United States Patent Application Publication US 2005/0244851 A1 - sequence listing, part 121

SEQ ID NO: 4720999 - DNA, 25 bp, Homo sapien
cagtggcaggccaactagggcccta

SEQ ID NO: 4721000 - DNA, 25 bp, Homo sapien
acctaggtttcaagaacgagatcat

SEQ ID NO: 4721001 - DNA, 25 bp, Homo sapien
ggtttcaagaacgagatcattccaa

SEQ ID NO: 4721002 - DNA, 25 bp, Homo sapien
ttcaagaacgagatcattccaatct

SEQ ID NO: 4721003 - DNA, 25 bp, Homo sapien
ctaggtttcaagaacgagatcattc

SEQ ID NO: 4721004 - DNA, 25 bp, Homo sapien
ctcgctctgtgacctaggctgtggt

SEQ ID NO: 4721005 - DNA, 25 bp, Homo sapien
tgtgacctaggctgtggtgcgatct

SEQ ID NO: 4721006 - DNA, 25 bp, Homo sapien
ctctgtgacctaggctgtggtgcga

SEQ ID NO: 4721007 - DNA, 25 bp, Homo sapien
tcgctctgtgacctaggctgtggtg

SEQ ID NO: 4721008 - DNA, 25 bp, Homo sapien
taacacagtgaactcccaagtacag

SEQ ID NO: 4721009 - DNA, 25 bp, Homo sapien
gaacaaagagtctacaccaaactag

SEQ ID NO: 4721010 - DNA, 25 bp, Homo sapien
taccaaagtggagcagataacacag

SEQ ID NO: 4721011 - DNA, 25 bp, Homo sapien
tcacacactgcctaatgacaaggat

SEQ ID NO: 4721012 - DNA, 25 bp, Homo sapien
ctgaaagttgctgagaggcaataac

SEQ ID NO: 4721013 - DNA, 25 bp, Homo sapien
cacacatagaggtgtcatatcctgt

SEQ ID NO: 4721014 - DNA, 25 bp, Homo sapien
gaggcaataacacacatagaggtgt

SEQ ID NO: 4721015 - DNA, 25 bp, Homo sapien
caataacacacatagaggtgtcata

SEQ ID NO: 4721016 - DNA, 25 bp, Homo sapien
aaattttgacaggagtggtggtgga

SEQ ID NO: 4721017 - DNA, 25 bp, Homo sapien
cccctactaacttttatcataagct

SEQ ID NO: 4721018 - DNA, 25 bp, Homo sapien
gaagacctaaggcatgagaactgtc

SEQ ID NO: 4721019 - DNA, 25 bp, Homo sapien
aggtgtatgccacagtgccgactga

SEQ ID NO: 4721020 - DNA, 25 bp, Homo sapien
tgcagaccccggcattaaaggagct

SEQ ID NO: 4721021 - DNA, 25 bp, Homo sapien
taaaggagctcacacggtaaaagcc

SEQ ID NO: 4721022 - DNA, 25 bp, Homo sapien
ttagggatgtaagctccacaccggc

SEQ ID NO: 4721023 - DNA, 25 bp, Homo sapien
cgccaatccggaagggaggtccaat

SEQ ID NO: 4721024 - DNA, 25 bp, Homo sapien
ggagtctcaggccgttgcctaggtc

SEQ ID NO: 4721025 - DNA, 25 bp, Homo sapien
caggccgttgcctaggtcctcccgg

SEQ ID NO: 4721026 - DNA, 25 bp, Homo sapien
ccctggagactgctagggagaggag

SEQ ID NO: 4721027 - DNA, 25 bp, Homo sapien
aaccctggagactgctagggagagg

SEQ ID NO: 4721028 - DNA, 25 bp, Homo sapien
gccggctgcaggcacgtcctccagc

SEQ ID NO: 4721029 - DNA, 25 bp, Homo sapien
tgccttcgcagtccgcgtcctcgtt

SEQ ID NO: 4721030 - DNA, 25 bp, Homo sapien
gcgttggaccgacggccgcggcgtg

SEQ ID NO: 4721031 - DNA, 25 bp, Homo sapien
attggccgcaggtacccgccggctg

SEQ ID NO: 4721032 - DNA, 25 bp, Homo sapien
caaactacagcctgaattctttatt

SEQ ID NO: 4721033 - DNA, 25 bp, Homo sapien
tccacaattagaaatccggccgctg

SEQ ID NO: 4721034 - DNA, 25 bp, Homo sapien
tattcttcactaaaggtctggttat

SEQ ID NO: 4721035 - DNA, 25 bp, Homo sapien
tgggctttacccagcgccagacttt

SEQ ID NO: 4721036 - DNA, 25 bp, Homo sapien
ctttcttagcctgtgcccagaattg

SEQ ID NO: 4721037 - DNA, 25 bp, Homo sapien
tttcttagcctgtgcccagaattgg

SEQ ID NO: 4721038 - DNA, 25 bp, Homo sapien
gcctgaactaagtctgctgctttct

SEQ ID NO: 4721039 - DNA, 25 bp, Homo sapien
gctccagcaggcgtctgcctgaact

SEQ ID NO: 4721040 - DNA, 25 bp, Homo sapien
ggtaactgaatcctgggaaagtcaa

SEQ ID NO: 4721041 - DNA, 25 bp, Homo sapien
agtctggtgaaagggtactacgtct

SEQ ID NO: 4721042 - DNA, 25 bp, Homo sapien
gagttaggtgatccactctatggag

SEQ ID NO: 4721043 - DNA, 25 bp, Homo sapien
ggaaagtcaagagcgcacccgcttt

SEQ ID NO: 4721044 - DNA, 25 bp, Homo sapien
tatcagtttctactggtttccctgg

SEQ ID NO: 4721045 - DNA, 25 bp, Homo sapien
tattcatcctcgaatatccagcaca

SEQ ID NO: 4721046 - DNA, 25 bp, Homo sapien
tgagaagtcctctgaagacggagaa

SEQ ID NO: 4721047 - DNA, 25 bp, Homo sapien
gtacctttgcggtctcatttatggg

SEQ ID NO: 4721048 - DNA, 25 bp, Homo sapien
agtttgcagtctgtgttggaagatc

SEQ ID NO: 4721049 - DNA, 25 bp, Homo sapien
gtttgcagtctgtgttggaagatct

SEQ ID NO: 4721050 - DNA, 25 bp, Homo sapien
cattacagtagctacgcccacctta

SEQ ID NO: 4721051 - DNA, 25 bp, Homo sapien
tacctttgatagttgagtgccgtca

SEQ ID NO: 4721052 - DNA, 25 bp, Homo sapien
tgttttgcaaggcatcagtcaaggg

SEQ ID NO: 4721053 - DNA, 25 bp, Homo sapien
taattagccaatgcccaagttctac

SEQ ID NO: 4721054 - DNA, 25 bp, Homo sapien
ctggtcacttgggagcactacatca

SEQ ID NO: 4721055 - DNA, 25 bp, Homo sapien
aaatttctttgcttccgctggtcac

SEQ ID NO: 4721056 - DNA, 25 bp, Homo sapien
ggatatagtccattgtagtcccagc

SEQ ID NO: 4721057 - DNA, 25 bp, Homo sapien
gagagccgattgttttccttgaagc

SEQ ID NO: 4721058 - DNA, 25 bp, Homo sapien
ccttttttcactcatgttgatctga

SEQ ID NO: 4721059 - DNA, 25 bp, Homo sapien
ttagatgtggccagcaaacccctgt

SEQ ID NO: 4721060 - DNA, 25 bp, Homo sapien
gaaggctgcctggttttcagtattt

SEQ ID NO: 4721061 - DNA, 25 bp, Homo sapien
cactatccacacacggttaattttt

SEQ ID NO: 4721062 - DNA, 25 bp, Homo sapien
taaggattttagctgtcggacattc

SEQ ID NO: 4721063 - DNA, 25 bp, Homo sapien
gagcaaaatatgatcgtgacaggtg

SEQ ID NO: 4721064 - DNA, 25 bp, Homo sapien
cggacattccctatggagtttgaaa

SEQ ID NO: 4721065 - DNA, 25 bp, Homo sapien
cataaatgaccgtcaagaagaggta

SEQ ID NO: 4721066 - DNA, 25 bp, Homo sapien
gctatttgacaaaagggcttgacag

SEQ ID NO: 4721067 - DNA, 25 bp, Homo sapien
taatggcttctttgcaactcctgaa

SEQ ID NO: 4721068 - DNA, 25 bp, Homo sapien
gcaaagaccctcatagcacacagtt

SEQ ID NO: 4721069 - DNA, 25 bp, Homo sapien
agaggagacactcaagcagaggcca

SEQ ID NO: 4721070 - DNA, 25 bp, Homo sapien
gaagtccctgcagtaagtaggcaac

SEQ ID NO: 4721071 - DNA, 25 bp, Homo sapien
cacagctcaggttagttgcaaaagt

SEQ ID NO: 4721072 - DNA, 25 bp, Homo sapien
gaagcatcagtttatcccagtcagc

SEQ ID NO: 4721073 - DNA, 25 bp, Homo sapien
tacaccagaagagtacttgcctcgc

SEQ ID NO: 4721074 - DNA, 25 bp, Homo sapien
ctacctggccaaatgctacaaactt

SEQ ID NO: 4721075 - DNA, 25 bp, Homo sapien
accctacctggccaaatgctacaaa

SEQ ID NO: 4721076 - DNA, 25 bp, Homo sapien
gccaccctacctggccaaatgctac

SEQ ID NO: 4721077 - DNA, 25 bp, Homo sapien
cccataagttactggggtccaggtg

SEQ ID NO: 4721078 - DNA, 25 bp, Homo sapien
gacttggtcaaactctagctagatt

SEQ ID NO: 4721079 - DNA, 25 bp, Homo sapien
gatgaatgcagtattggttcagcca

SEQ ID NO: 4721080 - DNA, 25 bp, Homo sapien
gactgaaagtagctccatggtggat

SEQ ID NO: 4721081 - DNA, 25 bp, Homo sapien
tcctgtagtagctgaatgtaaagac

SEQ ID NO: 4721082 - DNA, 25 bp, Homo sapien
tctatctcacttcttggcaccaaag

SEQ ID NO: 4721083 - DNA, 25 bp, Homo sapien
taagtatagaggaacctaggcgtca

SEQ ID NO: 4721084 - DNA, 25 bp, Homo sapien
aagagttcgcaacatcctagatgcc

SEQ ID NO: 4721085 - DNA, 25 bp, Homo sapien
taggcgtcatttctaataagcggga

SEQ ID NO: 4721086 - DNA, 25 bp, Homo sapien
tgaaggggaggatctaattccacac

SEQ ID NO: 4721087 - DNA, 25 bp, Homo sapien
gggaggatctaattccacacaaaat

SEQ ID NO: 4721088 - DNA, 25 bp, Homo sapien
aatgttaattacagcatttgaaggg

SEQ ID NO: 4721089 - DNA, 25 bp, Homo sapien
taagtaatgttaattacagcatttg

SEQ ID NO: 4721090 - DNA, 25 bp, Homo sapien
gaaattttgaaagcgagagtcctaa

SEQ ID NO: 4721091 - DNA, 25 bp, Homo sapien
tgattacaatcacacggactctgaa

SEQ ID NO: 4721092 - DNA, 25 bp, Homo sapien
tctaacgtggctattcaattgtcag

SEQ ID NO: 4721093 - DNA, 25 bp, Homo sapien
gttgcttgtgcctaatccagggtta

SEQ ID NO: 4721094 - DNA, 25 bp, Homo sapien
cagtttctatagtagctgggcccac

SEQ ID NO: 4721095 - DNA, 25 bp, Homo sapien
catgctggaaggaagtggcgcagtc

SEQ ID NO: 4721096 - DNA, 25 bp, Homo sapien
cccatgctggaaggaagtggcgcag

SEQ ID NO: 4721097 - DNA, 25 bp, Homo sapien
acctcagtttctatagtagctgggc

SEQ ID NO: 4721098 - DNA, 25 bp, Homo sapien
aaacagacattaagagccataactg

SEQ ID NO: 4721099 - DNA, 25 bp, Homo sapien
gccattagggactgttagggactgt

SEQ ID NO: 4721100 - DNA, 25 bp, Homo sapien
tgcagccctgtgagggtaagccaaa

SEQ ID NO: 4721101 - DNA, 25 bp, Homo sapien
agccagggtagttcgttgcctcacc

SEQ ID NO: 4721102 - DNA, 25 bp, Homo sapien
agcacagcattggagctctgataaa

SEQ ID NO: 4721103 - DNA, 25 bp, Homo sapien
gacgtccactcaagagaacccagct

SEQ ID NO: 4721104 - DNA, 25 bp, Homo sapien
ggtcaccaacttcaaaggtagataa

SEQ ID NO: 4721105 - DNA, 25 bp, Homo sapien
tcctcaagtgggtcctcccagtagg

SEQ ID NO: 4721106 - DNA, 25 bp, Homo sapien
cagtgtggtgtattcaggagatgca

SEQ ID NO: 4721107 - DNA, 25 bp, Homo sapien
gtggtgtattcaggagatgcatctc

SEQ ID NO: 4721108 - DNA, 25 bp, Homo sapien
tgtggtgtattcaggagatgcatct

SEQ ID NO: 4721109 - DNA, 25 bp, Homo sapien
gtgtggtgtattcaggagatgcatc

SEQ ID NO: 4721110 - DNA, 25 bp, Homo sapien
atgtgcagaaagctgacactggatc

SEQ ID NO: 4721111 - DNA, 25 bp, Homo sapien
ctagccatgtgcagaaagctgacac

SEQ ID NO: 4721112 - DNA, 25 bp, Homo sapien
aaactagctagccatgtgcagaaag

SEQ ID NO: 4721113 - DNA, 25 bp, Homo sapien
agccatgtgcagaaagctgacactg

SEQ ID NO: 4721114 - DNA, 25 bp, Homo sapien
catgctctattttggtgagtggtgg

SEQ ID NO: 4721115 - DNA, 25 bp, Homo sapien
tattttggtgagtggtggtgccctt

SEQ ID NO: 4721116 - DNA, 25 bp, Homo sapien
attttggtgagtggtggtgcccttt

SEQ ID NO: 4721117 - DNA, 25 bp, Homo sapien
gttcatgctctattttggtgagtgg

SEQ ID NO: 4721118 - DNA, 25 bp, Homo sapien
ggatacagaagaacacagatctgtt

SEQ ID NO: 4721119 - DNA, 25 bp, Homo sapien
gatctgtttttcagttaaaaagata

SEQ ID NO: 4721120 - DNA, 25 bp, Homo sapien
cagatctgtttttcagttaaaaaga

SEQ ID NO: 4721121 - DNA, 25 bp, Homo sapien
aaatatggggatacagaagaacaca

SEQ ID NO: 4721122 - DNA, 25 bp, Homo sapien
tatttcagtaacattgtaaggcaac

SEQ ID NO: 4721123 - DNA, 25 bp, Homo sapien
tttcagtaacattgtaaggcaacaa

SEQ ID NO: 4721124 - DNA, 25 bp, Homo sapien
aaacagtttatttcagtaacattgt

SEQ ID NO: 4721125 - DNA, 25 bp, Homo sapien
cagtaacattgtaaggcaacaatta

SEQ ID NO: 4721126 - DNA, 25 bp, Homo sapien
cttaggtcaaacacaagaacgaact

SEQ ID NO: 4721127 - DNA, 25 bp, Homo sapien
catgcgacaatcattcttaggtcaa

SEQ ID NO: 4721128 - DNA, 25 bp, Homo sapien
ctaatgtgacagacaaacggtatgc

SEQ ID NO: 4721129 - DNA, 25 bp, Homo sapien
caagccctgagactagtgagcatct

SEQ ID NO: 4721130 - DNA, 25 bp, Homo sapien
tgtacaataccaaagcttcataatg

SEQ ID NO: 4721131 - DNA, 25 bp, Homo sapien
cttgtacaataccaaagcttcataa

SEQ ID NO: 4721132 - DNA, 25 bp, Homo sapien
ttgtacaataccaaagcttcataat

SEQ ID NO: 4721133 - DNA, 25 bp, Homo sapien
aaacaaaagacaatggtttacacag

SEQ ID NO: 4721134 - DNA, 25 bp, Homo sapien
tacacagggaaataaccctaaggca

SEQ ID NO: 4721135 - DNA, 25 bp, Homo sapien
aacaaaagacaatggtttacacagg

SEQ ID NO: 4721136 - DNA, 25 bp, Homo sapien
acaaaagacaatggtttacacaggg

SEQ ID NO: 4721137 - DNA, 25 bp, Homo sapien
ccaaaaagccatgagaggtactgct

SEQ ID NO: 4721138 - DNA, 25 bp, Homo sapien
caaggacgttttctccggcaatgca

SEQ ID NO: 4721139 - DNA, 25 bp, Homo sapien
gataggcccagtgcatcagtaagat

SEQ ID NO: 4721140 - DNA, 25 bp, Homo sapien
tcaagtctcaggaaagccagtctgc

SEQ ID NO: 4721141 - DNA, 25 bp, Homo sapien
tacccacatgtgctgaagtgccaaa

SEQ ID NO: 4721142 - DNA, 25 bp, Homo sapien
tgtcaacaggccatgcatcactgcg

SEQ ID NO: 4721143 - DNA, 25 bp, Homo sapien
tctaccccagaatagcccagatggc

SEQ ID NO: 4721144 - DNA, 25 bp, Homo sapien
tggccctgaaaagcgttaacccaga

SEQ ID NO: 4721145 - DNA, 25 bp, Homo sapien
atggagtatccactgggcatgtact

SEQ ID NO: 4721146 - DNA, 25 bp, Homo sapien
catagggagaaaccatgtcacatgg

SEQ ID NO: 4721147 - DNA, 25 bp, Homo sapien
ttacaaacatccacgtaacataggg

SEQ ID NO: 4721148 - DNA, 25 bp, Homo sapien
tatccactgggcatgtacttagagc

SEQ ID NO: 4721149 - DNA, 25 bp, Homo sapien
aatacaaagagatcgtaggtgcaca

SEQ ID NO: 4721150 - DNA, 25 bp, Homo sapien
taaaatacaaagagatcgtaggtgc

SEQ ID NO: 4721151 - DNA, 25 bp, Homo sapien
atacaaagagatcgtaggtgcacac

SEQ ID NO: 4721152 - DNA, 25 bp, Homo sapien
aaatacaaagagatcgtaggtgcac

SEQ ID NO: 4721153 - DNA, 25 bp, Homo sapien
ttccttcagagcatccagttgaggg

SEQ ID NO: 4721154 - DNA, 25 bp, Homo sapien
cagacagatagtgggcagcaatggc

SEQ ID NO: 4721155 - DNA, 25 bp, Homo sapien
ccaggcagagggaaatgtccaatct

SEQ ID NO: 4721156 - DNA, 25 bp, Homo sapien
cacggtgaccattccttcaggatgt

SEQ ID NO: 4721157 - DNA, 25 bp, Homo sapien
caatgaaacaaacaatgctgggaaa

SEQ ID NO: 4721158 - DNA, 25 bp, Homo sapien
acaaacaatgctgggaaattggcac

SEQ ID NO: 4721159 - DNA, 25 bp, Homo sapien
tgaaacaaacaatgctgggaaattg

SEQ ID NO: 4721160 - DNA, 25 bp, Homo sapien
aaacaaacaatgctgggaaattggc

SEQ ID NO: 4721161 - DNA, 25 bp, Homo sapien
accctttgtgggctcgaacatagaa

SEQ ID NO: 4721162 - DNA, 25 bp, Homo sapien
gaacatagaaggacatatggcttgg

SEQ ID NO: 4721163 - DNA, 25 bp, Homo sapien
cctggagtccatgggagtaaaagac

SEQ ID NO: 4721164 - DNA, 25 bp, Homo sapien
gccattgccaagagaccactgagaa

SEQ ID NO: 4721165 - DNA, 25 bp, Homo sapien
aggaaagtagaataagcatggctgt

SEQ ID NO: 4721166 - DNA, 25 bp, Homo sapien
ctggccaaaagaacttattatactg

SEQ ID NO: 4721167 - DNA, 25 bp, Homo sapien
ggaaagtagaataagcatggctgtt

SEQ ID NO: 4721168 - DNA, 25 bp, Homo sapien
aaagtagaataagcatggctgttgt

SEQ ID NO: 4721169 - DNA, 25 bp, Homo sapien
ttcctatattagcattctccaggga

SEQ ID NO: 4721170 - DNA, 25 bp, Homo sapien
tcagaaaaagtatagcgtgaacagc

SEQ ID NO: 4721171 - DNA, 25 bp, Homo sapien
agacacatcaattgagctttgtggg

SEQ ID NO: 4721172 - DNA, 25 bp, Homo sapien
gaaaactacaggaggcgtatagaag

SEQ ID NO: 4721173 - DNA, 25 bp, Homo sapien
caaaatctgaaggataggcaggcag

SEQ ID NO: 4721174 - DNA, 25 bp, Homo sapien
ccaaaatctgaaggataggcaggca

SEQ ID NO: 4721175 - DNA, 25 bp, Homo sapien
agaaaaaagtcacagtatgagactg

SEQ ID NO: 4721176 - DNA, 25 bp, Homo sapien
gaaaaaagtcacagtatgagactga

SEQ ID NO: 4721177 - DNA, 25 bp, Homo sapien
gagactgaaggcagtctgctagcag

SEQ ID NO: 4721178 - DNA, 25 bp, Homo sapien
agtatgagactgaaggcagtctgct

SEQ ID NO: 4721179 - DNA, 25 bp, Homo sapien
tcccaaggtgtctgttctttggata

SEQ ID NO: 4721180 - DNA, 25 bp, Homo sapien
gaatcccaaggtgtctgttctttgg

SEQ ID NO: 4721181 - DNA, 25 bp, Homo sapien
caaaagtcaattttatagaatccca

SEQ ID NO: 4721182 - DNA, 25 bp, Homo sapien
aatcccaaggtgtctgttctttgga

SEQ ID NO: 4721183 - DNA, 25 bp, Homo sapien
tatcattgatctcaggaatgtgagg

SEQ ID NO: 4721184 - DNA, 25 bp, Homo sapien
gaaagtgcactggaagataccaagg

SEQ ID NO: 4721185 - DNA, 25 bp, Homo sapien
tccaagtcatggaatgttctagtca

SEQ ID NO: 4721186 - DNA, 25 bp, Homo sapien
tcctcacagtgagctcggatactat

SEQ ID NO: 4721187 - DNA, 25 bp, Homo sapien
cataccaaagttaaagttagcatgg

SEQ ID NO: 4721188 - DNA, 25 bp, Homo sapien
cactctctttggcttcggattagca

SEQ ID NO: 4721189 - DNA, 25 bp, Homo sapien
gcaggattggagctatatggaaaaa

SEQ ID NO: 4721190 - DNA, 25 bp, Homo sapien
aatgttccactgcaaacaaggagga

SEQ ID NO: 4721191 - DNA, 25 bp, Homo sapien
taactcatggcatcaaagtgcggca

SEQ ID NO: 4721192 - DNA, 25 bp, Homo sapien
tctaaagtattccaagaggcagtct

SEQ ID NO: 4721193 - DNA, 25 bp, Homo sapien
aaaagcagcaaaccctacaggcagc

SEQ ID NO: 4721194 - DNA, 25 bp, Homo sapien
tggacatccatagctcccattcatg

SEQ ID NO: 4721195 - DNA, 25 bp, Homo sapien
tcagaaccacttctcccgaggatag

SEQ ID NO: 4721196 - DNA, 25 bp, Homo sapien
gcacaacatcaggtgggatttcaga

SEQ ID NO: 4721197 - DNA, 25 bp, Homo sapien
gggtaaacatctcaaatactgccca

SEQ ID NO: 4721198 - DNA, 25 bp, Homo sapien
cagccaaaatggatgccagcacaac

SEQ ID NO: 4721199 - DNA, 25 bp, Homo sapien
caatgggaatgctacccagacagca

SEQ ID NO: 4721200 - DNA, 25 bp, Homo sapien
tgcttgaagtccttatgcacacaga

SEQ ID NO: 4721201 - DNA, 25 bp, Homo sapien
taataaacgccgagcaaagtccttg

SEQ ID NO: 4721202 - DNA, 25 bp, Homo sapien
taagtgagggtaacaagaaaacagc

SEQ ID NO: 4721203 - DNA, 25 bp, Homo sapien
taattacggtgcataaatacaaaga

SEQ ID NO: 4721204 - DNA, 25 bp, Homo sapien
aatacattttaacatctgcatgagt

SEQ ID NO: 4721205 - DNA, 25 bp, Homo sapien
ttaattacggtgcataaatacaaag

SEQ ID NO: 4721206 - DNA, 25 bp, Homo sapien
aacatctgcatgagtaattctattc

SEQ ID NO: 4721207 - DNA, 25 bp, Homo sapien
ggttataccatgagagagactgtcc

SEQ ID NO: 4721208 - DNA, 25 bp, Homo sapien
tcttttcgcaagagtatgtataagt

SEQ ID NO: 4721209 - DNA, 25 bp, Homo sapien
gcagttccatacagacaaacggaga

SEQ ID NO: 4721210 - DNA, 25 bp, Homo sapien
tattttggctacagttgcagttcca

SEQ ID NO: 4721211 - DNA, 25 bp, Homo sapien
caagtccacacaagaagtccttctt

SEQ ID NO: 4721212 - DNA, 25 bp, Homo sapien
caaggctagtgaaccagctgatcaa

SEQ ID NO: 4721213 - DNA, 25 bp, Homo sapien
ctataatgagaacggtaacaaggct

SEQ ID NO: 4721214 - DNA, 25 bp, Homo sapien
gatgccaagtccacacaagaagtcc

SEQ ID NO: 4721215 - DNA, 25 bp, Homo sapien
caccatgtagtttatgattgagcca

SEQ ID NO: 4721216 - DNA, 25 bp, Homo sapien
gtcgatacttagaagcagcagccag

SEQ ID NO: 4721217 - DNA, 25 bp, Homo sapien
cagcagccagcatatcagatgtagc

SEQ ID NO: 4721218 - DNA, 25 bp, Homo sapien
tatcagatgtagctagatgcttaag

SEQ ID NO: 4721219 - DNA, 25 bp, Homo sapien
tctgaatggaatctgttagaattct

SEQ ID NO: 4721220 - DNA, 25 bp, Homo sapien
aattctgtccgctgtgtcatacttg

SEQ ID NO: 4721221 - DNA, 25 bp, Homo sapien
tgtcatacttggtgtgataaatgta

SEQ ID NO: 4721222 - DNA, 25 bp, Homo sapien
tgttagaattctgtccgctgtgtca

SEQ ID NO: 4721223 - DNA, 25 bp, Homo sapien
tacgaaagtcagtatctgaaggaat

SEQ ID NO: 4721224 - DNA, 25 bp, Homo sapien
gcaaaagggtgtttagctgctgaaa

SEQ ID NO: 4721225 - DNA, 25 bp, Homo sapien
cataagcttgaaccaaccaaggatt

SEQ ID NO: 4721226 - DNA, 25 bp, Homo sapien
ggaatgttcccaaaatccctgtaga

SEQ ID NO: 4721227 - DNA, 25 bp, Homo sapien
ttttcctgtaggatagtgggataca

SEQ ID NO: 4721228 - DNA, 25 bp, Homo sapien
tatactagtaagcatccctaatcct

SEQ ID NO: 4721229 - DNA, 25 bp, Homo sapien
aaaagttgtgaattgtggagcatta

SEQ ID NO: 4721230 - DNA, 25 bp, Homo sapien
cctatgttgctagatacaaattggg

SEQ ID NO: 4721231 - DNA, 25 bp, Homo sapien
aaagaagactgagtgtcctctctcc

SEQ ID NO: 4721232 - DNA, 25 bp, Homo sapien
gttgttacatgtatgtgttcctcct

SEQ ID NO: 4721233 - DNA, 25 bp, Homo sapien
agaagactgagtgtcctctctcctt

SEQ ID NO: 4721234 - DNA, 25 bp, Homo sapien
catgtatgtgttcctcctatcctaa

SEQ ID NO: 4721235 - DNA, 25 bp, Homo sapien
tacacctgctgcctctaggttaatg

SEQ ID NO: 4721236 - DNA, 25 bp, Homo sapien
gaatacaagttctttccctcctaca

SEQ ID NO: 4721237 - DNA, 25 bp, Homo sapien
atgcacgaatcaagctagcccaggg

SEQ ID NO: 4721238 - DNA, 25 bp, Homo sapien
gctgagtaatgaaaccatgactggc

SEQ ID NO: 4721239 - DNA, 25 bp, Homo sapien
catcactgagcagctaactgcatca

SEQ ID NO: 4721240 - DNA, 25 bp, Homo sapien
cagcatgatgcaaggcttctgaaga

SEQ ID NO: 4721241 - DNA, 25 bp, Homo sapien
gatgttgacaagacgcgaaggactt

SEQ ID NO: 4721242 - DNA, 25 bp, Homo sapien
cttctgaagatgttgacaagacgcg

SEQ ID NO: 4721243 - DNA, 25 bp, Homo sapien
gtgggccgttgtacatctactgaaa

SEQ ID NO: 4721244 - DNA, 25 bp, Homo sapien
caattagccaagacagcatgctggg

SEQ ID NO: 4721245 - DNA, 25 bp, Homo sapien
ggtagtgcacggtcagaatttcatt

SEQ ID NO: 4721246 - DNA, 25 bp, Homo sapien
tcataatagcttgtaaaacctccca

SEQ ID NO: 4721247 - DNA, 25 bp, Homo sapien
gggccaatggaggttatgtgttcaa

SEQ ID NO: 4721248 - DNA, 25 bp, Homo sapien
gccaatggaggttatgtgttcaaga

SEQ ID NO: 4721249 - DNA, 25 bp, Homo sapien
tggggccaatggaggttatgtgttc

SEQ ID NO: 4721250 - DNA, 25 bp, Homo sapien
ccaatggaggttatgtgttcaagat

SEQ ID NO: 4721251 - DNA, 25 bp, Homo sapien
gtcagcgagtcccagcggtccggca

SEQ ID NO: 4721252 - DNA, 25 bp, Homo sapien
gtcccggcaattcagaccccagaag

SEQ ID NO: 4721253 - DNA, 25 bp, Homo sapien
tggcaaccccaatctgcaccacgag

SEQ ID NO: 4721254 - DNA, 25 bp, Homo sapien
aatctgcaccacgagcttaaccggg

SEQ ID NO: 4721255 - DNA, 25 bp, Homo sapien
gcgatcaggtagagcgcgagcccca

SEQ ID NO: 4721256 - DNA, 25 bp, Homo sapien
cgtccgcagcgcgatcaggtagagc

SEQ ID NO: 4721257 - DNA, 25 bp, Homo sapien
ggcgcgcacctcagacagcccggtc

SEQ ID NO: 4721258 - DNA, 25 bp, Homo sapien
ggcttggagcgcgtcgaactccccg

SEQ ID NO: 4721259 - DNA, 25 bp, Homo sapien
cgccgctccctctcgacgctctact

SEQ ID NO: 4721260 - DNA, 25 bp, Homo sapien
accagaggctcctgcgctcgggcct

SEQ ID NO: 4721261 - DNA, 25 bp, Homo sapien
gccgccgctgcacccatccaccaga

SEQ ID NO: 4721262 - DNA, 25 bp, Homo sapien
actccgacgcggtgccgcctcacag

SEQ ID NO: 4721263 - DNA, 25 bp, Homo sapien
gcctcctagtgagcggacggaaact

SEQ ID NO: 4721264 - DNA, 25 bp, Homo sapien
agcgcctcctagtgagcggacggaa

SEQ ID NO: 4721265 - DNA, 25 bp, Homo sapien
gccgcagcgcctcctagtgagcgga

SEQ ID NO: 4721266 - DNA, 25 bp, Homo sapien
gaaactgcagagggccaaacttctt

SEQ ID NO: 4721267 - DNA, 25 bp, Homo sapien
gccgacccagcagcgggtggtggat

SEQ ID NO: 4721268 - DNA, 25 bp, Homo sapien
cagccctctgtaggacggagattgc

SEQ ID NO: 4721269 - DNA, 25 bp, Homo sapien
tgtaggacggagattgccaaatgta

SEQ ID NO: 4721270 - DNA, 25 bp, Homo sapien
ggtggtggatatgccgtctcccgca

SEQ ID NO: 4721271 - DNA, 25 bp, Homo sapien
gaagctaaatcctttcctcctagga

SEQ ID NO: 4721272 - DNA, 25 bp, Homo sapien
atgaggagaaccaaagaccaccacc

SEQ ID NO: 4721273 - DNA, 25 bp, Homo sapien
ggatactatagcaacaacacaactg

SEQ ID NO: 4721274 - DNA, 25 bp, Homo sapien
caggagggcacataccagagaatct

SEQ ID NO: 4721275 - DNA, 25 bp, Homo sapien
ctgcttcgatttatcatcttcctgc

SEQ ID NO: 4721276 - DNA, 25 bp, Homo sapien
caactgcttcgatttatcatcttcc

SEQ ID NO: 4721277 - DNA, 25 bp, Homo sapien
tgcttcgatttatcatcttcctgct

SEQ ID NO: 4721278 - DNA, 25 bp, Homo sapien
actgcttcgatttatcatcttcctg

SEQ ID NO: 4721279 - DNA, 25 bp, Homo sapien
caggttatataccctgctgcaagga

SEQ ID NO: 4721280 - DNA, 25 bp, Homo sapien
aggttatataccctgctgcaaggag

SEQ ID NO: 4721281 - DNA, 25 bp, Homo sapien
ggttatataccctgctgcaaggagg

SEQ ID NO: 4721282 - DNA, 25 bp, Homo sapien
cctggcctagaaatggcaagtgggc

SEQ ID NO: 4721283 - DNA, 25 bp, Homo sapien
tggcctagaaatggcaagtgggcaa

SEQ ID NO: 4721284 - DNA, 25 bp, Homo sapien
cctcctggcctagaaatggcaagtg

SEQ ID NO: 4721285 - DNA, 25 bp, Homo sapien
aacaagaaagactctccagagttcc

SEQ ID NO: 4721286 - DNA, 25 bp, Homo sapien
agacttgattgcttgcttggcagtg

SEQ ID NO: 4721287 - DNA, 25 bp, Homo sapien
tgcttggcagtggaaagaaacactt

SEQ ID NO: 4721288 - DNA, 25 bp, Homo sapien
agaaacacttctcacatgtggtcac

SEQ ID NO: 4721289 - DNA, 25 bp, Homo sapien
cacttctcacatgtggtcacagaag

SEQ ID NO: 4721290 - DNA, 25 bp, Homo sapien
gggtggtccacagcctaacagttaa

SEQ ID NO: 4721291 - DNA, 25 bp, Homo sapien
gaaaaagtgcctccagagacacggg

SEQ ID NO: 4721292 - DNA, 25 bp, Homo sapien
gatttatgggagagtcaaatgcccc

SEQ ID NO: 4721293 - DNA, 25 bp, Homo sapien
taagaatctcaaacggtcagcccta

SEQ ID NO: 4721294 - DNA, 25 bp, Homo sapien
tcagcaaaccttcatcaagtcttca

SEQ ID NO: 4721295 - DNA, 25 bp, Homo sapien
cttcatcaagtcttcagagcgatac

SEQ ID NO: 4721296 - DNA, 25 bp, Homo sapien
gcaaaccttcatcaagtcttcagag

SEQ ID NO: 4721297 - DNA, 25 bp, Homo sapien
aaccttcatcaagtcttcagagcga

SEQ ID NO: 4721298 - DNA, 25 bp, Homo sapien
caaatcaatgagttgcaccgaatag

SEQ ID NO: 4721299 - DNA, 25 bp, Homo sapien
caccgaatagtacaacacctgcagc

SEQ ID NO: 4721300 - DNA, 25 bp, Homo sapien
gagttcatcgaatcttgaagcatga

SEQ ID NO: 4721301 - DNA, 25 bp, Homo sapien
tggcattaatcaacagaaaaagccc

SEQ ID NO: 4721302 - DNA, 25 bp, Homo sapien
aagggacttgaaccagagagaagca

SEQ ID NO: 4721303 - DNA, 25 bp, Homo sapien
cacaataataaggaaaggagcttcc

SEQ ID NO: 4721304 - DNA, 25 bp, Homo sapien
ttaatgagcgtacttgaattacggc

SEQ ID NO: 4721305 - DNA, 25 bp, Homo sapien
gaattacggccactgcagtttatgg

SEQ ID NO: 4721306 - DNA, 25 bp, Homo sapien
tgacttccaccagtacatgcctgct

SEQ ID NO: 4721307 - DNA, 25 bp, Homo sapien
cagtttgccgtttgctgacacagcc

SEQ ID NO: 4721308 - DNA, 25 bp, Homo sapien
ccctagtgtttatctccccagacag

SEQ ID NO: 4721309 - DNA, 25 bp, Homo sapien
tacaccacggctgaagagtaagttc

SEQ ID NO: 4721310 - DNA, 25 bp, Homo sapien
gcatttgcagagtccagtcccagca

SEQ ID NO: 4721311 - DNA, 25 bp, Homo sapien
tgacaatgccggaaaacgagctggt

SEQ ID NO: 4721312 - DNA, 25 bp, Homo sapien
caacccgtatgcgtgggagctatcc

SEQ ID NO: 4721313 - DNA, 25 bp, Homo sapien
gatcctgacaggagccagaagcaca

SEQ ID NO: 4721314 - DNA, 25 bp, Homo sapien
tatttggaagacactctgaggcgcc

SEQ ID NO: 4721315 - DNA, 25 bp, Homo sapien
gagtaccacgtgaccatgcataaag

SEQ ID NO: 4721316 - DNA, 25 bp, Homo sapien
gaatcagctgccttcagtcacgaga

SEQ ID NO: 4721317 - DNA, 25 bp, Homo sapien
tcaagatattcaagtggacgccaca

SEQ ID NO: 4721318 - DNA, 25 bp, Homo sapien
ggtaccagtatcctccatgaatggg

SEQ ID NO: 4721319 - DNA, 25 bp, Homo sapien
taaagccaggtagcacttcagcact

SEQ ID NO: 4721320 - DNA, 25 bp, Homo sapien
gactctacactaagcatcccaggat

SEQ ID NO: 4721321 - DNA, 25 bp, Homo sapien
catcagtgcgatgaggaaaccatcc

SEQ ID NO: 4721322 - DNA, 25 bp, Homo sapien
ggagaaggtgagagatacaactctg

SEQ ID NO: 4721323 - DNA, 25 bp, Homo sapien
tggcaagctgataaggagaaggtga

SEQ ID NO: 4721324 - DNA, 25 bp, Homo sapien
ggtggggattgaagcttggcaagct

SEQ ID NO: 4721325 - DNA, 25 bp, Homo sapien
tggggtggggattgaagcttggcaa

SEQ ID NO: 4721326 - DNA, 25 bp, Homo sapien
ttaattctattatagtctaagtgca

SEQ ID NO: 4721327 - DNA, 25 bp, Homo sapien
ctaagtgcaaacatggtataatttc

SEQ ID NO: 4721328 - DNA, 25 bp, Homo sapien
taaatactgcttgcactgctaagca

SEQ ID NO: 4721329 - DNA, 25 bp, Homo sapien
attcaatgtcatacatttccctcta

SEQ ID NO: 4721330 - DNA, 25 bp, Homo sapien
ctaatataggaactcctactttctt

SEQ ID NO: 4721331 - DNA, 25 bp, Homo sapien
aatctccttctgaaactaatatagg

SEQ ID NO: 4721332 - DNA, 25 bp, Homo sapien
ggcctctatccacttacttttaatg

SEQ ID NO: 4721333 - DNA, 25 bp, Homo sapien
caatgttaggtgttcttatgtcttc

SEQ ID NO: 4721334 - DNA, 25 bp, Homo sapien
gcaaacatggtgaaatcctatcttt

SEQ ID NO: 4721335 - DNA, 25 bp, Homo sapien
ggatcacctgatctcaggagctcga

SEQ ID NO: 4721336 - DNA, 25 bp, Homo sapien
gaccagcctggcaaacatggtgaaa

SEQ ID NO: 4721337 - DNA, 25 bp, Homo sapien
gggtggatcacctgatctcaggagc

SEQ ID NO: 4721338 - DNA, 25 bp, Homo sapien
gttcctcagacagtgtcccaggtga

SEQ ID NO: 4721339 - DNA, 25 bp, Homo sapien
ctctcctcacagagttcctcagaca

SEQ ID NO: 4721340 - DNA, 25 bp, Homo sapien
aggctctcctcacagagttcctcag

SEQ ID NO: 4721341 - DNA, 25 bp, Homo sapien
tcccaggtgatggacatggagactt

SEQ ID NO: 4721342 - DNA, 25 bp, Homo sapien
tttgaagtcacataatgtgatcctt

SEQ ID NO: 4721343 - DNA, 25 bp, Homo sapien
agtcacataatgtgatccttccagt

SEQ ID NO: 4721344 - DNA, 25 bp, Homo sapien
ggttactataggctttgtagtgtaa

SEQ ID NO: 4721345 - DNA, 25 bp, Homo sapien
gaagtcacataatgtgatccttcca

SEQ ID NO: 4721346 - DNA, 25 bp, Homo sapien
cagcctgtaggtcttttgtgggcta

SEQ ID NO: 4721347 - DNA, 25 bp, Homo sapien
ccagcctgtaggtcttttgtgggct

SEQ ID NO: 4721348 - DNA, 25 bp, Homo sapien
cccagcctgtaggtcttttgtgggc

SEQ ID NO: 4721349 - DNA, 25 bp, Homo sapien
cgcccagcctgtaggtcttttgtgg

SEQ ID NO: 4721350 - DNA, 25 bp, Homo sapien
ccctgcaagattctgatatggtctc

SEQ ID NO: 4721351 - DNA, 25 bp, Homo sapien
caggcatactttaaggagggaacaa

SEQ ID NO: 4721352 - DNA, 25 bp, Homo sapien
tgtccagccctcagtggtggtgact

SEQ ID NO: 4721353 - DNA, 25 bp, Homo sapien
tggtgactgatgcttaagacaaggc

SEQ ID NO: 4721354 - DNA, 25 bp, Homo sapien
taaagtgtctcaaaagaactttcag

SEQ ID NO: 4721355 - DNA, 25 bp, Homo sapien
taggaaaatctaaaagcgctatccc

SEQ ID NO: 4721356 - DNA, 25 bp, Homo sapien
caacagttacatgatgatgcatcaa

SEQ ID NO: 4721357 - DNA, 25 bp, Homo sapien
gtcaatctcaagtaaccggcgccaa

SEQ ID NO: 4721358 - DNA, 25 bp, Homo sapien
tgcctgtcttctttagcaaaaatta

SEQ ID NO: 4721359 - DNA, 25 bp, Homo sapien
tcatatggaaggtgatacacttgcc

SEQ ID NO: 4721360 - DNA, 25 bp, Homo sapien
caaaaattacatggatgatggcaac

SEQ ID NO: 4721361 - DNA, 25 bp, Homo sapien
acttctaggtaaatcaaaaagcaat

SEQ ID NO: 4721362 - DNA, 25 bp, Homo sapien
tgacgcctacaggaagatggcctcg

SEQ ID NO: 4721363 - DNA, 25 bp, Homo sapien
aaaatgctcaagaaagttggatggc

SEQ ID NO: 4721364 - DNA, 25 bp, Homo sapien
ggatggcagcttggcacacttaaga

SEQ ID NO: 4721365 - DNA, 25 bp, Homo sapien
gatggcctcgagaaagtcttggaaa

SEQ ID NO: 4721366 - DNA, 25 bp, Homo sapien
gcttcaaaagcttcagtagttcccc

SEQ ID NO: 4721367 - DNA, 25 bp, Homo sapien
tatgtggtaggcaccgggctaagta

SEQ ID NO: 4721368 - DNA, 25 bp, Homo sapien
tagtcaggtgaatgatggcagctac

SEQ ID NO: 4721369 - DNA, 25 bp, Homo sapien
tgggcccagttataaacgtacttgc

SEQ ID NO: 4721370 - DNA, 25 bp, Homo sapien
caatgtaaatgtgcaaaaggctagc

SEQ ID NO: 4721371 - DNA, 25 bp, Homo sapien
tttatgggagtcaaaacaatgcccc

SEQ ID NO: 4721372 - DNA, 25 bp, Homo sapien
ccctcctcagaacagtaagtgaaat

SEQ ID NO: 4721373 - DNA, 25 bp, Homo sapien
tcatagatatgctgcaacagtccaa

SEQ ID NO: 4721374 - DNA, 25 bp, Homo sapien
cgcaggacttcgactggcagataca

SEQ ID NO: 4721375 - DNA, 25 bp, Homo sapien
tacattggatggtgccgaagccgtg

SEQ ID NO: 4721376 - DNA, 25 bp, Homo sapien
taagcccgacgactgaaaagcaggg

SEQ ID NO: 4721377 - DNA, 25 bp, Homo sapien
cgaagccgtgtgaatggtagtgcca

SEQ ID NO: 4721378 - DNA, 25 bp, Homo sapien
ttactaaagcttgctgatttggcag

SEQ ID NO: 4721379 - DNA, 25 bp, Homo sapien
gaagcaaaattggacgtattagtta

SEQ ID NO: 4721380 - DNA, 25 bp, Homo sapien
cagagaagcaaaattggacgtatta

SEQ ID NO: 4721381 - DNA, 25 bp, Homo sapien
aagcttgctgatttggcagagaagc

SEQ ID NO: 4721382 - DNA, 25 bp, Homo sapien
gaaagggacgacaattcagtttgag

SEQ ID NO: 4721383 - DNA, 25 bp, Homo sapien
ctggacttgttgaaagggacgacaa

SEQ ID NO: 4721384 - DNA, 25 bp, Homo sapien
gacttgttgaaagggacgacaattc

SEQ ID NO: 4721385 - DNA, 25 bp, Homo sapien
tcagtttgaggtttatttgtgttta

SEQ ID NO: 4721386 - DNA, 25 bp, Homo sapien
tcagaacagatgatgcaaggtgtcc

SEQ ID NO: 4721387 - DNA, 25 bp, Homo sapien
tagtcgcaggtgtaggtaaggcaac

SEQ ID NO: 4721388 - DNA, 25 bp, Homo sapien
tagatacagaacgtgtggctcctgg

SEQ ID NO: 4721389 - DNA, 25 bp, Homo sapien
cagtgtttccgagacttgatgagca

SEQ ID NO: 4721390 - DNA, 25 bp, Homo sapien
tgctcttgctgaagaaaccactgat

SEQ ID NO: 4721391 - DNA, 25 bp, Homo sapien
gaaagcacatttactgctcttgctg

SEQ ID NO: 4721392 - DNA, 25 bp, Homo sapien
ttaacaggggtaatattctgactca

SEQ ID NO: 4721393 - DNA, 25 bp, Homo sapien
aagataaatttgctccggtaactga

SEQ ID NO: 4721394 - DNA, 25 bp, Homo sapien
ttgatggtatagctggcacagtgcc

SEQ ID NO: 4721395 - DNA, 25 bp, Homo sapien
tgcccactgtagacggaatcagtac

SEQ ID NO: 4721396 - DNA, 25 bp, Homo sapien
tgttgacaatggcaaaatatagccc

SEQ ID NO: 4721397 - DNA, 25 bp, Homo sapien
gggttgatgtaccactaggaactgg

SEQ ID NO: 4721398 - DNA, 25 bp, Homo sapien
gtttctgaactggagtcccactgat

SEQ ID NO: 4721399 - DNA, 25 bp, Homo sapien
gaagttttatctatcacgtggccca

SEQ ID NO: 4721400 - DNA, 25 bp, Homo sapien
cagctgaggagcaaaagtgaaaact

SEQ ID NO: 4721401 - DNA, 25 bp, Homo sapien
gcaaaacagttgaaggaactaccag

SEQ ID NO: 4721402 - DNA, 25 bp, Homo sapien
ttgttgatgacagaggctgacctgt

SEQ ID NO: 4721403 - DNA, 25 bp, Homo sapien
ctgatggtgttaataagttacttac

SEQ ID NO: 4721404 - DNA, 25 bp, Homo sapien
tggaggaaatggtcggtgaagcact

SEQ ID NO: 4721405 - DNA, 25 bp, Homo sapien
gaaatggtcggtgaagcactgggca

SEQ ID NO: 4721406 - DNA, 25 bp, Homo sapien
tgttttaggatccaccataggctgc

SEQ ID NO: 4721407 - DNA, 25 bp, Homo sapien
tgcttccggaggagataaaactggt

SEQ ID NO: 4721408 - DNA, 25 bp, Homo sapien
cactggtactgaatccaatgaggca

SEQ ID NO: 4721409 - DNA, 25 bp, Homo sapien
caaagcctgaatgggtttggtccct

SEQ ID NO: 4721410 - DNA, 25 bp, Homo sapien
gatgtggacactacttcttcaaaac

SEQ ID NO: 4721411 - DNA, 25 bp, Homo sapien
tgaccatattatcttttgccttcac

SEQ ID NO: 4721412 - DNA, 25 bp, Homo sapien
ttcattgaccatattatcttttgcc

SEQ ID NO: 4721413 - DNA, 25 bp, Homo sapien
gatactcctatctcgacctcttgaa

SEQ ID NO: 4721414 - DNA, 25 bp, Homo sapien
tctgaaatcatcatagtctttcttc

SEQ ID NO: 4721415 - DNA, 25 bp, Homo sapien
gaggttctgttgagtctatagactt

SEQ ID NO: 4721416 - DNA, 25 bp, Homo sapien
taggagagtcttttccaagatctcc

SEQ ID NO: 4721417 - DNA, 25 bp, Homo sapien
catgatcaggttgtcttctgaaatc

SEQ ID NO: 4721418 - DNA, 25 bp, Homo sapien
cagactcctatactgaactgcttat

SEQ ID NO: 4721419 - DNA, 25 bp, Homo sapien
catatactaagtgatttctaccagc

SEQ ID NO: 4721420 - DNA, 25 bp, Homo sapien
tacatgctggaaggtctaatgctcg

SEQ ID NO: 4721421 - DNA, 25 bp, Homo sapien
caaagttaacatgttcaaatccaac

SEQ ID NO: 4721422 - DNA, 25 bp, Homo sapien
gttcccatggcagcaattcatttaa

SEQ ID NO: 4721423 - DNA, 25 bp, Homo sapien
gtaattcttttacagcttgcctccg

SEQ ID NO: 4721424 - DNA, 25 bp, Homo sapien
catttaaaagacgtatcaatgtact

SEQ ID NO: 4721425 - DNA, 25 bp, Homo sapien
gcttgcctccgatgataccattttc

SEQ ID NO: 4721426 - DNA, 25 bp, Homo sapien
aaccgaggctcatgactaattcttg

SEQ ID NO: 4721427 - DNA, 25 bp, Homo sapien
gaagaggaattgcttactagaagag

SEQ ID NO: 4721428 - DNA, 25 bp, Homo sapien
gattttgtcctacagcaactgttga

SEQ ID NO: 4721429 - DNA, 25 bp, Homo sapien
cacgtaatgaatatggaaccgaggc

SEQ ID NO: 4721430 - DNA, 25 bp, Homo sapien
tgggatgggtatgacagcaccagca

SEQ ID NO: 4721431 - DNA, 25 bp, Homo sapien
ccagcataacactggctggagtgtg

SEQ ID NO: 4721432 - DNA, 25 bp, Homo sapien
tctgctacagtaatctgggatgggt

SEQ ID NO: 4721433 - DNA, 25 bp, Homo sapien
gagttggcaatctactgatgctggg

SEQ ID NO: 4721434 - DNA, 25 bp, Homo sapien
tactgcttacctacagaaactacca

SEQ ID NO: 4721435 - DNA, 25 bp, Homo sapien
gaagctctaacatgaactattatat

SEQ ID NO: 4721436 - DNA, 25 bp, Homo sapien
taccaccatactaacatattcctgc

SEQ ID NO: 4721437 - DNA, 25 bp, Homo sapien
catgttggtacacagtccctgaaaa

SEQ ID NO: 4721438 - DNA, 25 bp, Homo sapien
ataatgataacatttcaagtttctc

SEQ ID NO: 4721439 - DNA, 25 bp, Homo sapien
cactgaatacattgaatagtatatc

SEQ ID NO: 4721440 - DNA, 25 bp, Homo sapien
cagctttgtagcgggggaaaaactg

SEQ ID NO: 4721441 - DNA, 25 bp, Homo sapien
cacattcctggtaaggtagttcact

SEQ ID NO: 4721442 - DNA, 25 bp, Homo sapien
ggactagaaattaaccactggttga

SEQ ID NO: 4721443 - DNA, 25 bp, Homo sapien
ttacaaagaatgaaccgtggactag

SEQ ID NO: 4721444 - DNA, 25 bp, Homo sapien
gggttctcaaacaattcacagcaca

SEQ ID NO: 4721445 - DNA, 25 bp, Homo sapien
tatgctatcagaaagatgggttctc

SEQ ID NO: 4721446 - DNA, 25 bp, Homo sapien
tattcagtccactgagttttgacat

SEQ ID NO: 4721447 - DNA, 25 bp, Homo sapien
ctaagaatgatgtaaagctcatttt

SEQ ID NO: 4721448 - DNA, 25 bp, Homo sapien
gttttgacataatttcccaactcac

SEQ ID NO: 4721449 - DNA, 25 bp, Homo sapien
tctacagagtctagtaagatgctaa

SEQ ID NO: 4721450 - DNA, 25 bp, Homo sapien
tcaattttccagaaccatggaaggt

SEQ ID NO: 4721451 - DNA, 25 bp, Homo sapien
gaaccatggaaggtagtaatcaaac

SEQ ID NO: 4721452 - DNA, 25 bp, Homo sapien
ggtagtaatcaaactgttaaacaga

SEQ ID NO: 4721453 - DNA, 25 bp, Homo sapien
aattcaattttccagaaccatggaa

SEQ ID NO: 4721454 - DNA, 25 bp, Homo sapien
cgcgcctggcctattgtgtatgttc

SEQ ID NO: 4721455 - DNA, 25 bp, Homo sapien
ggcctattgtgtatgttcttaaaac

SEQ ID NO: 4721456 - DNA, 25 bp, Homo sapien
actggtacaatcttgagcacagtgg

SEQ ID NO: 4721457 - DNA, 25 bp, Homo sapien
tggtacaatcttgagcacagtggtg

SEQ ID NO: 4721458 - DNA, 25 bp, Homo sapien
aggatctaaacgatgatgaggactt

SEQ ID NO: 4721459 - DNA, 25 bp, Homo sapien
acaggatctaaacgatgatgaggac

SEQ ID NO: 4721460 - DNA, 25 bp, Homo sapien
ggatctaaacgatgatgaggacttt

SEQ ID NO: 4721461 - DNA, 25 bp, Homo sapien
caggatctaaacgatgatgaggact

SEQ ID NO: 4721462 - DNA, 25 bp, Homo sapien
ttttgtgattaattccctgagttca

SEQ ID NO: 4721463 - DNA, 25 bp, Homo sapien
cctgagttcatcaagattagtgcaa

SEQ ID NO: 4721464 - DNA, 25 bp, Homo sapien
ttttctactgttttccagatctttg

SEQ ID NO: 4721465 - DNA, 25 bp, Homo sapien
tgagttcattctcgatttttgtgat

SEQ ID NO: 4721466 - DNA, 25 bp, Homo sapien
gtcttagcagctggattctggagtt

SEQ ID NO: 4721467 - DNA, 25 bp, Homo sapien
tttcagaggtatgttaaggatcagt

SEQ ID NO: 4721468 - DNA, 25 bp, Homo sapien
ggttattgttgaaaagcagacttag

SEQ ID NO: 4721469 - DNA, 25 bp, Homo sapien
catatgaaatgggagcaagggcaca

SEQ ID NO: 4721470 - DNA, 25 bp, Homo sapien
cattaattagggtgagattctctgc

SEQ ID NO: 4721471 - DNA, 25 bp, Homo sapien
gacttgagactcacaaattcatctg

SEQ ID NO: 4721472 - DNA, 25 bp, Homo sapien
tctgaagatcatatacagctaagag

SEQ ID NO: 4721473 - DNA, 25 bp, Homo sapien
tcacttaatcatatggcagtacaga

SEQ ID NO: 4721474 - DNA, 25 bp, Homo sapien
ctgaaactctggtacagtaggtgac

SEQ ID NO: 4721475 - DNA, 25 bp, Homo sapien
aactctggtacagtaggtgacttta

SEQ ID NO: 4721476 - DNA, 25 bp, Homo sapien
taggtgactttatgacagttttcct

SEQ ID NO: 4721477 - DNA, 25 bp, Homo sapien
agtaggtgactttatgacagttttc

SEQ ID NO: 4721478 - DNA, 25 bp, Homo sapien
gcttaaataagcaatactcagggag

SEQ ID NO: 4721479 - DNA, 25 bp, Homo sapien
tcctacaaagataggtaagtgggtg

SEQ ID NO: 4721480 - DNA, 25 bp, Homo sapien
tattgacgggtatcatttgacatct

SEQ ID NO: 4721481 - DNA, 25 bp, Homo sapien
ccatgtatactatgactgaactgca

SEQ ID NO: 4721482 - DNA, 25 bp, Homo sapien
tagctaagctatggtgagaaaagcc

SEQ ID NO: 4721483 - DNA, 25 bp, Homo sapien
taaactacctgggtttgagtgcctg

SEQ ID NO: 4721484 - DNA, 25 bp, Homo sapien
gaggtcatgtataacagctatcaca

SEQ ID NO: 4721485 - DNA, 25 bp, Homo sapien
agaggtcacccttgatagtcccatg

SEQ ID NO: 4721486 - DNA, 25 bp, Homo sapien
taagcaaatttcttatcatactggt

SEQ ID NO: 4721487 - DNA, 25 bp, Homo sapien
gcaaatttcttatcatactggtaat

SEQ ID NO: 4721488 - DNA, 25 bp, Homo sapien
taattcagtaactcctgaacaccca

SEQ ID NO: 4721489 - DNA, 25 bp, Homo sapien
ggtaattctttaacgctatcacata

SEQ ID NO: 4721490 - DNA, 25 bp, Homo sapien
aatatcgtgaaaatggccatactgc

SEQ ID NO: 4721491 - DNA, 25 bp, Homo sapien
aggaagaatcaatatcgtgaaaatg

SEQ ID NO: 4721492 - DNA, 25 bp, Homo sapien
ggaagaacatttcatgctcatgggt

SEQ ID NO: 4721493 - DNA, 25 bp, Homo sapien
tggaagaacatttcatgctcatggg

SEQ ID NO: 4721494 - DNA, 25 bp, Homo sapien
ctgacttcaacttaaggttttctag

SEQ ID NO: 4721495 - DNA, 25 bp, Homo sapien
tatatacaccataatgcccttctga

SEQ ID NO: 4721496 - DNA, 25 bp, Homo sapien
gagtctttaataaacaggcccagaa

SEQ ID NO: 4721497 - DNA, 25 bp, Homo sapien
gagattatatgtttgattacaggag

SEQ ID NO: 4721498 - DNA, 25 bp, Homo sapien
atttttgccaaatcttacttttgct

SEQ ID NO: 4721499 - DNA, 25 bp, Homo sapien
tttttgccaaatcttacttttgcta

SEQ ID NO: 4721500 - DNA, 25 bp, Homo sapien
tataactcccatccatttgtgttag

SEQ ID NO: 4721501 - DNA, 25 bp, Homo sapien
aaatataactcccatccatttgtgt

SEQ ID NO: 4721502 - DNA, 25 bp, Homo sapien
ctcccatccatttgtgttagcttac

SEQ ID NO: 4721503 - DNA, 25 bp, Homo sapien
taactcccatccatttgtgttagct

SEQ ID NO: 4721504 - DNA, 25 bp, Homo sapien
cctgcattcatggataggctgtcca

SEQ ID NO: 4721505 - DNA, 25 bp, Homo sapien
tatttcacctggactaagaggctct

SEQ ID NO: 4721506 - DNA, 25 bp, Homo sapien
gcttcccaggtcctataaggcaaag

SEQ ID NO: 4721507 - DNA, 25 bp, Homo sapien
catacaagttggagctgcttgagct

SEQ ID NO: 4721508 - DNA, 25 bp, Homo sapien
gaatttgtaactataagctgactca

SEQ ID NO: 4721509 - DNA, 25 bp, Homo sapien
ttttttgtcttcacaataggagtgg

SEQ ID NO: 4721510 - DNA, 25 bp, Homo sapien
gaaaaacatcacactaagaaatgag

SEQ ID NO: 4721511 - DNA, 25 bp, Homo sapien
aatgagtttaatgtggtttcatgcc

SEQ ID NO: 4721512 - DNA, 25 bp, Homo sapien
cacacacataagctcacaccaaatg

SEQ ID NO: 4721513 - DNA, 25 bp, Homo sapien
taagagaaataagatagaccacccc

SEQ ID NO: 4721514 - DNA, 25 bp, Homo sapien
aaactatgcatagtaaaacacgtca

SEQ ID NO: 4721515 - DNA, 25 bp, Homo sapien
taaagtgctgataggaaaaaacctg

SEQ ID NO: 4721516 - DNA, 25 bp, Homo sapien
caatctactgtacgctactgtcaag

SEQ ID NO: 4721517 - DNA, 25 bp, Homo sapien
tttgttctccctataccaaggaaga

SEQ ID NO: 4721518 - DNA, 25 bp, Homo sapien
gaccagtagtggagatgtagactac

SEQ ID NO: 4721519 - DNA, 25 bp, Homo sapien
tactacagccttcttcgtacaagcc

SEQ ID NO: 4721520 - DNA, 25 bp, Homo sapien
ggagattctcctgattttaaaggtc

SEQ ID NO: 4721521 - DNA, 25 bp, Homo sapien
tgcttgaactacataatctctggag

SEQ ID NO: 4721522 - DNA, 25 bp, Homo sapien
tgattctgttctaaaactacaaacc

SEQ ID NO: 4721523 - DNA, 25 bp, Homo sapien
ttcacttgagaatgaatactactag

SEQ ID NO: 4721524 - DNA, 25 bp, Homo sapien
ggtacatgcagttcccttctcatcc

SEQ ID NO: 4721525 - DNA, 25 bp, Homo sapien
tgtcaagcctgccaaacttcgcggt

SEQ ID NO: 4721526 - DNA, 25 bp, Homo sapien
gaccgacgccttgttgaggtacatg

SEQ ID NO: 4721527 - DNA, 25 bp, Homo sapien
ccataatagcctctagatgtaactg

SEQ ID NO: 4721528 - DNA, 25 bp, Homo sapien
tatcgttgtcttttctctcaagtgc

SEQ ID NO: 4721529 - DNA, 25 bp, Homo sapien
ctatcgttgtcttttctctcaagtg

SEQ ID NO: 4721530 - DNA, 25 bp, Homo sapien
tacaataagtcttaacaagaaagtg

SEQ ID NO: 4721531 - DNA, 25 bp, Homo sapien
tacatgtgtcacctataaaaattct

SEQ ID NO: 4721532 - DNA, 25 bp, Homo sapien
taacatacaaactgacacctactcc

SEQ ID NO: 4721533 - DNA, 25 bp, Homo sapien
tctatcagcacactcaaaactcatg

SEQ ID NO: 4721534 - DNA, 25 bp, Homo sapien
gactgcccataacttatttcagaga

SEQ ID NO: 4721535 - DNA, 25 bp, Homo sapien
tcactttctcgcaggtgactgccca

SEQ ID NO: 4721536 - DNA, 25 bp, Homo sapien
attccatcactttctcgcaggtgac

SEQ ID NO: 4721537 - DNA, 25 bp, Homo sapien
tctcgcaggtgactgcccataactt

SEQ ID NO: 4721538 - DNA, 25 bp, Homo sapien
tgcaaaaattgggtgtcctcagatg

SEQ ID NO: 4721539 - DNA, 25 bp, Homo sapien
gatgcattccctattattgcaaaaa

SEQ ID NO: 4721540 - DNA, 25 bp, Homo sapien
tatgggtggcggataccaagagcac

SEQ ID NO: 4721541 - DNA, 25 bp, Homo sapien
agtatcatctgacttgcctatgatt

SEQ ID NO: 4721542 - DNA, 25 bp, Homo sapien
cactccataaatcttcgatgaccga

SEQ ID NO: 4721543 - DNA, 25 bp, Homo sapien
gaccgacatgggtagtaaatgataa

SEQ ID NO: 4721544 - DNA, 25 bp, Homo sapien
cataaatcttcgatgaccgacatgg

SEQ ID NO: 4721545 - DNA, 25 bp, Homo sapien
tcttcgatgaccgacatgggtagta

SEQ ID NO: 4721546 - DNA, 25 bp, Homo sapien
tcagcgctgcagactcgggtttcct

SEQ ID NO: 4721547 - DNA, 25 bp, Homo sapien
gggtttccttctcagtctacgcgca

SEQ ID NO: 4721548 - DNA, 25 bp, Homo sapien
ttgtgtcagtctgtcagtcccaccg

SEQ ID NO: 4721549 - DNA, 25 bp, Homo sapien
cgtgcaattcttcctacgggaccca

SEQ ID NO: 4721550 - DNA, 25 bp, Homo sapien
tgaagtccgccacgaactcggtgat

SEQ ID NO: 4721551 - DNA, 25 bp, Homo sapien
tagccctgctgtagctcgtaggtca

SEQ ID NO: 4721552 - DNA, 25 bp, Homo sapien
cctgtttggagatccagtggtccac

SEQ ID NO: 4721553 - DNA, 25 bp, Homo sapien
tagcacgtctccagcatcaacctga

SEQ ID NO: 4721554 - DNA, 25 bp, Homo sapien
gacgcgtgagcgcgagccgcttcct

SEQ ID NO: 4721555 - DNA, 25 bp, Homo sapien
gtggaacagccgctcgaggtgctgg

SEQ ID NO: 4721556 - DNA, 25 bp, Homo sapien
gcggggttacatggcgcgcgaggag

SEQ ID NO: 4721557 - DNA, 25 bp, Homo sapien
gcttcctcacggctcggccgcggcg

SEQ ID NO: 4721558 - DNA, 25 bp, Homo sapien
gaagcaaagaaagaggccctgtcgc

SEQ ID NO: 4721559 - DNA, 25 bp, Homo sapien
gctgggaagagctgtggagagaagc

SEQ ID NO: 4721560 - DNA, 25 bp, Homo sapien
agcaaagaaagaggccctgtcgcca

SEQ ID NO: 4721561 - DNA, 25 bp, Homo sapien
agggcactcagccccccggctggga

SEQ ID NO: 4721562 - DNA, 25 bp, Homo sapien
caatattagatgtatcaggactccc

SEQ ID NO: 4721563 - DNA, 25 bp, Homo sapien
ggatatgtcctacccagttcccagg

SEQ ID NO: 4721564 - DNA, 25 bp, Homo sapien
tgaagcacaggttatcaccaaggtc

SEQ ID NO: 4721565 - DNA, 25 bp, Homo sapien
taactatggttcttggagtcctgga

SEQ ID NO: 4721566 - DNA, 25 bp, Homo sapien
gacttcagggttgttatctcgcata

SEQ ID NO: 4721567 - DNA, 25 bp, Homo sapien
catatttagtagcattggccaccga

SEQ ID NO: 4721568 - DNA, 25 bp, Homo sapien
cagaagtctgtacctgacgcacgac

SEQ ID NO: 4721569 - DNA, 25 bp, Homo sapien
ggccatggcctacttgaacaaatta

SEQ ID NO: 4721570 - DNA, 25 bp, Homo sapien
ggctcgataaccagtggaaggtact

SEQ ID NO: 4721571 - DNA, 25 bp, Homo sapien
caagtgtagtacaggctgcagccct

SEQ ID NO: 4721572 - DNA, 25 bp, Homo sapien
ccatgtaagaggtctgagggtcatc

SEQ ID NO: 4721573 - DNA, 25 bp, Homo sapien
gaagtttaatcaccaagacggaatg

SEQ ID NO: 4721574 - DNA, 25 bp, Homo sapien
caaaagccgtcgtagcagtgcggca

SEQ ID NO: 4721575 - DNA, 25 bp, Homo sapien
aagaaacttcagaccttccggccag

SEQ ID NO: 4721576 - DNA, 25 bp, Homo sapien
cactataacttcgagggccagctgg

SEQ ID NO: 4721577 - DNA, 25 bp, Homo sapien
tcggagtggcagtttcagacaaggt

SEQ ID NO: 4721578 - DNA, 25 bp, Homo sapien
cttgcttttctgacacggtcgccgg

SEQ ID NO: 4721579 - DNA, 25 bp, Homo sapien
tgcttttctgacacggtcgccggca

SEQ ID NO: 4721580 - DNA, 25 bp, Homo sapien
ttgcctccgcaccatacagcttgga

SEQ ID NO: 4721581 - DNA, 25 bp, Homo sapien
gcctccgcaccatacagcttggatt

SEQ ID NO: 4721582 - DNA, 25 bp, Homo sapien
gtgacgtaggcgaggcgccggcggg

SEQ ID NO: 4721583 - DNA, 25 bp, Homo sapien
gggtctgcggctcgaagcagtgacg

SEQ ID NO: 4721584 - DNA, 25 bp, Homo sapien
tctgcggctcgaagcagtgacgtag

SEQ ID NO: 4721585 - DNA, 25 bp, Homo sapien
tcgaagcagtgacgtaggcgaggcg

SEQ ID NO: 4721586 - DNA, 25 bp, Homo sapien
gagagggatagtattaagttggaca

SEQ ID NO: 4721587 - DNA, 25 bp, Homo sapien
caaatgagagggatagtattaagtt

SEQ ID NO: 4721588 - DNA, 25 bp, Homo sapien
tagagtcaaatgagagggatagtat

SEQ ID NO: 4721589 - DNA, 25 bp, Homo sapien
aggtagacaaagttcattgtaagtt

SEQ ID NO: 4721590 - DNA, 25 bp, Homo sapien
tctaggtaacagtaaccaatggatg

SEQ ID NO: 4721591 - DNA, 25 bp, Homo sapien
ggacggattaggctaaagtcaccta

SEQ ID NO: 4721592 - DNA, 25 bp, Homo sapien
tctgatgctgaggttaggccctgga

SEQ ID NO: 4721593 - DNA, 25 bp, Homo sapien
tcactacgttgaacacactgtcttg

SEQ ID NO: 4721594 - DNA, 25 bp, Homo sapien
gctcagccttatgcctttccactga

SEQ ID NO: 4721595 - DNA, 25 bp, Homo sapien
tattttcctatctgacatttctaac

SEQ ID NO: 4721596 - DNA, 25 bp, Homo sapien
gagttaaaaagaatccaccgcacga

SEQ ID NO: 4721597 - DNA, 25 bp, Homo sapien
gaatccaccgcacgaaaggtaaaca

SEQ ID NO: 4721598 - DNA, 25 bp, Homo sapien
ggagcttctataccaactgggagca

SEQ ID NO: 4721599 - DNA, 25 bp, Homo sapien
tctgctatggtaaaaatggcacagc

SEQ ID NO: 4721600 - DNA, 25 bp, Homo sapien
tgagctttgaccagaatgagagcat

SEQ ID NO: 4721601 - DNA, 25 bp, Homo sapien
tgattgcatagcgtttgggcctgag

SEQ ID NO: 4721602 - DNA, 25 bp, Homo sapien
gaaaggcagtgtcttagaggagtct

SEQ ID NO: 4721603 - DNA, 25 bp, Homo sapien
tcagttgaaagccaagtcaaggctg

SEQ ID NO: 4721604 - DNA, 25 bp, Homo sapien
gaagaagctgaggtaccacactgca

SEQ ID NO: 4721605 - DNA, 25 bp, Homo sapien
gaagagcataacctggttctgaaga

SEQ ID NO: 4721606 - DNA, 25 bp, Homo sapien
cctgaagcctttgttgtcatcttcc

SEQ ID NO: 4721607 - DNA, 25 bp, Homo sapien
tcttccaagcttcccgtcatatgca

SEQ ID NO: 4721608 - DNA, 25 bp, Homo sapien
ccgtcatatgcatagttgcccaaac

SEQ ID NO: 4721609 - DNA, 25 bp, Homo sapien
cttctctcaaccgaatcaatcccat

SEQ ID NO: 4721610 - DNA, 25 bp, Homo sapien
gagttcacactgtgctagttcctgc

SEQ ID NO: 4721611 - DNA, 25 bp, Homo sapien
aatctcatattgaatgttgaagccc

SEQ ID NO: 4721612 - DNA, 25 bp, Homo sapien
ttcctaggcaaatttacaaagtata

SEQ ID NO: 4721613 - DNA, 25 bp, Homo sapien
agttcctgcaagtgctggttgttaa

SEQ ID NO: 4721614 - DNA, 25 bp, Homo sapien
tcagccaggaggtggtctcagagcc

SEQ ID NO: 4721615 - DNA, 25 bp, Homo sapien
agccaggaggtggtctcagagccat

SEQ ID NO: 4721616 - DNA, 25 bp, Homo sapien
gaggtggtctcagagccatggccac

SEQ ID NO: 4721617 - DNA, 25 bp, Homo sapien
ccaggaggtggtctcagagccatgg

SEQ ID NO: 4721618 - DNA, 25 bp, Homo sapien
ccaatatctactcacgctgttgagg

SEQ ID NO: 4721619 - DNA, 25 bp, Homo sapien
tagactcagaaagcctgagctgctg

SEQ ID NO: 4721620 - DNA, 25 bp, Homo sapien
tgcaaataatccttgcttgaagtgt

SEQ ID NO: 4721621 - DNA, 25 bp, Homo sapien
atgggcacccctggtagactcagaa

SEQ ID NO: 4721622 - DNA, 25 bp, Homo sapien
ggcagtgaatgcgacctcgtacaca

SEQ ID NO: 4721623 - DNA, 25 bp, Homo sapien
tgcgacctcgtacacagagattcat

SEQ ID NO: 4721624 - DNA, 25 bp, Homo sapien
tgaatgcgacctcgtacacagagat

SEQ ID NO: 4721625 - DNA, 25 bp, Homo sapien
cctcgtacacagagattcattagaa

SEQ ID NO: 4721626 - DNA, 25 bp, Homo sapien
gcccaggaacttttgaactctctgt

SEQ ID NO: 4721627 - DNA, 25 bp, Homo sapien
tactgctgatatttccagtctgggc

SEQ ID NO: 4721628 - DNA, 25 bp, Homo sapien
tctgggcccaacatgactgatgtga

SEQ ID NO: 4721629 - DNA, 25 bp, Homo sapien
tataaatttctacaccctgtgcttg

SEQ ID NO: 4721630 - DNA, 25 bp, Homo sapien
cctggcactgcattagaggagagtg

SEQ ID NO: 4721631 - DNA, 25 bp, Homo sapien
caaataaaggaagattaaggctaag

SEQ ID NO: 4721632 - DNA, 25 bp, Homo sapien
tagagcctggaggtagtaggacaga

SEQ ID NO: 4721633 - DNA, 25 bp, Homo sapien
agtgcacacaagatcactcctcttc

SEQ ID NO: 4721634 - DNA, 25 bp, Homo sapien
tcccgtcctctgatagccatttttc

SEQ ID NO: 4721635 - DNA, 25 bp, Homo sapien
taaagttttcccgtcctctgatagc

SEQ ID NO: 4721636 - DNA, 25 bp, Homo sapien
tttcacatgtgaaaactcgtttcca

SEQ ID NO: 4721637 - DNA, 25 bp, Homo sapien
tgaaaactcgtttccatctttcaca

SEQ ID NO: 4721638 - DNA, 25 bp, Homo sapien
cagagacctactagaagatgcgtac

SEQ ID NO: 4721639 - DNA, 25 bp, Homo sapien
tatccagagacctactagaagatgc

SEQ ID NO: 4721640 - DNA, 25 bp, Homo sapien
tctatccagagacctactagaagat

SEQ ID NO: 4721641 - DNA, 25 bp, Homo sapien
tccagagacctactagaagatgcgt

SEQ ID NO: 4721642 - DNA, 25 bp, Homo sapien
taaaccactgggataagcatgccag

SEQ ID NO: 4721643 - DNA, 25 bp, Homo sapien
gagggaccaatttcaactccagcct

SEQ ID NO: 4721644 - DNA, 25 bp, Homo sapien
tcctgctgcagtcgaagaactaccc

SEQ ID NO: 4721645 - DNA, 25 bp, Homo sapien
cataacagatcctgagagggaccaa

SEQ ID NO: 4721646 - DNA, 25 bp, Homo sapien
cccagaggtaacaaccaagaatttg

SEQ ID NO: 4721647 - DNA, 25 bp, Homo sapien
tgtcccacaatgacttaaggcatga

SEQ ID NO: 4721648 - DNA, 25 bp, Homo sapien
tgtgtcactacctaattgcatctcc

SEQ ID NO: 4721649 - DNA, 25 bp, Homo sapien
cgcatatgtaagtgtaagttctgga

SEQ ID NO: 4721650 - DNA, 25 bp, Homo sapien
cacactgtgttataagctagaagga

SEQ ID NO: 4721651 - DNA, 25 bp, Homo sapien
gggatattgccctgtgtaacaatta

SEQ ID NO: 4721652 - DNA, 25 bp, Homo sapien
tataatacatgctgtggcttggcac

SEQ ID NO: 4721653 - DNA, 25 bp, Homo sapien
tacagaatgctgtgccagaactgat

SEQ ID NO: 4721654 - DNA, 25 bp, Homo sapien
cattctaaagagatacagtctgacc

SEQ ID NO: 4721655 - DNA, 25 bp, Homo sapien
cacagttccaaacgataggctcaaa

SEQ ID NO: 4721656 - DNA, 25 bp, Homo sapien
tagacagggatccattttaaagagc

SEQ ID NO: 4721657 - DNA, 25 bp, Homo sapien
ttgatggaaacctgtgagtcttggg

SEQ ID NO: 4721658 - DNA, 25 bp, Homo sapien
gataaagctattaatggcaatattt

SEQ ID NO: 4721659 - DNA, 25 bp, Homo sapien
ataaagctattaatggcaatatttt

SEQ ID NO: 4721660 - DNA, 25 bp, Homo sapien
gcatgctcgttgtacctcttggaaa

SEQ ID NO: 4721661 - DNA, 25 bp, Homo sapien
gcttgactgacattatgaaggcctg

SEQ ID NO: 4721662 - DNA, 25 bp, Homo sapien
caagatagcttttccgtgctggcat

SEQ ID NO: 4721663 - DNA, 25 bp, Homo sapien
tgtggtctaagctggaatccggtca

SEQ ID NO: 4721664 - DNA, 25 bp, Homo sapien
catatagggatagaagtggtagagc

SEQ ID NO: 4721665 - DNA, 25 bp, Homo sapien
catacttcagcttccatatagggat

SEQ ID NO: 4721666 - DNA, 25 bp, Homo sapien
cagtaataacatacttcagcttcca

SEQ ID NO: 4721667 - DNA, 25 bp, Homo sapien
accacaatgtagaaaaatagtcatg

SEQ ID NO: 4721668 - DNA, 25 bp, Homo sapien
tgctggcaaataggcaaaacatttt

SEQ ID NO: 4721669 - DNA, 25 bp, Homo sapien
actgcattaatacagaaactatagg

SEQ ID NO: 4721670 - DNA, 25 bp, Homo sapien
taggaatattgttgttctctaaccc

SEQ ID NO: 4721671 - DNA, 25 bp, Homo sapien
gaagttagacatcttccaggtagca

SEQ ID NO: 4721672 - DNA, 25 bp, Homo sapien
ttggtgaaggctcgagtctgtagat

SEQ ID NO: 4721673 - DNA, 25 bp, Homo sapien
ggtgttactgattggactgccacca

SEQ ID NO: 4721674 - DNA, 25 bp, Homo sapien
gccaccatcttcaggactgcctcag

SEQ ID NO: 4721675 - DNA, 25 bp, Homo sapien
tgcctcaggaattggtgaaggctcg

SEQ ID NO: 4721676 - DNA, 25 bp, Homo sapien
agcttctacccttcctatgcattgg

SEQ ID NO: 4721677 - DNA, 25 bp, Homo sapien
tgaaaaggcctgatattattgaagc

SEQ ID NO: 4721678 - DNA, 25 bp, Homo sapien
gaatctctcagacttaggaaccaac

SEQ ID NO: 4721679 - DNA, 25 bp, Homo sapien
gattctggctctaaagtttcctcga

SEQ ID NO: 4721680 - DNA, 25 bp, Homo sapien
gagtctcattaactgggttctggat

SEQ ID NO: 4721681 - DNA, 25 bp, Homo sapien
atttagggtcactgttgtcaaaact

SEQ ID NO: 4721682 - DNA, 25 bp, Homo sapien
aacctgagagtctcattaactgggt

SEQ ID NO: 4721683 - DNA, 25 bp, Homo sapien
tttagggtcactgttgtcaaaactc

SEQ ID NO: 4721684 - DNA, 25 bp, Homo sapien
catccatatatccattgcaagctta

SEQ ID NO: 4721685 - DNA, 25 bp, Homo sapien
gcaagcttaagacccagcataacta

SEQ ID NO: 4721686 - DNA, 25 bp, Homo sapien
taactatttaccagcctatttacat

SEQ ID NO: 4721687 - DNA, 25 bp, Homo sapien
cagtgagttagttacagtcacacca

SEQ ID NO: 4721688 - DNA, 25 bp, Homo sapien
agcctttcacgtagcctcctgatgg

SEQ ID NO: 4721689 - DNA, 25 bp, Homo sapien
cctcctgatggggttggttgaggag

SEQ ID NO: 4721690 - DNA, 25 bp, Homo sapien
gcctcctgatggggttggttgagga

SEQ ID NO: 4721691 - DNA, 25 bp, Homo sapien
cagagcctttcacgtagcctcctga

SEQ ID NO: 4721692 - DNA, 25 bp, Homo sapien
aggggtgcaccttcgcagcagtcat

SEQ ID NO: 4721693 - DNA, 25 bp, Homo sapien
aaaggggtgcaccttcgcagcagtc

SEQ ID NO: 4721694 - DNA, 25 bp, Homo sapien
gagaaaggggtgcaccttcgcagca

SEQ ID NO: 4721695 - DNA, 25 bp, Homo sapien
gaaaggggtgcaccttcgcagcagt

SEQ ID NO: 4721696 - DNA, 25 bp, Homo sapien
actccaaacctttggctctctgcag

SEQ ID NO: 4721697 - DNA, 25 bp, Homo sapien
aaattttgagcctacctgtggccct

SEQ ID NO: 4721698 - DNA, 25 bp, Homo sapien
aagtccttgcttctgtctgactcca

SEQ ID NO: 4721699 - DNA, 25 bp, Homo sapien
gctgtcacgctgaaccttttttctc

SEQ ID NO: 4721700 - DNA, 25 bp, Homo sapien
cttcccctactgtccatccctttgc

SEQ ID NO: 4721701 - DNA, 25 bp, Homo sapien
gccacttgaatttcacctctctcca

SEQ ID NO: 4721702 - DNA, 25 bp, Homo sapien
catccctttgccacttgaatttcac

SEQ ID NO: 4721703 - DNA, 25 bp, Homo sapien
tactgtccatccctttgccacttga

SEQ ID NO: 4721704 - DNA, 25 bp, Homo sapien
gtctcttgaattactttactcagca

SEQ ID NO: 4721705 - DNA, 25 bp, Homo sapien
gaattactttactcagcagtctctg

SEQ ID NO: 4721706 - DNA, 25 bp, Homo sapien
tcttgaattactttactcagcagtc

SEQ ID NO: 4721707 - DNA, 25 bp, Homo sapien
ttgaattactttactcagcagtctc

SEQ ID NO: 4721708 - DNA, 25 bp, Homo sapien
ggcttcaggagcaggaccgtcaccc

SEQ ID NO: 4721709 - DNA, 25 bp, Homo sapien
ttcaggagcaggaccgtcaccctcc

SEQ ID NO: 4721710 - DNA, 25 bp, Homo sapien
gcttcaggagcaggaccgtcaccct

SEQ ID NO: 4721711 - DNA, 25 bp, Homo sapien
caggagcaggaccgtcaccctccat

SEQ ID NO: 4721712 - DNA, 25 bp, Homo sapien
tcaaccacctggttgggtaaggcga

SEQ ID NO: 4721713 - DNA, 25 bp, Homo sapien
ttctgcttatctacatagttgtttt

SEQ ID NO: 4721714 - DNA, 25 bp, Homo sapien
tgggtaaggcgagagtgatggccat

SEQ ID NO: 4721715 - DNA, 25 bp, Homo sapien
gttgggtaaggcgagagtgatggcc

SEQ ID NO: 4721716 - DNA, 25 bp, Homo sapien
caggtaactactggaatggcatcac

SEQ ID NO: 4721717 - DNA, 25 bp, Homo sapien
tagaggaatagacctttggtgccag

SEQ ID NO: 4721718 - DNA, 25 bp, Homo sapien
tatgcgctgacaagtagctatggca

SEQ ID NO: 4721719 - DNA, 25 bp, Homo sapien
tccagggtcctagtgggtaattcac

SEQ ID NO: 4721720 - DNA, 25 bp, Homo sapien
agtgaaacactgagctgatgactta

SEQ ID NO: 4721721 - DNA, 25 bp, Homo sapien
catgtacaatcacacccggctacgt

SEQ ID NO: 4721722 - DNA, 25 bp, Homo sapien
aagttgattcaagcactgattaaac

SEQ ID NO: 4721723 - DNA, 25 bp, Homo sapien
aaggtcacagccacaatgaaacatt

SEQ ID NO: 4721724 - DNA, 25 bp, Homo sapien
cctccacctctggagttcaagagat

SEQ ID NO: 4721725 - DNA, 25 bp, Homo sapien
caacctccacctctggagttcaaga

SEQ ID NO: 4721726 - DNA, 25 bp, Homo sapien
ttcaagagattctcttgcctctgcc

SEQ ID NO: 4721727 - DNA, 25 bp, Homo sapien
tcaagagattctcttgcctctgcct

SEQ ID NO: 4721728 - DNA, 25 bp, Homo sapien
cattagactggccaagatgttgtca

SEQ ID NO: 4721729 - DNA, 25 bp, Homo sapien
cagagtatccaacggacaaaatggc

SEQ ID NO: 4721730 - DNA, 25 bp, Homo sapien
gatgttgtcagagttgaacagcact

SEQ ID NO: 4721731 - DNA, 25 bp, Homo sapien
gcatcatggtctaagggcttttact

SEQ ID NO: 4721732 - DNA, 25 bp, Homo sapien
caagtatcggcctattagattcagt

SEQ ID NO: 4721733 - DNA, 25 bp, Homo sapien
gtttactagtcacttgggagtgcca

SEQ ID NO: 4721734 - DNA, 25 bp, Homo sapien
tgattaccatttagtgtcccagctt

SEQ ID NO: 4721735 - DNA, 25 bp, Homo sapien
cacataggtagcatgaattcaggcc

SEQ ID NO: 4721736 - DNA, 25 bp, Homo sapien
ggtaagaatctcataaggcaggtag

SEQ ID NO: 4721737 - DNA, 25 bp, Homo sapien
ggatgcctcaagcatatggcctgct

SEQ ID NO: 4721738 - DNA, 25 bp, Homo sapien
caactgcgggtatgtctctggagag

SEQ ID NO: 4721739 - DNA, 25 bp, Homo sapien
agaatcaaagagaaccaactgcggg

SEQ ID NO: 4721740 - DNA, 25 bp, Homo sapien
caatttaagctaggagacagtggaa

SEQ ID NO: 4721741 - DNA, 25 bp, Homo sapien
gatggctaaggcatacaggtagact

SEQ ID NO: 4721742 - DNA, 25 bp, Homo sapien
cattctgccaaaagacggtgccaca

SEQ ID NO: 4721743 - DNA, 25 bp, Homo sapien
tgaagcttttggctccatgacggag

SEQ ID NO: 4721744 - DNA, 25 bp, Homo sapien
tgagctaccgtgctgagtgtttttt

SEQ ID NO: 4721745 - DNA, 25 bp, Homo sapien
atcttgcccttgtcgcccagcttgg

SEQ ID NO: 4721746 - DNA, 25 bp, Homo sapien
ttccaggctacagggcagtgatgcg

SEQ ID NO: 4721747 - DNA, 25 bp, Homo sapien
cagggcagtgatgcgatttcggctc

SEQ ID NO: 4721748 - DNA, 25 bp, Homo sapien
ggctttctgaaaggcggatttggca

SEQ ID NO: 4721749 - DNA, 25 bp, Homo sapien
gccatctgtatagcctctttagtag

SEQ ID NO: 4721750 - DNA, 25 bp, Homo sapien
gtatagcacttcaggttttttggcc

SEQ ID NO: 4721751 - DNA, 25 bp, Homo sapien
tatcttattgttggacgtgattcgt

SEQ ID NO: 4721752 - DNA, 25 bp, Homo sapien
taagttccaggagagcacagactgc

SEQ ID NO: 4721753 - DNA, 25 bp, Homo sapien
gcacattgtagctacctgtaactca

SEQ ID NO: 4721754 - DNA, 25 bp, Homo sapien
tactctgctgtaggaacgtaagttc

SEQ ID NO: 4721755 - DNA, 25 bp, Homo sapien
taccactgtagatgagtgcctagca

SEQ ID NO: 4721756 - DNA, 25 bp, Homo sapien
tgaaggattatctttatgactagga

SEQ ID NO: 4721757 - DNA, 25 bp, Homo sapien
aatatgaaatatactcccttactac

SEQ ID NO: 4721758 - DNA, 25 bp, Homo sapien
aggattatctttatgactaggaaaa

SEQ ID NO: 4721759 - DNA, 25 bp, Homo sapien
atgaaatatactcccttactaccta

SEQ ID NO: 4721760 - DNA, 25 bp, Homo sapien
agctccgccttcttggttcactcca

SEQ ID NO: 4721761 - DNA, 25 bp, Homo sapien
aagctccgccttcttggttcactcc

SEQ ID NO: 4721762 - DNA, 25 bp, Homo sapien
gcacacgccgccacgcccagataat

SEQ ID NO: 4721763 - DNA, 25 bp, Homo sapien
caggcacacgccgccacgcccagat

SEQ ID NO: 4721764 - DNA, 25 bp, Homo sapien
tatattttgggatacatgtgaaatt

SEQ ID NO: 4721765 - DNA, 25 bp, Homo sapien
gaaattttgatatgttcatataaca

SEQ ID NO: 4721766 - DNA, 25 bp, Homo sapien
tattgctaaataatagatggatata

SEQ ID NO: 4721767 - DNA, 25 bp, Homo sapien
cccggcctctaaatagaagacatta

SEQ ID NO: 4721768 - DNA, 25 bp, Homo sapien
gaaatgacacttgagatccttggaa

SEQ ID NO: 4721769 - DNA, 25 bp, Homo sapien
gcctcccaaatattagttgtgcctg

SEQ ID NO: 4721770 - DNA, 25 bp, Homo sapien
gaaattttagctacacactgcctcc

SEQ ID NO: 4721771 - DNA, 25 bp, Homo sapien
tctcaccagtggttttacatctgca

SEQ ID NO: 4721772 - DNA, 25 bp, Homo sapien
caggcaactggcacatgtggaagca

SEQ ID NO: 4721773 - DNA, 25 bp, Homo sapien
ttaagtctccaggatagcctctatg

SEQ ID NO: 4721774 - DNA, 25 bp, Homo sapien
gcacatgtggaagcagaataccaaa

SEQ ID NO: 4721775 - DNA, 25 bp, Homo sapien
gtctccaggatagcctctatgacat

SEQ ID NO: 4721776 - DNA, 25 bp, Homo sapien
ggtgggcaggtacaaaccaggtgct

SEQ ID NO: 4721777 - DNA, 25 bp, Homo sapien
actcataaacttccatgggtgggca

SEQ ID NO: 4721778 - DNA, 25 bp, Homo sapien
ggtgctgatctccatatatgtcatc

SEQ ID NO: 4721779 - DNA, 25 bp, Homo sapien
aggtacaaaccaggtgctgatctcc

SEQ ID NO: 4721780 - DNA, 25 bp, Homo sapien
tctctggaataaggccggtcccagt

SEQ ID NO: 4721781 - DNA, 25 bp, Homo sapien
gaagatgtaacgcaggtcagggagt

SEQ ID NO: 4721782 - DNA, 25 bp, Homo sapien
cctctctggaataaggccggtccca

SEQ ID NO: 4721783 - DNA, 25 bp, Homo sapien
tcccagtgggaagatgtaacgcagg

SEQ ID NO: 4721784 - DNA, 25 bp, Homo sapien
cttattctagggaagagtatcatcc

SEQ ID NO: 4721785 - DNA, 25 bp, Homo sapien
agttgctggtacactgtccagacat

SEQ ID NO: 4721786 - DNA, 25 bp, Homo sapien
tattctagggaagagtatcatcctc

SEQ ID NO: 4721787 - DNA, 25 bp, Homo sapien
cctcagttgagagttcgggagttgc

SEQ ID NO: 4721788 - DNA, 25 bp, Homo sapien
ggtcgatgcggccctcctcaatgtc

SEQ ID NO: 4721789 - DNA, 25 bp, Homo sapien
tcctgccgaatgctgatcatggcat

SEQ ID NO: 4721790 - DNA, 25 bp, Homo sapien
cttcagcggattgaccctggggtcg

SEQ ID NO: 4721791 - DNA, 25 bp, Homo sapien
cctgccgaatgctgatcatggcatc

SEQ ID NO: 4721792 - DNA, 25 bp, Homo sapien
tctatgagtcataaaacatgccagg

SEQ ID NO: 4721793 - DNA, 25 bp, Homo sapien
gcagtatgccccaaaattgcctgaa

SEQ ID NO: 4721794 - DNA, 25 bp, Homo sapien
tccatgtgtgagcaaattcagtcca

SEQ ID NO: 4721795 - DNA, 25 bp, Homo sapien
ggtctgataattagcctggaactgc

SEQ ID NO: 4721796 - DNA, 25 bp, Homo sapien
gggtctcgtgtccaaaataaattca

SEQ ID NO: 4721797 - DNA, 25 bp, Homo sapien
cagactttttgaagggtctcgtgtc

SEQ ID NO: 4721798 - DNA, 25 bp, Homo sapien
atttgcagactttttgaagggtctc

SEQ ID NO: 4721799 - DNA, 25 bp, Homo sapien
tttgaagggtctcgtgtccaaaata

SEQ ID NO: 4721800 - DNA, 25 bp, Homo sapien
tagagccattgacacttttcagcaa

SEQ ID NO: 4721801 - DNA, 25 bp, Homo sapien
tattctgcggacataaaatctactt

SEQ ID NO: 4721802 - DNA, 25 bp, Homo sapien
taaatgtgttgtatagtcctgatcc

SEQ ID NO: 4721803 - DNA, 25 bp, Homo sapien
aatctacttgcaacagttaaatgtg

SEQ ID NO: 4721804 - DNA, 25 bp, Homo sapien
cagggacaggtatttgcaggcaaag

SEQ ID NO: 4721805 - DNA, 25 bp, Homo sapien
cgcagggacaggtatttgcaggcaa

SEQ ID NO: 4721806 - DNA, 25 bp, Homo sapien
agggacaggtatttgcaggcaaagt

SEQ ID NO: 4721807 - DNA, 25 bp, Homo sapien
gcagggacaggtatttgcaggcaaa

SEQ ID NO: 4721808 - DNA, 25 bp, Homo sapien
tttctctggtttgctcctgtgtctc

SEQ ID NO: 4721809 - DNA, 25 bp, Homo sapien
ctggtttgctcctgtgtctctgctt

SEQ ID NO: 4721810 - DNA, 25 bp, Homo sapien
tctctggtttgctcctgtgtctctg

SEQ ID NO: 4721811 - DNA, 25 bp, Homo sapien
tctggtttgctcctgtgtctctgct

SEQ ID NO: 4721812 - DNA, 25 bp, Homo sapien
ctcatcggctacgctggcttccagg

SEQ ID NO: 4721813 - DNA, 25 bp, Homo sapien
tcatcggctacgctggcttccaggc

SEQ ID NO: 4721814 - DNA, 25 bp, Homo sapien
tctcatcggctacgctggcttccag

SEQ ID NO: 4721815 - DNA, 25 bp, Homo sapien
atttaatatcgcagtttccgtggct

SEQ ID NO: 4721816 - DNA, 25 bp, Homo sapien
tttctaatcgcttggccatgtagtt

SEQ ID NO: 4721817 - DNA, 25 bp, Homo sapien
tgtagttggcatttaatatcgcagt

SEQ ID NO: 4721818 - DNA, 25 bp, Homo sapien
tcgcagtttccgtggcttgtttaag

SEQ ID NO: 4721819 - DNA, 25 bp, Homo sapien
tcctcattccgctttagtgaaatga

SEQ ID NO: 4721820 - DNA, 25 bp, Homo sapien
gcactgacggttcccacaggacagg

SEQ ID NO: 4721821 - DNA, 25 bp, Homo sapien
gggccgcactgacggttcccacagg

SEQ ID NO: 4721822 - DNA, 25 bp, Homo sapien
aggacaggcatcctcattccgcttt

SEQ ID NO: 4721823 - DNA, 25 bp, Homo sapien
gatttaggtgcgagacatcagaccc

SEQ ID NO: 4721824 - DNA, 25 bp, Homo sapien
gtgaagatttaggtgcgagacatca

SEQ ID NO: 4721825 - DNA, 25 bp, Homo sapien
agtctccagggcgacagattcccac

SEQ ID NO: 4721826 - DNA, 25 bp, Homo sapien
gaagatttaggtgcgagacatcaga

SEQ ID NO: 4721827 - DNA, 25 bp, Homo sapien
agtcaagagcttggaagcaccctcc

SEQ ID NO: 4721828 - DNA, 25 bp, Homo sapien
tccgataggcagagtgcttgtggtt

SEQ ID NO: 4721829 - DNA, 25 bp, Homo sapien
agaaatgtcctctatactggcccag

SEQ ID NO: 4721830 - DNA, 25 bp, Homo sapien
tagtcacaaactggcatccgatagg

SEQ ID NO: 4721831 - DNA, 25 bp, Homo sapien
agggagagaagtgtctctaacacaa

SEQ ID NO: 4721832 - DNA, 25 bp, Homo sapien
gggagagaagtgtctctaacacaag

SEQ ID NO: 4721833 - DNA, 25 bp, Homo sapien
aagggagagaagtgtctctaacaca

SEQ ID NO: 4721834 - DNA, 25 bp, Homo sapien
aaagggagagaagtgtctctaacac

SEQ ID NO: 4721835 - DNA, 25 bp, Homo sapien
ggcaactcttccctgagcagcgcta

SEQ ID NO: 4721836 - DNA, 25 bp, Homo sapien
tgaaataggcaactcttccctgagc

SEQ ID NO: 4721837 - DNA, 25 bp, Homo sapien
ctccatgttgttgaaataggcaact

SEQ ID NO: 4721838 - DNA, 25 bp, Homo sapien
tgttgttgaaataggcaactcttcc

SEQ ID NO: 4721839 - DNA, 25 bp, Homo sapien
gctttagtatgatgcacgttaccga

SEQ ID NO: 4721840 - DNA, 25 bp, Homo sapien
gcgtggtcggctttagtatgatgca

SEQ ID NO: 4721841 - DNA, 25 bp, Homo sapien
tatgatgcacgttaccgaacggccc

SEQ ID NO: 4721842 - DNA, 25 bp, Homo sapien
cttcccctgcgtggtcggctttagt

SEQ ID NO: 4721843 - DNA, 25 bp, Homo sapien
taagggcgggcctcttcagttccca

SEQ ID NO: 4721844 - DNA, 25 bp, Homo sapien
actgatgttctcttcaaacacccca

SEQ ID NO: 4721845 - DNA, 25 bp, Homo sapien
tgatggatgaggtcacacacgtcac

SEQ ID NO: 4721846 - DNA, 25 bp, Homo sapien
catatttgccccgtctaggtagacc

SEQ ID NO: 4721847 - DNA, 25 bp, Homo sapien
ccattggtggatgggtatgtaatca

SEQ ID NO: 4721848 - DNA, 25 bp, Homo sapien
cagagttcacagtctccatgcctaa

SEQ ID NO: 4721849 - DNA, 25 bp, Homo sapien
ccagcatatcagagcaggcatgttt

SEQ ID NO: 4721850 - DNA, 25 bp, Homo sapien
cctatattactataatggagggact

SEQ ID NO: 4721851 - DNA, 25 bp, Homo sapien
agggacttaataatttcaactactg

SEQ ID NO: 4721852 - DNA, 25 bp, Homo sapien
tgggaagcagatacggttgctaagc

SEQ ID NO: 4721853 - DNA, 25 bp, Homo sapien
tgttacaattcctgacacgaagatg

SEQ ID NO: 4721854 - DNA, 25 bp, Homo sapien
gctgccagtccgctggtgggaagca

SEQ ID NO: 4721855 - DNA, 25 bp, Homo sapien
ttcccgcttaagatgcagctgccag

SEQ ID NO: 4721856 - DNA, 25 bp, Homo sapien
aggcaggttctgcaaggagtactct

SEQ ID NO: 4721857 - DNA, 25 bp, Homo sapien
gagagggaagattgggcagaaagag

SEQ ID NO: 4721858 - DNA, 25 bp, Homo sapien
ggagtactcttactaccaccatgaa

SEQ ID NO: 4721859 - DNA, 25 bp, Homo sapien
tctgcaaggagtactcttactacca

SEQ ID NO: 4721860 - DNA, 25 bp, Homo sapien
tacataatccatcaagtccctgatc

SEQ ID NO: 4721861 - DNA, 25 bp, Homo sapien
tagagtagactctggtcaaaggaag

SEQ ID NO: 4721862 - DNA, 25 bp, Homo sapien
ggtagagtagactctggtcaaagga

SEQ ID NO: 4721863 - DNA, 25 bp, Homo sapien
gacatttacataatccatcaagtcc

SEQ ID NO: 4721864 - DNA, 25 bp, Homo sapien
ctctcccatctgctaaggagaagac

SEQ ID NO: 4721865 - DNA, 25 bp, Homo sapien
cccggcctctcccatctgctaagga

SEQ ID NO: 4721866 - DNA, 25 bp, Homo sapien
catctgctaaggagaagacaagtac

SEQ ID NO: 4721867 - DNA, 25 bp, Homo sapien
ccatctgctaaggagaagacaagta

SEQ ID NO: 4721868 - DNA, 25 bp, Homo sapien
ggtgaactgcatcgatattcccata

SEQ ID NO: 4721869 - DNA, 25 bp, Homo sapien
catggccttgaggtgaactgcatcg

SEQ ID NO: 4721870 - DNA, 25 bp, Homo sapien
gatattcccatatttatccacctcc

SEQ ID NO: 4721871 - DNA, 25 bp, Homo sapien
ggccttgaggtgaactgcatcgata

SEQ ID NO: 4721872 - DNA, 25 bp, Homo sapien
gccatgtgggcacttgctgggttgg

SEQ ID NO: 4721873 - DNA, 25 bp, Homo sapien
catgtgggcacttgctgggttggtc

SEQ ID NO: 4721874 - DNA, 25 bp, Homo sapien
cctgccatgtgggcacttgctgggt

SEQ ID NO: 4721875 - DNA, 25 bp, Homo sapien
tgggcacttgctgggttggtcccat

SEQ ID NO: 4721876 - DNA, 25 bp, Homo sapien
cgatggaaagagaagtcacagtggc

SEQ ID NO: 4721877 - DNA, 25 bp, Homo sapien
gccactaagcctgtagaaatttatc

SEQ ID NO: 4721878 - DNA, 25 bp, Homo sapien
catcctggtacaaggagcgatggaa

SEQ ID NO: 4721879 - DNA, 25 bp, Homo sapien
gaaatttatcatagcagccatagga

SEQ ID NO: 4721880 - DNA, 25 bp, Homo sapien
tcttgactatatgttccctcatctg

SEQ ID NO: 4721881 - DNA, 25 bp, Homo sapien
tctgtgccccatggtgagcaagcgc

SEQ ID NO: 4721882 - DNA, 25 bp, Homo sapien
tcttggaagcaaggatcataatggc

SEQ ID NO: 4721883 - DNA, 25 bp, Homo sapien
tcataatggctagttcacagaaatt

SEQ ID NO: 4721884 - DNA, 25 bp, Homo sapien
tctggtttaagtaggctcggatagt

SEQ ID NO: 4721885 - DNA, 25 bp, Homo sapien
ggctcggatagtggccagtccagca

SEQ ID NO: 4721886 - DNA, 25 bp, Homo sapien
tttaagtaggctcggatagtggcca

SEQ ID NO: 4721887 - DNA, 25 bp, Homo sapien
tctcctttctggtttaagtaggctc

SEQ ID NO: 4721888 - DNA, 25 bp, Homo sapien
caagaagaaagggatcacggttagg

SEQ ID NO: 4721889 - DNA, 25 bp, Homo sapien
aaagggatcacggttaggtcttctg

SEQ ID NO: 4721890 - DNA, 25 bp, Homo sapien
atcacggttaggtcttctggctttc

SEQ ID NO: 4721891 - DNA, 25 bp, Homo sapien
gacaagaagaaagggatcacggtta

SEQ ID NO: 4721892 - DNA, 25 bp, Homo sapien
ttcaccagcacgtgacacatggtca

SEQ ID NO: 4721893 - DNA, 25 bp, Homo sapien
gttcaccagcacgtgacacatggtc

SEQ ID NO: 4721894 - DNA, 25 bp, Homo sapien
aagatggagctttctatatccttgc

SEQ ID NO: 4721895 - DNA, 25 bp, Homo sapien
tcaaccactcctacccaaagatgga

SEQ ID NO: 4721896 - DNA, 25 bp, Homo sapien
gaactacgacgtgtgtgtcagccag

SEQ ID NO: 4721897 - DNA, 25 bp, Homo sapien
catccagtttgtgcactacagctca

SEQ ID NO: 4721898 - DNA, 25 bp, Homo sapien
tgccatgactaacattccggtgagc

SEQ ID NO: 4721899 - DNA, 25 bp, Homo sapien
tggaaggcaccactttcagggcata

SEQ ID NO: 4721900 - DNA, 25 bp, Homo sapien
tcatgttcccagtaccctgtgcagg

SEQ ID NO: 4721901 - DNA, 25 bp, Homo sapien
caaatatcgagtcaagggcctgatc

SEQ ID NO: 4721902 - DNA, 25 bp, Homo sapien
gcagcctagacctctgggtgtaagt

SEQ ID NO: 4721903 - DNA, 25 bp, Homo sapien
cgtgcccagtcctgattgtttaaaa

SEQ ID NO: 4721904 - DNA, 25 bp, Homo sapien
taacttttccctcacagccttaatc

SEQ ID NO: 4721905 - DNA, 25 bp, Homo sapien
actgatttcactggatctttcaaat

SEQ ID NO: 4721906 - DNA, 25 bp, Homo sapien
ttgttttcaagagtatcccatcctg

SEQ ID NO: 4721907 - DNA, 25 bp, Homo sapien
tggctgcccgggcaacctgttctga

SEQ ID NO: 4721908 - DNA, 25 bp, Homo sapien
gctacggctccattcacccttaggg

SEQ ID NO: 4721909 - DNA, 25 bp, Homo sapien
cagccagctctgagatcgaagttgt

SEQ ID NO: 4721910 - DNA, 25 bp, Homo sapien
cagtgcctataacgctggctgcccg

SEQ ID NO: 4721911 - DNA, 25 bp, Homo sapien
gagagaccttcgacccaggaacatt

SEQ ID NO: 4721912 - DNA, 25 bp, Homo sapien
ggctggaagagaaccagaccctgca

SEQ ID NO: 4721913 - DNA, 25 bp, Homo sapien
tctaacgacacccagaaccagggat

SEQ ID NO: 4721914 - DNA, 25 bp, Homo sapien
tctataattgcaggaccagcccaca

SEQ ID NO: 4721915 - DNA, 25 bp, Homo sapien
tctcggaaaagctgctgatatcctt

SEQ ID NO: 4721916 - DNA, 25 bp, Homo sapien
gacctggtcataacctgtgagttca

SEQ ID NO: 4721917 - DNA, 25 bp, Homo sapien
tgagcttgatccagaggcacaaagg

SEQ ID NO: 4721918 - DNA, 25 bp, Homo sapien
cacaaatccttctcaagctctcgga

SEQ ID NO: 4721919 - DNA, 25 bp, Homo sapien
gagttcagacgaactgttcagtttc

SEQ ID NO: 4721920 - DNA, 25 bp, Homo sapien
tgcgagttcagacgaactgttcagt

SEQ ID NO: 4721921 - DNA, 25 bp, Homo sapien
gcgagttcagacgaactgttcagtt

SEQ ID NO: 4721922 - DNA, 25 bp, Homo sapien
cgagttcagacgaactgttcagttt

SEQ ID NO: 4721923 - DNA, 25 bp, Homo sapien
ctgtgaacaagggaaatgtctttat

SEQ ID NO: 4721924 - DNA, 25 bp, Homo sapien
cttgatgggtgaggaacgggctggt

SEQ ID NO: 4721925 - DNA, 25 bp, Homo sapien
tgatgggtgaggaacgggctggtcc

SEQ ID NO: 4721926 - DNA, 25 bp, Homo sapien
ttgaacacttgatgggtgaggaacg

SEQ ID NO: 4721927 - DNA, 25 bp, Homo sapien
ctgttgaacacttgatgggtgagga

SEQ ID NO: 4721928 - DNA, 25 bp, Homo sapien
tcctctcccatgctttcagcaacca

SEQ ID NO: 4721929 - DNA, 25 bp, Homo sapien
tctcccatgctttcagcaaccagtt

SEQ ID NO: 4721930 - DNA, 25 bp, Homo sapien
ctggaatacctctgcactcctctcc

SEQ ID NO: 4721931 - DNA, 25 bp, Homo sapien
ggaatacctctgcactcctctccca

SEQ ID NO: 4721932 - DNA, 25 bp, Homo sapien
tgcagatgactcacaaccaaagatc

SEQ ID NO: 4721933 - DNA, 25 bp, Homo sapien
ccaaagatccacaacaaatcgtcca

SEQ ID NO: 4721934 - DNA, 25 bp, Homo sapien
gactcacaaccaaagatccacaaca

SEQ ID NO: 4721935 - DNA, 25 bp, Homo sapien
tccacaacaaatcgtccagatcttt

SEQ ID NO: 4721936 - DNA, 25 bp, Homo sapien
agttgatgccctgctcgcttgagac

SEQ ID NO: 4721937 - DNA, 25 bp, Homo sapien
gccatcctcaaaaagccgaaaattg

SEQ ID NO: 4721938 - DNA, 25 bp, Homo sapien
gaaaattgatctgccgctgagcggc

SEQ ID NO: 4721939 - DNA, 25 bp, Homo sapien
ggagttgatgccctgctcgcttgag

SEQ ID NO: 4721940 - DNA, 25 bp, Homo sapien
catgggaaccatggtagattgcaaa

SEQ ID NO: 4721941 - DNA, 25 bp, Homo sapien
caatatgctccagcccatgggaacc

SEQ ID NO: 4721942 - DNA, 25 bp, Homo sapien
tcctagcaatatgctccagcccatg

SEQ ID NO: 4721943 - DNA, 25 bp, Homo sapien
atgctccagcccatgggaaccatgg

SEQ ID NO: 4721944 - DNA, 25 bp, Homo sapien
cttgtctctccgaatgtgttgctcc

SEQ ID NO: 4721945 - DNA, 25 bp, Homo sapien
tctctccgaatgtgttgctccctgg

SEQ ID NO: 4721946 - DNA, 25 bp, Homo sapien
tgctggtagccttgtctctccgaat

SEQ ID NO: 4721947 - DNA, 25 bp, Homo sapien
tagccttgtctctccgaatgtgttg

SEQ ID NO: 4721948 - DNA, 25 bp, Homo sapien
gcactgggagatgctataaatagaa

SEQ ID NO: 4721949 - DNA, 25 bp, Homo sapien
gttagcacagataatcacagcactg

SEQ ID NO: 4721950 - DNA, 25 bp, Homo sapien
aatcacagcactgggagatgctata

SEQ ID NO: 4721951 - DNA, 25 bp, Homo sapien
ggcatccagttagcacagataatca

SEQ ID NO: 4721952 - DNA, 25 bp, Homo sapien
cccatagcccagtggcactccaaat

SEQ ID NO: 4721953 - DNA, 25 bp, Homo sapien
ccccatagcccagtggcactccaaa

SEQ ID NO: 4721954 - DNA, 25 bp, Homo sapien
catagcccagtggcactccaaatct

SEQ ID NO: 4721955 - DNA, 25 bp, Homo sapien
tagcccagtggcactccaaatctct

SEQ ID NO: 4721956 - DNA, 25 bp, Homo sapien
acaaagctaaaaggtcagtagcaca

SEQ ID NO: 4721957 - DNA, 25 bp, Homo sapien
cttcccctccgtgtctgggtactgg

SEQ ID NO: 4721958 - DNA, 25 bp, Homo sapien
tccacgagttccgtaaagtcttcca

SEQ ID NO: 4721959 - DNA, 25 bp, Homo sapien
catttcacagggtaacttcagctca

SEQ ID NO: 4721960 - DNA, 25 bp, Homo sapien
agctctctccacgagttccgtaaag

SEQ ID NO: 4721961 - DNA, 25 bp, Homo sapien
gcaacggggatcaacgagaaatttc

SEQ ID NO: 4721962 - DNA, 25 bp, Homo sapien
gggatcaacgagaaatttcctcctc

SEQ ID NO: 4721963 - DNA, 25 bp, Homo sapien
gatcaacgagaaatttcctcctctt

SEQ ID NO: 4721964 - DNA, 25 bp, Homo sapien
tgtgggtggcaacggggatcaacga

SEQ ID NO: 4721965 - DNA, 25 bp, Homo sapien
catgtccaggcctgtgatgtcacac

SEQ ID NO: 4721966 - DNA, 25 bp, Homo sapien
tggccatgtccaggcctgtgatgtc

SEQ ID NO: 4721967 - DNA, 25 bp, Homo sapien
cctgagacacctcaggctggtatgg

SEQ ID NO: 4721968 - DNA, 25 bp, Homo sapien
ctggtatggagtatactgggtgatc

SEQ ID NO: 4721969 - DNA, 25 bp, Homo sapien
gcacttgaggctacctataatatca

SEQ ID NO: 4721970 - DNA, 25 bp, Homo sapien
tattctttgtacagccagggttttg

SEQ ID NO: 4721971 - DNA, 25 bp, Homo sapien
tcactgagcctcaatgtacaaggct

SEQ ID NO: 4721972 - DNA, 25 bp, Homo sapien
gccactgcacttgaggctacctata

SEQ ID NO: 4721973 - DNA, 25 bp, Homo sapien
catgcagagttgcaaggatttcatt

SEQ ID NO: 4721974 - DNA, 25 bp, Homo sapien
tgaaatggcatgcagagttgcaagg

SEQ ID NO: 4721975 - DNA, 25 bp, Homo sapien
tcctgagttctccagtaagttccgc

SEQ ID NO: 4721976 - DNA, 25 bp, Homo sapien
agtaagttccgcaaaatcgtctgtg

SEQ ID NO: 4721977 - DNA, 25 bp, Homo sapien
tgtctaagtccaagttaagggacat

SEQ ID NO: 4721978 - DNA, 25 bp, Homo sapien
acttcacagaatccagtgtctaagt

SEQ ID NO: 4721979 - DNA, 25 bp, Homo sapien
ccagtgtctaagtccaagttaaggg

SEQ ID NO: 4721980 - DNA, 25 bp, Homo sapien
cttcacagaatccagtgtctaagtc

SEQ ID NO: 4721981 - DNA, 25 bp, Homo sapien
caacattcaagtgcttgccgaatta

SEQ ID NO: 4721982 - DNA, 25 bp, Homo sapien
catcagggatgatcccgcaacaaca

SEQ ID NO: 4721983 - DNA, 25 bp, Homo sapien
gatatacttcgacatttatctgaat

SEQ ID NO: 4721984 - DNA, 25 bp, Homo sapien
tgccgaattatgtcttgcacattgc

SEQ ID NO: 4721985 - DNA, 25 bp, Homo sapien
gcagggaccgtcttctcgatcaatt

SEQ ID NO: 4721986 - DNA, 25 bp, Homo sapien
tcttccattttcaagggtcttttca

SEQ ID NO: 4721987 - DNA, 25 bp, Homo sapien
gggaccgtcttctcgatcaattcat

SEQ ID NO: 4721988 - DNA, 25 bp, Homo sapien
tcttctcgatcaattcatcaatgct

SEQ ID NO: 4721989 - DNA, 25 bp, Homo sapien
ggccgatgtgcctccgagcgaagtc

SEQ ID NO: 4721990 - DNA, 25 bp, Homo sapien
cgatgtgcctccgagcgaagtcgtc

SEQ ID NO: 4721991 - DNA, 25 bp, Homo sapien
cagggccgatgtgcctccgagcgaa

SEQ ID NO: 4721992 - DNA, 25 bp, Homo sapien
gtgcctccgagcgaagtcgtcgtgt

SEQ ID NO: 4721993 - DNA, 25 bp, Homo sapien
cgatcccccagccaggcggcggccg

SEQ ID NO: 4721994 - DNA, 25 bp, Homo sapien
tccgcggcgcccagcacggccccga

SEQ ID NO: 4721995 - DNA, 25 bp, Homo sapien
tccaggaggcgcgaggccccagccg

SEQ ID NO: 4721996 - DNA, 25 bp, Homo sapien
actgctgctgtcccggctccgcggc

SEQ ID NO: 4721997 - DNA, 25 bp, Homo sapien
ccgcaagggtcagccgcgctcttgg

SEQ ID NO: 4721998 - DNA, 25 bp, Homo sapien
gagcccctttcgctggacagtcggc

SEQ ID NO: 4721999 - DNA, 25 bp, Homo sapien
tcaaccaagacactcgcgcaaagtt

SEQ ID NO: 4722000 - DNA, 25 bp, Homo sapien
tgaatgggcgctgcgctcaaccaag

SEQ ID NO: 4722001 - DNA, 25 bp, Homo sapien
aaaaaagccggtattgtgacacata

SEQ ID NO: 4722002 - DNA, 25 bp, Homo sapien
tgtggtcctagttataatcacacca

SEQ ID NO: 4722003 - DNA, 25 bp, Homo sapien
cttaaatgagaaagaaatcgccagg

SEQ ID NO: 4722004 - DNA, 25 bp, Homo sapien
atgagaaagaaatcgccaggtgcag

SEQ ID NO: 4722005 - DNA, 25 bp, Homo sapien
ctttgcttcgaagttcttctaaagc

SEQ ID NO: 4722006 - DNA, 25 bp, Homo sapien
cacctttgcttcgaagttcttctaa

SEQ ID NO: 4722007 - DNA, 25 bp, Homo sapien
gtttgattcacctttgcttcgaagt

SEQ ID NO: 4722008 - DNA, 25 bp, Homo sapien
gattcacctttgcttcgaagttctt

SEQ ID NO: 4722009 - DNA, 25 bp, Homo sapien
cctcgctgcagttatcttcagtcct

SEQ ID NO: 4722010 - DNA, 25 bp, Homo sapien
tcgctgcagttatcttcagtccttc

SEQ ID NO: 4722011 - DNA, 25 bp, Homo sapien
gctgcagttatcttcagtccttctt

SEQ ID NO: 4722012 - DNA, 25 bp, Homo sapien
ttgcctcgctgcagttatcttcagt

SEQ ID NO: 4722013 - DNA, 25 bp, Homo sapien
attctttgttgccacttctaagggc

SEQ ID NO: 4722014 - DNA, 25 bp, Homo sapien
ttctttgttgccacttctaagggct

SEQ ID NO: 4722015 - DNA, 25 bp, Homo sapien
ccacaatttctaagccatctgttat

SEQ ID NO: 4722016 - DNA, 25 bp, Homo sapien
caatttctaagccatctgttattgc

SEQ ID NO: 4722017 - DNA, 25 bp, Homo sapien
cacaatttctaagccatctgttatt

SEQ ID NO: 4722018 - DNA, 25 bp, Homo sapien
aaccacaatttctaagccatctgtt

SEQ ID NO: 4722019 - DNA, 25 bp, Homo sapien
tgtaagagagtcactgaggtgttca

SEQ ID NO: 4722020 - DNA, 25 bp, Homo sapien
gtaagagagtcactgaggtgttcat

SEQ ID NO: 4722021 - DNA, 25 bp, Homo sapien
ctgtaagagagtcactgaggtgttc

SEQ ID NO: 4722022 - DNA, 25 bp, Homo sapien
atgctggacccctcaaggatttaaa

SEQ ID NO: 4722023 - DNA, 25 bp, Homo sapien
tgatatggcataggaaacccaaccc

SEQ ID NO: 4722024 - DNA, 25 bp, Homo sapien
tctatctgtatgactgggcctttgg

SEQ ID NO: 4722025 - DNA, 25 bp, Homo sapien
caaacatagcaccttggaagttgag

SEQ ID NO: 4722026 - DNA, 25 bp, Homo sapien
aaaacagcatatactggaaggccac

SEQ ID NO: 4722027 - DNA, 25 bp, Homo sapien
tgcccaagtatctccccagctctga

SEQ ID NO: 4722028 - DNA, 25 bp, Homo sapien
cccagctctgacgaaacaggcaact

SEQ ID NO: 4722029 - DNA, 25 bp, Homo sapien
gctctgacgaaacaggcaacttcca

SEQ ID NO: 4722030 - DNA, 25 bp, Homo sapien
gcaacttccagactgtggcgttagc

SEQ ID NO: 4722031 - DNA, 25 bp, Homo sapien
agctgacccacatgcgttgcggagg

SEQ ID NO: 4722032 - DNA, 25 bp, Homo sapien
ctgagccgccgggaagatcctggtc

SEQ ID NO: 4722033 - DNA, 25 bp, Homo sapien
atgcgttgcggaggcgctgaccacc

SEQ ID NO: 4722034 - DNA, 25 bp, Homo sapien
gatcctggtcccgtcagccagctga

SEQ ID NO: 4722035 - DNA, 25 bp, Homo sapien
tgtcactcaggtagaacagtctcaa

SEQ ID NO: 4722036 - DNA, 25 bp, Homo sapien
gcgagcgtccgctgtcactcaggta

SEQ ID NO: 4722037 - DNA, 25 bp, Homo sapien
cagggagggcggcatccaagtcttt

SEQ ID NO: 4722038 - DNA, 25 bp, Homo sapien
tcaaatcgcaccgttagtaccggcc

SEQ ID NO: 4722039 - DNA, 25 bp, Homo sapien
tgttcgctgcgatatgccggcgtcg

SEQ ID NO: 4722040 - DNA, 25 bp, Homo sapien
tctctagaggaccagagttggcggt

SEQ ID NO: 4722041 - DNA, 25 bp, Homo sapien
caagaaacgcggagacagactactg

SEQ ID NO: 4722042 - DNA, 25 bp, Homo sapien
tgagtgtttgatccccatcctcgca

SEQ ID NO: 4722043 - DNA, 25 bp, Homo sapien
tgctccaaggtctcgggtaaccgat

SEQ ID NO: 4722044 - DNA, 25 bp, Homo sapien
tgccacacaatgaggagagttttgc

SEQ ID NO: 4722045 - DNA, 25 bp, Homo sapien
tcccacttagggaagatggcccaag

SEQ ID NO: 4722046 - DNA, 25 bp, Homo sapien
agagttttgcaaacaaacgcggccg

SEQ ID NO: 4722047 - DNA, 25 bp, Homo sapien
cttgggagggccaggacttccgagg

SEQ ID NO: 4722048 - DNA, 25 bp, Homo sapien
ctgtataggctgatggcccactcac

SEQ ID NO: 4722049 - DNA, 25 bp, Homo sapien
gagaacgtcgcttccagaggaccgt

SEQ ID NO: 4722050 - DNA, 25 bp, Homo sapien
cgtaactggcagtagtaatctggcg

SEQ ID NO: 4722051 - DNA, 25 bp, Homo sapien
tgacactctcgttgcctgtataggc

SEQ ID NO: 4722052 - DNA, 25 bp, Homo sapien
cattcatgtggaagaggctaaagga

SEQ ID NO: 4722053 - DNA, 25 bp, Homo sapien
ttgttgaatagttggagtgttctgc

SEQ ID NO: 4722054 - DNA, 25 bp, Homo sapien
gatgaagcactatgggctgccctgg

SEQ ID NO: 4722055 - DNA, 25 bp, Homo sapien
ggtctgtgacctgaaagttgttgaa

SEQ ID NO: 4722056 - DNA, 25 bp, Homo sapien
gtgctgctctgaacataatccagga

SEQ ID NO: 4722057 - DNA, 25 bp, Homo sapien
ttgtacatagttggtggttctgtca

SEQ ID NO: 4722058 - DNA, 25 bp, Homo sapien
gctgctctgaacataatccaggaca

SEQ ID NO: 4722059 - DNA, 25 bp, Homo sapien
ccaggacactttgtacatagttggt

SEQ ID NO: 4722060 - DNA, 25 bp, Homo sapien
tctttggctaccatggtcaccctcc

SEQ ID NO: 4722061 - DNA, 25 bp, Homo sapien
tctcgggcaggtggtcccatcaata

SEQ ID NO: 4722062 - DNA, 25 bp, Homo sapien
ctttcctcaactctcgggcaggtgg

SEQ ID NO: 4722063 - DNA, 25 bp, Homo sapien
cagggaatgaatgcttcaagaccac

SEQ ID NO: 4722064 - DNA, 25 bp, Homo sapien
gcaatctatctcaatttggattcat

SEQ ID NO: 4722065 - DNA, 25 bp, Homo sapien
gcaatacattatctttccctggcta

SEQ ID NO: 4722066 - DNA, 25 bp, Homo sapien
gcagtgggcaatacattatctttcc

SEQ ID NO: 4722067 - DNA, 25 bp, Homo sapien
aatgcagtgggcaatacattatctt

SEQ ID NO: 4722068 - DNA, 25 bp, Homo sapien
tgtatccttctcaacaatttctcac

SEQ ID NO: 4722069 - DNA, 25 bp, Homo sapien
ctgtatccttctcaacaatttctca

SEQ ID NO: 4722070 - DNA, 25 bp, Homo sapien
gtatccttctcaacaatttctcact

SEQ ID NO: 4722071 - DNA, 25 bp, Homo sapien
tctggccctggccactgtatgccat

SEQ ID NO: 4722072 - DNA, 25 bp, Homo sapien
tcatagagccacacctgaatctgcg

SEQ ID NO: 4722073 - DNA, 25 bp, Homo sapien
agcatgatccgacccagttgttttc

SEQ ID NO: 4722074 - DNA, 25 bp, Homo sapien
agccttctatctgcatattcacttg

SEQ ID NO: 4722075 - DNA, 25 bp, Homo sapien
tgaagaaaatggatttcaggtttcc

SEQ ID NO: 4722076 - DNA, 25 bp, Homo sapien
ccctagctgcttgattgtggacata

SEQ ID NO: 4722077 - DNA, 25 bp, Homo sapien
taatatagcatatggcttccaaaag

SEQ ID NO: 4722078 - DNA, 25 bp, Homo sapien
tggtgcacaagatttctaatatagc

SEQ ID NO: 4722079 - DNA, 25 bp, Homo sapien
tctagtctcagacgctggaggcacc

SEQ ID NO: 4722080 - DNA, 25 bp, Homo sapien
tatcttaagagcacacttgggcggg

SEQ ID NO: 4722081 - DNA, 25 bp, Homo sapien
gacacctcggaaggcggagttacag

SEQ ID NO: 4722082 - DNA, 25 bp, Homo sapien
caccccagtgagaaacgagttcaag

SEQ ID NO: 4722083 - DNA, 25 bp, Homo sapien
tattcgggatctcccattgtgggaa

SEQ ID NO: 4722084 - DNA, 25 bp, Homo sapien
ctccagtacattccgaggctccacc

SEQ ID NO: 4722085 - DNA, 25 bp, Homo sapien
ggtgaagggagaacgggaacacagc

SEQ ID NO: 4722086 - DNA, 25 bp, Homo sapien
tgtcatcgccggagagctgcgagcc

SEQ ID NO: 4722087 - DNA, 25 bp, Homo sapien
tgcgggaccccagccagcgcttccg

SEQ ID NO: 4722088 - DNA, 25 bp, Homo sapien
tcaggtccagccctgcgggacccca

SEQ ID NO: 4722089 - DNA, 25 bp, Homo sapien
agccagcgcttccgggcaaggttct

SEQ ID NO: 4722090 - DNA, 25 bp, Homo sapien
cgcttccgggcaaggttctgtgcac

SEQ ID NO: 4722091 - DNA, 25 bp, Homo sapien
tacgcgagtatctttcccctccgga

SEQ ID NO: 4722092 - DNA, 25 bp, Homo sapien
aggacaagaagatgcgcgccagcaa

SEQ ID NO: 4722093 - DNA, 25 bp, Homo sapien
tgttttctccttctacgcgagtatc

SEQ ID NO: 4722094 - DNA, 25 bp, Homo sapien
aaagaatgggatatgcctgtgtcca

SEQ ID NO: 4722095 - DNA, 25 bp, Homo sapien
cgcgcgccaggtaaccgcttttccg

SEQ ID NO: 4722096 - DNA, 25 bp, Homo sapien
cgagtcgtgctctcgccccaacccg

SEQ ID NO: 4722097 - DNA, 25 bp, Homo sapien
tccaccgagtcgtgctctcgcccca

SEQ ID NO: 4722098 - DNA, 25 bp, Homo sapien
ctcctccaccgagtcgtgctctcgc

SEQ ID NO: 4722099 - DNA, 25 bp, Homo sapien
ggggccggtgacagcccgctccggc

SEQ ID NO: 4722100 - DNA, 25 bp, Homo sapien
cgaggttcggtacccgcgctcgccg

SEQ ID NO: 4722101 - DNA, 25 bp, Homo sapien
cgctcgggcggtcctgggatgcgga

SEQ ID NO: 4722102 - DNA, 25 bp, Homo sapien
cagaggagcgctcgggcggtcctgg

SEQ ID NO: 4722103 - DNA, 25 bp, Homo sapien
gcggtcctgggatgcggacctctta

SEQ ID NO: 4722104 - DNA, 25 bp, Homo sapien
ggatgcggacctcttaacgccgcca

SEQ ID NO: 4722105 - DNA, 25 bp, Homo sapien
aaggccgggcctggtgcacccctcg

SEQ ID NO: 4722106 - DNA, 25 bp, Homo sapien
ctgtggcggactccaggaaggccgg

SEQ ID NO: 4722107 - DNA, 25 bp, Homo sapien
gcctggtgcacccctcggggccctc

SEQ ID NO: 4722108 - DNA, 25 bp, Homo sapien
gtggcggactccaggaaggccgggc

SEQ ID NO: 4722109 - DNA, 25 bp, Homo sapien
gggtcgtcttcagccctcgcggctg

SEQ ID NO: 4722110 - DNA, 25 bp, Homo sapien
gcaggcagtcatcccgtcattcggg

SEQ ID NO: 4722111 - DNA, 25 bp, Homo sapien
tcattcggggtcgtcttcagccctc

SEQ ID NO: 4722112 - DNA, 25 bp, Homo sapien
ctctcctgaccacccgttgcaggca

SEQ ID NO: 4722113 - DNA, 25 bp, Homo sapien
tggctggctctgattgtgggcaata

SEQ ID NO: 4722114 - DNA, 25 bp, Homo sapien
gccagcagccgggattcagatgctt

SEQ ID NO: 4722115 - DNA, 25 bp, Homo sapien
tccgcgtggacttgatgctgggctc

SEQ ID NO: 4722116 - DNA, 25 bp, Homo sapien
tttcctctgtgctccgccagtaaag

SEQ ID NO: 4722117 - DNA, 25 bp, Homo sapien
ttgctggcctccgcgcaacccgccc

SEQ ID NO: 4722118 - DNA, 25 bp, Homo sapien
cttgctggcctccgcgcaacccgcc

SEQ ID NO: 4722119 - DNA, 25 bp, Homo sapien
taggtttgtatattgagtttgaccc

SEQ ID NO: 4722120 - DNA, 25 bp, Homo sapien
tgagcccgcgtgctgggcctcaatc

SEQ ID NO: 4722121 - DNA, 25 bp, Homo sapien
tagcacttaggtttgtatattgagt

SEQ ID NO: 4722122 - DNA, 25 bp, Homo sapien
tcctatagcacttaggtttgtatat

SEQ ID NO: 4722123 - DNA, 25 bp, Homo sapien
taattctcatactgttattaaaaac

SEQ ID NO: 4722124 - DNA, 25 bp, Homo sapien
gatcgggaatttgtaaacatctgca

SEQ ID NO: 4722125 - DNA, 25 bp, Homo sapien
tataacagtaaaaagttaagagatc

SEQ ID NO: 4722126 - DNA, 25 bp, Homo sapien
ggattctggctcatattgcttctca

SEQ ID NO: 4722127 - DNA, 25 bp, Homo sapien
ccagaatgcagtctcttgaaggtgc

SEQ ID NO: 4722128 - DNA, 25 bp, Homo sapien
tgattcagtcttggctttttggtcc

SEQ ID NO: 4722129 - DNA, 25 bp, Homo sapien
gaaggtgcagattcttcaggcattg

SEQ ID NO: 4722130 - DNA, 25 bp, Homo sapien
cattatgcctatgatgattcagtct

SEQ ID NO: 4722131 - DNA, 25 bp, Homo sapien
agtcatagtggatcagggccgaccc

SEQ ID NO: 4722132 - DNA, 25 bp, Homo sapien
gggccgaccctaatcaaatatgacc

SEQ ID NO: 4722133 - DNA, 25 bp, Homo sapien
caatgcccagccaaagcagtgtgca

SEQ ID NO: 4722134 - DNA, 25 bp, Homo sapien
ggacacaagtcaatccctaacaatg

SEQ ID NO: 4722135 - DNA, 25 bp, Homo sapien
ggagtgttgtaaactgcttctggta

SEQ ID NO: 4722136 - DNA, 25 bp, Homo sapien
acaaaaccaatcacactcaagacac

SEQ ID NO: 4722137 - DNA, 25 bp, Homo sapien
cagctcctgagttggactgacattt

SEQ ID NO: 4722138 - DNA, 25 bp, Homo sapien
gaaagacatgagaggagtgttgtaa

SEQ ID NO: 4722139 - DNA, 25 bp, Homo sapien
taagagaagtaatttgtgcaaggtg

SEQ ID NO: 4722140 - DNA, 25 bp, Homo sapien
tgcaaagatggatacgaatcctgct

SEQ ID NO: 4722141 - DNA, 25 bp, Homo sapien
gatggatacgaatcctgcttctcaa

SEQ ID NO: 4722142 - DNA, 25 bp, Homo sapien
tgtgcaaggtgcaaagatggatacg

SEQ ID NO: 4722143 - DNA, 25 bp, Homo sapien
tgcagtgggcttgactctttgcagc

SEQ ID NO: 4722144 - DNA, 25 bp, Homo sapien
tggagggacagttggtgcagtgggc

SEQ ID NO: 4722145 - DNA, 25 bp, Homo sapien
tggtgcagtgggcttgactctttgc

SEQ ID NO: 4722146 - DNA, 25 bp, Homo sapien
acagttggtgcagtgggcttgactc

SEQ ID NO: 4722147 - DNA, 25 bp, Homo sapien
gaggcagtatgagcaggcctgcatt

SEQ ID NO: 4722148 - DNA, 25 bp, Homo sapien
gactaagttccagtgaaaggagaga

SEQ ID NO: 4722149 - DNA, 25 bp, Homo sapien
gcattcaagtaagactttctggagt

SEQ ID NO: 4722150 - DNA, 25 bp, Homo sapien
tgggaccagagctaggtaaattgaa

SEQ ID NO: 4722151 - DNA, 25 bp, Homo sapien
ggtcgtggatctgacccatggcccc

SEQ ID NO: 4722152 - DNA, 25 bp, Homo sapien
gaattttgtctcttagccccaggca

SEQ ID NO: 4722153 - DNA, 25 bp, Homo sapien
ctcgaatagcagctgtgggatatgg

SEQ ID NO: 4722154 - DNA, 25 bp, Homo sapien
gggtgaggaaaaactcgaatagcag

SEQ ID NO: 4722155 - DNA, 25 bp, Homo sapien
gctgtcaagttctgccttttgctgg

SEQ ID NO: 4722156 - DNA, 25 bp, Homo sapien
aataaagctttcttggagcccagtc

SEQ ID NO: 4722157 - DNA, 25 bp, Homo sapien
tatatattgaagagcagggtttggc

SEQ ID NO: 4722158 - DNA, 25 bp, Homo sapien
ggacagtaacctatggcaacagtaa

SEQ ID NO: 4722159 - DNA, 25 bp, Homo sapien
agattttccctttgctgagcggtga

SEQ ID NO: 4722160 - DNA, 25 bp, Homo sapien
tgagcggtgacacatagctcctcct

SEQ ID NO: 4722161 - DNA, 25 bp, Homo sapien
tataaccctagatggaccttccagt

SEQ ID NO: 4722162 - DNA, 25 bp, Homo sapien
tgtgtattcaagtcgtctttgcaag

SEQ ID NO: 4722163 - DNA, 25 bp, Homo sapien
aatcacgttgctccttcgttgctgc

SEQ ID NO: 4722164 - DNA, 25 bp, Homo sapien
caaaggtgtcccctaccctctcctg

SEQ ID NO: 4722165 - DNA, 25 bp, Homo sapien
acttgctttgaaacttagctccttc

SEQ ID NO: 4722166 - DNA, 25 bp, Homo sapien
ttagctccttcactgaatcacgttg

SEQ ID NO: 4722167 - DNA, 25 bp, Homo sapien
aatcttgagtcacatggtgaagctc

SEQ ID NO: 4722168 - DNA, 25 bp, Homo sapien
agaatggctatgagtccactgcaaa

SEQ ID NO: 4722169 - DNA, 25 bp, Homo sapien
tgagaatggctatgagtccactgca

SEQ ID NO: 4722170 - DNA, 25 bp, Homo sapien
gagaatggctatgagtccactgcaa

SEQ ID NO: 4722171 - DNA, 25 bp, Homo sapien
catcacttccaactcttcgtaggct

SEQ ID NO: 4722172 - DNA, 25 bp, Homo sapien
ttctgtaggtctcatatgctcactt

SEQ ID NO: 4722173 - DNA, 25 bp, Homo sapien
caactcttcgtaggcttctgtaggt

SEQ ID NO: 4722174 - DNA, 25 bp, Homo sapien
tctgtaggtctcatatgctcactta

SEQ ID NO: 4722175 - DNA, 25 bp, Homo sapien
catggtgagcaatgtgagggatgag

SEQ ID NO: 4722176 - DNA, 25 bp, Homo sapien
ggcaaagtccacaagactgtactga

SEQ ID NO: 4722177 - DNA, 25 bp, Homo sapien
ttatggacattaggcatggtgagca

SEQ ID NO: 4722178 - DNA, 25 bp, Homo sapien
gaatccagggcattatggacattag

SEQ ID NO: 4722179 - DNA, 25 bp, Homo sapien
tactggtttatcgtttggccacgtg

SEQ ID NO: 4722180 - DNA, 25 bp, Homo sapien
taaaaagtgtgtagtcagagttgac

SEQ ID NO: 4722181 - DNA, 25 bp, Homo sapien
gcatatctgtgagtatatcctgcac

SEQ ID NO: 4722182 - DNA, 25 bp, Homo sapien
gcttcatatggtttgggccccttta

SEQ ID NO: 4722183 - DNA, 25 bp, Homo sapien
ttgctacgcccgtcgtcgacaacgg

SEQ ID NO: 4722184 - DNA, 25 bp, Homo sapien
gatgatgatattgctacgcccgtcg

SEQ ID NO: 4722185 - DNA, 25 bp, Homo sapien
gatgatattgctacgcccgtcgtcg

SEQ ID NO: 4722186 - DNA, 25 bp, Homo sapien
catagatgatgatattgctacgccc

SEQ ID NO: 4722187 - DNA, 25 bp, Homo sapien
atcgtgtggcaccccaagcaccagg

SEQ ID NO: 4722188 - DNA, 25 bp, Homo sapien
catgggtcggaaggactcccatgtg

SEQ ID NO: 4722189 - DNA, 25 bp, Homo sapien
cttcgcaggtgacgatgacccccgg

SEQ ID NO: 4722190 - DNA, 25 bp, Homo sapien
ggccgtcttccccttcatcgtgtgg

SEQ ID NO: 4722191 - DNA, 25 bp, Homo sapien
atccagcccgtgctgtccctgtact

SEQ ID NO: 4722192 - DNA, 25 bp, Homo sapien
ctgcatgtggttcccgaggagcatc

SEQ ID NO: 4722193 - DNA, 25 bp, Homo sapien
agcccgtgctgtccctgtacttctt

SEQ ID NO: 4722194 - DNA, 25 bp, Homo sapien
gctgcatgtggttcccgaggagcat

SEQ ID NO: 4722195 - DNA, 25 bp, Homo sapien
ccaccacggctgagtgggatatcgt

SEQ ID NO: 4722196 - DNA, 25 bp, Homo sapien
ccctagcgttgccaacaggatgcag

SEQ ID NO: 4722197 - DNA, 25 bp, Homo sapien
caggagtatgatgagtccggctcca

SEQ ID NO: 4722198 - DNA, 25 bp, Homo sapien
ccatcggcaacgagcagttctgctg

SEQ ID NO: 4722199 - DNA, 25 bp, Homo sapien
ctgtctgggattgtgcttggaaacc

SEQ ID NO: 4722200 - DNA, 25 bp, Homo sapien
tggcacaccgaagacatggacctct

SEQ ID NO: 4722201 - DNA, 25 bp, Homo sapien
aaccccatggtaactcgtacagtca

SEQ ID NO: 4722202 - DNA, 25 bp, Homo sapien
ttctattgagggtgtaaatacccca

SEQ ID NO: 4722203 - DNA, 25 bp, Homo sapien
tctagcaaccatacgtgcaggcagt

SEQ ID NO: 4722204 - DNA, 25 bp, Homo sapien
ggcaccttgtagagctgaggcccta

SEQ ID NO: 4722205 - DNA, 25 bp, Homo sapien
taccaaaacctgtggctgctcacgt

SEQ ID NO: 4722206 - DNA, 25 bp, Homo sapien
taggtaacatagcattcatcccagg

SEQ ID NO: 4722207 - DNA, 25 bp, Homo sapien
cattgcatgtgccttcctggtgcct

SEQ ID NO: 4722208 - DNA, 25 bp, Homo sapien
tgttctccctccatgattctctgtc

SEQ ID NO: 4722209 - DNA, 25 bp, Homo sapien
tccctccatgattctctgtcttttc

SEQ ID NO: 4722210 - DNA, 25 bp, Homo sapien
tcacacatatgcattgcatgtgcct

SEQ ID NO: 4722211 - DNA, 25 bp, Homo sapien
ggtgacaactgagctcattgcagca

SEQ ID NO: 4722212 - DNA, 25 bp, Homo sapien
tgctgggcactggtaagcctgtctc

SEQ ID NO: 4722213 - DNA, 25 bp, Homo sapien
taatggagcttgaaccgtgctgggc

SEQ ID NO: 4722214 - DNA, 25 bp, Homo sapien
tctgctgccaggtgacaactgagct

SEQ ID NO: 4722215 - DNA, 25 bp, Homo sapien
agcgccggccggcaggttgtatttc

SEQ ID NO: 4722216 - DNA, 25 bp, Homo sapien
gccaggttggatcaaagcgccggcc

SEQ ID NO: 4722217 - DNA, 25 bp, Homo sapien
cgccggccggcaggttgtatttcat

SEQ ID NO: 4722218 - DNA, 25 bp, Homo sapien
tgcttcctggccaggttggatcaaa

SEQ ID NO: 4722219 - DNA, 25 bp, Homo sapien
tgtgcttacttcagacatcttgctg

SEQ ID NO: 4722220 - DNA, 25 bp, Homo sapien
catgaggtctcatgcagttcctgtc

SEQ ID NO: 4722221 - DNA, 25 bp, Homo sapien
tctgggcaggcttgtcttgatagct

SEQ ID NO: 4722222 - DNA, 25 bp, Homo sapien
caggaagcgagacagtgtgagaact

SEQ ID NO: 4722223 - DNA, 25 bp, Homo sapien
tcaatgactgcagaatccagtcttc

SEQ ID NO: 4722224 - DNA, 25 bp, Homo sapien
gacatctgaactaatggcttgtaat

SEQ ID NO: 4722225 - DNA, 25 bp, Homo sapien
aatgcttcctgtgtcaatgactgca

SEQ ID NO: 4722226 - DNA, 25 bp, Homo sapien
gcagagaaccaagggggaccactgt

SEQ ID NO: 4722227 - DNA, 25 bp, Homo sapien
cgtcaaggggctgttaggcattcct

SEQ ID NO: 4722228 - DNA, 25 bp, Homo sapien
ctttgtgagcagattacccagtttg

SEQ ID NO: 4722229 - DNA, 25 bp, Homo sapien
aggctgtaggactcaactgtgagag

SEQ ID NO: 4722230 - DNA, 25 bp, Homo sapien
actgaggtaatataaggcgtttgtg

SEQ ID NO: 4722231 - DNA, 25 bp, Homo sapien
tgcacctcgtacctgtgctgcttca

SEQ ID NO: 4722232 - DNA, 25 bp, Homo sapien
gcacctcgtacctgtgctgcttcat

SEQ ID NO: 4722233 - DNA, 25 bp, Homo sapien
ttgcacctcgtacctgtgctgcttc

SEQ ID NO: 4722234 - DNA, 25 bp, Homo sapien
cttgcacctcgtacctgtgctgctt

SEQ ID NO: 4722235 - DNA, 25 bp, Homo sapien
ggtttaggttgaacgccatatcatt

SEQ ID NO: 4722236 - DNA, 25 bp, Homo sapien
taggttgaacgccatatcattctga

SEQ ID NO: 4722237 - DNA, 25 bp, Homo sapien
ttcctggtttaggttgaacgccata

SEQ ID NO: 4722238 - DNA, 25 bp, Homo sapien
gttgaacgccatatcattctgatga

SEQ ID NO: 4722239 - DNA, 25 bp, Homo sapien
ggctgggagtcttcaccacaacact

SEQ ID NO: 4722240 - DNA, 25 bp, Homo sapien
accacaacactagctacataataga

SEQ ID NO: 4722241 - DNA, 25 bp, Homo sapien
aggctgggagtcttcaccacaacac

SEQ ID NO: 4722242 - DNA, 25 bp, Homo sapien
tcagaatcttgggtgtgtggcttgt

SEQ ID NO: 4722243 - DNA, 25 bp, Homo sapien
gggcccatcctggtgtaagtcagaa

SEQ ID NO: 4722244 - DNA, 25 bp, Homo sapien
aatatggctgtgctttagaatcatc

SEQ ID NO: 4722245 - DNA, 25 bp, Homo sapien
cattgtatggtatgaggccgagacc

SEQ ID NO: 4722246 - DNA, 25 bp, Homo sapien
gaatctgtgccgcagctttatcgaa

SEQ ID NO: 4722247 - DNA, 25 bp, Homo sapien
tgcagagctgagtatagaggcccct

SEQ ID NO: 4722248 - DNA, 25 bp, Homo sapien
gaaggatgcctttgatctggattca

SEQ ID NO: 4722249 - DNA, 25 bp, Homo sapien
ttttcatgcagtgcagtggaccatg

SEQ ID NO: 4722250 - DNA, 25 bp, Homo sapien
cataagagatcaaacgtggaggctg

SEQ ID NO: 4722251 - DNA, 25 bp, Homo sapien
tctgcagtaatagcagccacagtgg

SEQ ID NO: 4722252 - DNA, 25 bp, Homo sapien
cattgtcggagaatactggtaggtc

SEQ ID NO: 4722253 - DNA, 25 bp, Homo sapien
tagagcttgttaataccaccatgat

SEQ ID NO: 4722254 - DNA, 25 bp, Homo sapien
ctattggttgcacaattgtgttgtt

SEQ ID NO: 4722255 - DNA, 25 bp, Homo sapien
attggttgcacaattgtgttgtttg

SEQ ID NO: 4722256 - DNA, 25 bp, Homo sapien
tattggttgcacaattgtgttgttt

SEQ ID NO: 4722257 - DNA, 25 bp, Homo sapien
gaaaagctgttacatccagtgaatg

SEQ ID NO: 4722258 - DNA, 25 bp, Homo sapien
taacaactgtgtagcccgtatgaaa

SEQ ID NO: 4722259 - DNA, 25 bp, Homo sapien
tactacgaaagtgacaacagctgtg

SEQ ID NO: 4722260 - DNA, 25 bp, Homo sapien
ccagtgaatgcttgtagatacagaa

SEQ ID NO: 4722261 - DNA, 25 bp, Homo sapien
caagaccttcccaaagtcacaatgg

SEQ ID NO: 4722262 - DNA, 25 bp, Homo sapien
gagagattccttaggggtcaagacc

SEQ ID NO: 4722263 - DNA, 25 bp, Homo sapien
tgatccaagtccctgagagattcct

SEQ ID NO: 4722264 - DNA, 25 bp, Homo sapien
ggagaaaaagcttggccaatattcc

SEQ ID NO: 4722265 - DNA, 25 bp, Homo sapien
ggaagctctttaaagattgtcatag

SEQ ID NO: 4722266 - DNA, 25 bp, Homo sapien
aagatgatttcacactgacacaaat

SEQ ID NO: 4722267 - DNA, 25 bp, Homo sapien
catcaccacactcatctaggggtca

SEQ ID NO: 4722268 - DNA, 25 bp, Homo sapien
taaagattgtcatagaaagtaggaa

SEQ ID NO: 4722269 - DNA, 25 bp, Homo sapien
cacagtgggatacaagaggagcacc

SEQ ID NO: 4722270 - DNA, 25 bp, Homo sapien
aaatcagctactgggtcggttatgc

SEQ ID NO: 4722271 - DNA, 25 bp, Homo sapien
tgtactttgtatgctcaacagcctg

SEQ ID NO: 4722272 - DNA, 25 bp, Homo sapien
tatgtcagagtcgtgaggaacccta

SEQ ID NO: 4722273 - DNA, 25 bp, Homo sapien
ccaagtggttgcttttgctatctta

SEQ ID NO: 4722274 - DNA, 25 bp, Homo sapien
aaaggcaggacattcaccattgggc

SEQ ID NO: 4722275 - DNA, 25 bp, Homo sapien
caaggccgactttgatctttataca

SEQ ID NO: 4722276 - DNA, 25 bp, Homo sapien
tccacgggatactgtcaagaccagg

SEQ ID NO: 4722277 - DNA, 25 bp, Homo sapien
gattattctgaattgctgcagactt

SEQ ID NO: 4722278 - DNA, 25 bp, Homo sapien
tattctgaattgctgcagacttaaa

SEQ ID NO: 4722279 - DNA, 25 bp, Homo sapien
ttctgaattgctgcagacttaaacc

SEQ ID NO: 4722280 - DNA, 25 bp, Homo sapien
ttattctgaattgctgcagacttaa

SEQ ID NO: 4722281 - DNA, 25 bp, Homo sapien
gaagccgtcctgttagggaactgct

SEQ ID NO: 4722282 - DNA, 25 bp, Homo sapien
catagctatgatgtggaagccgtcc

SEQ ID NO: 4722283 - DNA, 25 bp, Homo sapien
caaacagaagagcacataagaggat

SEQ ID NO: 4722284 - DNA, 25 bp, Homo sapien
cagttatcctgacagcatagctatg

SEQ ID NO: 4722285 - DNA, 25 bp, Homo sapien
gccacatatccagaaatggttctcc

SEQ ID NO: 4722286 - DNA, 25 bp, Homo sapien
ctgtccttcggtgagagatcctgtc

SEQ ID NO: 4722287 - DNA, 25 bp, Homo sapien
cagccctgataatgagccacatatc

SEQ ID NO: 4722288 - DNA, 25 bp, Homo sapien
cagctctgtccttcggtgagagatc

SEQ ID NO: 4722289 - DNA, 25 bp, Homo sapien
ccgctggaatagagacatgtcaaaa

SEQ ID NO: 4722290 - DNA, 25 bp, Homo sapien
gcggattttgcaggctggcacttga

SEQ ID NO: 4722291 - DNA, 25 bp, Homo sapien
gattgtatatccctataaggcagta

SEQ ID NO: 4722292 - DNA, 25 bp, Homo sapien
gggccaaagcatattacagggtccg

SEQ ID NO: 4722293 - DNA, 25 bp, Homo sapien
tttgcatataaccttcctcaatttc

SEQ ID NO: 4722294 - DNA, 25 bp, Homo sapien
attgtaagtttgcatataaccttcc

SEQ ID NO: 4722295 - DNA, 25 bp, Homo sapien
tatattgtaagtttgcatataacct

SEQ ID NO: 4722296 - DNA, 25 bp, Homo sapien
ttgcatataaccttcctcaatttct

SEQ ID NO: 4722297 - DNA, 25 bp, Homo sapien
gaagttgtagcagatcctaaatgca

SEQ ID NO: 4722298 - DNA, 25 bp, Homo sapien
cataacaaacttagcattgagacca

SEQ ID NO: 4722299 - DNA, 25 bp, Homo sapien
ctcgggagcctatcgcaggagaatt

SEQ ID NO: 4722300 - DNA, 25 bp, Homo sapien
tcaatgcagcggatgtctgttctga

SEQ ID NO: 4722301 - DNA, 25 bp, Homo sapien
aatgccatttccttgcatggtacag

SEQ ID NO: 4722302 - DNA, 25 bp, Homo sapien
gcatgttgaaaagcgatcttgttca

SEQ ID NO: 4722303 - DNA, 25 bp, Homo sapien
tttgagcacggacatcgcatgttga

SEQ ID NO: 4722304 - DNA, 25 bp, Homo sapien
gatcttgttcaggacggttttgcta

SEQ ID NO: 4722305 - DNA, 25 bp, Homo sapien
tgtagaggaaatgaattcgacaatc

SEQ ID NO: 4722306 - DNA, 25 bp, Homo sapien
aatgaattcgacaatctctcagaag

SEQ ID NO: 4722307 - DNA, 25 bp, Homo sapien
ggaaatgaattcgacaatctctcag

SEQ ID NO: 4722308 - DNA, 25 bp, Homo sapien
gaattcgacaatctctcagaaggca

SEQ ID NO: 4722309 - DNA, 25 bp, Homo sapien
tcacttccccataagaacaaagagg

SEQ ID NO: 4722310 - DNA, 25 bp, Homo sapien
aaagaggtaaattcattgccgatgg

SEQ ID NO: 4722311 - DNA, 25 bp, Homo sapien
taatgaccaacagttctttgcagca

SEQ ID NO: 4722312 - DNA, 25 bp, Homo sapien
gcataaattcctataagctcttgtt

SEQ ID NO: 4722313 - DNA, 25 bp, Homo sapien
tcagtttcaatagtcaggtgaaaga

SEQ ID NO: 4722314 - DNA, 25 bp, Homo sapien
cagtttcaatagtcaggtgaaagat

SEQ ID NO: 4722315 - DNA, 25 bp, Homo sapien
agtttcaatagtcaggtgaaagatg

SEQ ID NO: 4722316 - DNA, 25 bp, Homo sapien
agcttgctgtacatgtggcgggtgg

SEQ ID NO: 4722317 - DNA, 25 bp, Homo sapien
tcagcttgctgtacatgtggcgggt

SEQ ID NO: 4722318 - DNA, 25 bp, Homo sapien
ttcagcttgctgtacatgtggcggg

SEQ ID NO: 4722319 - DNA, 25 bp, Homo sapien
cttcagcttgctgtacatgtggcgg

SEQ ID NO: 4722320 - DNA, 25 bp, Homo sapien
tttaggctctgggatcaaagacctc

SEQ ID NO: 4722321 - DNA, 25 bp, Homo sapien
acatgtgaggatctccagcacaatt

SEQ ID NO: 4722322 - DNA, 25 bp, Homo sapien
cacaattaaaggaaagttgatcaac

SEQ ID NO: 4722323 - DNA, 25 bp, Homo sapien
tccaggttccacatgtgaggatctc

SEQ ID NO: 4722324 - DNA, 25 bp, Homo sapien
gtgtgtgaggaacagcagagggaag

SEQ ID NO: 4722325 - DNA, 25 bp, Homo sapien
gcagagggaagcctgtgctgttgtc

SEQ ID NO: 4722326 - DNA, 25 bp, Homo sapien
cgtgtgtgaggaacagcagagggaa

SEQ ID NO: 4722327 - DNA, 25 bp, Homo sapien
acagcagagggaagcctgtgctgtt

SEQ ID NO: 4722328 - DNA, 25 bp, Homo sapien
cagagagctagttgccggctaatgg

SEQ ID NO: 4722329 - DNA, 25 bp, Homo sapien
caggtgttttccacttagcctggcc

SEQ ID NO: 4722330 - DNA, 25 bp, Homo sapien
gaaaggtgttttggtggtcgatatc

SEQ ID NO: 4722331 - DNA, 25 bp, Homo sapien
tagaaattgaatcagagcaggaacc

SEQ ID NO: 4722332 - DNA, 25 bp, Homo sapien
ggtgatctgatttttttgtcccatg

SEQ ID NO: 4722333 - DNA, 25 bp, Homo sapien
gatcttatacccaagctctttggcc

SEQ ID NO: 4722334 - DNA, 25 bp, Homo sapien
gccttttgcattggcaaactgaaaa

SEQ ID NO: 4722335 - DNA, 25 bp, Homo sapien
ttttgtcccatgtggatcttatacc

SEQ ID NO: 4722336 - DNA, 25 bp, Homo sapien
gcttgctgggcacttcttctgtggg

SEQ ID NO: 4722337 - DNA, 25 bp, Homo sapien
ttttactgccgtgaagcttgctggg

SEQ ID NO: 4722338 - DNA, 25 bp, Homo sapien
tattgatacataggcacccatagag

SEQ ID NO: 4722339 - DNA, 25 bp, Homo sapien
tatatgtagctacacttagaggcac

SEQ ID NO: 4722340 - DNA, 25 bp, Homo sapien
cctctgttgtggccacccctctttt

SEQ ID NO: 4722341 - DNA, 25 bp, Homo sapien
tctgttgtggccacccctcttttga

SEQ ID NO: 4722342 - DNA, 25 bp, Homo sapien
ctctgttgtggccacccctcttttg

SEQ ID NO: 4722343 - DNA, 25 bp, Homo sapien
tatactgtgacaggtgcctttaata

SEQ ID NO: 4722344 - DNA, 25 bp, Homo sapien
cagacacttagctcgtatactgtga

SEQ ID NO: 4722345 - DNA, 25 bp, Homo sapien
ctagaggagtatggcagttggtcaa

SEQ ID NO: 4722346 - DNA, 25 bp, Homo sapien
tggtcaaggtactccccagacactt

SEQ ID NO: 4722347 - DNA, 25 bp, Homo sapien
tgccccgcaggtagctgtcatgaag

SEQ ID NO: 4722348 - DNA, 25 bp, Homo sapien
tcttgggagccatcaggttggaact

SEQ ID NO: 4722349 - DNA, 25 bp, Homo sapien
tgtgtctggtctcggtaactcttgg

SEQ ID NO: 4722350 - DNA, 25 bp, Homo sapien
ggttggaactcatccagctgtgtct

SEQ ID NO: 4722351 - DNA, 25 bp, Homo sapien
taggcatcaaattccagagattttt

SEQ ID NO: 4722352 - DNA, 25 bp, Homo sapien
ttaggcatcaaattccagagatttt

SEQ ID NO: 4722353 - DNA, 25 bp, Homo sapien
ttaggaaagaatgacctgtcctcca

SEQ ID NO: 4722354 - DNA, 25 bp, Homo sapien
tgtcctccaaacccatattctactt

SEQ ID NO: 4722355 - DNA, 25 bp, Homo sapien
ggaaagaatgacctgtcctccaaac

SEQ ID NO: 4722356 - DNA, 25 bp, Homo sapien
gaaagaatgacctgtcctccaaacc

SEQ ID NO: 4722357 - DNA, 25 bp, Homo sapien
gcatcttctgcagacaccgggttaa

SEQ ID NO: 4722358 - DNA, 25 bp, Homo sapien
ggagcctgcatccagtgttcctacg

SEQ ID NO: 4722359 - DNA, 25 bp, Homo sapien
agtgttcctacggtcgctgcccggc

SEQ ID NO: 4722360 - DNA, 25 bp, Homo sapien
ccggcctccttccatgtcacttgtg

SEQ ID NO: 4722361 - DNA, 25 bp, Homo sapien
gatgagctcctattatgttgatcaa

SEQ ID NO: 4722362 - DNA, 25 bp, Homo sapien
aaataatttctcgagcatttgatga

SEQ ID NO: 4722363 - DNA, 25 bp, Homo sapien
tatgttgatcaatcttcaaagtctg

SEQ ID NO: 4722364 - DNA, 25 bp, Homo sapien
tctgggaaatgagcttcagaggact

SEQ ID NO: 4722365 - DNA, 25 bp, Homo sapien
ctggtgctgtgggtttctacataca

SEQ ID NO: 4722366 - DNA, 25 bp, Homo sapien
tggtgctgtgggtttctacatacat

SEQ ID NO: 4722367 - DNA, 25 bp, Homo sapien
gctggtgctgtgggtttctacatac

SEQ ID NO: 4722368 - DNA, 25 bp, Homo sapien
ggatttacgccctttattaacatca

SEQ ID NO: 4722369 - DNA, 25 bp, Homo sapien
tattgcatttggatttacgcccttt

SEQ ID NO: 4722370 - DNA, 25 bp, Homo sapien
catcatatgtagatagagaacccag

SEQ ID NO: 4722371 - DNA, 25 bp, Homo sapien
aaggtgacatctccgcccatgactc

SEQ ID NO: 4722372 - DNA, 25 bp, Homo sapien
tcaagttgcagttgcatcttgttcc

SEQ ID NO: 4722373 - DNA, 25 bp, Homo sapien
ttctgtaggcatcatagcgacagtt

SEQ ID NO: 4722374 - DNA, 25 bp, Homo sapien
tctcactgaccccaattctgtaggc

SEQ ID NO: 4722375 - DNA, 25 bp, Homo sapien
gttttacgaattgtgtgtgtctcac

SEQ ID NO: 4722376 - DNA, 25 bp, Homo sapien
ctgctatttcactgccatgagagtg

SEQ ID NO: 4722377 - DNA, 25 bp, Homo sapien
ctgtcgtgagagagggttaagggag

SEQ ID NO: 4722378 - DNA, 25 bp, Homo sapien
ttaagggagtcagggcattggcgca

SEQ ID NO: 4722379 - DNA, 25 bp, Homo sapien
gagggttaagggagtcagggcattg

SEQ ID NO: 4722380 - DNA, 25 bp, Homo sapien
agtcagggcattggcgcacctgctg

SEQ ID NO: 4722381 - DNA, 25 bp, Homo sapien
cagccctgagatcacgagtgggatc

SEQ ID NO: 4722382 - DNA, 25 bp, Homo sapien
tttatatttggagctttcaggagtt

SEQ ID NO: 4722383 - DNA, 25 bp, Homo sapien
tcacgagtgggatcattccagaata

SEQ ID NO: 4722384 - DNA, 25 bp, Homo sapien
tttcaggagttgaacttggaagatt

SEQ ID NO: 4722385 - DNA, 25 bp, Homo sapien
ttttcttctaagcatgttagaaagc

SEQ ID NO: 4722386 - DNA, 25 bp, Homo sapien
ttcttctaagcatgttagaaagctc

SEQ ID NO: 4722387 - DNA, 25 bp, Homo sapien
ttctaagcatgttagaaagctctca

SEQ ID NO: 4722388 - DNA, 25 bp, Homo sapien
ctaagcatgttagaaagctctcact

SEQ ID NO: 4722389 - DNA, 25 bp, Homo sapien
tctggaaacgatagcagctgttggc

SEQ ID NO: 4722390 - DNA, 25 bp, Homo sapien
gagcaggtgattatctctggaaacg

SEQ ID NO: 4722391 - DNA, 25 bp, Homo sapien
cctgccagggtccagtaatgagcag

SEQ ID NO: 4722392 - DNA, 25 bp, Homo sapien
ccagtaatgagcaggtgattatctc

SEQ ID NO: 4722393 - DNA, 25 bp, Homo sapien
cagagtaactgcatcaggtgggaac

SEQ ID NO: 4722394 - DNA, 25 bp, Homo sapien
ggtattgctgcccactcgatgggaa

SEQ ID NO: 4722395 - DNA, 25 bp, Homo sapien
tgcccactcgatgggaaatgtggct

SEQ ID NO: 4722396 - DNA, 25 bp, Homo sapien
caaagtgaaatcgtcaagaggagtg

SEQ ID NO: 4722397 - DNA, 25 bp, Homo sapien
tctagtgaaactaggtggtatgtgg

SEQ ID NO: 4722398 - DNA, 25 bp, Homo sapien
ttctctagtgaaactaggtggtatg

SEQ ID NO: 4722399 - DNA, 25 bp, Homo sapien
tagtgaaactaggtggtatgtgggg

SEQ ID NO: 4722400 - DNA, 25 bp, Homo sapien
tctctagtgaaactaggtggtatgt

SEQ ID NO: 4722401 - DNA, 25 bp, Homo sapien
catgaacagctttacgcttcggtac

SEQ ID NO: 4722402 - DNA, 25 bp, Homo sapien
ctatggaccgtgtgttttcaagtcc

SEQ ID NO: 4722403 - DNA, 25 bp, Homo sapien
gtcccatgaactggctggaaacatg

SEQ ID NO: 4722404 - DNA, 25 bp, Homo sapien
gagtaactgtcccatgaactggctg

SEQ ID NO: 4722405 - DNA, 25 bp, Homo sapien
tctgacatgcgatttgaagacacgt

SEQ ID NO: 4722406 - DNA, 25 bp, Homo sapien
taagaatgaatatgtggccgaccct

SEQ ID NO: 4722407 - DNA, 25 bp, Homo sapien
tgcatacatcgctgcaggccacaga

SEQ ID NO: 4722408 - DNA, 25 bp, Homo sapien
gacaaagagtgctgagctccaggtt

SEQ ID NO: 4722409 - DNA, 25 bp, Homo sapien
ccgtgagttttgctggcataggtga

SEQ ID NO: 4722410 - DNA, 25 bp, Homo sapien
caatgaattggacgcagcaatctga

SEQ ID NO: 4722411 - DNA, 25 bp, Homo sapien
tctgacagtggtaaatcgggtttcc

SEQ ID NO: 4722412 - DNA, 25 bp, Homo sapien
tctagtcttgctttcacttgtgagc

SEQ ID NO: 4722413 - DNA, 25 bp, Homo sapien
actttttccatggttgtggcacatg

SEQ ID NO: 4722414 - DNA, 25 bp, Homo sapien
ctgatgaggccggaactctccagca

SEQ ID NO: 4722415 - DNA, 25 bp, Homo sapien
ccgacatgttgtaggaacacatagc

SEQ ID NO: 4722416 - DNA, 25 bp, Homo sapien
ggaacacatagcattggccagtggg

SEQ ID NO: 4722417 - DNA, 25 bp, Homo sapien
gcctatgactgagaaaccccgggca

SEQ ID NO: 4722418 - DNA, 25 bp, Homo sapien
cttgccttctgttgattgggccagg

SEQ ID NO: 4722419 - DNA, 25 bp, Homo sapien
ttgattgggccaggtgtgtgatttt

SEQ ID NO: 4722420 - DNA, 25 bp, Homo sapien
cttctgttgattgggccaggtgtgt

SEQ ID NO: 4722421 - DNA, 25 bp, Homo sapien
tgccttctgttgattgggccaggtg

SEQ ID NO: 4722422 - DNA, 25 bp, Homo sapien
ttgcaacttcttgggaccttgccat

SEQ ID NO: 4722423 - DNA, 25 bp, Homo sapien
tgcaacttcttgggaccttgccatg

SEQ ID NO: 4722424 - DNA, 25 bp, Homo sapien
actgggaaggttggccctcttcttg

SEQ ID NO: 4722425 - DNA, 25 bp, Homo sapien
agaatgaggatcagtgtgatttggc

SEQ ID NO: 4722426 - DNA, 25 bp, Homo sapien
gtgagaatgaggatcagtgtgattt

SEQ ID NO: 4722427 - DNA, 25 bp, Homo sapien
gctcagctttaataacacagccttc

SEQ ID NO: 4722428 - DNA, 25 bp, Homo sapien
ggctcagctttaataacacagcctt

SEQ ID NO: 4722429 - DNA, 25 bp, Homo sapien
tccttttgaacactctgctgccaca

SEQ ID NO: 4722430 - DNA, 25 bp, Homo sapien
ttccttttgaacactctgctgccac

SEQ ID NO: 4722431 - DNA, 25 bp, Homo sapien
cttccttttgaacactctgctgcca

SEQ ID NO: 4722432 - DNA, 25 bp, Homo sapien
ccttttgaacactctgctgccacat

SEQ ID NO: 4722433 - DNA, 25 bp, Homo sapien
ggccctcaatgattttgctacagca

SEQ ID NO: 4722434 - DNA, 25 bp, Homo sapien
cattcaatggtctagatgacagggc

SEQ ID NO: 4722435 - DNA, 25 bp, Homo sapien
tttcctttgatgaaagcccaaggca

SEQ ID NO: 4722436 - DNA, 25 bp, Homo sapien
tttgcaggggttaacgttgagagcc

SEQ ID NO: 4722437 - DNA, 25 bp, Homo sapien
ggctgctgtcttgggaatggagcgt

SEQ ID NO: 4722438 - DNA, 25 bp, Homo sapien
gtcttgggaatggagcgtggcagct

SEQ ID NO: 4722439 - DNA, 25 bp, Homo sapien
gaggctgctgtcttgggaatggagc

SEQ ID NO: 4722440 - DNA, 25 bp, Homo sapien
tgctgtcttgggaatggagcgtggc

SEQ ID NO: 4722441 - DNA, 25 bp, Homo sapien
tcctccatgaatgagtccttctttt

SEQ ID NO: 4722442 - DNA, 25 bp, Homo sapien
tgatcccagggatcagtgcagagca

SEQ ID NO: 4722443 - DNA, 25 bp, Homo sapien
ttttatagccttgctgatcccaggg

SEQ ID NO: 4722444 - DNA, 25 bp, Homo sapien
agagcaggtgctcaaaagattcctc

SEQ ID NO: 4722445 - DNA, 25 bp, Homo sapien
gggcagccccatattgactagctca

SEQ ID NO: 4722446 - DNA, 25 bp, Homo sapien
tggaacaagtggcatgattagcagg

SEQ ID NO: 4722447 - DNA, 25 bp, Homo sapien
cgtcttgaatgtagatcagggttcc

SEQ ID NO: 4722448 - DNA, 25 bp, Homo sapien
tctgcgtcttgaatgtagatcaggg

SEQ ID NO: 4722449 - DNA, 25 bp, Homo sapien
cagggtagtgagttagtaaaggaga

SEQ ID NO: 4722450 - DNA, 25 bp, Homo sapien
acagtgcagggtagtgagttagtaa

SEQ ID NO: 4722451 - DNA, 25 bp, Homo sapien
gagttagtaaaggagaagccatcac

SEQ ID NO: 4722452 - DNA, 25 bp, Homo sapien
ccccggtgtccttccctgatggaga

SEQ ID NO: 4722453 - DNA, 25 bp, Homo sapien
ttaatacaatctaagatctctgaag

SEQ ID NO: 4722454 - DNA, 25 bp, Homo sapien
aatacaatctaagatctctgaagac

SEQ ID NO: 4722455 - DNA, 25 bp, Homo sapien
tggattgtggcaggaaaatgggctg

SEQ ID NO: 4722456 - DNA, 25 bp, Homo sapien
catctgaatccctatatgtttgctt

SEQ ID NO: 4722457 - DNA, 25 bp, Homo sapien
ggtggcagtggaacaggacaaggct

SEQ ID NO: 4722458 - DNA, 25 bp, Homo sapien
ggcagtggaacaggacaaggctcca

SEQ ID NO: 4722459 - DNA, 25 bp, Homo sapien
ctgggtggcagtggaacaggacaag

SEQ ID NO: 4722460 - DNA, 25 bp, Homo sapien
tggcagtggaacaggacaaggctcc

SEQ ID NO: 4722461 - DNA, 25 bp, Homo sapien
actctgtcccttagccttttgaatt

SEQ ID NO: 4722462 - DNA, 25 bp, Homo sapien
ctgtcccttagccttttgaattctc

SEQ ID NO: 4722463 - DNA, 25 bp, Homo sapien
ctctgtcccttagccttttgaattc

SEQ ID NO: 4722464 - DNA, 25 bp, Homo sapien
tgtcccttagccttttgaattctct

SEQ ID NO: 4722465 - DNA, 25 bp, Homo sapien
tcaatcttccagcagacatcaccag

SEQ ID NO: 4722466 - DNA, 25 bp, Homo sapien
ttactattgacagtcagtcttggca

SEQ ID NO: 4722467 - DNA, 25 bp, Homo sapien
tcttggcaagcttgctcgtctccat

SEQ ID NO: 4722468 - DNA, 25 bp, Homo sapien
taagtagtgtcagtgtcaccgcggg

SEQ ID NO: 4722469 - DNA, 25 bp, Homo sapien
agaaggttcagggtagcattgcagc

SEQ ID NO: 4722470 - DNA, 25 bp, Homo sapien
ggtagcattgcagcgaccctggtgc

SEQ ID NO: 4722471 - DNA, 25 bp, Homo sapien
gaagtaaaaaggagtgtatgaaaca

SEQ ID NO: 4722472 - DNA, 25 bp, Homo sapien
ttgcagcgaccctggtgcaccaggg

SEQ ID NO: 4722473 - DNA, 25 bp, Homo sapien
tgtgccaggcaactaataggagctg

SEQ ID NO: 4722474 - DNA, 25 bp, Homo sapien
caagagagagtgtggcaaagcagta

SEQ ID NO: 4722475 - DNA, 25 bp, Homo sapien
catcaatggtggcaggctaacttgt

SEQ ID NO: 4722476 - DNA, 25 bp, Homo sapien
cttacagttttgtggcaaggcagac

SEQ ID NO: 4722477 - DNA, 25 bp, Homo sapien
tgttctgttgttgaggaatggcagc

SEQ ID NO: 4722478 - DNA, 25 bp, Homo sapien
tctgttgttgaggaatggcagcatg

SEQ ID NO: 4722479 - DNA, 25 bp, Homo sapien
ggagatggtactgggtagacgagca

SEQ ID NO: 4722480 - DNA, 25 bp, Homo sapien
ctgggtagacgagcagcagttccaa

SEQ ID NO: 4722481 - DNA, 25 bp, Homo sapien
gttgcagagcagtagctcttcatta

SEQ ID NO: 4722482 - DNA, 25 bp, Homo sapien
gagcagtagctcttcattaaatcta

SEQ ID NO: 4722483 - DNA, 25 bp, Homo sapien
cagagcagtagctcttcattaaatc

SEQ ID NO: 4722484 - DNA, 25 bp, Homo sapien
gcagtagctcttcattaaatctatt

SEQ ID NO: 4722485 - DNA, 25 bp, Homo sapien
gggcactgctagatccaaggtcggc

SEQ ID NO: 4722486 - DNA, 25 bp, Homo sapien
tcatctgaacgatgagtctgaggcc

SEQ ID NO: 4722487 - DNA, 25 bp, Homo sapien
caaggtcggcttgggcagcaggtgc

SEQ ID NO: 4722488 - DNA, 25 bp, Homo sapien
tgcatcattcatctgaacgatgagt

SEQ ID NO: 4722489 - DNA, 25 bp, Homo sapien
tcacagctcagtaggggtcctaggg

SEQ ID NO: 4722490 - DNA, 25 bp, Homo sapien
ccaggaaggtgcttcgcttctcagg

SEQ ID NO: 4722491 - DNA, 25 bp, Homo sapien
aggaaggtgcttcgcttctcaggtc

SEQ ID NO: 4722492 - DNA, 25 bp, Homo sapien
gtcttgcttttcaggtgaagcccag

SEQ ID NO: 4722493 - DNA, 25 bp, Homo sapien
atggcatgtctctcagcaaagagaa

SEQ ID NO: 4722494 - DNA, 25 bp, Homo sapien
tgggagaacattcagaagcccccgt

SEQ ID NO: 4722495 - DNA, 25 bp, Homo sapien
agggtagcatgggagaacattcaga

SEQ ID NO: 4722496 - DNA, 25 bp, Homo sapien
ctagggtagcatgggagaacattca

SEQ ID NO: 4722497 - DNA, 25 bp, Homo sapien
ggagaacattcagaagcccccgtac

SEQ ID NO: 4722498 - DNA, 25 bp, Homo sapien
tgcagtggccacatagggaccttga

SEQ ID NO: 4722499 - DNA, 25 bp, Homo sapien
ctatctgagagaggaccaatggacc

SEQ ID NO: 4722500 - DNA, 25 bp, Homo sapien
aagacacaggctactggcaccgttg

SEQ ID NO: 4722501 - DNA, 25 bp, Homo sapien
gagaaggcctctaacctatctgaga

SEQ ID NO: 4722502 - DNA, 25 bp, Homo sapien
tattcttctggtggtagaataagtt

SEQ ID NO: 4722503 - DNA, 25 bp, Homo sapien
ctttcagagaagctgatgacttcaa

SEQ ID NO: 4722504 - DNA, 25 bp, Homo sapien
tgggagtccagcagcagtacctttt

SEQ ID NO: 4722505 - DNA, 25 bp, Homo sapien
accttttgcactgaattcctgattg

SEQ ID NO: 4722506 - DNA, 25 bp, Homo sapien
tgattcttgtggagaatttgcctga

SEQ ID NO: 4722507 - DNA, 25 bp, Homo sapien
tttgcctgaatcaagagccttcaga

SEQ ID NO: 4722508 - DNA, 25 bp, Homo sapien
tgtggagaatttgcctgaatcaaga

SEQ ID NO: 4722509 - DNA, 25 bp, Homo sapien
gaatttgcctgaatcaagagccttc

SEQ ID NO: 4722510 - DNA, 25 bp, Homo sapien
cagctttgtaggaccaatataaggc

SEQ ID NO: 4722511 - DNA, 25 bp, Homo sapien
agctctgatggaactgtcgggactg

SEQ ID NO: 4722512 - DNA, 25 bp, Homo sapien
taggcatcactatagcatgcaaagc

SEQ ID NO: 4722513 - DNA, 25 bp, Homo sapien
gcctggagtttggtcaagacaactt

SEQ ID NO: 4722514 - DNA, 25 bp, Homo sapien
cctgcttaatctgtgtaggatgaat

SEQ ID NO: 4722515 - DNA, 25 bp, Homo sapien
ttgcctgcttaatctgtgtaggatg

SEQ ID NO: 4722516 - DNA, 25 bp, Homo sapien
ctgttgcctgcttaatctgtgtagg

SEQ ID NO: 4722517 - DNA, 25 bp, Homo sapien
gcctgcttaatctgtgtaggatgaa

SEQ ID NO: 4722518 - DNA, 25 bp, Homo sapien
tatggtcaaccacctttcaatcaat

SEQ ID NO: 4722519 - DNA, 25 bp, Homo sapien
atgtgaaggctctggcagacaagcc

SEQ ID NO: 4722520 - DNA, 25 bp, Homo sapien
tcaatcaatgcaattttggcttttg

SEQ ID NO: 4722521 - DNA, 25 bp, Homo sapien
gaatgagctatggtcaaccaccttt

SEQ ID NO: 4722522 - DNA, 25 bp, Homo sapien
ttgtactggtgcctgagacttgaca

SEQ ID NO: 4722523 - DNA, 25 bp, Homo sapien
tgtcaaaaaccatcctcttgtactg

SEQ ID NO: 4722524 - DNA, 25 bp, Homo sapien
ctccattgccaaacatagagtgttg

SEQ ID NO: 4722525 - DNA, 25 bp, Homo sapien
ggtgcctgagacttgacatcacttc

SEQ ID NO: 4722526 - DNA, 25 bp, Homo sapien
ttcatagtgactggtttccctgccc

SEQ ID NO: 4722527 - DNA, 25 bp, Homo sapien
tgccctgctcaaatcaccactcatc

SEQ ID NO: 4722528 - DNA, 25 bp, Homo sapien
gacattcttctcgaggattctagct

SEQ ID NO: 4722529 - DNA, 25 bp, Homo sapien
cacttccccttcatagtgactggtt

SEQ ID NO: 4722530 - DNA, 25 bp, Homo sapien
gatctttgatgctcttcttggaggc

SEQ ID NO: 4722531 - DNA, 25 bp, Homo sapien
gaactaaagatgaggcttgggccag

SEQ ID NO: 4722532 - DNA, 25 bp, Homo sapien
tctttcaaattttaggccaatgttg

SEQ ID NO: 4722533 - DNA, 25 bp, Homo sapien
tataccaacccgatctctgacttct

SEQ ID NO: 4722534 - DNA, 25 bp, Homo sapien
cctctggttcctgcaataaagcgga

SEQ ID NO: 4722535 - DNA, 25 bp, Homo sapien
taaagcggaaatttgtaggagctcc

SEQ ID NO: 4722536 - DNA, 25 bp, Homo sapien
gaagcactcgttcgttccattttag

SEQ ID NO: 4722537 - DNA, 25 bp, Homo sapien
aaatccctgtattgtagctttgtga

SEQ ID NO: 4722538 - DNA, 25 bp, Homo sapien
aaaataagtaagaccttgcaatatt

SEQ ID NO: 4722539 - DNA, 25 bp, Homo sapien
aagaccttgcaatattttactgttt

SEQ ID NO: 4722540 - DNA, 25 bp, Homo sapien
gtaagaccttgcaatattttactgt

SEQ ID NO: 4722541 - DNA, 25 bp, Homo sapien
taagtaagaccttgcaatattttac

SEQ ID NO: 4722542 - DNA, 25 bp, Homo sapien
ttgcagctcccggtgtttcctttct

SEQ ID NO: 4722543 - DNA, 25 bp, Homo sapien
tgtagtgaacttctgttaggaattt

SEQ ID NO: 4722544 - DNA, 25 bp, Homo sapien
ttgtagtgaacttctgttaggaatt

SEQ ID NO: 4722545 - DNA, 25 bp, Homo sapien
agaatgctggcgaaagttccacaag

SEQ ID NO: 4722546 - DNA, 25 bp, Homo sapien
tctaatgtatttcctgacagcaagc

SEQ ID NO: 4722547 - DNA, 25 bp, Homo sapien
gtcagagtggagtcctctaatgtat

SEQ ID NO: 4722548 - DNA, 25 bp, Homo sapien
gaagtaggattctggccaaggtgtc

SEQ ID NO: 4722549 - DNA, 25 bp, Homo sapien
agaaaggatcacttttggtatgtct

SEQ ID NO: 4722550 - DNA, 25 bp, Homo sapien
aggatcacttttggtatgtctgtgt

SEQ ID NO: 4722551 - DNA, 25 bp, Homo sapien
aaaggatcacttttggtatgtctgt

SEQ ID NO: 4722552 - DNA, 25 bp, Homo sapien
tgatgagaaaggatcacttttggta

SEQ ID NO: 4722553 - DNA, 25 bp, Homo sapien
aagtttgcagacatcaccagttacc

SEQ ID NO: 4722554 - DNA, 25 bp, Homo sapien
ccagttacccataagtacaaccgtg

SEQ ID NO: 4722555 - DNA, 25 bp, Homo sapien
gcagacatcaccagttacccataag

SEQ ID NO: 4722556 - DNA, 25 bp, Homo sapien
tacccataagtacaaccgtgcatac

SEQ ID NO: 4722557 - DNA, 25 bp, Homo sapien
gcaggcaataaataaaccctcttgg

SEQ ID NO: 4722558 - DNA, 25 bp, Homo sapien
cctcttggatatgggagtggttgac

SEQ ID NO: 4722559 - DNA, 25 bp, Homo sapien
tctgtagggagacttaggaattggc

SEQ ID NO: 4722560 - DNA, 25 bp, Homo sapien
gagtggttgacttggttgcatttga

SEQ ID NO: 4722561 - DNA, 25 bp, Homo sapien
tgccatgtcgacattcttcttgttc

SEQ ID NO: 4722562 - DNA, 25 bp, Homo sapien
cttgttcattcgtctgtgcctcctg

SEQ ID NO: 4722563 - DNA, 25 bp, Homo sapien
gttcattcgtctgtgcctcctggcc

SEQ ID NO: 4722564 - DNA, 25 bp, Homo sapien
gctgccatgtcgacattcttcttgt

SEQ ID NO: 4722565 - DNA, 25 bp, Homo sapien
tgaggctgctaaaatggaacaattg

SEQ ID NO: 4722566 - DNA, 25 bp, Homo sapien
ggataaatagtacagtgcacacaaa

SEQ ID NO: 4722567 - DNA, 25 bp, Homo sapien
tgaatgcttgaatgttgaggccatc

SEQ ID NO: 4722568 - DNA, 25 bp, Homo sapien
tatgtccagcaggaattcgattcag

SEQ ID NO: 4722569 - DNA, 25 bp, Homo sapien
tcaccaaagctaccatggaaaatct

SEQ ID NO: 4722570 - DNA, 25 bp, Homo sapien
gaaaatctctgaccgattccacaca

SEQ ID NO: 4722571 - DNA, 25 bp, Homo sapien
tgtttgccttggacatttgctgccc

SEQ ID NO: 4722572 - DNA, 25 bp, Homo sapien
cttccctcaaagatccgtggtctgg

SEQ ID NO: 4722573 - DNA, 25 bp, Homo sapien
taggtgctacaggatccatagcctg

SEQ ID NO: 4722574 - DNA, 25 bp, Homo sapien
cacatcttaggtgctacaggatcca

SEQ ID NO: 4722575 - DNA, 25 bp, Homo sapien
atgggatgtgctgagtccggatgcc

SEQ ID NO: 4722576 - DNA, 25 bp, Homo sapien
ccatagcctggtttctctgagcacc

SEQ ID NO: 4722577 - DNA, 25 bp, Homo sapien
gaaggttgatgctgggggaaagcta

SEQ ID NO: 4722578 - DNA, 25 bp, Homo sapien
ttggtagcagagaaggttgatgctg

SEQ ID NO: 4722579 - DNA, 25 bp, Homo sapien
tctgaatcctggtaaacagcgtcct

SEQ ID NO: 4722580 - DNA, 25 bp, Homo sapien
taaacagcgtcctgaggccattggt

SEQ ID NO: 4722581 - DNA, 25 bp, Homo sapien
tcagcatttgggtctggatgcagga

SEQ ID NO: 4722582 - DNA, 25 bp, Homo sapien
gatgcaggatgggagaaataagtct

SEQ ID NO: 4722583 - DNA, 25 bp, Homo sapien
tcctgtttcagatcccaatgactgc

SEQ ID NO: 4722584 - DNA, 25 bp, Homo sapien
gctgagcattgcgtcttggaagagt

SEQ ID NO: 4722585 - DNA, 25 bp, Homo sapien
ggtgggtcatcaatcctgctgagca

SEQ ID NO: 4722586 - DNA, 25 bp, Homo sapien
aatgactgctgtagcttcttcgctg

SEQ ID NO: 4722587 - DNA, 25 bp, Homo sapien
ccaactcaaccaggctttcaaaggg

SEQ ID NO: 4722588 - DNA, 25 bp, Homo sapien
gcccaactcaaccaggctttcaaag

SEQ ID NO: 4722589 - DNA, 25 bp, Homo sapien
aactcaaccaggctttcaaagggct

SEQ ID NO: 4722590 - DNA, 25 bp, Homo sapien
gaaagcccaactcaaccaggctttc

SEQ ID NO: 4722591 - DNA, 25 bp, Homo sapien
tccagcaacacgaagccacttgaag

SEQ ID NO: 4722592 - DNA, 25 bp, Homo sapien
tctcctttgagactttgcccgaggg

SEQ ID NO: 4722593 - DNA, 25 bp, Homo sapien
tgaagttacccagcaccaagctgat

SEQ ID NO: 4722594 - DNA, 25 bp, Homo sapien
ggtgtttgacgtatccaacgctcca

SEQ ID NO: 4722595 - DNA, 25 bp, Homo sapien
tgaatcttgggtccagtccagagat

SEQ ID NO: 4722596 - DNA, 25 bp, Homo sapien
aatcttgggtccagtccagagatat

SEQ ID NO: 4722597 - DNA, 25 bp, Homo sapien
gaatcttgggtccagtccagagata

SEQ ID NO: 4722598 - DNA, 25 bp, Homo sapien
gcttctgaggatagaacataaattt

SEQ ID NO: 4722599 - DNA, 25 bp, Homo sapien
tacctgcttggtccgtgagtcagct

SEQ ID NO: 4722600 - DNA, 25 bp, Homo sapien
gttctacctgcttggtccgtgagtc

SEQ ID NO: 4722601 - DNA, 25 bp, Homo sapien
tctgaggatagaacataaatttcct

SEQ ID NO: 4722602 - DNA, 25 bp, Homo sapien
gatcagaggactatgatttcctctc

SEQ ID NO: 4722603 - DNA, 25 bp, Homo sapien
tcagaggactatgatttcctctcat

SEQ ID NO: 4722604 - DNA, 25 bp, Homo sapien
gtgatcagaggactatgatttcctc

SEQ ID NO: 4722605 - DNA, 25 bp, Homo sapien
cagaggactatgatttcctctcatc

SEQ ID NO: 4722606 - DNA, 25 bp, Homo sapien
tcttcttctgtggatacaaactcag

SEQ ID NO: 4722607 - DNA, 25 bp, Homo sapien
tcttctgtggatacaaactcaggca

SEQ ID NO: 4722608 - DNA, 25 bp, Homo sapien
ttcttctgtggatacaaactcaggc

SEQ ID NO: 4722609 - DNA, 25 bp, Homo sapien
cttctgtggatacaaactcaggcat

SEQ ID NO: 4722610 - DNA, 25 bp, Homo sapien
gagttgcaggatgatatccacatag

SEQ ID NO: 4722611 - DNA, 25 bp, Homo sapien
acatagttgtaacccttcctgtgct

SEQ ID NO: 4722612 - DNA, 25 bp, Homo sapien
gatgatatccacatagttgtaaccc

SEQ ID NO: 4722613 - DNA, 25 bp, Homo sapien
cttagtgcctttgggagttgcagga

SEQ ID NO: 4722614 - DNA, 25 bp, Homo sapien
attcatcagcagaagcttttcttca

SEQ ID NO: 4722615 - DNA, 25 bp, Homo sapien
taggattcatcagcagaagcttttc

SEQ ID NO: 4722616 - DNA, 25 bp, Homo sapien
catcagttttttccaggaccttgcc

SEQ ID NO: 4722617 - DNA, 25 bp, Homo sapien
cttaggattcatcagcagaagcttt

SEQ ID NO: 4722618 - DNA, 25 bp, Homo sapien
tgttgtgtgtattctagcacctcac

SEQ ID NO: 4722619 - DNA, 25 bp, Homo sapien
tctcgtcaattttctctggaccata

SEQ ID NO: 4722620 - DNA, 25 bp, Homo sapien
tggaccataggcactttgcaggcaa

SEQ ID NO: 4722621 - DNA, 25 bp, Homo sapien
gacacagtcatcgtccattttctcg

SEQ ID NO: 4722622 - DNA, 25 bp, Homo sapien
atcttcattggaatatctgtcttta

SEQ ID NO: 4722623 - DNA, 25 bp, Homo sapien
cctgcatcttcattggaatatctgt

SEQ ID NO: 4722624 - DNA, 25 bp, Homo sapien
tgcatcttcattggaatatctgtct

SEQ ID NO: 4722625 - DNA, 25 bp, Homo sapien
gcatcttcattggaatatctgtctt

SEQ ID NO: 4722626 - DNA, 25 bp, Homo sapien
catgctccacatttggatctaatgg

SEQ ID NO: 4722627 - DNA, 25 bp, Homo sapien
agcatgagcttatttatcatccaga

SEQ ID NO: 4722628 - DNA, 25 bp, Homo sapien
gttaaacgctaacaccagcatgagc

SEQ ID NO: 4722629 - DNA, 25 bp, Homo sapien
ggtaataaaggccatgctccacatt

SEQ ID NO: 4722630 - DNA, 25 bp, Homo sapien
gcttcttcacaccaacagcagcctt

SEQ ID NO: 4722631 - DNA, 25 bp, Homo sapien
tctacagtaggtttcttttctgcag

SEQ ID NO: 4722632 - DNA, 25 bp, Homo sapien
agaagctgtccacaatgatttgacc

SEQ ID NO: 4722633 - DNA, 25 bp, Homo sapien
aggcttcttttcctctacagtaggt

SEQ ID NO: 4722634 - DNA, 25 bp, Homo sapien
ttggtgcccgaaaggctctttggat

SEQ ID NO: 4722635 - DNA, 25 bp, Homo sapien
ttcttgcttggtgcccgaaaggctc

SEQ ID NO: 4722636 - DNA, 25 bp, Homo sapien
tcttcttgcttggtgcccgaaaggc

SEQ ID NO: 4722637 - DNA, 25 bp, Homo sapien
tgcttggtgcccgaaaggctctttg

SEQ ID NO: 4722638 - DNA, 25 bp, Homo sapien
aagactcagtgctggtccgatgacc

SEQ ID NO: 4722639 - DNA, 25 bp, Homo sapien
ccaagactcagtgctggtccgatga

SEQ ID NO: 4722640 - DNA, 25 bp, Homo sapien
gactcagtgctggtccgatgacctg

SEQ ID NO: 4722641 - DNA, 25 bp, Homo sapien
cagtgctggtccgatgacctgctaa

SEQ ID NO: 4722642 - DNA, 25 bp, Homo sapien
caagttggtgtgaacaaagttcacg

SEQ ID NO: 4722643 - DNA, 25 bp, Homo sapien
ctgttgtttttgcgcaagttggtgt

SEQ ID NO: 4722644 - DNA, 25 bp, Homo sapien
ttggtgtgaacaaagttcacgatgt

SEQ ID NO: 4722645 - DNA, 25 bp, Homo sapien
tgtttttgcgcaagttggtgtgaac

SEQ ID NO: 4722646 - DNA, 25 bp, Homo sapien
gcgacatcagtgggcggacacacgc

SEQ ID NO: 4722647 - DNA, 25 bp, Homo sapien
catcagtgggcggacacacgccatg

SEQ ID NO: 4722648 - DNA, 25 bp, Homo sapien
tcagtgggcggacacacgccatggc

SEQ ID NO: 4722649 - DNA, 25 bp, Homo sapien
gacatcagtgggcggacacacgcca

SEQ ID NO: 4722650 - DNA, 25 bp, Homo sapien
aaatggggtgcaaaggatggatgga

SEQ ID NO: 4722651 - DNA, 25 bp, Homo sapien
agaaaatggggtgcaaaggatggat

SEQ ID NO: 4722652 - DNA, 25 bp, Homo sapien
atggatggagggctcctttgttttt

SEQ ID NO: 4722653 - DNA, 25 bp, Homo sapien
gatggatggagggctcctttgtttt

SEQ ID NO: 4722654 - DNA, 25 bp, Homo sapien
catagcgctctggaccttcggcttc

SEQ ID NO: 4722655 - DNA, 25 bp, Homo sapien
tctccagcagagagaatccttgatt

SEQ ID NO: 4722656 - DNA, 25 bp, Homo sapien
tagcgctctggaccttcggcttcca

SEQ ID NO: 4722657 - DNA, 25 bp, Homo sapien
ccagcagagagaatccttgatttcc

SEQ ID NO: 4722658 - DNA, 25 bp, Homo sapien
acatggcttataccagcttcctggc

SEQ ID NO: 4722659 - DNA, 25 bp, Homo sapien
tctgcttgtgcattgtactcagcta

SEQ ID NO: 4722660 - DNA, 25 bp, Homo sapien
tactcagctagttgttgaatttccc

SEQ ID NO: 4722661 - DNA, 25 bp, Homo sapien
tgtagacttggttttggatcatgcc

SEQ ID NO: 4722662 - DNA, 25 bp, Homo sapien
tcagccgctcagatctgctttctca

SEQ ID NO: 4722663 - DNA, 25 bp, Homo sapien
tctcatcacctgttcccttggaaat

SEQ ID NO: 4722664 - DNA, 25 bp, Homo sapien
tcacctgttcccttggaaatgggaa

SEQ ID NO: 4722665 - DNA, 25 bp, Homo sapien
agccgctcagatctgctttctcatc

SEQ ID NO: 4722666 - DNA, 25 bp, Homo sapien
gagcagggctgccactcaaagaagc

SEQ ID NO: 4722667 - DNA, 25 bp, Homo sapien
ctttcctctcagctggtgaccagca

SEQ ID NO: 4722668 - DNA, 25 bp, Homo sapien
gatgcagatgaaaggccggtgacca

SEQ ID NO: 4722669 - DNA, 25 bp, Homo sapien
cactggaaggggataaggtcttgtc

SEQ ID NO: 4722670 - DNA, 25 bp, Homo sapien
ccactgctccagtgagtgtgagagc

SEQ ID NO: 4722671 - DNA, 25 bp, Homo sapien
tccagtgatggagcccactgctcca

SEQ ID NO: 4722672 - DNA, 25 bp, Homo sapien
ctggtcctcctgttgtgctccagtg

SEQ ID NO: 4722673 - DNA, 25 bp, Homo sapien
tgtgctccagtgatggagcccactg

SEQ ID NO: 4722674 - DNA, 25 bp, Homo sapien
cattactgttttcgctttgtttgtt

SEQ ID NO: 4722675 - DNA, 25 bp, Homo sapien
gttgctgacgacatcatttttgtca

SEQ ID NO: 4722676 - DNA, 25 bp, Homo sapien
taagctggggttgctgacgacatca

SEQ ID NO: 4722677 - DNA, 25 bp, Homo sapien
ctggcattaagctggggttgctgac

SEQ ID NO: 4722678 - DNA, 25 bp, Homo sapien
ttgtcattttcatagatgacatccg

SEQ ID NO: 4722679 - DNA, 25 bp, Homo sapien
ttcaatgtaacatgctcactgtcca

SEQ ID NO: 4722680 - DNA, 25 bp, Homo sapien
tactccttgcaagttcacatgggag

SEQ ID NO: 4722681 - DNA, 25 bp, Homo sapien
ggagcgtgtgcttattaacagagtg

SEQ ID NO: 4722682 - DNA, 25 bp, Homo sapien
cagagtgtccccattgggtctcttc

SEQ ID NO: 4722683 - DNA, 25 bp, Homo sapien
tataaaccaccaagtcctagacttc

SEQ ID NO: 4722684 - DNA, 25 bp, Homo sapien
agtataaaccaccaagtcctagact

SEQ ID NO: 4722685 - DNA, 25 bp, Homo sapien
taaaccaccaagtcctagacttcgc

SEQ ID NO: 4722686 - DNA, 25 bp, Homo sapien
aaccaccaagtcctagacttcgcat

SEQ ID NO: 4722687 - DNA, 25 bp, Homo sapien
attcatagccccagggtagcagatg

SEQ ID NO: 4722688 - DNA, 25 bp, Homo sapien
tcagagtgcctggtgtgacaccact

SEQ ID NO: 4722689 - DNA, 25 bp, Homo sapien
tgtgaacagcaccacagcatgaagc

SEQ ID NO: 4722690 - DNA, 25 bp, Homo sapien
tttgcagagcgccaataaaaatgat

SEQ ID NO: 4722691 - DNA, 25 bp, Homo sapien
aagagctgccaggaattcatgaggc

SEQ ID NO: 4722692 - DNA, 25 bp, Homo sapien
catgaggctttgcaaagttcatctg

SEQ ID NO: 4722693 - DNA, 25 bp, Homo sapien
gaaatgccgatccatctgtagccag

SEQ ID NO: 4722694 - DNA, 25 bp, Homo sapien
tgtttgatgattgccacaaatggca

SEQ ID NO: 4722695 - DNA, 25 bp, Homo sapien
ttaatggctcaagcgggccaactgt

SEQ ID NO: 4722696 - DNA, 25 bp, Homo sapien
atgcccacagcttctaccagctcct

SEQ ID NO: 4722697 - DNA, 25 bp, Homo sapien
ggccaactgtgcaatgcccacagct

SEQ ID NO: 4722698 - DNA, 25 bp, Homo sapien
gctcaagcgggccaactgtgcaatg

SEQ ID NO: 4722699 - DNA, 25 bp, Homo sapien
tttgtcccttagctagagctgcatc

SEQ ID NO: 4722700 - DNA, 25 bp, Homo sapien
ttgtcccttagctagagctgcatca

SEQ ID NO: 4722701 - DNA, 25 bp, Homo sapien
tgtcccttagctagagctgcatcat

SEQ ID NO: 4722702 - DNA, 25 bp, Homo sapien
catttgtcccttagctagagctgca

SEQ ID NO: 4722703 - DNA, 25 bp, Homo sapien
ttgaaatcaaccctcttggcagcct

SEQ ID NO: 4722704 - DNA, 25 bp, Homo sapien
tgcactgggcggtagcagcattaca

SEQ ID NO: 4722705 - DNA, 25 bp, Homo sapien
tgggcggtagcagcattacaaagag

SEQ ID NO: 4722706 - DNA, 25 bp, Homo sapien
gaactgactgttggaaatttagtga

SEQ ID NO: 4722707 - DNA, 25 bp, Homo sapien
tccatcctatcagcaaggcatattg

SEQ ID NO: 4722708 - DNA, 25 bp, Homo sapien
tttgtggctcaaatccttgacgtca

SEQ ID NO: 4722709 - DNA, 25 bp, Homo sapien
cagccataactatctctcatctata

SEQ ID NO: 4722710 - DNA, 25 bp, Homo sapien
tattgcctcacttccagccataact

SEQ ID NO: 4722711 - DNA, 25 bp, Homo sapien
gtgctctccagagacgcccttcaga

SEQ ID NO: 4722712 - DNA, 25 bp, Homo sapien
gatcgcattccgaaaagtgctctcc

SEQ ID NO: 4722713 - DNA, 25 bp, Homo sapien
gctctccagagacgcccttcagaaa

SEQ ID NO: 4722714 - DNA, 25 bp, Homo sapien
atgtacagctgatcgcattccgaaa

SEQ ID NO: 4722715 - DNA, 25 bp, Homo sapien
gtggcccagacaaataaacaccatt

SEQ ID NO: 4722716 - DNA, 25 bp, Homo sapien
ttcacaatagctagactggcccagt

SEQ ID NO: 4722717 - DNA, 25 bp, Homo sapien
tctgggagctggaaagtactcgagt

SEQ ID NO: 4722718 - DNA, 25 bp, Homo sapien
caatgatcctgttgttctccggagg

SEQ ID NO: 4722719 - DNA, 25 bp, Homo sapien
caatggatccctcagcagaaaccct

SEQ ID NO: 4722720 - DNA, 25 bp, Homo sapien
catactaacaatggatccctcagca

SEQ ID NO: 4722721 - DNA, 25 bp, Homo sapien
agcccatcatactaacaatggatcc

SEQ ID NO: 4722722 - DNA, 25 bp, Homo sapien
catcatactaacaatggatccctca

SEQ ID NO: 4722723 - DNA, 25 bp, Homo sapien
taatcaatgtaaagttagcttcttt

SEQ ID NO: 4722724 - DNA, 25 bp, Homo sapien
tctcggcaggattgtaaaatagctc

SEQ ID NO: 4722725 - DNA, 25 bp, Homo sapien
cacaaagtagataggtggaagagta

SEQ ID NO: 4722726 - DNA, 25 bp, Homo sapien
gagtaagctccaaacaacacttagt

SEQ ID NO: 4722727 - DNA, 25 bp, Homo sapien
tctagtactagtgaggagatgtttc

SEQ ID NO: 4722728 - DNA, 25 bp, Homo sapien
gagatgtttccgttgagcgtcagac

SEQ ID NO: 4722729 - DNA, 25 bp, Homo sapien
ttcaggaatatcctaatcaccagcc

SEQ ID NO: 4722730 - DNA, 25 bp, Homo sapien
tgagaaaggaaacatcgtcaattgc

SEQ ID NO: 4722731 - DNA, 25 bp, Homo sapien
gagaggtcaacgattttcaaagaag

SEQ ID NO: 4722732 - DNA, 25 bp, Homo sapien
caaaaaggattatattgaaggagcc

SEQ ID NO: 4722733 - DNA, 25 bp, Homo sapien
gattatattgaaggagcctggattg

SEQ ID NO: 4722734 - DNA, 25 bp, Homo sapien
cctggattggagaggtcaacgattt

SEQ ID NO: 4722735 - DNA, 25 bp, Homo sapien
tcttcgtgggcctcagtagaactgt

SEQ ID NO: 4722736 - DNA, 25 bp, Homo sapien
tcttccaaagcatatcttcgtgggc

SEQ ID NO: 4722737 - DNA, 25 bp, Homo sapien
tgggcctcagtagaactgttccacc

SEQ ID NO: 4722738 - DNA, 25 bp, Homo sapien
gcaccatataacctcttccaaagca

SEQ ID NO: 4722739 - DNA, 25 bp, Homo sapien
ccttcatatacatctaaaactattg

SEQ ID NO: 4722740 - DNA, 25 bp, Homo sapien
catctaaaactattgctgggctttt

SEQ ID NO: 4722741 - DNA, 25 bp, Homo sapien
tatacatctaaaactattgctgggc

SEQ ID NO: 4722742 - DNA, 25 bp, Homo sapien
atttgaaagtatccttcatatacat

SEQ ID NO: 4722743 - DNA, 25 bp, Homo sapien
tgtgatgcctgatgtgaccaaaacc

SEQ ID NO: 4722744 - DNA, 25 bp, Homo sapien
aaatatggtgggtagggcaatgcac

SEQ ID NO: 4722745 - DNA, 25 bp, Homo sapien
tcagctagcaagaggactgatgaca

SEQ ID NO: 4722746 - DNA, 25 bp, Homo sapien
agatactagtataccagctcctcca

SEQ ID NO: 4722747 - DNA, 25 bp, Homo sapien
tacataggaacccaaagcgctggag

SEQ ID NO: 4722748 - DNA, 25 bp, Homo sapien
tggagctgtctcgtcctaatggcct

SEQ ID NO: 4722749 - DNA, 25 bp, Homo sapien
taggcagtgccaaatcattagtagt

SEQ ID NO: 4722750 - DNA, 25 bp, Homo sapien
gctgggatatgatcggtcacactga

SEQ ID NO: 4722751 - DNA, 25 bp, Homo sapien
gcagttgtaactatgtgtgcggcca

SEQ ID NO: 4722752 - DNA, 25 bp, Homo sapien
tgataaacaggcttggcccacaggc

SEQ ID NO: 4722753 - DNA, 25 bp, Homo sapien
taatattcctgatgtgctacccatg

SEQ ID NO: 4722754 - DNA, 25 bp, Homo sapien
gggtcctcggtaaggtgttcaatca

SEQ ID NO: 4722755 - DNA, 25 bp, Homo sapien
ggtttcacatgactgatactcagct

SEQ ID NO: 4722756 - DNA, 25 bp, Homo sapien
tagggccctcatgcaagttcacagg

SEQ ID NO: 4722757 - DNA, 25 bp, Homo sapien
gaactttttctctacgggccagcaa

SEQ ID NO: 4722758 - DNA, 25 bp, Homo sapien
cagcttagggtcttaccagactgaa

SEQ ID NO: 4722759 - DNA, 25 bp, Homo sapien
gacttactgaatgaccctaggcaaa

SEQ ID NO: 4722760 - DNA, 25 bp, Homo sapien
tgcatgatgcccacccagggttagg

SEQ ID NO: 4722761 - DNA, 25 bp, Homo sapien
tagatatatgtagcaccatccccgc

SEQ ID NO: 4722762 - DNA, 25 bp, Homo sapien
gaacaagttctagctccatcacgga

SEQ ID NO: 4722763 - DNA, 25 bp, Homo sapien
tatatataatgcttaattaagcaat

SEQ ID NO: 4722764 - DNA, 25 bp, Homo sapien
ttatatataatgcttaattaagcaa

SEQ ID NO: 4722765 - DNA, 25 bp, Homo sapien
tttatatataatgcttaattaagca

SEQ ID NO: 4722766 - DNA, 25 bp, Homo sapien
gaacacccattaaattccatgcctg

SEQ ID NO: 4722767 - DNA, 25 bp, Homo sapien
cagaagacagattcactggtggtac

SEQ ID NO: 4722768 - DNA, 25 bp, Homo sapien
catgtacaagtgtctgtccagaaca

SEQ ID NO: 4722769 - DNA, 25 bp, Homo sapien
catagccagagaatgacaacatacg

SEQ ID NO: 4722770 - DNA, 25 bp, Homo sapien
ccctttggggtctgccatgacaacg

SEQ ID NO: 4722771 - DNA, 25 bp, Homo sapien
ctgccatgacaacgataccccaggt

SEQ ID NO: 4722772 - DNA, 25 bp, Homo sapien
taggccttccctttggggtctgcca

SEQ ID NO: 4722773 - DNA, 25 bp, Homo sapien
acaacgataccccaggtggcaatgc

SEQ ID NO: 4722774 - DNA, 25 bp, Homo sapien
gagaatttacctatacaggatcaag

SEQ ID NO: 4722775 - DNA, 25 bp, Homo sapien
caggatcaagaaggtaagacagtta

SEQ ID NO: 4722776 - DNA, 25 bp, Homo sapien
taccaagtgtttcacatatacgcca

SEQ ID NO: 4722777 - DNA, 25 bp, Homo sapien
cacttctggaggatatattaccatt

SEQ ID NO: 4722778 - DNA, 25 bp, Homo sapien
gaggccgatgaccatctgcgtaatg

SEQ ID NO: 4722779 - DNA, 25 bp, Homo sapien
cgatgaccatctgcgtaatggtcca

SEQ ID NO: 4722780 - DNA, 25 bp, Homo sapien
tgaggccgatgaccatctgcgtaat

SEQ ID NO: 4722781 - DNA, 25 bp, Homo sapien
ggccgatgaccatctgcgtaatggt

SEQ ID NO: 4722782 - DNA, 25 bp, Homo sapien
aaggctgggacaaccgagaccccat

SEQ ID NO: 4722783 - DNA, 25 bp, Homo sapien
gcggtaccgggaggcgcagtgatat

SEQ ID NO: 4722784 - DNA, 25 bp, Homo sapien
ccagcaggtcttcaacaggcggtgt

SEQ ID NO: 4722785 - DNA, 25 bp, Homo sapien
aggcgcagtgatataggactcaaaa

SEQ ID NO: 4722786 - DNA, 25 bp, Homo sapien
ctcaaccttgggcgtctttggttca

SEQ ID NO: 4722787 - DNA, 25 bp, Homo sapien
tcaaccttgggcgtctttggttcaa

SEQ ID NO: 4722788 - DNA, 25 bp, Homo sapien
ccttgggcgtctttggttcaaactg

SEQ ID NO: 4722789 - DNA, 25 bp, Homo sapien
tctcttaagtttcctgcctcacatg

SEQ ID NO: 4722790 - DNA, 25 bp, Homo sapien
agaagtctggctctcttaagtttcc

SEQ ID NO: 4722791 - DNA, 25 bp, Homo sapien
gtttcctgcctcacatgaactgcga

SEQ ID NO: 4722792 - DNA, 25 bp, Homo sapien
catgaactgcgagaccttgggcatg

SEQ ID NO: 4722793 - DNA, 25 bp, Homo sapien
gtgtctctgtcgtgggcctccattt

SEQ ID NO: 4722794 - DNA, 25 bp, Homo sapien
ctgcaggtgtctctgtcgtgggcct

SEQ ID NO: 4722795 - DNA, 25 bp, Homo sapien
ggtgtctctgtcgtgggcctccatt

SEQ ID NO: 4722796 - DNA, 25 bp, Homo sapien
gcaggtgtctctgtcgtgggcctcc

SEQ ID NO: 4722797 - DNA, 25 bp, Homo sapien
gaaagtatcacccttagagctgcag

SEQ ID NO: 4722798 - DNA, 25 bp, Homo sapien
aaagtatcacccttagagctgcagg

SEQ ID NO: 4722799 - DNA, 25 bp, Homo sapien
agagaaagtatcacccttagagctg

SEQ ID NO: 4722800 - DNA, 25 bp, Homo sapien
gagaaagtatcacccttagagctgc

SEQ ID NO: 4722801 - DNA, 25 bp, Homo sapien
tgaatgaattggggtgtgaattcag

SEQ ID NO: 4722802 - DNA, 25 bp, Homo sapien
tgaattggggtgtgaattcagagcc

SEQ ID NO: 4722803 - DNA, 25 bp, Homo sapien
gaatgaattggggtgtgaattcaga

SEQ ID NO: 4722804 - DNA, 25 bp, Homo sapien
atgaattggggtgtgaattcagagc

SEQ ID NO: 4722805 - DNA, 25 bp, Homo sapien
ctctcactcagggaggaattacctc

SEQ ID NO: 4722806 - DNA, 25 bp, Homo sapien
taccattagagagtagaagagctta

SEQ ID NO: 4722807 - DNA, 25 bp, Homo sapien
aagtgattttcgtttaccagctctg

SEQ ID NO: 4722808 - DNA, 25 bp, Homo sapien
aaatgaacaagagtatctgctgagg

SEQ ID NO: 4722809 - DNA, 25 bp, Homo sapien
catagtgcagtgtagtatctgcctg

SEQ ID NO: 4722810 - DNA, 25 bp, Homo sapien
gaagcccatagtgcagtgtagtatc

SEQ ID NO: 4722811 - DNA, 25 bp, Homo sapien
cccatagtgcagtgtagtatctgcc

SEQ ID NO: 4722812 - DNA, 25 bp, Homo sapien
gcagtgtagtatctgcctgttgctc

SEQ ID NO: 4722813 - DNA, 25 bp, Homo sapien
cttcacattccaagtggcaaggagc

SEQ ID NO: 4722814 - DNA, 25 bp, Homo sapien
gaaagtggctgatacccttttggaa

SEQ ID NO: 4722815 - DNA, 25 bp, Homo sapien
ccttttggaataagagccactttgt

SEQ ID NO: 4722816 - DNA, 25 bp, Homo sapien
cattccaagtggcaaggagcccaag

SEQ ID NO: 4722817 - DNA, 25 bp, Homo sapien
cttcatggggtagcaggatggattg

SEQ ID NO: 4722818 - DNA, 25 bp, Homo sapien
ccttcttcatggggtagcaggatgg

SEQ ID NO: 4722819 - DNA, 25 bp, Homo sapien
ttcatggggtagcaggatggattga

SEQ ID NO: 4722820 - DNA, 25 bp, Homo sapien
tcttcatggggtagcaggatggatt

SEQ ID NO: 4722821 - DNA, 25 bp, Homo sapien
atgttgcagaagcacactttccaag

SEQ ID NO: 4722822 - DNA, 25 bp, Homo sapien
tgtggggctcgactgccatgttgca

SEQ ID NO: 4722823 - DNA, 25 bp, Homo sapien
gcttctttgatgtggggctcgactg

SEQ ID NO: 4722824 - DNA, 25 bp, Homo sapien
gatgtggggctcgactgccatgttg

SEQ ID NO: 4722825 - DNA, 25 bp, Homo sapien
gaatatgttgtcttagtccatccag

SEQ ID NO: 4722826 - DNA, 25 bp, Homo sapien
atgttgtcttagtccatccaggctg

SEQ ID NO: 4722827 - DNA, 25 bp, Homo sapien
tagaatatgttgtcttagtccatcc

SEQ ID NO: 4722828 - DNA, 25 bp, Homo sapien
aaaatagaatatgttgtcttagtcc

SEQ ID NO: 4722829 - DNA, 25 bp, Homo sapien
agtccatactccagcagatttggtg

SEQ ID NO: 4722830 - DNA, 25 bp, Homo sapien
aagctaggaagtccatactccagca

SEQ ID NO: 4722831 - DNA, 25 bp, Homo sapien
gctaggaagtccatactccagcaga

SEQ ID NO: 4722832 - DNA, 25 bp, Homo sapien
gaagtccatactccagcagatttgg

SEQ ID NO: 4722833 - DNA, 25 bp, Homo sapien
ttgagtagccaaagatcacagcgca

SEQ ID NO: 4722834 - DNA, 25 bp, Homo sapien
tattgcttccgtgcaattgtgctgg

SEQ ID NO: 4722835 - DNA, 25 bp, Homo sapien
tggaatcaattgtatgcactctaac

SEQ ID NO: 4722836 - DNA, 25 bp, Homo sapien
tgacctggaatggacaaagcatttc

SEQ ID NO: 4722837 - DNA, 25 bp, Homo sapien
gccaaattagtaagtgagaactctg

SEQ ID NO: 4722838 - DNA, 25 bp, Homo sapien
cacagcaattgtggcggatacgtgg

SEQ ID NO: 4722839 - DNA, 25 bp, Homo sapien
tctgttaccattggtaatgttagcc

SEQ ID NO: 4722840 - DNA, 25 bp, Homo sapien
gggattttcataagtggtagctaat

SEQ ID NO: 4722841 - DNA, 25 bp, Homo sapien
aaatatcaacaacagacaccgaaag

SEQ ID NO: 4722842 - DNA, 25 bp, Homo sapien
aataaatatcaacaacagacaccga

SEQ ID NO: 4722843 - DNA, 25 bp, Homo sapien
aatatcaacaacagacaccgaaagt

SEQ ID NO: 4722844 - DNA, 25 bp, Homo sapien
taaatatcaacaacagacaccgaaa

SEQ ID NO: 4722845 - DNA, 25 bp, Homo sapien
tattgtggtgttgcgattgttctct

SEQ ID NO: 4722846 - DNA, 25 bp, Homo sapien
attattgtggtgttgcgattgttct

SEQ ID NO: 4722847 - DNA, 25 bp, Homo sapien
attgtggtgttgcgattgttctctt

SEQ ID NO: 4722848 - DNA, 25 bp, Homo sapien
ttattgtggtgttgcgattgttctc

SEQ ID NO: 4722849 - DNA, 25 bp, Homo sapien
aaatagcaccgtagtttatcttcgg

SEQ ID NO: 4722850 - DNA, 25 bp, Homo sapien
ccgtagtttatcttcggctgctggg

SEQ ID NO: 4722851 - DNA, 25 bp, Homo sapien
tgaaaggttcgctgtagattaaaaa

SEQ ID NO: 4722852 - DNA, 25 bp, Homo sapien
agaaacaggctttaattacggagca

SEQ ID NO: 4722853 - DNA, 25 bp, Homo sapien
cagaaatgataccaggcttatccat

SEQ ID NO: 4722854 - DNA, 25 bp, Homo sapien
tggggacagaaatgataccaggctt

SEQ ID NO: 4722855 - DNA, 25 bp, Homo sapien
gggacagaaatgataccaggcttat

SEQ ID NO: 4722856 - DNA, 25 bp, Homo sapien
gacagaaatgataccaggcttatcc

SEQ ID NO: 4722857 - DNA, 25 bp, Homo sapien
tcgaggcagtcgagggaggacagca

SEQ ID NO: 4722858 - DNA, 25 bp, Homo sapien
gatggtgacataggcagttctgctg

SEQ ID NO: 4722859 - DNA, 25 bp, Homo sapien
ctgatctggcatcgccctcgaggca

SEQ ID NO: 4722860 - DNA, 25 bp, Homo sapien
ttatatctaccagagtcaaatgaag

SEQ ID NO: 4722861 - DNA, 25 bp, Homo sapien
tctaaggctgcctgccctatggcta

SEQ ID NO: 4722862 - DNA, 25 bp, Homo sapien
tcacactcattaatagctccatcag

SEQ ID NO: 4722863 - DNA, 25 bp, Homo sapien
aaggctgcctgccctatggctattt

SEQ ID NO: 4722864 - DNA, 25 bp, Homo sapien
cacactcattaatagctccatcaga

SEQ ID NO: 4722865 - DNA, 25 bp, Homo sapien
tctcacaaccaatgactccgaactt

SEQ ID NO: 4722866 - DNA, 25 bp, Homo sapien
cacctcagagtgaggtgctttgcca

SEQ ID NO: 4722867 - DNA, 25 bp, Homo sapien
tgctgtcacatctcacaaccaatga

SEQ ID NO: 4722868 - DNA, 25 bp, Homo sapien
gaggtgctttgccaagcttacatga

SEQ ID NO: 4722869 - DNA, 25 bp, Homo sapien
ttctcccctgagtttacaactgctc

SEQ ID NO: 4722870 - DNA, 25 bp, Homo sapien
tccaccaccagaatctttcatggta

SEQ ID NO: 4722871 - DNA, 25 bp, Homo sapien
caccaccagaatctttcatggtaaa

SEQ ID NO: 4722872 - DNA, 25 bp, Homo sapien
actccaccaccagaatctttcatgg

SEQ ID NO: 4722873 - DNA, 25 bp, Homo sapien
tattggtgtcacactcccctagctg

SEQ ID NO: 4722874 - DNA, 25 bp, Homo sapien
tgtcagcttgtctctccctattggt

SEQ ID NO: 4722875 - DNA, 25 bp, Homo sapien
gtatttggtattccccagatcccca

SEQ ID NO: 4722876 - DNA, 25 bp, Homo sapien
ttgtcaaatttagcatactgtcagc

SEQ ID NO: 4722877 - DNA, 25 bp, Homo sapien
ccaccttgaactttctctgtcatct

SEQ ID NO: 4722878 - DNA, 25 bp, Homo sapien
cagaactctgcctgacaactctaca

SEQ ID NO: 4722879 - DNA, 25 bp, Homo sapien
gggaaggagattcagatccacccag

SEQ ID NO: 4722880 - DNA, 25 bp, Homo sapien
ctccaccttgaactttctctgtcat

SEQ ID NO: 4722881 - DNA, 25 bp, Homo sapien
ttcaccaaggtccttcccttgcttg

SEQ ID NO: 4722882 - DNA, 25 bp, Homo sapien
aggtccttcccttgcttgagctcat

SEQ ID NO: 4722883 - DNA, 25 bp, Homo sapien
tctctccttcaccaaggtccttccc

SEQ ID NO: 4722884 - DNA, 25 bp, Homo sapien
accaaggtccttcccttgcttgagc

SEQ ID NO: 4722885 - DNA, 25 bp, Homo sapien
cttctgttttattggattcgctgat

SEQ ID NO: 4722886 - DNA, 25 bp, Homo sapien
gattcgctgatgaactccaactcag

SEQ ID NO: 4722887 - DNA, 25 bp, Homo sapien
ttttattggattcgctgatgaactc

SEQ ID NO: 4722888 - DNA, 25 bp, Homo sapien
ccacttcacacctgtcaaggtttct

SEQ ID NO: 4722889 - DNA, 25 bp, Homo sapien
agagattgtaaaacccatgccccat

SEQ ID NO: 4722890 - DNA, 25 bp, Homo sapien
caacacctcttgcattcttgacaac

SEQ ID NO: 4722891 - DNA, 25 bp, Homo sapien
gagttcttgacaattccaaaatggc

SEQ ID NO: 4722892 - DNA, 25 bp, Homo sapien
catgccccataaactccaggcattt

SEQ ID NO: 4722893 - DNA, 25 bp, Homo sapien
cgaaagcatgataagaagatgccat

SEQ ID NO: 4722894 - DNA, 25 bp, Homo sapien
tcgaaagcatgataagaagatgcca

SEQ ID NO: 4722895 - DNA, 25 bp, Homo sapien
cttcgaaagcatgataagaagatgc

SEQ ID NO: 4722896 - DNA, 25 bp, Homo sapien
ttcgaaagcatgataagaagatgcc

SEQ ID NO: 4722897 - DNA, 25 bp, Homo sapien
tgtgttcaaggagattcacaattcc

SEQ ID NO: 4722898 - DNA, 25 bp, Homo sapien
tcacaattccctggagctgactcag

SEQ ID NO: 4722899 - DNA, 25 bp, Homo sapien
ctgaatcatccggaggaaaaatatt

SEQ ID NO: 4722900 - DNA, 25 bp, Homo sapien
aaatattttcaaccatcagagaaat

SEQ ID NO: 4722901 - DNA, 25 bp, Homo sapien
cagcaggatgcccagacactaatcc

SEQ ID NO: 4722902 - DNA, 25 bp, Homo sapien
gcttcaagccttgtagatccgattt

SEQ ID NO: 4722903 - DNA, 25 bp, Homo sapien
tatatcagtggatgagatgacagca

SEQ ID NO: 4722904 - DNA, 25 bp, Homo sapien
gttgataccatcgttgttgttgtta

SEQ ID NO: 4722905 - DNA, 25 bp, Homo sapien
tatgctccatatcctgttaccaaat

SEQ ID NO: 4722906 - DNA, 25 bp, Homo sapien
atcctgttaccaaatagctgagctg

SEQ ID NO: 4722907 - DNA, 25 bp, Homo sapien
gcgcacactgtgcatatgctccata

SEQ ID NO: 4722908 - DNA, 25 bp, Homo sapien
cctaaacagcacagcgcacactgtg

SEQ ID NO: 4722909 - DNA, 25 bp, Homo sapien
tgcttgatgcatggtgaactgtgtc

SEQ ID NO: 4722910 - DNA, 25 bp, Homo sapien
tcatgcttgatgcatggtgaactgt

SEQ ID NO: 4722911 - DNA, 25 bp, Homo sapien
cttgatgcatggtgaactgtgtcct

SEQ ID NO: 4722912 - DNA, 25 bp, Homo sapien
catgcttgatgcatggtgaactgtg

SEQ ID NO: 4722913 - DNA, 25 bp, Homo sapien
tgcagtaaaaccaaactagcgtagt

SEQ ID NO: 4722914 - DNA, 25 bp, Homo sapien
gggtcttcatcaagcactctccatg

SEQ ID NO: 4722915 - DNA, 25 bp, Homo sapien
caaactagcgtagtggccaatttct

SEQ ID NO: 4722916 - DNA, 25 bp, Homo sapien
gctttccaagtgttccaaatgaatg

SEQ ID NO: 4722917 - DNA, 25 bp, Homo sapien
actgtgcccatagcgagcgtaatga

SEQ ID NO: 4722918 - DNA, 25 bp, Homo sapien
gaaattgtagcaaataccaggtggg

SEQ ID NO: 4722919 - DNA, 25 bp, Homo sapien
taatgatggccgtcctctttgtccc

SEQ ID NO: 4722920 - DNA, 25 bp, Homo sapien
cagtggaagtcccttgataaatatc

SEQ ID NO: 4722921 - DNA, 25 bp, Homo sapien
gtgataatttaggtcctgaaagatt

SEQ ID NO: 4722922 - DNA, 25 bp, Homo sapien
atttaggtcctgaaagattttgatt

SEQ ID NO: 4722923 - DNA, 25 bp, Homo sapien
taccacaaatgggtgttaacagttg

SEQ ID NO: 4722924 - DNA, 25 bp, Homo sapien
ccacaaatgggtgttaacagttgta

SEQ ID NO: 4722925 - DNA, 25 bp, Homo sapien
tctgtcacctgaaggtactgaccgg

SEQ ID NO: 4722926 - DNA, 25 bp, Homo sapien
tactgaccggttaggcgttgtctaa

SEQ ID NO: 4722927 - DNA, 25 bp, Homo sapien
gaatgggcttcctagcaggcctatg

SEQ ID NO: 4722928 - DNA, 25 bp, Homo sapien
tgttccctaataggagtttgctggg

SEQ ID NO: 4722929 - DNA, 25 bp, Homo sapien
ggtatctgtccatgttatctctaat

SEQ ID NO: 4722930 - DNA, 25 bp, Homo sapien
tggtatctgtccatgttatctctaa

SEQ ID NO: 4722931 - DNA, 25 bp, Homo sapien
caaggtttcttcaggcccttggctt

SEQ ID NO: 4722932 - DNA, 25 bp, Homo sapien
ttggtatctgtccatgttatctcta

SEQ ID NO: 4722933 - DNA, 25 bp, Homo sapien
acataatcgcccatgatgagctggc

SEQ ID NO: 4722934 - DNA, 25 bp, Homo sapien
ttgggccaagccatcaaatgcagct

SEQ ID NO: 4722935 - DNA, 25 bp, Homo sapien
ttttgcagtctgagggtggaaatga

SEQ ID NO: 4722936 - DNA, 25 bp, Homo sapien
agctggctgagcaaagttgggccaa

SEQ ID NO: 4722937 - DNA, 25 bp, Homo sapien
gaaggtgtgtagaatatgaggccac

SEQ ID NO: 4722938 - DNA, 25 bp, Homo sapien
aggccacatgtcctgtgtgagtgtg

SEQ ID NO: 4722939 - DNA, 25 bp, Homo sapien
ggccacatgtcctgtgtgagtgtgc

SEQ ID NO: 4722940 - DNA, 25 bp, Homo sapien
aggaggaaggtgtgtagaatatgag

SEQ ID NO: 4722941 - DNA, 25 bp, Homo sapien
catttttggtccatcaagttgtctc

SEQ ID NO: 4722942 - DNA, 25 bp, Homo sapien
aacatggtacaggtgatagggtttg

SEQ ID NO: 4722943 - DNA, 25 bp, Homo sapien
ttaatcaggtggctgcaaagctctg

SEQ ID NO: 4722944 - DNA, 25 bp, Homo sapien
tctctcatggcttcgtatgaacatg

SEQ ID NO: 4722945 - DNA, 25 bp, Homo sapien
aaagatggtcagtaaatattctgtg

SEQ ID NO: 4722946 - DNA, 25 bp, Homo sapien
tggacataagaaacagtgacagagg

SEQ ID NO: 4722947 - DNA, 25 bp, Homo sapien
tttctgtgaacagtcgttacgagcg

SEQ ID NO: 4722948 - DNA, 25 bp, Homo sapien
ggactccaatcagtggacataagaa

SEQ ID NO: 4722949 - DNA, 25 bp, Homo sapien
tccatagcaggcaagccgatgctcc

SEQ ID NO: 4722950 - DNA, 25 bp, Homo sapien
tcagaactgcaattccatccagatt

SEQ ID NO: 4722951 - DNA, 25 bp, Homo sapien
taatgtcagctgaggtctggtgcct

SEQ ID NO: 4722952 - DNA, 25 bp, Homo sapien
tgggaaggaaatcgttctcagaact

SEQ ID NO: 4722953 - DNA, 25 bp, Homo sapien
tggctgagttccaaaagggtggacc

SEQ ID NO: 4722954 - DNA, 25 bp, Homo sapien
ttactggctgagttccaaaagggtg

SEQ ID NO: 4722955 - DNA, 25 bp, Homo sapien
ttttttgccacttaatatattctcc

SEQ ID NO: 4722956 - DNA, 25 bp, Homo sapien
ttccaaaagggtggacctccattca

SEQ ID NO: 4722957 - DNA, 25 bp, Homo sapien
cctgccacagaagggtctatgtgga

SEQ ID NO: 4722958 - DNA, 25 bp, Homo sapien
aaattgtgctacagccagcactgag

SEQ ID NO: 4722959 - DNA, 25 bp, Homo sapien
ggacaagtaaaattgtgctacagcc

SEQ ID NO: 4722960 - DNA, 25 bp, Homo sapien
tctatgtggacaagtaaaattgtgc

SEQ ID NO: 4722961 - DNA, 25 bp, Homo sapien
taagggtgacgcagacaagcagaaa

SEQ ID NO: 4722962 - DNA, 25 bp, Homo sapien
gaaaatggctgcctgctagtgccgg

SEQ ID NO: 4722963 - DNA, 25 bp, Homo sapien
catcatagaagctatcaagggctgg

SEQ ID NO: 4722964 - DNA, 25 bp, Homo sapien
ctagtgccggcttctttagtttggc

SEQ ID NO: 4722965 - DNA, 25 bp, Homo sapien
ttatcaggatattccctcagccagt

SEQ ID NO: 4722966 - DNA, 25 bp, Homo sapien
ccctcagccagtgctttgcattctc

SEQ ID NO: 4722967 - DNA, 25 bp, Homo sapien
cctcagccagtgctttgcattctca

SEQ ID NO: 4722968 - DNA, 25 bp, Homo sapien
atcaggatattccctcagccagtgc

SEQ ID NO: 4722969 - DNA, 25 bp, Homo sapien
aaagaggccgagattaagggaggca

SEQ ID NO: 4722970 - DNA, 25 bp, Homo sapien
tgctgtttgccactacttctatttt

SEQ ID NO: 4722971 - DNA, 25 bp, Homo sapien
cagagccactactgctgtttgccac

SEQ ID NO: 4722972 - DNA, 25 bp, Homo sapien
cctgggcctataaccaagatcataa

SEQ ID NO: 4722973 - DNA, 25 bp, Homo sapien
cagtttcatagagttccacctggcc

SEQ ID NO: 4722974 - DNA, 25 bp, Homo sapien
aaatgtctggtatatgggacccacc

SEQ ID NO: 4722975 - DNA, 25 bp, Homo sapien
tactgggctttttgagacacatctc

SEQ ID NO: 4722976 - DNA, 25 bp, Homo sapien
gagccgagatatacatcctgattgc

SEQ ID NO: 4722977 - DNA, 25 bp, Homo sapien
gttgttggtcccacaatattcactg

SEQ ID NO: 4722978 - DNA, 25 bp, Homo sapien
acacattctcgccttctgtccatac

SEQ ID NO: 4722979 - DNA, 25 bp, Homo sapien
gacagccaccttaaacccttctgga

SEQ ID NO: 4722980 - DNA, 25 bp, Homo sapien
tctggatttgataactcaatgcaca

SEQ ID NO: 4722981 - DNA, 25 bp, Homo sapien
tctgctggagtatcagggcacccat

SEQ ID NO: 4722982 - DNA, 25 bp, Homo sapien
gaaagtgcaaagttccctagaggcc

SEQ ID NO: 4722983 - DNA, 25 bp, Homo sapien
taacatccccgacttggctgaaaac

SEQ ID NO: 4722984 - DNA, 25 bp, Homo sapien
cagtctatgcatccaaaacgagagc

SEQ ID NO: 4722985 - DNA, 25 bp, Homo sapien
cgaacagtgaatggaaatacgaacc

SEQ ID NO: 4722986 - DNA, 25 bp, Homo sapien
gaaacaaagtacagcacttcccagg

SEQ ID NO: 4722987 - DNA, 25 bp, Homo sapien
tcccaggaatgctgtatgccacaaa

SEQ ID NO: 4722988 - DNA, 25 bp, Homo sapien
gatatgcactgacctttcccacatg

SEQ ID NO: 4722989 - DNA, 25 bp, Homo sapien
tccgtttcattgtgagaagccacac

SEQ ID NO: 4722990 - DNA, 25 bp, Homo sapien
gagtccgtttcattgtgagaagcca

SEQ ID NO: 4722991 - DNA, 25 bp, Homo sapien
cagagtccgtttcattgtgagaagc

SEQ ID NO: 4722992 - DNA, 25 bp, Homo sapien
agtccgtttcattgtgagaagccac

SEQ ID NO: 4722993 - DNA, 25 bp, Homo sapien
gcacatatcttgtgctgaactgcag

SEQ ID NO: 4722994 - DNA, 25 bp, Homo sapien
tttcaagcaatcctgaataagatgg

SEQ ID NO: 4722995 - DNA, 25 bp, Homo sapien
taagatggtggttctttgctgtgat

SEQ ID NO: 4722996 - DNA, 25 bp, Homo sapien
tttctccttgcacctttcaagcaat

SEQ ID NO: 4722997 - DNA, 25 bp, Homo sapien
tgtaaataaaatccttcagatgcct

SEQ ID NO: 4722998 - DNA, 25 bp, Homo sapien
gtaaataaaatccttcagatgcctc

SEQ ID NO: 4722999 - DNA, 25 bp, Homo sapien
agaaggacttctcaagtgccctgta

SEQ ID NO: 4723000 - DNA, 25 bp, Homo sapien
tgtgtgtaatagtcccactaagtag

SEQ ID NO: 4723001 - DNA, 25 bp, Homo sapien
gaagggcctgtagtaaaaatccaga

SEQ ID NO: 4723002 - DNA, 25 bp, Homo sapien
gactccatggatattgaagggcctg

SEQ ID NO: 4723003 - DNA, 25 bp, Homo sapien
tgcggcacgataggaaaactgatat

SEQ ID NO: 4723004 - DNA, 25 bp, Homo sapien
actctagtgcggcacgataggaaaa

SEQ ID NO: 4723005 - DNA, 25 bp, Homo sapien
tgcccaggtactctagtgcggcacg

SEQ ID NO: 4723006 - DNA, 25 bp, Homo sapien
ccaggtactctagtgcggcacgata

SEQ ID NO: 4723007 - DNA, 25 bp, Homo sapien
gaatcactcacagtcatttcagcta

SEQ ID NO: 4723008 - DNA, 25 bp, Homo sapien
tgaacattaccttcccagacaagtg

SEQ ID NO: 4723009 - DNA, 25 bp, Homo sapien
aagagaggctgatacagacacaaac

SEQ ID NO: 4723010 - DNA, 25 bp, Homo sapien
ccaagcagtggcaggtcgagtgaac

SEQ ID NO: 4723011 - DNA, 25 bp, Homo sapien
gacttccaagctttccatccctgaa

SEQ ID NO: 4723012 - DNA, 25 bp, Homo sapien
ccagaaggtagctggtgcggcacac

SEQ ID NO: 4723013 - DNA, 25 bp, Homo sapien
ctgaaaatggcttcacaggactggc

SEQ ID NO: 4723014 - DNA, 25 bp, Homo sapien
gcacaccaggcacacaaatccattt

SEQ ID NO: 4723015 - DNA, 25 bp, Homo sapien
ctagcaaaacgtaggctcttgagat

SEQ ID NO: 4723016 - DNA, 25 bp, Homo sapien
aaacgtaggctcttgagatgcgaaa

SEQ ID NO: 4723017 - DNA, 25 bp, Homo sapien
taggctcttgagatgcgaaaaatgc

SEQ ID NO: 4723018 - DNA, 25 bp, Homo sapien
tcttgagatgcgaaaaatgcaatgg

SEQ ID NO: 4723019 - DNA, 25 bp, Homo sapien
catagctggtcgttgtgttcttaac

SEQ ID NO: 4723020 - DNA, 25 bp, Homo sapien
caatgcttagcgttatgaagactcc

SEQ ID NO: 4723021 - DNA, 25 bp, Homo sapien
aactccttcatatctcattctttcc

SEQ ID NO: 4723022 - DNA, 25 bp, Homo sapien
cagtctggaagatatctacaactcc

SEQ ID NO: 4723023 - DNA, 25 bp, Homo sapien
aaatgcaccagggtggtttactgca

SEQ ID NO: 4723024 - DNA, 25 bp, Homo sapien
aatgcaccagggtggtttactgcac

SEQ ID NO: 4723025 - DNA, 25 bp, Homo sapien
tattaaatagaggagcctttcccca

SEQ ID NO: 4723026 - DNA, 25 bp, Homo sapien
ggtagcatgatctctcaagccttgt

SEQ ID NO: 4723027 - DNA, 25 bp, Homo sapien
gcatgatctctcaagccttgttctt

SEQ ID NO: 4723028 - DNA, 25 bp, Homo sapien
tcaggtagcatgatctctcaagcct

SEQ ID NO: 4723029 - DNA, 25 bp, Homo sapien
gaactgccttactgttcgggactgg

SEQ ID NO: 4723030 - DNA, 25 bp, Homo sapien
tgttttatggacttggccgatgaag

SEQ ID NO: 4723031 - DNA, 25 bp, Homo sapien
tgggtccatcttggccaaactgttc

SEQ ID NO: 4723032 - DNA, 25 bp, Homo sapien
tgaagtcaataaatccttctccgga

SEQ ID NO: 4723033 - DNA, 25 bp, Homo sapien
aaggaaagccacatacccggccgca

SEQ ID NO: 4723034 - DNA, 25 bp, Homo sapien
cgcaaaggaagacgccaggaggatt

SEQ ID NO: 4723035 - DNA, 25 bp, Homo sapien
gaaacttagttatggtttatctgct

SEQ ID NO: 4723036 - DNA, 25 bp, Homo sapien
catacggaccacaagaacaatcatt

SEQ ID NO: 4723037 - DNA, 25 bp, Homo sapien
cactgtcataacgaatgggcaaaaa

SEQ ID NO: 4723038 - DNA, 25 bp, Homo sapien
tatgataaacgcacagccactgtca

SEQ ID NO: 4723039 - DNA, 25 bp, Homo sapien
cccaaatctcaagctgataagaaac

SEQ ID NO: 4723040 - DNA, 25 bp, Homo sapien
tcaacaccactttgtgctaacaact

SEQ ID NO: 4723041 - DNA, 25 bp, Homo sapien
ggtgagcaacttccggtttcaatct

SEQ ID NO: 4723042 - DNA, 25 bp, Homo sapien
aaaattatacaatcacagggagact

SEQ ID NO: 4723043 - DNA, 25 bp, Homo sapien
ttcaggacttacactccaggagcac

SEQ ID NO: 4723044 - DNA, 25 bp, Homo sapien
tgtgtggaataggaaaggtgtctct

SEQ ID NO: 4723045 - DNA, 25 bp, Homo sapien
tctttcacttaaggtcaacagccag

SEQ ID NO: 4723046 - DNA, 25 bp, Homo sapien
aacaatggatcaactaaatagcttt

SEQ ID NO: 4723047 - DNA, 25 bp, Homo sapien
gcagacaatctccaaacctaagttt

SEQ ID NO: 4723048 - DNA, 25 bp, Homo sapien
aaacacaaggcaggtctttgaactg

SEQ ID NO: 4723049 - DNA, 25 bp, Homo sapien
tctgtgaccttgaattcccttagga

SEQ ID NO: 4723050 - DNA, 25 bp, Homo sapien
agaccgttctgctggccagtattgg

SEQ ID NO: 4723051 - DNA, 25 bp, Homo sapien
aacaaagtactggtatcttgcagac

SEQ ID NO: 4723052 - DNA, 25 bp, Homo sapien
cccttaggatatactgtggcatgtt

SEQ ID NO: 4723053 - DNA, 25 bp, Homo sapien
gagcatccgccagaagtcttcagtg

SEQ ID NO: 4723054 - DNA, 25 bp, Homo sapien
cccctgggtagcgatgtaggctttc

SEQ ID NO: 4723055 - DNA, 25 bp, Homo sapien
tcacgcagcttggtgagcatcacaa

SEQ ID NO: 4723056 - DNA, 25 bp, Homo sapien
caactatggtggaattgtgttccca

SEQ ID NO: 4723057 - DNA, 25 bp, Homo sapien
acccttgtggattcatatggcataa

SEQ ID NO: 4723058 - DNA, 25 bp, Homo sapien
ttattacatggaagattggcactga

SEQ ID NO: 4723059 - DNA, 25 bp, Homo sapien
ttctactccacggataggctgcagg

SEQ ID NO: 4723060 - DNA, 25 bp, Homo sapien
tggcataatattaacaaggcgattt

SEQ ID NO: 4723061 - DNA, 25 bp, Homo sapien
aaattcgagctccattcctgtgaca

SEQ ID NO: 4723062 - DNA, 25 bp, Homo sapien
ttctagctggcacttcggtatttcc

SEQ ID NO: 4723063 - DNA, 25 bp, Homo sapien
tatgacgatgaagcaaccagtccgg

SEQ ID NO: 4723064 - DNA, 25 bp, Homo sapien
tgaaccatatagttcctctgggctc

SEQ ID NO: 4723065 - DNA, 25 bp, Homo sapien
agggtgcctgtctcaactgaaatgg

SEQ ID NO: 4723066 - DNA, 25 bp, Homo sapien
cagggtgcctgtctcaactgaaatg

SEQ ID NO: 4723067 - DNA, 25 bp, Homo sapien
gaggagctttctgcgttcacattta

SEQ ID NO: 4723068 - DNA, 25 bp, Homo sapien
gctttcgtctactctctcaagctgc

SEQ ID NO: 4723069 - DNA, 25 bp, Homo sapien
aatcttgctttcgtctactctctca

SEQ ID NO: 4723070 - DNA, 25 bp, Homo sapien
caataaatgtgccttatacctgagg

SEQ ID NO: 4723071 - DNA, 25 bp, Homo sapien
aatattatcattcatccagttacaa

SEQ ID NO: 4723072 - DNA, 25 bp, Homo sapien
catccagttacaacatttgttttca

SEQ ID NO: 4723073 - DNA, 25 bp, Homo sapien
agatgcaggaatagcttggcaattt

SEQ ID NO: 4723074 - DNA, 25 bp, Homo sapien
tgcaggaatagcttggcaattttca

SEQ ID NO: 4723075 - DNA, 25 bp, Homo sapien
caggaatagcttggcaattttcatt

SEQ ID NO: 4723076 - DNA, 25 bp, Homo sapien
gatgcaggaatagcttggcaatttt

SEQ ID NO: 4723077 - DNA, 25 bp, Homo sapien
tcactcatggagtctaggcctattt

SEQ ID NO: 4723078 - DNA, 25 bp, Homo sapien
gaacatataagcagcaaatatactg

SEQ ID NO: 4723079 - DNA, 25 bp, Homo sapien
aaatatactgcatttgagacaagca

SEQ ID NO: 4723080 - DNA, 25 bp, Homo sapien
gagggataaaccgagggctgaattc

SEQ ID NO: 4723081 - DNA, 25 bp, Homo sapien
gggctgaattcatcaaagaacatat

SEQ ID NO: 4723082 - DNA, 25 bp, Homo sapien
gaaggctagcatctcctattccgta

SEQ ID NO: 4723083 - DNA, 25 bp, Homo sapien
tgtgccatcaacagactgaagaccc

SEQ ID NO: 4723084 - DNA, 25 bp, Homo sapien
agaatctggcataatgggttccaca

SEQ ID NO: 4723085 - DNA, 25 bp, Homo sapien
ggtctatggttcacgtttgtcagca

SEQ ID NO: 4723086 - DNA, 25 bp, Homo sapien
gaacaaggctcaaaagtggaacaaa

SEQ ID NO: 4723087 - DNA, 25 bp, Homo sapien
aatgtaatccatgacctcttaagaa

SEQ ID NO: 4723088 - DNA, 25 bp, Homo sapien
caaatcagttgtcatgtccctctgg

SEQ ID NO: 4723089 - DNA, 25 bp, Homo sapien
agtggaagactaagacgatatagga

SEQ ID NO: 4723090 - DNA, 25 bp, Homo sapien
gatatattgggcagaaggcttggat

SEQ ID NO: 4723091 - DNA, 25 bp, Homo sapien
gcagaaggcttggatctactttgtc

SEQ ID NO: 4723092 - DNA, 25 bp, Homo sapien
tattgggcagaaggcttggatctac

SEQ ID NO: 4723093 - DNA, 25 bp, Homo sapien
tgggcagaaggcttggatctacttt

SEQ ID NO: 4723094 - DNA, 25 bp, Homo sapien
ccagcatcgggagggttacaggttt

SEQ ID NO: 4723095 - DNA, 25 bp, Homo sapien
ctgcagtgcacaaccatcggaccag

SEQ ID NO: 4723096 - DNA, 25 bp, Homo sapien
tacaggttttgactctacgtaagaa

SEQ ID NO: 4723097 - DNA, 25 bp, Homo sapien
caggcggtgaactggaattgtctca

SEQ ID NO: 4723098 - DNA, 25 bp, Homo sapien
cagcgttacttgaacgagtccgtgg

SEQ ID NO: 4723099 - DNA, 25 bp, Homo sapien
tctgctaggccaatactggtcacac

SEQ ID NO: 4723100 - DNA, 25 bp, Homo sapien
tcgaacacaatatgtggccagctcc

SEQ ID NO: 4723101 - DNA, 25 bp, Homo sapien
cttgtaaagtgcaaatgttcgaaca

SEQ ID NO: 4723102 - DNA, 25 bp, Homo sapien
tgtagcagccggaatgttctatttt

SEQ ID NO: 4723103 - DNA, 25 bp, Homo sapien
cccggctgatctctattctggagat

SEQ ID NO: 4723104 - DNA, 25 bp, Homo sapien
tcaatgtagcagccggaatgttcta

SEQ ID NO: 4723105 - DNA, 25 bp, Homo sapien
tctattttggtctgttccccggctg

SEQ ID NO: 4723106 - DNA, 25 bp, Homo sapien
caaagagtaattaatgaagggagca

SEQ ID NO: 4723107 - DNA, 25 bp, Homo sapien
tctgttagaaagataagccttaggg

SEQ ID NO: 4723108 - DNA, 25 bp, Homo sapien
gatgcccattcataattagtatctg

SEQ ID NO: 4723109 - DNA, 25 bp, Homo sapien
tgtgaaaacacccagaggagtttta

SEQ ID NO: 4723110 - DNA, 25 bp, Homo sapien
aatatgcaacatagggactctgagg

SEQ ID NO: 4723111 - DNA, 25 bp, Homo sapien
ttcacatagtcacttcctgggatcc

SEQ ID NO: 4723112 - DNA, 25 bp, Homo sapien
cctgtgttgcaatataggcattttg

SEQ ID NO: 4723113 - DNA, 25 bp, Homo sapien
tcatcatgacaactgtggcactccg

SEQ ID NO: 4723114 - DNA, 25 bp, Homo sapien
ggcactccgttgttcccatatcatt

SEQ ID NO: 4723115 - DNA, 25 bp, Homo sapien
tgatatgggaaggtacactagaact

SEQ ID NO: 4723116 - DNA, 25 bp, Homo sapien
tcaaatggtcagaatcaaaaaggga

SEQ ID NO: 4723117 - DNA, 25 bp, Homo sapien
tataggaatgtcagcatgatatggg

SEQ ID NO: 4723118 - DNA, 25 bp, Homo sapien
tgtgcatgatcccttctaccctggg

SEQ ID NO: 4723119 - DNA, 25 bp, Homo sapien
ggttacaaacactgggacgtgcaca

SEQ ID NO: 4723120 - DNA, 25 bp, Homo sapien
gaacacacggatatggaataccacc

SEQ ID NO: 4723121 - DNA, 25 bp, Homo sapien
gatggaaactactgcactctgagat

SEQ ID NO: 4723122 - DNA, 25 bp, Homo sapien
gtaaagttgatcctctcaagaaagg

SEQ ID NO: 4723123 - DNA, 25 bp, Homo sapien
acatgagttggggaattaccagcac

SEQ ID NO: 4723124 - DNA, 25 bp, Homo sapien
tggacacaggaaagtagacggctga

SEQ ID NO: 4723125 - DNA, 25 bp, Homo sapien
gaatacattgcaagatcagcaacat

SEQ ID NO: 4723126 - DNA, 25 bp, Homo sapien
gacggctgattgaactatctttgaa

SEQ ID NO: 4723127 - DNA, 25 bp, Homo sapien
tctgattttactcttcgattagctt

SEQ ID NO: 4723128 - DNA, 25 bp, Homo sapien
gccagccagcccttaaaaatgcttt

SEQ ID NO: 4723129 - DNA, 25 bp, Homo sapien
cttttccgggtaagaaacatcagca

SEQ ID NO: 4723130 - DNA, 25 bp, Homo sapien
tcttcgattagctttctgagaacaa

SEQ ID NO: 4723131 - DNA, 25 bp, Homo sapien
cacagttgcaaacgattaacttgaa

SEQ ID NO: 4723132 - DNA, 25 bp, Homo sapien
caggctaagtgctatctacctttct

SEQ ID NO: 4723133 - DNA, 25 bp, Homo sapien
tcttagaaagactgcaagcaacctg

SEQ ID NO: 4723134 - DNA, 25 bp, Homo sapien
tacacagctctaattagacagctct

SEQ ID NO: 4723135 - DNA, 25 bp, Homo sapien
tctggtccacctgaatgatgcattt

SEQ ID NO: 4723136 - DNA, 25 bp, Homo sapien
tttgttctgcaatcttatgactctg

SEQ ID NO: 4723137 - DNA, 25 bp, Homo sapien
taggtttacatgtacttgacatttg

SEQ ID NO: 4723138 - DNA, 25 bp, Homo sapien
caatcttatgactctggtccacctg

SEQ ID NO: 4723139 - DNA, 25 bp, Homo sapien
attgtgtccttgcctcaggttagtc

SEQ ID NO: 4723140 - DNA, 25 bp, Homo sapien
actttggattctacaagtttaggca

SEQ ID NO: 4723141 - DNA, 25 bp, Homo sapien
ctttggattctacaagtttaggcat

SEQ ID NO: 4723142 - DNA, 25 bp, Homo sapien
ctgaacaactttggattctacaagt

SEQ ID NO: 4723143 - DNA, 25 bp, Homo sapien
acaactttggattctacaagtttag

SEQ ID NO: 4723144 - DNA, 25 bp, Homo sapien
gagaacccgggaatgatcatatgcg

SEQ ID NO: 4723145 - DNA, 25 bp, Homo sapien
cttctatagctgataggagaacccg

SEQ ID NO: 4723146 - DNA, 25 bp, Homo sapien
tgaatgttcccaagtgaactgctgg

SEQ ID NO: 4723147 - DNA, 25 bp, Homo sapien
tacattcgcgtatctattctttggt

SEQ ID NO: 4723148 - DNA, 25 bp, Homo sapien
gtttatactcgttttacacggatca

SEQ ID NO: 4723149 - DNA, 25 bp, Homo sapien
gctgacttgtctttgtgcaacacag

SEQ ID NO: 4723150 - DNA, 25 bp, Homo sapien
tcgttttacacggatcaaacaaaca

SEQ ID NO: 4723151 - DNA, 25 bp, Homo sapien
ataatgctgacttgtctttgtgcaa

SEQ ID NO: 4723152 - DNA, 25 bp, Homo sapien
cactatcatgtgttacagactggag

SEQ ID NO: 4723153 - DNA, 25 bp, Homo sapien
catgcttccatgtgtgccactatca

SEQ ID NO: 4723154 - DNA, 25 bp, Homo sapien
tagaaaatggctagcccagtgcatg

SEQ ID NO: 4723155 - DNA, 25 bp, Homo sapien
cagactggagcatccatttggcaac

SEQ ID NO: 4723156 - DNA, 25 bp, Homo sapien
tgtacaacttgaacaaggcctagag

SEQ ID NO: 4723157 - DNA, 25 bp, Homo sapien
taacccattggctaagctatgaacc

SEQ ID NO: 4723158 - DNA, 25 bp, Homo sapien
tacacgtagtcttatatataccagg

SEQ ID NO: 4723159 - DNA, 25 bp, Homo sapien
cttctcagatccaatagtaggcaaa

SEQ ID NO: 4723160 - DNA, 25 bp, Homo sapien
tgagttttccctacagcgggtccaa

SEQ ID NO: 4723161 - DNA, 25 bp, Homo sapien
taaatggcacgctctacaagataga

SEQ ID NO: 4723162 - DNA, 25 bp, Homo sapien
gggcatatatttcatccagctaggg

SEQ ID NO: 4723163 - DNA, 25 bp, Homo sapien
cctaagaagttctgccagggaagca

SEQ ID NO: 4723164 - DNA, 25 bp, Homo sapien
tcttgttctcaaggccatttgggag

SEQ ID NO: 4723165 - DNA, 25 bp, Homo sapien
tataatccttggtctgtggcatcac

SEQ ID NO: 4723166 - DNA, 25 bp, Homo sapien
atatcccttttcaagagcaaatgag

SEQ ID NO: 4723167 - DNA, 25 bp, Homo sapien
gataaatactgaagctggtagtctt

SEQ ID NO: 4723168 - DNA, 25 bp, Homo sapien
tccaaaagacttctgctgcagcaca

SEQ ID NO: 4723169 - DNA, 25 bp, Homo sapien
gatgcaaagagcaaactagactcct

SEQ ID NO: 4723170 - DNA, 25 bp, Homo sapien
caatatgttgcccaagggaggtcca

SEQ ID NO: 4723171 - DNA, 25 bp, Homo sapien
tgcccataaagttgctgttcctccg

SEQ ID NO: 4723172 - DNA, 25 bp, Homo sapien
gaagctgtgcatagcagcattgcca

SEQ ID NO: 4723173 - DNA, 25 bp, Homo sapien
tcaggtccacagctaagcctactgg

SEQ ID NO: 4723174 - DNA, 25 bp, Homo sapien
agtctatgtgggctatcaggtccac

SEQ ID NO: 4723175 - DNA, 25 bp, Homo sapien
gccagcatgcagttcataactattt

SEQ ID NO: 4723176 - DNA, 25 bp, Homo sapien
gtaaagaataaacacagtgaattac

SEQ ID NO: 4723177 - DNA, 25 bp, Homo sapien
tgtaaagaataaacacagtgaatta

SEQ ID NO: 4723178 - DNA, 25 bp, Homo sapien
tctgcaagttccaagatgggtattg

SEQ ID NO: 4723179 - DNA, 25 bp, Homo sapien
tcaatgtggtctgcaagttccaaga

SEQ ID NO: 4723180 - DNA, 25 bp, Homo sapien
caatctttcaatgtggtctgcaagt

SEQ ID NO: 4723181 - DNA, 25 bp, Homo sapien
gatgggtattggaggatggctagcc

SEQ ID NO: 4723182 - DNA, 25 bp, Homo sapien
catatatggactgagtggtggtttg

SEQ ID NO: 4723183 - DNA, 25 bp, Homo sapien
cgtaggggactgaattactgctcaa

SEQ ID NO: 4723184 - DNA, 25 bp, Homo sapien
cttttcgagcggatcgtgggagaga

SEQ ID NO: 4723185 - DNA, 25 bp, Homo sapien
acacagagccaatcagggaggcgta

SEQ ID NO: 4723186 - DNA, 25 bp, Homo sapien
gaatttctctaagatcctcaacctc

SEQ ID NO: 4723187 - DNA, 25 bp, Homo sapien
agcatcttctcttacaactttcttt

SEQ ID NO: 4723188 - DNA, 25 bp, Homo sapien
ccaccaatgctaccagtagcatctt

SEQ ID NO: 4723189 - DNA, 25 bp, Homo sapien
gaaggtaatgattggtgcaccacca

SEQ ID NO: 4723190 - DNA, 25 bp, Homo sapien
gattaggtagctcatgttgtctcaa

SEQ ID NO: 4723191 - DNA, 25 bp, Homo sapien
tctggctgaccttgtacactaataa

SEQ ID NO: 4723192 - DNA, 25 bp, Homo sapien
tacaagctgaggtgcctgctttcaa

SEQ ID NO: 4723193 - DNA, 25 bp, Homo sapien
tatacactgccatctgaaccacaat

SEQ ID NO: 4723194 - DNA, 25 bp, Homo sapien
tttatcattcataacagacccatca

SEQ ID NO: 4723195 - DNA, 25 bp, Homo sapien
attttatcattcataacagacccat

SEQ ID NO: 4723196 - DNA, 25 bp, Homo sapien
aatttcaaatcgtaatgtttgtttg

SEQ ID NO: 4723197 - DNA, 25 bp, Homo sapien
atttcaaatcgtaatgtttgtttgc

SEQ ID NO: 4723198 - DNA, 25 bp, Homo sapien
ggtgtttgaaagttaaggcgcctca

SEQ ID NO: 4723199 - DNA, 25 bp, Homo sapien
ttattgttcggtatgctgctttttc

SEQ ID NO: 4723200 - DNA, 25 bp, Homo sapien
ggcgcctcagttctacagggtctgt

SEQ ID NO: 4723201 - DNA, 25 bp, Homo sapien
gtggtgtgaagggatctccttattg

SEQ ID NO: 4723202 - DNA, 25 bp, Homo sapien
tattctgcgacctgccaaggtactg

SEQ ID NO: 4723203 - DNA, 25 bp, Homo sapien
tctacctaaaggtgtcagatacagc

SEQ ID NO: 4723204 - DNA, 25 bp, Homo sapien
aaaatgtgctgccaacccattccac

SEQ ID NO: 4723205 - DNA, 25 bp, Homo sapien
agccttgggacaaaatgtgctgcca

SEQ ID NO: 4723206 - DNA, 25 bp, Homo sapien
gatccagatccattgacaccacggg

SEQ ID NO: 4723207 - DNA, 25 bp, Homo sapien
gatgataaagaccactgcaaggaca

SEQ ID NO: 4723208 - DNA, 25 bp, Homo sapien
gacaggacctacaacccagatcaag

SEQ ID NO: 4723209 - DNA, 25 bp, Homo sapien
tcttcttcatccgtgattggctgcg

SEQ ID NO: 4723210 - DNA, 25 bp, Homo sapien
gaaaagcagagtctatttcagttat

SEQ ID NO: 4723211 - DNA, 25 bp, Homo sapien
gaggaaaagcagagtctatttcagt

SEQ ID NO: 4723212 - DNA, 25 bp, Homo sapien
tgaggaaaagcagagtctatttcag

SEQ ID NO: 4723213 - DNA, 25 bp, Homo sapien
aagcagagtctatttcagttataaa

SEQ ID NO: 4723214 - DNA, 25 bp, Homo sapien
tcagaaggtatcaagaaccatgtcc

SEQ ID NO: 4723215 - DNA, 25 bp, Homo sapien
gaatggccaagcttgtgagttccca

SEQ ID NO: 4723216 - DNA, 25 bp, Homo sapien
tctggaacttcataaactagagggc

SEQ ID NO: 4723217 - DNA, 25 bp, Homo sapien
gatagaccttcctcatgaatccggg

SEQ ID NO: 4723218 - DNA, 25 bp, Homo sapien
cattactgctaacacaaagaagaca

SEQ ID NO: 4723219 - DNA, 25 bp, Homo sapien
agacatattcttgaccactttggag

SEQ ID NO: 4723220 - DNA, 25 bp, Homo sapien
ggacatcaaagtgagcggcaatata

SEQ ID NO: 4723221 - DNA, 25 bp, Homo sapien
aacggatgcttctgcgcttcctaga

SEQ ID NO: 4723222 - DNA, 25 bp, Homo sapien
taaatcccgcttctagagatgacac

SEQ ID NO: 4723223 - DNA, 25 bp, Homo sapien
cttgaactcatctcctcgtctgaac

SEQ ID NO: 4723224 - DNA, 25 bp, Homo sapien
tgaagccagtgatcataaatcccgc

SEQ ID NO: 4723225 - DNA, 25 bp, Homo sapien
cgtctgaacacgatcaaatttaatt

SEQ ID NO: 4723226 - DNA, 25 bp, Homo sapien
ggactctcccatggcttgataaatt

SEQ ID NO: 4723227 - DNA, 25 bp, Homo sapien
ttcccgcgagatttcttcaaaggca

SEQ ID NO: 4723228 - DNA, 25 bp, Homo sapien
ggcttgataaatttcccgcgagatt

SEQ ID NO: 4723229 - DNA, 25 bp, Homo sapien
cttcaaaggcacaattattatgtag

SEQ ID NO: 4723230 - DNA, 25 bp, Homo sapien
tctttgccgtgaccctgtgctgcag

SEQ ID NO: 4723231 - DNA, 25 bp, Homo sapien
gcaggtacttcaggcagttgcacag

SEQ ID NO: 4723232 - DNA, 25 bp, Homo sapien
gaaggcaggcttggtacgtaataca

SEQ ID NO: 4723233 - DNA, 25 bp, Homo sapien
caattaacttctgtgtggctcggcc

SEQ ID NO: 4723234 - DNA, 25 bp, Homo sapien
cttcattactgctttgacatgaaaa

SEQ ID NO: 4723235 - DNA, 25 bp, Homo sapien
tttgaaaggcatggcggagttataa

SEQ ID NO: 4723236 - DNA, 25 bp, Homo sapien
tcattactgctttgacatgaaaatt

SEQ ID NO: 4723237 - DNA, 25 bp, Homo sapien
ggcatggcggagttataattctctg

SEQ ID NO: 4723238 - DNA, 25 bp, Homo sapien
cttgcttgacattctataactgaaa

SEQ ID NO: 4723239 - DNA, 25 bp, Homo sapien
cagacttgcttgacattctataact

SEQ ID NO: 4723240 - DNA, 25 bp, Homo sapien
agacttgcttgacattctataactg

SEQ ID NO: 4723241 - DNA, 25 bp, Homo sapien
gacttgcttgacattctataactga

SEQ ID NO: 4723242 - DNA, 25 bp, Homo sapien
gttattatagcttcaaaatactgat

SEQ ID NO: 4723243 - DNA, 25 bp, Homo sapien
gtttttgctgaacctattaatatga

SEQ ID NO: 4723244 - DNA, 25 bp, Homo sapien
gaatgggctgatcagttattatagc

SEQ ID NO: 4723245 - DNA, 25 bp, Homo sapien
acctattaatatgaatgggctgatc

SEQ ID NO: 4723246 - DNA, 25 bp, Homo sapien
gacactgggactatatggcccgggc

SEQ ID NO: 4723247 - DNA, 25 bp, Homo sapien
atggcccgggccctttgctcgtatg

SEQ ID NO: 4723248 - DNA, 25 bp, Homo sapien
tcctgaactggacactgggactata

SEQ ID NO: 4723249 - DNA, 25 bp, Homo sapien
ggccctttgctcgtatgagcacgta

SEQ ID NO: 4723250 - DNA, 25 bp, Homo sapien
gaacaataagctgctccatcgggag

SEQ ID NO: 4723251 - DNA, 25 bp, Homo sapien
ccaaatgtgtccaccggagggtgcc

SEQ ID NO: 4723252 - DNA, 25 bp, Homo sapien
gccaaattttagacggtagccctga

SEQ ID NO: 4723253 - DNA, 25 bp, Homo sapien
taagtggctccatatccttgcggcc

SEQ ID NO: 4723254 - DNA, 25 bp, Homo sapien
tattactgttcaaggcacatacatg

SEQ ID NO: 4723255 - DNA, 25 bp, Homo sapien
aaacacaaaagttgaccatagtcca

SEQ ID NO: 4723256 - DNA, 25 bp, Homo sapien
taaaagcctgctagaagctacctat

SEQ ID NO: 4723257 - DNA, 25 bp, Homo sapien
gttgaccatagtccatttatttcct

SEQ ID NO: 4723258 - DNA, 25 bp, Homo sapien
agtaggaagtttcaggctggagccc

SEQ ID NO: 4723259 - DNA, 25 bp, Homo sapien
ggcttgctgcgagcaccatctcctt

SEQ ID NO: 4723260 - DNA, 25 bp, Homo sapien
ttgtgtaggctgtgacggtgaggga

SEQ ID NO: 4723261 - DNA, 25 bp, Homo sapien
ctttggttgtgtaggctgtgacggt

SEQ ID NO: 4723262 - DNA, 25 bp, Homo sapien
actgattcaaaacatgctactaatg

SEQ ID NO: 4723263 - DNA, 25 bp, Homo sapien
atgctaagccctggaaatttcatgc

SEQ ID NO: 4723264 - DNA, 25 bp, Homo sapien
ggaaaaacaaggccgtctgccttca

SEQ ID NO: 4723265 - DNA, 25 bp, Homo sapien
gcacatcccttgcagccatgctaag

SEQ ID NO: 4723266 - DNA, 25 bp, Homo sapien
tgttcagtagtatcatcaaattccc

SEQ ID NO: 4723267 - DNA, 25 bp, Homo sapien
gttcagtagtatcatcaaattccca

SEQ ID NO: 4723268 - DNA, 25 bp, Homo sapien
atgttcagtagtatcatcaaattcc

SEQ ID NO: 4723269 - DNA, 25 bp, Homo sapien
caattcccttcctcacttgatagta

SEQ ID NO: 4723270 - DNA, 25 bp, Homo sapien
caatttcaggatatgaactaagata

SEQ ID NO: 4723271 - DNA, 25 bp, Homo sapien
taagagcaatttcaggatatgaact

SEQ ID NO: 4723272 - DNA, 25 bp, Homo sapien
cttcctcacttgatagtaactctga

SEQ ID NO: 4723273 - DNA, 25 bp, Homo sapien
catgctgtttattgggcacgggtga

SEQ ID NO: 4723274 - DNA, 25 bp, Homo sapien
cgactttgcgaggaggaccactagg

SEQ ID NO: 4723275 - DNA, 25 bp, Homo sapien
gggtgagcgccatgagactttaaca

SEQ ID NO: 4723276 - DNA, 25 bp, Homo sapien
tgacagcctctacctcgactttgcg

SEQ ID NO: 4723277 - DNA, 25 bp, Homo sapien
gaaggaattcccaaaatctcgtgag

SEQ ID NO: 4723278 - DNA, 25 bp, Homo sapien
gccagggccgacatctgtatgggct

SEQ ID NO: 4723279 - DNA, 25 bp, Homo sapien
cacagtgatccggtattcagtccat

SEQ ID NO: 4723280 - DNA, 25 bp, Homo sapien
tggttcgaatcaacacggacaagct

SEQ ID NO: 4723281 - DNA, 25 bp, Homo sapien
tacttgatggagtattcagtgataa

SEQ ID NO: 4723282 - DNA, 25 bp, Homo sapien
cttgatggagtattcagtgataatg

SEQ ID NO: 4723283 - DNA, 25 bp, Homo sapien
gatggagtattcagtgataatgcca

SEQ ID NO: 4723284 - DNA, 25 bp, Homo sapien
agtgtacttgatggagtattcagtg

SEQ ID NO: 4723285 - DNA, 25 bp, Homo sapien
gtgcaactaatgtcttgaggaggag

SEQ ID NO: 4723286 - DNA, 25 bp, Homo sapien
tgggctggtgcaactaatgtcttga

SEQ ID NO: 4723287 - DNA, 25 bp, Homo sapien
ctggtggaggttgccaacttaccaa

SEQ ID NO: 4723288 - DNA, 25 bp, Homo sapien
gctggtgcaactaatgtcttgagga

SEQ ID NO: 4723289 - DNA, 25 bp, Homo sapien
actttatgcaaaacaatctgccctg

SEQ ID NO: 4723290 - DNA, 25 bp, Homo sapien
tatgcttaagggtaacagctccaaa

SEQ ID NO: 4723291 - DNA, 25 bp, Homo sapien
tttgattgcaaagctaaagcctgtg

SEQ ID NO: 4723292 - DNA, 25 bp, Homo sapien
tccacaggtactacacacagagtta

SEQ ID NO: 4723293 - DNA, 25 bp, Homo sapien
gcagccagacggaaatagtataagc

SEQ ID NO: 4723294 - DNA, 25 bp, Homo sapien
atatgatgtccctggctcaatggta

SEQ ID NO: 4723295 - DNA, 25 bp, Homo sapien
gactgcatggttctagctgatattt

SEQ ID NO: 4723296 - DNA, 25 bp, Homo sapien
ggtttcagtccttgcagcctatatg

SEQ ID NO: 4723297 - DNA, 25 bp, Homo sapien
gaccagttcatagttggcaatggta

SEQ ID NO: 4723298 - DNA, 25 bp, Homo sapien
tctgctttgaagtttagtggctgcc

SEQ ID NO: 4723299 - DNA, 25 bp, Homo sapien
tatctgaacgtggaggtgtccaaga

SEQ ID NO: 4723300 - DNA, 25 bp, Homo sapien
tggaggtgtccaagagagcaaaata

SEQ ID NO: 4723301 - DNA, 25 bp, Homo sapien
agcatcagcacaaatcttattctca

SEQ ID NO: 4723302 - DNA, 25 bp, Homo sapien
tcaaggtaaactagttgcaagtgac

SEQ ID NO: 4723303 - DNA, 25 bp, Homo sapien
ttagagctatggagaactgagaaga

SEQ ID NO: 4723304 - DNA, 25 bp, Homo sapien
gtttgcttgtataggcctgttgaca

SEQ ID NO: 4723305 - DNA, 25 bp, Homo sapien
ggtcagacatgctttctaaatacag

SEQ ID NO: 4723306 - DNA, 25 bp, Homo sapien
tctatctgagatctcggtaactgtc

SEQ ID NO: 4723307 - DNA, 25 bp, Homo sapien
aatcaggcccaatgttctatctgag

SEQ ID NO: 4723308 - DNA, 25 bp, Homo sapien
tagctttgtcttgaaccatccaatc

SEQ ID NO: 4723309 - DNA, 25 bp, Homo sapien
gtaactgtctctctttatccactga

SEQ ID NO: 4723310 - DNA, 25 bp, Homo sapien
tctccaattgaggtaaaagccagga

SEQ ID NO: 4723311 - DNA, 25 bp, Homo sapien
ttagcacaggttcgctgggaggccc

SEQ ID NO: 4723312 - DNA, 25 bp, Homo sapien
gacactgtagcgtgtggtcgccacc

SEQ ID NO: 4723313 - DNA, 25 bp, Homo sapien
gggacttagtccagcgacactgtag

SEQ ID NO: 4723314 - DNA, 25 bp, Homo sapien
ggaagataaaagacaatgactaccc

SEQ ID NO: 4723315 - DNA, 25 bp, Homo sapien
ggggaagataaaagacaatgactac

SEQ ID NO: 4723316 - DNA, 25 bp, Homo sapien
cttggatgggggaagataaaagaca

SEQ ID NO: 4723317 - DNA, 25 bp, Homo sapien
aagataaaagacaatgactacccat

SEQ ID NO: 4723318 - DNA, 25 bp, Homo sapien
cagatcctcaaagcataatccattg

SEQ ID NO: 4723319 - DNA, 25 bp, Homo sapien
ttggcttgagtgtacccagatcctc

SEQ ID NO: 4723320 - DNA, 25 bp, Homo sapien
tcaaagcataatccattgagcatac

SEQ ID NO: 4723321 - DNA, 25 bp, Homo sapien
ggcttgagtgtacccagatcctcaa

SEQ ID NO: 4723322 - DNA, 25 bp, Homo sapien
gtgatattaacgcttccgcctggca

SEQ ID NO: 4723323 - DNA, 25 bp, Homo sapien
tattggcatatcatcttcaggtgtc

SEQ ID NO: 4723324 - DNA, 25 bp, Homo sapien
cccacggccacacaggtgatattaa

SEQ ID NO: 4723325 - DNA, 25 bp, Homo sapien
ataaggcattggtgaccccacggcc

SEQ ID NO: 4723326 - DNA, 25 bp, Homo sapien
gatttcatgattagtgggtgggata

SEQ ID NO: 4723327 - DNA, 25 bp, Homo sapien
atagagaatcttggtgggacacggc

SEQ ID NO: 4723328 - DNA, 25 bp, Homo sapien
gggatagagaatcttggtgggacac

SEQ ID NO: 4723329 - DNA, 25 bp, Homo sapien
attagtgggtgggatagagaatctt

SEQ ID NO: 4723330 - DNA, 25 bp, Homo sapien
gaaaacatcacctagagtacactga

SEQ ID NO: 4723331 - DNA, 25 bp, Homo sapien
tgacatgcaccgtacagacacgatt

SEQ ID NO: 4723332 - DNA, 25 bp, Homo sapien
gaaggtcaccagcatgtttaagttg

SEQ ID NO: 4723333 - DNA, 25 bp, Homo sapien
ttgattcagacctacaagggcccca

SEQ ID NO: 4723334 - DNA, 25 bp, Homo sapien
tcactctgctcaatctgaagggctc

SEQ ID NO: 4723335 - DNA, 25 bp, Homo sapien
taaattggcaggagcggaatagcga

SEQ ID NO: 4723336 - DNA, 25 bp, Homo sapien
cactcatattttccttggtcagact

SEQ ID NO: 4723337 - DNA, 25 bp, Homo sapien
cgagtgcccgcgctgttggtggcaa

SEQ ID NO: 4723338 - DNA, 25 bp, Homo sapien
tccagtcactggagggttcaaaaac

SEQ ID NO: 4723339 - DNA, 25 bp, Homo sapien
gttcaaaaaccttgacgggcgcaca

SEQ ID NO: 4723340 - DNA, 25 bp, Homo sapien
caaaagaggcagttaacaagacgct

SEQ ID NO: 4723341 - DNA, 25 bp, Homo sapien
tgtgaaattacctagggacaggctc

SEQ ID NO: 4723342 - DNA, 25 bp, Homo sapien
tacaaccattggatctccttgcaag

SEQ ID NO: 4723343 - DNA, 25 bp, Homo sapien
tctgaatgaagtccaatgttgaaat

SEQ ID NO: 4723344 - DNA, 25 bp, Homo sapien
tccatcaaatactgcgaaaaagcag

SEQ ID NO: 4723345 - DNA, 25 bp, Homo sapien
aaatggatccatcaaatactgcgaa

SEQ ID NO: 4723346 - DNA, 25 bp, Homo sapien
tggaccacccattaagtaacagaga

SEQ ID NO: 4723347 - DNA, 25 bp, Homo sapien
gacatcacaaacatggaccacccat

SEQ ID NO: 4723348 - DNA, 25 bp, Homo sapien
gactctgaaacaggctatgacatca

SEQ ID NO: 4723349 - DNA, 25 bp, Homo sapien
gaaagacagactctgaaacaggcta

SEQ ID NO: 4723350 - DNA, 25 bp, Homo sapien
gatccggattaccactggctgcaca

SEQ ID NO: 4723351 - DNA, 25 bp, Homo sapien
aatacgaccattgttgttgcttgtg

SEQ ID NO: 4723352 - DNA, 25 bp, Homo sapien
acaaagcatggtggccgtgcgagta

SEQ ID NO: 4723353 - DNA, 25 bp, Homo sapien
tgatcgtaactgcttaatacgacca

SEQ ID NO: 4723354 - DNA, 25 bp, Homo sapien
gtcaatggtagggaagcccctggga

SEQ ID NO: 4723355 - DNA, 25 bp, Homo sapien
agggaagcccctgggaatttgatct

SEQ ID NO: 4723356 - DNA, 25 bp, Homo sapien
tagggaagcccctgggaatttgatc

SEQ ID NO: 4723357 - DNA, 25 bp, Homo sapien
caatggtagggaagcccctgggaat

SEQ ID NO: 4723358 - DNA, 25 bp, Homo sapien
ggaagccacgcagccaaagtcacct

SEQ ID NO: 4723359 - DNA, 25 bp, Homo sapien
atgtttgctgggtactccgtgcttc

SEQ ID NO: 4723360 - DNA, 25 bp, Homo sapien
cacttcccagacaaatcatgtttgc

SEQ ID NO: 4723361 - DNA, 25 bp, Homo sapien
tactccgtgcttctaggaagccacg

SEQ ID NO: 4723362 - DNA, 25 bp, Homo sapien
ccatttgctgggaacctattgggta

SEQ ID NO: 4723363 - DNA, 25 bp, Homo sapien
catagacttccatttgctgggaacc

SEQ ID NO: 4723364 - DNA, 25 bp, Homo sapien
gctgggaacctattgggtatatcac

SEQ ID NO: 4723365 - DNA, 25 bp, Homo sapien
ggttgaaggttcatagacttccatt

SEQ ID NO: 4723366 - DNA, 25 bp, Homo sapien
gctggatattttgaaccaaggaagt

SEQ ID NO: 4723367 - DNA, 25 bp, Homo sapien
gcccgggccacagctggatattttg

SEQ ID NO: 4723368 - DNA, 25 bp, Homo sapien
tctgtcaagggagtgcagtgaaggg

SEQ ID NO: 4723369 - DNA, 25 bp, Homo sapien
ttctaaaaagcaatctctgtcaagg

SEQ ID NO: 4723370 - DNA, 25 bp, Homo sapien
agcaatgacttagccatcatctccc

SEQ ID NO: 4723371 - DNA, 25 bp, Homo sapien
tagcaatgacttagccatcatctcc

SEQ ID NO: 4723372 - DNA, 25 bp, Homo sapien
caatagcaatgacttagccatcatc

SEQ ID NO: 4723373 - DNA, 25 bp, Homo sapien
atagcaatgacttagccatcatctc

SEQ ID NO: 4723374 - DNA, 25 bp, Homo sapien
taaaaactagaacatggagttcaga

SEQ ID NO: 4723375 - DNA, 25 bp, Homo sapien
tacttggttgcgttggcacgtctgc

SEQ ID NO: 4723376 - DNA, 25 bp, Homo sapien
ggagttcagaacacaatccaatttc

SEQ ID NO: 4723377 - DNA, 25 bp, Homo sapien
cataagctatttgtgacttaaaaac

SEQ ID NO: 4723378 - DNA, 25 bp, Homo sapien
caaattccctacctcagatgatcca

SEQ ID NO: 4723379 - DNA, 25 bp, Homo sapien
tgcaacggcgcgatcactgcaacct

SEQ ID NO: 4723380 - DNA, 25 bp, Homo sapien
gtctcaaattccctacctcagatga

SEQ ID NO: 4723381 - DNA, 25 bp, Homo sapien
gagtgcaacggcgcgatcactgcaa

SEQ ID NO: 4723382 - DNA, 25 bp, Homo sapien
gtcctggcagccacaagctgactga

SEQ ID NO: 4723383 - DNA, 25 bp, Homo sapien
gtcatatggctttattgccagccca

SEQ ID NO: 4723384 - DNA, 25 bp, Homo sapien
tggcagtactccctatgggcccgtg

SEQ ID NO: 4723385 - DNA, 25 bp, Homo sapien
gcttttaggccttaagtgaacactg

SEQ ID NO: 4723386 - DNA, 25 bp, Homo sapien
cccatattatgatctgagaggcagc

SEQ ID NO: 4723387 - DNA, 25 bp, Homo sapien
caagtggatgtgcaaaacctgatgt

SEQ ID NO: 4723388 - DNA, 25 bp, Homo sapien
tgagggttggtcgatgaagcaccca

SEQ ID NO: 4723389 - DNA, 25 bp, Homo sapien
gatttgtgcacttctcaggagagag

SEQ ID NO: 4723390 - DNA, 25 bp, Homo sapien
tccagttcacttagataaagcccat

SEQ ID NO: 4723391 - DNA, 25 bp, Homo sapien
tcatccagttcacttagataaagcc

SEQ ID NO: 4723392 - DNA, 25 bp, Homo sapien
gagaaagtaaatgatccacgtggac

SEQ ID NO: 4723393 - DNA, 25 bp, Homo sapien
gacgaaatgggaatctaatgaggcc

SEQ ID NO: 4723394 - DNA, 25 bp, Homo sapien
tcacaatgctagtcttttcaatgat

SEQ ID NO: 4723395 - DNA, 25 bp, Homo sapien
cacaatgctagtcttttcaatgatg

SEQ ID NO: 4723396 - DNA, 25 bp, Homo sapien
tccgtaagggttgtattctgagaac

SEQ ID NO: 4723397 - DNA, 25 bp, Homo sapien
cctcatccctcggagtccgtaaggg

SEQ ID NO: 4723398 - DNA, 25 bp, Homo sapien
tatttctcccacattatttgaggcc

SEQ ID NO: 4723399 - DNA, 25 bp, Homo sapien
tgagaactgatccagacccatcgtc

SEQ ID NO: 4723400 - DNA, 25 bp, Homo sapien
cagacaattttaggtcttgggtctc

SEQ ID NO: 4723401 - DNA, 25 bp, Homo sapien
gatgaaagaggcaactccgccagag

SEQ ID NO: 4723402 - DNA, 25 bp, Homo sapien
ggtctcccgtagcttggcagatgaa

SEQ ID NO: 4723403 - DNA, 25 bp, Homo sapien
tgatcaacgggtgttcgtgtaaacc

SEQ ID NO: 4723404 - DNA, 25 bp, Homo sapien
aagcctcttgccagactaagacatg

SEQ ID NO: 4723405 - DNA, 25 bp, Homo sapien
ggctattgttcacagcataaacaga

SEQ ID NO: 4723406 - DNA, 25 bp, Homo sapien
catttgcagatacccaagcctcttg

SEQ ID NO: 4723407 - DNA, 25 bp, Homo sapien
ctaagacatgctgtagcaatgcttt

SEQ ID NO: 4723408 - DNA, 25 bp, Homo sapien
catgattatatttttgccgcaggcc

SEQ ID NO: 4723409 - DNA, 25 bp, Homo sapien
taccctagctacaaaggatgaggcg

SEQ ID NO: 4723410 - DNA, 25 bp, Homo sapien
ttacaatagcagtgaacacccacag

SEQ ID NO: 4723411 - DNA, 25 bp, Homo sapien
tgtatctagatggaaacactaccct

SEQ ID NO: 4723412 - DNA, 25 bp, Homo sapien
ccttcaacaatgtcaaaagaagtaa

SEQ ID NO: 4723413 - DNA, 25 bp, Homo sapien
catccttcaacaatgtcaaaagaag

SEQ ID NO: 4723414 - DNA, 25 bp, Homo sapien
tccttcaacaatgtcaaaagaagta

SEQ ID NO: 4723415 - DNA, 25 bp, Homo sapien
tcatccttcaacaatgtcaaaagaa

SEQ ID NO: 4723416 - DNA, 25 bp, Homo sapien
gagtcctccagattccaacctgttg

SEQ ID NO: 4723417 - DNA, 25 bp, Homo sapien
gatggtggctaccatgccagagaag

SEQ ID NO: 4723418 - DNA, 25 bp, Homo sapien
agaatctcaggagactgtgttggcc

SEQ ID NO: 4723419 - DNA, 25 bp, Homo sapien
tgacaaaatcaagaaggacactgtg

SEQ ID NO: 4723420 - DNA, 25 bp, Homo sapien
acactattcctgcatacagccagaa

SEQ ID NO: 4723421 - DNA, 25 bp, Homo sapien
cacactacactattcctgcatacag

SEQ ID NO: 4723422 - DNA, 25 bp, Homo sapien
tatccccacactacactattcctgc

SEQ ID NO: 4723423 - DNA, 25 bp, Homo sapien
aaaatatttccccagtcatattcat

SEQ ID NO: 4723424 - DNA, 25 bp, Homo sapien
gacttgttcgtcctatatatctgct

SEQ ID NO: 4723425 - DNA, 25 bp, Homo sapien
tcagctcactaacagagggacagtt

SEQ ID NO: 4723426 - DNA, 25 bp, Homo sapien
cattacacagagaatgaaacagtgg

SEQ ID NO: 4723427 - DNA, 25 bp, Homo sapien
tctaaccccttgacttgggcaggag

SEQ ID NO: 4723428 - DNA, 25 bp, Homo sapien
ccaggtccctgaataagtgacatta

SEQ ID NO: 4723429 - DNA, 25 bp, Homo sapien
tattaagactgttgcctggcatgta

SEQ ID NO: 4723430 - DNA, 25 bp, Homo sapien
tacaaacctatacaataaccacagc

SEQ ID NO: 4723431 - DNA, 25 bp, Homo sapien
gtgagtgcctttcatacaaacctat

SEQ ID NO: 4723432 - DNA, 25 bp, Homo sapien
gatgctaaacagttgctctggcaag

SEQ ID NO: 4723433 - DNA, 25 bp, Homo sapien
gataaacatcatctcaaaactggca

SEQ ID NO: 4723434 - DNA, 25 bp, Homo sapien
gatggatttctcataccctaccaga

SEQ ID NO: 4723435 - DNA, 25 bp, Homo sapien
gatgaggcagacaaagaaactctgt

SEQ ID NO: 4723436 - DNA, 25 bp, Homo sapien
ttgagttgctaaaacactagtaata

SEQ ID NO: 4723437 - DNA, 25 bp, Homo sapien
gcattaatgcagacatacaactttc

SEQ ID NO: 4723438 - DNA, 25 bp, Homo sapien
cctttagccaatgtttgagttgcta

SEQ ID NO: 4723439 - DNA, 25 bp, Homo sapien
tgtcctttaaataccattgctcacc

SEQ ID NO: 4723440 - DNA, 25 bp, Homo sapien
gtggcacatgcctctaatccaaagc

SEQ ID NO: 4723441 - DNA, 25 bp, Homo sapien
ggtggcacatgcctctaatccaaag

SEQ ID NO: 4723442 - DNA, 25 bp, Homo sapien
tggcacatgcctctaatccaaagct

SEQ ID NO: 4723443 - DNA, 25 bp, Homo sapien
ggcacatgcctctaatccaaagcta

SEQ ID NO: 4723444 - DNA, 25 bp, Homo sapien
cacataacaactgcaggatgaggtt

SEQ ID NO: 4723445 - DNA, 25 bp, Homo sapien
tatgagcctctaatcgctgccagga

SEQ ID NO: 4723446 - DNA, 25 bp, Homo sapien
cacagatgagcaacctaagattagc

SEQ ID NO: 4723447 - DNA, 25 bp, Homo sapien
gaaggtgtcatcaactaagctcagc

SEQ ID NO: 4723448 - DNA, 25 bp, Homo sapien
gctgtgactgtgacataactttcct

SEQ ID NO: 4723449 - DNA, 25 bp, Homo sapien
tacacagtgtgtaagctgtgactgt

SEQ ID NO: 4723450 - DNA, 25 bp, Homo sapien
cagtgcttctcaattcttacacagt

SEQ ID NO: 4723451 - DNA, 25 bp, Homo sapien
tcctccatgactctagggcctgaag

SEQ ID NO: 4723452 - DNA, 25 bp, Homo sapien
tgctgtgcattttgagctctcttgc

SEQ ID NO: 4723453 - DNA, 25 bp, Homo sapien
tgaacctggataactctggacctga

SEQ ID NO: 4723454 - DNA, 25 bp, Homo sapien
tacaatgaacctggataactctgga

SEQ ID NO: 4723455 - DNA, 25 bp, Homo sapien
cctggataactctggacctgatgcc

SEQ ID NO: 4723456 - DNA, 25 bp, Homo sapien
ggtatcacaatcactgtggtaatta

SEQ ID NO: 4723457 - DNA, 25 bp, Homo sapien
gttgcctacacttagaatattcagg

SEQ ID NO: 4723458 - DNA, 25 bp, Homo sapien
tattcaagtgaaaggtatcacaatc

SEQ ID NO: 4723459 - DNA, 25 bp, Homo sapien
aagtgtttaaactggctgggcgtag

SEQ ID NO: 4723460 - DNA, 25 bp, Homo sapien
gaaggaaagtgtagacttaattgca

SEQ ID NO: 4723461 - DNA, 25 bp, Homo sapien
tccttcactatctgcagctatggat

SEQ ID NO: 4723462 - DNA, 25 bp, Homo sapien
cagctatggatattgatgaaggaaa

SEQ ID NO: 4723463 - DNA, 25 bp, Homo sapien
gatattgatgaaggaaagtgtagac

SEQ ID NO: 4723464 - DNA, 25 bp, Homo sapien
catggaggctgattagacaaggaca

SEQ ID NO: 4723465 - DNA, 25 bp, Homo sapien
tttggccaagttgaagcctgcttcc

SEQ ID NO: 4723466 - DNA, 25 bp, Homo sapien
tacacatgctattcaagagtgccaa

SEQ ID NO: 4723467 - DNA, 25 bp, Homo sapien
gatatctccgactctaccatgtgct

SEQ ID NO: 4723468 - DNA, 25 bp, Homo sapien
cataaattgagtccagtaatccaag

SEQ ID NO: 4723469 - DNA, 25 bp, Homo sapien
tccaagctttggtgtctctagtcca

SEQ ID NO: 4723470 - DNA, 25 bp, Homo sapien
ttggtgtctctagtccacagaattc

SEQ ID NO: 4723471 - DNA, 25 bp, Homo sapien
catccagccacaaagttgtcagttc

SEQ ID NO: 4723472 - DNA, 25 bp, Homo sapien
ggtgccaactgcaaacaaaaccact

SEQ ID NO: 4723473 - DNA, 25 bp, Homo sapien
aggaggatcccgcagtgtctcagga

SEQ ID NO: 4723474 - DNA, 25 bp, Homo sapien
tgtctcaggatttacttccaaagga

SEQ ID NO: 4723475 - DNA, 25 bp, Homo sapien
aaaaccactcattatggtcacagcc

SEQ ID NO: 4723476 - DNA, 25 bp, Homo sapien
gcagcagcctggctacgtgcaccat

SEQ ID NO: 4723477 - DNA, 25 bp, Homo sapien
cagcagcagcctggctacgtgcacc

SEQ ID NO: 4723478 - DNA, 25 bp, Homo sapien
gcatccgtgcggaggaagaaagtga

SEQ ID NO: 4723479 - DNA, 25 bp, Homo sapien
tctcagcatccgtgcggaggaagaa

SEQ ID NO: 4723480 - DNA, 25 bp, Homo sapien
cagcgagtctgtccgatctgaaatt

SEQ ID NO: 4723481 - DNA, 25 bp, Homo sapien
tctgaaatttcagctggaacacttt

SEQ ID NO: 4723482 - DNA, 25 bp, Homo sapien
cagcttggaatcactgcctccggag

SEQ ID NO: 4723483 - DNA, 25 bp, Homo sapien
cagcgtgcgcgagcagcttggaatc

SEQ ID NO: 4723484 - DNA, 25 bp, Homo sapien
gacagactgcacacattacaatagg

SEQ ID NO: 4723485 - DNA, 25 bp, Homo sapien
taaaatttccttgatgacagactgc

SEQ ID NO: 4723486 - DNA, 25 bp, Homo sapien
tatacatcaagctataagacattag

SEQ ID NO: 4723487 - DNA, 25 bp, Homo sapien
gaacattttacatgatctgtcttgg

SEQ ID NO: 4723488 - DNA, 25 bp, Homo sapien
tcttatttcaagaaggctctggaga

SEQ ID NO: 4723489 - DNA, 25 bp, Homo sapien
atcttatttcaagaaggctctggag

SEQ ID NO: 4723490 - DNA, 25 bp, Homo sapien
caatacactgactttacataataat

SEQ ID NO: 4723491 - DNA, 25 bp, Homo sapien
ttctgaatcctgtgagacctgacaa

SEQ ID NO: 4723492 - DNA, 25 bp, Homo sapien
caaggtattgtctggtcttctgaat

SEQ ID NO: 4723493 - DNA, 25 bp, Homo sapien
tcatctttatcaaggtattgtctgg

SEQ ID NO: 4723494 - DNA, 25 bp, Homo sapien
taagctgaggcaatcatggtactcg

SEQ ID NO: 4723495 - DNA, 25 bp, Homo sapien
taaaccctagaaactctcgccaggc

SEQ ID NO: 4723496 - DNA, 25 bp, Homo sapien
aatgtactctactgaatggcctatg

SEQ ID NO: 4723497 - DNA, 25 bp, Homo sapien
tcagagggcactgtacttcaggacc

SEQ ID NO: 4723498 - DNA, 25 bp, Homo sapien
aactgtcctgagaatgtgtatccca

SEQ ID NO: 4723499 - DNA, 25 bp, Homo sapien
gacctaattttagtgactggagcaa

SEQ ID NO: 4723500 - DNA, 25 bp, Homo sapien
caaagatatgatcctatgggaccta

SEQ ID NO: 4723501 - DNA, 25 bp, Homo sapien
agaggtattacccaactggttgaca

SEQ ID NO: 4723502 - DNA, 25 bp, Homo sapien
caggaccaattctgctttgttgagg

SEQ ID NO: 4723503 - DNA, 25 bp, Homo sapien
cattcttgcgctgggtcctgggccg

SEQ ID NO: 4723504 - DNA, 25 bp, Homo sapien
gtcctgggccgtgacttccaagctc

SEQ ID NO: 4723505 - DNA, 25 bp, Homo sapien
cacaggaccaattctgctttgttga

SEQ ID NO: 4723506 - DNA, 25 bp, Homo sapien
acaggcagtctgagaagccgcttaa

SEQ ID NO: 4723507 - DNA, 25 bp, Homo sapien
tgccagtcggcttaacaaataaagt

SEQ ID NO: 4723508 - DNA, 25 bp, Homo sapien
gtggctaccagctacaactcctcag

SEQ ID NO: 4723509 - DNA, 25 bp, Homo sapien
aaacaaggagtggttatgctggcca

SEQ ID NO: 4723510 - DNA, 25 bp, Homo sapien
cacacaacttctagctttactcagc

SEQ ID NO: 4723511 - DNA, 25 bp, Homo sapien
gcccagaacttacacattcctattg

SEQ ID NO: 4723512 - DNA, 25 bp, Homo sapien
gagcaacagcaatatggagtcaaag

SEQ ID NO: 4723513 - DNA, 25 bp, Homo sapien
ccttgggaagctagacactcatgct

SEQ ID NO: 4723514 - DNA, 25 bp, Homo sapien
gactctaccctttatgtcatgtctg

SEQ ID NO: 4723515 - DNA, 25 bp, Homo sapien
ggagagaggtccctattaggtctca

SEQ ID NO: 4723516 - DNA, 25 bp, Homo sapien
gatggataatcttgcttactataat

SEQ ID NO: 4723517 - DNA, 25 bp, Homo sapien
gcaagtatgtgtactgactctaccc

SEQ ID NO: 4723518 - DNA, 25 bp, Homo sapien
aaaagtggtacaatgcccctgctgc

SEQ ID NO: 4723519 - DNA, 25 bp, Homo sapien
cagatgactcgtacctgggtagcca

SEQ ID NO: 4723520 - DNA, 25 bp, Homo sapien
taccatgtgagcagtccaacggtgg

SEQ ID NO: 4723521 - DNA, 25 bp, Homo sapien
taaggtcctgtagcgctttagcggc

SEQ ID NO: 4723522 - DNA, 25 bp, Homo sapien
catctcttagcctcaaaaatggaac

SEQ ID NO: 4723523 - DNA, 25 bp, Homo sapien
aacatctcttagcctcaaaaatgga

SEQ ID NO: 4723524 - DNA, 25 bp, Homo sapien
acatctcttagcctcaaaaatggaa

SEQ ID NO: 4723525 - DNA, 25 bp, Homo sapien
ggtaaaacaatgctgagaactactg

SEQ ID NO: 4723526 - DNA, 25 bp, Homo sapien
taaaaaacacgtgattctatttgac

SEQ ID NO: 4723527 - DNA, 25 bp, Homo sapien
tgattctatttgacatcatgtcagc

SEQ ID NO: 4723528 - DNA, 25 bp, Homo sapien
aactactgggctaaattcccagaca

SEQ ID NO: 4723529 - DNA, 25 bp, Homo sapien
cgccttccttaatgacgctccctgc

SEQ ID NO: 4723530 - DNA, 25 bp, Homo sapien
gaacattcacaatcgccttccttaa

SEQ ID NO: 4723531 - DNA, 25 bp, Homo sapien
gccttccttaatgacgctccctgcc

SEQ ID NO: 4723532 - DNA, 25 bp, Homo sapien
gaagaacattcacaatcgccttcct

SEQ ID NO: 4723533 - DNA, 25 bp, Homo sapien
taaaaattataacgcctgagcaaca

SEQ ID NO: 4723534 - DNA, 25 bp, Homo sapien
gctgtgatcggctcacttgtaacca

SEQ ID NO: 4723535 - DNA, 25 bp, Homo sapien
ggaagctctttgacactccctttag

SEQ ID NO: 4723536 - DNA, 25 bp, Homo sapien
gagtctaagaggtgaagcctacaga

SEQ ID NO: 4723537 - DNA, 25 bp, Homo sapien
ggttagagctcacctcatatcttaa

SEQ ID NO: 4723538 - DNA, 25 bp, Homo sapien
gacaaggcaaaatgggtctaaagag

SEQ ID NO: 4723539 - DNA, 25 bp, Homo sapien
gttccaacgagtgtggtctgctcct

SEQ ID NO: 4723540 - DNA, 25 bp, Homo sapien
caacagtggtatgtatggcgagaca

SEQ ID NO: 4723541 - DNA, 25 bp, Homo sapien
aaactctctggatatggtgtcccga

SEQ ID NO: 4723542 - DNA, 25 bp, Homo sapien
tagttcttcctaggacccagactgg

SEQ ID NO: 4723543 - DNA, 25 bp, Homo sapien
gaaataacactgtgagatggaacac

SEQ ID NO: 4723544 - DNA, 25 bp, Homo sapien
taagtaccgctgactgaagcatgaa

SEQ ID NO: 4723545 - DNA, 25 bp, Homo sapien
tggacgtttactactgcagggctgt

SEQ ID NO: 4723546 - DNA, 25 bp, Homo sapien
gatgttaccattgccatgtagggcc

SEQ ID NO: 4723547 - DNA, 25 bp, Homo sapien
cctgtggcgatataaacaacatgcc

SEQ ID NO: 4723548 - DNA, 25 bp, Homo sapien
caatgtgggccaattcatcagtcct

SEQ ID NO: 4723549 - DNA, 25 bp, Homo sapien
ttttaagaatcagccactcttcagc

SEQ ID NO: 4723550 - DNA, 25 bp, Homo sapien
cagcatcagctgaagcccaatcagt

SEQ ID NO: 4723551 - DNA, 25 bp, Homo sapien
tatcgaacacgctctaaaggaacac

SEQ ID NO: 4723552 - DNA, 25 bp, Homo sapien
cttgattgggcttgggttatcgaac

SEQ ID NO: 4723553 - DNA, 25 bp, Homo sapien
cttcgaggagatcaacacagatggg

SEQ ID NO: 4723554 - DNA, 25 bp, Homo sapien
acctttcgctaaggatctcagagca

SEQ ID NO: 4723555 - DNA, 25 bp, Homo sapien
ctgcacagggaagcttcgaggagat

SEQ ID NO: 4723556 - DNA, 25 bp, Homo sapien
gatatttccacctttcgctaaggat

SEQ ID NO: 4723557 - DNA, 25 bp, Homo sapien
gctaaaaaatctgtcctcctatcaa

SEQ ID NO: 4723558 - DNA, 25 bp, Homo sapien
cctagggaaatctatggtaaataga

SEQ ID NO: 4723559 - DNA, 25 bp, Homo sapien
tagactaactaagctcactgagggt

SEQ ID NO: 4723560 - DNA, 25 bp, Homo sapien
aatagatacgtgactcaacccatca

SEQ ID NO: 4723561 - DNA, 25 bp, Homo sapien
tctgatgactaccaagacagtacct

SEQ ID NO: 4723562 - DNA, 25 bp, Homo sapien
ccttctgagagctataatgtgcact

SEQ ID NO: 4723563 - DNA, 25 bp, Homo sapien
tgaatgcaaacagtagccggtgatt

SEQ ID NO: 4723564 - DNA, 25 bp, Homo sapien
gaaaagtgtttgcaaccttctgaga

SEQ ID NO: 4723565 - DNA, 25 bp, Homo sapien
gcagccagcctgatattccctttaa

SEQ ID NO: 4723566 - DNA, 25 bp, Homo sapien
gagtaagccccatgttttgtgaaaa

SEQ ID NO: 4723567 - DNA, 25 bp, Homo sapien
attgaaaatgtaagagtcaactgaa

SEQ ID NO: 4723568 - DNA, 25 bp, Homo sapien
taatatgcccacttcttagaacatg

SEQ ID NO: 4723569 - DNA, 25 bp, Homo sapien
gggataaggaagtgacaaatttgga

SEQ ID NO: 4723570 - DNA, 25 bp, Homo sapien
gaaccttgccttataccacaaccat

SEQ ID NO: 4723571 - DNA, 25 bp, Homo sapien
tctatgtgtatataactcttggttg

SEQ ID NO: 4723572 - DNA, 25 bp, Homo sapien
tcttctggcaaaagagtaggtagtt

SEQ ID NO: 4723573 - DNA, 25 bp, Homo sapien
ggaggtacatacttagagtctcaga

SEQ ID NO: 4723574 - DNA, 25 bp, Homo sapien
taaaactggaggtacatacttagag

SEQ ID NO: 4723575 - DNA, 25 bp, Homo sapien
acatacttagagtctcagaagtgac

SEQ ID NO: 4723576 - DNA, 25 bp, Homo sapien
tacttagagtctcagaagtgactta

SEQ ID NO: 4723577 - DNA, 25 bp, Homo sapien
taacttcttgtataacaatgagaat

SEQ ID NO: 4723578 - DNA, 25 bp, Homo sapien
tctgtgaccaaatgagagaccaggt

SEQ ID NO: 4723579 - DNA, 25 bp, Homo sapien
aaataccagaacctgtgacgctccc

SEQ ID NO: 4723580 - DNA, 25 bp, Homo sapien
ccctgtaggaggtgacagaaattta

SEQ ID NO: 4723581 - DNA, 25 bp, Homo sapien
tggaagtcactcatctggccctaga

SEQ ID NO: 4723582 - DNA, 25 bp, Homo sapien
tacatgtgacattggattggcctga

SEQ ID NO: 4723583 - DNA, 25 bp, Homo sapien
tcagtgacttctagcaggttgttct

SEQ ID NO: 4723584 - DNA, 25 bp, Homo sapien
aactctcacctagtggtagggagac

SEQ ID NO: 4723585 - DNA, 25 bp, Homo sapien
cacatcgggctggtacaaaatcaaa

SEQ ID NO: 4723586 - DNA, 25 bp, Homo sapien
catacagctatgcagtcacaatggc

SEQ ID NO: 4723587 - DNA, 25 bp, Homo sapien
taatacaacttagtgcaacacggga

SEQ ID NO: 4723588 - DNA, 25 bp, Homo sapien
tcagaatgatctggtagactagggc

SEQ ID NO: 4723589 - DNA, 25 bp, Homo sapien
gaataacaacagattggcaagtata

SEQ ID NO: 4723590 - DNA, 25 bp, Homo sapien
cattagtctctgttagggcggtcat

SEQ ID NO: 4723591 - DNA, 25 bp, Homo sapien
ggcaagtataaaaccaaggcacctg

SEQ ID NO: 4723592 - DNA, 25 bp, Homo sapien
gcacctgttgtacatttggcagcct

SEQ ID NO: 4723593 - DNA, 25 bp, Homo sapien
gctctggcagttgtatcactggcag

SEQ ID NO: 4723594 - DNA, 25 bp, Homo sapien
tatcactggcagaataggataaaat

SEQ ID NO: 4723595 - DNA, 25 bp, Homo sapien
cagttgtatcactggcagaatagga

SEQ ID NO: 4723596 - DNA, 25 bp, Homo sapien
cagagctctggcagttgtatcactg

SEQ ID NO: 4723597 - DNA, 25 bp, Homo sapien
gcctggacgatgtgagataaatatt

SEQ ID NO: 4723598 - DNA, 25 bp, Homo sapien
caagaaagcaccatgtcattgggcg

SEQ ID NO: 4723599 - DNA, 25 bp, Homo sapien
gcttgacttaaaatcttgaccctat

SEQ ID NO: 4723600 - DNA, 25 bp, Homo sapien
tcattgggcgtacttgcctggacga

SEQ ID NO: 4723601 - DNA, 25 bp, Homo sapien
gaatgtgatactgcacaagggcaga

SEQ ID NO: 4723602 - DNA, 25 bp, Homo sapien
tcctcaatgactgcagggaatgtga

SEQ ID NO: 4723603 - DNA, 25 bp, Homo sapien
tattggtagaactaaagaggtgccc

SEQ ID NO: 4723604 - DNA, 25 bp, Homo sapien
tcaatggatacaagtgaggacagct

SEQ ID NO: 4723605 - DNA, 25 bp, Homo sapien
tctctaggaagggtttgcatatgcc

SEQ ID NO: 4723606 - DNA, 25 bp, Homo sapien
ggaaaatcatagtgccagagaagcc

SEQ ID NO: 4723607 - DNA, 25 bp, Homo sapien
tgctctggcccaagaagaatctgtg

SEQ ID NO: 4723608 - DNA, 25 bp, Homo sapien
gaacagttatacaggcccctagtgg

SEQ ID NO: 4723609 - DNA, 25 bp, Homo sapien
cctcctctatggcagctgcgtagac

SEQ ID NO: 4723610 - DNA, 25 bp, Homo sapien
ttaagtacaccagattcccgcagct

SEQ ID NO: 4723611 - DNA, 25 bp, Homo sapien
tacgagctttgattctgccacggga

SEQ ID NO: 4723612 - DNA, 25 bp, Homo sapien
tgccacgggaaggtctcccaaacaa

SEQ ID NO: 4723613 - DNA, 25 bp, Homo sapien
caccatttgcccccaatactacgcc

SEQ ID NO: 4723614 - DNA, 25 bp, Homo sapien
catttgcccccaatactacgcccac

SEQ ID NO: 4723615 - DNA, 25 bp, Homo sapien
ccatttgcccccaatactacgccca

SEQ ID NO: 4723616 - DNA, 25 bp, Homo sapien
gcgggggtcgcacaaatacacatac

SEQ ID NO: 4723617 - DNA, 25 bp, Homo sapien
gagagcgggggtcgcacaaatacac

SEQ ID NO: 4723618 - DNA, 25 bp, Homo sapien
gagagagcgggggtcgcacaaatac

SEQ ID NO: 4723619 - DNA, 25 bp, Homo sapien
gagcgggggtcgcacaaatacacat

SEQ ID NO: 4723620 - DNA, 25 bp, Homo sapien
ccccattctctagagtcgcctctct

SEQ ID NO: 4723621 - DNA, 25 bp, Homo sapien
ccggacacccccattctctagagtc

SEQ ID NO: 4723622 - DNA, 25 bp, Homo sapien
gacacccccattctctagagtcgcc

SEQ ID NO: 4723623 - DNA, 25 bp, Homo sapien
acccccattctctagagtcgcctct

SEQ ID NO: 4723624 - DNA, 25 bp, Homo sapien
ctcccgcgccgccgccaacactttc

SEQ ID NO: 4723625 - DNA, 25 bp, Homo sapien
gcctcccgcgccgccgccaacactt

SEQ ID NO: 4723626 - DNA, 25 bp, Homo sapien
ccgcctcccgcgccgccgccaacac

SEQ ID NO: 4723627 - DNA, 25 bp, Homo sapien
gttggccccgggcagccgccgccac

SEQ ID NO: 4723628 - DNA, 25 bp, Homo sapien
ccgcgccgccgcctccgggcggcca

SEQ ID NO: 4723629 - DNA, 25 bp, Homo sapien
ctccagcgccttcgcgccccgccac

SEQ ID NO: 4723630 - DNA, 25 bp, Homo sapien
cgccgccgcctccgggcggccaatt

SEQ ID NO: 4723631 - DNA, 25 bp, Homo sapien
gccccgccacggccgcgccgccgcc

SEQ ID NO: 4723632 - DNA, 25 bp, Homo sapien
ggcagcctccttcggggatgcttgt

SEQ ID NO: 4723633 - DNA, 25 bp, Homo sapien
tgtaggatccgctttgaaggcaacg

SEQ ID NO: 4723634 - DNA, 25 bp, Homo sapien
gggatgcttgtaggatccgctttga

SEQ ID NO: 4723635 - DNA, 25 bp, Homo sapien
cgctttgaaggcaacgaggaagact

SEQ ID NO: 4723636 - DNA, 25 bp, Homo sapien
gcttttatgttgttggaaatgcagt

SEQ ID NO: 4723637 - DNA, 25 bp, Homo sapien
gcattccattaaccattggcactat

SEQ ID NO: 4723638 - DNA, 25 bp, Homo sapien
tggcactatcccaacccaagtgaaa

SEQ ID NO: 4723639 - DNA, 25 bp, Homo sapien
caaatggatattcccattaaattct

SEQ ID NO: 4723640 - DNA, 25 bp, Homo sapien
tggagatcacagcatgcgactgtga

SEQ ID NO: 4723641 - DNA, 25 bp, Homo sapien
tccactccgggcttcttctgatcct

SEQ ID NO: 4723642 - DNA, 25 bp, Homo sapien
tattcgttcacatactctccccttt

SEQ ID NO: 4723643 - DNA, 25 bp, Homo sapien
ttaacgtccccttatgaatgcttgt

SEQ ID NO: 4723644 - DNA, 25 bp, Homo sapien
tgttttcttcttattcgttcacata

SEQ ID NO: 4723645 - DNA, 25 bp, Homo sapien
taacagcatgggagagttcagtatg

SEQ ID NO: 4723646 - DNA, 25 bp, Homo sapien
cagcttgtgatggaaattttgttca

SEQ ID NO: 4723647 - DNA, 25 bp, Homo sapien
tctctagcagggagtaggccatttg

SEQ ID NO: 4723648 - DNA, 25 bp, Homo sapien
tttgttcagaccagtgtagaactcc

SEQ ID NO: 4723649 - DNA, 25 bp, Homo sapien
cttgagagggcccaaactttccatc

SEQ ID NO: 4723650 - DNA, 25 bp, Homo sapien
gacttgagagggcccaaactttcca

SEQ ID NO: 4723651 - DNA, 25 bp, Homo sapien
acttgagagggcccaaactttccat

SEQ ID NO: 4723652 - DNA, 25 bp, Homo sapien
tttcctgtcttccaaatgaagagtg

SEQ ID NO: 4723653 - DNA, 25 bp, Homo sapien
ctttcctgtcttccaaatgaagagt

SEQ ID NO: 4723654 - DNA, 25 bp, Homo sapien
ttcctgtcttccaaatgaagagtga

SEQ ID NO: 4723655 - DNA, 25 bp, Homo sapien
gccctatgcactgagaaaggttgct

SEQ ID NO: 4723656 - DNA, 25 bp, Homo sapien
cctatgcactgagaaaggttgctta

SEQ ID NO: 4723657 - DNA, 25 bp, Homo sapien
gacagccctatgcactgagaaaggt

SEQ ID NO: 4723658 - DNA, 25 bp, Homo sapien
agccagacagccctatgcactgaga

SEQ ID NO: 4723659 - DNA, 25 bp, Homo sapien
ctacgaatatgagaatacaaaggtc

SEQ ID NO: 4723660 - DNA, 25 bp, Homo sapien
cgaatatgagaatacaaaggtcatc

SEQ ID NO: 4723661 - DNA, 25 bp, Homo sapien
acgaatatgagaatacaaaggtcat

SEQ ID NO: 4723662 - DNA, 25 bp, Homo sapien
tacgaatatgagaatacaaaggtca

SEQ ID NO: 4723663 - DNA, 25 bp, Homo sapien
tattgtctttgccatccaactgcgt

SEQ ID NO: 4723664 - DNA, 25 bp, Homo sapien
caatagtcataataacattccatgt

SEQ ID NO: 4723665 - DNA, 25 bp, Homo sapien
taacattccatgtcttagatggctc

SEQ ID NO: 4723666 - DNA, 25 bp, Homo sapien
ccaactgcgtaggaactgattcaga

SEQ ID NO: 4723667 - DNA, 25 bp, Homo sapien
gggcctaagctacgattaaatccag

SEQ ID NO: 4723668 - DNA, 25 bp, Homo sapien
tactgaaaaaggatcaacattggca

SEQ ID NO: 4723669 - DNA, 25 bp, Homo sapien
gaattctcaatagttcctcagctct

SEQ ID NO: 4723670 - DNA, 25 bp, Homo sapien
tttgtcttcataaggcgcagtccca

SEQ ID NO: 4723671 - DNA, 25 bp, Homo sapien
tcacagaagctgtcaactcctttgt

SEQ ID NO: 4723672 - DNA, 25 bp, Homo sapien
ctgaatttcacagaagctgtcaact

SEQ ID NO: 4723673 - DNA, 25 bp, Homo sapien
gaagctgtcaactcctttgtcttgt

SEQ ID NO: 4723674 - DNA, 25 bp, Homo sapien
cagaagctgtcaactcctttgtctt

SEQ ID NO: 4723675 - DNA, 25 bp, Homo sapien
ggaactttctaatgtaatggttgac

SEQ ID NO: 4723676 - DNA, 25 bp, Homo sapien
actttctaatgtaatggttgacctg

SEQ ID NO: 4723677 - DNA, 25 bp, Homo sapien
ttctaatgtaatggttgacctgctg

SEQ ID NO: 4723678 - DNA, 25 bp, Homo sapien
ctttctaatgtaatggttgacctgc

SEQ ID NO: 4723679 - DNA, 25 bp, Homo sapien
tctatttacaagtgacttggccaac

SEQ ID NO: 4723680 - DNA, 25 bp, Homo sapien
ggtcatagagaaaatgcaagggcaa

SEQ ID NO: 4723681 - DNA, 25 bp, Homo sapien
tagtttctaatgttgtctgccactc

SEQ ID NO: 4723682 - DNA, 25 bp, Homo sapien
tctgccactcctctcactagatggg

SEQ ID NO: 4723683 - DNA, 25 bp, Homo sapien
gagttagccttgcacccgcaaatat

SEQ ID NO: 4723684 - DNA, 25 bp, Homo sapien
gacattaactgagcaaccactgtgg

SEQ ID NO: 4723685 - DNA, 25 bp, Homo sapien
ctttccactaggtcagagttagcct

SEQ ID NO: 4723686 - DNA, 25 bp, Homo sapien
tagtagtcaacagtgagcatgccct

SEQ ID NO: 4723687 - DNA, 25 bp, Homo sapien
tggttcttccagatatgatgctgaa

SEQ ID NO: 4723688 - DNA, 25 bp, Homo sapien
cataatagtttctgaggatattgtc

SEQ ID NO: 4723689 - DNA, 25 bp, Homo sapien
tacttcatgtccatagagttgttca

SEQ ID NO: 4723690 - DNA, 25 bp, Homo sapien
agtagcctattgatcctgtttatcc

SEQ ID NO: 4723691 - DNA, 25 bp, Homo sapien
tgcttttatgggtaactggaggctc

SEQ ID NO: 4723692 - DNA, 25 bp, Homo sapien
cagatgcacatccttttagaacggc

SEQ ID NO: 4723693 - DNA, 25 bp, Homo sapien
gctaccatccaagtacccataaagg

SEQ ID NO: 4723694 - DNA, 25 bp, Homo sapien
taaattccaccattggcgctgcatg

SEQ ID NO: 4723695 - DNA, 25 bp, Homo sapien
aatgacccatccatcgaacagccat

SEQ ID NO: 4723696 - DNA, 25 bp, Homo sapien
gccatgattatcctgccttccacta

SEQ ID NO: 4723697 - DNA, 25 bp, Homo sapien
cttccactataagaggacataccct

SEQ ID NO: 4723698 - DNA, 25 bp, Homo sapien
aacagctacagcaaagcacgcacag

SEQ ID NO: 4723699 - DNA, 25 bp, Homo sapien
tctttcacaaaagggcctctactgg

SEQ ID NO: 4723700 - DNA, 25 bp, Homo sapien
tataacaggtatggggatgtaccca

SEQ ID NO: 4723701 - DNA, 25 bp, Homo sapien
cttggagtcccactaattaaaccat

SEQ ID NO: 4723702 - DNA, 25 bp, Homo sapien
cattgtcaacattggtttaatcctt

SEQ ID NO: 4723703 - DNA, 25 bp, Homo sapien
gatgaagagaatggagcctcaaaag

SEQ ID NO: 4723704 - DNA, 25 bp, Homo sapien
aaaggactgttcaatgtacatttgg

SEQ ID NO: 4723705 - DNA, 25 bp, Homo sapien
ggagcctcaaaaggactgttcaatg

SEQ ID NO: 4723706 - DNA, 25 bp, Homo sapien
gagaatggagcctcaaaaggactgt

SEQ ID NO: 4723707 - DNA, 25 bp, Homo sapien
cttcagcaagtatacgtagatcaac

SEQ ID NO: 4723708 - DNA, 25 bp, Homo sapien
gatcaaccaccaatttttgaccata

SEQ ID NO: 4723709 - DNA, 25 bp, Homo sapien
gccaataagtagaaagaaagtagag

SEQ ID NO: 4723710 - DNA, 25 bp, Homo sapien
gctaaatgatcataggaatgcagaa

SEQ ID NO: 4723711 - DNA, 25 bp, Homo sapien
cagaatcatggttccacacgaggtg

SEQ ID NO: 4723712 - DNA, 25 bp, Homo sapien
gcttgtccaaggcacaactctgaga

SEQ ID NO: 4723713 - DNA, 25 bp, Homo sapien
tgaacgccggagtaatttgaaccat

SEQ ID NO: 4723714 - DNA, 25 bp, Homo sapien
cattagaggaatataaggcacccac

SEQ ID NO: 4723715 - DNA, 25 bp, Homo sapien
ggcacacaacccagtatgctttaaa

SEQ ID NO: 4723716 - DNA, 25 bp, Homo sapien
cataatatttttgtgtctgcctact

SEQ ID NO: 4723717 - DNA, 25 bp, Homo sapien
catacccattatttaggacttgaaa

SEQ ID NO: 4723718 - DNA, 25 bp, Homo sapien
aacaattttaagctacaacccacag

SEQ ID NO: 4723719 - DNA, 25 bp, Homo sapien
cccacgggtgttcaccagacgtctc

SEQ ID NO: 4723720 - DNA, 25 bp, Homo sapien
gttctttagatcccacgggtgttca

SEQ ID NO: 4723721 - DNA, 25 bp, Homo sapien
ccacgggtgttcaccagacgtctcc

SEQ ID NO: 4723722 - DNA, 25 bp, Homo sapien
ctcccctctctatccttggctctgg

SEQ ID NO: 4723723 - DNA, 25 bp, Homo sapien
tcactggatactcccctctctatcc

SEQ ID NO: 4723724 - DNA, 25 bp, Homo sapien
actcccctctctatccttggctctg

SEQ ID NO: 4723725 - DNA, 25 bp, Homo sapien
tggatactcccctctctatccttgg

SEQ ID NO: 4723726 - DNA, 25 bp, Homo sapien
ttccaaatgtaacgataaaccaaga

SEQ ID NO: 4723727 - DNA, 25 bp, Homo sapien
catgacatctggcatacattctgaa

SEQ ID NO: 4723728 - DNA, 25 bp, Homo sapien
tgtacttcagctttcttgcatgaca

SEQ ID NO: 4723729 - DNA, 25 bp, Homo sapien
tatgtctggtgttccgcccattact

SEQ ID NO: 4723730 - DNA, 25 bp, Homo sapien
atccatttgacaatagctgttacca

SEQ ID NO: 4723731 - DNA, 25 bp, Homo sapien
tccatttgacaatagctgttaccat

SEQ ID NO: 4723732 - DNA, 25 bp, Homo sapien
tgcatgttcagcttttatccatttg

SEQ ID NO: 4723733 - DNA, 25 bp, Homo sapien
catgttcagcttttatccatttgac

SEQ ID NO: 4723734 - DNA, 25 bp, Homo sapien
attgatgaaagacatttgatgacca

SEQ ID NO: 4723735 - DNA, 25 bp, Homo sapien
ttgatgaaagacatttgatgaccac

SEQ ID NO: 4723736 - DNA, 25 bp, Homo sapien
aattctttgatgcagagccaggaac

SEQ ID NO: 4723737 - DNA, 25 bp, Homo sapien
ggtggtgactcaatggcaattcttt

SEQ ID NO: 4723738 - DNA, 25 bp, Homo sapien
tgaatgtggaattcaagggtgacag

SEQ ID NO: 4723739 - DNA, 25 bp, Homo sapien
ttgaatgtggaattcaagggtgaca

SEQ ID NO: 4723740 - DNA, 25 bp, Homo sapien
caacaaagcccctaaaaatgatgac

SEQ ID NO: 4723741 - DNA, 25 bp, Homo sapien
gagttcccagctgctacagctcaac

SEQ ID NO: 4723742 - DNA, 25 bp, Homo sapien
tgctacagctcaacaaagcccctaa

SEQ ID NO: 4723743 - DNA, 25 bp, Homo sapien
gagggtctgtgggttgtaggagatg

SEQ ID NO: 4723744 - DNA, 25 bp, Homo sapien
ttgaaacgaggattgcaaatagctg

SEQ ID NO: 4723745 - DNA, 25 bp, Homo sapien
gaggattgcaaatagctgcagcttc

SEQ ID NO: 4723746 - DNA, 25 bp, Homo sapien
aacgaggattgcaaatagctgcagc

SEQ ID NO: 4723747 - DNA, 25 bp, Homo sapien
ccaacgccacattctgaaagtgatc

SEQ ID NO: 4723748 - DNA, 25 bp, Homo sapien
ctgaataaaaactgcagaacagtgc

SEQ ID NO: 4723749 - DNA, 25 bp, Homo sapien
ataaaaactgcagaacagtgcccat

SEQ ID NO: 4723750 - DNA, 25 bp, Homo sapien
tgaataaaaactgcagaacagtgcc

SEQ ID NO: 4723751 - DNA, 25 bp, Homo sapien
gaataaaaactgcagaacagtgccc

SEQ ID NO: 4723752 - DNA, 25 bp, Homo sapien
tatttgcttggctatataaaagggt

SEQ ID NO: 4723753 - DNA, 25 bp, Homo sapien
tcttagtggagtggctgtaatgcac

SEQ ID NO: 4723754 - DNA, 25 bp, Homo sapien
tatttgaagactaatgctagtagct

SEQ ID NO: 4723755 - DNA, 25 bp, Homo sapien
ctaatgtgcctacctcttttgaaac

SEQ ID NO: 4723756 - DNA, 25 bp, Homo sapien
atttcttcaagatttgtgagtatgt

SEQ ID NO: 4723757 - DNA, 25 bp, Homo sapien
tcttcaagatttgtgagtatgtttc

SEQ ID NO: 4723758 - DNA, 25 bp, Homo sapien
caagatttgtgagtatgtttctcaa

SEQ ID NO: 4723759 - DNA, 25 bp, Homo sapien
ttcaagatttgtgagtatgtttctc

SEQ ID NO: 4723760 - DNA, 25 bp, Homo sapien
tggtgtcacttgattctctagactt

SEQ ID NO: 4723761 - DNA, 25 bp, Homo sapien
cataaggcgtcttgtaattctacaa

SEQ ID NO: 4723762 - DNA, 25 bp, Homo sapien
tgagcataggtagcaacatcgatcc

SEQ ID NO: 4723763 - DNA, 25 bp, Homo sapien
caaagacgccaacttgtcaaggagt

SEQ ID NO: 4723764 - DNA, 25 bp, Homo sapien
ctaggataccatggctcttgatgca

SEQ ID NO: 4723765 - DNA, 25 bp, Homo sapien
caagtgcaaatcctctctgaaggaa

SEQ ID NO: 4723766 - DNA, 25 bp, Homo sapien
tacagatcttgtgagcagaagacct

SEQ ID NO: 4723767 - DNA, 25 bp, Homo sapien
cacggatgcttgtatagtgaagagc

SEQ ID NO: 4723768 - DNA, 25 bp, Homo sapien
agcaaatgttcattaaccatgtatc

SEQ ID NO: 4723769 - DNA, 25 bp, Homo sapien
cacacacattaatgatgattcttgc

SEQ ID NO: 4723770 - DNA, 25 bp, Homo sapien
tcttgctccaaaaattgcctttctt

SEQ ID NO: 4723771 - DNA, 25 bp, Homo sapien
caaattccagtgtgctctcttgcct

SEQ ID NO: 4723772 - DNA, 25 bp, Homo sapien
acctcattgaaaggataagtcactg

SEQ ID NO: 4723773 - DNA, 25 bp, Homo sapien
aaagcgtcacgctgtgtaatggaag

SEQ ID NO: 4723774 - DNA, 25 bp, Homo sapien
tacataggtgttactgaaagcgtca

SEQ ID NO: 4723775 - DNA, 25 bp, Homo sapien
taagtcactgtgacatctacagctg

SEQ ID NO: 4723776 - DNA, 25 bp, Homo sapien
tccaaagataactgccagccaaggg

SEQ ID NO: 4723777 - DNA, 25 bp, Homo sapien
tgtaagccagatttgctccaagagc

SEQ ID NO: 4723778 - DNA, 25 bp, Homo sapien
gtagagagaggtggccttcagccat

SEQ ID NO: 4723779 - DNA, 25 bp, Homo sapien
ccatttggcgttcagaagcatgtaa

SEQ ID NO: 4723780 - DNA, 25 bp, Homo sapien
tatctaacctcatgaaacaggagct

SEQ ID NO: 4723781 - DNA, 25 bp, Homo sapien
ttccaaagatactcaagcccactgt

SEQ ID NO: 4723782 - DNA, 25 bp, Homo sapien
agtgctgtaagaaccatgttggaca

SEQ ID NO: 4723783 - DNA, 25 bp, Homo sapien
cagtgctgtcagctaaaacaagtgc

SEQ ID NO: 4723784 - DNA, 25 bp, Homo sapien
ttcttacagtgatcaggccatttgt

SEQ ID NO: 4723785 - DNA, 25 bp, Homo sapien
tcttacagtgatcaggccatttgtc

SEQ ID NO: 4723786 - DNA, 25 bp, Homo sapien
cttacagtgatcaggccatttgtct

SEQ ID NO: 4723787 - DNA, 25 bp, Homo sapien
tttcttacagtgatcaggccatttg

SEQ ID NO: 4723788 - DNA, 25 bp, Homo sapien
taaggacgactgcttcataggcact

SEQ ID NO: 4723789 - DNA, 25 bp, Homo sapien
tcctctgctcattaaggacgactgc

SEQ ID NO: 4723790 - DNA, 25 bp, Homo sapien
tgctcattaaggacgactgcttcat

SEQ ID NO: 4723791 - DNA, 25 bp, Homo sapien
aagaaaacctttcctctgctcatta

SEQ ID NO: 4723792 - DNA, 25 bp, Homo sapien
cggaaaatcctattcagggcttgta

SEQ ID NO: 4723793 - DNA, 25 bp, Homo sapien
cctattcagggcttgtacaacatgt

SEQ ID NO: 4723794 - DNA, 25 bp, Homo sapien
ttacactcggaaaatcctattcagg

SEQ ID NO: 4723795 - DNA, 25 bp, Homo sapien
ttgtacaacatgtaaaacctcagtg

SEQ ID NO: 4723796 - DNA, 25 bp, Homo sapien
tatttcgcagattctctgaagggaa

SEQ ID NO: 4723797 - DNA, 25 bp, Homo sapien
tggttattctatttcgcagattctc

SEQ ID NO: 4723798 - DNA, 25 bp, Homo sapien
ctagtctacggtgttgttggaggta

SEQ ID NO: 4723799 - DNA, 25 bp, Homo sapien
tacggtgttgttggaggtagaataa

SEQ ID NO: 4723800 - DNA, 25 bp, Homo sapien
tcctctacatgcagaggatcaagtt

SEQ ID NO: 4723801 - DNA, 25 bp, Homo sapien
ctacatgcagaggatcaagttcttc

SEQ ID NO: 4723802 - DNA, 25 bp, Homo sapien
cctccagataccttgtgcttttcat

SEQ ID NO: 4723803 - DNA, 25 bp, Homo sapien
ttatctcctccagataccttgtgct

SEQ ID NO: 4723804 - DNA, 25 bp, Homo sapien
tcatgattaacagtagcagacttca

SEQ ID NO: 4723805 - DNA, 25 bp, Homo sapien
tggatgagtcagcaaatgtcctaaa

SEQ ID NO: 4723806 - DNA, 25 bp, Homo sapien
gcagacttcatatgttcctcagtga

SEQ ID NO: 4723807 - DNA, 25 bp, Homo sapien
tggaaagacacacctatatgggagg

SEQ ID NO: 4723808 - DNA, 25 bp, Homo sapien
ataggaagtcttggtccttttagct

SEQ ID NO: 4723809 - DNA, 25 bp, Homo sapien
gaagtcttggtccttttagcttctg

SEQ ID NO: 4723810 - DNA, 25 bp, Homo sapien
gctccgcagaggcaaatcccataga

SEQ ID NO: 4723811 - DNA, 25 bp, Homo sapien
ttgtggacaggtgctctttgaatgc

SEQ ID NO: 4723812 - DNA, 25 bp, Homo sapien
tgcagttctgcaaaacaagtgtggg

SEQ ID NO: 4723813 - DNA, 25 bp, Homo sapien
tccttgtgcttgtagggaccatctg

SEQ ID NO: 4723814 - DNA, 25 bp, Homo sapien
agcagcaagcaggtgtgctggcgcc

SEQ ID NO: 4723815 - DNA, 25 bp, Homo sapien
agagcagcaagcaggtgtgctggcg

SEQ ID NO: 4723816 - DNA, 25 bp, Homo sapien
ctagaagagcagcaagcaggtgtgc

SEQ ID NO: 4723817 - DNA, 25 bp, Homo sapien
cagcaagcaggtgtgctggcgccat

SEQ ID NO: 4723818 - DNA, 25 bp, Homo sapien
agaggcccagtaacaggaccaccag

SEQ ID NO: 4723819 - DNA, 25 bp, Homo sapien
ggcccagtaacaggaccaccaggat

SEQ ID NO: 4723820 - DNA, 25 bp, Homo sapien
ctgagaggcccagtaacaggaccac

SEQ ID NO: 4723821 - DNA, 25 bp, Homo sapien
cctgagaggcccagtaacaggacca

SEQ ID NO: 4723822 - DNA, 25 bp, Homo sapien
tctcaatgaattctagtccttcaga

SEQ ID NO: 4723823 - DNA, 25 bp, Homo sapien
atctcaatgaattctagtccttcag

SEQ ID NO: 4723824 - DNA, 25 bp, Homo sapien
gatctcaatgaattctagtccttca

SEQ ID NO: 4723825 - DNA, 25 bp, Homo sapien
cttgagttagccaccgtcggtgttt

SEQ ID NO: 4723826 - DNA, 25 bp, Homo sapien
agttagccaccgtcggtgttttcag

SEQ ID NO: 4723827 - DNA, 25 bp, Homo sapien
ttagccaccgtcggtgttttcagac

SEQ ID NO: 4723828 - DNA, 25 bp, Homo sapien
tgagttagccaccgtcggtgttttc

SEQ ID NO: 4723829 - DNA, 25 bp, Homo sapien
tttcctccccttgatccattctctc

SEQ ID NO: 4723830 - DNA, 25 bp, Homo sapien
tcctccccttgatccattctctcca

SEQ ID NO: 4723831 - DNA, 25 bp, Homo sapien
cctccccttgatccattctctccat

SEQ ID NO: 4723832 - DNA, 25 bp, Homo sapien
ttttcctccccttgatccattctct

SEQ ID NO: 4723833 - DNA, 25 bp, Homo sapien
ggttgataacctggtgtatgagtag

SEQ ID NO: 4723834 - DNA, 25 bp, Homo sapien
gacacttgcaggttgataacctggt

SEQ ID NO: 4723835 - DNA, 25 bp, Homo sapien
agtagggggaggctaactgattggc

SEQ ID NO: 4723836 - DNA, 25 bp, Homo sapien
gcaatataatagatccctccagctt

SEQ ID NO: 4723837 - DNA, 25 bp, Homo sapien
aagagccatgacaactgccttcagt

SEQ ID NO: 4723838 - DNA, 25 bp, Homo sapien
catgacaactgccttcagttctgtc

SEQ ID NO: 4723839 - DNA, 25 bp, Homo sapien
gccatgacaactgccttcagttctg

SEQ ID NO: 4723840 - DNA, 25 bp, Homo sapien
gagccatgacaactgccttcagttc

SEQ ID NO: 4723841 - DNA, 25 bp, Homo sapien
aagacacactgaacaagccttaaca

SEQ ID NO: 4723842 - DNA, 25 bp, Homo sapien
tatagagcacctcttacaaggaaca

SEQ ID NO: 4723843 - DNA, 25 bp, Homo sapien
tctttatcgaagaccaaccatcgta

SEQ ID NO: 4723844 - DNA, 25 bp, Homo sapien
ccaaccatcgtaagaaatatagagc

SEQ ID NO: 4723845 - DNA, 25 bp, Homo sapien
tctttttcatgtaaaggatagcgca

SEQ ID NO: 4723846 - DNA, 25 bp, Homo sapien
ctttttcatgtaaaggatagcgcat

SEQ ID NO: 4723847 - DNA, 25 bp, Homo sapien
actgagccaaacttggtggaataag

SEQ ID NO: 4723848 - DNA, 25 bp, Homo sapien
ccccgatcctgatcacagggactga

SEQ ID NO: 4723849 - DNA, 25 bp, Homo sapien
gcgaagggcggtcatctgatgccat

SEQ ID NO: 4723850 - DNA, 25 bp, Homo sapien
tacaaagacctcttaatcacacatc

SEQ ID NO: 4723851 - DNA, 25 bp, Homo sapien
ctgccactttcatgtcctaaaacca

SEQ ID NO: 4723852 - DNA, 25 bp, Homo sapien
tcatgtcctaaaaccaggtgttcaa

SEQ ID NO: 4723853 - DNA, 25 bp, Homo sapien
caggtgttcaaaagcaagcactatg

SEQ ID NO: 4723854 - DNA, 25 bp, Homo sapien
gttcaaaagcaagcactatggccat

SEQ ID NO: 4723855 - DNA, 25 bp, Homo sapien
aaatctgactaggagttttgaccca

SEQ ID NO: 4723856 - DNA, 25 bp, Homo sapien
cctccactgcaaatctgactaggag

SEQ ID NO: 4723857 - DNA, 25 bp, Homo sapien
agaacattcgccaaaccttccagag

SEQ ID NO: 4723858 - DNA, 25 bp, Homo sapien
ttccttacaagaacattcgccaaac

SEQ ID NO: 4723859 - DNA, 25 bp, Homo sapien
tgctgaacttgcttcactgaattgg

SEQ ID NO: 4723860 - DNA, 25 bp, Homo sapien
aaccacccgtagtttctcatagcag

SEQ ID NO: 4723861 - DNA, 25 bp, Homo sapien
tatgctattcaagggcatgtcctac

SEQ ID NO: 4723862 - DNA, 25 bp, Homo sapien
catgtcctactatactgcttgtcag

SEQ ID NO: 4723863 - DNA, 25 bp, Homo sapien
ttatggacagcagtaatatgtgtac

SEQ ID NO: 4723864 - DNA, 25 bp, Homo sapien
tccaagctccagtttgtgcaaagaa

SEQ ID NO: 4723865 - DNA, 25 bp, Homo sapien
tgaaaccactttccaatgtgctagt

SEQ ID NO: 4723866 - DNA, 25 bp, Homo sapien
gctagttaagagtcaggaaagtagt

SEQ ID NO: 4723867 - DNA, 25 bp, Homo sapien
gacaacgagagtcatcccagtttga

SEQ ID NO: 4723868 - DNA, 25 bp, Homo sapien
ttctctgtctggatatacaaaagcc

SEQ ID NO: 4723869 - DNA, 25 bp, Homo sapien
gagattacagtctatatgaccccat

SEQ ID NO: 4723870 - DNA, 25 bp, Homo sapien
agattccatgccctttactgtgaga

SEQ ID NO: 4723871 - DNA, 25 bp, Homo sapien
atcagaagagcaagatcagtggggc

SEQ ID NO: 4723872 - DNA, 25 bp, Homo sapien
tttgtaggtgacatagaataagggc

SEQ ID NO: 4723873 - DNA, 25 bp, Homo sapien
tagaatacatagataatcagaagag

SEQ ID NO: 4723874 - DNA, 25 bp, Homo sapien
tgacatagaataagggcttgaaatg

SEQ ID NO: 4723875 - DNA, 25 bp, Homo sapien
gaattactcatcaccaatctgatca

SEQ ID NO: 4723876 - DNA, 25 bp, Homo sapien
ttcatccccagttgaattactcatc

SEQ ID NO: 4723877 - DNA, 25 bp, Homo sapien
gttgaattactcatcaccaatctga

SEQ ID NO: 4723878 - DNA, 25 bp, Homo sapien
ccccagttgaattactcatcaccaa

SEQ ID NO: 4723879 - DNA, 25 bp, Homo sapien
ttctgaccacaactactggaaaatc

SEQ ID NO: 4723880 - DNA, 25 bp, Homo sapien
gaattcttcctgtgaacaggctata

SEQ ID NO: 4723881 - DNA, 25 bp, Homo sapien
tattctcctattctttgcattgctg

SEQ ID NO: 4723882 - DNA, 25 bp, Homo sapien
tctggagttcagctgaacagaattc

SEQ ID NO: 4723883 - DNA, 25 bp, Homo sapien
ggcgagacgaaccaactctgagaag

SEQ ID NO: 4723884 - DNA, 25 bp, Homo sapien
tgtataggaaactcaaggcgagacg

SEQ ID NO: 4723885 - DNA, 25 bp, Homo sapien
agggcctgcgcctgaatcagattca

SEQ ID NO: 4723886 - DNA, 25 bp, Homo sapien
aagtacatgttgagaagggcctgcg

SEQ ID NO: 4723887 - DNA, 25 bp, Homo sapien
cacagttgttcagttaatggacagg

SEQ ID NO: 4723888 - DNA, 25 bp, Homo sapien
cagttgttcagttaatggacaggca

SEQ ID NO: 4723889 - DNA, 25 bp, Homo sapien
gttgttcagttaatggacaggcacc

SEQ ID NO: 4723890 - DNA, 25 bp, Homo sapien
gttcagttaatggacaggcaccatc

SEQ ID NO: 4723891 - DNA, 25 bp, Homo sapien
catgaagtggaaatagccttttgct

SEQ ID NO: 4723892 - DNA, 25 bp, Homo sapien
gaaatcattaaacatgaagtggaaa

SEQ ID NO: 4723893 - DNA, 25 bp, Homo sapien
cttttgctaacgtttccgaaatgag

SEQ ID NO: 4723894 - DNA, 25 bp, Homo sapien
aacgtttccgaaatgagagctaaat

SEQ ID NO: 4723895 - DNA, 25 bp, Homo sapien
caggtagctatcatctcccaatctt

SEQ ID NO: 4723896 - DNA, 25 bp, Homo sapien
tagctatcatctcccaatcttttat

SEQ ID NO: 4723897 - DNA, 25 bp, Homo sapien
ggtagctatcatctcccaatctttt

SEQ ID NO: 4723898 - DNA, 25 bp, Homo sapien
aggtagctatcatctcccaatcttt

SEQ ID NO: 4723899 - DNA, 25 bp, Homo sapien
tattaagatagctacgaattgaggg

SEQ ID NO: 4723900 - DNA, 25 bp, Homo sapien
atagctagggagacaaaaagttagg

SEQ ID NO: 4723901 - DNA, 25 bp, Homo sapien
gattgagatcctgacgagagaagag

SEQ ID NO: 4723902 - DNA, 25 bp, Homo sapien
caggagttagcccagctctttgaga

SEQ ID NO: 4723903 - DNA, 25 bp, Homo sapien
aagccttacaaggtaaaaggctatg

SEQ ID NO: 4723904 - DNA, 25 bp, Homo sapien
gccttacaaggtaaaaggctatgaa

SEQ ID NO: 4723905 - DNA, 25 bp, Homo sapien
agccttacaaggtaaaaggctatga

SEQ ID NO: 4723906 - DNA, 25 bp, Homo sapien
tttgtgtcctcctcgaaatgaagcc

SEQ ID NO: 4723907 - DNA, 25 bp, Homo sapien
tcttggcgtataacacaaagtttgg

SEQ ID NO: 4723908 - DNA, 25 bp, Homo sapien
gataaacatgtcaggcccttagttg

SEQ ID NO: 4723909 - DNA, 25 bp, Homo sapien
catctgcctgctagaagatagagtg

SEQ ID NO: 4723910 - DNA, 25 bp, Homo sapien
ctggcaacggtcactggttgaaggt

SEQ ID NO: 4723911 - DNA, 25 bp, Homo sapien
caacggtcactggttgaaggtgaag

SEQ ID NO: 4723912 - DNA, 25 bp, Homo sapien
cccacggcattgtgtagaaattcca

SEQ ID NO: 4723913 - DNA, 25 bp, Homo sapien
aggtgaagtgctgaatagcccacgg

SEQ ID NO: 4723914 - DNA, 25 bp, Homo sapien
ccagaatatcgctttacagaggaca

SEQ ID NO: 4723915 - DNA, 25 bp, Homo sapien
tctggaatgtgatcaacaaatggct

SEQ ID NO: 4723916 - DNA, 25 bp, Homo sapien
gaggacattctgtcagtctgcggtt

SEQ ID NO: 4723917 - DNA, 25 bp, Homo sapien
caaaggcaatcctcattgcagaagc

SEQ ID NO: 4723918 - DNA, 25 bp, Homo sapien
atacttatctgtcccacgtttatcc

SEQ ID NO: 4723919 - DNA, 25 bp, Homo sapien
catacttatctgtcccacgtttatc

SEQ ID NO: 4723920 - DNA, 25 bp, Homo sapien
tttctatgccccaaacccaatgcgt

SEQ ID NO: 4723921 - DNA, 25 bp, Homo sapien
gccccaaacccaatgcgttctggat

SEQ ID NO: 4723922 - DNA, 25 bp, Homo sapien
caggacagtttagagttgatttcca

SEQ ID NO: 4723923 - DNA, 25 bp, Homo sapien
cctgatttttgagaacgatcctctc

SEQ ID NO: 4723924 - DNA, 25 bp, Homo sapien
gcttctttagcccaacttacatttg

SEQ ID NO: 4723925 - DNA, 25 bp, Homo sapien
tcaccctgtgagaatagcatcttaa

SEQ ID NO: 4723926 - DNA, 25 bp, Homo sapien
tagatacgcataccaaaggatgaag

SEQ ID NO: 4723927 - DNA, 25 bp, Homo sapien
gcctcactctagaaatcctcatatg

SEQ ID NO: 4723928 - DNA, 25 bp, Homo sapien
ataatgatgtatacgtgcatgtttt

SEQ ID NO: 4723929 - DNA, 25 bp, Homo sapien
cttaataatgatgtatacgtgcatg

SEQ ID NO: 4723930 - DNA, 25 bp, Homo sapien
ccattgagcaaaggatatttgtctt

SEQ ID NO: 4723931 - DNA, 25 bp, Homo sapien
accattgagcaaaggatatttgtct

SEQ ID NO: 4723932 - DNA, 25 bp, Homo sapien
gcttttgaaggtaagcagcgccgtc

SEQ ID NO: 4723933 - DNA, 25 bp, Homo sapien
acagagcaatatgtcagcacctttg

SEQ ID NO: 4723934 - DNA, 25 bp, Homo sapien
cacgtccacagcctgaaagcttttg

SEQ ID NO: 4723935 - DNA, 25 bp, Homo sapien
tgaaggtaagcagcgccgtcatcat

SEQ ID NO: 4723936 - DNA, 25 bp, Homo sapien
gtgattacagagtcaaatactaagg

SEQ ID NO: 4723937 - DNA, 25 bp, Homo sapien
cagagtcaaatactaaggcagcaag

SEQ ID NO: 4723938 - DNA, 25 bp, Homo sapien
gtcaaatactaaggcagcaagggca

SEQ ID NO: 4723939 - DNA, 25 bp, Homo sapien
ttacagagtcaaatactaaggcagc

SEQ ID NO: 4723940 - DNA, 25 bp, Homo sapien
gattattgcgctcaatatttcatca

SEQ ID NO: 4723941 - DNA, 25 bp, Homo sapien
tagctcttgattattgcgctcaata

SEQ ID NO: 4723942 - DNA, 25 bp, Homo sapien
gcgctcaatatttcatcatgtttgg

SEQ ID NO: 4723943 - DNA, 25 bp, Homo sapien
ttagctcttgattattgcgctcaat

SEQ ID NO: 4723944 - DNA, 25 bp, Homo sapien
cgtaagctcacaggttaggaattcg

SEQ ID NO: 4723945 - DNA, 25 bp, Homo sapien
gctcacaggttaggaattcgaagaa

SEQ ID NO: 4723946 - DNA, 25 bp, Homo sapien
tcacaggttaggaattcgaagaaaa

SEQ ID NO: 4723947 - DNA, 25 bp, Homo sapien
taagctcacaggttaggaattcgaa

SEQ ID NO: 4723948 - DNA, 25 bp, Homo sapien
cctgcattcggataaagggcagctt

SEQ ID NO: 4723949 - DNA, 25 bp, Homo sapien
cattcggataaagggcagcttggca

SEQ ID NO: 4723950 - DNA, 25 bp, Homo sapien
tgcattcggataaagggcagcttgg

SEQ ID NO: 4723951 - DNA, 25 bp, Homo sapien
agatcctgcattcggataaagggca

SEQ ID NO: 4723952 - DNA, 25 bp, Homo sapien
cagaatcatgtaactagcagcagat

SEQ ID NO: 4723953 - DNA, 25 bp, Homo sapien
tgccaccccacgacacaaatctggt

SEQ ID NO: 4723954 - DNA, 25 bp, Homo sapien
gctccatctgcagtttgcacctgtt

SEQ ID NO: 4723955 - DNA, 25 bp, Homo sapien
gcagcagatgtgtctgtctgcaact

SEQ ID NO: 4723956 - DNA, 25 bp, Homo sapien
ttaatggcccacactctcaaataag

SEQ ID NO: 4723957 - DNA, 25 bp, Homo sapien
tcattccaaaagtttaatggcccac

SEQ ID NO: 4723958 - DNA, 25 bp, Homo sapien
caaaagtttaatggcccacactctc

SEQ ID NO: 4723959 - DNA, 25 bp, Homo sapien
tccaaaagtttaatggcccacactc

SEQ ID NO: 4723960 - DNA, 25 bp, Homo sapien
tctctctctacacttcaggttcctg

SEQ ID NO: 4723961 - DNA, 25 bp, Homo sapien
ttctctctctctacacttcaggttc

SEQ ID NO: 4723962 - DNA, 25 bp, Homo sapien
ctctctctacacttcaggttcctgg

SEQ ID NO: 4723963 - DNA, 25 bp, Homo sapien
tctctctctctacacttcaggttcc

SEQ ID NO: 4723964 - DNA, 25 bp, Homo sapien
gataaggaaattgtctggaggccaa

SEQ ID NO: 4723965 - DNA, 25 bp, Homo sapien
gtgactgttcagtccaaatactgcc

SEQ ID NO: 4723966 - DNA, 25 bp, Homo sapien
gcctatcagtactacagcatttttc

SEQ ID NO: 4723967 - DNA, 25 bp, Homo sapien
taccagcacatagccacgtgactgt

SEQ ID NO: 4723968 - DNA, 25 bp, Homo sapien
agttaccagaagatcaaggagtcca

SEQ ID NO: 4723969 - DNA, 25 bp, Homo sapien
tttttgaagttaccagaagatcaag

SEQ ID NO: 4723970 - DNA, 25 bp, Homo sapien
cagatttttgaagttaccagaagat

SEQ ID NO: 4723971 - DNA, 25 bp, Homo sapien
ttgaagttaccagaagatcaaggag

SEQ ID NO: 4723972 - DNA, 25 bp, Homo sapien
ttgatcccctaaaccctaagagcag

SEQ ID NO: 4723973 - DNA, 25 bp, Homo sapien
caagattaatgagcagccagttggc

SEQ ID NO: 4723974 - DNA, 25 bp, Homo sapien
gaaggacaactatgaactccaggga

SEQ ID NO: 4723975 - DNA, 25 bp, Homo sapien
taaagcaaagggtgagcccaacaga

SEQ ID NO: 4723976 - DNA, 25 bp, Homo sapien
tccataactgtaggccagtgtccga

SEQ ID NO: 4723977 - DNA, 25 bp, Homo sapien
ttgtcctgtcaagtccaagaagtcc

SEQ ID NO: 4723978 - DNA, 25 bp, Homo sapien
cagtgtccgaatcccaaggctatag

SEQ ID NO: 4723979 - DNA, 25 bp, Homo sapien
gtagccctgataacttccctcttgg

SEQ ID NO: 4723980 - DNA, 25 bp, Homo sapien
tctgctgtggtctcaggacagaaac

SEQ ID NO: 4723981 - DNA, 25 bp, Homo sapien
caaggcacattctgctgtggtctca

SEQ ID NO: 4723982 - DNA, 25 bp, Homo sapien
ctttgtccaaggcacattctgctgt

SEQ ID NO: 4723983 - DNA, 25 bp, Homo sapien
attctgctgtggtctcaggacagaa

SEQ ID NO: 4723984 - DNA, 25 bp, Homo sapien
tcagggtgtagcactgatgtcgtca

SEQ ID NO: 4723985 - DNA, 25 bp, Homo sapien
cagcatggttgagtaggtatgttaa

SEQ ID NO: 4723986 - DNA, 25 bp, Homo sapien
ggtatgttaaaatgcactggatagc

SEQ ID NO: 4723987 - DNA, 25 bp, Homo sapien
taaatacagtgaacgacacacactt

SEQ ID NO: 4723988 - DNA, 25 bp, Homo sapien
gaagtaggtccagtgtcgcatataa

SEQ ID NO: 4723989 - DNA, 25 bp, Homo sapien
gtaggtccagtgtcgcatataaaag

SEQ ID NO: 4723990 - DNA, 25 bp, Homo sapien
atgggaagtaggtccagtgtcgcat

SEQ ID NO: 4723991 - DNA, 25 bp, Homo sapien
ttgatgggaagtaggtccagtgtcg

SEQ ID NO: 4723992 - DNA, 25 bp, Homo sapien
cttggacaggattcatcagtgttgt

SEQ ID NO: 4723993 - DNA, 25 bp, Homo sapien
ttggacaggattcatcagtgttgtg

SEQ ID NO: 4723994 - DNA, 25 bp, Homo sapien
tggacaggattcatcagtgttgtgc

SEQ ID NO: 4723995 - DNA, 25 bp, Homo sapien
aatccttgggcagtgaagtgaaact

SEQ ID NO: 4723996 - DNA, 25 bp, Homo sapien
ttggaagggtatattctggaaatcc

SEQ ID NO: 4723997 - DNA, 25 bp, Homo sapien
ttttgcataggcacatttggaaacc

SEQ ID NO: 4723998 - DNA, 25 bp, Homo sapien
taccagtacctatgtgtagtcaaaa

SEQ ID NO: 4723999 - DNA, 25 bp, Homo sapien
caatagtgtaattgagagcagctga

SEQ ID NO: 4724000 - DNA, 25 bp, Homo sapien
ggcaaagctagtattcaagtccaag

SEQ ID NO: 4724001 - DNA, 25 bp, Homo sapien
caagtccaagcagtgtcgttgtaaa

SEQ ID NO: 4724002 - DNA, 25 bp, Homo sapien
gagcagctgatattatgtgtcccac

SEQ ID NO: 4724003 - DNA, 25 bp, Homo sapien
catgattctaggttggactccatgc

SEQ ID NO: 4724004 - DNA, 25 bp, Homo sapien
tggctcaattgatgtaatatactgc

SEQ ID NO: 4724005 - DNA, 25 bp, Homo sapien
tgctggaggaaaatcatgctataaa

SEQ ID NO: 4724006 - DNA, 25 bp, Homo sapien
aatggtattgtcgtgaaaggcaaga

SEQ ID NO: 4724007 - DNA, 25 bp, Homo sapien
gatatttcactatgggaacaacaac

SEQ ID NO: 4724008 - DNA, 25 bp, Homo sapien
gagtttttgtccagaactgaattcc

SEQ ID NO: 4724009 - DNA, 25 bp, Homo sapien
gactcacaatgccataaagtggaaa

SEQ ID NO: 4724010 - DNA, 25 bp, Homo sapien
gaacaatgctgatttgatgggcagg

SEQ ID NO: 4724011 - DNA, 25 bp, Homo sapien
ccctcggtgccaacatgctgtcagt

SEQ ID NO: 4724012 - DNA, 25 bp, Homo sapien
agacacctctaactggaatatcacg

SEQ ID NO: 4724013 - DNA, 25 bp, Homo sapien
gcttccctcggtgccaacatgctgt

SEQ ID NO: 4724014 - DNA, 25 bp, Homo sapien
ctctaactggaatatcacgggccag

SEQ ID NO: 4724015 - DNA, 25 bp, Homo sapien
cattgagctgtgcaaactgttttag

SEQ ID NO: 4724016 - DNA, 25 bp, Homo sapien
tttcagttgtacactccttcggtca

SEQ ID NO: 4724017 - DNA, 25 bp, Homo sapien
cactccttcggtcagtgttaactgc

SEQ ID NO: 4724018 - DNA, 25 bp, Homo sapien
ggggaaagtccatcatatgaatgat

SEQ ID NO: 4724019 - DNA, 25 bp, Homo sapien
cagagcttctggagtatcagtatca

SEQ ID NO: 4724020 - DNA, 25 bp, Homo sapien
ctaggcttagctgaatgggaaggca

SEQ ID NO: 4724021 - DNA, 25 bp, Homo sapien
ggtcagattcaatagctaggcttag

SEQ ID NO: 4724022 - DNA, 25 bp, Homo sapien
tcgtcccgctggttgaccgaataga

SEQ ID NO: 4724023 - DNA, 25 bp, Homo sapien
atgatttctgtatagttctaaagtt

SEQ ID NO: 4724024 - DNA, 25 bp, Homo sapien
caaatcaagcctgataatgattcat

SEQ ID NO: 4724025 - DNA, 25 bp, Homo sapien
gataatgattcatgtgctaaacact

SEQ ID NO: 4724026 - DNA, 25 bp, Homo sapien
attcagcttcctcacaaatcaagcc

SEQ ID NO: 4724027 - DNA, 25 bp, Homo sapien
tctctcggaggcctggaatacccag

SEQ ID NO: 4724028 - DNA, 25 bp, Homo sapien
cagcagagagaattagggtgctgct

SEQ ID NO: 4724029 - DNA, 25 bp, Homo sapien
gaggcctggaatacccagtgtccat

SEQ ID NO: 4724030 - DNA, 25 bp, Homo sapien
tcggaggcctggaatacccagtgtc

SEQ ID NO: 4724031 - DNA, 25 bp, Homo sapien
gaagcccaggcattgaatttactag

SEQ ID NO: 4724032 - DNA, 25 bp, Homo sapien
cagtggcttcatacggcaaggaata

SEQ ID NO: 4724033 - DNA, 25 bp, Homo sapien
tagctgaccactataaggtcctcag

SEQ ID NO: 4724034 - DNA, 25 bp, Homo sapien
ggtcctcagaagtgatttcagtggc

SEQ ID NO: 4724035 - DNA, 25 bp, Homo sapien
tcagttcctgcggactgctgcttgg

SEQ ID NO: 4724036 - DNA, 25 bp, Homo sapien
cggactgctgcttggctaagttgca

SEQ ID NO: 4724037 - DNA, 25 bp, Homo sapien
tgcttggctaagttgcagctccctc

SEQ ID NO: 4724038 - DNA, 25 bp, Homo sapien
ttggctaagttgcagctccctctct

SEQ ID NO: 4724039 - DNA, 25 bp, Homo sapien
agccaaccgactcccacatacatac

SEQ ID NO: 4724040 - DNA, 25 bp, Homo sapien
ccaaccgactcccacatacatacac

SEQ ID NO: 4724041 - DNA, 25 bp, Homo sapien
ctggttgctcatcaacagccaaccg

SEQ ID NO: 4724042 - DNA, 25 bp, Homo sapien
gttgctcatcaacagccaaccgact

SEQ ID NO: 4724043 - DNA, 25 bp, Homo sapien
agccaaccgactcccacatacatac

SEQ ID NO: 4724044 - DNA, 25 bp, Homo sapien
gttgctcatcaacagccaaccgact

SEQ ID NO: 4724045 - DNA, 25 bp, Homo sapien
ccaaccgactcccacatacatacac

SEQ ID NO: 4724046 - DNA, 25 bp, Homo sapien
ctggttgctcatcaacagccaaccg

SEQ ID NO: 4724047 - DNA, 25 bp, Homo sapien
tatagctggaggatgaaaagtatca

SEQ ID NO: 4724048 - DNA, 25 bp, Homo sapien
caatgtacagcttccccctacaaga

SEQ ID NO: 4724049 - DNA, 25 bp, Homo sapien
gaggatgaaaagtatcagactcctc

SEQ ID NO: 4724050 - DNA, 25 bp, Homo sapien
cctacaagatgattttatagctgga

SEQ ID NO: 4724051 - DNA, 25 bp, Homo sapien
tgaaggaccaaaacgatgctagatt

SEQ ID NO: 4724052 - DNA, 25 bp, Homo sapien
tcaatgcaatatgcctgaaggacca

SEQ ID NO: 4724053 - DNA, 25 bp, Homo sapien
caagtaagtactaatggatggtcca

SEQ ID NO: 4724054 - DNA, 25 bp, Homo sapien
taaaattgggattgcagtgcttggc

SEQ ID NO: 4724055 - DNA, 25 bp, Homo sapien
gaaccacggtactcatcatcctata

SEQ ID NO: 4724056 - DNA, 25 bp, Homo sapien
tacatgctgcaagctatcttcttga

SEQ ID NO: 4724057 - DNA, 25 bp, Homo sapien
tatttccagtacttccacgtacatg

SEQ ID NO: 4724058 - DNA, 25 bp, Homo sapien
gtcttgcactgcctgccgcctctat

SEQ ID NO: 4724059 - DNA, 25 bp, Homo sapien
aaaaggaaactgtgttactaggcat

SEQ ID NO: 4724060 - DNA, 25 bp, Homo sapien
gaaaaggaccaattgaggctaggaa

SEQ ID NO: 4724061 - DNA, 25 bp, Homo sapien
tgtaatatacataagctggccagca

SEQ ID NO: 4724062 - DNA, 25 bp, Homo sapien
ttgaacccatcagagacaagacccc

SEQ ID NO: 4724063 - DNA, 25 bp, Homo sapien
gaaggtgatgctaggtccatttcat

SEQ ID NO: 4724064 - DNA, 25 bp, Homo sapien
cagacatgtaggtggcgacttcaag

SEQ ID NO: 4724065 - DNA, 25 bp, Homo sapien
ctgggcacagccgatggaatattct

SEQ ID NO: 4724066 - DNA, 25 bp, Homo sapien
gctgaagttttagtcgtccatccac

SEQ ID NO: 4724067 - DNA, 25 bp, Homo sapien
tattctaccccgtgccaaaatgaga

SEQ ID NO: 4724068 - DNA, 25 bp, Homo sapien
tatcatgtaccagtttctgggagcc

SEQ ID NO: 4724069 - DNA, 25 bp, Homo sapien
taggtcacctgaacatccgtcgaaa

SEQ ID NO: 4724070 - DNA, 25 bp, Homo sapien
tgatgtatctaccaacacggatgaa

SEQ ID NO: 4724071 - DNA, 25 bp, Homo sapien
ggaatattgtacaatgccaggcatg

SEQ ID NO: 4724072 - DNA, 25 bp, Homo sapien
ggcaaagtatcattgatgaaaaggc

SEQ ID NO: 4724073 - DNA, 25 bp, Homo sapien
cggcttggtggctagcacacaggaa

SEQ ID NO: 4724074 - DNA, 25 bp, Homo sapien
gaatgttgagggtaaggcatctata

SEQ ID NO: 4724075 - DNA, 25 bp, Homo sapien
cctagttaacaccagctgttagagg

SEQ ID NO: 4724076 - DNA, 25 bp, Homo sapien
cttgcctttcccaattactccattt

SEQ ID NO: 4724077 - DNA, 25 bp, Homo sapien
ggcattgacctctatgagatttgaa

SEQ ID NO: 4724078 - DNA, 25 bp, Homo sapien
tcctccacgtgaaaatctctttggg

SEQ ID NO: 4724079 - DNA, 25 bp, Homo sapien
agctgtcagatttcctcctccacgt

SEQ ID NO: 4724080 - DNA, 25 bp, Homo sapien
tccagtgaatggaatttccgtcatc

SEQ ID NO: 4724081 - DNA, 25 bp, Homo sapien
ttgaaaaatcctctaaatacataaa

SEQ ID NO: 4724082 - DNA, 25 bp, Homo sapien
taagttttatcactcccatctgatg

SEQ ID NO: 4724083 - DNA, 25 bp, Homo sapien
aaaggccagatgtttccacactaag

SEQ ID NO: 4724084 - DNA, 25 bp, Homo sapien
gcttgagtgattgcacgtctgagac

SEQ ID NO: 4724085 - DNA, 25 bp, Homo sapien
gattgcacgtctgagactattaagg

SEQ ID NO: 4724086 - DNA, 25 bp, Homo sapien
tattaaggaattccggcagatgtgc

SEQ ID NO: 4724087 - DNA, 25 bp, Homo sapien
gagactattaaggaattccggcaga

SEQ ID NO: 4724088 - DNA, 25 bp, Homo sapien
tgtttatcacctaacacaaggcctg

SEQ ID NO: 4724089 - DNA, 25 bp, Homo sapien
aaagtgctaagaatacacacccgag

SEQ ID NO: 4724090 - DNA, 25 bp, Homo sapien
tcttttactcttgggacaagactgg

SEQ ID NO: 4724091 - DNA, 25 bp, Homo sapien
acaagactggtctgggtgctctcac

SEQ ID NO: 4724092 - DNA, 25 bp, Homo sapien
tagttatttgctacatggacacacc

SEQ ID NO: 4724093 - DNA, 25 bp, Homo sapien
acaatccagttgtctgtcaaaactg

SEQ ID NO: 4724094 - DNA, 25 bp, Homo sapien
tacataattttgtagtcaggcaaca

SEQ ID NO: 4724095 - DNA, 25 bp, Homo sapien
taatacagaacaataagtgatcctc

SEQ ID NO: 4724096 - DNA, 25 bp, Homo sapien
taccctattttccattgcctttgtc

SEQ ID NO: 4724097 - DNA, 25 bp, Homo sapien
ttgcctttgtccattttatgcccat

SEQ ID NO: 4724098 - DNA, 25 bp, Homo sapien
cattgcctttgtccattttatgccc

SEQ ID NO: 4724099 - DNA, 25 bp, Homo sapien
tccattgcctttgtccattttatgc

SEQ ID NO: 4724100 - DNA, 25 bp, Homo sapien
tgagaggtgcgcgaatataaaggcc

SEQ ID NO: 4724101 - DNA, 25 bp, Homo sapien
tctgtatttactctggcgggtgcct

SEQ ID NO: 4724102 - DNA, 25 bp, Homo sapien
tcaccaggttgcaccatgagaaggg

SEQ ID NO: 4724103 - DNA, 25 bp, Homo sapien
tagaccaacgtaggccaagctgaat

SEQ ID NO: 4724104 - DNA, 25 bp, Homo sapien
tttccaatagataattttaggctta

SEQ ID NO: 4724105 - DNA, 25 bp, Homo sapien
tgaaagcctgtaggaatcagctaat

SEQ ID NO: 4724106 - DNA, 25 bp, Homo sapien
gcaaagtaagcctttgatgaaagcc

SEQ ID NO: 4724107 - DNA, 25 bp, Homo sapien
gaacaaggattagcattctattgca

SEQ ID NO: 4724108 - DNA, 25 bp, Homo sapien
gctgtcattacttgcaagatcatag

SEQ ID NO: 4724109 - DNA, 25 bp, Homo sapien
tgcaagatcatagacaataagcagc

SEQ ID NO: 4724110 - DNA, 25 bp, Homo sapien
ataagcagcagagtatccaggtggt

SEQ ID NO: 4724111 - DNA, 25 bp, Homo sapien
ggtattgtttagctttattagtgga

SEQ ID NO: 4724112 - DNA, 25 bp, Homo sapien
gaaggtttgtaaaatgaggagagtc

SEQ ID NO: 4724113 - DNA, 25 bp, Homo sapien
ctggaagaaggtttgtaaaatgagg

SEQ ID NO: 4724114 - DNA, 25 bp, Homo sapien
gaagaaggtttgtaaaatgaggaga

SEQ ID NO: 4724115 - DNA, 25 bp, Homo sapien
aagaaggtttgtaaaatgaggagag

SEQ ID NO: 4724116 - DNA, 25 bp, Homo sapien
tgtgactttgagacaggtcctttac

SEQ ID NO: 4724117 - DNA, 25 bp, Homo sapien
gactttgagacaggtcctttacttc

SEQ ID NO: 4724118 - DNA, 25 bp, Homo sapien
gtgactttgagacaggtcctttact

SEQ ID NO: 4724119 - DNA, 25 bp, Homo sapien
ctttgagacaggtcctttacttcct

SEQ ID NO: 4724120 - DNA, 25 bp, Homo sapien
tcaatacttggatgagacaacctca

SEQ ID NO: 4724121 - DNA, 25 bp, Homo sapien
agtaaagtggtgaagacagtgcctc

SEQ ID NO: 4724122 - DNA, 25 bp, Homo sapien
cacaggctagtgtggcttcctaaaa

SEQ ID NO: 4724123 - DNA, 25 bp, Homo sapien
tgatcaaaacccatgaggtcactgg

SEQ ID NO: 4724124 - DNA, 25 bp, Homo sapien
atatgatcgttcattaacttttacc

SEQ ID NO: 4724125 - DNA, 25 bp, Homo sapien
ttatatgatcgttcattaactttta

SEQ ID NO: 4724126 - DNA, 25 bp, Homo sapien
atgatcgttcattaacttttaccat

SEQ ID NO: 4724127 - DNA, 25 bp, Homo sapien
tattatatgatcgttcattaacttt

SEQ ID NO: 4724128 - DNA, 25 bp, Homo sapien
ctttcttgagacataccacctttac

SEQ ID NO: 4724129 - DNA, 25 bp, Homo sapien
ttgagacataccacctttacgcctt

SEQ ID NO: 4724130 - DNA, 25 bp, Homo sapien
tcttgagacataccacctttacgcc

SEQ ID NO: 4724131 - DNA, 25 bp, Homo sapien
gagacataccacctttacgccttgc

SEQ ID NO: 4724132 - DNA, 25 bp, Homo sapien
ctaactagtatcctgaagaaacctt

SEQ ID NO: 4724133 - DNA, 25 bp, Homo sapien
agataaagggcattgcattttgctg

SEQ ID NO: 4724134 - DNA, 25 bp, Homo sapien
ggagataaagggcattgcattttgc

SEQ ID NO: 4724135 - DNA, 25 bp, Homo sapien
tctggagataaagggcattgcattt

SEQ ID NO: 4724136 - DNA, 25 bp, Homo sapien
gcatcatgacagcttagcacatttg

SEQ ID NO: 4724137 - DNA, 25 bp, Homo sapien
tgacagcttagcacatttgagacca

SEQ ID NO: 4724138 - DNA, 25 bp, Homo sapien
cttgcatcatgacagcttagcacat

SEQ ID NO: 4724139 - DNA, 25 bp, Homo sapien
tcatgacagcttagcacatttgaga

SEQ ID NO: 4724140 - DNA, 25 bp, Homo sapien
tggatgctctcctgacgcttacttg

SEQ ID NO: 4724141 - DNA, 25 bp, Homo sapien
cacctgtcttacgaagggcaagtgg

SEQ ID NO: 4724142 - DNA, 25 bp, Homo sapien
tgcggaaagctacttcagcgactaa

SEQ ID NO: 4724143 - DNA, 25 bp, Homo sapien
gtgtgccttacagttcaaaacgaag

SEQ ID NO: 4724144 - DNA, 25 bp, Homo sapien
taagatagcagtataacttcacact

SEQ ID NO: 4724145 - DNA, 25 bp, Homo sapien
taaaagccattggtccatattcacc

SEQ ID NO: 4724146 - DNA, 25 bp, Homo sapien
caaagtaagggccaacttctcggat

SEQ ID NO: 4724147 - DNA, 25 bp, Homo sapien
tttctagatgtcttacagagctcca

SEQ ID NO: 4724148 - DNA, 25 bp, Homo sapien
caaaacgcatcacacaactttccat

SEQ ID NO: 4724149 - DNA, 25 bp, Homo sapien
gtagccaaaacgcatcacacaactt

SEQ ID NO: 4724150 - DNA, 25 bp, Homo sapien
cctgaataatactgtagccaaaacg

SEQ ID NO: 4724151 - DNA, 25 bp, Homo sapien
cttggattggcatattggcctgaat

SEQ ID NO: 4724152 - DNA, 25 bp, Homo sapien
tttgggagcttggtggaaacctgaa

SEQ ID NO: 4724153 - DNA, 25 bp, Homo sapien
ttgggagcttggtggaaacctgaac

SEQ ID NO: 4724154 - DNA, 25 bp, Homo sapien
tgtgaaaaggcttaattcagaagac

SEQ ID NO: 4724155 - DNA, 25 bp, Homo sapien
ctgtgaaaaggcttaattcagaaga

SEQ ID NO: 4724156 - DNA, 25 bp, Homo sapien
tctgtgaaaaggcttaattcagaag

SEQ ID NO: 4724157 - DNA, 25 bp, Homo sapien
cctcagtccgtgcactgatcagttt

SEQ ID NO: 4724158 - DNA, 25 bp, Homo sapien
tgacgagagctttccaattgttttt

SEQ ID NO: 4724159 - DNA, 25 bp, Homo sapien
cacaaactgatgatgtaactctttt

SEQ ID NO: 4724160 - DNA, 25 bp, Homo sapien
ctgacgagagctttccaattgtttt

SEQ ID NO: 4724161 - DNA, 25 bp, Homo sapien
gctgacgagagctttccaattgttt

SEQ ID NO: 4724162 - DNA, 25 bp, Homo sapien
taaaatggctacctggatcgggata

SEQ ID NO: 4724163 - DNA, 25 bp, Homo sapien
cctggatcgggatattgaaagtttc

SEQ ID NO: 4724164 - DNA, 25 bp, Homo sapien
ggctacctggatcgggatattgaaa

SEQ ID NO: 4724165 - DNA, 25 bp, Homo sapien
cctataaaatggctacctggatcgg

SEQ ID NO: 4724166 - DNA, 25 bp, Homo sapien
gataattttatgtcgtgctcaaggt

SEQ ID NO: 4724167 - DNA, 25 bp, Homo sapien
tccacaaagtcaagtcagaaatcac

SEQ ID NO: 4724168 - DNA, 25 bp, Homo sapien
tgttaagagaggaatctgggcttcc

SEQ ID NO: 4724169 - DNA, 25 bp, Homo sapien
gcacttgggtactctactgatgaaa

SEQ ID NO: 4724170 - DNA, 25 bp, Homo sapien
ggataatgtctaaactgtagttacc

SEQ ID NO: 4724171 - DNA, 25 bp, Homo sapien
tagttaccagtatgaggaatatcag

SEQ ID NO: 4724172 - DNA, 25 bp, Homo sapien
gaatgactataagtgcaacaggaca

SEQ ID NO: 4724173 - DNA, 25 bp, Homo sapien
tcttgtgagacactcagctgttagt

SEQ ID NO: 4724174 - DNA, 25 bp, Homo sapien
gcagcatatcctcattgtcagacga

SEQ ID NO: 4724175 - DNA, 25 bp, Homo sapien
tgaacagaaattgagccaactccat

SEQ ID NO: 4724176 - DNA, 25 bp, Homo sapien
tctaggtcattttattcagcgggag

SEQ ID NO: 4724177 - DNA, 25 bp, Homo sapien
tcttagcacatagaggcatacctca

SEQ ID NO: 4724178 - DNA, 25 bp, Homo sapien
gaattaataatgaatagtcccatgt

SEQ ID NO: 4724179 - DNA, 25 bp, Homo sapien
atatagatatcagggaattaagagc

SEQ ID NO: 4724180 - DNA, 25 bp, Homo sapien
taaagagtatgaaacacataaacct

SEQ ID NO: 4724181 - DNA, 25 bp, Homo sapien
tgatacaaactaacacctccatctg

SEQ ID NO: 4724182 - DNA, 25 bp, Homo sapien
catccactctgtagcagattgctgc

SEQ ID NO: 4724183 - DNA, 25 bp, Homo sapien
tctgtagcagattgctgctttaatg

SEQ ID NO: 4724184 - DNA, 25 bp, Homo sapien
cacaaattcatccactctgtagcag

SEQ ID NO: 4724185 - DNA, 25 bp, Homo sapien
acaaattcatccactctgtagcaga

SEQ ID NO: 4724186 - DNA, 25 bp, Homo sapien
taatctggtgagcttactgtatgcc

SEQ ID NO: 4724187 - DNA, 25 bp, Homo sapien
atttgtaatctggtgagcttactgt

SEQ ID NO: 4724188 - DNA, 25 bp, Homo sapien
tgagctgtttcaacaatgccattta

SEQ ID NO: 4724189 - DNA, 25 bp, Homo sapien
cgtcgtgagctgtttcaacaatgcc

SEQ ID NO: 4724190 - DNA, 25 bp, Homo sapien
gaatctagagtttcaggagttgatt

SEQ ID NO: 4724191 - DNA, 25 bp, Homo sapien
gttgattccgatgaaggattagctt

SEQ ID NO: 4724192 - DNA, 25 bp, Homo sapien
ctagagtttcaggagttgattccga

SEQ ID NO: 4724193 - DNA, 25 bp, Homo sapien
ggagttgattccgatgaaggattag

SEQ ID NO: 4724194 - DNA, 25 bp, Homo sapien
gacgctagatcaaccaattgctctt

SEQ ID NO: 4724195 - DNA, 25 bp, Homo sapien
cactgtggacgctagatcaaccaat

SEQ ID NO: 4724196 - DNA, 25 bp, Homo sapien
tgtggacgctagatcaaccaattgc

SEQ ID NO: 4724197 - DNA, 25 bp, Homo sapien
tggacgctagatcaaccaattgctc

SEQ ID NO: 4724198 - DNA, 25 bp, Homo sapien
cacatggcaacagcacaggttgagg

SEQ ID NO: 4724199 - DNA, 25 bp, Homo sapien
cctcaatggaggcaacatccctgtt

SEQ ID NO: 4724200 - DNA, 25 bp, Homo sapien
tctttccaagggcagatagcctaag

SEQ ID NO: 4724201 - DNA, 25 bp, Homo sapien
tccctgttgaatccatggctaactg

SEQ ID NO: 4724202 - DNA, 25 bp, Homo sapien
actatattagggcatgaagtccaac

SEQ ID NO: 4724203 - DNA, 25 bp, Homo sapien
tcttaagattgatgagagtaactct

SEQ ID NO: 4724204 - DNA, 25 bp, Homo sapien
gtaactctatacatgccatactcaa

SEQ ID NO: 4724205 - DNA, 25 bp, Homo sapien
ttgtacaatgcgtgccacaagccca

SEQ ID NO: 4724206 - DNA, 25 bp, Homo sapien
caagcccagaaagtacacccaattt

SEQ ID NO: 4724207 - DNA, 25 bp, Homo sapien
aaaggtacaggaagaatttcctcat

SEQ ID NO: 4724208 - DNA, 25 bp, Homo sapien
taaattcaggataggtgtaagccca

SEQ ID NO: 4724209 - DNA, 25 bp, Homo sapien
tatcagatagcctctcggacatgtg

SEQ ID NO: 4724210 - DNA, 25 bp, Homo sapien
catgtaatatgctctcagtggcagc

SEQ ID NO: 4724211 - DNA, 25 bp, Homo sapien
tctacgtaacaagagtgtccaggca

SEQ ID NO: 4724212 - DNA, 25 bp, Homo sapien
taaggctgcccatactgatcccata

SEQ ID NO: 4724213 - DNA, 25 bp, Homo sapien
gagccctgtcagagtttataacccg

SEQ ID NO: 4724214 - DNA, 25 bp, Homo sapien
tgttagccccaagaggaatactgcc

SEQ ID NO: 4724215 - DNA, 25 bp, Homo sapien
tgtcaaagtcacagtctcagccctg

SEQ ID NO: 4724216 - DNA, 25 bp, Homo sapien
aagcatcagcatatgcttcacttta

SEQ ID NO: 4724217 - DNA, 25 bp, Homo sapien
agcatcagcatatgcttcactttag

SEQ ID NO: 4724218 - DNA, 25 bp, Homo sapien
ctattccacacaggcccagaataaa

SEQ ID NO: 4724219 - DNA, 25 bp, Homo sapien
tctttctattccacacaggcccaga

SEQ ID NO: 4724220 - DNA, 25 bp, Homo sapien
gtctttctattccacacaggcccag

SEQ ID NO: 4724221 - DNA, 25 bp, Homo sapien
tttctattccacacaggcccagaat

SEQ ID NO: 4724222 - DNA, 25 bp, Homo sapien
aaagaaagcgcgctcggaaagccgg

SEQ ID NO: 4724223 - DNA, 25 bp, Homo sapien
cacagcagcccgtcagggtttggct

SEQ ID NO: 4724224 - DNA, 25 bp, Homo sapien
tcggaaagccggcttgggtcctgct

SEQ ID NO: 4724225 - DNA, 25 bp, Homo sapien
ggtcctgctaattattctgaaggca

SEQ ID NO: 4724226 - DNA, 25 bp, Homo sapien
ctgcactctccccgccgaggctggc

SEQ ID NO: 4724227 - DNA, 25 bp, Homo sapien
gggagccgaggcggccgctcccgca

SEQ ID NO: 4724228 - DNA, 25 bp, Homo sapien
ccccacgcgctccggccgccggctg

SEQ ID NO: 4724229 - DNA, 25 bp, Homo sapien
cgccggctgcgggcgcggctgggcg

SEQ ID NO: 4724230 - DNA, 25 bp, Homo sapien
ggcgaggcgctgcccccacgcgctc

SEQ ID NO: 4724231 - DNA, 25 bp, Homo sapien
gcatttccttaacgagccacttgat

SEQ ID NO: 4724232 - DNA, 25 bp, Homo sapien
tgcatttccttaacgagccacttga

SEQ ID NO: 4724233 - DNA, 25 bp, Homo sapien
ctgcatttccttaacgagccacttg

SEQ ID NO: 4724234 - DNA, 25 bp, Homo sapien
atttccttaacgagccacttgatgg

SEQ ID NO: 4724235 - DNA, 25 bp, Homo sapien
tacccatccaagaaggttcccatgc

SEQ ID NO: 4724236 - DNA, 25 bp, Homo sapien
tccctaaagccacggagcctaccca

SEQ ID NO: 4724237 - DNA, 25 bp, Homo sapien
tccaagaaggttcccatgcacaaac

SEQ ID NO: 4724238 - DNA, 25 bp, Homo sapien
acggagcctacccatccaagaaggt

SEQ ID NO: 4724239 - DNA, 25 bp, Homo sapien
ccttctagaaagtatcccttatcga

SEQ ID NO: 4724240 - DNA, 25 bp, Homo sapien
ttctctttaaaatgattcctgattg

SEQ ID NO: 4724241 - DNA, 25 bp, Homo sapien
aaatgattcctgattgtgccttcca

SEQ ID NO: 4724242 - DNA, 25 bp, Homo sapien
gaaagtatcccttatcgaaattctc

SEQ ID NO: 4724243 - DNA, 25 bp, Homo sapien
ttatatcccactcaaaccagggtat

SEQ ID NO: 4724244 - DNA, 25 bp, Homo sapien
tcaaaccagggtatctatgacacat

SEQ ID NO: 4724245 - DNA, 25 bp, Homo sapien
tctatgacacattggaacatggctg

SEQ ID NO: 4724246 - DNA, 25 bp, Homo sapien
cagggtatctatgacacattggaac

SEQ ID NO: 4724247 - DNA, 25 bp, Homo sapien
ctccgtggttgtaaggtgtcctcac

SEQ ID NO: 4724248 - DNA, 25 bp, Homo sapien
tcctcacttctaccccaggaggtga

SEQ ID NO: 4724249 - DNA, 25 bp, Homo sapien
cgtggttgtaaggtgtcctcacttc

SEQ ID NO: 4724250 - DNA, 25 bp, Homo sapien
tggttgtaaggtgtcctcacttcta

SEQ ID NO: 4724251 - DNA, 25 bp, Homo sapien
tcaaaacatgagtcttcagactttc

SEQ ID NO: 4724252 - DNA, 25 bp, Homo sapien
caaaacatgagtcttcagactttct

SEQ ID NO: 4724253 - DNA, 25 bp, Homo sapien
aaacatgagtcttcagactttctaa

SEQ ID NO: 4724254 - DNA, 25 bp, Homo sapien
catcaaaacatgagtcttcagactt

SEQ ID NO: 4724255 - DNA, 25 bp, Homo sapien
ttgcagtttctggtctagaacaaca

SEQ ID NO: 4724256 - DNA, 25 bp, Homo sapien
tgtgattgaattagggatggactga

SEQ ID NO: 4724257 - DNA, 25 bp, Homo sapien
gagagacttgcgcttatcttgcagg

SEQ ID NO: 4724258 - DNA, 25 bp, Homo sapien
gaaagtgcattgacagctaatggaa

SEQ ID NO: 4724259 - DNA, 25 bp, Homo sapien
cttgtatcagattccagagagttcc

SEQ ID NO: 4724260 - DNA, 25 bp, Homo sapien
ggaagactttccgtaggcaattgag

SEQ ID NO: 4724261 - DNA, 25 bp, Homo sapien
tagtggtagactgattcatgggcca

SEQ ID NO: 4724262 - DNA, 25 bp, Homo sapien
gccagtgtgaggaaatactagattt

SEQ ID NO: 4724263 - DNA, 25 bp, Homo sapien
cactccttccttcacctgctaaaac

SEQ ID NO: 4724264 - DNA, 25 bp, Homo sapien
tcacctgctaaaacctttatcaaca

SEQ ID NO: 4724265 - DNA, 25 bp, Homo sapien
ccttcacctgctaaaacctttatca

SEQ ID NO: 4724266 - DNA, 25 bp, Homo sapien
tccttcacctgctaaaacctttatc

SEQ ID NO: 4724267 - DNA, 25 bp, Homo sapien
gattgataaagtggagtaattaagt

SEQ ID NO: 4724268 - DNA, 25 bp, Homo sapien
ggcttggttcccatatcttaaggtg

SEQ ID NO: 4724269 - DNA, 25 bp, Homo sapien
agttaacggcttggttcccatatct

SEQ ID NO: 4724270 - DNA, 25 bp, Homo sapien
tcccatatcttaaggtgtcaaagag

SEQ ID NO: 4724271 - DNA, 25 bp, Homo sapien
aattgtgacataagtgtagtttgct

SEQ ID NO: 4724272 - DNA, 25 bp, Homo sapien
gtttctcagtgaactcaaattgtga

SEQ ID NO: 4724273 - DNA, 25 bp, Homo sapien
cagtgaactcaaattgtgacataag

SEQ ID NO: 4724274 - DNA, 25 bp, Homo sapien
aactcaaattgtgacataagtgtag

SEQ ID NO: 4724275 - DNA, 25 bp, Homo sapien
cctagatgagttgacccatgttaca

SEQ ID NO: 4724276 - DNA, 25 bp, Homo sapien
attctgcttgatcctagatgagttg

SEQ ID NO: 4724277 - DNA, 25 bp, Homo sapien
tctgcacatgacaaggaaggtaggg

SEQ ID NO: 4724278 - DNA, 25 bp, Homo sapien
tgttacaaagtcctccattctgcac

SEQ ID NO: 4724279 - DNA, 25 bp, Homo sapien
tcagggcccatgcacatatggcctt

SEQ ID NO: 4724280 - DNA, 25 bp, Homo sapien
gcacatatggccttgctccacaaag

SEQ ID NO: 4724281 - DNA, 25 bp, Homo sapien
ggcccatgcacatatggccttgctc

SEQ ID NO: 4724282 - DNA, 25 bp, Homo sapien
tgcacatatggccttgctccacaaa

SEQ ID NO: 4724283 - DNA, 25 bp, Homo sapien
cttgagtagcatagtagacaggtgg

SEQ ID NO: 4724284 - DNA, 25 bp, Homo sapien
gcagaagaatgaggccataattaag

SEQ ID NO: 4724285 - DNA, 25 bp, Homo sapien
gcttgactgagccacgtgtaggcac

SEQ ID NO: 4724286 - DNA, 25 bp, Homo sapien
ctgagccacgtgtaggcaccaggct

SEQ ID NO: 4724287 - DNA, 25 bp, Homo sapien
ggtatggctcagctgattgtagcac

SEQ ID NO: 4724288 - DNA, 25 bp, Homo sapien
atcagtgacctcccaattcaggaag

SEQ ID NO: 4724289 - DNA, 25 bp, Homo sapien
gtgatcagtgacctcccaattcagg

SEQ ID NO: 4724290 - DNA, 25 bp, Homo sapien
tgatcagtgacctcccaattcagga

SEQ ID NO: 4724291 - DNA, 25 bp, Homo sapien
gatcagtgacctcccaattcaggaa

SEQ ID NO: 4724292 - DNA, 25 bp, Homo sapien
ctgtgtttgctccttcatgctctgt

SEQ ID NO: 4724293 - DNA, 25 bp, Homo sapien
acacaggctgtgtttgctccttcat

SEQ ID NO: 4724294 - DNA, 25 bp, Homo sapien
gcacacaggctgtgtttgctccttc

SEQ ID NO: 4724295 - DNA, 25 bp, Homo sapien
ggctgtgtttgctccttcatgctct

SEQ ID NO: 4724296 - DNA, 25 bp, Homo sapien
gacccataacctgttcacaagatag

SEQ ID NO: 4724297 - DNA, 25 bp, Homo sapien
cattggcagaaaactgctactattt

SEQ ID NO: 4724298 - DNA, 25 bp, Homo sapien
ttaactgaaaaaagtagttgctatg

SEQ ID NO: 4724299 - DNA, 25 bp, Homo sapien
catatgcaggccaaatactagattc

SEQ ID NO: 4724300 - DNA, 25 bp, Homo sapien
aaggctacagatacctccactgtgg

SEQ ID NO: 4724301 - DNA, 25 bp, Homo sapien
ggaacatccctgctaggcattttca

SEQ ID NO: 4724302 - DNA, 25 bp, Homo sapien
gaatgattcccgctgtgtatggagc

SEQ ID NO: 4724303 - DNA, 25 bp, Homo sapien
cacacttaggccaggaacatccctg

SEQ ID NO: 4724304 - DNA, 25 bp, Homo sapien
cataggaacagcatagaacctttct

SEQ ID NO: 4724305 - DNA, 25 bp, Homo sapien
gtgaccataggaacagcatagaacc

SEQ ID NO: 4724306 - DNA, 25 bp, Homo sapien
tgaagattcattcttggctactcct

SEQ ID NO: 4724307 - DNA, 25 bp, Homo sapien
ttctggaattgaatctgcccaaatg

SEQ ID NO: 4724308 - DNA, 25 bp, Homo sapien
tgaggagtgtattgatctcaaaaac

SEQ ID NO: 4724309 - DNA, 25 bp, Homo sapien
taaataatccatggtctaaagaatc

SEQ ID NO: 4724310 - DNA, 25 bp, Homo sapien
tactcctgaaagcacatagaaatgg

SEQ ID NO: 4724311 - DNA, 25 bp, Homo sapien
gctacaaatcaagtgtttagaggaa

SEQ ID NO: 4724312 - DNA, 25 bp, Homo sapien
gcttcaccatcatttatatcagcat

SEQ ID NO: 4724313 - DNA, 25 bp, Homo sapien
tcagttcaccttgtcttgaagggct

SEQ ID NO: 4724314 - DNA, 25 bp, Homo sapien
cccaaatgcagcacattcacacacc

SEQ ID NO: 4724315 - DNA, 25 bp, Homo sapien
ttcccaaatgcagcacattcacaca

SEQ ID NO: 4724316 - DNA, 25 bp, Homo sapien
tgtttcccaaatgcagcacattcac

SEQ ID NO: 4724317 - DNA, 25 bp, Homo sapien
ccactgtttcccaaatgcagcacat

SEQ ID NO: 4724318 - DNA, 25 bp, Homo sapien
tcctattacctgtaccaaagaggcc

SEQ ID NO: 4724319 - DNA, 25 bp, Homo sapien
caaatctgcaagtgaagttcagggc

SEQ ID NO: 4724320 - DNA, 25 bp, Homo sapien
ggttcaccatagtccacatcacagt

SEQ ID NO: 4724321 - DNA, 25 bp, Homo sapien
aattcttgaatcctacagccgagga

SEQ ID NO: 4724322 - DNA, 25 bp, Homo sapien
ggttccaccgcaatggcagctttcg

SEQ ID NO: 4724323 - DNA, 25 bp, Homo sapien
cctcaatggcttcatgccgggcgag

SEQ ID NO: 4724324 - DNA, 25 bp, Homo sapien
gctacgactatgacttcgacctggg

SEQ ID NO: 4724325 - DNA, 25 bp, Homo sapien
ccagaattgtaaggagccagatgcc

SEQ ID NO: 4724326 - DNA, 25 bp, Homo sapien
tggtagtgggccattctgatgcatg

SEQ ID NO: 4724327 - DNA, 25 bp, Homo sapien
tttggtggtagtgggccattctgat

SEQ ID NO: 4724328 - DNA, 25 bp, Homo sapien
ggtggtagtgggccattctgatgca

SEQ ID NO: 4724329 - DNA, 25 bp, Homo sapien
gtagtgggccattctgatgcatgtt

SEQ ID NO: 4724330 - DNA, 25 bp, Homo sapien
cagctagaaagtccaaggcccttaa

SEQ ID NO: 4724331 - DNA, 25 bp, Homo sapien
catagtttctttataccattcatcc

SEQ ID NO: 4724332 - DNA, 25 bp, Homo sapien
tttctgctcaggatcaactccaggg

SEQ ID NO: 4724333 - DNA, 25 bp, Homo sapien
ggtaccataccgcacagatcatttc

SEQ ID NO: 4724334 - DNA, 25 bp, Homo sapien
cattgaaacaataagctaaactaca

SEQ ID NO: 4724335 - DNA, 25 bp, Homo sapien
taccaatcgtccatccaagtactca

SEQ ID NO: 4724336 - DNA, 25 bp, Homo sapien
gataaggtcttacccattgcattct

SEQ ID NO: 4724337 - DNA, 25 bp, Homo sapien
tattgctagtgtctaaactatgtga

SEQ ID NO: 4724338 - DNA, 25 bp, Homo sapien
aaagcataatgcaaatttcagggaa

SEQ ID NO: 4724339 - DNA, 25 bp, Homo sapien
ggtgtcttctcaatagatgctatag

SEQ ID NO: 4724340 - DNA, 25 bp, Homo sapien
tccggtgtcttctcaatagatgcta

SEQ ID NO: 4724341 - DNA, 25 bp, Homo sapien
ccggtgtcttctcaatagatgctat

SEQ ID NO: 4724342 - DNA, 25 bp, Homo sapien
catccggtgtcttctcaatagatgc

SEQ ID NO: 4724343 - DNA, 25 bp, Homo sapien
cttagtcccaaatgatgatggttct

SEQ ID NO: 4724344 - DNA, 25 bp, Homo sapien
agacaaatagcaggggctccagtgg

SEQ ID NO: 4724345 - DNA, 25 bp, Homo sapien
ggtgatatgcagaagcattgtttcc

SEQ ID NO: 4724346 - DNA, 25 bp, Homo sapien
ggctccagtggtgatatgcagaagc

SEQ ID NO: 4724347 - DNA, 25 bp, Homo sapien
tttctcatacagacaaatagcaggg

SEQ ID NO: 4724348 - DNA, 25 bp, Homo sapien
gacacccaggtttgttctccacaac

SEQ ID NO: 4724349 - DNA, 25 bp, Homo sapien
gtttccagctgaggattgttccagg

SEQ ID NO: 4724350 - DNA, 25 bp, Homo sapien
gctaccttggtttctctagacaccc

SEQ ID NO: 4724351 - DNA, 25 bp, Homo sapien
cctttgcgtacccttgtaatctgtg

SEQ ID NO: 4724352 - DNA, 25 bp, Homo sapien
gacaacagacaattgtttcttgact

SEQ ID NO: 4724353 - DNA, 25 bp, Homo sapien
tttatcaagcttttcactctatgcc

SEQ ID NO: 4724354 - DNA, 25 bp, Homo sapien
cactctatgcctttaaattgggcat

SEQ ID NO: 4724355 - DNA, 25 bp, Homo sapien
cctgtggctgccattacatatgagc

SEQ ID NO: 4724356 - DNA, 25 bp, Homo sapien
taatctagctagtgttccgttgatc

SEQ ID NO: 4724357 - DNA, 25 bp, Homo sapien
tagggaagagtccttccttcttgat

SEQ ID NO: 4724358 - DNA, 25 bp, Homo sapien
tagaaattgtaccagctcatcttcg

SEQ ID NO: 4724359 - DNA, 25 bp, Homo sapien
caccagtgtctttactagattttag

SEQ ID NO: 4724360 - DNA, 25 bp, Homo sapien
ttctttgtgtaatcagccggctccc

SEQ ID NO: 4724361 - DNA, 25 bp, Homo sapien
ccaaacatagaaatacctttgttct

SEQ ID NO: 4724362 - DNA, 25 bp, Homo sapien
tcttctacagacacgtacagacacg

SEQ ID NO: 4724363 - DNA, 25 bp, Homo sapien
gacacgtacatggtgggcttcctgg

SEQ ID NO: 4724364 - DNA, 25 bp, Homo sapien
ggccaagttcaagcctcaacttcca

SEQ ID NO: 4724365 - DNA, 25 bp, Homo sapien
ttgttcttaaaggccaagttcaagc

SEQ ID NO: 4724366 - DNA, 25 bp, Homo sapien
cttaaaggccaagttcaagcctcaa

SEQ ID NO: 4724367 - DNA, 25 bp, Homo sapien
aaggccaagttcaagcctcaacttc

SEQ ID NO: 4724368 - DNA, 25 bp, Homo sapien
ctatgatttctccaaatacaccttc

SEQ ID NO: 4724369 - DNA, 25 bp, Homo sapien
atgatttctccaaatacaccttctc

SEQ ID NO: 4724370 - DNA, 25 bp, Homo sapien
tatgatttctccaaatacaccttct

SEQ ID NO: 4724371 - DNA, 25 bp, Homo sapien
tgacctgtgttcagcttctggtaac

SEQ ID NO: 4724372 - DNA, 25 bp, Homo sapien
cttgaatgagatatgacctgtgttc

SEQ ID NO: 4724373 - DNA, 25 bp, Homo sapien
agcttctggtaacagagacccagat

SEQ ID NO: 4724374 - DNA, 25 bp, Homo sapien
ttctggtaacagagacccagattca

SEQ ID NO: 4724375 - DNA, 25 bp, Homo sapien
taactgctcgcttaccataatccct

SEQ ID NO: 4724376 - DNA, 25 bp, Homo sapien
taccgcactctttgcttcacgctgg

SEQ ID NO: 4724377 - DNA, 25 bp, Homo sapien
tactgaggctggtattgctaccgca

SEQ ID NO: 4724378 - DNA, 25 bp, Homo sapien
ttctagtggcaatgaatatcttgga

SEQ ID NO: 4724379 - DNA, 25 bp, Homo sapien
ttcctgtgctcccaagggcaggctg

SEQ ID NO: 4724380 - DNA, 25 bp, Homo sapien
ttctttcctgtgctcccaagggcag

SEQ ID NO: 4724381 - DNA, 25 bp, Homo sapien
cttttctttcctgtgctcccaaggg

SEQ ID NO: 4724382 - DNA, 25 bp, Homo sapien
cctgtgctcccaagggcaggctgca

SEQ ID NO: 4724383 - DNA, 25 bp, Homo sapien
caacagtgacttctgcagatacggg

SEQ ID NO: 4724384 - DNA, 25 bp, Homo sapien
gaaagtcgccagcaatggtattttc

SEQ ID NO: 4724385 - DNA, 25 bp, Homo sapien
tgctgtagtcaaaagagcaacagtg

SEQ ID NO: 4724386 - DNA, 25 bp, Homo sapien
cctgtgaatgcctgcttatagaaca

SEQ ID NO: 4724387 - DNA, 25 bp, Homo sapien
gtgtggaaaatatatccggcattct

SEQ ID NO: 4724388 - DNA, 25 bp, Homo sapien
atcatcaccagtactctttctggga

SEQ ID NO: 4724389 - DNA, 25 bp, Homo sapien
tgtgtggaaaatatatccggcattc

SEQ ID NO: 4724390 - DNA, 25 bp, Homo sapien
tcatcaccagtactctttctgggac

SEQ ID NO: 4724391 - DNA, 25 bp, Homo sapien
atagttaaaggtcatgccaactgtg

SEQ ID NO: 4724392 - DNA, 25 bp, Homo sapien
taatagttaaaggtcatgccaactg

SEQ ID NO: 4724393 - DNA, 25 bp, Homo sapien
ttaatagttaaaggtcatgccaact

SEQ ID NO: 4724394 - DNA, 25 bp, Homo sapien
aatagttaaaggtcatgccaactgt

SEQ ID NO: 4724395 - DNA, 25 bp, Homo sapien
ttctgctttcttacacctgagatac

SEQ ID NO: 4724396 - DNA, 25 bp, Homo sapien
tacacctgagatactgatagttgtg

SEQ ID NO: 4724397 - DNA, 25 bp, Homo sapien
tgtttaagtgttgggttgatggtca

SEQ ID NO: 4724398 - DNA, 25 bp, Homo sapien
atagttgtgtttaagtgttgggttg

SEQ ID NO: 4724399 - DNA, 25 bp, Homo sapien
ctcttatggttgtgagtgctgtttg

SEQ ID NO: 4724400 - DNA, 25 bp, Homo sapien
cttttatctactggatcttctacat

SEQ ID NO: 4724401 - DNA, 25 bp, Homo sapien
ttttatctactggatcttctacatc

SEQ ID NO: 4724402 - DNA, 25 bp, Homo sapien
ggcagtgccaaggacgtctgaagat

SEQ ID NO: 4724403 - DNA, 25 bp, Homo sapien
ccaccattttatcgaaaatgctaaa

SEQ ID NO: 4724404 - DNA, 25 bp, Homo sapien
ctgggacttcgaccggcccaggatt

SEQ ID NO: 4724405 - DNA, 25 bp, Homo sapien
gaagatggtaaaccattcctccaca

SEQ ID NO: 4724406 - DNA, 25 bp, Homo sapien
tgagggagcgaagcggcgagcgggc

SEQ ID NO: 4724407 - DNA, 25 bp, Homo sapien
gggtctctgagggagcgaagcggcg

SEQ ID NO: 4724408 - DNA, 25 bp, Homo sapien
tggccaatacggaccgctggcgcgg

SEQ ID NO: 4724409 - DNA, 25 bp, Homo sapien
cgtggccaatacggaccgctggcgc

SEQ ID NO: 4724410 - DNA, 25 bp, Homo sapien
gcggcggtagtggcggcagacagga

SEQ ID NO: 4724411 - DNA, 25 bp, Homo sapien
ggcggtagtggcggcagacaggaca

SEQ ID NO: 4724412 - DNA, 25 bp, Homo sapien
gtagtggcggcagacaggacagagc

SEQ ID NO: 4724413 - DNA, 25 bp, Homo sapien
cggtagtggcggcagacaggacaga

SEQ ID NO: 4724414 - DNA, 25 bp, Homo sapien
gaaaactcagcttgcaaatttgtca

SEQ ID NO: 4724415 - DNA, 25 bp, Homo sapien
tcagcttgcaaatttgtcatacaga

SEQ ID NO: 4724416 - DNA, 25 bp, Homo sapien
tctagctccaaatactgtgtccctt

SEQ ID NO: 4724417 - DNA, 25 bp, Homo sapien
gatttcagtcagtaatttaaccttc

SEQ ID NO: 4724418 - DNA, 25 bp, Homo sapien
attgttgatgataccttgccagtca

SEQ ID NO: 4724419 - DNA, 25 bp, Homo sapien
caccgatgaatatgggaggagagta

SEQ ID NO: 4724420 - DNA, 25 bp, Homo sapien
gcaattccagttgctacaccgatga

SEQ ID NO: 4724421 - DNA, 25 bp, Homo sapien
gttgctacaccgatgaatatgggag

SEQ ID NO: 4724422 - DNA, 25 bp, Homo sapien
cacttttttcgcagatctcagtatg

SEQ ID NO: 4724423 - DNA, 25 bp, Homo sapien
tttatatgaagtccacttttttcgc

SEQ ID NO: 4724424 - DNA, 25 bp, Homo sapien
agtccacttttttcgcagatctcag

SEQ ID NO: 4724425 - DNA, 25 bp, Homo sapien
atgaagtccacttttttcgcagatc

SEQ ID NO: 4724426 - DNA, 25 bp, Homo sapien
ggggctttcatgaaattgttatttg

SEQ ID NO: 4724427 - DNA, 25 bp, Homo sapien
ttgtttgaaaatcaacaattcccat

SEQ ID NO: 4724428 - DNA, 25 bp, Homo sapien
ttcatgaaattgttatttgtttgaa

SEQ ID NO: 4724429 - DNA, 25 bp, Homo sapien
tcatgaaattgttatttgtttgaaa

SEQ ID NO: 4724430 - DNA, 25 bp, Homo sapien
tagagaaactgagtaaaccgttgcc

SEQ ID NO: 4724431 - DNA, 25 bp, Homo sapien
tgacctctgtggaacgtttgcttgg

SEQ ID NO: 4724432 - DNA, 25 bp, Homo sapien
tattggatgcagtacggatggagaa

SEQ ID NO: 4724433 - DNA, 25 bp, Homo sapien
gagagcagcatggttaggtacatct

SEQ ID NO: 4724434 - DNA, 25 bp, Homo sapien
ctagtgactatccgaaaaaccagtg

SEQ ID NO: 4724435 - DNA, 25 bp, Homo sapien
gcttattctcactgggctgatcatt

SEQ ID NO: 4724436 - DNA, 25 bp, Homo sapien
taactaaccaaataggatgccctgc

SEQ ID NO: 4724437 - DNA, 25 bp, Homo sapien
tcattcttgacgtgtagttctcaca

SEQ ID NO: 4724438 - DNA, 25 bp, Homo sapien
gatgccctgctctagttatcctacc

SEQ ID NO: 4724439 - DNA, 25 bp, Homo sapien
ttggtttctcgccaacactataaac

SEQ ID NO: 4724440 - DNA, 25 bp, Homo sapien
tcttggtttctcgccaacactataa

SEQ ID NO: 4724441 - DNA, 25 bp, Homo sapien
ttatcttggtttctcgccaacacta

SEQ ID NO: 4724442 - DNA, 25 bp, Homo sapien
tatcttggtttctcgccaacactat

SEQ ID NO: 4724443 - DNA, 25 bp, Homo sapien
tgttgttcaagtcccctattgcctt

SEQ ID NO: 4724444 - DNA, 25 bp, Homo sapien
tgtcctatgtgtgcttgagaaaaac

SEQ ID NO: 4724445 - DNA, 25 bp, Homo sapien
tactctgtttatgctgttaggtcca

SEQ ID NO: 4724446 - DNA, 25 bp, Homo sapien
cactgtcagcttatgtgtatcctaa

SEQ ID NO: 4724447 - DNA, 25 bp, Homo sapien
tgagactcgttggtgatttgaaaac

SEQ ID NO: 4724448 - DNA, 25 bp, Homo sapien
ttttccacatacgaaatgagactcg

SEQ ID NO: 4724449 - DNA, 25 bp, Homo sapien
tagtcatggtcatcactcaaataaa

SEQ ID NO: 4724450 - DNA, 25 bp, Homo sapien
aagtaactaacacggttggcagtag

SEQ ID NO: 4724451 - DNA, 25 bp, Homo sapien
agcatataagtcattctctgctgac

SEQ ID NO: 4724452 - DNA, 25 bp, Homo sapien
cacatttgacctggtggatctggta

SEQ ID NO: 4724453 - DNA, 25 bp, Homo sapien
tggatctggtaaacgtaaagtcagt

SEQ ID NO: 4724454 - DNA, 25 bp, Homo sapien
cttcacatttgacctggtggatctg

SEQ ID NO: 4724455 - DNA, 25 bp, Homo sapien
gacctggtggatctggtaaacgtaa

SEQ ID NO: 4724456 - DNA, 25 bp, Homo sapien
tgacataaaccataacttgtataaa

SEQ ID NO: 4724457 - DNA, 25 bp, Homo sapien
gacataaaccataacttgtataaaa

SEQ ID NO: 4724458 - DNA, 25 bp, Homo sapien
cataaaccataacttgtataaaagt

SEQ ID NO: 4724459 - DNA, 25 bp, Homo sapien
taatgacataaaccataacttgtat

SEQ ID NO: 4724460 - DNA, 25 bp, Homo sapien
atatgttgtaaacgcggaactgtca

SEQ ID NO: 4724461 - DNA, 25 bp, Homo sapien
aatatgttgtaaacgcggaactgtc

SEQ ID NO: 4724462 - DNA, 25 bp, Homo sapien
tattaatatgttgtaaacgcggaac

SEQ ID NO: 4724463 - DNA, 25 bp, Homo sapien
ttaatatgttgtaaacgcggaactg

SEQ ID NO: 4724464 - DNA, 25 bp, Homo sapien
cactggaaagtcactgcttctgggt

SEQ ID NO: 4724465 - DNA, 25 bp, Homo sapien
ttgtgttttagaagtcatgatctgg

SEQ ID NO: 4724466 - DNA, 25 bp, Homo sapien
ggttgtgagatatgctccttagcac

SEQ ID NO: 4724467 - DNA, 25 bp, Homo sapien
ttaagtccttgtgttttagaagtca

SEQ ID NO: 4724468 - DNA, 25 bp, Homo sapien
ccagagaagtgttcttgacagcgat

SEQ ID NO: 4724469 - DNA, 25 bp, Homo sapien
gaaaacacgttgctctatatccaga

SEQ ID NO: 4724470 - DNA, 25 bp, Homo sapien
tatccagagcaagtgaattatctcc

SEQ ID NO: 4724471 - DNA, 25 bp, Homo sapien
ttagggaaactgtacaaaggattga

SEQ ID NO: 4724472 - DNA, 25 bp, Homo sapien
taatggcaccgtggtttataaccag

SEQ ID NO: 4724473 - DNA, 25 bp, Homo sapien
ccgtggtttataaccagtgcctgaa

SEQ ID NO: 4724474 - DNA, 25 bp, Homo sapien
ttagacattaatggcaccgtggttt

SEQ ID NO: 4724475 - DNA, 25 bp, Homo sapien
tataaccagtgcctgaatagaggta

SEQ ID NO: 4724476 - DNA, 25 bp, Homo sapien
gactttgtgccaaacttgatgcagt

SEQ ID NO: 4724477 - DNA, 25 bp, Homo sapien
attactccagggctcttgtttccca

SEQ ID NO: 4724478 - DNA, 25 bp, Homo sapien
agggctcttgtttcccatcagcaaa

SEQ ID NO: 4724479 - DNA, 25 bp, Homo sapien
tgcaccaactgaaatacactcatta

SEQ ID NO: 4724480 - DNA, 25 bp, Homo sapien
attgcctgactgaatgctgcttctc

SEQ ID NO: 4724481 - DNA, 25 bp, Homo sapien
cattgcctgactgaatgctgcttct

SEQ ID NO: 4724482 - DNA, 25 bp, Homo sapien
taatccttccttcgattgtgcattc

SEQ ID NO: 4724483 - DNA, 25 bp, Homo sapien
atttaatccttccttcgattgtgca

SEQ ID NO: 4724484 - DNA, 25 bp, Homo sapien
tttaatccttccttcgattgtgcat

SEQ ID NO: 4724485 - DNA, 25 bp, Homo sapien
gatttaatccttccttcgattgtgc

SEQ ID NO: 4724486 - DNA, 25 bp, Homo sapien
gccaagttaatgtatggagtagaca

SEQ ID NO: 4724487 - DNA, 25 bp, Homo sapien
tttcctcggaaagagaacatataag

SEQ ID NO: 4724488 - DNA, 25 bp, Homo sapien
tcctggcagtactgcaatgccaagt

SEQ ID NO: 4724489 - DNA, 25 bp, Homo sapien
tatgttctatctgctatttccaacg

SEQ ID NO: 4724490 - DNA, 25 bp, Homo sapien
tcttggcaactgtctattggaacaa

SEQ ID NO: 4724491 - DNA, 25 bp, Homo sapien
ccacagctcagtatgatcttggcaa

SEQ ID NO: 4724492 - DNA, 25 bp, Homo sapien
cttccacagctcagtatgatcttgg

SEQ ID NO: 4724493 - DNA, 25 bp, Homo sapien
tattggaacaagacttctgtggact

SEQ ID NO: 4724494 - DNA, 25 bp, Homo sapien
tccaggagcctttctttgtacctgt

SEQ ID NO: 4724495 - DNA, 25 bp, Homo sapien
ctcagatacctgtgaatcatgttcc

SEQ ID NO: 4724496 - DNA, 25 bp, Homo sapien
cagatacctgtgaatcatgttccag

SEQ ID NO: 4724497 - DNA, 25 bp, Homo sapien
ttctttgtacctgtatttctcatat

SEQ ID NO: 4724498 - DNA, 25 bp, Homo sapien
ggtccgccaatgcaacagaatcctc

SEQ ID NO: 4724499 - DNA, 25 bp, Homo sapien
gccaatgcaacagaatcctcctctg

SEQ ID NO: 4724500 - DNA, 25 bp, Homo sapien
caatgcaacagaatcctcctctgag

SEQ ID NO: 4724501 - DNA, 25 bp, Homo sapien
gaggtccgccaatgcaacagaatcc

SEQ ID NO: 4724502 - DNA, 25 bp, Homo sapien
ttcccatacagatcagcattattgc

SEQ ID NO: 4724503 - DNA, 25 bp, Homo sapien
atgcacatgtattcccatacagatc

SEQ ID NO: 4724504 - DNA, 25 bp, Homo sapien
cagatcagcattattgcagccaaga

SEQ ID NO: 4724505 - DNA, 25 bp, Homo sapien
cattattgcagccaagatcatacat

SEQ ID NO: 4724506 - DNA, 25 bp, Homo sapien
gaatccataccatgcaggatttgga

SEQ ID NO: 4724507 - DNA, 25 bp, Homo sapien
gctgactgttttgaggttctcttgt

SEQ ID NO: 4724508 - DNA, 25 bp, Homo sapien
tcttccctatgttcctgctgactgt

SEQ ID NO: 4724509 - DNA, 25 bp, Homo sapien
gaaattggccaaatcaattcttccc

SEQ ID NO: 4724510 - DNA, 25 bp, Homo sapien
tatttacccatgtaactacactgag

SEQ ID NO: 4724511 - DNA, 25 bp, Homo sapien
tagtgctgtactgattatttaccca

SEQ ID NO: 4724512 - DNA, 25 bp, Homo sapien
tcttcttagtgctgtactgattatt

SEQ ID NO: 4724513 - DNA, 25 bp, Homo sapien
caaaatgaagatatgaggaccaacc

SEQ ID NO: 4724514 - DNA, 25 bp, Homo sapien
cttgggatttatgaagagacctcta

SEQ ID NO: 4724515 - DNA, 25 bp, Homo sapien
ggatttatgaagagacctctaatgc

SEQ ID NO: 4724516 - DNA, 25 bp, Homo sapien
gatttatgaagagacctctaatgcc

SEQ ID NO: 4724517 - DNA, 25 bp, Homo sapien
ttatgaagagacctctaatgccatc

SEQ ID NO: 4724518 - DNA, 25 bp, Homo sapien
tgtccaaccttatcatccagatctg

SEQ ID NO: 4724519 - DNA, 25 bp, Homo sapien
accaattccagactgacagtgtcca

SEQ ID NO: 4724520 - DNA, 25 bp, Homo sapien
gactgacagtgtccaaccttatcat

SEQ ID NO: 4724521 - DNA, 25 bp, Homo sapien
ccttatcatccagatctgtctttac

SEQ ID NO: 4724522 - DNA, 25 bp, Homo sapien
acttctgttaggagtgatgtcactg

SEQ ID NO: 4724523 - DNA, 25 bp, Homo sapien
tggcaagttggcaattatttgagga

SEQ ID NO: 4724524 - DNA, 25 bp, Homo sapien
tttaccaaggctatatcatcaattg

SEQ ID NO: 4724525 - DNA, 25 bp, Homo sapien
tcatcaattgttgaagcacttctgt

SEQ ID NO: 4724526 - DNA, 25 bp, Homo sapien
tctccttgatgtctggccacttaat

SEQ ID NO: 4724527 - DNA, 25 bp, Homo sapien
ctccttgatgtctggccacttaatt

SEQ ID NO: 4724528 - DNA, 25 bp, Homo sapien
atctccttgatgtctggccacttaa

SEQ ID NO: 4724529 - DNA, 25 bp, Homo sapien
tccttgatgtctggccacttaattt

SEQ ID NO: 4724530 - DNA, 25 bp, Homo sapien
cacttatgtgcttctggatacttgg

SEQ ID NO: 4724531 - DNA, 25 bp, Homo sapien
cataccaattttactgcctgagcca

SEQ ID NO: 4724532 - DNA, 25 bp, Homo sapien
ttggcacagctgctttaattctccg

SEQ ID NO: 4724533 - DNA, 25 bp, Homo sapien
tttgactacccatgaagacttcgct

SEQ ID NO: 4724534 - DNA, 25 bp, Homo sapien
cggagaaggacgagcagaacatggc

SEQ ID NO: 4724535 - DNA, 25 bp, Homo sapien
ccggagaaggacgagcagaacatgg

SEQ ID NO: 4724536 - DNA, 25 bp, Homo sapien
gagaaggacgagcagaacatggctg

SEQ ID NO: 4724537 - DNA, 25 bp, Homo sapien
gaaggacgagcagaacatggctgcc

SEQ ID NO: 4724538 - DNA, 25 bp, Homo sapien
gctatctagagatgattgtgcctga

SEQ ID NO: 4724539 - DNA, 25 bp, Homo sapien
tatgcgtcactgtagactctaaaat

SEQ ID NO: 4724540 - DNA, 25 bp, Homo sapien
ccatgagggttgtgctgatatcact

SEQ ID NO: 4724541 - DNA, 25 bp, Homo sapien
cagtagaaggtatatttatgcgtca

SEQ ID NO: 4724542 - DNA, 25 bp, Homo sapien
tctgatttcttctgctcgtgaccct

SEQ ID NO: 4724543 - DNA, 25 bp, Homo sapien
cccagtataatcaatggctctgatt

SEQ ID NO: 4724544 - DNA, 25 bp, Homo sapien
gaaagacttcccagtataatcaatg

SEQ ID NO: 4724545 - DNA, 25 bp, Homo sapien
ccttgttcactactcttatatttga

SEQ ID NO: 4724546 - DNA, 25 bp, Homo sapien
aagttaataactatatgtttatcag

SEQ ID NO: 4724547 - DNA, 25 bp, Homo sapien
gttaataactatatgtttatcagca

SEQ ID NO: 4724548 - DNA, 25 bp, Homo sapien
aataactatatgtttatcagcagca

SEQ ID NO: 4724549 - DNA, 25 bp, Homo sapien
taataactatatgtttatcagcagc

SEQ ID NO: 4724550 - DNA, 25 bp, Homo sapien
tctgtcacttattttgtactctcca

SEQ ID NO: 4724551 - DNA, 25 bp, Homo sapien
gtcacttattttgtactctccaaca

SEQ ID NO: 4724552 - DNA, 25 bp, Homo sapien
tcacttattttgtactctccaacag

SEQ ID NO: 4724553 - DNA, 25 bp, Homo sapien
tgtcacttattttgtactctccaac

SEQ ID NO: 4724554 - DNA, 25 bp, Homo sapien
aatcacattttattcctccaaaaat

SEQ ID NO: 4724555 - DNA, 25 bp, Homo sapien
tcacattttattcctccaaaaatta

SEQ ID NO: 4724556 - DNA, 25 bp, Homo sapien
caatcacattttattcctccaaaaa

SEQ ID NO: 4724557 - DNA, 25 bp, Homo sapien
tcaatcacattttattcctccaaaa

SEQ ID NO: 4724558 - DNA, 25 bp, Homo sapien
cttctttcatcgttgtcttttccaa

SEQ ID NO: 4724559 - DNA, 25 bp, Homo sapien
tattgacagatatcccttttctccc

SEQ ID NO: 4724560 - DNA, 25 bp, Homo sapien
actccttggggtggccactagacct

SEQ ID NO: 4724561 - DNA, 25 bp, Homo sapien
catcgttgtcttttccaaatctcca

SEQ ID NO: 4724562 - DNA, 25 bp, Homo sapien
gagctgttctgttcaaaattgaagc

SEQ ID NO: 4724563 - DNA, 25 bp, Homo sapien
tgaagcttttgcagcttgcggctcc

SEQ ID NO: 4724564 - DNA, 25 bp, Homo sapien
cagaggaattttgttgaacccataa

SEQ ID NO: 4724565 - DNA, 25 bp, Homo sapien
ggctccttgatttgtgagctagaga

SEQ ID NO: 4724566 - DNA, 25 bp, Homo sapien
ttgtagagaaatttgtcaacctgtt

SEQ ID NO: 4724567 - DNA, 25 bp, Homo sapien
gccccagcaggatatttgtagagaa

SEQ ID NO: 4724568 - DNA, 25 bp, Homo sapien
gtggagcattgagactggtgctcat

SEQ ID NO: 4724569 - DNA, 25 bp, Homo sapien
tctttgctgccacaagagcacagtg

SEQ ID NO: 4724570 - DNA, 25 bp, Homo sapien
gggagagatgtgaattggatctgag

SEQ ID NO: 4724571 - DNA, 25 bp, Homo sapien
ggaagtgtgattaagttggtcctgg

SEQ ID NO: 4724572 - DNA, 25 bp, Homo sapien
aagtgtgattaagttggtcctggaa

SEQ ID NO: 4724573 - DNA, 25 bp, Homo sapien
gaagtgtgattaagttggtcctgga

SEQ ID NO: 4724574 - DNA, 25 bp, Homo sapien
gacagttggattgatctgaaaattt

SEQ ID NO: 4724575 - DNA, 25 bp, Homo sapien
gaggatagacagttggattgatctg

SEQ ID NO: 4724576 - DNA, 25 bp, Homo sapien
ctctaattttcctgagaggatagac

SEQ ID NO: 4724577 - DNA, 25 bp, Homo sapien
tttttcctgagaggatagacagttg

SEQ ID NO: 4724578 - DNA, 25 bp, Homo sapien
aatttaagcgtgtgtttatagaacg

SEQ ID NO: 4724579 - DNA, 25 bp, Homo sapien
gtttgaatttaagcgtgtgtttata

SEQ ID NO: 4724580 - DNA, 25 bp, Homo sapien
gcgtgtgtttatagaacgctctcga

SEQ ID NO: 4724581 - DNA, 25 bp, Homo sapien
ttaagcgtgtgtttatagaacgctc

SEQ ID NO: 4724582 - DNA, 25 bp, Homo sapien
cattttcaaggcaagcaaaattgta

SEQ ID NO: 4724583 - DNA, 25 bp, Homo sapien
gctttgattcagaaatagtttggta

SEQ ID NO: 4724584 - DNA, 25 bp, Homo sapien
tgtatttgctcttgctttgattcag

SEQ ID NO: 4724585 - DNA, 25 bp, Homo sapien
tttgttcacgttgaacagctgccca

SEQ ID NO: 4724586 - DNA, 25 bp, Homo sapien
aggtgtgggtattctgagttctttt

SEQ ID NO: 4724587 - DNA, 25 bp, Homo sapien
cagcagattttccatgagtaggtgt

SEQ ID NO: 4724588 - DNA, 25 bp, Homo sapien
ttcccatccgtggtagcagactttg

SEQ ID NO: 4724589 - DNA, 25 bp, Homo sapien
gcagactttgctttccgccctagac

SEQ ID NO: 4724590 - DNA, 25 bp, Homo sapien
acagtttttatctcgctgaatgctg

SEQ ID NO: 4724591 - DNA, 25 bp, Homo sapien
aatgctgctgctagtccctcaggga

SEQ ID NO: 4724592 - DNA, 25 bp, Homo sapien
ccctcagggactacatttgctgaaa

SEQ ID NO: 4724593 - DNA, 25 bp, Homo sapien
tgtagctccttgctgataacagttt

SEQ ID NO: 4724594 - DNA, 25 bp, Homo sapien
tatgagatgtgttgaaatttgcccc

SEQ ID NO: 4724595 - DNA, 25 bp, Homo sapien
acaaagcatttgtggacctcaagag

SEQ ID NO: 4724596 - DNA, 25 bp, Homo sapien
taatgaccactgactaaaaggagac

SEQ ID NO: 4724597 - DNA, 25 bp, Homo sapien
tgctagaaatgggactaagacgacc

SEQ ID NO: 4724598 - DNA, 25 bp, Homo sapien
cataggatgttaggtgcaatggcag

SEQ ID NO: 4724599 - DNA, 25 bp, Homo sapien
tcatcttttactggagacccacacg

SEQ ID NO: 4724600 - DNA, 25 bp, Homo sapien
gcgccaaacttggtggattgaaaat

SEQ ID NO: 4724601 - DNA, 25 bp, Homo sapien
tattgcagctaacgttcttccagcc

SEQ ID NO: 4724602 - DNA, 25 bp, Homo sapien
tctgacaagggtgaaagggctagcc

SEQ ID NO: 4724603 - DNA, 25 bp, Homo sapien
caaatggttccacgtacaatagatg

SEQ ID NO: 4724604 - DNA, 25 bp, Homo sapien
caatagatgattatgccaggaccaa

SEQ ID NO: 4724605 - DNA, 25 bp, Homo sapien
gagtggcatatcacccaaatggttc

SEQ ID NO: 4724606 - DNA, 25 bp, Homo sapien
tcagtgctgtctgttgattcatttg

SEQ ID NO: 4724607 - DNA, 25 bp, Homo sapien
atttgcattgcctcctgagtgtctc

SEQ ID NO: 4724608 - DNA, 25 bp, Homo sapien
ttcatttgcattgcctcctgagtgt

SEQ ID NO: 4724609 - DNA, 25 bp, Homo sapien
gctgggacctcagtgctgtctgttg

SEQ ID NO: 4724610 - DNA, 25 bp, Homo sapien
tgcaggaccagatcggctgaggaac

SEQ ID NO: 4724611 - DNA, 25 bp, Homo sapien
ttctccgcgtctggggtgcaggacc

SEQ ID NO: 4724612 - DNA, 25 bp, Homo sapien
ctttgctagcacttatgcaaatagc

SEQ ID NO: 4724613 - DNA, 25 bp, Homo sapien
ggaactttgctagcacttatgcaaa

SEQ ID NO: 4724614 - DNA, 25 bp, Homo sapien
tcagatttaagaagagtcccaaggg

SEQ ID NO: 4724615 - DNA, 25 bp, Homo sapien
ttaattgctggctagagaaatccat

SEQ ID NO: 4724616 - DNA, 25 bp, Homo sapien
tatttagccttagacactgccatga

SEQ ID NO: 4724617 - DNA, 25 bp, Homo sapien
gaaatccatttgactagctctcgag

SEQ ID NO: 4724618 - DNA, 25 bp, Homo sapien
gcttgtgatattgtgttcttggtgg

SEQ ID NO: 4724619 - DNA, 25 bp, Homo sapien
tgtgatattgtgttcttggtgggca

SEQ ID NO: 4724620 - DNA, 25 bp, Homo sapien
tgatattgtgttcttggtgggcaga

SEQ ID NO: 4724621 - DNA, 25 bp, Homo sapien
attgtgttcttggtgggcagaaacc

SEQ ID NO: 4724622 - DNA, 25 bp, Homo sapien
ttggagattcctgtagaacttccat

SEQ ID NO: 4724623 - DNA, 25 bp, Homo sapien
ctttcaaggtgaagactaagaattg

SEQ ID NO: 4724624 - DNA, 25 bp, Homo sapien
agctttcctctagacaacgtggcac

SEQ ID NO: 4724625 - DNA, 25 bp, Homo sapien
gagctttcctctagacaacgtggca

SEQ ID NO: 4724626 - DNA, 25 bp, Homo sapien
tcctctatttgaccgctcaaatact

SEQ ID NO: 4724627 - DNA, 25 bp, Homo sapien
tctcatatcctctatttgaccgctc

SEQ ID NO: 4724628 - DNA, 25 bp, Homo sapien
tatcctctatttgaccgctcaaata

SEQ ID NO: 4724629 - DNA, 25 bp, Homo sapien
catatcctctatttgaccgctcaaa

SEQ ID NO: 4724630 - DNA, 25 bp, Homo sapien
cactacttagcacaggaggttcgac

SEQ ID NO: 4724631 - DNA, 25 bp, Homo sapien
tgttgcctatgctgaagtgtcctgc

SEQ ID NO: 4724632 - DNA, 25 bp, Homo sapien
acctggtccagtgtaccgccctttg

SEQ ID NO: 4724633 - DNA, 25 bp, Homo sapien
tgtcctgctattcacaggaggcgtg

SEQ ID NO: 4724634 - DNA, 25 bp, Homo sapien
tttatgggtccatgcacacgaccga

SEQ ID NO: 4724635 - DNA, 25 bp, Homo sapien
caggatatcccgaaagcttggaggc

SEQ ID NO: 4724636 - DNA, 25 bp, Homo sapien
tatggctggaaaatgaaacgaccca

SEQ ID NO: 4724637 - DNA, 25 bp, Homo sapien
tgtgtcgcgtagtaccagatgggca

SEQ ID NO: 4724638 - DNA, 25 bp, Homo sapien
ccccgcgtcctgtgcggatttcagg

SEQ ID NO: 4724639 - DNA, 25 bp, Homo sapien
gatttcgcagcagccttcgaagccg

SEQ ID NO: 4724640 - DNA, 25 bp, Homo sapien
tttcagggctgataccgcataggcg

SEQ ID NO: 4724641 - DNA, 25 bp, Homo sapien
ccggagaggtctgctgatttcgcag

SEQ ID NO: 4724642 - DNA, 25 bp, Homo sapien
taaggcctgctgtgcgctgttaaca

SEQ ID NO: 4724643 - DNA, 25 bp, Homo sapien
tactttcggacaacgcgactcactg

SEQ ID NO: 4724644 - DNA, 25 bp, Homo sapien
caccagcccgttgagagtttgcagt

SEQ ID NO: 4724645 - DNA, 25 bp, Homo sapien
tcgggtaggttcaaaaggtggctca

SEQ ID NO: 4724646 - DNA, 25 bp, Homo sapien
ggatctgctaaggaccatctcccac

SEQ ID NO: 4724647 - DNA, 25 bp, Homo sapien
cgtttgcctgagcataggacaatga

SEQ ID NO: 4724648 - DNA, 25 bp, Homo sapien
gggatctgctaaggaccatctccca

SEQ ID NO: 4724649 - DNA, 25 bp, Homo sapien
tgctgtttgcaaacgtttgcctgag

SEQ ID NO: 4724650 - DNA, 25 bp, Homo sapien
gaaagttgcaacagtgggcctcaaa

SEQ ID NO: 4724651 - DNA, 25 bp, Homo sapien
tcagacatacgtgtggagactaaca

SEQ ID NO: 4724652 - DNA, 25 bp, Homo sapien
caaagtaggctaggagatttctatc

SEQ ID NO: 4724653 - DNA, 25 bp, Homo sapien
ggacaacccttaggtacataatgga

SEQ ID NO: 4724654 - DNA, 25 bp, Homo sapien
cagagttgtcggaagagtagagaaa

SEQ ID NO: 4724655 - DNA, 25 bp, Homo sapien
tgttctcagagttgtcggaagagta

SEQ ID NO: 4724656 - DNA, 25 bp, Homo sapien
tgctctttcctcagatattgtcact

SEQ ID NO: 4724657 - DNA, 25 bp, Homo sapien
gaaccattgttctcagagttgtcgg

SEQ ID NO: 4724658 - DNA, 25 bp, Homo sapien
ataattcagtgatcattcccctcct

SEQ ID NO: 4724659 - DNA, 25 bp, Homo sapien
aaaataattcagtgatcattcccct

SEQ ID NO: 4724660 - DNA, 25 bp, Homo sapien
aatttgcacatgatatcactgttcc

SEQ ID NO: 4724661 - DNA, 25 bp, Homo sapien
tgcacatgatatcactgttcctcaa

SEQ ID NO: 4724662 - DNA, 25 bp, Homo sapien
tacaagtgggtctgcctaaagcata

SEQ ID NO: 4724663 - DNA, 25 bp, Homo sapien
aagtggtcacctcccttaaatcaga

SEQ ID NO: 4724664 - DNA, 25 bp, Homo sapien
gaatatttttcgacagagctctgca

SEQ ID NO: 4724665 - DNA, 25 bp, Homo sapien
cacctttctattggattaatgccag

SEQ ID NO: 4724666 - DNA, 25 bp, Homo sapien
gactatcagttctttcgtggctaga

SEQ ID NO: 4724667 - DNA, 25 bp, Homo sapien
tcagacttgccctgtgcattcttgc

SEQ ID NO: 4724668 - DNA, 25 bp, Homo sapien
agaggtcccatggtctgtaataaaa

SEQ ID NO: 4724669 - DNA, 25 bp, Homo sapien
tttagccgagtgtaagaggtcagta

SEQ ID NO: 4724670 - DNA, 25 bp, Homo sapien
gaatgcttgtgacctttattactgt

SEQ ID NO: 4724671 - DNA, 25 bp, Homo sapien
tccacattgcaggttatttctgtga

SEQ ID NO: 4724672 - DNA, 25 bp, Homo sapien
caccattgcattatccagaggccat

SEQ ID NO: 4724673 - DNA, 25 bp, Homo sapien
tgttgaaacgtaatgtacactcctg

SEQ ID NO: 4724674 - DNA, 25 bp, Homo sapien
agtggaaacacttctctggtctgtg

SEQ ID NO: 4724675 - DNA, 25 bp, Homo sapien
aattagtggaaacacttctctggtc

SEQ ID NO: 4724676 - DNA, 25 bp, Homo sapien
ttagtggaaacacttctctggtctg

SEQ ID NO: 4724677 - DNA, 25 bp, Homo sapien
tataaattagtggaaacacttctct

SEQ ID NO: 4724678 - DNA, 25 bp, Homo sapien
gctgattttgaaactgcttaatggt

SEQ ID NO: 4724679 - DNA, 25 bp, Homo sapien
tgaaactgcttaatggtattgctgt

SEQ ID NO: 4724680 - DNA, 25 bp, Homo sapien
tcccttcttttacagtagcacaaac

SEQ ID NO: 4724681 - DNA, 25 bp, Homo sapien
gctgttgctcctaatacttctcatc

SEQ ID NO: 4724682 - DNA, 25 bp, Homo sapien
tagcactcggtccagtatttgggca

SEQ ID NO: 4724683 - DNA, 25 bp, Homo sapien
tctccagggtctgcaatatttagca

SEQ ID NO: 4724684 - DNA, 25 bp, Homo sapien
caacttagttctctggcggtttctc

SEQ ID NO: 4724685 - DNA, 25 bp, Homo sapien
tagcatggcttcagctaactaccac

SEQ ID NO: 4724686 - DNA, 25 bp, Homo sapien
aagtacgtaactgctcccaaggtag

SEQ ID NO: 4724687 - DNA, 25 bp, Homo sapien
tccaagtatgggtatgaaaaaagcc

SEQ ID NO: 4724688 - DNA, 25 bp, Homo sapien
taaacagtgctagctgactcctggc

SEQ ID NO: 4724689 - DNA, 25 bp, Homo sapien
gttgtgtgaacctcctttacgtgca

SEQ ID NO: 4724690 - DNA, 25 bp, Homo sapien
ctcaaggtctgaatcagcttgaatc

SEQ ID NO: 4724691 - DNA, 25 bp, Homo sapien
tcctccggccatacataaaggaagt

SEQ ID NO: 4724692 - DNA, 25 bp, Homo sapien
caggaggatggcaatcctccggcca

SEQ ID NO: 4724693 - DNA, 25 bp, Homo sapien
caaggtctgaatcagcttgaatcat

SEQ ID NO: 4724694 - DNA, 25 bp, Homo sapien
gccaggtattaccaagtggtcagca

SEQ ID NO: 4724695 - DNA, 25 bp, Homo sapien
tgttcgatgtgctaaaatcaggctc

SEQ ID NO: 4724696 - DNA, 25 bp, Homo sapien
ggttttccaagatagacatgccaag

SEQ ID NO: 4724697 - DNA, 25 bp, Homo sapien
gaggaggatttctgctgtaccactg

SEQ ID NO: 4724698 - DNA, 25 bp, Homo sapien
tctttaactatttgcgctgattctt

SEQ ID NO: 4724699 - DNA, 25 bp, Homo sapien
tttaactatttgcgctgattctttt

SEQ ID NO: 4724700 - DNA, 25 bp, Homo sapien
ctttaactatttgcgctgattcttt

SEQ ID NO: 4724701 - DNA, 25 bp, Homo sapien
tcccacgggtgttcctatgactgtt

SEQ ID NO: 4724702 - DNA, 25 bp, Homo sapien
tcatgttaggtctcattgaggtctc

SEQ ID NO: 4724703 - DNA, 25 bp, Homo sapien
gagtccctccctgtctaattgccta

SEQ ID NO: 4724704 - DNA, 25 bp, Homo sapien
tcttcccgctagctgcagaggtggt

SEQ ID NO: 4724705 - DNA, 25 bp, Homo sapien
tgttttggaactgaggaatgacaaa

SEQ ID NO: 4724706 - DNA, 25 bp, Homo sapien
ctccattcatattcctggatgtttt

SEQ ID NO: 4724707 - DNA, 25 bp, Homo sapien
tttgttttggaactgaggaatgaca

SEQ ID NO: 4724708 - DNA, 25 bp, Homo sapien
tggaactgaggaatgacaaaaagga

SEQ ID NO: 4724709 - DNA, 25 bp, Homo sapien
ctgggtgtttgcctgttgaaatagc

SEQ ID NO: 4724710 - DNA, 25 bp, Homo sapien
tttgcctgttgaaatagcacctagg

SEQ ID NO: 4724711 - DNA, 25 bp, Homo sapien
cttgatggggcttattcttgtctgg

SEQ ID NO: 4724712 - DNA, 25 bp, Homo sapien
gttgaaatagcacctaggcccacct

SEQ ID NO: 4724713 - DNA, 25 bp, Homo sapien
tacgactcaggccatcccttccaaa

SEQ ID NO: 4724714 - DNA, 25 bp, Homo sapien
accacaaaagagactttgttctcag

SEQ ID NO: 4724715 - DNA, 25 bp, Homo sapien
caaaagatcaatgggttgatgccct

SEQ ID NO: 4724716 - DNA, 25 bp, Homo sapien
agtggcctccccacaatacgactca

SEQ ID NO: 4724717 - DNA, 25 bp, Homo sapien
tggaaggcctgaactagtctcaaag

SEQ ID NO: 4724718 - DNA, 25 bp, Homo sapien
gtcagtgaactggaaggcctgaact

SEQ ID NO: 4724719 - DNA, 25 bp, Homo sapien
gaactggaaggcctgaactagtctc

SEQ ID NO: 4724720 - DNA, 25 bp, Homo sapien
ggcctgaactagtctcaaagtctca

SEQ ID NO: 4724721 - DNA, 25 bp, Homo sapien
catatcatcaacgataaagaggccc

SEQ ID NO: 4724722 - DNA, 25 bp, Homo sapien
gtgcacttcgggtctgaggccaaag

SEQ ID NO: 4724723 - DNA, 25 bp, Homo sapien
tccatgccagctgacagaagtgaga

SEQ ID NO: 4724724 - DNA, 25 bp, Homo sapien
gaggcccctgaatgagatgccttct

SEQ ID NO: 4724725 - DNA, 25 bp, Homo sapien
aaagaagaatacaacatatttcctt

SEQ ID NO: 4724726 - DNA, 25 bp, Homo sapien
agtgaagtcaagccggtaaaagaag

SEQ ID NO: 4724727 - DNA, 25 bp, Homo sapien
gtcaagccggtaaaagaagaataca

SEQ ID NO: 4724728 - DNA, 25 bp, Homo sapien
tcaagccggtaaaagaagaatacaa

SEQ ID NO: 4724729 - DNA, 25 bp, Homo sapien
ggtgcccaattttagcgtttcctga

SEQ ID NO: 4724730 - DNA, 25 bp, Homo sapien
tgtctggcataatggctgtggcttt

SEQ ID NO: 4724731 - DNA, 25 bp, Homo sapien
gcagggtgcccaattttagcgtttc

SEQ ID NO: 4724732 - DNA, 25 bp, Homo sapien
ccaattttagcgtttcctgaagaca

SEQ ID NO: 4724733 - DNA, 25 bp, Homo sapien
ctatcagcagtcctgacacaagcct

SEQ ID NO: 4724734 - DNA, 25 bp, Homo sapien
tcagcagtcctgacacaagcctctg

SEQ ID NO: 4724735 - DNA, 25 bp, Homo sapien
cagtcctgacacaagcctctgagaa

SEQ ID NO: 4724736 - DNA, 25 bp, Homo sapien
ggaagaggacgctgtgatagttatt

SEQ ID NO: 4724737 - DNA, 25 bp, Homo sapien
acaccttgatttgacatccaacaca

SEQ ID NO: 4724738 - DNA, 25 bp, Homo sapien
caccttgatttgacatccaacacag

SEQ ID NO: 4724739 - DNA, 25 bp, Homo sapien
aacaccttgatttgacatccaacac

SEQ ID NO: 4724740 - DNA, 25 bp, Homo sapien
gccgcccagtgtagcaagcaaacaa

SEQ ID NO: 4724741 - DNA, 25 bp, Homo sapien
gagcttgatataaagtatgggaagc

SEQ ID NO: 4724742 - DNA, 25 bp, Homo sapien
agcaggccgcccagtgtagcaagca

SEQ ID NO: 4724743 - DNA, 25 bp, Homo sapien
aagaagcacattgggtgtctggagc

SEQ ID NO: 4724744 - DNA, 25 bp, Homo sapien
gaatgagccccatgattatacaaag

SEQ ID NO: 4724745 - DNA, 25 bp, Homo sapien
taagtacaaggaatggcagataagc

SEQ ID NO: 4724746 - DNA, 25 bp, Homo sapien
gcctttgtagtaggaatgcactcag

SEQ ID NO: 4724747 - DNA, 25 bp, Homo sapien
gcagctattgtatatggagtgacca

SEQ ID NO: 4724748 - DNA, 25 bp, Homo sapien
cagaaaaggtgcatcctgattccaa

SEQ ID NO: 4724749 - DNA, 25 bp, Homo sapien
ggtcacaacttgacttcattggaga

SEQ ID NO: 4724750 - DNA, 25 bp, Homo sapien
acagaaaaggtgcatcctgattcca

SEQ ID NO: 4724751 - DNA, 25 bp, Homo sapien
gtcacaacttgacttcattggagac

SEQ ID NO: 4724752 - DNA, 25 bp, Homo sapien
cacttctccgtaggtaaaatgccat

SEQ ID NO: 4724753 - DNA, 25 bp, Homo sapien
tctccgtaggtaaaatgccatatct

SEQ ID NO: 4724754 - DNA, 25 bp, Homo sapien
atgaccacttctccgtaggtaaaat

SEQ ID NO: 4724755 - DNA, 25 bp, Homo sapien
gaccacttctccgtaggtaaaatgc

SEQ ID NO: 4724756 - DNA, 25 bp, Homo sapien
tgtgtgcaacaaatggtatagcagg

SEQ ID NO: 4724757 - DNA, 25 bp, Homo sapien
tcaaattcaaatcctgatatgactt

SEQ ID NO: 4724758 - DNA, 25 bp, Homo sapien
gagattgtagaagttgtgtgcaaca

SEQ ID NO: 4724759 - DNA, 25 bp, Homo sapien
agtccatagagattgtagaagttgt

SEQ ID NO: 4724760 - DNA, 25 bp, Homo sapien
cttgtggaagaatgtgggcaaaaga

SEQ ID NO: 4724761 - DNA, 25 bp, Homo sapien
gaagaatgtgggcaaaagaataaaa

SEQ ID NO: 4724762 - DNA, 25 bp, Homo sapien
tgtggaagaatgtgggcaaaagaat

SEQ ID NO: 4724763 - DNA, 25 bp, Homo sapien
tggaagaatgtgggcaaaagaataa

SEQ ID NO: 4724764 - DNA, 25 bp, Homo sapien
ggggctcattggacttcctcacaac

SEQ ID NO: 4724765 - DNA, 25 bp, Homo sapien
aagtgacataacagcacttctgcca

SEQ ID NO: 4724766 - DNA, 25 bp, Homo sapien
gagaggggacgtagactccaccact

SEQ ID NO: 4724767 - DNA, 25 bp, Homo sapien
tccaggagaggggacgtagactcca

SEQ ID NO: 4724768 - DNA, 25 bp, Homo sapien
gcgttttacgctggggagatctgcc

SEQ ID NO: 4724769 - DNA, 25 bp, Homo sapien
gaactgatatacagtgtcttcactt

SEQ ID NO: 4724770 - DNA, 25 bp, Homo sapien
gccatttccatagaactgatataca

SEQ ID NO: 4724771 - DNA, 25 bp, Homo sapien
gggagatctgccatttccatagaac

SEQ ID NO: 4724772 - DNA, 25 bp, Homo sapien
cacggcatctctgccatactaaatg

SEQ ID NO: 4724773 - DNA, 25 bp, Homo sapien
aaatgtggccctacatcttgatcca

SEQ ID NO: 4724774 - DNA, 25 bp, Homo sapien
ccacggcatctctgccatactaaat

SEQ ID NO: 4724775 - DNA, 25 bp, Homo sapien
tgccatactaaatgtggccctacat

SEQ ID NO: 4724776 - DNA, 25 bp, Homo sapien
taatgtgaaggtttgatagacagcc

SEQ ID NO: 4724777 - DNA, 25 bp, Homo sapien
aatgtactgatcatgcacttatggg

SEQ ID NO: 4724778 - DNA, 25 bp, Homo sapien
catagacctgcctagcatcttacaa

SEQ ID NO: 4724779 - DNA, 25 bp, Homo sapien
tagacagccatacttttatcactgg

SEQ ID NO: 4724780 - DNA, 25 bp, Homo sapien
ctttttcactggtccagttgcacca

SEQ ID NO: 4724781 - DNA, 25 bp, Homo sapien
tgttctttttcactggtccagttgc

SEQ ID NO: 4724782 - DNA, 25 bp, Homo sapien
cattttcttaccctgaagctgtact

SEQ ID NO: 4724783 - DNA, 25 bp, Homo sapien
ttcattttcttaccctgaagctgta

SEQ ID NO: 4724784 - DNA, 25 bp, Homo sapien
cacttctttgttaattgtagattac

SEQ ID NO: 4724785 - DNA, 25 bp, Homo sapien
tcacttctttgttaattgtagatta

SEQ ID NO: 4724786 - DNA, 25 bp, Homo sapien
aacgtctatccattttagttcaccg

SEQ ID NO: 4724787 - DNA, 25 bp, Homo sapien
gcacctctgacaacgtctatccatt

SEQ ID NO: 4724788 - DNA, 25 bp, Homo sapien
ctcttttgcacctctgacaacgtct

SEQ ID NO: 4724789 - DNA, 25 bp, Homo sapien
cgtctatccattttagttcaccgtg

SEQ ID NO: 4724790 - DNA, 25 bp, Homo sapien
aaaaatttcagcaagcatccagtct

SEQ ID NO: 4724791 - DNA, 25 bp, Homo sapien
tcagcaagcatccagtctttttttt

SEQ ID NO: 4724792 - DNA, 25 bp, Homo sapien
ctaagtcacccaaaaatttcagcaa

SEQ ID NO: 4724793 - DNA, 25 bp, Homo sapien
ccaaaaatttcagcaagcatccagt

SEQ ID NO: 4724794 - DNA, 25 bp, Homo sapien
atgtcctcagtgcttccacaattac

SEQ ID NO: 4724795 - DNA, 25 bp, Homo sapien
ttggatgtcctcagtgcttccacaa

SEQ ID NO: 4724796 - DNA, 25 bp, Homo sapien
taaaaatttgtcccacagcaaattg

SEQ ID NO: 4724797 - DNA, 25 bp, Homo sapien
ggatgtcctcagtgcttccacaatt

SEQ ID NO: 4724798 - DNA, 25 bp, Homo sapien
gcaagcaaggcttttggtgggtaca

SEQ ID NO: 4724799 - DNA, 25 bp, Homo sapien
caggccatccgggtaaacttcagag

SEQ ID NO: 4724800 - DNA, 25 bp, Homo sapien
tttgagaattccttgtaacataagc

SEQ ID NO: 4724801 - DNA, 25 bp, Homo sapien
caggttgagagacgtggaggtggct

SEQ ID NO: 4724802 - DNA, 25 bp, Homo sapien
caaagaagctgaaccggaagccgat

SEQ ID NO: 4724803 - DNA, 25 bp, Homo sapien
cttccaaagaagctgaaccggaagc

SEQ ID NO: 4724804 - DNA, 25 bp, Homo sapien
gctgaaccggaagccgatatgctta

SEQ ID NO: 4724805 - DNA, 25 bp, Homo sapien
gaagctgaaccggaagccgatatgc

SEQ ID NO: 4724806 - DNA, 25 bp, Homo sapien
taggtccctcttccttgacgtatag

SEQ ID NO: 4724807 - DNA, 25 bp, Homo sapien
ttttcagcggtagtatatgacccca

SEQ ID NO: 4724808 - DNA, 25 bp, Homo sapien
cattatacacaccaactgtgtgggc

SEQ ID NO: 4724809 - DNA, 25 bp, Homo sapien
ccacagtgatttggcaaaagcagaa

SEQ ID NO: 4724810 - DNA, 25 bp, Homo sapien
tgagaacatagccataaagcaggtt

SEQ ID NO: 4724811 - DNA, 25 bp, Homo sapien
aagatgagacaaggatgatttagtg

SEQ ID NO: 4724812 - DNA, 25 bp, Homo sapien
tcgcaacgccttgagaacatagcca

SEQ ID NO: 4724813 - DNA, 25 bp, Homo sapien
gatgatttagtgaagagtcgcaacg

SEQ ID NO: 4724814 - DNA, 25 bp, Homo sapien
tgcttaggtagacaaagcagccggg

SEQ ID NO: 4724815 - DNA, 25 bp, Homo sapien
cttgcttaggtagacaaagcagccg

SEQ ID NO: 4724816 - DNA, 25 bp, Homo sapien
actgcgcttttctgaccggcttaag

SEQ ID NO: 4724817 - DNA, 25 bp, Homo sapien
agcgggtgcgcgcaccgtgctcgag

SEQ ID NO: 4724818 - DNA, 25 bp, Homo sapien
cttctggaaacaccggcagctgctg

SEQ ID NO: 4724819 - DNA, 25 bp, Homo sapien
tgcagcctttgagctttcgcccagg

SEQ ID NO: 4724820 - DNA, 25 bp, Homo sapien
cagctgctgaggtgctgatagtgca

SEQ ID NO: 4724821 - DNA, 25 bp, Homo sapien
cacgatgactacctcaaagtttagg

SEQ ID NO: 4724822 - DNA, 25 bp, Homo sapien
tttccgacatattcgctcaataagc

SEQ ID NO: 4724823 - DNA, 25 bp, Homo sapien
cagtgtgcctgcttactgaattttc

SEQ ID NO: 4724824 - DNA, 25 bp, Homo sapien
ttagcttttccgacatattcgctca

SEQ ID NO: 4724825 - DNA, 25 bp, Homo sapien
tattcgctcaataagctcttctgca

SEQ ID NO: 4724826 - DNA, 25 bp, Homo sapien
ctgcccacacaacagaatgtcctcc

SEQ ID NO: 4724827 - DNA, 25 bp, Homo sapien
tgcccacacaacagaatgtcctcct

SEQ ID NO: 4724828 - DNA, 25 bp, Homo sapien
gcccacacaacagaatgtcctcctc

SEQ ID NO: 4724829 - DNA, 25 bp, Homo sapien
tctttaagaacatctgtgctcgatt

SEQ ID NO: 4724830 - DNA, 25 bp, Homo sapien
cttgatatttctacaagcagtcctt

SEQ ID NO: 4724831 - DNA, 25 bp, Homo sapien
tcacttgatatttctacaagcagtc

SEQ ID NO: 4724832 - DNA, 25 bp, Homo sapien
cagactttccagtctttaagaacat

SEQ ID NO: 4724833 - DNA, 25 bp, Homo sapien
acatggaggatcatccgaaagacac

SEQ ID NO: 4724834 - DNA, 25 bp, Homo sapien
tccaggtcagccctaacacatggag

SEQ ID NO: 4724835 - DNA, 25 bp, Homo sapien
taacacatggaggatcatccgaaag

SEQ ID NO: 4724836 - DNA, 25 bp, Homo sapien
tcagccctaacacatggaggatcat

SEQ ID NO: 4724837 - DNA, 25 bp, Homo sapien
taggttatcctctgcacagcagtcc

SEQ ID NO: 4724838 - DNA, 25 bp, Homo sapien
tggataggctctatggaatgttcaa

SEQ ID NO: 4724839 - DNA, 25 bp, Homo sapien
ctgatggatatctcatcttcatgga

SEQ ID NO: 4724840 - DNA, 25 bp, Homo sapien
ctaggttatcctctgcacagcagtc

SEQ ID NO: 4724841 - DNA, 25 bp, Homo sapien
gcagccacataggtcccaactcttt

SEQ ID NO: 4724842 - DNA, 25 bp, Homo sapien
caactgataacctgatatgtgctta

SEQ ID NO: 4724843 - DNA, 25 bp, Homo sapien
aaagcagccacataggtcccaactc

SEQ ID NO: 4724844 - DNA, 25 bp, Homo sapien
gatatgtgcttaaaccaggtcatca

SEQ ID NO: 4724845 - DNA, 25 bp, Homo sapien
cactgttgcactgtgcgtgcacaga

SEQ ID NO: 4724846 - DNA, 25 bp, Homo sapien
tcactgttgcactgtgcgtgcacag

SEQ ID NO: 4724847 - DNA, 25 bp, Homo sapien
tgttttaatgtgggtgtaagctatt

SEQ ID NO: 4724848 - DNA, 25 bp, Homo sapien
tcttttcaccactcgaaactcagtt

SEQ ID NO: 4724849 - DNA, 25 bp, Homo sapien
ttcctgcatgttggacaatacacag

SEQ ID NO: 4724850 - DNA, 25 bp, Homo sapien
gtaacttagtggatttgccaaaagc

SEQ ID NO: 4724851 - DNA, 25 bp, Homo sapien
tttcttgctttcaactcctgtccag

SEQ ID NO: 4724852 - DNA, 25 bp, Homo sapien
gatcatgatttcaggtggcactgac

SEQ ID NO: 4724853 - DNA, 25 bp, Homo sapien
tcagtatacttaaaggcaagcaggg

SEQ ID NO: 4724854 - DNA, 25 bp, Homo sapien
taaagcactgggtgcgatgacccaa

SEQ ID NO: 4724855 - DNA, 25 bp, Homo sapien
cataattaggtatgcctgccatctg

SEQ ID NO: 4724856 - DNA, 25 bp, Homo sapien
ctatgttcctctatggttagcagca

SEQ ID NO: 4724857 - DNA, 25 bp, Homo sapien
tacagttttgaagacccggctgaac

SEQ ID NO: 4724858 - DNA, 25 bp, Homo sapien
ggagtttcacgctctaaaatgggaa

SEQ ID NO: 4724859 - DNA, 25 bp, Homo sapien
cataaaaattgtcaggaccagtgca

SEQ ID NO: 4724860 - DNA, 25 bp, Homo sapien
tagactctgcccattgacagcaatg

SEQ ID NO: 4724861 - DNA, 25 bp, Homo sapien
tccgtttaaggatggcaacagcttc

SEQ ID NO: 4724862 - DNA, 25 bp, Homo sapien
tgatcgccccttttcagacgtccgt

SEQ ID NO: 4724863 - DNA, 25 bp, Homo sapien
gagaaccatcaaagtgacagtgcct

SEQ ID NO: 4724864 - DNA, 25 bp, Homo sapien
gcaaattataaagtagacttgttta

SEQ ID NO: 4724865 - DNA, 25 bp, Homo sapien
tgcaaattataaagtagacttgttt

SEQ ID NO: 4724866 - DNA, 25 bp, Homo sapien
taaatgggtaagtctccatgagggc

SEQ ID NO: 4724867 - DNA, 25 bp, Homo sapien
tctggtcctcgctctagtgtaatag

SEQ ID NO: 4724868 - DNA, 25 bp, Homo sapien
catgagggctgccatatcctccaac

SEQ ID NO: 4724869 - DNA, 25 bp, Homo sapien
ctatactgaagcctaagccatctgg

SEQ ID NO: 4724870 - DNA, 25 bp, Homo sapien
tgatgacctgtgaccacactcacgt

SEQ ID NO: 4724871 - DNA, 25 bp, Homo sapien
tgcttgacgtcagcccagtgaaaga

SEQ ID NO: 4724872 - DNA, 25 bp, Homo sapien
tgaaatatactgcttgacgtcagcc

SEQ ID NO: 4724873 - DNA, 25 bp, Homo sapien
ttgcaggctcctgctgatgacctgt

SEQ ID NO: 4724874 - DNA, 25 bp, Homo sapien
taactgcttgggtgtgagtcatgcc

SEQ ID NO: 4724875 - DNA, 25 bp, Homo sapien
agtcatgccctcagtggatgtgcca

SEQ ID NO: 4724876 - DNA, 25 bp, Homo sapien
cacagatggtgacaatcctatcccc

SEQ ID NO: 4724877 - DNA, 25 bp, Homo sapien
catgccctcagtggatgtgccacag

SEQ ID NO: 4724878 - DNA, 25 bp, Homo sapien
acaatcaggttttaagtgtcagcca

SEQ ID NO: 4724879 - DNA, 25 bp, Homo sapien
gactctaagtcggaggttggcaaac

SEQ ID NO: 4724880 - DNA, 25 bp, Homo sapien
gagctgggcagttggcataaattcc

SEQ ID NO: 4724881 - DNA, 25 bp, Homo sapien
tttggatatcaaacgaggctgaacc

SEQ ID NO: 4724882 - DNA, 25 bp, Homo sapien
taaaactgccttgcaacaggtagcc

SEQ ID NO: 4724883 - DNA, 25 bp, Homo sapien
ttctagggttgatagtacgactcac

SEQ ID NO: 4724884 - DNA, 25 bp, Homo sapien
caagcaagccttgctgtggttggat

SEQ ID NO: 4724885 - DNA, 25 bp, Homo sapien
caggtagccaggttcaaaggtttat

SEQ ID NO: 4724886 - DNA, 25 bp, Homo sapien
gcacatcaccaagtgggctgcctac

SEQ ID NO: 4724887 - DNA, 25 bp, Homo sapien
tgggctgcctactcctccagcaatg

SEQ ID NO: 4724888 - DNA, 25 bp, Homo sapien
ttgggtctgtgctgcaactccagtt

SEQ ID NO: 4724889 - DNA, 25 bp, Homo sapien
ccagttgggtgcatcattgcaataa

SEQ ID NO: 4724890 - DNA, 25 bp, Homo sapien
ctttttcatttcgactgttcttaat

SEQ ID NO: 4724891 - DNA, 25 bp, Homo sapien
atttcgactgttcttaatccctgta

SEQ ID NO: 4724892 - DNA, 25 bp, Homo sapien
cgactgttcttaatccctgtatttc

SEQ ID NO: 4724893 - DNA, 25 bp, Homo sapien
tcttaatccctgtatttcagatgcc

SEQ ID NO: 4724894 - DNA, 25 bp, Homo sapien
gcattcttctttgagctactttcca

SEQ ID NO: 4724895 - DNA, 25 bp, Homo sapien
tctttgagctactttccagtgactc

SEQ ID NO: 4724896 - DNA, 25 bp, Homo sapien
cttctttgagctactttccagtgac

SEQ ID NO: 4724897 - DNA, 25 bp, Homo sapien
ttgagctactttccagtgactcaga

SEQ ID NO: 4724898 - DNA, 25 bp, Homo sapien
ggaaaagtgaaagatgacaggctgc

SEQ ID NO: 4724899 - DNA, 25 bp, Homo sapien
agagagtggaaaagtgaaagatgac

SEQ ID NO: 4724900 - DNA, 25 bp, Homo sapien
cagagagtggaaaagtgaaagatga

SEQ ID NO: 4724901 - DNA, 25 bp, Homo sapien
agtggaaaagtgaaagatgacaggc

SEQ ID NO: 4724902 - DNA, 25 bp, Homo sapien
agtcagggccatctatgtgtcctct

SEQ ID NO: 4724903 - DNA, 25 bp, Homo sapien
tgccgattgcatcgccctgatgaac

SEQ ID NO: 4724904 - DNA, 25 bp, Homo sapien
tgtcctcttggcatgccgattgcat

SEQ ID NO: 4724905 - DNA, 25 bp, Homo sapien
tcttggcatgccgattgcatcgccc

SEQ ID NO: 4724906 - DNA, 25 bp, Homo sapien
ttgagatggcctcctctctgaatgg

SEQ ID NO: 4724907 - DNA, 25 bp, Homo sapien
ctggctgctttgagatggcctcctc

SEQ ID NO: 4724908 - DNA, 25 bp, Homo sapien
gctgctttgagatggcctcctctct

SEQ ID NO: 4724909 - DNA, 25 bp, Homo sapien
tgagatggcctcctctctgaatgga

SEQ ID NO: 4724910 - DNA, 25 bp, Homo sapien
tcttccaacttccaaggttactgtg

SEQ ID NO: 4724911 - DNA, 25 bp, Homo sapien
tcagtcttccatcggcatctgcaat

SEQ ID NO: 4724912 - DNA, 25 bp, Homo sapien
gtggcattacgaacgtcttccccat

SEQ ID NO: 4724913 - DNA, 25 bp, Homo sapien
agcggcaaccgcttcttgggtggca

SEQ ID NO: 4724914 - DNA, 25 bp, Homo sapien
gcaattcctcctttgacaatgtctg

SEQ ID NO: 4724915 - DNA, 25 bp, Homo sapien
ctacacacaattttgaatttcaaca

SEQ ID NO: 4724916 - DNA, 25 bp, Homo sapien
tacacacaattttgaatttcaacat

SEQ ID NO: 4724917 - DNA, 25 bp, Homo sapien
gacggtctttgtatggtcttcccaa

SEQ ID NO: 4724918 - DNA, 25 bp, Homo sapien
cattttatgggtcactcggctacta

SEQ ID NO: 4724919 - DNA, 25 bp, Homo sapien
acttaagagtcagtccttggatgca

SEQ ID NO: 4724920 - DNA, 25 bp, Homo sapien
cttccacacgagataggtttatgca

SEQ ID NO: 4724921 - DNA, 25 bp, Homo sapien
taacgtatttcctagcacatagcag

SEQ ID NO: 4724922 - DNA, 25 bp, Homo sapien
gatggcacgctcttattcgctctga

SEQ ID NO: 4724923 - DNA, 25 bp, Homo sapien
tatttaattcgacgttcaccagacg

SEQ ID NO: 4724924 - DNA, 25 bp, Homo sapien
gctttaggccctgttgatggcacgc

SEQ ID NO: 4724925 - DNA, 25 bp, Homo sapien
ttaccaacaatacttaatcctaggc

SEQ ID NO: 4724926 - DNA, 25 bp, Homo sapien
ctgtctcaggacattgattgcttca

SEQ ID NO: 4724927 - DNA, 25 bp, Homo sapien
cagctcaatagtgagggtgtcacac

SEQ ID NO: 4724928 - DNA, 25 bp, Homo sapien
catctctgtagagtgtcaggcgcac

SEQ ID NO: 4724929 - DNA, 25 bp, Homo sapien
tgggacactgactgtaaggaacatg

SEQ ID NO: 4724930 - DNA, 25 bp, Homo sapien
aggagccttttctctgttaattttg

SEQ ID NO: 4724931 - DNA, 25 bp, Homo sapien
catgagaagtaaaggagagttaggt

SEQ ID NO: 4724932 - DNA, 25 bp, Homo sapien
gagccttttctctgttaattttgaa

SEQ ID NO: 4724933 - DNA, 25 bp, Homo sapien
taaacttcatggataataatggcac

SEQ ID NO: 4724934 - DNA, 25 bp, Homo sapien
cataaacttcatggataataatggc

SEQ ID NO: 4724935 - DNA, 25 bp, Homo sapien
cttcataaacttcatggataataat

SEQ ID NO: 4724936 - DNA, 25 bp, Homo sapien
aaacttcatggataataatggcacc

SEQ ID NO: 4724937 - DNA, 25 bp, Homo sapien
agggttataaactctggctctacag

SEQ ID NO: 4724938 - DNA, 25 bp, Homo sapien
ctacagtacaagctccatataattc

SEQ ID NO: 4724939 - DNA, 25 bp, Homo sapien
gaaatggagtccaaacacattatac

SEQ ID NO: 4724940 - DNA, 25 bp, Homo sapien
tgatagacagcaataagggttataa

SEQ ID NO: 4724941 - DNA, 25 bp, Homo sapien
tattggcttactcaaaggaaacctc

SEQ ID NO: 4724942 - DNA, 25 bp, Homo sapien
tactagaactgatagaaatctcccc

SEQ ID NO: 4724943 - DNA, 25 bp, Homo sapien
tgaaggacggcctgtacagaagcac

SEQ ID NO: 4724944 - DNA, 25 bp, Homo sapien
tccccataatcgtctctgaggcctg

SEQ ID NO: 4724945 - DNA, 25 bp, Homo sapien
caggatcagaagcaaaaattgctgg

SEQ ID NO: 4724946 - DNA, 25 bp, Homo sapien
tgtctgaacccccaacgatgctcag

SEQ ID NO: 4724947 - DNA, 25 bp, Homo sapien
aaatctcgatggttgtttcgcagcc

SEQ ID NO: 4724948 - DNA, 25 bp, Homo sapien
gccctgttcgccctttggaaatctc

SEQ ID NO: 4724949 - DNA, 25 bp, Homo sapien
aaactcatcacacagattgactctg

SEQ ID NO: 4724950 - DNA, 25 bp, Homo sapien
tcagggaataccacaaaacatatca

SEQ ID NO: 4724951 - DNA, 25 bp, Homo sapien
caaatcctggtgcatatatgttcag

SEQ ID NO: 4724952 - DNA, 25 bp, Homo sapien
taactgagatatgtggcaaagacct

SEQ ID NO: 4724953 - DNA, 25 bp, Homo sapien
tagacaacactatttagggatcaac

SEQ ID NO: 4724954 - DNA, 25 bp, Homo sapien
catgttttgggaaagctaggacact

SEQ ID NO: 4724955 - DNA, 25 bp, Homo sapien
gacacttggtatagtagcgtatgct

SEQ ID NO: 4724956 - DNA, 25 bp, Homo sapien
tacgatacaacaaagagcatacagc

SEQ ID NO: 4724957 - DNA, 25 bp, Homo sapien
ccagactgtgggaccatcagagact

SEQ ID NO: 4724958 - DNA, 25 bp, Homo sapien
atcagagactgggagctgttctttt

SEQ ID NO: 4724959 - DNA, 25 bp, Homo sapien
gaatctggattctcagcatggatgg

SEQ ID NO: 4724960 - DNA, 25 bp, Homo sapien
actccggttctggggagccagactg

SEQ ID NO: 4724961 - DNA, 25 bp, Homo sapien
ctttgctgtcttcagaaggctaata

SEQ ID NO: 4724962 - DNA, 25 bp, Homo sapien
tttgctgtcttcagaaggctaataa

SEQ ID NO: 4724963 - DNA, 25 bp, Homo sapien
ttgctgtcttcagaaggctaataaa

SEQ ID NO: 4724964 - DNA, 25 bp, Homo sapien
atagggtaaccaacaacaatttcat

SEQ ID NO: 4724965 - DNA, 25 bp, Homo sapien
gatctccgactttgagtcgtccatc

SEQ ID NO: 4724966 - DNA, 25 bp, Homo sapien
ttcatcatctacagccagtatctga

SEQ ID NO: 4724967 - DNA, 25 bp, Homo sapien
tacagccagtatctgatctccgact

SEQ ID NO: 4724968 - DNA, 25 bp, Homo sapien
tggctgctaccccatgctctgttaa

SEQ ID NO: 4724969 - DNA, 25 bp, Homo sapien
gactccactgagtgtatcttcttcg

SEQ ID NO: 4724970 - DNA, 25 bp, Homo sapien
ttcgctgatagcaatacccaaaccc

SEQ ID NO: 4724971 - DNA, 25 bp, Homo sapien
taagctctttatgatgactccactg

SEQ ID NO: 4724972 - DNA, 25 bp, Homo sapien
cttgggaagctccagatgttgcaca

SEQ ID NO: 4724973 - DNA, 25 bp, Homo sapien
ggtccacagctgcatcagaagtagt

SEQ ID NO: 4724974 - DNA, 25 bp, Homo sapien
cagaagtagtaacagttggctctgt

SEQ ID NO: 4724975 - DNA, 25 bp, Homo sapien
gctgcatcagaagtagtaacagttg

SEQ ID NO: 4724976 - DNA, 25 bp, Homo sapien
aggacatacggccatctgattcact

SEQ ID NO: 4724977 - DNA, 25 bp, Homo sapien
catttccaggacatacggccatctg

SEQ ID NO: 4724978 - DNA, 25 bp, Homo sapien
ttagaaggcaaaggttctactgcat

SEQ ID NO: 4724979 - DNA, 25 bp, Homo sapien
tctgagttagaaggcaaaggttcta

SEQ ID NO: 4724980 - DNA, 25 bp, Homo sapien
gcacatttaatgattgatgaggcat

SEQ ID NO: 4724981 - DNA, 25 bp, Homo sapien
tcacttctcccattagtgattcaag

SEQ ID NO: 4724982 - DNA, 25 bp, Homo sapien
ctggggaatgactggtcacttggct

SEQ ID NO: 4724983 - DNA, 25 bp, Homo sapien
gattcaagttccagaatgtccagtg

SEQ ID NO: 4724984 - DNA, 25 bp, Homo sapien
ttccagaatgtccagtgggtcagcc

SEQ ID NO: 4724985 - DNA, 25 bp, Homo sapien
ggatcggtctttgttcccagcaaga

SEQ ID NO: 4724986 - DNA, 25 bp, Homo sapien
tagggttccataacgctctctgata

SEQ ID NO: 4724987 - DNA, 25 bp, Homo sapien
tatgcagctcgcctgttagggttcc

SEQ ID NO: 4724988 - DNA, 25 bp, Homo sapien
gatcaatccccactatgaagacact

SEQ ID NO: 4724989 - DNA, 25 bp, Homo sapien
ttaaatgcatcacaaaaacacaact

SEQ ID NO: 4724990 - DNA, 25 bp, Homo sapien
tcttacaattaaatgcatcacaaaa

SEQ ID NO: 4724991 - DNA, 25 bp, Homo sapien
aatgcatcacaaaaacacaacttac

SEQ ID NO: 4724992 - DNA, 25 bp, Homo sapien
ctcttacaattaaatgcatcacaaa

SEQ ID NO: 4724993 - DNA, 25 bp, Homo sapien
tcttgtgagattttgcttgcagatg

SEQ ID NO: 4724994 - DNA, 25 bp, Homo sapien
tgatcactacccatttcggcaaagg

SEQ ID NO: 4724995 - DNA, 25 bp, Homo sapien
tgtgtgtgatcactacccatttcgg

SEQ ID NO: 4724996 - DNA, 25 bp, Homo sapien
agatgactgtgtgtgatcactaccc

SEQ ID NO: 4724997 - DNA, 25 bp, Homo sapien
ggctctgactctgactgactgggtg

SEQ ID NO: 4724998 - DNA, 25 bp, Homo sapien
tgcacaatggagccttctctggctc

SEQ ID NO: 4724999 - DNA, 25 bp, Homo sapien
ctgcacaatggagccttctctggct

SEQ ID NO: 4725000 - DNA, 25 bp, Homo sapien
tggctctgactctgactgactgggt

SEQ ID NO: 4725001 - DNA, 25 bp, Homo sapien
gcaaatgggttagtgctgctgaagt

SEQ ID NO: 4725002 - DNA, 25 bp, Homo sapien
taaaggttgtgcagcaaggaaggca

SEQ ID NO: 4725003 - DNA, 25 bp, Homo sapien
cgttgatttgtagagagtcagcaaa

SEQ ID NO: 4725004 - DNA, 25 bp, Homo sapien
tacttagggtaaaggttgtgcagca

SEQ ID NO: 4725005 - DNA, 25 bp, Homo sapien
aatctgctcttcttgcaatgttttt

SEQ ID NO: 4725006 - DNA, 25 bp, Homo sapien
tttcaatctgctcttcttgcaatgt

SEQ ID NO: 4725007 - DNA, 25 bp, Homo sapien
tcaatctgctcttcttgcaatgttt

SEQ ID NO: 4725008 - DNA, 25 bp, Homo sapien
cctttcaatctgctcttcttgcaat

SEQ ID NO: 4725009 - DNA, 25 bp, Homo sapien
tgactgatggcaaaacgggttggta

SEQ ID NO: 4725010 - DNA, 25 bp, Homo sapien
ctgatggcaaaacgggttggtaggt

SEQ ID NO: 4725011 - DNA, 25 bp, Homo sapien
actgatggcaaaacgggttggtagg

SEQ ID NO: 4725012 - DNA, 25 bp, Homo sapien
gactgatggcaaaacgggttggtag

SEQ ID NO: 4725013 - DNA, 25 bp, Homo sapien
ggtctgtttataatgctctgtacca

SEQ ID NO: 4725014 - DNA, 25 bp, Homo sapien
tggcttccacagcttgttcatggct

SEQ ID NO: 4725015 - DNA, 25 bp, Homo sapien
gcatctctgaggtccattccatcca

SEQ ID NO: 4725016 - DNA, 25 bp, Homo sapien
agggttgcctgctttccgaatggct

SEQ ID NO: 4725017 - DNA, 25 bp, Homo sapien
tcacttctccattgcttagccgact

SEQ ID NO: 4725018 - DNA, 25 bp, Homo sapien
tctatctccaggtttcaaggttcca

SEQ ID NO: 4725019 - DNA, 25 bp, Homo sapien
ggactatcttccagaacatgtttga

SEQ ID NO: 4725020 - DNA, 25 bp, Homo sapien
caccaacaatgctgatgcctaagga

SEQ ID NO: 4725021 - DNA, 25 bp, Homo sapien
cgcctgggctgattccaattgctat

SEQ ID NO: 4725022 - DNA, 25 bp, Homo sapien
tcttctcgctctggtaattctggaa

SEQ ID NO: 4725023 - DNA, 25 bp, Homo sapien
tctccctcttctcgctctggtaatt

SEQ ID NO: 4725024 - DNA, 25 bp, Homo sapien
gattccaattgctatatgctgtgtt

SEQ ID NO: 4725025 - DNA, 25 bp, Homo sapien
gaattacacaatgagtaccccaaaa

SEQ ID NO: 4725026 - DNA, 25 bp, Homo sapien
attacacaatgagtaccccaaaatc

SEQ ID NO: 4725027 - DNA, 25 bp, Homo sapien
aagaattacacaatgagtaccccaa

SEQ ID NO: 4725028 - DNA, 25 bp, Homo sapien
agaattacacaatgagtaccccaaa

SEQ ID NO: 4725029 - DNA, 25 bp, Homo sapien
gttgtcccaagcttattttgaactc

SEQ ID NO: 4725030 - DNA, 25 bp, Homo sapien
attgttgtcccaagcttattttgaa

SEQ ID NO: 4725031 - DNA, 25 bp, Homo sapien
atatccagtgccattactcttccag

SEQ ID NO: 4725032 - DNA, 25 bp, Homo sapien
cagtgccattactcttccagattgt

SEQ ID NO: 4725033 - DNA, 25 bp, Homo sapien
ggggctcgatcgtcagcaggtgctg

SEQ ID NO: 4725034 - DNA, 25 bp, Homo sapien
gggctcgatcgtcagcaggtgctgc

SEQ ID NO: 4725035 - DNA, 25 bp, Homo sapien
acataaaagggggctcgatcgtcag

SEQ ID NO: 4725036 - DNA, 25 bp, Homo sapien
taaaagggggctcgatcgtcagcag

SEQ ID NO: 4725037 - DNA, 25 bp, Homo sapien
ggcacctccatgaataatgcttcga

SEQ ID NO: 4725038 - DNA, 25 bp, Homo sapien
gacaagatgcagtccccaatggcaa

SEQ ID NO: 4725039 - DNA, 25 bp, Homo sapien
tcagggccaatgagagaatgtcttc

SEQ ID NO: 4725040 - DNA, 25 bp, Homo sapien
ttctcaacatagctcgtgcctgggc

SEQ ID NO: 4725041 - DNA, 25 bp, Homo sapien
tagaattgccttttgctatattaat

SEQ ID NO: 4725042 - DNA, 25 bp, Homo sapien
gacacactcagcattacaggccagg

SEQ ID NO: 4725043 - DNA, 25 bp, Homo sapien
acacactcagcattacaggccaggg

SEQ ID NO: 4725044 - DNA, 25 bp, Homo sapien
ctttccagctgaatcgggtagcaca

SEQ ID NO: 4725045 - DNA, 25 bp, Homo sapien
cagaaggaagttctgcacttgatat

SEQ ID NO: 4725046 - DNA, 25 bp, Homo sapien
tgaatcgggtagcacagaaggaagt

SEQ ID NO: 4725047 - DNA, 25 bp, Homo sapien
aaggaagttctgcacttgatataac

SEQ ID NO: 4725048 - DNA, 25 bp, Homo sapien
caatagcatttgcaggtgtgtagtc

SEQ ID NO: 4725049 - DNA, 25 bp, Homo sapien
ccgaaggtgtattctcatcctgtct

SEQ ID NO: 4725050 - DNA, 25 bp, Homo sapien
aagcaggccccatacttatgtccac

SEQ ID NO: 4725051 - DNA, 25 bp, Homo sapien
gagattctgggtatatagttcctcc

SEQ ID NO: 4725052 - DNA, 25 bp, Homo sapien
ctggatcacaagaattttcaataac

SEQ ID NO: 4725053 - DNA, 25 bp, Homo sapien
aagggaagaaccatagttcaggcca

SEQ ID NO: 4725054 - DNA, 25 bp, Homo sapien
catcaccacaagaactgccatgaag

SEQ ID NO: 4725055 - DNA, 25 bp, Homo sapien
cattttcaggagagtatggagactc

SEQ ID NO: 4725056 - DNA, 25 bp, Homo sapien
tactaagtcagcatcatttgtgccc

SEQ ID NO: 4725057 - DNA, 25 bp, Homo sapien
ctgaagaggggtttgtcagccagcc

SEQ ID NO: 4725058 - DNA, 25 bp, Homo sapien
cacaggagtgtggtgggtagagaaa

SEQ ID NO: 4725059 - DNA, 25 bp, Homo sapien
agaggggtttgtcagccagccctgc

SEQ ID NO: 4725060 - DNA, 25 bp, Homo sapien
gcttcctcacaggagtgtggtgggt

SEQ ID NO: 4725061 - DNA, 25 bp, Homo sapien
tccttttcagcaatgccgccaggca

SEQ ID NO: 4725062 - DNA, 25 bp, Homo sapien
tacaaacatgagtcggtcaccagga

SEQ ID NO: 4725063 - DNA, 25 bp, Homo sapien
tgacggtgctcccttcagtgcttct

SEQ ID NO: 4725064 - DNA, 25 bp, Homo sapien
gccaggcaccaaagaacgaattata

SEQ ID NO: 4725065 - DNA, 25 bp, Homo sapien
tgatgacccgatgaactcacctaga

SEQ ID NO: 4725066 - DNA, 25 bp, Homo sapien
tggatcctctgtctctgatgacccg

SEQ ID NO: 4725067 - DNA, 25 bp, Homo sapien
tatgtgctgaatgccagcctcccac

SEQ ID NO: 4725068 - DNA, 25 bp, Homo sapien
cgcatcagtcatcgccagcactgga

SEQ ID NO: 4725069 - DNA, 25 bp, Homo sapien
tgggtggcacagttcgacgacagca

SEQ ID NO: 4725070 - DNA, 25 bp, Homo sapien
ttaagatattcaccacatcttggtg

SEQ ID NO: 4725071 - DNA, 25 bp, Homo sapien
tctgttagctcaatatcacataagt

SEQ ID NO: 4725072 - DNA, 25 bp, Homo sapien
cacaccattgtcacttctataggca

SEQ ID NO: 4725073 - DNA, 25 bp, Homo sapien
tccaatagctcgtctccactgaaga

SEQ ID NO: 4725074 - DNA, 25 bp, Homo sapien
tgtccaacaggaccctctggtagaa

SEQ ID NO: 4725075 - DNA, 25 bp, Homo sapien
gatgtcccactgtcgcttccaggct

SEQ ID NO: 4725076 - DNA, 25 bp, Homo sapien
cactaaacttgctcacatgggccac

SEQ ID NO: 4725077 - DNA, 25 bp, Homo sapien
aaaaggcctgtacatttgattcttc

SEQ ID NO: 4725078 - DNA, 25 bp, Homo sapien
tcttctctggaactctaatgattgc

SEQ ID NO: 4725079 - DNA, 25 bp, Homo sapien
tgattgcctctattattccctcgaa

SEQ ID NO: 4725080 - DNA, 25 bp, Homo sapien
tattccctcgaactgcctgctcaaa

SEQ ID NO: 4725081 - DNA, 25 bp, Homo sapien
tcttctatctcagctgacagtaatg

SEQ ID NO: 4725082 - DNA, 25 bp, Homo sapien
cagagcagcttcttgtttttgtgca

SEQ ID NO: 4725083 - DNA, 25 bp, Homo sapien
aatcctttgccattttgtcagcaga

SEQ ID NO: 4725084 - DNA, 25 bp, Homo sapien
actatttcatagttaattcccataa

SEQ ID NO: 4725085 - DNA, 25 bp, Homo sapien
gattctctgatcagaacccgctgta

SEQ ID NO: 4725086 - DNA, 25 bp, Homo sapien
gcaaactacagaaatctccacatct

SEQ ID NO: 4725087 - DNA, 25 bp, Homo sapien
agtcaaggcaattaagttagcagca

SEQ ID NO: 4725088 - DNA, 25 bp, Homo sapien
cacatcttaacatcctgtaccaagg

SEQ ID NO: 4725089 - DNA, 25 bp, Homo sapien
aggttagttcacttgatggtatccc

SEQ ID NO: 4725090 - DNA, 25 bp, Homo sapien
tggttacctctaagcctgtagctgg

SEQ ID NO: 4725091 - DNA, 25 bp, Homo sapien
tcaggagtccctattacacagaggt

SEQ ID NO: 4725092 - DNA, 25 bp, Homo sapien
tagctggatggtgttgtctttctcc

SEQ ID NO: 4725093 - DNA, 25 bp, Homo sapien
ctcgtcgaagataaaaaatcttcat

SEQ ID NO: 4725094 - DNA, 25 bp, Homo sapien
tgtttctcgtcgaagataaaaaatc

SEQ ID NO: 4725095 - DNA, 25 bp, Homo sapien
ttctcgtcgaagataaaaaatcttc

SEQ ID NO: 4725096 - DNA, 25 bp, Homo sapien
ttggtgtttctcgtcgaagataaaa

SEQ ID NO: 4725097 - DNA, 25 bp, Homo sapien
gattatgctggcattaacaggagac

SEQ ID NO: 4725098 - DNA, 25 bp, Homo sapien
tgcatcttttgtgacgtcttccctt

SEQ ID NO: 4725099 - DNA, 25 bp, Homo sapien
ctttgattatgctggcattaacagg

SEQ ID NO: 4725100 - DNA, 25 bp, Homo sapien
ctggcattaacaggagacaaatctg

SEQ ID NO: 4725101 - DNA, 25 bp, Homo sapien
aaccctgaaggtttgtgccatctac

SEQ ID NO: 4725102 - DNA, 25 bp, Homo sapien
tatgtcgcaatacctctactgcttg

SEQ ID NO: 4725103 - DNA, 25 bp, Homo sapien
gcacagtttgtcctgtatgtcgcaa

SEQ ID NO: 4725104 - DNA, 25 bp, Homo sapien
gagctcggcttcctgcttcattcct

SEQ ID NO: 4725105 - DNA, 25 bp, Homo sapien
gcactagaatcatttgagaggcttc

SEQ ID NO: 4725106 - DNA, 25 bp, Homo sapien
gatcctctcatcgtatcttcccaag

SEQ ID NO: 4725107 - DNA, 25 bp, Homo sapien
gttctagggtaggacacaggcttct

SEQ ID NO: 4725108 - DNA, 25 bp, Homo sapien
ccagtattaacagggatgcactaga

SEQ ID NO: 4725109 - DNA, 25 bp, Homo sapien
cccttgacttcaagtccaaagtcac

SEQ ID NO: 4725110 - DNA, 25 bp, Homo sapien
ccccttgacttcaagtccaaagtca

SEQ ID NO: 4725111 - DNA, 25 bp, Homo sapien
ggcaatgcagcagattgtgtctaat

SEQ ID NO: 4725112 - DNA, 25 bp, Homo sapien
caatgcagcagattgtgtctaatgc

SEQ ID NO: 4725113 - DNA, 25 bp, Homo sapien
aatgcagcagattgtgtctaatgcc

SEQ ID NO: 4725114 - DNA, 25 bp, Homo sapien
gaggcaatgcagcagattgtgtcta

SEQ ID NO: 4725115 - DNA, 25 bp, Homo sapien
tataccacatggcactttgtactgg

SEQ ID NO: 4725116 - DNA, 25 bp, Homo sapien
tggcactttgtactgggaagatact

SEQ ID NO: 4725117 - DNA, 25 bp, Homo sapien
cacatggcactttgtactgggaaga

SEQ ID NO: 4725118 - DNA, 25 bp, Homo sapien
gaattataccacatggcactttgta

SEQ ID NO: 4725119 - DNA, 25 bp, Homo sapien
gcacaacttgatctttagtgtagat

SEQ ID NO: 4725120 - DNA, 25 bp, Homo sapien
gtggcaagcacaacttgatctttag

SEQ ID NO: 4725121 - DNA, 25 bp, Homo sapien
ttcgggcatatagccagatgaggtg

SEQ ID NO: 4725122 - DNA, 25 bp, Homo sapien
caagcacaacttgatctttagtgta

SEQ ID NO: 4725123 - DNA, 25 bp, Homo sapien
taccctaaaggtactggacatctgg

SEQ ID NO: 4725124 - DNA, 25 bp, Homo sapien
ctctggagtatctgcaaggaacgta

SEQ ID NO: 4725125 - DNA, 25 bp, Homo sapien
ggacatctggtctctacctctggag

SEQ ID NO: 4725126 - DNA, 25 bp, Homo sapien
tatcctcagggctgaaagcagccgc

SEQ ID NO: 4725127 - DNA, 25 bp, Homo sapien
tccaatttggattcttccatcatgc

SEQ ID NO: 4725128 - DNA, 25 bp, Homo sapien
ttgtaatgctctttacaaagattcc

SEQ ID NO: 4725129 - DNA, 25 bp, Homo sapien
tccatcatgctcaacggcactgctt

SEQ ID NO: 4725130 - DNA, 25 bp, Homo sapien
gctataatttggtctccaatttgga

SEQ ID NO: 4725131 - DNA, 25 bp, Homo sapien
ctccaatgtagccagcaatggtaat

SEQ ID NO: 4725132 - DNA, 25 bp, Homo sapien
tcctaatccttggacatttttagtg

SEQ ID NO: 4725133 - DNA, 25 bp, Homo sapien
gccagcaatggtaattcctaatcct

SEQ ID NO: 4725134 - DNA, 25 bp, Homo sapien
atccttggacatttttagtgagttc

SEQ ID NO: 4725135 - DNA, 25 bp, Homo sapien
agaactatgacccaccttacagaga

SEQ ID NO: 4725136 - DNA, 25 bp, Homo sapien
tcaagttgacaaggatggaatgcta

SEQ ID NO: 4725137 - DNA, 25 bp, Homo sapien
tcttgcgacctgtaaatctgctgag

SEQ ID NO: 4725138 - DNA, 25 bp, Homo sapien
tatttatcctctgtagtcttgcgac

SEQ ID NO: 4725139 - DNA, 25 bp, Homo sapien
gctgtacgttcttctatggcacctc

SEQ ID NO: 4725140 - DNA, 25 bp, Homo sapien
atgcccaaagcagtgggtgctgtac

SEQ ID NO: 4725141 - DNA, 25 bp, Homo sapien
gcagtgggtgctgtacgttcttcta

SEQ ID NO: 4725142 - DNA, 25 bp, Homo sapien
tatggcacctcttgcaatcatcaac

SEQ ID NO: 4725143 - DNA, 25 bp, Homo sapien
cacattgcctaaggacttgtgctac

SEQ ID NO: 4725144 - DNA, 25 bp, Homo sapien
tgctcattcctgctagatctgtgtc

SEQ ID NO: 4725145 - DNA, 25 bp, Homo sapien
tgtggtctccactgcataaacgccc

SEQ ID NO: 4725146 - DNA, 25 bp, Homo sapien
tgctacttgctcactgctcattcct

SEQ ID NO: 4725147 - DNA, 25 bp, Homo sapien
caatcgtttccatgtgttgccagtg

SEQ ID NO: 4725148 - DNA, 25 bp, Homo sapien
tgatcagctactcctccaggcagaa

SEQ ID NO: 4725149 - DNA, 25 bp, Homo sapien
ttcctcctatgatgccaaatcccaa

SEQ ID NO: 4725150 - DNA, 25 bp, Homo sapien
ggtttttactatcacaccagttgct

SEQ ID NO: 4725151 - DNA, 25 bp, Homo sapien
taattgtctgatcaagagcctgtcc

SEQ ID NO: 4725152 - DNA, 25 bp, Homo sapien
taactagctggacagtatctttggc

SEQ ID NO: 4725153 - DNA, 25 bp, Homo sapien
caatgagcctctggcaataactagc

SEQ ID NO: 4725154 - DNA, 25 bp, Homo sapien
ctgcagatggagaacgggaaactat

SEQ ID NO: 4725155 - DNA, 25 bp, Homo sapien
tggaggtttgaggagctcaaaaact

SEQ ID NO: 4725156 - DNA, 25 bp, Homo sapien
ctgttttcacttcttagtcccacaa

SEQ ID NO: 4725157 - DNA, 25 bp, Homo sapien
caacactaaacccaaggcctccaga

SEQ ID NO: 4725158 - DNA, 25 bp, Homo sapien
ccctcttgtatctcttgaacaaata

SEQ ID NO: 4725159 - DNA, 25 bp, Homo sapien
caaattcatcacaagcaggtttccc

SEQ ID NO: 4725160 - DNA, 25 bp, Homo sapien
taccaggtcctgtaagtgcttccag

SEQ ID NO: 4725161 - DNA, 25 bp, Homo sapien
tttgcagagtaggaatcacagctgg

SEQ ID NO: 4725162 - DNA, 25 bp, Homo sapien
cattaatgtgtggaataccaggtcc

SEQ ID NO: 4725163 - DNA, 25 bp, Homo sapien
tagccattggtgtgcgggatcctca

SEQ ID NO: 4725164 - DNA, 25 bp, Homo sapien
cattagccattggtgtgcgggatcc

SEQ ID NO: 4725165 - DNA, 25 bp, Homo sapien
atagccattagccattggtgtgcgg

SEQ ID NO: 4725166 - DNA, 25 bp, Homo sapien
gccattagccattggtgtgcgggat

SEQ ID NO: 4725167 - DNA, 25 bp, Homo sapien
tatctgaaaagctgtaaccctccct

SEQ ID NO: 4725168 - DNA, 25 bp, Homo sapien
tcttggtgcaagatgacgaaccttg

SEQ ID NO: 4725169 - DNA, 25 bp, Homo sapien
gacaacaatgctacttcaacagtgc

SEQ ID NO: 4725170 - DNA, 25 bp, Homo sapien
gcagaagccgatgaaaatctagtat

SEQ ID NO: 4725171 - DNA, 25 bp, Homo sapien
cactcaattatgaaactaatcttca

SEQ ID NO: 4725172 - DNA, 25 bp, Homo sapien
tcttttgcattagccacactttggg

SEQ ID NO: 4725173 - DNA, 25 bp, Homo sapien
taaggcagaatatttgctagcaagt

SEQ ID NO: 4725174 - DNA, 25 bp, Homo sapien
tagattaagaagttatatgacatta

SEQ ID NO: 4725175 - DNA, 25 bp, Homo sapien
gcctgcttgggtgaatgatgtccta

SEQ ID NO: 4725176 - DNA, 25 bp, Homo sapien
gatcacatgaacaatgagcctcagt

SEQ ID NO: 4725177 - DNA, 25 bp, Homo sapien
ggaaactaagtctacagccaaccat

SEQ ID NO: 4725178 - DNA, 25 bp, Homo sapien
gatctatgccatgtcgtgaatgcct

SEQ ID NO: 4725179 - DNA, 25 bp, Homo sapien
ttcatttgctacatccccacgttct

SEQ ID NO: 4725180 - DNA, 25 bp, Homo sapien
gtctgaaggctcagaatctgactga

SEQ ID NO: 4725181 - DNA, 25 bp, Homo sapien
cagaatctgactgaagagagggctc

SEQ ID NO: 4725182 - DNA, 25 bp, Homo sapien
cttggtttgcaagcgctctgctgca

SEQ ID NO: 4725183 - DNA, 25 bp, Homo sapien
ttcttctctgaaatgattaacagca

SEQ ID NO: 4725184 - DNA, 25 bp, Homo sapien
tctgaaatgattaacagcaattaaa

SEQ ID NO: 4725185 - DNA, 25 bp, Homo sapien
tttttcaaagttcagtgttcttctc

SEQ ID NO: 4725186 - DNA, 25 bp, Homo sapien
agtgttcttctctgaaatgattaac

SEQ ID NO: 4725187 - DNA, 25 bp, Homo sapien
tcttgagcctttgctgccgaacaaa

SEQ ID NO: 4725188 - DNA, 25 bp, Homo sapien
atccacgtcactaacccatcttgag

SEQ ID NO: 4725189 - DNA, 25 bp, Homo sapien
ctggatacagatctgcattgctaac

SEQ ID NO: 4725190 - DNA, 25 bp, Homo sapien
aaatctgcacagctatccccatagt

SEQ ID NO: 4725191 - DNA, 25 bp, Homo sapien
tatgtatattagaaaccaccggtcg

SEQ ID NO: 4725192 - DNA, 25 bp, Homo sapien
tgtagatagtcaaattagccaactg

SEQ ID NO: 4725193 - DNA, 25 bp, Homo sapien
tagccaactgttcagacaaggtatg

SEQ ID NO: 4725194 - DNA, 25 bp, Homo sapien
ccaccggtcggtctatcaaagaaag

SEQ ID NO: 4725195 - DNA, 25 bp, Homo sapien
agcagatttagaataacccttaagg

SEQ ID NO: 4725196 - DNA, 25 bp, Homo sapien
tttccatttacagagaacgcaggca

SEQ ID NO: 4725197 - DNA, 25 bp, Homo sapien
gctcttggataaccagatgccttgt

SEQ ID NO: 4725198 - DNA, 25 bp, Homo sapien
catttacagagaacgcaggcatagc

SEQ ID NO: 4725199 - DNA, 25 bp, Homo sapien
tggcacaacacacttagctttcagc

SEQ ID NO: 4725200 - DNA, 25 bp, Homo sapien
ggagaagctattttaatccttcaag

SEQ ID NO: 4725201 - DNA, 25 bp, Homo sapien
tgttttgctttacatgcagtcactg

SEQ ID NO: 4725202 - DNA, 25 bp, Homo sapien
tttctgaaggctctacatgagcact

SEQ ID NO: 4725203 - DNA, 25 bp, Homo sapien
cacagttgtagtcaattgcaagtag

SEQ ID NO: 4725204 - DNA, 25 bp, Homo sapien
tgaagtaagcagacgaaggcacagt

SEQ ID NO: 4725205 - DNA, 25 bp, Homo sapien
tcataaatccaattgtccataacag

SEQ ID NO: 4725206 - DNA, 25 bp, Homo sapien
ccataacagcaatatttatactttc

SEQ ID NO: 4725207 - DNA, 25 bp, Homo sapien
ctgcatgtagtttcttatatagtaa

SEQ ID NO: 4725208 - DNA, 25 bp, Homo sapien
tgagcactgcatgtagtttcttata

SEQ ID NO: 4725209 - DNA, 25 bp, Homo sapien
tcttatatagtaacctggattgggg

SEQ ID NO: 4725210 - DNA, 25 bp, Homo sapien
cttctgagcactgcatgtagtttct

SEQ ID NO: 4725211 - DNA, 25 bp, Homo sapien
gagggtcctccatactactcttaaa

SEQ ID NO: 4725212 - DNA, 25 bp, Homo sapien
cctttccgggctttggttactgatg

SEQ ID NO: 4725213 - DNA, 25 bp, Homo sapien
aaaggctgaattactgagggtcctc

SEQ ID NO: 4725214 - DNA, 25 bp, Homo sapien
cctggagatgtgagtaaaggctgaa

SEQ ID NO: 4725215 - DNA, 25 bp, Homo sapien
taaggcagccgatatgtgaaaatgt

SEQ ID NO: 4725216 - DNA, 25 bp, Homo sapien
gaagcagatacttatggccctggat

SEQ ID NO: 4725217 - DNA, 25 bp, Homo sapien
tagtcaacttctcatcagagagcag

SEQ ID NO: 4725218 - DNA, 25 bp, Homo sapien
taccaagctgtttgagatacaggcc

SEQ ID NO: 4725219 - DNA, 25 bp, Homo sapien
tctcagggacaggattttcattgac

SEQ ID NO: 4725220 - DNA, 25 bp, Homo sapien
ccatgggacccagaaatatagttgg

SEQ ID NO: 4725221 - DNA, 25 bp, Homo sapien
tagaacctaccaactgctgtcggag

SEQ ID NO: 4725222 - DNA, 25 bp, Homo sapien
cggaggtgatagtacaaaacatgtc

SEQ ID NO: 4725223 - DNA, 25 bp, Homo sapien
tcttcactgtggctacagacaactt

SEQ ID NO: 4725224 - DNA, 25 bp, Homo sapien
tgtcatatacatttgtcacaggagt

SEQ ID NO: 4725225 - DNA, 25 bp, Homo sapien
catgcaagtgggtgaggaatattta

SEQ ID NO: 4725226 - DNA, 25 bp, Homo sapien
tttagcaagcagtcaaaataaagca

SEQ ID NO: 4725227 - DNA, 25 bp, Homo sapien
tgggtgatctaattacaggcaagct

SEQ ID NO: 4725228 - DNA, 25 bp, Homo sapien
cactggtatcctacatgccacgtgg

SEQ ID NO: 4725229 - DNA, 25 bp, Homo sapien
cagatgatgctcatttagaaaggca

SEQ ID NO: 4725230 - DNA, 25 bp, Homo sapien
gaaatctattgatcaacagctgctc

SEQ ID NO: 4725231 - DNA, 25 bp, Homo sapien
ttttaacttagctggccagattggg

SEQ ID NO: 4725232 - DNA, 25 bp, Homo sapien
gacattccagtccaactttgcctca

SEQ ID NO: 4725233 - DNA, 25 bp, Homo sapien
tgctatttgctctaccatatttggg

SEQ ID NO: 4725234 - DNA, 25 bp, Homo sapien
tttctctggcagatgtgctatttgc

SEQ ID NO: 4725235 - DNA, 25 bp, Homo sapien
cagagtactttgtacgtttccaaat

SEQ ID NO: 4725236 - DNA, 25 bp, Homo sapien
agggagagacaagaccaacgtgctc

SEQ ID NO: 4725237 - DNA, 25 bp, Homo sapien
ttccctggtaacatccggcatcctg

SEQ ID NO: 4725238 - DNA, 25 bp, Homo sapien
gacacaaagcgtctcccaaacatcg

SEQ ID NO: 4725239 - DNA, 25 bp, Homo sapien
ggcaccggtaccaattagcggctcg

SEQ ID NO: 4725240 - DNA, 25 bp, Homo sapien
gggagtggagacttgcgagtagcaa

SEQ ID NO: 4725241 - DNA, 25 bp, Homo sapien
acttgcgagtagcaaaggaaacttc

SEQ ID NO: 4725242 - DNA, 25 bp, Homo sapien
aaggtctaggattatccaccgcggg

SEQ ID NO: 4725243 - DNA, 25 bp, Homo sapien
ttagtcagcgagagcaaaagaaagg

SEQ ID NO: 4725244 - DNA, 25 bp, Homo sapien
ctcttctgaagtaacgacccggcga

SEQ ID NO: 4725245 - DNA, 25 bp, Homo sapien
ggagcttcggatcaaaacgcacaga

SEQ ID NO: 4725246 - DNA, 25 bp, Homo sapien
ttcggatcaaaacgcacagacactc

SEQ ID NO: 4725247 - DNA, 25 bp, Homo sapien
aacgacccggcgaggagcttcggat

SEQ ID NO: 4725248 - DNA, 25 bp, Homo sapien
tgactgagaaacttaatcccgcggt

SEQ ID NO: 4725249 - DNA, 25 bp, Homo sapien
ctgagaaacttaatcccgcggtggc

SEQ ID NO: 4725250 - DNA, 25 bp, Homo sapien
tgagaaacttaatcccgcggtggcc

SEQ ID NO: 4725251 - DNA, 25 bp, Homo sapien
gcgtgactgagaaacttaatcccgc

SEQ ID NO: 4725252 - DNA, 25 bp, Homo sapien
cgccgcacttgcgccgaccggggct

SEQ ID NO: 4725253 - DNA, 25 bp, Homo sapien
ccgcacttgcgccgaccggggctgc

SEQ ID NO: 4725254 - DNA, 25 bp, Homo sapien
gcacttgcgccgaccggggctgccg

SEQ ID NO: 4725255 - DNA, 25 bp, Homo sapien
cgcacttgcgccgaccggggctgcc

SEQ ID NO: 4725256 - DNA, 25 bp, Homo sapien
ctatgtatctagcttttcttcttcc

SEQ ID NO: 4725257 - DNA, 25 bp, Homo sapien
tatgtatctagcttttcttcttcct

SEQ ID NO: 4725258 - DNA, 25 bp, Homo sapien
ccttgaaagtctggtaatcgtggat

SEQ ID NO: 4725259 - DNA, 25 bp, Homo sapien
tgtttatattgggtccttgaaagtc

SEQ ID NO: 4725260 - DNA, 25 bp, Homo sapien
taataatgaggcagtgagcagtgtg

SEQ ID NO: 4725261 - DNA, 25 bp, Homo sapien
atatttaataatgaggcagtgagca

SEQ ID NO: 4725262 - DNA, 25 bp, Homo sapien
ttatatttaataatgaggcagtgag

SEQ ID NO: 4725263 - DNA, 25 bp, Homo sapien
taatgaggcagtgagcagtgtgggg

SEQ ID NO: 4725264 - DNA, 25 bp, Homo sapien
cgcaaggctttgttgacttgtactt

SEQ ID NO: 4725265 - DNA, 25 bp, Homo sapien
aaggctttgttgacttgtacttcac

SEQ ID NO: 4725266 - DNA, 25 bp, Homo sapien
caaggctttgttgacttgtacttca

SEQ ID NO: 4725267 - DNA, 25 bp, Homo sapien
ggctttgttgacttgtacttcactt

SEQ ID NO: 4725268 - DNA, 25 bp, Homo sapien
ctccatagccatctgatgtcttttg

SEQ ID NO: 4725269 - DNA, 25 bp, Homo sapien
tccatagccatctgatgtcttttga

SEQ ID NO: 4725270 - DNA, 25 bp, Homo sapien
agcattacactcaggggctcctcca

SEQ ID NO: 4725271 - DNA, 25 bp, Homo sapien
ctgagaaagcattacactcaggggc

SEQ ID NO: 4725272 - DNA, 25 bp, Homo sapien
ttttatggggatgatgtaacgttcc

SEQ ID NO: 4725273 - DNA, 25 bp, Homo sapien
tgctttcctggtacaccccacacaa

SEQ ID NO: 4725274 - DNA, 25 bp, Homo sapien
tcctgatgacctcataagattcgcc

SEQ ID NO: 4725275 - DNA, 25 bp, Homo sapien
cataagattcgccttcaaatcctgc

SEQ ID NO: 4725276 - DNA, 25 bp, Homo sapien
taggagacctagcatggctgctaca

SEQ ID NO: 4725277 - DNA, 25 bp, Homo sapien
ggagacctagcatggctgctacact

SEQ ID NO: 4725278 - DNA, 25 bp, Homo sapien
ttaggagacctagcatggctgctac

SEQ ID NO: 4725279 - DNA, 25 bp, Homo sapien
aggagacctagcatggctgctacac

SEQ ID NO: 4725280 - DNA, 25 bp, Homo sapien
gagtgtgtgagatagataaagcatt

SEQ ID NO: 4725281 - DNA, 25 bp, Homo sapien
tgtaatatatgacaaagataagaaa

SEQ ID NO: 4725282 - DNA, 25 bp, Homo sapien
gatcaaattgataaactgtcttaga

SEQ ID NO: 4725283 - DNA, 25 bp, Homo sapien
aattttaggatggatatagttggag

SEQ ID NO: 4725284 - DNA, 25 bp, Homo sapien
cactccctggggcactcgtggttgt

SEQ ID NO: 4725285 - DNA, 25 bp, Homo sapien
gggcactcgtggttgtcacagccgc

SEQ ID NO: 4725286 - DNA, 25 bp, Homo sapien
gcactcgtggttgtcacagccgctc

SEQ ID NO: 4725287 - DNA, 25 bp, Homo sapien
cctggggcactcgtggttgtcacag

SEQ ID NO: 4725288 - DNA, 25 bp, Homo sapien
tgtctccttgcggtccatggcaagg

SEQ ID NO: 4725289 - DNA, 25 bp, Homo sapien
tccttgcggtccatggcaaggtctg

SEQ ID NO: 4725290 - DNA, 25 bp, Homo sapien
tctttgctttcttgccttggccgtt

SEQ ID NO: 4725291 - DNA, 25 bp, Homo sapien
cttgcggtccatggcaaggtctgcg

SEQ ID NO: 4725292 - DNA, 25 bp, Homo sapien
tggtcgtgatcattggatgcatcct

SEQ ID NO: 4725293 - DNA, 25 bp, Homo sapien
ttggatgcatcctctcgattctcat

SEQ ID NO: 4725294 - DNA, 25 bp, Homo sapien
gatctcgtcgtggtcgtgatcattg

SEQ ID NO: 4725295 - DNA, 25 bp, Homo sapien
ctgtggtgatctcgtcgtggtcgtg

SEQ ID NO: 4725296 - DNA, 25 bp, Homo sapien
tcctggctccgagtcagggctctct

SEQ ID NO: 4725297 - DNA, 25 bp, Homo sapien
ggctctctggatgcacggtaacacc

SEQ ID NO: 4725298 - DNA, 25 bp, Homo sapien
gctccttcgtcggactcagtctgga

SEQ ID NO: 4725299 - DNA, 25 bp, Homo sapien
gagctcggcgagaccgcccatctgt

SEQ ID NO: 4725300 - DNA, 25 bp, Homo sapien
tctatcagttccaactccttgttcc

SEQ ID NO: 4725301 - DNA, 25 bp, Homo sapien
ctatcagttccaactccttgttccc

SEQ ID NO: 4725302 - DNA, 25 bp, Homo sapien
gtctatcagttccaactccttgttc

SEQ ID NO: 4725303 - DNA, 25 bp, Homo sapien
actcttcttgctgccaagagaatat

SEQ ID NO: 4725304 - DNA, 25 bp, Homo sapien
tgccaagagaatatctgcctttttg

SEQ ID NO: 4725305 - DNA, 25 bp, Homo sapien
tcttgctgccaagagaatatctgcc

SEQ ID NO: 4725306 - DNA, 25 bp, Homo sapien
gccaagagaatatctgcctttttgt

SEQ ID NO: 4725307 - DNA, 25 bp, Homo sapien
ttgacaaccacctctgccttcccac

SEQ ID NO: 4725308 - DNA, 25 bp, Homo sapien
acctttgacaaccacctctgccttc

SEQ ID NO: 4725309 - DNA, 25 bp, Homo sapien
caactggagtttcctgttttcacca

SEQ ID NO: 4725310 - DNA, 25 bp, Homo sapien
ctgttttcaccacctttgacaacca

SEQ ID NO: 4725311 - DNA, 25 bp, Homo sapien
gaaatagtactggagagagataatg

SEQ ID NO: 4725312 - DNA, 25 bp, Homo sapien
gatgaaatagtactggagagagata

SEQ ID NO: 4725313 - DNA, 25 bp, Homo sapien
gaaggattctttaggagctacacac

SEQ ID NO: 4725314 - DNA, 25 bp, Homo sapien
cagagtgtggaagaaggattcttta

SEQ ID NO: 4725315 - DNA, 25 bp, Homo sapien
tgttcccttccaggtatttgtggaa

SEQ ID NO: 4725316 - DNA, 25 bp, Homo sapien
ttcatgttcccttccaggtatttgt

SEQ ID NO: 4725317 - DNA, 25 bp, Homo sapien
ccaggtatttgtggaaagggatagt

SEQ ID NO: 4725318 - DNA, 25 bp, Homo sapien
catgttcccttccaggtatttgtgg

SEQ ID NO: 4725319 - DNA, 25 bp, Homo sapien
tcatctacttgtaaggaagacccag

SEQ ID NO: 4725320 - DNA, 25 bp, Homo sapien
ttacatcatctacttgtaaggaaga

SEQ ID NO: 4725321 - DNA, 25 bp, Homo sapien
tctacttgtaaggaagacccagttc

SEQ ID NO: 4725322 - DNA, 25 bp, Homo sapien
ggaagacccagttccaatagaactg

SEQ ID NO: 4725323 - DNA, 25 bp, Homo sapien
cacagttttgtcacaaggagtttca

SEQ ID NO: 4725324 - DNA, 25 bp, Homo sapien
agggtctgagggtcttctattagga

SEQ ID NO: 4725325 - DNA, 25 bp, Homo sapien
tctgagggtcttctattaggaatgt

SEQ ID NO: 4725326 - DNA, 25 bp, Homo sapien
tctgtgaaccctcccacgggaggca

SEQ ID NO: 4725327 - DNA, 25 bp, Homo sapien
tattgacatgtcaacccgctctgtg

SEQ ID NO: 4725328 - DNA, 25 bp, Homo sapien
tagatcctgcgttgacctgtgagag

SEQ ID NO: 4725329 - DNA, 25 bp, Homo sapien
tcaaggctcctcaatcgaactgggt

SEQ ID NO: 4725330 - DNA, 25 bp, Homo sapien
cacaactgaaggtggtatgtctcca

SEQ ID NO: 4725331 - DNA, 25 bp, Homo sapien
gcaactgaatgaaaagaatcccgtg

SEQ ID NO: 4725332 - DNA, 25 bp, Homo sapien
aatccttcttgggtcaatgacagcc

SEQ ID NO: 4725333 - DNA, 25 bp, Homo sapien
tagtcctcactagctacagatgcac

SEQ ID NO: 4725334 - DNA, 25 bp, Homo sapien
tgtgcatagaggacaggcttttacc

SEQ ID NO: 4725335 - DNA, 25 bp, Homo sapien
tatctttctgaaccataaggagagc

SEQ ID NO: 4725336 - DNA, 25 bp, Homo sapien
gcagactcggggcccaaattgggac

SEQ ID NO: 4725337 - DNA, 25 bp, Homo sapien
cagaggtcttgcattggctctgctt

SEQ ID NO: 4725338 - DNA, 25 bp, Homo sapien
ctccagcagactcggggcccaaatt

SEQ ID NO: 4725339 - DNA, 25 bp, Homo sapien
tttctccagcagactcggggcccaa

SEQ ID NO: 4725340 - DNA, 25 bp, Homo sapien
tccagtaactcgagagcacacggct

SEQ ID NO: 4725341 - DNA, 25 bp, Homo sapien
gaccactggagctgcttgcgctgct

SEQ ID NO: 4725342 - DNA, 25 bp, Homo sapien
agctgagaccactggagctgcttgc

SEQ ID NO: 4725343 - DNA, 25 bp, Homo sapien
ctgctccagtaactcgagagcacac

SEQ ID NO: 4725344 - DNA, 25 bp, Homo sapien
tagatatccagtggaggtaaatggt

SEQ ID NO: 4725345 - DNA, 25 bp, Homo sapien
aatcattaggcatagaagtgacaac

SEQ ID NO: 4725346 - DNA, 25 bp, Homo sapien
tccagtggaggtaaatggtaacaat

SEQ ID NO: 4725347 - DNA, 25 bp, Homo sapien
aaatagatatccagtggaggtaaat

SEQ ID NO: 4725348 - DNA, 25 bp, Homo sapien
tctaaccaaagaagttctgagggca

SEQ ID NO: 4725349 - DNA, 25 bp, Homo sapien
caggctggatactaagaggtgccca

SEQ ID NO: 4725350 - DNA, 25 bp, Homo sapien
ggtcaaggtagtgccctgcatttgc

SEQ ID NO: 4725351 - DNA, 25 bp, Homo sapien
ctgggggtaagtccagcaagacctc

SEQ ID NO: 4725352 - DNA, 25 bp, Homo sapien
tgaccaaacagacttaactgcaggc

SEQ ID NO: 4725353 - DNA, 25 bp, Homo sapien
tcctcttctataactaagtcctgtg

SEQ ID NO: 4725354 - DNA, 25 bp, Homo sapien
aggctctaccaacacgctgaccaaa

SEQ ID NO: 4725355 - DNA, 25 bp, Homo sapien
taagtcctgtgaaatagcatcaacc

SEQ ID NO: 4725356 - DNA, 25 bp, Homo sapien
tcattttcccagtaaatagcgcttg

SEQ ID NO: 4725357 - DNA, 25 bp, Homo sapien
tttcccagtaaatagcgcttgccat

SEQ ID NO: 4725358 - DNA, 25 bp, Homo sapien
aacatccaattgcattatcattttc

SEQ ID NO: 4725359 - DNA, 25 bp, Homo sapien
aattgcattatcattttcccagtaa

SEQ ID NO: 4725360 - DNA, 25 bp, Homo sapien
caataagcttcctggtaagaatcaa

SEQ ID NO: 4725361 - DNA, 25 bp, Homo sapien
aagcttcctggtaagaatcaaaatg

SEQ ID NO: 4725362 - DNA, 25 bp, Homo sapien
ctggaagggcaataagcttcctggt

SEQ ID NO: 4725363 - DNA, 25 bp, Homo sapien
agggcaataagcttcctggtaagaa

SEQ ID NO: 4725364 - DNA, 25 bp, Homo sapien
gagaactagacttgtactggcccct

SEQ ID NO: 4725365 - DNA, 25 bp, Homo sapien
cagtgagtctttgtgaaacttgcca

SEQ ID NO: 4725366 - DNA, 25 bp, Homo sapien
gctaggatacagtgagtctttgtga

SEQ ID NO: 4725367 - DNA, 25 bp, Homo sapien
ggcccctctgtaattagtggaatga

SEQ ID NO: 4725368 - DNA, 25 bp, Homo sapien
gatggggtgtggcaagtgtgaaggg

SEQ ID NO: 4725369 - DNA, 25 bp, Homo sapien
aggaggggatttattgttggctgat

SEQ ID NO: 4725370 - DNA, 25 bp, Homo sapien
ttggttgatcaaagctggtgcagcc

SEQ ID NO: 4725371 - DNA, 25 bp, Homo sapien
tggcgtcctgccagctggggattta

SEQ ID NO: 4725372 - DNA, 25 bp, Homo sapien
cagttagccaatctagctccacaga

SEQ ID NO: 4725373 - DNA, 25 bp, Homo sapien
tgtgaaaagtaagggcaagtgctga

SEQ ID NO: 4725374 - DNA, 25 bp, Homo sapien
caaaagttgaaggtttgctgactac

SEQ ID NO: 4725375 - DNA, 25 bp, Homo sapien
gaagataacattctgacactcctca

SEQ ID NO: 4725376 - DNA, 25 bp, Homo sapien
tccagacatcaggtattgtctgcat

SEQ ID NO: 4725377 - DNA, 25 bp, Homo sapien
ccctttccagacatcaggtattgtc

SEQ ID NO: 4725378 - DNA, 25 bp, Homo sapien
tttccagacatcaggtattgtctgc

SEQ ID NO: 4725379 - DNA, 25 bp, Homo sapien
ttttccctttccagacatcaggtat

SEQ ID NO: 4725380 - DNA, 25 bp, Homo sapien
atctggacaaaaatgaagatcagta

SEQ ID NO: 4725381 - DNA, 25 bp, Homo sapien
ctggacaaaaatgaagatcagtaaa

SEQ ID NO: 4725382 - DNA, 25 bp, Homo sapien
tggacaaaaatgaagatcagtaaac

SEQ ID NO: 4725383 - DNA, 25 bp, Homo sapien
tctggacaaaaatgaagatcagtaa

SEQ ID NO: 4725384 - DNA, 25 bp, Homo sapien
tagccttggctcttcttcgatgaga

SEQ ID NO: 4725385 - DNA, 25 bp, Homo sapien
aaatcctgccatgacggtggggttt

SEQ ID NO: 4725386 - DNA, 25 bp, Homo sapien
tgagacccaatgcaagtgcaacagc

SEQ ID NO: 4725387 - DNA, 25 bp, Homo sapien
tcttcgatgagacccaatgcaagtg

SEQ ID NO: 4725388 - DNA, 25 bp, Homo sapien
gggaaatgtaaatcgccggcgacac

SEQ ID NO: 4725389 - DNA, 25 bp, Homo sapien
cccaggccctggttgtgtcgaagtg

SEQ ID NO: 4725390 - DNA, 25 bp, Homo sapien
tgaactggcgacactgcttggcgaa

SEQ ID NO: 4725391 - DNA, 25 bp, Homo sapien
cgaagacacgccgagttcaggaata

SEQ ID NO: 4725392 - DNA, 25 bp, Homo sapien
gttggaagttaagtattcagcacaa

SEQ ID NO: 4725393 - DNA, 25 bp, Homo sapien
tctccattcaccacaacaattctgg

SEQ ID NO: 4725394 - DNA, 25 bp, Homo sapien
gactgatggacaagctggaaaggca

SEQ ID NO: 4725395 - DNA, 25 bp, Homo sapien
tcaaaaacgatgcttttaagttctc

SEQ ID NO: 4725396 - DNA, 25 bp, Homo sapien
aacagttgaatgagctttgacacca

SEQ ID NO: 4725397 - DNA, 25 bp, Homo sapien
gagtggctccatccaaacagttgaa

SEQ ID NO: 4725398 - DNA, 25 bp, Homo sapien
ggctccatccaaacagttgaatgag

SEQ ID NO: 4725399 - DNA, 25 bp, Homo sapien
catccaaacagttgaatgagctttg

SEQ ID NO: 4725400 - DNA, 25 bp, Homo sapien
cgggctcccgtttgtggtgcaggtg

SEQ ID NO: 4725401 - DNA, 25 bp, Homo sapien
aggactgcctaagtccacgttggcg

SEQ ID NO: 4725402 - DNA, 25 bp, Homo sapien
caacccggggctctaatctgctgaa

SEQ ID NO: 4725403 - DNA, 25 bp, Homo sapien
ccaaaagagggataccgtctccaag

SEQ ID NO: 4725404 - DNA, 25 bp, Homo sapien
gcagatattgagtgacccttcttaa

SEQ ID NO: 4725405 - DNA, 25 bp, Homo sapien
gaagcaaccattcgttctgtgttaa

SEQ ID NO: 4725406 - DNA, 25 bp, Homo sapien
tctgtgttaaagtcatccctttgga

SEQ ID NO: 4725407 - DNA, 25 bp, Homo sapien
tctcttatccttagtagaagcaacc

SEQ ID NO: 4725408 - DNA, 25 bp, Homo sapien
tgaggaaacggtcccatcctgaagt

SEQ ID NO: 4725409 - DNA, 25 bp, Homo sapien
gaggaaacggtcccatcctgaagtg

SEQ ID NO: 4725410 - DNA, 25 bp, Homo sapien
tttgaggaaacggtcccatcctgaa

SEQ ID NO: 4725411 - DNA, 25 bp, Homo sapien
cttttgaggaaacggtcccatcctg

SEQ ID NO: 4725412 - DNA, 25 bp, Homo sapien
ctcaacccattcaagagatccttca

SEQ ID NO: 4725413 - DNA, 25 bp, Homo sapien
gaggaaggtgaaagcgtcctgtttg

SEQ ID NO: 4725414 - DNA, 25 bp, Homo sapien
tttttggtgaagtctcaacccattc

SEQ ID NO: 4725415 - DNA, 25 bp, Homo sapien
tccttcaggcatcctgatgaggaag

SEQ ID NO: 4725416 - DNA, 25 bp, Homo sapien
tctgagaagtcttgagtctgagaag

SEQ ID NO: 4725417 - DNA, 25 bp, Homo sapien
ggagtctgagaagtcttgagtctga

SEQ ID NO: 4725418 - DNA, 25 bp, Homo sapien
aaaggagtctgagaagtcttgagtc

SEQ ID NO: 4725419 - DNA, 25 bp, Homo sapien
gagtctgagaagtcttgagtctgag

SEQ ID NO: 4725420 - DNA, 25 bp, Homo sapien
tgtaagtacagcagtctatatttgc

SEQ ID NO: 4725421 - DNA, 25 bp, Homo sapien
ctttttgtaagtacagcagtctata

SEQ ID NO: 4725422 - DNA, 25 bp, Homo sapien
ctatatttgccttgttcctggactg

SEQ ID NO: 4725423 - DNA, 25 bp, Homo sapien
ctgttgaatttgctaaggaaaacat

SEQ ID NO: 4725424 - DNA, 25 bp, Homo sapien
gaatcagatctacttcttttgcaga

SEQ ID NO: 4725425 - DNA, 25 bp, Homo sapien
gcatgcagtgacgtttatccaaggc

SEQ ID NO: 4725426 - DNA, 25 bp, Homo sapien
ttttgcagactcaaatgacttagac

SEQ ID NO: 4725427 - DNA, 25 bp, Homo sapien
gaagtgaaccctgcaaattttgccc

SEQ ID NO: 4725428 - DNA, 25 bp, Homo sapien
gcacatttggcgacagatctcctcg

SEQ ID NO: 4725429 - DNA, 25 bp, Homo sapien
tgataccggtccttattgcagggcc

SEQ ID NO: 4725430 - DNA, 25 bp, Homo sapien
gggcctaaatacctgctgctagtta

SEQ ID NO: 4725431 - DNA, 25 bp, Homo sapien
aaattcttcattacgttcacagcca

SEQ ID NO: 4725432 - DNA, 25 bp, Homo sapien
ctcactgatgtactccagatacagt

SEQ ID NO: 4725433 - DNA, 25 bp, Homo sapien
ttttttcctcactgatgtactccag

SEQ ID NO: 4725434 - DNA, 25 bp, Homo sapien
gatgggagcatgtctgcttttttcc

SEQ ID NO: 4725435 - DNA, 25 bp, Homo sapien
tactccagatacagtaagtgttctg

SEQ ID NO: 4725436 - DNA, 25 bp, Homo sapien
tttttatggatgcacgtataggtag

SEQ ID NO: 4725437 - DNA, 25 bp, Homo sapien
tacatttttatggatgcacgtatag

SEQ ID NO: 4725438 - DNA, 25 bp, Homo sapien
catttttatggatgcacgtataggt

SEQ ID NO: 4725439 - DNA, 25 bp, Homo sapien
acatttttatggatgcacgtatagg

SEQ ID NO: 4725440 - DNA, 25 bp, Homo sapien
tgttacccacatcttcagaatagtc

SEQ ID NO: 4725441 - DNA, 25 bp, Homo sapien
tcaaatataaagcgatgttacccac

SEQ ID NO: 4725442 - DNA, 25 bp, Homo sapien
atgttacccacatcttcagaatagt

SEQ ID NO: 4725443 - DNA, 25 bp, Homo sapien
gccaggcagcaatatacaaacattc

SEQ ID NO: 4725444 - DNA, 25 bp, Homo sapien
caggcagcaatatacaaacattcta

SEQ ID NO: 4725445 - DNA, 25 bp, Homo sapien
ccaggcagcaatatacaaacattct

SEQ ID NO: 4725446 - DNA, 25 bp, Homo sapien
ttcagctctatcaggccagttatgc

SEQ ID NO: 4725447 - DNA, 25 bp, Homo sapien
cagctcaaaatccttttctctgctt

SEQ ID NO: 4725448 - DNA, 25 bp, Homo sapien
ttttctgtcaggtactgcattgttt

SEQ ID NO: 4725449 - DNA, 25 bp, Homo sapien
tatcaggccagttatgctcttttct

SEQ ID NO: 4725450 - DNA, 25 bp, Homo sapien
catttctgaaggattttaaggcggg

SEQ ID NO: 4725451 - DNA, 25 bp, Homo sapien
taaggtggattcagctgactggctt

SEQ ID NO: 4725452 - DNA, 25 bp, Homo sapien
tgtggaataaggtggattcagctga

SEQ ID NO: 4725453 - DNA, 25 bp, Homo sapien
ggaataaggtggattcagctgactg

SEQ ID NO: 4725454 - DNA, 25 bp, Homo sapien
cagtgcagggaagaattacgcaggc

SEQ ID NO: 4725455 - DNA, 25 bp, Homo sapien
ttacgcaggctggtgtgtagccaca

SEQ ID NO: 4725456 - DNA, 25 bp, Homo sapien
caaggctccgtctgcaatggtggtg

SEQ ID NO: 4725457 - DNA, 25 bp, Homo sapien
ggtcaggcatagtcaaccaattcag

SEQ ID NO: 4725458 - DNA, 25 bp, Homo sapien
gtttagggcataaaaaggcttgcca

SEQ ID NO: 4725459 - DNA, 25 bp, Homo sapien
ccaaattaggagaagcctcattgct

SEQ ID NO: 4725460 - DNA, 25 bp, Homo sapien
tgcaaaagcataactaccctggagg

SEQ ID NO: 4725461 - DNA, 25 bp, Homo sapien
cgttaggatatcatcaacaatgtcc

SEQ ID NO: 4725462 - DNA, 25 bp, Homo sapien
taaacatatgcagtctgtagttcag

SEQ ID NO: 4725463 - DNA, 25 bp, Homo sapien
acatatgcagtctgtagttcagtga

SEQ ID NO: 4725464 - DNA, 25 bp, Homo sapien
aacatatgcagtctgtagttcagtg

SEQ ID NO: 4725465 - DNA, 25 bp, Homo sapien
ttaaacatatgcagtctgtagttca

SEQ ID NO: 4725466 - DNA, 25 bp, Homo sapien
ggcggcgctgttcccagagcgactc

SEQ ID NO: 4725467 - DNA, 25 bp, Homo sapien
aagcaaacgaggggagggcggcgct

SEQ ID NO: 4725468 - DNA, 25 bp, Homo sapien
cagagcgactcctcttcgcagctgg

SEQ ID NO: 4725469 - DNA, 25 bp, Homo sapien
gggagggcggcgctgttcccagagc

SEQ ID NO: 4725470 - DNA, 25 bp, Homo sapien
atggggagaagcagtagatgccctc

SEQ ID NO: 4725471 - DNA, 25 bp, Homo sapien
tgccctccgaagtgtggctccctgt

SEQ ID NO: 4725472 - DNA, 25 bp, Homo sapien
gatgccctccgaagtgtggctccct

SEQ ID NO: 4725473 - DNA, 25 bp, Homo sapien
gaagcagtagatgccctccgaagtg

SEQ ID NO: 4725474 - DNA, 25 bp, Homo sapien
attacaaatttgatccagaaagcca

SEQ ID NO: 4725475 - DNA, 25 bp, Homo sapien
acattacaaatttgatccagaaagc

SEQ ID NO: 4725476 - DNA, 25 bp, Homo sapien
agtgtcactgtcttgcctgacctca

SEQ ID NO: 4725477 - DNA, 25 bp, Homo sapien
cctttcttgtccaaccagtgtcact

SEQ ID NO: 4725478 - DNA, 25 bp, Homo sapien
taagcatcattcctggcatgcgagg

SEQ ID NO: 4725479 - DNA, 25 bp, Homo sapien
aagagttaagcatcattcctggcat

SEQ ID NO: 4725480 - DNA, 25 bp, Homo sapien
ttcaaaaacgcatcagaggcagtgg

SEQ ID NO: 4725481 - DNA, 25 bp, Homo sapien
tgagatcagatttgctaccattcaa

SEQ ID NO: 4725482 - DNA, 25 bp, Homo sapien
ctgggaggaggtgaaattagattag

SEQ ID NO: 4725483 - DNA, 25 bp, Homo sapien
ggtgggacggtgtaatcatgaaatg

SEQ ID NO: 4725484 - DNA, 25 bp, Homo sapien
cttgggaattcatcaagaaatgcaa

SEQ ID NO: 4725485 - DNA, 25 bp, Homo sapien
tgcaaatctgggtgggacggtgtaa

SEQ ID NO: 4725486 - DNA, 25 bp, Homo sapien
aagaaatgcaaatctgggtgggacg

SEQ ID NO: 4725487 - DNA, 25 bp, Homo sapien
aataggcatccagtatcccagcgga

SEQ ID NO: 4725488 - DNA, 25 bp, Homo sapien
aatccactagtctgagttgtcacca

SEQ ID NO: 4725489 - DNA, 25 bp, Homo sapien
tgtcaccatgagttccatgatgccc

SEQ ID NO: 4725490 - DNA, 25 bp, Homo sapien
tcccagcggaaccagtgctaagcag

SEQ ID NO: 4725491 - DNA, 25 bp, Homo sapien
caccatgggtgtcctcttgctccac

SEQ ID NO: 4725492 - DNA, 25 bp, Homo sapien
cattcattaagatgactctcttggc

SEQ ID NO: 4725493 - DNA, 25 bp, Homo sapien
aacaatgcaagtcccattcacaagg

SEQ ID NO: 4725494 - DNA, 25 bp, Homo sapien
tcacaagggctgtaatatgccattc

SEQ ID NO: 4725495 - DNA, 25 bp, Homo sapien
ggtcgttctccagatcaacgcattg

SEQ ID NO: 4725496 - DNA, 25 bp, Homo sapien
cgtagtcacgtgaacgataggtcgt

SEQ ID NO: 4725497 - DNA, 25 bp, Homo sapien
tacgaggcacagtcacgtagtcacg

SEQ ID NO: 4725498 - DNA, 25 bp, Homo sapien
tctcctacgaggcacagtcacgtag

SEQ ID NO: 4725499 - DNA, 25 bp, Homo sapien
gtcactgggcctatttcttccacca

SEQ ID NO: 4725500 - DNA, 25 bp, Homo sapien
gcctatttcttccaccagtaatttc

SEQ ID NO: 4725501 - DNA, 25 bp, Homo sapien
cttccaccagtaatttccacttctg

SEQ ID NO: 4725502 - DNA, 25 bp, Homo sapien
tcaggtcactgggcctatttcttcc

SEQ ID NO: 4725503 - DNA, 25 bp, Homo sapien
ttatcatatttcttgcattctctta

SEQ ID NO: 4725504 - DNA, 25 bp, Homo sapien
tctcttacaaacgttgaccttttca

SEQ ID NO: 4725505 - DNA, 25 bp, Homo sapien
gcattctcttacaaacgttgacctt

SEQ ID NO: 4725506 - DNA, 25 bp, Homo sapien
tcatatttcttgcattctcttacaa

SEQ ID NO: 4725507 - DNA, 25 bp, Homo sapien
gcaaagccgccaaagggatgtgcca

SEQ ID NO: 4725508 - DNA, 25 bp, Homo sapien
tgcgtctgctggcaaagccgccaaa

SEQ ID NO: 4725509 - DNA, 25 bp, Homo sapien
ctgcttgcgtctgctggcaaagccg

SEQ ID NO: 4725510 - DNA, 25 bp, Homo sapien
aaagccgccaaagggatgtgccaag

SEQ ID NO: 4725511 - DNA, 25 bp, Homo sapien
gagcactcgccagggaagactgaga

SEQ ID NO: 4725512 - DNA, 25 bp, Homo sapien
cgcaaagggtatgatggacatagtg

SEQ ID NO: 4725513 - DNA, 25 bp, Homo sapien
gcagtactagtaagagccagaactc

SEQ ID NO: 4725514 - DNA, 25 bp, Homo sapien
tatgatggacatagtgtcggagctg

SEQ ID NO: 4725515 - DNA, 25 bp, Homo sapien
tgactgaatcagactgggttccagg

SEQ ID NO: 4725516 - DNA, 25 bp, Homo sapien
tgtttcacaatttgagtgagctctc

SEQ ID NO: 4725517 - DNA, 25 bp, Homo sapien
gacagctctacatcagcaggcacat

SEQ ID NO: 4725518 - DNA, 25 bp, Homo sapien
cacagagaaagggaacgttgacagc

SEQ ID NO: 4725519 - DNA, 25 bp, Homo sapien
cacagctgtgtgtcctacgaaagga

SEQ ID NO: 4725520 - DNA, 25 bp, Homo sapien
tcgtaagcagaaggctgagaccgga

SEQ ID NO: 4725521 - DNA, 25 bp, Homo sapien
gaaaaccagtgtaaatcgcagtcct

SEQ ID NO: 4725522 - DNA, 25 bp, Homo sapien
gcagccaccatatcaagaagttcag

SEQ ID NO: 4725523 - DNA, 25 bp, Homo sapien
aggcagagacagacatcgagaattt

SEQ ID NO: 4725524 - DNA, 25 bp, Homo sapien
cagagacagacatcgagaatttttt

SEQ ID NO: 4725525 - DNA, 25 bp, Homo sapien
gggctttactaatccattcttcacc

SEQ ID NO: 4725526 - DNA, 25 bp, Homo sapien
ccaactaaagacttcatcactgggg

SEQ ID NO: 4725527 - DNA, 25 bp, Homo sapien
atcccaggtacagcagtagccacca

SEQ ID NO: 4725528 - DNA, 25 bp, Homo sapien
ggtacagcagtagccaccacagcag

SEQ ID NO: 4725529 - DNA, 25 bp, Homo sapien
ccatcccaggtacagcagtagccac

SEQ ID NO: 4725530 - DNA, 25 bp, Homo sapien
ccaggtacagcagtagccaccacag

SEQ ID NO: 4725531 - DNA, 25 bp, Homo sapien
aattcctcggcctttgtgcgcacca

SEQ ID NO: 4725532 - DNA, 25 bp, Homo sapien
cagttttcaattcctcggcctttgt

SEQ ID NO: 4725533 - DNA, 25 bp, Homo sapien
ctcggcctttgtgcgcaccatttct

SEQ ID NO: 4725534 - DNA, 25 bp, Homo sapien
cctttgtgcgcaccatttctttccg

SEQ ID NO: 4725535 - DNA, 25 bp, Homo sapien
atcattgcccctggtactatgtcaa

SEQ ID NO: 4725536 - DNA, 25 bp, Homo sapien
ttttctcgaatcattgcccctggta

SEQ ID NO: 4725537 - DNA, 25 bp, Homo sapien
gtactatgtcaaatctctctaaccc

SEQ ID NO: 4725538 - DNA, 25 bp, Homo sapien
ggtactatgtcaaatctctctaacc

SEQ ID NO: 4725539 - DNA, 25 bp, Homo sapien
aagttttaacatcaggcggggtgcg

SEQ ID NO: 4725540 - DNA, 25 bp, Homo sapien
gagtgcagaatcctcatgacccaat

SEQ ID NO: 4725541 - DNA, 25 bp, Homo sapien
gacgccatctatcaatactgccaca

SEQ ID NO: 4725542 - DNA, 25 bp, Homo sapien
tattaaccaatagatccatgaatta

SEQ ID NO: 4725543 - DNA, 25 bp, Homo sapien
ataatacatcctttgcaagcctgga

SEQ ID NO: 4725544 - DNA, 25 bp, Homo sapien
agataatatgcctttctaacaaaaa

SEQ ID NO: 4725545 - DNA, 25 bp, Homo sapien
taaagataatatgcctttctaacaa

SEQ ID NO: 4725546 - DNA, 25 bp, Homo sapien
taatacatcctttgcaagcctggaa

SEQ ID NO: 4725547 - DNA, 25 bp, Homo sapien
gaatcctccagttgatcgacagact

SEQ ID NO: 4725548 - DNA, 25 bp, Homo sapien
cataaattaaacagggctaagacta

SEQ ID NO: 4725549 - DNA, 25 bp, Homo sapien
gatcgacagacttccagtatttctg

SEQ ID NO: 4725550 - DNA, 25 bp, Homo sapien
tcgtgtgggccctgacaacctttct

SEQ ID NO: 4725551 - DNA, 25 bp, Homo sapien
ctgaaaattcctttgcattgtacta

SEQ ID NO: 4725552 - DNA, 25 bp, Homo sapien
ctttgagcaaatttaggagactgga

SEQ ID NO: 4725553 - DNA, 25 bp, Homo sapien
tgaaaattcctttgcattgtactac

SEQ ID NO: 4725554 - DNA, 25 bp, Homo sapien
tgtactactttgagcaaatttagga

SEQ ID NO: 4725555 - DNA, 25 bp, Homo sapien
tattgcattagaaaagtccatacta

SEQ ID NO: 4725556 - DNA, 25 bp, Homo sapien
gcattagaaaagtccatactagaaa

SEQ ID NO: 4725557 - DNA, 25 bp, Homo sapien
cacagtcactgtcagcaatatctgg

SEQ ID NO: 4725558 - DNA, 25 bp, Homo sapien
ttctggaaagacacagtcactgtca

SEQ ID NO: 4725559 - DNA, 25 bp, Homo sapien
gcaaattccctgtacatctttttct

SEQ ID NO: 4725560 - DNA, 25 bp, Homo sapien
ttggtagcatcaagcaaattccctg

SEQ ID NO: 4725561 - DNA, 25 bp, Homo sapien
tgttggtagcatcaagcaaattccc

SEQ ID NO: 4725562 - DNA, 25 bp, Homo sapien
gttttttgttggtagcatcaagcaa

SEQ ID NO: 4725563 - DNA, 25 bp, Homo sapien
ttttcaccctttacacaaacatgca

SEQ ID NO: 4725564 - DNA, 25 bp, Homo sapien
acatgcatccacacccatacctcca

SEQ ID NO: 4725565 - DNA, 25 bp, Homo sapien
gggttggctgtctagctgatccctg

SEQ ID NO: 4725566 - DNA, 25 bp, Homo sapien
tgcctttctttattccaacaaagat

SEQ ID NO: 4725567 - DNA, 25 bp, Homo sapien
ccacagaggcacacggattcaaaga

SEQ ID NO: 4725568 - DNA, 25 bp, Homo sapien
ctcaagggcttgaggaatctatctc

SEQ ID NO: 4725569 - DNA, 25 bp, Homo sapien
gattcaaagactggacacttccacg

SEQ ID NO: 4725570 - DNA, 25 bp, Homo sapien
tgcttctgccaaaaccgactgcatt

SEQ ID NO: 4725571 - DNA, 25 bp, Homo sapien
gctagctggaaaaatcctgaagcta

SEQ ID NO: 4725572 - DNA, 25 bp, Homo sapien
ccagggagctgggtatttaggagac

SEQ ID NO: 4725573 - DNA, 25 bp, Homo sapien
gagggtagggaagtagctagctgga

SEQ ID NO: 4725574 - DNA, 25 bp, Homo sapien
actggagatctctctcaccacacca

SEQ ID NO: 4725575 - DNA, 25 bp, Homo sapien
caatcaaactttccctggtagcagc

SEQ ID NO: 4725576 - DNA, 25 bp, Homo sapien
tggtagcagctgataacacagcact

SEQ ID NO: 4725577 - DNA, 25 bp, Homo sapien
tgcagatcagctattttcaggactc

SEQ ID NO: 4725578 - DNA, 25 bp, Homo sapien
atccattttgtagattctgcagatc

SEQ ID NO: 4725579 - DNA, 25 bp, Homo sapien
gatctgcctagtgtgggacacgacc

SEQ ID NO: 4725580 - DNA, 25 bp, Homo sapien
caccattagatctgcctagtgtggg

SEQ ID NO: 4725581 - DNA, 25 bp, Homo sapien
cattagatctgcctagtgtgggaca

SEQ ID NO: 4725582 - DNA, 25 bp, Homo sapien
ttgtggcaccattagatctgcctag

SEQ ID NO: 4725583 - DNA, 25 bp, Homo sapien
gtgagattgatctcccttgcccaac

SEQ ID NO: 4725584 - DNA, 25 bp, Homo sapien
ttgaaagctgtgagattgatctccc

SEQ ID NO: 4725585 - DNA, 25 bp, Homo sapien
gctgtgagattgatctcccttgccc

SEQ ID NO: 4725586 - DNA, 25 bp, Homo sapien
gaaagctgtgagattgatctccctt

SEQ ID NO: 4725587 - DNA, 25 bp, Homo sapien
attttctgcagagacgtgtgtacat

SEQ ID NO: 4725588 - DNA, 25 bp, Homo sapien
tttaagaacactgtaatcggagaca

SEQ ID NO: 4725589 - DNA, 25 bp, Homo sapien
cagccggcccacagctgagggatga

SEQ ID NO: 4725590 - DNA, 25 bp, Homo sapien
tcctgcaccatggtaatctacacag

SEQ ID NO: 4725591 - DNA, 25 bp, Homo sapien
gaaaacggagtctgctttctggagg

SEQ ID NO: 4725592 - DNA, 25 bp, Homo sapien
gaactaggacctgcgatgcccagag

SEQ ID NO: 4725593 - DNA, 25 bp, Homo sapien
ctagaactaggacctgcgatgccca

SEQ ID NO: 4725594 - DNA, 25 bp, Homo sapien
actagaactaggacctgcgatgccc

SEQ ID NO: 4725595 - DNA, 25 bp, Homo sapien
agaactaggacctgcgatgcccaga

SEQ ID NO: 4725596 - DNA, 25 bp, Homo sapien
tgggctttgggcaatatcaatgacc

SEQ ID NO: 4725597 - DNA, 25 bp, Homo sapien
tcaatgacccagtagcttgaaggac

SEQ ID NO: 4725598 - DNA, 25 bp, Homo sapien
gaaatgatctccgtgattgttcgag

SEQ ID NO: 4725599 - DNA, 25 bp, Homo sapien
gagtcttctcggcttgcagttagag

SEQ ID NO: 4725600 - DNA, 25 bp, Homo sapien
caatcatcgttcagtgaaatctgca

SEQ ID NO: 4725601 - DNA, 25 bp, Homo sapien
aatcatcgttcagtgaaatctgcat

SEQ ID NO: 4725602 - DNA, 25 bp, Homo sapien
tcaatcatcgttcagtgaaatctgc

SEQ ID NO: 4725603 - DNA, 25 bp, Homo sapien
ctacagtccgtgaattatccctaag

SEQ ID NO: 4725604 - DNA, 25 bp, Homo sapien
gaattatccctaagtattttgatgc

SEQ ID NO: 4725605 - DNA, 25 bp, Homo sapien
ggataattctgagtgggccatttga

SEQ ID NO: 4725606 - DNA, 25 bp, Homo sapien
tttgatgcataggataattctgagt

SEQ ID NO: 4725607 - DNA, 25 bp, Homo sapien
gttccatctttcatgagtggtccca

SEQ ID NO: 4725608 - DNA, 25 bp, Homo sapien
tgttccatctttcatgagtggtccc

SEQ ID NO: 4725609 - DNA, 25 bp, Homo sapien
acagatcataatcagtggatgcatt

SEQ ID NO: 4725610 - DNA, 25 bp, Homo sapien
ttcaccatagacaaagccatccaga

SEQ ID NO: 4725611 - DNA, 25 bp, Homo sapien
cttcaccatagacaaagccatccag

SEQ ID NO: 4725612 - DNA, 25 bp, Homo sapien
atcataatcagtggatgcattgttc

SEQ ID NO: 4725613 - DNA, 25 bp, Homo sapien
ggtacttgctgctctagactcttct

SEQ ID NO: 4725614 - DNA, 25 bp, Homo sapien
gactactctcatttctcggtcacag

SEQ ID NO: 4725615 - DNA, 25 bp, Homo sapien
catcaggtgccttccggcatagagg

SEQ ID NO: 4725616 - DNA, 25 bp, Homo sapien
tctagactcttctgggactactctc

SEQ ID NO: 4725617 - DNA, 25 bp, Homo sapien
cttcctgtgagacatgttgtcatcg

SEQ ID NO: 4725618 - DNA, 25 bp, Homo sapien
cagaaataccatgaagtggactgac

SEQ ID NO: 4725619 - DNA, 25 bp, Homo sapien
ttcttaatagcttgagtggatcctc

SEQ ID NO: 4725620 - DNA, 25 bp, Homo sapien
tcgaatcccgccaatagagcaggag

SEQ ID NO: 4725621 - DNA, 25 bp, Homo sapien
gtgatgaggtgtgaattcaatctcc

SEQ ID NO: 4725622 - DNA, 25 bp, Homo sapien
tgatgaggtgtgaattcaatctcca

SEQ ID NO: 4725623 - DNA, 25 bp, Homo sapien
acatcaactggaccggcagagggtt

SEQ ID NO: 4725624 - DNA, 25 bp, Homo sapien
gttgtgccagacaacatcaactgga

SEQ ID NO: 4725625 - DNA, 25 bp, Homo sapien
tcattttctgcgctgtgattgccag

SEQ ID NO: 4725626 - DNA, 25 bp, Homo sapien
ttggtgagattgacgaggtcctccg

SEQ ID NO: 4725627 - DNA, 25 bp, Homo sapien
gagataggagcaagcattctgcaat

SEQ ID NO: 4725628 - DNA, 25 bp, Homo sapien
tcgtgggctcgaagaatcagatgca

SEQ ID NO: 4725629 - DNA, 25 bp, Homo sapien
tactctgagtgagtaagagtgagag

SEQ ID NO: 4725630 - DNA, 25 bp, Homo sapien
tcagatgcagtcgatttaacttcat

SEQ ID NO: 4725631 - DNA, 25 bp, Homo sapien
aaaatcctacagtttctatcagtat

SEQ ID NO: 4725632 - DNA, 25 bp, Homo sapien
agtattaaagccagatgttccactg

SEQ ID NO: 4725633 - DNA, 25 bp, Homo sapien
atggaaaatatgcaaggccagagaa

SEQ ID NO: 4725634 - DNA, 25 bp, Homo sapien
taaaacccgatgacaaaggcttctg

SEQ ID NO: 4725635 - DNA, 25 bp, Homo sapien
attcatcagcgcgtgattcatgtgg

SEQ ID NO: 4725636 - DNA, 25 bp, Homo sapien
gttccattcatcagcgcgtgattca

SEQ ID NO: 4725637 - DNA, 25 bp, Homo sapien
ccaggttccattcatcagcgcgtga

SEQ ID NO: 4725638 - DNA, 25 bp, Homo sapien
aggttccattcatcagcgcgtgatt

SEQ ID NO: 4725639 - DNA, 25 bp, Homo sapien
gatccaaagtgcagcaagtgttacc

SEQ ID NO: 4725640 - DNA, 25 bp, Homo sapien
tggctgaagtgatccaaagtgcagc

SEQ ID NO: 4725641 - DNA, 25 bp, Homo sapien
gaagtgatccaaagtgcagcaagtg

SEQ ID NO: 4725642 - DNA, 25 bp, Homo sapien
tccaaagtgcagcaagtgttaccat

SEQ ID NO: 4725643 - DNA, 25 bp, Homo sapien
tggagaatgatgttaatttaaactt

SEQ ID NO: 4725644 - DNA, 25 bp, Homo sapien
ggagaatgatgttaatttaaacttc

SEQ ID NO: 4725645 - DNA, 25 bp, Homo sapien
gagaatgatgttaatttaaacttct

SEQ ID NO: 4725646 - DNA, 25 bp, Homo sapien
gaatgatgttaatttaaacttctgc

SEQ ID NO: 4725647 - DNA, 25 bp, Homo sapien
tcatacttcaatgtgttaaccagtg

SEQ ID NO: 4725648 - DNA, 25 bp, Homo sapien
accagaatttgcatcctatcaagca

SEQ ID NO: 4725649 - DNA, 25 bp, Homo sapien
gtgttaaccagtgagtgaggaacca

SEQ ID NO: 4725650 - DNA, 25 bp, Homo sapien
agctgggatactctggagaaccaga

SEQ ID NO: 4725651 - DNA, 25 bp, Homo sapien
tcaatgcttttctctcttcacaaag

SEQ ID NO: 4725652 - DNA, 25 bp, Homo sapien
cttttctctcttcacaaagaaaaat

SEQ ID NO: 4725653 - DNA, 25 bp, Homo sapien
ttctctcttcacaaagaaaaatact

SEQ ID NO: 4725654 - DNA, 25 bp, Homo sapien
tcacaaagaaaaatactgacaacat

SEQ ID NO: 4725655 - DNA, 25 bp, Homo sapien
tcttcaacgtattgctcaaaggcct

SEQ ID NO: 4725656 - DNA, 25 bp, Homo sapien
gaggtctgcgattctataactgcac

SEQ ID NO: 4725657 - DNA, 25 bp, Homo sapien
cagagttggtcggatcaggcagtca

SEQ ID NO: 4725658 - DNA, 25 bp, Homo sapien
cctttctcagagagtgaggtctgcg

SEQ ID NO: 4725659 - DNA, 25 bp, Homo sapien
ccaacattaatgtaggcagaacagc

SEQ ID NO: 4725660 - DNA, 25 bp, Homo sapien
aacagcaaggagacgatgaggagaa

SEQ ID NO: 4725661 - DNA, 25 bp, Homo sapien
caatttctgggacactactgaccca

SEQ ID NO: 4725662 - DNA, 25 bp, Homo sapien
gttaagggccaagatcaatttctgg

SEQ ID NO: 4725663 - DNA, 25 bp, Homo sapien
agttcagcttgcaacccaggtggga

SEQ ID NO: 4725664 - DNA, 25 bp, Homo sapien
gctttgagaaacctatgcctgggat

SEQ ID NO: 4725665 - DNA, 25 bp, Homo sapien
gatgatctgtttgctaccagggcga

SEQ ID NO: 4725666 - DNA, 25 bp, Homo sapien
aacttgcactgctaggatcccgctg

SEQ ID NO: 4725667 - DNA, 25 bp, Homo sapien
ctaatatgagataaatgtgccaaat

SEQ ID NO: 4725668 - DNA, 25 bp, Homo sapien
cagaaaaatccagagtaagatatat

SEQ ID NO: 4725669 - DNA, 25 bp, Homo sapien
aaattaagactaaagtgaggcagaa

SEQ ID NO: 4725670 - DNA, 25 bp, Homo sapien
cagatgcatcaaattattgctatcc

SEQ ID NO: 4725671 - DNA, 25 bp, Homo sapien
tacattggcttgcaacagaagcctg

SEQ ID NO: 4725672 - DNA, 25 bp, Homo sapien
tccctacattggcttgcaacagaag

SEQ ID NO: 4725673 - DNA, 25 bp, Homo sapien
tggttccctacattggcttgcaaca

SEQ ID NO: 4725674 - DNA, 25 bp, Homo sapien
acattggcttgcaacagaagcctga

SEQ ID NO: 4725675 - DNA, 25 bp, Homo sapien
tgaggctagcctggaagtgaaatac

SEQ ID NO: 4725676 - DNA, 25 bp, Homo sapien
tagggatcattattgccgtcggaat

SEQ ID NO: 4725677 - DNA, 25 bp, Homo sapien
tctgtatcagaaagctccctggcta

SEQ ID NO: 4725678 - DNA, 25 bp, Homo sapien
gagttccacttcagatgaggctagc

SEQ ID NO: 4725679 - DNA, 25 bp, Homo sapien
actgcaaagtactcttgtgggctct

SEQ ID NO: 4725680 - DNA, 25 bp, Homo sapien
tgaactgcaaagtactcttgtgggc

SEQ ID NO: 4725681 - DNA, 25 bp, Homo sapien
ctgaactgcaaagtactcttgtggg

SEQ ID NO: 4725682 - DNA, 25 bp, Homo sapien
gaactgcaaagtactcttgtgggct

SEQ ID NO: 4725683 - DNA, 25 bp, Homo sapien
gcgggaacttttctaatcctgctgg

SEQ ID NO: 4725684 - DNA, 25 bp, Homo sapien
gatcatctcattttggtcacactgc

SEQ ID NO: 4725685 - DNA, 25 bp, Homo sapien
gtgctctgaacaggccaccggttta

SEQ ID NO: 4725686 - DNA, 25 bp, Homo sapien
caccggtttactgcagagcgggaac

SEQ ID NO: 4725687 - DNA, 25 bp, Homo sapien
taatttcttaggaagtgttctgaag

SEQ ID NO: 4725688 - DNA, 25 bp, Homo sapien
gtctggctggaatacaattaatttc

SEQ ID NO: 4725689 - DNA, 25 bp, Homo sapien
tatggagcatggttaatttagagat

SEQ ID NO: 4725690 - DNA, 25 bp, Homo sapien
ggcatcttaatggattgctgaccca

SEQ ID NO: 4725691 - DNA, 25 bp, Homo sapien
tatggcatccgcagaaacacaaaaa

SEQ ID NO: 4725692 - DNA, 25 bp, Homo sapien
tgaagtattcaacccacagaaagga

SEQ ID NO: 4725693 - DNA, 25 bp, Homo sapien
catgtaacacggaaaatagctgata

SEQ ID NO: 4725694 - DNA, 25 bp, Homo sapien
taaacatatcctttggtaacacgcg

SEQ ID NO: 4725695 - DNA, 25 bp, Homo sapien
taaagctatcatgccaccgacaagg

SEQ ID NO: 4725696 - DNA, 25 bp, Homo sapien
tgacatggaaacacctcaacagggc

SEQ ID NO: 4725697 - DNA, 25 bp, Homo sapien
taaagccatagccatgccctgaaga

SEQ ID NO: 4725698 - DNA, 25 bp, Homo sapien
tataaagcagaaaagagggtgacca

SEQ ID NO: 4725699 - DNA, 25 bp, Homo sapien
taaacggaggattaacatcagagca

SEQ ID NO: 4725700 - DNA, 25 bp, Homo sapien
ccaatatggagataggcagacgatc

SEQ ID NO: 4725701 - DNA, 25 bp, Homo sapien
gtgaactccttctgggattacctca

SEQ ID NO: 4725702 - DNA, 25 bp, Homo sapien
ctatagacactttccgtaaacggag

SEQ ID NO: 4725703 - DNA, 25 bp, Homo sapien
cccaatgtatcctcactggtactgg

SEQ ID NO: 4725704 - DNA, 25 bp, Homo sapien
tactggggtataaatgcctgccgtt

SEQ ID NO: 4725705 - DNA, 25 bp, Homo sapien
tcatggtccagtcacaaatcctcag

SEQ ID NO: 4725706 - DNA, 25 bp, Homo sapien
gcctgccgttttgattcatggtcca

SEQ ID NO: 4725707 - DNA, 25 bp, Homo sapien
tatggatcgagcagtactacagttt

SEQ ID NO: 4725708 - DNA, 25 bp, Homo sapien
cctagcagtcagatatggatcgagc

SEQ ID NO: 4725709 - DNA, 25 bp, Homo sapien
cagtcagatatggatcgagcagtac

SEQ ID NO: 4725710 - DNA, 25 bp, Homo sapien
ctgtcaattgaaacctagcagtcag

SEQ ID NO: 4725711 - DNA, 25 bp, Homo sapien
gatagcgttttacgtcaagctgtca

SEQ ID NO: 4725712 - DNA, 25 bp, Homo sapien
caaaccagggaatgacaaaagacag

SEQ ID NO: 4725713 - DNA, 25 bp, Homo sapien
tagcctgcttcctgactgtattgaa

SEQ ID NO: 4725714 - DNA, 25 bp, Homo sapien
tacccagaagtcatgtgatagcgtt

SEQ ID NO: 4725715 - DNA, 25 bp, Homo sapien
gctgaagcccaagcaccaataaaat

SEQ ID NO: 4725716 - DNA, 25 bp, Homo sapien
tagcattatatagtcatgcaagaga

SEQ ID NO: 4725717 - DNA, 25 bp, Homo sapien
taatagcattatatagtcatgcaag

SEQ ID NO: 4725718 - DNA, 25 bp, Homo sapien
cactagaccagtaattgaaattcaa

SEQ ID NO: 4725719 - DNA, 25 bp, Homo sapien
gaccttagactcaaatgtaatggtg

SEQ ID NO: 4725720 - DNA, 25 bp, Homo sapien
caggccactgattcattagctctta

SEQ ID NO: 4725721 - DNA, 25 bp, Homo sapien
caatggcttgtttgaatggtgaact

SEQ ID NO: 4725722 - DNA, 25 bp, Homo sapien
caagaagcttcttagctgcaaactt

SEQ ID NO: 4725723 - DNA, 25 bp, Homo sapien
tccaacactctgattgatagttccc

SEQ ID NO: 4725724 - DNA, 25 bp, Homo sapien
cattgcctatcataacgaatttgca

SEQ ID NO: 4725725 - DNA, 25 bp, Homo sapien
gaaacgtggttccttcattgcctat

SEQ ID NO: 4725726 - DNA, 25 bp, Homo sapien
cgaatttgcacaatgtgttcgtgaa

SEQ ID NO: 4725727 - DNA, 25 bp, Homo sapien
tctcagcagagactaatcagttcag

SEQ ID NO: 4725728 - DNA, 25 bp, Homo sapien
tcagtttgccaaagcaggacccatg

SEQ ID NO: 4725729 - DNA, 25 bp, Homo sapien
actagtattcccaagcagttagcaa

SEQ ID NO: 4725730 - DNA, 25 bp, Homo sapien
gaatgaagctccaactgaagttctg

SEQ ID NO: 4725731 - DNA, 25 bp, Homo sapien
taaagctgccataggttagggtagt

SEQ ID NO: 4725732 - DNA, 25 bp, Homo sapien
caccaagcacagttgaggtaggtca

SEQ ID NO: 4725733 - DNA, 25 bp, Homo sapien
tctgcatgcctcaaaactggagttc

SEQ ID NO: 4725734 - DNA, 25 bp, Homo sapien
gaactgaagaatgtacctggtgacg

SEQ ID NO: 4725735 - DNA, 25 bp, Homo sapien
tcggaactgtttagaattacgtctc

SEQ ID NO: 4725736 - DNA, 25 bp, Homo sapien
cctgtaactagaatcgtgggatttc

SEQ ID NO: 4725737 - DNA, 25 bp, Homo sapien
gagagcagcaaacatatgcatcata

SEQ ID NO: 4725738 - DNA, 25 bp, Homo sapien
gatttctacattggtatggtccatg

SEQ ID NO: 4725739 - DNA, 25 bp, Homo sapien
accgtcacacctgggtgaaacttgc

SEQ ID NO: 4725740 - DNA, 25 bp, Homo sapien
caccgtcacacctgggtgaaacttg

SEQ ID NO: 4725741 - DNA, 25 bp, Homo sapien
agtcccacatatcgattggcttgag

SEQ ID NO: 4725742 - DNA, 25 bp, Homo sapien
ttagtcccacatatcgattggcttg

SEQ ID NO: 4725743 - DNA, 25 bp, Homo sapien
ggatgggtctcttgggcttagtccc

SEQ ID NO: 4725744 - DNA, 25 bp, Homo sapien
ggtctcttgggcttagtcccacata

SEQ ID NO: 4725745 - DNA, 25 bp, Homo sapien
gttgctgtaggtgaagctgcctcac

SEQ ID NO: 4725746 - DNA, 25 bp, Homo sapien
caggagtgaaatggccaggcacttt

SEQ ID NO: 4725747 - DNA, 25 bp, Homo sapien
tcacaggtcgcactgcactgggatg

SEQ ID NO: 4725748 - DNA, 25 bp, Homo sapien
ctactacttgaccactgccgttagg

SEQ ID NO: 4725749 - DNA, 25 bp, Homo sapien
gggtttagtatctgtcatgctcagg

SEQ ID NO: 4725750 - DNA, 25 bp, Homo sapien
tctagctctcttacacacaggtgtg

SEQ ID NO: 4725751 - DNA, 25 bp, Homo sapien
ggagatcaaatacaacgaattctgg

SEQ ID NO: 4725752 - DNA, 25 bp, Homo sapien
gctgagctacgtttgtccttacacc

SEQ ID NO: 4725753 - DNA, 25 bp, Homo sapien
gaagcagaggacaagcaaatgagca

SEQ ID NO: 4725754 - DNA, 25 bp, Homo sapien
gaaatgtgtaacactaagggcctga

SEQ ID NO: 4725755 - DNA, 25 bp, Homo sapien
taacagtgcctaattaagacatcag

SEQ ID NO: 4725756 - DNA, 25 bp, Homo sapien
taaaatcagaccttgtgtgcactgt

SEQ ID NO: 4725757 - DNA, 25 bp, Homo sapien
gcactgttcccagctgagtctagca

SEQ ID NO: 4725758 - DNA, 25 bp, Homo sapien
ccaaagggtcctggatgcgttgtta

SEQ ID NO: 4725759 - DNA, 25 bp, Homo sapien
caattattgatagccccaggtctgg

SEQ ID NO: 4725760 - DNA, 25 bp, Homo sapien
gaatgttccaccgtagtaatgacgg

SEQ ID NO: 4725761 - DNA, 25 bp, Homo sapien
gaatccccaaaaccactgcacaatg

SEQ ID NO: 4725762 - DNA, 25 bp, Homo sapien
tctgtcccatctcccttaggtgcta

SEQ ID NO: 4725763 - DNA, 25 bp, Homo sapien
ccatctcccttaggtgctaatctta

SEQ ID NO: 4725764 - DNA, 25 bp, Homo sapien
gaattagatctgtcccatctccctt

SEQ ID NO: 4725765 - DNA, 25 bp, Homo sapien
ccttaggtgctaatcttattttctc

SEQ ID NO: 4725766 - DNA, 25 bp, Homo sapien
tgggtcataagaaggtacatagttc

SEQ ID NO: 4725767 - DNA, 25 bp, Homo sapien
ttgtggactggatgggtcataagaa

SEQ ID NO: 4725768 - DNA, 25 bp, Homo sapien
aaggatagcttgtgttggaaatggc

SEQ ID NO: 4725769 - DNA, 25 bp, Homo sapien
catagttcttcagagtatcctgagg

SEQ ID NO: 4725770 - DNA, 25 bp, Homo sapien
ctctgtgagtggttacaaaatcagt

SEQ ID NO: 4725771 - DNA, 25 bp, Homo sapien
taaccaagctctcctaaatcaacag

SEQ ID NO: 4725772 - DNA, 25 bp, Homo sapien
tattctcaacaccagtacggctaac

SEQ ID NO: 4725773 - DNA, 25 bp, Homo sapien
aagattgactcatcagctggttacc

SEQ ID NO: 4725774 - DNA, 25 bp, Homo sapien
aattgtctggtcatggtataaatgc

SEQ ID NO: 4725775 - DNA, 25 bp, Homo sapien
gaaagacaataactaatacaacatc

SEQ ID NO: 4725776 - DNA, 25 bp, Homo sapien
cactttgtctcataagtccagagca

SEQ ID NO: 4725777 - DNA, 25 bp, Homo sapien
tcctacctggcaattgtttagaagg

SEQ ID NO: 4725778 - DNA, 25 bp, Homo sapien
gagaaagagtgtaatcgtatgatca

SEQ ID NO: 4725779 - DNA, 25 bp, Homo sapien
gatgtattgcttacctctcccaaaa

SEQ ID NO: 4725780 - DNA, 25 bp, Homo sapien
gggacctatttatgggatgtattgc

SEQ ID NO: 4725781 - DNA, 25 bp, Homo sapien
cacatgcaatgtggacaatgttcaa

SEQ ID NO: 4725782 - DNA, 25 bp, Homo sapien
ttttaaataagtgtccatgtaatct

SEQ ID NO: 4725783 - DNA, 25 bp, Homo sapien
taaataagtgtccatgtaatcttcc

SEQ ID NO: 4725784 - DNA, 25 bp, Homo sapien
ataagtgtccatgtaatcttcctac

SEQ ID NO: 4725785 - DNA, 25 bp, Homo sapien
tcaggacctctaggggtaaggcacc

SEQ ID NO: 4725786 - DNA, 25 bp, Homo sapien
tgtaggtggcctgataccactgggt

SEQ ID NO: 4725787 - DNA, 25 bp, Homo sapien
taatttggccttaatagttctggag

SEQ ID NO: 4725788 - DNA, 25 bp, Homo sapien
cacatctatgggcaacctggcactg

SEQ ID NO: 4725789 - DNA, 25 bp, Homo sapien
cactgtgcttgcatgagctgtaggt

SEQ ID NO: 4725790 - DNA, 25 bp, Homo sapien
tctgagaccgagtcctggatcactt

SEQ ID NO: 4725791 - DNA, 25 bp, Homo sapien
cgaagatatttgtggatccttggct

SEQ ID NO: 4725792 - DNA, 25 bp, Homo sapien
ggcttcatctctggccagacgaaga

SEQ ID NO: 4725793 - DNA, 25 bp, Homo sapien
cccaacaggtttttcagtacacaca

SEQ ID NO: 4725794 - DNA, 25 bp, Homo sapien
gcccctcaccatatgggttgagaaa

SEQ ID NO: 4725795 - DNA, 25 bp, Homo sapien
gagaaaatatggttgccatagctct

SEQ ID NO: 4725796 - DNA, 25 bp, Homo sapien
ttctcctctatgcttgaaactcctc

SEQ ID NO: 4725797 - DNA, 25 bp, Homo sapien
ggttaggccctacagacaagaagga

SEQ ID NO: 4725798 - DNA, 25 bp, Homo sapien
cagtcttggggaagaatcctgtgga

SEQ ID NO: 4725799 - DNA, 25 bp, Homo sapien
actccaggtattccgggatggtggt

SEQ ID NO: 4725800 - DNA, 25 bp, Homo sapien
gtgtgcaactccaggtattccggga

SEQ ID NO: 4725801 - DNA, 25 bp, Homo sapien
acaatggcttttcaggcttcttcat

SEQ ID NO: 4725802 - DNA, 25 bp, Homo sapien
tgagcacataatactaaactggcat

SEQ ID NO: 4725803 - DNA, 25 bp, Homo sapien
ggttctgtcagcatgctatcacact

SEQ ID NO: 4725804 - DNA, 25 bp, Homo sapien
cctaaatatagcttgagagtccagt

SEQ ID NO: 4725805 - DNA, 25 bp, Homo sapien
gccctctggcttaatgcgtttgaca

SEQ ID NO: 4725806 - DNA, 25 bp, Homo sapien
cattagaagatggacaagaacaacc

SEQ ID NO: 4725807 - DNA, 25 bp, Homo sapien
cagggtcttcagaattaaagtgaca

SEQ ID NO: 4725808 - DNA, 25 bp, Homo sapien
cacagggaagtgtgtctaaagaaca

SEQ ID NO: 4725809 - DNA, 25 bp, Homo sapien
tgtgcacattacgaagtcttcaggg

SEQ ID NO: 4725810 - DNA, 25 bp, Homo sapien
cttctgaataacgcatccattccca

SEQ ID NO: 4725811 - DNA, 25 bp, Homo sapien
ccattaaaatcttctccagaagaat

SEQ ID NO: 4725812 - DNA, 25 bp, Homo sapien
gaataacgcatccattcccacacat

SEQ ID NO: 4725813 - DNA, 25 bp, Homo sapien
tctgaataacgcatccattcccaca

SEQ ID NO: 4725814 - DNA, 25 bp, Homo sapien
ttggctccctgcaacgctccataga

SEQ ID NO: 4725815 - DNA, 25 bp, Homo sapien
ggagcaggcggatctaattgaatca

SEQ ID NO: 4725816 - DNA, 25 bp, Homo sapien
ccctgcaacgctccatagagaggag

SEQ ID NO: 4725817 - DNA, 25 bp, Homo sapien
gaggagcaggcggatctaattgaat

SEQ ID NO: 4725818 - DNA, 25 bp, Homo sapien
gacttggttccatattttcatctat

SEQ ID NO: 4725819 - DNA, 25 bp, Homo sapien
tcatctatggatatagttttgggtc

SEQ ID NO: 4725820 - DNA, 25 bp, Homo sapien
tgatctctttcgtgccatgttcgac

SEQ ID NO: 4725821 - DNA, 25 bp, Homo sapien
tggagaggggtaaaagtctcctgta

SEQ ID NO: 4725822 - DNA, 25 bp, Homo sapien
taagaaaggtgactatccagaacaa

SEQ ID NO: 4725823 - DNA, 25 bp, Homo sapien
cccaccaataaagcagacaattatg

SEQ ID NO: 4725824 - DNA, 25 bp, Homo sapien
gtagtacactgtggctcaatcttgg

SEQ ID NO: 4725825 - DNA, 25 bp, Homo sapien
tacccatagtggttgatatacttct

SEQ ID NO: 4725826 - DNA, 25 bp, Homo sapien
ttcatgtcatgatagtatggttggc

SEQ ID NO: 4725827 - DNA, 25 bp, Homo sapien
gacctctgaagattgacccccgagt

SEQ ID NO: 4725828 - DNA, 25 bp, Homo sapien
catgatagtatggttggcttgggat

SEQ ID NO: 4725829 - DNA, 25 bp, Homo sapien
gattgacccccgagttcatgtcatg

SEQ ID NO: 4725830 - DNA, 25 bp, Homo sapien
tgaattgtccaagaagtctgcgaaa

SEQ ID NO: 4725831 - DNA, 25 bp, Homo sapien
tgtccaagaagtctgcgaaaagcca

SEQ ID NO: 4725832 - DNA, 25 bp, Homo sapien
agaagtctgcgaaaagccatagctg

SEQ ID NO: 4725833 - DNA, 25 bp, Homo sapien
caagaagtctgcgaaaagccatagc

SEQ ID NO: 4725834 - DNA, 25 bp, Homo sapien
caaaattctagagcccctgagatgc

SEQ ID NO: 4725835 - DNA, 25 bp, Homo sapien
ggcttgaggcacaccaaaggttaaa

SEQ ID NO: 4725836 - DNA, 25 bp, Homo sapien
ggtaagaaatcccacagtaaccgca

SEQ ID NO: 4725837 - DNA, 25 bp, Homo sapien
tttatcacagagaagtaaccacgga

SEQ ID NO: 4725838 - DNA, 25 bp, Homo sapien
tggtaagtcaggcatatttcttccc

SEQ ID NO: 4725839 - DNA, 25 bp, Homo sapien
tttcaaatgttggatacctttggat

SEQ ID NO: 4725840 - DNA, 25 bp, Homo sapien
acaaagtgctactggtaagtcaggc

SEQ ID NO: 4725841 - DNA, 25 bp, Homo sapien
gatacctttggatatcacatattga

SEQ ID NO: 4725842 - DNA, 25 bp, Homo sapien
ttctggatactcttacaagttctga

SEQ ID NO: 4725843 - DNA, 25 bp, Homo sapien
tctgatacattgaagactccagatt

SEQ ID NO: 4725844 - DNA, 25 bp, Homo sapien
ggatactcttacaagttctgataca

SEQ ID NO: 4725845 - DNA, 25 bp, Homo sapien
gaagactccagattttacaaaacta

SEQ ID NO: 4725846 - DNA, 25 bp, Homo sapien
ctctttctacacactctagtctcat

SEQ ID NO: 4725847 - DNA, 25 bp, Homo sapien
ttctcagtggctataaagactccca

SEQ ID NO: 4725848 - DNA, 25 bp, Homo sapien
tttgtcatccaatgggaacaggcct

SEQ ID NO: 4725849 - DNA, 25 bp, Homo sapien
tattctgcatagttccaggagctgt

SEQ ID NO: 4725850 - DNA, 25 bp, Homo sapien
aacaataacagagggacacaatggc

SEQ ID NO: 4725851 - DNA, 25 bp, Homo sapien
ggtcaagtgaactctaagaacactg

SEQ ID NO: 4725852 - DNA, 25 bp, Homo sapien
ttcatggtcaagtgaactctaagaa

SEQ ID NO: 4725853 - DNA, 25 bp, Homo sapien
cattcatggtcaagtgaactctaag

SEQ ID NO: 4725854 - DNA, 25 bp, Homo sapien
gtcaagtgaactctaagaacactgt

SEQ ID NO: 4725855 - DNA, 25 bp, Homo sapien
tggcttacttgaggtacacccaata

SEQ ID NO: 4725856 - DNA, 25 bp, Homo sapien
ggttcccagaggtgttgccacacta

SEQ ID NO: 4725857 - DNA, 25 bp, Homo sapien
tgttaagtccatgttattcccggta

SEQ ID NO: 4725858 - DNA, 25 bp, Homo sapien
gcccagccagcgacttaaagaattt

SEQ ID NO: 4725859 - DNA, 25 bp, Homo sapien
ggatcgtgccttctcaagacacaaa

SEQ ID NO: 4725860 - DNA, 25 bp, Homo sapien
gaaagtgttggtattcaaggtgatc

SEQ ID NO: 4725861 - DNA, 25 bp, Homo sapien
aattttctcatacatggatcgtgcc

SEQ ID NO: 4725862 - DNA, 25 bp, Homo sapien
gtataacaattcaagcagcaaagtg

SEQ ID NO: 4725863 - DNA, 25 bp, Homo sapien
tcacatcttgtcccgatcatacctg

SEQ ID NO: 4725864 - DNA, 25 bp, Homo sapien
cacatcttgtcccgatcatacctgc

SEQ ID NO: 4725865 - DNA, 25 bp, Homo sapien
tccaacaatgtcagattgcaaatgt

SEQ ID NO: 4725866 - DNA, 25 bp, Homo sapien
caatgtcagattgcaaatgtcctgg

SEQ ID NO: 4725867 - DNA, 25 bp, Homo sapien
acaatgtcagattgcaaatgtcctg

SEQ ID NO: 4725868 - DNA, 25 bp, Homo sapien
caacaatgtcagattgcaaatgtcc

SEQ ID NO: 4725869 - DNA, 25 bp, Homo sapien
tcttggcaggatcattgtggcttgg

SEQ ID NO: 4725870 - DNA, 25 bp, Homo sapien
ctggaggattcttggcaggatcatt

SEQ ID NO: 4725871 - DNA, 25 bp, Homo sapien
ggcaggatcattgtggcttggactt

SEQ ID NO: 4725872 - DNA, 25 bp, Homo sapien
gattcttggcaggatcattgtggct

SEQ ID NO: 4725873 - DNA, 25 bp, Homo sapien
tgcgagttgctttgtaatcttcttt

SEQ ID NO: 4725874 - DNA, 25 bp, Homo sapien
tagcatttaagttttgtcgccccaa

SEQ ID NO: 4725875 - DNA, 25 bp, Homo sapien
cctaagcagaggcagagattctgtc

SEQ ID NO: 4725876 - DNA, 25 bp, Homo sapien
taaattgcatactcctaagcagagg

SEQ ID NO: 4725877 - DNA, 25 bp, Homo sapien
aactggtacaatatgggccactttc

SEQ ID NO: 4725878 - DNA, 25 bp, Homo sapien
caaggcaagattcagtgacttataa

SEQ ID NO: 4725879 - DNA, 25 bp, Homo sapien
gacttataaattaggagatcaatct

SEQ ID NO: 4725880 - DNA, 25 bp, Homo sapien
ggagatcaatcttcttcgttctaca

SEQ ID NO: 4725881 - DNA, 25 bp, Homo sapien
cagtagataccagccagttgatgaa

SEQ ID NO: 4725882 - DNA, 25 bp, Homo sapien
gaagtctttgaggaacaaggctgct

SEQ ID NO: 4725883 - DNA, 25 bp, Homo sapien
gctgctaagagttgtgagctgccca

SEQ ID NO: 4725884 - DNA, 25 bp, Homo sapien
gaggagtccactgctcttcaaggct

SEQ ID NO: 4725885 - DNA, 25 bp, Homo sapien
ggaaagattttgatgcagtagagaa

SEQ ID NO: 4725886 - DNA, 25 bp, Homo sapien
ttttatcttcctcgatctcaatctc

SEQ ID NO: 4725887 - DNA, 25 bp, Homo sapien
attttatcttcctcgatctcaatct

SEQ ID NO: 4725888 - DNA, 25 bp, Homo sapien
cattttatcttcctcgatctcaatc

SEQ ID NO: 4725889 - DNA, 25 bp, Homo sapien
ttaaaagcggtcaatctctcgtggc

SEQ ID NO: 4725890 - DNA, 25 bp, Homo sapien
gatcaaacggcttgtccaaagttgc

SEQ ID NO: 4725891 - DNA, 25 bp, Homo sapien
tacctaaggagtgagcagtttttcc

SEQ ID NO: 4725892 - DNA, 25 bp, Homo sapien
tatatggacagcctattcagacaca

SEQ ID NO: 4725893 - DNA, 25 bp, Homo sapien
aaagcccagctaattggcaactcac

SEQ ID NO: 4725894 - DNA, 25 bp, Homo sapien
ggcaggcagtagtgcggcagggtga

SEQ ID NO: 4725895 - DNA, 25 bp, Homo sapien
ttggcaactcacagccggctacagt

SEQ ID NO: 4725896 - DNA, 25 bp, Homo sapien
ggcagggtgaaccacctcatccctg

SEQ ID NO: 4725897 - DNA, 25 bp, Homo sapien
tacaaagtttatctccactgccaag

SEQ ID NO: 4725898 - DNA, 25 bp, Homo sapien
caagagtgtcttggcacggagcgac

SEQ ID NO: 4725899 - DNA, 25 bp, Homo sapien
aagtatctgcataaacccggttaat

SEQ ID NO: 4725900 - DNA, 25 bp, Homo sapien
aaagctaccctttccattcacggca

SEQ ID NO: 4725901 - DNA, 25 bp, Homo sapien
ggtgtactcctgtaatcatcattgg

SEQ ID NO: 4725902 - DNA, 25 bp, Homo sapien
gactgttccgcaagtttaagctcag

SEQ ID NO: 4725903 - DNA, 25 bp, Homo sapien
ggttgagagacacattaggcctggt

SEQ ID NO: 4725904 - DNA, 25 bp, Homo sapien
cataatgctgacacaaactggtggt

SEQ ID NO: 4725905 - DNA, 25 bp, Homo sapien
tcatgtgacacttaaggctatgctg

SEQ ID NO: 4725906 - DNA, 25 bp, Homo sapien
cttaaggctatgctgactttgccaa

SEQ ID NO: 4725907 - DNA, 25 bp, Homo sapien
tgccaaaattgctttcagccaaatt

SEQ ID NO: 4725908 - DNA, 25 bp, Homo sapien
ggctatgctgactttgccaaaattg

SEQ ID NO: 4725909 - DNA, 25 bp, Homo sapien
ctttccctccgcaaagcacaaagga

SEQ ID NO: 4725910 - DNA, 25 bp, Homo sapien
gatccccatttccaatgcactggtg

SEQ ID NO: 4725911 - DNA, 25 bp, Homo sapien
gcactggtgctctcagatcttttga

SEQ ID NO: 4725912 - DNA, 25 bp, Homo sapien
taaattagaaggtagcaagttgtcc

SEQ ID NO: 4725913 - DNA, 25 bp, Homo sapien
gattcgtgctctaaaagctcatcgg

SEQ ID NO: 4725914 - DNA, 25 bp, Homo sapien
tatgccaaatgggagatcaagtact

SEQ ID NO: 4725915 - DNA, 25 bp, Homo sapien
ggcctggctcctaaatataaactgg

SEQ ID NO: 4725916 - DNA, 25 bp, Homo sapien
gatcaggttgttacaccagcacgca

SEQ ID NO: 4725917 - DNA, 25 bp, Homo sapien
ccactgggcccagacttgttttgct

SEQ ID NO: 4725918 - DNA, 25 bp, Homo sapien
accactgggcccagacttgttttgc

SEQ ID NO: 4725919 - DNA, 25 bp, Homo sapien
aaccactgggcccagacttgttttg

SEQ ID NO: 4725920 - DNA, 25 bp, Homo sapien
cactgggcccagacttgttttgcta

SEQ ID NO: 4725921 - DNA, 25 bp, Homo sapien
taaaacttgggaggcaaactgatag

SEQ ID NO: 4725922 - DNA, 25 bp, Homo sapien
agtattgccagccccgaccttgttc

SEQ ID NO: 4725923 - DNA, 25 bp, Homo sapien
ttcacactaattcactccatctcat

SEQ ID NO: 4725924 - DNA, 25 bp, Homo sapien
gataaaggcgatctgatgttcaaag

SEQ ID NO: 4725925 - DNA, 25 bp, Homo sapien
cattgtggactcatgactcagtgct

SEQ ID NO: 4725926 - DNA, 25 bp, Homo sapien
gaacagcatcgagtacctaagagag

SEQ ID NO: 4725927 - DNA, 25 bp, Homo sapien
tgagggcttacatccgcctggtcca

SEQ ID NO: 4725928 - DNA, 25 bp, Homo sapien
caaacagacagaagggtgcatgcgc

SEQ ID NO: 4725929 - DNA, 25 bp, Homo sapien
tgatatccatgtgatcaatgaggca

SEQ ID NO: 4725930 - DNA, 25 bp, Homo sapien
tgagagaagcttcgaaacaggaaat

SEQ ID NO: 4725931 - DNA, 25 bp, Homo sapien
aacagtgaaagataccctccagagg

SEQ ID NO: 4725932 - DNA, 25 bp, Homo sapien
caatgaggcataaccacaagaacct

SEQ ID NO: 4725933 - DNA, 25 bp, Homo sapien
cttccttcccacctaaactgccctg

SEQ ID NO: 4725934 - DNA, 25 bp, Homo sapien
tccttcccacctaaactgccctgcc

SEQ ID NO: 4725935 - DNA, 25 bp, Homo sapien
ttccttcccacctaaactgccctgc

SEQ ID NO: 4725936 - DNA, 25 bp, Homo sapien
ccaggaacgtctgcagggactagtg

SEQ ID NO: 4725937 - DNA, 25 bp, Homo sapien
gaatataagccttcactgtggaaag

SEQ ID NO: 4725938 - DNA, 25 bp, Homo sapien
tctttgcccgagaagtaagggaaca

SEQ ID NO: 4725939 - DNA, 25 bp, Homo sapien
tagtttgggtgtctcgtgatcctcc

SEQ ID NO: 4725940 - DNA, 25 bp, Homo sapien
cacgcaggatttttagctctaacag

SEQ ID NO: 4725941 - DNA, 25 bp, Homo sapien
tttagggcctagcaatagacagtgg

SEQ ID NO: 4725942 - DNA, 25 bp, Homo sapien
tccggaacaaggcaggaatatcatc

SEQ ID NO: 4725943 - DNA, 25 bp, Homo sapien
taatgtccccaggtagctaatgtca

SEQ ID NO: 4725944 - DNA, 25 bp, Homo sapien
tcagacaagtaccttaaagctacaa

SEQ ID NO: 4725945 - DNA, 25 bp, Homo sapien
ttagcttatgaaagcgccaaccatg

SEQ ID NO: 4725946 - DNA, 25 bp, Homo sapien
tatgaaagcgccaaccatgcttcca

SEQ ID NO: 4725947 - DNA, 25 bp, Homo sapien
aagctacaagctttaaagtattagc

SEQ ID NO: 4725948 - DNA, 25 bp, Homo sapien
tatggcctagagcacaagaagggcc

SEQ ID NO: 4725949 - DNA, 25 bp, Homo sapien
aaaacactgtactcaaggcacctag

SEQ ID NO: 4725950 - DNA, 25 bp, Homo sapien
tatagtcctagaacatggtgcacac

SEQ ID NO: 4725951 - DNA, 25 bp, Homo sapien
caacaatgcaccagttccagaggtc

SEQ ID NO: 4725952 - DNA, 25 bp, Homo sapien
gctgtagctgttgtggtggtcaaac

SEQ ID NO: 4725953 - DNA, 25 bp, Homo sapien
aactgtctgagcagtgtggacttcc

SEQ ID NO: 4725954 - DNA, 25 bp, Homo sapien
taagaccaataatgtgccagctatg

SEQ ID NO: 4725955 - DNA, 25 bp, Homo sapien
gaaccttttgatgactcgtattaga

SEQ ID NO: 4725956 - DNA, 25 bp, Homo sapien
tacttttgtcggactccaggaagga

SEQ ID NO: 4725957 - DNA, 25 bp, Homo sapien
tggattggcccaaaggacctgcttt

SEQ ID NO: 4725958 - DNA, 25 bp, Homo sapien
tcgagcatatctgaactggccactg

SEQ ID NO: 4725959 - DNA, 25 bp, Homo sapien
taacatggaggtgtgccagtcgagc

SEQ ID NO: 4725960 - DNA, 25 bp, Homo sapien
catttcagcccgtaataaggcagtg

SEQ ID NO: 4725961 - DNA, 25 bp, Homo sapien
aaagcagtcacatctcaaacctttt

SEQ ID NO: 4725962 - DNA, 25 bp, Homo sapien
gtaataaggcagtgtagttgagtcc

SEQ ID NO: 4725963 - DNA, 25 bp, Homo sapien
tgtttgaagataatatataccattc

SEQ ID NO: 4725964 - DNA, 25 bp, Homo sapien
taaacacaggccacctatttgatgg

SEQ ID NO: 4725965 - DNA, 25 bp, Homo sapien
cagtttggcatacaggtgatttcct

SEQ ID NO: 4725966 - DNA, 25 bp, Homo sapien
tccttctgcaagtcaaagcacagcg

SEQ ID NO: 4725967 - DNA, 25 bp, Homo sapien
agggcactaagatgcactgcaccgg

SEQ ID NO: 4725968 - DNA, 25 bp, Homo sapien
attaaagtgagaagaatcatttctg

SEQ ID NO: 4725969 - DNA, 25 bp, Homo sapien
ccccacaccaggattaaagtgagaa

SEQ ID NO: 4725970 - DNA, 25 bp, Homo sapien
ctccccacaccaggattaaagtgag

SEQ ID NO: 4725971 - DNA, 25 bp, Homo sapien
gattaaagtgagaagaatcatttct

SEQ ID NO: 4725972 - DNA, 25 bp, Homo sapien
tgagaacaaacccaaagacctactg

SEQ ID NO: 4725973 - DNA, 25 bp, Homo sapien
gctacaacggaggtgttacagactg

SEQ ID NO: 4725974 - DNA, 25 bp, Homo sapien
gaaaggtatatctaggtctcagcaa

SEQ ID NO: 4725975 - DNA, 25 bp, Homo sapien
catgagacgctctgcaagatcagtc

SEQ ID NO: 4725976 - DNA, 25 bp, Homo sapien
ttgcctcctctgtactccaatagct

SEQ ID NO: 4725977 - DNA, 25 bp, Homo sapien
ctctgtactccaatagctcttttta

SEQ ID NO: 4725978 - DNA, 25 bp, Homo sapien
caagctcatttcttgagtcatgaga

SEQ ID NO: 4725979 - DNA, 25 bp, Homo sapien
gtatctgtgtggcattgtctactat

SEQ ID NO: 4725980 - DNA, 25 bp, Homo sapien
gctactaatcaacagagagggcaat

SEQ ID NO: 4725981 - DNA, 25 bp, Homo sapien
tatacatctgtcaggctattgagcg

SEQ ID NO: 4725982 - DNA, 25 bp, Homo sapien
caccctcaaatggagttatggcaag

SEQ ID NO: 4725983 - DNA, 25 bp, Homo sapien
tactgctccccgaccaggatttagt

SEQ ID NO: 4725984 - DNA, 25 bp, Homo sapien
ctacacagaggtccgtctgtcctcg

SEQ ID NO: 4725985 - DNA, 25 bp, Homo sapien
gtttccccagacacattgacacaca

SEQ ID NO: 4725986 - DNA, 25 bp, Homo sapien
tggtcaggcacgctacacagaggtc

SEQ ID NO: 4725987 - DNA, 25 bp, Homo sapien
gagacaagctggtcaggcacgctac

SEQ ID NO: 4725988 - DNA, 25 bp, Homo sapien
tgtttttctaatagctgctgctctg

SEQ ID NO: 4725989 - DNA, 25 bp, Homo sapien
catggtggaccactttgcaaaagtc

SEQ ID NO: 4725990 - DNA, 25 bp, Homo sapien
gctaaggtcattaaaacagtctcat

SEQ ID NO: 4725991 - DNA, 25 bp, Homo sapien
gcaaaagtccaaattacaagtgatg

SEQ ID NO: 4725992 - DNA, 25 bp, Homo sapien
tgtacaatcagtaacagtagagatg

SEQ ID NO: 4725993 - DNA, 25 bp, Homo sapien
gaaagctccgcaaatctaactatat

SEQ ID NO: 4725994 - DNA, 25 bp, Homo sapien
attgcagtcacacagggttccctcc

SEQ ID NO: 4725995 - DNA, 25 bp, Homo sapien
ttgtaaattactcggacaaggccat

SEQ ID NO: 4725996 - DNA, 25 bp, Homo sapien
actgcaagtgaccatgaccctctca

SEQ ID NO: 4725997 - DNA, 25 bp, Homo sapien
cacatggtcgaaaatggctgcaaac

SEQ ID NO: 4725998 - DNA, 25 bp, Homo sapien
gctgcttcaatcactatatggcgta

SEQ ID NO: 4725999 - DNA, 25 bp, Homo sapien
tctgtttgggacactttgacatctg

SEQ ID NO: 4726000 - DNA, 25 bp, Homo sapien
ttagctagtcccaggcacatggtcg

SEQ ID NO: 4726001 - DNA, 25 bp, Homo sapien
gaaattacgcctcatgggccttcca

SEQ ID NO: 4726002 - DNA, 25 bp, Homo sapien
gggccttccacaacaggagacgcaa

SEQ ID NO: 4726003 - DNA, 25 bp, Homo sapien
tcagaagtcccttcaacaaagctgt

SEQ ID NO: 4726004 - DNA, 25 bp, Homo sapien
tctctgtaactggaacacccaaggt

SEQ ID NO: 4726005 - DNA, 25 bp, Homo sapien
taattcctgcaagatctaagccccg

SEQ ID NO: 4726006 - DNA, 25 bp, Homo sapien
ttttgctgcatgtacggaaacaagg

SEQ ID NO: 4726007 - DNA, 25 bp, Homo sapien
tggaacttgactatgctggcactct

SEQ ID NO: 4726008 - DNA, 25 bp, Homo sapien
gaagagagccctcgctggaacttga

SEQ ID NO: 4726009 - DNA, 25 bp, Homo sapien
tgaaaagcatttaaattccttgatc

SEQ ID NO: 4726010 - DNA, 25 bp, Homo sapien
agcatttaaattccttgatcttgtg

SEQ ID NO: 4726011 - DNA, 25 bp, Homo sapien
atttaaattccttgatcttgtgaac

SEQ ID NO: 4726012 - DNA, 25 bp, Homo sapien
aaattccttgatcttgtgaacattc

SEQ ID NO: 4726013 - DNA, 25 bp, Homo sapien
gcagacggacgccttgaatccactg

SEQ ID NO: 4726014 - DNA, 25 bp, Homo sapien
gaagacgtagctactgcagacggac

SEQ ID NO: 4726015 - DNA, 25 bp, Homo sapien
cacttctacagccagaccatgtcaa

SEQ ID NO: 4726016 - DNA, 25 bp, Homo sapien
caaggagggctgcaaatttgtcccc

SEQ ID NO: 4726017 - DNA, 25 bp, Homo sapien
caaaatggcggttcttgtagcaacg

SEQ ID NO: 4726018 - DNA, 25 bp, Homo sapien
taaaatactgcctcatggccacgtg

SEQ ID NO: 4726019 - DNA, 25 bp, Homo sapien
tcctgagctaaacaaagagggtctg

SEQ ID NO: 4726020 - DNA, 25 bp, Homo sapien
gacaaagagggtctgatgccaacct

SEQ ID NO: 4726021 - DNA, 25 bp, Homo sapien
taaaaagtcatcactcgcgatatgc

SEQ ID NO: 4726022 - DNA, 25 bp, Homo sapien
tgaccagtggtgcaacatggaaggc

SEQ ID NO: 4726023 - DNA, 25 bp, Homo sapien
tatgcagccctctaactgaccggag

SEQ ID NO: 4726024 - DNA, 25 bp, Homo sapien
tagtgagggcctagaattcagagtc

SEQ ID NO: 4726025 - DNA, 25 bp, Homo sapien
tatggattgttggtaatgcaaggac

SEQ ID NO: 4726026 - DNA, 25 bp, Homo sapien
gtttggaaatgacctaccatctgtg

SEQ ID NO: 4726027 - DNA, 25 bp, Homo sapien
caaacctcaggtaacagtctgtcac

SEQ ID NO: 4726028 - DNA, 25 bp, Homo sapien
gctcatagcagtttattaagtccca

SEQ ID NO: 4726029 - DNA, 25 bp, Homo sapien
agttctattttcagtgcgataccac

SEQ ID NO: 4726030 - DNA, 25 bp, Homo sapien
taagtaaatctaggtctacgtaaga

SEQ ID NO: 4726031 - DNA, 25 bp, Homo sapien
gcgctgcgactttcctcctcggtaa

SEQ ID NO: 4726032 - DNA, 25 bp, Homo sapien
attaagtgttcccaagtaactctgg

SEQ ID NO: 4726033 - DNA, 25 bp, Homo sapien
gtagcctacgacagaaagtatagtg

SEQ ID NO: 4726034 - DNA, 25 bp, Homo sapien
aatgaactatatttgttagactacc

SEQ ID NO: 4726035 - DNA, 25 bp, Homo sapien
tagactaccctatgtctttgaaaaa

SEQ ID NO: 4726036 - DNA, 25 bp, Homo sapien
agatgcaaaaatgtagcctacgaca

SEQ ID NO: 4726037 - DNA, 25 bp, Homo sapien
tatttacatggctcgcacatggcag

SEQ ID NO: 4726038 - DNA, 25 bp, Homo sapien
gagtgaaagcggacaccctactata

SEQ ID NO: 4726039 - DNA, 25 bp, Homo sapien
gcctatccaggtacgaaagctctgt

SEQ ID NO: 4726040 - DNA, 25 bp, Homo sapien
cctactatacccagagagggtggag

SEQ ID NO: 4726041 - DNA, 25 bp, Homo sapien
gccagatactctgtctacggagatt

SEQ ID NO: 4726042 - DNA, 25 bp, Homo sapien
aggaccatctaactcaagccagata

SEQ ID NO: 4726043 - DNA, 25 bp, Homo sapien
tctacggagatttgtaggcggtgtt

SEQ ID NO: 4726044 - DNA, 25 bp, Homo sapien
gtgtttgccgtgctagaaaaaagaa

SEQ ID NO: 4726045 - DNA, 25 bp, Homo sapien
tcctgcacgtagtatgccaaaaaca

SEQ ID NO: 4726046 - DNA, 25 bp, Homo sapien
cttgctcctgcacgtagtatgccaa

SEQ ID NO: 4726047 - DNA, 25 bp, Homo sapien
tgctcctgcacgtagtatgccaaaa

SEQ ID NO: 4726048 - DNA, 25 bp, Homo sapien
cacgtagtatgccaaaaacaaatca

SEQ ID NO: 4726049 - DNA, 25 bp, Homo sapien
cagactttgtctgcctgtcgcaggc

SEQ ID NO: 4726050 - DNA, 25 bp, Homo sapien
tgtcgcaggcagtcgattctcctaa

SEQ ID NO: 4726051 - DNA, 25 bp, Homo sapien
gactagatccagacgccagactttg

SEQ ID NO: 4726052 - DNA, 25 bp, Homo sapien
gctctccatcggtactttccaaggg

SEQ ID NO: 4726053 - DNA, 25 bp, Homo sapien
aaagtacttgcgttttcgagcctgc

SEQ ID NO: 4726054 - DNA, 25 bp, Homo sapien
tataggcaattgcacggacatgtgg

SEQ ID NO: 4726055 - DNA, 25 bp, Homo sapien
tcgggattggataagacacagcacg

SEQ ID NO: 4726056 - DNA, 25 bp, Homo sapien
cagcacgggtgcttcttgccagtca

SEQ ID NO: 4726057 - DNA, 25 bp, Homo sapien
agaggggtgaggaaaagatgtgcat

SEQ ID NO: 4726058 - DNA, 25 bp, Homo sapien
ctgtggaagacagaggggtgaggaa

SEQ ID NO: 4726059 - DNA, 25 bp, Homo sapien
tgtggaagacagaggggtgaggaaa

SEQ ID NO: 4726060 - DNA, 25 bp, Homo sapien
gacagaggggtgaggaaaagatgtg

SEQ ID NO: 4726061 - DNA, 25 bp, Homo sapien
tcagaaggcaggagcgatgccacag

SEQ ID NO: 4726062 - DNA, 25 bp, Homo sapien
ttttttaatcggagtagagctgttc

SEQ ID NO: 4726063 - DNA, 25 bp, Homo sapien
cagaaggcaggagcgatgccacagt

SEQ ID NO: 4726064 - DNA, 25 bp, Homo sapien
tcggagtagagctgttcagaaggca

SEQ ID NO: 4726065 - DNA, 25 bp, Homo sapien
tcaaacgtccaacattccaacactg

SEQ ID NO: 4726066 - DNA, 25 bp, Homo sapien
gagaaaccggtatacagtgagggaa

SEQ ID NO: 4726067 - DNA, 25 bp, Homo sapien
cagctcgtcgtatcagtgtcctgaa

SEQ ID NO: 4726068 - DNA, 25 bp, Homo sapien
gaaggtttccatactttgagcagtg

SEQ ID NO: 4726069 - DNA, 25 bp, Homo sapien
aagtgaagcacttatttgacaaggg

SEQ ID NO: 4726070 - DNA, 25 bp, Homo sapien
agtgtgactgtttcctaatgctgag

SEQ ID NO: 4726071 - DNA, 25 bp, Homo sapien
tatcgttcagggtttcactattatg

SEQ ID NO: 4726072 - DNA, 25 bp, Homo sapien
tgccagtttgccttattgatatcgt

SEQ ID NO: 4726073 - DNA, 25 bp, Homo sapien
tgagtgagacagatgggagaataca

SEQ ID NO: 4726074 - DNA, 25 bp, Homo sapien
agtgagacagatgggagaatacatc

SEQ ID NO: 4726075 - DNA, 25 bp, Homo sapien
tgagacagatgggagaatacatcat

SEQ ID NO: 4726076 - DNA, 25 bp, Homo sapien
ctgagtgagacagatgggagaatac

SEQ ID NO: 4726077 - DNA, 25 bp, Homo sapien
cactcggcgtgctagatttccaggg

SEQ ID NO: 4726078 - DNA, 25 bp, Homo sapien
tgtgtcaccgcgctgggaaagttca

SEQ ID NO: 4726079 - DNA, 25 bp, Homo sapien
taaaacgcactttccgggagatgcc

SEQ ID NO: 4726080 - DNA, 25 bp, Homo sapien
tttacagtcatctgagccccgcgat

SEQ ID NO: 4726081 - DNA, 25 bp, Homo sapien
tcaaaacgatctcctgaaaaattcc

SEQ ID NO: 4726082 - DNA, 25 bp, Homo sapien
ttgctttctttcgttgcaaaacttg

SEQ ID NO: 4726083 - DNA, 25 bp, Homo sapien
aattccaaacgataaatcccgctct

SEQ ID NO: 4726084 - DNA, 25 bp, Homo sapien
cccaggggtatcaaaacgatctcct

SEQ ID NO: 4726085 - DNA, 25 bp, Homo sapien
ctggaagaggtatttcggtgctcgc

SEQ ID NO: 4726086 - DNA, 25 bp, Homo sapien
cttttaagccgcgggaacatccgag

SEQ ID NO: 4726087 - DNA, 25 bp, Homo sapien
ggtatttcggtgctcgctgcggact

SEQ ID NO: 4726088 - DNA, 25 bp, Homo sapien
gctcgctgcggactcttttaagccg

SEQ ID NO: 4726089 - DNA, 25 bp, Homo sapien
tgcaaaactgcaagtatctactgca

SEQ ID NO: 4726090 - DNA, 25 bp, Homo sapien
tatctactgcaccatgccctgggat

SEQ ID NO: 4726091 - DNA, 25 bp, Homo sapien
acagatgacctcctgaccccagaaa

SEQ ID NO: 4726092 - DNA, 25 bp, Homo sapien
cacaaaaatcatacatgtgtagtct

SEQ ID NO: 4726093 - DNA, 25 bp, Homo sapien
tgcagtcccaaccaccgatgataat

SEQ ID NO: 4726094 - DNA, 25 bp, Homo sapien
aatagggacttttcagcgctagagc

SEQ ID NO: 4726095 - DNA, 25 bp, Homo sapien
tttcccagtgcacaagaatgcagtc

SEQ ID NO: 4726096 - DNA, 25 bp, Homo sapien
tgagttggagtgcttgacctttgcc

SEQ ID NO: 4726097 - DNA, 25 bp, Homo sapien
gcagtttttacttaggatgcttaaa

SEQ ID NO: 4726098 - DNA, 25 bp, Homo sapien
cactggaaagtcacactaattctga

SEQ ID NO: 4726099 - DNA, 25 bp, Homo sapien
cgtgcattcttttctaaccacataa

SEQ ID NO: 4726100 - DNA, 25 bp, Homo sapien
cacatacaccctgcttatttacacg

SEQ ID NO: 4726101 - DNA, 25 bp, Homo sapien
tgcactgccacagttcttggcccga

SEQ ID NO: 4726102 - DNA, 25 bp, Homo sapien
gaaaaggcggtcaaagtcaagtcta

SEQ ID NO: 4726103 - DNA, 25 bp, Homo sapien
gtgcttgacttgaacgccgtccagg

SEQ ID NO: 4726104 - DNA, 25 bp, Homo sapien
gtcaagtctaaaagcaggcagccct

SEQ ID NO: 4726105 - DNA, 25 bp, Homo sapien
tgccagttgctgttacaacctggtt

SEQ ID NO: 4726106 - DNA, 25 bp, Homo sapien
gagggaatctcagcaacagtcgggc

SEQ ID NO: 4726107 - DNA, 25 bp, Homo sapien
tctcagcaacagtcgggctaggaca

SEQ ID NO: 4726108 - DNA, 25 bp, Homo sapien
gcaacagtcgggctaggacaggcat

SEQ ID NO: 4726109 - DNA, 25 bp, Homo sapien
taggagccgtctggccaagtggaaa

SEQ ID NO: 4726110 - DNA, 25 bp, Homo sapien
aaggtgatcctgaaaccgcttgccc

SEQ ID NO: 4726111 - DNA, 25 bp, Homo sapien
catctgccacgtgtgataggagccg

SEQ ID NO: 4726112 - DNA, 25 bp, Homo sapien
catatccgcagtcacacgaggtaac

SEQ ID NO: 4726113 - DNA, 25 bp, Homo sapien
gattctgccgcctggaacccttctt

SEQ ID NO: 4726114 - DNA, 25 bp, Homo sapien
aacccttcttcttctgcgcaatact

SEQ ID NO: 4726115 - DNA, 25 bp, Homo sapien
ttgggggattctgccgcctggaacc

SEQ ID NO: 4726116 - DNA, 25 bp, Homo sapien
tctgcgcaatactggcagcagtggg

SEQ ID NO: 4726117 - DNA, 25 bp, Homo sapien
gggagcagcggacagtcagctgcat

SEQ ID NO: 4726118 - DNA, 25 bp, Homo sapien
ccgggagcagcggacagtcagctgc

SEQ ID NO: 4726119 - DNA, 25 bp, Homo sapien
ccacgcgaagagagagggcggaaga

SEQ ID NO: 4726120 - DNA, 25 bp, Homo sapien
ctgggggtgccacgcgaagagagag

SEQ ID NO: 4726121 - DNA, 25 bp, Homo sapien
ttccctacggccacaaagcacccag

SEQ ID NO: 4726122 - DNA, 25 bp, Homo sapien
attccctacggccacaaagcaccca

SEQ ID NO: 4726123 - DNA, 25 bp, Homo sapien
tgtctccgggctcagcacttcccgg

SEQ ID NO: 4726124 - DNA, 25 bp, Homo sapien
agcacttcccggtactctacattag

SEQ ID NO: 4726125 - DNA, 25 bp, Homo sapien
gggctcagcacttcccggtactcta

SEQ ID NO: 4726126 - DNA, 25 bp, Homo sapien
tctccgggctcagcacttcccggta

SEQ ID NO: 4726127 - DNA, 25 bp, Homo sapien
gagtccacgggtcagatgccttttc

SEQ ID NO: 4726128 - DNA, 25 bp, Homo sapien
tggagacccgcaggcggtgagaccc

SEQ ID NO: 4726129 - DNA, 25 bp, Homo sapien
ctgcgagctgacgtggagacccgca

SEQ ID NO: 4726130 - DNA, 25 bp, Homo sapien
cctggtgtccgactggccgccgatg

SEQ ID NO: 4726131 - DNA, 25 bp, Homo sapien
tagttccaggcacaagaccaaaatc

SEQ ID NO: 4726132 - DNA, 25 bp, Homo sapien
taggtgtgaatatatgcttcaatag

SEQ ID NO: 4726133 - DNA, 25 bp, Homo sapien
gcagagttttcagctataatctggc

SEQ ID NO: 4726134 - DNA, 25 bp, Homo sapien
caaaatcttccccagaattagcaga

SEQ ID NO: 4726135 - DNA, 25 bp, Homo sapien
tagtgcatgccataccagtggattc

SEQ ID NO: 4726136 - DNA, 25 bp, Homo sapien
gaagctggagctgaatatgctaccc

SEQ ID NO: 4726137 - DNA, 25 bp, Homo sapien
gggtttacgagcaggactcctctct

SEQ ID NO: 4726138 - DNA, 25 bp, Homo sapien
tgtaaaaacagcaccgagacagagc

SEQ ID NO: 4726139 - DNA, 25 bp, Homo sapien
agtcacacaagggagaaaattaact

SEQ ID NO: 4726140 - DNA, 25 bp, Homo sapien
aaagaactcctccaagtcacacaag

SEQ ID NO: 4726141 - DNA, 25 bp, Homo sapien
cacacaagggagaaaattaacttca

SEQ ID NO: 4726142 - DNA, 25 bp, Homo sapien
attaacttcattggcttctatcagg

SEQ ID NO: 4726143 - DNA, 25 bp, Homo sapien
atttgtagaagaaagatggtagtac

SEQ ID NO: 4726144 - DNA, 25 bp, Homo sapien
tagaagaaagatggtagtacaaaag

SEQ ID NO: 4726145 - DNA, 25 bp, Homo sapien
tttgtagaagaaagatggtagtaca

SEQ ID NO: 4726146 - DNA, 25 bp, Homo sapien
tgtagaagaaagatggtagtacaaa

SEQ ID NO: 4726147 - DNA, 25 bp, Homo sapien
ccaggaactccttccatgccagtca

SEQ ID NO: 4726148 - DNA, 25 bp, Homo sapien
caggaactccttccatgccagtcac

SEQ ID NO: 4726149 - DNA, 25 bp, Homo sapien
gacttaggaacaagtagatgtaaaa

SEQ ID NO: 4726150 - DNA, 25 bp, Homo sapien
cagggccattcagagtctgtagctg

SEQ ID NO: 4726151 - DNA, 25 bp, Homo sapien
tagggatcagtttctctatgtcagg

SEQ ID NO: 4726152 - DNA, 25 bp, Homo sapien
tgtgggcttagggatcagtttctct

SEQ ID NO: 4726153 - DNA, 25 bp, Homo sapien
agtgaaacccgatgtcttctccggg

SEQ ID NO: 4726154 - DNA, 25 bp, Homo sapien
aagaccacttcctattccctagcgg

SEQ ID NO: 4726155 - DNA, 25 bp, Homo sapien
tccctagcggatatgtgtgtctttc

SEQ ID NO: 4726156 - DNA, 25 bp, Homo sapien
ccgggtggttatttttgcgcctatg

SEQ ID NO: 4726157 - DNA, 25 bp, Homo sapien
tcttatagctatgcaaggcctcagt

SEQ ID NO: 4726158 - DNA, 25 bp, Homo sapien
ttcttatagctatgcaaggcctcag

SEQ ID NO: 4726159 - DNA, 25 bp, Homo sapien
cttatagctatgcaaggcctcagtc

SEQ ID NO: 4726160 - DNA, 25 bp, Homo sapien
agaatgagctgtttatatagcgttt

SEQ ID NO: 4726161 - DNA, 25 bp, Homo sapien
gagctgtttatatagcgtttcctcc

SEQ ID NO: 4726162 - DNA, 25 bp, Homo sapien
gtttatatagcgtttcctcctcttc

SEQ ID NO: 4726163 - DNA, 25 bp, Homo sapien
gctgtttatatagcgtttcctcctc

SEQ ID NO: 4726164 - DNA, 25 bp, Homo sapien
cccaaatcctcttatatgcagatgg

SEQ ID NO: 4726165 - DNA, 25 bp, Homo sapien
ccaaatcctcttatatgcagatggg

SEQ ID NO: 4726166 - DNA, 25 bp, Homo sapien
tcccaaatcctcttatatgcagatg

SEQ ID NO: 4726167 - DNA, 25 bp, Homo sapien
cttcccaaatcctcttatatgcaga

SEQ ID NO: 4726168 - DNA, 25 bp, Homo sapien
gcgtgatgcttaagcgagccactta

SEQ ID NO: 4726169 - DNA, 25 bp, Homo sapien
caattgtataggagggcatgtggcc

SEQ ID NO: 4726170 - DNA, 25 bp, Homo sapien
gaagagcgctttaaataccatcgtg

SEQ ID NO: 4726171 - DNA, 25 bp, Homo sapien
gaaatcttacaactgcaagagcgcc

SEQ ID NO: 4726172 - DNA, 25 bp, Homo sapien
gaaaaatatcgactgcaaccagaag

SEQ ID NO: 4726173 - DNA, 25 bp, Homo sapien
tcatgaggagcacgccacatgcttc

SEQ ID NO: 4726174 - DNA, 25 bp, Homo sapien
aaccagaagtcgcaatcctgatgac

SEQ ID NO: 4726175 - DNA, 25 bp, Homo sapien
tcctgatgacagctcccgaaatctc

SEQ ID NO: 4726176 - DNA, 25 bp, Homo sapien
gatacttgatagctcagcctcagca

SEQ ID NO: 4726177 - DNA, 25 bp, Homo sapien
ccaaggtcaggtgtcattaatatct

SEQ ID NO: 4726178 - DNA, 25 bp, Homo sapien
tagagtagattgtccaaccagggat

SEQ ID NO: 4726179 - DNA, 25 bp, Homo sapien
tagtaaacagcctgagagaaatgct

SEQ ID NO: 4726180 - DNA, 25 bp, Homo sapien
ccttttcgttttgtctgatcagtag

SEQ ID NO: 4726181 - DNA, 25 bp, Homo sapien
cagtagctttacagtccttgcattt

SEQ ID NO: 4726182 - DNA, 25 bp, Homo sapien
tttacagtccttgcatttatctcct

SEQ ID NO: 4726183 - DNA, 25 bp, Homo sapien
cttttcgttttgtctgatcagtagc

SEQ ID NO: 4726184 - DNA, 25 bp, Homo sapien
cttctctttttcctaaatcttactg

SEQ ID NO: 4726185 - DNA, 25 bp, Homo sapien
gattgtttgattgattttcaccttc

SEQ ID NO: 4726186 - DNA, 25 bp, Homo sapien
attgtttgattgattttcaccttct

SEQ ID NO: 4726187 - DNA, 25 bp, Homo sapien
tctttttcctaaatcttactgtaga

SEQ ID NO: 4726188 - DNA, 25 bp, Homo sapien
acttaaccaagatcaggccgcatag

SEQ ID NO: 4726189 - DNA, 25 bp, Homo sapien
tagcaagagctaacaatcctcaggg

SEQ ID NO: 4726190 - DNA, 25 bp, Homo sapien
tagtaactggcaaacttgggaccca

SEQ ID NO: 4726191 - DNA, 25 bp, Homo sapien
ggttgggaggcctttgcaaaacaca

SEQ ID NO: 4726192 - DNA, 25 bp, Homo sapien
acgacacaggatggccacttctagg

SEQ ID NO: 4726193 - DNA, 25 bp, Homo sapien
cacttctaggttatttcttggggca

SEQ ID NO: 4726194 - DNA, 25 bp, Homo sapien
tctaggttatttcttggggcagtat

SEQ ID NO: 4726195 - DNA, 25 bp, Homo sapien
tctacgacacaggatggccacttct

SEQ ID NO: 4726196 - DNA, 25 bp, Homo sapien
gccttgcctcagtgcgggtgagata

SEQ ID NO: 4726197 - DNA, 25 bp, Homo sapien
ttggctgcggaagccagtgattgtc

SEQ ID NO: 4726198 - DNA, 25 bp, Homo sapien
ctgttttctatcagggcactgcagc

SEQ ID NO: 4726199 - DNA, 25 bp, Homo sapien
ggatcgggcctttgaagctgttttc

SEQ ID NO: 4726200 - DNA, 25 bp, Homo sapien
tgttggcacgcctcccatgggagct

SEQ ID NO: 4726201 - DNA, 25 bp, Homo sapien
gtgccactcattgtcccaggaactg

SEQ ID NO: 4726202 - DNA, 25 bp, Homo sapien
caaaataacgactgtggcgcctctg

SEQ ID NO: 4726203 - DNA, 25 bp, Homo sapien
tctttgggacaacgaacaggcacat

SEQ ID NO: 4726204 - DNA, 25 bp, Homo sapien
ttggagaaaacaatccttgtttctg

SEQ ID NO: 4726205 - DNA, 25 bp, Homo sapien
tgatgacaatggaactttaggtagc

SEQ ID NO: 4726206 - DNA, 25 bp, Homo sapien
tctgactatttaatatggcacttct

SEQ ID NO: 4726207 - DNA, 25 bp, Homo sapien
tgcagttaacagttcagtgatgaca

SEQ ID NO: 4726208 - DNA, 25 bp, Homo sapien
ggaaatgtcaagaccaaaggctgct

SEQ ID NO: 4726209 - DNA, 25 bp, Homo sapien
tacttatcttcatttcgtggattat

SEQ ID NO: 4726210 - DNA, 25 bp, Homo sapien
gagttatattactggaaatgtcaag

SEQ ID NO: 4726211 - DNA, 25 bp, Homo sapien
cccatactattgagttatattactg

SEQ ID NO: 4726212 - DNA, 25 bp, Homo sapien
ataatccttatgccagctctgaaag

SEQ ID NO: 4726213 - DNA, 25 bp, Homo sapien
gccctgcaacaggaaggaccttctc

SEQ ID NO: 4726214 - DNA, 25 bp, Homo sapien
cagtagtcgctctacattggaaaac

SEQ ID NO: 4726215 - DNA, 25 bp, Homo sapien
ggaaggaccttctctagagcagcca

SEQ ID NO: 4726216 - DNA, 25 bp, Homo sapien
ctgagacacattgtctaagaagttg

SEQ ID NO: 4726217 - DNA, 25 bp, Homo sapien
attttctgaaccccacactgagaca

SEQ ID NO: 4726218 - DNA, 25 bp, Homo sapien
gacacattgtctaagaagttgggac

SEQ ID NO: 4726219 - DNA, 25 bp, Homo sapien
acactgagacacattgtctaagaag

SEQ ID NO: 4726220 - DNA, 25 bp, Homo sapien
aaaatccaaagcacagagttgacat

SEQ ID NO: 4726221 - DNA, 25 bp, Homo sapien
ggattctttccatactccgaacgga

SEQ ID NO: 4726222 - DNA, 25 bp, Homo sapien
aggaatcccagggttacatttcaga

SEQ ID NO: 4726223 - DNA, 25 bp, Homo sapien
tccgaacggattcccgacaagaagc

SEQ ID NO: 4726224 - DNA, 25 bp, Homo sapien
ggtccgaagagtttgagggtgactg

SEQ ID NO: 4726225 - DNA, 25 bp, Homo sapien
caggcagaaggtccgaagagtttga

SEQ ID NO: 4726226 - DNA, 25 bp, Homo sapien
aacaggcagaaggtccgaagagttt

SEQ ID NO: 4726227 - DNA, 25 bp, Homo sapien
tgaacaggcagaaggtccgaagagt

SEQ ID NO: 4726228 - DNA, 25 bp, Homo sapien
atactgaatctggactggagcatcc

SEQ ID NO: 4726229 - DNA, 25 bp, Homo sapien
tagtctcagtcctatttacaatcat

SEQ ID NO: 4726230 - DNA, 25 bp, Homo sapien
tccaggctaatagtctcagtcctat

SEQ ID NO: 4726231 - DNA, 25 bp, Homo sapien
actggagcatccaggctaatagtct

SEQ ID NO: 4726232 - DNA, 25 bp, Homo sapien
tccaaatgtctatcggcaacctgca

SEQ ID NO: 4726233 - DNA, 25 bp, Homo sapien
aatgtctatcggcaacctgcaaagt

SEQ ID NO: 4726234 - DNA, 25 bp, Homo sapien
ccaaatgtctatcggcaacctgcaa

SEQ ID NO: 4726235 - DNA, 25 bp, Homo sapien
tgtctatcggcaacctgcaaagtca

SEQ ID NO: 4726236 - DNA, 25 bp, Homo sapien
taggaggataatcgtggcaagaaag

SEQ ID NO: 4726237 - DNA, 25 bp, Homo sapien
aggaaagcccatttcttctagtgct

SEQ ID NO: 4726238 - DNA, 25 bp, Homo sapien
tctagtgctggcaacattaggagga

SEQ ID NO: 4726239 - DNA, 25 bp, Homo sapien
agtgaattgatcagctctgttccaa

SEQ ID NO: 4726240 - DNA, 25 bp, Homo sapien
cagcaggaatcgagggcaaaacagg

SEQ ID NO: 4726241 - DNA, 25 bp, Homo sapien
caaaacaggggcactgtgtggtctc

SEQ ID NO: 4726242 - DNA, 25 bp, Homo sapien
ggcaaaacaggggcactgtgtggtc

SEQ ID NO: 4726243 - DNA, 25 bp, Homo sapien
aaacaggggcactgtgtggtctctg

SEQ ID NO: 4726244 - DNA, 25 bp, Homo sapien
tctacaagatcatgtgagccctgct

SEQ ID NO: 4726245 - DNA, 25 bp, Homo sapien
aagatcatgtgagccctgctgcttg

SEQ ID NO: 4726246 - DNA, 25 bp, Homo sapien
gcacttgatgccctgttgtagagat

SEQ ID NO: 4726247 - DNA, 25 bp, Homo sapien
cagctgtgcacttgatgccctgttg

SEQ ID NO: 4726248 - DNA, 25 bp, Homo sapien
gtcactcaggccagaatacagcggt

SEQ ID NO: 4726249 - DNA, 25 bp, Homo sapien
ggccagaatacagcggtgtgatcac

SEQ ID NO: 4726250 - DNA, 25 bp, Homo sapien
actcaggccagaatacagcggtgtg

SEQ ID NO: 4726251 - DNA, 25 bp, Homo sapien
tcaggccagaatacagcggtgtgat

SEQ ID NO: 4726252 - DNA, 25 bp, Homo sapien
tatgctgggaagtccgtacaaagaa

SEQ ID NO: 4726253 - DNA, 25 bp, Homo sapien
ggaagtccgtacaaagaacatagaa

SEQ ID NO: 4726254 - DNA, 25 bp, Homo sapien
aatgacagagcttaggtgaagacat

SEQ ID NO: 4726255 - DNA, 25 bp, Homo sapien
tcaaatgacagagcttaggtgaaga

SEQ ID NO: 4726256 - DNA, 25 bp, Homo sapien
tttcttttcgcaaagccaccaccag

SEQ ID NO: 4726257 - DNA, 25 bp, Homo sapien
aagcactttcttttcgcaaagccac

SEQ ID NO: 4726258 - DNA, 25 bp, Homo sapien
cctgtggatgaaattgcagcagctg

SEQ ID NO: 4726259 - DNA, 25 bp, Homo sapien
tcctgtggatgaaattgcagcagct

SEQ ID NO: 4726260 - DNA, 25 bp, Homo sapien
ttcgaaccgaggttgctgcggccac

SEQ ID NO: 4726261 - DNA, 25 bp, Homo sapien
tgactcggattcgaaccgaggttgc

SEQ ID NO: 4726262 - DNA, 25 bp, Homo sapien
tgccgtgactcggattcgaaccgag

SEQ ID NO: 4726263 - DNA, 25 bp, Homo sapien
ctcggattcgaaccgaggttgctgc

SEQ ID NO: 4726264 - DNA, 25 bp, Homo sapien
tcttctcagtgtgcctcctgcctcg

SEQ ID NO: 4726265 - DNA, 25 bp, Homo sapien
ctcttctcagtgtgcctcctgcctc

SEQ ID NO: 4726266 - DNA, 25 bp, Homo sapien
gggaaatgacagtcggatccatcac

SEQ ID NO: 4726267 - DNA, 25 bp, Homo sapien
ggtagggaaatgacagtcggatcca

SEQ ID NO: 4726268 - DNA, 25 bp, Homo sapien
tagggaaatgacagtcggatccatc

SEQ ID NO: 4726269 - DNA, 25 bp, Homo sapien
ggaaatgacagtcggatccatcact

SEQ ID NO: 4726270 - DNA, 25 bp, Homo sapien
tcttgtgtgtcatctgaatgatcat

SEQ ID NO: 4726271 - DNA, 25 bp, Homo sapien
tgagggtgatcagtcgggcagtgcc

SEQ ID NO: 4726272 - DNA, 25 bp, Homo sapien
gaatgatcatctccgttctccttct

SEQ ID NO: 4726273 - DNA, 25 bp, Homo sapien
tcgggcagtgccaaatttttcttct

SEQ ID NO: 4726274 - DNA, 25 bp, Homo sapien
ggcacacagacctgaagttgaggag

SEQ ID NO: 4726275 - DNA, 25 bp, Homo sapien
cagacctgaagttgaggaggagaac

SEQ ID NO: 4726276 - DNA, 25 bp, Homo sapien
gagaacagctgatggagcgtagcaa

SEQ ID NO: 4726277 - DNA, 25 bp, Homo sapien
agcgtagcaaggaattggcctcagg

SEQ ID NO: 4726278 - DNA, 25 bp, Homo sapien
caagtagatccaggcacatcagcaa

SEQ ID NO: 4726279 - DNA, 25 bp, Homo sapien
cacaagtagatccaggcacatcagc

SEQ ID NO: 4726280 - DNA, 25 bp, Homo sapien
acaagtagatccaggcacatcagca

SEQ ID NO: 4726281 - DNA, 25 bp, Homo sapien
ttccactttttgccacgtaagtcac

SEQ ID NO: 4726282 - DNA, 25 bp, Homo sapien
ctggttccactttttgccacgtaag

SEQ ID NO: 4726283 - DNA, 25 bp, Homo sapien
cactttttgccacgtaagtcaccat

SEQ ID NO: 4726284 - DNA, 25 bp, Homo sapien
ttctggttccactttttgccacgta

SEQ ID NO: 4726285 - DNA, 25 bp, Homo sapien
ctcccacagctaacgcagcagccag

SEQ ID NO: 4726286 - DNA, 25 bp, Homo sapien
tacctaaatctgcatggtgttgtct

SEQ ID NO: 4726287 - DNA, 25 bp, Homo sapien
tgagcaccagattgctttgggtttc

SEQ ID NO: 4726288 - DNA, 25 bp, Homo sapien
tgcatggtgttgtctgagcaccaga

SEQ ID NO: 4726289 - DNA, 25 bp, Homo sapien
ggtgttgtctgagcaccagattgct

SEQ ID NO: 4726290 - DNA, 25 bp, Homo sapien
ggataaaccagaaacttgcagaaac

SEQ ID NO: 4726291 - DNA, 25 bp, Homo sapien
tttccaaaagggtgcctgcttattc

SEQ ID NO: 4726292 - DNA, 25 bp, Homo sapien
tgtaggtaacacagtacatctggcc

SEQ ID NO: 4726293 - DNA, 25 bp, Homo sapien
tattcctgctacttggatgacacag

SEQ ID NO: 4726294 - DNA, 25 bp, Homo sapien
tatggatacaggcaactcatgactt

SEQ ID NO: 4726295 - DNA, 25 bp, Homo sapien
cataatctagtatccagtggtgaga

SEQ ID NO: 4726296 - DNA, 25 bp, Homo sapien
cacaaacttataggcccattgctgg

SEQ ID NO: 4726297 - DNA, 25 bp, Homo sapien
tattgaactaacagcccaggatccc

SEQ ID NO: 4726298 - DNA, 25 bp, Homo sapien
ggtgaagactgcttatcttgtagac

SEQ ID NO: 4726299 - DNA, 25 bp, Homo sapien
ctcctccttcaaaccagaggctctg

SEQ ID NO: 4726300 - DNA, 25 bp, Homo sapien
atcagcattgaaccttgaaatagta

SEQ ID NO: 4726301 - DNA, 25 bp, Homo sapien
ttgaaccttgaaatagtaagaactg

SEQ ID NO: 4726302 - DNA, 25 bp, Homo sapien
tagaagggagaatggtgctcctggt

SEQ ID NO: 4726303 - DNA, 25 bp, Homo sapien
ggagaatggtgctcctggttctaac

SEQ ID NO: 4726304 - DNA, 25 bp, Homo sapien
ctagaagggagaatggtgctcctgg

SEQ ID NO: 4726305 - DNA, 25 bp, Homo sapien
aagggagaatggtgctcctggttct

SEQ ID NO: 4726306 - DNA, 25 bp, Homo sapien
gaaacgtatcaaatgtgctagggtg

SEQ ID NO: 4726307 - DNA, 25 bp, Homo sapien
ggtgttttctctcaaacagttgctg

SEQ ID NO: 4726308 - DNA, 25 bp, Homo sapien
ctatagcatagaaacgtatcaaatg

SEQ ID NO: 4726309 - DNA, 25 bp, Homo sapien
caaacagttgctggtaatattctct

SEQ ID NO: 4726310 - DNA, 25 bp, Homo sapien
gaagttctactaagtctcacagaga

SEQ ID NO: 4726311 - DNA, 25 bp, Homo sapien
taaacttacaaatgttctggcctgg

SEQ ID NO: 4726312 - DNA, 25 bp, Homo sapien
tctggcctggttctgatgggatcaa

SEQ ID NO: 4726313 - DNA, 25 bp, Homo sapien
tgtgaaaggtcatcaacagaactct

SEQ ID NO: 4726314 - DNA, 25 bp, Homo sapien
ggcatagtaatcagtggttgctcca

SEQ ID NO: 4726315 - DNA, 25 bp, Homo sapien
ttaattacgctgagtggcatagtaa

SEQ ID NO: 4726316 - DNA, 25 bp, Homo sapien
gattccaaattaaggcaaagcgtgg

SEQ ID NO: 4726317 - DNA, 25 bp, Homo sapien
tcgcatactgatgagggagccgcac

SEQ ID NO: 4726318 - DNA, 25 bp, Homo sapien
ctgtccgacgttttcccagccatta

SEQ ID NO: 4726319 - DNA, 25 bp, Homo sapien
cagccattatgctgtcagcaacctt

SEQ ID NO: 4726320 - DNA, 25 bp, Homo sapien
gctgccattttatggagctgtccga

SEQ ID NO: 4726321 - DNA, 25 bp, Homo sapien
tgacatgtcataacatagctgccat

SEQ ID NO: 4726322 - DNA, 25 bp, Homo sapien
gcttgctggactacatgtaggccaa

SEQ ID NO: 4726323 - DNA, 25 bp, Homo sapien
gtaggccaatccttatcacactgca

SEQ ID NO: 4726324 - DNA, 25 bp, Homo sapien
atcaagaaaacatcagcggtggctt

SEQ ID NO: 4726325 - DNA, 25 bp, Homo sapien
catcagcggtggcttgctggactac

SEQ ID NO: 4726326 - DNA, 25 bp, Homo sapien
gaagtccagttgctgtgacagcagc

SEQ ID NO: 4726327 - DNA, 25 bp, Homo sapien
tccagttgctgtgacagcagccagg

SEQ ID NO: 4726328 - DNA, 25 bp, Homo sapien
caggaggaagtccagttgctgtgac

SEQ ID NO: 4726329 - DNA, 25 bp, Homo sapien
tgctcaaggccagcaactccccagg

SEQ ID NO: 4726330 - DNA, 25 bp, Homo sapien
gagggcagcgtggctacacacttcc

SEQ ID NO: 4726331 - DNA, 25 bp, Homo sapien
tggggaacgccagaggacagctgac

SEQ ID NO: 4726332 - DNA, 25 bp, Homo sapien
ctggggaacgccagaggacagctga

SEQ ID NO: 4726333 - DNA, 25 bp, Homo sapien
ggctggggaacgccagaggacagct

SEQ ID NO: 4726334 - DNA, 25 bp, Homo sapien
gctggggaacgccagaggacagctg

SEQ ID NO: 4726335 - DNA, 25 bp, Homo sapien
gggtcaccggcagagctaaacagga

SEQ ID NO: 4726336 - DNA, 25 bp, Homo sapien
gcctgcggggcgtctttcactgaga

SEQ ID NO: 4726337 - DNA, 25 bp, Homo sapien
aacaaatcccgaactggggctagca

SEQ ID NO: 4726338 - DNA, 25 bp, Homo sapien
gggctagcattcccaaaaggcatgt

SEQ ID NO: 4726339 - DNA, 25 bp, Homo sapien
cttttattcatgatggaaggcagag

SEQ ID NO: 4726340 - DNA, 25 bp, Homo sapien
caagaagcttttattcatgatggaa

SEQ ID NO: 4726341 - DNA, 25 bp, Homo sapien
ggcctcaagaagcttttattcatga

SEQ ID NO: 4726342 - DNA, 25 bp, Homo sapien
aaggcagagtaggagcaggcatgtc

SEQ ID NO: 4726343 - DNA, 25 bp, Homo sapien
cactcattgccatgggaggacacca

SEQ ID NO: 4726344 - DNA, 25 bp, Homo sapien
gtgccaggcccctttagagaaccag

SEQ ID NO: 4726345 - DNA, 25 bp, Homo sapien
taggcccgccttcaacactggcgga

SEQ ID NO: 4726346 - DNA, 25 bp, Homo sapien
tcacatcaactaccggagcaagaac

SEQ ID NO: 4726347 - DNA, 25 bp, Homo sapien
tctcatccatagtggtccagcctgg

SEQ ID NO: 4726348 - DNA, 25 bp, Homo sapien
tgtccaacccagagtcaaaggctga

SEQ ID NO: 4726349 - DNA, 25 bp, Homo sapien
gacagcaagctccaatgtgcaagtg

SEQ ID NO: 4726350 - DNA, 25 bp, Homo sapien
gagaatctgcaacgtcacattacaa

SEQ ID NO: 4726351 - DNA, 25 bp, Homo sapien
tttactaaataccttcagaggtcca

SEQ ID NO: 4726352 - DNA, 25 bp, Homo sapien
tagtggaagcaggataagtggtgtc

SEQ ID NO: 4726353 - DNA, 25 bp, Homo sapien
cagaggtccaagcagtgtactaggc

SEQ ID NO: 4726354 - DNA, 25 bp, Homo sapien
tgtactaggcacttgtatagagagc

SEQ ID NO: 4726355 - DNA, 25 bp, Homo sapien
caaagtcgagacctgctcatatttt

SEQ ID NO: 4726356 - DNA, 25 bp, Homo sapien
tcgagacctgctcatattttataag

SEQ ID NO: 4726357 - DNA, 25 bp, Homo sapien
cttcaaagtcgagacctgctcatat

SEQ ID NO: 4726358 - DNA, 25 bp, Homo sapien
ttataaggttaaatgttgaaagtga

SEQ ID NO: 4726359 - DNA, 25 bp, Homo sapien
cagtaaggctttgactaatgctttg

SEQ ID NO: 4726360 - DNA, 25 bp, Homo sapien
tatctgattcgagagatggcactac

SEQ ID NO: 4726361 - DNA, 25 bp, Homo sapien
gaaacctggtcctaagggaagagca

SEQ ID NO: 4726362 - DNA, 25 bp, Homo sapien
gctttgtatctgattcgagagatgg

SEQ ID NO: 4726363 - DNA, 25 bp, Homo sapien
cctttgacttgcatgcagtttgcca

SEQ ID NO: 4726364 - DNA, 25 bp, Homo sapien
tgcatattaacacagcatatacccc

SEQ ID NO: 4726365 - DNA, 25 bp, Homo sapien
gatttcctgtgagagttcactgccc

SEQ ID NO: 4726366 - DNA, 25 bp, Homo sapien
tgatttcccggatgtcaagcccttc

SEQ ID NO: 4726367 - DNA, 25 bp, Homo sapien
aagcactaatgtagtggttacactg

SEQ ID NO: 4726368 - DNA, 25 bp, Homo sapien
gaaagcactaatgtagtggttacac

SEQ ID NO: 4726369 - DNA, 25 bp, Homo sapien
ttagaaagcactaatgtagtggtta

SEQ ID NO: 4726370 - DNA, 25 bp, Homo sapien
gcactaatgtagtggttacactgac

SEQ ID NO: 4726371 - DNA, 25 bp, Homo sapien
gaatcaaattctggtgagtcctggc

SEQ ID NO: 4726372 - DNA, 25 bp, Homo sapien
aggagaatggccctaaagcttggca

SEQ ID NO: 4726373 - DNA, 25 bp, Homo sapien
gatgcaaattcccatttgacatgaa

SEQ ID NO: 4726374 - DNA, 25 bp, Homo sapien
catgaagccctactgaatcaaattc

SEQ ID NO: 4726375 - DNA, 25 bp, Homo sapien
ctctgaaggtggttctgagagtccc

SEQ ID NO: 4726376 - DNA, 25 bp, Homo sapien
agtcccatttcctcttgcgggcttc

SEQ ID NO: 4726377 - DNA, 25 bp, Homo sapien
gagtctgtggccacaatatatctct

SEQ ID NO: 4726378 - DNA, 25 bp, Homo sapien
gtggccacaatatatctctgaaggt

SEQ ID NO: 4726379 - DNA, 25 bp, Homo sapien
gccaggtccctgagaaattcgcaga

SEQ ID NO: 4726380 - DNA, 25 bp, Homo sapien
tgctgcttgctgctacaaagaggca

SEQ ID NO: 4726381 - DNA, 25 bp, Homo sapien
ttgagggtaactgccaacagcttcc

SEQ ID NO: 4726382 - DNA, 25 bp, Homo sapien
tgtacttctacagagggctgccacc

SEQ ID NO: 4726383 - DNA, 25 bp, Homo sapien
tttatggccaaatcacagaatcctg

SEQ ID NO: 4726384 - DNA, 25 bp, Homo sapien
tatggccaaatcacagaatcctgaa

SEQ ID NO: 4726385 - DNA, 25 bp, Homo sapien
tcctgaagttagagactccaaggag

SEQ ID NO: 4726386 - DNA, 25 bp, Homo sapien
attatttatggccaaatcacagaat

SEQ ID NO: 4726387 - DNA, 25 bp, Homo sapien
caccactagtacctcaaaaggcaga

SEQ ID NO: 4726388 - DNA, 25 bp, Homo sapien
gaaactcagtagtatcaatgcccaa

SEQ ID NO: 4726389 - DNA, 25 bp, Homo sapien
gatgcacctaaagatggaaactcag

SEQ ID NO: 4726390 - DNA, 25 bp, Homo sapien
cagttcctccaattgataccagcga

SEQ ID NO: 4726391 - DNA, 25 bp, Homo sapien
gagtactatccctcgtgacccatga

SEQ ID NO: 4726392 - DNA, 25 bp, Homo sapien
gagttttcagggcacataaccacaa

SEQ ID NO: 4726393 - DNA, 25 bp, Homo sapien
gatcaagccgatatcagtgaggaaa

SEQ ID NO: 4726394 - DNA, 25 bp, Homo sapien
gatacagagccacacttgagtagga

SEQ ID NO: 4726395 - DNA, 25 bp, Homo sapien
ggcaagtgcaaaagcagtcactcca

SEQ ID NO: 4726396 - DNA, 25 bp, Homo sapien
aaaattactgcgaaattgggagctg

SEQ ID NO: 4726397 - DNA, 25 bp, Homo sapien
gaagcaaggatatgtgaccatgatg

SEQ ID NO: 4726398 - DNA, 25 bp, Homo sapien
tgaagtagcatagccttttcgacaa

SEQ ID NO: 4726399 - DNA, 25 bp, Homo sapien
caacagaacataattcacatgctag

SEQ ID NO: 4726400 - DNA, 25 bp, Homo sapien
tagttcctactatgacctggtcacg

SEQ ID NO: 4726401 - DNA, 25 bp, Homo sapien
gccaatgatactgacacaaccggat

SEQ ID NO: 4726402 - DNA, 25 bp, Homo sapien
caaccggattatctatatgtaacga

SEQ ID NO: 4726403 - DNA, 25 bp, Homo sapien
agtggggactgagacctggtaccat

SEQ ID NO: 4726404 - DNA, 25 bp, Homo sapien
gagtattcactggtccggtaggaaa

SEQ ID NO: 4726405 - DNA, 25 bp, Homo sapien
ttcactggtccggtaggaaaagcag

SEQ ID NO: 4726406 - DNA, 25 bp, Homo sapien
cagagcagtgagagtattcactggt

SEQ ID NO: 4726407 - DNA, 25 bp, Homo sapien
tgggatttataatgaatggcccaaa

SEQ ID NO: 4726408 - DNA, 25 bp, Homo sapien
tgcaggttgaggacttagatgtatc

SEQ ID NO: 4726409 - DNA, 25 bp, Homo sapien
tggatgctacatacatcataaaagc

SEQ ID NO: 4726410 - DNA, 25 bp, Homo sapien
ttcacactgactttaggatggcggc

SEQ ID NO: 4726411 - DNA, 25 bp, Homo sapien
tagtaacagtacataagggttccaa

SEQ ID NO: 4726412 - DNA, 25 bp, Homo sapien
aaatggccattctaacagttgtgag

SEQ ID NO: 4726413 - DNA, 25 bp, Homo sapien
gagcatcccttcacgtacctgttgg

SEQ ID NO: 4726414 - DNA, 25 bp, Homo sapien
tcccattcgatagactgccatttga

SEQ ID NO: 4726415 - DNA, 25 bp, Homo sapien
ggaagacagaaaagctgctgtgccc

SEQ ID NO: 4726416 - DNA, 25 bp, Homo sapien
ttttatggcactaagtttgggattg

SEQ ID NO: 4726417 - DNA, 25 bp, Homo sapien
tgctgtgccctttctgaatgcctga

SEQ ID NO: 4726418 - DNA, 25 bp, Homo sapien
cagaaactgtgaccataaaaaaatg

SEQ ID NO: 4726419 - DNA, 25 bp, Homo sapien
gagatccaactttcttctatgaagg

SEQ ID NO: 4726420 - DNA, 25 bp, Homo sapien
aatgcgaagcagtatgagatccaac

SEQ ID NO: 4726421 - DNA, 25 bp, Homo sapien
caattcaattggtctaatgcgaagc

SEQ ID NO: 4726422 - DNA, 25 bp, Homo sapien
atgaaggcagacatgagagctttgc

SEQ ID NO: 4726423 - DNA, 25 bp, Homo sapien
aataaattgggtgactgaatccagc

SEQ ID NO: 4726424 - DNA, 25 bp, Homo sapien
catgcctaactagaaatactgcgtt

SEQ ID NO: 4726425 - DNA, 25 bp, Homo sapien
tttttggccaacttcataggagcac

SEQ ID NO: 4726426 - DNA, 25 bp, Homo sapien
tgccagatctaaaatagtgcctagg

SEQ ID NO: 4726427 - DNA, 25 bp, Homo sapien
ggacacaaagtgagctcatacagca

SEQ ID NO: 4726428 - DNA, 25 bp, Homo sapien
cacgctgaactcgatttgtaatgag

SEQ ID NO: 4726429 - DNA, 25 bp, Homo sapien
cagaatcaatacagtggcaacacaa

SEQ ID NO: 4726430 - DNA, 25 bp, Homo sapien
tgatccacgtgtgctctgtccttgc

SEQ ID NO: 4726431 - DNA, 25 bp, Homo sapien
cttgtgaaaagtgcttcaattatct

SEQ ID NO: 4726432 - DNA, 25 bp, Homo sapien
aaaacaacttgtgaaaagtgcttca

SEQ ID NO: 4726433 - DNA, 25 bp, Homo sapien
taatttcagcctatcaaactacctt

SEQ ID NO: 4726434 - DNA, 25 bp, Homo sapien
cttttgtaatttcagcctatcaaac

SEQ ID NO: 4726435 - DNA, 25 bp, Homo sapien
tattctctagggtggacaaggcaaa

SEQ ID NO: 4726436 - DNA, 25 bp, Homo sapien
tttggtcaaacaggcaggcaaagcc

SEQ ID NO: 4726437 - DNA, 25 bp, Homo sapien
taaaacacgaacttcaggcaccagt

SEQ ID NO: 4726438 - DNA, 25 bp, Homo sapien
gaccttcgaggtatcaagaactcca

SEQ ID NO: 4726439 - DNA, 25 bp, Homo sapien
gaatgcctactgcttgaagggtcct

SEQ ID NO: 4726440 - DNA, 25 bp, Homo sapien
cccacaggagagttaggtacgctaa

SEQ ID NO: 4726441 - DNA, 25 bp, Homo sapien
catcaattagccaaaagagggcgca

SEQ ID NO: 4726442 - DNA, 25 bp, Homo sapien
gggcgcagaaacaacaccagtagat

SEQ ID NO: 4726443 - DNA, 25 bp, Homo sapien
gcattcaactgatatctacctacct

SEQ ID NO: 4726444 - DNA, 25 bp, Homo sapien
ccttatgaacagttctgtcaccagg

SEQ ID NO: 4726445 - DNA, 25 bp, Homo sapien
ttctcaaggtctttatttgaaagga

SEQ ID NO: 4726446 - DNA, 25 bp, Homo sapien
gtatacaatataaggcattcaactg

SEQ ID NO: 4726447 - DNA, 25 bp, Homo sapien
cttctatttaatttactacgtctct

SEQ ID NO: 4726448 - DNA, 25 bp, Homo sapien
aaatatgttcgtctgctgtatttct

SEQ ID NO: 4726449 - DNA, 25 bp, Homo sapien
aataaatatgttcgtctgctgtatt

SEQ ID NO: 4726450 - DNA, 25 bp, Homo sapien
taaatatgttcgtctgctgtatttc

SEQ ID NO: 4726451 - DNA, 25 bp, Homo sapien
ataaatatgttcgtctgctgtattt

SEQ ID NO: 4726452 - DNA, 25 bp, Homo sapien
gaagaaaacgtaagcaagccactcc

SEQ ID NO: 4726453 - DNA, 25 bp, Homo sapien
gtattagtcccacaacaggatcaag

SEQ ID NO: 4726454 - DNA, 25 bp, Homo sapien
caactggctgacaatggtaaccttc

SEQ ID NO: 4726455 - DNA, 25 bp, Homo sapien
taaccacagtatagccaactggctg

SEQ ID NO: 4726456 - DNA, 25 bp, Homo sapien
gactgtcatagttctattatcataa

SEQ ID NO: 4726457 - DNA, 25 bp, Homo sapien
gaagactgtcatagttctattatca

SEQ ID NO: 4726458 - DNA, 25 bp, Homo sapien
ttgaagactgtcatagttctattat

SEQ ID NO: 4726459 - DNA, 25 bp, Homo sapien
tgtcatagttctattatcataaaac

SEQ ID NO: 4726460 - DNA, 25 bp, Homo sapien
cgcattgccagcatggaggacccat

SEQ ID NO: 4726461 - DNA, 25 bp, Homo sapien
tgccagcatggaggacccatctgtg

SEQ ID NO: 4726462 - DNA, 25 bp, Homo sapien
ctgtaacgcattgccagcatggagg

SEQ ID NO: 4726463 - DNA, 25 bp, Homo sapien
taacgcattgccagcatggaggacc

SEQ ID NO: 4726464 - DNA, 25 bp, Homo sapien
ctgagaaggtctgctgccatggctt

SEQ ID NO: 4726465 - DNA, 25 bp, Homo sapien
ctcgcagtggttgcctctgcctgaa

SEQ ID NO: 4726466 - DNA, 25 bp, Homo sapien
ttagacatgattggcaaagtggtag

SEQ ID NO: 4726467 - DNA, 25 bp, Homo sapien
caggatcttccaacgagtgccaaaa

SEQ ID NO: 4726468 - DNA, 25 bp, Homo sapien
ttcacaacagtttgacatcttttca

SEQ ID NO: 4726469 - DNA, 25 bp, Homo sapien
cagtttgacatcttttcaatagatg

SEQ ID NO: 4726470 - DNA, 25 bp, Homo sapien
caacagtttgacatcttttcaatag

SEQ ID NO: 4726471 - DNA, 25 bp, Homo sapien
cacaacagtttgacatcttttcaat

SEQ ID NO: 4726472 - DNA, 25 bp, Homo sapien
ttcattcaaatacaccaaaagctgg

SEQ ID NO: 4726473 - DNA, 25 bp, Homo sapien
caaactcttgcagctacaggtaaaa

SEQ ID NO: 4726474 - DNA, 25 bp, Homo sapien
ccaagaacttatttggctgcaaaac

SEQ ID NO: 4726475 - DNA, 25 bp, Homo sapien
tacataggtggacttatttaagcag

SEQ ID NO: 4726476 - DNA, 25 bp, Homo sapien
cagaaaaaaacccttgcaatttgag

SEQ ID NO: 4726477 - DNA, 25 bp, Homo sapien
taaaatgtaacgttcaatactacag

SEQ ID NO: 4726478 - DNA, 25 bp, Homo sapien
tttccactcggttttagaaatatca

SEQ ID NO: 4726479 - DNA, 25 bp, Homo sapien
tatcacctcataaccaaatctctct

SEQ ID NO: 4726480 - DNA, 25 bp, Homo sapien
gatgatgccaattagttgagtgtaa

SEQ ID NO: 4726481 - DNA, 25 bp, Homo sapien
tgcccataaaggctgctagtctcat

SEQ ID NO: 4726482 - DNA, 25 bp, Homo sapien
ttattccaactaacatagtaatgcc

SEQ ID NO: 4726483 - DNA, 25 bp, Homo sapien
tgtaaaagagtccagttattccaac

SEQ ID NO: 4726484 - DNA, 25 bp, Homo sapien
tatggccaattcatgtctaaaaaca

SEQ ID NO: 4726485 - DNA, 25 bp, Homo sapien
atggccaattcatgtctaaaaacaa

SEQ ID NO: 4726486 - DNA, 25 bp, Homo sapien
ttttataacagggatgcatgcagag

SEQ ID NO: 4726487 - DNA, 25 bp, Homo sapien
aaatatggtccatggcctcaagaag

SEQ ID NO: 4726488 - DNA, 25 bp, Homo sapien
taggaaggccaccagagatagtatg

SEQ ID NO: 4726489 - DNA, 25 bp, Homo sapien
ccaagtggatggaaaggacacccaa

SEQ ID NO: 4726490 - DNA, 25 bp, Homo sapien
cttagcatgctatagttggttgatt

SEQ ID NO: 4726491 - DNA, 25 bp, Homo sapien
cattgtctaaaggtttgtttgtgag

SEQ ID NO: 4726492 - DNA, 25 bp, Homo sapien
aatgccttgtctccaacctggaggg

SEQ ID NO: 4726493 - DNA, 25 bp, Homo sapien
tttccttcagcagttgtaccttttc

SEQ ID NO: 4726494 - DNA, 25 bp, Homo sapien
gggacactcttgtgcattgcagaac

SEQ ID NO: 4726495 - DNA, 25 bp, Homo sapien
agaaccactgtacccactggtaaag

SEQ ID NO: 4726496 - DNA, 25 bp, Homo sapien
agtagcactcccctagctgcgacaa

SEQ ID NO: 4726497 - DNA, 25 bp, Homo sapien
tcagcactactgacactcggctgga

SEQ ID NO: 4726498 - DNA, 25 bp, Homo sapien
tttataactgactatggaaacatgt

SEQ ID NO: 4726499 - DNA, 25 bp, Homo sapien
ggacatatactcagtcaacctggtg

SEQ ID NO: 4726500 - DNA, 25 bp, Homo sapien
gttccatctctcactaaaagcgtag

SEQ ID NO: 4726501 - DNA, 25 bp, Homo sapien
gcgtagagatatactgacaaatgga

SEQ ID NO: 4726502 - DNA, 25 bp, Homo sapien
tatcttcctagcagaagagttggct

SEQ ID NO: 4726503 - DNA, 25 bp, Homo sapien
taacccactgcgatgcctttataag

SEQ ID NO: 4726504 - DNA, 25 bp, Homo sapien
gctctcatagccttaaacgcagtta

SEQ ID NO: 4726505 - DNA, 25 bp, Homo sapien
taacagactgcctcaatgaaaacag

SEQ ID NO: 4726506 - DNA, 25 bp, Homo sapien
cggcctcccaatataaacatttctt

SEQ ID NO: 4726507 - DNA, 25 bp, Homo sapien
cctcggcctcccaatataaacattt

SEQ ID NO: 4726508 - DNA, 25 bp, Homo sapien
tcggcctcccaatataaacatttct

SEQ ID NO: 4726509 - DNA, 25 bp, Homo sapien
gcctcccaatataaacatttcttac

SEQ ID NO: 4726510 - DNA, 25 bp, Homo sapien
gaaaatagtaatagtggcagaaaga

SEQ ID NO: 4726511 - DNA, 25 bp, Homo sapien
agaaaatagtaatagtggcagaaag

SEQ ID NO: 4726512 - DNA, 25 bp, Homo sapien
aaatagtaatagtggcagaaagaaa

SEQ ID NO: 4726513 - DNA, 25 bp, Homo sapien
tagtaatagtggcagaaagaaaaca

SEQ ID NO: 4726514 - DNA, 25 bp, Homo sapien
tcagtgcgtagcaagtaagaagttc

SEQ ID NO: 4726515 - DNA, 25 bp, Homo sapien
acaactgcagaaagagccaatgatt

SEQ ID NO: 4726516 - DNA, 25 bp, Homo sapien
gaaagagccaatgattatcttcacc

SEQ ID NO: 4726517 - DNA, 25 bp, Homo sapien
gcgtagcaagtaagaagttcagtgt

SEQ ID NO: 4726518 - DNA, 25 bp, Homo sapien
ttcctgaatctctttaggtcccttg

SEQ ID NO: 4726519 - DNA, 25 bp, Homo sapien
gtcccttgtctactctcctttctga

SEQ ID NO: 4726520 - DNA, 25 bp, Homo sapien
cagcagtgctctatcaggaaattca

SEQ ID NO: 4726521 - DNA, 25 bp, Homo sapien
cagtgctctatcaggaaattcaatg

SEQ ID NO: 4726522 - DNA, 25 bp, Homo sapien
ccgcagcggctacagtgatgggaac

SEQ ID NO: 4726523 - DNA, 25 bp, Homo sapien
ggtctcatcaaattacacttgttac

SEQ ID NO: 4726524 - DNA, 25 bp, Homo sapien
atgggaacgctttggtctcatcaaa

SEQ ID NO: 4726525 - DNA, 25 bp, Homo sapien
cacttgttacataattcccagaact

SEQ ID NO: 4726526 - DNA, 25 bp, Homo sapien
catgcaagagcaacagtactaaagc

SEQ ID NO: 4726527 - DNA, 25 bp, Homo sapien
gcgttgggaaaatactcccactaca

SEQ ID NO: 4726528 - DNA, 25 bp, Homo sapien
tactttagttgaatggtcaggagca

SEQ ID NO: 4726529 - DNA, 25 bp, Homo sapien
caggagcaacatcaacatgctggac

SEQ ID NO: 4726530 - DNA, 25 bp, Homo sapien
tcttcctggatcagttatggaggcc

SEQ ID NO: 4726531 - DNA, 25 bp, Homo sapien
catgtgggatcttggggttctcagg

SEQ ID NO: 4726532 - DNA, 25 bp, Homo sapien
ttcctggatcagttatggaggccct

SEQ ID NO: 4726533 - DNA, 25 bp, Homo sapien
cctggatcagttatggaggccctca

SEQ ID NO: 4726534 - DNA, 25 bp, Homo sapien
gacagaatatggaaatgccatagaa

SEQ ID NO: 4726535 - DNA, 25 bp, Homo sapien
aggcaaccagacagaatatggaaat

SEQ ID NO: 4726536 - DNA, 25 bp, Homo sapien
gcaaccagacagaatatggaaatgc

SEQ ID NO: 4726537 - DNA, 25 bp, Homo sapien
ctaaggcaaccagacagaatatgga

SEQ ID NO: 4726538 - DNA, 25 bp, Homo sapien
caacaaagtgaatccggagacccat

SEQ ID NO: 4726539 - DNA, 25 bp, Homo sapien
ttgtataaccaaacaaagacaatca

SEQ ID NO: 4726540 - DNA, 25 bp, Homo sapien
agcaccaaccatgtgggtcaacaac

SEQ ID NO: 4726541 - DNA, 25 bp, Homo sapien
ccaaccatgtgggtcaacaacaaag

SEQ ID NO: 4726542 - DNA, 25 bp, Homo sapien
cctgctaacccacaaggaaggatga

SEQ ID NO: 4726543 - DNA, 25 bp, Homo sapien
tataactgcctgctaacccacaagg

SEQ ID NO: 4726544 - DNA, 25 bp, Homo sapien
caatcttataactgcctgctaaccc

SEQ ID NO: 4726545 - DNA, 25 bp, Homo sapien
tttgcaatcttataactgcctgcta

SEQ ID NO: 4726546 - DNA, 25 bp, Homo sapien
tctaccaggcgtggcttatggctga

SEQ ID NO: 4726547 - DNA, 25 bp, Homo sapien
cataactggaagaggtgcaagatct

SEQ ID NO: 4726548 - DNA, 25 bp, Homo sapien
caagatctctccactcaattaatat

SEQ ID NO: 4726549 - DNA, 25 bp, Homo sapien
cactcaattaatatctaccaggcgt

SEQ ID NO: 4726550 - DNA, 25 bp, Homo sapien
cactgttcgacgatattccatccat

SEQ ID NO: 4726551 - DNA, 25 bp, Homo sapien
tacctaaaaagtactcctgagactg

SEQ ID NO: 4726552 - DNA, 25 bp, Homo sapien
tattggtgggcatgtaagctgatac

SEQ ID NO: 4726553 - DNA, 25 bp, Homo sapien
cacatgaccgacaagaggcatacaa

SEQ ID NO: 4726554 - DNA, 25 bp, Homo sapien
aagctgatacaatcatcctgggagg

SEQ ID NO: 4726555 - DNA, 25 bp, Homo sapien
tctgtggtgctaacaagcatgtttc

SEQ ID NO: 4726556 - DNA, 25 bp, Homo sapien
cataggtattccgatgttaaacaaa

SEQ ID NO: 4726557 - DNA, 25 bp, Homo sapien
tcaaaattaagtgttcgggaagcaa

SEQ ID NO: 4726558 - DNA, 25 bp, Homo sapien
cacttaagattgttgcatgtcatgg

SEQ ID NO: 4726559 - DNA, 25 bp, Homo sapien
ctctcttcaataacagttctccatg

SEQ ID NO: 4726560 - DNA, 25 bp, Homo sapien
gatctctcttcaataacagttctcc

SEQ ID NO: 4726561 - DNA, 25 bp, Homo sapien
ttttaattatatcccaccaaatgga

SEQ ID NO: 4726562 - DNA, 25 bp, Homo sapien
cccaccaaatggatctctcttcaat

SEQ ID NO: 4726563 - DNA, 25 bp, Homo sapien
ctctttaactccttttatgaggcca

SEQ ID NO: 4726564 - DNA, 25 bp, Homo sapien
ggccagcatcatcctgataccaaag

SEQ ID NO: 4726565 - DNA, 25 bp, Homo sapien
gccagcatcatcctgataccaaagc

SEQ ID NO: 4726566 - DNA, 25 bp, Homo sapien
gaatcctctttaactccttttatga

SEQ ID NO: 4726567 - DNA, 25 bp, Homo sapien
tgtctccactaaaaatacaaaaata

SEQ ID NO: 4726568 - DNA, 25 bp, Homo sapien
caaacatgggaaaaccctgtctcca

SEQ ID NO: 4726569 - DNA, 25 bp, Homo sapien
ttcaagacgagcctggcaaacatgg

SEQ ID NO: 4726570 - DNA, 25 bp, Homo sapien
tgggaggatcacttgaggtcaggag

SEQ ID NO: 4726571 - DNA, 25 bp, Homo sapien
tgtcacgcttaaatgagaaattgac

SEQ ID NO: 4726572 - DNA, 25 bp, Homo sapien
attgactggcaaagcagcgcctcca

SEQ ID NO: 4726573 - DNA, 25 bp, Homo sapien
gttgctgtcacgcttaaatgagaaa

SEQ ID NO: 4726574 - DNA, 25 bp, Homo sapien
acagttgctgtcacgcttaaatgag

SEQ ID NO: 4726575 - DNA, 25 bp, Homo sapien
tgcttgctgaagctgaaaatcctgc

SEQ ID NO: 4726576 - DNA, 25 bp, Homo sapien
gcttgctgaagctgaaaatcctgca

SEQ ID NO: 4726577 - DNA, 25 bp, Homo sapien
tgccatccataagccattttccgaa

SEQ ID NO: 4726578 - DNA, 25 bp, Homo sapien
catatagcttgaaaaagaccgtaac

SEQ ID NO: 4726579 - DNA, 25 bp, Homo sapien
ggactctgcagttacaatccagcga

SEQ ID NO: 4726580 - DNA, 25 bp, Homo sapien
tgagaaggtcaataaaggagcaaac

SEQ ID NO: 4726581 - DNA, 25 bp, Homo sapien
ttagctcccgggagccgcgatggga

SEQ ID NO: 4726582 - DNA, 25 bp, Homo sapien
ctgagggcctggaccggccgagtgg

SEQ ID NO: 4726583 - DNA, 25 bp, Homo sapien
ggccgagtgggtgtccgcatgcccg

SEQ ID NO: 4726584 - DNA, 25 bp, Homo sapien
cgctctccccttccgcttccgggag

SEQ ID NO: 4726585 - DNA, 25 bp, Homo sapien
ttcaaagcgcggtctgcagcatcag

SEQ ID NO: 4726586 - DNA, 25 bp, Homo sapien
cttcaaagcgcggtctgcagcatca

SEQ ID NO: 4726587 - DNA, 25 bp, Homo sapien
tggagcatgacgctgggccacaatt

SEQ ID NO: 4726588 - DNA, 25 bp, Homo sapien
ccattctggcaagatagcacatttg

SEQ ID NO: 4726589 - DNA, 25 bp, Homo sapien
tagcttagactgtgtgtcaagtgca

SEQ ID NO: 4726590 - DNA, 25 bp, Homo sapien
catgacctatctgcgttagcttaga

SEQ ID NO: 4726591 - DNA, 25 bp, Homo sapien
aaaacatatgagagatcacagtgcc

SEQ ID NO: 4726592 - DNA, 25 bp, Homo sapien
gtatggaacccagaaagaggcattg

SEQ ID NO: 4726593 - DNA, 25 bp, Homo sapien
tgactacgtgataaaaagtgcaact

SEQ ID NO: 4726594 - DNA, 25 bp, Homo sapien
gagtagtactctccagtgattgtcc

SEQ ID NO: 4726595 - DNA, 25 bp, Homo sapien
tctctggattgatctctaaacctgg

SEQ ID NO: 4726596 - DNA, 25 bp, Homo sapien
caaatatttcacgtagcctgcctcc

SEQ ID NO: 4726597 - DNA, 25 bp, Homo sapien
tggctaccagtgattgttcctcttc

SEQ ID NO: 4726598 - DNA, 25 bp, Homo sapien
gaggcaaccaagcaagttactcctt

SEQ ID NO: 4726599 - DNA, 25 bp, Homo sapien
tcaaaggtaatagtgggatagctct

SEQ ID NO: 4726600 - DNA, 25 bp, Homo sapien
gacaaggtctcaaacgtgtaccaat

SEQ ID NO: 4726601 - DNA, 25 bp, Homo sapien
ttagcaatcatctaggtcgggtccg

SEQ ID NO: 4726602 - DNA, 25 bp, Homo sapien
tccctgaaaatgttatgtacccact

SEQ ID NO: 4726603 - DNA, 25 bp, Homo sapien
tgtaggatgtgtccatcttcatgct

SEQ ID NO: 4726604 - DNA, 25 bp, Homo sapien
gcagttcagtggcaagtgcatcgtg

SEQ ID NO: 4726605 - DNA, 25 bp, Homo sapien
acagacccgcatttcccaaagcaaa

SEQ ID NO: 4726606 - DNA, 25 bp, Homo sapien
ttttcacagccttcgtgggttatag

SEQ ID NO: 4726607 - DNA, 25 bp, Homo sapien
ccttgatcacggaggaaagttcagt

SEQ ID NO: 4726608 - DNA, 25 bp, Homo sapien
gcaggtctcccaatgtacttcatgg

SEQ ID NO: 4726609 - DNA, 25 bp, Homo sapien
tacttcatggcttttgatgggcaag

SEQ ID NO: 4726610 - DNA, 25 bp, Homo sapien
ccatctatcggctggatgagggact

SEQ ID NO: 4726611 - DNA, 25 bp, Homo sapien
ggaagggctcactatctgagtccct

SEQ ID NO: 4726612 - DNA, 25 bp, Homo sapien
cgtgtggtctttcctagaggcagga

SEQ ID NO: 4726613 - DNA, 25 bp, Homo sapien
tctggcggccatcctggtgccgtgt

SEQ ID NO: 4726614 - DNA, 25 bp, Homo sapien
ccgtgtggtctttcctagaggcagg

SEQ ID NO: 4726615 - DNA, 25 bp, Homo sapien
gagaactctgattctggcggccatc

SEQ ID NO: 4726616 - DNA, 25 bp, Homo sapien
aaggagaggctcattctctgcagga

SEQ ID NO: 4726617 - DNA, 25 bp, Homo sapien
ccaaaggagaggctcattctctgca

SEQ ID NO: 4726618 - DNA, 25 bp, Homo sapien
gagaggctcattctctgcaggactg

SEQ ID NO: 4726619 - DNA, 25 bp, Homo sapien
ggaaatcgtatatatagatacctgc

SEQ ID NO: 4726620 - DNA, 25 bp, Homo sapien
attcaggtccttcttgacgctttcc

SEQ ID NO: 4726621 - DNA, 25 bp, Homo sapien
ctagacactattgagctggactgac

SEQ ID NO: 4726622 - DNA, 25 bp, Homo sapien
aaattaatcagcaccagtttatggt

SEQ ID NO: 4726623 - DNA, 25 bp, Homo sapien
ggcagagggaaccttgacaatcatt

SEQ ID NO: 4726624 - DNA, 25 bp, Homo sapien
gagcaagtgacatttggcacaacca

SEQ ID NO: 4726625 - DNA, 25 bp, Homo sapien
gaagttacattggtgctcatagagc

SEQ ID NO: 4726626 - DNA, 25 bp, Homo sapien
gaagggagttctggtaacgctgcaa

SEQ ID NO: 4726627 - DNA, 25 bp, Homo sapien
tcaaaatcctttccgagaatgtagg

SEQ ID NO: 4726628 - DNA, 25 bp, Homo sapien
cagactaaagtggtaggagcaccta

SEQ ID NO: 4726629 - DNA, 25 bp, Homo sapien
aaaaatccaaggactatgagactgg

SEQ ID NO: 4726630 - DNA, 25 bp, Homo sapien
ggagcacctacgatacatatttcag

SEQ ID NO: 4726631 - DNA, 25 bp, Homo sapien
gactggtgctccctgagatttggaa

SEQ ID NO: 4726632 - DNA, 25 bp, Homo sapien
tattttaaaaggtattgagatacaa

SEQ ID NO: 4726633 - DNA, 25 bp, Homo sapien
catttattttaaaaggtattgagat

SEQ ID NO: 4726634 - DNA, 25 bp, Homo sapien
taatactgctggcatttattttaaa

SEQ ID NO: 4726635 - DNA, 25 bp, Homo sapien
aaaggtattgagatacaaaaattgt

SEQ ID NO: 4726636 - DNA, 25 bp, Homo sapien
gttttctatggagcaatattcacag

SEQ ID NO: 4726637 - DNA, 25 bp, Homo sapien
cactagacagaatcacaaaggtata

SEQ ID NO: 4726638 - DNA, 25 bp, Homo sapien
caaaggtatacccactcaatcataa

SEQ ID NO: 4726639 - DNA, 25 bp, Homo sapien
tctttctggcactattaaaaatgtc

SEQ ID NO: 4726640 - DNA, 25 bp, Homo sapien
gccagcatgcacttggtcgttcaaa

SEQ ID NO: 4726641 - DNA, 25 bp, Homo sapien
tgtctttgaaccaaaacacagctct

SEQ ID NO: 4726642 - DNA, 25 bp, Homo sapien
cacataattatgaggtttggctctc

SEQ ID NO: 4726643 - DNA, 25 bp, Homo sapien
tgaaggcaacaggttcaccaccgat

SEQ ID NO: 4726644 - DNA, 25 bp, Homo sapien
gtcccagagccaccgcatgtgctgc

SEQ ID NO: 4726645 - DNA, 25 bp, Homo sapien
caatgtcccagagccaccgcatgtg

SEQ ID NO: 4726646 - DNA, 25 bp, Homo sapien
tgtcccagagccaccgcatgtgctg

SEQ ID NO: 4726647 - DNA, 25 bp, Homo sapien
atgtcccagagccaccgcatgtgct

SEQ ID NO: 4726648 - DNA, 25 bp, Homo sapien
ggagaatacagttacaaggttgccc

SEQ ID NO: 4726649 - DNA, 25 bp, Homo sapien
gaatacagttacaaggttgcccagg

SEQ ID NO: 4726650 - DNA, 25 bp, Homo sapien
ctggagaatacagttacaaggttgc

SEQ ID NO: 4726651 - DNA, 25 bp, Homo sapien
gagaatacagttacaaggttgccca

SEQ ID NO: 4726652 - DNA, 25 bp, Homo sapien
tgtacagagcatgagagactaggat

SEQ ID NO: 4726653 - DNA, 25 bp, Homo sapien
cactgaatggccttagaccgctgga

SEQ ID NO: 4726654 - DNA, 25 bp, Homo sapien
gatgcaatgatgatttctaggcctt

SEQ ID NO: 4726655 - DNA, 25 bp, Homo sapien
gattaccccttaattccctgactga

SEQ ID NO: 4726656 - DNA, 25 bp, Homo sapien
ctaaggataggccagcaggggttcc

SEQ ID NO: 4726657 - DNA, 25 bp, Homo sapien
aggccagcaggggttccagacactc

SEQ ID NO: 4726658 - DNA, 25 bp, Homo sapien
taaggataggccagcaggggttcca

SEQ ID NO: 4726659 - DNA, 25 bp, Homo sapien
gataggccagcaggggttccagaca

SEQ ID NO: 4726660 - DNA, 25 bp, Homo sapien
cagtcaggctaatataaaagggtca

SEQ ID NO: 4726661 - DNA, 25 bp, Homo sapien
gaaggatccaataagctaatgcatg

SEQ ID NO: 4726662 - DNA, 25 bp, Homo sapien
tatacctgtgagcaagtgatttcgc

SEQ ID NO: 4726663 - DNA, 25 bp, Homo sapien
taggtttgtcaacatgagggcatcg

SEQ ID NO: 4726664 - DNA, 25 bp, Homo sapien
catggcaatggtgcagctttaacag

SEQ ID NO: 4726665 - DNA, 25 bp, Homo sapien
gaaactgcaatgctgctgactcaga

SEQ ID NO: 4726666 - DNA, 25 bp, Homo sapien
taatcgcattgctagaggcccgacg

SEQ ID NO: 4726667 - DNA, 25 bp, Homo sapien
gatcaataataaccagagacttccc

SEQ ID NO: 4726668 - DNA, 25 bp, Homo sapien
tgttccctgcaagcttgggcagccg

SEQ ID NO: 4726669 - DNA, 25 bp, Homo sapien
tctgctctgtgatcaagatgtgaca

SEQ ID NO: 4726670 - DNA, 25 bp, Homo sapien
gatcaagatgtgacagtagcctgag

SEQ ID NO: 4726671 - DNA, 25 bp, Homo sapien
ggtgccacccggctggacaggattt

SEQ ID NO: 4726672 - DNA, 25 bp, Homo sapien
ggcgatcccattgcactgatacagc

SEQ ID NO: 4726673 - DNA, 25 bp, Homo sapien
ggctttccaggcgatcccattgcac

SEQ ID NO: 4726674 - DNA, 25 bp, Homo sapien
cactgatacagcttctggatgcctt

SEQ ID NO: 4726675 - DNA, 25 bp, Homo sapien
tggaagagtccctttaattccagag

SEQ ID NO: 4726676 - DNA, 25 bp, Homo sapien
tgtggctgactaatgatggatactt

SEQ ID NO: 4726677 - DNA, 25 bp, Homo sapien
cttatctgcttgaggcagttctgcc

SEQ ID NO: 4726678 - DNA, 25 bp, Homo sapien
ggcagttctgccactttgattgtct

SEQ ID NO: 4726679 - DNA, 25 bp, Homo sapien
ccttttgtgagttgggaaactgtca

SEQ ID NO: 4726680 - DNA, 25 bp, Homo sapien
attatagatgatgtctgttccattt

SEQ ID NO: 4726681 - DNA, 25 bp, Homo sapien
ttgtcttggtcacaaaaggaatcaa

SEQ ID NO: 4726682 - DNA, 25 bp, Homo sapien
tttgtcttggtcacaaaaggaatca

SEQ ID NO: 4726683 - DNA, 25 bp, Homo sapien
tctatttcagggtcatggatcattc

SEQ ID NO: 4726684 - DNA, 25 bp, Homo sapien
ggtcatggatcattccctatttgtc

SEQ ID NO: 4726685 - DNA, 25 bp, Homo sapien
tgtctcccctgatgactgctagctg

SEQ ID NO: 4726686 - DNA, 25 bp, Homo sapien
cctttgagaaagatctgtagaatca

SEQ ID NO: 4726687 - DNA, 25 bp, Homo sapien
cacgggtcctaagcttcctttgaga

SEQ ID NO: 4726688 - DNA, 25 bp, Homo sapien
tgtagaatcaaagccccgcagggtg

SEQ ID NO: 4726689 - DNA, 25 bp, Homo sapien
cttgctttggttggaggaatatgaa

SEQ ID NO: 4726690 - DNA, 25 bp, Homo sapien
gcttgctttggttggaggaatatga

SEQ ID NO: 4726691 - DNA, 25 bp, Homo sapien
caaatgcccttctcccatgtgctgt

SEQ ID NO: 4726692 - DNA, 25 bp, Homo sapien
tgcttgctttggttggaggaatatg

SEQ ID NO: 4726693 - DNA, 25 bp, Homo sapien
ttgaaggtgttatcaagcacgttgg

SEQ ID NO: 4726694 - DNA, 25 bp, Homo sapien
tcacgactgagggtgctttcttgac

SEQ ID NO: 4726695 - DNA, 25 bp, Homo sapien
aattaagcattttgatttgaaggtg

SEQ ID NO: 4726696 - DNA, 25 bp, Homo sapien
gactgagggtgctttcttgacaaga

SEQ ID NO: 4726697 - DNA, 25 bp, Homo sapien
gcagcttttgtctttgtgccaagaa

SEQ ID NO: 4726698 - DNA, 25 bp, Homo sapien
cacaggggagttcagaattacttca

SEQ ID NO: 4726699 - DNA, 25 bp, Homo sapien
cctctaatccgtcataggtaattgc

SEQ ID NO: 4726700 - DNA, 25 bp, Homo sapien
ggtaattgctatattccacatctta

SEQ ID NO: 4726701 - DNA, 25 bp, Homo sapien
cacctaggtgtcagagaaatatatt

SEQ ID NO: 4726702 - DNA, 25 bp, Homo sapien
taacatgtctacagctagactgcag

SEQ ID NO: 4726703 - DNA, 25 bp, Homo sapien
tagactgcagtagcccgagtgagct

SEQ ID NO: 4726704 - DNA, 25 bp, Homo sapien
gagctattgtactgctaccaactca

SEQ ID NO: 4726705 - DNA, 25 bp, Homo sapien
gacgatgatgtttccgtttaaatgc

SEQ ID NO: 4726706 - DNA, 25 bp, Homo sapien
tgttcctggacgatgatgtttccgt

SEQ ID NO: 4726707 - DNA, 25 bp, Homo sapien
cacatttgttcctggacgatgatgt

SEQ ID NO: 4726708 - DNA, 25 bp, Homo sapien
tgatgtttccgtttaaatgcaaaca

SEQ ID NO: 4726709 - DNA, 25 bp, Homo sapien
gccgggtgcagtggtaaacaactgt

SEQ ID NO: 4726710 - DNA, 25 bp, Homo sapien
gaaggtatgcctcacatagatctca

SEQ ID NO: 4726711 - DNA, 25 bp, Homo sapien
cctcctagagagaatttatgggctg

SEQ ID NO: 4726712 - DNA, 25 bp, Homo sapien
tctggctgcctctattcatgaagtt

SEQ ID NO: 4726713 - DNA, 25 bp, Homo sapien
ggtgtaacataagccaagccctgat

SEQ ID NO: 4726714 - DNA, 25 bp, Homo sapien
tgggtcccagtgcactatcagtgag

SEQ ID NO: 4726715 - DNA, 25 bp, Homo sapien
catgcacacaaggagaacgctacgt

SEQ ID NO: 4726716 - DNA, 25 bp, Homo sapien
taggaagggacatggcgcacatcat

SEQ ID NO: 4726717 - DNA, 25 bp, Homo sapien
ggaatcacggtgaaatcttttccaa

SEQ ID NO: 4726718 - DNA, 25 bp, Homo sapien
ctgggtcaaactgaatcagtttaga

SEQ ID NO: 4726719 - DNA, 25 bp, Homo sapien
tgaatcagtttagatggaatcacgg

SEQ ID NO: 4726720 - DNA, 25 bp, Homo sapien
gtttagatggaatcacggtgaaatc

SEQ ID NO: 4726721 - DNA, 25 bp, Homo sapien
agacttcatattcggtctgtgacca

SEQ ID NO: 4726722 - DNA, 25 bp, Homo sapien
gccgagtccatggaatatccccttc

SEQ ID NO: 4726723 - DNA, 25 bp, Homo sapien
tgataatttccaagggcaacaaacc

SEQ ID NO: 4726724 - DNA, 25 bp, Homo sapien
tttatacccacaaaggccgagtcca

SEQ ID NO: 4726725 - DNA, 25 bp, Homo sapien
ctacgattgttaactgcacctccat

SEQ ID NO: 4726726 - DNA, 25 bp, Homo sapien
ccttcactacgattgttaactgcac

SEQ ID NO: 4726727 - DNA, 25 bp, Homo sapien
acacaagcaaccttcactacgattg

SEQ ID NO: 4726728 - DNA, 25 bp, Homo sapien
tagagcaggataaaagacacaagca

SEQ ID NO: 4726729 - DNA, 25 bp, Homo sapien
caacagtgtaggttcatagctgagc

SEQ ID NO: 4726730 - DNA, 25 bp, Homo sapien
actgtgtccacactgatcatgtgtc

SEQ ID NO: 4726731 - DNA, 25 bp, Homo sapien
tctatggattaagctcacgagccag

SEQ ID NO: 4726732 - DNA, 25 bp, Homo sapien
cgagccagataaactcaacagtgta

SEQ ID NO: 4726733 - DNA, 25 bp, Homo sapien
tatgtgtaacccatgtggcaatcgc

SEQ ID NO: 4726734 - DNA, 25 bp, Homo sapien
tcgcattagatgtaggagcaccact

SEQ ID NO: 4726735 - DNA, 25 bp, Homo sapien
gaagatctttctacgcagagactgt

SEQ ID NO: 4726736 - DNA, 25 bp, Homo sapien
agaagccacacagctatatgcctgg

SEQ ID NO: 4726737 - DNA, 25 bp, Homo sapien
ttttatcgaggcaacggagtgggac

SEQ ID NO: 4726738 - DNA, 25 bp, Homo sapien
ccataaagattgtgatcctgggaat

SEQ ID NO: 4726739 - DNA, 25 bp, Homo sapien
gattacattttaatatcacgggcca

SEQ ID NO: 4726740 - DNA, 25 bp, Homo sapien
tactttgctctaacctattccccag

SEQ ID NO: 4726741 - DNA, 25 bp, Homo sapien
tgggtttatgatgtaaagaatagtc

SEQ ID NO: 4726742 - DNA, 25 bp, Homo sapien
gggtccatgatttgaaattccacgg

SEQ ID NO: 4726743 - DNA, 25 bp, Homo sapien
tttgaggagtggccgagttccctgt

SEQ ID NO: 4726744 - DNA, 25 bp, Homo sapien
agaatagtcttactgtttaagtcct

SEQ ID NO: 4726745 - DNA, 25 bp, Homo sapien
gatgtccatgttttgggccttgtag

SEQ ID NO: 4726746 - DNA, 25 bp, Homo sapien
gatctgatcgtcctcagtgtcaggg

SEQ ID NO: 4726747 - DNA, 25 bp, Homo sapien
gatgtaaatcccgtagcagccattt

SEQ ID NO: 4726748 - DNA, 25 bp, Homo sapien
ggtctgatgccttcaacacgcggga

SEQ ID NO: 4726749 - DNA, 25 bp, Homo sapien
ttgagaaggggaatgcaagagtgtg

SEQ ID NO: 4726750 - DNA, 25 bp, Homo sapien
gaatgcaagagtgtgatacgaggag

SEQ ID NO: 4726751 - DNA, 25 bp, Homo sapien
gaaggggaatgcaagagtgtgatac

SEQ ID NO: 4726752 - DNA, 25 bp, Homo sapien
gggaatgcaagagtgtgatacgagg

SEQ ID NO: 4726753 - DNA, 25 bp, Homo sapien
caacaatgacataaaatgttgtcca

SEQ ID NO: 4726754 - DNA, 25 bp, Homo sapien
taaaatgttgtccaaaggcccctca

SEQ ID NO: 4726755 - DNA, 25 bp, Homo sapien
atgacataaaatgttgtccaaaggc

SEQ ID NO: 4726756 - DNA, 25 bp, Homo sapien
cataaaatgttgtccaaaggcccct

SEQ ID NO: 4726757 - DNA, 25 bp, Homo sapien
agttatcaagaactatcaggaatag

SEQ ID NO: 4726758 - DNA, 25 bp, Homo sapien
taaaccatctcgacctgagactgag

SEQ ID NO: 4726759 - DNA, 25 bp, Homo sapien
tagttaatgacataaggaaatgttc

SEQ ID NO: 4726760 - DNA, 25 bp, Homo sapien
tcatgttatcaggaatatgattagt

SEQ ID NO: 4726761 - DNA, 25 bp, Homo sapien
tatccctggttggacagtacagaga

SEQ ID NO: 4726762 - DNA, 25 bp, Homo sapien
gaatttgcagccaaagagacccaga

SEQ ID NO: 4726763 - DNA, 25 bp, Homo sapien
tacagagactggtatcaacctaggt

SEQ ID NO: 4726764 - DNA, 25 bp, Homo sapien
taggaaggaactctaacatctgcac

SEQ ID NO: 4726765 - DNA, 25 bp, Homo sapien
tgtgttcacgatgtcaatatcttct

SEQ ID NO: 4726766 - DNA, 25 bp, Homo sapien
gtgttcacgatgtcaatatcttctt

SEQ ID NO: 4726767 - DNA, 25 bp, Homo sapien
ctttgcattttttggacctcctgac

SEQ ID NO: 4726768 - DNA, 25 bp, Homo sapien
acatctctggcaaatgaactgtgtt

SEQ ID NO: 4726769 - DNA, 25 bp, Homo sapien
tctctggcaaatgaactgtgttttt

SEQ ID NO: 4726770 - DNA, 25 bp, Homo sapien
tcacatctctggcaaatgaactgtg

SEQ ID NO: 4726771 - DNA, 25 bp, Homo sapien
tctggcaaatgaactgtgtttttca

SEQ ID NO: 4726772 - DNA, 25 bp, Homo sapien
gctcggtccgcagtccattgctgat

SEQ ID NO: 4726773 - DNA, 25 bp, Homo sapien
tctccgcaggtgtatcagggtcggt

SEQ ID NO: 4726774 - DNA, 25 bp, Homo sapien
ttcctggttaccacaggcagggctc

SEQ ID NO: 4726775 - DNA, 25 bp, Homo sapien
aattgtgttgaagtagccctgtccc

SEQ ID NO: 4726776 - DNA, 25 bp, Homo sapien
ctggtaaagagaggcaaggcagcct

SEQ ID NO: 4726777 - DNA, 25 bp, Homo sapien
tggtaaagagaggcaaggcagcctt

SEQ ID NO: 4726778 - DNA, 25 bp, Homo sapien
tagcgcaaatataagccaaaggacg

SEQ ID NO: 4726779 - DNA, 25 bp, Homo sapien
ccaaaggacgtgtatttttagcatt

SEQ ID NO: 4726780 - DNA, 25 bp, Homo sapien
aaatcagccattggtaccttagcgc

SEQ ID NO: 4726781 - DNA, 25 bp, Homo sapien
ctctgtggagagtgttaaatcagcc

SEQ ID NO: 4726782 - DNA, 25 bp, Homo sapien
caaatgcaagcttgagtgagtgcca

SEQ ID NO: 4726783 - DNA, 25 bp, Homo sapien
gactccatcagaggcggccatcttg

SEQ ID NO: 4726784 - DNA, 25 bp, Homo sapien
agtgccagggactccatcagaggcg

SEQ ID NO: 4726785 - DNA, 25 bp, Homo sapien
aatgcaagcttgagtgagtgccagg

SEQ ID NO: 4726786 - DNA, 25 bp, Homo sapien
gtgaggtcaccgcagttgtcttatg

SEQ ID NO: 4726787 - DNA, 25 bp, Homo sapien
aggacggccacatctactcgatgcg

SEQ ID NO: 4726788 - DNA, 25 bp, Homo sapien
tcaccgcagttgtcttatgatccag

SEQ ID NO: 4726789 - DNA, 25 bp, Homo sapien
catctactcgatgcgtgcatggcct

SEQ ID NO: 4726790 - DNA, 25 bp, Homo sapien
cagtcactaatgtcttcagcagact

SEQ ID NO: 4726791 - DNA, 25 bp, Homo sapien
aacatctttatgcattcagtcctgt

SEQ ID NO: 4726792 - DNA, 25 bp, Homo sapien
tatgcattcagtcctgtgttctcca

SEQ ID NO: 4726793 - DNA, 25 bp, Homo sapien
agacagtcactaatgtcttcagcag

SEQ ID NO: 4726794 - DNA, 25 bp, Homo sapien
tcaaaactggattgtatacaatggt

SEQ ID NO: 4726795 - DNA, 25 bp, Homo sapien
aggacctcaggatcaaccagctttg

SEQ ID NO: 4726796 - DNA, 25 bp, Homo sapien
caatggttcgttcaaagtccaacat

SEQ ID NO: 4726797 - DNA, 25 bp, Homo sapien
atttcccagttctcatgcccggcct

SEQ ID NO: 4726798 - DNA, 25 bp, Homo sapien
tctggacttggctcttgctttatgt

SEQ ID NO: 4726799 - DNA, 25 bp, Homo sapien
cgagattatagatcttctggacttg

SEQ ID NO: 4726800 - DNA, 25 bp, Homo sapien
ctggacttggctcttgctttatgtg

SEQ ID NO: 4726801 - DNA, 25 bp, Homo sapien
ctgcgagattatagatcttctggac

SEQ ID NO: 4726802 - DNA, 25 bp, Homo sapien
gtgaagcacattaacagatctcctt

SEQ ID NO: 4726803 - DNA, 25 bp, Homo sapien
tgaagcacattaacagatctccttt

SEQ ID NO: 4726804 - DNA, 25 bp, Homo sapien
tgaatctgtcactggagacagtcac

SEQ ID NO: 4726805 - DNA, 25 bp, Homo sapien
ctgaatctgtcactggagacagtca

SEQ ID NO: 4726806 - DNA, 25 bp, Homo sapien
catattcgatctggccatatcgcgg

SEQ ID NO: 4726807 - DNA, 25 bp, Homo sapien
tatcacctttagacaccacgagtgg

SEQ ID NO: 4726808 - DNA, 25 bp, Homo sapien
tgtgtacatagcaaactgtctgccc

SEQ ID NO: 4726809 - DNA, 25 bp, Homo sapien
ccacgagtggttttgtaaggatgac

SEQ ID NO: 4726810 - DNA, 25 bp, Homo sapien
ggtgaagctatcttgattctgggaa

SEQ ID NO: 4726811 - DNA, 25 bp, Homo sapien
ctttttccatgtccttgatggtgat

SEQ ID NO: 4726812 - DNA, 25 bp, Homo sapien
ctgttgttgccatcccaaaggtaga

SEQ ID NO: 4726813 - DNA, 25 bp, Homo sapien
tttgacagtcaagagcaggggacct

SEQ ID NO: 4726814 - DNA, 25 bp, Homo sapien
tgtgtgtatctcagcaagttcagat

SEQ ID NO: 4726815 - DNA, 25 bp, Homo sapien
tgtgtatctcagcaagttcagatcc

SEQ ID NO: 4726816 - DNA, 25 bp, Homo sapien
gtgtatctcagcaagttcagatcca

SEQ ID NO: 4726817 - DNA, 25 bp, Homo sapien
tgtatctcagcaagttcagatccac

SEQ ID NO: 4726818 - DNA, 25 bp, Homo sapien
gccaggggagagaggaacccagtcc

SEQ ID NO: 4726819 - DNA, 25 bp, Homo sapien
gagagaggaacccagtccctcccta

SEQ ID NO: 4726820 - DNA, 25 bp, Homo sapien
agagaggaacccagtccctccctat

SEQ ID NO: 4726821 - DNA, 25 bp, Homo sapien
caggggagagaggaacccagtccct

SEQ ID NO: 4726822 - DNA, 25 bp, Homo sapien
catctgaacctaaacaataagggtt

SEQ ID NO: 4726823 - DNA, 25 bp, Homo sapien
gactcccacgtgaagttttctccca

SEQ ID NO: 4726824 - DNA, 25 bp, Homo sapien
caggatgggatgactcccacgtgaa

SEQ ID NO: 4726825 - DNA, 25 bp, Homo sapien
ttggtccaagactttgcccatctga

SEQ ID NO: 4726826 - DNA, 25 bp, Homo sapien
tggggaagcctttcaaatacatagt

SEQ ID NO: 4726827 - DNA, 25 bp, Homo sapien
catattcattgcaatttcagccttc

SEQ ID NO: 4726828 - DNA, 25 bp, Homo sapien
ccctgggtgagtcttcatctatggc

SEQ ID NO: 4726829 - DNA, 25 bp, Homo sapien
gaatagcactggaaataatacgagt

SEQ ID NO: 4726830 - DNA, 25 bp, Homo sapien
actgggatgacctctactgaaatgg

SEQ ID NO: 4726831 - DNA, 25 bp, Homo sapien
tcccatctgacaattggattgtaaa

SEQ ID NO: 4726832 - DNA, 25 bp, Homo sapien
ggattgtaaaatcatcagcaaggct

SEQ ID NO: 4726833 - DNA, 25 bp, Homo sapien
cattggtttttcatcattaactggg

SEQ ID NO: 4726834 - DNA, 25 bp, Homo sapien
aatgtccaggtccacagcgctgatg

SEQ ID NO: 4726835 - DNA, 25 bp, Homo sapien
gctgtgaacaggtgcatgtttctgg

SEQ ID NO: 4726836 - DNA, 25 bp, Homo sapien
ctcagagaagtctttgctaaacccc

SEQ ID NO: 4726837 - DNA, 25 bp, Homo sapien
ggcttttgagtgatgctgaacagca

SEQ ID NO: 4726838 - DNA, 25 bp, Homo sapien
gacgtacaccgtgaactggtcggca

SEQ ID NO: 4726839 - DNA, 25 bp, Homo sapien
taatattctgcactacaaagtcagg

SEQ ID NO: 4726840 - DNA, 25 bp, Homo sapien
tagaaaatggtatctccaaggagtg

SEQ ID NO: 4726841 - DNA, 25 bp, Homo sapien
ggtcggcagttggttctatcctcag

SEQ ID NO: 4726842 - DNA, 25 bp, Homo sapien
ggagtatattttcgaggtagccaaa

SEQ ID NO: 4726843 - DNA, 25 bp, Homo sapien
agggagtatattttcgaggtagcca

SEQ ID NO: 4726844 - DNA, 25 bp, Homo sapien
gggagtatattttcgaggtagccaa

SEQ ID NO: 4726845 - DNA, 25 bp, Homo sapien
tcagtggcggacaaatggttaacag

SEQ ID NO: 4726846 - DNA, 25 bp, Homo sapien
ggtcagtggcggacaaatggttaac

SEQ ID NO: 4726847 - DNA, 25 bp, Homo sapien
agtggcggacaaatggttaacagta

SEQ ID NO: 4726848 - DNA, 25 bp, Homo sapien
tcagggtcagtggcggacaaatggt

SEQ ID NO: 4726849 - DNA, 25 bp, Homo sapien
ggtgtcaaaacaaggcatcaggcca

SEQ ID NO: 4726850 - DNA, 25 bp, Homo sapien
tgagatcatacactggaaaggacgc

SEQ ID NO: 4726851 - DNA, 25 bp, Homo sapien
tggctggttgtctactgggtatacc

SEQ ID NO: 4726852 - DNA, 25 bp, Homo sapien
gattgggtccattgtagcaacagcc

SEQ ID NO: 4726853 - DNA, 25 bp, Homo sapien
tacgatgatcaaactgaccaaaaac

SEQ ID NO: 4726854 - DNA, 25 bp, Homo sapien
acgatgatcaaactgaccaaaaacg

SEQ ID NO: 4726855 - DNA, 25 bp, Homo sapien
actacgatgatcaaactgaccaaaa

SEQ ID NO: 4726856 - DNA, 25 bp, Homo sapien
caactacgatgatcaaactgaccaa

SEQ ID NO: 4726857 - DNA, 25 bp, Homo sapien
tgtttgtatgtcacggcctctgaga

SEQ ID NO: 4726858 - DNA, 25 bp, Homo sapien
tgaggttcgcgagcaatcacaaaca

SEQ ID NO: 4726859 - DNA, 25 bp, Homo sapien
taagactggtggctcatcgttgaca

SEQ ID NO: 4726860 - DNA, 25 bp, Homo sapien
aatgtattcagaggtgatgaccacc

SEQ ID NO: 4726861 - DNA, 25 bp, Homo sapien
gagtaggtcatcctgaagaacttca

SEQ ID NO: 4726862 - DNA, 25 bp, Homo sapien
catcggtgacctccaagagtaggtc

SEQ ID NO: 4726863 - DNA, 25 bp, Homo sapien
agaacttcagttccatcatgttgat

SEQ ID NO: 4726864 - DNA, 25 bp, Homo sapien
tctgctgaatttgtgccatcggtga

SEQ ID NO: 4726865 - DNA, 25 bp, Homo sapien
tgcttgtttgcctgcagatccctgc

SEQ ID NO: 4726866 - DNA, 25 bp, Homo sapien
tgaatttagaggaaatccattcagc

SEQ ID NO: 4726867 - DNA, 25 bp, Homo sapien
ttagaggaaatccattcagctccac

SEQ ID NO: 4726868 - DNA, 25 bp, Homo sapien
ttaaggtatggagatcgccccaaga

SEQ ID NO: 4726869 - DNA, 25 bp, Homo sapien
aggtatggagatcgccccaagaaaa

SEQ ID NO: 4726870 - DNA, 25 bp, Homo sapien
cagtcactttcagagggttggtgaa

SEQ ID NO: 4726871 - DNA, 25 bp, Homo sapien
tgcatcagaaattagaatgtgctct

SEQ ID NO: 4726872 - DNA, 25 bp, Homo sapien
tgctgatgatgctttgacctccctc

SEQ ID NO: 4726873 - DNA, 25 bp, Homo sapien
cttccgtgcagaggcaattcccgca

SEQ ID NO: 4726874 - DNA, 25 bp, Homo sapien
ccactgggaggattgtaatgttaaa

SEQ ID NO: 4726875 - DNA, 25 bp, Homo sapien
caggaacttgattgtccactgggag

SEQ ID NO: 4726876 - DNA, 25 bp, Homo sapien
tgtgaactggacatctctgcaatgg

SEQ ID NO: 4726877 - DNA, 25 bp, Homo sapien
aaagcagatcccatgcaaagtaccg

SEQ ID NO: 4726878 - DNA, 25 bp, Homo sapien
ctgtccaccataaataatttcccag

SEQ ID NO: 4726879 - DNA, 25 bp, Homo sapien
tatgctgtccaccataaataatttc

SEQ ID NO: 4726880 - DNA, 25 bp, Homo sapien
actacttttggtatgctgtccacca

SEQ ID NO: 4726881 - DNA, 25 bp, Homo sapien
ttggtatgctgtccaccataaataa

SEQ ID NO: 4726882 - DNA, 25 bp, Homo sapien
tttggaagctggtcatccactggag

SEQ ID NO: 4726883 - DNA, 25 bp, Homo sapien
gtttccttgacaaccaaatgccgag

SEQ ID NO: 4726884 - DNA, 25 bp, Homo sapien
cactggagttatatggattgttgcc

SEQ ID NO: 4726885 - DNA, 25 bp, Homo sapien
agtagttattgtgtagaccagctcc

SEQ ID NO: 4726886 - DNA, 25 bp, Homo sapien
atgattccattaaacaaatccctct

SEQ ID NO: 4726887 - DNA, 25 bp, Homo sapien
gaaagatttggaggttcatggctgt

SEQ ID NO: 4726888 - DNA, 25 bp, Homo sapien
actgaaagatttggaggttcatggc

SEQ ID NO: 4726889 - DNA, 25 bp, Homo sapien
ttctccaccaaaatgacgataataa

SEQ ID NO: 4726890 - DNA, 25 bp, Homo sapien
aaacaccacatacttttgtacaagc

SEQ ID NO: 4726891 - DNA, 25 bp, Homo sapien
taaaacaccacatacttttgtacaa

SEQ ID NO: 4726892 - DNA, 25 bp, Homo sapien
aaaacaccacatacttttgtacaag

SEQ ID NO: 4726893 - DNA, 25 bp, Homo sapien
gaagtctttggtggagtcgctgtca

SEQ ID NO: 4726894 - DNA, 25 bp, Homo sapien
gatgtagtcatcactggcgtccaca

SEQ ID NO: 4726895 - DNA, 25 bp, Homo sapien
tgatgatagcgaacaactccagcct

SEQ ID NO: 4726896 - DNA, 25 bp, Homo sapien
ctgaagctcgcagcatggatccctg

SEQ ID NO: 4726897 - DNA, 25 bp, Homo sapien
ccggccagagacttacaattcttaa

SEQ ID NO: 4726898 - DNA, 25 bp, Homo sapien
cccggccagagacttacaattctta

SEQ ID NO: 4726899 - DNA, 25 bp, Homo sapien
tgctgcaggccaccaacggtgacta

SEQ ID NO: 4726900 - DNA, 25 bp, Homo sapien
tgttcccaagtgatggctcgagact

SEQ ID NO: 4726901 - DNA, 25 bp, Homo sapien
gtgactagccggacagcaccaatgt

SEQ ID NO: 4726902 - DNA, 25 bp, Homo sapien
cattgtcgacaacctgaaactgttc

SEQ ID NO: 4726903 - DNA, 25 bp, Homo sapien
gcaggagcccatgcaacatgtgatt

SEQ ID NO: 4726904 - DNA, 25 bp, Homo sapien
gagcaaacctgggtgtcaccgatca

SEQ ID NO: 4726905 - DNA, 25 bp, Homo sapien
gctcgtttaagctgccacctgagga

SEQ ID NO: 4726906 - DNA, 25 bp, Homo sapien
ccccttgacagaggtacagtaggat

SEQ ID NO: 4726907 - DNA, 25 bp, Homo sapien
tgtggactgtcataggtgcactcct

SEQ ID NO: 4726908 - DNA, 25 bp, Homo sapien
tattccaggatacacggggggcatt

SEQ ID NO: 4726909 - DNA, 25 bp, Homo sapien
agaagtcgtatacctccaattctac

SEQ ID NO: 4726910 - DNA, 25 bp, Homo sapien
tcctttcaaagaagaagtcgtatac

SEQ ID NO: 4726911 - DNA, 25 bp, Homo sapien
tccagaataaacacggccatgaatg

SEQ ID NO: 4726912 - DNA, 25 bp, Homo sapien
taatgttgaacaccagcaagggttt

SEQ ID NO: 4726913 - DNA, 25 bp, Homo sapien
ggctgataggcgatctgcatgtcac

SEQ ID NO: 4726914 - DNA, 25 bp, Homo sapien
tctggtgtgatccaacaggtgagtc

SEQ ID NO: 4726915 - DNA, 25 bp, Homo sapien
tatagacaggcagccacgcactctc

SEQ ID NO: 4726916 - DNA, 25 bp, Homo sapien
gatatagacaggcagccacgcactc

SEQ ID NO: 4726917 - DNA, 25 bp, Homo sapien
ctgatatagacaggcagccacgcac

SEQ ID NO: 4726918 - DNA, 25 bp, Homo sapien
tagacaggcagccacgcactctctg

SEQ ID NO: 4726919 - DNA, 25 bp, Homo sapien
tgtgaatcctgggggcacccacaca

SEQ ID NO: 4726920 - DNA, 25 bp, Homo sapien
tgggggcacccacacataaccccaa

SEQ ID NO: 4726921 - DNA, 25 bp, Homo sapien
gaatcctgggggcacccacacataa

SEQ ID NO: 4726922 - DNA, 25 bp, Homo sapien
ctgggggcacccacacataacccca

SEQ ID NO: 4726923 - DNA, 25 bp, Homo sapien
gaactcctcacagctcactttgagg

SEQ ID NO: 4726924 - DNA, 25 bp, Homo sapien
gaggtccagttggatggagatataa

SEQ ID NO: 4726925 - DNA, 25 bp, Homo sapien
gatataatcaatgttgggtgaaggg

SEQ ID NO: 4726926 - DNA, 25 bp, Homo sapien
gggatccagatgctgataacgaagg

SEQ ID NO: 4726927 - DNA, 25 bp, Homo sapien
cccacctggacacttcagttttgct

SEQ ID NO: 4726928 - DNA, 25 bp, Homo sapien
ctcccacctggacacttcagttttg

SEQ ID NO: 4726929 - DNA, 25 bp, Homo sapien
acctggacacttcagttttgctctc

SEQ ID NO: 4726930 - DNA, 25 bp, Homo sapien
cacctggacacttcagttttgctct

SEQ ID NO: 4726931 - DNA, 25 bp, Homo sapien
agaaaggcattaaaagacatcatac

SEQ ID NO: 4726932 - DNA, 25 bp, Homo sapien
ccagaaaggcattaaaagacatcat

SEQ ID NO: 4726933 - DNA, 25 bp, Homo sapien
cagaaaggcattaaaagacatcata

SEQ ID NO: 4726934 - DNA, 25 bp, Homo sapien
cgagttctcgcagtgtccaggctga

SEQ ID NO: 4726935 - DNA, 25 bp, Homo sapien
gctgatctccacgaggttcttctgg

SEQ ID NO: 4726936 - DNA, 25 bp, Homo sapien
gttccaggagatagacccacaggat

SEQ ID NO: 4726937 - DNA, 25 bp, Homo sapien
tccaggctgacggtacattccaggc

SEQ ID NO: 4726938 - DNA, 25 bp, Homo sapien
catacttgacttcgttgggaaggaa

SEQ ID NO: 4726939 - DNA, 25 bp, Homo sapien
cattgtgaacatacttgacttcgtt

SEQ ID NO: 4726940 - DNA, 25 bp, Homo sapien
tcatcaagaattggacaaccattgt

SEQ ID NO: 4726941 - DNA, 25 bp, Homo sapien
caagaattggacaaccattgtgaac

SEQ ID NO: 4726942 - DNA, 25 bp, Homo sapien
ggaaggcagagtggcccttcatcac

SEQ ID NO: 4726943 - DNA, 25 bp, Homo sapien
accctctgggttattggctcattca

SEQ ID NO: 4726944 - DNA, 25 bp, Homo sapien
tggcaaacttcaggtcatctcctga

SEQ ID NO: 4726945 - DNA, 25 bp, Homo sapien
ggctcattcatcacaacttccactt

SEQ ID NO: 4726946 - DNA, 25 bp, Homo sapien
cactcctgacaacgccggcaagatt

SEQ ID NO: 4726947 - DNA, 25 bp, Homo sapien
gggtcctgacaatgtgccccgagat

SEQ ID NO: 4726948 - DNA, 25 bp, Homo sapien
ggcctttcaggcaatcccagggctt

SEQ ID NO: 4726949 - DNA, 25 bp, Homo sapien
gcttttaataaaactcgctgatcac

SEQ ID NO: 4726950 - DNA, 25 bp, Homo sapien
ttctccccatcactcatcactttca

SEQ ID NO: 4726951 - DNA, 25 bp, Homo sapien
ctccccatcactcatcactttcagg

SEQ ID NO: 4726952 - DNA, 25 bp, Homo sapien
attctccccatcactcatcactttc

SEQ ID NO: 4726953 - DNA, 25 bp, Homo sapien
tctccccatcactcatcactttcag

SEQ ID NO: 4726954 - DNA, 25 bp, Homo sapien
gcctgggtatccacagcagtggctg

SEQ ID NO: 4726955 - DNA, 25 bp, Homo sapien
tgggtatccacagcagtggctgcag

SEQ ID NO: 4726956 - DNA, 25 bp, Homo sapien
tttgcctgggtatccacagcagtgg

SEQ ID NO: 4726957 - DNA, 25 bp, Homo sapien
gcggattttcgtgaaccgcaaatgc

SEQ ID NO: 4726958 - DNA, 25 bp, Homo sapien
gagtacagttccttcatcaaggctc

SEQ ID NO: 4726959 - DNA, 25 bp, Homo sapien
gagccatcaagcctagccaaggagt

SEQ ID NO: 4726960 - DNA, 25 bp, Homo sapien
ggtcttcagctatgacttacacaca

SEQ ID NO: 4726961 - DNA, 25 bp, Homo sapien
cctgttgaggatcttagcacaattt

SEQ ID NO: 4726962 - DNA, 25 bp, Homo sapien
tggcatgtctaaaacaaccctcaga

SEQ ID NO: 4726963 - DNA, 25 bp, Homo sapien
taagtctcttagtcagggtggaacg

SEQ ID NO: 4726964 - DNA, 25 bp, Homo sapien
ccaagaacagcactaggaagagccc

SEQ ID NO: 4726965 - DNA, 25 bp, Homo sapien
ccaaaagcaagacccagtgtggtgg

SEQ ID NO: 4726966 - DNA, 25 bp, Homo sapien
gctcggcccctcaaagatgtctgtt

SEQ ID NO: 4726967 - DNA, 25 bp, Homo sapien
tgatttaacattccggcccttgcgt

SEQ ID NO: 4726968 - DNA, 25 bp, Homo sapien
cagcgggtgtcagttttccagagca

SEQ ID NO: 4726969 - DNA, 25 bp, Homo sapien
gcaatgtttacccaagtgtgaccca

SEQ ID NO: 4726970 - DNA, 25 bp, Homo sapien
agtctttcaggtcagctgtgtttga

SEQ ID NO: 4726971 - DNA, 25 bp, Homo sapien
gagtcactgacacagcaatctggtt

SEQ ID NO: 4726972 - DNA, 25 bp, Homo sapien
caatctggtttaaagggctttgaga

SEQ ID NO: 4726973 - DNA, 25 bp, Homo sapien
taaaaatccattaacccacctcaca

SEQ ID NO: 4726974 - DNA, 25 bp, Homo sapien
aaacttcctgagcgccaagcctcag

SEQ ID NO: 4726975 - DNA, 25 bp, Homo sapien
ctttgctggtcttctccaaggcagc

SEQ ID NO: 4726976 - DNA, 25 bp, Homo sapien
tgcagctttgcaaacttcctgagcg

SEQ ID NO: 4726977 - DNA, 25 bp, Homo sapien
tgctggtcttctccaaggcagctgc

SEQ ID NO: 4726978 - DNA, 25 bp, Homo sapien
ggcacacatacaaacacgatagaca

SEQ ID NO: 4726979 - DNA, 25 bp, Homo sapien
gcttttgttaatgaggtcggttgcc

SEQ ID NO: 4726980 - DNA, 25 bp, Homo sapien
acattcacaaatgggcacacagtca

SEQ ID NO: 4726981 - DNA, 25 bp, Homo sapien
gtgccttctgctggttgggtccgca

SEQ ID NO: 4726982 - DNA, 25 bp, Homo sapien
gatggaactagatcctaaggtgctg

SEQ ID NO: 4726983 - DNA, 25 bp, Homo sapien
gaagcccagcattcagaagggacag

SEQ ID NO: 4726984 - DNA, 25 bp, Homo sapien
tagatcctaaggtgctgtttttaag

SEQ ID NO: 4726985 - DNA, 25 bp, Homo sapien
taagggaaaagataggatggaacta

SEQ ID NO: 4726986 - DNA, 25 bp, Homo sapien
caaagtcatcggagatttcaaatct

SEQ ID NO: 4726987 - DNA, 25 bp, Homo sapien
aagtcatcggagatttcaaatcttc

SEQ ID NO: 4726988 - DNA, 25 bp, Homo sapien
aaagtcatcggagatttcaaatctt

SEQ ID NO: 4726989 - DNA, 25 bp, Homo sapien
tcaaagtcatcggagatttcaaatc

SEQ ID NO: 4726990 - DNA, 25 bp, Homo sapien
aagacatacgatattggatttacac

SEQ ID NO: 4726991 - DNA, 25 bp, Homo sapien
aaaggacagcatgtacaacctccaa

SEQ ID NO: 4726992 - DNA, 25 bp, Homo sapien
aggacagcatgtacaacctccaact

SEQ ID NO: 4726993 - DNA, 25 bp, Homo sapien
gacatacgatattggatttacacac

SEQ ID NO: 4726994 - DNA, 25 bp, Homo sapien
ctgtcccaaaatgcaaggaacccta

SEQ ID NO: 4726995 - DNA, 25 bp, Homo sapien
aaattgcagctctttttggatcccc

SEQ ID NO: 4726996 - DNA, 25 bp, Homo sapien
tatctgcactcttcttcaaacaggc

SEQ ID NO: 4726997 - DNA, 25 bp, Homo sapien
caaaatgcaaggaaccctaaggacg

SEQ ID NO: 4726998 - DNA, 25 bp, Homo sapien
gaaaactgggtgcacctgcctaaga

SEQ ID NO: 4726999 - DNA, 25 bp, Homo sapien
acctgcctaagattcttcactgtac

SEQ ID NO: 4727000 - DNA, 25 bp, Homo sapien
cttaatcatggtgaaaactgggtgc

SEQ ID NO: 4727001 - DNA, 25 bp, Homo sapien
tgcacctgcctaagattcttcactg

SEQ ID NO: 4727002 - DNA, 25 bp, Homo sapien
tgccaaatctgctacagagagtcca

SEQ ID NO: 4727003 - DNA, 25 bp, Homo sapien
aaatctgctacagagagtccaatgg

SEQ ID NO: 4727004 - DNA, 25 bp, Homo sapien
aatctgctacagagagtccaatggc

SEQ ID NO: 4727005 - DNA, 25 bp, Homo sapien
ctctgccaaatctgctacagagagt

SEQ ID NO: 4727006 - DNA, 25 bp, Homo sapien
gttccttatgtttatcagtctctaa

SEQ ID NO: 4727007 - DNA, 25 bp, Homo sapien
aacattctttccactccatacaggt

SEQ ID NO: 4727008 - DNA, 25 bp, Homo sapien
aagcactctcaaccaccagtttgtg

SEQ ID NO: 4727009 - DNA, 25 bp, Homo sapien
tttccactccatacaggtgcactgg

SEQ ID NO: 4727010 - DNA, 25 bp, Homo sapien
cttaaagatgttcacgttacgctgg

SEQ ID NO: 4727011 - DNA, 25 bp, Homo sapien
ttaaagatgttcacgttacgctgga

SEQ ID NO: 4727012 - DNA, 25 bp, Homo sapien
taaagatgttcacgttacgctggac

SEQ ID NO: 4727013 - DNA, 25 bp, Homo sapien
gccatgataattaccagtttggagt

SEQ ID NO: 4727014 - DNA, 25 bp, Homo sapien
tcaacaagatcaagttcatctgcca

SEQ ID NO: 4727015 - DNA, 25 bp, Homo sapien
taccagtttggagtttgcagttcca

SEQ ID NO: 4727016 - DNA, 25 bp, Homo sapien
atgtcccagccatgataattaccag

SEQ ID NO: 4727017 - DNA, 25 bp, Homo sapien
agctgatccttgagagttgccacat

SEQ ID NO: 4727018 - DNA, 25 bp, Homo sapien
ttctgggcggtctgttcttccttta

SEQ ID NO: 4727019 - DNA, 25 bp, Homo sapien
tcctttagaagattatgaagcagct

SEQ ID NO: 4727020 - DNA, 25 bp, Homo sapien
gtaatcttattctgggcggtctgtt

SEQ ID NO: 4727021 - DNA, 25 bp, Homo sapien
caaaaggaatcaggaatgcacatca

SEQ ID NO: 4727022 - DNA, 25 bp, Homo sapien
atgcacatcaggcagtcgtcggggc

SEQ ID NO: 4727023 - DNA, 25 bp, Homo sapien
cgtgtggcaatgagatctggaatca

SEQ ID NO: 4727024 - DNA, 25 bp, Homo sapien
gtcggggcgtgtggcaatgagatct

SEQ ID NO: 4727025 - DNA, 25 bp, Homo sapien
gaatagcagcaatgtaggcctgcat

SEQ ID NO: 4727026 - DNA, 25 bp, Homo sapien
tcctagtgtaacacaggctttttca

SEQ ID NO: 4727027 - DNA, 25 bp, Homo sapien
tgggaaagaagaatagcagcaatgt

SEQ ID NO: 4727028 - DNA, 25 bp, Homo sapien
tatttgctcctagtgtaacacaggc

SEQ ID NO: 4727029 - DNA, 25 bp, Homo sapien
acctatgacttgtgaaccaaaaaga

SEQ ID NO: 4727030 - DNA, 25 bp, Homo sapien
agagcttaagagaagctaattttct

SEQ ID NO: 4727031 - DNA, 25 bp, Homo sapien
aaagagcttaagagaagctaatttt

SEQ ID NO: 4727032 - DNA, 25 bp, Homo sapien
tgaaaagagcttaagagaagctaat

SEQ ID NO: 4727033 - DNA, 25 bp, Homo sapien
gaaaagagcttaagagaagctaatt

SEQ ID NO: 4727034 - DNA, 25 bp, Homo sapien
gcaccaagctatttgtgaggtacct

SEQ ID NO: 4727035 - DNA, 25 bp, Homo sapien
ggagcagacgtctcacatggctaga

SEQ ID NO: 4727036 - DNA, 25 bp, Homo sapien
ctagagcaggaacaagacgaaggga

SEQ ID NO: 4727037 - DNA, 25 bp, Homo sapien
tgcaaaatagtcatagcaactctat

SEQ ID NO: 4727038 - DNA, 25 bp, Homo sapien
aacttccgcttcccaggttccagca

SEQ ID NO: 4727039 - DNA, 25 bp, Homo sapien
cactcaggccggagtgccatggtgc

SEQ ID NO: 4727040 - DNA, 25 bp, Homo sapien
gtcactcaggccggagtgccatggt

SEQ ID NO: 4727041 - DNA, 25 bp, Homo sapien
tgcgatctcgggtcactgcaacttc

SEQ ID NO: 4727042 - DNA, 25 bp, Homo sapien
aataaagttcgcctgagctgcctgg

SEQ ID NO: 4727043 - DNA, 25 bp, Homo sapien
acactttcttctactccggagaggg

SEQ ID NO: 4727044 - DNA, 25 bp, Homo sapien
ttctactccggagagggaaataaga

SEQ ID NO: 4727045 - DNA, 25 bp, Homo sapien
ctgatattttaataaagttcgcctg

SEQ ID NO: 4727046 - DNA, 25 bp, Homo sapien
gattatgagtgttcccggttcctcc

SEQ ID NO: 4727047 - DNA, 25 bp, Homo sapien
tatccatattaataaggatccctgg

SEQ ID NO: 4727048 - DNA, 25 bp, Homo sapien
taaattgtacacaacaaatgctttc

SEQ ID NO: 4727049 - DNA, 25 bp, Homo sapien
gacttcaacatcttgaatatccata

SEQ ID NO: 4727050 - DNA, 25 bp, Homo sapien
gaaggggcttcccattgaggtccca

SEQ ID NO: 4727051 - DNA, 25 bp, Homo sapien
tagaattgtgagaataacgtttaga

SEQ ID NO: 4727052 - DNA, 25 bp, Homo sapien
tgagaataacgtttagatatgtaca

SEQ ID NO: 4727053 - DNA, 25 bp, Homo sapien
gctagctgctttgtagaattgtgag

SEQ ID NO: 4727054 - DNA, 25 bp, Homo sapien
aacgtttagatatgtacaaacatac

SEQ ID NO: 4727055 - DNA, 25 bp, Homo sapien
tgaatcttacctccagtgcttgctg

SEQ ID NO: 4727056 - DNA, 25 bp, Homo sapien
gagatccccaatcaacttaaagagg

SEQ ID NO: 4727057 - DNA, 25 bp, Homo sapien
gaaaagctccaattagccatagtgg

SEQ ID NO: 4727058 - DNA, 25 bp, Homo sapien
aatgagggacccacagttttgtcca

SEQ ID NO: 4727059 - DNA, 25 bp, Homo sapien
ttcctccactccttaagaagcctca

SEQ ID NO: 4727060 - DNA, 25 bp, Homo sapien
aggtgatgcccggaagcaagcttac

SEQ ID NO: 4727061 - DNA, 25 bp, Homo sapien
acccaagtgttttcggaggtgatgc

SEQ ID NO: 4727062 - DNA, 25 bp, Homo sapien
gcagaacctcacaaaggctcaggaa

SEQ ID NO: 4727063 - DNA, 25 bp, Homo sapien
gcaagcttactgacacgcagaacct

SEQ ID NO: 4727064 - DNA, 25 bp, Homo sapien
ccttctgggagatcatcgggaatga

SEQ ID NO: 4727065 - DNA, 25 bp, Homo sapien
tccgaactgtaccaagaagacgatg

SEQ ID NO: 4727066 - DNA, 25 bp, Homo sapien
gagagctgtgccttccaaattttga

SEQ ID NO: 4727067 - DNA, 25 bp, Homo sapien
gatgctccaaaaagcctagaagcgg

SEQ ID NO: 4727068 - DNA, 25 bp, Homo sapien
ctgcagaatggtgggcggtggctgg

SEQ ID NO: 4727069 - DNA, 25 bp, Homo sapien
gtgggcggtggctggaagcgcaggc

SEQ ID NO: 4727070 - DNA, 25 bp, Homo sapien
aatggtgggcggtggctggaagcgc

SEQ ID NO: 4727071 - DNA, 25 bp, Homo sapien
gcgctgcagctgcagaatggtgggc

SEQ ID NO: 4727072 - DNA, 25 bp, Homo sapien
gtctccagtgaccttcgaaaagaag

SEQ ID NO: 4727073 - DNA, 25 bp, Homo sapien
gtaaattctgtgaagctgatgtctc

SEQ ID NO: 4727074 - DNA, 25 bp, Homo sapien
gaagtagaaaatcattatacgctct

SEQ ID NO: 4727075 - DNA, 25 bp, Homo sapien
gaaaaaacagttgatgtgaagaaaa

SEQ ID NO: 4727076 - DNA, 25 bp, Homo sapien
aaaagcattatttcctgtctgtctc

SEQ ID NO: 4727077 - DNA, 25 bp, Homo sapien
tgtctccggaaagtattgtctaaat

SEQ ID NO: 4727078 - DNA, 25 bp, Homo sapien
tgtctgtctccggaaagtattgtct

SEQ ID NO: 4727079 - DNA, 25 bp, Homo sapien
aagccttggacttcaattagttgat

SEQ ID NO: 4727080 - DNA, 25 bp, Homo sapien
taaaatgaagaaaaaatcaacagtc

SEQ ID NO: 4727081 - DNA, 25 bp, Homo sapien
cataaaatgaagaaaaaatcaacag

SEQ ID NO: 4727082 - DNA, 25 bp, Homo sapien
acataaaatgaagaaaaaatcaaca

SEQ ID NO: 4727083 - DNA, 25 bp, Homo sapien
aatgaagaaaaaatcaacagtcccg

SEQ ID NO: 4727084 - DNA, 25 bp, Homo sapien
catgcttgccatggctactcttctc

SEQ ID NO: 4727085 - DNA, 25 bp, Homo sapien
aggtttaattctgcagtgattcctt

SEQ ID NO: 4727086 - DNA, 25 bp, Homo sapien
tttaattctgcagtgattccttgtc

SEQ ID NO: 4727087 - DNA, 25 bp, Homo sapien
ttaattctgcagtgattccttgtct

SEQ ID NO: 4727088 - DNA, 25 bp, Homo sapien
ccaggcattagtgcattgagctgaa

SEQ ID NO: 4727089 - DNA, 25 bp, Homo sapien
cattagtgcattgagctgaatatac

SEQ ID NO: 4727090 - DNA, 25 bp, Homo sapien
ggcattagtgcattgagctgaatat

SEQ ID NO: 4727091 - DNA, 25 bp, Homo sapien
gtgccaggcattagtgcattgagct

SEQ ID NO: 4727092 - DNA, 25 bp, Homo sapien
ggtggacttgtgtcgatgacaccag

SEQ ID NO: 4727093 - DNA, 25 bp, Homo sapien
gccataatggctgcaacgataatga

SEQ ID NO: 4727094 - DNA, 25 bp, Homo sapien
gcaacgataatgatttccagaatgg

SEQ ID NO: 4727095 - DNA, 25 bp, Homo sapien
ccaatgcctactggattatcaggaa

SEQ ID NO: 4727096 - DNA, 25 bp, Homo sapien
aacagctcaaaaatgtatgatggtg

SEQ ID NO: 4727097 - DNA, 25 bp, Homo sapien
cagctcaaaaatgtatgatggtgtg

SEQ ID NO: 4727098 - DNA, 25 bp, Homo sapien
gctcaaaaatgtatgatggtgtgtc

SEQ ID NO: 4727099 - DNA, 25 bp, Homo sapien
ctcaaaaatgtatgatggtgtgtca

SEQ ID NO: 4727100 - DNA, 25 bp, Homo sapien
cagtaatgcctattaatctggccaa

SEQ ID NO: 4727101 - DNA, 25 bp, Homo sapien
agtcatccagtcagcagtaatgcct

SEQ ID NO: 4727102 - DNA, 25 bp, Homo sapien
catccagtcagcagtaatgcctatt

SEQ ID NO: 4727103 - DNA, 25 bp, Homo sapien
agtaatgcctattaatctggccaag

SEQ ID NO: 4727104 - DNA, 25 bp, Homo sapien
gtaacctgaccacgcgtcatacaaa

SEQ ID NO: 4727105 - DNA, 25 bp, Homo sapien
tagccatttgtaacctgaccacgcg

SEQ ID NO: 4727106 - DNA, 25 bp, Homo sapien
tttgtaacctgaccacgcgtcatac

SEQ ID NO: 4727107 - DNA, 25 bp, Homo sapien
ctactagccatttgtaacctgacca

SEQ ID NO: 4727108 - DNA, 25 bp, Homo sapien
gctgattctttatttttgctgttga

SEQ ID NO: 4727109 - DNA, 25 bp, Homo sapien
ccatgctgattctttatttttgctg

SEQ ID NO: 4727110 - DNA, 25 bp, Homo sapien
ttcccatgctgattctttatttttg

SEQ ID NO: 4727111 - DNA, 25 bp, Homo sapien
ctgattctttatttttgctgttgat

SEQ ID NO: 4727112 - DNA, 25 bp, Homo sapien
tcttggactgggcttgttctttccc

SEQ ID NO: 4727113 - DNA, 25 bp, Homo sapien
tagtatggaaatcatcatatgtacc

SEQ ID NO: 4727114 - DNA, 25 bp, Homo sapien
tgtaccaacacctggaattggttca

SEQ ID NO: 4727115 - DNA, 25 bp, Homo sapien
tgtagaactgttaatgctgcctcca

SEQ ID NO: 4727116 - DNA, 25 bp, Homo sapien
aatgtgtagaactgttaatgctgcc

SEQ ID NO: 4727117 - DNA, 25 bp, Homo sapien
ttctttttccaattgagtgacagca

SEQ ID NO: 4727118 - DNA, 25 bp, Homo sapien
ccttatgtttggaagtggtctcaga

SEQ ID NO: 4727119 - DNA, 25 bp, Homo sapien
tcttttcaatctacccaactgaggg

SEQ ID NO: 4727120 - DNA, 25 bp, Homo sapien
ctctgcacgggtatccataaactgg

SEQ ID NO: 4727121 - DNA, 25 bp, Homo sapien
tgagggaatccccttaatacaatgc

SEQ ID NO: 4727122 - DNA, 25 bp, Homo sapien
tatgaatgacgaaaataaggtgtta

SEQ ID NO: 4727123 - DNA, 25 bp, Homo sapien
gatgacctcttgaagaccccagcac

SEQ ID NO: 4727124 - DNA, 25 bp, Homo sapien
aatgcactgcctcggtgttctctgg

SEQ ID NO: 4727125 - DNA, 25 bp, Homo sapien
ggtgttaagtgtagcccaaagacaa

SEQ ID NO: 4727126 - DNA, 25 bp, Homo sapien
cacgaagtcataatggcagcgagta

SEQ ID NO: 4727127 - DNA, 25 bp, Homo sapien
gtcataatggcagcgagtaaaagtg

SEQ ID NO: 4727128 - DNA, 25 bp, Homo sapien
tttcttttcgtcacccacgaagtca

SEQ ID NO: 4727129 - DNA, 25 bp, Homo sapien
gcgagtaaaagtgataccatataaa

SEQ ID NO: 4727130 - DNA, 25 bp, Homo sapien
cccaagagtaatgggatgaaattga

SEQ ID NO: 4727131 - DNA, 25 bp, Homo sapien
tacatttcggccttcacactctttg

SEQ ID NO: 4727132 - DNA, 25 bp, Homo sapien
tctgtttccgaaaatagtctctggg

SEQ ID NO: 4727133 - DNA, 25 bp, Homo sapien
caatgcactgcttcgctttataggc

SEQ ID NO: 4727134 - DNA, 25 bp, Homo sapien
ttttcacaaggttgaagaagctgcc

SEQ ID NO: 4727135 - DNA, 25 bp, Homo sapien
ttctgaccctgagattcacaagcaa

SEQ ID NO: 4727136 - DNA, 25 bp, Homo sapien
gctgaaggccacaatagttttcaca

SEQ ID NO: 4727137 - DNA, 25 bp, Homo sapien
actcgagtcccgaatcatggcattt

SEQ ID NO: 4727138 - DNA, 25 bp, Homo sapien
caataccctcacaaaccctccaagt

SEQ ID NO: 4727139 - DNA, 25 bp, Homo sapien
ctccaataccctcacaaaccctcca

SEQ ID NO: 4727140 - DNA, 25 bp, Homo sapien
agcgtgcaaggtctccaataccctc

SEQ ID NO: 4727141 - DNA, 25 bp, Homo sapien
ccaataccctcacaaaccctccaag

SEQ ID NO: 4727142 - DNA, 25 bp, Homo sapien
caaatgcagagctaggggccacatc

SEQ ID NO: 4727143 - DNA, 25 bp, Homo sapien
ccaaatgcagagctaggggccacat

SEQ ID NO: 4727144 - DNA, 25 bp, Homo sapien
aatgcagagctaggggccacatctc

SEQ ID NO: 4727145 - DNA, 25 bp, Homo sapien
tgcagagctaggggccacatctcac

SEQ ID NO: 4727146 - DNA, 25 bp, Homo sapien
ggattccaagccaaaacagccccag

SEQ ID NO: 4727147 - DNA, 25 bp, Homo sapien
gtggcagaaaccgaaatccgacacc

SEQ ID NO: 4727148 - DNA, 25 bp, Homo sapien
gactgtggaagaatgtagtccagaa

SEQ ID NO: 4727149 - DNA, 25 bp, Homo sapien
aaacagccccagctttttgtgactg

SEQ ID NO: 4727150 - DNA, 25 bp, Homo sapien
gagttcaagaccagtcggacaacaa

SEQ ID NO: 4727151 - DNA, 25 bp, Homo sapien
ttcaagaccagtcggacaacaaagt

SEQ ID NO: 4727152 - DNA, 25 bp, Homo sapien
gttcaagaccagtcggacaacaaag

SEQ ID NO: 4727153 - DNA, 25 bp, Homo sapien
caagaccagtcggacaacaaagtga

SEQ ID NO: 4727154 - DNA, 25 bp, Homo sapien
tctgtttgtgaaggttgccacctac

SEQ ID NO: 4727155 - DNA, 25 bp, Homo sapien
gcagtactacagctggcttcacggg

SEQ ID NO: 4727156 - DNA, 25 bp, Homo sapien
tgaaggttgccacctactgaagaac

SEQ ID NO: 4727157 - DNA, 25 bp, Homo sapien
caacaaaatcgcctgaattctgttt

SEQ ID NO: 4727158 - DNA, 25 bp, Homo sapien
gccatcaatttttagtaggtgagac

SEQ ID NO: 4727159 - DNA, 25 bp, Homo sapien
caatttttagtaggtgagactcttc

SEQ ID NO: 4727160 - DNA, 25 bp, Homo sapien
tcaatttttagtaggtgagactctt

SEQ ID NO: 4727161 - DNA, 25 bp, Homo sapien
catcaatttttagtaggtgagactc

SEQ ID NO: 4727162 - DNA, 25 bp, Homo sapien
aggttcaagggcacctcggtaggag

SEQ ID NO: 4727163 - DNA, 25 bp, Homo sapien
agggcacctcggtaggagggtggct

SEQ ID NO: 4727164 - DNA, 25 bp, Homo sapien
gcacctcggtaggagggtggcttcc

SEQ ID NO: 4727165 - DNA, 25 bp, Homo sapien
caagggcacctcggtaggagggtgg

SEQ ID NO: 4727166 - DNA, 25 bp, Homo sapien
cacctgaggcatactcaattgagac

SEQ ID NO: 4727167 - DNA, 25 bp, Homo sapien
tccaagatcgcagttcccagaacaa

SEQ ID NO: 4727168 - DNA, 25 bp, Homo sapien
tggaatactaaattgcacctgaggc

SEQ ID NO: 4727169 - DNA, 25 bp, Homo sapien
tgggaagacggcaactcacatagta

SEQ ID NO: 4727170 - DNA, 25 bp, Homo sapien
gatgaaaggcctaggaggttcccag

SEQ ID NO: 4727171 - DNA, 25 bp, Homo sapien
tgaagactgaaagcacgacatacct

SEQ ID NO: 4727172 - DNA, 25 bp, Homo sapien
gaactgaggtctgaacccagagact

SEQ ID NO: 4727173 - DNA, 25 bp, Homo sapien
gtccacattacacacgaactgaggt

SEQ ID NO: 4727174 - DNA, 25 bp, Homo sapien
tggccttggaataggagtcttttcc

SEQ ID NO: 4727175 - DNA, 25 bp, Homo sapien
aaaggctgtaacaagaggccagttg

SEQ ID NO: 4727176 - DNA, 25 bp, Homo sapien
gctggccttggaataggagtctttt

SEQ ID NO: 4727177 - DNA, 25 bp, Homo sapien
aggctgtaacaagaggccagttggt

SEQ ID NO: 4727178 - DNA, 25 bp, Homo sapien
tgcactaaaccacactgtatccagt

SEQ ID NO: 4727179 - DNA, 25 bp, Homo sapien
aataacaggtgcctctccacctcgt

SEQ ID NO: 4727180 - DNA, 25 bp, Homo sapien
tttctgcttagacagcaataacagg

SEQ ID NO: 4727181 - DNA, 25 bp, Homo sapien
gaaaagctgggaaccactgcactaa

SEQ ID NO: 4727182 - DNA, 25 bp, Homo sapien
caccagtccatagggtgaacttcca

SEQ ID NO: 4727183 - DNA, 25 bp, Homo sapien
cactcaccagtccatagggtgaact

SEQ ID NO: 4727184 - DNA, 25 bp, Homo sapien
ccttaactatcccactcaccagtcc

SEQ ID NO: 4727185 - DNA, 25 bp, Homo sapien
tatcccactcaccagtccatagggt

SEQ ID NO: 4727186 - DNA, 25 bp, Homo sapien
tagtaccagatccaatgcctccttg

SEQ ID NO: 4727187 - DNA, 25 bp, Homo sapien
tgggcagaccacaagacaggtttat

SEQ ID NO: 4727188 - DNA, 25 bp, Homo sapien
gaataaaagctgaactcggccaggc

SEQ ID NO: 4727189 - DNA, 25 bp, Homo sapien
ttaattaaagagaacccaacagtgc

SEQ ID NO: 4727190 - DNA, 25 bp, Homo sapien
aaaccatatcaaccacacagcactt

SEQ ID NO: 4727191 - DNA, 25 bp, Homo sapien
accatatcaaccacacagcacttca

SEQ ID NO: 4727192 - DNA, 25 bp, Homo sapien
aaccatatcaaccacacagcacttc

SEQ ID NO: 4727193 - DNA, 25 bp, Homo sapien
ccatatcaaccacacagcacttcaa

SEQ ID NO: 4727194 - DNA, 25 bp, Homo sapien
caataggcagcagaaacaagcaatc

SEQ ID NO: 4727195 - DNA, 25 bp, Homo sapien
ttggctacaagtctgctacactgag

SEQ ID NO: 4727196 - DNA, 25 bp, Homo sapien
tgtcactgggatatgccagcacccc

SEQ ID NO: 4727197 - DNA, 25 bp, Homo sapien
agttaaatacagtgagccagctgct

SEQ ID NO: 4727198 - DNA, 25 bp, Homo sapien
tgcactccaccatgcacggctcatt

SEQ ID NO: 4727199 - DNA, 25 bp, Homo sapien
taatactggcctagttgagaaagtc

SEQ ID NO: 4727200 - DNA, 25 bp, Homo sapien
aacaacacggtttacaggctcatga

SEQ ID NO: 4727201 - DNA, 25 bp, Homo sapien
tgtgctgtaagccattccgggtgct

SEQ ID NO: 4727202 - DNA, 25 bp, Homo sapien
gaactccgcaaagcaggctattggg

SEQ ID NO: 4727203 - DNA, 25 bp, Homo sapien
gaatcatagagtgacctcaaagttc

SEQ ID NO: 4727204 - DNA, 25 bp, Homo sapien
tttaatgtccaagctggaggaaaac

SEQ ID NO: 4727205 - DNA, 25 bp, Homo sapien
gaagattttccagttagccacaaag

SEQ ID NO: 4727206 - DNA, 25 bp, Homo sapien
ttcaactagtctaagcttgcaggac

SEQ ID NO: 4727207 - DNA, 25 bp, Homo sapien
taaatttatacagcaccaatcagaa

SEQ ID NO: 4727208 - DNA, 25 bp, Homo sapien
ttgtcaccattcctacaaagcacaa

SEQ ID NO: 4727209 - DNA, 25 bp, Homo sapien
agttacttaaatttatacagcacca

SEQ ID NO: 4727210 - DNA, 25 bp, Homo sapien
tatacagcaccaatcagaaccctgc

SEQ ID NO: 4727211 - DNA, 25 bp, Homo sapien
gctcagtatacccacagtcacaatg

SEQ ID NO: 4727212 - DNA, 25 bp, Homo sapien
gcccaagaagttggtgccactacaa

SEQ ID NO: 4727213 - DNA, 25 bp, Homo sapien
gacttgcagcactgacttgcagctt

SEQ ID NO: 4727214 - DNA, 25 bp, Homo sapien
cacaatgtgagtgtgcgctttcaaa

SEQ ID NO: 4727215 - DNA, 25 bp, Homo sapien
ggtctcctcactaatcgctaatggg

SEQ ID NO: 4727216 - DNA, 25 bp, Homo sapien
ggcacagtggactccctaaaggtct

SEQ ID NO: 4727217 - DNA, 25 bp, Homo sapien
ctaatgggtagcagaaccaggacca

SEQ ID NO: 4727218 - DNA, 25 bp, Homo sapien
tatggagtgtcaagctctcttctgc

SEQ ID NO: 4727219 - DNA, 25 bp, Homo sapien
cagatgccgatgctaattgaggaaa

SEQ ID NO: 4727220 - DNA, 25 bp, Homo sapien
ctaattagactattgcatctgcaag

SEQ ID NO: 4727221 - DNA, 25 bp, Homo sapien
tatgtagaccaacagtaaatctctc

SEQ ID NO: 4727222 - DNA, 25 bp, Homo sapien
tccaaaattggctcaacttgtaagc

SEQ ID NO: 4727223 - DNA, 25 bp, Homo sapien
ctccagggagtaatctttgtagttg

SEQ ID NO: 4727224 - DNA, 25 bp, Homo sapien
cagggagtaatctttgtagttgttc

SEQ ID NO: 4727225 - DNA, 25 bp, Homo sapien
tgaagtgtagtctggactccaggga

SEQ ID NO: 4727226 - DNA, 25 bp, Homo sapien
tggactccagggagtaatctttgta

SEQ ID NO: 4727227 - DNA, 25 bp, Homo sapien
taggtagtggtcatacttcagtagc

SEQ ID NO: 4727228 - DNA, 25 bp, Homo sapien
caattcaaatagagtgaacggcact

SEQ ID NO: 4727229 - DNA, 25 bp, Homo sapien
gcttttatacaaagatgccaattca

SEQ ID NO: 4727230 - DNA, 25 bp, Homo sapien
gaactttatggccttgtcaatttcc

SEQ ID NO: 4727231 - DNA, 25 bp, Homo sapien
tgattgtaacatagttcagcttgca

SEQ ID NO: 4727232 - DNA, 25 bp, Homo sapien
gcaagggccgctgtaagttcttgag

SEQ ID NO: 4727233 - DNA, 25 bp, Homo sapien
taagtaacttcactaagcactcatc

SEQ ID NO: 4727234 - DNA, 25 bp, Homo sapien
agttcttgaggcaacatcctttaag

SEQ ID NO: 4727235 - DNA, 25 bp, Homo sapien
acatacaaagaaaacacacaaagaa

SEQ ID NO: 4727236 - DNA, 25 bp, Homo sapien
aaacatacaaagaaaacacacaaag

SEQ ID NO: 4727237 - DNA, 25 bp, Homo sapien
aacatacaaagaaaacacacaaaga

SEQ ID NO: 4727238 - DNA, 25 bp, Homo sapien
catacaaagaaaacacacaaagaaa

SEQ ID NO: 4727239 - DNA, 25 bp, Homo sapien
atttgttatgcctcactaaataaaa

SEQ ID NO: 4727240 - DNA, 25 bp, Homo sapien
ggagttcactctattcactttaaaa

SEQ ID NO: 4727241 - DNA, 25 bp, Homo sapien
aggtggtcacgctctgagctttgtg

SEQ ID NO: 4727242 - DNA, 25 bp, Homo sapien
gaatttactatatcagaacatcatt

SEQ ID NO: 4727243 - DNA, 25 bp, Homo sapien
atcattttattaaggagttcactct

SEQ ID NO: 4727244 - DNA, 25 bp, Homo sapien
caacagttactaacagattttcaga

SEQ ID NO: 4727245 - DNA, 25 bp, Homo sapien
tttcaacagttactaacagattttc

SEQ ID NO: 4727246 - DNA, 25 bp, Homo sapien
tttgctcactattgaaaaaccattc

SEQ ID NO: 4727247 - DNA, 25 bp, Homo sapien
ttgaaaaaccattccagacatacat

SEQ ID NO: 4727248 - DNA, 25 bp, Homo sapien
ctctgagtttgtgttaggtaggaaa

SEQ ID NO: 4727249 - DNA, 25 bp, Homo sapien
taggcgcaggctaactcctgtctga

SEQ ID NO: 4727250 - DNA, 25 bp, Homo sapien
aaaggctcccataagtcactaagaa

SEQ ID NO: 4727251 - DNA, 25 bp, Homo sapien
gggcctgtctgatgctgaagttctc

SEQ ID NO: 4727252 - DNA, 25 bp, Homo sapien
gcctttatcgtaatgcctggatcat

SEQ ID NO: 4727253 - DNA, 25 bp, Homo sapien
ttttagtagcctttatcgtaatgcc

SEQ ID NO: 4727254 - DNA, 25 bp, Homo sapien
tgatacgtttttagtagcctttatc

SEQ ID NO: 4727255 - DNA, 25 bp, Homo sapien
gcctggatcatactaactagtcaaa

SEQ ID NO: 4727256 - DNA, 25 bp, Homo sapien
tagaaatgttcaacttacaacaaaa

SEQ ID NO: 4727257 - DNA, 25 bp, Homo sapien
ctgctgctgtgagtaggtaatttat

SEQ ID NO: 4727258 - DNA, 25 bp, Homo sapien
aaccaaatttagatatgctccctgc

SEQ ID NO: 4727259 - DNA, 25 bp, Homo sapien
atgagctaaacttcataaccaaatt

SEQ ID NO: 4727260 - DNA, 25 bp, Homo sapien
cagggcaggtaagatgagcttcaca

SEQ ID NO: 4727261 - DNA, 25 bp, Homo sapien
agatttcccggcaattctctgcttc

SEQ ID NO: 4727262 - DNA, 25 bp, Homo sapien
gaggcggagtaacgccgagccttcc

SEQ ID NO: 4727263 - DNA, 25 bp, Homo sapien
gtagggatagatttcccggcaattc

SEQ ID NO: 4727264 - DNA, 25 bp, Homo sapien
cccagcccagccccagagaaaggtc

SEQ ID NO: 4727265 - DNA, 25 bp, Homo sapien
accccagcccagccccagagaaagg

SEQ ID NO: 4727266 - DNA, 25 bp, Homo sapien
ctgtgaagaaccccagcccagcccc

SEQ ID NO: 4727267 - DNA, 25 bp, Homo sapien
cagcccagccccagagaaaggtcat

SEQ ID NO: 4727268 - DNA, 25 bp, Homo sapien
atacattatttgtacctgtggtttt

SEQ ID NO: 4727269 - DNA, 25 bp, Homo sapien
catacattatttgtacctgtggttt

SEQ ID NO: 4727270 - DNA, 25 bp, Homo sapien
acatacattatttgtacctgtggtt

SEQ ID NO: 4727271 - DNA, 25 bp, Homo sapien
tcctctggaagcatactcaaaattg

SEQ ID NO: 4727272 - DNA, 25 bp, Homo sapien
tcattcgttgctactacatcctcct

SEQ ID NO: 4727273 - DNA, 25 bp, Homo sapien
ttaccacattctcattcgttgctac

SEQ ID NO: 4727274 - DNA, 25 bp, Homo sapien
gctactacatcctcctctggaagca

SEQ ID NO: 4727275 - DNA, 25 bp, Homo sapien
ttactctctttgcaaagcagatctg

SEQ ID NO: 4727276 - DNA, 25 bp, Homo sapien
aacattaatccacattagctcccag

SEQ ID NO: 4727277 - DNA, 25 bp, Homo sapien
gaatagtaatatgcctgcatccagt

SEQ ID NO: 4727278 - DNA, 25 bp, Homo sapien
ttttgttggaaaacattaatccaca

SEQ ID NO: 4727279 - DNA, 25 bp, Homo sapien
gccatcacgtaatgtcctgagccag

SEQ ID NO: 4727280 - DNA, 25 bp, Homo sapien
aaatgcaaccaccttttggcccagg

SEQ ID NO: 4727281 - DNA, 25 bp, Homo sapien
taggagacatttaggcatactgatc

SEQ ID NO: 4727282 - DNA, 25 bp, Homo sapien
gagcccacacgtagtagacctgcat

SEQ ID NO: 4727283 - DNA, 25 bp, Homo sapien
cgggcatgataaaacaacacgagtg

SEQ ID NO: 4727284 - DNA, 25 bp, Homo sapien
catgataaaacaacacgagtgagcc

SEQ ID NO: 4727285 - DNA, 25 bp, Homo sapien
ctctattcgggcatgataaaacaac

SEQ ID NO: 4727286 - DNA, 25 bp, Homo sapien
tcagcaactctattcgggcatgata

SEQ ID NO: 4727287 - DNA, 25 bp, Homo sapien
ttccgcaacattcacttctcctgta

SEQ ID NO: 4727288 - DNA, 25 bp, Homo sapien
caggagacgctctgcttccgcaaca

SEQ ID NO: 4727289 - DNA, 25 bp, Homo sapien
agacgctctgcttccgcaacattca

SEQ ID NO: 4727290 - DNA, 25 bp, Homo sapien
ggagacgctctgcttccgcaacatt

SEQ ID NO: 4727291 - DNA, 25 bp, Homo sapien
caagtattagggagatgtaagtatg

SEQ ID NO: 4727292 - DNA, 25 bp, Homo sapien
ctgaagcaccttcacgtaactgcag

SEQ ID NO: 4727293 - DNA, 25 bp, Homo sapien
aaagctaagatggttaagcagcaca

SEQ ID NO: 4727294 - DNA, 25 bp, Homo sapien
taagtatgaaaagctaagatggtta

SEQ ID NO: 4727295 - DNA, 25 bp, Homo sapien
tccttgctggtaaaagggacagcat

SEQ ID NO: 4727296 - DNA, 25 bp, Homo sapien
atccttgctggtaaaagggacagca

SEQ ID NO: 4727297 - DNA, 25 bp, Homo sapien
agtagtctgataatccttgctggta

SEQ ID NO: 4727298 - DNA, 25 bp, Homo sapien
caataaattctagtagtctgataat

SEQ ID NO: 4727299 - DNA, 25 bp, Homo sapien
caaattaaaggccccactgccaagc

SEQ ID NO: 4727300 - DNA, 25 bp, Homo sapien
ttcatgcaggatagaaagacattct

SEQ ID NO: 4727301 - DNA, 25 bp, Homo sapien
tgccaagcttgacacccccttcaaa

SEQ ID NO: 4727302 - DNA, 25 bp, Homo sapien
caaactcatagaagaattcctgctg

SEQ ID NO: 4727303 - DNA, 25 bp, Homo sapien
aaaaaagtgacagcataagttgacc

SEQ ID NO: 4727304 - DNA, 25 bp, Homo sapien
gtgacagcataagttgaccatgact

SEQ ID NO: 4727305 - DNA, 25 bp, Homo sapien
aaagtgacagcataagttgaccatg

SEQ ID NO: 4727306 - DNA, 25 bp, Homo sapien
aaaaagtgacagcataagttgacca

SEQ ID NO: 4727307 - DNA, 25 bp, Homo sapien
gcagcatatcacagcggactccctg

SEQ ID NO: 4727308 - DNA, 25 bp, Homo sapien
tccggcagcatatcacagcggactc

SEQ ID NO: 4727309 - DNA, 25 bp, Homo sapien
atatcacagcggactccctgcaagc

SEQ ID NO: 4727310 - DNA, 25 bp, Homo sapien
acagcttccggcagcatatcacagc

SEQ ID NO: 4727311 - DNA, 25 bp, Homo sapien
cttgttctaattttgagtccacctt

SEQ ID NO: 4727312 - DNA, 25 bp, Homo sapien
acttgttctaattttgagtccacct

SEQ ID NO: 4727313 - DNA, 25 bp, Homo sapien
ctccagccatgctactcaagtatgc

SEQ ID NO: 4727314 - DNA, 25 bp, Homo sapien
gctactcaagtatgcaaacccgtca

SEQ ID NO: 4727315 - DNA, 25 bp, Homo sapien
tcaagtatgcaaacccgtcagtggc

SEQ ID NO: 4727316 - DNA, 25 bp, Homo sapien
caaacccgtcagtggctttcaagga

SEQ ID NO: 4727317 - DNA, 25 bp, Homo sapien
gagacactcggcataacagatttca

SEQ ID NO: 4727318 - DNA, 25 bp, Homo sapien
cggcataacagatttcagcatgcat

SEQ ID NO: 4727319 - DNA, 25 bp, Homo sapien
ctgcacaaacgtgagtgcagctttc

SEQ ID NO: 4727320 - DNA, 25 bp, Homo sapien
tgcacaaacgtgagtgcagctttct

SEQ ID NO: 4727321 - DNA, 25 bp, Homo sapien
cctataggagaaagtgtgggttaca

SEQ ID NO: 4727322 - DNA, 25 bp, Homo sapien
gtttgacaagttcctcctacacgca

SEQ ID NO: 4727323 - DNA, 25 bp, Homo sapien
cccttgtatcaagggtgggaactgg

SEQ ID NO: 4727324 - DNA, 25 bp, Homo sapien
ccttcatccgtatatgacacatttc

SEQ ID NO: 4727325 - DNA, 25 bp, Homo sapien
gggcctatttgatttctcattaacc

SEQ ID NO: 4727326 - DNA, 25 bp, Homo sapien
gagggaaaccatagagagagtaaca

SEQ ID NO: 4727327 - DNA, 25 bp, Homo sapien
aggtcaatgggccactagagggaaa

SEQ ID NO: 4727328 - DNA, 25 bp, Homo sapien
aaaaatctcaaatatcagccttcat

SEQ ID NO: 4727329 - DNA, 25 bp, Homo sapien
cattcttacaaatagttggaggtca

SEQ ID NO: 4727330 - DNA, 25 bp, Homo sapien
attcttacaaatagttggaggtcag

SEQ ID NO: 4727331 - DNA, 25 bp, Homo sapien
tcttacaaatagttggaggtcagtt

SEQ ID NO: 4727332 - DNA, 25 bp, Homo sapien
ttcttacaaatagttggaggtcagt

SEQ ID NO: 4727333 - DNA, 25 bp, Homo sapien
tatgtataaggattctaggacacca

SEQ ID NO: 4727334 - DNA, 25 bp, Homo sapien
tcctatggaataccacacagctgtt

SEQ ID NO: 4727335 - DNA, 25 bp, Homo sapien
taaacactcacatgtaacgatctgg

SEQ ID NO: 4727336 - DNA, 25 bp, Homo sapien
catctatctgatcagggtgccgcag

SEQ ID NO: 4727337 - DNA, 25 bp, Homo sapien
gaaagattctacaactgtgtatttt

SEQ ID NO: 4727338 - DNA, 25 bp, Homo sapien
ccagggatcctctagaaagaagact

SEQ ID NO: 4727339 - DNA, 25 bp, Homo sapien
tgagaaagattctacaactgtgtat

SEQ ID NO: 4727340 - DNA, 25 bp, Homo sapien
gattctacaactgtgtattttttcc

SEQ ID NO: 4727341 - DNA, 25 bp, Homo sapien
ttaagtatttaatgactcgtcatac

SEQ ID NO: 4727342 - DNA, 25 bp, Homo sapien
ggcagaaatgccgttctggatgtcc

SEQ ID NO: 4727343 - DNA, 25 bp, Homo sapien
caatggtactgtagcccaaggcatg

SEQ ID NO: 4727344 - DNA, 25 bp, Homo sapien
ttgctcgaaggtcaggacagcctgc

SEQ ID NO: 4727345 - DNA, 25 bp, Homo sapien
taaagcgtccttcatggcagaaatg

SEQ ID NO: 4727346 - DNA, 25 bp, Homo sapien
ataagttcaatgccacagcacattc

SEQ ID NO: 4727347 - DNA, 25 bp, Homo sapien
ttcttcgaggccactcttgagatcc

SEQ ID NO: 4727348 - DNA, 25 bp, Homo sapien
gggcgaagcaattctaaggcgtctg

SEQ ID NO: 4727349 - DNA, 25 bp, Homo sapien
ctaaggcgtctgtaaatttgttgct

SEQ ID NO: 4727350 - DNA, 25 bp, Homo sapien
aggaatgaccaggagagcaactttc

SEQ ID NO: 4727351 - DNA, 25 bp, Homo sapien
actagggctaccatgggttctgtaa

SEQ ID NO: 4727352 - DNA, 25 bp, Homo sapien
acccctctccagcacactagggcta

SEQ ID NO: 4727353 - DNA, 25 bp, Homo sapien
tgaccaggagagcaactttcaccat

SEQ ID NO: 4727354 - DNA, 25 bp, Homo sapien
ccacagcagtgatgccgagttctca

SEQ ID NO: 4727355 - DNA, 25 bp, Homo sapien
cattttgggcaagagtctacagcca

SEQ ID NO: 4727356 - DNA, 25 bp, Homo sapien
tcagggctacgagctgcatgcacat

SEQ ID NO: 4727357 - DNA, 25 bp, Homo sapien
tctcagtgcatgatatcagggctac

SEQ ID NO: 4727358 - DNA, 25 bp, Homo sapien
ttgtttgaacggtcactgtctcagc

SEQ ID NO: 4727359 - DNA, 25 bp, Homo sapien
agccatgcttcaatgttctgtgttc

SEQ ID NO: 4727360 - DNA, 25 bp, Homo sapien
cacatctatgtagctcttgtttgaa

SEQ ID NO: 4727361 - DNA, 25 bp, Homo sapien
tgtggccaccaacttgtagtcttcc

SEQ ID NO: 4727362 - DNA, 25 bp, Homo sapien
tatcacatgatgcaaagtgaaggct

SEQ ID NO: 4727363 - DNA, 25 bp, Homo sapien
tctgggcgcctgttgtgtatcacat

SEQ ID NO: 4727364 - DNA, 25 bp, Homo sapien
agtgaaggctgcttgttgccatatc

SEQ ID NO: 4727365 - DNA, 25 bp, Homo sapien
tgctgacagtagacgctccgcgctg

SEQ ID NO: 4727366 - DNA, 25 bp, Homo sapien
tacacatgtacacgaattcatggaa

SEQ ID NO: 4727367 - DNA, 25 bp, Homo sapien
caataagcatatcatgccacaaact

SEQ ID NO: 4727368 - DNA, 25 bp, Homo sapien
gatatagacataacccatttattga

SEQ ID NO: 4727369 - DNA, 25 bp, Homo sapien
gaaagtactgtctagtgttttaaga

SEQ ID NO: 4727370 - DNA, 25 bp, Homo sapien
tagttacacccctagaagaggtgga

SEQ ID NO: 4727371 - DNA, 25 bp, Homo sapien
gcagggccttagaagcgaacccaaa

SEQ ID NO: 4727372 - DNA, 25 bp, Homo sapien
cctacccaacatactaacgctatag

SEQ ID NO: 4727373 - DNA, 25 bp, Homo sapien
ctgcagacagaatcgcgcagggcct

SEQ ID NO: 4727374 - DNA, 25 bp, Homo sapien
cagctgtagatcctgttgcggacac

SEQ ID NO: 4727375 - DNA, 25 bp, Homo sapien
tcctccgtgagagaaaactggttcg

SEQ ID NO: 4727376 - DNA, 25 bp, Homo sapien
cattcccaatgatccgcagatgtgg

SEQ ID NO: 4727377 - DNA, 25 bp, Homo sapien
tgtagccctggcgagaaatcttcag

SEQ ID NO: 4727378 - DNA, 25 bp, Homo sapien
gccagctgccccatccaggagggag

SEQ ID NO: 4727379 - DNA, 25 bp, Homo sapien
tggcggttttgcggaatagaaagag

SEQ ID NO: 4727380 - DNA, 25 bp, Homo sapien
cggccagctgccccatccaggaggg

SEQ ID NO: 4727381 - DNA, 25 bp, Homo sapien
cagctgccccatccaggagggaggt

SEQ ID NO: 4727382 - DNA, 25 bp, Homo sapien
tcattttactgccaactccaatccc

SEQ ID NO: 4727383 - DNA, 25 bp, Homo sapien
caggcctgtcaccagtgcattcaga

SEQ ID NO: 4727384 - DNA, 25 bp, Homo sapien
gaatcaaaggaatatactttcaact

SEQ ID NO: 4727385 - DNA, 25 bp, Homo sapien
attttactgccaactccaatcccat

SEQ ID NO: 4727386 - DNA, 25 bp, Homo sapien
agttgaggagtttaaggtgtatgac

SEQ ID NO: 4727387 - DNA, 25 bp, Homo sapien
gaggagtttaaggtgtatgactcag

SEQ ID NO: 4727388 - DNA, 25 bp, Homo sapien
ttagttgaggagtttaaggtgtatg

SEQ ID NO: 4727389 - DNA, 25 bp, Homo sapien
ttgaggagtttaaggtgtatgactc

SEQ ID NO: 4727390 - DNA, 25 bp, Homo sapien
caataaaccagccatggcatcccgg

SEQ ID NO: 4727391 - DNA, 25 bp, Homo sapien
tcctccgcagcaagtcacactattt

SEQ ID NO: 4727392 - DNA, 25 bp, Homo sapien
tggcatcccgggaagaccagatcct

SEQ ID NO: 4727393 - DNA, 25 bp, Homo sapien
tccgcagcaagtcacactattttct

SEQ ID NO: 4727394 - DNA, 25 bp, Homo sapien
aagctgagcattgctaccagggctg

SEQ ID NO: 4727395 - DNA, 25 bp, Homo sapien
agcaaagtcctggctttcagacaca

SEQ ID NO: 4727396 - DNA, 25 bp, Homo sapien
tctgagaaccagacaatgctaatat

SEQ ID NO: 4727397 - DNA, 25 bp, Homo sapien
gatgatgttctgagaaccagacaat

SEQ ID NO: 4727398 - DNA, 25 bp, Homo sapien
catctaactcggttgaacaaaagag

SEQ ID NO: 4727399 - DNA, 25 bp, Homo sapien
gctaatattaaaccatctaactcgg

SEQ ID NO: 4727400 - DNA, 25 bp, Homo sapien
gacagtttaaaccactttgcttaca

SEQ ID NO: 4727401 - DNA, 25 bp, Homo sapien
tagaagtcatacaaaagatgcaatg

SEQ ID NO: 4727402 - DNA, 25 bp, Homo sapien
taatacccagtgatgataatgtgac

SEQ ID NO: 4727403 - DNA, 25 bp, Homo sapien
tgataatactcctgtggaagtactg

SEQ ID NO: 4727404 - DNA, 25 bp, Homo sapien
gagatggtttccaaggcatcttcga

SEQ ID NO: 4727405 - DNA, 25 bp, Homo sapien
tggtttccaaggcatcttcgaaaac

SEQ ID NO: 4727406 - DNA, 25 bp, Homo sapien
tttccaaggcatcttcgaaaacgtc

SEQ ID NO: 4727407 - DNA, 25 bp, Homo sapien
attgagatggtttccaaggcatctt

SEQ ID NO: 4727408 - DNA, 25 bp, Homo sapien
gatagccctttgcttcatgccactg

SEQ ID NO: 4727409 - DNA, 25 bp, Homo sapien
aataaataagaggacttgcccgatg

SEQ ID NO: 4727410 - DNA, 25 bp, Homo sapien
ggagagaaacgcacacagtcatatg

SEQ ID NO: 4727411 - DNA, 25 bp, Homo sapien
tccatggctagccaagtgagcatcc

SEQ ID NO: 4727412 - DNA, 25 bp, Homo sapien
acaatagggtacatggacagcccac

SEQ ID NO: 4727413 - DNA, 25 bp, Homo sapien
aacaatagggtacatggacagccca

SEQ ID NO: 4727414 - DNA, 25 bp, Homo sapien
caacaatagggtacatggacagccc

SEQ ID NO: 4727415 - DNA, 25 bp, Homo sapien
taaatttcctagtgctcctccagtg

SEQ ID NO: 4727416 - DNA, 25 bp, Homo sapien
cataaatttcctagtgctcctccag

SEQ ID NO: 4727417 - DNA, 25 bp, Homo sapien
cccttagctccccagtactggtggg

SEQ ID NO: 4727418 - DNA, 25 bp, Homo sapien
gggctcaccgtgtgccctccagtta

SEQ ID NO: 4727419 - DNA, 25 bp, Homo sapien
agcagtttcattttgcacgttaaaa

SEQ ID NO: 4727420 - DNA, 25 bp, Homo sapien
aaggtcctcaccttgagcagtttca

SEQ ID NO: 4727421 - DNA, 25 bp, Homo sapien
gctgagcacccttgtctggaggtgg

SEQ ID NO: 4727422 - DNA, 25 bp, Homo sapien
ctggaggtggaaggtcctcaccttg

SEQ ID NO: 4727423 - DNA, 25 bp, Homo sapien
ggaaagctgcatcacctactaaggc

SEQ ID NO: 4727424 - DNA, 25 bp, Homo sapien
acaatttccatcttaactcgctagc

SEQ ID NO: 4727425 - DNA, 25 bp, Homo sapien
tagaaactgccatcctgatcgtaga

SEQ ID NO: 4727426 - DNA, 25 bp, Homo sapien
ctgatcgtagaactgacacagagtg

SEQ ID NO: 4727427 - DNA, 25 bp, Homo sapien
catgcaagaacatttgagtggaaga

SEQ ID NO: 4727428 - DNA, 25 bp, Homo sapien
tgcaagaacatttgagtggaagagc

SEQ ID NO: 4727429 - DNA, 25 bp, Homo sapien
tgagtagcaaaaatgcatgcaagaa

SEQ ID NO: 4727430 - DNA, 25 bp, Homo sapien
gcaggttcttgatgttcatttaaga

SEQ ID NO: 4727431 - DNA, 25 bp, Homo sapien
taacgactgttgttggtccttgcag

SEQ ID NO: 4727432 - DNA, 25 bp, Homo sapien
cacctgtaacgactgttgttggtcc

SEQ ID NO: 4727433 - DNA, 25 bp, Homo sapien
caagtccccacctgtaacgactgtt

SEQ ID NO: 4727434 - DNA, 25 bp, Homo sapien
tgttgttggtccttgcagggaacaa

SEQ ID NO: 4727435 - DNA, 25 bp, Homo sapien
tggaagaggtacatcccagcatcta

SEQ ID NO: 4727436 - DNA, 25 bp, Homo sapien
taagtacgaaataatgtcagctccc

SEQ ID NO: 4727437 - DNA, 25 bp, Homo sapien
gaataacagtgccatcaaactcatg

SEQ ID NO: 4727438 - DNA, 25 bp, Homo sapien
tcatcagtccctattctggaagagg

SEQ ID NO: 4727439 - DNA, 25 bp, Homo sapien
cagaggacccagatagaacaagaag

SEQ ID NO: 4727440 - DNA, 25 bp, Homo sapien
tgcagacagcatatggtagggcttc

SEQ ID NO: 4727441 - DNA, 25 bp, Homo sapien
gggcttctcacgctccataattgta

SEQ ID NO: 4727442 - DNA, 25 bp, Homo sapien
aaggttctccagcattcggtctcca

SEQ ID NO: 4727443 - DNA, 25 bp, Homo sapien
gggattatgtgagctatgactcaag

SEQ ID NO: 4727444 - DNA, 25 bp, Homo sapien
gattatgtgagctatgactcaagat

SEQ ID NO: 4727445 - DNA, 25 bp, Homo sapien
tatgtgagctatgactcaagatgag

SEQ ID NO: 4727446 - DNA, 25 bp, Homo sapien
cacgtggggattatgtgagctatga

SEQ ID NO: 4727447 - DNA, 25 bp, Homo sapien
ggcattaggaactgccaggcactcc

SEQ ID NO: 4727448 - DNA, 25 bp, Homo sapien
ccccacttcagaagtccctttagag

SEQ ID NO: 4727449 - DNA, 25 bp, Homo sapien
tttagagaggtgtgatgacatcacc

SEQ ID NO: 4727450 - DNA, 25 bp, Homo sapien
ccaatacagcaactggccgcggtgg

SEQ ID NO: 4727451 - DNA, 25 bp, Homo sapien
aacaaatggcccatgctccgcaatc

SEQ ID NO: 4727452 - DNA, 25 bp, Homo sapien
tgctccgcaatcagaaaattcagtg

SEQ ID NO: 4727453 - DNA, 25 bp, Homo sapien
gcccatgctccgcaatcagaaaatt

SEQ ID NO: 4727454 - DNA, 25 bp, Homo sapien
aatggcccatgctccgcaatcagaa

SEQ ID NO: 4727455 - DNA, 25 bp, Homo sapien
gcccataagtatgtgaaggtaacca

SEQ ID NO: 4727456 - DNA, 25 bp, Homo sapien
gttgattgagctttaaatggccaca

SEQ ID NO: 4727457 - DNA, 25 bp, Homo sapien
tgcctccaatgaggatgcaagtcct

SEQ ID NO: 4727458 - DNA, 25 bp, Homo sapien
gacttcaagatcaggcaactagaga

SEQ ID NO: 4727459 - DNA, 25 bp, Homo sapien
gagattcctggcactaaagagatgg

SEQ ID NO: 4727460 - DNA, 25 bp, Homo sapien
caaagtatctccgaaacagtcccag

SEQ ID NO: 4727461 - DNA, 25 bp, Homo sapien
gatcctcaatgcaagggacaggctg

SEQ ID NO: 4727462 - DNA, 25 bp, Homo sapien
caggctgtaagcaagggtctggaca

SEQ ID NO: 4727463 - DNA, 25 bp, Homo sapien
tcaagagcagggagagcgctgtctc

SEQ ID NO: 4727464 - DNA, 25 bp, Homo sapien
ctaaaggcagcgactcgcacaattc

SEQ ID NO: 4727465 - DNA, 25 bp, Homo sapien
ctggagcctcggtctcaacttcaag

SEQ ID NO: 4727466 - DNA, 25 bp, Homo sapien
acaattcaagtcaggtaagatggca

SEQ ID NO: 4727467 - DNA, 25 bp, Homo sapien
cacgactgaaggagtggctaattac

SEQ ID NO: 4727468 - DNA, 25 bp, Homo sapien
cacagttgaaaccaaaggaggccgg

SEQ ID NO: 4727469 - DNA, 25 bp, Homo sapien
aataaatcaacaggtccggcgcgct

SEQ ID NO: 4727470 - DNA, 25 bp, Homo sapien
caaaggaggccggagtcggttctca

SEQ ID NO: 4727471 - DNA, 25 bp, Homo sapien
ttccatagaaggtgagattcccagg

SEQ ID NO: 4727472 - DNA, 25 bp, Homo sapien
taagcctttcggttctgccaccagg

SEQ ID NO: 4727473 - DNA, 25 bp, Homo sapien
gatgattccacgaacacccagagag

SEQ ID NO: 4727474 - DNA, 25 bp, Homo sapien
ggtcagacttcgtaaagcccaggcg

SEQ ID NO: 4727475 - DNA, 25 bp, Homo sapien
gcccgcaatccccatcggatcgtac

SEQ ID NO: 4727476 - DNA, 25 bp, Homo sapien
gccgggcccgcaatccccatcggat

SEQ ID NO: 4727477 - DNA, 25 bp, Homo sapien
tcccggactcctgtccagggcttca

SEQ ID NO: 4727478 - DNA, 25 bp, Homo sapien
tcttctctcccggactcctgtccag

SEQ ID NO: 4727479 - DNA, 25 bp, Homo sapien
tccgctcggctgcctaagagcgcca

SEQ ID NO: 4727480 - DNA, 25 bp, Homo sapien
ccgctcggctgcctaagagcgccat

SEQ ID NO: 4727481 - DNA, 25 bp, Homo sapien
cagcccagcgcaaaggagggcaaaa

SEQ ID NO: 4727482 - DNA, 25 bp, Homo sapien
ctcagcccagcgcaaaggagggcaa

SEQ ID NO: 4727483 - DNA, 25 bp, Homo sapien
aaaaaccaagcagggaactcagagc

SEQ ID NO: 4727484 - DNA, 25 bp, Homo sapien
cccaaaaaccaagcagggaactcag

SEQ ID NO: 4727485 - DNA, 25 bp, Homo sapien
agtgcagctactcgatttccccgcc

SEQ ID NO: 4727486 - DNA, 25 bp, Homo sapien
cagctactcgatttccccgcccccg

SEQ ID NO: 4727487 - DNA, 25 bp, Homo sapien
tgagtgcagctactcgatttccccg

SEQ ID NO: 4727488 - DNA, 25 bp, Homo sapien
tgcagctactcgatttccccgcccc

SEQ ID NO: 4727489 - DNA, 25 bp, Homo sapien
ctggggtccgtggaagcatccacct

SEQ ID NO: 4727490 - DNA, 25 bp, Homo sapien
gggtccgtggaagcatccacctggt

SEQ ID NO: 4727491 - DNA, 25 bp, Homo sapien
cgtggaagcatccacctggtctttg

SEQ ID NO: 4727492 - DNA, 25 bp, Homo sapien
cagtccttttccctcgccaggtggc

SEQ ID NO: 4727493 - DNA, 25 bp, Homo sapien
ccacccacctggactgtaggtggaa

SEQ ID NO: 4727494 - DNA, 25 bp, Homo sapien
gcagccttgggtcacggtcactggt

SEQ ID NO: 4727495 - DNA, 25 bp, Homo sapien
ctgtaggtggaaggactctgcttgc

SEQ ID NO: 4727496 - DNA, 25 bp, Homo sapien
gtcacggtcactggtccccgagagg

SEQ ID NO: 4727497 - DNA, 25 bp, Homo sapien
aaacgcgggacagagatttatacat

SEQ ID NO: 4727498 - DNA, 25 bp, Homo sapien
atagaaaaaaacgcgggacagagat

SEQ ID NO: 4727499 - DNA, 25 bp, Homo sapien
aaaacgcgggacagagatttataca

SEQ ID NO: 4727500 - DNA, 25 bp, Homo sapien
gctgatagttttttgctggtacttg

SEQ ID NO: 4727501 - DNA, 25 bp, Homo sapien
ctgatagttttttgctggtacttga

SEQ ID NO: 4727502 - DNA, 25 bp, Homo sapien
agctgatagttttttgctggtactt

SEQ ID NO: 4727503 - DNA, 25 bp, Homo sapien
gatagttttttgctggtacttgatt

SEQ ID NO: 4727504 - DNA, 25 bp, Homo sapien
tcatgggagggaccaggtagagaaa

SEQ ID NO: 4727505 - DNA, 25 bp, Homo sapien
caggtagagaaaattgaatgctggg

SEQ ID NO: 4727506 - DNA, 25 bp, Homo sapien
ggcaatttaccccatcctgttctca

SEQ ID NO: 4727507 - DNA, 25 bp, Homo sapien
gaatgctgggggcaatttaccccat

SEQ ID NO: 4727508 - DNA, 25 bp, Homo sapien
ctatagctattagattgactaaaag

SEQ ID NO: 4727509 - DNA, 25 bp, Homo sapien
atgagtttggctagttatccgcagc

SEQ ID NO: 4727510 - DNA, 25 bp, Homo sapien
tgtttctatagctattagattgact

SEQ ID NO: 4727511 - DNA, 25 bp, Homo sapien
agggatgagtttggctagttatccg

SEQ ID NO: 4727512 - DNA, 25 bp, Homo sapien
tctcaacaaatcaactcctccagct

SEQ ID NO: 4727513 - DNA, 25 bp, Homo sapien
ctgaaggcccagttcttcacatcct

SEQ ID NO: 4727514 - DNA, 25 bp, Homo sapien
gtgccacaagctgcaaccaggtcct

SEQ ID NO: 4727515 - DNA, 25 bp, Homo sapien
gttcttcacatcctcaaagtctctc

SEQ ID NO: 4727516 - DNA, 25 bp, Homo sapien
ttggtctgtcacttcactgatcttg

SEQ ID NO: 4727517 - DNA, 25 bp, Homo sapien
gaattttggtctgtcacttcactga

SEQ ID NO: 4727518 - DNA, 25 bp, Homo sapien
ttccttgaattttggtctgtcactt

SEQ ID NO: 4727519 - DNA, 25 bp, Homo sapien
ttttggtctgtcacttcactgatct

SEQ ID NO: 4727520 - DNA, 25 bp, Homo sapien
agtgtgcgtggatggcctctatttt

SEQ ID NO: 4727521 - DNA, 25 bp, Homo sapien
tgtgcgtggatggcctctattttat

SEQ ID NO: 4727522 - DNA, 25 bp, Homo sapien
aaagcagctagaatgcatgtggctg

SEQ ID NO: 4727523 - DNA, 25 bp, Homo sapien
aagcagctagaatgcatgtggctgg

SEQ ID NO: 4727524 - DNA, 25 bp, Homo sapien
gccaatgtggaaacaagaaaggcca

SEQ ID NO: 4727525 - DNA, 25 bp, Homo sapien
caagaaaggccaatactggtttggc

SEQ ID NO: 4727526 - DNA, 25 bp, Homo sapien
ggtttggccccatggatgtgcaggg

SEQ ID NO: 4727527 - DNA, 25 bp, Homo sapien
tagcagtactctgccgccaatgtgg

SEQ ID NO: 4727528 - DNA, 25 bp, Homo sapien
gtttctattacaagctatcttcttt

SEQ ID NO: 4727529 - DNA, 25 bp, Homo sapien
ggtttctattacaagctatcttctt

SEQ ID NO: 4727530 - DNA, 25 bp, Homo sapien
ttctttttggataagatctttagtg

SEQ ID NO: 4727531 - DNA, 25 bp, Homo sapien
ggccgtgctaatcttaaatatattg

SEQ ID NO: 4727532 - DNA, 25 bp, Homo sapien
atatcatccatgcacaggggccgtg

SEQ ID NO: 4727533 - DNA, 25 bp, Homo sapien
gcatatcatccatgcacaggggccg

SEQ ID NO: 4727534 - DNA, 25 bp, Homo sapien
aggggccgtgctaatcttaaatata

SEQ ID NO: 4727535 - DNA, 25 bp, Homo sapien
gaaaatagcgattactctagctggt

SEQ ID NO: 4727536 - DNA, 25 bp, Homo sapien
gattcaattcgatgtgtcagtgacc

SEQ ID NO: 4727537 - DNA, 25 bp, Homo sapien
ggtggtgaattcagcaacactcctg

SEQ ID NO: 4727538 - DNA, 25 bp, Homo sapien
ggtgttgggcagtcaaaaactcaca

SEQ ID NO: 4727539 - DNA, 25 bp, Homo sapien
tgctccacaggctgactatattcgt

SEQ ID NO: 4727540 - DNA, 25 bp, Homo sapien
tacgcggagcaggaaatacgagatt

SEQ ID NO: 4727541 - DNA, 25 bp, Homo sapien
gagactagcatatggctcacatgta

SEQ ID NO: 4727542 - DNA, 25 bp, Homo sapien
gctgattcagtgtaatgtgtgtccg

SEQ ID NO: 4727543 - DNA, 25 bp, Homo sapien
cttccaaggtaaagatccttcaaat

SEQ ID NO: 4727544 - DNA, 25 bp, Homo sapien
gcttccaaggtaaagatccttcaaa

SEQ ID NO: 4727545 - DNA, 25 bp, Homo sapien
cctattgattgctagctctggctca

SEQ ID NO: 4727546 - DNA, 25 bp, Homo sapien
tattctccggtaatgatactattgg

SEQ ID NO: 4727547 - DNA, 25 bp, Homo sapien
actatgttgcgcagaatagtctcga

SEQ ID NO: 4727548 - DNA, 25 bp, Homo sapien
caatagcagatttcgtatgactgtg

SEQ ID NO: 4727549 - DNA, 25 bp, Homo sapien
tcaaccaggttactcccacagtttg

SEQ ID NO: 4727550 - DNA, 25 bp, Homo sapien
ttattgttccctggtgaaactgagg

SEQ ID NO: 4727551 - DNA, 25 bp, Homo sapien
cagtttgcccgtgtgttatgtatca

SEQ ID NO: 4727552 - DNA, 25 bp, Homo sapien
tcagttatacaggtatcccaccaag

SEQ ID NO: 4727553 - DNA, 25 bp, Homo sapien
actcttttatccagtaatcaaaaca

SEQ ID NO: 4727554 - DNA, 25 bp, Homo sapien
gcgcccggctgatgtatgactcttt

SEQ ID NO: 4727555 - DNA, 25 bp, Homo sapien
cacataccagcccaaaagaggtgtt

SEQ ID NO: 4727556 - DNA, 25 bp, Homo sapien
catattacacgtactttttggaggg

SEQ ID NO: 4727557 - DNA, 25 bp, Homo sapien
tatgcaggttctctcaaaacggtga

SEQ ID NO: 4727558 - DNA, 25 bp, Homo sapien
ggatttagtccatacacgtcaatgt

SEQ ID NO: 4727559 - DNA, 25 bp, Homo sapien
taaggaccaaacagataatgactgg

SEQ ID NO: 4727560 - DNA, 25 bp, Homo sapien
caatgtcatacagagacgctggtct

SEQ ID NO: 4727561 - DNA, 25 bp, Homo sapien
agaggcaaggtttatacaagtagca

SEQ ID NO: 4727562 - DNA, 25 bp, Homo sapien
actagtgcctgcctataaaaggacc

SEQ ID NO: 4727563 - DNA, 25 bp, Homo sapien
tcctaagacttcactgaatgcccag

SEQ ID NO: 4727564 - DNA, 25 bp, Homo sapien
gaaaatatgctacaaccatgtctgg

SEQ ID NO: 4727565 - DNA, 25 bp, Homo sapien
tagtgtagaatccttcagagatatt

SEQ ID NO: 4727566 - DNA, 25 bp, Homo sapien
tagttatctagtgtagaatccttca

SEQ ID NO: 4727567 - DNA, 25 bp, Homo sapien
ctagttatctagtgtagaatccttc

SEQ ID NO: 4727568 - DNA, 25 bp, Homo sapien
tatctagtgtagaatccttcagaga

SEQ ID NO: 4727569 - DNA, 25 bp, Homo sapien
tatggctccatagcctattttaggg

SEQ ID NO: 4727570 - DNA, 25 bp, Homo sapien
gatgcttctatctaactccttcaga

SEQ ID NO: 4727571 - DNA, 25 bp, Homo sapien
tcagcaaagtgtcatggaccaagcc

SEQ ID NO: 4727572 - DNA, 25 bp, Homo sapien
caaagcaagacttcaactatggctc

SEQ ID NO: 4727573 - DNA, 25 bp, Homo sapien
ccttgaattcagtggcaaagtcact

SEQ ID NO: 4727574 - DNA, 25 bp, Homo sapien
gtatctcagtaaaagtagtccagga

SEQ ID NO: 4727575 - DNA, 25 bp, Homo sapien
aattgggtgatcaaaagataactgc

SEQ ID NO: 4727576 - DNA, 25 bp, Homo sapien
actgggttcccagctagttccattc

SEQ ID NO: 4727577 - DNA, 25 bp, Homo sapien
gatcctccatttagagtctttgacc

SEQ ID NO: 4727578 - DNA, 25 bp, Homo sapien
tgagcatcagatcctccatttagag

SEQ ID NO: 4727579 - DNA, 25 bp, Homo sapien
tgttgtggctgattaccatcttgag

SEQ ID NO: 4727580 - DNA, 25 bp, Homo sapien
cttcattgctctccccgttatgttg

SEQ ID NO: 4727581 - DNA, 25 bp, Homo sapien
gggagcagatgaccaccagaggctt

SEQ ID NO: 4727582 - DNA, 25 bp, Homo sapien
gctaaggcaccataaaaagcaggtt

SEQ ID NO: 4727583 - DNA, 25 bp, Homo sapien
tattctaccacggaaaagcaatgtg

SEQ ID NO: 4727584 - DNA, 25 bp, Homo sapien
cagaggctttgggtagctaaggcac

SEQ ID NO: 4727585 - DNA, 25 bp, Homo sapien
cctgactaactttgaatcgccgtat

SEQ ID NO: 4727586 - DNA, 25 bp, Homo sapien
tgggtgatcacggaatctccttcac

SEQ ID NO: 4727587 - DNA, 25 bp, Homo sapien
tttattcagcacttgggtgatcacg

SEQ ID NO: 4727588 - DNA, 25 bp, Homo sapien
gacttttccatgattacctgactaa

SEQ ID NO: 4727589 - DNA, 25 bp, Homo sapien
tttcagtgtagtaatcatctctgtg

SEQ ID NO: 4727590 - DNA, 25 bp, Homo sapien
tgtgtgtttctgagcttgttgcatt

SEQ ID NO: 4727591 - DNA, 25 bp, Homo sapien
ttttttcagtgtagtaatcatctct

SEQ ID NO: 4727592 - DNA, 25 bp, Homo sapien
gtgtttctgagcttgttgcattgtg

SEQ ID NO: 4727593 - DNA, 25 bp, Homo sapien
gtgaagcaagttcatccaaggcctc

SEQ ID NO: 4727594 - DNA, 25 bp, Homo sapien
tgaagtcgagaatccattgatgttt

SEQ ID NO: 4727595 - DNA, 25 bp, Homo sapien
tttgaagtcgagaatccattgatgt

SEQ ID NO: 4727596 - DNA, 25 bp, Homo sapien
ttttaatctcagcatgtatcctttg

SEQ ID NO: 4727597 - DNA, 25 bp, Homo sapien
cagcatgtatcctttgaagtcgaga

SEQ ID NO: 4727598 - DNA, 25 bp, Homo sapien
tcttctccactttcttaacttctgg

SEQ ID NO: 4727599 - DNA, 25 bp, Homo sapien
ttctccactttcttaacttctggct

SEQ ID NO: 4727600 - DNA, 25 bp, Homo sapien
ctccactttcttaacttctggcttc

SEQ ID NO: 4727601 - DNA, 25 bp, Homo sapien
tcgcttcttctccactttcttaact

SEQ ID NO: 4727602 - DNA, 25 bp, Homo sapien
gccacaatgggaagatgacacctat

SEQ ID NO: 4727603 - DNA, 25 bp, Homo sapien
gaatggtgcagttccgtagcataaa

SEQ ID NO: 4727604 - DNA, 25 bp, Homo sapien
cagggtcactggacaaacaggccac

SEQ ID NO: 4727605 - DNA, 25 bp, Homo sapien
tcaatagcctagactgcaaaggaac

SEQ ID NO: 4727606 - DNA, 25 bp, Homo sapien
ggccccattctcagggatataactg

SEQ ID NO: 4727607 - DNA, 25 bp, Homo sapien
caatgagtctgtatcaagatcttca

SEQ ID NO: 4727608 - DNA, 25 bp, Homo sapien
tgatggccgaccttagtatgtagtg

SEQ ID NO: 4727609 - DNA, 25 bp, Homo sapien
caaaggaatgtcaagagaagggccc

SEQ ID NO: 4727610 - DNA, 25 bp, Homo sapien
agcccaaaatgagatatatttttta

SEQ ID NO: 4727611 - DNA, 25 bp, Homo sapien
tttgagcccaaaatgagatatattt

SEQ ID NO: 4727612 - DNA, 25 bp, Homo sapien
ctttgagcccaaaatgagatatatt

SEQ ID NO: 4727613 - DNA, 25 bp, Homo sapien
tgagcccaaaatgagatatattttt

SEQ ID NO: 4727614 - DNA, 25 bp, Homo sapien
ttactgtagattacatgttgtttgg

SEQ ID NO: 4727615 - DNA, 25 bp, Homo sapien
tttcacacaagctgcatctgaaatg

SEQ ID NO: 4727616 - DNA, 25 bp, Homo sapien
ttattttgcataatgcatttcacac

SEQ ID NO: 4727617 - DNA, 25 bp, Homo sapien
aataaactttattttgcataatgca

SEQ ID NO: 4727618 - DNA, 25 bp, Homo sapien
tgcatttcacacaagctgcatctga

SEQ ID NO: 4727619 - DNA, 25 bp, Homo sapien
aacaaatggttgaggatgagtacac

SEQ ID NO: 4727620 - DNA, 25 bp, Homo sapien
tgagtacacttcttgcaaagccagt

SEQ ID NO: 4727621 - DNA, 25 bp, Homo sapien
tagtcagaatgtaagacgcttcacg

SEQ ID NO: 4727622 - DNA, 25 bp, Homo sapien
cataataatgtacaccctgtcagcc

SEQ ID NO: 4727623 - DNA, 25 bp, Homo sapien
agcagtctgaaagttcctcccacct

SEQ ID NO: 4727624 - DNA, 25 bp, Homo sapien
gagcagtctgaaagttcctcccacc

SEQ ID NO: 4727625 - DNA, 25 bp, Homo sapien
cagtctgaaagttcctcccaccttt

SEQ ID NO: 4727626 - DNA, 25 bp, Homo sapien
gcagtctgaaagttcctcccacctt

SEQ ID NO: 4727627 - DNA, 25 bp, Homo sapien
cttcagaatcggaggttgaagtaac

SEQ ID NO: 4727628 - DNA, 25 bp, Homo sapien
tttcaccttcttgatcatctccttc

SEQ ID NO: 4727629 - DNA, 25 bp, Homo sapien
tatccggctcttttcttggcttatc

SEQ ID NO: 4727630 - DNA, 25 bp, Homo sapien
ttcttcttcagaatcggaggttgaa

SEQ ID NO: 4727631 - DNA, 25 bp, Homo sapien
gtttaaagtcaaatgtctcatttat

SEQ ID NO: 4727632 - DNA, 25 bp, Homo sapien
gtctgcctcttggttttggaatctt

SEQ ID NO: 4727633 - DNA, 25 bp, Homo sapien
tctgcctcttggttttggaatcttg

SEQ ID NO: 4727634 - DNA, 25 bp, Homo sapien
ggtctgcctcttggttttggaatct

SEQ ID NO: 4727635 - DNA, 25 bp, Homo sapien
tcccccaccatggttaaaatgagca

SEQ ID NO: 4727636 - DNA, 25 bp, Homo sapien
gaatattagtagcttattacagata

SEQ ID NO: 4727637 - DNA, 25 bp, Homo sapien
acatttttcactatcgttttaacag

SEQ ID NO: 4727638 - DNA, 25 bp, Homo sapien
tataaagaggtaaacagagtaatcc

SEQ ID NO: 4727639 - DNA, 25 bp, Homo sapien
tcctcttttaggactcacttttaga

SEQ ID NO: 4727640 - DNA, 25 bp, Homo sapien
cctcttttaggactcacttttagat

SEQ ID NO: 4727641 - DNA, 25 bp, Homo sapien
tcctcagtttctacttgtttttctg

SEQ ID NO: 4727642 - DNA, 25 bp, Homo sapien
cctcagtttctacttgtttttctgc

SEQ ID NO: 4727643 - DNA, 25 bp, Homo sapien
ctcctcagtttctacttgtttttct

SEQ ID NO: 4727644 - DNA, 25 bp, Homo sapien
ccactcaagttactttaagggtgct

SEQ ID NO: 4727645 - DNA, 25 bp, Homo sapien
taagggtgctatatcactaagaaag

SEQ ID NO: 4727646 - DNA, 25 bp, Homo sapien
aaattcttttcagatccccatggtt

SEQ ID NO: 4727647 - DNA, 25 bp, Homo sapien
ccccatggttggtaagtcagtgaaa

SEQ ID NO: 4727648 - DNA, 25 bp, Homo sapien
tggcagcttttggagtagttatgtc

SEQ ID NO: 4727649 - DNA, 25 bp, Homo sapien
agttatgtcaactgctttagtcaca

SEQ ID NO: 4727650 - DNA, 25 bp, Homo sapien
gcagcttttggagtagttatgtcaa

SEQ ID NO: 4727651 - DNA, 25 bp, Homo sapien
ttggagtagttatgtcaactgcttt

SEQ ID NO: 4727652 - DNA, 25 bp, Homo sapien
tcatggtcggtatcttcctttgaaa

SEQ ID NO: 4727653 - DNA, 25 bp, Homo sapien
catggtcggtatcttcctttgaaac

SEQ ID NO: 4727654 - DNA, 25 bp, Homo sapien
ctgtgagcaatcaactctattaatt

SEQ ID NO: 4727655 - DNA, 25 bp, Homo sapien
tggattgttatctatctcccataaa

SEQ ID NO: 4727656 - DNA, 25 bp, Homo sapien
ggaagatgtgagtgcaaagcaagct

SEQ ID NO: 4727657 - DNA, 25 bp, Homo sapien
gggaagatgtgagtgcaaagcaagc

SEQ ID NO: 4727658 - DNA, 25 bp, Homo sapien
gaagatgtgagtgcaaagcaagctc

SEQ ID NO: 4727659 - DNA, 25 bp, Homo sapien
atttcaaaacacaaccatgcccttc

SEQ ID NO: 4727660 - DNA, 25 bp, Homo sapien
catttcaaaacacaaccatgccctt

SEQ ID NO: 4727661 - DNA, 25 bp, Homo sapien
ccatgcccttccaacagtccccatc

SEQ ID NO: 4727662 - DNA, 25 bp, Homo sapien
tgcccttccaacagtccccatcccc

SEQ ID NO: 4727663 - DNA, 25 bp, Homo sapien
gagtgatcccatgcacttggcagta

SEQ ID NO: 4727664 - DNA, 25 bp, Homo sapien
gaaattaacggtagcctcctgagtg

SEQ ID NO: 4727665 - DNA, 25 bp, Homo sapien
caagagatgctaatggtgctagacc

SEQ ID NO: 4727666 - DNA, 25 bp, Homo sapien
gctagacctgacaacacactttgaa

SEQ ID NO: 4727667 - DNA, 25 bp, Homo sapien
atgggtagtttgtttgtgggtggct

SEQ ID NO: 4727668 - DNA, 25 bp, Homo sapien
tgtgggtggctttacagctccatca

SEQ ID NO: 4727669 - DNA, 25 bp, Homo sapien
ttgtgggtggctttacagctccatc

SEQ ID NO: 4727670 - DNA, 25 bp, Homo sapien
tttgtgggtggctttacagctccat

SEQ ID NO: 4727671 - DNA, 25 bp, Homo sapien
atcttggcgaagatgaggtctccag

SEQ ID NO: 4727672 - DNA, 25 bp, Homo sapien
tcttggcgaagatgaggtctccagg

SEQ ID NO: 4727673 - DNA, 25 bp, Homo sapien
atgaggtctccaggtttgaaatcgc

SEQ ID NO: 4727674 - DNA, 25 bp, Homo sapien
ctccaggtttgaaatcgcgagtcat

SEQ ID NO: 4727675 - DNA, 25 bp, Homo sapien
ggcgaggagatgcggcggcgcgggg

SEQ ID NO: 4727676 - DNA, 25 bp, Homo sapien
gcgggggaggatgcctcggggcgtc

SEQ ID NO: 4727677 - DNA, 25 bp, Homo sapien
agctgccgcagaggcgtctcaacgg

SEQ ID NO: 4727678 - DNA, 25 bp, Homo sapien
agaggcgtctcaacggctcggaatc

SEQ ID NO: 4727679 - DNA, 25 bp, Homo sapien
tcaacggctcggaatcgcaaccgcg

SEQ ID NO: 4727680 - DNA, 25 bp, Homo sapien
tgcggttgctggccggtcgcctcta

SEQ ID NO: 4727681 - DNA, 25 bp, Homo sapien
ccacatgtgtatatgccatactcct

SEQ ID NO: 4727682 - DNA, 25 bp, Homo sapien
cacatgtgtatatgccatactcctc

SEQ ID NO: 4727683 - DNA, 25 bp, Homo sapien
acatgtgtatatgccatactcctct

SEQ ID NO: 4727684 - DNA, 25 bp, Homo sapien
gttcttactccatgattttggtgtg

SEQ ID NO: 4727685 - DNA, 25 bp, Homo sapien
cattttcctccgtgttcttactcca

SEQ ID NO: 4727686 - DNA, 25 bp, Homo sapien
tccatgattttggtgtgtgaagtgt

SEQ ID NO: 4727687 - DNA, 25 bp, Homo sapien
ttctcattttcctccgtgttcttac

SEQ ID NO: 4727688 - DNA, 25 bp, Homo sapien
tttgaaagtagaatgatgtcttgct

SEQ ID NO: 4727689 - DNA, 25 bp, Homo sapien
ctttgaaagtagaatgatgtcttgc

SEQ ID NO: 4727690 - DNA, 25 bp, Homo sapien
cccaaaactgtaggattatgggcac

SEQ ID NO: 4727691 - DNA, 25 bp, Homo sapien
cacatgcatagcgtatatcattatc

SEQ ID NO: 4727692 - DNA, 25 bp, Homo sapien
attagggttcactattgcttcgtgc

SEQ ID NO: 4727693 - DNA, 25 bp, Homo sapien
gatacagatgtatcccatatgccct

SEQ ID NO: 4727694 - DNA, 25 bp, Homo sapien
tgatcccttgcatgtcttggtagcc

SEQ ID NO: 4727695 - DNA, 25 bp, Homo sapien
caagaagtaggctgatgtgctgcgc

SEQ ID NO: 4727696 - DNA, 25 bp, Homo sapien
tgcgctgggtacatatgaaagcttc

SEQ ID NO: 4727697 - DNA, 25 bp, Homo sapien
tcagaccatcctgattggatgatcc

SEQ ID NO: 4727698 - DNA, 25 bp, Homo sapien
gatcactcaactggtccttcattaa

SEQ ID NO: 4727699 - DNA, 25 bp, Homo sapien
tcgtaagatcactcaactggtcctt

SEQ ID NO: 4727700 - DNA, 25 bp, Homo sapien
tgaactcgtaagatcactcaactgg

SEQ ID NO: 4727701 - DNA, 25 bp, Homo sapien
cacttttccactgaactcgtaagat

SEQ ID NO: 4727702 - DNA, 25 bp, Homo sapien
atggttcggagagcccaggttcaca

SEQ ID NO: 4727703 - DNA, 25 bp, Homo sapien
tggcatggttcggagagcccaggtt

SEQ ID NO: 4727704 - DNA, 25 bp, Homo sapien
tcggtggcatggttcggagagccca

SEQ ID NO: 4727705 - DNA, 25 bp, Homo sapien
aggtcggtggcatggttcggagagc

SEQ ID NO: 4727706 - DNA, 25 bp, Homo sapien
tcttccaggtctagtttgtgtgcca

SEQ ID NO: 4727707 - DNA, 25 bp, Homo sapien
cttccaggtctagtttgtgtgccat

SEQ ID NO: 4727708 - DNA, 25 bp, Homo sapien
tttcttccaggtctagtttgtgtgc

SEQ ID NO: 4727709 - DNA, 25 bp, Homo sapien
aatttcttccaggtctagtttgtgt

SEQ ID NO: 4727710 - DNA, 25 bp, Homo sapien
aagtcaccatattgaccttggactc

SEQ ID NO: 4727711 - DNA, 25 bp, Homo sapien
tattgaccttggactcaatgtggac

SEQ ID NO: 4727712 - DNA, 25 bp, Homo sapien
gctggagtgctttgggtactcacaa

SEQ ID NO: 4727713 - DNA, 25 bp, Homo sapien
gggtactcacaagcaagggcccact

SEQ ID NO: 4727714 - DNA, 25 bp, Homo sapien
gagtgcttgtcaaagagatattctg

SEQ ID NO: 4727715 - DNA, 25 bp, Homo sapien
gggtgctcccatcttgcacaagttg

SEQ ID NO: 4727716 - DNA, 25 bp, Homo sapien
agggagtgcttgtcaaagagatatt

SEQ ID NO: 4727717 - DNA, 25 bp, Homo sapien
ttcgggtgctcccatcttgcacaag

SEQ ID NO: 4727718 - DNA, 25 bp, Homo sapien
tcaccccattctttgatggcttcac

SEQ ID NO: 4727719 - DNA, 25 bp, Homo sapien
tggtcaccccattctttgatggctt

SEQ ID NO: 4727720 - DNA, 25 bp, Homo sapien
gtggtcaccccattctttgatggct

SEQ ID NO: 4727721 - DNA, 25 bp, Homo sapien
ggtcaccccattctttgatggcttc

SEQ ID NO: 4727722 - DNA, 25 bp, Homo sapien
actccatcgcattcagcccactctc

SEQ ID NO: 4727723 - DNA, 25 bp, Homo sapien
gcagttccagtggtgactgatacac

SEQ ID NO: 4727724 - DNA, 25 bp, Homo sapien
caaatgtagtgcacactccatcgca

SEQ ID NO: 4727725 - DNA, 25 bp, Homo sapien
cttgatatcctgaagaaggattcgg

SEQ ID NO: 4727726 - DNA, 25 bp, Homo sapien
agacgtggacaggtaaaggtaggag

SEQ ID NO: 4727727 - DNA, 25 bp, Homo sapien
taaaggtaggaggtgtagagctcca

SEQ ID NO: 4727728 - DNA, 25 bp, Homo sapien
caaagtagtaagacgtggacaggta

SEQ ID NO: 4727729 - DNA, 25 bp, Homo sapien
tcatcgaggtcaaagtagtaagacg

SEQ ID NO: 4727730 - DNA, 25 bp, Homo sapien
cagtgactaaggagaggcggcggcg

SEQ ID NO: 4727731 - DNA, 25 bp, Homo sapien
ggcagtgactaaggagaggcggcgg

SEQ ID NO: 4727732 - DNA, 25 bp, Homo sapien
gcggcggcggctgctgcgcggcgct

SEQ ID NO: 4727733 - DNA, 25 bp, Homo sapien
gcggcggctgctgcgcggcgctgga

SEQ ID NO: 4727734 - DNA, 25 bp, Homo sapien
agggctgggttccatccaagcactg

SEQ ID NO: 4727735 - DNA, 25 bp, Homo sapien
ggctgggttccatccaagcactgtt

SEQ ID NO: 4727736 - DNA, 25 bp, Homo sapien
gacgagggctgggttccatccaagc

SEQ ID NO: 4727737 - DNA, 25 bp, Homo sapien
taggggacgagggctgggttccatc

SEQ ID NO: 4727738 - DNA, 25 bp, Homo sapien
tctcggagtacgtatccaggagctg

SEQ ID NO: 4727739 - DNA, 25 bp, Homo sapien
tccctcagcgaaggcgcgctgcttg

SEQ ID NO: 4727740 - DNA, 25 bp, Homo sapien
gggctcttccaatccgagccagcgt

SEQ ID NO: 4727741 - DNA, 25 bp, Homo sapien
agcaacggcgcatgcgcccgttcgt

SEQ ID NO: 4727742 - DNA, 25 bp, Homo sapien
tcgatcttgtacacgttctccaagt

SEQ ID NO: 4727743 - DNA, 25 bp, Homo sapien
gtcgatcttgtacacgttctccaag

SEQ ID NO: 4727744 - DNA, 25 bp, Homo sapien
gatcttgtacacgttctccaagttc

SEQ ID NO: 4727745 - DNA, 25 bp, Homo sapien
cgatcttgtacacgttctccaagtt

SEQ ID NO: 4727746 - DNA, 25 bp, Homo sapien
caatctgtggtgaacagagcggtgt

SEQ ID NO: 4727747 - DNA, 25 bp, Homo sapien
tgtaggtggctcttgcaaatcctcc

SEQ ID NO: 4727748 - DNA, 25 bp, Homo sapien
ccttctgtagcatactgagatctga

SEQ ID NO: 4727749 - DNA, 25 bp, Homo sapien
tctgctatataagctatttcctcct

SEQ ID NO: 4727750 - DNA, 25 bp, Homo sapien
tggcatcatagttaagtgcgttcat

SEQ ID NO: 4727751 - DNA, 25 bp, Homo sapien
tccctcaggccttgtagtaaatcaa

SEQ ID NO: 4727752 - DNA, 25 bp, Homo sapien
atactggcatcatagttaagtgcgt

SEQ ID NO: 4727753 - DNA, 25 bp, Homo sapien
tctatccctcaggccttgtagtaaa

SEQ ID NO: 4727754 - DNA, 25 bp, Homo sapien
tatatactttcctaattggacccca

SEQ ID NO: 4727755 - DNA, 25 bp, Homo sapien
taagctctgagtctaacctatatac

SEQ ID NO: 4727756 - DNA, 25 bp, Homo sapien
gttacatattccaactaggcactag

SEQ ID NO: 4727757 - DNA, 25 bp, Homo sapien
caaatttagtattccagtaagcacc

SEQ ID NO: 4727758 - DNA, 25 bp, Homo sapien
gtcatccttgcgcagggccatgcta

SEQ ID NO: 4727759 - DNA, 25 bp, Homo sapien
aaacatggaacgcttcacaaacttg

SEQ ID NO: 4727760 - DNA, 25 bp, Homo sapien
taaaaacatggaacgcttcacaaac

SEQ ID NO: 4727761 - DNA, 25 bp, Homo sapien
catggaacgcttcacaaacttgcgt

SEQ ID NO: 4727762 - DNA, 25 bp, Homo sapien
ctggcttgctgatgacaactctgtc

SEQ ID NO: 4727763 - DNA, 25 bp, Homo sapien
caactctgtccatatagctgtcttg

SEQ ID NO: 4727764 - DNA, 25 bp, Homo sapien
gacacacaggtgttaacacagctgg

SEQ ID NO: 4727765 - DNA, 25 bp, Homo sapien
gctgtcttgtgtgtcattattcata

SEQ ID NO: 4727766 - DNA, 25 bp, Homo sapien
ggaaagccatctcacgtgcagagac

SEQ ID NO: 4727767 - DNA, 25 bp, Homo sapien
caggaaagccatctcacgtgcagag

SEQ ID NO: 4727768 - DNA, 25 bp, Homo sapien
tattcaggaaagccatctcacgtgc

SEQ ID NO: 4727769 - DNA, 25 bp, Homo sapien
acacataggctcaaaataaaaggat

SEQ ID NO: 4727770 - DNA, 25 bp, Homo sapien
tcaaagctttgggaaataaattgtg

SEQ ID NO: 4727771 - DNA, 25 bp, Homo sapien
aataaattgtgctatctccctgggt

SEQ ID NO: 4727772 - DNA, 25 bp, Homo sapien
aagctttgggaaataaattgtgcta

SEQ ID NO: 4727773 - DNA, 25 bp, Homo sapien
aattgtgctatctccctgggtcttg

SEQ ID NO: 4727774 - DNA, 25 bp, Homo sapien
gaaagggtgctttcagacgacatag

SEQ ID NO: 4727775 - DNA, 25 bp, Homo sapien
tccatgtttaggacataacgtcaga

SEQ ID NO: 4727776 - DNA, 25 bp, Homo sapien
tctagcagtacagcagatgatccca

SEQ ID NO: 4727777 - DNA, 25 bp, Homo sapien
gagcagttagtagagactttcccta

SEQ ID NO: 4727778 - DNA, 25 bp, Homo sapien
aattgtatgtcaggccgagatgtcg

SEQ ID NO: 4727779 - DNA, 25 bp, Homo sapien
cagttcccacactaggatagcaggt

SEQ ID NO: 4727780 - DNA, 25 bp, Homo sapien
gacacccatctttgatgctgacaga

SEQ ID NO: 4727781 - DNA, 25 bp, Homo sapien
ggtaatggctgttttgaccttcaaa

SEQ ID NO: 4727782 - DNA, 25 bp, Homo sapien
cacctttttctggctccgtctgtct

SEQ ID NO: 4727783 - DNA, 25 bp, Homo sapien
acctttttctggctccgtctgtctc

SEQ ID NO: 4727784 - DNA, 25 bp, Homo sapien
cctttttctggctccgtctgtctct

SEQ ID NO: 4727785 - DNA, 25 bp, Homo sapien
cccacctttttctggctccgtctgt

SEQ ID NO: 4727786 - DNA, 25 bp, Homo sapien
aattctactgctcctacactatctt

SEQ ID NO: 4727787 - DNA, 25 bp, Homo sapien
tacactatcttctcttttatgggcc

SEQ ID NO: 4727788 - DNA, 25 bp, Homo sapien
catgcagccatgctcaattctactg

SEQ ID NO: 4727789 - DNA, 25 bp, Homo sapien
tcctggactgagacataggtctctg

SEQ ID NO: 4727790 - DNA, 25 bp, Homo sapien
aggggatcggcattgaccaggtgat

SEQ ID NO: 4727791 - DNA, 25 bp, Homo sapien
gggatcggcattgaccaggtgatgc

SEQ ID NO: 4727792 - DNA, 25 bp, Homo sapien
ggatcggcattgaccaggtgatgca

SEQ ID NO: 4727793 - DNA, 25 bp, Homo sapien
actgcaggggatcggcattgaccag

SEQ ID NO: 4727794 - DNA, 25 bp, Homo sapien
gggaaatcttgtccagcgatctgct

SEQ ID NO: 4727795 - DNA, 25 bp, Homo sapien
tgtgaatgcccttggtgaattttca

SEQ ID NO: 4727796 - DNA, 25 bp, Homo sapien
caaccttgcattgattttgtgctgc

SEQ ID NO: 4727797 - DNA, 25 bp, Homo sapien
tgtctcttctagaacaaagatgacg

SEQ ID NO: 4727798 - DNA, 25 bp, Homo sapien
cacatcgtatgactctaggtgtcca

SEQ ID NO: 4727799 - DNA, 25 bp, Homo sapien
cgtatgactctaggtgtccatttgc

SEQ ID NO: 4727800 - DNA, 25 bp, Homo sapien
cctgcacatcgtatgactctaggtg

SEQ ID NO: 4727801 - DNA, 25 bp, Homo sapien
ggcctgcacatcgtatgactctagg

SEQ ID NO: 4727802 - DNA, 25 bp, Homo sapien
ctttctgagagtcccctggaaatgc

SEQ ID NO: 4727803 - DNA, 25 bp, Homo sapien
cccaagtctttctgagagtcccctg

SEQ ID NO: 4727804 - DNA, 25 bp, Homo sapien
aactgtttcccaagtctttctgaga

SEQ ID NO: 4727805 - DNA, 25 bp, Homo sapien
ctttcatgcgtccagaaatgttttt

SEQ ID NO: 4727806 - DNA, 25 bp, Homo sapien
cctcccaggaatttgattgtttgca

SEQ ID NO: 4727807 - DNA, 25 bp, Homo sapien
tggatctgtccgagcagagggttaa

SEQ ID NO: 4727808 - DNA, 25 bp, Homo sapien
tgttttacaagagcagctataggga

SEQ ID NO: 4727809 - DNA, 25 bp, Homo sapien
cacaaatggagtaacagtcttagcc

SEQ ID NO: 4727810 - DNA, 25 bp, Homo sapien
tagcactctccttcgagcctcagaa

SEQ ID NO: 4727811 - DNA, 25 bp, Homo sapien
aactattccactagaaggctttggg

SEQ ID NO: 4727812 - DNA, 25 bp, Homo sapien
ggtggccttggttcccagaacctgc

SEQ ID NO: 4727813 - DNA, 25 bp, Homo sapien
gatgcattcaagttcttgccccgtt

SEQ ID NO: 4727814 - DNA, 25 bp, Homo sapien
tgcgtggaaagatatggtccttctc

SEQ ID NO: 4727815 - DNA, 25 bp, Homo sapien
tcttccgggttcagcgctcctttta

SEQ ID NO: 4727816 - DNA, 25 bp, Homo sapien
tccgggctttgtagacagcagctag

SEQ ID NO: 4727817 - DNA, 25 bp, Homo sapien
tcatgaggccacgtatttgagtgcg

SEQ ID NO: 4727818 - DNA, 25 bp, Homo sapien
cactcaggcacagtggacacggcat

SEQ ID NO: 4727819 - DNA, 25 bp, Homo sapien
ccctgttgccagaccgggaggtagc

SEQ ID NO: 4727820 - DNA, 25 bp, Homo sapien
gggaggtagcaaccgtgattccaca

SEQ ID NO: 4727821 - DNA, 25 bp, Homo sapien
cacggcatcagagagattggctgca

SEQ ID NO: 4727822 - DNA, 25 bp, Homo sapien
ctgaatgttttcagacctaaagtct

SEQ ID NO: 4727823 - DNA, 25 bp, Homo sapien
aaatgaatctcctgaatgttttcag

SEQ ID NO: 4727824 - DNA, 25 bp, Homo sapien
cagagcacaaatgaatctcctgaat

SEQ ID NO: 4727825 - DNA, 25 bp, Homo sapien
tcagacctaaagtctcaatcccttt

SEQ ID NO: 4727826 - DNA, 25 bp, Homo sapien
aggagataatgaatttcagtggtac

SEQ ID NO: 4727827 - DNA, 25 bp, Homo sapien
ccccgtccagatgtgtttgtgagca

SEQ ID NO: 4727828 - DNA, 25 bp, Homo sapien
gaagattctccacacgggggcctgt

SEQ ID NO: 4727829 - DNA, 25 bp, Homo sapien
cctttgcctggttctcagaggagga

SEQ ID NO: 4727830 - DNA, 25 bp, Homo sapien
gagacattgctatcaactctctgta

SEQ ID NO: 4727831 - DNA, 25 bp, Homo sapien
taaaagctatcggtaggagttagaa

SEQ ID NO: 4727832 - DNA, 25 bp, Homo sapien
ggtggcctaataagtgagacattgc

SEQ ID NO: 4727833 - DNA, 25 bp, Homo sapien
tcactctgtggatgacatagcctgt

SEQ ID NO: 4727834 - DNA, 25 bp, Homo sapien
ggtacacacttcagatacagacatg

SEQ ID NO: 4727835 - DNA, 25 bp, Homo sapien
gtgacatgcacacaaatgactgagc

SEQ ID NO: 4727836 - DNA, 25 bp, Homo sapien
ttccctcactagagacatgtgctcg

SEQ ID NO: 4727837 - DNA, 25 bp, Homo sapien
catgtgctcggtgtagctcttgata

SEQ ID NO: 4727838 - DNA, 25 bp, Homo sapien
gatgggataactctctggctcccac

SEQ ID NO: 4727839 - DNA, 25 bp, Homo sapien
acaggcttgccacggatggtctggg

SEQ ID NO: 4727840 - DNA, 25 bp, Homo sapien
ctggggatgggataactctctggct

SEQ ID NO: 4727841 - DNA, 25 bp, Homo sapien
ggacaggcttgccacggatggtctg

SEQ ID NO: 4727842 - DNA, 25 bp, Homo sapien
gctttaactctgacaaaattaggcc

SEQ ID NO: 4727843 - DNA, 25 bp, Homo sapien
agtgagaccctgcatggaggcagct

SEQ ID NO: 4727844 - DNA, 25 bp, Homo sapien
tattccagaaatcctttttccacag

SEQ ID NO: 4727845 - DNA, 25 bp, Homo sapien
aatgtaacccgttttcagagtgaga

SEQ ID NO: 4727846 - DNA, 25 bp, Homo sapien
attgtcttccagctcggtagacagt

SEQ ID NO: 4727847 - DNA, 25 bp, Homo sapien
tgtcttccagctcggtagacagtgt

SEQ ID NO: 4727848 - DNA, 25 bp, Homo sapien
tcttccagctcggtagacagtgtgt

SEQ ID NO: 4727849 - DNA, 25 bp, Homo sapien
tcatctatgaagatggccgaattgt

SEQ ID NO: 4727850 - DNA, 25 bp, Homo sapien
gcatcccttaagtgcatttgtattg

SEQ ID NO: 4727851 - DNA, 25 bp, Homo sapien
ctgaggcatcccttaagtgcatttg

SEQ ID NO: 4727852 - DNA, 25 bp, Homo sapien
gaggcatcccttaagtgcatttgta

SEQ ID NO: 4727853 - DNA, 25 bp, Homo sapien
cctgaggcatcccttaagtgcattt

SEQ ID NO: 4727854 - DNA, 25 bp, Homo sapien
aattcaatttgagtgcccttaatat

SEQ ID NO: 4727855 - DNA, 25 bp, Homo sapien
gtccgcctgcgagcaaagcaccttt

SEQ ID NO: 4727856 - DNA, 25 bp, Homo sapien
gctgcctctaccttgtaaaatcggg

SEQ ID NO: 4727857 - DNA, 25 bp, Homo sapien
cttaatatcttgtgggggtgatgca

SEQ ID NO: 4727858 - DNA, 25 bp, Homo sapien
tctgggaaaagcttgtgggccagca

SEQ ID NO: 4727859 - DNA, 25 bp, Homo sapien
ctgggaaaagcttgtgggccagcac

SEQ ID NO: 4727860 - DNA, 25 bp, Homo sapien
ctgggacgttctgggaaaagcttgt

SEQ ID NO: 4727861 - DNA, 25 bp, Homo sapien
cacttctgggacgttctgggaaaag

SEQ ID NO: 4727862 - DNA, 25 bp, Homo sapien
ctcggggctaatgggagattgtctc

SEQ ID NO: 4727863 - DNA, 25 bp, Homo sapien
gtgggtgccagagaactgagctctc

SEQ ID NO: 4727864 - DNA, 25 bp, Homo sapien
gggtgccagagaactgagctctctt

SEQ ID NO: 4727865 - DNA, 25 bp, Homo sapien
gggctaatgggagattgtctctctg

SEQ ID NO: 4727866 - DNA, 25 bp, Homo sapien
ttctcggtcactcttccttgttttg

SEQ ID NO: 4727867 - DNA, 25 bp, Homo sapien
tcttctcggtcactcttccttgttt

SEQ ID NO: 4727868 - DNA, 25 bp, Homo sapien
tctcggtcactcttccttgttttgt

SEQ ID NO: 4727869 - DNA, 25 bp, Homo sapien
tcggtcactcttccttgttttgttg

SEQ ID NO: 4727870 - DNA, 25 bp, Homo sapien
tctgctgcgttgggttaaaaagcat

SEQ ID NO: 4727871 - DNA, 25 bp, Homo sapien
gtctgctgcgttgggttaaaaagca

SEQ ID NO: 4727872 - DNA, 25 bp, Homo sapien
tgtctgctgcgttgggttaaaaagc

SEQ ID NO: 4727873 - DNA, 25 bp, Homo sapien
ctgtctgctgcgttgggttaaaaag

SEQ ID NO: 4727874 - DNA, 25 bp, Homo sapien
tatccctagggtcccatgcttccgg

SEQ ID NO: 4727875 - DNA, 25 bp, Homo sapien
tccagtttggagctgtggtggtcct

SEQ ID NO: 4727876 - DNA, 25 bp, Homo sapien
ctgtgctgagctccttagggtccca

SEQ ID NO: 4727877 - DNA, 25 bp, Homo sapien
cacatcttcgtgctgggtttctctc

SEQ ID NO: 4727878 - DNA, 25 bp, Homo sapien
tctgcaacatgggtggtcctcgtgc

SEQ ID NO: 4727879 - DNA, 25 bp, Homo sapien
catctctgagctatgaacggtttca

SEQ ID NO: 4727880 - DNA, 25 bp, Homo sapien
tggtctccatggactgtcacgctgg

SEQ ID NO: 4727881 - DNA, 25 bp, Homo sapien
gaatggccttgctgacaaaacgtgg

SEQ ID NO: 4727882 - DNA, 25 bp, Homo sapien
tctgagcaaggcaaggacacaatcg

SEQ ID NO: 4727883 - DNA, 25 bp, Homo sapien
caatcgccttcggtgagcatgggct

SEQ ID NO: 4727884 - DNA, 25 bp, Homo sapien
gaacctacattcacatacgggccca

SEQ ID NO: 4727885 - DNA, 25 bp, Homo sapien
cagaacctacattcacatacgggcc

SEQ ID NO: 4727886 - DNA, 25 bp, Homo sapien
tctgttttggtgtccgtgtcctggc

SEQ ID NO: 4727887 - DNA, 25 bp, Homo sapien
gcagggctagaagggaaattacgat

SEQ ID NO: 4727888 - DNA, 25 bp, Homo sapien
tgcactggactaactcctgtgagcc

SEQ ID NO: 4727889 - DNA, 25 bp, Homo sapien
taggcaccaaggactgaagatgaag

SEQ ID NO: 4727890 - DNA, 25 bp, Homo sapien
ctttcctgagtgaagataatagaaa

SEQ ID NO: 4727891 - DNA, 25 bp, Homo sapien
tgttattggaactagccttggatgg

SEQ ID NO: 4727892 - DNA, 25 bp, Homo sapien
ccttggatggatttacggtaatgaa

SEQ ID NO: 4727893 - DNA, 25 bp, Homo sapien
tgaactcatctaacagcaaacccgt

SEQ ID NO: 4727894 - DNA, 25 bp, Homo sapien
tcagggcctgccaacttcagcactt

SEQ ID NO: 4727895 - DNA, 25 bp, Homo sapien
tttcctctcccgtttcccttcatga

SEQ ID NO: 4727896 - DNA, 25 bp, Homo sapien
cacctggttccagctcagctcactt

SEQ ID NO: 4727897 - DNA, 25 bp, Homo sapien
gcttaacgggcctttgaggcaggat

SEQ ID NO: 4727898 - DNA, 25 bp, Homo sapien
gtgctggtccttagatcttgcccac

SEQ ID NO: 4727899 - DNA, 25 bp, Homo sapien
ctctccttatctcttgtgagaaaga

SEQ ID NO: 4727900 - DNA, 25 bp, Homo sapien
ccctggtgagggacattagtgatgt

SEQ ID NO: 4727901 - DNA, 25 bp, Homo sapien
taagcagtccaatttccagggtccc

SEQ ID NO: 4727902 - DNA, 25 bp, Homo sapien
tttcagtgtgacgtctaattgctgc

SEQ ID NO: 4727903 - DNA, 25 bp, Homo sapien
aatagtcattgtgcacatttgggcc

SEQ ID NO: 4727904 - DNA, 25 bp, Homo sapien
cacatttgggccttgttcatagctc

SEQ ID NO: 4727905 - DNA, 25 bp, Homo sapien
aggagcgatggtattgattccggac

SEQ ID NO: 4727906 - DNA, 25 bp, Homo sapien
gggggccgtgcccataggggcctgc

SEQ ID NO: 4727907 - DNA, 25 bp, Homo sapien
tcagtgtgtgtgagaagctccacag

SEQ ID NO: 4727908 - DNA, 25 bp, Homo sapien
gccgtgcccataggggcctgcttct

SEQ ID NO: 4727909 - DNA, 25 bp, Homo sapien
ttcagtgtgtgtgagaagctccaca

SEQ ID NO: 4727910 - DNA, 25 bp, Homo sapien
gtattaaggaaacatcgtggacatt

SEQ ID NO: 4727911 - DNA, 25 bp, Homo sapien
tcgtggacattctccgagtgctgct

SEQ ID NO: 4727912 - DNA, 25 bp, Homo sapien
taaggaaacatcgtggacattctcc

SEQ ID NO: 4727913 - DNA, 25 bp, Homo sapien
aagaactaccaaagcagctcagaaa

SEQ ID NO: 4727914 - DNA, 25 bp, Homo sapien
agtgcctgggagtctatgtttccag

SEQ ID NO: 4727915 - DNA, 25 bp, Homo sapien
tctagtgcctgggagtctatgtttc

SEQ ID NO: 4727916 - DNA, 25 bp, Homo sapien
cttctagtgcctgggagtctatgtt

SEQ ID NO: 4727917 - DNA, 25 bp, Homo sapien
tagtgcctgggagtctatgtttcca

SEQ ID NO: 4727918 - DNA, 25 bp, Homo sapien
gccgaagccaaggaaaatatgcggg

SEQ ID NO: 4727919 - DNA, 25 bp, Homo sapien
ccggtgcttgttgcaatgcagctgc

SEQ ID NO: 4727920 - DNA, 25 bp, Homo sapien
tgatgtcaactgcttgcgccgaagc

SEQ ID NO: 4727921 - DNA, 25 bp, Homo sapien
ggcttcatcccggtgcttgttgcaa

SEQ ID NO: 4727922 - DNA, 25 bp, Homo sapien
tgaaaacttctagccatggagacac

SEQ ID NO: 4727923 - DNA, 25 bp, Homo sapien
ttctgaaaacttctagccatggaga

SEQ ID NO: 4727924 - DNA, 25 bp, Homo sapien
gaaaacttctagccatggagacaca

SEQ ID NO: 4727925 - DNA, 25 bp, Homo sapien
tctgaaaacttctagccatggagac

SEQ ID NO: 4727926 - DNA, 25 bp, Homo sapien
attgctccagccaagtgaagtttgg

SEQ ID NO: 4727927 - DNA, 25 bp, Homo sapien
cctctgtaaattgctccagccaagt

SEQ ID NO: 4727928 - DNA, 25 bp, Homo sapien
tgtgacaacatgatgggatgcaggg

SEQ ID NO: 4727929 - DNA, 25 bp, Homo sapien
aagtagggtgtgacaacatgatggg

SEQ ID NO: 4727930 - DNA, 25 bp, Homo sapien
tagttgcctggaagagcttgttaca

SEQ ID NO: 4727931 - DNA, 25 bp, Homo sapien
tacaagccaaatagaaggagctgtc

SEQ ID NO: 4727932 - DNA, 25 bp, Homo sapien
tcatcctgttgatggtttccaggga

SEQ ID NO: 4727933 - DNA, 25 bp, Homo sapien
gaagaccctgtctggtgattagttg

SEQ ID NO: 4727934 - DNA, 25 bp, Homo sapien
aatccatcctctctcaatgtgggga

SEQ ID NO: 4727935 - DNA, 25 bp, Homo sapien
ttcctgcaatcctgatgggctacgg

SEQ ID NO: 4727936 - DNA, 25 bp, Homo sapien
tgcaatcctgatgggctacgggtcc

SEQ ID NO: 4727937 - DNA, 25 bp, Homo sapien
cctgatgggctacgggtcctccagg

SEQ ID NO: 4727938 - DNA, 25 bp, Homo sapien
ttccccggcttttgccggagtctga

SEQ ID NO: 4727939 - DNA, 25 bp, Homo sapien
gcttttgccggagtctgaactacca

SEQ ID NO: 4727940 - DNA, 25 bp, Homo sapien
cggcttttgccggagtctgaactac

SEQ ID NO: 4727941 - DNA, 25 bp, Homo sapien
ttgccggagtctgaactaccagttg

SEQ ID NO: 4727942 - DNA, 25 bp, Homo sapien
cattttgaagagctggcgccgtgct

SEQ ID NO: 4727943 - DNA, 25 bp, Homo sapien
tgagccatgctcgaattagcaccgt

SEQ ID NO: 4727944 - DNA, 25 bp, Homo sapien
ccactgattggtctggctgaaaaac

SEQ ID NO: 4727945 - DNA, 25 bp, Homo sapien
tagcaccgtcgtggtaacaagcaga

SEQ ID NO: 4727946 - DNA, 25 bp, Homo sapien
ccctggcgttccgtgtgtagcttct

SEQ ID NO: 4727947 - DNA, 25 bp, Homo sapien
caacacaggagacttggatgagcct

SEQ ID NO: 4727948 - DNA, 25 bp, Homo sapien
tgtagcagccatctgctacagatgc

SEQ ID NO: 4727949 - DNA, 25 bp, Homo sapien
ttcattgagtggctccttccctggc

SEQ ID NO: 4727950 - DNA, 25 bp, Homo sapien
ttccggaaggttacagaatgagtgt

SEQ ID NO: 4727951 - DNA, 25 bp, Homo sapien
ccggaaggttacagaatgagtgtgt

SEQ ID NO: 4727952 - DNA, 25 bp, Homo sapien
gttgagagtaacttgcagcaaagaa

SEQ ID NO: 4727953 - DNA, 25 bp, Homo sapien
cagaatgagtgtgttgagagtaact

SEQ ID NO: 4727954 - DNA, 25 bp, Homo sapien
gggggcggctgtgcggctccgacgc

SEQ ID NO: 4727955 - DNA, 25 bp, Homo sapien
cgccgcgagccagccacgagacagg

SEQ ID NO: 4727956 - DNA, 25 bp, Homo sapien
gcaagcgccgcgagccagccacgag

SEQ ID NO: 4727957 - DNA, 25 bp, Homo sapien
cagggggcggctgtgcggctccgac

SEQ ID NO: 4727958 - DNA, 25 bp, Homo sapien
taacaatgtccccggctttgaacca

SEQ ID NO: 4727959 - DNA, 25 bp, Homo sapien
caatgtccccggctttgaaccaaag

SEQ ID NO: 4727960 - DNA, 25 bp, Homo sapien
tggaagaataacgttgtctttaaca

SEQ ID NO: 4727961 - DNA, 25 bp, Homo sapien
cggctttgaaccaaagtgcatttgt

SEQ ID NO: 4727962 - DNA, 25 bp, Homo sapien
ttttcagtgggcaaacagggtaata

SEQ ID NO: 4727963 - DNA, 25 bp, Homo sapien
tgttggtaacagtcctaatcttctt

SEQ ID NO: 4727964 - DNA, 25 bp, Homo sapien
tgggcaaacagggtaataatgcttt

SEQ ID NO: 4727965 - DNA, 25 bp, Homo sapien
tgggaagtagctttgttggtaacag

SEQ ID NO: 4727966 - DNA, 25 bp, Homo sapien
cacatcaacctgatctgatgaactg

SEQ ID NO: 4727967 - DNA, 25 bp, Homo sapien
catcgaggccattgaaagacacatc

SEQ ID NO: 4727968 - DNA, 25 bp, Homo sapien
gatgaactggaaaatcaatagatac

SEQ ID NO: 4727969 - DNA, 25 bp, Homo sapien
tttccaaacaagatgacatgccttt

SEQ ID NO: 4727970 - DNA, 25 bp, Homo sapien
caccatcagtgccactctgggtggc

SEQ ID NO: 4727971 - DNA, 25 bp, Homo sapien
gcaccatcagtgccactctgggtgg

SEQ ID NO: 4727972 - DNA, 25 bp, Homo sapien
ggcaccatcagtgccactctgggtg

SEQ ID NO: 4727973 - DNA, 25 bp, Homo sapien
tgactcccagaggaaatttcccaag

SEQ ID NO: 4727974 - DNA, 25 bp, Homo sapien
acaatagagcaacagaatgactccc

SEQ ID NO: 4727975 - DNA, 25 bp, Homo sapien
gaacaatagagcaacagaatgactc

SEQ ID NO: 4727976 - DNA, 25 bp, Homo sapien
agaatgactcccagaggaaatttcc

SEQ ID NO: 4727977 - DNA, 25 bp, Homo sapien
gaaggcgatggctggagtgctattc

SEQ ID NO: 4727978 - DNA, 25 bp, Homo sapien
ggaaggcgatggctggagtgctatt

SEQ ID NO: 4727979 - DNA, 25 bp, Homo sapien
gatgggttctgttgagcagaatcag

SEQ ID NO: 4727980 - DNA, 25 bp, Homo sapien
tgagggtctaggttcacagccggtc

SEQ ID NO: 4727981 - DNA, 25 bp, Homo sapien
gcttgcctgtcctcccgtgtctttt

SEQ ID NO: 4727982 - DNA, 25 bp, Homo sapien
gaatgaggtggctgacgattgccca

SEQ ID NO: 4727983 - DNA, 25 bp, Homo sapien
aaggaaccagcccagacgtgtcagc

SEQ ID NO: 4727984 - DNA, 25 bp, Homo sapien
tactaaatctggtactgctagctgc

SEQ ID NO: 4727985 - DNA, 25 bp, Homo sapien
gagtccctttggacacattgaccca

SEQ ID NO: 4727986 - DNA, 25 bp, Homo sapien
tattgatcttactggaaaatgggca

SEQ ID NO: 4727987 - DNA, 25 bp, Homo sapien
caatagatgaatgttgctggagtga

SEQ ID NO: 4727988 - DNA, 25 bp, Homo sapien
accatatctccacggctgttcgtat

SEQ ID NO: 4727989 - DNA, 25 bp, Homo sapien
aaacctagcaccacaggaccatatc

SEQ ID NO: 4727990 - DNA, 25 bp, Homo sapien
ggtactaaatctagcgtttcctggc

SEQ ID NO: 4727991 - DNA, 25 bp, Homo sapien
tagtgcatccccttccgcattagtg

SEQ ID NO: 4727992 - DNA, 25 bp, Homo sapien
ctcctgtttgttagtgcatcccctt

SEQ ID NO: 4727993 - DNA, 25 bp, Homo sapien
tccgcattagtgcagccatttgcca

SEQ ID NO: 4727994 - DNA, 25 bp, Homo sapien
tttgccattaacgtggctctgtgct

SEQ ID NO: 4727995 - DNA, 25 bp, Homo sapien
gacaaaataggagactgtagattcg

SEQ ID NO: 4727996 - DNA, 25 bp, Homo sapien
aagttttaatcaacacaagcagctg

SEQ ID NO: 4727997 - DNA, 25 bp, Homo sapien
gtagattcggctgtacattatgtat

SEQ ID NO: 4727998 - DNA, 25 bp, Homo sapien
gttttaatcaacacaagcagctgac

SEQ ID NO: 4727999 - DNA, 25 bp, Homo sapien
catgttatggagaatgctgtcagca

SEQ ID NO: 4728000 - DNA, 25 bp, Homo sapien
gtgcctttctgctaagacagcgagc

SEQ ID NO: 4728001 - DNA, 25 bp, Homo sapien
ggcaatgtagcaaacggaggtcccg

SEQ ID NO: 4728002 - DNA, 25 bp, Homo sapien
gtcgcagctgctgtggtgcctttct

SEQ ID NO: 4728003 - DNA, 25 bp, Homo sapien
agcattttccacccttccctgttgg

SEQ ID NO: 4728004 - DNA, 25 bp, Homo sapien
ccatgcacagtgcagcattttccac

SEQ ID NO: 4728005 - DNA, 25 bp, Homo sapien
cacccttccctgttggggatggttg

SEQ ID NO: 4728006 - DNA, 25 bp, Homo sapien
cctgttggggatggttgcatcctct

SEQ ID NO: 4728007 - DNA, 25 bp, Homo sapien
ttgttctctgaaaacgagccatctc

SEQ ID NO: 4728008 - DNA, 25 bp, Homo sapien
tcaaggaacacctatcttcttccct

SEQ ID NO: 4728009 - DNA, 25 bp, Homo sapien
aacgagccatctcgcgtctagctgg

SEQ ID NO: 4728010 - DNA, 25 bp, Homo sapien
agtagatgttcaaggaacacctatc

SEQ ID NO: 4728011 - DNA, 25 bp, Homo sapien
tcccaaagctacgaggatgcgatgg

SEQ ID NO: 4728012 - DNA, 25 bp, Homo sapien
gataaattgacccttgcttcccatg

SEQ ID NO: 4728013 - DNA, 25 bp, Homo sapien
tctcaaacatgggaccgccttcagt

SEQ ID NO: 4728014 - DNA, 25 bp, Homo sapien
gtagagccagtaccgacaatcacca

SEQ ID NO: 4728015 - DNA, 25 bp, Homo sapien
aaaagtccagaaccagacagattca

SEQ ID NO: 4728016 - DNA, 25 bp, Homo sapien
ccaaaaaaagtccagaaccagacag

SEQ ID NO: 4728017 - DNA, 25 bp, Homo sapien
caaaaaaagtccagaaccagacaga

SEQ ID NO: 4728018 - DNA, 25 bp, Homo sapien
aaaaaagtccagaaccagacagatt

SEQ ID NO: 4728019 - DNA, 25 bp, Homo sapien
ctctcatacttcctacctgctcacc

SEQ ID NO: 4728020 - DNA, 25 bp, Homo sapien
tctctcatacttcctacctgctcac

SEQ ID NO: 4728021 - DNA, 25 bp, Homo sapien
gtggtacttgtggtccaacacaccg

SEQ ID NO: 4728022 - DNA, 25 bp, Homo sapien
caacacaccgttgtgtacacatatg

SEQ ID NO: 4728023 - DNA, 25 bp, Homo sapien
gtaggtgttagttctgtgtgtttca

SEQ ID NO: 4728024 - DNA, 25 bp, Homo sapien
cttgcaacaactgctgccactaggt

SEQ ID NO: 4728025 - DNA, 25 bp, Homo sapien
gtctactgaagttataggactccat

SEQ ID NO: 4728026 - DNA, 25 bp, Homo sapien
cgtctactgaagttataggactcca

SEQ ID NO: 4728027 - DNA, 25 bp, Homo sapien
aagccaacttggagcatatgtggac

SEQ ID NO: 4728028 - DNA, 25 bp, Homo sapien
tgcttcttgaaaaagccaacttgga

SEQ ID NO: 4728029 - DNA, 25 bp, Homo sapien
tcctgcttcttgaaaaagccaactt

SEQ ID NO: 4728030 - DNA, 25 bp, Homo sapien
gagcatatgtggacaagctccagaa

SEQ ID NO: 4728031 - DNA, 25 bp, Homo sapien
gctcccatagagctgcctaaaggag

SEQ ID NO: 4728032 - DNA, 25 bp, Homo sapien
tcctctatggctcccatagagctgc

SEQ ID NO: 4728033 - DNA, 25 bp, Homo sapien
tctccttcccgtccttcctctatgg

SEQ ID NO: 4728034 - DNA, 25 bp, Homo sapien
ttagagcgtcagtgggcaccaggtg

SEQ ID NO: 4728035 - DNA, 25 bp, Homo sapien
caggacagtgagcatccccagagtg

SEQ ID NO: 4728036 - DNA, 25 bp, Homo sapien
aggacagtgagcatccccagagtgc

SEQ ID NO: 4728037 - DNA, 25 bp, Homo sapien
caggctgccatctgttatgtgccca

SEQ ID NO: 4728038 - DNA, 25 bp, Homo sapien
catctgttatgtgcccagaggagat

SEQ ID NO: 4728039 - DNA, 25 bp, Homo sapien
gttccagctggccttcctcaaaaga

SEQ ID NO: 4728040 - DNA, 25 bp, Homo sapien
ttccagctggccttcctcaaaagat

SEQ ID NO: 4728041 - DNA, 25 bp, Homo sapien
tccagctggccttcctcaaaagata

SEQ ID NO: 4728042 - DNA, 25 bp, Homo sapien
aggttccagctggccttcctcaaaa

SEQ ID NO: 4728043 - DNA, 25 bp, Homo sapien
cagctgtggtgtgctttcagctgca

SEQ ID NO: 4728044 - DNA, 25 bp, Homo sapien
agctgtggtgtgctttcagctgcac

SEQ ID NO: 4728045 - DNA, 25 bp, Homo sapien
agcttctgcgcctgtgcaccgggac

SEQ ID NO: 4728046 - DNA, 25 bp, Homo sapien
tgcacaagcttctgcgcctgtgcac

SEQ ID NO: 4728047 - DNA, 25 bp, Homo sapien
cctgtgcaccgggacccgtactcat

SEQ ID NO: 4728048 - DNA, 25 bp, Homo sapien
agatgcggcccaagactgcttcctg

SEQ ID NO: 4728049 - DNA, 25 bp, Homo sapien
tttctgatgtcctaatttcttgatc

SEQ ID NO: 4728050 - DNA, 25 bp, Homo sapien
ctagactttccgtaatttttctgat

SEQ ID NO: 4728051 - DNA, 25 bp, Homo sapien
tctgatgtcctaatttcttgatcac

SEQ ID NO: 4728052 - DNA, 25 bp, Homo sapien
tccgtaatttttctgatgtcctaat

SEQ ID NO: 4728053 - DNA, 25 bp, Homo sapien
caagatcctgatttccttcaatatg

SEQ ID NO: 4728054 - DNA, 25 bp, Homo sapien
tgtctgcttcggcatatgtccccat

SEQ ID NO: 4728055 - DNA, 25 bp, Homo sapien
gggaaatttatgtctgcttcggcat

SEQ ID NO: 4728056 - DNA, 25 bp, Homo sapien
tgacaagatcctgatttccttcaat

SEQ ID NO: 4728057 - DNA, 25 bp, Homo sapien
gaaaggtcataggaaattggtcctg

SEQ ID NO: 4728058 - DNA, 25 bp, Homo sapien
gataggcactttacctgaaaggtca

SEQ ID NO: 4728059 - DNA, 25 bp, Homo sapien
cactgagggatagagtcaggtgtgc

SEQ ID NO: 4728060 - DNA, 25 bp, Homo sapien
ctctgtcctgagaagtagaacactg

SEQ ID NO: 4728061 - DNA, 25 bp, Homo sapien
tcccagggttctagaactctttgct

SEQ ID NO: 4728062 - DNA, 25 bp, Homo sapien
ttaatggcttcgtgtggttgcctgg

SEQ ID NO: 4728063 - DNA, 25 bp, Homo sapien
ggcacaatctgtttcccagggttct

SEQ ID NO: 4728064 - DNA, 25 bp, Homo sapien
agttttggctcctcttaatggcttc

SEQ ID NO: 4728065 - DNA, 25 bp, Homo sapien
ggtttctgccagtgcacctgctgtg

SEQ ID NO: 4728066 - DNA, 25 bp, Homo sapien
gcgtttcacagcctcaggatgttta

SEQ ID NO: 4728067 - DNA, 25 bp, Homo sapien
tgttctcggatagggaaggttttgc

SEQ ID NO: 4728068 - DNA, 25 bp, Homo sapien
tactttctgttctcggatagggaag

SEQ ID NO: 4728069 - DNA, 25 bp, Homo sapien
gccagtctgtggaaaggctccttct

SEQ ID NO: 4728070 - DNA, 25 bp, Homo sapien
ggtcaatgctgtatgtccggctgga

SEQ ID NO: 4728071 - DNA, 25 bp, Homo sapien
aaatattgcccgctggcttcacgtg

SEQ ID NO: 4728072 - DNA, 25 bp, Homo sapien
tggatactagtctgctcaggatggg

SEQ ID NO: 4728073 - DNA, 25 bp, Homo sapien
tggctgctgtagttcagggactcag

SEQ ID NO: 4728074 - DNA, 25 bp, Homo sapien
ctcttcatgccactggctgctgtag

SEQ ID NO: 4728075 - DNA, 25 bp, Homo sapien
tcatgccactggctgctgtagttca

SEQ ID NO: 4728076 - DNA, 25 bp, Homo sapien
ttcagggactcaggggctgtcacct

SEQ ID NO: 4728077 - DNA, 25 bp, Homo sapien
gacatccgtcatctagggcagcagc

SEQ ID NO: 4728078 - DNA, 25 bp, Homo sapien
tcatggaagttagggtccccaggcc

SEQ ID NO: 4728079 - DNA, 25 bp, Homo sapien
tccgtaattcgtccatgcagttgct

SEQ ID NO: 4728080 - DNA, 25 bp, Homo sapien
ctccatgggacaaggtgctcagctt

SEQ ID NO: 4728081 - DNA, 25 bp, Homo sapien
tgtaataaagtccccagcagcagaa

SEQ ID NO: 4728082 - DNA, 25 bp, Homo sapien
cagcagcagaactcaaattgagtta

SEQ ID NO: 4728083 - DNA, 25 bp, Homo sapien
gcagcagaactcaaattgagttata

SEQ ID NO: 4728084 - DNA, 25 bp, Homo sapien
cagcagaactcaaattgagttatac

SEQ ID NO: 4728085 - DNA, 25 bp, Homo sapien
gaaaaccagagtgccatatggagga

SEQ ID NO: 4728086 - DNA, 25 bp, Homo sapien
catgttaaggcttccacaagaagga

SEQ ID NO: 4728087 - DNA, 25 bp, Homo sapien
cgaaataaatcagcgcgccgagtgg

SEQ ID NO: 4728088 - DNA, 25 bp, Homo sapien
cagtcattattccagggcgaatgca

SEQ ID NO: 4728089 - DNA, 25 bp, Homo sapien
gccaggagcctggggcgggtcgtgg

SEQ ID NO: 4728090 - DNA, 25 bp, Homo sapien
gcagggccaggagcctggggcgggt

SEQ ID NO: 4728091 - DNA, 25 bp, Homo sapien
agggccaggagcctggggcgggtcg

SEQ ID NO: 4728092 - DNA, 25 bp, Homo sapien
ctgtgcagggccaggagcctggggc

SEQ ID NO: 4728093 - DNA, 25 bp, Homo sapien
aaatcgctcagagtgcttaaaatct

SEQ ID NO: 4728094 - DNA, 25 bp, Homo sapien
cagagtgcttaaaatctggggcaca

SEQ ID NO: 4728095 - DNA, 25 bp, Homo sapien
agagtgcttaaaatctggggcacac

SEQ ID NO: 4728096 - DNA, 25 bp, Homo sapien
tcgctcagagtgcttaaaatctggg

SEQ ID NO: 4728097 - DNA, 25 bp, Homo sapien
ggcctgcacactgactcatataaat

SEQ ID NO: 4728098 - DNA, 25 bp, Homo sapien
gctcgggcctgcacactgactcata

SEQ ID NO: 4728099 - DNA, 25 bp, Homo sapien
gcacactgactcatataaataactc

SEQ ID NO: 4728100 - DNA, 25 bp, Homo sapien
ctggaaggctcgggcctgcacactg

SEQ ID NO: 4728101 - DNA, 25 bp, Homo sapien
tgcccaaatacaacccgtcttggga

SEQ ID NO: 4728102 - DNA, 25 bp, Homo sapien
tcttcacggaggcctcaaagagctt

SEQ ID NO: 4728103 - DNA, 25 bp, Homo sapien
ttcacggaggcctcaaagagcttca

SEQ ID NO: 4728104 - DNA, 25 bp, Homo sapien
ctttgcccaaatacaacccgtcttg

SEQ ID NO: 4728105 - DNA, 25 bp, Homo sapien
gagggaagaccaatacttattttca

SEQ ID NO: 4728106 - DNA, 25 bp, Homo sapien
gggaagaccaatacttattttcatc

SEQ ID NO: 4728107 - DNA, 25 bp, Homo sapien
gctgagggaagaccaatacttattt

SEQ ID NO: 4728108 - DNA, 25 bp, Homo sapien
ctgctgagggaagaccaatacttat

SEQ ID NO: 4728109 - DNA, 25 bp, Homo sapien
gatgttcccatccttgagcaattct

SEQ ID NO: 4728110 - DNA, 25 bp, Homo sapien
caattctgctctgttcgtggcggga

SEQ ID NO: 4728111 - DNA, 25 bp, Homo sapien
ttcagcccctagacttgctactggc

SEQ ID NO: 4728112 - DNA, 25 bp, Homo sapien
gcctgagatggccagtcgatgtccc

SEQ ID NO: 4728113 - DNA, 25 bp, Homo sapien
ttgtgttgctagtctccctgggcca

SEQ ID NO: 4728114 - DNA, 25 bp, Homo sapien
gtgttgctagtctccctgggccaca

SEQ ID NO: 4728115 - DNA, 25 bp, Homo sapien
acacttctgtttcgggagagagttt

SEQ ID NO: 4728116 - DNA, 25 bp, Homo sapien
gtttcgggagagagtttttgcactg

SEQ ID NO: 4728117 - DNA, 25 bp, Homo sapien
tgaatttgagccaagagttctgttg

SEQ ID NO: 4728118 - DNA, 25 bp, Homo sapien
ctgaaaagtgaatttgagccaagag

SEQ ID NO: 4728119 - DNA, 25 bp, Homo sapien
aaaagtgaatttgagccaagagttc

SEQ ID NO: 4728120 - DNA, 25 bp, Homo sapien
agtgaatttgagccaagagttctgt

SEQ ID NO: 4728121 - DNA, 25 bp, Homo sapien
cttccagcctctacaagcaggttgt

SEQ ID NO: 4728122 - DNA, 25 bp, Homo sapien
tccagcctctacaagcaggttgttt

SEQ ID NO: 4728123 - DNA, 25 bp, Homo sapien
cagcctctacaagcaggttgtttgc

SEQ ID NO: 4728124 - DNA, 25 bp, Homo sapien
gcctctacaagcaggttgtttgccc

SEQ ID NO: 4728125 - DNA, 25 bp, Homo sapien
gtccccgctctgcagtggagctgac

SEQ ID NO: 4728126 - DNA, 25 bp, Homo sapien
agtccccgctctgcagtggagctga

SEQ ID NO: 4728127 - DNA, 25 bp, Homo sapien
tatcaagaggcctaatttacccagg

SEQ ID NO: 4728128 - DNA, 25 bp, Homo sapien
aaactgctgagagtgtagaaccgtg

SEQ ID NO: 4728129 - DNA, 25 bp, Homo sapien
tagaaccgtgtattgtgagtgtccc

SEQ ID NO: 4728130 - DNA, 25 bp, Homo sapien
gggacagcgggatccaataaatctg

SEQ ID NO: 4728131 - DNA, 25 bp, Homo sapien
taacacgtagcctcagaaccataac

SEQ ID NO: 4728132 - DNA, 25 bp, Homo sapien
agaaccataacatagtgttcttggg

SEQ ID NO: 4728133 - DNA, 25 bp, Homo sapien
gtagcctcagaaccataacatagtg

SEQ ID NO: 4728134 - DNA, 25 bp, Homo sapien
tgtgtcagcatgctaacacgtagcc

SEQ ID NO: 4728135 - DNA, 25 bp, Homo sapien
aacttgtacaaagaactgatttcaa

SEQ ID NO: 4728136 - DNA, 25 bp, Homo sapien
ggaggccacatgcttagctgaagct

SEQ ID NO: 4728137 - DNA, 25 bp, Homo sapien
agagggaccgaggagctgtggagga

SEQ ID NO: 4728138 - DNA, 25 bp, Homo sapien
tttgcaaaagcggacaaccagcatc

SEQ ID NO: 4728139 - DNA, 25 bp, Homo sapien
cgttctaagagcctgcaaacatctc

SEQ ID NO: 4728140 - DNA, 25 bp, Homo sapien
gcatctcgttctaagagcctgcaaa

SEQ ID NO: 4728141 - DNA, 25 bp, Homo sapien
tcagaagcatctcgttctaagagcc

SEQ ID NO: 4728142 - DNA, 25 bp, Homo sapien
tccaccacgatcagaagcatctcgt

SEQ ID NO: 4728143 - DNA, 25 bp, Homo sapien
ccggaatgatgtggtgaattgttcc

SEQ ID NO: 4728144 - DNA, 25 bp, Homo sapien
tggtgaattgttccgcccctcaatc

SEQ ID NO: 4728145 - DNA, 25 bp, Homo sapien
caatgctgggatcctcccagattca

SEQ ID NO: 4728146 - DNA, 25 bp, Homo sapien
tgatgtggtgaattgttccgcccct

SEQ ID NO: 4728147 - DNA, 25 bp, Homo sapien
caggccaggtttcaggttccataac

SEQ ID NO: 4728148 - DNA, 25 bp, Homo sapien
tggtgaccgcaagccagtctgacat

SEQ ID NO: 4728149 - DNA, 25 bp, Homo sapien
gaaggcgctgcttaattgcattagg

SEQ ID NO: 4728150 - DNA, 25 bp, Homo sapien
aaaacgtactcctctccgtgctgtg

SEQ ID NO: 4728151 - DNA, 25 bp, Homo sapien
tattctttgtgacccatgactgctc

SEQ ID NO: 4728152 - DNA, 25 bp, Homo sapien
tggacgaggtctctgtcaacgcagc

SEQ ID NO: 4728153 - DNA, 25 bp, Homo sapien
gtattattgatcagtcccaggaggg

SEQ ID NO: 4728154 - DNA, 25 bp, Homo sapien
gaggaccgctggctttccgtagtat

SEQ ID NO: 4728155 - DNA, 25 bp, Homo sapien
agttcctggacttttccacaggttg

SEQ ID NO: 4728156 - DNA, 25 bp, Homo sapien
tcctggacttttccacaggttgtca

SEQ ID NO: 4728157 - DNA, 25 bp, Homo sapien
tcagttcctggacttttccacaggt

SEQ ID NO: 4728158 - DNA, 25 bp, Homo sapien
cctcagttcctggacttttccacag

SEQ ID NO: 4728159 - DNA, 25 bp, Homo sapien
tggcctgtgtgtcgttcaccagcgc

SEQ ID NO: 4728160 - DNA, 25 bp, Homo sapien
ggcctgtgtgtcgttcaccagcgcc

SEQ ID NO: 4728161 - DNA, 25 bp, Homo sapien
ccttacaaggtctccggatggctga

SEQ ID NO: 4728162 - DNA, 25 bp, Homo sapien
caaggtctccggatggctgagcaga

SEQ ID NO: 4728163 - DNA, 25 bp, Homo sapien
agtggtccttacaaggtctccggat

SEQ ID NO: 4728164 - DNA, 25 bp, Homo sapien
tccggatggctgagcagacagaacg

SEQ ID NO: 4728165 - DNA, 25 bp, Homo sapien
gaatgagcaagaatcaggaaacctg

SEQ ID NO: 4728166 - DNA, 25 bp, Homo sapien
tgaagagtgccattagtgtgaaagg

SEQ ID NO: 4728167 - DNA, 25 bp, Homo sapien
ggaaacctgtcagagactactgcaa

SEQ ID NO: 4728168 - DNA, 25 bp, Homo sapien
ctgcaatgatccaaccaagacgtga

SEQ ID NO: 4728169 - DNA, 25 bp, Homo sapien
gtactggtgttcaggtgatgtggcc

SEQ ID NO: 4728170 - DNA, 25 bp, Homo sapien
gtgtactggtgttcaggtgatgtgg

SEQ ID NO: 4728171 - DNA, 25 bp, Homo sapien
tactggtgttcaggtgatgtggcca

SEQ ID NO: 4728172 - DNA, 25 bp, Homo sapien
actggtgttcaggtgatgtggccat

SEQ ID NO: 4728173 - DNA, 25 bp, Homo sapien
tggctaaatgttcgtctgccagaaa

SEQ ID NO: 4728174 - DNA, 25 bp, Homo sapien
atctaacacggccactcccaaatta

SEQ ID NO: 4728175 - DNA, 25 bp, Homo sapien
actcccaaattactggctaaatgtt

SEQ ID NO: 4728176 - DNA, 25 bp, Homo sapien
tacagccaaacatctaacacggcca

SEQ ID NO: 4728177 - DNA, 25 bp, Homo sapien
tcagatgacaccacttctcttttta

SEQ ID NO: 4728178 - DNA, 25 bp, Homo sapien
cagatgacaccacttctctttttac

SEQ ID NO: 4728179 - DNA, 25 bp, Homo sapien
ctctccctggtgtttaactggttgg

SEQ ID NO: 4728180 - DNA, 25 bp, Homo sapien
tgaacaggagaaaggtttctttgaa

SEQ ID NO: 4728181 - DNA, 25 bp, Homo sapien
gatgtgctcttgacttctgaacagg

SEQ ID NO: 4728182 - DNA, 25 bp, Homo sapien
caggaggggttttcgcatgggcctc

SEQ ID NO: 4728183 - DNA, 25 bp, Homo sapien
agaggcacaatgttcccagagagcc

SEQ ID NO: 4728184 - DNA, 25 bp, Homo sapien
tcagaggcacaatgttcccagagag

SEQ ID NO: 4728185 - DNA, 25 bp, Homo sapien
gatcagaggcacaatgttcccagag

SEQ ID NO: 4728186 - DNA, 25 bp, Homo sapien
aggcacaatgttcccagagagcctt

SEQ ID NO: 4728187 - DNA, 25 bp, Homo sapien
gaagatggctttggattttccctgg

SEQ ID NO: 4728188 - DNA, 25 bp, Homo sapien
ccctggaaacgcatctattaaatga

SEQ ID NO: 4728189 - DNA, 25 bp, Homo sapien
acagaatggttctggtagtggtgca

SEQ ID NO: 4728190 - DNA, 25 bp, Homo sapien
tgtccccaggagcaaaaagaagatg

SEQ ID NO: 4728191 - DNA, 25 bp, Homo sapien
gaaggctcgacccttctcatcccac

SEQ ID NO: 4728192 - DNA, 25 bp, Homo sapien
tcctgatgtcaaaggctccagggcc

SEQ ID NO: 4728193 - DNA, 25 bp, Homo sapien
cacaacccagctgttcctgatgtca

SEQ ID NO: 4728194 - DNA, 25 bp, Homo sapien
ccagaaggctcgacccttctcatcc

SEQ ID NO: 4728195 - DNA, 25 bp, Homo sapien
tttgtagccccaccatgtagatgag

SEQ ID NO: 4728196 - DNA, 25 bp, Homo sapien
ctttgtagccccaccatgtagatga

SEQ ID NO: 4728197 - DNA, 25 bp, Homo sapien
cttctctgcaagattgatggctcgt

SEQ ID NO: 4728198 - DNA, 25 bp, Homo sapien
cattagccagcattacgggccgcat

SEQ ID NO: 4728199 - DNA, 25 bp, Homo sapien
tgatggctcgtcaataacattagcc

SEQ ID NO: 4728200 - DNA, 25 bp, Homo sapien
tcaataacattagccagcattacgg

SEQ ID NO: 4728201 - DNA, 25 bp, Homo sapien
gccctccgcactgtgatctgtcaat

SEQ ID NO: 4728202 - DNA, 25 bp, Homo sapien
taatgtattttcagccctccgcact

SEQ ID NO: 4728203 - DNA, 25 bp, Homo sapien
tatagttcgattggaattgtaatgt

SEQ ID NO: 4728204 - DNA, 25 bp, Homo sapien
ctgtcaatttttatggcgtctttta

SEQ ID NO: 4728205 - DNA, 25 bp, Homo sapien
tgcagggaatatcctgccggcagcg

SEQ ID NO: 4728206 - DNA, 25 bp, Homo sapien
aaatgctagaaggatgcttgcgtgc

SEQ ID NO: 4728207 - DNA, 25 bp, Homo sapien
tacagctgccaaaacgaaaatgcta

SEQ ID NO: 4728208 - DNA, 25 bp, Homo sapien
tggccagatgtagacgtgggaacca

SEQ ID NO: 4728209 - DNA, 25 bp, Homo sapien
ccactgagaaatatagactttggga

SEQ ID NO: 4728210 - DNA, 25 bp, Homo sapien
agaaatatagactttgggatggaga

SEQ ID NO: 4728211 - DNA, 25 bp, Homo sapien
gagcaatctcaaaggagtgaaggga

SEQ ID NO: 4728212 - DNA, 25 bp, Homo sapien
ggagacagcatgtgagtaggtgaca

SEQ ID NO: 4728213 - DNA, 25 bp, Homo sapien
tctgtgagagtgacacagtaatagg

SEQ ID NO: 4728214 - DNA, 25 bp, Homo sapien
gtgagagtgacacagtaataggtga

SEQ ID NO: 4728215 - DNA, 25 bp, Homo sapien
tgtgagagtgacacagtaataggtg

SEQ ID NO: 4728216 - DNA, 25 bp, Homo sapien
tgagagtgacacagtaataggtgaa

SEQ ID NO: 4728217 - DNA, 25 bp, Homo sapien
gaagggactgggccttctagaagat

SEQ ID NO: 4728218 - DNA, 25 bp, Homo sapien
gaaggtcaatggttgaaactgctga

SEQ ID NO: 4728219 - DNA, 25 bp, Homo sapien
gaagaagcgggagatgacaggaagg

SEQ ID NO: 4728220 - DNA, 25 bp, Homo sapien
tgctgaagaagaagcgggagatgac

SEQ ID NO: 4728221 - DNA, 25 bp, Homo sapien
tggtagcttgtagagaaagttttct

SEQ ID NO: 4728222 - DNA, 25 bp, Homo sapien
ctgggaggttaaggtcacatgttgc

SEQ ID NO: 4728223 - DNA, 25 bp, Homo sapien
ctgaaagtgggtgtagttgtgacag

SEQ ID NO: 4728224 - DNA, 25 bp, Homo sapien
tgacagatgttgtgtccctgtggca

SEQ ID NO: 4728225 - DNA, 25 bp, Homo sapien
aaggccctaagtttcagatttcctg

SEQ ID NO: 4728226 - DNA, 25 bp, Homo sapien
tccactgtgttgatgcttcttaggg

SEQ ID NO: 4728227 - DNA, 25 bp, Homo sapien
actgtgttgatgcttcttagggatc

SEQ ID NO: 4728228 - DNA, 25 bp, Homo sapien
tcagagacctctgactcaagccccc

SEQ ID NO: 4728229 - DNA, 25 bp, Homo sapien
cccacttccactgtgttgatgcttc

SEQ ID NO: 4728230 - DNA, 25 bp, Homo sapien
ctgtatctttccatgcaaagcagct

SEQ ID NO: 4728231 - DNA, 25 bp, Homo sapien
tgtatctttccatgcaaagcagctg

SEQ ID NO: 4728232 - DNA, 25 bp, Homo sapien
gtaacgtcttatgccactcatccga

SEQ ID NO: 4728233 - DNA, 25 bp, Homo sapien
ttatgccactcatccgactttcagg

SEQ ID NO: 4728234 - DNA, 25 bp, Homo sapien
actcatccgactttcaggctctctt

SEQ ID NO: 4728235 - DNA, 25 bp, Homo sapien
ctcctgctgtaacgtcttatgccac

SEQ ID NO: 4728236 - DNA, 25 bp, Homo sapien
tgcggcaggcttattgcaagagact

SEQ ID NO: 4728237 - DNA, 25 bp, Homo sapien
taaacagctaaactctgggagaggg

SEQ ID NO: 4728238 - DNA, 25 bp, Homo sapien
catgaaaagcccaggtcgtctcaag

SEQ ID NO: 4728239 - DNA, 25 bp, Homo sapien
tgttactggagacacaccaatgggt

SEQ ID NO: 4728240 - DNA, 25 bp, Homo sapien
cacattgtctgggagctcaagagca

SEQ ID NO: 4728241 - DNA, 25 bp, Homo sapien
agtgaggctcccactgaaacagtgc

SEQ ID NO: 4728242 - DNA, 25 bp, Homo sapien
gaatcatgcttctcgcagtggccac

SEQ ID NO: 4728243 - DNA, 25 bp, Homo sapien
taattcacgttatgcaaaccctgga

SEQ ID NO: 4728244 - DNA, 25 bp, Homo sapien
tatggaagatgataccgatacctgc

SEQ ID NO: 4728245 - DNA, 25 bp, Homo sapien
tagtatcagcgagcagaacttgtgc

SEQ ID NO: 4728246 - DNA, 25 bp, Homo sapien
tttgctcgaacccaagagtccttgc

SEQ ID NO: 4728247 - DNA, 25 bp, Homo sapien
tgtctatccctaaatctgctgctgt

SEQ ID NO: 4728248 - DNA, 25 bp, Homo sapien
ctggctgactaatatcttactgaaa

SEQ ID NO: 4728249 - DNA, 25 bp, Homo sapien
gaaatgtgactgtttgtaatggggc

SEQ ID NO: 4728250 - DNA, 25 bp, Homo sapien
gactgtttgtaatggggccaactat

SEQ ID NO: 4728251 - DNA, 25 bp, Homo sapien
tgtaatggggccaactatcttctct

SEQ ID NO: 4728252 - DNA, 25 bp, Homo sapien
gacgcttgatagatcttgcacttca

SEQ ID NO: 4728253 - DNA, 25 bp, Homo sapien
cctacgtccatggtttgatgccaag

SEQ ID NO: 4728254 - DNA, 25 bp, Homo sapien
gattaaagtcaaaagcctgacgcca

SEQ ID NO: 4728255 - DNA, 25 bp, Homo sapien
catgttacactatggatttggaggg

SEQ ID NO: 4728256 - DNA, 25 bp, Homo sapien
tcagggccagggcaataagtagcca

SEQ ID NO: 4728257 - DNA, 25 bp, Homo sapien
aaagcacactattagtttgtgtccc

SEQ ID NO: 4728258 - DNA, 25 bp, Homo sapien
tatttgatggccaagtgctgaactg

SEQ ID NO: 4728259 - DNA, 25 bp, Homo sapien
taaacaggcaattacgcatcctttt

SEQ ID NO: 4728260 - DNA, 25 bp, Homo sapien
tatgacaactatagtatgttgctcc

SEQ ID NO: 4728261 - DNA, 25 bp, Homo sapien
atcatttggattaaaaaagatttgg

SEQ ID NO: 4728262 - DNA, 25 bp, Homo sapien
caattcagtgtacatgtaaaaatgc

SEQ ID NO: 4728263 - DNA, 25 bp, Homo sapien
taatgaacaataatgctgatccaat

SEQ ID NO: 4728264 - DNA, 25 bp, Homo sapien
gaaaatcattttgcgcaagatgtgg

SEQ ID NO: 4728265 - DNA, 25 bp, Homo sapien
taacatagttattgccgaatgagca

SEQ ID NO: 4728266 - DNA, 25 bp, Homo sapien
tagttattgccgaatgagcacagaa

SEQ ID NO: 4728267 - DNA, 25 bp, Homo sapien
aaaagacagtatgccgaataacata

SEQ ID NO: 4728268 - DNA, 25 bp, Homo sapien
catttatggtgagcaacactccagc

SEQ ID NO: 4728269 - DNA, 25 bp, Homo sapien
cgcaaacaagactaccacgtgtggt

SEQ ID NO: 4728270 - DNA, 25 bp, Homo sapien
tacaggaaatatgcgactcgtctgg

SEQ ID NO: 4728271 - DNA, 25 bp, Homo sapien
cacgtgtggtttatctctgagggaa

SEQ ID NO: 4728272 - DNA, 25 bp, Homo sapien
tctatagccttgctgacccctggca

SEQ ID NO: 4728273 - DNA, 25 bp, Homo sapien
tcctgaccccaaaggaacttcagct

SEQ ID NO: 4728274 - DNA, 25 bp, Homo sapien
gcacctactcctctgttaggatgaa

SEQ ID NO: 4728275 - DNA, 25 bp, Homo sapien
tgaaaacgaggtgttaccactggcc

SEQ ID NO: 4728276 - DNA, 25 bp, Homo sapien
tctagctaccccaaaaccagggcag

SEQ ID NO: 4728277 - DNA, 25 bp, Homo sapien
tacaagttaggactgctcaggtcaa

SEQ ID NO: 4728278 - DNA, 25 bp, Homo sapien
tgcaggtccctacgatcaatacgct

SEQ ID NO: 4728279 - DNA, 25 bp, Homo sapien
tgtcagcagttagcagcatgtccat

SEQ ID NO: 4728280 - DNA, 25 bp, Homo sapien
tagcatgcagatattcccgaaagcg

SEQ ID NO: 4728281 - DNA, 25 bp, Homo sapien
aaggcatcaggctgaacagggcagc

SEQ ID NO: 4728282 - DNA, 25 bp, Homo sapien
cccgaaagcggactaaacctgatat

SEQ ID NO: 4728283 - DNA, 25 bp, Homo sapien
cagggcagctggactaagatctgga

SEQ ID NO: 4728284 - DNA, 25 bp, Homo sapien
gcatttgctgatgtgactgccgaca

SEQ ID NO: 4728285 - DNA, 25 bp, Homo sapien
gctatgtaattcactcacgagggct

SEQ ID NO: 4728286 - DNA, 25 bp, Homo sapien
catttagaaggccaccgtaacgact

SEQ ID NO: 4728287 - DNA, 25 bp, Homo sapien
gtaacgactgggcacttgaggcaca

SEQ ID NO: 4728288 - DNA, 25 bp, Homo sapien
caaacaggcctgaattatagtacga

SEQ ID NO: 4728289 - DNA, 25 bp, Homo sapien
gttttacatcaatggcccctcaagg

SEQ ID NO: 4728290 - DNA, 25 bp, Homo sapien
gaccgacccagttcagaggatttct

SEQ ID NO: 4728291 - DNA, 25 bp, Homo sapien
tggaccccatagcatcctctgaagg

SEQ ID NO: 4728292 - DNA, 25 bp, Homo sapien
gggaagaccaagaattattctgtca

SEQ ID NO: 4728293 - DNA, 25 bp, Homo sapien
gtcatgggtacaacaaattgtctct

SEQ ID NO: 4728294 - DNA, 25 bp, Homo sapien
aaaactggggctagttgcacactgt

SEQ ID NO: 4728295 - DNA, 25 bp, Homo sapien
tttttgcaggcaacagtcatgggta

SEQ ID NO: 4728296 - DNA, 25 bp, Homo sapien
tgtgtgtatatgtagccacagagca

SEQ ID NO: 4728297 - DNA, 25 bp, Homo sapien
ggcatttgtagtgtccattctgaga

SEQ ID NO: 4728298 - DNA, 25 bp, Homo sapien
ccaagtacataagcgcacactgact

SEQ ID NO: 4728299 - DNA, 25 bp, Homo sapien
tgactatggcagttcaaacacgtag

SEQ ID NO: 4728300 - DNA, 25 bp, Homo sapien
ctcagggtccccttgttgctgtaca

SEQ ID NO: 4728301 - DNA, 25 bp, Homo sapien
gttttgtagtgcactctcagggtcc

SEQ ID NO: 4728302 - DNA, 25 bp, Homo sapien
ggttctgactgtgccgatttcggct

SEQ ID NO: 4728303 - DNA, 25 bp, Homo sapien
tcggcttcgtacagaggaaaacatc

SEQ ID NO: 4728304 - DNA, 25 bp, Homo sapien
cattgctcccagacaagctgctgaa

SEQ ID NO: 4728305 - DNA, 25 bp, Homo sapien
gctgctgaacataagagatcctgaa

SEQ ID NO: 4728306 - DNA, 25 bp, Homo sapien
catcgcggaggtccttgctaaggga

SEQ ID NO: 4728307 - DNA, 25 bp, Homo sapien
aggaggcgtcttccctgacatcgag

SEQ ID NO: 4728308 - DNA, 25 bp, Homo sapien
gacaataagatcagctttctaatct

SEQ ID NO: 4728309 - DNA, 25 bp, Homo sapien
gtgacaataagatcagctttctaat

SEQ ID NO: 4728310 - DNA, 25 bp, Homo sapien
ttgtgacaataagatcagctttcta

SEQ ID NO: 4728311 - DNA, 25 bp, Homo sapien
cttgtgacaataagatcagctttct

SEQ ID NO: 4728312 - DNA, 25 bp, Homo sapien
tttatcaattgattcaggtgtaatg

SEQ ID NO: 4728313 - DNA, 25 bp, Homo sapien
gattcaggtgtaatgcaataataaa

SEQ ID NO: 4728314 - DNA, 25 bp, Homo sapien
taaagatgaactcatggcagtgcat

SEQ ID NO: 4728315 - DNA, 25 bp, Homo sapien
aataaagatgaactcatggcagtgc

SEQ ID NO: 4728316 - DNA, 25 bp, Homo sapien
gataagctcctaccaaactctttag

SEQ ID NO: 4728317 - DNA, 25 bp, Homo sapien
taatttactgcacagatacggcacg

SEQ ID NO: 4728318 - DNA, 25 bp, Homo sapien
tataaaacaaatcatccatactagt

SEQ ID NO: 4728319 - DNA, 25 bp, Homo sapien
cacgcagacagtttcctctacattc

SEQ ID NO: 4728320 - DNA, 25 bp, Homo sapien
tgttgtaactctgaagacgttagtg

SEQ ID NO: 4728321 - DNA, 25 bp, Homo sapien
gccaaacagatggtttgtttactcc

SEQ ID NO: 4728322 - DNA, 25 bp, Homo sapien
aagcatgacatatatggaaaagcca

SEQ ID NO: 4728323 - DNA, 25 bp, Homo sapien
gaattattggtttgttggcagaggc

SEQ ID NO: 4728324 - DNA, 25 bp, Homo sapien
cttgggtgctctgaggttgccaatt

SEQ ID NO: 4728325 - DNA, 25 bp, Homo sapien
ttgggtgctctgaggttgccaattc

SEQ ID NO: 4728326 - DNA, 25 bp, Homo sapien
gatccgaggctcactttaggcttga

SEQ ID NO: 4728327 - DNA, 25 bp, Homo sapien
cagaggttataatgccacaagagac

SEQ ID NO: 4728328 - DNA, 25 bp, Homo sapien
tatttggtgcacagttctgaagacg

SEQ ID NO: 4728329 - DNA, 25 bp, Homo sapien
tgaaaaataccaccggtgcactcag

SEQ ID NO: 4728330 - DNA, 25 bp, Homo sapien
gagaatctcccgtatgaagacagca

SEQ ID NO: 4728331 - DNA, 25 bp, Homo sapien
agcaggttccaggccggttagaatt

SEQ ID NO: 4728332 - DNA, 25 bp, Homo sapien
gctaattctgactatcacgctctct

SEQ ID NO: 4728333 - DNA, 25 bp, Homo sapien
tgactatcacgctctcttcaagaga

SEQ ID NO: 4728334 - DNA, 25 bp, Homo sapien
ggacctatggttctttccatccgta

SEQ ID NO: 4728335 - DNA, 25 bp, Homo sapien
ggctgtctcgatgtcctggacctat

SEQ ID NO: 4728336 - DNA, 25 bp, Homo sapien
ggagatgcaggctgtctcgatgtcc

SEQ ID NO: 4728337 - DNA, 25 bp, Homo sapien
gacctatggttctttccatccgtaa

SEQ ID NO: 4728338 - DNA, 25 bp, Homo sapien
tagtgtgaagtccaacatgactgaa

SEQ ID NO: 4728339 - DNA, 25 bp, Homo sapien
gtgtgaagtccaacatgactgaaaa

SEQ ID NO: 4728340 - DNA, 25 bp, Homo sapien
ttagtgtgaagtccaacatgactga

SEQ ID NO: 4728341 - DNA, 25 bp, Homo sapien
agtgtgaagtccaacatgactgaaa

SEQ ID NO: 4728342 - DNA, 25 bp, Homo sapien
gcaggagcagccaatggagatttac

SEQ ID NO: 4728343 - DNA, 25 bp, Homo sapien
gagcagccaatggagatttactgac

SEQ ID NO: 4728344 - DNA, 25 bp, Homo sapien
ccagcaggagcagccaatggagatt

SEQ ID NO: 4728345 - DNA, 25 bp, Homo sapien
caggagcagccaatggagatttact

SEQ ID NO: 4728346 - DNA, 25 bp, Homo sapien
tttgggctccgaagactcagactcg

SEQ ID NO: 4728347 - DNA, 25 bp, Homo sapien
gcagacgtgcatctctttcaagtga

SEQ ID NO: 4728348 - DNA, 25 bp, Homo sapien
tctgggctagaacataggtcacctt

SEQ ID NO: 4728349 - DNA, 25 bp, Homo sapien
cgatgtaaagctctcatgcaaggcg

SEQ ID NO: 4728350 - DNA, 25 bp, Homo sapien
tcatcaaactcatcggcggtatcaa

SEQ ID NO: 4728351 - DNA, 25 bp, Homo sapien
tttttcttgggtgccaggtcagcac

SEQ ID NO: 4728352 - DNA, 25 bp, Homo sapien
aaagtccttcacagacatgcctggg

SEQ ID NO: 4728353 - DNA, 25 bp, Homo sapien
ccgggtcctgttatgcttagaaaag

SEQ ID NO: 4728354 - DNA, 25 bp, Homo sapien
gggtgctgctctatggtaccactgg

SEQ ID NO: 4728355 - DNA, 25 bp, Homo sapien
gaatgatgggactggttgggaggga

SEQ ID NO: 4728356 - DNA, 25 bp, Homo sapien
tatggtaccactggttggaatgatg

SEQ ID NO: 4728357 - DNA, 25 bp, Homo sapien
gctgctctatggtaccactggttgg

SEQ ID NO: 4728358 - DNA, 25 bp, Homo sapien
catttggaggcaaccctagcagtgg

SEQ ID NO: 4728359 - DNA, 25 bp, Homo sapien
gacttcggagggagctaaagaccat

SEQ ID NO: 4728360 - DNA, 25 bp, Homo sapien
tttgaagatggtacagccacggcct

SEQ ID NO: 4728361 - DNA, 25 bp, Homo sapien
cacattagtaatgctggtcagggca

SEQ ID NO: 4728362 - DNA, 25 bp, Homo sapien
gatggcccagcggtccagcaccttg

SEQ ID NO: 4728363 - DNA, 25 bp, Homo sapien
cggtccagcaccttgccagcagcat

SEQ ID NO: 4728364 - DNA, 25 bp, Homo sapien
cagcggtccagcaccttgccagcag

SEQ ID NO: 4728365 - DNA, 25 bp, Homo sapien
ggtccagcaccttgccagcagcatc

SEQ ID NO: 4728366 - DNA, 25 bp, Homo sapien
catttttgccagtaactatgagatt

SEQ ID NO: 4728367 - DNA, 25 bp, Homo sapien
gatttgcctggaggtaggactttaa

SEQ ID NO: 4728368 - DNA, 25 bp, Homo sapien
tgtcaggcgatccatttcagcatgg

SEQ ID NO: 4728369 - DNA, 25 bp, Homo sapien
gcatggattgagagagatctattca

SEQ ID NO: 4728370 - DNA, 25 bp, Homo sapien
ggtagaaacatgcatgtacaccata

SEQ ID NO: 4728371 - DNA, 25 bp, Homo sapien
caactctcaattaattgggcatgca

SEQ ID NO: 4728372 - DNA, 25 bp, Homo sapien
tacagagaggcttctaacaccgatg

SEQ ID NO: 4728373 - DNA, 25 bp, Homo sapien
tcaaatcgccttatgacagccacag

SEQ ID NO: 4728374 - DNA, 25 bp, Homo sapien
attctgacgacattctggtgtcaag

SEQ ID NO: 4728375 - DNA, 25 bp, Homo sapien
gacattctggtgtcaaggtgctttt

SEQ ID NO: 4728376 - DNA, 25 bp, Homo sapien
ctttttctaaagtgcacctctgacc

SEQ ID NO: 4728377 - DNA, 25 bp, Homo sapien
gacgacattctggtgtcaaggtgct

SEQ ID NO: 4728378 - DNA, 25 bp, Homo sapien
gagagcatgggagatgaaccctcaa

SEQ ID NO: 4728379 - DNA, 25 bp, Homo sapien
aacaccacatggtgggctcatcttg

SEQ ID NO: 4728380 - DNA, 25 bp, Homo sapien
tgaaaattgccttactgactcctag

SEQ ID NO: 4728381 - DNA, 25 bp, Homo sapien
caatattgcaccctggatgtcctcc

SEQ ID NO: 4728382 - DNA, 25 bp, Homo sapien
tttccaagccataatgttagcaggg

SEQ ID NO: 4728383 - DNA, 25 bp, Homo sapien
aattcatgaagataaggacactggg

SEQ ID NO: 4728384 - DNA, 25 bp, Homo sapien
catggtgaactccaggaaggcttta

SEQ ID NO: 4728385 - DNA, 25 bp, Homo sapien
taggtctgactttacaccatggtga

SEQ ID NO: 4728386 - DNA, 25 bp, Homo sapien
aaaagatctcctatcaactccctac

SEQ ID NO: 4728387 - DNA, 25 bp, Homo sapien
ccatgtctttctgtcaacagtgaag

SEQ ID NO: 4728388 - DNA, 25 bp, Homo sapien
caattcccgtgtccaaaagatctcc

SEQ ID NO: 4728389 - DNA, 25 bp, Homo sapien
tctgtcaacagtgaagcaattcccg

SEQ ID NO: 4728390 - DNA, 25 bp, Homo sapien
aactgatgagaacgaggagttttgc

SEQ ID NO: 4728391 - DNA, 25 bp, Homo sapien
tcacttgcaataatagaggatgatg

SEQ ID NO: 4728392 - DNA, 25 bp, Homo sapien
tagttccactgctactagaagcctt

SEQ ID NO: 4728393 - DNA, 25 bp, Homo sapien
ctgagccactgacgccattcctagt

SEQ ID NO: 4728394 - DNA, 25 bp, Homo sapien
acaagctttccagatgtcatcacaa

SEQ ID NO: 4728395 - DNA, 25 bp, Homo sapien
ctgtgcttatagataaaacaagctt

SEQ ID NO: 4728396 - DNA, 25 bp, Homo sapien
catttgtctacaactgtgcttatag

SEQ ID NO: 4728397 - DNA, 25 bp, Homo sapien
agtgctcgaggcgaagatgccaccc

SEQ ID NO: 4728398 - DNA, 25 bp, Homo sapien
catacttaagtaaaggccttggcta

SEQ ID NO: 4728399 - DNA, 25 bp, Homo sapien
tattcatgtctaagttccaggttca

SEQ ID NO: 4728400 - DNA, 25 bp, Homo sapien
tccaggttcactttaaagcagcaag

SEQ ID NO: 4728401 - DNA, 25 bp, Homo sapien
ctttcacatggtgtgggcaagacaa

SEQ ID NO: 4728402 - DNA, 25 bp, Homo sapien
gaatacaggttatgcatcgaataaa

SEQ ID NO: 4728403 - DNA, 25 bp, Homo sapien
aaggtgttcctgctgtgatgtatgg

SEQ ID NO: 4728404 - DNA, 25 bp, Homo sapien
tcctgctgtgatgtatggtccactg

SEQ ID NO: 4728405 - DNA, 25 bp, Homo sapien
tcttgtcttttaggaatacaggtta

SEQ ID NO: 4728406 - DNA, 25 bp, Homo sapien
tcatagctgggaattcacaaactcc

SEQ ID NO: 4728407 - DNA, 25 bp, Homo sapien
ctggccctccctaaatatcttaaat

SEQ ID NO: 4728408 - DNA, 25 bp, Homo sapien
tcagtaatcccagactatgaaatgg

SEQ ID NO: 4728409 - DNA, 25 bp, Homo sapien
ctactatcatactaaggctcttgga

SEQ ID NO: 4728410 - DNA, 25 bp, Homo sapien
tacagcctctactccattggttgaa

SEQ ID NO: 4728411 - DNA, 25 bp, Homo sapien
tctggtaaggtaggtaagacaccca

SEQ ID NO: 4728412 - DNA, 25 bp, Homo sapien
gatggaaacgctgatcccattaggg

SEQ ID NO: 4728413 - DNA, 25 bp, Homo sapien
gaagctaaggtctatgttaccctga

SEQ ID NO: 4728414 - DNA, 25 bp, Homo sapien
gggacactagtttagacacatttcc

SEQ ID NO: 4728415 - DNA, 25 bp, Homo sapien
tcaaggtcttccacaggtctgagga

SEQ ID NO: 4728416 - DNA, 25 bp, Homo sapien
tctgctcagatttagagtcaaggtc

SEQ ID NO: 4728417 - DNA, 25 bp, Homo sapien
ctatacaaagtcatagccagaattg

SEQ ID NO: 4728418 - DNA, 25 bp, Homo sapien
tctgtcgcccataccggagtgtgga

SEQ ID NO: 4728419 - DNA, 25 bp, Homo sapien
tttaagtactgcaacaaaggtccgc

SEQ ID NO: 4728420 - DNA, 25 bp, Homo sapien
tattctcccacttgcttaaagcggc

SEQ ID NO: 4728421 - DNA, 25 bp, Homo sapien
taaagcggccaaactattgagaaca

SEQ ID NO: 4728422 - DNA, 25 bp, Homo sapien
tctgctccataggtcctcaggactt

SEQ ID NO: 4728423 - DNA, 25 bp, Homo sapien
tattctgctccataggtcctcagga

SEQ ID NO: 4728424 - DNA, 25 bp, Homo sapien
ttctgctccataggtcctcaggact

SEQ ID NO: 4728425 - DNA, 25 bp, Homo sapien
ttattctgctccataggtcctcagg

SEQ ID NO: 4728426 - DNA, 25 bp, Homo sapien
tattgttccacgcaggtcaaaattc

SEQ ID NO: 4728427 - DNA, 25 bp, Homo sapien
tgcccacaaatcagtctacttctct

SEQ ID NO: 4728428 - DNA, 25 bp, Homo sapien
ctggcatgtacatgttggcttgaat

SEQ ID NO: 4728429 - DNA, 25 bp, Homo sapien
gctctttatgcccagaggcccaaat

SEQ ID NO: 4728430 - DNA, 25 bp, Homo sapien
caacatcattagctgcatggagcag

SEQ ID NO: 4728431 - DNA, 25 bp, Homo sapien
gactgggctgtgacctgaacactgc

SEQ ID NO: 4728432 - DNA, 25 bp, Homo sapien
caagtggaagcaacatccagaggga

SEQ ID NO: 4728433 - DNA, 25 bp, Homo sapien
gaaatggagccgcttcaaagccgac

SEQ ID NO: 4728434 - DNA, 25 bp, Homo sapien
tagataacgttcttgtgatgccgcc

SEQ ID NO: 4728435 - DNA, 25 bp, Homo sapien
ccaggccgcagggttctaatgaata

SEQ ID NO: 4728436 - DNA, 25 bp, Homo sapien
tttcgggtggcctggtaaacacaca

SEQ ID NO: 4728437 - DNA, 25 bp, Homo sapien
taagattccccaatgattatgcgga

SEQ ID NO: 4728438 - DNA, 25 bp, Homo sapien
taaactggtcagttgcactgtgaca

SEQ ID NO: 4728439 - DNA, 25 bp, Homo sapien
tatccagacgaagccaaaaagtttg

SEQ ID NO: 4728440 - DNA, 25 bp, Homo sapien
aatcactctgtaaacggcatccagg

SEQ ID NO: 4728441 - DNA, 25 bp, Homo sapien
ggaatgcagcaccaacacttgcagt

SEQ ID NO: 4728442 - DNA, 25 bp, Homo sapien
cctagcatgcccgattgatataaat

SEQ ID NO: 4728443 - DNA, 25 bp, Homo sapien
tgacagagaagaaataccggcatct

SEQ ID NO: 4728444 - DNA, 25 bp, Homo sapien
cagttccacatgttggctgccacgg

SEQ ID NO: 4728445 - DNA, 25 bp, Homo sapien
cattgctgtcgggtttttgttccat

SEQ ID NO: 4728446 - DNA, 25 bp, Homo sapien
gaaacggatttacaacgcaatagaa

SEQ ID NO: 4728447 - DNA, 25 bp, Homo sapien
taggcacacaaattacgatacatcc

SEQ ID NO: 4728448 - DNA, 25 bp, Homo sapien
tatgtttcatcacctagtctaccag

SEQ ID NO: 4728449 - DNA, 25 bp, Homo sapien
cagtgtatgaaggaataggcacaca

SEQ ID NO: 4728450 - DNA, 25 bp, Homo sapien
cataatgtgtgtccaccaatgctgg

SEQ ID NO: 4728451 - DNA, 25 bp, Homo sapien
ttctatgacactcccagaacgtgga

SEQ ID NO: 4728452 - DNA, 25 bp, Homo sapien
gacacactgctaaaggacaaggact

SEQ ID NO: 4728453 - DNA, 25 bp, Homo sapien
tgagccacgtctgaagaaatcctgt

SEQ ID NO: 4728454 - DNA, 25 bp, Homo sapien
caggcagaatgccatacctgacaga

SEQ ID NO: 4728455 - DNA, 25 bp, Homo sapien
ggcagaatgccatacctgacagatt

SEQ ID NO: 4728456 - DNA, 25 bp, Homo sapien
tgccatacctgacagattcactaac

SEQ ID NO: 4728457 - DNA, 25 bp, Homo sapien
gaatgccatacctgacagattcact

SEQ ID NO: 4728458 - DNA, 25 bp, Homo sapien
cacatcaactcttagtttgcaaaca

SEQ ID NO: 4728459 - DNA, 25 bp, Homo sapien
tgatcaaacacatcaactcttagtt

SEQ ID NO: 4728460 - DNA, 25 bp, Homo sapien
tagtttgcaaacatcagaggatgat

SEQ ID NO: 4728461 - DNA, 25 bp, Homo sapien
tcaactcttagtttgcaaacatcag

SEQ ID NO: 4728462 - DNA, 25 bp, Homo sapien
gatgagatgctgcaacgctgcctca

SEQ ID NO: 4728463 - DNA, 25 bp, Homo sapien
tgcaacgcatcgctacaaattaagg

SEQ ID NO: 4728464 - DNA, 25 bp, Homo sapien
taggtcaaatcactagggagcggct

SEQ ID NO: 4728465 - DNA, 25 bp, Homo sapien
gcttcaatagcaggccagagcacca

SEQ ID NO: 4728466 - DNA, 25 bp, Homo sapien
tcatggtgggaaaacaataggtatg

SEQ ID NO: 4728467 - DNA, 25 bp, Homo sapien
gtcacagaaattttcagttcctaga

SEQ ID NO: 4728468 - DNA, 25 bp, Homo sapien
gtcatctctttaacagctcttgttt

SEQ ID NO: 4728469 - DNA, 25 bp, Homo sapien
tcatgacaaagaaacgatagaggtt

SEQ ID NO: 4728470 - DNA, 25 bp, Homo sapien
agagagggcgatgatcaagatccac

SEQ ID NO: 4728471 - DNA, 25 bp, Homo sapien
ggcatgaactactgaagcggcatta

SEQ ID NO: 4728472 - DNA, 25 bp, Homo sapien
ctaagcactatgaaagccaattggg

SEQ ID NO: 4728473 - DNA, 25 bp, Homo sapien
tctaaggttgactatgcacaggcat

SEQ ID NO: 4728474 - DNA, 25 bp, Homo sapien
agcagatttctgtttgagacgatgt

SEQ ID NO: 4728475 - DNA, 25 bp, Homo sapien
aaaaacaagaaagcggcgacaagat

SEQ ID NO: 4728476 - DNA, 25 bp, Homo sapien
cagatttctgtttgagacgatgttt

SEQ ID NO: 4728477 - DNA, 25 bp, Homo sapien
aagcggcgacaagatgctacagcag

SEQ ID NO: 4728478 - DNA, 25 bp, Homo sapien
ggtagactttgtgaccatcagctaa

SEQ ID NO: 4728479 - DNA, 25 bp, Homo sapien
ccaacaaggagataattaggcagga

SEQ ID NO: 4728480 - DNA, 25 bp, Homo sapien
ttggttaaacatgtggcagtatctg

SEQ ID NO: 4728481 - DNA, 25 bp, Homo sapien
gcaaagagctctagatgtgatatta

SEQ ID NO: 4728482 - DNA, 25 bp, Homo sapien
tctcctatcatatacgtcaatacgc

SEQ ID NO: 4728483 - DNA, 25 bp, Homo sapien
gttgggcacatgagtatagggtctc

SEQ ID NO: 4728484 - DNA, 25 bp, Homo sapien
tatatgtaaagggagttaatggcct

SEQ ID NO: 4728485 - DNA, 25 bp, Homo sapien
tacgcatattacaatggttgggcac

SEQ ID NO: 4728486 - DNA, 25 bp, Homo sapien
tctcagagaagatgcaatatacgcc

SEQ ID NO: 4728487 - DNA, 25 bp, Homo sapien
tgatctactatagccatgcaagtcc

SEQ ID NO: 4728488 - DNA, 25 bp, Homo sapien
gaaaaatgacgatgagttcgagcag

SEQ ID NO: 4728489 - DNA, 25 bp, Homo sapien
tgcctattgtgcacagagccttcct

SEQ ID NO: 4728490 - DNA, 25 bp, Homo sapien
taagagaaagatccagtatgtagtt

SEQ ID NO: 4728491 - DNA, 25 bp, Homo sapien
tcagagcctgtgttatactaatgag

SEQ ID NO: 4728492 - DNA, 25 bp, Homo sapien
gatccagtatgtagttactcccaaa

SEQ ID NO: 4728493 - DNA, 25 bp, Homo sapien
gagtatcatgaaggttaagagaaag

SEQ ID NO: 4728494 - DNA, 25 bp, Homo sapien
ggatggccccattcgtctttgagaa

SEQ ID NO: 4728495 - DNA, 25 bp, Homo sapien
tctaaaagacggatggccccattcg

SEQ ID NO: 4728496 - DNA, 25 bp, Homo sapien
aaagctggacctctaaaagacggat

SEQ ID NO: 4728497 - DNA, 25 bp, Homo sapien
gacctctaaaagacggatggcccca

SEQ ID NO: 4728498 - DNA, 25 bp, Homo sapien
tcgttttctcaaaatgtcaatttta

SEQ ID NO: 4728499 - DNA, 25 bp, Homo sapien
tatcgttttctcaaaatgtcaattt

SEQ ID NO: 4728500 - DNA, 25 bp, Homo sapien
gttttctcaaaatgtcaattttaga

SEQ ID NO: 4728501 - DNA, 25 bp, Homo sapien
ctatcgttttctcaaaatgtcaatt

SEQ ID NO: 4728502 - DNA, 25 bp, Homo sapien
ccattgacacaaaggagacactcaa

SEQ ID NO: 4728503 - DNA, 25 bp, Homo sapien
gccattgacacaaaggagacactca

SEQ ID NO: 4728504 - DNA, 25 bp, Homo sapien
cagtcggccccggacacgggcggcg

SEQ ID NO: 4728505 - DNA, 25 bp, Homo sapien
cggacacgggcggcgttcaagtcct

SEQ ID NO: 4728506 - DNA, 25 bp, Homo sapien
cacgggcggcgttcaagtcctctcc

SEQ ID NO: 4728507 - DNA, 25 bp, Homo sapien
gacacgggcggcgttcaagtcctct

SEQ ID NO: 4728508 - DNA, 25 bp, Homo sapien
tgtatcctcggacatagtcccgcag

SEQ ID NO: 4728509 - DNA, 25 bp, Homo sapien
caaggccgtgcagtatgtgcagtac

SEQ ID NO: 4728510 - DNA, 25 bp, Homo sapien
agcaggatctttagccgcacaggca

SEQ ID NO: 4728511 - DNA, 25 bp, Homo sapien
caaacacgacgttggactgcacaat

SEQ ID NO: 4728512 - DNA, 25 bp, Homo sapien
tggtggtcccgccaaagttccagag

SEQ ID NO: 4728513 - DNA, 25 bp, Homo sapien
gtggtcccgccaaagttccagagat

SEQ ID NO: 4728514 - DNA, 25 bp, Homo sapien
gctggaagttaccagggctccattt

SEQ ID NO: 4728515 - DNA, 25 bp, Homo sapien
aatattgctggaagttaccagggct

SEQ ID NO: 4728516 - DNA, 25 bp, Homo sapien
tcagttttgactgcctgtgtgacac

SEQ ID NO: 4728517 - DNA, 25 bp, Homo sapien
gtctcctctgatcctacgacaggtt

SEQ ID NO: 4728518 - DNA, 25 bp, Homo sapien
ttccgctgacaaggtttttgcctga

SEQ ID NO: 4728519 - DNA, 25 bp, Homo sapien
tttccgctgacaaggtttttgcctg

SEQ ID NO: 4728520 - DNA, 25 bp, Homo sapien
tctcctctgatcctacgacaggttt

SEQ ID NO: 4728521 - DNA, 25 bp, Homo sapien
caaagtagttgggaccgagagcaca

SEQ ID NO: 4728522 - DNA, 25 bp, Homo sapien
tagttaacgtcaacaacttacgcag

SEQ ID NO: 4728523 - DNA, 25 bp, Homo sapien
tacgcagctttagtaagcaatctgt

SEQ ID NO: 4728524 - DNA, 25 bp, Homo sapien
taagtcaacagagagaatgtgcgtg

SEQ ID NO: 4728525 - DNA, 25 bp, Homo sapien
cattctgggcaatgtatcttggtag

SEQ ID NO: 4728526 - DNA, 25 bp, Homo sapien
ccaggacactgcacagtataaggca

SEQ ID NO: 4728527 - DNA, 25 bp, Homo sapien
taaggcagccggaaagaatgctgtg

SEQ ID NO: 4728528 - DNA, 25 bp, Homo sapien
tacacactagaaaacccaagtcact

SEQ ID NO: 4728529 - DNA, 25 bp, Homo sapien
cattggagacacgatttcagggttt

SEQ ID NO: 4728530 - DNA, 25 bp, Homo sapien
tcattggagacacgatttcagggtt

SEQ ID NO: 4728531 - DNA, 25 bp, Homo sapien
ggattcacatgcttgggtgtatgca

SEQ ID NO: 4728532 - DNA, 25 bp, Homo sapien
cactgctgtatttggcctcatgaat

SEQ ID NO: 4728533 - DNA, 25 bp, Homo sapien
actgccaactccaaggctagaggcc

SEQ ID NO: 4728534 - DNA, 25 bp, Homo sapien
caaaaagagtgggtgctgtcatccc

SEQ ID NO: 4728535 - DNA, 25 bp, Homo sapien
tcatctgttgttcaagactggactg

SEQ ID NO: 4728536 - DNA, 25 bp, Homo sapien
tgagacctgttgctgatttgggcct

SEQ ID NO: 4728537 - DNA, 25 bp, Homo sapien
tcaagactggactgagacctgttgc

SEQ ID NO: 4728538 - DNA, 25 bp, Homo sapien
tgttgttcaagactggactgagacc

SEQ ID NO: 4728539 - DNA, 25 bp, Homo sapien
caagtcctcaggttaatcttccctg

SEQ ID NO: 4728540 - DNA, 25 bp, Homo sapien
agtttaccagtgtgcaacggatggc

SEQ ID NO: 4728541 - DNA, 25 bp, Homo sapien
gatcacaagtcctcaggttaatctt

SEQ ID NO: 4728542 - DNA, 25 bp, Homo sapien
agccatgtttacactgatcacaagt

SEQ ID NO: 4728543 - DNA, 25 bp, Homo sapien
cgttcacagaatgtaccacatacag

SEQ ID NO: 4728544 - DNA, 25 bp, Homo sapien
gaatgtaccacatacagcttggtct

SEQ ID NO: 4728545 - DNA, 25 bp, Homo sapien
tgttccgagtgcccagaagagggtt

SEQ ID NO: 4728546 - DNA, 25 bp, Homo sapien
gcattttcaaagtttgtcgttcaca

SEQ ID NO: 4728547 - DNA, 25 bp, Homo sapien
aggcagcagtgaagatgatcagcat

SEQ ID NO: 4728548 - DNA, 25 bp, Homo sapien
ctgaatggaggcagcagtgaagatg

SEQ ID NO: 4728549 - DNA, 25 bp, Homo sapien
gaggcagcagtgaagatgatcagca

SEQ ID NO: 4728550 - DNA, 25 bp, Homo sapien
aatggaggcagcagtgaagatgatc

SEQ ID NO: 4728551 - DNA, 25 bp, Homo sapien
ttgacttcttgaaagagaaatccat

SEQ ID NO: 4728552 - DNA, 25 bp, Homo sapien
taccattgacttcttgaaagagaaa

SEQ ID NO: 4728553 - DNA, 25 bp, Homo sapien
ctttaccattgacttcttgaaagag

SEQ ID NO: 4728554 - DNA, 25 bp, Homo sapien
ccattgacttcttgaaagagaaatc

SEQ ID NO: 4728555 - DNA, 25 bp, Homo sapien
actaagcaaaaaccgtcactgtgga

SEQ ID NO: 4728556 - DNA, 25 bp, Homo sapien
aatgaaacccttacacagattggag

SEQ ID NO: 4728557 - DNA, 25 bp, Homo sapien
ggcactgcctcttaagtggtgggaa

SEQ ID NO: 4728558 - DNA, 25 bp, Homo sapien
ggagagaccctaactaagaacataa

SEQ ID NO: 4728559 - DNA, 25 bp, Homo sapien
tgggctataacagcttcgaagcagc

SEQ ID NO: 4728560 - DNA, 25 bp, Homo sapien
aacataatgggctataacagcttcg

SEQ ID NO: 4728561 - DNA, 25 bp, Homo sapien
gcttcgaagcagctaatatggtcca

SEQ ID NO: 4728562 - DNA, 25 bp, Homo sapien
tgtcagctgaatcaacataatgggc

SEQ ID NO: 4728563 - DNA, 25 bp, Homo sapien
cagccatgtactattgtatgtaact

SEQ ID NO: 4728564 - DNA, 25 bp, Homo sapien
aagagccttactggtgctctctgaa

SEQ ID NO: 4728565 - DNA, 25 bp, Homo sapien
acagccatgtactattgtatgtaac

SEQ ID NO: 4728566 - DNA, 25 bp, Homo sapien
aataattctgaactagacagataaa

SEQ ID NO: 4728567 - DNA, 25 bp, Homo sapien
attttgtccaggtgttttatggcta

SEQ ID NO: 4728568 - DNA, 25 bp, Homo sapien
tccaggtgttttatggctatcttga

SEQ ID NO: 4728569 - DNA, 25 bp, Homo sapien
tttgtccaggtgttttatggctatc

SEQ ID NO: 4728570 - DNA, 25 bp, Homo sapien
ggtgttttatggctatcttgaggat

SEQ ID NO: 4728571 - DNA, 25 bp, Homo sapien
ctgccgcttgtttaccaaacagcac

SEQ ID NO: 4728572 - DNA, 25 bp, Homo sapien
gccgcttgtttaccaaacagcacgg

SEQ ID NO: 4728573 - DNA, 25 bp, Homo sapien
cttgtttaccaaacagcacgggcat

SEQ ID NO: 4728574 - DNA, 25 bp, Homo sapien
cgcttgtttaccaaacagcacgggc

SEQ ID NO: 4728575 - DNA, 25 bp, Homo sapien
catacggttccaactaatgaatcac

SEQ ID NO: 4728576 - DNA, 25 bp, Homo sapien
gcagtgggaccagcttagaacaagc

SEQ ID NO: 4728577 - DNA, 25 bp, Homo sapien
catactttcccgcaagtacagtaag

SEQ ID NO: 4728578 - DNA, 25 bp, Homo sapien
tttaccacatcctaacaaaaacatg

SEQ ID NO: 4728579 - DNA, 25 bp, Homo sapien
ggaagacctgtctgtgtcaagtaga

SEQ ID NO: 4728580 - DNA, 25 bp, Homo sapien
cagttcaagttgtgatgttcaccca

SEQ ID NO: 4728581 - DNA, 25 bp, Homo sapien
gactcttaaagtgcctaactgacaa

SEQ ID NO: 4728582 - DNA, 25 bp, Homo sapien
ccccatatatgagctcttacaggaa

SEQ ID NO: 4728583 - DNA, 25 bp, Homo sapien
ggagagtgccccagctactagaaat

SEQ ID NO: 4728584 - DNA, 25 bp, Homo sapien
aacagattttaagtgcccagcaaga

SEQ ID NO: 4728585 - DNA, 25 bp, Homo sapien
aaatcactgggacatcataggcaac

SEQ ID NO: 4728586 - DNA, 25 bp, Homo sapien
tgactccgagcaggattggatccgc

SEQ ID NO: 4728587 - DNA, 25 bp, Homo sapien
catttgacaagcagtttccagtctc

SEQ ID NO: 4728588 - DNA, 25 bp, Homo sapien
ttccagtctcttgaccaattccaca

SEQ ID NO: 4728589 - DNA, 25 bp, Homo sapien
gagaaacatttgacaagcagtttcc

SEQ ID NO: 4728590 - DNA, 25 bp, Homo sapien
tccacattagacaatcttgcaaatg

SEQ ID NO: 4728591 - DNA, 25 bp, Homo sapien
gaggtttttacaccctaagtgcaca

SEQ ID NO: 4728592 - DNA, 25 bp, Homo sapien
ttactggcaataaaccttgggtgcg

SEQ ID NO: 4728593 - DNA, 25 bp, Homo sapien
gctcaactggttagggcatcactga

SEQ ID NO: 4728594 - DNA, 25 bp, Homo sapien
gcttgcgatgctataaaatggctca

SEQ ID NO: 4728595 - DNA, 25 bp, Homo sapien
cttggtctgcgtatatgctccttga

SEQ ID NO: 4728596 - DNA, 25 bp, Homo sapien
gaagctctccactggcactcaatga

SEQ ID NO: 4728597 - DNA, 25 bp, Homo sapien
tcaatgaacagtagagatttacact

SEQ ID NO: 4728598 - DNA, 25 bp, Homo sapien
ttgggcaattccactgttcagttgt

SEQ ID NO: 4728599 - DNA, 25 bp, Homo sapien
actatgtacacagagcgagggcacc

SEQ ID NO: 4728600 - DNA, 25 bp, Homo sapien
tcagaggctctcacaggaacattcg

SEQ ID NO: 4728601 - DNA, 25 bp, Homo sapien
gaggagtaaccttctatcgcccaag

SEQ ID NO: 4728602 - DNA, 25 bp, Homo sapien
tctggtcatcagagagaaactgtcc

SEQ ID NO: 4728603 - DNA, 25 bp, Homo sapien
accactggtatccactgagtgccta

SEQ ID NO: 4728604 - DNA, 25 bp, Homo sapien
tataaaagggctctttgcctccacc

SEQ ID NO: 4728605 - DNA, 25 bp, Homo sapien
cttccaccactggtatccactgagt

SEQ ID NO: 4728606 - DNA, 25 bp, Homo sapien
cactggtatccactgagtgcctacc

SEQ ID NO: 4728607 - DNA, 25 bp, Homo sapien
ctctcatgtagggatgtattgcttg

SEQ ID NO: 4728608 - DNA, 25 bp, Homo sapien
caaatatcccatcgctgcaggtttg

SEQ ID NO: 4728609 - DNA, 25 bp, Homo sapien
gagaatcaaatatcccatcgctgca

SEQ ID NO: 4728610 - DNA, 25 bp, Homo sapien
gtagggatgtattgcttgtgtgtcc

SEQ ID NO: 4728611 - DNA, 25 bp, Homo sapien
tggacttccagcctgtggtatggct

SEQ ID NO: 4728612 - DNA, 25 bp, Homo sapien
cagcctgtggtatggctcctccagg

SEQ ID NO: 4728613 - DNA, 25 bp, Homo sapien
cagcactctgccagtacatgccaat

SEQ ID NO: 4728614 - DNA, 25 bp, Homo sapien
ctctgccagtacatgccaatggaac

SEQ ID NO: 4728615 - DNA, 25 bp, Homo sapien
gattatttgaccacgtcacaaacac

SEQ ID NO: 4728616 - DNA, 25 bp, Homo sapien
cagtcacagaatgcactttataaac

SEQ ID NO: 4728617 - DNA, 25 bp, Homo sapien
tgaccacgtcacaaacactaagttt

SEQ ID NO: 4728618 - DNA, 25 bp, Homo sapien
cttaagattatttgaccacgtcaca

SEQ ID NO: 4728619 - DNA, 25 bp, Homo sapien
gcaagtataaagaacactgtggcac

SEQ ID NO: 4728620 - DNA, 25 bp, Homo sapien
taagacttctgcaagagtgacacaa

SEQ ID NO: 4728621 - DNA, 25 bp, Homo sapien
gaaagagatcagttcaaatgcaggt

SEQ ID NO: 4728622 - DNA, 25 bp, Homo sapien
gaaaaggccaagtatgtacatgatg

SEQ ID NO: 4728623 - DNA, 25 bp, Homo sapien
ggtatttaccccacagtctttcata

SEQ ID NO: 4728624 - DNA, 25 bp, Homo sapien
gcaacaccctgtctgtgctgcgcaa

SEQ ID NO: 4728625 - DNA, 25 bp, Homo sapien
ggtgcgtgccagcaacctggcttgt

SEQ ID NO: 4728626 - DNA, 25 bp, Homo sapien
tgctgcgcaagctggactcaaaact

SEQ ID NO: 4728627 - DNA, 25 bp, Homo sapien
gcaaggttaacagatcagtcctggc

SEQ ID NO: 4728628 - DNA, 25 bp, Homo sapien
gccagtggtgcaaggttaacagatc

SEQ ID NO: 4728629 - DNA, 25 bp, Homo sapien
cctggccttcgggcagacagcagaa

SEQ ID NO: 4728630 - DNA, 25 bp, Homo sapien
acctctttgcgtgtgtcttgtcata

SEQ ID NO: 4728631 - DNA, 25 bp, Homo sapien
cagccttatccagcaacaccctgct

SEQ ID NO: 4728632 - DNA, 25 bp, Homo sapien
gccttatccagcaacaccctgctct

SEQ ID NO: 4728633 - DNA, 25 bp, Homo sapien
tatccagcaacaccctgctcttgaa

SEQ ID NO: 4728634 - DNA, 25 bp, Homo sapien
cttatccagcaacaccctgctcttg

SEQ ID NO: 4728635 - DNA, 25 bp, Homo sapien
tgttcgcgtgtcatgtgtagagtgc

SEQ ID NO: 4728636 - DNA, 25 bp, Homo sapien
tacgtgacacgatttgagcagggct

SEQ ID NO: 4728637 - DNA, 25 bp, Homo sapien
tcgctccctctaatgagagcagatg

SEQ ID NO: 4728638 - DNA, 25 bp, Homo sapien
ttccccaaactgttcgcgtgtcatg

SEQ ID NO: 4728639 - DNA, 25 bp, Homo sapien
gaaaatcaataacaggatgaccttc

SEQ ID NO: 4728640 - DNA, 25 bp, Homo sapien
cttttcccacgaaaatcaataacag

SEQ ID NO: 4728641 - DNA, 25 bp, Homo sapien
ctaggccccatttgcagatcatttt

SEQ ID NO: 4728642 - DNA, 25 bp, Homo sapien
ggatgaccttcaatttgaaattcaa

SEQ ID NO: 4728643 - DNA, 25 bp, Homo sapien
caggcagggttcattaagtgcacaa

SEQ ID NO: 4728644 - DNA, 25 bp, Homo sapien
ttcttatttgaacaacaatggtaca

SEQ ID NO: 4728645 - DNA, 25 bp, Homo sapien
gcacaaggcccttattcccataaca

SEQ ID NO: 4728646 - DNA, 25 bp, Homo sapien
tatttgaacaacaatggtacatgaa

SEQ ID NO: 4728647 - DNA, 25 bp, Homo sapien
tagtcgttctggttccgaactgcat

SEQ ID NO: 4728648 - DNA, 25 bp, Homo sapien
gttgggacattctgaataagaggtt

SEQ ID NO: 4728649 - DNA, 25 bp, Homo sapien
agaggttagtatcagcgttttgcca

SEQ ID NO: 4728650 - DNA, 25 bp, Homo sapien
cctggttcagccgtagtcgttctgg

SEQ ID NO: 4728651 - DNA, 25 bp, Homo sapien
gtctcttgccctctttggctctctg

SEQ ID NO: 4728652 - DNA, 25 bp, Homo sapien
caggagtctcttaaagtcaagtctc

SEQ ID NO: 4728653 - DNA, 25 bp, Homo sapien
ggagttgtcagtacaggagtctctt

SEQ ID NO: 4728654 - DNA, 25 bp, Homo sapien
ctttctctcacatccacttctgcct

SEQ ID NO: 4728655 - DNA, 25 bp, Homo sapien
cagccagtagcaggagtgtagtgta

SEQ ID NO: 4728656 - DNA, 25 bp, Homo sapien
tgtagtgtagttaagaagctggctg

SEQ ID NO: 4728657 - DNA, 25 bp, Homo sapien
ggcagccagtagcaggagtgtagtg

SEQ ID NO: 4728658 - DNA, 25 bp, Homo sapien
tagtgtagttaagaagctggctgaa

SEQ ID NO: 4728659 - DNA, 25 bp, Homo sapien
tacagagctgggttaaagatcagtg

SEQ ID NO: 4728660 - DNA, 25 bp, Homo sapien
cacacgctggtattcatctaatggc

SEQ ID NO: 4728661 - DNA, 25 bp, Homo sapien
tggtttttcatgtgacacacgctgg

SEQ ID NO: 4728662 - DNA, 25 bp, Homo sapien
taataaaaatgacgctccacatcgc

SEQ ID NO: 4728663 - DNA, 25 bp, Homo sapien
gatttgtaattaaggctatgtggag

SEQ ID NO: 4728664 - DNA, 25 bp, Homo sapien
gagatgtatcaaccccacaacatgg

SEQ ID NO: 4728665 - DNA, 25 bp, Homo sapien
ttgaaatatgctggccagtcttgct

SEQ ID NO: 4728666 - DNA, 25 bp, Homo sapien
cacaacatgggaccttgaaatatgc

SEQ ID NO: 4728667 - DNA, 25 bp, Homo sapien
gatgccaatgcaaaccactcttccc

SEQ ID NO: 4728668 - DNA, 25 bp, Homo sapien
cattcacatgatgggtatagggtgt

SEQ ID NO: 4728669 - DNA, 25 bp, Homo sapien
tagggtgttgagaggaatactgcca

SEQ ID NO: 4728670 - DNA, 25 bp, Homo sapien
gccagatggactggctccttttttc

SEQ ID NO: 4728671 - DNA, 25 bp, Homo sapien
caatcacactgccaacgggtaagtc

SEQ ID NO: 4728672 - DNA, 25 bp, Homo sapien
cactgccaacgggtaagtcttacat

SEQ ID NO: 4728673 - DNA, 25 bp, Homo sapien
cagctggatccaatattttgttaga

SEQ ID NO: 4728674 - DNA, 25 bp, Homo sapien
gtcttacatgtacagctggatccaa

SEQ ID NO: 4728675 - DNA, 25 bp, Homo sapien
tcattattaaatgcatccacccaag

SEQ ID NO: 4728676 - DNA, 25 bp, Homo sapien
aagaagcacttgagggccacagtca

SEQ ID NO: 4728677 - DNA, 25 bp, Homo sapien
gcagcaactgattcactaagatcat

SEQ ID NO: 4728678 - DNA, 25 bp, Homo sapien
cttgttttcaatatgcagcaactga

SEQ ID NO: 4728679 - DNA, 25 bp, Homo sapien
tctgtcaacttctggattccacaga

SEQ ID NO: 4728680 - DNA, 25 bp, Homo sapien
cctctgtcaacttctggattccaca

SEQ ID NO: 4728681 - DNA, 25 bp, Homo sapien
taacctgaccgcttaaggtcctctg

SEQ ID NO: 4728682 - DNA, 25 bp, Homo sapien
aaagagaaagataacctgaccgctt

SEQ ID NO: 4728683 - DNA, 25 bp, Homo sapien
gatttggataatggcaacagagaca

SEQ ID NO: 4728684 - DNA, 25 bp, Homo sapien
cttcctattcagaagatggtgagaa

SEQ ID NO: 4728685 - DNA, 25 bp, Homo sapien
tagggaagttatgagagatgccaag

SEQ ID NO: 4728686 - DNA, 25 bp, Homo sapien
gaagtcagtaagagccaccaagtag

SEQ ID NO: 4728687 - DNA, 25 bp, Homo sapien
tacaggagagttgacagtggatgct

SEQ ID NO: 4728688 - DNA, 25 bp, Homo sapien
cacagatatgggctgattgtgctct

SEQ ID NO: 4728689 - DNA, 25 bp, Homo sapien
gggccaaatctcagaatgcgaggca

SEQ ID NO: 4728690 - DNA, 25 bp, Homo sapien
gggccaaccctgtgtagtcacagat

SEQ ID NO: 4728691 - DNA, 25 bp, Homo sapien
gtagtgcacgcctgtagagccagct

SEQ ID NO: 4728692 - DNA, 25 bp, Homo sapien
tgagccaagatagcgagatcatgcc

SEQ ID NO: 4728693 - DNA, 25 bp, Homo sapien
ctgtagagccagctactcaggggct

SEQ ID NO: 4728694 - DNA, 25 bp, Homo sapien
gtagagccagctactcaggggctga

SEQ ID NO: 4728695 - DNA, 25 bp, Homo sapien
taatatgccattgttcccacttgag

SEQ ID NO: 4728696 - DNA, 25 bp, Homo sapien
tgagcacattaaattttccatatcc

SEQ ID NO: 4728697 - DNA, 25 bp, Homo sapien
atccacttttaaaccaatataacat

SEQ ID NO: 4728698 - DNA, 25 bp, Homo sapien
cttgagcacattaaattttccatat

SEQ ID NO: 4728699 - DNA, 25 bp, Homo sapien
gaacctgtttgcaataagactccgg

SEQ ID NO: 4728700 - DNA, 25 bp, Homo sapien
tcccactattagacatgccgcattg

SEQ ID NO: 4728701 - DNA, 25 bp, Homo sapien
tcttgcccagacagacggatggatc

SEQ ID NO: 4728702 - DNA, 25 bp, Homo sapien
tactatcaagggacactcttgccca

SEQ ID NO: 4728703 - DNA, 25 bp, Homo sapien
gtctgaagatcagggctggactgat

SEQ ID NO: 4728704 - DNA, 25 bp, Homo sapien
tcagttttgtgtccagccacgtaac

SEQ ID NO: 4728705 - DNA, 25 bp, Homo sapien
tacgcttttacttgaacagatacaa

SEQ ID NO: 4728706 - DNA, 25 bp, Homo sapien
gtaacattttgttcagctgatacgc

SEQ ID NO: 4728707 - DNA, 25 bp, Homo sapien
tgcttatgttatagctacgcttacg

SEQ ID NO: 4728708 - DNA, 25 bp, Homo sapien
tatagctacgcttacgcttctgcat

SEQ ID NO: 4728709 - DNA, 25 bp, Homo sapien
acaaaaatgttactctacaagtaca

SEQ ID NO: 4728710 - DNA, 25 bp, Homo sapien
tccagtcccacaaatactcagacaa

SEQ ID NO: 4728711 - DNA, 25 bp, Homo sapien
ggaaggtcattgatctgcggcacaa

SEQ ID NO: 4728712 - DNA, 25 bp, Homo sapien
caattagtacattcccaggcaagag

SEQ ID NO: 4728713 - DNA, 25 bp, Homo sapien
taattttcctaagtcggcctggtgc

SEQ ID NO: 4728714 - DNA, 25 bp, Homo sapien
gaactggagcttgctggtcctctga

SEQ ID NO: 4728715 - DNA, 25 bp, Homo sapien
taacaggaagtgctagtgtatggga

SEQ ID NO: 4728716 - DNA, 25 bp, Homo sapien
catgctttgctgtccgctgatgaac

SEQ ID NO: 4728717 - DNA, 25 bp, Homo sapien
gaaggcaacacgactacatgctttg

SEQ ID NO: 4728718 - DNA, 25 bp, Homo sapien
aatgctacatgggtctatcactggg

SEQ ID NO: 4728719 - DNA, 25 bp, Homo sapien
agtgattttaaatgccctgtgaccc

SEQ ID NO: 4728720 - DNA, 25 bp, Homo sapien
tactcttgtactacttatcgctaag

SEQ ID NO: 4728721 - DNA, 25 bp, Homo sapien
gaattttactccctacagcctagtg

SEQ ID NO: 4728722 - DNA, 25 bp, Homo sapien
catcaacatctggtacctggtacaa

SEQ ID NO: 4728723 - DNA, 25 bp, Homo sapien
caagcctgtgccatatagctctgct

SEQ ID NO: 4728724 - DNA, 25 bp, Homo sapien
cactggtgacaaatgtaaactggac

SEQ ID NO: 4728725 - DNA, 25 bp, Homo sapien
agctggatcttacttaccaccatgc

SEQ ID NO: 4728726 - DNA, 25 bp, Homo sapien
taggacctgccttttagaaccacca

SEQ ID NO: 4728727 - DNA, 25 bp, Homo sapien
agtgggacccactgaacaggaattt

SEQ ID NO: 4728728 - DNA, 25 bp, Homo sapien
cagagcagctgcgaccagcctcagt

SEQ ID NO: 4728729 - DNA, 25 bp, Homo sapien
cgaccagcctcagtgggacccactg

SEQ ID NO: 4728730 - DNA, 25 bp, Homo sapien
tgggacccactgaacaggaatttga

SEQ ID NO: 4728731 - DNA, 25 bp, Homo sapien
gagagtggaggaaagaggtattgta

SEQ ID NO: 4728732 - DNA, 25 bp, Homo sapien
tgagagtggaggaaagaggtattgt

SEQ ID NO: 4728733 - DNA, 25 bp, Homo sapien
ctgagagtggaggaaagaggtattg

SEQ ID NO: 4728734 - DNA, 25 bp, Homo sapien
gctccagatgtgtcggctgtcagga

SEQ ID NO: 4728735 - DNA, 25 bp, Homo sapien
tctagtggcactggaataacctgaa

SEQ ID NO: 4728736 - DNA, 25 bp, Homo sapien
ggaagatcgccataacaaccgctga

SEQ ID NO: 4728737 - DNA, 25 bp, Homo sapien
cagcgtatgactagatggccccgaa

SEQ ID NO: 4728738 - DNA, 25 bp, Homo sapien
gcattagggagcaaactacaacatg

SEQ ID NO: 4728739 - DNA, 25 bp, Homo sapien
cacggacttgtgagcattagggagc

SEQ ID NO: 4728740 - DNA, 25 bp, Homo sapien
tgcagcggcctctgcgaatttccgt

SEQ ID NO: 4728741 - DNA, 25 bp, Homo sapien
tcccctgagtggcctctgcgggact

SEQ ID NO: 4728742 - DNA, 25 bp, Homo sapien
aacactcttcttgacaatttcaacc

SEQ ID NO: 4728743 - DNA, 25 bp, Homo sapien
caaagaggaccaagattaacaaatc

SEQ ID NO: 4728744 - DNA, 25 bp, Homo sapien
tgccttcaaagaggaccaagattaa

SEQ ID NO: 4728745 - DNA, 25 bp, Homo sapien
cactcttcttgacaatttcaacctt

SEQ ID NO: 4728746 - DNA, 25 bp, Homo sapien
caagacggtcctgctaatggttccc

SEQ ID NO: 4728747 - DNA, 25 bp, Homo sapien
taatggttcccagattaggatttgg

SEQ ID NO: 4728748 - DNA, 25 bp, Homo sapien
caagtctatggtcattcaaggtaat

SEQ ID NO: 4728749 - DNA, 25 bp, Homo sapien
gaagaccaacggcatggcttcctcc

SEQ ID NO: 4728750 - DNA, 25 bp, Homo sapien
ggcgctgctttcaaaaacaatttgt

SEQ ID NO: 4728751 - DNA, 25 bp, Homo sapien
gcgctgctttcaaaaacaatttgtt

SEQ ID NO: 4728752 - DNA, 25 bp, Homo sapien
gtaggaagttcctatcagtcgggct

SEQ ID NO: 4728753 - DNA, 25 bp, Homo sapien
tcacagcgaactgatgagtaggaag

SEQ ID NO: 4728754 - DNA, 25 bp, Homo sapien
ctgtcagtacttcacagcgaactga

SEQ ID NO: 4728755 - DNA, 25 bp, Homo sapien
tgagtaggaagttcctatcagtcgg

SEQ ID NO: 4728756 - DNA, 25 bp, Homo sapien
acttcaagtgacctactcgcctctg

SEQ ID NO: 4728757 - DNA, 25 bp, Homo sapien
cctaaggcttcatatgccagaggaa

SEQ ID NO: 4728758 - DNA, 25 bp, Homo sapien
ggcacctaatagagtatcacataca

SEQ ID NO: 4728759 - DNA, 25 bp, Homo sapien
catcatagaaattcaaacgcttgtt

SEQ ID NO: 4728760 - DNA, 25 bp, Homo sapien
catctgtaatacctatggcacctaa

SEQ ID NO: 4728761 - DNA, 25 bp, Homo sapien
gttttcattgccaggggaagagtta

SEQ ID NO: 4728762 - DNA, 25 bp, Homo sapien
ttttcattgccaggggaagagttaa

SEQ ID NO: 4728763 - DNA, 25 bp, Homo sapien
ttcattgccaggggaagagttaaaa

SEQ ID NO: 4728764 - DNA, 25 bp, Homo sapien
tcattgccaggggaagagttaaaat

SEQ ID NO: 4728765 - DNA, 25 bp, Homo sapien
acagcttgctatacacagaggcttt

SEQ ID NO: 4728766 - DNA, 25 bp, Homo sapien
gtctgggtacacgtctggctttgga

SEQ ID NO: 4728767 - DNA, 25 bp, Homo sapien
aaaacagcttgctatacacagaggc

SEQ ID NO: 4728768 - DNA, 25 bp, Homo sapien
tgtgtctgggtacacgtctggcttt

SEQ ID NO: 4728769 - DNA, 25 bp, Homo sapien
tcagtcccacaaggactaacttgga

SEQ ID NO: 4728770 - DNA, 25 bp, Homo sapien
tcttcattaactgcggctctctggg

SEQ ID NO: 4728771 - DNA, 25 bp, Homo sapien
taagttgctctgctaatttcagtcc

SEQ ID NO: 4728772 - DNA, 25 bp, Homo sapien
cgtgtggagaactaagcagacctgt

SEQ ID NO: 4728773 - DNA, 25 bp, Homo sapien
gccggtcttggagctgtgcagataa

SEQ ID NO: 4728774 - DNA, 25 bp, Homo sapien
ctgtccgtgggctttattgaaccgc

SEQ ID NO: 4728775 - DNA, 25 bp, Homo sapien
caagatgaaacgagaggtctgggcc

SEQ ID NO: 4728776 - DNA, 25 bp, Homo sapien
tgcggctgcaacatgaaagtacttt

SEQ ID NO: 4728777 - DNA, 25 bp, Homo sapien
tcctcgctgcaaagaagtcgcttct

SEQ ID NO: 4728778 - DNA, 25 bp, Homo sapien
catcaccaggcgaactaattgcacg

SEQ ID NO: 4728779 - DNA, 25 bp, Homo sapien
gacttttaatacagcgcactctggg

SEQ ID NO: 4728780 - DNA, 25 bp, Homo sapien
tgcacttcgaaaagagccgtctctg

SEQ ID NO: 4728781 - DNA, 25 bp, Homo sapien
gccgccggtccctcactcggcggca

SEQ ID NO: 4728782 - DNA, 25 bp, Homo sapien
ccctcactcggcggcaagttgtaaa

SEQ ID NO: 4728783 - DNA, 25 bp, Homo sapien
cggtccctcactcggcggcaagttg

SEQ ID NO: 4728784 - DNA, 25 bp, Homo sapien
cactcggcggcaagttgtaaaagtt

SEQ ID NO: 4728785 - DNA, 25 bp, Homo sapien
ttgagaagccccctctcacgtgcac

SEQ ID NO: 4728786 - DNA, 25 bp, Homo sapien
gagcggggccgaccttgagaagccc

SEQ ID NO: 4728787 - DNA, 25 bp, Homo sapien
accttcgcgcggaagccgcgagcgg

SEQ ID NO: 4728788 - DNA, 25 bp, Homo sapien
tcgcctcagaaacttggggccaagt

SEQ ID NO: 4728789 - DNA, 25 bp, Homo sapien
agcggccgcgcctggaccagcccct

SEQ ID NO: 4728790 - DNA, 25 bp, Homo sapien
ccccgcctcttggtctcctcttagc

SEQ ID NO: 4728791 - DNA, 25 bp, Homo sapien
tcttggtctcctcttagcggccgcg

SEQ ID NO: 4728792 - DNA, 25 bp, Homo sapien
gctggttgtcaagtgcagcccccgc

SEQ ID NO: 4728793 - DNA, 25 bp, Homo sapien
gacagatcagcaattgccaaacaat

SEQ ID NO: 4728794 - DNA, 25 bp, Homo sapien
cgctttggacaagtgacagatcagc

SEQ ID NO: 4728795 - DNA, 25 bp, Homo sapien
tgccaaacaattgtattcacacagt

SEQ ID NO: 4728796 - DNA, 25 bp, Homo sapien
caaacaattgtattcacacagtgca

SEQ ID NO: 4728797 - DNA, 25 bp, Homo sapien
gctgagggacatgtgtatgactgca

SEQ ID NO: 4728798 - DNA, 25 bp, Homo sapien
caaagccccatttatgctgagggac

SEQ ID NO: 4728799 - DNA, 25 bp, Homo sapien
gttgtgtcaaacagagtaccccata

SEQ ID NO: 4728800 - DNA, 25 bp, Homo sapien
caaaagttacctctctcctactggg

SEQ ID NO: 4728801 - DNA, 25 bp, Homo sapien
ctttcagagctaatgggtatcccct

SEQ ID NO: 4728802 - DNA, 25 bp, Homo sapien
tatccccttcaaggaacgttgtgtg

SEQ ID NO: 4728803 - DNA, 25 bp, Homo sapien
caaggaacgttgtgtggcctcatca

SEQ ID NO: 4728804 - DNA, 25 bp, Homo sapien
tgccttcatcctttcagagctaatg

SEQ ID NO: 4728805 - DNA, 25 bp, Homo sapien
tattagctccataaccaaaaatgaa

SEQ ID NO: 4728806 - DNA, 25 bp, Homo sapien
gaattagggtgtcagattgtccgtg

SEQ ID NO: 4728807 - DNA, 25 bp, Homo sapien
taaggcacatcgttattagctccat

SEQ ID NO: 4728808 - DNA, 25 bp, Homo sapien
tgtccgtgttcaggtctcaggagac

SEQ ID NO: 4728809 - DNA, 25 bp, Homo sapien
gatgccctgccgtttggatgaatag

SEQ ID NO: 4728810 - DNA, 25 bp, Homo sapien
caaatatgcgggacggccctgggac

SEQ ID NO: 4728811 - DNA, 25 bp, Homo sapien
cataagaccaatcattctacagctg

SEQ ID NO: 4728812 - DNA, 25 bp, Homo sapien
tacttattgcaaatatgcgggacgg

SEQ ID NO: 4728813 - DNA, 25 bp, Homo sapien
gccgaaagtgaatatgactggcacc

SEQ ID NO: 4728814 - DNA, 25 bp, Homo sapien
gataagaatgctctttctggccgaa

SEQ ID NO: 4728815 - DNA, 25 bp, Homo sapien
gttttgtacccactcttgcctcttc

SEQ ID NO: 4728816 - DNA, 25 bp, Homo sapien
gtgccccaaaacctgcactatgctt

SEQ ID NO: 4728817 - DNA, 25 bp, Homo sapien
ccaaagttattgaattgcttgtcgc

SEQ ID NO: 4728818 - DNA, 25 bp, Homo sapien
ttgcttgtcgcaaccacctggtggg

SEQ ID NO: 4728819 - DNA, 25 bp, Homo sapien
cacctggtgggttggcagttaggtt

SEQ ID NO: 4728820 - DNA, 25 bp, Homo sapien
tgaattgcttgtcgcaaccacctgg

SEQ ID NO: 4728821 - DNA, 25 bp, Homo sapien
ctggtagactttcgaaatccttctt

SEQ ID NO: 4728822 - DNA, 25 bp, Homo sapien
cccaatctggtagactttcgaaatc

SEQ ID NO: 4728823 - DNA, 25 bp, Homo sapien
atctggtagactttcgaaatccttc

SEQ ID NO: 4728824 - DNA, 25 bp, Homo sapien
caatctggtagactttcgaaatcct

SEQ ID NO: 4728825 - DNA, 25 bp, Homo sapien
tccacaatggcccatgctctacttt

SEQ ID NO: 4728826 - DNA, 25 bp, Homo sapien
tcatacagctcgtgaccttggttcc

SEQ ID NO: 4728827 - DNA, 25 bp, Homo sapien
gctcgtgaccttggttccacaatgg

SEQ ID NO: 4728828 - DNA, 25 bp, Homo sapien
tctactttcctgttttcctccatgc

SEQ ID NO: 4728829 - DNA, 25 bp, Homo sapien
acagcagcaagaaaaccaaacccct

SEQ ID NO: 4728830 - DNA, 25 bp, Homo sapien
ctacagcagcaagaaaaccaaaccc

SEQ ID NO: 4728831 - DNA, 25 bp, Homo sapien
cagcagcaagaaaaccaaacccctc

SEQ ID NO: 4728832 - DNA, 25 bp, Homo sapien
tacagcagcaagaaaaccaaacccc

SEQ ID NO: 4728833 - DNA, 25 bp, Homo sapien
gacatggcacactttagctggacga

SEQ ID NO: 4728834 - DNA, 25 bp, Homo sapien
catatcttctggaccagttctccaa

SEQ ID NO: 4728835 - DNA, 25 bp, Homo sapien
ccaaatatgcgtggtgacatggcac

SEQ ID NO: 4728836 - DNA, 25 bp, Homo sapien
gttgttgaaacactcagatacgtgc

SEQ ID NO: 4728837 - DNA, 25 bp, Homo sapien
gctggccttggttgctacagtaata

SEQ ID NO: 4728838 - DNA, 25 bp, Homo sapien
tctatgtactctaagtcactggaca

SEQ ID NO: 4728839 - DNA, 25 bp, Homo sapien
gcctccaaccgcataaaaaatgtag

SEQ ID NO: 4728840 - DNA, 25 bp, Homo sapien
cagtaatatcatctcctggtttgcc

SEQ ID NO: 4728841 - DNA, 25 bp, Homo sapien
gctcagctgcaagggtgattctgtg

SEQ ID NO: 4728842 - DNA, 25 bp, Homo sapien
tctggcctccgatcccactttggag

SEQ ID NO: 4728843 - DNA, 25 bp, Homo sapien
tgggctggtaagttcccggacctga

SEQ ID NO: 4728844 - DNA, 25 bp, Homo sapien
taagttcccggacctgagaaggctg

SEQ ID NO: 4728845 - DNA, 25 bp, Homo sapien
tagatcgttttagacagggcttcca

SEQ ID NO: 4728846 - DNA, 25 bp, Homo sapien
ctagatcgttttagacagggcttcc

SEQ ID NO: 4728847 - DNA, 25 bp, Homo sapien
tcacattgaatatcttgaggagaaa

SEQ ID NO: 4728848 - DNA, 25 bp, Homo sapien
gaacatgcctatgatgccttcaaat

SEQ ID NO: 4728849 - DNA, 25 bp, Homo sapien
tcaggtgatgatgttaagattttca

SEQ ID NO: 4728850 - DNA, 25 bp, Homo sapien
tatgatgtgactgcattatcgaaca

SEQ ID NO: 4728851 - DNA, 25 bp, Homo sapien
gcagccacacacaatgatggtcagt

SEQ ID NO: 4728852 - DNA, 25 bp, Homo sapien
atgtcttcaccgtacacacagcagc

SEQ ID NO: 4728853 - DNA, 25 bp, Homo sapien
tattaggtgcaaaatagccaggtgg

SEQ ID NO: 4728854 - DNA, 25 bp, Homo sapien
tatggcactgaatacaatcccctcc

SEQ ID NO: 4728855 - DNA, 25 bp, Homo sapien
tcactagtatatcaatcaagtactt

SEQ ID NO: 4728856 - DNA, 25 bp, Homo sapien
cacactcactagtatatcaatcaag

SEQ ID NO: 4728857 - DNA, 25 bp, Homo sapien
aaaccacactcactagtatatcaat

SEQ ID NO: 4728858 - DNA, 25 bp, Homo sapien
cactcactagtatatcaatcaagta

SEQ ID NO: 4728859 - DNA, 25 bp, Homo sapien
acagtgacattacctccaactctct

SEQ ID NO: 4728860 - DNA, 25 bp, Homo sapien
tatttaagagttcactgggtttgta

SEQ ID NO: 4728861 - DNA, 25 bp, Homo sapien
tctgatcttatctttagtgtcacca

SEQ ID NO: 4728862 - DNA, 25 bp, Homo sapien
cactgggtttgtatctgatcttatc

SEQ ID NO: 4728863 - DNA, 25 bp, Homo sapien
ccctgccttggcttctgcggcttga

SEQ ID NO: 4728864 - DNA, 25 bp, Homo sapien
tatgcgtactctcgtttcgaccagc

SEQ ID NO: 4728865 - DNA, 25 bp, Homo sapien
cacagccatgtgtaagaggtgccct

SEQ ID NO: 4728866 - DNA, 25 bp, Homo sapien
cagcctggtcctctaatatgcgtac

SEQ ID NO: 4728867 - DNA, 25 bp, Homo sapien
tgcttctgaggcaaatgatgacctt

SEQ ID NO: 4728868 - DNA, 25 bp, Homo sapien
gacgtgagacggcaacaaggcattc

SEQ ID NO: 4728869 - DNA, 25 bp, Homo sapien
tcccagtcaggaagcgagatctttc

SEQ ID NO: 4728870 - DNA, 25 bp, Homo sapien
gctgtgccaatgtaggagaccagga

SEQ ID NO: 4728871 - DNA, 25 bp, Homo sapien
tcacagacccttagctactagtgct

SEQ ID NO: 4728872 - DNA, 25 bp, Homo sapien
tagtgctgcccaattccaagcatgt

SEQ ID NO: 4728873 - DNA, 25 bp, Homo sapien
acagacccttagctactagtgctgc

SEQ ID NO: 4728874 - DNA, 25 bp, Homo sapien
actagtgctgcccaattccaagcat

SEQ ID NO: 4728875 - DNA, 25 bp, Homo sapien
cttgtctggtaatccagggccagat

SEQ ID NO: 4728876 - DNA, 25 bp, Homo sapien
atagcctgttgctccccacaaggat

SEQ ID NO: 4728877 - DNA, 25 bp, Homo sapien
agcctgttgctccccacaaggatga

SEQ ID NO: 4728878 - DNA, 25 bp, Homo sapien
ctcttgtctggtaatccagggccag

SEQ ID NO: 4728879 - DNA, 25 bp, Homo sapien
tccagattttccagctaatgaaaca

SEQ ID NO: 4728880 - DNA, 25 bp, Homo sapien
ttccaaagatcagatccagattttc

SEQ ID NO: 4728881 - DNA, 25 bp, Homo sapien
agctaatgaaacaatgaagtcattt

SEQ ID NO: 4728882 - DNA, 25 bp, Homo sapien
ccttcttccaaagatcagatccaga

SEQ ID NO: 4728883 - DNA, 25 bp, Homo sapien
aatttcctgtgccattgggcacatt

SEQ ID NO: 4728884 - DNA, 25 bp, Homo sapien
aaacccttgagaatttcctgtgcca

SEQ ID NO: 4728885 - DNA, 25 bp, Homo sapien
tgagaatttcctgtgccattgggca

SEQ ID NO: 4728886 - DNA, 25 bp, Homo sapien
agaatttcctgtgccattgggcaca

SEQ ID NO: 4728887 - DNA, 25 bp, Homo sapien
tgtggggttgaatctctctttaatc

SEQ ID NO: 4728888 - DNA, 25 bp, Homo sapien
cagtgtggggttgaatctctcttta

SEQ ID NO: 4728889 - DNA, 25 bp, Homo sapien
tggggttgaatctctctttaatcat

SEQ ID NO: 4728890 - DNA, 25 bp, Homo sapien
agtgtggggttgaatctctctttaa

SEQ ID NO: 4728891 - DNA, 25 bp, Homo sapien
tgctctgagttcagaaagtctagaa

SEQ ID NO: 4728892 - DNA, 25 bp, Homo sapien
gaggctcttataacagatgtccagg

SEQ ID NO: 4728893 - DNA, 25 bp, Homo sapien
cttttcaggtaggatatgctcctgt

SEQ ID NO: 4728894 - DNA, 25 bp, Homo sapien
gaaagtctagcagtttgtgccttgg

SEQ ID NO: 4728895 - DNA, 25 bp, Homo sapien
tactgccaataatggctaggtatgg

SEQ ID NO: 4728896 - DNA, 25 bp, Homo sapien
taatggctaggtatgggtctgacac

SEQ ID NO: 4728897 - DNA, 25 bp, Homo sapien
taggtatgggtctgacactccagtg

SEQ ID NO: 4728898 - DNA, 25 bp, Homo sapien
gccaataatggctaggtatgggtct

SEQ ID NO: 4728899 - DNA, 25 bp, Homo sapien
ccatgaacggagaaaagtcttgtgt

SEQ ID NO: 4728900 - DNA, 25 bp, Homo sapien
tcttttctggcacataggctctgca

SEQ ID NO: 4728901 - DNA, 25 bp, Homo sapien
cacataggctctgcattataatgaa

SEQ ID NO: 4728902 - DNA, 25 bp, Homo sapien
tccattgaaacgtctgctcttggca

SEQ ID NO: 4728903 - DNA, 25 bp, Homo sapien
tactcacatactgatgataatggag

SEQ ID NO: 4728904 - DNA, 25 bp, Homo sapien
caaaatatattcagctggtgggtag

SEQ ID NO: 4728905 - DNA, 25 bp, Homo sapien
gatggttttcggcacctaaattgtc

SEQ ID NO: 4728906 - DNA, 25 bp, Homo sapien
catcttcgcaccagtcaaattttga

SEQ ID NO: 4728907 - DNA, 25 bp, Homo sapien
ttgacggagctatgccatgcccatt

SEQ ID NO: 4728908 - DNA, 25 bp, Homo sapien
gatggctcctattggcttccgggca

SEQ ID NO: 4728909 - DNA, 25 bp, Homo sapien
caactttcaagactgctagactgct

SEQ ID NO: 4728910 - DNA, 25 bp, Homo sapien
gaaatgaggcacaagtctccctttg

SEQ ID NO: 4728911 - DNA, 25 bp, Homo sapien
gctcaccaaaagagatcacatagtt

SEQ ID NO: 4728912 - DNA, 25 bp, Homo sapien
cagtccagctcatagcgtgtggctg

SEQ ID NO: 4728913 - DNA, 25 bp, Homo sapien
tttggcccggcaaaggaccagacca

SEQ ID NO: 4728914 - DNA, 25 bp, Homo sapien
ggctgccagctcaccaaaagagatc

SEQ ID NO: 4728915 - DNA, 25 bp, Homo sapien
gcccagcagcgggatctgggagacg

SEQ ID NO: 4728916 - DNA, 25 bp, Homo sapien
gagcccagcagcgggatctgggaga

SEQ ID NO: 4728917 - DNA, 25 bp, Homo sapien
gcagagcccagcagcgggatctggg

SEQ ID NO: 4728918 - DNA, 25 bp, Homo sapien
ctgcagagcccagcagcgggatctg

SEQ ID NO: 4728919 - DNA, 25 bp, Homo sapien
tcttctgagcaaggcccttaacacc

SEQ ID NO: 4728920 - DNA, 25 bp, Homo sapien
ctctgtgctcctcggagccagcctt

SEQ ID NO: 4728921 - DNA, 25 bp, Homo sapien
gccggacaaagagtgttcattacct

SEQ ID NO: 4728922 - DNA, 25 bp, Homo sapien
ggatcctcttggcttagcacctctc

SEQ ID NO: 4728923 - DNA, 25 bp, Homo sapien
ttggaaggtaaggcaagggaaagca

SEQ ID NO: 4728924 - DNA, 25 bp, Homo sapien
tgctgaagagcttgagtattggaag

SEQ ID NO: 4728925 - DNA, 25 bp, Homo sapien
gaagagcttgagtattggaaggtaa

SEQ ID NO: 4728926 - DNA, 25 bp, Homo sapien
gttgctgaagagcttgagtattgga

SEQ ID NO: 4728927 - DNA, 25 bp, Homo sapien
gtctccctgcatttgttcttccttc

SEQ ID NO: 4728928 - DNA, 25 bp, Homo sapien
tctccctgcatttgttcttccttcc

SEQ ID NO: 4728929 - DNA, 25 bp, Homo sapien
tgtctccctgcatttgttcttcctt

SEQ ID NO: 4728930 - DNA, 25 bp, Homo sapien
cttgtctccctgcatttgttcttcc

SEQ ID NO: 4728931 - DNA, 25 bp, Homo sapien
aacattgattggaaatactctgaga

SEQ ID NO: 4728932 - DNA, 25 bp, Homo sapien
gagaagagtgaaaggcaccttttgt

SEQ ID NO: 4728933 - DNA, 25 bp, Homo sapien
aggtgtcatcgtggacagacatagg

SEQ ID NO: 4728934 - DNA, 25 bp, Homo sapien
agaagagtgaaaggcaccttttgtc

SEQ ID NO: 4728935 - DNA, 25 bp, Homo sapien
gacagacataggaaggatggcttca

SEQ ID NO: 4728936 - DNA, 25 bp, Homo sapien
tattatgctggtgacatacattgtc

SEQ ID NO: 4728937 - DNA, 25 bp, Homo sapien
atgttgtattatgctggtgacatac

SEQ ID NO: 4728938 - DNA, 25 bp, Homo sapien
acatacattgtctcacagggatcat

SEQ ID NO: 4728939 - DNA, 25 bp, Homo sapien
catacattgtctcacagggatcatt

SEQ ID NO: 4728940 - DNA, 25 bp, Homo sapien
ggagactgaaggtctcttgttaact

SEQ ID NO: 4728941 - DNA, 25 bp, Homo sapien
atgttatttgtctcatctggtttct

SEQ ID NO: 4728942 - DNA, 25 bp, Homo sapien
actgaaggtctcttgttaactgtag

SEQ ID NO: 4728943 - DNA, 25 bp, Homo sapien
ataatttcccccagtgtctttgcag

SEQ ID NO: 4728944 - DNA, 25 bp, Homo sapien
aaaggatgcctgttatggggccaca

SEQ ID NO: 4728945 - DNA, 25 bp, Homo sapien
ttcagtgtgccctggtaaattccga

SEQ ID NO: 4728946 - DNA, 25 bp, Homo sapien
cacttcatctagcttgctccctcca

SEQ ID NO: 4728947 - DNA, 25 bp, Homo sapien
gaggggcgaatctccaacttcagtg

SEQ ID NO: 4728948 - DNA, 25 bp, Homo sapien
acagcaccgcctctgctgatggcgg

SEQ ID NO: 4728949 - DNA, 25 bp, Homo sapien
gcaaggagacagcaccgcctctgct

SEQ ID NO: 4728950 - DNA, 25 bp, Homo sapien
ctgctgatggcggtccccaggaaac

SEQ ID NO: 4728951 - DNA, 25 bp, Homo sapien
aaggagacagcaccgcctctgctga

SEQ ID NO: 4728952 - DNA, 25 bp, Homo sapien
cacatcaccctgtggacccaaagaa

SEQ ID NO: 4728953 - DNA, 25 bp, Homo sapien
cactcctcctacaggtaagtagaag

SEQ ID NO: 4728954 - DNA, 25 bp, Homo sapien
tgaagagattaataagggctgttgg

SEQ ID NO: 4728955 - DNA, 25 bp, Homo sapien
taataagggctgttgggagttggaa

SEQ ID NO: 4728956 - DNA, 25 bp, Homo sapien
gattaataagggctgttgggagttg

SEQ ID NO: 4728957 - DNA, 25 bp, Homo sapien
aagagattaataagggctgttggga

SEQ ID NO: 4728958 - DNA, 25 bp, Homo sapien
attagagtgtagtagaggcccttcc

SEQ ID NO: 4728959 - DNA, 25 bp, Homo sapien
cattagagtgtagtagaggcccttc

SEQ ID NO: 4728960 - DNA, 25 bp, Homo sapien
cttaagtcataactgaatatgttta

SEQ ID NO: 4728961 - DNA, 25 bp, Homo sapien
gaaattacttaagtcataactgaat

SEQ ID NO: 4728962 - DNA, 25 bp, Homo sapien
tacttaagtcataactgaatatgtt

SEQ ID NO: 4728963 - DNA, 25 bp, Homo sapien
gtagaaattacttaagtcataactg

SEQ ID NO: 4728964 - DNA, 25 bp, Homo sapien
ctggtgtctggaccattgatggatg

SEQ ID NO: 4728965 - DNA, 25 bp, Homo sapien
tggatgagctaggtctttccaggtc

SEQ ID NO: 4728966 - DNA, 25 bp, Homo sapien
attgatggatgagctaggtctttcc

SEQ ID NO: 4728967 - DNA, 25 bp, Homo sapien
gtgtctggaccattgatggatgagc

SEQ ID NO: 4728968 - DNA, 25 bp, Homo sapien
gttgccagggacatatctccatgcc

SEQ ID NO: 4728969 - DNA, 25 bp, Homo sapien
acagttgccagggacatatctccat

SEQ ID NO: 4728970 - DNA, 25 bp, Homo sapien
ccagggacatatctccatgccaaat

SEQ ID NO: 4728971 - DNA, 25 bp, Homo sapien
gccaatgttgttaatagtattgtac

SEQ ID NO: 4728972 - DNA, 25 bp, Homo sapien
gttgaagttttgatgcaaggttcat

SEQ ID NO: 4728973 - DNA, 25 bp, Homo sapien
aagagttgaagttttgatgcaaggt

SEQ ID NO: 4728974 - DNA, 25 bp, Homo sapien
gagttgaagttttgatgcaaggttc

SEQ ID NO: 4728975 - DNA, 25 bp, Homo sapien
gaaagagttgaagttttgatgcaag

SEQ ID NO: 4728976 - DNA, 25 bp, Homo sapien
aaccacagaaaacaggactctctcc

SEQ ID NO: 4728977 - DNA, 25 bp, Homo sapien
gcaaacaaccacagaaaacaggact

SEQ ID NO: 4728978 - DNA, 25 bp, Homo sapien
gaaaacaggactctctccccaagtc

SEQ ID NO: 4728979 - DNA, 25 bp, Homo sapien
tacttttccaagcaaacaaccacag

SEQ ID NO: 4728980 - DNA, 25 bp, Homo sapien
ccatttcattccaaatgcagctaac

SEQ ID NO: 4728981 - DNA, 25 bp, Homo sapien
agaaaaacccatttcattccaaatg

SEQ ID NO: 4728982 - DNA, 25 bp, Homo sapien
aaaaacccatttcattccaaatgca

SEQ ID NO: 4728983 - DNA, 25 bp, Homo sapien
acccatttcattccaaatgcagcta

SEQ ID NO: 4728984 - DNA, 25 bp, Homo sapien
tctcagcatctgtgttgattaaaga

SEQ ID NO: 4728985 - DNA, 25 bp, Homo sapien
gcccgaggatctgtgaccagcacaa

SEQ ID NO: 4728986 - DNA, 25 bp, Homo sapien
ccttggagtcagaggacgcgatata

SEQ ID NO: 4728987 - DNA, 25 bp, Homo sapien
caaaaactgcttggtctgggttaat

SEQ ID NO: 4728988 - DNA, 25 bp, Homo sapien
cagcaagaaagtgaactgcgcaggc

SEQ ID NO: 4728989 - DNA, 25 bp, Homo sapien
gaactgcgcaggcttcagaaccagt

SEQ ID NO: 4728990 - DNA, 25 bp, Homo sapien
ctctctctgtcttgtgcatgcactt

SEQ ID NO: 4728991 - DNA, 25 bp, Homo sapien
tcagaaccagtacccaaataaagga

SEQ ID NO: 4728992 - DNA, 25 bp, Homo sapien
catgagatatctttcacgttttttg

SEQ ID NO: 4728993 - DNA, 25 bp, Homo sapien
acatgagatatctttcacgtttttt

SEQ ID NO: 4728994 - DNA, 25 bp, Homo sapien
cttagttccctttcatttttgattg

SEQ ID NO: 4728995 - DNA, 25 bp, Homo sapien
tagttccctttcatttttgattgtc

SEQ ID NO: 4728996 - DNA, 25 bp, Homo sapien
atgctgggtcccataccacatccat

SEQ ID NO: 4728997 - DNA, 25 bp, Homo sapien
aacaatgctgggtcccataccacat

SEQ ID NO: 4728998 - DNA, 25 bp, Homo sapien
aatgctgggtcccataccacatcca

SEQ ID NO: 4728999 - DNA, 25 bp, Homo sapien
acaatgctgggtcccataccacatc

SEQ ID NO: 4729000 - DNA, 25 bp, Homo sapien
atgaagtactaatacatgccataac

SEQ ID NO: 4729001 - DNA, 25 bp, Homo sapien
caatggtatattttcagctataaaa

SEQ ID NO: 4729002 - DNA, 25 bp, Homo sapien
attatgctaataaaagaaaacagac

SEQ ID NO: 4729003 - DNA, 25 bp, Homo sapien
actaatacatgccataacatagatg

SEQ ID NO: 4729004 - DNA, 25 bp, Homo sapien
ggcgatggtgacccggacgcagctg

SEQ ID NO: 4729005 - DNA, 25 bp, Homo sapien
ggtccagacggctagagggcatctc

SEQ ID NO: 4729006 - DNA, 25 bp, Homo sapien
tcagcgcgcccatggggtccagacg

SEQ ID NO: 4729007 - DNA, 25 bp, Homo sapien
tagagggcatctcggtagaggaggc

SEQ ID NO: 4729008 - DNA, 25 bp, Homo sapien
tttctcactatcacaggcatgacat

SEQ ID NO: 4729009 - DNA, 25 bp, Homo sapien
ctcactatcacaggcatgacatttt

SEQ ID NO: 4729010 - DNA, 25 bp, Homo sapien
tctcactatcacaggcatgacattt

SEQ ID NO: 4729011 - DNA, 25 bp, Homo sapien
tcactatcacaggcatgacattttc

SEQ ID NO: 4729012 - DNA, 25 bp, Homo sapien
actttcaaatcctctatcttggttc

SEQ ID NO: 4729013 - DNA, 25 bp, Homo sapien
tcaaatcctctatcttggttctcag

SEQ ID NO: 4729014 - DNA, 25 bp, Homo sapien
tttcaaatcctctatcttggttctc

SEQ ID NO: 4729015 - DNA, 25 bp, Homo sapien
gtcactcaaatttagtaattcctct

SEQ ID NO: 4729016 - DNA, 25 bp, Homo sapien
gctggagtttgtacctatgaacact

SEQ ID NO: 4729017 - DNA, 25 bp, Homo sapien
ctgttaagctccttagcagtaatgg

SEQ ID NO: 4729018 - DNA, 25 bp, Homo sapien
tctgttgcatatgtgaggttgcggc

SEQ ID NO: 4729019 - DNA, 25 bp, Homo sapien
caggtgaatagtgcagctgtagttc

SEQ ID NO: 4729020 - DNA, 25 bp, Homo sapien
gatttctgacccctgatctacctgc

SEQ ID NO: 4729021 - DNA, 25 bp, Homo sapien
atttctgacccctgatctacctgca

SEQ ID NO: 4729022 - DNA, 25 bp, Homo sapien
tttctgacccctgatctacctgcat

SEQ ID NO: 4729023 - DNA, 25 bp, Homo sapien
tcctcctgtttggtaatgaaaactc

SEQ ID NO: 4729024 - DNA, 25 bp, Homo sapien
tcctcctcctgtttggtaatgaaaa

SEQ ID NO: 4729025 - DNA, 25 bp, Homo sapien
ttttcctcctcctgtttggtaatga

SEQ ID NO: 4729026 - DNA, 25 bp, Homo sapien
ttcctcctcctgtttggtaatgaaa

SEQ ID NO: 4729027 - DNA, 25 bp, Homo sapien
cctgtcccatgtgtattaagccaac

SEQ ID NO: 4729028 - DNA, 25 bp, Homo sapien
aactgtagctgccagaattatgcca

SEQ ID NO: 4729029 - DNA, 25 bp, Homo sapien
agtagcgtggctgtttggagacccc

SEQ ID NO: 4729030 - DNA, 25 bp, Homo sapien
gcacttttcgtgttgcaagagccat

SEQ ID NO: 4729031 - DNA, 25 bp, Homo sapien
tgctgcatccagctgagtgtgtttt

SEQ ID NO: 4729032 - DNA, 25 bp, Homo sapien
ctgcatccagctgagtgtgttttta

SEQ ID NO: 4729033 - DNA, 25 bp, Homo sapien
ttacaggcacgagctgctgcatcca

SEQ ID NO: 4729034 - DNA, 25 bp, Homo sapien
ggcacgagctgctgcatccagctga

SEQ ID NO: 4729035 - DNA, 25 bp, Homo sapien
tttacccaagtatttaggtgtgcta

SEQ ID NO: 4729036 - DNA, 25 bp, Homo sapien
ggagggctttaggatcaatattttc

SEQ ID NO: 4729037 - DNA, 25 bp, Homo sapien
tatttaggtgtgctaactgactcag

SEQ ID NO: 4729038 - DNA, 25 bp, Homo sapien
caagtatttaggtgtgctaactgac

SEQ ID NO: 4729039 - DNA, 25 bp, Homo sapien
aaattcaaagtattactaggcgcgg

SEQ ID NO: 4729040 - DNA, 25 bp, Homo sapien
gtagccatatttgtaagaacctaga

SEQ ID NO: 4729041 - DNA, 25 bp, Homo sapien
tcaacagggattaaatgggctgggt

SEQ ID NO: 4729042 - DNA, 25 bp, Homo sapien
gtttgagaatatgattcaacaggga

SEQ ID NO: 4729043 - DNA, 25 bp, Homo sapien
gaaggatatagaatttgcagacaac

SEQ ID NO: 4729044 - DNA, 25 bp, Homo sapien
tcatgggaacttgaacaaaattacg

SEQ ID NO: 4729045 - DNA, 25 bp, Homo sapien
tattccattatgaccagaggctagt

SEQ ID NO: 4729046 - DNA, 25 bp, Homo sapien
tgacgttggttttatggtctacata

SEQ ID NO: 4729047 - DNA, 25 bp, Homo sapien
ggcagatacattcagccagctcacg

SEQ ID NO: 4729048 - DNA, 25 bp, Homo sapien
tgttggcgtacacagttgcggtccg

SEQ ID NO: 4729049 - DNA, 25 bp, Homo sapien
gagccatgttgccaagcctaaagac

SEQ ID NO: 4729050 - DNA, 25 bp, Homo sapien
gacaatcctggtgccataaaactgg

SEQ ID NO: 4729051 - DNA, 25 bp, Homo sapien
tagtccatccaagcccataaaaatg

SEQ ID NO: 4729052 - DNA, 25 bp, Homo sapien
atttagtccatccaagcccataaaa

SEQ ID NO: 4729053 - DNA, 25 bp, Homo sapien
ctgcgtgtacaatgtcctcaggctt

SEQ ID NO: 4729054 - DNA, 25 bp, Homo sapien
ctctgcgtgtacaatgtcctcaggc

SEQ ID NO: 4729055 - DNA, 25 bp, Homo sapien
ctggacagcatgcagaattttattt

SEQ ID NO: 4729056 - DNA, 25 bp, Homo sapien
aaaccctgatccagtgtctctggca

SEQ ID NO: 4729057 - DNA, 25 bp, Homo sapien
gaaaccctgatccagtgtctctggc

SEQ ID NO: 4729058 - DNA, 25 bp, Homo sapien
ctgatccagtgtctctggcattcca

SEQ ID NO: 4729059 - DNA, 25 bp, Homo sapien
gaatgaaaaaatttccaccagaggc

SEQ ID NO: 4729060 - DNA, 25 bp, Homo sapien
tcctatcgacattttctgggccgag

SEQ ID NO: 4729061 - DNA, 25 bp, Homo sapien
tattttctactgagacctcgagcag

SEQ ID NO: 4729062 - DNA, 25 bp, Homo sapien
gatttggcatcctgtcaatgcagaa

SEQ ID NO: 4729063 - DNA, 25 bp, Homo sapien
caagggcagtttattggcaggtgag

SEQ ID NO: 4729064 - DNA, 25 bp, Homo sapien
tttaatacacatatagtctgctggg

SEQ ID NO: 4729065 - DNA, 25 bp, Homo sapien
tgcttttctagtcatagccagcttt

SEQ ID NO: 4729066 - DNA, 25 bp, Homo sapien
tgggatgcgcccctcttgtaagtga

SEQ ID NO: 4729067 - DNA, 25 bp, Homo sapien
tcaagaaaataatcgaagctgcttc

SEQ ID NO: 4729068 - DNA, 25 bp, Homo sapien
cttcttctggttctgaaacgtaatt

SEQ ID NO: 4729069 - DNA, 25 bp, Homo sapien
ctggttctgaaacgtaattcaggtc

SEQ ID NO: 4729070 - DNA, 25 bp, Homo sapien
gattgttacttgcactagaattgaa

SEQ ID NO: 4729071 - DNA, 25 bp, Homo sapien
gcagccttttcatcacttcgggggc

SEQ ID NO: 4729072 - DNA, 25 bp, Homo sapien
ttttcatcacttcgggggctgggct

SEQ ID NO: 4729073 - DNA, 25 bp, Homo sapien
ccttttcatcacttcgggggctggg

SEQ ID NO: 4729074 - DNA, 25 bp, Homo sapien
gccttttcatcacttcgggggctgg

SEQ ID NO: 4729075 - DNA, 25 bp, Homo sapien
tgattcctgtctacttctccaagta

SEQ ID NO: 4729076 - DNA, 25 bp, Homo sapien
cactgagtaaaaggtacgaatgtcc

SEQ ID NO: 4729077 - DNA, 25 bp, Homo sapien
tgcctagagtatgttgagaggcccc

SEQ ID NO: 4729078 - DNA, 25 bp, Homo sapien
tggaaacctttagaatgcagatgcc

SEQ ID NO: 4729079 - DNA, 25 bp, Homo sapien
tctgctcaaagctgtaggacttcct

SEQ ID NO: 4729080 - DNA, 25 bp, Homo sapien
cttctccagtccctgggcatgcagt

SEQ ID NO: 4729081 - DNA, 25 bp, Homo sapien
ctccaaggtacggtagctcttatct

SEQ ID NO: 4729082 - DNA, 25 bp, Homo sapien
taggacttcctattcctgccaccag

SEQ ID NO: 4729083 - DNA, 25 bp, Homo sapien
cattgtctgtgatccgttagcccca

SEQ ID NO: 4729084 - DNA, 25 bp, Homo sapien
tagccccatgctctttgacgtgatt

SEQ ID NO: 4729085 - DNA, 25 bp, Homo sapien
cggatggctacatggtactttgaag

SEQ ID NO: 4729086 - DNA, 25 bp, Homo sapien
ttagtgcaggcacatcggatggcta

SEQ ID NO: 4729087 - DNA, 25 bp, Homo sapien
aagatccactggactgctgacggtg

SEQ ID NO: 4729088 - DNA, 25 bp, Homo sapien
attgctgggcacaagcatgccttta

SEQ ID NO: 4729089 - DNA, 25 bp, Homo sapien
caagtgcttcgacctctgagataaa

SEQ ID NO: 4729090 - DNA, 25 bp, Homo sapien
gaaatcatttctagagtgaagctaa

SEQ ID NO: 4729091 - DNA, 25 bp, Homo sapien
gcacagctggctccgattctgatgt

SEQ ID NO: 4729092 - DNA, 25 bp, Homo sapien
acagctggctccgattctgatgttt

SEQ ID NO: 4729093 - DNA, 25 bp, Homo sapien
agcacagctggctccgattctgatg

SEQ ID NO: 4729094 - DNA, 25 bp, Homo sapien
agctggctccgattctgatgttttc

SEQ ID NO: 4729095 - DNA, 25 bp, Homo sapien
cttggtgtggtgcttgtgaagagag

SEQ ID NO: 4729096 - DNA, 25 bp, Homo sapien
catgaagtaaggatgggtgaagcac

SEQ ID NO: 4729097 - DNA, 25 bp, Homo sapien
tccttgttacccagtgcatgaagta

SEQ ID NO: 4729098 - DNA, 25 bp, Homo sapien
agccatgctgcttaatttctccttg

SEQ ID NO: 4729099 - DNA, 25 bp, Homo sapien
gaatggtaatgacccaggtcagttt

SEQ ID NO: 4729100 - DNA, 25 bp, Homo sapien
tactaaggcgtggtcttcaagggcg

SEQ ID NO: 4729101 - DNA, 25 bp, Homo sapien
cagttttagtgggtaagaggatgtc

SEQ ID NO: 4729102 - DNA, 25 bp, Homo sapien
ctgacagagcacttggtgaatggta

SEQ ID NO: 4729103 - DNA, 25 bp, Homo sapien
cttgcttcgatggtccatggctgta

SEQ ID NO: 4729104 - DNA, 25 bp, Homo sapien
ttcgatggtccatggctgtaccagt

SEQ ID NO: 4729105 - DNA, 25 bp, Homo sapien
ctaatcttgcttcgatggtccatgg

SEQ ID NO: 4729106 - DNA, 25 bp, Homo sapien
atggctgtaccagttcagtttcttc

SEQ ID NO: 4729107 - DNA, 25 bp, Homo sapien
tgaagtgaagctggatatcctttaa

SEQ ID NO: 4729108 - DNA, 25 bp, Homo sapien
aagtgaagctggatatcctttaact

SEQ ID NO: 4729109 - DNA, 25 bp, Homo sapien
gaagtgaagctggatatcctttaac

SEQ ID NO: 4729110 - DNA, 25 bp, Homo sapien
agtgaagctggatatcctttaacta

SEQ ID NO: 4729111 - DNA, 25 bp, Homo sapien
tgatccgctctttcactgatcccag

SEQ ID NO: 4729112 - DNA, 25 bp, Homo sapien
tgtgtcacaccgctgggggaatggg

SEQ ID NO: 4729113 - DNA, 25 bp, Homo sapien
aggtgatccgctctttcactgatcc

SEQ ID NO: 4729114 - DNA, 25 bp, Homo sapien
tgcttctgtgtcacaccgctggggg

SEQ ID NO: 4729115 - DNA, 25 bp, Homo sapien
tacgatacgtctgaatgttgccagg

SEQ ID NO: 4729116 - DNA, 25 bp, Homo sapien
gttgccaggtgtagaagatgtgtcc

SEQ ID NO: 4729117 - DNA, 25 bp, Homo sapien
gctagctggcgaggttcagaaagta

SEQ ID NO: 4729118 - DNA, 25 bp, Homo sapien
gatgtgtcctgtccataggaggagc

SEQ ID NO: 4729119 - DNA, 25 bp, Homo sapien
tggttcatcctgtgtgaatgggcag

SEQ ID NO: 4729120 - DNA, 25 bp, Homo sapien
tattctggttcccttggtgggagca

SEQ ID NO: 4729121 - DNA, 25 bp, Homo sapien
cagaggccagatagtccacatctgt

SEQ ID NO: 4729122 - DNA, 25 bp, Homo sapien
taggtgcccctttaacattggttca

SEQ ID NO: 4729123 - DNA, 25 bp, Homo sapien
ttgtcctttacttcagtcttcccca

SEQ ID NO: 4729124 - DNA, 25 bp, Homo sapien
ctccttgtcctttacttcagtcttc

SEQ ID NO: 4729125 - DNA, 25 bp, Homo sapien
cacagcagatggagcctgtgggagc

SEQ ID NO: 4729126 - DNA, 25 bp, Homo sapien
acagcagatggagcctgtgggagcc

SEQ ID NO: 4729127 - DNA, 25 bp, Homo sapien
gggatatgagcccatgtgagtgctt

SEQ ID NO: 4729128 - DNA, 25 bp, Homo sapien
ttttattgcctccatatgtcaaggg

SEQ ID NO: 4729129 - DNA, 25 bp, Homo sapien
ggtctgggacgggtctgacctccac

SEQ ID NO: 4729130 - DNA, 25 bp, Homo sapien
ctttcagattgctctggcctgaggc

SEQ ID NO: 4729131 - DNA, 25 bp, Homo sapien
acatttctgaccacattgttcccct

SEQ ID NO: 4729132 - DNA, 25 bp, Homo sapien
caagtccatcttctatacgcaacca

SEQ ID NO: 4729133 - DNA, 25 bp, Homo sapien
cccctttaaacacttggatgatgct

SEQ ID NO: 4729134 - DNA, 25 bp, Homo sapien
tctttgacttgacctactagccagc

SEQ ID NO: 4729135 - DNA, 25 bp, Homo sapien
gtatctttgtttcctcattcagcca

SEQ ID NO: 4729136 - DNA, 25 bp, Homo sapien
tttggaaagtatctttgtttcctca

SEQ ID NO: 4729137 - DNA, 25 bp, Homo sapien
ctggatttttggaaagtatctttgt

SEQ ID NO: 4729138 - DNA, 25 bp, Homo sapien
tctttgtttcctcattcagccacat

SEQ ID NO: 4729139 - DNA, 25 bp, Homo sapien
ggacaagtacagttctgatacctga

SEQ ID NO: 4729140 - DNA, 25 bp, Homo sapien
cgtttgattcagcataagcctgcat

SEQ ID NO: 4729141 - DNA, 25 bp, Homo sapien
tacctgagactgtgcgaagaaagca

SEQ ID NO: 4729142 - DNA, 25 bp, Homo sapien
cattactctgcgtatatgtttcatc

SEQ ID NO: 4729143 - DNA, 25 bp, Homo sapien
gtaagacagttaatcagcattattg

SEQ ID NO: 4729144 - DNA, 25 bp, Homo sapien
tgtgagagggactgaaaagaaattc

SEQ ID NO: 4729145 - DNA, 25 bp, Homo sapien
tattaaagccagagcggtaattcca

SEQ ID NO: 4729146 - DNA, 25 bp, Homo sapien
cattatgaggaattgggaagaaatc

SEQ ID NO: 4729147 - DNA, 25 bp, Homo sapien
taacgtgctgcttccgatgtgccac

SEQ ID NO: 4729148 - DNA, 25 bp, Homo sapien
catgaaagtcctgttaggtatgcag

SEQ ID NO: 4729149 - DNA, 25 bp, Homo sapien
cacctgcagtagtggatcatgtgga

SEQ ID NO: 4729150 - DNA, 25 bp, Homo sapien
tcatgtggagtgaaaggcaaatctt

SEQ ID NO: 4729151 - DNA, 25 bp, Homo sapien
actctgggtggtggttcgtggaaga

SEQ ID NO: 4729152 - DNA, 25 bp, Homo sapien
gactagttatgagccccttggttaa

SEQ ID NO: 4729153 - DNA, 25 bp, Homo sapien
cataccagcaatttctaggcccagc

SEQ ID NO: 4729154 - DNA, 25 bp, Homo sapien
aagagacttagagtgctgcaaggcc

SEQ ID NO: 4729155 - DNA, 25 bp, Homo sapien
tgtttttccaactttgctgacgaca

SEQ ID NO: 4729156 - DNA, 25 bp, Homo sapien
gcgctagatttgagtctgtgctgac

SEQ ID NO: 4729157 - DNA, 25 bp, Homo sapien
cattcgtttacgctttgctttccgc

SEQ ID NO: 4729158 - DNA, 25 bp, Homo sapien
tttgctgacgacattaaagatgcgc

SEQ ID NO: 4729159 - DNA, 25 bp, Homo sapien
gggagagggagcatatttgggtcca

SEQ ID NO: 4729160 - DNA, 25 bp, Homo sapien
taggccaccataagtatgaatataa

SEQ ID NO: 4729161 - DNA, 25 bp, Homo sapien
ccaaaaaatgacacagataggccac

SEQ ID NO: 4729162 - DNA, 25 bp, Homo sapien
cacagataggccaccataagtatga

SEQ ID NO: 4729163 - DNA, 25 bp, Homo sapien
tttgctggttctcaagcacctcctg

SEQ ID NO: 4729164 - DNA, 25 bp, Homo sapien
ggctatgcctcaattcaccacagag

SEQ ID NO: 4729165 - DNA, 25 bp, Homo sapien
tgcttatgcattgtccactgagtaa

SEQ ID NO: 4729166 - DNA, 25 bp, Homo sapien
cctcctgatggttgttagaattccc

SEQ ID NO: 4729167 - DNA, 25 bp, Homo sapien
ctgacattaatcgtagatgtaacat

SEQ ID NO: 4729168 - DNA, 25 bp, Homo sapien
ctcctatcaagagcacttctcattt

SEQ ID NO: 4729169 - DNA, 25 bp, Homo sapien
tttctgacattaatcgtagatgtaa

SEQ ID NO: 4729170 - DNA, 25 bp, Homo sapien
tctcctatcaagagcacttctcatt

SEQ ID NO: 4729171 - DNA, 25 bp, Homo sapien
caggtggtaccattccagtgtctta

SEQ ID NO: 4729172 - DNA, 25 bp, Homo sapien
tcctcaagagggcagactaaaatac

SEQ ID NO: 4729173 - DNA, 25 bp, Homo sapien
gaagatcccaggaaagttggaccta

SEQ ID NO: 4729174 - DNA, 25 bp, Homo sapien
gccggtcctgcagcctaataaatag

SEQ ID NO: 4729175 - DNA, 25 bp, Homo sapien
ctgaagaagcctgttgagtcagctc

SEQ ID NO: 4729176 - DNA, 25 bp, Homo sapien
tgaagaagcctgttgagtcagctca

SEQ ID NO: 4729177 - DNA, 25 bp, Homo sapien
gaagaagcctgttgagtcagctcac

SEQ ID NO: 4729178 - DNA, 25 bp, Homo sapien
cccagtgctgccagagtggtgggag

SEQ ID NO: 4729179 - DNA, 25 bp, Homo sapien
agtccccagtgctgccagagtggtg

SEQ ID NO: 4729180 - DNA, 25 bp, Homo sapien
catctaagaagtccccagtgctgcc

SEQ ID NO: 4729181 - DNA, 25 bp, Homo sapien
gtccccagtgctgccagagtggtgg

SEQ ID NO: 4729182 - DNA, 25 bp, Homo sapien
tggccaccactgctgttgcatcctc

SEQ ID NO: 4729183 - DNA, 25 bp, Homo sapien
ttgtggaagcatgcaccaatactgt

SEQ ID NO: 4729184 - DNA, 25 bp, Homo sapien
tctgtgcctgtttgagtcctgctgg

SEQ ID NO: 4729185 - DNA, 25 bp, Homo sapien
ccggggcccaaggtttctgtgcctg

SEQ ID NO: 4729186 - DNA, 25 bp, Homo sapien
ctaaagttaattaactctatctcag

SEQ ID NO: 4729187 - DNA, 25 bp, Homo sapien
tatctggacgcaatgctggttgcca

SEQ ID NO: 4729188 - DNA, 25 bp, Homo sapien
caggaactgcagttgggccaatgct

SEQ ID NO: 4729189 - DNA, 25 bp, Homo sapien
caaactgactgttttatctcagcct

SEQ ID NO: 4729190 - DNA, 25 bp, Homo sapien
tagtgatctctaagtttaccattgc

SEQ ID NO: 4729191 - DNA, 25 bp, Homo sapien
attgcaacagggcagtgcttgactc

SEQ ID NO: 4729192 - DNA, 25 bp, Homo sapien
ttaccattgccaattgcaacagggc

SEQ ID NO: 4729193 - DNA, 25 bp, Homo sapien
gtcctgcacacttagtgatctctaa

SEQ ID NO: 4729194 - DNA, 25 bp, Homo sapien
ctccctggtgttaacaaccttgctt

SEQ ID NO: 4729195 - DNA, 25 bp, Homo sapien
cctatggtatcagatgtcacacaga

SEQ ID NO: 4729196 - DNA, 25 bp, Homo sapien
ggccccaactccctaaatgcctgca

SEQ ID NO: 4729197 - DNA, 25 bp, Homo sapien
aaatgcctgcaggtcactccgttca

SEQ ID NO: 4729198 - DNA, 25 bp, Homo sapien
gtcacacagaattcatgggggcagg

SEQ ID NO: 4729199 - DNA, 25 bp, Homo sapien
ctgaatcctggacttgtattgaagg

SEQ ID NO: 4729200 - DNA, 25 bp, Homo sapien
ctcttaggcttgaatgttcattttg

SEQ ID NO: 4729201 - DNA, 25 bp, Homo sapien
ggcttgaatgttcattttgagaggg

SEQ ID NO: 4729202 - DNA, 25 bp, Homo sapien
tgaatcctggacttgtattgaaggg

SEQ ID NO: 4729203 - DNA, 25 bp, Homo sapien
ctgtccaggtccgactccacaagaa

SEQ ID NO: 4729204 - DNA, 25 bp, Homo sapien
tctgcttttccagtcctgcctctgt

SEQ ID NO: 4729205 - DNA, 25 bp, Homo sapien
tctttgtctcacatcgcctctgctg

SEQ ID NO: 4729206 - DNA, 25 bp, Homo sapien
tctgctgcttttgttccctgctctt

SEQ ID NO: 4729207 - DNA, 25 bp, Homo sapien
tgaggggtccctgattggtgctcag

SEQ ID NO: 4729208 - DNA, 25 bp, Homo sapien
gctcagggccaataacgataagggc

SEQ ID NO: 4729209 - DNA, 25 bp, Homo sapien
tcagggccaataacgataagggctt

SEQ ID NO: 4729210 - DNA, 25 bp, Homo sapien
agggccaataacgataagggctttg

SEQ ID NO: 4729211 - DNA, 25 bp, Homo sapien
atctggtgggctggtcaggtgttca

SEQ ID NO: 4729212 - DNA, 25 bp, Homo sapien
ggactatccagtcgcacaacaccat

SEQ ID NO: 4729213 - DNA, 25 bp, Homo sapien
tgagaattctcttgggcagatctgg

SEQ ID NO: 4729214 - DNA, 25 bp, Homo sapien
tcaggtgttcatggactatccagtc

SEQ ID NO: 4729215 - DNA, 25 bp, Homo sapien
ggagtgccttcctctagtcacaagg

SEQ ID NO: 4729216 - DNA, 25 bp, Homo sapien
gcttgggctccaacatttgagttgc

SEQ ID NO: 4729217 - DNA, 25 bp, Homo sapien
tgcatgggaacagcgtgtggacaaa

SEQ ID NO: 4729218 - DNA, 25 bp, Homo sapien
tttgagttgctgaagcccaacgaag

SEQ ID NO: 4729219 - DNA, 25 bp, Homo sapien
tatccaagatcaaccttatattcca

SEQ ID NO: 4729220 - DNA, 25 bp, Homo sapien
gcagttctctaagggagggatccat

SEQ ID NO: 4729221 - DNA, 25 bp, Homo sapien
ttcctccagaattaactgagcttct

SEQ ID NO: 4729222 - DNA, 25 bp, Homo sapien
aagatcaaccttatattccaatgtc

SEQ ID NO: 4729223 - DNA, 25 bp, Homo sapien
ggaggaggcctgaaactgtacatgc

SEQ ID NO: 4729224 - DNA, 25 bp, Homo sapien
tagcttaacccaaaagatgccaagg

SEQ ID NO: 4729225 - DNA, 25 bp, Homo sapien
taacgctttttggacgggctctctg

SEQ ID NO: 4729226 - DNA, 25 bp, Homo sapien
gaggagctagatgtagtcccagacc

SEQ ID NO: 4729227 - DNA, 25 bp, Homo sapien
ttgctgctccgttggaaacgcatct

SEQ ID NO: 4729228 - DNA, 25 bp, Homo sapien
ttggaaacgcatctgcctggaacat

SEQ ID NO: 4729229 - DNA, 25 bp, Homo sapien
atgccttgctgctccgttggaaacg

SEQ ID NO: 4729230 - DNA, 25 bp, Homo sapien
ccttgctgctccgttggaaacgcat

SEQ ID NO: 4729231 - DNA, 25 bp, Homo sapien
ttagagtcaaccattccccatcgtg

SEQ ID NO: 4729232 - DNA, 25 bp, Homo sapien
cgtgcattccccttcgatgatgtaa

SEQ ID NO: 4729233 - DNA, 25 bp, Homo sapien
aaagtcgttcgggtgtgcgaagcca

SEQ ID NO: 4729234 - DNA, 25 bp, Homo sapien
aaaatagccatccatacaaccgtgc

SEQ ID NO: 4729235 - DNA, 25 bp, Homo sapien
tactgcttgtacgttttatgaagaa

SEQ ID NO: 4729236 - DNA, 25 bp, Homo sapien
taataatcattgtcatactgcttgt

SEQ ID NO: 4729237 - DNA, 25 bp, Homo sapien
ttatgaagaatgactattgtgatgt

SEQ ID NO: 4729238 - DNA, 25 bp, Homo sapien
gaagaatgactattgtgatgtttct

SEQ ID NO: 4729239 - DNA, 25 bp, Homo sapien
cattcttcccgactccacaggatag

SEQ ID NO: 4729240 - DNA, 25 bp, Homo sapien
tcttcccgactccacaggataggag

SEQ ID NO: 4729241 - DNA, 25 bp, Homo sapien
ggataggagcagaaattcgagcccg

SEQ ID NO: 4729242 - DNA, 25 bp, Homo sapien
gggtgctgcttttgtgcacagtttg

SEQ ID NO: 4729243 - DNA, 25 bp, Homo sapien
ttcaattgtattgaggagctttcga

SEQ ID NO: 4729244 - DNA, 25 bp, Homo sapien
aggagctttcgagattttccatttt

SEQ ID NO: 4729245 - DNA, 25 bp, Homo sapien
gaattcagtctggtgggtgaggtgg

SEQ ID NO: 4729246 - DNA, 25 bp, Homo sapien
agaattcagtctggtgggtgaggtg

SEQ ID NO: 4729247 - DNA, 25 bp, Homo sapien
tctgtttttagctgccactgttaat

SEQ ID NO: 4729248 - DNA, 25 bp, Homo sapien
tggcaattccagggcggttggccac

SEQ ID NO: 4729249 - DNA, 25 bp, Homo sapien
ggcaattccagggcggttggccacc

SEQ ID NO: 4729250 - DNA, 25 bp, Homo sapien
atgtagggtgtttggttctgtgagg

SEQ ID NO: 4729251 - DNA, 25 bp, Homo sapien
aatgtagggtgtttggttctgtgag

SEQ ID NO: 4729252 - DNA, 25 bp, Homo sapien
gaatgtagggtgtttggttctgtga

SEQ ID NO: 4729253 - DNA, 25 bp, Homo sapien
ctgaatgtagggtgtttggttctgt

SEQ ID NO: 4729254 - DNA, 25 bp, Homo sapien
agcaggtaccacccctgcttgctgc

SEQ ID NO: 4729255 - DNA, 25 bp, Homo sapien
tcgccaccgcctgcatggatgggct

SEQ ID NO: 4729256 - DNA, 25 bp, Homo sapien
caaatatctccccaacctcgccacc

SEQ ID NO: 4729257 - DNA, 25 bp, Homo sapien
ttgccagaaattggcctgctttact

SEQ ID NO: 4729258 - DNA, 25 bp, Homo sapien
ggcttttggtctgagggtagcatgt

SEQ ID NO: 4729259 - DNA, 25 bp, Homo sapien
tctgagggtagcatgtttgggttgg

SEQ ID NO: 4729260 - DNA, 25 bp, Homo sapien
ccatgtggcttttggtctgagggta

SEQ ID NO: 4729261 - DNA, 25 bp, Homo sapien
cttttggtctgagggtagcatgttt

SEQ ID NO: 4729262 - DNA, 25 bp, Homo sapien
ttctctgcagccctaactgttgtca

SEQ ID NO: 4729263 - DNA, 25 bp, Homo sapien
ctaactgttgtcaacctgtctgctg

SEQ ID NO: 4729264 - DNA, 25 bp, Homo sapien
tgggtgagatccttgctccactggc

SEQ ID NO: 4729265 - DNA, 25 bp, Homo sapien
tggccctccgctagccagtgtgtga

SEQ ID NO: 4729266 - DNA, 25 bp, Homo sapien
attagaaacaataagctgttttttg

SEQ ID NO: 4729267 - DNA, 25 bp, Homo sapien
agactactcagcttagaaacattag

SEQ ID NO: 4729268 - DNA, 25 bp, Homo sapien
tagaaacaataagctgttttttgaa

SEQ ID NO: 4729269 - DNA, 25 bp, Homo sapien
actactcagcttagaaacattagaa

SEQ ID NO: 4729270 - DNA, 25 bp, Homo sapien
agaatctttgaggaactctgggatt

SEQ ID NO: 4729271 - DNA, 25 bp, Homo sapien
ttgaggaactctgggattggtgacc

SEQ ID NO: 4729272 - DNA, 25 bp, Homo sapien
tctttgaggaactctgggattggtg

SEQ ID NO: 4729273 - DNA, 25 bp, Homo sapien
aatctttgaggaactctgggattgg

SEQ ID NO: 4729274 - DNA, 25 bp, Homo sapien
tcccaacacctgtggagtttcagca

SEQ ID NO: 4729275 - DNA, 25 bp, Homo sapien
gctggcaccactccaaggtctatta

SEQ ID NO: 4729276 - DNA, 25 bp, Homo sapien
agaatttgtactttggcctgcacca

SEQ ID NO: 4729277 - DNA, 25 bp, Homo sapien
gctctgaaactcatgtgcccttgct

SEQ ID NO: 4729278 - DNA, 25 bp, Homo sapien
gaggtcttctgtggtaaatgccgtc

SEQ ID NO: 4729279 - DNA, 25 bp, Homo sapien
cttgtagtgctttttgaagtggctg

SEQ ID NO: 4729280 - DNA, 25 bp, Homo sapien
gctgtaagaccttctttggaggtct

SEQ ID NO: 4729281 - DNA, 25 bp, Homo sapien
ttttgcagagagatgatcttagtct

SEQ ID NO: 4729282 - DNA, 25 bp, Homo sapien
gggactccctctctatttgcctgtg

SEQ ID NO: 4729283 - DNA, 25 bp, Homo sapien
tctctatttgcctgtggccctttaa

SEQ ID NO: 4729284 - DNA, 25 bp, Homo sapien
ctgtggccctttaatttgaaggcct

SEQ ID NO: 4729285 - DNA, 25 bp, Homo sapien
ggggtgaaaatgagcccactctggg

SEQ ID NO: 4729286 - DNA, 25 bp, Homo sapien
ctaagaaaatgatcacgagcactgc

SEQ ID NO: 4729287 - DNA, 25 bp, Homo sapien
aaaatgatcacgagcactgctgagt

SEQ ID NO: 4729288 - DNA, 25 bp, Homo sapien
taactaagaaaatgatcacgagcac

SEQ ID NO: 4729289 - DNA, 25 bp, Homo sapien
tcacgagcactgctgagttgtacat

SEQ ID NO: 4729290 - DNA, 25 bp, Homo sapien
gaaggtaggaatcaagtttaatgtg

SEQ ID NO: 4729291 - DNA, 25 bp, Homo sapien
caagtttaatgtgtctagcacagac

SEQ ID NO: 4729292 - DNA, 25 bp, Homo sapien
tcaagtttaatgtgtctagcacaga

SEQ ID NO: 4729293 - DNA, 25 bp, Homo sapien
tctatgcgtgtgacaatctcttttt

SEQ ID NO: 4729294 - DNA, 25 bp, Homo sapien
tgctgatggtcttattggtggtgtc

SEQ ID NO: 4729295 - DNA, 25 bp, Homo sapien
gtccatattgcttcccagatctggg

SEQ ID NO: 4729296 - DNA, 25 bp, Homo sapien
tttccctccgattttgacagtttga

SEQ ID NO: 4729297 - DNA, 25 bp, Homo sapien
gcaccacgttgtaattacttttgga

SEQ ID NO: 4729298 - DNA, 25 bp, Homo sapien
cagggcagtgaacacaacctggtat

SEQ ID NO: 4729299 - DNA, 25 bp, Homo sapien
taatggcagtagcagatgcatcagg

SEQ ID NO: 4729300 - DNA, 25 bp, Homo sapien
tttccccagatgataagcaccacgt

SEQ ID NO: 4729301 - DNA, 25 bp, Homo sapien
gctggtgcattacctgcaattctca

SEQ ID NO: 4729302 - DNA, 25 bp, Homo sapien
tgcagctggtgcattacctgcaatt

SEQ ID NO: 4729303 - DNA, 25 bp, Homo sapien
cagctggtgcattacctgcaattct

SEQ ID NO: 4729304 - DNA, 25 bp, Homo sapien
tctgcagctggtgcattacctgcaa

SEQ ID NO: 4729305 - DNA, 25 bp, Homo sapien
ttatctcgttgggtggagttgtaag

SEQ ID NO: 4729306 - DNA, 25 bp, Homo sapien
tgcagaagggtgtagcacacatctg

SEQ ID NO: 4729307 - DNA, 25 bp, Homo sapien
cagaagggtgtagcacacatctggc

SEQ ID NO: 4729308 - DNA, 25 bp, Homo sapien
ctagtaggttatctcgttgggtgga

SEQ ID NO: 4729309 - DNA, 25 bp, Homo sapien
aaagaacaaccgctgtattaattat

SEQ ID NO: 4729310 - DNA, 25 bp, Homo sapien
accgctgtattaattatcataagga

SEQ ID NO: 4729311 - DNA, 25 bp, Homo sapien
gaacaaccgctgtattaattatcat

SEQ ID NO: 4729312 - DNA, 25 bp, Homo sapien
caaccgctgtattaattatcataag

SEQ ID NO: 4729313 - DNA, 25 bp, Homo sapien
ctatcaagccctttgctgtgatgtc

SEQ ID NO: 4729314 - DNA, 25 bp, Homo sapien
tgttttatctcctggatgcctagaa

SEQ ID NO: 4729315 - DNA, 25 bp, Homo sapien
gactttgtgtcttataagtgaggtg

SEQ ID NO: 4729316 - DNA, 25 bp, Homo sapien
tataagtgaggtgacctatcaagcc

SEQ ID NO: 4729317 - DNA, 25 bp, Homo sapien
tgtctctcctatggacccacagtca

SEQ ID NO: 4729318 - DNA, 25 bp, Homo sapien
cctatggacccacagtcagaggaag

SEQ ID NO: 4729319 - DNA, 25 bp, Homo sapien
ctctcctatggacccacagtcagag

SEQ ID NO: 4729320 - DNA, 25 bp, Homo sapien
tcctatggacccacagtcagaggaa

SEQ ID NO: 4729321 - DNA, 25 bp, Homo sapien
ctgagcccagtttcttgacatccac

SEQ ID NO: 4729322 - DNA, 25 bp, Homo sapien
gagcccagtttcttgacatccacaa

SEQ ID NO: 4729323 - DNA, 25 bp, Homo sapien
tgagcccagtttcttgacatccaca

SEQ ID NO: 4729324 - DNA, 25 bp, Homo sapien
tctgagcccagtttcttgacatcca

SEQ ID NO: 4729325 - DNA, 25 bp, Homo sapien
cttcagagtaagaaggttccttcca

SEQ ID NO: 4729326 - DNA, 25 bp, Homo sapien
ctagaattacaagggtagggcagca

SEQ ID NO: 4729327 - DNA, 25 bp, Homo sapien
ttccccagtgttagcattcagagtt

SEQ ID NO: 4729328 - DNA, 25 bp, Homo sapien
caatcgaagagagttgccggtatgg

SEQ ID NO: 4729329 - DNA, 25 bp, Homo sapien
gcattccaagcaggatcaagaacat

SEQ ID NO: 4729330 - DNA, 25 bp, Homo sapien
caccaactcagatccacttttatga

SEQ ID NO: 4729331 - DNA, 25 bp, Homo sapien
cctgtggccagtcagaagagtagct

SEQ ID NO: 4729332 - DNA, 25 bp, Homo sapien
ggtggtggcttctaacagatggccc

SEQ ID NO: 4729333 - DNA, 25 bp, Homo sapien
tcagggtagtgtgctcgaatcctag

SEQ ID NO: 4729334 - DNA, 25 bp, Homo sapien
ccctcagggtagtgtgctcgaatcc

SEQ ID NO: 4729335 - DNA, 25 bp, Homo sapien
ggtagtgtgctcgaatcctagaaag

SEQ ID NO: 4729336 - DNA, 25 bp, Homo sapien
agtgtgctcgaatcctagaaagttg

SEQ ID NO: 4729337 - DNA, 25 bp, Homo sapien
gtgctgaggagtccgaactgctctc

SEQ ID NO: 4729338 - DNA, 25 bp, Homo sapien
tgctgaggagtccgaactgctctca

SEQ ID NO: 4729339 - DNA, 25 bp, Homo sapien
tgtgctgaggagtccgaactgctct

SEQ ID NO: 4729340 - DNA, 25 bp, Homo sapien
caccctccttcaaactctcctctct

SEQ ID NO: 4729341 - DNA, 25 bp, Homo sapien
caaactctctaaagccaccctcctt

SEQ ID NO: 4729342 - DNA, 25 bp, Homo sapien
ccaccctccttcaaactctcctctc

SEQ ID NO: 4729343 - DNA, 25 bp, Homo sapien
tctaattcccaaaccaaactctcta

SEQ ID NO: 4729344 - DNA, 25 bp, Homo sapien
tgccacagcactatgcattccctga

SEQ ID NO: 4729345 - DNA, 25 bp, Homo sapien
gccacagcactatgcattccctgaa

SEQ ID NO: 4729346 - DNA, 25 bp, Homo sapien
ctgccacagcactatgcattccctg

SEQ ID NO: 4729347 - DNA, 25 bp, Homo sapien
gcagctgagaagttaatgttaccca

SEQ ID NO: 4729348 - DNA, 25 bp, Homo sapien
gggtgacctgttggcactcccttgc

SEQ ID NO: 4729349 - DNA, 25 bp, Homo sapien
atctcggtataaacaacacataggg

SEQ ID NO: 4729350 - DNA, 25 bp, Homo sapien
gagtaattccaccttcagagggtga

SEQ ID NO: 4729351 - DNA, 25 bp, Homo sapien
gtcaaagttgcacactaggtacagc

SEQ ID NO: 4729352 - DNA, 25 bp, Homo sapien
ggcaggtagcggtttttctagtatg

SEQ ID NO: 4729353 - DNA, 25 bp, Homo sapien
tagcggtttttctagtatgtggtct

SEQ ID NO: 4729354 - DNA, 25 bp, Homo sapien
aaggtcaaagttgcacactaggtac

SEQ ID NO: 4729355 - DNA, 25 bp, Homo sapien
tgactagcgttacaaacaagggaga

SEQ ID NO: 4729356 - DNA, 25 bp, Homo sapien
gggatatttgtgactagcgttacaa

SEQ ID NO: 4729357 - DNA, 25 bp, Homo sapien
tatttgtgactagcgttacaaacaa

SEQ ID NO: 4729358 - DNA, 25 bp, Homo sapien
tgtgactagcgttacaaacaaggga

SEQ ID NO: 4729359 - DNA, 25 bp, Homo sapien
catagaaggactgcacactcatccc

SEQ ID NO: 4729360 - DNA, 25 bp, Homo sapien
caggatgggctgctgaacagcatag

SEQ ID NO: 4729361 - DNA, 25 bp, Homo sapien
gatgggatggtgtggagatgatgca

SEQ ID NO: 4729362 - DNA, 25 bp, Homo sapien
gaggatgggatggtgtggagatgat

SEQ ID NO: 4729363 - DNA, 25 bp, Homo sapien
aacattgggtgttggtttaggatca

SEQ ID NO: 4729364 - DNA, 25 bp, Homo sapien
gatctgatactctgcacagctagtg

SEQ ID NO: 4729365 - DNA, 25 bp, Homo sapien
gaactgtagactcagggctagacag

SEQ ID NO: 4729366 - DNA, 25 bp, Homo sapien
cagctagtggcatcaaatatgtgaa

SEQ ID NO: 4729367 - DNA, 25 bp, Homo sapien
ccccaaagtgcatgacatactgcaa

SEQ ID NO: 4729368 - DNA, 25 bp, Homo sapien
tttctcttcatgctaattccaggat

SEQ ID NO: 4729369 - DNA, 25 bp, Homo sapien
gtaattcctggattaaatatattgt

SEQ ID NO: 4729370 - DNA, 25 bp, Homo sapien
aggcctgccacgtgttttctcttca

SEQ ID NO: 4729371 - DNA, 25 bp, Homo sapien
ttggcttgtaaactacttgctcagc

SEQ ID NO: 4729372 - DNA, 25 bp, Homo sapien
cctttggcttgtaaactacttgctc

SEQ ID NO: 4729373 - DNA, 25 bp, Homo sapien
gctttgagcattggggacatgagat

SEQ ID NO: 4729374 - DNA, 25 bp, Homo sapien
ggcttgtaaactacttgctcagctt

SEQ ID NO: 4729375 - DNA, 25 bp, Homo sapien
ttctggatggtctcctgccgtaggc

SEQ ID NO: 4729376 - DNA, 25 bp, Homo sapien
agcaaatgtttggctggttcctcca

SEQ ID NO: 4729377 - DNA, 25 bp, Homo sapien
tcaagcaaatgtttggctggttcct

SEQ ID NO: 4729378 - DNA, 25 bp, Homo sapien
aagcaaatgtttggctggttcctcc

SEQ ID NO: 4729379 - DNA, 25 bp, Homo sapien
caagcaaatgtttggctggttcctc

SEQ ID NO: 4729380 - DNA, 25 bp, Homo sapien
gcttgtcctcgcctgcatgtagttg

SEQ ID NO: 4729381 - DNA, 25 bp, Homo sapien
ttgtcctcgcctgcatgtagttggg

SEQ ID NO: 4729382 - DNA, 25 bp, Homo sapien
tttcgctcttgatggcttgtcctcg

SEQ ID NO: 4729383 - DNA, 25 bp, Homo sapien
tccagtttttcgctcttgatggctt

SEQ ID NO: 4729384 - DNA, 25 bp, Homo sapien
gatctgccaggaatccctcggaagg

SEQ ID NO: 4729385 - DNA, 25 bp, Homo sapien
gaacttgaacccaatgtcccttgaa

SEQ ID NO: 4729386 - DNA, 25 bp, Homo sapien
tgaagaatactaagtgccccaggta

SEQ ID NO: 4729387 - DNA, 25 bp, Homo sapien
cgtggcaccaggtcttgcaattgca

SEQ ID NO: 4729388 - DNA, 25 bp, Homo sapien
gtggagaacttggaactctaccagg

SEQ ID NO: 4729389 - DNA, 25 bp, Homo sapien
gagaacttggaactctaccaggcat

SEQ ID NO: 4729390 - DNA, 25 bp, Homo sapien
tgactgtggagaacttggaactcta

SEQ ID NO: 4729391 - DNA, 25 bp, Homo sapien
tggctgactgtggagaacttggaac

SEQ ID NO: 4729392 - DNA, 25 bp, Homo sapien
gacagagaccgtgggtaatgtgaca

SEQ ID NO: 4729393 - DNA, 25 bp, Homo sapien
cagcactattagaggaagcagggac

SEQ ID NO: 4729394 - DNA, 25 bp, Homo sapien
cattgatggtgtgatattgcttccc

SEQ ID NO: 4729395 - DNA, 25 bp, Homo sapien
tctctgtgcagtcgaaggcttgatg

SEQ ID NO: 4729396 - DNA, 25 bp, Homo sapien
ctgattggtatgctcacagaagtgg

SEQ ID NO: 4729397 - DNA, 25 bp, Homo sapien
tcctgttgttaggatcatccctaaa

SEQ ID NO: 4729398 - DNA, 25 bp, Homo sapien
catccctaaatgaaagtgcccagtc

SEQ ID NO: 4729399 - DNA, 25 bp, Homo sapien
acagaagtgggccaaccagctttca

SEQ ID NO: 4729400 - DNA, 25 bp, Homo sapien
ttgtggtgagtttcctggtgaccat

SEQ ID NO: 4729401 - DNA, 25 bp, Homo sapien
ctgaaattgtggtgagtttcctggt

SEQ ID NO: 4729402 - DNA, 25 bp, Homo sapien
aattgtggtgagtttcctggtgacc

SEQ ID NO: 4729403 - DNA, 25 bp, Homo sapien
gaaattgtggtgagtttcctggtga

SEQ ID NO: 4729404 - DNA, 25 bp, Homo sapien
tgccgtgaacaatcactttctctgc

SEQ ID NO: 4729405 - DNA, 25 bp, Homo sapien
ctccaactcccttaggatgccgtga

SEQ ID NO: 4729406 - DNA, 25 bp, Homo sapien
taacagactgttgcctcctccaact

SEQ ID NO: 4729407 - DNA, 25 bp, Homo sapien
ccttaggatgccgtgaacaatcact

SEQ ID NO: 4729408 - DNA, 25 bp, Homo sapien
aaaaaggcctgagtccacatggttt

SEQ ID NO: 4729409 - DNA, 25 bp, Homo sapien
ggaaaaaaggcctgagtccacatgg

SEQ ID NO: 4729410 - DNA, 25 bp, Homo sapien
ctttgatcagttcttttccttcatc

SEQ ID NO: 4729411 - DNA, 25 bp, Homo sapien
catggttttctttgatcagttcttt

SEQ ID NO: 4729412 - DNA, 25 bp, Homo sapien
gcaagtttgttgttggtgcatgcca

SEQ ID NO: 4729413 - DNA, 25 bp, Homo sapien
actgacaggatgtccggtgtgctgc

SEQ ID NO: 4729414 - DNA, 25 bp, Homo sapien
ctctgaactcaagaactgacaggat

SEQ ID NO: 4729415 - DNA, 25 bp, Homo sapien
gtgtgctgctacttatttgaacttc

SEQ ID NO: 4729416 - DNA, 25 bp, Homo sapien
aatattattaagttgatgtcttggg

SEQ ID NO: 4729417 - DNA, 25 bp, Homo sapien
tattattaagttgatgtcttgggag

SEQ ID NO: 4729418 - DNA, 25 bp, Homo sapien
tggtaccacttgattattaatatta

SEQ ID NO: 4729419 - DNA, 25 bp, Homo sapien
tattaagttgatgtcttgggagcat

SEQ ID NO: 4729420 - DNA, 25 bp, Homo sapien
ggctgaactggagcttaaataattc

SEQ ID NO: 4729421 - DNA, 25 bp, Homo sapien
gcatgctttatagatgggtccccat

SEQ ID NO: 4729422 - DNA, 25 bp, Homo sapien
cctgctcaagatgatggttgctgct

SEQ ID NO: 4729423 - DNA, 25 bp, Homo sapien
caagtgtaggcgtgtgcatgcttta

SEQ ID NO: 4729424 - DNA, 25 bp, Homo sapien
caagcaggcagacattctttcttaa

SEQ ID NO: 4729425 - DNA, 25 bp, Homo sapien
cataaaagtattggataaattgaac

SEQ ID NO: 4729426 - DNA, 25 bp, Homo sapien
tgttagcattagtgagtgttcagcc

SEQ ID NO: 4729427 - DNA, 25 bp, Homo sapien
gatgtcttactacctcttttggagg

SEQ ID NO: 4729428 - DNA, 25 bp, Homo sapien
ggaatcatatgatcaaaagtcagat

SEQ ID NO: 4729429 - DNA, 25 bp, Homo sapien
catttggcatcagaggtctgcacag

SEQ ID NO: 4729430 - DNA, 25 bp, Homo sapien
gggattcttctagtggttgaacaag

SEQ ID NO: 4729431 - DNA, 25 bp, Homo sapien
tagttgaaggcagttgaaaaggagt

SEQ ID NO: 4729432 - DNA, 25 bp, Homo sapien
ttatgtgcttttgggatgtcgtatt

SEQ ID NO: 4729433 - DNA, 25 bp, Homo sapien
tatgtgcttttgggatgtcgtattc

SEQ ID NO: 4729434 - DNA, 25 bp, Homo sapien
gtcctatgggtctcactatctttgc

SEQ ID NO: 4729435 - DNA, 25 bp, Homo sapien
cctatgggtctcactatctttgctc

SEQ ID NO: 4729436 - DNA, 25 bp, Homo sapien
aaagtcctatgggtctcactatctt

SEQ ID NO: 4729437 - DNA, 25 bp, Homo sapien
ctccaaagtcctatgggtctcacta

SEQ ID NO: 4729438 - DNA, 25 bp, Homo sapien
tgctaaagccagtgagattcttgtt

SEQ ID NO: 4729439 - DNA, 25 bp, Homo sapien
gataacggacattttcagggattga

SEQ ID NO: 4729440 - DNA, 25 bp, Homo sapien
cattggaactgtgatgataacggac

SEQ ID NO: 4729441 - DNA, 25 bp, Homo sapien
gaattggtgttggtatccttcggag

SEQ ID NO: 4729442 - DNA, 25 bp, Homo sapien
tggtatccttcggagaacaaaacac

SEQ ID NO: 4729443 - DNA, 25 bp, Homo sapien
ttctttccaaccaagagagagtcca

SEQ ID NO: 4729444 - DNA, 25 bp, Homo sapien
cttctttccaaccaagagagagtcc

SEQ ID NO: 4729445 - DNA, 25 bp, Homo sapien
tctttccaaccaagagagagtccat

SEQ ID NO: 4729446 - DNA, 25 bp, Homo sapien
tacgaagtcattggaggatacaaaa

SEQ ID NO: 4729447 - DNA, 25 bp, Homo sapien
ttacgaagtcattggaggatacaaa

SEQ ID NO: 4729448 - DNA, 25 bp, Homo sapien
ggaccagaactctagcacattgagg

SEQ ID NO: 4729449 - DNA, 25 bp, Homo sapien
cctgcgtggtttggataacaagcta

SEQ ID NO: 4729450 - DNA, 25 bp, Homo sapien
caagctagaaaagtcagttatgggc

SEQ ID NO: 4729451 - DNA, 25 bp, Homo sapien
ggaaagtcgatcagctcttaaggct

SEQ ID NO: 4729452 - DNA, 25 bp, Homo sapien
cataccccaaggcttcctgatattt

SEQ ID NO: 4729453 - DNA, 25 bp, Homo sapien
gcttcatagcctgaaattgaaccca

SEQ ID NO: 4729454 - DNA, 25 bp, Homo sapien
acccaggcatgcataccccaaggct

SEQ ID NO: 4729455 - DNA, 25 bp, Homo sapien
tgcttcatagcctgaaattgaaccc

SEQ ID NO: 4729456 - DNA, 25 bp, Homo sapien
caaaatgaggtaaacgaggaattat

SEQ ID NO: 4729457 - DNA, 25 bp, Homo sapien
tatgcaaaatgaggtaaacgaggaa

SEQ ID NO: 4729458 - DNA, 25 bp, Homo sapien
tgcaaaatgaggtaaacgaggaatt

SEQ ID NO: 4729459 - DNA, 25 bp, Homo sapien
ctagtatgcaaaatgaggtaaacga

SEQ ID NO: 4729460 - DNA, 25 bp, Homo sapien
gaatccttactttcacacagctcag

SEQ ID NO: 4729461 - DNA, 25 bp, Homo sapien
tggccaattaaagccccctgctgag

SEQ ID NO: 4729462 - DNA, 25 bp, Homo sapien
aatgttggcattgcgtagataccac

SEQ ID NO: 4729463 - DNA, 25 bp, Homo sapien
taccaccatggatggtaaaaatggg

SEQ ID NO: 4729464 - DNA, 25 bp, Homo sapien
tacacagaaatattccgcaaacatg

SEQ ID NO: 4729465 - DNA, 25 bp, Homo sapien
tgccttctttttagtacacagaaat

SEQ ID NO: 4729466 - DNA, 25 bp, Homo sapien
tgtctcggctttcagcaatatggca

SEQ ID NO: 4729467 - DNA, 25 bp, Homo sapien
tattccgcaaacatgactgtctcgg

SEQ ID NO: 4729468 - DNA, 25 bp, Homo sapien
ggctacctgggcctaggatcctcca

SEQ ID NO: 4729469 - DNA, 25 bp, Homo sapien
gttgtccattgttgggctacctggg

SEQ ID NO: 4729470 - DNA, 25 bp, Homo sapien
ctcccaccagtcaggctcaccattg

SEQ ID NO: 4729471 - DNA, 25 bp, Homo sapien
ggcctaggatcctccacggtgcctg

SEQ ID NO: 4729472 - DNA, 25 bp, Homo sapien
tgcaataacttctcgagtccttcct

SEQ ID NO: 4729473 - DNA, 25 bp, Homo sapien
cttcctgttggaattgcattgtttc

SEQ ID NO: 4729474 - DNA, 25 bp, Homo sapien
ttacaatcatattccaggtccaggc

SEQ ID NO: 4729475 - DNA, 25 bp, Homo sapien
gtccaggcttcttgcaataacttct

SEQ ID NO: 4729476 - DNA, 25 bp, Homo sapien
tcttgccactacttcatttgatctg

SEQ ID NO: 4729477 - DNA, 25 bp, Homo sapien
tgaagacgacgtacacagcaggaat

SEQ ID NO: 4729478 - DNA, 25 bp, Homo sapien
gattgcacatgagcaagatgttcca

SEQ ID NO: 4729479 - DNA, 25 bp, Homo sapien
catttagcaggcctattgtacagga

SEQ ID NO: 4729480 - DNA, 25 bp, Homo sapien
ggtaaacacaggacctgactcttgc

SEQ ID NO: 4729481 - DNA, 25 bp, Homo sapien
taaacacaggacctgactcttgcat

SEQ ID NO: 4729482 - DNA, 25 bp, Homo sapien
aggtgagagagctggtaaacacagg

SEQ ID NO: 4729483 - DNA, 25 bp, Homo sapien
gagagctggtaaacacaggacctga

SEQ ID NO: 4729484 - DNA, 25 bp, Homo sapien
gaggaaacaggtgtaaataacagag

SEQ ID NO: 4729485 - DNA, 25 bp, Homo sapien
gagtccaaaactcacggcctcaagt

SEQ ID NO: 4729486 - DNA, 25 bp, Homo sapien
ggcctcaagtaatatgtcatctgtt

SEQ ID NO: 4729487 - DNA, 25 bp, Homo sapien
gtagcagcaccaggttttgtaacca

SEQ ID NO: 4729488 - DNA, 25 bp, Homo sapien
gttcaccatagatcacatggacacc

SEQ ID NO: 4729489 - DNA, 25 bp, Homo sapien
gacagtgaggagacgtgtattccca

SEQ ID NO: 4729490 - DNA, 25 bp, Homo sapien
tatttggtgtgctgagccaatgtga

SEQ ID NO: 4729491 - DNA, 25 bp, Homo sapien
gggttgaaccatcttgcaaaaattc

SEQ ID NO: 4729492 - DNA, 25 bp, Homo sapien
gggtttcatgtttaagcagctctcc

SEQ ID NO: 4729493 - DNA, 25 bp, Homo sapien
aacagagtcactgtgagtgggtttc

SEQ ID NO: 4729494 - DNA, 25 bp, Homo sapien
tgtgagtgggtttcatgtttaagca

SEQ ID NO: 4729495 - DNA, 25 bp, Homo sapien
ccataaaggtcaacagagtcactgt

SEQ ID NO: 4729496 - DNA, 25 bp, Homo sapien
cttcccaatctgtattctgtgctcc

SEQ ID NO: 4729497 - DNA, 25 bp, Homo sapien
tcttgcatccattggcattgtagcc

SEQ ID NO: 4729498 - DNA, 25 bp, Homo sapien
gcattgtagccaccccctacagtga

SEQ ID NO: 4729499 - DNA, 25 bp, Homo sapien
acagttgaggactgccttcccaatc

SEQ ID NO: 4729500 - DNA, 25 bp, Homo sapien
cttttggcttctaacagattagatg

SEQ ID NO: 4729501 - DNA, 25 bp, Homo sapien
ttagatgatggtttagtgagacatt

SEQ ID NO: 4729502 - DNA, 25 bp, Homo sapien
tagatgatggtttagtgagacattt

SEQ ID NO: 4729503 - DNA, 25 bp, Homo sapien
ttagtgagacattttagggatgagg

SEQ ID NO: 4729504 - DNA, 25 bp, Homo sapien
tctacacctgggagaccctcactga

SEQ ID NO: 4729505 - DNA, 25 bp, Homo sapien
gaaatccctagtttagaatctacac

SEQ ID NO: 4729506 - DNA, 25 bp, Homo sapien
tgtagaatggtatcactgttctccc

SEQ ID NO: 4729507 - DNA, 25 bp, Homo sapien
ccagcaagagcagatttggaaatcc

SEQ ID NO: 4729508 - DNA, 25 bp, Homo sapien
aatcaaggtccttgccagtgttcat

SEQ ID NO: 4729509 - DNA, 25 bp, Homo sapien
gaatcaaggtccttgccagtgttca

SEQ ID NO: 4729510 - DNA, 25 bp, Homo sapien
gatatttgaatcaaggtccttgcca

SEQ ID NO: 4729511 - DNA, 25 bp, Homo sapien
caggaagatatttgaatcaaggtcc

SEQ ID NO: 4729512 - DNA, 25 bp, Homo sapien
gttgcacatgacaaagaattgtcct

SEQ ID NO: 4729513 - DNA, 25 bp, Homo sapien
gggcagttgcacatgacaaagaatt

SEQ ID NO: 4729514 - DNA, 25 bp, Homo sapien
tgggaacagagacattaacactctt

SEQ ID NO: 4729515 - DNA, 25 bp, Homo sapien
ggctgttactggttatgggaacaga

SEQ ID NO: 4729516 - DNA, 25 bp, Homo sapien
aatttctcactgtaaggttcttcat

SEQ ID NO: 4729517 - DNA, 25 bp, Homo sapien
cagtgggcacatagattctctccca

SEQ ID NO: 4729518 - DNA, 25 bp, Homo sapien
ctcccagctaaaactggaacaggtg

SEQ ID NO: 4729519 - DNA, 25 bp, Homo sapien
aacaggtgagttaagatccatacaa

SEQ ID NO: 4729520 - DNA, 25 bp, Homo sapien
tgttgactgagggacccacaccact

SEQ ID NO: 4729521 - DNA, 25 bp, Homo sapien
ctttctgtctagatgaggtgttgac

SEQ ID NO: 4729522 - DNA, 25 bp, Homo sapien
actcccaccagctaacctatcaggc

SEQ ID NO: 4729523 - DNA, 25 bp, Homo sapien
tcccaccagctaacctatcaggcat

SEQ ID NO: 4729524 - DNA, 25 bp, Homo sapien
ggagtcataaatttgcaaactgatt

SEQ ID NO: 4729525 - DNA, 25 bp, Homo sapien
taaatttgcaaactgattctcctct

SEQ ID NO: 4729526 - DNA, 25 bp, Homo sapien
gtcataaatttgcaaactgattctc

SEQ ID NO: 4729527 - DNA, 25 bp, Homo sapien
cataaatttgcaaactgattctcct

SEQ ID NO: 4729528 - DNA, 25 bp, Homo sapien
gccaacaggggctcttctaaaccca

SEQ ID NO: 4729529 - DNA, 25 bp, Homo sapien
gagatctacacttgacaccactgcc

SEQ ID NO: 4729530 - DNA, 25 bp, Homo sapien
tttggagatctacacttgacaccac

SEQ ID NO: 4729531 - DNA, 25 bp, Homo sapien
tccattatctgccaacaggggctct

SEQ ID NO: 4729532 - DNA, 25 bp, Homo sapien
tcactggcatgggtaccttcggtag

SEQ ID NO: 4729533 - DNA, 25 bp, Homo sapien
ggcatgggtaccttcggtagctttc

SEQ ID NO: 4729534 - DNA, 25 bp, Homo sapien
ctggcatgggtaccttcggtagctt

SEQ ID NO: 4729535 - DNA, 25 bp, Homo sapien
catgggtaccttcggtagctttcag

SEQ ID NO: 4729536 - DNA, 25 bp, Homo sapien
ccccgatgatgagaacttgattctt

SEQ ID NO: 4729537 - DNA, 25 bp, Homo sapien
ttggcacttcaccttcgatgagccc

SEQ ID NO: 4729538 - DNA, 25 bp, Homo sapien
ggtgccagcgttttggcacttcacc

SEQ ID NO: 4729539 - DNA, 25 bp, Homo sapien
cgatgagcccccgatgatgagaact

SEQ ID NO: 4729540 - DNA, 25 bp, Homo sapien
ttcttccttctcttttctggctctc

SEQ ID NO: 4729541 - DNA, 25 bp, Homo sapien
ccttcttccttctcttttctggctc

SEQ ID NO: 4729542 - DNA, 25 bp, Homo sapien
cttccttctcttttctggctctcat

SEQ ID NO: 4729543 - DNA, 25 bp, Homo sapien
ccttatcagctttccctccttcttc

SEQ ID NO: 4729544 - DNA, 25 bp, Homo sapien
tgaaatgcgtgtagaaatgtggaat

SEQ ID NO: 4729545 - DNA, 25 bp, Homo sapien
tcacagagaaggagacggttccttt

SEQ ID NO: 4729546 - DNA, 25 bp, Homo sapien
cggttcctttaatgaaatgcgtgta

SEQ ID NO: 4729547 - DNA, 25 bp, Homo sapien
ggaatttacacttgatgaagggcca

SEQ ID NO: 4729548 - DNA, 25 bp, Homo sapien
gtatctgaagaggccttctctgaag

SEQ ID NO: 4729549 - DNA, 25 bp, Homo sapien
atctgaagaggccttctctgaagca

SEQ ID NO: 4729550 - DNA, 25 bp, Homo sapien
tctgaagaggccttctctgaagcat

SEQ ID NO: 4729551 - DNA, 25 bp, Homo sapien
tatctgaagaggccttctctgaagc

SEQ ID NO: 4729552 - DNA, 25 bp, Homo sapien
gcagaattatttgagacatgtttat

SEQ ID NO: 4729553 - DNA, 25 bp, Homo sapien
catggcagaattatttgagacatgt

SEQ ID NO: 4729554 - DNA, 25 bp, Homo sapien
ttatttgagacatgtttatgggatt

SEQ ID NO: 4729555 - DNA, 25 bp, Homo sapien
ttccatcatggcagaattatttgag

SEQ ID NO: 4729556 - DNA, 25 bp, Homo sapien
taaggctgtcagtacctccaaatat

SEQ ID NO: 4729557 - DNA, 25 bp, Homo sapien
tctgacctggtggatttctccttcc

SEQ ID NO: 4729558 - DNA, 25 bp, Homo sapien
ctccttcctctaaggctgtcagtac

SEQ ID NO: 4729559 - DNA, 25 bp, Homo sapien
tgtcagtacctccaaatattgggca

SEQ ID NO: 4729560 - DNA, 25 bp, Homo sapien
tctttcagtgctattgctggtatca

SEQ ID NO: 4729561 - DNA, 25 bp, Homo sapien
ttcagtgctattgctggtatcattg

SEQ ID NO: 4729562 - DNA, 25 bp, Homo sapien
agtgctattgctggtatcattgata

SEQ ID NO: 4729563 - DNA, 25 bp, Homo sapien
tattgctggtatcattgatagcagg

SEQ ID NO: 4729564 - DNA, 25 bp, Homo sapien
cagactgggactggaacgtcatcag

SEQ ID NO: 4729565 - DNA, 25 bp, Homo sapien
tggaacgtcatcagcaaaggtgaaa

SEQ ID NO: 4729566 - DNA, 25 bp, Homo sapien
aaagttgaagcctttccagtagatg

SEQ ID NO: 4729567 - DNA, 25 bp, Homo sapien
tcagcaaaggtgaaagttgaagcct

SEQ ID NO: 4729568 - DNA, 25 bp, Homo sapien
tgaattcccttcttctagaccatga

SEQ ID NO: 4729569 - DNA, 25 bp, Homo sapien
ttgggcatgaactggccccgctttc

SEQ ID NO: 4729570 - DNA, 25 bp, Homo sapien
tgtatttcaccacgcactgtgtgcc

SEQ ID NO: 4729571 - DNA, 25 bp, Homo sapien
ttttttgaaccagcattgggcatga

SEQ ID NO: 4729572 - DNA, 25 bp, Homo sapien
cctgggaattcatcaaagggcgtag

SEQ ID NO: 4729573 - DNA, 25 bp, Homo sapien
agcatccggtatggcctctgtcaca

SEQ ID NO: 4729574 - DNA, 25 bp, Homo sapien
tgcagcatccggtatggcctctgtc

SEQ ID NO: 4729575 - DNA, 25 bp, Homo sapien
aagggcgtagatccttctttttctg

SEQ ID NO: 4729576 - DNA, 25 bp, Homo sapien
gctgagggcctcagataacctcttt

SEQ ID NO: 4729577 - DNA, 25 bp, Homo sapien
tatagacctactagagagcccagca

SEQ ID NO: 4729578 - DNA, 25 bp, Homo sapien
tatctttcccatagcacatcaccaa

SEQ ID NO: 4729579 - DNA, 25 bp, Homo sapien
tatgtttcccgtagcaaataaccaa

SEQ ID NO: 4729580 - DNA, 25 bp, Homo sapien
ttctctccatgtcccgtgtccaaat

SEQ ID NO: 4729581 - DNA, 25 bp, Homo sapien
tccatgtcccgtgtccaaatagtca

SEQ ID NO: 4729582 - DNA, 25 bp, Homo sapien
tgtcccgtgtccaaatagtcaccat

SEQ ID NO: 4729583 - DNA, 25 bp, Homo sapien
tctccatgtcccgtgtccaaatagt

SEQ ID NO: 4729584 - DNA, 25 bp, Homo sapien
cttgctcgggtttcaagcgtgtccc

SEQ ID NO: 4729585 - DNA, 25 bp, Homo sapien
tgatcttttgctaggaacccaacac

SEQ ID NO: 4729586 - DNA, 25 bp, Homo sapien
cctgacggcagtattttggaaccaa

SEQ ID NO: 4729587 - DNA, 25 bp, Homo sapien
tcgagctcgtgaatgttaccctaga

SEQ ID NO: 4729588 - DNA, 25 bp, Homo sapien
ctggactgccacgggaaggaaaaga

SEQ ID NO: 4729589 - DNA, 25 bp, Homo sapien
gaaagtgttcagtgccggtaggact

SEQ ID NO: 4729590 - DNA, 25 bp, Homo sapien
aagctgaatgttgtgccgtgtttgg

SEQ ID NO: 4729591 - DNA, 25 bp, Homo sapien
tgccgtgtttggtttggtgcttgct

SEQ ID NO: 4729592 - DNA, 25 bp, Homo sapien
gcccttggtgtcattactcattgaa

SEQ ID NO: 4729593 - DNA, 25 bp, Homo sapien
aactccacggcgaaatccctgtctg

SEQ ID NO: 4729594 - DNA, 25 bp, Homo sapien
gtcaagattttcgaggacttgccca

SEQ ID NO: 4729595 - DNA, 25 bp, Homo sapien
cgaaatccctgtctgtttgctgcag

SEQ ID NO: 4729596 - DNA, 25 bp, Homo sapien
aacagccaggtccttttcaatttca

SEQ ID NO: 4729597 - DNA, 25 bp, Homo sapien
tgccatgcagctatgccagaggtgg

SEQ ID NO: 4729598 - DNA, 25 bp, Homo sapien
tccaggctgtctcatgtgtgagtag

SEQ ID NO: 4729599 - DNA, 25 bp, Homo sapien
gtagaatcctacatgtcttcaaggc

SEQ ID NO: 4729600 - DNA, 25 bp, Homo sapien
gaatgaacaggatgcactgccttcc

SEQ ID NO: 4729601 - DNA, 25 bp, Homo sapien
ttgcagacggttttaatttagatac

SEQ ID NO: 4729602 - DNA, 25 bp, Homo sapien
gagcacttagcagcttattcagtgt

SEQ ID NO: 4729603 - DNA, 25 bp, Homo sapien
cagtactggatgtgacagcaggcag

SEQ ID NO: 4729604 - DNA, 25 bp, Homo sapien
gaatgctgccgtcgggcaactcctg

SEQ ID NO: 4729605 - DNA, 25 bp, Homo sapien
tgattccggcaaggatccaagcatg

SEQ ID NO: 4729606 - DNA, 25 bp, Homo sapien
ctgaatcatctgtatcatgactagg

SEQ ID NO: 4729607 - DNA, 25 bp, Homo sapien
ttcactgacagctgaatcatctgta

SEQ ID NO: 4729608 - DNA, 25 bp, Homo sapien
caaatattgaaggttgttcagcctt

SEQ ID NO: 4729609 - DNA, 25 bp, Homo sapien
gactaggttcttgagtgtgtacaaa

SEQ ID NO: 4729610 - DNA, 25 bp, Homo sapien
ggcttgattggcagtactggctcat

SEQ ID NO: 4729611 - DNA, 25 bp, Homo sapien
ggttgaattttggcttgattggcag

SEQ ID NO: 4729612 - DNA, 25 bp, Homo sapien
tgtggttgaattttggcttgattgg

SEQ ID NO: 4729613 - DNA, 25 bp, Homo sapien
tggttgaattttggcttgattggca

SEQ ID NO: 4729614 - DNA, 25 bp, Homo sapien
tattaagcaggactgtcttggctgc

SEQ ID NO: 4729615 - DNA, 25 bp, Homo sapien
ccagtcagctgcatatagaaggcta

SEQ ID NO: 4729616 - DNA, 25 bp, Homo sapien
gaaggctaatgacagtaggttttcc

SEQ ID NO: 4729617 - DNA, 25 bp, Homo sapien
aaactcgatcagtgggttttgccca

SEQ ID NO: 4729618 - DNA, 25 bp, Homo sapien
cattcatgtctcaactctccggttt

SEQ ID NO: 4729619 - DNA, 25 bp, Homo sapien
attcatgtctcaactctccggtttt

SEQ ID NO: 4729620 - DNA, 25 bp, Homo sapien
tcattcatgtctcaactctccggtt

SEQ ID NO: 4729621 - DNA, 25 bp, Homo sapien
aagcccataacagggagtcattttt

SEQ ID NO: 4729622 - DNA, 25 bp, Homo sapien
acacaaagcccataacagggagtca

SEQ ID NO: 4729623 - DNA, 25 bp, Homo sapien
gcccataacagggagtcatttttgt

SEQ ID NO: 4729624 - DNA, 25 bp, Homo sapien
caaagcccataacagggagtcattt

SEQ ID NO: 4729625 - DNA, 25 bp, Homo sapien
ctgtagtagtttcccatgtgtgatc

SEQ ID NO: 4729626 - DNA, 25 bp, Homo sapien
tgtctgaggctgtagtagtttccca

SEQ ID NO: 4729627 - DNA, 25 bp, Homo sapien
gagtgattattgttgtctgaggctg

SEQ ID NO: 4729628 - DNA, 25 bp, Homo sapien
ttgagtgattattgttgtctgaggc

SEQ ID NO: 4729629 - DNA, 25 bp, Homo sapien
aatagcgtcctactccactccttag

SEQ ID NO: 4729630 - DNA, 25 bp, Homo sapien
tctaacataggcatcacacgtgaag

SEQ ID NO: 4729631 - DNA, 25 bp, Homo sapien
cgaatctttacatgggatgccagca

SEQ ID NO: 4729632 - DNA, 25 bp, Homo sapien
gatgccagcaaatctctttgccctg

SEQ ID NO: 4729633 - DNA, 25 bp, Homo sapien
tgacaggctccctttggcaaacaag

SEQ ID NO: 4729634 - DNA, 25 bp, Homo sapien
caaacaaggatctaggacttggata

SEQ ID NO: 4729635 - DNA, 25 bp, Homo sapien
tactcagtgacaggctccctttggc

SEQ ID NO: 4729636 - DNA, 25 bp, Homo sapien
agggatgaaaattgtttactcagtg

SEQ ID NO: 4729637 - DNA, 25 bp, Homo sapien
gcgcactggaatgtgtgcatagatg

SEQ ID NO: 4729638 - DNA, 25 bp, Homo sapien
tgcgcaaaagcgcactggaatgtgt

SEQ ID NO: 4729639 - DNA, 25 bp, Homo sapien
gttagtcgccttaacaggaatgcgc

SEQ ID NO: 4729640 - DNA, 25 bp, Homo sapien
caggcttagtgcagttagtcgcctt

SEQ ID NO: 4729641 - DNA, 25 bp, Homo sapien
caaaagtcctccttggcctgtatag

SEQ ID NO: 4729642 - DNA, 25 bp, Homo sapien
ctgagaaagcaaaagggagacaggt

SEQ ID NO: 4729643 - DNA, 25 bp, Homo sapien
aaagtcctccttggcctgtatagct

SEQ ID NO: 4729644 - DNA, 25 bp, Homo sapien
cccaaaagtcctccttggcctgtat

SEQ ID NO: 4729645 - DNA, 25 bp, Homo sapien
tgtttccaaagcttcagacatggcc

SEQ ID NO: 4729646 - DNA, 25 bp, Homo sapien
tacagttggcggcagaaccagtatt

SEQ ID NO: 4729647 - DNA, 25 bp, Homo sapien
acctgatgtgggtagggcagctaaa

SEQ ID NO: 4729648 - DNA, 25 bp, Homo sapien
tatagattgctccacttcgcatggg

SEQ ID NO: 4729649 - DNA, 25 bp, Homo sapien
ctggaagtggaaaaccagaggttca

SEQ ID NO: 4729650 - DNA, 25 bp, Homo sapien
accagaggttcaggtaccttcttga

SEQ ID NO: 4729651 - DNA, 25 bp, Homo sapien
ttcttgatgatcttaaaattgtgag

SEQ ID NO: 4729652 - DNA, 25 bp, Homo sapien
gatcttaaaattgtgagtgccattc

SEQ ID NO: 4729653 - DNA, 25 bp, Homo sapien
taagaacgtcttgactggccaggaa

SEQ ID NO: 4729654 - DNA, 25 bp, Homo sapien
ccaggaacgatggatcaatggagtt

SEQ ID NO: 4729655 - DNA, 25 bp, Homo sapien
cacgtttagataagccagtaatggc

SEQ ID NO: 4729656 - DNA, 25 bp, Homo sapien
aaaattggcatttactgaggctaag

SEQ ID NO: 4729657 - DNA, 25 bp, Homo sapien
aggaccgcacgctccgaggaggacc

SEQ ID NO: 4729658 - DNA, 25 bp, Homo sapien
gaggaccgggacggcctatgggatg

SEQ ID NO: 4729659 - DNA, 25 bp, Homo sapien
ttccaggaccgcacgctccgaggag

SEQ ID NO: 4729660 - DNA, 25 bp, Homo sapien
agagttccaggaccgcacgctccga

SEQ ID NO: 4729661 - DNA, 25 bp, Homo sapien
gattcacctgctctcttaatcttga

SEQ ID NO: 4729662 - DNA, 25 bp, Homo sapien
gaaccttgagctgataagaaagact

SEQ ID NO: 4729663 - DNA, 25 bp, Homo sapien
gacttttgctccttatgattcacct

SEQ ID NO: 4729664 - DNA, 25 bp, Homo sapien
catttttgaggccagcttcgaatca

SEQ ID NO: 4729665 - DNA, 25 bp, Homo sapien
tggaccgggagcttgtgaggagact

SEQ ID NO: 4729666 - DNA, 25 bp, Homo sapien
ttccctgatggaccgggagcttgtg

SEQ ID NO: 4729667 - DNA, 25 bp, Homo sapien
acttggtttaccctctgagtacaga

SEQ ID NO: 4729668 - DNA, 25 bp, Homo sapien
cagaacatcctctctgagtgatctt

SEQ ID NO: 4729669 - DNA, 25 bp, Homo sapien
cattttatttcttcaatctgtgctt

SEQ ID NO: 4729670 - DNA, 25 bp, Homo sapien
tttatttcttcaatctgtgcttcaa

SEQ ID NO: 4729671 - DNA, 25 bp, Homo sapien
ttttatttcttcaatctgtgcttca

SEQ ID NO: 4729672 - DNA, 25 bp, Homo sapien
tcattttatttcttcaatctgtgct

SEQ ID NO: 4729673 - DNA, 25 bp, Homo sapien
ctagattctgcagctcagagaccaa

SEQ ID NO: 4729674 - DNA, 25 bp, Homo sapien
ccaagcatgttgctagattctgcag

SEQ ID NO: 4729675 - DNA, 25 bp, Homo sapien
catgttgctagattctgcagctcag

SEQ ID NO: 4729676 - DNA, 25 bp, Homo sapien
tgctagattctgcagctcagagacc

SEQ ID NO: 4729677 - DNA, 25 bp, Homo sapien
aaccaggaagcactgcccaggactc

SEQ ID NO: 4729678 - DNA, 25 bp, Homo sapien
ccaggaagcactgcccaggactcac

SEQ ID NO: 4729679 - DNA, 25 bp, Homo sapien
ttaaccaggaagcactgcccaggac

SEQ ID NO: 4729680 - DNA, 25 bp, Homo sapien
taaccaggaagcactgcccaggact

SEQ ID NO: 4729681 - DNA, 25 bp, Homo sapien
tttttgagcagtatgttcagagcag

SEQ ID NO: 4729682 - DNA, 25 bp, Homo sapien
agcagtttctggcttcgttagaagc

SEQ ID NO: 4729683 - DNA, 25 bp, Homo sapien
ttcataactgcagcccatatttgtg

SEQ ID NO: 4729684 - DNA, 25 bp, Homo sapien
tccgcattggagtgcttattgtaca

SEQ ID NO: 4729685 - DNA, 25 bp, Homo sapien
tgcaggcatgccaaatcttcttgtg

SEQ ID NO: 4729686 - DNA, 25 bp, Homo sapien
tgcctctatgcctttgcttagtttc

SEQ ID NO: 4729687 - DNA, 25 bp, Homo sapien
gtttgaaaatctgcaggcatgccaa

SEQ ID NO: 4729688 - DNA, 25 bp, Homo sapien
caaatcttcttgtgcctctatgcct

SEQ ID NO: 4729689 - DNA, 25 bp, Homo sapien
ttttgccaagtgacaagttccaggt

SEQ ID NO: 4729690 - DNA, 25 bp, Homo sapien
aatttctcctgattgttttgccaag

SEQ ID NO: 4729691 - DNA, 25 bp, Homo sapien
ttgttttgccaagtgacaagttcca

SEQ ID NO: 4729692 - DNA, 25 bp, Homo sapien
cctgattgttttgccaagtgacaag

SEQ ID NO: 4729693 - DNA, 25 bp, Homo sapien
gaatgtaggatggtgactaaactca

SEQ ID NO: 4729694 - DNA, 25 bp, Homo sapien
ccaagatgaatgtaggatggtgact

SEQ ID NO: 4729695 - DNA, 25 bp, Homo sapien
ggtgactaaactcattataggacat

SEQ ID NO: 4729696 - DNA, 25 bp, Homo sapien
tgtaaagccaagatgaatgtaggat

SEQ ID NO: 4729697 - DNA, 25 bp, Homo sapien
taaccgagtcaatgctgaagccaag

SEQ ID NO: 4729698 - DNA, 25 bp, Homo sapien
tctgacactgcgtggtacaaaccaa

SEQ ID NO: 4729699 - DNA, 25 bp, Homo sapien
taggccgcccagatgcgagctgttt

SEQ ID NO: 4729700 - DNA, 25 bp, Homo sapien
tctgtttaaggtaataaccgagtca

SEQ ID NO: 4729701 - DNA, 25 bp, Homo sapien
gatccacatttgtaccagggcagaa

SEQ ID NO: 4729702 - DNA, 25 bp, Homo sapien
ttccagtaagatccacatttgtacc

SEQ ID NO: 4729703 - DNA, 25 bp, Homo sapien
ttgtaccagggcagaataccagctg

SEQ ID NO: 4729704 - DNA, 25 bp, Homo sapien
ccagcagcagaagggagtctgagca

SEQ ID NO: 4729705 - DNA, 25 bp, Homo sapien
atatgaagctttttattgacctttg

SEQ ID NO: 4729706 - DNA, 25 bp, Homo sapien
tgtgcccagcctatatgaagctttt

SEQ ID NO: 4729707 - DNA, 25 bp, Homo sapien
gcctcaaccttgcaagtagctgtga

SEQ ID NO: 4729708 - DNA, 25 bp, Homo sapien
tgaagctttttattgacctttgtgt

SEQ ID NO: 4729709 - DNA, 25 bp, Homo sapien
caagaagcccaatatgtgtctctga

SEQ ID NO: 4729710 - DNA, 25 bp, Homo sapien
gccttttagcaagcatctagttggt

SEQ ID NO: 4729711 - DNA, 25 bp, Homo sapien
tggtaacttcgcacactaaatggac

SEQ ID NO: 4729712 - DNA, 25 bp, Homo sapien
ttacctagttcgctgggcatgggcc

SEQ ID NO: 4729713 - DNA, 25 bp, Homo sapien
caccgatggagggagacggatttct

SEQ ID NO: 4729714 - DNA, 25 bp, Homo sapien
cctgcagattcgtaactcgggctcc

SEQ ID NO: 4729715 - DNA, 25 bp, Homo sapien
cagttcatcttctatcaacccatca

SEQ ID NO: 4729716 - DNA, 25 bp, Homo sapien
ctcgggctccgctgacagtacagtc

SEQ ID NO: 4729717 - DNA, 25 bp, Homo sapien
tattttgtgaaaggttctgtgcttg

SEQ ID NO: 4729718 - DNA, 25 bp, Homo sapien
ctattttgtgaaaggttctgtgctt

SEQ ID NO: 4729719 - DNA, 25 bp, Homo sapien
tggtcctctgcatcgaccatcgagg

SEQ ID NO: 4729720 - DNA, 25 bp, Homo sapien
taaaagaggaatgcatcgtacccac

SEQ ID NO: 4729721 - DNA, 25 bp, Homo sapien
ggaggctgtagcccaaaaacaaagc

SEQ ID NO: 4729722 - DNA, 25 bp, Homo sapien
ggaatgcacacaggaggctgtagcc

SEQ ID NO: 4729723 - DNA, 25 bp, Homo sapien
gagcctggctctctaaacatcatta

SEQ ID NO: 4729724 - DNA, 25 bp, Homo sapien
gtttggccaaagctagataaatagg

SEQ ID NO: 4729725 - DNA, 25 bp, Homo sapien
gcatcattggctcatactataaagg

SEQ ID NO: 4729726 - DNA, 25 bp, Homo sapien
tctgtaagagccgttagaacatccc

SEQ ID NO: 4729727 - DNA, 25 bp, Homo sapien
caggctgtgcaggaagcagagctgg

SEQ ID NO: 4729728 - DNA, 25 bp, Homo sapien
ccacaggctgtgcaggaagcagagc

SEQ ID NO: 4729729 - DNA, 25 bp, Homo sapien
ctgtgcaggaagcagagctggggag

SEQ ID NO: 4729730 - DNA, 25 bp, Homo sapien
aggaagcagagctggggaggtctca

SEQ ID NO: 4729731 - DNA, 25 bp, Homo sapien
caaatccctccttgctatacattgt

SEQ ID NO: 4729732 - DNA, 25 bp, Homo sapien
gctatacattgttccgttcctgcag

SEQ ID NO: 4729733 - DNA, 25 bp, Homo sapien
ctatacattgttccgttcctgcagt

SEQ ID NO: 4729734 - DNA, 25 bp, Homo sapien
atgtacaaatccctccttgctatac

SEQ ID NO: 4729735 - DNA, 25 bp, Homo sapien
tgtaaaactgatcacattgtatagt

SEQ ID NO: 4729736 - DNA, 25 bp, Homo sapien
aaatatctgaggcttagtaaccatt

SEQ ID NO: 4729737 - DNA, 25 bp, Homo sapien
tttataaatccccagcatccaatac

SEQ ID NO: 4729738 - DNA, 25 bp, Homo sapien
ttttgtaaaactgatcacattgtat

SEQ ID NO: 4729739 - DNA, 25 bp, Homo sapien
agttggaagttgtaagcagagtgca

SEQ ID NO: 4729740 - DNA, 25 bp, Homo sapien
ggaaatcaactcagctctcagtaaa

SEQ ID NO: 4729741 - DNA, 25 bp, Homo sapien
gtgcagagtccattatgttaaatga

SEQ ID NO: 4729742 - DNA, 25 bp, Homo sapien
cataaacatcactttgtgttgggtt

SEQ ID NO: 4729743 - DNA, 25 bp, Homo sapien
ttctccaacggcagcaaggcggaga

SEQ ID NO: 4729744 - DNA, 25 bp, Homo sapien
cggcccgggagcactttgtgattaa

SEQ ID NO: 4729745 - DNA, 25 bp, Homo sapien
tgattaagctcatcggaggcaaccg

SEQ ID NO: 4729746 - DNA, 25 bp, Homo sapien
ctcatcacctgggagaaggacggcc

SEQ ID NO: 4729747 - DNA, 25 bp, Homo sapien
cagggctaggtaaaggagagtctct

SEQ ID NO: 4729748 - DNA, 25 bp, Homo sapien
tccgaatggcctaggcaaacttttg

SEQ ID NO: 4729749 - DNA, 25 bp, Homo sapien
tgttaaattcagcactcagccatct

SEQ ID NO: 4729750 - DNA, 25 bp, Homo sapien
ttaccaatgcagataagggcctctc

SEQ ID NO: 4729751 - DNA, 25 bp, Homo sapien
gtatagcaggagaatctcactgagc

SEQ ID NO: 4729752 - DNA, 25 bp, Homo sapien
aaactgatgagagtatagcaggaga

SEQ ID NO: 4729753 - DNA, 25 bp, Homo sapien
ttaaaactgatgagagtatagcagg

SEQ ID NO: 4729754 - DNA, 25 bp, Homo sapien
tatagcaggagaatctcactgagct

SEQ ID NO: 4729755 - DNA, 25 bp, Homo sapien
taaaatgcaatgacctcatggcatc

SEQ ID NO: 4729756 - DNA, 25 bp, Homo sapien
atggcatctgagtagacttcatggg

SEQ ID NO: 4729757 - DNA, 25 bp, Homo sapien
tcatggcatctgagtagacttcatg

SEQ ID NO: 4729758 - DNA, 25 bp, Homo sapien
cctggagagtgctgttcataaaatg

SEQ ID NO: 4729759 - DNA, 25 bp, Homo sapien
tgactttgaataagagaatgctgtc

SEQ ID NO: 4729760 - DNA, 25 bp, Homo sapien
ttccactcccgctttctggttcagg

SEQ ID NO: 4729761 - DNA, 25 bp, Homo sapien
agaatgctgtcattggtaccccttc

SEQ ID NO: 4729762 - DNA, 25 bp, Homo sapien
tgctgtcattggtaccccttccact

SEQ ID NO: 4729763 - DNA, 25 bp, Homo sapien
ctctaatatatgtgcaaatatgctt

SEQ ID NO: 4729764 - DNA, 25 bp, Homo sapien
tctaatatatgtgcaaatatgcttt

SEQ ID NO: 4729765 - DNA, 25 bp, Homo sapien
aagccctctaatatatgtgcaaata

SEQ ID NO: 4729766 - DNA, 25 bp, Homo sapien
aatatatgtgcaaatatgcttttct

SEQ ID NO: 4729767 - DNA, 25 bp, Homo sapien
gtttcttaatagatgcattacccag

SEQ ID NO: 4729768 - DNA, 25 bp, Homo sapien
tttcttaatagatgcattacccagc

SEQ ID NO: 4729769 - DNA, 25 bp, Homo sapien
agtttcttaatagatgcattaccca

SEQ ID NO: 4729770 - DNA, 25 bp, Homo sapien
aatcagagcaaaacttagcctgagt

SEQ ID NO: 4729771 - DNA, 25 bp, Homo sapien
ttagcctgagttcctgaggcatgct

SEQ ID NO: 4729772 - DNA, 25 bp, Homo sapien
tctgtgtattttctagcttgccttt

SEQ ID NO: 4729773 - DNA, 25 bp, Homo sapien
tcctgaggcatgctggctcggagct

SEQ ID NO: 4729774 - DNA, 25 bp, Homo sapien
tgaactgggttcagtccatttacag

SEQ ID NO: 4729775 - DNA, 25 bp, Homo sapien
aatctgtttatcaagctcaggtgcc

SEQ ID NO: 4729776 - DNA, 25 bp, Homo sapien
cagcttttactctgtgcaatctgtt

SEQ ID NO: 4729777 - DNA, 25 bp, Homo sapien
atctgtttatcaagctcaggtgcct

SEQ ID NO: 4729778 - DNA, 25 bp, Homo sapien
tccagctcttatttctaactggctt

SEQ ID NO: 4729779 - DNA, 25 bp, Homo sapien
ccagctcttatttctaactggcttc

SEQ ID NO: 4729780 - DNA, 25 bp, Homo sapien
ctccagctcttatttctaactggct

SEQ ID NO: 4729781 - DNA, 25 bp, Homo sapien
caggtcctccggcatgtagtattta

SEQ ID NO: 4729782 - DNA, 25 bp, Homo sapien
tcaggttgtagcaacctcttcattc

SEQ ID NO: 4729783 - DNA, 25 bp, Homo sapien
ttatgcgtgtccacagtacaccctc

SEQ ID NO: 4729784 - DNA, 25 bp, Homo sapien
tgggacaatgggtttatgcgtgtcc

SEQ ID NO: 4729785 - DNA, 25 bp, Homo sapien
agataagcctcccctcatgaaatgc

SEQ ID NO: 4729786 - DNA, 25 bp, Homo sapien
ccacagataagcctcccctcatgaa

SEQ ID NO: 4729787 - DNA, 25 bp, Homo sapien
acagataagcctcccctcatgaaat

SEQ ID NO: 4729788 - DNA, 25 bp, Homo sapien
ataagcctcccctcatgaaatgcca

SEQ ID NO: 4729789 - DNA, 25 bp, Homo sapien
ctaccattgacatcagggctgcatt

SEQ ID NO: 4729790 - DNA, 25 bp, Homo sapien
ccgggctaccattgacatcagggct

SEQ ID NO: 4729791 - DNA, 25 bp, Homo sapien
ggctaccattgacatcagggctgca

SEQ ID NO: 4729792 - DNA, 25 bp, Homo sapien
cccgggctaccattgacatcagggc

SEQ ID NO: 4729793 - DNA, 25 bp, Homo sapien
gaattatcctcactcatcaggcttc

SEQ ID NO: 4729794 - DNA, 25 bp, Homo sapien
gtggaattatcctcactcatcaggc

SEQ ID NO: 4729795 - DNA, 25 bp, Homo sapien
tgtggaattatcctcactcatcagg

SEQ ID NO: 4729796 - DNA, 25 bp, Homo sapien
tggaattatcctcactcatcaggct

SEQ ID NO: 4729797 - DNA, 25 bp, Homo sapien
tcaacccttcccagatgagtgtcca

SEQ ID NO: 4729798 - DNA, 25 bp, Homo sapien
tacttggccaagtatgaagcaggga

SEQ ID NO: 4729799 - DNA, 25 bp, Homo sapien
aaccaaagtcctcatctagccctgg

SEQ ID NO: 4729800 - DNA, 25 bp, Homo sapien
tgagggtttgccttcgtacttggcc

SEQ ID NO: 4729801 - DNA, 25 bp, Homo sapien
gctactgttgcaccctcaaagtggg

SEQ ID NO: 4729802 - DNA, 25 bp, Homo sapien
catgttctggaagggtcacgggctc

SEQ ID NO: 4729803 - DNA, 25 bp, Homo sapien
gaaagaagggcctaacctcgcattg

SEQ ID NO: 4729804 - DNA, 25 bp, Homo sapien
gtatctaaggatccagaggcttcaa

SEQ ID NO: 4729805 - DNA, 25 bp, Homo sapien
tgctatctgagagggtgtggaggca

SEQ ID NO: 4729806 - DNA, 25 bp, Homo sapien
tgatgctatctgagagggtgtggag

SEQ ID NO: 4729807 - DNA, 25 bp, Homo sapien
gactgttgcccctgatgtcagaatt

SEQ ID NO: 4729808 - DNA, 25 bp, Homo sapien
tcagaattgggctgtggtgtctgct

SEQ ID NO: 4729809 - DNA, 25 bp, Homo sapien
tctaggccaggtctagcaacgggct

SEQ ID NO: 4729810 - DNA, 25 bp, Homo sapien
tggtaaaagcccatgagcgcttcac

SEQ ID NO: 4729811 - DNA, 25 bp, Homo sapien
ttagcctggtgcttattctgctcca

SEQ ID NO: 4729812 - DNA, 25 bp, Homo sapien
agagccaaagtcaccctccaggtat

SEQ ID NO: 4729813 - DNA, 25 bp, Homo sapien
cacaggtggccccagtgtaacgtga

SEQ ID NO: 4729814 - DNA, 25 bp, Homo sapien
ggacaaggcctaccctggtcaccta

SEQ ID NO: 4729815 - DNA, 25 bp, Homo sapien
gacaggatggcagacctgcccatag

SEQ ID NO: 4729816 - DNA, 25 bp, Homo sapien
gtggccccagtgtaacgtgaaccaa

SEQ ID NO: 4729817 - DNA, 25 bp, Homo sapien
ccaatcaacctcactagagaatgtc

SEQ ID NO: 4729818 - DNA, 25 bp, Homo sapien
agccaatcaacctcactagagaatg

SEQ ID NO: 4729819 - DNA, 25 bp, Homo sapien
cctttcctctgatagactagaattc

SEQ ID NO: 4729820 - DNA, 25 bp, Homo sapien
gccaatcaacctcactagagaatgt

SEQ ID NO: 4729821 - DNA, 25 bp, Homo sapien
catcacagagccttttaccagcaaa

SEQ ID NO: 4729822 - DNA, 25 bp, Homo sapien
tgtgcctgtcctttcatcacagagc

SEQ ID NO: 4729823 - DNA, 25 bp, Homo sapien
gccttttaccagcaaactcaatatg

SEQ ID NO: 4729824 - DNA, 25 bp, Homo sapien
ctcaatatggaagcccaacacacag

SEQ ID NO: 4729825 - DNA, 25 bp, Homo sapien
cagtcccaattcagcaattgtcttc

SEQ ID NO: 4729826 - DNA, 25 bp, Homo sapien
agccagtcccaattcagcaattgtc

SEQ ID NO: 4729827 - DNA, 25 bp, Homo sapien
gccagtcccaattcagcaattgtct

SEQ ID NO: 4729828 - DNA, 25 bp, Homo sapien
gtcccaattcagcaattgtcttcct

SEQ ID NO: 4729829 - DNA, 25 bp, Homo sapien
caagggttaatcattatgtcagttc

SEQ ID NO: 4729830 - DNA, 25 bp, Homo sapien
taagcacaaagtaaaggacctgaaa

SEQ ID NO: 4729831 - DNA, 25 bp, Homo sapien
tttggcgcttcatacttggcaaggg

SEQ ID NO: 4729832 - DNA, 25 bp, Homo sapien
gagaaaccctcacagaccaactttg

SEQ ID NO: 4729833 - DNA, 25 bp, Homo sapien
caacaaataattctcagttgtctgc

SEQ ID NO: 4729834 - DNA, 25 bp, Homo sapien
tattcaagtgctctggaagtggtga

SEQ ID NO: 4729835 - DNA, 25 bp, Homo sapien
ttattcaagtgctctggaagtggtg

SEQ ID NO: 4729836 - DNA, 25 bp, Homo sapien
aatcatctacagaaagatggctgct

SEQ ID NO: 4729837 - DNA, 25 bp, Homo sapien
tgaatcatctacagaaagatggctg

SEQ ID NO: 4729838 - DNA, 25 bp, Homo sapien
ttctgaatcatctacagaaagatgg

SEQ ID NO: 4729839 - DNA, 25 bp, Homo sapien
tatatcctgtgacccaaagcatcca

SEQ ID NO: 4729840 - DNA, 25 bp, Homo sapien
tgttacagagctttggcatggccag

SEQ ID NO: 4729841 - DNA, 25 bp, Homo sapien
taatctgaagtgcaggtcggcagga

SEQ ID NO: 4729842 - DNA, 25 bp, Homo sapien
tgtgttccagacgaagtggctctcg

SEQ ID NO: 4729843 - DNA, 25 bp, Homo sapien
ggatatgaagctaggcacctgccca

SEQ ID NO: 4729844 - DNA, 25 bp, Homo sapien
agctctcatcacaccccacaatact

SEQ ID NO: 4729845 - DNA, 25 bp, Homo sapien
tcgtgagaggatccagggaatccat

SEQ ID NO: 4729846 - DNA, 25 bp, Homo sapien
caccccacaatactgcatgcaggga

SEQ ID NO: 4729847 - DNA, 25 bp, Homo sapien
catgcagggatcttagagggtccat

SEQ ID NO: 4729848 - DNA, 25 bp, Homo sapien
tacatgtcggtcaattgtgctcaag

SEQ ID NO: 4729849 - DNA, 25 bp, Homo sapien
ttagggaataccaactacatgtcgg

SEQ ID NO: 4729850 - DNA, 25 bp, Homo sapien
tactctctggttctaacagttaggg

SEQ ID NO: 4729851 - DNA, 25 bp, Homo sapien
gcacaaatgcaaattcagacccaga

SEQ ID NO: 4729852 - DNA, 25 bp, Homo sapien
tctgtagtttgaagaggacagcctg

SEQ ID NO: 4729853 - DNA, 25 bp, Homo sapien
gaggtccgtgaactgttcagcttgt

SEQ ID NO: 4729854 - DNA, 25 bp, Homo sapien
gtccgtgaactgttcagcttgtcct

SEQ ID NO: 4729855 - DNA, 25 bp, Homo sapien
agaggtccgtgaactgttcagcttg

SEQ ID NO: 4729856 - DNA, 25 bp, Homo sapien
aggtccgtgaactgttcagcttgtc

SEQ ID NO: 4729857 - DNA, 25 bp, Homo sapien
actccatcttgtcgctacatggata

SEQ ID NO: 4729858 - DNA, 25 bp, Homo sapien
gacagacagggtagggattgtaatc

SEQ ID NO: 4729859 - DNA, 25 bp, Homo sapien
atttactgtcccgaggtttgatggg

SEQ ID NO: 4729860 - DNA, 25 bp, Homo sapien
tgatggggtccactcgacagacagg

SEQ ID NO: 4729861 - DNA, 25 bp, Homo sapien
gtgccactttgtgaggcccaaaatc

SEQ ID NO: 4729862 - DNA, 25 bp, Homo sapien
actggtcatactggtggaccttcac

SEQ ID NO: 4729863 - DNA, 25 bp, Homo sapien
gccactttgtgaggcccaaaatctc

SEQ ID NO: 4729864 - DNA, 25 bp, Homo sapien
gaactggtcatactggtggaccttc

SEQ ID NO: 4729865 - DNA, 25 bp, Homo sapien
catgattgtcagtaaacccgaaccg

SEQ ID NO: 4729866 - DNA, 25 bp, Homo sapien
tctggagcagcattactcagccatg

SEQ ID NO: 4729867 - DNA, 25 bp, Homo sapien
tccactgtaacctgtcttgcgtgaa

SEQ ID NO: 4729868 - DNA, 25 bp, Homo sapien
cttgactagcaaaggtaacacgctc

SEQ ID NO: 4729869 - DNA, 25 bp, Homo sapien
tagtctccccagaattgctccaatt

SEQ ID NO: 4729870 - DNA, 25 bp, Homo sapien
gaattgctccaattaactagctttt

SEQ ID NO: 4729871 - DNA, 25 bp, Homo sapien
ctttctgtggtacatttcccagtct

SEQ ID NO: 4729872 - DNA, 25 bp, Homo sapien
agtctatattttagtctccccagaa

SEQ ID NO: 4729873 - DNA, 25 bp, Homo sapien
tctcccttgacttccgtgataccac

SEQ ID NO: 4729874 - DNA, 25 bp, Homo sapien
ggttgttcatagcatccatcctctc

SEQ ID NO: 4729875 - DNA, 25 bp, Homo sapien
tttccagacccaaccgctgcttctc

SEQ ID NO: 4729876 - DNA, 25 bp, Homo sapien
tctcaaccttatcccactgtggttg

SEQ ID NO: 4729877 - DNA, 25 bp, Homo sapien
ctgcatacattaatactgtttgccc

SEQ ID NO: 4729878 - DNA, 25 bp, Homo sapien
gcatacattaatactgtttgccctc

SEQ ID NO: 4729879 - DNA, 25 bp, Homo sapien
atacattaatactgtttgccctcac

SEQ ID NO: 4729880 - DNA, 25 bp, Homo sapien
catacattaatactgtttgccctca

SEQ ID NO: 4729881 - DNA, 25 bp, Homo sapien
gcttgaaggactctctgggcaggta

SEQ ID NO: 4729882 - DNA, 25 bp, Homo sapien
tggtactcccgccttggcttgaagg

SEQ ID NO: 4729883 - DNA, 25 bp, Homo sapien
tagtcaggccttccattggtatagg

SEQ ID NO: 4729884 - DNA, 25 bp, Homo sapien
ttggtataggccctttctggtactc

SEQ ID NO: 4729885 - DNA, 25 bp, Homo sapien
ggtttctctgttttatcataaatct

SEQ ID NO: 4729886 - DNA, 25 bp, Homo sapien
ttatcataaatcttggtagggagat

SEQ ID NO: 4729887 - DNA, 25 bp, Homo sapien
taaatcttggtagggagatgtggac

SEQ ID NO: 4729888 - DNA, 25 bp, Homo sapien
tcataaatcttggtagggagatgtg

SEQ ID NO: 4729889 - DNA, 25 bp, Homo sapien
gctcctgggtcaactcggaatatca

SEQ ID NO: 4729890 - DNA, 25 bp, Homo sapien
taactggttagctcctgggtcaact

SEQ ID NO: 4729891 - DNA, 25 bp, Homo sapien
ggctctccaatagggccagccagtg

SEQ ID NO: 4729892 - DNA, 25 bp, Homo sapien
tccaaggctctccaatagggccagc

SEQ ID NO: 4729893 - DNA, 25 bp, Homo sapien
gactcttaaaggatttgcagcccat

SEQ ID NO: 4729894 - DNA, 25 bp, Homo sapien
gttcagactcttaaaggatttgcag

SEQ ID NO: 4729895 - DNA, 25 bp, Homo sapien
cagactcttaaaggatttgcagccc

SEQ ID NO: 4729896 - DNA, 25 bp, Homo sapien
tcagactcttaaaggatttgcagcc

SEQ ID NO: 4729897 - DNA, 25 bp, Homo sapien
tgagagcttgtgacctgtcacagct

SEQ ID NO: 4729898 - DNA, 25 bp, Homo sapien
tcccagtagttgagagcttgtgacc

SEQ ID NO: 4729899 - DNA, 25 bp, Homo sapien
tagttgagagcttgtgacctgtcac

SEQ ID NO: 4729900 - DNA, 25 bp, Homo sapien
agtagttgagagcttgtgacctgtc

SEQ ID NO: 4729901 - DNA, 25 bp, Homo sapien
tgcactaggcttgttcccacatggc

SEQ ID NO: 4729902 - DNA, 25 bp, Homo sapien
cactctcttcacaagcaatctagga

SEQ ID NO: 4729903 - DNA, 25 bp, Homo sapien
tttcggatgaaacccaacagctgtg

SEQ ID NO: 4729904 - DNA, 25 bp, Homo sapien
gaagtttgtgtcagctgcactaggc

SEQ ID NO: 4729905 - DNA, 25 bp, Homo sapien
tccatatagccccagatgtttggct

SEQ ID NO: 4729906 - DNA, 25 bp, Homo sapien
ataaatgccaccatccatatagccc

SEQ ID NO: 4729907 - DNA, 25 bp, Homo sapien
gatgtttggcttgatgtgtgaacat

SEQ ID NO: 4729908 - DNA, 25 bp, Homo sapien
gtgtgtaaacagttggataaatgcc

SEQ ID NO: 4729909 - DNA, 25 bp, Homo sapien
ttggtagccaatgccaaattcaatt

SEQ ID NO: 4729910 - DNA, 25 bp, Homo sapien
attttctccactgctcgtaagctgc

SEQ ID NO: 4729911 - DNA, 25 bp, Homo sapien
actgctcgtaagctgccaaaactga

SEQ ID NO: 4729912 - DNA, 25 bp, Homo sapien
ttcaattgagcagcgaggattttct

SEQ ID NO: 4729913 - DNA, 25 bp, Homo sapien
cacgcagagccaccactccgactcc

SEQ ID NO: 4729914 - DNA, 25 bp, Homo sapien
ccctttctgttccggcagctgcatt

SEQ ID NO: 4729915 - DNA, 25 bp, Homo sapien
ttctgttccggcagctgcattccaa

SEQ ID NO: 4729916 - DNA, 25 bp, Homo sapien
ccctgccctttctgttccggcagct

SEQ ID NO: 4729917 - DNA, 25 bp, Homo sapien
acttcaacatcatgagtgaagtggc

SEQ ID NO: 4729918 - DNA, 25 bp, Homo sapien
gtccaagaggaacttcaacatcatg

SEQ ID NO: 4729919 - DNA, 25 bp, Homo sapien
tcaacatcatgagtgaagtggccaa

SEQ ID NO: 4729920 - DNA, 25 bp, Homo sapien
aagaggaacttcaacatcatgagtg

SEQ ID NO: 4729921 - DNA, 25 bp, Homo sapien
catccaaccatagaggctctacatg

SEQ ID NO: 4729922 - DNA, 25 bp, Homo sapien
tccgttcctggggaacaactgaatg

SEQ ID NO: 4729923 - DNA, 25 bp, Homo sapien
tgtctcctccgttcctggggaacaa

SEQ ID NO: 4729924 - DNA, 25 bp, Homo sapien
aactgaatgttggacaacatccaac

SEQ ID NO: 4729925 - DNA, 25 bp, Homo sapien
ggttgacactcaatgaagtaaccat

SEQ ID NO: 4729926 - DNA, 25 bp, Homo sapien
gaggttgacactcaatgaagtaacc

SEQ ID NO: 4729927 - DNA, 25 bp, Homo sapien
aggttgacactcaatgaagtaacca

SEQ ID NO: 4729928 - DNA, 25 bp, Homo sapien
gaacttgttgcaaggcaaaggcaaa

SEQ ID NO: 4729929 - DNA, 25 bp, Homo sapien
ctgtgaggcctgagcatgtgaccaa

SEQ ID NO: 4729930 - DNA, 25 bp, Homo sapien
tcaatgcagaccaattgggcctggc

SEQ ID NO: 4729931 - DNA, 25 bp, Homo sapien
caccatattcatcttgtggaaggca

SEQ ID NO: 4729932 - DNA, 25 bp, Homo sapien
tgtagaagcctttcaagtccgatga

SEQ ID NO: 4729933 - DNA, 25 bp, Homo sapien
tgtacccatagctctctgtagaagc

SEQ ID NO: 4729934 - DNA, 25 bp, Homo sapien
ctgtctttccagaaatctaggtttc

SEQ ID NO: 4729935 - DNA, 25 bp, Homo sapien
tagtgttgaaagtgatcctagagat

SEQ ID NO: 4729936 - DNA, 25 bp, Homo sapien
aaccgtgtgggatgaggccaagcaa

SEQ ID NO: 4729937 - DNA, 25 bp, Homo sapien
tgtccacggaggagatcatccagcg

SEQ ID NO: 4729938 - DNA, 25 bp, Homo sapien
tgggtgtgaacaaagactcctatcc

SEQ ID NO: 4729939 - DNA, 25 bp, Homo sapien
gagacccacggagcaatacagtgac

SEQ ID NO: 4729940 - DNA, 25 bp, Homo sapien
ccagctggtgcagatgttcactgga

SEQ ID NO: 4729941 - DNA, 25 bp, Homo sapien
ctagtccgggatgccttcgccctgg

SEQ ID NO: 4729942 - DNA, 25 bp, Homo sapien
caaggagaaagcgccctccatcatc

SEQ ID NO: 4729943 - DNA, 25 bp, Homo sapien
ctggagatggtgccaagctagtccg

SEQ ID NO: 4729944 - DNA, 25 bp, Homo sapien
gcaggagcacagttcacagatgcac

SEQ ID NO: 4729945 - DNA, 25 bp, Homo sapien
gagcacagttcacagatgcacttcg

SEQ ID NO: 4729946 - DNA, 25 bp, Homo sapien
caggagcacagttcacagatgcact

SEQ ID NO: 4729947 - DNA, 25 bp, Homo sapien
ccgcaggagcacagttcacagatgc

SEQ ID NO: 4729948 - DNA, 25 bp, Homo sapien
aatgtcctgtcgtctgttgccctcc

SEQ ID NO: 4729949 - DNA, 25 bp, Homo sapien
caggtgttctgtttactcgaaggaa

SEQ ID NO: 4729950 - DNA, 25 bp, Homo sapien
tttaagtggcccttttgcaatgtcc

SEQ ID NO: 4729951 - DNA, 25 bp, Homo sapien
ccagacttaagcacctggagcggct

SEQ ID NO: 4729952 - DNA, 25 bp, Homo sapien
tgcaacagaacaaaagaccgaagtc

SEQ ID NO: 4729953 - DNA, 25 bp, Homo sapien
tcgagcttcccttccatcttagggc

SEQ ID NO: 4729954 - DNA, 25 bp, Homo sapien
agcagcggcttttcaaggctcgtcg

SEQ ID NO: 4729955 - DNA, 25 bp, Homo sapien
gccccggttaggtttcattagagca

SEQ ID NO: 4729956 - DNA, 25 bp, Homo sapien
agcgcgacgtccaccggtttgagaa

SEQ ID NO: 4729957 - DNA, 25 bp, Homo sapien
gatgagacgctctacaaagcctggt

SEQ ID NO: 4729958 - DNA, 25 bp, Homo sapien
cactaccagtgcaaagagcagcgcg

SEQ ID NO: 4729959 - DNA, 25 bp, Homo sapien
gattcccaacgttcagcagctggag

SEQ ID NO: 4729960 - DNA, 25 bp, Homo sapien
cagcagatgtggatgacgctactca

SEQ ID NO: 4729961 - DNA, 25 bp, Homo sapien
gagtaagaagctattcaggtgtaat

SEQ ID NO: 4729962 - DNA, 25 bp, Homo sapien
cattagtataaagactccagatgtg

SEQ ID NO: 4729963 - DNA, 25 bp, Homo sapien
cattaaaccctttctagcagcagat

SEQ ID NO: 4729964 - DNA, 25 bp, Homo sapien
tctagagcaactatgtatctgcaac

SEQ ID NO: 4729965 - DNA, 25 bp, Homo sapien
tatctcaggtttcaagctgatgtat

SEQ ID NO: 4729966 - DNA, 25 bp, Homo sapien
tattttaaacttaggatgcagactg

SEQ ID NO: 4729967 - DNA, 25 bp, Homo sapien
agataatagtctgcttttacacagg

SEQ ID NO: 4729968 - DNA, 25 bp, Homo sapien
gaattttaggcaaggaagtgaccca

SEQ ID NO: 4729969 - DNA, 25 bp, Homo sapien
gacaaccaacttagagaaaggcagc

SEQ ID NO: 4729970 - DNA, 25 bp, Homo sapien
tctaaagacccatgctcactgaagc

SEQ ID NO: 4729971 - DNA, 25 bp, Homo sapien
ttcacactgggacaggacaaccaac

SEQ ID NO: 4729972 - DNA, 25 bp, Homo sapien
aataagttacactactactttgtca

SEQ ID NO: 4729973 - DNA, 25 bp, Homo sapien
catcccaaggtactacttttctcac

SEQ ID NO: 4729974 - DNA, 25 bp, Homo sapien
attgactgaagttataacataagaa

SEQ ID NO: 4729975 - DNA, 25 bp, Homo sapien
tgcttacaagattactcaagaaatc

SEQ ID NO: 4729976 - DNA, 25 bp, Homo sapien
aacagtgttacacttccaacatgta

SEQ ID NO: 4729977 - DNA, 25 bp, Homo sapien
cagtgttacacttccaacatgtatt

SEQ ID NO: 4729978 - DNA, 25 bp, Homo sapien
gcatagcttcaatttaagtgcatca

SEQ ID NO: 4729979 - DNA, 25 bp, Homo sapien
tgtaattcattttctatcctgtggc

SEQ ID NO: 4729980 - DNA, 25 bp, Homo sapien
tcaagtcagacggtggttcttttgc

SEQ ID NO: 4729981 - DNA, 25 bp, Homo sapien
tgtcaagtcagacggtggttctttt

SEQ ID NO: 4729982 - DNA, 25 bp, Homo sapien
cttgtcaagtcagacggtggttctt

SEQ ID NO: 4729983 - DNA, 25 bp, Homo sapien
aagtcagacggtggttcttttgcat

SEQ ID NO: 4729984 - DNA, 25 bp, Homo sapien
tatgggcaaatcagagtatgtaatg

SEQ ID NO: 4729985 - DNA, 25 bp, Homo sapien
ggcagtgtataactattatgggcaa

SEQ ID NO: 4729986 - DNA, 25 bp, Homo sapien
caagggaagaataccatgtgacaat

SEQ ID NO: 4729987 - DNA, 25 bp, Homo sapien
aagtgaagagaactgtgattaactc

SEQ ID NO: 4729988 - DNA, 25 bp, Homo sapien
taacaataaaggtcatgcagcattc

SEQ ID NO: 4729989 - DNA, 25 bp, Homo sapien
aaaaccaccttccactgggcaagat

SEQ ID NO: 4729990 - DNA, 25 bp, Homo sapien
gagattctgaaaggacctgtccagt

SEQ ID NO: 4729991 - DNA, 25 bp, Homo sapien
cctgtccagtgagggatcattcccc

SEQ ID NO: 4729992 - DNA, 25 bp, Homo sapien
taaaattggcctctgaactactgga

SEQ ID NO: 4729993 - DNA, 25 bp, Homo sapien
gactacatgctattgtggttctcaa

SEQ ID NO: 4729994 - DNA, 25 bp, Homo sapien
gagaccgttttctttcaccgatgga

SEQ ID NO: 4729995 - DNA, 25 bp, Homo sapien
ggtgtccaaaaagttaagcgtatca

SEQ ID NO: 4729996 - DNA, 25 bp, Homo sapien
tgaggcacacactcgcaatctgaaa

SEQ ID NO: 4729997 - DNA, 25 bp, Homo sapien
gcaacacaggtaatgattctggcaa

SEQ ID NO: 4729998 - DNA, 25 bp, Homo sapien
gtctccattcggctagtttctgaaa

SEQ ID NO: 4729999 - DNA, 25 bp, Homo sapien
atctatcctattgccgacagcaggg

SEQ ID NO: 4730000 - DNA, 25 bp, Homo sapien
agcttttctccatgagctcctaatt

SEQ ID NO: 4730001 - DNA, 25 bp, Homo sapien
ttcaatagcttttctccatgagctc

SEQ ID NO: 4730002 - DNA, 25 bp, Homo sapien
aatagcttttctccatgagctccta

SEQ ID NO: 4730003 - DNA, 25 bp, Homo sapien
ttctccatgagctcctaatttcagt

SEQ ID NO: 4730004 - DNA, 25 bp, Homo sapien
aataaacagcctttggcaactcagc

SEQ ID NO: 4730005 - DNA, 25 bp, Homo sapien
aaaagactgttatgtgagaatgccc

SEQ ID NO: 4730006 - DNA, 25 bp, Homo sapien
gagaatgcccacacttagtacgtcg

SEQ ID NO: 4730007 - DNA, 25 bp, Homo sapien
gctaaaaagatctgtcaggccatgg

SEQ ID NO: 4730008 - DNA, 25 bp, Homo sapien
gttttctggagtacggggaatctga

SEQ ID NO: 4730009 - DNA, 25 bp, Homo sapien
agagagctgtggtgaatcagataaa

SEQ ID NO: 4730010 - DNA, 25 bp, Homo sapien
gtgaatcagataaaactgctctggc

SEQ ID NO: 4730011 - DNA, 25 bp, Homo sapien
gaatctgattccttgttaagaaggg

SEQ ID NO: 4730012 - DNA, 25 bp, Homo sapien
tttgaaatggatcactttttttagc

SEQ ID NO: 4730013 - DNA, 25 bp, Homo sapien
ttgaaatggatcactttttttagct

SEQ ID NO: 4730014 - DNA, 25 bp, Homo sapien
ttctttgggagttcccatctttgtg

SEQ ID NO: 4730015 - DNA, 25 bp, Homo sapien
tgaaatggatcactttttttagctg

SEQ ID NO: 4730016 - DNA, 25 bp, Homo sapien
ttcaagtactgtaacactgtttcta

SEQ ID NO: 4730017 - DNA, 25 bp, Homo sapien
actgtaacactgtttctatctgatg

SEQ ID NO: 4730018 - DNA, 25 bp, Homo sapien
caagtactgtaacactgtttctatc

SEQ ID NO: 4730019 - DNA, 25 bp, Homo sapien
gtactgtaacactgtttctatctga

SEQ ID NO: 4730020 - DNA, 25 bp, Homo sapien
tgtctgccccgtatctgtccgttac

SEQ ID NO: 4730021 - DNA, 25 bp, Homo sapien
ctgtctgccccgtatctgtccgtta

SEQ ID NO: 4730022 - DNA, 25 bp, Homo sapien
tctgtctgccccgtatctgtccgtt

SEQ ID NO: 4730023 - DNA, 25 bp, Homo sapien
cactcaattcgtcccggtcatcaaa

SEQ ID NO: 4730024 - DNA, 25 bp, Homo sapien
gatttcactcaattcgtcccggtca

SEQ ID NO: 4730025 - DNA, 25 bp, Homo sapien
caattcgtcccggtcatcaaaaggc

SEQ ID NO: 4730026 - DNA, 25 bp, Homo sapien
tcccggtcatcaaaaggcagtttat

SEQ ID NO: 4730027 - DNA, 25 bp, Homo sapien
tgacaagtagagcagtatttcagcc

SEQ ID NO: 4730028 - DNA, 25 bp, Homo sapien
ctagggaggcatggtgacaagtaga

SEQ ID NO: 4730029 - DNA, 25 bp, Homo sapien
tagggaggcatggtgacaagtagag

SEQ ID NO: 4730030 - DNA, 25 bp, Homo sapien
gggaggcatggtgacaagtagagca

SEQ ID NO: 4730031 - DNA, 25 bp, Homo sapien
ttgatggaatcgatgagtaaatgcc

SEQ ID NO: 4730032 - DNA, 25 bp, Homo sapien
tatttgatggattgatggaatcgat

SEQ ID NO: 4730033 - DNA, 25 bp, Homo sapien
gatggattgatggaatcgatgagta

SEQ ID NO: 4730034 - DNA, 25 bp, Homo sapien
tgttaactatttgatggattgatgg

SEQ ID NO: 4730035 - DNA, 25 bp, Homo sapien
ttcttggttatgttgcttatgtgca

SEQ ID NO: 4730036 - DNA, 25 bp, Homo sapien
tgttggctagatcatgtagcgctcc

SEQ ID NO: 4730037 - DNA, 25 bp, Homo sapien
tcatgtagcgctcccaaggtatcac

SEQ ID NO: 4730038 - DNA, 25 bp, Homo sapien
gtagcgctcccaaggtatcactgtc

SEQ ID NO: 4730039 - DNA, 25 bp, Homo sapien
caggatcaaacgaaaggggagacat

SEQ ID NO: 4730040 - DNA, 25 bp, Homo sapien
ggggagacattggtggtaaaagatc

SEQ ID NO: 4730041 - DNA, 25 bp, Homo sapien
ggagacattggtggtaaaagatcta

SEQ ID NO: 4730042 - DNA, 25 bp, Homo sapien
tgaggcaggatcaaacgaaagggga

SEQ ID NO: 4730043 - DNA, 25 bp, Homo sapien
caacctttaattagactgaaaggag

SEQ ID NO: 4730044 - DNA, 25 bp, Homo sapien
tggagtccaacctttaattagactg

SEQ ID NO: 4730045 - DNA, 25 bp, Homo sapien
gagtccaacctttaattagactgaa

SEQ ID NO: 4730046 - DNA, 25 bp, Homo sapien
ctttaattagactgaaaggagacaa

SEQ ID NO: 4730047 - DNA, 25 bp, Homo sapien
tgttgagaaaaccaccctactcctc

SEQ ID NO: 4730048 - DNA, 25 bp, Homo sapien
caccctactcctcccacagtaaaat

SEQ ID NO: 4730049 - DNA, 25 bp, Homo sapien
gaagagctattaaacttatacaagt

SEQ ID NO: 4730050 - DNA, 25 bp, Homo sapien
aagagctattaaacttatacaagtt

SEQ ID NO: 4730051 - DNA, 25 bp, Homo sapien
tgttaagaggttcagttttccagcc

SEQ ID NO: 4730052 - DNA, 25 bp, Homo sapien
caatcttgcttgatcagcctgacaa

SEQ ID NO: 4730053 - DNA, 25 bp, Homo sapien
gacaacgttcatatttcatcacctt

SEQ ID NO: 4730054 - DNA, 25 bp, Homo sapien
ggtagtgaaggtctaccgtcaatct

SEQ ID NO: 4730055 - DNA, 25 bp, Homo sapien
agcatattggttaacaagactaagg

SEQ ID NO: 4730056 - DNA, 25 bp, Homo sapien
gaatattaatagcaacattagttcc

SEQ ID NO: 4730057 - DNA, 25 bp, Homo sapien
ttggaatattaatagcaacattagt

SEQ ID NO: 4730058 - DNA, 25 bp, Homo sapien
gagcgtttcattcactgaagcccac

SEQ ID NO: 4730059 - DNA, 25 bp, Homo sapien
tttttcttccatattactgtggtca

SEQ ID NO: 4730060 - DNA, 25 bp, Homo sapien
ttttttcttccatattactgtggtc

SEQ ID NO: 4730061 - DNA, 25 bp, Homo sapien
tttcttccatattactgtggtcatc

SEQ ID NO: 4730062 - DNA, 25 bp, Homo sapien
tcttccatattactgtggtcatcat

SEQ ID NO: 4730063 - DNA, 25 bp, Homo sapien
ggttttccaatcctatacattcaga

SEQ ID NO: 4730064 - DNA, 25 bp, Homo sapien
caagtttcgtacctgcttaactgat

SEQ ID NO: 4730065 - DNA, 25 bp, Homo sapien
gatctcaagtttcgtacctgcttaa

SEQ ID NO: 4730066 - DNA, 25 bp, Homo sapien
ttcagatctcaagtttcgtacctgc

SEQ ID NO: 4730067 - DNA, 25 bp, Homo sapien
tctgctacgtgcgaaatggcatctg

SEQ ID NO: 4730068 - DNA, 25 bp, Homo sapien
gcaatgcatttgtgcaagtcctgtg

SEQ ID NO: 4730069 - DNA, 25 bp, Homo sapien
aaaatctgctacgtgcgaaatggca

SEQ ID NO: 4730070 - DNA, 25 bp, Homo sapien
aaatggcatctggcaatgcatttgt

SEQ ID NO: 4730071 - DNA, 25 bp, Homo sapien
gatgaataaacttaggaccaccagg

SEQ ID NO: 4730072 - DNA, 25 bp, Homo sapien
tgcaaaatgatacatcagatgaata

SEQ ID NO: 4730073 - DNA, 25 bp, Homo sapien
gcaaaatgatacatcagatgaataa

SEQ ID NO: 4730074 - DNA, 25 bp, Homo sapien
gaataaacttaggaccaccaggaga

SEQ ID NO: 4730075 - DNA, 25 bp, Homo sapien
cacagcaatgttttcggaattcagt

SEQ ID NO: 4730076 - DNA, 25 bp, Homo sapien
tcacagcaatgttttcggaattcag

SEQ ID NO: 4730077 - DNA, 25 bp, Homo sapien
ctttggtgagagactggtccagaac

SEQ ID NO: 4730078 - DNA, 25 bp, Homo sapien
tcacggttcagcttgtcaaacatgt

SEQ ID NO: 4730079 - DNA, 25 bp, Homo sapien
tatgaaaggcatcacggttcagctt

SEQ ID NO: 4730080 - DNA, 25 bp, Homo sapien
aaattatatgaaaggcatcacggtt

SEQ ID NO: 4730081 - DNA, 25 bp, Homo sapien
gctgagtaagactttgacacaaatt

SEQ ID NO: 4730082 - DNA, 25 bp, Homo sapien
gaaacatgccttataatggtaacaa

SEQ ID NO: 4730083 - DNA, 25 bp, Homo sapien
tttattaagagtacatgttagacct

SEQ ID NO: 4730084 - DNA, 25 bp, Homo sapien
caatataagactggcagaactggct

SEQ ID NO: 4730085 - DNA, 25 bp, Homo sapien
ttatgctaactccaacatgccttac

SEQ ID NO: 4730086 - DNA, 25 bp, Homo sapien
tacagtgggaatgattaaatagaga

SEQ ID NO: 4730087 - DNA, 25 bp, Homo sapien
cctacagtgggaatgattaaataga

SEQ ID NO: 4730088 - DNA, 25 bp, Homo sapien
tgattaaatagagatactggctaaa

SEQ ID NO: 4730089 - DNA, 25 bp, Homo sapien
gacacgatctttccgcaggcaatgg

SEQ ID NO: 4730090 - DNA, 25 bp, Homo sapien
actccgaggtgcgtgtgcgacacga

SEQ ID NO: 4730091 - DNA, 25 bp, Homo sapien
tgcagatacatccagagatgctcct

SEQ ID NO: 4730092 - DNA, 25 bp, Homo sapien
tggctcgaagccgagcgcctgcaga

SEQ ID NO: 4730093 - DNA, 25 bp, Homo sapien
agcgatttcgcctcaaagggcctca

SEQ ID NO: 4730094 - DNA, 25 bp, Homo sapien
gactcccgcccttaaggaagagcag

SEQ ID NO: 4730095 - DNA, 25 bp, Homo sapien
tgcaaagaaagaaagcgcaagccca

SEQ ID NO: 4730096 - DNA, 25 bp, Homo sapien
tttctaacggtatagtgcggccacc

SEQ ID NO: 4730097 - DNA, 25 bp, Homo sapien
attgcgcggccagcgacttgctctg

SEQ ID NO: 4730098 - DNA, 25 bp, Homo sapien
gcgacttgctctgcgcttgcttaac

SEQ ID NO: 4730099 - DNA, 25 bp, Homo sapien
agatcctcgggccttcgggtttctg

SEQ ID NO: 4730100 - DNA, 25 bp, Homo sapien
tgcttaaccgctgtcgtgcccagat

SEQ ID NO: 4730101 - DNA, 25 bp, Homo sapien
tattcaacatcttgccctgagagga

SEQ ID NO: 4730102 - DNA, 25 bp, Homo sapien
caaattgcgtattcaaccaaaaggg

SEQ ID NO: 4730103 - DNA, 25 bp, Homo sapien
ggacagggccattagcatgtgaatt

SEQ ID NO: 4730104 - DNA, 25 bp, Homo sapien
tcagtctcagatgtcaagtctatgg

SEQ ID NO: 4730105 - DNA, 25 bp, Homo sapien
tctgagctcatggagactttagtgc

SEQ ID NO: 4730106 - DNA, 25 bp, Homo sapien
tagtggtggaacctagtcaatgaag

SEQ ID NO: 4730107 - DNA, 25 bp, Homo sapien
gagttgtcaggtccatctgagctca

SEQ ID NO: 4730108 - DNA, 25 bp, Homo sapien
caaacaccgatgaagtgagttgtca

SEQ ID NO: 4730109 - DNA, 25 bp, Homo sapien
ccttttcagtgaggtagtcagacat

SEQ ID NO: 4730110 - DNA, 25 bp, Homo sapien
tctttcgcccaggccagagcgcagt

SEQ ID NO: 4730111 - DNA, 25 bp, Homo sapien
tttgagatggagtcttgctctttcg

SEQ ID NO: 4730112 - DNA, 25 bp, Homo sapien
caggccagagcgcagtggcgctatc

SEQ ID NO: 4730113 - DNA, 25 bp, Homo sapien
ttgagatggagtcttgctctttcgc

SEQ ID NO: 4730114 - DNA, 25 bp, Homo sapien
aagcagtgaagacgccttttcagat

SEQ ID NO: 4730115 - DNA, 25 bp, Homo sapien
caagcatcatgagataaagcagtga

SEQ ID NO: 4730116 - DNA, 25 bp, Homo sapien
taaaatcaagttttacaagcaagca

SEQ ID NO: 4730117 - DNA, 25 bp, Homo sapien
tgaattcaaaggtagtattcctatt

SEQ ID NO: 4730118 - DNA, 25 bp, Homo sapien
tgtctggccacagcatgcactagtg

SEQ ID NO: 4730119 - DNA, 25 bp, Homo sapien
aattgagggcctttatactagctac

SEQ ID NO: 4730120 - DNA, 25 bp, Homo sapien
gtaacagaggcaacacaatggccat

SEQ ID NO: 4730121 - DNA, 25 bp, Homo sapien
tcccaatttagggttgcctagcaag

SEQ ID NO: 4730122 - DNA, 25 bp, Homo sapien
ttaatgagttttatgctcagatcgc

SEQ ID NO: 4730123 - DNA, 25 bp, Homo sapien
taatgagttttatgctcagatcgct

SEQ ID NO: 4730124 - DNA, 25 bp, Homo sapien
gctcagatcgctgggtctcctggct

SEQ ID NO: 4730125 - DNA, 25 bp, Homo sapien
aatgagttttatgctcagatcgctg

SEQ ID NO: 4730126 - DNA, 25 bp, Homo sapien
attctgagactcagtcagctgagga

SEQ ID NO: 4730127 - DNA, 25 bp, Homo sapien
cagtcagctgaggataaaagggacc

SEQ ID NO: 4730128 - DNA, 25 bp, Homo sapien
cttggtcctgagcattctgagactc

SEQ ID NO: 4730129 - DNA, 25 bp, Homo sapien
tcagctgaggataaaagggacctac

SEQ ID NO: 4730130 - DNA, 25 bp, Homo sapien
cgggcaattgcaagagtacgtgact

SEQ ID NO: 4730131 - DNA, 25 bp, Homo sapien
tacaccttggatgttggacaggagg

SEQ ID NO: 4730132 - DNA, 25 bp, Homo sapien
aggaggcagcattgcggaacactga

SEQ ID NO: 4730133 - DNA, 25 bp, Homo sapien
aacactgagtagatgtcgcctgcca

SEQ ID NO: 4730134 - DNA, 25 bp, Homo sapien
aaacagctgggtagggattcgaact

SEQ ID NO: 4730135 - DNA, 25 bp, Homo sapien
tgacttcagagcttttgggacacaa

SEQ ID NO: 4730136 - DNA, 25 bp, Homo sapien
acagtaggctggttatgtgtccacc

SEQ ID NO: 4730137 - DNA, 25 bp, Homo sapien
gattcgaactagtgcctgagtctcc

SEQ ID NO: 4730138 - DNA, 25 bp, Homo sapien
cacaccaccacaccctgctaatttt

SEQ ID NO: 4730139 - DNA, 25 bp, Homo sapien
tctcgagcaactaggactacaggtg

SEQ ID NO: 4730140 - DNA, 25 bp, Homo sapien
agcctctcgagcaactaggactaca

SEQ ID NO: 4730141 - DNA, 25 bp, Homo sapien
ctcagcctctcgagcaactaggact

SEQ ID NO: 4730142 - DNA, 25 bp, Homo sapien
cttttccactctacccatgagaggt

SEQ ID NO: 4730143 - DNA, 25 bp, Homo sapien
tcagcacagtgggactcatcagtat

SEQ ID NO: 4730144 - DNA, 25 bp, Homo sapien
cacagtgggactcatcagtatcatc

SEQ ID NO: 4730145 - DNA, 25 bp, Homo sapien
catgagaggtagagcttatcctgag

SEQ ID NO: 4730146 - DNA, 25 bp, Homo sapien
agtgaagcttggtagacagggatcc

SEQ ID NO: 4730147 - DNA, 25 bp, Homo sapien
cctgctggtaggcacgggagtgaag

SEQ ID NO: 4730148 - DNA, 25 bp, Homo sapien
ggtagacagggatcccagtctaaca

SEQ ID NO: 4730149 - DNA, 25 bp, Homo sapien
cttggcttctgaaccagatcaaatc

SEQ ID NO: 4730150 - DNA, 25 bp, Homo sapien
ccctgtgatcgtgctggccacagaa

SEQ ID NO: 4730151 - DNA, 25 bp, Homo sapien
ttggtgagtgcattttctacgccac

SEQ ID NO: 4730152 - DNA, 25 bp, Homo sapien
tttctacgccactgctcacgagctg

SEQ ID NO: 4730153 - DNA, 25 bp, Homo sapien
tccccaagactgtgttaatgctgcc

SEQ ID NO: 4730154 - DNA, 25 bp, Homo sapien
tgtaagtagaaaagcagatcccctg

SEQ ID NO: 4730155 - DNA, 25 bp, Homo sapien
ctgtaagtagaaaagcagatcccct

SEQ ID NO: 4730156 - DNA, 25 bp, Homo sapien
gtaagtagaaaagcagatcccctgg

SEQ ID NO: 4730157 - DNA, 25 bp, Homo sapien
ttataggagcaaagacacaaactga

SEQ ID NO: 4730158 - DNA, 25 bp, Homo sapien
tctgcttcgtagatacaacttgaca

SEQ ID NO: 4730159 - DNA, 25 bp, Homo sapien
tttcaaacatacatccagatccagg

SEQ ID NO: 4730160 - DNA, 25 bp, Homo sapien
taatccaaaggaggctagttcttct

SEQ ID NO: 4730161 - DNA, 25 bp, Homo sapien
tgtacagcttgttttaacagataga

SEQ ID NO: 4730162 - DNA, 25 bp, Homo sapien
atgaaaacatgtgaagtgtcaagtc

SEQ ID NO: 4730163 - DNA, 25 bp, Homo sapien
ttaacagatagaagatgaaaacatg

SEQ ID NO: 4730164 - DNA, 25 bp, Homo sapien
ctgtttgtgatatgtacagcttgtt

SEQ ID NO: 4730165 - DNA, 25 bp, Homo sapien
tctagccccttacaggcataggtat

SEQ ID NO: 4730166 - DNA, 25 bp, Homo sapien
ctagccccttacaggcataggtatt

SEQ ID NO: 4730167 - DNA, 25 bp, Homo sapien
tctaaaactcattcatggccaggca

SEQ ID NO: 4730168 - DNA, 25 bp, Homo sapien
ttatgcttaacgaaagaagccaatc

SEQ ID NO: 4730169 - DNA, 25 bp, Homo sapien
gaaattggagcctccatacagtgtt

SEQ ID NO: 4730170 - DNA, 25 bp, Homo sapien
caaagtagatgagtagctgcctcag

SEQ ID NO: 4730171 - DNA, 25 bp, Homo sapien
aaagctatgaaacaggccttctgtg

SEQ ID NO: 4730172 - DNA, 25 bp, Homo sapien
aaacatctgccaaagctatgaaaca

SEQ ID NO: 4730173 - DNA, 25 bp, Homo sapien
aacaggccttctgtggacaggcgcg

SEQ ID NO: 4730174 - DNA, 25 bp, Homo sapien
tatgaaacaggccttctgtggacag

SEQ ID NO: 4730175 - DNA, 25 bp, Homo sapien
ggtaaaggcagtgtatgccccagga

SEQ ID NO: 4730176 - DNA, 25 bp, Homo sapien
gtaaaggcagtgtatgccccaggaa

SEQ ID NO: 4730177 - DNA, 25 bp, Homo sapien
taggtaaaggcagtgtatgccccag

SEQ ID NO: 4730178 - DNA, 25 bp, Homo sapien
tctaggtaaaggcagtgtatgcccc

SEQ ID NO: 4730179 - DNA, 25 bp, Homo sapien
tactgagataggctgaggacatgag

SEQ ID NO: 4730180 - DNA, 25 bp, Homo sapien
aggtcatacgtggagctcaccaagg

SEQ ID NO: 4730181 - DNA, 25 bp, Homo sapien
cacacagacttcaggtagggatact

SEQ ID NO: 4730182 - DNA, 25 bp, Homo sapien
cttcaggtagggatactggtccttt

SEQ ID NO: 4730183 - DNA, 25 bp, Homo sapien
gtagggagggtatgcttattaatct

SEQ ID NO: 4730184 - DNA, 25 bp, Homo sapien
ggagggtatgcttattaatctctca

SEQ ID NO: 4730185 - DNA, 25 bp, Homo sapien
tagggagggtatgcttattaatctc

SEQ ID NO: 4730186 - DNA, 25 bp, Homo sapien
gggagggtatgcttattaatctctc

SEQ ID NO: 4730187 - DNA, 25 bp, Homo sapien
gaacaccgggataagactctcccaa

SEQ ID NO: 4730188 - DNA, 25 bp, Homo sapien
ctgcagaaaagagacttatttcaga

SEQ ID NO: 4730189 - DNA, 25 bp, Homo sapien
agacttatttcagaacaccgggata

SEQ ID NO: 4730190 - DNA, 25 bp, Homo sapien
tatttcagaacaccgggataagact

SEQ ID NO: 4730191 - DNA, 25 bp, Homo sapien
aaatgctagccaagccggacgcggt

SEQ ID NO: 4730192 - DNA, 25 bp, Homo sapien
aaaatgctagccaagccggacgcgg

SEQ ID NO: 4730193 - DNA, 25 bp, Homo sapien
aatgctagccaagccggacgcggtg

SEQ ID NO: 4730194 - DNA, 25 bp, Homo sapien
atgctagccaagccggacgcggtgg

SEQ ID NO: 4730195 - DNA, 25 bp, Homo sapien
gagcggggggtctcggaccatcacc

SEQ ID NO: 4730196 - DNA, 25 bp, Homo sapien
gggcacccactgggcgcgcactcac

SEQ ID NO: 4730197 - DNA, 25 bp, Homo sapien
gcgaggcgagcggggggtctcggac

SEQ ID NO: 4730198 - DNA, 25 bp, Homo sapien
ggtctcggaccatcacccccgcgtc

SEQ ID NO: 4730199 - DNA, 25 bp, Homo sapien
gagcaggcgcgtcccgaagacgact

SEQ ID NO: 4730200 - DNA, 25 bp, Homo sapien
cgaagagcaggcgcgtcccgaagac

SEQ ID NO: 4730201 - DNA, 25 bp, Homo sapien
ctgcagcgaaaggcgaagagcaggc

SEQ ID NO: 4730202 - DNA, 25 bp, Homo sapien
aggcgcgtcccgaagacgactccgg

SEQ ID NO: 4730203 - DNA, 25 bp, Homo sapien
ctgccacgacccggtcaaagcgtgg

SEQ ID NO: 4730204 - DNA, 25 bp, Homo sapien
caagcctccgcagcacgtgacccgc

SEQ ID NO: 4730205 - DNA, 25 bp, Homo sapien
cgcagcacgtgacccgcggcagcac

SEQ ID NO: 4730206 - DNA, 25 bp, Homo sapien
tgccacgacccggtcaaagcgtggg

SEQ ID NO: 4730207 - DNA, 25 bp, Homo sapien
gcttattgataatccatccctgctc

SEQ ID NO: 4730208 - DNA, 25 bp, Homo sapien
gcatcagaagactctcgccctttca

SEQ ID NO: 4730209 - DNA, 25 bp, Homo sapien
atgacctcttactttgcatcagaag

SEQ ID NO: 4730210 - DNA, 25 bp, Homo sapien
tgtttgttccctaagcaaatgtttg

SEQ ID NO: 4730211 - DNA, 25 bp, Homo sapien
taaggctgagcaagcttctttttgc

SEQ ID NO: 4730212 - DNA, 25 bp, Homo sapien
tcttcaagcccacaaaggatgaagc

SEQ ID NO: 4730213 - DNA, 25 bp, Homo sapien
acaagagactcttcaagcccacaaa

SEQ ID NO: 4730214 - DNA, 25 bp, Homo sapien
gagactcttcaagcccacaaaggat

SEQ ID NO: 4730215 - DNA, 25 bp, Homo sapien
taagagaacctaataccagctgctg

SEQ ID NO: 4730216 - DNA, 25 bp, Homo sapien
tggcaagaataacacccaaggtgag

SEQ ID NO: 4730217 - DNA, 25 bp, Homo sapien
gtttcatctacatgagcggtcccca

SEQ ID NO: 4730218 - DNA, 25 bp, Homo sapien
cctgcaggcggaagtagtcctacga

SEQ ID NO: 4730219 - DNA, 25 bp, Homo sapien
ttgtttggttccctccaggattcga

SEQ ID NO: 4730220 - DNA, 25 bp, Homo sapien
tggttccctccaggattcgatttac

SEQ ID NO: 4730221 - DNA, 25 bp, Homo sapien
tgagattcctggaggttttcagggt

SEQ ID NO: 4730222 - DNA, 25 bp, Homo sapien
ctgagattcctggaggttttcaggg

SEQ ID NO: 4730223 - DNA, 25 bp, Homo sapien
caccagcttcttctccggactttac

SEQ ID NO: 4730224 - DNA, 25 bp, Homo sapien
ggctcctgtctctttctcaccagct

SEQ ID NO: 4730225 - DNA, 25 bp, Homo sapien
atctggctcctgtctctttctcacc

SEQ ID NO: 4730226 - DNA, 25 bp, Homo sapien
tcagcatctggctcctgtctctttc

SEQ ID NO: 4730227 - DNA, 25 bp, Homo sapien
cctttgaacacatcctattatagga

SEQ ID NO: 4730228 - DNA, 25 bp, Homo sapien
gaacacatcctattataggattcct

SEQ ID NO: 4730229 - DNA, 25 bp, Homo sapien
agtcctttgaacacatcctattata

SEQ ID NO: 4730230 - DNA, 25 bp, Homo sapien
cctattataggattcctgtatgtca

SEQ ID NO: 4730231 - DNA, 25 bp, Homo sapien
tcgtgcccagctgaaacatcacttt

SEQ ID NO: 4730232 - DNA, 25 bp, Homo sapien
ccatcgtgcccagctgaaacatcac

SEQ ID NO: 4730233 - DNA, 25 bp, Homo sapien
tccacctaccaaattcaaacgattc

SEQ ID NO: 4730234 - DNA, 25 bp, Homo sapien
cctccacctaccaaattcaaacgat

SEQ ID NO: 4730235 - DNA, 25 bp, Homo sapien
gattattagcccttgaggtctcctg

SEQ ID NO: 4730236 - DNA, 25 bp, Homo sapien
ttgcttggtagcctttcttccatgc

SEQ ID NO: 4730237 - DNA, 25 bp, Homo sapien
ctgctttcttttccggccaagcaca

SEQ ID NO: 4730238 - DNA, 25 bp, Homo sapien
ttttccggccaagcacacttcagga

SEQ ID NO: 4730239 - DNA, 25 bp, Homo sapien
ggttgtcatacttcgcatcacccct

SEQ ID NO: 4730240 - DNA, 25 bp, Homo sapien
gccggttgtcatacttcgcatcacc

SEQ ID NO: 4730241 - DNA, 25 bp, Homo sapien
ctgccggttgtcatacttcgcatca

SEQ ID NO: 4730242 - DNA, 25 bp, Homo sapien
cggttgtcatacttcgcatcacccc

SEQ ID NO: 4730243 - DNA, 25 bp, Homo sapien
caggcaagtggtaacaacagcaggt

SEQ ID NO: 4730244 - DNA, 25 bp, Homo sapien
gatatttatcccagacggcaacagc

SEQ ID NO: 4730245 - DNA, 25 bp, Homo sapien
tatttaggccgatactgagggttct

SEQ ID NO: 4730246 - DNA, 25 bp, Homo sapien
tctgaggcgcttaactatttgaggc

SEQ ID NO: 4730247 - DNA, 25 bp, Homo sapien
atcagtgattgcaccagtacggtcc

SEQ ID NO: 4730248 - DNA, 25 bp, Homo sapien
tcagtgattgcaccagtacggtcca

SEQ ID NO: 4730249 - DNA, 25 bp, Homo sapien
cagtgattgcaccagtacggtccac

SEQ ID NO: 4730250 - DNA, 25 bp, Homo sapien
gtctgatcttatttattttttactc

SEQ ID NO: 4730251 - DNA, 25 bp, Homo sapien
gagtctgatcttatttattttttac

SEQ ID NO: 4730252 - DNA, 25 bp, Homo sapien
ctgatcttatttattttttactcac

SEQ ID NO: 4730253 - DNA, 25 bp, Homo sapien
tgagtctgatcttatttatttttta

SEQ ID NO: 4730254 - DNA, 25 bp, Homo sapien
tagaagtagaagctcgcagagagga

SEQ ID NO: 4730255 - DNA, 25 bp, Homo sapien
caatttgttcctggcgcttttcctt

SEQ ID NO: 4730256 - DNA, 25 bp, Homo sapien
cttcacaatttgttcctggcgcttt

SEQ ID NO: 4730257 - DNA, 25 bp, Homo sapien
gaaagtctgcgtctcttcacaattt

SEQ ID NO: 4730258 - DNA, 25 bp, Homo sapien
tcttcagagcaatacaccgccgttt

SEQ ID NO: 4730259 - DNA, 25 bp, Homo sapien
ctcttgccaaaagcttagcatattc

SEQ ID NO: 4730260 - DNA, 25 bp, Homo sapien
ttctcttgccaaaagcttagcatat

SEQ ID NO: 4730261 - DNA, 25 bp, Homo sapien
tcattctcttgccaaaagcttagca

SEQ ID NO: 4730262 - DNA, 25 bp, Homo sapien
ttagagagattgaaaagtttatgga

SEQ ID NO: 4730263 - DNA, 25 bp, Homo sapien
gagattgaaaagtttatggattctg

SEQ ID NO: 4730264 - DNA, 25 bp, Homo sapien
tctttaagggctttctttagagaga

SEQ ID NO: 4730265 - DNA, 25 bp, Homo sapien
ctttaagggctttctttagagagat

SEQ ID NO: 4730266 - DNA, 25 bp, Homo sapien
ggcaccatagtatcagtcagtccag

SEQ ID NO: 4730267 - DNA, 25 bp, Homo sapien
atagtatcagtcagtccaggaatat

SEQ ID NO: 4730268 - DNA, 25 bp, Homo sapien
cttttgggtcccaggtgatgaggca

SEQ ID NO: 4730269 - DNA, 25 bp, Homo sapien
ggtcccaggtgatgaggcaccatag

SEQ ID NO: 4730270 - DNA, 25 bp, Homo sapien
agattggcaaccacaatgcaaccat

SEQ ID NO: 4730271 - DNA, 25 bp, Homo sapien
catgaactgattttcccttcctttc

SEQ ID NO: 4730272 - DNA, 25 bp, Homo sapien
caaccatgaactgattttcccttcc

SEQ ID NO: 4730273 - DNA, 25 bp, Homo sapien
attggcaaccacaatgcaaccatga

SEQ ID NO: 4730274 - DNA, 25 bp, Homo sapien
agcagcaacttttgtggccgtacgt

SEQ ID NO: 4730275 - DNA, 25 bp, Homo sapien
acttttgtggccgtacgtttctcat

SEQ ID NO: 4730276 - DNA, 25 bp, Homo sapien
cagcaacttttgtggccgtacgttt

SEQ ID NO: 4730277 - DNA, 25 bp, Homo sapien
ttgtggccgtacgtttctcataaaa

SEQ ID NO: 4730278 - DNA, 25 bp, Homo sapien
gatgacatagtctaactccttgcac

SEQ ID NO: 4730279 - DNA, 25 bp, Homo sapien
aatgggatcagtggaccatcagcac

SEQ ID NO: 4730280 - DNA, 25 bp, Homo sapien
cctgaaggagcctcagctgatattc

SEQ ID NO: 4730281 - DNA, 25 bp, Homo sapien
tccttgcactcaaaatgggatcagt

SEQ ID NO: 4730282 - DNA, 25 bp, Homo sapien
ggttgaagtcccctgccaccatata

SEQ ID NO: 4730283 - DNA, 25 bp, Homo sapien
ccaggtatcttctgtggctacttca

SEQ ID NO: 4730284 - DNA, 25 bp, Homo sapien
catatagtggtagttgtcctgtctc

SEQ ID NO: 4730285 - DNA, 25 bp, Homo sapien
tgtttcggctcaggatcagttggtt

SEQ ID NO: 4730286 - DNA, 25 bp, Homo sapien
tttgtacatgcccatgaatgactga

SEQ ID NO: 4730287 - DNA, 25 bp, Homo sapien
ctttgtacatgcccatgaatgactg

SEQ ID NO: 4730288 - DNA, 25 bp, Homo sapien
gacagcagtgcatttatgacccagg

SEQ ID NO: 4730289 - DNA, 25 bp, Homo sapien
caaatctgggccgaaggagagacac

SEQ ID NO: 4730290 - DNA, 25 bp, Homo sapien
taatgaggctacacttaggaggcgt

SEQ ID NO: 4730291 - DNA, 25 bp, Homo sapien
ctctactcatgcgtgggaattccag

SEQ ID NO: 4730292 - DNA, 25 bp, Homo sapien
gagaccgcaggttcatcatccagaa

SEQ ID NO: 4730293 - DNA, 25 bp, Homo sapien
gcacctaggcatgtattgagaacag

SEQ ID NO: 4730294 - DNA, 25 bp, Homo sapien
cagaacatcttgaaggcacctaggc

SEQ ID NO: 4730295 - DNA, 25 bp, Homo sapien
ggcccacaggccatgtcgctttagc

SEQ ID NO: 4730296 - DNA, 25 bp, Homo sapien
aagtcggaatccacgaaggagtgtg

SEQ ID NO: 4730297 - DNA, 25 bp, Homo sapien
gatcctcatactccatggaagtcgg

SEQ ID NO: 4730298 - DNA, 25 bp, Homo sapien
gggtagccatttgaccaccacttgt

SEQ ID NO: 4730299 - DNA, 25 bp, Homo sapien
tcttgttgcattagagctctggcga

SEQ ID NO: 4730300 - DNA, 25 bp, Homo sapien
gaacttgtctcaatgactgaagttt

SEQ ID NO: 4730301 - DNA, 25 bp, Homo sapien
ctgggtctaattcctgtgcttcatc

SEQ ID NO: 4730302 - DNA, 25 bp, Homo sapien
aacttgtctcaatgactgaagtttc

SEQ ID NO: 4730303 - DNA, 25 bp, Homo sapien
tgaacttgtctcaatgactgaagtt

SEQ ID NO: 4730304 - DNA, 25 bp, Homo sapien
taattgtgacgggtctcaactgagt

SEQ ID NO: 4730305 - DNA, 25 bp, Homo sapien
taagttcagctgtattaatggttac

SEQ ID NO: 4730306 - DNA, 25 bp, Homo sapien
tctatatagcagaagagtaatttag

SEQ ID NO: 4730307 - DNA, 25 bp, Homo sapien
gttggtataggatcataagttcagc

SEQ ID NO: 4730308 - DNA, 25 bp, Homo sapien
aaggaaaatgtaggcctggcacggt

SEQ ID NO: 4730309 - DNA, 25 bp, Homo sapien
aaaggaaaatgtaggcctggcacgg

SEQ ID NO: 4730310 - DNA, 25 bp, Homo sapien
ttttaaaagctcaatcatactagta

SEQ ID NO: 4730311 - DNA, 25 bp, Homo sapien
aatcatactagtattaagtgaaata

SEQ ID NO: 4730312 - DNA, 25 bp, Homo sapien
ggaataggagcagaaacaatgtagc

SEQ ID NO: 4730313 - DNA, 25 bp, Homo sapien
caatgtagcaaagagatagacgcag

SEQ ID NO: 4730314 - DNA, 25 bp, Homo sapien
tattcagggcctgtgatacccacac

SEQ ID NO: 4730315 - DNA, 25 bp, Homo sapien
cttcagaatagtgtgcgtaatcgcg

SEQ ID NO: 4730316 - DNA, 25 bp, Homo sapien
tactagtgtgaagctttatgcccat

SEQ ID NO: 4730317 - DNA, 25 bp, Homo sapien
cattagtgtctctaggaagagagaa

SEQ ID NO: 4730318 - DNA, 25 bp, Homo sapien
tgtgacacctcatataactaactgt

SEQ ID NO: 4730319 - DNA, 25 bp, Homo sapien
gaatagaaacctgcaggaagttaca

SEQ ID NO: 4730320 - DNA, 25 bp, Homo sapien
aaattgatgctccaccaagtgccag

SEQ ID NO: 4730321 - DNA, 25 bp, Homo sapien
caatttgaaatgaacggctgttgtc

SEQ ID NO: 4730322 - DNA, 25 bp, Homo sapien
tagaatgttgacacacaaggcttgg

SEQ ID NO: 4730323 - DNA, 25 bp, Homo sapien
tgccatttgaatgtcccagggctta

SEQ ID NO: 4730324 - DNA, 25 bp, Homo sapien
aaagagagcaacatatttgtgtaag

SEQ ID NO: 4730325 - DNA, 25 bp, Homo sapien
gattgcatgttgcaatacggttttc

SEQ ID NO: 4730326 - DNA, 25 bp, Homo sapien
tgtgtatatacagccatattctaag

SEQ ID NO: 4730327 - DNA, 25 bp, Homo sapien
gtttgtatatgtgtagggctgtgta

SEQ ID NO: 4730328 - DNA, 25 bp, Homo sapien
aatttattaagcttgttgccagtag

SEQ ID NO: 4730329 - DNA, 25 bp, Homo sapien
gaaaatcatgatctcacatgcctca

SEQ ID NO: 4730330 - DNA, 25 bp, Homo sapien
actgtaaatttattaagcttgttgc

SEQ ID NO: 4730331 - DNA, 25 bp, Homo sapien
aagaaaatcatgatctcacatgcct

SEQ ID NO: 4730332 - DNA, 25 bp, Homo sapien
tttcagggttaatctgacctatgca

SEQ ID NO: 4730333 - DNA, 25 bp, Homo sapien
tagttattgtaccagtctttcaaca

SEQ ID NO: 4730334 - DNA, 25 bp, Homo sapien
tatttttgcaactcaagacttggta

SEQ ID NO: 4730335 - DNA, 25 bp, Homo sapien
tatgcagatgactaaatgagttgac

SEQ ID NO: 4730336 - DNA, 25 bp, Homo sapien
gactgtccttattttgtggctgcac

SEQ ID NO: 4730337 - DNA, 25 bp, Homo sapien
acacctgtagttcccaggcggtcaa

SEQ ID NO: 4730338 - DNA, 25 bp, Homo sapien
aaaaactagccgcagtgcacacctg

SEQ ID NO: 4730339 - DNA, 25 bp, Homo sapien
cagggcggttctcatgttttgtgca

SEQ ID NO: 4730340 - DNA, 25 bp, Homo sapien
gcgccttaaccagacccctaggtga

SEQ ID NO: 4730341 - DNA, 25 bp, Homo sapien
ggatggtatccactaaaactaggta

SEQ ID NO: 4730342 - DNA, 25 bp, Homo sapien
agaatcttagtaggcatcgagggac

SEQ ID NO: 4730343 - DNA, 25 bp, Homo sapien
ggtctgactttatccaccattggaa

SEQ ID NO: 4730344 - DNA, 25 bp, Homo sapien
ttatttctgactggattcagactta

SEQ ID NO: 4730345 - DNA, 25 bp, Homo sapien
tatttctgactggattcagacttag

SEQ ID NO: 4730346 - DNA, 25 bp, Homo sapien
ggaaagtctgcgtctcttcgcaatt

SEQ ID NO: 4730347 - DNA, 25 bp, Homo sapien
aagtctgcgtctcttcgcaatttgt

SEQ ID NO: 4730348 - DNA, 25 bp, Homo sapien
gtctgcgtctcttcgcaatttgttc

SEQ ID NO: 4730349 - DNA, 25 bp, Homo sapien
gaaagtctgcgtctcttcgcaattt

SEQ ID NO: 4730350 - DNA, 25 bp, Homo sapien
aatccaaagccaggtcgaactcctc

SEQ ID NO: 4730351 - DNA, 25 bp, Homo sapien
ttaaagacgcaaatccaaagccagg

SEQ ID NO: 4730352 - DNA, 25 bp, Homo sapien
atccaaagccaggtcgaactcctcc

SEQ ID NO: 4730353 - DNA, 25 bp, Homo sapien
ggttaaagacgcaaatccaaagcca

SEQ ID NO: 4730354 - DNA, 25 bp, Homo sapien
atttttcttggtacgctgcttcttc

SEQ ID NO: 4730355 - DNA, 25 bp, Homo sapien
tatttttcttggtacgctgcttctt

SEQ ID NO: 4730356 - DNA, 25 bp, Homo sapien
tctttatttttcttggtacgctgct

SEQ ID NO: 4730357 - DNA, 25 bp, Homo sapien
tttatttttcttggtacgctgcttc

SEQ ID NO: 4730358 - DNA, 25 bp, Homo sapien
tgcaggacacgtggagtaacaagac

SEQ ID NO: 4730359 - DNA, 25 bp, Homo sapien
ctgcaggacacgtggagtaacaaga

SEQ ID NO: 4730360 - DNA, 25 bp, Homo sapien
caggacacgtggagtaacaagacgc

SEQ ID NO: 4730361 - DNA, 25 bp, Homo sapien
ggacacgtggagtaacaagacgctg

SEQ ID NO: 4730362 - DNA, 25 bp, Homo sapien
tttgttttgttagaatccacatcta

SEQ ID NO: 4730363 - DNA, 25 bp, Homo sapien
ttcaaaggactcaatcatttcaata

SEQ ID NO: 4730364 - DNA, 25 bp, Homo sapien
ctaaaaattcaaaggactcaatcat

SEQ ID NO: 4730365 - DNA, 25 bp, Homo sapien
ggactcaatcatttcaatatttgtt

SEQ ID NO: 4730366 - DNA, 25 bp, Homo sapien
tatgaaaacctataatgaggccttt

SEQ ID NO: 4730367 - DNA, 25 bp, Homo sapien
atgaaaacctataatgaggccttta

SEQ ID NO: 4730368 - DNA, 25 bp, Homo sapien
tcagaaataaacgtaagcttaacag

SEQ ID NO: 4730369 - DNA, 25 bp, Homo sapien
agaaataaacgtaagcttaacagca

SEQ ID NO: 4730370 - DNA, 25 bp, Homo sapien
gatctgtactccaaaactgctcatg

SEQ ID NO: 4730371 - DNA, 25 bp, Homo sapien
accagaccacgcttgtattatacgg

SEQ ID NO: 4730372 - DNA, 25 bp, Homo sapien
tacagatctgcattggagcataggc

SEQ ID NO: 4730373 - DNA, 25 bp, Homo sapien
catgtatgttaagtcacaccagtcc

SEQ ID NO: 4730374 - DNA, 25 bp, Homo sapien
ggtgctaatagtcccagaattctca

SEQ ID NO: 4730375 - DNA, 25 bp, Homo sapien
tcaaacatgtgactcctaaaccaga

SEQ ID NO: 4730376 - DNA, 25 bp, Homo sapien
gaaattactgcactctacaaggcac

SEQ ID NO: 4730377 - DNA, 25 bp, Homo sapien
tacaaggcactggatataataagca

SEQ ID NO: 4730378 - DNA, 25 bp, Homo sapien
caggcggcgaggcactgtagtatca

SEQ ID NO: 4730379 - DNA, 25 bp, Homo sapien
aggcggcgaggcactgtagtatcag

SEQ ID NO: 4730380 - DNA, 25 bp, Homo sapien
cccaggcggcgaggcactgtagtat

SEQ ID NO: 4730381 - DNA, 25 bp, Homo sapien
gcggcgaggcactgtagtatcagtc

SEQ ID NO: 4730382 - DNA, 25 bp, Homo sapien
gagaacgctcagatttgcatccaca

SEQ ID NO: 4730383 - DNA, 25 bp, Homo sapien
aaccaagttgagaacgctcagattt

SEQ ID NO: 4730384 - DNA, 25 bp, Homo sapien
aacgctcagatttgcatccacaatg

SEQ ID NO: 4730385 - DNA, 25 bp, Homo sapien
ccaagttgagaacgctcagatttgc

SEQ ID NO: 4730386 - DNA, 25 bp, Homo sapien
tgtcgttcccaccactgattcggac

SEQ ID NO: 4730387 - DNA, 25 bp, Homo sapien
tagcaggcggacacggccatgggtc

SEQ ID NO: 4730388 - DNA, 25 bp, Homo sapien
gtttgtcgttcccaccactgattcg

SEQ ID NO: 4730389 - DNA, 25 bp, Homo sapien
aatgccccttactcagtagcaggcg

SEQ ID NO: 4730390 - DNA, 25 bp, Homo sapien
cttaccaaaggtcagaagccagaac

SEQ ID NO: 4730391 - DNA, 25 bp, Homo sapien
tggcattcggaagcaacttaccaaa

SEQ ID NO: 4730392 - DNA, 25 bp, Homo sapien
tcaagtcgcatttctaaccgatgtt

SEQ ID NO: 4730393 - DNA, 25 bp, Homo sapien
tacaggattgtgacctctgtgaaca

SEQ ID NO: 4730394 - DNA, 25 bp, Homo sapien
gaaagtacgaagtttgcgttcatcg

SEQ ID NO: 4730395 - DNA, 25 bp, Homo sapien
catacgcttctcatagaaagtacga

SEQ ID NO: 4730396 - DNA, 25 bp, Homo sapien
tctcatagaaagtacgaagtttgcg

SEQ ID NO: 4730397 - DNA, 25 bp, Homo sapien
acccagagcgtcagcagcaacttct

SEQ ID NO: 4730398 - DNA, 25 bp, Homo sapien
agcgccgcactcagcaggacgtttt

SEQ ID NO: 4730399 - DNA, 25 bp, Homo sapien
tataagatgccgactgtactcacta

SEQ ID NO: 4730400 - DNA, 25 bp, Homo sapien
tcatgttgcctccacacaagcagga

SEQ ID NO: 4730401 - DNA, 25 bp, Homo sapien
gcagagtagcagtcaagaagcgccg

SEQ ID NO: 4730402 - DNA, 25 bp, Homo sapien
ggcctgccgcaaactgggcaacacg

SEQ ID NO: 4730403 - DNA, 25 bp, Homo sapien
ggcaacacgccgcatccgtcccggc

SEQ ID NO: 4730404 - DNA, 25 bp, Homo sapien
acgccgcatccgtcccggctgggcg

SEQ ID NO: 4730405 - DNA, 25 bp, Homo sapien
acaggcctgccgcaaactgggcaac

SEQ ID NO: 4730406 - DNA, 25 bp, Homo sapien
ggcgagccttctcctacttgagacc

SEQ ID NO: 4730407 - DNA, 25 bp, Homo sapien
gcctgccatccgttcggccaaaaag

SEQ ID NO: 4730408 - DNA, 25 bp, Homo sapien
ggctccagccgcaatcgcctgccat

SEQ ID NO: 4730409 - DNA, 25 bp, Homo sapien
tccgttcggccaaaaagctccatgc

SEQ ID NO: 4730410 - DNA, 25 bp, Homo sapien
tgggactcgattcacgttccccaaa

SEQ ID NO: 4730411 - DNA, 25 bp, Homo sapien
aacccagtctaacactcgccaccat

SEQ ID NO: 4730412 - DNA, 25 bp, Homo sapien
gcaatgccgcgttctgggactcgat

SEQ ID NO: 4730413 - DNA, 25 bp, Homo sapien
tcctggagtgctggaactgaggcaa

SEQ ID NO: 4730414 - DNA, 25 bp, Homo sapien
cctccgaggcgccacggaaaagagg

SEQ ID NO: 4730415 - DNA, 25 bp, Homo sapien
tgaacgcctccgaggcgccacggaa

SEQ ID NO: 4730416 - DNA, 25 bp, Homo sapien
gaagcagctgaacgcctccgaggcg

SEQ ID NO: 4730417 - DNA, 25 bp, Homo sapien
ttgaagcagctgaacgcctccgagg

SEQ ID NO: 4730418 - DNA, 25 bp, Homo sapien
ctccatctgcctggttttagtcgta

SEQ ID NO: 4730419 - DNA, 25 bp, Homo sapien
ggttttcgctgtgagcagtgccttc

SEQ ID NO: 4730420 - DNA, 25 bp, Homo sapien
ggttttagtcgtactgcttctggca

SEQ ID NO: 4730421 - DNA, 25 bp, Homo sapien
gttttcgctgtgagcagtgccttcc

SEQ ID NO: 4730422 - DNA, 25 bp, Homo sapien
ctgcaagatggaagcctgaacttgg

SEQ ID NO: 4730423 - DNA, 25 bp, Homo sapien
agcctgaacttggtgctgaggtgtt

SEQ ID NO: 4730424 - DNA, 25 bp, Homo sapien
tggaagcctgaacttggtgctgagg

SEQ ID NO: 4730425 - DNA, 25 bp, Homo sapien
gaagcctgaacttggtgctgaggtg

SEQ ID NO: 4730426 - DNA, 25 bp, Homo sapien
tcatgcaaatggactgattccctta

SEQ ID NO: 4730427 - DNA, 25 bp, Homo sapien
aatggactgattcccttaggagaac

SEQ ID NO: 4730428 - DNA, 25 bp, Homo sapien
tgcaaatggactgattcccttagga

SEQ ID NO: 4730429 - DNA, 25 bp, Homo sapien
ctgattcccttaggagaacgaagac

SEQ ID NO: 4730430 - DNA, 25 bp, Homo sapien
tggcaacaattgaccctggggtttc

SEQ ID NO: 4730431 - DNA, 25 bp, Homo sapien
tgagagtgggatttaatctggttga

SEQ ID NO: 4730432 - DNA, 25 bp, Homo sapien
gcagataacaattctggcaacaatt

SEQ ID NO: 4730433 - DNA, 25 bp, Homo sapien
tctgggcctgacaagagcagataac

SEQ ID NO: 4730434 - DNA, 25 bp, Homo sapien
atctgccccatatcacactttgccc

SEQ ID NO: 4730435 - DNA, 25 bp, Homo sapien
atgtcatctgccccatatcacactt

SEQ ID NO: 4730436 - DNA, 25 bp, Homo sapien
ctgccccatatcacactttgcccca

SEQ ID NO: 4730437 - DNA, 25 bp, Homo sapien
gtcatctgccccatatcacactttg

SEQ ID NO: 4730438 - DNA, 25 bp, Homo sapien
ttcctggttccaaagagtctgtggc

SEQ ID NO: 4730439 - DNA, 25 bp, Homo sapien
cctggttccaaagagtctgtggcca

SEQ ID NO: 4730440 - DNA, 25 bp, Homo sapien
tcctggttccaaagagtctgtggcc

SEQ ID NO: 4730441 - DNA, 25 bp, Homo sapien
cttcctggttccaaagagtctgtgg

SEQ ID NO: 4730442 - DNA, 25 bp, Homo sapien
cagcttatttaccaaagtttccctg

SEQ ID NO: 4730443 - DNA, 25 bp, Homo sapien
ggttgtttgctatttgctccctcac

SEQ ID NO: 4730444 - DNA, 25 bp, Homo sapien
tgggaacaaggaccttctcatgaag

SEQ ID NO: 4730445 - DNA, 25 bp, Homo sapien
gtaacctcccattgccagtcctgtg

SEQ ID NO: 4730446 - DNA, 25 bp, Homo sapien
ctggtcctctctaggtctctctgac

SEQ ID NO: 4730447 - DNA, 25 bp, Homo sapien
cagccaggacctgtgtctcctcata

SEQ ID NO: 4730448 - DNA, 25 bp, Homo sapien
ggtcctctctaggtctctctgactg

SEQ ID NO: 4730449 - DNA, 25 bp, Homo sapien
ccaggacctgtgtctcctcataact

SEQ ID NO: 4730450 - DNA, 25 bp, Homo sapien
ctgtaaatgtaagtgtgtccaagga

SEQ ID NO: 4730451 - DNA, 25 bp, Homo sapien
tgtaaatgtaagtgtgtccaaggag

SEQ ID NO: 4730452 - DNA, 25 bp, Homo sapien
acaactctcatctacaagtctgagc

SEQ ID NO: 4730453 - DNA, 25 bp, Homo sapien
tctgagcctgaaaacgacctcagat

SEQ ID NO: 4730454 - DNA, 25 bp, Homo sapien
tgaaaacgacctcagattttagcaa

SEQ ID NO: 4730455 - DNA, 25 bp, Homo sapien
ttcctacaactctcatctacaagtc

SEQ ID NO: 4730456 - DNA, 25 bp, Homo sapien
ccacctgccgggtgctgggtagtct

SEQ ID NO: 4730457 - DNA, 25 bp, Homo sapien
gggaggctgcgagtctgagccagga

SEQ ID NO: 4730458 - DNA, 25 bp, Homo sapien
gaagagtctggagcccggtctccgc

SEQ ID NO: 4730459 - DNA, 25 bp, Homo sapien
cgtgggtagcaccatcgaggccctg

SEQ ID NO: 4730460 - DNA, 25 bp, Homo sapien
ttcgccgctggctgtcgccgcgttt

SEQ ID NO: 4730461 - DNA, 25 bp, Homo sapien
tcgtgcctgctatcgccgagttcta

SEQ ID NO: 4730462 - DNA, 25 bp, Homo sapien
gtggactggtgcgaggacaactaca

SEQ ID NO: 4730463 - DNA, 25 bp, Homo sapien
tggacgtgggtctctgcgcgcatct

SEQ ID NO: 4730464 - DNA, 25 bp, Homo sapien
tttctcagactggtgactgtatacc

SEQ ID NO: 4730465 - DNA, 25 bp, Homo sapien
tataccacctgggacgtctcagaca

SEQ ID NO: 4730466 - DNA, 25 bp, Homo sapien
caaggtcactagtcgcacatagcac

SEQ ID NO: 4730467 - DNA, 25 bp, Homo sapien
gggacgtctcagacaacttgtccat

SEQ ID NO: 4730468 - DNA, 25 bp, Homo sapien
tattgtccaacatgagtaaccgctc

SEQ ID NO: 4730469 - DNA, 25 bp, Homo sapien
taggtctggtaaagctctttggccc

SEQ ID NO: 4730470 - DNA, 25 bp, Homo sapien
tcctctaagtgaccattgtgtattg

SEQ ID NO: 4730471 - DNA, 25 bp, Homo sapien
tcagttctgttcaggtgcccaccat

SEQ ID NO: 4730472 - DNA, 25 bp, Homo sapien
ggggtggctgccgggcggagacgct

SEQ ID NO: 4730473 - DNA, 25 bp, Homo sapien
gtggctgccgggcggagacgctcct

SEQ ID NO: 4730474 - DNA, 25 bp, Homo sapien
gggtggctgccgggcggagacgctc

SEQ ID NO: 4730475 - DNA, 25 bp, Homo sapien
ggtggctgccgggcggagacgctcc

SEQ ID NO: 4730476 - DNA, 25 bp, Homo sapien
gcagctttggacaagccccgagtgc

SEQ ID NO: 4730477 - DNA, 25 bp, Homo sapien
ccgagtgcaaataaggctggtcagc

SEQ ID NO: 4730478 - DNA, 25 bp, Homo sapien
gaaacctaatggaccgcagctttgg

SEQ ID NO: 4730479 - DNA, 25 bp, Homo sapien
aatgggagtgaaacctaatggaccg

SEQ ID NO: 4730480 - DNA, 25 bp, Homo sapien
acctccctctcggttgatgccctcc

SEQ ID NO: 4730481 - DNA, 25 bp, Homo sapien
gcacctccctctcggttgatgccct

SEQ ID NO: 4730482 - DNA, 25 bp, Homo sapien
ctccctctcggttgatgccctccat

SEQ ID NO: 4730483 - DNA, 25 bp, Homo sapien
gggcacctccctctcggttgatgcc

SEQ ID NO: 4730484 - DNA, 25 bp, Homo sapien
caggcgcccttggagtggactctac

SEQ ID NO: 4730485 - DNA, 25 bp, Homo sapien
gaccctctgagagacaagaccctct

SEQ ID NO: 4730486 - DNA, 25 bp, Homo sapien
tctgactctgtgatggaagatgcca

SEQ ID NO: 4730487 - DNA, 25 bp, Homo sapien
cacaggacttgtggctaaaaaggct

SEQ ID NO: 4730488 - DNA, 25 bp, Homo sapien
tgccagcatgggatgtaaaccaaga

SEQ ID NO: 4730489 - DNA, 25 bp, Homo sapien
gaaatcactctagcttgccagcatg

SEQ ID NO: 4730490 - DNA, 25 bp, Homo sapien
ccaagagagtagaaatatacccatc

SEQ ID NO: 4730491 - DNA, 25 bp, Homo sapien
ggcatcgctcatatatgtaaaagca

SEQ ID NO: 4730492 - DNA, 25 bp, Homo sapien
agggttatggggacggatggagcag

SEQ ID NO: 4730493 - DNA, 25 bp, Homo sapien
cagagggttatggggacggatggag

SEQ ID NO: 4730494 - DNA, 25 bp, Homo sapien
gggttatggggacggatggagcagc

SEQ ID NO: 4730495 - DNA, 25 bp, Homo sapien
gagggttatggggacggatggagca

SEQ ID NO: 4730496 - DNA, 25 bp, Homo sapien
gactctgccaaatccccgtagtgga

SEQ ID NO: 4730497 - DNA, 25 bp, Homo sapien
actgactctgccaaatccccgtagt

SEQ ID NO: 4730498 - DNA, 25 bp, Homo sapien
atccccgtagtggagaggaatcaac

SEQ ID NO: 4730499 - DNA, 25 bp, Homo sapien
tgccaaatccccgtagtggagagga

SEQ ID NO: 4730500 - DNA, 25 bp, Homo sapien
ttacactgacaatttcatcccatac

SEQ ID NO: 4730501 - DNA, 25 bp, Homo sapien
gaggcatagaccatgtataggaatc

SEQ ID NO: 4730502 - DNA, 25 bp, Homo sapien
cctgggaggcatagaccatgtatag

SEQ ID NO: 4730503 - DNA, 25 bp, Homo sapien
gcatagaccatgtataggaatccat

SEQ ID NO: 4730504 - DNA, 25 bp, Homo sapien
ctcctgggaggcatagaccatgtat

SEQ ID NO: 4730505 - DNA, 25 bp, Homo sapien
tctcaccttggtatcgttctgttat

SEQ ID NO: 4730506 - DNA, 25 bp, Homo sapien
ctcactcatgttgacgtctcgaacg

SEQ ID NO: 4730507 - DNA, 25 bp, Homo sapien
cgtctcgaacgtcaggtacaaggaa

SEQ ID NO: 4730508 - DNA, 25 bp, Homo sapien
gttctgttatcaccgggcttttggc

SEQ ID NO: 4730509 - DNA, 25 bp, Homo sapien
tatgcacacataggtgcacactgac

SEQ ID NO: 4730510 - DNA, 25 bp, Homo sapien
cacataggtgcacactgacaagtgc

SEQ ID NO: 4730511 - DNA, 25 bp, Homo sapien
taggtgcacactgacaagtgctggc

SEQ ID NO: 4730512 - DNA, 25 bp, Homo sapien
ggtgcacactgacaagtgctggcac

SEQ ID NO: 4730513 - DNA, 25 bp, Homo sapien
tgcccagggcttcctctttctctcc

SEQ ID NO: 4730514 - DNA, 25 bp, Homo sapien
ccagggcttcctctttctctcccat

SEQ ID NO: 4730515 - DNA, 25 bp, Homo sapien
cccagggcttcctctttctctccca

SEQ ID NO: 4730516 - DNA, 25 bp, Homo sapien
atgcccagggcttcctctttctctc

SEQ ID NO: 4730517 - DNA, 25 bp, Homo sapien
aaactgatacctgacgggcagcgag

SEQ ID NO: 4730518 - DNA, 25 bp, Homo sapien
cttgcccgggtgaggaaggcttcct

SEQ ID NO: 4730519 - DNA, 25 bp, Homo sapien
gcttcctggattggaatgcggcgtc

SEQ ID NO: 4730520 - DNA, 25 bp, Homo sapien
gaatgcggcgtccaaactgatacct

SEQ ID NO: 4730521 - DNA, 25 bp, Homo sapien
acaacaggaacatgggaaatttcat

SEQ ID NO: 4730522 - DNA, 25 bp, Homo sapien
acaggaacatgggaaatttcatttt

SEQ ID NO: 4730523 - DNA, 25 bp, Homo sapien
caacaggaacatgggaaatttcatt

SEQ ID NO: 4730524 - DNA, 25 bp, Homo sapien
aacaacaggaacatgggaaatttca

SEQ ID NO: 4730525 - DNA, 25 bp, Homo sapien
tcatttagcccaaaccagaggttcc

SEQ ID NO: 4730526 - DNA, 25 bp, Homo sapien
tactgccgccttggtcactaggtgt

SEQ ID NO: 4730527 - DNA, 25 bp, Homo sapien
ggggcgggcagtgtcattactctca

SEQ ID NO: 4730528 - DNA, 25 bp, Homo sapien
ttactctcatcaccaggagagaaaa

SEQ ID NO: 4730529 - DNA, 25 bp, Homo sapien
aggaattctcgttctcggctgctac

SEQ ID NO: 4730530 - DNA, 25 bp, Homo sapien
ccgtgtgactgtgacccgtgtgacc

SEQ ID NO: 4730531 - DNA, 25 bp, Homo sapien
ggttctgggacatttgccgtgtgac

SEQ ID NO: 4730532 - DNA, 25 bp, Homo sapien
acgtgggcgatagggttctgggaca

SEQ ID NO: 4730533 - DNA, 25 bp, Homo sapien
catttgccgtgtgactgtgacccgt

SEQ ID NO: 4730534 - DNA, 25 bp, Homo sapien
tccaactagttggaccaggaattta

SEQ ID NO: 4730535 - DNA, 25 bp, Homo sapien
ccatgtctccaactagttggaccag

SEQ ID NO: 4730536 - DNA, 25 bp, Homo sapien
tcccccatgtctccaactagttgga

SEQ ID NO: 4730537 - DNA, 25 bp, Homo sapien
tctccaactagttggaccaggaatt

SEQ ID NO: 4730538 - DNA, 25 bp, Homo sapien
tcttgtcctgtggactggagcagtg

SEQ ID NO: 4730539 - DNA, 25 bp, Homo sapien
cgtcagtggccgtgtttcttgtcct

SEQ ID NO: 4730540 - DNA, 25 bp, Homo sapien
agcgtggcagcctgcgtcagtggcc

SEQ ID NO: 4730541 - DNA, 25 bp, Homo sapien
aagttaggcctctcggcaaccctgc

SEQ ID NO: 4730542 - DNA, 25 bp, Homo sapien
ggagtcttgacaactttccagttcc

SEQ ID NO: 4730543 - DNA, 25 bp, Homo sapien
gagaaaaaacgaacagctgtcggag

SEQ ID NO: 4730544 - DNA, 25 bp, Homo sapien
agcagggagtcttgacaactttcca

SEQ ID NO: 4730545 - DNA, 25 bp, Homo sapien
aaaaaacgaacagctgtcggaggag

SEQ ID NO: 4730546 - DNA, 25 bp, Homo sapien
gctgctaacagaagcgtctttatgt

SEQ ID NO: 4730547 - DNA, 25 bp, Homo sapien
gctaacagaagcgtctttatgtaga

SEQ ID NO: 4730548 - DNA, 25 bp, Homo sapien
cgcctttgaaatcaccaccacagct

SEQ ID NO: 4730549 - DNA, 25 bp, Homo sapien
cagaagcgtctttatgtagaatgtg

SEQ ID NO: 4730550 - DNA, 25 bp, Homo sapien
ctgtcaggaggtgcccccagtgtat

SEQ ID NO: 4730551 - DNA, 25 bp, Homo sapien
ggtgcccccagtgtatagatttgca

SEQ ID NO: 4730552 - DNA, 25 bp, Homo sapien
gctttgagctgacctccagagtggc

SEQ ID NO: 4730553 - DNA, 25 bp, Homo sapien
tggctttgagctgacctccagagtg

SEQ ID NO: 4730554 - DNA, 25 bp, Homo sapien
agccctcacttatgtccctgagtag

SEQ ID NO: 4730555 - DNA, 25 bp, Homo sapien
caggttatgtatggacttagctcta

SEQ ID NO: 4730556 - DNA, 25 bp, Homo sapien
aagcacacccagatacctcactctg

SEQ ID NO: 4730557 - DNA, 25 bp, Homo sapien
catgcaagcacacccagatacctca

SEQ ID NO: 4730558 - DNA, 25 bp, Homo sapien
tacaaacccttgtatcaagaagtgc

SEQ ID NO: 4730559 - DNA, 25 bp, Homo sapien
caaacccttgtatcaagaagtgctg

SEQ ID NO: 4730560 - DNA, 25 bp, Homo sapien
aacccttgtatcaagaagtgctgac

SEQ ID NO: 4730561 - DNA, 25 bp, Homo sapien
ccttgtatcaagaagtgctgactta

SEQ ID NO: 4730562 - DNA, 25 bp, Homo sapien
ccacaaaactggcagtgcatgaatg

SEQ ID NO: 4730563 - DNA, 25 bp, Homo sapien
gcaggtggtctaccagtggtttacc

SEQ ID NO: 4730564 - DNA, 25 bp, Homo sapien
gaatggcatagatgacggtctccaa

SEQ ID NO: 4730565 - DNA, 25 bp, Homo sapien
agaagcaggtggtctaccagtggtt

SEQ ID NO: 4730566 - DNA, 25 bp, Homo sapien
acagacgactacatgctccgggtga

SEQ ID NO: 4730567 - DNA, 25 bp, Homo sapien
tctaacagaggaatatcactggccc

SEQ ID NO: 4730568 - DNA, 25 bp, Homo sapien
tgaaatgcctgccatcagacccatg

SEQ ID NO: 4730569 - DNA, 25 bp, Homo sapien
gggtgattacatgccacaacctgcg

SEQ ID NO: 4730570 - DNA, 25 bp, Homo sapien
gttttgctgaaagggctccaaacca

SEQ ID NO: 4730571 - DNA, 25 bp, Homo sapien
tgaaagggctccaaaccacctgatt

SEQ ID NO: 4730572 - DNA, 25 bp, Homo sapien
gctgcgttttgctgaaagggctcca

SEQ ID NO: 4730573 - DNA, 25 bp, Homo sapien
gggctccaaaccacctgattcatgt

SEQ ID NO: 4730574 - DNA, 25 bp, Homo sapien
tctgggcaaggctttaggacattct

SEQ ID NO: 4730575 - DNA, 25 bp, Homo sapien
tgcatctgccgagggtataaacaac

SEQ ID NO: 4730576 - DNA, 25 bp, Homo sapien
tatgatggcccttgtcaggtgacac

SEQ ID NO: 4730577 - DNA, 25 bp, Homo sapien
gaattgtcagtttgagccaagctgc

SEQ ID NO: 4730578 - DNA, 25 bp, Homo sapien
tatggctgaccgatttccttaaggc

SEQ ID NO: 4730579 - DNA, 25 bp, Homo sapien
tggagctccgagacaagcaaagggc

SEQ ID NO: 4730580 - DNA, 25 bp, Homo sapien
gatgctccctgctttagaatcctga

SEQ ID NO: 4730581 - DNA, 25 bp, Homo sapien
tgttgtaggtcaggctcagtgcaca

SEQ ID NO: 4730582 - DNA, 25 bp, Homo sapien
gagtcagtcacctatttaaacctta

SEQ ID NO: 4730583 - DNA, 25 bp, Homo sapien
tatttcaaacaacgcaccagtcaat

SEQ ID NO: 4730584 - DNA, 25 bp, Homo sapien
catggtctgtttgcagttgagtcag

SEQ ID NO: 4730585 - DNA, 25 bp, Homo sapien
agaagagggcggcatcaggtctcct

SEQ ID NO: 4730586 - DNA, 25 bp, Homo sapien
taaggaagcaggacaaattcttgcc

SEQ ID NO: 4730587 - DNA, 25 bp, Homo sapien
aggaagcaggacaaattcttgcccc

SEQ ID NO: 4730588 - DNA, 25 bp, Homo sapien
aaggaagcaggacaaattcttgccc

SEQ ID NO: 4730589 - DNA, 25 bp, Homo sapien
cactcagcgcctctattggatggtg

SEQ ID NO: 4730590 - DNA, 25 bp, Homo sapien
caatgtcttggaaggcattgtccca

SEQ ID NO: 4730591 - DNA, 25 bp, Homo sapien
cattaggtggcaggttccactcagc

SEQ ID NO: 4730592 - DNA, 25 bp, Homo sapien
tgaagaccccaatctgccgagttgg

SEQ ID NO: 4730593 - DNA, 25 bp, Homo sapien
ggtgaagaggaatgatgggcatttc

SEQ ID NO: 4730594 - DNA, 25 bp, Homo sapien
gggtgaagaggaatgatgggcattt

SEQ ID NO: 4730595 - DNA, 25 bp, Homo sapien
tgggtgaagaggaatgatgggcatt

SEQ ID NO: 4730596 - DNA, 25 bp, Homo sapien
ctgggtgaagaggaatgatgggcat

SEQ ID NO: 4730597 - DNA, 25 bp, Homo sapien
tatgccatatgtaccaacttagacg

SEQ ID NO: 4730598 - DNA, 25 bp, Homo sapien
taagttgcctcaacccaagcagtgc

SEQ ID NO: 4730599 - DNA, 25 bp, Homo sapien
tcacaacaaaatcatagcaggcgtc

SEQ ID NO: 4730600 - DNA, 25 bp, Homo sapien
taaagccctttatgactacactgga

SEQ ID NO: 4730601 - DNA, 25 bp, Homo sapien
cctcttcttttgatgataatgggac

SEQ ID NO: 4730602 - DNA, 25 bp, Homo sapien
ctcttcttttgatgataatgggaca

SEQ ID NO: 4730603 - DNA, 25 bp, Homo sapien
cttcttttgatgataatgggacatg

SEQ ID NO: 4730604 - DNA, 25 bp, Homo sapien
ccctcttcttttgatgataatggga

SEQ ID NO: 4730605 - DNA, 25 bp, Homo sapien
ttcttggtcagggtactctggtgga

SEQ ID NO: 4730606 - DNA, 25 bp, Homo sapien
tcttgctgtcctagaaaaagcacta

SEQ ID NO: 4730607 - DNA, 25 bp, Homo sapien
tgcatgctgggacaatataagaaca

SEQ ID NO: 4730608 - DNA, 25 bp, Homo sapien
ctaagtaccctgagtttcttggtca

SEQ ID NO: 4730609 - DNA, 25 bp, Homo sapien
caagtccaaggtaggctgaaggtca

SEQ ID NO: 4730610 - DNA, 25 bp, Homo sapien
tcatgctgctggtgcaagatatggc

SEQ ID NO: 4730611 - DNA, 25 bp, Homo sapien
tactagagctatccctgaaaagatg

SEQ ID NO: 4730612 - DNA, 25 bp, Homo sapien
tcaaattcaccaaggagggacactt

SEQ ID NO: 4730613 - DNA, 25 bp, Homo sapien
agacggggcatgtaagaattctgtc

SEQ ID NO: 4730614 - DNA, 25 bp, Homo sapien
gggcatgtaagaattctgtcttcta

SEQ ID NO: 4730615 - DNA, 25 bp, Homo sapien
cggggcatgtaagaattctgtcttc

SEQ ID NO: 4730616 - DNA, 25 bp, Homo sapien
gacggggcatgtaagaattctgtct

SEQ ID NO: 4730617 - DNA, 25 bp, Homo sapien
gccaaacatgatgaagcccaggatt

SEQ ID NO: 4730618 - DNA, 25 bp, Homo sapien
caccaggaacacaaagtagaggcca

SEQ ID NO: 4730619 - DNA, 25 bp, Homo sapien
gagggcgatagagaggatgacgaag

SEQ ID NO: 4730620 - DNA, 25 bp, Homo sapien
tgatgaagagaaggacgatggcaca

SEQ ID NO: 4730621 - DNA, 25 bp, Homo sapien
gtgaatgacggtgtacaggagccag

SEQ ID NO: 4730622 - DNA, 25 bp, Homo sapien
tgtgaatgacggtgtacaggagcca

SEQ ID NO: 4730623 - DNA, 25 bp, Homo sapien
ctgtgaatgacggtgtacaggagcc

SEQ ID NO: 4730624 - DNA, 25 bp, Homo sapien
tgttgcttccaacagagctggacac

SEQ ID NO: 4730625 - DNA, 25 bp, Homo sapien
ccttccgggccactatgacactggt

SEQ ID NO: 4730626 - DNA, 25 bp, Homo sapien
gccaagatggtcaggcccataatct

SEQ ID NO: 4730627 - DNA, 25 bp, Homo sapien
gataagatcagggatggaggtccca

SEQ ID NO: 4730628 - DNA, 25 bp, Homo sapien
ccaaaaccaaggactgacacccagg

SEQ ID NO: 4730629 - DNA, 25 bp, Homo sapien
acccagggtctccattctcctttag

SEQ ID NO: 4730630 - DNA, 25 bp, Homo sapien
acacccagggtctccattctccttt

SEQ ID NO: 4730631 - DNA, 25 bp, Homo sapien
taccaaaaccaaggactgacaccca

SEQ ID NO: 4730632 - DNA, 25 bp, Homo sapien
tgcaatccaggtaatggagccaaag

SEQ ID NO: 4730633 - DNA, 25 bp, Homo sapien
tggtgcgcccaccagaccatcaagt

SEQ ID NO: 4730634 - DNA, 25 bp, Homo sapien
tggagccaaagaacgtgatgggaaa

SEQ ID NO: 4730635 - DNA, 25 bp, Homo sapien
caagtaagagaatactgcaatccag

SEQ ID NO: 4730636 - DNA, 25 bp, Homo sapien
aggacttttagaataaaggctggca

SEQ ID NO: 4730637 - DNA, 25 bp, Homo sapien
tgggctctcagggttgggaaggact

SEQ ID NO: 4730638 - DNA, 25 bp, Homo sapien
ttagaataaaggctggcaaaatgtt

SEQ ID NO: 4730639 - DNA, 25 bp, Homo sapien
ggctggcaaaatgttcatcctcttg

SEQ ID NO: 4730640 - DNA, 25 bp, Homo sapien
ggcaaggctgagaggctggtcctcc

SEQ ID NO: 4730641 - DNA, 25 bp, Homo sapien
cttgcgggtttcagaaggccaggca

SEQ ID NO: 4730642 - DNA, 25 bp, Homo sapien
caggtaacgtaatccagagaggaaa

SEQ ID NO: 4730643 - DNA, 25 bp, Homo sapien
caatcagaaacgtgacttgcttgcg

SEQ ID NO: 4730644 - DNA, 25 bp, Homo sapien
ccataagtgatttgctaacataaaa

SEQ ID NO: 4730645 - DNA, 25 bp, Homo sapien
ctgaggtgcaacttatggatgagac

SEQ ID NO: 4730646 - DNA, 25 bp, Homo sapien
gcattttgctccaacgattctgagg

SEQ ID NO: 4730647 - DNA, 25 bp, Homo sapien
tcttgctgataaaatccataagtga

SEQ ID NO: 4730648 - DNA, 25 bp, Homo sapien
gtctcatgggtcgtacagaaacagg

SEQ ID NO: 4730649 - DNA, 25 bp, Homo sapien
aaaacaaatctgacactgccactgc

SEQ ID NO: 4730650 - DNA, 25 bp, Homo sapien
cccaagaggagggtgaagtccagac

SEQ ID NO: 4730651 - DNA, 25 bp, Homo sapien
taaaaacccattcttgtctcatggg

SEQ ID NO: 4730652 - DNA, 25 bp, Homo sapien
tgcagcaaggtcctcccttgcaggg

SEQ ID NO: 4730653 - DNA, 25 bp, Homo sapien
tcatctgggactcttttgctcccct

SEQ ID NO: 4730654 - DNA, 25 bp, Homo sapien
tctgggactcttttgctcccctgca

SEQ ID NO: 4730655 - DNA, 25 bp, Homo sapien
cctgcagcaaggtcctcccttgcag

SEQ ID NO: 4730656 - DNA, 25 bp, Homo sapien
cttatccatgtggacataagctgct

SEQ ID NO: 4730657 - DNA, 25 bp, Homo sapien
tgaagcatcactggatggtgtcatt

SEQ ID NO: 4730658 - DNA, 25 bp, Homo sapien
atttcaacatctgtgctggtgctgt

SEQ ID NO: 4730659 - DNA, 25 bp, Homo sapien
aggttctgaagcatcactggatggt

SEQ ID NO: 4730660 - DNA, 25 bp, Homo sapien
tctgaagcatcactggatggtgtca

SEQ ID NO: 4730661 - DNA, 25 bp, Homo sapien
ttcttggcgatcttgtggagaattg

SEQ ID NO: 4730662 - DNA, 25 bp, Homo sapien
tgacatttcttcttggcgatcttgt

SEQ ID NO: 4730663 - DNA, 25 bp, Homo sapien
acatttcttcttggcgatcttgtgg

SEQ ID NO: 4730664 - DNA, 25 bp, Homo sapien
tttcttcttggcgatcttgtggaga

SEQ ID NO: 4730665 - DNA, 25 bp, Homo sapien
tgagatccaaaacaggtctagagaa

SEQ ID NO: 4730666 - DNA, 25 bp, Homo sapien
ctgagatccaaaacaggtctagaga

SEQ ID NO: 4730667 - DNA, 25 bp, Homo sapien
gaaacttgccagactttctgcttga

SEQ ID NO: 4730668 - DNA, 25 bp, Homo sapien
cctagaaacacattgcgggaaactt

SEQ ID NO: 4730669 - DNA, 25 bp, Homo sapien
cattgcgggaaacttgccagacttt

SEQ ID NO: 4730670 - DNA, 25 bp, Homo sapien
aacacattgcgggaaacttgccaga

SEQ ID NO: 4730671 - DNA, 25 bp, Homo sapien
gatcgtggccgtttctgacagtgct

SEQ ID NO: 4730672 - DNA, 25 bp, Homo sapien
tgatcgtggccgtttctgacagtgc

SEQ ID NO: 4730673 - DNA, 25 bp, Homo sapien
atcgtggccgtttctgacagtgctt

SEQ ID NO: 4730674 - DNA, 25 bp, Homo sapien
attttagttttccatatgatccaag

SEQ ID NO: 4730675 - DNA, 25 bp, Homo sapien
cttcttcagtcattgtgtcataata

SEQ ID NO: 4730676 - DNA, 25 bp, Homo sapien
tttagttttccatatgatccaagtt

SEQ ID NO: 4730677 - DNA, 25 bp, Homo sapien
tcttcagtcattgtgtcataatatt

SEQ ID NO: 4730678 - DNA, 25 bp, Homo sapien
cagaacagcagttcaagaagtttat

SEQ ID NO: 4730679 - DNA, 25 bp, Homo sapien
caaggacaacgtccaggctcatgga

SEQ ID NO: 4730680 - DNA, 25 bp, Homo sapien
ggtgacactccgagagaaagggact

SEQ ID NO: 4730681 - DNA, 25 bp, Homo sapien
cccaggtctattgtaaccctgtaat

SEQ ID NO: 4730682 - DNA, 25 bp, Homo sapien
tatttaaagaatgtacaactcagag

SEQ ID NO: 4730683 - DNA, 25 bp, Homo sapien
tctaacatcaggtacattgagacct

SEQ ID NO: 4730684 - DNA, 25 bp, Homo sapien
tgagacctgatgtcagttacattgg

SEQ ID NO: 4730685 - DNA, 25 bp, Homo sapien
tccagtggttaaaagagtgtgttct

SEQ ID NO: 4730686 - DNA, 25 bp, Homo sapien
cactcttagaagtggcaaaatattc

SEQ ID NO: 4730687 - DNA, 25 bp, Homo sapien
catcttgggtacatttttgcttgtc

SEQ ID NO: 4730688 - DNA, 25 bp, Homo sapien
aacacatttattacccactcttaga

SEQ ID NO: 4730689 - DNA, 25 bp, Homo sapien
tgctgtgtacagataggcctgttgg

SEQ ID NO: 4730690 - DNA, 25 bp, Homo sapien
tgtgcgctctcactgcttcaggaat

SEQ ID NO: 4730691 - DNA, 25 bp, Homo sapien
atgaatgtgcgctctcactgcttca

SEQ ID NO: 4730692 - DNA, 25 bp, Homo sapien
gaatgtgcgctctcactgcttcagg

SEQ ID NO: 4730693 - DNA, 25 bp, Homo sapien
aatgtgcgctctcactgcttcagga

SEQ ID NO: 4730694 - DNA, 25 bp, Homo sapien
cactggaagtacacaataatgggtt

SEQ ID NO: 4730695 - DNA, 25 bp, Homo sapien
tggcaggcgtgcatgacgacagcac

SEQ ID NO: 4730696 - DNA, 25 bp, Homo sapien
gataaagcacgtcaaagggccaggg

SEQ ID NO: 4730697 - DNA, 25 bp, Homo sapien
gacagctcctaagcagttctcaaag

SEQ ID NO: 4730698 - DNA, 25 bp, Homo sapien
tcccaaaccaaagcttgatgtttac

SEQ ID NO: 4730699 - DNA, 25 bp, Homo sapien
cacctcgctggagacgcggcttagc

SEQ ID NO: 4730700 - DNA, 25 bp, Homo sapien
gcagagcttccacctcgctggagac

SEQ ID NO: 4730701 - DNA, 25 bp, Homo sapien
tcatgagttggaagatgctattcct

SEQ ID NO: 4730702 - DNA, 25 bp, Homo sapien
ttcggcgagtgggtcaagggtgtgt

SEQ ID NO: 4730703 - DNA, 25 bp, Homo sapien
gagttggttcatccttgtccctggc

SEQ ID NO: 4730704 - DNA, 25 bp, Homo sapien
tcatccttgtccctggctgcagatg

SEQ ID NO: 4730705 - DNA, 25 bp, Homo sapien
ggttcatccttgtccctggctgcag

SEQ ID NO: 4730706 - DNA, 25 bp, Homo sapien
cggtagagttggttcatccttgtcc

SEQ ID NO: 4730707 - DNA, 25 bp, Homo sapien
aacatggcagtaagaaaccgttcca

SEQ ID NO: 4730708 - DNA, 25 bp, Homo sapien
gagaacatggcagtaagaaaccgtt

SEQ ID NO: 4730709 - DNA, 25 bp, Homo sapien
aaccgttccactgggtgttgaccat

SEQ ID NO: 4730710 - DNA, 25 bp, Homo sapien
cagtaagaaaccgttccactgggtg

SEQ ID NO: 4730711 - DNA, 25 bp, Homo sapien
caaatgctaactgacggaaaggagg

SEQ ID NO: 4730712 - DNA, 25 bp, Homo sapien
tatcttccagcatccaaagggtatg

SEQ ID NO: 4730713 - DNA, 25 bp, Homo sapien
tagcccatccagttgacagcctggt

SEQ ID NO: 4730714 - DNA, 25 bp, Homo sapien
tacaaacttttaggaggcagcggga

SEQ ID NO: 4730715 - DNA, 25 bp, Homo sapien
atttggagagagtacaactggatca

SEQ ID NO: 4730716 - DNA, 25 bp, Homo sapien
ccagtactagcatgttcaagcttct

SEQ ID NO: 4730717 - DNA, 25 bp, Homo sapien
ggtttcatttggtcaccagtactag

SEQ ID NO: 4730718 - DNA, 25 bp, Homo sapien
ttggagagagtacaactggatcaaa

SEQ ID NO: 4730719 - DNA, 25 bp, Homo sapien
ttcagagcaccacagacaagactca

SEQ ID NO: 4730720 - DNA, 25 bp, Homo sapien
gttcctcctcttttgaaatctgatg

SEQ ID NO: 4730721 - DNA, 25 bp, Homo sapien
tttgttcttatctctctgcatttcc

SEQ ID NO: 4730722 - DNA, 25 bp, Homo sapien
aatctgatgtggagacacagtttcc

SEQ ID NO: 4730723 - DNA, 25 bp, Homo sapien
tttatgtgcacctgagccttactca

SEQ ID NO: 4730724 - DNA, 25 bp, Homo sapien
tgctccatccagaccacctaaatag

SEQ ID NO: 4730725 - DNA, 25 bp, Homo sapien
aatccttcacctttatgtgcacctg

SEQ ID NO: 4730726 - DNA, 25 bp, Homo sapien
cattgcacattccaccatattctct

SEQ ID NO: 4730727 - DNA, 25 bp, Homo sapien
gacatcgacaagactgataagcact

SEQ ID NO: 4730728 - DNA, 25 bp, Homo sapien
tcagttgttgatggccctgtctaaa

SEQ ID NO: 4730729 - DNA, 25 bp, Homo sapien
ggtaggtgcaccatgactgtttact

SEQ ID NO: 4730730 - DNA, 25 bp, Homo sapien
tataaaggtgatttccgaggcactc

SEQ ID NO: 4730731 - DNA, 25 bp, Homo sapien
tgaattcctaactggtccctgagcg

SEQ ID NO: 4730732 - DNA, 25 bp, Homo sapien
caaactgttcaacaatggcgtggag

SEQ ID NO: 4730733 - DNA, 25 bp, Homo sapien
tcttaagaactcctgggtgtgcccc

SEQ ID NO: 4730734 - DNA, 25 bp, Homo sapien
tgaacacacggattatgagccctga

SEQ ID NO: 4730735 - DNA, 25 bp, Homo sapien
ttagacagaactgcaaaagggcagg

SEQ ID NO: 4730736 - DNA, 25 bp, Homo sapien
caaatatttgtccagctatggtcag

SEQ ID NO: 4730737 - DNA, 25 bp, Homo sapien
caggtgcaaatatttgtccagctat

SEQ ID NO: 4730738 - DNA, 25 bp, Homo sapien
acagaactgcaaaagggcaggtgca

SEQ ID NO: 4730739 - DNA, 25 bp, Homo sapien
ccaagtggtttagcccccctggctg

SEQ ID NO: 4730740 - DNA, 25 bp, Homo sapien
cacagtctgattagctttcagagaa

SEQ ID NO: 4730741 - DNA, 25 bp, Homo sapien
gaaaactctgacttgtagcttggaa

SEQ ID NO: 4730742 - DNA, 25 bp, Homo sapien
ggcagaggttgtgggattaatttcc

SEQ ID NO: 4730743 - DNA, 25 bp, Homo sapien
aaaatactagcaatactggctatta

SEQ ID NO: 4730744 - DNA, 25 bp, Homo sapien
aagagcatgagaaccccaacccatg

SEQ ID NO: 4730745 - DNA, 25 bp, Homo sapien
tggctattaaagagcatgagaaccc

SEQ ID NO: 4730746 - DNA, 25 bp, Homo sapien
gcaatactggctattaaagagcatg

SEQ ID NO: 4730747 - DNA, 25 bp, Homo sapien
cagccactttgccaatcacatttca

SEQ ID NO: 4730748 - DNA, 25 bp, Homo sapien
tcagggcagaccatgaaacagagac

SEQ ID NO: 4730749 - DNA, 25 bp, Homo sapien
tataatcctaacgtcgcaatctgag

SEQ ID NO: 4730750 - DNA, 25 bp, Homo sapien
tggcaatgtcagtcatacattagta

SEQ ID NO: 4730751 - DNA, 25 bp, Homo sapien
gattttcttcagcccagaatgcctc

SEQ ID NO: 4730752 - DNA, 25 bp, Homo sapien
ttgattttcttcagcccagaatgcc

SEQ ID NO: 4730753 - DNA, 25 bp, Homo sapien
ttttcttcagcccagaatgcctcac

SEQ ID NO: 4730754 - DNA, 25 bp, Homo sapien
tcaaagctcttgattttcttcagcc

SEQ ID NO: 4730755 - DNA, 25 bp, Homo sapien
gcaagatgatcttctttccgttctc

SEQ ID NO: 4730756 - DNA, 25 bp, Homo sapien
tctttccgttctcttacaatatccc

SEQ ID NO: 4730757 - DNA, 25 bp, Homo sapien
caagatgatcttctttccgttctct

SEQ ID NO: 4730758 - DNA, 25 bp, Homo sapien
cagcaagatgatcttctttccgttc

SEQ ID NO: 4730759 - DNA, 25 bp, Homo sapien
atgacgagttaatgagtgcagcaca

SEQ ID NO: 4730760 - DNA, 25 bp, Homo sapien
cgagttaatgagtgcagcacaacaa

SEQ ID NO: 4730761 - DNA, 25 bp, Homo sapien
gacgagttaatgagtgcagcacaac

SEQ ID NO: 4730762 - DNA, 25 bp, Homo sapien
cacactagggcctgttgtggggtgg

SEQ ID NO: 4730763 - DNA, 25 bp, Homo sapien
gcatttctgaaactttgctattgac

SEQ ID NO: 4730764 - DNA, 25 bp, Homo sapien
cgtactataagcttaaatttgaaga

SEQ ID NO: 4730765 - DNA, 25 bp, Homo sapien
tataagcttaaatttgaagaatgaa

SEQ ID NO: 4730766 - DNA, 25 bp, Homo sapien
tgaagaatgaatgttctttcagtgg

SEQ ID NO: 4730767 - DNA, 25 bp, Homo sapien
ccaaaagcattagggttacaggtgg

SEQ ID NO: 4730768 - DNA, 25 bp, Homo sapien
gtttcatttgtctctgtaccccgag

SEQ ID NO: 4730769 - DNA, 25 bp, Homo sapien
gagagaaaacgtgacatcagaaatg

SEQ ID NO: 4730770 - DNA, 25 bp, Homo sapien
tgttcacttcaatcggaaaaagatg

SEQ ID NO: 4730771 - DNA, 25 bp, Homo sapien
gtgtctcctgtgacctaccaataga

SEQ ID NO: 4730772 - DNA, 25 bp, Homo sapien
ctaccaatagacatggagtcctgtg

SEQ ID NO: 4730773 - DNA, 25 bp, Homo sapien
tagacatggagtcctgtgtctcctg

SEQ ID NO: 4730774 - DNA, 25 bp, Homo sapien
agtcctgtgtctcctgtgacctacc

SEQ ID NO: 4730775 - DNA, 25 bp, Homo sapien
tgttctatcgcaaggacggaaaacc

SEQ ID NO: 4730776 - DNA, 25 bp, Homo sapien
taaacgacaagttaaggagtgcatc

SEQ ID NO: 4730777 - DNA, 25 bp, Homo sapien
tccaaatgtttgttctatcgcaagg

SEQ ID NO: 4730778 - DNA, 25 bp, Homo sapien
ttaggagatacacctcacgtaaacg

SEQ ID NO: 4730779 - DNA, 25 bp, Homo sapien
gacctcttcattgctaaccccaatg

SEQ ID NO: 4730780 - DNA, 25 bp, Homo sapien
catcgcatggtgaacgggctaagtg

SEQ ID NO: 4730781 - DNA, 25 bp, Homo sapien
catttaaaccatagcaactctatat

SEQ ID NO: 4730782 - DNA, 25 bp, Homo sapien
ttctcttaccaagtcgccaatgacc

SEQ ID NO: 4730783 - DNA, 25 bp, Homo sapien
ctaccctgatgcccacacttgcaac

SEQ ID NO: 4730784 - DNA, 25 bp, Homo sapien
tgcaatgaaaaggacggtcatcaaa

SEQ ID NO: 4730785 - DNA, 25 bp, Homo sapien
tgaaaaggacggtcatcaaacttgg

SEQ ID NO: 4730786 - DNA, 25 bp, Homo sapien
caatgaaaaggacggtcatcaaact

SEQ ID NO: 4730787 - DNA, 25 bp, Homo sapien
tccatttcatggctgcaatgaaaag

SEQ ID NO: 4730788 - DNA, 25 bp, Homo sapien
tcagaaccgtagtcaagaaaagcat

SEQ ID NO: 4730789 - DNA, 25 bp, Homo sapien
gaaccgtagtcaagaaaagcattaa

SEQ ID NO: 4730790 - DNA, 25 bp, Homo sapien
cataataattcagaaccgtagtcaa

SEQ ID NO: 4730791 - DNA, 25 bp, Homo sapien
aattcagaaccgtagtcaagaaaag

SEQ ID NO: 4730792 - DNA, 25 bp, Homo sapien
ccttgacgaccttattgcggtttat

SEQ ID NO: 4730793 - DNA, 25 bp, Homo sapien
ttgggcttctggtgctgtcaccttg

SEQ ID NO: 4730794 - DNA, 25 bp, Homo sapien
gaccttattgcggtttatcatttgc

SEQ ID NO: 4730795 - DNA, 25 bp, Homo sapien
ggtgctgtcaccttgacgaccttat

SEQ ID NO: 4730796 - DNA, 25 bp, Homo sapien
gagacagtgctaatggctaccagac

SEQ ID NO: 4730797 - DNA, 25 bp, Homo sapien
gagcgataaatacccctatgagaga

SEQ ID NO: 4730798 - DNA, 25 bp, Homo sapien
gacccatgaaaaggcctaagactcg

SEQ ID NO: 4730799 - DNA, 25 bp, Homo sapien
gaaagacacatctcgaaagagcggc

SEQ ID NO: 4730800 - DNA, 25 bp, Homo sapien
gttttttcttgacactataatgtct

SEQ ID NO: 4730801 - DNA, 25 bp, Homo sapien
gatggtggtgctttgttgcagatcc

SEQ ID NO: 4730802 - DNA, 25 bp, Homo sapien
tggtggtgctttgttgcagatccat

SEQ ID NO: 4730803 - DNA, 25 bp, Homo sapien
atgtcttctgcagccagacagtgac

SEQ ID NO: 4730804 - DNA, 25 bp, Homo sapien
ggatatggtgatcttccaactttag

SEQ ID NO: 4730805 - DNA, 25 bp, Homo sapien
cagggattgttatgcttcacaggaa

SEQ ID NO: 4730806 - DNA, 25 bp, Homo sapien
tcaaccagatggttctttcatactt

SEQ ID NO: 4730807 - DNA, 25 bp, Homo sapien
ctttatagttaacgatgcttgtggg

SEQ ID NO: 4730808 - DNA, 25 bp, Homo sapien
gataagatgggaggacgcgcacacg

SEQ ID NO: 4730809 - DNA, 25 bp, Homo sapien
ggaggacgcgcacacggcggggccc

SEQ ID NO: 4730810 - DNA, 25 bp, Homo sapien
gggaggacgcgcacacggcggggcc

SEQ ID NO: 4730811 - DNA, 25 bp, Homo sapien
aagatgggaggacgcgcacacggcg

SEQ ID NO: 4730812 - DNA, 25 bp, Homo sapien
ccgctctcgccagccgggctgggtt

SEQ ID NO: 4730813 - DNA, 25 bp, Homo sapien
actgagccgctgtgagcccggcgct

SEQ ID NO: 4730814 - DNA, 25 bp, Homo sapien
ggttcgggaggagactgagccgctg

SEQ ID NO: 4730815 - DNA, 25 bp, Homo sapien
tcgggaggagactgagccgctgtga

SEQ ID NO: 4730816 - DNA, 25 bp, Homo sapien
cacactgctggctagaactatagca

SEQ ID NO: 4730817 - DNA, 25 bp, Homo sapien
gggaaactccgatctagctcttggg

SEQ ID NO: 4730818 - DNA, 25 bp, Homo sapien
actcagagagagtaagtggtatact

SEQ ID NO: 4730819 - DNA, 25 bp, Homo sapien
cacagtctcaggagaacagataccc

SEQ ID NO: 4730820 - DNA, 25 bp, Homo sapien
gaatgtgttatttcctgattgcttt

SEQ ID NO: 4730821 - DNA, 25 bp, Homo sapien
ctggtttgtgacaaccggctgctaa

SEQ ID NO: 4730822 - DNA, 25 bp, Homo sapien
tcttttagtttttcacgagtgtgct

SEQ ID NO: 4730823 - DNA, 25 bp, Homo sapien
tgctttcttactaggagtattctgt

SEQ ID NO: 4730824 - DNA, 25 bp, Homo sapien
ggtttgtgacaaccggctgctaaaa

SEQ ID NO: 4730825 - DNA, 25 bp, Homo sapien
catggttattcagggactcaggctc

SEQ ID NO: 4730826 - DNA, 25 bp, Homo sapien
tctgttttgttactccactatcccc

SEQ ID NO: 4730827 - DNA, 25 bp, Homo sapien
ttagagtcttctacttcaagcaggg

SEQ ID NO: 4730828 - DNA, 25 bp, Homo sapien
cctcacctagttggcgagtggcttt

SEQ ID NO: 4730829 - DNA, 25 bp, Homo sapien
cgacctcaagtgtggaattccctaa

SEQ ID NO: 4730830 - DNA, 25 bp, Homo sapien
gaaacacaagggctgaagtaactgg

SEQ ID NO: 4730831 - DNA, 25 bp, Homo sapien
gaaacactcagagacaggaacctgg

SEQ ID NO: 4730832 - DNA, 25 bp, Homo sapien
gaagactggattgcctgtggtcacc

SEQ ID NO: 4730833 - DNA, 25 bp, Homo sapien
ggcacaagaaatggcatggaaatca

SEQ ID NO: 4730834 - DNA, 25 bp, Homo sapien
gatttggtccctctgcaaaagcttc

SEQ ID NO: 4730835 - DNA, 25 bp, Homo sapien
ctggggatttggtccctctgcaaaa

SEQ ID NO: 4730836 - DNA, 25 bp, Homo sapien
ttccctgaaaagcagtaggcacaag

SEQ ID NO: 4730837 - DNA, 25 bp, Homo sapien
ctaacacaagagttatagcaaccag

SEQ ID NO: 4730838 - DNA, 25 bp, Homo sapien
tgccttaagaactgctagaacatta

SEQ ID NO: 4730839 - DNA, 25 bp, Homo sapien
caggattttgtctactgccttaaga

SEQ ID NO: 4730840 - DNA, 25 bp, Homo sapien
tagcaaccaggattttgtctactgc

SEQ ID NO: 4730841 - DNA, 25 bp, Homo sapien
ggtcaaatctgtgctttctggcagc

SEQ ID NO: 4730842 - DNA, 25 bp, Homo sapien
tcacattgcactgttcattgggtgg

SEQ ID NO: 4730843 - DNA, 25 bp, Homo sapien
gccttccttcacattgcactgttca

SEQ ID NO: 4730844 - DNA, 25 bp, Homo sapien
tccatctcctcatgcggtggcctgt

SEQ ID NO: 4730845 - DNA, 25 bp, Homo sapien
tcatcaggtcaaacagctgcacgtg

SEQ ID NO: 4730846 - DNA, 25 bp, Homo sapien
ccgggcagggtcaaattctaacatc

SEQ ID NO: 4730847 - DNA, 25 bp, Homo sapien
agggcctcggccagtgtgatgcgcc

SEQ ID NO: 4730848 - DNA, 25 bp, Homo sapien
tggtgtggaaggaccgctcctcagg

SEQ ID NO: 4730849 - DNA, 25 bp, Homo sapien
tcagtgtgacggcagggtcgtggga

SEQ ID NO: 4730850 - DNA, 25 bp, Homo sapien
ctcagtgtgacggcagggtcgtggg

SEQ ID NO: 4730851 - DNA, 25 bp, Homo sapien
ctggacaatgagcagctcctttcct

SEQ ID NO: 4730852 - DNA, 25 bp, Homo sapien
gacaatgagcagctcctttcctttc

SEQ ID NO: 4730853 - DNA, 25 bp, Homo sapien
ttccgccctcctggacaatgagcag

SEQ ID NO: 4730854 - DNA, 25 bp, Homo sapien
caatgagcagctcctttcctttcat

SEQ ID NO: 4730855 - DNA, 25 bp, Homo sapien
ccaagttaggatgggcaacaaacat

SEQ ID NO: 4730856 - DNA, 25 bp, Homo sapien
aacaacagttccaagttaggatggg

SEQ ID NO: 4730857 - DNA, 25 bp, Homo sapien
acaacagttccaagttaggatgggc

SEQ ID NO: 4730858 - DNA, 25 bp, Homo sapien
agttccaagttaggatgggcaacaa

SEQ ID NO: 4730859 - DNA, 25 bp, Homo sapien
tgaagtatgtgcaaggaccagcagc

SEQ ID NO: 4730860 - DNA, 25 bp, Homo sapien
tcagcagcctagaagctaaacagct

SEQ ID NO: 4730861 - DNA, 25 bp, Homo sapien
gctcggacatgtagcaaagacctgc

SEQ ID NO: 4730862 - DNA, 25 bp, Homo sapien
caggtctaatgggacaagtcatacc

SEQ ID NO: 4730863 - DNA, 25 bp, Homo sapien
ccataaaagggtcccagtgagagtc

SEQ ID NO: 4730864 - DNA, 25 bp, Homo sapien
gaatccaagacccacccacatgtgg

SEQ ID NO: 4730865 - DNA, 25 bp, Homo sapien
gactccaggagtgtatgccataaaa

SEQ ID NO: 4730866 - DNA, 25 bp, Homo sapien
aagagtcttgcgtgtgtttccccag

SEQ ID NO: 4730867 - DNA, 25 bp, Homo sapien
gcatttcggtaaagtttagctgagg

SEQ ID NO: 4730868 - DNA, 25 bp, Homo sapien
aatgcatttcggtaaagtttagctg

SEQ ID NO: 4730869 - DNA, 25 bp, Homo sapien
catttcggtaaagtttagctgaggg

SEQ ID NO: 4730870 - DNA, 25 bp, Homo sapien
tgcatttcggtaaagtttagctgag

SEQ ID NO: 4730871 - DNA, 25 bp, Homo sapien
cccttagtagtctgtgctgcagtca

SEQ ID NO: 4730872 - DNA, 25 bp, Homo sapien
cctgtgtcacgattccccttagtag

SEQ ID NO: 4730873 - DNA, 25 bp, Homo sapien
agcatgaccactagatggcgggaga

SEQ ID NO: 4730874 - DNA, 25 bp, Homo sapien
tccgctgtagttacgtgactcacct

SEQ ID NO: 4730875 - DNA, 25 bp, Homo sapien
tgtggtcgcctagccccttctacga

SEQ ID NO: 4730876 - DNA, 25 bp, Homo sapien
cactccagccggcatcgtaagtccc

SEQ ID NO: 4730877 - DNA, 25 bp, Homo sapien
tgtgccttgggctagaaagttctct

SEQ ID NO: 4730878 - DNA, 25 bp, Homo sapien
tctacgaaccttgtgaagagaagct

SEQ ID NO: 4730879 - DNA, 25 bp, Homo sapien
tcaaaattaactgagtacagtgctc

SEQ ID NO: 4730880 - DNA, 25 bp, Homo sapien
caatttcatgtaatcctgagaaccc

SEQ ID NO: 4730881 - DNA, 25 bp, Homo sapien
gaccagtgagaactgggatttataa

SEQ ID NO: 4730882 - DNA, 25 bp, Homo sapien
cccttttataaggtaggcattgcac

SEQ ID NO: 4730883 - DNA, 25 bp, Homo sapien
tctggcagccggaagtccaagatgc

SEQ ID NO: 4730884 - DNA, 25 bp, Homo sapien
gcagccggaagtccaagatgcccat

SEQ ID NO: 4730885 - DNA, 25 bp, Homo sapien
cagctctctggcagccggaagtcca

SEQ ID NO: 4730886 - DNA, 25 bp, Homo sapien
ggactctcacccgtgcagctctctg

SEQ ID NO: 4730887 - DNA, 25 bp, Homo sapien
gttccggcccccgtgcaccgtgcgc

SEQ ID NO: 4730888 - DNA, 25 bp, Homo sapien
ggcccccgtgcaccgtgcgcgccca

SEQ ID NO: 4730889 - DNA, 25 bp, Homo sapien
cgttccggcccccgtgcaccgtgcg

SEQ ID NO: 4730890 - DNA, 25 bp, Homo sapien
tccggcccccgtgcaccgtgcgcgc

SEQ ID NO: 4730891 - DNA, 25 bp, Homo sapien
gtacatttatactaactgcagaaga

SEQ ID NO: 4730892 - DNA, 25 bp, Homo sapien
tacatttatactaactgcagaagaa

SEQ ID NO: 4730893 - DNA, 25 bp, Homo sapien
acatttatactaactgcagaagaat

SEQ ID NO: 4730894 - DNA, 25 bp, Homo sapien
tcatgtgcctcacaaagtccctact

SEQ ID NO: 4730895 - DNA, 25 bp, Homo sapien
aagatgtcatgtgcctcacaaagtc

SEQ ID NO: 4730896 - DNA, 25 bp, Homo sapien
tcctaaggccaccatttatgtctac

SEQ ID NO: 4730897 - DNA, 25 bp, Homo sapien
ttatgtctacgtggcactgtgccca

SEQ ID NO: 4730898 - DNA, 25 bp, Homo sapien
tatctcctccactggttagatccaa

SEQ ID NO: 4730899 - DNA, 25 bp, Homo sapien
tagatccaaagaatgaccccgaatg

SEQ ID NO: 4730900 - DNA, 25 bp, Homo sapien
aagtcgtggatgtttattgtgtagc

SEQ ID NO: 4730901 - DNA, 25 bp, Homo sapien
tacaggcgccgatgagccaacaaag

SEQ ID NO: 4730902 - DNA, 25 bp, Homo sapien
tcagtgacttaatgggccttgagtt

SEQ ID NO: 4730903 - DNA, 25 bp, Homo sapien
gtgacttaatgggccttgagtttcc

SEQ ID NO: 4730904 - DNA, 25 bp, Homo sapien
gacttaatgggccttgagtttccca

SEQ ID NO: 4730905 - DNA, 25 bp, Homo sapien
cagtgacttaatgggccttgagttt

SEQ ID NO: 4730906 - DNA, 25 bp, Homo sapien
ttcccatagtgtcccatctgaggag

SEQ ID NO: 4730907 - DNA, 25 bp, Homo sapien
gctggctccacaatttcaaacgacc

SEQ ID NO: 4730908 - DNA, 25 bp, Homo sapien
tatttagtgcaaggagagatctctg

SEQ ID NO: 4730909 - DNA, 25 bp, Homo sapien
cttaaccgtaaatcagctaaggagt

SEQ ID NO: 4730910 - DNA, 25 bp, Homo sapien
taaaacaaatggattggctgtgctg

SEQ ID NO: 4730911 - DNA, 25 bp, Homo sapien
ggcccattcaatagctacaacctct

SEQ ID NO: 4730912 - DNA, 25 bp, Homo sapien
aaagctaaaacaaatggattggctg

SEQ ID NO: 4730913 - DNA, 25 bp, Homo sapien
ttcaatagctacaacctctgtctgg

SEQ ID NO: 4730914 - DNA, 25 bp, Homo sapien
tatgcagcatgacttggaaatcaca

SEQ ID NO: 4730915 - DNA, 25 bp, Homo sapien
caatgccatggcatttatccgggac

SEQ ID NO: 4730916 - DNA, 25 bp, Homo sapien
taccagtgttcttgtgtagcagaca

SEQ ID NO: 4730917 - DNA, 25 bp, Homo sapien
tatccgggacatgatttatgcagca

SEQ ID NO: 4730918 - DNA, 25 bp, Homo sapien
ttctcactaaatttggcttgggtct

SEQ ID NO: 4730919 - DNA, 25 bp, Homo sapien
aagctgtgtcactggctacacttgg

SEQ ID NO: 4730920 - DNA, 25 bp, Homo sapien
gtcactggctacacttggcttctca

SEQ ID NO: 4730921 - DNA, 25 bp, Homo sapien
gggtctgccctatgtgtgtttgttc

SEQ ID NO: 4730922 - DNA, 25 bp, Homo sapien
cccatgggaagttctttacaaggca

SEQ ID NO: 4730923 - DNA, 25 bp, Homo sapien
gaaaggacagcagttacccatggga

SEQ ID NO: 4730924 - DNA, 25 bp, Homo sapien
gcagttacccatgggaagttcttta

SEQ ID NO: 4730925 - DNA, 25 bp, Homo sapien
aagttctttacaaggcagtatggca

SEQ ID NO: 4730926 - DNA, 25 bp, Homo sapien
cccaggacgtggaggttgtaagtga

SEQ ID NO: 4730927 - DNA, 25 bp, Homo sapien
caagatcgcaccactgtactccagc

SEQ ID NO: 4730928 - DNA, 25 bp, Homo sapien
gcctggcaacagattgagactccat

SEQ ID NO: 4730929 - DNA, 25 bp, Homo sapien
caggacgtggaggttgtaagtgagc

SEQ ID NO: 4730930 - DNA, 25 bp, Homo sapien
ttccacttcaccactgacggcagca

SEQ ID NO: 4730931 - DNA, 25 bp, Homo sapien
acttcaccactgacggcagcatttg

SEQ ID NO: 4730932 - DNA, 25 bp, Homo sapien
cacttcaccactgacggcagcattt

SEQ ID NO: 4730933 - DNA, 25 bp, Homo sapien
ccacttcaccactgacggcagcatt

SEQ ID NO: 4730934 - DNA, 25 bp, Homo sapien
ccaaaaagtctccaattccagataa

SEQ ID NO: 4730935 - DNA, 25 bp, Homo sapien
tattgagaccccactattgctgagc

SEQ ID NO: 4730936 - DNA, 25 bp, Homo sapien
gatgacaatctccttcgtcagggaa

SEQ ID NO: 4730937 - DNA, 25 bp, Homo sapien
cagcagccgtgtgtactaggaaact

SEQ ID NO: 4730938 - DNA, 25 bp, Homo sapien
ggattagaatggtgatctgcctggc

SEQ ID NO: 4730939 - DNA, 25 bp, Homo sapien
gagaaagttaaagcctggaggatca

SEQ ID NO: 4730940 - DNA, 25 bp, Homo sapien
tggaggatcagcacttcgtttctga

SEQ ID NO: 4730941 - DNA, 25 bp, Homo sapien
aaacaatcaaatgcaaacgtggcag

SEQ ID NO: 4730942 - DNA, 25 bp, Homo sapien
cctcttagatccagcaatgagtggg

SEQ ID NO: 4730943 - DNA, 25 bp, Homo sapien
gagggagtgtgcatccaccttcctg

SEQ ID NO: 4730944 - DNA, 25 bp, Homo sapien
gcactctattttggctcaggtctgc

SEQ ID NO: 4730945 - DNA, 25 bp, Homo sapien
tggcactctattttggctcaggtct

SEQ ID NO: 4730946 - DNA, 25 bp, Homo sapien
ggcactctattttggctcaggtctg

SEQ ID NO: 4730947 - DNA, 25 bp, Homo sapien
actctattttggctcaggtctgcat

SEQ ID NO: 4730948 - DNA, 25 bp, Homo sapien
gctgggcctatgaccactctgttgg

SEQ ID NO: 4730949 - DNA, 25 bp, Homo sapien
tccagggaagctggtcataaaacag

SEQ ID NO: 4730950 - DNA, 25 bp, Homo sapien
ttggcctaacaccagacatgggcag

SEQ ID NO: 4730951 - DNA, 25 bp, Homo sapien
tttgttgaccggtgttcagctgggc

SEQ ID NO: 4730952 - DNA, 25 bp, Homo sapien
tctgtgctaggagaggagctatgaa

SEQ ID NO: 4730953 - DNA, 25 bp, Homo sapien
gagctatgaagatgaatgccactaa

SEQ ID NO: 4730954 - DNA, 25 bp, Homo sapien
ctggaacgaccaagtgacctggaat

SEQ ID NO: 4730955 - DNA, 25 bp, Homo sapien
tcatctcccaatgacctggaacgac

SEQ ID NO: 4730956 - DNA, 25 bp, Homo sapien
catcccttccaaggtaacatcatag

SEQ ID NO: 4730957 - DNA, 25 bp, Homo sapien
tcccttccaaggtaacatcatagaa

SEQ ID NO: 4730958 - DNA, 25 bp, Homo sapien
ccaaggtaacatcatagaaggcttt

SEQ ID NO: 4730959 - DNA, 25 bp, Homo sapien
cttccaaggtaacatcatagaaggc

SEQ ID NO: 4730960 - DNA, 25 bp, Homo sapien
caggcttactagaaagctccccaaa

SEQ ID NO: 4730961 - DNA, 25 bp, Homo sapien
cgtgccattctgctcgggcttctgc

SEQ ID NO: 4730962 - DNA, 25 bp, Homo sapien
ttcttccgccttccatagaaacgtg

SEQ ID NO: 4730963 - DNA, 25 bp, Homo sapien
aaatttttgtcaatctcaggcccac

SEQ ID NO: 4730964 - DNA, 25 bp, Homo sapien
tcctcctttgattccgggctttgta

SEQ ID NO: 4730965 - DNA, 25 bp, Homo sapien
atctcttgagtacacatccccctgt

SEQ ID NO: 4730966 - DNA, 25 bp, Homo sapien
ttgagtacacatccccctgtctgtc

SEQ ID NO: 4730967 - DNA, 25 bp, Homo sapien
tgtcctcctcctttgattccgggct

SEQ ID NO: 4730968 - DNA, 25 bp, Homo sapien
ttccctgataacactcattctcttt

SEQ ID NO: 4730969 - DNA, 25 bp, Homo sapien
ttaccacatgttgtcaaaagcctgg

SEQ ID NO: 4730970 - DNA, 25 bp, Homo sapien
tctctttaaacaacctggcagtact

SEQ ID NO: 4730971 - DNA, 25 bp, Homo sapien
cttttaccacatgttgtcaaaagcc

SEQ ID NO: 4730972 - DNA, 25 bp, Homo sapien
cacagctacatcttcgtcaccaaag

SEQ ID NO: 4730973 - DNA, 25 bp, Homo sapien
gggcttgaggtgcaactgtgaccac

SEQ ID NO: 4730974 - DNA, 25 bp, Homo sapien
ccaaagctatttggaaggcaaaggg

SEQ ID NO: 4730975 - DNA, 25 bp, Homo sapien
cttgaggtgcaactgtgaccacagc

SEQ ID NO: 4730976 - DNA, 25 bp, Homo sapien
ggggcagatgaagacgacctggaag

SEQ ID NO: 4730977 - DNA, 25 bp, Homo sapien
acctggaagctggaattggggatgc

SEQ ID NO: 4730978 - DNA, 25 bp, Homo sapien
aattggggatgccaactgggatgcg

SEQ ID NO: 4730979 - DNA, 25 bp, Homo sapien
gggcagatgaagacgacctggaagc

SEQ ID NO: 4730980 - DNA, 25 bp, Homo sapien
acaggtaggcttgctgccgagagcc

SEQ ID NO: 4730981 - DNA, 25 bp, Homo sapien
tgtcccctcaggtgccagactctgc

SEQ ID NO: 4730982 - DNA, 25 bp, Homo sapien
gggagttggcaatgcgcactcctaa

SEQ ID NO: 4730983 - DNA, 25 bp, Homo sapien
tcccagaagcacttgacaggtaggc

SEQ ID NO: 4730984 - DNA, 25 bp, Homo sapien
caaagcaagggcatatgacctgatc

SEQ ID NO: 4730985 - DNA, 25 bp, Homo sapien
cactattgcatctgctggcaaccaa

SEQ ID NO: 4730986 - DNA, 25 bp, Homo sapien
ttcactattgcatctgctggcaacc

SEQ ID NO: 4730987 - DNA, 25 bp, Homo sapien
gacctgatctctgccacttcaaccc

SEQ ID NO: 4730988 - DNA, 25 bp, Homo sapien
ctgtcatataaggaagaccacctgc

SEQ ID NO: 4730989 - DNA, 25 bp, Homo sapien
cagatgctgtcatataaggaagacc

SEQ ID NO: 4730990 - DNA, 25 bp, Homo sapien
tgctgtcatataaggaagaccacct

SEQ ID NO: 4730991 - DNA, 25 bp, Homo sapien
agcagatgctgtcatataaggaaga

SEQ ID NO: 4730992 - DNA, 25 bp, Homo sapien
tcagtggtcagcataggtttctggg

SEQ ID NO: 4730993 - DNA, 25 bp, Homo sapien
acttcagagcctgattcagtggtca

SEQ ID NO: 4730994 - DNA, 25 bp, Homo sapien
ttctggggcttttgaccatctcccc

SEQ ID NO: 4730995 - DNA, 25 bp, Homo sapien
ccacttcagagcctgattcagtggt

SEQ ID NO: 4730996 - DNA, 25 bp, Homo sapien
caaggtggcggatttgctgttctcc

SEQ ID NO: 4730997 - DNA, 25 bp, Homo sapien
taaatgttcttgtgcctccagccct

SEQ ID NO: 4730998 - DNA, 25 bp, Homo sapien
atccactattctcatcgcatccttg

SEQ ID NO: 4730999 - DNA, 25 bp, Homo sapien
tcagcagcgtgagatgtaaatgttc

SEQ ID NO: 4731000 - DNA, 25 bp, Homo sapien
tccagggaggactgcctgcatctcc

SEQ ID NO: 4731001 - DNA, 25 bp, Homo sapien
ccagggaggactgcctgcatctcca

SEQ ID NO: 4731002 - DNA, 25 bp, Homo sapien
agggaggactgcctgcatctccagt

SEQ ID NO: 4731003 - DNA, 25 bp, Homo sapien
ggaggactgcctgcatctccagttc

SEQ ID NO: 4731004 - DNA, 25 bp, Homo sapien
aaatggatacgaaacagtggacacc

SEQ ID NO: 4731005 - DNA, 25 bp, Homo sapien
tacaactgaccaaatgagcaaatgg

SEQ ID NO: 4731006 - DNA, 25 bp, Homo sapien
tgcttttcatgccatagcccaggtc

SEQ ID NO: 4731007 - DNA, 25 bp, Homo sapien
cagcagttgcgctgcaccttacaac

SEQ ID NO: 4731008 - DNA, 25 bp, Homo sapien
aatatgaaggataaaggttttgatg

SEQ ID NO: 4731009 - DNA, 25 bp, Homo sapien
ctaatatgaaggataaaggttttga

SEQ ID NO: 4731010 - DNA, 25 bp, Homo sapien
tatgaaggataaaggttttgatggg

SEQ ID NO: 4731011 - DNA, 25 bp, Homo sapien
tctaatatgaaggataaaggttttg

SEQ ID NO: 4731012 - DNA, 25 bp, Homo sapien
ttatttccttcttctttaggcaaca

SEQ ID NO: 4731013 - DNA, 25 bp, Homo sapien
tatttccttcttctttaggcaacaa

SEQ ID NO: 4731014 - DNA, 25 bp, Homo sapien
cttcttctttaggcaacaaaaccat

SEQ ID NO: 4731015 - DNA, 25 bp, Homo sapien
tgcaagttggttgtgtttggcatct

SEQ ID NO: 4731016 - DNA, 25 bp, Homo sapien
tgctgcagttggtgtgccatagctg

SEQ ID NO: 4731017 - DNA, 25 bp, Homo sapien
tgacatggtagatttgggtgcctgc

SEQ ID NO: 4731018 - DNA, 25 bp, Homo sapien
taaactttctattcccttgtgaaga

SEQ ID NO: 4731019 - DNA, 25 bp, Homo sapien
ttcttgtcagctttctgaaaagcat

SEQ ID NO: 4731020 - DNA, 25 bp, Homo sapien
atttagactcccgtaaagcctctcg

SEQ ID NO: 4731021 - DNA, 25 bp, Homo sapien
cgtaaagcctctcggcacccatttt

SEQ ID NO: 4731022 - DNA, 25 bp, Homo sapien
aagcctctcggcacccatttttaat

SEQ ID NO: 4731023 - DNA, 25 bp, Homo sapien
caattccaaatgcaggtaacccgta

SEQ ID NO: 4731024 - DNA, 25 bp, Homo sapien
ttcaattccaaatgcaggtaacccg

SEQ ID NO: 4731025 - DNA, 25 bp, Homo sapien
ccaaatgcaggtaacccgtaagctc

SEQ ID NO: 4731026 - DNA, 25 bp, Homo sapien
ttccaaatgcaggtaacccgtaagc

SEQ ID NO: 4731027 - DNA, 25 bp, Homo sapien
tgcgactccactagtcaggctctta

SEQ ID NO: 4731028 - DNA, 25 bp, Homo sapien
caacatcagtactgccctcagctga

SEQ ID NO: 4731029 - DNA, 25 bp, Homo sapien
ctctccttgatagcatgtgatgata

SEQ ID NO: 4731030 - DNA, 25 bp, Homo sapien
gctcttatgtacaacatcagtactg

SEQ ID NO: 4731031 - DNA, 25 bp, Homo sapien
aattagataaaacgcttctgtacct

SEQ ID NO: 4731032 - DNA, 25 bp, Homo sapien
gataaaacgcttctgtacctttgac

SEQ ID NO: 4731033 - DNA, 25 bp, Homo sapien
aaacgcttctgtacctttgactatg

SEQ ID NO: 4731034 - DNA, 25 bp, Homo sapien
tgaaattagataaaacgcttctgta

SEQ ID NO: 4731035 - DNA, 25 bp, Homo sapien
tcctgctggatcctatttgcaacat

SEQ ID NO: 4731036 - DNA, 25 bp, Homo sapien
ctgctggatcctatttgcaacatct

SEQ ID NO: 4731037 - DNA, 25 bp, Homo sapien
cctgctggatcctatttgcaacatc

SEQ ID NO: 4731038 - DNA, 25 bp, Homo sapien
tattgcccttcagtacagaaccatg

SEQ ID NO: 4731039 - DNA, 25 bp, Homo sapien
caaagcacgctagagaatgagaagt

SEQ ID NO: 4731040 - DNA, 25 bp, Homo sapien
caagggttctgaggtagtgcacacc

SEQ ID NO: 4731041 - DNA, 25 bp, Homo sapien
aaccatgggatgtcttcagggcaag

SEQ ID NO: 4731042 - DNA, 25 bp, Homo sapien
tttatggttaagcattcccaagttc

SEQ ID NO: 4731043 - DNA, 25 bp, Homo sapien
ctgaactacaacctacttttgctgt

SEQ ID NO: 4731044 - DNA, 25 bp, Homo sapien
gctgttgattcaggtgattttgtag

SEQ ID NO: 4731045 - DNA, 25 bp, Homo sapien
ccgcacctccttggaaaatgaaaat

SEQ ID NO: 4731046 - DNA, 25 bp, Homo sapien
taccaaggctccacaccagatgtga

SEQ ID NO: 4731047 - DNA, 25 bp, Homo sapien
caccagatgtgatccccagggattg

SEQ ID NO: 4731048 - DNA, 25 bp, Homo sapien
caccccacttgtaaaggcggtcatt

SEQ ID NO: 4731049 - DNA, 25 bp, Homo sapien
caggtaccaaggctccacaccagat

SEQ ID NO: 4731050 - DNA, 25 bp, Homo sapien
tccagcaggctcatcccaatagctt

SEQ ID NO: 4731051 - DNA, 25 bp, Homo sapien
tcatcccaatagctttgaaagccag

SEQ ID NO: 4731052 - DNA, 25 bp, Homo sapien
aggtccagcaggctcatcccaatag

SEQ ID NO: 4731053 - DNA, 25 bp, Homo sapien
gcaggctcatcccaatagctttgaa

SEQ ID NO: 4731054 - DNA, 25 bp, Homo sapien
gaagcacagttaagattgctaaact

SEQ ID NO: 4731055 - DNA, 25 bp, Homo sapien
ttaagattgctaaacttccaactgg

SEQ ID NO: 4731056 - DNA, 25 bp, Homo sapien
ttctgaagcacagttaagattgcta

SEQ ID NO: 4731057 - DNA, 25 bp, Homo sapien
cagttaagattgctaaacttccaac

SEQ ID NO: 4731058 - DNA, 25 bp, Homo sapien
gacttcagctgtcacccttgtagta

SEQ ID NO: 4731059 - DNA, 25 bp, Homo sapien
tgaccctttttggtaacagatccac

SEQ ID NO: 4731060 - DNA, 25 bp, Homo sapien
caatgttatcgcctttgccagacca

SEQ ID NO: 4731061 - DNA, 25 bp, Homo sapien
ctgtcacccttgtagtacaaggcca

SEQ ID NO: 4731062 - DNA, 25 bp, Homo sapien
gccctcattaaaagggcttggtgga

SEQ ID NO: 4731063 - DNA, 25 bp, Homo sapien
cggccctcattaaaagggcttggtg

SEQ ID NO: 4731064 - DNA, 25 bp, Homo sapien
ttgtttcatcaccacctcggatgca

SEQ ID NO: 4731065 - DNA, 25 bp, Homo sapien
ctttgtttcatcaccacctcggatg

SEQ ID NO: 4731066 - DNA, 25 bp, Homo sapien
tgtttcatcaccacctcggatgcac

SEQ ID NO: 4731067 - DNA, 25 bp, Homo sapien
ttcatcaccacctcggatgcacccc

SEQ ID NO: 4731068 - DNA, 25 bp, Homo sapien
caatacctgatgaagacctgaaaca

SEQ ID NO: 4731069 - DNA, 25 bp, Homo sapien
taaaaccgtggttcacaacatgtgg

SEQ ID NO: 4731070 - DNA, 25 bp, Homo sapien
tataatatagacctgacatgaagct

SEQ ID NO: 4731071 - DNA, 25 bp, Homo sapien
ggttgtgaccctgagtagtctgcca

SEQ ID NO: 4731072 - DNA, 25 bp, Homo sapien
gcttcatatgttcagaattgtcctc

SEQ ID NO: 4731073 - DNA, 25 bp, Homo sapien
cagcaactgactgtagtggtccaat

SEQ ID NO: 4731074 - DNA, 25 bp, Homo sapien
tcaactgcaaacgaggaaatccaga

SEQ ID NO: 4731075 - DNA, 25 bp, Homo sapien
tttggctccagtaatgtgcttcata

SEQ ID NO: 4731076 - DNA, 25 bp, Homo sapien
cgggatgcaacacctgacatgagaa

SEQ ID NO: 4731077 - DNA, 25 bp, Homo sapien
actccgggatgcaacacctgacatg

SEQ ID NO: 4731078 - DNA, 25 bp, Homo sapien
tgcaacacctgacatgagaaagagc

SEQ ID NO: 4731079 - DNA, 25 bp, Homo sapien
ctctgactccgggatgcaacacctg

SEQ ID NO: 4731080 - DNA, 25 bp, Homo sapien
gggggtgtttgactgccttccagta

SEQ ID NO: 4731081 - DNA, 25 bp, Homo sapien
ggggtgtttgactgccttccagtag

SEQ ID NO: 4731082 - DNA, 25 bp, Homo sapien
gggatcaggcggagatttctaaact

SEQ ID NO: 4731083 - DNA, 25 bp, Homo sapien
caatcaaggcctgagaagtctcttc

SEQ ID NO: 4731084 - DNA, 25 bp, Homo sapien
tgtcccagcctgtgaaactgcgctg

SEQ ID NO: 4731085 - DNA, 25 bp, Homo sapien
ggcttaaagttaatccatggagtct

SEQ ID NO: 4731086 - DNA, 25 bp, Homo sapien
gaaattctgttggattccaagtgaa

SEQ ID NO: 4731087 - DNA, 25 bp, Homo sapien
ttctgttggattccaagtgaaaaat

SEQ ID NO: 4731088 - DNA, 25 bp, Homo sapien
tgttggattccaagtgaaaaatcat

SEQ ID NO: 4731089 - DNA, 25 bp, Homo sapien
tttgaaattctgttggattccaagt

SEQ ID NO: 4731090 - DNA, 25 bp, Homo sapien
ctttctgataccctggagatgattc

SEQ ID NO: 4731091 - DNA, 25 bp, Homo sapien
gattttctagagccgtgcattcagt

SEQ ID NO: 4731092 - DNA, 25 bp, Homo sapien
aactgtgcagttcttaggttcaggg

SEQ ID NO: 4731093 - DNA, 25 bp, Homo sapien
gagaggttgggatcagattttctag

SEQ ID NO: 4731094 - DNA, 25 bp, Homo sapien
acctggaaggatagtcagcaataaa

SEQ ID NO: 4731095 - DNA, 25 bp, Homo sapien
taacctggaaggatagtcagcaata

SEQ ID NO: 4731096 - DNA, 25 bp, Homo sapien
ggttaacctggaaggatagtcagca

SEQ ID NO: 4731097 - DNA, 25 bp, Homo sapien
ctgaggttaacctggaaggatagtc

SEQ ID NO: 4731098 - DNA, 25 bp, Homo sapien
tggcgtctcctagtgcttgtctggc

SEQ ID NO: 4731099 - DNA, 25 bp, Homo sapien
ccacagctacactgtcctgtcaggc

SEQ ID NO: 4731100 - DNA, 25 bp, Homo sapien
tctcctagtgcttgtctggccagga

SEQ ID NO: 4731101 - DNA, 25 bp, Homo sapien
cctagtgcttgtctggccaggaccc

SEQ ID NO: 4731102 - DNA, 25 bp, Homo sapien
ttacagatcccttcaatgatgcatg

SEQ ID NO: 4731103 - DNA, 25 bp, Homo sapien
ctttgtagatcattaaactgtcccc

SEQ ID NO: 4731104 - DNA, 25 bp, Homo sapien
cctatttcgaagatgttgtctgtgc

SEQ ID NO: 4731105 - DNA, 25 bp, Homo sapien
tgtgctgctttgtagatcattaaac

SEQ ID NO: 4731106 - DNA, 25 bp, Homo sapien
cacccaacagaggatgtggacagcc

SEQ ID NO: 4731107 - DNA, 25 bp, Homo sapien
cacagtgtgaggcagacgatgtgtc

SEQ ID NO: 4731108 - DNA, 25 bp, Homo sapien
gatgtgtctaaccaataccacaccc

SEQ ID NO: 4731109 - DNA, 25 bp, Homo sapien
aaaaccatgatgcttgtccctgatg

SEQ ID NO: 4731110 - DNA, 25 bp, Homo sapien
gttacggcaaacaagtgaggagaga

SEQ ID NO: 4731111 - DNA, 25 bp, Homo sapien
gggttacggcaaacaagtgaggaga

SEQ ID NO: 4731112 - DNA, 25 bp, Homo sapien
ggttacggcaaacaagtgaggagag

SEQ ID NO: 4731113 - DNA, 25 bp, Homo sapien
ccagctctgatgaggcctttttcct

SEQ ID NO: 4731114 - DNA, 25 bp, Homo sapien
ctcccagctctgatgaggccttttt

SEQ ID NO: 4731115 - DNA, 25 bp, Homo sapien
gctctgatgaggcctttttcctcat

SEQ ID NO: 4731116 - DNA, 25 bp, Homo sapien
tcccagctctgatgaggcctttttc

SEQ ID NO: 4731117 - DNA, 25 bp, Homo sapien
taccagcaggccaaaatgacgcaaa

SEQ ID NO: 4731118 - DNA, 25 bp, Homo sapien
aacaataggccagagctagcagggt

SEQ ID NO: 4731119 - DNA, 25 bp, Homo sapien
atttactaccagcaggccaaaatga

SEQ ID NO: 4731120 - DNA, 25 bp, Homo sapien
caaaatgacgcaaacaataggccag

SEQ ID NO: 4731121 - DNA, 25 bp, Homo sapien
tacacattaaccctgatgaaggaga

SEQ ID NO: 4731122 - DNA, 25 bp, Homo sapien
ggacccaaacctggatcagcatcat

SEQ ID NO: 4731123 - DNA, 25 bp, Homo sapien
tacagattgagcctcaaaatccagg

SEQ ID NO: 4731124 - DNA, 25 bp, Homo sapien
tgaagggaaggttacagattgagcc

SEQ ID NO: 4731125 - DNA, 25 bp, Homo sapien
aacatgctcttagtccccctttgtc

SEQ ID NO: 4731126 - DNA, 25 bp, Homo sapien
taaaaatggtataggttcaatcttg

SEQ ID NO: 4731127 - DNA, 25 bp, Homo sapien
gctgaagactggcaattgcttcaca

SEQ ID NO: 4731128 - DNA, 25 bp, Homo sapien
tccattgttgtctggggagtacatt

SEQ ID NO: 4731129 - DNA, 25 bp, Homo sapien
gactgtgcctttgtgtcccagtgtc

SEQ ID NO: 4731130 - DNA, 25 bp, Homo sapien
tccaccattggctttagtcagaaag

SEQ ID NO: 4731131 - DNA, 25 bp, Homo sapien
cacgacagacggcagagagatttgg

SEQ ID NO: 4731132 - DNA, 25 bp, Homo sapien
gcttcatggatgtttacctgcctga

SEQ ID NO: 4731133 - DNA, 25 bp, Homo sapien
tacaaacaaaccacatgagggaaag

SEQ ID NO: 4731134 - DNA, 25 bp, Homo sapien
ttccaacttgggtctgcacatgtgg

SEQ ID NO: 4731135 - DNA, 25 bp, Homo sapien
tccacgtttgtaggttccattctga

SEQ ID NO: 4731136 - DNA, 25 bp, Homo sapien
tctgtgctgtccctaaatacacagg

SEQ ID NO: 4731137 - DNA, 25 bp, Homo sapien
tctttcattatcctcatgcgctttg

SEQ ID NO: 4731138 - DNA, 25 bp, Homo sapien
ttcctctttcattatcctcatgcgc

SEQ ID NO: 4731139 - DNA, 25 bp, Homo sapien
ttcattatcctcatgcgctttgtga

SEQ ID NO: 4731140 - DNA, 25 bp, Homo sapien
tatcctcatgcgctttgtgatttgg

SEQ ID NO: 4731141 - DNA, 25 bp, Homo sapien
catttctaccaggtgcctggctttg

SEQ ID NO: 4731142 - DNA, 25 bp, Homo sapien
tcatgggtgttctgtggttccattt

SEQ ID NO: 4731143 - DNA, 25 bp, Homo sapien
ttcatgggtgttctgtggttccatt

SEQ ID NO: 4731144 - DNA, 25 bp, Homo sapien
aggtgcctggctttgcattcctttg

SEQ ID NO: 4731145 - DNA, 25 bp, Homo sapien
taaaacacccagtcctttgcaggca

SEQ ID NO: 4731146 - DNA, 25 bp, Homo sapien
tctcaaggtggatgacggtagacag

SEQ ID NO: 4731147 - DNA, 25 bp, Homo sapien
tttgcaggcaaagcaaagggtgaga

SEQ ID NO: 4731148 - DNA, 25 bp, Homo sapien
gagagcccttccttcgatgacagga

SEQ ID NO: 4731149 - DNA, 25 bp, Homo sapien
gcttctggtgcaaaactaggagttg

SEQ ID NO: 4731150 - DNA, 25 bp, Homo sapien
ttgtcatggactttccagctcaggt

SEQ ID NO: 4731151 - DNA, 25 bp, Homo sapien
cagctcaggtggacattcatatacc

SEQ ID NO: 4731152 - DNA, 25 bp, Homo sapien
cagctatgatggaccagaaaccaga

SEQ ID NO: 4731153 - DNA, 25 bp, Homo sapien
tgcgcagtaggaaaaagtctaccca

SEQ ID NO: 4731154 - DNA, 25 bp, Homo sapien
tgggacgtgaccaggtttcaggcaa

SEQ ID NO: 4731155 - DNA, 25 bp, Homo sapien
tatcttgaagactgttcagctccac

SEQ ID NO: 4731156 - DNA, 25 bp, Homo sapien
ttcaggcaatttgggagtgaaaggc

SEQ ID NO: 4731157 - DNA, 25 bp, Homo sapien
cagctttatcttgaagactgttcag

SEQ ID NO: 4731158 - DNA, 25 bp, Homo sapien
taagatcgactctctctggctatag

SEQ ID NO: 4731159 - DNA, 25 bp, Homo sapien
tacagtttacagacagcggtggctt

SEQ ID NO: 4731160 - DNA, 25 bp, Homo sapien
tggccaccattaaggatctgtcagc

SEQ ID NO: 4731161 - DNA, 25 bp, Homo sapien
aaaagatgtagacttccagcccgag

SEQ ID NO: 4731162 - DNA, 25 bp, Homo sapien
cactgttagggtactcacatgtcaa

SEQ ID NO: 4731163 - DNA, 25 bp, Homo sapien
aacatgactgttacatccgaagaca

SEQ ID NO: 4731164 - DNA, 25 bp, Homo sapien
gatgagagcaagattaccacttcaa

SEQ ID NO: 4731165 - DNA, 25 bp, Homo sapien
tcatactctggctggttcaaaccat

SEQ ID NO: 4731166 - DNA, 25 bp, Homo sapien
tcaccaatacaagaaatccttctgg

SEQ ID NO: 4731167 - DNA, 25 bp, Homo sapien
tcaaaacaagggtacaacaagaaca

SEQ ID NO: 4731168 - DNA, 25 bp, Homo sapien
tctggaaatattagcaagcaactaa

SEQ ID NO: 4731169 - DNA, 25 bp, Homo sapien
ctccacttatggagaagatggaata

SEQ ID NO: 4731170 - DNA, 25 bp, Homo sapien
gatgagtaacacactggcagctgaa

SEQ ID NO: 4731171 - DNA, 25 bp, Homo sapien
ggattcaggacatttacaggtacac

SEQ ID NO: 4731172 - DNA, 25 bp, Homo sapien
cacaagaatgttgatgacagctcaa

SEQ ID NO: 4731173 - DNA, 25 bp, Homo sapien
taaatgatgatcctgtggaatgcct

SEQ ID NO: 4731174 - DNA, 25 bp, Homo sapien
ttacatggatacagccaaggactgg

SEQ ID NO: 4731175 - DNA, 25 bp, Homo sapien
ggtgtcattccctcaacgacttaga

SEQ ID NO: 4731176 - DNA, 25 bp, Homo sapien
ggtatacgagtaaggtcactgggct

SEQ ID NO: 4731177 - DNA, 25 bp, Homo sapien
gcatccacgggaccaagtacttata

SEQ ID NO: 4731178 - DNA, 25 bp, Homo sapien
cttgatgcatccagttgttatatcc

SEQ ID NO: 4731179 - DNA, 25 bp, Homo sapien
gagtgttttcatataaacaacaaga

SEQ ID NO: 4731180 - DNA, 25 bp, Homo sapien
aaaacacaatagttcttgatgcatc

SEQ ID NO: 4731181 - DNA, 25 bp, Homo sapien
caatagttcttgatgcatccagttg

SEQ ID NO: 4731182 - DNA, 25 bp, Homo sapien
ttccagatgtttccaggtaactctg

SEQ ID NO: 4731183 - DNA, 25 bp, Homo sapien
aatgttgtgtttgtgatatgaaagt

SEQ ID NO: 4731184 - DNA, 25 bp, Homo sapien
taactctgtagtttacggactgtgg

SEQ ID NO: 4731185 - DNA, 25 bp, Homo sapien
gtccagcgagcaaagatcaaaatca

SEQ ID NO: 4731186 - DNA, 25 bp, Homo sapien
tctcaatgtcattaaccttctgtga

SEQ ID NO: 4731187 - DNA, 25 bp, Homo sapien
tctgtgaagctctaccagttcatct

SEQ ID NO: 4731188 - DNA, 25 bp, Homo sapien
taaccttctgtgaagctctaccagt

SEQ ID NO: 4731189 - DNA, 25 bp, Homo sapien
gctctaccagttcatctaggtatgc

SEQ ID NO: 4731190 - DNA, 25 bp, Homo sapien
gctagtaagcaatgccagcaagtga

SEQ ID NO: 4731191 - DNA, 25 bp, Homo sapien
ccccaccaggtgttgtagtcaggtt

SEQ ID NO: 4731192 - DNA, 25 bp, Homo sapien
gaaacattacagaggtctgccctgg

SEQ ID NO: 4731193 - DNA, 25 bp, Homo sapien
tgttagtgtaactgcatgggtgccc

SEQ ID NO: 4731194 - DNA, 25 bp, Homo sapien
ttatttgcttatctgatttgctttg

SEQ ID NO: 4731195 - DNA, 25 bp, Homo sapien
tatttgcttatctgatttgctttgc

SEQ ID NO: 4731196 - DNA, 25 bp, Homo sapien
atttgcttatctgatttgctttgct

SEQ ID NO: 4731197 - DNA, 25 bp, Homo sapien
aattgatctaagcttccaaggctgc

SEQ ID NO: 4731198 - DNA, 25 bp, Homo sapien
ctagggatcaaagagaacgctgtgt

SEQ ID NO: 4731199 - DNA, 25 bp, Homo sapien
gccacctaaacaaaggcatccactg

SEQ ID NO: 4731200 - DNA, 25 bp, Homo sapien
caagcatctcttagctaaccagcca

SEQ ID NO: 4731201 - DNA, 25 bp, Homo sapien
actatcgctgccatcacttaagcta

SEQ ID NO: 4731202 - DNA, 25 bp, Homo sapien
tgctttcactatcgctgccatcact

SEQ ID NO: 4731203 - DNA, 25 bp, Homo sapien
gcagaactgctttcactatcgctgc

SEQ ID NO: 4731204 - DNA, 25 bp, Homo sapien
gatgtaggggtgaagaagcagaact

SEQ ID NO: 4731205 - DNA, 25 bp, Homo sapien
gagaccctgcatcaaatgaatgtga

SEQ ID NO: 4731206 - DNA, 25 bp, Homo sapien
aaagagtctgacttcatcacaggca

SEQ ID NO: 4731207 - DNA, 25 bp, Homo sapien
gaatgtgaccatctactgccgtttt

SEQ ID NO: 4731208 - DNA, 25 bp, Homo sapien
tgtgtaggcataccaaggagaccct

SEQ ID NO: 4731209 - DNA, 25 bp, Homo sapien
gtcattgtcgttatcctccacttca

SEQ ID NO: 4731210 - DNA, 25 bp, Homo sapien
tatttacaggcctctccatttcaga

SEQ ID NO: 4731211 - DNA, 25 bp, Homo sapien
ctcctcattgtcatcagaatgcaga

SEQ ID NO: 4731212 - DNA, 25 bp, Homo sapien
ttcggctgcctcctctatttacagg

SEQ ID NO: 4731213 - DNA, 25 bp, Homo sapien
acaaggtcttgttgcagcaatttta

SEQ ID NO: 4731214 - DNA, 25 bp, Homo sapien
caaggtcttgttgcagcaattttaa

SEQ ID NO: 4731215 - DNA, 25 bp, Homo sapien
acacaaggtcttgttgcagcaattt

SEQ ID NO: 4731216 - DNA, 25 bp, Homo sapien
cacaaggtcttgttgcagcaatttt

SEQ ID NO: 4731217 - DNA, 25 bp, Homo sapien
cttgttgcctggtctgggatggtgt

SEQ ID NO: 4731218 - DNA, 25 bp, Homo sapien
tgttgcctggtctgggatggtgtga

SEQ ID NO: 4731219 - DNA, 25 bp, Homo sapien
ttgttgcctggtctgggatggtgtg

SEQ ID NO: 4731220 - DNA, 25 bp, Homo sapien
tgtaatgttcgattgactcaactgg

SEQ ID NO: 4731221 - DNA, 25 bp, Homo sapien
tagttcaatcacactatgagccagt

SEQ ID NO: 4731222 - DNA, 25 bp, Homo sapien
atattcataacaagacccagacagg

SEQ ID NO: 4731223 - DNA, 25 bp, Homo sapien
gagataccttgattaccctttctgt

SEQ ID NO: 4731224 - DNA, 25 bp, Homo sapien
gaaaagcaaatactctaacttgata

SEQ ID NO: 4731225 - DNA, 25 bp, Homo sapien
cacagcctggacgttgaaaagcaaa

SEQ ID NO: 4731226 - DNA, 25 bp, Homo sapien
tctgctcccttgaaatgaatgacac

SEQ ID NO: 4731227 - DNA, 25 bp, Homo sapien
gacacctctagttctcacagcctgg

SEQ ID NO: 4731228 - DNA, 25 bp, Homo sapien
ggacagcaccggtaaaggtcttctc

SEQ ID NO: 4731229 - DNA, 25 bp, Homo sapien
tgtccttcaacaatggcagctcagg

SEQ ID NO: 4731230 - DNA, 25 bp, Homo sapien
ttctcttcctacagacaagttagtg

SEQ ID NO: 4731231 - DNA, 25 bp, Homo sapien
aagttagtgagggtccagatccaca

SEQ ID NO: 4731232 - DNA, 25 bp, Homo sapien
tagatgaatgcatgttatatgcaca

SEQ ID NO: 4731233 - DNA, 25 bp, Homo sapien
tcattaccttacataatatcccaga

SEQ ID NO: 4731234 - DNA, 25 bp, Homo sapien
ctctggagaacaaatgcacactggg

SEQ ID NO: 4731235 - DNA, 25 bp, Homo sapien
tatcccagaagctatcttgcctatg

SEQ ID NO: 4731236 - DNA, 25 bp, Homo sapien
catgtgtgtcagcaaggaatggaga

SEQ ID NO: 4731237 - DNA, 25 bp, Homo sapien
gaaaacagaagtgcccctaagttca

SEQ ID NO: 4731238 - DNA, 25 bp, Homo sapien
cggtgtagccctcaggaaaacagaa

SEQ ID NO: 4731239 - DNA, 25 bp, Homo sapien
aacggtgtagccctcaggaaaacag

SEQ ID NO: 4731240 - DNA, 25 bp, Homo sapien
tcactggcggcttgccacaagaatc

SEQ ID NO: 4731241 - DNA, 25 bp, Homo sapien
ctggcggcttgccacaagaatcagc

SEQ ID NO: 4731242 - DNA, 25 bp, Homo sapien
tggcggcttgccacaagaatcagct

SEQ ID NO: 4731243 - DNA, 25 bp, Homo sapien
cactggcggcttgccacaagaatca

SEQ ID NO: 4731244 - DNA, 25 bp, Homo sapien
atttgcttatccgaggcctcctgag

SEQ ID NO: 4731245 - DNA, 25 bp, Homo sapien
tcaatttgcttatccgaggcctcct

SEQ ID NO: 4731246 - DNA, 25 bp, Homo sapien
caatttgcttatccgaggcctcctg

SEQ ID NO: 4731247 - DNA, 25 bp, Homo sapien
ttgcttatccgaggcctcctgagct

SEQ ID NO: 4731248 - DNA, 25 bp, Homo sapien
ctgagttaccaagaagccaaatcta

SEQ ID NO: 4731249 - DNA, 25 bp, Homo sapien
ctgggtatctgttctgtttcaagta

SEQ ID NO: 4731250 - DNA, 25 bp, Homo sapien
tgggtatctgttctgtttcaagtac

SEQ ID NO: 4731251 - DNA, 25 bp, Homo sapien
aatagttggcgttgaagaagatgta

SEQ ID NO: 4731252 - DNA, 25 bp, Homo sapien
tgtccagttggtagcttttgagaat

SEQ ID NO: 4731253 - DNA, 25 bp, Homo sapien
ttgatcagaattgtccagttggtag

SEQ ID NO: 4731254 - DNA, 25 bp, Homo sapien
gcttttgagaatagttggcgttgaa

SEQ ID NO: 4731255 - DNA, 25 bp, Homo sapien
ttttagccagatagcttccttgacc

SEQ ID NO: 4731256 - DNA, 25 bp, Homo sapien
gaaaagtgttctaagattgccagtt

SEQ ID NO: 4731257 - DNA, 25 bp, Homo sapien
gccagcatttaaactagagacatct

SEQ ID NO: 4731258 - DNA, 25 bp, Homo sapien
tctaagattgccagttatttttagc

SEQ ID NO: 4731259 - DNA, 25 bp, Homo sapien
agtaacaaccctgtcactagaagtg

SEQ ID NO: 4731260 - DNA, 25 bp, Homo sapien
gataccaagctttgatgagcaacaa

SEQ ID NO: 4731261 - DNA, 25 bp, Homo sapien
tgctctcttaggcatccacaaagga

SEQ ID NO: 4731262 - DNA, 25 bp, Homo sapien
tagtgaatgaagatcacatacccca

SEQ ID NO: 4731263 - DNA, 25 bp, Homo sapien
ttttcttccctcattctttattaca

SEQ ID NO: 4731264 - DNA, 25 bp, Homo sapien
tcattttcttccctcattctttatt

SEQ ID NO: 4731265 - DNA, 25 bp, Homo sapien
tcttccctcattctttattacaaag

SEQ ID NO: 4731266 - DNA, 25 bp, Homo sapien
cattttcttccctcattctttatta

SEQ ID NO: 4731267 - DNA, 25 bp, Homo sapien
ggaagaaagccagtaagaactactc

SEQ ID NO: 4731268 - DNA, 25 bp, Homo sapien
aggaagaaagccagtaagaactact

SEQ ID NO: 4731269 - DNA, 25 bp, Homo sapien
cacatctgaatcattgggatccaca

SEQ ID NO: 4731270 - DNA, 25 bp, Homo sapien
caatatcatcaaatggcggtaacgt

SEQ ID NO: 4731271 - DNA, 25 bp, Homo sapien
tatcagtggtggtgcgctagaaaaa

SEQ ID NO: 4731272 - DNA, 25 bp, Homo sapien
ccctggaaggttctttgaaggcact

SEQ ID NO: 4731273 - DNA, 25 bp, Homo sapien
tgctgctgctggtatgaatactcct

SEQ ID NO: 4731274 - DNA, 25 bp, Homo sapien
gctggtatgaatactcctattaggg

SEQ ID NO: 4731275 - DNA, 25 bp, Homo sapien
tggtatgaatactcctattagggtc

SEQ ID NO: 4731276 - DNA, 25 bp, Homo sapien
gctgctggtatgaatactcctatta

SEQ ID NO: 4731277 - DNA, 25 bp, Homo sapien
ggcccacaatgtaccctatagtgaa

SEQ ID NO: 4731278 - DNA, 25 bp, Homo sapien
caagctgcaaaatctacacctgcaa

SEQ ID NO: 4731279 - DNA, 25 bp, Homo sapien
tagttgattggaccagtttgtttca

SEQ ID NO: 4731280 - DNA, 25 bp, Homo sapien
gaatagggatccttatctcactcaa

SEQ ID NO: 4731281 - DNA, 25 bp, Homo sapien
tgaaacaggtggtgtctgaacagaa

SEQ ID NO: 4731282 - DNA, 25 bp, Homo sapien
gactggaagcatgttccccatgtct

SEQ ID NO: 4731283 - DNA, 25 bp, Homo sapien
catgtcttctccagcaaatcttgcc

SEQ ID NO: 4731284 - DNA, 25 bp, Homo sapien
aatcttgccaaatgggcgtctgaaa

SEQ ID NO: 4731285 - DNA, 25 bp, Homo sapien
catctatcttatagtaatagatgac

SEQ ID NO: 4731286 - DNA, 25 bp, Homo sapien
cttatagtaatagatgacaaactct

SEQ ID NO: 4731287 - DNA, 25 bp, Homo sapien
tgttttcagtatgactgaattccaa

SEQ ID NO: 4731288 - DNA, 25 bp, Homo sapien
aatgttttcagtatgactgaattcc

SEQ ID NO: 4731289 - DNA, 25 bp, Homo sapien
gacacaatctaattctaataggaaa

SEQ ID NO: 4731290 - DNA, 25 bp, Homo sapien
tattttagagttgtcaagacacaat

SEQ ID NO: 4731291 - DNA, 25 bp, Homo sapien
aataggaaaatatctgctggcttca

SEQ ID NO: 4731292 - DNA, 25 bp, Homo sapien
gttgtcaagacacaatctaattcta

SEQ ID NO: 4731293 - DNA, 25 bp, Homo sapien
ttttaataggaatgcttttcacaag

SEQ ID NO: 4731294 - DNA, 25 bp, Homo sapien
ttaataggaatgcttttcacaagag

SEQ ID NO: 4731295 - DNA, 25 bp, Homo sapien
tttaataggaatgcttttcacaaga

SEQ ID NO: 4731296 - DNA, 25 bp, Homo sapien
aactttctcctaaagtcctctgtgg

SEQ ID NO: 4731297 - DNA, 25 bp, Homo sapien
gaaagttagcttttcacagcggagg

SEQ ID NO: 4731298 - DNA, 25 bp, Homo sapien
caggaataagtcataatcaaagcgg

SEQ ID NO: 4731299 - DNA, 25 bp, Homo sapien
atcaaagcggactttcctaggttct

SEQ ID NO: 4731300 - DNA, 25 bp, Homo sapien
tagccacccaactagaaaccaagca

SEQ ID NO: 4731301 - DNA, 25 bp, Homo sapien
tccccatgatctttcaggtgacagg

SEQ ID NO: 4731302 - DNA, 25 bp, Homo sapien
tgacaggataccagcaacatagcca

SEQ ID NO: 4731303 - DNA, 25 bp, Homo sapien
gctaaactgtcaaagtagtactggg

SEQ ID NO: 4731304 - DNA, 25 bp, Homo sapien
tttcttcaacaagccctctaactct

SEQ ID NO: 4731305 - DNA, 25 bp, Homo sapien
actcttactactaggcttttactca

SEQ ID NO: 4731306 - DNA, 25 bp, Homo sapien
cccagtacactcaccatcaaaggct

SEQ ID NO: 4731307 - DNA, 25 bp, Homo sapien
caccatcaaaggctgccattttctc

SEQ ID NO: 4731308 - DNA, 25 bp, Homo sapien
cagcttccaatagccattgggctaa

SEQ ID NO: 4731309 - DNA, 25 bp, Homo sapien
caggccttaagattatctatatgaa

SEQ ID NO: 4731310 - DNA, 25 bp, Homo sapien
ttgggctaaaaatcctaatctcact

SEQ ID NO: 4731311 - DNA, 25 bp, Homo sapien
ttcaacagcttccaatagccattgg

SEQ ID NO: 4731312 - DNA, 25 bp, Homo sapien
actttgtaaggtggatctttgcaca

SEQ ID NO: 4731313 - DNA, 25 bp, Homo sapien
ttcttctactttgtaaggtggatct

SEQ ID NO: 4731314 - DNA, 25 bp, Homo sapien
ctactttgtaaggtggatctttgca

SEQ ID NO: 4731315 - DNA, 25 bp, Homo sapien
ttctactttgtaaggtggatctttg

SEQ ID NO: 4731316 - DNA, 25 bp, Homo sapien
tgtcaaccgatcatgaatattcaaa

SEQ ID NO: 4731317 - DNA, 25 bp, Homo sapien
cacctgtcaaccgatcatgaatatt

SEQ ID NO: 4731318 - DNA, 25 bp, Homo sapien
cctgtcaaccgatcatgaatattca

SEQ ID NO: 4731319 - DNA, 25 bp, Homo sapien
acctgtcaaccgatcatgaatattc

SEQ ID NO: 4731320 - DNA, 25 bp, Homo sapien
caggttgcttgggattaatcatgcc

SEQ ID NO: 4731321 - DNA, 25 bp, Homo sapien
aggctagtgttacgcttatgacact

SEQ ID NO: 4731322 - DNA, 25 bp, Homo sapien
gccaatgtcattggaaggtagttta

SEQ ID NO: 4731323 - DNA, 25 bp, Homo sapien
tatgacacttccaggctgcaaagcc

SEQ ID NO: 4731324 - DNA, 25 bp, Homo sapien
ctactgctttgtgccaaatgtccct

SEQ ID NO: 4731325 - DNA, 25 bp, Homo sapien
tactgctttgtgccaaatgtccctt

SEQ ID NO: 4731326 - DNA, 25 bp, Homo sapien
agctttagtattttggactccctca

SEQ ID NO: 4731327 - DNA, 25 bp, Homo sapien
gctttagtattttggactccctcac

SEQ ID NO: 4731328 - DNA, 25 bp, Homo sapien
gaagtctagagccagcgtctgaaag

SEQ ID NO: 4731329 - DNA, 25 bp, Homo sapien
acaagcatctggaagtctagagcca

SEQ ID NO: 4731330 - DNA, 25 bp, Homo sapien
cacccaaactgttctgcacaagcat

SEQ ID NO: 4731331 - DNA, 25 bp, Homo sapien
ggcaaacaagatcctgttcagccca

SEQ ID NO: 4731332 - DNA, 25 bp, Homo sapien
gaaatgttacagagaacccctagat

SEQ ID NO: 4731333 - DNA, 25 bp, Homo sapien
tagagaacgtcatgctacacacact

SEQ ID NO: 4731334 - DNA, 25 bp, Homo sapien
taatgagacagtcggtataagcaga

SEQ ID NO: 4731335 - DNA, 25 bp, Homo sapien
gaaaaatggattgcactcgtaaagg

SEQ ID NO: 4731336 - DNA, 25 bp, Homo sapien
tttcatcaagaaatgctggtagata

SEQ ID NO: 4731337 - DNA, 25 bp, Homo sapien
gctggtagataaattccaaatccat

SEQ ID NO: 4731338 - DNA, 25 bp, Homo sapien
catcaagaaatgctggtagataaat

SEQ ID NO: 4731339 - DNA, 25 bp, Homo sapien
gttttcatcaagaaatgctggtaga

SEQ ID NO: 4731340 - DNA, 25 bp, Homo sapien
tgactgttaacgactgtgctttctg

SEQ ID NO: 4731341 - DNA, 25 bp, Homo sapien
acagcagaaatgtcagccacttgac

SEQ ID NO: 4731342 - DNA, 25 bp, Homo sapien
gctctagtaggaaactcaaatacag

SEQ ID NO: 4731343 - DNA, 25 bp, Homo sapien
atggcagctctagtaggaaactcaa

SEQ ID NO: 4731344 - DNA, 25 bp, Homo sapien
catttgactcaaagcaagctgttca

SEQ ID NO: 4731345 - DNA, 25 bp, Homo sapien
aattagggtccagttctaagctgag

SEQ ID NO: 4731346 - DNA, 25 bp, Homo sapien
tactatggtttctagttccagcctg

SEQ ID NO: 4731347 - DNA, 25 bp, Homo sapien
taactgtgtacttgtaccccaaggc

SEQ ID NO: 4731348 - DNA, 25 bp, Homo sapien
catagattagtagatatattccact

SEQ ID NO: 4731349 - DNA, 25 bp, Homo sapien
ctcttaatttagcatagattagtag

SEQ ID NO: 4731350 - DNA, 25 bp, Homo sapien
aaactcttaatttagcatagattag

SEQ ID NO: 4731351 - DNA, 25 bp, Homo sapien
ttagcatagattagtagatatattc

SEQ ID NO: 4731352 - DNA, 25 bp, Homo sapien
tcagacaacgtatccacaatccaag

SEQ ID NO: 4731353 - DNA, 25 bp, Homo sapien
taacaaatgcagctagaaacctgcc

SEQ ID NO: 4731354 - DNA, 25 bp, Homo sapien
gaagcttatggccactcgtaagaga

SEQ ID NO: 4731355 - DNA, 25 bp, Homo sapien
taacctactttcaaccggagccatg

SEQ ID NO: 4731356 - DNA, 25 bp, Homo sapien
cttcaaggaatttactctgtgctcc

SEQ ID NO: 4731357 - DNA, 25 bp, Homo sapien
tttactctgtgctcctctgataaag

SEQ ID NO: 4731358 - DNA, 25 bp, Homo sapien
tctgataaagatgtgatttctttca

SEQ ID NO: 4731359 - DNA, 25 bp, Homo sapien
tactctgtgctcctctgataaagat

SEQ ID NO: 4731360 - DNA, 25 bp, Homo sapien
gcaaaaacttggtgattgttaatat

SEQ ID NO: 4731361 - DNA, 25 bp, Homo sapien
tattcaactgaactaaagcaccagc

SEQ ID NO: 4731362 - DNA, 25 bp, Homo sapien
gatatgtactcaagaatgctttgcc

SEQ ID NO: 4731363 - DNA, 25 bp, Homo sapien
tagtctaggaatcccactttcagtg

SEQ ID NO: 4731364 - DNA, 25 bp, Homo sapien
gcatacttgcgggacctggtgaata

SEQ ID NO: 4731365 - DNA, 25 bp, Homo sapien
tgtaggccagggcattcagtgctga

SEQ ID NO: 4731366 - DNA, 25 bp, Homo sapien
gaacaatttttaggcaatgctccaa

SEQ ID NO: 4731367 - DNA, 25 bp, Homo sapien
gcagccttttcttgggatggccaga

SEQ ID NO: 4731368 - DNA, 25 bp, Homo sapien
taagtggccacctctactatggttg

SEQ ID NO: 4731369 - DNA, 25 bp, Homo sapien
tgaccttatccggatcaggctgtgg

SEQ ID NO: 4731370 - DNA, 25 bp, Homo sapien
gatgtttatctgacgagctcctggg

SEQ ID NO: 4731371 - DNA, 25 bp, Homo sapien
cctgatgtaagactctgcggctggg

SEQ ID NO: 4731372 - DNA, 25 bp, Homo sapien
tgtcaggtcccccttgttattcctc

SEQ ID NO: 4731373 - DNA, 25 bp, Homo sapien
tgatataatcattctggaccaaaac

SEQ ID NO: 4731374 - DNA, 25 bp, Homo sapien
tataatcattctggaccaaaacagt

SEQ ID NO: 4731375 - DNA, 25 bp, Homo sapien
tctcttagatataatctcttagaac

SEQ ID NO: 4731376 - DNA, 25 bp, Homo sapien
tatcttctcttagatataatctctt

SEQ ID NO: 4731377 - DNA, 25 bp, Homo sapien
caaaagatgtgttcattaggcaccc

SEQ ID NO: 4731378 - DNA, 25 bp, Homo sapien
ttggctatcactaagaaaggcttgg

SEQ ID NO: 4731379 - DNA, 25 bp, Homo sapien
tagtctaggttgaagcctgaccctc

SEQ ID NO: 4731380 - DNA, 25 bp, Homo sapien
taggtctagtcagtcccaaggtcac

SEQ ID NO: 4731381 - DNA, 25 bp, Homo sapien
tagaacagctagatccttgggtatg

SEQ ID NO: 4731382 - DNA, 25 bp, Homo sapien
taatgactaatgaggctaggcacct

SEQ ID NO: 4731383 - DNA, 25 bp, Homo sapien
gacctgccaaaaggtagtaccatcc

SEQ ID NO: 4731384 - DNA, 25 bp, Homo sapien
tagtatgaacatgatacacacaggg

SEQ ID NO: 4731385 - DNA, 25 bp, Homo sapien
tcagcagtggaattagcctaagcac

SEQ ID NO: 4731386 - DNA, 25 bp, Homo sapien
aagttcccactatggtagctcctgg

SEQ ID NO: 4731387 - DNA, 25 bp, Homo sapien
taatgtcacagctaatcagcagtgg

SEQ ID NO: 4731388 - DNA, 25 bp, Homo sapien
taagcactgaggtctgccacttcta

SEQ ID NO: 4731389 - DNA, 25 bp, Homo sapien
gaccaggaagtcatacaacggttgg

SEQ ID NO: 4731390 - DNA, 25 bp, Homo sapien
aagcctatacacgtcaacagttggg

SEQ ID NO: 4731391 - DNA, 25 bp, Homo sapien
tatgatgaataactgcaaaggtggc

SEQ ID NO: 4731392 - DNA, 25 bp, Homo sapien
taagctgtcagcttctagatgacgg

SEQ ID NO: 4731393 - DNA, 25 bp, Homo sapien
ctactgggtatatgtcctaaggaaa

SEQ ID NO: 4731394 - DNA, 25 bp, Homo sapien
actgggtatatgtcctaaggaaata

SEQ ID NO: 4731395 - DNA, 25 bp, Homo sapien
ggctatgatcgtgccggtatactcc

SEQ ID NO: 4731396 - DNA, 25 bp, Homo sapien
tgagtctacagcgggctatgatcgt

SEQ ID NO: 4731397 - DNA, 25 bp, Homo sapien
tgatcgtgccggtatactccaacct

SEQ ID NO: 4731398 - DNA, 25 bp, Homo sapien
tacagcgggctatgatcgtgccggt

SEQ ID NO: 4731399 - DNA, 25 bp, Homo sapien
gagattaacctcctccgcaaggaag

SEQ ID NO: 4731400 - DNA, 25 bp, Homo sapien
gatggctctcgtagtatctaactgg

SEQ ID NO: 4731401 - DNA, 25 bp, Homo sapien
ctggtacaggctgagattaacctcc

SEQ ID NO: 4731402 - DNA, 25 bp, Homo sapien
tctccagttctctgacattgcgttt

SEQ ID NO: 4731403 - DNA, 25 bp, Homo sapien
agccatcacgccctgcctcaaagat

SEQ ID NO: 4731404 - DNA, 25 bp, Homo sapien
ccatgcatctccatacccggctaat

SEQ ID NO: 4731405 - DNA, 25 bp, Homo sapien
cacgccctgcctcaaagatattaac

SEQ ID NO: 4731406 - DNA, 25 bp, Homo sapien
tacagccatgcatctccatacccgg

SEQ ID NO: 4731407 - DNA, 25 bp, Homo sapien
caaagatctttgcgcagtgatccat

SEQ ID NO: 4731408 - DNA, 25 bp, Homo sapien
aagatctttgcgcagtgatccattc

SEQ ID NO: 4731409 - DNA, 25 bp, Homo sapien
aaagatctttgcgcagtgatccatt

SEQ ID NO: 4731410 - DNA, 25 bp, Homo sapien
ttcgcagattcaacaaaggacagct

SEQ ID NO: 4731411 - DNA, 25 bp, Homo sapien
tccactcatggagaaatctgacctc

SEQ ID NO: 4731412 - DNA, 25 bp, Homo sapien
tagagtttatcccatgcctatgaca

SEQ ID NO: 4731413 - DNA, 25 bp, Homo sapien
taatagttgttgagtcggcctcaca

SEQ ID NO: 4731414 - DNA, 25 bp, Homo sapien
aatggttgttttatcctgttccagg

SEQ ID NO: 4731415 - DNA, 25 bp, Homo sapien
ggtagactgtagcacaatggttgtt

SEQ ID NO: 4731416 - DNA, 25 bp, Homo sapien
tgaatgatgagggtagactgtagca

SEQ ID NO: 4731417 - DNA, 25 bp, Homo sapien
ccaggtccacctttatggcccagga

SEQ ID NO: 4731418 - DNA, 25 bp, Homo sapien
gagacaatttggttaagcaaattca

SEQ ID NO: 4731419 - DNA, 25 bp, Homo sapien
agacaatttggttaagcaaattcaa

SEQ ID NO: 4731420 - DNA, 25 bp, Homo sapien
gacaatttggttaagcaaattcaaa

SEQ ID NO: 4731421 - DNA, 25 bp, Homo sapien
ggcgtccaacactgctataataaga

SEQ ID NO: 4731422 - DNA, 25 bp, Homo sapien
aagacgttggcgtccaacactgcta

SEQ ID NO: 4731423 - DNA, 25 bp, Homo sapien
tgggaaagacgttggcgtccaacac

SEQ ID NO: 4731424 - DNA, 25 bp, Homo sapien
ttctttatgtgggaaagacgttggc

SEQ ID NO: 4731425 - DNA, 25 bp, Homo sapien
gcagaaaaatgaaccgttggctcct

SEQ ID NO: 4731426 - DNA, 25 bp, Homo sapien
ttccctccactctgacaacacaaca

SEQ ID NO: 4731427 - DNA, 25 bp, Homo sapien
tgaaccgttggctcctcatttgccc

SEQ ID NO: 4731428 - DNA, 25 bp, Homo sapien
ccccagctggcccaaactacattcc

SEQ ID NO: 4731429 - DNA, 25 bp, Homo sapien
ctaaggtgaatccaaaatactcttt

SEQ ID NO: 4731430 - DNA, 25 bp, Homo sapien
gtatcagtcctgtttcaccctgctg

SEQ ID NO: 4731431 - DNA, 25 bp, Homo sapien
tgtataacgtcatgtaaccactcat

SEQ ID NO: 4731432 - DNA, 25 bp, Homo sapien
ctctctctgttgtacggaagttcta

SEQ ID NO: 4731433 - DNA, 25 bp, Homo sapien
cactgggggtgcatttaaaaattca

SEQ ID NO: 4731434 - DNA, 25 bp, Homo sapien
gaacacaagggacatttagtcacat

SEQ ID NO: 4731435 - DNA, 25 bp, Homo sapien
aaagttgtgacccactgtacctagc

SEQ ID NO: 4731436 - DNA, 25 bp, Homo sapien
gaagaagagtaagttcctgccacta

SEQ ID NO: 4731437 - DNA, 25 bp, Homo sapien
gaactgattatgagtagtgaacacc

SEQ ID NO: 4731438 - DNA, 25 bp, Homo sapien
tgtgaactcaccatttagggagcat

SEQ ID NO: 4731439 - DNA, 25 bp, Homo sapien
tgtttagggaacaaagaatcacctg

SEQ ID NO: 4731440 - DNA, 25 bp, Homo sapien
ttaggcagagttatagaatatcgcg

SEQ ID NO: 4731441 - DNA, 25 bp, Homo sapien
tccagaaggtaagaaccacgtctgt

SEQ ID NO: 4731442 - DNA, 25 bp, Homo sapien
tgggcagtactaaacactcagaact

SEQ ID NO: 4731443 - DNA, 25 bp, Homo sapien
ttgtgtgtatggaaaacatgcctga

SEQ ID NO: 4731444 - DNA, 25 bp, Homo sapien
tgcctgatgccagactaagcatttc

SEQ ID NO: 4731445 - DNA, 25 bp, Homo sapien
tttcaaagccagaactgactgcctg

SEQ ID NO: 4731446 - DNA, 25 bp, Homo sapien
ctattttcatccagccataactata

SEQ ID NO: 4731447 - DNA, 25 bp, Homo sapien
tcttttatcctaccccagtgaacta

SEQ ID NO: 4731448 - DNA, 25 bp, Homo sapien
ttcaaagccagaactgactgcctga

SEQ ID NO: 4731449 - DNA, 25 bp, Homo sapien
gtgagaggaacaaataattaaggcg

SEQ ID NO: 4731450 - DNA, 25 bp, Homo sapien
tgagaggaacaaataattaaggcgt

SEQ ID NO: 4731451 - DNA, 25 bp, Homo sapien
aatttggcatcttggaggagtggca

SEQ ID NO: 4731452 - DNA, 25 bp, Homo sapien
aacttcttcccgctaactcgtatgg

SEQ ID NO: 4731453 - DNA, 25 bp, Homo sapien
ggcttcaaagctagactccaggact

SEQ ID NO: 4731454 - DNA, 25 bp, Homo sapien
tatagtacacgcatgtgctcaggag

SEQ ID NO: 4731455 - DNA, 25 bp, Homo sapien
catactttctgattatgagtcctat

SEQ ID NO: 4731456 - DNA, 25 bp, Homo sapien
taccatcttaagtagaagaaatctc

SEQ ID NO: 4731457 - DNA, 25 bp, Homo sapien
ccacaaaggtttgggccagaacaat

SEQ ID NO: 4731458 - DNA, 25 bp, Homo sapien
tgccataggtaagagatactaattg

SEQ ID NO: 4731459 - DNA, 25 bp, Homo sapien
tacacttagtgggtcttggagccca

SEQ ID NO: 4731460 - DNA, 25 bp, Homo sapien
gacacacttatgaatggcttactgg

SEQ ID NO: 4731461 - DNA, 25 bp, Homo sapien
taagggccatttgtacactatcgtc

SEQ ID NO: 4731462 - DNA, 25 bp, Homo sapien
caagaagctggtacataggactggt

SEQ ID NO: 4731463 - DNA, 25 bp, Homo sapien
catcttcattttgttccttatatct

SEQ ID NO: 4731464 - DNA, 25 bp, Homo sapien
tcactcatcttcattttgttcctta

SEQ ID NO: 4731465 - DNA, 25 bp, Homo sapien
tcattttgttccttatatcttttaa

SEQ ID NO: 4731466 - DNA, 25 bp, Homo sapien
ttgttccttatatcttttaaatgac

SEQ ID NO: 4731467 - DNA, 25 bp, Homo sapien
tggccaaattagcttccataaaata

SEQ ID NO: 4731468 - DNA, 25 bp, Homo sapien
gcaacagatttcatatcataaatgt

SEQ ID NO: 4731469 - DNA, 25 bp, Homo sapien
aacaaattgcaatagtaaggatggc

SEQ ID NO: 4731470 - DNA, 25 bp, Homo sapien
catatcataaatgtcagtgaaacaa

SEQ ID NO: 4731471 - DNA, 25 bp, Homo sapien
gcggtgactttcaccaagccgaagt

SEQ ID NO: 4731472 - DNA, 25 bp, Homo sapien
ggtcctttctctgcggtgactttca

SEQ ID NO: 4731473 - DNA, 25 bp, Homo sapien
tttcaccaagccgaagtggcgcgcg

SEQ ID NO: 4731474 - DNA, 25 bp, Homo sapien
ctgacggtcctttctctgcggtgac

SEQ ID NO: 4731475 - DNA, 25 bp, Homo sapien
caagacccttttgtattcgagccct

SEQ ID NO: 4731476 - DNA, 25 bp, Homo sapien
tatcaagacccttttgtattcgagc

SEQ ID NO: 4731477 - DNA, 25 bp, Homo sapien
tcaaagacattttttatcaagaccc

SEQ ID NO: 4731478 - DNA, 25 bp, Homo sapien
caaagacattttttatcaagaccct

SEQ ID NO: 4731479 - DNA, 25 bp, Homo sapien
atccagtcgtgggtgaagccctcca

SEQ ID NO: 4731480 - DNA, 25 bp, Homo sapien
tggaagacgactttctccacaaagt

SEQ ID NO: 4731481 - DNA, 25 bp, Homo sapien
atgttactgtgctccggaccgcgta

SEQ ID NO: 4731482 - DNA, 25 bp, Homo sapien
aaagctttcgtgcaagtggaagacg

SEQ ID NO: 4731483 - DNA, 25 bp, Homo sapien
tcggcagtgaacgttgcgcctgaca

SEQ ID NO: 4731484 - DNA, 25 bp, Homo sapien
gattgtaacggaatgttatccccag

SEQ ID NO: 4731485 - DNA, 25 bp, Homo sapien
gagagacagccgtgaataacaggaa

SEQ ID NO: 4731486 - DNA, 25 bp, Homo sapien
gcacataaaaggaaacggcggtgcc

SEQ ID NO: 4731487 - DNA, 25 bp, Homo sapien
ttcggctcacacacgcgcgccgcgg

SEQ ID NO: 4731488 - DNA, 25 bp, Homo sapien
ctgtcagccccgcacacttcggctc

SEQ ID NO: 4731489 - DNA, 25 bp, Homo sapien
ccggcgctggggcaaagttgcgtgc

SEQ ID NO: 4731490 - DNA, 25 bp, Homo sapien
gggcaaagttgcgtgcggccccgcc

SEQ ID NO: 4731491 - DNA, 25 bp, Homo sapien
cgctttgcggaggtgcggccgccga

SEQ ID NO: 4731492 - DNA, 25 bp, Homo sapien
cggcgctttgcggaggtgcggccgc

SEQ ID NO: 4731493 - DNA, 25 bp, Homo sapien
tagcggccgcggcgctttgcggagg

SEQ ID NO: 4731494 - DNA, 25 bp, Homo sapien
ccgcggcgctttgcggaggtgcggc

SEQ ID NO: 4731495 - DNA, 25 bp, Homo sapien
atatggctgagttattattcgcctc

SEQ ID NO: 4731496 - DNA, 25 bp, Homo sapien
aatatggctgagttattattcgcct

SEQ ID NO: 4731497 - DNA, 25 bp, Homo sapien
aaatatggctgagttattattcgcc

SEQ ID NO: 4731498 - DNA, 25 bp, Homo sapien
gtgtgtgagtgcgcgcgtgtgagcg

SEQ ID NO: 4731499 - DNA, 25 bp, Homo sapien
tgtgtgagtgcgcgcgtgtgagcga

SEQ ID NO: 4731500 - DNA, 25 bp, Homo sapien
aaccgcggagcgctggcgctgtctg

SEQ ID NO: 4731501 - DNA, 25 bp, Homo sapien
ctctaattggaaccgcggagcgctg

SEQ ID NO: 4731502 - DNA, 25 bp, Homo sapien
ctttctctaattggaaccgcggagc

SEQ ID NO: 4731503 - DNA, 25 bp, Homo sapien
ttctctaattggaaccgcggagcgc

SEQ ID NO: 4731504 - DNA, 25 bp, Homo sapien
tattattatttttgcgcgtacttac

SEQ ID NO: 4731505 - DNA, 25 bp, Homo sapien
ggctgctatgaatgagagcgcgccc

SEQ ID NO: 4731506 - DNA, 25 bp, Homo sapien
aagatgattgcggagcatgcgccgt

SEQ ID NO: 4731507 - DNA, 25 bp, Homo sapien
ggtagatggcggacattctctgcct

SEQ ID NO: 4731508 - DNA, 25 bp, Homo sapien
tgctcgctcgctcgcttattaaact

SEQ ID NO: 4731509 - DNA, 25 bp, Homo sapien
taaacactctggaatgtactagggt

SEQ ID NO: 4731510 - DNA, 25 bp, Homo sapien
aatgtactagggttgatttgcatca

SEQ ID NO: 4731511 - DNA, 25 bp, Homo sapien
ttgcttgcagctggagagctgcaag

SEQ ID NO: 4731512 - DNA, 25 bp, Homo sapien
ctagggttgatttgcatcagttgct

SEQ ID NO: 4731513 - DNA, 25 bp, Homo sapien
acccagtggcgaacttgaaaagtct

SEQ ID NO: 4731514 - DNA, 25 bp, Homo sapien
tctgtaaatccaactgggagtactt

SEQ ID NO: 4731515 - DNA, 25 bp, Homo sapien
tccgttgtctgtgtcttttggcctt

SEQ ID NO: 4731516 - DNA, 25 bp, Homo sapien
tcttcctaagtaggacccagtggcg

SEQ ID NO: 4731517 - DNA, 25 bp, Homo sapien
agtaagaaaatgaccaagctgggca

SEQ ID NO: 4731518 - DNA, 25 bp, Homo sapien
cataggcaggtgctagtctttctaa

SEQ ID NO: 4731519 - DNA, 25 bp, Homo sapien
cagtaagaaaatgaccaagctgggc

SEQ ID NO: 4731520 - DNA, 25 bp, Homo sapien
ctagtctttctaatacagagagagc

SEQ ID NO: 4731521 - DNA, 25 bp, Homo sapien
tttggctgattagaagcataccttg

SEQ ID NO: 4731522 - DNA, 25 bp, Homo sapien
ggctgattagaagcataccttggac

SEQ ID NO: 4731523 - DNA, 25 bp, Homo sapien
aagcataccttggacatattacagg

SEQ ID NO: 4731524 - DNA, 25 bp, Homo sapien
gattagaagcataccttggacatat

SEQ ID NO: 4731525 - DNA, 25 bp, Homo sapien
catctgagtcttcattgagttgtaa

SEQ ID NO: 4731526 - DNA, 25 bp, Homo sapien
tgctggaggagggtcttgcctcaac

SEQ ID NO: 4731527 - DNA, 25 bp, Homo sapien
gaggagggtcttgcctcaacgttga

SEQ ID NO: 4731528 - DNA, 25 bp, Homo sapien
gagtcttcattgagttgtaatcttt

SEQ ID NO: 4731529 - DNA, 25 bp, Homo sapien
acaaccggaattccactccgtcata

SEQ ID NO: 4731530 - DNA, 25 bp, Homo sapien
cagggtttagaaacaactaagtcag

SEQ ID NO: 4731531 - DNA, 25 bp, Homo sapien
tgtcttaactctttcatcttgcgta

SEQ ID NO: 4731532 - DNA, 25 bp, Homo sapien
tgtcatccacaaccggaattccact

SEQ ID NO: 4731533 - DNA, 25 bp, Homo sapien
ctgctggctcttttcagcgtgtttc

SEQ ID NO: 4731534 - DNA, 25 bp, Homo sapien
gctggctcttttcagcgtgtttcat

SEQ ID NO: 4731535 - DNA, 25 bp, Homo sapien
ttctgctggctcttttcagcgtgtt

SEQ ID NO: 4731536 - DNA, 25 bp, Homo sapien
cagtctctcctcgtttttttctgct

SEQ ID NO: 4731537 - DNA, 25 bp, Homo sapien
ctgtctgttacagccttctcacgtg

SEQ ID NO: 4731538 - DNA, 25 bp, Homo sapien
tgtctgttacagccttctcacgtgg

SEQ ID NO: 4731539 - DNA, 25 bp, Homo sapien
gtctgttacagccttctcacgtggg

SEQ ID NO: 4731540 - DNA, 25 bp, Homo sapien
gaagctgttctgtattgccaaaagc

SEQ ID NO: 4731541 - DNA, 25 bp, Homo sapien
ctgttctgtattgccaaaagctgca

SEQ ID NO: 4731542 - DNA, 25 bp, Homo sapien
agctgttctgtattgccaaaagctg

SEQ ID NO: 4731543 - DNA, 25 bp, Homo sapien
aaaagctgcataggggcaggctgcc

SEQ ID NO: 4731544 - DNA, 25 bp, Homo sapien
tgcatacttagctgcagcaggttgc

SEQ ID NO: 4731545 - DNA, 25 bp, Homo sapien
tagtgggatctcgactcggaagccg

SEQ ID NO: 4731546 - DNA, 25 bp, Homo sapien
ggtcggcgcgatccttgcatactta

SEQ ID NO: 4731547 - DNA, 25 bp, Homo sapien
agcaggttgcagtcgtcccactctc

SEQ ID NO: 4731548 - DNA, 25 bp, Homo sapien
gcccttgagccgttcctatatagaa

SEQ ID NO: 4731549 - DNA, 25 bp, Homo sapien
gagtgctcaaagtcaaatgtctgtc

SEQ ID NO: 4731550 - DNA, 25 bp, Homo sapien
tttcagccatatgactgcccttgag

SEQ ID NO: 4731551 - DNA, 25 bp, Homo sapien
aaattctgtttagccctgagtttca

SEQ ID NO: 4731552 - DNA, 25 bp, Homo sapien
cacaggttgtttgcattcgctccac

SEQ ID NO: 4731553 - DNA, 25 bp, Homo sapien
taagtcctatcttctaggcatagtc

SEQ ID NO: 4731554 - DNA, 25 bp, Homo sapien
ccaaagctgagttgtgacacaagac

SEQ ID NO: 4731555 - DNA, 25 bp, Homo sapien
ccttccttaacggtcaatacaactg

SEQ ID NO: 4731556 - DNA, 25 bp, Homo sapien
tagtgagcaggagtccaaggatttg

SEQ ID NO: 4731557 - DNA, 25 bp, Homo sapien
gaacatcgttatgcatatagctctc

SEQ ID NO: 4731558 - DNA, 25 bp, Homo sapien
ccaaggatttggtgactatagggat

SEQ ID NO: 4731559 - DNA, 25 bp, Homo sapien
taaattctcagtaatgtagtgagca

SEQ ID NO: 4731560 - DNA, 25 bp, Homo sapien
gcagctgatttacttctgctgactt

SEQ ID NO: 4731561 - DNA, 25 bp, Homo sapien
agctgatttacttctgctgactttg

SEQ ID NO: 4731562 - DNA, 25 bp, Homo sapien
tttctgcagctgatttacttctgct

SEQ ID NO: 4731563 - DNA, 25 bp, Homo sapien
tctgctttctgcagctgatttactt

SEQ ID NO: 4731564 - DNA, 25 bp, Homo sapien
cttctgctgactttgccttgttctg

SEQ ID NO: 4731565 - DNA, 25 bp, Homo sapien
tttgccttgttctgattccctcttt

SEQ ID NO: 4731566 - DNA, 25 bp, Homo sapien
actttgccttgttctgattccctct

SEQ ID NO: 4731567 - DNA, 25 bp, Homo sapien
ctgactttgccttgttctgattccc

SEQ ID NO: 4731568 - DNA, 25 bp, Homo sapien
gcatcccagaagtcagctttcattt

SEQ ID NO: 4731569 - DNA, 25 bp, Homo sapien
catcccagaagtcagctttcatttt

SEQ ID NO: 4731570 - DNA, 25 bp, Homo sapien
gcacaaattgtgaggagatttttac

SEQ ID NO: 4731571 - DNA, 25 bp, Homo sapien
cagcatcccagaagtcagctttcat

SEQ ID NO: 4731572 - DNA, 25 bp, Homo sapien
tgaatcaagtgatgccgtcaggctt

SEQ ID NO: 4731573 - DNA, 25 bp, Homo sapien
gaatcattcctcatagctggcaaga

SEQ ID NO: 4731574 - DNA, 25 bp, Homo sapien
gagtgcattgctttagtacccgggc

SEQ ID NO: 4731575 - DNA, 25 bp, Homo sapien
tacccgggccagttgagactgaaac

SEQ ID NO: 4731576 - DNA, 25 bp, Homo sapien
gggtcatatgtccactcctaagtct

SEQ ID NO: 4731577 - DNA, 25 bp, Homo sapien
gatgctgctcaaccaccatggagct

SEQ ID NO: 4731578 - DNA, 25 bp, Homo sapien
tgtcaccaatgtacctgccacttag

SEQ ID NO: 4731579 - DNA, 25 bp, Homo sapien
aaatgacagatatctcccctgaaga

SEQ ID NO: 4731580 - DNA, 25 bp, Homo sapien
attacaaaaaaataagcacaataga

SEQ ID NO: 4731581 - DNA, 25 bp, Homo sapien
ttacaaaaaaataagcacaatagat

SEQ ID NO: 4731582 - DNA, 25 bp, Homo sapien
tacaaaaaaataagcacaatagatg

SEQ ID NO: 4731583 - DNA, 25 bp, Homo sapien
aataccacaacgaggcattttctat

SEQ ID NO: 4731584 - DNA, 25 bp, Homo sapien
caacaataccacaacgaggcatttt

SEQ ID NO: 4731585 - DNA, 25 bp, Homo sapien
ccacaacgaggcattttctatttta

SEQ ID NO: 4731586 - DNA, 25 bp, Homo sapien
acaataccacaacgaggcattttct

SEQ ID NO: 4731587 - DNA, 25 bp, Homo sapien
tttctatgcaccaggctcatcagct

SEQ ID NO: 4731588 - DNA, 25 bp, Homo sapien
ttctatgcaccaggctcatcagctc

SEQ ID NO: 4731589 - DNA, 25 bp, Homo sapien
ctgggccagcttgcaacatgaatgg

SEQ ID NO: 4731590 - DNA, 25 bp, Homo sapien
tctggaacggagaagtttaggtctg

SEQ ID NO: 4731591 - DNA, 25 bp, Homo sapien
cctcatataggtaggcctctggaac

SEQ ID NO: 4731592 - DNA, 25 bp, Homo sapien
caaacaggagtagtaaagaggaagt

SEQ ID NO: 4731593 - DNA, 25 bp, Homo sapien
tatgtgccactatacaagtttctgg

SEQ ID NO: 4731594 - DNA, 25 bp, Homo sapien
taaatgtcctacttctgcaaagccc

SEQ ID NO: 4731595 - DNA, 25 bp, Homo sapien
ctttaaagatagagttgcacacaca

SEQ ID NO: 4731596 - DNA, 25 bp, Homo sapien
tataaggaacgctttgagatacaat

SEQ ID NO: 4731597 - DNA, 25 bp, Homo sapien
gaagcagctttgacgttaggtaaca

SEQ ID NO: 4731598 - DNA, 25 bp, Homo sapien
gctgatgccttgatcctgagcggaa

SEQ ID NO: 4731599 - DNA, 25 bp, Homo sapien
tactctatcagagcactagggactg

SEQ ID NO: 4731600 - DNA, 25 bp, Homo sapien
gaatcagctagcaccttggaacctc

SEQ ID NO: 4731601 - DNA, 25 bp, Homo sapien
acagcctgtcttttctcgtgtcaca

SEQ ID NO: 4731602 - DNA, 25 bp, Homo sapien
tttatttactgcactgaatccacag

SEQ ID NO: 4731603 - DNA, 25 bp, Homo sapien
agcctgttatgtctagagttttggg

SEQ ID NO: 4731604 - DNA, 25 bp, Homo sapien
tattgcagctaatctcctatttctc

SEQ ID NO: 4731605 - DNA, 25 bp, Homo sapien
ctttctgagtatagatgactgtagg

SEQ ID NO: 4731606 - DNA, 25 bp, Homo sapien
cttctttctgagtatagatgactgt

SEQ ID NO: 4731607 - DNA, 25 bp, Homo sapien
ctgagtatagatgactgtaggtaaa

SEQ ID NO: 4731608 - DNA, 25 bp, Homo sapien
tatagatgactgtaggtaaaataca

SEQ ID NO: 4731609 - DNA, 25 bp, Homo sapien
taagtttttgttccatacatttctc

SEQ ID NO: 4731610 - DNA, 25 bp, Homo sapien
ttctcttgagtctgtaacaccgact

SEQ ID NO: 4731611 - DNA, 25 bp, Homo sapien
ttgttccatacatttctcttgagtc

SEQ ID NO: 4731612 - DNA, 25 bp, Homo sapien
gtctgtaacaccgactcccatttgc

SEQ ID NO: 4731613 - DNA, 25 bp, Homo sapien
tattttcagcacatatgggaaatag

SEQ ID NO: 4731614 - DNA, 25 bp, Homo sapien
taaggcagcgattgatagatggcaa

SEQ ID NO: 4731615 - DNA, 25 bp, Homo sapien
gaaatagatggataagtcaaagggc

SEQ ID NO: 4731616 - DNA, 25 bp, Homo sapien
gcagcttggtggaataagtgccaaa

SEQ ID NO: 4731617 - DNA, 25 bp, Homo sapien
cagtgagttaatgaagtgaaggcct

SEQ ID NO: 4731618 - DNA, 25 bp, Homo sapien
aaggcctcagatgccgttgcttttt

SEQ ID NO: 4731619 - DNA, 25 bp, Homo sapien
tgagttaatgaagtgaaggcctcag

SEQ ID NO: 4731620 - DNA, 25 bp, Homo sapien
agtgaaggcctcagatgccgttgct

SEQ ID NO: 4731621 - DNA, 25 bp, Homo sapien
gactgataacatgctataagtgtac

SEQ ID NO: 4731622 - DNA, 25 bp, Homo sapien
aggataaattggcatccatagtgtt

SEQ ID NO: 4731623 - DNA, 25 bp, Homo sapien
gcatccatagtgtttgactgagcca

SEQ ID NO: 4731624 - DNA, 25 bp, Homo sapien
tgtcaagacagcataggatattcct

SEQ ID NO: 4731625 - DNA, 25 bp, Homo sapien
tctggtgatacaataaaagacctgc

SEQ ID NO: 4731626 - DNA, 25 bp, Homo sapien
gaggcgtaagcactcactgagcaaa

SEQ ID NO: 4731627 - DNA, 25 bp, Homo sapien
tctctcaagtaggagggacggttct

SEQ ID NO: 4731628 - DNA, 25 bp, Homo sapien
tgtttgacaccaccacttgtagagg

SEQ ID NO: 4731629 - DNA, 25 bp, Homo sapien
cttcctcttgactggtgatcaccac

SEQ ID NO: 4731630 - DNA, 25 bp, Homo sapien
caccacaaaaaggatgattattctt

SEQ ID NO: 4731631 - DNA, 25 bp, Homo sapien
acttcctcttgactggtgatcacca

SEQ ID NO: 4731632 - DNA, 25 bp, Homo sapien
tagattccaaaagacgaataaaaca

SEQ ID NO: 4731633 - DNA, 25 bp, Homo sapien
tggaaacaaggaatttgggaacaga

SEQ ID NO: 4731634 - DNA, 25 bp, Homo sapien
gtttccagagttgtaagctatccat

SEQ ID NO: 4731635 - DNA, 25 bp, Homo sapien
tggtttccagagttgtaagctatcc

SEQ ID NO: 4731636 - DNA, 25 bp, Homo sapien
aacatatatatatccgaagtctcct

SEQ ID NO: 4731637 - DNA, 25 bp, Homo sapien
cctggtttccagagttgtaagctat

SEQ ID NO: 4731638 - DNA, 25 bp, Homo sapien
catcccttaattgaagaggacagag

SEQ ID NO: 4731639 - DNA, 25 bp, Homo sapien
gatgtcaggtcatcccttaattgaa

SEQ ID NO: 4731640 - DNA, 25 bp, Homo sapien
ggtcatcccttaattgaagaggaca

SEQ ID NO: 4731641 - DNA, 25 bp, Homo sapien
gtcaggtcatcccttaattgaagag

SEQ ID NO: 4731642 - DNA, 25 bp, Homo sapien
cttcactgtctgtggcaaggtagcg

SEQ ID NO: 4731643 - DNA, 25 bp, Homo sapien
ctgtctgtggcaaggtagcgatgaa

SEQ ID NO: 4731644 - DNA, 25 bp, Homo sapien
gtctgtggcaaggtagcgatgaaat

SEQ ID NO: 4731645 - DNA, 25 bp, Homo sapien
cactgtctgtggcaaggtagcgatg

SEQ ID NO: 4731646 - DNA, 25 bp, Homo sapien
ttacttaaaagcagccactctctta

SEQ ID NO: 4731647 - DNA, 25 bp, Homo sapien
tcagcgccatcccataatgagggaa

SEQ ID NO: 4731648 - DNA, 25 bp, Homo sapien
tcacatcacaactgtatcgacatgg

SEQ ID NO: 4731649 - DNA, 25 bp, Homo sapien
cccacttaactatctcttgaaggta

SEQ ID NO: 4731650 - DNA, 25 bp, Homo sapien
accttgggagaagatggtttgactc

SEQ ID NO: 4731651 - DNA, 25 bp, Homo sapien
ggtttgactcaatgccaacatatat

SEQ ID NO: 4731652 - DNA, 25 bp, Homo sapien
caacatatatgtgcagcagttccag

SEQ ID NO: 4731653 - DNA, 25 bp, Homo sapien
agttccaggagagatacggattggc

SEQ ID NO: 4731654 - DNA, 25 bp, Homo sapien
tagaaggttgaggtgtgtagaaatt

SEQ ID NO: 4731655 - DNA, 25 bp, Homo sapien
agaaatttaatataagcaggatgag

SEQ ID NO: 4731656 - DNA, 25 bp, Homo sapien
aaatttaatataagcaggatgaggt

SEQ ID NO: 4731657 - DNA, 25 bp, Homo sapien
ggatgaggtgaaaacaaggattaaa

SEQ ID NO: 4731658 - DNA, 25 bp, Homo sapien
aactggattaagtaatagatgaaaa

SEQ ID NO: 4731659 - DNA, 25 bp, Homo sapien
atagatgaaaagatacgcattcttc

SEQ ID NO: 4731660 - DNA, 25 bp, Homo sapien
gccacagaactggattaagtaatag

SEQ ID NO: 4731661 - DNA, 25 bp, Homo sapien
acagaactggattaagtaatagatg

SEQ ID NO: 4731662 - DNA, 25 bp, Homo sapien
ccgcccgccgcagaggggagctccc

SEQ ID NO: 4731663 - DNA, 25 bp, Homo sapien
cctgggcacggtagcgctgcgcctt

SEQ ID NO: 4731664 - DNA, 25 bp, Homo sapien
ctgcatgagctccaaggggtgcctg

SEQ ID NO: 4731665 - DNA, 25 bp, Homo sapien
ccgcagaggggagctcccgcctcca

SEQ ID NO: 4731666 - DNA, 25 bp, Homo sapien
gcagcgccaagggccccatgggccg

SEQ ID NO: 4731667 - DNA, 25 bp, Homo sapien
gggcagcgccaagggccccatgggc

SEQ ID NO: 4731668 - DNA, 25 bp, Homo sapien
ggcttccagcgcggtccaggaagga

SEQ ID NO: 4731669 - DNA, 25 bp, Homo sapien
ttccagcgcggtccaggaaggagta

SEQ ID NO: 4731670 - DNA, 25 bp, Homo sapien
tagaaaactgatttcgctgtctctg

SEQ ID NO: 4731671 - DNA, 25 bp, Homo sapien
gattggctagacaaaagcaggaaga

SEQ ID NO: 4731672 - DNA, 25 bp, Homo sapien
tgcctattaggcagatagaaaactg

SEQ ID NO: 4731673 - DNA, 25 bp, Homo sapien
gctggttttctagataaggattggc

SEQ ID NO: 4731674 - DNA, 25 bp, Homo sapien
cgctgctgtccactaccatatctcc

SEQ ID NO: 4731675 - DNA, 25 bp, Homo sapien
tcagtgctccgctgctgtccactac

SEQ ID NO: 4731676 - DNA, 25 bp, Homo sapien
gctccgctgctgtccactaccatat

SEQ ID NO: 4731677 - DNA, 25 bp, Homo sapien
gccctcagtgctccgctgctgtcca

SEQ ID NO: 4731678 - DNA, 25 bp, Homo sapien
ctagtgtcctttcatatgcagtaca

SEQ ID NO: 4731679 - DNA, 25 bp, Homo sapien
tagccatcagtcacttaaacagcat

SEQ ID NO: 4731680 - DNA, 25 bp, Homo sapien
cagcatctgctggttgaagaatgct

SEQ ID NO: 4731681 - DNA, 25 bp, Homo sapien
atgcttgaagcaattgtccagtccc

SEQ ID NO: 4731682 - DNA, 25 bp, Homo sapien
tctcatagatggtcaatgcggcgtc

SEQ ID NO: 4731683 - DNA, 25 bp, Homo sapien
caatagtctcattccagccagtgct

SEQ ID NO: 4731684 - DNA, 25 bp, Homo sapien
gacattagccaggaggttctcaaca

SEQ ID NO: 4731685 - DNA, 25 bp, Homo sapien
taggaatccaagcaagttgtagctc

SEQ ID NO: 4731686 - DNA, 25 bp, Homo sapien
ttgacaacacgaacagtgtcgccta

SEQ ID NO: 4731687 - DNA, 25 bp, Homo sapien
gacaacacgaacagtgtcgcctact

SEQ ID NO: 4731688 - DNA, 25 bp, Homo sapien
caacacgaacagtgtcgcctactac

SEQ ID NO: 4731689 - DNA, 25 bp, Homo sapien
gttgacaacacgaacagtgtcgcct

SEQ ID NO: 4731690 - DNA, 25 bp, Homo sapien
agagcaaaggcttcgaaaggttgca

SEQ ID NO: 4731691 - DNA, 25 bp, Homo sapien
cagagcaaaggcttcgaaaggttgc

SEQ ID NO: 4731692 - DNA, 25 bp, Homo sapien
ctatccataggttctgtatccgtgg

SEQ ID NO: 4731693 - DNA, 25 bp, Homo sapien
tatccgtggattctactgactgtag

SEQ ID NO: 4731694 - DNA, 25 bp, Homo sapien
tacagttggtccttcctatccatag

SEQ ID NO: 4731695 - DNA, 25 bp, Homo sapien
aaagcaaacgacctgagaattcaag

SEQ ID NO: 4731696 - DNA, 25 bp, Homo sapien
ttgaagaatggagcgggtattcccc

SEQ ID NO: 4731697 - DNA, 25 bp, Homo sapien
acatcctgggatatttgctgcgaaa

SEQ ID NO: 4731698 - DNA, 25 bp, Homo sapien
catttagctcctcgaaaggtagaga

SEQ ID NO: 4731699 - DNA, 25 bp, Homo sapien
gaaccaagaggtaaagtgtgccatt

SEQ ID NO: 4731700 - DNA, 25 bp, Homo sapien
cacatgtgagtcttcttgccccttc

SEQ ID NO: 4731701 - DNA, 25 bp, Homo sapien
tacaacgcagataataagatcagcc

SEQ ID NO: 4731702 - DNA, 25 bp, Homo sapien
tatactgatctcacaaggtaccaat

SEQ ID NO: 4731703 - DNA, 25 bp, Homo sapien
taaatgtagccccaacacatgtgag

SEQ ID NO: 4731704 - DNA, 25 bp, Homo sapien
atatatcaacactttcaggagggaa

SEQ ID NO: 4731705 - DNA, 25 bp, Homo sapien
tatatcaacactttcaggagggaaa

SEQ ID NO: 4731706 - DNA, 25 bp, Homo sapien
atatcaacactttcaggagggaaat

SEQ ID NO: 4731707 - DNA, 25 bp, Homo sapien
tgatgcttggaatagggccttcctg

SEQ ID NO: 4731708 - DNA, 25 bp, Homo sapien
cagactggatttcatcagcagctgg

SEQ ID NO: 4731709 - DNA, 25 bp, Homo sapien
tacacaagggcttgtctgatgcttg

SEQ ID NO: 4731710 - DNA, 25 bp, Homo sapien
caggtgatttctgccctccataaga

SEQ ID NO: 4731711 - DNA, 25 bp, Homo sapien
gagggccctacactggccataaaga

SEQ ID NO: 4731712 - DNA, 25 bp, Homo sapien
gaggtacttccagggagtacatttc

SEQ ID NO: 4731713 - DNA, 25 bp, Homo sapien
cctggaaattgagggccctacactg

SEQ ID NO: 4731714 - DNA, 25 bp, Homo sapien
ggtatagaggatgggaagcaagagt

SEQ ID NO: 4731715 - DNA, 25 bp, Homo sapien
tatttttgcaccatccggttcactg

SEQ ID NO: 4731716 - DNA, 25 bp, Homo sapien
ttgcaccatccggttcactgtacag

SEQ ID NO: 4731717 - DNA, 25 bp, Homo sapien
catccggttcactgtacagtccctg

SEQ ID NO: 4731718 - DNA, 25 bp, Homo sapien
ggttcactgtacagtccctgtgcag

SEQ ID NO: 4731719 - DNA, 25 bp, Homo sapien
gagctggtgcttattcagcagctgc

SEQ ID NO: 4731720 - DNA, 25 bp, Homo sapien
tgtgtgttgtctgtgtattctcttc

SEQ ID NO: 4731721 - DNA, 25 bp, Homo sapien
agggaatggagctggtgcttattca

SEQ ID NO: 4731722 - DNA, 25 bp, Homo sapien
aatggagctggtgcttattcagcag

SEQ ID NO: 4731723 - DNA, 25 bp, Homo sapien
tttcctccaaatgccgtctggtgct

SEQ ID NO: 4731724 - DNA, 25 bp, Homo sapien
aatgccgtctggtgctacaccacag

SEQ ID NO: 4731725 - DNA, 25 bp, Homo sapien
tccaaatgccgtctggtgctacacc

SEQ ID NO: 4731726 - DNA, 25 bp, Homo sapien
agactttcctccaaatgccgtctgg

SEQ ID NO: 4731727 - DNA, 25 bp, Homo sapien
ggaagccagacaaaagagtccctat

SEQ ID NO: 4731728 - DNA, 25 bp, Homo sapien
cagtgtggcctaaataacagacatt

SEQ ID NO: 4731729 - DNA, 25 bp, Homo sapien
taccaacacattaggcggcaggatt

SEQ ID NO: 4731730 - DNA, 25 bp, Homo sapien
cagatcagtggtggcctaaagatgg

SEQ ID NO: 4731731 - DNA, 25 bp, Homo sapien
ctttatctgaggagtgagttagagc

SEQ ID NO: 4731732 - DNA, 25 bp, Homo sapien
gaggagtgagttagagcaaccacaa

SEQ ID NO: 4731733 - DNA, 25 bp, Homo sapien
ctgaaggatttatgcaagatccttt

SEQ ID NO: 4731734 - DNA, 25 bp, Homo sapien
tttatgcaagatcctttatctgagg

SEQ ID NO: 4731735 - DNA, 25 bp, Homo sapien
tgatgcccctgaacctaagtctttt

SEQ ID NO: 4731736 - DNA, 25 bp, Homo sapien
tgaccagagtcacatgtgcaagtgt

SEQ ID NO: 4731737 - DNA, 25 bp, Homo sapien
tactggcttaatataccgacaaagt

SEQ ID NO: 4731738 - DNA, 25 bp, Homo sapien
taagagtcttttgaattgaccagag

SEQ ID NO: 4731739 - DNA, 25 bp, Homo sapien
gatgagcccaggtctctatctttac

SEQ ID NO: 4731740 - DNA, 25 bp, Homo sapien
agatgagcccaggtctctatcttta

SEQ ID NO: 4731741 - DNA, 25 bp, Homo sapien
tcaagatgagcccaggtctctatct

SEQ ID NO: 4731742 - DNA, 25 bp, Homo sapien
caagatgagcccaggtctctatctt

SEQ ID NO: 4731743 - DNA, 25 bp, Homo sapien
gggctgctaattgccccagcagatt

SEQ ID NO: 4731744 - DNA, 25 bp, Homo sapien
tggaggacagacatgacatgggcct

SEQ ID NO: 4731745 - DNA, 25 bp, Homo sapien
tctctttcaggtagacacggattcc

SEQ ID NO: 4731746 - DNA, 25 bp, Homo sapien
actggctcccttttaccatctcctg

SEQ ID NO: 4731747 - DNA, 25 bp, Homo sapien
atcactagggctgccagtagaggga

SEQ ID NO: 4731748 - DNA, 25 bp, Homo sapien
gggctatagctggtcatcactaggg

SEQ ID NO: 4731749 - DNA, 25 bp, Homo sapien
tagctggtcatcactagggctgcca

SEQ ID NO: 4731750 - DNA, 25 bp, Homo sapien
tccaacagggctatagctggtcatc

SEQ ID NO: 4731751 - DNA, 25 bp, Homo sapien
tactttatgtaggaagtcaggccct

SEQ ID NO: 4731752 - DNA, 25 bp, Homo sapien
tcaaatgaaaaacgtctgggtacta

SEQ ID NO: 4731753 - DNA, 25 bp, Homo sapien
gatatggcttaaccttggaccctag

SEQ ID NO: 4731754 - DNA, 25 bp, Homo sapien
tgttctccctatgaccttaagagga

SEQ ID NO: 4731755 - DNA, 25 bp, Homo sapien
aaacaccactgcactcagaccagcc

SEQ ID NO: 4731756 - DNA, 25 bp, Homo sapien
gtaaacaccactgcactcagaccag

SEQ ID NO: 4731757 - DNA, 25 bp, Homo sapien
ggagtggagagggaacaaaggaatc

SEQ ID NO: 4731758 - DNA, 25 bp, Homo sapien
gtaactggttgtgatggattagttg

SEQ ID NO: 4731759 - DNA, 25 bp, Homo sapien
tagtgcctgcacaggtaaacatgat

SEQ ID NO: 4731760 - DNA, 25 bp, Homo sapien
gatgtttccttacactcctgaaaag

SEQ ID NO: 4731761 - DNA, 25 bp, Homo sapien
caactcatgcggtggttataggaga

SEQ ID NO: 4731762 - DNA, 25 bp, Homo sapien
cagaagtcatagaagtgtggactgg

SEQ ID NO: 4731763 - DNA, 25 bp, Homo sapien
aatttttgataaagagaaggatctc

SEQ ID NO: 4731764 - DNA, 25 bp, Homo sapien
tccttcctccttaatctttcttgaa

SEQ ID NO: 4731765 - DNA, 25 bp, Homo sapien
tcttgaaaaatttttgataaagaga

SEQ ID NO: 4731766 - DNA, 25 bp, Homo sapien
gaaggatctcatgatttctgctctg

SEQ ID NO: 4731767 - DNA, 25 bp, Homo sapien
aagtatttcttcacagccaggatgg

SEQ ID NO: 4731768 - DNA, 25 bp, Homo sapien
aagagtgattctttggaagtatttc

SEQ ID NO: 4731769 - DNA, 25 bp, Homo sapien
tcttctctgtcagataaagagtgat

SEQ ID NO: 4731770 - DNA, 25 bp, Homo sapien
ccaggatggagtccacattcatcag

SEQ ID NO: 4731771 - DNA, 25 bp, Homo sapien
ggaactggttgccatcaaactcctc

SEQ ID NO: 4731772 - DNA, 25 bp, Homo sapien
tctggaactggttgccatcaaactc

SEQ ID NO: 4731773 - DNA, 25 bp, Homo sapien
ctggaactggttgccatcaaactcc

SEQ ID NO: 4731774 - DNA, 25 bp, Homo sapien
tggaactggttgccatcaaactcct

SEQ ID NO: 4731775 - DNA, 25 bp, Homo sapien
aacagatggatttgtagctgagcac

SEQ ID NO: 4731776 - DNA, 25 bp, Homo sapien
acagatggatttgtagctgagcacc

SEQ ID NO: 4731777 - DNA, 25 bp, Homo sapien
ccaatattgctaggctacttgagat

SEQ ID NO: 4731778 - DNA, 25 bp, Homo sapien
tgggatgttgccaatattgctaggc

SEQ ID NO: 4731779 - DNA, 25 bp, Homo sapien
gttgccaatattgctaggctacttg

SEQ ID NO: 4731780 - DNA, 25 bp, Homo sapien
gatgttgccaatattgctaggctac

SEQ ID NO: 4731781 - DNA, 25 bp, Homo sapien
tgagacacaagaaagtggagattct

SEQ ID NO: 4731782 - DNA, 25 bp, Homo sapien
gccctaagcaagactccaggcattc

SEQ ID NO: 4731783 - DNA, 25 bp, Homo sapien
gagacacaagaaagtggagattctg

SEQ ID NO: 4731784 - DNA, 25 bp, Homo sapien
ctgccctaagcaagactccaggcat

SEQ ID NO: 4731785 - DNA, 25 bp, Homo sapien
ctgctgattaattctatcaatccag

SEQ ID NO: 4731786 - DNA, 25 bp, Homo sapien
tcgtggtggttatagaagtgagtct

SEQ ID NO: 4731787 - DNA, 25 bp, Homo sapien
gaagaactcatgaaagtgtgagata

SEQ ID NO: 4731788 - DNA, 25 bp, Homo sapien
aattttgattcaactcgtggtggtt

SEQ ID NO: 4731789 - DNA, 25 bp, Homo sapien
gactagtgcctgcacaggtatacac

SEQ ID NO: 4731790 - DNA, 25 bp, Homo sapien
aaaacgagagggatctcatgatttc

SEQ ID NO: 4731791 - DNA, 25 bp, Homo sapien
ctccttaatcttttttgcaagtttg

SEQ ID NO: 4731792 - DNA, 25 bp, Homo sapien
tttgcaagtttgttgaaaacgagag

SEQ ID NO: 4731793 - DNA, 25 bp, Homo sapien
acgagagggatctcatgatttctgc

SEQ ID NO: 4731794 - DNA, 25 bp, Homo sapien
tctctgttagataaagagtgattct

SEQ ID NO: 4731795 - DNA, 25 bp, Homo sapien
tctgttagataaagagtgattcttt

SEQ ID NO: 4731796 - DNA, 25 bp, Homo sapien
tgttagataaagagtgattctttgg

SEQ ID NO: 4731797 - DNA, 25 bp, Homo sapien
tcttctctgttagataaagagtgat

SEQ ID NO: 4731798 - DNA, 25 bp, Homo sapien
tcagttgctggtaaagttcagtgga

SEQ ID NO: 4731799 - DNA, 25 bp, Homo sapien
cggggaatccgaaatcatgtctgtc

SEQ ID NO: 4731800 - DNA, 25 bp, Homo sapien
atcaggggagtctcttccaccccaa

SEQ ID NO: 4731801 - DNA, 25 bp, Homo sapien
caacctcctgtatcacacatgcttc

SEQ ID NO: 4731802 - DNA, 25 bp, Homo sapien
aacagatggatttgtagctgagcac

SEQ ID NO: 4731803 - DNA, 25 bp, Homo sapien
acagatggatttgtagctgagcacc

SEQ ID NO: 4731804 - DNA, 25 bp, Homo sapien
aagactttgctctgtgcataggtct

SEQ ID NO: 4731805 - DNA, 25 bp, Homo sapien
actttgctctgtgcataggtcttaa

SEQ ID NO: 4731806 - DNA, 25 bp, Homo sapien
gactttgctctgtgcataggtctta

SEQ ID NO: 4731807 - DNA, 25 bp, Homo sapien
tttgctctgtgcataggtcttaaat

SEQ ID NO: 4731808 - DNA, 25 bp, Homo sapien
caaggccagtatagggccccaatca

SEQ ID NO: 4731809 - DNA, 25 bp, Homo sapien
tcaaggccagtatagggccccaatc

SEQ ID NO: 4731810 - DNA, 25 bp, Homo sapien
aaggccagtatagggccccaatcac

SEQ ID NO: 4731811 - DNA, 25 bp, Homo sapien
caggcattcgagctgctgatgaaat

SEQ ID NO: 4731812 - DNA, 25 bp, Homo sapien
taagcaagactccaggcattcgagc

SEQ ID NO: 4731813 - DNA, 25 bp, Homo sapien
tgcctgccctaagcaagactccagg

SEQ ID NO: 4731814 - DNA, 25 bp, Homo sapien
ctgttgcctgccctaagcaagactc

SEQ ID NO: 4731815 - DNA, 25 bp, Homo sapien
tgagacacaagaaagtggagattct

SEQ ID NO: 4731816 - DNA, 25 bp, Homo sapien
gagacacaagaaagtggagattctg

SEQ ID NO: 4731817 - DNA, 25 bp, Homo sapien
ccattgccccaagacgacatgtcat

SEQ ID NO: 4731818 - DNA, 25 bp, Homo sapien
gtctttccccatagctgtccattgc

SEQ ID NO: 4731819 - DNA, 25 bp, Homo sapien
atagctgtccattgccccaagacga

SEQ ID NO: 4731820 - DNA, 25 bp, Homo sapien
ttccccatagctgtccattgcccca

SEQ ID NO: 4731821 - DNA, 25 bp, Homo sapien
caggtaaacacgatgcttcttaaca

SEQ ID NO: 4731822 - DNA, 25 bp, Homo sapien
gcacaggtaaacacgatgcttctta

SEQ ID NO: 4731823 - DNA, 25 bp, Homo sapien
ggtaaacacgatgcttcttaacact

SEQ ID NO: 4731824 - DNA, 25 bp, Homo sapien
taaacacgatgcttcttaacactcc

SEQ ID NO: 4731825 - DNA, 25 bp, Homo sapien
ctcatgaaagtgtgagatgatgcat

SEQ ID NO: 4731826 - DNA, 25 bp, Homo sapien
gaatcatttccatgatgaaccagtt

SEQ ID NO: 4731827 - DNA, 25 bp, Homo sapien
ttagtcaatgagaatcatttccatg

SEQ ID NO: 4731828 - DNA, 25 bp, Homo sapien
gagatgatgcattagtcaatgagaa

SEQ ID NO: 4731829 - DNA, 25 bp, Homo sapien
aagagaaggatctcatgatttctgc

SEQ ID NO: 4731830 - DNA, 25 bp, Homo sapien
tcaagtttgttgaaaaagagaagga

SEQ ID NO: 4731831 - DNA, 25 bp, Homo sapien
gatctcatgatttctgctctgacaa

SEQ ID NO: 4731832 - DNA, 25 bp, Homo sapien
agaaggatctcatgatttctgctct

SEQ ID NO: 4731833 - DNA, 25 bp, Homo sapien
cattagataaagagtgattctttgg

SEQ ID NO: 4731834 - DNA, 25 bp, Homo sapien
tcttctccattagataaagagtgat

SEQ ID NO: 4731835 - DNA, 25 bp, Homo sapien
tgtatttcttctccattagataaag

SEQ ID NO: 4731836 - DNA, 25 bp, Homo sapien
ctccattagataaagagtgattctt

SEQ ID NO: 4731837 - DNA, 25 bp, Homo sapien
tcagttgctggtaaagttcagtgga

SEQ ID NO: 4731838 - DNA, 25 bp, Homo sapien
aggatgaagtcctcattcatcaggg

SEQ ID NO: 4731839 - DNA, 25 bp, Homo sapien
ttgagtcttctggaactggtggcca

SEQ ID NO: 4731840 - DNA, 25 bp, Homo sapien
ctgggaatctgaattcatgtctgtc

SEQ ID NO: 4731841 - DNA, 25 bp, Homo sapien
gatggatttgtagctgagtaccagc

SEQ ID NO: 4731842 - DNA, 25 bp, Homo sapien
atggatttgtagctgagtaccagca

SEQ ID NO: 4731843 - DNA, 25 bp, Homo sapien
cagatggatttgtagctgagtacca

SEQ ID NO: 4731844 - DNA, 25 bp, Homo sapien
agatggatttgtagctgagtaccag

SEQ ID NO: 4731845 - DNA, 25 bp, Homo sapien
ttttgcaaatatcactaggctacct

SEQ ID NO: 4731846 - DNA, 25 bp, Homo sapien
tgggattttgcaaatatcactaggc

SEQ ID NO: 4731847 - DNA, 25 bp, Homo sapien
ggattttgcaaatatcactaggcta

SEQ ID NO: 4731848 - DNA, 25 bp, Homo sapien
gattttgcaaatatcactaggctac

SEQ ID NO: 4731849 - DNA, 25 bp, Homo sapien
gtaaagcgactcatgatattacata

SEQ ID NO: 4731850 - DNA, 25 bp, Homo sapien
agtgcctgcacaggtatacacgaca

SEQ ID NO: 4731851 - DNA, 25 bp, Homo sapien
gcacaggtatacacgacacttcttt

SEQ ID NO: 4731852 - DNA, 25 bp, Homo sapien
aaccacaatgtaaagcgactcatga

SEQ ID NO: 4731853 - DNA, 25 bp, Homo sapien
aaaacgagagggatctcatgatttc

SEQ ID NO: 4731854 - DNA, 25 bp, Homo sapien
ctccttaatcttttttgcaagtttg

SEQ ID NO: 4731855 - DNA, 25 bp, Homo sapien
tttgcaagtttgttgaaaacgagag

SEQ ID NO: 4731856 - DNA, 25 bp, Homo sapien
acgagagggatctcatgatttctgc

SEQ ID NO: 4731857 - DNA, 25 bp, Homo sapien
gggctgtatttcctctctattagat

SEQ ID NO: 4731858 - DNA, 25 bp, Homo sapien
tttcctctctattagataaagagtg

SEQ ID NO: 4731859 - DNA, 25 bp, Homo sapien
tattagataaagagtgattctttgg

SEQ ID NO: 4731860 - DNA, 25 bp, Homo sapien
caagggctgtatttcctctctatta

SEQ ID NO: 4731861 - DNA, 25 bp, Homo sapien
atcaggggagtctcttccaccccaa

SEQ ID NO: 4731862 - DNA, 25 bp, Homo sapien
atggagtcctcattcatcaggggag

SEQ ID NO: 4731863 - DNA, 25 bp, Homo sapien
tcctcattcatcaggggagtctctt

SEQ ID NO: 4731864 - DNA, 25 bp, Homo sapien
tcatcaggggagtctcttccacccc

SEQ ID NO: 4731865 - DNA, 25 bp, Homo sapien
tctggaactggttgccatcaaactc

SEQ ID NO: 4731866 - DNA, 25 bp, Homo sapien
ggaactggttgccatcaaactcctc

SEQ ID NO: 4731867 - DNA, 25 bp, Homo sapien
ctggaactggttgccatcaaactcc

SEQ ID NO: 4731868 - DNA, 25 bp, Homo sapien
tggaactggttgccatcaaactcct

SEQ ID NO: 4731869 - DNA, 25 bp, Homo sapien
ggcaggagaaaggagagattcttcc

SEQ ID NO: 4731870 - DNA, 25 bp, Homo sapien
caggcaggagaaaggagagattctt

SEQ ID NO: 4731871 - DNA, 25 bp, Homo sapien
caggagaaaggagagattcttccca

SEQ ID NO: 4731872 - DNA, 25 bp, Homo sapien
aggagaaaggagagattcttcccat

SEQ ID NO: 4731873 - DNA, 25 bp, Homo sapien
ctagagaacagatggatttgtagct

SEQ ID NO: 4731874 - DNA, 25 bp, Homo sapien
aacagatggatttgtagctgagcac

SEQ ID NO: 4731875 - DNA, 25 bp, Homo sapien
acagatggatttgtagctgagcacc

SEQ ID NO: 4731876 - DNA, 25 bp, Homo sapien
agcctagagaacagatggatttgta

SEQ ID NO: 4731877 - DNA, 25 bp, Homo sapien
tacttgagatggataaccttgaact

SEQ ID NO: 4731878 - DNA, 25 bp, Homo sapien
caaatattgctaggctacttgagat

SEQ ID NO: 4731879 - DNA, 25 bp, Homo sapien
aggctacttgagatggataaccttg

SEQ ID NO: 4731880 - DNA, 25 bp, Homo sapien
gctacttgagatggataaccttgaa

SEQ ID NO: 4731881 - DNA, 25 bp, Homo sapien
tcaaggccagtgtagggccccaaac

SEQ ID NO: 4731882 - DNA, 25 bp, Homo sapien
caaggccagtgtagggccccaaaca

SEQ ID NO: 4731883 - DNA, 25 bp, Homo sapien
taagcaagactccaggcattcgagc

SEQ ID NO: 4731884 - DNA, 25 bp, Homo sapien
caggcattcgagctgctgatgaaat

SEQ ID NO: 4731885 - DNA, 25 bp, Homo sapien
tgcctgccctaagcaagactccagg

SEQ ID NO: 4731886 - DNA, 25 bp, Homo sapien
ctgttgcctgccctaagcaagactc

SEQ ID NO: 4731887 - DNA, 25 bp, Homo sapien
tgagacacaagaaagtggagattct

SEQ ID NO: 4731888 - DNA, 25 bp, Homo sapien
gagacacaagaaagtggagattctg

SEQ ID NO: 4731889 - DNA, 25 bp, Homo sapien
tgattcaacttgtggtggttataga

SEQ ID NO: 4731890 - DNA, 25 bp, Homo sapien
ggtggttatagaagtgagtctttga

SEQ ID NO: 4731891 - DNA, 25 bp, Homo sapien
tgcacaggtaaacacgatgcttctt

SEQ ID NO: 4731892 - DNA, 25 bp, Homo sapien
ggactagtgcctgcacaggtaaaca

SEQ ID NO: 4731893 - DNA, 25 bp, Homo sapien
cttcttaatcctttttgcaagtttg

SEQ ID NO: 4731894 - DNA, 25 bp, Homo sapien
ttcttccccatcagataaagagtga

SEQ ID NO: 4731895 - DNA, 25 bp, Homo sapien
gcacaagggctgtatttcttcccca

SEQ ID NO: 4731896 - DNA, 25 bp, Homo sapien
tttgcaagtttgttgaaaaagagaa

SEQ ID NO: 4731897 - DNA, 25 bp, Homo sapien
ttgctggaaaagttcaatgtagaat

SEQ ID NO: 4731898 - DNA, 25 bp, Homo sapien
aacagatggatttgtagctgagcac

SEQ ID NO: 4731899 - DNA, 25 bp, Homo sapien
acagatggatttgtagctgagcacc

SEQ ID NO: 4731900 - DNA, 25 bp, Homo sapien
gaactcatgaaagtgtgagataatg

SEQ ID NO: 4731901 - DNA, 25 bp, Homo sapien
tcgtggtggttatagaagtgagtct

SEQ ID NO: 4731902 - DNA, 25 bp, Homo sapien
tagtgcctgcacaggtatacacgac

SEQ ID NO: 4731903 - DNA, 25 bp, Homo sapien
caggatcattgccatgttgaaccag

SEQ ID NO: 4731904 - DNA, 25 bp, Homo sapien
tccttcctccttaatattttttgca

SEQ ID NO: 4731905 - DNA, 25 bp, Homo sapien
tgttagataaagagtgattctttgg

SEQ ID NO: 4731906 - DNA, 25 bp, Homo sapien
aaaagagagagatctcatgatttct

SEQ ID NO: 4731907 - DNA, 25 bp, Homo sapien
tcttctctgttagataaagagtgat

SEQ ID NO: 4731908 - DNA, 25 bp, Homo sapien
ggaactggttgccatcaaactcctc

SEQ ID NO: 4731909 - DNA, 25 bp, Homo sapien
tctggaactggttgccatcaaactc

SEQ ID NO: 4731910 - DNA, 25 bp, Homo sapien
ctggaactggttgccatcaaactcc

SEQ ID NO: 4731911 - DNA, 25 bp, Homo sapien
tggaactggttgccatcaaactcct

SEQ ID NO: 4731912 - DNA, 25 bp, Homo sapien
caggcaggagaaaggagagattctt

SEQ ID NO: 4731913 - DNA, 25 bp, Homo sapien
aggagaaaggagagattcttcccat

SEQ ID NO: 4731914 - DNA, 25 bp, Homo sapien
caggagaaaggagagattcttccca

SEQ ID NO: 4731915 - DNA, 25 bp, Homo sapien
ggcaggagaaaggagagattcttcc

SEQ ID NO: 4731916 - DNA, 25 bp, Homo sapien
ccagcacggccatcagtaaagaaaa

SEQ ID NO: 4731917 - DNA, 25 bp, Homo sapien
gcacggccatcagtaaagaaaagga

SEQ ID NO: 4731918 - DNA, 25 bp, Homo sapien
acagatggatttgtagctgagcacc

SEQ ID NO: 4731919 - DNA, 25 bp, Homo sapien
agcctagagaacagatggatttgta

SEQ ID NO: 4731920 - DNA, 25 bp, Homo sapien
gaagactttgctctgtgcataggcc

SEQ ID NO: 4731921 - DNA, 25 bp, Homo sapien
aagactttgctctgtgcataggcct

SEQ ID NO: 4731922 - DNA, 25 bp, Homo sapien
cagtgtagggccacaatcaccccta

SEQ ID NO: 4731923 - DNA, 25 bp, Homo sapien
tctggattcccatggattccctgga

SEQ ID NO: 4731924 - DNA, 25 bp, Homo sapien
ttctctgcatttggcccagaagagc

SEQ ID NO: 4731925 - DNA, 25 bp, Homo sapien
ccaggcatcctagctacagatgaaa

SEQ ID NO: 4731926 - DNA, 25 bp, Homo sapien
cccagagatccaacagggccacagt

SEQ ID NO: 4731927 - DNA, 25 bp, Homo sapien
aagtaggccatggttctgaggcagg

SEQ ID NO: 4731928 - DNA, 25 bp, Homo sapien
acagggccacagtggcaaagcagca

SEQ ID NO: 4731929 - DNA, 25 bp, Homo sapien
ggttctgaggcaggtcaaagcccag

SEQ ID NO: 4731930 - DNA, 25 bp, Homo sapien
ctgctgattaattctatcaatccag

SEQ ID NO: 4731931 - DNA, 25 bp, Homo sapien
gagatgatgtattagtcaatgagaa

SEQ ID NO: 4731932 - DNA, 25 bp, Homo sapien
tagtcaatgagaatcatttccatga

SEQ ID NO: 4731933 - DNA, 25 bp, Homo sapien
tgaaagtgtgagatgatgtattagt

SEQ ID NO: 4731934 - DNA, 25 bp, Homo sapien
tgtgagatgatgtattagtcaatga

SEQ ID NO: 4731935 - DNA, 25 bp, Homo sapien
aaaaagagagggatctcatgatttc

SEQ ID NO: 4731936 - DNA, 25 bp, Homo sapien
ttgcaagtttgttgaaaaagagagg

SEQ ID NO: 4731937 - DNA, 25 bp, Homo sapien
ttgaaaaagagagggatctcatgat

SEQ ID NO: 4731938 - DNA, 25 bp, Homo sapien
gtttgttgaaaaagagagggatctc

SEQ ID NO: 4731939 - DNA, 25 bp, Homo sapien
atcaggggagtctcttccaccccaa

SEQ ID NO: 4731940 - DNA, 25 bp, Homo sapien
tctccatcagataaagagtgattct

SEQ ID NO: 4731941 - DNA, 25 bp, Homo sapien
catcagataaagagtgattctttgg

SEQ ID NO: 4731942 - DNA, 25 bp, Homo sapien
ttcttctccatcagataaagagtga

SEQ ID NO: 4731943 - DNA, 25 bp, Homo sapien
ttgctggaaaagttcaatgtagaat

SEQ ID NO: 4731944 - DNA, 25 bp, Homo sapien
gattctcctcatttgtgccatgagc

SEQ ID NO: 4731945 - DNA, 25 bp, Homo sapien
catcaaagtcctcctgttattcagg

SEQ ID NO: 4731946 - DNA, 25 bp, Homo sapien
cctcatttgtgccatgagcatcaaa

SEQ ID NO: 4731947 - DNA, 25 bp, Homo sapien
ctcctcatttgtgccatgagcatca

SEQ ID NO: 4731948 - DNA, 25 bp, Homo sapien
gtttgagacagattacagcccagag

SEQ ID NO: 4731949 - DNA, 25 bp, Homo sapien
ctgtgggtttgagacagattacagc

SEQ ID NO: 4731950 - DNA, 25 bp, Homo sapien
gggtttgagacagattacagcccag

SEQ ID NO: 4731951 - DNA, 25 bp, Homo sapien
ttgagacagattacagcccagagag

SEQ ID NO: 4731952 - DNA, 25 bp, Homo sapien
ggaatcccgaagatgctgctgggct

SEQ ID NO: 4731953 - DNA, 25 bp, Homo sapien
ctgggctggttgatgaggggtaaca

SEQ ID NO: 4731954 - DNA, 25 bp, Homo sapien
gttgtaggttttctgaagaccttgc

SEQ ID NO: 4731955 - DNA, 25 bp, Homo sapien
atcccgaagatgctgctgggctggt

SEQ ID NO: 4731956 - DNA, 25 bp, Homo sapien
ggctagcctactgttctcattccta

SEQ ID NO: 4731957 - DNA, 25 bp, Homo sapien
tcaggctagcctactgttctcattc

SEQ ID NO: 4731958 - DNA, 25 bp, Homo sapien
tagcctactgttctcattcctaaag

SEQ ID NO: 4731959 - DNA, 25 bp, Homo sapien
cctactgttctcattcctaaaggtg

SEQ ID NO: 4731960 - DNA, 25 bp, Homo sapien
cagcccagactgaacttcatcttgt

SEQ ID NO: 4731961 - DNA, 25 bp, Homo sapien
tctgtctttccaacaagtggttgag

SEQ ID NO: 4731962 - DNA, 25 bp, Homo sapien
cttgtgaagaatctcttatcctctg

SEQ ID NO: 4731963 - DNA, 25 bp, Homo sapien
tgtactgatagagtcttgtgaagaa

SEQ ID NO: 4731964 - DNA, 25 bp, Homo sapien
aaaacgttttgtcagatggaagaat

SEQ ID NO: 4731965 - DNA, 25 bp, Homo sapien
cgttttgtcagatggaagaatatta

SEQ ID NO: 4731966 - DNA, 25 bp, Homo sapien
ctgaaaaaacgttttgtcagatgga

SEQ ID NO: 4731967 - DNA, 25 bp, Homo sapien
tgaaaaaacgttttgtcagatggaa

SEQ ID NO: 4731968 - DNA, 25 bp, Homo sapien
tgctgtgtcccttctgttcaggcat

SEQ ID NO: 4731969 - DNA, 25 bp, Homo sapien
ctttaaggaggctgcattatgacta

SEQ ID NO: 4731970 - DNA, 25 bp, Homo sapien
tttttactgcctttaaggaggctgc

SEQ ID NO: 4731971 - DNA, 25 bp, Homo sapien
tcccttctgttcaggcattgtttca

SEQ ID NO: 4731972 - DNA, 25 bp, Homo sapien
taagagatgccttgaattgcattgg

SEQ ID NO: 4731973 - DNA, 25 bp, Homo sapien
cttgaattgcattggccccataaat

SEQ ID NO: 4731974 - DNA, 25 bp, Homo sapien
aaataagtttgcctgtagtgtgaga

SEQ ID NO: 4731975 - DNA, 25 bp, Homo sapien
gcattggccccataaataagtttgc

SEQ ID NO: 4731976 - DNA, 25 bp, Homo sapien
caggctgctgtagtatcagtgtcac

SEQ ID NO: 4731977 - DNA, 25 bp, Homo sapien
tggccatgtctccacgggagcactg

SEQ ID NO: 4731978 - DNA, 25 bp, Homo sapien
tgacactgaagtaaccctgtccctt

SEQ ID NO: 4731979 - DNA, 25 bp, Homo sapien
gggagcactgtatgctctcagcatc

SEQ ID NO: 4731980 - DNA, 25 bp, Homo sapien
gggtaacctatgctgaagacactga

SEQ ID NO: 4731981 - DNA, 25 bp, Homo sapien
gaacagttgacttagtgctcccact

SEQ ID NO: 4731982 - DNA, 25 bp, Homo sapien
atctccatgaggaaactctgtgctc

SEQ ID NO: 4731983 - DNA, 25 bp, Homo sapien
ggaattgttccagctcttgagtacc

SEQ ID NO: 4731984 - DNA, 25 bp, Homo sapien
cttttgaatagaagcacagatgagt

SEQ ID NO: 4731985 - DNA, 25 bp, Homo sapien
tggaaacttttgaatagaagcacag

SEQ ID NO: 4731986 - DNA, 25 bp, Homo sapien
atttggaaacttttgaatagaagca

SEQ ID NO: 4731987 - DNA, 25 bp, Homo sapien
gaaacttttgaatagaagcacagat

SEQ ID NO: 4731988 - DNA, 25 bp, Homo sapien
ctctttgggtgcagatctgtgggca

SEQ ID NO: 4731989 - DNA, 25 bp, Homo sapien
gtaacccttgtagctcatgaatcac

SEQ ID NO: 4731990 - DNA, 25 bp, Homo sapien
cagggtgctttccactaaccatggt

SEQ ID NO: 4731991 - DNA, 25 bp, Homo sapien
ggttgtgctgaattggacttccttg

SEQ ID NO: 4731992 - DNA, 25 bp, Homo sapien
tcagaaacttggctgtctccagctg

SEQ ID NO: 4731993 - DNA, 25 bp, Homo sapien
tgattgatccttagccaagtcttcc

SEQ ID NO: 4731994 - DNA, 25 bp, Homo sapien
gattgatccttagccaagtcttcct

SEQ ID NO: 4731995 - DNA, 25 bp, Homo sapien
attgatccttagccaagtcttcctg

SEQ ID NO: 4731996 - DNA, 25 bp, Homo sapien
agtgattgatccttagccaagtctt

SEQ ID NO: 4731997 - DNA, 25 bp, Homo sapien
gaatttgtctaaaagggtcgcatcc

SEQ ID NO: 4731998 - DNA, 25 bp, Homo sapien
tgtctaaaagggtcgcatcccaagt

SEQ ID NO: 4731999 - DNA, 25 bp, Homo sapien
tgtagaatttgtctaaaagggtcgc

SEQ ID NO: 4732000 - DNA, 25 bp, Homo sapien
ctaaaagggtcgcatcccaagtatc

SEQ ID NO: 4732001 - DNA, 25 bp, Homo sapien
aggcagatcacagcccagaggcaga

SEQ ID NO: 4732002 - DNA, 25 bp, Homo sapien
acagcccagaggcagatggacttgc

SEQ ID NO: 4732003 - DNA, 25 bp, Homo sapien
gcccagaggcagatggacttgcagc

SEQ ID NO: 4732004 - DNA, 25 bp, Homo sapien
cagaggcagatggacttgcagctga

SEQ ID NO: 4732005 - DNA, 25 bp, Homo sapien
cagactggaattaatcgtgtgtact

SEQ ID NO: 4732006 - DNA, 25 bp, Homo sapien
tccaatagtcgagttttgagtgctg

SEQ ID NO: 4732007 - DNA, 25 bp, Homo sapien
tgatagagtccagtaaagaatcctc

SEQ ID NO: 4732008 - DNA, 25 bp, Homo sapien
tgagtgctgaagagacctttgatga

SEQ ID NO: 4732009 - DNA, 25 bp, Homo sapien
taatctttcttgcaagtttgctgat

SEQ ID NO: 4732010 - DNA, 25 bp, Homo sapien
tttgctgataaagagaaggatctca

SEQ ID NO: 4732011 - DNA, 25 bp, Homo sapien
ttgcaagtttgctgataaagagaag

SEQ ID NO: 4732012 - DNA, 25 bp, Homo sapien
ttcttgcaagtttgctgataaagag

SEQ ID NO: 4732013 - DNA, 25 bp, Homo sapien
gtcagatagagggtgattctttgaa

SEQ ID NO: 4732014 - DNA, 25 bp, Homo sapien
tcccatgcacaagggctgtatttct

SEQ ID NO: 4732015 - DNA, 25 bp, Homo sapien
ttcttctctgtcagatagagggtga

SEQ ID NO: 4732016 - DNA, 25 bp, Homo sapien
aacctcccatgcacaagggctgtat

SEQ ID NO: 4732017 - DNA, 25 bp, Homo sapien
attcatcagaggagtgtcttccact

SEQ ID NO: 4732018 - DNA, 25 bp, Homo sapien
gaggagtgtcttccactccaacctc

SEQ ID NO: 4732019 - DNA, 25 bp, Homo sapien
tccaacctcctgcatcatacaggct

SEQ ID NO: 4732020 - DNA, 25 bp, Homo sapien
tcagaggagtgtcttccactccaac

SEQ ID NO: 4732021 - DNA, 25 bp, Homo sapien
aacagattgacttgcagttgagcac

SEQ ID NO: 4732022 - DNA, 25 bp, Homo sapien
acagattgacttgcagttgagcacc

SEQ ID NO: 4732023 - DNA, 25 bp, Homo sapien
gaacagattgacttgcagttgagca

SEQ ID NO: 4732024 - DNA, 25 bp, Homo sapien
tcccatttgtgccattatcatcaaa

SEQ ID NO: 4732025 - DNA, 25 bp, Homo sapien
ctgttgagattgagtgaccctgaac

SEQ ID NO: 4732026 - DNA, 25 bp, Homo sapien
gctgttgagattgagtgaccctgaa

SEQ ID NO: 4732027 - DNA, 25 bp, Homo sapien
tgttgagattgagtgaccctgaacc

SEQ ID NO: 4732028 - DNA, 25 bp, Homo sapien
tttctggtcataagaactgatttct

SEQ ID NO: 4732029 - DNA, 25 bp, Homo sapien
gagagtcctgcctaagtaatgacag

SEQ ID NO: 4732030 - DNA, 25 bp, Homo sapien
tatttctggtcataagaactgattt

SEQ ID NO: 4732031 - DNA, 25 bp, Homo sapien
gttttcccaggagagtcctgcctaa

SEQ ID NO: 4732032 - DNA, 25 bp, Homo sapien
agcccagaccgacattcatcttgtg

SEQ ID NO: 4732033 - DNA, 25 bp, Homo sapien
caggacctcactaattccacaagag

SEQ ID NO: 4732034 - DNA, 25 bp, Homo sapien
tggtacaaccatatcaggcctgtct

SEQ ID NO: 4732035 - DNA, 25 bp, Homo sapien
ttttgagcgctgaaaagacctttta

SEQ ID NO: 4732036 - DNA, 25 bp, Homo sapien
taagtagttgattcagtgctcccat

SEQ ID NO: 4732037 - DNA, 25 bp, Homo sapien
tctctctgatcagaataatcttaag

SEQ ID NO: 4732038 - DNA, 25 bp, Homo sapien
gctgctgtggtatcagtgttatcca

SEQ ID NO: 4732039 - DNA, 25 bp, Homo sapien
tggtatcagtgttatccatggtggg

SEQ ID NO: 4732040 - DNA, 25 bp, Homo sapien
ttccagtcaatgtgttaagtatctc

SEQ ID NO: 4732041 - DNA, 25 bp, Homo sapien
gtcaatgtgttaagtatctctctct

SEQ ID NO: 4732042 - DNA, 25 bp, Homo sapien
ccaagttctaaagctgctgcttgcc

SEQ ID NO: 4732043 - DNA, 25 bp, Homo sapien
ccttccaagttctaaagctgctgct

SEQ ID NO: 4732044 - DNA, 25 bp, Homo sapien
aggttttatgtgtccttctccaggg

SEQ ID NO: 4732045 - DNA, 25 bp, Homo sapien
tgtatctcctccaagggattcaggg

SEQ ID NO: 4732046 - DNA, 25 bp, Homo sapien
cttcctgtatctcctccaagggatt

SEQ ID NO: 4732047 - DNA, 25 bp, Homo sapien
ggcactgtgccacgacttcctgtat

SEQ ID NO: 4732048 - DNA, 25 bp, Homo sapien
tacacctacattggcaggttgtact

SEQ ID NO: 4732049 - DNA, 25 bp, Homo sapien
tgtactgattcccagtctagcacaa

SEQ ID NO: 4732050 - DNA, 25 bp, Homo sapien
gatttcccttgtagttctacaccta

SEQ ID NO: 4732051 - DNA, 25 bp, Homo sapien
gagggagggacaagtcaagaggctg

SEQ ID NO: 4732052 - DNA, 25 bp, Homo sapien
caacttgctgagacactggttccct

SEQ ID NO: 4732053 - DNA, 25 bp, Homo sapien
tgatgttgtttaagctcccaggagc

SEQ ID NO: 4732054 - DNA, 25 bp, Homo sapien
gacatcaacgtgttagacctcagga

SEQ ID NO: 4732055 - DNA, 25 bp, Homo sapien
gcaaggcactactctgacaatggga

SEQ ID NO: 4732056 - DNA, 25 bp, Homo sapien
ttctaacatgggtcactcacacggc

SEQ ID NO: 4732057 - DNA, 25 bp, Homo sapien
tgggctggcggatctgtttctaaca

SEQ ID NO: 4732058 - DNA, 25 bp, Homo sapien
gcttcggtgggcttagaatcgctca

SEQ ID NO: 4732059 - DNA, 25 bp, Homo sapien
tcaataattcaagagcagcttcggt

SEQ ID NO: 4732060 - DNA, 25 bp, Homo sapien
gaagtgtagatattgcagcccaaga

SEQ ID NO: 4732061 - DNA, 25 bp, Homo sapien
tccccttgcaggataaagtatagct

SEQ ID NO: 4732062 - DNA, 25 bp, Homo sapien
aagtatagctagtccagggcatggg

SEQ ID NO: 4732063 - DNA, 25 bp, Homo sapien
ggtagccatgaacctcttgcaagtg

SEQ ID NO: 4732064 - DNA, 25 bp, Homo sapien
cagtagaagttagacctgcctccca

SEQ ID NO: 4732065 - DNA, 25 bp, Homo sapien
tgagcccatgggtggcactaagaaa

SEQ ID NO: 4732066 - DNA, 25 bp, Homo sapien
tcaggaggcactattaagagatcac

SEQ ID NO: 4732067 - DNA, 25 bp, Homo sapien
gaagatggaccagtaaagagctaga

SEQ ID NO: 4732068 - DNA, 25 bp, Homo sapien
tctttgctcacagaacacaagtggg

SEQ ID NO: 4732069 - DNA, 25 bp, Homo sapien
ctaattgtgctacgttacaaaggaa

SEQ ID NO: 4732070 - DNA, 25 bp, Homo sapien
taaatgccaccctaacatgtcaaga

SEQ ID NO: 4732071 - DNA, 25 bp, Homo sapien
gaacaggagacaagcagtaaatgcc

SEQ ID NO: 4732072 - DNA, 25 bp, Homo sapien
aaaatgtcctgtaggagcttactgc

SEQ ID NO: 4732073 - DNA, 25 bp, Homo sapien
gttgtttataatcggttgagctggg

SEQ ID NO: 4732074 - DNA, 25 bp, Homo sapien
tttaaaatgtcctgtaggagcttac

SEQ ID NO: 4732075 - DNA, 25 bp, Homo sapien
cccacaatctttcggcagttgttta

SEQ ID NO: 4732076 - DNA, 25 bp, Homo sapien
gattaccaagagaactgtcaactgc

SEQ ID NO: 4732077 - DNA, 25 bp, Homo sapien
ttgcatgtacatgacgtatcctggg

SEQ ID NO: 4732078 - DNA, 25 bp, Homo sapien
tgtaacctgtcacatgagctctggt

SEQ ID NO: 4732079 - DNA, 25 bp, Homo sapien
gaagcaccaggttcagacataagat

SEQ ID NO: 4732080 - DNA, 25 bp, Homo sapien
ctccagactgcacaacagtgagacc

SEQ ID NO: 4732081 - DNA, 25 bp, Homo sapien
aggtttcagtgagcacacatcgtgc

SEQ ID NO: 4732082 - DNA, 25 bp, Homo sapien
gaggtttcagtgagcacacatcgtg

SEQ ID NO: 4732083 - DNA, 25 bp, Homo sapien
ttgcactccagactgcacaacagtg

SEQ ID NO: 4732084 - DNA, 25 bp, Homo sapien
ctgaacagcgttgcctttgtaaaac

SEQ ID NO: 4732085 - DNA, 25 bp, Homo sapien
taactgaacagcgttgcctttgtaa

SEQ ID NO: 4732086 - DNA, 25 bp, Homo sapien
aaaattaactgaacagcgttgcctt

SEQ ID NO: 4732087 - DNA, 25 bp, Homo sapien
aattaactgaacagcgttgcctttg

SEQ ID NO: 4732088 - DNA, 25 bp, Homo sapien
aaagagatcctataacttgatacga

SEQ ID NO: 4732089 - DNA, 25 bp, Homo sapien
gctcagatcatagcctcgaggcaga

SEQ ID NO: 4732090 - DNA, 25 bp, Homo sapien
gatgcacatggactggaacagcacc

SEQ ID NO: 4732091 - DNA, 25 bp, Homo sapien
tatgggcagtaaggttcagacccct

SEQ ID NO: 4732092 - DNA, 25 bp, Homo sapien
gcttgtaagaccatagtgttccaga

SEQ ID NO: 4732093 - DNA, 25 bp, Homo sapien
actcaactttgaagcataatggaca

SEQ ID NO: 4732094 - DNA, 25 bp, Homo sapien
ttctgtctacgtaagaaacttcaaa

SEQ ID NO: 4732095 - DNA, 25 bp, Homo sapien
catactaaaagccatacaagacgaa

SEQ ID NO: 4732096 - DNA, 25 bp, Homo sapien
ttctgaatgcaaccacacaatcgag

SEQ ID NO: 4732097 - DNA, 25 bp, Homo sapien
tgtaccaatcactgtaagaagatac

SEQ ID NO: 4732098 - DNA, 25 bp, Homo sapien
tatctaataactgtaccaatcactg

SEQ ID NO: 4732099 - DNA, 25 bp, Homo sapien
gggaagtattagatcacccatgacg

SEQ ID NO: 4732100 - DNA, 25 bp, Homo sapien
gacgtactgcaaaggtgttacacct

SEQ ID NO: 4732101 - DNA, 25 bp, Homo sapien
tacaaatgtcctttgagggcactca

SEQ ID NO: 4732102 - DNA, 25 bp, Homo sapien
tgcagcataatccatccgagggtct

SEQ ID NO: 4732103 - DNA, 25 bp, Homo sapien
gaatgccaccaagtgactctggaag

SEQ ID NO: 4732104 - DNA, 25 bp, Homo sapien
tgagtgtacaggctcgaatgccacc

SEQ ID NO: 4732105 - DNA, 25 bp, Homo sapien
gatcaaagccttgcaataccaccga

SEQ ID NO: 4732106 - DNA, 25 bp, Homo sapien
taccaccgaactgtgagtattgctg

SEQ ID NO: 4732107 - DNA, 25 bp, Homo sapien
catctccatcacctggtaccagggt

SEQ ID NO: 4732108 - DNA, 25 bp, Homo sapien
aaagcgtgtggttcctgccttacaa

SEQ ID NO: 4732109 - DNA, 25 bp, Homo sapien
cgccgttaccaagggacactttcat

SEQ ID NO: 4732110 - DNA, 25 bp, Homo sapien
gcagagacgcccatttcgccgttac

SEQ ID NO: 4732111 - DNA, 25 bp, Homo sapien
catttcgccgttaccaagggacact

SEQ ID NO: 4732112 - DNA, 25 bp, Homo sapien
agacgcccatttcgccgttaccaag

SEQ ID NO: 4732113 - DNA, 25 bp, Homo sapien
ttttacaggtaacgaggtgtccaga

SEQ ID NO: 4732114 - DNA, 25 bp, Homo sapien
cacaaagggctgtggacctcaaatc

SEQ ID NO: 4732115 - DNA, 25 bp, Homo sapien
ttatcaagggaaggcagtcactgcg

SEQ ID NO: 4732116 - DNA, 25 bp, Homo sapien
gaaaatcaccctgtagcaggaccac

SEQ ID NO: 4732117 - DNA, 25 bp, Homo sapien
gaaggcggttaaatgacctggttca

SEQ ID NO: 4732118 - DNA, 25 bp, Homo sapien
gccaccggcctgtctttgagcaagg

SEQ ID NO: 4732119 - DNA, 25 bp, Homo sapien
ctgtacctagagtgtcgcagcggcc

SEQ ID NO: 4732120 - DNA, 25 bp, Homo sapien
tcagcagttccgcttcgggcaagga

SEQ ID NO: 4732121 - DNA, 25 bp, Homo sapien
caccagggatgctaattgtgcaaaa

SEQ ID NO: 4732122 - DNA, 25 bp, Homo sapien
caaggatggccatcgtagtaaaggc

SEQ ID NO: 4732123 - DNA, 25 bp, Homo sapien
taaaggccatctctgaccagatggg

SEQ ID NO: 4732124 - DNA, 25 bp, Homo sapien
ttatcacattcttcgtacaccaggg

SEQ ID NO: 4732125 - DNA, 25 bp, Homo sapien
tgggtcacagacagacctcctatca

SEQ ID NO: 4732126 - DNA, 25 bp, Homo sapien
tcctatcacctgcataagtgcagtg

SEQ ID NO: 4732127 - DNA, 25 bp, Homo sapien
tcagtaaagagacgggcctgaatag

SEQ ID NO: 4732128 - DNA, 25 bp, Homo sapien
agaactcaggtaccccaaggattct

SEQ ID NO: 4732129 - DNA, 25 bp, Homo sapien
gatttctgctctgacaacctcccag

SEQ ID NO: 4732130 - DNA, 25 bp, Homo sapien
gcaagtttcttgatgaagagaagga

SEQ ID NO: 4732131 - DNA, 25 bp, Homo sapien
agggctgtactttttctctgtcagg

SEQ ID NO: 4732132 - DNA, 25 bp, Homo sapien
caggtagagagtgattctttggaag

SEQ ID NO: 4732133 - DNA, 25 bp, Homo sapien
tctggaactggttgccatcaaactc

SEQ ID NO: 4732134 - DNA, 25 bp, Homo sapien
ggaactggttgccatcaaactcctc

SEQ ID NO: 4732135 - DNA, 25 bp, Homo sapien
ctggaactggttgccatcaaactcc

SEQ ID NO: 4732136 - DNA, 25 bp, Homo sapien
tggaactggttgccatcaaactcct

SEQ ID NO: 4732137 - DNA, 25 bp, Homo sapien
ggagcatcatggtcctcctgtgacc

SEQ ID NO: 4732138 - DNA, 25 bp, Homo sapien
gagcatcatggtcctcctgtgaccc

SEQ ID NO: 4732139 - DNA, 25 bp, Homo sapien
aggagcatcatggtcctcctgtgac

SEQ ID NO: 4732140 - DNA, 25 bp, Homo sapien
gcatcatggtcctcctgtgacccag

SEQ ID NO: 4732141 - DNA, 25 bp, Homo sapien
gaattgtcttcgtattgttggtctt

SEQ ID NO: 4732142 - DNA, 25 bp, Homo sapien
ttgtcttcgtattgttggtctttaa

SEQ ID NO: 4732143 - DNA, 25 bp, Homo sapien
aagaattgtcttcgtattgttggtc

SEQ ID NO: 4732144 - DNA, 25 bp, Homo sapien
tcaagaattgtcttcgtattgttgg

SEQ ID NO: 4732145 - DNA, 25 bp, Homo sapien
ctgcattggtcccatgaataatttt

SEQ ID NO: 4732146 - DNA, 25 bp, Homo sapien
tgcattggtcccatgaataattttc

SEQ ID NO: 4732147 - DNA, 25 bp, Homo sapien
gcattggtcccatgaataattttcc

SEQ ID NO: 4732148 - DNA, 25 bp, Homo sapien
gggtggaagtaaggccacacgcaca

SEQ ID NO: 4732149 - DNA, 25 bp, Homo sapien
ggtggaagtaaggccacacgcacac

SEQ ID NO: 4732150 - DNA, 25 bp, Homo sapien
tggaagtaaggccacacgcacactc

SEQ ID NO: 4732151 - DNA, 25 bp, Homo sapien
agggtggaagtaaggccacacgcac

SEQ ID NO: 4732152 - DNA, 25 bp, Homo sapien
aaagagttaatgtgccttcaaacag

SEQ ID NO: 4732153 - DNA, 25 bp, Homo sapien
agatgggatggctctcacctccatg

SEQ ID NO: 4732154 - DNA, 25 bp, Homo sapien
caaaagagttaatgtgccttcaaac

SEQ ID NO: 4732155 - DNA, 25 bp, Homo sapien
aaaagagttaatgtgccttcaaaca

SEQ ID NO: 4732156 - DNA, 25 bp, Homo sapien
cttttctctccccagggttgcacat

SEQ ID NO: 4732157 - DNA, 25 bp, Homo sapien
ttttgtggtaaagaggttgaagatc

SEQ ID NO: 4732158 - DNA, 25 bp, Homo sapien
atcttttgtggtaaagaggttgaag

SEQ ID NO: 4732159 - DNA, 25 bp, Homo sapien
tgtggtaaagaggttgaagatctgc

SEQ ID NO: 4732160 - DNA, 25 bp, Homo sapien
tggtaaagaggttgaagatctgctg

SEQ ID NO: 4732161 - DNA, 25 bp, Homo sapien
tgctgagatgggtgactctgaacct

SEQ ID NO: 4732162 - DNA, 25 bp, Homo sapien
ttgctgagatgggtgactctgaacc

SEQ ID NO: 4732163 - DNA, 25 bp, Homo sapien
ctgagatgggtgactctgaaccttg

SEQ ID NO: 4732164 - DNA, 25 bp, Homo sapien
gctgagatgggtgactctgaacctt

SEQ ID NO: 4732165 - DNA, 25 bp, Homo sapien
tagggaacatactgatttccacttt

SEQ ID NO: 4732166 - DNA, 25 bp, Homo sapien
tactgatttccactttcttaatgct

SEQ ID NO: 4732167 - DNA, 25 bp, Homo sapien
ttaatgcttctggaccactttccat

SEQ ID NO: 4732168 - DNA, 25 bp, Homo sapien
ccactttcttaatgcttctggacca

SEQ ID NO: 4732169 - DNA, 25 bp, Homo sapien
aggacacaggtcctaagaattttat

SEQ ID NO: 4732170 - DNA, 25 bp, Homo sapien
gcaggacacaggtcctaagaatttt

SEQ ID NO: 4732171 - DNA, 25 bp, Homo sapien
atgcaggacacaggtcctaagaatt

SEQ ID NO: 4732172 - DNA, 25 bp, Homo sapien
tgcaggacacaggtcctaagaattt

SEQ ID NO: 4732173 - DNA, 25 bp, Homo sapien
ggactagtgccttaagagctgaata

SEQ ID NO: 4732174 - DNA, 25 bp, Homo sapien
taatcaggttgcacaattaggcttg

SEQ ID NO: 4732175 - DNA, 25 bp, Homo sapien
gataatggatcagtcagcatggtcc

SEQ ID NO: 4732176 - DNA, 25 bp, Homo sapien
cataaaaaggtgagctggcatacga

SEQ ID NO: 4732177 - DNA, 25 bp, Homo sapien
ctttcttgcaagtttgttgacaaag

SEQ ID NO: 4732178 - DNA, 25 bp, Homo sapien
tcttgcaagtttgttgacaaagaaa

SEQ ID NO: 4732179 - DNA, 25 bp, Homo sapien
tgcaagtttgttgacaaagaaaaag

SEQ ID NO: 4732180 - DNA, 25 bp, Homo sapien
tttcttgcaagtttgttgacaaaga

SEQ ID NO: 4732181 - DNA, 25 bp, Homo sapien
tttggaagtatttcctcacagccag

SEQ ID NO: 4732182 - DNA, 25 bp, Homo sapien
cagatagagagtgattctttggaag

SEQ ID NO: 4732183 - DNA, 25 bp, Homo sapien
agtatttcctcacagccagaatgga

SEQ ID NO: 4732184 - DNA, 25 bp, Homo sapien
ttcttctctttcagatagagagtga

SEQ ID NO: 4732185 - DNA, 25 bp, Homo sapien
cagccttttggaactggttgccaaa

SEQ ID NO: 4732186 - DNA, 25 bp, Homo sapien
caggagggccaccagtaaagcaaag

SEQ ID NO: 4732187 - DNA, 25 bp, Homo sapien
agatgctgctagactggttgaaatg

SEQ ID NO: 4732188 - DNA, 25 bp, Homo sapien
tgaaatgggtgagcctaaaccttag

SEQ ID NO: 4732189 - DNA, 25 bp, Homo sapien
tgagcctaaaccttaggctccaggt

SEQ ID NO: 4732190 - DNA, 25 bp, Homo sapien
ctagactggttgaaatgggtgagcc

SEQ ID NO: 4732191 - DNA, 25 bp, Homo sapien
ttttgaattcaactagcagatggga

SEQ ID NO: 4732192 - DNA, 25 bp, Homo sapien
ggcaatggtggcaggtgtacacaaa

SEQ ID NO: 4732193 - DNA, 25 bp, Homo sapien
tgaatgcttcatagaaagcccttgc

SEQ ID NO: 4732194 - DNA, 25 bp, Homo sapien
tgggatgacattttgaaccaagtgg

SEQ ID NO: 4732195 - DNA, 25 bp, Homo sapien
tctccgcagaaatggccctgaatct

SEQ ID NO: 4732196 - DNA, 25 bp, Homo sapien
ggtggacagcactttgtaagctcgc

SEQ ID NO: 4732197 - DNA, 25 bp, Homo sapien
cactggcacattggtaaaacggtct

SEQ ID NO: 4732198 - DNA, 25 bp, Homo sapien
taacactgactacggcacgatctga

SEQ ID NO: 4732199 - DNA, 25 bp, Homo sapien
tgagaaaaatgtctcgggggaggcg

SEQ ID NO: 4732200 - DNA, 25 bp, Homo sapien
atgagaaaaatgtctcgggggaggc

SEQ ID NO: 4732201 - DNA, 25 bp, Homo sapien
gctggtgggtccgttaccgctggtc

SEQ ID NO: 4732202 - DNA, 25 bp, Homo sapien
ttactcgctgctcacgaggcctgcg

SEQ ID NO: 4732203 - DNA, 25 bp, Homo sapien
tcagagccgtgaaaggcggcgttta

SEQ ID NO: 4732204 - DNA, 25 bp, Homo sapien
caagcgcgggtctccttgaggaagg

SEQ ID NO: 4732205 - DNA, 25 bp, Homo sapien
caacatatagagccacctgggccat

SEQ ID NO: 4732206 - DNA, 25 bp, Homo sapien
gcaacatatagagccacctgggcca

SEQ ID NO: 4732207 - DNA, 25 bp, Homo sapien
agcaacatatagagccacctgggcc

SEQ ID NO: 4732208 - DNA, 25 bp, Homo sapien
gagcaacatatagagccacctgggc

SEQ ID NO: 4732209 - DNA, 25 bp, Homo sapien
ggtggcctgagccttttggaatttg

SEQ ID NO: 4732210 - DNA, 25 bp, Homo sapien
tcagccctttgtgctgaaaacattg

SEQ ID NO: 4732211 - DNA, 25 bp, Homo sapien
tgtgctgaaaacattggagatctgc

SEQ ID NO: 4732212 - DNA, 25 bp, Homo sapien
aaaacattggagatctgctggatca

SEQ ID NO: 4732213 - DNA, 25 bp, Homo sapien
cgaagctgcacaaagttggcgcgat

SEQ ID NO: 4732214 - DNA, 25 bp, Homo sapien
ataagccgcgacgacgtttccctgg

SEQ ID NO: 4732215 - DNA, 25 bp, Homo sapien
caaagttggcgcgataagccgcgac

SEQ ID NO: 4732216 - DNA, 25 bp, Homo sapien
gctgcgggacgccccgaaactcaaa

SEQ ID NO: 4732217 - DNA, 25 bp, Homo sapien
gtcatcatgctcatctccagcgctg

SEQ ID NO: 4732218 - DNA, 25 bp, Homo sapien
agtcatcatgctcatctccagcgct

SEQ ID NO: 4732219 - DNA, 25 bp, Homo sapien
atcatgctcatctccagcgctgcct

SEQ ID NO: 4732220 - DNA, 25 bp, Homo sapien
tcatcatgctcatctccagcgctgc

SEQ ID NO: 4732221 - DNA, 25 bp, Homo sapien
ttggcagggacaagtcttggagcca

SEQ ID NO: 4732222 - DNA, 25 bp, Homo sapien
tggcagggacaagtcttggagccat

SEQ ID NO: 4732223 - DNA, 25 bp, Homo sapien
ggcagggacaagtcttggagccatg

SEQ ID NO: 4732224 - DNA, 25 bp, Homo sapien
gcagggacaagtcttggagccatgg

SEQ ID NO: 4732225 - DNA, 25 bp, Homo sapien
tttctaggaaacgaggaactatcac

SEQ ID NO: 4732226 - DNA, 25 bp, Homo sapien
ttttctaggaaacgaggaactatca

SEQ ID NO: 4732227 - DNA, 25 bp, Homo sapien
gagacatccgtttccaccgtcagct

SEQ ID NO: 4732228 - DNA, 25 bp, Homo sapien
gctgtttggcataagatcctcctca

SEQ ID NO: 4732229 - DNA, 25 bp, Homo sapien
gtctggaacgactgcagctgacaaa

SEQ ID NO: 4732230 - DNA, 25 bp, Homo sapien
agggacgacacactggctgtttggc

SEQ ID NO: 4732231 - DNA, 25 bp, Homo sapien
tccatggcatcggtaacactgacac

SEQ ID NO: 4732232 - DNA, 25 bp, Homo sapien
tggagttctccccatgcctgcatga

SEQ ID NO: 4732233 - DNA, 25 bp, Homo sapien
ggttagtccgttcccagatgcaaac

SEQ ID NO: 4732234 - DNA, 25 bp, Homo sapien
cagcagcctgcagaatattgggaag

SEQ ID NO: 4732235 - DNA, 25 bp, Homo sapien
tcactggacacaatcagtacacaag

SEQ ID NO: 4732236 - DNA, 25 bp, Homo sapien
tcagcactcacaactcaaccaatgg

SEQ ID NO: 4732237 - DNA, 25 bp, Homo sapien
gggataaacatctaagcatcacaat

SEQ ID NO: 4732238 - DNA, 25 bp, Homo sapien
cacaagattaagtcctgaatgggct

SEQ ID NO: 4732239 - DNA, 25 bp, Homo sapien
gaaaaggagttctaaagtcatcagg

SEQ ID NO: 4732240 - DNA, 25 bp, Homo sapien
gggaagcataaccacatgaacctga

SEQ ID NO: 4732241 - DNA, 25 bp, Homo sapien
tgttcattgatctaagcttgagccc

SEQ ID NO: 4732242 - DNA, 25 bp, Homo sapien
tcatcaggatgtggtgagcctgcat

SEQ ID NO: 4732243 - DNA, 25 bp, Homo sapien
ctgaatacagaaacccatagggccc

SEQ ID NO: 4732244 - DNA, 25 bp, Homo sapien
ccctattgtgaagtgcagatgcgaa

SEQ ID NO: 4732245 - DNA, 25 bp, Homo sapien
cattggattctcaaaagagcaggaa

SEQ ID NO: 4732246 - DNA, 25 bp, Homo sapien
tcttcatagaacctaggatccaagg

SEQ ID NO: 4732247 - DNA, 25 bp, Homo sapien
tatgatgtgttacagcaggtcttca

SEQ ID NO: 4732248 - DNA, 25 bp, Homo sapien
cacacaaagcgctcctctgctgcat

SEQ ID NO: 4732249 - DNA, 25 bp, Homo sapien
acttctcacacaaagcgctcctctg

SEQ ID NO: 4732250 - DNA, 25 bp, Homo sapien
actccacactttacgtcatcagcag

SEQ ID NO: 4732251 - DNA, 25 bp, Homo sapien
ctatgtacatttaacttctccttcc

SEQ ID NO: 4732252 - DNA, 25 bp, Homo sapien
ttccaatttcatctagcctctttct

SEQ ID NO: 4732253 - DNA, 25 bp, Homo sapien
tctttctcggatactcattcctccg

SEQ ID NO: 4732254 - DNA, 25 bp, Homo sapien
tagcctctttctcggatactcattc

SEQ ID NO: 4732255 - DNA, 25 bp, Homo sapien
tcatctagcctctttctcggatact

SEQ ID NO: 4732256 - DNA, 25 bp, Homo sapien
cacaggtggagtaaggggacttcac

SEQ ID NO: 4732257 - DNA, 25 bp, Homo sapien
ggccttagccaataacaggaggctg

SEQ ID NO: 4732258 - DNA, 25 bp, Homo sapien
ggtggtctgaaactgggaagactct

SEQ ID NO: 4732259 - DNA, 25 bp, Homo sapien
gaaactgggaagactcttcacaggt

SEQ ID NO: 4732260 - DNA, 25 bp, Homo sapien
gcattgctatcgtggaagttttgat

SEQ ID NO: 4732261 - DNA, 25 bp, Homo sapien
caatcagcattgctatcgtggaagt

SEQ ID NO: 4732262 - DNA, 25 bp, Homo sapien
atcagcattgctatcgtggaagttt

SEQ ID NO: 4732263 - DNA, 25 bp, Homo sapien
cagcattgctatcgtggaagttttg

SEQ ID NO: 4732264 - DNA, 25 bp, Homo sapien
caaagcaatgtgattgtactataaa

SEQ ID NO: 4732265 - DNA, 25 bp, Homo sapien
caatatgcacaatcttaaaacacag

SEQ ID NO: 4732266 - DNA, 25 bp, Homo sapien
aattgtattaccactctatgaagaa

SEQ ID NO: 4732267 - DNA, 25 bp, Homo sapien
tgaagaatcatgtctggagaagtcc

SEQ ID NO: 4732268 - DNA, 25 bp, Homo sapien
ctcgggcttctaaactctgtagtaa

SEQ ID NO: 4732269 - DNA, 25 bp, Homo sapien
ttcaagggtcttccttgtttgctca

SEQ ID NO: 4732270 - DNA, 25 bp, Homo sapien
tcgggcttctaaactctgtagtaag

SEQ ID NO: 4732271 - DNA, 25 bp, Homo sapien
ctcttgcttcatgtcgttcaagggt

SEQ ID NO: 4732272 - DNA, 25 bp, Homo sapien
tcatggatccttcggaagtacattt

SEQ ID NO: 4732273 - DNA, 25 bp, Homo sapien
ctggttttccaggtaatcatggatc

SEQ ID NO: 4732274 - DNA, 25 bp, Homo sapien
taatcatggatccttcggaagtaca

SEQ ID NO: 4732275 - DNA, 25 bp, Homo sapien
aggtgctgtagtcctggttttccag

SEQ ID NO: 4732276 - DNA, 25 bp, Homo sapien
tatcactacccaaagtaccacttag

SEQ ID NO: 4732277 - DNA, 25 bp, Homo sapien
acactgctgaattgacaaggtttgc

SEQ ID NO: 4732278 - DNA, 25 bp, Homo sapien
tccagtcccatgagtgcttctaggt

SEQ ID NO: 4732279 - DNA, 25 bp, Homo sapien
tttcctgtgtggtagacactgctga

SEQ ID NO: 4732280 - DNA, 25 bp, Homo sapien
ctagagagaagatagtggtagaggc

SEQ ID NO: 4732281 - DNA, 25 bp, Homo sapien
cagttccaaagaagtgcttgataat

SEQ ID NO: 4732282 - DNA, 25 bp, Homo sapien
agagaagatagtggtagaggccagc

SEQ ID NO: 4732283 - DNA, 25 bp, Homo sapien
gttccaaagaagtgcttgataatca

SEQ ID NO: 4732284 - DNA, 25 bp, Homo sapien
tgcatagacttagggaaattccagc

SEQ ID NO: 4732285 - DNA, 25 bp, Homo sapien
ggtcaaatatgctacttatccctgc

SEQ ID NO: 4732286 - DNA, 25 bp, Homo sapien
tcatggagtaaaacttaccaaaggc

SEQ ID NO: 4732287 - DNA, 25 bp, Homo sapien
tccttgaggcaattacagactagtc

SEQ ID NO: 4732288 - DNA, 25 bp, Homo sapien
cagaggtctaacagagcagaatagc

SEQ ID NO: 4732289 - DNA, 25 bp, Homo sapien
tattatggtcctagcattgctccag

SEQ ID NO: 4732290 - DNA, 25 bp, Homo sapien
tataacatgatactcagcacatggg

SEQ ID NO: 4732291 - DNA, 25 bp, Homo sapien
gagggtagcccctattaatcagtca

SEQ ID NO: 4732292 - DNA, 25 bp, Homo sapien
gtttgctgagcaacgaagtctaact

SEQ ID NO: 4732293 - DNA, 25 bp, Homo sapien
ctggtccagagattaatgagtttgc

SEQ ID NO: 4732294 - DNA, 25 bp, Homo sapien
cgaagtctaactacctggttacaca

SEQ ID NO: 4732295 - DNA, 25 bp, Homo sapien
gattaatgagtttgctgagcaacga

SEQ ID NO: 4732296 - DNA, 25 bp, Homo sapien
gacttaagaacgcaccagtaatgag

SEQ ID NO: 4732297 - DNA, 25 bp, Homo sapien
taaagagttaggtttgcaggcccag

SEQ ID NO: 4732298 - DNA, 25 bp, Homo sapien
tcttgagggtcctatggagtcacta

SEQ ID NO: 4732299 - DNA, 25 bp, Homo sapien
tgaggaatgtgaactaaccaggaga

SEQ ID NO: 4732300 - DNA, 25 bp, Homo sapien
agcaatacacgaaggactggcatgc

SEQ ID NO: 4732301 - DNA, 25 bp, Homo sapien
acagcaatacacgaaggactggcat

SEQ ID NO: 4732302 - DNA, 25 bp, Homo sapien
gaaggactggcatgcaggtggccat

SEQ ID NO: 4732303 - DNA, 25 bp, Homo sapien
acgaaggactggcatgcaggtggcc

SEQ ID NO: 4732304 - DNA, 25 bp, Homo sapien
gttggcatagcaggttcccagttca

SEQ ID NO: 4732305 - DNA, 25 bp, Homo sapien
gcatagcaggttcccagttcaacag

SEQ ID NO: 4732306 - DNA, 25 bp, Homo sapien
ggaaagatggcaatatgttggcata

SEQ ID NO: 4732307 - DNA, 25 bp, Homo sapien
gatggcaatatgttggcatagcagg

SEQ ID NO: 4732308 - DNA, 25 bp, Homo sapien
aacaaaattctgaattgagaagatt

SEQ ID NO: 4732309 - DNA, 25 bp, Homo sapien
tgatattcataattaagaggcaggt

SEQ ID NO: 4732310 - DNA, 25 bp, Homo sapien
aggtatatggtacatatttgaaaac

SEQ ID NO: 4732311 - DNA, 25 bp, Homo sapien
tgaataaagcttctccaataaactc

SEQ ID NO: 4732312 - DNA, 25 bp, Homo sapien
gccggggacgcgcgtcttccttctc

SEQ ID NO: 4732313 - DNA, 25 bp, Homo sapien
caggcggtcccccagccggcttcgg

SEQ ID NO: 4732314 - DNA, 25 bp, Homo sapien
caagcgcacacgaaggggccgcttc

SEQ ID NO: 4732315 - DNA, 25 bp, Homo sapien
agaccaggcggctcacggaacaccg

SEQ ID NO: 4732316 - DNA, 25 bp, Homo sapien
tgggaggccgccctggtccccgaga

SEQ ID NO: 4732317 - DNA, 25 bp, Homo sapien
ctgggaggccgccctggtccccgag

SEQ ID NO: 4732318 - DNA, 25 bp, Homo sapien
tcctcctgggaggccgccctggtcc

SEQ ID NO: 4732319 - DNA, 25 bp, Homo sapien
caagctcctcctgggaggccgccct

SEQ ID NO: 4732320 - DNA, 25 bp, Homo sapien
cccatccgatgaatgactagttaaa

SEQ ID NO: 4732321 - DNA, 25 bp, Homo sapien
aaagccagcaatgtttggaaccaca

SEQ ID NO: 4732322 - DNA, 25 bp, Homo sapien
aatgtctctgggctgttggttttaa

SEQ ID NO: 4732323 - DNA, 25 bp, Homo sapien
gaaccacatcaaggattccaatcca

SEQ ID NO: 4732324 - DNA, 25 bp, Homo sapien
tttgttacatcagggctagtggata

SEQ ID NO: 4732325 - DNA, 25 bp, Homo sapien
tcagggctagtggataatgctaaac

SEQ ID NO: 4732326 - DNA, 25 bp, Homo sapien
tggataatgctaaactaacactcat

SEQ ID NO: 4732327 - DNA, 25 bp, Homo sapien
ctagtggataatgctaaactaacac

SEQ ID NO: 4732328 - DNA, 25 bp, Homo sapien
ggcttccttgtatttagaactccag

SEQ ID NO: 4732329 - DNA, 25 bp, Homo sapien
gaactccagcccctctttatgcaag

SEQ ID NO: 4732330 - DNA, 25 bp, Homo sapien
gcaaggaccttccatacctactttg

SEQ ID NO: 4732331 - DNA, 25 bp, Homo sapien
tgagtcctccgctttttgtctgcct

SEQ ID NO: 4732332 - DNA, 25 bp, Homo sapien
tctctctcgtccaggggacggtctg

SEQ ID NO: 4732333 - DNA, 25 bp, Homo sapien
gagggcatggtctggactctacaca

SEQ ID NO: 4732334 - DNA, 25 bp, Homo sapien
gacggtctggttccagagggcatgg

SEQ ID NO: 4732335 - DNA, 25 bp, Homo sapien
gtatcgtggctagtaaaatatatgc

SEQ ID NO: 4732336 - DNA, 25 bp, Homo sapien
tacacagagcactgtgcataattga

SEQ ID NO: 4732337 - DNA, 25 bp, Homo sapien
gagcactgtgcataattgatgaatc

SEQ ID NO: 4732338 - DNA, 25 bp, Homo sapien
gcactgtgcataattgatgaatcaa

SEQ ID NO: 4732339 - DNA, 25 bp, Homo sapien
cttacacagagcactgtgcataatt

SEQ ID NO: 4732340 - DNA, 25 bp, Homo sapien
gtcttcctcataaggcgttggagtt

SEQ ID NO: 4732341 - DNA, 25 bp, Homo sapien
cgttggagttgatgggatggcagga

SEQ ID NO: 4732342 - DNA, 25 bp, Homo sapien
aggcgttggagttgatgggatggca

SEQ ID NO: 4732343 - DNA, 25 bp, Homo sapien
cctcataaggcgttggagttgatgg

SEQ ID NO: 4732344 - DNA, 25 bp, Homo sapien
gaagctcttgtagcccctgaataaa

SEQ ID NO: 4732345 - DNA, 25 bp, Homo sapien
tatctgtcgaagctaagtcatggag

SEQ ID NO: 4732346 - DNA, 25 bp, Homo sapien
tattggtcaaggcaaagtaacgact

SEQ ID NO: 4732347 - DNA, 25 bp, Homo sapien
caagccaggctttttagggtattca

SEQ ID NO: 4732348 - DNA, 25 bp, Homo sapien
aacagctggccgctaaagctgccag

SEQ ID NO: 4732349 - DNA, 25 bp, Homo sapien
atggtccgaaccaagccgactgctg

SEQ ID NO: 4732350 - DNA, 25 bp, Homo sapien
ttgtgtgaaagagaatggtccgaac

SEQ ID NO: 4732351 - DNA, 25 bp, Homo sapien
gccaatggggtgaagaatacgcgtc

SEQ ID NO: 4732352 - DNA, 25 bp, Homo sapien
gaaggtgctaacgtgtgtgccatcc

SEQ ID NO: 4732353 - DNA, 25 bp, Homo sapien
tcaaaacgacttgaggtttcagagc

SEQ ID NO: 4732354 - DNA, 25 bp, Homo sapien
tgagcttctcatccagaaactgcct

SEQ ID NO: 4732355 - DNA, 25 bp, Homo sapien
cagccattagtgcttttcaggaggc

SEQ ID NO: 4732356 - DNA, 25 bp, Homo sapien
ctttatactgggagtaataattgaa

SEQ ID NO: 4732357 - DNA, 25 bp, Homo sapien
tttatactgggagtaataattgaaa

SEQ ID NO: 4732358 - DNA, 25 bp, Homo sapien
cactttgatagatggcttttcccat

SEQ ID NO: 4732359 - DNA, 25 bp, Homo sapien
tcagaaactcaggaggttggatcca

SEQ ID NO: 4732360 - DNA, 25 bp, Homo sapien
tgacgcatgcccaaactgtaagctt

SEQ ID NO: 4732361 - DNA, 25 bp, Homo sapien
aactttttaaactctggatgccctg

SEQ ID NO: 4732362 - DNA, 25 bp, Homo sapien
tgggtaagtctacaagccttctaac

SEQ ID NO: 4732363 - DNA, 25 bp, Homo sapien
tcggtaaccacagtaaggatgaagc

SEQ ID NO: 4732364 - DNA, 25 bp, Homo sapien
cagtaaggatgaagcagctcaacca

SEQ ID NO: 4732365 - DNA, 25 bp, Homo sapien
aggtatctcggtaaccacagtaagg

SEQ ID NO: 4732366 - DNA, 25 bp, Homo sapien
taaccacagtaaggatgaagcagct

SEQ ID NO: 4732367 - DNA, 25 bp, Homo sapien
ttttgttcctgttgctgatctcatg

SEQ ID NO: 4732368 - DNA, 25 bp, Homo sapien
tgcgagccaacattcctgtgaggtg

SEQ ID NO: 4732369 - DNA, 25 bp, Homo sapien
ggtggtatccacaaaggagctcgtt

SEQ ID NO: 4732370 - DNA, 25 bp, Homo sapien
tggctttcagctatattcaccaggg

SEQ ID NO: 4732371 - DNA, 25 bp, Homo sapien
ttcagtgcctcaagtgggctcctgg

SEQ ID NO: 4732372 - DNA, 25 bp, Homo sapien
ctctccatatcagggcaaagggcag

SEQ ID NO: 4732373 - DNA, 25 bp, Homo sapien
ggacggacagtccttcctcttgagt

SEQ ID NO: 4732374 - DNA, 25 bp, Homo sapien
cggccttaggccatgcctggaggca

SEQ ID NO: 4732375 - DNA, 25 bp, Homo sapien
aggtaaaattaaagctctcttgcca

SEQ ID NO: 4732376 - DNA, 25 bp, Homo sapien
ttcagttgcactctgctatgtttcc

SEQ ID NO: 4732377 - DNA, 25 bp, Homo sapien
tattcagttgcactctgctatgttt

SEQ ID NO: 4732378 - DNA, 25 bp, Homo sapien
gtaaaattaaagctctcttgccaga

SEQ ID NO: 4732379 - DNA, 25 bp, Homo sapien
gtactcattaggtggagcagcagtg

SEQ ID NO: 4732380 - DNA, 25 bp, Homo sapien
tcaccagtactcattaggtggagca

SEQ ID NO: 4732381 - DNA, 25 bp, Homo sapien
taattttgctttgtcgctctttgac

SEQ ID NO: 4732382 - DNA, 25 bp, Homo sapien
gctctttgacagtccagaaacaaca

SEQ ID NO: 4732383 - DNA, 25 bp, Homo sapien
ggtttaaagctctgtgccgctatca

SEQ ID NO: 4732384 - DNA, 25 bp, Homo sapien
aaatctttcaggtttaaagctctgt

SEQ ID NO: 4732385 - DNA, 25 bp, Homo sapien
gctctgtgccgctatcattttaagc

SEQ ID NO: 4732386 - DNA, 25 bp, Homo sapien
tcaggtttaaagctctgtgccgcta

SEQ ID NO: 4732387 - DNA, 25 bp, Homo sapien
attagtttgacggtatatttgagct

SEQ ID NO: 4732388 - DNA, 25 bp, Homo sapien
ctgcctcactgatcaaagggttggg

SEQ ID NO: 4732389 - DNA, 25 bp, Homo sapien
tgaatttgagggacagagctcacat

SEQ ID NO: 4732390 - DNA, 25 bp, Homo sapien
ggcactgacaaactggtcacactcc

SEQ ID NO: 4732391 - DNA, 25 bp, Homo sapien
tcattccagtgttaacctgaggagc

SEQ ID NO: 4732392 - DNA, 25 bp, Homo sapien
tcctttttcctgtcaggagatctca

SEQ ID NO: 4732393 - DNA, 25 bp, Homo sapien
ccagtgttaacctgaggagcctgca

SEQ ID NO: 4732394 - DNA, 25 bp, Homo sapien
agtgttcctgtgctgtggagaatta

SEQ ID NO: 4732395 - DNA, 25 bp, Homo sapien
cagttgctctttggttaattcgcat

SEQ ID NO: 4732396 - DNA, 25 bp, Homo sapien
gcagttgctctttggttaattcgca

SEQ ID NO: 4732397 - DNA, 25 bp, Homo sapien
cagcagttgctctttggttaattcg

SEQ ID NO: 4732398 - DNA, 25 bp, Homo sapien
agcagttgctctttggttaattcgc

SEQ ID NO: 4732399 - DNA, 25 bp, Homo sapien
attgtacaatcagtttccaactagg

SEQ ID NO: 4732400 - DNA, 25 bp, Homo sapien
tgctatagcataaaggaaattgaag

SEQ ID NO: 4732401 - DNA, 25 bp, Homo sapien
agcatgtcagtgtctaattgtacaa

SEQ ID NO: 4732402 - DNA, 25 bp, Homo sapien
cattggggactttctcattggttgg

SEQ ID NO: 4732403 - DNA, 25 bp, Homo sapien
tccatctttatcaatctctaatttt

SEQ ID NO: 4732404 - DNA, 25 bp, Homo sapien
ccatctttatcaatctctaattttt

SEQ ID NO: 4732405 - DNA, 25 bp, Homo sapien
catctttatcaatctctaatttttc

SEQ ID NO: 4732406 - DNA, 25 bp, Homo sapien
tcttttcccatcttatacagactag

SEQ ID NO: 4732407 - DNA, 25 bp, Homo sapien
tcttatacagactagaaaacctgtt

SEQ ID NO: 4732408 - DNA, 25 bp, Homo sapien
ttttcccatcttatacagactagaa

SEQ ID NO: 4732409 - DNA, 25 bp, Homo sapien
tacagactagaaaacctgttgtgca

SEQ ID NO: 4732410 - DNA, 25 bp, Homo sapien
agtcagctggccagttgactatggg

SEQ ID NO: 4732411 - DNA, 25 bp, Homo sapien
cctgtatagtcagctggccagttga

SEQ ID NO: 4732412 - DNA, 25 bp, Homo sapien
tgattaaaggttccaattttctgcc

SEQ ID NO: 4732413 - DNA, 25 bp, Homo sapien
gactatggggtacacctgattaaag

SEQ ID NO: 4732414 - DNA, 25 bp, Homo sapien
aacttgccagctttaataccttcag

SEQ ID NO: 4732415 - DNA, 25 bp, Homo sapien
gtttcttaggccatgacaacttgcc

SEQ ID NO: 4732416 - DNA, 25 bp, Homo sapien
ggttaccagccagcttgggcccatt

SEQ ID NO: 4732417 - DNA, 25 bp, Homo sapien
cattttgtagtacccatccaggaca

SEQ ID NO: 4732418 - DNA, 25 bp, Homo sapien
ccatttcagtactttgttggctagg

SEQ ID NO: 4732419 - DNA, 25 bp, Homo sapien
acatagtcagctactggtgataacc

SEQ ID NO: 4732420 - DNA, 25 bp, Homo sapien
cagctactggtgataaccatttcag

SEQ ID NO: 4732421 - DNA, 25 bp, Homo sapien
atttcagtactttgttggctaggac

SEQ ID NO: 4732422 - DNA, 25 bp, Homo sapien
tgaccgtctcctggtgccttgcggg

SEQ ID NO: 4732423 - DNA, 25 bp, Homo sapien
gcgtaggcacccctttagagagaga

SEQ ID NO: 4732424 - DNA, 25 bp, Homo sapien
tctgactctgcttgttgcctgcggc

SEQ ID NO: 4732425 - DNA, 25 bp, Homo sapien
tccaagaaagacacccggctggagt

SEQ ID NO: 4732426 - DNA, 25 bp, Homo sapien
tcctcccagatactgctggttaggg

SEQ ID NO: 4732427 - DNA, 25 bp, Homo sapien
cttcctcccagatactgctggttag

SEQ ID NO: 4732428 - DNA, 25 bp, Homo sapien
tcaaagtgggcgataaggggccacg

SEQ ID NO: 4732429 - DNA, 25 bp, Homo sapien
aagtgggcgataaggggccacgagt

SEQ ID NO: 4732430 - DNA, 25 bp, Homo sapien
tcctgacagagggccaaaccagtct

SEQ ID NO: 4732431 - DNA, 25 bp, Homo sapien
gccaagggcaggtggtattcctgac

SEQ ID NO: 4732432 - DNA, 25 bp, Homo sapien
aaccagtctttggcacccagataca

SEQ ID NO: 4732433 - DNA, 25 bp, Homo sapien
aagggcaggtggtattcctgacaga

SEQ ID NO: 4732434 - DNA, 25 bp, Homo sapien
tttcagcctcggtgaattccatctc

SEQ ID NO: 4732435 - DNA, 25 bp, Homo sapien
ttgctttcagcctcggtgaattcca

SEQ ID NO: 4732436 - DNA, 25 bp, Homo sapien
tgctttcagcctcggtgaattccat

SEQ ID NO: 4732437 - DNA, 25 bp, Homo sapien
catgttgctttcagcctcggtgaat

SEQ ID NO: 4732438 - DNA, 25 bp, Homo sapien
gctttgcaccgaagtatacctgtga

SEQ ID NO: 4732439 - DNA, 25 bp, Homo sapien
gaaagctttgcaccgaagtatacct

SEQ ID NO: 4732440 - DNA, 25 bp, Homo sapien
acaggaaagctttgcaccgaagtat

SEQ ID NO: 4732441 - DNA, 25 bp, Homo sapien
ccgaagtatacctgtgaactgctct

SEQ ID NO: 4732442 - DNA, 25 bp, Homo sapien
ctagatagcagtgttgttgccagtg

SEQ ID NO: 4732443 - DNA, 25 bp, Homo sapien
agtgttgttgccagtgaaggtggcc

SEQ ID NO: 4732444 - DNA, 25 bp, Homo sapien
tgttgttgccagtgaaggtggccgg

SEQ ID NO: 4732445 - DNA, 25 bp, Homo sapien
ttgttgccagtgaaggtggccggac

SEQ ID NO: 4732446 - DNA, 25 bp, Homo sapien
ctttagccctgagggtgggaagtca

SEQ ID NO: 4732447 - DNA, 25 bp, Homo sapien
ttagccctgagggtgggaagtcaca

SEQ ID NO: 4732448 - DNA, 25 bp, Homo sapien
gccctgagggtgggaagtcacacac

SEQ ID NO: 4732449 - DNA, 25 bp, Homo sapien
atctttagccctgagggtgggaagt

SEQ ID NO: 4732450 - DNA, 25 bp, Homo sapien
catattttgggcattaagcatgtgc

SEQ ID NO: 4732451 - DNA, 25 bp, Homo sapien
atcttgggggatccaaccaacaaag

SEQ ID NO: 4732452 - DNA, 25 bp, Homo sapien
ctgctgttcatattttgggcattaa

SEQ ID NO: 4732453 - DNA, 25 bp, Homo sapien
ttgggcattaagcatgtgcatgtcc

SEQ ID NO: 4732454 - DNA, 25 bp, Homo sapien
gcagctaccattacgtagcaaccat

SEQ ID NO: 4732455 - DNA, 25 bp, Homo sapien
agaactgccaagtgggctcacgcac

SEQ ID NO: 4732456 - DNA, 25 bp, Homo sapien
accattacgtagcaaccatggcaga

SEQ ID NO: 4732457 - DNA, 25 bp, Homo sapien
gaacatggcagctaccattacgtag

SEQ ID NO: 4732458 - DNA, 25 bp, Homo sapien
gggaagccatacatgaagtgcaggt

SEQ ID NO: 4732459 - DNA, 25 bp, Homo sapien
catgagggcccagtactgctggttg

SEQ ID NO: 4732460 - DNA, 25 bp, Homo sapien
atgagggcccagtactgctggttgt

SEQ ID NO: 4732461 - DNA, 25 bp, Homo sapien
gtttgcggccagcttctgcaagtca

SEQ ID NO: 4732462 - DNA, 25 bp, Homo sapien
tgcaagtcagcattgagttggccag

SEQ ID NO: 4732463 - DNA, 25 bp, Homo sapien
ccaggtggttcaagtcactgtaggt

SEQ ID NO: 4732464 - DNA, 25 bp, Homo sapien
ttcaagtcactgtaggtaggtgtgg

SEQ ID NO: 4732465 - DNA, 25 bp, Homo sapien
gtcatagagagctttatttattatc

SEQ ID NO: 4732466 - DNA, 25 bp, Homo sapien
ctgaggcagatgtcatagagagctt

SEQ ID NO: 4732467 - DNA, 25 bp, Homo sapien
tcatagagagctttatttattatca

SEQ ID NO: 4732468 - DNA, 25 bp, Homo sapien
aggcagatgtcatagagagctttat

SEQ ID NO: 4732469 - DNA, 25 bp, Homo sapien
gttgtactttgctgtggagccagca

SEQ ID NO: 4732470 - DNA, 25 bp, Homo sapien
tcagtgcttgggtacttcatcccag

SEQ ID NO: 4732471 - DNA, 25 bp, Homo sapien
ttcatcccagttgtactttgctgtg

SEQ ID NO: 4732472 - DNA, 25 bp, Homo sapien
cagtgcttgggtacttcatcccagt

SEQ ID NO: 4732473 - DNA, 25 bp, Homo sapien
tctttgcattgggttcgaatttcct

SEQ ID NO: 4732474 - DNA, 25 bp, Homo sapien
tcacgtagttctcgtactatggttt

SEQ ID NO: 4732475 - DNA, 25 bp, Homo sapien
tttgcattgggttcgaatttccttc

SEQ ID NO: 4732476 - DNA, 25 bp, Homo sapien
tgcattgggttcgaatttccttctt

SEQ ID NO: 4732477 - DNA, 25 bp, Homo sapien
tgcaagctggtacgaacagaatcca

SEQ ID NO: 4732478 - DNA, 25 bp, Homo sapien
cattgtatggtggtaagtgactgcc

SEQ ID NO: 4732479 - DNA, 25 bp, Homo sapien
aaagtgtatgtttcctgcgtcctca

SEQ ID NO: 4732480 - DNA, 25 bp, Homo sapien
tacaagtgctccagtacggccagtt

SEQ ID NO: 4732481 - DNA, 25 bp, Homo sapien
ctttctgagaaaagctaggtgttta

SEQ ID NO: 4732482 - DNA, 25 bp, Homo sapien
ctaaagaagaggatcattgatttct

SEQ ID NO: 4732483 - DNA, 25 bp, Homo sapien
agaacagtacttgggtttgcaacag

SEQ ID NO: 4732484 - DNA, 25 bp, Homo sapien
gaatgtcatttaagggagttacatc

SEQ ID NO: 4732485 - DNA, 25 bp, Homo sapien
gcctttgagaacctcgggatcccaa

SEQ ID NO: 4732486 - DNA, 25 bp, Homo sapien
caatgtatatattggcccagcaagg

SEQ ID NO: 4732487 - DNA, 25 bp, Homo sapien
tcaagataggcaagaaggacagcag

SEQ ID NO: 4732488 - DNA, 25 bp, Homo sapien
gattgttgcaccttggaactaccag

SEQ ID NO: 4732489 - DNA, 25 bp, Homo sapien
tttcattttgacgaagcctagttta

SEQ ID NO: 4732490 - DNA, 25 bp, Homo sapien
tgacgaagcctagtttatcaatttt

SEQ ID NO: 4732491 - DNA, 25 bp, Homo sapien
cattttgacgaagcctagtttatca

SEQ ID NO: 4732492 - DNA, 25 bp, Homo sapien
tttgacgaagcctagtttatcaatt

SEQ ID NO: 4732493 - DNA, 25 bp, Homo sapien
tgtgtgcccttgtcaaaatttactg

SEQ ID NO: 4732494 - DNA, 25 bp, Homo sapien
tactgtttatctgtgaatctggatg

SEQ ID NO: 4732495 - DNA, 25 bp, Homo sapien
cctttcaatcgatggacatggtatg

SEQ ID NO: 4732496 - DNA, 25 bp, Homo sapien
aaaatctgctggaatggcactgaat

SEQ ID NO: 4732497 - DNA, 25 bp, Homo sapien
gctccaaaatcaccttagtgggtca

SEQ ID NO: 4732498 - DNA, 25 bp, Homo sapien
ggaacactctcccagcagataacca

SEQ ID NO: 4732499 - DNA, 25 bp, Homo sapien
tgcctttaacattagagtatttggt

SEQ ID NO: 4732500 - DNA, 25 bp, Homo sapien
tatgatagcctatgaatccccatgt

SEQ ID NO: 4732501 - DNA, 25 bp, Homo sapien
tacattcaatggtaggctgtcacag

SEQ ID NO: 4732502 - DNA, 25 bp, Homo sapien
gttgttctttgatagtcacactcac

SEQ ID NO: 4732503 - DNA, 25 bp, Homo sapien
tggtcagccttttaggacattttaa

SEQ ID NO: 4732504 - DNA, 25 bp, Homo sapien
tgatcttgggcaccctttacccagt

SEQ ID NO: 4732505 - DNA, 25 bp, Homo sapien
ttgctgaatacaacaattgaattgt

SEQ ID NO: 4732506 - DNA, 25 bp, Homo sapien
gaattctattgaatacacttgctga

SEQ ID NO: 4732507 - DNA, 25 bp, Homo sapien
gatgttgactagctttgtctgtcta

SEQ ID NO: 4732508 - DNA, 25 bp, Homo sapien
tttggctaacatacatatgctgtaa

SEQ ID NO: 4732509 - DNA, 25 bp, Homo sapien
ggagaggttattgaatcatggagtc

SEQ ID NO: 4732510 - DNA, 25 bp, Homo sapien
cagggagaggttattgaatcatgga

SEQ ID NO: 4732511 - DNA, 25 bp, Homo sapien
agaggttattgaatcatggagtctg

SEQ ID NO: 4732512 - DNA, 25 bp, Homo sapien
acccagggagaggttattgaatcat

SEQ ID NO: 4732513 - DNA, 25 bp, Homo sapien
gagtgtgcaaccctcatcaatggaa

SEQ ID NO: 4732514 - DNA, 25 bp, Homo sapien
gtacccttagaaaaatgactccaga

SEQ ID NO: 4732515 - DNA, 25 bp, Homo sapien
atcaaggtgctggtaaggctgtttc

SEQ ID NO: 4732516 - DNA, 25 bp, Homo sapien
cacctttgcctttgttatagactga

SEQ ID NO: 4732517 - DNA, 25 bp, Homo sapien
ctctttgggctttactcaaaaatgc

SEQ ID NO: 4732518 - DNA, 25 bp, Homo sapien
tcaaaaatgcttgttcagttagggc

SEQ ID NO: 4732519 - DNA, 25 bp, Homo sapien
tcagttagggctctagttttattcc

SEQ ID NO: 4732520 - DNA, 25 bp, Homo sapien
tacctctggtcctgtgcacttttcc

SEQ ID NO: 4732521 - DNA, 25 bp, Homo sapien
aaaagggtcccggagatagcctctg

SEQ ID NO: 4732522 - DNA, 25 bp, Homo sapien
tgctcgggaaacacgcgtgggcttt

SEQ ID NO: 4732523 - DNA, 25 bp, Homo sapien
taacagcagatctccataaaagggt

SEQ ID NO: 4732524 - DNA, 25 bp, Homo sapien
tcgtcaggcccagtatgcgtgtgct

SEQ ID NO: 4732525 - DNA, 25 bp, Homo sapien
cagcaatctcccgagaagcggcgag

SEQ ID NO: 4732526 - DNA, 25 bp, Homo sapien
gtctgtgaatcggttatccctccca

SEQ ID NO: 4732527 - DNA, 25 bp, Homo sapien
gggaatgtctgtgaatcggttatcc

SEQ ID NO: 4732528 - DNA, 25 bp, Homo sapien
agcaatctcccgagaagcggcgagg

SEQ ID NO: 4732529 - DNA, 25 bp, Homo sapien
gggcctcctatgcagttgacgaaaa

SEQ ID NO: 4732530 - DNA, 25 bp, Homo sapien
tttatgttatgtggcgtgtacccta

SEQ ID NO: 4732531 - DNA, 25 bp, Homo sapien
cgaaaatgttttgggctagatagga

SEQ ID NO: 4732532 - DNA, 25 bp, Homo sapien
aaaaaatagaggtgcagtgctccag

SEQ ID NO: 4732533 - DNA, 25 bp, Homo sapien
gcagcagtcattcgcaacctcacag

SEQ ID NO: 4732534 - DNA, 25 bp, Homo sapien
cagagaaccgcagagttccttccgg

SEQ ID NO: 4732535 - DNA, 25 bp, Homo sapien
tcagtgaagtctgagccgcgtgcct

SEQ ID NO: 4732536 - DNA, 25 bp, Homo sapien
gcagagttccttccggtttggcagc

SEQ ID NO: 4732537 - DNA, 25 bp, Homo sapien
gccagggttggctggattcagttac

SEQ ID NO: 4732538 - DNA, 25 bp, Homo sapien
tatgggccagggttggctggattca

SEQ ID NO: 4732539 - DNA, 25 bp, Homo sapien
tgggccagggttggctggattcagt

SEQ ID NO: 4732540 - DNA, 25 bp, Homo sapien
ctatgggccagggttggctggattc

SEQ ID NO: 4732541 - DNA, 25 bp, Homo sapien
caaaatatcccaaacctcgcgtgat

SEQ ID NO: 4732542 - DNA, 25 bp, Homo sapien
aggcctggtgagcaaaatatcccaa

SEQ ID NO: 4732543 - DNA, 25 bp, Homo sapien
agcaaaatatcccaaacctcgcgtg

SEQ ID NO: 4732544 - DNA, 25 bp, Homo sapien
ctggtgagcaaaatatcccaaacct

SEQ ID NO: 4732545 - DNA, 25 bp, Homo sapien
gagtgctcactccagaaaactccaa

SEQ ID NO: 4732546 - DNA, 25 bp, Homo sapien
aagtcgacagcttccggaggctgcg

SEQ ID NO: 4732547 - DNA, 25 bp, Homo sapien
ccacatgaatgtgcgcttagggcgt

SEQ ID NO: 4732548 - DNA, 25 bp, Homo sapien
gaggctcgcaagaaatgcccacatg

SEQ ID NO: 4732549 - DNA, 25 bp, Homo sapien
ataaatggacatttacggtagtggg

SEQ ID NO: 4732550 - DNA, 25 bp, Homo sapien
ggaccttcggtgactgatgatctaa

SEQ ID NO: 4732551 - DNA, 25 bp, Homo sapien
catatatctacgttaaaaggcagga

SEQ ID NO: 4732552 - DNA, 25 bp, Homo sapien
cagttgtggccctgtaggaccttcg

SEQ ID NO: 4732553 - DNA, 25 bp, Homo sapien
cggcccgcagggttgcaagaagaaa

SEQ ID NO: 4732554 - DNA, 25 bp, Homo sapien
tcaaagatgtgtggcacatcccgcc

SEQ ID NO: 4732555 - DNA, 25 bp, Homo sapien
cgtccctaccggcattgaaatactt

SEQ ID NO: 4732556 - DNA, 25 bp, Homo sapien
tatggataaagttctcgcaatggct

SEQ ID NO: 4732557 - DNA, 25 bp, Homo sapien
ccaggcgcgaaggcgtgaagatgtg

SEQ ID NO: 4732558 - DNA, 25 bp, Homo sapien
cgcgaaggcgtgaagatgtggcctt

SEQ ID NO: 4732559 - DNA, 25 bp, Homo sapien
tttcccttcccgcatccccaggcat

SEQ ID NO: 4732560 - DNA, 25 bp, Homo sapien
aggcgcgaaggcgtgaagatgtggc

SEQ ID NO: 4732561 - DNA, 25 bp, Homo sapien
ggaatcccgtagcttccctacgcat

SEQ ID NO: 4732562 - DNA, 25 bp, Homo sapien
aggctctggcgctcctcggcggaat

SEQ ID NO: 4732563 - DNA, 25 bp, Homo sapien
tgcgataaccaaagggcgcctcagg

SEQ ID NO: 4732564 - DNA, 25 bp, Homo sapien
ctggtgcggagtgagccagccagct

SEQ ID NO: 4732565 - DNA, 25 bp, Homo sapien
gcaagatagcttgggactgtaatcc

SEQ ID NO: 4732566 - DNA, 25 bp, Homo sapien
taatctcgttgcgtatgggctccag

SEQ ID NO: 4732567 - DNA, 25 bp, Homo sapien
cgtagcttgcattagattctccgac

SEQ ID NO: 4732568 - DNA, 25 bp, Homo sapien
tgtttcccaggtcgggcaagatagc

SEQ ID NO: 4732569 - DNA, 25 bp, Homo sapien
ctcattcaccttggcgtgcccacca

SEQ ID NO: 4732570 - DNA, 25 bp, Homo sapien
ctagaacagggctgatcacgcagta

SEQ ID NO: 4732571 - DNA, 25 bp, Homo sapien
cgcagtagaatctaaccatataatt

SEQ ID NO: 4732572 - DNA, 25 bp, Homo sapien
ccatgagggcaagactcttgtttgg

SEQ ID NO: 4732573 - DNA, 25 bp, Homo sapien
cccgggacctggatgctagctgtaa

SEQ ID NO: 4732574 - DNA, 25 bp, Homo sapien
cctggaaccgcgctgtaattggcag

SEQ ID NO: 4732575 - DNA, 25 bp, Homo sapien
aattggcagctccttctaaatcggg

SEQ ID NO: 4732576 - DNA, 25 bp, Homo sapien
aatcgggacccggatgctagctgta

SEQ ID NO: 4732577 - DNA, 25 bp, Homo sapien
cgttctgggccaaaataagatggat

SEQ ID NO: 4732578 - DNA, 25 bp, Homo sapien
agtaatgttggcagtttcagcagac

SEQ ID NO: 4732579 - DNA, 25 bp, Homo sapien
gcaagggcaaggaggaccataattc

SEQ ID NO: 4732580 - DNA, 25 bp, Homo sapien
tattcgtgttaattcccgtgtactg

SEQ ID NO: 4732581 - DNA, 25 bp, Homo sapien
tcttgcacaagtttaagagggaaag

SEQ ID NO: 4732582 - DNA, 25 bp, Homo sapien
gccagggtcagcgaagtcttggtcc

SEQ ID NO: 4732583 - DNA, 25 bp, Homo sapien
aaaggagccaactccggtgcacaga

SEQ ID NO: 4732584 - DNA, 25 bp, Homo sapien
cgaagtcttggtcctgatgtcccca

SEQ ID NO: 4732585 - DNA, 25 bp, Homo sapien
ctgagggaccttccgcggcatctat

SEQ ID NO: 4732586 - DNA, 25 bp, Homo sapien
gaccttccgcggcatctatgcgggc

SEQ ID NO: 4732587 - DNA, 25 bp, Homo sapien
cgcggcatctatgcgggcatggtta

SEQ ID NO: 4732588 - DNA, 25 bp, Homo sapien
catctatgcgggcatggttactgcc

SEQ ID NO: 4732589 - DNA, 25 bp, Homo sapien
tgcgacatcgcgatggcccagctcc

SEQ ID NO: 4732590 - DNA, 25 bp, Homo sapien
gtgcgacatcgcgatggcccagctc

SEQ ID NO: 4732591 - DNA, 25 bp, Homo sapien
cgtgcgacatcgcgatggcccagct

SEQ ID NO: 4732592 - DNA, 25 bp, Homo sapien
ccccaggcatcgcgcacgtccagcc

SEQ ID NO: 4732593 - DNA, 25 bp, Homo sapien
ggcatcgcgcacgtccagccgcgcc

SEQ ID NO: 4732594 - DNA, 25 bp, Homo sapien
aggcatcgcgcacgtccagccgcgc

SEQ ID NO: 4732595 - DNA, 25 bp, Homo sapien
ccaggcatcgcgcacgtccagccgc

SEQ ID NO: 4732596 - DNA, 25 bp, Homo sapien
agttgggctccgcgccgtggagcag

SEQ ID NO: 4732597 - DNA, 25 bp, Homo sapien
cagttgggctccgcgccgtggagca

SEQ ID NO: 4732598 - DNA, 25 bp, Homo sapien
tgtagagccccctcaccgccaagca

SEQ ID NO: 4732599 - DNA, 25 bp, Homo sapien
ccggcatgacggaaaggaagcttgt

SEQ ID NO: 4732600 - DNA, 25 bp, Homo sapien
catgacggaaaggaagcttgtgtag

SEQ ID NO: 4732601 - DNA, 25 bp, Homo sapien
gggccggcatgacggaaaggaagct

SEQ ID NO: 4732602 - DNA, 25 bp, Homo sapien
gctgtatatccaagcgcagaatgtg

SEQ ID NO: 4732603 - DNA, 25 bp, Homo sapien
catcatgctatgaaacacatctcaa

SEQ ID NO: 4732604 - DNA, 25 bp, Homo sapien
taagttacacttagcttctgggaat

SEQ ID NO: 4732605 - DNA, 25 bp, Homo sapien
tcccatcttaactgaggctttatat

SEQ ID NO: 4732606 - DNA, 25 bp, Homo sapien
tcattaaacaagagatggtcacctc

SEQ ID NO: 4732607 - DNA, 25 bp, Homo sapien
taaaatttgagtgctgcatggtgga

SEQ ID NO: 4732608 - DNA, 25 bp, Homo sapien
tctttggttcctaaatcatcttgga

SEQ ID NO: 4732609 - DNA, 25 bp, Homo sapien
aggaatgaaaccttgtggacccatt

SEQ ID NO: 4732610 - DNA, 25 bp, Homo sapien
agatcttctcagcattcgagagatc

SEQ ID NO: 4732611 - DNA, 25 bp, Homo sapien
gagagatctgtacgcgcgtggctcc

SEQ ID NO: 4732612 - DNA, 25 bp, Homo sapien
gcattcgagagatctgtacgcgcgt

SEQ ID NO: 4732613 - DNA, 25 bp, Homo sapien
ttctcagcattcgagagatctgtac

SEQ ID NO: 4732614 - DNA, 25 bp, Homo sapien
ccagggcgtcgccaggaggaggtct

SEQ ID NO: 4732615 - DNA, 25 bp, Homo sapien
cctgcaaacttcgtcctccagagtc

SEQ ID NO: 4732616 - DNA, 25 bp, Homo sapien
gaggaggtctgtgattacaaacccc

SEQ ID NO: 4732617 - DNA, 25 bp, Homo sapien
tttttccggagaatcgaagcgctac

SEQ ID NO: 4732618 - DNA, 25 bp, Homo sapien
cgtaactattcggtgcgttgggcag

SEQ ID NO: 4732619 - DNA, 25 bp, Homo sapien
actattcggtgcgttgggcagcgcc

SEQ ID NO: 4732620 - DNA, 25 bp, Homo sapien
cctccgaccgtaactattcggtgcg

SEQ ID NO: 4732621 - DNA, 25 bp, Homo sapien
ctggatcggcctccgaccgtaacta

SEQ ID NO: 4732622 - DNA, 25 bp, Homo sapien
tagcgaatgtggcacccctgaagtc

SEQ ID NO: 4732623 - DNA, 25 bp, Homo sapien
gaggaggtgctattaactccgagca

SEQ ID NO: 4732624 - DNA, 25 bp, Homo sapien
cctgtccctcaaatcctctggaggg

SEQ ID NO: 4732625 - DNA, 25 bp, Homo sapien
ttcctccggtgctggcggaagagcc

SEQ ID NO: 4732626 - DNA, 25 bp, Homo sapien
agagccagcgttggcaaggaaggag

SEQ ID NO: 4732627 - DNA, 25 bp, Homo sapien
gagccagcgttggcaaggaaggagg

SEQ ID NO: 4732628 - DNA, 25 bp, Homo sapien
caaaggcgtgtttgagtgcgttcac

SEQ ID NO: 4732629 - DNA, 25 bp, Homo sapien
aaaggcgtgtttgagtgcgttcact

SEQ ID NO: 4732630 - DNA, 25 bp, Homo sapien
ttccttcctccgcgatacaaccttc

SEQ ID NO: 4732631 - DNA, 25 bp, Homo sapien
ttcctccgcgatacaaccttcctaa

SEQ ID NO: 4732632 - DNA, 25 bp, Homo sapien
ccttcctccgcgatacaaccttcct

SEQ ID NO: 4732633 - DNA, 25 bp, Homo sapien
cttcctccgcgatacaaccttccta

SEQ ID NO: 4732634 - DNA, 25 bp, Homo sapien
ttttcctctttcctgagaatgccat

SEQ ID NO: 4732635 - DNA, 25 bp, Homo sapien
tgaaaccatcattccagggctcatg

SEQ ID NO: 4732636 - DNA, 25 bp, Homo sapien
tgctttgggaatttcaatcctgtag

SEQ ID NO: 4732637 - DNA, 25 bp, Homo sapien
tgaatgcactgagagacactgacaa

SEQ ID NO: 4732638 - DNA, 25 bp, Homo sapien
gattgtagagttctgcccaaatgaa

SEQ ID NO: 4732639 - DNA, 25 bp, Homo sapien
tcgtcactggaaaaatactacgggc

SEQ ID NO: 4732640 - DNA, 25 bp, Homo sapien
ggaaccccaggtccgcagttatgat

SEQ ID NO: 4732641 - DNA, 25 bp, Homo sapien
gataacggatcacatcgctcctgcg

SEQ ID NO: 4732642 - DNA, 25 bp, Homo sapien
tcagaagcgcactttccccgtggtt

SEQ ID NO: 4732643 - DNA, 25 bp, Homo sapien
ggaggacctcgttccagctgccagt

SEQ ID NO: 4732644 - DNA, 25 bp, Homo sapien
attcttgttggaggacctcgttcca

SEQ ID NO: 4732645 - DNA, 25 bp, Homo sapien
tgttggaggacctcgttccagctgc

SEQ ID NO: 4732646 - DNA, 25 bp, Homo sapien
ttaagcctctgggatccgcagcgtc

SEQ ID NO: 4732647 - DNA, 25 bp, Homo sapien
tagatctgtaaaccatcatagacgg

SEQ ID NO: 4732648 - DNA, 25 bp, Homo sapien
tgcacagtgcttaccttgagaggac

SEQ ID NO: 4732649 - DNA, 25 bp, Homo sapien
gagaggactctgtgctattaaagaa

SEQ ID NO: 4732650 - DNA, 25 bp, Homo sapien
aaagggctatggttcacttggaaca

SEQ ID NO: 4732651 - DNA, 25 bp, Homo sapien
catttcaggaagtcgctgcctgcgt

SEQ ID NO: 4732652 - DNA, 25 bp, Homo sapien
tacgatccttgttagcatttcagga

SEQ ID NO: 4732653 - DNA, 25 bp, Homo sapien
tggctgcaaaactcccccaagaagc

SEQ ID NO: 4732654 - DNA, 25 bp, Homo sapien
gctcctcgcagcagtaactgatcct

SEQ ID NO: 4732655 - DNA, 25 bp, Homo sapien
ggtttagaagctctgttcgcctcag

SEQ ID NO: 4732656 - DNA, 25 bp, Homo sapien
tcagtttcccacgattgaggggctg

SEQ ID NO: 4732657 - DNA, 25 bp, Homo sapien
ttagaagctctgttcgcctcagttt

SEQ ID NO: 4732658 - DNA, 25 bp, Homo sapien
tgaggtgggtttagaagctctgttc

SEQ ID NO: 4732659 - DNA, 25 bp, Homo sapien
ctgcgagaaccacatgtctaagtcg

SEQ ID NO: 4732660 - DNA, 25 bp, Homo sapien
tgtaacccgaatggggaagcctcca

SEQ ID NO: 4732661 - DNA, 25 bp, Homo sapien
tgtctaagtcgttgtaacccgaatg

SEQ ID NO: 4732662 - DNA, 25 bp, Homo sapien
ggaagcctccaccggcggttatctc

SEQ ID NO: 4732663 - DNA, 25 bp, Homo sapien
caaacaaaacaagtgccgaatgcgc

SEQ ID NO: 4732664 - DNA, 25 bp, Homo sapien
caagtgccgaatgcgccccggactt

SEQ ID NO: 4732665 - DNA, 25 bp, Homo sapien
aaaacaagtgccgaatgcgccccgg

SEQ ID NO: 4732666 - DNA, 25 bp, Homo sapien
cgaatgcgccccggacttttcgagg

SEQ ID NO: 4732667 - DNA, 25 bp, Homo sapien
tgccctagacgctggctcctcagta

SEQ ID NO: 4732668 - DNA, 25 bp, Homo sapien
cacgcgcgccgaatccggagggtca

SEQ ID NO: 4732669 - DNA, 25 bp, Homo sapien
gggatgtgaaccacgaaaaccctca

SEQ ID NO: 4732670 - DNA, 25 bp, Homo sapien
aatccggagggtcaccaagaacctg

SEQ ID NO: 4732671 - DNA, 25 bp, Homo sapien
cagaggtgagcagcgccactcctgc

SEQ ID NO: 4732672 - DNA, 25 bp, Homo sapien
tcctgcccccttaactgcagactgg

SEQ ID NO: 4732673 - DNA, 25 bp, Homo sapien
ccttaactgcagactgggacccacg

SEQ ID NO: 4732674 - DNA, 25 bp, Homo sapien
cgctgcgccgccctttggcaccaga

SEQ ID NO: 4732675 - DNA, 25 bp, Homo sapien
ctgagccctgcgcacgcgggaaggg

SEQ ID NO: 4732676 - DNA, 25 bp, Homo sapien
ccaagatctcggaacggctctgagc

SEQ ID NO: 4732677 - DNA, 25 bp, Homo sapien
tcccacccggacctccaagatctcg

SEQ ID NO: 4732678 - DNA, 25 bp, Homo sapien
agggctgccggaggcgcccgtaggg

SEQ ID NO: 4732679 - DNA, 25 bp, Homo sapien
gaaattaaactaaaccgctgcacgc

SEQ ID NO: 4732680 - DNA, 25 bp, Homo sapien
gctcccgcggattctggtgctgctc

SEQ ID NO: 4732681 - DNA, 25 bp, Homo sapien
gaaagcgaggtcatctcattgctct

SEQ ID NO: 4732682 - DNA, 25 bp, Homo sapien
tgctctatccgccaatcaggaggct

SEQ ID NO: 4732683 - DNA, 25 bp, Homo sapien
ttaaccttcacgacagccgcggagc

SEQ ID NO: 4732684 - DNA, 25 bp, Homo sapien
tgactcctcggcgtacgttctctct

SEQ ID NO: 4732685 - DNA, 25 bp, Homo sapien
cgcgtcctcgcgtagaatggttgtc

SEQ ID NO: 4732686 - DNA, 25 bp, Homo sapien
aatggttgtcttggcgaccgttggc

SEQ ID NO: 4732687 - DNA, 25 bp, Homo sapien
aaagtgaggcctgcactggccgagc

SEQ ID NO: 4732688 - DNA, 25 bp, Homo sapien
gtgaggcctgcactggccgagccac

SEQ ID NO: 4732689 - DNA, 25 bp, Homo sapien
ggaggaaagtgaggcctgcactggc

SEQ ID NO: 4732690 - DNA, 25 bp, Homo sapien
gaggaaagtgaggcctgcactggcc

SEQ ID NO: 4732691 - DNA, 25 bp, Homo sapien
cggtagcctagaggagcggcagact

SEQ ID NO: 4732692 - DNA, 25 bp, Homo sapien
taaggcggtgcggtagcctagagga

SEQ ID NO: 4732693 - DNA, 25 bp, Homo sapien
tagcctagaggagcggcagacttct

SEQ ID NO: 4732694 - DNA, 25 bp, Homo sapien
cggtgcggtagcctagaggagcggc

SEQ ID NO: 4732695 - DNA, 25 bp, Homo sapien
tattccacaatggagctagaagcag

SEQ ID NO: 4732696 - DNA, 25 bp, Homo sapien
caaacattgagagaagggaacccct

SEQ ID NO: 4732697 - DNA, 25 bp, Homo sapien
tctcaggagttagtggtaaacccat

SEQ ID NO: 4732698 - DNA, 25 bp, Homo sapien
ccttaggagcttacaagggagatca

SEQ ID NO: 4732699 - DNA, 25 bp, Homo sapien
tcggaagattcgtagccaccaggtc

SEQ ID NO: 4732700 - DNA, 25 bp, Homo sapien
cattggagtgaacgcatcgactgcc

SEQ ID NO: 4732701 - DNA, 25 bp, Homo sapien
cagtgtagtaagagcaaaggccagc

SEQ ID NO: 4732702 - DNA, 25 bp, Homo sapien
gatataatgatcaagcaaccctgga

SEQ ID NO: 4732703 - DNA, 25 bp, Homo sapien
gtggccccgctcctcggccaagtcc

SEQ ID NO: 4732704 - DNA, 25 bp, Homo sapien
catcatgcaccggtcgggtgagagt

SEQ ID NO: 4732705 - DNA, 25 bp, Homo sapien
tcggccaagtccacgggcagacgac

SEQ ID NO: 4732706 - DNA, 25 bp, Homo sapien
caggtaccctgcaacgtcgcggtgg

SEQ ID NO: 4732707 - DNA, 25 bp, Homo sapien
gcaggtatgggagatgccggccggg

SEQ ID NO: 4732708 - DNA, 25 bp, Homo sapien
atactcagtacaaattaaatgccat

SEQ ID NO: 4732709 - DNA, 25 bp, Homo sapien
tttgctgatgcaatccactttccca

SEQ ID NO: 4732710 - DNA, 25 bp, Homo sapien
ccccaccttcaggttatactcagta

SEQ ID NO: 4732711 - DNA, 25 bp, Homo sapien
aaatgatgttttgcaggagtaatcc

SEQ ID NO: 4732712 - DNA, 25 bp, Homo sapien
agaatcgcttgcatcctggaagagg

SEQ ID NO: 4732713 - DNA, 25 bp, Homo sapien
ggagtaatcctgtagcagccatttg

SEQ ID NO: 4732714 - DNA, 25 bp, Homo sapien
gatgttagcagtcaatcaggatgat

SEQ ID NO: 4732715 - DNA, 25 bp, Homo sapien
gagactcctgtacaaatctacatcg

SEQ ID NO: 4732716 - DNA, 25 bp, Homo sapien
tccggccaacggagactcctgtaca

SEQ ID NO: 4732717 - DNA, 25 bp, Homo sapien
tcctgtacaaatctacatcggcgat

SEQ ID NO: 4732718 - DNA, 25 bp, Homo sapien
caacggagactcctgtacaaatcta

SEQ ID NO: 4732719 - DNA, 25 bp, Homo sapien
ctaggttccagccccgatccgccga

SEQ ID NO: 4732720 - DNA, 25 bp, Homo sapien
gttccagccccgatccgccgaggcc

SEQ ID NO: 4732721 - DNA, 25 bp, Homo sapien
cgaggccgcgccccgcgttcgcgcg

SEQ ID NO: 4732722 - DNA, 25 bp, Homo sapien
gcgccccgcgttcgcgcgccccctg

SEQ ID NO: 4732723 - DNA, 25 bp, Homo sapien
gatcgcgcgcctcccgaaacggttg

SEQ ID NO: 4732724 - DNA, 25 bp, Homo sapien
actccgttgggatccgcgccggctt

SEQ ID NO: 4732725 - DNA, 25 bp, Homo sapien
tggatcgcgcgcctcccgaaacggt

SEQ ID NO: 4732726 - DNA, 25 bp, Homo sapien
acggttgactccgttgggatccgcg

SEQ ID NO: 4732727 - DNA, 25 bp, Homo sapien
ccgcggcgctggccagaccctcatc

SEQ ID NO: 4732728 - DNA, 25 bp, Homo sapien
tccactagtccccgcgccgcggcgc

SEQ ID NO: 4732729 - DNA, 25 bp, Homo sapien
cttctccactagtccccgcgccgcg

SEQ ID NO: 4732730 - DNA, 25 bp, Homo sapien
cgcggcgctggccagaccctcatcg

SEQ ID NO: 4732731 - DNA, 25 bp, Homo sapien
cccactgggcatgcccttgttctcc

SEQ ID NO: 4732732 - DNA, 25 bp, Homo sapien
tgcagtggccgagcggccggtcgtt

SEQ ID NO: 4732733 - DNA, 25 bp, Homo sapien
agcggcccggataatccaccgttgg

SEQ ID NO: 4732734 - DNA, 25 bp, Homo sapien
ttcctggcgctcaagaaccagcggg

SEQ ID NO: 4732735 - DNA, 25 bp, Homo sapien
tcccgtcgtccttctgcggcttggg

SEQ ID NO: 4732736 - DNA, 25 bp, Homo sapien
ctagcgcggacgcagccgagctcaa

SEQ ID NO: 4732737 - DNA, 25 bp, Homo sapien
ggacgcagccgagctcaaagccgct

SEQ ID NO: 4732738 - DNA, 25 bp, Homo sapien
gcggacgcagccgagctcaaagccg

SEQ ID NO: 4732739 - DNA, 25 bp, Homo sapien
agcgcggacgcagccgagctcaaag

SEQ ID NO: 4732740 - DNA, 25 bp, Homo sapien
gtccgctgtgatcgccgggaggcca

SEQ ID NO: 4732741 - DNA, 25 bp, Homo sapien
cccctgtccgctgtgatcgccggga

SEQ ID NO: 4732742 - DNA, 25 bp, Homo sapien
ggacgcgtcgcggagtcctcactgc

SEQ ID NO: 4732743 - DNA, 25 bp, Homo sapien
ctggccgcagggtgcggacgcgtcg

SEQ ID NO: 4732744 - DNA, 25 bp, Homo sapien
taaattcatccccaggcagtacttg

SEQ ID NO: 4732745 - DNA, 25 bp, Homo sapien
cagtacttgggcttcacaagtttca

SEQ ID NO: 4732746 - DNA, 25 bp, Homo sapien
caagttaaattcatccccaggcagt

SEQ ID NO: 4732747 - DNA, 25 bp, Homo sapien
caggcagtacttgggcttcacaagt

SEQ ID NO: 4732748 - DNA, 25 bp, Homo sapien
gcaattttctcttggatgtgtcttt

SEQ ID NO: 4732749 - DNA, 25 bp, Homo sapien
acttgtatcaaacttagcaattttc

SEQ ID NO: 4732750 - DNA, 25 bp, Homo sapien
aacttgtatcaaacttagcaatttt

SEQ ID NO: 4732751 - DNA, 25 bp, Homo sapien
ttagcaattttctcttggatgtgtc

SEQ ID NO: 4732752 - DNA, 25 bp, Homo sapien
cactttgtcaggtatcttattttta

SEQ ID NO: 4732753 - DNA, 25 bp, Homo sapien
ccactttgtcaggtatcttattttt

SEQ ID NO: 4732754 - DNA, 25 bp, Homo sapien
tgccataagcgctatgctctcctgc

SEQ ID NO: 4732755 - DNA, 25 bp, Homo sapien
gctgaaacaagatgatctgccataa

SEQ ID NO: 4732756 - DNA, 25 bp, Homo sapien
cctatgctgtcaattgccgcaagaa

SEQ ID NO: 4732757 - DNA, 25 bp, Homo sapien
tcctgcacccctatgctgtcaattg

SEQ ID NO: 4732758 - DNA, 25 bp, Homo sapien
ggatgcatctgttctacttgtggaa

SEQ ID NO: 4732759 - DNA, 25 bp, Homo sapien
gagctattgggctgtttatgccaca

SEQ ID NO: 4732760 - DNA, 25 bp, Homo sapien
aaaggtcactggctggtttgagcta

SEQ ID NO: 4732761 - DNA, 25 bp, Homo sapien
ctagcttggtctgtggttccacgag

SEQ ID NO: 4732762 - DNA, 25 bp, Homo sapien
ttcttttcgctcttgtccttcacct

SEQ ID NO: 4732763 - DNA, 25 bp, Homo sapien
tccctgcaaggaccacctcaaatcc

SEQ ID NO: 4732764 - DNA, 25 bp, Homo sapien
ccctgcaaggaccacctcaaatccc

SEQ ID NO: 4732765 - DNA, 25 bp, Homo sapien
tctccctgcaaggaccacctcaaat

SEQ ID NO: 4732766 - DNA, 25 bp, Homo sapien
cagcaggttctacgggtgagatcac

SEQ ID NO: 4732767 - DNA, 25 bp, Homo sapien
ctcacttgctgaaggactagcccag

SEQ ID NO: 4732768 - DNA, 25 bp, Homo sapien
agatcactgctagctcattcactgc

SEQ ID NO: 4732769 - DNA, 25 bp, Homo sapien
gaaggactagcccagcaggttctac

SEQ ID NO: 4732770 - DNA, 25 bp, Homo sapien
accactgtggcccaatggaagcacc

SEQ ID NO: 4732771 - DNA, 25 bp, Homo sapien
cactgtggcccaatggaagcaccag

SEQ ID NO: 4732772 - DNA, 25 bp, Homo sapien
tgtggcccaatggaagcaccagtcc

SEQ ID NO: 4732773 - DNA, 25 bp, Homo sapien
tggcccaatggaagcaccagtccag

SEQ ID NO: 4732774 - DNA, 25 bp, Homo sapien
ggtgaggaggtattccaatgcaaaa

SEQ ID NO: 4732775 - DNA, 25 bp, Homo sapien
ggacggctaagtttatatagtgaac

SEQ ID NO: 4732776 - DNA, 25 bp, Homo sapien
gaaaattgccacatagattagaggc

SEQ ID NO: 4732777 - DNA, 25 bp, Homo sapien
cagtgagccgcatggacacaggtga

SEQ ID NO: 4732778 - DNA, 25 bp, Homo sapien
tagagattccaaaggcctttacatc

SEQ ID NO: 4732779 - DNA, 25 bp, Homo sapien
actgaagctataggagcagatgagg

SEQ ID NO: 4732780 - DNA, 25 bp, Homo sapien
tatatggtttcaaggcacttttctg

SEQ ID NO: 4732781 - DNA, 25 bp, Homo sapien
tgcttaggagagagatgtgaacgat

SEQ ID NO: 4732782 - DNA, 25 bp, Homo sapien
cacaaaaccactggtgacgttgcct

SEQ ID NO: 4732783 - DNA, 25 bp, Homo sapien
tatagtggtaagctggcacctgggc

SEQ ID NO: 4732784 - DNA, 25 bp, Homo sapien
gagtttgagtacctccgtcagcact

SEQ ID NO: 4732785 - DNA, 25 bp, Homo sapien
cattccctaggataattagggctac

SEQ ID NO: 4732786 - DNA, 25 bp, Homo sapien
ttttgatgtggactggcattcttcc

SEQ ID NO: 4732787 - DNA, 25 bp, Homo sapien
gaaactctgtctcatgagcactccc

SEQ ID NO: 4732788 - DNA, 25 bp, Homo sapien
cttagtgccttctttctgtaatagc

SEQ ID NO: 4732789 - DNA, 25 bp, Homo sapien
ctttgttctgagcataaatgtgacc

SEQ ID NO: 4732790 - DNA, 25 bp, Homo sapien
ccttttggcttcaggtagaaactct

SEQ ID NO: 4732791 - DNA, 25 bp, Homo sapien
aaactcttgctatcccctgctgagg

SEQ ID NO: 4732792 - DNA, 25 bp, Homo sapien
gaggattcatacatctcggactggt

SEQ ID NO: 4732793 - DNA, 25 bp, Homo sapien
tttgccttagcaagtgaatcattta

SEQ ID NO: 4732794 - DNA, 25 bp, Homo sapien
tgctgaggtccgcacttgctgtggc

SEQ ID NO: 4732795 - DNA, 25 bp, Homo sapien
caaaagggttgaaagctgtcgccat

SEQ ID NO: 4732796 - DNA, 25 bp, Homo sapien
gtccaaaagggttgaaagctgtcgc

SEQ ID NO: 4732797 - DNA, 25 bp, Homo sapien
ctgggtccaaaagggttgaaagctg

SEQ ID NO: 4732798 - DNA, 25 bp, Homo sapien
tttcatgatgagtgccagtctgggt

SEQ ID NO: 4732799 - DNA, 25 bp, Homo sapien
tagttgcttgggctaggacttccat

SEQ ID NO: 4732800 - DNA, 25 bp, Homo sapien
tcttagaggaaatgctagtgtagct

SEQ ID NO: 4732801 - DNA, 25 bp, Homo sapien
caggtgctgctattaggatggccaa

SEQ ID NO: 4732802 - DNA, 25 bp, Homo sapien
gatggccaatgatccagaagtaatg

SEQ ID NO: 4732803 - DNA, 25 bp, Homo sapien
tgtgtcagtgtcagagcactgggtc

SEQ ID NO: 4732804 - DNA, 25 bp, Homo sapien
tcagtgtcagagcactgggtcacat

SEQ ID NO: 4732805 - DNA, 25 bp, Homo sapien
tgtcagagcactgggtcacatcctg

SEQ ID NO: 4732806 - DNA, 25 bp, Homo sapien
agtgtcagagcactgggtcacatcc

SEQ ID NO: 4732807 - DNA, 25 bp, Homo sapien
aagaccactggattatctgagagcc

SEQ ID NO: 4732808 - DNA, 25 bp, Homo sapien
tgaaaataaacgactattgggagcc

SEQ ID NO: 4732809 - DNA, 25 bp, Homo sapien
gccacagttgtcctttgccacatgg

SEQ ID NO: 4732810 - DNA, 25 bp, Homo sapien
tcaatgtagggaagagcagtaaaag

SEQ ID NO: 4732811 - DNA, 25 bp, Homo sapien
tgtctattctggctattctctttaa

SEQ ID NO: 4732812 - DNA, 25 bp, Homo sapien
gtgtctattctggctattctcttta

SEQ ID NO: 4732813 - DNA, 25 bp, Homo sapien
gtctattctggctattctctttaaa

SEQ ID NO: 4732814 - DNA, 25 bp, Homo sapien
accaggtggactgcagcgcagtggg

SEQ ID NO: 4732815 - DNA, 25 bp, Homo sapien
ccaggtggactgcagcgcagtgggt

SEQ ID NO: 4732816 - DNA, 25 bp, Homo sapien
ctaaaagctggcatctttactccgg

SEQ ID NO: 4732817 - DNA, 25 bp, Homo sapien
aaaagctggcatctttactccggaa

SEQ ID NO: 4732818 - DNA, 25 bp, Homo sapien
gctggcatctttactccggaaatta

SEQ ID NO: 4732819 - DNA, 25 bp, Homo sapien
aagctggcatctttactccggaaat

SEQ ID NO: 4732820 - DNA, 25 bp, Homo sapien
ttgtctacattttgcctctagagta

SEQ ID NO: 4732821 - DNA, 25 bp, Homo sapien
gcctctagagtatagcgattgccat

SEQ ID NO: 4732822 - DNA, 25 bp, Homo sapien
gcgattgccatttgaggaagattct

SEQ ID NO: 4732823 - DNA, 25 bp, Homo sapien
tcttggcccaattgaggcagatttg

SEQ ID NO: 4732824 - DNA, 25 bp, Homo sapien
tagtcatagacagggagatttcgca

SEQ ID NO: 4732825 - DNA, 25 bp, Homo sapien
tcagagctcggttattgtgcccaaa

SEQ ID NO: 4732826 - DNA, 25 bp, Homo sapien
tagctaaagttagagggtccttcca

SEQ ID NO: 4732827 - DNA, 25 bp, Homo sapien
cattgacagcctgggatccacaggg

SEQ ID NO: 4732828 - DNA, 25 bp, Homo sapien
agacacaaacacgtagaaatccaag

SEQ ID NO: 4732829 - DNA, 25 bp, Homo sapien
gacacaaacacgtagaaatccaagg

SEQ ID NO: 4732830 - DNA, 25 bp, Homo sapien
gagtttaacagatctaagacacaaa

SEQ ID NO: 4732831 - DNA, 25 bp, Homo sapien
gtcagctgagtttaacagatctaag

SEQ ID NO: 4732832 - DNA, 25 bp, Homo sapien
ctgagaatatgcctcgccgccagta

SEQ ID NO: 4732833 - DNA, 25 bp, Homo sapien
taggctgagaatatgcctcgccgcc

SEQ ID NO: 4732834 - DNA, 25 bp, Homo sapien
ggctgagaatatgcctcgccgccag

SEQ ID NO: 4732835 - DNA, 25 bp, Homo sapien
gagaatatgcctcgccgccagtata

SEQ ID NO: 4732836 - DNA, 25 bp, Homo sapien
tcacaaacagccttaccaggttcat

SEQ ID NO: 4732837 - DNA, 25 bp, Homo sapien
tattcacaaacagccttaccaggtt

SEQ ID NO: 4732838 - DNA, 25 bp, Homo sapien
cagttattcacaaacagccttacca

SEQ ID NO: 4732839 - DNA, 25 bp, Homo sapien
tctccagttattcacaaacagcctt

SEQ ID NO: 4732840 - DNA, 25 bp, Homo sapien
taggagggagtagtctgaattgtgg

SEQ ID NO: 4732841 - DNA, 25 bp, Homo sapien
tgaagtcttcaagcagggttctggt

SEQ ID NO: 4732842 - DNA, 25 bp, Homo sapien
tcttcaagcagggttctggtccgca

SEQ ID NO: 4732843 - DNA, 25 bp, Homo sapien
cagggttctggtccgcaagttctct

SEQ ID NO: 4732844 - DNA, 25 bp, Homo sapien
ttcttaagatgagagtctctatgtc

SEQ ID NO: 4732845 - DNA, 25 bp, Homo sapien
tgtcaagggtgataagtttaaaaca

SEQ ID NO: 4732846 - DNA, 25 bp, Homo sapien
gtccagagcagttgtgttcaaagtg

SEQ ID NO: 4732847 - DNA, 25 bp, Homo sapien
agcagttgtgttcaaagtgtggtcc

SEQ ID NO: 4732848 - DNA, 25 bp, Homo sapien
aagtgtggtccatagacaaatgatg

SEQ ID NO: 4732849 - DNA, 25 bp, Homo sapien
tgtggtccatagacaaatgatggtc

SEQ ID NO: 4732850 - DNA, 25 bp, Homo sapien
atggttgtatcccaaggatccagtg

SEQ ID NO: 4732851 - DNA, 25 bp, Homo sapien
ggtcttgtcatataatcagcatttg

SEQ ID NO: 4732852 - DNA, 25 bp, Homo sapien
ggattgggactgtcacaattatctt

SEQ ID NO: 4732853 - DNA, 25 bp, Homo sapien
cacaattatcttatggttgtatccc

SEQ ID NO: 4732854 - DNA, 25 bp, Homo sapien
ggtgatcccgtgaacatactgctgt

SEQ ID NO: 4732855 - DNA, 25 bp, Homo sapien
tgtgattgtaccaacagcactgagt

SEQ ID NO: 4732856 - DNA, 25 bp, Homo sapien
cagataactgggctgaatcgtcaat

SEQ ID NO: 4732857 - DNA, 25 bp, Homo sapien
agcactgagtttatgcactgccaga

SEQ ID NO: 4732858 - DNA, 25 bp, Homo sapien
ccagatgggtgaaatctaacggcac

SEQ ID NO: 4732859 - DNA, 25 bp, Homo sapien
aaaattagtggaatctgaatccaga

SEQ ID NO: 4732860 - DNA, 25 bp, Homo sapien
ggtgaaatctaacggcacactagag

SEQ ID NO: 4732861 - DNA, 25 bp, Homo sapien
tgtcagcattatgtggacttccaaa

SEQ ID NO: 4732862 - DNA, 25 bp, Homo sapien
gcatttgtcacggagctcttgtgtc

SEQ ID NO: 4732863 - DNA, 25 bp, Homo sapien
ttctgcatttgtcacggagctcttg

SEQ ID NO: 4732864 - DNA, 25 bp, Homo sapien
ctgcatttgtcacggagctcttgtg

SEQ ID NO: 4732865 - DNA, 25 bp, Homo sapien
catttgtcacggagctcttgtgtct

SEQ ID NO: 4732866 - DNA, 25 bp, Homo sapien
gggtgttatcaacctagaagtgcat

SEQ ID NO: 4732867 - DNA, 25 bp, Homo sapien
tcaatttattacattggcttcagag

SEQ ID NO: 4732868 - DNA, 25 bp, Homo sapien
ttcagacataggaatgaaccctcta

SEQ ID NO: 4732869 - DNA, 25 bp, Homo sapien
taagaatgccctaagttccagaagg

SEQ ID NO: 4732870 - DNA, 25 bp, Homo sapien
ttattcactcacagtgctcttcagg

SEQ ID NO: 4732871 - DNA, 25 bp, Homo sapien
tattcactcacagtgctcttcaggt

SEQ ID NO: 4732872 - DNA, 25 bp, Homo sapien
ctcttcaggtgactggtcagtgttg

SEQ ID NO: 4732873 - DNA, 25 bp, Homo sapien
ggtgactggtcagtgttggtgagga

SEQ ID NO: 4732874 - DNA, 25 bp, Homo sapien
tgagaagttactaaaatgccctttc

SEQ ID NO: 4732875 - DNA, 25 bp, Homo sapien
tatctcacttagagctcaggagtca

SEQ ID NO: 4732876 - DNA, 25 bp, Homo sapien
ctagacaaataagtcaatgtagttc

SEQ ID NO: 4732877 - DNA, 25 bp, Homo sapien
catttacagaggtcggatgttcgtg

SEQ ID NO: 4732878 - DNA, 25 bp, Homo sapien
gacatagtagcaatggcagaaccta

SEQ ID NO: 4732879 - DNA, 25 bp, Homo sapien
aatgagctcgttgtttattgacaca

SEQ ID NO: 4732880 - DNA, 25 bp, Homo sapien
tcctggaggataaacaggctcattc

SEQ ID NO: 4732881 - DNA, 25 bp, Homo sapien
tgttatcagacaaaattcccttggc

SEQ ID NO: 4732882 - DNA, 25 bp, Homo sapien
tcaggagaaagggataagcttggtt

SEQ ID NO: 4732883 - DNA, 25 bp, Homo sapien
gatcctggttagaagcaatcattgc

SEQ ID NO: 4732884 - DNA, 25 bp, Homo sapien
gcaatctgtttctctggataaccca

SEQ ID NO: 4732885 - DNA, 25 bp, Homo sapien
tactgcatcccgacaaactggaaag

SEQ ID NO: 4732886 - DNA, 25 bp, Homo sapien
agcaggcttgctatctttggtctgt

SEQ ID NO: 4732887 - DNA, 25 bp, Homo sapien
aggcttgctatctttggtctgtaag

SEQ ID NO: 4732888 - DNA, 25 bp, Homo sapien
gcaggcttgctatctttggtctgta

SEQ ID NO: 4732889 - DNA, 25 bp, Homo sapien
caggcttgctatctttggtctgtaa

SEQ ID NO: 4732890 - DNA, 25 bp, Homo sapien
ccttggatgctgcttggatggcctt

SEQ ID NO: 4732891 - DNA, 25 bp, Homo sapien
taggcacgactcttgctctcaactg

SEQ ID NO: 4732892 - DNA, 25 bp, Homo sapien
tgtggtagagagtaggcacgactct

SEQ ID NO: 4732893 - DNA, 25 bp, Homo sapien
gggtgtggtagagagtaggcacgac

SEQ ID NO: 4732894 - DNA, 25 bp, Homo sapien
caaagaccaatactcggtaaataat

SEQ ID NO: 4732895 - DNA, 25 bp, Homo sapien
ccccatatattgcttttggcccatt

SEQ ID NO: 4732896 - DNA, 25 bp, Homo sapien
caatactcggtaaataatgtggaaa

SEQ ID NO: 4732897 - DNA, 25 bp, Homo sapien
ttgcttttggcccattcatcaccaa

SEQ ID NO: 4732898 - DNA, 25 bp, Homo sapien
tctggctttggaggttttccaacca

SEQ ID NO: 4732899 - DNA, 25 bp, Homo sapien
ccccagagcaaatgtgatgtcctgc

SEQ ID NO: 4732900 - DNA, 25 bp, Homo sapien
tgtgatgtcctgcatctactgactc

SEQ ID NO: 4732901 - DNA, 25 bp, Homo sapien
gagcaaatgtgatgtcctgcatcta

SEQ ID NO: 4732902 - DNA, 25 bp, Homo sapien
aattggtcatatactgtgggccagt

SEQ ID NO: 4732903 - DNA, 25 bp, Homo sapien
tcaagattcccaggtttcaaattgg

SEQ ID NO: 4732904 - DNA, 25 bp, Homo sapien
cctgatgctttctctcaagattccc

SEQ ID NO: 4732905 - DNA, 25 bp, Homo sapien
cccaggtttcaaattggtcatatac

SEQ ID NO: 4732906 - DNA, 25 bp, Homo sapien
ctttaccataccgacaggagagaaa

SEQ ID NO: 4732907 - DNA, 25 bp, Homo sapien
ttaccataccgacaggagagaaatt

SEQ ID NO: 4732908 - DNA, 25 bp, Homo sapien
ggcttctttaccataccgacaggag

SEQ ID NO: 4732909 - DNA, 25 bp, Homo sapien
ttctttaccataccgacaggagaga

SEQ ID NO: 4732910 - DNA, 25 bp, Homo sapien
aagcctttatccctccctgttgtct

SEQ ID NO: 4732911 - DNA, 25 bp, Homo sapien
tgttgtctgctgatcccactttatc

SEQ ID NO: 4732912 - DNA, 25 bp, Homo sapien
gagagacttcgttgaagagtattga

SEQ ID NO: 4732913 - DNA, 25 bp, Homo sapien
gagtattgaatttggtgatgtgtaa

SEQ ID NO: 4732914 - DNA, 25 bp, Homo sapien
gcacgtccaggacatctaagaaatt

SEQ ID NO: 4732915 - DNA, 25 bp, Homo sapien
gagcacgtccaggacatctaagaaa

SEQ ID NO: 4732916 - DNA, 25 bp, Homo sapien
acgtccaggacatctaagaaattct

SEQ ID NO: 4732917 - DNA, 25 bp, Homo sapien
tgagcacgtccaggacatctaagaa

SEQ ID NO: 4732918 - DNA, 25 bp, Homo sapien
ttccctaaacatctgtaggacaaca

SEQ ID NO: 4732919 - DNA, 25 bp, Homo sapien
atctgtaggacaacatcagagaaag

SEQ ID NO: 4732920 - DNA, 25 bp, Homo sapien
taaacatctgtaggacaacatcaga

SEQ ID NO: 4732921 - DNA, 25 bp, Homo sapien
cctaaacatctgtaggacaacatca

SEQ ID NO: 4732922 - DNA, 25 bp, Homo sapien
agaacttgagcatagagtaagtagg

SEQ ID NO: 4732923 - DNA, 25 bp, Homo sapien
gacatggtccgaaagcccactttcc

SEQ ID NO: 4732924 - DNA, 25 bp, Homo sapien
ttctttctggttggagcttagacat

SEQ ID NO: 4732925 - DNA, 25 bp, Homo sapien
tgagcatagagtaagtaggtcttct

SEQ ID NO: 4732926 - DNA, 25 bp, Homo sapien
caacagctgaaggagtcaccaaact

SEQ ID NO: 4732927 - DNA, 25 bp, Homo sapien
agtcaccagatttatatgatttgtg

SEQ ID NO: 4732928 - DNA, 25 bp, Homo sapien
ggaggttgccaacataagaccaaca

SEQ ID NO: 4732929 - DNA, 25 bp, Homo sapien
gatttgtgagggaggttgccaacat

SEQ ID NO: 4732930 - DNA, 25 bp, Homo sapien
tctgccccggtgtagatagatgcaa

SEQ ID NO: 4732931 - DNA, 25 bp, Homo sapien
ggtaatcacaggagtcagtctccat

SEQ ID NO: 4732932 - DNA, 25 bp, Homo sapien
ttcatgtccaaaatccccgtgcagg

SEQ ID NO: 4732933 - DNA, 25 bp, Homo sapien
cctggaggaaaggagttgccatatc

SEQ ID NO: 4732934 - DNA, 25 bp, Homo sapien
gcgcccgctgtcgtaaccatggtgt

SEQ ID NO: 4732935 - DNA, 25 bp, Homo sapien
gtggtgtcagcgctcaagggccaca

SEQ ID NO: 4732936 - DNA, 25 bp, Homo sapien
ggactgcgcgtgtgccaagtgcacc

SEQ ID NO: 4732937 - DNA, 25 bp, Homo sapien
atcgccgagcgccagcgcgtcatgg

SEQ ID NO: 4732938 - DNA, 25 bp, Homo sapien
tcacccaggatagaagcctcaagct

SEQ ID NO: 4732939 - DNA, 25 bp, Homo sapien
gcatgggctcccacaggttgatctg

SEQ ID NO: 4732940 - DNA, 25 bp, Homo sapien
gaagaattaatcacccaggatagaa

SEQ ID NO: 4732941 - DNA, 25 bp, Homo sapien
cacaggttgatctgaaggagactga

SEQ ID NO: 4732942 - DNA, 25 bp, Homo sapien
aaaacagatgtatagaccaacggaa

SEQ ID NO: 4732943 - DNA, 25 bp, Homo sapien
accaaaacagatgtatagaccaacg

SEQ ID NO: 4732944 - DNA, 25 bp, Homo sapien
gatgtatagaccaacggaacagaac

SEQ ID NO: 4732945 - DNA, 25 bp, Homo sapien
atgtatagaccaacggaacagaaca

SEQ ID NO: 4732946 - DNA, 25 bp, Homo sapien
ctgcttatgaaagggagtgtggtct

SEQ ID NO: 4732947 - DNA, 25 bp, Homo sapien
gctggtaggcctgaaattagctgtg

SEQ ID NO: 4732948 - DNA, 25 bp, Homo sapien
ggtaggcctgaaattagctgtgcag

SEQ ID NO: 4732949 - DNA, 25 bp, Homo sapien
tccccatatggttaatcaccagctg

SEQ ID NO: 4732950 - DNA, 25 bp, Homo sapien
tggaccagatcctttgggggaaatc

SEQ ID NO: 4732951 - DNA, 25 bp, Homo sapien
acactggaccagatcctttggggga

SEQ ID NO: 4732952 - DNA, 25 bp, Homo sapien
ctggaccagatcctttgggggaaat

SEQ ID NO: 4732953 - DNA, 25 bp, Homo sapien
cactggaccagatcctttgggggaa

SEQ ID NO: 4732954 - DNA, 25 bp, Homo sapien
ttgtatcaaccttctggacagcaag

SEQ ID NO: 4732955 - DNA, 25 bp, Homo sapien
gaggggcattactggacttctcttt

SEQ ID NO: 4732956 - DNA, 25 bp, Homo sapien
gtaaggaagttctgtgatgccgtgc

SEQ ID NO: 4732957 - DNA, 25 bp, Homo sapien
tctgtgatgccgtgcttttgccaca

SEQ ID NO: 4732958 - DNA, 25 bp, Homo sapien
accaaaaactgagtgattggaatcg

SEQ ID NO: 4732959 - DNA, 25 bp, Homo sapien
gagtgattggaatcgggaccacgtt

SEQ ID NO: 4732960 - DNA, 25 bp, Homo sapien
actgagtgattggaatcgggaccac

SEQ ID NO: 4732961 - DNA, 25 bp, Homo sapien
ttggaatcgggaccacgttgctcat

SEQ ID NO: 4732962 - DNA, 25 bp, Homo sapien
tgccacacatctagaaccatctcat

SEQ ID NO: 4732963 - DNA, 25 bp, Homo sapien
ggatccctttcttaaacctcataca

SEQ ID NO: 4732964 - DNA, 25 bp, Homo sapien
gaaaaaattctagcaatcttcccac

SEQ ID NO: 4732965 - DNA, 25 bp, Homo sapien
tagcatcagagcgaacaggcaacat

SEQ ID NO: 4732966 - DNA, 25 bp, Homo sapien
attttcatagtggttgcaattgttt

SEQ ID NO: 4732967 - DNA, 25 bp, Homo sapien
ttttcatagtggttgcaattgtttt

SEQ ID NO: 4732968 - DNA, 25 bp, Homo sapien
tgccttcaccatctccatctgcttc

SEQ ID NO: 4732969 - DNA, 25 bp, Homo sapien
gcttctctttgcctccatcccccat

SEQ ID NO: 4732970 - DNA, 25 bp, Homo sapien
catctgcttctctttgcctccatcc

SEQ ID NO: 4732971 - DNA, 25 bp, Homo sapien
tctgcttctctttgcctccatcccc

SEQ ID NO: 4732972 - DNA, 25 bp, Homo sapien
ggccactgccaccaatgcctgccat

SEQ ID NO: 4732973 - DNA, 25 bp, Homo sapien
ggtgtagcttgtatgccagtttgag

SEQ ID NO: 4732974 - DNA, 25 bp, Homo sapien
gcttgtatgccagtttgagctttcg

SEQ ID NO: 4732975 - DNA, 25 bp, Homo sapien
ccagtttgagctttcgtttttggtg

SEQ ID NO: 4732976 - DNA, 25 bp, Homo sapien
tatgcaataggtgtagcttgtatgc

SEQ ID NO: 4732977 - DNA, 25 bp, Homo sapien
ttcttctgtaaggtaagtagggctg

SEQ ID NO: 4732978 - DNA, 25 bp, Homo sapien
tcttctgtaaggtaagtagggctgg

SEQ ID NO: 4732979 - DNA, 25 bp, Homo sapien
ctgtaaggtaagtagggctggtcat

SEQ ID NO: 4732980 - DNA, 25 bp, Homo sapien
ttctgtaaggtaagtagggctggtc

SEQ ID NO: 4732981 - DNA, 25 bp, Homo sapien
ggtgatttctaaggcgttattgctc

SEQ ID NO: 4732982 - DNA, 25 bp, Homo sapien
ggcgttattgctcttgccatcaatc

SEQ ID NO: 4732983 - DNA, 25 bp, Homo sapien
tttggtgatttctaaggcgttattg

SEQ ID NO: 4732984 - DNA, 25 bp, Homo sapien
gccatcaatccttattggttcattt

SEQ ID NO: 4732985 - DNA, 25 bp, Homo sapien
cgtgggatcacatgatacgttgaac

SEQ ID NO: 4732986 - DNA, 25 bp, Homo sapien
gatcacatgatacgttgaacagtac

SEQ ID NO: 4732987 - DNA, 25 bp, Homo sapien
tagccaccctcgtgggatcacatga

SEQ ID NO: 4732988 - DNA, 25 bp, Homo sapien
ttccaaatagccaccctcgtgggat

SEQ ID NO: 4732989 - DNA, 25 bp, Homo sapien
tcatgcatattgctcgtaactaaca

SEQ ID NO: 4732990 - DNA, 25 bp, Homo sapien
agacattgtgactaccataattgga

SEQ ID NO: 4732991 - DNA, 25 bp, Homo sapien
tgctcgtaactaacatatctgtcac

SEQ ID NO: 4732992 - DNA, 25 bp, Homo sapien
ccataattggattcctcatgtccat

SEQ ID NO: 4732993 - DNA, 25 bp, Homo sapien
cattgtgactttgacatgagaaagc

SEQ ID NO: 4732994 - DNA, 25 bp, Homo sapien
ttcagaaaacaccactcagcacgga

SEQ ID NO: 4732995 - DNA, 25 bp, Homo sapien
cagagagacccattgtcagtagaag

SEQ ID NO: 4732996 - DNA, 25 bp, Homo sapien
gagaaaagttattctgggctctaag

SEQ ID NO: 4732997 - DNA, 25 bp, Homo sapien
cccctccagacagtgatagtaggct

SEQ ID NO: 4732998 - DNA, 25 bp, Homo sapien
cagacagtgatagtaggctggactt

SEQ ID NO: 4732999 - DNA, 25 bp, Homo sapien
agtgatagtaggctggacttctggc

SEQ ID NO: 4733000 - DNA, 25 bp, Homo sapien
gacagtgatagtaggctggacttct

SEQ ID NO: 4733001 - DNA, 25 bp, Homo sapien
ggaagaatttgtgcccaaggatggt

SEQ ID NO: 4733002 - DNA, 25 bp, Homo sapien
taaaatgcctctgagtgcttaaact

SEQ ID NO: 4733003 - DNA, 25 bp, Homo sapien
aagacatccctgacaaagcgacatg

SEQ ID NO: 4733004 - DNA, 25 bp, Homo sapien
acagagataatatttgccacccaca

SEQ ID NO: 4733005 - DNA, 25 bp, Homo sapien
ctggaatggacatctttgccaaatt

SEQ ID NO: 4733006 - DNA, 25 bp, Homo sapien
gctggaatggacatctttgccaaat

SEQ ID NO: 4733007 - DNA, 25 bp, Homo sapien
tgctggaatggacatctttgccaaa

SEQ ID NO: 4733008 - DNA, 25 bp, Homo sapien
aaatactgctggaatggacatcttt

SEQ ID NO: 4733009 - DNA, 25 bp, Homo sapien
ccatctgccatcattattcacttgt

SEQ ID NO: 4733010 - DNA, 25 bp, Homo sapien
caagggtcacatcaaagatatagcc

SEQ ID NO: 4733011 - DNA, 25 bp, Homo sapien
catcaaagatatagcctgctttaag

SEQ ID NO: 4733012 - DNA, 25 bp, Homo sapien
caaggtattgtctcaagaggtggaa

SEQ ID NO: 4733013 - DNA, 25 bp, Homo sapien
ccatgaggatagttgctgatctgga

SEQ ID NO: 4733014 - DNA, 25 bp, Homo sapien
tccatgaggatagttgctgatctgg

SEQ ID NO: 4733015 - DNA, 25 bp, Homo sapien
ctgagaatcaggatcaggacttgct

SEQ ID NO: 4733016 - DNA, 25 bp, Homo sapien
gagaatcaggatcaggacttgctag

SEQ ID NO: 4733017 - DNA, 25 bp, Homo sapien
tcatttttgccttgattgacatctg

SEQ ID NO: 4733018 - DNA, 25 bp, Homo sapien
atttttgccttgattgacatctgta

SEQ ID NO: 4733019 - DNA, 25 bp, Homo sapien
catttttgccttgattgacatctgt

SEQ ID NO: 4733020 - DNA, 25 bp, Homo sapien
tatatgccgtatgcacctgaaaact

SEQ ID NO: 4733021 - DNA, 25 bp, Homo sapien
aaagcaagttgataccattgggagg

SEQ ID NO: 4733022 - DNA, 25 bp, Homo sapien
taatcttcccaattaggtggacatc

SEQ ID NO: 4733023 - DNA, 25 bp, Homo sapien
ccattgggaggaaatttctctttca

SEQ ID NO: 4733024 - DNA, 25 bp, Homo sapien
ttcagagcttagattccaacaaagg

SEQ ID NO: 4733025 - DNA, 25 bp, Homo sapien
tagtgtgacattgcacaacagttga

SEQ ID NO: 4733026 - DNA, 25 bp, Homo sapien
gagccaagcctcttttagtgtgaca

SEQ ID NO: 4733027 - DNA, 25 bp, Homo sapien
tgttgtgaaggtttccattcatcca

SEQ ID NO: 4733028 - DNA, 25 bp, Homo sapien
tgagccagatgatccctagaacagc

SEQ ID NO: 4733029 - DNA, 25 bp, Homo sapien
tcaaactctgatatcatgagccaga

SEQ ID NO: 4733030 - DNA, 25 bp, Homo sapien
atcatgagccagatgatccctagaa

SEQ ID NO: 4733031 - DNA, 25 bp, Homo sapien
caaactctgatatcatgagccagat

SEQ ID NO: 4733032 - DNA, 25 bp, Homo sapien
catatcacagttgttgatatacagc

SEQ ID NO: 4733033 - DNA, 25 bp, Homo sapien
tatacagcttcttacacaaagtgct

SEQ ID NO: 4733034 - DNA, 25 bp, Homo sapien
gttgatatacagcttcttacacaaa

SEQ ID NO: 4733035 - DNA, 25 bp, Homo sapien
gatgctgcattccatatcacagttg

SEQ ID NO: 4733036 - DNA, 25 bp, Homo sapien
actgttcccatacatccaatctgcc

SEQ ID NO: 4733037 - DNA, 25 bp, Homo sapien
ttctccccatctctattctattctc

SEQ ID NO: 4733038 - DNA, 25 bp, Homo sapien
tgttcccatacatccaatctgccat

SEQ ID NO: 4733039 - DNA, 25 bp, Homo sapien
tctctattctattctccacagtgaa

SEQ ID NO: 4733040 - DNA, 25 bp, Homo sapien
atgactaagatctactgcggacctc

SEQ ID NO: 4733041 - DNA, 25 bp, Homo sapien
gatctactgcggacctctggaccgg

SEQ ID NO: 4733042 - DNA, 25 bp, Homo sapien
gaaatctcaactgcatgacacctac

SEQ ID NO: 4733043 - DNA, 25 bp, Homo sapien
gctataaaactacaaatggttctcc

SEQ ID NO: 4733044 - DNA, 25 bp, Homo sapien
tacagagatgtgaagagtgcccttt

SEQ ID NO: 4733045 - DNA, 25 bp, Homo sapien
tcactgttacagcaaaatggctttg

SEQ ID NO: 4733046 - DNA, 25 bp, Homo sapien
gagattaacagatattggacagtcc

SEQ ID NO: 4733047 - DNA, 25 bp, Homo sapien
gtgcatctccttgacgtaaacagga

SEQ ID NO: 4733048 - DNA, 25 bp, Homo sapien
aaatctaagtgagcagaacaagggc

SEQ ID NO: 4733049 - DNA, 25 bp, Homo sapien
gcctatagagttagccttcgactga

SEQ ID NO: 4733050 - DNA, 25 bp, Homo sapien
gcagaatatacgttcctggtccaaa

SEQ ID NO: 4733051 - DNA, 25 bp, Homo sapien
aacaagggccaaagcgagctgggaa

SEQ ID NO: 4733052 - DNA, 25 bp, Homo sapien
gaaacattccaagttgttcatactt

SEQ ID NO: 4733053 - DNA, 25 bp, Homo sapien
gcatcatctatgaacttcagaaaca

SEQ ID NO: 4733054 - DNA, 25 bp, Homo sapien
agcaatggctgcatcatctatgaac

SEQ ID NO: 4733055 - DNA, 25 bp, Homo sapien
ttaaaaggagtaagcaatggctgca

SEQ ID NO: 4733056 - DNA, 25 bp, Homo sapien
atggcaaagtactcctttcaaatgt

SEQ ID NO: 4733057 - DNA, 25 bp, Homo sapien
gatggcaaagtactcctttcaaatg

SEQ ID NO: 4733058 - DNA, 25 bp, Homo sapien
cgatggcaaagtactcctttcaaat

SEQ ID NO: 4733059 - DNA, 25 bp, Homo sapien
cagcagaagcaaacagtgttctgat

SEQ ID NO: 4733060 - DNA, 25 bp, Homo sapien
ttgggtggtgttgacagagcatgca

SEQ ID NO: 4733061 - DNA, 25 bp, Homo sapien
gcacagcagaagcaaacagtgttct

SEQ ID NO: 4733062 - DNA, 25 bp, Homo sapien
tgcaggaagctgatctgtccccagc

SEQ ID NO: 4733063 - DNA, 25 bp, Homo sapien
gctgcaacaagctgtgatcccagca

SEQ ID NO: 4733064 - DNA, 25 bp, Homo sapien
ctggatctggctttgtgatacagca

SEQ ID NO: 4733065 - DNA, 25 bp, Homo sapien
gttattctcatcatgtctgtaatca

SEQ ID NO: 4733066 - DNA, 25 bp, Homo sapien
tcaccagatgcaataccagaaacat

SEQ ID NO: 4733067 - DNA, 25 bp, Homo sapien
caagcgtctgagaatgttcacgaat

SEQ ID NO: 4733068 - DNA, 25 bp, Homo sapien
caaaagacaaagtactcaagcgtct

SEQ ID NO: 4733069 - DNA, 25 bp, Homo sapien
gtattgactactttgaatttcagcc

SEQ ID NO: 4733070 - DNA, 25 bp, Homo sapien
cttcctgtagcgcactctgtattga

SEQ ID NO: 4733071 - DNA, 25 bp, Homo sapien
ttaaaagcttcctgtagcgcactct

SEQ ID NO: 4733072 - DNA, 25 bp, Homo sapien
gcgcactctgtattgactactttga

SEQ ID NO: 4733073 - DNA, 25 bp, Homo sapien
tgccactacaccctaatcgacttaa

SEQ ID NO: 4733074 - DNA, 25 bp, Homo sapien
tgaattggaatgaagtctacagacc

SEQ ID NO: 4733075 - DNA, 25 bp, Homo sapien
gacctcatggatatgctgaattgga

SEQ ID NO: 4733076 - DNA, 25 bp, Homo sapien
gaaagtactgctgaaaaatccgtgc

SEQ ID NO: 4733077 - DNA, 25 bp, Homo sapien
gctgctctgcttgcggaccaataat

SEQ ID NO: 4733078 - DNA, 25 bp, Homo sapien
gatgtgaagcataaggcaaaagacc

SEQ ID NO: 4733079 - DNA, 25 bp, Homo sapien
gcaaaagaccttgagttccacggat

SEQ ID NO: 4733080 - DNA, 25 bp, Homo sapien
tccacggatttcaggacaggaaaca

SEQ ID NO: 4733081 - DNA, 25 bp, Homo sapien
gaacaccaaacacatgccaagcaat

SEQ ID NO: 4733082 - DNA, 25 bp, Homo sapien
taacctcagtgtccaatgatgcagt

SEQ ID NO: 4733083 - DNA, 25 bp, Homo sapien
tctgttctggttctatcgtgggtaa

SEQ ID NO: 4733084 - DNA, 25 bp, Homo sapien
cgtgggtaagcaattctgctatact

SEQ ID NO: 4733085 - DNA, 25 bp, Homo sapien
taaatgggttaatgtcagtaataca

SEQ ID NO: 4733086 - DNA, 25 bp, Homo sapien
gccacagtcaacaagagccctgttt

SEQ ID NO: 4733087 - DNA, 25 bp, Homo sapien
catttgtagggattagcattgccac

SEQ ID NO: 4733088 - DNA, 25 bp, Homo sapien
caatatatcagtgacagtgatgtaa

SEQ ID NO: 4733089 - DNA, 25 bp, Homo sapien
gataaagtcccacagtcctatttgg

SEQ ID NO: 4733090 - DNA, 25 bp, Homo sapien
gggtcatatcagtgggctccccata

SEQ ID NO: 4733091 - DNA, 25 bp, Homo sapien
taaccaaaatagcttgggtcatatc

SEQ ID NO: 4733092 - DNA, 25 bp, Homo sapien
gggctccccatacgaatacagcttt

SEQ ID NO: 4733093 - DNA, 25 bp, Homo sapien
gatatcattgctgtgccctatctcc

SEQ ID NO: 4733094 - DNA, 25 bp, Homo sapien
tatcattgctgtgccctatctccat

SEQ ID NO: 4733095 - DNA, 25 bp, Homo sapien
ctccttgggctttgacgctctgtgc

SEQ ID NO: 4733096 - DNA, 25 bp, Homo sapien
gggctttgacgctctgtgccaagtc

SEQ ID NO: 4733097 - DNA, 25 bp, Homo sapien
ccctcaagtgactgaatggaccctg

SEQ ID NO: 4733098 - DNA, 25 bp, Homo sapien
gaaaaactgaattcctggcatattt

SEQ ID NO: 4733099 - DNA, 25 bp, Homo sapien
ctattttgacttaagattgtgtaaa

SEQ ID NO: 4733100 - DNA, 25 bp, Homo sapien
ctccattaatacagccagggattcc

SEQ ID NO: 4733101 - DNA, 25 bp, Homo sapien
cagacatctacaattggagatttgt

SEQ ID NO: 4733102 - DNA, 25 bp, Homo sapien
caccagacatctacaattggagatt

SEQ ID NO: 4733103 - DNA, 25 bp, Homo sapien
gcaccagacatctacaattggagat

SEQ ID NO: 4733104 - DNA, 25 bp, Homo sapien
tagcaccagacatctacaattggag

SEQ ID NO: 4733105 - DNA, 25 bp, Homo sapien
gccacagacgtataaacttcagctg

SEQ ID NO: 4733106 - DNA, 25 bp, Homo sapien
cacagacgtataaacttcagctgat

SEQ ID NO: 4733107 - DNA, 25 bp, Homo sapien
cagacgtataaacttcagctgatcc

SEQ ID NO: 4733108 - DNA, 25 bp, Homo sapien
atttaaggagtaattaacaatgcca

SEQ ID NO: 4733109 - DNA, 25 bp, Homo sapien
catgaatggtaagaatcactaaagc

SEQ ID NO: 4733110 - DNA, 25 bp, Homo sapien
tggtggtgcgcacatgttgccccag

SEQ ID NO: 4733111 - DNA, 25 bp, Homo sapien
tctgcagttagtttcttaacaatta

SEQ ID NO: 4733112 - DNA, 25 bp, Homo sapien
tcactaaagcaatcagtaacacagt

SEQ ID NO: 4733113 - DNA, 25 bp, Homo sapien
cctctttgataccattgacttgaat

SEQ ID NO: 4733114 - DNA, 25 bp, Homo sapien
ctctttgataccattgacttgaatg

SEQ ID NO: 4733115 - DNA, 25 bp, Homo sapien
gacttgaatgtgtaataggaagaac

SEQ ID NO: 4733116 - DNA, 25 bp, Homo sapien
tttgataccattgacttgaatgtgt

SEQ ID NO: 4733117 - DNA, 25 bp, Homo sapien
gaattctgaattcgtggcttatcaa

SEQ ID NO: 4733118 - DNA, 25 bp, Homo sapien
cgtggcttatcaataaaaacacatt

SEQ ID NO: 4733119 - DNA, 25 bp, Homo sapien
tgactttcacggaggttgactggtg

SEQ ID NO: 4733120 - DNA, 25 bp, Homo sapien
caggtacttgttcctcgacttgtgg

SEQ ID NO: 4733121 - DNA, 25 bp, Homo sapien
taagataaggaggtgccctctccac

SEQ ID NO: 4733122 - DNA, 25 bp, Homo sapien
atcttagttaagctttgtccttcct

SEQ ID NO: 4733123 - DNA, 25 bp, Homo sapien
taggtaataagataaggaggtgccc

SEQ ID NO: 4733124 - DNA, 25 bp, Homo sapien
acatctgaggctgcaatttgcatgc

SEQ ID NO: 4733125 - DNA, 25 bp, Homo sapien
tattaatttctgtccgacacgggaa

SEQ ID NO: 4733126 - DNA, 25 bp, Homo sapien
gacacgggaattcaatttgtactgt

SEQ ID NO: 4733127 - DNA, 25 bp, Homo sapien
gctctgtggtttgcgctgcatatta

SEQ ID NO: 4733128 - DNA, 25 bp, Homo sapien
tgctgcttgttcaggcagctctgtg

SEQ ID NO: 4733129 - DNA, 25 bp, Homo sapien
cagctcagggacttcatgaagggct

SEQ ID NO: 4733130 - DNA, 25 bp, Homo sapien
aaagatgcacttttcaccgttgtgc

SEQ ID NO: 4733131 - DNA, 25 bp, Homo sapien
tcaccgttgtgcatggagactccag

SEQ ID NO: 4733132 - DNA, 25 bp, Homo sapien
caggtgagataaaagatgcactttt

SEQ ID NO: 4733133 - DNA, 25 bp, Homo sapien
aatcagatgaaatttcacgataagc

SEQ ID NO: 4733134 - DNA, 25 bp, Homo sapien
cattagtagcttcttgttcatagga

SEQ ID NO: 4733135 - DNA, 25 bp, Homo sapien
cacaagcatcctaaaatcagatgaa

SEQ ID NO: 4733136 - DNA, 25 bp, Homo sapien
cacgataagcagtatcattagtagc

SEQ ID NO: 4733137 - DNA, 25 bp, Homo sapien
cacagggaagcaaaacacctaaata

SEQ ID NO: 4733138 - DNA, 25 bp, Homo sapien
gcaagttagtgtgatagcatacaca

SEQ ID NO: 4733139 - DNA, 25 bp, Homo sapien
gataatggtaatagcccagtgactt

SEQ ID NO: 4733140 - DNA, 25 bp, Homo sapien
ccagtgacttccaagtaaggtgaat

SEQ ID NO: 4733141 - DNA, 25 bp, Homo sapien
cacaattctcacaatggattcaggg

SEQ ID NO: 4733142 - DNA, 25 bp, Homo sapien
ggaatggagctacttctggagtaca

SEQ ID NO: 4733143 - DNA, 25 bp, Homo sapien
catgcagtttcgttgatccagagaa

SEQ ID NO: 4733144 - DNA, 25 bp, Homo sapien
taatcctagttacagacaagtccca

SEQ ID NO: 4733145 - DNA, 25 bp, Homo sapien
ctgttttacattcatgtccacagga

SEQ ID NO: 4733146 - DNA, 25 bp, Homo sapien
ttacattcatgtccacaggaaaagc

SEQ ID NO: 4733147 - DNA, 25 bp, Homo sapien
tgttttacattcatgtccacaggaa

SEQ ID NO: 4733148 - DNA, 25 bp, Homo sapien
cattcatgtccacaggaaaagccat

SEQ ID NO: 4733149 - DNA, 25 bp, Homo sapien
tacatgatttctgtcctgtccggca

SEQ ID NO: 4733150 - DNA, 25 bp, Homo sapien
gagctgggagcataagccatcctaa

SEQ ID NO: 4733151 - DNA, 25 bp, Homo sapien
tgccagtcagatcataaaccgtaga

SEQ ID NO: 4733152 - DNA, 25 bp, Homo sapien
caatgtaccctaggatctacgctgg

SEQ ID NO: 4733153 - DNA, 25 bp, Homo sapien
gaatctaaagtgaagtaatgctcca

SEQ ID NO: 4733154 - DNA, 25 bp, Homo sapien
tccaagaactgggaatctaaagtga

SEQ ID NO: 4733155 - DNA, 25 bp, Homo sapien
aaagtgaagtaatgctccatcaaga

SEQ ID NO: 4733156 - DNA, 25 bp, Homo sapien
ctgggaatctaaagtgaagtaatgc

SEQ ID NO: 4733157 - DNA, 25 bp, Homo sapien
tctgagaaagggcagactggctcca

SEQ ID NO: 4733158 - DNA, 25 bp, Homo sapien
agaaagggcagactggctccacaag

SEQ ID NO: 4733159 - DNA, 25 bp, Homo sapien
ggcagactggctccacaagcgggtc

SEQ ID NO: 4733160 - DNA, 25 bp, Homo sapien
actggctccacaagcgggtccctga

SEQ ID NO: 4733161 - DNA, 25 bp, Homo sapien
tagctggaaatacactctggctctg

SEQ ID NO: 4733162 - DNA, 25 bp, Homo sapien
ggtaacattgcacaccaataaggca

SEQ ID NO: 4733163 - DNA, 25 bp, Homo sapien
gacagtacgcgagtttctcattagc

SEQ ID NO: 4733164 - DNA, 25 bp, Homo sapien
tcacacgggagatttaattctgcac

SEQ ID NO: 4733165 - DNA, 25 bp, Homo sapien
ccacatactcatagtatgtgccatc

SEQ ID NO: 4733166 - DNA, 25 bp, Homo sapien
tgtgaaccacatactcatagtatgt

SEQ ID NO: 4733167 - DNA, 25 bp, Homo sapien
gaaccacatactcatagtatgtgcc

SEQ ID NO: 4733168 - DNA, 25 bp, Homo sapien
acatactcatagtatgtgccatcat

SEQ ID NO: 4733169 - DNA, 25 bp, Homo sapien
caagcttgtctagactcagctcttc

SEQ ID NO: 4733170 - DNA, 25 bp, Homo sapien
agcttgtctagactcagctcttcat

SEQ ID NO: 4733171 - DNA, 25 bp, Homo sapien
aagcttgtctagactcagctcttca

SEQ ID NO: 4733172 - DNA, 25 bp, Homo sapien
gcaagcttgtctagactcagctctt

SEQ ID NO: 4733173 - DNA, 25 bp, Homo sapien
tctgttgtcatgccgattgtcagca

SEQ ID NO: 4733174 - DNA, 25 bp, Homo sapien
gttgtcatgccgattgtcagcatgg

SEQ ID NO: 4733175 - DNA, 25 bp, Homo sapien
tgtcatgccgattgtcagcatggtc

SEQ ID NO: 4733176 - DNA, 25 bp, Homo sapien
gtcatgccgattgtcagcatggtcc

SEQ ID NO: 4733177 - DNA, 25 bp, Homo sapien
caagctgaaaagatattccagacca

SEQ ID NO: 4733178 - DNA, 25 bp, Homo sapien
agctgaaaagatattccagaccaaa

SEQ ID NO: 4733179 - DNA, 25 bp, Homo sapien
ctgaaaagatattccagaccaaaac

SEQ ID NO: 4733180 - DNA, 25 bp, Homo sapien
aacaagctgaaaagatattccagac

SEQ ID NO: 4733181 - DNA, 25 bp, Homo sapien
ctaatatgtaatataaggattagag

SEQ ID NO: 4733182 - DNA, 25 bp, Homo sapien
agcaagcaagcaaactaatatgtaa

SEQ ID NO: 4733183 - DNA, 25 bp, Homo sapien
ttaagaaatttgcatgcaaagttaa

SEQ ID NO: 4733184 - DNA, 25 bp, Homo sapien
gcaagcaagcaaactaatatgtaat

SEQ ID NO: 4733185 - DNA, 25 bp, Homo sapien
tggttcaatttgttcctaggtatgt

SEQ ID NO: 4733186 - DNA, 25 bp, Homo sapien
cattgaatctatggatagcttcggg

SEQ ID NO: 4733187 - DNA, 25 bp, Homo sapien
gactgcattcttgatcactttttca

SEQ ID NO: 4733188 - DNA, 25 bp, Homo sapien
ggtagctattgtaaatcagactgca

SEQ ID NO: 4733189 - DNA, 25 bp, Homo sapien
tggtctcaggtagtctctgcaactc

SEQ ID NO: 4733190 - DNA, 25 bp, Homo sapien
cagaggctgtaattggtctcaggta

SEQ ID NO: 4733191 - DNA, 25 bp, Homo sapien
acaaatgccagaggctgtaattggt

SEQ ID NO: 4733192 - DNA, 25 bp, Homo sapien
ggtagtctctgcaactctgccaata

SEQ ID NO: 4733193 - DNA, 25 bp, Homo sapien
gagtaatttaatccagcccaccatg

SEQ ID NO: 4733194 - DNA, 25 bp, Homo sapien
gctgtacccaaatctgaatgcagga

SEQ ID NO: 4733195 - DNA, 25 bp, Homo sapien
aaatatctaggaggcttctttgcca

SEQ ID NO: 4733196 - DNA, 25 bp, Homo sapien
tctgtgagacatatggcctgtggag

SEQ ID NO: 4733197 - DNA, 25 bp, Homo sapien
atcactgcagacgtaaaagttttgc

SEQ ID NO: 4733198 - DNA, 25 bp, Homo sapien
agctccttgatggaaggcacactag

SEQ ID NO: 4733199 - DNA, 25 bp, Homo sapien
cacatcagcattatagaacccttga

SEQ ID NO: 4733200 - DNA, 25 bp, Homo sapien
taaaggagccatcgcaatcttccat

SEQ ID NO: 4733201 - DNA, 25 bp, Homo sapien
catcaaaggcaacaccgtataggta

SEQ ID NO: 4733202 - DNA, 25 bp, Homo sapien
tgaataccttaagccaacagagctg

SEQ ID NO: 4733203 - DNA, 25 bp, Homo sapien
gagcccacactagcagagagaactg

SEQ ID NO: 4733204 - DNA, 25 bp, Homo sapien
catctctgtgggataaaagtggcta

SEQ ID NO: 4733205 - DNA, 25 bp, Homo sapien
gagctaagttgatatcggtttccac

SEQ ID NO: 4733206 - DNA, 25 bp, Homo sapien
gagtggtacctcatctcattgtgca

SEQ ID NO: 4733207 - DNA, 25 bp, Homo sapien
tatcagaagctttgtgccaatagga

SEQ ID NO: 4733208 - DNA, 25 bp, Homo sapien
ccacatcaggatggagagctaagtt

SEQ ID NO: 4733209 - DNA, 25 bp, Homo sapien
cctggatcttttcttgagatgacat

SEQ ID NO: 4733210 - DNA, 25 bp, Homo sapien
gatgttgatcgtatcctggatcttt

SEQ ID NO: 4733211 - DNA, 25 bp, Homo sapien
cgaaaatgtgatgttgatcgtatcc

SEQ ID NO: 4733212 - DNA, 25 bp, Homo sapien
cactattactatgttcgaaaatgtg

SEQ ID NO: 4733213 - DNA, 25 bp, Homo sapien
tatttattccacaagtgtacatgtt

SEQ ID NO: 4733214 - DNA, 25 bp, Homo sapien
cacaagtgtacatgttcatgtatgc

SEQ ID NO: 4733215 - DNA, 25 bp, Homo sapien
agtgtacatgttcatgtatgccaaa

SEQ ID NO: 4733216 - DNA, 25 bp, Homo sapien
tttattccacaagtgtacatgttca

SEQ ID NO: 4733217 - DNA, 25 bp, Homo sapien
aggtcaaggctgtaatgagctgaga

SEQ ID NO: 4733218 - DNA, 25 bp, Homo sapien
tcaaggctgtaatgagctgagattg

SEQ ID NO: 4733219 - DNA, 25 bp, Homo sapien
ggaggtcaaggctgtaatgagctga

SEQ ID NO: 4733220 - DNA, 25 bp, Homo sapien
ggtcaaggctgtaatgagctgagat

SEQ ID NO: 4733221 - DNA, 25 bp, Homo sapien
tttgatgcaacatgtcacaactcct

SEQ ID NO: 4733222 - DNA, 25 bp, Homo sapien
tgcaacatgtcacaactcctcatgt

SEQ ID NO: 4733223 - DNA, 25 bp, Homo sapien
ccagcaataacaagtatggccttcc

SEQ ID NO: 4733224 - DNA, 25 bp, Homo sapien
caataacaagtatggccttccttta

SEQ ID NO: 4733225 - DNA, 25 bp, Homo sapien
tagcagtgtggtagacacgtactca

SEQ ID NO: 4733226 - DNA, 25 bp, Homo sapien
cattcagctagcagtgtggtagaca

SEQ ID NO: 4733227 - DNA, 25 bp, Homo sapien
tgtggtagacacgtactcattggta

SEQ ID NO: 4733228 - DNA, 25 bp, Homo sapien
gacacgtactcattggtagcagtgg

SEQ ID NO: 4733229 - DNA, 25 bp, Homo sapien
aaaagtgaaaaataaatcaatgtcg

SEQ ID NO: 4733230 - DNA, 25 bp, Homo sapien
tgtcaaaagtgaaaaataaatcaat

SEQ ID NO: 4733231 - DNA, 25 bp, Homo sapien
caaaagtgaaaaataaatcaatgtc

SEQ ID NO: 4733232 - DNA, 25 bp, Homo sapien
gttgtcaaaagtgaaaaataaatca

SEQ ID NO: 4733233 - DNA, 25 bp, Homo sapien
ttgtatctgtaagcgttagtgccat

SEQ ID NO: 4733234 - DNA, 25 bp, Homo sapien
tgcatttgtatctgtaagcgttagt

SEQ ID NO: 4733235 - DNA, 25 bp, Homo sapien
catttgtatctgtaagcgttagtgc

SEQ ID NO: 4733236 - DNA, 25 bp, Homo sapien
attgcatttgtatctgtaagcgtta

SEQ ID NO: 4733237 - DNA, 25 bp, Homo sapien
aaggcagcacttctaatgatcctgg

SEQ ID NO: 4733238 - DNA, 25 bp, Homo sapien
aaaaggcagcacttctaatgatcct

SEQ ID NO: 4733239 - DNA, 25 bp, Homo sapien
ggcagcacttctaatgatcctggca

SEQ ID NO: 4733240 - DNA, 25 bp, Homo sapien
agcacttctaatgatcctggcattg

SEQ ID NO: 4733241 - DNA, 25 bp, Homo sapien
aggattggggcattaatttcctctt

SEQ ID NO: 4733242 - DNA, 25 bp, Homo sapien
tcaaaacggatgtttcaggattggg

SEQ ID NO: 4733243 - DNA, 25 bp, Homo sapien
tgtagctcggagtaatttcatcatc

SEQ ID NO: 4733244 - DNA, 25 bp, Homo sapien
ctgtagctcggagtaatttcatcat

SEQ ID NO: 4733245 - DNA, 25 bp, Homo sapien
aggagaggtactctgctttttagag

SEQ ID NO: 4733246 - DNA, 25 bp, Homo sapien
gaggaggagaggtactctgcttttt

SEQ ID NO: 4733247 - DNA, 25 bp, Homo sapien
tgtaaatgggctaaaggctccaatt

SEQ ID NO: 4733248 - DNA, 25 bp, Homo sapien
atgacaggaccaaatacacacaaaa

SEQ ID NO: 4733249 - DNA, 25 bp, Homo sapien
caatattaactttaaatgtaaatgg

SEQ ID NO: 4733250 - DNA, 25 bp, Homo sapien
taatgacaggaccaaatacacacaa

SEQ ID NO: 4733251 - DNA, 25 bp, Homo sapien
aaaggtaagaactgaacaagtgcca

SEQ ID NO: 4733252 - DNA, 25 bp, Homo sapien
ttgtttatctcatcaaagggagcag

SEQ ID NO: 4733253 - DNA, 25 bp, Homo sapien
ctatggtgcttcaaacatattgttt

SEQ ID NO: 4733254 - DNA, 25 bp, Homo sapien
gagcaggttctaaaggtaagaactg

SEQ ID NO: 4733255 - DNA, 25 bp, Homo sapien
gagcagatggcccatctatgatggt

SEQ ID NO: 4733256 - DNA, 25 bp, Homo sapien
tctatgatggtctgccttcacttga

SEQ ID NO: 4733257 - DNA, 25 bp, Homo sapien
ctgccttcacttgatgagagtctgc

SEQ ID NO: 4733258 - DNA, 25 bp, Homo sapien
cttgatgagagtctgctccaatctc

SEQ ID NO: 4733259 - DNA, 25 bp, Homo sapien
cgagtaatagatggccttcagagga

SEQ ID NO: 4733260 - DNA, 25 bp, Homo sapien
cactagcccattaggaagagcacaa

SEQ ID NO: 4733261 - DNA, 25 bp, Homo sapien
ttcagaggaaaaagacactagccca

SEQ ID NO: 4733262 - DNA, 25 bp, Homo sapien
caagcgagtgtgaacaacagccttc

SEQ ID NO: 4733263 - DNA, 25 bp, Homo sapien
aatatctctaacagcagcatcaagc

SEQ ID NO: 4733264 - DNA, 25 bp, Homo sapien
tgcctgtaagacagcaaatatctct

SEQ ID NO: 4733265 - DNA, 25 bp, Homo sapien
tctatcccattctttttccacaatc

SEQ ID NO: 4733266 - DNA, 25 bp, Homo sapien
tttttccacaatctctcctttgcct

SEQ ID NO: 4733267 - DNA, 25 bp, Homo sapien
ataatgtcccaattaattgatttgt

SEQ ID NO: 4733268 - DNA, 25 bp, Homo sapien
gtctgataattgatagctttgctgt

SEQ ID NO: 4733269 - DNA, 25 bp, Homo sapien
agctaaattctgtaatcatgttcat

SEQ ID NO: 4733270 - DNA, 25 bp, Homo sapien
acagaggcaccactaaagtctgata

SEQ ID NO: 4733271 - DNA, 25 bp, Homo sapien
gcaaggggaacttcatgtaatatca

SEQ ID NO: 4733272 - DNA, 25 bp, Homo sapien
ttccatcactatggttacactttct

SEQ ID NO: 4733273 - DNA, 25 bp, Homo sapien
ctatggttacactttcttcgctctc

SEQ ID NO: 4733274 - DNA, 25 bp, Homo sapien
gtctgttggatattgaagcctctga

SEQ ID NO: 4733275 - DNA, 25 bp, Homo sapien
ttcacagtagcccttactaccatca

SEQ ID NO: 4733276 - DNA, 25 bp, Homo sapien
tgcacactttcataacatcctcttc

SEQ ID NO: 4733277 - DNA, 25 bp, Homo sapien
acatcctcttcacagtagcccttac

SEQ ID NO: 4733278 - DNA, 25 bp, Homo sapien
gcacactttcataacatcctcttca

SEQ ID NO: 4733279 - DNA, 25 bp, Homo sapien
tcagagtagtgactcgcactacagt

SEQ ID NO: 4733280 - DNA, 25 bp, Homo sapien
ttcttacagccaaactatatgtaac

SEQ ID NO: 4733281 - DNA, 25 bp, Homo sapien
tatatgtaacatcactcagagtagt

SEQ ID NO: 4733282 - DNA, 25 bp, Homo sapien
gactcgcactacagtttcacaagtg

SEQ ID NO: 4733283 - DNA, 25 bp, Homo sapien
gtggtaaccgacttccatcatcttc

SEQ ID NO: 4733284 - DNA, 25 bp, Homo sapien
agaactattgacatgtacagctaac

SEQ ID NO: 4733285 - DNA, 25 bp, Homo sapien
cctacagttagggacgatgtggtaa

SEQ ID NO: 4733286 - DNA, 25 bp, Homo sapien
tacagctaaccaacccctacagtta

SEQ ID NO: 4733287 - DNA, 25 bp, Homo sapien
tcaggggatggcatctttagcacag

SEQ ID NO: 4733288 - DNA, 25 bp, Homo sapien
ttgaatacttgttgcagtaagatac

SEQ ID NO: 4733289 - DNA, 25 bp, Homo sapien
gttgcagtaagataccaagtagctt

SEQ ID NO: 4733290 - DNA, 25 bp, Homo sapien
gggatggcatctttagcacagacat

SEQ ID NO: 4733291 - DNA, 25 bp, Homo sapien
caggacatcattgtgggtggagggg

SEQ ID NO: 4733292 - DNA, 25 bp, Homo sapien
catgtgctgaagtgctaaacacccc

SEQ ID NO: 4733293 - DNA, 25 bp, Homo sapien
tggcctgctgcagactaatttcttg

SEQ ID NO: 4733294 - DNA, 25 bp, Homo sapien
tgtgctaaccgtgagggcgatttaa

SEQ ID NO: 4733295 - DNA, 25 bp, Homo sapien
gccttgaatgcacagtcacagagca

SEQ ID NO: 4733296 - DNA, 25 bp, Homo sapien
cacagatggcccatcatctgagcat

SEQ ID NO: 4733297 - DNA, 25 bp, Homo sapien
aggtactttatgtgttggctcaagg

SEQ ID NO: 4733298 - DNA, 25 bp, Homo sapien
gcacagatggcccatcatctgagca

SEQ ID NO: 4733299 - DNA, 25 bp, Homo sapien
ctttaattcgcaagtgaggtacttt

SEQ ID NO: 4733300 - DNA, 25 bp, Homo sapien
ccccaaaattaagggctgctgtgcc

SEQ ID NO: 4733301 - DNA, 25 bp, Homo sapien
taatcctggtagtaaagagacagca

SEQ ID NO: 4733302 - DNA, 25 bp, Homo sapien
gaacataatcctggtagtaaagaga

SEQ ID NO: 4733303 - DNA, 25 bp, Homo sapien
ggtagtaaagagacagcataatgcc

SEQ ID NO: 4733304 - DNA, 25 bp, Homo sapien
aaagagacagcataatgcctttctc

SEQ ID NO: 4733305 - DNA, 25 bp, Homo sapien
tcaattgcccattgactaaagccca

SEQ ID NO: 4733306 - DNA, 25 bp, Homo sapien
tatgcagctcctcgaggtgtattcc

SEQ ID NO: 4733307 - DNA, 25 bp, Homo sapien
gcgttctcgacccaggctctgtggc

SEQ ID NO: 4733308 - DNA, 25 bp, Homo sapien
atttccggcgttctcgacccaggct

SEQ ID NO: 4733309 - DNA, 25 bp, Homo sapien
gttgaggcttccagggggacactca

SEQ ID NO: 4733310 - DNA, 25 bp, Homo sapien
ttgaggcttccagggggacactcag

SEQ ID NO: 4733311 - DNA, 25 bp, Homo sapien
ttccagggggacactcagttaacat

SEQ ID NO: 4733312 - DNA, 25 bp, Homo sapien
ggcttccagggggacactcagttaa

SEQ ID NO: 4733313 - DNA, 25 bp, Homo sapien
gcataagtccttgatacaatcctgg

SEQ ID NO: 4733314 - DNA, 25 bp, Homo sapien
tgctttttggccacactgctcacct

SEQ ID NO: 4733315 - DNA, 25 bp, Homo sapien
taaagcgagggctgtgcttctcgtc

SEQ ID NO: 4733316 - DNA, 25 bp, Homo sapien
gagagaactgaagagtccccagctg

SEQ ID NO: 4733317 - DNA, 25 bp, Homo sapien
tttcatccactgaaccgcttcctgg

SEQ ID NO: 4733318 - DNA, 25 bp, Homo sapien
cctaatggtggtaatgcagggccca

SEQ ID NO: 4733319 - DNA, 25 bp, Homo sapien
catcccatgggtgctttcaatttta

SEQ ID NO: 4733320 - DNA, 25 bp, Homo sapien
tgtttcccatgaactgagctttcct

SEQ ID NO: 4733321 - DNA, 25 bp, Homo sapien
aataggacgtgactttgccaccaag

SEQ ID NO: 4733322 - DNA, 25 bp, Homo sapien
gccagaaagtggaagtgcacgagtt

SEQ ID NO: 4733323 - DNA, 25 bp, Homo sapien
tatgagaaataagcagttcctcctc

SEQ ID NO: 4733324 - DNA, 25 bp, Homo sapien
ggacagatatctctagcaccagcta

SEQ ID NO: 4733325 - DNA, 25 bp, Homo sapien
ctttcttgtggtaaatccacacttc

SEQ ID NO: 4733326 - DNA, 25 bp, Homo sapien
tttcttgtggtaaatccacacttca

SEQ ID NO: 4733327 - DNA, 25 bp, Homo sapien
gaagtgaacctcataaattgtgcac

SEQ ID NO: 4733328 - DNA, 25 bp, Homo sapien
gattcagccttattcctttggagaa

SEQ ID NO: 4733329 - DNA, 25 bp, Homo sapien
agattcagataaaaagctcagttcc

SEQ ID NO: 4733330 - DNA, 25 bp, Homo sapien
ggaaaagctacaagaaagcactgaa

SEQ ID NO: 4733331 - DNA, 25 bp, Homo sapien
gcagtcattggctaaagctccctct

SEQ ID NO: 4733332 - DNA, 25 bp, Homo sapien
gaaatgtctccctgtagatctatat

SEQ ID NO: 4733333 - DNA, 25 bp, Homo sapien
ccagaagttattaggcgagtatgca

SEQ ID NO: 4733334 - DNA, 25 bp, Homo sapien
tactccctaaaacaggctgatgcat

SEQ ID NO: 4733335 - DNA, 25 bp, Homo sapien
aatgtaacaatactatgtttgaaat

SEQ ID NO: 4733336 - DNA, 25 bp, Homo sapien
acaaatgtaacaatactatgtttga

SEQ ID NO: 4733337 - DNA, 25 bp, Homo sapien
tgaaatgttcattgactccttctgt

SEQ ID NO: 4733338 - DNA, 25 bp, Homo sapien
gtaacaatactatgtttgaaatgtt

SEQ ID NO: 4733339 - DNA, 25 bp, Homo sapien
tctttacaagcagccaagatgcctg

SEQ ID NO: 4733340 - DNA, 25 bp, Homo sapien
tcttttccctcgtagcccttgattc

SEQ ID NO: 4733341 - DNA, 25 bp, Homo sapien
ttgattctttacaagcagccaagat

SEQ ID NO: 4733342 - DNA, 25 bp, Homo sapien
tacaagcagccaagatgcctgtcct

SEQ ID NO: 4733343 - DNA, 25 bp, Homo sapien
ctggagagaccctgtaggcaagaac

SEQ ID NO: 4733344 - DNA, 25 bp, Homo sapien
agaccctgtaggcaagaaccaagtc

SEQ ID NO: 4733345 - DNA, 25 bp, Homo sapien
ttgcagatggtccaaatttccctgg

SEQ ID NO: 4733346 - DNA, 25 bp, Homo sapien
ccctggaacaaggtccatacacact

SEQ ID NO: 4733347 - DNA, 25 bp, Homo sapien
accactgcattactttgaaggtgga

SEQ ID NO: 4733348 - DNA, 25 bp, Homo sapien
aggtggatgggcataatacatctgg

SEQ ID NO: 4733349 - DNA, 25 bp, Homo sapien
cagtgctccttaggtgaagactcga

SEQ ID NO: 4733350 - DNA, 25 bp, Homo sapien
gaggccaatgaaaagcccaacgaag

SEQ ID NO: 4733351 - DNA, 25 bp, Homo sapien
tgtattatatgggtacactgtgatg

SEQ ID NO: 4733352 - DNA, 25 bp, Homo sapien
cgttagcctagaattcaggaactgc

SEQ ID NO: 4733353 - DNA, 25 bp, Homo sapien
catcgttgtgggattcatgttcctt

SEQ ID NO: 4733354 - DNA, 25 bp, Homo sapien
catgttccttaaagactattctcca

SEQ ID NO: 4733355 - DNA, 25 bp, Homo sapien
atacctcacattcccagaattgagg

SEQ ID NO: 4733356 - DNA, 25 bp, Homo sapien
ccagaattgaggctatcaagatgat

SEQ ID NO: 4733357 - DNA, 25 bp, Homo sapien
ttcattatttcctccgcatacctca

SEQ ID NO: 4733358 - DNA, 25 bp, Homo sapien
ttatttcctccgcatacctcacatt

SEQ ID NO: 4733359 - DNA, 25 bp, Homo sapien
tgacaagacatggtgatagtcgcca

SEQ ID NO: 4733360 - DNA, 25 bp, Homo sapien
tgcaatacaggtagcacagccctga

SEQ ID NO: 4733361 - DNA, 25 bp, Homo sapien
tgcaaagtagacaggctgacaagac

SEQ ID NO: 4733362 - DNA, 25 bp, Homo sapien
gccctgaggtacaagctgcaaagta

SEQ ID NO: 4733363 - DNA, 25 bp, Homo sapien
agtgatgaaagactttcaagaggtt

SEQ ID NO: 4733364 - DNA, 25 bp, Homo sapien
gatgaaagactttcaagaggttaag

SEQ ID NO: 4733365 - DNA, 25 bp, Homo sapien
tgaaagactttcaagaggttaagaa

SEQ ID NO: 4733366 - DNA, 25 bp, Homo sapien
tgatgaaagactttcaagaggttaa

SEQ ID NO: 4733367 - DNA, 25 bp, Homo sapien
ggacagtggctatggatcccaaaag

SEQ ID NO: 4733368 - DNA, 25 bp, Homo sapien
gaatgccacctgagtgactaagcca

SEQ ID NO: 4733369 - DNA, 25 bp, Homo sapien
cagactactgaaggatgagtggtca

SEQ ID NO: 4733370 - DNA, 25 bp, Homo sapien
tacagtaccactcaagcctctaggg

SEQ ID NO: 4733371 - DNA, 25 bp, Homo sapien
tgttcctgggcacacgatcagacga

SEQ ID NO: 4733372 - DNA, 25 bp, Homo sapien
gaagggacataaatccatcatgggc

SEQ ID NO: 4733373 - DNA, 25 bp, Homo sapien
gagtcaggtggcattaataacgcct

SEQ ID NO: 4733374 - DNA, 25 bp, Homo sapien
cctctctagcagttggatgagtcca

SEQ ID NO: 4733375 - DNA, 25 bp, Homo sapien
ttagagcaaagataccccacaaggg

SEQ ID NO: 4733376 - DNA, 25 bp, Homo sapien
tcacttgagctagcagcactggcca

SEQ ID NO: 4733377 - DNA, 25 bp, Homo sapien
cctggagctgcagtatggccaaata

SEQ ID NO: 4733378 - DNA, 25 bp, Homo sapien
catggagcctcaagacagaaagacc

SEQ ID NO: 4733379 - DNA, 25 bp, Homo sapien
tacagacaaggcaggggcgtttcca

SEQ ID NO: 4733380 - DNA, 25 bp, Homo sapien
acgcaaaagccgcaaggtgtccgat

SEQ ID NO: 4733381 - DNA, 25 bp, Homo sapien
taagttgattcttgaagtacagaca

SEQ ID NO: 4733382 - DNA, 25 bp, Homo sapien
aaacacaggaataagctcacgcaaa

SEQ ID NO: 4733383 - DNA, 25 bp, Homo sapien
aaaacgccttaattggctgctggca

SEQ ID NO: 4733384 - DNA, 25 bp, Homo sapien
catacagatgcttggtgcctgacac

SEQ ID NO: 4733385 - DNA, 25 bp, Homo sapien
caggtggtaccttccaagacagagg

SEQ ID NO: 4733386 - DNA, 25 bp, Homo sapien
ttgcatgcgccaacgtcaagagctg

SEQ ID NO: 4733387 - DNA, 25 bp, Homo sapien
taaggctggcaaacaaagtgctcgt

SEQ ID NO: 4733388 - DNA, 25 bp, Homo sapien
ggcaaacaaagtgctcgtttaataa

SEQ ID NO: 4733389 - DNA, 25 bp, Homo sapien
gtgctcgtttaataagttggctttc

SEQ ID NO: 4733390 - DNA, 25 bp, Homo sapien
caaagtgctcgtttaataagttggc

SEQ ID NO: 4733391 - DNA, 25 bp, Homo sapien
tgggacagcatccttgccaagaggt

SEQ ID NO: 4733392 - DNA, 25 bp, Homo sapien
cagataaattcacacgtgggacagc

SEQ ID NO: 4733393 - DNA, 25 bp, Homo sapien
taaataaactagcacagaggtcagc

SEQ ID NO: 4733394 - DNA, 25 bp, Homo sapien
aagataattcttagctcgaaggcca

SEQ ID NO: 4733395 - DNA, 25 bp, Homo sapien
cggaaagcaaagtgaaagcaggaca

SEQ ID NO: 4733396 - DNA, 25 bp, Homo sapien
tggtctgtggtcagttcgtgaagct

SEQ ID NO: 4733397 - DNA, 25 bp, Homo sapien
aagcaggacaggaattcactgattg

SEQ ID NO: 4733398 - DNA, 25 bp, Homo sapien
gaagctgatgagcttctcactgctg

SEQ ID NO: 4733399 - DNA, 25 bp, Homo sapien
agtggtgaaatctcgccaacatctc

SEQ ID NO: 4733400 - DNA, 25 bp, Homo sapien
aacatctctcgtaaaagatccttga

SEQ ID NO: 4733401 - DNA, 25 bp, Homo sapien
tctgcgcactttcccgttgactata

SEQ ID NO: 4733402 - DNA, 25 bp, Homo sapien
tctgttcacacaggtgaacaggact

SEQ ID NO: 4733403 - DNA, 25 bp, Homo sapien
tttgtgatactgagccaggtggtct

SEQ ID NO: 4733404 - DNA, 25 bp, Homo sapien
cctgacatctcaagatgagggagaa

SEQ ID NO: 4733405 - DNA, 25 bp, Homo sapien
gagaaatcagggtgctttgtgatac

SEQ ID NO: 4733406 - DNA, 25 bp, Homo sapien
acgaagttttctgagggatcctgac

SEQ ID NO: 4733407 - DNA, 25 bp, Homo sapien
caggatttgtttgataatttagtaa

SEQ ID NO: 4733408 - DNA, 25 bp, Homo sapien
caccaagtaaaacatgattgggttt

SEQ ID NO: 4733409 - DNA, 25 bp, Homo sapien
gggtttatgatgattgtagttctct

SEQ ID NO: 4733410 - DNA, 25 bp, Homo sapien
acttcttgttgatatgatttaggta

SEQ ID NO: 4733411 - DNA, 25 bp, Homo sapien
accacccacagcatcatgagaagga

SEQ ID NO: 4733412 - DNA, 25 bp, Homo sapien
ctgaagaactccaacccacataggg

SEQ ID NO: 4733413 - DNA, 25 bp, Homo sapien
gaaggaagctattagtttcatgctg

SEQ ID NO: 4733414 - DNA, 25 bp, Homo sapien
ccacccacagcatcatgagaaggaa

SEQ ID NO: 4733415 - DNA, 25 bp, Homo sapien
gttccactgggagtccagcatcagc

SEQ ID NO: 4733416 - DNA, 25 bp, Homo sapien
gtgttccactgggagtccagcatca

SEQ ID NO: 4733417 - DNA, 25 bp, Homo sapien
ttggtgtcatcttgcgttgataacg

SEQ ID NO: 4733418 - DNA, 25 bp, Homo sapien
taacgttactgctaaatcactacaa

SEQ ID NO: 4733419 - DNA, 25 bp, Homo sapien
gaagatgctgcttcacataatgcag

SEQ ID NO: 4733420 - DNA, 25 bp, Homo sapien
catccagtttcaacatcaaggggaa

SEQ ID NO: 4733421 - DNA, 25 bp, Homo sapien
tccagtttcaacatcaaggggaaag

SEQ ID NO: 4733422 - DNA, 25 bp, Homo sapien
gatgctgcttcacataatgcaggtc

SEQ ID NO: 4733423 - DNA, 25 bp, Homo sapien
tccccagcattgctccgtgggttgt

SEQ ID NO: 4733424 - DNA, 25 bp, Homo sapien
ccccagcattgctccgtgggttgta

SEQ ID NO: 4733425 - DNA, 25 bp, Homo sapien
gaaatagttacatccccagcattgc

SEQ ID NO: 4733426 - DNA, 25 bp, Homo sapien
caagaaatagttacatccccagcat

SEQ ID NO: 4733427 - DNA, 25 bp, Homo sapien
ctcctctcggcagatgcttcttttt

SEQ ID NO: 4733428 - DNA, 25 bp, Homo sapien
tgaaagcaaatcaagatcaaccccg

SEQ ID NO: 4733429 - DNA, 25 bp, Homo sapien
tccgtggcaactccctgaaagcaaa

SEQ ID NO: 4733430 - DNA, 25 bp, Homo sapien
ggtttaggttacatctgagctcact

SEQ ID NO: 4733431 - DNA, 25 bp, Homo sapien
caagctgtagggcactgagccaaag

SEQ ID NO: 4733432 - DNA, 25 bp, Homo sapien
cgtccagagaaagaagaccgtatct

SEQ ID NO: 4733433 - DNA, 25 bp, Homo sapien
gccagcaggagagaacctagagcat

SEQ ID NO: 4733434 - DNA, 25 bp, Homo sapien
tgagccaaaggtgaaccgtccagag

SEQ ID NO: 4733435 - DNA, 25 bp, Homo sapien
catcattacgtagaggggtggctcc

SEQ ID NO: 4733436 - DNA, 25 bp, Homo sapien
gtggctcccagtttagctcaaccat

SEQ ID NO: 4733437 - DNA, 25 bp, Homo sapien
tcattacgtagaggggtggctccca

SEQ ID NO: 4733438 - DNA, 25 bp, Homo sapien
ggtggctcccagtttagctcaacca

SEQ ID NO: 4733439 - DNA, 25 bp, Homo sapien
gatgatcagacgctccactggtgat

SEQ ID NO: 4733440 - DNA, 25 bp, Homo sapien
caccatgagctctatctgaagggat

SEQ ID NO: 4733441 - DNA, 25 bp, Homo sapien
ttagcacgcgcctcacagtatatgt

SEQ ID NO: 4733442 - DNA, 25 bp, Homo sapien
caatatttactcacaggttcaaggc

SEQ ID NO: 4733443 - DNA, 25 bp, Homo sapien
cccagacggtatccattgaggctag

SEQ ID NO: 4733444 - DNA, 25 bp, Homo sapien
caaactggtcattccgtcaatggtc

SEQ ID NO: 4733445 - DNA, 25 bp, Homo sapien
cgtcaggagccaggttgtacacaaa

SEQ ID NO: 4733446 - DNA, 25 bp, Homo sapien
caggatactctcatctgcgtcagga

SEQ ID NO: 4733447 - DNA, 25 bp, Homo sapien
ctccataagccatattgagcagatt

SEQ ID NO: 4733448 - DNA, 25 bp, Homo sapien
actccataagccatattgagcagat

SEQ ID NO: 4733449 - DNA, 25 bp, Homo sapien
tactccataagccatattgagcaga

SEQ ID NO: 4733450 - DNA, 25 bp, Homo sapien
aactttacagtgattggctccgtgg

SEQ ID NO: 4733451 - DNA, 25 bp, Homo sapien
tttggagactggtacagctgggaaa

SEQ ID NO: 4733452 - DNA, 25 bp, Homo sapien
cctggataccttctgtttggagact

SEQ ID NO: 4733453 - DNA, 25 bp, Homo sapien
aaaacgctgtgcctgctgagctagc

SEQ ID NO: 4733454 - DNA, 25 bp, Homo sapien
catctctgatagaagctgaacttgg

SEQ ID NO: 4733455 - DNA, 25 bp, Homo sapien
tgacctggtcgacaagaatacgaga

SEQ ID NO: 4733456 - DNA, 25 bp, Homo sapien
ctgaacttgggcgagcataggaaac

SEQ ID NO: 4733457 - DNA, 25 bp, Homo sapien
gaagtccgctgacatataaatttgc

SEQ ID NO: 4733458 - DNA, 25 bp, Homo sapien
tcaaaaacagtatctttcagtgaca

SEQ ID NO: 4733459 - DNA, 25 bp, Homo sapien
cttctcaaaaacagtatctttcagt

SEQ ID NO: 4733460 - DNA, 25 bp, Homo sapien
caaaaacagtatctttcagtgacat

SEQ ID NO: 4733461 - DNA, 25 bp, Homo sapien
tctcaaaaacagtatctttcagtga

SEQ ID NO: 4733462 - DNA, 25 bp, Homo sapien
caattaaccaaagaaactacacatc

SEQ ID NO: 4733463 - DNA, 25 bp, Homo sapien
aattctcaggagtaagcaatgccat

SEQ ID NO: 4733464 - DNA, 25 bp, Homo sapien
gaagtggccactaattacaattaac

SEQ ID NO: 4733465 - DNA, 25 bp, Homo sapien
actacacatcatcattagaattttt

SEQ ID NO: 4733466 - DNA, 25 bp, Homo sapien
agaaaccaagaacagaacacaaatc

SEQ ID NO: 4733467 - DNA, 25 bp, Homo sapien
acttacacctccaagtcctattgca

SEQ ID NO: 4733468 - DNA, 25 bp, Homo sapien
caagacttacacctccaagtcctat

SEQ ID NO: 4733469 - DNA, 25 bp, Homo sapien
caaatccaagacttacacctccaag

SEQ ID NO: 4733470 - DNA, 25 bp, Homo sapien
gcctctgctccaacaactgtgggaa

SEQ ID NO: 4733471 - DNA, 25 bp, Homo sapien
ggaaatccattggaagaatgcctag

SEQ ID NO: 4733472 - DNA, 25 bp, Homo sapien
caattaactctcactttggagttgg

SEQ ID NO: 4733473 - DNA, 25 bp, Homo sapien
gaatgcctagttattgccctttgag

SEQ ID NO: 4733474 - DNA, 25 bp, Homo sapien
ataaatactcaaggtcaatcccaac

SEQ ID NO: 4733475 - DNA, 25 bp, Homo sapien
ttcctctccgaataaatactcaagg

SEQ ID NO: 4733476 - DNA, 25 bp, Homo sapien
tactcaaggtcaatcccaacactac

SEQ ID NO: 4733477 - DNA, 25 bp, Homo sapien
cttcctctccgaataaatactcaag

SEQ ID NO: 4733478 - DNA, 25 bp, Homo sapien
gaacaaaacatcagcgccttcacat

SEQ ID NO: 4733479 - DNA, 25 bp, Homo sapien
aaaacatcagcgccttcacatacat

SEQ ID NO: 4733480 - DNA, 25 bp, Homo sapien
ttccacatattcagcccaagcagct

SEQ ID NO: 4733481 - DNA, 25 bp, Homo sapien
gtttgaagtctcaatccattcaggg

SEQ ID NO: 4733482 - DNA, 25 bp, Homo sapien
acaaagccatatcccaagctctgcc

SEQ ID NO: 4733483 - DNA, 25 bp, Homo sapien
ggtttgaagtctcaatccattcagg

SEQ ID NO: 4733484 - DNA, 25 bp, Homo sapien
aattgtagcttcacattaaccatgt

SEQ ID NO: 4733485 - DNA, 25 bp, Homo sapien
gcttcacattaaccatgttcggtat

SEQ ID NO: 4733486 - DNA, 25 bp, Homo sapien
ttcttctcctacaaggtagaaatga

SEQ ID NO: 4733487 - DNA, 25 bp, Homo sapien
catgttcggtattcagattcttctc

SEQ ID NO: 4733488 - DNA, 25 bp, Homo sapien
actggatggcagtgggcatgatctc

SEQ ID NO: 4733489 - DNA, 25 bp, Homo sapien
tcaaaccattaattcaaatctttct

SEQ ID NO: 4733490 - DNA, 25 bp, Homo sapien
ctgtggtcaagtgttctaagaattt

SEQ ID NO: 4733491 - DNA, 25 bp, Homo sapien
tcatccagactggatggcagtgggc

SEQ ID NO: 4733492 - DNA, 25 bp, Homo sapien
ctggaaaatcaattatgttggtcaa

SEQ ID NO: 4733493 - DNA, 25 bp, Homo sapien
aaatcaattatgttggtcaaatcac

SEQ ID NO: 4733494 - DNA, 25 bp, Homo sapien
gaaaatcaattatgttggtcaaatc

SEQ ID NO: 4733495 - DNA, 25 bp, Homo sapien
ggaaaatcaattatgttggtcaaat

SEQ ID NO: 4733496 - DNA, 25 bp, Homo sapien
ttctataccaccaatctcctgatgc

SEQ ID NO: 4733497 - DNA, 25 bp, Homo sapien
cattcctacgacaagcgcttaaatt

SEQ ID NO: 4733498 - DNA, 25 bp, Homo sapien
tacgacaagcgcttaaattgagaat

SEQ ID NO: 4733499 - DNA, 25 bp, Homo sapien
ggtgtctcttctataccaccaatct

SEQ ID NO: 4733500 - DNA, 25 bp, Homo sapien
gctgaaatgcaagtgcggtggcacg

SEQ ID NO: 4733501 - DNA, 25 bp, Homo sapien
aggtccagatttgccaccccaaaat

SEQ ID NO: 4733502 - DNA, 25 bp, Homo sapien
tactgaatggtgaaaaggtccagat

SEQ ID NO: 4733503 - DNA, 25 bp, Homo sapien
ctgggaattaacttactgaatggtg

SEQ ID NO: 4733504 - DNA, 25 bp, Homo sapien
aagcttacaggactctatttcacca

SEQ ID NO: 4733505 - DNA, 25 bp, Homo sapien
tcccagagtcaactggtgacgaaca

SEQ ID NO: 4733506 - DNA, 25 bp, Homo sapien
caagttggcccattagacagttgtg

SEQ ID NO: 4733507 - DNA, 25 bp, Homo sapien
ggaccattggctgtgttattgcaag

SEQ ID NO: 4733508 - DNA, 25 bp, Homo sapien
attctgaattgacgggatgctagtt

SEQ ID NO: 4733509 - DNA, 25 bp, Homo sapien
aagaactgcttctcaaaactgacaa

SEQ ID NO: 4733510 - DNA, 25 bp, Homo sapien
gggaagctttaacatagaaaaggca

SEQ ID NO: 4733511 - DNA, 25 bp, Homo sapien
ttgacgggatgctagttttagggaa

SEQ ID NO: 4733512 - DNA, 25 bp, Homo sapien
ggctctgctgcccacgaaccacttc

SEQ ID NO: 4733513 - DNA, 25 bp, Homo sapien
gctgcccacgaaccacttctaagca

SEQ ID NO: 4733514 - DNA, 25 bp, Homo sapien
tgccatgttagtttggagttgccgt

SEQ ID NO: 4733515 - DNA, 25 bp, Homo sapien
gtctgactgccatgttagtttggag

SEQ ID NO: 4733516 - DNA, 25 bp, Homo sapien
aggaccagcaaattaaagcctccaa

SEQ ID NO: 4733517 - DNA, 25 bp, Homo sapien
cagcaaattaaagcctccaaaaggt

SEQ ID NO: 4733518 - DNA, 25 bp, Homo sapien
cttcttcaggaccagcaaattaaag

SEQ ID NO: 4733519 - DNA, 25 bp, Homo sapien
agcctccaaaaggtccctctctcct

SEQ ID NO: 4733520 - DNA, 25 bp, Homo sapien
cttcacactggcaaagtgggcagac

SEQ ID NO: 4733521 - DNA, 25 bp, Homo sapien
gctgcttttggtttaccccagtaga

SEQ ID NO: 4733522 - DNA, 25 bp, Homo sapien
gtagaatcccatgaaaacctgcttc

SEQ ID NO: 4733523 - DNA, 25 bp, Homo sapien
cacactggcaaagtgggcagacaga

SEQ ID NO: 4733524 - DNA, 25 bp, Homo sapien
caaaactcccagtatgagtacgaat

SEQ ID NO: 4733525 - DNA, 25 bp, Homo sapien
gacctattctgtcaatgagcagctg

SEQ ID NO: 4733526 - DNA, 25 bp, Homo sapien
ctagacctattctgtcaatgagcag

SEQ ID NO: 4733527 - DNA, 25 bp, Homo sapien
cagtcacgacatagaaatctagacc

SEQ ID NO: 4733528 - DNA, 25 bp, Homo sapien
tctttcctggtaacttagcatgcac

SEQ ID NO: 4733529 - DNA, 25 bp, Homo sapien
taaatcaaagggcactgcagtcagc

SEQ ID NO: 4733530 - DNA, 25 bp, Homo sapien
tttgtaaggccccatcaatgactcc

SEQ ID NO: 4733531 - DNA, 25 bp, Homo sapien
gaaacccaaccagaatggagacata

SEQ ID NO: 4733532 - DNA, 25 bp, Homo sapien
gcagccaacaccctagtttgaaaga

SEQ ID NO: 4733533 - DNA, 25 bp, Homo sapien
tagtaactcttgctactcccagcag

SEQ ID NO: 4733534 - DNA, 25 bp, Homo sapien
taattgccttaccacacccaaggtg

SEQ ID NO: 4733535 - DNA, 25 bp, Homo sapien
caccagtgcatcttctattgagagc

SEQ ID NO: 4733536 - DNA, 25 bp, Homo sapien
caaacatgacatgtggagcctcttt

SEQ ID NO: 4733537 - DNA, 25 bp, Homo sapien
tctacttctgctggtgcatcagtct

SEQ ID NO: 4733538 - DNA, 25 bp, Homo sapien
attacagcattggtccaaacatgac

SEQ ID NO: 4733539 - DNA, 25 bp, Homo sapien
tacttctgctggtgcatcagtctgc

SEQ ID NO: 4733540 - DNA, 25 bp, Homo sapien
caatgaggttagcaggtgggccaca

SEQ ID NO: 4733541 - DNA, 25 bp, Homo sapien
tagcaatgttgaccccaaagcatct

SEQ ID NO: 4733542 - DNA, 25 bp, Homo sapien
tataagctcacaacatcagcaatga

SEQ ID NO: 4733543 - DNA, 25 bp, Homo sapien
ggccacaggcctcttttaaacagct

SEQ ID NO: 4733544 - DNA, 25 bp, Homo sapien
agctctaggaacttcgcgggcacaa

SEQ ID NO: 4733545 - DNA, 25 bp, Homo sapien
gccgcaacgggctgagctctaggaa

SEQ ID NO: 4733546 - DNA, 25 bp, Homo sapien
tgttcccgcccagagttcggactag

SEQ ID NO: 4733547 - DNA, 25 bp, Homo sapien
cagtttccttcttgcgctacacgcg

SEQ ID NO: 4733548 - DNA, 25 bp, Homo sapien
tcagcactgccgcggaggagtcgct

SEQ ID NO: 4733549 - DNA, 25 bp, Homo sapien
agctactacggctcgtgccgctggc

SEQ ID NO: 4733550 - DNA, 25 bp, Homo sapien
cgagctccgcggagaggcggtggcg

SEQ ID NO: 4733551 - DNA, 25 bp, Homo sapien
tgctgtgactcgaagctgcagctac

SEQ ID NO: 4733552 - DNA, 25 bp, Homo sapien
ttaaaaaatcacctgtcatacctac

SEQ ID NO: 4733553 - DNA, 25 bp, Homo sapien
atttaaaaaatcacctgtcatacct

SEQ ID NO: 4733554 - DNA, 25 bp, Homo sapien
ttagcccttctcctaaaatactaca

SEQ ID NO: 4733555 - DNA, 25 bp, Homo sapien
agcccttctcctaaaatactacatt

SEQ ID NO: 4733556 - DNA, 25 bp, Homo sapien
taaattaagcaacaatggccacgcg

SEQ ID NO: 4733557 - DNA, 25 bp, Homo sapien
aaatgaagcgtgtgcctatctgccc

SEQ ID NO: 4733558 - DNA, 25 bp, Homo sapien
ccaaggtcaaaagcgagataggcca

SEQ ID NO: 4733559 - DNA, 25 bp, Homo sapien
taattggagtccgtgaatcagagcc

SEQ ID NO: 4733560 - DNA, 25 bp, Homo sapien
gaatattcagtacgctaagcatgcg

SEQ ID NO: 4733561 - DNA, 25 bp, Homo sapien
taagcatgcgtccaccgtcttttag

SEQ ID NO: 4733562 - DNA, 25 bp, Homo sapien
ccaaagtagaggcatgcatccccaa

SEQ ID NO: 4733563 - DNA, 25 bp, Homo sapien
tccttccgttgctgagccaaagtag

SEQ ID NO: 4733564 - DNA, 25 bp, Homo sapien
taacggtgcagttctcccaataagg

SEQ ID NO: 4733565 - DNA, 25 bp, Homo sapien
ttctcccaataaggatgagcaagaa

SEQ ID NO: 4733566 - DNA, 25 bp, Homo sapien
ttaaagtaacggtgcagttctccca

SEQ ID NO: 4733567 - DNA, 25 bp, Homo sapien
gcagttctcccaataaggatgagca

SEQ ID NO: 4733568 - DNA, 25 bp, Homo sapien
caaagtccaatgctaaaagaaatgg

SEQ ID NO: 4733569 - DNA, 25 bp, Homo sapien
ctaaactgtgctcggcttaaaagaa

SEQ ID NO: 4733570 - DNA, 25 bp, Homo sapien
aagacagcacgaaacctaaactgtg

SEQ ID NO: 4733571 - DNA, 25 bp, Homo sapien
gacggagagactaccctcctattgc

SEQ ID NO: 4733572 - DNA, 25 bp, Homo sapien
tttttagtaggtcgctacaggagta

SEQ ID NO: 4733573 - DNA, 25 bp, Homo sapien
tccttgttgctttttagtaggtcgc

SEQ ID NO: 4733574 - DNA, 25 bp, Homo sapien
tttcaaaaagacgatgtctttctcc

SEQ ID NO: 4733575 - DNA, 25 bp, Homo sapien
aaaaagacgatgtctttctccttgt

SEQ ID NO: 4733576 - DNA, 25 bp, Homo sapien
ggaggtggactggaccacagattta

SEQ ID NO: 4733577 - DNA, 25 bp, Homo sapien
taaaagggaggtggactggaccaca

SEQ ID NO: 4733578 - DNA, 25 bp, Homo sapien
gtggactggaccacagatttatagc

SEQ ID NO: 4733579 - DNA, 25 bp, Homo sapien
ggtggactggaccacagatttatag

SEQ ID NO: 4733580 - DNA, 25 bp, Homo sapien
gtatcaccaaccccttctctgcctc

SEQ ID NO: 4733581 - DNA, 25 bp, Homo sapien
ccaaccccttctctgcctccgcact

SEQ ID NO: 4733582 - DNA, 25 bp, Homo sapien
accccttctctgcctccgcactgcc

SEQ ID NO: 4733583 - DNA, 25 bp, Homo sapien
cgtatcaccaaccccttctctgcct

SEQ ID NO: 4733584 - DNA, 25 bp, Homo sapien
cccaggatcctgattggtccacacg

SEQ ID NO: 4733585 - DNA, 25 bp, Homo sapien
ggtccacacgcttccattgaggccg

SEQ ID NO: 4733586 - DNA, 25 bp, Homo sapien
aagtatacgccgaatcgcgccacaa

SEQ ID NO: 4733587 - DNA, 25 bp, Homo sapien
tatcccgggcagcacgcgcggaagt

SEQ ID NO: 4733588 - DNA, 25 bp, Homo sapien
tatgtatgagtcattgagagctccc

SEQ ID NO: 4733589 - DNA, 25 bp, Homo sapien
tctgtccggtatgtatgagtcattg

SEQ ID NO: 4733590 - DNA, 25 bp, Homo sapien
taactctgtccggtatgtatgagtc

SEQ ID NO: 4733591 - DNA, 25 bp, Homo sapien
ataacatttaactctgtccggtatg

SEQ ID NO: 4733592 - DNA, 25 bp, Homo sapien
tgtttccacttgtgtgcgatgcacg

SEQ ID NO: 4733593 - DNA, 25 bp, Homo sapien
tgaaataataaaaccgggctgagca

SEQ ID NO: 4733594 - DNA, 25 bp, Homo sapien
gaaacggtttttatgcttccgatgc

SEQ ID NO: 4733595 - DNA, 25 bp, Homo sapien
gctcggaggctctttcttatattga

SEQ ID NO: 4733596 - DNA, 25 bp, Homo sapien
ggcttttgaagagcaacaattataa

SEQ ID NO: 4733597 - DNA, 25 bp, Homo sapien
aaatatacagctggattgggcaagc

SEQ ID NO: 4733598 - DNA, 25 bp, Homo sapien
gagataattaggaagtggatgagca

SEQ ID NO: 4733599 - DNA, 25 bp, Homo sapien
ttcttttggtatactcctgaagcag

SEQ ID NO: 4733600 - DNA, 25 bp, Homo sapien
aaactgcttgtgctgggcgcagaac

SEQ ID NO: 4733601 - DNA, 25 bp, Homo sapien
cctcatattgctttgtcatgctttt

SEQ ID NO: 4733602 - DNA, 25 bp, Homo sapien
tttcaaaactgcttgtgctgggcgc

SEQ ID NO: 4733603 - DNA, 25 bp, Homo sapien
tgggcgcagaactgggaaggcaggg

SEQ ID NO: 4733604 - DNA, 25 bp, Homo sapien
gagcagctgctaggatccttgccgt

SEQ ID NO: 4733605 - DNA, 25 bp, Homo sapien
tctttcgagctgcacaatagccccg

SEQ ID NO: 4733606 - DNA, 25 bp, Homo sapien
taatgactgtatgatggatgcaacc

SEQ ID NO: 4733607 - DNA, 25 bp, Homo sapien
cgtgtgacagcgctacctctttgta

SEQ ID NO: 4733608 - DNA, 25 bp, Homo sapien
catcgggtaatttccaactgaaccg

SEQ ID NO: 4733609 - DNA, 25 bp, Homo sapien
tatgccattttctgcagtcagcgtt

SEQ ID NO: 4733610 - DNA, 25 bp, Homo sapien
tacggacggcgaatttatccaaaca

SEQ ID NO: 4733611 - DNA, 25 bp, Homo sapien
tatccaaacacttaagcaaggagag

SEQ ID NO: 4733612 - DNA, 25 bp, Homo sapien
gcagcctactcagcgctgctccgga

SEQ ID NO: 4733613 - DNA, 25 bp, Homo sapien
aatagtttgcaactgccggtcaaca

SEQ ID NO: 4733614 - DNA, 25 bp, Homo sapien
gcgctgctccggaggcgcgggacgc

SEQ ID NO: 4733615 - DNA, 25 bp, Homo sapien
acgtgagccgcgctcctcccagtgc

SEQ ID NO: 4733616 - DNA, 25 bp, Homo sapien
tgcaccgaggcagcgcgcagccagt

SEQ ID NO: 4733617 - DNA, 25 bp, Homo sapien
gtaacttctgcaccgaggcagcgcg

SEQ ID NO: 4733618 - DNA, 25 bp, Homo sapien
ccagtcggggaagaactctgcaacc

SEQ ID NO: 4733619 - DNA, 25 bp, Homo sapien
gactgcaggagtaacttctgcaccg

SEQ ID NO: 4733620 - DNA, 25 bp, Homo sapien
gtccgagactcccaagtcgggcgag

SEQ ID NO: 4733621 - DNA, 25 bp, Homo sapien
gatgctggagcgagtgtcagggtcc

SEQ ID NO: 4733622 - DNA, 25 bp, Homo sapien
aagtccgaccctctcgggagggctg

SEQ ID NO: 4733623 - DNA, 25 bp, Homo sapien
gcgagtgtcagggtccgagactccc

SEQ ID NO: 4733624 - DNA, 25 bp, Homo sapien
tcggccccacaggtgcgcagcgaag

SEQ ID NO: 4733625 - DNA, 25 bp, Homo sapien
ggtgcgcagcgaagtcaccacgttg

SEQ ID NO: 4733626 - DNA, 25 bp, Homo sapien
actctgagtcttgcctgtgctggcc

SEQ ID NO: 4733627 - DNA, 25 bp, Homo sapien
tcactccactctgagtcttgcctgt

SEQ ID NO: 4733628 - DNA, 25 bp, Homo sapien
caattgtatgttttgaaggtagtac

SEQ ID NO: 4733629 - DNA, 25 bp, Homo sapien
tttgaaggtagtaccagacttctgt

SEQ ID NO: 4733630 - DNA, 25 bp, Homo sapien
gtatgttttgaaggtagtaccagac

SEQ ID NO: 4733631 - DNA, 25 bp, Homo sapien
aggtagtaccagacttctgttcaca

SEQ ID NO: 4733632 - DNA, 25 bp, Homo sapien
tatcctttggataatgaacctcttg

SEQ ID NO: 4733633 - DNA, 25 bp, Homo sapien
tctatcctttggataatgaacctct

SEQ ID NO: 4733634 - DNA, 25 bp, Homo sapien
ctatcctttggataatgaacctctt

SEQ ID NO: 4733635 - DNA, 25 bp, Homo sapien
taagcaaggcatccaattttagatt

SEQ ID NO: 4733636 - DNA, 25 bp, Homo sapien
tataaggtgtaagcaaggcatccaa

SEQ ID NO: 4733637 - DNA, 25 bp, Homo sapien
gttctccttgaagagatgtgctcta

SEQ ID NO: 4733638 - DNA, 25 bp, Homo sapien
caattttagatttctacgtatggct

SEQ ID NO: 4733639 - DNA, 25 bp, Homo sapien
gaacatcagcaaaacgccaggattt

SEQ ID NO: 4733640 - DNA, 25 bp, Homo sapien
cagtataagcatctacatcaagaag

SEQ ID NO: 4733641 - DNA, 25 bp, Homo sapien
cagaacatcagcaaaacgccaggat

SEQ ID NO: 4733642 - DNA, 25 bp, Homo sapien
agtataagcatctacatcaagaagc

SEQ ID NO: 4733643 - DNA, 25 bp, Homo sapien
cgtaagcttcatccatagaaggatt

SEQ ID NO: 4733644 - DNA, 25 bp, Homo sapien
tccatagaaggattgtgagcaaaag

SEQ ID NO: 4733645 - DNA, 25 bp, Homo sapien
catagaaggattgtgagcaaaagag

SEQ ID NO: 4733646 - DNA, 25 bp, Homo sapien
taagcttcatccatagaaggattgt

SEQ ID NO: 4733647 - DNA, 25 bp, Homo sapien
tataaagtgcatcagtaggatctcc

SEQ ID NO: 4733648 - DNA, 25 bp, Homo sapien
tcccagtggcagtcactatcaggag

SEQ ID NO: 4733649 - DNA, 25 bp, Homo sapien
tgtaggtttcccttacaactgtcca

SEQ ID NO: 4733650 - DNA, 25 bp, Homo sapien
gaatcttgcctataacagaccactg

SEQ ID NO: 4733651 - DNA, 25 bp, Homo sapien
ttaacatggccaacagttccaacaa

SEQ ID NO: 4733652 - DNA, 25 bp, Homo sapien
catacaaattaacatggccaacagt

SEQ ID NO: 4733653 - DNA, 25 bp, Homo sapien
tacaaattaacatggccaacagttc

SEQ ID NO: 4733654 - DNA, 25 bp, Homo sapien
aattaacatggccaacagttccaac

SEQ ID NO: 4733655 - DNA, 25 bp, Homo sapien
gattaaatttgtatttgtcctccat

SEQ ID NO: 4733656 - DNA, 25 bp, Homo sapien
tggaagggctcggaaggcaccctca

SEQ ID NO: 4733657 - DNA, 25 bp, Homo sapien
gaaggcaccctcacgatgaccagat

SEQ ID NO: 4733658 - DNA, 25 bp, Homo sapien
cctcacgatgaccagattaaatttg

SEQ ID NO: 4733659 - DNA, 25 bp, Homo sapien
gaggacctgtattgaatgcctgaaa

SEQ ID NO: 4733660 - DNA, 25 bp, Homo sapien
acctgtattgaatgcctgaaagggc

SEQ ID NO: 4733661 - DNA, 25 bp, Homo sapien
ggacctgtattgaatgcctgaaagg

SEQ ID NO: 4733662 - DNA, 25 bp, Homo sapien
cctgtattgaatgcctgaaagggca

SEQ ID NO: 4733663 - DNA, 25 bp, Homo sapien
tattgacaagcgttccattagtgca

SEQ ID NO: 4733664 - DNA, 25 bp, Homo sapien
actggatgaaaaactggccgttgcc

SEQ ID NO: 4733665 - DNA, 25 bp, Homo sapien
aaacaactttaatcagggcctgaca

SEQ ID NO: 4733666 - DNA, 25 bp, Homo sapien
taagccctggatcaaatggcaccaa

SEQ ID NO: 4733667 - DNA, 25 bp, Homo sapien
cagatagaacctcaatctgttgcag

SEQ ID NO: 4733668 - DNA, 25 bp, Homo sapien
catcactactggcttgagaatactt

SEQ ID NO: 4733669 - DNA, 25 bp, Homo sapien
agatagaacctcaatctgttgcaga

SEQ ID NO: 4733670 - DNA, 25 bp, Homo sapien
ccatcactactggcttgagaatact

SEQ ID NO: 4733671 - DNA, 25 bp, Homo sapien
tcttcatctactctaggctgcattt

SEQ ID NO: 4733672 - DNA, 25 bp, Homo sapien
acgctgtgcctctttccagcaagaa

SEQ ID NO: 4733673 - DNA, 25 bp, Homo sapien
cagagaaatactgctgtacgctgtg

SEQ ID NO: 4733674 - DNA, 25 bp, Homo sapien
atctactctaggctgcattttagca

SEQ ID NO: 4733675 - DNA, 25 bp, Homo sapien
acaccgtagattgttgttgaaagtg

SEQ ID NO: 4733676 - DNA, 25 bp, Homo sapien
ggacgttgggaaagccgatgaggca

SEQ ID NO: 4733677 - DNA, 25 bp, Homo sapien
agtgaattcttgacaccgtagattg

SEQ ID NO: 4733678 - DNA, 25 bp, Homo sapien
tcttgacaccgtagattgttgttga

SEQ ID NO: 4733679 - DNA, 25 bp, Homo sapien
gagaggaaaaccttagttgcacgat

SEQ ID NO: 4733680 - DNA, 25 bp, Homo sapien
gaggaaaaccttagttgcacgatgc

SEQ ID NO: 4733681 - DNA, 25 bp, Homo sapien
ggaaaaccttagttgcacgatgcat

SEQ ID NO: 4733682 - DNA, 25 bp, Homo sapien
gcagagaggaaaaccttagttgcac

SEQ ID NO: 4733683 - DNA, 25 bp, Homo sapien
tgaatttaaagaccaatagaaatcc

SEQ ID NO: 4733684 - DNA, 25 bp, Homo sapien
tgataaagtggatcagacacacatg

SEQ ID NO: 4733685 - DNA, 25 bp, Homo sapien
gctccagagagtttaaacatacatt

SEQ ID NO: 4733686 - DNA, 25 bp, Homo sapien
cattattgattctatcgtttgaagg

SEQ ID NO: 4733687 - DNA, 25 bp, Homo sapien
aaagttttgcgctttttctctagca

SEQ ID NO: 4733688 - DNA, 25 bp, Homo sapien
tccaaagcatgatatcacactggtc

SEQ ID NO: 4733689 - DNA, 25 bp, Homo sapien
tgttaattccaagccaattattttc

SEQ ID NO: 4733690 - DNA, 25 bp, Homo sapien
ttttctctagcacatggccttttaa

SEQ ID NO: 4733691 - DNA, 25 bp, Homo sapien
agttgagtgtatccagataaactct

SEQ ID NO: 4733692 - DNA, 25 bp, Homo sapien
aagagttgagtgtatccagataaac

SEQ ID NO: 4733693 - DNA, 25 bp, Homo sapien
ccagataaactcttgctcccatatg

SEQ ID NO: 4733694 - DNA, 25 bp, Homo sapien
tccagataaactcttgctcccatat

SEQ ID NO: 4733695 - DNA, 25 bp, Homo sapien
gcccagtataacatgctattgatca

SEQ ID NO: 4733696 - DNA, 25 bp, Homo sapien
tcagatttcccgtagcccagtataa

SEQ ID NO: 4733697 - DNA, 25 bp, Homo sapien
catgctattgatcaccccttctgct

SEQ ID NO: 4733698 - DNA, 25 bp, Homo sapien
ctttcaccttccagtacaaattggc

SEQ ID NO: 4733699 - DNA, 25 bp, Homo sapien
cccaaatgttacaattgttagtgac

SEQ ID NO: 4733700 - DNA, 25 bp, Homo sapien
aatatacatgggctcccaaatgtta

SEQ ID NO: 4733701 - DNA, 25 bp, Homo sapien
gactagctcattcagtgcatgcacc

SEQ ID NO: 4733702 - DNA, 25 bp, Homo sapien
tgttagtgactagctcattcagtgc

SEQ ID NO: 4733703 - DNA, 25 bp, Homo sapien
gactgcagagtcatattgaagagat

SEQ ID NO: 4733704 - DNA, 25 bp, Homo sapien
tcgactctgaaaatagcttgtacta

SEQ ID NO: 4733705 - DNA, 25 bp, Homo sapien
tattctctccttgaattcgactctg

SEQ ID NO: 4733706 - DNA, 25 bp, Homo sapien
tactaacatcaggaactttgcatcc

SEQ ID NO: 4733707 - DNA, 25 bp, Homo sapien
ctgactgatagtaagcctgctaatg

SEQ ID NO: 4733708 - DNA, 25 bp, Homo sapien
tttccacaaagtcaaataactggtg

SEQ ID NO: 4733709 - DNA, 25 bp, Homo sapien
gggatgaaattgcagcctccgagac

SEQ ID NO: 4733710 - DNA, 25 bp, Homo sapien
caatatgtttttatcctgctgtaca

SEQ ID NO: 4733711 - DNA, 25 bp, Homo sapien
atcagggctgattgggcacctgtgc

SEQ ID NO: 4733712 - DNA, 25 bp, Homo sapien
caatcagggctgattgggcacctgt

SEQ ID NO: 4733713 - DNA, 25 bp, Homo sapien
tcaatcagggctgattgggcacctg

SEQ ID NO: 4733714 - DNA, 25 bp, Homo sapien
aatcagggctgattgggcacctgtg

SEQ ID NO: 4733715 - DNA, 25 bp, Homo sapien
catgtccttcaataatatgagctat

SEQ ID NO: 4733716 - DNA, 25 bp, Homo sapien
gtccttcaataatatgagctatctg

SEQ ID NO: 4733717 - DNA, 25 bp, Homo sapien
ccttcaataatatgagctatctgag

SEQ ID NO: 4733718 - DNA, 25 bp, Homo sapien
cttcaataatatgagctatctgaga

SEQ ID NO: 4733719 - DNA, 25 bp, Homo sapien
ggcagcaacaaagtgggagattcct

SEQ ID NO: 4733720 - DNA, 25 bp, Homo sapien
tggaataattgtccctgtcctggaa

SEQ ID NO: 4733721 - DNA, 25 bp, Homo sapien
gggatgagtcccctccagatctaga

SEQ ID NO: 4733722 - DNA, 25 bp, Homo sapien
caatcttcctggtaaagctgacaaa

SEQ ID NO: 4733723 - DNA, 25 bp, Homo sapien
atcgtagcatgaaggtttcctgagt

SEQ ID NO: 4733724 - DNA, 25 bp, Homo sapien
tagcatgaaggtttcctgagtttgg

SEQ ID NO: 4733725 - DNA, 25 bp, Homo sapien
gtttggtagtctgaaacaatctctc

SEQ ID NO: 4733726 - DNA, 25 bp, Homo sapien
atgatatcgtagcatgaaggtttcc

SEQ ID NO: 4733727 - DNA, 25 bp, Homo sapien
cagtttggagctttcagcactgaag

SEQ ID NO: 4733728 - DNA, 25 bp, Homo sapien
caatacctccatttcagaggttgag

SEQ ID NO: 4733729 - DNA, 25 bp, Homo sapien
tcctgagtggaaagtaccataagcc

SEQ ID NO: 4733730 - DNA, 25 bp, Homo sapien
gaagcctgcaattgatcctgagtgg

SEQ ID NO: 4733731 - DNA, 25 bp, Homo sapien
actgagtccgctgaaagcaaagcat

SEQ ID NO: 4733732 - DNA, 25 bp, Homo sapien
ctgagtccgctgaaagcaaagcatg

SEQ ID NO: 4733733 - DNA, 25 bp, Homo sapien
ttcatttagcagagccaactttact

SEQ ID NO: 4733734 - DNA, 25 bp, Homo sapien
tgccaattttacaggctcctcaaac

SEQ ID NO: 4733735 - DNA, 25 bp, Homo sapien
actttactctgtctgccaaaagccc

SEQ ID NO: 4733736 - DNA, 25 bp, Homo sapien
attgccaattttacaggctcctcaa

SEQ ID NO: 4733737 - DNA, 25 bp, Homo sapien
tattgagagggctgtatagattcct

SEQ ID NO: 4733738 - DNA, 25 bp, Homo sapien
tagattcctgtaagtgctaacagtc

SEQ ID NO: 4733739 - DNA, 25 bp, Homo sapien
cagtcatgctgttattttggtcaaa

SEQ ID NO: 4733740 - DNA, 25 bp, Homo sapien
caatgaagctttaccgactgaagtg

SEQ ID NO: 4733741 - DNA, 25 bp, Homo sapien
gaaatagtggttttggccactctga

SEQ ID NO: 4733742 - DNA, 25 bp, Homo sapien
catatacctgtactcagaacattta

SEQ ID NO: 4733743 - DNA, 25 bp, Homo sapien
aggttgggagaactgggtgacttgt

SEQ ID NO: 4733744 - DNA, 25 bp, Homo sapien
aactgggtgacttgttggaggtgga

SEQ ID NO: 4733745 - DNA, 25 bp, Homo sapien
gcagtagcttgcaaagtggttcaca

SEQ ID NO: 4733746 - DNA, 25 bp, Homo sapien
ttgggcaccattgaccatacagtct

SEQ ID NO: 4733747 - DNA, 25 bp, Homo sapien
cagtagtaagagagtttagcgacac

SEQ ID NO: 4733748 - DNA, 25 bp, Homo sapien
gaaattatgttaacctggactgcca

SEQ ID NO: 4733749 - DNA, 25 bp, Homo sapien
attgcatagttcagccaggcccagt

SEQ ID NO: 4733750 - DNA, 25 bp, Homo sapien
ttgcatagttcagccaggcccagtt

SEQ ID NO: 4733751 - DNA, 25 bp, Homo sapien
ctggtggtttcatgccagacgttgt

SEQ ID NO: 4733752 - DNA, 25 bp, Homo sapien
ttcctccagtagacctggtggtttc

SEQ ID NO: 4733753 - DNA, 25 bp, Homo sapien
ctccagtagacctggtggtttcatg

SEQ ID NO: 4733754 - DNA, 25 bp, Homo sapien
catgccagacgttgttcttactatt

SEQ ID NO: 4733755 - DNA, 25 bp, Homo sapien
tggcccatctgaattgacatctgtg

SEQ ID NO: 4733756 - DNA, 25 bp, Homo sapien
cacaaagatacatgctggcccatct

SEQ ID NO: 4733757 - DNA, 25 bp, Homo sapien
tcaaactcagagtccatcgcttcca

SEQ ID NO: 4733758 - DNA, 25 bp, Homo sapien
ccatctgaattgacatctgtgtgca

SEQ ID NO: 4733759 - DNA, 25 bp, Homo sapien
acagcattactgacataagcctggg

SEQ ID NO: 4733760 - DNA, 25 bp, Homo sapien
agcctggggaactaagccataaaat

SEQ ID NO: 4733761 - DNA, 25 bp, Homo sapien
cataagcctggggaactaagccata

SEQ ID NO: 4733762 - DNA, 25 bp, Homo sapien
ctgacataagcctggggaactaagc

SEQ ID NO: 4733763 - DNA, 25 bp, Homo sapien
tagggaactcgcaataaagctgcta

SEQ ID NO: 4733764 - DNA, 25 bp, Homo sapien
ttagggaactcgcaataaagctgct

SEQ ID NO: 4733765 - DNA, 25 bp, Homo sapien
agggaactcgcaataaagctgctac

SEQ ID NO: 4733766 - DNA, 25 bp, Homo sapien
cttgatcaccttgatctcgactcct

SEQ ID NO: 4733767 - DNA, 25 bp, Homo sapien
tatcttcccctgaattgggtctgaa

SEQ ID NO: 4733768 - DNA, 25 bp, Homo sapien
tctcgactcctctatcttcccctga

SEQ ID NO: 4733769 - DNA, 25 bp, Homo sapien
gatcaccttgatctcgactcctcta

SEQ ID NO: 4733770 - DNA, 25 bp, Homo sapien
agagtgggagctattgatcgccagt

SEQ ID NO: 4733771 - DNA, 25 bp, Homo sapien
tgggagctattgatcgccagtggct

SEQ ID NO: 4733772 - DNA, 25 bp, Homo sapien
ggagctattgatcgccagtggctcc

SEQ ID NO: 4733773 - DNA, 25 bp, Homo sapien
aggagagtgggagctattgatcgcc

SEQ ID NO: 4733774 - DNA, 25 bp, Homo sapien
cagagatagatattgacatggccat

SEQ ID NO: 4733775 - DNA, 25 bp, Homo sapien
catcacagttgatgtactgcagtgt

SEQ ID NO: 4733776 - DNA, 25 bp, Homo sapien
taacaaagaactgtcagctatggga

SEQ ID NO: 4733777 - DNA, 25 bp, Homo sapien
cattatcgaccagtacatcacagtt

SEQ ID NO: 4733778 - DNA, 25 bp, Homo sapien
cagttgatgtactgcagtgtaacaa

SEQ ID NO: 4733779 - DNA, 25 bp, Homo sapien
actcgagcttctcttacatacagca

SEQ ID NO: 4733780 - DNA, 25 bp, Homo sapien
gggtcggacaacagtgatcatttct

SEQ ID NO: 4733781 - DNA, 25 bp, Homo sapien
cattcctggaggtcaaacttctttg

SEQ ID NO: 4733782 - DNA, 25 bp, Homo sapien
tcctctgtttccatctataaacact

SEQ ID NO: 4733783 - DNA, 25 bp, Homo sapien
caacttgccagaacatttgttgaaa

SEQ ID NO: 4733784 - DNA, 25 bp, Homo sapien
acttgccagaacatttgttgaaaca

SEQ ID NO: 4733785 - DNA, 25 bp, Homo sapien
tatcaacttgccagaacatttgttg

SEQ ID NO: 4733786 - DNA, 25 bp, Homo sapien
cttgccagaacatttgttgaaacat

SEQ ID NO: 4733787 - DNA, 25 bp, Homo sapien
tgtgcattgcaacataccagcatta

SEQ ID NO: 4733788 - DNA, 25 bp, Homo sapien
tagcgaccttcgtattgccttcatt

SEQ ID NO: 4733789 - DNA, 25 bp, Homo sapien
cattttcctccgatgaaagatgcaa

SEQ ID NO: 4733790 - DNA, 25 bp, Homo sapien
ctcccattacttccgttgtctcagg

SEQ ID NO: 4733791 - DNA, 25 bp, Homo sapien
tattacagctgttgccagcaatatg

SEQ ID NO: 4733792 - DNA, 25 bp, Homo sapien
atatgagaaatagagcaatctctcg

SEQ ID NO: 4733793 - DNA, 25 bp, Homo sapien
cagtattacagctgttgccagcaat

SEQ ID NO: 4733794 - DNA, 25 bp, Homo sapien
aaatagagcaatctctcgattctca

SEQ ID NO: 4733795 - DNA, 25 bp, Homo sapien
gacacgtccaacaatcaagaatggg

SEQ ID NO: 4733796 - DNA, 25 bp, Homo sapien
gaagcacctgttagtcatgcgaaga

SEQ ID NO: 4733797 - DNA, 25 bp, Homo sapien
tgttagtcatgcgaagacacgtcca

SEQ ID NO: 4733798 - DNA, 25 bp, Homo sapien
tctcctttgaagcacctgttagtca

SEQ ID NO: 4733799 - DNA, 25 bp, Homo sapien
caggttttggcagacatcgagaagc

SEQ ID NO: 4733800 - DNA, 25 bp, Homo sapien
gaagcttgccttgatagataaagac

SEQ ID NO: 4733801 - DNA, 25 bp, Homo sapien
gattccaggttttggcagacatcga

SEQ ID NO: 4733802 - DNA, 25 bp, Homo sapien
gcagacatcgagaagcttgccttga

SEQ ID NO: 4733803 - DNA, 25 bp, Homo sapien
ttcttcaaccatgttctcaacttaa

SEQ ID NO: 4733804 - DNA, 25 bp, Homo sapien
tcaaccatgttctcaacttaacaac

SEQ ID NO: 4733805 - DNA, 25 bp, Homo sapien
catgttctcaacttaacaacctgct

SEQ ID NO: 4733806 - DNA, 25 bp, Homo sapien
accatgttctcaacttaacaacctg

SEQ ID NO: 4733807 - DNA, 25 bp, Homo sapien
gggtcacattctaaacagcctttga

SEQ ID NO: 4733808 - DNA, 25 bp, Homo sapien
tgggagaccttgaagcttaaatgaa

SEQ ID NO: 4733809 - DNA, 25 bp, Homo sapien
cacccgaagcctcttgtcactgtgg

SEQ ID NO: 4733810 - DNA, 25 bp, Homo sapien
cgttcaagcagctgagttcggccgg

SEQ ID NO: 4733811 - DNA, 25 bp, Homo sapien
aggagcaggaataaccacaggtcac

SEQ ID NO: 4733812 - DNA, 25 bp, Homo sapien
caggttgtcctggcaactagttcac

SEQ ID NO: 4733813 - DNA, 25 bp, Homo sapien
gcaggttgtcctggcaactagttca

SEQ ID NO: 4733814 - DNA, 25 bp, Homo sapien
agcaggttgtcctggcaactagttc

SEQ ID NO: 4733815 - DNA, 25 bp, Homo sapien
aggttgtcctggcaactagttcact

SEQ ID NO: 4733816 - DNA, 25 bp, Homo sapien
tgtttccatcccactatcgggcaat

SEQ ID NO: 4733817 - DNA, 25 bp, Homo sapien
ttttcccgctgtttccatcccacta

SEQ ID NO: 4733818 - DNA, 25 bp, Homo sapien
ctggttctggatagtctgactccac

SEQ ID NO: 4733819 - DNA, 25 bp, Homo sapien
gagcctggttctggatagtctgact

SEQ ID NO: 4733820 - DNA, 25 bp, Homo sapien
tagaacaccaagagatagagaagcc

SEQ ID NO: 4733821 - DNA, 25 bp, Homo sapien
ttctgtgcagggagatgtctcagaa

SEQ ID NO: 4733822 - DNA, 25 bp, Homo sapien
tgagttctgagtgtagaacaccaag

SEQ ID NO: 4733823 - DNA, 25 bp, Homo sapien
gaagccttgagctcacacaagcaga

SEQ ID NO: 4733824 - DNA, 25 bp, Homo sapien
ggaaggatgtacaactcaactcagg

SEQ ID NO: 4733825 - DNA, 25 bp, Homo sapien
caaggcttcaggtaaagggaccctg

SEQ ID NO: 4733826 - DNA, 25 bp, Homo sapien
ccctgtgtaacagccggagagcaga

SEQ ID NO: 4733827 - DNA, 25 bp, Homo sapien
gactggcacctttgctggcatatca

SEQ ID NO: 4733828 - DNA, 25 bp, Homo sapien
catatacacattttacaataaatga

SEQ ID NO: 4733829 - DNA, 25 bp, Homo sapien
tacaataaatgagcaaacaaagcgg

SEQ ID NO: 4733830 - DNA, 25 bp, Homo sapien
atatacacattttacaataaatgag

SEQ ID NO: 4733831 - DNA, 25 bp, Homo sapien
ttttacaataaatgagcaaacaaag

SEQ ID NO: 4733832 - DNA, 25 bp, Homo sapien
ttctttccagaaacagcaacgtagt

SEQ ID NO: 4733833 - DNA, 25 bp, Homo sapien
atttctttccagaaacagcaacgta

SEQ ID NO: 4733834 - DNA, 25 bp, Homo sapien
ctttccagaaacagcaacgtagttt

SEQ ID NO: 4733835 - DNA, 25 bp, Homo sapien
ttatttctttccagaaacagcaacg

SEQ ID NO: 4733836 - DNA, 25 bp, Homo sapien
tcccaaacctccttatgtgaaaatg

SEQ ID NO: 4733837 - DNA, 25 bp, Homo sapien
gaaaatgtgaacactaaagccgcca

SEQ ID NO: 4733838 - DNA, 25 bp, Homo sapien
caaacctccttatgtgaaaatgtga

SEQ ID NO: 4733839 - DNA, 25 bp, Homo sapien
actaaagccgccactgccagaggca

SEQ ID NO: 4733840 - DNA, 25 bp, Homo sapien
aatgaacgagaatgcttattcttga

SEQ ID NO: 4733841 - DNA, 25 bp, Homo sapien
tattttcgatatgaatatgacattg

SEQ ID NO: 4733842 - DNA, 25 bp, Homo sapien
gaattccaaatgaacgagaatgctt

SEQ ID NO: 4733843 - DNA, 25 bp, Homo sapien
caaacgtggaatttctatattttcg

SEQ ID NO: 4733844 - DNA, 25 bp, Homo sapien
ttatcaatgaccagacttcctcctc

SEQ ID NO: 4733845 - DNA, 25 bp, Homo sapien
caaagtcagcaggatcaaaattgaa

SEQ ID NO: 4733846 - DNA, 25 bp, Homo sapien
tcaaagtcagcaggatcaaaattga

SEQ ID NO: 4733847 - DNA, 25 bp, Homo sapien
aaaattgaagcccttatcaatgacc

SEQ ID NO: 4733848 - DNA, 25 bp, Homo sapien
tgtcactaactcctgtgaagtcttc

SEQ ID NO: 4733849 - DNA, 25 bp, Homo sapien
aagacatgtcactaactcctgtgaa

SEQ ID NO: 4733850 - DNA, 25 bp, Homo sapien
gcaaaagacatgtcactaactcctg

SEQ ID NO: 4733851 - DNA, 25 bp, Homo sapien
atatttgaaacccagacattggcaa

SEQ ID NO: 4733852 - DNA, 25 bp, Homo sapien
ctttaaagcatcagtgccttttgct

SEQ ID NO: 4733853 - DNA, 25 bp, Homo sapien
atcagtgccttttgctatctgctcc

SEQ ID NO: 4733854 - DNA, 25 bp, Homo sapien
taaagcatcagtgccttttgctatc

SEQ ID NO: 4733855 - DNA, 25 bp, Homo sapien
catcagtgccttttgctatctgctc

SEQ ID NO: 4733856 - DNA, 25 bp, Homo sapien
tgatgatgatgttagcattgataat

SEQ ID NO: 4733857 - DNA, 25 bp, Homo sapien
gatgatgatgttagcattgataatg

SEQ ID NO: 4733858 - DNA, 25 bp, Homo sapien
gatgatgttagcattgataatgttg

SEQ ID NO: 4733859 - DNA, 25 bp, Homo sapien
gatgttagcattgataatgttgatg

SEQ ID NO: 4733860 - DNA, 25 bp, Homo sapien
agttcagacatcaggaactgctggt

SEQ ID NO: 4733861 - DNA, 25 bp, Homo sapien
tcagttcagacatcaggaactgctg

SEQ ID NO: 4733862 - DNA, 25 bp, Homo sapien
gcttcagttcagacatcaggaactg

SEQ ID NO: 4733863 - DNA, 25 bp, Homo sapien
cccagcttcagttcagacatcagga

SEQ ID NO: 4733864 - DNA, 25 bp, Homo sapien
tgttcccgtctgtcatggcaagcaa

SEQ ID NO: 4733865 - DNA, 25 bp, Homo sapien
caattttcttgctggactgctgtgg

SEQ ID NO: 4733866 - DNA, 25 bp, Homo sapien
tagtgccaggaagatttgagacagc

SEQ ID NO: 4733867 - DNA, 25 bp, Homo sapien
tgagaacaccaagccctgtattgca

SEQ ID NO: 4733868 - DNA, 25 bp, Homo sapien
ctggaaagaggccattaacatcgta

SEQ ID NO: 4733869 - DNA, 25 bp, Homo sapien
tcgtaggtgttgattcgtggagaac

SEQ ID NO: 4733870 - DNA, 25 bp, Homo sapien
aatgactgaaatggagtaagataca

SEQ ID NO: 4733871 - DNA, 25 bp, Homo sapien
gaaatggagtaagatacaggacaac

SEQ ID NO: 4733872 - DNA, 25 bp, Homo sapien
gtggctgatcgtggctttgtgcttt

SEQ ID NO: 4733873 - DNA, 25 bp, Homo sapien
gggatgcaccctgacgtttgaatgg

SEQ ID NO: 4733874 - DNA, 25 bp, Homo sapien
cctgacgtttgaatggtagaccata

SEQ ID NO: 4733875 - DNA, 25 bp, Homo sapien
gctgatcgtggctttgtgctttcca

SEQ ID NO: 4733876 - DNA, 25 bp, Homo sapien
tataagcaggaggtcaatgatgttc

SEQ ID NO: 4733877 - DNA, 25 bp, Homo sapien
agtttcttctataagcaggaggtca

SEQ ID NO: 4733878 - DNA, 25 bp, Homo sapien
caatgatgttctctattctaatgat

SEQ ID NO: 4733879 - DNA, 25 bp, Homo sapien
aggaggtcaatgatgttctctattc

SEQ ID NO: 4733880 - DNA, 25 bp, Homo sapien
tccaaaatacgggaattgagaaggc

SEQ ID NO: 4733881 - DNA, 25 bp, Homo sapien
gaattgagaaggctatttccatgat

SEQ ID NO: 4733882 - DNA, 25 bp, Homo sapien
gagaaggctatttccatgatgctgt

SEQ ID NO: 4733883 - DNA, 25 bp, Homo sapien
tacgggaattgagaaggctatttcc

SEQ ID NO: 4733884 - DNA, 25 bp, Homo sapien
atcaatgtattccattactttatct

SEQ ID NO: 4733885 - DNA, 25 bp, Homo sapien
catcaatgtattccattactttatc

SEQ ID NO: 4733886 - DNA, 25 bp, Homo sapien
ctacatcaatgtattccattacttt

SEQ ID NO: 4733887 - DNA, 25 bp, Homo sapien
atgtattccattactttatcttccc

SEQ ID NO: 4733888 - DNA, 25 bp, Homo sapien
caaagagtgctttaccaggtatctg

SEQ ID NO: 4733889 - DNA, 25 bp, Homo sapien
tcaaagagtgctttaccaggtatct

SEQ ID NO: 4733890 - DNA, 25 bp, Homo sapien
ctcaaagagtgctttaccaggtatc

SEQ ID NO: 4733891 - DNA, 25 bp, Homo sapien
ctctcaaagagtgctttaccaggta

SEQ ID NO: 4733892 - DNA, 25 bp, Homo sapien
ccgtacagatgtcaccaacatcaaa

SEQ ID NO: 4733893 - DNA, 25 bp, Homo sapien
gttcactcagagaccccgtacagat

SEQ ID NO: 4733894 - DNA, 25 bp, Homo sapien
gggaacaacactggatggacaatga

SEQ ID NO: 4733895 - DNA, 25 bp, Homo sapien
aacagaaaggagtagcacgttcact

SEQ ID NO: 4733896 - DNA, 25 bp, Homo sapien
aattaacttatgcttcctagcccaa

SEQ ID NO: 4733897 - DNA, 25 bp, Homo sapien
aaaaaacctgtgttgaccttcatca

SEQ ID NO: 4733898 - DNA, 25 bp, Homo sapien
aacttatgcttcctagcccaaaaga

SEQ ID NO: 4733899 - DNA, 25 bp, Homo sapien
attgagagatcagtacatgcatcta

SEQ ID NO: 4733900 - DNA, 25 bp, Homo sapien
tagtgacttggtgccattgattttc

SEQ ID NO: 4733901 - DNA, 25 bp, Homo sapien
gacggaataattgtttagtgacttg

SEQ ID NO: 4733902 - DNA, 25 bp, Homo sapien
aggtcatcagggagaaatagcctct

SEQ ID NO: 4733903 - DNA, 25 bp, Homo sapien
aagaagacggaataattgtttagtg

SEQ ID NO: 4733904 - DNA, 25 bp, Homo sapien
ctaagcttttgtgacaggagtctac

SEQ ID NO: 4733905 - DNA, 25 bp, Homo sapien
ctaaacagtgctaagcttttgtgac

SEQ ID NO: 4733906 - DNA, 25 bp, Homo sapien
aacagtgctaagcttttgtgacagg

SEQ ID NO: 4733907 - DNA, 25 bp, Homo sapien
cagtgctaagcttttgtgacaggag

SEQ ID NO: 4733908 - DNA, 25 bp, Homo sapien
tccatgatgaattactatttcagag

SEQ ID NO: 4733909 - DNA, 25 bp, Homo sapien
ttactatttcagagaagctttcaac

SEQ ID NO: 4733910 - DNA, 25 bp, Homo sapien
gagagagggatgatacactctaatt

SEQ ID NO: 4733911 - DNA, 25 bp, Homo sapien
cgagttactttgtattcacgttcac

SEQ ID NO: 4733912 - DNA, 25 bp, Homo sapien
agattaagtatggtggatgctgtgc

SEQ ID NO: 4733913 - DNA, 25 bp, Homo sapien
caaacttcagattaagtatggtgga

SEQ ID NO: 4733914 - DNA, 25 bp, Homo sapien
tatcccaaacttcagattaagtatg

SEQ ID NO: 4733915 - DNA, 25 bp, Homo sapien
gcagtggcagtagcacctagttttg

SEQ ID NO: 4733916 - DNA, 25 bp, Homo sapien
ctgtgaaaacaatggcatttaatgt

SEQ ID NO: 4733917 - DNA, 25 bp, Homo sapien
tgtgaaaacaatggcatttaatgtt

SEQ ID NO: 4733918 - DNA, 25 bp, Homo sapien
tagaaatctgagcatagcaggtgct

SEQ ID NO: 4733919 - DNA, 25 bp, Homo sapien
ctgccgttaattgctgttgtagaaa

SEQ ID NO: 4733920 - DNA, 25 bp, Homo sapien
gatgccgaaaaccacgtgccttctg

SEQ ID NO: 4733921 - DNA, 25 bp, Homo sapien
aagtgtgactcttgatgaatgtgca

SEQ ID NO: 4733922 - DNA, 25 bp, Homo sapien
gtgaacaccttgtgaaaatgccttt

SEQ ID NO: 4733923 - DNA, 25 bp, Homo sapien
aacaccttgtgaaaatgccttttgc

SEQ ID NO: 4733924 - DNA, 25 bp, Homo sapien
aaaatgccttttgcttcgtttcagg

SEQ ID NO: 4733925 - DNA, 25 bp, Homo sapien
gtgaaaatgccttttgcttcgtttc

SEQ ID NO: 4733926 - DNA, 25 bp, Homo sapien
ttcttaactagctggtcttgctgtt

SEQ ID NO: 4733927 - DNA, 25 bp, Homo sapien
actagctggtcttgctgtttactca

SEQ ID NO: 4733928 - DNA, 25 bp, Homo sapien
aactagctggtcttgctgtttactc

SEQ ID NO: 4733929 - DNA, 25 bp, Homo sapien
ttaactagctggtcttgctgtttac

SEQ ID NO: 4733930 - DNA, 25 bp, Homo sapien
ttgttgcagaggatgttgtcggttt

SEQ ID NO: 4733931 - DNA, 25 bp, Homo sapien
attgttgttgcagaggatgttgtcg

SEQ ID NO: 4733932 - DNA, 25 bp, Homo sapien
ttgcagaggatgttgtcggtttgat

SEQ ID NO: 4733933 - DNA, 25 bp, Homo sapien
tgttgttgcagaggatgttgtcggt

SEQ ID NO: 4733934 - DNA, 25 bp, Homo sapien
caaactaccagaacacattcatttc

SEQ ID NO: 4733935 - DNA, 25 bp, Homo sapien
taccagaacacattcatttctatct

SEQ ID NO: 4733936 - DNA, 25 bp, Homo sapien
ccagaacacattcatttctatctgc

SEQ ID NO: 4733937 - DNA, 25 bp, Homo sapien
catttctatctgcaatcctcacttc

SEQ ID NO: 4733938 - DNA, 25 bp, Homo sapien
ccatttcctctaggcagcgactgtt

SEQ ID NO: 4733939 - DNA, 25 bp, Homo sapien
tcatacatgcagcaacgatgggcat

SEQ ID NO: 4733940 - DNA, 25 bp, Homo sapien
tcagtgacacaaccagagaaataac

SEQ ID NO: 4733941 - DNA, 25 bp, Homo sapien
cttcatcagaatgacctccagtaga

SEQ ID NO: 4733942 - DNA, 25 bp, Homo sapien
cccagtttctttattgtttgagatg

SEQ ID NO: 4733943 - DNA, 25 bp, Homo sapien
gtttctttattgtttgagatgacat

SEQ ID NO: 4733944 - DNA, 25 bp, Homo sapien
ctcccagtttctttattgtttgaga

SEQ ID NO: 4733945 - DNA, 25 bp, Homo sapien
ttctcccagtttctttattgtttga

SEQ ID NO: 4733946 - DNA, 25 bp, Homo sapien
agctattgatatacccttgacgaaa

SEQ ID NO: 4733947 - DNA, 25 bp, Homo sapien
ttgacgaaatactggtccttctcta

SEQ ID NO: 4733948 - DNA, 25 bp, Homo sapien
aaggaggaagccgacagctgcctag

SEQ ID NO: 4733949 - DNA, 25 bp, Homo sapien
agaacacaacttccggagggacaca

SEQ ID NO: 4733950 - DNA, 25 bp, Homo sapien
aagtgtttgcttgggacataaatgc

SEQ ID NO: 4733951 - DNA, 25 bp, Homo sapien
ttcttgcagctggtaatttttggca

SEQ ID NO: 4733952 - DNA, 25 bp, Homo sapien
tgaatgctaatgcaatggggagtag

SEQ ID NO: 4733953 - DNA, 25 bp, Homo sapien
tttgcttgggacataaatgctacta

SEQ ID NO: 4733954 - DNA, 25 bp, Homo sapien
tgacatattttggaagtgcagggca

SEQ ID NO: 4733955 - DNA, 25 bp, Homo sapien
agtggctgaatcacttgcctttcct

SEQ ID NO: 4733956 - DNA, 25 bp, Homo sapien
tgacttataggtccacgggactcct

SEQ ID NO: 4733957 - DNA, 25 bp, Homo sapien
ccagtacattgctgtgacttatagg

SEQ ID NO: 4733958 - DNA, 25 bp, Homo sapien
tcttctacttgattccaagaggcaa

SEQ ID NO: 4733959 - DNA, 25 bp, Homo sapien
attccaagaggcaatttgcatgatt

SEQ ID NO: 4733960 - DNA, 25 bp, Homo sapien
tacttgattccaagaggcaatttgc

SEQ ID NO: 4733961 - DNA, 25 bp, Homo sapien
ttccaagaggcaatttgcatgattc

SEQ ID NO: 4733962 - DNA, 25 bp, Homo sapien
acaaagaccagaggagctatttact

SEQ ID NO: 4733963 - DNA, 25 bp, Homo sapien
ccagaggagctatttactgaatctc

SEQ ID NO: 4733964 - DNA, 25 bp, Homo sapien
taataagttgctgccttacaaagac

SEQ ID NO: 4733965 - DNA, 25 bp, Homo sapien
ctaataagttgctgccttacaaaga

SEQ ID NO: 4733966 - DNA, 25 bp, Homo sapien
tcaacatccgaggaaagtcagaaca

SEQ ID NO: 4733967 - DNA, 25 bp, Homo sapien
tcagaacaagagaaacgaggtgaat

SEQ ID NO: 4733968 - DNA, 25 bp, Homo sapien
ggtgaattgttcaagttgacccaag

SEQ ID NO: 4733969 - DNA, 25 bp, Homo sapien
caagtgattcgccttaccgttactc

SEQ ID NO: 4733970 - DNA, 25 bp, Homo sapien
aagacacaaagataaaagaacaaca

SEQ ID NO: 4733971 - DNA, 25 bp, Homo sapien
aaaggtgaccacttgcttcattgac

SEQ ID NO: 4733972 - DNA, 25 bp, Homo sapien
gtaaggcagcatcatttaatggtct

SEQ ID NO: 4733973 - DNA, 25 bp, Homo sapien
gcttcattgacatcataagtaaggc

SEQ ID NO: 4733974 - DNA, 25 bp, Homo sapien
tgcagtcagtgggcaaataagcagt

SEQ ID NO: 4733975 - DNA, 25 bp, Homo sapien
agagggagacgcagcttgctgagaa

SEQ ID NO: 4733976 - DNA, 25 bp, Homo sapien
cagagggagacgcagcttgctgaga

SEQ ID NO: 4733977 - DNA, 25 bp, Homo sapien
agtaggacttccctctctaaatagg

SEQ ID NO: 4733978 - DNA, 25 bp, Homo sapien
tctacacactgaggattcgcagtct

SEQ ID NO: 4733979 - DNA, 25 bp, Homo sapien
tataattcagtatgcactggttgct

SEQ ID NO: 4733980 - DNA, 25 bp, Homo sapien
aaaatccaaggccaatggaatccaa

SEQ ID NO: 4733981 - DNA, 25 bp, Homo sapien
cacagaggacagcccaaaaatatga

SEQ ID NO: 4733982 - DNA, 25 bp, Homo sapien
gaggacagcccaaaaatatgaatta

SEQ ID NO: 4733983 - DNA, 25 bp, Homo sapien
cagaggacagcccaaaaatatgaat

SEQ ID NO: 4733984 - DNA, 25 bp, Homo sapien
ggacagcccaaaaatatgaattaga

SEQ ID NO: 4733985 - DNA, 25 bp, Homo sapien
tgttcttggctgatctttacatgac

SEQ ID NO: 4733986 - DNA, 25 bp, Homo sapien
tttgttcttggctgatctttacatg

SEQ ID NO: 4733987 - DNA, 25 bp, Homo sapien
ttgttcttggctgatctttacatga

SEQ ID NO: 4733988 - DNA, 25 bp, Homo sapien
ggcatccgacctgcctcgggcttgg

SEQ ID NO: 4733989 - DNA, 25 bp, Homo sapien
tgaaatcctggcatccgacctgcct

SEQ ID NO: 4733990 - DNA, 25 bp, Homo sapien
ctttgaaatcctggcatccgacctg

SEQ ID NO: 4733991 - DNA, 25 bp, Homo sapien
ctggcatccgacctgcctcgggctt

SEQ ID NO: 4733992 - DNA, 25 bp, Homo sapien
tactgcttggcatcttatgtctctg

SEQ ID NO: 4733993 - DNA, 25 bp, Homo sapien
gttaactgtgctaatcctccaatgc

SEQ ID NO: 4733994 - DNA, 25 bp, Homo sapien
ctgtagcagctggtttttggaaggc

SEQ ID NO: 4733995 - DNA, 25 bp, Homo sapien
cattttcaactctgtagcagctggt

SEQ ID NO: 4733996 - DNA, 25 bp, Homo sapien
aataatgggagcagatctactgaag

SEQ ID NO: 4733997 - DNA, 25 bp, Homo sapien
ctaaaataatgggagcagatctact

SEQ ID NO: 4733998 - DNA, 25 bp, Homo sapien
gagcagatctactgaaggaattaaa

SEQ ID NO: 4733999 - DNA, 25 bp, Homo sapien
aattaccagagaaacggattatcat

SEQ ID NO: 4734000 - DNA, 25 bp, Homo sapien
cagacatgctcattaagattaactt

SEQ ID NO: 4734001 - DNA, 25 bp, Homo sapien
gacatgctcattaagattaactttc

SEQ ID NO: 4734002 - DNA, 25 bp, Homo sapien
acagacatgctcattaagattaact

SEQ ID NO: 4734003 - DNA, 25 bp, Homo sapien
agacatgctcattaagattaacttt

SEQ ID NO: 4734004 - DNA, 25 bp, Homo sapien
cactgagaaggtgggttagctattg

SEQ ID NO: 4734005 - DNA, 25 bp, Homo sapien
actgagaaggtgggttagctattgt

SEQ ID NO: 4734006 - DNA, 25 bp, Homo sapien
tcactgagaaggtgggttagctatt

SEQ ID NO: 4734007 - DNA, 25 bp, Homo sapien
ctgagaaggtgggttagctattgtt

SEQ ID NO: 4734008 - DNA, 25 bp, Homo sapien
ctgttctctttgcttgtactacctc

SEQ ID NO: 4734009 - DNA, 25 bp, Homo sapien
ctataacttgggcctactcctgttc

SEQ ID NO: 4734010 - DNA, 25 bp, Homo sapien
gttctctttgcttgtactacctcca

SEQ ID NO: 4734011 - DNA, 25 bp, Homo sapien
taacttgggcctactcctgttctct

SEQ ID NO: 4734012 - DNA, 25 bp, Homo sapien
ccatttatttcaagcagatctacag

SEQ ID NO: 4734013 - DNA, 25 bp, Homo sapien
gaagtcaattcttcaccacttgcaa

SEQ ID NO: 4734014 - DNA, 25 bp, Homo sapien
cgctgattgaaaagactggatgtat

SEQ ID NO: 4734015 - DNA, 25 bp, Homo sapien
tttaaactggtatttgataaacagc

SEQ ID NO: 4734016 - DNA, 25 bp, Homo sapien
taattcagccagagtaagaaaggaa

SEQ ID NO: 4734017 - DNA, 25 bp, Homo sapien
ttccctcagatcatagggtttccct

SEQ ID NO: 4734018 - DNA, 25 bp, Homo sapien
cataccacctgattccagatagaac

SEQ ID NO: 4734019 - DNA, 25 bp, Homo sapien
tttccataccacctgattccagata

SEQ ID NO: 4734020 - DNA, 25 bp, Homo sapien
tggcactgccattttttaagtacag

SEQ ID NO: 4734021 - DNA, 25 bp, Homo sapien
tctgttgtactcttggcactgccat

SEQ ID NO: 4734022 - DNA, 25 bp, Homo sapien
tttctctgttgtactcttggcactg

SEQ ID NO: 4734023 - DNA, 25 bp, Homo sapien
gtacagcacttcatttgcataataa

SEQ ID NO: 4734024 - DNA, 25 bp, Homo sapien
tcttcatctatgagcatatctagct

SEQ ID NO: 4734025 - DNA, 25 bp, Homo sapien
taccaatcagagtgaagggatgggt

SEQ ID NO: 4734026 - DNA, 25 bp, Homo sapien
ctagggctcagattgtaatttaagt

SEQ ID NO: 4734027 - DNA, 25 bp, Homo sapien
tctatgagcatatctagctctctct

SEQ ID NO: 4734028 - DNA, 25 bp, Homo sapien
ctgtcttttagccttctcagtttcc

SEQ ID NO: 4734029 - DNA, 25 bp, Homo sapien
tgtcttttagccttctcagtttcca

SEQ ID NO: 4734030 - DNA, 25 bp, Homo sapien
gtcttttagccttctcagtttccat

SEQ ID NO: 4734031 - DNA, 25 bp, Homo sapien
catctggcttaatggcccctggatt

SEQ ID NO: 4734032 - DNA, 25 bp, Homo sapien
atctggcttaatggcccctggattg

SEQ ID NO: 4734033 - DNA, 25 bp, Homo sapien
gattgttgcaaatgcgacctgacat

SEQ ID NO: 4734034 - DNA, 25 bp, Homo sapien
ccatctggcttaatggcccctggat

SEQ ID NO: 4734035 - DNA, 25 bp, Homo sapien
gatcataccaatgcacttagcctct

SEQ ID NO: 4734036 - DNA, 25 bp, Homo sapien
tgcttaagggagactgaaatttcag

SEQ ID NO: 4734037 - DNA, 25 bp, Homo sapien
gtggaacagacccaatcattgaaca

SEQ ID NO: 4734038 - DNA, 25 bp, Homo sapien
taaagagagtacactgttcccagaa

SEQ ID NO: 4734039 - DNA, 25 bp, Homo sapien
ttcctgttaactagaggtgcagggc

SEQ ID NO: 4734040 - DNA, 25 bp, Homo sapien
tagttaatgctgtcttgatggttgc

SEQ ID NO: 4734041 - DNA, 25 bp, Homo sapien
gaggtgcagggccatcatctaatga

SEQ ID NO: 4734042 - DNA, 25 bp, Homo sapien
taactagaggtgcagggccatcatc

SEQ ID NO: 4734043 - DNA, 25 bp, Homo sapien
tttgccagagcatctattgttcggt

SEQ ID NO: 4734044 - DNA, 25 bp, Homo sapien
ttctagcctcttcagcgtcaaacac

SEQ ID NO: 4734045 - DNA, 25 bp, Homo sapien
acacatgtttgccagagcatctatt

SEQ ID NO: 4734046 - DNA, 25 bp, Homo sapien
ttaaatagcacaactgagagccttc

SEQ ID NO: 4734047 - DNA, 25 bp, Homo sapien
actgtagaatcccttctcttcaaaa

SEQ ID NO: 4734048 - DNA, 25 bp, Homo sapien
ttataggcatatctctgtctaactg

SEQ ID NO: 4734049 - DNA, 25 bp, Homo sapien
tctctgtctaactgtagaatccctt

SEQ ID NO: 4734050 - DNA, 25 bp, Homo sapien
cttataggcatatctctgtctaact

SEQ ID NO: 4734051 - DNA, 25 bp, Homo sapien
gctattaaaagggagtttccatgga

SEQ ID NO: 4734052 - DNA, 25 bp, Homo sapien
tttccatggatacggacattagtgg

SEQ ID NO: 4734053 - DNA, 25 bp, Homo sapien
tacggacattagtgggaatgaaaaa

SEQ ID NO: 4734054 - DNA, 25 bp, Homo sapien
tgtgatgcggatgctattaaaaggg

SEQ ID NO: 4734055 - DNA, 25 bp, Homo sapien
ttgttggcaaggtcgcataccccac

SEQ ID NO: 4734056 - DNA, 25 bp, Homo sapien
tacaggaagtgatacagcatgcagt

SEQ ID NO: 4734057 - DNA, 25 bp, Homo sapien
taggagaggcagtgtatttcatgac

SEQ ID NO: 4734058 - DNA, 25 bp, Homo sapien
catgcagtttatgtgaatgaccgac

SEQ ID NO: 4734059 - DNA, 25 bp, Homo sapien
caaaataactggatacctcggagtc

SEQ ID NO: 4734060 - DNA, 25 bp, Homo sapien
gagtctctgatgactctcatcaata

SEQ ID NO: 4734061 - DNA, 25 bp, Homo sapien
cacagttgctctccactattacaaa

SEQ ID NO: 4734062 - DNA, 25 bp, Homo sapien
tgaaaaatcctgacattgaacatgg

SEQ ID NO: 4734063 - DNA, 25 bp, Homo sapien
tatcctcttcattacttagttggca

SEQ ID NO: 4734064 - DNA, 25 bp, Homo sapien
gcaaaagtgttattaacgaagcgca

SEQ ID NO: 4734065 - DNA, 25 bp, Homo sapien
catcattgaaacactcttggaccta

SEQ ID NO: 4734066 - DNA, 25 bp, Homo sapien
ttttttatcaggcacaatggtatcc

SEQ ID NO: 4734067 - DNA, 25 bp, Homo sapien
gaaggcaccgtagtccaaggtatcc

SEQ ID NO: 4734068 - DNA, 25 bp, Homo sapien
gaactgtacatgtgggaggtcctga

SEQ ID NO: 4734069 - DNA, 25 bp, Homo sapien
tatattagatgtacagggactgcag

SEQ ID NO: 4734070 - DNA, 25 bp, Homo sapien
tataggacatccaagtaacaccgac

SEQ ID NO: 4734071 - DNA, 25 bp, Homo sapien
gccgcaaagcctgacggaagaggct

SEQ ID NO: 4734072 - DNA, 25 bp, Homo sapien
aagaggctgcggttctcgcgcttca

SEQ ID NO: 4734073 - DNA, 25 bp, Homo sapien
tgtctctagccctccggttcgtgct

SEQ ID NO: 4734074 - DNA, 25 bp, Homo sapien
agggcccggcggtacatggcttcca

SEQ ID NO: 4734075 - DNA, 25 bp, Homo sapien
ggtcccactcgtcccgcgcacggat

SEQ ID NO: 4734076 - DNA, 25 bp, Homo sapien
ccgcgcacggatggcctccaagtgg

SEQ ID NO: 4734077 - DNA, 25 bp, Homo sapien
ggatggcctccaagtggctcgccgc

SEQ ID NO: 4734078 - DNA, 25 bp, Homo sapien
gtggctcgccgccaggtcggcaaac

SEQ ID NO: 4734079 - DNA, 25 bp, Homo sapien
gcctagtggcgccaccacgcatgcg

SEQ ID NO: 4734080 - DNA, 25 bp, Homo sapien
cacgcatgcgccacatcggtcccat

SEQ ID NO: 4734081 - DNA, 25 bp, Homo sapien
gccgcagcaactcccgcgcctagtg

SEQ ID NO: 4734082 - DNA, 25 bp, Homo sapien
ggccctcggccgtccgcagcaccgt

SEQ ID NO: 4734083 - DNA, 25 bp, Homo sapien
agtacatggcccctttaagaatttg

SEQ ID NO: 4734084 - DNA, 25 bp, Homo sapien
tacatggcccctttaagaatttgat

SEQ ID NO: 4734085 - DNA, 25 bp, Homo sapien
aatacagtacatggcccctttaaga

SEQ ID NO: 4734086 - DNA, 25 bp, Homo sapien
cccaaatacagtacatggccccttt

SEQ ID NO: 4734087 - DNA, 25 bp, Homo sapien
taccttcgtggttctttggccatcc

SEQ ID NO: 4734088 - DNA, 25 bp, Homo sapien
cggttgcttcacgttccacaggtaa

SEQ ID NO: 4734089 - DNA, 25 bp, Homo sapien
tctggtggtatactctgcacagcct

SEQ ID NO: 4734090 - DNA, 25 bp, Homo sapien
gagtccttttcaatccttgctctgg

SEQ ID NO: 4734091 - DNA, 25 bp, Homo sapien
tagagatgaaatctcctcacttcca

SEQ ID NO: 4734092 - DNA, 25 bp, Homo sapien
ctgtgtaatagagatgaaatctcct

SEQ ID NO: 4734093 - DNA, 25 bp, Homo sapien
gtaatagagatgaaatctcctcact

SEQ ID NO: 4734094 - DNA, 25 bp, Homo sapien
atagagatgaaatctcctcacttcc

SEQ ID NO: 4734095 - DNA, 25 bp, Homo sapien
tagatgttttttgttatagtgctcc

SEQ ID NO: 4734096 - DNA, 25 bp, Homo sapien
cctcgtatgtgagacaaaatttaac

SEQ ID NO: 4734097 - DNA, 25 bp, Homo sapien
acatcgtctgtagcctttgttctta

SEQ ID NO: 4734098 - DNA, 25 bp, Homo sapien
aatcgccatatctttacatcgtctg

SEQ ID NO: 4734099 - DNA, 25 bp, Homo sapien
taggaactggagtgcatactgtctc

SEQ ID NO: 4734100 - DNA, 25 bp, Homo sapien
tacaacacaaataggaactggagtg

SEQ ID NO: 4734101 - DNA, 25 bp, Homo sapien
atactgtctccgcaaaggttcccac

SEQ ID NO: 4734102 - DNA, 25 bp, Homo sapien
gagtgcatactgtctccgcaaaggt

SEQ ID NO: 4734103 - DNA, 25 bp, Homo sapien
aatgtgccctctactttggaactca

SEQ ID NO: 4734104 - DNA, 25 bp, Homo sapien
tcaagaacagaagcaaaaccgtcag

SEQ ID NO: 4734105 - DNA, 25 bp, Homo sapien
tcctcccacaggtataacttgtctg

SEQ ID NO: 4734106 - DNA, 25 bp, Homo sapien
tgctttgtccgctcttcaagaacag

SEQ ID NO: 4734107 - DNA, 25 bp, Homo sapien
cagacaatcctgagttgcacgcaga

SEQ ID NO: 4734108 - DNA, 25 bp, Homo sapien
ttgcacgcagagttttcccagacat

SEQ ID NO: 4734109 - DNA, 25 bp, Homo sapien
tcatttcagtgttcagacaatcctg

SEQ ID NO: 4734110 - DNA, 25 bp, Homo sapien
tggctgacaccaatccagtcatttc

SEQ ID NO: 4734111 - DNA, 25 bp, Homo sapien
taatctgacacaatggctatgtaaa

SEQ ID NO: 4734112 - DNA, 25 bp, Homo sapien
tacatttgcccgagggctctttgat

SEQ ID NO: 4734113 - DNA, 25 bp, Homo sapien
tcaaaaacgataaaggttatagcac

SEQ ID NO: 4734114 - DNA, 25 bp, Homo sapien
gctatgtaaatgtcacacgggtccc

SEQ ID NO: 4734115 - DNA, 25 bp, Homo sapien
cctcttaggattgcctctcttctat

SEQ ID NO: 4734116 - DNA, 25 bp, Homo sapien
tccctcttaggattgcctctcttct

SEQ ID NO: 4734117 - DNA, 25 bp, Homo sapien
ccctcttaggattgcctctcttcta

SEQ ID NO: 4734118 - DNA, 25 bp, Homo sapien
caaagtaacactgcgtgtgaccaca

SEQ ID NO: 4734119 - DNA, 25 bp, Homo sapien
ctgcgtgtgaccacatagtttcctt

SEQ ID NO: 4734120 - DNA, 25 bp, Homo sapien
ggcttcccaaagtaacactgcgtgt

SEQ ID NO: 4734121 - DNA, 25 bp, Homo sapien
gtaacactgcgtgtgaccacatagt

SEQ ID NO: 4734122 - DNA, 25 bp, Homo sapien
gaccaaagtggtccaagacagaaaa

SEQ ID NO: 4734123 - DNA, 25 bp, Homo sapien
caaatcaatagagcttaccgtctca

SEQ ID NO: 4734124 - DNA, 25 bp, Homo sapien
taacaaatagaggtggtctgcatca

SEQ ID NO: 4734125 - DNA, 25 bp, Homo sapien
tctgcatcaggagagctagtaaact

SEQ ID NO: 4734126 - DNA, 25 bp, Homo sapien
tgtctcgtcttctcgtcactctctt

SEQ ID NO: 4734127 - DNA, 25 bp, Homo sapien
tctcgtcttctcgtcactctctttt

SEQ ID NO: 4734128 - DNA, 25 bp, Homo sapien
cgtcttctcgtcactctctttttca

SEQ ID NO: 4734129 - DNA, 25 bp, Homo sapien
ctgtctcgtcttctcgtcactctct

SEQ ID NO: 4734130 - DNA, 25 bp, Homo sapien
tagtgcagcacaagtaaaatgcagg

SEQ ID NO: 4734131 - DNA, 25 bp, Homo sapien
tctgtcctctttctatttacctggt

SEQ ID NO: 4734132 - DNA, 25 bp, Homo sapien
ctgcaattaatgaagaagtaggcac

SEQ ID NO: 4734133 - DNA, 25 bp, Homo sapien
cagttgtctcggaaaaaagatgctt

SEQ ID NO: 4734134 - DNA, 25 bp, Homo sapien
acaatgaggatttgccttgagtatg

SEQ ID NO: 4734135 - DNA, 25 bp, Homo sapien
gaacaagccacatggaacaatgagg

SEQ ID NO: 4734136 - DNA, 25 bp, Homo sapien
tgccttaagcttcagcagggtctgg

SEQ ID NO: 4734137 - DNA, 25 bp, Homo sapien
atatacatgagacccagaacaagcc

SEQ ID NO: 4734138 - DNA, 25 bp, Homo sapien
accaattcccatagcaccccagaaa

SEQ ID NO: 4734139 - DNA, 25 bp, Homo sapien
atatggagaaactgatccatcgtct

SEQ ID NO: 4734140 - DNA, 25 bp, Homo sapien
tgatccatcgtcttgtcaccaattc

SEQ ID NO: 4734141 - DNA, 25 bp, Homo sapien
taggtttgttggatcaacgagccaa

SEQ ID NO: 4734142 - DNA, 25 bp, Homo sapien
tgttggccacattagcttactgatc

SEQ ID NO: 4734143 - DNA, 25 bp, Homo sapien
catttgtcagagacctatgttggcc

SEQ ID NO: 4734144 - DNA, 25 bp, Homo sapien
cactgtgcaaggcattcaggataca

SEQ ID NO: 4734145 - DNA, 25 bp, Homo sapien
tgatcacccattacgtgtcaggcac

SEQ ID NO: 4734146 - DNA, 25 bp, Homo sapien
gagattctataagctgccatagtac

SEQ ID NO: 4734147 - DNA, 25 bp, Homo sapien
tgccatagtactccttccccggtat

SEQ ID NO: 4734148 - DNA, 25 bp, Homo sapien
accatcagagattctataagctgcc

SEQ ID NO: 4734149 - DNA, 25 bp, Homo sapien
catagtactccttccccggtattca

SEQ ID NO: 4734150 - DNA, 25 bp, Homo sapien
tttgcagagtacagagatgagcgtg

SEQ ID NO: 4734151 - DNA, 25 bp, Homo sapien
gatatacgctttcatactccactct

SEQ ID NO: 4734152 - DNA, 25 bp, Homo sapien
tgcctcctgggaagatactacttga

SEQ ID NO: 4734153 - DNA, 25 bp, Homo sapien
gatgagcgtgacaatatactcactg

SEQ ID NO: 4734154 - DNA, 25 bp, Homo sapien
tagtgacattcctagctgtaaaagc

SEQ ID NO: 4734155 - DNA, 25 bp, Homo sapien
aattttctcctaggcatggctccca

SEQ ID NO: 4734156 - DNA, 25 bp, Homo sapien
tcattcatcctctagactcagctca

SEQ ID NO: 4734157 - DNA, 25 bp, Homo sapien
taagtaagcccattggataggacaa

SEQ ID NO: 4734158 - DNA, 25 bp, Homo sapien
ctgactgctttctggagaaaatttg

SEQ ID NO: 4734159 - DNA, 25 bp, Homo sapien
cacttcctccgggtattcagggtca

SEQ ID NO: 4734160 - DNA, 25 bp, Homo sapien
cagagataaacacttcctccgggta

SEQ ID NO: 4734161 - DNA, 25 bp, Homo sapien
cttcctccgggtattcagggtcagt

SEQ ID NO: 4734162 - DNA, 25 bp, Homo sapien
gataaacacttcctccgggtattca

SEQ ID NO: 4734163 - DNA, 25 bp, Homo sapien
tttccctggatccctccacctccat

SEQ ID NO: 4734164 - DNA, 25 bp, Homo sapien
cctcctgttgagtcatttccctgga

SEQ ID NO: 4734165 - DNA, 25 bp, Homo sapien
cagcggccttagcccagtcctcctg

SEQ ID NO: 4734166 - DNA, 25 bp, Homo sapien
ggccttagcccagtcctcctgttga

SEQ ID NO: 4734167 - DNA, 25 bp, Homo sapien
accggctcctttaactcattcatca

SEQ ID NO: 4734168 - DNA, 25 bp, Homo sapien
cggctcctttaactcattcatcacc

SEQ ID NO: 4734169 - DNA, 25 bp, Homo sapien
ggaccggctcctttaactcattcat

SEQ ID NO: 4734170 - DNA, 25 bp, Homo sapien
aggaccggctcctttaactcattca

SEQ ID NO: 4734171 - DNA, 25 bp, Homo sapien
tgccaacaaattcataacttcctgg

SEQ ID NO: 4734172 - DNA, 25 bp, Homo sapien
aacaaattcataacttcctggtctt

SEQ ID NO: 4734173 - DNA, 25 bp, Homo sapien
caacaaattcataacttcctggtct

SEQ ID NO: 4734174 - DNA, 25 bp, Homo sapien
gccaacaaattcataacttcctggt

SEQ ID NO: 4734175 - DNA, 25 bp, Homo sapien
gatggagggagcacgtctaggtctt

SEQ ID NO: 4734176 - DNA, 25 bp, Homo sapien
atggagggagcacgtctaggtcttc

SEQ ID NO: 4734177 - DNA, 25 bp, Homo sapien
ctgagagtcttgaacaccaagtgca

SEQ ID NO: 4734178 - DNA, 25 bp, Homo sapien
aagatggagggagcacgtctaggtc

SEQ ID NO: 4734179 - DNA, 25 bp, Homo sapien
tgtaaataaatcagaagttgcttct

SEQ ID NO: 4734180 - DNA, 25 bp, Homo sapien
aactcttgccaatctcaatgtttaa

SEQ ID NO: 4734181 - DNA, 25 bp, Homo sapien
tctgtgtagcatcaacatcgtatct

SEQ ID NO: 4734182 - DNA, 25 bp, Homo sapien
ctagcaagcattcttgtcgctgtaa

SEQ ID NO: 4734183 - DNA, 25 bp, Homo sapien
gcctttgctcatgcaaatgttccac

SEQ ID NO: 4734184 - DNA, 25 bp, Homo sapien
tttccccagccaatcctgtgcgcct

SEQ ID NO: 4734185 - DNA, 25 bp, Homo sapien
ccaacttgagccttagtaaatgcca

SEQ ID NO: 4734186 - DNA, 25 bp, Homo sapien
gaagtaatccttctcttcctactcg

SEQ ID NO: 4734187 - DNA, 25 bp, Homo sapien
caggaacattctgatttcaaggatg

SEQ ID NO: 4734188 - DNA, 25 bp, Homo sapien
ctgtcataatcctcagtctagacca

SEQ ID NO: 4734189 - DNA, 25 bp, Homo sapien
cataatcctcagtctagaccacagt

SEQ ID NO: 4734190 - DNA, 25 bp, Homo sapien
ctgtaagtgttgagtcagttttgta

SEQ ID NO: 4734191 - DNA, 25 bp, Homo sapien
gtcataatcctcagtctagaccaca

SEQ ID NO: 4734192 - DNA, 25 bp, Homo sapien
gaagatattcgctacctgtcctgga

SEQ ID NO: 4734193 - DNA, 25 bp, Homo sapien
tataggagaccgatattgactaggc

SEQ ID NO: 4734194 - DNA, 25 bp, Homo sapien
tacagtaatagacagtgccttgcga

SEQ ID NO: 4734195 - DNA, 25 bp, Homo sapien
gagggcaccttcttagtgttcaaag

SEQ ID NO: 4734196 - DNA, 25 bp, Homo sapien
tttgaggcagcccacgacagcacca

SEQ ID NO: 4734197 - DNA, 25 bp, Homo sapien
ggcataccggtcagatctaaatatt

SEQ ID NO: 4734198 - DNA, 25 bp, Homo sapien
gaagccgtcaggcataccggtcaga

SEQ ID NO: 4734199 - DNA, 25 bp, Homo sapien
tttcttttgaggcagcccacgacag

SEQ ID NO: 4734200 - DNA, 25 bp, Homo sapien
acacctccatactcaactttatctt

SEQ ID NO: 4734201 - DNA, 25 bp, Homo sapien
gtttacacctccatactcaacttta

SEQ ID NO: 4734202 - DNA, 25 bp, Homo sapien
cctccatactcaactttatctttaa

SEQ ID NO: 4734203 - DNA, 25 bp, Homo sapien
tccaaggcacttgtttacacctcca

SEQ ID NO: 4734204 - DNA, 25 bp, Homo sapien
catctacagtattaatgatgaaaag

SEQ ID NO: 4734205 - DNA, 25 bp, Homo sapien
atctacagtattaatgatgaaaagt

SEQ ID NO: 4734206 - DNA, 25 bp, Homo sapien
actcatctacagtattaatgatgaa

SEQ ID NO: 4734207 - DNA, 25 bp, Homo sapien
ctcatctacagtattaatgatgaaa

SEQ ID NO: 4734208 - DNA, 25 bp, Homo sapien
tcaatatgagaaacatccactttca

SEQ ID NO: 4734209 - DNA, 25 bp, Homo sapien
acatccactttcatgcattagtacc

SEQ ID NO: 4734210 - DNA, 25 bp, Homo sapien
ctttcatgcattagtacctgattta

SEQ ID NO: 4734211 - DNA, 25 bp, Homo sapien
tgcattagtacctgatttaatgagc

SEQ ID NO: 4734212 - DNA, 25 bp, Homo sapien
cagtagcttagggatggtttcagaa

SEQ ID NO: 4734213 - DNA, 25 bp, Homo sapien
aggaaaccttatgcagggttccctg

SEQ ID NO: 4734214 - DNA, 25 bp, Homo sapien
gtccaggtcgcaacactcattacta

SEQ ID NO: 4734215 - DNA, 25 bp, Homo sapien
cagtaacagaaagcccagtttgtgc

SEQ ID NO: 4734216 - DNA, 25 bp, Homo sapien
ggaaggaaaagacatagcctctgat

SEQ ID NO: 4734217 - DNA, 25 bp, Homo sapien
tctagtataagcacatatggtgccc

SEQ ID NO: 4734218 - DNA, 25 bp, Homo sapien
tatgctcagtaagcacaagagcccc

SEQ ID NO: 4734219 - DNA, 25 bp, Homo sapien
tatggtgcccgaaggtgcttggttc

SEQ ID NO: 4734220 - DNA, 25 bp, Homo sapien
gcttctgtaaaactcaaggccctta

SEQ ID NO: 4734221 - DNA, 25 bp, Homo sapien
caaggcttctgtaaaactcaaggcc

SEQ ID NO: 4734222 - DNA, 25 bp, Homo sapien
catcaaggcttctgtaaaactcaag

SEQ ID NO: 4734223 - DNA, 25 bp, Homo sapien
cctcatcaaggcttctgtaaaactc

SEQ ID NO: 4734224 - DNA, 25 bp, Homo sapien
ttgtaaccagggcccctgatcccat

SEQ ID NO: 4734225 - DNA, 25 bp, Homo sapien
gaccatggatgctcattacaaaaag

SEQ ID NO: 4734226 - DNA, 25 bp, Homo sapien
tatgttctctgctcttgctctacag

SEQ ID NO: 4734227 - DNA, 25 bp, Homo sapien
caatatttgttatgaagtccagagc

SEQ ID NO: 4734228 - DNA, 25 bp, Homo sapien
ccaccgtgccaagcctagaggtaat

SEQ ID NO: 4734229 - DNA, 25 bp, Homo sapien
tgttgactctgtagaagatgacatg

SEQ ID NO: 4734230 - DNA, 25 bp, Homo sapien
gactctgtagaagatgacatggctg

SEQ ID NO: 4734231 - DNA, 25 bp, Homo sapien
ttgactctgtagaagatgacatggc

SEQ ID NO: 4734232 - DNA, 25 bp, Homo sapien
catgccctgtcccagttaaaacttt

SEQ ID NO: 4734233 - DNA, 25 bp, Homo sapien
taaatgccagagaagcgtattcatc

SEQ ID NO: 4734234 - DNA, 25 bp, Homo sapien
catctgtatttaacccactggctat

SEQ ID NO: 4734235 - DNA, 25 bp, Homo sapien
catttgggcaccagtccataatact

SEQ ID NO: 4734236 - DNA, 25 bp, Homo sapien
tgcaccacttatgacccctgctgtg

SEQ ID NO: 4734237 - DNA, 25 bp, Homo sapien
gttgataagggaagctgacgacgca

SEQ ID NO: 4734238 - DNA, 25 bp, Homo sapien
taagggaagctgacgacgcaatctt

SEQ ID NO: 4734239 - DNA, 25 bp, Homo sapien
ctgacgacgcaatcttcagagagga

SEQ ID NO: 4734240 - DNA, 25 bp, Homo sapien
tgtccgttgataagggaagctgacg

SEQ ID NO: 4734241 - DNA, 25 bp, Homo sapien
gacaacagctggctactgtcagttt

SEQ ID NO: 4734242 - DNA, 25 bp, Homo sapien
tcccttttcgcctcgtggatcttgg

SEQ ID NO: 4734243 - DNA, 25 bp, Homo sapien
gaaaacactcgtgtttggcttccac

SEQ ID NO: 4734244 - DNA, 25 bp, Homo sapien
gatggtgcttagctctgacaacagc

SEQ ID NO: 4734245 - DNA, 25 bp, Homo sapien
ctttctcaccgttgcatgacatact

SEQ ID NO: 4734246 - DNA, 25 bp, Homo sapien
tcaccgttgcatgacatacttccag

SEQ ID NO: 4734247 - DNA, 25 bp, Homo sapien
ttctcaccgttgcatgacatacttc

SEQ ID NO: 4734248 - DNA, 25 bp, Homo sapien
tctcaccgttgcatgacatacttcc

SEQ ID NO: 4734249 - DNA, 25 bp, Homo sapien
gaaagagcactaactgacactctat

SEQ ID NO: 4734250 - DNA, 25 bp, Homo sapien
ctaagagagaccagatgataagcca

SEQ ID NO: 4734251 - DNA, 25 bp, Homo sapien
tcaaggaactacagaaacaggaaga

SEQ ID NO: 4734252 - DNA, 25 bp, Homo sapien
gacactctatagtcacacctcaagg

SEQ ID NO: 4734253 - DNA, 25 bp, Homo sapien
gtttcaatactgattaggtcttcca

SEQ ID NO: 4734254 - DNA, 25 bp, Homo sapien
gcctgtttcaatactgattaggtct

SEQ ID NO: 4734255 - DNA, 25 bp, Homo sapien
gattaggtcttccacacactgagca

SEQ ID NO: 4734256 - DNA, 25 bp, Homo sapien
tactgattaggtcttccacacactg

SEQ ID NO: 4734257 - DNA, 25 bp, Homo sapien
gtatttatcctcaataatttcatcc

SEQ ID NO: 4734258 - DNA, 25 bp, Homo sapien
acaattcgattaaactttgggatat

SEQ ID NO: 4734259 - DNA, 25 bp, Homo sapien
ttgtatttatcctcaataatttcat

SEQ ID NO: 4734260 - DNA, 25 bp, Homo sapien
tacaattcgattaaactttgggata

SEQ ID NO: 4734261 - DNA, 25 bp, Homo sapien
gtaacatatgatggttgtgtctgtg

SEQ ID NO: 4734262 - DNA, 25 bp, Homo sapien
gtgtctgtgctagatggctttatat

SEQ ID NO: 4734263 - DNA, 25 bp, Homo sapien
tttggcagggaaattgtaacatatg

SEQ ID NO: 4734264 - DNA, 25 bp, Homo sapien
tggatttggctttgaacgtgttggc

SEQ ID NO: 4734265 - DNA, 25 bp, Homo sapien
cagtttgtagccagaagctgcctgc

SEQ ID NO: 4734266 - DNA, 25 bp, Homo sapien
taatacatcttcaagccagccttcc

SEQ ID NO: 4734267 - DNA, 25 bp, Homo sapien
ccgctagaactccagtaggaaggct

SEQ ID NO: 4734268 - DNA, 25 bp, Homo sapien
taggaaggcttttatccctgcaaaa

SEQ ID NO: 4734269 - DNA, 25 bp, Homo sapien
aatgcctgagtttactctttgactg

SEQ ID NO: 4734270 - DNA, 25 bp, Homo sapien
cgtttgttcaatgcctgagtttact

SEQ ID NO: 4734271 - DNA, 25 bp, Homo sapien
gacacactccaacccgcctccaaag

SEQ ID NO: 4734272 - DNA, 25 bp, Homo sapien
tactctttgactgactgacacactc

SEQ ID NO: 4734273 - DNA, 25 bp, Homo sapien
agactaccgtcagggttagctatca

SEQ ID NO: 4734274 - DNA, 25 bp, Homo sapien
gcagcaatgcgaagctatttcctag

SEQ ID NO: 4734275 - DNA, 25 bp, Homo sapien
gctatttcctagactaccgtcaggg

SEQ ID NO: 4734276 - DNA, 25 bp, Homo sapien
ttacagcagcaatgcgaagctattt

SEQ ID NO: 4734277 - DNA, 25 bp, Homo sapien
cattcactgttctgaataataagtg

SEQ ID NO: 4734278 - DNA, 25 bp, Homo sapien
cctcttgccaatagcctgcagccat

SEQ ID NO: 4734279 - DNA, 25 bp, Homo sapien
cagataattgctaaacctcttgcca

SEQ ID NO: 4734280 - DNA, 25 bp, Homo sapien
atcagataattgctaaacctcttgc

SEQ ID NO: 4734281 - DNA, 25 bp, Homo sapien
atatggctgcctaatgctccccagg

SEQ ID NO: 4734282 - DNA, 25 bp, Homo sapien
gaaactcatgaagttattgtcagcc

SEQ ID NO: 4734283 - DNA, 25 bp, Homo sapien
caaaacttctgttcttgagcctgaa

SEQ ID NO: 4734284 - DNA, 25 bp, Homo sapien
gaagttattgtcagccagagaatca

SEQ ID NO: 4734285 - DNA, 25 bp, Homo sapien
ccatgcccacgagactgaagctctg

SEQ ID NO: 4734286 - DNA, 25 bp, Homo sapien
cgaaggacctttgattatgacgata

SEQ ID NO: 4734287 - DNA, 25 bp, Homo sapien
tgacgatatccctccatgagctggt

SEQ ID NO: 4734288 - DNA, 25 bp, Homo sapien
ttcactcatggacaagtcgaaggac

SEQ ID NO: 4734289 - DNA, 25 bp, Homo sapien
aatctaagaagatccctgatgactg

SEQ ID NO: 4734290 - DNA, 25 bp, Homo sapien
cctaagtgagttgaccatgggcagt

SEQ ID NO: 4734291 - DNA, 25 bp, Homo sapien
ctccagtggagaggaatgtctgaag

SEQ ID NO: 4734292 - DNA, 25 bp, Homo sapien
caagtgtagcatacgggagtgtagt

SEQ ID NO: 4734293 - DNA, 25 bp, Homo sapien
gcctctctcggaagctagtcacatt

SEQ ID NO: 4734294 - DNA, 25 bp, Homo sapien
cagaaagtgggccagtctagcctct

SEQ ID NO: 4734295 - DNA, 25 bp, Homo sapien
gaagctagtcacattgacagacaca

SEQ ID NO: 4734296 - DNA, 25 bp, Homo sapien
acattgacagacacaatagaacttg

SEQ ID NO: 4734297 - DNA, 25 bp, Homo sapien
aaaaactgtccctaaacctgcactg

SEQ ID NO: 4734298 - DNA, 25 bp, Homo sapien
caccaagtcatcctcttggaatatt

SEQ ID NO: 4734299 - DNA, 25 bp, Homo sapien
gggcatcgaaaacctccaccaagtc

SEQ ID NO: 4734300 - DNA, 25 bp, Homo sapien
ttctgacaagttccctggccaagct

SEQ ID NO: 4734301 - DNA, 25 bp, Homo sapien
ctttgaattctactgaaaccgaagg

SEQ ID NO: 4734302 - DNA, 25 bp, Homo sapien
cagctcgcagaaaacaactgtcaga

SEQ ID NO: 4734303 - DNA, 25 bp, Homo sapien
tccagaggcctctgatggataccag

SEQ ID NO: 4734304 - DNA, 25 bp, Homo sapien
cagtcaggcccaggtctccagaggc

SEQ ID NO: 4734305 - DNA, 25 bp, Homo sapien
tagcattcatgttaatcacagcccc

SEQ ID NO: 4734306 - DNA, 25 bp, Homo sapien
gagtcttctagtgatttgtccataa

SEQ ID NO: 4734307 - DNA, 25 bp, Homo sapien
tgatttgtccataataactgagcat

SEQ ID NO: 4734308 - DNA, 25 bp, Homo sapien
tcagcaagggacaatagagtcttct

SEQ ID NO: 4734309 - DNA, 25 bp, Homo sapien
caatagagtcttctagtgatttgtc

SEQ ID NO: 4734310 - DNA, 25 bp, Homo sapien
ctttttagaagcagtagcaacaagg

SEQ ID NO: 4734311 - DNA, 25 bp, Homo sapien
ttttagaagcagtagcaacaaggct

SEQ ID NO: 4734312 - DNA, 25 bp, Homo sapien
ttagaagcagtagcaacaaggcttt

SEQ ID NO: 4734313 - DNA, 25 bp, Homo sapien
tttttagaagcagtagcaacaaggc

SEQ ID NO: 4734314 - DNA, 25 bp, Homo sapien
acaatctctgcaaatgaaattggaa

SEQ ID NO: 4734315 - DNA, 25 bp, Homo sapien
caatctctgcaaatgaaattggaag

SEQ ID NO: 4734316 - DNA, 25 bp, Homo sapien
ttttgtcacaaagacaatctctgca

SEQ ID NO: 4734317 - DNA, 25 bp, Homo sapien
gacaatctctgcaaatgaaattgga

SEQ ID NO: 4734318 - DNA, 25 bp, Homo sapien
cctagctaagatctgtgaggagtca

SEQ ID NO: 4734319 - DNA, 25 bp, Homo sapien
gagtcagagaagaatacctggagca

SEQ ID NO: 4734320 - DNA, 25 bp, Homo sapien
gctgagagcatcaaagggaataaac

SEQ ID NO: 4734321 - DNA, 25 bp, Homo sapien
gcacctagttgggataaacctgcaa

SEQ ID NO: 4734322 - DNA, 25 bp, Homo sapien
tgtgtccacaacacaagactgggct

SEQ ID NO: 4734323 - DNA, 25 bp, Homo sapien
cacttggtctgctgaccgagccctg

SEQ ID NO: 4734324 - DNA, 25 bp, Homo sapien
tggagttatggaatttgtgtccaca

SEQ ID NO: 4734325 - DNA, 25 bp, Homo sapien
gttattagcaagtgcagtctctgtg

SEQ ID NO: 4734326 - DNA, 25 bp, Homo sapien
ttcccattctgggcagagatgctgg

SEQ ID NO: 4734327 - DNA, 25 bp, Homo sapien
tcatttcccattctgggcagagatg

SEQ ID NO: 4734328 - DNA, 25 bp, Homo sapien
ccattctgggcagagatgctggcat

SEQ ID NO: 4734329 - DNA, 25 bp, Homo sapien
catttcccattctgggcagagatgc

SEQ ID NO: 4734330 - DNA, 25 bp, Homo sapien
tgctccattacttctgagtctgttc

SEQ ID NO: 4734331 - DNA, 25 bp, Homo sapien
cttgctccattacttctgagtctgt

SEQ ID NO: 4734332 - DNA, 25 bp, Homo sapien
tcttcatgttccagttctgcatcag

SEQ ID NO: 4734333 - DNA, 25 bp, Homo sapien
ctgttcttcatgttccagttctgca

SEQ ID NO: 4734334 - DNA, 25 bp, Homo sapien
tggcctctggatatgatctgctgca

SEQ ID NO: 4734335 - DNA, 25 bp, Homo sapien
tatggcctctggatatgatctgctg

SEQ ID NO: 4734336 - DNA, 25 bp, Homo sapien
gctatggcctctggatatgatctgc

SEQ ID NO: 4734337 - DNA, 25 bp, Homo sapien
gcctctggatatgatctgctgcagc

SEQ ID NO: 4734338 - DNA, 25 bp, Homo sapien
tctcttaggttgctctcatggacaa

SEQ ID NO: 4734339 - DNA, 25 bp, Homo sapien
aaagtcattacaatcagaggtggca

SEQ ID NO: 4734340 - DNA, 25 bp, Homo sapien
tagctgctatccagcccagtgaaaa

SEQ ID NO: 4734341 - DNA, 25 bp, Homo sapien
cacacaaagattatcttaggccggg

SEQ ID NO: 4734342 - DNA, 25 bp, Homo sapien
ttgtcgttgctatagaacatggcca

SEQ ID NO: 4734343 - DNA, 25 bp, Homo sapien
gctatagaacatggccaatcaacac

SEQ ID NO: 4734344 - DNA, 25 bp, Homo sapien
cgttgctatagaacatggccaatca

SEQ ID NO: 4734345 - DNA, 25 bp, Homo sapien
acatggccaatcaacacatctgaat

SEQ ID NO: 4734346 - DNA, 25 bp, Homo sapien
tatttctcatcaataagactgggag

SEQ ID NO: 4734347 - DNA, 25 bp, Homo sapien
ccaggagctggtagttaattcctac

SEQ ID NO: 4734348 - DNA, 25 bp, Homo sapien
ggtacaggtccccagctagttgctt

SEQ ID NO: 4734349 - DNA, 25 bp, Homo sapien
caggaagccaacagcaaccactgtg

SEQ ID NO: 4734350 - DNA, 25 bp, Homo sapien
tctaagaatgatacatagaattcca

SEQ ID NO: 4734351 - DNA, 25 bp, Homo sapien
gaattccacacccaataattaataa

SEQ ID NO: 4734352 - DNA, 25 bp, Homo sapien
aatgatacatagaattccacaccca

SEQ ID NO: 4734353 - DNA, 25 bp, Homo sapien
gtttcttctaagaatgatacataga

SEQ ID NO: 4734354 - DNA, 25 bp, Homo sapien
ggacaaatggagttagacagcttct

SEQ ID NO: 4734355 - DNA, 25 bp, Homo sapien
cagtcaggtcgatgaaccagagttt

SEQ ID NO: 4734356 - DNA, 25 bp, Homo sapien
gaggattcctcaagatttccaaagg

SEQ ID NO: 4734357 - DNA, 25 bp, Homo sapien
aaaaagtaaacgcactggagagtgg

SEQ ID NO: 4734358 - DNA, 25 bp, Homo sapien
tgaatctagttacctaagaagggag

SEQ ID NO: 4734359 - DNA, 25 bp, Homo sapien
tactggcagaatatgaaatccacgc

SEQ ID NO: 4734360 - DNA, 25 bp, Homo sapien
taacagaattgtatcccaactctgg

SEQ ID NO: 4734361 - DNA, 25 bp, Homo sapien
caaaaggttgacacaacactggagg

SEQ ID NO: 4734362 - DNA, 25 bp, Homo sapien
taaagcccagtgagcaatctgaggg

SEQ ID NO: 4734363 - DNA, 25 bp, Homo sapien
tctgagggcgcctggaaaagcatga

SEQ ID NO: 4734364 - DNA, 25 bp, Homo sapien
tgtgcgacacgttaaatccttttgg

SEQ ID NO: 4734365 - DNA, 25 bp, Homo sapien
tttagcagaggctgagataacctcc

SEQ ID NO: 4734366 - DNA, 25 bp, Homo sapien
gaattgctgacgtatgctgaagact

SEQ ID NO: 4734367 - DNA, 25 bp, Homo sapien
ccaattcctgacagtggaggtagca

SEQ ID NO: 4734368 - DNA, 25 bp, Homo sapien
aaaatcctgagtgtgggaatgccac

SEQ ID NO: 4734369 - DNA, 25 bp, Homo sapien
gacttcagcaaacagggtgtaccac

SEQ ID NO: 4734370 - DNA, 25 bp, Homo sapien
cagaccgcaaggcaaacccagttaa

SEQ ID NO: 4734371 - DNA, 25 bp, Homo sapien
ccacagagagaatcatctatcttca

SEQ ID NO: 4734372 - DNA, 25 bp, Homo sapien
gaaaggagtgagtcttgtaataaaa

SEQ ID NO: 4734373 - DNA, 25 bp, Homo sapien
ataaaatgttctctggtccagattc

SEQ ID NO: 4734374 - DNA, 25 bp, Homo sapien
tcagagcatgcctttgctctgcttt

SEQ ID NO: 4734375 - DNA, 25 bp, Homo sapien
gagcatgcctttgctctgctttgca

SEQ ID NO: 4734376 - DNA, 25 bp, Homo sapien
tctgctttgcattggagagctgtaa

SEQ ID NO: 4734377 - DNA, 25 bp, Homo sapien
ggagagctgtaatagaaccaataat

SEQ ID NO: 4734378 - DNA, 25 bp, Homo sapien
gctcctaattgtatgggccatattt

SEQ ID NO: 4734379 - DNA, 25 bp, Homo sapien
acttctggggctcctaattgtatgg

SEQ ID NO: 4734380 - DNA, 25 bp, Homo sapien
gggctcctaattgtatgggccatat

SEQ ID NO: 4734381 - DNA, 25 bp, Homo sapien
tctggggctcctaattgtatgggcc

SEQ ID NO: 4734382 - DNA, 25 bp, Homo sapien
tttatcatcctgttgtgacaatacc

SEQ ID NO: 4734383 - DNA, 25 bp, Homo sapien
tatcatcctgttgtgacaatacctc

SEQ ID NO: 4734384 - DNA, 25 bp, Homo sapien
tctttatcatcctgttgtgacaata

SEQ ID NO: 4734385 - DNA, 25 bp, Homo sapien
atcatcctgttgtgacaatacctct

SEQ ID NO: 4734386 - DNA, 25 bp, Homo sapien
tccctttggcgaaagaccgttctgc

SEQ ID NO: 4734387 - DNA, 25 bp, Homo sapien
agacatatttttctcgccctggact

SEQ ID NO: 4734388 - DNA, 25 bp, Homo sapien
ggtcctgtggatgtaatactttcca

SEQ ID NO: 4734389 - DNA, 25 bp, Homo sapien
ttttctcgccctggactttctggtc

SEQ ID NO: 4734390 - DNA, 25 bp, Homo sapien
atacatacacccacagcacaactgg

SEQ ID NO: 4734391 - DNA, 25 bp, Homo sapien
cacccacagcacaactggatactgt

SEQ ID NO: 4734392 - DNA, 25 bp, Homo sapien
gcacaactggatactgtgttcgtgg

SEQ ID NO: 4734393 - DNA, 25 bp, Homo sapien
gtacacactagcagtcacacacaaa

SEQ ID NO: 4734394 - DNA, 25 bp, Homo sapien
gggaatcaggaatttcctctggaag

SEQ ID NO: 4734395 - DNA, 25 bp, Homo sapien
ggaatcaggaatttcctctggaagc

SEQ ID NO: 4734396 - DNA, 25 bp, Homo sapien
agggaatcaggaatttcctctggaa

SEQ ID NO: 4734397 - DNA, 25 bp, Homo sapien
tatacagtgcactctttctatcggc

SEQ ID NO: 4734398 - DNA, 25 bp, Homo sapien
caattgtgtaattatacagtgcact

SEQ ID NO: 4734399 - DNA, 25 bp, Homo sapien
gcactctttctatcggcaagatcca

SEQ ID NO: 4734400 - DNA, 25 bp, Homo sapien
cagggacaattgtgtaattatacag

SEQ ID NO: 4734401 - DNA, 25 bp, Homo sapien
taggacgatgagcaagcaaggttct

SEQ ID NO: 4734402 - DNA, 25 bp, Homo sapien
tgctcctgtaacagtgaagggctaa

SEQ ID NO: 4734403 - DNA, 25 bp, Homo sapien
aagtgtacattttctggcatccaat

SEQ ID NO: 4734404 - DNA, 25 bp, Homo sapien
gaagggctaattagttgcatttgca

SEQ ID NO: 4734405 - DNA, 25 bp, Homo sapien
tcagacatcaccagatactgacctg

SEQ ID NO: 4734406 - DNA, 25 bp, Homo sapien
cagcctctggccgtaagagatatcc

SEQ ID NO: 4734407 - DNA, 25 bp, Homo sapien
cctgatagtaggacatttgcccagc

SEQ ID NO: 4734408 - DNA, 25 bp, Homo sapien
aagagggtcatcctttacaacagtg

SEQ ID NO: 4734409 - DNA, 25 bp, Homo sapien
ctgcagtctcattccagttagctcc

SEQ ID NO: 4734410 - DNA, 25 bp, Homo sapien
gcaaggcagaccgaccctggaagaa

SEQ ID NO: 4734411 - DNA, 25 bp, Homo sapien
ctggacatatgccttggcaaatatt

SEQ ID NO: 4734412 - DNA, 25 bp, Homo sapien
gagaggcgaggcaaggcagaccgac

SEQ ID NO: 4734413 - DNA, 25 bp, Homo sapien
ttctggacatatgccttggcaaata

SEQ ID NO: 4734414 - DNA, 25 bp, Homo sapien
caaccttattaaaaatgcgcaaaca

SEQ ID NO: 4734415 - DNA, 25 bp, Homo sapien
caaacaaccttattaaaaatgcgca

SEQ ID NO: 4734416 - DNA, 25 bp, Homo sapien
aaagtgaccactcactcaagtggga

SEQ ID NO: 4734417 - DNA, 25 bp, Homo sapien
gtacttgtttcaaagatcctataaa

SEQ ID NO: 4734418 - DNA, 25 bp, Homo sapien
aaaatgtacttgtttcaaagatcct

SEQ ID NO: 4734419 - DNA, 25 bp, Homo sapien
aagtgggatatagatcacccctcag

SEQ ID NO: 4734420 - DNA, 25 bp, Homo sapien
ctgaaagctagaaagtgttgactgt

SEQ ID NO: 4734421 - DNA, 25 bp, Homo sapien
cttcccattcttccatgtatattaa

SEQ ID NO: 4734422 - DNA, 25 bp, Homo sapien
gtgccttatctgctatttgccttcc

SEQ ID NO: 4734423 - DNA, 25 bp, Homo sapien
tgtgccttatctgctatttgccttc

SEQ ID NO: 4734424 - DNA, 25 bp, Homo sapien
cttttcaataatttcatatttggac

SEQ ID NO: 4734425 - DNA, 25 bp, Homo sapien
ttttcaataatttcatatttggaca

SEQ ID NO: 4734426 - DNA, 25 bp, Homo sapien
tttcaataatttcatatttggacat

SEQ ID NO: 4734427 - DNA, 25 bp, Homo sapien
cacatatacactccagtcaaatgtc

SEQ ID NO: 4734428 - DNA, 25 bp, Homo sapien
atagagtagaacagacacacaatgc

SEQ ID NO: 4734429 - DNA, 25 bp, Homo sapien
ccattctgcatagagtagaacagac

SEQ ID NO: 4734430 - DNA, 25 bp, Homo sapien
gtcaaatgtcctgtaaaccattctg

SEQ ID NO: 4734431 - DNA, 25 bp, Homo sapien
tcataactcaaatctgtttaccagc

SEQ ID NO: 4734432 - DNA, 25 bp, Homo sapien
aggtggagactttaatcatctacaa

SEQ ID NO: 4734433 - DNA, 25 bp, Homo sapien
catcttgaagcaataacaatgaact

SEQ ID NO: 4734434 - DNA, 25 bp, Homo sapien
gtttaccagcttaagagaagcattt

SEQ ID NO: 4734435 - DNA, 25 bp, Homo sapien
cacaatccctgcaacttttatatat

SEQ ID NO: 4734436 - DNA, 25 bp, Homo sapien
tcatacagtatcagtagaccatggc

SEQ ID NO: 4734437 - DNA, 25 bp, Homo sapien
tgtaactgcaattccagcgtttcat

SEQ ID NO: 4734438 - DNA, 25 bp, Homo sapien
gaattattccaaggcatgttcagga

SEQ ID NO: 4734439 - DNA, 25 bp, Homo sapien
attataacaacaacttatcaaaggt

SEQ ID NO: 4734440 - DNA, 25 bp, Homo sapien
aggatctctacgtaaatttattttg

SEQ ID NO: 4734441 - DNA, 25 bp, Homo sapien
ttattttggtatcaaacaactgcaa

SEQ ID NO: 4734442 - DNA, 25 bp, Homo sapien
ggataaaagcatccctaattgtgga

SEQ ID NO: 4734443 - DNA, 25 bp, Homo sapien
gaaacagccacaggtaatttagggc

SEQ ID NO: 4734444 - DNA, 25 bp, Homo sapien
caaatacctgttagaatggcgtgtc

SEQ ID NO: 4734445 - DNA, 25 bp, Homo sapien
tatccaggctatccaactatattgc

SEQ ID NO: 4734446 - DNA, 25 bp, Homo sapien
tactcatctaacaaagtatccaggc

SEQ ID NO: 4734447 - DNA, 25 bp, Homo sapien
tgctttgggttcgtttgggctagac

SEQ ID NO: 4734448 - DNA, 25 bp, Homo sapien
gccctcatctcaagttctagcagct

SEQ ID NO: 4734449 - DNA, 25 bp, Homo sapien
gggctagactctgccagtcctagaa

SEQ ID NO: 4734450 - DNA, 25 bp, Homo sapien
ttatatcaccagctttcattagggc

SEQ ID NO: 4734451 - DNA, 25 bp, Homo sapien
ttttctggtgcctcgggagcagctg

SEQ ID NO: 4734452 - DNA, 25 bp, Homo sapien
tatgtcgctgtcataagcatctgca

SEQ ID NO: 4734453 - DNA, 25 bp, Homo sapien
agcagctgcttcttcgttgcatggg

SEQ ID NO: 4734454 - DNA, 25 bp, Homo sapien
gcatgggccttctatgtcgctgtca

SEQ ID NO: 4734455 - DNA, 25 bp, Homo sapien
gagtcccaaacacattccataatcc

SEQ ID NO: 4734456 - DNA, 25 bp, Homo sapien
tggagtcccaaacacattccataat

SEQ ID NO: 4734457 - DNA, 25 bp, Homo sapien
tcccactatggagtcccaaacacat

SEQ ID NO: 4734458 - DNA, 25 bp, Homo sapien
actatggagtcccaaacacattcca

SEQ ID NO: 4734459 - DNA, 25 bp, Homo sapien
tagacactaagcctagatggattcg

SEQ ID NO: 4734460 - DNA, 25 bp, Homo sapien
aaaatcttcagtacttgggtgcgga

SEQ ID NO: 4734461 - DNA, 25 bp, Homo sapien
tacattggtgagtagctagccagag

SEQ ID NO: 4734462 - DNA, 25 bp, Homo sapien
tgaaagtatacaggctagacgacag

SEQ ID NO: 4734463 - DNA, 25 bp, Homo sapien
gcttattctctctcacggatgaagc

SEQ ID NO: 4734464 - DNA, 25 bp, Homo sapien
agcagaatctatacagatgtcttgc

SEQ ID NO: 4734465 - DNA, 25 bp, Homo sapien
tgaagcagaatctatacagatgtct

SEQ ID NO: 4734466 - DNA, 25 bp, Homo sapien
tattctctctcacggatgaagcaga

SEQ ID NO: 4734467 - DNA, 25 bp, Homo sapien
aagcttggcattgaatcacaagaga

SEQ ID NO: 4734468 - DNA, 25 bp, Homo sapien
taagttctgaaaccaacatcagtcc

SEQ ID NO: 4734469 - DNA, 25 bp, Homo sapien
tatttctaactcacttctcctatct

SEQ ID NO: 4734470 - DNA, 25 bp, Homo sapien
gagagccctatacttatgactgaga

SEQ ID NO: 4734471 - DNA, 25 bp, Homo sapien
actcagatagaaaatgtcacttccg

SEQ ID NO: 4734472 - DNA, 25 bp, Homo sapien
tagatctagatgacaggtatatggg

SEQ ID NO: 4734473 - DNA, 25 bp, Homo sapien
gcaatgtgtactcttgcttgtactc

SEQ ID NO: 4734474 - DNA, 25 bp, Homo sapien
gaacatccgggaaaatctgaatatg

SEQ ID NO: 4734475 - DNA, 25 bp, Homo sapien
gaaaagttctatagattctggaaag

SEQ ID NO: 4734476 - DNA, 25 bp, Homo sapien
ggaaaccgttgccaagcataacacc

SEQ ID NO: 4734477 - DNA, 25 bp, Homo sapien
gattgaaatgaagaccccatctggg

SEQ ID NO: 4734478 - DNA, 25 bp, Homo sapien
gaaaggtgcctatctgcttcctatt

SEQ ID NO: 4734479 - DNA, 25 bp, Homo sapien
gaataagaggctatatcatatggcc

SEQ ID NO: 4734480 - DNA, 25 bp, Homo sapien
tttggagcctaggaataagaggcta

SEQ ID NO: 4734481 - DNA, 25 bp, Homo sapien
cttaccactgtaccacaattgtcta

SEQ ID NO: 4734482 - DNA, 25 bp, Homo sapien
catgcttctgtattggtaagtgccc

SEQ ID NO: 4734483 - DNA, 25 bp, Homo sapien
ggcatattcacacaagatacatgtt

SEQ ID NO: 4734484 - DNA, 25 bp, Homo sapien
caataagtacctatccagcccaaag

SEQ ID NO: 4734485 - DNA, 25 bp, Homo sapien
ttctcagacctcagtaaaccaagtt

SEQ ID NO: 4734486 - DNA, 25 bp, Homo sapien
caacatccatcttactttggagaaa

SEQ ID NO: 4734487 - DNA, 25 bp, Homo sapien
ttgttatacatttggcatggacagc

SEQ ID NO: 4734488 - DNA, 25 bp, Homo sapien
taattgttatacatttggcatggac

SEQ ID NO: 4734489 - DNA, 25 bp, Homo sapien
ttatacatttggcatggacagcaca

SEQ ID NO: 4734490 - DNA, 25 bp, Homo sapien
tacatttggcatggacagcacacag

SEQ ID NO: 4734491 - DNA, 25 bp, Homo sapien
gaaacaactgatttcatggagtgcc

SEQ ID NO: 4734492 - DNA, 25 bp, Homo sapien
taccaccagttaatgtgcaagcagt

SEQ ID NO: 4734493 - DNA, 25 bp, Homo sapien
cctttgtagtcagttgcttcctgga

SEQ ID NO: 4734494 - DNA, 25 bp, Homo sapien
gagggtgcactcttgtaagcagcct

SEQ ID NO: 4734495 - DNA, 25 bp, Homo sapien
cagtacagcagaagttgtgaaaacc

SEQ ID NO: 4734496 - DNA, 25 bp, Homo sapien
ggcataagcaagtgtgccaagccct

SEQ ID NO: 4734497 - DNA, 25 bp, Homo sapien
gagtcacccatgctttgggatgctg

SEQ ID NO: 4734498 - DNA, 25 bp, Homo sapien
caaattcaacatcaacctgggtaac

SEQ ID NO: 4734499 - DNA, 25 bp, Homo sapien
tataagaagcgccttttgccttcca

SEQ ID NO: 4734500 - DNA, 25 bp, Homo sapien
gccgccatataagaagcgccttttg

SEQ ID NO: 4734501 - DNA, 25 bp, Homo sapien
gctgccgccatataagaagcgcctt

SEQ ID NO: 4734502 - DNA, 25 bp, Homo sapien
tgctgccgccatataagaagcgcct

SEQ ID NO: 4734503 - DNA, 25 bp, Homo sapien
tcagatcccatcttagaaccatcat

SEQ ID NO: 4734504 - DNA, 25 bp, Homo sapien
catcttagaaccatcatctgcttcc

SEQ ID NO: 4734505 - DNA, 25 bp, Homo sapien
tgactgactaaatcagatcccatct

SEQ ID NO: 4734506 - DNA, 25 bp, Homo sapien
gactaaatcagatcccatcttagaa

SEQ ID NO: 4734507 - DNA, 25 bp, Homo sapien
taactaagaagttgccagaatgtaa

SEQ ID NO: 4734508 - DNA, 25 bp, Homo sapien
tgtctattcttgaaacgcttttctg

SEQ ID NO: 4734509 - DNA, 25 bp, Homo sapien
tcttacctatatacacttgacctgg

SEQ ID NO: 4734510 - DNA, 25 bp, Homo sapien
taggagaaagaatacctcaggattt

SEQ ID NO: 4734511 - DNA, 25 bp, Homo sapien
aggagctctaactgttcctggcata

SEQ ID NO: 4734512 - DNA, 25 bp, Homo sapien
gctctaactgttcctggcatagttt

SEQ ID NO: 4734513 - DNA, 25 bp, Homo sapien
ggagctctaactgttcctggcatag

SEQ ID NO: 4734514 - DNA, 25 bp, Homo sapien
gagctctaactgttcctggcatagt

SEQ ID NO: 4734515 - DNA, 25 bp, Homo sapien
gcttaactttagtgaccaaggccaa

SEQ ID NO: 4734516 - DNA, 25 bp, Homo sapien
aatgcatttatgtaacacagcccca

SEQ ID NO: 4734517 - DNA, 25 bp, Homo sapien
aactaaagagtgagtcagtttccca

SEQ ID NO: 4734518 - DNA, 25 bp, Homo sapien
cacagccccaatgtaaactggaaaa

SEQ ID NO: 4734519 - DNA, 25 bp, Homo sapien
agaattatctccacagagtcaacac

SEQ ID NO: 4734520 - DNA, 25 bp, Homo sapien
aatcttttcaagtagcttattttag

SEQ ID NO: 4734521 - DNA, 25 bp, Homo sapien
gcctaaacatttcttcgtggcaaat

SEQ ID NO: 4734522 - DNA, 25 bp, Homo sapien
ttaacagaattatctccacagagtc

SEQ ID NO: 4734523 - DNA, 25 bp, Homo sapien
tttctacatatgtatctagtctgat

SEQ ID NO: 4734524 - DNA, 25 bp, Homo sapien
atttctacatatgtatctagtctga

SEQ ID NO: 4734525 - DNA, 25 bp, Homo sapien
tatttctacatatgtatctagtctg

SEQ ID NO: 4734526 - DNA, 25 bp, Homo sapien
gtatttctacatatgtatctagtct

SEQ ID NO: 4734527 - DNA, 25 bp, Homo sapien
tctctcctataatacagaagcactg

SEQ ID NO: 4734528 - DNA, 25 bp, Homo sapien
agaaactaactggtttcaatgacac

SEQ ID NO: 4734529 - DNA, 25 bp, Homo sapien
gacacagtcaggtccagtccacctt

SEQ ID NO: 4734530 - DNA, 25 bp, Homo sapien
actaactggtttcaatgacacagtc

SEQ ID NO: 4734531 - DNA, 25 bp, Homo sapien
tagccatttaatgggactccctgca

SEQ ID NO: 4734532 - DNA, 25 bp, Homo sapien
gaaaagtaacatacgtaccaggagc

SEQ ID NO: 4734533 - DNA, 25 bp, Homo sapien
taaaaggccattcacccaaaagctc

SEQ ID NO: 4734534 - DNA, 25 bp, Homo sapien
gcctgggttacaccaatagccattt

SEQ ID NO: 4734535 - DNA, 25 bp, Homo sapien
attgccgcgctagcagtgagctcca

SEQ ID NO: 4734536 - DNA, 25 bp, Homo sapien
caggacttaggtaggaacatgaacc

SEQ ID NO: 4734537 - DNA, 25 bp, Homo sapien
tctggaagcccgacttcttccgaaa

SEQ ID NO: 4734538 - DNA, 25 bp, Homo sapien
tgaacctcaaggacggacgaccttg

SEQ ID NO: 4734539 - DNA, 25 bp, Homo sapien
agagtcggtactcctccgcttccgg

SEQ ID NO: 4734540 - DNA, 25 bp, Homo sapien
gacgctggaagagtcggtactcctc

SEQ ID NO: 4734541 - DNA, 25 bp, Homo sapien
ctgctgcaaggagcccgagacgctg

SEQ ID NO: 4734542 - DNA, 25 bp, Homo sapien
cccgagacgctggaagagtcggtac

SEQ ID NO: 4734543 - DNA, 25 bp, Homo sapien
tcccaccgccggtgacacttccact

SEQ ID NO: 4734544 - DNA, 25 bp, Homo sapien
cgcagccgctagtgcttccactgct

SEQ ID NO: 4734545 - DNA, 25 bp, Homo sapien
cacagcagctgacgctcccgcagcc

SEQ ID NO: 4734546 - DNA, 25 bp, Homo sapien
ctgctgccgctggccaacgcgggta

SEQ ID NO: 4734547 - DNA, 25 bp, Homo sapien
ctcctgactgctacgtttgcgccgt

SEQ ID NO: 4734548 - DNA, 25 bp, Homo sapien
tgactgctacgtttgcgccgtttct

SEQ ID NO: 4734549 - DNA, 25 bp, Homo sapien
ccgcctcctgactgctacgtttgcg

SEQ ID NO: 4734550 - DNA, 25 bp, Homo sapien
actgctacgtttgcgccgtttctcc

SEQ ID NO: 4734551 - DNA, 25 bp, Homo sapien
tctctggtgcgaccgaagcccgact

SEQ ID NO: 4734552 - DNA, 25 bp, Homo sapien
aggaaagtccgctgtctctggtgcg

SEQ ID NO: 4734553 - DNA, 25 bp, Homo sapien
ccctctgctgcaaccatcggaggaa

SEQ ID NO: 4734554 - DNA, 25 bp, Homo sapien
tgcaaccatcggaggaaagtccgct

SEQ ID NO: 4734555 - DNA, 25 bp, Homo sapien
cctccggtcgcggaggtcgatttga

SEQ ID NO: 4734556 - DNA, 25 bp, Homo sapien
cacagaacgtggtgaagcgttatgg

SEQ ID NO: 4734557 - DNA, 25 bp, Homo sapien
caggcactggcgtcgcaggttatgc

SEQ ID NO: 4734558 - DNA, 25 bp, Homo sapien
aggttatgcgtcacttccggccgtg

SEQ ID NO: 4734559 - DNA, 25 bp, Homo sapien
tacaataaggttgaagtatagttgc

SEQ ID NO: 4734560 - DNA, 25 bp, Homo sapien
taaggttgaagtatagttgctgatt

SEQ ID NO: 4734561 - DNA, 25 bp, Homo sapien
ctgtttacaataaggttgaagtata

SEQ ID NO: 4734562 - DNA, 25 bp, Homo sapien
ttgaagtatagttgctgattctcca

SEQ ID NO: 4734563 - DNA, 25 bp, Homo sapien
gctctttgtaccaaatataagttta

SEQ ID NO: 4734564 - DNA, 25 bp, Homo sapien
tgtggagctctttgtaccaaatata

SEQ ID NO: 4734565 - DNA, 25 bp, Homo sapien
aaaaatcaggttatcaaagagtatg

SEQ ID NO: 4734566 - DNA, 25 bp, Homo sapien
tttattaatgtggagctctttgtac

SEQ ID NO: 4734567 - DNA, 25 bp, Homo sapien
tctctagatagtggccttacaggca

SEQ ID NO: 4734568 - DNA, 25 bp, Homo sapien
gaaactgggttacctcagacacaat

SEQ ID NO: 4734569 - DNA, 25 bp, Homo sapien
cagtgtattgtaaaggaaccagcca

SEQ ID NO: 4734570 - DNA, 25 bp, Homo sapien
tatcagtgctgttcgaaggatctag

SEQ ID NO: 4734571 - DNA, 25 bp, Homo sapien
ttttaattatctgttatcagtcatg

SEQ ID NO: 4734572 - DNA, 25 bp, Homo sapien
tttttaattatctgttatcagtcat

SEQ ID NO: 4734573 - DNA, 25 bp, Homo sapien
tttaattatctgttatcagtcatgt

SEQ ID NO: 4734574 - DNA, 25 bp, Homo sapien
caaatttaggataaatctacagcat

SEQ ID NO: 4734575 - DNA, 25 bp, Homo sapien
gcaaatttaggataaatctacagca

SEQ ID NO: 4734576 - DNA, 25 bp, Homo sapien
acagcaaatttaggataaatctaca

SEQ ID NO: 4734577 - DNA, 25 bp, Homo sapien
cagcaaatttaggataaatctacag

SEQ ID NO: 4734578 - DNA, 25 bp, Homo sapien
cactgataagtgttccaagagccac

SEQ ID NO: 4734579 - DNA, 25 bp, Homo sapien
taaaagtggcttctaggtcttgtac

SEQ ID NO: 4734580 - DNA, 25 bp, Homo sapien
tgggctttcccttcaatgttatggt

SEQ ID NO: 4734581 - DNA, 25 bp, Homo sapien
tgctaattagtgacaaacattgggc

SEQ ID NO: 4734582 - DNA, 25 bp, Homo sapien
gcaaaaagtcctgagagcaagcagc

SEQ ID NO: 4734583 - DNA, 25 bp, Homo sapien
tcagttctattgcatgggacatcag

SEQ ID NO: 4734584 - DNA, 25 bp, Homo sapien
caaccgaagaatgtcaagtgcagga

SEQ ID NO: 4734585 - DNA, 25 bp, Homo sapien
taagatgactgctgaactgagcccc

SEQ ID NO: 4734586 - DNA, 25 bp, Homo sapien
ccatagtgatttagaactaccgaag

SEQ ID NO: 4734587 - DNA, 25 bp, Homo sapien
cccttttcgtgaagattttccatag

SEQ ID NO: 4734588 - DNA, 25 bp, Homo sapien
ccagtagtgtagtgaacccttttcg

SEQ ID NO: 4734589 - DNA, 25 bp, Homo sapien
tctcaaaaggcatgtaacggaaaca

SEQ ID NO: 4734590 - DNA, 25 bp, Homo sapien
tacatttttgaagagtgtttattta

SEQ ID NO: 4734591 - DNA, 25 bp, Homo sapien
atcttctcaagaagtatcaagtcat

SEQ ID NO: 4734592 - DNA, 25 bp, Homo sapien
agaagtatcaagtcatcctcagtta

SEQ ID NO: 4734593 - DNA, 25 bp, Homo sapien
cttcaggacagttaatagctttcca

SEQ ID NO: 4734594 - DNA, 25 bp, Homo sapien
caggacagttaatagctttccacaa

SEQ ID NO: 4734595 - DNA, 25 bp, Homo sapien
tatttgtgtagggtttgcttggtca

SEQ ID NO: 4734596 - DNA, 25 bp, Homo sapien
tattcattgttttagatgcagctga

SEQ ID NO: 4734597 - DNA, 25 bp, Homo sapien
gcagctgatcggtaggcactattcc

SEQ ID NO: 4734598 - DNA, 25 bp, Homo sapien
tttgcttggtcaaatgtgacagcct

SEQ ID NO: 4734599 - DNA, 25 bp, Homo sapien
gagtaggcgatctagcaaggacaca

SEQ ID NO: 4734600 - DNA, 25 bp, Homo sapien
tcttggtcattacagtctaggagct

SEQ ID NO: 4734601 - DNA, 25 bp, Homo sapien
gatcatcgagagaccaatttggaag

SEQ ID NO: 4734602 - DNA, 25 bp, Homo sapien
tattccaggcgagaggtgacattag

SEQ ID NO: 4734603 - DNA, 25 bp, Homo sapien
ctgtaaatggatcaactccggccat

SEQ ID NO: 4734604 - DNA, 25 bp, Homo sapien
gttcccatacttgcagaacctggta

SEQ ID NO: 4734605 - DNA, 25 bp, Homo sapien
gaacctggtacataacgaccagcac

SEQ ID NO: 4734606 - DNA, 25 bp, Homo sapien
aactccggccatggtagttcccata

SEQ ID NO: 4734607 - DNA, 25 bp, Homo sapien
ggtgggactaactagcacataagac

SEQ ID NO: 4734608 - DNA, 25 bp, Homo sapien
taatggatcagcctttatgggaaga

SEQ ID NO: 4734609 - DNA, 25 bp, Homo sapien
tacaaccggcgcaaaacatacagaa

SEQ ID NO: 4734610 - DNA, 25 bp, Homo sapien
gttagagatactatgacaacagccc

SEQ ID NO: 4734611 - DNA, 25 bp, Homo sapien
aaaatctaagatcaaactaccacca

SEQ ID NO: 4734612 - DNA, 25 bp, Homo sapien
aatctcttggccatagaaccctggg

SEQ ID NO: 4734613 - DNA, 25 bp, Homo sapien
taagactgactttaagttgtagcca

SEQ ID NO: 4734614 - DNA, 25 bp, Homo sapien
gaagaacaaaactctgactcgaaaa

SEQ ID NO: 4734615 - DNA, 25 bp, Homo sapien
gagcccggaacataccgaccaccac

SEQ ID NO: 4734616 - DNA, 25 bp, Homo sapien
gtaaaaggatctgctgtgggtagtg

SEQ ID NO: 4734617 - DNA, 25 bp, Homo sapien
cgaagagcccggaacataccgacca

SEQ ID NO: 4734618 - DNA, 25 bp, Homo sapien
ctgtgggtagtgtgttagaagatcc

SEQ ID NO: 4734619 - DNA, 25 bp, Homo sapien
aggcagaagtgcaccaaagttctga

SEQ ID NO: 4734620 - DNA, 25 bp, Homo sapien
ggcagaagtgcaccaaagttctgaa

SEQ ID NO: 4734621 - DNA, 25 bp, Homo sapien
aaggcagaagtgcaccaaagttctg

SEQ ID NO: 4734622 - DNA, 25 bp, Homo sapien
aaaggcagaagtgcaccaaagttct

SEQ ID NO: 4734623 - DNA, 25 bp, Homo sapien
tattataccttagccccagcactta

SEQ ID NO: 4734624 - DNA, 25 bp, Homo sapien
tgttattgttatcaaaaccacaggc

SEQ ID NO: 4734625 - DNA, 25 bp, Homo sapien
tgtcaaacaatggactcagggctgg

SEQ ID NO: 4734626 - DNA, 25 bp, Homo sapien
tacaaattcacaagagttcctgctg

SEQ ID NO: 4734627 - DNA, 25 bp, Homo sapien
gaccaatttagcctcatgtgaaaaa

SEQ ID NO: 4734628 - DNA, 25 bp, Homo sapien
taacagtaaagtgcctatctcaaaa

SEQ ID NO: 4734629 - DNA, 25 bp, Homo sapien
agactggtatgagcacctaactgca

SEQ ID NO: 4734630 - DNA, 25 bp, Homo sapien
gaagagcactagcacctgaaaaatg

SEQ ID NO: 4734631 - DNA, 25 bp, Homo sapien
atggaactacataagactcaatata

SEQ ID NO: 4734632 - DNA, 25 bp, Homo sapien
aatcaatcaacactaatggaactac

SEQ ID NO: 4734633 - DNA, 25 bp, Homo sapien
gctaatcacatgactatttgaaaac

SEQ ID NO: 4734634 - DNA, 25 bp, Homo sapien
ttgaaaaagctaatcacatgactat

SEQ ID NO: 4734635 - DNA, 25 bp, Homo sapien
tatgcagttaaccaagggtcatcac

SEQ ID NO: 4734636 - DNA, 25 bp, Homo sapien
ggcaatttatatgatggtccacctt

SEQ ID NO: 4734637 - DNA, 25 bp, Homo sapien
tagctacttgatccagaaacatagg

SEQ ID NO: 4734638 - DNA, 25 bp, Homo sapien
gggtcatcactggtattatatggca

SEQ ID NO: 4734639 - DNA, 25 bp, Homo sapien
ttcactaacactccactgataggct

SEQ ID NO: 4734640 - DNA, 25 bp, Homo sapien
ccatctctgattagacgagtctgtc

SEQ ID NO: 4734641 - DNA, 25 bp, Homo sapien
tgataggcttcgactttctccccat

SEQ ID NO: 4734642 - DNA, 25 bp, Homo sapien
tgctgattagcaccagatgagccaa

SEQ ID NO: 4734643 - DNA, 25 bp, Homo sapien
agcacttgctgttcgatcttctgat

SEQ ID NO: 4734644 - DNA, 25 bp, Homo sapien
caatggttgcgtgagacagttcttt

SEQ ID NO: 4734645 - DNA, 25 bp, Homo sapien
cattaagatgttccctcccaggaag

SEQ ID NO: 4734646 - DNA, 25 bp, Homo sapien
gatgtcccctaaatcgccagtttta

SEQ ID NO: 4734647 - DNA, 25 bp, Homo sapien
tagaccctctatcccttatagctgt

SEQ ID NO: 4734648 - DNA, 25 bp, Homo sapien
gaagcaaattagacacttccaactg

SEQ ID NO: 4734649 - DNA, 25 bp, Homo sapien
aactaagcctataaatcagcctctg

SEQ ID NO: 4734650 - DNA, 25 bp, Homo sapien
gtccacaaacatgtacatcactcgt

SEQ ID NO: 4734651 - DNA, 25 bp, Homo sapien
acccattagcattgtggggccaatg

SEQ ID NO: 4734652 - DNA, 25 bp, Homo sapien
ccattagcattgtggggccaatgtc

SEQ ID NO: 4734653 - DNA, 25 bp, Homo sapien
tttacttatttcctacccattagca

SEQ ID NO: 4734654 - DNA, 25 bp, Homo sapien
acttatttcctacccattagcattg

SEQ ID NO: 4734655 - DNA, 25 bp, Homo sapien
ccccaggcaatgaatctaaaaaatg

SEQ ID NO: 4734656 - DNA, 25 bp, Homo sapien
aaggttctccacagttaagccccat

SEQ ID NO: 4734657 - DNA, 25 bp, Homo sapien
tggtatatcatgcatcattgactgc

SEQ ID NO: 4734658 - DNA, 25 bp, Homo sapien
tgcctggcatgaaagcactaaaggt

SEQ ID NO: 4734659 - DNA, 25 bp, Homo sapien
ttgaagtgtccatatagtctcctca

SEQ ID NO: 4734660 - DNA, 25 bp, Homo sapien
attgaagtgtccatatagtctcctc

SEQ ID NO: 4734661 - DNA, 25 bp, Homo sapien
ctgaaggcctagacatataacattt

SEQ ID NO: 4734662 - DNA, 25 bp, Homo sapien
gaaggcctagacatataacatttaa

SEQ ID NO: 4734663 - DNA, 25 bp, Homo sapien
ctactgaaggcctagacatataaca

SEQ ID NO: 4734664 - DNA, 25 bp, Homo sapien
aacatttaatgattgactagaatat

SEQ ID NO: 4734665 - DNA, 25 bp, Homo sapien
cacagcagcaccatatagactgagc

SEQ ID NO: 4734666 - DNA, 25 bp, Homo sapien
gctggaagtcggatagtttgagcac

SEQ ID NO: 4734667 - DNA, 25 bp, Homo sapien
gtcaccattgtcgagcacacagcag

SEQ ID NO: 4734668 - DNA, 25 bp, Homo sapien
gatagtttgagcacattccccatgt

SEQ ID NO: 4734669 - DNA, 25 bp, Homo sapien
taatactagcatcatttgcacagga

SEQ ID NO: 4734670 - DNA, 25 bp, Homo sapien
taatatacttcaagacactcgccag

SEQ ID NO: 4734671 - DNA, 25 bp, Homo sapien
caaaattgccaaacctcttacacag

SEQ ID NO: 4734672 - DNA, 25 bp, Homo sapien
caatttggaaaaacggatatgctat

SEQ ID NO: 4734673 - DNA, 25 bp, Homo sapien
gtaagatctttaccgcccacactgc

SEQ ID NO: 4734674 - DNA, 25 bp, Homo sapien
tccacagtttaacagtcttgtctgc

SEQ ID NO: 4734675 - DNA, 25 bp, Homo sapien
gtctgctgatccagtcaacattaag

SEQ ID NO: 4734676 - DNA, 25 bp, Homo sapien
caacattaagccctgttcaggtaag

SEQ ID NO: 4734677 - DNA, 25 bp, Homo sapien
tgaaccactaagtaatgtcccaaat

SEQ ID NO: 4734678 - DNA, 25 bp, Homo sapien
ctttagcagtggtgtcccatgaacc

SEQ ID NO: 4734679 - DNA, 25 bp, Homo sapien
cattcagccagactttagcagtggt

SEQ ID NO: 4734680 - DNA, 25 bp, Homo sapien
ggtcatcatgcacttgtcattcagc

SEQ ID NO: 4734681 - DNA, 25 bp, Homo sapien
aagaaagatacaacacttgaaccca

SEQ ID NO: 4734682 - DNA, 25 bp, Homo sapien
aatctaggcaatgattatcagtagc

SEQ ID NO: 4734683 - DNA, 25 bp, Homo sapien
aaaattaccattatgtgaaaggctg

SEQ ID NO: 4734684 - DNA, 25 bp, Homo sapien
tacaacacttgaacccactgatcaa

SEQ ID NO: 4734685 - DNA, 25 bp, Homo sapien
gttatgagagcaaccatatggcctg

SEQ ID NO: 4734686 - DNA, 25 bp, Homo sapien
tgccaacccctgttttagagccaca

SEQ ID NO: 4734687 - DNA, 25 bp, Homo sapien
tcaaaggcaatcttctaacgtgaaa

SEQ ID NO: 4734688 - DNA, 25 bp, Homo sapien
caaactaatgctggtgagccacctg

SEQ ID NO: 4734689 - DNA, 25 bp, Homo sapien
aaaacaccaaagcattattatactc

SEQ ID NO: 4734690 - DNA, 25 bp, Homo sapien
aacaccaaagcattattatactcac

SEQ ID NO: 4734691 - DNA, 25 bp, Homo sapien
aaacaccaaagcattattatactca

SEQ ID NO: 4734692 - DNA, 25 bp, Homo sapien
aaaaacaccaaagcattattatact

SEQ ID NO: 4734693 - DNA, 25 bp, Homo sapien
attgtggtcatttccaccggtggca

SEQ ID NO: 4734694 - DNA, 25 bp, Homo sapien
cacttgagggtatgatgcatacaca

SEQ ID NO: 4734695 - DNA, 25 bp, Homo sapien
taggccatgagggtagatgtcactt

SEQ ID NO: 4734696 - DNA, 25 bp, Homo sapien
ggcattggactgtccagtgagaaaa

SEQ ID NO: 4734697 - DNA, 25 bp, Homo sapien
tagggttggcaaaaaggatcctgtc

SEQ ID NO: 4734698 - DNA, 25 bp, Homo sapien
gcaggcagtcatgcatctgttccca

SEQ ID NO: 4734699 - DNA, 25 bp, Homo sapien
ggcacagtagcagttacccacacct

SEQ ID NO: 4734700 - DNA, 25 bp, Homo sapien
gctgctttgatcacagagcaacaac

SEQ ID NO: 4734701 - DNA, 25 bp, Homo sapien
gacacaaaggctcccggcggatagg

SEQ ID NO: 4734702 - DNA, 25 bp, Homo sapien
cggtctcgggacacggacacaaagg

SEQ ID NO: 4734703 - DNA, 25 bp, Homo sapien
cggtacctggttgcgccgctcgtca

SEQ ID NO: 4734704 - DNA, 25 bp, Homo sapien
ccggagcgagcagctcagccggtac

SEQ ID NO: 4734705 - DNA, 25 bp, Homo sapien
cactgtgcgagaccagtccgcaggg

SEQ ID NO: 4734706 - DNA, 25 bp, Homo sapien
gggcgactcggagagcgccgggccg

SEQ ID NO: 4734707 - DNA, 25 bp, Homo sapien
cagtgtctgtctggcgcccggtgcc

SEQ ID NO: 4734708 - DNA, 25 bp, Homo sapien
caggcactgtgcgagaccagtccgc

SEQ ID NO: 4734709 - DNA, 25 bp, Homo sapien
tcagccctccatgacgcagagtgtg

SEQ ID NO: 4734710 - DNA, 25 bp, Homo sapien
accgccgacgccgatgcggagctga

SEQ ID NO: 4734711 - DNA, 25 bp, Homo sapien
ggaattcatcatcggcctcagccct

SEQ ID NO: 4734712 - DNA, 25 bp, Homo sapien
agcaagcctgacaggcactccggaa

SEQ ID NO: 4734713 - DNA, 25 bp, Homo sapien
gcaagagagaaagaggcccgccctt

SEQ ID NO: 4734714 - DNA, 25 bp, Homo sapien
caagagagaaagaggcccgcccttc

SEQ ID NO: 4734715 - DNA, 25 bp, Homo sapien
ctcttccgactccgggcccaacagt

SEQ ID NO: 4734716 - DNA, 25 bp, Homo sapien
gtctcttccgactccgggcccaaca

SEQ ID NO: 4734717 - DNA, 25 bp, Homo sapien
cagtttgtggtaaatcgggaagcgg

SEQ ID NO: 4734718 - DNA, 25 bp, Homo sapien
caacagtttgtggtaaatcgggaag

SEQ ID NO: 4734719 - DNA, 25 bp, Homo sapien
gatgcgttgtgtacgctatgccgtc

SEQ ID NO: 4734720 - DNA, 25 bp, Homo sapien
ctaatgaaaggaagcttaaagacgc

SEQ ID NO: 4734721 - DNA, 25 bp, Homo sapien
caggaacggaacagttggtgccaga

SEQ ID NO: 4734722 - DNA, 25 bp, Homo sapien
tggtgccagaatcgcatccatactt

SEQ ID NO: 4734723 - DNA, 25 bp, Homo sapien
ctagggacatagcaaaactcgctag

SEQ ID NO: 4734724 - DNA, 25 bp, Homo sapien
ttacttcaagtaaggcacacggagg

SEQ ID NO: 4734725 - DNA, 25 bp, Homo sapien
cacacggaggttgctctgattatca

SEQ ID NO: 4734726 - DNA, 25 bp, Homo sapien
tccaaaaagcactgaagcgtggtga

SEQ ID NO: 4734727 - DNA, 25 bp, Homo sapien
tgcccggccaggaatactttcttag

SEQ ID NO: 4734728 - DNA, 25 bp, Homo sapien
cgtgcccggccaggaatactttctt

SEQ ID NO: 4734729 - DNA, 25 bp, Homo sapien
cggccaggaatactttcttagttct

SEQ ID NO: 4734730 - DNA, 25 bp, Homo sapien
caccgtgcccggccaggaatacttt

SEQ ID NO: 4734731 - DNA, 25 bp, Homo sapien
tattggccccatgaaaatttctagt

SEQ ID NO: 4734732 - DNA, 25 bp, Homo sapien
tcagtccttgggtgatattggcccc

SEQ ID NO: 4734733 - DNA, 25 bp, Homo sapien
ggctaaaatgtattggtcctatcag

SEQ ID NO: 4734734 - DNA, 25 bp, Homo sapien
ctaaagatgcttctacctgtggact

SEQ ID NO: 4734735 - DNA, 25 bp, Homo sapien
ttaggtgtactcagataatatcctg

SEQ ID NO: 4734736 - DNA, 25 bp, Homo sapien
tcaggaataaaacttgtggtggttc

SEQ ID NO: 4734737 - DNA, 25 bp, Homo sapien
gacataggattgataaaatgactct

SEQ ID NO: 4734738 - DNA, 25 bp, Homo sapien
tgtgcacaggtagagttaattaggt

SEQ ID NO: 4734739 - DNA, 25 bp, Homo sapien
caaatatggtaatttgtcctgaaga

SEQ ID NO: 4734740 - DNA, 25 bp, Homo sapien
tcaaatatggtaatttgtcctgaag

SEQ ID NO: 4734741 - DNA, 25 bp, Homo sapien
tatataatacctaggtcaggtttta

SEQ ID NO: 4734742 - DNA, 25 bp, Homo sapien
aaagcttaagtgtagtctttgctca

SEQ ID NO: 4734743 - DNA, 25 bp, Homo sapien
tctctcagtagacatttgtattgaa

SEQ ID NO: 4734744 - DNA, 25 bp, Homo sapien
aataccccatattcaacagaggccc

SEQ ID NO: 4734745 - DNA, 25 bp, Homo sapien
gtctgtaaacacaagcaaatatgta

SEQ ID NO: 4734746 - DNA, 25 bp, Homo sapien
tttttctaaggaattgtcaagtaca

SEQ ID NO: 4734747 - DNA, 25 bp, Homo sapien
tgtaactgtcaactaccgaggagtg

SEQ ID NO: 4734748 - DNA, 25 bp, Homo sapien
gccaattgattatgaggactcagca

SEQ ID NO: 4734749 - DNA, 25 bp, Homo sapien
tatggtcacccaagcactgctaaga

SEQ ID NO: 4734750 - DNA, 25 bp, Homo sapien
gatagaaatagctgtccatggacca

SEQ ID NO: 4734751 - DNA, 25 bp, Homo sapien
taccatattgggcatttgatagcaa

SEQ ID NO: 4734752 - DNA, 25 bp, Homo sapien
caggcgatgatgattataactaagc

SEQ ID NO: 4734753 - DNA, 25 bp, Homo sapien
gaagtgaagtcgtcagtacagtgac

SEQ ID NO: 4734754 - DNA, 25 bp, Homo sapien
tgcttcatgctcttccaggcgatga

SEQ ID NO: 4734755 - DNA, 25 bp, Homo sapien
aagttgttcgaagagctattaaata

SEQ ID NO: 4734756 - DNA, 25 bp, Homo sapien
taagttgttcgaagagctattaaat

SEQ ID NO: 4734757 - DNA, 25 bp, Homo sapien
tgttaagttgttcgaagagctatta

SEQ ID NO: 4734758 - DNA, 25 bp, Homo sapien
tcttgttaagttgttcgaagagcta

SEQ ID NO: 4734759 - DNA, 25 bp, Homo sapien
tctgcaggctgttggggtagctaca

SEQ ID NO: 4734760 - DNA, 25 bp, Homo sapien
tgagtggcattcagccttatgaggt

SEQ ID NO: 4734761 - DNA, 25 bp, Homo sapien
aaggaaattttgagtggcattcagc

SEQ ID NO: 4734762 - DNA, 25 bp, Homo sapien
cagccttatgaggtactgttttgat

SEQ ID NO: 4734763 - DNA, 25 bp, Homo sapien
tagaggcacaaatacatcagcattc

SEQ ID NO: 4734764 - DNA, 25 bp, Homo sapien
gaagttttaggcttcttagaggcac

SEQ ID NO: 4734765 - DNA, 25 bp, Homo sapien
caaattaaatagactgcaagagcag

SEQ ID NO: 4734766 - DNA, 25 bp, Homo sapien
ggtggtacatccaaatagctaatca

SEQ ID NO: 4734767 - DNA, 25 bp, Homo sapien
taaccttgttctcaatcaaatagag

SEQ ID NO: 4734768 - DNA, 25 bp, Homo sapien
tgagtaaaaagtatgtctgtagaac

SEQ ID NO: 4734769 - DNA, 25 bp, Homo sapien
caaaaccgttattatgtaagatagt

SEQ ID NO: 4734770 - DNA, 25 bp, Homo sapien
caatcaaatagagctctgtgagtaa

SEQ ID NO: 4734771 - DNA, 25 bp, Homo sapien
cattaagagtaatttggttataact

SEQ ID NO: 4734772 - DNA, 25 bp, Homo sapien
aactgagatcaagtatagtaacatc

SEQ ID NO: 4734773 - DNA, 25 bp, Homo sapien
gagtaatttggttataactgagatc

SEQ ID NO: 4734774 - DNA, 25 bp, Homo sapien
gatatctgctggaatcaaggtataa

SEQ ID NO: 4734775 - DNA, 25 bp, Homo sapien
gataataatatcatggagaggggcc

SEQ ID NO: 4734776 - DNA, 25 bp, Homo sapien
tggagaggggccaaaagaggattgt

SEQ ID NO: 4734777 - DNA, 25 bp, Homo sapien
aaaagaggattgtgatgcctgtgac

SEQ ID NO: 4734778 - DNA, 25 bp, Homo sapien
ggattgtgatgcctgtgactttcat

SEQ ID NO: 4734779 - DNA, 25 bp, Homo sapien
gaataggtgttcagctccttcaatg

SEQ ID NO: 4734780 - DNA, 25 bp, Homo sapien
taggaataggtgttcagctccttca

SEQ ID NO: 4734781 - DNA, 25 bp, Homo sapien
gtttaatgatttataggaataggtg

SEQ ID NO: 4734782 - DNA, 25 bp, Homo sapien
tgatttataggaataggtgttcagc

SEQ ID NO: 4734783 - DNA, 25 bp, Homo sapien
taactctgtttcaacggcattaaaa

SEQ ID NO: 4734784 - DNA, 25 bp, Homo sapien
aaaaagtacatcgtatgattacatt

SEQ ID NO: 4734785 - DNA, 25 bp, Homo sapien
gaaattaactctgtttcaacggcat

SEQ ID NO: 4734786 - DNA, 25 bp, Homo sapien
catcgtatgattacatttcactttg

SEQ ID NO: 4734787 - DNA, 25 bp, Homo sapien
tagccagccccatacaagaggagtc

SEQ ID NO: 4734788 - DNA, 25 bp, Homo sapien
agaacaatcctgctccaagggaagg

SEQ ID NO: 4734789 - DNA, 25 bp, Homo sapien
tgtaacatccacactaaccagaggc

SEQ ID NO: 4734790 - DNA, 25 bp, Homo sapien
ataaacttgtggcaggcctatggcc

SEQ ID NO: 4734791 - DNA, 25 bp, Homo sapien
gcagcactacaagagcagttaaagg

SEQ ID NO: 4734792 - DNA, 25 bp, Homo sapien
tgaaaaactaaggtattcaggcaat

SEQ ID NO: 4734793 - DNA, 25 bp, Homo sapien
gctagaaggaattggagtcctacct

SEQ ID NO: 4734794 - DNA, 25 bp, Homo sapien
gattacaactgggaaatgcatcaca

SEQ ID NO: 4734795 - DNA, 25 bp, Homo sapien
tctcaacgtgcttggctctagcagt

SEQ ID NO: 4734796 - DNA, 25 bp, Homo sapien
tgtgcctggtgttttactctttact

SEQ ID NO: 4734797 - DNA, 25 bp, Homo sapien
tactagtgtattcccttacattgaa

SEQ ID NO: 4734798 - DNA, 25 bp, Homo sapien
caggctgatctcaacgtgcttggct

SEQ ID NO: 4734799 - DNA, 25 bp, Homo sapien
ccttcagtggaacaaagcctccgtg

SEQ ID NO: 4734800 - DNA, 25 bp, Homo sapien
ttatcaagagagaaaagcgacagtt

SEQ ID NO: 4734801 - DNA, 25 bp, Homo sapien
gtcacctgagggatagcaacatgcc

SEQ ID NO: 4734802 - DNA, 25 bp, Homo sapien
aagccgtctgtattatgaagcctcg

SEQ ID NO: 4734803 - DNA, 25 bp, Homo sapien
aaggcagctttcatctttcacccag

SEQ ID NO: 4734804 - DNA, 25 bp, Homo sapien
tcatgatccactcctactaatgggt

SEQ ID NO: 4734805 - DNA, 25 bp, Homo sapien
cgtaagctgcctcatctttgtgcta

SEQ ID NO: 4734806 - DNA, 25 bp, Homo sapien
attaccaccgctctactcaaggcag

SEQ ID NO: 4734807 - DNA, 25 bp, Homo sapien
gtaatacagcgtggcagtaaggcag

SEQ ID NO: 4734808 - DNA, 25 bp, Homo sapien
tattgccccagaattatgtgtggct

SEQ ID NO: 4734809 - DNA, 25 bp, Homo sapien
acagaggctataatttatgattgcc

SEQ ID NO: 4734810 - DNA, 25 bp, Homo sapien
cagctggctagtattatgttgtata

SEQ ID NO: 4734811 - DNA, 25 bp, Homo sapien
tggcaacaccttgagcaaaataatt

SEQ ID NO: 4734812 - DNA, 25 bp, Homo sapien
ggcaacaccttgagcaaaataattt

SEQ ID NO: 4734813 - DNA, 25 bp, Homo sapien
gtggcaacaccttgagcaaaataat

SEQ ID NO: 4734814 - DNA, 25 bp, Homo sapien
agtggcaacaccttgagcaaaataa

SEQ ID NO: 4734815 - DNA, 25 bp, Homo sapien
tgacccattcaaggatgtctctgcc

SEQ ID NO: 4734816 - DNA, 25 bp, Homo sapien
gagtcaagagagtgattaccagcca

SEQ ID NO: 4734817 - DNA, 25 bp, Homo sapien
agtatgctctaagtctcacactgga

SEQ ID NO: 4734818 - DNA, 25 bp, Homo sapien
gaactagatcctgactcagtggcag

SEQ ID NO: 4734819 - DNA, 25 bp, Homo sapien
tgaatcgtgggggtagtttcccgca

SEQ ID NO: 4734820 - DNA, 25 bp, Homo sapien
cgtgggggtagtttcccgcatactg

SEQ ID NO: 4734821 - DNA, 25 bp, Homo sapien
tatgtgctggtcacacccatctcag

SEQ ID NO: 4734822 - DNA, 25 bp, Homo sapien
cgtgggcggctgtcatttgctctct

SEQ ID NO: 4734823 - DNA, 25 bp, Homo sapien
gagagggagaaaatttggactagcc

SEQ ID NO: 4734824 - DNA, 25 bp, Homo sapien
gcttgaccagtgaggtgtatgtgct

SEQ ID NO: 4734825 - DNA, 25 bp, Homo sapien
gctcagtcaccatagagaacgaggc

SEQ ID NO: 4734826 - DNA, 25 bp, Homo sapien
gtcaccatagagaacgaggccctgc

SEQ ID NO: 4734827 - DNA, 25 bp, Homo sapien
tcagtcaccatagagaacgaggccc

SEQ ID NO: 4734828 - DNA, 25 bp, Homo sapien
acagctcagtcaccatagagaacga

SEQ ID NO: 4734829 - DNA, 25 bp, Homo sapien
aatgaccagatccatgcaggctttt

SEQ ID NO: 4734830 - DNA, 25 bp, Homo sapien
cttccaaatgaccagatccatgcag

SEQ ID NO: 4734831 - DNA, 25 bp, Homo sapien
gaccagatccatgcaggcttttgca

SEQ ID NO: 4734832 - DNA, 25 bp, Homo sapien
tccaaatgaccagatccatgcaggc

SEQ ID NO: 4734833 - DNA, 25 bp, Homo sapien
tctccttcccagggaggtatgagaa

SEQ ID NO: 4734834 - DNA, 25 bp, Homo sapien
acatcggtaccctcagctgtgtatc

SEQ ID NO: 4734835 - DNA, 25 bp, Homo sapien
gagggatcaccaaagcaagacatct

SEQ ID NO: 4734836 - DNA, 25 bp, Homo sapien
caatgattggctagcacatcggtac

SEQ ID NO: 4734837 - DNA, 25 bp, Homo sapien
cacgccagacactggtgaaactgtg

SEQ ID NO: 4734838 - DNA, 25 bp, Homo sapien
gcaatgccacgaacaggtaattggt

SEQ ID NO: 4734839 - DNA, 25 bp, Homo sapien
caggaagggcctatataggcataca

SEQ ID NO: 4734840 - DNA, 25 bp, Homo sapien
gaaactgtgcatatagcaatgccac

SEQ ID NO: 4734841 - DNA, 25 bp, Homo sapien
gctgatgaggaaacataaccgatat

SEQ ID NO: 4734842 - DNA, 25 bp, Homo sapien
ctgaacgattctctgcaggcaatca

SEQ ID NO: 4734843 - DNA, 25 bp, Homo sapien
tgtccacaactgaagtgtgaattaa

SEQ ID NO: 4734844 - DNA, 25 bp, Homo sapien
tcagccattagactcctaaggggtc

SEQ ID NO: 4734845 - DNA, 25 bp, Homo sapien
gagcacaagaagaggagaaatgatc

SEQ ID NO: 4734846 - DNA, 25 bp, Homo sapien
gcagggtagtctgtagggagcacag

SEQ ID NO: 4734847 - DNA, 25 bp, Homo sapien
gtctgtagggagcacagagcacaag

SEQ ID NO: 4734848 - DNA, 25 bp, Homo sapien
gtagtctgtagggagcacagagcac

SEQ ID NO: 4734849 - DNA, 25 bp, Homo sapien
aaacacacggtgattaccatcagca

SEQ ID NO: 4734850 - DNA, 25 bp, Homo sapien
tgcaaacacacggtgattaccatca

SEQ ID NO: 4734851 - DNA, 25 bp, Homo sapien
caggtgggaacttgacaaaagtctt

SEQ ID NO: 4734852 - DNA, 25 bp, Homo sapien
acacacggtgattaccatcagcagg

SEQ ID NO: 4734853 - DNA, 25 bp, Homo sapien
tgacaccggggcgatccaaggaaac

SEQ ID NO: 4734854 - DNA, 25 bp, Homo sapien
cttggcgacctgacaccggggcgat

SEQ ID NO: 4734855 - DNA, 25 bp, Homo sapien
acaacagccgtattgagattcaaag

SEQ ID NO: 4734856 - DNA, 25 bp, Homo sapien
gatccaaggaaacctccacaacagc

SEQ ID NO: 4734857 - DNA, 25 bp, Homo sapien
tatgactagttccaactaccacctt

SEQ ID NO: 4734858 - DNA, 25 bp, Homo sapien
ctagaaccttctgtatgactagttc

SEQ ID NO: 4734859 - DNA, 25 bp, Homo sapien
ttctgtatgactagttccaactacc

SEQ ID NO: 4734860 - DNA, 25 bp, Homo sapien
aaccttctgtatgactagttccaac

SEQ ID NO: 4734861 - DNA, 25 bp, Homo sapien
cactccgccaaattggtagttacat

SEQ ID NO: 4734862 - DNA, 25 bp, Homo sapien
tccgccaaattggtagttacattct

SEQ ID NO: 4734863 - DNA, 25 bp, Homo sapien
caaattggtagttacattcttctac

SEQ ID NO: 4734864 - DNA, 25 bp, Homo sapien
tcaacactccgccaaattggtagtt

SEQ ID NO: 4734865 - DNA, 25 bp, Homo sapien
tcttaggtgccgaaacaaaacatga

SEQ ID NO: 4734866 - DNA, 25 bp, Homo sapien
taaatgagccaatgtggagacttgc

SEQ ID NO: 4734867 - DNA, 25 bp, Homo sapien
catgaagtaggattattccagatga

SEQ ID NO: 4734868 - DNA, 25 bp, Homo sapien
ttttccacatcgacaacagagcttc

SEQ ID NO: 4734869 - DNA, 25 bp, Homo sapien
taagtgtattgccttccattgaggg

SEQ ID NO: 4734870 - DNA, 25 bp, Homo sapien
cgagaaaagctaatagtgaagataa

SEQ ID NO: 4734871 - DNA, 25 bp, Homo sapien
ccattgaggggatgtgaaaaaataa

SEQ ID NO: 4734872 - DNA, 25 bp, Homo sapien
aacaaaacgagaaaagctaatagtg

SEQ ID NO: 4734873 - DNA, 25 bp, Homo sapien
ttaataaagtagatcacttagataa

SEQ ID NO: 4734874 - DNA, 25 bp, Homo sapien
aataaagtagatcacttagataaaa

SEQ ID NO: 4734875 - DNA, 25 bp, Homo sapien
tgttttgaggacttaataaagtaga

SEQ ID NO: 4734876 - DNA, 25 bp, Homo sapien
gtagatcacttagataaaattaagc

SEQ ID NO: 4734877 - DNA, 25 bp, Homo sapien
cattgttccgtataccatgtgacat

SEQ ID NO: 4734878 - DNA, 25 bp, Homo sapien
cagcaacaccaacaaaaccgacatt

SEQ ID NO: 4734879 - DNA, 25 bp, Homo sapien
aaccgacattgttccgtataccatg

SEQ ID NO: 4734880 - DNA, 25 bp, Homo sapien
caacaaaaccgacattgttccgtat

SEQ ID NO: 4734881 - DNA, 25 bp, Homo sapien
taatttactgctatgttcacataca

SEQ ID NO: 4734882 - DNA, 25 bp, Homo sapien
tcctgctacacctttcatatattgc

SEQ ID NO: 4734883 - DNA, 25 bp, Homo sapien
cttaagataatttactgctatgttc

SEQ ID NO: 4734884 - DNA, 25 bp, Homo sapien
cttgatctcttagcttcttaagata

SEQ ID NO: 4734885 - DNA, 25 bp, Homo sapien
tccgatgagccatcttgttaaatgt

SEQ ID NO: 4734886 - DNA, 25 bp, Homo sapien
tcaaatacttctcaacaaagaggtt

SEQ ID NO: 4734887 - DNA, 25 bp, Homo sapien
caggtactttggataagaattctga

SEQ ID NO: 4734888 - DNA, 25 bp, Homo sapien
tgtagcgttgtcttacttcatcagg

SEQ ID NO: 4734889 - DNA, 25 bp, Homo sapien
ggctggacatgtagatgcatttttc

SEQ ID NO: 4734890 - DNA, 25 bp, Homo sapien
tttgctgggcccgaatgattccagt

SEQ ID NO: 4734891 - DNA, 25 bp, Homo sapien
aagtggcatcaataaaagccttccc

SEQ ID NO: 4734892 - DNA, 25 bp, Homo sapien
ggtaccctgaatggtctaatgacct

SEQ ID NO: 4734893 - DNA, 25 bp, Homo sapien
ggacacccaactattctatgaagaa

SEQ ID NO: 4734894 - DNA, 25 bp, Homo sapien
ccacaacatttgcagttaaagggaa

SEQ ID NO: 4734895 - DNA, 25 bp, Homo sapien
ggaagtatagactctgccatgcaga

SEQ ID NO: 4734896 - DNA, 25 bp, Homo sapien
aagtacttatatatttgaccctggg

SEQ ID NO: 4734897 - DNA, 25 bp, Homo sapien
tgttatttcaggtagttatactctg

SEQ ID NO: 4734898 - DNA, 25 bp, Homo sapien
cgattcttgttatttcaggtagtta

SEQ ID NO: 4734899 - DNA, 25 bp, Homo sapien
taaagtcgattcttgttatttcagg

SEQ ID NO: 4734900 - DNA, 25 bp, Homo sapien
tgaaaactaaagtcgattcttgtta

SEQ ID NO: 4734901 - DNA, 25 bp, Homo sapien
gattcctataaaagaatcctctagg

SEQ ID NO: 4734902 - DNA, 25 bp, Homo sapien
tgtagattcctataaaagaatcctc

SEQ ID NO: 4734903 - DNA, 25 bp, Homo sapien
agattcctataaaagaatcctctag

SEQ ID NO: 4734904 - DNA, 25 bp, Homo sapien
ctgtgtagattcctataaaagaatc

SEQ ID NO: 4734905 - DNA, 25 bp, Homo sapien
gtcatcagaatgagaggaggtgtca

SEQ ID NO: 4734906 - DNA, 25 bp, Homo sapien
cagatttgattggatcagaaccaaa

SEQ ID NO: 4734907 - DNA, 25 bp, Homo sapien
ggaggtgtcatcttcagtacaacca

SEQ ID NO: 4734908 - DNA, 25 bp, Homo sapien
gattcactttcaacgagctcattag

SEQ ID NO: 4734909 - DNA, 25 bp, Homo sapien
cttgcattcttggcacattgtcttt

SEQ ID NO: 4734910 - DNA, 25 bp, Homo sapien
cttgattattaccttgcattcttgg

SEQ ID NO: 4734911 - DNA, 25 bp, Homo sapien
ttcaaaagtaatgaggtcttgatta

SEQ ID NO: 4734912 - DNA, 25 bp, Homo sapien
aatgaggtcttgattattaccttgc

SEQ ID NO: 4734913 - DNA, 25 bp, Homo sapien
tattggtgaaacagaaggcctttgg

SEQ ID NO: 4734914 - DNA, 25 bp, Homo sapien
ccagggatgtgtggcgaccttcact

SEQ ID NO: 4734915 - DNA, 25 bp, Homo sapien
tcattgccattgagaggtgcagaag

SEQ ID NO: 4734916 - DNA, 25 bp, Homo sapien
tagaagtaggcatgactggaggtac

SEQ ID NO: 4734917 - DNA, 25 bp, Homo sapien
cacttttcctctgggagcaggctat

SEQ ID NO: 4734918 - DNA, 25 bp, Homo sapien
catattcaagatcagtctctggaca

SEQ ID NO: 4734919 - DNA, 25 bp, Homo sapien
tgctaaagttcatttggagatcctc

SEQ ID NO: 4734920 - DNA, 25 bp, Homo sapien
cctgctttgctttagatgccccaag

SEQ ID NO: 4734921 - DNA, 25 bp, Homo sapien
agatgctcttgacgcctgcccaagc

SEQ ID NO: 4734922 - DNA, 25 bp, Homo sapien
tggaagagatgctcttgacgcctgc

SEQ ID NO: 4734923 - DNA, 25 bp, Homo sapien
gcccagcagttctttcggttactgg

SEQ ID NO: 4734924 - DNA, 25 bp, Homo sapien
ggcccagcagttctttcggttactg

SEQ ID NO: 4734925 - DNA, 25 bp, Homo sapien
tcaggaactgagggaccacccaaaa

SEQ ID NO: 4734926 - DNA, 25 bp, Homo sapien
caggaactgagggaccacccaaaag

SEQ ID NO: 4734927 - DNA, 25 bp, Homo sapien
accgtcaatcaggacccctgtagca

SEQ ID NO: 4734928 - DNA, 25 bp, Homo sapien
ctgcaaaaaacaccgtcaatcagga

SEQ ID NO: 4734929 - DNA, 25 bp, Homo sapien
gcaaaaaacaccgtcaatcaggacc

SEQ ID NO: 4734930 - DNA, 25 bp, Homo sapien
aaaacaccgtcaatcaggacccctg

SEQ ID NO: 4734931 - DNA, 25 bp, Homo sapien
gaactgatcctaggttcctttggca

SEQ ID NO: 4734932 - DNA, 25 bp, Homo sapien
gtcacagccagtccgtaggaactga

SEQ ID NO: 4734933 - DNA, 25 bp, Homo sapien
cctggtcactttagatggacttggc

SEQ ID NO: 4734934 - DNA, 25 bp, Homo sapien
gacttggctgctagttctaaggcga

SEQ ID NO: 4734935 - DNA, 25 bp, Homo sapien
ctgtggactcaacacaactcctttg

SEQ ID NO: 4734936 - DNA, 25 bp, Homo sapien
tggactcaacacaactcctttgcac

SEQ ID NO: 4734937 - DNA, 25 bp, Homo sapien
ccaagcaactgcaatcacctccctc

SEQ ID NO: 4734938 - DNA, 25 bp, Homo sapien
aagcaactgcaatcacctccctcac

SEQ ID NO: 4734939 - DNA, 25 bp, Homo sapien
ctggagctgtcaaaagggcacagag

SEQ ID NO: 4734940 - DNA, 25 bp, Homo sapien
caaaataaccggcagagagtagcat

SEQ ID NO: 4734941 - DNA, 25 bp, Homo sapien
gaaatggcaaaataaccggcagaga

SEQ ID NO: 4734942 - DNA, 25 bp, Homo sapien
tggcaccgatccctggagctgtcaa

SEQ ID NO: 4734943 - DNA, 25 bp, Homo sapien
caaaggtgccgtcttttatagccca

SEQ ID NO: 4734944 - DNA, 25 bp, Homo sapien
caaccaatggtgagtgagactgggc

SEQ ID NO: 4734945 - DNA, 25 bp, Homo sapien
tattcaaaggcggagcttcgtagct

SEQ ID NO: 4734946 - DNA, 25 bp, Homo sapien
aaggtgagcgcctgacctactgcct

SEQ ID NO: 4734947 - DNA, 25 bp, Homo sapien
ggagagaacctcagattggaagcac

SEQ ID NO: 4734948 - DNA, 25 bp, Homo sapien
gagagaacctcagattggaagcaca

SEQ ID NO: 4734949 - DNA, 25 bp, Homo sapien
agagaacctcagattggaagcacat

SEQ ID NO: 4734950 - DNA, 25 bp, Homo sapien
tctgagcctatggaaatgatatccg

SEQ ID NO: 4734951 - DNA, 25 bp, Homo sapien
tcttcaccgggtaaccgactcatcg

SEQ ID NO: 4734952 - DNA, 25 bp, Homo sapien
tgtgcctgatcttctcatatctgaa

SEQ ID NO: 4734953 - DNA, 25 bp, Homo sapien
tgctctctgcactcttggaaaagga

SEQ ID NO: 4734954 - DNA, 25 bp, Homo sapien
gacagagtactgactctcacaactt

SEQ ID NO: 4734955 - DNA, 25 bp, Homo sapien
tctgatggatgaaagtaagacatcg

SEQ ID NO: 4734956 - DNA, 25 bp, Homo sapien
tgggttgacagagtactgactctca

SEQ ID NO: 4734957 - DNA, 25 bp, Homo sapien
agacatcgtggccagctctgggttg

SEQ ID NO: 4734958 - DNA, 25 bp, Homo sapien
tacagtgtagcactacagaatgcca

SEQ ID NO: 4734959 - DNA, 25 bp, Homo sapien
catcaacgagattcccagcattatt

SEQ ID NO: 4734960 - DNA, 25 bp, Homo sapien
tcagtttgtacagtgtagcactaca

SEQ ID NO: 4734961 - DNA, 25 bp, Homo sapien
ggtcatcaacgagattcccagcatt

SEQ ID NO: 4734962 - DNA, 25 bp, Homo sapien
tctccctgtgtagcattcacatcag

SEQ ID NO: 4734963 - DNA, 25 bp, Homo sapien
ccctgtgtagcattcacatcagact

SEQ ID NO: 4734964 - DNA, 25 bp, Homo sapien
tggctgattttctccctgtgtagca

SEQ ID NO: 4734965 - DNA, 25 bp, Homo sapien
tgattttctccctgtgtagcattca

SEQ ID NO: 4734966 - DNA, 25 bp, Homo sapien
ctggaattgggtgaaataattgatc

SEQ ID NO: 4734967 - DNA, 25 bp, Homo sapien
taattgatctttatcatccatgacc

SEQ ID NO: 4734968 - DNA, 25 bp, Homo sapien
attgatctttatcatccatgaccac

SEQ ID NO: 4734969 - DNA, 25 bp, Homo sapien
aataattgatctttatcatccatga

SEQ ID NO: 4734970 - DNA, 25 bp, Homo sapien
tatgagacacacttttatgcatgca

SEQ ID NO: 4734971 - DNA, 25 bp, Homo sapien
caaaaaacgtggcattaagtgggct

SEQ ID NO: 4734972 - DNA, 25 bp, Homo sapien
ttttcaaagctctgccaatgtccat

SEQ ID NO: 4734973 - DNA, 25 bp, Homo sapien
tgagtaggtgatacagaatgcaaac

SEQ ID NO: 4734974 - DNA, 25 bp, Homo sapien
tgtccaaaatgcaggcacgtttggg

SEQ ID NO: 4734975 - DNA, 25 bp, Homo sapien
agctaacattgtccaaaatgcaggc

SEQ ID NO: 4734976 - DNA, 25 bp, Homo sapien
taacattgtccaaaatgcaggcacg

SEQ ID NO: 4734977 - DNA, 25 bp, Homo sapien
ctttagctaacattgtccaaaatgc

SEQ ID NO: 4734978 - DNA, 25 bp, Homo sapien
taaatatatactaatttgtaagtac

SEQ ID NO: 4734979 - DNA, 25 bp, Homo sapien
tatatactaatttgtaagtacgtat

SEQ ID NO: 4734980 - DNA, 25 bp, Homo sapien
tacattcgacatatatttataaata

SEQ ID NO: 4734981 - DNA, 25 bp, Homo sapien
aatatatactaatttgtaagtacgt

SEQ ID NO: 4734982 - DNA, 25 bp, Homo sapien
gaagactgactgttagacattcacc

SEQ ID NO: 4734983 - DNA, 25 bp, Homo sapien
gctatggctttatgtaatgctcaga

SEQ ID NO: 4734984 - DNA, 25 bp, Homo sapien
taaattctttaagcatgctatggct

SEQ ID NO: 4734985 - DNA, 25 bp, Homo sapien
tattctccaggtatgaatacagtgt

SEQ ID NO: 4734986 - DNA, 25 bp, Homo sapien
tgagagggttcgctagtagttgttt

SEQ ID NO: 4734987 - DNA, 25 bp, Homo sapien
gagagggttcgctagtagttgtttc

SEQ ID NO: 4734988 - DNA, 25 bp, Homo sapien
atgagagggttcgctagtagttgtt

SEQ ID NO: 4734989 - DNA, 25 bp, Homo sapien
agagggttcgctagtagttgtttct

SEQ ID NO: 4734990 - DNA, 25 bp, Homo sapien
gataattggctccagatggttccct

SEQ ID NO: 4734991 - DNA, 25 bp, Homo sapien
tgcacaggcggtgaaatgatcctct

SEQ ID NO: 4734992 - DNA, 25 bp, Homo sapien
tcagtgtaacgacgcaagaaaggga

SEQ ID NO: 4734993 - DNA, 25 bp, Homo sapien
cctctagaggaatgtcactaaggga

SEQ ID NO: 4734994 - DNA, 25 bp, Homo sapien
agcaaaattcaggtcagttgtggct

SEQ ID NO: 4734995 - DNA, 25 bp, Homo sapien
tcaggtcagttgtggctctcacaga

SEQ ID NO: 4734996 - DNA, 25 bp, Homo sapien
gagcaaaattcaggtcagttgtggc

SEQ ID NO: 4734997 - DNA, 25 bp, Homo sapien
aattcaggtcagttgtggctctcac

SEQ ID NO: 4734998 - DNA, 25 bp, Homo sapien
tcagcaactagctaagtcacttttt

SEQ ID NO: 4734999 - DNA, 25 bp, Homo sapien
gcgaaagtcttcagcaactagctaa

SEQ ID NO: 4735000 - DNA, 25 bp, Homo sapien
caaaagcgaaagtcttcagcaacta

SEQ ID NO: 4735001 - DNA, 25 bp, Homo sapien
tcttcagcaactagctaagtcactt

SEQ ID NO: 4735002 - DNA, 25 bp, Homo sapien
caggagcataattgggagtatgatc

SEQ ID NO: 4735003 - DNA, 25 bp, Homo sapien
taattgggagtatgatcttcattct

SEQ ID NO: 4735004 - DNA, 25 bp, Homo sapien
cattagcaggagcataattgggagt

SEQ ID NO: 4735005 - DNA, 25 bp, Homo sapien
ttttctcattagcaggagcataatt

SEQ ID NO: 4735006 - DNA, 25 bp, Homo sapien
caatagtaggcttcaaagtgctact

SEQ ID NO: 4735007 - DNA, 25 bp, Homo sapien
cttcaatagtaggcttcaaagtgct

SEQ ID NO: 4735008 - DNA, 25 bp, Homo sapien
tagtaggcttcaaagtgctactttt

SEQ ID NO: 4735009 - DNA, 25 bp, Homo sapien
gtaggcttcaaagtgctacttttta

SEQ ID NO: 4735010 - DNA, 25 bp, Homo sapien
taatctagtgcgtctacccagagcc

SEQ ID NO: 4735011 - DNA, 25 bp, Homo sapien
cagtaatctagtgcgtctacccaga

SEQ ID NO: 4735012 - DNA, 25 bp, Homo sapien
atctagtgcgtctacccagagcctc

SEQ ID NO: 4735013 - DNA, 25 bp, Homo sapien
atccagtaatctagtgcgtctaccc

SEQ ID NO: 4735014 - DNA, 25 bp, Homo sapien
ctctgccggtatggtaactcttttt

SEQ ID NO: 4735015 - DNA, 25 bp, Homo sapien
tctgccggtatggtaactcttttta

SEQ ID NO: 4735016 - DNA, 25 bp, Homo sapien
gctggtctattagcatgaagagccc

SEQ ID NO: 4735017 - DNA, 25 bp, Homo sapien
tgaagagccctaaatgaccaggcag

SEQ ID NO: 4735018 - DNA, 25 bp, Homo sapien
gggcttccacactcacgaaacataa

SEQ ID NO: 4735019 - DNA, 25 bp, Homo sapien
gaccaggcagcattaacagctttag

SEQ ID NO: 4735020 - DNA, 25 bp, Homo sapien
cacataagggccagtagataaagtg

SEQ ID NO: 4735021 - DNA, 25 bp, Homo sapien
taaagtgtagtccctaatgctgaag

SEQ ID NO: 4735022 - DNA, 25 bp, Homo sapien
cataagggccagtagataaagtgta

SEQ ID NO: 4735023 - DNA, 25 bp, Homo sapien
gtgtagtccctaatgctgaagttgg

SEQ ID NO: 4735024 - DNA, 25 bp, Homo sapien
tgcctgagggcagcttttttaatct

SEQ ID NO: 4735025 - DNA, 25 bp, Homo sapien
gcctgagggcagcttttttaatctc

SEQ ID NO: 4735026 - DNA, 25 bp, Homo sapien
ttgcatgtcagatgggtcttccgaa

SEQ ID NO: 4735027 - DNA, 25 bp, Homo sapien
tttgcatgtcagatgggtcttccga

SEQ ID NO: 4735028 - DNA, 25 bp, Homo sapien
ctttgcatgtcagatgggtcttccg

SEQ ID NO: 4735029 - DNA, 25 bp, Homo sapien
gaatgtacgtatgcacagcctcaca

SEQ ID NO: 4735030 - DNA, 25 bp, Homo sapien
caacaagactccgtagaggatgcca

SEQ ID NO: 4735031 - DNA, 25 bp, Homo sapien
tccatgcccgaagaactgtgagagg

SEQ ID NO: 4735032 - DNA, 25 bp, Homo sapien
cacagcaacatggtgaggtagcagc

SEQ ID NO: 4735033 - DNA, 25 bp, Homo sapien
ccagtaaagcttaggcggcaggtca

SEQ ID NO: 4735034 - DNA, 25 bp, Homo sapien
tcatttcagccagggtggtccacct

SEQ ID NO: 4735035 - DNA, 25 bp, Homo sapien
gggaaatgctatggacgcctcggca

SEQ ID NO: 4735036 - DNA, 25 bp, Homo sapien
cagccgtctgggtgttaaatctaca

SEQ ID NO: 4735037 - DNA, 25 bp, Homo sapien
caggaggaaacagctttcctttctt

SEQ ID NO: 4735038 - DNA, 25 bp, Homo sapien
ttcttccaaagggtgaggtggagca

SEQ ID NO: 4735039 - DNA, 25 bp, Homo sapien
ctttcttccaaagggtgaggtggag

SEQ ID NO: 4735040 - DNA, 25 bp, Homo sapien
cagctttcctttcttccaaagggtg

SEQ ID NO: 4735041 - DNA, 25 bp, Homo sapien
tagtgacacatcctgctcgtcattt

SEQ ID NO: 4735042 - DNA, 25 bp, Homo sapien
gacacatcctgctcgtcatttcttt

SEQ ID NO: 4735043 - DNA, 25 bp, Homo sapien
gtgacacatcctgctcgtcatttct

SEQ ID NO: 4735044 - DNA, 25 bp, Homo sapien
ttagtgacacatcctgctcgtcatt

SEQ ID NO: 4735045 - DNA, 25 bp, Homo sapien
ggagcttctgaacaactggagttga

SEQ ID NO: 4735046 - DNA, 25 bp, Homo sapien
tttatagatcccgaatagccatcct

SEQ ID NO: 4735047 - DNA, 25 bp, Homo sapien
ccagcaggagccatgtagcacttat

SEQ ID NO: 4735048 - DNA, 25 bp, Homo sapien
aaagtgtctgacatgcgtcacctgc

SEQ ID NO: 4735049 - DNA, 25 bp, Homo sapien
gggctccgcacaggttgagtcccat

SEQ ID NO: 4735050 - DNA, 25 bp, Homo sapien
catcctgcgcctgcccctcttcatt

SEQ ID NO: 4735051 - DNA, 25 bp, Homo sapien
gtcccatgcctatggtccgctgcta

SEQ ID NO: 4735052 - DNA, 25 bp, Homo sapien
tatggtccgctgctaccacatcctg

SEQ ID NO: 4735053 - DNA, 25 bp, Homo sapien
ctgactgcagctactacatctcttg

SEQ ID NO: 4735054 - DNA, 25 bp, Homo sapien
gctactacatctcttgcatactgac

SEQ ID NO: 4735055 - DNA, 25 bp, Homo sapien
gactgcagctactacatctcttgca

SEQ ID NO: 4735056 - DNA, 25 bp, Homo sapien
tgcagagctgactgcagctactaca

SEQ ID NO: 4735057 - DNA, 25 bp, Homo sapien
taggaaacatcgagaaaaaggagac

SEQ ID NO: 4735058 - DNA, 25 bp, Homo sapien
ggactgccacaccttatataatagg

SEQ ID NO: 4735059 - DNA, 25 bp, Homo sapien
gcgttctattcgaaaaccatacaga

SEQ ID NO: 4735060 - DNA, 25 bp, Homo sapien
aaggagactgagtgtgggagtgcca

SEQ ID NO: 4735061 - DNA, 25 bp, Homo sapien
cataggctgctgttatagctgggag

SEQ ID NO: 4735062 - DNA, 25 bp, Homo sapien
tctaggaattatgaaacaagcgcca

SEQ ID NO: 4735063 - DNA, 25 bp, Homo sapien
taatttcggagatgtggcaactcag

SEQ ID NO: 4735064 - DNA, 25 bp, Homo sapien
tcagaccatcggaaagtaagtgact

SEQ ID NO: 4735065 - DNA, 25 bp, Homo sapien
ttctcagctataccgtgtgggccca

SEQ ID NO: 4735066 - DNA, 25 bp, Homo sapien
tacctggaaaagtggcttgaactgc

SEQ ID NO: 4735067 - DNA, 25 bp, Homo sapien
tcagcaagggattcgggttctcagc

SEQ ID NO: 4735068 - DNA, 25 bp, Homo sapien
ttatagcaaaagcaagtccctctgg

SEQ ID NO: 4735069 - DNA, 25 bp, Homo sapien
aggttaagtacctcggccatggcca

SEQ ID NO: 4735070 - DNA, 25 bp, Homo sapien
tgaatgaagccgtgccaggtcacaa

SEQ ID NO: 4735071 - DNA, 25 bp, Homo sapien
caaagtgtcttgtgttccgaatgga

SEQ ID NO: 4735072 - DNA, 25 bp, Homo sapien
taccctggccaaggttgaaacttga

SEQ ID NO: 4735073 - DNA, 25 bp, Homo sapien
caaagcgacactgagatctctgaca

SEQ ID NO: 4735074 - DNA, 25 bp, Homo sapien
catttgtcagcgcagctggattggt

SEQ ID NO: 4735075 - DNA, 25 bp, Homo sapien
tgtgatcaaaggagcctgtgatttc

SEQ ID NO: 4735076 - DNA, 25 bp, Homo sapien
gtctgcacagttggcaggagtctgc

SEQ ID NO: 4735077 - DNA, 25 bp, Homo sapien
agcaaagggtgactgagtgcaccca

SEQ ID NO: 4735078 - DNA, 25 bp, Homo sapien
aagggtgactgagtgcacccacccg

SEQ ID NO: 4735079 - DNA, 25 bp, Homo sapien
ctgggatgagcaaagggtgactgag

SEQ ID NO: 4735080 - DNA, 25 bp, Homo sapien
caaagggtgactgagtgcacccacc

SEQ ID NO: 4735081 - DNA, 25 bp, Homo sapien
gatgacactggtcgtgtcaagtgaa

SEQ ID NO: 4735082 - DNA, 25 bp, Homo sapien
cactggtcgtgtcaagtgaagccaa

SEQ ID NO: 4735083 - DNA, 25 bp, Homo sapien
ggcgatgacactggtcgtgtcaagt

SEQ ID NO: 4735084 - DNA, 25 bp, Homo sapien
tcgtgtcaagtgaagccaatgacaa

SEQ ID NO: 4735085 - DNA, 25 bp, Homo sapien
ttgtctctgagaagcggacaattag

SEQ ID NO: 4735086 - DNA, 25 bp, Homo sapien
gatgagcaggacttaagctgaggac

SEQ ID NO: 4735087 - DNA, 25 bp, Homo sapien
aattaggcctagacttgcaggatga

SEQ ID NO: 4735088 - DNA, 25 bp, Homo sapien
cgtttcaaatgaaaggtgtttgtct

SEQ ID NO: 4735089 - DNA, 25 bp, Homo sapien
tggcaggcttatatatgggcatcaa

SEQ ID NO: 4735090 - DNA, 25 bp, Homo sapien
tttggcaggcttatatatgggcatc

SEQ ID NO: 4735091 - DNA, 25 bp, Homo sapien
ttggcaggcttatatatgggcatca

SEQ ID NO: 4735092 - DNA, 25 bp, Homo sapien
atttggcaggcttatatatgggcat

SEQ ID NO: 4735093 - DNA, 25 bp, Homo sapien
tgctcatgaagacgaattaatccct

SEQ ID NO: 4735094 - DNA, 25 bp, Homo sapien
acgaattaatccctgctgtgactga

SEQ ID NO: 4735095 - DNA, 25 bp, Homo sapien
gtaaatgctcatgaagacgaattaa

SEQ ID NO: 4735096 - DNA, 25 bp, Homo sapien
gaagacgaattaatccctgctgtga

SEQ ID NO: 4735097 - DNA, 25 bp, Homo sapien
cagctcccctaagatactgagcagc

SEQ ID NO: 4735098 - DNA, 25 bp, Homo sapien
caacagctcccctaagatactgagc

SEQ ID NO: 4735099 - DNA, 25 bp, Homo sapien
acagctcccctaagatactgagcag

SEQ ID NO: 4735100 - DNA, 25 bp, Homo sapien
gctcccctaagatactgagcagctt

SEQ ID NO: 4735101 - DNA, 25 bp, Homo sapien
ttgaggagctctcttggcaaacact

SEQ ID NO: 4735102 - DNA, 25 bp, Homo sapien
ctctcttggcaaacactgatcttca

SEQ ID NO: 4735103 - DNA, 25 bp, Homo sapien
gagctctcttggcaaacactgatct

SEQ ID NO: 4735104 - DNA, 25 bp, Homo sapien
ggcattttgaggagctctcttggca

SEQ ID NO: 4735105 - DNA, 25 bp, Homo sapien
gatgaagcattagtcccaacatgga

SEQ ID NO: 4735106 - DNA, 25 bp, Homo sapien
tgaggcctcgtctttctctgtgaga

SEQ ID NO: 4735107 - DNA, 25 bp, Homo sapien
tggtcttcaccaggctagccagggt

SEQ ID NO: 4735108 - DNA, 25 bp, Homo sapien
tcagaggcctgatagggtgaccaac

SEQ ID NO: 4735109 - DNA, 25 bp, Homo sapien
caatgacccggtcgaagtggtggat

SEQ ID NO: 4735110 - DNA, 25 bp, Homo sapien
caaaggctctagctccttgcggtct

SEQ ID NO: 4735111 - DNA, 25 bp, Homo sapien
aaaaggcggcacaggatcttcttgc

SEQ ID NO: 4735112 - DNA, 25 bp, Homo sapien
gtggatatagacgtggacaaagacc

SEQ ID NO: 4735113 - DNA, 25 bp, Homo sapien
gaacatgtctggcaggcggcagtga

SEQ ID NO: 4735114 - DNA, 25 bp, Homo sapien
aggaacatgtctggcaggcggcagt

SEQ ID NO: 4735115 - DNA, 25 bp, Homo sapien
aaggaacatgtctggcaggcggcag

SEQ ID NO: 4735116 - DNA, 25 bp, Homo sapien
acatgtctggcaggcggcagtgaca

SEQ ID NO: 4735117 - DNA, 25 bp, Homo sapien
gggacacagggactttcagctgtgc

SEQ ID NO: 4735118 - DNA, 25 bp, Homo sapien
acacagggactttcagctgtgccag

SEQ ID NO: 4735119 - DNA, 25 bp, Homo sapien
tggcccttatagccagcccccctac

SEQ ID NO: 4735120 - DNA, 25 bp, Homo sapien
agtttatctgtgtggcccttatagc

SEQ ID NO: 4735121 - DNA, 25 bp, Homo sapien
gactgtctccaagcggctctgttcc

SEQ ID NO: 4735122 - DNA, 25 bp, Homo sapien
tacagataaggcaaagttttggaca

SEQ ID NO: 4735123 - DNA, 25 bp, Homo sapien
cactgcggatgctcatggcaattgc

SEQ ID NO: 4735124 - DNA, 25 bp, Homo sapien
tggccccttttagactgtctccaag

SEQ ID NO: 4735125 - DNA, 25 bp, Homo sapien
gttcctcaagaaagtgtctgttcgt

SEQ ID NO: 4735126 - DNA, 25 bp, Homo sapien
tctgttcgtcatgccaaggaaaaca

SEQ ID NO: 4735127 - DNA, 25 bp, Homo sapien
aatcctgtgtagcaggactttgttc

SEQ ID NO: 4735128 - DNA, 25 bp, Homo sapien
ggaaaacaatcctgtgtagcaggac

SEQ ID NO: 4735129 - DNA, 25 bp, Homo sapien
agaagacctggcacaactggactga

SEQ ID NO: 4735130 - DNA, 25 bp, Homo sapien
gaatcccagggagcatgaacagaca

SEQ ID NO: 4735131 - DNA, 25 bp, Homo sapien
aaaggcattagcacccattgggacc

SEQ ID NO: 4735132 - DNA, 25 bp, Homo sapien
gttggtacccgttgcacacactgag

SEQ ID NO: 4735133 - DNA, 25 bp, Homo sapien
gcaaaagccagggtttagtcccaga

SEQ ID NO: 4735134 - DNA, 25 bp, Homo sapien
gggccacaaagctaacaagtgctag

SEQ ID NO: 4735135 - DNA, 25 bp, Homo sapien
gcaaaccacttatccagggccacaa

SEQ ID NO: 4735136 - DNA, 25 bp, Homo sapien
aaggtcttatcacacagggaggcta

SEQ ID NO: 4735137 - DNA, 25 bp, Homo sapien
gcaaatgtttgtgttggcttctccg

SEQ ID NO: 4735138 - DNA, 25 bp, Homo sapien
tggcttctccgtgaactctggaaat

SEQ ID NO: 4735139 - DNA, 25 bp, Homo sapien
tgtgttggcttctccgtgaactctg

SEQ ID NO: 4735140 - DNA, 25 bp, Homo sapien
gttgccacagtaatgcaaatgtttg

SEQ ID NO: 4735141 - DNA, 25 bp, Homo sapien
ctggattaacgtttcggatggattg

SEQ ID NO: 4735142 - DNA, 25 bp, Homo sapien
taacgtttcggatggattgaaagtc

SEQ ID NO: 4735143 - DNA, 25 bp, Homo sapien
ggattaacgtttcggatggattgaa

SEQ ID NO: 4735144 - DNA, 25 bp, Homo sapien
attaacgtttcggatggattgaaag

SEQ ID NO: 4735145 - DNA, 25 bp, Homo sapien
acgtgactgtctcaagtcagtgtcc

SEQ ID NO: 4735146 - DNA, 25 bp, Homo sapien
tctggatcttagtgcaaaagtcctg

SEQ ID NO: 4735147 - DNA, 25 bp, Homo sapien
tggatcttagtgcaaaagtcctgaa

SEQ ID NO: 4735148 - DNA, 25 bp, Homo sapien
ttgggtgacatacaagtcacgtgac

SEQ ID NO: 4735149 - DNA, 25 bp, Homo sapien
ggctgtggcagtcttctgatctgct

SEQ ID NO: 4735150 - DNA, 25 bp, Homo sapien
agtcttctgatctgctaacatccaa

SEQ ID NO: 4735151 - DNA, 25 bp, Homo sapien
tctgatctgctaacatccaaggtac

SEQ ID NO: 4735152 - DNA, 25 bp, Homo sapien
gcagtcttctgatctgctaacatcc

SEQ ID NO: 4735153 - DNA, 25 bp, Homo sapien
ttttaaaattgagttgtttgagctc

SEQ ID NO: 4735154 - DNA, 25 bp, Homo sapien
catattggctagtctggtcttgaaa

SEQ ID NO: 4735155 - DNA, 25 bp, Homo sapien
caccacgcccaacctgtccattttt

SEQ ID NO: 4735156 - DNA, 25 bp, Homo sapien
tattggctagtctggtcttgaaatc

SEQ ID NO: 4735157 - DNA, 25 bp, Homo sapien
tacaatagctacaatgcaatccctg

SEQ ID NO: 4735158 - DNA, 25 bp, Homo sapien
atgtatacagaaccacaaaacctgg

SEQ ID NO: 4735159 - DNA, 25 bp, Homo sapien
aaacctggaatagccgaagcaatcc

SEQ ID NO: 4735160 - DNA, 25 bp, Homo sapien
cctgtcataacaccagtaatgttct

SEQ ID NO: 4735161 - DNA, 25 bp, Homo sapien
tcacaggcctttctatctccagaga

SEQ ID NO: 4735162 - DNA, 25 bp, Homo sapien
catcaatggctcactgatgccccag

SEQ ID NO: 4735163 - DNA, 25 bp, Homo sapien
ccactgagcccgatgcttgggacat

SEQ ID NO: 4735164 - DNA, 25 bp, Homo sapien
tgagacctggtcctacctgccctag

SEQ ID NO: 4735165 - DNA, 25 bp, Homo sapien
tggtggtcttcaggctggacacata

SEQ ID NO: 4735166 - DNA, 25 bp, Homo sapien
gaccactccagggttaatgctttga

SEQ ID NO: 4735167 - DNA, 25 bp, Homo sapien
aaatctttccttgtaagagctcagt

SEQ ID NO: 4735168 - DNA, 25 bp, Homo sapien
tatccccagaatggtcaccacacag

SEQ ID NO: 4735169 - DNA, 25 bp, Homo sapien
gaaaatgaaggcgactccagcctgc

SEQ ID NO: 4735170 - DNA, 25 bp, Homo sapien
tatcccatggcagctctacctgtga

SEQ ID NO: 4735171 - DNA, 25 bp, Homo sapien
gttgataggaacatggaccacgctg

SEQ ID NO: 4735172 - DNA, 25 bp, Homo sapien
ttgctttagccatctacaggaccag

SEQ ID NO: 4735173 - DNA, 25 bp, Homo sapien
tgggtgctcctttcaaaccacgcag

SEQ ID NO: 4735174 - DNA, 25 bp, Homo sapien
ggcacacagccctagagtgagttaa

SEQ ID NO: 4735175 - DNA, 25 bp, Homo sapien
taggcaaagaattgaggcacacagc

SEQ ID NO: 4735176 - DNA, 25 bp, Homo sapien
cacgcagttctctacaaagcagcca

SEQ ID NO: 4735177 - DNA, 25 bp, Homo sapien
gagtgactggtttgaagagagatgt

SEQ ID NO: 4735178 - DNA, 25 bp, Homo sapien
tgtggctaacgtcaaacattctttc

SEQ ID NO: 4735179 - DNA, 25 bp, Homo sapien
cgtcaaacattctttcagagtgact

SEQ ID NO: 4735180 - DNA, 25 bp, Homo sapien
taacgtcaaacattctttcagagtg

SEQ ID NO: 4735181 - DNA, 25 bp, Homo sapien
cacagggttattgccatttgagata

SEQ ID NO: 4735182 - DNA, 25 bp, Homo sapien
gcatctctgccaggtttgcacaccg

SEQ ID NO: 4735183 - DNA, 25 bp, Homo sapien
cagcacatggtaggttttccgcaag

SEQ ID NO: 4735184 - DNA, 25 bp, Homo sapien
cgttagtatttgagaggatcctgga

SEQ ID NO: 4735185 - DNA, 25 bp, Homo sapien
gccagtttgttataaaggctacaat

SEQ ID NO: 4735186 - DNA, 25 bp, Homo sapien
gtctccttgccagtttgttataaag

SEQ ID NO: 4735187 - DNA, 25 bp, Homo sapien
tataaaggctacaatacttcatgtg

SEQ ID NO: 4735188 - DNA, 25 bp, Homo sapien
gttataaaggctacaatacttcatg

SEQ ID NO: 4735189 - DNA, 25 bp, Homo sapien
tgagctccagttttggtcatatttg

SEQ ID NO: 4735190 - DNA, 25 bp, Homo sapien
catatttgttaaaggacattcctca

SEQ ID NO: 4735191 - DNA, 25 bp, Homo sapien
ctggatagcaccgttgggaggacaa

SEQ ID NO: 4735192 - DNA, 25 bp, Homo sapien
ggacaaggagctgcaagagatgaaa

SEQ ID NO: 4735193 - DNA, 25 bp, Homo sapien
acttctgggagcctcaacggtttat

SEQ ID NO: 4735194 - DNA, 25 bp, Homo sapien
ggtttattgatatgtgtagcttcta

SEQ ID NO: 4735195 - DNA, 25 bp, Homo sapien
caacggtttattgatatgtgtagct

SEQ ID NO: 4735196 - DNA, 25 bp, Homo sapien
ggagcctcaacggtttattgatatg

SEQ ID NO: 4735197 - DNA, 25 bp, Homo sapien
tctttttagtttcagcagaccatga

SEQ ID NO: 4735198 - DNA, 25 bp, Homo sapien
tgagaaagtagcaaagccatgactt

SEQ ID NO: 4735199 - DNA, 25 bp, Homo sapien
catccatgcaggatttcttctgcag

SEQ ID NO: 4735200 - DNA, 25 bp, Homo sapien
gcagaccatgagtcaaattccaagt

SEQ ID NO: 4735201 - DNA, 25 bp, Homo sapien
gtaaataccataaagcagcggtcct

SEQ ID NO: 4735202 - DNA, 25 bp, Homo sapien
catcagtactggtgggtaaatacca

SEQ ID NO: 4735203 - DNA, 25 bp, Homo sapien
tgataaggagaccacataactgtga

SEQ ID NO: 4735204 - DNA, 25 bp, Homo sapien
tggtgctcccaaaaactctgtgata

SEQ ID NO: 4735205 - DNA, 25 bp, Homo sapien
tactgccctgcgtgacacaactgaa

SEQ ID NO: 4735206 - DNA, 25 bp, Homo sapien
caccaagctcaacagtcaggaacgt

SEQ ID NO: 4735207 - DNA, 25 bp, Homo sapien
tccctcatgcaagcctaaggtggca

SEQ ID NO: 4735208 - DNA, 25 bp, Homo sapien
ggcagaatttgctcgccccagacaa

SEQ ID NO: 4735209 - DNA, 25 bp, Homo sapien
aatgaacacctgactcttggctgca

SEQ ID NO: 4735210 - DNA, 25 bp, Homo sapien
gagcctcccattgccggcggattgt

SEQ ID NO: 4735211 - DNA, 25 bp, Homo sapien
gctgcaccagagactaagcaggagc

SEQ ID NO: 4735212 - DNA, 25 bp, Homo sapien
cattagggtaatcttcagctgcacc

SEQ ID NO: 4735213 - DNA, 25 bp, Homo sapien
tactctctatctagaggcaaggcag

SEQ ID NO: 4735214 - DNA, 25 bp, Homo sapien
taaagcttgacacttagacagcctg

SEQ ID NO: 4735215 - DNA, 25 bp, Homo sapien
cagaaagaagccctctggtgtcagg

SEQ ID NO: 4735216 - DNA, 25 bp, Homo sapien
ggccctgctgatacaccccttaaag

SEQ ID NO: 4735217 - DNA, 25 bp, Homo sapien
ccacagtacaggcttcgttgactaa

SEQ ID NO: 4735218 - DNA, 25 bp, Homo sapien
ttcgttgactaaggaaggatgccat

SEQ ID NO: 4735219 - DNA, 25 bp, Homo sapien
gcttcgttgactaaggaaggatgcc

SEQ ID NO: 4735220 - DNA, 25 bp, Homo sapien
tacaggcttcgttgactaaggaagg

SEQ ID NO: 4735221 - DNA, 25 bp, Homo sapien
aatgacaaatgacgaatggaataaa

SEQ ID NO: 4735222 - DNA, 25 bp, Homo sapien
atgacgaatggaataaaagcagcag

SEQ ID NO: 4735223 - DNA, 25 bp, Homo sapien
atccccaccctattatggcctttgt

SEQ ID NO: 4735224 - DNA, 25 bp, Homo sapien
cccaccctattatggcctttgtttg

SEQ ID NO: 4735225 - DNA, 25 bp, Homo sapien
gcatactgaatgactaagaaaatgt

SEQ ID NO: 4735226 - DNA, 25 bp, Homo sapien
ctaagcatactgaatgactaagaaa

SEQ ID NO: 4735227 - DNA, 25 bp, Homo sapien
agcatactgaatgactaagaaaatg

SEQ ID NO: 4735228 - DNA, 25 bp, Homo sapien
taagcatactgaatgactaagaaaa

SEQ ID NO: 4735229 - DNA, 25 bp, Homo sapien
gcatgggtgctacctagcattcaaa

SEQ ID NO: 4735230 - DNA, 25 bp, Homo sapien
tttcatagtgaagattgtgcaggtg

SEQ ID NO: 4735231 - DNA, 25 bp, Homo sapien
gatgggattaatgcatgggtgctac

SEQ ID NO: 4735232 - DNA, 25 bp, Homo sapien
catagtgaagattgtgcaggtgaca

SEQ ID NO: 4735233 - DNA, 25 bp, Homo sapien
aggacaggtccgctcggtgcagaac

SEQ ID NO: 4735234 - DNA, 25 bp, Homo sapien
tgcagctcaaacctctgtgtgccag

SEQ ID NO: 4735235 - DNA, 25 bp, Homo sapien
tccacacccgagttgagggatgcct

SEQ ID NO: 4735236 - DNA, 25 bp, Homo sapien
gaactcacagatggtgccatagatg

SEQ ID NO: 4735237 - DNA, 25 bp, Homo sapien
tgccagcactcaggccccagtctta

SEQ ID NO: 4735238 - DNA, 25 bp, Homo sapien
tgcaggaagcgaaaaggcacctgga

SEQ ID NO: 4735239 - DNA, 25 bp, Homo sapien
ttcttttgcaggaagcgaaaaggca

SEQ ID NO: 4735240 - DNA, 25 bp, Homo sapien
cacagcccaacagtgttttccactg

SEQ ID NO: 4735241 - DNA, 25 bp, Homo sapien
cttgaatgatttccaagggaacctc

SEQ ID NO: 4735242 - DNA, 25 bp, Homo sapien
tgtagcttttaagctcttctaaaca

SEQ ID NO: 4735243 - DNA, 25 bp, Homo sapien
gaatgatttccaagggaacctcatg

SEQ ID NO: 4735244 - DNA, 25 bp, Homo sapien
gcttttaagctcttctaaacagccc

SEQ ID NO: 4735245 - DNA, 25 bp, Homo sapien
gtccaagctgacagtacaggaagcc

SEQ ID NO: 4735246 - DNA, 25 bp, Homo sapien
gattctacattcatcaatacgtctt

SEQ ID NO: 4735247 - DNA, 25 bp, Homo sapien
gttaggtaagcctccagtggatttc

SEQ ID NO: 4735248 - DNA, 25 bp, Homo sapien
cccctgcggcgagggctcgctttat

SEQ ID NO: 4735249 - DNA, 25 bp, Homo sapien
ttttctcatctagcggagtaatctt

SEQ ID NO: 4735250 - DNA, 25 bp, Homo sapien
tcatctagcggagtaatcttgtgaa

SEQ ID NO: 4735251 - DNA, 25 bp, Homo sapien
tacacttggattctcatttctgcaa

SEQ ID NO: 4735252 - DNA, 25 bp, Homo sapien
gctttgaaaggccactacacttgga

SEQ ID NO: 4735253 - DNA, 25 bp, Homo sapien
tccaggtcatcataccctagaatag

SEQ ID NO: 4735254 - DNA, 25 bp, Homo sapien
atccaggtcatcataccctagaata

SEQ ID NO: 4735255 - DNA, 25 bp, Homo sapien
cactgaaacatgaatggaagcgaag

SEQ ID NO: 4735256 - DNA, 25 bp, Homo sapien
aacataaagcacatggagccccact

SEQ ID NO: 4735257 - DNA, 25 bp, Homo sapien
gcttatgctaaaacgccactgtgat

SEQ ID NO: 4735258 - DNA, 25 bp, Homo sapien
aaaatgctattgatccagtggaggg

SEQ ID NO: 4735259 - DNA, 25 bp, Homo sapien
tctggatggtctggatgtttgttcc

SEQ ID NO: 4735260 - DNA, 25 bp, Homo sapien
gggcttactggatacctgggcttat

SEQ ID NO: 4735261 - DNA, 25 bp, Homo sapien
ttactggatacctgggcttatctag

SEQ ID NO: 4735262 - DNA, 25 bp, Homo sapien
gttccaccaggtctgcttacaccaa

SEQ ID NO: 4735263 - DNA, 25 bp, Homo sapien
aaacggcaatgttaaaaggaatgct

SEQ ID NO: 4735264 - DNA, 25 bp, Homo sapien
aacggcaatgttaaaaggaatgctc

SEQ ID NO: 4735265 - DNA, 25 bp, Homo sapien
aatgctctgtgcctaaaagaatgga

SEQ ID NO: 4735266 - DNA, 25 bp, Homo sapien
aaaaggaatgctctgtgcctaaaag

SEQ ID NO: 4735267 - DNA, 25 bp, Homo sapien
caccacatggccgtttttaagtttg

SEQ ID NO: 4735268 - DNA, 25 bp, Homo sapien
ccctgtataaggaatgcaccacatg

SEQ ID NO: 4735269 - DNA, 25 bp, Homo sapien
caaaccctttccaagtgaagcattc

SEQ ID NO: 4735270 - DNA, 25 bp, Homo sapien
taaaagttgcttgaggttcctgaca

SEQ ID NO: 4735271 - DNA, 25 bp, Homo sapien
gctgctcgcccttcatgaatgaaat

SEQ ID NO: 4735272 - DNA, 25 bp, Homo sapien
ggtgacagagccactaaggagtgcc

SEQ ID NO: 4735273 - DNA, 25 bp, Homo sapien
gggtgagggcccataacgagcttat

SEQ ID NO: 4735274 - DNA, 25 bp, Homo sapien
ttaataggatgtgaagcgacgtagg

SEQ ID NO: 4735275 - DNA, 25 bp, Homo sapien
ccttctcttaacttggtcttgctca

SEQ ID NO: 4735276 - DNA, 25 bp, Homo sapien
gccttctcttaacttggtcttgctc

SEQ ID NO: 4735277 - DNA, 25 bp, Homo sapien
tgccttctcttaacttggtcttgct

SEQ ID NO: 4735278 - DNA, 25 bp, Homo sapien
cttctcttaacttggtcttgctcat

SEQ ID NO: 4735279 - DNA, 25 bp, Homo sapien
ggcatttgaagcagtggaaacagca

SEQ ID NO: 4735280 - DNA, 25 bp, Homo sapien
ccttcagtgagccaacaggtataga

SEQ ID NO: 4735281 - DNA, 25 bp, Homo sapien
gaggacctaccacgtatcaggcgaa

SEQ ID NO: 4735282 - DNA, 25 bp, Homo sapien
taaagttcaaaagagccaatgtgcc

SEQ ID NO: 4735283 - DNA, 25 bp, Homo sapien
agtggcatacacctacagtctcagc

SEQ ID NO: 4735284 - DNA, 25 bp, Homo sapien
acagtggcatacacctacagtctca

SEQ ID NO: 4735285 - DNA, 25 bp, Homo sapien
gcacagtggcatacacctacagtct

SEQ ID NO: 4735286 - DNA, 25 bp, Homo sapien
gggcacagtggcatacacctacagt

SEQ ID NO: 4735287 - DNA, 25 bp, Homo sapien
acgtgcaaagtatatgaagtgacac

SEQ ID NO: 4735288 - DNA, 25 bp, Homo sapien
tcatttcccgtagagccattttttc

SEQ ID NO: 4735289 - DNA, 25 bp, Homo sapien
tctgcctggaaactcatttcccgta

SEQ ID NO: 4735290 - DNA, 25 bp, Homo sapien
gacacattcttcaggtgtctcagct

SEQ ID NO: 4735291 - DNA, 25 bp, Homo sapien
tctctccaccaggatccaccaagtt

SEQ ID NO: 4735292 - DNA, 25 bp, Homo sapien
gaagtctactgcagagaccttggca

SEQ ID NO: 4735293 - DNA, 25 bp, Homo sapien
gggtcaggagatactccctgaagtc

SEQ ID NO: 4735294 - DNA, 25 bp, Homo sapien
tcacaggggcattagtgccttttcc

SEQ ID NO: 4735295 - DNA, 25 bp, Homo sapien
ggacacctaagttgccatctaccac

SEQ ID NO: 4735296 - DNA, 25 bp, Homo sapien
tctaccactctgttaattcccttaa

SEQ ID NO: 4735297 - DNA, 25 bp, Homo sapien
gaatcccaaggagaatgcaccagaa

SEQ ID NO: 4735298 - DNA, 25 bp, Homo sapien
tagtataggacattaaatggacacc

SEQ ID NO: 4735299 - DNA, 25 bp, Homo sapien
tgtgcacatgtaaagccagcataga

SEQ ID NO: 4735300 - DNA, 25 bp, Homo sapien
gcaatcaaatgtaactctgcaggag

SEQ ID NO: 4735301 - DNA, 25 bp, Homo sapien
gaagagtagcagaggaatggctctc

SEQ ID NO: 4735302 - DNA, 25 bp, Homo sapien
cacttgttacgggtatgtgcacatg

SEQ ID NO: 4735303 - DNA, 25 bp, Homo sapien
cacttagctaaatgggtgacttcct

SEQ ID NO: 4735304 - DNA, 25 bp, Homo sapien
tgctttaaccataatcagaggaagg

SEQ ID NO: 4735305 - DNA, 25 bp, Homo sapien
cacagtaacattggtccagctagga

SEQ ID NO: 4735306 - DNA, 25 bp, Homo sapien
gaaccaccaggcaagaagatataat

SEQ ID NO: 4735307 - DNA, 25 bp, Homo sapien
gaaatcactagagaaagtgctctat

SEQ ID NO: 4735308 - DNA, 25 bp, Homo sapien
gttgctgctgctaaatttcaaagga

SEQ ID NO: 4735309 - DNA, 25 bp, Homo sapien
cggggtaggccaagacaagaaatgc

SEQ ID NO: 4735310 - DNA, 25 bp, Homo sapien
caccgttgggaaggtaaagagatat

SEQ ID NO: 4735311 - DNA, 25 bp, Homo sapien
taagccacttgttctctgggacgtg

SEQ ID NO: 4735312 - DNA, 25 bp, Homo sapien
taacaggtgcacagtctcagtcagc

SEQ ID NO: 4735313 - DNA, 25 bp, Homo sapien
tcgcaaagggaaaactctcagagct

SEQ ID NO: 4735314 - DNA, 25 bp, Homo sapien
tcccctgggttgaggaggaatcaaa

SEQ ID NO: 4735315 - DNA, 25 bp, Homo sapien
cgttcattccggagtgaaccaccac

SEQ ID NO: 4735316 - DNA, 25 bp, Homo sapien
tctctttttggcgactagcctgccc

SEQ ID NO: 4735317 - DNA, 25 bp, Homo sapien
tttccaggcaacgtcataaggcttc

SEQ ID NO: 4735318 - DNA, 25 bp, Homo sapien
aacttggagcggtactcaaagccag

SEQ ID NO: 4735319 - DNA, 25 bp, Homo sapien
gaaatcctctggaaccaaccactgg

SEQ ID NO: 4735320 - DNA, 25 bp, Homo sapien
aagcagcaccttctcggatttgagc

SEQ ID NO: 4735321 - DNA, 25 bp, Homo sapien
gaacgcgcttccactgtctcgaaag

SEQ ID NO: 4735322 - DNA, 25 bp, Homo sapien
ggatttgagcctttgcggcgcgcct

SEQ ID NO: 4735323 - DNA, 25 bp, Homo sapien
ggcagcagcggaggcggggaaggaa

SEQ ID NO: 4735324 - DNA, 25 bp, Homo sapien
ctgggccacaggcagcagcggaggc

SEQ ID NO: 4735325 - DNA, 25 bp, Homo sapien
gccacaggcagcagcggaggcgggg

SEQ ID NO: 4735326 - DNA, 25 bp, Homo sapien
cagcggaggcggggaaggaacaact

SEQ ID NO: 4735327 - DNA, 25 bp, Homo sapien
tctcagtcggctgcgtagagagatc

SEQ ID NO: 4735328 - DNA, 25 bp, Homo sapien
cccgccagatgttggaaaggcaaac

SEQ ID NO: 4735329 - DNA, 25 bp, Homo sapien
gaaacaaaaggccattcgccacgat

SEQ ID NO: 4735330 - DNA, 25 bp, Homo sapien
caagccccgccagatgttggaaagg

SEQ ID NO: 4735331 - DNA, 25 bp, Homo sapien
ttgcaccccgaaagaaggacgatct

SEQ ID NO: 4735332 - DNA, 25 bp, Homo sapien
taagcgcgatttgtacggcctttac

SEQ ID NO: 4735333 - DNA, 25 bp, Homo sapien
tgttggccccaaagttaagcgcgat

SEQ ID NO: 4735334 - DNA, 25 bp, Homo sapien
cagcccaggcgcacttttgtaaaag

SEQ ID NO: 4735335 - DNA, 25 bp, Homo sapien
tgcagccagcgcgaaagaaaatggt

SEQ ID NO: 4735336 - DNA, 25 bp, Homo sapien
acgcaagggactctgccgccggtgc

SEQ ID NO: 4735337 - DNA, 25 bp, Homo sapien
ggcgtcgcttgccaatccacgcaag

SEQ ID NO: 4735338 - DNA, 25 bp, Homo sapien
gtcggctcccttcgccgggtcagct

SEQ ID NO: 4735339 - DNA, 25 bp, Homo sapien
agccgccgtcgctccggagcagccc

SEQ ID NO: 4735340 - DNA, 25 bp, Homo sapien
ccctcatgcacccagcgcgccgcgc

SEQ ID NO: 4735341 - DNA, 25 bp, Homo sapien
cggagcagccccctcatgcacccag

SEQ ID NO: 4735342 - DNA, 25 bp, Homo sapien
cagctgcagccgccgtcgctccgga

SEQ ID NO: 4735343 - DNA, 25 bp, Homo sapien
tcttccctccggaaagagatgggac

SEQ ID NO: 4735344 - DNA, 25 bp, Homo sapien
gagatgggacatgaccagtctaagg

SEQ ID NO: 4735345 - DNA, 25 bp, Homo sapien
aaaagtcgtctttgggatcatcttc

SEQ ID NO: 4735346 - DNA, 25 bp, Homo sapien
cagcaccgtggagagaaaagtcgtc

SEQ ID NO: 4735347 - DNA, 25 bp, Homo sapien
taaagcctcagtattctcctccgta

SEQ ID NO: 4735348 - DNA, 25 bp, Homo sapien
cagagcggagcataaatcattggaa

SEQ ID NO: 4735349 - DNA, 25 bp, Homo sapien
gatttactagaacacactgggagtc

SEQ ID NO: 4735350 - DNA, 25 bp, Homo sapien
catgaactgcctgacacagagcgga

SEQ ID NO: 4735351 - DNA, 25 bp, Homo sapien
tattacatatcagtaaagaaagcct

SEQ ID NO: 4735352 - DNA, 25 bp, Homo sapien
tacatatcagtaaagaaagcctgta

SEQ ID NO: 4735353 - DNA, 25 bp, Homo sapien
tatattacatatcagtaaagaaagc

SEQ ID NO: 4735354 - DNA, 25 bp, Homo sapien
gtctgtgtattatattacatatcag

SEQ ID NO: 4735355 - DNA, 25 bp, Homo sapien
tctggaagtacatataccaagatgt

SEQ ID NO: 4735356 - DNA, 25 bp, Homo sapien
tacaaagcagcatgatagcctttta

SEQ ID NO: 4735357 - DNA, 25 bp, Homo sapien
tctctaggtagaatcataacaggtt

SEQ ID NO: 4735358 - DNA, 25 bp, Homo sapien
caagatgttgacaatggttctctag

SEQ ID NO: 4735359 - DNA, 25 bp, Homo sapien
tggacaccaaatgaatgtactgagc

SEQ ID NO: 4735360 - DNA, 25 bp, Homo sapien
gtactgagccattgttccaagacag

SEQ ID NO: 4735361 - DNA, 25 bp, Homo sapien
tcaaccacaggtagcaagtaacggc

SEQ ID NO: 4735362 - DNA, 25 bp, Homo sapien
cagaagtggcaaatggattctctcc

SEQ ID NO: 4735363 - DNA, 25 bp, Homo sapien
cttctggccctagcgccttgctcca

SEQ ID NO: 4735364 - DNA, 25 bp, Homo sapien
tctcttctggccctagcgccttgct

SEQ ID NO: 4735365 - DNA, 25 bp, Homo sapien
gccctagcgccttgctccagcccat

SEQ ID NO: 4735366 - DNA, 25 bp, Homo sapien
tggccctagcgccttgctccagccc

SEQ ID NO: 4735367 - DNA, 25 bp, Homo sapien
tgagaatttatacatggaccttgag

SEQ ID NO: 4735368 - DNA, 25 bp, Homo sapien
cctctctcagttacggatgaactta

SEQ ID NO: 4735369 - DNA, 25 bp, Homo sapien
cagcaagcaaggatgatataagcca

SEQ ID NO: 4735370 - DNA, 25 bp, Homo sapien
tacatggaccttgaggtcagcaagc

SEQ ID NO: 4735371 - DNA, 25 bp, Homo sapien
cagttgcatgaaacggccaattgcc

SEQ ID NO: 4735372 - DNA, 25 bp, Homo sapien
tacttgaggtgagcaattacgggag

SEQ ID NO: 4735373 - DNA, 25 bp, Homo sapien
taaaccagcaagagcaattccaagc

SEQ ID NO: 4735374 - DNA, 25 bp, Homo sapien
caaccaatggagcatgagagccaat

SEQ ID NO: 4735375 - DNA, 25 bp, Homo sapien
tataacaatgtttacacatgcttta

SEQ ID NO: 4735376 - DNA, 25 bp, Homo sapien
gtacaacttacattctgtataacag

SEQ ID NO: 4735377 - DNA, 25 bp, Homo sapien
cttacattctgtataacagtacaat

SEQ ID NO: 4735378 - DNA, 25 bp, Homo sapien
tatttcactgtacaacttacattct

SEQ ID NO: 4735379 - DNA, 25 bp, Homo sapien
cacagtatgggacactacaaggtag

SEQ ID NO: 4735380 - DNA, 25 bp, Homo sapien
tgccaaagcaggtacatggtaagac

SEQ ID NO: 4735381 - DNA, 25 bp, Homo sapien
tagctctgccaaagtagcacctagg

SEQ ID NO: 4735382 - DNA, 25 bp, Homo sapien
ggttgtctaaaacatcaagctgtcc

SEQ ID NO: 4735383 - DNA, 25 bp, Homo sapien
cagtgaaatctgaacttgttccaag

SEQ ID NO: 4735384 - DNA, 25 bp, Homo sapien
gaaatctgaacttgttccaagtaat

SEQ ID NO: 4735385 - DNA, 25 bp, Homo sapien
gtgaaatctgaacttgttccaagta

SEQ ID NO: 4735386 - DNA, 25 bp, Homo sapien
tctgaacttgttccaagtaattaga

SEQ ID NO: 4735387 - DNA, 25 bp, Homo sapien
taactgtggttcaccaggaacaagg

SEQ ID NO: 4735388 - DNA, 25 bp, Homo sapien
gacacccaatgtaatgatgcacctg

SEQ ID NO: 4735389 - DNA, 25 bp, Homo sapien
tgagctactttaccagcgatcatga

SEQ ID NO: 4735390 - DNA, 25 bp, Homo sapien
cataaatctaggaaaagagacaccc

SEQ ID NO: 4735391 - DNA, 25 bp, Homo sapien
tccaaagataaaagagtgtaggcct

SEQ ID NO: 4735392 - DNA, 25 bp, Homo sapien
cagccagagccattattatgttaag

SEQ ID NO: 4735393 - DNA, 25 bp, Homo sapien
agaacatctcgttcttgcacactag

SEQ ID NO: 4735394 - DNA, 25 bp, Homo sapien
gcacactagtgtagaaaggtcttcc

SEQ ID NO: 4735395 - DNA, 25 bp, Homo sapien
ctgagagataagccaggtttcagct

SEQ ID NO: 4735396 - DNA, 25 bp, Homo sapien
tgtgcaaggaaagtacttctgagag

SEQ ID NO: 4735397 - DNA, 25 bp, Homo sapien
ctgtgcaaggaaagtacttctgaga

SEQ ID NO: 4735398 - DNA, 25 bp, Homo sapien
aaggacaagtagaaactgtgcaagg

SEQ ID NO: 4735399 - DNA, 25 bp, Homo sapien
ttgacagtgcttggcagacaataca

SEQ ID NO: 4735400 - DNA, 25 bp, Homo sapien
cttggcagacaatacacactaaaca

SEQ ID NO: 4735401 - DNA, 25 bp, Homo sapien
gtgcttggcagacaatacacactaa

SEQ ID NO: 4735402 - DNA, 25 bp, Homo sapien
ttctactcgtacagaagtttctatg

SEQ ID NO: 4735403 - DNA, 25 bp, Homo sapien
gaaggctttcactagagtgtctctg

SEQ ID NO: 4735404 - DNA, 25 bp, Homo sapien
ctctgtgtaagacatcttgaaaaat

SEQ ID NO: 4735405 - DNA, 25 bp, Homo sapien
cactagagtgtctctgtgtaagaca

SEQ ID NO: 4735406 - DNA, 25 bp, Homo sapien
gagtgtctctgtgtaagacatcttg

SEQ ID NO: 4735407 - DNA, 25 bp, Homo sapien
ctacacctgacctactgaaggtttt

SEQ ID NO: 4735408 - DNA, 25 bp, Homo sapien
gagtcactacacctgacctactgaa

SEQ ID NO: 4735409 - DNA, 25 bp, Homo sapien
aagcctacttgatcaaagtagatca

SEQ ID NO: 4735410 - DNA, 25 bp, Homo sapien
caaagtagatcagctttttgatgtg

SEQ ID NO: 4735411 - DNA, 25 bp, Homo sapien
tagaaaatttagagctggatgcaaa

SEQ ID NO: 4735412 - DNA, 25 bp, Homo sapien
ggtaatgaaatcacctgtacaccaa

SEQ ID NO: 4735413 - DNA, 25 bp, Homo sapien
caatttttcatgtattggcagtgac

SEQ ID NO: 4735414 - DNA, 25 bp, Homo sapien
gactctgtgacaatagacttaacac

SEQ ID NO: 4735415 - DNA, 25 bp, Homo sapien
gaaaatgtttcaaggcacagattaa

SEQ ID NO: 4735416 - DNA, 25 bp, Homo sapien
aaaatgggtcctatattaagtcatc

SEQ ID NO: 4735417 - DNA, 25 bp, Homo sapien
tgtaatttcagttggaccaattcat

SEQ ID NO: 4735418 - DNA, 25 bp, Homo sapien
aatggttgcaaacccattctgcagt

SEQ ID NO: 4735419 - DNA, 25 bp, Homo sapien
taaatatgttcatgacagggtggca

SEQ ID NO: 4735420 - DNA, 25 bp, Homo sapien
tagatgatcgtatcctgagccatgt

SEQ ID NO: 4735421 - DNA, 25 bp, Homo sapien
gatatggagcatacatgacttgccg

SEQ ID NO: 4735422 - DNA, 25 bp, Homo sapien
gaaggctgtcagctcggatctcatg

SEQ ID NO: 4735423 - DNA, 25 bp, Homo sapien
gatgattctgcttcacataacctgg

SEQ ID NO: 4735424 - DNA, 25 bp, Homo sapien
gagccctgactcatatttaaatgat

SEQ ID NO: 4735425 - DNA, 25 bp, Homo sapien
aggccttgtacaaagagccctgact

SEQ ID NO: 4735426 - DNA, 25 bp, Homo sapien
gaaaaaggcataatgttctgactat

SEQ ID NO: 4735427 - DNA, 25 bp, Homo sapien
taatcccaatagctccctagaaggg

SEQ ID NO: 4735428 - DNA, 25 bp, Homo sapien
ggtaagctattctccctcaagagga

SEQ ID NO: 4735429 - DNA, 25 bp, Homo sapien
tctttagtcacctggaatccatggg

SEQ ID NO: 4735430 - DNA, 25 bp, Homo sapien
tcaacctagagtggtggcaacttct

SEQ ID NO: 4735431 - DNA, 25 bp, Homo sapien
tactacaacggaacagccacaggtt

SEQ ID NO: 4735432 - DNA, 25 bp, Homo sapien
tgcactgctacctactacaacggaa

SEQ ID NO: 4735433 - DNA, 25 bp, Homo sapien
tgctacctactacaacggaacagcc

SEQ ID NO: 4735434 - DNA, 25 bp, Homo sapien
ccacaggtttgcaagtgtgagctga

SEQ ID NO: 4735435 - DNA, 25 bp, Homo sapien
gattcaagccattaaggctcttagg

SEQ ID NO: 4735436 - DNA, 25 bp, Homo sapien
aatgatgtatgaaaggctgacactg

SEQ ID NO: 4735437 - DNA, 25 bp, Homo sapien
gatactccatcatgagcctaaagga

SEQ ID NO: 4735438 - DNA, 25 bp, Homo sapien
gactaaagtgcttctgattcaagcc

SEQ ID NO: 4735439 - DNA, 25 bp, Homo sapien
taaaggaactaacatgtaggcactc

SEQ ID NO: 4735440 - DNA, 25 bp, Homo sapien
tcttgtctgggatggaaactcggtt

SEQ ID NO: 4735441 - DNA, 25 bp, Homo sapien
cacgggtacacagcattaatccagg

SEQ ID NO: 4735442 - DNA, 25 bp, Homo sapien
gaattcaggcaccttgcccacgggt

SEQ ID NO: 4735443 - DNA, 25 bp, Homo sapien
cttcatgacagctgtcaccaatatc

SEQ ID NO: 4735444 - DNA, 25 bp, Homo sapien
tcatcatcattgagtactgtatcag

SEQ ID NO: 4735445 - DNA, 25 bp, Homo sapien
catgacagctgtcaccaatatcatc

SEQ ID NO: 4735446 - DNA, 25 bp, Homo sapien
catcattgagtactgtatcagctat

SEQ ID NO: 4735447 - DNA, 25 bp, Homo sapien
taagcattggaataatactctgacc

SEQ ID NO: 4735448 - DNA, 25 bp, Homo sapien
tccattacaggaatcacttctccag

SEQ ID NO: 4735449 - DNA, 25 bp, Homo sapien
tctccagtaagcattggaataatac

SEQ ID NO: 4735450 - DNA, 25 bp, Homo sapien
gaatcacttctccagtaagcattgg

SEQ ID NO: 4735451 - DNA, 25 bp, Homo sapien
taacaagaataatgactagatccgt

SEQ ID NO: 4735452 - DNA, 25 bp, Homo sapien
cagatgacagctacaactgaagttg

SEQ ID NO: 4735453 - DNA, 25 bp, Homo sapien
catatgcccatttgcataatgctga

SEQ ID NO: 4735454 - DNA, 25 bp, Homo sapien
gaagttttatcctaagccatatgcc

SEQ ID NO: 4735455 - DNA, 25 bp, Homo sapien
ctgtgccttctaagataatcttctg

SEQ ID NO: 4735456 - DNA, 25 bp, Homo sapien
tctgtgccttctaagataatcttct

SEQ ID NO: 4735457 - DNA, 25 bp, Homo sapien
ctctgtgccttctaagataatcttc

SEQ ID NO: 4735458 - DNA, 25 bp, Homo sapien
gccttctaagataatcttctggaca

SEQ ID NO: 4735459 - DNA, 25 bp, Homo sapien
atatgtgctgcgatccccattccag

SEQ ID NO: 4735460 - DNA, 25 bp, Homo sapien
aaatgtgccttactctaggaccaag

SEQ ID NO: 4735461 - DNA, 25 bp, Homo sapien
cacacactctatgaagtgggaggta

SEQ ID NO: 4735462 - DNA, 25 bp, Homo sapien
ccatttagagtgtggttggcaagaa

SEQ ID NO: 4735463 - DNA, 25 bp, Homo sapien
ctgcattccaactgtcacattatcc

SEQ ID NO: 4735464 - DNA, 25 bp, Homo sapien
acattatccaaatgctccggagata

SEQ ID NO: 4735465 - DNA, 25 bp, Homo sapien
tccaactgtcacattatccaaatgc

SEQ ID NO: 4735466 - DNA, 25 bp, Homo sapien
ctgtcacattatccaaatgctccgg

SEQ ID NO: 4735467 - DNA, 25 bp, Homo sapien
tcataggtgacagctacatgtgtgt

SEQ ID NO: 4735468 - DNA, 25 bp, Homo sapien
gatcctaatcctgtctatgcctagg

SEQ ID NO: 4735469 - DNA, 25 bp, Homo sapien
gatactgatgatcctaatcctgtct

SEQ ID NO: 4735470 - DNA, 25 bp, Homo sapien
tgtctatgcctaggtgaaagtgtgt

SEQ ID NO: 4735471 - DNA, 25 bp, Homo sapien
taacgtagaatagaacccgagggca

SEQ ID NO: 4735472 - DNA, 25 bp, Homo sapien
taggctaacctagtcctcctgggaa

SEQ ID NO: 4735473 - DNA, 25 bp, Homo sapien
gaagttcatatcactatctggccat

SEQ ID NO: 4735474 - DNA, 25 bp, Homo sapien
tcacagttccaagtttctcagacaa

SEQ ID NO: 4735475 - DNA, 25 bp, Homo sapien
aagcaaccaggtcatgtcccacaga

SEQ ID NO: 4735476 - DNA, 25 bp, Homo sapien
tggtggtgttcaacgcggccagata

SEQ ID NO: 4735477 - DNA, 25 bp, Homo sapien
tgaaattgtgcaggcgtctccacac

SEQ ID NO: 4735478 - DNA, 25 bp, Homo sapien
gatagacccaatgagcacacggaca

SEQ ID NO: 4735479 - DNA, 25 bp, Homo sapien
ggaaagtaaaaatgcgtcgagctct

SEQ ID NO: 4735480 - DNA, 25 bp, Homo sapien
cccgacacccagcttcggtcagaga

SEQ ID NO: 4735481 - DNA, 25 bp, Homo sapien
gtcgctagaggcgaaagcccgacac

SEQ ID NO: 4735482 - DNA, 25 bp, Homo sapien
aggcaattccaccagtcgctagagg

SEQ ID NO: 4735483 - DNA, 25 bp, Homo sapien
gccgccgcgggcgcaggcaccgcaa

SEQ ID NO: 4735484 - DNA, 25 bp, Homo sapien
ccactcgccaccgcctgcgcctccg

SEQ ID NO: 4735485 - DNA, 25 bp, Homo sapien
tccgccgccgcgggcgcaggcaccg

SEQ ID NO: 4735486 - DNA, 25 bp, Homo sapien
cctccgccgccgcgggcgcaggcac

SEQ ID NO: 4735487 - DNA, 25 bp, Homo sapien
tttacgtgggcggaacttgtcgctg

SEQ ID NO: 4735488 - DNA, 25 bp, Homo sapien
caagcgtcatcttttacgtgggcgg

SEQ ID NO: 4735489 - DNA, 25 bp, Homo sapien
ggcggaacttgtcgctgtttgacgc

SEQ ID NO: 4735490 - DNA, 25 bp, Homo sapien
gctgtttgacgcacctctctttcct

SEQ ID NO: 4735491 - DNA, 25 bp, Homo sapien
tcgcaattttgcctttacatgtaag

SEQ ID NO: 4735492 - DNA, 25 bp, Homo sapien
gcattcaaaactccactgcaaaccc

SEQ ID NO: 4735493 - DNA, 25 bp, Homo sapien
acggtcccctgcaaagtcatcgcaa

SEQ ID NO: 4735494 - DNA, 25 bp, Homo sapien
cactgcgggcgggaatcccacggtc

SEQ ID NO: 4735495 - DNA, 25 bp, Homo sapien
actgagtcacaggtagtaagtctgc

SEQ ID NO: 4735496 - DNA, 25 bp, Homo sapien
tatcgtgaaggattaattagtaccc

SEQ ID NO: 4735497 - DNA, 25 bp, Homo sapien
tagagagatagtcaccttaaatagc

SEQ ID NO: 4735498 - DNA, 25 bp, Homo sapien
tgcagttgcacccacggcatttaac

SEQ ID NO: 4735499 - DNA, 25 bp, Homo sapien
aaacaccttatttcaatgtggccag

SEQ ID NO: 4735500 - DNA, 25 bp, Homo sapien
ggcaccttggtcctttaataatgag

SEQ ID NO: 4735501 - DNA, 25 bp, Homo sapien
tgatctcgatattgcagccttggcc

SEQ ID NO: 4735502 - DNA, 25 bp, Homo sapien
taataatgaggccactgaaatactt

SEQ ID NO: 4735503 - DNA, 25 bp, Homo sapien
gagatgagattttccatcaccagat

SEQ ID NO: 4735504 - DNA, 25 bp, Homo sapien
tctcacagagttgcatcgatgtaac

SEQ ID NO: 4735505 - DNA, 25 bp, Homo sapien
gaatcttgtttacagggttctgaga

SEQ ID NO: 4735506 - DNA, 25 bp, Homo sapien
taaggcagggtgactgctttaaccc

SEQ ID NO: 4735507 - DNA, 25 bp, Homo sapien
tggaacacctttcaagggtggccta

SEQ ID NO: 4735508 - DNA, 25 bp, Homo sapien
gagcatttacaaagtgaaaccgctt

SEQ ID NO: 4735509 - DNA, 25 bp, Homo sapien
tgttccagtcctgagagtcatgatg

SEQ ID NO: 4735510 - DNA, 25 bp, Homo sapien
aaggtgtaactcctcttttcatggc

SEQ ID NO: 4735511 - DNA, 25 bp, Homo sapien
gtttatataatcgtggattagttta

SEQ ID NO: 4735512 - DNA, 25 bp, Homo sapien
taatcgtggattagtttatcaaatt

SEQ ID NO: 4735513 - DNA, 25 bp, Homo sapien
tataatcgtggattagtttatcaaa

SEQ ID NO: 4735514 - DNA, 25 bp, Homo sapien
tatataatcgtggattagtttatca

SEQ ID NO: 4735515 - DNA, 25 bp, Homo sapien
tccattaagcttcagtgggagcaaa

SEQ ID NO: 4735516 - DNA, 25 bp, Homo sapien
ttccattaagcttcagtgggagcaa

SEQ ID NO: 4735517 - DNA, 25 bp, Homo sapien
gaaacgcctcgctggatagacattt

SEQ ID NO: 4735518 - DNA, 25 bp, Homo sapien
aggagaaaagtaagggccagttgct

SEQ ID NO: 4735519 - DNA, 25 bp, Homo sapien
ggaaacgcctcgctggatagacatt

SEQ ID NO: 4735520 - DNA, 25 bp, Homo sapien
tcatgaacaggctccttgtatcccc

SEQ ID NO: 4735521 - DNA, 25 bp, Homo sapien
tacggtcctgttcccatggaggtga

SEQ ID NO: 4735522 - DNA, 25 bp, Homo sapien
gaagaaacatcatcctacggtcctg

SEQ ID NO: 4735523 - DNA, 25 bp, Homo sapien
acagggacccagtgtcagagaagcc

SEQ ID NO: 4735524 - DNA, 25 bp, Homo sapien
tgacagggacccagtgtcagagaag

SEQ ID NO: 4735525 - DNA, 25 bp, Homo sapien
ctgtcacatcttgattctcctcttt

SEQ ID NO: 4735526 - DNA, 25 bp, Homo sapien
aggattccctggacctcttgagcct

SEQ ID NO: 4735527 - DNA, 25 bp, Homo sapien
gaggattccctggacctcttgagcc

SEQ ID NO: 4735528 - DNA, 25 bp, Homo sapien
ccagaggattccctggacctcttga

SEQ ID NO: 4735529 - DNA, 25 bp, Homo sapien
tttttctcgtgggaaataatccatc

SEQ ID NO: 4735530 - DNA, 25 bp, Homo sapien
attatgtgcttttttctcgtgggaa

SEQ ID NO: 4735531 - DNA, 25 bp, Homo sapien
tggaacatgaagtgcataaggatct

SEQ ID NO: 4735532 - DNA, 25 bp, Homo sapien
ccaattattatgtgcttttttctcg

SEQ ID NO: 4735533 - DNA, 25 bp, Homo sapien
acggctgatcttttcgtgtacttta

SEQ ID NO: 4735534 - DNA, 25 bp, Homo sapien
cggtaatttcatctactgttaattt

SEQ ID NO: 4735535 - DNA, 25 bp, Homo sapien
catctactgttaatttcctctggag

SEQ ID NO: 4735536 - DNA, 25 bp, Homo sapien
ctactgttaatttcctctggagttt

SEQ ID NO: 4735537 - DNA, 25 bp, Homo sapien
tcatctactgttaatttcctctgga

SEQ ID NO: 4735538 - DNA, 25 bp, Homo sapien
ggagtcttcaaatgttattttctgt

SEQ ID NO: 4735539 - DNA, 25 bp, Homo sapien
tattttctgtttattaagttcactc

SEQ ID NO: 4735540 - DNA, 25 bp, Homo sapien
ttggagtcttcaaatgttattttct

SEQ ID NO: 4735541 - DNA, 25 bp, Homo sapien
ttttctgtttattaagttcactcac

SEQ ID NO: 4735542 - DNA, 25 bp, Homo sapien
ttcatttgaaatatcgtcaagttca

SEQ ID NO: 4735543 - DNA, 25 bp, Homo sapien
tcatttgaaatatcgtcaagttcat

SEQ ID NO: 4735544 - DNA, 25 bp, Homo sapien
taaacttgggctgtgggcggcagag

SEQ ID NO: 4735545 - DNA, 25 bp, Homo sapien
aacccgaatccgcacgtggcaaacg

SEQ ID NO: 4735546 - DNA, 25 bp, Homo sapien
cggcggttgccacaataaacttggg

SEQ ID NO: 4735547 - DNA, 25 bp, Homo sapien
cgtggcaaacggagcggaccattgt

SEQ ID NO: 4735548 - DNA, 25 bp, Homo sapien
caaggtttctacagcagaagcgaaa

SEQ ID NO: 4735549 - DNA, 25 bp, Homo sapien
ccagtggtagaactaaagtgggtgt

SEQ ID NO: 4735550 - DNA, 25 bp, Homo sapien
aagcgttgtccataggcaagaagca

SEQ ID NO: 4735551 - DNA, 25 bp, Homo sapien
agaagcgaaagcaaagcgttgtcca

SEQ ID NO: 4735552 - DNA, 25 bp, Homo sapien
ctctatttgcatgagttttttctcc

SEQ ID NO: 4735553 - DNA, 25 bp, Homo sapien
tttccataatgtgggaaacattgca

SEQ ID NO: 4735554 - DNA, 25 bp, Homo sapien
tactctatttgcatgagttttttct

SEQ ID NO: 4735555 - DNA, 25 bp, Homo sapien
atttccataatgtgggaaacattgc

SEQ ID NO: 4735556 - DNA, 25 bp, Homo sapien
caatatgttctttcaactctgtcat

SEQ ID NO: 4735557 - DNA, 25 bp, Homo sapien
gctggatggtttaatctgctgatcc

SEQ ID NO: 4735558 - DNA, 25 bp, Homo sapien
catttcctgaaagacgtattcttta

SEQ ID NO: 4735559 - DNA, 25 bp, Homo sapien
cttctttgctggatggtttaatctg

SEQ ID NO: 4735560 - DNA, 25 bp, Homo sapien
agttctacaaggcctttcagctttt

SEQ ID NO: 4735561 - DNA, 25 bp, Homo sapien
aaccttgcttcttatcagtgtggct

SEQ ID NO: 4735562 - DNA, 25 bp, Homo sapien
ttcttatcagtgtggcttgcctcag

SEQ ID NO: 4735563 - DNA, 25 bp, Homo sapien
tgtggcttgcctcagttctacaagg

SEQ ID NO: 4735564 - DNA, 25 bp, Homo sapien
atgtggatagaagttcaaattctca

SEQ ID NO: 4735565 - DNA, 25 bp, Homo sapien
gaatccaattggtaacagatagttg

SEQ ID NO: 4735566 - DNA, 25 bp, Homo sapien
ggatagaagttcaaattctcaagac

SEQ ID NO: 4735567 - DNA, 25 bp, Homo sapien
gaacagatggacaggtgtatgaaga

SEQ ID NO: 4735568 - DNA, 25 bp, Homo sapien
gagagatccccaaatgttgtcctgg

SEQ ID NO: 4735569 - DNA, 25 bp, Homo sapien
aattaataccatgtccactactgag

SEQ ID NO: 4735570 - DNA, 25 bp, Homo sapien
tcctggtatttccactggtgagaat

SEQ ID NO: 4735571 - DNA, 25 bp, Homo sapien
tgttttaaggcactaagcttgtgga

SEQ ID NO: 4735572 - DNA, 25 bp, Homo sapien
gcaagctctcaaatgctaacggcat

SEQ ID NO: 4735573 - DNA, 25 bp, Homo sapien
aagccttcttgggtaaatgagctgt

SEQ ID NO: 4735574 - DNA, 25 bp, Homo sapien
aatgagctgtttcttgggacattat

SEQ ID NO: 4735575 - DNA, 25 bp, Homo sapien
gcttttgaagtctcgatgctgtgct

SEQ ID NO: 4735576 - DNA, 25 bp, Homo sapien
ttttcgaattctagatcctctcagg

SEQ ID NO: 4735577 - DNA, 25 bp, Homo sapien
aatagtcttctgtctgcgtctagct

SEQ ID NO: 4735578 - DNA, 25 bp, Homo sapien
gaaaagccacaggatggctccccat

SEQ ID NO: 4735579 - DNA, 25 bp, Homo sapien
tagatcctctcaggctagaaaagcc

SEQ ID NO: 4735580 - DNA, 25 bp, Homo sapien
ttcatcttttgggatagtcatgtct

SEQ ID NO: 4735581 - DNA, 25 bp, Homo sapien
tggaatttagcattacttttcctca

SEQ ID NO: 4735582 - DNA, 25 bp, Homo sapien
tagtcatgtctgaagaagagggttc

SEQ ID NO: 4735583 - DNA, 25 bp, Homo sapien
atttcagtcctcataagttggaatt

SEQ ID NO: 4735584 - DNA, 25 bp, Homo sapien
ttactgttatcctgaggaacatcat

SEQ ID NO: 4735585 - DNA, 25 bp, Homo sapien
atggtggccttgtggtgagtcttac

SEQ ID NO: 4735586 - DNA, 25 bp, Homo sapien
gtgagtcttactgttatcctgagga

SEQ ID NO: 4735587 - DNA, 25 bp, Homo sapien
tggtggccttgtggtgagtcttact

SEQ ID NO: 4735588 - DNA, 25 bp, Homo sapien
tccatgtgtcatctaacacacaccg

SEQ ID NO: 4735589 - DNA, 25 bp, Homo sapien
tctaataagagcagacagttttgtc

SEQ ID NO: 4735590 - DNA, 25 bp, Homo sapien
cacacaccgttttgtcaggttagga

SEQ ID NO: 4735591 - DNA, 25 bp, Homo sapien
cagttttgtctctccgatggttcct

SEQ ID NO: 4735592 - DNA, 25 bp, Homo sapien
ttactccaaattgtctggtttttgc

SEQ ID NO: 4735593 - DNA, 25 bp, Homo sapien
atttcctttactccaaattgtctgg

SEQ ID NO: 4735594 - DNA, 25 bp, Homo sapien
cttccatttcctttactccaaattg

SEQ ID NO: 4735595 - DNA, 25 bp, Homo sapien
tccatttcctttactccaaattgtc

SEQ ID NO: 4735596 - DNA, 25 bp, Homo sapien
catgcaactgctattctgagacatt

SEQ ID NO: 4735597 - DNA, 25 bp, Homo sapien
gaaatgtcagagctttccataacac

SEQ ID NO: 4735598 - DNA, 25 bp, Homo sapien
tgttatgtttatcaggcagctttcc

SEQ ID NO: 4735599 - DNA, 25 bp, Homo sapien
ggcaccagtaatccgagatacttgg

SEQ ID NO: 4735600 - DNA, 25 bp, Homo sapien
tcatggtatcataaattattgcaat

SEQ ID NO: 4735601 - DNA, 25 bp, Homo sapien
tgaattatgttggaaagaggactgg

SEQ ID NO: 4735602 - DNA, 25 bp, Homo sapien
gaggactgggttgataggtcactcc

SEQ ID NO: 4735603 - DNA, 25 bp, Homo sapien
actgggttgataggtcactccataa

SEQ ID NO: 4735604 - DNA, 25 bp, Homo sapien
ctttgttatgcttgcttccagtaca

SEQ ID NO: 4735605 - DNA, 25 bp, Homo sapien
tccagtacattcatcttgttgctag

SEQ ID NO: 4735606 - DNA, 25 bp, Homo sapien
tatggctactcagccttattttcca

SEQ ID NO: 4735607 - DNA, 25 bp, Homo sapien
ctgtgttctgccactgtatggctac

SEQ ID NO: 4735608 - DNA, 25 bp, Homo sapien
gaggcatagccactgaccagagaag

SEQ ID NO: 4735609 - DNA, 25 bp, Homo sapien
gcctgagtggctgtacaatttcgca

SEQ ID NO: 4735610 - DNA, 25 bp, Homo sapien
gatgaagcactctggagagatcaaa

SEQ ID NO: 4735611 - DNA, 25 bp, Homo sapien
gatcaaagaccatcgggcctgagtg

SEQ ID NO: 4735612 - DNA, 25 bp, Homo sapien
ccaatttctgttatagccttttcat

SEQ ID NO: 4735613 - DNA, 25 bp, Homo sapien
ctgttatagccttttcatttagcct

SEQ ID NO: 4735614 - DNA, 25 bp, Homo sapien
gttatagccttttcatttagcctct

SEQ ID NO: 4735615 - DNA, 25 bp, Homo sapien
gtccaatttctgttatagccttttc

SEQ ID NO: 4735616 - DNA, 25 bp, Homo sapien
cagttctgtgacgtggctgggctgg

SEQ ID NO: 4735617 - DNA, 25 bp, Homo sapien
gacgtggctgggctggtttcatata

SEQ ID NO: 4735618 - DNA, 25 bp, Homo sapien
gttctgtgacgtggctgggctggtt

SEQ ID NO: 4735619 - DNA, 25 bp, Homo sapien
gtggctgggctggtttcatatacat

SEQ ID NO: 4735620 - DNA, 25 bp, Homo sapien
caagactggtatacaatcaggaacc

SEQ ID NO: 4735621 - DNA, 25 bp, Homo sapien
gaacctgggtattgtcctgcttcaa

SEQ ID NO: 4735622 - DNA, 25 bp, Homo sapien
cgattgccccaactaattgaaaggc

SEQ ID NO: 4735623 - DNA, 25 bp, Homo sapien
tcacatggttgactacgattgcccc

SEQ ID NO: 4735624 - DNA, 25 bp, Homo sapien
gataggagtttggcttttttgtgac

SEQ ID NO: 4735625 - DNA, 25 bp, Homo sapien
ggataggagtttggcttttttgtga

SEQ ID NO: 4735626 - DNA, 25 bp, Homo sapien
ggctcacggcaacggcaacctccgc

SEQ ID NO: 4735627 - DNA, 25 bp, Homo sapien
ccagcctcttttataggtaatactt

SEQ ID NO: 4735628 - DNA, 25 bp, Homo sapien
taatacttttattgtcaagtctaag

SEQ ID NO: 4735629 - DNA, 25 bp, Homo sapien
tcggctcacggcaacggcaacctcc

SEQ ID NO: 4735630 - DNA, 25 bp, Homo sapien
tggatcagtaatcagccaggtcacc

SEQ ID NO: 4735631 - DNA, 25 bp, Homo sapien
cagctttaaggcctatggatcagta

SEQ ID NO: 4735632 - DNA, 25 bp, Homo sapien
gcatgatcaatagcacaggcgagca

SEQ ID NO: 4735633 - DNA, 25 bp, Homo sapien
gacagaaaggcctcgaagtcgactg

SEQ ID NO: 4735634 - DNA, 25 bp, Homo sapien
tgccccaccattgcctccgtatatt

SEQ ID NO: 4735635 - DNA, 25 bp, Homo sapien
agccacattccctatcactgtcccc

SEQ ID NO: 4735636 - DNA, 25 bp, Homo sapien
agcagccacattccctatcactgtc

SEQ ID NO: 4735637 - DNA, 25 bp, Homo sapien
ccccttagctgccccaccattgcct

SEQ ID NO: 4735638 - DNA, 25 bp, Homo sapien
gatctgtgcatgtcttgtctctcac

SEQ ID NO: 4735639 - DNA, 25 bp, Homo sapien
cctcattgtcaaacagctcatctga

SEQ ID NO: 4735640 - DNA, 25 bp, Homo sapien
tcctcattgtcaaacagctcatctg

SEQ ID NO: 4735641 - DNA, 25 bp, Homo sapien
cctccagggggtcctcattgtcaaa

SEQ ID NO: 4735642 - DNA, 25 bp, Homo sapien
cattgtcaaacagctcatctgacat

SEQ ID NO: 4735643 - DNA, 25 bp, Homo sapien
tggcagtgcacatgcacagtgtcag

SEQ ID NO: 4735644 - DNA, 25 bp, Homo sapien
tactggacacgctgaaagacaggta

SEQ ID NO: 4735645 - DNA, 25 bp, Homo sapien
tttccatactggacacgctgaaaga

SEQ ID NO: 4735646 - DNA, 25 bp, Homo sapien
gataattagagcagacatggcagtg

SEQ ID NO: 4735647 - DNA, 25 bp, Homo sapien
cttcgggtttgaggagaggttgtgg

SEQ ID NO: 4735648 - DNA, 25 bp, Homo sapien
tactaccaacccttctctggtcatt

SEQ ID NO: 4735649 - DNA, 25 bp, Homo sapien
gtggtcatttcctatactaccaacc

SEQ ID NO: 4735650 - DNA, 25 bp, Homo sapien
ctaacacacttgtgcctttgtccat

SEQ ID NO: 4735651 - DNA, 25 bp, Homo sapien
ttagttattaattgttggaagccca

SEQ ID NO: 4735652 - DNA, 25 bp, Homo sapien
tattaattgttggaagcccaaaatc

SEQ ID NO: 4735653 - DNA, 25 bp, Homo sapien
ccaaaatctttggatctaagggcat

SEQ ID NO: 4735654 - DNA, 25 bp, Homo sapien
aagttgtgtttatctaatagtttag

SEQ ID NO: 4735655 - DNA, 25 bp, Homo sapien
gcactagggaaggatgtagattaca

SEQ ID NO: 4735656 - DNA, 25 bp, Homo sapien
agacctacgtctccacccagatgtt

SEQ ID NO: 4735657 - DNA, 25 bp, Homo sapien
taagtattaacatctacagctcccc

SEQ ID NO: 4735658 - DNA, 25 bp, Homo sapien
caaaatggaacttttggagataagc

SEQ ID NO: 4735659 - DNA, 25 bp, Homo sapien
cacaccttgaccaggtgactggaag

SEQ ID NO: 4735660 - DNA, 25 bp, Homo sapien
aagtgcagtactgcgcacaccttga

SEQ ID NO: 4735661 - DNA, 25 bp, Homo sapien
gtgactggaagctgttggtccagct

SEQ ID NO: 4735662 - DNA, 25 bp, Homo sapien
tgcattagaccacatggccacctgg

SEQ ID NO: 4735663 - DNA, 25 bp, Homo sapien
cctcttccaacagactgccaggcag

SEQ ID NO: 4735664 - DNA, 25 bp, Homo sapien
cagactgccaggcaggctgttcagc

SEQ ID NO: 4735665 - DNA, 25 bp, Homo sapien
caggcaggctgttcagcaaaagcat

SEQ ID NO: 4735666 - DNA, 25 bp, Homo sapien
tcctcttccaacagactgccaggca

SEQ ID NO: 4735667 - DNA, 25 bp, Homo sapien
tcatagaacgaagtacactgactgt

SEQ ID NO: 4735668 - DNA, 25 bp, Homo sapien
gcagaaccaaggttttcttgctgct

SEQ ID NO: 4735669 - DNA, 25 bp, Homo sapien
gctggaagtgcttaacagagtcaaa

SEQ ID NO: 4735670 - DNA, 25 bp, Homo sapien
atagttcttccagagtgtcttcagc

SEQ ID NO: 4735671 - DNA, 25 bp, Homo sapien
ctgtcctgtccggagcagtaatata

SEQ ID NO: 4735672 - DNA, 25 bp, Homo sapien
aagatgctgtcctgtccggagcagt

SEQ ID NO: 4735673 - DNA, 25 bp, Homo sapien
tcctgtccggagcagtaatatactc

SEQ ID NO: 4735674 - DNA, 25 bp, Homo sapien
gatgctgtcctgtccggagcagtaa

SEQ ID NO: 4735675 - DNA, 25 bp, Homo sapien
caacttcgttgtgtcacatacagaa

SEQ ID NO: 4735676 - DNA, 25 bp, Homo sapien
gactttatcaacttcgttgtgtcac

SEQ ID NO: 4735677 - DNA, 25 bp, Homo sapien
ttcactgactttatcaacttcgttg

SEQ ID NO: 4735678 - DNA, 25 bp, Homo sapien
acatacagaatgaagttcccaatca

SEQ ID NO: 4735679 - DNA, 25 bp, Homo sapien
ttttggccaacagttagacacctgt

SEQ ID NO: 4735680 - DNA, 25 bp, Homo sapien
gaacattcaggctcggaaggtttaa

SEQ ID NO: 4735681 - DNA, 25 bp, Homo sapien
ctttgttaattctgggtagctggca

SEQ ID NO: 4735682 - DNA, 25 bp, Homo sapien
caggaggcaaagtctatggcttaca

SEQ ID NO: 4735683 - DNA, 25 bp, Homo sapien
gggctttagggaagatgcaggcatc

SEQ ID NO: 4735684 - DNA, 25 bp, Homo sapien
gctttagggaagatgcaggcatcag

SEQ ID NO: 4735685 - DNA, 25 bp, Homo sapien
tagggaagatgcaggcatcagcaaa

SEQ ID NO: 4735686 - DNA, 25 bp, Homo sapien
ggaagatgcaggcatcagcaaacat

SEQ ID NO: 4735687 - DNA, 25 bp, Homo sapien
tgaatccagtgacatagccctaggg

SEQ ID NO: 4735688 - DNA, 25 bp, Homo sapien
gtaggtccttaacgccagacttgtg

SEQ ID NO: 4735689 - DNA, 25 bp, Homo sapien
taatgacttcagtgacgggcagctc

SEQ ID NO: 4735690 - DNA, 25 bp, Homo sapien
gcaactgacagttttgaaggacacc

SEQ ID NO: 4735691 - DNA, 25 bp, Homo sapien
aagcacagaccactggattctccag

SEQ ID NO: 4735692 - DNA, 25 bp, Homo sapien
tcagttactttcagtttccgtgaac

SEQ ID NO: 4735693 - DNA, 25 bp, Homo sapien
tgcgttaaagccagcaactttctta

SEQ ID NO: 4735694 - DNA, 25 bp, Homo sapien
tatattgaaaccagccctgcgttaa

SEQ ID NO: 4735695 - DNA, 25 bp, Homo sapien
aattgcctctgtgctatggtactag

SEQ ID NO: 4735696 - DNA, 25 bp, Homo sapien
gaataaaacaatacctgcatagctg

SEQ ID NO: 4735697 - DNA, 25 bp, Homo sapien
cccatggctaaaggaataggctaga

SEQ ID NO: 4735698 - DNA, 25 bp, Homo sapien
tgtgacaagccctagaagccagtgt

SEQ ID NO: 4735699 - DNA, 25 bp, Homo sapien
tgataccctagatgatgacacctgc

SEQ ID NO: 4735700 - DNA, 25 bp, Homo sapien
tatccctggagagagcgttcattga

SEQ ID NO: 4735701 - DNA, 25 bp, Homo sapien
taaggtgcagagctagaagccaggc

SEQ ID NO: 4735702 - DNA, 25 bp, Homo sapien
tgcaattaaatagcagcaggccggg

SEQ ID NO: 4735703 - DNA, 25 bp, Homo sapien
gagatccccagaacgccaatatttg

SEQ ID NO: 4735704 - DNA, 25 bp, Homo sapien
cctgcctttcgatggagagtctcca

SEQ ID NO: 4735705 - DNA, 25 bp, Homo sapien
taggtaacggaaggtgaaatcacac

SEQ ID NO: 4735706 - DNA, 25 bp, Homo sapien
gtccgtgagtgtgagccaaatattc

SEQ ID NO: 4735707 - DNA, 25 bp, Homo sapien
ttcatgttgaacctcctgggtccag

SEQ ID NO: 4735708 - DNA, 25 bp, Homo sapien
atcattttcatgttgaacctcctgg

SEQ ID NO: 4735709 - DNA, 25 bp, Homo sapien
attttcatgttgaacctcctgggtc

SEQ ID NO: 4735710 - DNA, 25 bp, Homo sapien
caaatcattttcatgttgaacctcc

SEQ ID NO: 4735711 - DNA, 25 bp, Homo sapien
ccgtagaggctattggcaggcatca

SEQ ID NO: 4735712 - DNA, 25 bp, Homo sapien
tgtgaaggtatcattcccagcagca

SEQ ID NO: 4735713 - DNA, 25 bp, Homo sapien
acctctcacggatggtgtctgggcc

SEQ ID NO: 4735714 - DNA, 25 bp, Homo sapien
gacacattgagcacgcgtaggaagc

SEQ ID NO: 4735715 - DNA, 25 bp, Homo sapien
tataaaccaaatcattgtcccccac

SEQ ID NO: 4735716 - DNA, 25 bp, Homo sapien
atgccctgtgtgatatataaaccaa

SEQ ID NO: 4735717 - DNA, 25 bp, Homo sapien
aagaagcccactgaatgccctgtgt

SEQ ID NO: 4735718 - DNA, 25 bp, Homo sapien
ctaagaagcccactgaatgccctgt

SEQ ID NO: 4735719 - DNA, 25 bp, Homo sapien
aagggaccagctttagacgattgcc

SEQ ID NO: 4735720 - DNA, 25 bp, Homo sapien
cttagtgagattggacagccccgtg

SEQ ID NO: 4735721 - DNA, 25 bp, Homo sapien
tgaagattaacaccacagccagacc

SEQ ID NO: 4735722 - DNA, 25 bp, Homo sapien
gatcaatcgccttctgtgacagcta

SEQ ID NO: 4735723 - DNA, 25 bp, Homo sapien
cttcttagtctacaccttggtcacg

SEQ ID NO: 4735724 - DNA, 25 bp, Homo sapien
ctccacttcttagtctacaccttgg

SEQ ID NO: 4735725 - DNA, 25 bp, Homo sapien
cttagtctacaccttggtcacgggt

SEQ ID NO: 4735726 - DNA, 25 bp, Homo sapien
cacttcttagtctacaccttggtca

SEQ ID NO: 4735727 - DNA, 25 bp, Homo sapien
taggaaacggtgagggcatctaagg

SEQ ID NO: 4735728 - DNA, 25 bp, Homo sapien
ttaggaaacggtgagggcatctaag

SEQ ID NO: 4735729 - DNA, 25 bp, Homo sapien
aggaaacggtgagggcatctaagga

SEQ ID NO: 4735730 - DNA, 25 bp, Homo sapien
gaacacgcagttgggaactgtgaca

SEQ ID NO: 4735731 - DNA, 25 bp, Homo sapien
actgctgcgtgaacacgcagttggg

SEQ ID NO: 4735732 - DNA, 25 bp, Homo sapien
tgcgtgaacacgcagttgggaactg

SEQ ID NO: 4735733 - DNA, 25 bp, Homo sapien
cacaactgctgcgtgaacacgcagt

SEQ ID NO: 4735734 - DNA, 25 bp, Homo sapien
gcttttgagtgctacacagtgttgg

SEQ ID NO: 4735735 - DNA, 25 bp, Homo sapien
tttagggggcttttgagtgctacac

SEQ ID NO: 4735736 - DNA, 25 bp, Homo sapien
cacagtgttggtgtagttttgaagg

SEQ ID NO: 4735737 - DNA, 25 bp, Homo sapien
tagttttgaaggacggtagcaatgt

SEQ ID NO: 4735738 - DNA, 25 bp, Homo sapien
tcgaagaacctgcaacacagtccat

SEQ ID NO: 4735739 - DNA, 25 bp, Homo sapien
ttccctcgaagaacctgcaacacag

SEQ ID NO: 4735740 - DNA, 25 bp, Homo sapien
tactccttggataatggggattccc

SEQ ID NO: 4735741 - DNA, 25 bp, Homo sapien
atggggattccctcgaagaacctgc

SEQ ID NO: 4735742 - DNA, 25 bp, Homo sapien
gcaagccgtttgtcccagattctgg

SEQ ID NO: 4735743 - DNA, 25 bp, Homo sapien
agtgtgtggctcgactgctcttagc

SEQ ID NO: 4735744 - DNA, 25 bp, Homo sapien
aggacatccaataaaaaagcctctc

SEQ ID NO: 4735745 - DNA, 25 bp, Homo sapien
catttttggtgtagctgagtgtgtg

SEQ ID NO: 4735746 - DNA, 25 bp, Homo sapien
tttgctcctgggatgaaatgtaaga

SEQ ID NO: 4735747 - DNA, 25 bp, Homo sapien
ctgaattctaagaacttttaagcct

SEQ ID NO: 4735748 - DNA, 25 bp, Homo sapien
gctttggcgctgatcctatcctgaa

SEQ ID NO: 4735749 - DNA, 25 bp, Homo sapien
tcagctccagagtcagctttggcgc

SEQ ID NO: 4735750 - DNA, 25 bp, Homo sapien
ggcaaggtctacatcagagtcttcc

SEQ ID NO: 4735751 - DNA, 25 bp, Homo sapien
ccagaaatttctggcaaggtctaca

SEQ ID NO: 4735752 - DNA, 25 bp, Homo sapien
caagatgggcgtggtcttgcacagt

SEQ ID NO: 4735753 - DNA, 25 bp, Homo sapien
tccttttcttgtcctccaagatggg

SEQ ID NO: 4735754 - DNA, 25 bp, Homo sapien
gggcaacgggaggtaagctgtccac

SEQ ID NO: 4735755 - DNA, 25 bp, Homo sapien
aacgggaggtaagctgtccacagcc

SEQ ID NO: 4735756 - DNA, 25 bp, Homo sapien
caacgggaggtaagctgtccacagc

SEQ ID NO: 4735757 - DNA, 25 bp, Homo sapien
gaagcaggaagtggggcaacgggag

SEQ ID NO: 4735758 - DNA, 25 bp, Homo sapien
tgttatccgtttcaaaatgtaggcc

SEQ ID NO: 4735759 - DNA, 25 bp, Homo sapien
tggagcaggtgttatccgtttcaaa

SEQ ID NO: 4735760 - DNA, 25 bp, Homo sapien
aatgtaggcctaactggtgcatctt

SEQ ID NO: 4735761 - DNA, 25 bp, Homo sapien
gcaaattattccttcccaagtcatg

SEQ ID NO: 4735762 - DNA, 25 bp, Homo sapien
aaatgtaagccagtttgtcacatag

SEQ ID NO: 4735763 - DNA, 25 bp, Homo sapien
cataggttctgacacttatgagtca

SEQ ID NO: 4735764 - DNA, 25 bp, Homo sapien
aatgtaagccagtttgtcacatagg

SEQ ID NO: 4735765 - DNA, 25 bp, Homo sapien
gtcacataggttctgacacttatga

SEQ ID NO: 4735766 - DNA, 25 bp, Homo sapien
ggctcccgtcttacatcgtttgtca

SEQ ID NO: 4735767 - DNA, 25 bp, Homo sapien
gggcttttgttatatgtcctaatgg

SEQ ID NO: 4735768 - DNA, 25 bp, Homo sapien
tgtcctaatggaggctcccgtctta

SEQ ID NO: 4735769 - DNA, 25 bp, Homo sapien
tgttatatgtcctaatggaggctcc

SEQ ID NO: 4735770 - DNA, 25 bp, Homo sapien
aaagggttataggttcctcatgatt

SEQ ID NO: 4735771 - DNA, 25 bp, Homo sapien
ggttataggttcctcatgatttatc

SEQ ID NO: 4735772 - DNA, 25 bp, Homo sapien
gggttataggttcctcatgatttat

SEQ ID NO: 4735773 - DNA, 25 bp, Homo sapien
agggttataggttcctcatgattta

SEQ ID NO: 4735774 - DNA, 25 bp, Homo sapien
tctggctaaagaatggggctttcat

SEQ ID NO: 4735775 - DNA, 25 bp, Homo sapien
aaggatatttctggctaaagaatgg

SEQ ID NO: 4735776 - DNA, 25 bp, Homo sapien
tatttctggctaaagaatggggctt

SEQ ID NO: 4735777 - DNA, 25 bp, Homo sapien
tttctggctaaagaatggggctttc

SEQ ID NO: 4735778 - DNA, 25 bp, Homo sapien
tcatcttgttcaggctttgatggaa

SEQ ID NO: 4735779 - DNA, 25 bp, Homo sapien
cagggccagtagcagagagctcttt

SEQ ID NO: 4735780 - DNA, 25 bp, Homo sapien
tgctccaaggattccttcatcttgt

SEQ ID NO: 4735781 - DNA, 25 bp, Homo sapien
ctttgatggaacagggccagtagca

SEQ ID NO: 4735782 - DNA, 25 bp, Homo sapien
accaacaagtgagttccaatgttcc

SEQ ID NO: 4735783 - DNA, 25 bp, Homo sapien
actttctggcaggattaaatgcgag

SEQ ID NO: 4735784 - DNA, 25 bp, Homo sapien
taagagctatcattctagccctggc

SEQ ID NO: 4735785 - DNA, 25 bp, Homo sapien
tgtagggagctacggcaaatactgg

SEQ ID NO: 4735786 - DNA, 25 bp, Homo sapien
ctttcttagtaatgtgaccttgggc

SEQ ID NO: 4735787 - DNA, 25 bp, Homo sapien
gctctacctgtcatagcaacagtgt

SEQ ID NO: 4735788 - DNA, 25 bp, Homo sapien
tatacacgtaacacccagagaagat

SEQ ID NO: 4735789 - DNA, 25 bp, Homo sapien
caactaggcaggtgcaatgccatca

SEQ ID NO: 4735790 - DNA, 25 bp, Homo sapien
gctggtaggatattacggacatcta

SEQ ID NO: 4735791 - DNA, 25 bp, Homo sapien
aatgggagcatgttggagacactgt

SEQ ID NO: 4735792 - DNA, 25 bp, Homo sapien
tgttctgccctactgaaacctgtgc

SEQ ID NO: 4735793 - DNA, 25 bp, Homo sapien
agagtcagtaccctccgaaatggga

SEQ ID NO: 4735794 - DNA, 25 bp, Homo sapien
tattagcagtcatcaaaggttcttg

SEQ ID NO: 4735795 - DNA, 25 bp, Homo sapien
aacgcagctcctttgctggttgttg

SEQ ID NO: 4735796 - DNA, 25 bp, Homo sapien
gtgtacatcttgtaacaacgcagct

SEQ ID NO: 4735797 - DNA, 25 bp, Homo sapien
gctggggcgttcagcagcctgcaca

SEQ ID NO: 4735798 - DNA, 25 bp, Homo sapien
tctgctccccagtgtacatcttgta

SEQ ID NO: 4735799 - DNA, 25 bp, Homo sapien
ccccttgtgagatatactggaggat

SEQ ID NO: 4735800 - DNA, 25 bp, Homo sapien
tgacccacccccttgtgagatatac

SEQ ID NO: 4735801 - DNA, 25 bp, Homo sapien
gagatatactggaggatcagctcca

SEQ ID NO: 4735802 - DNA, 25 bp, Homo sapien
tgttgtctttcctctttggagtgtc

SEQ ID NO: 4735803 - DNA, 25 bp, Homo sapien
aatgcagtattgaaggttgccacag

SEQ ID NO: 4735804 - DNA, 25 bp, Homo sapien
caggattggtgactaccttcttttt

SEQ ID NO: 4735805 - DNA, 25 bp, Homo sapien
aaggttgccacaggattggtgacta

SEQ ID NO: 4735806 - DNA, 25 bp, Homo sapien
gccacaggattggtgactaccttct

SEQ ID NO: 4735807 - DNA, 25 bp, Homo sapien
gtgtatttcagggtagattgccatt

SEQ ID NO: 4735808 - DNA, 25 bp, Homo sapien
aaacagggctgcttatagcaggttg

SEQ ID NO: 4735809 - DNA, 25 bp, Homo sapien
taaaggcaccgacatttccatgagg

SEQ ID NO: 4735810 - DNA, 25 bp, Homo sapien
tagcaggttggatttccagagtcac

SEQ ID NO: 4735811 - DNA, 25 bp, Homo sapien
gctgggcttgtctcggtatagtaac

SEQ ID NO: 4735812 - DNA, 25 bp, Homo sapien
ctgagcagaaatgggacgaagccag

SEQ ID NO: 4735813 - DNA, 25 bp, Homo sapien
tctgcattgacgaaccagctgggct

SEQ ID NO: 4735814 - DNA, 25 bp, Homo sapien
agcagaaatgggacgaagccaggca

SEQ ID NO: 4735815 - DNA, 25 bp, Homo sapien
tgatgagaaatccacgtggtcctat

SEQ ID NO: 4735816 - DNA, 25 bp, Homo sapien
gatagcaacgggactttctccagta

SEQ ID NO: 4735817 - DNA, 25 bp, Homo sapien
ggtgagaatcccgactgttgatagc

SEQ ID NO: 4735818 - DNA, 25 bp, Homo sapien
cgactgttgatagcaacgggacttt

SEQ ID NO: 4735819 - DNA, 25 bp, Homo sapien
tgatttttgcatcaggtcttgctag

SEQ ID NO: 4735820 - DNA, 25 bp, Homo sapien
gatttttgcatcaggtcttgctagc

SEQ ID NO: 4735821 - DNA, 25 bp, Homo sapien
aatgatttttgcatcaggtcttgct

SEQ ID NO: 4735822 - DNA, 25 bp, Homo sapien
gaaatgatttttgcatcaggtcttg

SEQ ID NO: 4735823 - DNA, 25 bp, Homo sapien
tattgactatctcccctcacaaggt

SEQ ID NO: 4735824 - DNA, 25 bp, Homo sapien
gattgctaccactgcacccttaaag

SEQ ID NO: 4735825 - DNA, 25 bp, Homo sapien
ctcttactcagttaggacaaatgac

SEQ ID NO: 4735826 - DNA, 25 bp, Homo sapien
gaagagaggtctaaagtgtaggttc

SEQ ID NO: 4735827 - DNA, 25 bp, Homo sapien
tgttagtcgttggatgacagcaaat

SEQ ID NO: 4735828 - DNA, 25 bp, Homo sapien
gggatagagtatctgtggcaggaga

SEQ ID NO: 4735829 - DNA, 25 bp, Homo sapien
tctgaagtgaaaacggtgttagtcg

SEQ ID NO: 4735830 - DNA, 25 bp, Homo sapien
aggcttgacgttctgaagtgaaaac

SEQ ID NO: 4735831 - DNA, 25 bp, Homo sapien
ggtatctattatgcacctgcaggtg

SEQ ID NO: 4735832 - DNA, 25 bp, Homo sapien
gcaaccatatatacagccctcagag

SEQ ID NO: 4735833 - DNA, 25 bp, Homo sapien
agcaatggtagggaagaaggcaacc

SEQ ID NO: 4735834 - DNA, 25 bp, Homo sapien
ggtatacgccaggtacttatcaata

SEQ ID NO: 4735835 - DNA, 25 bp, Homo sapien
ggaatataaaccctcatgaacatgc

SEQ ID NO: 4735836 - DNA, 25 bp, Homo sapien
taggagtcacgcaccaggaatataa

SEQ ID NO: 4735837 - DNA, 25 bp, Homo sapien
aacatgctgccatagactggtgtga

SEQ ID NO: 4735838 - DNA, 25 bp, Homo sapien
tccctgggataatttattttgacat

SEQ ID NO: 4735839 - DNA, 25 bp, Homo sapien
ctgccacagagaccacgttggaatc

SEQ ID NO: 4735840 - DNA, 25 bp, Homo sapien
ccctcccactgagcattttgaatgc

SEQ ID NO: 4735841 - DNA, 25 bp, Homo sapien
gagaccacgttggaatcaaaactgt

SEQ ID NO: 4735842 - DNA, 25 bp, Homo sapien
cttgatccctcccactgagcatttt

SEQ ID NO: 4735843 - DNA, 25 bp, Homo sapien
cagagccaccatctagcacagagat

SEQ ID NO: 4735844 - DNA, 25 bp, Homo sapien
tgtatgaggcgcaaacctaattctc

SEQ ID NO: 4735845 - DNA, 25 bp, Homo sapien
tccccaagcaacaatgacgaatgag

SEQ ID NO: 4735846 - DNA, 25 bp, Homo sapien
tgatcctaagatggaacaccctgac

SEQ ID NO: 4735847 - DNA, 25 bp, Homo sapien
tgtgctaacaagagagtttcactgc

SEQ ID NO: 4735848 - DNA, 25 bp, Homo sapien
catatgtacctcctctgaagaacgg

SEQ ID NO: 4735849 - DNA, 25 bp, Homo sapien
gagttaggaagtcagattggcacac

SEQ ID NO: 4735850 - DNA, 25 bp, Homo sapien
tgggctcactatataacagatcacg

SEQ ID NO: 4735851 - DNA, 25 bp, Homo sapien
gatgcacatataattttttatttac

SEQ ID NO: 4735852 - DNA, 25 bp, Homo sapien
tggggctgaaccagtgctgataatg

SEQ ID NO: 4735853 - DNA, 25 bp, Homo sapien
tcttttggactcaacttctctacgg

SEQ ID NO: 4735854 - DNA, 25 bp, Homo sapien
aacttctctacggttctgacctggg

SEQ ID NO: 4735855 - DNA, 25 bp, Homo sapien
tcattctccctcaatgcagtgctgc

SEQ ID NO: 4735856 - DNA, 25 bp, Homo sapien
tcttacccaggctcaatactccagg

SEQ ID NO: 4735857 - DNA, 25 bp, Homo sapien
ccattctttacacagtttttataca

SEQ ID NO: 4735858 - DNA, 25 bp, Homo sapien
gtcattaagcttcctgtcttaccca

SEQ ID NO: 4735859 - DNA, 25 bp, Homo sapien
gaaactaattgataatcttacccag

SEQ ID NO: 4735860 - DNA, 25 bp, Homo sapien
gagaacccactgctccgtggcggtc

SEQ ID NO: 4735861 - DNA, 25 bp, Homo sapien
tagtaagcaggagcctcgtaaagcg

SEQ ID NO: 4735862 - DNA, 25 bp, Homo sapien
gtaaagcgcctgtaccatctccacg

SEQ ID NO: 4735863 - DNA, 25 bp, Homo sapien
ataagatagtaagcaggagcctcgt

SEQ ID NO: 4735864 - DNA, 25 bp, Homo sapien
taaattctacgtgatcctccttggg

SEQ ID NO: 4735865 - DNA, 25 bp, Homo sapien
gtaagattcccatgctctgttaggg

SEQ ID NO: 4735866 - DNA, 25 bp, Homo sapien
tgagaactctcatcaatgtgcagcc

SEQ ID NO: 4735867 - DNA, 25 bp, Homo sapien
tagggatccccatttctgtgccatg

SEQ ID NO: 4735868 - DNA, 25 bp, Homo sapien
cgattgggcacagtagtcatctcct

SEQ ID NO: 4735869 - DNA, 25 bp, Homo sapien
accattcccaatttttccctgagtg

SEQ ID NO: 4735870 - DNA, 25 bp, Homo sapien
cacacattgggaggcttcttcatag

SEQ ID NO: 4735871 - DNA, 25 bp, Homo sapien
ggtgattctaacagaaagccagatt

SEQ ID NO: 4735872 - DNA, 25 bp, Homo sapien
ttggttcttgaagcactggtggtag

SEQ ID NO: 4735873 - DNA, 25 bp, Homo sapien
tagtatttggttcttgaagcactgg

SEQ ID NO: 4735874 - DNA, 25 bp, Homo sapien
tatttggttcttgaagcactggtgg

SEQ ID NO: 4735875 - DNA, 25 bp, Homo sapien
ttagtatttggttcttgaagcactg

SEQ ID NO: 4735876 - DNA, 25 bp, Homo sapien
ccacaaggtccttcatcaatactaa

SEQ ID NO: 4735877 - DNA, 25 bp, Homo sapien
cacaaggtccttcatcaatactaaa

SEQ ID NO: 4735878 - DNA, 25 bp, Homo sapien
gggagagaagttgttagcatcacag

SEQ ID NO: 4735879 - DNA, 25 bp, Homo sapien
agttgttagcatcacagagggcttg

SEQ ID NO: 4735880 - DNA, 25 bp, Homo sapien
gaaatcaagctacagatacccgcag

SEQ ID NO: 4735881 - DNA, 25 bp, Homo sapien
caacatggcaatagatgcttctgca

SEQ ID NO: 4735882 - DNA, 25 bp, Homo sapien
taaattgtgacttagagacggtagc

SEQ ID NO: 4735883 - DNA, 25 bp, Homo sapien
tgtctgggctctcacatgtaggaag

SEQ ID NO: 4735884 - DNA, 25 bp, Homo sapien
ctggaagatttccaatccatgaaac

SEQ ID NO: 4735885 - DNA, 25 bp, Homo sapien
gctggaagatttccaatccatgaaa

SEQ ID NO: 4735886 - DNA, 25 bp, Homo sapien
atactatagagtatgtatacgatat

SEQ ID NO: 4735887 - DNA, 25 bp, Homo sapien
tatagagtatgtatacgatatgtag

SEQ ID NO: 4735888 - DNA, 25 bp, Homo sapien
tactatagagtatgtatacgatatg

SEQ ID NO: 4735889 - DNA, 25 bp, Homo sapien
gagtatgtatacgatatgtagtatt

SEQ ID NO: 4735890 - DNA, 25 bp, Homo sapien
tccactgattttagattatgcttac

SEQ ID NO: 4735891 - DNA, 25 bp, Homo sapien
taggcacctacattgccaataggag

SEQ ID NO: 4735892 - DNA, 25 bp, Homo sapien
tattgtgtaaaaagtttcctatgaa

SEQ ID NO: 4735893 - DNA, 25 bp, Homo sapien
taggagggatgtattcattgactga

SEQ ID NO: 4735894 - DNA, 25 bp, Homo sapien
gaacaatgtttggaggattaaccaa

SEQ ID NO: 4735895 - DNA, 25 bp, Homo sapien
tgtaattctgagaaaggtaccagtt

SEQ ID NO: 4735896 - DNA, 25 bp, Homo sapien
tagtaacaaacctatgggccaagca

SEQ ID NO: 4735897 - DNA, 25 bp, Homo sapien
caaaaggggattgttgaagtcaaat

SEQ ID NO: 4735898 - DNA, 25 bp, Homo sapien
aatgagagatactgtcgtggccatc

SEQ ID NO: 4735899 - DNA, 25 bp, Homo sapien
gttagagcaatcctttgggtaaagc

SEQ ID NO: 4735900 - DNA, 25 bp, Homo sapien
ttatccaaggtagcatctcatccca

SEQ ID NO: 4735901 - DNA, 25 bp, Homo sapien
ggtcatgtaggttaggttagagcaa

SEQ ID NO: 4735902 - DNA, 25 bp, Homo sapien
taggttaggttagagcaatcctttg

SEQ ID NO: 4735903 - DNA, 25 bp, Homo sapien
cttcttttccattagctaacagatt

SEQ ID NO: 4735904 - DNA, 25 bp, Homo sapien
ccattagctaacagattgagtcggt

SEQ ID NO: 4735905 - DNA, 25 bp, Homo sapien
cagattgagtcggtttattttaata

SEQ ID NO: 4735906 - DNA, 25 bp, Homo sapien
ttccatgaacagaatcttcttttcc

SEQ ID NO: 4735907 - DNA, 25 bp, Homo sapien
tattgccttgatgtccaaaatagcc

SEQ ID NO: 4735908 - DNA, 25 bp, Homo sapien
actcccataaaagatatttggtgac

SEQ ID NO: 4735909 - DNA, 25 bp, Homo sapien
tcacattctgactcccataaaagat

SEQ ID NO: 4735910 - DNA, 25 bp, Homo sapien
gacttataatgggtcttggtccgaa

SEQ ID NO: 4735911 - DNA, 25 bp, Homo sapien
tcatgacttgaaaaggagaagaatc

SEQ ID NO: 4735912 - DNA, 25 bp, Homo sapien
atgacttgaaaaggagaagaatcac

SEQ ID NO: 4735913 - DNA, 25 bp, Homo sapien
catgacttgaaaaggagaagaatca

SEQ ID NO: 4735914 - DNA, 25 bp, Homo sapien
gcctagcttgccatatgtctgatag

SEQ ID NO: 4735915 - DNA, 25 bp, Homo sapien
ccacatactatgtaatgaagttgca

SEQ ID NO: 4735916 - DNA, 25 bp, Homo sapien
cagtgtgagcaatatgaatgcctag

SEQ ID NO: 4735917 - DNA, 25 bp, Homo sapien
gaagccataacatctacaggatact

SEQ ID NO: 4735918 - DNA, 25 bp, Homo sapien
tctggtactcattctcagacatgaa

SEQ ID NO: 4735919 - DNA, 25 bp, Homo sapien
ttatccttcactctggtactcattc

SEQ ID NO: 4735920 - DNA, 25 bp, Homo sapien
tcactctggtactcattctcagaca

SEQ ID NO: 4735921 - DNA, 25 bp, Homo sapien
cttcactctggtactcattctcaga

SEQ ID NO: 4735922 - DNA, 25 bp, Homo sapien
agatatagaccaacgatttggagac

SEQ ID NO: 4735923 - DNA, 25 bp, Homo sapien
tagaccaacgatttggagacagagt

SEQ ID NO: 4735924 - DNA, 25 bp, Homo sapien
taagcggccctcaccccttgcttca

SEQ ID NO: 4735925 - DNA, 25 bp, Homo sapien
catttattttgtaagcggccctcac

SEQ ID NO: 4735926 - DNA, 25 bp, Homo sapien
taaaattatgactactagaagtcgc

SEQ ID NO: 4735927 - DNA, 25 bp, Homo sapien
ctatacttgaagctaccttgatctc

SEQ ID NO: 4735928 - DNA, 25 bp, Homo sapien
gaagtcgctaattcagagttcagag

SEQ ID NO: 4735929 - DNA, 25 bp, Homo sapien
aaatagcctcccagagactcactaa

SEQ ID NO: 4735930 - DNA, 25 bp, Homo sapien
agtgtctaatcaggttcattttaaa

SEQ ID NO: 4735931 - DNA, 25 bp, Homo sapien
tttgctaataaatgatgaggtgtcc

SEQ ID NO: 4735932 - DNA, 25 bp, Homo sapien
tctaatcaggttcattttaaaccac

SEQ ID NO: 4735933 - DNA, 25 bp, Homo sapien
acctctttgctaataaatgatgagg

SEQ ID NO: 4735934 - DNA, 25 bp, Homo sapien
tctgaattccacagctcaatgaaag

SEQ ID NO: 4735935 - DNA, 25 bp, Homo sapien
atctgaattccacagctcaatgaaa

SEQ ID NO: 4735936 - DNA, 25 bp, Homo sapien
aatctgaattccacagctcaatgaa

SEQ ID NO: 4735937 - DNA, 25 bp, Homo sapien
tccccagtattgacaccagagtcct

SEQ ID NO: 4735938 - DNA, 25 bp, Homo sapien
cagaattagtctgtttgcatgtgtg

SEQ ID NO: 4735939 - DNA, 25 bp, Homo sapien
tgttgcttatttgatctccccagta

SEQ ID NO: 4735940 - DNA, 25 bp, Homo sapien
gcatgtgtgatgcatagcagaccct

SEQ ID NO: 4735941 - DNA, 25 bp, Homo sapien
ttgattttacttgccgatagcttgg

SEQ ID NO: 4735942 - DNA, 25 bp, Homo sapien
ctggagagatttggcaattaatttc

SEQ ID NO: 4735943 - DNA, 25 bp, Homo sapien
cagtcgtacaaaagaagggatgttg

SEQ ID NO: 4735944 - DNA, 25 bp, Homo sapien
taatttctcccagtcgtacaaaaga

SEQ ID NO: 4735945 - DNA, 25 bp, Homo sapien
ggtcagttgagcctctcctcttgca

SEQ ID NO: 4735946 - DNA, 25 bp, Homo sapien
cttccaaagccttggtcagttgagc

SEQ ID NO: 4735947 - DNA, 25 bp, Homo sapien
gattagagcaggatcctccctttcc

SEQ ID NO: 4735948 - DNA, 25 bp, Homo sapien
ccaccagccctgattagagcaggat

SEQ ID NO: 4735949 - DNA, 25 bp, Homo sapien
gacaaggcacgtaattactttcctc

SEQ ID NO: 4735950 - DNA, 25 bp, Homo sapien
gctaagtgacaaatacccctagaga

SEQ ID NO: 4735951 - DNA, 25 bp, Homo sapien
ccctagagacagaggtgtacattcc

SEQ ID NO: 4735952 - DNA, 25 bp, Homo sapien
tcttgctggtgactaaggacaaggc

SEQ ID NO: 4735953 - DNA, 25 bp, Homo sapien
taatacactagctgtgccccgctgt

SEQ ID NO: 4735954 - DNA, 25 bp, Homo sapien
ggacaatcgtggacatctgaacata

SEQ ID NO: 4735955 - DNA, 25 bp, Homo sapien
ccgctgtacatctatcttgggcaaa

SEQ ID NO: 4735956 - DNA, 25 bp, Homo sapien
ccttgtgccctgagtaagctatgac

SEQ ID NO: 4735957 - DNA, 25 bp, Homo sapien
gctgatgccagcttaaaacaattcc

SEQ ID NO: 4735958 - DNA, 25 bp, Homo sapien
cctcatcggaatctgttgtaaatgc

SEQ ID NO: 4735959 - DNA, 25 bp, Homo sapien
aagacctttcctgcatccttacttc

SEQ ID NO: 4735960 - DNA, 25 bp, Homo sapien
caattccagtcaactaagacctttc

SEQ ID NO: 4735961 - DNA, 25 bp, Homo sapien
cattgcagtggtattggcccagtaa

SEQ ID NO: 4735962 - DNA, 25 bp, Homo sapien
caacttgaatatcgcctcctgaaag

SEQ ID NO: 4735963 - DNA, 25 bp, Homo sapien
gcaagttttacagcagccaatgagg

SEQ ID NO: 4735964 - DNA, 25 bp, Homo sapien
taatcatgagcagaggactaacaac

SEQ ID NO: 4735965 - DNA, 25 bp, Homo sapien
tttccaaacaggaaacaatattcca

SEQ ID NO: 4735966 - DNA, 25 bp, Homo sapien
ccaaacaggaaacaatattccacat

SEQ ID NO: 4735967 - DNA, 25 bp, Homo sapien
ctgtttccaaacaggaaacaatatt

SEQ ID NO: 4735968 - DNA, 25 bp, Homo sapien
tccaaacaggaaacaatattccaca

SEQ ID NO: 4735969 - DNA, 25 bp, Homo sapien
caggatctgaggtttcatttcaagc

SEQ ID NO: 4735970 - DNA, 25 bp, Homo sapien
tagccataaaaatgtgcctgcagtg

SEQ ID NO: 4735971 - DNA, 25 bp, Homo sapien
aataaagtagggtagcagctgcccc

SEQ ID NO: 4735972 - DNA, 25 bp, Homo sapien
gcagtgcatgccgtgttctcgagga

SEQ ID NO: 4735973 - DNA, 25 bp, Homo sapien
gagaggaatgttaacgtctccaaaa

SEQ ID NO: 4735974 - DNA, 25 bp, Homo sapien
gattgatggtattgtccaattcttc

SEQ ID NO: 4735975 - DNA, 25 bp, Homo sapien
tccttctaactctgaggttttgaca

SEQ ID NO: 4735976 - DNA, 25 bp, Homo sapien
tctgtctgctggttgtagtactaag

SEQ ID NO: 4735977 - DNA, 25 bp, Homo sapien
tgaaaaatccaacccttgccgtctc

SEQ ID NO: 4735978 - DNA, 25 bp, Homo sapien
cacaagccaactgcttgaaacgaac

SEQ ID NO: 4735979 - DNA, 25 bp, Homo sapien
gttgatcatgataattcccgcatgt

SEQ ID NO: 4735980 - DNA, 25 bp, Homo sapien
ggtgaaatccaagctgggtagttga

SEQ ID NO: 4735981 - DNA, 25 bp, Homo sapien
ctctctagatatagtataggtccca

SEQ ID NO: 4735982 - DNA, 25 bp, Homo sapien
ctctagatatagtataggtcccatt

SEQ ID NO: 4735983 - DNA, 25 bp, Homo sapien
gctctctagatatagtataggtccc

SEQ ID NO: 4735984 - DNA, 25 bp, Homo sapien
ctagatatagtataggtcccatttc

SEQ ID NO: 4735985 - DNA, 25 bp, Homo sapien
tcaatagagggaacgtgaagaattt

SEQ ID NO: 4735986 - DNA, 25 bp, Homo sapien
ttgagactactctggaggccttaga

SEQ ID NO: 4735987 - DNA, 25 bp, Homo sapien
gaatttggctcagacccctttctaa

SEQ ID NO: 4735988 - DNA, 25 bp, Homo sapien
cagagcatatgtacaagtcagggtc

SEQ ID NO: 4735989 - DNA, 25 bp, Homo sapien
ggaaatgaatccactttgagactac

SEQ ID NO: 4735990 - DNA, 25 bp, Homo sapien
gtacggaaacagtcggagcctgttc

SEQ ID NO: 4735991 - DNA, 25 bp, Homo sapien
tagtacggaaacagtcggagcctgt

SEQ ID NO: 4735992 - DNA, 25 bp, Homo sapien
ttagtacggaaacagtcggagcctg

SEQ ID NO: 4735993 - DNA, 25 bp, Homo sapien
tacggaaacagtcggagcctgttcc

SEQ ID NO: 4735994 - DNA, 25 bp, Homo sapien
tattagtaactacagcttgcttccc

SEQ ID NO: 4735995 - DNA, 25 bp, Homo sapien
catattagtaactacagcttgcttc

SEQ ID NO: 4735996 - DNA, 25 bp, Homo sapien
ttagtaactacagcttgcttccctg

SEQ ID NO: 4735997 - DNA, 25 bp, Homo sapien
accatattagtaactacagcttgct

SEQ ID NO: 4735998 - DNA, 25 bp, Homo sapien
tgtgtttgaaagactctaccatgga

SEQ ID NO: 4735999 - DNA, 25 bp, Homo sapien
ggtaggatcattcacttgcattagc

SEQ ID NO: 4736000 - DNA, 25 bp, Homo sapien
tgtgccctggatagccatgttttac

SEQ ID NO: 4736001 - DNA, 25 bp, Homo sapien
gaagaagcagggcataacatcatcc

SEQ ID NO: 4736002 - DNA, 25 bp, Homo sapien
agctgcattctgtttttctcacttc

SEQ ID NO: 4736003 - DNA, 25 bp, Homo sapien
cttgaaagctgcattctgtttttct

SEQ ID NO: 4736004 - DNA, 25 bp, Homo sapien
tgaaagctgcattctgtttttctca

SEQ ID NO: 4736005 - DNA, 25 bp, Homo sapien
aaagctgcattctgtttttctcact

SEQ ID NO: 4736006 - DNA, 25 bp, Homo sapien
ttgtaggacaaaggggataatatta

SEQ ID NO: 4736007 - DNA, 25 bp, Homo sapien
gtaggatttagcacatccaaatatc

SEQ ID NO: 4736008 - DNA, 25 bp, Homo sapien
tgtctttgtaggacaaaggggataa

SEQ ID NO: 4736009 - DNA, 25 bp, Homo sapien
atcagtaggatttagcacatccaaa

SEQ ID NO: 4736010 - DNA, 25 bp, Homo sapien
tgtgcttgcaagtcttcaaaacctg

SEQ ID NO: 4736011 - DNA, 25 bp, Homo sapien
catgtgcttgcaagtcttcaaaacc

SEQ ID NO: 4736012 - DNA, 25 bp, Homo sapien
atgtgcttgcaagtcttcaaaacct

SEQ ID NO: 4736013 - DNA, 25 bp, Homo sapien
aagccaaaggataagggagctacat

SEQ ID NO: 4736014 - DNA, 25 bp, Homo sapien
taagggagctacatacatcagactt

SEQ ID NO: 4736015 - DNA, 25 bp, Homo sapien
ggagctacatacatcagacttcttg

SEQ ID NO: 4736016 - DNA, 25 bp, Homo sapien
tgttaaactcaggaagccaaaggat

SEQ ID NO: 4736017 - DNA, 25 bp, Homo sapien
tatagaaagatagagaacaatgaag

SEQ ID NO: 4736018 - DNA, 25 bp, Homo sapien
ctatagaaagatagagaacaatgaa

SEQ ID NO: 4736019 - DNA, 25 bp, Homo sapien
gaaagatagagaacaatgaagaggg

SEQ ID NO: 4736020 - DNA, 25 bp, Homo sapien
tagaaagatagagaacaatgaagag

SEQ ID NO: 4736021 - DNA, 25 bp, Homo sapien
gctcatcttccgcagatcaagcata

SEQ ID NO: 4736022 - DNA, 25 bp, Homo sapien
gatcaaagccacagaacttgctcat

SEQ ID NO: 4736023 - DNA, 25 bp, Homo sapien
tcatcctgaccaccctgaagcttgt

SEQ ID NO: 4736024 - DNA, 25 bp, Homo sapien
gatcaagcataatctgacatgtctt

SEQ ID NO: 4736025 - DNA, 25 bp, Homo sapien
catgctggtagtggccactttcggt

SEQ ID NO: 4736026 - DNA, 25 bp, Homo sapien
gagcttcttctcataaccctatttc

SEQ ID NO: 4736027 - DNA, 25 bp, Homo sapien
tgaattgttgggctcttcatgctgg

SEQ ID NO: 4736028 - DNA, 25 bp, Homo sapien
tagtggccactttcggtgctctgct

SEQ ID NO: 4736029 - DNA, 25 bp, Homo sapien
caaaggttgataatgcacattgcag

SEQ ID NO: 4736030 - DNA, 25 bp, Homo sapien
gctttgtgaataggcatggaaacac

SEQ ID NO: 4736031 - DNA, 25 bp, Homo sapien
caatctaaaggaagcactgcaagta

SEQ ID NO: 4736032 - DNA, 25 bp, Homo sapien
tacaggtgatactactaccagctga

SEQ ID NO: 4736033 - DNA, 25 bp, Homo sapien
tatcctatatgtctagaatagtacc

SEQ ID NO: 4736034 - DNA, 25 bp, Homo sapien
taaaaaaggttatgcagccatatta

SEQ ID NO: 4736035 - DNA, 25 bp, Homo sapien
aaaatatatcaacacagattttaag

SEQ ID NO: 4736036 - DNA, 25 bp, Homo sapien
tattctttcagtaaggttgaaatta

SEQ ID NO: 4736037 - DNA, 25 bp, Homo sapien
ttttcagtgtgatcatgttgctgtc

SEQ ID NO: 4736038 - DNA, 25 bp, Homo sapien
ttatttaataatggcatgaggtgca

SEQ ID NO: 4736039 - DNA, 25 bp, Homo sapien
cagtcatcttgtttagctgagtccc

SEQ ID NO: 4736040 - DNA, 25 bp, Homo sapien
gctgagtccctgatgctaaaaggac

SEQ ID NO: 4736041 - DNA, 25 bp, Homo sapien
ccagagtgggcattcccacccatgt

SEQ ID NO: 4736042 - DNA, 25 bp, Homo sapien
gtccagagtgggcattcccacccat

SEQ ID NO: 4736043 - DNA, 25 bp, Homo sapien
gttaaaaagtcagaagctgttacaa

SEQ ID NO: 4736044 - DNA, 25 bp, Homo sapien
aagtcagaagctgttacaacaagaa

SEQ ID NO: 4736045 - DNA, 25 bp, Homo sapien
aggatttaaggggaaatggagacat

SEQ ID NO: 4736046 - DNA, 25 bp, Homo sapien
ctgcagccagaaaaatttgaaattg

SEQ ID NO: 4736047 - DNA, 25 bp, Homo sapien
cagaaaaatttgaaattgaaggatt

SEQ ID NO: 4736048 - DNA, 25 bp, Homo sapien
tgaaggatttaaggggaaatggaga

SEQ ID NO: 4736049 - DNA, 25 bp, Homo sapien
gttaagggcaccagcactttggcat

SEQ ID NO: 4736050 - DNA, 25 bp, Homo sapien
actgagacgcacagcatggttaagg

SEQ ID NO: 4736051 - DNA, 25 bp, Homo sapien
tatactgtctgctaaatgcactgct

SEQ ID NO: 4736052 - DNA, 25 bp, Homo sapien
tctgtagatcaactttcaccaagct

SEQ ID NO: 4736053 - DNA, 25 bp, Homo sapien
gccacatgcttctacacaagagctg

SEQ ID NO: 4736054 - DNA, 25 bp, Homo sapien
cacaagagctgatcagcaaaggtct

SEQ ID NO: 4736055 - DNA, 25 bp, Homo sapien
gaccaggcttctgagatccagccat

SEQ ID NO: 4736056 - DNA, 25 bp, Homo sapien
tcagcaaaggtctcactccggtgac

SEQ ID NO: 4736057 - DNA, 25 bp, Homo sapien
taatccagtgaccactctaacatag

SEQ ID NO: 4736058 - DNA, 25 bp, Homo sapien
gagctttaatccagtgaccactcta

SEQ ID NO: 4736059 - DNA, 25 bp, Homo sapien
ccactctaacatagctaaagtccat

SEQ ID NO: 4736060 - DNA, 25 bp, Homo sapien
agtgaccactctaacatagctaaag

SEQ ID NO: 4736061 - DNA, 25 bp, Homo sapien
aatactactgtcttggaaactctag

SEQ ID NO: 4736062 - DNA, 25 bp, Homo sapien
cagggacttgagaaagtaatgcagc

SEQ ID NO: 4736063 - DNA, 25 bp, Homo sapien
gaaactctagctatagctgtcagtg

SEQ ID NO: 4736064 - DNA, 25 bp, Homo sapien
agatgcttaagggtgacagggactt

SEQ ID NO: 4736065 - DNA, 25 bp, Homo sapien
attttcacactgaaaggacaaattc

SEQ ID NO: 4736066 - DNA, 25 bp, Homo sapien
tcaccaatgaaattactccctttat

SEQ ID NO: 4736067 - DNA, 25 bp, Homo sapien
tttcacactgaaaggacaaattcat

SEQ ID NO: 4736068 - DNA, 25 bp, Homo sapien
caccaatgaaattactccctttatt

SEQ ID NO: 4736069 - DNA, 25 bp, Homo sapien
ttccttaagttgaatgttggcctgc

SEQ ID NO: 4736070 - DNA, 25 bp, Homo sapien
tttccttaagttgaatgttggcctg

SEQ ID NO: 4736071 - DNA, 25 bp, Homo sapien
tatttccttaagttgaatgttggcc

SEQ ID NO: 4736072 - DNA, 25 bp, Homo sapien
gtatttccttaagttgaatgttggc

SEQ ID NO: 4736073 - DNA, 25 bp, Homo sapien
ttatagtcacagcagtaagaactgg

SEQ ID NO: 4736074 - DNA, 25 bp, Homo sapien
ccacctgcggaactgtttctgtaag

SEQ ID NO: 4736075 - DNA, 25 bp, Homo sapien
gtgtcatatatgcagagcccacagc

SEQ ID NO: 4736076 - DNA, 25 bp, Homo sapien
tgataaaaggcaacgggccaagagc

SEQ ID NO: 4736077 - DNA, 25 bp, Homo sapien
ctttgaaacagcctttgccactgct

SEQ ID NO: 4736078 - DNA, 25 bp, Homo sapien
tcactgtccctttgaaacagccttt

SEQ ID NO: 4736079 - DNA, 25 bp, Homo sapien
cactgctgcctctactgctactgcc

SEQ ID NO: 4736080 - DNA, 25 bp, Homo sapien
cctctactgctactgccatgattga

SEQ ID NO: 4736081 - DNA, 25 bp, Homo sapien
ctggacactttagaagtgcaggcag

SEQ ID NO: 4736082 - DNA, 25 bp, Homo sapien
atccactggacactttagaagtgca

SEQ ID NO: 4736083 - DNA, 25 bp, Homo sapien
aaaatccactggacactttagaagt

SEQ ID NO: 4736084 - DNA, 25 bp, Homo sapien
tcatgtgattaaaaatccactggac

SEQ ID NO: 4736085 - DNA, 25 bp, Homo sapien
cagctttctgatggcactcatcaat

SEQ ID NO: 4736086 - DNA, 25 bp, Homo sapien
tcatgatacagctttctgatggcac

SEQ ID NO: 4736087 - DNA, 25 bp, Homo sapien
atgatacagctttctgatggcactc

SEQ ID NO: 4736088 - DNA, 25 bp, Homo sapien
gctttctgatggcactcatcaattc

SEQ ID NO: 4736089 - DNA, 25 bp, Homo sapien
tggccacctgtgttccatttacaac

SEQ ID NO: 4736090 - DNA, 25 bp, Homo sapien
taacgctctcacataatcccttgag

SEQ ID NO: 4736091 - DNA, 25 bp, Homo sapien
tatactgtctaacgctctcacataa

SEQ ID NO: 4736092 - DNA, 25 bp, Homo sapien
cttcaactatactgtctaacgctct

SEQ ID NO: 4736093 - DNA, 25 bp, Homo sapien
catgttgcgtgggtttgatgtacag

SEQ ID NO: 4736094 - DNA, 25 bp, Homo sapien
tcacccagggaatatgcataacacg

SEQ ID NO: 4736095 - DNA, 25 bp, Homo sapien
aaattgcatgttgcgtgggtttgat

SEQ ID NO: 4736096 - DNA, 25 bp, Homo sapien
cacgtgataggtgattttttgatcc

SEQ ID NO: 4736097 - DNA, 25 bp, Homo sapien
gcttccaggttatgagcaaagactc

SEQ ID NO: 4736098 - DNA, 25 bp, Homo sapien
acatacagagttgctgcaggctaca

SEQ ID NO: 4736099 - DNA, 25 bp, Homo sapien
gcatgctcaagctcaataacagtat

SEQ ID NO: 4736100 - DNA, 25 bp, Homo sapien
tatttcctgaaacacggctatacag

SEQ ID NO: 4736101 - DNA, 25 bp, Homo sapien
tactgtcatgaaggagtagagtctc

SEQ ID NO: 4736102 - DNA, 25 bp, Homo sapien
tcaaggttaatgtcactcctgttcc

SEQ ID NO: 4736103 - DNA, 25 bp, Homo sapien
gagtctccgagcatttcaaggttaa

SEQ ID NO: 4736104 - DNA, 25 bp, Homo sapien
ttctcttccacaacgaacatgttga

SEQ ID NO: 4736105 - DNA, 25 bp, Homo sapien
ggagctgataaccaattcttctgca

SEQ ID NO: 4736106 - DNA, 25 bp, Homo sapien
aaattgtgaaacaactccagtcacc

SEQ ID NO: 4736107 - DNA, 25 bp, Homo sapien
gacaattgccgctagatttgggcta

SEQ ID NO: 4736108 - DNA, 25 bp, Homo sapien
taattaattccagtagtactgcctg

SEQ ID NO: 4736109 - DNA, 25 bp, Homo sapien
cagggagtcctaagccaaactttgg

SEQ ID NO: 4736110 - DNA, 25 bp, Homo sapien
gaactgcctgtcttatcaagagagg

SEQ ID NO: 4736111 - DNA, 25 bp, Homo sapien
tgtaggaatcatgtggcgtaagcca

SEQ ID NO: 4736112 - DNA, 25 bp, Homo sapien
tgctttctaagaacaacaccccagt

SEQ ID NO: 4736113 - DNA, 25 bp, Homo sapien
cttccacggcaattaagcctgagct

SEQ ID NO: 4736114 - DNA, 25 bp, Homo sapien
ttccacggcaattaagcctgagctg

SEQ ID NO: 4736115 - DNA, 25 bp, Homo sapien
cacggcaattaagcctgagctgctt

SEQ ID NO: 4736116 - DNA, 25 bp, Homo sapien
tccacggcaattaagcctgagctgc

SEQ ID NO: 4736117 - DNA, 25 bp, Homo sapien
tttttctccacgaacaactgatctc

SEQ ID NO: 4736118 - DNA, 25 bp, Homo sapien
tgaacaaggagccagttaggacctc

SEQ ID NO: 4736119 - DNA, 25 bp, Homo sapien
ctccaattaggccatttttgtgctg

SEQ ID NO: 4736120 - DNA, 25 bp, Homo sapien
gatagacaattctggtacattttgg

SEQ ID NO: 4736121 - DNA, 25 bp, Homo sapien
gttctccatggaaggataagagtgc

SEQ ID NO: 4736122 - DNA, 25 bp, Homo sapien
gactgttgtatagtccaaatttcca

SEQ ID NO: 4736123 - DNA, 25 bp, Homo sapien
gcagaaggaaaggactgttgtatag

SEQ ID NO: 4736124 - DNA, 25 bp, Homo sapien
atggttctccatggaaggataagag

SEQ ID NO: 4736125 - DNA, 25 bp, Homo sapien
tatacatgaggtttttgaggctcag

SEQ ID NO: 4736126 - DNA, 25 bp, Homo sapien
catatgatctgagctggaaaggcgt

SEQ ID NO: 4736127 - DNA, 25 bp, Homo sapien
tagaaacgaagctgagactacaacc

SEQ ID NO: 4736128 - DNA, 25 bp, Homo sapien
caatttgtttctcttgatcccaagc

SEQ ID NO: 4736129 - DNA, 25 bp, Homo sapien
ttgccaataaaggtatccaaccagc

SEQ ID NO: 4736130 - DNA, 25 bp, Homo sapien
tgtccaaggcatatctgtgtggcaa

SEQ ID NO: 4736131 - DNA, 25 bp, Homo sapien
tacccaccagccaacttaacttgag

SEQ ID NO: 4736132 - DNA, 25 bp, Homo sapien
ggtagcatggaacgttacccaccag

SEQ ID NO: 4736133 - DNA, 25 bp, Homo sapien
ggtgacctgctctaaatcagacatt

SEQ ID NO: 4736134 - DNA, 25 bp, Homo sapien
taaagtacgggtcctagacagtagc

SEQ ID NO: 4736135 - DNA, 25 bp, Homo sapien
tagtctaaaagcacaggtgacctgc

SEQ ID NO: 4736136 - DNA, 25 bp, Homo sapien
cagtgctcagagtattaggtgctag

SEQ ID NO: 4736137 - DNA, 25 bp, Homo sapien
caaggtgaacctggatactgtctct

SEQ ID NO: 4736138 - DNA, 25 bp, Homo sapien
tcaaaggcccgtcaaggtaataatc

SEQ ID NO: 4736139 - DNA, 25 bp, Homo sapien
gggtcttcactgacagaaggagtca

SEQ ID NO: 4736140 - DNA, 25 bp, Homo sapien
ggtaataatcactccagagatgtgc

SEQ ID NO: 4736141 - DNA, 25 bp, Homo sapien
gaaccaacccagactgtgaacgaca

SEQ ID NO: 4736142 - DNA, 25 bp, Homo sapien
caacccagactgtgaacgacattca

SEQ ID NO: 4736143 - DNA, 25 bp, Homo sapien
agactgtgaacgacattcatggcca

SEQ ID NO: 4736144 - DNA, 25 bp, Homo sapien
cagaaccaacccagactgtgaacga

SEQ ID NO: 4736145 - DNA, 25 bp, Homo sapien
tgttgtccattgcaaagcagtagaa

SEQ ID NO: 4736146 - DNA, 25 bp, Homo sapien
tgttcccgggaactcatcagtctcc

SEQ ID NO: 4736147 - DNA, 25 bp, Homo sapien
tcatcagtctcctgttcattttcaa

SEQ ID NO: 4736148 - DNA, 25 bp, Homo sapien
gaaggtaccagccataaaatgttgt

SEQ ID NO: 4736149 - DNA, 25 bp, Homo sapien
gaagaatgccacaatgaatacagcc

SEQ ID NO: 4736150 - DNA, 25 bp, Homo sapien
cctgcctggtatttaatgaggtgga

SEQ ID NO: 4736151 - DNA, 25 bp, Homo sapien
tttcctaaatgggtacacacttgtg

SEQ ID NO: 4736152 - DNA, 25 bp, Homo sapien
tataattaggttgtgcaggtaagca

SEQ ID NO: 4736153 - DNA, 25 bp, Homo sapien
ctcgagcagtaaagtccatctgaga

SEQ ID NO: 4736154 - DNA, 25 bp, Homo sapien
tgatgtggggacctgctgcaattat

SEQ ID NO: 4736155 - DNA, 25 bp, Homo sapien
gattttgccaaaactacttgattag

SEQ ID NO: 4736156 - DNA, 25 bp, Homo sapien
gctgcaattatcttggtagctcgag

SEQ ID NO: 4736157 - DNA, 25 bp, Homo sapien
tgccacaaggatatacagatttgtc

SEQ ID NO: 4736158 - DNA, 25 bp, Homo sapien
tatacagatttgtcatttgtctaaa

SEQ ID NO: 4736159 - DNA, 25 bp, Homo sapien
gatttgtcatttgtctaaaaggcat

SEQ ID NO: 4736160 - DNA, 25 bp, Homo sapien
ccctgccacaaggatatacagattt

SEQ ID NO: 4736161 - DNA, 25 bp, Homo sapien
ctcaatgccttcagacagttttgca

SEQ ID NO: 4736162 - DNA, 25 bp, Homo sapien
gttttacaacaccaccatgagcatt

SEQ ID NO: 4736163 - DNA, 25 bp, Homo sapien
tctgggcaggtacaatccattttct

SEQ ID NO: 4736164 - DNA, 25 bp, Homo sapien
ttttctctggtactgagttactcaa

SEQ ID NO: 4736165 - DNA, 25 bp, Homo sapien
gctagtctctcaattgctgtttgga

SEQ ID NO: 4736166 - DNA, 25 bp, Homo sapien
cctgcggtgtgagtggcagacctgc

SEQ ID NO: 4736167 - DNA, 25 bp, Homo sapien
gccttgcacctttgcatctgtgggt

SEQ ID NO: 4736168 - DNA, 25 bp, Homo sapien
gcagacctgctagtctctcaattgc

SEQ ID NO: 4736169 - DNA, 25 bp, Homo sapien
tacctctttatggagtgattggcca

SEQ ID NO: 4736170 - DNA, 25 bp, Homo sapien
aggtattaatcctaggacccactgg

SEQ ID NO: 4736171 - DNA, 25 bp, Homo sapien
tgattggccaaccacattcttggtg

SEQ ID NO: 4736172 - DNA, 25 bp, Homo sapien
tacatatagtcatgcaccccataag

SEQ ID NO: 4736173 - DNA, 25 bp, Homo sapien
caatttcaacatggatgctccaact

SEQ ID NO: 4736174 - DNA, 25 bp, Homo sapien
atttcaacatggatgctccaacttc

SEQ ID NO: 4736175 - DNA, 25 bp, Homo sapien
tcatttgggatacttcacatataag

SEQ ID NO: 4736176 - DNA, 25 bp, Homo sapien
aacttcatttgggatacttcacata

SEQ ID NO: 4736177 - DNA, 25 bp, Homo sapien
tgtgaggctgattgactatggatgc

SEQ ID NO: 4736178 - DNA, 25 bp, Homo sapien
cttgcatgtggattaggaagattgc

SEQ ID NO: 4736179 - DNA, 25 bp, Homo sapien
cacactgactgctgatggaggtagt

SEQ ID NO: 4736180 - DNA, 25 bp, Homo sapien
actatggatgcatgggagtgtctgc

SEQ ID NO: 4736181 - DNA, 25 bp, Homo sapien
tgctatcaactttaatgtcttccct

SEQ ID NO: 4736182 - DNA, 25 bp, Homo sapien
tgccataagaagcattcagcagtga

SEQ ID NO: 4736183 - DNA, 25 bp, Homo sapien
tgatttctatacctaagatgccata

SEQ ID NO: 4736184 - DNA, 25 bp, Homo sapien
ctgttcgtatttgctatttcttcat

SEQ ID NO: 4736185 - DNA, 25 bp, Homo sapien
ttccaggttatctgtgccactgaag

SEQ ID NO: 4736186 - DNA, 25 bp, Homo sapien
tctccttgcctcatttccaggttat

SEQ ID NO: 4736187 - DNA, 25 bp, Homo sapien
gaccttgcagtgtactctccttgcc

SEQ ID NO: 4736188 - DNA, 25 bp, Homo sapien
tctcagaccttgcagtgtactctcc

SEQ ID NO: 4736189 - DNA, 25 bp, Homo sapien
atacaggaatatgaacacgtcttgg

SEQ ID NO: 4736190 - DNA, 25 bp, Homo sapien
gaaagacaggtcacaaatacaggaa

SEQ ID NO: 4736191 - DNA, 25 bp, Homo sapien
ggaatatgaacacgtcttgggaagc

SEQ ID NO: 4736192 - DNA, 25 bp, Homo sapien
agccctcaaccaatactctcagaaa

SEQ ID NO: 4736193 - DNA, 25 bp, Homo sapien
agtgtttgaaacatagtactcattc

SEQ ID NO: 4736194 - DNA, 25 bp, Homo sapien
tcagtgtttgaaacatagtactcat

SEQ ID NO: 4736195 - DNA, 25 bp, Homo sapien
tttcagtgtttgaaacatagtactc

SEQ ID NO: 4736196 - DNA, 25 bp, Homo sapien
tgtttgaaacatagtactcattcat

SEQ ID NO: 4736197 - DNA, 25 bp, Homo sapien
tttgtgacctgaatctcacaggcat

SEQ ID NO: 4736198 - DNA, 25 bp, Homo sapien
catagcttttgtgacctgaatctca

SEQ ID NO: 4736199 - DNA, 25 bp, Homo sapien
gttcacatagcttttgtgacctgaa

SEQ ID NO: 4736200 - DNA, 25 bp, Homo sapien
ttcttctgtagcttgttcacatagc

SEQ ID NO: 4736201 - DNA, 25 bp, Homo sapien
tatatttgccacttcgcatgtcaga

SEQ ID NO: 4736202 - DNA, 25 bp, Homo sapien
gtcagaaacatagtaatcatagcac

SEQ ID NO: 4736203 - DNA, 25 bp, Homo sapien
tcagctatttcggaggctgaaagag

SEQ ID NO: 4736204 - DNA, 25 bp, Homo sapien
tttcctgagtggagttctgagggca

SEQ ID NO: 4736205 - DNA, 25 bp, Homo sapien
gaatccagttttatgcctacagcag

SEQ ID NO: 4736206 - DNA, 25 bp, Homo sapien
cagttttatgcctacagcagcatct

SEQ ID NO: 4736207 - DNA, 25 bp, Homo sapien
ggttgaatccagttttatgcctaca

SEQ ID NO: 4736208 - DNA, 25 bp, Homo sapien
gacggttgaatccagttttatgcct

SEQ ID NO: 4736209 - DNA, 25 bp, Homo sapien
acttcatatactgcgtaatatcatg

SEQ ID NO: 4736210 - DNA, 25 bp, Homo sapien
attgatcagcgatgccacacttcat

SEQ ID NO: 4736211 - DNA, 25 bp, Homo sapien
tcatatactgcgtaatatcatgcat

SEQ ID NO: 4736212 - DNA, 25 bp, Homo sapien
acacttcatatactgcgtaatatca

SEQ ID NO: 4736213 - DNA, 25 bp, Homo sapien
tatcatgacggaattgggtggaaca

SEQ ID NO: 4736214 - DNA, 25 bp, Homo sapien
catgacggaattgggtggaacaacc

SEQ ID NO: 4736215 - DNA, 25 bp, Homo sapien
gaacaatatcatgacggaattgggt

SEQ ID NO: 4736216 - DNA, 25 bp, Homo sapien
aatatcatgacggaattgggtggaa

SEQ ID NO: 4736217 - DNA, 25 bp, Homo sapien
tcatcatctacctggtgtacaatct

SEQ ID NO: 4736218 - DNA, 25 bp, Homo sapien
catctacctggtgtacaatctttcc

SEQ ID NO: 4736219 - DNA, 25 bp, Homo sapien
tggtgtacaatctttcctatggtaa

SEQ ID NO: 4736220 - DNA, 25 bp, Homo sapien
caatctttcctatggtaatgtgttc

SEQ ID NO: 4736221 - DNA, 25 bp, Homo sapien
tcctgttagtagttccaaatccgtc

SEQ ID NO: 4736222 - DNA, 25 bp, Homo sapien
gatttgcatgcttagcctctacact

SEQ ID NO: 4736223 - DNA, 25 bp, Homo sapien
ttgtgcccgttggatcaacagaggc

SEQ ID NO: 4736224 - DNA, 25 bp, Homo sapien
aatccgtcttatcatagctaagtgc

SEQ ID NO: 4736225 - DNA, 25 bp, Homo sapien
aaagagtcgactctgagtaaaccat

SEQ ID NO: 4736226 - DNA, 25 bp, Homo sapien
taaagagtcgactctgagtaaacca

SEQ ID NO: 4736227 - DNA, 25 bp, Homo sapien
cctaaagagtcgactctgagtaaac

SEQ ID NO: 4736228 - DNA, 25 bp, Homo sapien
agagtcgactctgagtaaaccataa

SEQ ID NO: 4736229 - DNA, 25 bp, Homo sapien
gaggtaaacttgaatctcagaaatg

SEQ ID NO: 4736230 - DNA, 25 bp, Homo sapien
aggtactctacctgtaattacacca

SEQ ID NO: 4736231 - DNA, 25 bp, Homo sapien
gaaaagaggtaaacttgaatctcag

SEQ ID NO: 4736232 - DNA, 25 bp, Homo sapien
tactctacctgtaattacaccacca

SEQ ID NO: 4736233 - DNA, 25 bp, Homo sapien
taagttcctcaaacaaccaatgctc

SEQ ID NO: 4736234 - DNA, 25 bp, Homo sapien
cgggtctaagaaaggtaatgttatg

SEQ ID NO: 4736235 - DNA, 25 bp, Homo sapien
aatactactaactgtggtccaactc

SEQ ID NO: 4736236 - DNA, 25 bp, Homo sapien
ccttagtaatcatgttaatttgaaa

SEQ ID NO: 4736237 - DNA, 25 bp, Homo sapien
taagtcaagatcttcatccagggac

SEQ ID NO: 4736238 - DNA, 25 bp, Homo sapien
caaaagaaaagctcctagtaggcca

SEQ ID NO: 4736239 - DNA, 25 bp, Homo sapien
gcaattggcagtggcaactcgtcca

SEQ ID NO: 4736240 - DNA, 25 bp, Homo sapien
cttagtaattgagggcaaccggctg

SEQ ID NO: 4736241 - DNA, 25 bp, Homo sapien
cacaatactggtcactttttctata

SEQ ID NO: 4736242 - DNA, 25 bp, Homo sapien
taaagacacaatactggtcactttt

SEQ ID NO: 4736243 - DNA, 25 bp, Homo sapien
aaagcatgtttaggcataataagaa

SEQ ID NO: 4736244 - DNA, 25 bp, Homo sapien
taaaagcatgtttaggcataataag

SEQ ID NO: 4736245 - DNA, 25 bp, Homo sapien
tagcagaccatccaaacatactgag

SEQ ID NO: 4736246 - DNA, 25 bp, Homo sapien
tagtctgtgactcgctcatcgatag

SEQ ID NO: 4736247 - DNA, 25 bp, Homo sapien
tatgtgcaaaacctgcatgtgggca

SEQ ID NO: 4736248 - DNA, 25 bp, Homo sapien
catcgatagctatgagtaacatggc

SEQ ID NO: 4736249 - DNA, 25 bp, Homo sapien
gatgtcagcataagactgagacagt

SEQ ID NO: 4736250 - DNA, 25 bp, Homo sapien
cagaaatgtagctgatgtcagcata

SEQ ID NO: 4736251 - DNA, 25 bp, Homo sapien
taacctgtatcatgacaccatcact

SEQ ID NO: 4736252 - DNA, 25 bp, Homo sapien
tgacaccatcactttaccagaaatg

SEQ ID NO: 4736253 - DNA, 25 bp, Homo sapien
ccgcggcgcggtgcggagctcggaa

SEQ ID NO: 4736254 - DNA, 25 bp, Homo sapien
gctcagccgggttcggacctgcgtc

SEQ ID NO: 4736255 - DNA, 25 bp, Homo sapien
tcagggtgcgggtcaggatctcatc

SEQ ID NO: 4736256 - DNA, 25 bp, Homo sapien
cgaagtggctccagttcaaggcaca

SEQ ID NO: 4736257 - DNA, 25 bp, Homo sapien
ctggcgcccccacacccacccgctc

SEQ ID NO: 4736258 - DNA, 25 bp, Homo sapien
cgccgcctcctggcgcccccacacc

SEQ ID NO: 4736259 - DNA, 25 bp, Homo sapien
cccacacccacccgctccgcggcgc

SEQ ID NO: 4736260 - DNA, 25 bp, Homo sapien
acacccacccgctccgcggcgcccg

SEQ ID NO: 4736261 - DNA, 25 bp, Homo sapien
tagttgcgttcaccggtgcccacag

SEQ ID NO: 4736262 - DNA, 25 bp, Homo sapien
cggtgcccacagctctctatggcaa

SEQ ID NO: 4736263 - DNA, 25 bp, Homo sapien
tgccaccgcgtcctagttgcgttca

SEQ ID NO: 4736264 - DNA, 25 bp, Homo sapien
gtcctagttgcgttcaccggtgccc

SEQ ID NO: 4736265 - DNA, 25 bp, Homo sapien
ggatattctcagttgcggccgctcc

SEQ ID NO: 4736266 - DNA, 25 bp, Homo sapien
gtaaccccacagacacgtcagtcaa

SEQ ID NO: 4736267 - DNA, 25 bp, Homo sapien
gacacgtcagtcaattccctggcat

SEQ ID NO: 4736268 - DNA, 25 bp, Homo sapien
ttgctttctctcgataatgcccctc

SEQ ID NO: 4736269 - DNA, 25 bp, Homo sapien
gaaaggtgtaagaagagccactcca

SEQ ID NO: 4736270 - DNA, 25 bp, Homo sapien
tcctcactagttagcggattgccgg

SEQ ID NO: 4736271 - DNA, 25 bp, Homo sapien
gcacgccgttaagtccgttgggcca

SEQ ID NO: 4736272 - DNA, 25 bp, Homo sapien
ctgctgcagcgcgaaggtgtctacg

SEQ ID NO: 4736273 - DNA, 25 bp, Homo sapien
tgccttttcaactgtgagacagagg

SEQ ID NO: 4736274 - DNA, 25 bp, Homo sapien
tgcaacagagcgctactctgccttt

SEQ ID NO: 4736275 - DNA, 25 bp, Homo sapien
ttcgcgaatatctatggcttcggac

SEQ ID NO: 4736276 - DNA, 25 bp, Homo sapien
ccctctggggcttcgcgaatatcta

SEQ ID NO: 4736277 - DNA, 25 bp, Homo sapien
ctgctagcggaaaacgcaaagttgc

SEQ ID NO: 4736278 - DNA, 25 bp, Homo sapien
tgctagcggaaaacgcaaagttgcc

SEQ ID NO: 4736279 - DNA, 25 bp, Homo sapien
caggttcctttgctctggcgctgga

SEQ ID NO: 4736280 - DNA, 25 bp, Homo sapien
tgctctggcgctggatgctccgctc

SEQ ID NO: 4736281 - DNA, 25 bp, Homo sapien
aattggaaggcggttgactttgccg

SEQ ID NO: 4736282 - DNA, 25 bp, Homo sapien
gagttcttgactgtccctctccaaa

SEQ ID NO: 4736283 - DNA, 25 bp, Homo sapien
gaatctcctcaaaatcaagggagtt

SEQ ID NO: 4736284 - DNA, 25 bp, Homo sapien
gccgtctccatcgagaatctcctca

SEQ ID NO: 4736285 - DNA, 25 bp, Homo sapien
ggatgacctctagcagcgctactca

SEQ ID NO: 4736286 - DNA, 25 bp, Homo sapien
gcgcagaagtgaagatttaatacaa

SEQ ID NO: 4736287 - DNA, 25 bp, Homo sapien
gatgaaacttgtaggatgacctcta

SEQ ID NO: 4736288 - DNA, 25 bp, Homo sapien
caaacgtggagtcgcagagcgcaga

SEQ ID NO: 4736289 - DNA, 25 bp, Homo sapien
atcgatccagagcattccacagtga

SEQ ID NO: 4736290 - DNA, 25 bp, Homo sapien
cacagtgagcgttgcggctcccagg

SEQ ID NO: 4736291 - DNA, 25 bp, Homo sapien
ccggtaacttcaggcgcaagtctga

SEQ ID NO: 4736292 - DNA, 25 bp, Homo sapien
gtctgaatttcagggatgaacctgc

SEQ ID NO: 4736293 - DNA, 25 bp, Homo sapien
tttgagccgactcagtgcagaggca

SEQ ID NO: 4736294 - DNA, 25 bp, Homo sapien
ctgtttgagccgactcagtgcagag

SEQ ID NO: 4736295 - DNA, 25 bp, Homo sapien
ccgactcagtgcagaggcagtgaca

SEQ ID NO: 4736296 - DNA, 25 bp, Homo sapien
tgagccgactcagtgcagaggcagt

SEQ ID NO: 4736297 - DNA, 25 bp, Homo sapien
tggtaggaaatgttgtggaaagtct

SEQ ID NO: 4736298 - DNA, 25 bp, Homo sapien
taggaaatgttgtggaaagtcttgt

SEQ ID NO: 4736299 - DNA, 25 bp, Homo sapien
ggaaatgttgtggaaagtcttgtac

SEQ ID NO: 4736300 - DNA, 25 bp, Homo sapien
agtggtaggaaatgttgtggaaagt

SEQ ID NO: 4736301 - DNA, 25 bp, Homo sapien
gatgtatgcgatgtgtatgcagtag

SEQ ID NO: 4736302 - DNA, 25 bp, Homo sapien
tgcgatgtgtatgcagtagtggtaa

SEQ ID NO: 4736303 - DNA, 25 bp, Homo sapien
gagtttttgatgtatgcgatgtgta

SEQ ID NO: 4736304 - DNA, 25 bp, Homo sapien
tgtgtatgcagtagtggtaatccat

SEQ ID NO: 4736305 - DNA, 25 bp, Homo sapien
acttactatcaaactgatgggaggg

SEQ ID NO: 4736306 - DNA, 25 bp, Homo sapien
gaaactataggcactaagaatcaac

SEQ ID NO: 4736307 - DNA, 25 bp, Homo sapien
tgcaaaactagtggtatcagaatac

SEQ ID NO: 4736308 - DNA, 25 bp, Homo sapien
gcatcaatgccggagatcaaaacat

SEQ ID NO: 4736309 - DNA, 25 bp, Homo sapien
gatttaagcagtcatcaagacctgt

SEQ ID NO: 4736310 - DNA, 25 bp, Homo sapien
ttatgcaaatcacacagccaccaga

SEQ ID NO: 4736311 - DNA, 25 bp, Homo sapien
aaaatgggtggcaccacagtgacac

SEQ ID NO: 4736312 - DNA, 25 bp, Homo sapien
cattggatttgacctaggcttcgcc

SEQ ID NO: 4736313 - DNA, 25 bp, Homo sapien
tattttagatttaggcgttgattga

SEQ ID NO: 4736314 - DNA, 25 bp, Homo sapien
gatttaggcgttgattgagaaagag

SEQ ID NO: 4736315 - DNA, 25 bp, Homo sapien
tcatagcttcatagggtcgcttatt

SEQ ID NO: 4736316 - DNA, 25 bp, Homo sapien
catagggtcgcttattttagattta

SEQ ID NO: 4736317 - DNA, 25 bp, Homo sapien
cagggctaaagggaagacgctcata

SEQ ID NO: 4736318 - DNA, 25 bp, Homo sapien
tccagggctaaagggaagacgctca

SEQ ID NO: 4736319 - DNA, 25 bp, Homo sapien
gctaaagggaagacgctcataaggg

SEQ ID NO: 4736320 - DNA, 25 bp, Homo sapien
cttccagggctaaagggaagacgct

SEQ ID NO: 4736321 - DNA, 25 bp, Homo sapien
ttagaccagaggagtggccgatcca

SEQ ID NO: 4736322 - DNA, 25 bp, Homo sapien
ggccgatccagaagctatgttatta

SEQ ID NO: 4736323 - DNA, 25 bp, Homo sapien
gagatatggtgttaaatgtcagcgg

SEQ ID NO: 4736324 - DNA, 25 bp, Homo sapien
cctgtgaactgcatcaaggtagaat

SEQ ID NO: 4736325 - DNA, 25 bp, Homo sapien
taagtctaatatgacttagcgtatg

SEQ ID NO: 4736326 - DNA, 25 bp, Homo sapien
taatatgacttagcgtatgctattg

SEQ ID NO: 4736327 - DNA, 25 bp, Homo sapien
ttagcgtatgctattgataattatc

SEQ ID NO: 4736328 - DNA, 25 bp, Homo sapien
tctttgaactatatttgcataaatg

SEQ ID NO: 4736329 - DNA, 25 bp, Homo sapien
cctggaacattctagctagctaaaa

SEQ ID NO: 4736330 - DNA, 25 bp, Homo sapien
ccagatacgatagccaaggtttcca

SEQ ID NO: 4736331 - DNA, 25 bp, Homo sapien
aagtgaacattgattacctggaaca

SEQ ID NO: 4736332 - DNA, 25 bp, Homo sapien
ggtaaagatttctgagctagctcgc

SEQ ID NO: 4736333 - DNA, 25 bp, Homo sapien
cactgctgaacaagaccactgagga

SEQ ID NO: 4736334 - DNA, 25 bp, Homo sapien
gatactacagacttttgaaaccacc

SEQ ID NO: 4736335 - DNA, 25 bp, Homo sapien
aagtctgtgatgtttgggatactac

SEQ ID NO: 4736336 - DNA, 25 bp, Homo sapien
tgcacagccatgaaactaggttctt

SEQ ID NO: 4736337 - DNA, 25 bp, Homo sapien
cagagagtgtccttgctaagcactg

SEQ ID NO: 4736338 - DNA, 25 bp, Homo sapien
gagagtgtccttgctaagcactgcc

SEQ ID NO: 4736339 - DNA, 25 bp, Homo sapien
gagtgtccttgctaagcactgccgg

SEQ ID NO: 4736340 - DNA, 25 bp, Homo sapien
tgtccttgctaagcactgccggtac

SEQ ID NO: 4736341 - DNA, 25 bp, Homo sapien
tacattagcaggaacatcatccgtg

SEQ ID NO: 4736342 - DNA, 25 bp, Homo sapien
tcatccgtgttaggaaatccatgga

SEQ ID NO: 4736343 - DNA, 25 bp, Homo sapien
tgttaggaaatccatggatgggtcc

SEQ ID NO: 4736344 - DNA, 25 bp, Homo sapien
ggagacttcagcatctacattagca

SEQ ID NO: 4736345 - DNA, 25 bp, Homo sapien
agagcagtgagctggtgaactgggc

SEQ ID NO: 4736346 - DNA, 25 bp, Homo sapien
cagagcagtgagctggtgaactggg

SEQ ID NO: 4736347 - DNA, 25 bp, Homo sapien
cagtgagctggtgaactgggcagtg

SEQ ID NO: 4736348 - DNA, 25 bp, Homo sapien
agctggtgaactgggcagtggaggg

SEQ ID NO: 4736349 - DNA, 25 bp, Homo sapien
ctccttttggtcatttcttttagag

SEQ ID NO: 4736350 - DNA, 25 bp, Homo sapien
ctatgttctctccttttggtcattt

SEQ ID NO: 4736351 - DNA, 25 bp, Homo sapien
tcatttcttttagaggtttgaagta

SEQ ID NO: 4736352 - DNA, 25 bp, Homo sapien
ttggtcatttcttttagaggtttga

SEQ ID NO: 4736353 - DNA, 25 bp, Homo sapien
tgatcctttgccttcttggttctgg

SEQ ID NO: 4736354 - DNA, 25 bp, Homo sapien
ttcttggttctggaacattctgtac

SEQ ID NO: 4736355 - DNA, 25 bp, Homo sapien
ctctgatcctttgccttcttggttc

SEQ ID NO: 4736356 - DNA, 25 bp, Homo sapien
ttgccttcttggttctggaacattc

SEQ ID NO: 4736357 - DNA, 25 bp, Homo sapien
ccattaaaagcatcgggactccggt

SEQ ID NO: 4736358 - DNA, 25 bp, Homo sapien
atggaacaaggcagttgcaggctgt

SEQ ID NO: 4736359 - DNA, 25 bp, Homo sapien
tgccatgatcatacacacggtttgt

SEQ ID NO: 4736360 - DNA, 25 bp, Homo sapien
gactccggttggtccttgttccatc

SEQ ID NO: 4736361 - DNA, 25 bp, Homo sapien
tctctgtaagtccagaatgtttgtg

SEQ ID NO: 4736362 - DNA, 25 bp, Homo sapien
ggccacagaaattccctgaaggtcg

SEQ ID NO: 4736363 - DNA, 25 bp, Homo sapien
ccctgaaggtcgttcattaagccta

SEQ ID NO: 4736364 - DNA, 25 bp, Homo sapien
gtttgtggagattatgaagactact

SEQ ID NO: 4736365 - DNA, 25 bp, Homo sapien
ctgactgctataagatggtttcaca

SEQ ID NO: 4736366 - DNA, 25 bp, Homo sapien
cagtatagtgtgtagtcctttaaga

SEQ ID NO: 4736367 - DNA, 25 bp, Homo sapien
tcttaatcagttagtcatggcgtct

SEQ ID NO: 4736368 - DNA, 25 bp, Homo sapien
tcaaaactgctctgcatagtgtcag

SEQ ID NO: 4736369 - DNA, 25 bp, Homo sapien
tcccctttatgacacggtattagaa

SEQ ID NO: 4736370 - DNA, 25 bp, Homo sapien
ctttatgacacggtattagaaatca

SEQ ID NO: 4736371 - DNA, 25 bp, Homo sapien
ctccttcccctttatgacacggtat

SEQ ID NO: 4736372 - DNA, 25 bp, Homo sapien
tatgacacggtattagaaatcagca

SEQ ID NO: 4736373 - DNA, 25 bp, Homo sapien
ttgtttgctctattggaagccgact

SEQ ID NO: 4736374 - DNA, 25 bp, Homo sapien
aaaatggccccatagcattatcaac

SEQ ID NO: 4736375 - DNA, 25 bp, Homo sapien
gtaatgtaaccatgtttgtttgctc

SEQ ID NO: 4736376 - DNA, 25 bp, Homo sapien
caacttccaatgtaatgtaaccatg

SEQ ID NO: 4736377 - DNA, 25 bp, Homo sapien
caacgctgtgcttttgttggacgca

SEQ ID NO: 4736378 - DNA, 25 bp, Homo sapien
tttctgacagcagttagtaacccaa

SEQ ID NO: 4736379 - DNA, 25 bp, Homo sapien
catgcttgcagaattattcaacttc

SEQ ID NO: 4736380 - DNA, 25 bp, Homo sapien
ttagtaacccaacgctgtgcttttg

SEQ ID NO: 4736381 - DNA, 25 bp, Homo sapien
cattattgagttttgctatcatgat

SEQ ID NO: 4736382 - DNA, 25 bp, Homo sapien
tgctatcatgatccttactttactt

SEQ ID NO: 4736383 - DNA, 25 bp, Homo sapien
tatcatgatccttactttacttttc

SEQ ID NO: 4736384 - DNA, 25 bp, Homo sapien
gagttttgctatcatgatccttact

SEQ ID NO: 4736385 - DNA, 25 bp, Homo sapien
gaaaacacatagcttagctcaacta

SEQ ID NO: 4736386 - DNA, 25 bp, Homo sapien
tttaacacttaaataacgcatggtg

SEQ ID NO: 4736387 - DNA, 25 bp, Homo sapien
taatttacttataggttgactgaca

SEQ ID NO: 4736388 - DNA, 25 bp, Homo sapien
gactgacaagatctttatcaagtga

SEQ ID NO: 4736389 - DNA, 25 bp, Homo sapien
ttgagaaagccattttattagcata

SEQ ID NO: 4736390 - DNA, 25 bp, Homo sapien
tgagaaagccattttattagcatac

SEQ ID NO: 4736391 - DNA, 25 bp, Homo sapien
tccgtcacgtggcttgtcaatgcct

SEQ ID NO: 4736392 - DNA, 25 bp, Homo sapien
tatatacattgtttcctcgatctgg

SEQ ID NO: 4736393 - DNA, 25 bp, Homo sapien
tcgggctagcgcgtcatccgtcacg

SEQ ID NO: 4736394 - DNA, 25 bp, Homo sapien
gaaaacattgtcactaatttgctgg

SEQ ID NO: 4736395 - DNA, 25 bp, Homo sapien
ctctgggactgggtaagtaaatggt

SEQ ID NO: 4736396 - DNA, 25 bp, Homo sapien
ggcctttcattgatacagccaatgg

SEQ ID NO: 4736397 - DNA, 25 bp, Homo sapien
tgttgcaagaagacctattagagct

SEQ ID NO: 4736398 - DNA, 25 bp, Homo sapien
tctgcccctaaactaataaaccata

SEQ ID NO: 4736399 - DNA, 25 bp, Homo sapien
aaactcatcaattggatcatcagac

SEQ ID NO: 4736400 - DNA, 25 bp, Homo sapien
actcatcaattggatcatcagactg

SEQ ID NO: 4736401 - DNA, 25 bp, Homo sapien
cataaactcatcaattggatcatca

SEQ ID NO: 4736402 - DNA, 25 bp, Homo sapien
catcaattggatcatcagactgttg

SEQ ID NO: 4736403 - DNA, 25 bp, Homo sapien
atcaggccatattcctggacaaact

SEQ ID NO: 4736404 - DNA, 25 bp, Homo sapien
ctatcaggccatattcctggacaaa

SEQ ID NO: 4736405 - DNA, 25 bp, Homo sapien
tacacaccagaaggcatctatcagg

SEQ ID NO: 4736406 - DNA, 25 bp, Homo sapien
tcaatacacaccagaaggcatctat

SEQ ID NO: 4736407 - DNA, 25 bp, Homo sapien
agatatagttttccgaagggctagt

SEQ ID NO: 4736408 - DNA, 25 bp, Homo sapien
atagttttccgaagggctagtcatt

SEQ ID NO: 4736409 - DNA, 25 bp, Homo sapien
atatagttttccgaagggctagtca

SEQ ID NO: 4736410 - DNA, 25 bp, Homo sapien
tagatatagttttccgaagggctag

SEQ ID NO: 4736411 - DNA, 25 bp, Homo sapien
gaatttgtcacaattacgtccaatg

SEQ ID NO: 4736412 - DNA, 25 bp, Homo sapien
caattacgtccaatgtagtcacaca

SEQ ID NO: 4736413 - DNA, 25 bp, Homo sapien
cgtccaatgtagtcacacagcactc

SEQ ID NO: 4736414 - DNA, 25 bp, Homo sapien
tcactcagaatttgtcacaattacg

SEQ ID NO: 4736415 - DNA, 25 bp, Homo sapien
aatgtagacaaatctgatgccccag

SEQ ID NO: 4736416 - DNA, 25 bp, Homo sapien
gatgccccagaagtagtcatttcca

SEQ ID NO: 4736417 - DNA, 25 bp, Homo sapien
tgtcagtgctagatcaaagtgattc

SEQ ID NO: 4736418 - DNA, 25 bp, Homo sapien
tgtccctgtagaaggccacttatag

SEQ ID NO: 4736419 - DNA, 25 bp, Homo sapien
caaggttgccacgtttggggctcca

SEQ ID NO: 4736420 - DNA, 25 bp, Homo sapien
tgctttttagtcatagtccctctta

SEQ ID NO: 4736421 - DNA, 25 bp, Homo sapien
ttgccaaggtaaggaaatcatctga

SEQ ID NO: 4736422 - DNA, 25 bp, Homo sapien
aacacgggatgtcaagtcagaagct

SEQ ID NO: 4736423 - DNA, 25 bp, Homo sapien
gagccactgttagccactagattca

SEQ ID NO: 4736424 - DNA, 25 bp, Homo sapien
agccactgttagccactagattcat

SEQ ID NO: 4736425 - DNA, 25 bp, Homo sapien
tgagccactgttagccactagattc

SEQ ID NO: 4736426 - DNA, 25 bp, Homo sapien
tttgtctaaatacacagcttgcaga

SEQ ID NO: 4736427 - DNA, 25 bp, Homo sapien
ccactgtcagtttgagaaatattaa

SEQ ID NO: 4736428 - DNA, 25 bp, Homo sapien
tatcttccattggtacaaagtcaaa

SEQ ID NO: 4736429 - DNA, 25 bp, Homo sapien
taattttgtctaaatacacagcttg

SEQ ID NO: 4736430 - DNA, 25 bp, Homo sapien
ctgctgattgaagtgtccaggacct

SEQ ID NO: 4736431 - DNA, 25 bp, Homo sapien
tcacttttgttaccgctgttgattt

SEQ ID NO: 4736432 - DNA, 25 bp, Homo sapien
tacctgaatgattcttagcctctgc

SEQ ID NO: 4736433 - DNA, 25 bp, Homo sapien
aagtgtccaggacctatcatgactc

SEQ ID NO: 4736434 - DNA, 25 bp, Homo sapien
ccattttccgctgaaggcattgcat

SEQ ID NO: 4736435 - DNA, 25 bp, Homo sapien
tatatggcttcttgatcagggtgga

SEQ ID NO: 4736436 - DNA, 25 bp, Homo sapien
cagggtggagtcttgttggtaattc

SEQ ID NO: 4736437 - DNA, 25 bp, Homo sapien
tccattttccgctgaaggcattgca

SEQ ID NO: 4736438 - DNA, 25 bp, Homo sapien
acaggaagcctccctttgctagcaa

SEQ ID NO: 4736439 - DNA, 25 bp, Homo sapien
caggaagcctccctttgctagcaaa

SEQ ID NO: 4736440 - DNA, 25 bp, Homo sapien
cacaggaagcctccctttgctagca

SEQ ID NO: 4736441 - DNA, 25 bp, Homo sapien
tcagatagagttgttttgactggtt

SEQ ID NO: 4736442 - DNA, 25 bp, Homo sapien
ctatttccttttggttcgcttagag

SEQ ID NO: 4736443 - DNA, 25 bp, Homo sapien
tggttcgcttagaggaataaaattg

SEQ ID NO: 4736444 - DNA, 25 bp, Homo sapien
cctgatatcagggttatgtttcaga

SEQ ID NO: 4736445 - DNA, 25 bp, Homo sapien
catagaaatcggtaatcaaaatcct

SEQ ID NO: 4736446 - DNA, 25 bp, Homo sapien
tccgtgctaaagatagtctaaagtc

SEQ ID NO: 4736447 - DNA, 25 bp, Homo sapien
gctgctcatttcttatccgtgctaa

SEQ ID NO: 4736448 - DNA, 25 bp, Homo sapien
gtagagataaagtctaactacattg

SEQ ID NO: 4736449 - DNA, 25 bp, Homo sapien
aatctttggcactaagtacagtaaa

SEQ ID NO: 4736450 - DNA, 25 bp, Homo sapien
tgtcagtccctattttgcctttatg

SEQ ID NO: 4736451 - DNA, 25 bp, Homo sapien
aaactgtcaatcacattcttgggct

SEQ ID NO: 4736452 - DNA, 25 bp, Homo sapien
catttgtacttcaacagatttgccc

SEQ ID NO: 4736453 - DNA, 25 bp, Homo sapien
ggcttttgacctgtacacatttgta

SEQ ID NO: 4736454 - DNA, 25 bp, Homo sapien
cagccataaggtaaagcgtactaaa

SEQ ID NO: 4736455 - DNA, 25 bp, Homo sapien
cactcagccataaggtaaagcgtac

SEQ ID NO: 4736456 - DNA, 25 bp, Homo sapien
ttcacatttatattctgtgactgag

SEQ ID NO: 4736457 - DNA, 25 bp, Homo sapien
gcgtactaaacgtccctttgaatca

SEQ ID NO: 4736458 - DNA, 25 bp, Homo sapien
caaaccagcactgagagaatgagac

SEQ ID NO: 4736459 - DNA, 25 bp, Homo sapien
gcttcacaagagttcagcagagttt

SEQ ID NO: 4736460 - DNA, 25 bp, Homo sapien
ctgcttcacaagagttcagcagagt

SEQ ID NO: 4736461 - DNA, 25 bp, Homo sapien
ttcacaagagttcagcagagttttg

SEQ ID NO: 4736462 - DNA, 25 bp, Homo sapien
tctgtttcctaagatgctgtatggc

SEQ ID NO: 4736463 - DNA, 25 bp, Homo sapien
aagatgctgtatggcttggtcctgg

SEQ ID NO: 4736464 - DNA, 25 bp, Homo sapien
gtttcctaagatgctgtatggcttg

SEQ ID NO: 4736465 - DNA, 25 bp, Homo sapien
tcctaagatgctgtatggcttggtc

SEQ ID NO: 4736466 - DNA, 25 bp, Homo sapien
ttggaagatctctgttcttaatcaa

SEQ ID NO: 4736467 - DNA, 25 bp, Homo sapien
agatctctgttcttaatcaatatca

SEQ ID NO: 4736468 - DNA, 25 bp, Homo sapien
ggaagatctctgttcttaatcaata

SEQ ID NO: 4736469 - DNA, 25 bp, Homo sapien
ctctgttcttaatcaatatcaaata

SEQ ID NO: 4736470 - DNA, 25 bp, Homo sapien
tctgtccaggccccttcctttatct

SEQ ID NO: 4736471 - DNA, 25 bp, Homo sapien
tgtccaggccccttcctttatcttc

SEQ ID NO: 4736472 - DNA, 25 bp, Homo sapien
ctttatcttctgcaacttcagtgtt

SEQ ID NO: 4736473 - DNA, 25 bp, Homo sapien
tatcttctgcaacttcagtgttcat

SEQ ID NO: 4736474 - DNA, 25 bp, Homo sapien
gatccggaaccattgggaccagaaa

SEQ ID NO: 4736475 - DNA, 25 bp, Homo sapien
tagaaagatccggaaccattgggac

SEQ ID NO: 4736476 - DNA, 25 bp, Homo sapien
atccttagaaagatccggaaccatt

SEQ ID NO: 4736477 - DNA, 25 bp, Homo sapien
gaaagatccggaaccattgggacca

SEQ ID NO: 4736478 - DNA, 25 bp, Homo sapien
cattgtgtattggtttatggtcagc

SEQ ID NO: 4736479 - DNA, 25 bp, Homo sapien
tttttcaatcccattgcagcttgcc

SEQ ID NO: 4736480 - DNA, 25 bp, Homo sapien
cctgagctacttttgtgattcatct

SEQ ID NO: 4736481 - DNA, 25 bp, Homo sapien
tttatctacgtcagacagcagaaac

SEQ ID NO: 4736482 - DNA, 25 bp, Homo sapien
gcagcttgccaaggagttgcatatc

SEQ ID NO: 4736483 - DNA, 25 bp, Homo sapien
caatggcagtggtacaacaaataaa

SEQ ID NO: 4736484 - DNA, 25 bp, Homo sapien
tggcagtggtacaacaaataaatta

SEQ ID NO: 4736485 - DNA, 25 bp, Homo sapien
tcaatggcagtggtacaacaaataa

SEQ ID NO: 4736486 - DNA, 25 bp, Homo sapien
cttcaatggcagtggtacaacaaat

SEQ ID NO: 4736487 - DNA, 25 bp, Homo sapien
tccaattttcgtctataataactga

SEQ ID NO: 4736488 - DNA, 25 bp, Homo sapien
ttgtagcttggtagtatttcatcat

SEQ ID NO: 4736489 - DNA, 25 bp, Homo sapien
gtctataataactgatagttctgtg

SEQ ID NO: 4736490 - DNA, 25 bp, Homo sapien
tcatcgattgtagcttggtagtatt

SEQ ID NO: 4736491 - DNA, 25 bp, Homo sapien
aggatattgggctgaacaataagaa

SEQ ID NO: 4736492 - DNA, 25 bp, Homo sapien
tagtgaaggatattgggctgaacaa

SEQ ID NO: 4736493 - DNA, 25 bp, Homo sapien
ttgggctgaacaataagaatgatca

SEQ ID NO: 4736494 - DNA, 25 bp, Homo sapien
actgacatagtgaaggatattgggc

SEQ ID NO: 4736495 - DNA, 25 bp, Homo sapien
cataaaatgtttgagggagatacat

SEQ ID NO: 4736496 - DNA, 25 bp, Homo sapien
tcagaaggataatatgccgatgtca

SEQ ID NO: 4736497 - DNA, 25 bp, Homo sapien
catcagaaggataatatgccgatgt

SEQ ID NO: 4736498 - DNA, 25 bp, Homo sapien
ataaaatgtttgagggagatacatc

SEQ ID NO: 4736499 - DNA, 25 bp, Homo sapien
gagataccaggctcataaaaattgg

SEQ ID NO: 4736500 - DNA, 25 bp, Homo sapien
catgcatggcatctggagataccag

SEQ ID NO: 4736501 - DNA, 25 bp, Homo sapien
actgatctgttaccatggtactaat

SEQ ID NO: 4736502 - DNA, 25 bp, Homo sapien
ttaaattggcatctatatttgctga

SEQ ID NO: 4736503 - DNA, 25 bp, Homo sapien
agtctcctccctctgctattctctt

SEQ ID NO: 4736504 - DNA, 25 bp, Homo sapien
ttcctttgagtctcctccctctgct

SEQ ID NO: 4736505 - DNA, 25 bp, Homo sapien
agactcagacctaggtaaccttggg

SEQ ID NO: 4736506 - DNA, 25 bp, Homo sapien
cagtcttcagtgcacatggccagca

SEQ ID NO: 4736507 - DNA, 25 bp, Homo sapien
tgaaatgagttagagggtccagcgt

SEQ ID NO: 4736508 - DNA, 25 bp, Homo sapien
gttgtttagctcaaggcaggcagga

SEQ ID NO: 4736509 - DNA, 25 bp, Homo sapien
tctcagtaagggatgcattggtctc

SEQ ID NO: 4736510 - DNA, 25 bp, Homo sapien
tttaactgccatgcgaaattcctaa

SEQ ID NO: 4736511 - DNA, 25 bp, Homo sapien
tgttgatcgcgccaactatcatcca

SEQ ID NO: 4736512 - DNA, 25 bp, Homo sapien
cattggtctctaagattacagctgc

SEQ ID NO: 4736513 - DNA, 25 bp, Homo sapien
cttcccgtgtactgacctgttatag

SEQ ID NO: 4736514 - DNA, 25 bp, Homo sapien
gtttcttatgctcttatatccattt

SEQ ID NO: 4736515 - DNA, 25 bp, Homo sapien
tgttatagtttactgattctctcag

SEQ ID NO: 4736516 - DNA, 25 bp, Homo sapien
tgattctctcagtttgttcgtataa

SEQ ID NO: 4736517 - DNA, 25 bp, Homo sapien
gagaggtccatttagtttgcactga

SEQ ID NO: 4736518 - DNA, 25 bp, Homo sapien
aagtttaacctgattatagggtgca

SEQ ID NO: 4736519 - DNA, 25 bp, Homo sapien
gaaaatagtaaggtgtcatctcaag

SEQ ID NO: 4736520 - DNA, 25 bp, Homo sapien
taaatgtttcaaacaagaggcagag

SEQ ID NO: 4736521 - DNA, 25 bp, Homo sapien
gttacagtatttagcccaagagtgc

SEQ ID NO: 4736522 - DNA, 25 bp, Homo sapien
gaacaaagccatgggtctgatccaa

SEQ ID NO: 4736523 - DNA, 25 bp, Homo sapien
taatgtacacatgctgatcccactg

SEQ ID NO: 4736524 - DNA, 25 bp, Homo sapien
gatcgagtgcttttgctgtcacccc

SEQ ID NO: 4736525 - DNA, 25 bp, Homo sapien
tcaaataactgcattagttccccag

SEQ ID NO: 4736526 - DNA, 25 bp, Homo sapien
aatggttcttgagcagaataaaatt

SEQ ID NO: 4736527 - DNA, 25 bp, Homo sapien
atggttcttgagcagaataaaattg

SEQ ID NO: 4736528 - DNA, 25 bp, Homo sapien
atgcatacactttctgaagttcttt

SEQ ID NO: 4736529 - DNA, 25 bp, Homo sapien
tcctgctcaagtagggtagttcttt

SEQ ID NO: 4736530 - DNA, 25 bp, Homo sapien
tgtgaccaggtgtgcatctcccggt

SEQ ID NO: 4736531 - DNA, 25 bp, Homo sapien
gctcaagtagggtagttctttgcaa

SEQ ID NO: 4736532 - DNA, 25 bp, Homo sapien
gttctttgactgcatatgagtaaat

SEQ ID NO: 4736533 - DNA, 25 bp, Homo sapien
acagaatagttcactgattgcagca

SEQ ID NO: 4736534 - DNA, 25 bp, Homo sapien
ggtgctgaacctgagactgggatcc

SEQ ID NO: 4736535 - DNA, 25 bp, Homo sapien
ctgcaaagacagaatagttcactga

SEQ ID NO: 4736536 - DNA, 25 bp, Homo sapien
gaacctgagactgggatcctcagga

SEQ ID NO: 4736537 - DNA, 25 bp, Homo sapien
ctctctgtggattggattgctgtct

SEQ ID NO: 4736538 - DNA, 25 bp, Homo sapien
ctgaattagctctctgtggattgga

SEQ ID NO: 4736539 - DNA, 25 bp, Homo sapien
tgttctgaattagctctctgtggat

SEQ ID NO: 4736540 - DNA, 25 bp, Homo sapien
gattggattgctgtcttgtcttctg

SEQ ID NO: 4736541 - DNA, 25 bp, Homo sapien
ccatggtgagctttaattgcaccac

SEQ ID NO: 4736542 - DNA, 25 bp, Homo sapien
gccatggtgagctttaattgcacca

SEQ ID NO: 4736543 - DNA, 25 bp, Homo sapien
ctgttgatctcaggcgttcaaggcc

SEQ ID NO: 4736544 - DNA, 25 bp, Homo sapien
gaatatctgttgatctcaggcgttc

SEQ ID NO: 4736545 - DNA, 25 bp, Homo sapien
tgagaatgcccttgcgaatccagac

SEQ ID NO: 4736546 - DNA, 25 bp, Homo sapien
cttgcgaatccagaccttacccttt

SEQ ID NO: 4736547 - DNA, 25 bp, Homo sapien
ttttttgttgatggttcatgtctct

SEQ ID NO: 4736548 - DNA, 25 bp, Homo sapien
gccactcaagcctcaaccttcctct

SEQ ID NO: 4736549 - DNA, 25 bp, Homo sapien
ccttagtgaagctgtttgccctata

SEQ ID NO: 4736550 - DNA, 25 bp, Homo sapien
cttagtgaagctgtttgccctataa

SEQ ID NO: 4736551 - DNA, 25 bp, Homo sapien
accttagtgaagctgtttgccctat

SEQ ID NO: 4736552 - DNA, 25 bp, Homo sapien
ttagtgaagctgtttgccctataat

SEQ ID NO: 4736553 - DNA, 25 bp, Homo sapien
tgttataaagattccagatctgggc

SEQ ID NO: 4736554 - DNA, 25 bp, Homo sapien
gattccagatctgggccaccgaggt

SEQ ID NO: 4736555 - DNA, 25 bp, Homo sapien
caaagtgtatgttataaagattcca

SEQ ID NO: 4736556 - DNA, 25 bp, Homo sapien
cccagcatcaaagtgtatgttataa

SEQ ID NO: 4736557 - DNA, 25 bp, Homo sapien
catgcctgagtttgggtcataattt

SEQ ID NO: 4736558 - DNA, 25 bp, Homo sapien
gtcctgtccaatagttccccttgtg

SEQ ID NO: 4736559 - DNA, 25 bp, Homo sapien
gtgcatatctgcgtgcagtattggg

SEQ ID NO: 4736560 - DNA, 25 bp, Homo sapien
cctcatgaagttgagttgtatgtgc

SEQ ID NO: 4736561 - DNA, 25 bp, Homo sapien
gtcttgtatcatctctaggatttac

SEQ ID NO: 4736562 - DNA, 25 bp, Homo sapien
agtcttgtatcatctctaggattta

SEQ ID NO: 4736563 - DNA, 25 bp, Homo sapien
ctgaattagggatttaagtcttgta

SEQ ID NO: 4736564 - DNA, 25 bp, Homo sapien
ttagggatttaagtcttgtatcatc

SEQ ID NO: 4736565 - DNA, 25 bp, Homo sapien
tcttgagcattagatattggcgtac

SEQ ID NO: 4736566 - DNA, 25 bp, Homo sapien
gagcattagatattggcgtactgat

SEQ ID NO: 4736567 - DNA, 25 bp, Homo sapien
gcattagatattggcgtactgatca

SEQ ID NO: 4736568 - DNA, 25 bp, Homo sapien
tcttttcttgagcattagatattgg

SEQ ID NO: 4736569 - DNA, 25 bp, Homo sapien
aatatcaaatgcatgagaatcatat

SEQ ID NO: 4736570 - DNA, 25 bp, Homo sapien
tcaaatgcatgagaatcatatgggc

SEQ ID NO: 4736571 - DNA, 25 bp, Homo sapien
acatatggttccctttttacataca

SEQ ID NO: 4736572 - DNA, 25 bp, Homo sapien
ttttaataggatcatgtctctcact

SEQ ID NO: 4736573 - DNA, 25 bp, Homo sapien
cttgtcattaagatgggttctgcca

SEQ ID NO: 4736574 - DNA, 25 bp, Homo sapien
ggtcctgcgcacaatgaagtggttt

SEQ ID NO: 4736575 - DNA, 25 bp, Homo sapien
gggtcatcttcaggatatttggaag

SEQ ID NO: 4736576 - DNA, 25 bp, Homo sapien
tgttcttcctcgctaagttgagaca

SEQ ID NO: 4736577 - DNA, 25 bp, Homo sapien
atgcttcgggggtaacttccctgct

SEQ ID NO: 4736578 - DNA, 25 bp, Homo sapien
tgcttcgggggtaacttccctgctg

SEQ ID NO: 4736579 - DNA, 25 bp, Homo sapien
tctggatgcttcgggggtaacttcc

SEQ ID NO: 4736580 - DNA, 25 bp, Homo sapien
gatgcttcgggggtaacttccctgc

SEQ ID NO: 4736581 - DNA, 25 bp, Homo sapien
ttcagaccaggtagaataaacctgc

SEQ ID NO: 4736582 - DNA, 25 bp, Homo sapien
gaagctgagctccacaaggatttaa

SEQ ID NO: 4736583 - DNA, 25 bp, Homo sapien
tatccatgggtatttccttgagaac

SEQ ID NO: 4736584 - DNA, 25 bp, Homo sapien
tgctgctactaatcttccagaagca

SEQ ID NO: 4736585 - DNA, 25 bp, Homo sapien
aaatgcctctcaatagtaagacaaa

SEQ ID NO: 4736586 - DNA, 25 bp, Homo sapien
aatcttagtaatctcttacccatat

SEQ ID NO: 4736587 - DNA, 25 bp, Homo sapien
atagtaagacaaacccagcattgca

SEQ ID NO: 4736588 - DNA, 25 bp, Homo sapien
aaatatatctcttcattgggttttc

SEQ ID NO: 4736589 - DNA, 25 bp, Homo sapien
gactctgggcactaacgagaacgtg

SEQ ID NO: 4736590 - DNA, 25 bp, Homo sapien
tgaagcaaagttgtggctgagcccg

SEQ ID NO: 4736591 - DNA, 25 bp, Homo sapien
caccgcagccggtatattgatggcg

SEQ ID NO: 4736592 - DNA, 25 bp, Homo sapien
tgcaccttacagagctggcgggacg

SEQ ID NO: 4736593 - DNA, 25 bp, Homo sapien
ataaagtgtaataaccttgtgggag

SEQ ID NO: 4736594 - DNA, 25 bp, Homo sapien
taaagtgtaataaccttgtgggaga

SEQ ID NO: 4736595 - DNA, 25 bp, Homo sapien
tataaagtgtaataaccttgtggga

SEQ ID NO: 4736596 - DNA, 25 bp, Homo sapien
tgccttctactatcaggcctcttgc

SEQ ID NO: 4736597 - DNA, 25 bp, Homo sapien
gccttctactatcaggcctcttgct

SEQ ID NO: 4736598 - DNA, 25 bp, Homo sapien
ttgccttctactatcaggcctcttg

SEQ ID NO: 4736599 - DNA, 25 bp, Homo sapien
tgatgctcttttgcacgcatctccc

SEQ ID NO: 4736600 - DNA, 25 bp, Homo sapien
ccccgcagctgccaatcttattttt

SEQ ID NO: 4736601 - DNA, 25 bp, Homo sapien
cactgatgctcttttgcacgcatct

SEQ ID NO: 4736602 - DNA, 25 bp, Homo sapien
cgcagctgccaatcttatttttact

SEQ ID NO: 4736603 - DNA, 25 bp, Homo sapien
cctctttggtaaatggttactatgc

SEQ ID NO: 4736604 - DNA, 25 bp, Homo sapien
ggtaaatggttactatgcttggcgc

SEQ ID NO: 4736605 - DNA, 25 bp, Homo sapien
tggttactatgcttggcgctctcat

SEQ ID NO: 4736606 - DNA, 25 bp, Homo sapien
cacctctttggtaaatggttactat

SEQ ID NO: 4736607 - DNA, 25 bp, Homo sapien
tgtcacctctagctccactcacgct

SEQ ID NO: 4736608 - DNA, 25 bp, Homo sapien
gctgaccaccccaactctgtcacct

SEQ ID NO: 4736609 - DNA, 25 bp, Homo sapien
gctccagggctaatgccagtggcca

SEQ ID NO: 4736610 - DNA, 25 bp, Homo sapien
tccactcacgctttcagctccaggg

SEQ ID NO: 4736611 - DNA, 25 bp, Homo sapien
gtgtccattaaggcctgatgttcac

SEQ ID NO: 4736612 - DNA, 25 bp, Homo sapien
tgtccattaaggcctgatgttcacc

SEQ ID NO: 4736613 - DNA, 25 bp, Homo sapien
tgaaagtggtagacgtggaccgcct

SEQ ID NO: 4736614 - DNA, 25 bp, Homo sapien
ggaccagttcgcagtagcagtgaaa

SEQ ID NO: 4736615 - DNA, 25 bp, Homo sapien
gccgttcactggtgggcttaacacg

SEQ ID NO: 4736616 - DNA, 25 bp, Homo sapien
gcagattgcccaggaaagccgttca

SEQ ID NO: 4736617 - DNA, 25 bp, Homo sapien
tgatctgggcaatccctgggagagc

SEQ ID NO: 4736618 - DNA, 25 bp, Homo sapien
tgcagatgcagtaacacccctatga

SEQ ID NO: 4736619 - DNA, 25 bp, Homo sapien
tgggagagcattcacaacgtactct

SEQ ID NO: 4736620 - DNA, 25 bp, Homo sapien
actgttctgtttccttcacgttctg

SEQ ID NO: 4736621 - DNA, 25 bp, Homo sapien
tgaataaaagccaagtgctaatgtc

SEQ ID NO: 4736622 - DNA, 25 bp, Homo sapien
gaataaaagccaagtgctaatgtcc

SEQ ID NO: 4736623 - DNA, 25 bp, Homo sapien
ctgaataaaagccaagtgctaatgt

SEQ ID NO: 4736624 - DNA, 25 bp, Homo sapien
cacagcatgtggtgtctgtatccat

SEQ ID NO: 4736625 - DNA, 25 bp, Homo sapien
ttctgctgtatcagcaccacagcat

SEQ ID NO: 4736626 - DNA, 25 bp, Homo sapien
caccacagcatgtggtgtctgtatc

SEQ ID NO: 4736627 - DNA, 25 bp, Homo sapien
tatcagcaccacagcatgtggtgtc

SEQ ID NO: 4736628 - DNA, 25 bp, Homo sapien
cgaggattttaaccttggtgatgcc

SEQ ID NO: 4736629 - DNA, 25 bp, Homo sapien
gcgaggattttaaccttggtgatgc

SEQ ID NO: 4736630 - DNA, 25 bp, Homo sapien
cggcgaggattttaaccttggtgat

SEQ ID NO: 4736631 - DNA, 25 bp, Homo sapien
ggcgaggattttaaccttggtgatg

SEQ ID NO: 4736632 - DNA, 25 bp, Homo sapien
ccgctggatagtggattgtaaagtg

SEQ ID NO: 4736633 - DNA, 25 bp, Homo sapien
gattgtaaagtggtgtctgaaacca

SEQ ID NO: 4736634 - DNA, 25 bp, Homo sapien
tgtaaagtggtgtctgaaaccaagg

SEQ ID NO: 4736635 - DNA, 25 bp, Homo sapien
agtggattgtaaagtggtgtctgaa

SEQ ID NO: 4736636 - DNA, 25 bp, Homo sapien
ctatctggcgggtggcgttttgtat

SEQ ID NO: 4736637 - DNA, 25 bp, Homo sapien
cattcactatctggcgggtggcgtt

SEQ ID NO: 4736638 - DNA, 25 bp, Homo sapien
gcgggtggcgttttgtatggtttgc

SEQ ID NO: 4736639 - DNA, 25 bp, Homo sapien
gccattcactatctggcgggtggcg

SEQ ID NO: 4736640 - DNA, 25 bp, Homo sapien
ctgatgttcagcagggactcgtact

SEQ ID NO: 4736641 - DNA, 25 bp, Homo sapien
tgttcagcagggactcgtactcctg

SEQ ID NO: 4736642 - DNA, 25 bp, Homo sapien
tcagcagggactcgtactcctgcgc

SEQ ID NO: 4736643 - DNA, 25 bp, Homo sapien
atgttcagcagggactcgtactcct

SEQ ID NO: 4736644 - DNA, 25 bp, Homo sapien
catctgcagggcgtagcgggcttcc

SEQ ID NO: 4736645 - DNA, 25 bp, Homo sapien
tctgcagggcgtagcgggcttccac

SEQ ID NO: 4736646 - DNA, 25 bp, Homo sapien
gtgcaacaggatcccgttgagctgt

SEQ ID NO: 4736647 - DNA, 25 bp, Homo sapien
acaggatcccgttgagctgttccat

SEQ ID NO: 4736648 - DNA, 25 bp, Homo sapien
gctggtcatattgggcccgaatgtc

SEQ ID NO: 4736649 - DNA, 25 bp, Homo sapien
ggatttgggggcatctgcgtccaca

SEQ ID NO: 4736650 - DNA, 25 bp, Homo sapien
gccagctggtcatattgggcccgaa

SEQ ID NO: 4736651 - DNA, 25 bp, Homo sapien
tcctggatttgggggcatctgcgtc

SEQ ID NO: 4736652 - DNA, 25 bp, Homo sapien
gctgcaatctgggcttgccggcctt

SEQ ID NO: 4736653 - DNA, 25 bp, Homo sapien
cagagctgcaatctgggcttgccgg

SEQ ID NO: 4736654 - DNA, 25 bp, Homo sapien
gagctgcaatctgggcttgccggcc

SEQ ID NO: 4736655 - DNA, 25 bp, Homo sapien
tgcaatctgggcttgccggcctttc

SEQ ID NO: 4736656 - DNA, 25 bp, Homo sapien
cctcgaactgtgtctccagctgcat

SEQ ID NO: 4736657 - DNA, 25 bp, Homo sapien
attggtgccatccatgaccttgcag

SEQ ID NO: 4736658 - DNA, 25 bp, Homo sapien
tcagcagcaagtcctgcattgtcca

SEQ ID NO: 4736659 - DNA, 25 bp, Homo sapien
ttggtgccatccatgaccttgcaga

SEQ ID NO: 4736660 - DNA, 25 bp, Homo sapien
ggacattgtctgcagtatttgcaaa

SEQ ID NO: 4736661 - DNA, 25 bp, Homo sapien
agatctgagccctcaggtcctgaat

SEQ ID NO: 4736662 - DNA, 25 bp, Homo sapien
ctgcagaacgatggggacattgtct

SEQ ID NO: 4736663 - DNA, 25 bp, Homo sapien
tctgagccctcaggtcctgaatggt

SEQ ID NO: 4736664 - DNA, 25 bp, Homo sapien
caggccgtcgttcaagtcttgcatg

SEQ ID NO: 4736665 - DNA, 25 bp, Homo sapien
gccaggccgtcgttcaagtcttgca

SEQ ID NO: 4736666 - DNA, 25 bp, Homo sapien
ggaggccaggccgtcgttcaagtct

SEQ ID NO: 4736667 - DNA, 25 bp, Homo sapien
gccgtcgttcaagtcttgcatggtc

SEQ ID NO: 4736668 - DNA, 25 bp, Homo sapien
cgcggccaggtccccggaccccatg

SEQ ID NO: 4736669 - DNA, 25 bp, Homo sapien
gccaggtccccggaccccatgccgc

SEQ ID NO: 4736670 - DNA, 25 bp, Homo sapien
cccggaccccatgccgcccaggaag

SEQ ID NO: 4736671 - DNA, 25 bp, Homo sapien
cccctggccatccccgcggccaggt

SEQ ID NO: 4736672 - DNA, 25 bp, Homo sapien
tgctggcagctgggcgccgtagctg

SEQ ID NO: 4736673 - DNA, 25 bp, Homo sapien
agacgctggccacgctgctggcagc

SEQ ID NO: 4736674 - DNA, 25 bp, Homo sapien
ggaagcagagcccttgcctgcatag

SEQ ID NO: 4736675 - DNA, 25 bp, Homo sapien
agatccaggaagcagagcccttgcc

SEQ ID NO: 4736676 - DNA, 25 bp, Homo sapien
gagaaggtggaacaagtggtgaagc

SEQ ID NO: 4736677 - DNA, 25 bp, Homo sapien
ctagacagagcccagggacccgtag

SEQ ID NO: 4736678 - DNA, 25 bp, Homo sapien
tggtggagaaggtggaacaagtggt

SEQ ID NO: 4736679 - DNA, 25 bp, Homo sapien
agacagagcccagggacccgtagtt

SEQ ID NO: 4736680 - DNA, 25 bp, Homo sapien
ttcacttctcttgagtaagtacata

SEQ ID NO: 4736681 - DNA, 25 bp, Homo sapien
tatatgtctttctgtagataatatt

SEQ ID NO: 4736682 - DNA, 25 bp, Homo sapien
aaataggtatgtatttggtgatatg

SEQ ID NO: 4736683 - DNA, 25 bp, Homo sapien
cttgagtaagtacataagattgtat

SEQ ID NO: 4736684 - DNA, 25 bp, Homo sapien
gcacgtaggcatcgaagacgcttgc

SEQ ID NO: 4736685 - DNA, 25 bp, Homo sapien
cgtaggcatcgaagacgcttgcttc

SEQ ID NO: 4736686 - DNA, 25 bp, Homo sapien
cacgtaggcatcgaagacgcttgct

SEQ ID NO: 4736687 - DNA, 25 bp, Homo sapien
aagcacgtaggcatcgaagacgctt

SEQ ID NO: 4736688 - DNA, 25 bp, Homo sapien
cccattactctccatttgtttacta

SEQ ID NO: 4736689 - DNA, 25 bp, Homo sapien
catgtacctttagcttggatgccat

SEQ ID NO: 4736690 - DNA, 25 bp, Homo sapien
tccatttgtttactactatatgcaa

SEQ ID NO: 4736691 - DNA, 25 bp, Homo sapien
tgcaaatatactacttgcatgtacc

SEQ ID NO: 4736692 - DNA, 25 bp, Homo sapien
tgttcccgtggacaaagcctaccat

SEQ ID NO: 4736693 - DNA, 25 bp, Homo sapien
tagaagcaatgcatcactgttcccg

SEQ ID NO: 4736694 - DNA, 25 bp, Homo sapien
gaaggatgtagtagcaaacaccagt

SEQ ID NO: 4736695 - DNA, 25 bp, Homo sapien
gctgcttggaaatccacttagaagc

SEQ ID NO: 4736696 - DNA, 25 bp, Homo sapien
tagtcttggtccacgacatataatg

SEQ ID NO: 4736697 - DNA, 25 bp, Homo sapien
tgataggctctaaacagtcacaaga

SEQ ID NO: 4736698 - DNA, 25 bp, Homo sapien
tgacactgtcagttatgcatgcctc

SEQ ID NO: 4736699 - DNA, 25 bp, Homo sapien
gcatgcctcaattgttgccctgata

SEQ ID NO: 4736700 - DNA, 25 bp, Homo sapien
actgtaaagctctaatcctgtgacc

SEQ ID NO: 4736701 - DNA, 25 bp, Homo sapien
aagctctaatcctgtgaccttcacc

SEQ ID NO: 4736702 - DNA, 25 bp, Homo sapien
ctacaactgtaaagctctaatcctg

SEQ ID NO: 4736703 - DNA, 25 bp, Homo sapien
tcaaagttctacaactgtaaagctc

SEQ ID NO: 4736704 - DNA, 25 bp, Homo sapien
tgcctctagcctgcagctgaatgtg

SEQ ID NO: 4736705 - DNA, 25 bp, Homo sapien
agcctgcagctgaatgtgcaggctg

SEQ ID NO: 4736706 - DNA, 25 bp, Homo sapien
tgcagctgaatgtgcaggctgccat

SEQ ID NO: 4736707 - DNA, 25 bp, Homo sapien
cctgcagctgaatgtgcaggctgcc

SEQ ID NO: 4736708 - DNA, 25 bp, Homo sapien
ggaaggcagagacctcaaagcttct

SEQ ID NO: 4736709 - DNA, 25 bp, Homo sapien
tggaaggcagagacctcaaagcttc

SEQ ID NO: 4736710 - DNA, 25 bp, Homo sapien
gaaggcagagacctcaaagcttctt

SEQ ID NO: 4736711 - DNA, 25 bp, Homo sapien
tctgaagtccccatttataactcta

SEQ ID NO: 4736712 - DNA, 25 bp, Homo sapien
tcagatctcttatttctgtaatgac

SEQ ID NO: 4736713 - DNA, 25 bp, Homo sapien
aatacttgtaattcctgcgtcttca

SEQ ID NO: 4736714 - DNA, 25 bp, Homo sapien
tttataactctatcccgcagcatca

SEQ ID NO: 4736715 - DNA, 25 bp, Homo sapien
cacccacagagatcagttcaggatg

SEQ ID NO: 4736716 - DNA, 25 bp, Homo sapien
gagatcagttcaggatggattctgg

SEQ ID NO: 4736717 - DNA, 25 bp, Homo sapien
gcatacacccacagagatcagttca

SEQ ID NO: 4736718 - DNA, 25 bp, Homo sapien
cacgcatacacccacagagatcagt

SEQ ID NO: 4736719 - DNA, 25 bp, Homo sapien
caaacgtctgtccacagtcaatggg

SEQ ID NO: 4736720 - DNA, 25 bp, Homo sapien
aacgtctgtccacagtcaatgggtc

SEQ ID NO: 4736721 - DNA, 25 bp, Homo sapien
cccaaacgtctgtccacagtcaatg

SEQ ID NO: 4736722 - DNA, 25 bp, Homo sapien
gtctgtccacagtcaatgggtccat

SEQ ID NO: 4736723 - DNA, 25 bp, Homo sapien
ggttcctcatagataatccgctttt

SEQ ID NO: 4736724 - DNA, 25 bp, Homo sapien
tctctgtcccacaaaatagtttgtt

SEQ ID NO: 4736725 - DNA, 25 bp, Homo sapien
tgttgctccaattggttcctcatag

SEQ ID NO: 4736726 - DNA, 25 bp, Homo sapien
gccttttgcactgtcaagaaccaga

SEQ ID NO: 4736727 - DNA, 25 bp, Homo sapien
gttgttgttgatagcatcactggaa

SEQ ID NO: 4736728 - DNA, 25 bp, Homo sapien
tgttgttgttgatagcatcactgga

SEQ ID NO: 4736729 - DNA, 25 bp, Homo sapien
aagttggcacagtcaatgggtgcat

SEQ ID NO: 4736730 - DNA, 25 bp, Homo sapien
cacaaagcagcatatcatgaagaat

SEQ ID NO: 4736731 - DNA, 25 bp, Homo sapien
cagtcaatgggtgcatcatccacaa

SEQ ID NO: 4736732 - DNA, 25 bp, Homo sapien
caaagcagcatatcatgaagaatga

SEQ ID NO: 4736733 - DNA, 25 bp, Homo sapien
ggcaacaccaggatgatattgtttc

SEQ ID NO: 4736734 - DNA, 25 bp, Homo sapien
cactggcaacaccaggatgatattg

SEQ ID NO: 4736735 - DNA, 25 bp, Homo sapien
ccaggatgatattgtttctcagaaa

SEQ ID NO: 4736736 - DNA, 25 bp, Homo sapien
aacaccaggatgatattgtttctca

SEQ ID NO: 4736737 - DNA, 25 bp, Homo sapien
gatgattggatgacatcacttcata

SEQ ID NO: 4736738 - DNA, 25 bp, Homo sapien
gattggatgacatcacttcataaaa

SEQ ID NO: 4736739 - DNA, 25 bp, Homo sapien
ttccaactcctgatctgcctttttg

SEQ ID NO: 4736740 - DNA, 25 bp, Homo sapien
aactcctgatctgcctttttgaaaa

SEQ ID NO: 4736741 - DNA, 25 bp, Homo sapien
tcaccgctaaaactggtcaattgtg

SEQ ID NO: 4736742 - DNA, 25 bp, Homo sapien
tttcttggtaccctgctgcttgcac

SEQ ID NO: 4736743 - DNA, 25 bp, Homo sapien
tacttccttaagcaaaactctctga

SEQ ID NO: 4736744 - DNA, 25 bp, Homo sapien
tttcaccgaatcctgtggttcctga

SEQ ID NO: 4736745 - DNA, 25 bp, Homo sapien
gctagttctggtgactgaatccctt

SEQ ID NO: 4736746 - DNA, 25 bp, Homo sapien
gttctggtgactgaatcccttttat

SEQ ID NO: 4736747 - DNA, 25 bp, Homo sapien
tagttctggtgactgaatccctttt

SEQ ID NO: 4736748 - DNA, 25 bp, Homo sapien
gggctagttctggtgactgaatccc

SEQ ID NO: 4736749 - DNA, 25 bp, Homo sapien
attcagtacttattccaactgcctc

SEQ ID NO: 4736750 - DNA, 25 bp, Homo sapien
tgcctctctgttagttgttaactta

SEQ ID NO: 4736751 - DNA, 25 bp, Homo sapien
ttcagtacttattccaactgcctct

SEQ ID NO: 4736752 - DNA, 25 bp, Homo sapien
tcagtacttattccaactgcctctc

SEQ ID NO: 4736753 - DNA, 25 bp, Homo sapien
tccatgtgtcactaaattcttctgt

SEQ ID NO: 4736754 - DNA, 25 bp, Homo sapien
cctcattttcaggctccatggaaac

SEQ ID NO: 4736755 - DNA, 25 bp, Homo sapien
gtgaaacagctgtgaatctgtaatc

SEQ ID NO: 4736756 - DNA, 25 bp, Homo sapien
gatgcagatcttgcatctactcggc

SEQ ID NO: 4736757 - DNA, 25 bp, Homo sapien
ccttactacatgttagtgaaacagc

SEQ ID NO: 4736758 - DNA, 25 bp, Homo sapien
gaaactggaaatccttactacatgt

SEQ ID NO: 4736759 - DNA, 25 bp, Homo sapien
tctgtcaggtcctttaaggccttct

SEQ ID NO: 4736760 - DNA, 25 bp, Homo sapien
agctctgtcaggtcctttaaggcct

SEQ ID NO: 4736761 - DNA, 25 bp, Homo sapien
tctttaaacttctcttcaaccttca

SEQ ID NO: 4736762 - DNA, 25 bp, Homo sapien
tgtcaggtcctttaaggccttctct

SEQ ID NO: 4736763 - DNA, 25 bp, Homo sapien
gcatggccgtcacaacaactctgtc

SEQ ID NO: 4736764 - DNA, 25 bp, Homo sapien
tcttgggaagtgaggtttcttatga

SEQ ID NO: 4736765 - DNA, 25 bp, Homo sapien
cagcatggccgtcacaacaactctg

SEQ ID NO: 4736766 - DNA, 25 bp, Homo sapien
gaagtgaggtttcttatgaaataag

SEQ ID NO: 4736767 - DNA, 25 bp, Homo sapien
ccagggaccaggttccagattccag

SEQ ID NO: 4736768 - DNA, 25 bp, Homo sapien
tccagggaccaggttccagattcca

SEQ ID NO: 4736769 - DNA, 25 bp, Homo sapien
ggcacagaacatgtcaggaccttgc

SEQ ID NO: 4736770 - DNA, 25 bp, Homo sapien
acatgtcaggaccttgcccaggatc

SEQ ID NO: 4736771 - DNA, 25 bp, Homo sapien
cagaacatgtcaggaccttgcccag

SEQ ID NO: 4736772 - DNA, 25 bp, Homo sapien
gaggcacagaacatgtcaggacctt

SEQ ID NO: 4736773 - DNA, 25 bp, Homo sapien
tattgtaccagggcctgctcacata

SEQ ID NO: 4736774 - DNA, 25 bp, Homo sapien
catttggttatttgtacgttctgtt

SEQ ID NO: 4736775 - DNA, 25 bp, Homo sapien
tcatttggttatttgtacgttctgt

SEQ ID NO: 4736776 - DNA, 25 bp, Homo sapien
gtcatttggttatttgtacgttctg

SEQ ID NO: 4736777 - DNA, 25 bp, Homo sapien
ctaacccttcgacacagtgcggcgg

SEQ ID NO: 4736778 - DNA, 25 bp, Homo sapien
cggacgatgatgcagtcccggcgca

SEQ ID NO: 4736779 - DNA, 25 bp, Homo sapien
ccggcgcaaaggagctgacatcatg

SEQ ID NO: 4736780 - DNA, 25 bp, Homo sapien
aagggtgtgtggtccaacgccctca

SEQ ID NO: 4736781 - DNA, 25 bp, Homo sapien
tggtagttcattcaacacgtgagag

SEQ ID NO: 4736782 - DNA, 25 bp, Homo sapien
tgtgtccacaacatttaccctaagg

SEQ ID NO: 4736783 - DNA, 25 bp, Homo sapien
cccatgagttgaagaaatatgccca

SEQ ID NO: 4736784 - DNA, 25 bp, Homo sapien
tatcaacatgatcagtgtggagtcc

SEQ ID NO: 4736785 - DNA, 25 bp, Homo sapien
tttggatgatttgcaatattctgcc

SEQ ID NO: 4736786 - DNA, 25 bp, Homo sapien
ttggatgatttgcaatattctgcct

SEQ ID NO: 4736787 - DNA, 25 bp, Homo sapien
ctttggatgatttgcaatattctgc

SEQ ID NO: 4736788 - DNA, 25 bp, Homo sapien
tttggcaggcttgatcctctaccca

SEQ ID NO: 4736789 - DNA, 25 bp, Homo sapien
tggtttctccttatcccataacagt

SEQ ID NO: 4736790 - DNA, 25 bp, Homo sapien
cacccgtggccgaggtttaacatat

SEQ ID NO: 4736791 - DNA, 25 bp, Homo sapien
aaatggttgctatccattccgctgg

SEQ ID NO: 4736792 - DNA, 25 bp, Homo sapien
ttcccactttccagatacagagttg

SEQ ID NO: 4736793 - DNA, 25 bp, Homo sapien
tcctgaatcccatcctgatgatttg

SEQ ID NO: 4736794 - DNA, 25 bp, Homo sapien
ttatcaatgtgaccagtgaaaggtt

SEQ ID NO: 4736795 - DNA, 25 bp, Homo sapien
tacagagttgttatcaatgtgacca

SEQ ID NO: 4736796 - DNA, 25 bp, Homo sapien
tagctgacacccaaagttagaaatg

SEQ ID NO: 4736797 - DNA, 25 bp, Homo sapien
tataaatcagaacaccacctaggca

SEQ ID NO: 4736798 - DNA, 25 bp, Homo sapien
tcatttgggtgcaaagaacagctgc

SEQ ID NO: 4736799 - DNA, 25 bp, Homo sapien
taaggtagtactgtgttcctgctgt

SEQ ID NO: 4736800 - DNA, 25 bp, Homo sapien
ttagttccaatgtcttttatgccgg

SEQ ID NO: 4736801 - DNA, 25 bp, Homo sapien
gttccaatgtcttttatgccggaga

SEQ ID NO: 4736802 - DNA, 25 bp, Homo sapien
ccaatgtcttttatgccggagattt

SEQ ID NO: 4736803 - DNA, 25 bp, Homo sapien
tcttagttccaatgtcttttatgcc

SEQ ID NO: 4736804 - DNA, 25 bp, Homo sapien
gtcatcaaagctaaaggcatcctag

SEQ ID NO: 4736805 - DNA, 25 bp, Homo sapien
cactagaggatgagaaacatgtgga

SEQ ID NO: 4736806 - DNA, 25 bp, Homo sapien
gaatgagccaagtcaccccagtcat

SEQ ID NO: 4736807 - DNA, 25 bp, Homo sapien
gaacattcccagtatagcccactag

SEQ ID NO: 4736808 - DNA, 25 bp, Homo sapien
aaaggtgtacatcccaaaaggtgag

SEQ ID NO: 4736809 - DNA, 25 bp, Homo sapien
tcgattgccacactttactttgggc

SEQ ID NO: 4736810 - DNA, 25 bp, Homo sapien
cagggcctatccaccgaaaaggtgt

SEQ ID NO: 4736811 - DNA, 25 bp, Homo sapien
ttgacataaagagaacagggcctat

SEQ ID NO: 4736812 - DNA, 25 bp, Homo sapien
ttaacagattgagaacaggtctctg

SEQ ID NO: 4736813 - DNA, 25 bp, Homo sapien
tctgagttgccggagaatatgatta

SEQ ID NO: 4736814 - DNA, 25 bp, Homo sapien
agtggctttaacagattgagaacag

SEQ ID NO: 4736815 - DNA, 25 bp, Homo sapien
gagttgccggagaatatgattagac

SEQ ID NO: 4736816 - DNA, 25 bp, Homo sapien
caaaactcaggaagcgatgtataga

SEQ ID NO: 4736817 - DNA, 25 bp, Homo sapien
ctcaggaagcgatgtatagaaatag

SEQ ID NO: 4736818 - DNA, 25 bp, Homo sapien
aactcaggaagcgatgtatagaaat

SEQ ID NO: 4736819 - DNA, 25 bp, Homo sapien
tagaaatagcaaatgggttattagg

SEQ ID NO: 4736820 - DNA, 25 bp, Homo sapien
agattcaatgccaacacccatggct

SEQ ID NO: 4736821 - DNA, 25 bp, Homo sapien
ccagattcaatgccaacacccatgg

SEQ ID NO: 4736822 - DNA, 25 bp, Homo sapien
cagattcaatgccaacacccatggc

SEQ ID NO: 4736823 - DNA, 25 bp, Homo sapien
tccagattcaatgccaacacccatg

SEQ ID NO: 4736824 - DNA, 25 bp, Homo sapien
gaagtcgcactgttatctctccaaa

SEQ ID NO: 4736825 - DNA, 25 bp, Homo sapien
aatgaaaaaggcttcggctaagtga

SEQ ID NO: 4736826 - DNA, 25 bp, Homo sapien
tccaaatctactagaatgaattagt

SEQ ID NO: 4736827 - DNA, 25 bp, Homo sapien
agtatgattactttctttgtgccca

SEQ ID NO: 4736828 - DNA, 25 bp, Homo sapien
agtctttgctgggttgaccagcact

SEQ ID NO: 4736829 - DNA, 25 bp, Homo sapien
tgctgggttgaccagcactgacagg

SEQ ID NO: 4736830 - DNA, 25 bp, Homo sapien
ggtgggtccataactgagtctccat

SEQ ID NO: 4736831 - DNA, 25 bp, Homo sapien
gcactgacagggtgggtccataact

SEQ ID NO: 4736832 - DNA, 25 bp, Homo sapien
cttttccttcattattaatgtggtc

SEQ ID NO: 4736833 - DNA, 25 bp, Homo sapien
cttaatgacacctgaaaatttttct

SEQ ID NO: 4736834 - DNA, 25 bp, Homo sapien
ctcttaatgacacctgaaaattttt

SEQ ID NO: 4736835 - DNA, 25 bp, Homo sapien
tccttttccttcattattaatgtgg

SEQ ID NO: 4736836 - DNA, 25 bp, Homo sapien
tgtttttaccaggaacaggtgctcg

SEQ ID NO: 4736837 - DNA, 25 bp, Homo sapien
tgcagcaaatcaatatagcccttgt

SEQ ID NO: 4736838 - DNA, 25 bp, Homo sapien
taatcttctcacactgtcaagacaa

SEQ ID NO: 4736839 - DNA, 25 bp, Homo sapien
ccaggaacaggtgctcgaggaaaga

SEQ ID NO: 4736840 - DNA, 25 bp, Homo sapien
gtagagtccctaatatcctcatttg

SEQ ID NO: 4736841 - DNA, 25 bp, Homo sapien
gattatctaaaatatcctgtcgtag

SEQ ID NO: 4736842 - DNA, 25 bp, Homo sapien
taatgaaagtatcatcagacacatc

SEQ ID NO: 4736843 - DNA, 25 bp, Homo sapien
tttgttgaagtttaatgaaagtatc

SEQ ID NO: 4736844 - DNA, 25 bp, Homo sapien
gaaagctctgtttagttcccatatt

SEQ ID NO: 4736845 - DNA, 25 bp, Homo sapien
tttgtgtcataactgtcattctgga

SEQ ID NO: 4736846 - DNA, 25 bp, Homo sapien
ggcttggcagccattttatagacag

SEQ ID NO: 4736847 - DNA, 25 bp, Homo sapien
ggtgcacagactggacggtccagac

SEQ ID NO: 4736848 - DNA, 25 bp, Homo sapien
gcagaagtcatagtgccagatggtc

SEQ ID NO: 4736849 - DNA, 25 bp, Homo sapien
cccatgttatcacgggccacttgat

SEQ ID NO: 4736850 - DNA, 25 bp, Homo sapien
agtgccagatggtctgctgttgtgc

SEQ ID NO: 4736851 - DNA, 25 bp, Homo sapien
tatcacgggccacttgataggttta

SEQ ID NO: 4736852 - DNA, 25 bp, Homo sapien
ggtacactgggtagagatcccaaag

SEQ ID NO: 4736853 - DNA, 25 bp, Homo sapien
aacacagcagggttgttcttgggta

SEQ ID NO: 4736854 - DNA, 25 bp, Homo sapien
cagcagggttgttcttgggtacact

SEQ ID NO: 4736855 - DNA, 25 bp, Homo sapien
agctgaactgattcaccacaccagg

SEQ ID NO: 4736856 - DNA, 25 bp, Homo sapien
gcacacaggccgaccagagcacaga

SEQ ID NO: 4736857 - DNA, 25 bp, Homo sapien
ctgcacacaggccgaccagagcaca

SEQ ID NO: 4736858 - DNA, 25 bp, Homo sapien
tgcacacaggccgaccagagcacag

SEQ ID NO: 4736859 - DNA, 25 bp, Homo sapien
tttgctgctgattacctcaaattgt

SEQ ID NO: 4736860 - DNA, 25 bp, Homo sapien
agatttgctgctgattacctcaaat

SEQ ID NO: 4736861 - DNA, 25 bp, Homo sapien
gctgctgattacctcaaattgtcta

SEQ ID NO: 4736862 - DNA, 25 bp, Homo sapien
tgctgctgattacctcaaattgtct

SEQ ID NO: 4736863 - DNA, 25 bp, Homo sapien
gcaaactacgagtcatttctcccca

SEQ ID NO: 4736864 - DNA, 25 bp, Homo sapien
ttttctctgcaaactacgagtcatt

SEQ ID NO: 4736865 - DNA, 25 bp, Homo sapien
ggactcttatcttgccaccaagaag

SEQ ID NO: 4736866 - DNA, 25 bp, Homo sapien
ccttcccttgtgcattctggactct

SEQ ID NO: 4736867 - DNA, 25 bp, Homo sapien
ccattttcacccaattcctctggat

SEQ ID NO: 4736868 - DNA, 25 bp, Homo sapien
ccactgtgctgagattgccgtccca

SEQ ID NO: 4736869 - DNA, 25 bp, Homo sapien
tcacttgaaccctgttgttggcaac

SEQ ID NO: 4736870 - DNA, 25 bp, Homo sapien
tgttggcaacttcagctattatctc

SEQ ID NO: 4736871 - DNA, 25 bp, Homo sapien
ttcttatacttcagcttcactgcct

SEQ ID NO: 4736872 - DNA, 25 bp, Homo sapien
cagcaacatccttcttatacttcag

SEQ ID NO: 4736873 - DNA, 25 bp, Homo sapien
ctgcttttcacggtcacctaagtta

SEQ ID NO: 4736874 - DNA, 25 bp, Homo sapien
cacggtcacctaagttattctgcat

SEQ ID NO: 4736875 - DNA, 25 bp, Homo sapien
aggaaaacttcagacagtggccttt

SEQ ID NO: 4736876 - DNA, 25 bp, Homo sapien
tgaacagaacaggaaaacttcagac

SEQ ID NO: 4736877 - DNA, 25 bp, Homo sapien
cagaacaggaaaacttcagacagtg

SEQ ID NO: 4736878 - DNA, 25 bp, Homo sapien
gaacaggaaaacttcagacagtggc

SEQ ID NO: 4736879 - DNA, 25 bp, Homo sapien
ctccaagttctacgattgcaggggc

SEQ ID NO: 4736880 - DNA, 25 bp, Homo sapien
tctacgattgcaggggcaactctca

SEQ ID NO: 4736881 - DNA, 25 bp, Homo sapien
tcatttatcctccaactggactcca

SEQ ID NO: 4736882 - DNA, 25 bp, Homo sapien
atttatcctccaactggactccaag

SEQ ID NO: 4736883 - DNA, 25 bp, Homo sapien
cacgaatcccagagatgtgatactc

SEQ ID NO: 4736884 - DNA, 25 bp, Homo sapien
tatgacacgaatcccagagatgtga

SEQ ID NO: 4736885 - DNA, 25 bp, Homo sapien
gaatcccagagatgtgatactcaaa

SEQ ID NO: 4736886 - DNA, 25 bp, Homo sapien
ttattgatatgacacgaatcccaga

SEQ ID NO: 4736887 - DNA, 25 bp, Homo sapien
tgcctatctccacacaagacaacat

SEQ ID NO: 4736888 - DNA, 25 bp, Homo sapien
ttttgcctatctccacacaagacaa

SEQ ID NO: 4736889 - DNA, 25 bp, Homo sapien
tcttttttgcctatctccacacaag

SEQ ID NO: 4736890 - DNA, 25 bp, Homo sapien
ttttttgcctatctccacacaagac

SEQ ID NO: 4736891 - DNA, 25 bp, Homo sapien
gatgctcagtgtcaacgtatgaatg

SEQ ID NO: 4736892 - DNA, 25 bp, Homo sapien
tctgctttgaaggaacgagagggat

SEQ ID NO: 4736893 - DNA, 25 bp, Homo sapien
ctttgaaggaacgagagggatgcca

SEQ ID NO: 4736894 - DNA, 25 bp, Homo sapien
ggtttctagctacgtcattttccac

SEQ ID NO: 4736895 - DNA, 25 bp, Homo sapien
tccacatctagccatacttcgtttg

SEQ ID NO: 4736896 - DNA, 25 bp, Homo sapien
cagccaaactctgatccaaaggaag

SEQ ID NO: 4736897 - DNA, 25 bp, Homo sapien
tcgtttgaaagcttcccgggctctg

SEQ ID NO: 4736898 - DNA, 25 bp, Homo sapien
aaggaagccaccgccgtcatatcca

SEQ ID NO: 4736899 - DNA, 25 bp, Homo sapien
tgtgtcgtcaaaggttaggatcccc

SEQ ID NO: 4736900 - DNA, 25 bp, Homo sapien
caaaggttaggatcccctgcacaac

SEQ ID NO: 4736901 - DNA, 25 bp, Homo sapien
tccatgaatcaatgtgtcgtcaaag

SEQ ID NO: 4736902 - DNA, 25 bp, Homo sapien
taggatcccctgcacaactatttca

SEQ ID NO: 4736903 - DNA, 25 bp, Homo sapien
cagtttctcagacaattgtggtggt

SEQ ID NO: 4736904 - DNA, 25 bp, Homo sapien
gatacggctttcctgcatcagcagt

SEQ ID NO: 4736905 - DNA, 25 bp, Homo sapien
tgttttagctgttggcaatcaaggt

SEQ ID NO: 4736906 - DNA, 25 bp, Homo sapien
ggttgtagagatacggctttcctgc

SEQ ID NO: 4736907 - DNA, 25 bp, Homo sapien
tcttctagaatgagacgaatttcaa

SEQ ID NO: 4736908 - DNA, 25 bp, Homo sapien
tctagaatgagacgaatttcaacag

SEQ ID NO: 4736909 - DNA, 25 bp, Homo sapien
aaaagacagtgtcttaagagactct

SEQ ID NO: 4736910 - DNA, 25 bp, Homo sapien
gaatgagacgaatttcaacagtcat

SEQ ID NO: 4736911 - DNA, 25 bp, Homo sapien
tctagctttcagtgtcttaagctca

SEQ ID NO: 4736912 - DNA, 25 bp, Homo sapien
gttactcattataacacttggcata

SEQ ID NO: 4736913 - DNA, 25 bp, Homo sapien
cttggcatatgtgatagtctttctc

SEQ ID NO: 4736914 - DNA, 25 bp, Homo sapien
attcagccacgtttctagctttcag

SEQ ID NO: 4736915 - DNA, 25 bp, Homo sapien
caaaaccatcttgtctaccaaacta

SEQ ID NO: 4736916 - DNA, 25 bp, Homo sapien
catgcgtcataaaaggggttataac

SEQ ID NO: 4736917 - DNA, 25 bp, Homo sapien
tgtcttttctgggatctgtaaactc

SEQ ID NO: 4736918 - DNA, 25 bp, Homo sapien
ccatcttgtctaccaaactaattct

SEQ ID NO: 4736919 - DNA, 25 bp, Homo sapien
tcccagcctgcatcggaagtaacct

SEQ ID NO: 4736920 - DNA, 25 bp, Homo sapien
tctatatccacatagtgtctagctc

SEQ ID NO: 4736921 - DNA, 25 bp, Homo sapien
ggaagtaacctctatatccacatag

SEQ ID NO: 4736922 - DNA, 25 bp, Homo sapien
tagtgtctagctcctgctccactgg

SEQ ID NO: 4736923 - DNA, 25 bp, Homo sapien
ccaaagcagcccgaactctggatgc

SEQ ID NO: 4736924 - DNA, 25 bp, Homo sapien
caaagcagcccgaactctggatgct

SEQ ID NO: 4736925 - DNA, 25 bp, Homo sapien
ctacatgaggagacttaatcctagg

SEQ ID NO: 4736926 - DNA, 25 bp, Homo sapien
tataatagcgagatttcatgtcaca

SEQ ID NO: 4736927 - DNA, 25 bp, Homo sapien
taatcctaggcgatttgaacagaaa

SEQ ID NO: 4736928 - DNA, 25 bp, Homo sapien
ctagtccaaatataatagcgagatt

SEQ ID NO: 4736929 - DNA, 25 bp, Homo sapien
caaggccagttggtctcacgttcat

SEQ ID NO: 4736930 - DNA, 25 bp, Homo sapien
tcctgaaaaggaagtaagtgtcctg

SEQ ID NO: 4736931 - DNA, 25 bp, Homo sapien
gaacatacatggtaacattggcagg

SEQ ID NO: 4736932 - DNA, 25 bp, Homo sapien
ctgtacaagggccagtaaaggagac

SEQ ID NO: 4736933 - DNA, 25 bp, Homo sapien
ctgaacctgggtggtagtggaccct

SEQ ID NO: 4736934 - DNA, 25 bp, Homo sapien
atcgaggaagatatttccccccaga

SEQ ID NO: 4736935 - DNA, 25 bp, Homo sapien
taaaatatcgaggaagatatttccc

SEQ ID NO: 4736936 - DNA, 25 bp, Homo sapien
atatcgaggaagatatttcccccca

SEQ ID NO: 4736937 - DNA, 25 bp, Homo sapien
tttaaaatatcgaggaagatatttc

SEQ ID NO: 4736938 - DNA, 25 bp, Homo sapien
tttataggaaatgtacacaggattg

SEQ ID NO: 4736939 - DNA, 25 bp, Homo sapien
caggattgaagttcttatacccagc

SEQ ID NO: 4736940 - DNA, 25 bp, Homo sapien
attgaagttcttatacccagccctt

SEQ ID NO: 4736941 - DNA, 25 bp, Homo sapien
ggattgaagttcttatacccagccc

SEQ ID NO: 4736942 - DNA, 25 bp, Homo sapien
gttgtctgctgtcacggaacagagt

SEQ ID NO: 4736943 - DNA, 25 bp, Homo sapien
agcatgacggttgtctgctgtcacg

SEQ ID NO: 4736944 - DNA, 25 bp, Homo sapien
agcttcagcatgacggttgtctgct

SEQ ID NO: 4736945 - DNA, 25 bp, Homo sapien
ccaggggcaaatttacaacaggtat

SEQ ID NO: 4736946 - DNA, 25 bp, Homo sapien
gcaatctgcaggatcaccatttcca

SEQ ID NO: 4736947 - DNA, 25 bp, Homo sapien
cttcagcaatctgcaggatcaccat

SEQ ID NO: 4736948 - DNA, 25 bp, Homo sapien
agcaatctgcaggatcaccatttcc

SEQ ID NO: 4736949 - DNA, 25 bp, Homo sapien
ctcccttcagcaatctgcaggatca

SEQ ID NO: 4736950 - DNA, 25 bp, Homo sapien
gtggcaggaggatgcctttcttcat

SEQ ID NO: 4736951 - DNA, 25 bp, Homo sapien
aggaggtggcaggaggatgcctttc

SEQ ID NO: 4736952 - DNA, 25 bp, Homo sapien
ggtggcaggaggatgcctttcttca

SEQ ID NO: 4736953 - DNA, 25 bp, Homo sapien
gaggtggcaggaggatgcctttctt

SEQ ID NO: 4736954 - DNA, 25 bp, Homo sapien
ttggactctggctagctgtagcgcc

SEQ ID NO: 4736955 - DNA, 25 bp, Homo sapien
tggctagctgtagcgcctctgtttt

SEQ ID NO: 4736956 - DNA, 25 bp, Homo sapien
tcatttggactctggctagctgtag

SEQ ID NO: 4736957 - DNA, 25 bp, Homo sapien
gactctggctagctgtagcgcctct

SEQ ID NO: 4736958 - DNA, 25 bp, Homo sapien
gggcacaaagacctattgacaatat

SEQ ID NO: 4736959 - DNA, 25 bp, Homo sapien
tccataagcaccattttgatgtgaa

SEQ ID NO: 4736960 - DNA, 25 bp, Homo sapien
tagaatctacacttaggtcttcgca

SEQ ID NO: 4736961 - DNA, 25 bp, Homo sapien
gttgtaaaatccaacttcagaggaa

SEQ ID NO: 4736962 - DNA, 25 bp, Homo sapien
gagttcattgattcgacttatattt

SEQ ID NO: 4736963 - DNA, 25 bp, Homo sapien
tgagttcattgattcgacttatatt

SEQ ID NO: 4736964 - DNA, 25 bp, Homo sapien
tcattgattcgacttatatttaaaa

SEQ ID NO: 4736965 - DNA, 25 bp, Homo sapien
gttcattgattcgacttatatttaa

SEQ ID NO: 4736966 - DNA, 25 bp, Homo sapien
agattttcccatgttctgcagaggg

SEQ ID NO: 4736967 - DNA, 25 bp, Homo sapien
tgggttctgccctatccagattttc

SEQ ID NO: 4736968 - DNA, 25 bp, Homo sapien
acagttctgcctagttttgactcac

SEQ ID NO: 4736969 - DNA, 25 bp, Homo sapien
tcacaagtgtatgcaagattgaaca

SEQ ID NO: 4736970 - DNA, 25 bp, Homo sapien
tcttctgagactaacccctttggag

SEQ ID NO: 4736971 - DNA, 25 bp, Homo sapien
gcagctcttcaggaactcctatgag

SEQ ID NO: 4736972 - DNA, 25 bp, Homo sapien
agaggcacacatggagtcatactgc

SEQ ID NO: 4736973 - DNA, 25 bp, Homo sapien
gaggctctgcctcttaaacatctct

SEQ ID NO: 4736974 - DNA, 25 bp, Homo sapien
gcagccggaccaccactgactcaaa

SEQ ID NO: 4736975 - DNA, 25 bp, Homo sapien
tcaagccctgtgagtgggaactggc

SEQ ID NO: 4736976 - DNA, 25 bp, Homo sapien
aagccctgtgagtgggaactggcat

SEQ ID NO: 4736977 - DNA, 25 bp, Homo sapien
ggaactggcatcagcagccggacca

SEQ ID NO: 4736978 - DNA, 25 bp, Homo sapien
ggcaggactgcttccccatcagtac

SEQ ID NO: 4736979 - DNA, 25 bp, Homo sapien
tatccctcaggcaaattgctgatca

SEQ ID NO: 4736980 - DNA, 25 bp, Homo sapien
cccatcagtacttgtctgtggttcc

SEQ ID NO: 4736981 - DNA, 25 bp, Homo sapien
tcttccttatcacagaaagcgtagg

SEQ ID NO: 4736982 - DNA, 25 bp, Homo sapien
ttttttccaatttcaacatctacta

SEQ ID NO: 4736983 - DNA, 25 bp, Homo sapien
tttttccaatttcaacatctactac

SEQ ID NO: 4736984 - DNA, 25 bp, Homo sapien
cacactcaagttccattcgtttttt

SEQ ID NO: 4736985 - DNA, 25 bp, Homo sapien
cataccctaaccattccacgagcat

SEQ ID NO: 4736986 - DNA, 25 bp, Homo sapien
taccctaaccattccacgagcatcc

SEQ ID NO: 4736987 - DNA, 25 bp, Homo sapien
accctaaccattccacgagcatcca

SEQ ID NO: 4736988 - DNA, 25 bp, Homo sapien
cctaaccattccacgagcatccaca

SEQ ID NO: 4736989 - DNA, 25 bp, Homo sapien
tctcatctctaatatctgaattcat

SEQ ID NO: 4736990 - DNA, 25 bp, Homo sapien
ccagtgtagaacatatttctcatct

SEQ ID NO: 4736991 - DNA, 25 bp, Homo sapien
atttctcatctctaatatctgaatt

SEQ ID NO: 4736992 - DNA, 25 bp, Homo sapien
cagtgtagaacatatttctcatctc

SEQ ID NO: 4736993 - DNA, 25 bp, Homo sapien
ttgctgaaatccatttgggctcccc

SEQ ID NO: 4736994 - DNA, 25 bp, Homo sapien
tgcaattactagaactatgttgctg

SEQ ID NO: 4736995 - DNA, 25 bp, Homo sapien
taatgacatggagaggtaagaactt

SEQ ID NO: 4736996 - DNA, 25 bp, Homo sapien
ataatctacagttgctatctttacc

SEQ ID NO: 4736997 - DNA, 25 bp, Homo sapien
gtctttgatctctaagtataactcc

SEQ ID NO: 4736998 - DNA, 25 bp, Homo sapien
tccacgtctttgatctctaagtata

SEQ ID NO: 4736999 - DNA, 25 bp, Homo sapien
ttatcagtgtaatccacgtctttga

SEQ ID NO: 4737000 - DNA, 25 bp, Homo sapien
ctacttatcagtgtaatccacgtct

SEQ ID NO: 4737001 - DNA, 25 bp, Homo sapien
tgggatttgccctcacatttgaacc

SEQ ID NO: 4737002 - DNA, 25 bp, Homo sapien
ggatgttcccactgtagtacaccag

SEQ ID NO: 4737003 - DNA, 25 bp, Homo sapien
ctgtagtacaccagccaattccctg

SEQ ID NO: 4737004 - DNA, 25 bp, Homo sapien
ctgggatttgccctcacatttgaac

SEQ ID NO: 4737005 - DNA, 25 bp, Homo sapien
cactcacactcttgtatgagacaca

SEQ ID NO: 4737006 - DNA, 25 bp, Homo sapien
ccaaggcacagaggacttattccta

SEQ ID NO: 4737007 - DNA, 25 bp, Homo sapien
ggacttattcctagtacttccttca

SEQ ID NO: 4737008 - DNA, 25 bp, Homo sapien
cacacgaaaacaccatctgtttctc

SEQ ID NO: 4737009 - DNA, 25 bp, Homo sapien
cagagcactgctgatgttatcctca

SEQ ID NO: 4737010 - DNA, 25 bp, Homo sapien
tgaattccaatgtgccacagtctga

SEQ ID NO: 4737011 - DNA, 25 bp, Homo sapien
tggcttgatctatagcacagagcac

SEQ ID NO: 4737012 - DNA, 25 bp, Homo sapien
cattgcactgcatagctctacatgg

SEQ ID NO: 4737013 - DNA, 25 bp, Homo sapien
aatggtagttgtggttgaatatagc

SEQ ID NO: 4737014 - DNA, 25 bp, Homo sapien
cagatatcactaggaccctctccaa

SEQ ID NO: 4737015 - DNA, 25 bp, Homo sapien
cacattgtcacataacggcaccctg

SEQ ID NO: 4737016 - DNA, 25 bp, Homo sapien
cagggaccttgtaggaatggtagtt

SEQ ID NO: 4737017 - DNA, 25 bp, Homo sapien
caagatgccagaagtgtgtcgtgtg

SEQ ID NO: 4737018 - DNA, 25 bp, Homo sapien
tataattaacgtgtgcgtagtagtc

SEQ ID NO: 4737019 - DNA, 25 bp, Homo sapien
tagtagtccgttttcaagctcctga

SEQ ID NO: 4737020 - DNA, 25 bp, Homo sapien
cgtgtgcgtagtagtccgttttcaa

SEQ ID NO: 4737021 - DNA, 25 bp, Homo sapien
cttgagttattattgccatgaattt

SEQ ID NO: 4737022 - DNA, 25 bp, Homo sapien
tatttatagttctgtatcatctggt

SEQ ID NO: 4737023 - DNA, 25 bp, Homo sapien
tatagttctgtatcatctggtcgct

SEQ ID NO: 4737024 - DNA, 25 bp, Homo sapien
atagttctgtatcatctggtcgctg

SEQ ID NO: 4737025 - DNA, 25 bp, Homo sapien
tttatagttctgtatcatctggtcg

SEQ ID NO: 4737026 - DNA, 25 bp, Homo sapien
atactgatgtaatactcatctctgt

SEQ ID NO: 4737027 - DNA, 25 bp, Homo sapien
gaatactgatgtaatactcatctct

SEQ ID NO: 4737028 - DNA, 25 bp, Homo sapien
aatactgatgtaatactcatctctg

SEQ ID NO: 4737029 - DNA, 25 bp, Homo sapien
tactgatgtaatactcatctctgtt

SEQ ID NO: 4737030 - DNA, 25 bp, Homo sapien
tagacgttgatgttccaggctgaag

SEQ ID NO: 4737031 - DNA, 25 bp, Homo sapien
ggctgaagtcatctgctcgtccatc

SEQ ID NO: 4737032 - DNA, 25 bp, Homo sapien
cattggtaagtcaaggagtttctac

SEQ ID NO: 4737033 - DNA, 25 bp, Homo sapien
taactcccttaaggagtccaacaga

SEQ ID NO: 4737034 - DNA, 25 bp, Homo sapien
gcaggtatcttcatactggataaac

SEQ ID NO: 4737035 - DNA, 25 bp, Homo sapien
gagcaggtatcttcatactggataa

SEQ ID NO: 4737036 - DNA, 25 bp, Homo sapien
tgagcaggtatcttcatactggata

SEQ ID NO: 4737037 - DNA, 25 bp, Homo sapien
ctgagcaggtatcttcatactggat

SEQ ID NO: 4737038 - DNA, 25 bp, Homo sapien
tccatggtccagacgacagaaatat

SEQ ID NO: 4737039 - DNA, 25 bp, Homo sapien
ttcacccctatctcttttgcctggt

SEQ ID NO: 4737040 - DNA, 25 bp, Homo sapien
ttttccatggtccagacgacagaaa

SEQ ID NO: 4737041 - DNA, 25 bp, Homo sapien
gttttccatggtccagacgacagaa

SEQ ID NO: 4737042 - DNA, 25 bp, Homo sapien
tgaccaaattcatgtaggtgcaacc

SEQ ID NO: 4737043 - DNA, 25 bp, Homo sapien
tctcttgttctagctttgcttggat

SEQ ID NO: 4737044 - DNA, 25 bp, Homo sapien
ggtgcaacctaacggtgtctctcct

SEQ ID NO: 4737045 - DNA, 25 bp, Homo sapien
tgtttatgatgctcaggaccctgct

SEQ ID NO: 4737046 - DNA, 25 bp, Homo sapien
gggatagaatctgaagtatctaaag

SEQ ID NO: 4737047 - DNA, 25 bp, Homo sapien
tagcataggtcatgtagtaccactt

SEQ ID NO: 4737048 - DNA, 25 bp, Homo sapien
gagatagaatagcataggtcatgta

SEQ ID NO: 4737049 - DNA, 25 bp, Homo sapien
gatgacagctgacactactgaggtt

SEQ ID NO: 4737050 - DNA, 25 bp, Homo sapien
gcagagctgcctaaattattcaaac

SEQ ID NO: 4737051 - DNA, 25 bp, Homo sapien
gctgcctaaattattcaaacaaacc

SEQ ID NO: 4737052 - DNA, 25 bp, Homo sapien
cattggttgcagagctgcctaaatt

SEQ ID NO: 4737053 - DNA, 25 bp, Homo sapien
tggtgcattggttgcagagctgcct

SEQ ID NO: 4737054 - DNA, 25 bp, Homo sapien
cttttttgattgtgtctctgcccgg

SEQ ID NO: 4737055 - DNA, 25 bp, Homo sapien
tttttgattgtgtctctgcccggct

SEQ ID NO: 4737056 - DNA, 25 bp, Homo sapien
ttttgattgtgtctctgcccggctt

SEQ ID NO: 4737057 - DNA, 25 bp, Homo sapien
ttgattgtgtctctgcccggctttg

SEQ ID NO: 4737058 - DNA, 25 bp, Homo sapien
ctgcttccctatctcttccttggta

SEQ ID NO: 4737059 - DNA, 25 bp, Homo sapien
cctgcttccctatctcttccttggt

SEQ ID NO: 4737060 - DNA, 25 bp, Homo sapien
tctattggtctccagtaacatgggc

SEQ ID NO: 4737061 - DNA, 25 bp, Homo sapien
gaagtgatctgctttgtcctctaaa

SEQ ID NO: 4737062 - DNA, 25 bp, Homo sapien
gagccacagcctcttgactgtagaa

SEQ ID NO: 4737063 - DNA, 25 bp, Homo sapien
gatcataaagggaacagtgccaaac

SEQ ID NO: 4737064 - DNA, 25 bp, Homo sapien
agtccagagtaatcagacgcaactg

SEQ ID NO: 4737065 - DNA, 25 bp, Homo sapien
ggtggaattgtaactgtgcctgttc

SEQ ID NO: 4737066 - DNA, 25 bp, Homo sapien
gacgcaactgacctgcgagccttca

SEQ ID NO: 4737067 - DNA, 25 bp, Homo sapien
cctttggcctcagctagttctggaa

SEQ ID NO: 4737068 - DNA, 25 bp, Homo sapien
tctctgtcggaaatgacaatgtttc

SEQ ID NO: 4737069 - DNA, 25 bp, Homo sapien
acttgtgctttatcactctcggctg

SEQ ID NO: 4737070 - DNA, 25 bp, Homo sapien
cgtgcattatatattctctgtcgga

SEQ ID NO: 4737071 - DNA, 25 bp, Homo sapien
tgactgacaaaggtggaacagaccc

SEQ ID NO: 4737072 - DNA, 25 bp, Homo sapien
tgaaactgatgggtcattaactcgt

SEQ ID NO: 4737073 - DNA, 25 bp, Homo sapien
ggtcattaactcgtccaactttaca

SEQ ID NO: 4737074 - DNA, 25 bp, Homo sapien
aactgatgggtcattaactcgtcca

SEQ ID NO: 4737075 - DNA, 25 bp, Homo sapien
gatgggtcattaactcgtccaactt

SEQ ID NO: 4737076 - DNA, 25 bp, Homo sapien
gagtcggatagagctgagtattcag

SEQ ID NO: 4737077 - DNA, 25 bp, Homo sapien
agctaccagagtcggatagagctga

SEQ ID NO: 4737078 - DNA, 25 bp, Homo sapien
ccagagtcggatagagctgagtatt

SEQ ID NO: 4737079 - DNA, 25 bp, Homo sapien
tgaaagctaccagagtcggatagag

SEQ ID NO: 4737080 - DNA, 25 bp, Homo sapien
accaattcttctttgaatgtctgtt

SEQ ID NO: 4737081 - DNA, 25 bp, Homo sapien
caattcttctttgaatgtctgttag

SEQ ID NO: 4737082 - DNA, 25 bp, Homo sapien
gtaccaattcttctttgaatgtctg

SEQ ID NO: 4737083 - DNA, 25 bp, Homo sapien
attcttctttgaatgtctgttagaa

SEQ ID NO: 4737084 - DNA, 25 bp, Homo sapien
gctggcgctcataactctcataaat

SEQ ID NO: 4737085 - DNA, 25 bp, Homo sapien
atattattgggattgtgtatgtaca

SEQ ID NO: 4737086 - DNA, 25 bp, Homo sapien
cattctgagtgaatataagttgtgc

SEQ ID NO: 4737087 - DNA, 25 bp, Homo sapien
gagagatactgaaccccagagaaca

SEQ ID NO: 4737088 - DNA, 25 bp, Homo sapien
tccagttccaaccacatttccaatt

SEQ ID NO: 4737089 - DNA, 25 bp, Homo sapien
tttcatgtccacagtaacaatgtgg

SEQ ID NO: 4737090 - DNA, 25 bp, Homo sapien
tgttactgtggacatgaaagatcaa

SEQ ID NO: 4737091 - DNA, 25 bp, Homo sapien
aaaagaatgaatggccttggtaact

SEQ ID NO: 4737092 - DNA, 25 bp, Homo sapien
tcaaacgagctttatactgtggaga

SEQ ID NO: 4737093 - DNA, 25 bp, Homo sapien
tactgtggagagtctacactgtttt

SEQ ID NO: 4737094 - DNA, 25 bp, Homo sapien
tttatactgtggagagtctacactg

SEQ ID NO: 4737095 - DNA, 25 bp, Homo sapien
cgagctttatactgtggagagtcta

SEQ ID NO: 4737096 - DNA, 25 bp, Homo sapien
ccacgaagcgctggactaagcatgc

SEQ ID NO: 4737097 - DNA, 25 bp, Homo sapien
tgttgcccacgaagcgctggactaa

SEQ ID NO: 4737098 - DNA, 25 bp, Homo sapien
ggaaatacccttatttggtgaagca

SEQ ID NO: 4737099 - DNA, 25 bp, Homo sapien
aagcaagcgtgtccccatgggtttt

SEQ ID NO: 4737100 - DNA, 25 bp, Homo sapien
gctgggttgaatggtctgtcccctg

SEQ ID NO: 4737101 - DNA, 25 bp, Homo sapien
cagctgggttgaatggtctgtcccc

SEQ ID NO: 4737102 - DNA, 25 bp, Homo sapien
gctcctcactggttccctaggatac

SEQ ID NO: 4737103 - DNA, 25 bp, Homo sapien
gggctcctcactggttccctaggat

SEQ ID NO: 4737104 - DNA, 25 bp, Homo sapien
gtaaatagttcccactgataaactg

SEQ ID NO: 4737105 - DNA, 25 bp, Homo sapien
tcccactgataaactgacagccagg

SEQ ID NO: 4737106 - DNA, 25 bp, Homo sapien
ttcaaccagtaaatagttcccactg

SEQ ID NO: 4737107 - DNA, 25 bp, Homo sapien
agttcccactgataaactgacagcc

SEQ ID NO: 4737108 - DNA, 25 bp, Homo sapien
catgatgtcagttgctttgagttct

SEQ ID NO: 4737109 - DNA, 25 bp, Homo sapien
tacatgatgtcagttgctttgagtt

SEQ ID NO: 4737110 - DNA, 25 bp, Homo sapien
ctttttgatttcatcacacaagaca

SEQ ID NO: 4737111 - DNA, 25 bp, Homo sapien
tgatgtcagttgctttgagttctga

SEQ ID NO: 4737112 - DNA, 25 bp, Homo sapien
aagtcaacccagcaaatggaagtga

SEQ ID NO: 4737113 - DNA, 25 bp, Homo sapien
aacccagcaaatggaagtgatggac

SEQ ID NO: 4737114 - DNA, 25 bp, Homo sapien
gtcaacccagcaaatggaagtgatg

SEQ ID NO: 4737115 - DNA, 25 bp, Homo sapien
tcaacccagcaaatggaagtgatgg

SEQ ID NO: 4737116 - DNA, 25 bp, Homo sapien
ccatcatccagctgatgacgatgcg

SEQ ID NO: 4737117 - DNA, 25 bp, Homo sapien
tccagctgatgacgatgcgagtgtt

SEQ ID NO: 4737118 - DNA, 25 bp, Homo sapien
tcatccagctgatgacgatgcgagt

SEQ ID NO: 4737119 - DNA, 25 bp, Homo sapien
cagctgatgacgatgcgagtgttct

SEQ ID NO: 4737120 - DNA, 25 bp, Homo sapien
caggcagtcatcgagatctctgaat

SEQ ID NO: 4737121 - DNA, 25 bp, Homo sapien
gagatctctgaatcccctttcgcct

SEQ ID NO: 4737122 - DNA, 25 bp, Homo sapien
gcctccaggtctacccacatcggct

SEQ ID NO: 4737123 - DNA, 25 bp, Homo sapien
gacagcttggtagatgacaataccc

SEQ ID NO: 4737124 - DNA, 25 bp, Homo sapien
aagtcatgccaaaactgggtcttct

SEQ ID NO: 4737125 - DNA, 25 bp, Homo sapien
tcatgccaaaactgggtcttcttgt

SEQ ID NO: 4737126 - DNA, 25 bp, Homo sapien
gtcatgccaaaactgggtcttcttg

SEQ ID NO: 4737127 - DNA, 25 bp, Homo sapien
aaagtcatgccaaaactgggtcttc

SEQ ID NO: 4737128 - DNA, 25 bp, Homo sapien
agaaggataggactccctgctcctt

SEQ ID NO: 4737129 - DNA, 25 bp, Homo sapien
cgcgccagaaggataggactccctg

SEQ ID NO: 4737130 - DNA, 25 bp, Homo sapien
cgccagaaggataggactccctgct

SEQ ID NO: 4737131 - DNA, 25 bp, Homo sapien
gccagaaggataggactccctgctc

SEQ ID NO: 4737132 - DNA, 25 bp, Homo sapien
atgcctttgtattgcttatctgtgg

SEQ ID NO: 4737133 - DNA, 25 bp, Homo sapien
ttatctgtggtgatttgcttgctgg

SEQ ID NO: 4737134 - DNA, 25 bp, Homo sapien
tctgtggtgatttgcttgctggcat

SEQ ID NO: 4737135 - DNA, 25 bp, Homo sapien
tgcttatctgtggtgatttgcttgc

SEQ ID NO: 4737136 - DNA, 25 bp, Homo sapien
ttgaccccctcgatgggcactactg

SEQ ID NO: 4737137 - DNA, 25 bp, Homo sapien
accccctcgatgggcactactgcca

SEQ ID NO: 4737138 - DNA, 25 bp, Homo sapien
tgaccccctcgatgggcactactgc

SEQ ID NO: 4737139 - DNA, 25 bp, Homo sapien
agtcctcagcgaaggacagagtggt

SEQ ID NO: 4737140 - DNA, 25 bp, Homo sapien
ttgaaaggaaagaggaggcaggtgg

SEQ ID NO: 4737141 - DNA, 25 bp, Homo sapien
gttgaaaggaaagaggaggcaggtg

SEQ ID NO: 4737142 - DNA, 25 bp, Homo sapien
tgccctcaaatgtcatggacaaagc

SEQ ID NO: 4737143 - DNA, 25 bp, Homo sapien
gagacgtatcaagtgctacaaaagg

SEQ ID NO: 4737144 - DNA, 25 bp, Homo sapien
tggagagccatctgtgcattgtagg

SEQ ID NO: 4737145 - DNA, 25 bp, Homo sapien
tatatgtgtagctgcaagctccctg

SEQ ID NO: 4737146 - DNA, 25 bp, Homo sapien
aggccacgggccaatccaggtagcc

SEQ ID NO: 4737147 - DNA, 25 bp, Homo sapien
aaggtcacctgcacctaggccacgg

SEQ ID NO: 4737148 - DNA, 25 bp, Homo sapien
aggtcacctgcacctaggccacggg

SEQ ID NO: 4737149 - DNA, 25 bp, Homo sapien
acctaggccacgggccaatccaggt

SEQ ID NO: 4737150 - DNA, 25 bp, Homo sapien
ctgggacattaggtccaacatccat

SEQ ID NO: 4737151 - DNA, 25 bp, Homo sapien
gtccaacatccatcggcatcacagg

SEQ ID NO: 4737152 - DNA, 25 bp, Homo sapien
tcacaggtattgtccacacttggac

SEQ ID NO: 4737153 - DNA, 25 bp, Homo sapien
catccatcggcatcacaggtattgt

SEQ ID NO: 4737154 - DNA, 25 bp, Homo sapien
atgaatgctttctcagcttcatttt

SEQ ID NO: 4737155 - DNA, 25 bp, Homo sapien
cctcccgcaaaccaatgaatgcttt

SEQ ID NO: 4737156 - DNA, 25 bp, Homo sapien
caatgaatgctttctcagcttcatt

SEQ ID NO: 4737157 - DNA, 25 bp, Homo sapien
accaatgaatgctttctcagcttca

SEQ ID NO: 4737158 - DNA, 25 bp, Homo sapien
catccttgaaatctttgaaaccata

SEQ ID NO: 4737159 - DNA, 25 bp, Homo sapien
cacatcatccttgaaatctttgaaa

SEQ ID NO: 4737160 - DNA, 25 bp, Homo sapien
ttaaacaaaacacatcatccttgaa

SEQ ID NO: 4737161 - DNA, 25 bp, Homo sapien
aaacacatcatccttgaaatctttg

SEQ ID NO: 4737162 - DNA, 25 bp, Homo sapien
tcaacccagtgaaatagagcagctg

SEQ ID NO: 4737163 - DNA, 25 bp, Homo sapien
gcagctgtgccattgtgggagtcac

SEQ ID NO: 4737164 - DNA, 25 bp, Homo sapien
tcagcacgcctgcatctggcttcag

SEQ ID NO: 4737165 - DNA, 25 bp, Homo sapien
tctgatggacttgggtttgcgttcc

SEQ ID NO: 4737166 - DNA, 25 bp, Homo sapien
tcagaaataggagcatcaggtcctc

SEQ ID NO: 4737167 - DNA, 25 bp, Homo sapien
gaatgtgctgatcagaaataggagc

SEQ ID NO: 4737168 - DNA, 25 bp, Homo sapien
cagaaataggagcatcaggtcctcc

SEQ ID NO: 4737169 - DNA, 25 bp, Homo sapien
gggaaggaatgtgctgatcagaaat

SEQ ID NO: 4737170 - DNA, 25 bp, Homo sapien
ccatatctcaagaccaagtagaggc

SEQ ID NO: 4737171 - DNA, 25 bp, Homo sapien
aggctcacagtgcacccaagcatgg

SEQ ID NO: 4737172 - DNA, 25 bp, Homo sapien
gctgtctgtcattcacgtaaaggga

SEQ ID NO: 4737173 - DNA, 25 bp, Homo sapien
gcaaagtgtactggcccaaatagga

SEQ ID NO: 4737174 - DNA, 25 bp, Homo sapien
aaaggacatattgaggggagcaaag

SEQ ID NO: 4737175 - DNA, 25 bp, Homo sapien
agccattcagggattctcttcacag

SEQ ID NO: 4737176 - DNA, 25 bp, Homo sapien
tcatctaaggctaaatttgagccat

SEQ ID NO: 4737177 - DNA, 25 bp, Homo sapien
ggactttatctggagttatagtcac

SEQ ID NO: 4737178 - DNA, 25 bp, Homo sapien
cttggagaatattcatatcaagaga

SEQ ID NO: 4737179 - DNA, 25 bp, Homo sapien
tgttaggcagtctcaggaattgatc

SEQ ID NO: 4737180 - DNA, 25 bp, Homo sapien
cctattaaagcaaccaacacttgtc

SEQ ID NO: 4737181 - DNA, 25 bp, Homo sapien
caggaattgatcctacctattaaag

SEQ ID NO: 4737182 - DNA, 25 bp, Homo sapien
atatttttagcagagatggggtttc

SEQ ID NO: 4737183 - DNA, 25 bp, Homo sapien
tatatttttagcagagatggggttt

SEQ ID NO: 4737184 - DNA, 25 bp, Homo sapien
ttgctttgtcgcccaagttggagtg

SEQ ID NO: 4737185 - DNA, 25 bp, Homo sapien
cttgctttgtcgcccaagttggagt

SEQ ID NO: 4737186 - DNA, 25 bp, Homo sapien
cacagatgttatcaagtgacaccat

SEQ ID NO: 4737187 - DNA, 25 bp, Homo sapien
tatcactcagcaagcaaggagatgc

SEQ ID NO: 4737188 - DNA, 25 bp, Homo sapien
tcttagcgtataatctgtggttcac

SEQ ID NO: 4737189 - DNA, 25 bp, Homo sapien
taaaccttggtcctacacacaggag

SEQ ID NO: 4737190 - DNA, 25 bp, Homo sapien
catggcatgggttgtagtgaacagc

SEQ ID NO: 4737191 - DNA, 25 bp, Homo sapien
tgcaggtggccattatacttcttgg

SEQ ID NO: 4737192 - DNA, 25 bp, Homo sapien
tgaacagcgggctcaacaacaggtc

SEQ ID NO: 4737193 - DNA, 25 bp, Homo sapien
tattgcttcagaatagtgtagccct

SEQ ID NO: 4737194 - DNA, 25 bp, Homo sapien
aaaaagtcagcgtgagtttgtttat

SEQ ID NO: 4737195 - DNA, 25 bp, Homo sapien
aaaagtcagcgtgagtttgtttata

SEQ ID NO: 4737196 - DNA, 25 bp, Homo sapien
aagtcagcgtgagtttgtttatacc

SEQ ID NO: 4737197 - DNA, 25 bp, Homo sapien
aaagtcagcgtgagtttgtttatac

SEQ ID NO: 4737198 - DNA, 25 bp, Homo sapien
gctgccgtgggtctatagtttctct

SEQ ID NO: 4737199 - DNA, 25 bp, Homo sapien
tttgcaaacccaagcagatactgct

SEQ ID NO: 4737200 - DNA, 25 bp, Homo sapien
cagagcccaccatagtgaaccttat

SEQ ID NO: 4737201 - DNA, 25 bp, Homo sapien
cttaaacctagtagagtctgaggga

SEQ ID NO: 4737202 - DNA, 25 bp, Homo sapien
ttaccttggaagaacgctctgaggc

SEQ ID NO: 4737203 - DNA, 25 bp, Homo sapien
tttggttctaatgggagcactgtgg

SEQ ID NO: 4737204 - DNA, 25 bp, Homo sapien
cacgttatactagctgtggagcctt

SEQ ID NO: 4737205 - DNA, 25 bp, Homo sapien
cctagcatagagtctggtacatgtc

SEQ ID NO: 4737206 - DNA, 25 bp, Homo sapien
tcacagggcaagaacgatacactat

SEQ ID NO: 4737207 - DNA, 25 bp, Homo sapien
caggtcaaggtaagctggagcctct

SEQ ID NO: 4737208 - DNA, 25 bp, Homo sapien
cattcaccgcagtaacctggttggg

SEQ ID NO: 4737209 - DNA, 25 bp, Homo sapien
tccctggtgagaatgcagatgccct

SEQ ID NO: 4737210 - DNA, 25 bp, Homo sapien
tctcagataagcagatgggccagct

SEQ ID NO: 4737211 - DNA, 25 bp, Homo sapien
gaaaatgatagatccctaggcaagg

SEQ ID NO: 4737212 - DNA, 25 bp, Homo sapien
caaggtaaagataaagtgcccagca

SEQ ID NO: 4737213 - DNA, 25 bp, Homo sapien
tgtcattaatagctactgccctgag

SEQ ID NO: 4737214 - DNA, 25 bp, Homo sapien
gatcacaggacgttgctttttcact

SEQ ID NO: 4737215 - DNA, 25 bp, Homo sapien
ggaggtgtctcctaccctcttattg

SEQ ID NO: 4737216 - DNA, 25 bp, Homo sapien
tttccttcagagtgaatcatccaga

SEQ ID NO: 4737217 - DNA, 25 bp, Homo sapien
gacatagataagaactttgcacact

SEQ ID NO: 4737218 - DNA, 25 bp, Homo sapien
agaaaagaggcttaatagattcaca

SEQ ID NO: 4737219 - DNA, 25 bp, Homo sapien
gaaaagaggcttaatagattcacag

SEQ ID NO: 4737220 - DNA, 25 bp, Homo sapien
ataaagaaaagaggcttaatagatt

SEQ ID NO: 4737221 - DNA, 25 bp, Homo sapien
aaagaaaagaggcttaatagattca

SEQ ID NO: 4737222 - DNA, 25 bp, Homo sapien
tcaacagggccaaatgcgcagaggt

SEQ ID NO: 4737223 - DNA, 25 bp, Homo sapien
caccagattgcatgaagagggaggc

SEQ ID NO: 4737224 - DNA, 25 bp, Homo sapien
tcagatacttgtttccacgtccagg

SEQ ID NO: 4737225 - DNA, 25 bp, Homo sapien
ccctgtagctgaagattgaggacct

SEQ ID NO: 4737226 - DNA, 25 bp, Homo sapien
catggattccccagtcatggctgca

SEQ ID NO: 4737227 - DNA, 25 bp, Homo sapien
catggctgcagttctgtcgggcaca

SEQ ID NO: 4737228 - DNA, 25 bp, Homo sapien
catctccaagcacagtgtaatggca

SEQ ID NO: 4737229 - DNA, 25 bp, Homo sapien
tacagtgtctgaactccagttgcaa

SEQ ID NO: 4737230 - DNA, 25 bp, Homo sapien
tgtgtaacatgccaaggctttgcac

SEQ ID NO: 4737231 - DNA, 25 bp, Homo sapien
gtgtaacatgccaaggctttgcact

SEQ ID NO: 4737232 - DNA, 25 bp, Homo sapien
ctctatcactcttacgtcagctgtg

SEQ ID NO: 4737233 - DNA, 25 bp, Homo sapien
tcactcttacgtcagctgtgtaaca

SEQ ID NO: 4737234 - DNA, 25 bp, Homo sapien
tgtctgaaggcgtaaaatagagtca

SEQ ID NO: 4737235 - DNA, 25 bp, Homo sapien
aatactgcttcgtcccatgtctgaa

SEQ ID NO: 4737236 - DNA, 25 bp, Homo sapien
tacaccagcattactagtcagaagg

SEQ ID NO: 4737237 - DNA, 25 bp, Homo sapien
tagtcagaaggaagcacttgctacc

SEQ ID NO: 4737238 - DNA, 25 bp, Homo sapien
gccttcatcagcaactgaggtggca

SEQ ID NO: 4737239 - DNA, 25 bp, Homo sapien
aggtggcaatcagaatattgtgatc

SEQ ID NO: 4737240 - DNA, 25 bp, Homo sapien
tgcactgtgcaatgtcaatgccttc

SEQ ID NO: 4737241 - DNA, 25 bp, Homo sapien
tgatctccactggctttgaatgcat

SEQ ID NO: 4737242 - DNA, 25 bp, Homo sapien
tcaatatgccaggttttagaaaact

SEQ ID NO: 4737243 - DNA, 25 bp, Homo sapien
gttttgccacgtccagtcaatatgc

SEQ ID NO: 4737244 - DNA, 25 bp, Homo sapien
aactgagtttaggatttccttcaat

SEQ ID NO: 4737245 - DNA, 25 bp, Homo sapien
gagtttaggatttccttcaatccaa

SEQ ID NO: 4737246 - DNA, 25 bp, Homo sapien
gaatagtgctgggtccatttgttat

SEQ ID NO: 4737247 - DNA, 25 bp, Homo sapien
gagtacgctgtcatgatcactgcag

SEQ ID NO: 4737248 - DNA, 25 bp, Homo sapien
ccatttgttatctacaaggagaaaa

SEQ ID NO: 4737249 - DNA, 25 bp, Homo sapien
ctggagtgcagagtacgctgtcatg

SEQ ID NO: 4737250 - DNA, 25 bp, Homo sapien
tcttcttgtaagatgaagcagaggt

SEQ ID NO: 4737251 - DNA, 25 bp, Homo sapien
gttttcacaaagagaattgttattg

SEQ ID NO: 4737252 - DNA, 25 bp, Homo sapien
ttcaagtttaggattctcattgctg

SEQ ID NO: 4737253 - DNA, 25 bp, Homo sapien
ttgtctctgggtttaagtggtactc

SEQ ID NO: 4737254 - DNA, 25 bp, Homo sapien
ccagagcatctttcattcgtgcatg

SEQ ID NO: 4737255 - DNA, 25 bp, Homo sapien
aatctcatcgaatcctgctgctcgg

SEQ ID NO: 4737256 - DNA, 25 bp, Homo sapien
tgctcggacattgctgaagaagtct

SEQ ID NO: 4737257 - DNA, 25 bp, Homo sapien
tgctcactgataatgagggcatcat

SEQ ID NO: 4737258 - DNA, 25 bp, Homo sapien
tgaagtgtataaaaacagggcttta

SEQ ID NO: 4737259 - DNA, 25 bp, Homo sapien
ccgcaaatgtgaagtgtataaaaac

SEQ ID NO: 4737260 - DNA, 25 bp, Homo sapien
gctttacaaatcctgctctcttcat

SEQ ID NO: 4737261 - DNA, 25 bp, Homo sapien
atgtgaagtgtataaaaacagggct

SEQ ID NO: 4737262 - DNA, 25 bp, Homo sapien
gcatgctttctgaactgtaacaatc

SEQ ID NO: 4737263 - DNA, 25 bp, Homo sapien
tgtgttccaaattccctattttgaa

SEQ ID NO: 4737264 - DNA, 25 bp, Homo sapien
tctgtgttccaaattccctattttg

SEQ ID NO: 4737265 - DNA, 25 bp, Homo sapien
caatccattgttcatatttctgtgt

SEQ ID NO: 4737266 - DNA, 25 bp, Homo sapien
tgttccctcccttgagttttaagca

SEQ ID NO: 4737267 - DNA, 25 bp, Homo sapien
ctcccttgagttttaagcagtgcat

SEQ ID NO: 4737268 - DNA, 25 bp, Homo sapien
tccctcccttgagttttaagcagtg

SEQ ID NO: 4737269 - DNA, 25 bp, Homo sapien
cttgccttgttccctcccttgagtt

SEQ ID NO: 4737270 - DNA, 25 bp, Homo sapien
tcagttcaccctatgttctgctttg

SEQ ID NO: 4737271 - DNA, 25 bp, Homo sapien
ggactcagttcaccctatgttctgc

SEQ ID NO: 4737272 - DNA, 25 bp, Homo sapien
ttaggactcagttcaccctatgttc

SEQ ID NO: 4737273 - DNA, 25 bp, Homo sapien
tcaccctatgttctgctttgctgtg

SEQ ID NO: 4737274 - DNA, 25 bp, Homo sapien
tactctggtatcagttcgccagggc

SEQ ID NO: 4737275 - DNA, 25 bp, Homo sapien
caaaggaggctacccaaacaagtag

SEQ ID NO: 4737276 - DNA, 25 bp, Homo sapien
gtgcatctcctaggataagcctcag

SEQ ID NO: 4737277 - DNA, 25 bp, Homo sapien
tagaatcggccctcaaaagacactt

SEQ ID NO: 4737278 - DNA, 25 bp, Homo sapien
cacccactggcattcatagaggtgc

SEQ ID NO: 4737279 - DNA, 25 bp, Homo sapien
cactggcattcatagaggtgcctaa

SEQ ID NO: 4737280 - DNA, 25 bp, Homo sapien
tggcattcatagaggtgcctaagcc

SEQ ID NO: 4737281 - DNA, 25 bp, Homo sapien
ggaccacccactggcattcatagag

SEQ ID NO: 4737282 - DNA, 25 bp, Homo sapien
tatttaaatttgtcgctaatccgtg

SEQ ID NO: 4737283 - DNA, 25 bp, Homo sapien
gtcgctaatccgtgattccactttc

SEQ ID NO: 4737284 - DNA, 25 bp, Homo sapien
catcagctgagctatgatgtattta

SEQ ID NO: 4737285 - DNA, 25 bp, Homo sapien
ccctcatcagctgagctatgatgta

SEQ ID NO: 4737286 - DNA, 25 bp, Homo sapien
aggcttgttattggatccaacttac

SEQ ID NO: 4737287 - DNA, 25 bp, Homo sapien
aaaggcttgttattggatccaactt

SEQ ID NO: 4737288 - DNA, 25 bp, Homo sapien
tcaaaggcttgttattggatccaac

SEQ ID NO: 4737289 - DNA, 25 bp, Homo sapien
caaaggcttgttattggatccaact

SEQ ID NO: 4737290 - DNA, 25 bp, Homo sapien
gttcctccagattgtgtttgactgt

SEQ ID NO: 4737291 - DNA, 25 bp, Homo sapien
gcttataaacaacttgctccagttc

SEQ ID NO: 4737292 - DNA, 25 bp, Homo sapien
gttgctatcactgacgcatcaagag

SEQ ID NO: 4737293 - DNA, 25 bp, Homo sapien
aagcacacagcttgcagatataatc

SEQ ID NO: 4737294 - DNA, 25 bp, Homo sapien
caaccgaggcagtcagcccaatgac

SEQ ID NO: 4737295 - DNA, 25 bp, Homo sapien
aacaccaaccgaggcagtcagccca

SEQ ID NO: 4737296 - DNA, 25 bp, Homo sapien
tccccaacaccaaccgaggcagtca

SEQ ID NO: 4737297 - DNA, 25 bp, Homo sapien
catccccaacaccaaccgaggcagt

SEQ ID NO: 4737298 - DNA, 25 bp, Homo sapien
taaacatgatcatattgtacgggtg

SEQ ID NO: 4737299 - DNA, 25 bp, Homo sapien
tcaacaatctgttccactgggacat

SEQ ID NO: 4737300 - DNA, 25 bp, Homo sapien
gatggatagtgatggaatcgttccc

SEQ ID NO: 4737301 - DNA, 25 bp, Homo sapien
gcctgaagatcctccaagtttctga

SEQ ID NO: 4737302 - DNA, 25 bp, Homo sapien
gatctgattcgcaaaaaagacaact

SEQ ID NO: 4737303 - DNA, 25 bp, Homo sapien
tacactgggatctgattcgcaaaaa

SEQ ID NO: 4737304 - DNA, 25 bp, Homo sapien
taagatgatgttcacatataagcag

SEQ ID NO: 4737305 - DNA, 25 bp, Homo sapien
ttcatacactgggatctgattcgca

SEQ ID NO: 4737306 - DNA, 25 bp, Homo sapien
ctgtaggagcacatattattgtgtt

SEQ ID NO: 4737307 - DNA, 25 bp, Homo sapien
caagctctaattggtaatttcttgg

SEQ ID NO: 4737308 - DNA, 25 bp, Homo sapien
aaagcaagctctaattggtaatttc

SEQ ID NO: 4737309 - DNA, 25 bp, Homo sapien
caggcaaagcaagctctaattggta

SEQ ID NO: 4737310 - DNA, 25 bp, Homo sapien
ctgtacaagtttgtatcagacactt

SEQ ID NO: 4737311 - DNA, 25 bp, Homo sapien
catgaattctcactaagattctggc

SEQ ID NO: 4737312 - DNA, 25 bp, Homo sapien
ttctcactaagattctggcattctg

SEQ ID NO: 4737313 - DNA, 25 bp, Homo sapien
tggacatgaattctcactaagattc

SEQ ID NO: 4737314 - DNA, 25 bp, Homo sapien
tgaattctcactaagattctggcat

SEQ ID NO: 4737315 - DNA, 25 bp, Homo sapien
tcttatcctcaagatcttctgtttc

SEQ ID NO: 4737316 - DNA, 25 bp, Homo sapien
cctcaagatcttctgtttcaacatc

SEQ ID NO: 4737317 - DNA, 25 bp, Homo sapien
ccatcttatcctcaagatcttctgt

SEQ ID NO: 4737318 - DNA, 25 bp, Homo sapien
catcttatcctcaagatcttctgtt

SEQ ID NO: 4737319 - DNA, 25 bp, Homo sapien
ctacaatccacagttcactgaactt

SEQ ID NO: 4737320 - DNA, 25 bp, Homo sapien
tacaatccacagttcactgaacttg

SEQ ID NO: 4737321 - DNA, 25 bp, Homo sapien
tgagaaggcattccaccaatttctc

SEQ ID NO: 4737322 - DNA, 25 bp, Homo sapien
taagcaaggtaactgtagtttattg

SEQ ID NO: 4737323 - DNA, 25 bp, Homo sapien
gaaatgtcagtcatgtactatctga

SEQ ID NO: 4737324 - DNA, 25 bp, Homo sapien
tttactgaagaaatgtcagtcatgt

SEQ ID NO: 4737325 - DNA, 25 bp, Homo sapien
gtttattgatcaattatctcaaaag

SEQ ID NO: 4737326 - DNA, 25 bp, Homo sapien
atgatatcggttgggataattctgg

SEQ ID NO: 4737327 - DNA, 25 bp, Homo sapien
caatggcttcataaagtccagaata

SEQ ID NO: 4737328 - DNA, 25 bp, Homo sapien
gacagatcagaaatgatatcggttg

SEQ ID NO: 4737329 - DNA, 25 bp, Homo sapien
taaaagtaatctatactcctccaac

SEQ ID NO: 4737330 - DNA, 25 bp, Homo sapien
atgcagactgcaaccctttatgaaa

SEQ ID NO: 4737331 - DNA, 25 bp, Homo sapien
tgcttctggcccgaggctacacttc

SEQ ID NO: 4737332 - DNA, 25 bp, Homo sapien
tctgttgatagaaaacaccatagct

SEQ ID NO: 4737333 - DNA, 25 bp, Homo sapien
gactcctcctgtagcttactgaata

SEQ ID NO: 4737334 - DNA, 25 bp, Homo sapien
ggagctccaacaggaacttgagaaa

SEQ ID NO: 4737335 - DNA, 25 bp, Homo sapien
aaaagtgtggcagcctccattgggc

SEQ ID NO: 4737336 - DNA, 25 bp, Homo sapien
atccaaaaagccacggaaccagcct

SEQ ID NO: 4737337 - DNA, 25 bp, Homo sapien
ctgcatggtctagggcatccaaaaa

SEQ ID NO: 4737338 - DNA, 25 bp, Homo sapien
tgttagcagagtcatgcttcctctg

SEQ ID NO: 4737339 - DNA, 25 bp, Homo sapien
ttgcccttccggtttctggtagctg

SEQ ID NO: 4737340 - DNA, 25 bp, Homo sapien
tcttggaggccagaattgtgaatca

SEQ ID NO: 4737341 - DNA, 25 bp, Homo sapien
ctgtggctgcaataacgaattagga

SEQ ID NO: 4737342 - DNA, 25 bp, Homo sapien
aaaatgcttgactaggaaccagggc

SEQ ID NO: 4737343 - DNA, 25 bp, Homo sapien
cctatgccaccagggatctgggttt

SEQ ID NO: 4737344 - DNA, 25 bp, Homo sapien
cccaagtcttcgcaaccagcagacc

SEQ ID NO: 4737345 - DNA, 25 bp, Homo sapien
gaaccagggcaagatggccaaaaaa

SEQ ID NO: 4737346 - DNA, 25 bp, Homo sapien
aaaggttagaggagtgacaactaga

SEQ ID NO: 4737347 - DNA, 25 bp, Homo sapien
acagataactcatctgaaggtcacc

SEQ ID NO: 4737348 - DNA, 25 bp, Homo sapien
gaggaaacgccagtgcaaaaaggca

SEQ ID NO: 4737349 - DNA, 25 bp, Homo sapien
aaaaaatgtgatcctcttctcctcc

SEQ ID NO: 4737350 - DNA, 25 bp, Homo sapien
acaaatatatagaccacaagccagt

SEQ ID NO: 4737351 - DNA, 25 bp, Homo sapien
aaatatatagaccacaagccagttt

SEQ ID NO: 4737352 - DNA, 25 bp, Homo sapien
caaatatatagaccacaagccagtt

SEQ ID NO: 4737353 - DNA, 25 bp, Homo sapien
catgaatgcagcacctgggcaaact

SEQ ID NO: 4737354 - DNA, 25 bp, Homo sapien
ttatcatgaatgcagcacctgggca

SEQ ID NO: 4737355 - DNA, 25 bp, Homo sapien
ccgaaggcccttgggatgtgaccaa

SEQ ID NO: 4737356 - DNA, 25 bp, Homo sapien
aatgcagcacctgggcaaactcaca

SEQ ID NO: 4737357 - DNA, 25 bp, Homo sapien
ggctgcgtcgctgctcggtggtcat

SEQ ID NO: 4737358 - DNA, 25 bp, Homo sapien
aaaccagggggccatgtagctcagg

SEQ ID NO: 4737359 - DNA, 25 bp, Homo sapien
ttccggatataatcctggaaggctt

SEQ ID NO: 4737360 - DNA, 25 bp, Homo sapien
ctccctaaaccagggggccatgtag

SEQ ID NO: 4737361 - DNA, 25 bp, Homo sapien
cactagctttaaagccgggtaggag

SEQ ID NO: 4737362 - DNA, 25 bp, Homo sapien
aaagcagggattttccgaggaaatg

SEQ ID NO: 4737363 - DNA, 25 bp, Homo sapien
tgcttgcagctagctacgttccccg

SEQ ID NO: 4737364 - DNA, 25 bp, Homo sapien
cgaggcggagctgcataggaacttt

SEQ ID NO: 4737365 - DNA, 25 bp, Homo sapien
tcccatataattaatggtgggcaca

SEQ ID NO: 4737366 - DNA, 25 bp, Homo sapien
gaggagcagacacttatattgatgc

SEQ ID NO: 4737367 - DNA, 25 bp, Homo sapien
cacatttgcatgtgcttactgggtc

SEQ ID NO: 4737368 - DNA, 25 bp, Homo sapien
gaagcatctgctccaatcttttgcc

SEQ ID NO: 4737369 - DNA, 25 bp, Homo sapien
aaagtttatggggattttgatcaag

SEQ ID NO: 4737370 - DNA, 25 bp, Homo sapien
atcaacttgtcaattaccccttcct

SEQ ID NO: 4737371 - DNA, 25 bp, Homo sapien
tccatatgaaataagaatcaacttg

SEQ ID NO: 4737372 - DNA, 25 bp, Homo sapien
tgaatccctgtgcatttccatatga

SEQ ID NO: 4737373 - DNA, 25 bp, Homo sapien
ggtgacggctttttctcttgactat

SEQ ID NO: 4737374 - DNA, 25 bp, Homo sapien
cacactgtggtaggtctgtttcaaa

SEQ ID NO: 4737375 - DNA, 25 bp, Homo sapien
gcattccactgaattaccgatgaat

SEQ ID NO: 4737376 - DNA, 25 bp, Homo sapien
gactatgggttcattcacatgtcta

SEQ ID NO: 4737377 - DNA, 25 bp, Homo sapien
tcatgcagataagctggaaccagcc

SEQ ID NO: 4737378 - DNA, 25 bp, Homo sapien
gaaccagcctactccaagcaaattg

SEQ ID NO: 4737379 - DNA, 25 bp, Homo sapien
tggactctatgtactcaatgcctga

SEQ ID NO: 4737380 - DNA, 25 bp, Homo sapien
gatatccccttgtccaggagagaac

SEQ ID NO: 4737381 - DNA, 25 bp, Homo sapien
tgaaagaactaccaatgtaaaagaa

SEQ ID NO: 4737382 - DNA, 25 bp, Homo sapien
aaatactgcataggaaaatgtctga

SEQ ID NO: 4737383 - DNA, 25 bp, Homo sapien
cacctgaagttcagtatttatgaca

SEQ ID NO: 4737384 - DNA, 25 bp, Homo sapien
tatttagcaagttaaatgctgtttt

SEQ ID NO: 4737385 - DNA, 25 bp, Homo sapien
gcaaataagatactcctcaaaatca

SEQ ID NO: 4737386 - DNA, 25 bp, Homo sapien
taaagactgtccaaagggattctcc

SEQ ID NO: 4737387 - DNA, 25 bp, Homo sapien
gactgcagtagacgacattcttcct

SEQ ID NO: 4737388 - DNA, 25 bp, Homo sapien
taaaaatatgtcaataccgtatggc

SEQ ID NO: 4737389 - DNA, 25 bp, Homo sapien
tattttggcagaagataaactgtgc

SEQ ID NO: 4737390 - DNA, 25 bp, Homo sapien
cattaatgatgtccgtggcgatggc

SEQ ID NO: 4737391 - DNA, 25 bp, Homo sapien
gctgccagaggtggaatattatcta

SEQ ID NO: 4737392 - DNA, 25 bp, Homo sapien
gaagagacacaatgttactgggctg

SEQ ID NO: 4737393 - DNA, 25 bp, Homo sapien
gagagtttgttcaactgaagctgcc

SEQ ID NO: 4737394 - DNA, 25 bp, Homo sapien
caaggaaggagccaaaaactcattt

SEQ ID NO: 4737395 - DNA, 25 bp, Homo sapien
tgtagagggtcttgaggaccactat

SEQ ID NO: 4737396 - DNA, 25 bp, Homo sapien
ttgaggaccactattgtcacattct

SEQ ID NO: 4737397 - DNA, 25 bp, Homo sapien
agggtcttgaggaccactattgtca

SEQ ID NO: 4737398 - DNA, 25 bp, Homo sapien
cactgtcactgtcaatggtaattac

SEQ ID NO: 4737399 - DNA, 25 bp, Homo sapien
ttatcactgtcactgtcaatggtaa

SEQ ID NO: 4737400 - DNA, 25 bp, Homo sapien
ttcagaatccttatcactgtcactg

SEQ ID NO: 4737401 - DNA, 25 bp, Homo sapien
tatcactgtcactgtcaatggtaat

SEQ ID NO: 4737402 - DNA, 25 bp, Homo sapien
tatggtgtttagttgtatcagtagc

SEQ ID NO: 4737403 - DNA, 25 bp, Homo sapien
ggtgtttagttgtatcagtagcttt

SEQ ID NO: 4737404 - DNA, 25 bp, Homo sapien
tttttatggtgtttagttgtatcag

SEQ ID NO: 4737405 - DNA, 25 bp, Homo sapien
gtttagttgtatcagtagcttttcc

SEQ ID NO: 4737406 - DNA, 25 bp, Homo sapien
gtctctctgtctgatgatcggctgt

SEQ ID NO: 4737407 - DNA, 25 bp, Homo sapien
gttttgtctctctgtctgatgatcg

SEQ ID NO: 4737408 - DNA, 25 bp, Homo sapien
tgtctctctgtctgatgatcggctg

SEQ ID NO: 4737409 - DNA, 25 bp, Homo sapien
tttgtctctctgtctgatgatcggc

SEQ ID NO: 4737410 - DNA, 25 bp, Homo sapien
tcatttttgtagtttccatccaatt

SEQ ID NO: 4737411 - DNA, 25 bp, Homo sapien
tttccatccaattttgatgaagatt

SEQ ID NO: 4737412 - DNA, 25 bp, Homo sapien
ccatccaattttgatgaagattttt

SEQ ID NO: 4737413 - DNA, 25 bp, Homo sapien
aaggtatcactctcatttttgtagt

SEQ ID NO: 4737414 - DNA, 25 bp, Homo sapien
gtcctttgctttagaagcaaattca

SEQ ID NO: 4737415 - DNA, 25 bp, Homo sapien
tgtcctttgctttagaagcaaattc

SEQ ID NO: 4737416 - DNA, 25 bp, Homo sapien
tcctttgctttagaagcaaattcac

SEQ ID NO: 4737417 - DNA, 25 bp, Homo sapien
gatggctgagccacttcgttagtac

SEQ ID NO: 4737418 - DNA, 25 bp, Homo sapien
atggctgagccacttcgttagtacc

SEQ ID NO: 4737419 - DNA, 25 bp, Homo sapien
ctccaaatgccgtgttttgtatttt

SEQ ID NO: 4737420 - DNA, 25 bp, Homo sapien
tccaaatgccgtgttttgtattttc

SEQ ID NO: 4737421 - DNA, 25 bp, Homo sapien
aaaggactgaactctaaattctgga

SEQ ID NO: 4737422 - DNA, 25 bp, Homo sapien
tcagtcccggtagatgcagtccttg

SEQ ID NO: 4737423 - DNA, 25 bp, Homo sapien
ttgatctgttactagacaggctcct

SEQ ID NO: 4737424 - DNA, 25 bp, Homo sapien
gtaagatgattcgtacccatccctg

SEQ ID NO: 4737425 - DNA, 25 bp, Homo sapien
taattggcatgctggtcaaaggctg

SEQ ID NO: 4737426 - DNA, 25 bp, Homo sapien
catgatcactgctacgagaccttga

SEQ ID NO: 4737427 - DNA, 25 bp, Homo sapien
tgtatctgagacgtggctcctcctg

SEQ ID NO: 4737428 - DNA, 25 bp, Homo sapien
tatttctaactcgagcaccagcacg

SEQ ID NO: 4737429 - DNA, 25 bp, Homo sapien
gaagcatttcgttcccttgtcagag

SEQ ID NO: 4737430 - DNA, 25 bp, Homo sapien
gaaccattatacgaaggccttagga

SEQ ID NO: 4737431 - DNA, 25 bp, Homo sapien
catataggacacttagaatcaggag

SEQ ID NO: 4737432 - DNA, 25 bp, Homo sapien
tacggtagcgaaatcgtcgatcagg

SEQ ID NO: 4737433 - DNA, 25 bp, Homo sapien
taaaagggaaagaaatatatcagta

SEQ ID NO: 4737434 - DNA, 25 bp, Homo sapien
tgtaaaagggaaagaaatatatcag

SEQ ID NO: 4737435 - DNA, 25 bp, Homo sapien
ctgtaaaagggaaagaaatatatca

SEQ ID NO: 4737436 - DNA, 25 bp, Homo sapien
tatgttatgccccttatcttcccct

SEQ ID NO: 4737437 - DNA, 25 bp, Homo sapien
tatgccactaacaatacagactact

SEQ ID NO: 4737438 - DNA, 25 bp, Homo sapien
tcaggccacagaatatcttgaaatc

SEQ ID NO: 4737439 - DNA, 25 bp, Homo sapien
cattcagcattcctaataagccttc

SEQ ID NO: 4737440 - DNA, 25 bp, Homo sapien
ccctggcccgccgaggcccggacag

SEQ ID NO: 4737441 - DNA, 25 bp, Homo sapien
caatccacaggtgcgcgcaggagcc

SEQ ID NO: 4737442 - DNA, 25 bp, Homo sapien
gaggcccggacagccccgcaggcca

SEQ ID NO: 4737443 - DNA, 25 bp, Homo sapien
ctggcccgccgaggcccggacagcc

SEQ ID NO: 4737444 - DNA, 25 bp, Homo sapien
ggagcgccaactcccacggcccttc

SEQ ID NO: 4737445 - DNA, 25 bp, Homo sapien
ctccaggcgggagcgccaactccca

SEQ ID NO: 4737446 - DNA, 25 bp, Homo sapien
ccccgcgtcccattgttccgaatct

SEQ ID NO: 4737447 - DNA, 25 bp, Homo sapien
gcgtcccattgttccgaatctcact

SEQ ID NO: 4737448 - DNA, 25 bp, Homo sapien
accctcctcgcgagacagcggagac

SEQ ID NO: 4737449 - DNA, 25 bp, Homo sapien
ccagaaagctaggtcggtgtcggca

SEQ ID NO: 4737450 - DNA, 25 bp, Homo sapien
gcctaccctccgaagcgggagcagg

SEQ ID NO: 4737451 - DNA, 25 bp, Homo sapien
cgcgaaggcgtacccggcgacttct

SEQ ID NO: 4737452 - DNA, 25 bp, Homo sapien
gcaaagggctcatcaccaatggcag

SEQ ID NO: 4737453 - DNA, 25 bp, Homo sapien
gacgcaaagggctcatcaccaatgg

SEQ ID NO: 4737454 - DNA, 25 bp, Homo sapien
ctgtgacgcaaagggctcatcacca

SEQ ID NO: 4737455 - DNA, 25 bp, Homo sapien
tgacgcaaagggctcatcaccaatg

SEQ ID NO: 4737456 - DNA, 25 bp, Homo sapien
ccgctccagaccccggaggagggca

SEQ ID NO: 4737457 - DNA, 25 bp, Homo sapien
taagtcgtcgcacgctggactggat

SEQ ID NO: 4737458 - DNA, 25 bp, Homo sapien
gaagccagtaagtcgtcgcacgctg

SEQ ID NO: 4737459 - DNA, 25 bp, Homo sapien
agtaagtcgtcgcacgctggactgg

SEQ ID NO: 4737460 - DNA, 25 bp, Homo sapien
ccagtaagtcgtcgcacgctggact

SEQ ID NO: 4737461 - DNA, 25 bp, Homo sapien
cgcaggcggaaaggccctatttctt

SEQ ID NO: 4737462 - DNA, 25 bp, Homo sapien
ccccaccgtgtcgactcactgggcc

SEQ ID NO: 4737463 - DNA, 25 bp, Homo sapien
tattcagtggtaagtcccggggatc

SEQ ID NO: 4737464 - DNA, 25 bp, Homo sapien
cgtgtcgactcactgggcccgcagg

SEQ ID NO: 4737465 - DNA, 25 bp, Homo sapien
tcttcctggaggatacgatcttccg

SEQ ID NO: 4737466 - DNA, 25 bp, Homo sapien
cgatcttccgcttcttacgtaaggg

SEQ ID NO: 4737467 - DNA, 25 bp, Homo sapien
ctgctgggtgtacccgccactggaa

SEQ ID NO: 4737468 - DNA, 25 bp, Homo sapien
tttaattcccaccttagcaatggca

SEQ ID NO: 4737469 - DNA, 25 bp, Homo sapien
ttaacagcaacctaaatctgacagt

SEQ ID NO: 4737470 - DNA, 25 bp, Homo sapien
tgcattatcctttataacaagcact

SEQ ID NO: 4737471 - DNA, 25 bp, Homo sapien
cctttataacaagcactagtatgca

SEQ ID NO: 4737472 - DNA, 25 bp, Homo sapien
caaaattaacagcaacctaaatctg

SEQ ID NO: 4737473 - DNA, 25 bp, Homo sapien
gatatttcactgttgcataccctga

SEQ ID NO: 4737474 - DNA, 25 bp, Homo sapien
tctcatatttgtttagcatgtccac

SEQ ID NO: 4737475 - DNA, 25 bp, Homo sapien
caaattgtacaatgcttgaaaacag

SEQ ID NO: 4737476 - DNA, 25 bp, Homo sapien
taccgttttccaagtcaagaatgac

SEQ ID NO: 4737477 - DNA, 25 bp, Homo sapien
ataggaacaaacttaggctcataag

SEQ ID NO: 4737478 - DNA, 25 bp, Homo sapien
aggaacaaacttaggctcataagcc

SEQ ID NO: 4737479 - DNA, 25 bp, Homo sapien
taggaacaaacttaggctcataagc

SEQ ID NO: 4737480 - DNA, 25 bp, Homo sapien
cattggtggaattacttctccagtc

SEQ ID NO: 4737481 - DNA, 25 bp, Homo sapien
ttggtggaattacttctccagtctc

SEQ ID NO: 4737482 - DNA, 25 bp, Homo sapien
tcattggtggaattacttctccagt

SEQ ID NO: 4737483 - DNA, 25 bp, Homo sapien
ttcattggtggaattacttctccag

SEQ ID NO: 4737484 - DNA, 25 bp, Homo sapien
ggaaaatgtacttgagttctggcat

SEQ ID NO: 4737485 - DNA, 25 bp, Homo sapien
tgtatgaccccaataaatggaggcc

SEQ ID NO: 4737486 - DNA, 25 bp, Homo sapien
cttaagtctacagaggtgatagttc

SEQ ID NO: 4737487 - DNA, 25 bp, Homo sapien
gaagctgactaaatctgaacaatca

SEQ ID NO: 4737488 - DNA, 25 bp, Homo sapien
taggcacggctgtaagattgaggaa

SEQ ID NO: 4737489 - DNA, 25 bp, Homo sapien
gaaacaagaaagaaccacagtggca

SEQ ID NO: 4737490 - DNA, 25 bp, Homo sapien
gaacctcatattcgataggcacggc

SEQ ID NO: 4737491 - DNA, 25 bp, Homo sapien
tgagactacctaggctgtaacacac

SEQ ID NO: 4737492 - DNA, 25 bp, Homo sapien
ccatttgaactgtaattgttacctc

SEQ ID NO: 4737493 - DNA, 25 bp, Homo sapien
gaactgtaattgttacctcacggta

SEQ ID NO: 4737494 - DNA, 25 bp, Homo sapien
tgtaattgttacctcacggtatttc

SEQ ID NO: 4737495 - DNA, 25 bp, Homo sapien
ctaataattgcttggaaagggagga

SEQ ID NO: 4737496 - DNA, 25 bp, Homo sapien
tttcaactatgccatatggtttttc

SEQ ID NO: 4737497 - DNA, 25 bp, Homo sapien
agggaatattctggacttcttttca

SEQ ID NO: 4737498 - DNA, 25 bp, Homo sapien
tggacttcttttcaactatgccata

SEQ ID NO: 4737499 - DNA, 25 bp, Homo sapien
aatattctggacttcttttcaacta

SEQ ID NO: 4737500 - DNA, 25 bp, Homo sapien
aaggctagagattttgcagtcataa

SEQ ID NO: 4737501 - DNA, 25 bp, Homo sapien
tgactgtgaactttggttttatccc

SEQ ID NO: 4737502 - DNA, 25 bp, Homo sapien
tattcacttctatcccatcatcaga

SEQ ID NO: 4737503 - DNA, 25 bp, Homo sapien
aacttaatcaaccaccaacttcagg

SEQ ID NO: 4737504 - DNA, 25 bp, Homo sapien
gatgttccttagctgaattaaatat

SEQ ID NO: 4737505 - DNA, 25 bp, Homo sapien
tactatgatgattctcaaatggtaa

SEQ ID NO: 4737506 - DNA, 25 bp, Homo sapien
cagactaatgttagcatcctttgat

SEQ ID NO: 4737507 - DNA, 25 bp, Homo sapien
atattactatgatgattctcaaatg

SEQ ID NO: 4737508 - DNA, 25 bp, Homo sapien
ctgctgattacacaacaaatgtaaa

SEQ ID NO: 4737509 - DNA, 25 bp, Homo sapien
ctgttcagatcagcgtttccttcca

SEQ ID NO: 4737510 - DNA, 25 bp, Homo sapien
tccttccagattgtctctgcgcact

SEQ ID NO: 4737511 - DNA, 25 bp, Homo sapien
taactctgataaatggagcaggagc

SEQ ID NO: 4737512 - DNA, 25 bp, Homo sapien
aattagtcagccatggtggcggaca

SEQ ID NO: 4737513 - DNA, 25 bp, Homo sapien
ataaacaattcagcaggccaggtgc

SEQ ID NO: 4737514 - DNA, 25 bp, Homo sapien
aaattagtcagccatggtggcggac

SEQ ID NO: 4737515 - DNA, 25 bp, Homo sapien
cattataaacaattcagcaggccag

SEQ ID NO: 4737516 - DNA, 25 bp, Homo sapien
ccagtgtaggaatgatggtgcgttt

SEQ ID NO: 4737517 - DNA, 25 bp, Homo sapien
tccaccagtgtaggaatgatggtgc

SEQ ID NO: 4737518 - DNA, 25 bp, Homo sapien
caccagtgtaggaatgatggtgcgt

SEQ ID NO: 4737519 - DNA, 25 bp, Homo sapien
cttccaccagtgtaggaatgatggt

SEQ ID NO: 4737520 - DNA, 25 bp, Homo sapien
gtccagaagaggagcctgctctccc

SEQ ID NO: 4737521 - DNA, 25 bp, Homo sapien
aagaggagcctgctctccctgttac

SEQ ID NO: 4737522 - DNA, 25 bp, Homo sapien
cagaagaggagcctgctctccctgt

SEQ ID NO: 4737523 - DNA, 25 bp, Homo sapien
ggtccagaagaggagcctgctctcc

SEQ ID NO: 4737524 - DNA, 25 bp, Homo sapien
tgatggagtatcttgacaagcagcc

SEQ ID NO: 4737525 - DNA, 25 bp, Homo sapien
tcttgacaagcagccgtccatgtcg

SEQ ID NO: 4737526 - DNA, 25 bp, Homo sapien
gtatcttgacaagcagccgtccatg

SEQ ID NO: 4737527 - DNA, 25 bp, Homo sapien
caagcagccgtccatgtcgaaggga

SEQ ID NO: 4737528 - DNA, 25 bp, Homo sapien
agccttccggtgtgcagagacggct

SEQ ID NO: 4737529 - DNA, 25 bp, Homo sapien
ccttccggtgtgcagagacggctgc

SEQ ID NO: 4737530 - DNA, 25 bp, Homo sapien
cttccggtgtgcagagacggctgcc

SEQ ID NO: 4737531 - DNA, 25 bp, Homo sapien
ctagccttccggtgtgcagagacgg

SEQ ID NO: 4737532 - DNA, 25 bp, Homo sapien
tggagcttctggcacatggagcgga

SEQ ID NO: 4737533 - DNA, 25 bp, Homo sapien
actggagcttctggcacatggagcg

SEQ ID NO: 4737534 - DNA, 25 bp, Homo sapien
ctggagcttctggcacatggagcgg

SEQ ID NO: 4737535 - DNA, 25 bp, Homo sapien
tgtcggctgcgacgttctggctgac

SEQ ID NO: 4737536 - DNA, 25 bp, Homo sapien
cagatagccagacttattccaaaat

SEQ ID NO: 4737537 - DNA, 25 bp, Homo sapien
agccttcaaaccacagcgggtcctc

SEQ ID NO: 4737538 - DNA, 25 bp, Homo sapien
gacttattccaaaatcgggactcca

SEQ ID NO: 4737539 - DNA, 25 bp, Homo sapien
cctggatgagccacgcgtgcggctg

SEQ ID NO: 4737540 - DNA, 25 bp, Homo sapien
ggaagcacccgatgtcactcacata

SEQ ID NO: 4737541 - DNA, 25 bp, Homo sapien
gctcggcatcgtcgaggacgcttcg

SEQ ID NO: 4737542 - DNA, 25 bp, Homo sapien
cagctcggcatcgtcgaggacgctt

SEQ ID NO: 4737543 - DNA, 25 bp, Homo sapien
ctgaggaagcacccgatgtcactca

SEQ ID NO: 4737544 - DNA, 25 bp, Homo sapien
tttggaactgcattgttctacaacc

SEQ ID NO: 4737545 - DNA, 25 bp, Homo sapien
tgtaactcgttttggtggtctagaa

SEQ ID NO: 4737546 - DNA, 25 bp, Homo sapien
cgttcttttacactgctattacaca

SEQ ID NO: 4737547 - DNA, 25 bp, Homo sapien
tattacacacttataccacagcaca

SEQ ID NO: 4737548 - DNA, 25 bp, Homo sapien
tagggtaagatagccacaaagaaag

SEQ ID NO: 4737549 - DNA, 25 bp, Homo sapien
agggtaagatagccacaaagaaagt

SEQ ID NO: 4737550 - DNA, 25 bp, Homo sapien
aatgaataatccagacaggtacaag

SEQ ID NO: 4737551 - DNA, 25 bp, Homo sapien
tacaagtacatgagtgaaaacaaag

SEQ ID NO: 4737552 - DNA, 25 bp, Homo sapien
taatccagacaggtacaagtacatg

SEQ ID NO: 4737553 - DNA, 25 bp, Homo sapien
aagatactctttttgtataccccat

SEQ ID NO: 4737554 - DNA, 25 bp, Homo sapien
tcttatagtctgtaggtaacctcat

SEQ ID NO: 4737555 - DNA, 25 bp, Homo sapien
cgccaatgctggaaaaaggacgttt

SEQ ID NO: 4737556 - DNA, 25 bp, Homo sapien
tataaggcagacaaccttgacaacg

SEQ ID NO: 4737557 - DNA, 25 bp, Homo sapien
gaagatacctacaaagtccagacca

SEQ ID NO: 4737558 - DNA, 25 bp, Homo sapien
tcaaaagagaaccaaacgtgcagcg

SEQ ID NO: 4737559 - DNA, 25 bp, Homo sapien
aattttaattctagcgagtccttgg

SEQ ID NO: 4737560 - DNA, 25 bp, Homo sapien
gatactgtgttacttggtctctaga

SEQ ID NO: 4737561 - DNA, 25 bp, Homo sapien
tgccctctggtggttggatactgtg

SEQ ID NO: 4737562 - DNA, 25 bp, Homo sapien
aaaggcatgattctctcaaagccat

SEQ ID NO: 4737563 - DNA, 25 bp, Homo sapien
ttgacagtaaaaggcatgattctct

SEQ ID NO: 4737564 - DNA, 25 bp, Homo sapien
aggcatgattctctcaaagccatac

SEQ ID NO: 4737565 - DNA, 25 bp, Homo sapien
taaaaggcatgattctctcaaagcc

SEQ ID NO: 4737566 - DNA, 25 bp, Homo sapien
gcagggagcggacgttcagtgttca

SEQ ID NO: 4737567 - DNA, 25 bp, Homo sapien
gagcgttatcagtccttggtgtggc

SEQ ID NO: 4737568 - DNA, 25 bp, Homo sapien
ggactctcgggactggccagtgtcc

SEQ ID NO: 4737569 - DNA, 25 bp, Homo sapien
gccagtgtcccagagcactgagcgt

SEQ ID NO: 4737570 - DNA, 25 bp, Homo sapien
ttcctccaaggggatttattctcca

SEQ ID NO: 4737571 - DNA, 25 bp, Homo sapien
tcctccaaggggatttattctccaa

SEQ ID NO: 4737572 - DNA, 25 bp, Homo sapien
gcagtttctcatccggagtgtaccc

SEQ ID NO: 4737573 - DNA, 25 bp, Homo sapien
ctccataggccccatcttctgtggg

SEQ ID NO: 4737574 - DNA, 25 bp, Homo sapien
tctcatccggagtgtaccccgtcat

SEQ ID NO: 4737575 - DNA, 25 bp, Homo sapien
cagccgcagtttctcatccggagtg

SEQ ID NO: 4737576 - DNA, 25 bp, Homo sapien
tggtaccaacgcaaaaggacacggc

SEQ ID NO: 4737577 - DNA, 25 bp, Homo sapien
gccgcgcgcggttattacgtcacat

SEQ ID NO: 4737578 - DNA, 25 bp, Homo sapien
gactagttacttaagcgcgctcccg

SEQ ID NO: 4737579 - DNA, 25 bp, Homo sapien
tctgcaaagcgaccttgcgggaacg

SEQ ID NO: 4737580 - DNA, 25 bp, Homo sapien
tctgagggcccaatttgcgaattgc

SEQ ID NO: 4737581 - DNA, 25 bp, Homo sapien
catcttatcatgtcggaaagcaggg

SEQ ID NO: 4737582 - DNA, 25 bp, Homo sapien
cttttatcaagggagatgagcatct

SEQ ID NO: 4737583 - DNA, 25 bp, Homo sapien
ttgacatcacggaccccataaaagg

SEQ ID NO: 4737584 - DNA, 25 bp, Homo sapien
cctggatgcagaactcagcacctct

SEQ ID NO: 4737585 - DNA, 25 bp, Homo sapien
tgctgctctccaccaaatccagcca

SEQ ID NO: 4737586 - DNA, 25 bp, Homo sapien
gttaatttccctgaagactctgtgg

SEQ ID NO: 4737587 - DNA, 25 bp, Homo sapien
cagaaaagcttcagtgagcaatgtt

SEQ ID NO: 4737588 - DNA, 25 bp, Homo sapien
tctggccccaatctaaggagatagt

SEQ ID NO: 4737589 - DNA, 25 bp, Homo sapien
tgagattggcgacacctgatggcaa

SEQ ID NO: 4737590 - DNA, 25 bp, Homo sapien
ggagatagtgcccacagaataatga

SEQ ID NO: 4737591 - DNA, 25 bp, Homo sapien
gactggatggcaagtcacattcaca

SEQ ID NO: 4737592 - DNA, 25 bp, Homo sapien
ttgcctcaaatccatataggaacga

SEQ ID NO: 4737593 - DNA, 25 bp, Homo sapien
aatccatataggaacgaggcattgt

SEQ ID NO: 4737594 - DNA, 25 bp, Homo sapien
tcaaatccatataggaacgaggcat

SEQ ID NO: 4737595 - DNA, 25 bp, Homo sapien
catataggaacgaggcattgtataa

SEQ ID NO: 4737596 - DNA, 25 bp, Homo sapien
agcatgctgaagcatgaagggttgt

SEQ ID NO: 4737597 - DNA, 25 bp, Homo sapien
gaaaggattgtctccttcttcgtca

SEQ ID NO: 4737598 - DNA, 25 bp, Homo sapien
agatataagcaaatcctcatacagg

SEQ ID NO: 4737599 - DNA, 25 bp, Homo sapien
catacaggacactggcttcaggttg

SEQ ID NO: 4737600 - DNA, 25 bp, Homo sapien
cactttcactcagctggatagcaga

SEQ ID NO: 4737601 - DNA, 25 bp, Homo sapien
gggctggaggcttaggtttcccatc

SEQ ID NO: 4737602 - DNA, 25 bp, Homo sapien
aagatcaccatctcccccttctggg

SEQ ID NO: 4737603 - DNA, 25 bp, Homo sapien
tggggctggaggcttaggtttccca

SEQ ID NO: 4737604 - DNA, 25 bp, Homo sapien
ctgcaagatcaccatctcccccttc

SEQ ID NO: 4737605 - DNA, 25 bp, Homo sapien
gggtccaggctttctaattctgctt

SEQ ID NO: 4737606 - DNA, 25 bp, Homo sapien
tcattgggtccaggctttctaattc

SEQ ID NO: 4737607 - DNA, 25 bp, Homo sapien
ttgaaatacagaggcatctcgagac

SEQ ID NO: 4737608 - DNA, 25 bp, Homo sapien
tatccttctcaagttgagtcaaatg

SEQ ID NO: 4737609 - DNA, 25 bp, Homo sapien
ggcccattgtaggtcgcactgtttt

SEQ ID NO: 4737610 - DNA, 25 bp, Homo sapien
acaggtttcgaaggtggcacatttg

SEQ ID NO: 4737611 - DNA, 25 bp, Homo sapien
gcaacaggtttcgaaggtggcacat

SEQ ID NO: 4737612 - DNA, 25 bp, Homo sapien
tggcaacaggtttcgaaggtggcac

SEQ ID NO: 4737613 - DNA, 25 bp, Homo sapien
tttttaatctcttcctcaggcacac

SEQ ID NO: 4737614 - DNA, 25 bp, Homo sapien
ctttttaatctcttcctcaggcaca

SEQ ID NO: 4737615 - DNA, 25 bp, Homo sapien
caaatttacgtagaagttgcttggc

SEQ ID NO: 4737616 - DNA, 25 bp, Homo sapien
aaatttacgtagaagttgcttggca

SEQ ID NO: 4737617 - DNA, 25 bp, Homo sapien
catttttcagggaaaggcgacgaag

SEQ ID NO: 4737618 - DNA, 25 bp, Homo sapien
atttacgtagaagttgcttggcatt

SEQ ID NO: 4737619 - DNA, 25 bp, Homo sapien
gtgttggtttatttggaatcttcac

SEQ ID NO: 4737620 - DNA, 25 bp, Homo sapien
tgctgtgttggtttatttggaatct

SEQ ID NO: 4737621 - DNA, 25 bp, Homo sapien
tgtggctctttatcatccttctgct

SEQ ID NO: 4737622 - DNA, 25 bp, Homo sapien
tttatcatccttctgctgtgttggt

SEQ ID NO: 4737623 - DNA, 25 bp, Homo sapien
ggagcagcgtgaacttcatcatcaa

SEQ ID NO: 4737624 - DNA, 25 bp, Homo sapien
aaggagcagcgtgaacttcatcatc

SEQ ID NO: 4737625 - DNA, 25 bp, Homo sapien
caaggagcagcgtgaacttcatcat

SEQ ID NO: 4737626 - DNA, 25 bp, Homo sapien
aggagcagcgtgaacttcatcatca

SEQ ID NO: 4737627 - DNA, 25 bp, Homo sapien
cagacttaagcacccaccagtttga

SEQ ID NO: 4737628 - DNA, 25 bp, Homo sapien
agcgcagagctttagcctcttccgg

SEQ ID NO: 4737629 - DNA, 25 bp, Homo sapien
tgtgcgtttgaagtcagcgcagagc

SEQ ID NO: 4737630 - DNA, 25 bp, Homo sapien
tccattcgtatcctccgtggccgat

SEQ ID NO: 4737631 - DNA, 25 bp, Homo sapien
ctgtagaaagtctcgaatatgcata

SEQ ID NO: 4737632 - DNA, 25 bp, Homo sapien
gcccttctggagttaggcccaggaa

SEQ ID NO: 4737633 - DNA, 25 bp, Homo sapien
gaaagtctcgaatatgcatattggc

SEQ ID NO: 4737634 - DNA, 25 bp, Homo sapien
gcatattggcccttctggagttagg

SEQ ID NO: 4737635 - DNA, 25 bp, Homo sapien
ggagcacgaaaaaggttgttctcaa

SEQ ID NO: 4737636 - DNA, 25 bp, Homo sapien
tgatgtgctttagcaaaggttggac

SEQ ID NO: 4737637 - DNA, 25 bp, Homo sapien
tagtaaccctgtcttgtccgaatga

SEQ ID NO: 4737638 - DNA, 25 bp, Homo sapien
tgccatgccaacctgcatcattaag

SEQ ID NO: 4737639 - DNA, 25 bp, Homo sapien
catcattggagagattccatggatc

SEQ ID NO: 4737640 - DNA, 25 bp, Homo sapien
cattggagagattccatggatcttt

SEQ ID NO: 4737641 - DNA, 25 bp, Homo sapien
tactcatcattggagagattccatg

SEQ ID NO: 4737642 - DNA, 25 bp, Homo sapien
ataatactcatcattggagagattc

SEQ ID NO: 4737643 - DNA, 25 bp, Homo sapien
attcctagtcttaatagaaggaagc

SEQ ID NO: 4737644 - DNA, 25 bp, Homo sapien
cctagtcttaatagaaggaagccag

SEQ ID NO: 4737645 - DNA, 25 bp, Homo sapien
ctagtcttaatagaaggaagccagc

SEQ ID NO: 4737646 - DNA, 25 bp, Homo sapien
ttgaagccatagtcaaacccactgc

SEQ ID NO: 4737647 - DNA, 25 bp, Homo sapien
tttctcagtttgaagccatagtcaa

SEQ ID NO: 4737648 - DNA, 25 bp, Homo sapien
tcagtttgaagccatagtcaaaccc

SEQ ID NO: 4737649 - DNA, 25 bp, Homo sapien
gtttgaagccatagtcaaacccact

SEQ ID NO: 4737650 - DNA, 25 bp, Homo sapien
atcagagtaactactgaaatccact

SEQ ID NO: 4737651 - DNA, 25 bp, Homo sapien
cctggtccaaaaagatgtaggaagc

SEQ ID NO: 4737652 - DNA, 25 bp, Homo sapien
gatttcatcatcagcgagacactgc

SEQ ID NO: 4737653 - DNA, 25 bp, Homo sapien
tgtaggaagcgtaacacttttccag

SEQ ID NO: 4737654 - DNA, 25 bp, Homo sapien
ctaaagtaaatgggccacctccaga

SEQ ID NO: 4737655 - DNA, 25 bp, Homo sapien
gatacccgctaaagtaaatgggcca

SEQ ID NO: 4737656 - DNA, 25 bp, Homo sapien
tggcggcagtgacggtagctgctgc

SEQ ID NO: 4737657 - DNA, 25 bp, Homo sapien
gatggcggcagtgacggtagctgct

SEQ ID NO: 4737658 - DNA, 25 bp, Homo sapien
cggcagtgacggtagctgctgccct

SEQ ID NO: 4737659 - DNA, 25 bp, Homo sapien
gcggcagtgacggtagctgctgccc

SEQ ID NO: 4737660 - DNA, 25 bp, Homo sapien
tgatctacttagctcccttacccta

SEQ ID NO: 4737661 - DNA, 25 bp, Homo sapien
aacagtcgcccggaagtgatctact

SEQ ID NO: 4737662 - DNA, 25 bp, Homo sapien
cctaccagcgtctaccggaagctga

SEQ ID NO: 4737663 - DNA, 25 bp, Homo sapien
tctaccggaagctgaataaaggcgg

SEQ ID NO: 4737664 - DNA, 25 bp, Homo sapien
tataatgggaccctctgggcaacag

SEQ ID NO: 4737665 - DNA, 25 bp, Homo sapien
catggattgagcaatagtgaggcca

SEQ ID NO: 4737666 - DNA, 25 bp, Homo sapien
gctgaaagtgcaagtaaagccatgg

SEQ ID NO: 4737667 - DNA, 25 bp, Homo sapien
cacccctgccgtgaaaaatgctcaa

SEQ ID NO: 4737668 - DNA, 25 bp, Homo sapien
gaaggaatgatagtgggaatgagag

SEQ ID NO: 4737669 - DNA, 25 bp, Homo sapien
tgggaatgagagtcatgggaaagga

SEQ ID NO: 4737670 - DNA, 25 bp, Homo sapien
aatgatagtgggaatgagagtcatg

SEQ ID NO: 4737671 - DNA, 25 bp, Homo sapien
gttttgaggaaggaatgatagtggg

SEQ ID NO: 4737672 - DNA, 25 bp, Homo sapien
cttgcttcatgggatcattacgatt

SEQ ID NO: 4737673 - DNA, 25 bp, Homo sapien
tctctaatgaatggtgatattgatc

SEQ ID NO: 4737674 - DNA, 25 bp, Homo sapien
gatgaatagtagacttttgtcacat

SEQ ID NO: 4737675 - DNA, 25 bp, Homo sapien
tacgattttatagggccaagcattg

SEQ ID NO: 4737676 - DNA, 25 bp, Homo sapien
cagaaaggaggtagtatatgcccat

SEQ ID NO: 4737677 - DNA, 25 bp, Homo sapien
tcagaaggactaagtgatttggcca

SEQ ID NO: 4737678 - DNA, 25 bp, Homo sapien
tagatctaaatccaaagcttgtggg

SEQ ID NO: 4737679 - DNA, 25 bp, Homo sapien
ggaggctattgaaattggaccaccc

SEQ ID NO: 4737680 - DNA, 25 bp, Homo sapien
ccttagctggcaaattagatggagc

SEQ ID NO: 4737681 - DNA, 25 bp, Homo sapien
tggagttggaacattcctttccctg

SEQ ID NO: 4737682 - DNA, 25 bp, Homo sapien
ctgcatggagttggaacattccttt

SEQ ID NO: 4737683 - DNA, 25 bp, Homo sapien
gttcccttccttagctggcaaatta

SEQ ID NO: 4737684 - DNA, 25 bp, Homo sapien
ttggcaatggtatccaggagtggct

SEQ ID NO: 4737685 - DNA, 25 bp, Homo sapien
aagaagttgcctgactcagcaagtc

SEQ ID NO: 4737686 - DNA, 25 bp, Homo sapien
tctgataacagcttactggttggat

SEQ ID NO: 4737687 - DNA, 25 bp, Homo sapien
tgttcccatggatgcagtcacgctc

SEQ ID NO: 4737688 - DNA, 25 bp, Homo sapien
gaatactttgataagttccattgct

SEQ ID NO: 4737689 - DNA, 25 bp, Homo sapien
atcccacggaaaggagggcccatca

SEQ ID NO: 4737690 - DNA, 25 bp, Homo sapien
atcatcccacggaaaggagggccca

SEQ ID NO: 4737691 - DNA, 25 bp, Homo sapien
ctggcatcatcccacggaaaggagg

SEQ ID NO: 4737692 - DNA, 25 bp, Homo sapien
gcatcatgggagggctcgcatatgg

SEQ ID NO: 4737693 - DNA, 25 bp, Homo sapien
ttcctaccactgaagtgggcctttc

SEQ ID NO: 4737694 - DNA, 25 bp, Homo sapien
tgtttcctaccactgaagtgggcct

SEQ ID NO: 4737695 - DNA, 25 bp, Homo sapien
tcgcccaattgccaattttcataat

SEQ ID NO: 4737696 - DNA, 25 bp, Homo sapien
acactgtgaacatcgcccaattgcc

SEQ ID NO: 4737697 - DNA, 25 bp, Homo sapien
gccccaggcagtagacgggacactg

SEQ ID NO: 4737698 - DNA, 25 bp, Homo sapien
gcagtagacgggacactgtgaacat

SEQ ID NO: 4737699 - DNA, 25 bp, Homo sapien
tctgtccgtgggatctaaaacacga

SEQ ID NO: 4737700 - DNA, 25 bp, Homo sapien
gtgtcaccaccaccctacgaaaatg

SEQ ID NO: 4737701 - DNA, 25 bp, Homo sapien
agtttaacagcctccaaccagaagt

SEQ ID NO: 4737702 - DNA, 25 bp, Homo sapien
tatttttctgattggtatcctcgcc

SEQ ID NO: 4737703 - DNA, 25 bp, Homo sapien
gcagccgtcagcttcccatgaaagg

SEQ ID NO: 4737704 - DNA, 25 bp, Homo sapien
tcccatgaaaggtcttagaaccatg

SEQ ID NO: 4737705 - DNA, 25 bp, Homo sapien
ccatgctgcagtaggtttagatcaa

SEQ ID NO: 4737706 - DNA, 25 bp, Homo sapien
tttagatcaagttgcttggagcaga

SEQ ID NO: 4737707 - DNA, 25 bp, Homo sapien
tggggcggtgaaaacaaacaggcca

SEQ ID NO: 4737708 - DNA, 25 bp, Homo sapien
gggcggtgaaaacaaacaggccata

SEQ ID NO: 4737709 - DNA, 25 bp, Homo sapien
ggcggtgaaaacaaacaggccatac

SEQ ID NO: 4737710 - DNA, 25 bp, Homo sapien
caaacaggccatacagatctcagct

SEQ ID NO: 4737711 - DNA, 25 bp, Homo sapien
tcttggcggtttggacgattgctga

SEQ ID NO: 4737712 - DNA, 25 bp, Homo sapien
gtgtcatgtcttggcggtttggacg

SEQ ID NO: 4737713 - DNA, 25 bp, Homo sapien
catgtcttggcggtttggacgattg

SEQ ID NO: 4737714 - DNA, 25 bp, Homo sapien
tttggacgattgctgaggtagagct

SEQ ID NO: 4737715 - DNA, 25 bp, Homo sapien
taacacagtcgagcattccaggtcc

SEQ ID NO: 4737716 - DNA, 25 bp, Homo sapien
acaatccaactccatttcttgaatc

SEQ ID NO: 4737717 - DNA, 25 bp, Homo sapien
cagactcctgccatgtgctgctcct

SEQ ID NO: 4737718 - DNA, 25 bp, Homo sapien
tccacacgctgtgtcctgcacggta

SEQ ID NO: 4737719 - DNA, 25 bp, Homo sapien
gacaaaagactctaggctgaggctg

SEQ ID NO: 4737720 - DNA, 25 bp, Homo sapien
catgtggtctcgctgtacaagatgg

SEQ ID NO: 4737721 - DNA, 25 bp, Homo sapien
tacaagatggttgggctttctcaca

SEQ ID NO: 4737722 - DNA, 25 bp, Homo sapien
tctgaagactcactctccgtgcctg

SEQ ID NO: 4737723 - DNA, 25 bp, Homo sapien
tggcacttcttggagcaactgtact

SEQ ID NO: 4737724 - DNA, 25 bp, Homo sapien
cttatggcacttcttggagcaactg

SEQ ID NO: 4737725 - DNA, 25 bp, Homo sapien
cacttcttggagcaactgtacttgt

SEQ ID NO: 4737726 - DNA, 25 bp, Homo sapien
tatggcacttcttggagcaactgta

SEQ ID NO: 4737727 - DNA, 25 bp, Homo sapien
ataaattaggtattgatgggacgta

SEQ ID NO: 4737728 - DNA, 25 bp, Homo sapien
ttaggtattgatgggacgtatttca

SEQ ID NO: 4737729 - DNA, 25 bp, Homo sapien
aaattaggtattgatgggacgtatt

SEQ ID NO: 4737730 - DNA, 25 bp, Homo sapien
attaggtattgatgggacgtatttc

SEQ ID NO: 4737731 - DNA, 25 bp, Homo sapien
aatgtcaacactgttgcttgtcggg

SEQ ID NO: 4737732 - DNA, 25 bp, Homo sapien
cactgttgcttgtcgggaaaccgga

SEQ ID NO: 4737733 - DNA, 25 bp, Homo sapien
aggaaaatgtcaacactgttgcttg

SEQ ID NO: 4737734 - DNA, 25 bp, Homo sapien
caacactgttgcttgtcgggaaacc

SEQ ID NO: 4737735 - DNA, 25 bp, Homo sapien
gagtgtcaggttcatagaggtattt

SEQ ID NO: 4737736 - DNA, 25 bp, Homo sapien
ggttcatagaggtatttgcctacct

SEQ ID NO: 4737737 - DNA, 25 bp, Homo sapien
catagaggtatttgcctacctcggg

SEQ ID NO: 4737738 - DNA, 25 bp, Homo sapien
tgtcaggttcatagaggtatttgcc

SEQ ID NO: 4737739 - DNA, 25 bp, Homo sapien
ttcctactgtgtgagattggcattt

SEQ ID NO: 4737740 - DNA, 25 bp, Homo sapien
cacaagcactcattaggggctgcga

SEQ ID NO: 4737741 - DNA, 25 bp, Homo sapien
ccaaccagaagtcattaagctcggt

SEQ ID NO: 4737742 - DNA, 25 bp, Homo sapien
agtcattaagctcggtggtttccct

SEQ ID NO: 4737743 - DNA, 25 bp, Homo sapien
cttctccgaacctctacttagaact

SEQ ID NO: 4737744 - DNA, 25 bp, Homo sapien
tctccgaacctctacttagaacttc

SEQ ID NO: 4737745 - DNA, 25 bp, Homo sapien
cagggaagatgacaacatatctcat

SEQ ID NO: 4737746 - DNA, 25 bp, Homo sapien
gaagatgacaacatatctcattgag

SEQ ID NO: 4737747 - DNA, 25 bp, Homo sapien
tgccacactcagaccgcctgatcag

SEQ ID NO: 4737748 - DNA, 25 bp, Homo sapien
tgatcagaacctcggtggacaccat

SEQ ID NO: 4737749 - DNA, 25 bp, Homo sapien
cgcctgatcagaacctcggtggaca

SEQ ID NO: 4737750 - DNA, 25 bp, Homo sapien
tcagaccgcctgatcagaacctcgg

SEQ ID NO: 4737751 - DNA, 25 bp, Homo sapien
tgaaatttttgttaagacggcaagc

SEQ ID NO: 4737752 - DNA, 25 bp, Homo sapien
gaataagaaggtataccgctttgca

SEQ ID NO: 4737753 - DNA, 25 bp, Homo sapien
ttcttttccttgtctgcgttcagta

SEQ ID NO: 4737754 - DNA, 25 bp, Homo sapien
gacttcactggcaatactgaactgg

SEQ ID NO: 4737755 - DNA, 25 bp, Homo sapien
aaacatgcctttcttcccctgggag

SEQ ID NO: 4737756 - DNA, 25 bp, Homo sapien
tcaaacatgcctttcttcccctggg

SEQ ID NO: 4737757 - DNA, 25 bp, Homo sapien
aacatgcctttcttcccctgggagg

SEQ ID NO: 4737758 - DNA, 25 bp, Homo sapien
catgcctttcttcccctgggaggaa

SEQ ID NO: 4737759 - DNA, 25 bp, Homo sapien
tctcaggcctacaacaatcagctct

SEQ ID NO: 4737760 - DNA, 25 bp, Homo sapien
ggttgatcactatccccttcccaaa

SEQ ID NO: 4737761 - DNA, 25 bp, Homo sapien
catgcttggatgtcagctgattatc

SEQ ID NO: 4737762 - DNA, 25 bp, Homo sapien
aatcagctctgagtatctgcttctg

SEQ ID NO: 4737763 - DNA, 25 bp, Homo sapien
tcaactttacatccccaggaggagc

SEQ ID NO: 4737764 - DNA, 25 bp, Homo sapien
gaagaaatccgagctggcaacagag

SEQ ID NO: 4737765 - DNA, 25 bp, Homo sapien
tgtaggagcctgagaaggatcaacc

SEQ ID NO: 4737766 - DNA, 25 bp, Homo sapien
tctggcacagaggtcccagcataag

SEQ ID NO: 4737767 - DNA, 25 bp, Homo sapien
tattgtgccggtatctgacctggtc

SEQ ID NO: 4737768 - DNA, 25 bp, Homo sapien
ggtatctgacctggtctttgccgga

SEQ ID NO: 4737769 - DNA, 25 bp, Homo sapien
tcatttccaatattgtgccggtatc

SEQ ID NO: 4737770 - DNA, 25 bp, Homo sapien
ctgacctggtctttgccggactcaa

SEQ ID NO: 4737771 - DNA, 25 bp, Homo sapien
cagcacatattttcgggtggacatt

SEQ ID NO: 4737772 - DNA, 25 bp, Homo sapien
gacattggacttatgtggaatctca

SEQ ID NO: 4737773 - DNA, 25 bp, Homo sapien
ttttctgcacaggtactaggtccag

SEQ ID NO: 4737774 - DNA, 25 bp, Homo sapien
cttatgtggaatctcaaaagttttc

SEQ ID NO: 4737775 - DNA, 25 bp, Homo sapien
tgagtcattattgtccagtgctgtg

SEQ ID NO: 4737776 - DNA, 25 bp, Homo sapien
caacattaaaggacgaagattcagc

SEQ ID NO: 4737777 - DNA, 25 bp, Homo sapien
tcagatttcgaccaaaacacaagtt

SEQ ID NO: 4737778 - DNA, 25 bp, Homo sapien
ccataagcataaaagttcacacgat

SEQ ID NO: 4737779 - DNA, 25 bp, Homo sapien
tgttactagactgcaccctgaaggt

SEQ ID NO: 4737780 - DNA, 25 bp, Homo sapien
gccttctgccctttagagctccagt

SEQ ID NO: 4737781 - DNA, 25 bp, Homo sapien
tcaacatggctattggtctcagtcc

SEQ ID NO: 4737782 - DNA, 25 bp, Homo sapien
gaaggtgatgggagaaccatcgtct

SEQ ID NO: 4737783 - DNA, 25 bp, Homo sapien
gaaggagtctctatcagtgacatgg

SEQ ID NO: 4737784 - DNA, 25 bp, Homo sapien
aaaacatggacgctctcttgacccc

SEQ ID NO: 4737785 - DNA, 25 bp, Homo sapien
gccggtctttaagctctatgcctca

SEQ ID NO: 4737786 - DNA, 25 bp, Homo sapien
gaatctgactgctttgagtaactgc

SEQ ID NO: 4737787 - DNA, 25 bp, Homo sapien
catgcctaagtggtaagcttgctgc

SEQ ID NO: 4737788 - DNA, 25 bp, Homo sapien
tgtagactgctccaactctctgcct

SEQ ID NO: 4737789 - DNA, 25 bp, Homo sapien
ggtggagggacttaaccaaatcaca

SEQ ID NO: 4737790 - DNA, 25 bp, Homo sapien
ttaagctgaaatcccaatgccagtc

SEQ ID NO: 4737791 - DNA, 25 bp, Homo sapien
ggcaggttggccttgtcttaggtca

SEQ ID NO: 4737792 - DNA, 25 bp, Homo sapien
ggccttgtcttaggtcatcaacaac

SEQ ID NO: 4737793 - DNA, 25 bp, Homo sapien
ggtatgaatccgaacagttaattac

SEQ ID NO: 4737794 - DNA, 25 bp, Homo sapien
gtgcctatttttaggtatgaatccg

SEQ ID NO: 4737795 - DNA, 25 bp, Homo sapien
gcagcatcattttttacattggcac

SEQ ID NO: 4737796 - DNA, 25 bp, Homo sapien
aagtcaagtgtattccctaacccag

SEQ ID NO: 4737797 - DNA, 25 bp, Homo sapien
cacagtggatttgtaccaagtcaag

SEQ ID NO: 4737798 - DNA, 25 bp, Homo sapien
tgttctgtcctccatacacagtaag

SEQ ID NO: 4737799 - DNA, 25 bp, Homo sapien
tgctcttcagaataacgctcttcct

SEQ ID NO: 4737800 - DNA, 25 bp, Homo sapien
tcagcaactcaagagggagacataa

SEQ ID NO: 4737801 - DNA, 25 bp, Homo sapien
gggcaaggatagtgattctcaggct

SEQ ID NO: 4737802 - DNA, 25 bp, Homo sapien
ctcaggcttccctgtgatcagcaac

SEQ ID NO: 4737803 - DNA, 25 bp, Homo sapien
tctaacaacactggtcggtccctta

SEQ ID NO: 4737804 - DNA, 25 bp, Homo sapien
ctcctagatatccagcattccacgg

SEQ ID NO: 4737805 - DNA, 25 bp, Homo sapien
agatatccagcattccacgggctcc

SEQ ID NO: 4737806 - DNA, 25 bp, Homo sapien
ctagatatccagcattccacgggct

SEQ ID NO: 4737807 - DNA, 25 bp, Homo sapien
tccatcaagcttccctttgggcagt

SEQ ID NO: 4737808 - DNA, 25 bp, Homo sapien
caataaccacatctggcagtgcaat

SEQ ID NO: 4737809 - DNA, 25 bp, Homo sapien
tcattgagcagaacatccatcaagc

SEQ ID NO: 4737810 - DNA, 25 bp, Homo sapien
cctccagtgaatctgcagatgtttg

SEQ ID NO: 4737811 - DNA, 25 bp, Homo sapien
tcccaccaaggaaaggaatcatcgg

SEQ ID NO: 4737812 - DNA, 25 bp, Homo sapien
tgctcccacatggtaagcaccactg

SEQ ID NO: 4737813 - DNA, 25 bp, Homo sapien
ggcatcactgtggtaaagaccatct

SEQ ID NO: 4737814 - DNA, 25 bp, Homo sapien
accattactggtgggcggcatcact

SEQ ID NO: 4737815 - DNA, 25 bp, Homo sapien
tctacagaaagaccatcgcactgca

SEQ ID NO: 4737816 - DNA, 25 bp, Homo sapien
tgaggctcgtaatccattccacagg

SEQ ID NO: 4737817 - DNA, 25 bp, Homo sapien
gggaaacaatgacccacgaagcaga

SEQ ID NO: 4737818 - DNA, 25 bp, Homo sapien
cacgaagcagaggttcacaaacaat

SEQ ID NO: 4737819 - DNA, 25 bp, Homo sapien
tttgggtgaagtgccgcttcctaga

SEQ ID NO: 4737820 - DNA, 25 bp, Homo sapien
tgggtgaagtgccgcttcctagaag

SEQ ID NO: 4737821 - DNA, 25 bp, Homo sapien
ggtgaagtgccgcttcctagaagcc

SEQ ID NO: 4737822 - DNA, 25 bp, Homo sapien
gtgaagtgccgcttcctagaagcca

SEQ ID NO: 4737823 - DNA, 25 bp, Homo sapien
ggccactgtcaacccgctgcccagg

SEQ ID NO: 4737824 - DNA, 25 bp, Homo sapien
ccttggccactgtcaacccgctgcc

SEQ ID NO: 4737825 - DNA, 25 bp, Homo sapien
tcccctccacagtccaccgaaccac

SEQ ID NO: 4737826 - DNA, 25 bp, Homo sapien
ccctccacagtccaccgaaccacat

SEQ ID NO: 4737827 - DNA, 25 bp, Homo sapien
ccatgccccagctgttagaggacca

SEQ ID NO: 4737828 - DNA, 25 bp, Homo sapien
ggatgcacgggatctccattgccct

SEQ ID NO: 4737829 - DNA, 25 bp, Homo sapien
ttcttgtcacctgtctgagtctcca

SEQ ID NO: 4737830 - DNA, 25 bp, Homo sapien
aaagaggattatttatagtgttggc

SEQ ID NO: 4737831 - DNA, 25 bp, Homo sapien
caagactggactaagcccctggacc

SEQ ID NO: 4737832 - DNA, 25 bp, Homo sapien
tgtctgtgcataggcacttgttcct

SEQ ID NO: 4737833 - DNA, 25 bp, Homo sapien
tgtgcataggcacttgttcctccaa

SEQ ID NO: 4737834 - DNA, 25 bp, Homo sapien
ttgttcctccaagactggactaagc

SEQ ID NO: 4737835 - DNA, 25 bp, Homo sapien
tacgtggcattaaggaaattttctg

SEQ ID NO: 4737836 - DNA, 25 bp, Homo sapien
acgtggcattaaggaaattttctgc

SEQ ID NO: 4737837 - DNA, 25 bp, Homo sapien
gaccttgacatgtgatttcttgtgc

SEQ ID NO: 4737838 - DNA, 25 bp, Homo sapien
agagtgaccttgacatgtgatttct

SEQ ID NO: 4737839 - DNA, 25 bp, Homo sapien
ctagggtccattgcttttcaggggc

SEQ ID NO: 4737840 - DNA, 25 bp, Homo sapien
tagtactgatggtctctgccaaagc

SEQ ID NO: 4737841 - DNA, 25 bp, Homo sapien
ctgggcctatgggtcttggcttcaa

SEQ ID NO: 4737842 - DNA, 25 bp, Homo sapien
caatctcaggcctgcgggaagtcgt

SEQ ID NO: 4737843 - DNA, 25 bp, Homo sapien
gagctggatgattgaggcaatagta

SEQ ID NO: 4737844 - DNA, 25 bp, Homo sapien
agttctgatatgggcaataagagaa

SEQ ID NO: 4737845 - DNA, 25 bp, Homo sapien
tccagttctgatatgggcaataaga

SEQ ID NO: 4737846 - DNA, 25 bp, Homo sapien
ccagttctgatatgggcaataagag

SEQ ID NO: 4737847 - DNA, 25 bp, Homo sapien
ttccagttctgatatgggcaataag

SEQ ID NO: 4737848 - DNA, 25 bp, Homo sapien
ctttgtcattaacactgaatgacga

SEQ ID NO: 4737849 - DNA, 25 bp, Homo sapien
tacctggaggtcgtccctttatcca

SEQ ID NO: 4737850 - DNA, 25 bp, Homo sapien
tcattaacactgaatgacgactacc

SEQ ID NO: 4737851 - DNA, 25 bp, Homo sapien
cactgaatgacgactacctggaggt

SEQ ID NO: 4737852 - DNA, 25 bp, Homo sapien
tacatgtcctcacaaaactctttgc

SEQ ID NO: 4737853 - DNA, 25 bp, Homo sapien
cggcttcagtgctagacatgtggaa

SEQ ID NO: 4737854 - DNA, 25 bp, Homo sapien
tttgcattcctcacaccaggagagg

SEQ ID NO: 4737855 - DNA, 25 bp, Homo sapien
catgtggaaggctcggagtttctgt

SEQ ID NO: 4737856 - DNA, 25 bp, Homo sapien
ccggtcctgacagcataggcatgag

SEQ ID NO: 4737857 - DNA, 25 bp, Homo sapien
tgacagcataggcatgagagttgtc

SEQ ID NO: 4737858 - DNA, 25 bp, Homo sapien
cactgactgcactcacagggggcct

SEQ ID NO: 4737859 - DNA, 25 bp, Homo sapien
caccatatagggcatgttgaagggc

SEQ ID NO: 4737860 - DNA, 25 bp, Homo sapien
ctctgtccccagacactgacctcca

SEQ ID NO: 4737861 - DNA, 25 bp, Homo sapien
tctgtccccagacactgacctccat

SEQ ID NO: 4737862 - DNA, 25 bp, Homo sapien
aaaacttcggatgaacttgactgga

SEQ ID NO: 4737863 - DNA, 25 bp, Homo sapien
cggatgaacttgactggaaccactc

SEQ ID NO: 4737864 - DNA, 25 bp, Homo sapien
gggctgtgtagatgcagctgcctaa

SEQ ID NO: 4737865 - DNA, 25 bp, Homo sapien
gatgcagctgcctaaaacttcggat

SEQ ID NO: 4737866 - DNA, 25 bp, Homo sapien
acctaaagcggttggagatttgcca

SEQ ID NO: 4737867 - DNA, 25 bp, Homo sapien
gcttcccttcctgattgttggctcc

SEQ ID NO: 4737868 - DNA, 25 bp, Homo sapien
ttttctctctcaagcagtaacaggc

SEQ ID NO: 4737869 - DNA, 25 bp, Homo sapien
ccttgtggaggtttacggcagggca

SEQ ID NO: 4737870 - DNA, 25 bp, Homo sapien
tgagcagcctcaattgcctccaagc

SEQ ID NO: 4737871 - DNA, 25 bp, Homo sapien
ctgtgagcagcctcaattgcctcca

SEQ ID NO: 4737872 - DNA, 25 bp, Homo sapien
tgtgagcagcctcaattgcctccaa

SEQ ID NO: 4737873 - DNA, 25 bp, Homo sapien
cagcctcaattgcctccaagcttag

SEQ ID NO: 4737874 - DNA, 25 bp, Homo sapien
tatacatcccaccactttaatagca

SEQ ID NO: 4737875 - DNA, 25 bp, Homo sapien
tcaactgccaaactatcagaactca

SEQ ID NO: 4737876 - DNA, 25 bp, Homo sapien
aagaattaccgaatgacaatccacg

SEQ ID NO: 4737877 - DNA, 25 bp, Homo sapien
catttgctaaggagctggttataca

SEQ ID NO: 4737878 - DNA, 25 bp, Homo sapien
gcatggtggatgtggttcatgcctg

SEQ ID NO: 4737879 - DNA, 25 bp, Homo sapien
ctgggcatggtggatgtggttcatg

SEQ ID NO: 4737880 - DNA, 25 bp, Homo sapien
ggcatggtggatgtggttcatgcct

SEQ ID NO: 4737881 - DNA, 25 bp, Homo sapien
tacagatgcctacaaccacacccag

SEQ ID NO: 4737882 - DNA, 25 bp, Homo sapien
taaagattgtgcacaaaatgaagca

SEQ ID NO: 4737883 - DNA, 25 bp, Homo sapien
tgaagcaatacagggatatattaaa

SEQ ID NO: 4737884 - DNA, 25 bp, Homo sapien
cctctgaggtaaccaattacttttg

SEQ ID NO: 4737885 - DNA, 25 bp, Homo sapien
cattggagatagagcaaacacattt

SEQ ID NO: 4737886 - DNA, 25 bp, Homo sapien
acagtggcagcccggacacctcttg

SEQ ID NO: 4737887 - DNA, 25 bp, Homo sapien
ggaacaaggctatgacatcattgcc

SEQ ID NO: 4737888 - DNA, 25 bp, Homo sapien
gaagaaggcactgaagcttgggacc

SEQ ID NO: 4737889 - DNA, 25 bp, Homo sapien
aggagttcatctggccggccatcca

SEQ ID NO: 4737890 - DNA, 25 bp, Homo sapien
catgtaccgagaagtgcgcaaaatc

SEQ ID NO: 4737891 - DNA, 25 bp, Homo sapien
aatgaagttgcaggcaagcacggcg

SEQ ID NO: 4737892 - DNA, 25 bp, Homo sapien
ccttggagcttttcgtgtacctgaa

SEQ ID NO: 4737893 - DNA, 25 bp, Homo sapien
aagtcctgaggtatctgcgaggccc

SEQ ID NO: 4737894 - DNA, 25 bp, Homo sapien
tacggagtcgtctcacacagaaaga

SEQ ID NO: 4737895 - DNA, 25 bp, Homo sapien
tgtgaaatgaactcccctaaacctg

SEQ ID NO: 4737896 - DNA, 25 bp, Homo sapien
caattgtgttgtgtctacggagtcg

SEQ ID NO: 4737897 - DNA, 25 bp, Homo sapien
gatagagcacgtggaaaacagcagg

SEQ ID NO: 4737898 - DNA, 25 bp, Homo sapien
tttgaattaaaagcgacttgccttg

SEQ ID NO: 4737899 - DNA, 25 bp, Homo sapien
aagcctgctcattgttgtgtagtta

SEQ ID NO: 4737900 - DNA, 25 bp, Homo sapien
agatgtcttacttcgtcctaagcag

SEQ ID NO: 4737901 - DNA, 25 bp, Homo sapien
taagcagtatttagcatctaccaaa

SEQ ID NO: 4737902 - DNA, 25 bp, Homo sapien
cacttttaggctggccacacaggag

SEQ ID NO: 4737903 - DNA, 25 bp, Homo sapien
cagatatttcaccacaggcgacgaa

SEQ ID NO: 4737904 - DNA, 25 bp, Homo sapien
cgctttggataacaggagacgctaa

SEQ ID NO: 4737905 - DNA, 25 bp, Homo sapien
aggagccccgaggaaactatgcgtc

SEQ ID NO: 4737906 - DNA, 25 bp, Homo sapien
ctagctcggtccgccgtcgagggtg

SEQ ID NO: 4737907 - DNA, 25 bp, Homo sapien
gtccgccgtcgagggtgcctggaag

SEQ ID NO: 4737908 - DNA, 25 bp, Homo sapien
tcggtccgccgtcgagggtgcctgg

SEQ ID NO: 4737909 - DNA, 25 bp, Homo sapien
ccgccgtcgagggtgcctggaagtc

SEQ ID NO: 4737910 - DNA, 25 bp, Homo sapien
ccccggctggagccccatgggcgcc

SEQ ID NO: 4737911 - DNA, 25 bp, Homo sapien
ggctggagccccatgggcgcctccc

SEQ ID NO: 4737912 - DNA, 25 bp, Homo sapien
cggctggagccccatgggcgcctcc

SEQ ID NO: 4737913 - DNA, 25 bp, Homo sapien
ctggagccccatgggcgcctcccgc

SEQ ID NO: 4737914 - DNA, 25 bp, Homo sapien
cagggagacaaggatcccggagacc

SEQ ID NO: 4737915 - DNA, 25 bp, Homo sapien
ctggcccagctctcggccggtctcc

SEQ ID NO: 4737916 - DNA, 25 bp, Homo sapien
gccgcttctccccattcggtgcagc

SEQ ID NO: 4737917 - DNA, 25 bp, Homo sapien
tccagctgaggattccgccgcggct

SEQ ID NO: 4737918 - DNA, 25 bp, Homo sapien
cggaccctcccgggcgcagccctca

SEQ ID NO: 4737919 - DNA, 25 bp, Homo sapien
gcgggccagggctccccgctggccg

SEQ ID NO: 4737920 - DNA, 25 bp, Homo sapien
tggccggagccgcagcccctttccc

SEQ ID NO: 4737921 - DNA, 25 bp, Homo sapien
agagggcgggccagggctccccgct

SEQ ID NO: 4737922 - DNA, 25 bp, Homo sapien
ctgctgcccgcaccgcctccgagga

SEQ ID NO: 4737923 - DNA, 25 bp, Homo sapien
caccgcctccgaggaaggccctcgg

SEQ ID NO: 4737924 - DNA, 25 bp, Homo sapien
cgcaccgcctccgaggaaggccctc

SEQ ID NO: 4737925 - DNA, 25 bp, Homo sapien
tgcccgcaccgcctccgaggaaggc

SEQ ID NO: 4737926 - DNA, 25 bp, Homo sapien
tgcgtgaatacaagaggaggcgcct

SEQ ID NO: 4737927 - DNA, 25 bp, Homo sapien
tagaaaggtttgacacatccagccc

SEQ ID NO: 4737928 - DNA, 25 bp, Homo sapien
aacatggcgtttgagctctgaggac

SEQ ID NO: 4737929 - DNA, 25 bp, Homo sapien
gaggttccgaaaagccatgcagagc

SEQ ID NO: 4737930 - DNA, 25 bp, Homo sapien
tacctttcctagagaacctcatgag

SEQ ID NO: 4737931 - DNA, 25 bp, Homo sapien
ggttgcaccctatgtggccctcagt

SEQ ID NO: 4737932 - DNA, 25 bp, Homo sapien
acagggaccccacaccgtaagattg

SEQ ID NO: 4737933 - DNA, 25 bp, Homo sapien
taagattgtacgtacggttgcaccc

SEQ ID NO: 4737934 - DNA, 25 bp, Homo sapien
tgttcactaagtaaccactgtggca

SEQ ID NO: 4737935 - DNA, 25 bp, Homo sapien
tcacaacttgagtgaaaagtcacat

SEQ ID NO: 4737936 - DNA, 25 bp, Homo sapien
ggtcaaatgtctctatggactgtgg

SEQ ID NO: 4737937 - DNA, 25 bp, Homo sapien
ctccagaagaagcttttgttaaggg

SEQ ID NO: 4737938 - DNA, 25 bp, Homo sapien
gaaaaagaaagtagtggctctacgc

SEQ ID NO: 4737939 - DNA, 25 bp, Homo sapien
tttccatgcatcagaacctatgctg

SEQ ID NO: 4737940 - DNA, 25 bp, Homo sapien
gctgtgattgttagctgaacttcaa

SEQ ID NO: 4737941 - DNA, 25 bp, Homo sapien
ggctctacgcaactttttcattcac

SEQ ID NO: 4737942 - DNA, 25 bp, Homo sapien
gaaggactggacaaactaagcctcc

SEQ ID NO: 4737943 - DNA, 25 bp, Homo sapien
cagaaatgtataaccagcccaatgc

SEQ ID NO: 4737944 - DNA, 25 bp, Homo sapien
tcagacaacaggtccaagaagactt

SEQ ID NO: 4737945 - DNA, 25 bp, Homo sapien
gaagatggtgggtcaggtatatccc

SEQ ID NO: 4737946 - DNA, 25 bp, Homo sapien
caagcaacccagaataggtgccagc

SEQ ID NO: 4737947 - DNA, 25 bp, Homo sapien
agcaacccagaataggtgccagcag

SEQ ID NO: 4737948 - DNA, 25 bp, Homo sapien
cagaataggtgccagcagtttgctc

SEQ ID NO: 4737949 - DNA, 25 bp, Homo sapien
gaataggtgccagcagtttgctcca

SEQ ID NO: 4737950 - DNA, 25 bp, Homo sapien
actcatgacaacgaaggggcagctt

SEQ ID NO: 4737951 - DNA, 25 bp, Homo sapien
gcctcttgtaccatctcgatcacag

SEQ ID NO: 4737952 - DNA, 25 bp, Homo sapien
tcaggcatcccatctcggacagtta

SEQ ID NO: 4737953 - DNA, 25 bp, Homo sapien
aacgaaggggcagcttcaagagctc

SEQ ID NO: 4737954 - DNA, 25 bp, Homo sapien
gcaaggaagaaaagtcaaatcccag

SEQ ID NO: 4737955 - DNA, 25 bp, Homo sapien
ctgcaggcaaggaagaaaagtcaaa

SEQ ID NO: 4737956 - DNA, 25 bp, Homo sapien
gcaggcaaggaagaaaagtcaaatc

SEQ ID NO: 4737957 - DNA, 25 bp, Homo sapien
caggcaaggaagaaaagtcaaatcc

SEQ ID NO: 4737958 - DNA, 25 bp, Homo sapien
gcccttggtaaatgccagctgccat

SEQ ID NO: 4737959 - DNA, 25 bp, Homo sapien
ctctggttggcccttggtaaatgcc

SEQ ID NO: 4737960 - DNA, 25 bp, Homo sapien
gttggcccttggtaaatgccagctg

SEQ ID NO: 4737961 - DNA, 25 bp, Homo sapien
ggcccttggtaaatgccagctgcca

SEQ ID NO: 4737962 - DNA, 25 bp, Homo sapien
ttaagttcttacacaccaggaaatg

SEQ ID NO: 4737963 - DNA, 25 bp, Homo sapien
atgcttaagttcttacacaccagga

SEQ ID NO: 4737964 - DNA, 25 bp, Homo sapien
gcttaagttcttacacaccaggaaa

SEQ ID NO: 4737965 - DNA, 25 bp, Homo sapien
aagttcttacacaccaggaaatgct

SEQ ID NO: 4737966 - DNA, 25 bp, Homo sapien
cttgtgattctaggaagtattctgt

SEQ ID NO: 4737967 - DNA, 25 bp, Homo sapien
tctgtattgaaagaattccaatgtt

SEQ ID NO: 4737968 - DNA, 25 bp, Homo sapien
taggaagtattctgtattgaaagaa

SEQ ID NO: 4737969 - DNA, 25 bp, Homo sapien
gattctaggaagtattctgtattga

SEQ ID NO: 4737970 - DNA, 25 bp, Homo sapien
cctggctgatcacatgaagatgtac

SEQ ID NO: 4737971 - DNA, 25 bp, Homo sapien
aaaatcctggctgatcacatgaaga

SEQ ID NO: 4737972 - DNA, 25 bp, Homo sapien
aaatcctggctgatcacatgaagat

SEQ ID NO: 4737973 - DNA, 25 bp, Homo sapien
gctgatcacatgaagatgtacatgg

SEQ ID NO: 4737974 - DNA, 25 bp, Homo sapien
tactctttgaatattcatactattg

SEQ ID NO: 4737975 - DNA, 25 bp, Homo sapien
taacaactatggcttaatcaaaatg

SEQ ID NO: 4737976 - DNA, 25 bp, Homo sapien
atagtgtgtccatttaattcaattg

SEQ ID NO: 4737977 - DNA, 25 bp, Homo sapien
caaagagtatgagtacattgtatat

SEQ ID NO: 4737978 - DNA, 25 bp, Homo sapien
agtgtactccaagcgtaccgtaaga

SEQ ID NO: 4737979 - DNA, 25 bp, Homo sapien
taactatgagctgacaaagtagagg

SEQ ID NO: 4737980 - DNA, 25 bp, Homo sapien
cagcagtggcctgtaagtgtactcc

SEQ ID NO: 4737981 - DNA, 25 bp, Homo sapien
gacattagtgggtcaactcttcatg

SEQ ID NO: 4737982 - DNA, 25 bp, Homo sapien
tcttgatatacagcctcctcaattt

SEQ ID NO: 4737983 - DNA, 25 bp, Homo sapien
ttgatatacagcctcctcaatttga

SEQ ID NO: 4737984 - DNA, 25 bp, Homo sapien
ttcttgatatacagcctcctcaatt

SEQ ID NO: 4737985 - DNA, 25 bp, Homo sapien
tttcttgatatacagcctcctcaat

SEQ ID NO: 4737986 - DNA, 25 bp, Homo sapien
aaagagagtcagaagtgcttcgttc

SEQ ID NO: 4737987 - DNA, 25 bp, Homo sapien
cagctccaatagcagtgtagccatc

SEQ ID NO: 4737988 - DNA, 25 bp, Homo sapien
gcagcaagcacctcgcaacacttta

SEQ ID NO: 4737989 - DNA, 25 bp, Homo sapien
cagtgtagccatctcctgtttggag

SEQ ID NO: 4737990 - DNA, 25 bp, Homo sapien
cagggtctttctcggttgatagtaa

SEQ ID NO: 4737991 - DNA, 25 bp, Homo sapien
gagctactttcttctctcgcttcag

SEQ ID NO: 4737992 - DNA, 25 bp, Homo sapien
gaaacacgagtatctagagcatttg

SEQ ID NO: 4737993 - DNA, 25 bp, Homo sapien
cttgcactgccaccggagctacttt

SEQ ID NO: 4737994 - DNA, 25 bp, Homo sapien
ttcttctgggggctgtaataattcc

SEQ ID NO: 4737995 - DNA, 25 bp, Homo sapien
taactgatattctgattcttctggg

SEQ ID NO: 4737996 - DNA, 25 bp, Homo sapien
taataattccatggtcatgggaata

SEQ ID NO: 4737997 - DNA, 25 bp, Homo sapien
tatgctgcttgccattagcattaac

SEQ ID NO: 4737998 - DNA, 25 bp, Homo sapien
atccaatgctccagctgtattcttc

SEQ ID NO: 4737999 - DNA, 25 bp, Homo sapien
tttggcaaatccaatgctccagctg

SEQ ID NO: 4738000 - DNA, 25 bp, Homo sapien
ctccagctgtattcttctgcaccat

SEQ ID NO: 4738001 - DNA, 25 bp, Homo sapien
aagctcctttggcaaatccaatgct

SEQ ID NO: 4738002 - DNA, 25 bp, Homo sapien
gcaatgggaaccaccttgtccaatg

SEQ ID NO: 4738003 - DNA, 25 bp, Homo sapien
accaccttgtccaatgtggctctgg

SEQ ID NO: 4738004 - DNA, 25 bp, Homo sapien
ccttgtccaatgtggctctggcagg

SEQ ID NO: 4738005 - DNA, 25 bp, Homo sapien
gggaaccaccttgtccaatgtggct

SEQ ID NO: 4738006 - DNA, 25 bp, Homo sapien
cccacaggggcaacctgatttacat

SEQ ID NO: 4738007 - DNA, 25 bp, Homo sapien
aaacaagcctcagtggtcctgacag

SEQ ID NO: 4738008 - DNA, 25 bp, Homo sapien
tgtgtgaagaaaggacggataggga

SEQ ID NO: 4738009 - DNA, 25 bp, Homo sapien
cttcctcacaaaccaagcccacagg

SEQ ID NO: 4738010 - DNA, 25 bp, Homo sapien
gaaaccacactaaatggattgagga

SEQ ID NO: 4738011 - DNA, 25 bp, Homo sapien
gcatgttgctttgggagagtgttac

SEQ ID NO: 4738012 - DNA, 25 bp, Homo sapien
gctgagatgtcaacaagcaatccta

SEQ ID NO: 4738013 - DNA, 25 bp, Homo sapien
caatcaacatgtgtgcagaatccaa

SEQ ID NO: 4738014 - DNA, 25 bp, Homo sapien
taaagtacatatgtctatgatatac

SEQ ID NO: 4738015 - DNA, 25 bp, Homo sapien
aagtacatatgtctatgatatacac

SEQ ID NO: 4738016 - DNA, 25 bp, Homo sapien
catatgtctatgatatacacaataa

SEQ ID NO: 4738017 - DNA, 25 bp, Homo sapien
gtacatatgtctatgatatacacaa

SEQ ID NO: 4738018 - DNA, 25 bp, Homo sapien
gtttccttcagagtaatggtcctta

SEQ ID NO: 4738019 - DNA, 25 bp, Homo sapien
gataaaagccactgaccacaattct

SEQ ID NO: 4738020 - DNA, 25 bp, Homo sapien
aaatcctggatctactacgctgtca

SEQ ID NO: 4738021 - DNA, 25 bp, Homo sapien
cacggagatccaccttgcttgtatt

SEQ ID NO: 4738022 - DNA, 25 bp, Homo sapien
tggtagcccaatcggaagcggagtt

SEQ ID NO: 4738023 - DNA, 25 bp, Homo sapien
tcatactcggaatggcgtggtagcc

SEQ ID NO: 4738024 - DNA, 25 bp, Homo sapien
tcggaagcggagtttgctggaccca

SEQ ID NO: 4738025 - DNA, 25 bp, Homo sapien
gctggacccagcaaaatctacaatc

SEQ ID NO: 4738026 - DNA, 25 bp, Homo sapien
ccccacagtgtgcatatgcttaagg

SEQ ID NO: 4738027 - DNA, 25 bp, Homo sapien
cttcagactggaaatggaggtccac

SEQ ID NO: 4738028 - DNA, 25 bp, Homo sapien
taagaccagccaatggtaacgggcc

SEQ ID NO: 4738029 - DNA, 25 bp, Homo sapien
gggtatttatcctttatcaccacca

SEQ ID NO: 4738030 - DNA, 25 bp, Homo sapien
tcttcaagccttgactccagtggcc

SEQ ID NO: 4738031 - DNA, 25 bp, Homo sapien
aatcttcaagccttgactccagtgg

SEQ ID NO: 4738032 - DNA, 25 bp, Homo sapien
agaaatcttcaagccttgactccag

SEQ ID NO: 4738033 - DNA, 25 bp, Homo sapien
ccttgactccagtggcccagggatt

SEQ ID NO: 4738034 - DNA, 25 bp, Homo sapien
tctttaggggcacagagcattggcc

SEQ ID NO: 4738035 - DNA, 25 bp, Homo sapien
cttctttaggggcacagagcattgg

SEQ ID NO: 4738036 - DNA, 25 bp, Homo sapien
ggcacagagcattggccagagttgc

SEQ ID NO: 4738037 - DNA, 25 bp, Homo sapien
ttaggggcacagagcattggccaga

SEQ ID NO: 4738038 - DNA, 25 bp, Homo sapien
tagaatcactgttgcctgatctctt

SEQ ID NO: 4738039 - DNA, 25 bp, Homo sapien
cactgttgcctgatctctttctctt

SEQ ID NO: 4738040 - DNA, 25 bp, Homo sapien
tcactgttgcctgatctctttctct

SEQ ID NO: 4738041 - DNA, 25 bp, Homo sapien
aatcactgttgcctgatctctttct

SEQ ID NO: 4738042 - DNA, 25 bp, Homo sapien
ctacaatatatggataaagttcatt

SEQ ID NO: 4738043 - DNA, 25 bp, Homo sapien
tacaatatatggataaagttcattc

SEQ ID NO: 4738044 - DNA, 25 bp, Homo sapien
acaatatatggataaagttcattca

SEQ ID NO: 4738045 - DNA, 25 bp, Homo sapien
caatatatggataaagttcattcac

SEQ ID NO: 4738046 - DNA, 25 bp, Homo sapien
cgactgagtcaatgctggtgggatt

SEQ ID NO: 4738047 - DNA, 25 bp, Homo sapien
ccaattacgactgagtcaatgctgg

SEQ ID NO: 4738048 - DNA, 25 bp, Homo sapien
tccttcccaattacgactgagtcaa

SEQ ID NO: 4738049 - DNA, 25 bp, Homo sapien
ctcttggtccttcccaattacgact

SEQ ID NO: 4738050 - DNA, 25 bp, Homo sapien
ctggctggcacagacactctaaagt

SEQ ID NO: 4738051 - DNA, 25 bp, Homo sapien
actggctggcacagacactctaaag

SEQ ID NO: 4738052 - DNA, 25 bp, Homo sapien
cactggctggcacagacactctaaa

SEQ ID NO: 4738053 - DNA, 25 bp, Homo sapien
gcaacaaagaaccaggcacttgctc

SEQ ID NO: 4738054 - DNA, 25 bp, Homo sapien
tgcaacaaagaaccaggcacttgct

SEQ ID NO: 4738055 - DNA, 25 bp, Homo sapien
atgcaacaaagaaccaggcacttgc

SEQ ID NO: 4738056 - DNA, 25 bp, Homo sapien
aatgcaacaaagaaccaggcacttg

SEQ ID NO: 4738057 - DNA, 25 bp, Homo sapien
agctattgccaagatccctatgagg

SEQ ID NO: 4738058 - DNA, 25 bp, Homo sapien
gaggcagcttcaattaatccccaca

SEQ ID NO: 4738059 - DNA, 25 bp, Homo sapien
taaaggcctattagcaatcacctgt

SEQ ID NO: 4738060 - DNA, 25 bp, Homo sapien
aaacaagcttcactacaggcggcag

SEQ ID NO: 4738061 - DNA, 25 bp, Homo sapien
taaccatagtaatctccacatttct

SEQ ID NO: 4738062 - DNA, 25 bp, Homo sapien
ggttatcactatcccacataaccat

SEQ ID NO: 4738063 - DNA, 25 bp, Homo sapien
atctttggttatcactatcccacat

SEQ ID NO: 4738064 - DNA, 25 bp, Homo sapien
tatcactatcccacataaccatagt

SEQ ID NO: 4738065 - DNA, 25 bp, Homo sapien
tgggccacgcccaatcacaactgct

SEQ ID NO: 4738066 - DNA, 25 bp, Homo sapien
tgctgtcgagaacatttcttatcag

SEQ ID NO: 4738067 - DNA, 25 bp, Homo sapien
tccaaatgtggaagtctgattcgct

SEQ ID NO: 4738068 - DNA, 25 bp, Homo sapien
ggtgccggctgtcctgtctcaccaa

SEQ ID NO: 4738069 - DNA, 25 bp, Homo sapien
tgtgagtaagtatttacctccctgc

SEQ ID NO: 4738070 - DNA, 25 bp, Homo sapien
tcctcacctataaaccatgataatg

SEQ ID NO: 4738071 - DNA, 25 bp, Homo sapien
tgccaccacgcatgtgatctaccag

SEQ ID NO: 4738072 - DNA, 25 bp, Homo sapien
gctgttcatcttgaggcaagtgact

SEQ ID NO: 4738073 - DNA, 25 bp, Homo sapien
gttgcccagattgggtgcagggcgt

SEQ ID NO: 4738074 - DNA, 25 bp, Homo sapien
cccagattgggtgcagggcgtcatc

SEQ ID NO: 4738075 - DNA, 25 bp, Homo sapien
agattgggtgcagggcgtcatcaca

SEQ ID NO: 4738076 - DNA, 25 bp, Homo sapien
tgcccagattgggtgcagggcgtca

SEQ ID NO: 4738077 - DNA, 25 bp, Homo sapien
gggcaacacagcaacacctcatcta

SEQ ID NO: 4738078 - DNA, 25 bp, Homo sapien
gagcctaggggttcaagtccagctt

SEQ ID NO: 4738079 - DNA, 25 bp, Homo sapien
caacacagcaacacctcatctaaaa

SEQ ID NO: 4738080 - DNA, 25 bp, Homo sapien
tgagcctaggggttcaagtccagct

SEQ ID NO: 4738081 - DNA, 25 bp, Homo sapien
tgcaaagggtggaagcacaatgcta

SEQ ID NO: 4738082 - DNA, 25 bp, Homo sapien
acatgatgattgctctgtgcaaagg

SEQ ID NO: 4738083 - DNA, 25 bp, Homo sapien
gagtacccaaccgagattgggagga

SEQ ID NO: 4738084 - DNA, 25 bp, Homo sapien
cagcctaattaggtgaggagcagga

SEQ ID NO: 4738085 - DNA, 25 bp, Homo sapien
catttctggcggaaacgctgccctt

SEQ ID NO: 4738086 - DNA, 25 bp, Homo sapien
ggtccctcaagtgcctttcacgaag

SEQ ID NO: 4738087 - DNA, 25 bp, Homo sapien
tccttggttggacagggcccattct

SEQ ID NO: 4738088 - DNA, 25 bp, Homo sapien
caaggcctgttgaggatgctgctaa

SEQ ID NO: 4738089 - DNA, 25 bp, Homo sapien
acgcaaagtgggtcgaagaccaacg

SEQ ID NO: 4738090 - DNA, 25 bp, Homo sapien
gcacacgtgaacaaacgcaaagtgg

SEQ ID NO: 4738091 - DNA, 25 bp, Homo sapien
tgggtcgaagaccaacgcgagcgcc

SEQ ID NO: 4738092 - DNA, 25 bp, Homo sapien
cacacgtgaacaaacgcaaagtggg

SEQ ID NO: 4738093 - DNA, 25 bp, Homo sapien
aaagcagcgtcattcaaggcacatc

SEQ ID NO: 4738094 - DNA, 25 bp, Homo sapien
tgagagcagcgcatgaaagcagcgt

SEQ ID NO: 4738095 - DNA, 25 bp, Homo sapien
acagcccaaggtagtaacaggggag

SEQ ID NO: 4738096 - DNA, 25 bp, Homo sapien
catcactcaagggtaggagcagcct

SEQ ID NO: 4738097 - DNA, 25 bp, Homo sapien
gaagagataggctgacgaccgcctt

SEQ ID NO: 4738098 - DNA, 25 bp, Homo sapien
agaagagataggctgacgaccgcct

SEQ ID NO: 4738099 - DNA, 25 bp, Homo sapien
agagataggctgacgaccgccttac

SEQ ID NO: 4738100 - DNA, 25 bp, Homo sapien
aagagataggctgacgaccgcctta

SEQ ID NO: 4738101 - DNA, 25 bp, Homo sapien
gagacggacaaattcacgttactca

SEQ ID NO: 4738102 - DNA, 25 bp, Homo sapien
ctccagaagtcggagacggacaaat

SEQ ID NO: 4738103 - DNA, 25 bp, Homo sapien
cagaagtcggagacggacaaattca

SEQ ID NO: 4738104 - DNA, 25 bp, Homo sapien
aagtcggagacggacaaattcacgt

SEQ ID NO: 4738105 - DNA, 25 bp, Homo sapien
ctgtgcctcaccgcttccggcgctg

SEQ ID NO: 4738106 - DNA, 25 bp, Homo sapien
gagacgttcacaacctttaaggcca

SEQ ID NO: 4738107 - DNA, 25 bp, Homo sapien
caatccctctgtggacgtttctagg

SEQ ID NO: 4738108 - DNA, 25 bp, Homo sapien
ggctgtgcagcttctcgatactcca

SEQ ID NO: 4738109 - DNA, 25 bp, Homo sapien
tactccataaggagacgttcacaac

SEQ ID NO: 4738110 - DNA, 25 bp, Homo sapien
ctggtaagtacaggactttcttgat

SEQ ID NO: 4738111 - DNA, 25 bp, Homo sapien
tgtgtatgaacaaacacccctggcc

SEQ ID NO: 4738112 - DNA, 25 bp, Homo sapien
gtgtgtatgaacaaacacccctggc

SEQ ID NO: 4738113 - DNA, 25 bp, Homo sapien
tttcttgatgaaccaccactaccac

SEQ ID NO: 4738114 - DNA, 25 bp, Homo sapien
caaaaatatctaaagggcagtttat

SEQ ID NO: 4738115 - DNA, 25 bp, Homo sapien
atatctaaagggcagtttattagaa

SEQ ID NO: 4738116 - DNA, 25 bp, Homo sapien
tctaaagggcagtttattagaaatc

SEQ ID NO: 4738117 - DNA, 25 bp, Homo sapien
taaagggcagtttattagaaatcat

SEQ ID NO: 4738118 - DNA, 25 bp, Homo sapien
ggagttcgtattatctagaccaaga

SEQ ID NO: 4738119 - DNA, 25 bp, Homo sapien
gccaaatggtatctaggagttcgta

SEQ ID NO: 4738120 - DNA, 25 bp, Homo sapien
aagctatttccatgagagtttccct

SEQ ID NO: 4738121 - DNA, 25 bp, Homo sapien
ctgtgcagcagtattcttcccgaat

SEQ ID NO: 4738122 - DNA, 25 bp, Homo sapien
ccaggctggagctttaaagacaaca

SEQ ID NO: 4738123 - DNA, 25 bp, Homo sapien
aagtgtggtgaaccagcagatactc

SEQ ID NO: 4738124 - DNA, 25 bp, Homo sapien
gaatgtacctcacgacttctttcgg

SEQ ID NO: 4738125 - DNA, 25 bp, Homo sapien
taggtcaggatctcataaatgagca

SEQ ID NO: 4738126 - DNA, 25 bp, Homo sapien
taacaaacatttaagaaccagagaa

SEQ ID NO: 4738127 - DNA, 25 bp, Homo sapien
tattttctgtggtaacaaacattta

SEQ ID NO: 4738128 - DNA, 25 bp, Homo sapien
tttctgtggtaacaaacatttaaga

SEQ ID NO: 4738129 - DNA, 25 bp, Homo sapien
tgtggtaacaaacatttaagaacca

SEQ ID NO: 4738130 - DNA, 25 bp, Homo sapien
gcacacaaaggcagtacaggccgac

SEQ ID NO: 4738131 - DNA, 25 bp, Homo sapien
agggacccctgagcacacaaaggca

SEQ ID NO: 4738132 - DNA, 25 bp, Homo sapien
cctgagcacacaaaggcagtacagg

SEQ ID NO: 4738133 - DNA, 25 bp, Homo sapien
tgagcacacaaaggcagtacaggcc

SEQ ID NO: 4738134 - DNA, 25 bp, Homo sapien
ctgccctagggaggatggatgcact

SEQ ID NO: 4738135 - DNA, 25 bp, Homo sapien
gatgcactgcctaggaggagacgca

SEQ ID NO: 4738136 - DNA, 25 bp, Homo sapien
cctaggaggagacgcaaggttagac

SEQ ID NO: 4738137 - DNA, 25 bp, Homo sapien
cgcaaggttagacctcgccccattt

SEQ ID NO: 4738138 - DNA, 25 bp, Homo sapien
gaaagatggtcgagaaagttgataa

SEQ ID NO: 4738139 - DNA, 25 bp, Homo sapien
ccagagaaagatggtcgagaaagtt

SEQ ID NO: 4738140 - DNA, 25 bp, Homo sapien
accaccagagaaagatggtcgagaa

SEQ ID NO: 4738141 - DNA, 25 bp, Homo sapien
tggtcgagaaagttgataagggaaa

SEQ ID NO: 4738142 - DNA, 25 bp, Homo sapien
tcagctttccagcggacggccagga

SEQ ID NO: 4738143 - DNA, 25 bp, Homo sapien
ctttccagcggacggccaggatcct

SEQ ID NO: 4738144 - DNA, 25 bp, Homo sapien
agcggacggccaggatcctgccgct

SEQ ID NO: 4738145 - DNA, 25 bp, Homo sapien
ccagcggacggccaggatcctgccg

SEQ ID NO: 4738146 - DNA, 25 bp, Homo sapien
tcggcatctggagccagggacccat

SEQ ID NO: 4738147 - DNA, 25 bp, Homo sapien
gggttcggcatctggagccagggac

SEQ ID NO: 4738148 - DNA, 25 bp, Homo sapien
caccctttggtggggttcggcatct

SEQ ID NO: 4738149 - DNA, 25 bp, Homo sapien
tgagatccttcccaaccaccctttg

SEQ ID NO: 4738150 - DNA, 25 bp, Homo sapien
tctgctaggacctgacacgtgcggt

SEQ ID NO: 4738151 - DNA, 25 bp, Homo sapien
tgtgcggccgcattcctggcccttg

SEQ ID NO: 4738152 - DNA, 25 bp, Homo sapien
ggccacagacgctgcgtttctgcta

SEQ ID NO: 4738153 - DNA, 25 bp, Homo sapien
cattcctggcccttggccacagacg

SEQ ID NO: 4738154 - DNA, 25 bp, Homo sapien
tctgcatccacgtcccacataaccg

SEQ ID NO: 4738155 - DNA, 25 bp, Homo sapien
cataaccgccctggctccgactcct

SEQ ID NO: 4738156 - DNA, 25 bp, Homo sapien
tgcgtctgcatccacgtcccacata

SEQ ID NO: 4738157 - DNA, 25 bp, Homo sapien
acgtcccacataaccgccctggctc

SEQ ID NO: 4738158 - DNA, 25 bp, Homo sapien
aaagtatagctgtagttgtactcat

SEQ ID NO: 4738159 - DNA, 25 bp, Homo sapien
aaaagtatagctgtagttgtactca

SEQ ID NO: 4738160 - DNA, 25 bp, Homo sapien
tacggtgcctacatactacgccatt

SEQ ID NO: 4738161 - DNA, 25 bp, Homo sapien
taaacagcttgtataatgatcccat

SEQ ID NO: 4738162 - DNA, 25 bp, Homo sapien
tctggttccctatgttgtgagctcc

SEQ ID NO: 4738163 - DNA, 25 bp, Homo sapien
ggcagggaccacgacttatgtgatt

SEQ ID NO: 4738164 - DNA, 25 bp, Homo sapien
tgttccaagagctttcccgttcaca

SEQ ID NO: 4738165 - DNA, 25 bp, Homo sapien
aaaagagaagaggcgcccgtaagag

SEQ ID NO: 4738166 - DNA, 25 bp, Homo sapien
gctcgccacgttcccaaaaagagaa

SEQ ID NO: 4738167 - DNA, 25 bp, Homo sapien
ggctcaagcattttttgctcgccac

SEQ ID NO: 4738168 - DNA, 25 bp, Homo sapien
agccggagacttccgcactctcagg

SEQ ID NO: 4738169 - DNA, 25 bp, Homo sapien
ttccgcactctcaggctcgctgagt

SEQ ID NO: 4738170 - DNA, 25 bp, Homo sapien
ctcaggctcgctgagtggagaaaag

SEQ ID NO: 4738171 - DNA, 25 bp, Homo sapien
caccagccggagacttccgcactct

SEQ ID NO: 4738172 - DNA, 25 bp, Homo sapien
ggaggcaggggcgaggggctgcggg

SEQ ID NO: 4738173 - DNA, 25 bp, Homo sapien
cacagggaggcaggggcgaggggct

SEQ ID NO: 4738174 - DNA, 25 bp, Homo sapien
ggctgcggggggagccgggcggaga

SEQ ID NO: 4738175 - DNA, 25 bp, Homo sapien
gcgcacagggaggcaggggcgaggg

SEQ ID NO: 4738176 - DNA, 25 bp, Homo sapien
gaagtaaggcactccttagtagcca

SEQ ID NO: 4738177 - DNA, 25 bp, Homo sapien
ttggccttcaaaacaaccagtgctg

SEQ ID NO: 4738178 - DNA, 25 bp, Homo sapien
caataagcacatgtgattggtggct

SEQ ID NO: 4738179 - DNA, 25 bp, Homo sapien
tggtggctgctacgttggacagaac

SEQ ID NO: 4738180 - DNA, 25 bp, Homo sapien
gaatgactttgaatccttaactagg

SEQ ID NO: 4738181 - DNA, 25 bp, Homo sapien
caggttgcacatgtttgctcttccc

SEQ ID NO: 4738182 - DNA, 25 bp, Homo sapien
gatggtaaatggtaaaggctgccta

SEQ ID NO: 4738183 - DNA, 25 bp, Homo sapien
tcatattttatgcagacgaggagaa

SEQ ID NO: 4738184 - DNA, 25 bp, Homo sapien
aaaactctgtatttaactggcaatg

SEQ ID NO: 4738185 - DNA, 25 bp, Homo sapien
tatgtacgtggacaagcttagactg

SEQ ID NO: 4738186 - DNA, 25 bp, Homo sapien
tatgtattggcttcagtgtatgacc

SEQ ID NO: 4738187 - DNA, 25 bp, Homo sapien
tatgctgcttcttgaaggcttgcac

SEQ ID NO: 4738188 - DNA, 25 bp, Homo sapien
tatataatcttgaccagtcctggtc

SEQ ID NO: 4738189 - DNA, 25 bp, Homo sapien
cctttacgtggagaatttgcatgcg

SEQ ID NO: 4738190 - DNA, 25 bp, Homo sapien
ccatgataagcccaagtagtgactt

SEQ ID NO: 4738191 - DNA, 25 bp, Homo sapien
tcacatgcttaaatctgggtatcag

SEQ ID NO: 4738192 - DNA, 25 bp, Homo sapien
caaatttgagcacgcttgctgggcc

SEQ ID NO: 4738193 - DNA, 25 bp, Homo sapien
catccgttaaatctggtggctgcag

SEQ ID NO: 4738194 - DNA, 25 bp, Homo sapien
tgcacacgcccaattcagaaggaag

SEQ ID NO: 4738195 - DNA, 25 bp, Homo sapien
gcccttaagacgatgtgaccgccaa

SEQ ID NO: 4738196 - DNA, 25 bp, Homo sapien
tgagaacctatgcatcacctggcct

SEQ ID NO: 4738197 - DNA, 25 bp, Homo sapien
ggatgactgtctacatgctcaggaa

SEQ ID NO: 4738198 - DNA, 25 bp, Homo sapien
tcctagaataaaccaacacgtgctg

SEQ ID NO: 4738199 - DNA, 25 bp, Homo sapien
tggtgccagcaacagaagtgttccc

SEQ ID NO: 4738200 - DNA, 25 bp, Homo sapien
gggtagttgctacttaaacatgaat

SEQ ID NO: 4738201 - DNA, 25 bp, Homo sapien
tacaagttttactatgggagggaca

SEQ ID NO: 4738202 - DNA, 25 bp, Homo sapien
tcagtatttcactctccaggtcgaa

SEQ ID NO: 4738203 - DNA, 25 bp, Homo sapien
gactgcaccagttagaagaagataa

SEQ ID NO: 4738204 - DNA, 25 bp, Homo sapien
tgtaggtagcaatcaggttctgatg

SEQ ID NO: 4738205 - DNA, 25 bp, Homo sapien
tctgatgagggtgatgtgcaatacc

SEQ ID NO: 4738206 - DNA, 25 bp, Homo sapien
cttcactgtaggtagcaatcaggtt

SEQ ID NO: 4738207 - DNA, 25 bp, Homo sapien
gttctgatgagggtgatgtgcaata

SEQ ID NO: 4738208 - DNA, 25 bp, Homo sapien
cacagtagatccattcaccacgggg

SEQ ID NO: 4738209 - DNA, 25 bp, Homo sapien
cagtagatccattcaccacggggag

SEQ ID NO: 4738210 - DNA, 25 bp, Homo sapien
gatccattcaccacggggagagagg

SEQ ID NO: 4738211 - DNA, 25 bp, Homo sapien
attcaccacggggagagagggcaca

SEQ ID NO: 4738212 - DNA, 25 bp, Homo sapien
gcagctcaaccatgtgcagcatttt

SEQ ID NO: 4738213 - DNA, 25 bp, Homo sapien
catttttacgttgttattttgcact

SEQ ID NO: 4738214 - DNA, 25 bp, Homo sapien
aaaaacatcaggattagtagcagct

SEQ ID NO: 4738215 - DNA, 25 bp, Homo sapien
aggattagtagcagctcaaccatgt

SEQ ID NO: 4738216 - DNA, 25 bp, Homo sapien
cccacagttcctgtgcaagggtacg

SEQ ID NO: 4738217 - DNA, 25 bp, Homo sapien
tgtgcaagggtacgttctgaacact

SEQ ID NO: 4738218 - DNA, 25 bp, Homo sapien
gcaagggtacgttctgaacactcac

SEQ ID NO: 4738219 - DNA, 25 bp, Homo sapien
gttcctgtgcaagggtacgttctga

SEQ ID NO: 4738220 - DNA, 25 bp, Homo sapien
gtgtttgatctgttgcacaccacaa

SEQ ID NO: 4738221 - DNA, 25 bp, Homo sapien
cactgttgacggtaatatctgtccc

SEQ ID NO: 4738222 - DNA, 25 bp, Homo sapien
tgcccctgcatgttcatgatgacca

SEQ ID NO: 4738223 - DNA, 25 bp, Homo sapien
gtgctgcccagggatttaaaggtat

SEQ ID NO: 4738224 - DNA, 25 bp, Homo sapien
tgaatccatgttccggatacagagg

SEQ ID NO: 4738225 - DNA, 25 bp, Homo sapien
gaaagctacccttgtctggatatca

SEQ ID NO: 4738226 - DNA, 25 bp, Homo sapien
tactgtcataaacaaccagaaagct

SEQ ID NO: 4738227 - DNA, 25 bp, Homo sapien
tacatttttccttagccaatagagc

SEQ ID NO: 4738228 - DNA, 25 bp, Homo sapien
gagcatacatctcctgccttcgggt

SEQ ID NO: 4738229 - DNA, 25 bp, Homo sapien
catcaggtacaaagtctctaaggca

SEQ ID NO: 4738230 - DNA, 25 bp, Homo sapien
tttgaagtggaagctactcttggcc

SEQ ID NO: 4738231 - DNA, 25 bp, Homo sapien
gaattaagaacgctaaggcttccag

SEQ ID NO: 4738232 - DNA, 25 bp, Homo sapien
tgggaattacccacagaatactgtt

SEQ ID NO: 4738233 - DNA, 25 bp, Homo sapien
tattaggccactgagactttcgtga

SEQ ID NO: 4738234 - DNA, 25 bp, Homo sapien
ccaggaaagaggtttactacagcac

SEQ ID NO: 4738235 - DNA, 25 bp, Homo sapien
gactgttagcaggtggaccatacct

SEQ ID NO: 4738236 - DNA, 25 bp, Homo sapien
cagtgccatcagaggatgcactaat

SEQ ID NO: 4738237 - DNA, 25 bp, Homo sapien
tgccatcagaggatgcactaataat

SEQ ID NO: 4738238 - DNA, 25 bp, Homo sapien
ttacagtgccatcagaggatgcact

SEQ ID NO: 4738239 - DNA, 25 bp, Homo sapien
tacagtgccatcagaggatgcacta

SEQ ID NO: 4738240 - DNA, 25 bp, Homo sapien
tctcaaatctccttaaacattgtcc

SEQ ID NO: 4738241 - DNA, 25 bp, Homo sapien
ctgctgaaacacatgcagaggacag

SEQ ID NO: 4738242 - DNA, 25 bp, Homo sapien
tctgctgaaacacatgcagaggaca

SEQ ID NO: 4738243 - DNA, 25 bp, Homo sapien
ttgggccccagttgctaacatttct

SEQ ID NO: 4738244 - DNA, 25 bp, Homo sapien
ggccccagttgctaacatttctgta

SEQ ID NO: 4738245 - DNA, 25 bp, Homo sapien
aaaagttagtaaatagctatatggg

SEQ ID NO: 4738246 - DNA, 25 bp, Homo sapien
aaaccaacttggatctataccaact

SEQ ID NO: 4738247 - DNA, 25 bp, Homo sapien
gttcgagcaatactcctgcatcagg

SEQ ID NO: 4738248 - DNA, 25 bp, Homo sapien
cataaatccactacccatagaatgg

SEQ ID NO: 4738249 - DNA, 25 bp, Homo sapien
tctggagaaaatcgagcacactcca

SEQ ID NO: 4738250 - DNA, 25 bp, Homo sapien
ccatctggagaaaatcgagcacact

SEQ ID NO: 4738251 - DNA, 25 bp, Homo sapien
tgatttttccagtagtaaagttcca

SEQ ID NO: 4738252 - DNA, 25 bp, Homo sapien
catctggagaaaatcgagcacactc

SEQ ID NO: 4738253 - DNA, 25 bp, Homo sapien
gtccatccattagatgacacatctg

SEQ ID NO: 4738254 - DNA, 25 bp, Homo sapien
gatgtcaagctagatgtccatccat

SEQ ID NO: 4738255 - DNA, 25 bp, Homo sapien
tgggctagatgtcaagctagatgtc

SEQ ID NO: 4738256 - DNA, 25 bp, Homo sapien
acacatctgaggtgtaccactccca

SEQ ID NO: 4738257 - DNA, 25 bp, Homo sapien
aacaaatctatggtcataccaggag

SEQ ID NO: 4738258 - DNA, 25 bp, Homo sapien
acaaatctatggtcataccaggagg

SEQ ID NO: 4738259 - DNA, 25 bp, Homo sapien
caaatctatggtcataccaggagga

SEQ ID NO: 4738260 - DNA, 25 bp, Homo sapien
aaatctatggtcataccaggaggaa

SEQ ID NO: 4738261 - DNA, 25 bp, Homo sapien
ccagctaaggcctgggcaattgctg

SEQ ID NO: 4738262 - DNA, 25 bp, Homo sapien
gcctgggcaattgctgctcttctct

SEQ ID NO: 4738263 - DNA, 25 bp, Homo sapien
tgccatgagacgagatggaggcacc

SEQ ID NO: 4738264 - DNA, 25 bp, Homo sapien
ccatgagacgagatggaggcaccac

SEQ ID NO: 4738265 - DNA, 25 bp, Homo sapien
tcaccacctctaagttaaatcctgt

SEQ ID NO: 4738266 - DNA, 25 bp, Homo sapien
ctattatccagtgcctattaagttc

SEQ ID NO: 4738267 - DNA, 25 bp, Homo sapien
cattaaacccagagttgttcttcca

SEQ ID NO: 4738268 - DNA, 25 bp, Homo sapien
gtaggtttactctaacattctatta

SEQ ID NO: 4738269 - DNA, 25 bp, Homo sapien
gcttctagggactaaaaaggctaga

SEQ ID NO: 4738270 - DNA, 25 bp, Homo sapien
gctctactggtaagcataatccgcg

SEQ ID NO: 4738271 - DNA, 25 bp, Homo sapien
tgacaaacctctagtaaaaggctgg

SEQ ID NO: 4738272 - DNA, 25 bp, Homo sapien
aaagactatcatcatgctctactgg

SEQ ID NO: 4738273 - DNA, 25 bp, Homo sapien
gcacccaattcacggagctctatca

SEQ ID NO: 4738274 - DNA, 25 bp, Homo sapien
cggagctctatcaattccagaacaa

SEQ ID NO: 4738275 - DNA, 25 bp, Homo sapien
ctcacgaggatcaaagtaagacctg

SEQ ID NO: 4738276 - DNA, 25 bp, Homo sapien
tggcagcacccaattcacggagctc

SEQ ID NO: 4738277 - DNA, 25 bp, Homo sapien
tatcccaatggccactgttaatgtc

SEQ ID NO: 4738278 - DNA, 25 bp, Homo sapien
gagggttttgtctggcaatttcaga

SEQ ID NO: 4738279 - DNA, 25 bp, Homo sapien
tgtatagcctgcaacacagtatccc

SEQ ID NO: 4738280 - DNA, 25 bp, Homo sapien
cacaaaactctcaatgctgtccaca

SEQ ID NO: 4738281 - DNA, 25 bp, Homo sapien
gggcaaggaaatggccctccactcc

SEQ ID NO: 4738282 - DNA, 25 bp, Homo sapien
tagcgagatccaagatgcttctttg

SEQ ID NO: 4738283 - DNA, 25 bp, Homo sapien
tcggatgccttctcccgagtaccct

SEQ ID NO: 4738284 - DNA, 25 bp, Homo sapien
tgtgggcccacctccgaggtagcga

SEQ ID NO: 4738285 - DNA, 25 bp, Homo sapien
ccgaagattcgatttcgatcgacat

SEQ ID NO: 4738286 - DNA, 25 bp, Homo sapien
tccgaagattcgatttcgatcgaca

SEQ ID NO: 4738287 - DNA, 25 bp, Homo sapien
ttccgcttgggtcggcgtctggctc

SEQ ID NO: 4738288 - DNA, 25 bp, Homo sapien
tccggcggacacctaacgtcacttc

SEQ ID NO: 4738289 - DNA, 25 bp, Homo sapien
acaccaacgacacctccggcggaca

SEQ ID NO: 4738290 - DNA, 25 bp, Homo sapien
ggccagtcgcgcaacacaccaacga

SEQ ID NO: 4738291 - DNA, 25 bp, Homo sapien
ttttattcagtcaattacaggtaca

SEQ ID NO: 4738292 - DNA, 25 bp, Homo sapien
tattcagtcaattacaggtacaatt

SEQ ID NO: 4738293 - DNA, 25 bp, Homo sapien
ttattcagtcaattacaggtacaat

SEQ ID NO: 4738294 - DNA, 25 bp, Homo sapien
tttattcagtcaattacaggtacaa

SEQ ID NO: 4738295 - DNA, 25 bp, Homo sapien
cactttgtctggacccctgaaatcc

SEQ ID NO: 4738296 - DNA, 25 bp, Homo sapien
ggtctccagtagtccactttgtctg

SEQ ID NO: 4738297 - DNA, 25 bp, Homo sapien
ctggtctccagtagtccactttgtc

SEQ ID NO: 4738298 - DNA, 25 bp, Homo sapien
cagtagtccactttgtctggacccc

SEQ ID NO: 4738299 - DNA, 25 bp, Homo sapien
tcagtcaggagcatccgatcatgtg

SEQ ID NO: 4738300 - DNA, 25 bp, Homo sapien
aggagcatccgatcatgtgagagtt

SEQ ID NO: 4738301 - DNA, 25 bp, Homo sapien
ctcagtcaggagcatccgatcatgt

SEQ ID NO: 4738302 - DNA, 25 bp, Homo sapien
catccgatcatgtgagagttgggtg

SEQ ID NO: 4738303 - DNA, 25 bp, Homo sapien
tttgtctcgagaacaggtagccgct

SEQ ID NO: 4738304 - DNA, 25 bp, Homo sapien
gaagatgctgggactaaccaccatg

SEQ ID NO: 4738305 - DNA, 25 bp, Homo sapien
tctaacatggagttcaggctctgct

SEQ ID NO: 4738306 - DNA, 25 bp, Homo sapien
tctatagtccactcccagaatgggt

SEQ ID NO: 4738307 - DNA, 25 bp, Homo sapien
caccacaggagtcttcttatttttt

SEQ ID NO: 4738308 - DNA, 25 bp, Homo sapien
tcaccacaggagtcttcttattttt

SEQ ID NO: 4738309 - DNA, 25 bp, Homo sapien
gttcacacagagtcaccagcaatag

SEQ ID NO: 4738310 - DNA, 25 bp, Homo sapien
aacttcgcggtcataactcccagga

SEQ ID NO: 4738311 - DNA, 25 bp, Homo sapien
tgggacatgaaagccgtcatcctgg

SEQ ID NO: 4738312 - DNA, 25 bp, Homo sapien
tgagagcactacgtcagcaaatggg

SEQ ID NO: 4738313 - DNA, 25 bp, Homo sapien
ctccacactgagggctggtacccag

SEQ ID NO: 4738314 - DNA, 25 bp, Homo sapien
cacactgagggctggtacccaggag

SEQ ID NO: 4738315 - DNA, 25 bp, Homo sapien
cagctcagcctccacactgagggct

SEQ ID NO: 4738316 - DNA, 25 bp, Homo sapien
gccaggcaccagctcagcctccaca

SEQ ID NO: 4738317 - DNA, 25 bp, Homo sapien
caggaggctttaggcaccgaagttc

SEQ ID NO: 4738318 - DNA, 25 bp, Homo sapien
gtggctcaatagctcccaacagagg

SEQ ID NO: 4738319 - DNA, 25 bp, Homo sapien
cagctgagtcttggaacctgagccc

SEQ ID NO: 4738320 - DNA, 25 bp, Homo sapien
ggtgggagcacctgtgaaaacctga

SEQ ID NO: 4738321 - DNA, 25 bp, Homo sapien
gataggccactgaatgcgagaaacc

SEQ ID NO: 4738322 - DNA, 25 bp, Homo sapien
aattcacatgccgagccaagttggg

SEQ ID NO: 4738323 - DNA, 25 bp, Homo sapien
tatcaccgggaatgtgttccacggc

SEQ ID NO: 4738324 - DNA, 25 bp, Homo sapien
tagtctgtttgaccctgagtgccac

SEQ ID NO: 4738325 - DNA, 25 bp, Homo sapien
ctagctcggtgtcccgatgtccact

SEQ ID NO: 4738326 - DNA, 25 bp, Homo sapien
gatttgggtatacaatgggtatctc

SEQ ID NO: 4738327 - DNA, 25 bp, Homo sapien
tgtcccgatgtccactgtgatttgg

SEQ ID NO: 4738328 - DNA, 25 bp, Homo sapien
aatgggtatctctgtacatccagca

SEQ ID NO: 4738329 - DNA, 25 bp, Homo sapien
ctttgtgtgtgcaattcggtcaaac

SEQ ID NO: 4738330 - DNA, 25 bp, Homo sapien
cctttgtgtgtgcaattcggtcaaa

SEQ ID NO: 4738331 - DNA, 25 bp, Homo sapien
agttcaaaccatcagagagcattgt

SEQ ID NO: 4738332 - DNA, 25 bp, Homo sapien
gttcaaaccatcagagagcattgtc

SEQ ID NO: 4738333 - DNA, 25 bp, Homo sapien
acacctcccgaccacagcatttggg

SEQ ID NO: 4738334 - DNA, 25 bp, Homo sapien
cagcatttgggcgagatatagacat

SEQ ID NO: 4738335 - DNA, 25 bp, Homo sapien
tctcttgagtggcggatcatgcgac

SEQ ID NO: 4738336 - DNA, 25 bp, Homo sapien
gtggcggatcatgcgacacctcccg

SEQ ID NO: 4738337 - DNA, 25 bp, Homo sapien
agaaactgttgtttacttagagcag

SEQ ID NO: 4738338 - DNA, 25 bp, Homo sapien
ttaggaaatccattgatggttagaa

SEQ ID NO: 4738339 - DNA, 25 bp, Homo sapien
gaaactgttgtttacttagagcaga

SEQ ID NO: 4738340 - DNA, 25 bp, Homo sapien
aattattaggaaatccattgatggt

SEQ ID NO: 4738341 - DNA, 25 bp, Homo sapien
gccctaacagttgaggcagtgtttc

SEQ ID NO: 4738342 - DNA, 25 bp, Homo sapien
tctgttcccgcacatgaagtcctta

SEQ ID NO: 4738343 - DNA, 25 bp, Homo sapien
tcagtggttatgaattgtgaactcc

SEQ ID NO: 4738344 - DNA, 25 bp, Homo sapien
tactgactagaacactggccctaac

SEQ ID NO: 4738345 - DNA, 25 bp, Homo sapien
cagctactaggaaagccgaggtgag

SEQ ID NO: 4738346 - DNA, 25 bp, Homo sapien
agggttttgttattcaactgatagg

SEQ ID NO: 4738347 - DNA, 25 bp, Homo sapien
ctgtactagtcagcctaaaccaggg

SEQ ID NO: 4738348 - DNA, 25 bp, Homo sapien
aaagggtctgctgtctacatgagcc

SEQ ID NO: 4738349 - DNA, 25 bp, Homo sapien
ctgcgcatggtggcaagtgtttgta

SEQ ID NO: 4738350 - DNA, 25 bp, Homo sapien
tggatgtgcagagactacaggcatt

SEQ ID NO: 4738351 - DNA, 25 bp, Homo sapien
cgcatggtggcaagtgtttgtagtc

SEQ ID NO: 4738352 - DNA, 25 bp, Homo sapien
ctggatgtgcagagactacaggcat

SEQ ID NO: 4738353 - DNA, 25 bp, Homo sapien
attgcaacggaaatgtgccgtggct

SEQ ID NO: 4738354 - DNA, 25 bp, Homo sapien
tggctgtgaaaaacacctgtacgca

SEQ ID NO: 4738355 - DNA, 25 bp, Homo sapien
aaaacacctgtacgcattatggtca

SEQ ID NO: 4738356 - DNA, 25 bp, Homo sapien
ggaaatgtgccgtggctgtgaaaaa

SEQ ID NO: 4738357 - DNA, 25 bp, Homo sapien
gcaggtgtagtcatagtccttcaag

SEQ ID NO: 4738358 - DNA, 25 bp, Homo sapien
cacgattgaatatagtgtctcccgc

SEQ ID NO: 4738359 - DNA, 25 bp, Homo sapien
cattgaggagcttagcacgattgaa

SEQ ID NO: 4738360 - DNA, 25 bp, Homo sapien
tccacgtcactaaacacaaagcagg

SEQ ID NO: 4738361 - DNA, 25 bp, Homo sapien
gaaatacagcaaacccaactcaacc

SEQ ID NO: 4738362 - DNA, 25 bp, Homo sapien
cacaaacctaggcacctgagaaata

SEQ ID NO: 4738363 - DNA, 25 bp, Homo sapien
tgtcaagcacaaacctaggcacctg

SEQ ID NO: 4738364 - DNA, 25 bp, Homo sapien
cctaggcacctgagaaatacagcaa

SEQ ID NO: 4738365 - DNA, 25 bp, Homo sapien
gaagctcgaccaaagagccctgtga

SEQ ID NO: 4738366 - DNA, 25 bp, Homo sapien
tacaatggcagatggtgatcccttc

SEQ ID NO: 4738367 - DNA, 25 bp, Homo sapien
agaaggccatgccatacacaccagg

SEQ ID NO: 4738368 - DNA, 25 bp, Homo sapien
gaagactgcttctcacacaataaga

SEQ ID NO: 4738369 - DNA, 25 bp, Homo sapien
caggcatggtggtccctagtactct

SEQ ID NO: 4738370 - DNA, 25 bp, Homo sapien
aggctgcctgtgtgcgtacagaatg

SEQ ID NO: 4738371 - DNA, 25 bp, Homo sapien
taggaggctcaactgatcccaggga

SEQ ID NO: 4738372 - DNA, 25 bp, Homo sapien
caagacctggaaactggcactccaa

SEQ ID NO: 4738373 - DNA, 25 bp, Homo sapien
tgtttgctgaaacaccctctgtatg

SEQ ID NO: 4738374 - DNA, 25 bp, Homo sapien
aagctctcaacaggacagatccggg

SEQ ID NO: 4738375 - DNA, 25 bp, Homo sapien
gctgaaacaccctctgtatgctttt

SEQ ID NO: 4738376 - DNA, 25 bp, Homo sapien
catgcaagaacgcagcactaagctc

SEQ ID NO: 4738377 - DNA, 25 bp, Homo sapien
aaaatctagcctgggaaaatgatcc

SEQ ID NO: 4738378 - DNA, 25 bp, Homo sapien
cagatatatcaagacagtggtgcta

SEQ ID NO: 4738379 - DNA, 25 bp, Homo sapien
gagacgtggctttccgcagatatat

SEQ ID NO: 4738380 - DNA, 25 bp, Homo sapien
ccagccagaggagacaattttaaac

SEQ ID NO: 4738381 - DNA, 25 bp, Homo sapien
tcagaccctgtatgacgggctggct

SEQ ID NO: 4738382 - DNA, 25 bp, Homo sapien
tacacacacagcatgagctcaactg

SEQ ID NO: 4738383 - DNA, 25 bp, Homo sapien
tggaattctacgatcaactactatg

SEQ ID NO: 4738384 - DNA, 25 bp, Homo sapien
cagcaacctcagcatttccgagaga

SEQ ID NO: 4738385 - DNA, 25 bp, Homo sapien
gaagccactccattttgagcattac

SEQ ID NO: 4738386 - DNA, 25 bp, Homo sapien
ccagggataagctgagaggctataa

SEQ ID NO: 4738387 - DNA, 25 bp, Homo sapien
cagaaaggtcaaaaccaggtgctac

SEQ ID NO: 4738388 - DNA, 25 bp, Homo sapien
tgtgacctgctgtaagcggaaggtt

SEQ ID NO: 4738389 - DNA, 25 bp, Homo sapien
ttgatggaagccgtaaactgccaac

SEQ ID NO: 4738390 - DNA, 25 bp, Homo sapien
agttccttgaccttgatggaagccg

SEQ ID NO: 4738391 - DNA, 25 bp, Homo sapien
agcagtcctcgagtgcttcccctgg

SEQ ID NO: 4738392 - DNA, 25 bp, Homo sapien
ggaagccgtaaactgccaacaatcc

SEQ ID NO: 4738393 - DNA, 25 bp, Homo sapien
tgctcctgccggttgcggaatggaa

SEQ ID NO: 4738394 - DNA, 25 bp, Homo sapien
gttctgctttgccacgagctccagg

SEQ ID NO: 4738395 - DNA, 25 bp, Homo sapien
taacatagatgccatagtccagctg

SEQ ID NO: 4738396 - DNA, 25 bp, Homo sapien
tagccagtacttgaggtgctcctgc

SEQ ID NO: 4738397 - DNA, 25 bp, Homo sapien
caccctgccgacttgctcgtacctt

SEQ ID NO: 4738398 - DNA, 25 bp, Homo sapien
tgggctgtcaccctgccgacttgct

SEQ ID NO: 4738399 - DNA, 25 bp, Homo sapien
gctgctaaacataaccgcgttttgg

SEQ ID NO: 4738400 - DNA, 25 bp, Homo sapien
ctgctaaacataaccgcgttttggg

SEQ ID NO: 4738401 - DNA, 25 bp, Homo sapien
aacaggaattcacatgtggcctggc

SEQ ID NO: 4738402 - DNA, 25 bp, Homo sapien
gcctggctcgcttccgcgggacaga

SEQ ID NO: 4738403 - DNA, 25 bp, Homo sapien
acatgtggcctggctcgcttccgcg

SEQ ID NO: 4738404 - DNA, 25 bp, Homo sapien
aaacaggaattcacatgtggcctgg

SEQ ID NO: 4738405 - DNA, 25 bp, Homo sapien
cagccccagacctggcgttgaatga

SEQ ID NO: 4738406 - DNA, 25 bp, Homo sapien
ctggcgttgaatgactaattgggtc

SEQ ID NO: 4738407 - DNA, 25 bp, Homo sapien
tgaatgactaattgggtcgagtgcc

SEQ ID NO: 4738408 - DNA, 25 bp, Homo sapien
ctaattgggtcgagtgccagccagg

SEQ ID NO: 4738409 - DNA, 25 bp, Homo sapien
tgcagggaccatgctctgctacaca

SEQ ID NO: 4738410 - DNA, 25 bp, Homo sapien
actgcagggaccatgctctgctaca

SEQ ID NO: 4738411 - DNA, 25 bp, Homo sapien
gcagggaccatgctctgctacacac

SEQ ID NO: 4738412 - DNA, 25 bp, Homo sapien
agggaccatgctctgctacacacct

SEQ ID NO: 4738413 - DNA, 25 bp, Homo sapien
ctgtcccagtgagaaactccagaga

SEQ ID NO: 4738414 - DNA, 25 bp, Homo sapien
tcccgtgggactgcagtgcatgcta

SEQ ID NO: 4738415 - DNA, 25 bp, Homo sapien
agcctcccgtgggactgcagtgcat

SEQ ID NO: 4738416 - DNA, 25 bp, Homo sapien
aatggcatgattatcgaactcctgg

SEQ ID NO: 4738417 - DNA, 25 bp, Homo sapien
ggtctcagtaccctgcatttgggaa

SEQ ID NO: 4738418 - DNA, 25 bp, Homo sapien
aagttgctttcgcaatgctggtagc

SEQ ID NO: 4738419 - DNA, 25 bp, Homo sapien
ctttcatgctgtgcagtgcaagaag

SEQ ID NO: 4738420 - DNA, 25 bp, Homo sapien
aaagtgacttcgtcagcaatgaacc

SEQ ID NO: 4738421 - DNA, 25 bp, Homo sapien
catgcctgacctgccacacttggta

SEQ ID NO: 4738422 - DNA, 25 bp, Homo sapien
tcaaatataataactacgttgggac

SEQ ID NO: 4738423 - DNA, 25 bp, Homo sapien
atataataactacgttgggacccat

SEQ ID NO: 4738424 - DNA, 25 bp, Homo sapien
cacgagccacacagctcagctaatt

SEQ ID NO: 4738425 - DNA, 25 bp, Homo sapien
ctgggctgtggtctcggcctcctga

SEQ ID NO: 4738426 - DNA, 25 bp, Homo sapien
cacctgagatgttgccaggcaagtc

SEQ ID NO: 4738427 - DNA, 25 bp, Homo sapien
gataaggtctcacctgagatgttgc

SEQ ID NO: 4738428 - DNA, 25 bp, Homo sapien
cgtgaaaatttgcttaacttcatca

SEQ ID NO: 4738429 - DNA, 25 bp, Homo sapien
acacgtgaaaatttgcttaacttca

SEQ ID NO: 4738430 - DNA, 25 bp, Homo sapien
atatataaaggttagtaacacccag

SEQ ID NO: 4738431 - DNA, 25 bp, Homo sapien
cacgtgaaaatttgcttaacttcat

SEQ ID NO: 4738432 - DNA, 25 bp, Homo sapien
gccatttagcgatgctgagcaggag

SEQ ID NO: 4738433 - DNA, 25 bp, Homo sapien
acatagctggccctaatggaggcag

SEQ ID NO: 4738434 - DNA, 25 bp, Homo sapien
tacatggctacgtcagaactccagg

SEQ ID NO: 4738435 - DNA, 25 bp, Homo sapien
tggaggcagcactcaatggtcctac

SEQ ID NO: 4738436 - DNA, 25 bp, Homo sapien
ttgcccaggatactgatgaacaacg

SEQ ID NO: 4738437 - DNA, 25 bp, Homo sapien
gtggtttatgatggcctcttgccca

SEQ ID NO: 4738438 - DNA, 25 bp, Homo sapien
caggatactgatgaacaacgtccac

SEQ ID NO: 4738439 - DNA, 25 bp, Homo sapien
ctgtggtttatgatggcctcttgcc

SEQ ID NO: 4738440 - DNA, 25 bp, Homo sapien
tgaaagagccacagtaaggctcctt

SEQ ID NO: 4738441 - DNA, 25 bp, Homo sapien
cacagtaaggctccttttgtggaca

SEQ ID NO: 4738442 - DNA, 25 bp, Homo sapien
agtaaggctccttttgtggacacag

SEQ ID NO: 4738443 - DNA, 25 bp, Homo sapien
gtgggtgttgaaagagccacagtaa

SEQ ID NO: 4738444 - DNA, 25 bp, Homo sapien
tcctgccctgctggtaaaggtgtgc

SEQ ID NO: 4738445 - DNA, 25 bp, Homo sapien
caaactggaatctaggaggtagaga

SEQ ID NO: 4738446 - DNA, 25 bp, Homo sapien
taaagaccagggctcggaatcctca

SEQ ID NO: 4738447 - DNA, 25 bp, Homo sapien
gaccaaaggagttaggacttgccta

SEQ ID NO: 4738448 - DNA, 25 bp, Homo sapien
caatgattgaatcccctgccaggga

SEQ ID NO: 4738449 - DNA, 25 bp, Homo sapien
tgcaacaccaatgacagctctgcgg

SEQ ID NO: 4738450 - DNA, 25 bp, Homo sapien
tctccactgaggacattctaaaggg

SEQ ID NO: 4738451 - DNA, 25 bp, Homo sapien
tactccttgggaatagcctggcaca

SEQ ID NO: 4738452 - DNA, 25 bp, Homo sapien
ctatggctcctccctagatctcagg

SEQ ID NO: 4738453 - DNA, 25 bp, Homo sapien
cctccctagatctcaggaccacctg

SEQ ID NO: 4738454 - DNA, 25 bp, Homo sapien
atggctcctccctagatctcaggac

SEQ ID NO: 4738455 - DNA, 25 bp, Homo sapien
gctcctccctagatctcaggaccac

SEQ ID NO: 4738456 - DNA, 25 bp, Homo sapien
cacatctcaatgatgtcaacagcac

SEQ ID NO: 4738457 - DNA, 25 bp, Homo sapien
tgtcaacagcactggtttagctagc

SEQ ID NO: 4738458 - DNA, 25 bp, Homo sapien
gtttagctagctgttgttcacccac

SEQ ID NO: 4738459 - DNA, 25 bp, Homo sapien
cctgtgcgtcacatctcaatgatgt

SEQ ID NO: 4738460 - DNA, 25 bp, Homo sapien
aagttactgagaaagcatcaccccc

SEQ ID NO: 4738461 - DNA, 25 bp, Homo sapien
cacagcagatttctgctcagccaga

SEQ ID NO: 4738462 - DNA, 25 bp, Homo sapien
gccagatcctaagagcctatcctgc

SEQ ID NO: 4738463 - DNA, 25 bp, Homo sapien
caggcacttcctggacctagtttct

SEQ ID NO: 4738464 - DNA, 25 bp, Homo sapien
agtgccacagctggtcaagtcccat

SEQ ID NO: 4738465 - DNA, 25 bp, Homo sapien
ctccccccatcaccctactcatctt

SEQ ID NO: 4738466 - DNA, 25 bp, Homo sapien
ccccccatcaccctactcatcttca

SEQ ID NO: 4738467 - DNA, 25 bp, Homo sapien
ggcagtgccacagctggtcaagtcc

SEQ ID NO: 4738468 - DNA, 25 bp, Homo sapien
cagagataaacatgacgggggaaga

SEQ ID NO: 4738469 - DNA, 25 bp, Homo sapien
cctcgctgcagggttataagtggat

SEQ ID NO: 4738470 - DNA, 25 bp, Homo sapien
tcagcaggcaaacacccaggtggcc

SEQ ID NO: 4738471 - DNA, 25 bp, Homo sapien
tggccagaaaagagggcctcgctgc

SEQ ID NO: 4738472 - DNA, 25 bp, Homo sapien
aagtctatctgaagactattccaag

SEQ ID NO: 4738473 - DNA, 25 bp, Homo sapien
cggtgccttatgtcctccagggaag

SEQ ID NO: 4738474 - DNA, 25 bp, Homo sapien
aacagcaacccatcagcagtccaat

SEQ ID NO: 4738475 - DNA, 25 bp, Homo sapien
cagcagtccaatccggtgccttatg

SEQ ID NO: 4738476 - DNA, 25 bp, Homo sapien
ccatgaacagatgggctcgactccc

SEQ ID NO: 4738477 - DNA, 25 bp, Homo sapien
tttggctgacacctgcccatgaaca

SEQ ID NO: 4738478 - DNA, 25 bp, Homo sapien
ctcaaaaccacccgcaagggctttg

SEQ ID NO: 4738479 - DNA, 25 bp, Homo sapien
ctcccaaggagactttcagctttct

SEQ ID NO: 4738480 - DNA, 25 bp, Homo sapien
gtacacgatctcatttagtcttaaa

SEQ ID NO: 4738481 - DNA, 25 bp, Homo sapien
taatcatcgacaaccacattttaca

SEQ ID NO: 4738482 - DNA, 25 bp, Homo sapien
tgagtgcctgtatttaatgtacacg

SEQ ID NO: 4738483 - DNA, 25 bp, Homo sapien
aacccctgtaaggtaatcatcgaca

SEQ ID NO: 4738484 - DNA, 25 bp, Homo sapien
cacctgtgtggtaaccctggaagca

SEQ ID NO: 4738485 - DNA, 25 bp, Homo sapien
cagccagctgctatgaggaatgcaa

SEQ ID NO: 4738486 - DNA, 25 bp, Homo sapien
taattgagactcaggctgctaccgg

SEQ ID NO: 4738487 - DNA, 25 bp, Homo sapien
tgctaccggaagtaccagaaatggg

SEQ ID NO: 4738488 - DNA, 25 bp, Homo sapien
cacgtcagtccccaaaagggagtgg

SEQ ID NO: 4738489 - DNA, 25 bp, Homo sapien
cacttggcccaaacgatcaggagaa

SEQ ID NO: 4738490 - DNA, 25 bp, Homo sapien
ggattactcgaggtccctaccagag

SEQ ID NO: 4738491 - DNA, 25 bp, Homo sapien
tctatggcaagacacgtgaaccgag

SEQ ID NO: 4738492 - DNA, 25 bp, Homo sapien
ctaagcagacccaaactccaaaact

SEQ ID NO: 4738493 - DNA, 25 bp, Homo sapien
cagtgcaaggctgctcgaagcccta

SEQ ID NO: 4738494 - DNA, 25 bp, Homo sapien
gcctcgggacttccctgtgcggtcc

SEQ ID NO: 4738495 - DNA, 25 bp, Homo sapien
cagggacccacctcgcaaaccttct

SEQ ID NO: 4738496 - DNA, 25 bp, Homo sapien
actctgatccagaagagggaggctg

SEQ ID NO: 4738497 - DNA, 25 bp, Homo sapien
aaactctgatccagaagagggaggc

SEQ ID NO: 4738498 - DNA, 25 bp, Homo sapien
ttaaaactctgatccagaagaggga

SEQ ID NO: 4738499 - DNA, 25 bp, Homo sapien
taaaactctgatccagaagagggag

SEQ ID NO: 4738500 - DNA, 25 bp, Homo sapien
gggtcccaatcctccgactggcgcc

SEQ ID NO: 4738501 - DNA, 25 bp, Homo sapien
gactggcgccgacccgagtccttac

SEQ ID NO: 4738502 - DNA, 25 bp, Homo sapien
ggtcccaatcctccgactggcgccg

SEQ ID NO: 4738503 - DNA, 25 bp, Homo sapien
cccaatcctccgactggcgccgacc

SEQ ID NO: 4738504 - DNA, 25 bp, Homo sapien
ccagaatccacgactgggctggagt

SEQ ID NO: 4738505 - DNA, 25 bp, Homo sapien
caggtagtaaacgagggtgacgcca

SEQ ID NO: 4738506 - DNA, 25 bp, Homo sapien
cactgggaccgaggtcaagttgcta

SEQ ID NO: 4738507 - DNA, 25 bp, Homo sapien
tgcagcggtgtggagactccgacca

SEQ ID NO: 4738508 - DNA, 25 bp, Homo sapien
aggcgctgccccacagcggcgacta

SEQ ID NO: 4738509 - DNA, 25 bp, Homo sapien
ccacagcggcgactaggggagggcc

SEQ ID NO: 4738510 - DNA, 25 bp, Homo sapien
acagcggcgactaggggagggcccg

SEQ ID NO: 4738511 - DNA, 25 bp, Homo sapien
cgctgccccacagcggcgactaggg

SEQ ID NO: 4738512 - DNA, 25 bp, Homo sapien
taggatcagccatgccagaatgcac

SEQ ID NO: 4738513 - DNA, 25 bp, Homo sapien
tcttgtttgtgtaggatcagccatg

SEQ ID NO: 4738514 - DNA, 25 bp, Homo sapien
cacggtagccctgctttactgctgc

SEQ ID NO: 4738515 - DNA, 25 bp, Homo sapien
tgcaccttgttccagtcaagctctg

SEQ ID NO: 4738516 - DNA, 25 bp, Homo sapien
ttcagtgttgcagcccatctggtgg

SEQ ID NO: 4738517 - DNA, 25 bp, Homo sapien
attcagtgttgcagcccatctggtg

SEQ ID NO: 4738518 - DNA, 25 bp, Homo sapien
tggccttcatagccctggaaatgct

SEQ ID NO: 4738519 - DNA, 25 bp, Homo sapien
atctggtggctgtggccttcatagc

SEQ ID NO: 4738520 - DNA, 25 bp, Homo sapien
tcagaaacaaggggatagtgggaac

SEQ ID NO: 4738521 - DNA, 25 bp, Homo sapien
tgttaagtccttcccgttgggctgc

SEQ ID NO: 4738522 - DNA, 25 bp, Homo sapien
tgggcatccttcagcgagaggctgc

SEQ ID NO: 4738523 - DNA, 25 bp, Homo sapien
gagaggctgcccctagtgtcccctc

SEQ ID NO: 4738524 - DNA, 25 bp, Homo sapien
tcagccagagtagatgctgttaagt

SEQ ID NO: 4738525 - DNA, 25 bp, Homo sapien
gggtcccatgtctgagcccaagcag

SEQ ID NO: 4738526 - DNA, 25 bp, Homo sapien
caatggtctcatgtatccaaggaga

SEQ ID NO: 4738527 - DNA, 25 bp, Homo sapien
ttttattagcccctcaatggtctca

SEQ ID NO: 4738528 - DNA, 25 bp, Homo sapien
gccaattgctgggacgaatctcagg

SEQ ID NO: 4738529 - DNA, 25 bp, Homo sapien
tagatcttggagatcagtcgtgttg

SEQ ID NO: 4738530 - DNA, 25 bp, Homo sapien
caggcacagcttggagcctgttccc

SEQ ID NO: 4738531 - DNA, 25 bp, Homo sapien
tcagtcgtgttgtgagtcaccagag

SEQ ID NO: 4738532 - DNA, 25 bp, Homo sapien
tccaggcacaatcaggtttagatct

SEQ ID NO: 4738533 - DNA, 25 bp, Homo sapien
gtggcactgagtgatgcaagcctgg

SEQ ID NO: 4738534 - DNA, 25 bp, Homo sapien
gggagggtggcactgagtgatgcaa

SEQ ID NO: 4738535 - DNA, 25 bp, Homo sapien
tgagtgatgcaagcctgggtcccaa

SEQ ID NO: 4738536 - DNA, 25 bp, Homo sapien
cactgagtgatgcaagcctgggtcc

SEQ ID NO: 4738537 - DNA, 25 bp, Homo sapien
cagagctgcgaacagcctggacaga

SEQ ID NO: 4738538 - DNA, 25 bp, Homo sapien
tggctccagagctgcgaacagcctg

SEQ ID NO: 4738539 - DNA, 25 bp, Homo sapien
agggtagggttagcccccagcagct

SEQ ID NO: 4738540 - DNA, 25 bp, Homo sapien
tctcaagtttcccactaaagcaggg

SEQ ID NO: 4738541 - DNA, 25 bp, Homo sapien
gcggatgaacgctcatctgcctttg

SEQ ID NO: 4738542 - DNA, 25 bp, Homo sapien
tgcggatgaacgctcatctgccttt

SEQ ID NO: 4738543 - DNA, 25 bp, Homo sapien
ctgcggatgaacgctcatctgcctt

SEQ ID NO: 4738544 - DNA, 25 bp, Homo sapien
ctggaggatgaacgctcacctggct

SEQ ID NO: 4738545 - DNA, 25 bp, Homo sapien
taggacatcccactggatatggaca

SEQ ID NO: 4738546 - DNA, 25 bp, Homo sapien
cattgggagtggaattgacaggctt

SEQ ID NO: 4738547 - DNA, 25 bp, Homo sapien
catgaacaggtaggacataggtccg

SEQ ID NO: 4738548 - DNA, 25 bp, Homo sapien
caaagactcatggttaggaggtaca

SEQ ID NO: 4738549 - DNA, 25 bp, Homo sapien
aatggtacactacagctcctgagaa

SEQ ID NO: 4738550 - DNA, 25 bp, Homo sapien
actgcatatgtgggcgacgctcagc

SEQ ID NO: 4738551 - DNA, 25 bp, Homo sapien
atatgtgggcgacgctcagcaggat

SEQ ID NO: 4738552 - DNA, 25 bp, Homo sapien
ggtacactacagctcctgagaaggt

SEQ ID NO: 4738553 - DNA, 25 bp, Homo sapien
tgtgaaatcaggaacagtagctcat

SEQ ID NO: 4738554 - DNA, 25 bp, Homo sapien
gaaatcaggaacagtagctcatacc

SEQ ID NO: 4738555 - DNA, 25 bp, Homo sapien
aaagcctctgtgaaatcaggaacag

SEQ ID NO: 4738556 - DNA, 25 bp, Homo sapien
gcctcagaaagcctctgtgaaatca

SEQ ID NO: 4738557 - DNA, 25 bp, Homo sapien
gataaagaagctccttcacccaagg

SEQ ID NO: 4738558 - DNA, 25 bp, Homo sapien
ggaagtcgagagaggatcccacctg

SEQ ID NO: 4738559 - DNA, 25 bp, Homo sapien
gcagtgcatctgaggacctgaaaga

SEQ ID NO: 4738560 - DNA, 25 bp, Homo sapien
ctggacagggtctcaacacagtagg

SEQ ID NO: 4738561 - DNA, 25 bp, Homo sapien
gaattcctgggacttcaacgactct

SEQ ID NO: 4738562 - DNA, 25 bp, Homo sapien
aaatcagagaatgggcctgtgcaac

SEQ ID NO: 4738563 - DNA, 25 bp, Homo sapien
tcattaaatgttgtggcccacgcca

SEQ ID NO: 4738564 - DNA, 25 bp, Homo sapien
tgcctaaagagaaagtgagccattg

SEQ ID NO: 4738565 - DNA, 25 bp, Homo sapien
gacagtacaaccacagagacagaag

SEQ ID NO: 4738566 - DNA, 25 bp, Homo sapien
gaggtggccctctccagaaaaggtg

SEQ ID NO: 4738567 - DNA, 25 bp, Homo sapien
tggcccaaggcaaattagagctctc

SEQ ID NO: 4738568 - DNA, 25 bp, Homo sapien
tatgggactacacgatcacaagagc

SEQ ID NO: 4738569 - DNA, 25 bp, Homo sapien
ttttcattgagaaccagtgtgagag

SEQ ID NO: 4738570 - DNA, 25 bp, Homo sapien
ttcattgagaaccagtgtgagagta

SEQ ID NO: 4738571 - DNA, 25 bp, Homo sapien
cattgagaaccagtgtgagagtagg

SEQ ID NO: 4738572 - DNA, 25 bp, Homo sapien
tgagaaccagtgtgagagtaggaaa

SEQ ID NO: 4738573 - DNA, 25 bp, Homo sapien
ggtaaattccgctccagagacggca

SEQ ID NO: 4738574 - DNA, 25 bp, Homo sapien
aagaaatcaggtaaattccgctcca

SEQ ID NO: 4738575 - DNA, 25 bp, Homo sapien
tggcaaatggccagttgcccccagc

SEQ ID NO: 4738576 - DNA, 25 bp, Homo sapien
agacggcagagctggtggcgccatt

SEQ ID NO: 4738577 - DNA, 25 bp, Homo sapien
ctgtgtcacactcggctaggaatgc

SEQ ID NO: 4738578 - DNA, 25 bp, Homo sapien
cactgtgtcacactcggctaggaat

SEQ ID NO: 4738579 - DNA, 25 bp, Homo sapien
actgtgtcacactcggctaggaatg

SEQ ID NO: 4738580 - DNA, 25 bp, Homo sapien
tgtgtaatgtgtcagccctacctgc

SEQ ID NO: 4738581 - DNA, 25 bp, Homo sapien
tcaaatataattacagggacacagg

SEQ ID NO: 4738582 - DNA, 25 bp, Homo sapien
taggccagcaatcccctaaaaggtg

SEQ ID NO: 4738583 - DNA, 25 bp, Homo sapien
gagcataggaccagcattctgacca

SEQ ID NO: 4738584 - DNA, 25 bp, Homo sapien
cctttccttttcaatctactgtctt

SEQ ID NO: 4738585 - DNA, 25 bp, Homo sapien
agcctttccttttcaatctactgtc

SEQ ID NO: 4738586 - DNA, 25 bp, Homo sapien
tttccttttcaatctactgtctttg

SEQ ID NO: 4738587 - DNA, 25 bp, Homo sapien
tccttttcaatctactgtctttgaa

SEQ ID NO: 4738588 - DNA, 25 bp, Homo sapien
ggtctgtatcctgtatggcctttcc

SEQ ID NO: 4738589 - DNA, 25 bp, Homo sapien
ggtcacaggtcaccaatgtaaatgt

SEQ ID NO: 4738590 - DNA, 25 bp, Homo sapien
gggccataggaactgatctttaaca

SEQ ID NO: 4738591 - DNA, 25 bp, Homo sapien
acaccatgggctcattgtgacagga

SEQ ID NO: 4738592 - DNA, 25 bp, Homo sapien
tttactctcctatcaagtttgcaga

SEQ ID NO: 4738593 - DNA, 25 bp, Homo sapien
tcctatcaagtttgcagagagcttc

SEQ ID NO: 4738594 - DNA, 25 bp, Homo sapien
tcataaactgctctattgtggcttt

SEQ ID NO: 4738595 - DNA, 25 bp, Homo sapien
tattgtggcttttactctcctatca

SEQ ID NO: 4738596 - DNA, 25 bp, Homo sapien
tctctgaggctgacggaagactcca

SEQ ID NO: 4738597 - DNA, 25 bp, Homo sapien
tagagtcttcaaagcctacgcctga

SEQ ID NO: 4738598 - DNA, 25 bp, Homo sapien
taatggttcactcacacagcttggc

SEQ ID NO: 4738599 - DNA, 25 bp, Homo sapien
gatttcacaacacgtagcaagagct

SEQ ID NO: 4738600 - DNA, 25 bp, Homo sapien
tgctggattccagtaagctctttat

SEQ ID NO: 4738601 - DNA, 25 bp, Homo sapien
ttagttcaacctcttcctgtggact

SEQ ID NO: 4738602 - DNA, 25 bp, Homo sapien
caaatgtttcaacttctttagttca

SEQ ID NO: 4738603 - DNA, 25 bp, Homo sapien
gctctttattcaactcttccagctg

SEQ ID NO: 4738604 - DNA, 25 bp, Homo sapien
tgagatcacacagtccaaaagaggt

SEQ ID NO: 4738605 - DNA, 25 bp, Homo sapien
cctgaccctgaagcaagaaatttag

SEQ ID NO: 4738606 - DNA, 25 bp, Homo sapien
cagtaaacacttgtgaggagtccag

SEQ ID NO: 4738607 - DNA, 25 bp, Homo sapien
taaatggcagcctccaattgagcgc

SEQ ID NO: 4738608 - DNA, 25 bp, Homo sapien
gcaaccatcttgtattccaagtgct

SEQ ID NO: 4738609 - DNA, 25 bp, Homo sapien
acccggcaaccatcttgtattccaa

SEQ ID NO: 4738610 - DNA, 25 bp, Homo sapien
gtgctgacaacggtgtttccatttc

SEQ ID NO: 4738611 - DNA, 25 bp, Homo sapien
tgctgacaacggtgtttccatttcc

SEQ ID NO: 4738612 - DNA, 25 bp, Homo sapien
gagagtgtccaatacctagcaggtc

SEQ ID NO: 4738613 - DNA, 25 bp, Homo sapien
gaagactgcccatgagcttcatcga

SEQ ID NO: 4738614 - DNA, 25 bp, Homo sapien
gccatcatcataagacttcaaatct

SEQ ID NO: 4738615 - DNA, 25 bp, Homo sapien
catcgaaaatggtgagatttctgcc

SEQ ID NO: 4738616 - DNA, 25 bp, Homo sapien
ccaggtcttggacaactggttcact

SEQ ID NO: 4738617 - DNA, 25 bp, Homo sapien
gaaaagactgtggaacccctatgac

SEQ ID NO: 4738618 - DNA, 25 bp, Homo sapien
aggtaacatgaaggtcgtgcttctc

SEQ ID NO: 4738619 - DNA, 25 bp, Homo sapien
gctgggaggtaacatgaaggtcgtg

SEQ ID NO: 4738620 - DNA, 25 bp, Homo sapien
tgaacacacttgagtgcatccatga

SEQ ID NO: 4738621 - DNA, 25 bp, Homo sapien
cctgtattgtattggtctcgtctcg

SEQ ID NO: 4738622 - DNA, 25 bp, Homo sapien
tattggtctcgtctcgcttgctgta

SEQ ID NO: 4738623 - DNA, 25 bp, Homo sapien
gtctcgcttgctgtaatgggcaagt

SEQ ID NO: 4738624 - DNA, 25 bp, Homo sapien
caaggtcacacgcttctggaggaca

SEQ ID NO: 4738625 - DNA, 25 bp, Homo sapien
caggatcgcacaaatgaccagagac

SEQ ID NO: 4738626 - DNA, 25 bp, Homo sapien
caaagggcacaataactgcgcgggc

SEQ ID NO: 4738627 - DNA, 25 bp, Homo sapien
aaaagtgtacagacacaagcccggg

SEQ ID NO: 4738628 - DNA, 25 bp, Homo sapien
gtgggtgacagtcacggtgagccca

SEQ ID NO: 4738629 - DNA, 25 bp, Homo sapien
gacagtcacggtgagcccagctgcc

SEQ ID NO: 4738630 - DNA, 25 bp, Homo sapien
gtgacagtcacggtgagcccagctg

SEQ ID NO: 4738631 - DNA, 25 bp, Homo sapien
ggtgacagtcacggtgagcccagct

SEQ ID NO: 4738632 - DNA, 25 bp, Homo sapien
tcatctcttcgccctgggtcgcctc

SEQ ID NO: 4738633 - DNA, 25 bp, Homo sapien
ccgattcatctcttcgccctgggtc

SEQ ID NO: 4738634 - DNA, 25 bp, Homo sapien
gattcatctcttcgccctgggtcgc

SEQ ID NO: 4738635 - DNA, 25 bp, Homo sapien
cacctcctggctccgattcatctct

SEQ ID NO: 4738636 - DNA, 25 bp, Homo sapien
ctcactctgggtcgcctcttcactc

SEQ ID NO: 4738637 - DNA, 25 bp, Homo sapien
ctctgggtcgcctcttcactccagg

SEQ ID NO: 4738638 - DNA, 25 bp, Homo sapien
gtcgcttcctcactcagggtcaact

SEQ ID NO: 4738639 - DNA, 25 bp, Homo sapien
tccaggtcgcttcctcactcagggt

SEQ ID NO: 4738640 - DNA, 25 bp, Homo sapien
ctcgctccgggtcgagcggcgccgg

SEQ ID NO: 4738641 - DNA, 25 bp, Homo sapien
tcgctccgggtcgagcggcgccggg

SEQ ID NO: 4738642 - DNA, 25 bp, Homo sapien
cgctccgggtcgagcggcgccgggt

SEQ ID NO: 4738643 - DNA, 25 bp, Homo sapien
tcctcgctccgggtcgagcggcgcc

SEQ ID NO: 4738644 - DNA, 25 bp, Homo sapien
agtactccgggcaggtggacgccca

SEQ ID NO: 4738645 - DNA, 25 bp, Homo sapien
gcggcgcccctggtgggtcggtcat

SEQ ID NO: 4738646 - DNA, 25 bp, Homo sapien
gtcatgcccgctggcagtactccgg

SEQ ID NO: 4738647 - DNA, 25 bp, Homo sapien
tgggtcggtcatgcccgctggcagt

SEQ ID NO: 4738648 - DNA, 25 bp, Homo sapien
cgaagggcgcgcagccgggaaccca

SEQ ID NO: 4738649 - DNA, 25 bp, Homo sapien
gaagggcgcgcagccgggaacccag

SEQ ID NO: 4738650 - DNA, 25 bp, Homo sapien
gccgaagggcgcgcagccgggaacc

SEQ ID NO: 4738651 - DNA, 25 bp, Homo sapien
ctggccgaagggcgcgcagccggga

SEQ ID NO: 4738652 - DNA, 25 bp, Homo sapien
tgagcgcggcgtctcacaaccccgc

SEQ ID NO: 4738653 - DNA, 25 bp, Homo sapien
accgcccagcgatggaagctgagcg

SEQ ID NO: 4738654 - DNA, 25 bp, Homo sapien
cgcacttgttgaccgcccagcgatg

SEQ ID NO: 4738655 - DNA, 25 bp, Homo sapien
ttgttgaccgcccagcgatggaagc

SEQ ID NO: 4738656 - DNA, 25 bp, Homo sapien
cagggaacccctaaccccatcactg

SEQ ID NO: 4738657 - DNA, 25 bp, Homo sapien
ttgccctgccagcacccaacccgtt

SEQ ID NO: 4738658 - DNA, 25 bp, Homo sapien
cattcctaacgccacaaaccaggga

SEQ ID NO: 4738659 - DNA, 25 bp, Homo sapien
tgccagcacccaacccgttttgatg

SEQ ID NO: 4738660 - DNA, 25 bp, Homo sapien
agtctatgacagtgtaactctacag

SEQ ID NO: 4738661 - DNA, 25 bp, Homo sapien
aagagactcattgcttgggaaatgc

SEQ ID NO: 4738662 - DNA, 25 bp, Homo sapien
gaacaagtcgttactgtgtccatta

SEQ ID NO: 4738663 - DNA, 25 bp, Homo sapien
caaacacatattatgggactaggaa

SEQ ID NO: 4738664 - DNA, 25 bp, Homo sapien
tcaggagccacccgttcccccttgc

SEQ ID NO: 4738665 - DNA, 25 bp, Homo sapien
ccgggcggcctgctgctttttcctt

SEQ ID NO: 4738666 - DNA, 25 bp, Homo sapien
ccttgccctgccgttcaccctccac

SEQ ID NO: 4738667 - DNA, 25 bp, Homo sapien
tgccctgccgttcaccctccacctt

SEQ ID NO: 4738668 - DNA, 25 bp, Homo sapien
cagagggctaattctgacctatagc

SEQ ID NO: 4738669 - DNA, 25 bp, Homo sapien
tatagcatatcactcagcccagttc

SEQ ID NO: 4738670 - DNA, 25 bp, Homo sapien
tccatgttactcactagcatgcctc

SEQ ID NO: 4738671 - DNA, 25 bp, Homo sapien
tctattggtctctataatatagctc

SEQ ID NO: 4738672 - DNA, 25 bp, Homo sapien
agaaacgaagtctgtaactgttgta

SEQ ID NO: 4738673 - DNA, 25 bp, Homo sapien
gaaacgaagtctgtaactgttgtaa

SEQ ID NO: 4738674 - DNA, 25 bp, Homo sapien
aagaaacgaagtctgtaactgttgt

SEQ ID NO: 4738675 - DNA, 25 bp, Homo sapien
gataattaccagaaccgtctcttgt

SEQ ID NO: 4738676 - DNA, 25 bp, Homo sapien
aggtgaaacctctatcctaatttct

SEQ ID NO: 4738677 - DNA, 25 bp, Homo sapien
catttacccattatactgttaatgg

SEQ ID NO: 4738678 - DNA, 25 bp, Homo sapien
ttgtactctacataaaggtgaaacc

SEQ ID NO: 4738679 - DNA, 25 bp, Homo sapien
tagttactggccattggatagcctc

SEQ ID NO: 4738680 - DNA, 25 bp, Homo sapien
tcccaccagctaaggataattccca

SEQ ID NO: 4738681 - DNA, 25 bp, Homo sapien
gtagattctgcccatgtccaaagtg

SEQ ID NO: 4738682 - DNA, 25 bp, Homo sapien
tgatgacttaagagattgagcacct

SEQ ID NO: 4738683 - DNA, 25 bp, Homo sapien
tgattaaattgaatagccctgcaaa

SEQ ID NO: 4738684 - DNA, 25 bp, Homo sapien
tgaggatactctatcagatcaagag

SEQ ID NO: 4738685 - DNA, 25 bp, Homo sapien
cctgactaatcctccatctcatggg

SEQ ID NO: 4738686 - DNA, 25 bp, Homo sapien
ctagcctagacgatacagcaagact

SEQ ID NO: 4738687 - DNA, 25 bp, Homo sapien
tcaggagagtctcccagtgccacgt

SEQ ID NO: 4738688 - DNA, 25 bp, Homo sapien
atcaggagagtctcccagtgccacg

SEQ ID NO: 4738689 - DNA, 25 bp, Homo sapien
ctggtacagctctcagagaatagct

SEQ ID NO: 4738690 - DNA, 25 bp, Homo sapien
acctctggagcccatacctggtaca

SEQ ID NO: 4738691 - DNA, 25 bp, Homo sapien
tgttaggggcaacaggcctagtgca

SEQ ID NO: 4738692 - DNA, 25 bp, Homo sapien
tgacgttgggaccagaaactgcaag

SEQ ID NO: 4738693 - DNA, 25 bp, Homo sapien
gctcatctgagcctgacgttgggac

SEQ ID NO: 4738694 - DNA, 25 bp, Homo sapien
gaccagaaactgcaaggtgttaggg

SEQ ID NO: 4738695 - DNA, 25 bp, Homo sapien
tgggtcatcactttcgcaggcccat

SEQ ID NO: 4738696 - DNA, 25 bp, Homo sapien
gggtcatcactttcgcaggcccatc

SEQ ID NO: 4738697 - DNA, 25 bp, Homo sapien
ggtcatcactttcgcaggcccatct

SEQ ID NO: 4738698 - DNA, 25 bp, Homo sapien
gcatccactgcgcatccccagtgtc

SEQ ID NO: 4738699 - DNA, 25 bp, Homo sapien
ctgcgcatccccagtgtccaggcag

SEQ ID NO: 4738700 - DNA, 25 bp, Homo sapien
tccactgcgcatccccagtgtccag

SEQ ID NO: 4738701 - DNA, 25 bp, Homo sapien
cagggtcagtggatcctggcccctc

SEQ ID NO: 4738702 - DNA, 25 bp, Homo sapien
catgtggtcgaaggatttccctctt

SEQ ID NO: 4738703 - DNA, 25 bp, Homo sapien
tggagccctatgaggcctcttcctg

SEQ ID NO: 4738704 - DNA, 25 bp, Homo sapien
cttcctgtgtcttcatgtggtcgaa

SEQ ID NO: 4738705 - DNA, 25 bp, Homo sapien
tggagcccttggagccctatgaggc

SEQ ID NO: 4738706 - DNA, 25 bp, Homo sapien
tcagctacggtctgttccccaaaac

SEQ ID NO: 4738707 - DNA, 25 bp, Homo sapien
cagtcagctacggtctgttccccaa

SEQ ID NO: 4738708 - DNA, 25 bp, Homo sapien
aaatctagaagaatactagggaagg

SEQ ID NO: 4738709 - DNA, 25 bp, Homo sapien
cccaaccagtcagctacggtctgtt

SEQ ID NO: 4738710 - DNA, 25 bp, Homo sapien
tctacaccttgggctaagacatagc

SEQ ID NO: 4738711 - DNA, 25 bp, Homo sapien
ctctacaccttgggctaagacatag

SEQ ID NO: 4738712 - DNA, 25 bp, Homo sapien
gggaatggatgggatcacaaataat

SEQ ID NO: 4738713 - DNA, 25 bp, Homo sapien
cggacaagccttgctttattgggga

SEQ ID NO: 4738714 - DNA, 25 bp, Homo sapien
tggatgggatcacaaataatctctg

SEQ ID NO: 4738715 - DNA, 25 bp, Homo sapien
gacaagccttgctttattggggaat

SEQ ID NO: 4738716 - DNA, 25 bp, Homo sapien
catggattcatgtaagggtggggca

SEQ ID NO: 4738717 - DNA, 25 bp, Homo sapien
ggcagggtggactgaagatctgttg

SEQ ID NO: 4738718 - DNA, 25 bp, Homo sapien
actgaagatctgttggcagggctca

SEQ ID NO: 4738719 - DNA, 25 bp, Homo sapien
tggactgaagatctgttggcagggc

SEQ ID NO: 4738720 - DNA, 25 bp, Homo sapien
agatcccatcttgggcaatacggtt

SEQ ID NO: 4738721 - DNA, 25 bp, Homo sapien
catgagatcccatcttgggcaatac

SEQ ID NO: 4738722 - DNA, 25 bp, Homo sapien
tgagatcccatcttgggcaatacgg

SEQ ID NO: 4738723 - DNA, 25 bp, Homo sapien
gagatcccatcttgggcaatacggt

SEQ ID NO: 4738724 - DNA, 25 bp, Homo sapien
tggtggagccaatgaagaccaggta

SEQ ID NO: 4738725 - DNA, 25 bp, Homo sapien
ccaatgaagaccaggtagatgatgc

SEQ ID NO: 4738726 - DNA, 25 bp, Homo sapien
cagaatcctccaatttcaggggctc

SEQ ID NO: 4738727 - DNA, 25 bp, Homo sapien
gctcccgtgggatggtggagccaat

SEQ ID NO: 4738728 - DNA, 25 bp, Homo sapien
actggcacccaccaccagttctccc

SEQ ID NO: 4738729 - DNA, 25 bp, Homo sapien
tggcacccaccaccagttctcccca

SEQ ID NO: 4738730 - DNA, 25 bp, Homo sapien
ctagataggcacccagaagtggtgc

SEQ ID NO: 4738731 - DNA, 25 bp, Homo sapien
agaagtggtgccaccactggcaccc

SEQ ID NO: 4738732 - DNA, 25 bp, Homo sapien
aatgttgggactcactcctgctccc

SEQ ID NO: 4738733 - DNA, 25 bp, Homo sapien
gggaaatgttgggactcactcctgc

SEQ ID NO: 4738734 - DNA, 25 bp, Homo sapien
gaaatgttgggactcactcctgctc

SEQ ID NO: 4738735 - DNA, 25 bp, Homo sapien
gcctggggaaatgttgggactcact

SEQ ID NO: 4738736 - DNA, 25 bp, Homo sapien
gccaagggacaccccgatgatgacc

SEQ ID NO: 4738737 - DNA, 25 bp, Homo sapien
agggacaccccgatgatgaccacga

SEQ ID NO: 4738738 - DNA, 25 bp, Homo sapien
gatgcctatcaccagcgcctctgtt

SEQ ID NO: 4738739 - DNA, 25 bp, Homo sapien
aagggacaccccgatgatgaccacg

SEQ ID NO: 4738740 - DNA, 25 bp, Homo sapien
agttcttgtcctgtctatccggagg

SEQ ID NO: 4738741 - DNA, 25 bp, Homo sapien
tgtctatccggagggactccctgct

SEQ ID NO: 4738742 - DNA, 25 bp, Homo sapien
tgtcctgtctatccggagggactcc

SEQ ID NO: 4738743 - DNA, 25 bp, Homo sapien
tcttgtcctgtctatccggagggac

SEQ ID NO: 4738744 - DNA, 25 bp, Homo sapien
aggaagccccgccacaatgtcatgt

SEQ ID NO: 4738745 - DNA, 25 bp, Homo sapien
tcaggaagccccgccacaatgtcat

SEQ ID NO: 4738746 - DNA, 25 bp, Homo sapien
gaagccccgccacaatgtcatgtga

SEQ ID NO: 4738747 - DNA, 25 bp, Homo sapien
aagccccgccacaatgtcatgtgat

SEQ ID NO: 4738748 - DNA, 25 bp, Homo sapien
gcgcacagttagcaaaggtcacagc

SEQ ID NO: 4738749 - DNA, 25 bp, Homo sapien
cgcggcccagcgcacagttagcaaa

SEQ ID NO: 4738750 - DNA, 25 bp, Homo sapien
ggcccagcgcacagttagcaaaggt

SEQ ID NO: 4738751 - DNA, 25 bp, Homo sapien
cagcgcacagttagcaaaggtcaca

SEQ ID NO: 4738752 - DNA, 25 bp, Homo sapien
caagttgacaccaaggtagctccca

SEQ ID NO: 4738753 - DNA, 25 bp, Homo sapien
agccaaaacccaagttgacaccaag

SEQ ID NO: 4738754 - DNA, 25 bp, Homo sapien
actcccatggtgactccgaagccaa

SEQ ID NO: 4738755 - DNA, 25 bp, Homo sapien
catggtgactccgaagccaaaaccc

SEQ ID NO: 4738756 - DNA, 25 bp, Homo sapien
atgggccacggaaccaaggccgaat

SEQ ID NO: 4738757 - DNA, 25 bp, Homo sapien
tgggccacggaaccaaggccgaata

SEQ ID NO: 4738758 - DNA, 25 bp, Homo sapien
ggatggctggcatgcattgcacccc

SEQ ID NO: 4738759 - DNA, 25 bp, Homo sapien
gaagctcttacgacaaacatccaag

SEQ ID NO: 4738760 - DNA, 25 bp, Homo sapien
tggagcggcagagttagaagctctt

SEQ ID NO: 4738761 - DNA, 25 bp, Homo sapien
gaagccccaacctcagaggagggct

SEQ ID NO: 4738762 - DNA, 25 bp, Homo sapien
tcaggcccattagcctcagtccaga

SEQ ID NO: 4738763 - DNA, 25 bp, Homo sapien
tcagtccagagccactgttcccttc

SEQ ID NO: 4738764 - DNA, 25 bp, Homo sapien
cttcaggcccattagcctcagtcca

SEQ ID NO: 4738765 - DNA, 25 bp, Homo sapien
cagagccactgttcccttcagccct

SEQ ID NO: 4738766 - DNA, 25 bp, Homo sapien
cctctccctgatcagtgaatgtggc

SEQ ID NO: 4738767 - DNA, 25 bp, Homo sapien
tcctctccctgatcagtgaatgtgg

SEQ ID NO: 4738768 - DNA, 25 bp, Homo sapien
tgtgctcatgaactcggccaggaac

SEQ ID NO: 4738769 - DNA, 25 bp, Homo sapien
atgaactcggccaggaactctcgca

SEQ ID NO: 4738770 - DNA, 25 bp, Homo sapien
cggccaggaactctcgcaccatctt

SEQ ID NO: 4738771 - DNA, 25 bp, Homo sapien
atcatgacatatgtgctcatgaact

SEQ ID NO: 4738772 - DNA, 25 bp, Homo sapien
gaccattttggagccacgggtggac

SEQ ID NO: 4738773 - DNA, 25 bp, Homo sapien
tatttcctggatctttgctatcacg

SEQ ID NO: 4738774 - DNA, 25 bp, Homo sapien
gatctttgctatcacggaccaggag

SEQ ID NO: 4738775 - DNA, 25 bp, Homo sapien
agaccattttggagccacgggtgga

SEQ ID NO: 4738776 - DNA, 25 bp, Homo sapien
gcctgtgagacaccagtgggtctct

SEQ ID NO: 4738777 - DNA, 25 bp, Homo sapien
gagctgagttgcctgtgagacacca

SEQ ID NO: 4738778 - DNA, 25 bp, Homo sapien
ctgagttgcctgtgagacaccagtg

SEQ ID NO: 4738779 - DNA, 25 bp, Homo sapien
cctgtgagacaccagtgggtctcta

SEQ ID NO: 4738780 - DNA, 25 bp, Homo sapien
gcctgtgcccggatgcttgaaccat

SEQ ID NO: 4738781 - DNA, 25 bp, Homo sapien
cgcctgtgcccggatgcttgaacca

SEQ ID NO: 4738782 - DNA, 25 bp, Homo sapien
gttttgtctttcagatttgtagatg

SEQ ID NO: 4738783 - DNA, 25 bp, Homo sapien
caggggagaggtcagtaaggcaggg

SEQ ID NO: 4738784 - DNA, 25 bp, Homo sapien
tgcttgcctccacataggccaaggc

SEQ ID NO: 4738785 - DNA, 25 bp, Homo sapien
ctgaaagaccctcccgactccctca

SEQ ID NO: 4738786 - DNA, 25 bp, Homo sapien
ttgcctccacataggccaaggccag

SEQ ID NO: 4738787 - DNA, 25 bp, Homo sapien
cttgcttgcctccacataggccaag

SEQ ID NO: 4738788 - DNA, 25 bp, Homo sapien
ccctcaagggctccacccggcccag

SEQ ID NO: 4738789 - DNA, 25 bp, Homo sapien
ttagcctgagtccactggaggtgtc

SEQ ID NO: 4738790 - DNA, 25 bp, Homo sapien
acatgcctttgttgtggcttccaag

SEQ ID NO: 4738791 - DNA, 25 bp, Homo sapien
actggaggtgtcacccgtgcgtccc

SEQ ID NO: 4738792 - DNA, 25 bp, Homo sapien
actttagtgctgtctctgtttgctc

SEQ ID NO: 4738793 - DNA, 25 bp, Homo sapien
cctgcgctgcttgctctctggtttt

SEQ ID NO: 4738794 - DNA, 25 bp, Homo sapien
cacctgcgctgcttgctctctggtt

SEQ ID NO: 4738795 - DNA, 25 bp, Homo sapien
ctctggttttgttgactttagtgct

SEQ ID NO: 4738796 - DNA, 25 bp, Homo sapien
gtggagtgtgcatacagtgccacac

SEQ ID NO: 4738797 - DNA, 25 bp, Homo sapien
gggccaacacaccaagttgtggagt

SEQ ID NO: 4738798 - DNA, 25 bp, Homo sapien
aaaccaggggcatgcgcaacctggg

SEQ ID NO: 4738799 - DNA, 25 bp, Homo sapien
ccacacaaaccaggggcatgcgcaa

SEQ ID NO: 4738800 - DNA, 25 bp, Homo sapien
acagcccctcagaccagacgcagcc

SEQ ID NO: 4738801 - DNA, 25 bp, Homo sapien
tgtctcactcaggtcagagagtaca

SEQ ID NO: 4738802 - DNA, 25 bp, Homo sapien
ggccgaggctccactatccacctgt

SEQ ID NO: 4738803 - DNA, 25 bp, Homo sapien
cctgtggtagaatgtctcactcagg

SEQ ID NO: 4738804 - DNA, 25 bp, Homo sapien
tatccacctgtccagacttgccttc

SEQ ID NO: 4738805 - DNA, 25 bp, Homo sapien
ttcttccacggctgaccccattaga

SEQ ID NO: 4738806 - DNA, 25 bp, Homo sapien
tagccagagctttgtctattccacc

SEQ ID NO: 4738807 - DNA, 25 bp, Homo sapien
tgggcctctaattctttctcgtaac

SEQ ID NO: 4738808 - DNA, 25 bp, Homo sapien
tgaccccattagaagtttctgggcc

SEQ ID NO: 4738809 - DNA, 25 bp, Homo sapien
tcttcagcactaagccgtgccagga

SEQ ID NO: 4738810 - DNA, 25 bp, Homo sapien
aagaacccattgctcctcacaggag

SEQ ID NO: 4738811 - DNA, 25 bp, Homo sapien
ggagacgagcagctgaccataacaa

SEQ ID NO: 4738812 - DNA, 25 bp, Homo sapien
cagtgaccctggaccgagaggcgaa

SEQ ID NO: 4738813 - DNA, 25 bp, Homo sapien
gaaggggcaccgatccttttctggc

SEQ ID NO: 4738814 - DNA, 25 bp, Homo sapien
ctagtgtgctttggccatacacggg

SEQ ID NO: 4738815 - DNA, 25 bp, Homo sapien
gtgtcccctagtgtgctttggccat

SEQ ID NO: 4738816 - DNA, 25 bp, Homo sapien
agctgtccctaagacgtgccggtta

SEQ ID NO: 4738817 - DNA, 25 bp, Homo sapien
gcctgaccctccaggcaacacgttc

SEQ ID NO: 4738818 - DNA, 25 bp, Homo sapien
gttcccttggttgcggccacgtgct

SEQ ID NO: 4738819 - DNA, 25 bp, Homo sapien
acacgttcccttggttgcggccacg

SEQ ID NO: 4738820 - DNA, 25 bp, Homo sapien
gcaacacgttcccttggttgcggcc

SEQ ID NO: 4738821 - DNA, 25 bp, Homo sapien
gtgagcccctcttgtctcccctcca

SEQ ID NO: 4738822 - DNA, 25 bp, Homo sapien
gtgtgagcccctcttgtctcccctc

SEQ ID NO: 4738823 - DNA, 25 bp, Homo sapien
cctgtgtgtgagcccctcttgtctc

SEQ ID NO: 4738824 - DNA, 25 bp, Homo sapien
gtgtgtgagcccctcttgtctcccc

SEQ ID NO: 4738825 - DNA, 25 bp, Homo sapien
ttatgacagaaacacgtcccactgc

SEQ ID NO: 4738826 - DNA, 25 bp, Homo sapien
tccttatgcacagatggacaggctg

SEQ ID NO: 4738827 - DNA, 25 bp, Homo sapien
cagagctccaaacctaagctgtggc

SEQ ID NO: 4738828 - DNA, 25 bp, Homo sapien
catcccggatccctaagactgtaac

SEQ ID NO: 4738829 - DNA, 25 bp, Homo sapien
cttagcctgaaagggtggatcgtga

SEQ ID NO: 4738830 - DNA, 25 bp, Homo sapien
gggtagatagggagctccttagcct

SEQ ID NO: 4738831 - DNA, 25 bp, Homo sapien
aaggatgtattgacccaaattccgg

SEQ ID NO: 4738832 - DNA, 25 bp, Homo sapien
taaggtgctatttgggcaaggtcca

SEQ ID NO: 4738833 - DNA, 25 bp, Homo sapien
gccgatcatcagctggtacacgaag

SEQ ID NO: 4738834 - DNA, 25 bp, Homo sapien
ctggtacacgaagacacccgcaatg

SEQ ID NO: 4738835 - DNA, 25 bp, Homo sapien
tgctccaggtggcagccgatcatca

SEQ ID NO: 4738836 - DNA, 25 bp, Homo sapien
cattctcttcctcgttggagggtgg

SEQ ID NO: 4738837 - DNA, 25 bp, Homo sapien
catagccggagttgaagcccatgga

SEQ ID NO: 4738838 - DNA, 25 bp, Homo sapien
catggaggtgccaatgaccaggacc

SEQ ID NO: 4738839 - DNA, 25 bp, Homo sapien
tggccagcacacacacgataaggga

SEQ ID NO: 4738840 - DNA, 25 bp, Homo sapien
agcccgcaagggctgtaaaaaggcg

SEQ ID NO: 4738841 - DNA, 25 bp, Homo sapien
cattgatcatatccaagtgtccaga

SEQ ID NO: 4738842 - DNA, 25 bp, Homo sapien
cattggggcccgaaacaaaaagctg

SEQ ID NO: 4738843 - DNA, 25 bp, Homo sapien
ggtaggtagcaaagatgccggctgt

SEQ ID NO: 4738844 - DNA, 25 bp, Homo sapien
gttgtcggcgaagtgccagattgca

SEQ ID NO: 4738845 - DNA, 25 bp, Homo sapien
cccatgagttatgggtaagtagcaa

SEQ ID NO: 4738846 - DNA, 25 bp, Homo sapien
cagattagacacacagtgagtcggg

SEQ ID NO: 4738847 - DNA, 25 bp, Homo sapien
tatgggtaagtagcaatactgctgt

SEQ ID NO: 4738848 - DNA, 25 bp, Homo sapien
gtgacagattagacacacagtgagt

SEQ ID NO: 4738849 - DNA, 25 bp, Homo sapien
tctgtgccagggtgtagatgggcag

SEQ ID NO: 4738850 - DNA, 25 bp, Homo sapien
atacagcccaaaaactattccagca

SEQ ID NO: 4738851 - DNA, 25 bp, Homo sapien
tccagggctcacgagccaggaagca

SEQ ID NO: 4738852 - DNA, 25 bp, Homo sapien
catggcaaaggtcacggcagggttc

SEQ ID NO: 4738853 - DNA, 25 bp, Homo sapien
aaccaccgtgggtgccccggctgag

SEQ ID NO: 4738854 - DNA, 25 bp, Homo sapien
cagagacctggccagcgatgaggat

SEQ ID NO: 4738855 - DNA, 25 bp, Homo sapien
ccaaaggccaggttgatggtgagga

SEQ ID NO: 4738856 - DNA, 25 bp, Homo sapien
gtgccccggctgagcacaacctggg

SEQ ID NO: 4738857 - DNA, 25 bp, Homo sapien
gaccataaaggtgggaagcctctca

SEQ ID NO: 4738858 - DNA, 25 bp, Homo sapien
accactgggaggactagaggcgctt

SEQ ID NO: 4738859 - DNA, 25 bp, Homo sapien
tctgcgactgggatcctagaagatg

SEQ ID NO: 4738860 - DNA, 25 bp, Homo sapien
ggaacagctttcaccttagcacaag

SEQ ID NO: 4738861 - DNA, 25 bp, Homo sapien
ctaaaagagactaagagccctggtg

SEQ ID NO: 4738862 - DNA, 25 bp, Homo sapien
tagaaatggggagatcggttctaaa

SEQ ID NO: 4738863 - DNA, 25 bp, Homo sapien
acaaatatagaacatactggagcca

SEQ ID NO: 4738864 - DNA, 25 bp, Homo sapien
ctacaaatatagaacatactggagc

SEQ ID NO: 4738865 - DNA, 25 bp, Homo sapien
cctgtcggagcagccggtagcggat

SEQ ID NO: 4738866 - DNA, 25 bp, Homo sapien
ggcactcggccagcgcctgtcggag

SEQ ID NO: 4738867 - DNA, 25 bp, Homo sapien
agcggatgtggagcatctccccgca

SEQ ID NO: 4738868 - DNA, 25 bp, Homo sapien
ggacaccagctccttctgtcgaccc

SEQ ID NO: 4738869 - DNA, 25 bp, Homo sapien
gtggcgggaggcggtggcgcagcga

SEQ ID NO: 4738870 - DNA, 25 bp, Homo sapien
tggcgggaggcggtggcgcagcgag

SEQ ID NO: 4738871 - DNA, 25 bp, Homo sapien
ggggtggcgggaggcggtggcgcag

SEQ ID NO: 4738872 - DNA, 25 bp, Homo sapien
ctgtcgggcgggcaggggtggcggg

SEQ ID NO: 4738873 - DNA, 25 bp, Homo sapien
tgagaagacatgggtagatcttcgt

SEQ ID NO: 4738874 - DNA, 25 bp, Homo sapien
tagatcttcgtgcttcttcttaatg

SEQ ID NO: 4738875 - DNA, 25 bp, Homo sapien
agaagacatgggtagatcttcgtgc

SEQ ID NO: 4738876 - DNA, 25 bp, Homo sapien
cttaatggatgtgagaggactctgg

SEQ ID NO: 4738877 - DNA, 25 bp, Homo sapien
tgattcacaaagaccaacagttgag

SEQ ID NO: 4738878 - DNA, 25 bp, Homo sapien
cagtagaggcaagcagtgattcaca

SEQ ID NO: 4738879 - DNA, 25 bp, Homo sapien
atcttgaggatggagcttgctagcc

SEQ ID NO: 4738880 - DNA, 25 bp, Homo sapien
tatgactgtacgacaagtttccgca

SEQ ID NO: 4738881 - DNA, 25 bp, Homo sapien
cactgtgtgtgcctgccaaacgaac

SEQ ID NO: 4738882 - DNA, 25 bp, Homo sapien
actgctctaatagttcagaggaggg

SEQ ID NO: 4738883 - DNA, 25 bp, Homo sapien
tgtgcctgccaaacgaactgaacag

SEQ ID NO: 4738884 - DNA, 25 bp, Homo sapien
actgaacagacagtaactgctctaa

SEQ ID NO: 4738885 - DNA, 25 bp, Homo sapien
gctttttgcacctctccaagattgg

SEQ ID NO: 4738886 - DNA, 25 bp, Homo sapien
gggcactatttgagctgagtctgga

SEQ ID NO: 4738887 - DNA, 25 bp, Homo sapien
ttgtgacatgaacgggcaaacagcc

SEQ ID NO: 4738888 - DNA, 25 bp, Homo sapien
accagaaagtgggtgtagaccagac

SEQ ID NO: 4738889 - DNA, 25 bp, Homo sapien
ctgggaagtggcatcaacacaggag

SEQ ID NO: 4738890 - DNA, 25 bp, Homo sapien
gggaagtggcatcaacacaggaggg

SEQ ID NO: 4738891 - DNA, 25 bp, Homo sapien
gaagtggcatcaacacaggagggca

SEQ ID NO: 4738892 - DNA, 25 bp, Homo sapien
aagtggcatcaacacaggagggcat

SEQ ID NO: 4738893 - DNA, 25 bp, Homo sapien
catacacatatagcccctttccact

SEQ ID NO: 4738894 - DNA, 25 bp, Homo sapien
tacacatatagcccctttccactgc

SEQ ID NO: 4738895 - DNA, 25 bp, Homo sapien
atacacatatagcccctttccactg

SEQ ID NO: 4738896 - DNA, 25 bp, Homo sapien
agaagggccacattttcgctgggtc

SEQ ID NO: 4738897 - DNA, 25 bp, Homo sapien
agggccacattttcgctgggtccca

SEQ ID NO: 4738898 - DNA, 25 bp, Homo sapien
gggccacattttcgctgggtcccat

SEQ ID NO: 4738899 - DNA, 25 bp, Homo sapien
gaagggccacattttcgctgggtcc

SEQ ID NO: 4738900 - DNA, 25 bp, Homo sapien
tgcagtgaagggcatgctaagtcta

SEQ ID NO: 4738901 - DNA, 25 bp, Homo sapien
cagtgaagggcatgctaagtctagg

SEQ ID NO: 4738902 - DNA, 25 bp, Homo sapien
ggcatgctaagtctaggcacaggtc

SEQ ID NO: 4738903 - DNA, 25 bp, Homo sapien
tgaagggcatgctaagtctaggcac

SEQ ID NO: 4738904 - DNA, 25 bp, Homo sapien
ctctcccaggcacacatccccttct

SEQ ID NO: 4738905 - DNA, 25 bp, Homo sapien
acacatccccttctctgtttctgga

SEQ ID NO: 4738906 - DNA, 25 bp, Homo sapien
cacatccccttctctgtttctggaa

SEQ ID NO: 4738907 - DNA, 25 bp, Homo sapien
ggagacagagcctctcccaggcaca

SEQ ID NO: 4738908 - DNA, 25 bp, Homo sapien
cagggctaataggtggatggatctc

SEQ ID NO: 4738909 - DNA, 25 bp, Homo sapien
tactgacatcttgctctagaggtcc

SEQ ID NO: 4738910 - DNA, 25 bp, Homo sapien
tgtccgtctacagcttgctccagag

SEQ ID NO: 4738911 - DNA, 25 bp, Homo sapien
tagaggtccaatgtcctgctgtccg

SEQ ID NO: 4738912 - DNA, 25 bp, Homo sapien
agacatcaccatgcgcccctttgtg

SEQ ID NO: 4738913 - DNA, 25 bp, Homo sapien
tctcacttcgggcctccacagtctg

SEQ ID NO: 4738914 - DNA, 25 bp, Homo sapien
aacattgggcaccattactagctcc

SEQ ID NO: 4738915 - DNA, 25 bp, Homo sapien
agctccccacctcgagacatcacca

SEQ ID NO: 4738916 - DNA, 25 bp, Homo sapien
gcttccagaggacaccaatcacctc

SEQ ID NO: 4738917 - DNA, 25 bp, Homo sapien
ggacaccaatcacctctccaccatg

SEQ ID NO: 4738918 - DNA, 25 bp, Homo sapien
cagaggacaccaatcacctctccac

SEQ ID NO: 4738919 - DNA, 25 bp, Homo sapien
ttccagaggacaccaatcacctctc

SEQ ID NO: 4738920 - DNA, 25 bp, Homo sapien
ctgaggaggatcatagcccagcacg

SEQ ID NO: 4738921 - DNA, 25 bp, Homo sapien
aggcagctggcgagtccacagcctg

SEQ ID NO: 4738922 - DNA, 25 bp, Homo sapien
cgtcgtaaatgtccaagggcggccg

SEQ ID NO: 4738923 - DNA, 25 bp, Homo sapien
atatggcgaggagacaggcgaatca

SEQ ID NO: 4738924 - DNA, 25 bp, Homo sapien
tgcatagcccggcagaaggagcaca

SEQ ID NO: 4738925 - DNA, 25 bp, Homo sapien
aagactgaagcaccaagacccacag

SEQ ID NO: 4738926 - DNA, 25 bp, Homo sapien
cccacctgcccatttgaagactgaa

SEQ ID NO: 4738927 - DNA, 25 bp, Homo sapien
aacagctgttgcatagcccggcaga

SEQ ID NO: 4738928 - DNA, 25 bp, Homo sapien
cttctctaacatgggcagggcttca

SEQ ID NO: 4738929 - DNA, 25 bp, Homo sapien
agctgcttctctaacatgggcaggg

SEQ ID NO: 4738930 - DNA, 25 bp, Homo sapien
ctctaacatgggcagggcttcagct

SEQ ID NO: 4738931 - DNA, 25 bp, Homo sapien
tgcttctctaacatgggcagggctt

SEQ ID NO: 4738932 - DNA, 25 bp, Homo sapien
gtgtccacacagagtttttgcggtc

SEQ ID NO: 4738933 - DNA, 25 bp, Homo sapien
cacacagagtttttgcggtcttggg

SEQ ID NO: 4738934 - DNA, 25 bp, Homo sapien
cctgtgtccacacagagtttttgcg

SEQ ID NO: 4738935 - DNA, 25 bp, Homo sapien
tgcggtcttggggggtaacaatgac

SEQ ID NO: 4738936 - DNA, 25 bp, Homo sapien
gccaggaagccactgcggatctcca

SEQ ID NO: 4738937 - DNA, 25 bp, Homo sapien
ccaggaagccactgcggatctccac

SEQ ID NO: 4738938 - DNA, 25 bp, Homo sapien
tgccaggaagccactgcggatctcc

SEQ ID NO: 4738939 - DNA, 25 bp, Homo sapien
ctgccaggaagccactgcggatctc

SEQ ID NO: 4738940 - DNA, 25 bp, Homo sapien
cctgctcctccctgtaagacaccct

SEQ ID NO: 4738941 - DNA, 25 bp, Homo sapien
ctgctcctccctgtaagacaccctc

SEQ ID NO: 4738942 - DNA, 25 bp, Homo sapien
tgctcctccctgtaagacaccctct

SEQ ID NO: 4738943 - DNA, 25 bp, Homo sapien
tcttccaatcaaacgttgataccaa

SEQ ID NO: 4738944 - DNA, 25 bp, Homo sapien
tccaatcaaacgttgataccaagaa

SEQ ID NO: 4738945 - DNA, 25 bp, Homo sapien
caatcaaacgttgataccaagaaaa

SEQ ID NO: 4738946 - DNA, 25 bp, Homo sapien
ttccaatcaaacgttgataccaaga

SEQ ID NO: 4738947 - DNA, 25 bp, Homo sapien
tctcaggctatggagctcagacccc

SEQ ID NO: 4738948 - DNA, 25 bp, Homo sapien
atatccccaggcttctctcaggcta

SEQ ID NO: 4738949 - DNA, 25 bp, Homo sapien
cccagccacatatccccaggcttct

SEQ ID NO: 4738950 - DNA, 25 bp, Homo sapien
cttctctcaggctatggagctcaga

SEQ ID NO: 4738951 - DNA, 25 bp, Homo sapien
cacccattcccatgtagacttaggg

SEQ ID NO: 4738952 - DNA, 25 bp, Homo sapien
tgtagacttagggtgcagcacgaag

SEQ ID NO: 4738953 - DNA, 25 bp, Homo sapien
cagggcagggcatcttagaacccct

SEQ ID NO: 4738954 - DNA, 25 bp, Homo sapien
gatgatggctggccgcaaggaaact

SEQ ID NO: 4738955 - DNA, 25 bp, Homo sapien
ggccaccagatccaggctctcatca

SEQ ID NO: 4738956 - DNA, 25 bp, Homo sapien
gcggccaccagatccaggctctcat

SEQ ID NO: 4738957 - DNA, 25 bp, Homo sapien
aggctctcatcagcgaaaccctcac

SEQ ID NO: 4738958 - DNA, 25 bp, Homo sapien
ccaggctctcatcagcgaaaccctc

SEQ ID NO: 4738959 - DNA, 25 bp, Homo sapien
ccgtgccacaccagagaaggctggg

SEQ ID NO: 4738960 - DNA, 25 bp, Homo sapien
gccagccgtgccacaccagagaagg

SEQ ID NO: 4738961 - DNA, 25 bp, Homo sapien
cagccgtgccacaccagagaaggct

SEQ ID NO: 4738962 - DNA, 25 bp, Homo sapien
ttggccagccgtgccacaccagaga

SEQ ID NO: 4738963 - DNA, 25 bp, Homo sapien
gctcccgctgataggccacgcgaat

SEQ ID NO: 4738964 - DNA, 25 bp, Homo sapien
tcagcgagatcatcccctctgggct

SEQ ID NO: 4738965 - DNA, 25 bp, Homo sapien
cgcgaatccgaaacacaaatccatc

SEQ ID NO: 4738966 - DNA, 25 bp, Homo sapien
gtgtccctcagcgagatcatcccct

SEQ ID NO: 4738967 - DNA, 25 bp, Homo sapien
cggcactgcagaccatgctgttgtg

SEQ ID NO: 4738968 - DNA, 25 bp, Homo sapien
gctgcacggcctcagcgtcctgtgg

SEQ ID NO: 4738969 - DNA, 25 bp, Homo sapien
cactgcagaccatgctgttgtgtca

SEQ ID NO: 4738970 - DNA, 25 bp, Homo sapien
ctgcagaccatgctgttgtgtcaac

SEQ ID NO: 4738971 - DNA, 25 bp, Homo sapien
taggccggacagggcttatcgagcc

SEQ ID NO: 4738972 - DNA, 25 bp, Homo sapien
cccgcagagtctcatagaaggagaa

SEQ ID NO: 4738973 - DNA, 25 bp, Homo sapien
cagcagtgaggaccgctcccgcaga

SEQ ID NO: 4738974 - DNA, 25 bp, Homo sapien
gtcatgggctccacgtaggccggac

SEQ ID NO: 4738975 - DNA, 25 bp, Homo sapien
tccctgaacagcagacacggtcagt

SEQ ID NO: 4738976 - DNA, 25 bp, Homo sapien
cccacagtaggcgactgaggtcgtc

SEQ ID NO: 4738977 - DNA, 25 bp, Homo sapien
tcgtcgtagcaacgtaccgccgcta

SEQ ID NO: 4738978 - DNA, 25 bp, Homo sapien
cacggtcagtgggagaccctctagc

SEQ ID NO: 4738979 - DNA, 25 bp, Homo sapien
gggccccccacatagtggacacagg

SEQ ID NO: 4738980 - DNA, 25 bp, Homo sapien
ggacacaggtttctgggatgtcagc

SEQ ID NO: 4738981 - DNA, 25 bp, Homo sapien
ttggataagtgcatccagggggccc

SEQ ID NO: 4738982 - DNA, 25 bp, Homo sapien
ccccacatagtggacacaggtttct

SEQ ID NO: 4738983 - DNA, 25 bp, Homo sapien
tctgggacatagaggctgcctccca

SEQ ID NO: 4738984 - DNA, 25 bp, Homo sapien
aaacgccgaagctccgagcgggatc

SEQ ID NO: 4738985 - DNA, 25 bp, Homo sapien
gggaataaggcgcttctgggacata

SEQ ID NO: 4738986 - DNA, 25 bp, Homo sapien
atggctccgtcctggaaacgccgaa

SEQ ID NO: 4738987 - DNA, 25 bp, Homo sapien
tccctcaggccggagaaggagtccc

SEQ ID NO: 4738988 - DNA, 25 bp, Homo sapien
ctggacccagctcaaggacgctggt

SEQ ID NO: 4738989 - DNA, 25 bp, Homo sapien
aaggacgctggtcagtccctcaggc

SEQ ID NO: 4738990 - DNA, 25 bp, Homo sapien
tgtgctttggtggatcttggctgat

SEQ ID NO: 4738991 - DNA, 25 bp, Homo sapien
ccaaagcagctgagacatagtcccc

SEQ ID NO: 4738992 - DNA, 25 bp, Homo sapien
ctgcaggcgactcagtggacggaga

SEQ ID NO: 4738993 - DNA, 25 bp, Homo sapien
ctggccagagcttcagccggtggca

SEQ ID NO: 4738994 - DNA, 25 bp, Homo sapien
gtggcacgctgcctgcaggcgactc

SEQ ID NO: 4738995 - DNA, 25 bp, Homo sapien
gcaacatcatagacagccgtgcctc

SEQ ID NO: 4738996 - DNA, 25 bp, Homo sapien
ccggatcatgggtttgggagtcatc

SEQ ID NO: 4738997 - DNA, 25 bp, Homo sapien
tggaacccgtcgtcagctctgctgt

SEQ ID NO: 4738998 - DNA, 25 bp, Homo sapien
caggacatggtcaaaagcccggatc

SEQ ID NO: 4738999 - DNA, 25 bp, Homo sapien
agtgacatcagcacagaggttgaga

SEQ ID NO: 4739000 - DNA, 25 bp, Homo sapien
ccaggaagacaacggagaaggcctg

SEQ ID NO: 4739001 - DNA, 25 bp, Homo sapien
aggaatccaggaagacaacggagaa

SEQ ID NO: 4739002 - DNA, 25 bp, Homo sapien
acatcagcacagaggttgagatggc

SEQ ID NO: 4739003 - DNA, 25 bp, Homo sapien
aaagagggatctgagctgagacata

SEQ ID NO: 4739004 - DNA, 25 bp, Homo sapien
taaactgatcccgttgactgtcagg

SEQ ID NO: 4739005 - DNA, 25 bp, Homo sapien
tgagacataaactgatcccgttgac

SEQ ID NO: 4739006 - DNA, 25 bp, Homo sapien
aagagggatctgagctgagacataa

SEQ ID NO: 4739007 - DNA, 25 bp, Homo sapien
cagaaactgcaagacacttctcagg

SEQ ID NO: 4739008 - DNA, 25 bp, Homo sapien
ccagaaactgcaagacacttctcag

SEQ ID NO: 4739009 - DNA, 25 bp, Homo sapien
gaaactgcaagacacttctcaggac

SEQ ID NO: 4739010 - DNA, 25 bp, Homo sapien
agaaactgcaagacacttctcagga

SEQ ID NO: 4739011 - DNA, 25 bp, Homo sapien
tcttgcgtgtagacacaaggaagac

SEQ ID NO: 4739012 - DNA, 25 bp, Homo sapien
ggtatggatcttgcgtgtagacaca

SEQ ID NO: 4739013 - DNA, 25 bp, Homo sapien
agccactcatggtggtatggatctt

SEQ ID NO: 4739014 - DNA, 25 bp, Homo sapien
ccagcatggagacaaggaacccagt

SEQ ID NO: 4739015 - DNA, 25 bp, Homo sapien
gggactcgagaactgtatcttgcag

SEQ ID NO: 4739016 - DNA, 25 bp, Homo sapien
gcagctgcaaatgggactcgagaac

SEQ ID NO: 4739017 - DNA, 25 bp, Homo sapien
tgcaggacccatgtgttatagcggg

SEQ ID NO: 4739018 - DNA, 25 bp, Homo sapien
tgtatcttgcaggacccatgtgtta

SEQ ID NO: 4739019 - DNA, 25 bp, Homo sapien
aggactctgccctcggtaccaggca

SEQ ID NO: 4739020 - DNA, 25 bp, Homo sapien
atgcagacgtacagtgaccaggcgc

SEQ ID NO: 4739021 - DNA, 25 bp, Homo sapien
ttcttggttggcagcaagcggcacg

SEQ ID NO: 4739022 - DNA, 25 bp, Homo sapien
ggtaccaggcagagcgcacattgtt

SEQ ID NO: 4739023 - DNA, 25 bp, Homo sapien
atcctgtccccccatacttgaggcc

SEQ ID NO: 4739024 - DNA, 25 bp, Homo sapien
catgctatgccctcagcccaatgtg

SEQ ID NO: 4739025 - DNA, 25 bp, Homo sapien
tgccttctcctccagatttaccatc

SEQ ID NO: 4739026 - DNA, 25 bp, Homo sapien
catacttgaggcctccgtgcctctg

SEQ ID NO: 4739027 - DNA, 25 bp, Homo sapien
cggccgcagcaacagtgagggtttc

SEQ ID NO: 4739028 - DNA, 25 bp, Homo sapien
agcccgtccttgtcctgtaggattt

SEQ ID NO: 4739029 - DNA, 25 bp, Homo sapien
gagaagcaaacactgccaaagaggg

SEQ ID NO: 4739030 - DNA, 25 bp, Homo sapien
cggaagtagcgctggttcagcccgt

SEQ ID NO: 4739031 - DNA, 25 bp, Homo sapien
cacggttagcaacactaggcccagt

SEQ ID NO: 4739032 - DNA, 25 bp, Homo sapien
gcccgagggatctaagctgccttca

SEQ ID NO: 4739033 - DNA, 25 bp, Homo sapien
tagaattctgacttcaatcccctgg

SEQ ID NO: 4739034 - DNA, 25 bp, Homo sapien
tagtcaggtggtgggcctctatccc

SEQ ID NO: 4739035 - DNA, 25 bp, Homo sapien
tctggtcggatgcaggtgcccagaa

SEQ ID NO: 4739036 - DNA, 25 bp, Homo sapien
cacttggtggaggggcactcgaacc

SEQ ID NO: 4739037 - DNA, 25 bp, Homo sapien
cccttcacggcatagggcacttggt

SEQ ID NO: 4739038 - DNA, 25 bp, Homo sapien
tgcccacaacagtaacctgggctgg

SEQ ID NO: 4739039 - DNA, 25 bp, Homo sapien
attagccgggcatggcggcgtgcgc

SEQ ID NO: 4739040 - DNA, 25 bp, Homo sapien
cgggcatggcggcgtgcgcctgtag

SEQ ID NO: 4739041 - DNA, 25 bp, Homo sapien
tcccagctgctggggaggctgaggc

SEQ ID NO: 4739042 - DNA, 25 bp, Homo sapien
gccgggcatggcggcgtgcgcctgt

SEQ ID NO: 4739043 - DNA, 25 bp, Homo sapien
tataacctcagcattacagcatagg

SEQ ID NO: 4739044 - DNA, 25 bp, Homo sapien
aaatgaccacgctcccagctaagct

SEQ ID NO: 4739045 - DNA, 25 bp, Homo sapien
taagcttccttgctgtgagaatgag

SEQ ID NO: 4739046 - DNA, 25 bp, Homo sapien
cacaaatactgcaaggcatggaagt

SEQ ID NO: 4739047 - DNA, 25 bp, Homo sapien
ggcatcaatccgatccttcttcttc

SEQ ID NO: 4739048 - DNA, 25 bp, Homo sapien
gacctcccgtaggaaggcatcaatc

SEQ ID NO: 4739049 - DNA, 25 bp, Homo sapien
gccttacttcctttagtagctcctc

SEQ ID NO: 4739050 - DNA, 25 bp, Homo sapien
agggactgagggcaccctcacaacc

SEQ ID NO: 4739051 - DNA, 25 bp, Homo sapien
gcgattaagctcctcattggtaggc

SEQ ID NO: 4739052 - DNA, 25 bp, Homo sapien
caggaggcccttcgctggaggttca

SEQ ID NO: 4739053 - DNA, 25 bp, Homo sapien
taaacgaagcaagctggagtggaac

SEQ ID NO: 4739054 - DNA, 25 bp, Homo sapien
tctcagtctcccgaaggcgattaag

SEQ ID NO: 4739055 - DNA, 25 bp, Homo sapien
ccctcttttgagtaggagtcagatt

SEQ ID NO: 4739056 - DNA, 25 bp, Homo sapien
aaattccttgagttaagagctctcc

SEQ ID NO: 4739057 - DNA, 25 bp, Homo sapien
ggatgaacatcactgagcgctgagc

SEQ ID NO: 4739058 - DNA, 25 bp, Homo sapien
aaaactcaggagaatcgttacttgg

SEQ ID NO: 4739059 - DNA, 25 bp, Homo sapien
tatgagcaggcttcaaaggcaagcg

SEQ ID NO: 4739060 - DNA, 25 bp, Homo sapien
aaaggcaagcgtgcaggatcccaaa

SEQ ID NO: 4739061 - DNA, 25 bp, Homo sapien
tcgaggttccacaactggtacaccc

SEQ ID NO: 4739062 - DNA, 25 bp, Homo sapien
ggtacacccgtactatgagcaggct

SEQ ID NO: 4739063 - DNA, 25 bp, Homo sapien
cagagagccttactggagcgctcca

SEQ ID NO: 4739064 - DNA, 25 bp, Homo sapien
tctgtggaggaagatcccgcttatc

SEQ ID NO: 4739065 - DNA, 25 bp, Homo sapien
tctcttcaactttgaggtgcagagc

SEQ ID NO: 4739066 - DNA, 25 bp, Homo sapien
gtgccactggctggaaacatcctcc

SEQ ID NO: 4739067 - DNA, 25 bp, Homo sapien
gtcgctccgcgaagctgctctccag

SEQ ID NO: 4739068 - DNA, 25 bp, Homo sapien
tctggctctccagtcgctccgcgaa

SEQ ID NO: 4739069 - DNA, 25 bp, Homo sapien
tctccagtcgctccgcgaagctgct

SEQ ID NO: 4739070 - DNA, 25 bp, Homo sapien
gctctccagtcgctccgcgaagctg

SEQ ID NO: 4739071 - DNA, 25 bp, Homo sapien
tatacctcatagcttcccacgtggg

SEQ ID NO: 4739072 - DNA, 25 bp, Homo sapien
cacgtgggcggaaatgcctaactcc

SEQ ID NO: 4739073 - DNA, 25 bp, Homo sapien
tcgcttgccattggccgggcagtct

SEQ ID NO: 4739074 - DNA, 25 bp, Homo sapien
gcacttcagattctagccgggtcta

SEQ ID NO: 4739075 - DNA, 25 bp, Homo sapien
gaccagagaagagtgtcattaaatt

SEQ ID NO: 4739076 - DNA, 25 bp, Homo sapien
gaaaaaatatgaatcctggcttgga

SEQ ID NO: 4739077 - DNA, 25 bp, Homo sapien
gacactaaagtcacaattctgagac

SEQ ID NO: 4739078 - DNA, 25 bp, Homo sapien
gaaagttatattcagcaaaaggtag

SEQ ID NO: 4739079 - DNA, 25 bp, Homo sapien
aattctacacaatgtggacaggacc

SEQ ID NO: 4739080 - DNA, 25 bp, Homo sapien
ggaccagaggcagaccaaaatcctg

SEQ ID NO: 4739081 - DNA, 25 bp, Homo sapien
aaattctacacaatgtggacaggac

SEQ ID NO: 4739082 - DNA, 25 bp, Homo sapien
caaaatcctggtaagggccgggcat

SEQ ID NO: 4739083 - DNA, 25 bp, Homo sapien
tgacaccttttaatccagtcactga

SEQ ID NO: 4739084 - DNA, 25 bp, Homo sapien
atccagtcactgaaattagcatctg

SEQ ID NO: 4739085 - DNA, 25 bp, Homo sapien
ccagtcactgaaattagcatctgca

SEQ ID NO: 4739086 - DNA, 25 bp, Homo sapien
cttgacaccttttaatccagtcact

SEQ ID NO: 4739087 - DNA, 25 bp, Homo sapien
ttgtcctcctataaaagtttctaga

SEQ ID NO: 4739088 - DNA, 25 bp, Homo sapien
gttttttaaatggtattcacatatc

SEQ ID NO: 4739089 - DNA, 25 bp, Homo sapien
tgtcctcctataaaagtttctagag

SEQ ID NO: 4739090 - DNA, 25 bp, Homo sapien
cctcctataaaagtttctagagcag

SEQ ID NO: 4739091 - DNA, 25 bp, Homo sapien
tgtagaaaaagatgcgtttctggct

SEQ ID NO: 4739092 - DNA, 25 bp, Homo sapien
gtagaaaaagatgcgtttctggctg

SEQ ID NO: 4739093 - DNA, 25 bp, Homo sapien
acgaggtcaagaaatcgagaccagc

SEQ ID NO: 4739094 - DNA, 25 bp, Homo sapien
tggctaacacagtgaaaccccgtct

SEQ ID NO: 4739095 - DNA, 25 bp, Homo sapien
cacgaggtcaagaaatcgagaccag

SEQ ID NO: 4739096 - DNA, 25 bp, Homo sapien
gcctggctaacacagtgaaaccccg

SEQ ID NO: 4739097 - DNA, 25 bp, Homo sapien
aataagctctttgacgataatatat

SEQ ID NO: 4739098 - DNA, 25 bp, Homo sapien
cgataatatatgtgcatcatctggt

SEQ ID NO: 4739099 - DNA, 25 bp, Homo sapien
tctttgacgataatatatgtgcatc

SEQ ID NO: 4739100 - DNA, 25 bp, Homo sapien
gctctttgacgataatatatgtgca

SEQ ID NO: 4739101 - DNA, 25 bp, Homo sapien
caaacatgttgagtgtcagtaaaag

SEQ ID NO: 4739102 - DNA, 25 bp, Homo sapien
caaataacttatgatcagaaactac

SEQ ID NO: 4739103 - DNA, 25 bp, Homo sapien
catgttgagtgtcagtaaaagtttt

SEQ ID NO: 4739104 - DNA, 25 bp, Homo sapien
tttaaacaaataacttatgatcaga

SEQ ID NO: 4739105 - DNA, 25 bp, Homo sapien
tggccgggaacagcctggaatcagc

SEQ ID NO: 4739106 - DNA, 25 bp, Homo sapien
agggccaccaccagcgtgaggaaag

SEQ ID NO: 4739107 - DNA, 25 bp, Homo sapien
tcaacctaacgctccaccagagagg

SEQ ID NO: 4739108 - DNA, 25 bp, Homo sapien
ttacaagaagcgaaaggacggcctc

SEQ ID NO: 4739109 - DNA, 25 bp, Homo sapien
tccaaagtcacctccttgtaagagg

SEQ ID NO: 4739110 - DNA, 25 bp, Homo sapien
caggtgaggtgatttcgggcacagg

SEQ ID NO: 4739111 - DNA, 25 bp, Homo sapien
gcacaggaaggctgaatgacatttc

SEQ ID NO: 4739112 - DNA, 25 bp, Homo sapien
gctgacaatggacttgaccactatg

SEQ ID NO: 4739113 - DNA, 25 bp, Homo sapien
ttgagctgaggtattcaaggctgca

SEQ ID NO: 4739114 - DNA, 25 bp, Homo sapien
aggatcgtttgagctgaggtattca

SEQ ID NO: 4739115 - DNA, 25 bp, Homo sapien
tcgtttgagctgaggtattcaaggc

SEQ ID NO: 4739116 - DNA, 25 bp, Homo sapien
tttgagctgaggtattcaaggctgc

SEQ ID NO: 4739117 - DNA, 25 bp, Homo sapien
gacagccagtgggtgagtgcgtgga

SEQ ID NO: 4739118 - DNA, 25 bp, Homo sapien
cagccagtgggtgagtgcgtggagg

SEQ ID NO: 4739119 - DNA, 25 bp, Homo sapien
acagccagtgggtgagtgcgtggag

SEQ ID NO: 4739120 - DNA, 25 bp, Homo sapien
cttatggccgagaaggaagctgtat

SEQ ID NO: 4739121 - DNA, 25 bp, Homo sapien
ggagccaaggttacatttgttttgc

SEQ ID NO: 4739122 - DNA, 25 bp, Homo sapien
gatgtttcgggtgtatccagcagaa

SEQ ID NO: 4739123 - DNA, 25 bp, Homo sapien
cgagtttactgggaacaggagccaa

SEQ ID NO: 4739124 - DNA, 25 bp, Homo sapien
cttttggcagcaaagctcaagaggt

SEQ ID NO: 4739125 - DNA, 25 bp, Homo sapien
gcgctaaagagggaggtgaaccttc

SEQ ID NO: 4739126 - DNA, 25 bp, Homo sapien
tagacaccggtgtgcgctaaagagg

SEQ ID NO: 4739127 - DNA, 25 bp, Homo sapien
gaggtgaaccttcgtagaagaagga

SEQ ID NO: 4739128 - DNA, 25 bp, Homo sapien
ctagcaactgtagacaccggtgtgc

SEQ ID NO: 4739129 - DNA, 25 bp, Homo sapien
accagtaggtgaggtacttgcctgc

SEQ ID NO: 4739130 - DNA, 25 bp, Homo sapien
ccagtaggtgaggtacttgcctgct

SEQ ID NO: 4739131 - DNA, 25 bp, Homo sapien
cagtaggtgaggtacttgcctgctt

SEQ ID NO: 4739132 - DNA, 25 bp, Homo sapien
aaccagtaggtgaggtacttgcctg

SEQ ID NO: 4739133 - DNA, 25 bp, Homo sapien
tttatgaccacaacccttgctgttt

SEQ ID NO: 4739134 - DNA, 25 bp, Homo sapien
gtgttcactctctgctctggagagt

SEQ ID NO: 4739135 - DNA, 25 bp, Homo sapien
ttatgaccacaacccttgctgtttc

SEQ ID NO: 4739136 - DNA, 25 bp, Homo sapien
ttttatgaccacaacccttgctgtt

SEQ ID NO: 4739137 - DNA, 25 bp, Homo sapien
tttgcagtcaggggctccaacgact

SEQ ID NO: 4739138 - DNA, 25 bp, Homo sapien
tgcagtcaggggctccaacgacttg

SEQ ID NO: 4739139 - DNA, 25 bp, Homo sapien
gtcaggggctccaacgacttgtagc

SEQ ID NO: 4739140 - DNA, 25 bp, Homo sapien
cagtcaggggctccaacgacttgta

SEQ ID NO: 4739141 - DNA, 25 bp, Homo sapien
atgatcttgtcatcgtcgtcaaagg

SEQ ID NO: 4739142 - DNA, 25 bp, Homo sapien
aatgatcttgtcatcgtcgtcaaag

SEQ ID NO: 4739143 - DNA, 25 bp, Homo sapien
ccccaatgatcttgtcatcgtcgtc

SEQ ID NO: 4739144 - DNA, 25 bp, Homo sapien
ccaatgatcttgtcatcgtcgtcaa

SEQ ID NO: 4739145 - DNA, 25 bp, Homo sapien
atccttaataagcacagtgaaggca

SEQ ID NO: 4739146 - DNA, 25 bp, Homo sapien
aaatccttaataagcacagtgaagg

SEQ ID NO: 4739147 - DNA, 25 bp, Homo sapien
aataggaagggagaagtcagtagta

SEQ ID NO: 4739148 - DNA, 25 bp, Homo sapien
aagggagaagtcagtagtatgttag

SEQ ID NO: 4739149 - DNA, 25 bp, Homo sapien
caagctcagcttggagggtgatcac

SEQ ID NO: 4739150 - DNA, 25 bp, Homo sapien
tacactaactttgatgctgagcggg

SEQ ID NO: 4739151 - DNA, 25 bp, Homo sapien
cagctgtacgactccatgaagggca

SEQ ID NO: 4739152 - DNA, 25 bp, Homo sapien
tcagcatcatgaccgagcggagcgt

SEQ ID NO: 4739153 - DNA, 25 bp, Homo sapien
tagcagaagtcaagaggtgatggac

SEQ ID NO: 4739154 - DNA, 25 bp, Homo sapien
cagacagttctgaaaaggcaccact

SEQ ID NO: 4739155 - DNA, 25 bp, Homo sapien
tttgcgacgtcaatgcgaccacggg

SEQ ID NO: 4739156 - DNA, 25 bp, Homo sapien
tggagcaatcacgtcacaagaaggt

SEQ ID NO: 4739157 - DNA, 25 bp, Homo sapien
tacatgcaagaatgcagcaaaaccc

SEQ ID NO: 4739158 - DNA, 25 bp, Homo sapien
ggtactaatagcatctgactttcag

SEQ ID NO: 4739159 - DNA, 25 bp, Homo sapien
tctgatgacatacctattcgaaccc

SEQ ID NO: 4739160 - DNA, 25 bp, Homo sapien
tctatcgtcaatgtgtgaggttcca

SEQ ID NO: 4739161 - DNA, 25 bp, Homo sapien
tttcaactggacaacaagtgtcaaa

SEQ ID NO: 4739162 - DNA, 25 bp, Homo sapien
cttttgacacaaaaaggtatataca

SEQ ID NO: 4739163 - DNA, 25 bp, Homo sapien
gacacagctacacaaccttttttca

SEQ ID NO: 4739164 - DNA, 25 bp, Homo sapien
ccctgtggatgtatagggtaaaaca

SEQ ID NO: 4739165 - DNA, 25 bp, Homo sapien
ttcagtttattcaagtttgttttca

SEQ ID NO: 4739166 - DNA, 25 bp, Homo sapien
ttgttttcatggtgttttatccctc

SEQ ID NO: 4739167 - DNA, 25 bp, Homo sapien
agtttattcaagtttgttttcatgg

SEQ ID NO: 4739168 - DNA, 25 bp, Homo sapien
tattcaagtttgttttcatggtgtt

SEQ ID NO: 4739169 - DNA, 25 bp, Homo sapien
aatacatgaacttgtcctcccatcg

SEQ ID NO: 4739170 - DNA, 25 bp, Homo sapien
aaatacatgaacttgtcctcccatc

SEQ ID NO: 4739171 - DNA, 25 bp, Homo sapien
gttcctgtatacgccttcaagtctt

SEQ ID NO: 4739172 - DNA, 25 bp, Homo sapien
atttggcggtgtcataatgtctttc

SEQ ID NO: 4739173 - DNA, 25 bp, Homo sapien
ctacatcatcaatattgttcctgta

SEQ ID NO: 4739174 - DNA, 25 bp, Homo sapien
cttgtaatggtttttatgctttgaa

SEQ ID NO: 4739175 - DNA, 25 bp, Homo sapien
ccttttgtttctgctaacgatctct

SEQ ID NO: 4739176 - DNA, 25 bp, Homo sapien
aggtcaagtctaagtcgaatccatc

SEQ ID NO: 4739177 - DNA, 25 bp, Homo sapien
taagtcgaatccatcctcttgatat

SEQ ID NO: 4739178 - DNA, 25 bp, Homo sapien
tcctcttgatatctccttttgtttc

SEQ ID NO: 4739179 - DNA, 25 bp, Homo sapien
agatggcagaagctgctggtggcgg

SEQ ID NO: 4739180 - DNA, 25 bp, Homo sapien
gagagatggcagaagctgctggtgg

SEQ ID NO: 4739181 - DNA, 25 bp, Homo sapien
gaggagagagatggcagaagctgct

SEQ ID NO: 4739182 - DNA, 25 bp, Homo sapien
ggagagagatggcagaagctgctgg

SEQ ID NO: 4739183 - DNA, 25 bp, Homo sapien
ggctctggacttggcggtagctgat

SEQ ID NO: 4739184 - DNA, 25 bp, Homo sapien
ctctggaccgcagccgggtaatggc

SEQ ID NO: 4739185 - DNA, 25 bp, Homo sapien
gctctggaccgcagccgggtaatgg

SEQ ID NO: 4739186 - DNA, 25 bp, Homo sapien
ctggacttggcggtagctgatgccc

SEQ ID NO: 4739187 - DNA, 25 bp, Homo sapien
aatggggagaagacgaataatcctc

SEQ ID NO: 4739188 - DNA, 25 bp, Homo sapien
cggaatggggagaagacgaataatc

SEQ ID NO: 4739189 - DNA, 25 bp, Homo sapien
ggcggcagcggaatggggagaagac

SEQ ID NO: 4739190 - DNA, 25 bp, Homo sapien
tggggagaagacgaataatcctccg

SEQ ID NO: 4739191 - DNA, 25 bp, Homo sapien
tctggagtcagtgcagagctactcc

SEQ ID NO: 4739192 - DNA, 25 bp, Homo sapien
gtgggacttcgcctctgctaagcca

SEQ ID NO: 4739193 - DNA, 25 bp, Homo sapien
cccttggcgaatctcttcactgaca

SEQ ID NO: 4739194 - DNA, 25 bp, Homo sapien
caatgggccatcagggtgggacttc

SEQ ID NO: 4739195 - DNA, 25 bp, Homo sapien
cacataaacatatgcaccagcacca

SEQ ID NO: 4739196 - DNA, 25 bp, Homo sapien
tcacacacataaacatatgcaccag

SEQ ID NO: 4739197 - DNA, 25 bp, Homo sapien
acataaacatatgcaccagcaccat

SEQ ID NO: 4739198 - DNA, 25 bp, Homo sapien
cacacataaacatatgcaccagcac

SEQ ID NO: 4739199 - DNA, 25 bp, Homo sapien
tgcagcccgtgctgggccgcgaatc

SEQ ID NO: 4739200 - DNA, 25 bp, Homo sapien
aatctggtagccacgcttctccggc

SEQ ID NO: 4739201 - DNA, 25 bp, Homo sapien
ctggagggaaagaacgcaccgccaa

SEQ ID NO: 4739202 - DNA, 25 bp, Homo sapien
ggaaagaacgcaccgccaaggaggc

SEQ ID NO: 4739203 - DNA, 25 bp, Homo sapien
ggcctaaaagtctctgccttgggag

SEQ ID NO: 4739204 - DNA, 25 bp, Homo sapien
ggcaggcgtgattctaagatctcaa

SEQ ID NO: 4739205 - DNA, 25 bp, Homo sapien
ttaacagtcctggatggaggtaagg

SEQ ID NO: 4739206 - DNA, 25 bp, Homo sapien
tggcagtggaacattggaaacagag

SEQ ID NO: 4739207 - DNA, 25 bp, Homo sapien
ttccatccacctttaggtgcagcat

SEQ ID NO: 4739208 - DNA, 25 bp, Homo sapien
cttccatccacctttaggtgcagca

SEQ ID NO: 4739209 - DNA, 25 bp, Homo sapien
aaaaactgggttgtggtccctgatg

SEQ ID NO: 4739210 - DNA, 25 bp, Homo sapien
tctccggtgtgttcgcagtggttgc

SEQ ID NO: 4739211 - DNA, 25 bp, Homo sapien
cttggtaacaaacactcttcagagc

SEQ ID NO: 4739212 - DNA, 25 bp, Homo sapien
gtcccggttggttgcagtcctcctg

SEQ ID NO: 4739213 - DNA, 25 bp, Homo sapien
gggcacaggtcagacgtcagtaccc

SEQ ID NO: 4739214 - DNA, 25 bp, Homo sapien
gatgcagacggctgcgaggcgctgg

SEQ ID NO: 4739215 - DNA, 25 bp, Homo sapien
cgagcggcgcgggatgcagacggct

SEQ ID NO: 4739216 - DNA, 25 bp, Homo sapien
caggtcagacgtcagtacccgcagg

SEQ ID NO: 4739217 - DNA, 25 bp, Homo sapien
tgttagctgcgatacacaaatacat

SEQ ID NO: 4739218 - DNA, 25 bp, Homo sapien
taacattgggcggtggataaagtcc

SEQ ID NO: 4739219 - DNA, 25 bp, Homo sapien
gcttagcttccgttaatggagccat

SEQ ID NO: 4739220 - DNA, 25 bp, Homo sapien
tgggcactggtaccccgactgcctt

SEQ ID NO: 4739221 - DNA, 25 bp, Homo sapien
tctcacatttggcaccagttgtttc

SEQ ID NO: 4739222 - DNA, 25 bp, Homo sapien
ttgtgatggccgaggcgaagttatt

SEQ ID NO: 4739223 - DNA, 25 bp, Homo sapien
cccgcacccttctggttgatgttgg

SEQ ID NO: 4739224 - DNA, 25 bp, Homo sapien
tcccatttattccgtgagttcctcc

SEQ ID NO: 4739225 - DNA, 25 bp, Homo sapien
taaagacggggatagactctggacc

SEQ ID NO: 4739226 - DNA, 25 bp, Homo sapien
aactgaagttcaggactgcggccac

SEQ ID NO: 4739227 - DNA, 25 bp, Homo sapien
gtagctgtcaaattctaaagacggg

SEQ ID NO: 4739228 - DNA, 25 bp, Homo sapien
cccactgtagagcagggacgtgact

SEQ ID NO: 4739229 - DNA, 25 bp, Homo sapien
cctcttagagcatgttcttctccct

SEQ ID NO: 4739230 - DNA, 25 bp, Homo sapien
tccctcttagagcatgttcttctcc

SEQ ID NO: 4739231 - DNA, 25 bp, Homo sapien
ctggtctccaccacatgtagatggg

SEQ ID NO: 4739232 - DNA, 25 bp, Homo sapien
tggtctccaccacatgtagatgggg

SEQ ID NO: 4739233 - DNA, 25 bp, Homo sapien
ctctctggggtatttgggatctata

SEQ ID NO: 4739234 - DNA, 25 bp, Homo sapien
tggttggaacttgagtagaggccca

SEQ ID NO: 4739235 - DNA, 25 bp, Homo sapien
gtgtctgccgccacaaactgggaga

SEQ ID NO: 4739236 - DNA, 25 bp, Homo sapien
gatctatatattttgtgtctgccgc

SEQ ID NO: 4739237 - DNA, 25 bp, Homo sapien
ctcctgtaactaaaagtgactcatc

SEQ ID NO: 4739238 - DNA, 25 bp, Homo sapien
cttgttcctcctgtaactaaaagtg

SEQ ID NO: 4739239 - DNA, 25 bp, Homo sapien
tgttcctcctgtaactaaaagtgac

SEQ ID NO: 4739240 - DNA, 25 bp, Homo sapien
tcctcctgtaactaaaagtgactca

SEQ ID NO: 4739241 - DNA, 25 bp, Homo sapien
aaatgcaggcaaaaaattgagcagc

SEQ ID NO: 4739242 - DNA, 25 bp, Homo sapien
ataatgaggagaaggccttccagtt

SEQ ID NO: 4739243 - DNA, 25 bp, Homo sapien
actagatctttaggcaagtaggaga

SEQ ID NO: 4739244 - DNA, 25 bp, Homo sapien
tatcaaaaccaaccatttcaggaaa

SEQ ID NO: 4739245 - DNA, 25 bp, Homo sapien
tgaaaccaggtgcaagaattcaccc

SEQ ID NO: 4739246 - DNA, 25 bp, Homo sapien
ggatcacggcacaaactaccacact

SEQ ID NO: 4739247 - DNA, 25 bp, Homo sapien
tgcggattctgtacagagccctggc

SEQ ID NO: 4739248 - DNA, 25 bp, Homo sapien
taagcgccatctactggatcacggc

SEQ ID NO: 4739249 - DNA, 25 bp, Homo sapien
tccctccgggcataaaacttgcatg

SEQ ID NO: 4739250 - DNA, 25 bp, Homo sapien
tgcttcctgtctaagggagcctgga

SEQ ID NO: 4739251 - DNA, 25 bp, Homo sapien
tagtctcaagtgctagaggcttccc

SEQ ID NO: 4739252 - DNA, 25 bp, Homo sapien
tctaataggccaaacaagagagtgg

SEQ ID NO: 4739253 - DNA, 25 bp, Homo sapien
tctcaggtcagacagggctgtcccc

SEQ ID NO: 4739254 - DNA, 25 bp, Homo sapien
tcacactccttcacactggaaagca

SEQ ID NO: 4739255 - DNA, 25 bp, Homo sapien
aagcatcctccaatctcaggtcaga

SEQ ID NO: 4739256 - DNA, 25 bp, Homo sapien
ccttcacactggaaagcatcctcca

SEQ ID NO: 4739257 - DNA, 25 bp, Homo sapien
ggaccccagctcgtcgtgcagggag

SEQ ID NO: 4739258 - DNA, 25 bp, Homo sapien
ctccctgcacgacgagctggggtcc

SEQ ID NO: 4739259 - DNA, 25 bp, Homo sapien
aagcccagcactgcacgctgcattt

SEQ ID NO: 4739260 - DNA, 25 bp, Homo sapien
ctttgcctttgtggtaggacgctgc

SEQ ID NO: 4739261 - DNA, 25 bp, Homo sapien
ttgcctttgtggtaggacgctgcag

SEQ ID NO: 4739262 - DNA, 25 bp, Homo sapien
gcctttgtggtaggacgctgcagtg

SEQ ID NO: 4739263 - DNA, 25 bp, Homo sapien
tgagggctgtgacaccatccagcca

SEQ ID NO: 4739264 - DNA, 25 bp, Homo sapien
cactctggccacacgttggctggct

SEQ ID NO: 4739265 - DNA, 25 bp, Homo sapien
cacttcaagtgagttatttgggact

SEQ ID NO: 4739266 - DNA, 25 bp, Homo sapien
ccacacgttggctggcttgcatcca

SEQ ID NO: 4739267 - DNA, 25 bp, Homo sapien
ggtaaagtggtatgatcttccacac

SEQ ID NO: 4739268 - DNA, 25 bp, Homo sapien
aaccaaaggtaaagtggtatgatct

SEQ ID NO: 4739269 - DNA, 25 bp, Homo sapien
tcatctgtctttcgttgtttgcttt

SEQ ID NO: 4739270 - DNA, 25 bp, Homo sapien
tgtctttcgttgtttgcttttcaaa

SEQ ID NO: 4739271 - DNA, 25 bp, Homo sapien
ggaaggggcccctcaaggatgcatt

SEQ ID NO: 4739272 - DNA, 25 bp, Homo sapien
gcccctcaaggatgcattgatcttg

SEQ ID NO: 4739273 - DNA, 25 bp, Homo sapien
ctgaaccagtttgtagccaccagag

SEQ ID NO: 4739274 - DNA, 25 bp, Homo sapien
tgaaccagtttgtagccaccagagc

SEQ ID NO: 4739275 - DNA, 25 bp, Homo sapien
agaagccccatagcaacctgccata

SEQ ID NO: 4739276 - DNA, 25 bp, Homo sapien
gaatttgagagatcaagaagcccca

SEQ ID NO: 4739277 - DNA, 25 bp, Homo sapien
tagcaacctgccatacaactgccca

SEQ ID NO: 4739278 - DNA, 25 bp, Homo sapien
ttgagagatcaagaagccccatagc

SEQ ID NO: 4739279 - DNA, 25 bp, Homo sapien
agcgctcattctttcatggattagc

SEQ ID NO: 4739280 - DNA, 25 bp, Homo sapien
cagcgctcattctttcatggattag

SEQ ID NO: 4739281 - DNA, 25 bp, Homo sapien
tacagaattgtttattgacgcccaa

SEQ ID NO: 4739282 - DNA, 25 bp, Homo sapien
gcctcttcgataatgtgtaattgga

SEQ ID NO: 4739283 - DNA, 25 bp, Homo sapien
catgtctcttcatggagagagggtc

SEQ ID NO: 4739284 - DNA, 25 bp, Homo sapien
aagttcctgtttcgcagccaggcac

SEQ ID NO: 4739285 - DNA, 25 bp, Homo sapien
caggagatactacacagatgtggaa

SEQ ID NO: 4739286 - DNA, 25 bp, Homo sapien
gcaggagatactacacagatgtgga

SEQ ID NO: 4739287 - DNA, 25 bp, Homo sapien
caggcaagcagacctctttttaaaa

SEQ ID NO: 4739288 - DNA, 25 bp, Homo sapien
catgcccaggcaagcagacctcttt

SEQ ID NO: 4739289 - DNA, 25 bp, Homo sapien
gtttgcccaccttgggcttgcaaag

SEQ ID NO: 4739290 - DNA, 25 bp, Homo sapien
tttgcccaccttgggcttgcaaagt

SEQ ID NO: 4739291 - DNA, 25 bp, Homo sapien
cctggcctgttgacctgaatttaag

SEQ ID NO: 4739292 - DNA, 25 bp, Homo sapien
cagattctaggtactgtatttcagg

SEQ ID NO: 4739293 - DNA, 25 bp, Homo sapien
tgttttatactgtctatccaatgag

SEQ ID NO: 4739294 - DNA, 25 bp, Homo sapien
gcctgttgacctgaatttaagttaa

SEQ ID NO: 4739295 - DNA, 25 bp, Homo sapien
cacccagctgggaatattggcacgt

SEQ ID NO: 4739296 - DNA, 25 bp, Homo sapien
actgcacccgtcccctaatggtgta

SEQ ID NO: 4739297 - DNA, 25 bp, Homo sapien
cactgcacccgtcccctaatggtgt

SEQ ID NO: 4739298 - DNA, 25 bp, Homo sapien
tgcacccgtcccctaatggtgtaac

SEQ ID NO: 4739299 - DNA, 25 bp, Homo sapien
ctgtaaacgtgtacttgaaaagact

SEQ ID NO: 4739300 - DNA, 25 bp, Homo sapien
tatatattgtctaattgttgagaat

SEQ ID NO: 4739301 - DNA, 25 bp, Homo sapien
ttgctttatggctgtaaacgtgtac

SEQ ID NO: 4739302 - DNA, 25 bp, Homo sapien
tatggctgtaaacgtgtacttgaaa

SEQ ID NO: 4739303 - DNA, 25 bp, Homo sapien
ctgtcctggttttaccgtgtacaca

SEQ ID NO: 4739304 - DNA, 25 bp, Homo sapien
caaaaccttatactagcagggctct

SEQ ID NO: 4739305 - DNA, 25 bp, Homo sapien
agcaagggacagggaatgattttcc

SEQ ID NO: 4739306 - DNA, 25 bp, Homo sapien
cgtgtacacacttggcaagcaaggg

SEQ ID NO: 4739307 - DNA, 25 bp, Homo sapien
ttattactgtaaggccaagatgcta

SEQ ID NO: 4739308 - DNA, 25 bp, Homo sapien
aaagctaatttacccactcctgaag

SEQ ID NO: 4739309 - DNA, 25 bp, Homo sapien
caagatgctaactttatgaggcacc

SEQ ID NO: 4739310 - DNA, 25 bp, Homo sapien
ggcaccagtttctcctaatggagag

SEQ ID NO: 4739311 - DNA, 25 bp, Homo sapien
gtactccatactctactgtctcagg

SEQ ID NO: 4739312 - DNA, 25 bp, Homo sapien
tagattccgaaaggtagcttgccat

SEQ ID NO: 4739313 - DNA, 25 bp, Homo sapien
ggagacaccttctgtcccgtcttta

SEQ ID NO: 4739314 - DNA, 25 bp, Homo sapien
gtatcctgaagtaccctagaatctt

SEQ ID NO: 4739315 - DNA, 25 bp, Homo sapien
aaattgccagtactacaagaagccc

SEQ ID NO: 4739316 - DNA, 25 bp, Homo sapien
tttgatcaaaacatgtgaaggtaga

SEQ ID NO: 4739317 - DNA, 25 bp, Homo sapien
gtggcttgcttgttccctgttttaa

SEQ ID NO: 4739318 - DNA, 25 bp, Homo sapien
ccctatcctaatttctaacagtatg

SEQ ID NO: 4739319 - DNA, 25 bp, Homo sapien
acttgggtgggtgagacaggagaat

SEQ ID NO: 4739320 - DNA, 25 bp, Homo sapien
cttgggtgggtgagacaggagaatt

SEQ ID NO: 4739321 - DNA, 25 bp, Homo sapien
gtctcctaggtcatttagggctgga

SEQ ID NO: 4739322 - DNA, 25 bp, Homo sapien
gggctggacagccaactgtgacttc

SEQ ID NO: 4739323 - DNA, 25 bp, Homo sapien
caagcggatactgccacctgagcat

SEQ ID NO: 4739324 - DNA, 25 bp, Homo sapien
tcctgagtggtcataggctcaagcc

SEQ ID NO: 4739325 - DNA, 25 bp, Homo sapien
tttggagacaagagtttcgcttttg

SEQ ID NO: 4739326 - DNA, 25 bp, Homo sapien
gtgctgggattcagaaaaactcttt

SEQ ID NO: 4739327 - DNA, 25 bp, Homo sapien
tacaatggtgtgatctcggctcacc

SEQ ID NO: 4739328 - DNA, 25 bp, Homo sapien
agtgctgggattcagaaaaactctt

SEQ ID NO: 4739329 - DNA, 25 bp, Homo sapien
tacaacaacacaatctctaaccttt

SEQ ID NO: 4739330 - DNA, 25 bp, Homo sapien
ggaacagttttggagcctattacgc

SEQ ID NO: 4739331 - DNA, 25 bp, Homo sapien
aaagcctaggagtaatttggaacag

SEQ ID NO: 4739332 - DNA, 25 bp, Homo sapien
taatgcacataatttttagggggaa

SEQ ID NO: 4739333 - DNA, 25 bp, Homo sapien
tacgacgacttgtatgatgacgaca

SEQ ID NO: 4739334 - DNA, 25 bp, Homo sapien
cctgttgggagttcacaagtgctgc

SEQ ID NO: 4739335 - DNA, 25 bp, Homo sapien
caaaaacctattcacagcgggtggg

SEQ ID NO: 4739336 - DNA, 25 bp, Homo sapien
tcgtctctacagaatgttcacagca

SEQ ID NO: 4739337 - DNA, 25 bp, Homo sapien
ttgtgctaagcctgatgaaatgtgc

SEQ ID NO: 4739338 - DNA, 25 bp, Homo sapien
tcaatctccatgaaaccatcgtaac

SEQ ID NO: 4739339 - DNA, 25 bp, Homo sapien
accatcgtaacatggaggcctcagc

SEQ ID NO: 4739340 - DNA, 25 bp, Homo sapien
ctaaggctgggacatggtgggcatc

SEQ ID NO: 4739341 - DNA, 25 bp, Homo sapien
aagatttcggttttcatcgagctgc

SEQ ID NO: 4739342 - DNA, 25 bp, Homo sapien
gctgcttatactgatagtgaaaaac

SEQ ID NO: 4739343 - DNA, 25 bp, Homo sapien
gatgtgtgtgagacgagttaccgcc

SEQ ID NO: 4739344 - DNA, 25 bp, Homo sapien
ctaggtgcatgtgttaagatttcgg

SEQ ID NO: 4739345 - DNA, 25 bp, Homo sapien
ccagatctcaatcgtgttgcttcaa

SEQ ID NO: 4739346 - DNA, 25 bp, Homo sapien
taaggctagatcttcctgcaatgca

SEQ ID NO: 4739347 - DNA, 25 bp, Homo sapien
cagtttttaggccagataaggctag

SEQ ID NO: 4739348 - DNA, 25 bp, Homo sapien
gcaccagatcataggagggcattat

SEQ ID NO: 4739349 - DNA, 25 bp, Homo sapien
ttcccttaccctggcaaattgcttc

SEQ ID NO: 4739350 - DNA, 25 bp, Homo sapien
caactattctgaaaccagcaggaca

SEQ ID NO: 4739351 - DNA, 25 bp, Homo sapien
tttacaactaaaaggattcagatgc

SEQ ID NO: 4739352 - DNA, 25 bp, Homo sapien
gcaggacacacctgactttaatagt

SEQ ID NO: 4739353 - DNA, 25 bp, Homo sapien
cccttcaagctccttatagacgtag

SEQ ID NO: 4739354 - DNA, 25 bp, Homo sapien
tatccccagtcccttcaagctcctt

SEQ ID NO: 4739355 - DNA, 25 bp, Homo sapien
ttcaagctccttatagacgtagcca

SEQ ID NO: 4739356 - DNA, 25 bp, Homo sapien
ccttatagacgtagccatttgttaa

SEQ ID NO: 4739357 - DNA, 25 bp, Homo sapien
ctgatacaagtaggtcagtgaagga

SEQ ID NO: 4739358 - DNA, 25 bp, Homo sapien
gatacaagtaggtcagtgaaggatt

SEQ ID NO: 4739359 - DNA, 25 bp, Homo sapien
tacaagtaggtcagtgaaggattga

SEQ ID NO: 4739360 - DNA, 25 bp, Homo sapien
tgatacaagtaggtcagtgaaggat

SEQ ID NO: 4739361 - DNA, 25 bp, Homo sapien
ggttaataggagtatcggtcccatc

SEQ ID NO: 4739362 - DNA, 25 bp, Homo sapien
gtcccaagctgtgggttaataggag

SEQ ID NO: 4739363 - DNA, 25 bp, Homo sapien
caagctgtgggttaataggagtatc

SEQ ID NO: 4739364 - DNA, 25 bp, Homo sapien
gagtatcggtcccatctgatgacag

SEQ ID NO: 4739365 - DNA, 25 bp, Homo sapien
gaagcccctgttctatatgaagaca

SEQ ID NO: 4739366 - DNA, 25 bp, Homo sapien
cattacatacagtagccagtctggg

SEQ ID NO: 4739367 - DNA, 25 bp, Homo sapien
gataccgctgctattcccagatgaa

SEQ ID NO: 4739368 - DNA, 25 bp, Homo sapien
cagttgcccacgtggttcaagacaa

SEQ ID NO: 4739369 - DNA, 25 bp, Homo sapien
ctgcccaggataagccttgccccag

SEQ ID NO: 4739370 - DNA, 25 bp, Homo sapien
caaatacgtgctcgtgtgttctctc

SEQ ID NO: 4739371 - DNA, 25 bp, Homo sapien
gggctcccaaatacgtgctcgtgtg

SEQ ID NO: 4739372 - DNA, 25 bp, Homo sapien
tcccaaatacgtgctcgtgtgttct

SEQ ID NO: 4739373 - DNA, 25 bp, Homo sapien
tccagtatggagagttgccgtaggc

SEQ ID NO: 4739374 - DNA, 25 bp, Homo sapien
tttgtccagtatggagagttgccgt

SEQ ID NO: 4739375 - DNA, 25 bp, Homo sapien
ttagtttgtccagtatggagagttg

SEQ ID NO: 4739376 - DNA, 25 bp, Homo sapien
gctgggctggctgcgctgacccgag

SEQ ID NO: 4739377 - DNA, 25 bp, Homo sapien
aaggctggagcagaacccctggccc

SEQ ID NO: 4739378 - DNA, 25 bp, Homo sapien
gctggagcagaacccctggcccaga

SEQ ID NO: 4739379 - DNA, 25 bp, Homo sapien
aggctggagcagaacccctggccca

SEQ ID NO: 4739380 - DNA, 25 bp, Homo sapien
gagaagggaaggctgtcaaggctgg

SEQ ID NO: 4739381 - DNA, 25 bp, Homo sapien
gggtgcatagccaggggccgctccc

SEQ ID NO: 4739382 - DNA, 25 bp, Homo sapien
tgcatcctgcggaaggtggtggtgc

SEQ ID NO: 4739383 - DNA, 25 bp, Homo sapien
gaggcgtccctgcatgaaatccctg

SEQ ID NO: 4739384 - DNA, 25 bp, Homo sapien
cagtggagcccaagaccgagggcag

SEQ ID NO: 4739385 - DNA, 25 bp, Homo sapien
gaaggtcaggttgggctgtaacctc

SEQ ID NO: 4739386 - DNA, 25 bp, Homo sapien
tgggctgtaacctctcaaaaaccta

SEQ ID NO: 4739387 - DNA, 25 bp, Homo sapien
ggctgtaacctctcaaaaacctata

SEQ ID NO: 4739388 - DNA, 25 bp, Homo sapien
caggttgggctgtaacctctcaaaa

SEQ ID NO: 4739389 - DNA, 25 bp, Homo sapien
gaaccagtcatatcaggtagaccag

SEQ ID NO: 4739390 - DNA, 25 bp, Homo sapien
ctgtgtcttattgtagacagaacca

SEQ ID NO: 4739391 - DNA, 25 bp, Homo sapien
caggtagaccagtggtgcttgaaga

SEQ ID NO: 4739392 - DNA, 25 bp, Homo sapien
cttattgtagacagaaccagtcata

SEQ ID NO: 4739393 - DNA, 25 bp, Homo sapien
aagcagttgttccccacagcagttg

SEQ ID NO: 4739394 - DNA, 25 bp, Homo sapien
cctccaggatcactcaggggttgcc

SEQ ID NO: 4739395 - DNA, 25 bp, Homo sapien
gcagttgttccccacagcagttgtt

SEQ ID NO: 4739396 - DNA, 25 bp, Homo sapien
ttgttccccacagcagttgttccca

SEQ ID NO: 4739397 - DNA, 25 bp, Homo sapien
actccaggccttatcctggaaagga

SEQ ID NO: 4739398 - DNA, 25 bp, Homo sapien
accactccaggccttatcctggaaa

SEQ ID NO: 4739399 - DNA, 25 bp, Homo sapien
cactccaggccttatcctggaaagg

SEQ ID NO: 4739400 - DNA, 25 bp, Homo sapien
tccaggccttatcctggaaaggaga

SEQ ID NO: 4739401 - DNA, 25 bp, Homo sapien
cagcatagccacctttggagtagtc

SEQ ID NO: 4739402 - DNA, 25 bp, Homo sapien
tgtcccctgggtcaggtcgtcataa

SEQ ID NO: 4739403 - DNA, 25 bp, Homo sapien
tgtttggtgcctgcgatgatccagc

SEQ ID NO: 4739404 - DNA, 25 bp, Homo sapien
agaacctgcagacttgtttggtgcc

SEQ ID NO: 4739405 - DNA, 25 bp, Homo sapien
caggcaagcctgtctaaccccatgt

SEQ ID NO: 4739406 - DNA, 25 bp, Homo sapien
tgtctaaccccatgtgtctctgtct

SEQ ID NO: 4739407 - DNA, 25 bp, Homo sapien
tctctgtctgggaagtacccctcac

SEQ ID NO: 4739408 - DNA, 25 bp, Homo sapien
gtgtctctgtctgggaagtacccct

SEQ ID NO: 4739409 - DNA, 25 bp, Homo sapien
gtgggagtgctgaggttcaccccat

SEQ ID NO: 4739410 - DNA, 25 bp, Homo sapien
ttcaccccatgttgcttggctgagg

SEQ ID NO: 4739411 - DNA, 25 bp, Homo sapien
gttcaccccatgttgcttggctgag

SEQ ID NO: 4739412 - DNA, 25 bp, Homo sapien
gcaacacatgctggatctaaacaca

SEQ ID NO: 4739413 - DNA, 25 bp, Homo sapien
aagataggtcccaggtttccacctg

SEQ ID NO: 4739414 - DNA, 25 bp, Homo sapien
taagacggagtggaatcacaaccct

SEQ ID NO: 4739415 - DNA, 25 bp, Homo sapien
gcaagctgaggctggtcaggtaccc

SEQ ID NO: 4739416 - DNA, 25 bp, Homo sapien
actgggcatgcctgtgtagtaggga

SEQ ID NO: 4739417 - DNA, 25 bp, Homo sapien
gtggggccatactggaaggcactgg

SEQ ID NO: 4739418 - DNA, 25 bp, Homo sapien
ggaagaccagtgtagctatagccag

SEQ ID NO: 4739419 - DNA, 25 bp, Homo sapien
ccagtgtagctatagccaggtggca

SEQ ID NO: 4739420 - DNA, 25 bp, Homo sapien
gggatgcagagtccccacggccaaa

SEQ ID NO: 4739421 - DNA, 25 bp, Homo sapien
ccacggccaaactttgtgacatcac

SEQ ID NO: 4739422 - DNA, 25 bp, Homo sapien
gcagagtccccacggccaaactttg

SEQ ID NO: 4739423 - DNA, 25 bp, Homo sapien
gtccccacggccaaactttgtgaca

SEQ ID NO: 4739424 - DNA, 25 bp, Homo sapien
tccaaccagagaaaggccacactgg

SEQ ID NO: 4739425 - DNA, 25 bp, Homo sapien
agctcctggagttcgcgctaggccg

SEQ ID NO: 4739426 - DNA, 25 bp, Homo sapien
gctcagcacaggctactaagaggcc

SEQ ID NO: 4739427 - DNA, 25 bp, Homo sapien
gggctactcctcatccattgagcaa

SEQ ID NO: 4739428 - DNA, 25 bp, Homo sapien
aggctcccatctcggctggcaagcg

SEQ ID NO: 4739429 - DNA, 25 bp, Homo sapien
gtgggtgcagcaaagggaattccat

SEQ ID NO: 4739430 - DNA, 25 bp, Homo sapien
tatggattattagctaggctcccat

SEQ ID NO: 4739431 - DNA, 25 bp, Homo sapien
tggcaagcgctgtgggtgcagcaaa

SEQ ID NO: 4739432 - DNA, 25 bp, Homo sapien
gaccagggaggcttgatcagcgact

SEQ ID NO: 4739433 - DNA, 25 bp, Homo sapien
taaatggtgcccctcggaagagtgt

SEQ ID NO: 4739434 - DNA, 25 bp, Homo sapien
tggtgacgccacactcctgaaacag

SEQ ID NO: 4739435 - DNA, 25 bp, Homo sapien
aagagtgtgcaactaggcggcctgc

SEQ ID NO: 4739436 - DNA, 25 bp, Homo sapien
taggcacgggaataagcaggacccc

SEQ ID NO: 4739437 - DNA, 25 bp, Homo sapien
taggaaagctgactaaacagagcag

SEQ ID NO: 4739438 - DNA, 25 bp, Homo sapien
gcttgtgtgaatgcctcgggctgaa

SEQ ID NO: 4739439 - DNA, 25 bp, Homo sapien
acttcgctggcttttctgtgtgaga

SEQ ID NO: 4739440 - DNA, 25 bp, Homo sapien
gcatctggagctcgtcatagccata

SEQ ID NO: 4739441 - DNA, 25 bp, Homo sapien
tctggagctcgtcatagccatagat

SEQ ID NO: 4739442 - DNA, 25 bp, Homo sapien
gcagcatctggagctcgtcatagcc

SEQ ID NO: 4739443 - DNA, 25 bp, Homo sapien
cagcatctggagctcgtcatagcca

SEQ ID NO: 4739444 - DNA, 25 bp, Homo sapien
cgggacctacgaggtactggttgtg

SEQ ID NO: 4739445 - DNA, 25 bp, Homo sapien
taggcaggaagcagtcctccgggac

SEQ ID NO: 4739446 - DNA, 25 bp, Homo sapien
gacctacgaggtactggttgtgcag

SEQ ID NO: 4739447 - DNA, 25 bp, Homo sapien
ctacgaggtactggttgtgcagcag

SEQ ID NO: 4739448 - DNA, 25 bp, Homo sapien
gctggatgcactcgcgggggtccca

SEQ ID NO: 4739449 - DNA, 25 bp, Homo sapien
cccagacagaggctgttcgcggtgt

SEQ ID NO: 4739450 - DNA, 25 bp, Homo sapien
aagggcgcggccctgctactgctgc

SEQ ID NO: 4739451 - DNA, 25 bp, Homo sapien
gacagaggctgttcgcggtgttcat

SEQ ID NO: 4739452 - DNA, 25 bp, Homo sapien
aggatgcggaacttgagacggaggt

SEQ ID NO: 4739453 - DNA, 25 bp, Homo sapien
tgcggaacttgagacggaggtcgct

SEQ ID NO: 4739454 - DNA, 25 bp, Homo sapien
aacttgagacggaggtcgctgccgt

SEQ ID NO: 4739455 - DNA, 25 bp, Homo sapien
ggtcgctgccgtggagaaggtggct

SEQ ID NO: 4739456 - DNA, 25 bp, Homo sapien
aaaagaaaagccaggacacatggat

SEQ ID NO: 4739457 - DNA, 25 bp, Homo sapien
caaaagaaaagccaggacacatgga

SEQ ID NO: 4739458 - DNA, 25 bp, Homo sapien
ctggcaaaagaaaagccaggacaca

SEQ ID NO: 4739459 - DNA, 25 bp, Homo sapien
ggcaaaagaaaagccaggacacatg

SEQ ID NO: 4739460 - DNA, 25 bp, Homo sapien
ctatctgaatatgggacaagtacct

SEQ ID NO: 4739461 - DNA, 25 bp, Homo sapien
gctttaatgaccacaactctctgta

SEQ ID NO: 4739462 - DNA, 25 bp, Homo sapien
catagaaatcccaagataacttcgg

SEQ ID NO: 4739463 - DNA, 25 bp, Homo sapien
caggcaatgatgtaaccacccaggc

SEQ ID NO: 4739464 - DNA, 25 bp, Homo sapien
tgcccacctaaaagggcatggcctg

SEQ ID NO: 4739465 - DNA, 25 bp, Homo sapien
cttatgcctgtttgacaaggtaccc

SEQ ID NO: 4739466 - DNA, 25 bp, Homo sapien
tcagccactgtggtctggaaacagg

SEQ ID NO: 4739467 - DNA, 25 bp, Homo sapien
acaggaagcccagcgtaagtctcaa

SEQ ID NO: 4739468 - DNA, 25 bp, Homo sapien
gaagaaagagtgaaccagcggatgc

SEQ ID NO: 4739469 - DNA, 25 bp, Homo sapien
acctaggtggacaaggcaagtctca

SEQ ID NO: 4739470 - DNA, 25 bp, Homo sapien
gaaaagctctgtaagagggagacca

SEQ ID NO: 4739471 - DNA, 25 bp, Homo sapien
agctgcccaaccctagcaacagggt

SEQ ID NO: 4739472 - DNA, 25 bp, Homo sapien
tgacgtgctcgaggagagggctgca

SEQ ID NO: 4739473 - DNA, 25 bp, Homo sapien
tgtgtgacgtgctcgaggagagggc

SEQ ID NO: 4739474 - DNA, 25 bp, Homo sapien
acgtgctcgaggagagggctgcatg

SEQ ID NO: 4739475 - DNA, 25 bp, Homo sapien
tgtgtgtgacgtgctcgaggagagg

SEQ ID NO: 4739476 - DNA, 25 bp, Homo sapien
agaagacaaaacagagcgccgtatg

SEQ ID NO: 4739477 - DNA, 25 bp, Homo sapien
acaaaacagagcgccgtatgtccac

SEQ ID NO: 4739478 - DNA, 25 bp, Homo sapien
agacaaaacagagcgccgtatgtcc

SEQ ID NO: 4739479 - DNA, 25 bp, Homo sapien
gaagacaaaacagagcgccgtatgt

SEQ ID NO: 4739480 - DNA, 25 bp, Homo sapien
cagagggagggcctgttgtctttgg

SEQ ID NO: 4739481 - DNA, 25 bp, Homo sapien
gagagagggctgctagtcaggtcgc

SEQ ID NO: 4739482 - DNA, 25 bp, Homo sapien
ctgggatgtggacggcagaagtgca

SEQ ID NO: 4739483 - DNA, 25 bp, Homo sapien
tgctagtcaggtcgccagtgtgctg

SEQ ID NO: 4739484 - DNA, 25 bp, Homo sapien
catgtcagcctcagttgagacgtcc

SEQ ID NO: 4739485 - DNA, 25 bp, Homo sapien
aaatgccaagcatatcgccagatag

SEQ ID NO: 4739486 - DNA, 25 bp, Homo sapien
caccatggtcagctgttcaagatgc

SEQ ID NO: 4739487 - DNA, 25 bp, Homo sapien
gaacctaagctgtagatgcatccag

SEQ ID NO: 4739488 - DNA, 25 bp, Homo sapien
gctcacggccaacgtaaggcagatt

SEQ ID NO: 4739489 - DNA, 25 bp, Homo sapien
cacttgagtctctaaaggaagggca

SEQ ID NO: 4739490 - DNA, 25 bp, Homo sapien
ggatgtggagacactcagtcctagc

SEQ ID NO: 4739491 - DNA, 25 bp, Homo sapien
taagttcaatatccgcactcccagg

SEQ ID NO: 4739492 - DNA, 25 bp, Homo sapien
catttctaataacaccacagccaac

SEQ ID NO: 4739493 - DNA, 25 bp, Homo sapien
tctgattagggcagaagaatatgag

SEQ ID NO: 4739494 - DNA, 25 bp, Homo sapien
taaaatgcatactgtatgctgcact

SEQ ID NO: 4739495 - DNA, 25 bp, Homo sapien
tatgctgcacttgtggtgcagtctg

SEQ ID NO: 4739496 - DNA, 25 bp, Homo sapien
acatcacgtgagctatcctcttcct

SEQ ID NO: 4739497 - DNA, 25 bp, Homo sapien
tggttggcaccagccatgacaagag

SEQ ID NO: 4739498 - DNA, 25 bp, Homo sapien
gacaagagtagcttgctgctatact

SEQ ID NO: 4739499 - DNA, 25 bp, Homo sapien
cattgaccaactggtgttttccaca

SEQ ID NO: 4739500 - DNA, 25 bp, Homo sapien
agtgtctgctgacttcgaccaccac

SEQ ID NO: 4739501 - DNA, 25 bp, Homo sapien
tagtgtctgctgacttcgaccacca

SEQ ID NO: 4739502 - DNA, 25 bp, Homo sapien
tgtctagtgtctgctgacttcgacc

SEQ ID NO: 4739503 - DNA, 25 bp, Homo sapien
tctagtgtctgctgacttcgaccac

SEQ ID NO: 4739504 - DNA, 25 bp, Homo sapien
tggagctgactctgatgaactcaca

SEQ ID NO: 4739505 - DNA, 25 bp, Homo sapien
gactctgatgaactcacagggcttt

SEQ ID NO: 4739506 - DNA, 25 bp, Homo sapien
gatgaactcacagggctttggtatg

SEQ ID NO: 4739507 - DNA, 25 bp, Homo sapien
actcacagggctttggtatgggatc

SEQ ID NO: 4739508 - DNA, 25 bp, Homo sapien
tctggtcataagaggaagacattgc

SEQ ID NO: 4739509 - DNA, 25 bp, Homo sapien
agacattgctactggactagcagaa

SEQ ID NO: 4739510 - DNA, 25 bp, Homo sapien
cagaattcagtgatgagcttgtcag

SEQ ID NO: 4739511 - DNA, 25 bp, Homo sapien
ctgttatgcacagaactctggtcat

SEQ ID NO: 4739512 - DNA, 25 bp, Homo sapien
caggaggtaatgacggaagttgtat

SEQ ID NO: 4739513 - DNA, 25 bp, Homo sapien
aatgacggaagttgtatatgtggag

SEQ ID NO: 4739514 - DNA, 25 bp, Homo sapien
ggtaatgacggaagttgtatatgtg

SEQ ID NO: 4739515 - DNA, 25 bp, Homo sapien
ctgcaggaggtaatgacggaagttg

SEQ ID NO: 4739516 - DNA, 25 bp, Homo sapien
ttcactgcttggagctgatccaaat

SEQ ID NO: 4739517 - DNA, 25 bp, Homo sapien
tgcacatttaatcctgtgacatctg

SEQ ID NO: 4739518 - DNA, 25 bp, Homo sapien
tcgaatacaagctgatgggaatctg

SEQ ID NO: 4739519 - DNA, 25 bp, Homo sapien
tgatccaaattcagagagagaaggt

SEQ ID NO: 4739520 - DNA, 25 bp, Homo sapien
ggtcacaaaggcctataacagagcc

SEQ ID NO: 4739521 - DNA, 25 bp, Homo sapien
aaagcaaagctgtcgtgtcaggaac

SEQ ID NO: 4739522 - DNA, 25 bp, Homo sapien
taggttcccaggcaatactggcaag

SEQ ID NO: 4739523 - DNA, 25 bp, Homo sapien
cagagccaaacaagcatttaggttc

SEQ ID NO: 4739524 - DNA, 25 bp, Homo sapien
gctgcaaaagcttgttcacagtgga

SEQ ID NO: 4739525 - DNA, 25 bp, Homo sapien
gatattttcaatggtcgtgctggga

SEQ ID NO: 4739526 - DNA, 25 bp, Homo sapien
gggtatccgccgcttagcaagtttg

SEQ ID NO: 4739527 - DNA, 25 bp, Homo sapien
gtctccaggtgttgattctcgaagt

SEQ ID NO: 4739528 - DNA, 25 bp, Homo sapien
gggatggctcaggttgagatttgaa

SEQ ID NO: 4739529 - DNA, 25 bp, Homo sapien
tcaactggctaagaactggggatgg

SEQ ID NO: 4739530 - DNA, 25 bp, Homo sapien
tgctgttgtcgctggctcaactggc

SEQ ID NO: 4739531 - DNA, 25 bp, Homo sapien
ctggctctggtgctgttgtcgctgg

SEQ ID NO: 4739532 - DNA, 25 bp, Homo sapien
gtagtagttgtagggtgacttgtac

SEQ ID NO: 4739533 - DNA, 25 bp, Homo sapien
gggtgacttgtactattctgctgtg

SEQ ID NO: 4739534 - DNA, 25 bp, Homo sapien
aactggcccaaactcggagctttca

SEQ ID NO: 4739535 - DNA, 25 bp, Homo sapien
tcaactggtccaaaatctgggagct

SEQ ID NO: 4739536 - DNA, 25 bp, Homo sapien
ttttggtggtgcaagctctccaaat

SEQ ID NO: 4739537 - DNA, 25 bp, Homo sapien
tttggtggtgcaagctctccaaatc

SEQ ID NO: 4739538 - DNA, 25 bp, Homo sapien
gaacaaatcctcaacaatacagaat

SEQ ID NO: 4739539 - DNA, 25 bp, Homo sapien
caatacagaatttctgcccaaggct

SEQ ID NO: 4739540 - DNA, 25 bp, Homo sapien
acaaatcctcaacaatacagaattt

SEQ ID NO: 4739541 - DNA, 25 bp, Homo sapien
acaatacagaatttctgcccaaggc

SEQ ID NO: 4739542 - DNA, 25 bp, Homo sapien
agctatccttcctcattctgacata

SEQ ID NO: 4739543 - DNA, 25 bp, Homo sapien
attctgacataagaagttaaaggga

SEQ ID NO: 4739544 - DNA, 25 bp, Homo sapien
tctgacataagaagttaaagggaag

SEQ ID NO: 4739545 - DNA, 25 bp, Homo sapien
attacaaggtcaggcggatcacgag

SEQ ID NO: 4739546 - DNA, 25 bp, Homo sapien
gagttgacggcagtggagctgccag

SEQ ID NO: 4739547 - DNA, 25 bp, Homo sapien
tgttgtgttgcgaatttgtgaagac

SEQ ID NO: 4739548 - DNA, 25 bp, Homo sapien
tgaagacaagggcttggccaaagcc

SEQ ID NO: 4739549 - DNA, 25 bp, Homo sapien
tgctgttgggaagtttcaaaggagt

SEQ ID NO: 4739550 - DNA, 25 bp, Homo sapien
ctgcaacctctgcctcccaggctta

SEQ ID NO: 4739551 - DNA, 25 bp, Homo sapien
aatgcagtggtgtgaccctggctca

SEQ ID NO: 4739552 - DNA, 25 bp, Homo sapien
tcccaggcttaagcgattctcgtgc

SEQ ID NO: 4739553 - DNA, 25 bp, Homo sapien
gcgtgtgccaccatgcccagctaat

SEQ ID NO: 4739554 - DNA, 25 bp, Homo sapien
gatgtgattctctgctggagcagat

SEQ ID NO: 4739555 - DNA, 25 bp, Homo sapien
aggcagtgaagacctttgtttcaga

SEQ ID NO: 4739556 - DNA, 25 bp, Homo sapien
gtgattctctgctggagcagatgag

SEQ ID NO: 4739557 - DNA, 25 bp, Homo sapien
gatgaggcagtgaagacctttgttt

SEQ ID NO: 4739558 - DNA, 25 bp, Homo sapien
catcagtagtctcttacacttcgca

SEQ ID NO: 4739559 - DNA, 25 bp, Homo sapien
gatcatttgtagtcatcagtagtct

SEQ ID NO: 4739560 - DNA, 25 bp, Homo sapien
tctcttacacttcgcataacagcta

SEQ ID NO: 4739561 - DNA, 25 bp, Homo sapien
ttcctgatcatttgtagtcatcagt

SEQ ID NO: 4739562 - DNA, 25 bp, Homo sapien
tctgttgtccactcttccacagaat

SEQ ID NO: 4739563 - DNA, 25 bp, Homo sapien
agtcttctgttgtccactcttccac

SEQ ID NO: 4739564 - DNA, 25 bp, Homo sapien
actcttccacagaattcttccaagc

SEQ ID NO: 4739565 - DNA, 25 bp, Homo sapien
atcttcagtccagtcttctgttgtc

SEQ ID NO: 4739566 - DNA, 25 bp, Homo sapien
tgttaaggccacttaggaacatgga

SEQ ID NO: 4739567 - DNA, 25 bp, Homo sapien
tcccatgtgagaagcaagtgccacg

SEQ ID NO: 4739568 - DNA, 25 bp, Homo sapien
ggctcaggtcctaatcatattttgg

SEQ ID NO: 4739569 - DNA, 25 bp, Homo sapien
cagatagttataagcagagatgcaa

SEQ ID NO: 4739570 - DNA, 25 bp, Homo sapien
gtttgacagatcctgagctatgttg

SEQ ID NO: 4739571 - DNA, 25 bp, Homo sapien
ttttgtttgacagatcctgagctat

SEQ ID NO: 4739572 - DNA, 25 bp, Homo sapien
ctttgagtccataagaacttttgtt

SEQ ID NO: 4739573 - DNA, 25 bp, Homo sapien
cagatcctgagctatgttgtgagta

SEQ ID NO: 4739574 - DNA, 25 bp, Homo sapien
tactctagccataaaaaaactcaac

SEQ ID NO: 4739575 - DNA, 25 bp, Homo sapien
aaccctccattgtaaacaggaagct

SEQ ID NO: 4739576 - DNA, 25 bp, Homo sapien
tatgaaacctaaaccctccattgta

SEQ ID NO: 4739577 - DNA, 25 bp, Homo sapien
tttggtgcattcgattggtacagga

SEQ ID NO: 4739578 - DNA, 25 bp, Homo sapien
atcggtcacagagccaacactttga

SEQ ID NO: 4739579 - DNA, 25 bp, Homo sapien
tcatcggtcacagagccaacacttt

SEQ ID NO: 4739580 - DNA, 25 bp, Homo sapien
ggtcacagagccaacactttgaggt

SEQ ID NO: 4739581 - DNA, 25 bp, Homo sapien
tggccgagggcatgtgcagcctggt

SEQ ID NO: 4739582 - DNA, 25 bp, Homo sapien
ctaatgggacgcggtacaaagtctc

SEQ ID NO: 4739583 - DNA, 25 bp, Homo sapien
atgggacgcggtacaaagtctccat

SEQ ID NO: 4739584 - DNA, 25 bp, Homo sapien
aatgggacgcggtacaaagtctcca

SEQ ID NO: 4739585 - DNA, 25 bp, Homo sapien
taatgggacgcggtacaaagtctcc

SEQ ID NO: 4739586 - DNA, 25 bp, Homo sapien
aaatcccacgtgccactcagaaaca

SEQ ID NO: 4739587 - DNA, 25 bp, Homo sapien
tcaaatcccacgtgccactcagaaa

SEQ ID NO: 4739588 - DNA, 25 bp, Homo sapien
caaatcccacgtgccactcagaaac

SEQ ID NO: 4739589 - DNA, 25 bp, Homo sapien
ctcaaatcccacgtgccactcagaa

SEQ ID NO: 4739590 - DNA, 25 bp, Homo sapien
tagttccagcagtaagtactaggga

SEQ ID NO: 4739591 - DNA, 25 bp, Homo sapien
gcttgaacccaatggttcaaggcta

SEQ ID NO: 4739592 - DNA, 25 bp, Homo sapien
cagtaagtactagggagattaaggt

SEQ ID NO: 4739593 - DNA, 25 bp, Homo sapien
tggcttgaacccaatggttcaaggc

SEQ ID NO: 4739594 - DNA, 25 bp, Homo sapien
tctcctaatatctatatgatccata

SEQ ID NO: 4739595 - DNA, 25 bp, Homo sapien
tatcttataatctcctaatatctat

SEQ ID NO: 4739596 - DNA, 25 bp, Homo sapien
tataatctcctaatatctatatgat

SEQ ID NO: 4739597 - DNA, 25 bp, Homo sapien
atatgatccatatcaatattccttt

SEQ ID NO: 4739598 - DNA, 25 bp, Homo sapien
acacatctgtagatgtagaatctga

SEQ ID NO: 4739599 - DNA, 25 bp, Homo sapien
tagctttgtcccacacacatctgta

SEQ ID NO: 4739600 - DNA, 25 bp, Homo sapien
actagctttgtcccacacacatctg

SEQ ID NO: 4739601 - DNA, 25 bp, Homo sapien
cacacacatctgtagatgtagaatc

SEQ ID NO: 4739602 - DNA, 25 bp, Homo sapien
catgccttgggttgagaaccttcct

SEQ ID NO: 4739603 - DNA, 25 bp, Homo sapien
tgggttgagaaccttcctgcccctc

SEQ ID NO: 4739604 - DNA, 25 bp, Homo sapien
gccttgggttgagaaccttcctgcc

SEQ ID NO: 4739605 - DNA, 25 bp, Homo sapien
cccatgccttgggttgagaaccttc

SEQ ID NO: 4739606 - DNA, 25 bp, Homo sapien
ctaagacgcccactaatgccagcag

SEQ ID NO: 4739607 - DNA, 25 bp, Homo sapien
gatttgacgatttctctaagacgcc

SEQ ID NO: 4739608 - DNA, 25 bp, Homo sapien
tctaagacgcccactaatgccagca

SEQ ID NO: 4739609 - DNA, 25 bp, Homo sapien
agtcatgaagatttgacgatttctc

SEQ ID NO: 4739610 - DNA, 25 bp, Homo sapien
ccgggctcgcttgccacgatctgaa

SEQ ID NO: 4739611 - DNA, 25 bp, Homo sapien
gcttgccacgatctgaaggtttgtc

SEQ ID NO: 4739612 - DNA, 25 bp, Homo sapien
acgatctgaaggtttgtccacttga

SEQ ID NO: 4739613 - DNA, 25 bp, Homo sapien
tgaaggtttgtccacttgattgcaa

SEQ ID NO: 4739614 - DNA, 25 bp, Homo sapien
tctgccacgattgccgcctcttcct

SEQ ID NO: 4739615 - DNA, 25 bp, Homo sapien
ttctctgccacgattgccgcctctt

SEQ ID NO: 4739616 - DNA, 25 bp, Homo sapien
attctctgccacgattgccgcctct

SEQ ID NO: 4739617 - DNA, 25 bp, Homo sapien
tctctgccacgattgccgcctcttc

SEQ ID NO: 4739618 - DNA, 25 bp, Homo sapien
gcttttcttctctctattctctttg

SEQ ID NO: 4739619 - DNA, 25 bp, Homo sapien
tcgattctttctcgcttttcttctc

SEQ ID NO: 4739620 - DNA, 25 bp, Homo sapien
ttcttctctctattctctttgtttt

SEQ ID NO: 4739621 - DNA, 25 bp, Homo sapien
ttttcttctctctattctctttgtt

SEQ ID NO: 4739622 - DNA, 25 bp, Homo sapien
tctttttcttacaccctacagtctc

SEQ ID NO: 4739623 - DNA, 25 bp, Homo sapien
tcttacaccctacagtctcccatga

SEQ ID NO: 4739624 - DNA, 25 bp, Homo sapien
ttttcttacaccctacagtctccca

SEQ ID NO: 4739625 - DNA, 25 bp, Homo sapien
tacaccctacagtctcccatgaagt

SEQ ID NO: 4739626 - DNA, 25 bp, Homo sapien
agaaaaagatactacattcttgact

SEQ ID NO: 4739627 - DNA, 25 bp, Homo sapien
agaaatcctaaaattggcccaatag

SEQ ID NO: 4739628 - DNA, 25 bp, Homo sapien
aaattatcaagcagggtagttacag

SEQ ID NO: 4739629 - DNA, 25 bp, Homo sapien
cattcttgactataagtggatataa

SEQ ID NO: 4739630 - DNA, 25 bp, Homo sapien
gaatcaattgaacctagaaggcttg

SEQ ID NO: 4739631 - DNA, 25 bp, Homo sapien
ataaaacaacgtggccgagcacact

SEQ ID NO: 4739632 - DNA, 25 bp, Homo sapien
gcgcctggcctatttggtgcatact

SEQ ID NO: 4739633 - DNA, 25 bp, Homo sapien
ggtgcatactctttcaacccagcaa

SEQ ID NO: 4739634 - DNA, 25 bp, Homo sapien
gtgtaccagtgttctcttacatgga

SEQ ID NO: 4739635 - DNA, 25 bp, Homo sapien
gatacttagtcccaggtcagtaaac

SEQ ID NO: 4739636 - DNA, 25 bp, Homo sapien
tagcgataaggtaaacagatcctcc

SEQ ID NO: 4739637 - DNA, 25 bp, Homo sapien
agccactctctgctgtacccattag

SEQ ID NO: 4739638 - DNA, 25 bp, Homo sapien
ttagggctgacaagtgcctggtgta

SEQ ID NO: 4739639 - DNA, 25 bp, Homo sapien
gcctggtgtagctttagctgtatcc

SEQ ID NO: 4739640 - DNA, 25 bp, Homo sapien
aaattttagggctgacaagtgcctg

SEQ ID NO: 4739641 - DNA, 25 bp, Homo sapien
gtgcctggtgtagctttagctgtat

SEQ ID NO: 4739642 - DNA, 25 bp, Homo sapien
gcaatatattgatagctttgttcac

SEQ ID NO: 4739643 - DNA, 25 bp, Homo sapien
gtagggccactatgcattcatcctg

SEQ ID NO: 4739644 - DNA, 25 bp, Homo sapien
catctccattacaatcatgtagggc

SEQ ID NO: 4739645 - DNA, 25 bp, Homo sapien
gatagctttgttcacatctccatta

SEQ ID NO: 4739646 - DNA, 25 bp, Homo sapien
tattgtaaggcaggtgaacgtattc

SEQ ID NO: 4739647 - DNA, 25 bp, Homo sapien
gcatggtgatgaacatctgtcgtca

SEQ ID NO: 4739648 - DNA, 25 bp, Homo sapien
tactttctatgcacaggtatcggaa

SEQ ID NO: 4739649 - DNA, 25 bp, Homo sapien
gaaaacctcagtgtgcttacagaaa

SEQ ID NO: 4739650 - DNA, 25 bp, Homo sapien
gatcacttgagcgagacgcatctgt

SEQ ID NO: 4739651 - DNA, 25 bp, Homo sapien
aaagatcacttgagcgagacgcatc

SEQ ID NO: 4739652 - DNA, 25 bp, Homo sapien
aagatcacttgagcgagacgcatct

SEQ ID NO: 4739653 - DNA, 25 bp, Homo sapien
atcacttgagcgagacgcatctgtt

SEQ ID NO: 4739654 - DNA, 25 bp, Homo sapien
tctggcaaaaattaccctcttcacg

SEQ ID NO: 4739655 - DNA, 25 bp, Homo sapien
tggcaaaaattaccctcttcacgat

SEQ ID NO: 4739656 - DNA, 25 bp, Homo sapien
ctggcaaaaattaccctcttcacga

SEQ ID NO: 4739657 - DNA, 25 bp, Homo sapien
tcaggtagccttgttccaatccaag

SEQ ID NO: 4739658 - DNA, 25 bp, Homo sapien
cataccagcagattcaggtagcctt

SEQ ID NO: 4739659 - DNA, 25 bp, Homo sapien
gttccaatccaagcaccactgatgc

SEQ ID NO: 4739660 - DNA, 25 bp, Homo sapien
caatccaagcaccactgatgctcat

SEQ ID NO: 4739661 - DNA, 25 bp, Homo sapien
gtggtttttcccgagcacctcgaca

SEQ ID NO: 4739662 - DNA, 25 bp, Homo sapien
ttcccgagcacctcgacaatggtca

SEQ ID NO: 4739663 - DNA, 25 bp, Homo sapien
gtttctgtggttgcgttgattgtgc

SEQ ID NO: 4739664 - DNA, 25 bp, Homo sapien
ggttgcgttgattgtgctgctgaaa

SEQ ID NO: 4739665 - DNA, 25 bp, Homo sapien
ataatgtatgtacaaaatagaaaat

SEQ ID NO: 4739666 - DNA, 25 bp, Homo sapien
tacagtatatacaaaataatgtatg

SEQ ID NO: 4739667 - DNA, 25 bp, Homo sapien
aaataatgtatgtacaaaatagaaa

SEQ ID NO: 4739668 - DNA, 25 bp, Homo sapien
caaaataatgtatgtacaaaataga

SEQ ID NO: 4739669 - DNA, 25 bp, Homo sapien
ctgacaacatactgagaagagggaa

SEQ ID NO: 4739670 - DNA, 25 bp, Homo sapien
tctcaaactggcaaggatgggtctc

SEQ ID NO: 4739671 - DNA, 25 bp, Homo sapien
cataatgggctaagggttcaactac

SEQ ID NO: 4739672 - DNA, 25 bp, Homo sapien
ccagagatgctgttcactgagtcat

SEQ ID NO: 4739673 - DNA, 25 bp, Homo sapien
gcagtgagccgccactgtactctgg

SEQ ID NO: 4739674 - DNA, 25 bp, Homo sapien
gttgcagtgagccgccactgtactc

SEQ ID NO: 4739675 - DNA, 25 bp, Homo sapien
aatctcagctagtccagaggctggg

SEQ ID NO: 4739676 - DNA, 25 bp, Homo sapien
taatctcagctagtccagaggctgg

SEQ ID NO: 4739677 - DNA, 25 bp, Homo sapien
ctcggcctccggattagctgagatt

SEQ ID NO: 4739678 - DNA, 25 bp, Homo sapien
ctgcctcggcctccggattagctga

SEQ ID NO: 4739679 - DNA, 25 bp, Homo sapien
aacctccgacttctgggatcaagcg

SEQ ID NO: 4739680 - DNA, 25 bp, Homo sapien
cctccgacttctgggatcaagcgat

SEQ ID NO: 4739681 - DNA, 25 bp, Homo sapien
tcccaagactagctacgggcgtgaa

SEQ ID NO: 4739682 - DNA, 25 bp, Homo sapien
tgagtcccaattgagaccaatgccc

SEQ ID NO: 4739683 - DNA, 25 bp, Homo sapien
tgaactgtgactccgggtaagccag

SEQ ID NO: 4739684 - DNA, 25 bp, Homo sapien
tataaccagactacaggaacggcgg

SEQ ID NO: 4739685 - DNA, 25 bp, Homo sapien
tcagacgagctgaacccagaattag

SEQ ID NO: 4739686 - DNA, 25 bp, Homo sapien
aaagcacacgctgcagcgctcaggg

SEQ ID NO: 4739687 - DNA, 25 bp, Homo sapien
gcgagtgaagctcggcccggtcctc

SEQ ID NO: 4739688 - DNA, 25 bp, Homo sapien
aagctcggcccggtcctcacgggtg

SEQ ID NO: 4739689 - DNA, 25 bp, Homo sapien
ctctcggaggacccaagacccgctg

SEQ ID NO: 4739690 - DNA, 25 bp, Homo sapien
tctcggaggacccaagacccgctgc

SEQ ID NO: 4739691 - DNA, 25 bp, Homo sapien
tcggaggacccaagacccgctgccg

SEQ ID NO: 4739692 - DNA, 25 bp, Homo sapien
gaggacccaagacccgctgccgccg

SEQ ID NO: 4739693 - DNA, 25 bp, Homo sapien
caatgtgcctcttacaaagcggcgg

SEQ ID NO: 4739694 - DNA, 25 bp, Homo sapien
ctgccaatgtgcctcttacaaagcg

SEQ ID NO: 4739695 - DNA, 25 bp, Homo sapien
tgccaatgtgcctcttacaaagcgg

SEQ ID NO: 4739696 - DNA, 25 bp, Homo sapien
caggctgcccaacccgtcacgtgac

SEQ ID NO: 4739697 - DNA, 25 bp, Homo sapien
aaagcaccacaggttactcccctgt

SEQ ID NO: 4739698 - DNA, 25 bp, Homo sapien
cgtgatgacctcacaaagcaccaca

SEQ ID NO: 4739699 - DNA, 25 bp, Homo sapien
tgcagctcgtcgtcgcgccgtgatg

SEQ ID NO: 4739700 - DNA, 25 bp, Homo sapien
accgcatacaaggtgcccacaactg

SEQ ID NO: 4739701 - DNA, 25 bp, Homo sapien
gccacagctggctactgatggtaag

SEQ ID NO: 4739702 - DNA, 25 bp, Homo sapien
cagctggctactgatggtaagaaag

SEQ ID NO: 4739703 - DNA, 25 bp, Homo sapien
tggctactgatggtaagaaagagac

SEQ ID NO: 4739704 - DNA, 25 bp, Homo sapien
ctgaatagcccctgcagaaaattcc

SEQ ID NO: 4739705 - DNA, 25 bp, Homo sapien
tcaaatacagatagagccaaactgg

SEQ ID NO: 4739706 - DNA, 25 bp, Homo sapien
gccaaactggacttttaggagctga

SEQ ID NO: 4739707 - DNA, 25 bp, Homo sapien
agaccgtgcctgtggggcaaagcta

SEQ ID NO: 4739708 - DNA, 25 bp, Homo sapien
tggggcaaagctaacactcaagtca

SEQ ID NO: 4739709 - DNA, 25 bp, Homo sapien
ggacatctccaaagagcaccaatgc

SEQ ID NO: 4739710 - DNA, 25 bp, Homo sapien
tccatccaactgtgtcagctcagat

SEQ ID NO: 4739711 - DNA, 25 bp, Homo sapien
tacttctgcctgaaaggacatctcc

SEQ ID NO: 4739712 - DNA, 25 bp, Homo sapien
ctttcttggtcagcatagtggctac

SEQ ID NO: 4739713 - DNA, 25 bp, Homo sapien
gtggcacgggcatagagactcagct

SEQ ID NO: 4739714 - DNA, 25 bp, Homo sapien
ggccagacgctggtgaaatcccgtc

SEQ ID NO: 4739715 - DNA, 25 bp, Homo sapien
catggtggcacgggcatagagactc

SEQ ID NO: 4739716 - DNA, 25 bp, Homo sapien
gcacgggcatagagactcagctact

SEQ ID NO: 4739717 - DNA, 25 bp, Homo sapien
caaacagtcttcctgtgcaccatca

SEQ ID NO: 4739718 - DNA, 25 bp, Homo sapien
ttcaattttgtgtagagaccaggtc

SEQ ID NO: 4739719 - DNA, 25 bp, Homo sapien
gcagccacgcctagcctattattat

SEQ ID NO: 4739720 - DNA, 25 bp, Homo sapien
tgtgagcagccacgcctagcctatt

SEQ ID NO: 4739721 - DNA, 25 bp, Homo sapien
tttctttcattggattcttctttgg

SEQ ID NO: 4739722 - DNA, 25 bp, Homo sapien
cacatttctttcattggattcttct

SEQ ID NO: 4739723 - DNA, 25 bp, Homo sapien
tcacatttctttcattggattcttc

SEQ ID NO: 4739724 - DNA, 25 bp, Homo sapien
ctttcattggattcttctttggagg

SEQ ID NO: 4739725 - DNA, 25 bp, Homo sapien
gaattcagttcagctacaaagcctc

SEQ ID NO: 4739726 - DNA, 25 bp, Homo sapien
agaattcagttcagctacaaagcct

SEQ ID NO: 4739727 - DNA, 25 bp, Homo sapien
ctaagaattcagttcagctacaaag

SEQ ID NO: 4739728 - DNA, 25 bp, Homo sapien
taagaattcagttcagctacaaagc

SEQ ID NO: 4739729 - DNA, 25 bp, Homo sapien
cagaagagggtctagcaatagtaca

SEQ ID NO: 4739730 - DNA, 25 bp, Homo sapien
cagggctaagccaacagagtaggag

SEQ ID NO: 4739731 - DNA, 25 bp, Homo sapien
tcagggaacaagtggacatcacagt

SEQ ID NO: 4739732 - DNA, 25 bp, Homo sapien
taaacagacagttcaagggaggaac

SEQ ID NO: 4739733 - DNA, 25 bp, Homo sapien
tcagtgacacacagtacctacaggc

SEQ ID NO: 4739734 - DNA, 25 bp, Homo sapien
aaggagccctacctctcaagagtga

SEQ ID NO: 4739735 - DNA, 25 bp, Homo sapien
gatacagactagtcccaaagctgga

SEQ ID NO: 4739736 - DNA, 25 bp, Homo sapien
caggtagggctggatcactttgcag

SEQ ID NO: 4739737 - DNA, 25 bp, Homo sapien
cagagcccagcatagtttccatgga

SEQ ID NO: 4739738 - DNA, 25 bp, Homo sapien
ccagcatagtttccatggagccctg

SEQ ID NO: 4739739 - DNA, 25 bp, Homo sapien
tccagagcccagcatagtttccatg

SEQ ID NO: 4739740 - DNA, 25 bp, Homo sapien
gagcccagcatagtttccatggagc

SEQ ID NO: 4739741 - DNA, 25 bp, Homo sapien
tcctgccacaaagagtttcgttcca

SEQ ID NO: 4739742 - DNA, 25 bp, Homo sapien
cacaaagagtttcgttccagacgag

SEQ ID NO: 4739743 - DNA, 25 bp, Homo sapien
tcgttccagacgagtcgtagcagtg

SEQ ID NO: 4739744 - DNA, 25 bp, Homo sapien
tagcagtgggtgtaaacagcattgg

SEQ ID NO: 4739745 - DNA, 25 bp, Homo sapien
agctcggatgtcatagaacagcagg

SEQ ID NO: 4739746 - DNA, 25 bp, Homo sapien
tgtgctcgtagaaactcactgaccg

SEQ ID NO: 4739747 - DNA, 25 bp, Homo sapien
cagcctttgccagtggttagtttca

SEQ ID NO: 4739748 - DNA, 25 bp, Homo sapien
tccagaaatctctgagctcggatgt

SEQ ID NO: 4739749 - DNA, 25 bp, Homo sapien
caagatgcttttggccgaagaccat

SEQ ID NO: 4739750 - DNA, 25 bp, Homo sapien
gcaaagagaatcctgatgccatcct

SEQ ID NO: 4739751 - DNA, 25 bp, Homo sapien
gattcccgatgatgctcaagatgct

SEQ ID NO: 4739752 - DNA, 25 bp, Homo sapien
tacactgcaactcaaggtaatctgc

SEQ ID NO: 4739753 - DNA, 25 bp, Homo sapien
atggctgccgtggatccaagaagga

SEQ ID NO: 4739754 - DNA, 25 bp, Homo sapien
ttgggagcccactgcataaactgac

SEQ ID NO: 4739755 - DNA, 25 bp, Homo sapien
gacttgacgttgtatgatggctgcc

SEQ ID NO: 4739756 - DNA, 25 bp, Homo sapien
cattctcacggcaatatggcagttt

SEQ ID NO: 4739757 - DNA, 25 bp, Homo sapien
tgaaaaaaaagctcagctagaatta

SEQ ID NO: 4739758 - DNA, 25 bp, Homo sapien
taaatgaatagataaaataaacatg

SEQ ID NO: 4739759 - DNA, 25 bp, Homo sapien
aaaaaaaagctcagctagaattaca

SEQ ID NO: 4739760 - DNA, 25 bp, Homo sapien
tgaatagataaaataaacatgaaaa

SEQ ID NO: 4739761 - DNA, 25 bp, Homo sapien
ttttcagccttccagagatgaaagt

SEQ ID NO: 4739762 - DNA, 25 bp, Homo sapien
tttcagccttccagagatgaaagta

SEQ ID NO: 4739763 - DNA, 25 bp, Homo sapien
attttcagccttccagagatgaaag

SEQ ID NO: 4739764 - DNA, 25 bp, Homo sapien
gagcccgaaccttgcagttgtcagg

SEQ ID NO: 4739765 - DNA, 25 bp, Homo sapien
ttaaggccttgtgagtgatgtgtgc

SEQ ID NO: 4739766 - DNA, 25 bp, Homo sapien
tgtgtgcatacacagggacccgtga

SEQ ID NO: 4739767 - DNA, 25 bp, Homo sapien
gagtcccatagaaccatcacgtgag

SEQ ID NO: 4739768 - DNA, 25 bp, Homo sapien
tttccatgaacccacagggaccaca

SEQ ID NO: 4739769 - DNA, 25 bp, Homo sapien
cccagactaggcctctttttctaga

SEQ ID NO: 4739770 - DNA, 25 bp, Homo sapien
tgtcatattgcccagcattgtctta

SEQ ID NO: 4739771 - DNA, 25 bp, Homo sapien
tgcccagcattgtcttaaacacctg

SEQ ID NO: 4739772 - DNA, 25 bp, Homo sapien
tttcactcttattgcccaggctaga

SEQ ID NO: 4739773 - DNA, 25 bp, Homo sapien
tatttattttggtggtgggacagag

SEQ ID NO: 4739774 - DNA, 25 bp, Homo sapien
atgcaatggcacgatcttggctcac

SEQ ID NO: 4739775 - DNA, 25 bp, Homo sapien
caccgcaacctctgcttactgggtt

SEQ ID NO: 4739776 - DNA, 25 bp, Homo sapien
actgccatagtgtcgctgatccatg

SEQ ID NO: 4739777 - DNA, 25 bp, Homo sapien
tgatccatgcgatggaaaagatcca

SEQ ID NO: 4739778 - DNA, 25 bp, Homo sapien
cagacactgccatagtgtcgctgat

SEQ ID NO: 4739779 - DNA, 25 bp, Homo sapien
tagtgtcgctgatccatgcgatgga

SEQ ID NO: 4739780 - DNA, 25 bp, Homo sapien
tggcatggataccacagccctgctg

SEQ ID NO: 4739781 - DNA, 25 bp, Homo sapien
tccaggctcccggtctttcagaatg

SEQ ID NO: 4739782 - DNA, 25 bp, Homo sapien
tcctccagtggctagcagtgttcta

SEQ ID NO: 4739783 - DNA, 25 bp, Homo sapien
cacacacaggatccagcgtaggtag

SEQ ID NO: 4739784 - DNA, 25 bp, Homo sapien
ggcatcaaacatccgctggatgggc

SEQ ID NO: 4739785 - DNA, 25 bp, Homo sapien
agaggggggtcccacgcagccatca

SEQ ID NO: 4739786 - DNA, 25 bp, Homo sapien
agccacagaggggggtcccacgcag

SEQ ID NO: 4739787 - DNA, 25 bp, Homo sapien
tggcatcaaacatccgctggatggg

SEQ ID NO: 4739788 - DNA, 25 bp, Homo sapien
aaaaaaggagtcagatgtggtagca

SEQ ID NO: 4739789 - DNA, 25 bp, Homo sapien
ttcaagggtgtttcagactggagcc

SEQ ID NO: 4739790 - DNA, 25 bp, Homo sapien
gaaagtaattctacgcaggtcacac

SEQ ID NO: 4739791 - DNA, 25 bp, Homo sapien
tggtagcaggaacctatcgtcccag

SEQ ID NO: 4739792 - DNA, 25 bp, Homo sapien
ctaaacactatgatgcacgtgcggg

SEQ ID NO: 4739793 - DNA, 25 bp, Homo sapien
ttctgggtaagacaagcgactcctc

SEQ ID NO: 4739794 - DNA, 25 bp, Homo sapien
cagttcttaaccacgagtgggcagc

SEQ ID NO: 4739795 - DNA, 25 bp, Homo sapien
gaagttctgtggaggcccgttgcca

SEQ ID NO: 4739796 - DNA, 25 bp, Homo sapien
cctatgattcaaccactgagatgca

SEQ ID NO: 4739797 - DNA, 25 bp, Homo sapien
ttttgtgaagcgagtgatcccagcc

SEQ ID NO: 4739798 - DNA, 25 bp, Homo sapien
cattctgtagcctgacttcccggtt

SEQ ID NO: 4739799 - DNA, 25 bp, Homo sapien
gcataaccatgcaacactcgagagt

SEQ ID NO: 4739800 - DNA, 25 bp, Homo sapien
ggagcacggaagatacagtccaagg

SEQ ID NO: 4739801 - DNA, 25 bp, Homo sapien
acggaagatacagtccaaggagcca

SEQ ID NO: 4739802 - DNA, 25 bp, Homo sapien
cactggagcacggaagatacagtcc

SEQ ID NO: 4739803 - DNA, 25 bp, Homo sapien
agcacggaagatacagtccaaggag

SEQ ID NO: 4739804 - DNA, 25 bp, Homo sapien
gcgaggcgggcgctttccgcttcct

SEQ ID NO: 4739805 - DNA, 25 bp, Homo sapien
tcctgctaactactttccgggccat

SEQ ID NO: 4739806 - DNA, 25 bp, Homo sapien
tgcgggccctgagcgtcgctcccag

SEQ ID NO: 4739807 - DNA, 25 bp, Homo sapien
tccgcttcctgctaactactttccg

SEQ ID NO: 4739808 - DNA, 25 bp, Homo sapien
aagcgaaggatagcaggacggcggg

SEQ ID NO: 4739809 - DNA, 25 bp, Homo sapien
agccacatggggcgggggaagcgaa

SEQ ID NO: 4739810 - DNA, 25 bp, Homo sapien
gggaagcgaaggatagcaggacggc

SEQ ID NO: 4739811 - DNA, 25 bp, Homo sapien
cgggggaagcgaaggatagcaggac

SEQ ID NO: 4739812 - DNA, 25 bp, Homo sapien
acggcgagcggctagaaccaaaaca

SEQ ID NO: 4739813 - DNA, 25 bp, Homo sapien
cttagtgcgcccggcccggaaaatg

SEQ ID NO: 4739814 - DNA, 25 bp, Homo sapien
agcagaaaaaagataggcggaaaga

SEQ ID NO: 4739815 - DNA, 25 bp, Homo sapien
aatgagcggctttccgacggcagag

SEQ ID NO: 4739816 - DNA, 25 bp, Homo sapien
tcagtacagccgcttttcataaaag

SEQ ID NO: 4739817 - DNA, 25 bp, Homo sapien
gatctgggccgacatgatccgcttc

SEQ ID NO: 4739818 - DNA, 25 bp, Homo sapien
cttttcataaaagtgcagaccatgg

SEQ ID NO: 4739819 - DNA, 25 bp, Homo sapien
cataaaagtgcagaccatggacgcc

SEQ ID NO: 4739820 - DNA, 25 bp, Homo sapien
ccgcacctcgtctgagaagtactca

SEQ ID NO: 4739821 - DNA, 25 bp, Homo sapien
cgccgggcatacttggcctccttgt

SEQ ID NO: 4739822 - DNA, 25 bp, Homo sapien
gcgccgggcatacttggcctccttg

SEQ ID NO: 4739823 - DNA, 25 bp, Homo sapien
agcgccgggcatacttggcctcctt

SEQ ID NO: 4739824 - DNA, 25 bp, Homo sapien
gtttgatgtaatgcaccatggcgat

SEQ ID NO: 4739825 - DNA, 25 bp, Homo sapien
gggtacttctgtttgatgtaatgca

SEQ ID NO: 4739826 - DNA, 25 bp, Homo sapien
acttctgtttgatgtaatgcaccat

SEQ ID NO: 4739827 - DNA, 25 bp, Homo sapien
ctgtttgatgtaatgcaccatggcg

SEQ ID NO: 4739828 - DNA, 25 bp, Homo sapien
ctgatacaccaagttcccttgggac

SEQ ID NO: 4739829 - DNA, 25 bp, Homo sapien
caagttcccttgggacgagtccaag

SEQ ID NO: 4739830 - DNA, 25 bp, Homo sapien
atacaccaagttcccttgggacgag

SEQ ID NO: 4739831 - DNA, 25 bp, Homo sapien
gatacaccaagttcccttgggacga

SEQ ID NO: 4739832 - DNA, 25 bp, Homo sapien
tgagcaggtccaggcgatatttgtc

SEQ ID NO: 4739833 - DNA, 25 bp, Homo sapien
tccaggcgatatttgtcatcctcac

SEQ ID NO: 4739834 - DNA, 25 bp, Homo sapien
ggtccaggcgatatttgtcatcctc

SEQ ID NO: 4739835 - DNA, 25 bp, Homo sapien
caggtccaggcgatatttgtcatcc

SEQ ID NO: 4739836 - DNA, 25 bp, Homo sapien
ggtcgctgccggtgataatggccac

SEQ ID NO: 4739837 - DNA, 25 bp, Homo sapien
tcaggtcgctgccggtgataatggc

SEQ ID NO: 4739838 - DNA, 25 bp, Homo sapien
aggtcgctgccggtgataatggcca

SEQ ID NO: 4739839 - DNA, 25 bp, Homo sapien
caggtcgctgccggtgataatggcc

SEQ ID NO: 4739840 - DNA, 25 bp, Homo sapien
gagctaccaccagctcgagccttgg

SEQ ID NO: 4739841 - DNA, 25 bp, Homo sapien
atgctggagctaccaccagctcgag

SEQ ID NO: 4739842 - DNA, 25 bp, Homo sapien
cagctcattgcgatcattgatgata

SEQ ID NO: 4739843 - DNA, 25 bp, Homo sapien
acacatgctggagctaccaccagct

SEQ ID NO: 4739844 - DNA, 25 bp, Homo sapien
ttccgtagctccttggcctggagct

SEQ ID NO: 4739845 - DNA, 25 bp, Homo sapien
tccagcacatcacctacagtgtggg

SEQ ID NO: 4739846 - DNA, 25 bp, Homo sapien
agcacatcacctacagtgtgggagg

SEQ ID NO: 4739847 - DNA, 25 bp, Homo sapien
tgtgggaggggctcagcaccgtggg

SEQ ID NO: 4739848 - DNA, 25 bp, Homo sapien
gaggtaaggtccacctcagctatga

SEQ ID NO: 4739849 - DNA, 25 bp, Homo sapien
aggtagtccaccacgctgctgggag

SEQ ID NO: 4739850 - DNA, 25 bp, Homo sapien
gtagtccaccacgctgctgggagac

SEQ ID NO: 4739851 - DNA, 25 bp, Homo sapien
tagtccaccacgctgctgggagacc

SEQ ID NO: 4739852 - DNA, 25 bp, Homo sapien
tgttgaggagtcttccatcagtcat

SEQ ID NO: 4739853 - DNA, 25 bp, Homo sapien
attttgttgaggagtcttccatcag

SEQ ID NO: 4739854 - DNA, 25 bp, Homo sapien
tttgttgaggagtcttccatcagtc

SEQ ID NO: 4739855 - DNA, 25 bp, Homo sapien
caattttgttgaggagtcttccatc

SEQ ID NO: 4739856 - DNA, 25 bp, Homo sapien
ccaggaaccaggccaacatagacat

SEQ ID NO: 4739857 - DNA, 25 bp, Homo sapien
acccctcctcaactctctgaagaat

SEQ ID NO: 4739858 - DNA, 25 bp, Homo sapien
tacccctcctcaactctctgaagaa

SEQ ID NO: 4739859 - DNA, 25 bp, Homo sapien
ctacccctcctcaactctctgaaga

SEQ ID NO: 4739860 - DNA, 25 bp, Homo sapien
gacatccagagtgccccttctttgc

SEQ ID NO: 4739861 - DNA, 25 bp, Homo sapien
tgcagacatccagagtgccccttct

SEQ ID NO: 4739862 - DNA, 25 bp, Homo sapien
tgccccttctttgccggagtaagtc

SEQ ID NO: 4739863 - DNA, 25 bp, Homo sapien
tccttatctgcagacatccagagtg

SEQ ID NO: 4739864 - DNA, 25 bp, Homo sapien
tcttgatcatctagcctgggttcct

SEQ ID NO: 4739865 - DNA, 25 bp, Homo sapien
tattgctctttccactgcgtttggg

SEQ ID NO: 4739866 - DNA, 25 bp, Homo sapien
caacagtccttgtattgcttgggta

SEQ ID NO: 4739867 - DNA, 25 bp, Homo sapien
tctccatcgctctctgcaggtcagg

SEQ ID NO: 4739868 - DNA, 25 bp, Homo sapien
gggattagaggtgcgcgccaccagg

SEQ ID NO: 4739869 - DNA, 25 bp, Homo sapien
agcttactgcaactttcatctcccg

SEQ ID NO: 4739870 - DNA, 25 bp, Homo sapien
tcagcttactgcaactttcatctcc

SEQ ID NO: 4739871 - DNA, 25 bp, Homo sapien
ttagaggtgcgcgccaccaggcctg

SEQ ID NO: 4739872 - DNA, 25 bp, Homo sapien
cgtcggctcctcccattggtccggg

SEQ ID NO: 4739873 - DNA, 25 bp, Homo sapien
cctcccattggtccgggcgtgtgga

SEQ ID NO: 4739874 - DNA, 25 bp, Homo sapien
ccattggtccgggcgtgtggagcgc

SEQ ID NO: 4739875 - DNA, 25 bp, Homo sapien
gctcctcccattggtccgggcgtgt

SEQ ID NO: 4739876 - DNA, 25 bp, Homo sapien
cacccgtcttggcctcccagagtgc

SEQ ID NO: 4739877 - DNA, 25 bp, Homo sapien
acccgtcttggcctcccagagtgct

SEQ ID NO: 4739878 - DNA, 25 bp, Homo sapien
tacaggcgcctgccacacacctggc

SEQ ID NO: 4739879 - DNA, 25 bp, Homo sapien
acaggcgcctgccacacacctggct

SEQ ID NO: 4739880 - DNA, 25 bp, Homo sapien
aaagaaataatctcgggcgggtgct

SEQ ID NO: 4739881 - DNA, 25 bp, Homo sapien
agaaataatctcgggcgggtgctgt

SEQ ID NO: 4739882 - DNA, 25 bp, Homo sapien
aataatctcgggcgggtgctgtggg

SEQ ID NO: 4739883 - DNA, 25 bp, Homo sapien
caaaagaaataatctcgggcgggtg

SEQ ID NO: 4739884 - DNA, 25 bp, Homo sapien
tgcgcccggctggtttgtgcttgtt

SEQ ID NO: 4739885 - DNA, 25 bp, Homo sapien
tgtgcttgttgtatcaaatttggga

SEQ ID NO: 4739886 - DNA, 25 bp, Homo sapien
gtgccttacatgtgggtttcataca

SEQ ID NO: 4739887 - DNA, 25 bp, Homo sapien
aaaggaggttggattgtgccttaca

SEQ ID NO: 4739888 - DNA, 25 bp, Homo sapien
aacactgctttgaataagttctgat

SEQ ID NO: 4739889 - DNA, 25 bp, Homo sapien
cactgctttgaataagttctgatga

SEQ ID NO: 4739890 - DNA, 25 bp, Homo sapien
agtaacactgctttgaataagttct

SEQ ID NO: 4739891 - DNA, 25 bp, Homo sapien
ctgctttgaataagttctgatgagc

SEQ ID NO: 4739892 - DNA, 25 bp, Homo sapien
ctttcgggctgaagtttatcctcct

SEQ ID NO: 4739893 - DNA, 25 bp, Homo sapien
ttcgggctgaagtttatcctcctac

SEQ ID NO: 4739894 - DNA, 25 bp, Homo sapien
tagctgcaactacacaaacacgcta

SEQ ID NO: 4739895 - DNA, 25 bp, Homo sapien
tacacaaacacgctaccatgtctgg

SEQ ID NO: 4739896 - DNA, 25 bp, Homo sapien
attgaattatttggttcagtcatta

SEQ ID NO: 4739897 - DNA, 25 bp, Homo sapien
attatttggttcagtcattatattc

SEQ ID NO: 4739898 - DNA, 25 bp, Homo sapien
tcattatattcttccgctctaagat

SEQ ID NO: 4739899 - DNA, 25 bp, Homo sapien
attcttccgctctaagatttgcttt

SEQ ID NO: 4739900 - DNA, 25 bp, Homo sapien
taaccaggctcaaccctgcttctga

SEQ ID NO: 4739901 - DNA, 25 bp, Homo sapien
agcgttcagggtggtttggttgtag

SEQ ID NO: 4739902 - DNA, 25 bp, Homo sapien
tcaggagcgttcagggtggtttggt

SEQ ID NO: 4739903 - DNA, 25 bp, Homo sapien
accaggctcaaccctgcttctgaga

SEQ ID NO: 4739904 - DNA, 25 bp, Homo sapien
caccttcattacatgggtgaagaca

SEQ ID NO: 4739905 - DNA, 25 bp, Homo sapien
taaacaccttcattacatgggtgaa

SEQ ID NO: 4739906 - DNA, 25 bp, Homo sapien
caataaacaccttcattacatgggt

SEQ ID NO: 4739907 - DNA, 25 bp, Homo sapien
cattacatgggtgaagacaaaacga

SEQ ID NO: 4739908 - DNA, 25 bp, Homo sapien
cggccttgaagtgatgcacgcaaga

SEQ ID NO: 4739909 - DNA, 25 bp, Homo sapien
agcacatagccgtctgtttggccac

SEQ ID NO: 4739910 - DNA, 25 bp, Homo sapien
tagccgtctgtttggccacactgtc

SEQ ID NO: 4739911 - DNA, 25 bp, Homo sapien
ctctagcacatagccgtctgtttgg

SEQ ID NO: 4739912 - DNA, 25 bp, Homo sapien
cctttcatcgatttcttctgaaatt

SEQ ID NO: 4739913 - DNA, 25 bp, Homo sapien
ttcctttcatcgatttcttctgaaa

SEQ ID NO: 4739914 - DNA, 25 bp, Homo sapien
catcgatttcttctgaaatttttta

SEQ ID NO: 4739915 - DNA, 25 bp, Homo sapien
ttcatcgatttcttctgaaattttt

SEQ ID NO: 4739916 - DNA, 25 bp, Homo sapien
tttgtttaaaatctcttcttcctca

SEQ ID NO: 4739917 - DNA, 25 bp, Homo sapien
ttgtttaaaatctcttcttcctcag

SEQ ID NO: 4739918 - DNA, 25 bp, Homo sapien
ccatacggtgtgctgtcgatgagta

SEQ ID NO: 4739919 - DNA, 25 bp, Homo sapien
tcagcttgtctcctttcttgtggcc

SEQ ID NO: 4739920 - DNA, 25 bp, Homo sapien
cagcttgtctcctttcttgtggccc

SEQ ID NO: 4739921 - DNA, 25 bp, Homo sapien
actcgtaccactgtccatacggtgt

SEQ ID NO: 4739922 - DNA, 25 bp, Homo sapien
gtcaatgagcatgaagcaattcttc

SEQ ID NO: 4739923 - DNA, 25 bp, Homo sapien
acatcgatgatccttgttttgcaaa

SEQ ID NO: 4739924 - DNA, 25 bp, Homo sapien
cagggtcttgttatggaccagctcg

SEQ ID NO: 4739925 - DNA, 25 bp, Homo sapien
gaccagctcgttattaaacgcattg

SEQ ID NO: 4739926 - DNA, 25 bp, Homo sapien
tgttatggaccagctcgttattaaa

SEQ ID NO: 4739927 - DNA, 25 bp, Homo sapien
ctacatgcagccttagggcacggta

SEQ ID NO: 4739928 - DNA, 25 bp, Homo sapien
catgcagccttagggcacggtattt

SEQ ID NO: 4739929 - DNA, 25 bp, Homo sapien
atgcagccttagggcacggtatttc

SEQ ID NO: 4739930 - DNA, 25 bp, Homo sapien
tacatgcagccttagggcacggtat

SEQ ID NO: 4739931 - DNA, 25 bp, Homo sapien
ctgtgtggacgtggcaggggccaat

SEQ ID NO: 4739932 - DNA, 25 bp, Homo sapien
tgtggacgtggcaggggccaatgtt

SEQ ID NO: 4739933 - DNA, 25 bp, Homo sapien
tggactgtgtggacgtggcaggggc

SEQ ID NO: 4739934 - DNA, 25 bp, Homo sapien
tggcaggggccaatgttggtgttgg

SEQ ID NO: 4739935 - DNA, 25 bp, Homo sapien
cgcttcttgtggtagggctttctct

SEQ ID NO: 4739936 - DNA, 25 bp, Homo sapien
ttccgcttcttgtggtagggctttc

SEQ ID NO: 4739937 - DNA, 25 bp, Homo sapien
tccgcttcttgtggtagggctttct

SEQ ID NO: 4739938 - DNA, 25 bp, Homo sapien
acttccgcttcttgtggtagggctt

SEQ ID NO: 4739939 - DNA, 25 bp, Homo sapien
ccgagagatgcccattgctcggcgc

SEQ ID NO: 4739940 - DNA, 25 bp, Homo sapien
agttctcccgagagatgcccattgc

SEQ ID NO: 4739941 - DNA, 25 bp, Homo sapien
tctcccgagagatgcccattgctcg

SEQ ID NO: 4739942 - DNA, 25 bp, Homo sapien
gagagatgcccattgctcggcgctg

SEQ ID NO: 4739943 - DNA, 25 bp, Homo sapien
aggtgtggtggagcttctctatagt

SEQ ID NO: 4739944 - DNA, 25 bp, Homo sapien
gtgtggtggagcttctctatagtcc

SEQ ID NO: 4739945 - DNA, 25 bp, Homo sapien
tgtggtggagcttctctatagtcct

SEQ ID NO: 4739946 - DNA, 25 bp, Homo sapien
ttaagcctgtcatctttaaaagcag

SEQ ID NO: 4739947 - DNA, 25 bp, Homo sapien
ggcttttacactaagtgccattgaa

SEQ ID NO: 4739948 - DNA, 25 bp, Homo sapien
ttaaaagcagcagtcaccattactt

SEQ ID NO: 4739949 - DNA, 25 bp, Homo sapien
ctgtaacttctagacttaggatagc

SEQ ID NO: 4739950 - DNA, 25 bp, Homo sapien
tccacagttagaagagcagagtcat

SEQ ID NO: 4739951 - DNA, 25 bp, Homo sapien
tctctcaccttggacattaacacag

SEQ ID NO: 4739952 - DNA, 25 bp, Homo sapien
tctggtgttagcacgttagacctct

SEQ ID NO: 4739953 - DNA, 25 bp, Homo sapien
gagcatagaatctgtagtcagactg

SEQ ID NO: 4739954 - DNA, 25 bp, Homo sapien
taaacttgatagagtgccgaacacc

SEQ ID NO: 4739955 - DNA, 25 bp, Homo sapien
tattggtgggatatctgtcagagac

SEQ ID NO: 4739956 - DNA, 25 bp, Homo sapien
tgtgtccggccagcttacagatttt

SEQ ID NO: 4739957 - DNA, 25 bp, Homo sapien
tggcctgctttacaagtcccagtaa

SEQ ID NO: 4739958 - DNA, 25 bp, Homo sapien
tattctgggtgtatgcctgcatccc

SEQ ID NO: 4739959 - DNA, 25 bp, Homo sapien
taaagcccgtctctaaagagggaga

SEQ ID NO: 4739960 - DNA, 25 bp, Homo sapien
ccaggcatttaggaggcattatgag

SEQ ID NO: 4739961 - DNA, 25 bp, Homo sapien
ccgcacctggctagatatgatttta

SEQ ID NO: 4739962 - DNA, 25 bp, Homo sapien
taagaaatcattggccccttcccag

SEQ ID NO: 4739963 - DNA, 25 bp, Homo sapien
tttggaagacctcatggctcgggca

SEQ ID NO: 4739964 - DNA, 25 bp, Homo sapien
cagcccactgctttaggatgacaca

SEQ ID NO: 4739965 - DNA, 25 bp, Homo sapien
ccctgagactggtggactgaactcc

SEQ ID NO: 4739966 - DNA, 25 bp, Homo sapien
accaggctgctagtgtctcaagaga

SEQ ID NO: 4739967 - DNA, 25 bp, Homo sapien
tattctctaggcacaagggaaaggc

SEQ ID NO: 4739968 - DNA, 25 bp, Homo sapien
tgacaaagggtgactggaccaggct

SEQ ID NO: 4739969 - DNA, 25 bp, Homo sapien
tcacatagtaatgggcgttcgggcc

SEQ ID NO: 4739970 - DNA, 25 bp, Homo sapien
ctaagacggcactgttccctcaggg

SEQ ID NO: 4739971 - DNA, 25 bp, Homo sapien
tgggcccgtggcaggtgagatagag

SEQ ID NO: 4739972 - DNA, 25 bp, Homo sapien
ctcagactctggatacacttggatt

SEQ ID NO: 4739973 - DNA, 25 bp, Homo sapien
ggatttcagaaccatgatttcatcc

SEQ ID NO: 4739974 - DNA, 25 bp, Homo sapien
aagccagctggctcatcagcgtctc

SEQ ID NO: 4739975 - DNA, 25 bp, Homo sapien
aagccgagctcagccatttcatcca

SEQ ID NO: 4739976 - DNA, 25 bp, Homo sapien
agccgagctcagccatttcatccag

SEQ ID NO: 4739977 - DNA, 25 bp, Homo sapien
agaagccagctggctcatcagcgtc

SEQ ID NO: 4739978 - DNA, 25 bp, Homo sapien
tccagggtgggctgacggagtgtcc

SEQ ID NO: 4739979 - DNA, 25 bp, Homo sapien
ggctgacggagtgtccctgcagtct

SEQ ID NO: 4739980 - DNA, 25 bp, Homo sapien
gaaccaagggagaacttggccttgc

SEQ ID NO: 4739981 - DNA, 25 bp, Homo sapien
aagggagaacttggccttgctaagc

SEQ ID NO: 4739982 - DNA, 25 bp, Homo sapien
ggtctgtggacaaaccaaactcctg

SEQ ID NO: 4739983 - DNA, 25 bp, Homo sapien
tgttgcagggcaacttgatggggtc

SEQ ID NO: 4739984 - DNA, 25 bp, Homo sapien
tgccaaccaagccttgtaggatgtt

SEQ ID NO: 4739985 - DNA, 25 bp, Homo sapien
ctgccaaccaagccttgtaggatgt

SEQ ID NO: 4739986 - DNA, 25 bp, Homo sapien
tactgctcactacccatgtgttcgt

SEQ ID NO: 4739987 - DNA, 25 bp, Homo sapien
tctgcatcagcatcatactgctcac

SEQ ID NO: 4739988 - DNA, 25 bp, Homo sapien
gaaaagtacagtctctctgctctgg

SEQ ID NO: 4739989 - DNA, 25 bp, Homo sapien
tatgtatggtggtgaagggctttcc

SEQ ID NO: 4739990 - DNA, 25 bp, Homo sapien
cacaggtgcctagttgctgaagaca

SEQ ID NO: 4739991 - DNA, 25 bp, Homo sapien
tggattgggccgtctgcactgactt

SEQ ID NO: 4739992 - DNA, 25 bp, Homo sapien
tattcagcatgcgtgcctaactgcc

SEQ ID NO: 4739993 - DNA, 25 bp, Homo sapien
tcctgggacagcatgaccgtttttc

SEQ ID NO: 4739994 - DNA, 25 bp, Homo sapien
cctgtctatatatgaaatctacctg

SEQ ID NO: 4739995 - DNA, 25 bp, Homo sapien
tggggatggcaagttgccctcattc

SEQ ID NO: 4739996 - DNA, 25 bp, Homo sapien
ctgcaacgtgggacaatgagatagt

SEQ ID NO: 4739997 - DNA, 25 bp, Homo sapien
tgaaatctacctgtgaacagtatgg

SEQ ID NO: 4739998 - DNA, 25 bp, Homo sapien
gtccccacgtctggtgcaggaagaa

SEQ ID NO: 4739999 - DNA, 25 bp, Homo sapien
gcaggaagaatgagtcttcgctatt

SEQ ID NO: 4740000 - DNA, 25 bp, Homo sapien
gagtcttcgctattctccagggtgt

SEQ ID NO: 4740001 - DNA, 25 bp, Homo sapien
tggagtccacccagcttttagttag

SEQ ID NO: 4740002 - DNA, 25 bp, Homo sapien
tctcattcgtgagctgaccctctgg

SEQ ID NO: 4740003 - DNA, 25 bp, Homo sapien
ttggaactgctggtgatagaaacgc

SEQ ID NO: 4740004 - DNA, 25 bp, Homo sapien
tgtactggcgtaaagaccttttcag

SEQ ID NO: 4740005 - DNA, 25 bp, Homo sapien
ggagagctcaactcgagacacaagc

SEQ ID NO: 4740006 - DNA, 25 bp, Homo sapien
tttttggccacatgtccagagcgca

SEQ ID NO: 4740007 - DNA, 25 bp, Homo sapien
tcacagggctagcatgaatgaccca

SEQ ID NO: 4740008 - DNA, 25 bp, Homo sapien
tggagccaccccttttaccagagac

SEQ ID NO: 4740009 - DNA, 25 bp, Homo sapien
gaatgacccactcttgtgaaggact

SEQ ID NO: 4740010 - DNA, 25 bp, Homo sapien
tggcttggtgagatgttggcgatca

SEQ ID NO: 4740011 - DNA, 25 bp, Homo sapien
cagcatagcgcaaggtgttgagagt

SEQ ID NO: 4740012 - DNA, 25 bp, Homo sapien
tggccacgtggcttggtgagatgtt

SEQ ID NO: 4740013 - DNA, 25 bp, Homo sapien
tgttgagagtgtgttcagtggccac

SEQ ID NO: 4740014 - DNA, 25 bp, Homo sapien
cattgccgatgaaagagtccttcag

SEQ ID NO: 4740015 - DNA, 25 bp, Homo sapien
tggcattgccgatgaaagagtcctt

SEQ ID NO: 4740016 - DNA, 25 bp, Homo sapien
ggcattgccgatgaaagagtccttc

SEQ ID NO: 4740017 - DNA, 25 bp, Homo sapien
tgccgatgaaagagtccttcaggac

SEQ ID NO: 4740018 - DNA, 25 bp, Homo sapien
ccagtgctcggatacattccttcag

SEQ ID NO: 4740019 - DNA, 25 bp, Homo sapien
gttcctgatccagtgctcggataca

SEQ ID NO: 4740020 - DNA, 25 bp, Homo sapien
tgtgttcctgatccagtgctcggat

SEQ ID NO: 4740021 - DNA, 25 bp, Homo sapien
tgatccagtgctcggatacattcct

SEQ ID NO: 4740022 - DNA, 25 bp, Homo sapien
cctcagtgagaagcgctcattggac

SEQ ID NO: 4740023 - DNA, 25 bp, Homo sapien
tgtggacctccaggggaaacactcc

SEQ ID NO: 4740024 - DNA, 25 bp, Homo sapien
aaggaatgttccttgctcatggctg

SEQ ID NO: 4740025 - DNA, 25 bp, Homo sapien
gacatgataaggacagcagagatct

SEQ ID NO: 4740026 - DNA, 25 bp, Homo sapien
gcacaaggcagcatatacaactgga

SEQ ID NO: 4740027 - DNA, 25 bp, Homo sapien
gaagagctctatgtacagtcatgca

SEQ ID NO: 4740028 - DNA, 25 bp, Homo sapien
taacaaggttgagagtacagggatg

SEQ ID NO: 4740029 - DNA, 25 bp, Homo sapien
tcatgcagtgatcttgaggatgccg

SEQ ID NO: 4740030 - DNA, 25 bp, Homo sapien
gaaattggcaggcttaaacacacag

SEQ ID NO: 4740031 - DNA, 25 bp, Homo sapien
caaatgaacctaacactatgaaatt

SEQ ID NO: 4740032 - DNA, 25 bp, Homo sapien
cactatgaaattggcaggcttaaac

SEQ ID NO: 4740033 - DNA, 25 bp, Homo sapien
tcaggtgatttgacagcataatatt

SEQ ID NO: 4740034 - DNA, 25 bp, Homo sapien
gagaaattaggctgacaacacttga

SEQ ID NO: 4740035 - DNA, 25 bp, Homo sapien
ttaaaaacggctgaatggcatgtcc

SEQ ID NO: 4740036 - DNA, 25 bp, Homo sapien
cacaaagagagacaactagacattc

SEQ ID NO: 4740037 - DNA, 25 bp, Homo sapien
tctaattcaggactgtcccaacaga

SEQ ID NO: 4740038 - DNA, 25 bp, Homo sapien
gccagccaagtcaataaaagagatc

SEQ ID NO: 4740039 - DNA, 25 bp, Homo sapien
tatctgagtcccttgcatctgctgc

SEQ ID NO: 4740040 - DNA, 25 bp, Homo sapien
tctttcactgccagccaagtcaata

SEQ ID NO: 4740041 - DNA, 25 bp, Homo sapien
tctttgtctgtctatctgagtccct

SEQ ID NO: 4740042 - DNA, 25 bp, Homo sapien
agaccccgtctcaaccctggagatc

SEQ ID NO: 4740043 - DNA, 25 bp, Homo sapien
agagagaccccgtctcaaccctgga

SEQ ID NO: 4740044 - DNA, 25 bp, Homo sapien
ggcaaaacagagagaccccgtctca

SEQ ID NO: 4740045 - DNA, 25 bp, Homo sapien
gagaccccgtctcaaccctggagat

SEQ ID NO: 4740046 - DNA, 25 bp, Homo sapien
ggagtctgcattaactccagtggcc

SEQ ID NO: 4740047 - DNA, 25 bp, Homo sapien
gctccttgctgccctttaagatcac

SEQ ID NO: 4740048 - DNA, 25 bp, Homo sapien
gtctgcattaactccagtggcccca

SEQ ID NO: 4740049 - DNA, 25 bp, Homo sapien
gaatttggatgacggcatgggagcg

SEQ ID NO: 4740050 - DNA, 25 bp, Homo sapien
ctgatgctcctggccaaatgtggga

SEQ ID NO: 4740051 - DNA, 25 bp, Homo sapien
atgctcctggccaaatgtgggagtg

SEQ ID NO: 4740052 - DNA, 25 bp, Homo sapien
gatgctcctggccaaatgtgggagt

SEQ ID NO: 4740053 - DNA, 25 bp, Homo sapien
tgctcctggccaaatgtgggagtgg

SEQ ID NO: 4740054 - DNA, 25 bp, Homo sapien
taggttgtccttgaatagaacatgt

SEQ ID NO: 4740055 - DNA, 25 bp, Homo sapien
ctaccaagtcaatgcatggagcgga

SEQ ID NO: 4740056 - DNA, 25 bp, Homo sapien
tcaatgcatggagcggacagagcaa

SEQ ID NO: 4740057 - DNA, 25 bp, Homo sapien
ggaggtcttgcactaccaagtcaat

SEQ ID NO: 4740058 - DNA, 25 bp, Homo sapien
ctgttgtggtggggtaataaagaag

SEQ ID NO: 4740059 - DNA, 25 bp, Homo sapien
tgaagctcttgcagtcccactatct

SEQ ID NO: 4740060 - DNA, 25 bp, Homo sapien
gaagctcttgcagtcccactatctg

SEQ ID NO: 4740061 - DNA, 25 bp, Homo sapien
agctcttgcagtcccactatctgca

SEQ ID NO: 4740062 - DNA, 25 bp, Homo sapien
acctgaagctcttgcagtcccacta

SEQ ID NO: 4740063 - DNA, 25 bp, Homo sapien
gaacagatttatcgcttcccactca

SEQ ID NO: 4740064 - DNA, 25 bp, Homo sapien
tctcattaaagcctatgattcagtg

SEQ ID NO: 4740065 - DNA, 25 bp, Homo sapien
aagggcactaatgtaccaaagcatc

SEQ ID NO: 4740066 - DNA, 25 bp, Homo sapien
gattcagtgattctccgggactctg

SEQ ID NO: 4740067 - DNA, 25 bp, Homo sapien
tggcagctagagcatacaatcctgg

SEQ ID NO: 4740068 - DNA, 25 bp, Homo sapien
tagaagctgatccacacaaagaggt

SEQ ID NO: 4740069 - DNA, 25 bp, Homo sapien
acaatcctgggttctcatgagttcc

SEQ ID NO: 4740070 - DNA, 25 bp, Homo sapien
tatttaggaggtcataaagctgtcc

SEQ ID NO: 4740071 - DNA, 25 bp, Homo sapien
ctgtccataagcaaagcaagtggca

SEQ ID NO: 4740072 - DNA, 25 bp, Homo sapien
gtccataagcaaagcaagtggcatt

SEQ ID NO: 4740073 - DNA, 25 bp, Homo sapien
tgtccataagcaaagcaagtggcat

SEQ ID NO: 4740074 - DNA, 25 bp, Homo sapien
gagtagtcttcatgtatacatcctg

SEQ ID NO: 4740075 - DNA, 25 bp, Homo sapien
ttggtgcacgcctcaccaaagactt

SEQ ID NO: 4740076 - DNA, 25 bp, Homo sapien
tacatcctgattggtgcacgcctca

SEQ ID NO: 4740077 - DNA, 25 bp, Homo sapien
tgaataagtgggtgagtagtcttca

SEQ ID NO: 4740078 - DNA, 25 bp, Homo sapien
tattaatttctccacgacgtacctc

SEQ ID NO: 4740079 - DNA, 25 bp, Homo sapien
gggcgttttcgaacacaaactctga

SEQ ID NO: 4740080 - DNA, 25 bp, Homo sapien
ctgcagaatatattgagtgaggtca

SEQ ID NO: 4740081 - DNA, 25 bp, Homo sapien
tttcttctcatgcacaagtagagtt

SEQ ID NO: 4740082 - DNA, 25 bp, Homo sapien
tcaaattctaactcgaagcactagg

SEQ ID NO: 4740083 - DNA, 25 bp, Homo sapien
tgtgtgtaggtgaactaactgcccc

SEQ ID NO: 4740084 - DNA, 25 bp, Homo sapien
tagatgctgtctgctggacatgaag

SEQ ID NO: 4740085 - DNA, 25 bp, Homo sapien
gatctgctacagatcctggcaagta

SEQ ID NO: 4740086 - DNA, 25 bp, Homo sapien
tagttataccctgaaacatgagaga

SEQ ID NO: 4740087 - DNA, 25 bp, Homo sapien
tttgcacataggaatcaccagctgt

SEQ ID NO: 4740088 - DNA, 25 bp, Homo sapien
gaataatgggaatatcacaatcccc

SEQ ID NO: 4740089 - DNA, 25 bp, Homo sapien
gaatgagggattccatagttatacc

SEQ ID NO: 4740090 - DNA, 25 bp, Homo sapien
tgcttgtctgaagatgacgctctgg

SEQ ID NO: 4740091 - DNA, 25 bp, Homo sapien
tctgcgagggccagatcttaattcc

SEQ ID NO: 4740092 - DNA, 25 bp, Homo sapien
catctggtagcatgtgttctagcac

SEQ ID NO: 4740093 - DNA, 25 bp, Homo sapien
cgtttgcggtcgttcatgtcatgga

SEQ ID NO: 4740094 - DNA, 25 bp, Homo sapien
gacattcatataaccaggatgccat

SEQ ID NO: 4740095 - DNA, 25 bp, Homo sapien
aagacattcatataaccaggatgcc

SEQ ID NO: 4740096 - DNA, 25 bp, Homo sapien
caaagacattcatataaccaggatg

SEQ ID NO: 4740097 - DNA, 25 bp, Homo sapien
tgtaatcttggctaattcatctatt

SEQ ID NO: 4740098 - DNA, 25 bp, Homo sapien
catgccacaactattgaaaccttgt

SEQ ID NO: 4740099 - DNA, 25 bp, Homo sapien
tagatgctcaacttaatgtcaaggc

SEQ ID NO: 4740100 - DNA, 25 bp, Homo sapien
caacaactgattgtagcaggactaa

SEQ ID NO: 4740101 - DNA, 25 bp, Homo sapien
caaccttgcaatgtctacttaacac

SEQ ID NO: 4740102 - DNA, 25 bp, Homo sapien
tccatgagttaacaacgaaacagtc

SEQ ID NO: 4740103 - DNA, 25 bp, Homo sapien
tagacacctgatgaatagatggagt

SEQ ID NO: 4740104 - DNA, 25 bp, Homo sapien
taggaacgcaattctatcatagaca

SEQ ID NO: 4740105 - DNA, 25 bp, Homo sapien
gcaatcacaccaacaatcaggctgt

SEQ ID NO: 4740106 - DNA, 25 bp, Homo sapien
gcccgcaacctaacagtcccgtcaa

SEQ ID NO: 4740107 - DNA, 25 bp, Homo sapien
gggagtgagccccaaagcccgcaac

SEQ ID NO: 4740108 - DNA, 25 bp, Homo sapien
aagacaatgccgtcgggagtgagcc

SEQ ID NO: 4740109 - DNA, 25 bp, Homo sapien
aactcctcggtctgccctgtctgag

SEQ ID NO: 4740110 - DNA, 25 bp, Homo sapien
tgtggcccgcgcgtcgccagtcccg

SEQ ID NO: 4740111 - DNA, 25 bp, Homo sapien
cgctgtggcccgcgcgtcgccagtc

SEQ ID NO: 4740112 - DNA, 25 bp, Homo sapien
ctgtggcccgcgcgtcgccagtccc

SEQ ID NO: 4740113 - DNA, 25 bp, Homo sapien
gctgtggcccgcgcgtcgccagtcc

SEQ ID NO: 4740114 - DNA, 25 bp, Homo sapien
caaaagggaactcaattatgtggcc

SEQ ID NO: 4740115 - DNA, 25 bp, Homo sapien
gactatgacgtggagatccgcctct

SEQ ID NO: 4740116 - DNA, 25 bp, Homo sapien
cagtcatttactggctggcggaggt

SEQ ID NO: 4740117 - DNA, 25 bp, Homo sapien
ttgtgaaatcggctcaactcccagg

SEQ ID NO: 4740118 - DNA, 25 bp, Homo sapien
tgcagccggaggagttgttttggta

SEQ ID NO: 4740119 - DNA, 25 bp, Homo sapien
tgttttggtagtacgtcgtccttga

SEQ ID NO: 4740120 - DNA, 25 bp, Homo sapien
tggtagtacgtcgtccttgaatcat

SEQ ID NO: 4740121 - DNA, 25 bp, Homo sapien
cagccggaggagttgttttggtagt

SEQ ID NO: 4740122 - DNA, 25 bp, Homo sapien
aaggtagaggagtggtgtattagtc

SEQ ID NO: 4740123 - DNA, 25 bp, Homo sapien
ttacaacaacctcgggaggtaggca

SEQ ID NO: 4740124 - DNA, 25 bp, Homo sapien
gtgatagaatcagcacttgagttgt

SEQ ID NO: 4740125 - DNA, 25 bp, Homo sapien
tagcaaggttaagcggcttgttcaa

SEQ ID NO: 4740126 - DNA, 25 bp, Homo sapien
gatgcatggtaccaagtccctgggc

SEQ ID NO: 4740127 - DNA, 25 bp, Homo sapien
tataccattctgatgtctggaggac

SEQ ID NO: 4740128 - DNA, 25 bp, Homo sapien
tctcggttgcttttacaggctggcg

SEQ ID NO: 4740129 - DNA, 25 bp, Homo sapien
caacactacgtggaagatgccaaga

SEQ ID NO: 4740130 - DNA, 25 bp, Homo sapien
ttcagttaaggcacgaagtctggcc

SEQ ID NO: 4740131 - DNA, 25 bp, Homo sapien
tatttatttcctacgagagtcctgg

SEQ ID NO: 4740132 - DNA, 25 bp, Homo sapien
cagaaaaaactcactccggctgagg

SEQ ID NO: 4740133 - DNA, 25 bp, Homo sapien
cctaagatggacaaagatggccacg

SEQ ID NO: 4740134 - DNA, 25 bp, Homo sapien
taaagtaggcgatctcatccaggtc

SEQ ID NO: 4740135 - DNA, 25 bp, Homo sapien
tcattgactttgatggcggccgcgc

SEQ ID NO: 4740136 - DNA, 25 bp, Homo sapien
tgtagttgacaaaagggtgcaccca

SEQ ID NO: 4740137 - DNA, 25 bp, Homo sapien
tctgttgggcaaaacgcagcacctt

SEQ ID NO: 4740138 - DNA, 25 bp, Homo sapien
gggttctgacgctatgcgtagcagc

SEQ ID NO: 4740139 - DNA, 25 bp, Homo sapien
cctcggggttctgacgctatgcgta

SEQ ID NO: 4740140 - DNA, 25 bp, Homo sapien
ttctgacgctatgcgtagcagccag

SEQ ID NO: 4740141 - DNA, 25 bp, Homo sapien
gatggcctcggggttctgacgctat

SEQ ID NO: 4740142 - DNA, 25 bp, Homo sapien
gctgctaagaaaggagcgggccgtg

SEQ ID NO: 4740143 - DNA, 25 bp, Homo sapien
atctgactgagttcatctcaacctg

SEQ ID NO: 4740144 - DNA, 25 bp, Homo sapien
tagtgggctgctaagaaaggagcgg

SEQ ID NO: 4740145 - DNA, 25 bp, Homo sapien
ctgactgagttcatctcaacctgct

SEQ ID NO: 4740146 - DNA, 25 bp, Homo sapien
cgatcccctgcgcttgaaccagagt

SEQ ID NO: 4740147 - DNA, 25 bp, Homo sapien
cctgcgcttgaaccagagtgaagct

SEQ ID NO: 4740148 - DNA, 25 bp, Homo sapien
gggtgaaagagcttcccgccgatcc

SEQ ID NO: 4740149 - DNA, 25 bp, Homo sapien
tacagcccggcagaagcgggggtga

SEQ ID NO: 4740150 - DNA, 25 bp, Homo sapien
gcccccttggcacagcaagcccagg

SEQ ID NO: 4740151 - DNA, 25 bp, Homo sapien
tttatttattgctctgcccccttgg

SEQ ID NO: 4740152 - DNA, 25 bp, Homo sapien
gggttgaagagtttatttattgctc

SEQ ID NO: 4740153 - DNA, 25 bp, Homo sapien
gagtttatttattgctctgccccct

SEQ ID NO: 4740154 - DNA, 25 bp, Homo sapien
cgatagtcgggataggtctcagaca

SEQ ID NO: 4740155 - DNA, 25 bp, Homo sapien
ctcaggatggataacatagttgttt

SEQ ID NO: 4740156 - DNA, 25 bp, Homo sapien
ctaccagcaacgatagtcgggatag

SEQ ID NO: 4740157 - DNA, 25 bp, Homo sapien
caaactcaggatggataacatagtt

SEQ ID NO: 4740158 - DNA, 25 bp, Homo sapien
gggtcagccgttttggatcctcata

SEQ ID NO: 4740159 - DNA, 25 bp, Homo sapien
tatgtgcctgtcagtgcaccgcgga

SEQ ID NO: 4740160 - DNA, 25 bp, Homo sapien
caaatgagtgtgtgcgcgttagact

SEQ ID NO: 4740161 - DNA, 25 bp, Homo sapien
gaaccaacgcctttggctgtaagcc

SEQ ID NO: 4740162 - DNA, 25 bp, Homo sapien
aaggttcggatatgggtagtatgac

SEQ ID NO: 4740163 - DNA, 25 bp, Homo sapien
ccggtgctcgtagggaggtacacat

SEQ ID NO: 4740164 - DNA, 25 bp, Homo sapien
cattccgggccggtgctcgtaggga

SEQ ID NO: 4740165 - DNA, 25 bp, Homo sapien
tgacggcgggggagttgtaacagca

SEQ ID NO: 4740166 - DNA, 25 bp, Homo sapien
tctccagcagtaggacgaggcatca

SEQ ID NO: 4740167 - DNA, 25 bp, Homo sapien
tgcacaatgaatcaggctctctcgg

SEQ ID NO: 4740168 - DNA, 25 bp, Homo sapien
ttctgccgttgaggaaagagcgctg

SEQ ID NO: 4740169 - DNA, 25 bp, Homo sapien
ttttcttagcagtaacacgcgaggg

SEQ ID NO: 4740170 - DNA, 25 bp, Homo sapien
caggtggtgcgggatccgaggaggc

SEQ ID NO: 4740171 - DNA, 25 bp, Homo sapien
gaggccagagccattctggtaaagt

SEQ ID NO: 4740172 - DNA, 25 bp, Homo sapien
atgaccgcacccactaccgacggtg

SEQ ID NO: 4740173 - DNA, 25 bp, Homo sapien
taaagtggtcaccatttcccggctc

SEQ ID NO: 4740174 - DNA, 25 bp, Homo sapien
gacgggacctccagagcatatagag

SEQ ID NO: 4740175 - DNA, 25 bp, Homo sapien
gggacttggagtaaccttcgtgctg

SEQ ID NO: 4740176 - DNA, 25 bp, Homo sapien
tctcccgcctcagttgttagttcag

SEQ ID NO: 4740177 - DNA, 25 bp, Homo sapien
tagaacctgcgtctctagggccagg

SEQ ID NO: 4740178 - DNA, 25 bp, Homo sapien
agcactttcgtaaccatggaagggc

SEQ ID NO: 4740179 - DNA, 25 bp, Homo sapien
gtagtagtccatcccgcgcagacag

SEQ ID NO: 4740180 - DNA, 25 bp, Homo sapien
cgctggcgtagtagtccatcccgcg

SEQ ID NO: 4740181 - DNA, 25 bp, Homo sapien
tagtggcggcccgagcaagcacttt

SEQ ID NO: 4740182 - DNA, 25 bp, Homo sapien
atcggggcgtgatccgcggcagctg

SEQ ID NO: 4740183 - DNA, 25 bp, Homo sapien
ccgcatcggggcgtgatccgcggca

SEQ ID NO: 4740184 - DNA, 25 bp, Homo sapien
catcggggcgtgatccgcggcagct

SEQ ID NO: 4740185 - DNA, 25 bp, Homo sapien
gcatcggggcgtgatccgcggcagc

SEQ ID NO: 4740186 - DNA, 25 bp, Homo sapien
ggttccgcgacagtgagttcagcat

SEQ ID NO: 4740187 - DNA, 25 bp, Homo sapien
tggttccgcgacagtgagttcagca

SEQ ID NO: 4740188 - DNA, 25 bp, Homo sapien
ctggttccgcgacagtgagttcagc

SEQ ID NO: 4740189 - DNA, 25 bp, Homo sapien
gctccggcctaggagggcattccaa

SEQ ID NO: 4740190 - DNA, 25 bp, Homo sapien
cgtaggcattgagccgctccggcct

SEQ ID NO: 4740191 - DNA, 25 bp, Homo sapien
ccaagggcattcctcgaactgctgt

SEQ ID NO: 4740192 - DNA, 25 bp, Homo sapien
ggagggcattccaagggcattcctc

SEQ ID NO: 4740193 - DNA, 25 bp, Homo sapien
gctacctcaagctctgacctggcag

SEQ ID NO: 4740194 - DNA, 25 bp, Homo sapien
ctggaagcggcacacatgctacctc

SEQ ID NO: 4740195 - DNA, 25 bp, Homo sapien
agagctgctcccttttaggggtcct

SEQ ID NO: 4740196 - DNA, 25 bp, Homo sapien
ggcacacatgctacctcaagctctg

SEQ ID NO: 4740197 - DNA, 25 bp, Homo sapien
cacgccgcaacttctcccgcccttc

SEQ ID NO: 4740198 - DNA, 25 bp, Homo sapien
ctatcgccacgccgcaacttctccc

SEQ ID NO: 4740199 - DNA, 25 bp, Homo sapien
gccacgccgcaacttctcccgccct

SEQ ID NO: 4740200 - DNA, 25 bp, Homo sapien
atcgccacgccgcaacttctcccgc

SEQ ID NO: 4740201 - DNA, 25 bp, Homo sapien
tcacagatgcggaagagctctgggg

SEQ ID NO: 4740202 - DNA, 25 bp, Homo sapien
tcagtcactgtagtttgggaggtgg

SEQ ID NO: 4740203 - DNA, 25 bp, Homo sapien
aagcaatgaggacctaatggtgaaa

SEQ ID NO: 4740204 - DNA, 25 bp, Homo sapien
tggggtatgcgtgtcccagtcccca

SEQ ID NO: 4740205 - DNA, 25 bp, Homo sapien
cagctgctgttgtaaggttccatcc

SEQ ID NO: 4740206 - DNA, 25 bp, Homo sapien
gttgtaaggttccatcctccatgtg

SEQ ID NO: 4740207 - DNA, 25 bp, Homo sapien
cagccgaggaaggtaggtggtatac

SEQ ID NO: 4740208 - DNA, 25 bp, Homo sapien
ggtggtatacttgttgcagcagctg

SEQ ID NO: 4740209 - DNA, 25 bp, Homo sapien
gcagggcttcgggatccacatgtcg

SEQ ID NO: 4740210 - DNA, 25 bp, Homo sapien
taagtgtagtcctgtacagcacatt

SEQ ID NO: 4740211 - DNA, 25 bp, Homo sapien
tggcctgatatggaccccctataag

SEQ ID NO: 4740212 - DNA, 25 bp, Homo sapien
gaaagccagtacttctcaggcaagt

SEQ ID NO: 4740213 - DNA, 25 bp, Homo sapien
agtccaacacactagtgaggagaga

SEQ ID NO: 4740214 - DNA, 25 bp, Homo sapien
ctagtccaacacactagtgaggaga

SEQ ID NO: 4740215 - DNA, 25 bp, Homo sapien
gactagtccaacacactagtgagga

SEQ ID NO: 4740216 - DNA, 25 bp, Homo sapien
taagactagtccaacacactagtga

SEQ ID NO: 4740217 - DNA, 25 bp, Homo sapien
ggccagagtggcctaactcacaatt

SEQ ID NO: 4740218 - DNA, 25 bp, Homo sapien
ttcaaaaacctggagccttatgtcc

SEQ ID NO: 4740219 - DNA, 25 bp, Homo sapien
tgcccttcaggttgggcagcgctct

SEQ ID NO: 4740220 - DNA, 25 bp, Homo sapien
tcctgaaagggcatacgataatata

SEQ ID NO: 4740221 - DNA, 25 bp, Homo sapien
cacaggggtgggtccttatagacct

SEQ ID NO: 4740222 - DNA, 25 bp, Homo sapien
cacacaggggtgggtccttatagac

SEQ ID NO: 4740223 - DNA, 25 bp, Homo sapien
aggcacacaggggtgggtccttata

SEQ ID NO: 4740224 - DNA, 25 bp, Homo sapien
gcacacaggggtgggtccttataga

SEQ ID NO: 4740225 - DNA, 25 bp, Homo sapien
actgtaggtactgataggggtcctg

SEQ ID NO: 4740226 - DNA, 25 bp, Homo sapien
taggtactgataggggtcctggtct

SEQ ID NO: 4740227 - DNA, 25 bp, Homo sapien
gtactgataggggtcctggtcttac

SEQ ID NO: 4740228 - DNA, 25 bp, Homo sapien
tcactgtaggtactgataggggtcc

SEQ ID NO: 4740229 - DNA, 25 bp, Homo sapien
ggtgtggtcttggagatgccgtggt

SEQ ID NO: 4740230 - DNA, 25 bp, Homo sapien
agatgccgtggtgggctctacctgt

SEQ ID NO: 4740231 - DNA, 25 bp, Homo sapien
tggtcttggagatgccgtggtgggc

SEQ ID NO: 4740232 - DNA, 25 bp, Homo sapien
ccgtggtgggctctacctgtcaagg

SEQ ID NO: 4740233 - DNA, 25 bp, Homo sapien
ctggcaggtgcccttagctgctata

SEQ ID NO: 4740234 - DNA, 25 bp, Homo sapien
tagctgctataatcccctcctgcag

SEQ ID NO: 4740235 - DNA, 25 bp, Homo sapien
taatcccctcctgcagaggatctct

SEQ ID NO: 4740236 - DNA, 25 bp, Homo sapien
ggtgcccttagctgctataatcccc

SEQ ID NO: 4740237 - DNA, 25 bp, Homo sapien
ccaaggatgatggtcaatactgcaa

SEQ ID NO: 4740238 - DNA, 25 bp, Homo sapien
tacacgatacacaaccaaggatgat

SEQ ID NO: 4740239 - DNA, 25 bp, Homo sapien
tcattatttgtgttacacgatacac

SEQ ID NO: 4740240 - DNA, 25 bp, Homo sapien
tattatacacggctcatgtcttcca

SEQ ID NO: 4740241 - DNA, 25 bp, Homo sapien
taaattagtgagcacggagaaacct

SEQ ID NO: 4740242 - DNA, 25 bp, Homo sapien
tagtgagcacggagaaacctggctg

SEQ ID NO: 4740243 - DNA, 25 bp, Homo sapien
gagaggagggagtgttaaggcagta

SEQ ID NO: 4740244 - DNA, 25 bp, Homo sapien
tggaaataaattagtgagcacggag

SEQ ID NO: 4740245 - DNA, 25 bp, Homo sapien
gcaagctaaggcctagattcttccc

SEQ ID NO: 4740246 - DNA, 25 bp, Homo sapien
gctaaggcctagattcttccctcca

SEQ ID NO: 4740247 - DNA, 25 bp, Homo sapien
agggtggcaggagggcaagctaagg

SEQ ID NO: 4740248 - DNA, 25 bp, Homo sapien
caggagggcaagctaaggcctagat

SEQ ID NO: 4740249 - DNA, 25 bp, Homo sapien
cacacatgcactgcctcagttggaa

SEQ ID NO: 4740250 - DNA, 25 bp, Homo sapien
cacatgcactgcctcagttggaagc

SEQ ID NO: 4740251 - DNA, 25 bp, Homo sapien
acatgcactgcctcagttggaagcc

SEQ ID NO: 4740252 - DNA, 25 bp, Homo sapien
ccacacatgcactgcctcagttgga

SEQ ID NO: 4740253 - DNA, 25 bp, Homo sapien
caaaggcagcagtctaaatgagccc

SEQ ID NO: 4740254 - DNA, 25 bp, Homo sapien
ccagtatgggccttgtgggtcctgc

SEQ ID NO: 4740255 - DNA, 25 bp, Homo sapien
gagattgaacaatgggcccgagtca

SEQ ID NO: 4740256 - DNA, 25 bp, Homo sapien
cccatgttctagaaaggtgagccaa

SEQ ID NO: 4740257 - DNA, 25 bp, Homo sapien
gagtggatccaccagcacatgtggg

SEQ ID NO: 4740258 - DNA, 25 bp, Homo sapien
gcctgcagcatgtgagtggatccat

SEQ ID NO: 4740259 - DNA, 25 bp, Homo sapien
tgggtgagtctactgcatgcctgca

SEQ ID NO: 4740260 - DNA, 25 bp, Homo sapien
tagcatgagatgatccacctgggcc

SEQ ID NO: 4740261 - DNA, 25 bp, Homo sapien
gcaaatagaaacatgggccggtagg

SEQ ID NO: 4740262 - DNA, 25 bp, Homo sapien
tggattcaccaaagcttgctcctgg

SEQ ID NO: 4740263 - DNA, 25 bp, Homo sapien
catgaacacacagaggtacacgtcc

SEQ ID NO: 4740264 - DNA, 25 bp, Homo sapien
gagagacaggtccaacagagacaca

SEQ ID NO: 4740265 - DNA, 25 bp, Homo sapien
gcaatgactgttatacgaggttggc

SEQ ID NO: 4740266 - DNA, 25 bp, Homo sapien
aatgactgttatacgaggttggcgg

SEQ ID NO: 4740267 - DNA, 25 bp, Homo sapien
gaagcaatgactgttatacgaggtt

SEQ ID NO: 4740268 - DNA, 25 bp, Homo sapien
ggaggaagcaatgactgttatacga

SEQ ID NO: 4740269 - DNA, 25 bp, Homo sapien
gggggcaggcagacgagctgggaag

SEQ ID NO: 4740270 - DNA, 25 bp, Homo sapien
tcggcctctgcccgtcctacccggc

SEQ ID NO: 4740271 - DNA, 25 bp, Homo sapien
ctctgcccgtcctacccggcccttg

SEQ ID NO: 4740272 - DNA, 25 bp, Homo sapien
gtggcaggcggtggaggacgtggcc

SEQ ID NO: 4740273 - DNA, 25 bp, Homo sapien
tgaatgtggcaggcggtggaggacg

SEQ ID NO: 4740274 - DNA, 25 bp, Homo sapien
atgtggcaggcggtggaggacgtgg

SEQ ID NO: 4740275 - DNA, 25 bp, Homo sapien
aggacgtggcctggcagcacatgca

SEQ ID NO: 4740276 - DNA, 25 bp, Homo sapien
aaccggtagccgtccttcagcagct

SEQ ID NO: 4740277 - DNA, 25 bp, Homo sapien
cctcgtcgtcggggatctcatctaa

SEQ ID NO: 4740278 - DNA, 25 bp, Homo sapien
gggatctcatctaaccggtagccgt

SEQ ID NO: 4740279 - DNA, 25 bp, Homo sapien
catctaaccggtagccgtccttcag

SEQ ID NO: 4740280 - DNA, 25 bp, Homo sapien
gaggagtagccggaggaggagtatc

SEQ ID NO: 4740281 - DNA, 25 bp, Homo sapien
gaggaggagtatctagacatgtcaa

SEQ ID NO: 4740282 - DNA, 25 bp, Homo sapien
ctcagcagaggagtagccggaggag

SEQ ID NO: 4740283 - DNA, 25 bp, Homo sapien
gagtatctagacatgtcaaagtcat

SEQ ID NO: 4740284 - DNA, 25 bp, Homo sapien
caggtgtggcctgtacagcccactt

SEQ ID NO: 4740285 - DNA, 25 bp, Homo sapien
ggttcctttgggctgcccagctacc

SEQ ID NO: 4740286 - DNA, 25 bp, Homo sapien
tacagcccacttgtgctatacaggt

SEQ ID NO: 4740287 - DNA, 25 bp, Homo sapien
tgctatacaggttcctttgggctgc

SEQ ID NO: 4740288 - DNA, 25 bp, Homo sapien
ttctcatcagggctctggtcaagtg

SEQ ID NO: 4740289 - DNA, 25 bp, Homo sapien
tgtccgtgtcaagggctaccagtgg

SEQ ID NO: 4740290 - DNA, 25 bp, Homo sapien
gagtagcctttattggggacgacca

SEQ ID NO: 4740291 - DNA, 25 bp, Homo sapien
ctctggtcaagtgaggagtagcctt

SEQ ID NO: 4740292 - DNA, 25 bp, Homo sapien
ggatcctgttaaggctgtctcctct

SEQ ID NO: 4740293 - DNA, 25 bp, Homo sapien
cttggatcctgttaaggctgtctcc

SEQ ID NO: 4740294 - DNA, 25 bp, Homo sapien
ttggatcctgttaaggctgtctcct

SEQ ID NO: 4740295 - DNA, 25 bp, Homo sapien
tggatcctgttaaggctgtctcctc

SEQ ID NO: 4740296 - DNA, 25 bp, Homo sapien
ccattcttcagggagcccttccggg

SEQ ID NO: 4740297 - DNA, 25 bp, Homo sapien
acattgttcttcttgggttgctggt

SEQ ID NO: 4740298 - DNA, 25 bp, Homo sapien
cttgttcgggccatgacattgttct

SEQ ID NO: 4740299 - DNA, 25 bp, Homo sapien
gacagggctacccatgctgccattc

SEQ ID NO: 4740300 - DNA, 25 bp, Homo sapien
cctcttagagtttcaggctcctgca

SEQ ID NO: 4740301 - DNA, 25 bp, Homo sapien
gcctcttagagtttcaggctcctgc

SEQ ID NO: 4740302 - DNA, 25 bp, Homo sapien
agcggggatggtttgtaattcatgg

SEQ ID NO: 4740303 - DNA, 25 bp, Homo sapien
cttggagcggggatggtttgtaatt

SEQ ID NO: 4740304 - DNA, 25 bp, Homo sapien
gcttcacttggagcggggatggttt

SEQ ID NO: 4740305 - DNA, 25 bp, Homo sapien
cagcttcacttggagcggggatggt

SEQ ID NO: 4740306 - DNA, 25 bp, Homo sapien
ccgggcgtcacagtctccgtcagag

SEQ ID NO: 4740307 - DNA, 25 bp, Homo sapien
ggcgtcacagtctccgtcagagatg

SEQ ID NO: 4740308 - DNA, 25 bp, Homo sapien
gtcacagtctccgtcagagatggag

SEQ ID NO: 4740309 - DNA, 25 bp, Homo sapien
acagtctccgtcagagatggaggcg

SEQ ID NO: 4740310 - DNA, 25 bp, Homo sapien
tgtggtccttgaggcctactgggca

SEQ ID NO: 4740311 - DNA, 25 bp, Homo sapien
cctttggaccacaattcaggagggc

SEQ ID NO: 4740312 - DNA, 25 bp, Homo sapien
gggcagttcctgatggtatttgatc

SEQ ID NO: 4740313 - DNA, 25 bp, Homo sapien
tcctttggaccacaattcaggaggg

SEQ ID NO: 4740314 - DNA, 25 bp, Homo sapien
gctgaggggtcccatgcaaagccca

SEQ ID NO: 4740315 - DNA, 25 bp, Homo sapien
gccctaggctgaggggtcccatgca

SEQ ID NO: 4740316 - DNA, 25 bp, Homo sapien
taggctgaggggtcccatgcaaagc

SEQ ID NO: 4740317 - DNA, 25 bp, Homo sapien
cagagccctaggctgaggggtccca

SEQ ID NO: 4740318 - DNA, 25 bp, Homo sapien
aagacttcttatagggataaggtct

SEQ ID NO: 4740319 - DNA, 25 bp, Homo sapien
agacttcttatagggataaggtctt

SEQ ID NO: 4740320 - DNA, 25 bp, Homo sapien
caaagacttcttatagggataaggt

SEQ ID NO: 4740321 - DNA, 25 bp, Homo sapien
tcttcatggtcataggagtgagcct

SEQ ID NO: 4740322 - DNA, 25 bp, Homo sapien
tactaaaagtaagcaccgccaagcc

SEQ ID NO: 4740323 - DNA, 25 bp, Homo sapien
gagtcttttgcgtatactacagcag

SEQ ID NO: 4740324 - DNA, 25 bp, Homo sapien
gaaggattatcacactcgggctaga

SEQ ID NO: 4740325 - DNA, 25 bp, Homo sapien
gggtcatttgcagcaggaccttttc

SEQ ID NO: 4740326 - DNA, 25 bp, Homo sapien
tttgcagcaggaccttttcctttac

SEQ ID NO: 4740327 - DNA, 25 bp, Homo sapien
tcattttggggggtcatttgcagca

SEQ ID NO: 4740328 - DNA, 25 bp, Homo sapien
ccacctcattttggggggtcatttg

SEQ ID NO: 4740329 - DNA, 25 bp, Homo sapien
tgcaaattgtctggatcgagctgct

SEQ ID NO: 4740330 - DNA, 25 bp, Homo sapien
caatagcccagctctagctagctgc

SEQ ID NO: 4740331 - DNA, 25 bp, Homo sapien
gctctagctagctgcaaattgtctg

SEQ ID NO: 4740332 - DNA, 25 bp, Homo sapien
tgtctggatcgagctgctttgacat

SEQ ID NO: 4740333 - DNA, 25 bp, Homo sapien
tcatcttgtgccactcttccccagg

SEQ ID NO: 4740334 - DNA, 25 bp, Homo sapien
tcaatatcctttttaacctcatgct

SEQ ID NO: 4740335 - DNA, 25 bp, Homo sapien
ggcttactagtttgcacactggtct

SEQ ID NO: 4740336 - DNA, 25 bp, Homo sapien
tcatgctccccttctggttaaattt

SEQ ID NO: 4740337 - DNA, 25 bp, Homo sapien
ttgaggtataatgcatgcctttggg

SEQ ID NO: 4740338 - DNA, 25 bp, Homo sapien
catcaatttctttgaccaggaggtt

SEQ ID NO: 4740339 - DNA, 25 bp, Homo sapien
ttccttcaataagggacccagaagc

SEQ ID NO: 4740340 - DNA, 25 bp, Homo sapien
tgaccaggaggttctttgaggtata

SEQ ID NO: 4740341 - DNA, 25 bp, Homo sapien
ggtgcatagcaggaacaagattgtt

SEQ ID NO: 4740342 - DNA, 25 bp, Homo sapien
cacctgggaaaaaatgatagagtca

SEQ ID NO: 4740343 - DNA, 25 bp, Homo sapien
gaaagcatgagctctatcacctggg

SEQ ID NO: 4740344 - DNA, 25 bp, Homo sapien
gcctcctagaagctacagggctctg

SEQ ID NO: 4740345 - DNA, 25 bp, Homo sapien
ctaggctagagtgtaatagtgcaat

SEQ ID NO: 4740346 - DNA, 25 bp, Homo sapien
gctagagtgtaatagtgcaattata

SEQ ID NO: 4740347 - DNA, 25 bp, Homo sapien
gcctaggctagagtgtaatagtgca

SEQ ID NO: 4740348 - DNA, 25 bp, Homo sapien
taggctagagtgtaatagtgcaatt

SEQ ID NO: 4740349 - DNA, 25 bp, Homo sapien
aaataaggatcaaaccagcatttgg

SEQ ID NO: 4740350 - DNA, 25 bp, Homo sapien
tgcctgtgcacctaaccaaagttca

SEQ ID NO: 4740351 - DNA, 25 bp, Homo sapien
caaagttcaccaagagcttcctact

SEQ ID NO: 4740352 - DNA, 25 bp, Homo sapien
cagtaaagtactaaatggctagtgt

SEQ ID NO: 4740353 - DNA, 25 bp, Homo sapien
ataaagtattctcaggccgggcata

SEQ ID NO: 4740354 - DNA, 25 bp, Homo sapien
aggtgcctctggaatacaacctggg

SEQ ID NO: 4740355 - DNA, 25 bp, Homo sapien
aatgtagtggtaggcacacggctca

SEQ ID NO: 4740356 - DNA, 25 bp, Homo sapien
caatgtctatgaccctcaaatgagg

SEQ ID NO: 4740357 - DNA, 25 bp, Homo sapien
attctcccacggttttcttgtcctg

SEQ ID NO: 4740358 - DNA, 25 bp, Homo sapien
ctctttgccccatccgatggcgccc

SEQ ID NO: 4740359 - DNA, 25 bp, Homo sapien
ttttcttgtcctgcaagtccccgtc

SEQ ID NO: 4740360 - DNA, 25 bp, Homo sapien
cacggttttcttgtcctgcaagtcc

SEQ ID NO: 4740361 - DNA, 25 bp, Homo sapien
agcggctgcatctccgagtgcgcgg

SEQ ID NO: 4740362 - DNA, 25 bp, Homo sapien
gcggctgcatctccgagtgcgcggt

SEQ ID NO: 4740363 - DNA, 25 bp, Homo sapien
cagcggctgcatctccgagtgcgcg

SEQ ID NO: 4740364 - DNA, 25 bp, Homo sapien
tggaaccggtcgatctcctccatca

SEQ ID NO: 4740365 - DNA, 25 bp, Homo sapien
ggaaccggtcgatctcctccatcat

SEQ ID NO: 4740366 - DNA, 25 bp, Homo sapien
ctggaaccggtcgatctcctccatc

SEQ ID NO: 4740367 - DNA, 25 bp, Homo sapien
gtgccggcgggcgagcgggccaggg

SEQ ID NO: 4740368 - DNA, 25 bp, Homo sapien
gccggcgggcgagcgggccaggggc

SEQ ID NO: 4740369 - DNA, 25 bp, Homo sapien
tgccggcgggcgagcgggccagggg

SEQ ID NO: 4740370 - DNA, 25 bp, Homo sapien
ggtgccggcgggcgagcgggccagg

SEQ ID NO: 4740371 - DNA, 25 bp, Homo sapien
acgccgacaggaccgcgcggggcgg

SEQ ID NO: 4740372 - DNA, 25 bp, Homo sapien
gcggacgccgacaggaccgcgcggg

SEQ ID NO: 4740373 - DNA, 25 bp, Homo sapien
cgcggccgcggacgccgacaggacc

SEQ ID NO: 4740374 - DNA, 25 bp, Homo sapien
gggcgcggccgcggacgccgacagg

SEQ ID NO: 4740375 - DNA, 25 bp, Homo sapien
ctccccggaccactcgggcgggcag

SEQ ID NO: 4740376 - DNA, 25 bp, Homo sapien
cgagccgcaggtcttgcctcgcctc

SEQ ID NO: 4740377 - DNA, 25 bp, Homo sapien
cggcgtgactccgtgggcttgccta

SEQ ID NO: 4740378 - DNA, 25 bp, Homo sapien
ttgcctagcactaccgcggctgtgg

SEQ ID NO: 4740379 - DNA, 25 bp, Homo sapien
gagaggttcgcagactggctgaggc

SEQ ID NO: 4740380 - DNA, 25 bp, Homo sapien
ggctgtccctaaagaaccgttgcga

SEQ ID NO: 4740381 - DNA, 25 bp, Homo sapien
ccgcgtcagggagttggattctatc

SEQ ID NO: 4740382 - DNA, 25 bp, Homo sapien
agatgattcctgcttctgcgaaggc

SEQ ID NO: 4740383 - DNA, 25 bp, Homo sapien
cataagcaggtaacgtacgcacacc

SEQ ID NO: 4740384 - DNA, 25 bp, Homo sapien
taccacagggccctcaggaagagaa

SEQ ID NO: 4740385 - DNA, 25 bp, Homo sapien
acacctttaattgtgctaccacagg

SEQ ID NO: 4740386 - DNA, 25 bp, Homo sapien
acctttaattgtgctaccacagggc

SEQ ID NO: 4740387 - DNA, 25 bp, Homo sapien
ccacacctttaattgtgctaccaca

SEQ ID NO: 4740388 - DNA, 25 bp, Homo sapien
tcagcctagggaaagagtggacccg

SEQ ID NO: 4740389 - DNA, 25 bp, Homo sapien
tattatccagcaaacactgggagga

SEQ ID NO: 4740390 - DNA, 25 bp, Homo sapien
tccccagcctagagggcctagaggt

SEQ ID NO: 4740391 - DNA, 25 bp, Homo sapien
tggcccttgggatggagcatagtcc

SEQ ID NO: 4740392 - DNA, 25 bp, Homo sapien
cagctccaagcaggcggactcttga

SEQ ID NO: 4740393 - DNA, 25 bp, Homo sapien
gactctgggccgctgggtccagctc

SEQ ID NO: 4740394 - DNA, 25 bp, Homo sapien
gggccactgagctcctattggagcc

SEQ ID NO: 4740395 - DNA, 25 bp, Homo sapien
caagctggctagactctgggccgct

SEQ ID NO: 4740396 - DNA, 25 bp, Homo sapien
ctgaactctgggatcctaattccag

SEQ ID NO: 4740397 - DNA, 25 bp, Homo sapien
aactctgggatcctaattccaggct

SEQ ID NO: 4740398 - DNA, 25 bp, Homo sapien
tgaactctgggatcctaattccagg

SEQ ID NO: 4740399 - DNA, 25 bp, Homo sapien
gaactctgggatcctaattccaggc

SEQ ID NO: 4740400 - DNA, 25 bp, Homo sapien
gggctccaggctaggccaggggcct

SEQ ID NO: 4740401 - DNA, 25 bp, Homo sapien
tcctgggctccaggctaggccaggg

SEQ ID NO: 4740402 - DNA, 25 bp, Homo sapien
ttaggtcctgggctccaggctaggc

SEQ ID NO: 4740403 - DNA, 25 bp, Homo sapien
ggtcctgggctccaggctaggccag

SEQ ID NO: 4740404 - DNA, 25 bp, Homo sapien
gctgcagcaggtagctgccttcatg

SEQ ID NO: 4740405 - DNA, 25 bp, Homo sapien
ggtagctgccttcatggctgggctt

SEQ ID NO: 4740406 - DNA, 25 bp, Homo sapien
ggtggtggggccttctcaggacagg

SEQ ID NO: 4740407 - DNA, 25 bp, Homo sapien
cagcaggtagctgccttcatggctg

SEQ ID NO: 4740408 - DNA, 25 bp, Homo sapien
agaccgttgcagacgatggcgatga

SEQ ID NO: 4740409 - DNA, 25 bp, Homo sapien
caacgtcggcagagcgagaatggca

SEQ ID NO: 4740410 - DNA, 25 bp, Homo sapien
gcccacgagaccgttgcagacgatg

SEQ ID NO: 4740411 - DNA, 25 bp, Homo sapien
ttcagagagagagtcaacgtcggca

SEQ ID NO: 4740412 - DNA, 25 bp, Homo sapien
ggcagtggagatgtctacctgcagt

SEQ ID NO: 4740413 - DNA, 25 bp, Homo sapien
gtctgcacgctcagtgattcctggg

SEQ ID NO: 4740414 - DNA, 25 bp, Homo sapien
tgtgctgtctgcacgctcagtgatt

SEQ ID NO: 4740415 - DNA, 25 bp, Homo sapien
gcaggactctggtatggccggcctt

SEQ ID NO: 4740416 - DNA, 25 bp, Homo sapien
ccggggcagcgggatgctcggcgcc

SEQ ID NO: 4740417 - DNA, 25 bp, Homo sapien
atgctcggcgccgactaaggcttgg

SEQ ID NO: 4740418 - DNA, 25 bp, Homo sapien
gttgagcctggtgcgcgcccgcggg

SEQ ID NO: 4740419 - DNA, 25 bp, Homo sapien
ctgagttgagcctggtgcgcgcccg

SEQ ID NO: 4740420 - DNA, 25 bp, Homo sapien
gcggcgggaggtgggagaccagcag

SEQ ID NO: 4740421 - DNA, 25 bp, Homo sapien
gaggtgggagaccagcagaggcgac

SEQ ID NO: 4740422 - DNA, 25 bp, Homo sapien
gggcggcgggaggtgggagaccagc

SEQ ID NO: 4740423 - DNA, 25 bp, Homo sapien
ggcgggaggtgggagaccagcagag

SEQ ID NO: 4740424 - DNA, 25 bp, Homo sapien
gagctgcgcggtgttcggctgggct

SEQ ID NO: 4740425 - DNA, 25 bp, Homo sapien
gctcggctgcgttcggttgggctcg

SEQ ID NO: 4740426 - DNA, 25 bp, Homo sapien
ggcggtctgcggtgagcgggcacct

SEQ ID NO: 4740427 - DNA, 25 bp, Homo sapien
ctgggctcggctgcgttcggttggg

SEQ ID NO: 4740428 - DNA, 25 bp, Homo sapien
cagtcaatgcactttacaatgggag

SEQ ID NO: 4740429 - DNA, 25 bp, Homo sapien
caatgccgaatcttccagtgtaagt

SEQ ID NO: 4740430 - DNA, 25 bp, Homo sapien
gaatgatgcccttgcttcgccccat

SEQ ID NO: 4740431 - DNA, 25 bp, Homo sapien
tttacaatgggaggcaccatcacat

SEQ ID NO: 4740432 - DNA, 25 bp, Homo sapien
acctcctctcccttcgccttagcat

SEQ ID NO: 4740433 - DNA, 25 bp, Homo sapien
tcccttcgccttagcatagtcctct

SEQ ID NO: 4740434 - DNA, 25 bp, Homo sapien
tctcccttcgccttagcatagtcct

SEQ ID NO: 4740435 - DNA, 25 bp, Homo sapien
ttcgccttagcatagtcctctcaag

SEQ ID NO: 4740436 - DNA, 25 bp, Homo sapien
tccagaaggtcagggtcaggaagat

SEQ ID NO: 4740437 - DNA, 25 bp, Homo sapien
ttaggtttccagaaggtcagggtca

SEQ ID NO: 4740438 - DNA, 25 bp, Homo sapien
gaagatggctgtggttgacttcagc

SEQ ID NO: 4740439 - DNA, 25 bp, Homo sapien
gacttcagctttgggcctgagatcc

SEQ ID NO: 4740440 - DNA, 25 bp, Homo sapien
cccagcccccagcactttcaagttc

SEQ ID NO: 4740441 - DNA, 25 bp, Homo sapien
cccttggaccggcccctctggcagc

SEQ ID NO: 4740442 - DNA, 25 bp, Homo sapien
ttggaccggcccctctggcagcccc

SEQ ID NO: 4740443 - DNA, 25 bp, Homo sapien
ctctccccttggaccggcccctctg

SEQ ID NO: 4740444 - DNA, 25 bp, Homo sapien
acacaggcagcgagctcacaggctc

SEQ ID NO: 4740445 - DNA, 25 bp, Homo sapien
caggcagcgagctcacaggctccgg

SEQ ID NO: 4740446 - DNA, 25 bp, Homo sapien
ctacacaggcagcgagctcacaggc

SEQ ID NO: 4740447 - DNA, 25 bp, Homo sapien
acaggcagcgagctcacaggctccg

SEQ ID NO: 4740448 - DNA, 25 bp, Homo sapien
cccaggaaggattcctgcctagtgt

SEQ ID NO: 4740449 - DNA, 25 bp, Homo sapien
tgtcaccctctttcctggctggctg

SEQ ID NO: 4740450 - DNA, 25 bp, Homo sapien
ccaggaaggattcctgcctagtgtc

SEQ ID NO: 4740451 - DNA, 25 bp, Homo sapien
tgtgggatgtctgtgctgagagctg

SEQ ID NO: 4740452 - DNA, 25 bp, Homo sapien
gcaggcaggcggccgagagggggca

SEQ ID NO: 4740453 - DNA, 25 bp, Homo sapien
taaggcggcttctataagtggggtc

SEQ ID NO: 4740454 - DNA, 25 bp, Homo sapien
agaagtcagagggatcccggagccc

SEQ ID NO: 4740455 - DNA, 25 bp, Homo sapien
tgggacagccaagtgtcctcctctg

SEQ ID NO: 4740456 - DNA, 25 bp, Homo sapien
aagtggggtctggacctaagcaggc

SEQ ID NO: 4740457 - DNA, 25 bp, Homo sapien
ccacaatttctttcctccgccagcc

SEQ ID NO: 4740458 - DNA, 25 bp, Homo sapien
caaccacaatttctttcctccgcca

SEQ ID NO: 4740459 - DNA, 25 bp, Homo sapien
accacaatttctttcctccgccagc

SEQ ID NO: 4740460 - DNA, 25 bp, Homo sapien
aaccacaatttctttcctccgccag

SEQ ID NO: 4740461 - DNA, 25 bp, Homo sapien
gaaatcggatgtgagaggctcccct

SEQ ID NO: 4740462 - DNA, 25 bp, Homo sapien
tgacgtttaatgagaaccgcccact

SEQ ID NO: 4740463 - DNA, 25 bp, Homo sapien
tcctgcccgtgtgcaaaatagaaac

SEQ ID NO: 4740464 - DNA, 25 bp, Homo sapien
gaatgcaaaaggtcctcctgcccgt

SEQ ID NO: 4740465 - DNA, 25 bp, Homo sapien
ctgcatgtcctcatggggtgccggg

SEQ ID NO: 4740466 - DNA, 25 bp, Homo sapien
tgcatgtcctcatggggtgccgggc

SEQ ID NO: 4740467 - DNA, 25 bp, Homo sapien
gatggggacgctgaccaagaagggt

SEQ ID NO: 4740468 - DNA, 25 bp, Homo sapien
agggtcacagatcttcgtggtaggt

SEQ ID NO: 4740469 - DNA, 25 bp, Homo sapien
gggacgctgaccaagaagggtgccg

SEQ ID NO: 4740470 - DNA, 25 bp, Homo sapien
tgaccaagaagggtgccgagggtcc

SEQ ID NO: 4740471 - DNA, 25 bp, Homo sapien
acatgggggaaactcagggcaaggc

SEQ ID NO: 4740472 - DNA, 25 bp, Homo sapien
gggaacatgggggaaactcagggca

SEQ ID NO: 4740473 - DNA, 25 bp, Homo sapien
aacatgggggaaactcagggcaagg

SEQ ID NO: 4740474 - DNA, 25 bp, Homo sapien
ctggggaacatgggggaaactcagg

SEQ ID NO: 4740475 - DNA, 25 bp, Homo sapien
ggataatgtactccttcccggcgta

SEQ ID NO: 4740476 - DNA, 25 bp, Homo sapien
tgtgctgtgccgtcggacagctcca

SEQ ID NO: 4740477 - DNA, 25 bp, Homo sapien
tcccggcgtaggcatctgtgatggt

SEQ ID NO: 4740478 - DNA, 25 bp, Homo sapien
ttcctcagtccagggcgtagcgtgg

SEQ ID NO: 4740479 - DNA, 25 bp, Homo sapien
tgcagccagaccatggggtgggggt

SEQ ID NO: 4740480 - DNA, 25 bp, Homo sapien
ctgcagccagaccatggggtggggg

SEQ ID NO: 4740481 - DNA, 25 bp, Homo sapien
agccagaccatggggtgggggtaag

SEQ ID NO: 4740482 - DNA, 25 bp, Homo sapien
cagccagaccatggggtgggggtaa

SEQ ID NO: 4740483 - DNA, 25 bp, Homo sapien
ggcactggccgggctaccacatttt

SEQ ID NO: 4740484 - DNA, 25 bp, Homo sapien
gtcgagggggtctgccacgtcacct

SEQ ID NO: 4740485 - DNA, 25 bp, Homo sapien
tccagccggcgagggttgctgggca

SEQ ID NO: 4740486 - DNA, 25 bp, Homo sapien
ggtcggtagcgcagaaagaacttga

SEQ ID NO: 4740487 - DNA, 25 bp, Homo sapien
ccagggcattgctgacacttatgga

SEQ ID NO: 4740488 - DNA, 25 bp, Homo sapien
actcgtcaaaggtgatagctgtggc

SEQ ID NO: 4740489 - DNA, 25 bp, Homo sapien
catgtagcgaatgtggcagcggttc

SEQ ID NO: 4740490 - DNA, 25 bp, Homo sapien
tgggtccttctcacagaccataatt

SEQ ID NO: 4740491 - DNA, 25 bp, Homo sapien
tcacattgaaggtgttgggaatgta

SEQ ID NO: 4740492 - DNA, 25 bp, Homo sapien
gcacagtcacattgaaggtgttggg

SEQ ID NO: 4740493 - DNA, 25 bp, Homo sapien
ccagctgcagtagaagcccttgggg

SEQ ID NO: 4740494 - DNA, 25 bp, Homo sapien
gctgcagtagaagcccttggggtaa

SEQ ID NO: 4740495 - DNA, 25 bp, Homo sapien
gggtgaggacagtatggtcagggca

SEQ ID NO: 4740496 - DNA, 25 bp, Homo sapien
ggacagtatggtcagggcattcttg

SEQ ID NO: 4740497 - DNA, 25 bp, Homo sapien
ctgggggtgaggacagtatggtcag

SEQ ID NO: 4740498 - DNA, 25 bp, Homo sapien
ggtcagggcattcttggagctccca

SEQ ID NO: 4740499 - DNA, 25 bp, Homo sapien
caaggtcagacagtaagccagagct

SEQ ID NO: 4740500 - DNA, 25 bp, Homo sapien
gaccagggatccgtaggagcagcta

SEQ ID NO: 4740501 - DNA, 25 bp, Homo sapien
tttgtgtccactcccagaggaagac

SEQ ID NO: 4740502 - DNA, 25 bp, Homo sapien
tgacccgagcaaggaatgtccatct

SEQ ID NO: 4740503 - DNA, 25 bp, Homo sapien
ttgtgtgtcactttcccattccttc

SEQ ID NO: 4740504 - DNA, 25 bp, Homo sapien
ttcacctgccaaacaaactacttgc

SEQ ID NO: 4740505 - DNA, 25 bp, Homo sapien
cattccttcacggtatttccttcac

SEQ ID NO: 4740506 - DNA, 25 bp, Homo sapien
tgggatctgattctagggaaaccca

SEQ ID NO: 4740507 - DNA, 25 bp, Homo sapien
gcaggacttggtggcgcaggtgcca

SEQ ID NO: 4740508 - DNA, 25 bp, Homo sapien
ttggtggcgcaggtgccaggagtca

SEQ ID NO: 4740509 - DNA, 25 bp, Homo sapien
agtcacggtggaagcaggcgtagag

SEQ ID NO: 4740510 - DNA, 25 bp, Homo sapien
acggtggaagcaggcgtagaggcca

SEQ ID NO: 4740511 - DNA, 25 bp, Homo sapien
aggtctgtcccatttacccgccacg

SEQ ID NO: 4740512 - DNA, 25 bp, Homo sapien
gtcccacatggcagtgtcacgtcag

SEQ ID NO: 4740513 - DNA, 25 bp, Homo sapien
cgtcagagcccaggcgctcgtactg

SEQ ID NO: 4740514 - DNA, 25 bp, Homo sapien
catggcagtgtcacgtcagagccca

SEQ ID NO: 4740515 - DNA, 25 bp, Homo sapien
tcacaggtcacagcccggcccagca

SEQ ID NO: 4740516 - DNA, 25 bp, Homo sapien
aagtcacaggtcacagcccggccca

SEQ ID NO: 4740517 - DNA, 25 bp, Homo sapien
acccgcaggcgagcgtgctcagaca

SEQ ID NO: 4740518 - DNA, 25 bp, Homo sapien
caggcgagcgtgctcagacaagagc

SEQ ID NO: 4740519 - DNA, 25 bp, Homo sapien
ggttcttggccctgaagcggtgaca

SEQ ID NO: 4740520 - DNA, 25 bp, Homo sapien
agggacagagctgacggctccctca

SEQ ID NO: 4740521 - DNA, 25 bp, Homo sapien
tgaggtcatggacatggagaacaca

SEQ ID NO: 4740522 - DNA, 25 bp, Homo sapien
cgtgggtgcccctactgatgtgctg

SEQ ID NO: 4740523 - DNA, 25 bp, Homo sapien
ccccgggcatcccaaagcaacttca

SEQ ID NO: 4740524 - DNA, 25 bp, Homo sapien
cgggcatcccaaagcaacttcactt

SEQ ID NO: 4740525 - DNA, 25 bp, Homo sapien
gaccacatgtcagaaacagtccccc

SEQ ID NO: 4740526 - DNA, 25 bp, Homo sapien
acacacaggctcacagggggaccac

SEQ ID NO: 4740527 - DNA, 25 bp, Homo sapien
ctctgggcgtagacaactgcggcgg

SEQ ID NO: 4740528 - DNA, 25 bp, Homo sapien
tgtgtctctgggcgtagacaactgc

SEQ ID NO: 4740529 - DNA, 25 bp, Homo sapien
tctctgggcgtagacaactgcggcg

SEQ ID NO: 4740530 - DNA, 25 bp, Homo sapien
tgtctctgggcgtagacaactgcgg

SEQ ID NO: 4740531 - DNA, 25 bp, Homo sapien
cagccacgggagacgggtgctgctg

SEQ ID NO: 4740532 - DNA, 25 bp, Homo sapien
aaagtcgcctccatcagcctgatga

SEQ ID NO: 4740533 - DNA, 25 bp, Homo sapien
cctgatgagttactgtaagggccgg

SEQ ID NO: 4740534 - DNA, 25 bp, Homo sapien
gggtggcttcttcatcaaagtcgcc

SEQ ID NO: 4740535 - DNA, 25 bp, Homo sapien
tgtgacctccacagccggagatggg

SEQ ID NO: 4740536 - DNA, 25 bp, Homo sapien
tgttgtgacctccacagccggagat

SEQ ID NO: 4740537 - DNA, 25 bp, Homo sapien
gctgttgtgacctccacagccggag

SEQ ID NO: 4740538 - DNA, 25 bp, Homo sapien
ctgctgttgtgacctccacagccgg

SEQ ID NO: 4740539 - DNA, 25 bp, Homo sapien
gacactggcattcagagcctaccat

SEQ ID NO: 4740540 - DNA, 25 bp, Homo sapien
ggcagcctctcgcagacactggcat

SEQ ID NO: 4740541 - DNA, 25 bp, Homo sapien
cgcagacactggcattcagagccta

SEQ ID NO: 4740542 - DNA, 25 bp, Homo sapien
gcctctcgcagacactggcattcag

SEQ ID NO: 4740543 - DNA, 25 bp, Homo sapien
ccgtcggtgcctccggcgctccgtg

SEQ ID NO: 4740544 - DNA, 25 bp, Homo sapien
cgcaggcgccccgtcggtgcctccg

SEQ ID NO: 4740545 - DNA, 25 bp, Homo sapien
tgcctccggcgctccgtgggtccgc

SEQ ID NO: 4740546 - DNA, 25 bp, Homo sapien
tgggtccccacgcaggcgccccgtc

SEQ ID NO: 4740547 - DNA, 25 bp, Homo sapien
gggggcaagatgaggtgacaaggct

SEQ ID NO: 4740548 - DNA, 25 bp, Homo sapien
ttccaaaaccaagggggcaagatga

SEQ ID NO: 4740549 - DNA, 25 bp, Homo sapien
gggcaagatgaggtgacaaggctag

SEQ ID NO: 4740550 - DNA, 25 bp, Homo sapien
ggcaagatgaggtgacaaggctaga

SEQ ID NO: 4740551 - DNA, 25 bp, Homo sapien
atctgccaaaggtatgattaggtgc

SEQ ID NO: 4740552 - DNA, 25 bp, Homo sapien
cagggtccaactgctcccttgaaaa

SEQ ID NO: 4740553 - DNA, 25 bp, Homo sapien
tctataagaccccaggagatcctca

SEQ ID NO: 4740554 - DNA, 25 bp, Homo sapien
tatatctgccaaaggtatgattagg

SEQ ID NO: 4740555 - DNA, 25 bp, Homo sapien
ggtaaaagggactgatgacctcagt

SEQ ID NO: 4740556 - DNA, 25 bp, Homo sapien
tgtgctttgggactctctttgccct

SEQ ID NO: 4740557 - DNA, 25 bp, Homo sapien
cagagtgcctagctctggtgacccc

SEQ ID NO: 4740558 - DNA, 25 bp, Homo sapien
tgtgggtttggtcacccagggccac

SEQ ID NO: 4740559 - DNA, 25 bp, Homo sapien
gcgagcgaggcagggagcgcggagc

SEQ ID NO: 4740560 - DNA, 25 bp, Homo sapien
cgccggatcccaccgccgagcctcg

SEQ ID NO: 4740561 - DNA, 25 bp, Homo sapien
ccacccgggcttcgcgccgcgcctt

SEQ ID NO: 4740562 - DNA, 25 bp, Homo sapien
gcggagctagcaccgcccgccggat

SEQ ID NO: 4740563 - DNA, 25 bp, Homo sapien
ctcgggcgcgccctcaagacggctg

SEQ ID NO: 4740564 - DNA, 25 bp, Homo sapien
ttctcgggcgcgccctcaagacggc

SEQ ID NO: 4740565 - DNA, 25 bp, Homo sapien
cctttctcgggcgcgccctcaagac

SEQ ID NO: 4740566 - DNA, 25 bp, Homo sapien
tttctcgggcgcgccctcaagacgg

SEQ ID NO: 4740567 - DNA, 25 bp, Homo sapien
cagaccgggattagactgtggacgc

SEQ ID NO: 4740568 - DNA, 25 bp, Homo sapien
ccgtgccgcagaccgggattagact

SEQ ID NO: 4740569 - DNA, 25 bp, Homo sapien
cttcccgtgccgcagaccgggatta

SEQ ID NO: 4740570 - DNA, 25 bp, Homo sapien
ccgcagaccgggattagactgtgga

SEQ ID NO: 4740571 - DNA, 25 bp, Homo sapien
taagaccaccagggataagaaactg

SEQ ID NO: 4740572 - DNA, 25 bp, Homo sapien
tgcaggggttgaagagtctgtgttc

SEQ ID NO: 4740573 - DNA, 25 bp, Homo sapien
ctgcaggggttgaagagtctgtgtt

SEQ ID NO: 4740574 - DNA, 25 bp, Homo sapien
gggataagaaactgcaggggttgaa

SEQ ID NO: 4740575 - DNA, 25 bp, Homo sapien
ccagatgtcatttccatgtcactgt

SEQ ID NO: 4740576 - DNA, 25 bp, Homo sapien
ggtggggcgaacacaagaaatccag

SEQ ID NO: 4740577 - DNA, 25 bp, Homo sapien
atccagatgtcatttccatgtcact

SEQ ID NO: 4740578 - DNA, 25 bp, Homo sapien
tggtccaaaaagctccttcttggtg

SEQ ID NO: 4740579 - DNA, 25 bp, Homo sapien
tacatcctttctatttgaataattc

SEQ ID NO: 4740580 - DNA, 25 bp, Homo sapien
aacagggagggcagcgccaaatttg

SEQ ID NO: 4740581 - DNA, 25 bp, Homo sapien
acagggagggcagcgccaaatttgc

SEQ ID NO: 4740582 - DNA, 25 bp, Homo sapien
ttctatttgaataattcaacaggtt

SEQ ID NO: 4740583 - DNA, 25 bp, Homo sapien
gcctttcttcaggttatgctcctct

SEQ ID NO: 4740584 - DNA, 25 bp, Homo sapien
cttcaggttatgctcctctgcctgc

SEQ ID NO: 4740585 - DNA, 25 bp, Homo sapien
gatgcctttccctcagcgtcagtcc

SEQ ID NO: 4740586 - DNA, 25 bp, Homo sapien
tgcctttccctcagcgtcagtcctg

SEQ ID NO: 4740587 - DNA, 25 bp, Homo sapien
gtctctgtctccagaccctccagcc

SEQ ID NO: 4740588 - DNA, 25 bp, Homo sapien
ctctgtctccagaccctccagccat

SEQ ID NO: 4740589 - DNA, 25 bp, Homo sapien
tctctgtctccagaccctccagcca

SEQ ID NO: 4740590 - DNA, 25 bp, Homo sapien
gttgagcagtcacaacgcttctcag

SEQ ID NO: 4740591 - DNA, 25 bp, Homo sapien
ggaagcatgatagggaggtccactt

SEQ ID NO: 4740592 - DNA, 25 bp, Homo sapien
gcttctcagaaaaggcacaagcacc

SEQ ID NO: 4740593 - DNA, 25 bp, Homo sapien
gaggaagcccttatttagcaatgca

SEQ ID NO: 4740594 - DNA, 25 bp, Homo sapien
gatcgggtgtctcgagcccttcttc

SEQ ID NO: 4740595 - DNA, 25 bp, Homo sapien
ctgaaggaaacgtagcttggtgagc

SEQ ID NO: 4740596 - DNA, 25 bp, Homo sapien
gacccagctgtcctcagtctgaagg

SEQ ID NO: 4740597 - DNA, 25 bp, Homo sapien
ttcttcgggaacgagggccacagct

SEQ ID NO: 4740598 - DNA, 25 bp, Homo sapien
cagcaggttgcgaattttgctgcca

SEQ ID NO: 4740599 - DNA, 25 bp, Homo sapien
ccaaccccagcaggttgcgaatttt

SEQ ID NO: 4740600 - DNA, 25 bp, Homo sapien
tgagaacactacatgccgagcactg

SEQ ID NO: 4740601 - DNA, 25 bp, Homo sapien
cagaacctgagaacactacatgccg

SEQ ID NO: 4740602 - DNA, 25 bp, Homo sapien
agagccagctttccggtagtgctcc

SEQ ID NO: 4740603 - DNA, 25 bp, Homo sapien
tacagagccagctttccggtagtgc

SEQ ID NO: 4740604 - DNA, 25 bp, Homo sapien
acagagccagctttccggtagtgct

SEQ ID NO: 4740605 - DNA, 25 bp, Homo sapien
tctacagagccagctttccggtagt

SEQ ID NO: 4740606 - DNA, 25 bp, Homo sapien
tgtcttgtctgtgactctcgctgcc

SEQ ID NO: 4740607 - DNA, 25 bp, Homo sapien
tcttgtctgtgactctcgctgccca

SEQ ID NO: 4740608 - DNA, 25 bp, Homo sapien
ctgtcttgtctgtgactctcgctgc

SEQ ID NO: 4740609 - DNA, 25 bp, Homo sapien
gtcttgtctgtgactctcgctgccc

SEQ ID NO: 4740610 - DNA, 25 bp, Homo sapien
ccatccaggatatggccctgctccc

SEQ ID NO: 4740611 - DNA, 25 bp, Homo sapien
agcatcaggtaagtgctaagcaatg

SEQ ID NO: 4740612 - DNA, 25 bp, Homo sapien
aggtaagtgctaagcaatgtgcccc

SEQ ID NO: 4740613 - DNA, 25 bp, Homo sapien
tcaggtaagtgctaagcaatgtgcc

SEQ ID NO: 4740614 - DNA, 25 bp, Homo sapien
cagaacggatcccctctcccagaga

SEQ ID NO: 4740615 - DNA, 25 bp, Homo sapien
acagaacggatcccctctcccagag

SEQ ID NO: 4740616 - DNA, 25 bp, Homo sapien
agccaagaacccttatccagtgctg

SEQ ID NO: 4740617 - DNA, 25 bp, Homo sapien
ttatccagtgctgcccccaaacaga

SEQ ID NO: 4740618 - DNA, 25 bp, Homo sapien
atatcaacccaggtcactcagaaac

SEQ ID NO: 4740619 - DNA, 25 bp, Homo sapien
caagacagccttggccgtttccata

SEQ ID NO: 4740620 - DNA, 25 bp, Homo sapien
catagccacggtctcttccagggtc

SEQ ID NO: 4740621 - DNA, 25 bp, Homo sapien
caaggtcaatctatatcaacccagg

SEQ ID NO: 4740622 - DNA, 25 bp, Homo sapien
agccgcctcacgcacgatccggagc

SEQ ID NO: 4740623 - DNA, 25 bp, Homo sapien
gaagccgcctcacgcacgatccgga

SEQ ID NO: 4740624 - DNA, 25 bp, Homo sapien
cgaagccgcctcacgcacgatccgg

SEQ ID NO: 4740625 - DNA, 25 bp, Homo sapien
cgcctcacgcacgatccggagccaa

SEQ ID NO: 4740626 - DNA, 25 bp, Homo sapien
gaccaggatgagtttagttcccagt

SEQ ID NO: 4740627 - DNA, 25 bp, Homo sapien
tgagagctctacacctgccagaaag

SEQ ID NO: 4740628 - DNA, 25 bp, Homo sapien
tccatcctagaccaagaagccagca

SEQ ID NO: 4740629 - DNA, 25 bp, Homo sapien
caaacgattaggcaggctgacacct

SEQ ID NO: 4740630 - DNA, 25 bp, Homo sapien
tccaactttagagcccagagtacag

SEQ ID NO: 4740631 - DNA, 25 bp, Homo sapien
taaatacaaagcttcctctgccttg

SEQ ID NO: 4740632 - DNA, 25 bp, Homo sapien
gccttgtaacaaaggcaggttggca

SEQ ID NO: 4740633 - DNA, 25 bp, Homo sapien
ggtgggccttgaagccaataaatac

SEQ ID NO: 4740634 - DNA, 25 bp, Homo sapien
tctagctggcaaagtagctcatccc

SEQ ID NO: 4740635 - DNA, 25 bp, Homo sapien
ttgcgtggcggcctctagctggcaa

SEQ ID NO: 4740636 - DNA, 25 bp, Homo sapien
tggcaaagtagctcatcccactgca

SEQ ID NO: 4740637 - DNA, 25 bp, Homo sapien
ccactgcacgaattgcttggagaga

SEQ ID NO: 4740638 - DNA, 25 bp, Homo sapien
tgtaggtcaaggtgagaataggaat

SEQ ID NO: 4740639 - DNA, 25 bp, Homo sapien
tggttgtaggtcaaggtgagaatag

SEQ ID NO: 4740640 - DNA, 25 bp, Homo sapien
ctggttgtaggtcaaggtgagaata

SEQ ID NO: 4740641 - DNA, 25 bp, Homo sapien
gttgtaggtcaaggtgagaatagga

SEQ ID NO: 4740642 - DNA, 25 bp, Homo sapien
acataggtgggtaggataggatgag

SEQ ID NO: 4740643 - DNA, 25 bp, Homo sapien
cataggtgggtaggataggatgaga

SEQ ID NO: 4740644 - DNA, 25 bp, Homo sapien
aggtgggtaggataggatgagagag

SEQ ID NO: 4740645 - DNA, 25 bp, Homo sapien
tggaaagtggggaacaggcaaacat

SEQ ID NO: 4740646 - DNA, 25 bp, Homo sapien
gcttagggacagcacccattagggt

SEQ ID NO: 4740647 - DNA, 25 bp, Homo sapien
aaaggacagggcttagggacagcac

SEQ ID NO: 4740648 - DNA, 25 bp, Homo sapien
cttagggacagcacccattagggtc

SEQ ID NO: 4740649 - DNA, 25 bp, Homo sapien
acaaaaggacagggcttagggacag

SEQ ID NO: 4740650 - DNA, 25 bp, Homo sapien
ctgtagggccaaagtgtagcacaga

SEQ ID NO: 4740651 - DNA, 25 bp, Homo sapien
tgtagggccaaagtgtagcacagaa

SEQ ID NO: 4740652 - DNA, 25 bp, Homo sapien
tcctgcctcatcacggactcccact

SEQ ID NO: 4740653 - DNA, 25 bp, Homo sapien
ttcctgcctcatcacggactcccac

SEQ ID NO: 4740654 - DNA, 25 bp, Homo sapien
aaagcccacatcttccactaaactt

SEQ ID NO: 4740655 - DNA, 25 bp, Homo sapien
tgctgaggttacaacagaaaggcct

SEQ ID NO: 4740656 - DNA, 25 bp, Homo sapien
gaatagtgaaaaaagagcccctcta

SEQ ID NO: 4740657 - DNA, 25 bp, Homo sapien
tatggtgtcccaataaagtcctgct

SEQ ID NO: 4740658 - DNA, 25 bp, Homo sapien
tttgtacatgaacctaggcaagtcc

SEQ ID NO: 4740659 - DNA, 25 bp, Homo sapien
tgaatgtggatctgggccaagcgct

SEQ ID NO: 4740660 - DNA, 25 bp, Homo sapien
gaatgtggatctgggccaagcgctg

SEQ ID NO: 4740661 - DNA, 25 bp, Homo sapien
tgtggatctgggccaagcgctgcag

SEQ ID NO: 4740662 - DNA, 25 bp, Homo sapien
aatgtggatctgggccaagcgctgc

SEQ ID NO: 4740663 - DNA, 25 bp, Homo sapien
gaagatggatgccaggtccctaagc

SEQ ID NO: 4740664 - DNA, 25 bp, Homo sapien
catgctgggctcaaagcttaaggct

SEQ ID NO: 4740665 - DNA, 25 bp, Homo sapien
ctgtcagatactcagcgggcagctg

SEQ ID NO: 4740666 - DNA, 25 bp, Homo sapien
ggagaagctaaacaaacgccagact

SEQ ID NO: 4740667 - DNA, 25 bp, Homo sapien
gattcaattaaagccactatctgct

SEQ ID NO: 4740668 - DNA, 25 bp, Homo sapien
tcacatacattcatggacctggcag

SEQ ID NO: 4740669 - DNA, 25 bp, Homo sapien
gatagtaaaatctgggttctgcagc

SEQ ID NO: 4740670 - DNA, 25 bp, Homo sapien
gacaagatggatatctggattcaat

SEQ ID NO: 4740671 - DNA, 25 bp, Homo sapien
tagtgaagctataaccccagagaga

SEQ ID NO: 4740672 - DNA, 25 bp, Homo sapien
tacctccccaaccagagtagtgaag

SEQ ID NO: 4740673 - DNA, 25 bp, Homo sapien
tgcctgaggtcctaaaactgggctc

SEQ ID NO: 4740674 - DNA, 25 bp, Homo sapien
gcttaggctagtgttctcaggccca

SEQ ID NO: 4740675 - DNA, 25 bp, Homo sapien
gtccagcatgggcaccaaggcattc

SEQ ID NO: 4740676 - DNA, 25 bp, Homo sapien
ccagcatgggcaccaaggcattcac

SEQ ID NO: 4740677 - DNA, 25 bp, Homo sapien
tccagcatgggcaccaaggcattca

SEQ ID NO: 4740678 - DNA, 25 bp, Homo sapien
ctaatcagcccatgtaagggcctga

SEQ ID NO: 4740679 - DNA, 25 bp, Homo sapien
atggacaagatagttgcagtgaagc

SEQ ID NO: 4740680 - DNA, 25 bp, Homo sapien
agtgaagcaaacctgggcattgcta

SEQ ID NO: 4740681 - DNA, 25 bp, Homo sapien
caaacctgggcattgctaatcagcc

SEQ ID NO: 4740682 - DNA, 25 bp, Homo sapien
tacactgaggttccaaagtaggcaa

SEQ ID NO: 4740683 - DNA, 25 bp, Homo sapien
gctaggccctgtatgcacacgggat

SEQ ID NO: 4740684 - DNA, 25 bp, Homo sapien
gacccggccgactgaaaggctttga

SEQ ID NO: 4740685 - DNA, 25 bp, Homo sapien
taaacttggtgcttgagcgatggca

SEQ ID NO: 4740686 - DNA, 25 bp, Homo sapien
ttgatagaacactggactagctccc

SEQ ID NO: 4740687 - DNA, 25 bp, Homo sapien
tgatagaacactggactagctccca

SEQ ID NO: 4740688 - DNA, 25 bp, Homo sapien
tattgatagaacactggactagctc

SEQ ID NO: 4740689 - DNA, 25 bp, Homo sapien
aactattgatagaacactggactag

SEQ ID NO: 4740690 - DNA, 25 bp, Homo sapien
ataggatcctcaacccagaaccagg

SEQ ID NO: 4740691 - DNA, 25 bp, Homo sapien
tgtctactagaggatccataggatc

SEQ ID NO: 4740692 - DNA, 25 bp, Homo sapien
gcatccagggcttgtatccaccaga

SEQ ID NO: 4740693 - DNA, 25 bp, Homo sapien
gaaccaggccacaattccagagagc

SEQ ID NO: 4740694 - DNA, 25 bp, Homo sapien
tcaggtatggcaatgcggtcgatgt

SEQ ID NO: 4740695 - DNA, 25 bp, Homo sapien
aatgcggtcgatgtactcaggatcc

SEQ ID NO: 4740696 - DNA, 25 bp, Homo sapien
tgtactcaggatccaggtacttgat

SEQ ID NO: 4740697 - DNA, 25 bp, Homo sapien
gatgaattgcagcttagaggcatca

SEQ ID NO: 4740698 - DNA, 25 bp, Homo sapien
tgctggaaatgttccccaaagccac

SEQ ID NO: 4740699 - DNA, 25 bp, Homo sapien
cctcttgctggaaatgttccccaaa

SEQ ID NO: 4740700 - DNA, 25 bp, Homo sapien
acctgcaccttgaccaggccgtcag

SEQ ID NO: 4740701 - DNA, 25 bp, Homo sapien
tttgtagagaatcttcaccctctcc

SEQ ID NO: 4740702 - DNA, 25 bp, Homo sapien
ttccaggaatccttaaagtggagag

SEQ ID NO: 4740703 - DNA, 25 bp, Homo sapien
ccaggaatccttaaagtggagagag

SEQ ID NO: 4740704 - DNA, 25 bp, Homo sapien
tccactcgggcctgtagccgctgca

SEQ ID NO: 4740705 - DNA, 25 bp, Homo sapien
gctgcaagtcagtcagacccgccat

SEQ ID NO: 4740706 - DNA, 25 bp, Homo sapien
ggcccgtacacccagcgctccagct

SEQ ID NO: 4740707 - DNA, 25 bp, Homo sapien
cagctcttccactcgggcctgtagc

SEQ ID NO: 4740708 - DNA, 25 bp, Homo sapien
cggccaggaaacagccagagggcgg

SEQ ID NO: 4740709 - DNA, 25 bp, Homo sapien
ctcggccaggaaacagccagagggc

SEQ ID NO: 4740710 - DNA, 25 bp, Homo sapien
cgctactaccgacccacctcggcca

SEQ ID NO: 4740711 - DNA, 25 bp, Homo sapien
cacctcggccaggaaacagccagag

SEQ ID NO: 4740712 - DNA, 25 bp, Homo sapien
cagggctgactcaaaagggtagggt

SEQ ID NO: 4740713 - DNA, 25 bp, Homo sapien
ttggctcctgaagagaagcagggct

SEQ ID NO: 4740714 - DNA, 25 bp, Homo sapien
gaagcagggctgactcaaaagggta

SEQ ID NO: 4740715 - DNA, 25 bp, Homo sapien
agagaagcagggctgactcaaaagg

SEQ ID NO: 4740716 - DNA, 25 bp, Homo sapien
ggcaagatgctggaagggggccctg

SEQ ID NO: 4740717 - DNA, 25 bp, Homo sapien
tcagggcaagatgctggaagggggc

SEQ ID NO: 4740718 - DNA, 25 bp, Homo sapien
caagatgctggaagggggccctgtg

SEQ ID NO: 4740719 - DNA, 25 bp, Homo sapien
agggcaagatgctggaagggggccc

SEQ ID NO: 4740720 - DNA, 25 bp, Homo sapien
ggctggcggcgggcaaagaggacac

SEQ ID NO: 4740721 - DNA, 25 bp, Homo sapien
cagtgtagaccaccccgttgatctc

SEQ ID NO: 4740722 - DNA, 25 bp, Homo sapien
tgccagattaagaggcccatccagc

SEQ ID NO: 4740723 - DNA, 25 bp, Homo sapien
gccactgcctgccagattaagaggc

SEQ ID NO: 4740724 - DNA, 25 bp, Homo sapien
cccgttgatctctagggccatgttg

SEQ ID NO: 4740725 - DNA, 25 bp, Homo sapien
tcccgtgtaggtcccagtgccaggc

SEQ ID NO: 4740726 - DNA, 25 bp, Homo sapien
catgcaaggtcgaggtgggtccata

SEQ ID NO: 4740727 - DNA, 25 bp, Homo sapien
gggctcctctggtgccaatttctcc

SEQ ID NO: 4740728 - DNA, 25 bp, Homo sapien
tgggtccataggccccatcagcaca

SEQ ID NO: 4740729 - DNA, 25 bp, Homo sapien
gagtctcgcactcgtacgggtacag

SEQ ID NO: 4740730 - DNA, 25 bp, Homo sapien
ggactcagctgagcgcatgcatgcg

SEQ ID NO: 4740731 - DNA, 25 bp, Homo sapien
ttcttaatagggcttggactcagct

SEQ ID NO: 4740732 - DNA, 25 bp, Homo sapien
ccctgccaagccgaagagcggagta

SEQ ID NO: 4740733 - DNA, 25 bp, Homo sapien
tcaccaggcgaaacagagcgtacag

SEQ ID NO: 4740734 - DNA, 25 bp, Homo sapien
cgccatgatgggcacgcggttcact

SEQ ID NO: 4740735 - DNA, 25 bp, Homo sapien
cacactttgcggttgatgacttcca

SEQ ID NO: 4740736 - DNA, 25 bp, Homo sapien
tcgagcacctgcttcgccatgatgg

SEQ ID NO: 4740737 - DNA, 25 bp, Homo sapien
cgtcaggacactgagacgaagaccc

SEQ ID NO: 4740738 - DNA, 25 bp, Homo sapien
caggacactgagacgaagaccctgt

SEQ ID NO: 4740739 - DNA, 25 bp, Homo sapien
gtggggagcgggctgccgtcaggac

SEQ ID NO: 4740740 - DNA, 25 bp, Homo sapien
ggagcgggctgccgtcaggacactg

SEQ ID NO: 4740741 - DNA, 25 bp, Homo sapien
ccagtgggctggccactaattaatc

SEQ ID NO: 4740742 - DNA, 25 bp, Homo sapien
ttgcatgaagctaaacaggtcatcc

SEQ ID NO: 4740743 - DNA, 25 bp, Homo sapien
ccctcttttgcatgaagctaaacag

SEQ ID NO: 4740744 - DNA, 25 bp, Homo sapien
catgaagctaaacaggtcatccaga

SEQ ID NO: 4740745 - DNA, 25 bp, Homo sapien
tcttggggtctgcatcgagctcata

SEQ ID NO: 4740746 - DNA, 25 bp, Homo sapien
tgttcctcgtaggtccactcgtggg

SEQ ID NO: 4740747 - DNA, 25 bp, Homo sapien
ctgcttgaattgttcctcgtaggtc

SEQ ID NO: 4740748 - DNA, 25 bp, Homo sapien
gcttgaattgttcctcgtaggtcca

SEQ ID NO: 4740749 - DNA, 25 bp, Homo sapien
gaattgttcctcgtaggtccactcg

SEQ ID NO: 4740750 - DNA, 25 bp, Homo sapien
ggcccctggacggctctcctcagct

SEQ ID NO: 4740751 - DNA, 25 bp, Homo sapien
gggcccctggacggctctcctcagc

SEQ ID NO: 4740752 - DNA, 25 bp, Homo sapien
gcccctggacggctctcctcagctg

SEQ ID NO: 4740753 - DNA, 25 bp, Homo sapien
ctccatgacagcttccaggcgcagt

SEQ ID NO: 4740754 - DNA, 25 bp, Homo sapien
gggccagccgagctgcctgctgctt

SEQ ID NO: 4740755 - DNA, 25 bp, Homo sapien
tccaggcgcagtcccccagctgagg

SEQ ID NO: 4740756 - DNA, 25 bp, Homo sapien
ctgagggggtccctggtaccaggcg

SEQ ID NO: 4740757 - DNA, 25 bp, Homo sapien
atctgccgctctcagctccccaaca

SEQ ID NO: 4740758 - DNA, 25 bp, Homo sapien
ctctcagctccccaacaggtgtctc

SEQ ID NO: 4740759 - DNA, 25 bp, Homo sapien
ggatctgccgctctcagctccccaa

SEQ ID NO: 4740760 - DNA, 25 bp, Homo sapien
tcagctccccaacaggtgtctccca

SEQ ID NO: 4740761 - DNA, 25 bp, Homo sapien
cttctttccagccagcttcgggggc

SEQ ID NO: 4740762 - DNA, 25 bp, Homo sapien
tccagccagcttcgggggcaggggg

SEQ ID NO: 4740763 - DNA, 25 bp, Homo sapien
ctttccagccagcttcgggggcagg

SEQ ID NO: 4740764 - DNA, 25 bp, Homo sapien
ttctttccagccagcttcgggggca

SEQ ID NO: 4740765 - DNA, 25 bp, Homo sapien
aagttcaggcgcatagcttcccagt

SEQ ID NO: 4740766 - DNA, 25 bp, Homo sapien
atggcctgggcacgctgtgatcaag

SEQ ID NO: 4740767 - DNA, 25 bp, Homo sapien
tcggcactgggcttccacatacaaa

SEQ ID NO: 4740768 - DNA, 25 bp, Homo sapien
cacacgttccgtgacatggtcacca

SEQ ID NO: 4740769 - DNA, 25 bp, Homo sapien
gggctgtgtgaaaactgtgatatgt

SEQ ID NO: 4740770 - DNA, 25 bp, Homo sapien
aaatctttattaatagaaacagaca

SEQ ID NO: 4740771 - DNA, 25 bp, Homo sapien
ctttattaatagaaacagacagatg

SEQ ID NO: 4740772 - DNA, 25 bp, Homo sapien
ggacagagaatgcagcaggggctgt

SEQ ID NO: 4740773 - DNA, 25 bp, Homo sapien
gaagggcatcatagctgcaggtgaa

SEQ ID NO: 4740774 - DNA, 25 bp, Homo sapien
tgtgtgtgtaaaaggccttctccag

SEQ ID NO: 4740775 - DNA, 25 bp, Homo sapien
gctgtggagctatggaaaggcctca

SEQ ID NO: 4740776 - DNA, 25 bp, Homo sapien
aaattactctcgttccccagctgag

SEQ ID NO: 4740777 - DNA, 25 bp, Homo sapien
catggatatccctgctcatacagca

SEQ ID NO: 4740778 - DNA, 25 bp, Homo sapien
caactggctcccttggtataccggg

SEQ ID NO: 4740779 - DNA, 25 bp, Homo sapien
tgcatggtcctactgtacacacagg

SEQ ID NO: 4740780 - DNA, 25 bp, Homo sapien
tccagcaagtggatatgtgcgggcc

SEQ ID NO: 4740781 - DNA, 25 bp, Homo sapien
gccccgagcataggagcgaagagta

SEQ ID NO: 4740782 - DNA, 25 bp, Homo sapien
ctgaagacagtgtcggccagcgcga

SEQ ID NO: 4740783 - DNA, 25 bp, Homo sapien
taggtggtgagctcaagccggaggc

SEQ ID NO: 4740784 - DNA, 25 bp, Homo sapien
gtggatgggatgacgccccggccgt

SEQ ID NO: 4740785 - DNA, 25 bp, Homo sapien
ttccctggcccatggactaactagg

SEQ ID NO: 4740786 - DNA, 25 bp, Homo sapien
gcacccaagtgaaaagccagctctg

SEQ ID NO: 4740787 - DNA, 25 bp, Homo sapien
acggctacctcgcttggccatggac

SEQ ID NO: 4740788 - DNA, 25 bp, Homo sapien
tgtggcatcatctgacccacgtcct

SEQ ID NO: 4740789 - DNA, 25 bp, Homo sapien
caattgtgggcaccccccgcgtgaa

SEQ ID NO: 4740790 - DNA, 25 bp, Homo sapien
cccgcgtgaagggacccacttctct

SEQ ID NO: 4740791 - DNA, 25 bp, Homo sapien
tatgttttgtttccccttgacagag

SEQ ID NO: 4740792 - DNA, 25 bp, Homo sapien
atgccatgctccccgcaattgtggg

SEQ ID NO: 4740793 - DNA, 25 bp, Homo sapien
gccctctctccactggtggaaggtg

SEQ ID NO: 4740794 - DNA, 25 bp, Homo sapien
gaaggtgccagagatgatggtatcc

SEQ ID NO: 4740795 - DNA, 25 bp, Homo sapien
gaagacctcacttttggtggtgccc

SEQ ID NO: 4740796 - DNA, 25 bp, Homo sapien
gtagaagacctcacttttggtggtg

SEQ ID NO: 4740797 - DNA, 25 bp, Homo sapien
tattcgcgccattgcatggcccagc

SEQ ID NO: 4740798 - DNA, 25 bp, Homo sapien
ctatcagggtattcgcgccattgca

SEQ ID NO: 4740799 - DNA, 25 bp, Homo sapien
gcccagccaaacatcagaaaggagg

SEQ ID NO: 4740800 - DNA, 25 bp, Homo sapien
catggcccagccaaacatcagaaag

SEQ ID NO: 4740801 - DNA, 25 bp, Homo sapien
gcgggagcccaaggcggtgccgaag

SEQ ID NO: 4740802 - DNA, 25 bp, Homo sapien
gcccaaggcggtgccgaagagcagc

SEQ ID NO: 4740803 - DNA, 25 bp, Homo sapien
gtggccgcgggagcccaaggcggtg

SEQ ID NO: 4740804 - DNA, 25 bp, Homo sapien
gagtggccgcgggagcccaaggcgg

SEQ ID NO: 4740805 - DNA, 25 bp, Homo sapien
acccgcattcacgaacacccactgc

SEQ ID NO: 4740806 - DNA, 25 bp, Homo sapien
aggcgtgcagaaggcacatggcgcc

SEQ ID NO: 4740807 - DNA, 25 bp, Homo sapien
gcattcacgaacacccactgcagct

SEQ ID NO: 4740808 - DNA, 25 bp, Homo sapien
tccagccacccgcattcacgaacac

SEQ ID NO: 4740809 - DNA, 25 bp, Homo sapien
cgggcagcacgtggcctgggtgcag

SEQ ID NO: 4740810 - DNA, 25 bp, Homo sapien
gcacgtggcctgggtgcagccgccg

SEQ ID NO: 4740811 - DNA, 25 bp, Homo sapien
gtcgggcagcacgtggcctgggtgc

SEQ ID NO: 4740812 - DNA, 25 bp, Homo sapien
acgtggcctgggtgcagccgccgca

SEQ ID NO: 4740813 - DNA, 25 bp, Homo sapien
atcagacgagagaaggccagctcgt

SEQ ID NO: 4740814 - DNA, 25 bp, Homo sapien
gatcagacgagagaaggccagctcg

SEQ ID NO: 4740815 - DNA, 25 bp, Homo sapien
tcagacgagagaaggccagctcgtg

SEQ ID NO: 4740816 - DNA, 25 bp, Homo sapien
agacgagagaaggccagctcgtggt

SEQ ID NO: 4740817 - DNA, 25 bp, Homo sapien
gagtcagggctggcaccggtcctag

SEQ ID NO: 4740818 - DNA, 25 bp, Homo sapien
taggtccggggatggcgccttcgga

SEQ ID NO: 4740819 - DNA, 25 bp, Homo sapien
tcagggctggcaccggtcctaggtc

SEQ ID NO: 4740820 - DNA, 25 bp, Homo sapien
tcctaggtccggggatggcgccttc

SEQ ID NO: 4740821 - DNA, 25 bp, Homo sapien
gctcccaggccggccgctcccctcc

SEQ ID NO: 4740822 - DNA, 25 bp, Homo sapien
ctaggctccgctcccaggccggccg

SEQ ID NO: 4740823 - DNA, 25 bp, Homo sapien
ggctccgctcccaggccggccgctc

SEQ ID NO: 4740824 - DNA, 25 bp, Homo sapien
cgctcccaggccggccgctcccctc

SEQ ID NO: 4740825 - DNA, 25 bp, Homo sapien
gtactgccgcgccaactgcgctatc

SEQ ID NO: 4740826 - DNA, 25 bp, Homo sapien
caactgcgctatctcttcgcgctgg

SEQ ID NO: 4740827 - DNA, 25 bp, Homo sapien
gcgctatctcttcgcgctggaagac

SEQ ID NO: 4740828 - DNA, 25 bp, Homo sapien
cgctggaagacgaagctctgcgtac

SEQ ID NO: 4740829 - DNA, 25 bp, Homo sapien
gtcagcaccgctgcgacagccagga

SEQ ID NO: 4740830 - DNA, 25 bp, Homo sapien
accgctgcgacagccaggagcagcg

SEQ ID NO: 4740831 - DNA, 25 bp, Homo sapien
cagacgacctgggtcagcaccgctg

SEQ ID NO: 4740832 - DNA, 25 bp, Homo sapien
acctgggtcagcaccgctgcgacag

SEQ ID NO: 4740833 - DNA, 25 bp, Homo sapien
tgaggctttgcgctcacggcctcgg

SEQ ID NO: 4740834 - DNA, 25 bp, Homo sapien
ggcctgaggctttgcgctcacggcc

SEQ ID NO: 4740835 - DNA, 25 bp, Homo sapien
gcctgaggctttgcgctcacggcct

SEQ ID NO: 4740836 - DNA, 25 bp, Homo sapien
ggctttgcgctcacggcctcggagc

SEQ ID NO: 4740837 - DNA, 25 bp, Homo sapien
gaccacgccgaccacagggccttga

SEQ ID NO: 4740838 - DNA, 25 bp, Homo sapien
cgaccacagggccttgaatcctttt

SEQ ID NO: 4740839 - DNA, 25 bp, Homo sapien
agcaaccatcgcctgaccacgccga

SEQ ID NO: 4740840 - DNA, 25 bp, Homo sapien
agacagcaaccatcgcctgaccacg

SEQ ID NO: 4740841 - DNA, 25 bp, Homo sapien
tcttcagtccgggacgggacaggaa

SEQ ID NO: 4740842 - DNA, 25 bp, Homo sapien
taaacaatactggtgcctaggtcca

SEQ ID NO: 4740843 - DNA, 25 bp, Homo sapien
tggataggccttcaggcggagaccc

SEQ ID NO: 4740844 - DNA, 25 bp, Homo sapien
accttacacctctgatttggctgca

SEQ ID NO: 4740845 - DNA, 25 bp, Homo sapien
gtcacttggtgcagctgtcagctaa

SEQ ID NO: 4740846 - DNA, 25 bp, Homo sapien
cgccaaagtcttgtcaggagtgggc

SEQ ID NO: 4740847 - DNA, 25 bp, Homo sapien
ccaatgtgtgacttcagcagtagca

SEQ ID NO: 4740848 - DNA, 25 bp, Homo sapien
tatgatctgaaaggccgggagtgac

SEQ ID NO: 4740849 - DNA, 25 bp, Homo sapien
tagaggctatggacactctgctgct

SEQ ID NO: 4740850 - DNA, 25 bp, Homo sapien
cacctgccatatagacacactgtta

SEQ ID NO: 4740851 - DNA, 25 bp, Homo sapien
cagggtaagtgtggctgggtggcca

SEQ ID NO: 4740852 - DNA, 25 bp, Homo sapien
gtagctggtgagaggaagtcctaga

SEQ ID NO: 4740853 - DNA, 25 bp, Homo sapien
tgcctgttggtctgacactcatgac

SEQ ID NO: 4740854 - DNA, 25 bp, Homo sapien
ttgtcctggagtgactgccgggtaa

SEQ ID NO: 4740855 - DNA, 25 bp, Homo sapien
ggaagagccttacctcagaagtgcc

SEQ ID NO: 4740856 - DNA, 25 bp, Homo sapien
catgatgctttgatccagtgagccc

SEQ ID NO: 4740857 - DNA, 25 bp, Homo sapien
gaatcttgccagatagtaatacctg

SEQ ID NO: 4740858 - DNA, 25 bp, Homo sapien
ttcaaagagcttacatcttagtggg

SEQ ID NO: 4740859 - DNA, 25 bp, Homo sapien
tcgaagaggacaactgagtggttac

SEQ ID NO: 4740860 - DNA, 25 bp, Homo sapien
tctgggatacagcagtgctaatgcc

SEQ ID NO: 4740861 - DNA, 25 bp, Homo sapien
ctggcgtctttgggaatcctttctt

SEQ ID NO: 4740862 - DNA, 25 bp, Homo sapien
cctttctttcctgggactggtggct

SEQ ID NO: 4740863 - DNA, 25 bp, Homo sapien
actggggctctggtaagtgactgcc

SEQ ID NO: 4740864 - DNA, 25 bp, Homo sapien
caggtagctgtgctggcgtctttgg

SEQ ID NO: 4740865 - DNA, 25 bp, Homo sapien
ttatccaatgctgctttattatttg

SEQ ID NO: 4740866 - DNA, 25 bp, Homo sapien
tatccaatgctgctttattatttgg

SEQ ID NO: 4740867 - DNA, 25 bp, Homo sapien
ggtgctcaaaccactgtgacaggct

SEQ ID NO: 4740868 - DNA, 25 bp, Homo sapien
gggcagagtcccatggagctttctc

SEQ ID NO: 4740869 - DNA, 25 bp, Homo sapien
gagtcccatggagctttctctcttg

SEQ ID NO: 4740870 - DNA, 25 bp, Homo sapien
cagatgctgcgttgagccaggtgaa

SEQ ID NO: 4740871 - DNA, 25 bp, Homo sapien
tcatccccaatgaccctaattaggg

SEQ ID NO: 4740872 - DNA, 25 bp, Homo sapien
aaggtccaaagctatgaccatagct

SEQ ID NO: 4740873 - DNA, 25 bp, Homo sapien
gatgagattagggtcatccccaatg

SEQ ID NO: 4740874 - DNA, 25 bp, Homo sapien
gatgaaaacctgagttggcaacaga

SEQ ID NO: 4740875 - DNA, 25 bp, Homo sapien
cacctggatgaccttcctcagtagc

SEQ ID NO: 4740876 - DNA, 25 bp, Homo sapien
ggaggtgacagtccccgtcagcctc

SEQ ID NO: 4740877 - DNA, 25 bp, Homo sapien
ttccacctggatgaccttcctcagt

SEQ ID NO: 4740878 - DNA, 25 bp, Homo sapien
cctggatgaccttcctcagtagctt

SEQ ID NO: 4740879 - DNA, 25 bp, Homo sapien
gggatcctgaccaagaacctctctg

SEQ ID NO: 4740880 - DNA, 25 bp, Homo sapien
cagacagctggaggttaggttggat

SEQ ID NO: 4740881 - DNA, 25 bp, Homo sapien
caacagggccatgtgttcagaggga

SEQ ID NO: 4740882 - DNA, 25 bp, Homo sapien
aagaacctctctgccagacagctgg

SEQ ID NO: 4740883 - DNA, 25 bp, Homo sapien
tgggctcaggagcaatgacagcagc

SEQ ID NO: 4740884 - DNA, 25 bp, Homo sapien
ctgctgtagggtctgggctcaggag

SEQ ID NO: 4740885 - DNA, 25 bp, Homo sapien
gaggctgcagaaggttgggggcccc

SEQ ID NO: 4740886 - DNA, 25 bp, Homo sapien
gctgcagaaggttgggggccccttc

SEQ ID NO: 4740887 - DNA, 25 bp, Homo sapien
tactcatgatcagacaaccgtagac

SEQ ID NO: 4740888 - DNA, 25 bp, Homo sapien
gaatgggtccctagagcaggccctt

SEQ ID NO: 4740889 - DNA, 25 bp, Homo sapien
ccatgtgctcctaagctctgggcag

SEQ ID NO: 4740890 - DNA, 25 bp, Homo sapien
tatagccccggttatactcaaagtc

SEQ ID NO: 4740891 - DNA, 25 bp, Homo sapien
tgtcagtacggaacagagcccgtgt

SEQ ID NO: 4740892 - DNA, 25 bp, Homo sapien
gcttgtcggtccagaagtcttcgga

SEQ ID NO: 4740893 - DNA, 25 bp, Homo sapien
gctttgacgtggaagggcacccttc

SEQ ID NO: 4740894 - DNA, 25 bp, Homo sapien
ggaatgccaacctcttgccagcagg

SEQ ID NO: 4740895 - DNA, 25 bp, Homo sapien
aatctttaatgcactggctggctgg

SEQ ID NO: 4740896 - DNA, 25 bp, Homo sapien
tctttaatgcactggctggctgggc

SEQ ID NO: 4740897 - DNA, 25 bp, Homo sapien
ttaaatctttaatgcactggctggc

SEQ ID NO: 4740898 - DNA, 25 bp, Homo sapien
ctttaatgcactggctggctgggca

SEQ ID NO: 4740899 - DNA, 25 bp, Homo sapien
gcgggggaagccacgacccgagcgc

SEQ ID NO: 4740900 - DNA, 25 bp, Homo sapien
gacccgagcgctggggagtaggacc

SEQ ID NO: 4740901 - DNA, 25 bp, Homo sapien
acccaggccgctggacagacagctc

SEQ ID NO: 4740902 - DNA, 25 bp, Homo sapien
caggccgctggacagacagctcatc

SEQ ID NO: 4740903 - DNA, 25 bp, Homo sapien
ggcgggtccgcggtatcgcagcctc

SEQ ID NO: 4740904 - DNA, 25 bp, Homo sapien
tcctcagagactgagtcccgtccat

SEQ ID NO: 4740905 - DNA, 25 bp, Homo sapien
cgacccgacactggcatgaggcggg

SEQ ID NO: 4740906 - DNA, 25 bp, Homo sapien
ggattccccccgatgggtcctcaga

SEQ ID NO: 4740907 - DNA, 25 bp, Homo sapien
cgccacatgcgaagccaggggaaaa

SEQ ID NO: 4740908 - DNA, 25 bp, Homo sapien
tccgccacatgcgaagccaggggaa

SEQ ID NO: 4740909 - DNA, 25 bp, Homo sapien
aaagtagaaacagccccagtagatc

SEQ ID NO: 4740910 - DNA, 25 bp, Homo sapien
gctccctccgccacatgcgaagcca

SEQ ID NO: 4740911 - DNA, 25 bp, Homo sapien
cggggaggagctgaccctacagact

SEQ ID NO: 4740912 - DNA, 25 bp, Homo sapien
tgcctcgccgtcgaggaaggctccg

SEQ ID NO: 4740913 - DNA, 25 bp, Homo sapien
gaggagctgaccctacagactccgc

SEQ ID NO: 4740914 - DNA, 25 bp, Homo sapien
cccgcggtgcctcgccgtcgaggaa

SEQ ID NO: 4740915 - DNA, 25 bp, Homo sapien
cagcgccacctcgtatctcctcatt

SEQ ID NO: 4740916 - DNA, 25 bp, Homo sapien
gcctccagcgccacctcgtatctcc

SEQ ID NO: 4740917 - DNA, 25 bp, Homo sapien
tatctcctcattcccgacatgtcct

SEQ ID NO: 4740918 - DNA, 25 bp, Homo sapien
ctcattcccgacatgtcctgggctc

SEQ ID NO: 4740919 - DNA, 25 bp, Homo sapien
tcagttgccaccacgggacagggtg

SEQ ID NO: 4740920 - DNA, 25 bp, Homo sapien
tctccgtcattctcaggacgaggct

SEQ ID NO: 4740921 - DNA, 25 bp, Homo sapien
gaatcagggattccctagccccagg

SEQ ID NO: 4740922 - DNA, 25 bp, Homo sapien
tcaggtaatctgaggctgatgcccc

SEQ ID NO: 4740923 - DNA, 25 bp, Homo sapien
gaggggtcagcgcagcctaaactcc

SEQ ID NO: 4740924 - DNA, 25 bp, Homo sapien
ggggtcagcgcagcctaaactcccg

SEQ ID NO: 4740925 - DNA, 25 bp, Homo sapien
tcagcgcagcctaaactcccgccct

SEQ ID NO: 4740926 - DNA, 25 bp, Homo sapien
ctgagaggggtcagcgcagcctaaa

SEQ ID NO: 4740927 - DNA, 25 bp, Homo sapien
cacagggatgccgttgcgcactagg

SEQ ID NO: 4740928 - DNA, 25 bp, Homo sapien
agggatgccgttgcgcactaggttt

SEQ ID NO: 4740929 - DNA, 25 bp, Homo sapien
cgtcacagggatgccgttgcgcact

SEQ ID NO: 4740930 - DNA, 25 bp, Homo sapien
cgttactattacgtcacagggatgc

SEQ ID NO: 4740931 - DNA, 25 bp, Homo sapien
tctggtgccgaggaactagaggcct

SEQ ID NO: 4740932 - DNA, 25 bp, Homo sapien
tttattggaagcactgcagtctggg

SEQ ID NO: 4740933 - DNA, 25 bp, Homo sapien
actgtcatgggctaactgctgtggc

SEQ ID NO: 4740934 - DNA, 25 bp, Homo sapien
catgttgacactccaggcctggctg

SEQ ID NO: 4740935 - DNA, 25 bp, Homo sapien
gaggtcttccgcagtctccagtttg

SEQ ID NO: 4740936 - DNA, 25 bp, Homo sapien
catgggctgtaatcttagacagggc

SEQ ID NO: 4740937 - DNA, 25 bp, Homo sapien
ccatgggctgtaatcttagacaggg

SEQ ID NO: 4740938 - DNA, 25 bp, Homo sapien
ttccttggcagaggtcttccgcagt

SEQ ID NO: 4740939 - DNA, 25 bp, Homo sapien
ttaggagtcctgagccttcatgaaa

SEQ ID NO: 4740940 - DNA, 25 bp, Homo sapien
gagccttcatgaaactgttatatct

SEQ ID NO: 4740941 - DNA, 25 bp, Homo sapien
tgttatatctaaggttttctggtgg

SEQ ID NO: 4740942 - DNA, 25 bp, Homo sapien
tcatgaaactgttatatctaaggtt

SEQ ID NO: 4740943 - DNA, 25 bp, Homo sapien
tgctcagattgctgggcaattgtac

SEQ ID NO: 4740944 - DNA, 25 bp, Homo sapien
tgctcagttgctccaattgctcaga

SEQ ID NO: 4740945 - DNA, 25 bp, Homo sapien
gcagatgttgattaaatgtagtcac

SEQ ID NO: 4740946 - DNA, 25 bp, Homo sapien
gtagtcacagtgctgagaatgttag

SEQ ID NO: 4740947 - DNA, 25 bp, Homo sapien
ctgagacctgggatacccaaggttt

SEQ ID NO: 4740948 - DNA, 25 bp, Homo sapien
cctgggatacccaaggttttgagca

SEQ ID NO: 4740949 - DNA, 25 bp, Homo sapien
tgggatacccaaggttttgagcacc

SEQ ID NO: 4740950 - DNA, 25 bp, Homo sapien
ttctgagacctgggatacccaaggt

SEQ ID NO: 4740951 - DNA, 25 bp, Homo sapien
agaaagaacaaagaaatctgtaaca

SEQ ID NO: 4740952 - DNA, 25 bp, Homo sapien
aaagaaatctgtaacaggttgtgat

SEQ ID NO: 4740953 - DNA, 25 bp, Homo sapien
aaggctagttaagcagtaggagtgg

SEQ ID NO: 4740954 - DNA, 25 bp, Homo sapien
gaaatctgtaacaggttgtgatcaa

SEQ ID NO: 4740955 - DNA, 25 bp, Homo sapien
tccccaggttaggtaataattcaca

SEQ ID NO: 4740956 - DNA, 25 bp, Homo sapien
caatgcttgactcggactccgggct

SEQ ID NO: 4740957 - DNA, 25 bp, Homo sapien
ggcggctttattggtagcattgcaa

SEQ ID NO: 4740958 - DNA, 25 bp, Homo sapien
tttattggtagcattgcaatctggg

SEQ ID NO: 4740959 - DNA, 25 bp, Homo sapien
aggaaggatcatgggctggaatctt

SEQ ID NO: 4740960 - DNA, 25 bp, Homo sapien
gagaggaaggatcatgggctggaat

SEQ ID NO: 4740961 - DNA, 25 bp, Homo sapien
gaggaaggatcatgggctggaatct

SEQ ID NO: 4740962 - DNA, 25 bp, Homo sapien
ggaaggatcatgggctggaatctta

SEQ ID NO: 4740963 - DNA, 25 bp, Homo sapien
gagacagggccagggagggccaggc

SEQ ID NO: 4740964 - DNA, 25 bp, Homo sapien
tcagagggaggagacagggccaggg

SEQ ID NO: 4740965 - DNA, 25 bp, Homo sapien
gacagggccagggagggccaggctt

SEQ ID NO: 4740966 - DNA, 25 bp, Homo sapien
cagggccagggagggccaggcttgc

SEQ ID NO: 4740967 - DNA, 25 bp, Homo sapien
ctggatgatgcgttctacccagggc

SEQ ID NO: 4740968 - DNA, 25 bp, Homo sapien
ggatgatgcgttctacccagggctg

SEQ ID NO: 4740969 - DNA, 25 bp, Homo sapien
agtctctggatgatgcgttctaccc

SEQ ID NO: 4740970 - DNA, 25 bp, Homo sapien
tctctggatgatgcgttctacccag

SEQ ID NO: 4740971 - DNA, 25 bp, Homo sapien
ttcagcatcattggtgccactcaga

SEQ ID NO: 4740972 - DNA, 25 bp, Homo sapien
tagtggaagttcctcacgatgtacc

SEQ ID NO: 4740973 - DNA, 25 bp, Homo sapien
cacgatgtacccagggatgggtttc

SEQ ID NO: 4740974 - DNA, 25 bp, Homo sapien
catcattggtgccactcagagttgg

SEQ ID NO: 4740975 - DNA, 25 bp, Homo sapien
aggctgagggccagtagcagggcca

SEQ ID NO: 4740976 - DNA, 25 bp, Homo sapien
ggctgagggccagtagcagggccat

SEQ ID NO: 4740977 - DNA, 25 bp, Homo sapien
caggctgagggccagtagcagggcc

SEQ ID NO: 4740978 - DNA, 25 bp, Homo sapien
tgcagctgactcctatttatggcca

SEQ ID NO: 4740979 - DNA, 25 bp, Homo sapien
atgtgtgagcgccagctgtctgggt

SEQ ID NO: 4740980 - DNA, 25 bp, Homo sapien
tgtgaggctgcagggcgactgggat

SEQ ID NO: 4740981 - DNA, 25 bp, Homo sapien
cagaggcaggccaacggtgaatgtg

SEQ ID NO: 4740982 - DNA, 25 bp, Homo sapien
tggcttggaatagcccccttcattt

SEQ ID NO: 4740983 - DNA, 25 bp, Homo sapien
gactggcttggaatagcccccttca

SEQ ID NO: 4740984 - DNA, 25 bp, Homo sapien
gagactggcttggaatagccccctt

SEQ ID NO: 4740985 - DNA, 25 bp, Homo sapien
actggcttggaatagcccccttcat

SEQ ID NO: 4740986 - DNA, 25 bp, Homo sapien
caagaggagcagacaagccaatact

SEQ ID NO: 4740987 - DNA, 25 bp, Homo sapien
taagtgctgtggcatactcaggctc

SEQ ID NO: 4740988 - DNA, 25 bp, Homo sapien
gatgttaggataggtggtaagtgct

SEQ ID NO: 4740989 - DNA, 25 bp, Homo sapien
caatacttgaggatgttaggatagg

SEQ ID NO: 4740990 - DNA, 25 bp, Homo sapien
cttctactctccccgcctggaggtg

SEQ ID NO: 4740991 - DNA, 25 bp, Homo sapien
tgatggcttctactctccccgcctg

SEQ ID NO: 4740992 - DNA, 25 bp, Homo sapien
ggcttctactctccccgcctggagg

SEQ ID NO: 4740993 - DNA, 25 bp, Homo sapien
atggcttctactctccccgcctgga

SEQ ID NO: 4740994 - DNA, 25 bp, Homo sapien
tttattcagttaggtataaatcata

SEQ ID NO: 4740995 - DNA, 25 bp, Homo sapien
ctgggagactctccctcctcggtct

SEQ ID NO: 4740996 - DNA, 25 bp, Homo sapien
tactggggagccgtatcaggtccag

SEQ ID NO: 4740997 - DNA, 25 bp, Homo sapien
tcagttaggtataaatcatatttac

SEQ ID NO: 4740998 - DNA, 25 bp, Homo sapien
ttcttgcatcttgggttcaggcttc

SEQ ID NO: 4740999 - DNA, 25 bp, Homo sapien
atgcagatggggtggttaaagcagg

SEQ ID NO: 4741000 - DNA, 25 bp, Homo sapien
cagatggggtggttaaagcaggaga

SEQ ID NO: 4741001 - DNA, 25 bp, Homo sapien
aggcttcaagcgctggtgaggctgg

SEQ ID NO: 4741002 - DNA, 25 bp, Homo sapien
tttaggggtctgtgaccgctcagtc

SEQ ID NO: 4741003 - DNA, 25 bp, Homo sapien
tcccctttacccacatccctcagat

SEQ ID NO: 4741004 - DNA, 25 bp, Homo sapien
gctgactgaggctcccctttaccca

SEQ ID NO: 4741005 - DNA, 25 bp, Homo sapien
gggctgactgaggctcccctttacc

SEQ ID NO: 4741006 - DNA, 25 bp, Homo sapien
tacccacatccctcagattcctcac

SEQ ID NO: 4741007 - DNA, 25 bp, Homo sapien
gatggtgtcttgtccagatgctgca

SEQ ID NO: 4741008 - DNA, 25 bp, Homo sapien
ggatggtgtcttgtccagatgctgc

SEQ ID NO: 4741009 - DNA, 25 bp, Homo sapien
tagctctgcctgagagcgcttgcgg

SEQ ID NO: 4741010 - DNA, 25 bp, Homo sapien
gtctgcacatagctctgcctgagag

SEQ ID NO: 4741011 - DNA, 25 bp, Homo sapien
gcgggaatcttcctttggctgtact

SEQ ID NO: 4741012 - DNA, 25 bp, Homo sapien
gatggagcagcctaagcttggttcc

SEQ ID NO: 4741013 - DNA, 25 bp, Homo sapien
tggttcctgcttccggtagctgcgg

SEQ ID NO: 4741014 - DNA, 25 bp, Homo sapien
ccggtagctgcggacaaccttggcg

SEQ ID NO: 4741015 - DNA, 25 bp, Homo sapien
agaaccaggataaggaggctcagag

SEQ ID NO: 4741016 - DNA, 25 bp, Homo sapien
gaaccaggataaggaggctcagagc

SEQ ID NO: 4741017 - DNA, 25 bp, Homo sapien
gtggtagagggtgagtaagaggcca

SEQ ID NO: 4741018 - DNA, 25 bp, Homo sapien
gtgaggtgggcagctgcaagttggg

SEQ ID NO: 4741019 - DNA, 25 bp, Homo sapien
tagagggtgagtaagaggccagagc

SEQ ID NO: 4741020 - DNA, 25 bp, Homo sapien
caagttgggggtctgtgcgtgggct

SEQ ID NO: 4741021 - DNA, 25 bp, Homo sapien
tgtgggtctccacctacagttccag

SEQ ID NO: 4741022 - DNA, 25 bp, Homo sapien
agatggctgcacatccgagatgtgg

SEQ ID NO: 4741023 - DNA, 25 bp, Homo sapien
gaaactggctactttgtgacaacct

SEQ ID NO: 4741024 - DNA, 25 bp, Homo sapien
aagatgttggcttggtgagctcctg

SEQ ID NO: 4741025 - DNA, 25 bp, Homo sapien
taggtgcagaggagtgcttcactgg

SEQ ID NO: 4741026 - DNA, 25 bp, Homo sapien
ggtgcagaggagtgcttcactggta

SEQ ID NO: 4741027 - DNA, 25 bp, Homo sapien
ctaggtgcagaggagtgcttcactg

SEQ ID NO: 4741028 - DNA, 25 bp, Homo sapien
gtgcagaggagtgcttcactggtac

SEQ ID NO: 4741029 - DNA, 25 bp, Homo sapien
tgatgatgaattcaccagactgaga

SEQ ID NO: 4741030 - DNA, 25 bp, Homo sapien
ggataaaggaggtacacatggctga

SEQ ID NO: 4741031 - DNA, 25 bp, Homo sapien
tggctgatttcagccctacccgtga

SEQ ID NO: 4741032 - DNA, 25 bp, Homo sapien
cagccctacccgtgatgatgaattc

SEQ ID NO: 4741033 - DNA, 25 bp, Homo sapien
aacgtgtggtattgatctgatgtag

SEQ ID NO: 4741034 - DNA, 25 bp, Homo sapien
gtattgatctgatgtagatgacaag

SEQ ID NO: 4741035 - DNA, 25 bp, Homo sapien
gcttctgcataacgtgtggtattga

SEQ ID NO: 4741036 - DNA, 25 bp, Homo sapien
agatgacaagttgttggctgttttc

SEQ ID NO: 4741037 - DNA, 25 bp, Homo sapien
tcccacctgagctcaaggaagtcct

SEQ ID NO: 4741038 - DNA, 25 bp, Homo sapien
catattcccacctgagctcaaggaa

SEQ ID NO: 4741039 - DNA, 25 bp, Homo sapien
tctcatattcccacctgagctcaag

SEQ ID NO: 4741040 - DNA, 25 bp, Homo sapien
ttcccacctgagctcaaggaagtcc

SEQ ID NO: 4741041 - DNA, 25 bp, Homo sapien
gctggtacagtgttccaagagcacc

SEQ ID NO: 4741042 - DNA, 25 bp, Homo sapien
catgctcttgcgcagtctccatgca

SEQ ID NO: 4741043 - DNA, 25 bp, Homo sapien
cactgagcactaggatgccatctct

SEQ ID NO: 4741044 - DNA, 25 bp, Homo sapien
tctccatgcatttagagctttctct

SEQ ID NO: 4741045 - DNA, 25 bp, Homo sapien
tgcttgggacctaacagaaactttc

SEQ ID NO: 4741046 - DNA, 25 bp, Homo sapien
gaaactttccatggtaacttccaga

SEQ ID NO: 4741047 - DNA, 25 bp, Homo sapien
tatttttagccaaagccagactgtc

SEQ ID NO: 4741048 - DNA, 25 bp, Homo sapien
atgtactcacaaccaactgcttggg

SEQ ID NO: 4741049 - DNA, 25 bp, Homo sapien
tgttcagaaatcaagcatgaccttt

SEQ ID NO: 4741050 - DNA, 25 bp, Homo sapien
cagccctgactttggattcaactaa

SEQ ID NO: 4741051 - DNA, 25 bp, Homo sapien
tatgcattagccactctcctaggcc

SEQ ID NO: 4741052 - DNA, 25 bp, Homo sapien
ggaatggtgacccatctgaaaggta

SEQ ID NO: 4741053 - DNA, 25 bp, Homo sapien
tagagtgtatttctagtggcatctg

SEQ ID NO: 4741054 - DNA, 25 bp, Homo sapien
aggagcagacagacaatgtattgct

SEQ ID NO: 4741055 - DNA, 25 bp, Homo sapien
cagacagacaatgtattgctgagaa

SEQ ID NO: 4741056 - DNA, 25 bp, Homo sapien
gaaatatagagtgtatttctagtgg

SEQ ID NO: 4741057 - DNA, 25 bp, Homo sapien
ggctctgcatgttctccttgagcgg

SEQ ID NO: 4741058 - DNA, 25 bp, Homo sapien
gcatgttctccttgagcggaccaat

SEQ ID NO: 4741059 - DNA, 25 bp, Homo sapien
tgcatgttctccttgagcggaccaa

SEQ ID NO: 4741060 - DNA, 25 bp, Homo sapien
tctgcatgttctccttgagcggacc

SEQ ID NO: 4741061 - DNA, 25 bp, Homo sapien
tggagcaccctgtcggcttctccgt

SEQ ID NO: 4741062 - DNA, 25 bp, Homo sapien
tggcacaagcctctcgaggacagtg

SEQ ID NO: 4741063 - DNA, 25 bp, Homo sapien
gccggagcttatcgtctagggattg

SEQ ID NO: 4741064 - DNA, 25 bp, Homo sapien
tgggtgccctggtttgttggcacaa

SEQ ID NO: 4741065 - DNA, 25 bp, Homo sapien
ggttttggccaccttcgcagcggct

SEQ ID NO: 4741066 - DNA, 25 bp, Homo sapien
ccttcgcagcggctgagaacatgga

SEQ ID NO: 4741067 - DNA, 25 bp, Homo sapien
gccaccttcgcagcggctgagaaca

SEQ ID NO: 4741068 - DNA, 25 bp, Homo sapien
cagcggctgagaacatggagtcctc

SEQ ID NO: 4741069 - DNA, 25 bp, Homo sapien
caggaaaggctgaccctgtgaagcc

SEQ ID NO: 4741070 - DNA, 25 bp, Homo sapien
gtgacagtacctggtaaagcctgtt

SEQ ID NO: 4741071 - DNA, 25 bp, Homo sapien
ttcagtgacagtacctggtaaagcc

SEQ ID NO: 4741072 - DNA, 25 bp, Homo sapien
tgttcagtgacagtacctggtaaag

SEQ ID NO: 4741073 - DNA, 25 bp, Homo sapien
cagtgacagtacctggtaaagcctg

SEQ ID NO: 4741074 - DNA, 25 bp, Homo sapien
gacagcacatcgcaagccccgttgg

SEQ ID NO: 4741075 - DNA, 25 bp, Homo sapien
atcgcaagccccgttggcctctagg

SEQ ID NO: 4741076 - DNA, 25 bp, Homo sapien
gggccgcaatgggtgacagcacatc

SEQ ID NO: 4741077 - DNA, 25 bp, Homo sapien
cgttggcctctagggctacaggctg

SEQ ID NO: 4741078 - DNA, 25 bp, Homo sapien
tgcaatggccccgataaagtcaggg

SEQ ID NO: 4741079 - DNA, 25 bp, Homo sapien
catactagacgtagacagcatctct

SEQ ID NO: 4741080 - DNA, 25 bp, Homo sapien
gaggaccatatgcaaggccattgga

SEQ ID NO: 4741081 - DNA, 25 bp, Homo sapien
cccagcgatggcgaatcaactgttt

SEQ ID NO: 4741082 - DNA, 25 bp, Homo sapien
cagacaacccatgggagggcatggc

SEQ ID NO: 4741083 - DNA, 25 bp, Homo sapien
gagcttgttgggcaaggcctcagac

SEQ ID NO: 4741084 - DNA, 25 bp, Homo sapien
ggagtcagttctctgttgaccttgt

SEQ ID NO: 4741085 - DNA, 25 bp, Homo sapien
gctgggctgatggtctggagcttgt

SEQ ID NO: 4741086 - DNA, 25 bp, Homo sapien
cttttaatgatggagagcagcttct

SEQ ID NO: 4741087 - DNA, 25 bp, Homo sapien
tctcagcttcttcccgggaacgtct

SEQ ID NO: 4741088 - DNA, 25 bp, Homo sapien
ggcttctcagcttcttcccgggaac

SEQ ID NO: 4741089 - DNA, 25 bp, Homo sapien
tctgtggcttctcagcttcttcccg

SEQ ID NO: 4741090 - DNA, 25 bp, Homo sapien
tgatgctgcatctctagctctttgc

SEQ ID NO: 4741091 - DNA, 25 bp, Homo sapien
attcacagagaagtcctgctggatg

SEQ ID NO: 4741092 - DNA, 25 bp, Homo sapien
ctcccatctgattcacagagaagtc

SEQ ID NO: 4741093 - DNA, 25 bp, Homo sapien
tgattcacagagaagtcctgctgga

SEQ ID NO: 4741094 - DNA, 25 bp, Homo sapien
cccatctgattcacagagaagtcct

SEQ ID NO: 4741095 - DNA, 25 bp, Homo sapien
agtagggctcaacatggtctaaact

SEQ ID NO: 4741096 - DNA, 25 bp, Homo sapien
gcagcagctccttttaggttctgaa

SEQ ID NO: 4741097 - DNA, 25 bp, Homo sapien
ggttctgaactcaattcatggtggc

SEQ ID NO: 4741098 - DNA, 25 bp, Homo sapien
gggctcaacatggtctaaacttcat

SEQ ID NO: 4741099 - DNA, 25 bp, Homo sapien
ctcactttattgcccgtgttggtct

SEQ ID NO: 4741100 - DNA, 25 bp, Homo sapien
actttattgcccgtgttggtcttga

SEQ ID NO: 4741101 - DNA, 25 bp, Homo sapien
tggtctccatagtagctgtactaat

SEQ ID NO: 4741102 - DNA, 25 bp, Homo sapien
caggcgtgagcctatttttagtttt

SEQ ID NO: 4741103 - DNA, 25 bp, Homo sapien
tccagatggtctcatcagctcctga

SEQ ID NO: 4741104 - DNA, 25 bp, Homo sapien
ttcttccagatggtctcatcagctc

SEQ ID NO: 4741105 - DNA, 25 bp, Homo sapien
accttttcttccagatggtctcatc

SEQ ID NO: 4741106 - DNA, 25 bp, Homo sapien
ccttttcttccagatggtctcatca

SEQ ID NO: 4741107 - DNA, 25 bp, Homo sapien
ccaaacctgaagtagtaaattcttg

SEQ ID NO: 4741108 - DNA, 25 bp, Homo sapien
gacatgttgttacctgagtgtgcca

SEQ ID NO: 4741109 - DNA, 25 bp, Homo sapien
cactgatgtattcctagcatctacc

SEQ ID NO: 4741110 - DNA, 25 bp, Homo sapien
gaggtgaacccaaagatcccaagca

SEQ ID NO: 4741111 - DNA, 25 bp, Homo sapien
gagactagtgcctgccttaacccaa

SEQ ID NO: 4741112 - DNA, 25 bp, Homo sapien
ccaaagcaggtctgtaggagggact

SEQ ID NO: 4741113 - DNA, 25 bp, Homo sapien
taacctattgagtggagcaagcaca

SEQ ID NO: 4741114 - DNA, 25 bp, Homo sapien
tggcaagctacactgagagacctcc

SEQ ID NO: 4741115 - DNA, 25 bp, Homo sapien
agcaaaatattggacattcccagag

SEQ ID NO: 4741116 - DNA, 25 bp, Homo sapien
ggtttcagagaattccacatagtat

SEQ ID NO: 4741117 - DNA, 25 bp, Homo sapien
ccttgtagatctcagcttgccactc

SEQ ID NO: 4741118 - DNA, 25 bp, Homo sapien
gaatagcaaaatattggacattccc

SEQ ID NO: 4741119 - DNA, 25 bp, Homo sapien
ccgtccttggcaggaaaaagtgtag

SEQ ID NO: 4741120 - DNA, 25 bp, Homo sapien
gatgtagaagggtgacaggaaccaa

SEQ ID NO: 4741121 - DNA, 25 bp, Homo sapien
aaggtgattggcttcagtgttttca

SEQ ID NO: 4741122 - DNA, 25 bp, Homo sapien
ctcattgttagactcatgtgtggca

SEQ ID NO: 4741123 - DNA, 25 bp, Homo sapien
aacagtaggcctgggtacaagctgc

SEQ ID NO: 4741124 - DNA, 25 bp, Homo sapien
caggcacaggtggtatagaaacagt

SEQ ID NO: 4741125 - DNA, 25 bp, Homo sapien
tgggtgcccaccattagttactgtg

SEQ ID NO: 4741126 - DNA, 25 bp, Homo sapien
taagggcaagcagaactaagctcag

SEQ ID NO: 4741127 - DNA, 25 bp, Homo sapien
caatccctgggcctgtgggacaggc

SEQ ID NO: 4741128 - DNA, 25 bp, Homo sapien
ggacaggcccttctccattttctac

SEQ ID NO: 4741129 - DNA, 25 bp, Homo sapien
tctactgtcatctcattccaggagg

SEQ ID NO: 4741130 - DNA, 25 bp, Homo sapien
atctcattccaggaggctttcattt

SEQ ID NO: 4741131 - DNA, 25 bp, Homo sapien
cacaatacagtggagataaggagca

SEQ ID NO: 4741132 - DNA, 25 bp, Homo sapien
taaccgaagcttattgtctagggac

SEQ ID NO: 4741133 - DNA, 25 bp, Homo sapien
acagtggcagagaacatggaatcct

SEQ ID NO: 4741134 - DNA, 25 bp, Homo sapien
tactgtggcactcctctaaaatgaa

SEQ ID NO: 4741135 - DNA, 25 bp, Homo sapien
cttctctggttgaggagcgcccaaa

SEQ ID NO: 4741136 - DNA, 25 bp, Homo sapien
tccccagggactcgtggaggtagct

SEQ ID NO: 4741137 - DNA, 25 bp, Homo sapien
tgtcttgtttggaagcatccctgct

SEQ ID NO: 4741138 - DNA, 25 bp, Homo sapien
tggtcttcagcagggcgtctctctt

SEQ ID NO: 4741139 - DNA, 25 bp, Homo sapien
gggaattccccattgtatctctagg

SEQ ID NO: 4741140 - DNA, 25 bp, Homo sapien
tgcgtctggctttctagaggcagcg

SEQ ID NO: 4741141 - DNA, 25 bp, Homo sapien
tcttggagaccgagtgggcagaacc

SEQ ID NO: 4741142 - DNA, 25 bp, Homo sapien
cctggacttccttgccctaatggga

SEQ ID NO: 4741143 - DNA, 25 bp, Homo sapien
tgttccttttactggcactgcaggc

SEQ ID NO: 4741144 - DNA, 25 bp, Homo sapien
cattgttgccttgagggcatggccc

SEQ ID NO: 4741145 - DNA, 25 bp, Homo sapien
tttgcaacgtctgtacaactctcat

SEQ ID NO: 4741146 - DNA, 25 bp, Homo sapien
tgcaggctggaactcttttgcaacg

SEQ ID NO: 4741147 - DNA, 25 bp, Homo sapien
tcagaggctctgctgggatttccac

SEQ ID NO: 4741148 - DNA, 25 bp, Homo sapien
aggctctgctgggatttccacggga

SEQ ID NO: 4741149 - DNA, 25 bp, Homo sapien
ctaaatcagaggctctgctgggatt

SEQ ID NO: 4741150 - DNA, 25 bp, Homo sapien
agaggctctgctgggatttccacgg

SEQ ID NO: 4741151 - DNA, 25 bp, Homo sapien
ggagcgccacataatacagagcagg

SEQ ID NO: 4741152 - DNA, 25 bp, Homo sapien
gacaggaaggccagatgcttgtgcc

SEQ ID NO: 4741153 - DNA, 25 bp, Homo sapien
tggcttccacagacaagactcggag

SEQ ID NO: 4741154 - DNA, 25 bp, Homo sapien
catctctgtgatgacagattggcta

SEQ ID NO: 4741155 - DNA, 25 bp, Homo sapien
gagacacccaatttggcgaaagtgg

SEQ ID NO: 4741156 - DNA, 25 bp, Homo sapien
aggccccagcgatggcgaatcgact

SEQ ID NO: 4741157 - DNA, 25 bp, Homo sapien
tcgttgatggtcagatggagacacc

SEQ ID NO: 4741158 - DNA, 25 bp, Homo sapien
ccagggcataactttgtgatgtagg

SEQ ID NO: 4741159 - DNA, 25 bp, Homo sapien
cacttagggctttaagggctggaga

SEQ ID NO: 4741160 - DNA, 25 bp, Homo sapien
tagctggctgtatttctgctggaga

SEQ ID NO: 4741161 - DNA, 25 bp, Homo sapien
gagaagggagcccacagaatagctg

SEQ ID NO: 4741162 - DNA, 25 bp, Homo sapien
caaggctagagccatagggtttgga

SEQ ID NO: 4741163 - DNA, 25 bp, Homo sapien
gtggaccattcagaaacccagaagg

SEQ ID NO: 4741164 - DNA, 25 bp, Homo sapien
tgtggaccattcagaaacccagaag

SEQ ID NO: 4741165 - DNA, 25 bp, Homo sapien
tccaggttggtaatacaatggtggg

SEQ ID NO: 4741166 - DNA, 25 bp, Homo sapien
cagggaggaccatatgcaaggccat

SEQ ID NO: 4741167 - DNA, 25 bp, Homo sapien
taacatgtacctcaagaagcctcag

SEQ ID NO: 4741168 - DNA, 25 bp, Homo sapien
tttggcataagctgcctcagggact

SEQ ID NO: 4741169 - DNA, 25 bp, Homo sapien
tcaaaggatacactagacagagaca

SEQ ID NO: 4741170 - DNA, 25 bp, Homo sapien
tgatggactcctcgacaaagttggg

SEQ ID NO: 4741171 - DNA, 25 bp, Homo sapien
gcaagaggagacctgtgatggactc

SEQ ID NO: 4741172 - DNA, 25 bp, Homo sapien
tctggaatggagctctatactctgc

SEQ ID NO: 4741173 - DNA, 25 bp, Homo sapien
ttgtggcttctgatcttcttcctga

SEQ ID NO: 4741174 - DNA, 25 bp, Homo sapien
ttttcatgacagagaacagctcttg

SEQ ID NO: 4741175 - DNA, 25 bp, Homo sapien
cttttcatgacagagaacagctctt

SEQ ID NO: 4741176 - DNA, 25 bp, Homo sapien
gatcttcttcctgagaaagtctcct

SEQ ID NO: 4741177 - DNA, 25 bp, Homo sapien
ttcccatgggaataatgtagagaat

SEQ ID NO: 4741178 - DNA, 25 bp, Homo sapien
ggaactggagtcttcagtggcagag

SEQ ID NO: 4741179 - DNA, 25 bp, Homo sapien
ttggctccaggggtcatagagggac

SEQ ID NO: 4741180 - DNA, 25 bp, Homo sapien
tccaaggtaagatttcccacccatg

SEQ ID NO: 4741181 - DNA, 25 bp, Homo sapien
tgatgctgcatctctagctctttgc

SEQ ID NO: 4741182 - DNA, 25 bp, Homo sapien
attcccagataagtcctgctggatg

SEQ ID NO: 4741183 - DNA, 25 bp, Homo sapien
cttccatctgattcccagataagtc

SEQ ID NO: 4741184 - DNA, 25 bp, Homo sapien
tctgattcccagataagtcctgctg

SEQ ID NO: 4741185 - DNA, 25 bp, Homo sapien
ttccatctgattcccagataagtcc

SEQ ID NO: 4741186 - DNA, 25 bp, Homo sapien
gcagcagctcctttcaacttccaag

SEQ ID NO: 4741187 - DNA, 25 bp, Homo sapien
tctcggcattcagggttctggtgcc

SEQ ID NO: 4741188 - DNA, 25 bp, Homo sapien
gatcagccatccctctatctcggca

SEQ ID NO: 4741189 - DNA, 25 bp, Homo sapien
acttccaagttcaattcatggtggc

SEQ ID NO: 4741190 - DNA, 25 bp, Homo sapien
tggcacaggggcaccttatgagaag

SEQ ID NO: 4741191 - DNA, 25 bp, Homo sapien
tttggcacaggggcaccttatgaga

SEQ ID NO: 4741192 - DNA, 25 bp, Homo sapien
tgctttggcacaggggcaccttatg

SEQ ID NO: 4741193 - DNA, 25 bp, Homo sapien
agtgctttggcacaggggcacctta

SEQ ID NO: 4741194 - DNA, 25 bp, Homo sapien
taagctgggtgatgtcaagggtaca

SEQ ID NO: 4741195 - DNA, 25 bp, Homo sapien
gtatgctcatccctaagctgggtga

SEQ ID NO: 4741196 - DNA, 25 bp, Homo sapien
tatattcagtatgctcatccctaag

SEQ ID NO: 4741197 - DNA, 25 bp, Homo sapien
ggtaagtatattcagtatgctcatc

SEQ ID NO: 4741198 - DNA, 25 bp, Homo sapien
gatatagctcatgaaacacctttca

SEQ ID NO: 4741199 - DNA, 25 bp, Homo sapien
catctttcaagatatagctcatgaa

SEQ ID NO: 4741200 - DNA, 25 bp, Homo sapien
tcagcaattgactcctggaagcatg

SEQ ID NO: 4741201 - DNA, 25 bp, Homo sapien
caaggtggtcagcaattgactcctg

SEQ ID NO: 4741202 - DNA, 25 bp, Homo sapien
acataaaaggtgaccagccacaagg

SEQ ID NO: 4741203 - DNA, 25 bp, Homo sapien
ttacataaaaggtgaccagccacaa

SEQ ID NO: 4741204 - DNA, 25 bp, Homo sapien
cttacataaaaggtgaccagccaca

SEQ ID NO: 4741205 - DNA, 25 bp, Homo sapien
tacataaaaggtgaccagccacaag

SEQ ID NO: 4741206 - DNA, 25 bp, Homo sapien
tatgaaaaaccaacagaaccagggc

SEQ ID NO: 4741207 - DNA, 25 bp, Homo sapien
tttccatttctgtagaccaactgtc

SEQ ID NO: 4741208 - DNA, 25 bp, Homo sapien
catttctgtagaccaactgtccctc

SEQ ID NO: 4741209 - DNA, 25 bp, Homo sapien
tccatttctgtagaccaactgtccc

SEQ ID NO: 4741210 - DNA, 25 bp, Homo sapien
agtttccatttctgtagaccaactg

SEQ ID NO: 4741211 - DNA, 25 bp, Homo sapien
tcaaaatctgctggggcatgtagga

SEQ ID NO: 4741212 - DNA, 25 bp, Homo sapien
aaaatctgctggggcatgtaggagc

SEQ ID NO: 4741213 - DNA, 25 bp, Homo sapien
aatcaaaatctgctggggcatgtag

SEQ ID NO: 4741214 - DNA, 25 bp, Homo sapien
cataatcaaaatctgctggggcatg

SEQ ID NO: 4741215 - DNA, 25 bp, Homo sapien
ataaaatgtgatttaagcttctata

SEQ ID NO: 4741216 - DNA, 25 bp, Homo sapien
gcttctataccacataagaagtact

SEQ ID NO: 4741217 - DNA, 25 bp, Homo sapien
atgcacctaaaacaagggcctttct

SEQ ID NO: 4741218 - DNA, 25 bp, Homo sapien
tttctttcaatgcacctaaaacaag

SEQ ID NO: 4741219 - DNA, 25 bp, Homo sapien
aaagtatatttggagaatgccctgc

SEQ ID NO: 4741220 - DNA, 25 bp, Homo sapien
gccttctgctgaggtgagttagacc

SEQ ID NO: 4741221 - DNA, 25 bp, Homo sapien
gagtggcacaagtcatttgaggaca

SEQ ID NO: 4741222 - DNA, 25 bp, Homo sapien
catttgtaggagtggcacaggaccc

SEQ ID NO: 4741223 - DNA, 25 bp, Homo sapien
tcctcagtagaaggaggctgagcct

SEQ ID NO: 4741224 - DNA, 25 bp, Homo sapien
cccacacatgatctttggtgacagt

SEQ ID NO: 4741225 - DNA, 25 bp, Homo sapien
ttcagggttaatccagtgcagaaac

SEQ ID NO: 4741226 - DNA, 25 bp, Homo sapien
tgttatccaagccaacttctggagc

SEQ ID NO: 4741227 - DNA, 25 bp, Homo sapien
tgttttagtgcagaacacttgtacg

SEQ ID NO: 4741228 - DNA, 25 bp, Homo sapien
gattgtggattcgtgagtgattgcc

SEQ ID NO: 4741229 - DNA, 25 bp, Homo sapien
gatgagattgagtcagaggctctga

SEQ ID NO: 4741230 - DNA, 25 bp, Homo sapien
tacgttatctacacaagcttcattg

SEQ ID NO: 4741231 - DNA, 25 bp, Homo sapien
aagagccacataatagagagcaggc

SEQ ID NO: 4741232 - DNA, 25 bp, Homo sapien
gaatcttggacgctgtctgcaccag

SEQ ID NO: 4741233 - DNA, 25 bp, Homo sapien
ggagcccagatcctgactatgctta

SEQ ID NO: 4741234 - DNA, 25 bp, Homo sapien
ctcaaagtttgaagacagagatccc

SEQ ID NO: 4741235 - DNA, 25 bp, Homo sapien
agatctctgtcctcgctgaaagtga

SEQ ID NO: 4741236 - DNA, 25 bp, Homo sapien
ggattcgccgcacacttccttcctg

SEQ ID NO: 4741237 - DNA, 25 bp, Homo sapien
gttctcacctgccagcaattgctta

SEQ ID NO: 4741238 - DNA, 25 bp, Homo sapien
aacattgcagatttggcagcagggg

SEQ ID NO: 4741239 - DNA, 25 bp, Homo sapien
ttgcttaatctccagagccataaca

SEQ ID NO: 4741240 - DNA, 25 bp, Homo sapien
aacattaatgatggagtgacatctg

SEQ ID NO: 4741241 - DNA, 25 bp, Homo sapien
acattaatgatggagtgacatctgc

SEQ ID NO: 4741242 - DNA, 25 bp, Homo sapien
gcagcttccacaacttctcggcttc

SEQ ID NO: 4741243 - DNA, 25 bp, Homo sapien
cttccacaacttctcggcttcttcc

SEQ ID NO: 4741244 - DNA, 25 bp, Homo sapien
gcttcttcctgtgaagttctcctag

SEQ ID NO: 4741245 - DNA, 25 bp, Homo sapien
tcggcttcttcctgtgaagttctcc

SEQ ID NO: 4741246 - DNA, 25 bp, Homo sapien
agacttttgttggactcttcggtga

SEQ ID NO: 4741247 - DNA, 25 bp, Homo sapien
gacttttgttggactcttcggtgac

SEQ ID NO: 4741248 - DNA, 25 bp, Homo sapien
acttttgttggactcttcggtgaca

SEQ ID NO: 4741249 - DNA, 25 bp, Homo sapien
cagacttttgttggactcttcggtg

SEQ ID NO: 4741250 - DNA, 25 bp, Homo sapien
aaacattagaatgcaaagctgctac

SEQ ID NO: 4741251 - DNA, 25 bp, Homo sapien
aaaacattagaatgcaaagctgcta

SEQ ID NO: 4741252 - DNA, 25 bp, Homo sapien
agacaaaaacattagaatgcaaagc

SEQ ID NO: 4741253 - DNA, 25 bp, Homo sapien
caaaaacattagaatgcaaagctgc

SEQ ID NO: 4741254 - DNA, 25 bp, Homo sapien
ggtaccaagcttaatttttggcagc

SEQ ID NO: 4741255 - DNA, 25 bp, Homo sapien
taatgcagatggatccataggtgta

SEQ ID NO: 4741256 - DNA, 25 bp, Homo sapien
aaaacaaaggtagggctcaacatga

SEQ ID NO: 4741257 - DNA, 25 bp, Homo sapien
caacagctcctgttaggtaccaagc

SEQ ID NO: 4741258 - DNA, 25 bp, Homo sapien
ctgcaaagtagcctgtatccttcat

SEQ ID NO: 4741259 - DNA, 25 bp, Homo sapien
gcatgttcccacttaaataaaggca

SEQ ID NO: 4741260 - DNA, 25 bp, Homo sapien
aataaaggcatcaagcaggtgtaca

SEQ ID NO: 4741261 - DNA, 25 bp, Homo sapien
ggcccgtctgctcggcacccagaac

SEQ ID NO: 4741262 - DNA, 25 bp, Homo sapien
accatgaccacctcagcatgttccc

SEQ ID NO: 4741263 - DNA, 25 bp, Homo sapien
acagcaggtaactttacaaataatg

SEQ ID NO: 4741264 - DNA, 25 bp, Homo sapien
gctaacagcaggtaactttacaaat

SEQ ID NO: 4741265 - DNA, 25 bp, Homo sapien
aagctaacagcaggtaactttacaa

SEQ ID NO: 4741266 - DNA, 25 bp, Homo sapien
tgaaagctaacagcaggtaacttta

SEQ ID NO: 4741267 - DNA, 25 bp, Homo sapien
tttgtgggacagcatggatgacaaa

SEQ ID NO: 4741268 - DNA, 25 bp, Homo sapien
tgtgggacagcatggatgacaaatg

SEQ ID NO: 4741269 - DNA, 25 bp, Homo sapien
tgacaaatggtctactgtgtaaatt

SEQ ID NO: 4741270 - DNA, 25 bp, Homo sapien
ggatgacaaatggtctactgtgtaa

SEQ ID NO: 4741271 - DNA, 25 bp, Homo sapien
gaagaatttgctctcgcttgtgaag

SEQ ID NO: 4741272 - DNA, 25 bp, Homo sapien
aagaatttgctctcgcttgtgaagc

SEQ ID NO: 4741273 - DNA, 25 bp, Homo sapien
aacgtcataatagaacacggagaag

SEQ ID NO: 4741274 - DNA, 25 bp, Homo sapien
tctctggggaattcagaacgtcata

SEQ ID NO: 4741275 - DNA, 25 bp, Homo sapien
catgcttcgggtctcttgtgtcggg

SEQ ID NO: 4741276 - DNA, 25 bp, Homo sapien
tgtacttaagtggtgccgagactca

SEQ ID NO: 4741277 - DNA, 25 bp, Homo sapien
gagccactggtttgtgcaggtttct

SEQ ID NO: 4741278 - DNA, 25 bp, Homo sapien
gtgcaggtttctcagtgtacttaag

SEQ ID NO: 4741279 - DNA, 25 bp, Homo sapien
aaagtgggttacacgacagcacagc

SEQ ID NO: 4741280 - DNA, 25 bp, Homo sapien
tactgcaaaggtgagtgccccagtg

SEQ ID NO: 4741281 - DNA, 25 bp, Homo sapien
taatcccagaaaacagcgcataggg

SEQ ID NO: 4741282 - DNA, 25 bp, Homo sapien
tatgtgaaggttcgttgggaccctc

SEQ ID NO: 4741283 - DNA, 25 bp, Homo sapien
tagggctgcagcctctttccattcc

SEQ ID NO: 4741284 - DNA, 25 bp, Homo sapien
gggctgcagcctctttccattcctc

SEQ ID NO: 4741285 - DNA, 25 bp, Homo sapien
tccccattcggatttttcttctcca

SEQ ID NO: 4741286 - DNA, 25 bp, Homo sapien
gcagcctctttccattcctcctctt

SEQ ID NO: 4741287 - DNA, 25 bp, Homo sapien
ttgctccacgctgcattttagtgga

SEQ ID NO: 4741288 - DNA, 25 bp, Homo sapien
agtggagacagaaactgctgcgaga

SEQ ID NO: 4741289 - DNA, 25 bp, Homo sapien
tttagtggagacagaaactgctgcg

SEQ ID NO: 4741290 - DNA, 25 bp, Homo sapien
tgctccacgctgcattttagtggag

SEQ ID NO: 4741291 - DNA, 25 bp, Homo sapien
cagtttctatagcactgggtaggca

SEQ ID NO: 4741292 - DNA, 25 bp, Homo sapien
cagaatttcggctagcactaaggga

SEQ ID NO: 4741293 - DNA, 25 bp, Homo sapien
tggtctgggccagtgactaagaagc

SEQ ID NO: 4741294 - DNA, 25 bp, Homo sapien
gctgcaacccagacaatggcgagat

SEQ ID NO: 4741295 - DNA, 25 bp, Homo sapien
tggtcagcataggttcagaacacgc

SEQ ID NO: 4741296 - DNA, 25 bp, Homo sapien
tagaacctgatgttgcacgccctct

SEQ ID NO: 4741297 - DNA, 25 bp, Homo sapien
ttggacgcttgcctctagaacctga

SEQ ID NO: 4741298 - DNA, 25 bp, Homo sapien
taaccaggttgtgtctcaggctgag

SEQ ID NO: 4741299 - DNA, 25 bp, Homo sapien
aaaggaaagaatgcacggccgcacg

SEQ ID NO: 4741300 - DNA, 25 bp, Homo sapien
agaaaggaaagaatgcacggccgca

SEQ ID NO: 4741301 - DNA, 25 bp, Homo sapien
gaaaggaaagaatgcacggccgcac

SEQ ID NO: 4741302 - DNA, 25 bp, Homo sapien
aaggaaagaatgcacggccgcacgg

SEQ ID NO: 4741303 - DNA, 25 bp, Homo sapien
tactggtcgatattcctgtgggaag

SEQ ID NO: 4741304 - DNA, 25 bp, Homo sapien
tttctggctgactagaagagctacc

SEQ ID NO: 4741305 - DNA, 25 bp, Homo sapien
ggtgagcgagaaaccactatctggg

SEQ ID NO: 4741306 - DNA, 25 bp, Homo sapien
tgtgctatgtacgatgaacgactga

SEQ ID NO: 4741307 - DNA, 25 bp, Homo sapien
ttcctgaggcctgaagatttgggat

SEQ ID NO: 4741308 - DNA, 25 bp, Homo sapien
cctctctcttgacttgtggctaaat

SEQ ID NO: 4741309 - DNA, 25 bp, Homo sapien
gggctcctagggtagcctctctctt

SEQ ID NO: 4741310 - DNA, 25 bp, Homo sapien
cttgtggctaaattcttgtccagga

SEQ ID NO: 4741311 - DNA, 25 bp, Homo sapien
cacagctagcaggatatcaatgatg

SEQ ID NO: 4741312 - DNA, 25 bp, Homo sapien
tgatgaaatactgaaagttttcccc

SEQ ID NO: 4741313 - DNA, 25 bp, Homo sapien
cccaacacgatataaagcatttatg

SEQ ID NO: 4741314 - DNA, 25 bp, Homo sapien
catttatgagaaagccacagctagc

SEQ ID NO: 4741315 - DNA, 25 bp, Homo sapien
aatcagttccagcaggaaaagaatc

SEQ ID NO: 4741316 - DNA, 25 bp, Homo sapien
tctgtagaaggtcaaacttaagagt

SEQ ID NO: 4741317 - DNA, 25 bp, Homo sapien
taaagacctaggacatctggtggaa

SEQ ID NO: 4741318 - DNA, 25 bp, Homo sapien
ccttcaagaagtggcgtggctgctt

SEQ ID NO: 4741319 - DNA, 25 bp, Homo sapien
gcagagggatgacttcctgtcccac

SEQ ID NO: 4741320 - DNA, 25 bp, Homo sapien
aagtttagtctgtctcagtgtatct

SEQ ID NO: 4741321 - DNA, 25 bp, Homo sapien
acaggaagcaatcggatatgcaatt

SEQ ID NO: 4741322 - DNA, 25 bp, Homo sapien
agagggatgacttcctgtcccacat

SEQ ID NO: 4741323 - DNA, 25 bp, Homo sapien
gataatctgcaagtcaaaactaatg

SEQ ID NO: 4741324 - DNA, 25 bp, Homo sapien
cacatacagaaagttacacggatgc

SEQ ID NO: 4741325 - DNA, 25 bp, Homo sapien
gccaagagcacaggacactatgtta

SEQ ID NO: 4741326 - DNA, 25 bp, Homo sapien
caaaccctgtaattgaatggcacaa

SEQ ID NO: 4741327 - DNA, 25 bp, Homo sapien
tgagctaggccatagtggtgcatgc

SEQ ID NO: 4741328 - DNA, 25 bp, Homo sapien
aatagtttacccagattacttatga

SEQ ID NO: 4741329 - DNA, 25 bp, Homo sapien
aaagttatttccctgatggccagcc

SEQ ID NO: 4741330 - DNA, 25 bp, Homo sapien
agatcatttataagcatttattcca

SEQ ID NO: 4741331 - DNA, 25 bp, Homo sapien
ttaataatcacagggctagccaagt

SEQ ID NO: 4741332 - DNA, 25 bp, Homo sapien
ggcagcaaagaaagaatttaataat

SEQ ID NO: 4741333 - DNA, 25 bp, Homo sapien
agaatttaataatcacagggctagc

SEQ ID NO: 4741334 - DNA, 25 bp, Homo sapien
atttaataatcacagggctagccaa

SEQ ID NO: 4741335 - DNA, 25 bp, Homo sapien
gcccatataacagtatggtggtgca

SEQ ID NO: 4741336 - DNA, 25 bp, Homo sapien
gccctgagcgatgggatctgacgcc

SEQ ID NO: 4741337 - DNA, 25 bp, Homo sapien
ccttatcagcataagtgttgccctg

SEQ ID NO: 4741338 - DNA, 25 bp, Homo sapien
tgctagctgcttttttagctacctt

SEQ ID NO: 4741339 - DNA, 25 bp, Homo sapien
aatgtgaagtgggtagccttcgtat

SEQ ID NO: 4741340 - DNA, 25 bp, Homo sapien
ccgaggtgatcaggcaacgtcagtc

SEQ ID NO: 4741341 - DNA, 25 bp, Homo sapien
gggaaaggcagcaatgaggtgtggc

SEQ ID NO: 4741342 - DNA, 25 bp, Homo sapien
tgtctcgacctaataagggagctgg

SEQ ID NO: 4741343 - DNA, 25 bp, Homo sapien
acacccaagagtaacctctgttgta

SEQ ID NO: 4741344 - DNA, 25 bp, Homo sapien
tctaagtgtctaaaccaaactcttc

SEQ ID NO: 4741345 - DNA, 25 bp, Homo sapien
ctcttccttgatttaaacacccaag

SEQ ID NO: 4741346 - DNA, 25 bp, Homo sapien
ctctaagtgtctaaaccaaactctt

SEQ ID NO: 4741347 - DNA, 25 bp, Homo sapien
tagagacctgtattagagcaatgcc

SEQ ID NO: 4741348 - DNA, 25 bp, Homo sapien
catgttgttaagtctgcaggcaccc

SEQ ID NO: 4741349 - DNA, 25 bp, Homo sapien
gatgcatcagaaagcctaggtgtcc

SEQ ID NO: 4741350 - DNA, 25 bp, Homo sapien
atcaggaatgtgagattgcagcccc

SEQ ID NO: 4741351 - DNA, 25 bp, Homo sapien
ttttttacctgacagatggtgcaga

SEQ ID NO: 4741352 - DNA, 25 bp, Homo sapien
gccagtaatatactttctacattga

SEQ ID NO: 4741353 - DNA, 25 bp, Homo sapien
cagatggtgcagacaaacctgtatt

SEQ ID NO: 4741354 - DNA, 25 bp, Homo sapien
ggcccagccagtaatatactttcta

SEQ ID NO: 4741355 - DNA, 25 bp, Homo sapien
gaaatgatgagcgtctgaactacca

SEQ ID NO: 4741356 - DNA, 25 bp, Homo sapien
tatggcgaatcaagcttggagatgc

SEQ ID NO: 4741357 - DNA, 25 bp, Homo sapien
gaagcagcatagaatggctcctgtg

SEQ ID NO: 4741358 - DNA, 25 bp, Homo sapien
gatcaactgctgcacaggttacagg

SEQ ID NO: 4741359 - DNA, 25 bp, Homo sapien
aacacaggacctgacatacaggagc

SEQ ID NO: 4741360 - DNA, 25 bp, Homo sapien
tctatcaggacatagctagagttcc

SEQ ID NO: 4741361 - DNA, 25 bp, Homo sapien
cacaaaacgcagtcatgtgccaata

SEQ ID NO: 4741362 - DNA, 25 bp, Homo sapien
tgtgccaatacctagatgtgaaggc

SEQ ID NO: 4741363 - DNA, 25 bp, Homo sapien
ggtccaactccaggtggcaactgga

SEQ ID NO: 4741364 - DNA, 25 bp, Homo sapien
tgctgccgggcccttaacactacat

SEQ ID NO: 4741365 - DNA, 25 bp, Homo sapien
gctgggcctctcagacactcgatga

SEQ ID NO: 4741366 - DNA, 25 bp, Homo sapien
agctgggttgctgccgggcccttaa

SEQ ID NO: 4741367 - DNA, 25 bp, Homo sapien
ctggttcctctgagacctgctggct

SEQ ID NO: 4741368 - DNA, 25 bp, Homo sapien
ctgatgtcttctggttcctctgaga

SEQ ID NO: 4741369 - DNA, 25 bp, Homo sapien
catctgatgtcttctggttcctctg

SEQ ID NO: 4741370 - DNA, 25 bp, Homo sapien
tggttcctctgagacctgctggctg

SEQ ID NO: 4741371 - DNA, 25 bp, Homo sapien
tttccctctttagcatgttgtacat

SEQ ID NO: 4741372 - DNA, 25 bp, Homo sapien
ctttagcatgttgtacattgacaaa

SEQ ID NO: 4741373 - DNA, 25 bp, Homo sapien
cctctttagcatgttgtacattgac

SEQ ID NO: 4741374 - DNA, 25 bp, Homo sapien
cccatttccctctttagcatgttgt

SEQ ID NO: 4741375 - DNA, 25 bp, Homo sapien
tggaaacacaaagccactaacaatc

SEQ ID NO: 4741376 - DNA, 25 bp, Homo sapien
tacaactttatccaggttctgtgtg

SEQ ID NO: 4741377 - DNA, 25 bp, Homo sapien
gaacctggtgggtgaagtttgcaat

SEQ ID NO: 4741378 - DNA, 25 bp, Homo sapien
tcccatgagacaggacaggtgtggt

SEQ ID NO: 4741379 - DNA, 25 bp, Homo sapien
taaagactgagcacaatacctggtc

SEQ ID NO: 4741380 - DNA, 25 bp, Homo sapien
tggccccataaaactctgtgcgcat

SEQ ID NO: 4741381 - DNA, 25 bp, Homo sapien
gatcagtgatggagctagagaaccc

SEQ ID NO: 4741382 - DNA, 25 bp, Homo sapien
aaggaagggccgacatggaacaaag

SEQ ID NO: 4741383 - DNA, 25 bp, Homo sapien
gatgacctcagggtaaactgccaga

SEQ ID NO: 4741384 - DNA, 25 bp, Homo sapien
cctgaagcataattctgaactgggc

SEQ ID NO: 4741385 - DNA, 25 bp, Homo sapien
tgttctgtgatgcaatgatgacctc

SEQ ID NO: 4741386 - DNA, 25 bp, Homo sapien
taaggcagttcggtgctagaatcca

SEQ ID NO: 4741387 - DNA, 25 bp, Homo sapien
cagcttgggaggttgcgacagcttc

SEQ ID NO: 4741388 - DNA, 25 bp, Homo sapien
tggtgacactattcttattcgtggt

SEQ ID NO: 4741389 - DNA, 25 bp, Homo sapien
ccctagcctgcagacactgcggcag

SEQ ID NO: 4741390 - DNA, 25 bp, Homo sapien
tcgtggtttggcagattcagagatg

SEQ ID NO: 4741391 - DNA, 25 bp, Homo sapien
ccaaatgaggactgggtaatgacca

SEQ ID NO: 4741392 - DNA, 25 bp, Homo sapien
tgaggctgggtgagtaaccactgac

SEQ ID NO: 4741393 - DNA, 25 bp, Homo sapien
gatgaatgactgctgacaccacatg

SEQ ID NO: 4741394 - DNA, 25 bp, Homo sapien
tgagtgcctcatagcaaaccttgtg

SEQ ID NO: 4741395 - DNA, 25 bp, Homo sapien
cgtgagttcacacttatctgagtag

SEQ ID NO: 4741396 - DNA, 25 bp, Homo sapien
cattttacatgggaacgtgagttca

SEQ ID NO: 4741397 - DNA, 25 bp, Homo sapien
cctgctggccaagggtggaactaaa

SEQ ID NO: 4741398 - DNA, 25 bp, Homo sapien
tctcccactactatggtctccaaag

SEQ ID NO: 4741399 - DNA, 25 bp, Homo sapien
gcaatgttgactctgtgtgtaagca

SEQ ID NO: 4741400 - DNA, 25 bp, Homo sapien
gttatataaagctaggtgcccacaa

SEQ ID NO: 4741401 - DNA, 25 bp, Homo sapien
gagacaatgcagtggtaacgcaaca

SEQ ID NO: 4741402 - DNA, 25 bp, Homo sapien
gaatgtttcatctgctcatcaccgt

SEQ ID NO: 4741403 - DNA, 25 bp, Homo sapien
cataccgatgttgatcaggagagga

SEQ ID NO: 4741404 - DNA, 25 bp, Homo sapien
gaggcaacaggagacatcataccga

SEQ ID NO: 4741405 - DNA, 25 bp, Homo sapien
tgcaaccctgcgattttcaaatggc

SEQ ID NO: 4741406 - DNA, 25 bp, Homo sapien
tagagaatatccacctgcaagtaag

SEQ ID NO: 4741407 - DNA, 25 bp, Homo sapien
cagtagtgccttggttcacacccca

SEQ ID NO: 4741408 - DNA, 25 bp, Homo sapien
tccctgttggtaattcactctccgc

SEQ ID NO: 4741409 - DNA, 25 bp, Homo sapien
aggcccaaggcccaattccctgttg

SEQ ID NO: 4741410 - DNA, 25 bp, Homo sapien
tcgggcagcattgagtcaagtgcag

SEQ ID NO: 4741411 - DNA, 25 bp, Homo sapien
tccagagtcagactgtagctgaact

SEQ ID NO: 4741412 - DNA, 25 bp, Homo sapien
gtagctgaactgttcagactggaga

SEQ ID NO: 4741413 - DNA, 25 bp, Homo sapien
ggctgtgggcgcacccctggtccct

SEQ ID NO: 4741414 - DNA, 25 bp, Homo sapien
aacagaaaccccctgtccagagtca

SEQ ID NO: 4741415 - DNA, 25 bp, Homo sapien
ccagctccaccctggttccctgaag

SEQ ID NO: 4741416 - DNA, 25 bp, Homo sapien
agctccaccctggttccctgaaggg

SEQ ID NO: 4741417 - DNA, 25 bp, Homo sapien
ttgtcttctgtgtatacactgccac

SEQ ID NO: 4741418 - DNA, 25 bp, Homo sapien
atcattgtcttctgtgtatacactg

SEQ ID NO: 4741419 - DNA, 25 bp, Homo sapien
taggactcccatcccttttggtgta

SEQ ID NO: 4741420 - DNA, 25 bp, Homo sapien
ctgtctaatgctcccaaccaactta

SEQ ID NO: 4741421 - DNA, 25 bp, Homo sapien
aaagtaacttaagcactgtctaatg

SEQ ID NO: 4741422 - DNA, 25 bp, Homo sapien
gacagggcctgtgtaagatttccac

SEQ ID NO: 4741423 - DNA, 25 bp, Homo sapien
caaagccccgactctgctgaagggt

SEQ ID NO: 4741424 - DNA, 25 bp, Homo sapien
cattgtcactgacagaacggcgcgc

SEQ ID NO: 4741425 - DNA, 25 bp, Homo sapien
tgggcaaacatctcatacttccgaa

SEQ ID NO: 4741426 - DNA, 25 bp, Homo sapien
atctcgacggatctcaggcactgga

SEQ ID NO: 4741427 - DNA, 25 bp, Homo sapien
tactttaaaaggaaatgccaatggc

SEQ ID NO: 4741428 - DNA, 25 bp, Homo sapien
tacctagcggtctcacttccagtga

SEQ ID NO: 4741429 - DNA, 25 bp, Homo sapien
caacctgaggtaagatgctaggcca

SEQ ID NO: 4741430 - DNA, 25 bp, Homo sapien
agttggtaaacacagatcactaggg

SEQ ID NO: 4741431 - DNA, 25 bp, Homo sapien
ggatggccagcttgcaagcacgctg

SEQ ID NO: 4741432 - DNA, 25 bp, Homo sapien
tcgatggattcacggatggccagct

SEQ ID NO: 4741433 - DNA, 25 bp, Homo sapien
cacgctggcaaatctctgtcaggtc

SEQ ID NO: 4741434 - DNA, 25 bp, Homo sapien
tctcgcctaatctcactctcgatgg

SEQ ID NO: 4741435 - DNA, 25 bp, Homo sapien
ttagccaggaactccaagtccacat

SEQ ID NO: 4741436 - DNA, 25 bp, Homo sapien
tagccaggaactccaagtccacatc

SEQ ID NO: 4741437 - DNA, 25 bp, Homo sapien
taccagcctgaggactcatgcaagt

SEQ ID NO: 4741438 - DNA, 25 bp, Homo sapien
ctgaggactcatgcaagtctcccac

SEQ ID NO: 4741439 - DNA, 25 bp, Homo sapien
tccgtaccagcctgaggactcatgc

SEQ ID NO: 4741440 - DNA, 25 bp, Homo sapien
cgtaccagcctgaggactcatgcaa

SEQ ID NO: 4741441 - DNA, 25 bp, Homo sapien
gacttgcgcaggttagccttgagga

SEQ ID NO: 4741442 - DNA, 25 bp, Homo sapien
ccttgaggatggcaacacgggactt

SEQ ID NO: 4741443 - DNA, 25 bp, Homo sapien
aatgttacctccacgagccttggca

SEQ ID NO: 4741444 - DNA, 25 bp, Homo sapien
tgtagatgagctgatcaagacggcc

SEQ ID NO: 4741445 - DNA, 25 bp, Homo sapien
aatggattgattcaagcactaacaa

SEQ ID NO: 4741446 - DNA, 25 bp, Homo sapien
tgtctctaggcaaacgtggtggctc

SEQ ID NO: 4741447 - DNA, 25 bp, Homo sapien
aaaactagatgtctctaggcaaacg

SEQ ID NO: 4741448 - DNA, 25 bp, Homo sapien
tcaagcactaacaaaactagatgtc

SEQ ID NO: 4741449 - DNA, 25 bp, Homo sapien
agcagctcaggacccttgatggaga

SEQ ID NO: 4741450 - DNA, 25 bp, Homo sapien
caggaatttgtctgggtgctccaca

SEQ ID NO: 4741451 - DNA, 25 bp, Homo sapien
catagaacagaactcccttggaagg

SEQ ID NO: 4741452 - DNA, 25 bp, Homo sapien
ggtgtcatgccaaacttcaggaatt

SEQ ID NO: 4741453 - DNA, 25 bp, Homo sapien
gatgggttactctggctcaaggccc

SEQ ID NO: 4741454 - DNA, 25 bp, Homo sapien
cctgtagctcacgtttgacatcctc

SEQ ID NO: 4741455 - DNA, 25 bp, Homo sapien
ccccgatgtcttcccaggttacctg

SEQ ID NO: 4741456 - DNA, 25 bp, Homo sapien
acctctaccacggtttcccgcagtg

SEQ ID NO: 4741457 - DNA, 25 bp, Homo sapien
aactgctagagagttcatgacctcg

SEQ ID NO: 4741458 - DNA, 25 bp, Homo sapien
ggaagtcatccatagtaactgctag

SEQ ID NO: 4741459 - DNA, 25 bp, Homo sapien
catgacctcggcatcaatggtctca

SEQ ID NO: 4741460 - DNA, 25 bp, Homo sapien
tcctctaggtcaatgagatccatct

SEQ ID NO: 4741461 - DNA, 25 bp, Homo sapien
gaagaatctctaagcgtcctgtagc

SEQ ID NO: 4741462 - DNA, 25 bp, Homo sapien
atatctacctccctgtcaaagcgac

SEQ ID NO: 4741463 - DNA, 25 bp, Homo sapien
catgttcttggtatggatctgaaga

SEQ ID NO: 4741464 - DNA, 25 bp, Homo sapien
cgtcctgtagcatcaggaattccaa

SEQ ID NO: 4741465 - DNA, 25 bp, Homo sapien
tgggtctgttggttgctgccataac

SEQ ID NO: 4741466 - DNA, 25 bp, Homo sapien
gccataacaatcacatgtgccctct

SEQ ID NO: 4741467 - DNA, 25 bp, Homo sapien
caaatcgccgtagagctgggtcaat

SEQ ID NO: 4741468 - DNA, 25 bp, Homo sapien
tcaacaactgtgatacaatgcgccg

SEQ ID NO: 4741469 - DNA, 25 bp, Homo sapien
ccctctatcccctcaggtaagctcc

SEQ ID NO: 4741470 - DNA, 25 bp, Homo sapien
tctatcccctcaggtaagctcctac

SEQ ID NO: 4741471 - DNA, 25 bp, Homo sapien
ctctatcccctcaggtaagctccta

SEQ ID NO: 4741472 - DNA, 25 bp, Homo sapien
ccccctctatcccctcaggtaagct

SEQ ID NO: 4741473 - DNA, 25 bp, Homo sapien
tcagactcaccagccaatttgctca

SEQ ID NO: 4741474 - DNA, 25 bp, Homo sapien
tctctcttttgggagcgatggcatc

SEQ ID NO: 4741475 - DNA, 25 bp, Homo sapien
aaggctttacgaaggttgctctcag

SEQ ID NO: 4741476 - DNA, 25 bp, Homo sapien
gccaatttgctcatgatctcaggac

SEQ ID NO: 4741477 - DNA, 25 bp, Homo sapien
ctacagctcgagcaatcagggtctt

SEQ ID NO: 4741478 - DNA, 25 bp, Homo sapien
aggaggtccgtaaagcaggattcct

SEQ ID NO: 4741479 - DNA, 25 bp, Homo sapien
atttgctacagctcgagcaatcagg

SEQ ID NO: 4741480 - DNA, 25 bp, Homo sapien
ggtccgtaaagcaggattcctctag

SEQ ID NO: 4741481 - DNA, 25 bp, Homo sapien
tgcagagtgtgattaggttcccacc

SEQ ID NO: 4741482 - DNA, 25 bp, Homo sapien
ccaatgcagagtgtgattaggttcc

SEQ ID NO: 4741483 - DNA, 25 bp, Homo sapien
tgtgattaggttcccaccttctccc

SEQ ID NO: 4741484 - DNA, 25 bp, Homo sapien
ctgtggaccaatgcagagtgtgatt

SEQ ID NO: 4741485 - DNA, 25 bp, Homo sapien
tgaagatacatgactagggaaaggc

SEQ ID NO: 4741486 - DNA, 25 bp, Homo sapien
taaaatggcttgactagcgctccag

SEQ ID NO: 4741487 - DNA, 25 bp, Homo sapien
gcaagaggccattacactaagggct

SEQ ID NO: 4741488 - DNA, 25 bp, Homo sapien
tattaagaataagccctccgcagta

SEQ ID NO: 4741489 - DNA, 25 bp, Homo sapien
tcacaccaattgccttaaagagggc

SEQ ID NO: 4741490 - DNA, 25 bp, Homo sapien
ttcacaccaattgccttaaagaggg

SEQ ID NO: 4741491 - DNA, 25 bp, Homo sapien
aaagagggcaggatgtctcaggggc

SEQ ID NO: 4741492 - DNA, 25 bp, Homo sapien
cttcacaccaattgccttaaagagg

SEQ ID NO: 4741493 - DNA, 25 bp, Homo sapien
ccaatgtcatcataccctacttcat

SEQ ID NO: 4741494 - DNA, 25 bp, Homo sapien
accaatgtcatcataccctacttca

SEQ ID NO: 4741495 - DNA, 25 bp, Homo sapien
tgtcatcataccctacttcattcaa

SEQ ID NO: 4741496 - DNA, 25 bp, Homo sapien
catcataccctacttcattcaagga

SEQ ID NO: 4741497 - DNA, 25 bp, Homo sapien
taaatccaagaaacaattaggccca

SEQ ID NO: 4741498 - DNA, 25 bp, Homo sapien
gaatagctggcaggtttctcatccc

SEQ ID NO: 4741499 - DNA, 25 bp, Homo sapien
gatggttagttctccaaagaacacc

SEQ ID NO: 4741500 - DNA, 25 bp, Homo sapien
attcctggcattaggtaaatccaag

SEQ ID NO: 4741501 - DNA, 25 bp, Homo sapien
tctcgtttgataggctccccttcgc

SEQ ID NO: 4741502 - DNA, 25 bp, Homo sapien
caacaatgcaataagggctaggatc

SEQ ID NO: 4741503 - DNA, 25 bp, Homo sapien
catcccaccacggacaagaaaaatg

SEQ ID NO: 4741504 - DNA, 25 bp, Homo sapien
ccttcgcagtggatcactgtgtctg

SEQ ID NO: 4741505 - DNA, 25 bp, Homo sapien
tccggatgggtcgatacgcttccag

SEQ ID NO: 4741506 - DNA, 25 bp, Homo sapien
gcagcacatggatacgtttgccgta

SEQ ID NO: 4741507 - DNA, 25 bp, Homo sapien
tccactgtgtcatcaatgggcagca

SEQ ID NO: 4741508 - DNA, 25 bp, Homo sapien
cgtacttcacatcagggcatggctg

SEQ ID NO: 4741509 - DNA, 25 bp, Homo sapien
actgggtgtccaaaagggcctggca

SEQ ID NO: 4741510 - DNA, 25 bp, Homo sapien
acacttcgggcccaagcactgggtg

SEQ ID NO: 4741511 - DNA, 25 bp, Homo sapien
tccatattaccaaccacacttcggg

SEQ ID NO: 4741512 - DNA, 25 bp, Homo sapien
agactccatattaccaaccacactt

SEQ ID NO: 4741513 - DNA, 25 bp, Homo sapien
tgtgtcacctcggaacaactgcaat

SEQ ID NO: 4741514 - DNA, 25 bp, Homo sapien
gaacaagtatcatcagaaaggacga

SEQ ID NO: 4741515 - DNA, 25 bp, Homo sapien
aaaggacgatgcaaacagcttctcg

SEQ ID NO: 4741516 - DNA, 25 bp, Homo sapien
catcccctaggcgtacacgaaggtt

SEQ ID NO: 4741517 - DNA, 25 bp, Homo sapien
aaggaaagactagtctgtggccaca

SEQ ID NO: 4741518 - DNA, 25 bp, Homo sapien
agtgcagtaaggaaagactagtctg

SEQ ID NO: 4741519 - DNA, 25 bp, Homo sapien
aaatccctcaagtaagtgcagtaag

SEQ ID NO: 4741520 - DNA, 25 bp, Homo sapien
ctgggaaaatccctcaagtaagtgc

SEQ ID NO: 4741521 - DNA, 25 bp, Homo sapien
cctcattgatggcttcatcaacaat

SEQ ID NO: 4741522 - DNA, 25 bp, Homo sapien
catcaacaattaaccgattgggacg

SEQ ID NO: 4741523 - DNA, 25 bp, Homo sapien
agaatggctgttgataggtcatcac

SEQ ID NO: 4741524 - DNA, 25 bp, Homo sapien
gacggttcttctgtttgagaatggc

SEQ ID NO: 4741525 - DNA, 25 bp, Homo sapien
aagcgcctcgccagtctctaaaact

SEQ ID NO: 4741526 - DNA, 25 bp, Homo sapien
ggagtcagtagatactcctgcccca

SEQ ID NO: 4741527 - DNA, 25 bp, Homo sapien
ggagcagtatctaccatacatatta

SEQ ID NO: 4741528 - DNA, 25 bp, Homo sapien
tagatgaagctgtccctagaccaga

SEQ ID NO: 4741529 - DNA, 25 bp, Homo sapien
taagtaagccagacaacctcccttg

SEQ ID NO: 4741530 - DNA, 25 bp, Homo sapien
taggctaaacctactgatgccaggg

SEQ ID NO: 4741531 - DNA, 25 bp, Homo sapien
ggtgctaccctccttataggctaaa

SEQ ID NO: 4741532 - DNA, 25 bp, Homo sapien
tcagggaggccttaagttctaccaa

SEQ ID NO: 4741533 - DNA, 25 bp, Homo sapien
cattaaccaaagtaggaaggccaga

SEQ ID NO: 4741534 - DNA, 25 bp, Homo sapien
aaatgctgtgctcagctaggaagcc

SEQ ID NO: 4741535 - DNA, 25 bp, Homo sapien
tctcttttttaagagcggcctcgtg

SEQ ID NO: 4741536 - DNA, 25 bp, Homo sapien
tcgtgttagtaaggctcaggaaaac

SEQ ID NO: 4741537 - DNA, 25 bp, Homo sapien
tgagagcaatgtaaacccacgagct

SEQ ID NO: 4741538 - DNA, 25 bp, Homo sapien
gcttgacttatagaactgggactgg

SEQ ID NO: 4741539 - DNA, 25 bp, Homo sapien
taaaagactgaatttggcctgacca

SEQ ID NO: 4741540 - DNA, 25 bp, Homo sapien
tgaccatgggccaacagcagttctg

SEQ ID NO: 4741541 - DNA, 25 bp, Homo sapien
tatctaacgctttcctaaggatgga

SEQ ID NO: 4741542 - DNA, 25 bp, Homo sapien
tggaaaggcgcacaaaacacgaact

SEQ ID NO: 4741543 - DNA, 25 bp, Homo sapien
taaactgcacaccacgaaacctgga

SEQ ID NO: 4741544 - DNA, 25 bp, Homo sapien
cagaagcgaaaggtagggctcgccc

SEQ ID NO: 4741545 - DNA, 25 bp, Homo sapien
cgacccggctccaaaaaggcggctg

SEQ ID NO: 4741546 - DNA, 25 bp, Homo sapien
aggccttcacatggcgcaaagtcca

SEQ ID NO: 4741547 - DNA, 25 bp, Homo sapien
agcttccctgagctcggcgggcctt

SEQ ID NO: 4741548 - DNA, 25 bp, Homo sapien
atggcgcaaagtccacgcccaccgg

SEQ ID NO: 4741549 - DNA, 25 bp, Homo sapien
cctctcccggccggcggctgtggcg

SEQ ID NO: 4741550 - DNA, 25 bp, Homo sapien
cggctgtggcggcccgcgggtaacg

SEQ ID NO: 4741551 - DNA, 25 bp, Homo sapien
cgcgcctctcccggccggcggctgt

SEQ ID NO: 4741552 - DNA, 25 bp, Homo sapien
ggcggctgtggcggcccgcgggtaa

SEQ ID NO: 4741553 - DNA, 25 bp, Homo sapien
tcaaacgacggtcgcagacgcttcg

SEQ ID NO: 4741554 - DNA, 25 bp, Homo sapien
tgagccgagaagagccgaatcatcg

SEQ ID NO: 4741555 - DNA, 25 bp, Homo sapien
agacgcttcgctgagactgagccga

SEQ ID NO: 4741556 - DNA, 25 bp, Homo sapien
gggcgaacaacgctggctcctgatc

SEQ ID NO: 4741557 - DNA, 25 bp, Homo sapien
tcaggaaagggcatcatagacaact

SEQ ID NO: 4741558 - DNA, 25 bp, Homo sapien
tcccacgcaagtatatgtagtaggc

SEQ ID NO: 4741559 - DNA, 25 bp, Homo sapien
tccaaagtgaggattcctgtagccc

SEQ ID NO: 4741560 - DNA, 25 bp, Homo sapien
aaaggtgcctcgagcaaagtcaatg

SEQ ID NO: 4741561 - DNA, 25 bp, Homo sapien
tcaaggaaggcgtcacgatcagagg

SEQ ID NO: 4741562 - DNA, 25 bp, Homo sapien
gggacggatccagctcaaatagctt

SEQ ID NO: 4741563 - DNA, 25 bp, Homo sapien
tacaggtcacaagactttggcagag

SEQ ID NO: 4741564 - DNA, 25 bp, Homo sapien
gatgtccgaaattcttcaaggaagg

SEQ ID NO: 4741565 - DNA, 25 bp, Homo sapien
cacccacaataggtccaaggactct

SEQ ID NO: 4741566 - DNA, 25 bp, Homo sapien
gctttcagtgttcaccacccacaat

SEQ ID NO: 4741567 - DNA, 25 bp, Homo sapien
aaggactctaggacaccaactgccc

SEQ ID NO: 4741568 - DNA, 25 bp, Homo sapien
caataggtccaaggactctaggaca

SEQ ID NO: 4741569 - DNA, 25 bp, Homo sapien
ttcatgtgaccccttagtttgggcc

SEQ ID NO: 4741570 - DNA, 25 bp, Homo sapien
catgtgaccccttagtttgggcctc

SEQ ID NO: 4741571 - DNA, 25 bp, Homo sapien
tgtgaccccttagtttgggcctcca

SEQ ID NO: 4741572 - DNA, 25 bp, Homo sapien
catcttcatgtgaccccttagtttg

SEQ ID NO: 4741573 - DNA, 25 bp, Homo sapien
catccctccgatctagcctcttcag

SEQ ID NO: 4741574 - DNA, 25 bp, Homo sapien
ccctccgatctagcctcttcagagt

SEQ ID NO: 4741575 - DNA, 25 bp, Homo sapien
tccctccgatctagcctcttcagag

SEQ ID NO: 4741576 - DNA, 25 bp, Homo sapien
ctcatccctccgatctagcctcttc

SEQ ID NO: 4741577 - DNA, 25 bp, Homo sapien
aggtgaaagtaagtgtctcgattac

SEQ ID NO: 4741578 - DNA, 25 bp, Homo sapien
gcaggtgaaagtaagtgtctcgatt

SEQ ID NO: 4741579 - DNA, 25 bp, Homo sapien
agcaggtgaaagtaagtgtctcgat

SEQ ID NO: 4741580 - DNA, 25 bp, Homo sapien
aagcaggtgaaagtaagtgtctcga

SEQ ID NO: 4741581 - DNA, 25 bp, Homo sapien
ccagcccagagtacagagtcttaga

SEQ ID NO: 4741582 - DNA, 25 bp, Homo sapien
tacactcacatatggaagcgggggc

SEQ ID NO: 4741583 - DNA, 25 bp, Homo sapien
gaggaagtatcttgcctacactcac

SEQ ID NO: 4741584 - DNA, 25 bp, Homo sapien
cttgacatagtcttaggcattgttt

SEQ ID NO: 4741585 - DNA, 25 bp, Homo sapien
cactcttacacttacgcccaagtat

SEQ ID NO: 4741586 - DNA, 25 bp, Homo sapien
tagccgacgtcatgcaagtatacat

SEQ ID NO: 4741587 - DNA, 25 bp, Homo sapien
tctgtccttgcacatctatgcatag

SEQ ID NO: 4741588 - DNA, 25 bp, Homo sapien
acttacgcccaagtatttcccatgg

SEQ ID NO: 4741589 - DNA, 25 bp, Homo sapien
ctgcagtgccgcatctgacttacat

SEQ ID NO: 4741590 - DNA, 25 bp, Homo sapien
taattagggcggctgcccgaagctg

SEQ ID NO: 4741591 - DNA, 25 bp, Homo sapien
gctttggtatcctggccgctggcta

SEQ ID NO: 4741592 - DNA, 25 bp, Homo sapien
cattccagtccacgactaattaggg

SEQ ID NO: 4741593 - DNA, 25 bp, Homo sapien
gcctcacagtcaccaaaaccccaaa

SEQ ID NO: 4741594 - DNA, 25 bp, Homo sapien
gctgggacacattaaagggaaccca

SEQ ID NO: 4741595 - DNA, 25 bp, Homo sapien
ccactcccaaagtcaagaagtgtct

SEQ ID NO: 4741596 - DNA, 25 bp, Homo sapien
tcccaaagtcaagaagtgtcttccc

SEQ ID NO: 4741597 - DNA, 25 bp, Homo sapien
ccactaccacttccaggaggtaaga

SEQ ID NO: 4741598 - DNA, 25 bp, Homo sapien
ctaccacttccaggaggtaagagga

SEQ ID NO: 4741599 - DNA, 25 bp, Homo sapien
cactaccacttccaggaggtaagag

SEQ ID NO: 4741600 - DNA, 25 bp, Homo sapien
actaccacttccaggaggtaagagg

SEQ ID NO: 4741601 - DNA, 25 bp, Homo sapien
ggtgtggcccggaagagcagctcga

SEQ ID NO: 4741602 - DNA, 25 bp, Homo sapien
tcaggtgtggcccggaagagcagct

SEQ ID NO: 4741603 - DNA, 25 bp, Homo sapien
cctcaggtgtggcccggaagagcag

SEQ ID NO: 4741604 - DNA, 25 bp, Homo sapien
aggtgtggcccggaagagcagctcg

SEQ ID NO: 4741605 - DNA, 25 bp, Homo sapien
attgccactttttgggcacccagtt

SEQ ID NO: 4741606 - DNA, 25 bp, Homo sapien
ctgctaaattcactaattgccactt

SEQ ID NO: 4741607 - DNA, 25 bp, Homo sapien
ttgccactttttgggcacccagttg

SEQ ID NO: 4741608 - DNA, 25 bp, Homo sapien
tgccactttttgggcacccagttga

SEQ ID NO: 4741609 - DNA, 25 bp, Homo sapien
gagtcaaggcatcttgggctctgcc

SEQ ID NO: 4741610 - DNA, 25 bp, Homo sapien
ccagagtgggcagtatggcagttcc

SEQ ID NO: 4741611 - DNA, 25 bp, Homo sapien
cacagccgggacatcttgggtagca

SEQ ID NO: 4741612 - DNA, 25 bp, Homo sapien
gctgagcaactcctcacatagagtc

SEQ ID NO: 4741613 - DNA, 25 bp, Homo sapien
cttggctccgagctatccagcaaca

SEQ ID NO: 4741614 - DNA, 25 bp, Homo sapien
ccaagtaatgctctgcagcgtctcc

SEQ ID NO: 4741615 - DNA, 25 bp, Homo sapien
cgagctatccagcaacagggccagc

SEQ ID NO: 4741616 - DNA, 25 bp, Homo sapien
aggtccaagtaatgctctgcagcgt

SEQ ID NO: 4741617 - DNA, 25 bp, Homo sapien
gcttgctagtatgtgcttggtctgg

SEQ ID NO: 4741618 - DNA, 25 bp, Homo sapien
ttgctagtatgtgcttggtctggct

SEQ ID NO: 4741619 - DNA, 25 bp, Homo sapien
cttgctagtatgtgcttggtctggc

SEQ ID NO: 4741620 - DNA, 25 bp, Homo sapien
tgcttgctagtatgtgcttggtctg

SEQ ID NO: 4741621 - DNA, 25 bp, Homo sapien
ctttggaactgcatgggacattcaa

SEQ ID NO: 4741622 - DNA, 25 bp, Homo sapien
gggctttggaactgcatgggacatt

SEQ ID NO: 4741623 - DNA, 25 bp, Homo sapien
ctcaatgagaaactgcggggctttg

SEQ ID NO: 4741624 - DNA, 25 bp, Homo sapien
gaaactgcggggctttggaactgca

SEQ ID NO: 4741625 - DNA, 25 bp, Homo sapien
ggaatcctccaccccacatcttcac

SEQ ID NO: 4741626 - DNA, 25 bp, Homo sapien
aggaatcctccaccccacatcttca

SEQ ID NO: 4741627 - DNA, 25 bp, Homo sapien
tcaggaatcctccaccccacatctt

SEQ ID NO: 4741628 - DNA, 25 bp, Homo sapien
ctcaggaatcctccaccccacatct

SEQ ID NO: 4741629 - DNA, 25 bp, Homo sapien
ccaagtacaacagtgctctctgtgg

SEQ ID NO: 4741630 - DNA, 25 bp, Homo sapien
tgctgatagagcctagaggcctcca

SEQ ID NO: 4741631 - DNA, 25 bp, Homo sapien
ccccagttgctgatagagcctagag

SEQ ID NO: 4741632 - DNA, 25 bp, Homo sapien
gctctgctgttgtgtcccccagttg

SEQ ID NO: 4741633 - DNA, 25 bp, Homo sapien
tgcttagtgccttgtctgggttccc

SEQ ID NO: 4741634 - DNA, 25 bp, Homo sapien
ggttccctgtgatcagctcctggag

SEQ ID NO: 4741635 - DNA, 25 bp, Homo sapien
atcttacggtgacaggaccccagtg

SEQ ID NO: 4741636 - DNA, 25 bp, Homo sapien
cctgaggccgcttcatgaaggctgc

SEQ ID NO: 4741637 - DNA, 25 bp, Homo sapien
catggaactgaatgggacaagagag

SEQ ID NO: 4741638 - DNA, 25 bp, Homo sapien
catgagtctggaggaccacttaaag

SEQ ID NO: 4741639 - DNA, 25 bp, Homo sapien
ggaacaagggtctaagaagcccatg

SEQ ID NO: 4741640 - DNA, 25 bp, Homo sapien
gagatgagtcaggttgctagctgac

SEQ ID NO: 4741641 - DNA, 25 bp, Homo sapien
gtcaggaggacatccttcaatccct

SEQ ID NO: 4741642 - DNA, 25 bp, Homo sapien
cttggcggtaggcaaatgctgtcag

SEQ ID NO: 4741643 - DNA, 25 bp, Homo sapien
gaggacatccttcaatccctgggca

SEQ ID NO: 4741644 - DNA, 25 bp, Homo sapien
ggacatccttcaatccctgggcatc

SEQ ID NO: 4741645 - DNA, 25 bp, Homo sapien
aagtaacagcagatccttagaggct

SEQ ID NO: 4741646 - DNA, 25 bp, Homo sapien
acagcagatccttagaggctccact

SEQ ID NO: 4741647 - DNA, 25 bp, Homo sapien
taattcctcagctgggggactccaa

SEQ ID NO: 4741648 - DNA, 25 bp, Homo sapien
cagggtcaatggagcatctaattcc

SEQ ID NO: 4741649 - DNA, 25 bp, Homo sapien
agacggtcagcactcaaccagaggg

SEQ ID NO: 4741650 - DNA, 25 bp, Homo sapien
ggaagcacgaaggacagagtcccac

SEQ ID NO: 4741651 - DNA, 25 bp, Homo sapien
gtctctagtaacaaggccaggtccc

SEQ ID NO: 4741652 - DNA, 25 bp, Homo sapien
tggctgccattcagggtctctagta

SEQ ID NO: 4741653 - DNA, 25 bp, Homo sapien
atatcctgggcctgatcctctgtga

SEQ ID NO: 4741654 - DNA, 25 bp, Homo sapien
tctgtgaaaccctgggccaagcttg

SEQ ID NO: 4741655 - DNA, 25 bp, Homo sapien
tctaggctccgctggatatcctggg

SEQ ID NO: 4741656 - DNA, 25 bp, Homo sapien
tcaggataatgaagttgcaggtgac

SEQ ID NO: 4741657 - DNA, 25 bp, Homo sapien
tgagcccttccagtgcatcctgagc

SEQ ID NO: 4741658 - DNA, 25 bp, Homo sapien
ccttccagtgcatcctgagccaact

SEQ ID NO: 4741659 - DNA, 25 bp, Homo sapien
cttccagtgcatcctgagccaactg

SEQ ID NO: 4741660 - DNA, 25 bp, Homo sapien
ctctgagcccttccagtgcatcctg

SEQ ID NO: 4741661 - DNA, 25 bp, Homo sapien
agagtcagaccggagttctgagcca

SEQ ID NO: 4741662 - DNA, 25 bp, Homo sapien
tcagagtcagaccggagttctgagc

SEQ ID NO: 4741663 - DNA, 25 bp, Homo sapien
gagtcagaccggagttctgagccac

SEQ ID NO: 4741664 - DNA, 25 bp, Homo sapien
gcctcagagtcagaccggagttctg

SEQ ID NO: 4741665 - DNA, 25 bp, Homo sapien
aaacccgctttcagggatcttgagg

SEQ ID NO: 4741666 - DNA, 25 bp, Homo sapien
ttgcagcagtggcaagggatgcatt

SEQ ID NO: 4741667 - DNA, 25 bp, Homo sapien
tcttgaggctgcaaaccgagggtgc

SEQ ID NO: 4741668 - DNA, 25 bp, Homo sapien
gctctttggtcaagctcagtccctc

SEQ ID NO: 4741669 - DNA, 25 bp, Homo sapien
tcgaacgagccggtcattcttttcc

SEQ ID NO: 4741670 - DNA, 25 bp, Homo sapien
cttggcctgtcgaacgagccggtca

SEQ ID NO: 4741671 - DNA, 25 bp, Homo sapien
cctgtcgaacgagccggtcattctt

SEQ ID NO: 4741672 - DNA, 25 bp, Homo sapien
tggcctgtcgaacgagccggtcatt

SEQ ID NO: 4741673 - DNA, 25 bp, Homo sapien
tggagcccacagaggtggtctggcg

SEQ ID NO: 4741674 - DNA, 25 bp, Homo sapien
ggagcccacagaggtggtctggcgg

SEQ ID NO: 4741675 - DNA, 25 bp, Homo sapien
ttccaggacagatgggacgctctct

SEQ ID NO: 4741676 - DNA, 25 bp, Homo sapien
ggcccggagaccagaagcggactta

SEQ ID NO: 4741677 - DNA, 25 bp, Homo sapien
cggagaccagaagcggacttaggaa

SEQ ID NO: 4741678 - DNA, 25 bp, Homo sapien
ctgggcacttctgcaccccgccgag

SEQ ID NO: 4741679 - DNA, 25 bp, Homo sapien
ccaaacaggcttaggcgggctagaa

SEQ ID NO: 4741680 - DNA, 25 bp, Homo sapien
gagtttcggccccacagtccgtggc

SEQ ID NO: 4741681 - DNA, 25 bp, Homo sapien
aaacgagtcagcaaccccaaacagg

SEQ ID NO: 4741682 - DNA, 25 bp, Homo sapien
tcttgaagagttagttcccgcggga

SEQ ID NO: 4741683 - DNA, 25 bp, Homo sapien
gccgctctgtacttgcactgctcaa

SEQ ID NO: 4741684 - DNA, 25 bp, Homo sapien
taactggagacgagggcgctccgta

SEQ ID NO: 4741685 - DNA, 25 bp, Homo sapien
ttctaccgcgtgtagtctgctggca

SEQ ID NO: 4741686 - DNA, 25 bp, Homo sapien
gccccggcggatggtgtttccagaa

SEQ ID NO: 4741687 - DNA, 25 bp, Homo sapien
aagaatgtttgtgcattaaaggata

SEQ ID NO: 4741688 - DNA, 25 bp, Homo sapien
acaggatgaactggactttctcaaa

SEQ ID NO: 4741689 - DNA, 25 bp, Homo sapien
taagaatttttgtgtaggccaggcg

SEQ ID NO: 4741690 - DNA, 25 bp, Homo sapien
ttgtgcattaaaggatattatcaag

SEQ ID NO: 4741691 - DNA, 25 bp, Homo sapien
cgttgtgaatgtactaacggccact

SEQ ID NO: 4741692 - DNA, 25 bp, Homo sapien
gaaacagcagattagtgctagccag

SEQ ID NO: 4741693 - DNA, 25 bp, Homo sapien
gattggagggtgatatctaaacagt

SEQ ID NO: 4741694 - DNA, 25 bp, Homo sapien
tgctatatagatgaaaccggaaaac

SEQ ID NO: 4741695 - DNA, 25 bp, Homo sapien
tctgtaacactagggaccactggcc

SEQ ID NO: 4741696 - DNA, 25 bp, Homo sapien
gttctatagtgaaaaggcccagtgg

SEQ ID NO: 4741697 - DNA, 25 bp, Homo sapien
gctaaaagtaggtgctatcccatgg

SEQ ID NO: 4741698 - DNA, 25 bp, Homo sapien
tctctaggaggatttcatgccagca

SEQ ID NO: 4741699 - DNA, 25 bp, Homo sapien
gcccctggctgcatgatagtaagag

SEQ ID NO: 4741700 - DNA, 25 bp, Homo sapien
taatgaagtcctagatgtcagcggc

SEQ ID NO: 4741701 - DNA, 25 bp, Homo sapien
tctgtagccaagtgccagtaatcac

SEQ ID NO: 4741702 - DNA, 25 bp, Homo sapien
tagggatcatactccactgtggtcc

SEQ ID NO: 4741703 - DNA, 25 bp, Homo sapien
tgggccagaaatagctgcctgaacc

SEQ ID NO: 4741704 - DNA, 25 bp, Homo sapien
ccagaaatagctgcctgaaccagga

SEQ ID NO: 4741705 - DNA, 25 bp, Homo sapien
ggccagaaatagctgcctgaaccag

SEQ ID NO: 4741706 - DNA, 25 bp, Homo sapien
tgctgggccagaaatagctgcctga

SEQ ID NO: 4741707 - DNA, 25 bp, Homo sapien
ccaaagctatgcccaggagaagtcc

SEQ ID NO: 4741708 - DNA, 25 bp, Homo sapien
gaagcccacagcctcaaatatgaac

SEQ ID NO: 4741709 - DNA, 25 bp, Homo sapien
atgaagcccacagcctcaaatatga

SEQ ID NO: 4741710 - DNA, 25 bp, Homo sapien
ctcatcaccaaagctatgcccagga

SEQ ID NO: 4741711 - DNA, 25 bp, Homo sapien
cacctctacttctcaagcaaatcta

SEQ ID NO: 4741712 - DNA, 25 bp, Homo sapien
gcggagaatctcaggcaacagagta

SEQ ID NO: 4741713 - DNA, 25 bp, Homo sapien
cctggatgtttaggatcttcatact

SEQ ID NO: 4741714 - DNA, 25 bp, Homo sapien
tccctgtagaggcaaaaccttggcc

SEQ ID NO: 4741715 - DNA, 25 bp, Homo sapien
cactttccagaccatgagatgcctg

SEQ ID NO: 4741716 - DNA, 25 bp, Homo sapien
ccatgagatgcctgcgaaggatgga

SEQ ID NO: 4741717 - DNA, 25 bp, Homo sapien
cagaccatgagatgcctgcgaagga

SEQ ID NO: 4741718 - DNA, 25 bp, Homo sapien
tttccagaccatgagatgcctgcga

SEQ ID NO: 4741719 - DNA, 25 bp, Homo sapien
ccaggactaggattaaggagaccca

SEQ ID NO: 4741720 - DNA, 25 bp, Homo sapien
gaactgccatttgaggccactgggc

SEQ ID NO: 4741721 - DNA, 25 bp, Homo sapien
ggagagtttctataggcccctgtaa

SEQ ID NO: 4741722 - DNA, 25 bp, Homo sapien
gtaatcctcaaatgcaactagcggg

SEQ ID NO: 4741723 - DNA, 25 bp, Homo sapien
gcatagaagtgctgaggcgcatccc

SEQ ID NO: 4741724 - DNA, 25 bp, Homo sapien
cggagccgcatctccatcagtggct

SEQ ID NO: 4741725 - DNA, 25 bp, Homo sapien
taaagaggtacttgaggcccagctg

SEQ ID NO: 4741726 - DNA, 25 bp, Homo sapien
tctggcatcagcttcattccctggg

SEQ ID NO: 4741727 - DNA, 25 bp, Homo sapien
ctcacacaggaaaggccagagcagg

SEQ ID NO: 4741728 - DNA, 25 bp, Homo sapien
acacaggaaaggccagagcaggagc

SEQ ID NO: 4741729 - DNA, 25 bp, Homo sapien
tcacacaggaaaggccagagcagga

SEQ ID NO: 4741730 - DNA, 25 bp, Homo sapien
cacacaggaaaggccagagcaggag

SEQ ID NO: 4741731 - DNA, 25 bp, Homo sapien
ctggaatcaacaggccaccctggct

SEQ ID NO: 4741732 - DNA, 25 bp, Homo sapien
tgccaaagatccaacaaacccatat

SEQ ID NO: 4741733 - DNA, 25 bp, Homo sapien
aggttccaattagcctaggccaagg

SEQ ID NO: 4741734 - DNA, 25 bp, Homo sapien
cctggctggctcaggttccaattag

SEQ ID NO: 4741735 - DNA, 25 bp, Homo sapien
tgcatgccaatggatggctggaaag

SEQ ID NO: 4741736 - DNA, 25 bp, Homo sapien
aagcaggcagccaagtacaggagcc

SEQ ID NO: 4741737 - DNA, 25 bp, Homo sapien
ccaagtacaggagccatgaccctct

SEQ ID NO: 4741738 - DNA, 25 bp, Homo sapien
aaggtgttggctcccactagcaaag

SEQ ID NO: 4741739 - DNA, 25 bp, Homo sapien
actgcctgccatggcacagtaaaag

SEQ ID NO: 4741740 - DNA, 25 bp, Homo sapien
agactgcctgccatggcacagtaaa

SEQ ID NO: 4741741 - DNA, 25 bp, Homo sapien
ggcccaagccgagactgcctgccat

SEQ ID NO: 4741742 - DNA, 25 bp, Homo sapien
gcctgccatggcacagtaaaaggac

SEQ ID NO: 4741743 - DNA, 25 bp, Homo sapien
gcatgggaccctctgtcaagctcag

SEQ ID NO: 4741744 - DNA, 25 bp, Homo sapien
tctctgtggtacaaaagcgccatca

SEQ ID NO: 4741745 - DNA, 25 bp, Homo sapien
gaaaagatatgccacgttacagtca

SEQ ID NO: 4741746 - DNA, 25 bp, Homo sapien
tcaagaaatgtgctcatgaggatgc

SEQ ID NO: 4741747 - DNA, 25 bp, Homo sapien
tattgtctttaagtgaatcagagct

SEQ ID NO: 4741748 - DNA, 25 bp, Homo sapien
actattgtctttaagtgaatcagag

SEQ ID NO: 4741749 - DNA, 25 bp, Homo sapien
ttgtctttaagtgaatcagagctga

SEQ ID NO: 4741750 - DNA, 25 bp, Homo sapien
ctattgtctttaagtgaatcagagc

SEQ ID NO: 4741751 - DNA, 25 bp, Homo sapien
cagcaagcagatgtaggagaaggaa

SEQ ID NO: 4741752 - DNA, 25 bp, Homo sapien
gggtggtgacgggtatcccagcagc

SEQ ID NO: 4741753 - DNA, 25 bp, Homo sapien
ccagcagcaagcagatgtaggagaa

SEQ ID NO: 4741754 - DNA, 25 bp, Homo sapien
ggtgacgggtatcccagcagcaagc

SEQ ID NO: 4741755 - DNA, 25 bp, Homo sapien
ttgagattaccatagcggcgaagcc

SEQ ID NO: 4741756 - DNA, 25 bp, Homo sapien
caccatggatgccagaggactcagc

SEQ ID NO: 4741757 - DNA, 25 bp, Homo sapien
caggtgtctcttcagggcaacgatg

SEQ ID NO: 4741758 - DNA, 25 bp, Homo sapien
gagatttggtcctctctaaccggcc

SEQ ID NO: 4741759 - DNA, 25 bp, Homo sapien
tagcttgaaggtcctgagtagcagc

SEQ ID NO: 4741760 - DNA, 25 bp, Homo sapien
tcagcaatcacagtcggcagtgtcg

SEQ ID NO: 4741761 - DNA, 25 bp, Homo sapien
gagcccaagactcgatgcacatggc

SEQ ID NO: 4741762 - DNA, 25 bp, Homo sapien
cactggtagtcagcagaggccttgg

SEQ ID NO: 4741763 - DNA, 25 bp, Homo sapien
gataggtatggaaggtgggactaag

SEQ ID NO: 4741764 - DNA, 25 bp, Homo sapien
gacccaaactctgtccagaatcggg

SEQ ID NO: 4741765 - DNA, 25 bp, Homo sapien
agagtggttcattatgcttctttca

SEQ ID NO: 4741766 - DNA, 25 bp, Homo sapien
gggcagaggcaagaataggtattac

SEQ ID NO: 4741767 - DNA, 25 bp, Homo sapien
gctgggagtcctcaccccctgagaa

SEQ ID NO: 4741768 - DNA, 25 bp, Homo sapien
ccctgagaatagctcagccatcact

SEQ ID NO: 4741769 - DNA, 25 bp, Homo sapien
tgagaatagctcagccatcacttcc

SEQ ID NO: 4741770 - DNA, 25 bp, Homo sapien
acaaggctaacttgaggaatcacct

SEQ ID NO: 4741771 - DNA, 25 bp, Homo sapien
tcatgaggatgctgtaatggtaaca

SEQ ID NO: 4741772 - DNA, 25 bp, Homo sapien
caacagattcatcacaaagctgaag

SEQ ID NO: 4741773 - DNA, 25 bp, Homo sapien
tgagagtggaggatacccaggatca

SEQ ID NO: 4741774 - DNA, 25 bp, Homo sapien
gctgaagtcaatgtttgggatggca

SEQ ID NO: 4741775 - DNA, 25 bp, Homo sapien
gtcattctccagacgctccacaagt

SEQ ID NO: 4741776 - DNA, 25 bp, Homo sapien
ccagccactaccagcagtgtgtcat

SEQ ID NO: 4741777 - DNA, 25 bp, Homo sapien
atggtccccagccactaccagcagt

SEQ ID NO: 4741778 - DNA, 25 bp, Homo sapien
gggctatacagaaagagagcagctg

SEQ ID NO: 4741779 - DNA, 25 bp, Homo sapien
gccatgatcctgatgcccaaagcta

SEQ ID NO: 4741780 - DNA, 25 bp, Homo sapien
caaagagacatgtcttcggccatga

SEQ ID NO: 4741781 - DNA, 25 bp, Homo sapien
taatcaagatggatggagcctctag

SEQ ID NO: 4741782 - DNA, 25 bp, Homo sapien
taagagcttcttcgagattctcaga

SEQ ID NO: 4741783 - DNA, 25 bp, Homo sapien
agtggtccacacccaggaagtgagc

SEQ ID NO: 4741784 - DNA, 25 bp, Homo sapien
gaagtgagcaatcagcacgtcccat

SEQ ID NO: 4741785 - DNA, 25 bp, Homo sapien
caggaagtgagcaatcagcacgtcc

SEQ ID NO: 4741786 - DNA, 25 bp, Homo sapien
tgagcaatcagcacgtcccattcac

SEQ ID NO: 4741787 - DNA, 25 bp, Homo sapien
gctttgacactcctctatgtccagg

SEQ ID NO: 4741788 - DNA, 25 bp, Homo sapien
tgagcacagaagactaagacccact

SEQ ID NO: 4741789 - DNA, 25 bp, Homo sapien
aagcccaggctgttacacccatagg

SEQ ID NO: 4741790 - DNA, 25 bp, Homo sapien
ggactaaagcagttctccccagctc

SEQ ID NO: 4741791 - DNA, 25 bp, Homo sapien
gtgttccaggatgccattgtccact

SEQ ID NO: 4741792 - DNA, 25 bp, Homo sapien
tgtccactgtgtctaggtctctgac

SEQ ID NO: 4741793 - DNA, 25 bp, Homo sapien
gtgtctaggtctctgacattgaagg

SEQ ID NO: 4741794 - DNA, 25 bp, Homo sapien
ggtgttccaggatgccattgtccac

SEQ ID NO: 4741795 - DNA, 25 bp, Homo sapien
caatgccagcgtagaagaggaagca

SEQ ID NO: 4741796 - DNA, 25 bp, Homo sapien
ctccaaacgggtgagcaggaagcca

SEQ ID NO: 4741797 - DNA, 25 bp, Homo sapien
aacctgagatcggtagagccgggca

SEQ ID NO: 4741798 - DNA, 25 bp, Homo sapien
ggaggctctctaggcacgtgtgaat

SEQ ID NO: 4741799 - DNA, 25 bp, Homo sapien
gggcaaagaaccagtggatattctg

SEQ ID NO: 4741800 - DNA, 25 bp, Homo sapien
tattctggtccctgaatacaagccc

SEQ ID NO: 4741801 - DNA, 25 bp, Homo sapien
gcaatattactctcctcctatttcc

SEQ ID NO: 4741802 - DNA, 25 bp, Homo sapien
tggagataaaccatttcacagccaa

SEQ ID NO: 4741803 - DNA, 25 bp, Homo sapien
gccgagattgaaccactgcactaga

SEQ ID NO: 4741804 - DNA, 25 bp, Homo sapien
cgagattgaaccactgcactagagt

SEQ ID NO: 4741805 - DNA, 25 bp, Homo sapien
ccgagattgaaccactgcactagag

SEQ ID NO: 4741806 - DNA, 25 bp, Homo sapien
taatgctgcctgtacatgtgaacag

SEQ ID NO: 4741807 - DNA, 25 bp, Homo sapien
tctactgaatcaggatcttcgaggg

SEQ ID NO: 4741808 - DNA, 25 bp, Homo sapien
gagacgccgtttcatgaggtcccac

SEQ ID NO: 4741809 - DNA, 25 bp, Homo sapien
taggaacgttcacatgtacaggcag

SEQ ID NO: 4741810 - DNA, 25 bp, Homo sapien
gccgtttctgcgcctctcccctcgc

SEQ ID NO: 4741811 - DNA, 25 bp, Homo sapien
ccgtttctgcgcctctcccctcgcc

SEQ ID NO: 4741812 - DNA, 25 bp, Homo sapien
cgccgtttctgcgcctctcccctcg

SEQ ID NO: 4741813 - DNA, 25 bp, Homo sapien
acgccgtttctgcgcctctcccctc

SEQ ID NO: 4741814 - DNA, 25 bp, Homo sapien
aagccgcaggggaatccgggcccag

SEQ ID NO: 4741815 - DNA, 25 bp, Homo sapien
ccagtggaaagggatcgaagccgca

SEQ ID NO: 4741816 - DNA, 25 bp, Homo sapien
ggaatccgggcccagccgacggcgc

SEQ ID NO: 4741817 - DNA, 25 bp, Homo sapien
gatcgaagccgcaggggaatccggg

SEQ ID NO: 4741818 - DNA, 25 bp, Homo sapien
ggagtcactctccgcttccgggcgg

SEQ ID NO: 4741819 - DNA, 25 bp, Homo sapien
caggttcgccaggagacctgaggca

SEQ ID NO: 4741820 - DNA, 25 bp, Homo sapien
tgaggcacgaccttcgccacgcaag

SEQ ID NO: 4741821 - DNA, 25 bp, Homo sapien
gtcgagagtcgactgggcctccgct

SEQ ID NO: 4741822 - DNA, 25 bp, Homo sapien
aagagggagactcccttacttcagg

SEQ ID NO: 4741823 - DNA, 25 bp, Homo sapien
gaagagggagactcccttacttcag

SEQ ID NO: 4741824 - DNA, 25 bp, Homo sapien
ctggccccagtttgatgggatattt

SEQ ID NO: 4741825 - DNA, 25 bp, Homo sapien
acctggcagcacagagatgcgtgcg

SEQ ID NO: 4741826 - DNA, 25 bp, Homo sapien
cacctcggtggaagtttggccagga

SEQ ID NO: 4741827 - DNA, 25 bp, Homo sapien
ctgcaatggcacccggaagtgcggc

SEQ ID NO: 4741828 - DNA, 25 bp, Homo sapien
tatgccagtgcagggtagtagtttc

SEQ ID NO: 4741829 - DNA, 25 bp, Homo sapien
gtttctcatgaaagtacttctttcc

SEQ ID NO: 4741830 - DNA, 25 bp, Homo sapien
gaaaaccctttaagtatgccagtgc

SEQ ID NO: 4741831 - DNA, 25 bp, Homo sapien
ggagcaccctcagtccctgaaaacc

SEQ ID NO: 4741832 - DNA, 25 bp, Homo sapien
gaggcatcatgctgacaggactgga

SEQ ID NO: 4741833 - DNA, 25 bp, Homo sapien
aaggaaaatgctagtgactttccca

SEQ ID NO: 4741834 - DNA, 25 bp, Homo sapien
ttcattccccaatcaaagaggacag

SEQ ID NO: 4741835 - DNA, 25 bp, Homo sapien
gaagttcactcttattcatggaggc

SEQ ID NO: 4741836 - DNA, 25 bp, Homo sapien
gggaagctagagccagaatcaggaa

SEQ ID NO: 4741837 - DNA, 25 bp, Homo sapien
agggaagctagagccagaatcagga

SEQ ID NO: 4741838 - DNA, 25 bp, Homo sapien
ggaagctagagccagaatcaggaaa

SEQ ID NO: 4741839 - DNA, 25 bp, Homo sapien
ttggtgagggctccatatacaccca

SEQ ID NO: 4741840 - DNA, 25 bp, Homo sapien
tcaagacttgcatctgtaccctgga

SEQ ID NO: 4741841 - DNA, 25 bp, Homo sapien
gactcgatcaagttcctcatcaaga

SEQ ID NO: 4741842 - DNA, 25 bp, Homo sapien
agagtgagtctggagtccctggcac

SEQ ID NO: 4741843 - DNA, 25 bp, Homo sapien
tggctaaacgggaaaagatggcatg

SEQ ID NO: 4741844 - DNA, 25 bp, Homo sapien
tagggccaaggcactctgaagacct

SEQ ID NO: 4741845 - DNA, 25 bp, Homo sapien
taggaatcttgcaaaccatcagagt

SEQ ID NO: 4741846 - DNA, 25 bp, Homo sapien
acagagagaataccatgaggacact

SEQ ID NO: 4741847 - DNA, 25 bp, Homo sapien
cttggccagtttggagaacgcgctg

SEQ ID NO: 4741848 - DNA, 25 bp, Homo sapien
catgctggtgacatcgccagggttg

SEQ ID NO: 4741849 - DNA, 25 bp, Homo sapien
gcagtaggatagtgttggagtcctt

SEQ ID NO: 4741850 - DNA, 25 bp, Homo sapien
tgacatactgctcggccacagtcag

SEQ ID NO: 4741851 - DNA, 25 bp, Homo sapien
cctcaagcgtagataagagaacccc

SEQ ID NO: 4741852 - DNA, 25 bp, Homo sapien
aggaccatgtaatctggctcaacag

SEQ ID NO: 4741853 - DNA, 25 bp, Homo sapien
aaaatcagagatcaccgatacggag

SEQ ID NO: 4741854 - DNA, 25 bp, Homo sapien
agagcccacagaggcggaactctcc

SEQ ID NO: 4741855 - DNA, 25 bp, Homo sapien
ggattcgaatagcttcagctttagc

SEQ ID NO: 4741856 - DNA, 25 bp, Homo sapien
agccttggccttcgccagaactgca

SEQ ID NO: 4741857 - DNA, 25 bp, Homo sapien
tagccttggccttcgccagaactgc

SEQ ID NO: 4741858 - DNA, 25 bp, Homo sapien
gccaggattcgaatagcttcagctt

SEQ ID NO: 4741859 - DNA, 25 bp, Homo sapien
ctgcaagagaagggacagagcttgc

SEQ ID NO: 4741860 - DNA, 25 bp, Homo sapien
ctctagaactgtggcccgtttccgc

SEQ ID NO: 4741861 - DNA, 25 bp, Homo sapien
agccttttctgcttcggaggccagg

SEQ ID NO: 4741862 - DNA, 25 bp, Homo sapien
tgccacattgatggccgactctcgg

SEQ ID NO: 4741863 - DNA, 25 bp, Homo sapien
tctcgggtcccctcagactctagaa

SEQ ID NO: 4741864 - DNA, 25 bp, Homo sapien
caacaatcccaatcaacaagccaag

SEQ ID NO: 4741865 - DNA, 25 bp, Homo sapien
tggaagcccacaacaatcccaatca

SEQ ID NO: 4741866 - DNA, 25 bp, Homo sapien
aacaagccaagggagactgatacag

SEQ ID NO: 4741867 - DNA, 25 bp, Homo sapien
caagggagactgatacagacatgca

SEQ ID NO: 4741868 - DNA, 25 bp, Homo sapien
gatctcataacggaggcagcggata

SEQ ID NO: 4741869 - DNA, 25 bp, Homo sapien
tgctggcattcagggactcccgttc

SEQ ID NO: 4741870 - DNA, 25 bp, Homo sapien
cacccggggtggcacatggatatcc

SEQ ID NO: 4741871 - DNA, 25 bp, Homo sapien
ggatatccttgatctcataacggag

SEQ ID NO: 4741872 - DNA, 25 bp, Homo sapien
agtttgccgagctctgatctcatgg

SEQ ID NO: 4741873 - DNA, 25 bp, Homo sapien
tgggtgacggcatactcagggtcct

SEQ ID NO: 4741874 - DNA, 25 bp, Homo sapien
tttgagctagctgggtgacggcata

SEQ ID NO: 4741875 - DNA, 25 bp, Homo sapien
tcagggtcctccacaccgtagcttg

SEQ ID NO: 4741876 - DNA, 25 bp, Homo sapien
tgcgcaggtaaaggactccatcgat

SEQ ID NO: 4741877 - DNA, 25 bp, Homo sapien
taaaggactccatcgatttgcagag

SEQ ID NO: 4741878 - DNA, 25 bp, Homo sapien
ccatcgatttgcagagttacattgt

SEQ ID NO: 4741879 - DNA, 25 bp, Homo sapien
gactccatcgatttgcagagttaca

SEQ ID NO: 4741880 - DNA, 25 bp, Homo sapien
atcctaatagcctcagagcacccat

SEQ ID NO: 4741881 - DNA, 25 bp, Homo sapien
aaccagttctttctactaagctctg

SEQ ID NO: 4741882 - DNA, 25 bp, Homo sapien
aagtcaggcctctaggtcccaacca

SEQ ID NO: 4741883 - DNA, 25 bp, Homo sapien
aagctctggatctacagcaaccaca

SEQ ID NO: 4741884 - DNA, 25 bp, Homo sapien
tgagactctgcacatatcggatccg

SEQ ID NO: 4741885 - DNA, 25 bp, Homo sapien
agagtcacagccgactgctcaggca

SEQ ID NO: 4741886 - DNA, 25 bp, Homo sapien
gcacgttgatgacaatttccttgag

SEQ ID NO: 4741887 - DNA, 25 bp, Homo sapien
ccggtctaacacagggatgaggatg

SEQ ID NO: 4741888 - DNA, 25 bp, Homo sapien
gaaagaggagtcatgggtcctcaga

SEQ ID NO: 4741889 - DNA, 25 bp, Homo sapien
tattgggttgggacctaagctagtc

SEQ ID NO: 4741890 - DNA, 25 bp, Homo sapien
actattgggttgggacctaagctag

SEQ ID NO: 4741891 - DNA, 25 bp, Homo sapien
tggaaagaggagtcatgggtcctca

SEQ ID NO: 4741892 - DNA, 25 bp, Homo sapien
ggagtatgtagggagtcaacacatg

SEQ ID NO: 4741893 - DNA, 25 bp, Homo sapien
gagtatgtagggagtcaacacatgg

SEQ ID NO: 4741894 - DNA, 25 bp, Homo sapien
tatgtagggagtcaacacatggaac

SEQ ID NO: 4741895 - DNA, 25 bp, Homo sapien
ctggagtatgtagggagtcaacaca

SEQ ID NO: 4741896 - DNA, 25 bp, Homo sapien
ctacagagtcgggagctaacagtgc

SEQ ID NO: 4741897 - DNA, 25 bp, Homo sapien
gaatcggagccagcagaatagccat

SEQ ID NO: 4741898 - DNA, 25 bp, Homo sapien
caaaggaagtcctcccgacattgca

SEQ ID NO: 4741899 - DNA, 25 bp, Homo sapien
ggaatgcaagactaggcccctgaat

SEQ ID NO: 4741900 - DNA, 25 bp, Homo sapien
ggagcgcggccagaagccagtagag

SEQ ID NO: 4741901 - DNA, 25 bp, Homo sapien
cacgaacagtaccacggtgtttcgg

SEQ ID NO: 4741902 - DNA, 25 bp, Homo sapien
tcctgctgcggcacgaacagtacca

SEQ ID NO: 4741903 - DNA, 25 bp, Homo sapien
ctccaggatccggtggaatcggccc

SEQ ID NO: 4741904 - DNA, 25 bp, Homo sapien
gaccctctggaaaggttgcctcgct

SEQ ID NO: 4741905 - DNA, 25 bp, Homo sapien
ccgcccctcggtcctgaaggcatct

SEQ ID NO: 4741906 - DNA, 25 bp, Homo sapien
caggatcctcggagaatcacatggg

SEQ ID NO: 4741907 - DNA, 25 bp, Homo sapien
gaatttcgctcttttccagcggaga

SEQ ID NO: 4741908 - DNA, 25 bp, Homo sapien
gcaaaagggccccagtgccccgcgc

SEQ ID NO: 4741909 - DNA, 25 bp, Homo sapien
cctcagcaaaagggccccagtgccc

SEQ ID NO: 4741910 - DNA, 25 bp, Homo sapien
tcagcaaaagggccccagtgccccg

SEQ ID NO: 4741911 - DNA, 25 bp, Homo sapien
agcaaaagggccccagtgccccgcg

SEQ ID NO: 4741912 - DNA, 25 bp, Homo sapien
aaccaacgagacgagcggagcggtc

SEQ ID NO: 4741913 - DNA, 25 bp, Homo sapien
ttcccaccgccgcagcgacctccgg

SEQ ID NO: 4741914 - DNA, 25 bp, Homo sapien
gcggagcggtcgctcccagaagcct

SEQ ID NO: 4741915 - DNA, 25 bp, Homo sapien
ccgcagcgacctccggaaccaacga

SEQ ID NO: 4741916 - DNA, 25 bp, Homo sapien
tggattggagctgactcgttgccat

SEQ ID NO: 4741917 - DNA, 25 bp, Homo sapien
agagcgtagtatcgcccccatctgt

SEQ ID NO: 4741918 - DNA, 25 bp, Homo sapien
tctgtcaccatagcgactagtggat

SEQ ID NO: 4741919 - DNA, 25 bp, Homo sapien
cccatctgtcaccatagcgactagt

SEQ ID NO: 4741920 - DNA, 25 bp, Homo sapien
ggtagtttggaaccacatgactgag

SEQ ID NO: 4741921 - DNA, 25 bp, Homo sapien
agtttggaaccacatgactgagttt

SEQ ID NO: 4741922 - DNA, 25 bp, Homo sapien
gaatggggtagtttggaaccacatg

SEQ ID NO: 4741923 - DNA, 25 bp, Homo sapien
gggtagtttggaaccacatgactga

SEQ ID NO: 4741924 - DNA, 25 bp, Homo sapien
cttcttcagtcaggaccccaaaaca

SEQ ID NO: 4741925 - DNA, 25 bp, Homo sapien
cttcagtcaggaccccaaaacaagg

SEQ ID NO: 4741926 - DNA, 25 bp, Homo sapien
agaggaggcaccccagtgcttggcc

SEQ ID NO: 4741927 - DNA, 25 bp, Homo sapien
gagaggaggcaccccagtgcttggc

SEQ ID NO: 4741928 - DNA, 25 bp, Homo sapien
tacgcataacttggctttcagagat

SEQ ID NO: 4741929 - DNA, 25 bp, Homo sapien
acacacatacgcataacttggcttt

SEQ ID NO: 4741930 - DNA, 25 bp, Homo sapien
cttggctttcagagataggtcagag

SEQ ID NO: 4741931 - DNA, 25 bp, Homo sapien
taacttggctttcagagataggtca

SEQ ID NO: 4741932 - DNA, 25 bp, Homo sapien
taaaataacaagtggcccctgccca

SEQ ID NO: 4741933 - DNA, 25 bp, Homo sapien
cctactacctaagctggcctgggaa

SEQ ID NO: 4741934 - DNA, 25 bp, Homo sapien
tgtgggaggttaccaaggcaatcca

SEQ ID NO: 4741935 - DNA, 25 bp, Homo sapien
gagaaaatctcagggtagctccagt

SEQ ID NO: 4741936 - DNA, 25 bp, Homo sapien
tcattagcccgcatgggttcagagt

SEQ ID NO: 4741937 - DNA, 25 bp, Homo sapien
caggatgggcaggtcattagcccgc

SEQ ID NO: 4741938 - DNA, 25 bp, Homo sapien
ccgcatgggttcagagtgctggcaa

SEQ ID NO: 4741939 - DNA, 25 bp, Homo sapien
ggcaggtcattagcccgcatgggtt

SEQ ID NO: 4741940 - DNA, 25 bp, Homo sapien
gtggattatgaggggcctcggtcac

SEQ ID NO: 4741941 - DNA, 25 bp, Homo sapien
agcaggcggatatctccatgcaggc

SEQ ID NO: 4741942 - DNA, 25 bp, Homo sapien
tccaggctccggcgggaaaaaagca

SEQ ID NO: 4741943 - DNA, 25 bp, Homo sapien
aaaaagcaggcggatatctccatgc

SEQ ID NO: 4741944 - DNA, 25 bp, Homo sapien
ggaaaaaagcaggcggatatctcca

SEQ ID NO: 4741945 - DNA, 25 bp, Homo sapien
gatcaacgtaagaatccaggctggg

SEQ ID NO: 4741946 - DNA, 25 bp, Homo sapien
cagtatcgaagcaaggagagatcct

SEQ ID NO: 4741947 - DNA, 25 bp, Homo sapien
aataaactaagcaagaatccggaca

SEQ ID NO: 4741948 - DNA, 25 bp, Homo sapien
ctggaggaggacaatgtgatcaacg

SEQ ID NO: 4741949 - DNA, 25 bp, Homo sapien
gcagcaagtagcagaggaggcggtg

SEQ ID NO: 4741950 - DNA, 25 bp, Homo sapien
gggcagcaggcatgtccgagaagtc

SEQ ID NO: 4741951 - DNA, 25 bp, Homo sapien
ccaaaaagaggcgatggcgcaggaa

SEQ ID NO: 4741952 - DNA, 25 bp, Homo sapien
gcaccaaaaagaggcgatggcgcag

SEQ ID NO: 4741953 - DNA, 25 bp, Homo sapien
gacagtcaaggttggtagggcctga

SEQ ID NO: 4741954 - DNA, 25 bp, Homo sapien
caggacagtcaaggttggtagggcc

SEQ ID NO: 4741955 - DNA, 25 bp, Homo sapien
tcaaggttggtagggcctgagggct

SEQ ID NO: 4741956 - DNA, 25 bp, Homo sapien
gggacaggacagtcaaggttggtag

SEQ ID NO: 4741957 - DNA, 25 bp, Homo sapien
ctccccaaggggttcagatccacga

SEQ ID NO: 4741958 - DNA, 25 bp, Homo sapien
ccaaggggttcagatccacgatgcc

SEQ ID NO: 4741959 - DNA, 25 bp, Homo sapien
ccccaaggggttcagatccacgatg

SEQ ID NO: 4741960 - DNA, 25 bp, Homo sapien
cacttggacggtgcccaccttgggc

SEQ ID NO: 4741961 - DNA, 25 bp, Homo sapien
aggccagggagccatcagtcaaggt

SEQ ID NO: 4741962 - DNA, 25 bp, Homo sapien
agtaagaaatacctcttgccccctg

SEQ ID NO: 4741963 - DNA, 25 bp, Homo sapien
acttctaggtgaggaataagtaaga

SEQ ID NO: 4741964 - DNA, 25 bp, Homo sapien
tgccctacagtagagttctcctcac

SEQ ID NO: 4741965 - DNA, 25 bp, Homo sapien
acagtgacaggcagcgtgacgtgct

SEQ ID NO: 4741966 - DNA, 25 bp, Homo sapien
acgtgctgggggcagtatgacccac

SEQ ID NO: 4741967 - DNA, 25 bp, Homo sapien
gcagtatgacccactagctccaatt

SEQ ID NO: 4741968 - DNA, 25 bp, Homo sapien
tgacccactagctccaatttctgct

SEQ ID NO: 4741969 - DNA, 25 bp, Homo sapien
aaagttgcccagcagggtacggctg

SEQ ID NO: 4741970 - DNA, 25 bp, Homo sapien
cccagcagggtacggctgacagcag

SEQ ID NO: 4741971 - DNA, 25 bp, Homo sapien
ttgcccagcagggtacggctgacag

SEQ ID NO: 4741972 - DNA, 25 bp, Homo sapien
ctggccccttccggaggcttcgaag

SEQ ID NO: 4741973 - DNA, 25 bp, Homo sapien
tcaggcgacgggctcctttcagcct

SEQ ID NO: 4741974 - DNA, 25 bp, Homo sapien
cttcaggcgacgggctcctttcagc

SEQ ID NO: 4741975 - DNA, 25 bp, Homo sapien
gcgacgggctcctttcagcctccgc

SEQ ID NO: 4741976 - DNA, 25 bp, Homo sapien
agcttcaggcgacgggctcctttca

SEQ ID NO: 4741977 - DNA, 25 bp, Homo sapien
atcagaactgttggcagcagtaggg

SEQ ID NO: 4741978 - DNA, 25 bp, Homo sapien
tgttggcagcagtagggtggcccag

SEQ ID NO: 4741979 - DNA, 25 bp, Homo sapien
gtggcccagggatccccggcgcctc

SEQ ID NO: 4741980 - DNA, 25 bp, Homo sapien
ccagaagggtgtggctttggcatca

SEQ ID NO: 4741981 - DNA, 25 bp, Homo sapien
tttgtgcaagactgtgcaaatcagt

SEQ ID NO: 4741982 - DNA, 25 bp, Homo sapien
gtgtgtgctcgggactgtgcccatt

SEQ ID NO: 4741983 - DNA, 25 bp, Homo sapien
caaatcagtgtcaagtgtgtgcagc

SEQ ID NO: 4741984 - DNA, 25 bp, Homo sapien
ggctcttaccccctatttgtgcaag

SEQ ID NO: 4741985 - DNA, 25 bp, Homo sapien
ggcccccgaagtccaagatgaggtg

SEQ ID NO: 4741986 - DNA, 25 bp, Homo sapien
ggtgacactacttctctgttccaca

SEQ ID NO: 4741987 - DNA, 25 bp, Homo sapien
tgcaaagtattgcaggaagcatttg

SEQ ID NO: 4741988 - DNA, 25 bp, Homo sapien
agtattgcaggaagcatttgatggg

SEQ ID NO: 4741989 - DNA, 25 bp, Homo sapien
taagagccccacagtagatggttct

SEQ ID NO: 4741990 - DNA, 25 bp, Homo sapien
tgtcgtttcagggccctatgaggct

SEQ ID NO: 4741991 - DNA, 25 bp, Homo sapien
gccctatgaggctcagaggtaccag

SEQ ID NO: 4741992 - DNA, 25 bp, Homo sapien
cagccggaggggaaaagatggatac

SEQ ID NO: 4741993 - DNA, 25 bp, Homo sapien
gggatgtcgccccccctgctgggct

SEQ ID NO: 4741994 - DNA, 25 bp, Homo sapien
gccagcctccggctctgaggatgga

SEQ ID NO: 4741995 - DNA, 25 bp, Homo sapien
agcccatgagcaggccaccctggag

SEQ ID NO: 4741996 - DNA, 25 bp, Homo sapien
atggagacggctccgcctgcacgtg

SEQ ID NO: 4741997 - DNA, 25 bp, Homo sapien
aacacggcctttatgctgggcctgg

SEQ ID NO: 4741998 - DNA, 25 bp, Homo sapien
ccccaacacggcctttatgctgggc

SEQ ID NO: 4741999 - DNA, 25 bp, Homo sapien
gccccccaacacggcctttatgctg

SEQ ID NO: 4742000 - DNA, 25 bp, Homo sapien
ccaacacggcctttatgctgggcct

SEQ ID NO: 4742001 - DNA, 25 bp, Homo sapien
tacaaatccctggatggactaatgg

SEQ ID NO: 4742002 - DNA, 25 bp, Homo sapien
tcagaccctctccttgcctaaaggg

SEQ ID NO: 4742003 - DNA, 25 bp, Homo sapien
tagctcaggcttcttactggacaca

SEQ ID NO: 4742004 - DNA, 25 bp, Homo sapien
gactaatggaatatagagaccactc

SEQ ID NO: 4742005 - DNA, 25 bp, Homo sapien
gtgcccctagcttgcagtctgatcc

SEQ ID NO: 4742006 - DNA, 25 bp, Homo sapien
aactgatgcctcgtgcccctagctt

SEQ ID NO: 4742007 - DNA, 25 bp, Homo sapien
ggcctcaagcctagctgtgcgtccc

SEQ ID NO: 4742008 - DNA, 25 bp, Homo sapien
cattccgtgcagctcctgagctcag

SEQ ID NO: 4742009 - DNA, 25 bp, Homo sapien
tgtcaagttgaaagccagctgcccc

SEQ ID NO: 4742010 - DNA, 25 bp, Homo sapien
cagagttgggctacctaaggagtca

SEQ ID NO: 4742011 - DNA, 25 bp, Homo sapien
caaactagagataaggccgcagcag

SEQ ID NO: 4742012 - DNA, 25 bp, Homo sapien
tagaccgaccatagagttcctgagg

SEQ ID NO: 4742013 - DNA, 25 bp, Homo sapien
tgtggctggcaaggactacagctcc

SEQ ID NO: 4742014 - DNA, 25 bp, Homo sapien
tggctggcaaggactacagctccca

SEQ ID NO: 4742015 - DNA, 25 bp, Homo sapien
gtggctggcaaggactacagctccc

SEQ ID NO: 4742016 - DNA, 25 bp, Homo sapien
tcctatgcaaagagaactgctgcca

SEQ ID NO: 4742017 - DNA, 25 bp, Homo sapien
ccatttctaccatgatcaaggagag

SEQ ID NO: 4742018 - DNA, 25 bp, Homo sapien
ctatactggagcttcggagatttgc

SEQ ID NO: 4742019 - DNA, 25 bp, Homo sapien
gggacaggccccatactatactgga

SEQ ID NO: 4742020 - DNA, 25 bp, Homo sapien
taggctcttcgctgttcagcttcgt

SEQ ID NO: 4742021 - DNA, 25 bp, Homo sapien
ctcccaaattggctccgcggaggtg

SEQ ID NO: 4742022 - DNA, 25 bp, Homo sapien
cccaaattggctccgcggaggtggc

SEQ ID NO: 4742023 - DNA, 25 bp, Homo sapien
ttcgtgtgcaacactagcgggccct

SEQ ID NO: 4742024 - DNA, 25 bp, Homo sapien
tgttgcccacacattgagtccccaa

SEQ ID NO: 4742025 - DNA, 25 bp, Homo sapien
cgcgacttcgtatcttccctcaaca

SEQ ID NO: 4742026 - DNA, 25 bp, Homo sapien
tctccagatcgtctgcaaagcgcac

SEQ ID NO: 4742027 - DNA, 25 bp, Homo sapien
aactgctcccgcgacttcgtatctt

SEQ ID NO: 4742028 - DNA, 25 bp, Homo sapien
tcccgttgcacttggggacgtggta

SEQ ID NO: 4742029 - DNA, 25 bp, Homo sapien
ctgtagttccgtgggtcccgttgca

SEQ ID NO: 4742030 - DNA, 25 bp, Homo sapien
ttactgagcagccctagctgtagcc

SEQ ID NO: 4742031 - DNA, 25 bp, Homo sapien
cgtggtagtggttggggcagttact

SEQ ID NO: 4742032 - DNA, 25 bp, Homo sapien
aaccaggatccgctggctctgattg

SEQ ID NO: 4742033 - DNA, 25 bp, Homo sapien
agacaaagtgatggtcgcaggtcgc

SEQ ID NO: 4742034 - DNA, 25 bp, Homo sapien
gggcggtcgcactccaaccaggatc

SEQ ID NO: 4742035 - DNA, 25 bp, Homo sapien
atggtcgcaggtcgcctgaggtccc

SEQ ID NO: 4742036 - DNA, 25 bp, Homo sapien
ggtgggcgcgtgcatttgcactaat

SEQ ID NO: 4742037 - DNA, 25 bp, Homo sapien
caaggtagtgcaaggaatctcaggg

SEQ ID NO: 4742038 - DNA, 25 bp, Homo sapien
tgccgccggaactctaacctctttg

SEQ ID NO: 4742039 - DNA, 25 bp, Homo sapien
gaggtccgtagggattgcaaggtag

SEQ ID NO: 4742040 - DNA, 25 bp, Homo sapien
gaatctgggcggtggggttcaggtc

SEQ ID NO: 4742041 - DNA, 25 bp, Homo sapien
gtttctgaagcctacgctgtgcagg

SEQ ID NO: 4742042 - DNA, 25 bp, Homo sapien
tcaggtctgcgaggttgagcagttt

SEQ ID NO: 4742043 - DNA, 25 bp, Homo sapien
ttctgaagcctacgctgtgcaggcg

SEQ ID NO: 4742044 - DNA, 25 bp, Homo sapien
gaaggagcttgattcctcttgactg

SEQ ID NO: 4742045 - DNA, 25 bp, Homo sapien
gattgagaaggagcttgattcctct

SEQ ID NO: 4742046 - DNA, 25 bp, Homo sapien
aggagcttgattcctcttgactgtt

SEQ ID NO: 4742047 - DNA, 25 bp, Homo sapien
gagaaggagcttgattcctcttgac

SEQ ID NO: 4742048 - DNA, 25 bp, Homo sapien
ttaagtcttgccacactgttcacac

SEQ ID NO: 4742049 - DNA, 25 bp, Homo sapien
gttcacacttgtagaagttttctcc

SEQ ID NO: 4742050 - DNA, 25 bp, Homo sapien
tgttcacacttgtagaagttttctc

SEQ ID NO: 4742051 - DNA, 25 bp, Homo sapien
cactgttcacacttgtagaagtttt

SEQ ID NO: 4742052 - DNA, 25 bp, Homo sapien
ctacaagcaagtgtgataaccattt

SEQ ID NO: 4742053 - DNA, 25 bp, Homo sapien
gcaagtgtgataaccatttaaaggc

SEQ ID NO: 4742054 - DNA, 25 bp, Homo sapien
caagcaagtgtgataaccatttaaa

SEQ ID NO: 4742055 - DNA, 25 bp, Homo sapien
tacaagcaagtgtgataaccattta

SEQ ID NO: 4742056 - DNA, 25 bp, Homo sapien
cagtatgaataaccttgtgtttaga

SEQ ID NO: 4742057 - DNA, 25 bp, Homo sapien
tgtctgttaagaatagaggagttgt

SEQ ID NO: 4742058 - DNA, 25 bp, Homo sapien
cttttatgtttggaaatgtttgaga

SEQ ID NO: 4742059 - DNA, 25 bp, Homo sapien
agatgttgtcacaagcattgttaca

SEQ ID NO: 4742060 - DNA, 25 bp, Homo sapien
agaaaggtttgaggcctcattatag

SEQ ID NO: 4742061 - DNA, 25 bp, Homo sapien
tagaaaggtttgaggcctcattata

SEQ ID NO: 4742062 - DNA, 25 bp, Homo sapien
gtagaaaggtttgaggcctcattat

SEQ ID NO: 4742063 - DNA, 25 bp, Homo sapien
gtcttgggcaaaataagaacataca

SEQ ID NO: 4742064 - DNA, 25 bp, Homo sapien
ttatgccctggtttggccaaaggtc

SEQ ID NO: 4742065 - DNA, 25 bp, Homo sapien
aaggtcttgggcaaaataagaacat

SEQ ID NO: 4742066 - DNA, 25 bp, Homo sapien
attttcctaactgtaaattttcatg

SEQ ID NO: 4742067 - DNA, 25 bp, Homo sapien
acattccaaggttcttttccttgct

SEQ ID NO: 4742068 - DNA, 25 bp, Homo sapien
ggttcagctaccatctcatgtctct

SEQ ID NO: 4742069 - DNA, 25 bp, Homo sapien
tcttcacattccaaggttcttttcc

SEQ ID NO: 4742070 - DNA, 25 bp, Homo sapien
ctgggggttcagctaccatctcatg

SEQ ID NO: 4742071 - DNA, 25 bp, Homo sapien
accaggtttctgtagttctctaaca

SEQ ID NO: 4742072 - DNA, 25 bp, Homo sapien
ggaagaccaggtttctgtagttctc

SEQ ID NO: 4742073 - DNA, 25 bp, Homo sapien
ccaggtttctgtagttctctaacat

SEQ ID NO: 4742074 - DNA, 25 bp, Homo sapien
ccaggaagaccaggtttctgtagtt

SEQ ID NO: 4742075 - DNA, 25 bp, Homo sapien
ctgtgcagtgtccagacaatgccac

SEQ ID NO: 4742076 - DNA, 25 bp, Homo sapien
gtccagacaatgccactcctccaga

SEQ ID NO: 4742077 - DNA, 25 bp, Homo sapien
acaatgccactcctccagagagaat

SEQ ID NO: 4742078 - DNA, 25 bp, Homo sapien
cagacaatgccactcctccagagag

SEQ ID NO: 4742079 - DNA, 25 bp, Homo sapien
ctcagtccatctggatgtacaggtg

SEQ ID NO: 4742080 - DNA, 25 bp, Homo sapien
ttcctcagtccatctggatgtacag

SEQ ID NO: 4742081 - DNA, 25 bp, Homo sapien
ctgcagtttcctcagtccatctgga

SEQ ID NO: 4742082 - DNA, 25 bp, Homo sapien
cagtggggaacttctgagactcatt

SEQ ID NO: 4742083 - DNA, 25 bp, Homo sapien
taacaactccaagagggagtcaaga

SEQ ID NO: 4742084 - DNA, 25 bp, Homo sapien
taagtcgaggcctcagtggttttag

SEQ ID NO: 4742085 - DNA, 25 bp, Homo sapien
gagacagtgagattgatagtgtggt

SEQ ID NO: 4742086 - DNA, 25 bp, Homo sapien
tgttaaagaaggattagaaatggct

SEQ ID NO: 4742087 - DNA, 25 bp, Homo sapien
caggctgtcagctatgaccgctaga

SEQ ID NO: 4742088 - DNA, 25 bp, Homo sapien
aacttaactttgctgtgcggtgcga

SEQ ID NO: 4742089 - DNA, 25 bp, Homo sapien
tagataagaactgaggtctccagac

SEQ ID NO: 4742090 - DNA, 25 bp, Homo sapien
gactgattaccatacactaggcact

SEQ ID NO: 4742091 - DNA, 25 bp, Homo sapien
gtactcaccgctacccggagttcgc

SEQ ID NO: 4742092 - DNA, 25 bp, Homo sapien
gcctgccggccggtactcaccgcta

SEQ ID NO: 4742093 - DNA, 25 bp, Homo sapien
gatggcgtcgctgtgccgcgcccag

SEQ ID NO: 4742094 - DNA, 25 bp, Homo sapien
tcccagcgatggcgtcgctgtgccg

SEQ ID NO: 4742095 - DNA, 25 bp, Homo sapien
cagacggtgagatttggggcgggtc

SEQ ID NO: 4742096 - DNA, 25 bp, Homo sapien
gtccgaggcagcggcgggacgctac

SEQ ID NO: 4742097 - DNA, 25 bp, Homo sapien
gggccggtaacgagagcagtcgcgg

SEQ ID NO: 4742098 - DNA, 25 bp, Homo sapien
gcgcggcagaggcttgcccgatcct

SEQ ID NO: 4742099 - DNA, 25 bp, Homo sapien
gcggcagaggcttgcccgatcctcg

SEQ ID NO: 4742100 - DNA, 25 bp, Homo sapien
aacgagagcagtcgcggcacctgct

SEQ ID NO: 4742101 - DNA, 25 bp, Homo sapien
ttaaagttagtcctgaggattctgt

SEQ ID NO: 4742102 - DNA, 25 bp, Homo sapien
aaagctagatctgtctgcacagaca

SEQ ID NO: 4742103 - DNA, 25 bp, Homo sapien
tcttgctagccagtcagaacagctg

SEQ ID NO: 4742104 - DNA, 25 bp, Homo sapien
tttaaaaagctagatctgtctgcac

SEQ ID NO: 4742105 - DNA, 25 bp, Homo sapien
ctacaggggcgtgccaccacgtccg

SEQ ID NO: 4742106 - DNA, 25 bp, Homo sapien
actacaggggcgtgccaccacgtcc

SEQ ID NO: 4742107 - DNA, 25 bp, Homo sapien
tgcccggcgcctactatcatttctt

SEQ ID NO: 4742108 - DNA, 25 bp, Homo sapien
cttacattcaatagtttacaggcag

SEQ ID NO: 4742109 - DNA, 25 bp, Homo sapien
tatgcaataagatcagaaaataatt

SEQ ID NO: 4742110 - DNA, 25 bp, Homo sapien
caggcagtcctattctatgcaataa

SEQ ID NO: 4742111 - DNA, 25 bp, Homo sapien
aaggttaatattgttacttgtgaat

SEQ ID NO: 4742112 - DNA, 25 bp, Homo sapien
ttaaggttaatattgttacttgtga

SEQ ID NO: 4742113 - DNA, 25 bp, Homo sapien
taaggttaatattgttacttgtgaa

SEQ ID NO: 4742114 - DNA, 25 bp, Homo sapien
gagaacgaatcgaaactcttctgca

SEQ ID NO: 4742115 - DNA, 25 bp, Homo sapien
gcctgagaggtagatcagcattttc

SEQ ID NO: 4742116 - DNA, 25 bp, Homo sapien
gggcgatcattaagacagagaacga

SEQ ID NO: 4742117 - DNA, 25 bp, Homo sapien
taattgaagcctcaaaaatgggtcc

SEQ ID NO: 4742118 - DNA, 25 bp, Homo sapien
atcctgatgtttactctctgatggc

SEQ ID NO: 4742119 - DNA, 25 bp, Homo sapien
tctgatggcactctacatagggcca

SEQ ID NO: 4742120 - DNA, 25 bp, Homo sapien
ctctctgatggcactctacataggg

SEQ ID NO: 4742121 - DNA, 25 bp, Homo sapien
cttctcaccatcctgatgtttactc

SEQ ID NO: 4742122 - DNA, 25 bp, Homo sapien
gtcattctctgctgcatatgctttc

SEQ ID NO: 4742123 - DNA, 25 bp, Homo sapien
ctcctgctgcccgtcattctctgct

SEQ ID NO: 4742124 - DNA, 25 bp, Homo sapien
gctgcccgtcattctctgctgcata

SEQ ID NO: 4742125 - DNA, 25 bp, Homo sapien
tctctgctgcatatgctttctccat

SEQ ID NO: 4742126 - DNA, 25 bp, Homo sapien
ccctgggaggtagttgttcatatac

SEQ ID NO: 4742127 - DNA, 25 bp, Homo sapien
catgaccagcccttagtataatagg

SEQ ID NO: 4742128 - DNA, 25 bp, Homo sapien
caggatcagggagtttgtgtcattc

SEQ ID NO: 4742129 - DNA, 25 bp, Homo sapien
gaaatgaatccttgcaataaccctg

SEQ ID NO: 4742130 - DNA, 25 bp, Homo sapien
tcaaataagttgaacgtctcaagtc

SEQ ID NO: 4742131 - DNA, 25 bp, Homo sapien
agtcttttgactctcaataatggag

SEQ ID NO: 4742132 - DNA, 25 bp, Homo sapien
ggtatgtcacttccttataaaatgg

SEQ ID NO: 4742133 - DNA, 25 bp, Homo sapien
taaaatggactgtctggaacagtga

SEQ ID NO: 4742134 - DNA, 25 bp, Homo sapien
gcattttagggagttgggaagcaca

SEQ ID NO: 4742135 - DNA, 25 bp, Homo sapien
cagctagtggagaggcacttaatcc

SEQ ID NO: 4742136 - DNA, 25 bp, Homo sapien
gataggcgatgtgctaagccctcag

SEQ ID NO: 4742137 - DNA, 25 bp, Homo sapien
gacttgaatacaggacacgtgagga

SEQ ID NO: 4742138 - DNA, 25 bp, Homo sapien
tctaacatgtgtctacctgagggct

SEQ ID NO: 4742139 - DNA, 25 bp, Homo sapien
tagactgtcccttgagtagaatcca

SEQ ID NO: 4742140 - DNA, 25 bp, Homo sapien
tcaggttcacgtggtgcttcaaagc

SEQ ID NO: 4742141 - DNA, 25 bp, Homo sapien
ggctccagtgagaacaaggctttga

SEQ ID NO: 4742142 - DNA, 25 bp, Homo sapien
gagagtcagatggacttcccaagac

SEQ ID NO: 4742143 - DNA, 25 bp, Homo sapien
cacagatgtactggccattacatga

SEQ ID NO: 4742144 - DNA, 25 bp, Homo sapien
gaggactcgacattgtccacagatg

SEQ ID NO: 4742145 - DNA, 25 bp, Homo sapien
tgttacaggagattataggctagtc

SEQ ID NO: 4742146 - DNA, 25 bp, Homo sapien
gattactgggagtgtcagatctgtc

SEQ ID NO: 4742147 - DNA, 25 bp, Homo sapien
tacctcacatagtatctctgcaggg

SEQ ID NO: 4742148 - DNA, 25 bp, Homo sapien
ccttggaataatatcccagtggcca

SEQ ID NO: 4742149 - DNA, 25 bp, Homo sapien
tgtgcgaactcttctgtacagtaga

SEQ ID NO: 4742150 - DNA, 25 bp, Homo sapien
cccaggagatcatacgtcaccattt

SEQ ID NO: 4742151 - DNA, 25 bp, Homo sapien
ggaaggtgcgcttggaagaaaccca

SEQ ID NO: 4742152 - DNA, 25 bp, Homo sapien
ggcttcccgaatgcgcagtgctttc

SEQ ID NO: 4742153 - DNA, 25 bp, Homo sapien
ggttaaagagagaaggtcaagtgcc

SEQ ID NO: 4742154 - DNA, 25 bp, Homo sapien
aaatgaattcgtagcctgcaatcag

SEQ ID NO: 4742155 - DNA, 25 bp, Homo sapien
atgtaaatgaattcgtagcctgcaa

SEQ ID NO: 4742156 - DNA, 25 bp, Homo sapien
ctcatgtaaatgaattcgtagcctg

SEQ ID NO: 4742157 - DNA, 25 bp, Homo sapien
taaatgaattcgtagcctgcaatca

SEQ ID NO: 4742158 - DNA, 25 bp, Homo sapien
tagagggagcgcattgccagatatg

SEQ ID NO: 4742159 - DNA, 25 bp, Homo sapien
aggatactccccctgcatattccag

SEQ ID NO: 4742160 - DNA, 25 bp, Homo sapien
tgagtatgagtatggtatgaagaga

SEQ ID NO: 4742161 - DNA, 25 bp, Homo sapien
aagagaggagctgtcgcaaggatac

SEQ ID NO: 4742162 - DNA, 25 bp, Homo sapien
ctatttcctaatgtggccactgtga

SEQ ID NO: 4742163 - DNA, 25 bp, Homo sapien
atttcctaatgtggccactgtgacc

SEQ ID NO: 4742164 - DNA, 25 bp, Homo sapien
tatttcctaatgtggccactgtgac

SEQ ID NO: 4742165 - DNA, 25 bp, Homo sapien
caagagagtactataagcaacagct

SEQ ID NO: 4742166 - DNA, 25 bp, Homo sapien
ctgactcaagagagtactataagca

SEQ ID NO: 4742167 - DNA, 25 bp, Homo sapien
gagagtactataagcaacagctttc

SEQ ID NO: 4742168 - DNA, 25 bp, Homo sapien
ctcaagagagtactataagcaacag

SEQ ID NO: 4742169 - DNA, 25 bp, Homo sapien
gaggtttggcactagacagctggac

SEQ ID NO: 4742170 - DNA, 25 bp, Homo sapien
caagacttgcttcccgtagaatcca

SEQ ID NO: 4742171 - DNA, 25 bp, Homo sapien
tagaatccaacttagtaacctggag

SEQ ID NO: 4742172 - DNA, 25 bp, Homo sapien
ttccctgtcctgtttaatgctgaac

SEQ ID NO: 4742173 - DNA, 25 bp, Homo sapien
catttagcctgctgtgcttgccatc

SEQ ID NO: 4742174 - DNA, 25 bp, Homo sapien
cagctgggctccatttagcctgctg

SEQ ID NO: 4742175 - DNA, 25 bp, Homo sapien
gctccatttagcctgctgtgcttgc

SEQ ID NO: 4742176 - DNA, 25 bp, Homo sapien
tgggctccatttagcctgctgtgct

SEQ ID NO: 4742177 - DNA, 25 bp, Homo sapien
gaaaggaactttgaacgccacatta

SEQ ID NO: 4742178 - DNA, 25 bp, Homo sapien
tgaacgccacattaaagaatttggg

SEQ ID NO: 4742179 - DNA, 25 bp, Homo sapien
gcctggctggtagaaaggaactttg

SEQ ID NO: 4742180 - DNA, 25 bp, Homo sapien
cctggctggtagaaaggaactttga

SEQ ID NO: 4742181 - DNA, 25 bp, Homo sapien
gaaagagaggactatctgacgtcct

SEQ ID NO: 4742182 - DNA, 25 bp, Homo sapien
tggattgacatgcagtgatagcctc

SEQ ID NO: 4742183 - DNA, 25 bp, Homo sapien
ctttctggtaccctgatattccacc

SEQ ID NO: 4742184 - DNA, 25 bp, Homo sapien
tatggggttctcaaagacttcagtc

SEQ ID NO: 4742185 - DNA, 25 bp, Homo sapien
tcctgattttggagagcatgacctc

SEQ ID NO: 4742186 - DNA, 25 bp, Homo sapien
tacctggtaggcatagctagagggc

SEQ ID NO: 4742187 - DNA, 25 bp, Homo sapien
gatgggccacttgtcttgatgtaga

SEQ ID NO: 4742188 - DNA, 25 bp, Homo sapien
taataggacaagagacacccatttg

SEQ ID NO: 4742189 - DNA, 25 bp, Homo sapien
cagagactatggagctggatgagtg

SEQ ID NO: 4742190 - DNA, 25 bp, Homo sapien
ttggatactcagcagtgcggcacca

SEQ ID NO: 4742191 - DNA, 25 bp, Homo sapien
gctggaagcagagactatggagctg

SEQ ID NO: 4742192 - DNA, 25 bp, Homo sapien
aggagccagtgatgaccttggatac

SEQ ID NO: 4742193 - DNA, 25 bp, Homo sapien
cccttccaaaaggatggctgggata

SEQ ID NO: 4742194 - DNA, 25 bp, Homo sapien
gaagggaacttgatgtccagtggcc

SEQ ID NO: 4742195 - DNA, 25 bp, Homo sapien
ggtgagatggccaaatgtgtggcca

SEQ ID NO: 4742196 - DNA, 25 bp, Homo sapien
tccagtggcctaagccaagagctgc

SEQ ID NO: 4742197 - DNA, 25 bp, Homo sapien
ggccaagagagtctgtcacatgtag

SEQ ID NO: 4742198 - DNA, 25 bp, Homo sapien
tggccaagagagtctgtcacatgta

SEQ ID NO: 4742199 - DNA, 25 bp, Homo sapien
gccaagagagtctgtcacatgtagc

SEQ ID NO: 4742200 - DNA, 25 bp, Homo sapien
gtggccaagagagtctgtcacatgt

SEQ ID NO: 4742201 - DNA, 25 bp, Homo sapien
aaacagccctctaaaatctggccct

SEQ ID NO: 4742202 - DNA, 25 bp, Homo sapien
ctccaaacagccctctaaaatctgg

SEQ ID NO: 4742203 - DNA, 25 bp, Homo sapien
cagccctctaaaatctggccctaat

SEQ ID NO: 4742204 - DNA, 25 bp, Homo sapien
gccctctaaaatctggccctaattc

SEQ ID NO: 4742205 - DNA, 25 bp, Homo sapien
gatctgagccctcccatatctatta

SEQ ID NO: 4742206 - DNA, 25 bp, Homo sapien
gagccctcccatatctattagtttc

SEQ ID NO: 4742207 - DNA, 25 bp, Homo sapien
aataaagctgaaccacatgatctga

SEQ ID NO: 4742208 - DNA, 25 bp, Homo sapien
gctgaaccacatgatctgagccctc

SEQ ID NO: 4742209 - DNA, 25 bp, Homo sapien
gcacgtagcccccatagttaggtaa

SEQ ID NO: 4742210 - DNA, 25 bp, Homo sapien
gcgcagggcacatagccagtgaagc

SEQ ID NO: 4742211 - DNA, 25 bp, Homo sapien
caggaaagctggagccgaagaggaa

SEQ ID NO: 4742212 - DNA, 25 bp, Homo sapien
tcctgcagtgcctggttggtgagca

SEQ ID NO: 4742213 - DNA, 25 bp, Homo sapien
ctccccacgcctctgatcctgaccc

SEQ ID NO: 4742214 - DNA, 25 bp, Homo sapien
cctgtcatccatggagtagggagaa

SEQ ID NO: 4742215 - DNA, 25 bp, Homo sapien
gaagaacttccgagggtccctgtca

SEQ ID NO: 4742216 - DNA, 25 bp, Homo sapien
agggtccctgtcatccatggagtag

SEQ ID NO: 4742217 - DNA, 25 bp, Homo sapien
acatgaagaacttccgagggtccct

SEQ ID NO: 4742218 - DNA, 25 bp, Homo sapien
aggtggagctgacaatcaagtgcac

SEQ ID NO: 4742219 - DNA, 25 bp, Homo sapien
tgaacccacagccacactactcatg

SEQ ID NO: 4742220 - DNA, 25 bp, Homo sapien
tggagctgacaatcaagtgcacatc

SEQ ID NO: 4742221 - DNA, 25 bp, Homo sapien
tgacaatcaagtgcacatcccctga

SEQ ID NO: 4742222 - DNA, 25 bp, Homo sapien
tcccttggcctcctttggtagctct

SEQ ID NO: 4742223 - DNA, 25 bp, Homo sapien
gagtaaagtcactcagagcctcggc

SEQ ID NO: 4742224 - DNA, 25 bp, Homo sapien
caaagatgaactgtgcccggggtac

SEQ ID NO: 4742225 - DNA, 25 bp, Homo sapien
gctcttcactcccttgcttttcatg

SEQ ID NO: 4742226 - DNA, 25 bp, Homo sapien
tcttggaggccgaatgggaggcaga

SEQ ID NO: 4742227 - DNA, 25 bp, Homo sapien
tgcccacgcctgacaggtagactct

SEQ ID NO: 4742228 - DNA, 25 bp, Homo sapien
cagggatcatgctggagctgagcct

SEQ ID NO: 4742229 - DNA, 25 bp, Homo sapien
ccaggagggcctcgaagtagctgac

SEQ ID NO: 4742230 - DNA, 25 bp, Homo sapien
cacctgcccataggtctggcccacg

SEQ ID NO: 4742231 - DNA, 25 bp, Homo sapien
gtcacctgcccataggtctggccca

SEQ ID NO: 4742232 - DNA, 25 bp, Homo sapien
agtcacctgcccataggtctggccc

SEQ ID NO: 4742233 - DNA, 25 bp, Homo sapien
cagtcacctgcccataggtctggcc

SEQ ID NO: 4742234 - DNA, 25 bp, Homo sapien
tgaaccgaagtagtgggcagtgtcc

SEQ ID NO: 4742235 - DNA, 25 bp, Homo sapien
accgaagtagtgggcagtgtccagt

SEQ ID NO: 4742236 - DNA, 25 bp, Homo sapien
gaaccgaagtagtgggcagtgtcca

SEQ ID NO: 4742237 - DNA, 25 bp, Homo sapien
ctgaaccgaagtagtgggcagtgtc

SEQ ID NO: 4742238 - DNA, 25 bp, Homo sapien
taagcagcttaattcctccacccta

SEQ ID NO: 4742239 - DNA, 25 bp, Homo sapien
gacccggtgtctcactagtcccttg

SEQ ID NO: 4742240 - DNA, 25 bp, Homo sapien
cagaagcggagacctctgaagccct

SEQ ID NO: 4742241 - DNA, 25 bp, Homo sapien
gcttggccccatgctctaagcagct

SEQ ID NO: 4742242 - DNA, 25 bp, Homo sapien
tctggtctgtgtgtaccgtgtccag

SEQ ID NO: 4742243 - DNA, 25 bp, Homo sapien
gccctggtatgaaggtgctggccac

SEQ ID NO: 4742244 - DNA, 25 bp, Homo sapien
aggctctggtctgtgtgtaccgtgt

SEQ ID NO: 4742245 - DNA, 25 bp, Homo sapien
tctgagggttgagccctggtatgaa

SEQ ID NO: 4742246 - DNA, 25 bp, Homo sapien
cagtgaccatgcctgcgctgaccaa

SEQ ID NO: 4742247 - DNA, 25 bp, Homo sapien
caaggcacacatttcatgttcctca

SEQ ID NO: 4742248 - DNA, 25 bp, Homo sapien
caaggacggcactgacatcccaggg

SEQ ID NO: 4742249 - DNA, 25 bp, Homo sapien
gggaattacataagagcactgggct

SEQ ID NO: 4742250 - DNA, 25 bp, Homo sapien
cctttgattctgaccaggaactgct

SEQ ID NO: 4742251 - DNA, 25 bp, Homo sapien
gattgtatgtcaaccctaggcaagc

SEQ ID NO: 4742252 - DNA, 25 bp, Homo sapien
ttcaaaaatgcttataatgggccag

SEQ ID NO: 4742253 - DNA, 25 bp, Homo sapien
aatgggtttcaaatgctcacctcag

SEQ ID NO: 4742254 - DNA, 25 bp, Homo sapien
ttttgcaactcagaagtatagtctc

SEQ ID NO: 4742255 - DNA, 25 bp, Homo sapien
gaaacagacacaggtgagcatcacc

SEQ ID NO: 4742256 - DNA, 25 bp, Homo sapien
gagaaacagacacaggtgagcatca

SEQ ID NO: 4742257 - DNA, 25 bp, Homo sapien
cagaagtatagtctcccatgcgtcc

SEQ ID NO: 4742258 - DNA, 25 bp, Homo sapien
ggctcagcagcggaccaaattgagg

SEQ ID NO: 4742259 - DNA, 25 bp, Homo sapien
caagctggctcatgcgtgatttgca

SEQ ID NO: 4742260 - DNA, 25 bp, Homo sapien
gcagatggaattcactctacctgag

SEQ ID NO: 4742261 - DNA, 25 bp, Homo sapien
taaaacttcataactacaagctggc

SEQ ID NO: 4742262 - DNA, 25 bp, Homo sapien
gaaattactgcatagtccacccctt

SEQ ID NO: 4742263 - DNA, 25 bp, Homo sapien
cagagacggtggcaatcagcggtca

SEQ ID NO: 4742264 - DNA, 25 bp, Homo sapien
gcatacagcctataggacagccctg

SEQ ID NO: 4742265 - DNA, 25 bp, Homo sapien
ggcaaagctaagaacctcccaaggc

SEQ ID NO: 4742266 - DNA, 25 bp, Homo sapien
cagataactcaccattaggacgccc

SEQ ID NO: 4742267 - DNA, 25 bp, Homo sapien
aagggtctctggcaagtcagggcct

SEQ ID NO: 4742268 - DNA, 25 bp, Homo sapien
taggacgcccttcaggctaattcag

SEQ ID NO: 4742269 - DNA, 25 bp, Homo sapien
taaaccttctctacagggagtggga

SEQ ID NO: 4742270 - DNA, 25 bp, Homo sapien
ggttctccctcttgtcgcgtctgtt

SEQ ID NO: 4742271 - DNA, 25 bp, Homo sapien
cgtctgttcaaaccggcacggtctg

SEQ ID NO: 4742272 - DNA, 25 bp, Homo sapien
cctcttgtcgcgtctgttcaaaccg

SEQ ID NO: 4742273 - DNA, 25 bp, Homo sapien
ttgtcgcgtctgttcaaaccggcac

SEQ ID NO: 4742274 - DNA, 25 bp, Homo sapien
taacacaaaacttgccaaacctaga

SEQ ID NO: 4742275 - DNA, 25 bp, Homo sapien
tatacccaggtgcatagaggaaacc

SEQ ID NO: 4742276 - DNA, 25 bp, Homo sapien
cctagagaaagatatacccaggtgc

SEQ ID NO: 4742277 - DNA, 25 bp, Homo sapien
catagaggaaaccacacaagccagg

SEQ ID NO: 4742278 - DNA, 25 bp, Homo sapien
atcaaatacagaggatggaggaaca

SEQ ID NO: 4742279 - DNA, 25 bp, Homo sapien
gatggagaataagcatagatctgca

SEQ ID NO: 4742280 - DNA, 25 bp, Homo sapien
tcctgatagaagtgctaaaaccatc

SEQ ID NO: 4742281 - DNA, 25 bp, Homo sapien
tcaagactctaagaaactctacagg

SEQ ID NO: 4742282 - DNA, 25 bp, Homo sapien
gagggcacgggtatagatgaaacaa

SEQ ID NO: 4742283 - DNA, 25 bp, Homo sapien
gaattgctcattggagaatcactga

SEQ ID NO: 4742284 - DNA, 25 bp, Homo sapien
caattttgcactatgggtttccaac

SEQ ID NO: 4742285 - DNA, 25 bp, Homo sapien
ggtcaaatatggcaacagtacaact

SEQ ID NO: 4742286 - DNA, 25 bp, Homo sapien
caccggctgtggaaggattgcgaat

SEQ ID NO: 4742287 - DNA, 25 bp, Homo sapien
cgtgccccgtgcaattctgtgaggt

SEQ ID NO: 4742288 - DNA, 25 bp, Homo sapien
gcaataccttcccttgtacagcgca

SEQ ID NO: 4742289 - DNA, 25 bp, Homo sapien
gtgctgaagaccaaacgcctccaga

SEQ ID NO: 4742290 - DNA, 25 bp, Homo sapien
ggaatccggcaggtttctgagcccg

SEQ ID NO: 4742291 - DNA, 25 bp, Homo sapien
gattggctatttcgccgaggccgga

SEQ ID NO: 4742292 - DNA, 25 bp, Homo sapien
cagaccgtgttcctacgtggagggc

SEQ ID NO: 4742293 - DNA, 25 bp, Homo sapien
taggctacctctgattgcggctggg

SEQ ID NO: 4742294 - DNA, 25 bp, Homo sapien
caccccattctaccatgggaagttc

SEQ ID NO: 4742295 - DNA, 25 bp, Homo sapien
aaagtcccttctagaggtggcttca

SEQ ID NO: 4742296 - DNA, 25 bp, Homo sapien
ccattctaccatgggaagttcttgg

SEQ ID NO: 4742297 - DNA, 25 bp, Homo sapien
tctagaggtggcttcacccttttcc

SEQ ID NO: 4742298 - DNA, 25 bp, Homo sapien
ggcctcaggttaggaaggaggggca

SEQ ID NO: 4742299 - DNA, 25 bp, Homo sapien
caggcctcaggttaggaaggagggg

SEQ ID NO: 4742300 - DNA, 25 bp, Homo sapien
gggcacaggttcttgttggcatgag

SEQ ID NO: 4742301 - DNA, 25 bp, Homo sapien
aggaggggcacaggttcttgttggc

SEQ ID NO: 4742302 - DNA, 25 bp, Homo sapien
agtgagctccatggttgacttaact

SEQ ID NO: 4742303 - DNA, 25 bp, Homo sapien
ctggaaaagtaaagtatcagtgagc

SEQ ID NO: 4742304 - DNA, 25 bp, Homo sapien
aaagtaaagtatcagtgagctccat

SEQ ID NO: 4742305 - DNA, 25 bp, Homo sapien
catggttgacttaactgaaccctca

SEQ ID NO: 4742306 - DNA, 25 bp, Homo sapien
agaacttctacatgactctgactcc

SEQ ID NO: 4742307 - DNA, 25 bp, Homo sapien
gtaccttgttacattttgagctttg

SEQ ID NO: 4742308 - DNA, 25 bp, Homo sapien
acattttgagctttgagcataagtc

SEQ ID NO: 4742309 - DNA, 25 bp, Homo sapien
ccatgaccaagttttatgtaccttg

SEQ ID NO: 4742310 - DNA, 25 bp, Homo sapien
cctcagtttgggtggccttctcgaa

SEQ ID NO: 4742311 - DNA, 25 bp, Homo sapien
tctcgaaggatggagaaacgctgct

SEQ ID NO: 4742312 - DNA, 25 bp, Homo sapien
caagtggccgctactgagaaagtac

SEQ ID NO: 4742313 - DNA, 25 bp, Homo sapien
tgaagtggagcttcgatggtacccc

SEQ ID NO: 4742314 - DNA, 25 bp, Homo sapien
gctgaggccagtccaatatgaattc

SEQ ID NO: 4742315 - DNA, 25 bp, Homo sapien
gtgtatcatcagtcaacttccaatc

SEQ ID NO: 4742316 - DNA, 25 bp, Homo sapien
ttgttagagctgaggccagtccaat

SEQ ID NO: 4742317 - DNA, 25 bp, Homo sapien
tttggcaacagtgaatttaagaagt

SEQ ID NO: 4742318 - DNA, 25 bp, Homo sapien
gaggggagattcagagagaccagag

SEQ ID NO: 4742319 - DNA, 25 bp, Homo sapien
ggggagattcagagagaccagagat

SEQ ID NO: 4742320 - DNA, 25 bp, Homo sapien
ctgaggggagattcagagagaccag

SEQ ID NO: 4742321 - DNA, 25 bp, Homo sapien
gggagattcagagagaccagagata

SEQ ID NO: 4742322 - DNA, 25 bp, Homo sapien
taatagtacccactgcagtctgtga

SEQ ID NO: 4742323 - DNA, 25 bp, Homo sapien
ctgcagtctgtgagtaaggatatgc

SEQ ID NO: 4742324 - DNA, 25 bp, Homo sapien
ctaatagtacccactgcagtctgtg

SEQ ID NO: 4742325 - DNA, 25 bp, Homo sapien
agtctgtgagtaaggatatgcttac

SEQ ID NO: 4742326 - DNA, 25 bp, Homo sapien
ttatccatcccgacggacagcaggt

SEQ ID NO: 4742327 - DNA, 25 bp, Homo sapien
aattttttgaagtaagtgagatgta

SEQ ID NO: 4742328 - DNA, 25 bp, Homo sapien
tgaatgtggccagcttggaagacag

SEQ ID NO: 4742329 - DNA, 25 bp, Homo sapien
ttgaagtaagtgagatgtaaaagca

SEQ ID NO: 4742330 - DNA, 25 bp, Homo sapien
tgggtgatagactcctgccactact

SEQ ID NO: 4742331 - DNA, 25 bp, Homo sapien
tatctccttgctccaatccatccct

SEQ ID NO: 4742332 - DNA, 25 bp, Homo sapien
acaggcccctgggtgatagactcct

SEQ ID NO: 4742333 - DNA, 25 bp, Homo sapien
tgccactactatctccttgctccaa

SEQ ID NO: 4742334 - DNA, 25 bp, Homo sapien
tgcgttatcttgaggcggagctgct

SEQ ID NO: 4742335 - DNA, 25 bp, Homo sapien
gaagaagggcttcagtctgttctcc

SEQ ID NO: 4742336 - DNA, 25 bp, Homo sapien
tcaggctgctgttagtgacttccag

SEQ ID NO: 4742337 - DNA, 25 bp, Homo sapien
accctgttcgtctgctggagctgct

SEQ ID NO: 4742338 - DNA, 25 bp, Homo sapien
agagatttggtggatgtcttctcca

SEQ ID NO: 4742339 - DNA, 25 bp, Homo sapien
ctgccctagtgccctgagactgcag

SEQ ID NO: 4742340 - DNA, 25 bp, Homo sapien
gactaaagcgtaaggaggtactgga

SEQ ID NO: 4742341 - DNA, 25 bp, Homo sapien
gaaatacaagatttgactgactaaa

SEQ ID NO: 4742342 - DNA, 25 bp, Homo sapien
gtagtgactatgatccctgctgagg

SEQ ID NO: 4742343 - DNA, 25 bp, Homo sapien
tactggattaggtgaggacaattca

SEQ ID NO: 4742344 - DNA, 25 bp, Homo sapien
gagcaggaggtatcgcaggcaggtt

SEQ ID NO: 4742345 - DNA, 25 bp, Homo sapien
aggccgagcaggaggtatcgcaggc

SEQ ID NO: 4742346 - DNA, 25 bp, Homo sapien
atggcggtcactcctaacagcaggc

SEQ ID NO: 4742347 - DNA, 25 bp, Homo sapien
aggcagatggcggtcactcctaaca

SEQ ID NO: 4742348 - DNA, 25 bp, Homo sapien
catccctaagaggagggcggtgcag

SEQ ID NO: 4742349 - DNA, 25 bp, Homo sapien
ccccgtaaagaatgtagagaggaag

SEQ ID NO: 4742350 - DNA, 25 bp, Homo sapien
cggtgcacgtcggattcaggcgcac

SEQ ID NO: 4742351 - DNA, 25 bp, Homo sapien
taggtgaattgggaccatccgcagg

SEQ ID NO: 4742352 - DNA, 25 bp, Homo sapien
gcagcccgggcgtcggaaggactgc

SEQ ID NO: 4742353 - DNA, 25 bp, Homo sapien
acaggcgcgagcacttggccccgcg

SEQ ID NO: 4742354 - DNA, 25 bp, Homo sapien
gcagccgggacaggcgcgagcactt

SEQ ID NO: 4742355 - DNA, 25 bp, Homo sapien
cccggaaggagctgcaccccgcggg

SEQ ID NO: 4742356 - DNA, 25 bp, Homo sapien
gcagttggctgctccgacttgaccg

SEQ ID NO: 4742357 - DNA, 25 bp, Homo sapien
caggacgcagttggctgctccgact

SEQ ID NO: 4742358 - DNA, 25 bp, Homo sapien
acggctctccaggacgcagttggct

SEQ ID NO: 4742359 - DNA, 25 bp, Homo sapien
tctccaggacgcagttggctgctcc

SEQ ID NO: 4742360 - DNA, 25 bp, Homo sapien
agcttgagggcacccctaggactgc

SEQ ID NO: 4742361 - DNA, 25 bp, Homo sapien
cattctcgtaggtgatttccccatc

SEQ ID NO: 4742362 - DNA, 25 bp, Homo sapien
tcccctagtacagaagaagccaagc

SEQ ID NO: 4742363 - DNA, 25 bp, Homo sapien
ctgcgggcacttgaacattctcgta

SEQ ID NO: 4742364 - DNA, 25 bp, Homo sapien
tgctcttcttcaggggagccttcac

SEQ ID NO: 4742365 - DNA, 25 bp, Homo sapien
cttcttcaggggagccttcacaaac

SEQ ID NO: 4742366 - DNA, 25 bp, Homo sapien
cggctggagatgctcttcttcaggg

SEQ ID NO: 4742367 - DNA, 25 bp, Homo sapien
tcttcttcaggggagccttcacaaa

SEQ ID NO: 4742368 - DNA, 25 bp, Homo sapien
cagatctgcataggtgatggcctca

SEQ ID NO: 4742369 - DNA, 25 bp, Homo sapien
atctgcataggtgatggcctcagcc

SEQ ID NO: 4742370 - DNA, 25 bp, Homo sapien
ctgcataggtgatggcctcagccat

SEQ ID NO: 4742371 - DNA, 25 bp, Homo sapien
ctcagatctgcataggtgatggcct

SEQ ID NO: 4742372 - DNA, 25 bp, Homo sapien
ctctcgtctctgtccgtttacaact

SEQ ID NO: 4742373 - DNA, 25 bp, Homo sapien
tgtccgtttacaactaggctctgtg

SEQ ID NO: 4742374 - DNA, 25 bp, Homo sapien
tacaactaggctctgtgttccctct

SEQ ID NO: 4742375 - DNA, 25 bp, Homo sapien
ctaggctctgtgttccctctgtgac

SEQ ID NO: 4742376 - DNA, 25 bp, Homo sapien
ctccagggtgaggctccgttctccc

SEQ ID NO: 4742377 - DNA, 25 bp, Homo sapien
tcatcctgggggttccagtaactgg

SEQ ID NO: 4742378 - DNA, 25 bp, Homo sapien
cagtaactgggggttcaggaacagg

SEQ ID NO: 4742379 - DNA, 25 bp, Homo sapien
ggttcctggtttgcatccctcgctt

SEQ ID NO: 4742380 - DNA, 25 bp, Homo sapien
tcctgaaagtccttgcttttggctc

SEQ ID NO: 4742381 - DNA, 25 bp, Homo sapien
cattttttctgtcagggattcagct

SEQ ID NO: 4742382 - DNA, 25 bp, Homo sapien
tcaagggctgagaaattaaatccac

SEQ ID NO: 4742383 - DNA, 25 bp, Homo sapien
gagtcatgattgtccttgggaagca

SEQ ID NO: 4742384 - DNA, 25 bp, Homo sapien
tattgtgagtagctgacctgagttt

SEQ ID NO: 4742385 - DNA, 25 bp, Homo sapien
cacaagaccgaagaggaaatatgaa

SEQ ID NO: 4742386 - DNA, 25 bp, Homo sapien
acatttaactgaggtcacaagaccg

SEQ ID NO: 4742387 - DNA, 25 bp, Homo sapien
aaaggatagggaagcaagttagcaa

SEQ ID NO: 4742388 - DNA, 25 bp, Homo sapien
ctgatgaccgctgtaactgcttcct

SEQ ID NO: 4742389 - DNA, 25 bp, Homo sapien
cattgccggcttgaatgcccgggtt

SEQ ID NO: 4742390 - DNA, 25 bp, Homo sapien
tgccattgccggcttgaatgcccgg

SEQ ID NO: 4742391 - DNA, 25 bp, Homo sapien
gaggttggctgatgaccgctgtaac

SEQ ID NO: 4742392 - DNA, 25 bp, Homo sapien
cacaggtatttgtgagtcgatcagc

SEQ ID NO: 4742393 - DNA, 25 bp, Homo sapien
cggaacggctgtacaggagaagaca

SEQ ID NO: 4742394 - DNA, 25 bp, Homo sapien
tcaggaatcaatagggaaactgccc

SEQ ID NO: 4742395 - DNA, 25 bp, Homo sapien
tcttaagttccaggttcaggaatca

SEQ ID NO: 4742396 - DNA, 25 bp, Homo sapien
caaacgactgcttgggagcagtcat

SEQ ID NO: 4742397 - DNA, 25 bp, Homo sapien
ctcagtttacaaacgactgcttggg

SEQ ID NO: 4742398 - DNA, 25 bp, Homo sapien
aacaaagttcaaatcataccccgct

SEQ ID NO: 4742399 - DNA, 25 bp, Homo sapien
taccccgctacagtcacatatgaaa

SEQ ID NO: 4742400 - DNA, 25 bp, Homo sapien
gagggagccggtcagctgcgttccg

SEQ ID NO: 4742401 - DNA, 25 bp, Homo sapien
ttccgcgaacttgggaggcgactgc

SEQ ID NO: 4742402 - DNA, 25 bp, Homo sapien
cgttccgcgaacttgggaggcgact

SEQ ID NO: 4742403 - DNA, 25 bp, Homo sapien
gtcagctgcgttccgcgaacttggg

SEQ ID NO: 4742404 - DNA, 25 bp, Homo sapien
tctgtggactcctgaggaatatacc

SEQ ID NO: 4742405 - DNA, 25 bp, Homo sapien
ttgaagctcagataggaagtccggg

SEQ ID NO: 4742406 - DNA, 25 bp, Homo sapien
gcaatggcgcccgtctttgggtgct

SEQ ID NO: 4742407 - DNA, 25 bp, Homo sapien
tcctgctagggttcttaggtcaaaa

SEQ ID NO: 4742408 - DNA, 25 bp, Homo sapien
ctgcaggctggtatagcacatcacc

SEQ ID NO: 4742409 - DNA, 25 bp, Homo sapien
tggctgttggcataggcctgatccg

SEQ ID NO: 4742410 - DNA, 25 bp, Homo sapien
tggtatagcacatcacctcctctgc

SEQ ID NO: 4742411 - DNA, 25 bp, Homo sapien
tccaggaccggggatccgaccctga

SEQ ID NO: 4742412 - DNA, 25 bp, Homo sapien
tagaagttcactggaccctcggaaa

SEQ ID NO: 4742413 - DNA, 25 bp, Homo sapien
ctgttagaagttcactggaccctcg

SEQ ID NO: 4742414 - DNA, 25 bp, Homo sapien
gttagaagttcactggaccctcgga

SEQ ID NO: 4742415 - DNA, 25 bp, Homo sapien
tcactggaccctcggaaaagcccga

SEQ ID NO: 4742416 - DNA, 25 bp, Homo sapien
ttggatcctgctggtctggctctgg

SEQ ID NO: 4742417 - DNA, 25 bp, Homo sapien
aggttcccatacagcgggacctctt

SEQ ID NO: 4742418 - DNA, 25 bp, Homo sapien
ctgtctgtagataatgcaggttccc

SEQ ID NO: 4742419 - DNA, 25 bp, Homo sapien
ggttcccatacagcgggacctcttc

SEQ ID NO: 4742420 - DNA, 25 bp, Homo sapien
gtagataatgcaggttcccatacag

SEQ ID NO: 4742421 - DNA, 25 bp, Homo sapien
gcaacgcagagtttaggggatgagt

SEQ ID NO: 4742422 - DNA, 25 bp, Homo sapien
acgcagagtttaggggatgagtggg

SEQ ID NO: 4742423 - DNA, 25 bp, Homo sapien
caacgcagagtttaggggatgagtg

SEQ ID NO: 4742424 - DNA, 25 bp, Homo sapien
ctgcaacgcagagtttaggggatga

SEQ ID NO: 4742425 - DNA, 25 bp, Homo sapien
gatgagaaatagcagcgtcacagcc

SEQ ID NO: 4742426 - DNA, 25 bp, Homo sapien
gcagccagcgagatgagaaatagca

SEQ ID NO: 4742427 - DNA, 25 bp, Homo sapien
tccggcccctggtccactgggacaa

SEQ ID NO: 4742428 - DNA, 25 bp, Homo sapien
cagcgagatgagaaatagcagcgtc

SEQ ID NO: 4742429 - DNA, 25 bp, Homo sapien
taagaggacccacagtccccaggcc

SEQ ID NO: 4742430 - DNA, 25 bp, Homo sapien
ctaagaggacccacagtccccaggc

SEQ ID NO: 4742431 - DNA, 25 bp, Homo sapien
caggcctgggttatggaggggattc

SEQ ID NO: 4742432 - DNA, 25 bp, Homo sapien
agtccccaggcctgggttatggagg

SEQ ID NO: 4742433 - DNA, 25 bp, Homo sapien
ccagtgcgagtagatccgtgcagtt

SEQ ID NO: 4742434 - DNA, 25 bp, Homo sapien
tccgtgcagttgtcgcctctgctca

SEQ ID NO: 4742435 - DNA, 25 bp, Homo sapien
gagtagatccgtgcagttgtcgcct

SEQ ID NO: 4742436 - DNA, 25 bp, Homo sapien
tagatccgtgcagttgtcgcctctg

SEQ ID NO: 4742437 - DNA, 25 bp, Homo sapien
gctgcagatgtgagagtccacaagc

SEQ ID NO: 4742438 - DNA, 25 bp, Homo sapien
acactgctctgagccgagggtcagc

SEQ ID NO: 4742439 - DNA, 25 bp, Homo sapien
gatgtgagagtccacaagcacactg

SEQ ID NO: 4742440 - DNA, 25 bp, Homo sapien
cacaagcacactgctctgagccgag

SEQ ID NO: 4742441 - DNA, 25 bp, Homo sapien
gcatccccaatactggtggtggcaa

SEQ ID NO: 4742442 - DNA, 25 bp, Homo sapien
tttccacagcacttcttactcccat

SEQ ID NO: 4742443 - DNA, 25 bp, Homo sapien
tccccaatactggtggtggcaaagt

SEQ ID NO: 4742444 - DNA, 25 bp, Homo sapien
gctcagcatccccaatactggtggt

SEQ ID NO: 4742445 - DNA, 25 bp, Homo sapien
ttaaatgatccggaacaggcaaggt

SEQ ID NO: 4742446 - DNA, 25 bp, Homo sapien
tttttaaatgatccggaacaggcaa

SEQ ID NO: 4742447 - DNA, 25 bp, Homo sapien
tttaaatgatccggaacaggcaagg

SEQ ID NO: 4742448 - DNA, 25 bp, Homo sapien
ttttttaaatgatccggaacaggca

SEQ ID NO: 4742449 - DNA, 25 bp, Homo sapien
cgctgagaatgagccccgtgtggtt

SEQ ID NO: 4742450 - DNA, 25 bp, Homo sapien
tcagtgtgtagcctaggatacaggc

SEQ ID NO: 4742451 - DNA, 25 bp, Homo sapien
taactagagggagctgacggatgac

SEQ ID NO: 4742452 - DNA, 25 bp, Homo sapien
gatacgcttcttggcggactttgga

SEQ ID NO: 4742453 - DNA, 25 bp, Homo sapien
gaacccagctagcagtgtccatgct

SEQ ID NO: 4742454 - DNA, 25 bp, Homo sapien
ctagagttccagatatgaagtggtc

SEQ ID NO: 4742455 - DNA, 25 bp, Homo sapien
agtagtcacttgctcgaggtcaccc

SEQ ID NO: 4742456 - DNA, 25 bp, Homo sapien
ttagttctcctacaatccagtgagg

SEQ ID NO: 4742457 - DNA, 25 bp, Homo sapien
ggctgtgtctttagccgtgacccta

SEQ ID NO: 4742458 - DNA, 25 bp, Homo sapien
cgtacttgcattataaaatagaacc

SEQ ID NO: 4742459 - DNA, 25 bp, Homo sapien
gtgaccctattacgtacttgcatta

SEQ ID NO: 4742460 - DNA, 25 bp, Homo sapien
tagaaccgatggaaccagtttagat

SEQ ID NO: 4742461 - DNA, 25 bp, Homo sapien
gagaaaaccaccgtcaatgagcact

SEQ ID NO: 4742462 - DNA, 25 bp, Homo sapien
gctttaagagcactacgtgttcagg

SEQ ID NO: 4742463 - DNA, 25 bp, Homo sapien
gagcactgactgtaaagactgacgt

SEQ ID NO: 4742464 - DNA, 25 bp, Homo sapien
gaccattgccttcaaattcctgagg

SEQ ID NO: 4742465 - DNA, 25 bp, Homo sapien
tcaaattgcactctctcttggctgg

SEQ ID NO: 4742466 - DNA, 25 bp, Homo sapien
taggacgtcgcttcatatgctgggt

SEQ ID NO: 4742467 - DNA, 25 bp, Homo sapien
tcagcaaactgaccatgtgtgggac

SEQ ID NO: 4742468 - DNA, 25 bp, Homo sapien
tcaaaccggagggagttgctcattc

SEQ ID NO: 4742469 - DNA, 25 bp, Homo sapien
gaaactgcggttctccacgaggagg

SEQ ID NO: 4742470 - DNA, 25 bp, Homo sapien
aactgcggttctccacgaggaggca

SEQ ID NO: 4742471 - DNA, 25 bp, Homo sapien
tgcggttctccacgaggaggcaagc

SEQ ID NO: 4742472 - DNA, 25 bp, Homo sapien
ttctccacgaggaggcaagcaagca

SEQ ID NO: 4742473 - DNA, 25 bp, Homo sapien
gaagatacataaccacttctgcccc

SEQ ID NO: 4742474 - DNA, 25 bp, Homo sapien
caggtgggtttagcagaagtctgtg

SEQ ID NO: 4742475 - DNA, 25 bp, Homo sapien
gcagaagatacataaccacttctgc

SEQ ID NO: 4742476 - DNA, 25 bp, Homo sapien
tctgtgctgggtcgggggagtttag

SEQ ID NO: 4742477 - DNA, 25 bp, Homo sapien
gcacctgaacaacctgatggcccag

SEQ ID NO: 4742478 - DNA, 25 bp, Homo sapien
tggcccagttgacacaacagctggc

SEQ ID NO: 4742479 - DNA, 25 bp, Homo sapien
ccagacagagcagcacctgaacaac

SEQ ID NO: 4742480 - DNA, 25 bp, Homo sapien
caacagctggcccagttgacacaac

SEQ ID NO: 4742481 - DNA, 25 bp, Homo sapien
ggaatggggacataggttgggagcc

SEQ ID NO: 4742482 - DNA, 25 bp, Homo sapien
gtgaggagagcaatgattctgtgaa

SEQ ID NO: 4742483 - DNA, 25 bp, Homo sapien
tgaggagagcaatgattctgtgaat

SEQ ID NO: 4742484 - DNA, 25 bp, Homo sapien
gggagccactgagtggacatttctt

SEQ ID NO: 4742485 - DNA, 25 bp, Homo sapien
gaagctatggaccatccacgagctg

SEQ ID NO: 4742486 - DNA, 25 bp, Homo sapien
ctgctgcaagatagcaagccggaca

SEQ ID NO: 4742487 - DNA, 25 bp, Homo sapien
gccggacaaggatatggaggcttca

SEQ ID NO: 4742488 - DNA, 25 bp, Homo sapien
gcttctgaacatgaagctatggacc

SEQ ID NO: 4742489 - DNA, 25 bp, Homo sapien
aggcgagtctgctggaggtggagac

SEQ ID NO: 4742490 - DNA, 25 bp, Homo sapien
aaggctcgggaggcgagtctgctgg

SEQ ID NO: 4742491 - DNA, 25 bp, Homo sapien
tcgggaggcgagtctgctggaggtg

SEQ ID NO: 4742492 - DNA, 25 bp, Homo sapien
gaacattcctgatctctccccacac

SEQ ID NO: 4742493 - DNA, 25 bp, Homo sapien
gaggccagcagacctcttcctgagg

SEQ ID NO: 4742494 - DNA, 25 bp, Homo sapien
agaggccagcagacctcttcctgag

SEQ ID NO: 4742495 - DNA, 25 bp, Homo sapien
ccagcagacctcttcctgaggactt

SEQ ID NO: 4742496 - DNA, 25 bp, Homo sapien
ggccagcagacctcttcctgaggac

SEQ ID NO: 4742497 - DNA, 25 bp, Homo sapien
gaacctagctacttcctgggaggtg

SEQ ID NO: 4742498 - DNA, 25 bp, Homo sapien
ccttgataaatgacgggccatggac

SEQ ID NO: 4742499 - DNA, 25 bp, Homo sapien
gatcctagttggttgtacacaccca

SEQ ID NO: 4742500 - DNA, 25 bp, Homo sapien
actggagcacagagacatggaacct

SEQ ID NO: 4742501 - DNA, 25 bp, Homo sapien
cctgagttctggaatctataagatt

SEQ ID NO: 4742502 - DNA, 25 bp, Homo sapien
tcagatgatctggagtagcttggtc

SEQ ID NO: 4742503 - DNA, 25 bp, Homo sapien
tagcttggtccaggcaaacagaaag

SEQ ID NO: 4742504 - DNA, 25 bp, Homo sapien
gaaagtgacctttgtcaaatcatga

SEQ ID NO: 4742505 - DNA, 25 bp, Homo sapien
tcagactgtggtaccagcgtgacag

SEQ ID NO: 4742506 - DNA, 25 bp, Homo sapien
gtggtaccagcgtgacagctcctcc

SEQ ID NO: 4742507 - DNA, 25 bp, Homo sapien
actgtggtaccagcgtgacagctcc

SEQ ID NO: 4742508 - DNA, 25 bp, Homo sapien
cagactgtggtaccagcgtgacagc

SEQ ID NO: 4742509 - DNA, 25 bp, Homo sapien
tgaagaggaagaacatgcggggccg

SEQ ID NO: 4742510 - DNA, 25 bp, Homo sapien
cccatggggaggcaccactaacagc

SEQ ID NO: 4742511 - DNA, 25 bp, Homo sapien
gtgccactccgcagcaggtgcagtg

SEQ ID NO: 4742512 - DNA, 25 bp, Homo sapien
aggcaccactaacagccagccctgg

SEQ ID NO: 4742513 - DNA, 25 bp, Homo sapien
agagcctggacacgccgaaggtgct

SEQ ID NO: 4742514 - DNA, 25 bp, Homo sapien
gtctcacttatcagtcgggcagccc

SEQ ID NO: 4742515 - DNA, 25 bp, Homo sapien
tctgaccaatagtatggactctctg

SEQ ID NO: 4742516 - DNA, 25 bp, Homo sapien
tctgggcagtctcacttatcagtcg

SEQ ID NO: 4742517 - DNA, 25 bp, Homo sapien
gttgtgaaagaggttattctggaag

SEQ ID NO: 4742518 - DNA, 25 bp, Homo sapien
tggttgtgaaagaggttattctgga

SEQ ID NO: 4742519 - DNA, 25 bp, Homo sapien
atggttgtgaaagaggttattctgg

SEQ ID NO: 4742520 - DNA, 25 bp, Homo sapien
tactccccatacaactttgactttg

SEQ ID NO: 4742521 - DNA, 25 bp, Homo sapien
cagtggaagatagggtcataccaga

SEQ ID NO: 4742522 - DNA, 25 bp, Homo sapien
acatgtcagtggaagatagggtcat

SEQ ID NO: 4742523 - DNA, 25 bp, Homo sapien
ccagacattgttggaggtcagaatc

SEQ ID NO: 4742524 - DNA, 25 bp, Homo sapien
cctgcgttgccgaggagcaagaacc

SEQ ID NO: 4742525 - DNA, 25 bp, Homo sapien
cctgtgttttcagccaaagctacga

SEQ ID NO: 4742526 - DNA, 25 bp, Homo sapien
tgttgatggtcagggctgttgggac

SEQ ID NO: 4742527 - DNA, 25 bp, Homo sapien
caaagctacgacgagattctcatac

SEQ ID NO: 4742528 - DNA, 25 bp, Homo sapien
cagggctgttgggacctgtgttttc

SEQ ID NO: 4742529 - DNA, 25 bp, Homo sapien
aaactcagggcggccttcctgaagc

SEQ ID NO: 4742530 - DNA, 25 bp, Homo sapien
tcctgaagccgtacaaacctccgga

SEQ ID NO: 4742531 - DNA, 25 bp, Homo sapien
cttcctgaagccgtacaaacctccg

SEQ ID NO: 4742532 - DNA, 25 bp, Homo sapien
ccccaaactcagggcggccttcctg

SEQ ID NO: 4742533 - DNA, 25 bp, Homo sapien
tccaagtggcggcagaagccctcca

SEQ ID NO: 4742534 - DNA, 25 bp, Homo sapien
agcaaattggttatagagctccaag

SEQ ID NO: 4742535 - DNA, 25 bp, Homo sapien
agctccaagtggcggcagaagccct

SEQ ID NO: 4742536 - DNA, 25 bp, Homo sapien
caagtggcggcagaagccctccagc

SEQ ID NO: 4742537 - DNA, 25 bp, Homo sapien
gctggcgccgtagatgagctcccag

SEQ ID NO: 4742538 - DNA, 25 bp, Homo sapien
ctggcgccgtagatgagctcccagg

SEQ ID NO: 4742539 - DNA, 25 bp, Homo sapien
tggctggcgccgtagatgagctccc

SEQ ID NO: 4742540 - DNA, 25 bp, Homo sapien
ctcaggtggtcgcagggtccccttg

SEQ ID NO: 4742541 - DNA, 25 bp, Homo sapien
tgcggaaggagagaacattggttct

SEQ ID NO: 4742542 - DNA, 25 bp, Homo sapien
gaaggagagaacattggttcttagc

SEQ ID NO: 4742543 - DNA, 25 bp, Homo sapien
cggaaggagagaacattggttctta

SEQ ID NO: 4742544 - DNA, 25 bp, Homo sapien
ctgcggaaggagagaacattggttc

SEQ ID NO: 4742545 - DNA, 25 bp, Homo sapien
cccagctgttcttggtagcgccgct

SEQ ID NO: 4742546 - DNA, 25 bp, Homo sapien
tcccgggcggtgcaggcgcgtttcc

SEQ ID NO: 4742547 - DNA, 25 bp, Homo sapien
tagcgccgctcggtctctagcagct

SEQ ID NO: 4742548 - DNA, 25 bp, Homo sapien
ggtgcaggcgcgtttccgctcccag

SEQ ID NO: 4742549 - DNA, 25 bp, Homo sapien
tgctcttgcaccgggcaccgcgaac

SEQ ID NO: 4742550 - DNA, 25 bp, Homo sapien
tcttgcaccgggcaccgcgaaccgg

SEQ ID NO: 4742551 - DNA, 25 bp, Homo sapien
ctcttgcaccgggcaccgcgaaccg

SEQ ID NO: 4742552 - DNA, 25 bp, Homo sapien
ctgctcttgcaccgggcaccgcgaa

SEQ ID NO: 4742553 - DNA, 25 bp, Homo sapien
tgcagtccgcggcagattcaaatcc

SEQ ID NO: 4742554 - DNA, 25 bp, Homo sapien
ccctggctgagggatcgacacttcc

SEQ ID NO: 4742555 - DNA, 25 bp, Homo sapien
gggatcgacacttccggctgcagtc

SEQ ID NO: 4742556 - DNA, 25 bp, Homo sapien
aatcccaaccgctcgcgggcgggag

SEQ ID NO: 4742557 - DNA, 25 bp, Homo sapien
gactcccagcatgatccagggtcag

SEQ ID NO: 4742558 - DNA, 25 bp, Homo sapien
gagaaacagagccatagggaatcgc

SEQ ID NO: 4742559 - DNA, 25 bp, Homo sapien
ggtttggcagactcccagcatgatc

SEQ ID NO: 4742560 - DNA, 25 bp, Homo sapien
tccactcagaccagagacgagagag

SEQ ID NO: 4742561 - DNA, 25 bp, Homo sapien
cattggcgctatggaggtgagacac

SEQ ID NO: 4742562 - DNA, 25 bp, Homo sapien
gaaacgtggcttcttgactcccaag

SEQ ID NO: 4742563 - DNA, 25 bp, Homo sapien
cactctcggaggtagaaagggacag

SEQ ID NO: 4742564 - DNA, 25 bp, Homo sapien
catctctgcaaaagggcgctctgtg

SEQ ID NO: 4742565 - DNA, 25 bp, Homo sapien
gggtggcaaccatagcctggctggg

SEQ ID NO: 4742566 - DNA, 25 bp, Homo sapien
ttgggttggggtggcaaccatagcc

SEQ ID NO: 4742567 - DNA, 25 bp, Homo sapien
ttggggtggcaaccatagcctggct

SEQ ID NO: 4742568 - DNA, 25 bp, Homo sapien
acatcagttttattgggttggggtg

SEQ ID NO: 4742569 - DNA, 25 bp, Homo sapien
ctggtccaaggtctggtgaatctcg

SEQ ID NO: 4742570 - DNA, 25 bp, Homo sapien
ggtctggtgaatctcgacgttctcc

SEQ ID NO: 4742571 - DNA, 25 bp, Homo sapien
tccaaggtctggtgaatctcgacgt

SEQ ID NO: 4742572 - DNA, 25 bp, Homo sapien
gaatctcgacgttctcctccttggc

SEQ ID NO: 4742573 - DNA, 25 bp, Homo sapien
cactcaaggccttggggtcatagag

SEQ ID NO: 4742574 - DNA, 25 bp, Homo sapien
acacatgcattcacggacctcaggg

SEQ ID NO: 4742575 - DNA, 25 bp, Homo sapien
catggagtgggtcaaggaagacaca

SEQ ID NO: 4742576 - DNA, 25 bp, Homo sapien
ggaaggtgacatatagacatggagt

SEQ ID NO: 4742577 - DNA, 25 bp, Homo sapien
ggaaccccagctaagtgctctgagg

SEQ ID NO: 4742578 - DNA, 25 bp, Homo sapien
cagtgaaagccccatgttgctgata

SEQ ID NO: 4742579 - DNA, 25 bp, Homo sapien
agtggtgaatcagagagcgacagcc

SEQ ID NO: 4742580 - DNA, 25 bp, Homo sapien
tgtcaggagtgaaccagtgctccgt

SEQ ID NO: 4742581 - DNA, 25 bp, Homo sapien
tcagaatttattaagcagcaaagga

SEQ ID NO: 4742582 - DNA, 25 bp, Homo sapien
ccaagttcagaatttattaagcagc

SEQ ID NO: 4742583 - DNA, 25 bp, Homo sapien
agttcagaatttattaagcagcaaa

SEQ ID NO: 4742584 - DNA, 25 bp, Homo sapien
caagttcagaatttattaagcagca

SEQ ID NO: 4742585 - DNA, 25 bp, Homo sapien
caatgttggcaatttctgctcctcc

SEQ ID NO: 4742586 - DNA, 25 bp, Homo sapien
tcccctccccatagagagaatggaa

SEQ ID NO: 4742587 - DNA, 25 bp, Homo sapien
tgcaatgttggcaatttctgctcct

SEQ ID NO: 4742588 - DNA, 25 bp, Homo sapien
agctgaggtggccacgctggcgtgg

SEQ ID NO: 4742589 - DNA, 25 bp, Homo sapien
aggtgatgtcattgagtgcgttgtc

SEQ ID NO: 4742590 - DNA, 25 bp, Homo sapien
tcattgagtgcgttgtccagttcct

SEQ ID NO: 4742591 - DNA, 25 bp, Homo sapien
gtcattgagtgcgttgtccagttcc

SEQ ID NO: 4742592 - DNA, 25 bp, Homo sapien
tgatgtcattgagtgcgttgtccag

SEQ ID NO: 4742593 - DNA, 25 bp, Homo sapien
agacctctcggcaaactctgctcgg

SEQ ID NO: 4742594 - DNA, 25 bp, Homo sapien
cagacctctcggcaaactctgctcg

SEQ ID NO: 4742595 - DNA, 25 bp, Homo sapien
gacctctcggcaaactctgctcggg

SEQ ID NO: 4742596 - DNA, 25 bp, Homo sapien
cctctcggcaaactctgctcgggtc

SEQ ID NO: 4742597 - DNA, 25 bp, Homo sapien
cctccaacagtttgatctcctcttc

SEQ ID NO: 4742598 - DNA, 25 bp, Homo sapien
tcctccaacagtttgatctcctctt

SEQ ID NO: 4742599 - DNA, 25 bp, Homo sapien
gggacacacacacgccatcagtaca

SEQ ID NO: 4742600 - DNA, 25 bp, Homo sapien
accccgtaggctcctggtcatcttg

SEQ ID NO: 4742601 - DNA, 25 bp, Homo sapien
gtacagcgctaccacagatccttca

SEQ ID NO: 4742602 - DNA, 25 bp, Homo sapien
tcatttctccattgtaccccgtagg

SEQ ID NO: 4742603 - DNA, 25 bp, Homo sapien
ttcaagttgttggtaacaattttca

SEQ ID NO: 4742604 - DNA, 25 bp, Homo sapien
aaagagcagcctgcggtgctgagac

SEQ ID NO: 4742605 - DNA, 25 bp, Homo sapien
gagagaaggcgccattgcccagaaa

SEQ ID NO: 4742606 - DNA, 25 bp, Homo sapien
tgtgagggcacagcgaagccagaca

SEQ ID NO: 4742607 - DNA, 25 bp, Homo sapien
gagcaaagttgtgagagtgacagca

SEQ ID NO: 4742608 - DNA, 25 bp, Homo sapien
tccatggttcgaagttcctcctcca

SEQ ID NO: 4742609 - DNA, 25 bp, Homo sapien
tggtccatggttcgaagttcctcct

SEQ ID NO: 4742610 - DNA, 25 bp, Homo sapien
cctggtccatggttcgaagttcctc

SEQ ID NO: 4742611 - DNA, 25 bp, Homo sapien
ggcctggtccatggttcgaagttcc

SEQ ID NO: 4742612 - DNA, 25 bp, Homo sapien
gggccaatgggctcacttgtcaccc

SEQ ID NO: 4742613 - DNA, 25 bp, Homo sapien
aggccccagggccaatgggctcact

SEQ ID NO: 4742614 - DNA, 25 bp, Homo sapien
aagcctaggatgctaccttcccact

SEQ ID NO: 4742615 - DNA, 25 bp, Homo sapien
gccccaagcctaggatgctaccttc

SEQ ID NO: 4742616 - DNA, 25 bp, Homo sapien
tcagccctctcctccgagcgctcca

SEQ ID NO: 4742617 - DNA, 25 bp, Homo sapien
gccctctcctccgagcgctccagct

SEQ ID NO: 4742618 - DNA, 25 bp, Homo sapien
cagctctccttccaggatcaccagc

SEQ ID NO: 4742619 - DNA, 25 bp, Homo sapien
tccaggatcaccagcttcctggcca

SEQ ID NO: 4742620 - DNA, 25 bp, Homo sapien
ctgaatcctcagcgatgtgcttggc

SEQ ID NO: 4742621 - DNA, 25 bp, Homo sapien
tgaatcctcagcgatgtgcttggcc

SEQ ID NO: 4742622 - DNA, 25 bp, Homo sapien
gaatcctcagcgatgtgcttggcct

SEQ ID NO: 4742623 - DNA, 25 bp, Homo sapien
atcctcagcgatgtgcttggcctcc

SEQ ID NO: 4742624 - DNA, 25 bp, Homo sapien
ctctcgctctcatcagccgccttct

SEQ ID NO: 4742625 - DNA, 25 bp, Homo sapien
tgcggcggttcagggaggccacatc

SEQ ID NO: 4742626 - DNA, 25 bp, Homo sapien
aaccagctgaatgcggcggttcagg

SEQ ID NO: 4742627 - DNA, 25 bp, Homo sapien
tcaaccagctgaatgcggcggttca

SEQ ID NO: 4742628 - DNA, 25 bp, Homo sapien
tgaatgcggcggttcagggaggcca

SEQ ID NO: 4742629 - DNA, 25 bp, Homo sapien
tggccttcttctcggcctgctccag

SEQ ID NO: 4742630 - DNA, 25 bp, Homo sapien
ttcttctcggcctgctccagtttct

SEQ ID NO: 4742631 - DNA, 25 bp, Homo sapien
agtggccttcttctcggcctgctcc

SEQ ID NO: 4742632 - DNA, 25 bp, Homo sapien
gccttcttctcggcctgctccagtt

SEQ ID NO: 4742633 - DNA, 25 bp, Homo sapien
attcagaatacttttccacctcatc

SEQ ID NO: 4742634 - DNA, 25 bp, Homo sapien
gattcagaatacttttccacctcat

SEQ ID NO: 4742635 - DNA, 25 bp, Homo sapien
ggattcagaatacttttccacctca

SEQ ID NO: 4742636 - DNA, 25 bp, Homo sapien
ttcttgtcggcttcggcctgctcgg

SEQ ID NO: 4742637 - DNA, 25 bp, Homo sapien
ctgcttgcagcggtcctcagcttgc

SEQ ID NO: 4742638 - DNA, 25 bp, Homo sapien
tgcttgcagcggtcctcagcttgct

SEQ ID NO: 4742639 - DNA, 25 bp, Homo sapien
cttcggcctgctcggcgcggtcgat

SEQ ID NO: 4742640 - DNA, 25 bp, Homo sapien
ttaaatgtctctcgggaggcggagc

SEQ ID NO: 4742641 - DNA, 25 bp, Homo sapien
tagtagcggagtctcatcgggagct

SEQ ID NO: 4742642 - DNA, 25 bp, Homo sapien
tccctctaggtttgcgttatcgacg

SEQ ID NO: 4742643 - DNA, 25 bp, Homo sapien
cccagtgggccaactttatgctgaa

SEQ ID NO: 4742644 - DNA, 25 bp, Homo sapien
taaccacagtttgtcggccattctt

SEQ ID NO: 4742645 - DNA, 25 bp, Homo sapien
aattaatacatttaggctgggcgtg

SEQ ID NO: 4742646 - DNA, 25 bp, Homo sapien
tagaaaagttctgccagctacctaa

SEQ ID NO: 4742647 - DNA, 25 bp, Homo sapien
tcttttgagtaaacgtggcattcca

SEQ ID NO: 4742648 - DNA, 25 bp, Homo sapien
tggataactttagggtccgggtgca

SEQ ID NO: 4742649 - DNA, 25 bp, Homo sapien
taacaggagtatgacttctcaggca

SEQ ID NO: 4742650 - DNA, 25 bp, Homo sapien
gcagcagcagaacgacactttgtga

SEQ ID NO: 4742651 - DNA, 25 bp, Homo sapien
caaggactggatttgttgacatacc

SEQ ID NO: 4742652 - DNA, 25 bp, Homo sapien
cagattcagatcgaggtacagcagc

SEQ ID NO: 4742653 - DNA, 25 bp, Homo sapien
tctgggccgggtctgcattaaatag

SEQ ID NO: 4742654 - DNA, 25 bp, Homo sapien
cagaaggctttggtagtggcacgca

SEQ ID NO: 4742655 - DNA, 25 bp, Homo sapien
tataactctgcagcccctatgggta

SEQ ID NO: 4742656 - DNA, 25 bp, Homo sapien
cagctctcgttccttccgaagcatt

SEQ ID NO: 4742657 - DNA, 25 bp, Homo sapien
tgctcatctcgaagctctgaaggca

SEQ ID NO: 4742658 - DNA, 25 bp, Homo sapien
gggccagtttcttccgcgcctcttc

SEQ ID NO: 4742659 - DNA, 25 bp, Homo sapien
gaaggcagaaacttgtactgctgct

SEQ ID NO: 4742660 - DNA, 25 bp, Homo sapien
gaggctcgcttcactgcgttgccag

SEQ ID NO: 4742661 - DNA, 25 bp, Homo sapien
gattatctgaggctcgcttcactgc

SEQ ID NO: 4742662 - DNA, 25 bp, Homo sapien
tgtgctgctttcaccagattatctg

SEQ ID NO: 4742663 - DNA, 25 bp, Homo sapien
accagattatctgaggctcgcttca

SEQ ID NO: 4742664 - DNA, 25 bp, Homo sapien
cacacagattgttggtggccgcagc

SEQ ID NO: 4742665 - DNA, 25 bp, Homo sapien
tgtggaggcagctacctgcttggct

SEQ ID NO: 4742666 - DNA, 25 bp, Homo sapien
ccttgaccttgcaggccacaaggag

SEQ ID NO: 4742667 - DNA, 25 bp, Homo sapien
tcattgcctccgagtcctggtcagc

SEQ ID NO: 4742668 - DNA, 25 bp, Homo sapien
cagtgcattggctggaatggcaccc

SEQ ID NO: 4742669 - DNA, 25 bp, Homo sapien
gtgcattggctggaatggcacccac

SEQ ID NO: 4742670 - DNA, 25 bp, Homo sapien
tccagtgcattggctggaatggcac

SEQ ID NO: 4742671 - DNA, 25 bp, Homo sapien
gccctgggaccactgcccatcgtcc

SEQ ID NO: 4742672 - DNA, 25 bp, Homo sapien
gtggctgctgcaatggacttggcag

SEQ ID NO: 4742673 - DNA, 25 bp, Homo sapien
tggacttggcagcttctagtatctg

SEQ ID NO: 4742674 - DNA, 25 bp, Homo sapien
caaagttcaaggactcatctgcctc

SEQ ID NO: 4742675 - DNA, 25 bp, Homo sapien
gggcagccgacgcagcctttaccag

SEQ ID NO: 4742676 - DNA, 25 bp, Homo sapien
ctgctctagctttttggctgcagcc

SEQ ID NO: 4742677 - DNA, 25 bp, Homo sapien
ggtcctctgggtctacccattctgt

SEQ ID NO: 4742678 - DNA, 25 bp, Homo sapien
gcccggggcttcagctgctctagct

SEQ ID NO: 4742679 - DNA, 25 bp, Homo sapien
gggtcctctgggtctacccattctg

SEQ ID NO: 4742680 - DNA, 25 bp, Homo sapien
cagagtggggaggtcaaaagcacca

SEQ ID NO: 4742681 - DNA, 25 bp, Homo sapien
gcaccagggagcatggttagtatca

SEQ ID NO: 4742682 - DNA, 25 bp, Homo sapien
aaagcaccagggagcatggttagta

SEQ ID NO: 4742683 - DNA, 25 bp, Homo sapien
aaaagcaccagggagcatggttagt

SEQ ID NO: 4742684 - DNA, 25 bp, Homo sapien
ggaaccagccacacgctttgaatgt

SEQ ID NO: 4742685 - DNA, 25 bp, Homo sapien
atgagctcagtgacggaaccagcca

SEQ ID NO: 4742686 - DNA, 25 bp, Homo sapien
acgctttgaatgtcctgtcaactgc

SEQ ID NO: 4742687 - DNA, 25 bp, Homo sapien
agtgacggaaccagccacacgcttt

SEQ ID NO: 4742688 - DNA, 25 bp, Homo sapien
caggtagccattggcacactcccgg

SEQ ID NO: 4742689 - DNA, 25 bp, Homo sapien
acactcccggccatagtgcagggct

SEQ ID NO: 4742690 - DNA, 25 bp, Homo sapien
gcagggctcgaagccgcacatcagg

SEQ ID NO: 4742691 - DNA, 25 bp, Homo sapien
gcagtacatggtccagcagttccag

SEQ ID NO: 4742692 - DNA, 25 bp, Homo sapien
tagcacggcggctcagattggctgt

SEQ ID NO: 4742693 - DNA, 25 bp, Homo sapien
catggtgatacccttggtcattcgg

SEQ ID NO: 4742694 - DNA, 25 bp, Homo sapien
tcctggcgacaggaattgccagcag

SEQ ID NO: 4742695 - DNA, 25 bp, Homo sapien
gaagcatatctgcaatagcacggcg

SEQ ID NO: 4742696 - DNA, 25 bp, Homo sapien
cagtcagatgctttcgaaatattca

SEQ ID NO: 4742697 - DNA, 25 bp, Homo sapien
gaagtggccactgaatgtagcaact

SEQ ID NO: 4742698 - DNA, 25 bp, Homo sapien
gtagcaactaagaagaggccactag

SEQ ID NO: 4742699 - DNA, 25 bp, Homo sapien
caaagagaggcttgttaacacagtc

SEQ ID NO: 4742700 - DNA, 25 bp, Homo sapien
gtcttaagcaatgatgtcacattgg

SEQ ID NO: 4742701 - DNA, 25 bp, Homo sapien
ccacggcttttactgtcttaagcaa

SEQ ID NO: 4742702 - DNA, 25 bp, Homo sapien
agctcctgccgtatgtgttctgtgg

SEQ ID NO: 4742703 - DNA, 25 bp, Homo sapien
ttggtggcctcatcttccacggctt

SEQ ID NO: 4742704 - DNA, 25 bp, Homo sapien
ctttcactgcgttgattagtaccac

SEQ ID NO: 4742705 - DNA, 25 bp, Homo sapien
cagccttcgttgcactgatgaggtc

SEQ ID NO: 4742706 - DNA, 25 bp, Homo sapien
tttggctacatctttcactgcgttg

SEQ ID NO: 4742707 - DNA, 25 bp, Homo sapien
cagctgcagccttcgttgcactgat

SEQ ID NO: 4742708 - DNA, 25 bp, Homo sapien
gtgatggtcgccacggaggactggg

SEQ ID NO: 4742709 - DNA, 25 bp, Homo sapien
cagcaccttcgcagtcttcaggatg

SEQ ID NO: 4742710 - DNA, 25 bp, Homo sapien
agcttgaccacatcagcgaggcggg

SEQ ID NO: 4742711 - DNA, 25 bp, Homo sapien
agctgcgttttgcaccaggaccttg

SEQ ID NO: 4742712 - DNA, 25 bp, Homo sapien
tgtcgaggtcagcaatgataccaga

SEQ ID NO: 4742713 - DNA, 25 bp, Homo sapien
tgataccagacacagcgctggctgc

SEQ ID NO: 4742714 - DNA, 25 bp, Homo sapien
tgggtgccacgattcccagcctgga

SEQ ID NO: 4742715 - DNA, 25 bp, Homo sapien
agcgaaagtttcagtaccctcacga

SEQ ID NO: 4742716 - DNA, 25 bp, Homo sapien
tcacatggtgactgtggaaggtgcc

SEQ ID NO: 4742717 - DNA, 25 bp, Homo sapien
cacatggtgactgtggaaggtgcca

SEQ ID NO: 4742718 - DNA, 25 bp, Homo sapien
gtcacatggtgactgtggaaggtgc

SEQ ID NO: 4742719 - DNA, 25 bp, Homo sapien
catctgcagggatgagcaccgtcac

SEQ ID NO: 4742720 - DNA, 25 bp, Homo sapien
agactctccgggcacactctatgag

SEQ ID NO: 4742721 - DNA, 25 bp, Homo sapien
cacactctatgagctccttcttggt

SEQ ID NO: 4742722 - DNA, 25 bp, Homo sapien
tgaccagagcggcacagccatggcc

SEQ ID NO: 4742723 - DNA, 25 bp, Homo sapien
cttggtgaccagagcggcacagcca

SEQ ID NO: 4742724 - DNA, 25 bp, Homo sapien
cctgtacccggtgtttgatatggga

SEQ ID NO: 4742725 - DNA, 25 bp, Homo sapien
ctcctgtacccggtgtttgatatgg

SEQ ID NO: 4742726 - DNA, 25 bp, Homo sapien
cccggtgtttgatatgggaacctat

SEQ ID NO: 4742727 - DNA, 25 bp, Homo sapien
tgtacccggtgtttgatatgggaac

SEQ ID NO: 4742728 - DNA, 25 bp, Homo sapien
ggccagacggccatagtcactggtc

SEQ ID NO: 4742729 - DNA, 25 bp, Homo sapien
gtcactggtcagctggttagcaaga

SEQ ID NO: 4742730 - DNA, 25 bp, Homo sapien
ggcctccgaggccagacggccatag

SEQ ID NO: 4742731 - DNA, 25 bp, Homo sapien
gtcagctggttagcaagagggccca

SEQ ID NO: 4742732 - DNA, 25 bp, Homo sapien
atccacgaaggaaccttctggttca

SEQ ID NO: 4742733 - DNA, 25 bp, Homo sapien
tagttgtttggtaatccacgaagga

SEQ ID NO: 4742734 - DNA, 25 bp, Homo sapien
ttggctgtccgcaccatagttgttt

SEQ ID NO: 4742735 - DNA, 25 bp, Homo sapien
atggccttggctgtccgcaccatag

SEQ ID NO: 4742736 - DNA, 25 bp, Homo sapien
acggcctcggtcatcatctgcacag

SEQ ID NO: 4742737 - DNA, 25 bp, Homo sapien
aggtcctctacggcctcggtcatca

SEQ ID NO: 4742738 - DNA, 25 bp, Homo sapien
ggctgcctcgttgagggttgttgtc

SEQ ID NO: 4742739 - DNA, 25 bp, Homo sapien
tgggtgatggagtccaccatgccac

SEQ ID NO: 4742740 - DNA, 25 bp, Homo sapien
agtgccatctgctgcgggtggctca

SEQ ID NO: 4742741 - DNA, 25 bp, Homo sapien
caaagtactgcgccatctgggacac

SEQ ID NO: 4742742 - DNA, 25 bp, Homo sapien
cagggtgagcggctcaaagtactgc

SEQ ID NO: 4742743 - DNA, 25 bp, Homo sapien
gttttagtctggtccaggagtgcca

SEQ ID NO: 4742744 - DNA, 25 bp, Homo sapien
cagcattggccagcggctcaatgag

SEQ ID NO: 4742745 - DNA, 25 bp, Homo sapien
cagcggctcaatgagatgggagatc

SEQ ID NO: 4742746 - DNA, 25 bp, Homo sapien
gatctcttggactgcagtgagcatc

SEQ ID NO: 4742747 - DNA, 25 bp, Homo sapien
cttcagcccgggcagcattggccag

SEQ ID NO: 4742748 - DNA, 25 bp, Homo sapien
cctcacggggagcaagctgctggct

SEQ ID NO: 4742749 - DNA, 25 bp, Homo sapien
taggtcccgtagacaactgttcaga

SEQ ID NO: 4742750 - DNA, 25 bp, Homo sapien
tggctgactgcagcgagggaagcct

SEQ ID NO: 4742751 - DNA, 25 bp, Homo sapien
tcagagctgcaatggccgtttcaca

SEQ ID NO: 4742752 - DNA, 25 bp, Homo sapien
ttgtaattagcttcttgatggagtc

SEQ ID NO: 4742753 - DNA, 25 bp, Homo sapien
tctaacattgtcttggcagagatca

SEQ ID NO: 4742754 - DNA, 25 bp, Homo sapien
agagatcacaatgggctccatggca

SEQ ID NO: 4742755 - DNA, 25 bp, Homo sapien
agtctgagacagtacgggagtggcc

SEQ ID NO: 4742756 - DNA, 25 bp, Homo sapien
gacgcaaaggcactcagattgtcca

SEQ ID NO: 4742757 - DNA, 25 bp, Homo sapien
agaactcagggttggacgcaaaggc

SEQ ID NO: 4742758 - DNA, 25 bp, Homo sapien
tcggcactgggcacggttctcctct

SEQ ID NO: 4742759 - DNA, 25 bp, Homo sapien
actgggcacggttctcctctgtgaa

SEQ ID NO: 4742760 - DNA, 25 bp, Homo sapien
cttgatggtcttgacaagattagct

SEQ ID NO: 4742761 - DNA, 25 bp, Homo sapien
gtcttgacaagattagctgtgctgt

SEQ ID NO: 4742762 - DNA, 25 bp, Homo sapien
gacaagattagctgtgctgttggcc

SEQ ID NO: 4742763 - DNA, 25 bp, Homo sapien
tggtcttgacaagattagctgtgct

SEQ ID NO: 4742764 - DNA, 25 bp, Homo sapien
taggattggtggtacgggcagaagc

SEQ ID NO: 4742765 - DNA, 25 bp, Homo sapien
cagtgcagaggtgtgtttagccaca

SEQ ID NO: 4742766 - DNA, 25 bp, Homo sapien
agccaggcgacagctgttacacagt

SEQ ID NO: 4742767 - DNA, 25 bp, Homo sapien
caaactggcgcttggcagtaggatt

SEQ ID NO: 4742768 - DNA, 25 bp, Homo sapien
gctattggggtcagagacaccaacc

SEQ ID NO: 4742769 - DNA, 25 bp, Homo sapien
tctggcaggccatctgaattgcctg

SEQ ID NO: 4742770 - DNA, 25 bp, Homo sapien
tttgcacgggcaaactgtgtgggct

SEQ ID NO: 4742771 - DNA, 25 bp, Homo sapien
gaattgcctggtttgcacgggcaaa

SEQ ID NO: 4742772 - DNA, 25 bp, Homo sapien
gctgcctcggtgaagccacaaagtg

SEQ ID NO: 4742773 - DNA, 25 bp, Homo sapien
tctggcaggtttccgttcttggcat

SEQ ID NO: 4742774 - DNA, 25 bp, Homo sapien
aactctggcaggtttccgttcttgg

SEQ ID NO: 4742775 - DNA, 25 bp, Homo sapien
cattttgggagatgccagtcatggc

SEQ ID NO: 4742776 - DNA, 25 bp, Homo sapien
caggcaaccaaagtaggacatgtca

SEQ ID NO: 4742777 - DNA, 25 bp, Homo sapien
cattgatgggctggactgggttctc

SEQ ID NO: 4742778 - DNA, 25 bp, Homo sapien
gttctccattacactgtccaggcaa

SEQ ID NO: 4742779 - DNA, 25 bp, Homo sapien
ggacatgtcattgatgggctggact

SEQ ID NO: 4742780 - DNA, 25 bp, Homo sapien
agggggagggcaaagtgagatccaa

SEQ ID NO: 4742781 - DNA, 25 bp, Homo sapien
gtagggggagggcaaagtgagatcc

SEQ ID NO: 4742782 - DNA, 25 bp, Homo sapien
ggagggcaaagtgagatccaagaca

SEQ ID NO: 4742783 - DNA, 25 bp, Homo sapien
ctgtgtagggggagggcaaagtgag

SEQ ID NO: 4742784 - DNA, 25 bp, Homo sapien
tcaggcccaaaaccagaacacttcc

SEQ ID NO: 4742785 - DNA, 25 bp, Homo sapien
ctccctcaggcccaaaaccagaaca

SEQ ID NO: 4742786 - DNA, 25 bp, Homo sapien
gaacacttccctcaacctcaatgcc

SEQ ID NO: 4742787 - DNA, 25 bp, Homo sapien
tgccatcagcctgccatgtgtctac

SEQ ID NO: 4742788 - DNA, 25 bp, Homo sapien
cgcagggcgttatcacactccttct

SEQ ID NO: 4742789 - DNA, 25 bp, Homo sapien
ctgattgatgctgtcagttactgcc

SEQ ID NO: 4742790 - DNA, 25 bp, Homo sapien
agggcgttatcacactccttctggc

SEQ ID NO: 4742791 - DNA, 25 bp, Homo sapien
ctccaattcccgcagggcgttatca

SEQ ID NO: 4742792 - DNA, 25 bp, Homo sapien
gagatgcccttcaagttggacacaa

SEQ ID NO: 4742793 - DNA, 25 bp, Homo sapien
ctgactcttgaggttaggggcagca

SEQ ID NO: 4742794 - DNA, 25 bp, Homo sapien
acaacttgggctcggtcctcctggc

SEQ ID NO: 4742795 - DNA, 25 bp, Homo sapien
cagccagaagaagtttgcttgaaga

SEQ ID NO: 4742796 - DNA, 25 bp, Homo sapien
tgctgaagtcctgtccaaatcggcc

SEQ ID NO: 4742797 - DNA, 25 bp, Homo sapien
cttgaaatgtcccagtgctaggagg

SEQ ID NO: 4742798 - DNA, 25 bp, Homo sapien
gcagcttcattcaaccggctctgag

SEQ ID NO: 4742799 - DNA, 25 bp, Homo sapien
ccgagaggcctgcaccagttctgtg

SEQ ID NO: 4742800 - DNA, 25 bp, Homo sapien
ccctcagggcattatccacatcgcg

SEQ ID NO: 4742801 - DNA, 25 bp, Homo sapien
agggcattatccacatcgcgctggc

SEQ ID NO: 4742802 - DNA, 25 bp, Homo sapien
cgagtcactcaggagtcgcttgctg

SEQ ID NO: 4742803 - DNA, 25 bp, Homo sapien
ctcagggcattatccacatcgcgct

SEQ ID NO: 4742804 - DNA, 25 bp, Homo sapien
cagcacatcactggccgtatcaagt

SEQ ID NO: 4742805 - DNA, 25 bp, Homo sapien
gatctgacgtcagtgcagcgactcc

SEQ ID NO: 4742806 - DNA, 25 bp, Homo sapien
aagtacaatggcctgcactgcagga

SEQ ID NO: 4742807 - DNA, 25 bp, Homo sapien
cactgcaggatctgacgtcagtgca

SEQ ID NO: 4742808 - DNA, 25 bp, Homo sapien
ctgcataattctcattgccctgggc

SEQ ID NO: 4742809 - DNA, 25 bp, Homo sapien
ccctgggcaacctctcccagtagct

SEQ ID NO: 4742810 - DNA, 25 bp, Homo sapien
ctcacggctttggtgctgttgccca

SEQ ID NO: 4742811 - DNA, 25 bp, Homo sapien
gctcacggctttggtgctgttgccc

SEQ ID NO: 4742812 - DNA, 25 bp, Homo sapien
ttgccatctcgagctgctgccttca

SEQ ID NO: 4742813 - DNA, 25 bp, Homo sapien
tgtaccacactcagtgcagaatcca

SEQ ID NO: 4742814 - DNA, 25 bp, Homo sapien
ccaggtaagggtttaagcttgccat

SEQ ID NO: 4742815 - DNA, 25 bp, Homo sapien
tctccaaaggtccacatgcttcctg

SEQ ID NO: 4742816 - DNA, 25 bp, Homo sapien
gcctggtcctgaatcgttggcactg

SEQ ID NO: 4742817 - DNA, 25 bp, Homo sapien
tgaagcctggtcctgaatcgttggc

SEQ ID NO: 4742818 - DNA, 25 bp, Homo sapien
ctggtcctgaatcgttggcactgag

SEQ ID NO: 4742819 - DNA, 25 bp, Homo sapien
tgggcagccgtccggagttcagcca

SEQ ID NO: 4742820 - DNA, 25 bp, Homo sapien
aagctgagcgctggggctgtcaggc

SEQ ID NO: 4742821 - DNA, 25 bp, Homo sapien
tgggcttggcttcctcggacgccct

SEQ ID NO: 4742822 - DNA, 25 bp, Homo sapien
cagcagtggaatctgctctgccact

SEQ ID NO: 4742823 - DNA, 25 bp, Homo sapien
tggctggcagcaatgagggcaagct

SEQ ID NO: 4742824 - DNA, 25 bp, Homo sapien
gccttgggggtagaggctgcgtgct

SEQ ID NO: 4742825 - DNA, 25 bp, Homo sapien
ggccttgggggtagaggctgcgtgc

SEQ ID NO: 4742826 - DNA, 25 bp, Homo sapien
tgctgagctgcagcgatggtctgtg

SEQ ID NO: 4742827 - DNA, 25 bp, Homo sapien
ctgagctgcagcgatggtctgtgtg

SEQ ID NO: 4742828 - DNA, 25 bp, Homo sapien
tggcattctgcgcagctgcattggt

SEQ ID NO: 4742829 - DNA, 25 bp, Homo sapien
attctgcgcagctgcattggtggcc

SEQ ID NO: 4742830 - DNA, 25 bp, Homo sapien
attggtggccatgcgcagcccctca

SEQ ID NO: 4742831 - DNA, 25 bp, Homo sapien
gatggcattctgcgcagctgcattg

SEQ ID NO: 4742832 - DNA, 25 bp, Homo sapien
gcacttaagagcttgcgggagttct

SEQ ID NO: 4742833 - DNA, 25 bp, Homo sapien
cttgatggcattgaccaggtcagat

SEQ ID NO: 4742834 - DNA, 25 bp, Homo sapien
ttggcagcctctaccatcttggctg

SEQ ID NO: 4742835 - DNA, 25 bp, Homo sapien
gggagttctccagatcactttcccc

SEQ ID NO: 4742836 - DNA, 25 bp, Homo sapien
cacggctttggctaccagtcgtcca

SEQ ID NO: 4742837 - DNA, 25 bp, Homo sapien
gcagcagctcatttagggcctgggt

SEQ ID NO: 4742838 - DNA, 25 bp, Homo sapien
gtgagctgattgtaggtgccaccac

SEQ ID NO: 4742839 - DNA, 25 bp, Homo sapien
gtcagtagcctggtcataacggcca

SEQ ID NO: 4742840 - DNA, 25 bp, Homo sapien
tagtacaggccactagttgggaagt

SEQ ID NO: 4742841 - DNA, 25 bp, Homo sapien
tgttgctgcagcaataacttgggtc

SEQ ID NO: 4742842 - DNA, 25 bp, Homo sapien
tgggtctgaagtcccgagtcctctg

SEQ ID NO: 4742843 - DNA, 25 bp, Homo sapien
aagtggatagggcacactgtgttgc

SEQ ID NO: 4742844 - DNA, 25 bp, Homo sapien
ccacgttcccagctgcttgcagcag

SEQ ID NO: 4742845 - DNA, 25 bp, Homo sapien
gaagtgggggtcagtatcactttcc

SEQ ID NO: 4742846 - DNA, 25 bp, Homo sapien
aatttgttgcaacagctccccactg

SEQ ID NO: 4742847 - DNA, 25 bp, Homo sapien
tgggggtcagtatcactttccccaa

SEQ ID NO: 4742848 - DNA, 25 bp, Homo sapien
ctgtggagagtgaacaccagtcaga

SEQ ID NO: 4742849 - DNA, 25 bp, Homo sapien
gtggagagtgaacaccagtcagaag

SEQ ID NO: 4742850 - DNA, 25 bp, Homo sapien
tgtggagagtgaacaccagtcagaa

SEQ ID NO: 4742851 - DNA, 25 bp, Homo sapien
cactgcggtatagtctgtctcagca

SEQ ID NO: 4742852 - DNA, 25 bp, Homo sapien
tttgctgcctgcaacaggggccgac

SEQ ID NO: 4742853 - DNA, 25 bp, Homo sapien
ttgggcactgcgcagcagttctgac

SEQ ID NO: 4742854 - DNA, 25 bp, Homo sapien
agttctgacactgctcccgcaaggc

SEQ ID NO: 4742855 - DNA, 25 bp, Homo sapien
ttcatccatcttgtttttacgccag

SEQ ID NO: 4742856 - DNA, 25 bp, Homo sapien
tgtttttacgccaggccttagaggc

SEQ ID NO: 4742857 - DNA, 25 bp, Homo sapien
tgtgatggcatctacctgagagtgg

SEQ ID NO: 4742858 - DNA, 25 bp, Homo sapien
aggttcaccacagacgcagtaccag

SEQ ID NO: 4742859 - DNA, 25 bp, Homo sapien
agaggcggcagagtgtcaaagtcat

SEQ ID NO: 4742860 - DNA, 25 bp, Homo sapien
caagaggcggcagagtgtcaaagtc

SEQ ID NO: 4742861 - DNA, 25 bp, Homo sapien
aagaggcggcagagtgtcaaagtca

SEQ ID NO: 4742862 - DNA, 25 bp, Homo sapien
tttccccacccggttgtattgctgc

SEQ ID NO: 4742863 - DNA, 25 bp, Homo sapien
ccgctggtaatctgctgctgggcag

SEQ ID NO: 4742864 - DNA, 25 bp, Homo sapien
atctggccgctggtaatctgctgct

SEQ ID NO: 4742865 - DNA, 25 bp, Homo sapien
tcctcggtgcatctggccgctggta

SEQ ID NO: 4742866 - DNA, 25 bp, Homo sapien
gaaatgggatcagcccaactccctt

SEQ ID NO: 4742867 - DNA, 25 bp, Homo sapien
tgggatcagcccaactcccttcgta

SEQ ID NO: 4742868 - DNA, 25 bp, Homo sapien
tgggaaatgggatcagcccaactcc

SEQ ID NO: 4742869 - DNA, 25 bp, Homo sapien
cctgggaaatgggatcagcccaact

SEQ ID NO: 4742870 - DNA, 25 bp, Homo sapien
ctgagtcctccagcatagtagactc

SEQ ID NO: 4742871 - DNA, 25 bp, Homo sapien
atagtagactcctcatctccttcca

SEQ ID NO: 4742872 - DNA, 25 bp, Homo sapien
cttccagcccaaagtgatccttgct

SEQ ID NO: 4742873 - DNA, 25 bp, Homo sapien
cagcccaaagtgatccttgcttttt

SEQ ID NO: 4742874 - DNA, 25 bp, Homo sapien
gcccatttctaaaggactggcttgt

SEQ ID NO: 4742875 - DNA, 25 bp, Homo sapien
cgataaggagaaggctagggcaggc

SEQ ID NO: 4742876 - DNA, 25 bp, Homo sapien
gagagggcaagaggcgataaggaga

SEQ ID NO: 4742877 - DNA, 25 bp, Homo sapien
ctgagtgcccatttctaaaggactg

SEQ ID NO: 4742878 - DNA, 25 bp, Homo sapien
tgtagccggcaatgagctgtgcaat

SEQ ID NO: 4742879 - DNA, 25 bp, Homo sapien
caatctgctccccttcagttgtctg

SEQ ID NO: 4742880 - DNA, 25 bp, Homo sapien
cagttgtctgtactgagtaatagcc

SEQ ID NO: 4742881 - DNA, 25 bp, Homo sapien
tcttcaggatgatatcgatgtagcc

SEQ ID NO: 4742882 - DNA, 25 bp, Homo sapien
gaaagctcaaatctatccaggatgg

SEQ ID NO: 4742883 - DNA, 25 bp, Homo sapien
ctgatgagatgccttcccgtggcaa

SEQ ID NO: 4742884 - DNA, 25 bp, Homo sapien
gaggagtggcctctacactacacag

SEQ ID NO: 4742885 - DNA, 25 bp, Homo sapien
tggaagatgcccacctttcttgaac

SEQ ID NO: 4742886 - DNA, 25 bp, Homo sapien
ttcttgttatagtccccagacttac

SEQ ID NO: 4742887 - DNA, 25 bp, Homo sapien
taatactcagtatacttaccccaag

SEQ ID NO: 4742888 - DNA, 25 bp, Homo sapien
aagcactttcttgttatagtcccca

SEQ ID NO: 4742889 - DNA, 25 bp, Homo sapien
tcagtatacttaccccaagagaggg

SEQ ID NO: 4742890 - DNA, 25 bp, Homo sapien
acacactccttggtgatgcccagaa

SEQ ID NO: 4742891 - DNA, 25 bp, Homo sapien
ggtgaagcttttgggagacgcagcc

SEQ ID NO: 4742892 - DNA, 25 bp, Homo sapien
tgttggtgaggttccactcctggat

SEQ ID NO: 4742893 - DNA, 25 bp, Homo sapien
cagcccagcgtttgatgttggtgag

SEQ ID NO: 4742894 - DNA, 25 bp, Homo sapien
gcagaggttggtgttggtgttacag

SEQ ID NO: 4742895 - DNA, 25 bp, Homo sapien
tcagaggtcaaatgagaggtgaatg

SEQ ID NO: 4742896 - DNA, 25 bp, Homo sapien
tagggctgatgacaggcaggttttc

SEQ ID NO: 4742897 - DNA, 25 bp, Homo sapien
gaatgatcagatcagcttgcagcca

SEQ ID NO: 4742898 - DNA, 25 bp, Homo sapien
aagaaggagacaccgtaagtcttga

SEQ ID NO: 4742899 - DNA, 25 bp, Homo sapien
taagtcttgagagaacgggctagct

SEQ ID NO: 4742900 - DNA, 25 bp, Homo sapien
ggaccttggcctcaatctcactcat

SEQ ID NO: 4742901 - DNA, 25 bp, Homo sapien
tagcttcacgtagcggaccttggcc

SEQ ID NO: 4742902 - DNA, 25 bp, Homo sapien
ttcatatcacagctaaggaattaag

SEQ ID NO: 4742903 - DNA, 25 bp, Homo sapien
tttcatatcacagctaaggaattaa

SEQ ID NO: 4742904 - DNA, 25 bp, Homo sapien
ttctgcttcacatactccttgggca

SEQ ID NO: 4742905 - DNA, 25 bp, Homo sapien
gaagatcttacgctctcccttctgc

SEQ ID NO: 4742906 - DNA, 25 bp, Homo sapien
ctggaagatcttacgctctcccttc

SEQ ID NO: 4742907 - DNA, 25 bp, Homo sapien
ccttctgcttcacatactccttggg

SEQ ID NO: 4742908 - DNA, 25 bp, Homo sapien
cctggtacctcggaagaagaaatag

SEQ ID NO: 4742909 - DNA, 25 bp, Homo sapien
gatgatggcaactaaaagggtagct

SEQ ID NO: 4742910 - DNA, 25 bp, Homo sapien
gatgaggcttgtgagacttttaacc

SEQ ID NO: 4742911 - DNA, 25 bp, Homo sapien
gctgagaaagccacgccaaactctg

SEQ ID NO: 4742912 - DNA, 25 bp, Homo sapien
caaactggatctggcattggaagcc

SEQ ID NO: 4742913 - DNA, 25 bp, Homo sapien
gcccaaactggatctggcattggaa

SEQ ID NO: 4742914 - DNA, 25 bp, Homo sapien
gccttgtgcttctgctcattgtggg

SEQ ID NO: 4742915 - DNA, 25 bp, Homo sapien
caggccttgtcaaaggagacagggt

SEQ ID NO: 4742916 - DNA, 25 bp, Homo sapien
acagggtcccgggaatccacattct

SEQ ID NO: 4742917 - DNA, 25 bp, Homo sapien
tccacattctggtctgagtaaaaga

SEQ ID NO: 4742918 - DNA, 25 bp, Homo sapien
tgctccctcagtgtccgaccatggt

SEQ ID NO: 4742919 - DNA, 25 bp, Homo sapien
caggaggttcagctgtacagggtcc

SEQ ID NO: 4742920 - DNA, 25 bp, Homo sapien
actcatcatctgtgtgcaatttctg

SEQ ID NO: 4742921 - DNA, 25 bp, Homo sapien
tcatcatctgtgtgcaatttctgct

SEQ ID NO: 4742922 - DNA, 25 bp, Homo sapien
tcatctgtgtgcaatttctgcttta

SEQ ID NO: 4742923 - DNA, 25 bp, Homo sapien
atctgtgtgcaatttctgctttagt

SEQ ID NO: 4742924 - DNA, 25 bp, Homo sapien
gctctcgaaccaatgaatattcatc

SEQ ID NO: 4742925 - DNA, 25 bp, Homo sapien
cttccatcagctctcgaaccaatga

SEQ ID NO: 4742926 - DNA, 25 bp, Homo sapien
catctcgcagcaatgtcttgtcctt

SEQ ID NO: 4742927 - DNA, 25 bp, Homo sapien
ttcatctcgcagcaatgtcttgtcc

SEQ ID NO: 4742928 - DNA, 25 bp, Homo sapien
tctggcccaggctttcaactgtact

SEQ ID NO: 4742929 - DNA, 25 bp, Homo sapien
cccaggctttcaactgtactagggc

SEQ ID NO: 4742930 - DNA, 25 bp, Homo sapien
ggcccaggctttcaactgtactagg

SEQ ID NO: 4742931 - DNA, 25 bp, Homo sapien
caggctttcaactgtactagggccc

SEQ ID NO: 4742932 - DNA, 25 bp, Homo sapien
ggcacagatggtcatgagcatgtca

SEQ ID NO: 4742933 - DNA, 25 bp, Homo sapien
tagagtcatccaccatgatcgtctt

SEQ ID NO: 4742934 - DNA, 25 bp, Homo sapien
gcatgtcagtgacagtcttagagtc

SEQ ID NO: 4742935 - DNA, 25 bp, Homo sapien
caccatgatcgtcttcacagttcca

SEQ ID NO: 4742936 - DNA, 25 bp, Homo sapien
gctaagagacaacagatgtgggtgc

SEQ ID NO: 4742937 - DNA, 25 bp, Homo sapien
gactgtctgttaataggaagaaagc

SEQ ID NO: 4742938 - DNA, 25 bp, Homo sapien
aaagcagggaattatgactgtctgt

SEQ ID NO: 4742939 - DNA, 25 bp, Homo sapien
tatggtggttcgttcaaaagcaggg

SEQ ID NO: 4742940 - DNA, 25 bp, Homo sapien
tagtagtccaaagctttcccagcct

SEQ ID NO: 4742941 - DNA, 25 bp, Homo sapien
gcatgtagtagtccaaagctttccc

SEQ ID NO: 4742942 - DNA, 25 bp, Homo sapien
catttcggagcatgtagtagtccaa

SEQ ID NO: 4742943 - DNA, 25 bp, Homo sapien
gggtcatcatctgacagaaagagcc

SEQ ID NO: 4742944 - DNA, 25 bp, Homo sapien
aggcttatgaagaccccaatgtggc

SEQ ID NO: 4742945 - DNA, 25 bp, Homo sapien
agaggatggatcactttaggcttat

SEQ ID NO: 4742946 - DNA, 25 bp, Homo sapien
ttaggcttatgaagaccccaatgtg

SEQ ID NO: 4742947 - DNA, 25 bp, Homo sapien
gatggatcactttaggcttatgaag

SEQ ID NO: 4742948 - DNA, 25 bp, Homo sapien
tggtagacggctcaaactgcatcgt

SEQ ID NO: 4742949 - DNA, 25 bp, Homo sapien
attcccaatgctgatcttcagtgaa

SEQ ID NO: 4742950 - DNA, 25 bp, Homo sapien
ggcaggcgtcgtacaccatggtaga

SEQ ID NO: 4742951 - DNA, 25 bp, Homo sapien
ctctgggatccgctcacgaatgatg

SEQ ID NO: 4742952 - DNA, 25 bp, Homo sapien
cccatggcatcagggcattagaata

SEQ ID NO: 4742953 - DNA, 25 bp, Homo sapien
gacccatggcatcagggcattagaa

SEQ ID NO: 4742954 - DNA, 25 bp, Homo sapien
ctgacccatggcatcagggcattag

SEQ ID NO: 4742955 - DNA, 25 bp, Homo sapien
ccatggcatcagggcattagaatac

SEQ ID NO: 4742956 - DNA, 25 bp, Homo sapien
tgaagatgttataattccctaaggc

SEQ ID NO: 4742957 - DNA, 25 bp, Homo sapien
gatgttataattccctaaggctctt

SEQ ID NO: 4742958 - DNA, 25 bp, Homo sapien
tcttccctgtccgggattttcagag

SEQ ID NO: 4742959 - DNA, 25 bp, Homo sapien
ttataattccctaaggctcttgaag

SEQ ID NO: 4742960 - DNA, 25 bp, Homo sapien
tcaggctgctggagactcatttaga

SEQ ID NO: 4742961 - DNA, 25 bp, Homo sapien
gactcatttagagctggactgggca

SEQ ID NO: 4742962 - DNA, 25 bp, Homo sapien
gagactgacatatccggcctcaggc

SEQ ID NO: 4742963 - DNA, 25 bp, Homo sapien
ctgtgggtgagactgacatatccgg

SEQ ID NO: 4742964 - DNA, 25 bp, Homo sapien
tctgccatttattgactatgtcact

SEQ ID NO: 4742965 - DNA, 25 bp, Homo sapien
taaatcgtggaggagcattcaggga

SEQ ID NO: 4742966 - DNA, 25 bp, Homo sapien
gttgtgaagccaggatccgaaccca

SEQ ID NO: 4742967 - DNA, 25 bp, Homo sapien
ccttacagtaggtgtcattatttcc

SEQ ID NO: 4742968 - DNA, 25 bp, Homo sapien
ttgggttagtgactgcatcaggctg

SEQ ID NO: 4742969 - DNA, 25 bp, Homo sapien
ggcagcttgagtttaggcgacgaat

SEQ ID NO: 4742970 - DNA, 25 bp, Homo sapien
taatgaagccggagttggaatggca

SEQ ID NO: 4742971 - DNA, 25 bp, Homo sapien
taaggtagacaggttagagtcccac

SEQ ID NO: 4742972 - DNA, 25 bp, Homo sapien
ccaacttgtgactaggccttgtaca

SEQ ID NO: 4742973 - DNA, 25 bp, Homo sapien
cagtgattccttggttagcttcccc

SEQ ID NO: 4742974 - DNA, 25 bp, Homo sapien
tatctctctgggtaaaaagaagccc

SEQ ID NO: 4742975 - DNA, 25 bp, Homo sapien
tagggtattcagcagatgaccaggt

SEQ ID NO: 4742976 - DNA, 25 bp, Homo sapien
ccaagcctcttctcagttggaggga

SEQ ID NO: 4742977 - DNA, 25 bp, Homo sapien
tacatttgcatagcccctgggacgt

SEQ ID NO: 4742978 - DNA, 25 bp, Homo sapien
tgggacgtggcgctgcacccaagcc

SEQ ID NO: 4742979 - DNA, 25 bp, Homo sapien
tctggccccgttctcgatgctcggg

SEQ ID NO: 4742980 - DNA, 25 bp, Homo sapien
tatttggccccagagatactaggta

SEQ ID NO: 4742981 - DNA, 25 bp, Homo sapien
taaaagatctgctcaagagagccgc

SEQ ID NO: 4742982 - DNA, 25 bp, Homo sapien
tgattccaagaagctcccagtagtg

SEQ ID NO: 4742983 - DNA, 25 bp, Homo sapien
caaattctgaaacgtgtgcggagga

SEQ ID NO: 4742984 - DNA, 25 bp, Homo sapien
gaagaagtcgtttgcaaaaatagaa

SEQ ID NO: 4742985 - DNA, 25 bp, Homo sapien
ccaggggatgctcactattggcccc

SEQ ID NO: 4742986 - DNA, 25 bp, Homo sapien
gttttaatgaggaacttcaggcatt

SEQ ID NO: 4742987 - DNA, 25 bp, Homo sapien
ggatgctcactattggcccctctct

SEQ ID NO: 4742988 - DNA, 25 bp, Homo sapien
tttatttgtacccatgtgtctgtca

SEQ ID NO: 4742989 - DNA, 25 bp, Homo sapien
tgtctgtcacaccatgaatgtacct

SEQ ID NO: 4742990 - DNA, 25 bp, Homo sapien
cacaccatgaatgtacctggggaaa

SEQ ID NO: 4742991 - DNA, 25 bp, Homo sapien
ctgtcacaccatgaatgtacctggg

SEQ ID NO: 4742992 - DNA, 25 bp, Homo sapien
cccatttactggcacaattgggtgg

SEQ ID NO: 4742993 - DNA, 25 bp, Homo sapien
gggtatgattgtcctgatggctcag

SEQ ID NO: 4742994 - DNA, 25 bp, Homo sapien
tgattctaatgctgcctaggtcacc

SEQ ID NO: 4742995 - DNA, 25 bp, Homo sapien
ttctaatgctgcctaggtcaccctc

SEQ ID NO: 4742996 - DNA, 25 bp, Homo sapien
actctgggctcaggtttgccatggc

SEQ ID NO: 4742997 - DNA, 25 bp, Homo sapien
caaacataggccctgtccttagtcc

SEQ ID NO: 4742998 - DNA, 25 bp, Homo sapien
gctcaggtttgccatggcttccttt

SEQ ID NO: 4742999 - DNA, 25 bp, Homo sapien
ctttggtccaaacataggccctgtc

SEQ ID NO: 4743000 - DNA, 25 bp, Homo sapien
gagcggaacactcgctgctggcagt

SEQ ID NO: 4743001 - DNA, 25 bp, Homo sapien
cgcatgtaggccagtgagcggaaca

SEQ ID NO: 4743002 - DNA, 25 bp, Homo sapien
gcccatatgctcagtggccgcatgt

SEQ ID NO: 4743003 - DNA, 25 bp, Homo sapien
cacacggtacggtagcagccttcag

SEQ ID NO: 4743004 - DNA, 25 bp, Homo sapien
taactatgacccacagacagaagcc

SEQ ID NO: 4743005 - DNA, 25 bp, Homo sapien
cacttccactggatagatggaggca

SEQ ID NO: 4743006 - DNA, 25 bp, Homo sapien
tacatactaacttggcaccctctga

SEQ ID NO: 4743007 - DNA, 25 bp, Homo sapien
gccttcaaggagctcccagcaagtg

SEQ ID NO: 4743008 - DNA, 25 bp, Homo sapien
gacaagatggcattgggttatgcct

SEQ ID NO: 4743009 - DNA, 25 bp, Homo sapien
tgggaggctttatagacggacaaga

SEQ ID NO: 4743010 - DNA, 25 bp, Homo sapien
ctttatagacggacaagatggcatt

SEQ ID NO: 4743011 - DNA, 25 bp, Homo sapien
tgggttatgccttgaagaaatttgg

SEQ ID NO: 4743012 - DNA, 25 bp, Homo sapien
tcttggatcatggtagctgccagcc

SEQ ID NO: 4743013 - DNA, 25 bp, Homo sapien
aaaggcctggacgttcagctcaaag

SEQ ID NO: 4743014 - DNA, 25 bp, Homo sapien
gatagtttggagagcacggaccaca

SEQ ID NO: 4743015 - DNA, 25 bp, Homo sapien
ctggatttatcagggacaccatggg

SEQ ID NO: 4743016 - DNA, 25 bp, Homo sapien
cagggaaaacccatttttctctctg

SEQ ID NO: 4743017 - DNA, 25 bp, Homo sapien
ttctctctggctgctcctcctcctc

SEQ ID NO: 4743018 - DNA, 25 bp, Homo sapien
tctctggctgctcctcctcctctct

SEQ ID NO: 4743019 - DNA, 25 bp, Homo sapien
gaaaacccatttttctctctggctg

SEQ ID NO: 4743020 - DNA, 25 bp, Homo sapien
tgaggccgagagctgctgtcatagt

SEQ ID NO: 4743021 - DNA, 25 bp, Homo sapien
ctgctgtcatagttgtaatagcggc

SEQ ID NO: 4743022 - DNA, 25 bp, Homo sapien
ttcaggaaccactgtccagcacact

SEQ ID NO: 4743023 - DNA, 25 bp, Homo sapien
cataacactacgagactgaggccga

SEQ ID NO: 4743024 - DNA, 25 bp, Homo sapien
aaataaggctcctggtgtcctctca

SEQ ID NO: 4743025 - DNA, 25 bp, Homo sapien
tcagctgccttaagactacttaggc

SEQ ID NO: 4743026 - DNA, 25 bp, Homo sapien
gaaaaataaggctcctggtgtcctc

SEQ ID NO: 4743027 - DNA, 25 bp, Homo sapien
tgccttaagactacttaggctcccc

SEQ ID NO: 4743028 - DNA, 25 bp, Homo sapien
ccacagcagtctctcataggcttct

SEQ ID NO: 4743029 - DNA, 25 bp, Homo sapien
ttccacagcagtctctcataggctt

SEQ ID NO: 4743030 - DNA, 25 bp, Homo sapien
tccacagcagtctctcataggcttc

SEQ ID NO: 4743031 - DNA, 25 bp, Homo sapien
cattccacagcagtctctcataggc

SEQ ID NO: 4743032 - DNA, 25 bp, Homo sapien
aagaaaacttatcctggatgtcctg

SEQ ID NO: 4743033 - DNA, 25 bp, Homo sapien
ttatcctggatgtcctgtgccccac

SEQ ID NO: 4743034 - DNA, 25 bp, Homo sapien
gaggatagaagaaaacttatcctgg

SEQ ID NO: 4743035 - DNA, 25 bp, Homo sapien
ctggatgtcctgtgccccacacaga

SEQ ID NO: 4743036 - DNA, 25 bp, Homo sapien
tcttgagccctacaatcccttgttg

SEQ ID NO: 4743037 - DNA, 25 bp, Homo sapien
catgccgtgtaatagacaatgagtc

SEQ ID NO: 4743038 - DNA, 25 bp, Homo sapien
tccagctgctcccatgccgtgtaat

SEQ ID NO: 4743039 - DNA, 25 bp, Homo sapien
tgctcccatgccgtgtaatagacaa

SEQ ID NO: 4743040 - DNA, 25 bp, Homo sapien
aatgagtccatcatggtccttgtca

SEQ ID NO: 4743041 - DNA, 25 bp, Homo sapien
gtctgcatagcctccattttcaatg

SEQ ID NO: 4743042 - DNA, 25 bp, Homo sapien
ggtctgcatagcctccattttcaat

SEQ ID NO: 4743043 - DNA, 25 bp, Homo sapien
caatgagtccatcatggtccttgtc

SEQ ID NO: 4743044 - DNA, 25 bp, Homo sapien
ccaagatgttgaagacctaggtacc

SEQ ID NO: 4743045 - DNA, 25 bp, Homo sapien
tgttgaagacctaggtaccgaggaa

SEQ ID NO: 4743046 - DNA, 25 bp, Homo sapien
acaccaaccatacccctggcacact

SEQ ID NO: 4743047 - DNA, 25 bp, Homo sapien
gatgttgaagacctaggtaccgagg

SEQ ID NO: 4743048 - DNA, 25 bp, Homo sapien
tccttcaggaagttttgatcacccg

SEQ ID NO: 4743049 - DNA, 25 bp, Homo sapien
gattaaatatgcattgacgcggagc

SEQ ID NO: 4743050 - DNA, 25 bp, Homo sapien
caatcagcagtatcatggattaaat

SEQ ID NO: 4743051 - DNA, 25 bp, Homo sapien
taatagtcccgataaacctgcagca

SEQ ID NO: 4743052 - DNA, 25 bp, Homo sapien
ctgtgggagaggaggggacttgggt

SEQ ID NO: 4743053 - DNA, 25 bp, Homo sapien
gtgggagaggaggggacttgggtca

SEQ ID NO: 4743054 - DNA, 25 bp, Homo sapien
tgtgggagaggaggggacttgggtc

SEQ ID NO: 4743055 - DNA, 25 bp, Homo sapien
atcaggtaccgtcgccgtgtcaggt

SEQ ID NO: 4743056 - DNA, 25 bp, Homo sapien
tccccaatatcatgggggatgacgt

SEQ ID NO: 4743057 - DNA, 25 bp, Homo sapien
tcatgggggatgacgttcctccttt

SEQ ID NO: 4743058 - DNA, 25 bp, Homo sapien
acaggtgccatcaccccactcatca

SEQ ID NO: 4743059 - DNA, 25 bp, Homo sapien
tgtgttgtacatgcggtactcctgg

SEQ ID NO: 4743060 - DNA, 25 bp, Homo sapien
ctgagctcaagtttgggccagagca

SEQ ID NO: 4743061 - DNA, 25 bp, Homo sapien
gagctcaagtttgggccagagcatg

SEQ ID NO: 4743062 - DNA, 25 bp, Homo sapien
ggaagcataaaagtggacatcatat

SEQ ID NO: 4743063 - DNA, 25 bp, Homo sapien
gtagcttgtcctctagatttagagg

SEQ ID NO: 4743064 - DNA, 25 bp, Homo sapien
tagcttgtcctctagatttagaggt

SEQ ID NO: 4743065 - DNA, 25 bp, Homo sapien
tgtagcttgtcctctagatttagag

SEQ ID NO: 4743066 - DNA, 25 bp, Homo sapien
gatggcctgccatatcccagcccac

SEQ ID NO: 4743067 - DNA, 25 bp, Homo sapien
ctcatcctaaccaataccctggggt

SEQ ID NO: 4743068 - DNA, 25 bp, Homo sapien
tcatcctgacttggggatggcctgc

SEQ ID NO: 4743069 - DNA, 25 bp, Homo sapien
tagtccacacccaacaccccctcat

SEQ ID NO: 4743070 - DNA, 25 bp, Homo sapien
tcaaggtagccaaatcgaccgtagt

SEQ ID NO: 4743071 - DNA, 25 bp, Homo sapien
gaacagcgcagatttgtaccaggca

SEQ ID NO: 4743072 - DNA, 25 bp, Homo sapien
gaggtgacacatgtttctgcccagc

SEQ ID NO: 4743073 - DNA, 25 bp, Homo sapien
tagggagtcctcaagaacttccagc

SEQ ID NO: 4743074 - DNA, 25 bp, Homo sapien
ggaacatgtacctcccaagatggaa

SEQ ID NO: 4743075 - DNA, 25 bp, Homo sapien
tgaatcccagtgcaagtctactgac

SEQ ID NO: 4743076 - DNA, 25 bp, Homo sapien
gtggagagtaaatcgaggagtccca

SEQ ID NO: 4743077 - DNA, 25 bp, Homo sapien
ggttcagcagagtgggatcatcaaa

SEQ ID NO: 4743078 - DNA, 25 bp, Homo sapien
tatcggcacagtgcatagtggctga

SEQ ID NO: 4743079 - DNA, 25 bp, Homo sapien
ttcccactctgcgtatcggcacagt

SEQ ID NO: 4743080 - DNA, 25 bp, Homo sapien
catcctggccaaagaaccttgtata

SEQ ID NO: 4743081 - DNA, 25 bp, Homo sapien
tgtcatccaataccgggctctgcca

SEQ ID NO: 4743082 - DNA, 25 bp, Homo sapien
tggcctcgaggtcgcaacttgctgg

SEQ ID NO: 4743083 - DNA, 25 bp, Homo sapien
gcctttagctccaaacatgatcctg

SEQ ID NO: 4743084 - DNA, 25 bp, Homo sapien
tgtagtggacttggcctttagctcc

SEQ ID NO: 4743085 - DNA, 25 bp, Homo sapien
aatgcctactcctttctgcgtaggg

SEQ ID NO: 4743086 - DNA, 25 bp, Homo sapien
cctaacatggaaacaaggcctactt

SEQ ID NO: 4743087 - DNA, 25 bp, Homo sapien
gatagggatccctaacatggaaaca

SEQ ID NO: 4743088 - DNA, 25 bp, Homo sapien
caaggcctacttattaccaggcctc

SEQ ID NO: 4743089 - DNA, 25 bp, Homo sapien
cccagggatagggatccctaacatg

SEQ ID NO: 4743090 - DNA, 25 bp, Homo sapien
tgaagtagatcctgccacacctgct

SEQ ID NO: 4743091 - DNA, 25 bp, Homo sapien
acctgctgccccgtgctgtcagggt

SEQ ID NO: 4743092 - DNA, 25 bp, Homo sapien
caaaggctgtgatgtgggttaccgt

SEQ ID NO: 4743093 - DNA, 25 bp, Homo sapien
gtccatcctgaagtagatcctgcca

SEQ ID NO: 4743094 - DNA, 25 bp, Homo sapien
cagccacagccatcgtgtaggggtt

SEQ ID NO: 4743095 - DNA, 25 bp, Homo sapien
atgatgcaggagcagcccccggaca

SEQ ID NO: 4743096 - DNA, 25 bp, Homo sapien
cacccagtccattccgcatggagaa

SEQ ID NO: 4743097 - DNA, 25 bp, Homo sapien
ccgctacgctccagacagaagggct

SEQ ID NO: 4743098 - DNA, 25 bp, Homo sapien
cacaaagactcctacaggcaggctg

SEQ ID NO: 4743099 - DNA, 25 bp, Homo sapien
tttccacatcccacacaaagactcc

SEQ ID NO: 4743100 - DNA, 25 bp, Homo sapien
ctagagcttcgtccccttcattttc

SEQ ID NO: 4743101 - DNA, 25 bp, Homo sapien
gatggacacatctagagcttcgtcc

SEQ ID NO: 4743102 - DNA, 25 bp, Homo sapien
gaagatacagatgtgggggcctcac

SEQ ID NO: 4743103 - DNA, 25 bp, Homo sapien
agtttctagcagaggcaggtcctgg

SEQ ID NO: 4743104 - DNA, 25 bp, Homo sapien
gagctaccgcgcctcgcaggccatg

SEQ ID NO: 4743105 - DNA, 25 bp, Homo sapien
aagggagggcaatggaagatacaga

SEQ ID NO: 4743106 - DNA, 25 bp, Homo sapien
ccagttccagctgcggaggacactt

SEQ ID NO: 4743107 - DNA, 25 bp, Homo sapien
agctgatagacagtccaggctcggg

SEQ ID NO: 4743108 - DNA, 25 bp, Homo sapien
gatagagggcatggtagaaagcaaa

SEQ ID NO: 4743109 - DNA, 25 bp, Homo sapien
gacttgctggtacacagtctgccct

SEQ ID NO: 4743110 - DNA, 25 bp, Homo sapien
ccacagggaccacagactaagtctt

SEQ ID NO: 4743111 - DNA, 25 bp, Homo sapien
cacagggaccacagactaagtcttc

SEQ ID NO: 4743112 - DNA, 25 bp, Homo sapien
tggccctcaggctaaagtctcaact

SEQ ID NO: 4743113 - DNA, 25 bp, Homo sapien
tcaactcttgcctggctttcaaggc

SEQ ID NO: 4743114 - DNA, 25 bp, Homo sapien
tccactacggtggtgttagcacctc

SEQ ID NO: 4743115 - DNA, 25 bp, Homo sapien
gactcatcacctgttcaagcaccta

SEQ ID NO: 4743116 - DNA, 25 bp, Homo sapien
tccttttagcactgatgtggtctca

SEQ ID NO: 4743117 - DNA, 25 bp, Homo sapien
taggagctatgagggattaatatcc

SEQ ID NO: 4743118 - DNA, 25 bp, Homo sapien
cagtctccatttcccctaagtctta

SEQ ID NO: 4743119 - DNA, 25 bp, Homo sapien
tttttccacagtatactatccaccc

SEQ ID NO: 4743120 - DNA, 25 bp, Homo sapien
tggttaagaccacaagctcttcacc

SEQ ID NO: 4743121 - DNA, 25 bp, Homo sapien
catcctcggatagcaggtcctgggc

SEQ ID NO: 4743122 - DNA, 25 bp, Homo sapien
ttattgtatacagtgggctctccat

SEQ ID NO: 4743123 - DNA, 25 bp, Homo sapien
tgtacggcacaacaagggtttatgt

SEQ ID NO: 4743124 - DNA, 25 bp, Homo sapien
gtgaccttgcgcatgttactaaacc

SEQ ID NO: 4743125 - DNA, 25 bp, Homo sapien
tgtgaccttgcgcatgttactaaac

SEQ ID NO: 4743126 - DNA, 25 bp, Homo sapien
cttgtgaccttgcgcatgttactaa

SEQ ID NO: 4743127 - DNA, 25 bp, Homo sapien
tgaccttgcgcatgttactaaacct

SEQ ID NO: 4743128 - DNA, 25 bp, Homo sapien
gcctctccagccacgggtaatagtg

SEQ ID NO: 4743129 - DNA, 25 bp, Homo sapien
ttggtcagcgatgactgtccggtgc

SEQ ID NO: 4743130 - DNA, 25 bp, Homo sapien
tgtccggtgctgatacattccaggg

SEQ ID NO: 4743131 - DNA, 25 bp, Homo sapien
gctgccaacgacagaactggcctct

SEQ ID NO: 4743132 - DNA, 25 bp, Homo sapien
ctcccccgatgccacccaagggaca

SEQ ID NO: 4743133 - DNA, 25 bp, Homo sapien
tcccccgatgccacccaagggacaa

SEQ ID NO: 4743134 - DNA, 25 bp, Homo sapien
gggtacagaattgatcatgtcgatg

SEQ ID NO: 4743135 - DNA, 25 bp, Homo sapien
cataaatctgtcttaggggtacaga

SEQ ID NO: 4743136 - DNA, 25 bp, Homo sapien
cagaattgatcatgtcgatgaaagg

SEQ ID NO: 4743137 - DNA, 25 bp, Homo sapien
atcatgtcgatgaaaggtgtcttct

SEQ ID NO: 4743138 - DNA, 25 bp, Homo sapien
ggtacagccctatatccaagaggca

SEQ ID NO: 4743139 - DNA, 25 bp, Homo sapien
gcctactgccacattatgcctactg

SEQ ID NO: 4743140 - DNA, 25 bp, Homo sapien
gatgggtcctcactaagtagcccct

SEQ ID NO: 4743141 - DNA, 25 bp, Homo sapien
caaacgattctgttttcaaggctct

SEQ ID NO: 4743142 - DNA, 25 bp, Homo sapien
aactcatgagccagacagatgcgcc

SEQ ID NO: 4743143 - DNA, 25 bp, Homo sapien
gaggcacctggtagcccatagcttt

SEQ ID NO: 4743144 - DNA, 25 bp, Homo sapien
cagagtcctccggattgcagcagtc

SEQ ID NO: 4743145 - DNA, 25 bp, Homo sapien
taccctcataggaaaccatcagctg

SEQ ID NO: 4743146 - DNA, 25 bp, Homo sapien
cctcgatggcgccaagtcccgagcc

SEQ ID NO: 4743147 - DNA, 25 bp, Homo sapien
acctcgatggcgccaagtcccgagc

SEQ ID NO: 4743148 - DNA, 25 bp, Homo sapien
gacctcgatggcgccaagtcccgag

SEQ ID NO: 4743149 - DNA, 25 bp, Homo sapien
gcgccggtcgttgttaggtatcgtc

SEQ ID NO: 4743150 - DNA, 25 bp, Homo sapien
tcattgagccgacgattagctcgcc

SEQ ID NO: 4743151 - DNA, 25 bp, Homo sapien
aagggtcgggcctcgtcgtcattga

SEQ ID NO: 4743152 - DNA, 25 bp, Homo sapien
taagtatctcgccagcctattccag

SEQ ID NO: 4743153 - DNA, 25 bp, Homo sapien
tcagaatacattggcagctgctagt

SEQ ID NO: 4743154 - DNA, 25 bp, Homo sapien
cagaatacattggcagctgctagtg

SEQ ID NO: 4743155 - DNA, 25 bp, Homo sapien
agggcagccgagggtcagatttttg

SEQ ID NO: 4743156 - DNA, 25 bp, Homo sapien
ggcaggttcctgcctcctgacgtac

SEQ ID NO: 4743157 - DNA, 25 bp, Homo sapien
cagggcagccgagggtcagattttt

SEQ ID NO: 4743158 - DNA, 25 bp, Homo sapien
ctggcaggttcctgcctcctgacgt

SEQ ID NO: 4743159 - DNA, 25 bp, Homo sapien
cccagccgggaagtcgatgggatgc

SEQ ID NO: 4743160 - DNA, 25 bp, Homo sapien
cacccagccgggaagtcgatgggat

SEQ ID NO: 4743161 - DNA, 25 bp, Homo sapien
ccagccgggaagtcgatgggatgct

SEQ ID NO: 4743162 - DNA, 25 bp, Homo sapien
agccgggaagtcgatgggatgctgg

SEQ ID NO: 4743163 - DNA, 25 bp, Homo sapien
ttctctccaggtccaccccaacctc

SEQ ID NO: 4743164 - DNA, 25 bp, Homo sapien
ataacaggagtattttctctccagg

SEQ ID NO: 4743165 - DNA, 25 bp, Homo sapien
tgttttataacaggagtattttctc

SEQ ID NO: 4743166 - DNA, 25 bp, Homo sapien
catatgtgggcctttttgttttata

SEQ ID NO: 4743167 - DNA, 25 bp, Homo sapien
agcagcccacgccaacaggatgcag

SEQ ID NO: 4743168 - DNA, 25 bp, Homo sapien
gaaacagtccttgcggagccaagac

SEQ ID NO: 4743169 - DNA, 25 bp, Homo sapien
aatatttcccctcatagtgacaggg

SEQ ID NO: 4743170 - DNA, 25 bp, Homo sapien
gagccaagactcacccagggtaaaa

SEQ ID NO: 4743171 - DNA, 25 bp, Homo sapien
taggatccccttggcctgtccagcc

SEQ ID NO: 4743172 - DNA, 25 bp, Homo sapien
cttggcctgtccagcccagagcatc

SEQ ID NO: 4743173 - DNA, 25 bp, Homo sapien
agtagcacttgctgtagactcctgg

SEQ ID NO: 4743174 - DNA, 25 bp, Homo sapien
agcttggaagtagcacttgctgtag

SEQ ID NO: 4743175 - DNA, 25 bp, Homo sapien
ttgcgttgctccttgagtcttagtt

SEQ ID NO: 4743176 - DNA, 25 bp, Homo sapien
ctctgctcagctactctggtcttga

SEQ ID NO: 4743177 - DNA, 25 bp, Homo sapien
gcctctgctcagctactctggtctt

SEQ ID NO: 4743178 - DNA, 25 bp, Homo sapien
ttgctttgcgttgctccttgagtct

SEQ ID NO: 4743179 - DNA, 25 bp, Homo sapien
agttgtaactctgtttcctgaggtg

SEQ ID NO: 4743180 - DNA, 25 bp, Homo sapien
gctggaaaagttgtaactctgtttc

SEQ ID NO: 4743181 - DNA, 25 bp, Homo sapien
tcacaggctggggatgtttataaag

SEQ ID NO: 4743182 - DNA, 25 bp, Homo sapien
gaaaagttgtaactctgtttcctga

SEQ ID NO: 4743183 - DNA, 25 bp, Homo sapien
ccctttccgtttcagaggattgcca

SEQ ID NO: 4743184 - DNA, 25 bp, Homo sapien
tagtcaggactgataccctttccgt

SEQ ID NO: 4743185 - DNA, 25 bp, Homo sapien
gatgcagaatggacctcacgttcgc

SEQ ID NO: 4743186 - DNA, 25 bp, Homo sapien
gaaatgactgtgtcagtgcacctca

SEQ ID NO: 4743187 - DNA, 25 bp, Homo sapien
gacagaagtgaaggttcatcgccta

SEQ ID NO: 4743188 - DNA, 25 bp, Homo sapien
aaaggtcttgtcagtggccagtagc

SEQ ID NO: 4743189 - DNA, 25 bp, Homo sapien
ggtggattcgaaggcctgtctagca

SEQ ID NO: 4743190 - DNA, 25 bp, Homo sapien
tcttgcaagctagagccagcccaat

SEQ ID NO: 4743191 - DNA, 25 bp, Homo sapien
tgttgggagagcagaatatcctcat

SEQ ID NO: 4743192 - DNA, 25 bp, Homo sapien
ggatctcgcataagtctctgcattg

SEQ ID NO: 4743193 - DNA, 25 bp, Homo sapien
gcattgtgacctaaactgtgtagca

SEQ ID NO: 4743194 - DNA, 25 bp, Homo sapien
tacaaatgggctgcgtccactgagg

SEQ ID NO: 4743195 - DNA, 25 bp, Homo sapien
gcatttactcctcactcattgcaat

SEQ ID NO: 4743196 - DNA, 25 bp, Homo sapien
cagagtatgtattctgcatttggct

SEQ ID NO: 4743197 - DNA, 25 bp, Homo sapien
tctttaactcagcacactgtttttg

SEQ ID NO: 4743198 - DNA, 25 bp, Homo sapien
tgcaatccacactgatctggtttct

SEQ ID NO: 4743199 - DNA, 25 bp, Homo sapien
caccgtgccggccttagtattgtca

SEQ ID NO: 4743200 - DNA, 25 bp, Homo sapien
gtgtgtagtgctgcctcattgtggt

SEQ ID NO: 4743201 - DNA, 25 bp, Homo sapien
tctcatatttggtgaaatctattca

SEQ ID NO: 4743202 - DNA, 25 bp, Homo sapien
aaaaaatctagtaggtgtgtagtgc

SEQ ID NO: 4743203 - DNA, 25 bp, Homo sapien
tattccggttttcgttgaatgtaca

SEQ ID NO: 4743204 - DNA, 25 bp, Homo sapien
tgaaggggtcataccccagttctac

SEQ ID NO: 4743205 - DNA, 25 bp, Homo sapien
catgggactctgaaggggtcatacc

SEQ ID NO: 4743206 - DNA, 25 bp, Homo sapien
tttcgttgaatgtacatgggactct

SEQ ID NO: 4743207 - DNA, 25 bp, Homo sapien
caagaactggctactctgggctcca

SEQ ID NO: 4743208 - DNA, 25 bp, Homo sapien
tgaacacatcgtggaggctggactg

SEQ ID NO: 4743209 - DNA, 25 bp, Homo sapien
agcatccactttagatggcgccggg

SEQ ID NO: 4743210 - DNA, 25 bp, Homo sapien
aaaaggtcgctttgacacctgaaca

SEQ ID NO: 4743211 - DNA, 25 bp, Homo sapien
tggatagtgggatatatacataacc

SEQ ID NO: 4743212 - DNA, 25 bp, Homo sapien
tagtgggatatatacataaccgaag

SEQ ID NO: 4743213 - DNA, 25 bp, Homo sapien
agcctttcactgtgtgttaataaaa

SEQ ID NO: 4743214 - DNA, 25 bp, Homo sapien
gatatatacataaccgaagttctca

SEQ ID NO: 4743215 - DNA, 25 bp, Homo sapien
tgcctctatcctctgggatcaagcg

SEQ ID NO: 4743216 - DNA, 25 bp, Homo sapien
ggctgcctctatcctctgggatcaa

SEQ ID NO: 4743217 - DNA, 25 bp, Homo sapien
ccaggctgcctctatcctctgggat

SEQ ID NO: 4743218 - DNA, 25 bp, Homo sapien
gcctctatcctctgggatcaagcga

SEQ ID NO: 4743219 - DNA, 25 bp, Homo sapien
ttctagttaactggccaactgggag

SEQ ID NO: 4743220 - DNA, 25 bp, Homo sapien
acttgtacttgcgtaggagtctggg

SEQ ID NO: 4743221 - DNA, 25 bp, Homo sapien
gattataggcattacaggcaagagc

SEQ ID NO: 4743222 - DNA, 25 bp, Homo sapien
gcacagctttctacagtaagttcca

SEQ ID NO: 4743223 - DNA, 25 bp, Homo sapien
gccgccgtagctccggatgggacca

SEQ ID NO: 4743224 - DNA, 25 bp, Homo sapien
gggcccgttagtccaagcaggagct

SEQ ID NO: 4743225 - DNA, 25 bp, Homo sapien
ggagctccgggagaatccttcacag

SEQ ID NO: 4743226 - DNA, 25 bp, Homo sapien
tccttcacagggagatttacccctg

SEQ ID NO: 4743227 - DNA, 25 bp, Homo sapien
tgtccttgggagtaaaaatcatctg

SEQ ID NO: 4743228 - DNA, 25 bp, Homo sapien
gccttaggtaagtcacagaatctcc

SEQ ID NO: 4743229 - DNA, 25 bp, Homo sapien
tacctaacattgtttggcatgtggc

SEQ ID NO: 4743230 - DNA, 25 bp, Homo sapien
catgtggcagactactatttaggga

SEQ ID NO: 4743231 - DNA, 25 bp, Homo sapien
tattctcttacatagctttggcaca

SEQ ID NO: 4743232 - DNA, 25 bp, Homo sapien
tgtcaggtccatttcactgggcctg

SEQ ID NO: 4743233 - DNA, 25 bp, Homo sapien
ctttggcacaattaccaaaatcaaa

SEQ ID NO: 4743234 - DNA, 25 bp, Homo sapien
tcctctctgacagtttgggctgtca

SEQ ID NO: 4743235 - DNA, 25 bp, Homo sapien
cctcttgagttaccgttttcttgct

SEQ ID NO: 4743236 - DNA, 25 bp, Homo sapien
tcctcttgagttaccgttttcttgc

SEQ ID NO: 4743237 - DNA, 25 bp, Homo sapien
ctgtcctcttgagttaccgttttct

SEQ ID NO: 4743238 - DNA, 25 bp, Homo sapien
ctctgtcctcttgagttaccgtttt

SEQ ID NO: 4743239 - DNA, 25 bp, Homo sapien
tactggtaaggctgactctcactcc

SEQ ID NO: 4743240 - DNA, 25 bp, Homo sapien
catgaccagctgaggctacgcatag

SEQ ID NO: 4743241 - DNA, 25 bp, Homo sapien
cgccatgcaccagaaattgctcgta

SEQ ID NO: 4743242 - DNA, 25 bp, Homo sapien
tcccaggccgaaatggtcaacgcca

SEQ ID NO: 4743243 - DNA, 25 bp, Homo sapien
tcgggcacggtgctatacagtatca

SEQ ID NO: 4743244 - DNA, 25 bp, Homo sapien
gacaaagggactaacatcgaagcat

SEQ ID NO: 4743245 - DNA, 25 bp, Homo sapien
aatagatatgcattgggagcttccc

SEQ ID NO: 4743246 - DNA, 25 bp, Homo sapien
agttccttagtgtcgcatcctcggg

SEQ ID NO: 4743247 - DNA, 25 bp, Homo sapien
tccaagtcagatagtcttctgctgc

SEQ ID NO: 4743248 - DNA, 25 bp, Homo sapien
ctgctgctggtacctgggtgggcaa

SEQ ID NO: 4743249 - DNA, 25 bp, Homo sapien
gctcttaggagagcggaaaggacct

SEQ ID NO: 4743250 - DNA, 25 bp, Homo sapien
tacctgggtgggcaatggccaccat

SEQ ID NO: 4743251 - DNA, 25 bp, Homo sapien
gggtatgcacacagtgactcacaga

SEQ ID NO: 4743252 - DNA, 25 bp, Homo sapien
ccgacctctctagtgcagacagaaa

SEQ ID NO: 4743253 - DNA, 25 bp, Homo sapien
ggtaattctcaggttcatagggcaa

SEQ ID NO: 4743254 - DNA, 25 bp, Homo sapien
tatatggaagttgtagccctctgca

SEQ ID NO: 4743255 - DNA, 25 bp, Homo sapien
ggatgaggatggatcccactctccc

SEQ ID NO: 4743256 - DNA, 25 bp, Homo sapien
caggatgaggatggatcccactctc

SEQ ID NO: 4743257 - DNA, 25 bp, Homo sapien
ccaggatgaggatggatcccactct

SEQ ID NO: 4743258 - DNA, 25 bp, Homo sapien
atgaggatggatcccactctcccca

SEQ ID NO: 4743259 - DNA, 25 bp, Homo sapien
ccctctgtatccagaaggtctcagg

SEQ ID NO: 4743260 - DNA, 25 bp, Homo sapien
gtatccagaaggtctcaggttgctc

SEQ ID NO: 4743261 - DNA, 25 bp, Homo sapien
tgccctctgtatccagaaggtctca

SEQ ID NO: 4743262 - DNA, 25 bp, Homo sapien
tctgtatccagaaggtctcaggttg

SEQ ID NO: 4743263 - DNA, 25 bp, Homo sapien
acctctgggcttggtacttggccac

SEQ ID NO: 4743264 - DNA, 25 bp, Homo sapien
ctgtgagggagggtactgagtaact

SEQ ID NO: 4743265 - DNA, 25 bp, Homo sapien
tctgggcttggtacttggccacagc

SEQ ID NO: 4743266 - DNA, 25 bp, Homo sapien
ggagggtactgagtaactcctggcc

SEQ ID NO: 4743267 - DNA, 25 bp, Homo sapien
cattcggtagtcatggtgtgtcaca

SEQ ID NO: 4743268 - DNA, 25 bp, Homo sapien
catggtgtgtcacagactcaacctc

SEQ ID NO: 4743269 - DNA, 25 bp, Homo sapien
cagactcaacctcgaagagcttcct

SEQ ID NO: 4743270 - DNA, 25 bp, Homo sapien
cctgcttgtgccagctccattcggt

SEQ ID NO: 4743271 - DNA, 25 bp, Homo sapien
tagcccgaggggtgtcaaggccatt

SEQ ID NO: 4743272 - DNA, 25 bp, Homo sapien
gggtgtcaaggccattctcacccaa

SEQ ID NO: 4743273 - DNA, 25 bp, Homo sapien
aaggccattctcacccaatttttct

SEQ ID NO: 4743274 - DNA, 25 bp, Homo sapien
ccgaggggtgtcaaggccattctca

SEQ ID NO: 4743275 - DNA, 25 bp, Homo sapien
gctgcaggagcatctccagcatggc

SEQ ID NO: 4743276 - DNA, 25 bp, Homo sapien
gcaggagcatctccagcatggcttc

SEQ ID NO: 4743277 - DNA, 25 bp, Homo sapien
gcatctccagcatggcttcacgctt

SEQ ID NO: 4743278 - DNA, 25 bp, Homo sapien
ggagcatctccagcatggcttcacg

SEQ ID NO: 4743279 - DNA, 25 bp, Homo sapien
agagagttggggggtgggcaaggtg

SEQ ID NO: 4743280 - DNA, 25 bp, Homo sapien
tgtgagagagttggggggtgggcaa

SEQ ID NO: 4743281 - DNA, 25 bp, Homo sapien
ctgtgagagagttggggggtgggca

SEQ ID NO: 4743282 - DNA, 25 bp, Homo sapien
tgagagagttggggggtgggcaagg

SEQ ID NO: 4743283 - DNA, 25 bp, Homo sapien
ttccctctgagtaatgggctcgttc

SEQ ID NO: 4743284 - DNA, 25 bp, Homo sapien
tccctctgagtaatgggctcgttct

SEQ ID NO: 4743285 - DNA, 25 bp, Homo sapien
cttccctctgagtaatgggctcgtt

SEQ ID NO: 4743286 - DNA, 25 bp, Homo sapien
atagtcagcagtccccggtgtccgt

SEQ ID NO: 4743287 - DNA, 25 bp, Homo sapien
gaagtggccaatagacgtttcctgg

SEQ ID NO: 4743288 - DNA, 25 bp, Homo sapien
gccatcctgcatgcttgggacttga

SEQ ID NO: 4743289 - DNA, 25 bp, Homo sapien
tcctggtggctggtacgagtctttc

SEQ ID NO: 4743290 - DNA, 25 bp, Homo sapien
tggtacccaccctcatgtaaactac

SEQ ID NO: 4743291 - DNA, 25 bp, Homo sapien
tggatcccaagttgaatgactataa

SEQ ID NO: 4743292 - DNA, 25 bp, Homo sapien
tataatatcccttctggtacccacc

SEQ ID NO: 4743293 - DNA, 25 bp, Homo sapien
tgcctcccctaagaaactgagggca

SEQ ID NO: 4743294 - DNA, 25 bp, Homo sapien
ccccgcggcaaagtttcatagcaaa

SEQ ID NO: 4743295 - DNA, 25 bp, Homo sapien
gggcacccggttctaagacttgcaa

SEQ ID NO: 4743296 - DNA, 25 bp, Homo sapien
tatagttagggacccgatctgccac

SEQ ID NO: 4743297 - DNA, 25 bp, Homo sapien
cataagcttccctttaatgtctggg

SEQ ID NO: 4743298 - DNA, 25 bp, Homo sapien
ttagaactatggtcagttgtagtgc

SEQ ID NO: 4743299 - DNA, 25 bp, Homo sapien
caggaaacatagacgggctcaaagc

SEQ ID NO: 4743300 - DNA, 25 bp, Homo sapien
ctcccatgggctatattgtgggtaa

SEQ ID NO: 4743301 - DNA, 25 bp, Homo sapien
ggtcagttgtagtgcaagtgtcctg

SEQ ID NO: 4743302 - DNA, 25 bp, Homo sapien
gggtcagaggacggctccatgaact

SEQ ID NO: 4743303 - DNA, 25 bp, Homo sapien
ggctggggtcagaggacggctccat

SEQ ID NO: 4743304 - DNA, 25 bp, Homo sapien
cagctgctgcggttgcagctgccag

SEQ ID NO: 4743305 - DNA, 25 bp, Homo sapien
catgaactcagaacagggcgctggg

SEQ ID NO: 4743306 - DNA, 25 bp, Homo sapien
ttcggagctgggctgtatgtctaaa

SEQ ID NO: 4743307 - DNA, 25 bp, Homo sapien
tcggagctgggctgtatgtctaaag

SEQ ID NO: 4743308 - DNA, 25 bp, Homo sapien
cggagctgggctgtatgtctaaaga

SEQ ID NO: 4743309 - DNA, 25 bp, Homo sapien
ccttcggagctgggctgtatgtcta

SEQ ID NO: 4743310 - DNA, 25 bp, Homo sapien
gatccctccgtagactcgttggtct

SEQ ID NO: 4743311 - DNA, 25 bp, Homo sapien
cgcgaccgcgatccctccgtagact

SEQ ID NO: 4743312 - DNA, 25 bp, Homo sapien
cctccgtagactcgttggtctccat

SEQ ID NO: 4743313 - DNA, 25 bp, Homo sapien
cgcgatccctccgtagactcgttgg

SEQ ID NO: 4743314 - DNA, 25 bp, Homo sapien
tagagacagcaaacaactcctggag

SEQ ID NO: 4743315 - DNA, 25 bp, Homo sapien
tggagcctgcgcagaagtacagctg

SEQ ID NO: 4743316 - DNA, 25 bp, Homo sapien
tggcggtggaggcaagtcctctgcg

SEQ ID NO: 4743317 - DNA, 25 bp, Homo sapien
cagctactgggttgccatagagaca

SEQ ID NO: 4743318 - DNA, 25 bp, Homo sapien
tagcatcacagggtccatttttccc

SEQ ID NO: 4743319 - DNA, 25 bp, Homo sapien
gcatcacagggtccatttttccctt

SEQ ID NO: 4743320 - DNA, 25 bp, Homo sapien
agcatcacagggtccatttttccct

SEQ ID NO: 4743321 - DNA, 25 bp, Homo sapien
ttagcatcacagggtccatttttcc

SEQ ID NO: 4743322 - DNA, 25 bp, Homo sapien
tctggtgtcctttaatcagttggca

SEQ ID NO: 4743323 - DNA, 25 bp, Homo sapien
agagtctggtgtcctttaatcagtt

SEQ ID NO: 4743324 - DNA, 25 bp, Homo sapien
agtctggtgtcctttaatcagttgg

SEQ ID NO: 4743325 - DNA, 25 bp, Homo sapien
ggtgtcctttaatcagttggcaggt

SEQ ID NO: 4743326 - DNA, 25 bp, Homo sapien
tgcacccagcttcccatcgttgatc

SEQ ID NO: 4743327 - DNA, 25 bp, Homo sapien
tgccggcccccaagtacatgaatgt

SEQ ID NO: 4743328 - DNA, 25 bp, Homo sapien
tacacagattgtgcacccagcttcc

SEQ ID NO: 4743329 - DNA, 25 bp, Homo sapien
tgcagatgatacacagattgtgcac

SEQ ID NO: 4743330 - DNA, 25 bp, Homo sapien
gagaattcataggtgagggaccaag

SEQ ID NO: 4743331 - DNA, 25 bp, Homo sapien
ggagtcaggatcatggcagaggtcg

SEQ ID NO: 4743332 - DNA, 25 bp, Homo sapien
caggatcatggcagaggtcgaagaa

SEQ ID NO: 4743333 - DNA, 25 bp, Homo sapien
tgagaattcataggtgagggaccaa

SEQ ID NO: 4743334 - DNA, 25 bp, Homo sapien
tgcttggccacaaggagtaggtgtc

SEQ ID NO: 4743335 - DNA, 25 bp, Homo sapien
ctgcttggccacaaggagtaggtgt

SEQ ID NO: 4743336 - DNA, 25 bp, Homo sapien
agagagagcggagggacataggtgg

SEQ ID NO: 4743337 - DNA, 25 bp, Homo sapien
ctatagagagagcggagggacatag

SEQ ID NO: 4743338 - DNA, 25 bp, Homo sapien
atagagagagcggagggacataggt

SEQ ID NO: 4743339 - DNA, 25 bp, Homo sapien
tagagagagcggagggacataggtg

SEQ ID NO: 4743340 - DNA, 25 bp, Homo sapien
cttcattcatagggagcaagacctc

SEQ ID NO: 4743341 - DNA, 25 bp, Homo sapien
cattcatagggagcaagacctctag

SEQ ID NO: 4743342 - DNA, 25 bp, Homo sapien
attcatagggagcaagacctctagc

SEQ ID NO: 4743343 - DNA, 25 bp, Homo sapien
tcattcatagggagcaagacctcta

SEQ ID NO: 4743344 - DNA, 25 bp, Homo sapien
ggaatgggcttcttaggaatgacca

SEQ ID NO: 4743345 - DNA, 25 bp, Homo sapien
tcttaggaatgaccaggaagtgcac

SEQ ID NO: 4743346 - DNA, 25 bp, Homo sapien
cttcagcctggctaatccgaggaat

SEQ ID NO: 4743347 - DNA, 25 bp, Homo sapien
tggctaatccgaggaatgggcttct

SEQ ID NO: 4743348 - DNA, 25 bp, Homo sapien
gggataggtcctaagagcaccccac

SEQ ID NO: 4743349 - DNA, 25 bp, Homo sapien
gaggccacgttacttcaacaggttg

SEQ ID NO: 4743350 - DNA, 25 bp, Homo sapien
gtgacaggccagaggccacgttact

SEQ ID NO: 4743351 - DNA, 25 bp, Homo sapien
gatggtatctacaacattcctaagg

SEQ ID NO: 4743352 - DNA, 25 bp, Homo sapien
tgggccttggccacttcattcccat

SEQ ID NO: 4743353 - DNA, 25 bp, Homo sapien
gctggtcctcatagagaatgtcagc

SEQ ID NO: 4743354 - DNA, 25 bp, Homo sapien
ggtcctcatagagaatgtcagctgg

SEQ ID NO: 4743355 - DNA, 25 bp, Homo sapien
tggtcctcatagagaatgtcagctg

SEQ ID NO: 4743356 - DNA, 25 bp, Homo sapien
caattgattcctgctcatgtgtcca

SEQ ID NO: 4743357 - DNA, 25 bp, Homo sapien
gagttcagctaagtgacctctgctc

SEQ ID NO: 4743358 - DNA, 25 bp, Homo sapien
cctgtttgacactagttgacccctc

SEQ ID NO: 4743359 - DNA, 25 bp, Homo sapien
tggatcgaccatattcaaaggaggg

SEQ ID NO: 4743360 - DNA, 25 bp, Homo sapien
ctccgagccgcttctggcaagtgca

SEQ ID NO: 4743361 - DNA, 25 bp, Homo sapien
ctagtgctcattaggaggccagaag

SEQ ID NO: 4743362 - DNA, 25 bp, Homo sapien
cactagtgctcattaggaggccaga

SEQ ID NO: 4743363 - DNA, 25 bp, Homo sapien
caagtgcagaagagaggttaacact

SEQ ID NO: 4743364 - DNA, 25 bp, Homo sapien
tcgttctccggagccaccagttcga

SEQ ID NO: 4743365 - DNA, 25 bp, Homo sapien
gggcgggaatcagcaccagctcgtt

SEQ ID NO: 4743366 - DNA, 25 bp, Homo sapien
accagttcgacctcaccacacagcc

SEQ ID NO: 4743367 - DNA, 25 bp, Homo sapien
atcagcaccagctcgttctccggag

SEQ ID NO: 4743368 - DNA, 25 bp, Homo sapien
cccctactcgctcccgcgccacttc

SEQ ID NO: 4743369 - DNA, 25 bp, Homo sapien
tctgcgcggctctgcgcgccttcgg

SEQ ID NO: 4743370 - DNA, 25 bp, Homo sapien
cacaggcaggagctctgcgcggctc

SEQ ID NO: 4743371 - DNA, 25 bp, Homo sapien
cggatggcttcggagcccgcaggac

SEQ ID NO: 4743372 - DNA, 25 bp, Homo sapien
tgcgcgccgcgcgcaacccagcagc

SEQ ID NO: 4743373 - DNA, 25 bp, Homo sapien
ccgcgcgcaacccagcagccagcac

SEQ ID NO: 4743374 - DNA, 25 bp, Homo sapien
gcgccgcgcgcaacccagcagccag

SEQ ID NO: 4743375 - DNA, 25 bp, Homo sapien
ctctgcgcgccgcgcgcaacccagc

SEQ ID NO: 4743376 - DNA, 25 bp, Homo sapien
tccctgagccgcgggaacctctcac

SEQ ID NO: 4743377 - DNA, 25 bp, Homo sapien
ttccctgagccgcgggaacctctca

SEQ ID NO: 4743378 - DNA, 25 bp, Homo sapien
cttccctgagccgcgggaacctctc

SEQ ID NO: 4743379 - DNA, 25 bp, Homo sapien
cagccactttggaggcgggctcttt

SEQ ID NO: 4743380 - DNA, 25 bp, Homo sapien
ttggagcgcgcctctgagcacgatt

SEQ ID NO: 4743381 - DNA, 25 bp, Homo sapien
gagagaaacttccactccattggaa

SEQ ID NO: 4743382 - DNA, 25 bp, Homo sapien
gctgcttctaccaacgcgaggacaa

SEQ ID NO: 4743383 - DNA, 25 bp, Homo sapien
ctctgagggcatccggcgcttattg

SEQ ID NO: 4743384 - DNA, 25 bp, Homo sapien
gctctgagggcatccggcgcttatt

SEQ ID NO: 4743385 - DNA, 25 bp, Homo sapien
tccggcgcttattggctccaagaac

SEQ ID NO: 4743386 - DNA, 25 bp, Homo sapien
gggcatccggcgcttattggctcca

SEQ ID NO: 4743387 - DNA, 25 bp, Homo sapien
gaatcctgaactacccactgatgag

SEQ ID NO: 4743388 - DNA, 25 bp, Homo sapien
tgacttgcctgggttcacagagccc

SEQ ID NO: 4743389 - DNA, 25 bp, Homo sapien
gacactgggagaccctagagttgcc

SEQ ID NO: 4743390 - DNA, 25 bp, Homo sapien
taagaacctatggactcccttgtga

SEQ ID NO: 4743391 - DNA, 25 bp, Homo sapien
ccaatgactcctcttttattgctga

SEQ ID NO: 4743392 - DNA, 25 bp, Homo sapien
caatgactcctcttttattgctgat

SEQ ID NO: 4743393 - DNA, 25 bp, Homo sapien
cttttattgctgatctgggccagac

SEQ ID NO: 4743394 - DNA, 25 bp, Homo sapien
tcctcttttattgctgatctgggcc

SEQ ID NO: 4743395 - DNA, 25 bp, Homo sapien
tcacaaaggcctgtgccagttgctg

SEQ ID NO: 4743396 - DNA, 25 bp, Homo sapien
cacaaaggcctgtgccagttgctga

SEQ ID NO: 4743397 - DNA, 25 bp, Homo sapien
ctgtgccagttgctgacagtgtctg

SEQ ID NO: 4743398 - DNA, 25 bp, Homo sapien
tgccagttgctgacagtgtctgtcc

SEQ ID NO: 4743399 - DNA, 25 bp, Homo sapien
catctctgcaaaaggtacatagtct

SEQ ID NO: 4743400 - DNA, 25 bp, Homo sapien
tctgcaaaaggtacatagtctgctc

SEQ ID NO: 4743401 - DNA, 25 bp, Homo sapien
gaggatggcttctcggagcacagcc

SEQ ID NO: 4743402 - DNA, 25 bp, Homo sapien
ctgaggatggcttctcggagcacag

SEQ ID NO: 4743403 - DNA, 25 bp, Homo sapien
aaccagtgcagatgtgggatgcagg

SEQ ID NO: 4743404 - DNA, 25 bp, Homo sapien
cagtgcagatgtgggatgcaggtag

SEQ ID NO: 4743405 - DNA, 25 bp, Homo sapien
aaaaccagtgcagatgtgggatgca

SEQ ID NO: 4743406 - DNA, 25 bp, Homo sapien
ccagtgcagatgtgggatgcaggta

SEQ ID NO: 4743407 - DNA, 25 bp, Homo sapien
tgtcaaagaaagtctcgtgttcctc

SEQ ID NO: 4743408 - DNA, 25 bp, Homo sapien
ttcctcctcgttgccgggtcttctg

SEQ ID NO: 4743409 - DNA, 25 bp, Homo sapien
gtgttcctcccagcgccggtcacag

SEQ ID NO: 4743410 - DNA, 25 bp, Homo sapien
gtcacaggccgcacagaggaaatta

SEQ ID NO: 4743411 - DNA, 25 bp, Homo sapien
caaaggtggcccgtctcttgagcca

SEQ ID NO: 4743412 - DNA, 25 bp, Homo sapien
aggtggcccgtctcttgagccagaa

SEQ ID NO: 4743413 - DNA, 25 bp, Homo sapien
ggctgcatgttcttcgtggctgtgt

SEQ ID NO: 4743414 - DNA, 25 bp, Homo sapien
tgtgtttgcagcgacattgggccct

SEQ ID NO: 4743415 - DNA, 25 bp, Homo sapien
atgaagcagcggcactggcttacct

SEQ ID NO: 4743416 - DNA, 25 bp, Homo sapien
tcctctgggcgtgatgggataaagc

SEQ ID NO: 4743417 - DNA, 25 bp, Homo sapien
aagcagaacatgaagcagcggcact

SEQ ID NO: 4743418 - DNA, 25 bp, Homo sapien
cctcctctgggcgtgatgggataaa

SEQ ID NO: 4743419 - DNA, 25 bp, Homo sapien
gggcagcgccagccaatgtagagac

SEQ ID NO: 4743420 - DNA, 25 bp, Homo sapien
tccggaaacagtcccataggtaatg

SEQ ID NO: 4743421 - DNA, 25 bp, Homo sapien
gatgatccggtgctctctcaacaag

SEQ ID NO: 4743422 - DNA, 25 bp, Homo sapien
aacaagtgtccacaaaagcatctgg

SEQ ID NO: 4743423 - DNA, 25 bp, Homo sapien
tgaccacagggattctcatctcctc

SEQ ID NO: 4743424 - DNA, 25 bp, Homo sapien
tctctgtgaccacagggattctcat

SEQ ID NO: 4743425 - DNA, 25 bp, Homo sapien
cactaaagcccaactttgctttgtt

SEQ ID NO: 4743426 - DNA, 25 bp, Homo sapien
atcccactaaagcccaactttgctt

SEQ ID NO: 4743427 - DNA, 25 bp, Homo sapien
cgggagccaggattccactagagga

SEQ ID NO: 4743428 - DNA, 25 bp, Homo sapien
ttgttgagagagcaaggtataggca

SEQ ID NO: 4743429 - DNA, 25 bp, Homo sapien
tctgtcttgatgctgattgcctgta

SEQ ID NO: 4743430 - DNA, 25 bp, Homo sapien
agtgcccccttacaccagggaggct

SEQ ID NO: 4743431 - DNA, 25 bp, Homo sapien
tgagcaccaaactcctctctatgca

SEQ ID NO: 4743432 - DNA, 25 bp, Homo sapien
gtctgcctagcagggaacactgggc

SEQ ID NO: 4743433 - DNA, 25 bp, Homo sapien
tgtctgcctagcagggaacactggg

SEQ ID NO: 4743434 - DNA, 25 bp, Homo sapien
ttcacttgagcaccaaactcctctc

SEQ ID NO: 4743435 - DNA, 25 bp, Homo sapien
agtgagaaggccctaaaactaagag

SEQ ID NO: 4743436 - DNA, 25 bp, Homo sapien
tgagaaggccctaaaactaagagaa

SEQ ID NO: 4743437 - DNA, 25 bp, Homo sapien
ctaggatgggagaggatgagtaacc

SEQ ID NO: 4743438 - DNA, 25 bp, Homo sapien
gatgggagaggatgagtaaccaggg

SEQ ID NO: 4743439 - DNA, 25 bp, Homo sapien
agctaactcctttcttcttcttctt

SEQ ID NO: 4743440 - DNA, 25 bp, Homo sapien
gctaactcctttcttcttcttcttc

SEQ ID NO: 4743441 - DNA, 25 bp, Homo sapien
gagtctcagagatggaaggctcctg

SEQ ID NO: 4743442 - DNA, 25 bp, Homo sapien
cagattcagagagatgggtagacct

SEQ ID NO: 4743443 - DNA, 25 bp, Homo sapien
ccatgggacctcattggaagaagac

SEQ ID NO: 4743444 - DNA, 25 bp, Homo sapien
gcaccactgagatgggactatccaa

SEQ ID NO: 4743445 - DNA, 25 bp, Homo sapien
gatatgaggctcttctatgatctca

SEQ ID NO: 4743446 - DNA, 25 bp, Homo sapien
tgatatgaggctcttctatgatctc

SEQ ID NO: 4743447 - DNA, 25 bp, Homo sapien
ggtgatatgaggctcttctatgatc

SEQ ID NO: 4743448 - DNA, 25 bp, Homo sapien
tatgaggctcttctatgatctcatg

SEQ ID NO: 4743449 - DNA, 25 bp, Homo sapien
ttcgcaaaggagctctggcatgacc

SEQ ID NO: 4743450 - DNA, 25 bp, Homo sapien
ttgtggatgtgcctcagctgcaggt

SEQ ID NO: 4743451 - DNA, 25 bp, Homo sapien
gtcaagaccttgacttaggatggca

SEQ ID NO: 4743452 - DNA, 25 bp, Homo sapien
gaaatgccttgcctgaaagtctgct

SEQ ID NO: 4743453 - DNA, 25 bp, Homo sapien
ctgtctgggtggctggtatcctcgt

SEQ ID NO: 4743454 - DNA, 25 bp, Homo sapien
ttcttaaggactggagcctatgcag

SEQ ID NO: 4743455 - DNA, 25 bp, Homo sapien
gcacagagtccctcaggaccaagga

SEQ ID NO: 4743456 - DNA, 25 bp, Homo sapien
ggagggattgcaggatggatggagc

SEQ ID NO: 4743457 - DNA, 25 bp, Homo sapien
catctggtccccagtcagaggtcca

SEQ ID NO: 4743458 - DNA, 25 bp, Homo sapien
atctggtccccagtcagaggtccag

SEQ ID NO: 4743459 - DNA, 25 bp, Homo sapien
tgtggctggcagatattgctgtacc

SEQ ID NO: 4743460 - DNA, 25 bp, Homo sapien
tccttgccttgaatacagggctgtg

SEQ ID NO: 4743461 - DNA, 25 bp, Homo sapien
agatattgctgtacccttgcatgta

SEQ ID NO: 4743462 - DNA, 25 bp, Homo sapien
ctgtacatacgactggactgagacc

SEQ ID NO: 4743463 - DNA, 25 bp, Homo sapien
gagatgagccagacccgactgaatc

SEQ ID NO: 4743464 - DNA, 25 bp, Homo sapien
tagggaacatgctgtgggagctaca

SEQ ID NO: 4743465 - DNA, 25 bp, Homo sapien
tcagtcccgcaaaccttccataggg

SEQ ID NO: 4743466 - DNA, 25 bp, Homo sapien
acagagatgagccagacccgactga

SEQ ID NO: 4743467 - DNA, 25 bp, Homo sapien
ttagatgggacaagtgtgaagtgga

SEQ ID NO: 4743468 - DNA, 25 bp, Homo sapien
gaatgcaagttagatgggacaagtg

SEQ ID NO: 4743469 - DNA, 25 bp, Homo sapien
tgaagtggaagatcctgacaaagtg

SEQ ID NO: 4743470 - DNA, 25 bp, Homo sapien
tcatgaatgcaagttagatgggaca

SEQ ID NO: 4743471 - DNA, 25 bp, Homo sapien
tcagcagagttaggacggcagcttt

SEQ ID NO: 4743472 - DNA, 25 bp, Homo sapien
tctcagcagagttaggacggcagct

SEQ ID NO: 4743473 - DNA, 25 bp, Homo sapien
gcagagttaggacggcagctttcac

SEQ ID NO: 4743474 - DNA, 25 bp, Homo sapien
cagcagagttaggacggcagctttc

SEQ ID NO: 4743475 - DNA, 25 bp, Homo sapien
gaagtagttgatgacgtggccacag

SEQ ID NO: 4743476 - DNA, 25 bp, Homo sapien
tacctaagcggctggcagatagcca

SEQ ID NO: 4743477 - DNA, 25 bp, Homo sapien
gtcacaaccccgtagaacaatgcga

SEQ ID NO: 4743478 - DNA, 25 bp, Homo sapien
cactcatgagctctgggtacctaag

SEQ ID NO: 4743479 - DNA, 25 bp, Homo sapien
ggttgtgcaggcgagggtgcagcac

SEQ ID NO: 4743480 - DNA, 25 bp, Homo sapien
aggcgagggtgcagcacgttcagcc

SEQ ID NO: 4743481 - DNA, 25 bp, Homo sapien
atggggttgtgcaggcgagggtgca

SEQ ID NO: 4743482 - DNA, 25 bp, Homo sapien
tgcaggcgagggtgcagcacgttca

SEQ ID NO: 4743483 - DNA, 25 bp, Homo sapien
tagccccatcaggacgtattccgtc

SEQ ID NO: 4743484 - DNA, 25 bp, Homo sapien
ccaacacattcacggagtagatgcc

SEQ ID NO: 4743485 - DNA, 25 bp, Homo sapien
cacctccaggttacagtgctcgtgt

SEQ ID NO: 4743486 - DNA, 25 bp, Homo sapien
agatgcccaggcagaacacaaacag

SEQ ID NO: 4743487 - DNA, 25 bp, Homo sapien
tcagttgtgaccagctttgcaaagg

SEQ ID NO: 4743488 - DNA, 25 bp, Homo sapien
atgatgtcacacgaggagggaagcc

SEQ ID NO: 4743489 - DNA, 25 bp, Homo sapien
aggtgacctccatcgccatgcagag

SEQ ID NO: 4743490 - DNA, 25 bp, Homo sapien
tgctctcacttctcctcgggaaagg

SEQ ID NO: 4743491 - DNA, 25 bp, Homo sapien
aaaatgtcttatggccaggtggccc

SEQ ID NO: 4743492 - DNA, 25 bp, Homo sapien
gaaaaatgtcttatggccaggtggc

SEQ ID NO: 4743493 - DNA, 25 bp, Homo sapien
tagtcttgttagaactggaaaaatg

SEQ ID NO: 4743494 - DNA, 25 bp, Homo sapien
tgtccagagaacagtagtcttgtta

SEQ ID NO: 4743495 - DNA, 25 bp, Homo sapien
actgcccttggccatccctctgtgt

SEQ ID NO: 4743496 - DNA, 25 bp, Homo sapien
ctgccttcttgtgctcccactgccc

SEQ ID NO: 4743497 - DNA, 25 bp, Homo sapien
ctgctgccttcttgtgctcccactg

SEQ ID NO: 4743498 - DNA, 25 bp, Homo sapien
ccttcttgtgctcccactgcccttg

SEQ ID NO: 4743499 - DNA, 25 bp, Homo sapien
gcccagtgctcccatcgtacagatg

SEQ ID NO: 4743500 - DNA, 25 bp, Homo sapien
ggaaaggtggactgctgcttgcagg

SEQ ID NO: 4743501 - DNA, 25 bp, Homo sapien
gaatggaaatgctccgtgaatctag

SEQ ID NO: 4743502 - DNA, 25 bp, Homo sapien
cccatcgtacagatggtaccatgga

SEQ ID NO: 4743503 - DNA, 25 bp, Homo sapien
ctggaggcccgactcctgccccaca

SEQ ID NO: 4743504 - DNA, 25 bp, Homo sapien
tggaggcccgactcctgccccacac

SEQ ID NO: 4743505 - DNA, 25 bp, Homo sapien
catgagcacgtggtacctgagtggc

SEQ ID NO: 4743506 - DNA, 25 bp, Homo sapien
gaaaagcagcactacagccaggtgt

SEQ ID NO: 4743507 - DNA, 25 bp, Homo sapien
gaagtgactgaccacgtggtggcca

SEQ ID NO: 4743508 - DNA, 25 bp, Homo sapien
gcaggaagtcttcgctgaccgacgt

SEQ ID NO: 4743509 - DNA, 25 bp, Homo sapien
cagagttctgaagagatggtccaca

SEQ ID NO: 4743510 - DNA, 25 bp, Homo sapien
gctgcagagttctgaagagatggtc

SEQ ID NO: 4743511 - DNA, 25 bp, Homo sapien
tgcagagttctgaagagatggtcca

SEQ ID NO: 4743512 - DNA, 25 bp, Homo sapien
agagttctgaagagatggtccacag

SEQ ID NO: 4743513 - DNA, 25 bp, Homo sapien
ctttaaccatagccaatttctcatc

SEQ ID NO: 4743514 - DNA, 25 bp, Homo sapien
tatttgaacaccttgaagttggtct

SEQ ID NO: 4743515 - DNA, 25 bp, Homo sapien
accatagccaatttctcatctgcaa

SEQ ID NO: 4743516 - DNA, 25 bp, Homo sapien
ctgcaatctgttctgtatactttct

SEQ ID NO: 4743517 - DNA, 25 bp, Homo sapien
tctatactgggatagtttgtgcaag

SEQ ID NO: 4743518 - DNA, 25 bp, Homo sapien
tgggaacagctttattagatatacc

SEQ ID NO: 4743519 - DNA, 25 bp, Homo sapien
tgcaactagtcttcaccttgtggga

SEQ ID NO: 4743520 - DNA, 25 bp, Homo sapien
gtgggaggattttaactactgacaa

SEQ ID NO: 4743521 - DNA, 25 bp, Homo sapien
ttcagggctggtcgcagtgggtcac

SEQ ID NO: 4743522 - DNA, 25 bp, Homo sapien
aattcagggctggtcgcagtgggtc

SEQ ID NO: 4743523 - DNA, 25 bp, Homo sapien
cagggctggtcgcagtgggtcacac

SEQ ID NO: 4743524 - DNA, 25 bp, Homo sapien
ctgtaatcccagcactttggaaggc

SEQ ID NO: 4743525 - DNA, 25 bp, Homo sapien
tcagactgaggtcagagggggaagg

SEQ ID NO: 4743526 - DNA, 25 bp, Homo sapien
ctcagactgaggtcagagggggaag

SEQ ID NO: 4743527 - DNA, 25 bp, Homo sapien
cagactgaggtcagagggggaaggg

SEQ ID NO: 4743528 - DNA, 25 bp, Homo sapien
gactgaggtcagagggggaagggtc

SEQ ID NO: 4743529 - DNA, 25 bp, Homo sapien
accagccttgcggtgtctgcagaca

SEQ ID NO: 4743530 - DNA, 25 bp, Homo sapien
gaactcagagaaccagccttgcggt

SEQ ID NO: 4743531 - DNA, 25 bp, Homo sapien
ctcttgctccgggagttctgcagag

SEQ ID NO: 4743532 - DNA, 25 bp, Homo sapien
cagacattcctccaggcggtaggga

SEQ ID NO: 4743533 - DNA, 25 bp, Homo sapien
cgtggagaggaaccgtacagctgca

SEQ ID NO: 4743534 - DNA, 25 bp, Homo sapien
tccacggacggcaggactgtgacgt

SEQ ID NO: 4743535 - DNA, 25 bp, Homo sapien
ctgccttttccacggacggcaggac

SEQ ID NO: 4743536 - DNA, 25 bp, Homo sapien
caggactgtgacgtggagaggaacc

SEQ ID NO: 4743537 - DNA, 25 bp, Homo sapien
ctcctggcagggaggagggtggaaa

SEQ ID NO: 4743538 - DNA, 25 bp, Homo sapien
gggtggaaaaggcctggggtgcgca

SEQ ID NO: 4743539 - DNA, 25 bp, Homo sapien
ggtggaaaaggcctggggtgcgcat

SEQ ID NO: 4743540 - DNA, 25 bp, Homo sapien
cagggaggagggtggaaaaggcctg

SEQ ID NO: 4743541 - DNA, 25 bp, Homo sapien
gaatctgtgctcacgtcttccagga

SEQ ID NO: 4743542 - DNA, 25 bp, Homo sapien
tcttccaggacagtgcttcttctag

SEQ ID NO: 4743543 - DNA, 25 bp, Homo sapien
atggcctgaggcttagaaaatagac

SEQ ID NO: 4743544 - DNA, 25 bp, Homo sapien
cttcttctagaagctgacatggagc

SEQ ID NO: 4743545 - DNA, 25 bp, Homo sapien
gctgtgtgtagctcattgaccagat

SEQ ID NO: 4743546 - DNA, 25 bp, Homo sapien
ggttggctctcagtatggccaggtc

SEQ ID NO: 4743547 - DNA, 25 bp, Homo sapien
tatggccaggtcactatatacgggt

SEQ ID NO: 4743548 - DNA, 25 bp, Homo sapien
ccttagatatatgaacgcagaaggg

SEQ ID NO: 4743549 - DNA, 25 bp, Homo sapien
tggatcaaacacaagcattcatgcc

SEQ ID NO: 4743550 - DNA, 25 bp, Homo sapien
cattcatgcctatgaaaacgtttgg

SEQ ID NO: 4743551 - DNA, 25 bp, Homo sapien
cgtttggcaatgaatgggatcttgg

SEQ ID NO: 4743552 - DNA, 25 bp, Homo sapien
tattcctggatcaaacacaagcatt

SEQ ID NO: 4743553 - DNA, 25 bp, Homo sapien
tggccttcgcttcttagccttgctc

SEQ ID NO: 4743554 - DNA, 25 bp, Homo sapien
ttccgggggacagtagcatgcctgc

SEQ ID NO: 4743555 - DNA, 25 bp, Homo sapien
ctggccttcgcttcttagccttgct

SEQ ID NO: 4743556 - DNA, 25 bp, Homo sapien
gagggtgttccgggggacagtagca

SEQ ID NO: 4743557 - DNA, 25 bp, Homo sapien
aggaactatttccttcagactctca

SEQ ID NO: 4743558 - DNA, 25 bp, Homo sapien
ctcaccggaggatagctgatcttca

SEQ ID NO: 4743559 - DNA, 25 bp, Homo sapien
catggctttacacagagtcacttca

SEQ ID NO: 4743560 - DNA, 25 bp, Homo sapien
gatctgaggaactatttccttcaga

SEQ ID NO: 4743561 - DNA, 25 bp, Homo sapien
ggcacatcacaggagtgcctccaga

SEQ ID NO: 4743562 - DNA, 25 bp, Homo sapien
gtggtggcacatcacaggagtgcct

SEQ ID NO: 4743563 - DNA, 25 bp, Homo sapien
gtggcacatcacaggagtgcctcca

SEQ ID NO: 4743564 - DNA, 25 bp, Homo sapien
ggaggtggtggcacatcacaggagt

SEQ ID NO: 4743565 - DNA, 25 bp, Homo sapien
gcactgtccagaggatccgatcgct

SEQ ID NO: 4743566 - DNA, 25 bp, Homo sapien
taatgccactccttgaggcaccaag

SEQ ID NO: 4743567 - DNA, 25 bp, Homo sapien
tctgctttattgaggccagccagac

SEQ ID NO: 4743568 - DNA, 25 bp, Homo sapien
gactcccgtaatgccactccttgag

SEQ ID NO: 4743569 - DNA, 25 bp, Homo sapien
ctgcctgccgcgctttgcctccttg

SEQ ID NO: 4743570 - DNA, 25 bp, Homo sapien
cctgcctgccgcgctttgcctcctt

SEQ ID NO: 4743571 - DNA, 25 bp, Homo sapien
aggaagcaggtgtcaaactcatagc

SEQ ID NO: 4743572 - DNA, 25 bp, Homo sapien
gaggaagcaggtgtcaaactcatag

SEQ ID NO: 4743573 - DNA, 25 bp, Homo sapien
caccacatctgatcagtactagctt

SEQ ID NO: 4743574 - DNA, 25 bp, Homo sapien
tccacgtgctctcaccacatctgat

SEQ ID NO: 4743575 - DNA, 25 bp, Homo sapien
caggttccacgtgctctcaccacat

SEQ ID NO: 4743576 - DNA, 25 bp, Homo sapien
ccacatctgatcagtactagcttgt

SEQ ID NO: 4743577 - DNA, 25 bp, Homo sapien
gttttggattcttgcaaattcctat

SEQ ID NO: 4743578 - DNA, 25 bp, Homo sapien
ttttggattcttgcaaattcctatt

SEQ ID NO: 4743579 - DNA, 25 bp, Homo sapien
cagactttgatataacttgccataa

SEQ ID NO: 4743580 - DNA, 25 bp, Homo sapien
ctatgaatagataggcaaaagaggt

SEQ ID NO: 4743581 - DNA, 25 bp, Homo sapien
accttggcctggtcaggagttcacc

SEQ ID NO: 4743582 - DNA, 25 bp, Homo sapien
atttctgaacctcttgtatgtcttc

SEQ ID NO: 4743583 - DNA, 25 bp, Homo sapien
gaagccttttggtctcagcagtctc

SEQ ID NO: 4743584 - DNA, 25 bp, Homo sapien
tacatgaagaataaggtcccgtaga

SEQ ID NO: 4743585 - DNA, 25 bp, Homo sapien
tgctcatgatcacggagtacctaag

SEQ ID NO: 4743586 - DNA, 25 bp, Homo sapien
ggactcctaggaagatcacattcgt

SEQ ID NO: 4743587 - DNA, 25 bp, Homo sapien
aaaagctgtccaggaccagtgggac

SEQ ID NO: 4743588 - DNA, 25 bp, Homo sapien
aaagctgtccaggaccagtgggact

SEQ ID NO: 4743589 - DNA, 25 bp, Homo sapien
accagtgggactgaggaggtagtga

SEQ ID NO: 4743590 - DNA, 25 bp, Homo sapien
gggactgaggaggtagtgaagcaga

SEQ ID NO: 4743591 - DNA, 25 bp, Homo sapien
tgcaggcgggagtcaaggatggtca

SEQ ID NO: 4743592 - DNA, 25 bp, Homo sapien
gtgtgcaggcgggagtcaaggatgg

SEQ ID NO: 4743593 - DNA, 25 bp, Homo sapien
gcaggcgggagtcaaggatggtcac

SEQ ID NO: 4743594 - DNA, 25 bp, Homo sapien
gggcgtgtgcaggcgggagtcaagg

SEQ ID NO: 4743595 - DNA, 25 bp, Homo sapien
gcaggatcacgaggtacatcagcag

SEQ ID NO: 4743596 - DNA, 25 bp, Homo sapien
caggatgagcacgaagaatgtcttt

SEQ ID NO: 4743597 - DNA, 25 bp, Homo sapien
agcacgaagaatgtcttttccagct

SEQ ID NO: 4743598 - DNA, 25 bp, Homo sapien
ccattgcccagcaggatcacgaggt

SEQ ID NO: 4743599 - DNA, 25 bp, Homo sapien
agagcctcaggagaacgaaccccat

SEQ ID NO: 4743600 - DNA, 25 bp, Homo sapien
ggtgggcagagagcctcaggagaac

SEQ ID NO: 4743601 - DNA, 25 bp, Homo sapien
agagagcctcaggagaacgaacccc

SEQ ID NO: 4743602 - DNA, 25 bp, Homo sapien
gcagagagcctcaggagaacgaacc

SEQ ID NO: 4743603 - DNA, 25 bp, Homo sapien
caggggaggtctcattggctttttc

SEQ ID NO: 4743604 - DNA, 25 bp, Homo sapien
cacaggggaggtctcattggctttt

SEQ ID NO: 4743605 - DNA, 25 bp, Homo sapien
ggggaggtctcattggctttttcca

SEQ ID NO: 4743606 - DNA, 25 bp, Homo sapien
gggaggtctcattggctttttccat

SEQ ID NO: 4743607 - DNA, 25 bp, Homo sapien
ccctgaccctgagggagtccgcttt

SEQ ID NO: 4743608 - DNA, 25 bp, Homo sapien
cctctcgccccctgaccctgaggga

SEQ ID NO: 4743609 - DNA, 25 bp, Homo sapien
cccttcctcgcctgtggagtgggat

SEQ ID NO: 4743610 - DNA, 25 bp, Homo sapien
tcccttcctcgcctgtggagtggga

SEQ ID NO: 4743611 - DNA, 25 bp, Homo sapien
cagcagctgctgcttaggaccagtg

SEQ ID NO: 4743612 - DNA, 25 bp, Homo sapien
cagctgctgcttaggaccagtggca

SEQ ID NO: 4743613 - DNA, 25 bp, Homo sapien
tccccggcgggcactgggagcccag

SEQ ID NO: 4743614 - DNA, 25 bp, Homo sapien
agctgctgcttaggaccagtggcag

SEQ ID NO: 4743615 - DNA, 25 bp, Homo sapien
aggaggaaagcgcatctgaggcaaa

SEQ ID NO: 4743616 - DNA, 25 bp, Homo sapien
gggcgaggaggaaagcgcatctgag

SEQ ID NO: 4743617 - DNA, 25 bp, Homo sapien
cggggcgaggaggaaagcgcatctg

SEQ ID NO: 4743618 - DNA, 25 bp, Homo sapien
gcgaggaggaaagcgcatctgaggc

SEQ ID NO: 4743619 - DNA, 25 bp, Homo sapien
gcactttagcctttggtggtgtttc

SEQ ID NO: 4743620 - DNA, 25 bp, Homo sapien
tttttcctcttaaatcgtgtgggca

SEQ ID NO: 4743621 - DNA, 25 bp, Homo sapien
cgtgtgggcactttagcctttggtg

SEQ ID NO: 4743622 - DNA, 25 bp, Homo sapien
cttaaatcgtgtgggcactttagcc

SEQ ID NO: 4743623 - DNA, 25 bp, Homo sapien
ctgtgctggctaaatgctgctgtcc

SEQ ID NO: 4743624 - DNA, 25 bp, Homo sapien
tcattcctttcagctgtgctggcta

SEQ ID NO: 4743625 - DNA, 25 bp, Homo sapien
ctggctaaatgctgctgtcccagct

SEQ ID NO: 4743626 - DNA, 25 bp, Homo sapien
agctgtgctggctaaatgctgctgt

SEQ ID NO: 4743627 - DNA, 25 bp, Homo sapien
ccatcccaattagaggtggtgacag

SEQ ID NO: 4743628 - DNA, 25 bp, Homo sapien
gttggatgactaaaccggatgatgg

SEQ ID NO: 4743629 - DNA, 25 bp, Homo sapien
taataaaaatcccatgctgcataga

SEQ ID NO: 4743630 - DNA, 25 bp, Homo sapien
ggcaaaaagcaagcacttaaggtct

SEQ ID NO: 4743631 - DNA, 25 bp, Homo sapien
gttctatttatctggtcaacgggca

SEQ ID NO: 4743632 - DNA, 25 bp, Homo sapien
tcagtcctgccccgctcagcctcag

SEQ ID NO: 4743633 - DNA, 25 bp, Homo sapien
ctgccccgctcagcctcaggagtgg

SEQ ID NO: 4743634 - DNA, 25 bp, Homo sapien
gccccgctcagcctcaggagtggac

SEQ ID NO: 4743635 - DNA, 25 bp, Homo sapien
agtcctgccccgctcagcctcagga

SEQ ID NO: 4743636 - DNA, 25 bp, Homo sapien
ttttctgggtgtctgcgtcggcaat

SEQ ID NO: 4743637 - DNA, 25 bp, Homo sapien
tatatccccgatacgtattctgcct

SEQ ID NO: 4743638 - DNA, 25 bp, Homo sapien
ctgtctttggcgtggagggcccctg

SEQ ID NO: 4743639 - DNA, 25 bp, Homo sapien
tgtctgcgtcggcaattgaagttgc

SEQ ID NO: 4743640 - DNA, 25 bp, Homo sapien
ttgtcagcaccctccatcacttcac

SEQ ID NO: 4743641 - DNA, 25 bp, Homo sapien
gttgtcagcaccctccatcacttca

SEQ ID NO: 4743642 - DNA, 25 bp, Homo sapien
tggttgtcagcaccctccatcactt

SEQ ID NO: 4743643 - DNA, 25 bp, Homo sapien
ctggttgtcagcaccctccatcact

SEQ ID NO: 4743644 - DNA, 25 bp, Homo sapien
ttggcctgcgggagcactctccgat

SEQ ID NO: 4743645 - DNA, 25 bp, Homo sapien
ttcgcctgcggtagggccggcgttg

SEQ ID NO: 4743646 - DNA, 25 bp, Homo sapien
tgggcttggcctgcgggagcactct

SEQ ID NO: 4743647 - DNA, 25 bp, Homo sapien
agtaaggtgggaaccttcgcctgcg

SEQ ID NO: 4743648 - DNA, 25 bp, Homo sapien
ggttacggtctgctgcatatgtact

SEQ ID NO: 4743649 - DNA, 25 bp, Homo sapien
tacggtctgctgcatatgtactgcc

SEQ ID NO: 4743650 - DNA, 25 bp, Homo sapien
atagcgtctataatggttacggtct

SEQ ID NO: 4743651 - DNA, 25 bp, Homo sapien
agcgtctataatggttacggtctgc

SEQ ID NO: 4743652 - DNA, 25 bp, Homo sapien
accaccaggccctgtaacatttgct

SEQ ID NO: 4743653 - DNA, 25 bp, Homo sapien
aacaccaccaggccctgtaacattt

SEQ ID NO: 4743654 - DNA, 25 bp, Homo sapien
tcaacaacatcaaactccacagtct

SEQ ID NO: 4743655 - DNA, 25 bp, Homo sapien
ttctccttcaacaacatcaaactcc

SEQ ID NO: 4743656 - DNA, 25 bp, Homo sapien
tattcttctttctggcagtctggtg

SEQ ID NO: 4743657 - DNA, 25 bp, Homo sapien
ttccttacactgaaccattttactg

SEQ ID NO: 4743658 - DNA, 25 bp, Homo sapien
ttctggcagtctggtgtacaaatac

SEQ ID NO: 4743659 - DNA, 25 bp, Homo sapien
gaaaccatatccgttccttacactg

SEQ ID NO: 4743660 - DNA, 25 bp, Homo sapien
gcgccgccgatgtgaggccgcccgg

SEQ ID NO: 4743661 - DNA, 25 bp, Homo sapien
ggcgccgccgatgtgaggccgcccg

SEQ ID NO: 4743662 - DNA, 25 bp, Homo sapien
ctaggtatttttggcgtgactattg

SEQ ID NO: 4743663 - DNA, 25 bp, Homo sapien
cgctaccgattgaactctccttgta

SEQ ID NO: 4743664 - DNA, 25 bp, Homo sapien
tctaggtatttttggcgtgactatt

SEQ ID NO: 4743665 - DNA, 25 bp, Homo sapien
gctcccgctaccgattgaactctcc

SEQ ID NO: 4743666 - DNA, 25 bp, Homo sapien
ctggagcagtgctttttctcacctc

SEQ ID NO: 4743667 - DNA, 25 bp, Homo sapien
tggagcagtgctttttctcacctct

SEQ ID NO: 4743668 - DNA, 25 bp, Homo sapien
gcctggagcagtgctttttctcacc

SEQ ID NO: 4743669 - DNA, 25 bp, Homo sapien
cctggagcagtgctttttctcacct

SEQ ID NO: 4743670 - DNA, 25 bp, Homo sapien
ccttgctgcttggtgattctcccat

SEQ ID NO: 4743671 - DNA, 25 bp, Homo sapien
cccttgctgcttggtgattctccca

SEQ ID NO: 4743672 - DNA, 25 bp, Homo sapien
ttctctgggatctgggagtagtcca

SEQ ID NO: 4743673 - DNA, 25 bp, Homo sapien
tgggatctgggagtagtccagaagc

SEQ ID NO: 4743674 - DNA, 25 bp, Homo sapien
tctctgggatctgggagtagtccag

SEQ ID NO: 4743675 - DNA, 25 bp, Homo sapien
cataagtagctttgttcatgacttc

SEQ ID NO: 4743676 - DNA, 25 bp, Homo sapien
atgggcacataagtagctttgttca

SEQ ID NO: 4743677 - DNA, 25 bp, Homo sapien
gatggtcccgtagaagacgatcacg

SEQ ID NO: 4743678 - DNA, 25 bp, Homo sapien
atgcaaggggtgtctgcaccatggc

SEQ ID NO: 4743679 - DNA, 25 bp, Homo sapien
tgaggaggttgtatagcagatgtcc

SEQ ID NO: 4743680 - DNA, 25 bp, Homo sapien
aggatgaggaggttgtatagcagat

SEQ ID NO: 4743681 - DNA, 25 bp, Homo sapien
ctgtcaaggatgaggaggttgtata

SEQ ID NO: 4743682 - DNA, 25 bp, Homo sapien
tgtccaggaaggagaggttccccag

SEQ ID NO: 4743683 - DNA, 25 bp, Homo sapien
aggcgggagtcaaggatggtcacca

SEQ ID NO: 4743684 - DNA, 25 bp, Homo sapien
gcgggagtcaaggatggtcaccagg

SEQ ID NO: 4743685 - DNA, 25 bp, Homo sapien
gggagtcaaggatggtcaccaggat

SEQ ID NO: 4743686 - DNA, 25 bp, Homo sapien
caggcgggagtcaaggatggtcacc

SEQ ID NO: 4743687 - DNA, 25 bp, Homo sapien
gggaggtctgattggaactgaccat

SEQ ID NO: 4743688 - DNA, 25 bp, Homo sapien
ggggaggtctgattggaactgacca

SEQ ID NO: 4743689 - DNA, 25 bp, Homo sapien
aggggaggtctgattggaactgacc

SEQ ID NO: 4743690 - DNA, 25 bp, Homo sapien
atttctgaaatatcaagtccctcac

SEQ ID NO: 4743691 - DNA, 25 bp, Homo sapien
aagcatttctgaaatatcaagtccc

SEQ ID NO: 4743692 - DNA, 25 bp, Homo sapien
ctaggcaaagcatttctgaaatatc

SEQ ID NO: 4743693 - DNA, 25 bp, Homo sapien
gcatttctgaaatatcaagtccctc

SEQ ID NO: 4743694 - DNA, 25 bp, Homo sapien
ctcaggctgtagatgatggggttga

SEQ ID NO: 4743695 - DNA, 25 bp, Homo sapien
caggctgtagatgatggggttgagc

SEQ ID NO: 4743696 - DNA, 25 bp, Homo sapien
agcagcctttacatccttgttcctc

SEQ ID NO: 4743697 - DNA, 25 bp, Homo sapien
ggctgtagatgatggggttgagcat

SEQ ID NO: 4743698 - DNA, 25 bp, Homo sapien
ctgcaaggtcttgcttgtctgcccc

SEQ ID NO: 4743699 - DNA, 25 bp, Homo sapien
caccaccccatagaaaagggaaatg

SEQ ID NO: 4743700 - DNA, 25 bp, Homo sapien
ggaaatgagtttgtctgcaaggtct

SEQ ID NO: 4743701 - DNA, 25 bp, Homo sapien
ggtccttagacttgggcttcccata

SEQ ID NO: 4743702 - DNA, 25 bp, Homo sapien
tgatgatgttgtctccacagaaggg

SEQ ID NO: 4743703 - DNA, 25 bp, Homo sapien
catactgatcacattgacagagata

SEQ ID NO: 4743704 - DNA, 25 bp, Homo sapien
ctcccatactgatcacattgacaga

SEQ ID NO: 4743705 - DNA, 25 bp, Homo sapien
atgatgttgtctccacagaagggca

SEQ ID NO: 4743706 - DNA, 25 bp, Homo sapien
tatgggcatgtaggcagccttgctc

SEQ ID NO: 4743707 - DNA, 25 bp, Homo sapien
cttatgggcatgtaggcagccttgc

SEQ ID NO: 4743708 - DNA, 25 bp, Homo sapien
gcatgtaggcagccttgctcatgac

SEQ ID NO: 4743709 - DNA, 25 bp, Homo sapien
gggcatgtaggcagccttgctcatg

SEQ ID NO: 4743710 - DNA, 25 bp, Homo sapien
ctcaggagaacacactctgtggctc

SEQ ID NO: 4743711 - DNA, 25 bp, Homo sapien
tgctcaggagaacacactctgtggc

SEQ ID NO: 4743712 - DNA, 25 bp, Homo sapien
gctcaggagaacacactctgtggct

SEQ ID NO: 4743713 - DNA, 25 bp, Homo sapien
aaggatgagggggactgaggatgtt

SEQ ID NO: 4743714 - DNA, 25 bp, Homo sapien
gggggactgaggatgttgtatagca

SEQ ID NO: 4743715 - DNA, 25 bp, Homo sapien
ggggactgaggatgttgtatagcag

SEQ ID NO: 4743716 - DNA, 25 bp, Homo sapien
gagggggactgaggatgttgtatag

SEQ ID NO: 4743717 - DNA, 25 bp, Homo sapien
gaataaactcggtcacagaggctgt

SEQ ID NO: 4743718 - DNA, 25 bp, Homo sapien
caggagaataaactcggtcacagag

SEQ ID NO: 4743719 - DNA, 25 bp, Homo sapien
aggtgggagttggacacagtcatca

SEQ ID NO: 4743720 - DNA, 25 bp, Homo sapien
agcacaaagaacgttttctccagct

SEQ ID NO: 4743721 - DNA, 25 bp, Homo sapien
ggtcctcatcctggtgaccatcctt

SEQ ID NO: 4743722 - DNA, 25 bp, Homo sapien
catgaacaggtccaatgaggcctcc

SEQ ID NO: 4743723 - DNA, 25 bp, Homo sapien
tgtacctggtgatcctgctgggcaa

SEQ ID NO: 4743724 - DNA, 25 bp, Homo sapien
tctgcccacccatagctggagaaga

SEQ ID NO: 4743725 - DNA, 25 bp, Homo sapien
gatcccgggtgacatgctttctttg

SEQ ID NO: 4743726 - DNA, 25 bp, Homo sapien
ctttctttgggtgcgaggcagcgtc

SEQ ID NO: 4743727 - DNA, 25 bp, Homo sapien
ggtgagtaacctccagagcaacggt

SEQ ID NO: 4743728 - DNA, 25 bp, Homo sapien
gactaagcccttgttctcaggtgaa

SEQ ID NO: 4743729 - DNA, 25 bp, Homo sapien
ccaagatcttctgggcggtgactcg

SEQ ID NO: 4743730 - DNA, 25 bp, Homo sapien
tacttgttacttgacccgcacttgg

SEQ ID NO: 4743731 - DNA, 25 bp, Homo sapien
tagatgggatttcggatacgcagcc

SEQ ID NO: 4743732 - DNA, 25 bp, Homo sapien
cttgtcagaaaagggtgcgatgccc

SEQ ID NO: 4743733 - DNA, 25 bp, Homo sapien
tgatgagctccaaaaagagcgaaac

SEQ ID NO: 4743734 - DNA, 25 bp, Homo sapien
tgcagctgatgagctccaaaaagag

SEQ ID NO: 4743735 - DNA, 25 bp, Homo sapien
agctgatgagctccaaaaagagcga

SEQ ID NO: 4743736 - DNA, 25 bp, Homo sapien
gagctccaaaaagagcgaaacctat

SEQ ID NO: 4743737 - DNA, 25 bp, Homo sapien
tcatcgagggttgtaagacccagcc

SEQ ID NO: 4743738 - DNA, 25 bp, Homo sapien
tggaatggccgtgttgtcccaaaag

SEQ ID NO: 4743739 - DNA, 25 bp, Homo sapien
cacaatctgttcaccctggagtcac

SEQ ID NO: 4743740 - DNA, 25 bp, Homo sapien
gaccatgcttgccaaaatgcctgca

SEQ ID NO: 4743741 - DNA, 25 bp, Homo sapien
tacagagcactaggacttctaagga

SEQ ID NO: 4743742 - DNA, 25 bp, Homo sapien
gcttgtacaggttgcaaactgggag

SEQ ID NO: 4743743 - DNA, 25 bp, Homo sapien
tgttcatgtggacaaagtggactct

SEQ ID NO: 4743744 - DNA, 25 bp, Homo sapien
tctgatttcattgtccgtcaaggga

SEQ ID NO: 4743745 - DNA, 25 bp, Homo sapien
gatttgattagaaagaagagtgctc

SEQ ID NO: 4743746 - DNA, 25 bp, Homo sapien
ccatagtagttcagcttttatatgc

SEQ ID NO: 4743747 - DNA, 25 bp, Homo sapien
gcaagtcaggtatttatctctcaat

SEQ ID NO: 4743748 - DNA, 25 bp, Homo sapien
caccactttttaggatctgttccct

SEQ ID NO: 4743749 - DNA, 25 bp, Homo sapien
ggtgactgtgatcgcccagagtctg

SEQ ID NO: 4743750 - DNA, 25 bp, Homo sapien
actgtgatcgcccagagtctgtcct

SEQ ID NO: 4743751 - DNA, 25 bp, Homo sapien
cacaggtgactgtgatcgcccagag

SEQ ID NO: 4743752 - DNA, 25 bp, Homo sapien
tgtgatcgcccagagtctgtcctca

SEQ ID NO: 4743753 - DNA, 25 bp, Homo sapien
taagcaacaggctcactggtcacgg

SEQ ID NO: 4743754 - DNA, 25 bp, Homo sapien
ttatcgctgggaaatgagatgacca

SEQ ID NO: 4743755 - DNA, 25 bp, Homo sapien
ccaactactgtgttatgcaaaagca

SEQ ID NO: 4743756 - DNA, 25 bp, Homo sapien
tacctactctggctagaagctaggg

SEQ ID NO: 4743757 - DNA, 25 bp, Homo sapien
caatcatgtgtgttaacccagtgct

SEQ ID NO: 4743758 - DNA, 25 bp, Homo sapien
agtgctttccattcgtgaaaacaca

SEQ ID NO: 4743759 - DNA, 25 bp, Homo sapien
ggtattcatccaagttaaatgtaga

SEQ ID NO: 4743760 - DNA, 25 bp, Homo sapien
gctgctacttatataattgccaaaa

SEQ ID NO: 4743761 - DNA, 25 bp, Homo sapien
tcggcagtcgcggagctgcttccca

SEQ ID NO: 4743762 - DNA, 25 bp, Homo sapien
tcgcccgctgcggaatggttcggaa

SEQ ID NO: 4743763 - DNA, 25 bp, Homo sapien
ccatgggcaagtcaggtgagcccgc

SEQ ID NO: 4743764 - DNA, 25 bp, Homo sapien
cagctgtcgctccttataaggcggg

SEQ ID NO: 4743765 - DNA, 25 bp, Homo sapien
cgcccgaccgggctatgtgactttg

SEQ ID NO: 4743766 - DNA, 25 bp, Homo sapien
cactgcgcccgaccgggctatgtga

SEQ ID NO: 4743767 - DNA, 25 bp, Homo sapien
tgactttgggccaatctttcaacct

SEQ ID NO: 4743768 - DNA, 25 bp, Homo sapien
tatgtgactttgggccaatctttca

SEQ ID NO: 4743769 - DNA, 25 bp, Homo sapien
caagcggccttggatggatgaagtc

SEQ ID NO: 4743770 - DNA, 25 bp, Homo sapien
gctacccctggtttctggagagttg

SEQ ID NO: 4743771 - DNA, 25 bp, Homo sapien
ccatcaggaacatggagcaggcagg

SEQ ID NO: 4743772 - DNA, 25 bp, Homo sapien
tgagggtgagcttactcagggcccc

SEQ ID NO: 4743773 - DNA, 25 bp, Homo sapien
gtggacactggatccaacggcagcc

SEQ ID NO: 4743774 - DNA, 25 bp, Homo sapien
gctgattggactagagtggacactg

SEQ ID NO: 4743775 - DNA, 25 bp, Homo sapien
agttttaagccatctgacccaccag

SEQ ID NO: 4743776 - DNA, 25 bp, Homo sapien
cgaagaagccagttattggaggtac

SEQ ID NO: 4743777 - DNA, 25 bp, Homo sapien
catcctgcaaccagggacccgatta

SEQ ID NO: 4743778 - DNA, 25 bp, Homo sapien
agaccttcatcatgtcactcctgac

SEQ ID NO: 4743779 - DNA, 25 bp, Homo sapien
gacccgattaacctcctaagcagca

SEQ ID NO: 4743780 - DNA, 25 bp, Homo sapien
caagttagtcacttccctactggga

SEQ ID NO: 4743781 - DNA, 25 bp, Homo sapien
tcaaagatatgtgcgttttttataa

SEQ ID NO: 4743782 - DNA, 25 bp, Homo sapien
tcttgtcccctgctgactacctctg

SEQ ID NO: 4743783 - DNA, 25 bp, Homo sapien
ttttgtcatcaaagatatgtgcgtt

SEQ ID NO: 4743784 - DNA, 25 bp, Homo sapien
cctgctgactacctctggaagcttc

SEQ ID NO: 4743785 - DNA, 25 bp, Homo sapien
tctggtggcccctgcataagcactc

SEQ ID NO: 4743786 - DNA, 25 bp, Homo sapien
actccccctcaacatgagcatgatt

SEQ ID NO: 4743787 - DNA, 25 bp, Homo sapien
tgagcatgattaactggaaccactg

SEQ ID NO: 4743788 - DNA, 25 bp, Homo sapien
taagcactccccctcaacatgagca

SEQ ID NO: 4743789 - DNA, 25 bp, Homo sapien
ccatgtagctattaacatctccctg

SEQ ID NO: 4743790 - DNA, 25 bp, Homo sapien
agtggcatgcctcttcagtaatcgg

SEQ ID NO: 4743791 - DNA, 25 bp, Homo sapien
tagctagtatcttggaagtccccag

SEQ ID NO: 4743792 - DNA, 25 bp, Homo sapien
tctagctccgaaaagacgtaatggc

SEQ ID NO: 4743793 - DNA, 25 bp, Homo sapien
caatcttctaataatcccgggaggg

SEQ ID NO: 4743794 - DNA, 25 bp, Homo sapien
cggatacacgggtagggcttccgct

SEQ ID NO: 4743795 - DNA, 25 bp, Homo sapien
ctctcccagtcggcaccacagcggt

SEQ ID NO: 4743796 - DNA, 25 bp, Homo sapien
cctctcccagtcggcaccacagcgg

SEQ ID NO: 4743797 - DNA, 25 bp, Homo sapien
tcctggcgcttgtcctcctctccca

SEQ ID NO: 4743798 - DNA, 25 bp, Homo sapien
cgagattgcgggcatcgagaacgac

SEQ ID NO: 4743799 - DNA, 25 bp, Homo sapien
ggcatcgagaacgacgaggccttcg

SEQ ID NO: 4743800 - DNA, 25 bp, Homo sapien
cgttggtgtccgtgccgttcagttg

SEQ ID NO: 4743801 - DNA, 25 bp, Homo sapien
cttggcgcagcaagagagcgagatt

SEQ ID NO: 4743802 - DNA, 25 bp, Homo sapien
tgtatataactaccaccactgcccg

SEQ ID NO: 4743803 - DNA, 25 bp, Homo sapien
tatgctatcctaaactgcttgagtg

SEQ ID NO: 4743804 - DNA, 25 bp, Homo sapien
taagtatctagtgaattccagctac

SEQ ID NO: 4743805 - DNA, 25 bp, Homo sapien
aattgaggttttaggcgggagctct

SEQ ID NO: 4743806 - DNA, 25 bp, Homo sapien
tagttgttgtagtaagtcaaggccc

SEQ ID NO: 4743807 - DNA, 25 bp, Homo sapien
gcagtgtcactaaggtagcaaggta

SEQ ID NO: 4743808 - DNA, 25 bp, Homo sapien
caaggtaataaatggctcaagtgca

SEQ ID NO: 4743809 - DNA, 25 bp, Homo sapien
tcaagtgcagcttcaaacgtaggtc

SEQ ID NO: 4743810 - DNA, 25 bp, Homo sapien
agcaacagacgatcccttggcttga

SEQ ID NO: 4743811 - DNA, 25 bp, Homo sapien
gaatgttagtgcagtaatacagtaa

SEQ ID NO: 4743812 - DNA, 25 bp, Homo sapien
tggaggagccttcagacagcatgtg

SEQ ID NO: 4743813 - DNA, 25 bp, Homo sapien
agatgtgggatgaggattgcttctt

SEQ ID NO: 4743814 - DNA, 25 bp, Homo sapien
tcagtccgtggtggttgtagcacac

SEQ ID NO: 4743815 - DNA, 25 bp, Homo sapien
tatgcaagacaggacgagcagctac

SEQ ID NO: 4743816 - DNA, 25 bp, Homo sapien
taacctgtaatggtgtgattcagcc

SEQ ID NO: 4743817 - DNA, 25 bp, Homo sapien
gccatcccaattgtagtgagcttag

SEQ ID NO: 4743818 - DNA, 25 bp, Homo sapien
gtggaagttcagatcggtaaagccg

SEQ ID NO: 4743819 - DNA, 25 bp, Homo sapien
tctgggtctgtgatgcgtcaataac

SEQ ID NO: 4743820 - DNA, 25 bp, Homo sapien
gaagtactgtagctgtgccgaccct

SEQ ID NO: 4743821 - DNA, 25 bp, Homo sapien
cagaatccgttgttctcagagggag

SEQ ID NO: 4743822 - DNA, 25 bp, Homo sapien
ctccctggcattcagagaggaggga

SEQ ID NO: 4743823 - DNA, 25 bp, Homo sapien
gtagcctcaacctgtgcttctgtgc

SEQ ID NO: 4743824 - DNA, 25 bp, Homo sapien
ggagggaagcttcccaagagtagcc

SEQ ID NO: 4743825 - DNA, 25 bp, Homo sapien
ctgtgcttctgtgcattattctgag

SEQ ID NO: 4743826 - DNA, 25 bp, Homo sapien
gagagattacaccaaagaacagatg

SEQ ID NO: 4743827 - DNA, 25 bp, Homo sapien
ggaatcaccatggaatgtctgaaca

SEQ ID NO: 4743828 - DNA, 25 bp, Homo sapien
gaacagatgtcccttcccagaacat

SEQ ID NO: 4743829 - DNA, 25 bp, Homo sapien
tgtctgaacaataaccaggccctgg

SEQ ID NO: 4743830 - DNA, 25 bp, Homo sapien
gatagggtcaaggatacattaagtc

SEQ ID NO: 4743831 - DNA, 25 bp, Homo sapien
aaatagaacacctgtcactagacca

SEQ ID NO: 4743832 - DNA, 25 bp, Homo sapien
tcattaaattcagctgatagggtca

SEQ ID NO: 4743833 - DNA, 25 bp, Homo sapien
taaagtttttggtggcctagagtga

SEQ ID NO: 4743834 - DNA, 25 bp, Homo sapien
tggtgcggtctcagttcactgccag

SEQ ID NO: 4743835 - DNA, 25 bp, Homo sapien
ctgcgcccagctggaaggattatta

SEQ ID NO: 4743836 - DNA, 25 bp, Homo sapien
gcgcccagctggaaggattattatt

SEQ ID NO: 4743837 - DNA, 25 bp, Homo sapien
cactgcgcccagctggaaggattat

SEQ ID NO: 4743838 - DNA, 25 bp, Homo sapien
agacaagaacttgattccactcagg

SEQ ID NO: 4743839 - DNA, 25 bp, Homo sapien
tgagctaaaatgacccctagtaaga

SEQ ID NO: 4743840 - DNA, 25 bp, Homo sapien
cccggcctggaaggattattaatgc

SEQ ID NO: 4743841 - DNA, 25 bp, Homo sapien
gatgaagtgatatcccaggcaaggc

SEQ ID NO: 4743842 - DNA, 25 bp, Homo sapien
gcctgctggcgaatgacgtctttga

SEQ ID NO: 4743843 - DNA, 25 bp, Homo sapien
ggtatggaggatgttcacaacccca

SEQ ID NO: 4743844 - DNA, 25 bp, Homo sapien
ctggccaggactccggagaggatca

SEQ ID NO: 4743845 - DNA, 25 bp, Homo sapien
tagatcctgcgtgttgtgtagtcca

SEQ ID NO: 4743846 - DNA, 25 bp, Homo sapien
tttcgcagcttggatgagatggagc

SEQ ID NO: 4743847 - DNA, 25 bp, Homo sapien
agatggagcgcacccacagcctcat

SEQ ID NO: 4743848 - DNA, 25 bp, Homo sapien
tgggccttcgcattgccaagtttcg

SEQ ID NO: 4743849 - DNA, 25 bp, Homo sapien
gcattgccaagtttcgcagcttgga

SEQ ID NO: 4743850 - DNA, 25 bp, Homo sapien
aacagagtgagaaggaaaagcagtc

SEQ ID NO: 4743851 - DNA, 25 bp, Homo sapien
gagtgagaaggaaaagcagtcacta

SEQ ID NO: 4743852 - DNA, 25 bp, Homo sapien
ctgaacagagtgagaaggaaaagca

SEQ ID NO: 4743853 - DNA, 25 bp, Homo sapien
gtgagaaggaaaagcagtcactaat

SEQ ID NO: 4743854 - DNA, 25 bp, Homo sapien
ctctctcatagggggcaccaccagg

SEQ ID NO: 4743855 - DNA, 25 bp, Homo sapien
tctctcatagggggcaccaccaggc

SEQ ID NO: 4743856 - DNA, 25 bp, Homo sapien
ttgcttcctgtcccatacacccatc

SEQ ID NO: 4743857 - DNA, 25 bp, Homo sapien
tcagtgttcagctgtctttggaatt

SEQ ID NO: 4743858 - DNA, 25 bp, Homo sapien
gttcagctgtctttggaatttccac

SEQ ID NO: 4743859 - DNA, 25 bp, Homo sapien
cagtgttcagctgtctttggaattt

SEQ ID NO: 4743860 - DNA, 25 bp, Homo sapien
gtgttcagctgtctttggaatttcc

SEQ ID NO: 4743861 - DNA, 25 bp, Homo sapien
tttgaagtacttgtctactatttgg

SEQ ID NO: 4743862 - DNA, 25 bp, Homo sapien
tatttggttacttaattcctcgaga

SEQ ID NO: 4743863 - DNA, 25 bp, Homo sapien
aattcctcgagagagggacaccaac

SEQ ID NO: 4743864 - DNA, 25 bp, Homo sapien
gaagtacttgtctactatttggtta

SEQ ID NO: 4743865 - DNA, 25 bp, Homo sapien
catccagagacacaacaaggtggcc

SEQ ID NO: 4743866 - DNA, 25 bp, Homo sapien
tccagaggcgtatgcttcaatgcac

SEQ ID NO: 4743867 - DNA, 25 bp, Homo sapien
gcttccgtggatcaattcatgctga

SEQ ID NO: 4743868 - DNA, 25 bp, Homo sapien
tgcagcacagaaggagcttccgtgg

SEQ ID NO: 4743869 - DNA, 25 bp, Homo sapien
caaatttcctttccgccagggcagc

SEQ ID NO: 4743870 - DNA, 25 bp, Homo sapien
ctgtgcctgtgataagtgtaacaaa

SEQ ID NO: 4743871 - DNA, 25 bp, Homo sapien
gccaaatttcctttccgccagggca

SEQ ID NO: 4743872 - DNA, 25 bp, Homo sapien
tgcctgtgataagtgtaacaaagtt

SEQ ID NO: 4743873 - DNA, 25 bp, Homo sapien
tttacacggccacctgtggaaatgc

SEQ ID NO: 4743874 - DNA, 25 bp, Homo sapien
agcacaattccttcccgaggattta

SEQ ID NO: 4743875 - DNA, 25 bp, Homo sapien
agtttggttgaatgcagcacaattc

SEQ ID NO: 4743876 - DNA, 25 bp, Homo sapien
gggtcctaaggtccacagagttcca

SEQ ID NO: 4743877 - DNA, 25 bp, Homo sapien
aagtatgctgactttcttgtcttaa

SEQ ID NO: 4743878 - DNA, 25 bp, Homo sapien
agaacacagattcattcaccccaga

SEQ ID NO: 4743879 - DNA, 25 bp, Homo sapien
gatctcctaagacaaacgttaccaa

SEQ ID NO: 4743880 - DNA, 25 bp, Homo sapien
gcaatctcaggaaagtatgctgact

SEQ ID NO: 4743881 - DNA, 25 bp, Homo sapien
caaaattctgcagttcagttttaca

SEQ ID NO: 4743882 - DNA, 25 bp, Homo sapien
gattgaactgagtatacttcttaac

SEQ ID NO: 4743883 - DNA, 25 bp, Homo sapien
aattctgcagttcagttttacagct

SEQ ID NO: 4743884 - DNA, 25 bp, Homo sapien
cataggttttaggattgaactgagt

SEQ ID NO: 4743885 - DNA, 25 bp, Homo sapien
gccaaggcacttagagtttcaagaa

SEQ ID NO: 4743886 - DNA, 25 bp, Homo sapien
tattgcaactcggaggttcgtcccg

SEQ ID NO: 4743887 - DNA, 25 bp, Homo sapien
ggaacagcatttccatccccatata

SEQ ID NO: 4743888 - DNA, 25 bp, Homo sapien
gagatattctccttcacaggaggaa

SEQ ID NO: 4743889 - DNA, 25 bp, Homo sapien
ttgggtgtcagcatcccggacatga

SEQ ID NO: 4743890 - DNA, 25 bp, Homo sapien
tcccggacatgaagaacattctccc

SEQ ID NO: 4743891 - DNA, 25 bp, Homo sapien
gtttaccaaactgaaggtgcagtgc

SEQ ID NO: 4743892 - DNA, 25 bp, Homo sapien
gtactgtttaccaaactgaaggtgc

SEQ ID NO: 4743893 - DNA, 25 bp, Homo sapien
gttcccaggttgatcacaggtgttc

SEQ ID NO: 4743894 - DNA, 25 bp, Homo sapien
cagcatgggcaaccaactgtataaa

SEQ ID NO: 4743895 - DNA, 25 bp, Homo sapien
tcaaatgggacgtgtttaactgcac

SEQ ID NO: 4743896 - DNA, 25 bp, Homo sapien
tcttccaatctgacgtgttcccagg

SEQ ID NO: 4743897 - DNA, 25 bp, Homo sapien
tcgattcagttgaaagcccctcttt

SEQ ID NO: 4743898 - DNA, 25 bp, Homo sapien
gcttcgataatccattttccggagg

SEQ ID NO: 4743899 - DNA, 25 bp, Homo sapien
ttggcttaaggcttcgataatccat

SEQ ID NO: 4743900 - DNA, 25 bp, Homo sapien
tactattccaagattcaggtttcga

SEQ ID NO: 4743901 - DNA, 25 bp, Homo sapien
tatagcaaaattggtaatcctttga

SEQ ID NO: 4743902 - DNA, 25 bp, Homo sapien
taaacatgagactaaagtagacagt

SEQ ID NO: 4743903 - DNA, 25 bp, Homo sapien
gcatttcagaatagagtgcccttca

SEQ ID NO: 4743904 - DNA, 25 bp, Homo sapien
tactggacttggcaaaaacattaca

SEQ ID NO: 4743905 - DNA, 25 bp, Homo sapien
tgtagtgcaacaatgtaatctttag

SEQ ID NO: 4743906 - DNA, 25 bp, Homo sapien
actagggtccgcttgttaaatgaga

SEQ ID NO: 4743907 - DNA, 25 bp, Homo sapien
ctgcgtcaatatttggaaacaggac

SEQ ID NO: 4743908 - DNA, 25 bp, Homo sapien
aagtgcatccaatgttaattcaaac

SEQ ID NO: 4743909 - DNA, 25 bp, Homo sapien
caccagcattatctagacgatccct

SEQ ID NO: 4743910 - DNA, 25 bp, Homo sapien
ctgaagagacagaaggttgttccac

SEQ ID NO: 4743911 - DNA, 25 bp, Homo sapien
aagagacagaaggttgttccaccag

SEQ ID NO: 4743912 - DNA, 25 bp, Homo sapien
gacgatcccttgataattacaaatc

SEQ ID NO: 4743913 - DNA, 25 bp, Homo sapien
tcaggcgattaaggacatctggcag

SEQ ID NO: 4743914 - DNA, 25 bp, Homo sapien
aagtttgtcataggaagggcagcct

SEQ ID NO: 4743915 - DNA, 25 bp, Homo sapien
tgccaaaaggatgcgatcatggtcc

SEQ ID NO: 4743916 - DNA, 25 bp, Homo sapien
caatcatgatatcaggcttcaggcg

SEQ ID NO: 4743917 - DNA, 25 bp, Homo sapien
ttacaagtagcaacacaaacccgca

SEQ ID NO: 4743918 - DNA, 25 bp, Homo sapien
gaataatctgcacggttacaagtag

SEQ ID NO: 4743919 - DNA, 25 bp, Homo sapien
gagccaagtaccacaacatcaagtt

SEQ ID NO: 4743920 - DNA, 25 bp, Homo sapien
tagtcatctatcaggtgagagccaa

SEQ ID NO: 4743921 - DNA, 25 bp, Homo sapien
ttgagaggttcttaaaatagagttc

SEQ ID NO: 4743922 - DNA, 25 bp, Homo sapien
cacggcggagccctgaattgggcca

SEQ ID NO: 4743923 - DNA, 25 bp, Homo sapien
caaagaggtgccctatggtgaggcc

SEQ ID NO: 4743924 - DNA, 25 bp, Homo sapien
acattgggcgagagccgggtccagt

SEQ ID NO: 4743925 - DNA, 25 bp, Homo sapien
gcctgcaggacattgggcgagagcc

SEQ ID NO: 4743926 - DNA, 25 bp, Homo sapien
ctcccggagtcccacgccgccgcgc

SEQ ID NO: 4743927 - DNA, 25 bp, Homo sapien
cccggagtcccacgccgccgcgcgg

SEQ ID NO: 4743928 - DNA, 25 bp, Homo sapien
ctctcccggagtcccacgccgccgc

SEQ ID NO: 4743929 - DNA, 25 bp, Homo sapien
gctctcccggagtcccacgccgccg

SEQ ID NO: 4743930 - DNA, 25 bp, Homo sapien
ccaccgcgctcctcgggcgagggac

SEQ ID NO: 4743931 - DNA, 25 bp, Homo sapien
agggacgaaccaagcgccacgaagc

SEQ ID NO: 4743932 - DNA, 25 bp, Homo sapien
cgaaccaagcgccacgaagcaggca

SEQ ID NO: 4743933 - DNA, 25 bp, Homo sapien
ctcctcgggcgagggacgaaccaag

SEQ ID NO: 4743934 - DNA, 25 bp, Homo sapien
ggcggtattttgaggcgcaggcagg

SEQ ID NO: 4743935 - DNA, 25 bp, Homo sapien
ccggcggtattttgaggcgcaggca

SEQ ID NO: 4743936 - DNA, 25 bp, Homo sapien
cggcggtattttgaggcgcaggcag

SEQ ID NO: 4743937 - DNA, 25 bp, Homo sapien
cccggcggtattttgaggcgcaggc

SEQ ID NO: 4743938 - DNA, 25 bp, Homo sapien
actatactgtcgtgtagcgcggcca

SEQ ID NO: 4743939 - DNA, 25 bp, Homo sapien
ttatttcataaaccaggaccgcaac

SEQ ID NO: 4743940 - DNA, 25 bp, Homo sapien
tccctgacgttaacccttgccgtga

SEQ ID NO: 4743941 - DNA, 25 bp, Homo sapien
agcccgagtcttcccgctgggtagt

SEQ ID NO: 4743942 - DNA, 25 bp, Homo sapien
gaattgatgaccaaggcatggcaga

SEQ ID NO: 4743943 - DNA, 25 bp, Homo sapien
tgaattgatgaccaaggcatggcag

SEQ ID NO: 4743944 - DNA, 25 bp, Homo sapien
ttgatgaccaaggcatggcagagcc

SEQ ID NO: 4743945 - DNA, 25 bp, Homo sapien
aagacactggtggagtgtgaattga

SEQ ID NO: 4743946 - DNA, 25 bp, Homo sapien
agccagtcccgaggcctagggacat

SEQ ID NO: 4743947 - DNA, 25 bp, Homo sapien
ttataatcagttcagcggcggcctc

SEQ ID NO: 4743948 - DNA, 25 bp, Homo sapien
ggcggcctccactacagggaactcc

SEQ ID NO: 4743949 - DNA, 25 bp, Homo sapien
ggcctccactacagggaactcccag

SEQ ID NO: 4743950 - DNA, 25 bp, Homo sapien
cctagttaggaaggtgaccgcatcc

SEQ ID NO: 4743951 - DNA, 25 bp, Homo sapien
ataaagccaggcattccagccggca

SEQ ID NO: 4743952 - DNA, 25 bp, Homo sapien
tgtaccgtgtttgttaccgctcaag

SEQ ID NO: 4743953 - DNA, 25 bp, Homo sapien
aagctaagctttcgctcgttgtcca

SEQ ID NO: 4743954 - DNA, 25 bp, Homo sapien
aagctatcctctcccctcagccacc

SEQ ID NO: 4743955 - DNA, 25 bp, Homo sapien
ctatcctctcccctcagccacctga

SEQ ID NO: 4743956 - DNA, 25 bp, Homo sapien
ctaggttcaagctatcctctcccct

SEQ ID NO: 4743957 - DNA, 25 bp, Homo sapien
taggttcaagctatcctctcccctc

SEQ ID NO: 4743958 - DNA, 25 bp, Homo sapien
gttggtcactgccttattcttgaga

SEQ ID NO: 4743959 - DNA, 25 bp, Homo sapien
tatttagcggtgctttcctggccac

SEQ ID NO: 4743960 - DNA, 25 bp, Homo sapien
tgcccatgtacctagtcttctctgc

SEQ ID NO: 4743961 - DNA, 25 bp, Homo sapien
tgggcttgcaagacacctgatttcc

SEQ ID NO: 4743962 - DNA, 25 bp, Homo sapien
gaagcacgagctctgtaccctagtg

SEQ ID NO: 4743963 - DNA, 25 bp, Homo sapien
tgactccctctgcagataaccatag

SEQ ID NO: 4743964 - DNA, 25 bp, Homo sapien
ataggtttccatcccgaagcacgag

SEQ ID NO: 4743965 - DNA, 25 bp, Homo sapien
cttgaaagcatgactccctctgcag

SEQ ID NO: 4743966 - DNA, 25 bp, Homo sapien
tttcagctctaatatcccacacaca

SEQ ID NO: 4743967 - DNA, 25 bp, Homo sapien
tatcccacacacaggtatccttgca

SEQ ID NO: 4743968 - DNA, 25 bp, Homo sapien
atatcccacacacaggtatccttgc

SEQ ID NO: 4743969 - DNA, 25 bp, Homo sapien
tacatttcagctctaatatcccaca

SEQ ID NO: 4743970 - DNA, 25 bp, Homo sapien
gactacaatacgatcgtgatcaaat

SEQ ID NO: 4743971 - DNA, 25 bp, Homo sapien
gagagactacaatacgatcgtgatc

SEQ ID NO: 4743972 - DNA, 25 bp, Homo sapien
ttgagagactacaatacgatcgtga

SEQ ID NO: 4743973 - DNA, 25 bp, Homo sapien
gtacaactttggtgcagtttcaggg

SEQ ID NO: 4743974 - DNA, 25 bp, Homo sapien
gacgctttgcgccataaaactttcc

SEQ ID NO: 4743975 - DNA, 25 bp, Homo sapien
ccctactctatgtattcacaaggag

SEQ ID NO: 4743976 - DNA, 25 bp, Homo sapien
tttagcaggacgctttgcgccataa

SEQ ID NO: 4743977 - DNA, 25 bp, Homo sapien
agttacggcgctcccctactctatg

SEQ ID NO: 4743978 - DNA, 25 bp, Homo sapien
tcccgatcatagcacacttcatccg

SEQ ID NO: 4743979 - DNA, 25 bp, Homo sapien
ccgatcatagcacacttcatccgcc

SEQ ID NO: 4743980 - DNA, 25 bp, Homo sapien
gatcatagcacacttcatccgcctt

SEQ ID NO: 4743981 - DNA, 25 bp, Homo sapien
ttcccgatcatagcacacttcatcc

SEQ ID NO: 4743982 - DNA, 25 bp, Homo sapien
atttaaatttctctttactggacat

SEQ ID NO: 4743983 - DNA, 25 bp, Homo sapien
cctcccagagcatttcttggaaaat

SEQ ID NO: 4743984 - DNA, 25 bp, Homo sapien
cacctcccagagcatttcttggaaa

SEQ ID NO: 4743985 - DNA, 25 bp, Homo sapien
ctcccagagcatttcttggaaaatt

SEQ ID NO: 4743986 - DNA, 25 bp, Homo sapien
ccacctcccagagcatttcttggaa

SEQ ID NO: 4743987 - DNA, 25 bp, Homo sapien
ctgcaaaattgacagggacttctgg

SEQ ID NO: 4743988 - DNA, 25 bp, Homo sapien
caaaattgacagggacttctgggtt

SEQ ID NO: 4743989 - DNA, 25 bp, Homo sapien
gcaaaattgacagggacttctgggt

SEQ ID NO: 4743990 - DNA, 25 bp, Homo sapien
tgcaaaattgacagggacttctggg

SEQ ID NO: 4743991 - DNA, 25 bp, Homo sapien
tgccctgtggtttcttggggtcacc

SEQ ID NO: 4743992 - DNA, 25 bp, Homo sapien
acatcttgccctgtggtttcttggg

SEQ ID NO: 4743993 - DNA, 25 bp, Homo sapien
catgtctgcacagagaaggcataag

SEQ ID NO: 4743994 - DNA, 25 bp, Homo sapien
taagcagacatcttgccctgtggtt

SEQ ID NO: 4743995 - DNA, 25 bp, Homo sapien
tcactagtctgggtagcgcagggca

SEQ ID NO: 4743996 - DNA, 25 bp, Homo sapien
tgttcactagtctgggtagcgcagg

SEQ ID NO: 4743997 - DNA, 25 bp, Homo sapien
cactagtctgggtagcgcagggcat

SEQ ID NO: 4743998 - DNA, 25 bp, Homo sapien
gtattgttcactagtctgggtagcg

SEQ ID NO: 4743999 - DNA, 25 bp, Homo sapien
gatagagtcattatgagctgcgccg

SEQ ID NO: 4744000 - DNA, 25 bp, Homo sapien
cccctgtgaggtcggccagggactt

SEQ ID NO: 4744001 - DNA, 25 bp, Homo sapien
tcccgagggcctcagcggatagagt

SEQ ID NO: 4744002 - DNA, 25 bp, Homo sapien
tagcgttgcagatcagcagcaggga

SEQ ID NO: 4744003 - DNA, 25 bp, Homo sapien
cagactcctaggtgtggaccattgg

SEQ ID NO: 4744004 - DNA, 25 bp, Homo sapien
tatttagccagactagtgggtcctg

SEQ ID NO: 4744005 - DNA, 25 bp, Homo sapien
tagagtatctcaagaggaatccacc

SEQ ID NO: 4744006 - DNA, 25 bp, Homo sapien
cccatgtgtagaccaagaactagac

SEQ ID NO: 4744007 - DNA, 25 bp, Homo sapien
taaatgcctctgtcataagacatgg

SEQ ID NO: 4744008 - DNA, 25 bp, Homo sapien
catgggtacttagcagtaaatgcct

SEQ ID NO: 4744009 - DNA, 25 bp, Homo sapien
cataagacatggtgttaagttttgg

SEQ ID NO: 4744010 - DNA, 25 bp, Homo sapien
aaacacaagtactcttctacgtatg

SEQ ID NO: 4744011 - DNA, 25 bp, Homo sapien
catttattaccaacaaccctctcaa

SEQ ID NO: 4744012 - DNA, 25 bp, Homo sapien
gcattactagtaactttcataaaaa

SEQ ID NO: 4744013 - DNA, 25 bp, Homo sapien
catacatttattaccaacaaccctc

SEQ ID NO: 4744014 - DNA, 25 bp, Homo sapien
ttgcactacttagtaaagcattact

SEQ ID NO: 4744015 - DNA, 25 bp, Homo sapien
tgaggtaaccaaatgtaccaacagg

SEQ ID NO: 4744016 - DNA, 25 bp, Homo sapien
tctgaaacggcaaaatgaggtaacc

SEQ ID NO: 4744017 - DNA, 25 bp, Homo sapien
tgaaaaggcccaaagataatctgtg

SEQ ID NO: 4744018 - DNA, 25 bp, Homo sapien
tctcacaagtgagtcggtagatctc

SEQ ID NO: 4744019 - DNA, 25 bp, Homo sapien
agatttgaccaaaacagaccctgct

SEQ ID NO: 4744020 - DNA, 25 bp, Homo sapien
caatggctgggcacaaataaacttc

SEQ ID NO: 4744021 - DNA, 25 bp, Homo sapien
tgagccccatgcaaagacaagacat

SEQ ID NO: 4744022 - DNA, 25 bp, Homo sapien
tcactagagtgcaacaacgaaattc

SEQ ID NO: 4744023 - DNA, 25 bp, Homo sapien
ttctgatgcactgacaaccctaggg

SEQ ID NO: 4744024 - DNA, 25 bp, Homo sapien
tagacacttcaagggagggcaagca

SEQ ID NO: 4744025 - DNA, 25 bp, Homo sapien
aaaccagggaatgttagtgcacaca

SEQ ID NO: 4744026 - DNA, 25 bp, Homo sapien
ggcaacaatgtctcgcaaagggcaa

SEQ ID NO: 4744027 - DNA, 25 bp, Homo sapien
tagtccgtatatacatgtgatgagg

SEQ ID NO: 4744028 - DNA, 25 bp, Homo sapien
tcaatggatagtccgtatatacatg

SEQ ID NO: 4744029 - DNA, 25 bp, Homo sapien
tggatagtccgtatatacatgtgat

SEQ ID NO: 4744030 - DNA, 25 bp, Homo sapien
acacccaaactaaatttgtgcttct

SEQ ID NO: 4744031 - DNA, 25 bp, Homo sapien
acttctgaagcatcagctcggcaaa

SEQ ID NO: 4744032 - DNA, 25 bp, Homo sapien
attctgaatcccgatgcacttctga

SEQ ID NO: 4744033 - DNA, 25 bp, Homo sapien
tgaatcccgatgcacttctgaagca

SEQ ID NO: 4744034 - DNA, 25 bp, Homo sapien
gctcggcaaattgggcaagtacgat

SEQ ID NO: 4744035 - DNA, 25 bp, Homo sapien
cagggttaaaccctgttgcccacag

SEQ ID NO: 4744036 - DNA, 25 bp, Homo sapien
ttaccattgaccagtttggaccaag

SEQ ID NO: 4744037 - DNA, 25 bp, Homo sapien
cagaaaacatttagtggtaccgagg

SEQ ID NO: 4744038 - DNA, 25 bp, Homo sapien
aggtgactgactctatactgatagc

SEQ ID NO: 4744039 - DNA, 25 bp, Homo sapien
gctacattgagccatgactgtaccg

SEQ ID NO: 4744040 - DNA, 25 bp, Homo sapien
aggctacattgagccatgactgtac

SEQ ID NO: 4744041 - DNA, 25 bp, Homo sapien
acattgagccatgactgtaccgctg

SEQ ID NO: 4744042 - DNA, 25 bp, Homo sapien
tacattgagccatgactgtaccgct

SEQ ID NO: 4744043 - DNA, 25 bp, Homo sapien
catactgattgtcaagaggtcatcc

SEQ ID NO: 4744044 - DNA, 25 bp, Homo sapien
aactctcaaactgtggcctagcaag

SEQ ID NO: 4744045 - DNA, 25 bp, Homo sapien
aataatttcactctggcatagccac

SEQ ID NO: 4744046 - DNA, 25 bp, Homo sapien
gggccttgtccctatataccatgaa

SEQ ID NO: 4744047 - DNA, 25 bp, Homo sapien
ttgactcaaaatcacacatgcatac

SEQ ID NO: 4744048 - DNA, 25 bp, Homo sapien
tacagggtaagactctaagtagctg

SEQ ID NO: 4744049 - DNA, 25 bp, Homo sapien
cacttggcatggaactcgtggttac

SEQ ID NO: 4744050 - DNA, 25 bp, Homo sapien
catggaactcgtggttacagggtaa

SEQ ID NO: 4744051 - DNA, 25 bp, Homo sapien
tggttgttaggattgaaccgataag

SEQ ID NO: 4744052 - DNA, 25 bp, Homo sapien
tatctgctttagtcagtccacgagg

SEQ ID NO: 4744053 - DNA, 25 bp, Homo sapien
gaaggaagttgttcaatatctgctt

SEQ ID NO: 4744054 - DNA, 25 bp, Homo sapien
gtcgctctgccaggtttaacagggc

SEQ ID NO: 4744055 - DNA, 25 bp, Homo sapien
aattcaaagctgaaagttgggccca

SEQ ID NO: 4744056 - DNA, 25 bp, Homo sapien
tctaattcaaagctgaaagttgggc

SEQ ID NO: 4744057 - DNA, 25 bp, Homo sapien
ctgaaagttgggcccactgcaggtg

SEQ ID NO: 4744058 - DNA, 25 bp, Homo sapien
gaaagttgggcccactgcaggtggc

SEQ ID NO: 4744059 - DNA, 25 bp, Homo sapien
ggctgctgggatcggtatctactac

SEQ ID NO: 4744060 - DNA, 25 bp, Homo sapien
gcctccgaggcataaatggaggata

SEQ ID NO: 4744061 - DNA, 25 bp, Homo sapien
tacgtcctgtaagcctccgaggcat

SEQ ID NO: 4744062 - DNA, 25 bp, Homo sapien
ggtatctactacgtcctgtaagcct

SEQ ID NO: 4744063 - DNA, 25 bp, Homo sapien
acctcctgatgcaaaggatcatgtg

SEQ ID NO: 4744064 - DNA, 25 bp, Homo sapien
ggtgggctgatggagggtaagtaaa

SEQ ID NO: 4744065 - DNA, 25 bp, Homo sapien
tgcaaaggatcatgtgttaagaact

SEQ ID NO: 4744066 - DNA, 25 bp, Homo sapien
tactccaaaggacacctcctgatgc

SEQ ID NO: 4744067 - DNA, 25 bp, Homo sapien
aagatgttctcctaagagttccact

SEQ ID NO: 4744068 - DNA, 25 bp, Homo sapien
cttcattttctatcctttgcagagg

SEQ ID NO: 4744069 - DNA, 25 bp, Homo sapien
ctggaagatgttctcctaagagttc

SEQ ID NO: 4744070 - DNA, 25 bp, Homo sapien
ctcctaagagttccacttcattttc

SEQ ID NO: 4744071 - DNA, 25 bp, Homo sapien
catagtaacttaggcattcgtctgg

SEQ ID NO: 4744072 - DNA, 25 bp, Homo sapien
ccagaagaatgcctaagttattacg

SEQ ID NO: 4744073 - DNA, 25 bp, Homo sapien
tatacctggcctaaacattctgaaa

SEQ ID NO: 4744074 - DNA, 25 bp, Homo sapien
aatccactaaggttatatacctggc

SEQ ID NO: 4744075 - DNA, 25 bp, Homo sapien
tgaggaggatgtataagaaatggat

SEQ ID NO: 4744076 - DNA, 25 bp, Homo sapien
catatggtactggtaagtgctgaac

SEQ ID NO: 4744077 - DNA, 25 bp, Homo sapien
cgatcgtgattgctgtgtttggaaa

SEQ ID NO: 4744078 - DNA, 25 bp, Homo sapien
agaaatggatcactagaaataaggg

SEQ ID NO: 4744079 - DNA, 25 bp, Homo sapien
aaatatatccggttataaagctaat

SEQ ID NO: 4744080 - DNA, 25 bp, Homo sapien
ttacttgaaagtgaaactacaaaga

SEQ ID NO: 4744081 - DNA, 25 bp, Homo sapien
tataatgcagttagcccctctaaag

SEQ ID NO: 4744082 - DNA, 25 bp, Homo sapien
ccctcaggatatccaaatatatgta

SEQ ID NO: 4744083 - DNA, 25 bp, Homo sapien
agagtggaatcccatgtggtgccac

SEQ ID NO: 4744084 - DNA, 25 bp, Homo sapien
tggaggaggcacactacagacaggg

SEQ ID NO: 4744085 - DNA, 25 bp, Homo sapien
cctgctgtgtactacaagcagggat

SEQ ID NO: 4744086 - DNA, 25 bp, Homo sapien
agaaacagggactgttccttgatgg

SEQ ID NO: 4744087 - DNA, 25 bp, Homo sapien
tatgccattacgttgaatatcacgg

SEQ ID NO: 4744088 - DNA, 25 bp, Homo sapien
ccttcaaccccataagacaggattg

SEQ ID NO: 4744089 - DNA, 25 bp, Homo sapien
aaactgtggttctgttataatgaca

SEQ ID NO: 4744090 - DNA, 25 bp, Homo sapien
ccgtgcctgacctatattaagactt

SEQ ID NO: 4744091 - DNA, 25 bp, Homo sapien
tcctttgagtgttgagtcggtgctc

SEQ ID NO: 4744092 - DNA, 25 bp, Homo sapien
tgtgttagcaaactagaaccttcaa

SEQ ID NO: 4744093 - DNA, 25 bp, Homo sapien
gggtgtccaacctgaataaggttca

SEQ ID NO: 4744094 - DNA, 25 bp, Homo sapien
taaggttcaacccaactatcatctt

SEQ ID NO: 4744095 - DNA, 25 bp, Homo sapien
aatccctatgggttaactgcaagac

SEQ ID NO: 4744096 - DNA, 25 bp, Homo sapien
tgtgttacaactactgcttggctga

SEQ ID NO: 4744097 - DNA, 25 bp, Homo sapien
gacatatgatgcacagcacaagcaa

SEQ ID NO: 4744098 - DNA, 25 bp, Homo sapien
cacgtctggccagattgtatagcca

SEQ ID NO: 4744099 - DNA, 25 bp, Homo sapien
cagccctcaaaccattaaaccatag

SEQ ID NO: 4744100 - DNA, 25 bp, Homo sapien
aagcaaatcccaggaccctatcatt

SEQ ID NO: 4744101 - DNA, 25 bp, Homo sapien
taaaccatagccaatccacctgaat

SEQ ID NO: 4744102 - DNA, 25 bp, Homo sapien
catgcagtcacgttcaaaattccaa

SEQ ID NO: 4744103 - DNA, 25 bp, Homo sapien
tattttacgcaggaagggtctccta

SEQ ID NO: 4744104 - DNA, 25 bp, Homo sapien
ctttctaggcccctgaggtacccat

SEQ ID NO: 4744105 - DNA, 25 bp, Homo sapien
taacaattacctaagatgcttcggg

SEQ ID NO: 4744106 - DNA, 25 bp, Homo sapien
gctcagtcttatcctagtgaccaga

SEQ ID NO: 4744107 - DNA, 25 bp, Homo sapien
tatgatctagaatagtttaaattcg

SEQ ID NO: 4744108 - DNA, 25 bp, Homo sapien
tcatgagggaaactagtcaacagct

SEQ ID NO: 4744109 - DNA, 25 bp, Homo sapien
tcttttaatacaccactagctatgg

SEQ ID NO: 4744110 - DNA, 25 bp, Homo sapien
gaagctatctttttctatgatctag

SEQ ID NO: 4744111 - DNA, 25 bp, Homo sapien
atgtcaaccatgactgcattctgct

SEQ ID NO: 4744112 - DNA, 25 bp, Homo sapien
caggatgtagcagacggggagatac

SEQ ID NO: 4744113 - DNA, 25 bp, Homo sapien
tagcagacggggagatacattcgga

SEQ ID NO: 4744114 - DNA, 25 bp, Homo sapien
tcaaccatgactgcattctgctggg

SEQ ID NO: 4744115 - DNA, 25 bp, Homo sapien
ctcgaggctcctctattgcttgctg

SEQ ID NO: 4744116 - DNA, 25 bp, Homo sapien
gcgtaagggagatggtgatagtttt

SEQ ID NO: 4744117 - DNA, 25 bp, Homo sapien
tgcgtaagggagatggtgatagttt

SEQ ID NO: 4744118 - DNA, 25 bp, Homo sapien
ctgtgcgtaagggagatggtgatag

SEQ ID NO: 4744119 - DNA, 25 bp, Homo sapien
tgtgcgtaagggagatggtgatagt

SEQ ID NO: 4744120 - DNA, 25 bp, Homo sapien
catcttgactaatggaattatgtcg

SEQ ID NO: 4744121 - DNA, 25 bp, Homo sapien
gactaatggaattatgtcgagacag

SEQ ID NO: 4744122 - DNA, 25 bp, Homo sapien
tgtcgagacagacgatcccttcttc

SEQ ID NO: 4744123 - DNA, 25 bp, Homo sapien
gaattatgtcgagacagacgatccc

SEQ ID NO: 4744124 - DNA, 25 bp, Homo sapien
atctggcaatatgcttataggtaac

SEQ ID NO: 4744125 - DNA, 25 bp, Homo sapien
gaaatcctgctagattattgttaaa

SEQ ID NO: 4744126 - DNA, 25 bp, Homo sapien
ctctgtaactgaaatcctgctagat

SEQ ID NO: 4744127 - DNA, 25 bp, Homo sapien
gagaaaatctggcaatatgcttata

SEQ ID NO: 4744128 - DNA, 25 bp, Homo sapien
ttcttctgttgcgtgcaggtgtgtt

SEQ ID NO: 4744129 - DNA, 25 bp, Homo sapien
tcttctgttgcgtgcaggtgtgttg

SEQ ID NO: 4744130 - DNA, 25 bp, Homo sapien
cttctgttgcgtgcaggtgtgttgc

SEQ ID NO: 4744131 - DNA, 25 bp, Homo sapien
cttcttctgttgcgtgcaggtgtgt

SEQ ID NO: 4744132 - DNA, 25 bp, Homo sapien
gaagggggctgcctatttgatgtca

SEQ ID NO: 4744133 - DNA, 25 bp, Homo sapien
tgatgttggcttggtcgaactgaag

SEQ ID NO: 4744134 - DNA, 25 bp, Homo sapien
gcctatttgatgtcatctcccatgg

SEQ ID NO: 4744135 - DNA, 25 bp, Homo sapien
aagtgatgttggcttggtcgaactg

SEQ ID NO: 4744136 - DNA, 25 bp, Homo sapien
ctgaatgagagaggcgctgtctctt

SEQ ID NO: 4744137 - DNA, 25 bp, Homo sapien
tcttaggacttggactatcttcact

SEQ ID NO: 4744138 - DNA, 25 bp, Homo sapien
ggtgatgctgatgtataatcaaaga

SEQ ID NO: 4744139 - DNA, 25 bp, Homo sapien
tgatgctgatgtataatcaaagact

SEQ ID NO: 4744140 - DNA, 25 bp, Homo sapien
tcagagggctccgagaaaaatgccc

SEQ ID NO: 4744141 - DNA, 25 bp, Homo sapien
tgacagaagtaacccagagagtaca

SEQ ID NO: 4744142 - DNA, 25 bp, Homo sapien
tgcgctgggccaataagtttacttt

SEQ ID NO: 4744143 - DNA, 25 bp, Homo sapien
caaaggtgctccttacatagcagaa

SEQ ID NO: 4744144 - DNA, 25 bp, Homo sapien
ctatgtagggaaagggtaaatatat

SEQ ID NO: 4744145 - DNA, 25 bp, Homo sapien
ttcagccctatgtagggaaagggta

SEQ ID NO: 4744146 - DNA, 25 bp, Homo sapien
tcagccctatgtagggaaagggtaa

SEQ ID NO: 4744147 - DNA, 25 bp, Homo sapien
tatgtagggaaagggtaaatatata

SEQ ID NO: 4744148 - DNA, 25 bp, Homo sapien
tcttgaacggtagtgttctgatcac

SEQ ID NO: 4744149 - DNA, 25 bp, Homo sapien
agtgttctgatcacttgggaggaga

SEQ ID NO: 4744150 - DNA, 25 bp, Homo sapien
gaagaaagctttgaagtgagcatcc

SEQ ID NO: 4744151 - DNA, 25 bp, Homo sapien
tgaagtgagcatcctcttgaacggt

SEQ ID NO: 4744152 - DNA, 25 bp, Homo sapien
agatgctgaattggccccgggagat

SEQ ID NO: 4744153 - DNA, 25 bp, Homo sapien
tcacaaatcaccttgttaggatggc

SEQ ID NO: 4744154 - DNA, 25 bp, Homo sapien
tagagatgctgaattggccccggga

SEQ ID NO: 4744155 - DNA, 25 bp, Homo sapien
acaaatcaccttgttaggatggcca

SEQ ID NO: 4744156 - DNA, 25 bp, Homo sapien
tttctgctttgctatggacctggta

SEQ ID NO: 4744157 - DNA, 25 bp, Homo sapien
aactgtgcccactggtaagagtaaa

SEQ ID NO: 4744158 - DNA, 25 bp, Homo sapien
tggacctggtaaacagataactgtg

SEQ ID NO: 4744159 - DNA, 25 bp, Homo sapien
gataactgtgcccactggtaagagt

SEQ ID NO: 4744160 - DNA, 25 bp, Homo sapien
cggatggcattcttcaaagctggtc

SEQ ID NO: 4744161 - DNA, 25 bp, Homo sapien
gagaagagttctatcactgggccta

SEQ ID NO: 4744162 - DNA, 25 bp, Homo sapien
tggagcaggggtactcaaagtcccg

SEQ ID NO: 4744163 - DNA, 25 bp, Homo sapien
gaaaggattttgacagtgtggagca

SEQ ID NO: 4744164 - DNA, 25 bp, Homo sapien
gttactaccctttgagatccaagac

SEQ ID NO: 4744165 - DNA, 25 bp, Homo sapien
gtcattcatctctaagcttcaacag

SEQ ID NO: 4744166 - DNA, 25 bp, Homo sapien
aaactgaggtccaaacactgggtag

SEQ ID NO: 4744167 - DNA, 25 bp, Homo sapien
cactgggtagaactgaccctctgag

SEQ ID NO: 4744168 - DNA, 25 bp, Homo sapien
agttgggaagagactgtgtacatga

SEQ ID NO: 4744169 - DNA, 25 bp, Homo sapien
gagtccagaagggacaacatagcaa

SEQ ID NO: 4744170 - DNA, 25 bp, Homo sapien
gactgtgtacatgacccctcttctt

SEQ ID NO: 4744171 - DNA, 25 bp, Homo sapien
taatttactatatagagttcaagta

SEQ ID NO: 4744172 - DNA, 25 bp, Homo sapien
tctcacgcttcaaccctgaaaggaa

SEQ ID NO: 4744173 - DNA, 25 bp, Homo sapien
tcacctgcgtctcggcaaaaaggga

SEQ ID NO: 4744174 - DNA, 25 bp, Homo sapien
gaagaacttgcatcccctgagaaca

SEQ ID NO: 4744175 - DNA, 25 bp, Homo sapien
tatccagaaacccacggaagcagaa

SEQ ID NO: 4744176 - DNA, 25 bp, Homo sapien
caaaccttagcccaagactcgggcg

SEQ ID NO: 4744177 - DNA, 25 bp, Homo sapien
gcggccgaggcaaaccttagcccaa

SEQ ID NO: 4744178 - DNA, 25 bp, Homo sapien
tcgccaccgcgggaacaaagagcgc

SEQ ID NO: 4744179 - DNA, 25 bp, Homo sapien
ccaccgcgggaacaaagagcgccgg

SEQ ID NO: 4744180 - DNA, 25 bp, Homo sapien
cccggctccaacttaggcactgtca

SEQ ID NO: 4744181 - DNA, 25 bp, Homo sapien
aggaaacgacggctgcacgcccaga

SEQ ID NO: 4744182 - DNA, 25 bp, Homo sapien
gggccgccgcctcctattgtgactg

SEQ ID NO: 4744183 - DNA, 25 bp, Homo sapien
agagtcgcctaacgcctcggaggct

SEQ ID NO: 4744184 - DNA, 25 bp, Homo sapien
gcctcggcgatcacagacccgggct

SEQ ID NO: 4744185 - DNA, 25 bp, Homo sapien
gctaggccgcgacacgcgcggtcct

SEQ ID NO: 4744186 - DNA, 25 bp, Homo sapien
gacccgggctccctatgcgccggcg

SEQ ID NO: 4744187 - DNA, 25 bp, Homo sapien
cgctgcgcgcgcaggcgactcccct

SEQ ID NO: 4744188 - DNA, 25 bp, Homo sapien
ctagcgagcccagcgcgccagacca

SEQ ID NO: 4744189 - DNA, 25 bp, Homo sapien
ccaggctccgcaccgcgcgccgaac

SEQ ID NO: 4744190 - DNA, 25 bp, Homo sapien
cagaccaccggagcgctcctccctt

SEQ ID NO: 4744191 - DNA, 25 bp, Homo sapien
agcgcgccagaccaccggagcgctc

SEQ ID NO: 4744192 - DNA, 25 bp, Homo sapien
tccacagtgcaggtgagagatgact

SEQ ID NO: 4744193 - DNA, 25 bp, Homo sapien
gtaacctatactctttgaagccaca

SEQ ID NO: 4744194 - DNA, 25 bp, Homo sapien
ccactagatggcctgctgtaaccta

SEQ ID NO: 4744195 - DNA, 25 bp, Homo sapien
tcaactgtatgctccagcagcttca

SEQ ID NO: 4744196 - DNA, 25 bp, Homo sapien
gcttgttctgttccggagaacagac

SEQ ID NO: 4744197 - DNA, 25 bp, Homo sapien
gactggctggaaggacaagcagttt

SEQ ID NO: 4744198 - DNA, 25 bp, Homo sapien
ccatgggtcaaaggactggctggaa

SEQ ID NO: 4744199 - DNA, 25 bp, Homo sapien
gaccaatgggccatgggtcaaagga

SEQ ID NO: 4744200 - DNA, 25 bp, Homo sapien
gaaggacaagcagtttacccaggaa

SEQ ID NO: 4744201 - DNA, 25 bp, Homo sapien
gggtgatcccctgacatggtgctct

SEQ ID NO: 4744202 - DNA, 25 bp, Homo sapien
tcagtatcccggtctctcagctgtg

SEQ ID NO: 4744203 - DNA, 25 bp, Homo sapien
ggcatctgctccgatggaggtagca

SEQ ID NO: 4744204 - DNA, 25 bp, Homo sapien
tgtaatgtgatcagtatcccggtct

SEQ ID NO: 4744205 - DNA, 25 bp, Homo sapien
cagaaggtggcgctttcaatacaac

SEQ ID NO: 4744206 - DNA, 25 bp, Homo sapien
aaaagaccatcaagtaagggccagg

SEQ ID NO: 4744207 - DNA, 25 bp, Homo sapien
tgggtggcaccatagagctctcaag

SEQ ID NO: 4744208 - DNA, 25 bp, Homo sapien
gacaacaccgttatatccaggcagc

SEQ ID NO: 4744209 - DNA, 25 bp, Homo sapien
taaatgcctagacacatagctacct

SEQ ID NO: 4744210 - DNA, 25 bp, Homo sapien
tacatagtcaagagaccctaatcca

SEQ ID NO: 4744211 - DNA, 25 bp, Homo sapien
aaaggagagtcgtttcagacagttc

SEQ ID NO: 4744212 - DNA, 25 bp, Homo sapien
caatatatacatggtaggcaggaag

SEQ ID NO: 4744213 - DNA, 25 bp, Homo sapien
ttacgcaagagaatccagcaacgta

SEQ ID NO: 4744214 - DNA, 25 bp, Homo sapien
cagcaacgtaaggttggcatgcatt

SEQ ID NO: 4744215 - DNA, 25 bp, Homo sapien
gagaatccagcaacgtaaggttggc

SEQ ID NO: 4744216 - DNA, 25 bp, Homo sapien
tggcagacatcaacacgaacctcac

SEQ ID NO: 4744217 - DNA, 25 bp, Homo sapien
tgtcatcatgacaaatgtggtcgtg

SEQ ID NO: 4744218 - DNA, 25 bp, Homo sapien
gtcactgtcatcatgacaaatgtgg

SEQ ID NO: 4744219 - DNA, 25 bp, Homo sapien
caaatgtggtcgtgatggatggact

SEQ ID NO: 4744220 - DNA, 25 bp, Homo sapien
catgacaaatgtggtcgtgatggat

SEQ ID NO: 4744221 - DNA, 25 bp, Homo sapien
tatcccaatacacacttacaagcag

SEQ ID NO: 4744222 - DNA, 25 bp, Homo sapien
tagataggttagcacactcaggcat

SEQ ID NO: 4744223 - DNA, 25 bp, Homo sapien
tgtctacaatagcaaagcttcacgg

SEQ ID NO: 4744224 - DNA, 25 bp, Homo sapien
gcttcacggtgctgaacaaaagacc

SEQ ID NO: 4744225 - DNA, 25 bp, Homo sapien
ccagctgaataggtgagagacttga

SEQ ID NO: 4744226 - DNA, 25 bp, Homo sapien
gctgaataggtgagagacttgacat

SEQ ID NO: 4744227 - DNA, 25 bp, Homo sapien
agctgaataggtgagagacttgaca

SEQ ID NO: 4744228 - DNA, 25 bp, Homo sapien
cagctgaataggtgagagacttgac

SEQ ID NO: 4744229 - DNA, 25 bp, Homo sapien
ttcccctgctcgggaagagatgtcc

SEQ ID NO: 4744230 - DNA, 25 bp, Homo sapien
tcccctgctcgggaagagatgtcct

SEQ ID NO: 4744231 - DNA, 25 bp, Homo sapien
cttcccctgctcgggaagagatgtc

SEQ ID NO: 4744232 - DNA, 25 bp, Homo sapien
cccctgctcgggaagagatgtcctc

SEQ ID NO: 4744233 - DNA, 25 bp, Homo sapien
tattttgtaatgtactaaggttaca

SEQ ID NO: 4744234 - DNA, 25 bp, Homo sapien
agtaagtcctcctctgggcgcaaag

SEQ ID NO: 4744235 - DNA, 25 bp, Homo sapien
agaataggctacaagtggctggctc

SEQ ID NO: 4744236 - DNA, 25 bp, Homo sapien
taggcctacccacatagagatctgt

SEQ ID NO: 4744237 - DNA, 25 bp, Homo sapien
tcaaagaccgattttcacacgaaga

SEQ ID NO: 4744238 - DNA, 25 bp, Homo sapien
taataccaaggtgataggttaatct

SEQ ID NO: 4744239 - DNA, 25 bp, Homo sapien
taggttaatctgtgctgcaaaccac

SEQ ID NO: 4744240 - DNA, 25 bp, Homo sapien
tgcatttcctgcacttgtaccctgg

SEQ ID NO: 4744241 - DNA, 25 bp, Homo sapien
aaaataagagtgattaacaggaagt

SEQ ID NO: 4744242 - DNA, 25 bp, Homo sapien
tcaccgtcttttgcgatgggacagt

SEQ ID NO: 4744243 - DNA, 25 bp, Homo sapien
gagaaggtacgcacttacagacaac

SEQ ID NO: 4744244 - DNA, 25 bp, Homo sapien
catggtaaggataaagacaagagtc

SEQ ID NO: 4744245 - DNA, 25 bp, Homo sapien
gggttcagcatccacaagggtgaca

SEQ ID NO: 4744246 - DNA, 25 bp, Homo sapien
gctaagaattctggcccctcaagta

SEQ ID NO: 4744247 - DNA, 25 bp, Homo sapien
gatgtggaacttcagagccgttgcc

SEQ ID NO: 4744248 - DNA, 25 bp, Homo sapien
cagggaagtccaccaagctttgtga

SEQ ID NO: 4744249 - DNA, 25 bp, Homo sapien
tgtgatgtgctacaaactctcaggc

SEQ ID NO: 4744250 - DNA, 25 bp, Homo sapien
ggaagcttgagattttaacactggg

SEQ ID NO: 4744251 - DNA, 25 bp, Homo sapien
tataacagagggcaattcatcactg

SEQ ID NO: 4744252 - DNA, 25 bp, Homo sapien
aacttaatgacagggtgagggcaga

SEQ ID NO: 4744253 - DNA, 25 bp, Homo sapien
tattgaagcctacatgcagctctgc

SEQ ID NO: 4744254 - DNA, 25 bp, Homo sapien
gaaccttagtaatgggtacgcatgg

SEQ ID NO: 4744255 - DNA, 25 bp, Homo sapien
ctcccgcctcagttatacacaaaat

SEQ ID NO: 4744256 - DNA, 25 bp, Homo sapien
tacgcatgggtttgttatactagtc

SEQ ID NO: 4744257 - DNA, 25 bp, Homo sapien
catagtagtcatgtacacgattaga

SEQ ID NO: 4744258 - DNA, 25 bp, Homo sapien
ccagaactgttatattctgcattgt

SEQ ID NO: 4744259 - DNA, 25 bp, Homo sapien
cattgtgccaagcatgaagaccaac

SEQ ID NO: 4744260 - DNA, 25 bp, Homo sapien
tgttatattctgcattgtgccaagc

SEQ ID NO: 4744261 - DNA, 25 bp, Homo sapien
catgaagaccaacagattgggccat

SEQ ID NO: 4744262 - DNA, 25 bp, Homo sapien
acaccacaagcgtccgcggcttcat

SEQ ID NO: 4744263 - DNA, 25 bp, Homo sapien
gcagagcctcaatatagtagtaatg

SEQ ID NO: 4744264 - DNA, 25 bp, Homo sapien
gtgtttaaaggattgtaagcacacc

SEQ ID NO: 4744265 - DNA, 25 bp, Homo sapien
caatatagtagtaatgagaggtgaa

SEQ ID NO: 4744266 - DNA, 25 bp, Homo sapien
caagtgtgaagaccagctgaaaggc

SEQ ID NO: 4744267 - DNA, 25 bp, Homo sapien
gacagagcagagaggtaaaaccttc

SEQ ID NO: 4744268 - DNA, 25 bp, Homo sapien
aaattcaagtgcaatgggatgccac

SEQ ID NO: 4744269 - DNA, 25 bp, Homo sapien
gatgaagaaacaggcccaagccctg

SEQ ID NO: 4744270 - DNA, 25 bp, Homo sapien
cttgcatgtaagtcaggagaaaggc

SEQ ID NO: 4744271 - DNA, 25 bp, Homo sapien
gtagccagtatgtaggcctggtaca

SEQ ID NO: 4744272 - DNA, 25 bp, Homo sapien
ctttgcttatcttggcctaccctga

SEQ ID NO: 4744273 - DNA, 25 bp, Homo sapien
tcataagagtagaggttttacctgc

SEQ ID NO: 4744274 - DNA, 25 bp, Homo sapien
caatccataatgcttcgcacccatc

SEQ ID NO: 4744275 - DNA, 25 bp, Homo sapien
agggccacaaaccataagccccaat

SEQ ID NO: 4744276 - DNA, 25 bp, Homo sapien
aagatccccctggtctacctcaggg

SEQ ID NO: 4744277 - DNA, 25 bp, Homo sapien
tcctggtactcaaaactttcttcac

SEQ ID NO: 4744278 - DNA, 25 bp, Homo sapien
tctgctcgaacaaggacaccttcac

SEQ ID NO: 4744279 - DNA, 25 bp, Homo sapien
cttctctgctcgaacaaggacacct

SEQ ID NO: 4744280 - DNA, 25 bp, Homo sapien
cgaacaaggacaccttcaccaacat

SEQ ID NO: 4744281 - DNA, 25 bp, Homo sapien
gctcgaacaaggacaccttcaccaa

SEQ ID NO: 4744282 - DNA, 25 bp, Homo sapien
agcccccacttccatgcagcagccc

SEQ ID NO: 4744283 - DNA, 25 bp, Homo sapien
ctagcccccacttccatgcagcagc

SEQ ID NO: 4744284 - DNA, 25 bp, Homo sapien
cccacttccatgcagcagcccccat

SEQ ID NO: 4744285 - DNA, 25 bp, Homo sapien
gcccccacttccatgcagcagcccc

SEQ ID NO: 4744286 - DNA, 25 bp, Homo sapien
tctctaacccatagcccaggatggc

SEQ ID NO: 4744287 - DNA, 25 bp, Homo sapien
gtcaacaatgtcttaagagccacca

SEQ ID NO: 4744288 - DNA, 25 bp, Homo sapien
taggtatccataaaccaagcttctc

SEQ ID NO: 4744289 - DNA, 25 bp, Homo sapien
gagttcttgacttacattcctgcca

SEQ ID NO: 4744290 - DNA, 25 bp, Homo sapien
gccttctgtgccgtaaacgtcttta

SEQ ID NO: 4744291 - DNA, 25 bp, Homo sapien
ttctgtgccgtaaacgtctttacca

SEQ ID NO: 4744292 - DNA, 25 bp, Homo sapien
ctgtgccgtaaacgtctttaccaag

SEQ ID NO: 4744293 - DNA, 25 bp, Homo sapien
atggccttctgtgccgtaaacgtct

SEQ ID NO: 4744294 - DNA, 25 bp, Homo sapien
agcggctccggctgcgactcgactc

SEQ ID NO: 4744295 - DNA, 25 bp, Homo sapien
tgcgactcgactccggcgcggcagg

SEQ ID NO: 4744296 - DNA, 25 bp, Homo sapien
ccggagggctgaggcggtccgtggc

SEQ ID NO: 4744297 - DNA, 25 bp, Homo sapien
ctgggagacgacgactgaggctgaa

SEQ ID NO: 4744298 - DNA, 25 bp, Homo sapien
ccgtaaccaaggagtatggcaccat

SEQ ID NO: 4744299 - DNA, 25 bp, Homo sapien
ccagatgtgagtgaatgagccttca

SEQ ID NO: 4744300 - DNA, 25 bp, Homo sapien
acccctggagttttcacatacgtga

SEQ ID NO: 4744301 - DNA, 25 bp, Homo sapien
tcaagccttatttggagtcagccca

SEQ ID NO: 4744302 - DNA, 25 bp, Homo sapien
atgatgtgacttcagctcactgaaa

SEQ ID NO: 4744303 - DNA, 25 bp, Homo sapien
tgagtgctgcgattacacgtgtgag

SEQ ID NO: 4744304 - DNA, 25 bp, Homo sapien
ctccctgagtgctgcgattacacgt

SEQ ID NO: 4744305 - DNA, 25 bp, Homo sapien
gcacccagcccaaaagcattcagtg

SEQ ID NO: 4744306 - DNA, 25 bp, Homo sapien
gtgcatggcttgttgcccgaggctg

SEQ ID NO: 4744307 - DNA, 25 bp, Homo sapien
ttgcccttggattggatgtaaaatc

SEQ ID NO: 4744308 - DNA, 25 bp, Homo sapien
ggcttgttgcccgaggctggctaac

SEQ ID NO: 4744309 - DNA, 25 bp, Homo sapien
attttctatggcttcccacttgccc

SEQ ID NO: 4744310 - DNA, 25 bp, Homo sapien
cttgtgttttctcgccccctgcttc

SEQ ID NO: 4744311 - DNA, 25 bp, Homo sapien
ttctccacggtgacttgtgttttct

SEQ ID NO: 4744312 - DNA, 25 bp, Homo sapien
gacttgtgttttctcgccccctgct

SEQ ID NO: 4744313 - DNA, 25 bp, Homo sapien
acttgtgttttctcgccccctgctt

SEQ ID NO: 4744314 - DNA, 25 bp, Homo sapien
ccatctgcagtctgtagtctgtagg

SEQ ID NO: 4744315 - DNA, 25 bp, Homo sapien
ctacttaggtggctttgcaaaggtc

SEQ ID NO: 4744316 - DNA, 25 bp, Homo sapien
cagattttaacgcagtgcagtggga

SEQ ID NO: 4744317 - DNA, 25 bp, Homo sapien
tgcctgccatatccttactggagag

SEQ ID NO: 4744318 - DNA, 25 bp, Homo sapien
ccttttcctggaacacgctaaggtg

SEQ ID NO: 4744319 - DNA, 25 bp, Homo sapien
gaaagacaaccacttgtttatgtgt

SEQ ID NO: 4744320 - DNA, 25 bp, Homo sapien
tgcctcagggcatttgtacttaccc

SEQ ID NO: 4744321 - DNA, 25 bp, Homo sapien
tcgatgtcatttcaccttagggagg

SEQ ID NO: 4744322 - DNA, 25 bp, Homo sapien
gtgcctgccaccacgactgactaat

SEQ ID NO: 4744323 - DNA, 25 bp, Homo sapien
ttagtagagacagtgtttcaccacg

SEQ ID NO: 4744324 - DNA, 25 bp, Homo sapien
tagtagagacagtgtttcaccacgt

SEQ ID NO: 4744325 - DNA, 25 bp, Homo sapien
ggtgcctgccaccacgactgactaa

SEQ ID NO: 4744326 - DNA, 25 bp, Homo sapien
tagaaatgagtttgattataagggt

SEQ ID NO: 4744327 - DNA, 25 bp, Homo sapien
ctagaaatgagtttgattataaggg

SEQ ID NO: 4744328 - DNA, 25 bp, Homo sapien
ggaaaacttcagtcattcccttgat

SEQ ID NO: 4744329 - DNA, 25 bp, Homo sapien
ctctggaaaacttcagtcattccct

SEQ ID NO: 4744330 - DNA, 25 bp, Homo sapien
cattcccttgatggagaagaagaac

SEQ ID NO: 4744331 - DNA, 25 bp, Homo sapien
tgtcctaaattctcaccctcatttg

SEQ ID NO: 4744332 - DNA, 25 bp, Homo sapien
tggttggtggcttctgcttagagct

SEQ ID NO: 4744333 - DNA, 25 bp, Homo sapien
gagtgtgataaacctgctgccgagc

SEQ ID NO: 4744334 - DNA, 25 bp, Homo sapien
ggcggcggcatttcataacggagaa

SEQ ID NO: 4744335 - DNA, 25 bp, Homo sapien
ggccaggttcactccctgcgtggca

SEQ ID NO: 4744336 - DNA, 25 bp, Homo sapien
tcagagaaggggacgaaggtgagaa

SEQ ID NO: 4744337 - DNA, 25 bp, Homo sapien
cagagaaggggacgaaggtgagaac

SEQ ID NO: 4744338 - DNA, 25 bp, Homo sapien
tgtcagagaaggggacgaaggtgag

SEQ ID NO: 4744339 - DNA, 25 bp, Homo sapien
gtcagagaaggggacgaaggtgaga

SEQ ID NO: 4744340 - DNA, 25 bp, Homo sapien
ctctatcaggttgtggacccagtgg

SEQ ID NO: 4744341 - DNA, 25 bp, Homo sapien
cctttgtgactctatcaggttgtgg

SEQ ID NO: 4744342 - DNA, 25 bp, Homo sapien
tgtgactctatcaggttgtggaccc

SEQ ID NO: 4744343 - DNA, 25 bp, Homo sapien
gactctatcaggttgtggacccagt

SEQ ID NO: 4744344 - DNA, 25 bp, Homo sapien
attgattctagctctgaggccttcc

SEQ ID NO: 4744345 - DNA, 25 bp, Homo sapien
ggattgattctagctctgaggcctt

SEQ ID NO: 4744346 - DNA, 25 bp, Homo sapien
caaccttcagggactctgttgggtc

SEQ ID NO: 4744347 - DNA, 25 bp, Homo sapien
acagggggattgattctagctctga

SEQ ID NO: 4744348 - DNA, 25 bp, Homo sapien
tcctctgatttgttcatcactctca

SEQ ID NO: 4744349 - DNA, 25 bp, Homo sapien
gatccactatgtggtccggtttctt

SEQ ID NO: 4744350 - DNA, 25 bp, Homo sapien
tcttcagctcctctgatttgttcat

SEQ ID NO: 4744351 - DNA, 25 bp, Homo sapien
ttatgatccactatgtggtccggtt

SEQ ID NO: 4744352 - DNA, 25 bp, Homo sapien
ccagggtgagaaaccgtcttaggag

SEQ ID NO: 4744353 - DNA, 25 bp, Homo sapien
cttgctgttggagttgggcttgacc

SEQ ID NO: 4744354 - DNA, 25 bp, Homo sapien
tcttggcgtgtgtccagggcagaga

SEQ ID NO: 4744355 - DNA, 25 bp, Homo sapien
aaaccgtcttaggagcttgctgttg

SEQ ID NO: 4744356 - DNA, 25 bp, Homo sapien
gtcctggctgctcccctcactaggc

SEQ ID NO: 4744357 - DNA, 25 bp, Homo sapien
tcctggctgctcccctcactaggct

SEQ ID NO: 4744358 - DNA, 25 bp, Homo sapien
ggctgctcccctcactaggctgtgg

SEQ ID NO: 4744359 - DNA, 25 bp, Homo sapien
ctggctgctcccctcactaggctgt

SEQ ID NO: 4744360 - DNA, 25 bp, Homo sapien
gtggaggggagccggctgcctcctc

SEQ ID NO: 4744361 - DNA, 25 bp, Homo sapien
ctcctggcccccttcctcctcccat

SEQ ID NO: 4744362 - DNA, 25 bp, Homo sapien
ctgcctcctcctggcccccttcctc

SEQ ID NO: 4744363 - DNA, 25 bp, Homo sapien
ctgtggaggggagccggctgcctcc

SEQ ID NO: 4744364 - DNA, 25 bp, Homo sapien
accatggaagaagaaggactgtgag

SEQ ID NO: 4744365 - DNA, 25 bp, Homo sapien
agggacagggcctccatctgcttct

SEQ ID NO: 4744366 - DNA, 25 bp, Homo sapien
agaagaaggactgtgagggacaggg

SEQ ID NO: 4744367 - DNA, 25 bp, Homo sapien
ctgaccatggaagaagaaggactgt

SEQ ID NO: 4744368 - DNA, 25 bp, Homo sapien
cagccaacttcagtgccccatttgg

SEQ ID NO: 4744369 - DNA, 25 bp, Homo sapien
tgccccatttgggagtcttgagaat

SEQ ID NO: 4744370 - DNA, 25 bp, Homo sapien
tgaccgcttccagccaacttcagtg

SEQ ID NO: 4744371 - DNA, 25 bp, Homo sapien
acttcagtgccccatttgggagtct

SEQ ID NO: 4744372 - DNA, 25 bp, Homo sapien
gtcctggcggctccacacttatctg

SEQ ID NO: 4744373 - DNA, 25 bp, Homo sapien
agcactaggtgtaggcccaggagct

SEQ ID NO: 4744374 - DNA, 25 bp, Homo sapien
ttccttggcagcactaggtgtaggc

SEQ ID NO: 4744375 - DNA, 25 bp, Homo sapien
gtgtcctggcggctccacacttatc

SEQ ID NO: 4744376 - DNA, 25 bp, Homo sapien
tgagatttggcccaaaggagtaggt

SEQ ID NO: 4744377 - DNA, 25 bp, Homo sapien
gctgtcccacaccagcaactgagct

SEQ ID NO: 4744378 - DNA, 25 bp, Homo sapien
gtcccacaccagcaactgagctaca

SEQ ID NO: 4744379 - DNA, 25 bp, Homo sapien
tgtgagatttggcccaaaggagtag

SEQ ID NO: 4744380 - DNA, 25 bp, Homo sapien
ctgtggcagctacccaacttgatcc

SEQ ID NO: 4744381 - DNA, 25 bp, Homo sapien
tggcagctacccaacttgatcctga

SEQ ID NO: 4744382 - DNA, 25 bp, Homo sapien
tgtctgggggactgactggagggtc

SEQ ID NO: 4744383 - DNA, 25 bp, Homo sapien
tgactggagggtcctccaggaatct

SEQ ID NO: 4744384 - DNA, 25 bp, Homo sapien
gaatctgtccaaggtgacttctgga

SEQ ID NO: 4744385 - DNA, 25 bp, Homo sapien
gtccaaggtgacttctggaatgagt

SEQ ID NO: 4744386 - DNA, 25 bp, Homo sapien
ctgaatctgtccaaggtgacttctg

SEQ ID NO: 4744387 - DNA, 25 bp, Homo sapien
ctgtccaaggtgacttctggaatga

SEQ ID NO: 4744388 - DNA, 25 bp, Homo sapien
gagccttgctcaaggtgactgtgag

SEQ ID NO: 4744389 - DNA, 25 bp, Homo sapien
actgtgagctcctgacttctcagtg

SEQ ID NO: 4744390 - DNA, 25 bp, Homo sapien
gacttctcagtgtgctggcaaatgg

SEQ ID NO: 4744391 - DNA, 25 bp, Homo sapien
aggagagccttgctcaaggtgactg

SEQ ID NO: 4744392 - DNA, 25 bp, Homo sapien
tgcccatgggtaacgtgttgtggtt

SEQ ID NO: 4744393 - DNA, 25 bp, Homo sapien
cataaggggctcgagcaggaagaca

SEQ ID NO: 4744394 - DNA, 25 bp, Homo sapien
tcttcggcgaggagtgagacttcct

SEQ ID NO: 4744395 - DNA, 25 bp, Homo sapien
gaaggttgcctcagcttcacaggtg

SEQ ID NO: 4744396 - DNA, 25 bp, Homo sapien
ccatccctgcgtagctgtggatgga

SEQ ID NO: 4744397 - DNA, 25 bp, Homo sapien
ctgtgaatgcattgaggtctctgcc

SEQ ID NO: 4744398 - DNA, 25 bp, Homo sapien
tgcagagtaggagctcaggcaatgt

SEQ ID NO: 4744399 - DNA, 25 bp, Homo sapien
gtgttggtggcgtgcctatctccta

SEQ ID NO: 4744400 - DNA, 25 bp, Homo sapien
gggtcttcttgactctatggtacag

SEQ ID NO: 4744401 - DNA, 25 bp, Homo sapien
ctgccagggcatctgagaaatgtac

SEQ ID NO: 4744402 - DNA, 25 bp, Homo sapien
gccagggcatctgagaaatgtactt

SEQ ID NO: 4744403 - DNA, 25 bp, Homo sapien
tcttgactctatggtacaggacaat

SEQ ID NO: 4744404 - DNA, 25 bp, Homo sapien
ccatttggtggctgacaaggagctg

SEQ ID NO: 4744405 - DNA, 25 bp, Homo sapien
ccagttgtattaaccatttggtggc

SEQ ID NO: 4744406 - DNA, 25 bp, Homo sapien
gagcccactgaacccagttgtatta

SEQ ID NO: 4744407 - DNA, 25 bp, Homo sapien
tttgcctctccttgtgaaggtcact

SEQ ID NO: 4744408 - DNA, 25 bp, Homo sapien
taccatggctgtagcgtagcccacc

SEQ ID NO: 4744409 - DNA, 25 bp, Homo sapien
cactgagtaccatggctgtagcgta

SEQ ID NO: 4744410 - DNA, 25 bp, Homo sapien
tctccactgagtaccatggctgtag

SEQ ID NO: 4744411 - DNA, 25 bp, Homo sapien
atggctgtagcgtagcccacccaac

SEQ ID NO: 4744412 - DNA, 25 bp, Homo sapien
ttctttatctggaatgcctcccttg

SEQ ID NO: 4744413 - DNA, 25 bp, Homo sapien
cagtttcactagtgaagaactgggg

SEQ ID NO: 4744414 - DNA, 25 bp, Homo sapien
tgaagaactggggcttcttcttaat

SEQ ID NO: 4744415 - DNA, 25 bp, Homo sapien
tatctggaatgcctcccttggccat

SEQ ID NO: 4744416 - DNA, 25 bp, Homo sapien
tcagaacagccgatgctgccctctg

SEQ ID NO: 4744417 - DNA, 25 bp, Homo sapien
ctggattcctcagaagccggctcct

SEQ ID NO: 4744418 - DNA, 25 bp, Homo sapien
gattcctcagaagccggctcctggg

SEQ ID NO: 4744419 - DNA, 25 bp, Homo sapien
tcagactcagaacagccgatgctgc

SEQ ID NO: 4744420 - DNA, 25 bp, Homo sapien
gacaaaagctaatggactggagtcc

SEQ ID NO: 4744421 - DNA, 25 bp, Homo sapien
agtccttgaggacagtgggtctctt

SEQ ID NO: 4744422 - DNA, 25 bp, Homo sapien
aaacactccccttgcaatcttgaag

SEQ ID NO: 4744423 - DNA, 25 bp, Homo sapien
gggtctcttgagcaaattaaacact

SEQ ID NO: 4744424 - DNA, 25 bp, Homo sapien
tgtctggaacagctgtatcgggagc

SEQ ID NO: 4744425 - DNA, 25 bp, Homo sapien
ggtgaaagactttccctccatgagt

SEQ ID NO: 4744426 - DNA, 25 bp, Homo sapien
gagatcgatccctgatgctcctgga

SEQ ID NO: 4744427 - DNA, 25 bp, Homo sapien
ggcttcctctccaagactgtgcatt

SEQ ID NO: 4744428 - DNA, 25 bp, Homo sapien
aagagccaggtgagagccaaggacc

SEQ ID NO: 4744429 - DNA, 25 bp, Homo sapien
aggacctacgcggtgagaggtccat

SEQ ID NO: 4744430 - DNA, 25 bp, Homo sapien
gccaaggacctacgcggtgagaggt

SEQ ID NO: 4744431 - DNA, 25 bp, Homo sapien
caaggacctacgcggtgagaggtcc

SEQ ID NO: 4744432 - DNA, 25 bp, Homo sapien
tagtttttcctggattcgacttcca

SEQ ID NO: 4744433 - DNA, 25 bp, Homo sapien
attcgacttccagccgcatcagagc

SEQ ID NO: 4744434 - DNA, 25 bp, Homo sapien
ttttcctggattcgacttccagccg

SEQ ID NO: 4744435 - DNA, 25 bp, Homo sapien
tggattcgacttccagccgcatcag

SEQ ID NO: 4744436 - DNA, 25 bp, Homo sapien
tgagctgggtcaggcacatgcatgc

SEQ ID NO: 4744437 - DNA, 25 bp, Homo sapien
ggccaggaatgtgcttgttctccaa

SEQ ID NO: 4744438 - DNA, 25 bp, Homo sapien
tgagttcacgcgagagcaggacaaa

SEQ ID NO: 4744439 - DNA, 25 bp, Homo sapien
tccaagcccgggttcagcgtgagtt

SEQ ID NO: 4744440 - DNA, 25 bp, Homo sapien
tgatgagttggcctttctagtgtgc

SEQ ID NO: 4744441 - DNA, 25 bp, Homo sapien
gcctttctagtgtgctaagcaaact

SEQ ID NO: 4744442 - DNA, 25 bp, Homo sapien
gaactcggacaattactgctcttga

SEQ ID NO: 4744443 - DNA, 25 bp, Homo sapien
agcagagtctaagtcaggaggcttt

SEQ ID NO: 4744444 - DNA, 25 bp, Homo sapien
tgggcatgcctcagaaaacaccgtt

SEQ ID NO: 4744445 - DNA, 25 bp, Homo sapien
tatgcaaggaattaaggccccaggt

SEQ ID NO: 4744446 - DNA, 25 bp, Homo sapien
tattgtctacatcaccggaacaggc

SEQ ID NO: 4744447 - DNA, 25 bp, Homo sapien
catcggtcccagagaaatggaggca

SEQ ID NO: 4744448 - DNA, 25 bp, Homo sapien
tttggtgcccgcctggctccaaggg

SEQ ID NO: 4744449 - DNA, 25 bp, Homo sapien
tgtttggtgcccgcctggctccaag

SEQ ID NO: 4744450 - DNA, 25 bp, Homo sapien
agtgtttggtgcccgcctggctcca

SEQ ID NO: 4744451 - DNA, 25 bp, Homo sapien
tcagtgtttggtgcccgcctggctc

SEQ ID NO: 4744452 - DNA, 25 bp, Homo sapien
tcagtgacggtcataggcagtggcg

SEQ ID NO: 4744453 - DNA, 25 bp, Homo sapien
gtgacggtcataggcagtggcggct

SEQ ID NO: 4744454 - DNA, 25 bp, Homo sapien
cggctcctcgggcggcagcgctata

SEQ ID NO: 4744455 - DNA, 25 bp, Homo sapien
cctcgggcggcagcgctataatagt

SEQ ID NO: 4744456 - DNA, 25 bp, Homo sapien
ggagtcgttgtacgaggaatactga

SEQ ID NO: 4744457 - DNA, 25 bp, Homo sapien
ctccaggagtcgttgtacgaggaat

SEQ ID NO: 4744458 - DNA, 25 bp, Homo sapien
acgaggaatactgagggtggctgta

SEQ ID NO: 4744459 - DNA, 25 bp, Homo sapien
gctgtagggactcccggaaaactca

SEQ ID NO: 4744460 - DNA, 25 bp, Homo sapien
catgagatccggagaagctaggtcc

SEQ ID NO: 4744461 - DNA, 25 bp, Homo sapien
tctgaagtgccacacaagaagctgt

SEQ ID NO: 4744462 - DNA, 25 bp, Homo sapien
gcagactctctaactcaggcgacag

SEQ ID NO: 4744463 - DNA, 25 bp, Homo sapien
cccttggtgggagaaatgagcctac

SEQ ID NO: 4744464 - DNA, 25 bp, Homo sapien
ggaggggaggaaagatatcttggga

SEQ ID NO: 4744465 - DNA, 25 bp, Homo sapien
tacactttcatatgtatcccctgtg

SEQ ID NO: 4744466 - DNA, 25 bp, Homo sapien
cactttcatatgtatcccctgtgac

SEQ ID NO: 4744467 - DNA, 25 bp, Homo sapien
tttacactttcatatgtatcccctg

SEQ ID NO: 4744468 - DNA, 25 bp, Homo sapien
ggtggctccttacatgttcactggg

SEQ ID NO: 4744469 - DNA, 25 bp, Homo sapien
ggtggtcctccaatgcggcagaaac

SEQ ID NO: 4744470 - DNA, 25 bp, Homo sapien
cgtcttggcccacaggttctttaag

SEQ ID NO: 4744471 - DNA, 25 bp, Homo sapien
cggcagaaactcaggctcatgagct

SEQ ID NO: 4744472 - DNA, 25 bp, Homo sapien
gaatcaatgtctttgccgctgcccc

SEQ ID NO: 4744473 - DNA, 25 bp, Homo sapien
aggcaaggccctcggctagggcctc

SEQ ID NO: 4744474 - DNA, 25 bp, Homo sapien
ggccctcggctagggcctctgttga

SEQ ID NO: 4744475 - DNA, 25 bp, Homo sapien
gctagggcctctgttgaatcaatgt

SEQ ID NO: 4744476 - DNA, 25 bp, Homo sapien
tttggaaggcagaagccaagctcca

SEQ ID NO: 4744477 - DNA, 25 bp, Homo sapien
ggcatgggtggtttggccccatttg

SEQ ID NO: 4744478 - DNA, 25 bp, Homo sapien
tggccccatttgagaacactctcct

SEQ ID NO: 4744479 - DNA, 25 bp, Homo sapien
tttgagaacactctccttttggaag

SEQ ID NO: 4744480 - DNA, 25 bp, Homo sapien
tgccctgagggcttcggacactgcc

SEQ ID NO: 4744481 - DNA, 25 bp, Homo sapien
ggaggcagcggttggtccagatgaa

SEQ ID NO: 4744482 - DNA, 25 bp, Homo sapien
gtatcccaggtggagtgaccctcag

SEQ ID NO: 4744483 - DNA, 25 bp, Homo sapien
gttctctggatagcagtatcccagg

SEQ ID NO: 4744484 - DNA, 25 bp, Homo sapien
ctgacagccccagtagattaaagct

SEQ ID NO: 4744485 - DNA, 25 bp, Homo sapien
cagcaagccgaagggagtcaaactc

SEQ ID NO: 4744486 - DNA, 25 bp, Homo sapien
aagccgaagggagtcaaactctgac

SEQ ID NO: 4744487 - DNA, 25 bp, Homo sapien
tctgacagccccagtagattaaagc

SEQ ID NO: 4744488 - DNA, 25 bp, Homo sapien
gggctgaggatggcttctgctgcca

SEQ ID NO: 4744489 - DNA, 25 bp, Homo sapien
gctgccactccgtgggccctgtgca

SEQ ID NO: 4744490 - DNA, 25 bp, Homo sapien
tgccactccgtgggccctgtgcata

SEQ ID NO: 4744491 - DNA, 25 bp, Homo sapien
ctgaggatggcttctgctgccactc

SEQ ID NO: 4744492 - DNA, 25 bp, Homo sapien
ctcgtccagtcctcggcgtttatct

SEQ ID NO: 4744493 - DNA, 25 bp, Homo sapien
cctcggcgtttatctcctggattca

SEQ ID NO: 4744494 - DNA, 25 bp, Homo sapien
gggctgcagtcctcgtccagtcctc

SEQ ID NO: 4744495 - DNA, 25 bp, Homo sapien
cagtcctcggcgtttatctcctgga

SEQ ID NO: 4744496 - DNA, 25 bp, Homo sapien
gatataagatgctatattcgctttc

SEQ ID NO: 4744497 - DNA, 25 bp, Homo sapien
ctgggacttgatggaaataaaattt

SEQ ID NO: 4744498 - DNA, 25 bp, Homo sapien
ttggtgcaaaattttcggcattttc

SEQ ID NO: 4744499 - DNA, 25 bp, Homo sapien
ttctaagctgatataagatgctata

SEQ ID NO: 4744500 - DNA, 25 bp, Homo sapien
ttctcagaagcgtagaggtcaccca

SEQ ID NO: 4744501 - DNA, 25 bp, Homo sapien
cttctcagaagcgtagaggtcaccc

SEQ ID NO: 4744502 - DNA, 25 bp, Homo sapien
tccgcttctcagaagcgtagaggtc

SEQ ID NO: 4744503 - DNA, 25 bp, Homo sapien
cgcttctcagaagcgtagaggtcac

SEQ ID NO: 4744504 - DNA, 25 bp, Homo sapien
tgtggagacgccgacagtgcaaact

SEQ ID NO: 4744505 - DNA, 25 bp, Homo sapien
gctgtggagacgccgacagtgcaaa

SEQ ID NO: 4744506 - DNA, 25 bp, Homo sapien
tggagacgccgacagtgcaaactca

SEQ ID NO: 4744507 - DNA, 25 bp, Homo sapien
ggagacgccgacagtgcaaactcac

SEQ ID NO: 4744508 - DNA, 25 bp, Homo sapien
tcagcgtcggtgctgagtagctgcc

SEQ ID NO: 4744509 - DNA, 25 bp, Homo sapien
gggagggtcgtgctcgccaagtcac

SEQ ID NO: 4744510 - DNA, 25 bp, Homo sapien
agggtcgtgctcgccaagtcacggc

SEQ ID NO: 4744511 - DNA, 25 bp, Homo sapien
tgctgagtagctgccctgtccagcg

SEQ ID NO: 4744512 - DNA, 25 bp, Homo sapien
ggctttgcttactatcagcaaggag

SEQ ID NO: 4744513 - DNA, 25 bp, Homo sapien
aagacttggctttgcttactatcag

SEQ ID NO: 4744514 - DNA, 25 bp, Homo sapien
cagggagaataaccaagacttggct

SEQ ID NO: 4744515 - DNA, 25 bp, Homo sapien
gcttactatcagcaaggagtccagg

SEQ ID NO: 4744516 - DNA, 25 bp, Homo sapien
tagtccagggcgctcatgtccctga

SEQ ID NO: 4744517 - DNA, 25 bp, Homo sapien
aacactttcttttgtgagtagatct

SEQ ID NO: 4744518 - DNA, 25 bp, Homo sapien
tttgtgagtagatctaagaatgcca

SEQ ID NO: 4744519 - DNA, 25 bp, Homo sapien
gatgacgagaattacaacactttct

SEQ ID NO: 4744520 - DNA, 25 bp, Homo sapien
ttcaaacgtgtaatccaactcagca

SEQ ID NO: 4744521 - DNA, 25 bp, Homo sapien
tctgcctcccatggtttgttcctgg

SEQ ID NO: 4744522 - DNA, 25 bp, Homo sapien
catattatttatgcggcctcaggca

SEQ ID NO: 4744523 - DNA, 25 bp, Homo sapien
cattcacatgtgtaaagggcctctc

SEQ ID NO: 4744524 - DNA, 25 bp, Homo sapien
tcatcatcataaagacctgagacat

SEQ ID NO: 4744525 - DNA, 25 bp, Homo sapien
tggagagagtgcaggagttgagcac

SEQ ID NO: 4744526 - DNA, 25 bp, Homo sapien
tcaatttcactcacatccttaatac

SEQ ID NO: 4744527 - DNA, 25 bp, Homo sapien
ttcactcacatccttaatacactgg

SEQ ID NO: 4744528 - DNA, 25 bp, Homo sapien
taacaggcataatggtgggctgatc

SEQ ID NO: 4744529 - DNA, 25 bp, Homo sapien
cttgacaatgacctagaagggtgga

SEQ ID NO: 4744530 - DNA, 25 bp, Homo sapien
tcaaggcacaatgggctaacaggca

SEQ ID NO: 4744531 - DNA, 25 bp, Homo sapien
taacgaccaatcatagcagacagct

SEQ ID NO: 4744532 - DNA, 25 bp, Homo sapien
tgtcccttttttacgcaaaggcagc

SEQ ID NO: 4744533 - DNA, 25 bp, Homo sapien
ttttttacgcaaaggcagcatgctg

SEQ ID NO: 4744534 - DNA, 25 bp, Homo sapien
gcaaaggcagcatgctgtatacact

SEQ ID NO: 4744535 - DNA, 25 bp, Homo sapien
ggcagcatgctgtatacactattct

SEQ ID NO: 4744536 - DNA, 25 bp, Homo sapien
tataacaaggtctccacggatggac

SEQ ID NO: 4744537 - DNA, 25 bp, Homo sapien
caaagcacctttgggctggacctcg

SEQ ID NO: 4744538 - DNA, 25 bp, Homo sapien
cgcctttgaggtagtgaaatcccca

SEQ ID NO: 4744539 - DNA, 25 bp, Homo sapien
taaataccgctggaagagacttcgc

SEQ ID NO: 4744540 - DNA, 25 bp, Homo sapien
gctgagatagagcagcgcagaagcc

SEQ ID NO: 4744541 - DNA, 25 bp, Homo sapien
aacttaatatttaatgcggcatata

SEQ ID NO: 4744542 - DNA, 25 bp, Homo sapien
tatccctctctaatgagatcttccc

SEQ ID NO: 4744543 - DNA, 25 bp, Homo sapien
gagcagcgcagaagccatctgttcc

SEQ ID NO: 4744544 - DNA, 25 bp, Homo sapien
cagctgggcacctacagcactctgg

SEQ ID NO: 4744545 - DNA, 25 bp, Homo sapien
tccagctgggcacctacagcactct

SEQ ID NO: 4744546 - DNA, 25 bp, Homo sapien
agctgggcacctacagcactctggg

SEQ ID NO: 4744547 - DNA, 25 bp, Homo sapien
catccagctgggcacctacagcact

SEQ ID NO: 4744548 - DNA, 25 bp, Homo sapien
tcccccatgccccaggtgccctcac

SEQ ID NO: 4744549 - DNA, 25 bp, Homo sapien
ctcatcccccatgccccaggtgccc

SEQ ID NO: 4744550 - DNA, 25 bp, Homo sapien
tcactcatcccccatgccccaggtg

SEQ ID NO: 4744551 - DNA, 25 bp, Homo sapien
atcccccatgccccaggtgccctca

SEQ ID NO: 4744552 - DNA, 25 bp, Homo sapien
tggcacactgctcccgatgtcagca

SEQ ID NO: 4744553 - DNA, 25 bp, Homo sapien
gccagcgaggccatggctgaatact

SEQ ID NO: 4744554 - DNA, 25 bp, Homo sapien
gccagattggccttcatgtcgtcca

SEQ ID NO: 4744555 - DNA, 25 bp, Homo sapien
gctggccagattggccttcatgtcg

SEQ ID NO: 4744556 - DNA, 25 bp, Homo sapien
ccaagtattgtctcatcagcacggg

SEQ ID NO: 4744557 - DNA, 25 bp, Homo sapien
attgtctcatcagcacggggcacca

SEQ ID NO: 4744558 - DNA, 25 bp, Homo sapien
gggctgcaccaagtattgtctcatc

SEQ ID NO: 4744559 - DNA, 25 bp, Homo sapien
cctggggctgcaccaagtattgtct

SEQ ID NO: 4744560 - DNA, 25 bp, Homo sapien
ccacaggtatcccttgggagctggg

SEQ ID NO: 4744561 - DNA, 25 bp, Homo sapien
agtaagatcccagtagggttgactc

SEQ ID NO: 4744562 - DNA, 25 bp, Homo sapien
ctcctaaacagtaagatcccagtag

SEQ ID NO: 4744563 - DNA, 25 bp, Homo sapien
aaagctccacttctggagaatgaga

SEQ ID NO: 4744564 - DNA, 25 bp, Homo sapien
cacaaagctccacttctggagaatg

SEQ ID NO: 4744565 - DNA, 25 bp, Homo sapien
tctgcatgtaaatgtcggaaaatag

SEQ ID NO: 4744566 - DNA, 25 bp, Homo sapien
gcatgtaaatgtcggaaaatagcat

SEQ ID NO: 4744567 - DNA, 25 bp, Homo sapien
taatatctgcatgtaaatgtcggaa

SEQ ID NO: 4744568 - DNA, 25 bp, Homo sapien
tttggttctaatatctgcatgtaaa

SEQ ID NO: 4744569 - DNA, 25 bp, Homo sapien
gacagcctgctaaggaagatggatt

SEQ ID NO: 4744570 - DNA, 25 bp, Homo sapien
attggagattatgaagtatggccag

SEQ ID NO: 4744571 - DNA, 25 bp, Homo sapien
gattatgaagtatggccagctcctg

SEQ ID NO: 4744572 - DNA, 25 bp, Homo sapien
cctgacagcctgctaaggaagatgg

SEQ ID NO: 4744573 - DNA, 25 bp, Homo sapien
agtaagtactgttgggactctgtaa

SEQ ID NO: 4744574 - DNA, 25 bp, Homo sapien
gttgggactctgtaatggcccgact

SEQ ID NO: 4744575 - DNA, 25 bp, Homo sapien
cacttgaggcaattgcgttggtctc

SEQ ID NO: 4744576 - DNA, 25 bp, Homo sapien
tcccattactgggagtaagtactgt

SEQ ID NO: 4744577 - DNA, 25 bp, Homo sapien
gctcctagcatcccataggtggtgg

SEQ ID NO: 4744578 - DNA, 25 bp, Homo sapien
ctggctcctagcatcccataggtgg

SEQ ID NO: 4744579 - DNA, 25 bp, Homo sapien
ggctcctagcatcccataggtggtg

SEQ ID NO: 4744580 - DNA, 25 bp, Homo sapien
tggctcctagcatcccataggtggt

SEQ ID NO: 4744581 - DNA, 25 bp, Homo sapien
tcaggaactccgcaatgccaagcag

SEQ ID NO: 4744582 - DNA, 25 bp, Homo sapien
gactccctgaggagtgctctgtcag

SEQ ID NO: 4744583 - DNA, 25 bp, Homo sapien
agtgctccatcaggaagtgactccc

SEQ ID NO: 4744584 - DNA, 25 bp, Homo sapien
ctaaaggaacagcacgcaggaaact

SEQ ID NO: 4744585 - DNA, 25 bp, Homo sapien
actttggccacctgaaactactctc

SEQ ID NO: 4744586 - DNA, 25 bp, Homo sapien
ctcaaatggtctcaagtgaaagtat

SEQ ID NO: 4744587 - DNA, 25 bp, Homo sapien
taaggatatgcactgtccagatatt

SEQ ID NO: 4744588 - DNA, 25 bp, Homo sapien
atttaaggatatgcactgtccagat

SEQ ID NO: 4744589 - DNA, 25 bp, Homo sapien
tacttagagacaaatggacatcccc

SEQ ID NO: 4744590 - DNA, 25 bp, Homo sapien
gacttaggccaagaaaacgtgttga

SEQ ID NO: 4744591 - DNA, 25 bp, Homo sapien
tgggccaccaggacattagctcatg

SEQ ID NO: 4744592 - DNA, 25 bp, Homo sapien
gagtatggctggtctagaggcaccc

SEQ ID NO: 4744593 - DNA, 25 bp, Homo sapien
aacggttgggaaggtatggagtgag

SEQ ID NO: 4744594 - DNA, 25 bp, Homo sapien
tatggagtgagtatttgggtacttg

SEQ ID NO: 4744595 - DNA, 25 bp, Homo sapien
gagtatttgggtacttgttcagtac

SEQ ID NO: 4744596 - DNA, 25 bp, Homo sapien
gggtacttgttcagtacccaaatca

SEQ ID NO: 4744597 - DNA, 25 bp, Homo sapien
gaagtcctgaacaaaagcgcatcca

SEQ ID NO: 4744598 - DNA, 25 bp, Homo sapien
cgtgctatggtaattgggaagtcct

SEQ ID NO: 4744599 - DNA, 25 bp, Homo sapien
tctgtcagcctttggatgaccaggg

SEQ ID NO: 4744600 - DNA, 25 bp, Homo sapien
agcagagccttacaaatagtgtgcc

SEQ ID NO: 4744601 - DNA, 25 bp, Homo sapien
cagagaagtcaacgcaaactacgaa

SEQ ID NO: 4744602 - DNA, 25 bp, Homo sapien
cagttgatggtgaccactggaggca

SEQ ID NO: 4744603 - DNA, 25 bp, Homo sapien
aaattcttattctcatcaagagttg

SEQ ID NO: 4744604 - DNA, 25 bp, Homo sapien
caagagttgagctgatgcagttgat

SEQ ID NO: 4744605 - DNA, 25 bp, Homo sapien
aaatgtgctgttgaggaccgtgacc

SEQ ID NO: 4744606 - DNA, 25 bp, Homo sapien
tcaagctaactctaggaactacggg

SEQ ID NO: 4744607 - DNA, 25 bp, Homo sapien
ctaagaagagctaccctagagggtc

SEQ ID NO: 4744608 - DNA, 25 bp, Homo sapien
ttttgggcaatactacggactggag

SEQ ID NO: 4744609 - DNA, 25 bp, Homo sapien
tgtagtacctgtcacgaaacacgct

SEQ ID NO: 4744610 - DNA, 25 bp, Homo sapien
gaaagagatccaacggtagtcgcag

SEQ ID NO: 4744611 - DNA, 25 bp, Homo sapien
tcttgtgagcaagcagagggacatg

SEQ ID NO: 4744612 - DNA, 25 bp, Homo sapien
cagcagcttagagagtgagccacaa

SEQ ID NO: 4744613 - DNA, 25 bp, Homo sapien
gaggttcaggccatccctgatgacc

SEQ ID NO: 4744614 - DNA, 25 bp, Homo sapien
gagaaggcaatgctgttcggcccac

SEQ ID NO: 4744615 - DNA, 25 bp, Homo sapien
gatgaccaagctcaacatgctcaga

SEQ ID NO: 4744616 - DNA, 25 bp, Homo sapien
ttttctgcctcatggtcgaggttca

SEQ ID NO: 4744617 - DNA, 25 bp, Homo sapien
gcctggtgttggttaatagtctgcc

SEQ ID NO: 4744618 - DNA, 25 bp, Homo sapien
caaaagccagattaatagcctggtg

SEQ ID NO: 4744619 - DNA, 25 bp, Homo sapien
agtaaatacggcaggctatgctccg

SEQ ID NO: 4744620 - DNA, 25 bp, Homo sapien
tatgggctttagtgaaggctcaaaa

SEQ ID NO: 4744621 - DNA, 25 bp, Homo sapien
ggtgtggtgggcgtgcatcacgagg

SEQ ID NO: 4744622 - DNA, 25 bp, Homo sapien
tgtggtgggcgtgcatcacgaggcg

SEQ ID NO: 4744623 - DNA, 25 bp, Homo sapien
ggaacctggctgggccggtgtggcg

SEQ ID NO: 4744624 - DNA, 25 bp, Homo sapien
ggtgggcgtgcatcacgaggcgtac

SEQ ID NO: 4744625 - DNA, 25 bp, Homo sapien
catctgcttccggaggaagtctctg

SEQ ID NO: 4744626 - DNA, 25 bp, Homo sapien
gatgtctgagtagtgctgcctctca

SEQ ID NO: 4744627 - DNA, 25 bp, Homo sapien
tgctcgggcttgatgggctctgtgg

SEQ ID NO: 4744628 - DNA, 25 bp, Homo sapien
gtgtgaacaagtctccccgcatctg

SEQ ID NO: 4744629 - DNA, 25 bp, Homo sapien
agggtgagtggaggttatacacgtt

SEQ ID NO: 4744630 - DNA, 25 bp, Homo sapien
gggtgagtggaggttatacacgttg

SEQ ID NO: 4744631 - DNA, 25 bp, Homo sapien
tttgacccaagaggatactgtaggc

SEQ ID NO: 4744632 - DNA, 25 bp, Homo sapien
tgacccaagaggatactgtaggctg

SEQ ID NO: 4744633 - DNA, 25 bp, Homo sapien
cacagcctgagtgaccagatacccc

SEQ ID NO: 4744634 - DNA, 25 bp, Homo sapien
caattttgacccaagaggatactgt

SEQ ID NO: 4744635 - DNA, 25 bp, Homo sapien
tctggcagcccatgaccttggcctt

SEQ ID NO: 4744636 - DNA, 25 bp, Homo sapien
ggccttccacaagacaggtgcctgc

SEQ ID NO: 4744637 - DNA, 25 bp, Homo sapien
ggacatcatcctcagagacccttct

SEQ ID NO: 4744638 - DNA, 25 bp, Homo sapien
cctgctcctgcccacaggacatcat

SEQ ID NO: 4744639 - DNA, 25 bp, Homo sapien
aatacattcacaattccagacacag

SEQ ID NO: 4744640 - DNA, 25 bp, Homo sapien
gttccagtcagtcccttgtctgatg

SEQ ID NO: 4744641 - DNA, 25 bp, Homo sapien
attccccagtctctgttccagtcag

SEQ ID NO: 4744642 - DNA, 25 bp, Homo sapien
catacagtctaatctggccacagtg

SEQ ID NO: 4744643 - DNA, 25 bp, Homo sapien
tgaggcccagggtcgagtgggagcc

SEQ ID NO: 4744644 - DNA, 25 bp, Homo sapien
caggacagagctaacagtgggaatg

SEQ ID NO: 4744645 - DNA, 25 bp, Homo sapien
ctgttggagggagatgagactgagg

SEQ ID NO: 4744646 - DNA, 25 bp, Homo sapien
agggtcgagtgggagccctcagcca

SEQ ID NO: 4744647 - DNA, 25 bp, Homo sapien
aattgcaaatgcttggcggaggccg

SEQ ID NO: 4744648 - DNA, 25 bp, Homo sapien
tgacctcctggaagtcgtctgccct

SEQ ID NO: 4744649 - DNA, 25 bp, Homo sapien
ttccacgtcgcgcaggaaatccagg

SEQ ID NO: 4744650 - DNA, 25 bp, Homo sapien
gatcttgggatatgactcggtgcgc

SEQ ID NO: 4744651 - DNA, 25 bp, Homo sapien
ggaatcgctccgtggctccacagct

SEQ ID NO: 4744652 - DNA, 25 bp, Homo sapien
gggcactgttgttcagcctggatgc

SEQ ID NO: 4744653 - DNA, 25 bp, Homo sapien
gtggtgggcgaaccagccagttcca

SEQ ID NO: 4744654 - DNA, 25 bp, Homo sapien
caatcggcttcttcagtactatgga

SEQ ID NO: 4744655 - DNA, 25 bp, Homo sapien
ttctgttttctgccctcatcccggg

SEQ ID NO: 4744656 - DNA, 25 bp, Homo sapien
cagcagacagcatctatgcatccag

SEQ ID NO: 4744657 - DNA, 25 bp, Homo sapien
tcatcccgggagcagcagacagcat

SEQ ID NO: 4744658 - DNA, 25 bp, Homo sapien
tctatgcatccagggaaggaaaagg

SEQ ID NO: 4744659 - DNA, 25 bp, Homo sapien
caacctgctaatcatgcccttctga

SEQ ID NO: 4744660 - DNA, 25 bp, Homo sapien
caggtctcacttctctctccgcatc

SEQ ID NO: 4744661 - DNA, 25 bp, Homo sapien
ccagccggccagtgtgcctgaaata

SEQ ID NO: 4744662 - DNA, 25 bp, Homo sapien
gaaccctcacaaatccatggtttgc

SEQ ID NO: 4744663 - DNA, 25 bp, Homo sapien
attaatgtcagccagtactggcagc

SEQ ID NO: 4744664 - DNA, 25 bp, Homo sapien
gccagtactggcagcccatacaggg

SEQ ID NO: 4744665 - DNA, 25 bp, Homo sapien
tgtcagccagtactggcagcccata

SEQ ID NO: 4744666 - DNA, 25 bp, Homo sapien
ttctctgtctgctgagacgtgtgca

SEQ ID NO: 4744667 - DNA, 25 bp, Homo sapien
caggcccgctgcttctatccaaggg

SEQ ID NO: 4744668 - DNA, 25 bp, Homo sapien
tcccgtgttcacgaaaaggacagcg

SEQ ID NO: 4744669 - DNA, 25 bp, Homo sapien
ggactcgctcctctgcaggtaaggg

SEQ ID NO: 4744670 - DNA, 25 bp, Homo sapien
gagcgccggaaacagaccccgtgga

SEQ ID NO: 4744671 - DNA, 25 bp, Homo sapien
atggagtacgacgagccggccgaat

SEQ ID NO: 4744672 - DNA, 25 bp, Homo sapien
cccaggatgccgctgatggagtacg

SEQ ID NO: 4744673 - DNA, 25 bp, Homo sapien
ctctcttgcgcttgttggtgtcggc

SEQ ID NO: 4744674 - DNA, 25 bp, Homo sapien
acctgcgtcacggagccagtggaca

SEQ ID NO: 4744675 - DNA, 25 bp, Homo sapien
gcagagcccatgacattcgttttgg

SEQ ID NO: 4744676 - DNA, 25 bp, Homo sapien
ctggcaacatgacctagggctagtt

SEQ ID NO: 4744677 - DNA, 25 bp, Homo sapien
gattgcgctaggctcaaaagaccca

SEQ ID NO: 4744678 - DNA, 25 bp, Homo sapien
ggtcagctacaagtgaaatctcagc

SEQ ID NO: 4744679 - DNA, 25 bp, Homo sapien
cgcagggacttagcagacactttct

SEQ ID NO: 4744680 - DNA, 25 bp, Homo sapien
gacactttctgaagggattactaaa

SEQ ID NO: 4744681 - DNA, 25 bp, Homo sapien
gccaaggtctgcaccgcagggactt

SEQ ID NO: 4744682 - DNA, 25 bp, Homo sapien
aggaattatttcatggcagggagga

SEQ ID NO: 4744683 - DNA, 25 bp, Homo sapien
gccaaccatggaggatcagaggcct

SEQ ID NO: 4744684 - DNA, 25 bp, Homo sapien
cattttactgggtgaggtaatgaca

SEQ ID NO: 4744685 - DNA, 25 bp, Homo sapien
tgagcacctggttagtgcccctcca

SEQ ID NO: 4744686 - DNA, 25 bp, Homo sapien
tgacaaagttggaactggaggccag

SEQ ID NO: 4744687 - DNA, 25 bp, Homo sapien
ctgctgtacttttgtccggatgatc

SEQ ID NO: 4744688 - DNA, 25 bp, Homo sapien
ttgatggaactgacgctaggcacgg

SEQ ID NO: 4744689 - DNA, 25 bp, Homo sapien
taggcacggtgtcattgtcacacac

SEQ ID NO: 4744690 - DNA, 25 bp, Homo sapien
caccactttgggtgtggcgaccttt

SEQ ID NO: 4744691 - DNA, 25 bp, Homo sapien
ggatcctccaattaccccaggcttg

SEQ ID NO: 4744692 - DNA, 25 bp, Homo sapien
acacaaccatggctgacccgaagct

SEQ ID NO: 4744693 - DNA, 25 bp, Homo sapien
gatgagcaagttccactatcctctg

SEQ ID NO: 4744694 - DNA, 25 bp, Homo sapien
tatcctctggcggactacatccggg

SEQ ID NO: 4744695 - DNA, 25 bp, Homo sapien
cagggcctgacaccttgatgagcaa

SEQ ID NO: 4744696 - DNA, 25 bp, Homo sapien
aagaccccttggccttctccaccat

SEQ ID NO: 4744697 - DNA, 25 bp, Homo sapien
caagaccccttggccttctccacca

SEQ ID NO: 4744698 - DNA, 25 bp, Homo sapien
tctggaattggtaagaagtgaagtc

SEQ ID NO: 4744699 - DNA, 25 bp, Homo sapien
ggatgcaaacgggtcgtgcttacag

SEQ ID NO: 4744700 - DNA, 25 bp, Homo sapien
caaacgggtcgtgcttacagtgtat

SEQ ID NO: 4744701 - DNA, 25 bp, Homo sapien
gggtcgtgcttacagtgtatttcca

SEQ ID NO: 4744702 - DNA, 25 bp, Homo sapien
tatgcatggatgcaaacgggtcgtg

SEQ ID NO: 4744703 - DNA, 25 bp, Homo sapien
ggaaggagcagctttgaggaggccg

SEQ ID NO: 4744704 - DNA, 25 bp, Homo sapien
ctaggagcgggtgcccaactccggc

SEQ ID NO: 4744705 - DNA, 25 bp, Homo sapien
gcgggtgcccaactccggctggctt

SEQ ID NO: 4744706 - DNA, 25 bp, Homo sapien
cgccggaacaatcggcccttgactt

SEQ ID NO: 4744707 - DNA, 25 bp, Homo sapien
tgagacccgctgccttcaaagttcc

SEQ ID NO: 4744708 - DNA, 25 bp, Homo sapien
cgtctcggacgaagttgcaaagaac

SEQ ID NO: 4744709 - DNA, 25 bp, Homo sapien
ggtctccgccagatcctttctttct

SEQ ID NO: 4744710 - DNA, 25 bp, Homo sapien
tcctggcgggtttggagatgcttcc

SEQ ID NO: 4744711 - DNA, 25 bp, Homo sapien
tgggaccaggaacggggacaccagc

SEQ ID NO: 4744712 - DNA, 25 bp, Homo sapien
gaacggggacaccagcgacggactc

SEQ ID NO: 4744713 - DNA, 25 bp, Homo sapien
gggacaccagcgacggactcttcct

SEQ ID NO: 4744714 - DNA, 25 bp, Homo sapien
accaggaacggggacaccagcgacg

SEQ ID NO: 4744715 - DNA, 25 bp, Homo sapien
tccgctgcctcttccgggacggccg

SEQ ID NO: 4744716 - DNA, 25 bp, Homo sapien
tccctcgtgggtctgattccactgt

SEQ ID NO: 4744717 - DNA, 25 bp, Homo sapien
gtgccaaccaactcttcgagccccg

SEQ ID NO: 4744718 - DNA, 25 bp, Homo sapien
gccgccctccctcgtgggtctgatt

SEQ ID NO: 4744719 - DNA, 25 bp, Homo sapien
tgccccaggcgtggagtgaggaaca

SEQ ID NO: 4744720 - DNA, 25 bp, Homo sapien
gatggagccgcagtcggctctgact

SEQ ID NO: 4744721 - DNA, 25 bp, Homo sapien
ctgctcggcgcgcacagtgcgccac

SEQ ID NO: 4744722 - DNA, 25 bp, Homo sapien
tcggctctgactgcctgcgttgccg

SEQ ID NO: 4744723 - DNA, 25 bp, Homo sapien
gcttcttgagaaccgaatgagccaa

SEQ ID NO: 4744724 - DNA, 25 bp, Homo sapien
gctaataagggtccctgaagcgggc

SEQ ID NO: 4744725 - DNA, 25 bp, Homo sapien
aatgagccaagtcgcgtccagggct

SEQ ID NO: 4744726 - DNA, 25 bp, Homo sapien
tcgcgtccagggctaataagggtcc

SEQ ID NO: 4744727 - DNA, 25 bp, Homo sapien
tcccgcaactctcggcgttcttggg

SEQ ID NO: 4744728 - DNA, 25 bp, Homo sapien
gagtttccctctggataggggtgat

SEQ ID NO: 4744729 - DNA, 25 bp, Homo sapien
agccccttcccgcaactctcggcgt

SEQ ID NO: 4744730 - DNA, 25 bp, Homo sapien
caactctcggcgttcttgggggaag

SEQ ID NO: 4744731 - DNA, 25 bp, Homo sapien
tcctgctggtccgaggagtcggata

SEQ ID NO: 4744732 - DNA, 25 bp, Homo sapien
ccgaggagtcggataatttttctct

SEQ ID NO: 4744733 - DNA, 25 bp, Homo sapien
tccgaggagtcggataatttttctc

SEQ ID NO: 4744734 - DNA, 25 bp, Homo sapien
gctggtccgaggagtcggataattt

SEQ ID NO: 4744735 - DNA, 25 bp, Homo sapien
ttcaggacttgatggaatggacagg

SEQ ID NO: 4744736 - DNA, 25 bp, Homo sapien
gggccgctcacaggtcggaataatt

SEQ ID NO: 4744737 - DNA, 25 bp, Homo sapien
gcgtccgaaggcaccgtgaaatgat

SEQ ID NO: 4744738 - DNA, 25 bp, Homo sapien
actaaagagcttctcgccatgtgag

SEQ ID NO: 4744739 - DNA, 25 bp, Homo sapien
tctggacgctcgagaccagcgggaa

SEQ ID NO: 4744740 - DNA, 25 bp, Homo sapien
cagcgggaaacaaatgtggttcccg

SEQ ID NO: 4744741 - DNA, 25 bp, Homo sapien
cgcacccatgaagggcagaggatta

SEQ ID NO: 4744742 - DNA, 25 bp, Homo sapien
taggccaagcatcacgaatcgtagg

SEQ ID NO: 4744743 - DNA, 25 bp, Homo sapien
ggtccgtacagcgcgcacgtggtac

SEQ ID NO: 4744744 - DNA, 25 bp, Homo sapien
gtacagcgcgcacgtggtaccgcat

SEQ ID NO: 4744745 - DNA, 25 bp, Homo sapien
gattcggggtccgtacagcgcgcac

SEQ ID NO: 4744746 - DNA, 25 bp, Homo sapien
ttcggggtccgtacagcgcgcacgt

SEQ ID NO: 4744747 - DNA, 25 bp, Homo sapien
ccgagtcgcggcgagttggtccctt

SEQ ID NO: 4744748 - DNA, 25 bp, Homo sapien
gcgagttggtcccttgcggtataaa

SEQ ID NO: 4744749 - DNA, 25 bp, Homo sapien
aactgtgtcagcattgagggtggac

SEQ ID NO: 4744750 - DNA, 25 bp, Homo sapien
ccctgcttcgtttgccgggcctgaa

SEQ ID NO: 4744751 - DNA, 25 bp, Homo sapien
aatacttgggttgcgctagaatacg

SEQ ID NO: 4744752 - DNA, 25 bp, Homo sapien
tgcgctagaatacgcaatgggtctg

SEQ ID NO: 4744753 - DNA, 25 bp, Homo sapien
agcgactcgccacccggaaatactt

SEQ ID NO: 4744754 - DNA, 25 bp, Homo sapien
tgtgttcgggtaacctggtgctcat

SEQ ID NO: 4744755 - DNA, 25 bp, Homo sapien
tgcagagttatgtttccgcttaatg

SEQ ID NO: 4744756 - DNA, 25 bp, Homo sapien
tgtaatcagtgttaccgtattcttg

SEQ ID NO: 4744757 - DNA, 25 bp, Homo sapien
ctcaaccacccggtatacctccctg

SEQ ID NO: 4744758 - DNA, 25 bp, Homo sapien
tacctccctggtaaccttgtaatca

SEQ ID NO: 4744759 - DNA, 25 bp, Homo sapien
cttccttgttcttcttcgtatattt

SEQ ID NO: 4744760 - DNA, 25 bp, Homo sapien
ggcttccttgttcttcttcgtatat

SEQ ID NO: 4744761 - DNA, 25 bp, Homo sapien
gggcttccttgttcttcttcgtata

SEQ ID NO: 4744762 - DNA, 25 bp, Homo sapien
agggcttccttgttcttcttcgtat

SEQ ID NO: 4744763 - DNA, 25 bp, Homo sapien
gatcgatacgcatttaaatctccaa

SEQ ID NO: 4744764 - DNA, 25 bp, Homo sapien
ctacccttggggagcatacagtttc

SEQ ID NO: 4744765 - DNA, 25 bp, Homo sapien
tggaagatagtctctacccttgggg

SEQ ID NO: 4744766 - DNA, 25 bp, Homo sapien
tattctgatcgatacgcatttaaat

SEQ ID NO: 4744767 - DNA, 25 bp, Homo sapien
tgaagccatgcgttctcacggaggc

SEQ ID NO: 4744768 - DNA, 25 bp, Homo sapien
aaaaattcacttgtagccgggtgca

SEQ ID NO: 4744769 - DNA, 25 bp, Homo sapien
ttcggaggcttccaaaggatcagca

SEQ ID NO: 4744770 - DNA, 25 bp, Homo sapien
tcagcctaagatcaggagcgcaagg

SEQ ID NO: 4744771 - DNA, 25 bp, Homo sapien
cccggcttttgcccgataaatagca

SEQ ID NO: 4744772 - DNA, 25 bp, Homo sapien
tgcgggcgtagagggcacgaactcc

SEQ ID NO: 4744773 - DNA, 25 bp, Homo sapien
tgtagttttccttgcgggcgtagag

SEQ ID NO: 4744774 - DNA, 25 bp, Homo sapien
ccggcttttgcccgataaatagcat

SEQ ID NO: 4744775 - DNA, 25 bp, Homo sapien
taatagacgcaatctaggtaacttc

SEQ ID NO: 4744776 - DNA, 25 bp, Homo sapien
caatctaggtaacttcaagagaaga

SEQ ID NO: 4744777 - DNA, 25 bp, Homo sapien
ctcttttgtacgagtcattcaaata

SEQ ID NO: 4744778 - DNA, 25 bp, Homo sapien
tacgagtcattcaaataatagacgc

SEQ ID NO: 4744779 - DNA, 25 bp, Homo sapien
ggaacccatggatacctctgagcct

SEQ ID NO: 4744780 - DNA, 25 bp, Homo sapien
tctatctgcattaccattcactggg

SEQ ID NO: 4744781 - DNA, 25 bp, Homo sapien
cagcagtcttttgagccaagtggca

SEQ ID NO: 4744782 - DNA, 25 bp, Homo sapien
tatccatcgatgcagatgaaccaca

SEQ ID NO: 4744783 - DNA, 25 bp, Homo sapien
ggacatagaacagctcaatcagtgt

SEQ ID NO: 4744784 - DNA, 25 bp, Homo sapien
ggaagtggaggacatagaacagctc

SEQ ID NO: 4744785 - DNA, 25 bp, Homo sapien
ctcaatcagtgtttgatccaacact

SEQ ID NO: 4744786 - DNA, 25 bp, Homo sapien
tcagtgtttgatccaacacttccat

SEQ ID NO: 4744787 - DNA, 25 bp, Homo sapien
tctagtagaatttgagtctccaggg

SEQ ID NO: 4744788 - DNA, 25 bp, Homo sapien
tctccagggaaagagctacttgacc

SEQ ID NO: 4744789 - DNA, 25 bp, Homo sapien
cattcagatggttgcatcctgccag

SEQ ID NO: 4744790 - DNA, 25 bp, Homo sapien
tcagttataatgcagggccagtgat

SEQ ID NO: 4744791 - DNA, 25 bp, Homo sapien
gttcataagtctgcaaaaggctgta

SEQ ID NO: 4744792 - DNA, 25 bp, Homo sapien
taacagtctagccttcctcggtaca

SEQ ID NO: 4744793 - DNA, 25 bp, Homo sapien
gcttggaaatctcttaaccatggga

SEQ ID NO: 4744794 - DNA, 25 bp, Homo sapien
gctccattgagaccgtatatacgtg

SEQ ID NO: 4744795 - DNA, 25 bp, Homo sapien
taaataagccctgtttgagcatgcg

SEQ ID NO: 4744796 - DNA, 25 bp, Homo sapien
ggaatggtgcccttgcaatactagt

SEQ ID NO: 4744797 - DNA, 25 bp, Homo sapien
ctgtagacataattcccgggtccgg

SEQ ID NO: 4744798 - DNA, 25 bp, Homo sapien
tcataatctgtggatccagggctca

SEQ ID NO: 4744799 - DNA, 25 bp, Homo sapien
tttcaagaacgatttcatagcctgg

SEQ ID NO: 4744800 - DNA, 25 bp, Homo sapien
tagcctggttgaaaattgtgtgctc

SEQ ID NO: 4744801 - DNA, 25 bp, Homo sapien
tctatgaatgtccacattttcaaga

SEQ ID NO: 4744802 - DNA, 25 bp, Homo sapien
catctctatgaatgtccacattttc

SEQ ID NO: 4744803 - DNA, 25 bp, Homo sapien
tagttaggctgtcgcatacaaagac

SEQ ID NO: 4744804 - DNA, 25 bp, Homo sapien
gatttgattcagagtggccatcgca

SEQ ID NO: 4744805 - DNA, 25 bp, Homo sapien
taagagactgcatgaccgaaggaaa

SEQ ID NO: 4744806 - DNA, 25 bp, Homo sapien
taaagtcaggaaggatcgcaagtga

SEQ ID NO: 4744807 - DNA, 25 bp, Homo sapien
ctgcccttccccttatgagtaatca

SEQ ID NO: 4744808 - DNA, 25 bp, Homo sapien
aattgttggtttgtccttacatgtg

SEQ ID NO: 4744809 - DNA, 25 bp, Homo sapien
ccccttatgagtaatcattaagaga

SEQ ID NO: 4744810 - DNA, 25 bp, Homo sapien
taaaatctatccagagaaggcaaac

SEQ ID NO: 4744811 - DNA, 25 bp, Homo sapien
gaaaccccagaaatcccatgcagct

SEQ ID NO: 4744812 - DNA, 25 bp, Homo sapien
gaagaaagctttttatggccattgt

SEQ ID NO: 4744813 - DNA, 25 bp, Homo sapien
gtgatttcactgtagatcagcaaca

SEQ ID NO: 4744814 - DNA, 25 bp, Homo sapien
gctttacttgtgaatggagcgaggt

SEQ ID NO: 4744815 - DNA, 25 bp, Homo sapien
tctgcctattgtggccgtttgctct

SEQ ID NO: 4744816 - DNA, 25 bp, Homo sapien
tttttatccatacagattctctgcc

SEQ ID NO: 4744817 - DNA, 25 bp, Homo sapien
catggctttcggttgcagacttggt

SEQ ID NO: 4744818 - DNA, 25 bp, Homo sapien
gacttggttttctgcaagagtgccc

SEQ ID NO: 4744819 - DNA, 25 bp, Homo sapien
acttggtgtttgacttcagtggaag

SEQ ID NO: 4744820 - DNA, 25 bp, Homo sapien
ttacttggtgtttgacttcagtgga

SEQ ID NO: 4744821 - DNA, 25 bp, Homo sapien
tacttggtgtttgacttcagtggaa

SEQ ID NO: 4744822 - DNA, 25 bp, Homo sapien
gtatcctgtcagtaattgttttttc

SEQ ID NO: 4744823 - DNA, 25 bp, Homo sapien
atcctgtcagtaattgttttttcat

SEQ ID NO: 4744824 - DNA, 25 bp, Homo sapien
tggtatcctgtcagtaattgttttt

SEQ ID NO: 4744825 - DNA, 25 bp, Homo sapien
ctggtatcctgtcagtaattgtttt

SEQ ID NO: 4744826 - DNA, 25 bp, Homo sapien
tgtattatagtatgccacagccact

SEQ ID NO: 4744827 - DNA, 25 bp, Homo sapien
tgcctagtggcacaaaaaataccaa

SEQ ID NO: 4744828 - DNA, 25 bp, Homo sapien
ccagtgcaatcctcctagtcttgga

SEQ ID NO: 4744829 - DNA, 25 bp, Homo sapien
cagtcaccagttgtttacaacctgg

SEQ ID NO: 4744830 - DNA, 25 bp, Homo sapien
tcatatagatggctgttagcaaagt

SEQ ID NO: 4744831 - DNA, 25 bp, Homo sapien
atgtgtaaacgatcatatagatggc

SEQ ID NO: 4744832 - DNA, 25 bp, Homo sapien
taaaaacctatgtgtaaacgatcat

SEQ ID NO: 4744833 - DNA, 25 bp, Homo sapien
tagatggctgttagcaaagtggtac

SEQ ID NO: 4744834 - DNA, 25 bp, Homo sapien
tatatacacaggaagccatcatcac

SEQ ID NO: 4744835 - DNA, 25 bp, Homo sapien
catgagagattagttttgcactttc

SEQ ID NO: 4744836 - DNA, 25 bp, Homo sapien
ggaaccattgcattctgtcatgaga

SEQ ID NO: 4744837 - DNA, 25 bp, Homo sapien
tccagaagtccctcatgttcctttg

SEQ ID NO: 4744838 - DNA, 25 bp, Homo sapien
tgcctggtactattctctgtaatcc

SEQ ID NO: 4744839 - DNA, 25 bp, Homo sapien
tctcactggtggaaatagacactat

SEQ ID NO: 4744840 - DNA, 25 bp, Homo sapien
taagatttgctaggtggaaacaaga

SEQ ID NO: 4744841 - DNA, 25 bp, Homo sapien
gaacactttgccgaatattcagaaa

SEQ ID NO: 4744842 - DNA, 25 bp, Homo sapien
agcatcgtgggcattccagttgtta

SEQ ID NO: 4744843 - DNA, 25 bp, Homo sapien
gcatcgtgggcattccagttgttac

SEQ ID NO: 4744844 - DNA, 25 bp, Homo sapien
gagcatcgtgggcattccagttgtt

SEQ ID NO: 4744845 - DNA, 25 bp, Homo sapien
gcagtagggacttgagcgagcaaca

SEQ ID NO: 4744846 - DNA, 25 bp, Homo sapien
agcgagcaacatgggcattgcaata

SEQ ID NO: 4744847 - DNA, 25 bp, Homo sapien
acttgagcgagcaacatgggcattg

SEQ ID NO: 4744848 - DNA, 25 bp, Homo sapien
gagcagtgtgggcattccagttgtg

SEQ ID NO: 4744849 - DNA, 25 bp, Homo sapien
ttgagtgagcaacgtgggcattcca

SEQ ID NO: 4744850 - DNA, 25 bp, Homo sapien
gcaacgtgggcattccaatagggac

SEQ ID NO: 4744851 - DNA, 25 bp, Homo sapien
ccaatagggacttgagtgagcaacg

SEQ ID NO: 4744852 - DNA, 25 bp, Homo sapien
ggacttgagtgagcaacgtggccat

SEQ ID NO: 4744853 - DNA, 25 bp, Homo sapien
aatttgcttcagtttaccaggcatg

SEQ ID NO: 4744854 - DNA, 25 bp, Homo sapien
gaaccatagcgttgttgatattcag

SEQ ID NO: 4744855 - DNA, 25 bp, Homo sapien
agagtctacacgctgaacaacaatg

SEQ ID NO: 4744856 - DNA, 25 bp, Homo sapien
gagtacagtttcaatgctaatagca

SEQ ID NO: 4744857 - DNA, 25 bp, Homo sapien
ccacttctaaggctacatcattttc

SEQ ID NO: 4744858 - DNA, 25 bp, Homo sapien
caaggatgagcagaatatatttatt

SEQ ID NO: 4744859 - DNA, 25 bp, Homo sapien
cattttcagagtaactgattccaag

SEQ ID NO: 4744860 - DNA, 25 bp, Homo sapien
cagagtaactgattccaaggatgag

SEQ ID NO: 4744861 - DNA, 25 bp, Homo sapien
acttgataggtgctttgactttaaa

SEQ ID NO: 4744862 - DNA, 25 bp, Homo sapien
gcttctaaagggcaaataatacatc

SEQ ID NO: 4744863 - DNA, 25 bp, Homo sapien
tctgaatttgcacctactctgtaac

SEQ ID NO: 4744864 - DNA, 25 bp, Homo sapien
gactagcagtcccaaacctttttga

SEQ ID NO: 4744865 - DNA, 25 bp, Homo sapien
ccttgtcttgacagtatcatgcaca

SEQ ID NO: 4744866 - DNA, 25 bp, Homo sapien
tattgtttctacttcgggagatggg

SEQ ID NO: 4744867 - DNA, 25 bp, Homo sapien
catgcacaggtaggtacttttaagc

SEQ ID NO: 4744868 - DNA, 25 bp, Homo sapien
taattctgactagcctgccggctgc

SEQ ID NO: 4744869 - DNA, 25 bp, Homo sapien
taatcagtgcaaatccatcagtcac

SEQ ID NO: 4744870 - DNA, 25 bp, Homo sapien
tttcctaatcagtgcaaatccatca

SEQ ID NO: 4744871 - DNA, 25 bp, Homo sapien
tcctaatcagtgcaaatccatcagt

SEQ ID NO: 4744872 - DNA, 25 bp, Homo sapien
cctaatcagtgcaaatccatcagtc

SEQ ID NO: 4744873 - DNA, 25 bp, Homo sapien
tgtcctgtgtgacccttgtaacctg

SEQ ID NO: 4744874 - DNA, 25 bp, Homo sapien
tatttgaatgcctcatccctttccc

SEQ ID NO: 4744875 - DNA, 25 bp, Homo sapien
aattattatttgaatgcctcatccc

SEQ ID NO: 4744876 - DNA, 25 bp, Homo sapien
ccctcttacagcgttttcattatga

SEQ ID NO: 4744877 - DNA, 25 bp, Homo sapien
ttaattgatgattgacccttggtgt

SEQ ID NO: 4744878 - DNA, 25 bp, Homo sapien
gcttcctatttttgacacatttgcc

SEQ ID NO: 4744879 - DNA, 25 bp, Homo sapien
atcttttagccttctacccactgag

SEQ ID NO: 4744880 - DNA, 25 bp, Homo sapien
tctgaaacagactgcttaccacctg

SEQ ID NO: 4744881 - DNA, 25 bp, Homo sapien
taagtgtgctttagcacctgcacag

SEQ ID NO: 4744882 - DNA, 25 bp, Homo sapien
cagtatgcaggttaattctcttggc

SEQ ID NO: 4744883 - DNA, 25 bp, Homo sapien
ccatggtaacatttgtgaggtgttc

SEQ ID NO: 4744884 - DNA, 25 bp, Homo sapien
acatttgtgaggtgttcctttttga

SEQ ID NO: 4744885 - DNA, 25 bp, Homo sapien
gaaattgcagcgactttgacctgtg

SEQ ID NO: 4744886 - DNA, 25 bp, Homo sapien
cctagctttctatgtggccagtttc

SEQ ID NO: 4744887 - DNA, 25 bp, Homo sapien
caggatcactattctgccatgtctg

SEQ ID NO: 4744888 - DNA, 25 bp, Homo sapien
cttgacactcaattacgtagatggg

SEQ ID NO: 4744889 - DNA, 25 bp, Homo sapien
tcttgtattcctgtaatacatgtgg

SEQ ID NO: 4744890 - DNA, 25 bp, Homo sapien
ttgtcggatcggataatttttactg

SEQ ID NO: 4744891 - DNA, 25 bp, Homo sapien
aaatcgattttctgtttgtcggatc

SEQ ID NO: 4744892 - DNA, 25 bp, Homo sapien
tggtaatccgttgctgtgtcctaca

SEQ ID NO: 4744893 - DNA, 25 bp, Homo sapien
atttctctggtgtgatttcctatct

SEQ ID NO: 4744894 - DNA, 25 bp, Homo sapien
tcctttctgtgttagtggtgttcac

SEQ ID NO: 4744895 - DNA, 25 bp, Homo sapien
ctgctatttagcccattcagtgatt

SEQ ID NO: 4744896 - DNA, 25 bp, Homo sapien
tatgaccgaggtttagtgaatagtt

SEQ ID NO: 4744897 - DNA, 25 bp, Homo sapien
agtgtctgggattattctgtttttc

SEQ ID NO: 4744898 - DNA, 25 bp, Homo sapien
ggtaaaagctgatggattcccaggc

SEQ ID NO: 4744899 - DNA, 25 bp, Homo sapien
ccaaatggctttgactgtgttaaag

SEQ ID NO: 4744900 - DNA, 25 bp, Homo sapien
tttaatgcttccttggtaaaagctg

SEQ ID NO: 4744901 - DNA, 25 bp, Homo sapien
tagaaaagaaatgttgcagattaat

SEQ ID NO: 4744902 - DNA, 25 bp, Homo sapien
gaacaaaataactcctcatttcgaa

SEQ ID NO: 4744903 - DNA, 25 bp, Homo sapien
aagaaatgttgcagattaatgatgc

SEQ ID NO: 4744904 - DNA, 25 bp, Homo sapien
cctcatttcgaaagataatagaaaa

SEQ ID NO: 4744905 - DNA, 25 bp, Homo sapien
ccttggtgaagaacaggagtcagca

SEQ ID NO: 4744906 - DNA, 25 bp, Homo sapien
tctatagtcttaagccctggctaca

SEQ ID NO: 4744907 - DNA, 25 bp, Homo sapien
tctgaacagtatcgatgcggaaacc

SEQ ID NO: 4744908 - DNA, 25 bp, Homo sapien
gcacttatgtgccagttctgaacag

SEQ ID NO: 4744909 - DNA, 25 bp, Homo sapien
tttgttcaggtcctgtttttctcat

SEQ ID NO: 4744910 - DNA, 25 bp, Homo sapien
ttttgttcaggtcctgtttttctca

SEQ ID NO: 4744911 - DNA, 25 bp, Homo sapien
gcagtatcttctaaaacactccatt

SEQ ID NO: 4744912 - DNA, 25 bp, Homo sapien
tccattttgcatggatgaacctgtt

SEQ ID NO: 4744913 - DNA, 25 bp, Homo sapien
ttctaaaacactccattttgcatgg

SEQ ID NO: 4744914 - DNA, 25 bp, Homo sapien
aacactccattttgcatggatgaac

SEQ ID NO: 4744915 - DNA, 25 bp, Homo sapien
gtccagactgatctcgaactcttga

SEQ ID NO: 4744916 - DNA, 25 bp, Homo sapien
agtggtgcaatctcagcgcactgca

SEQ ID NO: 4744917 - DNA, 25 bp, Homo sapien
acctccgcctcctggattcaagcaa

SEQ ID NO: 4744918 - DNA, 25 bp, Homo sapien
tgctctgttgtccagattggagagc

SEQ ID NO: 4744919 - DNA, 25 bp, Homo sapien
taatactactcacattgctgccact

SEQ ID NO: 4744920 - DNA, 25 bp, Homo sapien
tgtagtctacccttatctttaggga

SEQ ID NO: 4744921 - DNA, 25 bp, Homo sapien
gccactgctgatgccttataactag

SEQ ID NO: 4744922 - DNA, 25 bp, Homo sapien
tgaatgtggcactgtactcaccctt

SEQ ID NO: 4744923 - DNA, 25 bp, Homo sapien
tcagcctaggagatcgagagcaacc

SEQ ID NO: 4744924 - DNA, 25 bp, Homo sapien
ttcagcctaggagatcgagagcaac

SEQ ID NO: 4744925 - DNA, 25 bp, Homo sapien
cagcctaggagatcgagagcaacct

SEQ ID NO: 4744926 - DNA, 25 bp, Homo sapien
tatgtcccccttaatcttgtaatct

SEQ ID NO: 4744927 - DNA, 25 bp, Homo sapien
ccgataaccagagttttggtggttg

SEQ ID NO: 4744928 - DNA, 25 bp, Homo sapien
tgccgataaccagagttttggtggt

SEQ ID NO: 4744929 - DNA, 25 bp, Homo sapien
tcaatgccgataaccagagttttgg

SEQ ID NO: 4744930 - DNA, 25 bp, Homo sapien
tctccatagcagttaaacctgaact

SEQ ID NO: 4744931 - DNA, 25 bp, Homo sapien
tgaactctcatcagagaagtaaaaa

SEQ ID NO: 4744932 - DNA, 25 bp, Homo sapien
catagcagttaaacctgaactctca

SEQ ID NO: 4744933 - DNA, 25 bp, Homo sapien
gtcctctccatagcagttaaacctg

SEQ ID NO: 4744934 - DNA, 25 bp, Homo sapien
ctgttttccagcgaccattttcctt

SEQ ID NO: 4744935 - DNA, 25 bp, Homo sapien
catattgctgttggactgatcttcc

SEQ ID NO: 4744936 - DNA, 25 bp, Homo sapien
aatctgtcatctcgttgcttctcta

SEQ ID NO: 4744937 - DNA, 25 bp, Homo sapien
atagaggtctcatcatggctttctg

SEQ ID NO: 4744938 - DNA, 25 bp, Homo sapien
taaaattgaggatagtgtgtttagc

SEQ ID NO: 4744939 - DNA, 25 bp, Homo sapien
ctttaaaattgaggatagtgtgttt

SEQ ID NO: 4744940 - DNA, 25 bp, Homo sapien
ttaaaattgaggatagtgtgtttag

SEQ ID NO: 4744941 - DNA, 25 bp, Homo sapien
tttaaaattgaggatagtgtgttta

SEQ ID NO: 4744942 - DNA, 25 bp, Homo sapien
gagtttattcactctgctctaagtg

SEQ ID NO: 4744943 - DNA, 25 bp, Homo sapien
gatgcatccaggagatataattttg

SEQ ID NO: 4744944 - DNA, 25 bp, Homo sapien
taattttgtatacatcaggcttcct

SEQ ID NO: 4744945 - DNA, 25 bp, Homo sapien
tcaggtaatacatgtaggagtagaa

SEQ ID NO: 4744946 - DNA, 25 bp, Homo sapien
atcttaagagatgatatcagcctct

SEQ ID NO: 4744947 - DNA, 25 bp, Homo sapien
tccgtgaccctgaatcttaagagat

SEQ ID NO: 4744948 - DNA, 25 bp, Homo sapien
ctctttctcacatgccatggctgct

SEQ ID NO: 4744949 - DNA, 25 bp, Homo sapien
cctctttctcacatgccatggctgc

SEQ ID NO: 4744950 - DNA, 25 bp, Homo sapien
tgtagtatttaacatacacgtgagt

SEQ ID NO: 4744951 - DNA, 25 bp, Homo sapien
ttaacatacacgtgagtgctcaatg

SEQ ID NO: 4744952 - DNA, 25 bp, Homo sapien
gatgctagaaaaatgctcccatatc

SEQ ID NO: 4744953 - DNA, 25 bp, Homo sapien
aactgtgtagtatttaacatacacg

SEQ ID NO: 4744954 - DNA, 25 bp, Homo sapien
tggaaagaagtacttgttgtggtca

SEQ ID NO: 4744955 - DNA, 25 bp, Homo sapien
catggccttaaagttgtacttctgt

SEQ ID NO: 4744956 - DNA, 25 bp, Homo sapien
gtacttgttgtggtcatctgttttc

SEQ ID NO: 4744957 - DNA, 25 bp, Homo sapien
acatggccttaaagttgtacttctg

SEQ ID NO: 4744958 - DNA, 25 bp, Homo sapien
taggttcaagctattcctacttcag

SEQ ID NO: 4744959 - DNA, 25 bp, Homo sapien
ctcctaggttcaagctattcctact

SEQ ID NO: 4744960 - DNA, 25 bp, Homo sapien
ctaggttcaagctattcctacttca

SEQ ID NO: 4744961 - DNA, 25 bp, Homo sapien
cacctcctaggttcaagctattcct

SEQ ID NO: 4744962 - DNA, 25 bp, Homo sapien
gcagggaattgagcttcagcaaaat

SEQ ID NO: 4744963 - DNA, 25 bp, Homo sapien
tgtttcaagcggactgtcactcaga

SEQ ID NO: 4744964 - DNA, 25 bp, Homo sapien
tttcaactaccgcaaagctatacag

SEQ ID NO: 4744965 - DNA, 25 bp, Homo sapien
tgtcatcattgaagccctgaagagg

SEQ ID NO: 4744966 - DNA, 25 bp, Homo sapien
tggcttgtgcacagtctagagacta

SEQ ID NO: 4744967 - DNA, 25 bp, Homo sapien
tctgcccaaccagtcatgtagatgt

SEQ ID NO: 4744968 - DNA, 25 bp, Homo sapien
tagagactatataagcaggccatga

SEQ ID NO: 4744969 - DNA, 25 bp, Homo sapien
ctttgtgagcatacacctagcctta

SEQ ID NO: 4744970 - DNA, 25 bp, Homo sapien
gaggaggcctattagcatgcttgcc

SEQ ID NO: 4744971 - DNA, 25 bp, Homo sapien
gccaaacagtttatcccatccaaga

SEQ ID NO: 4744972 - DNA, 25 bp, Homo sapien
gatgcctcagccaagtcgttcgtgg

SEQ ID NO: 4744973 - DNA, 25 bp, Homo sapien
ggtgggaccattgacctggtttgcc

SEQ ID NO: 4744974 - DNA, 25 bp, Homo sapien
agtcttgatgccaactcaggagccc

SEQ ID NO: 4744975 - DNA, 25 bp, Homo sapien
cacccagctatggtttttttcgtag

SEQ ID NO: 4744976 - DNA, 25 bp, Homo sapien
attgagaccacagttgagtgccacc

SEQ ID NO: 4744977 - DNA, 25 bp, Homo sapien
tgcccggcctctgttgagtcttgat

SEQ ID NO: 4744978 - DNA, 25 bp, Homo sapien
ggaaccttcgcctttgagatcagga

SEQ ID NO: 4744979 - DNA, 25 bp, Homo sapien
tgtgaacaactttggtggaaccttc

SEQ ID NO: 4744980 - DNA, 25 bp, Homo sapien
tcaaaggtgtcagaccaggagtctc

SEQ ID NO: 4744981 - DNA, 25 bp, Homo sapien
aaattgagcccaagtgtcccgaagg

SEQ ID NO: 4744982 - DNA, 25 bp, Homo sapien
catatcattctaactgctcggcggt

SEQ ID NO: 4744983 - DNA, 25 bp, Homo sapien
cggcacctacgagggcgatgtcaga

SEQ ID NO: 4744984 - DNA, 25 bp, Homo sapien
tgtcagactcgggaatccaggcacg

SEQ ID NO: 4744985 - DNA, 25 bp, Homo sapien
catgaggcagctatcataacaaggc

SEQ ID NO: 4744986 - DNA, 25 bp, Homo sapien
cacccagcctcgaggtttgtttctt

SEQ ID NO: 4744987 - DNA, 25 bp, Homo sapien
tgtttcttaaactatcaccctccag

SEQ ID NO: 4744988 - DNA, 25 bp, Homo sapien
tcaccccagattctgccaagctggt

SEQ ID NO: 4744989 - DNA, 25 bp, Homo sapien
tggtgcttaggacagtggccctccc

SEQ ID NO: 4744990 - DNA, 25 bp, Homo sapien
cagccccacatgagctgtctcgtag

SEQ ID NO: 4744991 - DNA, 25 bp, Homo sapien
tgtttgtgggcctcacttcccaggt

SEQ ID NO: 4744992 - DNA, 25 bp, Homo sapien
gctgaggccgagatctctgacatgt

SEQ ID NO: 4744993 - DNA, 25 bp, Homo sapien
ggccaagacagcacttttgtatggg

SEQ ID NO: 4744994 - DNA, 25 bp, Homo sapien
ttaaagaaaggaattcatacatatt

SEQ ID NO: 4744995 - DNA, 25 bp, Homo sapien
cattttcttaaggtggtaatacata

SEQ ID NO: 4744996 - DNA, 25 bp, Homo sapien
ctgtaaaagataacaggtgtacatt

SEQ ID NO: 4744997 - DNA, 25 bp, Homo sapien
gcttaagcaactgggcaaatattca

SEQ ID NO: 4744998 - DNA, 25 bp, Homo sapien
tgccattcggatccatgatcctttg

SEQ ID NO: 4744999 - DNA, 25 bp, Homo sapien
tgttaaagaatccagtgccattcgg

SEQ ID NO: 4745000 - DNA, 25 bp, Homo sapien
tgtctcgtttttaccattggcttgg

SEQ ID NO: 4745001 - DNA, 25 bp, Homo sapien
catcatgttccggttcccactgacg

SEQ ID NO: 4745002 - DNA, 25 bp, Homo sapien
tggtttggctcaccccaccagaatg

SEQ ID NO: 4745003 - DNA, 25 bp, Homo sapien
tttgtttatggtttggctcacccca

SEQ ID NO: 4745004 - DNA, 25 bp, Homo sapien
ttggctcaccccaccagaatgtgtg

SEQ ID NO: 4745005 - DNA, 25 bp, Homo sapien
gctcaccccaccagaatgtgtgtcc

SEQ ID NO: 4745006 - DNA, 25 bp, Homo sapien
cagaagcttatgtactctttttccc

SEQ ID NO: 4745007 - DNA, 25 bp, Homo sapien
acttgtgaatggaatgagtctgaga

SEQ ID NO: 4745008 - DNA, 25 bp, Homo sapien
gaattacagtgtgattaccccaatc

SEQ ID NO: 4745009 - DNA, 25 bp, Homo sapien
ggagatgggaaacatagagcattgt

SEQ ID NO: 4745010 - DNA, 25 bp, Homo sapien
catataagtgtgtgggaccattgca

SEQ ID NO: 4745011 - DNA, 25 bp, Homo sapien
tctgggtaacaggtcgaatgtgaat

SEQ ID NO: 4745012 - DNA, 25 bp, Homo sapien
gtcaaattgctgttccccaaagagt

SEQ ID NO: 4745013 - DNA, 25 bp, Homo sapien
ccaaacctgcgttctcgtggagagc

SEQ ID NO: 4745014 - DNA, 25 bp, Homo sapien
gaattcaaaacgatcctgtacttcc

SEQ ID NO: 4745015 - DNA, 25 bp, Homo sapien
ctgaattcaaaacgatcctgtactt

SEQ ID NO: 4745016 - DNA, 25 bp, Homo sapien
ttcaaaacgatcctgtacttcctgc

SEQ ID NO: 4745017 - DNA, 25 bp, Homo sapien
aattcaaaacgatcctgtacttcct

SEQ ID NO: 4745018 - DNA, 25 bp, Homo sapien
gaagaggccaaatagtcagatgcaa

SEQ ID NO: 4745019 - DNA, 25 bp, Homo sapien
gacctaattgttaccagagaggaga

SEQ ID NO: 4745020 - DNA, 25 bp, Homo sapien
tgttggcattcagctccgggttttc

SEQ ID NO: 4745021 - DNA, 25 bp, Homo sapien
tcacagtcccttcctaagtgtaggg

SEQ ID NO: 4745022 - DNA, 25 bp, Homo sapien
caggcttgatttggatccacaggca

SEQ ID NO: 4745023 - DNA, 25 bp, Homo sapien
gatgcctagtgaactcaagctgtag

SEQ ID NO: 4745024 - DNA, 25 bp, Homo sapien
tagccaaacagtagagatggagggc

SEQ ID NO: 4745025 - DNA, 25 bp, Homo sapien
cattggtgttggacacatttgcgcc

SEQ ID NO: 4745026 - DNA, 25 bp, Homo sapien
tctagggagacgcattaacctgtgc

SEQ ID NO: 4745027 - DNA, 25 bp, Homo sapien
catctactcgaaaggaatcgtgggt

SEQ ID NO: 4745028 - DNA, 25 bp, Homo sapien
tatgcttcagcagaggtaagcgggc

SEQ ID NO: 4745029 - DNA, 25 bp, Homo sapien
tacagatcataggaaccctgggact

SEQ ID NO: 4745030 - DNA, 25 bp, Homo sapien
gcctcagcgttgtcttgtaaggaca

SEQ ID NO: 4745031 - DNA, 25 bp, Homo sapien
caaatactacatgttagttctccgg

SEQ ID NO: 4745032 - DNA, 25 bp, Homo sapien
gactgcattactcaaccccaaggaa

SEQ ID NO: 4745033 - DNA, 25 bp, Homo sapien
caaggaagcacctggtttcagggat

SEQ ID NO: 4745034 - DNA, 25 bp, Homo sapien
tcaacctgagttgcacgagaggcca

SEQ ID NO: 4745035 - DNA, 25 bp, Homo sapien
taaatgggttctctacatgggagcc

SEQ ID NO: 4745036 - DNA, 25 bp, Homo sapien
cctgcataggcctgacgaagtggga

SEQ ID NO: 4745037 - DNA, 25 bp, Homo sapien
caggttactgcgcatggaagagctc

SEQ ID NO: 4745038 - DNA, 25 bp, Homo sapien
gggatctttgaaaagaggctactga

SEQ ID NO: 4745039 - DNA, 25 bp, Homo sapien
ggatctttgaaaagaggctactgag

SEQ ID NO: 4745040 - DNA, 25 bp, Homo sapien
taatactggaagacaggcaaacagt

SEQ ID NO: 4745041 - DNA, 25 bp, Homo sapien
ggcaaacagtacctacaatctttta

SEQ ID NO: 4745042 - DNA, 25 bp, Homo sapien
aatgacagatgtccacctagcatcc

SEQ ID NO: 4745043 - DNA, 25 bp, Homo sapien
ctgcaaatgacagatgtccacctag

SEQ ID NO: 4745044 - DNA, 25 bp, Homo sapien
tgacagatgtccacctagcatccct

SEQ ID NO: 4745045 - DNA, 25 bp, Homo sapien
caaatgacagatgtccacctagcat

SEQ ID NO: 4745046 - DNA, 25 bp, Homo sapien
aaggccagatgagttggtgttacac

SEQ ID NO: 4745047 - DNA, 25 bp, Homo sapien
taataaacgattacagccgggcaca

SEQ ID NO: 4745048 - DNA, 25 bp, Homo sapien
ttaagtcctgattactctgccatgg

SEQ ID NO: 4745049 - DNA, 25 bp, Homo sapien
tctgccatggacagctaaggaagta

SEQ ID NO: 4745050 - DNA, 25 bp, Homo sapien
gataaaaccctagcagatcctactt

SEQ ID NO: 4745051 - DNA, 25 bp, Homo sapien
tgctgggtagaagaaggcagtaccc

SEQ ID NO: 4745052 - DNA, 25 bp, Homo sapien
caaaaaccctagtgatatggacagg

SEQ ID NO: 4745053 - DNA, 25 bp, Homo sapien
tcctacttctgtgtgggctcagcaa

SEQ ID NO: 4745054 - DNA, 25 bp, Homo sapien
gaaatgaaacctcgtcgctcaagac

SEQ ID NO: 4745055 - DNA, 25 bp, Homo sapien
gatgggacggcagtgtcttaccacc

SEQ ID NO: 4745056 - DNA, 25 bp, Homo sapien
ttcagtcctctcataacaagttggg

SEQ ID NO: 4745057 - DNA, 25 bp, Homo sapien
ttggctccaacggtaacaatgctcc

SEQ ID NO: 4745058 - DNA, 25 bp, Homo sapien
cgccatcacgatactcgctgacggg

SEQ ID NO: 4745059 - DNA, 25 bp, Homo sapien
gagcgcgcccgccatcacgatactc

SEQ ID NO: 4745060 - DNA, 25 bp, Homo sapien
gcgcccgccatcacgatactcgctg

SEQ ID NO: 4745061 - DNA, 25 bp, Homo sapien
gatactcgctgacggggtctcctca

SEQ ID NO: 4745062 - DNA, 25 bp, Homo sapien
cagttcgccgcagcactctgagaac

SEQ ID NO: 4745063 - DNA, 25 bp, Homo sapien
aggcggtgacccctctccgatcgga

SEQ ID NO: 4745064 - DNA, 25 bp, Homo sapien
tgaccagcgtctccgttacgggact

SEQ ID NO: 4745065 - DNA, 25 bp, Homo sapien
tccgatcggactcggcagtgtcaga

SEQ ID NO: 4745066 - DNA, 25 bp, Homo sapien
gccgactcctgctgactggatatca

SEQ ID NO: 4745067 - DNA, 25 bp, Homo sapien
cggacggatccctcagatcaggagt

SEQ ID NO: 4745068 - DNA, 25 bp, Homo sapien
gaggccgaagcggacggatccctca

SEQ ID NO: 4745069 - DNA, 25 bp, Homo sapien
ttcacccacgcctttttctgcgtgg

SEQ ID NO: 4745070 - DNA, 25 bp, Homo sapien
aggctgcttcccattggttctcacc

SEQ ID NO: 4745071 - DNA, 25 bp, Homo sapien
ggtacctttctcttttgcttctgtc

SEQ ID NO: 4745072 - DNA, 25 bp, Homo sapien
ggcgcttcagttgaacccaggtacc

SEQ ID NO: 4745073 - DNA, 25 bp, Homo sapien
tgtgcttctctgggtggagcaggct

SEQ ID NO: 4745074 - DNA, 25 bp, Homo sapien
ccctggagtcagtcttttgttgtgg

SEQ ID NO: 4745075 - DNA, 25 bp, Homo sapien
tcctggatcccatcattttaagggt

SEQ ID NO: 4745076 - DNA, 25 bp, Homo sapien
gttactgtgattccttgtgatgtcc

SEQ ID NO: 4745077 - DNA, 25 bp, Homo sapien
gcatgagatattccaggcctacctt

SEQ ID NO: 4745078 - DNA, 25 bp, Homo sapien
cttgggtagaggtcagctggaacct

SEQ ID NO: 4745079 - DNA, 25 bp, Homo sapien
ggtagaggtcagctggaacctcttg

SEQ ID NO: 4745080 - DNA, 25 bp, Homo sapien
agggaggacacagtataagctgctt

SEQ ID NO: 4745081 - DNA, 25 bp, Homo sapien
gtataagctgcttgggtagaggtca

SEQ ID NO: 4745082 - DNA, 25 bp, Homo sapien
gaggatcacctgagtgagcctgagg

SEQ ID NO: 4745083 - DNA, 25 bp, Homo sapien
atcacctgagtgagcctgaggaggt

SEQ ID NO: 4745084 - DNA, 25 bp, Homo sapien
gagtgagatcccgtttcaaaaagaa

SEQ ID NO: 4745085 - DNA, 25 bp, Homo sapien
aggatcacctgagtgagcctgagga

SEQ ID NO: 4745086 - DNA, 25 bp, Homo sapien
cctggctttgggacttggacatatt

SEQ ID NO: 4745087 - DNA, 25 bp, Homo sapien
aacaagtgcaaaggacagtgccagg

SEQ ID NO: 4745088 - DNA, 25 bp, Homo sapien
ggacatattcacagtacggttcagt

SEQ ID NO: 4745089 - DNA, 25 bp, Homo sapien
attttttacagcgactcacattggg

SEQ ID NO: 4745090 - DNA, 25 bp, Homo sapien
tctggggacacacagtcagaagtgg

SEQ ID NO: 4745091 - DNA, 25 bp, Homo sapien
aggcaatggacccagatagctccag

SEQ ID NO: 4745092 - DNA, 25 bp, Homo sapien
actcaggccactaatcctaccccaa

SEQ ID NO: 4745093 - DNA, 25 bp, Homo sapien
acagtcagaagtggccctacctacg

SEQ ID NO: 4745094 - DNA, 25 bp, Homo sapien
tatagacttcgagtgactggaaacc

SEQ ID NO: 4745095 - DNA, 25 bp, Homo sapien
ccttgaggaacgaggacacggagat

SEQ ID NO: 4745096 - DNA, 25 bp, Homo sapien
cagtgtctcggctaaaccttgagga

SEQ ID NO: 4745097 - DNA, 25 bp, Homo sapien
taaagaccagcgctcatccatgaga

SEQ ID NO: 4745098 - DNA, 25 bp, Homo sapien
cgttgccatggctgtcaccttctgc

SEQ ID NO: 4745099 - DNA, 25 bp, Homo sapien
aagacactgcggttgctgtggtaac

SEQ ID NO: 4745100 - DNA, 25 bp, Homo sapien
ttccacccgggctgtgatcctcgtt

SEQ ID NO: 4745101 - DNA, 25 bp, Homo sapien
tgccgagggacgtctgagagaattt

SEQ ID NO: 4745102 - DNA, 25 bp, Homo sapien
tcttcagggagcttactgtggctct

SEQ ID NO: 4745103 - DNA, 25 bp, Homo sapien
tctagaggactcgttcaggcaaccc

SEQ ID NO: 4745104 - DNA, 25 bp, Homo sapien
tctgactggagtcgacagctggcag

SEQ ID NO: 4745105 - DNA, 25 bp, Homo sapien
cgggcagccacaatccctgggtgtg

SEQ ID NO: 4745106 - DNA, 25 bp, Homo sapien
cattctcggttgtttgagatctgct

SEQ ID NO: 4745107 - DNA, 25 bp, Homo sapien
gcacggccccgcacggcgatgccgt

SEQ ID NO: 4745108 - DNA, 25 bp, Homo sapien
ttgcatgatgcattctcggttgttt

SEQ ID NO: 4745109 - DNA, 25 bp, Homo sapien
cgtaggcccggaacgagtggatccg

SEQ ID NO: 4745110 - DNA, 25 bp, Homo sapien
ccattcgcgtggatcacattggtga

SEQ ID NO: 4745111 - DNA, 25 bp, Homo sapien
tgtcgcccttggtgataatgccgtg

SEQ ID NO: 4745112 - DNA, 25 bp, Homo sapien
tgaccccactttgccggttgcagga

SEQ ID NO: 4745113 - DNA, 25 bp, Homo sapien
caatgacgatggtgctgtcgccctt

SEQ ID NO: 4745114 - DNA, 25 bp, Homo sapien
gaggcctcataacaagtgccagtgg

SEQ ID NO: 4745115 - DNA, 25 bp, Homo sapien
taaaccatgatatgcatctcgtggg

SEQ ID NO: 4745116 - DNA, 25 bp, Homo sapien
gaaataaatacagtcgcgaggcctc

SEQ ID NO: 4745117 - DNA, 25 bp, Homo sapien
gctctgagcacctagaataccgtgg

SEQ ID NO: 4745118 - DNA, 25 bp, Homo sapien
caacaagagctatggtgatgggccg

SEQ ID NO: 4745119 - DNA, 25 bp, Homo sapien
taactcgctggagccatccttctgg

SEQ ID NO: 4745120 - DNA, 25 bp, Homo sapien
cttgagccctgtggcctcgaggtaa

SEQ ID NO: 4745121 - DNA, 25 bp, Homo sapien
gggaggctggacgacatcatccaca

SEQ ID NO: 4745122 - DNA, 25 bp, Homo sapien
gctcggctcgttccacacagtgtga

SEQ ID NO: 4745123 - DNA, 25 bp, Homo sapien
tcagaagcacatgagcccacagtga

SEQ ID NO: 4745124 - DNA, 25 bp, Homo sapien
gagagagtccctgccttgctaatga

SEQ ID NO: 4745125 - DNA, 25 bp, Homo sapien
cagtgagaggagctggtcaccgaca

SEQ ID NO: 4745126 - DNA, 25 bp, Homo sapien
cccactgattctcacggatgacatt

SEQ ID NO: 4745127 - DNA, 25 bp, Homo sapien
tgaggttactcctgagaacggggat

SEQ ID NO: 4745128 - DNA, 25 bp, Homo sapien
atttccttctatgaggcctttgcct

SEQ ID NO: 4745129 - DNA, 25 bp, Homo sapien
cctccacggcggatgtccacacctc

SEQ ID NO: 4745130 - DNA, 25 bp, Homo sapien
atgccggcagcacggcccttgaaga

SEQ ID NO: 4745131 - DNA, 25 bp, Homo sapien
ttcactgctatgccggcagcacggc

SEQ ID NO: 4745132 - DNA, 25 bp, Homo sapien
gatgaggcctttgccgttctcattc

SEQ ID NO: 4745133 - DNA, 25 bp, Homo sapien
gcacggcccttgaagatgtggttcc

SEQ ID NO: 4745134 - DNA, 25 bp, Homo sapien
aatgccagcctccttattggaaaag

SEQ ID NO: 4745135 - DNA, 25 bp, Homo sapien
gattgttccggatgatgcctttccc

SEQ ID NO: 4745136 - DNA, 25 bp, Homo sapien
tccgtggtacaggatgtaaatgcca

SEQ ID NO: 4745137 - DNA, 25 bp, Homo sapien
tgcctttcccattgccaaggacgac

SEQ ID NO: 4745138 - DNA, 25 bp, Homo sapien
tcactaggtgtaggactttgggcag

SEQ ID NO: 4745139 - DNA, 25 bp, Homo sapien
aaagcatctggcgtataataagcat

SEQ ID NO: 4745140 - DNA, 25 bp, Homo sapien
gatatgatgggttcagcattacccg

SEQ ID NO: 4745141 - DNA, 25 bp, Homo sapien
gcattacccgtgagtcagactgcct

SEQ ID NO: 4745142 - DNA, 25 bp, Homo sapien
gaagaaagatgcctgacgctcggca

SEQ ID NO: 4745143 - DNA, 25 bp, Homo sapien
cattgtggtaaatgttgttgccggc

SEQ ID NO: 4745144 - DNA, 25 bp, Homo sapien
cgctcggcagcggtaaatgtcgttc

SEQ ID NO: 4745145 - DNA, 25 bp, Homo sapien
gccctccaagcgaagaaagatgcct

SEQ ID NO: 4745146 - DNA, 25 bp, Homo sapien
cgtggtagtcacgacagcaaagcta

SEQ ID NO: 4745147 - DNA, 25 bp, Homo sapien
tactgaatacttccggcatgggacc

SEQ ID NO: 4745148 - DNA, 25 bp, Homo sapien
agactcgaatctaggtgctatgcca

SEQ ID NO: 4745149 - DNA, 25 bp, Homo sapien
tcctctttggaagtgggctgggtaa

SEQ ID NO: 4745150 - DNA, 25 bp, Homo sapien
taaaatgcaaaatagccccatcaaa

SEQ ID NO: 4745151 - DNA, 25 bp, Homo sapien
caagcgtgcgtgaataagtttaaag

SEQ ID NO: 4745152 - DNA, 25 bp, Homo sapien
caaatcagatgatgggcatgacgtc

SEQ ID NO: 4745153 - DNA, 25 bp, Homo sapien
ttcctacatatagccacaggagccc

SEQ ID NO: 4745154 - DNA, 25 bp, Homo sapien
tagtagatacttgtaggcccagttc

SEQ ID NO: 4745155 - DNA, 25 bp, Homo sapien
aatgtcacaggtctttgggctccag

SEQ ID NO: 4745156 - DNA, 25 bp, Homo sapien
tggatgtgcccgttctcaaagttgc

SEQ ID NO: 4745157 - DNA, 25 bp, Homo sapien
cttatctgcagatgggtgaccctca

SEQ ID NO: 4745158 - DNA, 25 bp, Homo sapien
cacacctgggaagagcacaattcgg

SEQ ID NO: 4745159 - DNA, 25 bp, Homo sapien
tgcaagtaggctaagatcatgcgcc

SEQ ID NO: 4745160 - DNA, 25 bp, Homo sapien
tatacatgatgggtgagaaccaggc

SEQ ID NO: 4745161 - DNA, 25 bp, Homo sapien
cacaattcggtcatacaggctggcc

SEQ ID NO: 4745162 - DNA, 25 bp, Homo sapien
accatgtggaggaaaccttctggta

SEQ ID NO: 4745163 - DNA, 25 bp, Homo sapien
tggaggaaaccttctggtataagag

SEQ ID NO: 4745164 - DNA, 25 bp, Homo sapien
gaaaccttctggtataagagccaaa

SEQ ID NO: 4745165 - DNA, 25 bp, Homo sapien
catgtggaggaaaccttctggtata

SEQ ID NO: 4745166 - DNA, 25 bp, Homo sapien
ttcttctatctgtctgagaaagctt

SEQ ID NO: 4745167 - DNA, 25 bp, Homo sapien
ggatataatctcttgtctaaaagct

SEQ ID NO: 4745168 - DNA, 25 bp, Homo sapien
tatgtcctttgccagatacatgttc

SEQ ID NO: 4745169 - DNA, 25 bp, Homo sapien
tctacttgtcaatccttatgccagc

SEQ ID NO: 4745170 - DNA, 25 bp, Homo sapien
tattccaatactgggtctacgtgtc

SEQ ID NO: 4745171 - DNA, 25 bp, Homo sapien
tacagggtgcctacattattccaat

SEQ ID NO: 4745172 - DNA, 25 bp, Homo sapien
tctctgaagactcaatacctggtgt

SEQ ID NO: 4745173 - DNA, 25 bp, Homo sapien
gagagcattcttagctacagggtgc

SEQ ID NO: 4745174 - DNA, 25 bp, Homo sapien
ttaatcattgctaagagctttgacg

SEQ ID NO: 4745175 - DNA, 25 bp, Homo sapien
aatcattgctaagagctttgacgta

SEQ ID NO: 4745176 - DNA, 25 bp, Homo sapien
taatcattgctaagagctttgacgt

SEQ ID NO: 4745177 - DNA, 25 bp, Homo sapien
atcattgctaagagctttgacgtac

SEQ ID NO: 4745178 - DNA, 25 bp, Homo sapien
gaatctgtattctcatcgtccccac

SEQ ID NO: 4745179 - DNA, 25 bp, Homo sapien
gacagggttgtcaaggaaggtctct

SEQ ID NO: 4745180 - DNA, 25 bp, Homo sapien
aacagttgagtataaagtgaagccc

SEQ ID NO: 4745181 - DNA, 25 bp, Homo sapien
aatggctggcctgatacacctcatg

SEQ ID NO: 4745182 - DNA, 25 bp, Homo sapien
cgttcaccaagcaccaagatgggca

SEQ ID NO: 4745183 - DNA, 25 bp, Homo sapien
gagcctgggcacctctaggaggaaa

SEQ ID NO: 4745184 - DNA, 25 bp, Homo sapien
gaagtgctgagttattccacaggga

SEQ ID NO: 4745185 - DNA, 25 bp, Homo sapien
gctttgcactatgcccagaactatg

SEQ ID NO: 4745186 - DNA, 25 bp, Homo sapien
tctcccctgagtaaaatgtaagctc

SEQ ID NO: 4745187 - DNA, 25 bp, Homo sapien
cattagcaatagattccctgctgcc

SEQ ID NO: 4745188 - DNA, 25 bp, Homo sapien
tctggtatattagcatagctgagac

SEQ ID NO: 4745189 - DNA, 25 bp, Homo sapien
tagctgagactactcaaatcattag

SEQ ID NO: 4745190 - DNA, 25 bp, Homo sapien
ttatctggtatattagcatagctga

SEQ ID NO: 4745191 - DNA, 25 bp, Homo sapien
aatcagatcatgaaggcagttcccc

SEQ ID NO: 4745192 - DNA, 25 bp, Homo sapien
caagtggttagcaccttgtgagtca

SEQ ID NO: 4745193 - DNA, 25 bp, Homo sapien
tcagtgggaatcagataaagaccct

SEQ ID NO: 4745194 - DNA, 25 bp, Homo sapien
gaaaaatgcttagtgcctgatatgg

SEQ ID NO: 4745195 - DNA, 25 bp, Homo sapien
caatcactcgttagagaggtgcaga

SEQ ID NO: 4745196 - DNA, 25 bp, Homo sapien
aaggccctatgcgtgctgaaatgac

SEQ ID NO: 4745197 - DNA, 25 bp, Homo sapien
cagactaatcatgacggcaggtgac

SEQ ID NO: 4745198 - DNA, 25 bp, Homo sapien
aaaccgtagctctcttcagcgtgag

SEQ ID NO: 4745199 - DNA, 25 bp, Homo sapien
tcatgtggtctaaggtcgctgtact

SEQ ID NO: 4745200 - DNA, 25 bp, Homo sapien
ttacatctcctctaccctaaggtgg

SEQ ID NO: 4745201 - DNA, 25 bp, Homo sapien
tcgctgtactgtctgtccaaaagag

SEQ ID NO: 4745202 - DNA, 25 bp, Homo sapien
tctctgtaggctagtaagactccaa

SEQ ID NO: 4745203 - DNA, 25 bp, Homo sapien
cacacatccgtggactgtgtaggac

SEQ ID NO: 4745204 - DNA, 25 bp, Homo sapien
agggcattgagcagcagtgatcaca

SEQ ID NO: 4745205 - DNA, 25 bp, Homo sapien
cagagatttggtccaataagggcat

SEQ ID NO: 4745206 - DNA, 25 bp, Homo sapien
ctggcagagatttggtccaataagg

SEQ ID NO: 4745207 - DNA, 25 bp, Homo sapien
ctgcctggggatcgtgcggagccgc

SEQ ID NO: 4745208 - DNA, 25 bp, Homo sapien
cgcccgggggcggacagctgcctgg

SEQ ID NO: 4745209 - DNA, 25 bp, Homo sapien
cgcagcagccggtaggattgcggcg

SEQ ID NO: 4745210 - DNA, 25 bp, Homo sapien
cagccggtaggattgcggcgtgcgg

SEQ ID NO: 4745211 - DNA, 25 bp, Homo sapien
taaaggttgttcttgtgtagtggaa

SEQ ID NO: 4745212 - DNA, 25 bp, Homo sapien
gaatttggaactgcagtatacacaa

SEQ ID NO: 4745213 - DNA, 25 bp, Homo sapien
agaatggaatctcttaagactcaag

SEQ ID NO: 4745214 - DNA, 25 bp, Homo sapien
gtagtggaatttggaactgcagtat

SEQ ID NO: 4745215 - DNA, 25 bp, Homo sapien
cctggataagcacagactgactaga

SEQ ID NO: 4745216 - DNA, 25 bp, Homo sapien
tgagcccctctgtggcgtttatggc

SEQ ID NO: 4745217 - DNA, 25 bp, Homo sapien
tcattggccactgaaacttgcagtc

SEQ ID NO: 4745218 - DNA, 25 bp, Homo sapien
gcttattccaagtattgagcccctc

SEQ ID NO: 4745219 - DNA, 25 bp, Homo sapien
tactcaaaacagagacgcagtgagc

SEQ ID NO: 4745220 - DNA, 25 bp, Homo sapien
taagtgtgagcagacaaccaaggaa

SEQ ID NO: 4745221 - DNA, 25 bp, Homo sapien
caatagatggccctttggcaaagtt

SEQ ID NO: 4745222 - DNA, 25 bp, Homo sapien
cacaagaaccgtttgagtcagggag

SEQ ID NO: 4745223 - DNA, 25 bp, Homo sapien
agagtacctaataaagctgattgct

SEQ ID NO: 4745224 - DNA, 25 bp, Homo sapien
atggcaaaaagtttagttgatttag

SEQ ID NO: 4745225 - DNA, 25 bp, Homo sapien
agtacctaataaagctgattgctgt

SEQ ID NO: 4745226 - DNA, 25 bp, Homo sapien
gtgaatgatttagataaatggcaaa

SEQ ID NO: 4745227 - DNA, 25 bp, Homo sapien
ggtttgcagcaaaaagtaggataag

SEQ ID NO: 4745228 - DNA, 25 bp, Homo sapien
cttactgaagcttgcaataatctca

SEQ ID NO: 4745229 - DNA, 25 bp, Homo sapien
tagtgattgttggtttgcagcaaaa

SEQ ID NO: 4745230 - DNA, 25 bp, Homo sapien
taatacaagtctcactagtgattgt

SEQ ID NO: 4745231 - DNA, 25 bp, Homo sapien
ggtacaccagatcacgagacatcgt

SEQ ID NO: 4745232 - DNA, 25 bp, Homo sapien
aagacagtgccatttcagacacagc

SEQ ID NO: 4745233 - DNA, 25 bp, Homo sapien
cgtcacagggataagggtacaccag

SEQ ID NO: 4745234 - DNA, 25 bp, Homo sapien
attataccagtattgtcagaggcca

SEQ ID NO: 4745235 - DNA, 25 bp, Homo sapien
gagaggagtcgaaactgtaaccagg

SEQ ID NO: 4745236 - DNA, 25 bp, Homo sapien
tgcattcatatgtgatgtcctgtct

SEQ ID NO: 4745237 - DNA, 25 bp, Homo sapien
caggctcttcatatcgtgcattcat

SEQ ID NO: 4745238 - DNA, 25 bp, Homo sapien
ctgggcctattcacttgcagagagg

SEQ ID NO: 4745239 - DNA, 25 bp, Homo sapien
tagatcaatgaaaaaggcaggaggc

SEQ ID NO: 4745240 - DNA, 25 bp, Homo sapien
tggtcaagcatgtgcctgtacagcc

SEQ ID NO: 4745241 - DNA, 25 bp, Homo sapien
tatcagtgagctctggcctaagccc

SEQ ID NO: 4745242 - DNA, 25 bp, Homo sapien
aacactgaactagagaaccggaaga

SEQ ID NO: 4745243 - DNA, 25 bp, Homo sapien
tatgcccgtcgccttcaacgcgcac

SEQ ID NO: 4745244 - DNA, 25 bp, Homo sapien
aaaccgcgcatatgcccgtcgcctt

SEQ ID NO: 4745245 - DNA, 25 bp, Homo sapien
ctcaaaccgcgcatatgcccgtcgc

SEQ ID NO: 4745246 - DNA, 25 bp, Homo sapien
gcgcatatgcccgtcgccttcaacg

SEQ ID NO: 4745247 - DNA, 25 bp, Homo sapien
ggtgcccgtcggtgagctccccgct

SEQ ID NO: 4745248 - DNA, 25 bp, Homo sapien
agctcagttcgaaggccccgatgac

SEQ ID NO: 4745249 - DNA, 25 bp, Homo sapien
cgttcagctcagttcgaaggccccg

SEQ ID NO: 4745250 - DNA, 25 bp, Homo sapien
ctggtctcacagtcacagcccggga

SEQ ID NO: 4745251 - DNA, 25 bp, Homo sapien
cagcttcggcgcgaggccctcaatc

SEQ ID NO: 4745252 - DNA, 25 bp, Homo sapien
gcgcgaggccctcaatccggaacat

SEQ ID NO: 4745253 - DNA, 25 bp, Homo sapien
ttcggcgcgaggccctcaatccgga

SEQ ID NO: 4745254 - DNA, 25 bp, Homo sapien
gggtccagcttcggcgcgaggccct

SEQ ID NO: 4745255 - DNA, 25 bp, Homo sapien
ccagccgccgcgctctgctctccac

SEQ ID NO: 4745256 - DNA, 25 bp, Homo sapien
ctgacttagcagcttccagccgccg

SEQ ID NO: 4745257 - DNA, 25 bp, Homo sapien
tgacttagcagcttccagccgccgc

SEQ ID NO: 4745258 - DNA, 25 bp, Homo sapien
caagggtgtagatgtcaggtctcca

SEQ ID NO: 4745259 - DNA, 25 bp, Homo sapien
cacactctggccaagggtgtagatg

SEQ ID NO: 4745260 - DNA, 25 bp, Homo sapien
gccaagggtgtagatgtcaggtctc

SEQ ID NO: 4745261 - DNA, 25 bp, Homo sapien
ctctggccaagggtgtagatgtcag

SEQ ID NO: 4745262 - DNA, 25 bp, Homo sapien
agaagcttgctatttcaggaagaca

SEQ ID NO: 4745263 - DNA, 25 bp, Homo sapien
tcgtggcttttgtgaatcaatttta

SEQ ID NO: 4745264 - DNA, 25 bp, Homo sapien
ttaatagacgatagcaagagtgtgt

SEQ ID NO: 4745265 - DNA, 25 bp, Homo sapien
aagacatgggtcgtggcttttgtga

SEQ ID NO: 4745266 - DNA, 25 bp, Homo sapien
gactcgaaatctcccaacaggttaa

SEQ ID NO: 4745267 - DNA, 25 bp, Homo sapien
agcagattctcaaaggactcgaaat

SEQ ID NO: 4745268 - DNA, 25 bp, Homo sapien
tcaaaggactcgaaatctcccaaca

SEQ ID NO: 4745269 - DNA, 25 bp, Homo sapien
gattctcaaaggactcgaaatctcc

SEQ ID NO: 4745270 - DNA, 25 bp, Homo sapien
aacactgctggatgtacaaggaccc

SEQ ID NO: 4745271 - DNA, 25 bp, Homo sapien
cattgcttgctttccgcagactgca

SEQ ID NO: 4745272 - DNA, 25 bp, Homo sapien
gattggaaggcacaacagtgatcct

SEQ ID NO: 4745273 - DNA, 25 bp, Homo sapien
gggtatattaccaccaagctacagg

SEQ ID NO: 4745274 - DNA, 25 bp, Homo sapien
acactcatcccgattggtctccttg

SEQ ID NO: 4745275 - DNA, 25 bp, Homo sapien
tactacactcatcccgattggtctc

SEQ ID NO: 4745276 - DNA, 25 bp, Homo sapien
ctggaatactacactcatcccgatt

SEQ ID NO: 4745277 - DNA, 25 bp, Homo sapien
tcatcccgattggtctccttgtctc

SEQ ID NO: 4745278 - DNA, 25 bp, Homo sapien
aatgccacttcttccctaaagcact

SEQ ID NO: 4745279 - DNA, 25 bp, Homo sapien
ctttcaaagctcctctcaaatgcca

SEQ ID NO: 4745280 - DNA, 25 bp, Homo sapien
ccacttcttccctaaagcactccat

SEQ ID NO: 4745281 - DNA, 25 bp, Homo sapien
tcaaagctcctctcaaatgccactt

SEQ ID NO: 4745282 - DNA, 25 bp, Homo sapien
cacccgagggccaatggaaatttat

SEQ ID NO: 4745283 - DNA, 25 bp, Homo sapien
acatgacaccagaggggaacctggg

SEQ ID NO: 4745284 - DNA, 25 bp, Homo sapien
ctcagggagaccaaagacttgcttt

SEQ ID NO: 4745285 - DNA, 25 bp, Homo sapien
tgcaaaaaccctcagctcacccgag

SEQ ID NO: 4745286 - DNA, 25 bp, Homo sapien
attccccagagaagtagcggcaggg

SEQ ID NO: 4745287 - DNA, 25 bp, Homo sapien
ccacattccccagagaagtagcggc

SEQ ID NO: 4745288 - DNA, 25 bp, Homo sapien
ggagagtgagccaggtgtgctgcct

SEQ ID NO: 4745289 - DNA, 25 bp, Homo sapien
caaccctggatggaacccacattcc

SEQ ID NO: 4745290 - DNA, 25 bp, Homo sapien
gcctctggcacggtgggccttccgc

SEQ ID NO: 4745291 - DNA, 25 bp, Homo sapien
ccagcctctggcacggtgggccttc

SEQ ID NO: 4745292 - DNA, 25 bp, Homo sapien
tgggccttccgcctccgcctgacat

SEQ ID NO: 4745293 - DNA, 25 bp, Homo sapien
ggccttccgcctccgcctgacatgg

SEQ ID NO: 4745294 - DNA, 25 bp, Homo sapien
aaagccacagactcaaatgccccag

SEQ ID NO: 4745295 - DNA, 25 bp, Homo sapien
tggggagcccaggacaccccaaagc

SEQ ID NO: 4745296 - DNA, 25 bp, Homo sapien
ccctccagggacatcatttggagaa

SEQ ID NO: 4745297 - DNA, 25 bp, Homo sapien
ggaagagggaggcacctcctgtccc

SEQ ID NO: 4745298 - DNA, 25 bp, Homo sapien
tgctgtcgatcttgagattgggccg

SEQ ID NO: 4745299 - DNA, 25 bp, Homo sapien
tcagcagccatggtcatgaacgcct

SEQ ID NO: 4745300 - DNA, 25 bp, Homo sapien
gaacgcctgctcgacattggtggca

SEQ ID NO: 4745301 - DNA, 25 bp, Homo sapien
cgatcttgagattgggccgctcgcc

SEQ ID NO: 4745302 - DNA, 25 bp, Homo sapien
caaactccttggctgtggtgttgtc

SEQ ID NO: 4745303 - DNA, 25 bp, Homo sapien
tccttggctgtggtgttgtccacca

SEQ ID NO: 4745304 - DNA, 25 bp, Homo sapien
tgcaaactccttggctgtggtgttg

SEQ ID NO: 4745305 - DNA, 25 bp, Homo sapien
aactccttggctgtggtgttgtcca

SEQ ID NO: 4745306 - DNA, 25 bp, Homo sapien
catataccacgaggaagccatgagc

SEQ ID NO: 4745307 - DNA, 25 bp, Homo sapien
ttcacgttggcataggattcctggt

SEQ ID NO: 4745308 - DNA, 25 bp, Homo sapien
cacgttggcataggattcctggtca

SEQ ID NO: 4745309 - DNA, 25 bp, Homo sapien
cagtgacgtcatataccacgaggaa

SEQ ID NO: 4745310 - DNA, 25 bp, Homo sapien
ccgatggtgctgatgtagctctctg

SEQ ID NO: 4745311 - DNA, 25 bp, Homo sapien
gtttgatagttttgccatccagctc

SEQ ID NO: 4745312 - DNA, 25 bp, Homo sapien
gatagttttgccatccagctcgatg

SEQ ID NO: 4745313 - DNA, 25 bp, Homo sapien
tggtgctgatgtagctctctgtgta

SEQ ID NO: 4745314 - DNA, 25 bp, Homo sapien
gcttaaacaggcagtcatatccggg

SEQ ID NO: 4745315 - DNA, 25 bp, Homo sapien
ggcggcggaagcccgctcagtcgct

SEQ ID NO: 4745316 - DNA, 25 bp, Homo sapien
cggaagcccgctcagtcgctcccag

SEQ ID NO: 4745317 - DNA, 25 bp, Homo sapien
ctgagtcgccaatcaaaagcagctt

SEQ ID NO: 4745318 - DNA, 25 bp, Homo sapien
tcagccgaacacctgcggggcgtgg

SEQ ID NO: 4745319 - DNA, 25 bp, Homo sapien
gccagggacgatcagctgcagtgcc

SEQ ID NO: 4745320 - DNA, 25 bp, Homo sapien
tcagctgcagtgccaatgcctgtgt

SEQ ID NO: 4745321 - DNA, 25 bp, Homo sapien
ggttcgccagggacgatcagctgca

SEQ ID NO: 4745322 - DNA, 25 bp, Homo sapien
gggacgatcagctgcagtgccaatg

SEQ ID NO: 4745323 - DNA, 25 bp, Homo sapien
ctttgaccaagaatgcagcttcggg

SEQ ID NO: 4745324 - DNA, 25 bp, Homo sapien
ctgaatcaaacctggtgaccagtgg

SEQ ID NO: 4745325 - DNA, 25 bp, Homo sapien
gtcggggatggctgtcctctttgac

SEQ ID NO: 4745326 - DNA, 25 bp, Homo sapien
ctctgtcggggatggctgtcctctt

SEQ ID NO: 4745327 - DNA, 25 bp, Homo sapien
gatggatgctgaagatggttcttca

SEQ ID NO: 4745328 - DNA, 25 bp, Homo sapien
tctggatagatggatgctgaagatg

SEQ ID NO: 4745329 - DNA, 25 bp, Homo sapien
cactggggattgctgagtaaattgg

SEQ ID NO: 4745330 - DNA, 25 bp, Homo sapien
aattggtgtgagtgccaggatttct

SEQ ID NO: 4745331 - DNA, 25 bp, Homo sapien
gaggtcttgaggatgagaatgccat

SEQ ID NO: 4745332 - DNA, 25 bp, Homo sapien
caatcaaggacctctagggtttcct

SEQ ID NO: 4745333 - DNA, 25 bp, Homo sapien
tctcgactggctcaagtggttgagg

SEQ ID NO: 4745334 - DNA, 25 bp, Homo sapien
gtttcctctctcgactggctcaagt

SEQ ID NO: 4745335 - DNA, 25 bp, Homo sapien
ttcctatgggtcacagtcacaaagt

SEQ ID NO: 4745336 - DNA, 25 bp, Homo sapien
ttgcacacatagttgggagagggaa

SEQ ID NO: 4745337 - DNA, 25 bp, Homo sapien
gaacaaaagcagcagcgctcagagg

SEQ ID NO: 4745338 - DNA, 25 bp, Homo sapien
ggcaaaactgaaccgcattgtccag

SEQ ID NO: 4745339 - DNA, 25 bp, Homo sapien
tctttcctgactcccagggcccaga

SEQ ID NO: 4745340 - DNA, 25 bp, Homo sapien
ttcctgactcccagggcccagagat

SEQ ID NO: 4745341 - DNA, 25 bp, Homo sapien
tttctttcctgactcccagggccca

SEQ ID NO: 4745342 - DNA, 25 bp, Homo sapien
tgtattttttctttcctgactccca

SEQ ID NO: 4745343 - DNA, 25 bp, Homo sapien
tgctactatgacagggagccctacc

SEQ ID NO: 4745344 - DNA, 25 bp, Homo sapien
gaaggtctttcctacagaccgacta

SEQ ID NO: 4745345 - DNA, 25 bp, Homo sapien
gagagtgtagacgacgtgtgctact

SEQ ID NO: 4745346 - DNA, 25 bp, Homo sapien
ggagccctacctggcccttggtgca

SEQ ID NO: 4745347 - DNA, 25 bp, Homo sapien
cagaggcacctaaccatgtgacagg

SEQ ID NO: 4745348 - DNA, 25 bp, Homo sapien
gactccccgggtgatgtgtcaaata

SEQ ID NO: 4745349 - DNA, 25 bp, Homo sapien
gctgccaggctcaagaacaaaaact

SEQ ID NO: 4745350 - DNA, 25 bp, Homo sapien
caccaacgtatttcaggaggagtct

SEQ ID NO: 4745351 - DNA, 25 bp, Homo sapien
tacagattaaaagaggttcgtccag

SEQ ID NO: 4745352 - DNA, 25 bp, Homo sapien
ctggacttaaccgaggcaggaggct

SEQ ID NO: 4745353 - DNA, 25 bp, Homo sapien
cagtaaagcattctggtggtcacca

SEQ ID NO: 4745354 - DNA, 25 bp, Homo sapien
tctgcaaaacaactggactggactt

SEQ ID NO: 4745355 - DNA, 25 bp, Homo sapien
tggtgagtctagattacaggaatga

SEQ ID NO: 4745356 - DNA, 25 bp, Homo sapien
caactggtgagtctagattacagga

SEQ ID NO: 4745357 - DNA, 25 bp, Homo sapien
attaacaactggtgagtctagatta

SEQ ID NO: 4745358 - DNA, 25 bp, Homo sapien
taacaactggtgagtctagattaca

SEQ ID NO: 4745359 - DNA, 25 bp, Homo sapien
tcagcctgggtgatgcaacacagtg

SEQ ID NO: 4745360 - DNA, 25 bp, Homo sapien
cctgggtgatgcaacacagtgagac

SEQ ID NO: 4745361 - DNA, 25 bp, Homo sapien
agcctgggtgatgcaacacagtgag

SEQ ID NO: 4745362 - DNA, 25 bp, Homo sapien
tgggtgatgcaacacagtgagaccc

SEQ ID NO: 4745363 - DNA, 25 bp, Homo sapien
tcagtgagcagtgcatgacttacag

SEQ ID NO: 4745364 - DNA, 25 bp, Homo sapien
ttacctgcagcagggtgacagcgcc

SEQ ID NO: 4745365 - DNA, 25 bp, Homo sapien
gcagttaagttcagagggtcagtga

SEQ ID NO: 4745366 - DNA, 25 bp, Homo sapien
tggcacaatcagcttactccaggct

SEQ ID NO: 4745367 - DNA, 25 bp, Homo sapien
tactggactagcttagaacaagttc

SEQ ID NO: 4745368 - DNA, 25 bp, Homo sapien
gaaaaggtactaggtccacttcaca

SEQ ID NO: 4745369 - DNA, 25 bp, Homo sapien
tatgggaccgtaaacaaaatgatac

SEQ ID NO: 4745370 - DNA, 25 bp, Homo sapien
catgatggccagtcagttatgggac

SEQ ID NO: 4745371 - DNA, 25 bp, Homo sapien
ttaagtggcctttgagtcagtctcc

SEQ ID NO: 4745372 - DNA, 25 bp, Homo sapien
ccctcttggttctaagtggcagtga

SEQ ID NO: 4745373 - DNA, 25 bp, Homo sapien
aaaggcccgggaatactctgtcaag

SEQ ID NO: 4745374 - DNA, 25 bp, Homo sapien
gagatactggccatcaatcaaggta

SEQ ID NO: 4745375 - DNA, 25 bp, Homo sapien
tgatcatgctcgttgttgcccagct

SEQ ID NO: 4745376 - DNA, 25 bp, Homo sapien
cctgagcctgtaccaactagattct

SEQ ID NO: 4745377 - DNA, 25 bp, Homo sapien
catggctttggacgtgctaattcaa

SEQ ID NO: 4745378 - DNA, 25 bp, Homo sapien
catagcattttgttccctcctgtgg

SEQ ID NO: 4745379 - DNA, 25 bp, Homo sapien
gaatcactgatgtggatcacctggc

SEQ ID NO: 4745380 - DNA, 25 bp, Homo sapien
agatactggagacccggaacaggga

SEQ ID NO: 4745381 - DNA, 25 bp, Homo sapien
gctacaggtaagcacacagagtggt

SEQ ID NO: 4745382 - DNA, 25 bp, Homo sapien
caaaaaggactttctatggataggc

SEQ ID NO: 4745383 - DNA, 25 bp, Homo sapien
gactacaggtgacatttctttgctg

SEQ ID NO: 4745384 - DNA, 25 bp, Homo sapien
tcgttgttatatactcacccgctga

SEQ ID NO: 4745385 - DNA, 25 bp, Homo sapien
cacatttcctctggtgaacctggct

SEQ ID NO: 4745386 - DNA, 25 bp, Homo sapien
gaacctggcttactgttataatcac

SEQ ID NO: 4745387 - DNA, 25 bp, Homo sapien
tacatacattcacaccttatcttct

SEQ ID NO: 4745388 - DNA, 25 bp, Homo sapien
gactctaataatacatacattcaca

SEQ ID NO: 4745389 - DNA, 25 bp, Homo sapien
aatactttcggactctaataataca

SEQ ID NO: 4745390 - DNA, 25 bp, Homo sapien
actttcggactctaataatacatac

SEQ ID NO: 4745391 - DNA, 25 bp, Homo sapien
tcccacttcctgtatgatttcacaa

SEQ ID NO: 4745392 - DNA, 25 bp, Homo sapien
ctgccaatctggagaagatctgttt

SEQ ID NO: 4745393 - DNA, 25 bp, Homo sapien
ctgttttctttgatctgacgtcatg

SEQ ID NO: 4745394 - DNA, 25 bp, Homo sapien
ttaaagtctgctggatggtttttgc

SEQ ID NO: 4745395 - DNA, 25 bp, Homo sapien
aagtcattcccctagatggtcagag

SEQ ID NO: 4745396 - DNA, 25 bp, Homo sapien
tctttcaaaccataagggtggtgct

SEQ ID NO: 4745397 - DNA, 25 bp, Homo sapien
caaggcacgtgatgacatttgctgc

SEQ ID NO: 4745398 - DNA, 25 bp, Homo sapien
gaggtgggctatgccttacaaagaa

SEQ ID NO: 4745399 - DNA, 25 bp, Homo sapien
tccaaatgtgttaaaatggatactg

SEQ ID NO: 4745400 - DNA, 25 bp, Homo sapien
aaattcaaacgttacaaagaatctg

SEQ ID NO: 4745401 - DNA, 25 bp, Homo sapien
taaaatggatactgatttctaactc

SEQ ID NO: 4745402 - DNA, 25 bp, Homo sapien
gagtttccaaatgtgttaaaatgga

SEQ ID NO: 4745403 - DNA, 25 bp, Homo sapien
tctaattaagcccagagtcacttta

SEQ ID NO: 4745404 - DNA, 25 bp, Homo sapien
taattaagcccagagtcactttaaa

SEQ ID NO: 4745405 - DNA, 25 bp, Homo sapien
gcccagagtcactttaaaaagcaga

SEQ ID NO: 4745406 - DNA, 25 bp, Homo sapien
tttctaattaagcccagagtcactt

SEQ ID NO: 4745407 - DNA, 25 bp, Homo sapien
aaactggccatagatgagatctcca

SEQ ID NO: 4745408 - DNA, 25 bp, Homo sapien
attggctcgtccacagctgtcaata

SEQ ID NO: 4745409 - DNA, 25 bp, Homo sapien
cattccattggctcgtccacagctg

SEQ ID NO: 4745410 - DNA, 25 bp, Homo sapien
ccattggctcgtccacagctgtcaa

SEQ ID NO: 4745411 - DNA, 25 bp, Homo sapien
tcaggaaatcacagacgaggagcca

SEQ ID NO: 4745412 - DNA, 25 bp, Homo sapien
cctacagttctgtggctaagggact

SEQ ID NO: 4745413 - DNA, 25 bp, Homo sapien
gactgactgcactataggattccca

SEQ ID NO: 4745414 - DNA, 25 bp, Homo sapien
gaaaggaaggaactccggcatgcaa

SEQ ID NO: 4745415 - DNA, 25 bp, Homo sapien
aatcacatggtctccttttactgga

SEQ ID NO: 4745416 - DNA, 25 bp, Homo sapien
caatcacatggtctccttttactgg

SEQ ID NO: 4745417 - DNA, 25 bp, Homo sapien
atcacatggtctccttttactggaa

SEQ ID NO: 4745418 - DNA, 25 bp, Homo sapien
tcacatggtctccttttactggaac

SEQ ID NO: 4745419 - DNA, 25 bp, Homo sapien
ggtcttctcaaagcagggctaccac

SEQ ID NO: 4745420 - DNA, 25 bp, Homo sapien
aagtgggcacaagactacggtggct

SEQ ID NO: 4745421 - DNA, 25 bp, Homo sapien
ctctgagactccaaacggcaggcct

SEQ ID NO: 4745422 - DNA, 25 bp, Homo sapien
tattgttcacggtccctctaaagga

SEQ ID NO: 4745423 - DNA, 25 bp, Homo sapien
tgagagtccacccagtaaacaccgc

SEQ ID NO: 4745424 - DNA, 25 bp, Homo sapien
ctgccactgccgggctccttgtgac

SEQ ID NO: 4745425 - DNA, 25 bp, Homo sapien
cttctgctgagagtccacccagtaa

SEQ ID NO: 4745426 - DNA, 25 bp, Homo sapien
tgctgagagtccacccagtaaacac

SEQ ID NO: 4745427 - DNA, 25 bp, Homo sapien
tagcattcaggctcaacggtcgctc

SEQ ID NO: 4745428 - DNA, 25 bp, Homo sapien
acctagtactgtgcgtgcagcgcgc

SEQ ID NO: 4745429 - DNA, 25 bp, Homo sapien
attcagccgcgacagacgcaggttc

SEQ ID NO: 4745430 - DNA, 25 bp, Homo sapien
tgctgcccgcgagagattcagccgc

SEQ ID NO: 4745431 - DNA, 25 bp, Homo sapien
tgaaaaccgcgcagcttggtccatc

SEQ ID NO: 4745432 - DNA, 25 bp, Homo sapien
tgaggactttccgtttccggcagta

SEQ ID NO: 4745433 - DNA, 25 bp, Homo sapien
cagtttatgaagcttgatggccgtc

SEQ ID NO: 4745434 - DNA, 25 bp, Homo sapien
cacttccagtgtctcgggtcgcgtg

SEQ ID NO: 4745435 - DNA, 25 bp, Homo sapien
tccccactccagaagtattcggtga

SEQ ID NO: 4745436 - DNA, 25 bp, Homo sapien
gtgaccacgcctgcctcaatcttgg

SEQ ID NO: 4745437 - DNA, 25 bp, Homo sapien
caagagtgggagctcctgtggcagg

SEQ ID NO: 4745438 - DNA, 25 bp, Homo sapien
tgtggcagggacagcgtaaattgtg

SEQ ID NO: 4745439 - DNA, 25 bp, Homo sapien
taaatgttctctggaccgtctttga

SEQ ID NO: 4745440 - DNA, 25 bp, Homo sapien
aggcaaacaggcaggtcggtaaatg

SEQ ID NO: 4745441 - DNA, 25 bp, Homo sapien
tctggaccgtctttgatacacccca

SEQ ID NO: 4745442 - DNA, 25 bp, Homo sapien
gcaggtcggtaaatgttctctggac

SEQ ID NO: 4745443 - DNA, 25 bp, Homo sapien
cgcgttttcgggcagcgcgtgcctc

SEQ ID NO: 4745444 - DNA, 25 bp, Homo sapien
ttcaagccgtcgagggcgcgcgggt

SEQ ID NO: 4745445 - DNA, 25 bp, Homo sapien
ccatgggtcgcggttcgcgttttcg

SEQ ID NO: 4745446 - DNA, 25 bp, Homo sapien
cgcgcgggtcggttctagcgtccca

SEQ ID NO: 4745447 - DNA, 25 bp, Homo sapien
attccataaaatatagtttcctcac

SEQ ID NO: 4745448 - DNA, 25 bp, Homo sapien
tggcccagaacacgcttttttctta

SEQ ID NO: 4745449 - DNA, 25 bp, Homo sapien
caattccataaaatatagtttcctc

SEQ ID NO: 4745450 - DNA, 25 bp, Homo sapien
cctggcccagaacacgcttttttct

SEQ ID NO: 4745451 - DNA, 25 bp, Homo sapien
tgtcccaatagaagtcaaggcctgt

SEQ ID NO: 4745452 - DNA, 25 bp, Homo sapien
caccctttgttagagaagagcccca

SEQ ID NO: 4745453 - DNA, 25 bp, Homo sapien
agtaaatgcaatgggcccggacagt

SEQ ID NO: 4745454 - DNA, 25 bp, Homo sapien
tggtttgcaccatgactgagggatc

SEQ ID NO: 4745455 - DNA, 25 bp, Homo sapien
tttctggccaccaatcaaagcagga

SEQ ID NO: 4745456 - DNA, 25 bp, Homo sapien
tctgctataaaactgcccaataggg

SEQ ID NO: 4745457 - DNA, 25 bp, Homo sapien
gaagcactggctaataagaactaga

SEQ ID NO: 4745458 - DNA, 25 bp, Homo sapien
ggcagattgagacccttttgaagag

SEQ ID NO: 4745459 - DNA, 25 bp, Homo sapien
cttgccacctcatcctgcttctccc

SEQ ID NO: 4745460 - DNA, 25 bp, Homo sapien
cctcatcctgcttctccctgacttc

SEQ ID NO: 4745461 - DNA, 25 bp, Homo sapien
ttgccacctcatcctgcttctccct

SEQ ID NO: 4745462 - DNA, 25 bp, Homo sapien
catcctgcttctccctgacttccat

SEQ ID NO: 4745463 - DNA, 25 bp, Homo sapien
actgctctccttcttagatccactt

SEQ ID NO: 4745464 - DNA, 25 bp, Homo sapien
tccattttgctagaggtccataacc

SEQ ID NO: 4745465 - DNA, 25 bp, Homo sapien
tagaggtccataacctccggtatct

SEQ ID NO: 4745466 - DNA, 25 bp, Homo sapien
gatccacttagatcacttttattcc

SEQ ID NO: 4745467 - DNA, 25 bp, Homo sapien
cctcaaaagatcttcctgctgcttg

SEQ ID NO: 4745468 - DNA, 25 bp, Homo sapien
gccatgactgtattactgtactcca

SEQ ID NO: 4745469 - DNA, 25 bp, Homo sapien
tgactgtattactgtactccatcct

SEQ ID NO: 4745470 - DNA, 25 bp, Homo sapien
aaaagatcttcctgctgcttgagct

SEQ ID NO: 4745471 - DNA, 25 bp, Homo sapien
cagccggtggggttaggccgctgca

SEQ ID NO: 4745472 - DNA, 25 bp, Homo sapien
aggggcactgaggtgtcggccggcg

SEQ ID NO: 4745473 - DNA, 25 bp, Homo sapien
ccaaacccggcggtgtctcagcttt

SEQ ID NO: 4745474 - DNA, 25 bp, Homo sapien
gctgcacgccggaagtggcagctga

SEQ ID NO: 4745475 - DNA, 25 bp, Homo sapien
agtactcgcccgacgggtaagcgcg

SEQ ID NO: 4745476 - DNA, 25 bp, Homo sapien
acccacggcgccgtcttcaacctcg

SEQ ID NO: 4745477 - DNA, 25 bp, Homo sapien
ggcgccgtcttcaacctcgagtact

SEQ ID NO: 4745478 - DNA, 25 bp, Homo sapien
ctcgagtactcgcccgacgggtaag

SEQ ID NO: 4745479 - DNA, 25 bp, Homo sapien
gttgtggtgaaactctagaatacca

SEQ ID NO: 4745480 - DNA, 25 bp, Homo sapien
cattagcaatagttgatatcaggag

SEQ ID NO: 4745481 - DNA, 25 bp, Homo sapien
gctgagaatttttagcgctgaaggg

SEQ ID NO: 4745482 - DNA, 25 bp, Homo sapien
tagaagccagattacctacagaagt

SEQ ID NO: 4745483 - DNA, 25 bp, Homo sapien
ctgttgctctattgatatatgttta

SEQ ID NO: 4745484 - DNA, 25 bp, Homo sapien
atatcagacagatgaaagaccaagg

SEQ ID NO: 4745485 - DNA, 25 bp, Homo sapien
ctattgatatatgtttagcaatgcc

SEQ ID NO: 4745486 - DNA, 25 bp, Homo sapien
agagttccaaatatatgagtagttc

SEQ ID NO: 4745487 - DNA, 25 bp, Homo sapien
tatctaaccacaatccagcactcgt

SEQ ID NO: 4745488 - DNA, 25 bp, Homo sapien
tgatctagagataaaccaccctgtt

SEQ ID NO: 4745489 - DNA, 25 bp, Homo sapien
gattcaggttggaagcactgtcatg

SEQ ID NO: 4745490 - DNA, 25 bp, Homo sapien
aaagtgactctgcataaggctggga

SEQ ID NO: 4745491 - DNA, 25 bp, Homo sapien
cagatctaaccatgaccctaggcag

SEQ ID NO: 4745492 - DNA, 25 bp, Homo sapien
tgagtgacaccatatacaacagtgg

SEQ ID NO: 4745493 - DNA, 25 bp, Homo sapien
cctggagggcataacagctgaatac

SEQ ID NO: 4745494 - DNA, 25 bp, Homo sapien
tgcttagtaaccctgaccacttagg

SEQ ID NO: 4745495 - DNA, 25 bp, Homo sapien
tccagcaagtggtaaatagataaac

SEQ ID NO: 4745496 - DNA, 25 bp, Homo sapien
tgattgctgaaacccacattgctgg

SEQ ID NO: 4745497 - DNA, 25 bp, Homo sapien
ggtggatgtatgcaacagaattcta

SEQ ID NO: 4745498 - DNA, 25 bp, Homo sapien
aacatatatggccacacaaagactt

SEQ ID NO: 4745499 - DNA, 25 bp, Homo sapien
gctggttatcttgcatggctactta

SEQ ID NO: 4745500 - DNA, 25 bp, Homo sapien
ttgggcagagactaaatcttagact

SEQ ID NO: 4745501 - DNA, 25 bp, Homo sapien
ggctttgcctagtagatgctggtta

SEQ ID NO: 4745502 - DNA, 25 bp, Homo sapien
taagagctctttctaacctatatgg

SEQ ID NO: 4745503 - DNA, 25 bp, Homo sapien
tatgattggcaatgtctcccatccc

SEQ ID NO: 4745504 - DNA, 25 bp, Homo sapien
taacagtgccttactccagcagtca

SEQ ID NO: 4745505 - DNA, 25 bp, Homo sapien
gaaagtggtttttcacgcacctgaa

SEQ ID NO: 4745506 - DNA, 25 bp, Homo sapien
aatatacagcagttctatgccacag

SEQ ID NO: 4745507 - DNA, 25 bp, Homo sapien
ggaggtactttaaaggccagcatca

SEQ ID NO: 4745508 - DNA, 25 bp, Homo sapien
tagtcttgaagtcgtaacccctgaa

SEQ ID NO: 4745509 - DNA, 25 bp, Homo sapien
tgtgcagagcttaggccgatcgctg

SEQ ID NO: 4745510 - DNA, 25 bp, Homo sapien
caaattgccattgccgtgtgtgcag

SEQ ID NO: 4745511 - DNA, 25 bp, Homo sapien
cctccttgagatatggtgatgatca

SEQ ID NO: 4745512 - DNA, 25 bp, Homo sapien
aaaagttttccgcagaacagtgcat

SEQ ID NO: 4745513 - DNA, 25 bp, Homo sapien
aattaacagccagcaaactcaaaag

SEQ ID NO: 4745514 - DNA, 25 bp, Homo sapien
taaactcagggcacacattctggcc

SEQ ID NO: 4745515 - DNA, 25 bp, Homo sapien
tcaaagttaccattacgctgctctc

SEQ ID NO: 4745516 - DNA, 25 bp, Homo sapien
aactcccagttaaagcctaggctag

SEQ ID NO: 4745517 - DNA, 25 bp, Homo sapien
gatatactacaaactaaggatgctg

SEQ ID NO: 4745518 - DNA, 25 bp, Homo sapien
tgctctcttgtaaatgaactaggga

SEQ ID NO: 4745519 - DNA, 25 bp, Homo sapien
attcagggctggcttaaagaggttg

SEQ ID NO: 4745520 - DNA, 25 bp, Homo sapien
tagtgtcccatacttagaaagattc

SEQ ID NO: 4745521 - DNA, 25 bp, Homo sapien
aaagaggttgtacatgtgcagttac

SEQ ID NO: 4745522 - DNA, 25 bp, Homo sapien
tttagtactgggaactcaagggaca

SEQ ID NO: 4745523 - DNA, 25 bp, Homo sapien
cagacctggtgctgtgtagcttatc

SEQ ID NO: 4745524 - DNA, 25 bp, Homo sapien
cactccctggtataagctgtaaata

SEQ ID NO: 4745525 - DNA, 25 bp, Homo sapien
tgaaactttaaccagagcatacaca

SEQ ID NO: 4745526 - DNA, 25 bp, Homo sapien
taagatgatcttaccttctcaggaa

SEQ ID NO: 4745527 - DNA, 25 bp, Homo sapien
gtactttagaatgctttgttgacat

SEQ ID NO: 4745528 - DNA, 25 bp, Homo sapien
ttagaatgctttgttgacattactt

SEQ ID NO: 4745529 - DNA, 25 bp, Homo sapien
tactttagaatgctttgttgacatt

SEQ ID NO: 4745530 - DNA, 25 bp, Homo sapien
ctttagaatgctttgttgacattac

SEQ ID NO: 4745531 - DNA, 25 bp, Homo sapien
gaaacagttatcacttggcacagaa

SEQ ID NO: 4745532 - DNA, 25 bp, Homo sapien
gagaacctctaatctgtggatatag

SEQ ID NO: 4745533 - DNA, 25 bp, Homo sapien
tgagtaggtgtaacacaaactcgct

SEQ ID NO: 4745534 - DNA, 25 bp, Homo sapien
tgccctcgaggagatcacattgtcc

SEQ ID NO: 4745535 - DNA, 25 bp, Homo sapien
ttcgtattgtctgaaacaagagagc

SEQ ID NO: 4745536 - DNA, 25 bp, Homo sapien
tgatcatgaaaggtagagcagctgt

SEQ ID NO: 4745537 - DNA, 25 bp, Homo sapien
tgaagcttcttttgcccaaggaaac

SEQ ID NO: 4745538 - DNA, 25 bp, Homo sapien
gctgtagaggtgagctgccctaaaa

SEQ ID NO: 4745539 - DNA, 25 bp, Homo sapien
ccacagtggtctaggcaacagctaa

SEQ ID NO: 4745540 - DNA, 25 bp, Homo sapien
tgctcccagaactgtacaccggttg

SEQ ID NO: 4745541 - DNA, 25 bp, Homo sapien
tactcagtggtctcggctattcaac

SEQ ID NO: 4745542 - DNA, 25 bp, Homo sapien
ttaaagaggcaacagggccaggcat

SEQ ID NO: 4745543 - DNA, 25 bp, Homo sapien
aagatgagtacagcgtgccccaagt

SEQ ID NO: 4745544 - DNA, 25 bp, Homo sapien
taaccgagtcctgagagtgtaagcc

SEQ ID NO: 4745545 - DNA, 25 bp, Homo sapien
catggtgacatagaagagcctgacg

SEQ ID NO: 4745546 - DNA, 25 bp, Homo sapien
tcaaccgagatctgaaggacagcag

SEQ ID NO: 4745547 - DNA, 25 bp, Homo sapien
cactccagcccaggcaatagaaacc

SEQ ID NO: 4745548 - DNA, 25 bp, Homo sapien
tacactccagcccaggcaatagaaa

SEQ ID NO: 4745549 - DNA, 25 bp, Homo sapien
actacactccagcccaggcaataga

SEQ ID NO: 4745550 - DNA, 25 bp, Homo sapien
ggaagtcaaggctatagtgagccat

SEQ ID NO: 4745551 - DNA, 25 bp, Homo sapien
cagacgtaacagaaaggccactttt

SEQ ID NO: 4745552 - DNA, 25 bp, Homo sapien
gagggctcataccactctcagtgtg

SEQ ID NO: 4745553 - DNA, 25 bp, Homo sapien
tactctgtggtgcagtcctgagggc

SEQ ID NO: 4745554 - DNA, 25 bp, Homo sapien
cataagtgtcctgcgctcatgagcc

SEQ ID NO: 4745555 - DNA, 25 bp, Homo sapien
accacctgtgtggagtgtaaagaca

SEQ ID NO: 4745556 - DNA, 25 bp, Homo sapien
ccagccatagtgcatttagaggtca

SEQ ID NO: 4745557 - DNA, 25 bp, Homo sapien
cagggccaaggtataaccccaggct

SEQ ID NO: 4745558 - DNA, 25 bp, Homo sapien
tgggctgagtagctgcacacacctg

SEQ ID NO: 4745559 - DNA, 25 bp, Homo sapien
gagttgcccgaaaccggagagagaa

SEQ ID NO: 4745560 - DNA, 25 bp, Homo sapien
gcaacaataatacggcgcccaacgt

SEQ ID NO: 4745561 - DNA, 25 bp, Homo sapien
tgggcctcagagaagactcggaacc

SEQ ID NO: 4745562 - DNA, 25 bp, Homo sapien
tgtgatgatgaagaaccgcagatcc

SEQ ID NO: 4745563 - DNA, 25 bp, Homo sapien
tccataataagattgggatttcctt

SEQ ID NO: 4745564 - DNA, 25 bp, Homo sapien
agttgatggctttccataataagat

SEQ ID NO: 4745565 - DNA, 25 bp, Homo sapien
ttccataataagattgggatttcct

SEQ ID NO: 4745566 - DNA, 25 bp, Homo sapien
cataataagattgggatttccttta

SEQ ID NO: 4745567 - DNA, 25 bp, Homo sapien
actgaaattccccaccaatctgaga

SEQ ID NO: 4745568 - DNA, 25 bp, Homo sapien
gctgcttaagatctttctttttcat

SEQ ID NO: 4745569 - DNA, 25 bp, Homo sapien
ttaagatctttctttttcatgaagg

SEQ ID NO: 4745570 - DNA, 25 bp, Homo sapien
gatctttctttttcatgaaggactt

SEQ ID NO: 4745571 - DNA, 25 bp, Homo sapien
aagatctttctttttcatgaaggac

SEQ ID NO: 4745572 - DNA, 25 bp, Homo sapien
tgtgttccttgaagtttaattgcat

SEQ ID NO: 4745573 - DNA, 25 bp, Homo sapien
tgttccttgaagtttaattgcattc

SEQ ID NO: 4745574 - DNA, 25 bp, Homo sapien
gttccttgaagtttaattgcattca

SEQ ID NO: 4745575 - DNA, 25 bp, Homo sapien
ttccttgaagtttaattgcattcac

SEQ ID NO: 4745576 - DNA, 25 bp, Homo sapien
tggagtttggcaggatgatagcttt

SEQ ID NO: 4745577 - DNA, 25 bp, Homo sapien
ttaaagacaggatcttggccaggtg

SEQ ID NO: 4745578 - DNA, 25 bp, Homo sapien
aaagacaggatcttggccaggtgtg

SEQ ID NO: 4745579 - DNA, 25 bp, Homo sapien
tctcactatgttgtcaacggtggtc

SEQ ID NO: 4745580 - DNA, 25 bp, Homo sapien
actatgttgtcaacggtggtctcaa

SEQ ID NO: 4745581 - DNA, 25 bp, Homo sapien
cagcagcttgtgaattaccaatctt

SEQ ID NO: 4745582 - DNA, 25 bp, Homo sapien
ttctaacctgtgtacttatgttccc

SEQ ID NO: 4745583 - DNA, 25 bp, Homo sapien
tgcacccatccaacacttgctgttt

SEQ ID NO: 4745584 - DNA, 25 bp, Homo sapien
ccactcctagcaaagcagcagcttg

SEQ ID NO: 4745585 - DNA, 25 bp, Homo sapien
cgttctccaggcgtccatttcccca

SEQ ID NO: 4745586 - DNA, 25 bp, Homo sapien
gttctccaggcgtccatttccccaa

SEQ ID NO: 4745587 - DNA, 25 bp, Homo sapien
ttctccaggcgtccatttccccaac

SEQ ID NO: 4745588 - DNA, 25 bp, Homo sapien
agactgtgaccgaccccgaggttgg

SEQ ID NO: 4745589 - DNA, 25 bp, Homo sapien
tggcctcagcgtgccagaaacagcc

SEQ ID NO: 4745590 - DNA, 25 bp, Homo sapien
gcacacctgtcaggatgcgggctcc

SEQ ID NO: 4745591 - DNA, 25 bp, Homo sapien
gcttcacccttgatgccgtacggtg

SEQ ID NO: 4745592 - DNA, 25 bp, Homo sapien
gaccatcctggtgttagccctcaga

SEQ ID NO: 4745593 - DNA, 25 bp, Homo sapien
cacagctggaaagggacggaattag

SEQ ID NO: 4745594 - DNA, 25 bp, Homo sapien
caactgttccggcttgctgggacca

SEQ ID NO: 4745595 - DNA, 25 bp, Homo sapien
aggaactgacgcatctctggaggac

SEQ ID NO: 4745596 - DNA, 25 bp, Homo sapien
tactgagcccttctgattcggcctg

SEQ ID NO: 4745597 - DNA, 25 bp, Homo sapien
tactaaagaaaaccacacgagggca

SEQ ID NO: 4745598 - DNA, 25 bp, Homo sapien
gtactccctgcgtgttgaggcctgg

SEQ ID NO: 4745599 - DNA, 25 bp, Homo sapien
cataaaattgttccgtactgagccc

SEQ ID NO: 4745600 - DNA, 25 bp, Homo sapien
ggcaggctgcaccacattaggctct

SEQ ID NO: 4745601 - DNA, 25 bp, Homo sapien
tctgcggaatgaggcctctggagtc

SEQ ID NO: 4745602 - DNA, 25 bp, Homo sapien
tggtggcaggcaaacaatggcagat

SEQ ID NO: 4745603 - DNA, 25 bp, Homo sapien
tcctctaggaaacaggtggccagca

SEQ ID NO: 4745604 - DNA, 25 bp, Homo sapien
ggtcttcgctgatcaccaattctgg

SEQ ID NO: 4745605 - DNA, 25 bp, Homo sapien
tacaagagacttcagcagtaggtgg

SEQ ID NO: 4745606 - DNA, 25 bp, Homo sapien
ggacagctgcctgattcggccatga

SEQ ID NO: 4745607 - DNA, 25 bp, Homo sapien
ctgcaagcgcgcctgtgaacaagtc

SEQ ID NO: 4745608 - DNA, 25 bp, Homo sapien
tctcagacaaaatgccgagggcgcg

SEQ ID NO: 4745609 - DNA, 25 bp, Homo sapien
gaataccctaagaggccaagtcagg

SEQ ID NO: 4745610 - DNA, 25 bp, Homo sapien
acagagttgctcaagtgggcaggca

SEQ ID NO: 4745611 - DNA, 25 bp, Homo sapien
ttttctgaggagcaatgtgcccggg

SEQ ID NO: 4745612 - DNA, 25 bp, Homo sapien
tctctgcatgtgaacagtgagctgg

SEQ ID NO: 4745613 - DNA, 25 bp, Homo sapien
gagtcctccttctccgggcctgtgt

SEQ ID NO: 4745614 - DNA, 25 bp, Homo sapien
ggaaccacctccaaacagtctctaa

SEQ ID NO: 4745615 - DNA, 25 bp, Homo sapien
tctctaaagacatgagcagcgctga

SEQ ID NO: 4745616 - DNA, 25 bp, Homo sapien
ggccatgcagaaccaacgaaagagc

SEQ ID NO: 4745617 - DNA, 25 bp, Homo sapien
cgaaagagcattggctgcagaaccg

SEQ ID NO: 4745618 - DNA, 25 bp, Homo sapien
gggtgtcaacacagacgtcccactg

SEQ ID NO: 4745619 - DNA, 25 bp, Homo sapien
gggcaaatgacgttccttctctgtc

SEQ ID NO: 4745620 - DNA, 25 bp, Homo sapien
tgggaaaactttgccctgtacagag

SEQ ID NO: 4745621 - DNA, 25 bp, Homo sapien
ccagcatttggctcccagcatcagt

SEQ ID NO: 4745622 - DNA, 25 bp, Homo sapien
gggactctcaaagcaccagcatttg

SEQ ID NO: 4745623 - DNA, 25 bp, Homo sapien
tacaagtagatcagtgggcttaccc

SEQ ID NO: 4745624 - DNA, 25 bp, Homo sapien
cattctagagacatgcagtggtgtg

SEQ ID NO: 4745625 - DNA, 25 bp, Homo sapien
tgtgttgccgcccttctgtctttat

SEQ ID NO: 4745626 - DNA, 25 bp, Homo sapien
acaacacaaacgacacagccagcaa

SEQ ID NO: 4745627 - DNA, 25 bp, Homo sapien
gtggtgtgctagtaccatacacaca

SEQ ID NO: 4745628 - DNA, 25 bp, Homo sapien
gacactgtcgaacggagggctgttc

SEQ ID NO: 4745629 - DNA, 25 bp, Homo sapien
tagtagtggatgacttccgggacac

SEQ ID NO: 4745630 - DNA, 25 bp, Homo sapien
ttcatgtgcataaaaccctggttgc

SEQ ID NO: 4745631 - DNA, 25 bp, Homo sapien
gagggacaagtgctcagcccctttg

SEQ ID NO: 4745632 - DNA, 25 bp, Homo sapien
gagttatcagaactacccccctgac

SEQ ID NO: 4745633 - DNA, 25 bp, Homo sapien
acagagttatcagaactacccccct

SEQ ID NO: 4745634 - DNA, 25 bp, Homo sapien
ggtctcctcagctgtctgggacaga

SEQ ID NO: 4745635 - DNA, 25 bp, Homo sapien
ccctgacactcaggctgaggccaag

SEQ ID NO: 4745636 - DNA, 25 bp, Homo sapien
attccggcatctgacccggaaccag

SEQ ID NO: 4745637 - DNA, 25 bp, Homo sapien
ccccaattccggcatctgacccgga

SEQ ID NO: 4745638 - DNA, 25 bp, Homo sapien
caattccggcatctgacccggaacc

SEQ ID NO: 4745639 - DNA, 25 bp, Homo sapien
atgcagctgcacccaagcgcacccc

SEQ ID NO: 4745640 - DNA, 25 bp, Homo sapien
cccttaggtagaaagctggagcttc

SEQ ID NO: 4745641 - DNA, 25 bp, Homo sapien
ggagaattgcctagacacgtctgag

SEQ ID NO: 4745642 - DNA, 25 bp, Homo sapien
cattccaacactgagcgcttctagg

SEQ ID NO: 4745643 - DNA, 25 bp, Homo sapien
tgtaggtacttagccaccatcccgg

SEQ ID NO: 4745644 - DNA, 25 bp, Homo sapien
gcaggctttgtgattctcacagatc

SEQ ID NO: 4745645 - DNA, 25 bp, Homo sapien
cactgagtggccttacgtttttggg

SEQ ID NO: 4745646 - DNA, 25 bp, Homo sapien
tctgcgtgcatgcactgagtggcct

SEQ ID NO: 4745647 - DNA, 25 bp, Homo sapien
tgggcacatcattcccctctgcgtg

SEQ ID NO: 4745648 - DNA, 25 bp, Homo sapien
gaactgagtctgccagtgtgcaggt

SEQ ID NO: 4745649 - DNA, 25 bp, Homo sapien
gtcacagccgctggcgggaactgag

SEQ ID NO: 4745650 - DNA, 25 bp, Homo sapien
aactgagtctgccagtgtgcaggta

SEQ ID NO: 4745651 - DNA, 25 bp, Homo sapien
gccgctggcgggaactgagtctgcc

SEQ ID NO: 4745652 - DNA, 25 bp, Homo sapien
tatgtcctgaagcaccgaggtgcag

SEQ ID NO: 4745653 - DNA, 25 bp, Homo sapien
gagaaaggcgcgttcacatgctgac

SEQ ID NO: 4745654 - DNA, 25 bp, Homo sapien
tgacagagtccgaagcagaagctaa

SEQ ID NO: 4745655 - DNA, 25 bp, Homo sapien
aatgtcctctgtaccttggctgccg

SEQ ID NO: 4745656 - DNA, 25 bp, Homo sapien
gcatgagcaaaggaagcatgagcac

SEQ ID NO: 4745657 - DNA, 25 bp, Homo sapien
agacgcgagcatgagcaaaggaagc

SEQ ID NO: 4745658 - DNA, 25 bp, Homo sapien
agcatgagcaaaggaagcatgagca

SEQ ID NO: 4745659 - DNA, 25 bp, Homo sapien
aggagacgcgagcatgagcaaagga

SEQ ID NO: 4745660 - DNA, 25 bp, Homo sapien
tcggcaccgtcatcagcaccatcgt

SEQ ID NO: 4745661 - DNA, 25 bp, Homo sapien
tcagcaccatcgtcgttcagggagg

SEQ ID NO: 4745662 - DNA, 25 bp, Homo sapien
caccatcgtcgttcagggagggcat

SEQ ID NO: 4745663 - DNA, 25 bp, Homo sapien
cgtcatcagcaccatcgtcgttcag

SEQ ID NO: 4745664 - DNA, 25 bp, Homo sapien
ctgtgagtctgaaatgtgggtgtcc

SEQ ID NO: 4745665 - DNA, 25 bp, Homo sapien
tgcgaatatttggagactgtgagtc

SEQ ID NO: 4745666 - DNA, 25 bp, Homo sapien
cacacttggaaggtttggaaatgga

SEQ ID NO: 4745667 - DNA, 25 bp, Homo sapien
gttgcctcagtcatcttaccatcga

SEQ ID NO: 4745668 - DNA, 25 bp, Homo sapien
gcagccaggatatgcagtaccagga

SEQ ID NO: 4745669 - DNA, 25 bp, Homo sapien
gttccccttgcggttgaggtgattc

SEQ ID NO: 4745670 - DNA, 25 bp, Homo sapien
tgcggttgaggtgattcattccagg

SEQ ID NO: 4745671 - DNA, 25 bp, Homo sapien
tgcagtaccaggacggttccccttg

SEQ ID NO: 4745672 - DNA, 25 bp, Homo sapien
gcctggctcagccataggatgccca

SEQ ID NO: 4745673 - DNA, 25 bp, Homo sapien
ttgcctggctcagccataggatgcc

SEQ ID NO: 4745674 - DNA, 25 bp, Homo sapien
tgcctggctcagccataggatgccc

SEQ ID NO: 4745675 - DNA, 25 bp, Homo sapien
cacctctgcctagaagaacaggaag

SEQ ID NO: 4745676 - DNA, 25 bp, Homo sapien
cccggtttggcatggagtgctctgt

SEQ ID NO: 4745677 - DNA, 25 bp, Homo sapien
gcaggaccttagttcaagggctcag

SEQ ID NO: 4745678 - DNA, 25 bp, Homo sapien
tggtcctctaggatgaacggcccgg

SEQ ID NO: 4745679 - DNA, 25 bp, Homo sapien
ccccagttgcagtttagcatattga

SEQ ID NO: 4745680 - DNA, 25 bp, Homo sapien
gtcctctcctcagtccaattccgct

SEQ ID NO: 4745681 - DNA, 25 bp, Homo sapien
gtccaattccgctcctctggctttg

SEQ ID NO: 4745682 - DNA, 25 bp, Homo sapien
tggtggtgtgcacgcccccctgctg

SEQ ID NO: 4745683 - DNA, 25 bp, Homo sapien
tcagggagagggagtagtcatgctt

SEQ ID NO: 4745684 - DNA, 25 bp, Homo sapien
ggttctcggcgtctcctctgctgat

SEQ ID NO: 4745685 - DNA, 25 bp, Homo sapien
gttccggacaaggtagctacactcc

SEQ ID NO: 4745686 - DNA, 25 bp, Homo sapien
ctctgctgatggctccgtgatacca

SEQ ID NO: 4745687 - DNA, 25 bp, Homo sapien
ctcagggctcccatgtttgataggc

SEQ ID NO: 4745688 - DNA, 25 bp, Homo sapien
ccatgtttgataggcttaaagcccc

SEQ ID NO: 4745689 - DNA, 25 bp, Homo sapien
ggatgactgccgcttctcgttgcca

SEQ ID NO: 4745690 - DNA, 25 bp, Homo sapien
taggatcccgcagaactcagggctc

SEQ ID NO: 4745691 - DNA, 25 bp, Homo sapien
caccaacaagaggcctctgtgttcg

SEQ ID NO: 4745692 - DNA, 25 bp, Homo sapien
tacctgtaggacaagtggcttagca

SEQ ID NO: 4745693 - DNA, 25 bp, Homo sapien
ctgcccagtgagtgtaggttccttt

SEQ ID NO: 4745694 - DNA, 25 bp, Homo sapien
tggcttagcaaatgtttgatttgta

SEQ ID NO: 4745695 - DNA, 25 bp, Homo sapien
gactttttccccatccacaagccca

SEQ ID NO: 4745696 - DNA, 25 bp, Homo sapien
atccacaagcccaaagacctgcaag

SEQ ID NO: 4745697 - DNA, 25 bp, Homo sapien
aatgagtctccctgtccataagacc

SEQ ID NO: 4745698 - DNA, 25 bp, Homo sapien
gtctccctgtccataagacccaaag

SEQ ID NO: 4745699 - DNA, 25 bp, Homo sapien
gattcatagtcaatcctcagacagg

SEQ ID NO: 4745700 - DNA, 25 bp, Homo sapien
tggattcatagtcaatcctcagaca

SEQ ID NO: 4745701 - DNA, 25 bp, Homo sapien
tctggattcatagtcaatcctcaga

SEQ ID NO: 4745702 - DNA, 25 bp, Homo sapien
attcatagtcaatcctcagacaggc

SEQ ID NO: 4745703 - DNA, 25 bp, Homo sapien
tcacttccctgtggaggcagagctg

SEQ ID NO: 4745704 - DNA, 25 bp, Homo sapien
ctgcagccagcagcccgtggtggaa

SEQ ID NO: 4745705 - DNA, 25 bp, Homo sapien
cagagctgcagtccactccctgcag

SEQ ID NO: 4745706 - DNA, 25 bp, Homo sapien
tgcagccagcagcccgtggtggaac

SEQ ID NO: 4745707 - DNA, 25 bp, Homo sapien
gggattgggatccgacaagtgggag

SEQ ID NO: 4745708 - DNA, 25 bp, Homo sapien
tcctggggattgggatccgacaagt

SEQ ID NO: 4745709 - DNA, 25 bp, Homo sapien
gattgggatccgacaagtgggagtg

SEQ ID NO: 4745710 - DNA, 25 bp, Homo sapien
ttgggatccgacaagtgggagtggg

SEQ ID NO: 4745711 - DNA, 25 bp, Homo sapien
tttatgacttatgatgcacatgccc

SEQ ID NO: 4745712 - DNA, 25 bp, Homo sapien
tcacttttcaaaagggctgtgggag

SEQ ID NO: 4745713 - DNA, 25 bp, Homo sapien
ctttggcacagattctaaggagtgg

SEQ ID NO: 4745714 - DNA, 25 bp, Homo sapien
ttgtgacagatacccagattctaga

SEQ ID NO: 4745715 - DNA, 25 bp, Homo sapien
gaaactgggatagaagacacagtgg

SEQ ID NO: 4745716 - DNA, 25 bp, Homo sapien
tgcagggctagctcagctcgcagca

SEQ ID NO: 4745717 - DNA, 25 bp, Homo sapien
agccctgcagggctagctcagctcg

SEQ ID NO: 4745718 - DNA, 25 bp, Homo sapien
aaactgggatagaagacacagtggt

SEQ ID NO: 4745719 - DNA, 25 bp, Homo sapien
cagaaccagacaatgagagcatctg

SEQ ID NO: 4745720 - DNA, 25 bp, Homo sapien
tattatcaataaataggaccaagac

SEQ ID NO: 4745721 - DNA, 25 bp, Homo sapien
gacaatgagagcatctgagccctct

SEQ ID NO: 4745722 - DNA, 25 bp, Homo sapien
cttcagtgagctagggtattatcaa

SEQ ID NO: 4745723 - DNA, 25 bp, Homo sapien
gggaccaaggtgagtgctgagcgca

SEQ ID NO: 4745724 - DNA, 25 bp, Homo sapien
ctggagtttgtcctgagcgcaggtg

SEQ ID NO: 4745725 - DNA, 25 bp, Homo sapien
caaggtgagtgctgagcgcagctca

SEQ ID NO: 4745726 - DNA, 25 bp, Homo sapien
gaccacccaactggattattaaaca

SEQ ID NO: 4745727 - DNA, 25 bp, Homo sapien
ggttccactcccaaggctggtcgta

SEQ ID NO: 4745728 - DNA, 25 bp, Homo sapien
tggtcgtactcatcggcgggcctgt

SEQ ID NO: 4745729 - DNA, 25 bp, Homo sapien
actgtgctctccgagtctgagtcaa

SEQ ID NO: 4745730 - DNA, 25 bp, Homo sapien
gggtgtcatataactggataccttt

SEQ ID NO: 4745731 - DNA, 25 bp, Homo sapien
acccagaaacaccacaaactcagag

SEQ ID NO: 4745732 - DNA, 25 bp, Homo sapien
ccacccagaaacaccacaaactcag

SEQ ID NO: 4745733 - DNA, 25 bp, Homo sapien
tgcattcccacccagaaacaccaca

SEQ ID NO: 4745734 - DNA, 25 bp, Homo sapien
tcccacccagaaacaccacaaactc

SEQ ID NO: 4745735 - DNA, 25 bp, Homo sapien
gaccattttagccatgattaacgta

SEQ ID NO: 4745736 - DNA, 25 bp, Homo sapien
cccagccaacattgaccattttagc

SEQ ID NO: 4745737 - DNA, 25 bp, Homo sapien
ccatgattaacgtacagttcagtgg

SEQ ID NO: 4745738 - DNA, 25 bp, Homo sapien
gtacattcacactattgggaacctt

SEQ ID NO: 4745739 - DNA, 25 bp, Homo sapien
tgaggtcttcccgaaatcagaattc

SEQ ID NO: 4745740 - DNA, 25 bp, Homo sapien
gattcaggccggctcatgtggacac

SEQ ID NO: 4745741 - DNA, 25 bp, Homo sapien
tggacacacgccacgaagaaacaga

SEQ ID NO: 4745742 - DNA, 25 bp, Homo sapien
caggctgggctttatgattcaggcc

SEQ ID NO: 4745743 - DNA, 25 bp, Homo sapien
tcgtcttcctccgttctgaggagtg

SEQ ID NO: 4745744 - DNA, 25 bp, Homo sapien
ttctgaggagtgaagtctagcctcc

SEQ ID NO: 4745745 - DNA, 25 bp, Homo sapien
ctgtattcgtcttcctccgttctga

SEQ ID NO: 4745746 - DNA, 25 bp, Homo sapien
gagtgaagtctagcctcctgtctgc

SEQ ID NO: 4745747 - DNA, 25 bp, Homo sapien
cccatgtacacagttgatgaagtac

SEQ ID NO: 4745748 - DNA, 25 bp, Homo sapien
ctccttcacaaaagcaggaccagca

SEQ ID NO: 4745749 - DNA, 25 bp, Homo sapien
gcaaccactcccatgtacacagttg

SEQ ID NO: 4745750 - DNA, 25 bp, Homo sapien
cttcacaaaagcaggaccagcaacc

SEQ ID NO: 4745751 - DNA, 25 bp, Homo sapien
ggtgaaaacaccgatcccactagag

SEQ ID NO: 4745752 - DNA, 25 bp, Homo sapien
tgaaccgacaggcatagcagcactg

SEQ ID NO: 4745753 - DNA, 25 bp, Homo sapien
tgctggaaatgatagacgctggcct

SEQ ID NO: 4745754 - DNA, 25 bp, Homo sapien
ccttaatgggagcagacttgatacc

SEQ ID NO: 4745755 - DNA, 25 bp, Homo sapien
ctggcaccacggagtgagcgatgag

SEQ ID NO: 4745756 - DNA, 25 bp, Homo sapien
cttccagtgactgcctttgcgtgcg

SEQ ID NO: 4745757 - DNA, 25 bp, Homo sapien
ccccgtggagactcactgaggcgag

SEQ ID NO: 4745758 - DNA, 25 bp, Homo sapien
gagactcactgaggcgagcttgctg

SEQ ID NO: 4745759 - DNA, 25 bp, Homo sapien
ggaggcctctaagccgctgcaggcc

SEQ ID NO: 4745760 - DNA, 25 bp, Homo sapien
tgggcccaggtgtagaaggctctcc

SEQ ID NO: 4745761 - DNA, 25 bp, Homo sapien
gtcacaaacagcgaggagtgggccc

SEQ ID NO: 4745762 - DNA, 25 bp, Homo sapien
tgcctggtgtcacaaacagcgagga

SEQ ID NO: 4745763 - DNA, 25 bp, Homo sapien
gcccaggtgtagaaggctctccagg

SEQ ID NO: 4745764 - DNA, 25 bp, Homo sapien
gggctgggctagcacgggtggcatc

SEQ ID NO: 4745765 - DNA, 25 bp, Homo sapien
atgtggaaatgctggcatatccact

SEQ ID NO: 4745766 - DNA, 25 bp, Homo sapien
gggctagcacgggtggcatcagcat

SEQ ID NO: 4745767 - DNA, 25 bp, Homo sapien
gctggcatatccactgggatgatga

SEQ ID NO: 4745768 - DNA, 25 bp, Homo sapien
agccagggcccagcagggacttcac

SEQ ID NO: 4745769 - DNA, 25 bp, Homo sapien
ctgcagagagccagggcccagcagg

SEQ ID NO: 4745770 - DNA, 25 bp, Homo sapien
agggcccagcagggacttcacaggg

SEQ ID NO: 4745771 - DNA, 25 bp, Homo sapien
ccagggcccagcagggacttcacag

SEQ ID NO: 4745772 - DNA, 25 bp, Homo sapien
gcaccacgacaggttctttcccaca

SEQ ID NO: 4745773 - DNA, 25 bp, Homo sapien
tcccacagattaacatggggtccca

SEQ ID NO: 4745774 - DNA, 25 bp, Homo sapien
aggcagcaccacgacaggttctttc

SEQ ID NO: 4745775 - DNA, 25 bp, Homo sapien
cagcaccacgacaggttctttccca

SEQ ID NO: 4745776 - DNA, 25 bp, Homo sapien
acaggccacatgaccgctgaggctc

SEQ ID NO: 4745777 - DNA, 25 bp, Homo sapien
aggccacatgaccgctgaggctcca

SEQ ID NO: 4745778 - DNA, 25 bp, Homo sapien
gtcccctgacggagggaggcaccag

SEQ ID NO: 4745779 - DNA, 25 bp, Homo sapien
ccacatgaccgctgaggctccagct

SEQ ID NO: 4745780 - DNA, 25 bp, Homo sapien
gtctggaaaaatgctcctccacagg

SEQ ID NO: 4745781 - DNA, 25 bp, Homo sapien
agcctgggtcacagcgtgctccaag

SEQ ID NO: 4745782 - DNA, 25 bp, Homo sapien
tgggcctgatattccagccacctgc

SEQ ID NO: 4745783 - DNA, 25 bp, Homo sapien
gctctggccactgtcagtcagtctg

SEQ ID NO: 4745784 - DNA, 25 bp, Homo sapien
aagctcccactgtttaaaatgaaat

SEQ ID NO: 4745785 - DNA, 25 bp, Homo sapien
ttgaataatgtccaagccgaaatga

SEQ ID NO: 4745786 - DNA, 25 bp, Homo sapien
tgtccaagccgaaatgactgcagcc

SEQ ID NO: 4745787 - DNA, 25 bp, Homo sapien
atttttctatgtggtggatgacctg

SEQ ID NO: 4745788 - DNA, 25 bp, Homo sapien
ttctatgtggtggatgacctgaaat

SEQ ID NO: 4745789 - DNA, 25 bp, Homo sapien
gcttggatctcatttatgtcaatct

SEQ ID NO: 4745790 - DNA, 25 bp, Homo sapien
tgtggaggtccccacagcgcaaagt

SEQ ID NO: 4745791 - DNA, 25 bp, Homo sapien
aagacatgtcagacctgagtccaca

SEQ ID NO: 4745792 - DNA, 25 bp, Homo sapien
tcaatctctggacgcccagtgtaga

SEQ ID NO: 4745793 - DNA, 25 bp, Homo sapien
tgtgtccaaccgagcaagcagaggc

SEQ ID NO: 4745794 - DNA, 25 bp, Homo sapien
ggacagcccgtgtgacaggcacttg

SEQ ID NO: 4745795 - DNA, 25 bp, Homo sapien
gcccgtgtgacaggcacttgctgca

SEQ ID NO: 4745796 - DNA, 25 bp, Homo sapien
cagtggcaggacagcccgtgtgaca

SEQ ID NO: 4745797 - DNA, 25 bp, Homo sapien
ggcaccatcgtgtaattaaggacga

SEQ ID NO: 4745798 - DNA, 25 bp, Homo sapien
aggacgataattacagctccatggc

SEQ ID NO: 4745799 - DNA, 25 bp, Homo sapien
agctccatggctagtgtcaaaccca

SEQ ID NO: 4745800 - DNA, 25 bp, Homo sapien
ggcaaaggcaccatcgtgtaattaa

SEQ ID NO: 4745801 - DNA, 25 bp, Homo sapien
atggattctccacgaagaccctcca

SEQ ID NO: 4745802 - DNA, 25 bp, Homo sapien
gtgctcgttgcagtgcccagaacag

SEQ ID NO: 4745803 - DNA, 25 bp, Homo sapien
ccagcccctgtgctcgttgcagtgc

SEQ ID NO: 4745804 - DNA, 25 bp, Homo sapien
ccctgtgctcgttgcagtgcccaga

SEQ ID NO: 4745805 - DNA, 25 bp, Homo sapien
ggcctggttctgccttgagccacag

SEQ ID NO: 4745806 - DNA, 25 bp, Homo sapien
ggccaaaacctcaaacacagggcac

SEQ ID NO: 4745807 - DNA, 25 bp, Homo sapien
gatgaggggacattcttcaccagaa

SEQ ID NO: 4745808 - DNA, 25 bp, Homo sapien
acagggcaccgacagtctgagcaca

SEQ ID NO: 4745809 - DNA, 25 bp, Homo sapien
gttccaggccaaaacctcaaacaca

SEQ ID NO: 4745810 - DNA, 25 bp, Homo sapien
gatgcaggagctttgctgcagatta

SEQ ID NO: 4745811 - DNA, 25 bp, Homo sapien
gcaggagctttgctgcagattaatc

SEQ ID NO: 4745812 - DNA, 25 bp, Homo sapien
agattaatctgagtctccctgagcc

SEQ ID NO: 4745813 - DNA, 25 bp, Homo sapien
gagctttgctgcagattaatctgag

SEQ ID NO: 4745814 - DNA, 25 bp, Homo sapien
ccaggaaagacaaggagttagggat

SEQ ID NO: 4745815 - DNA, 25 bp, Homo sapien
caatctgtttgttgggccctcacat

SEQ ID NO: 4745816 - DNA, 25 bp, Homo sapien
gaaaaccaatggcaaccctcagggc

SEQ ID NO: 4745817 - DNA, 25 bp, Homo sapien
ctgacaaacgctcagcaggactgca

SEQ ID NO: 4745818 - DNA, 25 bp, Homo sapien
atagaacggtgccagcacatggcag

SEQ ID NO: 4745819 - DNA, 25 bp, Homo sapien
ctcaactgttaactccatgagaaca

SEQ ID NO: 4745820 - DNA, 25 bp, Homo sapien
ttgttcatgcatagacccgggagca

SEQ ID NO: 4745821 - DNA, 25 bp, Homo sapien
gaatcatgggtaggctactgccacc

SEQ ID NO: 4745822 - DNA, 25 bp, Homo sapien
ttggtgtagtctccaacacagcccg

SEQ ID NO: 4745823 - DNA, 25 bp, Homo sapien
gcagtggcggtatctgcccaggtta

SEQ ID NO: 4745824 - DNA, 25 bp, Homo sapien
gcggtatctgcccaggttatttggt

SEQ ID NO: 4745825 - DNA, 25 bp, Homo sapien
tggtgtagtctccaacacagcccgg

SEQ ID NO: 4745826 - DNA, 25 bp, Homo sapien
ctcctgccggtgacacaaactggag

SEQ ID NO: 4745827 - DNA, 25 bp, Homo sapien
tcctgccggtgacacaaactggagc

SEQ ID NO: 4745828 - DNA, 25 bp, Homo sapien
tcaaagggatctgagtagtcatcgg

SEQ ID NO: 4745829 - DNA, 25 bp, Homo sapien
cttggcatcaaagggatctgagtag

SEQ ID NO: 4745830 - DNA, 25 bp, Homo sapien
ggcatcaaagggatctgagtagtca

SEQ ID NO: 4745831 - DNA, 25 bp, Homo sapien
gatcctctgtgcctcatagggctcc

SEQ ID NO: 4745832 - DNA, 25 bp, Homo sapien
tttcacatctcttcacagctaggct

SEQ ID NO: 4745833 - DNA, 25 bp, Homo sapien
ggcttttttgtttcacatctcttca

SEQ ID NO: 4745834 - DNA, 25 bp, Homo sapien
gatggcaggtgtgagtccacctttg

SEQ ID NO: 4745835 - DNA, 25 bp, Homo sapien
ttcacagctaggctttgggcctcag

SEQ ID NO: 4745836 - DNA, 25 bp, Homo sapien
cctaacctttaggagaggcacagaa

SEQ ID NO: 4745837 - DNA, 25 bp, Homo sapien
tttaattagaaaccacaggagcctg

SEQ ID NO: 4745838 - DNA, 25 bp, Homo sapien
tcataaacttgtcctgggacttccc

SEQ ID NO: 4745839 - DNA, 25 bp, Homo sapien
taaaaattctcgattgcaggctcca

SEQ ID NO: 4745840 - DNA, 25 bp, Homo sapien
agatggccatgcagaaggtttgtgt

SEQ ID NO: 4745841 - DNA, 25 bp, Homo sapien
gtgtgaagcgtgctgcttttttgag

SEQ ID NO: 4745842 - DNA, 25 bp, Homo sapien
gtccagatggccatgcagaaggttt

SEQ ID NO: 4745843 - DNA, 25 bp, Homo sapien
aaggtttgtgtgaagcgtgctgctt

SEQ ID NO: 4745844 - DNA, 25 bp, Homo sapien
agcaggtgcacagatgcgacgcgtc

SEQ ID NO: 4745845 - DNA, 25 bp, Homo sapien
gcacagatgcgacgcgtcgactgca

SEQ ID NO: 4745846 - DNA, 25 bp, Homo sapien
aggtgcacagatgcgacgcgtcgac

SEQ ID NO: 4745847 - DNA, 25 bp, Homo sapien
cagcaggtgcacagatgcgacgcgt

SEQ ID NO: 4745848 - DNA, 25 bp, Homo sapien
ttataggcacgccaataaatcactg

SEQ ID NO: 4745849 - DNA, 25 bp, Homo sapien
gactatcatcatagaccaactctcc

SEQ ID NO: 4745850 - DNA, 25 bp, Homo sapien
cctcagctttgactatcatcataga

SEQ ID NO: 4745851 - DNA, 25 bp, Homo sapien
tcatagaccaactctccttataggc

SEQ ID NO: 4745852 - DNA, 25 bp, Homo sapien
cgcgaagagtaagagcaagattttc

SEQ ID NO: 4745853 - DNA, 25 bp, Homo sapien
ccctggtcgcgaagagtaagagcaa

SEQ ID NO: 4745854 - DNA, 25 bp, Homo sapien
agaccagccctggtcgcgaagagta

SEQ ID NO: 4745855 - DNA, 25 bp, Homo sapien
accagccctggtcgcgaagagtaag

SEQ ID NO: 4745856 - DNA, 25 bp, Homo sapien
tcagaaatccagactatccccctcc

SEQ ID NO: 4745857 - DNA, 25 bp, Homo sapien
cagaaatccagactatccccctccc

SEQ ID NO: 4745858 - DNA, 25 bp, Homo sapien
ttgcccagggtcacctggacatcag

SEQ ID NO: 4745859 - DNA, 25 bp, Homo sapien
tgcccagggtcacctggacatcaga

SEQ ID NO: 4745860 - DNA, 25 bp, Homo sapien
tgggctctggaacatagagcagaag

SEQ ID NO: 4745861 - DNA, 25 bp, Homo sapien
aggcctctggggcaacttgcagctg

SEQ ID NO: 4745862 - DNA, 25 bp, Homo sapien
atgggcctctcgacaggagtctggc

SEQ ID NO: 4745863 - DNA, 25 bp, Homo sapien
agaaatgggcctctcgacaggagtc

SEQ ID NO: 4745864 - DNA, 25 bp, Homo sapien
ctctcgacaggagtctggcggccca

SEQ ID NO: 4745865 - DNA, 25 bp, Homo sapien
ttctccctgcaaggacgtcctctga

SEQ ID NO: 4745866 - DNA, 25 bp, Homo sapien
cctgcaaggacgtcctctgaagatc

SEQ ID NO: 4745867 - DNA, 25 bp, Homo sapien
tccctgcaaggacgtcctctgaaga

SEQ ID NO: 4745868 - DNA, 25 bp, Homo sapien
tgcaaggacgtcctctgaagatcag

SEQ ID NO: 4745869 - DNA, 25 bp, Homo sapien
gctcagagccctggttttccctttc

SEQ ID NO: 4745870 - DNA, 25 bp, Homo sapien
ttcccttcttgcactgctgtcttct

SEQ ID NO: 4745871 - DNA, 25 bp, Homo sapien
cccgcgttggctcagagccctggtt

SEQ ID NO: 4745872 - DNA, 25 bp, Homo sapien
cactgctgtcttctgaagacttcaa

SEQ ID NO: 4745873 - DNA, 25 bp, Homo sapien
cagctgtttatagcctggatgcccc

SEQ ID NO: 4745874 - DNA, 25 bp, Homo sapien
gacacataagcactcctgcagcgtg

SEQ ID NO: 4745875 - DNA, 25 bp, Homo sapien
gagctcaggccagagatcatggaca

SEQ ID NO: 4745876 - DNA, 25 bp, Homo sapien
gctttccaagaacaggcctcacatt

SEQ ID NO: 4745877 - DNA, 25 bp, Homo sapien
gccagaaggactgactgggtccgtc

SEQ ID NO: 4745878 - DNA, 25 bp, Homo sapien
tcaggagtcaaagctcttcgaagtc

SEQ ID NO: 4745879 - DNA, 25 bp, Homo sapien
gactgactgggtccgtcttcctggg

SEQ ID NO: 4745880 - DNA, 25 bp, Homo sapien
aagtcctagacagctctgactctga

SEQ ID NO: 4745881 - DNA, 25 bp, Homo sapien
ggcggcgcacttgttgagcagtttc

SEQ ID NO: 4745882 - DNA, 25 bp, Homo sapien
ccccgctctcctccgcggctgaggc

SEQ ID NO: 4745883 - DNA, 25 bp, Homo sapien
gctgaggcggcgcacttgttgagca

SEQ ID NO: 4745884 - DNA, 25 bp, Homo sapien
tccgcaggccgtcgggctccaggtg

SEQ ID NO: 4745885 - DNA, 25 bp, Homo sapien
ggtgcttgggggagatgtagcgcac

SEQ ID NO: 4745886 - DNA, 25 bp, Homo sapien
gcggtgcttgggggagatgtagcgc

SEQ ID NO: 4745887 - DNA, 25 bp, Homo sapien
tgaggcggtgcttgggggagatgta

SEQ ID NO: 4745888 - DNA, 25 bp, Homo sapien
tttgatgaggcggtgcttgggggag

SEQ ID NO: 4745889 - DNA, 25 bp, Homo sapien
ccaggcggcacatggcgcgcagttt

SEQ ID NO: 4745890 - DNA, 25 bp, Homo sapien
agtttgcgcagcgacgagccaggcc

SEQ ID NO: 4745891 - DNA, 25 bp, Homo sapien
gctgctgctgcggtagagatgcgga

SEQ ID NO: 4745892 - DNA, 25 bp, Homo sapien
aagtacttgtttagccacttggcca

SEQ ID NO: 4745893 - DNA, 25 bp, Homo sapien
aggccgcctagggccgcggcgcggg

SEQ ID NO: 4745894 - DNA, 25 bp, Homo sapien
agaggccgcctagggccgcggcgcg

SEQ ID NO: 4745895 - DNA, 25 bp, Homo sapien
ggcgagaggccgcctagggccgcgg

SEQ ID NO: 4745896 - DNA, 25 bp, Homo sapien
cgagaggccgcctagggccgcggcg

SEQ ID NO: 4745897 - DNA, 25 bp, Homo sapien
agagcggaaggtccgagcgctccac

SEQ ID NO: 4745898 - DNA, 25 bp, Homo sapien
tagcgccgcccaagctaggaatctc

SEQ ID NO: 4745899 - DNA, 25 bp, Homo sapien
caagttcaagttcttgccgccgccg

SEQ ID NO: 4745900 - DNA, 25 bp, Homo sapien
tgccgcgggaacttctcggcgtcct

SEQ ID NO: 4745901 - DNA, 25 bp, Homo sapien
taattgagctgtttatgccgctgcc

SEQ ID NO: 4745902 - DNA, 25 bp, Homo sapien
gttttgaccattaccgcgcactgag

SEQ ID NO: 4745903 - DNA, 25 bp, Homo sapien
tcttaggaatctcattacgggtcga

SEQ ID NO: 4745904 - DNA, 25 bp, Homo sapien
gcgcactgagcattgagccaacagt

SEQ ID NO: 4745905 - DNA, 25 bp, Homo sapien
ccatggcctgaaccgtgaggtgttg

SEQ ID NO: 4745906 - DNA, 25 bp, Homo sapien
gccacccatggcctgaaccgtgagg

SEQ ID NO: 4745907 - DNA, 25 bp, Homo sapien
cccatggcctgaaccgtgaggtgtt

SEQ ID NO: 4745908 - DNA, 25 bp, Homo sapien
cacccatggcctgaaccgtgaggtg

SEQ ID NO: 4745909 - DNA, 25 bp, Homo sapien
ttgggaacaaggctatggagcttca

SEQ ID NO: 4745910 - DNA, 25 bp, Homo sapien
cagcaggcgatgagacttgggaaca

SEQ ID NO: 4745911 - DNA, 25 bp, Homo sapien
gggaaggcagcaggcgatgagactt

SEQ ID NO: 4745912 - DNA, 25 bp, Homo sapien
aaggctatggagcttcagatttgac

SEQ ID NO: 4745913 - DNA, 25 bp, Homo sapien
ccgtcagcagcatagaagaatgcag

SEQ ID NO: 4745914 - DNA, 25 bp, Homo sapien
tgttcccaccgtcagcagcatagaa

SEQ ID NO: 4745915 - DNA, 25 bp, Homo sapien
tccagagtaggctgttcccaccgtc

SEQ ID NO: 4745916 - DNA, 25 bp, Homo sapien
catagaagaatgcagaacaaagttc

SEQ ID NO: 4745917 - DNA, 25 bp, Homo sapien
gccttgagggcaggataggccacac

SEQ ID NO: 4745918 - DNA, 25 bp, Homo sapien
cagcttgctttcacagccttgaggg

SEQ ID NO: 4745919 - DNA, 25 bp, Homo sapien
tgcagcttgctttcacagccttgag

SEQ ID NO: 4745920 - DNA, 25 bp, Homo sapien
agccttgagggcaggataggccaca

SEQ ID NO: 4745921 - DNA, 25 bp, Homo sapien
ctccacaagaccctgctgtatacag

SEQ ID NO: 4745922 - DNA, 25 bp, Homo sapien
gtctccacaagaccctgctgtatac

SEQ ID NO: 4745923 - DNA, 25 bp, Homo sapien
ttgtctccacaagaccctgctgtat

SEQ ID NO: 4745924 - DNA, 25 bp, Homo sapien
ctttgtctccacaagaccctgctgt

SEQ ID NO: 4745925 - DNA, 25 bp, Homo sapien
gctgagctgggtgtgagagcaatag

SEQ ID NO: 4745926 - DNA, 25 bp, Homo sapien
gagcaatagctgcacgaggattgtg

SEQ ID NO: 4745927 - DNA, 25 bp, Homo sapien
aatagctgcacgaggattgtggcca

SEQ ID NO: 4745928 - DNA, 25 bp, Homo sapien
gctgggtgtgagagcaatagctgca

SEQ ID NO: 4745929 - DNA, 25 bp, Homo sapien
ctggcacctggaggtggtttgctca

SEQ ID NO: 4745930 - DNA, 25 bp, Homo sapien
tggcacctggaggtggtttgctcat

SEQ ID NO: 4745931 - DNA, 25 bp, Homo sapien
tggtcccatgaaataggcgcctcat

SEQ ID NO: 4745932 - DNA, 25 bp, Homo sapien
gccagctctggctacccgctgatgt

SEQ ID NO: 4745933 - DNA, 25 bp, Homo sapien
ctgatgtctgtactctttggtccca

SEQ ID NO: 4745934 - DNA, 25 bp, Homo sapien
agtcttcttgtgtttgccagctctg

SEQ ID NO: 4745935 - DNA, 25 bp, Homo sapien
tctcccttccattgttgtggccagg

SEQ ID NO: 4745936 - DNA, 25 bp, Homo sapien
tgctctcatggctcaagatggcaaa

SEQ ID NO: 4745937 - DNA, 25 bp, Homo sapien
tgacctggttattcatggatgaacc

SEQ ID NO: 4745938 - DNA, 25 bp, Homo sapien
tctgagtagggatcactgagtctgc

SEQ ID NO: 4745939 - DNA, 25 bp, Homo sapien
tatgcataagtaggacgcaggcctc

SEQ ID NO: 4745940 - DNA, 25 bp, Homo sapien
tgcataagtaggacgcaggcctcct

SEQ ID NO: 4745941 - DNA, 25 bp, Homo sapien
agtgggcgaaggtgagggtggacag

SEQ ID NO: 4745942 - DNA, 25 bp, Homo sapien
cagttgacattcatggggcttatgc

SEQ ID NO: 4745943 - DNA, 25 bp, Homo sapien
tcaccttggccttaactgtatcctc

SEQ ID NO: 4745944 - DNA, 25 bp, Homo sapien
caccttggccttaactgtatcctct

SEQ ID NO: 4745945 - DNA, 25 bp, Homo sapien
tgtgggaagtcctaggtggctcctc

SEQ ID NO: 4745946 - DNA, 25 bp, Homo sapien
tgccatagcctggatgaagagagtg

SEQ ID NO: 4745947 - DNA, 25 bp, Homo sapien
gagtgagtgtgggaagtcctaggtg

SEQ ID NO: 4745948 - DNA, 25 bp, Homo sapien
agccagagctgccatagcctggatg

SEQ ID NO: 4745949 - DNA, 25 bp, Homo sapien
aggaggcccaactgtgtctgagatt

SEQ ID NO: 4745950 - DNA, 25 bp, Homo sapien
ggaggcccaactgtgtctgagattg

SEQ ID NO: 4745951 - DNA, 25 bp, Homo sapien
tgccagatttttttcgcctgggggc

SEQ ID NO: 4745952 - DNA, 25 bp, Homo sapien
tcatgccagatttttttcgcctggg

SEQ ID NO: 4745953 - DNA, 25 bp, Homo sapien
tggagaattgcagctccaagtttat

SEQ ID NO: 4745954 - DNA, 25 bp, Homo sapien
tctggagaattgcagctccaagttt

SEQ ID NO: 4745955 - DNA, 25 bp, Homo sapien
ttgcagctccaagtttattttaccc

SEQ ID NO: 4745956 - DNA, 25 bp, Homo sapien
gcagctccaagtttattttacccat

SEQ ID NO: 4745957 - DNA, 25 bp, Homo sapien
tggctgctcgatttcccatcatatg

SEQ ID NO: 4745958 - DNA, 25 bp, Homo sapien
acgcccggcctgaagctatacttct

SEQ ID NO: 4745959 - DNA, 25 bp, Homo sapien
tcatatggagacaccctattgttga

SEQ ID NO: 4745960 - DNA, 25 bp, Homo sapien
gattttattaagctagacttccagg

SEQ ID NO: 4745961 - DNA, 25 bp, Homo sapien
tctccaatgcctatcctggcatgtg

SEQ ID NO: 4745962 - DNA, 25 bp, Homo sapien
ttctccaatgcctatcctggcatgt

SEQ ID NO: 4745963 - DNA, 25 bp, Homo sapien
tttctccaatgcctatcctggcatg

SEQ ID NO: 4745964 - DNA, 25 bp, Homo sapien
gctctgtatcctcaagtggagcaaa

SEQ ID NO: 4745965 - DNA, 25 bp, Homo sapien
tgccggggtgctctgtatcctcaag

SEQ ID NO: 4745966 - DNA, 25 bp, Homo sapien
gggtgctctgtatcctcaagtggag

SEQ ID NO: 4745967 - DNA, 25 bp, Homo sapien
ctgtatcctcaagtggagcaaactc

SEQ ID NO: 4745968 - DNA, 25 bp, Homo sapien
cgggcagcggagctgtctcagtctt

SEQ ID NO: 4745969 - DNA, 25 bp, Homo sapien
gccccagctgcagatatgaagcgga

SEQ ID NO: 4745970 - DNA, 25 bp, Homo sapien
cgcccgaccgccgggaggatggagt

SEQ ID NO: 4745971 - DNA, 25 bp, Homo sapien
aggatggagttcagcgggcagcgga

SEQ ID NO: 4745972 - DNA, 25 bp, Homo sapien
aattcacttgcaccaggataaatgc

SEQ ID NO: 4745973 - DNA, 25 bp, Homo sapien
gataaatgctgatgggtctgacacc

SEQ ID NO: 4745974 - DNA, 25 bp, Homo sapien
gtgcttcctgagcatccactccagc

SEQ ID NO: 4745975 - DNA, 25 bp, Homo sapien
gctgatgggtctgacacccctgata

SEQ ID NO: 4745976 - DNA, 25 bp, Homo sapien
tctcaagtcctgcatccactggagg

SEQ ID NO: 4745977 - DNA, 25 bp, Homo sapien
tcaagtcctgcatccactggaggga

SEQ ID NO: 4745978 - DNA, 25 bp, Homo sapien
tcctctcaagtcctgcatccactgg

SEQ ID NO: 4745979 - DNA, 25 bp, Homo sapien
ctctcaagtcctgcatccactggag

SEQ ID NO: 4745980 - DNA, 25 bp, Homo sapien
gccagagtcacgcaggctgggcttc

SEQ ID NO: 4745981 - DNA, 25 bp, Homo sapien
aaagacagccagagtcacgcaggct

SEQ ID NO: 4745982 - DNA, 25 bp, Homo sapien
gaggaccatctacagacttctgggg

SEQ ID NO: 4745983 - DNA, 25 bp, Homo sapien
ggaccatctacagacttctggggct

SEQ ID NO: 4745984 - DNA, 25 bp, Homo sapien
ttccatagcttcaccacaatcaccc

SEQ ID NO: 4745985 - DNA, 25 bp, Homo sapien
tgggatgaggagttgcgcttcatct

SEQ ID NO: 4745986 - DNA, 25 bp, Homo sapien
ggatgaggagttgcgcttcatctcc

SEQ ID NO: 4745987 - DNA, 25 bp, Homo sapien
ctgtgggatgaggagttgcgcttca

SEQ ID NO: 4745988 - DNA, 25 bp, Homo sapien
gacgacattcgatctgggctttaag

SEQ ID NO: 4745989 - DNA, 25 bp, Homo sapien
gaaactgcctggtcaagaatggttg

SEQ ID NO: 4745990 - DNA, 25 bp, Homo sapien
gggacacattttgggcaaaagcctg

SEQ ID NO: 4745991 - DNA, 25 bp, Homo sapien
gggtagcaggaagacgacattcgat

SEQ ID NO: 4745992 - DNA, 25 bp, Homo sapien
caggggggcatcaggctcttccttg

SEQ ID NO: 4745993 - DNA, 25 bp, Homo sapien
acaggggggcatcaggctcttcctt

SEQ ID NO: 4745994 - DNA, 25 bp, Homo sapien
aaggggttcagactggcgttctgat

SEQ ID NO: 4745995 - DNA, 25 bp, Homo sapien
ggagaaggggttcagactggcgttc

SEQ ID NO: 4745996 - DNA, 25 bp, Homo sapien
ctgcatgtggtcactgccagcagcc

SEQ ID NO: 4745997 - DNA, 25 bp, Homo sapien
gcctctatgccatctgtggtgccca

SEQ ID NO: 4745998 - DNA, 25 bp, Homo sapien
gctgtggaggcagaacccagtctcc

SEQ ID NO: 4745999 - DNA, 25 bp, Homo sapien
ggtgcccaggaatttttgctgagcc

SEQ ID NO: 4746000 - DNA, 25 bp, Homo sapien
gctgaaccagttgcctaaagcccca

SEQ ID NO: 4746001 - DNA, 25 bp, Homo sapien
tgatgtgctcgttaaaacccagact

SEQ ID NO: 4746002 - DNA, 25 bp, Homo sapien
tctaacaaggtcaacaagcacatct

SEQ ID NO: 4746003 - DNA, 25 bp, Homo sapien
tgtcggcggcatgccaattttgatg

SEQ ID NO: 4746004 - DNA, 25 bp, Homo sapien
tatttctttgctgcaatgctcctcg

SEQ ID NO: 4746005 - DNA, 25 bp, Homo sapien
atcagtataatctccagaaactgaa

SEQ ID NO: 4746006 - DNA, 25 bp, Homo sapien
aatgctcctcgtgggtttcagaaaa

SEQ ID NO: 4746007 - DNA, 25 bp, Homo sapien
gctgcaatgctcctcgtgggtttca

SEQ ID NO: 4746008 - DNA, 25 bp, Homo sapien
tcctgtgaactggattgctccagtc

SEQ ID NO: 4746009 - DNA, 25 bp, Homo sapien
ccctggacagtcctgtgaactggat

SEQ ID NO: 4746010 - DNA, 25 bp, Homo sapien
ctgggcagcttaagatgacatttcc

SEQ ID NO: 4746011 - DNA, 25 bp, Homo sapien
ctcgctttcctgtttgcatgcactc

SEQ ID NO: 4746012 - DNA, 25 bp, Homo sapien
gtcgccaaatcctgtgcccttggtc

SEQ ID NO: 4746013 - DNA, 25 bp, Homo sapien
tgtcgccaaatcctgtgcccttggt

SEQ ID NO: 4746014 - DNA, 25 bp, Homo sapien
ctgtcgccaaatcctgtgcccttgg

SEQ ID NO: 4746015 - DNA, 25 bp, Homo sapien
cgccaaatcctgtgcccttggtcat

SEQ ID NO: 4746016 - DNA, 25 bp, Homo sapien
tccaacaatgtacttcacgaagccc

SEQ ID NO: 4746017 - DNA, 25 bp, Homo sapien
aacaatgtacttcacgaagcccttg

SEQ ID NO: 4746018 - DNA, 25 bp, Homo sapien
caacaatgtacttcacgaagccctt

SEQ ID NO: 4746019 - DNA, 25 bp, Homo sapien
caatgtacttcacgaagcccttgtc

SEQ ID NO: 4746020 - DNA, 25 bp, Homo sapien
cctgttatgtttttcctggcctggg

SEQ ID NO: 4746021 - DNA, 25 bp, Homo sapien
tttccgtgggtctgctgaagtctgg

SEQ ID NO: 4746022 - DNA, 25 bp, Homo sapien
tggctggtgtatcccctgcaaactg

SEQ ID NO: 4746023 - DNA, 25 bp, Homo sapien
ctgtagaccgggaggaggtttcctg

SEQ ID NO: 4746024 - DNA, 25 bp, Homo sapien
actggcatgggagtaggtttcagca

SEQ ID NO: 4746025 - DNA, 25 bp, Homo sapien
aactggcatgggagtaggtttcagc

SEQ ID NO: 4746026 - DNA, 25 bp, Homo sapien
ctggcatgggagtaggtttcagcat

SEQ ID NO: 4746027 - DNA, 25 bp, Homo sapien
tcaacaagcaatgccaacaagatca

SEQ ID NO: 4746028 - DNA, 25 bp, Homo sapien
gtgtataaatgtgatggctctgtgc

SEQ ID NO: 4746029 - DNA, 25 bp, Homo sapien
gaccatatttatgggagaacgtgga

SEQ ID NO: 4746030 - DNA, 25 bp, Homo sapien
gatgtaaattgtccccaaatatggt

SEQ ID NO: 4746031 - DNA, 25 bp, Homo sapien
tagctgaagtgatacactccgctgg

SEQ ID NO: 4746032 - DNA, 25 bp, Homo sapien
gaggttccacacagaataccctgaa

SEQ ID NO: 4746033 - DNA, 25 bp, Homo sapien
tgtgactgtatgacgcaaatggtgc

SEQ ID NO: 4746034 - DNA, 25 bp, Homo sapien
gaaaagcgaggtatgcatgcgtcag

SEQ ID NO: 4746035 - DNA, 25 bp, Homo sapien
tgagagggccaacaacaccaggtat

SEQ ID NO: 4746036 - DNA, 25 bp, Homo sapien
cagtttgaacgagtcctaggctaca

SEQ ID NO: 4746037 - DNA, 25 bp, Homo sapien
tgttcacccgggatctggacaaggc

SEQ ID NO: 4746038 - DNA, 25 bp, Homo sapien
gacaaggccatgtacttcacccagg

SEQ ID NO: 4746039 - DNA, 25 bp, Homo sapien
gggcaggacagtgtttttaaagatg

SEQ ID NO: 4746040 - DNA, 25 bp, Homo sapien
gcggagacttttactgtcgctggat

SEQ ID NO: 4746041 - DNA, 25 bp, Homo sapien
gatgttggaattaatttcaccataa

SEQ ID NO: 4746042 - DNA, 25 bp, Homo sapien
gatctgccgttcttattcatttctc

SEQ ID NO: 4746043 - DNA, 25 bp, Homo sapien
caaatgctaacagctgtggcagcgc

SEQ ID NO: 4746044 - DNA, 25 bp, Homo sapien
ccctgaagcctgtggattggcaaca

SEQ ID NO: 4746045 - DNA, 25 bp, Homo sapien
gagatgaccctgagtagcagcaccg

SEQ ID NO: 4746046 - DNA, 25 bp, Homo sapien
gaatgatgatgctaaagccagcccc

SEQ ID NO: 4746047 - DNA, 25 bp, Homo sapien
taaagagtcacagctgacacgagcc

SEQ ID NO: 4746048 - DNA, 25 bp, Homo sapien
ggaagggatctgttcaggtcacaca

SEQ ID NO: 4746049 - DNA, 25 bp, Homo sapien
gacacgagccctttcgaaattgcaa

SEQ ID NO: 4746050 - DNA, 25 bp, Homo sapien
taagtcacagagcaccactaatagg

SEQ ID NO: 4746051 - DNA, 25 bp, Homo sapien
tacaggtcttataagccacctcaaa

SEQ ID NO: 4746052 - DNA, 25 bp, Homo sapien
cataacatgggtgtaaaatactgaa

SEQ ID NO: 4746053 - DNA, 25 bp, Homo sapien
ggattctactgctcatctaagtatg

SEQ ID NO: 4746054 - DNA, 25 bp, Homo sapien
tgtctttgcatgctaagaagctcag

SEQ ID NO: 4746055 - DNA, 25 bp, Homo sapien
tgcggtcatcgggagctgggaagtg

SEQ ID NO: 4746056 - DNA, 25 bp, Homo sapien
atggcactggtacacaccctcatcc

SEQ ID NO: 4746057 - DNA, 25 bp, Homo sapien
gctcctgtatttactcagatctaga

SEQ ID NO: 4746058 - DNA, 25 bp, Homo sapien
tctagaaccgtcactgtgctgtggg

SEQ ID NO: 4746059 - DNA, 25 bp, Homo sapien
gaaaggcacgctccctattgtggct

SEQ ID NO: 4746060 - DNA, 25 bp, Homo sapien
taatgataagtctgcacacttcctc

SEQ ID NO: 4746061 - DNA, 25 bp, Homo sapien
tcccagggaccctcttgaaaggcac

SEQ ID NO: 4746062 - DNA, 25 bp, Homo sapien
tgtggctctcatctgaatgattcct

SEQ ID NO: 4746063 - DNA, 25 bp, Homo sapien
cctcacatcgaatcacttcagtctg

SEQ ID NO: 4746064 - DNA, 25 bp, Homo sapien
ccagttcctagtggatgctggcact

SEQ ID NO: 4746065 - DNA, 25 bp, Homo sapien
aacaaatcgccacaagctgagtgcc

SEQ ID NO: 4746066 - DNA, 25 bp, Homo sapien
gccagaaatggtgggtcaagtcctc

SEQ ID NO: 4746067 - DNA, 25 bp, Homo sapien
agaagggccccctcgcacttggaca

SEQ ID NO: 4746068 - DNA, 25 bp, Homo sapien
aaaatccaggccgtggcctcatggt

SEQ ID NO: 4746069 - DNA, 25 bp, Homo sapien
cgcacttggacagctatattgacat

SEQ ID NO: 4746070 - DNA, 25 bp, Homo sapien
aatccaggccgtggcctcatggtca

SEQ ID NO: 4746071 - DNA, 25 bp, Homo sapien
gactggggtaggcacagccctcact

SEQ ID NO: 4746072 - DNA, 25 bp, Homo sapien
ctgcgccccggtgacgttgtgaaca

SEQ ID NO: 4746073 - DNA, 25 bp, Homo sapien
cgccccggtgacgttgtgaacactt

SEQ ID NO: 4746074 - DNA, 25 bp, Homo sapien
ccggtgacgttgtgaacacttcggg

SEQ ID NO: 4746075 - DNA, 25 bp, Homo sapien
cttcggggaggaacgacgaccacag

SEQ ID NO: 4746076 - DNA, 25 bp, Homo sapien
ctctaaattcccctgccgcggagag

SEQ ID NO: 4746077 - DNA, 25 bp, Homo sapien
tcccctgccgcggagagcccgctgt

SEQ ID NO: 4746078 - DNA, 25 bp, Homo sapien
cctgccgcggagagcccgctgtgat

SEQ ID NO: 4746079 - DNA, 25 bp, Homo sapien
tctaaattcccctgccgcggagagc

SEQ ID NO: 4746080 - DNA, 25 bp, Homo sapien
ccacagcgtgttgggcaacgtgcag

SEQ ID NO: 4746081 - DNA, 25 bp, Homo sapien
cagcaccacagcgtgttgggcaacg

SEQ ID NO: 4746082 - DNA, 25 bp, Homo sapien
caccacagcgtgttgggcaacgtgc

SEQ ID NO: 4746083 - DNA, 25 bp, Homo sapien
gcaccacagcgtgttgggcaacgtg

SEQ ID NO: 4746084 - DNA, 25 bp, Homo sapien
ttatatcgatcattgatggctggaa

SEQ ID NO: 4746085 - DNA, 25 bp, Homo sapien
caattatatcgatcattgatggctg

SEQ ID NO: 4746086 - DNA, 25 bp, Homo sapien
ctcgtcaattatatcgatcattgat

SEQ ID NO: 4746087 - DNA, 25 bp, Homo sapien
tatcgatcattgatggctggaatga

SEQ ID NO: 4746088 - DNA, 25 bp, Homo sapien
gaattaacggctgaggaaagcagtt

SEQ ID NO: 4746089 - DNA, 25 bp, Homo sapien
gagaattgcctgtgaattaacggct

SEQ ID NO: 4746090 - DNA, 25 bp, Homo sapien
gagacaaagagaattgcctgtgaat

SEQ ID NO: 4746091 - DNA, 25 bp, Homo sapien
gcagttataaaaacgagtgatagga

SEQ ID NO: 4746092 - DNA, 25 bp, Homo sapien
tgggcaactatagcactcagagatt

SEQ ID NO: 4746093 - DNA, 25 bp, Homo sapien
ggcaactatagcactcagagattat

SEQ ID NO: 4746094 - DNA, 25 bp, Homo sapien
ggtgggcaactatagcactcagaga

SEQ ID NO: 4746095 - DNA, 25 bp, Homo sapien
gattattttactgtgatgttaatga

SEQ ID NO: 4746096 - DNA, 25 bp, Homo sapien
tgtggcctggtgactactgattccc

SEQ ID NO: 4746097 - DNA, 25 bp, Homo sapien
gagtctgcccctaatagcaccacaa

SEQ ID NO: 4746098 - DNA, 25 bp, Homo sapien
agaagcacgaaacctgagtctgccc

SEQ ID NO: 4746099 - DNA, 25 bp, Homo sapien
tctccaaaggtcttacttctcctgg

SEQ ID NO: 4746100 - DNA, 25 bp, Homo sapien
aagtgactgcatcagcaggtactta

SEQ ID NO: 4746101 - DNA, 25 bp, Homo sapien
agtgactgcatcagcaggtacttaa

SEQ ID NO: 4746102 - DNA, 25 bp, Homo sapien
gtgactgcatcagcaggtacttaag

SEQ ID NO: 4746103 - DNA, 25 bp, Homo sapien
tgactgcatcagcaggtacttaagt

SEQ ID NO: 4746104 - DNA, 25 bp, Homo sapien
ggcagggggatccttcgctccacac

SEQ ID NO: 4746105 - DNA, 25 bp, Homo sapien
actgggcagggggatccttcgctcc

SEQ ID NO: 4746106 - DNA, 25 bp, Homo sapien
ggatccttcgctccacaccccagag

SEQ ID NO: 4746107 - DNA, 25 bp, Homo sapien
tatgaaatactgctccctaagggga

SEQ ID NO: 4746108 - DNA, 25 bp, Homo sapien
tcgcaagggccgtcgcgcgccttgt

SEQ ID NO: 4746109 - DNA, 25 bp, Homo sapien
gcgcggggcgtgtgccgagcgcgca

SEQ ID NO: 4746110 - DNA, 25 bp, Homo sapien
gcagacgctggggtacgagcgaccg

SEQ ID NO: 4746111 - DNA, 25 bp, Homo sapien
ccttgtgcaggtgaccggggtgcgc

SEQ ID NO: 4746112 - DNA, 25 bp, Homo sapien
tgcgcgcacacgcagagcccggtgc

SEQ ID NO: 4746113 - DNA, 25 bp, Homo sapien
gcgcgcacacgcagagcccggtgcc

SEQ ID NO: 4746114 - DNA, 25 bp, Homo sapien
agccgcactcgtcgagcgccgagat

SEQ ID NO: 4746115 - DNA, 25 bp, Homo sapien
cacgtcgcggatcccaaggctcggg

SEQ ID NO: 4746116 - DNA, 25 bp, Homo sapien
gcaagagcagagacaagcgcggcat

SEQ ID NO: 4746117 - DNA, 25 bp, Homo sapien
ctggccggcacggaccacacttggg

SEQ ID NO: 4746118 - DNA, 25 bp, Homo sapien
ctgaaagcctactccaaaatataac

SEQ ID NO: 4746119 - DNA, 25 bp, Homo sapien
gaactgaaagcctactccaaaatat

SEQ ID NO: 4746120 - DNA, 25 bp, Homo sapien
cacttctggcgtcacaatatctgtt

SEQ ID NO: 4746121 - DNA, 25 bp, Homo sapien
caaccatcacttctggcgtcacaat

SEQ ID NO: 4746122 - DNA, 25 bp, Homo sapien
agctgtgccccttggacccttgatg

SEQ ID NO: 4746123 - DNA, 25 bp, Homo sapien
tgtgccccttggacccttgatgttc

SEQ ID NO: 4746124 - DNA, 25 bp, Homo sapien
cccttggacccttgatgttcctttg

SEQ ID NO: 4746125 - DNA, 25 bp, Homo sapien
tggacccttgatgttcctttgaagt

SEQ ID NO: 4746126 - DNA, 25 bp, Homo sapien
tggctgactcggtttatgtagaata

SEQ ID NO: 4746127 - DNA, 25 bp, Homo sapien
tggtggctgactcggtttatgtaga

SEQ ID NO: 4746128 - DNA, 25 bp, Homo sapien
gtggctgactcggtttatgtagaat

SEQ ID NO: 4746129 - DNA, 25 bp, Homo sapien
ggtggctgactcggtttatgtagaa

SEQ ID NO: 4746130 - DNA, 25 bp, Homo sapien
gctaagatgcacagtatctactctt

SEQ ID NO: 4746131 - DNA, 25 bp, Homo sapien
tatgaagccaggtcaagaggatatt

SEQ ID NO: 4746132 - DNA, 25 bp, Homo sapien
attatatgaagccaggtcaagagga

SEQ ID NO: 4746133 - DNA, 25 bp, Homo sapien
gaataaggatgacagcttgcataat

SEQ ID NO: 4746134 - DNA, 25 bp, Homo sapien
gtcgtagagattgaatgcagcctgg

SEQ ID NO: 4746135 - DNA, 25 bp, Homo sapien
tgctctaagagagtcgtagagattg

SEQ ID NO: 4746136 - DNA, 25 bp, Homo sapien
tgatcaagccttttactatcagtga

SEQ ID NO: 4746137 - DNA, 25 bp, Homo sapien
tcatcatttgctctaagagagtcgt

SEQ ID NO: 4746138 - DNA, 25 bp, Homo sapien
cactagcgattctctgtagctcaat

SEQ ID NO: 4746139 - DNA, 25 bp, Homo sapien
gaggtgatcagttacactagcgatt

SEQ ID NO: 4746140 - DNA, 25 bp, Homo sapien
ggcgatgaggtgatcagttacacta

SEQ ID NO: 4746141 - DNA, 25 bp, Homo sapien
gatcagttacactagcgattctctg

SEQ ID NO: 4746142 - DNA, 25 bp, Homo sapien
agataggcaagtgtctcagctcctt

SEQ ID NO: 4746143 - DNA, 25 bp, Homo sapien
ttcaatcagataggcaagtgtctca

SEQ ID NO: 4746144 - DNA, 25 bp, Homo sapien
tcagataggcaagtgtctcagctcc

SEQ ID NO: 4746145 - DNA, 25 bp, Homo sapien
ctggttcaatcagataggcaagtgt

SEQ ID NO: 4746146 - DNA, 25 bp, Homo sapien
gcatgtttgaaccaaataaggcaat

SEQ ID NO: 4746147 - DNA, 25 bp, Homo sapien
tttgaaccaaataaggcaatgtctt

SEQ ID NO: 4746148 - DNA, 25 bp, Homo sapien
tgtttgaaccaaataaggcaatgtc

SEQ ID NO: 4746149 - DNA, 25 bp, Homo sapien
tgaaccaaataaggcaatgtcttta

SEQ ID NO: 4746150 - DNA, 25 bp, Homo sapien
gcatctcaatatgcttatccctctg

SEQ ID NO: 4746151 - DNA, 25 bp, Homo sapien
gatgtaagctgcatctcaatatgct

SEQ ID NO: 4746152 - DNA, 25 bp, Homo sapien
caatatgcttatccctctgtaacat

SEQ ID NO: 4746153 - DNA, 25 bp, Homo sapien
ttaaacattttgctgatgtaagctg

SEQ ID NO: 4746154 - DNA, 25 bp, Homo sapien
cctgtgtcatagtcatggctgcctt

SEQ ID NO: 4746155 - DNA, 25 bp, Homo sapien
ccaaaagctctcctgtgtcatagtc

SEQ ID NO: 4746156 - DNA, 25 bp, Homo sapien
ctagggtccggagcgccggcgctct

SEQ ID NO: 4746157 - DNA, 25 bp, Homo sapien
ctctcgcggggaccaggctaccagg

SEQ ID NO: 4746158 - DNA, 25 bp, Homo sapien
gcgctctctcgcggggaccaggcta

SEQ ID NO: 4746159 - DNA, 25 bp, Homo sapien
ggagcgccggcgctctctcgcgggg

SEQ ID NO: 4746160 - DNA, 25 bp, Homo sapien
gcgctccagcgggtcgccacaccca

SEQ ID NO: 4746161 - DNA, 25 bp, Homo sapien
caacaggccggagtctcccacgcgg

SEQ ID NO: 4746162 - DNA, 25 bp, Homo sapien
aggccggagtctcccacgcggaact

SEQ ID NO: 4746163 - DNA, 25 bp, Homo sapien
aacaggccggagtctcccacgcgga

SEQ ID NO: 4746164 - DNA, 25 bp, Homo sapien
acaggccggagtctcccacgcggaa

SEQ ID NO: 4746165 - DNA, 25 bp, Homo sapien
gagcatttcgggctcgcccagatca

SEQ ID NO: 4746166 - DNA, 25 bp, Homo sapien
ttcgggctcgcccagatcagtgcgc

SEQ ID NO: 4746167 - DNA, 25 bp, Homo sapien
ccagctcgcggagcatttcgggctc

SEQ ID NO: 4746168 - DNA, 25 bp, Homo sapien
tcgcggagcatttcgggctcgccca

SEQ ID NO: 4746169 - DNA, 25 bp, Homo sapien
cttgatcccccttccctaagggcag

SEQ ID NO: 4746170 - DNA, 25 bp, Homo sapien
tgatcccccttccctaagggcagtg

SEQ ID NO: 4746171 - DNA, 25 bp, Homo sapien
gatcccccttccctaagggcagtgc

SEQ ID NO: 4746172 - DNA, 25 bp, Homo sapien
cccccttccctaagggcagtgccat

SEQ ID NO: 4746173 - DNA, 25 bp, Homo sapien
tctaggtttacacgcgtgcgtgcat

SEQ ID NO: 4746174 - DNA, 25 bp, Homo sapien
cttctctaggtttacacgcgtgcgt

SEQ ID NO: 4746175 - DNA, 25 bp, Homo sapien
gtttacacgcgtgcgtgcatttgtg

SEQ ID NO: 4746176 - DNA, 25 bp, Homo sapien
aggtttacacgcgtgcgtgcatttg

SEQ ID NO: 4746177 - DNA, 25 bp, Homo sapien
actcgtatgagagacggcaattgcg

SEQ ID NO: 4746178 - DNA, 25 bp, Homo sapien
tgataactcgtatgagagacggcaa

SEQ ID NO: 4746179 - DNA, 25 bp, Homo sapien
tcgtatgagagacggcaattgcgtt

SEQ ID NO: 4746180 - DNA, 25 bp, Homo sapien
taactcgtatgagagacggcaattg

SEQ ID NO: 4746181 - DNA, 25 bp, Homo sapien
caaacggcacaagcctgacgtagat

SEQ ID NO: 4746182 - DNA, 25 bp, Homo sapien
aacaaacggcacaagcctgacgtag

SEQ ID NO: 4746183 - DNA, 25 bp, Homo sapien
cggcacaagcctgacgtagatgaga

SEQ ID NO: 4746184 - DNA, 25 bp, Homo sapien
gtcaacaaacggcacaagcctgacg

SEQ ID NO: 4746185 - DNA, 25 bp, Homo sapien
tggatttgctggggctcccacagag

SEQ ID NO: 4746186 - DNA, 25 bp, Homo sapien
ctggatttgctggggctcccacaga

SEQ ID NO: 4746187 - DNA, 25 bp, Homo sapien
ggctcccacagagggcctgcaccat

SEQ ID NO: 4746188 - DNA, 25 bp, Homo sapien
tggggctcccacagagggcctgcac

SEQ ID NO: 4746189 - DNA, 25 bp, Homo sapien
caaagggaagtctgctgttctgcag

SEQ ID NO: 4746190 - DNA, 25 bp, Homo sapien
gagggctctggacagtatagcttgc

SEQ ID NO: 4746191 - DNA, 25 bp, Homo sapien
gctgctcagtagaagatgataagga

SEQ ID NO: 4746192 - DNA, 25 bp, Homo sapien
tttctcacagcccgagttcccatgg

SEQ ID NO: 4746193 - DNA, 25 bp, Homo sapien
ccgagttcccatggaatgttttact

SEQ ID NO: 4746194 - DNA, 25 bp, Homo sapien
caaggggtttaccaaatagtgcagc

SEQ ID NO: 4746195 - DNA, 25 bp, Homo sapien
atagtgcagcttagactaacagtaa

SEQ ID NO: 4746196 - DNA, 25 bp, Homo sapien
accaaatagtgcagcttagactaac

SEQ ID NO: 4746197 - DNA, 25 bp, Homo sapien
ctgcaaaacagcaaggggtttacca

SEQ ID NO: 4746198 - DNA, 25 bp, Homo sapien
caagaggtgacctttgagcagcaac

SEQ ID NO: 4746199 - DNA, 25 bp, Homo sapien
ccaggagtaaagacccagcacgagg

SEQ ID NO: 4746200 - DNA, 25 bp, Homo sapien
tgacctttgagcagcaacctgagag

SEQ ID NO: 4746201 - DNA, 25 bp, Homo sapien
caggagtaaagacccagcacgaggt

SEQ ID NO: 4746202 - DNA, 25 bp, Homo sapien
cagccgcaatgaagagccacggtgg

SEQ ID NO: 4746203 - DNA, 25 bp, Homo sapien
tggagggagcagaaagcagccgcaa

SEQ ID NO: 4746204 - DNA, 25 bp, Homo sapien
caattccacgcagggtccatggagg

SEQ ID NO: 4746205 - DNA, 25 bp, Homo sapien
aaacatggggcaattccacgcaggg

SEQ ID NO: 4746206 - DNA, 25 bp, Homo sapien
aggtcatgaagcatacccagcccct

SEQ ID NO: 4746207 - DNA, 25 bp, Homo sapien
gaagcatacccagcccctgaaggca

SEQ ID NO: 4746208 - DNA, 25 bp, Homo sapien
atgaagcatacccagcccctgaagg

SEQ ID NO: 4746209 - DNA, 25 bp, Homo sapien
caaaacacaggtcatgaagcatacc

SEQ ID NO: 4746210 - DNA, 25 bp, Homo sapien
gtagagatcccagaagatcagataa

SEQ ID NO: 4746211 - DNA, 25 bp, Homo sapien
agtagagatcccagaagatcagata

SEQ ID NO: 4746212 - DNA, 25 bp, Homo sapien
aggaaaaggaacatgcaggatgcag

SEQ ID NO: 4746213 - DNA, 25 bp, Homo sapien
gggaatctgcttttcagcaggaaaa

SEQ ID NO: 4746214 - DNA, 25 bp, Homo sapien
aaaggaacatgcaggatgcagaagc

SEQ ID NO: 4746215 - DNA, 25 bp, Homo sapien
ggcctacagggagaaacaggattct

SEQ ID NO: 4746216 - DNA, 25 bp, Homo sapien
tagaacacactaactcagagggcac

SEQ ID NO: 4746217 - DNA, 25 bp, Homo sapien
aacacactaactcagagggcacctg

SEQ ID NO: 4746218 - DNA, 25 bp, Homo sapien
gaacacactaactcagagggcacct

SEQ ID NO: 4746219 - DNA, 25 bp, Homo sapien
ttagaacacactaactcagagggca

SEQ ID NO: 4746220 - DNA, 25 bp, Homo sapien
cagacacttgatctcaagctgcatt

SEQ ID NO: 4746221 - DNA, 25 bp, Homo sapien
tcagacacttgatctcaagctgcat

SEQ ID NO: 4746222 - DNA, 25 bp, Homo sapien
cacttgatctcaagctgcattctac

SEQ ID NO: 4746223 - DNA, 25 bp, Homo sapien
gacacttgatctcaagctgcattct

SEQ ID NO: 4746224 - DNA, 25 bp, Homo sapien
gaattaagatcccagagatgcccac

SEQ ID NO: 4746225 - DNA, 25 bp, Homo sapien
ctcctgaattaagatcccagagatg

SEQ ID NO: 4746226 - DNA, 25 bp, Homo sapien
ctgaattaagatcccagagatgccc

SEQ ID NO: 4746227 - DNA, 25 bp, Homo sapien
cctgaattaagatcccagagatgcc

SEQ ID NO: 4746228 - DNA, 25 bp, Homo sapien
ggcacaagtgcatcaatgaagtcca

SEQ ID NO: 4746229 - DNA, 25 bp, Homo sapien
ccttggccttgaggacgtcaacacc

SEQ ID NO: 4746230 - DNA, 25 bp, Homo sapien
ggccttgaggacgtcaacaccctgg

SEQ ID NO: 4746231 - DNA, 25 bp, Homo sapien
cttgctcggcacaagtgcatcaatg

SEQ ID NO: 4746232 - DNA, 25 bp, Homo sapien
catctcccctcaggagtgaggtagt

SEQ ID NO: 4746233 - DNA, 25 bp, Homo sapien
ggtggcaacatagtcactagaattc

SEQ ID NO: 4746234 - DNA, 25 bp, Homo sapien
agtcactagaattcctacagggtaa

SEQ ID NO: 4746235 - DNA, 25 bp, Homo sapien
caagatggtggcaacatagtcacta

SEQ ID NO: 4746236 - DNA, 25 bp, Homo sapien
aacatagtcactagaattcctacag

SEQ ID NO: 4746237 - DNA, 25 bp, Homo sapien
gaagtagctgcataacacatatgat

SEQ ID NO: 4746238 - DNA, 25 bp, Homo sapien
tagctgcataacacatatgataccc

SEQ ID NO: 4746239 - DNA, 25 bp, Homo sapien
agtagctgcataacacatatgatac

SEQ ID NO: 4746240 - DNA, 25 bp, Homo sapien
gtagctgcataacacatatgatacc

SEQ ID NO: 4746241 - DNA, 25 bp, Homo sapien
gctgggggcttcttgctgttctcct

SEQ ID NO: 4746242 - DNA, 25 bp, Homo sapien
aacatgacatgttcctcagaatgtg

SEQ ID NO: 4746243 - DNA, 25 bp, Homo sapien
gatgtccagggccatatgtggatgt

SEQ ID NO: 4746244 - DNA, 25 bp, Homo sapien
gtttgctgggggcttcttgctgttc

SEQ ID NO: 4746245 - DNA, 25 bp, Homo sapien
tcattctgcaaaacgctccttgttg

SEQ ID NO: 4746246 - DNA, 25 bp, Homo sapien
taggatgtgcgatgggcccctgctc

SEQ ID NO: 4746247 - DNA, 25 bp, Homo sapien
tagcatctgtgcctaggatgtgcga

SEQ ID NO: 4746248 - DNA, 25 bp, Homo sapien
tgacaccaccgggcctgtttgtcct

SEQ ID NO: 4746249 - DNA, 25 bp, Homo sapien
tgggctcctgacaccaccgggcctg

SEQ ID NO: 4746250 - DNA, 25 bp, Homo sapien
tgtatctggcattttcctaggtcct

SEQ ID NO: 4746251 - DNA, 25 bp, Homo sapien
gtccttagtttccaccttctagaca

SEQ ID NO: 4746252 - DNA, 25 bp, Homo sapien
gtggaaaggctgtatctggcatttt

SEQ ID NO: 4746253 - DNA, 25 bp, Homo sapien
ctggcattttcctaggtccttagtt

SEQ ID NO: 4746254 - DNA, 25 bp, Homo sapien
atgggactcccttgtagagcagctg

SEQ ID NO: 4746255 - DNA, 25 bp, Homo sapien
tgaaatgggactcccttgtagagca

SEQ ID NO: 4746256 - DNA, 25 bp, Homo sapien
aaatgggactcccttgtagagcagc

SEQ ID NO: 4746257 - DNA, 25 bp, Homo sapien
ctgaaatgggactcccttgtagagc

SEQ ID NO: 4746258 - DNA, 25 bp, Homo sapien
tgtcctccgggtaaagacagtgggc

SEQ ID NO: 4746259 - DNA, 25 bp, Homo sapien
gagtgctctgcgtcaggaactctga

SEQ ID NO: 4746260 - DNA, 25 bp, Homo sapien
cctgagccacaagcacaattctggg

SEQ ID NO: 4746261 - DNA, 25 bp, Homo sapien
taaaggaagccaagccgccagtatt

SEQ ID NO: 4746262 - DNA, 25 bp, Homo sapien
gctttgtccagttttgactgggtct

SEQ ID NO: 4746263 - DNA, 25 bp, Homo sapien
tgggtctttgggcactactgggcca

SEQ ID NO: 4746264 - DNA, 25 bp, Homo sapien
ggcactactgggccatcccaactgt

SEQ ID NO: 4746265 - DNA, 25 bp, Homo sapien
ccacagggccctcaataacgtgcat

SEQ ID NO: 4746266 - DNA, 25 bp, Homo sapien
attgcctggcaccatagatgaggcc

SEQ ID NO: 4746267 - DNA, 25 bp, Homo sapien
cactgattagaaccccatgaccagg

SEQ ID NO: 4746268 - DNA, 25 bp, Homo sapien
taaccaggcccttgctgctaggcca

SEQ ID NO: 4746269 - DNA, 25 bp, Homo sapien
tgctgctaggccaacagtgtccagg

SEQ ID NO: 4746270 - DNA, 25 bp, Homo sapien
catcctgttatacaaccagatctca

SEQ ID NO: 4746271 - DNA, 25 bp, Homo sapien
cacagggaggacacgtcttgagatt

SEQ ID NO: 4746272 - DNA, 25 bp, Homo sapien
ggaagaccagtattaatagccaatg

SEQ ID NO: 4746273 - DNA, 25 bp, Homo sapien
taacaagtctctacaatggtccaaa

SEQ ID NO: 4746274 - DNA, 25 bp, Homo sapien
tcggtcacacataaaggcacaggct

SEQ ID NO: 4746275 - DNA, 25 bp, Homo sapien
gatacatgaacgtccaaaacccagt

SEQ ID NO: 4746276 - DNA, 25 bp, Homo sapien
atacatgaacgtccaaaacccagta

SEQ ID NO: 4746277 - DNA, 25 bp, Homo sapien
ctggagccggatctgcagggataca

SEQ ID NO: 4746278 - DNA, 25 bp, Homo sapien
cctcctggcttaacactatgtggaa

SEQ ID NO: 4746279 - DNA, 25 bp, Homo sapien
tagtcttggctatttgcactgggct

SEQ ID NO: 4746280 - DNA, 25 bp, Homo sapien
ctagtaaaggtttcccatgaggctc

SEQ ID NO: 4746281 - DNA, 25 bp, Homo sapien
ccacatgggttttgatagggatata

SEQ ID NO: 4746282 - DNA, 25 bp, Homo sapien
cttcaggattcaatcaccttagacc

SEQ ID NO: 4746283 - DNA, 25 bp, Homo sapien
gccttcaggattcaatcaccttaga

SEQ ID NO: 4746284 - DNA, 25 bp, Homo sapien
gatagggatatagagacaaaccata

SEQ ID NO: 4746285 - DNA, 25 bp, Homo sapien
ttcacagggtttgaggtctacagca

SEQ ID NO: 4746286 - DNA, 25 bp, Homo sapien
aagccatccttgtactaccgccaat

SEQ ID NO: 4746287 - DNA, 25 bp, Homo sapien
gcaataaagtaagtggtatcattct

SEQ ID NO: 4746288 - DNA, 25 bp, Homo sapien
gaactggaaacagtgcacaatcgag

SEQ ID NO: 4746289 - DNA, 25 bp, Homo sapien
aacagtgcacaatcgagtatctagt

SEQ ID NO: 4746290 - DNA, 25 bp, Homo sapien
tgtcatcagcctctgcatctctgtc

SEQ ID NO: 4746291 - DNA, 25 bp, Homo sapien
attctgatgtcatcagcctctgcat

SEQ ID NO: 4746292 - DNA, 25 bp, Homo sapien
cagccacagtgtccaaagaaatcct

SEQ ID NO: 4746293 - DNA, 25 bp, Homo sapien
tccaaagaaatcctgttcctgtgat

SEQ ID NO: 4746294 - DNA, 25 bp, Homo sapien
caggatgatgacctggtgtcccaga

SEQ ID NO: 4746295 - DNA, 25 bp, Homo sapien
aggatgatgacctggtgtcccagag

SEQ ID NO: 4746296 - DNA, 25 bp, Homo sapien
tgatgtccaggatgatgacctggtg

SEQ ID NO: 4746297 - DNA, 25 bp, Homo sapien
gtccaggatgatgacctggtgtccc

SEQ ID NO: 4746298 - DNA, 25 bp, Homo sapien
agctcaccgacggtgttgaaggcat

SEQ ID NO: 4746299 - DNA, 25 bp, Homo sapien
gcaaagagctcaccgacggtgttga

SEQ ID NO: 4746300 - DNA, 25 bp, Homo sapien
tggcaaagagctcaccgacggtgtt

SEQ ID NO: 4746301 - DNA, 25 bp, Homo sapien
ctcaccgacggtgttgaaggcatct

SEQ ID NO: 4746302 - DNA, 25 bp, Homo sapien
tctcccactcttaaaggttgagggc

SEQ ID NO: 4746303 - DNA, 25 bp, Homo sapien
cgtcaccataatctgcttgcatgtc

SEQ ID NO: 4746304 - DNA, 25 bp, Homo sapien
ctgaggctgaagagctggccacctt

SEQ ID NO: 4746305 - DNA, 25 bp, Homo sapien
gtgaagcgctcgaagccgtcaattt

SEQ ID NO: 4746306 - DNA, 25 bp, Homo sapien
aagaagctggaattcaccacctcat

SEQ ID NO: 4746307 - DNA, 25 bp, Homo sapien
caggaaccaagtagggcggttgtct

SEQ ID NO: 4746308 - DNA, 25 bp, Homo sapien
cctgcatcttggttatcacggagcg

SEQ ID NO: 4746309 - DNA, 25 bp, Homo sapien
gtcagatgcaggaaccaagtagggc

SEQ ID NO: 4746310 - DNA, 25 bp, Homo sapien
catcttggttatcacggagcgagac

SEQ ID NO: 4746311 - DNA, 25 bp, Homo sapien
ggccaggattagagcctcccacagg

SEQ ID NO: 4746312 - DNA, 25 bp, Homo sapien
ggtgctccccaatttcttccctctc

SEQ ID NO: 4746313 - DNA, 25 bp, Homo sapien
tcttccctctccactgagggtggtc

SEQ ID NO: 4746314 - DNA, 25 bp, Homo sapien
tcccacaggtgctccccaatttctt

SEQ ID NO: 4746315 - DNA, 25 bp, Homo sapien
ccaacgaggcccctaatgagcactc

SEQ ID NO: 4746316 - DNA, 25 bp, Homo sapien
gccccactgaccaagtccccacgga

SEQ ID NO: 4746317 - DNA, 25 bp, Homo sapien
aggccccactgaccaagtccccacg

SEQ ID NO: 4746318 - DNA, 25 bp, Homo sapien
tgagcactcccccattgaccaggcc

SEQ ID NO: 4746319 - DNA, 25 bp, Homo sapien
tggggactagtgagcgcatgatggg

SEQ ID NO: 4746320 - DNA, 25 bp, Homo sapien
ttctgttggggactagtgagcgcat

SEQ ID NO: 4746321 - DNA, 25 bp, Homo sapien
cttctgttggggactagtgagcgca

SEQ ID NO: 4746322 - DNA, 25 bp, Homo sapien
ggactagtgagcgcatgatgggaag

SEQ ID NO: 4746323 - DNA, 25 bp, Homo sapien
cgtaacactagtatggacaaacctg

SEQ ID NO: 4746324 - DNA, 25 bp, Homo sapien
agaagaaaaccgtaacactagtatg

SEQ ID NO: 4746325 - DNA, 25 bp, Homo sapien
ccgtaacactagtatggacaaacct

SEQ ID NO: 4746326 - DNA, 25 bp, Homo sapien
gaaaaccgtaacactagtatggaca

SEQ ID NO: 4746327 - DNA, 25 bp, Homo sapien
ccaaactcaataacgctggtgttca

SEQ ID NO: 4746328 - DNA, 25 bp, Homo sapien
ttcaggcaatttgagtaggccaaac

SEQ ID NO: 4746329 - DNA, 25 bp, Homo sapien
tgtttaaacagctgacattcaggca

SEQ ID NO: 4746330 - DNA, 25 bp, Homo sapien
tgcaaagaagccctcgatgaccttt

SEQ ID NO: 4746331 - DNA, 25 bp, Homo sapien
ctactttagtaaagattatgatgtt

SEQ ID NO: 4746332 - DNA, 25 bp, Homo sapien
taagattttatggttaatctcttca

SEQ ID NO: 4746333 - DNA, 25 bp, Homo sapien
tataaatatacaccatatgtgacat

SEQ ID NO: 4746334 - DNA, 25 bp, Homo sapien
tatacaccatatgtgacatgaaaat

SEQ ID NO: 4746335 - DNA, 25 bp, Homo sapien
ctacaaaagaaagtagacgggagca

SEQ ID NO: 4746336 - DNA, 25 bp, Homo sapien
cctgtaattatttgttctacacggt

SEQ ID NO: 4746337 - DNA, 25 bp, Homo sapien
gtaattatttgttctacacggtcca

SEQ ID NO: 4746338 - DNA, 25 bp, Homo sapien
atttgttctacacggtccagctcca

SEQ ID NO: 4746339 - DNA, 25 bp, Homo sapien
ttatttgttctacacggtccagctc

SEQ ID NO: 4746340 - DNA, 25 bp, Homo sapien
tcatccgctgtttctccgtaaagag

SEQ ID NO: 4746341 - DNA, 25 bp, Homo sapien
ttcatccgctgtttctccgtaaaga

SEQ ID NO: 4746342 - DNA, 25 bp, Homo sapien
tgctcctgcaaaggcttccttaaat

SEQ ID NO: 4746343 - DNA, 25 bp, Homo sapien
gaattgttagctttcactgctcctg

SEQ ID NO: 4746344 - DNA, 25 bp, Homo sapien
atggaattgttagctttcactgctc

SEQ ID NO: 4746345 - DNA, 25 bp, Homo sapien
tccttaaattcttctaattcagttg

SEQ ID NO: 4746346 - DNA, 25 bp, Homo sapien
ccgtattatccttgtttaactgctc

SEQ ID NO: 4746347 - DNA, 25 bp, Homo sapien
cacatctttaagtgtgagttccttc

SEQ ID NO: 4746348 - DNA, 25 bp, Homo sapien
tcttttttagtgaagccgtattatc

SEQ ID NO: 4746349 - DNA, 25 bp, Homo sapien
ggagaatttacattccacatcttta

SEQ ID NO: 4746350 - DNA, 25 bp, Homo sapien
agcttccttctcggccacaagatca

SEQ ID NO: 4746351 - DNA, 25 bp, Homo sapien
tcttgtacatttctcatagataata

SEQ ID NO: 4746352 - DNA, 25 bp, Homo sapien
ctgaagacacagcttccttctcggc

SEQ ID NO: 4746353 - DNA, 25 bp, Homo sapien
tccttctcggccacaagatcattaa

SEQ ID NO: 4746354 - DNA, 25 bp, Homo sapien
aagtctccatggcaactgaagtcct

SEQ ID NO: 4746355 - DNA, 25 bp, Homo sapien
tattgtcatttctaggcatttctta

SEQ ID NO: 4746356 - DNA, 25 bp, Homo sapien
tctccatggcaactgaagtcctcat

SEQ ID NO: 4746357 - DNA, 25 bp, Homo sapien
tgaagtcctcatttgcaaatgcatt

SEQ ID NO: 4746358 - DNA, 25 bp, Homo sapien
ttctttcttatttggtccgcagtat

SEQ ID NO: 4746359 - DNA, 25 bp, Homo sapien
ggtccgcagtatagttcagtaatga

SEQ ID NO: 4746360 - DNA, 25 bp, Homo sapien
tatttggtccgcagtatagttcagt

SEQ ID NO: 4746361 - DNA, 25 bp, Homo sapien
ctttcttatttggtccgcagtatag

SEQ ID NO: 4746362 - DNA, 25 bp, Homo sapien
aatgttttaaggtgatcgaccagtt

SEQ ID NO: 4746363 - DNA, 25 bp, Homo sapien
ccagtggagactctgatattgaaaa

SEQ ID NO: 4746364 - DNA, 25 bp, Homo sapien
tctttgaagtccatgtctcattcaa

SEQ ID NO: 4746365 - DNA, 25 bp, Homo sapien
ggtgatcgaccagttcttcttgaaa

SEQ ID NO: 4746366 - DNA, 25 bp, Homo sapien
taaaatgcggcaacatgaagacgtt

SEQ ID NO: 4746367 - DNA, 25 bp, Homo sapien
tacatataagagagagccactgaag

SEQ ID NO: 4746368 - DNA, 25 bp, Homo sapien
gactacacaccttatcagcattgct

SEQ ID NO: 4746369 - DNA, 25 bp, Homo sapien
gtaaatttactgtgtcgtgcaacca

SEQ ID NO: 4746370 - DNA, 25 bp, Homo sapien
tatttgtatattgaactaggttcaa

SEQ ID NO: 4746371 - DNA, 25 bp, Homo sapien
ttatttgtatattgaactaggttca

SEQ ID NO: 4746372 - DNA, 25 bp, Homo sapien
ttctctttctgctttttctttttca

SEQ ID NO: 4746373 - DNA, 25 bp, Homo sapien
ctctttctgctttttctttttcaca

SEQ ID NO: 4746374 - DNA, 25 bp, Homo sapien
tctctttctgctttttctttttcac

SEQ ID NO: 4746375 - DNA, 25 bp, Homo sapien
gttctgctttccaatggattgactt

SEQ ID NO: 4746376 - DNA, 25 bp, Homo sapien
tccaatggattgactttctttagct

SEQ ID NO: 4746377 - DNA, 25 bp, Homo sapien
tttatggacctgttcagtaagcaac

SEQ ID NO: 4746378 - DNA, 25 bp, Homo sapien
ttcacccgagctttatggacctgtt

SEQ ID NO: 4746379 - DNA, 25 bp, Homo sapien
ttgagcatggcaatgtctttcttca

SEQ ID NO: 4746380 - DNA, 25 bp, Homo sapien
aatttccatacatcgcatccttctt

SEQ ID NO: 4746381 - DNA, 25 bp, Homo sapien
taattcctctttgagcatggcaatg

SEQ ID NO: 4746382 - DNA, 25 bp, Homo sapien
cataaaatttccatacatcgcatcc

SEQ ID NO: 4746383 - DNA, 25 bp, Homo sapien
aacagtttgagtcaaacagataaac

SEQ ID NO: 4746384 - DNA, 25 bp, Homo sapien
tggctgggaatatttgttgcaactc

SEQ ID NO: 4746385 - DNA, 25 bp, Homo sapien
ggctgaggagttacgctacttatat

SEQ ID NO: 4746386 - DNA, 25 bp, Homo sapien
gaacataacgtacaggactcagcct

SEQ ID NO: 4746387 - DNA, 25 bp, Homo sapien
ttctgtcatcactatgtggtggaga

SEQ ID NO: 4746388 - DNA, 25 bp, Homo sapien
tgtcatcactatgtggtggagaata

SEQ ID NO: 4746389 - DNA, 25 bp, Homo sapien
tctgtcatcactatgtggtggagaa

SEQ ID NO: 4746390 - DNA, 25 bp, Homo sapien
gttctgtcatcactatgtggtggag

SEQ ID NO: 4746391 - DNA, 25 bp, Homo sapien
ttggagtgagcaaaccacaaatcaa

SEQ ID NO: 4746392 - DNA, 25 bp, Homo sapien
aagactttttggatctacagactga

SEQ ID NO: 4746393 - DNA, 25 bp, Homo sapien
attctttggagtgagcaaaccacaa

SEQ ID NO: 4746394 - DNA, 25 bp, Homo sapien
aaagactttttggatctacagactg

SEQ ID NO: 4746395 - DNA, 25 bp, Homo sapien
tcctctgaagccacttttaggttgt

SEQ ID NO: 4746396 - DNA, 25 bp, Homo sapien
tattttcacttctttggagcctttc

SEQ ID NO: 4746397 - DNA, 25 bp, Homo sapien
tgtttattttcacttctttggagcc

SEQ ID NO: 4746398 - DNA, 25 bp, Homo sapien
tctgaagccacttttaggttgtgtt

SEQ ID NO: 4746399 - DNA, 25 bp, Homo sapien
agtttaagatcagcccagagaccat

SEQ ID NO: 4746400 - DNA, 25 bp, Homo sapien
taggcacaggtgtttaaagaatgag

SEQ ID NO: 4746401 - DNA, 25 bp, Homo sapien
tatacctttacagtgtacaccctgt

SEQ ID NO: 4746402 - DNA, 25 bp, Homo sapien
gtagcaatcatctctgtgtagacag

SEQ ID NO: 4746403 - DNA, 25 bp, Homo sapien
tttttcaaatttgcaggcttcatag

SEQ ID NO: 4746404 - DNA, 25 bp, Homo sapien
ttcaaatttgcaggcttcatagctg

SEQ ID NO: 4746405 - DNA, 25 bp, Homo sapien
ctttttttcaaatttgcaggcttca

SEQ ID NO: 4746406 - DNA, 25 bp, Homo sapien
ttttcaaatttgcaggcttcatagc

SEQ ID NO: 4746407 - DNA, 25 bp, Homo sapien
ggtgaaggctgcagtaatctgagat

SEQ ID NO: 4746408 - DNA, 25 bp, Homo sapien
catgccactggactccagactggtg

SEQ ID NO: 4746409 - DNA, 25 bp, Homo sapien
gccactggactccagactggtgata

SEQ ID NO: 4746410 - DNA, 25 bp, Homo sapien
ggactccagactggtgatagagcga

SEQ ID NO: 4746411 - DNA, 25 bp, Homo sapien
tgaacttgctccttgtgttttaaaa

SEQ ID NO: 4746412 - DNA, 25 bp, Homo sapien
taaaactttcattcttcatggctgc

SEQ ID NO: 4746413 - DNA, 25 bp, Homo sapien
tttgaacttgctccttgtgttttaa

SEQ ID NO: 4746414 - DNA, 25 bp, Homo sapien
cttttgaacttgctccttgtgtttt

SEQ ID NO: 4746415 - DNA, 25 bp, Homo sapien
tgtcatttcgaagatgatttttaag

SEQ ID NO: 4746416 - DNA, 25 bp, Homo sapien
catttcgaagatgatttttaagcat

SEQ ID NO: 4746417 - DNA, 25 bp, Homo sapien
cttgattgtcatttcgaagatgatt

SEQ ID NO: 4746418 - DNA, 25 bp, Homo sapien
tttcgaagatgatttttaagcattt

SEQ ID NO: 4746419 - DNA, 25 bp, Homo sapien
gagggtgacgatacttgacaagtta

SEQ ID NO: 4746420 - DNA, 25 bp, Homo sapien
aggagggtgacgatacttgacaagt

SEQ ID NO: 4746421 - DNA, 25 bp, Homo sapien
ggagggtgacgatacttgacaagtt

SEQ ID NO: 4746422 - DNA, 25 bp, Homo sapien
caggagggtgacgatacttgacaag

SEQ ID NO: 4746423 - DNA, 25 bp, Homo sapien
caccatatgctgtctcctggaattt

SEQ ID NO: 4746424 - DNA, 25 bp, Homo sapien
ccatatgctgtctcctggaatttat

SEQ ID NO: 4746425 - DNA, 25 bp, Homo sapien
accatatgctgtctcctggaattta

SEQ ID NO: 4746426 - DNA, 25 bp, Homo sapien
ccaccatatgctgtctcctggaatt

SEQ ID NO: 4746427 - DNA, 25 bp, Homo sapien
tgaaaagaaagttgattgatctgta

SEQ ID NO: 4746428 - DNA, 25 bp, Homo sapien
gaaaagaaagttgattgatctgtac

SEQ ID NO: 4746429 - DNA, 25 bp, Homo sapien
attttgaaaagaaagttgattgatc

SEQ ID NO: 4746430 - DNA, 25 bp, Homo sapien
tttgaaaagaaagttgattgatctg

SEQ ID NO: 4746431 - DNA, 25 bp, Homo sapien
acattccaggagaacgatggcacaa

SEQ ID NO: 4746432 - DNA, 25 bp, Homo sapien
attccaggagaacgatggcacaagc

SEQ ID NO: 4746433 - DNA, 25 bp, Homo sapien
cattccaggagaacgatggcacaag

SEQ ID NO: 4746434 - DNA, 25 bp, Homo sapien
cacattccaggagaacgatggcaca

SEQ ID NO: 4746435 - DNA, 25 bp, Homo sapien
tcgatctggcatcttctgtgcagca

SEQ ID NO: 4746436 - DNA, 25 bp, Homo sapien
tgtcctgtttagtctgtcacagatg

SEQ ID NO: 4746437 - DNA, 25 bp, Homo sapien
atcttctgtgcagcaagagagtgac

SEQ ID NO: 4746438 - DNA, 25 bp, Homo sapien
tgtcacagatgtcgatctggcatct

SEQ ID NO: 4746439 - DNA, 25 bp, Homo sapien
agcatatctgatattggagtggtat

SEQ ID NO: 4746440 - DNA, 25 bp, Homo sapien
tttagcatatctgatattggagtgg

SEQ ID NO: 4746441 - DNA, 25 bp, Homo sapien
ttagcatatctgatattggagtggt

SEQ ID NO: 4746442 - DNA, 25 bp, Homo sapien
tagcatatctgatattggagtggta

SEQ ID NO: 4746443 - DNA, 25 bp, Homo sapien
gaatgtcgtaacccggacccgcata

SEQ ID NO: 4746444 - DNA, 25 bp, Homo sapien
atgtcgtaacccggacccgcatact

SEQ ID NO: 4746445 - DNA, 25 bp, Homo sapien
cgaatgtcgtaacccggacccgcat

SEQ ID NO: 4746446 - DNA, 25 bp, Homo sapien
tgtcgtaacccggacccgcatactc

SEQ ID NO: 4746447 - DNA, 25 bp, Homo sapien
gcgcgcctgaacctcagcgctccga

SEQ ID NO: 4746448 - DNA, 25 bp, Homo sapien
agtccccgcgatgccagttaggcgc

SEQ ID NO: 4746449 - DNA, 25 bp, Homo sapien
agtgagcccagctaagccgttaggc

SEQ ID NO: 4746450 - DNA, 25 bp, Homo sapien
agcgctccgaactctcagaccgagt

SEQ ID NO: 4746451 - DNA, 25 bp, Homo sapien
ggaatcccaggagtgcatcccttcc

SEQ ID NO: 4746452 - DNA, 25 bp, Homo sapien
tcccaagccctcgtggccggcaggg

SEQ ID NO: 4746453 - DNA, 25 bp, Homo sapien
ggacgtcccggaatcccaggagtgc

SEQ ID NO: 4746454 - DNA, 25 bp, Homo sapien
acgggcgcacgcgtcgctggcttgc

SEQ ID NO: 4746455 - DNA, 25 bp, Homo sapien
ggcggcctctggatcgcgagtgcac

SEQ ID NO: 4746456 - DNA, 25 bp, Homo sapien
ctaggcggcctctggatcgcgagtg

SEQ ID NO: 4746457 - DNA, 25 bp, Homo sapien
taggcggcctctggatcgcgagtgc

SEQ ID NO: 4746458 - DNA, 25 bp, Homo sapien
aggcggcctctggatcgcgagtgca

SEQ ID NO: 4746459 - DNA, 25 bp, Homo sapien
gctgaagctcgggacctctagccag

SEQ ID NO: 4746460 - DNA, 25 bp, Homo sapien
cagggcagaccacctagctcagccg

SEQ ID NO: 4746461 - DNA, 25 bp, Homo sapien
gctgagagccggttcccgctgcagg

SEQ ID NO: 4746462 - DNA, 25 bp, Homo sapien
ctgctcggctcctcgtctgctgaag

SEQ ID NO: 4746463 - DNA, 25 bp, Homo sapien
agagcccgcgggtagcttgttcccg

SEQ ID NO: 4746464 - DNA, 25 bp, Homo sapien
atcagacgggcggttgtccccagag

SEQ ID NO: 4746465 - DNA, 25 bp, Homo sapien
actctgccatgaaaagcatccaggc

SEQ ID NO: 4746466 - DNA, 25 bp, Homo sapien
cagacgggcggttgtccccagagcc

SEQ ID NO: 4746467 - DNA, 25 bp, Homo sapien
tgtaacgacttcataccaatatctt

SEQ ID NO: 4746468 - DNA, 25 bp, Homo sapien
agtagagagtataatgatgcttacc

SEQ ID NO: 4746469 - DNA, 25 bp, Homo sapien
gatgcaaagattcagttaaaccgga

SEQ ID NO: 4746470 - DNA, 25 bp, Homo sapien
tgatgcttaccagaggctgtgttgc

SEQ ID NO: 4746471 - DNA, 25 bp, Homo sapien
tgcctgttaccagcgctgctgggag

SEQ ID NO: 4746472 - DNA, 25 bp, Homo sapien
gaatgacatgacttatggcccaagg

SEQ ID NO: 4746473 - DNA, 25 bp, Homo sapien
gctttactcagaagcttggtgcctg

SEQ ID NO: 4746474 - DNA, 25 bp, Homo sapien
tatggcccaaggctttactcagaag

SEQ ID NO: 4746475 - DNA, 25 bp, Homo sapien
cccaggctttcttccaccaggacct

SEQ ID NO: 4746476 - DNA, 25 bp, Homo sapien
tccccaggctttcttccaccaggac

SEQ ID NO: 4746477 - DNA, 25 bp, Homo sapien
aggctttcttccaccaggacctcca

SEQ ID NO: 4746478 - DNA, 25 bp, Homo sapien
gggctccccaggctttcttccacca

SEQ ID NO: 4746479 - DNA, 25 bp, Homo sapien
ttccactcgcttctccgttgttaca

SEQ ID NO: 4746480 - DNA, 25 bp, Homo sapien
gttacacgcctttgacttttgagac

SEQ ID NO: 4746481 - DNA, 25 bp, Homo sapien
tcctgtagccctgggcttcttgtca

SEQ ID NO: 4746482 - DNA, 25 bp, Homo sapien
catgcaacgtgactccactgatgtc

SEQ ID NO: 4746483 - DNA, 25 bp, Homo sapien
tggctgcagggtccatctgtttgtc

SEQ ID NO: 4746484 - DNA, 25 bp, Homo sapien
ctggctgcagggtccatctgtttgt

SEQ ID NO: 4746485 - DNA, 25 bp, Homo sapien
cctggctgcagggtccatctgtttg

SEQ ID NO: 4746486 - DNA, 25 bp, Homo sapien
tcagtgtcccagggtttcccctcca

SEQ ID NO: 4746487 - DNA, 25 bp, Homo sapien
gcgcttgttatgtgagcgctgaggg

SEQ ID NO: 4746488 - DNA, 25 bp, Homo sapien
cagcgcttgttatgtgagcgctgag

SEQ ID NO: 4746489 - DNA, 25 bp, Homo sapien
tcagcgcttgttatgtgagcgctga

SEQ ID NO: 4746490 - DNA, 25 bp, Homo sapien
cttgttatgtgagcgctgagggccc

SEQ ID NO: 4746491 - DNA, 25 bp, Homo sapien
tctgaaaccgcaggctccctctgtg

SEQ ID NO: 4746492 - DNA, 25 bp, Homo sapien
tgctcctccggctcacggaagtgcc

SEQ ID NO: 4746493 - DNA, 25 bp, Homo sapien
ccggatctgtggtcgcctctgaaac

SEQ ID NO: 4746494 - DNA, 25 bp, Homo sapien
gaccagctcttcagccggatctgtg

SEQ ID NO: 4746495 - DNA, 25 bp, Homo sapien
tgtacgctgctgtatttggtgctgc

SEQ ID NO: 4746496 - DNA, 25 bp, Homo sapien
ggtgctgctggtgcctaggcttcct

SEQ ID NO: 4746497 - DNA, 25 bp, Homo sapien
tgctggtgcctaggcttcctctctc

SEQ ID NO: 4746498 - DNA, 25 bp, Homo sapien
ctttggctgtgagaactgtactctc

SEQ ID NO: 4746499 - DNA, 25 bp, Homo sapien
tgacagagggtttgatgagcacagc

SEQ ID NO: 4746500 - DNA, 25 bp, Homo sapien
ggtttgatgagcacagcatccccat

SEQ ID NO: 4746501 - DNA, 25 bp, Homo sapien
aatgacagagggtttgatgagcaca

SEQ ID NO: 4746502 - DNA, 25 bp, Homo sapien
caaatgacagagggtttgatgagca

SEQ ID NO: 4746503 - DNA, 25 bp, Homo sapien
ctatggaggtaagatgagggagtcc

SEQ ID NO: 4746504 - DNA, 25 bp, Homo sapien
gtggaaggtgagactatggaggtaa

SEQ ID NO: 4746505 - DNA, 25 bp, Homo sapien
gaaggtgagactatggaggtaagat

SEQ ID NO: 4746506 - DNA, 25 bp, Homo sapien
gagactatggaggtaagatgaggga

SEQ ID NO: 4746507 - DNA, 25 bp, Homo sapien
ttttcatgaacttggcgggtgcaga

SEQ ID NO: 4746508 - DNA, 25 bp, Homo sapien
tgttccacactcaatccccgatggg

SEQ ID NO: 4746509 - DNA, 25 bp, Homo sapien
gcagacacacttccggttccaggga

SEQ ID NO: 4746510 - DNA, 25 bp, Homo sapien
ccagcgtggctgagtttttcatgaa

SEQ ID NO: 4746511 - DNA, 25 bp, Homo sapien
cagcccatccacgaagaactccagc

SEQ ID NO: 4746512 - DNA, 25 bp, Homo sapien
tgcagcccatccacgaagaactcca

SEQ ID NO: 4746513 - DNA, 25 bp, Homo sapien
gcaggaaggccccatcccggcactg

SEQ ID NO: 4746514 - DNA, 25 bp, Homo sapien
ggaaggccccatcccggcactggga

SEQ ID NO: 4746515 - DNA, 25 bp, Homo sapien
gtagaggatcacataaagggtatat

SEQ ID NO: 4746516 - DNA, 25 bp, Homo sapien
gagtagaggatcacataaagggtat

SEQ ID NO: 4746517 - DNA, 25 bp, Homo sapien
agagtagaggatcacataaagggta

SEQ ID NO: 4746518 - DNA, 25 bp, Homo sapien
agtagaggatcacataaagggtata

SEQ ID NO: 4746519 - DNA, 25 bp, Homo sapien
catttctgtgttcacaaaaagcggg

SEQ ID NO: 4746520 - DNA, 25 bp, Homo sapien
gaaagaaggacaagattttatgact

SEQ ID NO: 4746521 - DNA, 25 bp, Homo sapien
tcatcaaggtcattgccctcggtaa

SEQ ID NO: 4746522 - DNA, 25 bp, Homo sapien
tgagttccttttcaagccatattgt

SEQ ID NO: 4746523 - DNA, 25 bp, Homo sapien
tatctttgaagtcggtgaggcaggc

SEQ ID NO: 4746524 - DNA, 25 bp, Homo sapien
gaagcacaaatagagagcgtcctgt

SEQ ID NO: 4746525 - DNA, 25 bp, Homo sapien
ttcccctagaaaagtggtcgcttgc

SEQ ID NO: 4746526 - DNA, 25 bp, Homo sapien
actaggctacatgggtctgtgagac

SEQ ID NO: 4746527 - DNA, 25 bp, Homo sapien
gtccgcggtgtgtgccggcttttcc

SEQ ID NO: 4746528 - DNA, 25 bp, Homo sapien
agtccgcggtgtgtgccggcttttc

SEQ ID NO: 4746529 - DNA, 25 bp, Homo sapien
catatctggcatatctctggaaaat

SEQ ID NO: 4746530 - DNA, 25 bp, Homo sapien
tcatatctggcatatctctggaaaa

SEQ ID NO: 4746531 - DNA, 25 bp, Homo sapien
atccactttaaaagtaataacagag

SEQ ID NO: 4746532 - DNA, 25 bp, Homo sapien
gtaataacagagaaacaattcacat

SEQ ID NO: 4746533 - DNA, 25 bp, Homo sapien
ctccagttctcggtaaaaagtctgt

SEQ ID NO: 4746534 - DNA, 25 bp, Homo sapien
tcagggcgcttctttcttgacgatc

SEQ ID NO: 4746535 - DNA, 25 bp, Homo sapien
tttgagctcatgacaagttccacag

SEQ ID NO: 4746536 - DNA, 25 bp, Homo sapien
gcagaagacttctcgacggatgtat

SEQ ID NO: 4746537 - DNA, 25 bp, Homo sapien
gagccaaattagtaccagaaccaga

SEQ ID NO: 4746538 - DNA, 25 bp, Homo sapien
gacattgtagccttccctcgtggtg

SEQ ID NO: 4746539 - DNA, 25 bp, Homo sapien
tgaaatcacattgttgcagccccta

SEQ ID NO: 4746540 - DNA, 25 bp, Homo sapien
cagcccctatataaggagtggagga

SEQ ID NO: 4746541 - DNA, 25 bp, Homo sapien
tattcaaggtgctagatatgctaat

SEQ ID NO: 4746542 - DNA, 25 bp, Homo sapien
aaggtgctagatatgctaattgccc

SEQ ID NO: 4746543 - DNA, 25 bp, Homo sapien
acatcttattttggcggggattttg

SEQ ID NO: 4746544 - DNA, 25 bp, Homo sapien
atatcactctacatcccataaatat

SEQ ID NO: 4746545 - DNA, 25 bp, Homo sapien
ccttggatgtcgagctatggcatca

SEQ ID NO: 4746546 - DNA, 25 bp, Homo sapien
gaacccataggagatttgtagaaga

SEQ ID NO: 4746547 - DNA, 25 bp, Homo sapien
gcagccatgggaacccataggagat

SEQ ID NO: 4746548 - DNA, 25 bp, Homo sapien
tatggcatcacatatactctgcagc

SEQ ID NO: 4746549 - DNA, 25 bp, Homo sapien
gctacctggttaaatgcatgggccc

SEQ ID NO: 4746550 - DNA, 25 bp, Homo sapien
cagtggtctttagccttgctgcaga

SEQ ID NO: 4746551 - DNA, 25 bp, Homo sapien
tctgaagttgagtccaccctggtct

SEQ ID NO: 4746552 - DNA, 25 bp, Homo sapien
ggaatattcttagtagggagccagt

SEQ ID NO: 4746553 - DNA, 25 bp, Homo sapien
agggacttgtacttggttataatct

SEQ ID NO: 4746554 - DNA, 25 bp, Homo sapien
acagggacttgtacttggttataat

SEQ ID NO: 4746555 - DNA, 25 bp, Homo sapien
cagggacttgtacttggttataatc

SEQ ID NO: 4746556 - DNA, 25 bp, Homo sapien
cacagggacttgtacttggttataa

SEQ ID NO: 4746557 - DNA, 25 bp, Homo sapien
tggctgccttctctattttaagaca

SEQ ID NO: 4746558 - DNA, 25 bp, Homo sapien
tggtgctgatcatggctgccttctc

SEQ ID NO: 4746559 - DNA, 25 bp, Homo sapien
aaatggtgctgatcatggctgcctt

SEQ ID NO: 4746560 - DNA, 25 bp, Homo sapien
tcaaatggtgctgatcatggctgcc

SEQ ID NO: 4746561 - DNA, 25 bp, Homo sapien
tccctgtgttcccagttctacattc

SEQ ID NO: 4746562 - DNA, 25 bp, Homo sapien
gcatttgcctttagccacctgttca

SEQ ID NO: 4746563 - DNA, 25 bp, Homo sapien
cattcaaatcattctgggtcttttg

SEQ ID NO: 4746564 - DNA, 25 bp, Homo sapien
tgggggaattctcctataggctccc

SEQ ID NO: 4746565 - DNA, 25 bp, Homo sapien
tacactgttcactggtccgctgtct

SEQ ID NO: 4746566 - DNA, 25 bp, Homo sapien
tgctacactgttcactggtccgctg

SEQ ID NO: 4746567 - DNA, 25 bp, Homo sapien
tcactggtccgctgtcttccacggg

SEQ ID NO: 4746568 - DNA, 25 bp, Homo sapien
actgttcactggtccgctgtcttcc

SEQ ID NO: 4746569 - DNA, 25 bp, Homo sapien
gtaaaggatggcgaaactcttccaa

SEQ ID NO: 4746570 - DNA, 25 bp, Homo sapien
ggtaaaggatggcgaaactcttcca

SEQ ID NO: 4746571 - DNA, 25 bp, Homo sapien
ctaaattattgacacggctttggaa

SEQ ID NO: 4746572 - DNA, 25 bp, Homo sapien
cattactcttgggatctttcagcag

SEQ ID NO: 4746573 - DNA, 25 bp, Homo sapien
atcttatatgcaaattccagttgtc

SEQ ID NO: 4746574 - DNA, 25 bp, Homo sapien
tctattcagagaattaaattcccca

SEQ ID NO: 4746575 - DNA, 25 bp, Homo sapien
gcagtggccggatctcgatctcggc

SEQ ID NO: 4746576 - DNA, 25 bp, Homo sapien
gtgcagtggccggatctcgatctcg

SEQ ID NO: 4746577 - DNA, 25 bp, Homo sapien
agtggccggatctcgatctcggctc

SEQ ID NO: 4746578 - DNA, 25 bp, Homo sapien
agtgcagtggccggatctcgatctc

SEQ ID NO: 4746579 - DNA, 25 bp, Homo sapien
attgacagaacctgcatgctttgga

SEQ ID NO: 4746580 - DNA, 25 bp, Homo sapien
cgttgacatcgagagatgtcaggtt

SEQ ID NO: 4746581 - DNA, 25 bp, Homo sapien
tcgttgacatcgagagatgtcaggt

SEQ ID NO: 4746582 - DNA, 25 bp, Homo sapien
ctcgttgacatcgagagatgtcagg

SEQ ID NO: 4746583 - DNA, 25 bp, Homo sapien
gtctgcacttgtgacctgctgttct

SEQ ID NO: 4746584 - DNA, 25 bp, Homo sapien
tctgcacttgtgacctgctgttctc

SEQ ID NO: 4746585 - DNA, 25 bp, Homo sapien
gcacttgtgacctgctgttctcttt

SEQ ID NO: 4746586 - DNA, 25 bp, Homo sapien
cttgtgacctgctgttctctttctt

SEQ ID NO: 4746587 - DNA, 25 bp, Homo sapien
tagaatcaatggaaatctgttgtgt

SEQ ID NO: 4746588 - DNA, 25 bp, Homo sapien
aatcaatggaaatctgttgtgtata

SEQ ID NO: 4746589 - DNA, 25 bp, Homo sapien
cttagaatcaatggaaatctgttgt

SEQ ID NO: 4746590 - DNA, 25 bp, Homo sapien
gaatcaatggaaatctgttgtgtat

SEQ ID NO: 4746591 - DNA, 25 bp, Homo sapien
ccatgggtggctattaggtaatgca

SEQ ID NO: 4746592 - DNA, 25 bp, Homo sapien
gattgtgtggaagcggacactgcgt

SEQ ID NO: 4746593 - DNA, 25 bp, Homo sapien
aaggcagacgcttccctgtggcgct

SEQ ID NO: 4746594 - DNA, 25 bp, Homo sapien
gtgagcatccctcctcgtgaagcca

SEQ ID NO: 4746595 - DNA, 25 bp, Homo sapien
tgttgcaaaaaagagccagggtgtc

SEQ ID NO: 4746596 - DNA, 25 bp, Homo sapien
aaaaaagagccagggtgtcctggtg

SEQ ID NO: 4746597 - DNA, 25 bp, Homo sapien
cagggtgtcctggtgactgccgcac

SEQ ID NO: 4746598 - DNA, 25 bp, Homo sapien
ccagggtgtcctggtgactgccgca

SEQ ID NO: 4746599 - DNA, 25 bp, Homo sapien
tgctgctgcctctgagcagggctca

SEQ ID NO: 4746600 - DNA, 25 bp, Homo sapien
tgccccttgtaggaaatgctgctgc

SEQ ID NO: 4746601 - DNA, 25 bp, Homo sapien
ccccttgtaggaaatgctgctgcct

SEQ ID NO: 4746602 - DNA, 25 bp, Homo sapien
cttgccccttgtaggaaatgctgct

SEQ ID NO: 4746603 - DNA, 25 bp, Homo sapien
cctgattcctcggacccacgtgcac

SEQ ID NO: 4746604 - DNA, 25 bp, Homo sapien
tgattcctcggacccacgtgcacac

SEQ ID NO: 4746605 - DNA, 25 bp, Homo sapien
agctcctgattcctcggacccacgt

SEQ ID NO: 4746606 - DNA, 25 bp, Homo sapien
ctcctgattcctcggacccacgtgc

SEQ ID NO: 4746607 - DNA, 25 bp, Homo sapien
gaagcacctacacgctcccaccctg

SEQ ID NO: 4746608 - DNA, 25 bp, Homo sapien
tagctgcttcgggtgctcccgaagc

SEQ ID NO: 4746609 - DNA, 25 bp, Homo sapien
tgcttcgggtgctcccgaagcacct

SEQ ID NO: 4746610 - DNA, 25 bp, Homo sapien
ctttgtagctgcttcgggtgctccc

SEQ ID NO: 4746611 - DNA, 25 bp, Homo sapien
taagattcaagctttgtaacctcaa

SEQ ID NO: 4746612 - DNA, 25 bp, Homo sapien
aatactatgtaagattcaagctttg

SEQ ID NO: 4746613 - DNA, 25 bp, Homo sapien
ttctcttcgacactgaggtcatcaa

SEQ ID NO: 4746614 - DNA, 25 bp, Homo sapien
cactgaggtcatcaaatactatgta

SEQ ID NO: 4746615 - DNA, 25 bp, Homo sapien
tttggcatggcaggttaactgcgat

SEQ ID NO: 4746616 - DNA, 25 bp, Homo sapien
gtttgtttggcatggcaggttaact

SEQ ID NO: 4746617 - DNA, 25 bp, Homo sapien
catggcaggttaactgcgatgaagg

SEQ ID NO: 4746618 - DNA, 25 bp, Homo sapien
tgtttggcatggcaggttaactgcg

SEQ ID NO: 4746619 - DNA, 25 bp, Homo sapien
tgccatcagagccttgctttggctc

SEQ ID NO: 4746620 - DNA, 25 bp, Homo sapien
ccatcagagccttgctttggctcat

SEQ ID NO: 4746621 - DNA, 25 bp, Homo sapien
ttgccatcagagccttgctttggct

SEQ ID NO: 4746622 - DNA, 25 bp, Homo sapien
gccatcagagccttgctttggctca

SEQ ID NO: 4746623 - DNA, 25 bp, Homo sapien
caagcttcttggctcactgatatga

SEQ ID NO: 4746624 - DNA, 25 bp, Homo sapien
gcgattcacatcctgagaagggtgt

SEQ ID NO: 4746625 - DNA, 25 bp, Homo sapien
gatatgatggactctgcgattcaca

SEQ ID NO: 4746626 - DNA, 25 bp, Homo sapien
tgcacaatgcggctcatcacagagg

SEQ ID NO: 4746627 - DNA, 25 bp, Homo sapien
agagtgtcgagatcgtgcccttgca

SEQ ID NO: 4746628 - DNA, 25 bp, Homo sapien
gagtgtcgagatcgtgcccttgcac

SEQ ID NO: 4746629 - DNA, 25 bp, Homo sapien
cagagtgtcgagatcgtgcccttgc

SEQ ID NO: 4746630 - DNA, 25 bp, Homo sapien
gcagagtgtcgagatcgtgcccttg

SEQ ID NO: 4746631 - DNA, 25 bp, Homo sapien
tgtggtgtctcaggtcaattcctgg

SEQ ID NO: 4746632 - DNA, 25 bp, Homo sapien
tcctggaaaggcaatgtgagaggcc

SEQ ID NO: 4746633 - DNA, 25 bp, Homo sapien
tcctggtcagggtccactttggttc

SEQ ID NO: 4746634 - DNA, 25 bp, Homo sapien
ggccaaggctacaaggtgcctcaat

SEQ ID NO: 4746635 - DNA, 25 bp, Homo sapien
gctaagggaacggttgttcttcatg

SEQ ID NO: 4746636 - DNA, 25 bp, Homo sapien
cggttgttcttcatgttcccaaggg

SEQ ID NO: 4746637 - DNA, 25 bp, Homo sapien
tggctaagggaacggttgttcttca

SEQ ID NO: 4746638 - DNA, 25 bp, Homo sapien
ggaacggttgttcttcatgttccca

SEQ ID NO: 4746639 - DNA, 25 bp, Homo sapien
tcagttgatacatcttttcagtaac

SEQ ID NO: 4746640 - DNA, 25 bp, Homo sapien
tgccaaagcctcatttgcaatttca

SEQ ID NO: 4746641 - DNA, 25 bp, Homo sapien
ctgccaaagcctcatttgcaatttc

SEQ ID NO: 4746642 - DNA, 25 bp, Homo sapien
ctgaactcagttgatacatcttttc

SEQ ID NO: 4746643 - DNA, 25 bp, Homo sapien
gctgtgctggaaggaccaagatgat

SEQ ID NO: 4746644 - DNA, 25 bp, Homo sapien
ttggtacaaggtgggttcaactgac

SEQ ID NO: 4746645 - DNA, 25 bp, Homo sapien
caagatgatccaagaccactggtca

SEQ ID NO: 4746646 - DNA, 25 bp, Homo sapien
tgatggccttgagggtttggttttg

SEQ ID NO: 4746647 - DNA, 25 bp, Homo sapien
tcaggggttaaatggattcaaaaca

SEQ ID NO: 4746648 - DNA, 25 bp, Homo sapien
atcagtaaagctgtcattgcagatt

SEQ ID NO: 4746649 - DNA, 25 bp, Homo sapien
cagaaatcagtaaagctgtcattgc

SEQ ID NO: 4746650 - DNA, 25 bp, Homo sapien
caggggttaaatggattcaaaacag

SEQ ID NO: 4746651 - DNA, 25 bp, Homo sapien
ctcaggacatggaaaatacggactt

SEQ ID NO: 4746652 - DNA, 25 bp, Homo sapien
ttctcaggacatggaaaatacggac

SEQ ID NO: 4746653 - DNA, 25 bp, Homo sapien
tctcaggacatggaaaatacggact

SEQ ID NO: 4746654 - DNA, 25 bp, Homo sapien
tcaggacatggaaaatacggacttg

SEQ ID NO: 4746655 - DNA, 25 bp, Homo sapien
ctgcccgcttgcactgtaactccaa

SEQ ID NO: 4746656 - DNA, 25 bp, Homo sapien
tctgctaataatccatcactgtggt

SEQ ID NO: 4746657 - DNA, 25 bp, Homo sapien
aaggaagctttcacctaaagcttgg

SEQ ID NO: 4746658 - DNA, 25 bp, Homo sapien
tcacctaaagcttgggagaaatgat

SEQ ID NO: 4746659 - DNA, 25 bp, Homo sapien
gcgtgtgtacgcatgttaggagtta

SEQ ID NO: 4746660 - DNA, 25 bp, Homo sapien
gagcttcaatatattgtcatctaaa

SEQ ID NO: 4746661 - DNA, 25 bp, Homo sapien
catctaaactccagtaatttctact

SEQ ID NO: 4746662 - DNA, 25 bp, Homo sapien
tgtacgcatgttaggagttaaattt

SEQ ID NO: 4746663 - DNA, 25 bp, Homo sapien
tcatgaaatatgaataggtggacaa

SEQ ID NO: 4746664 - DNA, 25 bp, Homo sapien
catgaaatatgaataggtggacaat

SEQ ID NO: 4746665 - DNA, 25 bp, Homo sapien
gccagcatagctctctgtttctctg

SEQ ID NO: 4746666 - DNA, 25 bp, Homo sapien
tcacagagttgtgaccttcctggat

SEQ ID NO: 4746667 - DNA, 25 bp, Homo sapien
gacagcactggccagcatagctctc

SEQ ID NO: 4746668 - DNA, 25 bp, Homo sapien
agagttgtgaccttcctggattttg

SEQ ID NO: 4746669 - DNA, 25 bp, Homo sapien
tgcgttagctaaaactatcactgtg

SEQ ID NO: 4746670 - DNA, 25 bp, Homo sapien
tatcactgtgcttatagcctgtaag

SEQ ID NO: 4746671 - DNA, 25 bp, Homo sapien
cctgtaaggctacagcatcagagag

SEQ ID NO: 4746672 - DNA, 25 bp, Homo sapien
ggagtatttagcacagttattttca

SEQ ID NO: 4746673 - DNA, 25 bp, Homo sapien
ttggcatgggatcaaagagtgccat

SEQ ID NO: 4746674 - DNA, 25 bp, Homo sapien
caggactctcaatgatgaggtattc

SEQ ID NO: 4746675 - DNA, 25 bp, Homo sapien
ctctcaatgatgaggtattctttgc

SEQ ID NO: 4746676 - DNA, 25 bp, Homo sapien
caatgatgaggtattctttgccttc

SEQ ID NO: 4746677 - DNA, 25 bp, Homo sapien
ctggggagcttcatcttggctttcc

SEQ ID NO: 4746678 - DNA, 25 bp, Homo sapien
actggggagcttcatcttggctttc

SEQ ID NO: 4746679 - DNA, 25 bp, Homo sapien
tgtaacatagcaccaaagggaaggt

SEQ ID NO: 4746680 - DNA, 25 bp, Homo sapien
tgtgtaacatagcaccaaagggaag

SEQ ID NO: 4746681 - DNA, 25 bp, Homo sapien
aacatagcaccaaagggaaggtcat

SEQ ID NO: 4746682 - DNA, 25 bp, Homo sapien
ctgtgtaacatagcaccaaagggaa

SEQ ID NO: 4746683 - DNA, 25 bp, Homo sapien
tctgagacagcccatggaacgtgtc

SEQ ID NO: 4746684 - DNA, 25 bp, Homo sapien
ccatggaacgtgtctcagaatcttc

SEQ ID NO: 4746685 - DNA, 25 bp, Homo sapien
gacagcccatggaacgtgtctcaga

SEQ ID NO: 4746686 - DNA, 25 bp, Homo sapien
ctatgtagctaatccctctggggac

SEQ ID NO: 4746687 - DNA, 25 bp, Homo sapien
gaactttctgttgaactcaggaaca

SEQ ID NO: 4746688 - DNA, 25 bp, Homo sapien
aaggcagactcttgagatggaaatc

SEQ ID NO: 4746689 - DNA, 25 bp, Homo sapien
tactagaactttctgttgaactcag

SEQ ID NO: 4746690 - DNA, 25 bp, Homo sapien
aatctgtcaaccttactagaacttt

SEQ ID NO: 4746691 - DNA, 25 bp, Homo sapien
gtttgcagaagcaaagtgcaattat

SEQ ID NO: 4746692 - DNA, 25 bp, Homo sapien
gaagcaaagtgcaattattctccat

SEQ ID NO: 4746693 - DNA, 25 bp, Homo sapien
gcctgttggcggaacacttattagg

SEQ ID NO: 4746694 - DNA, 25 bp, Homo sapien
tttcctgcctgttggcggaacactt

SEQ ID NO: 4746695 - DNA, 25 bp, Homo sapien
tgtagaagtttggagccttaggcca

SEQ ID NO: 4746696 - DNA, 25 bp, Homo sapien
tagaagtttggagccttaggccagt

SEQ ID NO: 4746697 - DNA, 25 bp, Homo sapien
tttggagccttaggccagtgctgga

SEQ ID NO: 4746698 - DNA, 25 bp, Homo sapien
gaagtttggagccttaggccagtgc

SEQ ID NO: 4746699 - DNA, 25 bp, Homo sapien
ctggctgctgggtcatccacacgca

SEQ ID NO: 4746700 - DNA, 25 bp, Homo sapien
tggctgctgggtcatccacacgcac

SEQ ID NO: 4746701 - DNA, 25 bp, Homo sapien
tggaagggaacaggaatacactcac

SEQ ID NO: 4746702 - DNA, 25 bp, Homo sapien
ctggaagggaacaggaatacactca

SEQ ID NO: 4746703 - DNA, 25 bp, Homo sapien
aggaatacactctccagtgcacacg

SEQ ID NO: 4746704 - DNA, 25 bp, Homo sapien
acgagctctgctttccgacagttca

SEQ ID NO: 4746705 - DNA, 25 bp, Homo sapien
tctccagtgcacacgagctctgctt

SEQ ID NO: 4746706 - DNA, 25 bp, Homo sapien
gcacacgagctctgctttccgacag

SEQ ID NO: 4746707 - DNA, 25 bp, Homo sapien
tctgcagtcaactcccatcccacct

SEQ ID NO: 4746708 - DNA, 25 bp, Homo sapien
tgtgtttctctgcagtcaactccca

SEQ ID NO: 4746709 - DNA, 25 bp, Homo sapien
cttgtgtttctctgcagtcaactcc

SEQ ID NO: 4746710 - DNA, 25 bp, Homo sapien
tgtttctctgcagtcaactcccatc

SEQ ID NO: 4746711 - DNA, 25 bp, Homo sapien
tgcagaactcacatgacactgctat

SEQ ID NO: 4746712 - DNA, 25 bp, Homo sapien
tacttttactcatgctgcagaactc

SEQ ID NO: 4746713 - DNA, 25 bp, Homo sapien
cctgaaaggcttttacactgttctc

SEQ ID NO: 4746714 - DNA, 25 bp, Homo sapien
tagcatttgctttagggattacacc

SEQ ID NO: 4746715 - DNA, 25 bp, Homo sapien
aaaggctgaaaaaagtagtagacag

SEQ ID NO: 4746716 - DNA, 25 bp, Homo sapien
aaggctgaaaaaagtagtagacagc

SEQ ID NO: 4746717 - DNA, 25 bp, Homo sapien
ttacatctagcaatcagtaaatatt

SEQ ID NO: 4746718 - DNA, 25 bp, Homo sapien
atttttacatctagcaatcagtaaa

SEQ ID NO: 4746719 - DNA, 25 bp, Homo sapien
tttacatctagcaatcagtaaatat

SEQ ID NO: 4746720 - DNA, 25 bp, Homo sapien
tttttacatctagcaatcagtaaat

SEQ ID NO: 4746721 - DNA, 25 bp, Homo sapien
cgtttcgctgtcttgcaaaaggtgc

SEQ ID NO: 4746722 - DNA, 25 bp, Homo sapien
gcaatttgatgcatccgtttcgctg

SEQ ID NO: 4746723 - DNA, 25 bp, Homo sapien
gaagagatcatttgttaagagcgga

SEQ ID NO: 4746724 - DNA, 25 bp, Homo sapien
caaaaggtgcagtgaccaatgggct

SEQ ID NO: 4746725 - DNA, 25 bp, Homo sapien
tcacgatgatagagacagccacagc

SEQ ID NO: 4746726 - DNA, 25 bp, Homo sapien
ccagtgaaggtagtccaagaagcat

SEQ ID NO: 4746727 - DNA, 25 bp, Homo sapien
tgaacagtgatgaatggccatacct

SEQ ID NO: 4746728 - DNA, 25 bp, Homo sapien
catggactgcgttttgcacatcgag

SEQ ID NO: 4746729 - DNA, 25 bp, Homo sapien
agatgcgtatggctatggcagtgat

SEQ ID NO: 4746730 - DNA, 25 bp, Homo sapien
ctttgcgtaactttctctgttgata

SEQ ID NO: 4746731 - DNA, 25 bp, Homo sapien
tttctttgcgtaactttctctgttg

SEQ ID NO: 4746732 - DNA, 25 bp, Homo sapien
ttctctgttgatagatgcgtatggc

SEQ ID NO: 4746733 - DNA, 25 bp, Homo sapien
tctgacggactatgacttttggata

SEQ ID NO: 4746734 - DNA, 25 bp, Homo sapien
cctacaggtatatgatgattgggtt

SEQ ID NO: 4746735 - DNA, 25 bp, Homo sapien
gattgggttttagataatgctttca

SEQ ID NO: 4746736 - DNA, 25 bp, Homo sapien
gatatggctgtgttaggctttttcc

SEQ ID NO: 4746737 - DNA, 25 bp, Homo sapien
actgaggtttctcccacgtgctgtg

SEQ ID NO: 4746738 - DNA, 25 bp, Homo sapien
tgagccagacttctaagccactgcg

SEQ ID NO: 4746739 - DNA, 25 bp, Homo sapien
caattaagaagcagccaatggagga

SEQ ID NO: 4746740 - DNA, 25 bp, Homo sapien
tgggctgcatgccttagtaaacttg

SEQ ID NO: 4746741 - DNA, 25 bp, Homo sapien
gcgataatgacaagcaccaggtcat

SEQ ID NO: 4746742 - DNA, 25 bp, Homo sapien
tatcattatctaaagcgataatgac

SEQ ID NO: 4746743 - DNA, 25 bp, Homo sapien
tatctaaagcgataatgacaagcac

SEQ ID NO: 4746744 - DNA, 25 bp, Homo sapien
taaagcgataatgacaagcaccagg

SEQ ID NO: 4746745 - DNA, 25 bp, Homo sapien
gtctgcattaaccaagggctctccc

SEQ ID NO: 4746746 - DNA, 25 bp, Homo sapien
tgcattaaccaagggctctccctca

SEQ ID NO: 4746747 - DNA, 25 bp, Homo sapien
tctgcattaaccaagggctctccct

SEQ ID NO: 4746748 - DNA, 25 bp, Homo sapien
ccataggggccacgtggccgcggac

SEQ ID NO: 4746749 - DNA, 25 bp, Homo sapien
gccagtgaagccactagtcgccgcc

SEQ ID NO: 4746750 - DNA, 25 bp, Homo sapien
ttgtgtccgggtccgcgccggcagc

SEQ ID NO: 4746751 - DNA, 25 bp, Homo sapien
gcaccgccgagaggcagccagtgaa

SEQ ID NO: 4746752 - DNA, 25 bp, Homo sapien
ttcacgtttgcacaaattcctggtc

SEQ ID NO: 4746753 - DNA, 25 bp, Homo sapien
gctcccgagtaaattcacgtttgca

SEQ ID NO: 4746754 - DNA, 25 bp, Homo sapien
gctttctcaacttcggggtcctgca

SEQ ID NO: 4746755 - DNA, 25 bp, Homo sapien
atcaaagcctgctcccgagtaaatt

SEQ ID NO: 4746756 - DNA, 25 bp, Homo sapien
cattgaatgatggtctccggagttg

SEQ ID NO: 4746757 - DNA, 25 bp, Homo sapien
gaacgcccttgcacatctcacaggt

SEQ ID NO: 4746758 - DNA, 25 bp, Homo sapien
gcatgattgccaagtgagaggttaa

SEQ ID NO: 4746759 - DNA, 25 bp, Homo sapien
cataatctgtgaacttcgtgtcagc

SEQ ID NO: 4746760 - DNA, 25 bp, Homo sapien
tatgagagatttgacggcgttgaat

SEQ ID NO: 4746761 - DNA, 25 bp, Homo sapien
agatttgacggcgttgaattctgtc

SEQ ID NO: 4746762 - DNA, 25 bp, Homo sapien
tttgacggcgttgaattctgtccct

SEQ ID NO: 4746763 - DNA, 25 bp, Homo sapien
tgagagatttgacggcgttgaattc

SEQ ID NO: 4746764 - DNA, 25 bp, Homo sapien
taagtaccattacaaaagctcaaga

SEQ ID NO: 4746765 - DNA, 25 bp, Homo sapien
tattagatgtcccatgagaagcaaa

SEQ ID NO: 4746766 - DNA, 25 bp, Homo sapien
tatccacgatgtacccacttgctgg

SEQ ID NO: 4746767 - DNA, 25 bp, Homo sapien
ccttccaatgccgatgacaatgtgt

SEQ ID NO: 4746768 - DNA, 25 bp, Homo sapien
tatctagcttgtacctaatctgcaa

SEQ ID NO: 4746769 - DNA, 25 bp, Homo sapien
tgatgtctatctagcttgtacctaa

SEQ ID NO: 4746770 - DNA, 25 bp, Homo sapien
tcaggattttgatgtctatctagct

SEQ ID NO: 4746771 - DNA, 25 bp, Homo sapien
gattttgatgtctatctagcttgta

SEQ ID NO: 4746772 - DNA, 25 bp, Homo sapien
gctcacatacagcaataagctcgga

SEQ ID NO: 4746773 - DNA, 25 bp, Homo sapien
tgtggttcggaagctcagtgtgatc

SEQ ID NO: 4746774 - DNA, 25 bp, Homo sapien
ggtattcctcatagaaagagctcac

SEQ ID NO: 4746775 - DNA, 25 bp, Homo sapien
cattgttggcgaggataactgaaag

SEQ ID NO: 4746776 - DNA, 25 bp, Homo sapien
ctataacctgctccttggtcacact

SEQ ID NO: 4746777 - DNA, 25 bp, Homo sapien
taacctgctccttggtcacacttac

SEQ ID NO: 4746778 - DNA, 25 bp, Homo sapien
tttccctataacctgctccttggtc

SEQ ID NO: 4746779 - DNA, 25 bp, Homo sapien
ttccctataacctgctccttggtca

SEQ ID NO: 4746780 - DNA, 25 bp, Homo sapien
tctccctccattgcgacacaagtgt

SEQ ID NO: 4746781 - DNA, 25 bp, Homo sapien
caagtgtccataggtgctgcagtgt

SEQ ID NO: 4746782 - DNA, 25 bp, Homo sapien
agtcacaggtgacccccctgcgttt

SEQ ID NO: 4746783 - DNA, 25 bp, Homo sapien
gaaggcacagtcacaggtgaccccc

SEQ ID NO: 4746784 - DNA, 25 bp, Homo sapien
gagattccaattcggtgggcctaag

SEQ ID NO: 4746785 - DNA, 25 bp, Homo sapien
ttaggaagtcatggtataacacccc

SEQ ID NO: 4746786 - DNA, 25 bp, Homo sapien
gcagtttttagcctcctcccagaga

SEQ ID NO: 4746787 - DNA, 25 bp, Homo sapien
taatagaagagctaaccacgcctga

SEQ ID NO: 4746788 - DNA, 25 bp, Homo sapien
tgttgagctgtaaacgaacgtgccc

SEQ ID NO: 4746789 - DNA, 25 bp, Homo sapien
tgatcaacttgaagagacgctcctt

SEQ ID NO: 4746790 - DNA, 25 bp, Homo sapien
ggtccattccccacatcgaaggaaa

SEQ ID NO: 4746791 - DNA, 25 bp, Homo sapien
cattaaagggagtgggtgactgcac

SEQ ID NO: 4746792 - DNA, 25 bp, Homo sapien
cctgtgacttgtccagagtggcgag

SEQ ID NO: 4746793 - DNA, 25 bp, Homo sapien
tgacttgtccagagtggcgagctta

SEQ ID NO: 4746794 - DNA, 25 bp, Homo sapien
tgtgacttgtccagagtggcgagct

SEQ ID NO: 4746795 - DNA, 25 bp, Homo sapien
gacttgtccagagtggcgagcttac

SEQ ID NO: 4746796 - DNA, 25 bp, Homo sapien
gaaggtatgaagtctcagtgttgaa

SEQ ID NO: 4746797 - DNA, 25 bp, Homo sapien
acgtcagcagtgagttctccgtgga

SEQ ID NO: 4746798 - DNA, 25 bp, Homo sapien
ttaaaaaagaagcacacgtcagcag

SEQ ID NO: 4746799 - DNA, 25 bp, Homo sapien
atgaagtctcagtgttgaaggaagc

SEQ ID NO: 4746800 - DNA, 25 bp, Homo sapien
tgcgtctgtcatcacaatctgagtg

SEQ ID NO: 4746801 - DNA, 25 bp, Homo sapien
ttttgggaaaggactattgtgtcac

SEQ ID NO: 4746802 - DNA, 25 bp, Homo sapien
ggaaaggactattgtgtcactagtc

SEQ ID NO: 4746803 - DNA, 25 bp, Homo sapien
ggcctgcgtctgtcatcacaatctg

SEQ ID NO: 4746804 - DNA, 25 bp, Homo sapien
aataaatgcacacgtctgggtccaa

SEQ ID NO: 4746805 - DNA, 25 bp, Homo sapien
gcacacagcctattgaataccatga

SEQ ID NO: 4746806 - DNA, 25 bp, Homo sapien
ccagttatggttagaaactccacag

SEQ ID NO: 4746807 - DNA, 25 bp, Homo sapien
ggtccaatacaaagagacctggagg

SEQ ID NO: 4746808 - DNA, 25 bp, Homo sapien
tcagcttgcttgaacatactttagt

SEQ ID NO: 4746809 - DNA, 25 bp, Homo sapien
tagttaccttattgtaccagcttgt

SEQ ID NO: 4746810 - DNA, 25 bp, Homo sapien
tttcatcaaaacttgtatttcagct

SEQ ID NO: 4746811 - DNA, 25 bp, Homo sapien
tgtctgacatttaattaactatgca

SEQ ID NO: 4746812 - DNA, 25 bp, Homo sapien
ttgagcatcaggcagagaacctccc

SEQ ID NO: 4746813 - DNA, 25 bp, Homo sapien
taatccacaagtacacttttgagca

SEQ ID NO: 4746814 - DNA, 25 bp, Homo sapien
cacttttgagcatcaggcagagaac

SEQ ID NO: 4746815 - DNA, 25 bp, Homo sapien
cacaagtacacttttgagcatcagg

SEQ ID NO: 4746816 - DNA, 25 bp, Homo sapien
gcagcgcagagccagccgctgctcg

SEQ ID NO: 4746817 - DNA, 25 bp, Homo sapien
aggttcaccgcggaccgcagctgcc

SEQ ID NO: 4746818 - DNA, 25 bp, Homo sapien
ggcgccgcgccgtcccgcagcgcag

SEQ ID NO: 4746819 - DNA, 25 bp, Homo sapien
gcagcgctccgccaggttcaccgcg

SEQ ID NO: 4746820 - DNA, 25 bp, Homo sapien
gcgaaggacacagccgagcgcgggt

SEQ ID NO: 4746821 - DNA, 25 bp, Homo sapien
aggacacagccgagcgcgggtgccc

SEQ ID NO: 4746822 - DNA, 25 bp, Homo sapien
gcacctcggagggtcaccgcgtcgg

SEQ ID NO: 4746823 - DNA, 25 bp, Homo sapien
gggcacctcggagggtcaccgcgtc

SEQ ID NO: 4746824 - DNA, 25 bp, Homo sapien
tcatattgcagtacacaagaaatgg

SEQ ID NO: 4746825 - DNA, 25 bp, Homo sapien
tattgcagtacacaagaaatggtcc

SEQ ID NO: 4746826 - DNA, 25 bp, Homo sapien
ctgtcatattgcagtacacaagaaa

SEQ ID NO: 4746827 - DNA, 25 bp, Homo sapien
ttgcagtacacaagaaatggtccca

SEQ ID NO: 4746828 - DNA, 25 bp, Homo sapien
tctccagatgttgagtcagtgtcca

SEQ ID NO: 4746829 - DNA, 25 bp, Homo sapien
tgttgagtcagtgtccaaaggtttg

SEQ ID NO: 4746830 - DNA, 25 bp, Homo sapien
tccagatgttgagtcagtgtccaaa

SEQ ID NO: 4746831 - DNA, 25 bp, Homo sapien
cagatgttgagtcagtgtccaaagg

SEQ ID NO: 4746832 - DNA, 25 bp, Homo sapien
ggaactgaggactttgcatctctgt

SEQ ID NO: 4746833 - DNA, 25 bp, Homo sapien
agacccagggatgggcgaaatattc

SEQ ID NO: 4746834 - DNA, 25 bp, Homo sapien
actcaggatgagcaagtggaactga

SEQ ID NO: 4746835 - DNA, 25 bp, Homo sapien
cttgaagacccagggatgggcgaaa

SEQ ID NO: 4746836 - DNA, 25 bp, Homo sapien
agatgctgacagaaacgagagggag

SEQ ID NO: 4746837 - DNA, 25 bp, Homo sapien
agagatgctgacagaaacgagaggg

SEQ ID NO: 4746838 - DNA, 25 bp, Homo sapien
gatgctgacagaaacgagagggagg

SEQ ID NO: 4746839 - DNA, 25 bp, Homo sapien
gagatgctgacagaaacgagaggga

SEQ ID NO: 4746840 - DNA, 25 bp, Homo sapien
aggtctcgcccgtatagcctgtgcc

SEQ ID NO: 4746841 - DNA, 25 bp, Homo sapien
aatggcaggtctcgcccgtatagcc

SEQ ID NO: 4746842 - DNA, 25 bp, Homo sapien
acgactgggaacactcgcccccatg

SEQ ID NO: 4746843 - DNA, 25 bp, Homo sapien
aggaatggcaggtctcgcccgtata

SEQ ID NO: 4746844 - DNA, 25 bp, Homo sapien
tgagcagggttggatctcagcctct

SEQ ID NO: 4746845 - DNA, 25 bp, Homo sapien
taaggacctggtaaagagtgaagat

SEQ ID NO: 4746846 - DNA, 25 bp, Homo sapien
cttgagcagggttggatctcagcct

SEQ ID NO: 4746847 - DNA, 25 bp, Homo sapien
tcccactgctgagtacacagctaag

SEQ ID NO: 4746848 - DNA, 25 bp, Homo sapien
ggccgtgagggacatcatagtccat

SEQ ID NO: 4746849 - DNA, 25 bp, Homo sapien
aggccgtgagggacatcatagtcca

SEQ ID NO: 4746850 - DNA, 25 bp, Homo sapien
ccaggccgtgagggacatcatagtc

SEQ ID NO: 4746851 - DNA, 25 bp, Homo sapien
caggccgtgagggacatcatagtcc

SEQ ID NO: 4746852 - DNA, 25 bp, Homo sapien
agcgccccctgctgtactaagatgg

SEQ ID NO: 4746853 - DNA, 25 bp, Homo sapien
gatccaccgctttgtcaccaatggt

SEQ ID NO: 4746854 - DNA, 25 bp, Homo sapien
cccctgctgtactaagatgggatcc

SEQ ID NO: 4746855 - DNA, 25 bp, Homo sapien
ctaagatgggatccaccgctttgtc

SEQ ID NO: 4746856 - DNA, 25 bp, Homo sapien
gagccagagctgttgtccaggcagc

SEQ ID NO: 4746857 - DNA, 25 bp, Homo sapien
gggcttttacatccagagccagagc

SEQ ID NO: 4746858 - DNA, 25 bp, Homo sapien
cctcccagggggcttttacatccag

SEQ ID NO: 4746859 - DNA, 25 bp, Homo sapien
ccagagccagagctgttgtccaggc

SEQ ID NO: 4746860 - DNA, 25 bp, Homo sapien
cgcttgtttatggacatcggtatga

SEQ ID NO: 4746861 - DNA, 25 bp, Homo sapien
tggacatcggtatgatgcgatgagc

SEQ ID NO: 4746862 - DNA, 25 bp, Homo sapien
tatgatgcgatgagcttcaccattc

SEQ ID NO: 4746863 - DNA, 25 bp, Homo sapien
ctgctgctcccgcttgtttatggac

SEQ ID NO: 4746864 - DNA, 25 bp, Homo sapien
taaaaagtggttccactgccagtgt

SEQ ID NO: 4746865 - DNA, 25 bp, Homo sapien
aaaaagtggttccactgccagtgtc

SEQ ID NO: 4746866 - DNA, 25 bp, Homo sapien
aaaagtggttccactgccagtgtca

SEQ ID NO: 4746867 - DNA, 25 bp, Homo sapien
gataaaaagtggttccactgccagt

SEQ ID NO: 4746868 - DNA, 25 bp, Homo sapien
cactgcccatcgtttaatccagcac

SEQ ID NO: 4746869 - DNA, 25 bp, Homo sapien
caaaataataggtgtcacctgaatc

SEQ ID NO: 4746870 - DNA, 25 bp, Homo sapien
tcacctgaatcaatgagcacagcca

SEQ ID NO: 4746871 - DNA, 25 bp, Homo sapien
tgaacagctgtgtcatcgtccacca

SEQ ID NO: 4746872 - DNA, 25 bp, Homo sapien
caaatgatttccgtgtggatatgtc

SEQ ID NO: 4746873 - DNA, 25 bp, Homo sapien
caggtttatgggaatacaactgtta

SEQ ID NO: 4746874 - DNA, 25 bp, Homo sapien
tccgtgtggatatgtcaggtttatg

SEQ ID NO: 4746875 - DNA, 25 bp, Homo sapien
aattaccaaatgatttccgtgtgga

SEQ ID NO: 4746876 - DNA, 25 bp, Homo sapien
tgtcctccccagagttgcctggcag

SEQ ID NO: 4746877 - DNA, 25 bp, Homo sapien
agttcgccgaaaagcaaatgtcctg

SEQ ID NO: 4746878 - DNA, 25 bp, Homo sapien
ctggaagagactcagtttgagcttg

SEQ ID NO: 4746879 - DNA, 25 bp, Homo sapien
tgagcttgccatccttaagaaagag

SEQ ID NO: 4746880 - DNA, 25 bp, Homo sapien
gcgatcttccgggtgtcggaattcc

SEQ ID NO: 4746881 - DNA, 25 bp, Homo sapien
tttcttggctaattcggtaacatcc

SEQ ID NO: 4746882 - DNA, 25 bp, Homo sapien
gctaattcggtaacatccactccat

SEQ ID NO: 4746883 - DNA, 25 bp, Homo sapien
tgaatgcccgcgatcttccgggtgt

SEQ ID NO: 4746884 - DNA, 25 bp, Homo sapien
tcgatgaggacggaatgccagtgct

SEQ ID NO: 4746885 - DNA, 25 bp, Homo sapien
gaggagctcgatgaggacggaatgc

SEQ ID NO: 4746886 - DNA, 25 bp, Homo sapien
gcaatagtggaaggcagcttagcat

SEQ ID NO: 4746887 - DNA, 25 bp, Homo sapien
gtcacaggagcaatagtggaaggca

SEQ ID NO: 4746888 - DNA, 25 bp, Homo sapien
tacagcagagcactttgtccatcaa

SEQ ID NO: 4746889 - DNA, 25 bp, Homo sapien
taattaattccagagtaatgtgatt

SEQ ID NO: 4746890 - DNA, 25 bp, Homo sapien
tatacagcagagcactttgtccatc

SEQ ID NO: 4746891 - DNA, 25 bp, Homo sapien
ttaattccagagtaatgtgatttcc

SEQ ID NO: 4746892 - DNA, 25 bp, Homo sapien
ctaggaaagaagatattagaaagca

SEQ ID NO: 4746893 - DNA, 25 bp, Homo sapien
aggaaagaagatattagaaagcaat

SEQ ID NO: 4746894 - DNA, 25 bp, Homo sapien
taggaaagaagatattagaaagcaa

SEQ ID NO: 4746895 - DNA, 25 bp, Homo sapien
ggaaagaagatattagaaagcaatt

SEQ ID NO: 4746896 - DNA, 25 bp, Homo sapien
cagcaagattccatagggtgcaaac

SEQ ID NO: 4746897 - DNA, 25 bp, Homo sapien
agcaagattccatagggtgcaaaca

SEQ ID NO: 4746898 - DNA, 25 bp, Homo sapien
caagattccatagggtgcaaacact

SEQ ID NO: 4746899 - DNA, 25 bp, Homo sapien
gcaagattccatagggtgcaaacac

SEQ ID NO: 4746900 - DNA, 25 bp, Homo sapien
caggctgggcaatcaagtaatctgc

SEQ ID NO: 4746901 - DNA, 25 bp, Homo sapien
aaatttaattagcacttcagtgttt

SEQ ID NO: 4746902 - DNA, 25 bp, Homo sapien
cccaggctgggcaatcaagtaatct

SEQ ID NO: 4746903 - DNA, 25 bp, Homo sapien
tagcacttcagtgttttacagaaaa

SEQ ID NO: 4746904 - DNA, 25 bp, Homo sapien
catccgtacacttcgatccgcatcc

SEQ ID NO: 4746905 - DNA, 25 bp, Homo sapien
tccgtacacttcgatccgcatccca

SEQ ID NO: 4746906 - DNA, 25 bp, Homo sapien
atccgtacacttcgatccgcatccc

SEQ ID NO: 4746907 - DNA, 25 bp, Homo sapien
acatccgtacacttcgatccgcatc

SEQ ID NO: 4746908 - DNA, 25 bp, Homo sapien
ccctggactaggaaacaaggagcgc

SEQ ID NO: 4746909 - DNA, 25 bp, Homo sapien
ccggcactccctggactaggaaaca

SEQ ID NO: 4746910 - DNA, 25 bp, Homo sapien
agaacaccggcactccctggactag

SEQ ID NO: 4746911 - DNA, 25 bp, Homo sapien
cactccctggactaggaaacaagga

SEQ ID NO: 4746912 - DNA, 25 bp, Homo sapien
ctcagacggggtccgaagaaattca

SEQ ID NO: 4746913 - DNA, 25 bp, Homo sapien
gtccgaagaaattcagatcggtgaa

SEQ ID NO: 4746914 - DNA, 25 bp, Homo sapien
acgactcctgaggacaaccgactca

SEQ ID NO: 4746915 - DNA, 25 bp, Homo sapien
tcctgaggacaaccgactcagacgg

SEQ ID NO: 4746916 - DNA, 25 bp, Homo sapien
attttgccctgagatggttctgtgg

SEQ ID NO: 4746917 - DNA, 25 bp, Homo sapien
cattttgccctgagatggttctgtg

SEQ ID NO: 4746918 - DNA, 25 bp, Homo sapien
ttttgccctgagatggttctgtgga

SEQ ID NO: 4746919 - DNA, 25 bp, Homo sapien
acacaaggaccggcctgtgagaaac

SEQ ID NO: 4746920 - DNA, 25 bp, Homo sapien
gagaaacttccagtagaaaatgctg

SEQ ID NO: 4746921 - DNA, 25 bp, Homo sapien
caaggaccggcctgtgagaaacttc

SEQ ID NO: 4746922 - DNA, 25 bp, Homo sapien
gctcactttgcaaaccacacaagga

SEQ ID NO: 4746923 - DNA, 25 bp, Homo sapien
gaattccaatcagagacccgagagc

SEQ ID NO: 4746924 - DNA, 25 bp, Homo sapien
tgtcatccccggacatgtcctcaaa

SEQ ID NO: 4746925 - DNA, 25 bp, Homo sapien
gttgatcctcaggtcaatctgtcct

SEQ ID NO: 4746926 - DNA, 25 bp, Homo sapien
aaatcgtatgccgttgatcctcagg

SEQ ID NO: 4746927 - DNA, 25 bp, Homo sapien
gactgactagtagcagcaacttaga

SEQ ID NO: 4746928 - DNA, 25 bp, Homo sapien
tattttgagacagcgatgcgctgcc

SEQ ID NO: 4746929 - DNA, 25 bp, Homo sapien
gcaacttagaaaccgagtcagcagc

SEQ ID NO: 4746930 - DNA, 25 bp, Homo sapien
aaagccgggttaaagtcgcagacag

SEQ ID NO: 4746931 - DNA, 25 bp, Homo sapien
gttgatgtatacttattcatagtag

SEQ ID NO: 4746932 - DNA, 25 bp, Homo sapien
ctaggttgtccaatttgttgatgta

SEQ ID NO: 4746933 - DNA, 25 bp, Homo sapien
tagtctgttaagatcctttgtattt

SEQ ID NO: 4746934 - DNA, 25 bp, Homo sapien
tattcatagtagtctgttaagatcc

SEQ ID NO: 4746935 - DNA, 25 bp, Homo sapien
actgcgcccagccccctttagcatt

SEQ ID NO: 4746936 - DNA, 25 bp, Homo sapien
ctgcgcccagccccctttagcatta

SEQ ID NO: 4746937 - DNA, 25 bp, Homo sapien
cttttcccctccagtagtctctagt

SEQ ID NO: 4746938 - DNA, 25 bp, Homo sapien
tcccctccagtagtctctagtgtct

SEQ ID NO: 4746939 - DNA, 25 bp, Homo sapien
ccactccctcataacataaattttg

SEQ ID NO: 4746940 - DNA, 25 bp, Homo sapien
ttataagaaacccactccctcataa

SEQ ID NO: 4746941 - DNA, 25 bp, Homo sapien
tcctggtacaggaaggttaatacga

SEQ ID NO: 4746942 - DNA, 25 bp, Homo sapien
gctggaaatgcattctgttctcctg

SEQ ID NO: 4746943 - DNA, 25 bp, Homo sapien
ctaggagagagctggaaatgcattc

SEQ ID NO: 4746944 - DNA, 25 bp, Homo sapien
gtacaggaaggttaatacgatgacc

SEQ ID NO: 4746945 - DNA, 25 bp, Homo sapien
ggcgatactgcttccagtttctccc

SEQ ID NO: 4746946 - DNA, 25 bp, Homo sapien
tttcttctcggcgatactgcttcca

SEQ ID NO: 4746947 - DNA, 25 bp, Homo sapien
ccatatcctccttgggtggcgacag

SEQ ID NO: 4746948 - DNA, 25 bp, Homo sapien
catatcctccttgggtggcgacagc

SEQ ID NO: 4746949 - DNA, 25 bp, Homo sapien
aagcaggttctggtgcactctgctc

SEQ ID NO: 4746950 - DNA, 25 bp, Homo sapien
caggttctggtgcactctgctctct

SEQ ID NO: 4746951 - DNA, 25 bp, Homo sapien
agcaggttctggtgcactctgctct

SEQ ID NO: 4746952 - DNA, 25 bp, Homo sapien
tcttctcggcatccctcacagtttg

SEQ ID NO: 4746953 - DNA, 25 bp, Homo sapien
tcggcatccctcacagtttgttagt

SEQ ID NO: 4746954 - DNA, 25 bp, Homo sapien
ttctcggcatccctcacagtttgtt

SEQ ID NO: 4746955 - DNA, 25 bp, Homo sapien
gccatccctcttctcggcatccctc

SEQ ID NO: 4746956 - DNA, 25 bp, Homo sapien
tctgtgtgcctttgttaaaggcagc

SEQ ID NO: 4746957 - DNA, 25 bp, Homo sapien
tgtgcactgctggatagcactagtc

SEQ ID NO: 4746958 - DNA, 25 bp, Homo sapien
gctggatagcactagtctgtgtgcc

SEQ ID NO: 4746959 - DNA, 25 bp, Homo sapien
ctttgatggttggtatagaaggcca

SEQ ID NO: 4746960 - DNA, 25 bp, Homo sapien
ctttcttgccaagaactgcatgaca

SEQ ID NO: 4746961 - DNA, 25 bp, Homo sapien
aggaagaatgcaaactgtaagagag

SEQ ID NO: 4746962 - DNA, 25 bp, Homo sapien
gttgagctgtcacatgttatcactg

SEQ ID NO: 4746963 - DNA, 25 bp, Homo sapien
aactgtaagagagcgatgcgaaaat

SEQ ID NO: 4746964 - DNA, 25 bp, Homo sapien
tccttgtctgcgaaattcattccca

SEQ ID NO: 4746965 - DNA, 25 bp, Homo sapien
tgcacgtgagagttcatggttttca

SEQ ID NO: 4746966 - DNA, 25 bp, Homo sapien
tataaagcccgtttgaatcattaac

SEQ ID NO: 4746967 - DNA, 25 bp, Homo sapien
gctccctgattgtactctgcacgtg

SEQ ID NO: 4746968 - DNA, 25 bp, Homo sapien
cagcagggcgtccagtcctgtcact

SEQ ID NO: 4746969 - DNA, 25 bp, Homo sapien
gcagcagggcgtccagtcctgtcac

SEQ ID NO: 4746970 - DNA, 25 bp, Homo sapien
ctgcagcaatagaatctaaagtaac

SEQ ID NO: 4746971 - DNA, 25 bp, Homo sapien
cactgaggctctgcagcaatagaat

SEQ ID NO: 4746972 - DNA, 25 bp, Homo sapien
gaggctctgcagcaatagaatctaa

SEQ ID NO: 4746973 - DNA, 25 bp, Homo sapien
ttcagtgataatgaccatccactga

SEQ ID NO: 4746974 - DNA, 25 bp, Homo sapien
atctcttcgattaagccttgaaaac

SEQ ID NO: 4746975 - DNA, 25 bp, Homo sapien
tgaaaaccccgggccgtggctgctg

SEQ ID NO: 4746976 - DNA, 25 bp, Homo sapien
catctcttcgattaagccttgaaaa

SEQ ID NO: 4746977 - DNA, 25 bp, Homo sapien
gccgtggctgctggacagctctgag

SEQ ID NO: 4746978 - DNA, 25 bp, Homo sapien
agaggccagtggggcatcacagtca

SEQ ID NO: 4746979 - DNA, 25 bp, Homo sapien
aggcagaggccagtggggcatcaca

SEQ ID NO: 4746980 - DNA, 25 bp, Homo sapien
ctaggcaaggcagaggccagtgggg

SEQ ID NO: 4746981 - DNA, 25 bp, Homo sapien
cagaggccagtggggcatcacagtc

SEQ ID NO: 4746982 - DNA, 25 bp, Homo sapien
ttcttcaggccacgtctggatgttc

SEQ ID NO: 4746983 - DNA, 25 bp, Homo sapien
cttcttcaggccacgtctggatgtt

SEQ ID NO: 4746984 - DNA, 25 bp, Homo sapien
tcttcaggccacgtctggatgttca

SEQ ID NO: 4746985 - DNA, 25 bp, Homo sapien
cttcaggccacgtctggatgttcat

SEQ ID NO: 4746986 - DNA, 25 bp, Homo sapien
ggtcctggcattcaattccttccat

SEQ ID NO: 4746987 - DNA, 25 bp, Homo sapien
tttcctgtcactctctgcactacag

SEQ ID NO: 4746988 - DNA, 25 bp, Homo sapien
cctttaatcggagtggtcttctcac

SEQ ID NO: 4746989 - DNA, 25 bp, Homo sapien
aattccttccatcgcctgtttcctg

SEQ ID NO: 4746990 - DNA, 25 bp, Homo sapien
tgaatgtgggatgcatgcaccaacg

SEQ ID NO: 4746991 - DNA, 25 bp, Homo sapien
atgcaccaacgctccttgaccgctc

SEQ ID NO: 4746992 - DNA, 25 bp, Homo sapien
tgtttcctgaatgtgggatgcatgc

SEQ ID NO: 4746993 - DNA, 25 bp, Homo sapien
tccttgaccgctcacccgatgacat

SEQ ID NO: 4746994 - DNA, 25 bp, Homo sapien
gcccctcctgtctgcgagttcccat

SEQ ID NO: 4746995 - DNA, 25 bp, Homo sapien
agcccctcctgtctgcgagttccca

SEQ ID NO: 4746996 - DNA, 25 bp, Homo sapien
gcagcccctcctgtctgcgagttcc

SEQ ID NO: 4746997 - DNA, 25 bp, Homo sapien
tgcagcccctcctgtctgcgagttc

SEQ ID NO: 4746998 - DNA, 25 bp, Homo sapien
gaaaatcatgtggagatgtcatcac

SEQ ID NO: 4746999 - DNA, 25 bp, Homo sapien
ttacgaatgtatccacagctgtggg

SEQ ID NO: 4747000 - DNA, 25 bp, Homo sapien
taaatgatctttccacgggtacaaa

SEQ ID NO: 4747001 - DNA, 25 bp, Homo sapien
taaagatgagctgctaataaagggc

SEQ ID NO: 4747002 - DNA, 25 bp, Homo sapien
tggccactggcgtttattggaactt

SEQ ID NO: 4747003 - DNA, 25 bp, Homo sapien
tggcgtttattggaacttatttcga

SEQ ID NO: 4747004 - DNA, 25 bp, Homo sapien
gccactggcgtttattggaacttat

SEQ ID NO: 4747005 - DNA, 25 bp, Homo sapien
catggccactggcgtttattggaac

SEQ ID NO: 4747006 - DNA, 25 bp, Homo sapien
gaaagacaactctctgctagagatt

SEQ ID NO: 4747007 - DNA, 25 bp, Homo sapien
taaaaattctaatctcatggtttga

SEQ ID NO: 4747008 - DNA, 25 bp, Homo sapien
cattatgttttgctcatctgtctgg

SEQ ID NO: 4747009 - DNA, 25 bp, Homo sapien
gctagagatttactccaagccaaaa

SEQ ID NO: 4747010 - DNA, 25 bp, Homo sapien
cttgaggacggcccaggccactgaa

SEQ ID NO: 4747011 - DNA, 25 bp, Homo sapien
ttgaggacggcccaggccactgaag

SEQ ID NO: 4747012 - DNA, 25 bp, Homo sapien
cagcaacgcgagtcaagaagcgagc

SEQ ID NO: 4747013 - DNA, 25 bp, Homo sapien
ggactcgcgccgcagctttctggag

SEQ ID NO: 4747014 - DNA, 25 bp, Homo sapien
gccccagctgcgtctccgaggtcgg

SEQ ID NO: 4747015 - DNA, 25 bp, Homo sapien
gttcaggcgcgtcccggacactagg

SEQ ID NO: 4747016 - DNA, 25 bp, Homo sapien
ggcagacgcgcgcacactttgattt

SEQ ID NO: 4747017 - DNA, 25 bp, Homo sapien
tgtagagaaccaagctgggaaaccg

SEQ ID NO: 4747018 - DNA, 25 bp, Homo sapien
taactctgcggcgtgtacttgggca

SEQ ID NO: 4747019 - DNA, 25 bp, Homo sapien
aaagagcaacccctgcaagtgtagg

SEQ ID NO: 4747020 - DNA, 25 bp, Homo sapien
cactgaaccttatgtttccgtaata

SEQ ID NO: 4747021 - DNA, 25 bp, Homo sapien
tcactgaaccttatgtttccgtaat

SEQ ID NO: 4747022 - DNA, 25 bp, Homo sapien
ctttctcgcactctggagtggcagt

SEQ ID NO: 4747023 - DNA, 25 bp, Homo sapien
acatgcaaagcagagagtccgcatc

SEQ ID NO: 4747024 - DNA, 25 bp, Homo sapien
ctccctttctcgcactctggagtgg

SEQ ID NO: 4747025 - DNA, 25 bp, Homo sapien
aaagcagagagtccgcatcccactg

SEQ ID NO: 4747026 - DNA, 25 bp, Homo sapien
gggcagcctttatggaggttgctga

SEQ ID NO: 4747027 - DNA, 25 bp, Homo sapien
tttatggaggttgctgagggccgtg

SEQ ID NO: 4747028 - DNA, 25 bp, Homo sapien
ctttatggaggttgctgagggccgt

SEQ ID NO: 4747029 - DNA, 25 bp, Homo sapien
cagcctttatggaggttgctgaggg

SEQ ID NO: 4747030 - DNA, 25 bp, Homo sapien
aagtagttctgggtgaatggagtag

SEQ ID NO: 4747031 - DNA, 25 bp, Homo sapien
ggcttctgatggtgggactctgtag

SEQ ID NO: 4747032 - DNA, 25 bp, Homo sapien
tgggtgaatggagtagggtatgcct

SEQ ID NO: 4747033 - DNA, 25 bp, Homo sapien
gcttctgatggtgggactctgtaga

SEQ ID NO: 4747034 - DNA, 25 bp, Homo sapien
tgacaataggtggaaaagcaaggac

SEQ ID NO: 4747035 - DNA, 25 bp, Homo sapien
aaggactagagaaccccaggcatga

SEQ ID NO: 4747036 - DNA, 25 bp, Homo sapien
taatatacacgtagccccaggactg

SEQ ID NO: 4747037 - DNA, 25 bp, Homo sapien
gcatgagtcgaagtctggtgacctt

SEQ ID NO: 4747038 - DNA, 25 bp, Homo sapien
tttcaatggtggagaggccagtgcc

SEQ ID NO: 4747039 - DNA, 25 bp, Homo sapien
tctgggccctgtccatatgggaaag

SEQ ID NO: 4747040 - DNA, 25 bp, Homo sapien
cacaaatcatggacaggaggagcca

SEQ ID NO: 4747041 - DNA, 25 bp, Homo sapien
tagatgacaatggaaatggccctgc

SEQ ID NO: 4747042 - DNA, 25 bp, Homo sapien
catactgctttcaacaaatcgggca

SEQ ID NO: 4747043 - DNA, 25 bp, Homo sapien
tcatactgctttcaacaaatcgggc

SEQ ID NO: 4747044 - DNA, 25 bp, Homo sapien
gggcttgataattgcctcctccata

SEQ ID NO: 4747045 - DNA, 25 bp, Homo sapien
ttggcaaagtatggtgcatccagcc

SEQ ID NO: 4747046 - DNA, 25 bp, Homo sapien
ggtttataaccattcgtgtaacaca

SEQ ID NO: 4747047 - DNA, 25 bp, Homo sapien
tcctccatataccttctgaggtcgg

SEQ ID NO: 4747048 - DNA, 25 bp, Homo sapien
gtttactactagacaagatgctatg

SEQ ID NO: 4747049 - DNA, 25 bp, Homo sapien
taatacttagcagcatattgagcca

SEQ ID NO: 4747050 - DNA, 25 bp, Homo sapien
cgctgatgctatagacaaaaattta

SEQ ID NO: 4747051 - DNA, 25 bp, Homo sapien
aataatgagaacacgcaggacaacg

SEQ ID NO: 4747052 - DNA, 25 bp, Homo sapien
agaagcctggtggatattcatttct

SEQ ID NO: 4747053 - DNA, 25 bp, Homo sapien
aagcctggtggatattcatttctgc

SEQ ID NO: 4747054 - DNA, 25 bp, Homo sapien
ttctgcaagaatactcagggagttc

SEQ ID NO: 4747055 - DNA, 25 bp, Homo sapien
gaatactcagggagttctatcatca

SEQ ID NO: 4747056 - DNA, 25 bp, Homo sapien
tcccctgagcgagttctaagatgtg

SEQ ID NO: 4747057 - DNA, 25 bp, Homo sapien
tgaaggctcctgatcatcctggatg

SEQ ID NO: 4747058 - DNA, 25 bp, Homo sapien
gtgtgatgtaccctaagagctgcct

SEQ ID NO: 4747059 - DNA, 25 bp, Homo sapien
aagttcccagcctatgtcacatgag

SEQ ID NO: 4747060 - DNA, 25 bp, Homo sapien
tttgagggctgaattatgggcaaaa

SEQ ID NO: 4747061 - DNA, 25 bp, Homo sapien
tgaattctctgatgtgctctcaggg

SEQ ID NO: 4747062 - DNA, 25 bp, Homo sapien
tgtgaattctctgatgtgctctcag

SEQ ID NO: 4747063 - DNA, 25 bp, Homo sapien
cattcatagggttttctacctgtgt

SEQ ID NO: 4747064 - DNA, 25 bp, Homo sapien
agggttttctacctgtgtgaattct

SEQ ID NO: 4747065 - DNA, 25 bp, Homo sapien
gatattcttagggagctatcctgca

SEQ ID NO: 4747066 - DNA, 25 bp, Homo sapien
ttatacccggcagcagtttctttga

SEQ ID NO: 4747067 - DNA, 25 bp, Homo sapien
cagtgtagactaccacaatcctgga

SEQ ID NO: 4747068 - DNA, 25 bp, Homo sapien
tcatgtaggcatactcagtgtagac

SEQ ID NO: 4747069 - DNA, 25 bp, Homo sapien
ttttgctctatgagaacatcaatct

SEQ ID NO: 4747070 - DNA, 25 bp, Homo sapien
tcatcgtttttgctctatgagaaca

SEQ ID NO: 4747071 - DNA, 25 bp, Homo sapien
tatgagaacatcaatctttctattt

SEQ ID NO: 4747072 - DNA, 25 bp, Homo sapien
tctatgagaacatcaatctttctat

SEQ ID NO: 4747073 - DNA, 25 bp, Homo sapien
tcctgtttccaggttctgacaacaa

SEQ ID NO: 4747074 - DNA, 25 bp, Homo sapien
tgtttccaggttctgacaacaaatt

SEQ ID NO: 4747075 - DNA, 25 bp, Homo sapien
cctgtttccaggttctgacaacaaa

SEQ ID NO: 4747076 - DNA, 25 bp, Homo sapien
ctgtttccaggttctgacaacaaat

SEQ ID NO: 4747077 - DNA, 25 bp, Homo sapien
tctgctgtaggtggtaaaggctttc

SEQ ID NO: 4747078 - DNA, 25 bp, Homo sapien
tttggttgccacaaggtcacctggt

SEQ ID NO: 4747079 - DNA, 25 bp, Homo sapien
agacctttgtgttccccggctgctg

SEQ ID NO: 4747080 - DNA, 25 bp, Homo sapien
gggatctggcagcaaccgttcctcc

SEQ ID NO: 4747081 - DNA, 25 bp, Homo sapien
ctggagcaaatgtgagtggaactaa

SEQ ID NO: 4747082 - DNA, 25 bp, Homo sapien
tatctttattttccgggcctgactg

SEQ ID NO: 4747083 - DNA, 25 bp, Homo sapien
aagtgcattagtagatctcccatgg

SEQ ID NO: 4747084 - DNA, 25 bp, Homo sapien
catgggacgtttttgggacagtgga

SEQ ID NO: 4747085 - DNA, 25 bp, Homo sapien
tggagatctgccgatcagcactgag

SEQ ID NO: 4747086 - DNA, 25 bp, Homo sapien
ggagatctgccgatcagcactgagc

SEQ ID NO: 4747087 - DNA, 25 bp, Homo sapien
gcagcagctgtctggactgactcgg

SEQ ID NO: 4747088 - DNA, 25 bp, Homo sapien
gcagctgtctggactgactcggtac

SEQ ID NO: 4747089 - DNA, 25 bp, Homo sapien
tggaacaccgttctggacattggcc

SEQ ID NO: 4747090 - DNA, 25 bp, Homo sapien
tagtgttaagatcactggtgagcca

SEQ ID NO: 4747091 - DNA, 25 bp, Homo sapien
ggttacagtaacctcaacagtctgg

SEQ ID NO: 4747092 - DNA, 25 bp, Homo sapien
gacaagtgggatccggctagactaa

SEQ ID NO: 4747093 - DNA, 25 bp, Homo sapien
cagaacactgggtactgagctggtc

SEQ ID NO: 4747094 - DNA, 25 bp, Homo sapien
cttccagagctgcagaacactgggt

SEQ ID NO: 4747095 - DNA, 25 bp, Homo sapien
cagagctgcagaacactgggtactg

SEQ ID NO: 4747096 - DNA, 25 bp, Homo sapien
tccagagctgcagaacactgggtac

SEQ ID NO: 4747097 - DNA, 25 bp, Homo sapien
ttagcatctgcaggtatgccgacat

SEQ ID NO: 4747098 - DNA, 25 bp, Homo sapien
gaattagcatctgcaggtatgccga

SEQ ID NO: 4747099 - DNA, 25 bp, Homo sapien
aattagcatctgcaggtatgccgac

SEQ ID NO: 4747100 - DNA, 25 bp, Homo sapien
agaattagcatctgcaggtatgccg

SEQ ID NO: 4747101 - DNA, 25 bp, Homo sapien
cccacttgccaggagtcccttcttc

SEQ ID NO: 4747102 - DNA, 25 bp, Homo sapien
tcccacttgccaggagtcccttctt

SEQ ID NO: 4747103 - DNA, 25 bp, Homo sapien
gagatcaccatttgatgctaaaatt

SEQ ID NO: 4747104 - DNA, 25 bp, Homo sapien
tggtcctccgctcggagagatcacc

SEQ ID NO: 4747105 - DNA, 25 bp, Homo sapien
tgacctgcttcatttgggagcaggg

SEQ ID NO: 4747106 - DNA, 25 bp, Homo sapien
tgggagcagggctagttcactcttc

SEQ ID NO: 4747107 - DNA, 25 bp, Homo sapien
tggagcccactgcatgaatcacgat

SEQ ID NO: 4747108 - DNA, 25 bp, Homo sapien
gggctggactgatgactctgcttat

SEQ ID NO: 4747109 - DNA, 25 bp, Homo sapien
gctgcctgcgttgctcttcatagtg

SEQ ID NO: 4747110 - DNA, 25 bp, Homo sapien
tgaggtcccaattcatcactggctg

SEQ ID NO: 4747111 - DNA, 25 bp, Homo sapien
gataaaaagtggttccactgccagt

SEQ ID NO: 4747112 - DNA, 25 bp, Homo sapien
taaaaagtggttccactgccagtgt

SEQ ID NO: 4747113 - DNA, 25 bp, Homo sapien
aaaaagtggttccactgccagtgtc

SEQ ID NO: 4747114 - DNA, 25 bp, Homo sapien
aaaagtggttccactgccagtgtca

SEQ ID NO: 4747115 - DNA, 25 bp, Homo sapien
cactgcccatcgtttaatccagcac

SEQ ID NO: 4747116 - DNA, 25 bp, Homo sapien
caaaataataggtgtcacctgaatc

SEQ ID NO: 4747117 - DNA, 25 bp, Homo sapien
tcacctgaatcaatgagcacagcca

SEQ ID NO: 4747118 - DNA, 25 bp, Homo sapien
tgaacagctgtgtcatcgtccacca

SEQ ID NO: 4747119 - DNA, 25 bp, Homo sapien
ctggaagagactcagtttgagcttg

SEQ ID NO: 4747120 - DNA, 25 bp, Homo sapien
tgaagttcgccgaaaagcaaatgtc

SEQ ID NO: 4747121 - DNA, 25 bp, Homo sapien
ctgaaccacgttgaagttcgccgaa

SEQ ID NO: 4747122 - DNA, 25 bp, Homo sapien
cacgttgaagttcgccgaaaagcaa

SEQ ID NO: 4747123 - DNA, 25 bp, Homo sapien
tgaaccacgttgaagttcgccgaaa

SEQ ID NO: 4747124 - DNA, 25 bp, Homo sapien
ctgctctgttccacgttcaaaattg

SEQ ID NO: 4747125 - DNA, 25 bp, Homo sapien
gctctgttccacgttcaaaattgaa

SEQ ID NO: 4747126 - DNA, 25 bp, Homo sapien
ttcaaaattgaaaagtgacagacac

SEQ ID NO: 4747127 - DNA, 25 bp, Homo sapien
ctgttccacgttcaaaattgaaaag

SEQ ID NO: 4747128 - DNA, 25 bp, Homo sapien
gtcctccccagagttgcctggcaga

SEQ ID NO: 4747129 - DNA, 25 bp, Homo sapien
tgtcctccccagagttgcctggcag

SEQ ID NO: 4747130 - DNA, 25 bp, Homo sapien
tcctccccagagttgcctggcagag

SEQ ID NO: 4747131 - DNA, 25 bp, Homo sapien
cagagacaccagcttaactgtggtt

SEQ ID NO: 4747132 - DNA, 25 bp, Homo sapien
gaggatgatgtccagaacccagaga

SEQ ID NO: 4747133 - DNA, 25 bp, Homo sapien
tatgaaaacctgtgtctattgtcct

SEQ ID NO: 4747134 - DNA, 25 bp, Homo sapien
cagtgaacccatcagtaattcagaa

SEQ ID NO: 4747135 - DNA, 25 bp, Homo sapien
tcttcctcacttcaatgacagtgtc

SEQ ID NO: 4747136 - DNA, 25 bp, Homo sapien
tagccccatagaagttagggtgagg

SEQ ID NO: 4747137 - DNA, 25 bp, Homo sapien
gtgtctttggaaatagccccataga

SEQ ID NO: 4747138 - DNA, 25 bp, Homo sapien
cacttcaatgacagtgtctttggaa

SEQ ID NO: 4747139 - DNA, 25 bp, Homo sapien
cagggtgctgttcatagtaaaactt

SEQ ID NO: 4747140 - DNA, 25 bp, Homo sapien
agggtgctgttcatagtaaaactta

SEQ ID NO: 4747141 - DNA, 25 bp, Homo sapien
gcagggtgctgttcatagtaaaact

SEQ ID NO: 4747142 - DNA, 25 bp, Homo sapien
gacaactaaacatgagctttccctt

SEQ ID NO: 4747143 - DNA, 25 bp, Homo sapien
cactgacaactaaacatgagctttc

SEQ ID NO: 4747144 - DNA, 25 bp, Homo sapien
gctgagatacactgacaactaaaca

SEQ ID NO: 4747145 - DNA, 25 bp, Homo sapien
gatacactgacaactaaacatgagc

SEQ ID NO: 4747146 - DNA, 25 bp, Homo sapien
gcgatcttccgggtgtcggaattcc

SEQ ID NO: 4747147 - DNA, 25 bp, Homo sapien
tttcttggctaattcggtaacatcc

SEQ ID NO: 4747148 - DNA, 25 bp, Homo sapien
gctaattcggtaacatccactccat

SEQ ID NO: 4747149 - DNA, 25 bp, Homo sapien
tgaatgcccgcgatcttccgggtgt

SEQ ID NO: 4747150 - DNA, 25 bp, Homo sapien
tcgatgaggacggaatgccagtgct

SEQ ID NO: 4747151 - DNA, 25 bp, Homo sapien
gaggagctcgatgaggacggaatgc

SEQ ID NO: 4747152 - DNA, 25 bp, Homo sapien
gtcacaggagcaatagtggaaggca

SEQ ID NO: 4747153 - DNA, 25 bp, Homo sapien
gcaatagtggaaggcagcttagcat

SEQ ID NO: 4747154 - DNA, 25 bp, Homo sapien
tacagcagagcactttgtccatcaa

SEQ ID NO: 4747155 - DNA, 25 bp, Homo sapien
taattaattccagagtaatgtgatt

SEQ ID NO: 4747156 - DNA, 25 bp, Homo sapien
tatacagcagagcactttgtccatc

SEQ ID NO: 4747157 - DNA, 25 bp, Homo sapien
ttaattccagagtaatgtgatttcc

SEQ ID NO: 4747158 - DNA, 25 bp, Homo sapien
ctaggaaagaagatattaaaaagca

SEQ ID NO: 4747159 - DNA, 25 bp, Homo sapien
taggaaagaagatattaaaaagcaa

SEQ ID NO: 4747160 - DNA, 25 bp, Homo sapien
aggaaagaagatattaaaaagcaat

SEQ ID NO: 4747161 - DNA, 25 bp, Homo sapien
caacattgagaggaaaacattgctt

SEQ ID NO: 4747162 - DNA, 25 bp, Homo sapien
catcaacattgagaggaaaacattg

SEQ ID NO: 4747163 - DNA, 25 bp, Homo sapien
tcaacattgagaggaaaacattgct

SEQ ID NO: 4747164 - DNA, 25 bp, Homo sapien
aacatcaacattgagaggaaaacat

SEQ ID NO: 4747165 - DNA, 25 bp, Homo sapien
tccgtacacttcgatccgcatccca

SEQ ID NO: 4747166 - DNA, 25 bp, Homo sapien
atccgtacacttcgatccgcatccc

SEQ ID NO: 4747167 - DNA, 25 bp, Homo sapien
catccgtacacttcgatccgcatcc

SEQ ID NO: 4747168 - DNA, 25 bp, Homo sapien
acatccgtacacttcgatccgcatc

SEQ ID NO: 4747169 - DNA, 25 bp, Homo sapien
caggtttccaattcatccaagagac

SEQ ID NO: 4747170 - DNA, 25 bp, Homo sapien
gttttgcatattcagtttagaggga

SEQ ID NO: 4747171 - DNA, 25 bp, Homo sapien
agggaatcacagagatgggatcaga

SEQ ID NO: 4747172 - DNA, 25 bp, Homo sapien
cagaactagggcatccaatatcagg

SEQ ID NO: 4747173 - DNA, 25 bp, Homo sapien
gcgattatgcgaaaaccaagcctct

SEQ ID NO: 4747174 - DNA, 25 bp, Homo sapien
cacagcgattatgcgaaaaccaagc

SEQ ID NO: 4747175 - DNA, 25 bp, Homo sapien
aaaccaagcctcttaacatcatacc

SEQ ID NO: 4747176 - DNA, 25 bp, Homo sapien
cttcccacagcgattatgcgaaaac

SEQ ID NO: 4747177 - DNA, 25 bp, Homo sapien
aggcacaccagcgatgccgaggatg

SEQ ID NO: 4747178 - DNA, 25 bp, Homo sapien
tccccaagggtgttgtgtggtcgct

SEQ ID NO: 4747179 - DNA, 25 bp, Homo sapien
tgtggtcgctgtctcccatgacact

SEQ ID NO: 4747180 - DNA, 25 bp, Homo sapien
tctggaatctgaagcttgcagactg

SEQ ID NO: 4747181 - DNA, 25 bp, Homo sapien
tttacacgactcctgaggacaaccg

SEQ ID NO: 4747182 - DNA, 25 bp, Homo sapien
agaacaccggcactccctggactag

SEQ ID NO: 4747183 - DNA, 25 bp, Homo sapien
ccctggactaggaaacaaggagcgc

SEQ ID NO: 4747184 - DNA, 25 bp, Homo sapien
gggtccgaagaaattcagatcggtg

SEQ ID NO: 4747185 - DNA, 25 bp, Homo sapien
attttgccctgagatggttctgtgg

SEQ ID NO: 4747186 - DNA, 25 bp, Homo sapien
cattttgccctgagatggttctgtg

SEQ ID NO: 4747187 - DNA, 25 bp, Homo sapien
ttttgccctgagatggttctgtgga

SEQ ID NO: 4747188 - DNA, 25 bp, Homo sapien
aatattggccctcctatgttcactg

SEQ ID NO: 4747189 - DNA, 25 bp, Homo sapien
gatccagcaatcttactttcgggta

SEQ ID NO: 4747190 - DNA, 25 bp, Homo sapien
agcagatcgctagaacttgtttaac

SEQ ID NO: 4747191 - DNA, 25 bp, Homo sapien
ggaaaacattatggcaaatcctcaa

SEQ ID NO: 4747192 - DNA, 25 bp, Homo sapien
tggaactgtccaacagagtcctgca

SEQ ID NO: 4747193 - DNA, 25 bp, Homo sapien
aactgggagaacaacaggggccact

SEQ ID NO: 4747194 - DNA, 25 bp, Homo sapien
cgtcttccaagttggagcaactggg

SEQ ID NO: 4747195 - DNA, 25 bp, Homo sapien
tgtcctctgggattccgtcttccaa

SEQ ID NO: 4747196 - DNA, 25 bp, Homo sapien
gcagctgggtgtttcatagccaaca

SEQ ID NO: 4747197 - DNA, 25 bp, Homo sapien
caacaggcctacacataccacagaa

SEQ ID NO: 4747198 - DNA, 25 bp, Homo sapien
gtgtctggtcctactcaagtctgca

SEQ ID NO: 4747199 - DNA, 25 bp, Homo sapien
caagtctgcagagggtcagtttcct

SEQ ID NO: 4747200 - DNA, 25 bp, Homo sapien
ctcagttgccttcacaggttctgca

SEQ ID NO: 4747201 - DNA, 25 bp, Homo sapien
taattctaggtcagtcttctcagtt

SEQ ID NO: 4747202 - DNA, 25 bp, Homo sapien
ctaattctaggtcagtcttctcagt

SEQ ID NO: 4747203 - DNA, 25 bp, Homo sapien
aattctaggtcagtcttctcagttg

SEQ ID NO: 4747204 - DNA, 25 bp, Homo sapien
accaggaggctgacataaaatatct

SEQ ID NO: 4747205 - DNA, 25 bp, Homo sapien
gttgccaggtaagactgactacagt

SEQ ID NO: 4747206 - DNA, 25 bp, Homo sapien
aagcgagctccctgtgtgtagcaca

SEQ ID NO: 4747207 - DNA, 25 bp, Homo sapien
gagctgggtctggtttttataatcc

SEQ ID NO: 4747208 - DNA, 25 bp, Homo sapien
tttattcaatccactactgataagc

SEQ ID NO: 4747209 - DNA, 25 bp, Homo sapien
ccatgtttacgccttcttttgagaa

SEQ ID NO: 4747210 - DNA, 25 bp, Homo sapien
ctgccatgatgaacacacaagtgta

SEQ ID NO: 4747211 - DNA, 25 bp, Homo sapien
actactgataagcaccaaggttgat

SEQ ID NO: 4747212 - DNA, 25 bp, Homo sapien
ctaggagagagctggaaatgcattc

SEQ ID NO: 4747213 - DNA, 25 bp, Homo sapien
tcctggtacaggaaggttaatacga

SEQ ID NO: 4747214 - DNA, 25 bp, Homo sapien
gctggaaatgcattctgttctcctg

SEQ ID NO: 4747215 - DNA, 25 bp, Homo sapien
gtacaggaaggttaatacgatgacc

SEQ ID NO: 4747216 - DNA, 25 bp, Homo sapien
ggcgatactgcttccagtttctccc

SEQ ID NO: 4747217 - DNA, 25 bp, Homo sapien
tttcttctcggcgatactgcttcca

SEQ ID NO: 4747218 - DNA, 25 bp, Homo sapien
ccatatcctccttgggtggcgacag

SEQ ID NO: 4747219 - DNA, 25 bp, Homo sapien
catatcctccttgggtggcgacagc

SEQ ID NO: 4747220 - DNA, 25 bp, Homo sapien
aagcaggttctggtgcactctgctc

SEQ ID NO: 4747221 - DNA, 25 bp, Homo sapien
caggttctggtgcactctgctctct

SEQ ID NO: 4747222 - DNA, 25 bp, Homo sapien
agcaggttctggtgcactctgctct

SEQ ID NO: 4747223 - DNA, 25 bp, Homo sapien
gttgggtattgaagaagatgcatgc

SEQ ID NO: 4747224 - DNA, 25 bp, Homo sapien
ctgttgggtattgaagaagatgcat

SEQ ID NO: 4747225 - DNA, 25 bp, Homo sapien
tgttgggtattgaagaagatgcatg

SEQ ID NO: 4747226 - DNA, 25 bp, Homo sapien
tcttctcggcatccctcacagtttg

SEQ ID NO: 4747227 - DNA, 25 bp, Homo sapien
tcggcatccctcacagtttgttagt

SEQ ID NO: 4747228 - DNA, 25 bp, Homo sapien
ttctcggcatccctcacagtttgtt

SEQ ID NO: 4747229 - DNA, 25 bp, Homo sapien
gccatccctcttctcggcatccctc

SEQ ID NO: 4747230 - DNA, 25 bp, Homo sapien
tctgtgtgcctttgttaaaggcagc

SEQ ID NO: 4747231 - DNA, 25 bp, Homo sapien
tgtgcactgctggatagcactagtc

SEQ ID NO: 4747232 - DNA, 25 bp, Homo sapien
gctggatagcactagtctgtgtgcc

SEQ ID NO: 4747233 - DNA, 25 bp, Homo sapien
ctttgatggttggtatagaaggcca

SEQ ID NO: 4747234 - DNA, 25 bp, Homo sapien
acaaatgcattggagagttgagctt

SEQ ID NO: 4747235 - DNA, 25 bp, Homo sapien
caaatgcattggagagttgagcttg

SEQ ID NO: 4747236 - DNA, 25 bp, Homo sapien
aatgcattggagagttgagcttgca

SEQ ID NO: 4747237 - DNA, 25 bp, Homo sapien
gcattggagagttgagcttgcagaa

SEQ ID NO: 4747238 - DNA, 25 bp, Homo sapien
agaactgcatgacagttgagctgtc

SEQ ID NO: 4747239 - DNA, 25 bp, Homo sapien
ctttcttgccaagaactgcatgaca

SEQ ID NO: 4747240 - DNA, 25 bp, Homo sapien
cagttgagctgtcacatgtatcact

SEQ ID NO: 4747241 - DNA, 25 bp, Homo sapien
tgacagttgagctgtcacatgtatc

SEQ ID NO: 4747242 - DNA, 25 bp, Homo sapien
tccagaggaaacatgaagagatgtc

SEQ ID NO: 4747243 - DNA, 25 bp, Homo sapien
ccttgagggatatgacaggaagatt

SEQ ID NO: 4747244 - DNA, 25 bp, Homo sapien
caatgtccacttacttccttgaggg

SEQ ID NO: 4747245 - DNA, 25 bp, Homo sapien
aaggccggcagtgctgtagagaccc

SEQ ID NO: 4747246 - DNA, 25 bp, Homo sapien
agtcctgtcactgaatgtgccgcag

SEQ ID NO: 4747247 - DNA, 25 bp, Homo sapien
gggctgtcctcaccggccaccagag

SEQ ID NO: 4747248 - DNA, 25 bp, Homo sapien
ctgcctttggtacctcagggtgtcc

SEQ ID NO: 4747249 - DNA, 25 bp, Homo sapien
ctcagggtgtccttggataactggg

SEQ ID NO: 4747250 - DNA, 25 bp, Homo sapien
tcagatccctgagcttcagtgaaga

SEQ ID NO: 4747251 - DNA, 25 bp, Homo sapien
gatccctgagcttcagtgaagactt

SEQ ID NO: 4747252 - DNA, 25 bp, Homo sapien
agatccctgagcttcagtgaagact

SEQ ID NO: 4747253 - DNA, 25 bp, Homo sapien
cagatccctgagcttcagtgaagac

SEQ ID NO: 4747254 - DNA, 25 bp, Homo sapien
tgagatctttacactccactggaga

SEQ ID NO: 4747255 - DNA, 25 bp, Homo sapien
tgggctgcacaacagggaaactact

SEQ ID NO: 4747256 - DNA, 25 bp, Homo sapien
gacagacgggatgcatagctacctt

SEQ ID NO: 4747257 - DNA, 25 bp, Homo sapien
ttgactctttacactgggacagacg

SEQ ID NO: 4747258 - DNA, 25 bp, Homo sapien
ttcagtgataatgaccatccactga

SEQ ID NO: 4747259 - DNA, 25 bp, Homo sapien
cactgaggctctgcagcaatagaat

SEQ ID NO: 4747260 - DNA, 25 bp, Homo sapien
ctgcagcaatagaatctaaagtaac

SEQ ID NO: 4747261 - DNA, 25 bp, Homo sapien
gaggctctgcagcaatagaatctaa

SEQ ID NO: 4747262 - DNA, 25 bp, Homo sapien
atctcttcgattaagccttgaaaac

SEQ ID NO: 4747263 - DNA, 25 bp, Homo sapien
tgaaaaccccgggccgtggctgctg

SEQ ID NO: 4747264 - DNA, 25 bp, Homo sapien
gccgtggctgctggacagctctgag

SEQ ID NO: 4747265 - DNA, 25 bp, Homo sapien
catctcttcgattaagccttgaaaa

SEQ ID NO: 4747266 - DNA, 25 bp, Homo sapien
agaggccagtggggcatcacagtca

SEQ ID NO: 4747267 - DNA, 25 bp, Homo sapien
aggcagaggccagtggggcatcaca

SEQ ID NO: 4747268 - DNA, 25 bp, Homo sapien
ctaggcaaggcagaggccagtgggg

SEQ ID NO: 4747269 - DNA, 25 bp, Homo sapien
cagaggccagtggggcatcacagtc

SEQ ID NO: 4747270 - DNA, 25 bp, Homo sapien
aacaaaaccagcctctgaaagagca

SEQ ID NO: 4747271 - DNA, 25 bp, Homo sapien
tactagggagagatgcgtataaaag

SEQ ID NO: 4747272 - DNA, 25 bp, Homo sapien
acaaaaccagcctctgaaagagcaa

SEQ ID NO: 4747273 - DNA, 25 bp, Homo sapien
gggagagatgcgtataaaagtgctt

SEQ ID NO: 4747274 - DNA, 25 bp, Homo sapien
ttcttcaggccacgtctggatgttc

SEQ ID NO: 4747275 - DNA, 25 bp, Homo sapien
cttcttcaggccacgtctggatgtt

SEQ ID NO: 4747276 - DNA, 25 bp, Homo sapien
tcttcaggccacgtctggatgttca

SEQ ID NO: 4747277 - DNA, 25 bp, Homo sapien
cttcaggccacgtctggatgttcat

SEQ ID NO: 4747278 - DNA, 25 bp, Homo sapien
cacacagcagccacgtgcggcggca

SEQ ID NO: 4747279 - DNA, 25 bp, Homo sapien
cacagcagccacgtgcggcggcaga

SEQ ID NO: 4747280 - DNA, 25 bp, Homo sapien
acacagcagccacgtgcggcggcag

SEQ ID NO: 4747281 - DNA, 25 bp, Homo sapien
gtggatttcctgctcctacggggct

SEQ ID NO: 4747282 - DNA, 25 bp, Homo sapien
tggatttcctgctcctacggggctc

SEQ ID NO: 4747283 - DNA, 25 bp, Homo sapien
gatttcctgctcctacggggctcca

SEQ ID NO: 4747284 - DNA, 25 bp, Homo sapien
tttcctgctcctacggggctccaag

SEQ ID NO: 4747285 - DNA, 25 bp, Homo sapien
ttcagccaggcgccctgagacccgg

SEQ ID NO: 4747286 - DNA, 25 bp, Homo sapien
cttcagccaggcgccctgagacccg

SEQ ID NO: 4747287 - DNA, 25 bp, Homo sapien
tcagccaggcgccctgagacccggg

SEQ ID NO: 4747288 - DNA, 25 bp, Homo sapien
agccaggcgccctgagacccgggca

SEQ ID NO: 4747289 - DNA, 25 bp, Homo sapien
gttcaggcgcgtcccggacactagg

SEQ ID NO: 4747290 - DNA, 25 bp, Homo sapien
cagcaacgcgagtcaagaagcgagc

SEQ ID NO: 4747291 - DNA, 25 bp, Homo sapien
gccccagctgcgtctccgaggtcgg

SEQ ID NO: 4747292 - DNA, 25 bp, Homo sapien
ggactcgcgccgcagctttctggag

SEQ ID NO: 4747293 - DNA, 25 bp, Homo sapien
tgatacacagatacaccgaagcctc

SEQ ID NO: 4747294 - DNA, 25 bp, Homo sapien
acagtcgcaggtggcgtgatttgat

SEQ ID NO: 4747295 - DNA, 25 bp, Homo sapien
agaagatggattaatgtttttccat

SEQ ID NO: 4747296 - DNA, 25 bp, Homo sapien
ggcgtgatttgatttgtgtgaaggc

SEQ ID NO: 4747297 - DNA, 25 bp, Homo sapien
cactgaaccttatgtttccgtaata

SEQ ID NO: 4747298 - DNA, 25 bp, Homo sapien
tcactgaaccttatgtttccgtaat

SEQ ID NO: 4747299 - DNA, 25 bp, Homo sapien
ggcttctgatggtgggactctgtag

SEQ ID NO: 4747300 - DNA, 25 bp, Homo sapien
gcttctgatggtgggactctgtaga

SEQ ID NO: 4747301 - DNA, 25 bp, Homo sapien
tgggtgaatggagtagggtatgcct

SEQ ID NO: 4747302 - DNA, 25 bp, Homo sapien
aagtagttctgggtgaatggagtag

SEQ ID NO: 4747303 - DNA, 25 bp, Homo sapien
aaggactagagaaccccaggcatga

SEQ ID NO: 4747304 - DNA, 25 bp, Homo sapien
tgacaataggtggaaaagcaaggac

SEQ ID NO: 4747305 - DNA, 25 bp, Homo sapien
taatatacacgtagccccaggactg

SEQ ID NO: 4747306 - DNA, 25 bp, Homo sapien
gcatgagtcgaagtctggtgacctt

SEQ ID NO: 4747307 - DNA, 25 bp, Homo sapien
aggcaggatttgaacatacaaggga

SEQ ID NO: 4747308 - DNA, 25 bp, Homo sapien
gatttgaacatacaagggagctgga

SEQ ID NO: 4747309 - DNA, 25 bp, Homo sapien
ggatttgaacatacaagggagctgg

SEQ ID NO: 4747310 - DNA, 25 bp, Homo sapien
cacaaatcatggacaggaggagcca

SEQ ID NO: 4747311 - DNA, 25 bp, Homo sapien
tttcaatggtggagaggccagtgcc

SEQ ID NO: 4747312 - DNA, 25 bp, Homo sapien
tctgggccctgtccatatgggaaag

SEQ ID NO: 4747313 - DNA, 25 bp, Homo sapien
tagatgacaatggaaatggccctgc

SEQ ID NO: 4747314 - DNA, 25 bp, Homo sapien
catactgctttcaacaaatcgggca

SEQ ID NO: 4747315 - DNA, 25 bp, Homo sapien
tcatactgctttcaacaaatcgggc

SEQ ID NO: 4747316 - DNA, 25 bp, Homo sapien
gggcttgataattgcctcctccata

SEQ ID NO: 4747317 - DNA, 25 bp, Homo sapien
ttggcaaagtatggtgcatccagcc

SEQ ID NO: 4747318 - DNA, 25 bp, Homo sapien
ggtttataaccattcgtgtaacaca

SEQ ID NO: 4747319 - DNA, 25 bp, Homo sapien
tcctccatataccttctgaggtcgg

SEQ ID NO: 4747320 - DNA, 25 bp, Homo sapien
caggtgaattggctacaaccacagg

SEQ ID NO: 4747321 - DNA, 25 bp, Homo sapien
ggtgaattggctacaaccacaggca

SEQ ID NO: 4747322 - DNA, 25 bp, Homo sapien
gtgaattggctacaaccacaggcaa

SEQ ID NO: 4747323 - DNA, 25 bp, Homo sapien
aggtgaattggctacaaccacaggc

SEQ ID NO: 4747324 - DNA, 25 bp, Homo sapien
aatgggaatatttacgtcctcttcg

SEQ ID NO: 4747325 - DNA, 25 bp, Homo sapien
gcactgagactatgtgacctgtgat

SEQ ID NO: 4747326 - DNA, 25 bp, Homo sapien
gccagattttatatgcaagatgttg

SEQ ID NO: 4747327 - DNA, 25 bp, Homo sapien
taataataaaccaggaacatagtgt

SEQ ID NO: 4747328 - DNA, 25 bp, Homo sapien
tgttcttataactcttggcactgag

SEQ ID NO: 4747329 - DNA, 25 bp, Homo sapien
attttcagagactagatccattcag

SEQ ID NO: 4747330 - DNA, 25 bp, Homo sapien
agcgccaagccaaaaatgtcggtga

SEQ ID NO: 4747331 - DNA, 25 bp, Homo sapien
ttgacctcgtaatcttcccgtctca

SEQ ID NO: 4747332 - DNA, 25 bp, Homo sapien
tccattcagtgaacacagccagggc

SEQ ID NO: 4747333 - DNA, 25 bp, Homo sapien
agagattgggaattgccttgttcaa

SEQ ID NO: 4747334 - DNA, 25 bp, Homo sapien
attgccttgttcaatgtcgaaaggc

SEQ ID NO: 4747335 - DNA, 25 bp, Homo sapien
cttgttcaatgtcgaaaggctgtcc

SEQ ID NO: 4747336 - DNA, 25 bp, Homo sapien
caagagattgggaattgccttgttc

SEQ ID NO: 4747337 - DNA, 25 bp, Homo sapien
aaacttactctctgttgctaggagc

SEQ ID NO: 4747338 - DNA, 25 bp, Homo sapien
gcttagaagtccaaatcaggtggtg

SEQ ID NO: 4747339 - DNA, 25 bp, Homo sapien
tgctaggagcgtgtttgctaaggaa

SEQ ID NO: 4747340 - DNA, 25 bp, Homo sapien
cacatttcttggcatcactccagtc

SEQ ID NO: 4747341 - DNA, 25 bp, Homo sapien
atacataggactggggcacttgctc

SEQ ID NO: 4747342 - DNA, 25 bp, Homo sapien
gacataaatacataggactggggca

SEQ ID NO: 4747343 - DNA, 25 bp, Homo sapien
cataaatacataggactggggcact

SEQ ID NO: 4747344 - DNA, 25 bp, Homo sapien
taaatacataggactggggcacttg

SEQ ID NO: 4747345 - DNA, 25 bp, Homo sapien
ttgggcaagtttagctatcacagct

SEQ ID NO: 4747346 - DNA, 25 bp, Homo sapien
tttgggcaagtttagctatcacagc

SEQ ID NO: 4747347 - DNA, 25 bp, Homo sapien
gcttggtacatcagttctaggtgaa

SEQ ID NO: 4747348 - DNA, 25 bp, Homo sapien
catcagttctaggtgaatattttat

SEQ ID NO: 4747349 - DNA, 25 bp, Homo sapien
cattctacagtgagtttttctatag

SEQ ID NO: 4747350 - DNA, 25 bp, Homo sapien
tacaaaacagaagcttggtacatca

SEQ ID NO: 4747351 - DNA, 25 bp, Homo sapien
tgaaggctcctgatcatcctggatg

SEQ ID NO: 4747352 - DNA, 25 bp, Homo sapien
ggtcagccccacctgaataaacggc

SEQ ID NO: 4747353 - DNA, 25 bp, Homo sapien
aagttcccagcctatgtcacatgag

SEQ ID NO: 4747354 - DNA, 25 bp, Homo sapien
caagtttgctgcagaaataacctcc

SEQ ID NO: 4747355 - DNA, 25 bp, Homo sapien
ctctctggtatgcattctggtgtga

SEQ ID NO: 4747356 - DNA, 25 bp, Homo sapien
caggacttcccaaatccattacatg

SEQ ID NO: 4747357 - DNA, 25 bp, Homo sapien
tggtatgcattctggtgtgatgtac

SEQ ID NO: 4747358 - DNA, 25 bp, Homo sapien
ttacatgctagggttttctctctgg

SEQ ID NO: 4747359 - DNA, 25 bp, Homo sapien
catattcactgccaccacagagttc

SEQ ID NO: 4747360 - DNA, 25 bp, Homo sapien
tgtaggtgaaagatctcccacattc

SEQ ID NO: 4747361 - DNA, 25 bp, Homo sapien
cactgaggtgtgtcttgtgagagaa

SEQ ID NO: 4747362 - DNA, 25 bp, Homo sapien
cagggctgaattgtaggtgaaagat

SEQ ID NO: 4747363 - DNA, 25 bp, Homo sapien
tcccacagccattgttatcacaagg

SEQ ID NO: 4747364 - DNA, 25 bp, Homo sapien
catagtgtgtcatagccatgtgaac

SEQ ID NO: 4747365 - DNA, 25 bp, Homo sapien
ggttttgtcacaggatgtcccatat

SEQ ID NO: 4747366 - DNA, 25 bp, Homo sapien
ccaggatgctgaataggatgtgaac

SEQ ID NO: 4747367 - DNA, 25 bp, Homo sapien
ttacaggacttttctcctgttagaa

SEQ ID NO: 4747368 - DNA, 25 bp, Homo sapien
tctcatgcttaatatcaagctgcag

SEQ ID NO: 4747369 - DNA, 25 bp, Homo sapien
tataattaattgagaagcaactggc

SEQ ID NO: 4747370 - DNA, 25 bp, Homo sapien
ggcaaattcattctgtgtgagtcac

SEQ ID NO: 4747371 - DNA, 25 bp, Homo sapien
taattaatgagactacgaacttcct

SEQ ID NO: 4747372 - DNA, 25 bp, Homo sapien
ttcttgcttaattaatgagactacg

SEQ ID NO: 4747373 - DNA, 25 bp, Homo sapien
atacctgatggtttctaacttgcag

SEQ ID NO: 4747374 - DNA, 25 bp, Homo sapien
gagactacgaacttccttctgtcca

SEQ ID NO: 4747375 - DNA, 25 bp, Homo sapien
cccatatgctgttgttaggaacgga

SEQ ID NO: 4747376 - DNA, 25 bp, Homo sapien
gatagccctagctgactaatacaga

SEQ ID NO: 4747377 - DNA, 25 bp, Homo sapien
ttataagaagcggaagaaacaccag

SEQ ID NO: 4747378 - DNA, 25 bp, Homo sapien
ggtcacagggaaggaccctaatcca

SEQ ID NO: 4747379 - DNA, 25 bp, Homo sapien
ttcatcttctaaataccatggctct

SEQ ID NO: 4747380 - DNA, 25 bp, Homo sapien
caccttgggtttagtaatgcaatat

SEQ ID NO: 4747381 - DNA, 25 bp, Homo sapien
caacttggagatcaccttgggttta

SEQ ID NO: 4747382 - DNA, 25 bp, Homo sapien
ctgggtacctctggttcaggaattc

SEQ ID NO: 4747383 - DNA, 25 bp, Homo sapien
ccactgagatgaggtggctgtagtt

SEQ ID NO: 4747384 - DNA, 25 bp, Homo sapien
agatgaggtggctgtagttctccag

SEQ ID NO: 4747385 - DNA, 25 bp, Homo sapien
tgaggtggctgtagttctccagcat

SEQ ID NO: 4747386 - DNA, 25 bp, Homo sapien
cactgagatgaggtggctgtagttc

SEQ ID NO: 4747387 - DNA, 25 bp, Homo sapien
cagcgtcctctcgacagggcccagg

SEQ ID NO: 4747388 - DNA, 25 bp, Homo sapien
agcgtcctctcgacagggcccaggt

SEQ ID NO: 4747389 - DNA, 25 bp, Homo sapien
acagcgtcctctcgacagggcccag

SEQ ID NO: 4747390 - DNA, 25 bp, Homo sapien
gcgtcctctcgacagggcccaggtg

SEQ ID NO: 4747391 - DNA, 25 bp, Homo sapien
cttgggcaaggacaagcaccttgac

SEQ ID NO: 4747392 - DNA, 25 bp, Homo sapien
tcagcggggaataatctccaccaag

SEQ ID NO: 4747393 - DNA, 25 bp, Homo sapien
ctccaccaagaacagtaatagcttg

SEQ ID NO: 4747394 - DNA, 25 bp, Homo sapien
acagaggttgtagagctctttgcag

SEQ ID NO: 4747395 - DNA, 25 bp, Homo sapien
gaagaaagcagctagccacagcttc

SEQ ID NO: 4747396 - DNA, 25 bp, Homo sapien
ctgtggtcgttaggaaacagaagaa

SEQ ID NO: 4747397 - DNA, 25 bp, Homo sapien
agaagaaagcagctagccacagctt

SEQ ID NO: 4747398 - DNA, 25 bp, Homo sapien
aagaaagcagctagccacagcttca

SEQ ID NO: 4747399 - DNA, 25 bp, Homo sapien
tctttccaaaactggcgaactctgt

SEQ ID NO: 4747400 - DNA, 25 bp, Homo sapien
tgctgtccgttgtccagtcccagaa

SEQ ID NO: 4747401 - DNA, 25 bp, Homo sapien
cagagaacaactacttgcacgtata

SEQ ID NO: 4747402 - DNA, 25 bp, Homo sapien
agtcccagaagaggttcagccacgc

SEQ ID NO: 4747403 - DNA, 25 bp, Homo sapien
tatctaacattctttattctcaagg

SEQ ID NO: 4747404 - DNA, 25 bp, Homo sapien
ttcttcttgcataaacctctgctgg

SEQ ID NO: 4747405 - DNA, 25 bp, Homo sapien
gctggtatctaacattctttattct

SEQ ID NO: 4747406 - DNA, 25 bp, Homo sapien
aaacctctgctggtatctaacattc

SEQ ID NO: 4747407 - DNA, 25 bp, Homo sapien
ggtttgagcagggatacttatgtca

SEQ ID NO: 4747408 - DNA, 25 bp, Homo sapien
tttccaccctgacataacataaaag

SEQ ID NO: 4747409 - DNA, 25 bp, Homo sapien
caccctgacataacataaaagacaa

SEQ ID NO: 4747410 - DNA, 25 bp, Homo sapien
tccaccctgacataacataaaagac

SEQ ID NO: 4747411 - DNA, 25 bp, Homo sapien
tttatcaagatagcccctaataccc

SEQ ID NO: 4747412 - DNA, 25 bp, Homo sapien
ggcttggtgccagctgacatgagac

SEQ ID NO: 4747413 - DNA, 25 bp, Homo sapien
ttggtgccagctgacatgagacaag

SEQ ID NO: 4747414 - DNA, 25 bp, Homo sapien
cctaatacccacatggataacagcc

SEQ ID NO: 4747415 - DNA, 25 bp, Homo sapien
caactcagttagacacacaccacaa

SEQ ID NO: 4747416 - DNA, 25 bp, Homo sapien
agaactgaactgggcaaaagtggtg

SEQ ID NO: 4747417 - DNA, 25 bp, Homo sapien
gcaactcagttagacacacaccaca

SEQ ID NO: 4747418 - DNA, 25 bp, Homo sapien
ctgcttcatagccctggtttgggca

SEQ ID NO: 4747419 - DNA, 25 bp, Homo sapien
gcttcatagccctggtttgggcagc

SEQ ID NO: 4747420 - DNA, 25 bp, Homo sapien
ttcatagccctggtttgggcagcag

SEQ ID NO: 4747421 - DNA, 25 bp, Homo sapien
tcatagccctggtttgggcagcaga

SEQ ID NO: 4747422 - DNA, 25 bp, Homo sapien
acagacagaccgacattaatggcag

SEQ ID NO: 4747423 - DNA, 25 bp, Homo sapien
cagacagaccgacattaatggcagg

SEQ ID NO: 4747424 - DNA, 25 bp, Homo sapien
agacagaccgacattaatggcaggg

SEQ ID NO: 4747425 - DNA, 25 bp, Homo sapien
aagcagacacatcaccagtctgttt

SEQ ID NO: 4747426 - DNA, 25 bp, Homo sapien
tcattggaatgtaagcagacacatc

SEQ ID NO: 4747427 - DNA, 25 bp, Homo sapien
gatagaaatgacattcattggaatg

SEQ ID NO: 4747428 - DNA, 25 bp, Homo sapien
cttagtgatagaaatgacattcatt

SEQ ID NO: 4747429 - DNA, 25 bp, Homo sapien
gcaaagcagtcaaggagccaccacc

SEQ ID NO: 4747430 - DNA, 25 bp, Homo sapien
gctgacaccacgatggtgtaattca

SEQ ID NO: 4747431 - DNA, 25 bp, Homo sapien
ctgacaccacgatggtgtaattcat

SEQ ID NO: 4747432 - DNA, 25 bp, Homo sapien
agctgacaccacgatggtgtaattc

SEQ ID NO: 4747433 - DNA, 25 bp, Homo sapien
ggcatctgcatcgtaagtctcttca

SEQ ID NO: 4747434 - DNA, 25 bp, Homo sapien
gcatctgcatcgtaagtctcttcac

SEQ ID NO: 4747435 - DNA, 25 bp, Homo sapien
tcatcagatccatcattgaaacatt

SEQ ID NO: 4747436 - DNA, 25 bp, Homo sapien
tgaccaataacaacatagacacagt

SEQ ID NO: 4747437 - DNA, 25 bp, Homo sapien
cagtggatctcttttgaccaataac

SEQ ID NO: 4747438 - DNA, 25 bp, Homo sapien
aacaacatagacacagtacagcttc

SEQ ID NO: 4747439 - DNA, 25 bp, Homo sapien
ccagtctgtccattaccaataatca

SEQ ID NO: 4747440 - DNA, 25 bp, Homo sapien
ttacagccttaatgccagtctgcat

SEQ ID NO: 4747441 - DNA, 25 bp, Homo sapien
tggccaattggcaccaagctattta

SEQ ID NO: 4747442 - DNA, 25 bp, Homo sapien
taatgccagtctgcattggttcctg

SEQ ID NO: 4747443 - DNA, 25 bp, Homo sapien
ccaagctatttacagccttaatgcc

SEQ ID NO: 4747444 - DNA, 25 bp, Homo sapien
ctgaaatttgaggaatgattccagg

SEQ ID NO: 4747445 - DNA, 25 bp, Homo sapien
gaatgattccaggggctttcagact

SEQ ID NO: 4747446 - DNA, 25 bp, Homo sapien
aggaatgattccaggggctttcaga

SEQ ID NO: 4747447 - DNA, 25 bp, Homo sapien
atgattccaggggctttcagactaa

SEQ ID NO: 4747448 - DNA, 25 bp, Homo sapien
ctatggttcttggaaccaaatggac

SEQ ID NO: 4747449 - DNA, 25 bp, Homo sapien
tggaatgtccacaatggctcttgtc

SEQ ID NO: 4747450 - DNA, 25 bp, Homo sapien
caactggaatgtccacaatggctct

SEQ ID NO: 4747451 - DNA, 25 bp, Homo sapien
caccaactggaatgtccacaatggc

SEQ ID NO: 4747452 - DNA, 25 bp, Homo sapien
caagggcatcaaccacatgacccaa

SEQ ID NO: 4747453 - DNA, 25 bp, Homo sapien
ctctagttgcaaaggtacattgtta

SEQ ID NO: 4747454 - DNA, 25 bp, Homo sapien
gttcctctagttgcaaaggtacatt

SEQ ID NO: 4747455 - DNA, 25 bp, Homo sapien
tagttcctctagttgcaaaggtaca

SEQ ID NO: 4747456 - DNA, 25 bp, Homo sapien
tcctctagttgcaaaggtacattgt

SEQ ID NO: 4747457 - DNA, 25 bp, Homo sapien
gacattgccaaaagattgtctattg

SEQ ID NO: 4747458 - DNA, 25 bp, Homo sapien
gattgtctattgaagatagtatcgc

SEQ ID NO: 4747459 - DNA, 25 bp, Homo sapien
agatagtatcgcattcccactgtaa

SEQ ID NO: 4747460 - DNA, 25 bp, Homo sapien
tctattgaagatagtatcgcattcc

SEQ ID NO: 4747461 - DNA, 25 bp, Homo sapien
tctctccctaggtgtgatagcagtg

SEQ ID NO: 4747462 - DNA, 25 bp, Homo sapien
tgctaggacagctctaaacagtgag

SEQ ID NO: 4747463 - DNA, 25 bp, Homo sapien
cagtgagctcgatgtgcaaaacgca

SEQ ID NO: 4747464 - DNA, 25 bp, Homo sapien
gctgtggctgtctctatcatcgtga

SEQ ID NO: 4747465 - DNA, 25 bp, Homo sapien
cacagttgaagcctggaaacactac

SEQ ID NO: 4747466 - DNA, 25 bp, Homo sapien
caagatgcaagaggatgtcaataca

SEQ ID NO: 4747467 - DNA, 25 bp, Homo sapien
gcttcttggactaccttcactggca

SEQ ID NO: 4747468 - DNA, 25 bp, Homo sapien
gtcctggaatccagagccaagtggc

SEQ ID NO: 4747469 - DNA, 25 bp, Homo sapien
ggacacagcgttcggctcataacaa

SEQ ID NO: 4747470 - DNA, 25 bp, Homo sapien
taataagtgttctgccaacaggcag

SEQ ID NO: 4747471 - DNA, 25 bp, Homo sapien
gatattgatgcctcagtgttcccca

SEQ ID NO: 4747472 - DNA, 25 bp, Homo sapien
cttaggagttttagagggacacagc

SEQ ID NO: 4747473 - DNA, 25 bp, Homo sapien
tcaaacagtacataacatcagcatg

SEQ ID NO: 4747474 - DNA, 25 bp, Homo sapien
aacagtacataacatcagcatgctg

SEQ ID NO: 4747475 - DNA, 25 bp, Homo sapien
cagtacataacatcagcatgctgaa

SEQ ID NO: 4747476 - DNA, 25 bp, Homo sapien
caaacagtacataacatcagcatgc

SEQ ID NO: 4747477 - DNA, 25 bp, Homo sapien
gaatacctcatcattgagagtcctg

SEQ ID NO: 4747478 - DNA, 25 bp, Homo sapien
tgatcccatgccaaattccagagag

SEQ ID NO: 4747479 - DNA, 25 bp, Homo sapien
caagaatcccagaacagagtggaag

SEQ ID NO: 4747480 - DNA, 25 bp, Homo sapien
cagtgccaaaaaggtcaagaatccc

SEQ ID NO: 4747481 - DNA, 25 bp, Homo sapien
taagcacagtgatagttttagctaa

SEQ ID NO: 4747482 - DNA, 25 bp, Homo sapien
gccttacaggctataagcacagtga

SEQ ID NO: 4747483 - DNA, 25 bp, Homo sapien
tttagctaacgcagttgaaacaacc

SEQ ID NO: 4747484 - DNA, 25 bp, Homo sapien
gatgctgtagccttacaggctataa

SEQ ID NO: 4747485 - DNA, 25 bp, Homo sapien
agtcctctgattaatgtggtaggta

SEQ ID NO: 4747486 - DNA, 25 bp, Homo sapien
ccaaagtcctctgattaatgtggta

SEQ ID NO: 4747487 - DNA, 25 bp, Homo sapien
aatgtggtaggtattgtagacgtga

SEQ ID NO: 4747488 - DNA, 25 bp, Homo sapien
tgtggtaggtattgtagacgtgata

SEQ ID NO: 4747489 - DNA, 25 bp, Homo sapien
aattccaagtccgtattttccatgt

SEQ ID NO: 4747490 - DNA, 25 bp, Homo sapien
attccaagtccgtattttccatgtc

SEQ ID NO: 4747491 - DNA, 25 bp, Homo sapien
tcaaattccaagtccgtattttcca

SEQ ID NO: 4747492 - DNA, 25 bp, Homo sapien
caaattccaagtccgtattttccat

SEQ ID NO: 4747493 - DNA, 25 bp, Homo sapien
tctggaaccagggtcttgtgatctg

SEQ ID NO: 4747494 - DNA, 25 bp, Homo sapien
tgtgatctgctatcaaacaaggtag

SEQ ID NO: 4747495 - DNA, 25 bp, Homo sapien
cacacggaaaggcaaggaaggttag

SEQ ID NO: 4747496 - DNA, 25 bp, Homo sapien
tgtaaagcaggaccgctctggaacc

SEQ ID NO: 4747497 - DNA, 25 bp, Homo sapien
taagagtgcgtagacccaaggaagt

SEQ ID NO: 4747498 - DNA, 25 bp, Homo sapien
ggtggagacctaacaaggaagtgat

SEQ ID NO: 4747499 - DNA, 25 bp, Homo sapien
gactactgaggaattgacggcttca

SEQ ID NO: 4747500 - DNA, 25 bp, Homo sapien
gatgagctcggatctgactactgag

SEQ ID NO: 4747501 - DNA, 25 bp, Homo sapien
tgcctactgggaacatgcgggcttc

SEQ ID NO: 4747502 - DNA, 25 bp, Homo sapien
gagtgtctgtctcccaagatccaag

SEQ ID NO: 4747503 - DNA, 25 bp, Homo sapien
taatgaatttgagcctggaatggcc

SEQ ID NO: 4747504 - DNA, 25 bp, Homo sapien
tggaatggccacaaagtcagagacc

SEQ ID NO: 4747505 - DNA, 25 bp, Homo sapien
tcactgaaccttatgtttccgtaat

SEQ ID NO: 4747506 - DNA, 25 bp, Homo sapien
cactgaaccttatgtttccgtaata

SEQ ID NO: 4747507 - DNA, 25 bp, Homo sapien
aagtagttctgggtgaatggagtag

SEQ ID NO: 4747508 - DNA, 25 bp, Homo sapien
ggcttctgatggtgggactctgtag

SEQ ID NO: 4747509 - DNA, 25 bp, Homo sapien
tgggtgaatggagtagggtatgcct

SEQ ID NO: 4747510 - DNA, 25 bp, Homo sapien
gcttctgatggtgggactctgtaga

SEQ ID NO: 4747511 - DNA, 25 bp, Homo sapien
taatatacacgtagccccaggactg

SEQ ID NO: 4747512 - DNA, 25 bp, Homo sapien
aaggactagagaaccccaggcatga

SEQ ID NO: 4747513 - DNA, 25 bp, Homo sapien
tgacaataggtggaaaagcaaggac

SEQ ID NO: 4747514 - DNA, 25 bp, Homo sapien
gcatgagtcgaagtctggtgacctt

SEQ ID NO: 4747515 - DNA, 25 bp, Homo sapien
cacaaatcatggacaggaggagcca

SEQ ID NO: 4747516 - DNA, 25 bp, Homo sapien
tttcaatggtggagaggccagtgcc

SEQ ID NO: 4747517 - DNA, 25 bp, Homo sapien
tctgggccctgtccatatgggaaag

SEQ ID NO: 4747518 - DNA, 25 bp, Homo sapien
tagatgacaatggaaatggccctgc

SEQ ID NO: 4747519 - DNA, 25 bp, Homo sapien
catactgctttcaacaaatcgggca

SEQ ID NO: 4747520 - DNA, 25 bp, Homo sapien
tcatactgctttcaacaaatcgggc

SEQ ID NO: 4747521 - DNA, 25 bp, Homo sapien
gggcttgataattgcctcctccata

SEQ ID NO: 4747522 - DNA, 25 bp, Homo sapien
ggtttataaccattcgtgtaacaca

SEQ ID NO: 4747523 - DNA, 25 bp, Homo sapien
tcctccatataccttctgaggtcgg

SEQ ID NO: 4747524 - DNA, 25 bp, Homo sapien
ttggcaaagtatggtgcatccagcc

SEQ ID NO: 4747525 - DNA, 25 bp, Homo sapien
caggcacagtcggtgaggatttaga

SEQ ID NO: 4747526 - DNA, 25 bp, Homo sapien
cctaagaaacgtgggtgacatcggc

SEQ ID NO: 4747527 - DNA, 25 bp, Homo sapien
tccaccatgttgcaaccagaagagc

SEQ ID NO: 4747528 - DNA, 25 bp, Homo sapien
ctgcaaaataatgctgcgccaggca

SEQ ID NO: 4747529 - DNA, 25 bp, Homo sapien
tgttggacaatagatttagagagaa

SEQ ID NO: 4747530 - DNA, 25 bp, Homo sapien
atgttggacaatagatttagagaga

SEQ ID NO: 4747531 - DNA, 25 bp, Homo sapien
gatgttggacaatagatttagagag

SEQ ID NO: 4747532 - DNA, 25 bp, Homo sapien
gttgctaaaggcaacattgctaggg

SEQ ID NO: 4747533 - DNA, 25 bp, Homo sapien
tttggcgtgctttgctaagaaatct

SEQ ID NO: 4747534 - DNA, 25 bp, Homo sapien
cactgctgccacgaaaactgttgct

SEQ ID NO: 4747535 - DNA, 25 bp, Homo sapien
tatcaaagtaccacaaacgaggtgg

SEQ ID NO: 4747536 - DNA, 25 bp, Homo sapien
atacataggactggggcacttgctc

SEQ ID NO: 4747537 - DNA, 25 bp, Homo sapien
gacataaatacataggactggggca

SEQ ID NO: 4747538 - DNA, 25 bp, Homo sapien
cataaatacataggactggggcact

SEQ ID NO: 4747539 - DNA, 25 bp, Homo sapien
taaatacataggactggggcacttg

SEQ ID NO: 4747540 - DNA, 25 bp, Homo sapien
tttgggcaagtttagctaccacagc

SEQ ID NO: 4747541 - DNA, 25 bp, Homo sapien
ttgggcaagtttagctaccacagct

SEQ ID NO: 4747542 - DNA, 25 bp, Homo sapien
gttcctttggaattcaggcacagct

SEQ ID NO: 4747543 - DNA, 25 bp, Homo sapien
gcacagctgaccagcatttaacatt

SEQ ID NO: 4747544 - DNA, 25 bp, Homo sapien
tcctttggaattcaggcacagctga

SEQ ID NO: 4747545 - DNA, 25 bp, Homo sapien
aggcacagctgaccagcatttaaca

SEQ ID NO: 4747546 - DNA, 25 bp, Homo sapien
tggtagccattaagataccaacatg

SEQ ID NO: 4747547 - DNA, 25 bp, Homo sapien
ttacgactgatgaaacagactcttg

SEQ ID NO: 4747548 - DNA, 25 bp, Homo sapien
caagtttgctgcagaaataacctcc

SEQ ID NO: 4747549 - DNA, 25 bp, Homo sapien
tgaaggctcctgatcatcctggatg

SEQ ID NO: 4747550 - DNA, 25 bp, Homo sapien
ggtcagccccacctgaataaacggc

SEQ ID NO: 4747551 - DNA, 25 bp, Homo sapien
aagttcccagcctatgtcacatgag

SEQ ID NO: 4747552 - DNA, 25 bp, Homo sapien
caggacttcccaaatccattacatg

SEQ ID NO: 4747553 - DNA, 25 bp, Homo sapien
ctctctggtatgcattctggtgtga

SEQ ID NO: 4747554 - DNA, 25 bp, Homo sapien
tggtatgcattctggtgtgatgtac

SEQ ID NO: 4747555 - DNA, 25 bp, Homo sapien
ttacatgctagggttttctctctgg

SEQ ID NO: 4747556 - DNA, 25 bp, Homo sapien
tcccctgagcgagttctaagatgtg

SEQ ID NO: 4747557 - DNA, 25 bp, Homo sapien
tgagggctgccttatagacaaaagt

SEQ ID NO: 4747558 - DNA, 25 bp, Homo sapien
gatattctgatgtgctctaagggct

SEQ ID NO: 4747559 - DNA, 25 bp, Homo sapien
tctccgatgtgtactgaggcgtgtc

SEQ ID NO: 4747560 - DNA, 25 bp, Homo sapien
tcccacagccattgttatcacaagg

SEQ ID NO: 4747561 - DNA, 25 bp, Homo sapien
cactgaggtgtgtcttgtgagagaa

SEQ ID NO: 4747562 - DNA, 25 bp, Homo sapien
ccaggatgctgaataggatgtgaac

SEQ ID NO: 4747563 - DNA, 25 bp, Homo sapien
catattcactgccaccacagagttc

SEQ ID NO: 4747564 - DNA, 25 bp, Homo sapien
ctactgaaattaatccccctttcat

SEQ ID NO: 4747565 - DNA, 25 bp, Homo sapien
agtgaggggtgacttcctactgaaa

SEQ ID NO: 4747566 - DNA, 25 bp, Homo sapien
tgaggggtgacttcctactgaaatt

SEQ ID NO: 4747567 - DNA, 25 bp, Homo sapien
gagtgaggggtgacttcctactgaa

SEQ ID NO: 4747568 - DNA, 25 bp, Homo sapien
tattcaacagcggtggttttgtcac

SEQ ID NO: 4747569 - DNA, 25 bp, Homo sapien
tgtcagttctcatgtggttaaataa

SEQ ID NO: 4747570 - DNA, 25 bp, Homo sapien
cccatattcattaagatcagagcat

SEQ ID NO: 4747571 - DNA, 25 bp, Homo sapien
tttgtcacaggatgtcccatattca

SEQ ID NO: 4747572 - DNA, 25 bp, Homo sapien
tacaaattgtcttatcatataaacc

SEQ ID NO: 4747573 - DNA, 25 bp, Homo sapien
tagaaaactctgaggtgtaatacaa

SEQ ID NO: 4747574 - DNA, 25 bp, Homo sapien
catataaaccttgtccagatccatc

SEQ ID NO: 4747575 - DNA, 25 bp, Homo sapien
tgtccagatccatcacattcaaaag

SEQ ID NO: 4747576 - DNA, 25 bp, Homo sapien
tctcatgcttaatatcaagctgcag

SEQ ID NO: 4747577 - DNA, 25 bp, Homo sapien
ctctggagctatttccagattaaat

SEQ ID NO: 4747578 - DNA, 25 bp, Homo sapien
ggcaaattcattctgtgtgagtcac

SEQ ID NO: 4747579 - DNA, 25 bp, Homo sapien
tataattaattgagaagcaactggc

SEQ ID NO: 4747580 - DNA, 25 bp, Homo sapien
tgttccctgccgtagatacacagga

SEQ ID NO: 4747581 - DNA, 25 bp, Homo sapien
cacaggatctgcatgctcttatatg

SEQ ID NO: 4747582 - DNA, 25 bp, Homo sapien
cgtagatacacaggatctgcatgct

SEQ ID NO: 4747583 - DNA, 25 bp, Homo sapien
agctaatgttccctgccgtagatac

SEQ ID NO: 4747584 - DNA, 25 bp, Homo sapien
agctccatgctacttagctacacag

SEQ ID NO: 4747585 - DNA, 25 bp, Homo sapien
agcctcaatatctggtagagcagca

SEQ ID NO: 4747586 - DNA, 25 bp, Homo sapien
aaatcctcctgtatcactcgttttt

SEQ ID NO: 4747587 - DNA, 25 bp, Homo sapien
tatagcgttacctctttacagatgt

SEQ ID NO: 4747588 - DNA, 25 bp, Homo sapien
aggaattcatcttctaaagaccatg

SEQ ID NO: 4747589 - DNA, 25 bp, Homo sapien
ggaattcatcttctaaagaccatgg

SEQ ID NO: 4747590 - DNA, 25 bp, Homo sapien
gcatcacatctctgtacagcgtcct

SEQ ID NO: 4747591 - DNA, 25 bp, Homo sapien
ccactgagacgaggtggctgtagtt

SEQ ID NO: 4747592 - DNA, 25 bp, Homo sapien
ccagcatcacatctctgtacagcgt

SEQ ID NO: 4747593 - DNA, 25 bp, Homo sapien
cactgagacgaggtggctgtagttc

SEQ ID NO: 4747594 - DNA, 25 bp, Homo sapien
ctcccgggtgaattctacagtcacg

SEQ ID NO: 4747595 - DNA, 25 bp, Homo sapien
gtcacgtcctggaatgacactgatg

SEQ ID NO: 4747596 - DNA, 25 bp, Homo sapien
cactcctcccgggtgaattctacag

SEQ ID NO: 4747597 - DNA, 25 bp, Homo sapien
tcctcccgggtgaattctacagtca

SEQ ID NO: 4747598 - DNA, 25 bp, Homo sapien
tatccggggtagtctctaggacatt

SEQ ID NO: 4747599 - DNA, 25 bp, Homo sapien
ccacatctccgcaaattatccgggg

SEQ ID NO: 4747600 - DNA, 25 bp, Homo sapien
tctccgcaaattatccggggtagtc

SEQ ID NO: 4747601 - DNA, 25 bp, Homo sapien
tagtctctaggacattcacaccctc

SEQ ID NO: 4747602 - DNA, 25 bp, Homo sapien
gaagagtgtagaggactgtggaggt

SEQ ID NO: 4747603 - DNA, 25 bp, Homo sapien
tggaagagtgtagaggactgtggag

SEQ ID NO: 4747604 - DNA, 25 bp, Homo sapien
agtgtagaggactgtggaggttcag

SEQ ID NO: 4747605 - DNA, 25 bp, Homo sapien
agagtgtagaggactgtggaggttc

SEQ ID NO: 4747606 - DNA, 25 bp, Homo sapien
ggtctgcctctcagttcttacagag

SEQ ID NO: 4747607 - DNA, 25 bp, Homo sapien
cctgacatgagatggttcgacttga

SEQ ID NO: 4747608 - DNA, 25 bp, Homo sapien
gggtcatgagagacctggtctgcct

SEQ ID NO: 4747609 - DNA, 25 bp, Homo sapien
taatggttttactgcgacataaccc

SEQ ID NO: 4747610 - DNA, 25 bp, Homo sapien
ttagaacgagcaggacagggagtcc

SEQ ID NO: 4747611 - DNA, 25 bp, Homo sapien
taccacttggtgagattctgtccac

SEQ ID NO: 4747612 - DNA, 25 bp, Homo sapien
gccactctgcataagcgctctgaag

SEQ ID NO: 4747613 - DNA, 25 bp, Homo sapien
gaacacgagttgctagtaacctcct

SEQ ID NO: 4747614 - DNA, 25 bp, Homo sapien
tgcggacaggactcggcctgggccc

SEQ ID NO: 4747615 - DNA, 25 bp, Homo sapien
gcggacaggactcggcctgggcccg

SEQ ID NO: 4747616 - DNA, 25 bp, Homo sapien
cggagccctgtcaccgacgctctca

SEQ ID NO: 4747617 - DNA, 25 bp, Homo sapien
tgctgtcctccgcacacaagcccgc

SEQ ID NO: 4747618 - DNA, 25 bp, Homo sapien
ggagccctgtcaccgacgctctcac

SEQ ID NO: 4747619 - DNA, 25 bp, Homo sapien
gtcctccgcacacaagcccgcccgt

SEQ ID NO: 4747620 - DNA, 25 bp, Homo sapien
tgggctcccgcgcagacctaaagac

SEQ ID NO: 4747621 - DNA, 25 bp, Homo sapien
tcccgcgcagacctaaagactcgga

SEQ ID NO: 4747622 - DNA, 25 bp, Homo sapien
gcagacctaaagactcggacaccgt

SEQ ID NO: 4747623 - DNA, 25 bp, Homo sapien
ctaaagactcggacaccgtgtccct

SEQ ID NO: 4747624 - DNA, 25 bp, Homo sapien
ctgttattatctttcttttttctca

SEQ ID NO: 4747625 - DNA, 25 bp, Homo sapien
tctgttattatctttcttttttctc

SEQ ID NO: 4747626 - DNA, 25 bp, Homo sapien
tcttttctaagatgttatcaagttg

SEQ ID NO: 4747627 - DNA, 25 bp, Homo sapien
taggcactccaaactctgattgtaa

SEQ ID NO: 4747628 - DNA, 25 bp, Homo sapien
tcccagaaacaagtacatcgccctt

SEQ ID NO: 4747629 - DNA, 25 bp, Homo sapien
tgtaaggcctacctgattgctggca

SEQ ID NO: 4747630 - DNA, 25 bp, Homo sapien
gaaacaagtacatcgccctttgctg

SEQ ID NO: 4747631 - DNA, 25 bp, Homo sapien
tcctctttttggattggtattgcaa

SEQ ID NO: 4747632 - DNA, 25 bp, Homo sapien
tggattggtattgcaataaggtaaa

SEQ ID NO: 4747633 - DNA, 25 bp, Homo sapien
tattctcctctttttggattggtat

SEQ ID NO: 4747634 - DNA, 25 bp, Homo sapien
ggattggtattgcaataaggtaaaa

SEQ ID NO: 4747635 - DNA, 25 bp, Homo sapien
ccttctttcccaatcgtatgtggac

SEQ ID NO: 4747636 - DNA, 25 bp, Homo sapien
ttctttcccaatcgtatgtggacat

SEQ ID NO: 4747637 - DNA, 25 bp, Homo sapien
gccttctttcccaatcgtatgtgga

SEQ ID NO: 4747638 - DNA, 25 bp, Homo sapien
tgccttctttcccaatcgtatgtgg

SEQ ID NO: 4747639 - DNA, 25 bp, Homo sapien
gatattcaacatgacaatgcatgtg

SEQ ID NO: 4747640 - DNA, 25 bp, Homo sapien
aatactgatattcaacatgacaatg

SEQ ID NO: 4747641 - DNA, 25 bp, Homo sapien
tactgatattcaacatgacaatgca

SEQ ID NO: 4747642 - DNA, 25 bp, Homo sapien
atctttttcaggatgccactgatgt

SEQ ID NO: 4747643 - DNA, 25 bp, Homo sapien
acaaccagtggggagtgatatctca

SEQ ID NO: 4747644 - DNA, 25 bp, Homo sapien
cacatctttgctaacacttgttacc

SEQ ID NO: 4747645 - DNA, 25 bp, Homo sapien
tgtgtgttggctactcggatattct

SEQ ID NO: 4747646 - DNA, 25 bp, Homo sapien
gagaaatgtcaatccaagtactgta

SEQ ID NO: 4747647 - DNA, 25 bp, Homo sapien
aacattctatcactctcgcctgcaa

SEQ ID NO: 4747648 - DNA, 25 bp, Homo sapien
tttttgcacttgtcataattgaaag

SEQ ID NO: 4747649 - DNA, 25 bp, Homo sapien
ggtaacattctatcactctcgcctg

SEQ ID NO: 4747650 - DNA, 25 bp, Homo sapien
ttggtaacattctatcactctcgcc

SEQ ID NO: 4747651 - DNA, 25 bp, Homo sapien
attccatcctcatcgagctccttga

SEQ ID NO: 4747652 - DNA, 25 bp, Homo sapien
gattccatcctcatcgagctccttg

SEQ ID NO: 4747653 - DNA, 25 bp, Homo sapien
ttgggacaaaatgagggcatttctg

SEQ ID NO: 4747654 - DNA, 25 bp, Homo sapien
aaaatgagggcatttctgaggaagc

SEQ ID NO: 4747655 - DNA, 25 bp, Homo sapien
cttgggacaaaatgagggcatttct

SEQ ID NO: 4747656 - DNA, 25 bp, Homo sapien
gacaaaatgagggcatttctgagga

SEQ ID NO: 4747657 - DNA, 25 bp, Homo sapien
actgcagcgcactgtgcaccgagtt

SEQ ID NO: 4747658 - DNA, 25 bp, Homo sapien
gcgcactgtgcaccgagttttgcat

SEQ ID NO: 4747659 - DNA, 25 bp, Homo sapien
ttgtgatgtttccatcagacagcag

SEQ ID NO: 4747660 - DNA, 25 bp, Homo sapien
aggcggcactgcagcgcactgtgca

SEQ ID NO: 4747661 - DNA, 25 bp, Homo sapien
gagagggtcaacaccgtgacagcat

SEQ ID NO: 4747662 - DNA, 25 bp, Homo sapien
agagggtcaacaccgtgacagcatc

SEQ ID NO: 4747663 - DNA, 25 bp, Homo sapien
ggagacgctgccctgctgagctgtc

SEQ ID NO: 4747664 - DNA, 25 bp, Homo sapien
ccctgctgagctgtcatttaaactt

SEQ ID NO: 4747665 - DNA, 25 bp, Homo sapien
tgctgagctgtcatttaaacttatt

SEQ ID NO: 4747666 - DNA, 25 bp, Homo sapien
gggagacgctgccctgctgagctgt

SEQ ID NO: 4747667 - DNA, 25 bp, Homo sapien
cacgtcgtttatcctcgtgtatctg

SEQ ID NO: 4747668 - DNA, 25 bp, Homo sapien
ccctgtctctgtaagggcagcaata

SEQ ID NO: 4747669 - DNA, 25 bp, Homo sapien
cagagtcatgaagtagcacgtcgtt

SEQ ID NO: 4747670 - DNA, 25 bp, Homo sapien
ttggcagcaaatcctcagagtcatg

SEQ ID NO: 4747671 - DNA, 25 bp, Homo sapien
tgcgagcctccatgcagcattcgct

SEQ ID NO: 4747672 - DNA, 25 bp, Homo sapien
gagcctccatgcagcattcgctgga

SEQ ID NO: 4747673 - DNA, 25 bp, Homo sapien
tatcagtgccgctggtggacgtgaa

SEQ ID NO: 4747674 - DNA, 25 bp, Homo sapien
gaggagtcagttatcagtgccgctg

SEQ ID NO: 4747675 - DNA, 25 bp, Homo sapien
tggccaagggtgacatttcctccag

SEQ ID NO: 4747676 - DNA, 25 bp, Homo sapien
ctgtgtggccaagggtgacatttcc

SEQ ID NO: 4747677 - DNA, 25 bp, Homo sapien
tgtggccaagggtgacatttcctcc

SEQ ID NO: 4747678 - DNA, 25 bp, Homo sapien
gccaagggtgacatttcctccaggc

SEQ ID NO: 4747679 - DNA, 25 bp, Homo sapien
caaagttttgcttgacacaggaggc

SEQ ID NO: 4747680 - DNA, 25 bp, Homo sapien
gtctctctgtgtgtaaccgcccaat

SEQ ID NO: 4747681 - DNA, 25 bp, Homo sapien
tgttgttcaaattagtctcctggag

SEQ ID NO: 4747682 - DNA, 25 bp, Homo sapien
tgtggagcaacgtaactggacaaaa

SEQ ID NO: 4747683 - DNA, 25 bp, Homo sapien
tcatatctcctcatgacattagggt

SEQ ID NO: 4747684 - DNA, 25 bp, Homo sapien
cattagggttttagataggcactcc

SEQ ID NO: 4747685 - DNA, 25 bp, Homo sapien
gtagaaccatgtcacgctaaatgtt

SEQ ID NO: 4747686 - DNA, 25 bp, Homo sapien
gtgctctgagctccgataatacaaa

SEQ ID NO: 4747687 - DNA, 25 bp, Homo sapien
tggatgttcccatcaggagtgaact

SEQ ID NO: 4747688 - DNA, 25 bp, Homo sapien
aggccagccaccgaacatggccttc

SEQ ID NO: 4747689 - DNA, 25 bp, Homo sapien
taggccagccaccgaacatggcctt

SEQ ID NO: 4747690 - DNA, 25 bp, Homo sapien
ctaggccagccaccgaacatggcct

SEQ ID NO: 4747691 - DNA, 25 bp, Homo sapien
gccagagcatctgccgaagtttggg

SEQ ID NO: 4747692 - DNA, 25 bp, Homo sapien
tggtcctcgggctgatgggctccaa

SEQ ID NO: 4747693 - DNA, 25 bp, Homo sapien
cctcgggctgatgggctccaaagcc

SEQ ID NO: 4747694 - DNA, 25 bp, Homo sapien
agccagagcatctgccgaagtttgg

SEQ ID NO: 4747695 - DNA, 25 bp, Homo sapien
gctgaagctgcagcacaatggcatg

SEQ ID NO: 4747696 - DNA, 25 bp, Homo sapien
gttgctgaagctgcagcacaatggc

SEQ ID NO: 4747697 - DNA, 25 bp, Homo sapien
ttgttgctgaagctgcagcacaatg

SEQ ID NO: 4747698 - DNA, 25 bp, Homo sapien
ttcgctcttgttgctgaagctgcag

SEQ ID NO: 4747699 - DNA, 25 bp, Homo sapien
gattactactagcttgttgctgatg

SEQ ID NO: 4747700 - DNA, 25 bp, Homo sapien
cctcttgacaaacgtttttgtgtct

SEQ ID NO: 4747701 - DNA, 25 bp, Homo sapien
ttgacaaacgtttttgtgtcttcca

SEQ ID NO: 4747702 - DNA, 25 bp, Homo sapien
ttccatgaggatgattactactagc

SEQ ID NO: 4747703 - DNA, 25 bp, Homo sapien
catcgcgctgcacggtcttcccttc

SEQ ID NO: 4747704 - DNA, 25 bp, Homo sapien
gcgctgcaaggacgccctgtccctg

SEQ ID NO: 4747705 - DNA, 25 bp, Homo sapien
tcttcccttccaacaccgagggcgc

SEQ ID NO: 4747706 - DNA, 25 bp, Homo sapien
cctgatccccatcgcgctgcacggt

SEQ ID NO: 4747707 - DNA, 25 bp, Homo sapien
ggtcatgtcattgaagccacatctg

SEQ ID NO: 4747708 - DNA, 25 bp, Homo sapien
gctgctgcgcttctgtctgggtctc

SEQ ID NO: 4747709 - DNA, 25 bp, Homo sapien
tctgcaatctgacccatgcaggtgg

SEQ ID NO: 4747710 - DNA, 25 bp, Homo sapien
acatctgcaatctgacccatgcagg

SEQ ID NO: 4747711 - DNA, 25 bp, Homo sapien
gatccagaataaccttacggccctg

SEQ ID NO: 4747712 - DNA, 25 bp, Homo sapien
gccagttggattcaccaggacagag

SEQ ID NO: 4747713 - DNA, 25 bp, Homo sapien
gctcaaaaagtagggcaatgtatcc

SEQ ID NO: 4747714 - DNA, 25 bp, Homo sapien
tcaaacagttgagtggacgacccat

SEQ ID NO: 4747715 - DNA, 25 bp, Homo sapien
tatccgagtacaggtttctttcaac

SEQ ID NO: 4747716 - DNA, 25 bp, Homo sapien
tttttgctgttccatgccccagggt

SEQ ID NO: 4747717 - DNA, 25 bp, Homo sapien
tatctgcctaataacagctgggtca

SEQ ID NO: 4747718 - DNA, 25 bp, Homo sapien
ggatgagcaactcagctttgcatga

SEQ ID NO: 4747719 - DNA, 25 bp, Homo sapien
gatgaaatcttcacgatccagttct

SEQ ID NO: 4747720 - DNA, 25 bp, Homo sapien
ggctccccatgtctcctaagatacg

SEQ ID NO: 4747721 - DNA, 25 bp, Homo sapien
ctaagatacgggcttccaccagaga

SEQ ID NO: 4747722 - DNA, 25 bp, Homo sapien
taaagtgctttaatgcaacctgtcc

SEQ ID NO: 4747723 - DNA, 25 bp, Homo sapien
catgtcatgcaacgcatcaaggagg

SEQ ID NO: 4747724 - DNA, 25 bp, Homo sapien
tgtcatgcaacgcatcaaggaggct

SEQ ID NO: 4747725 - DNA, 25 bp, Homo sapien
accatgtcatgcaacgcatcaagga

SEQ ID NO: 4747726 - DNA, 25 bp, Homo sapien
catgcaacgcatcaaggaggctcat

SEQ ID NO: 4747727 - DNA, 25 bp, Homo sapien
aaacctttattctgggctgcacact

SEQ ID NO: 4747728 - DNA, 25 bp, Homo sapien
tccatcaaacctttattctgggctg

SEQ ID NO: 4747729 - DNA, 25 bp, Homo sapien
tcaaacctttattctgggctgcaca

SEQ ID NO: 4747730 - DNA, 25 bp, Homo sapien
tcactccatcaaacctttattctgg

SEQ ID NO: 4747731 - DNA, 25 bp, Homo sapien
tatcctcctgcaagcctggaggaca

SEQ ID NO: 4747732 - DNA, 25 bp, Homo sapien
ctatcctcctgcaagcctggaggac

SEQ ID NO: 4747733 - DNA, 25 bp, Homo sapien
ggtttgagcagggatacttatgtca

SEQ ID NO: 4747734 - DNA, 25 bp, Homo sapien
caccctgacataacataaaagacaa

SEQ ID NO: 4747735 - DNA, 25 bp, Homo sapien
tttccaccctgacataacataaaag

SEQ ID NO: 4747736 - DNA, 25 bp, Homo sapien
tccaccctgacataacataaaagac

SEQ ID NO: 4747737 - DNA, 25 bp, Homo sapien
tttatcaagatagcccctaataccc

SEQ ID NO: 4747738 - DNA, 25 bp, Homo sapien
gcttggtgccagctgacatgagaca

SEQ ID NO: 4747739 - DNA, 25 bp, Homo sapien
cctaatacccacatggataacagcc

SEQ ID NO: 4747740 - DNA, 25 bp, Homo sapien
gcaactcagttagacacacaccaca

SEQ ID NO: 4747741 - DNA, 25 bp, Homo sapien
ttcatagccctggtttgggcagcag

SEQ ID NO: 4747742 - DNA, 25 bp, Homo sapien
ctgcttcatagccctggtttgggca

SEQ ID NO: 4747743 - DNA, 25 bp, Homo sapien
gcttcatagccctggtttgggcagc

SEQ ID NO: 4747744 - DNA, 25 bp, Homo sapien
tcatagccctggtttgggcagcaga

SEQ ID NO: 4747745 - DNA, 25 bp, Homo sapien
acagacagaccgacattaatggcag

SEQ ID NO: 4747746 - DNA, 25 bp, Homo sapien
cagacagaccgacattaatggcagg

SEQ ID NO: 4747747 - DNA, 25 bp, Homo sapien
agacagaccgacattaatggcaggg

SEQ ID NO: 4747748 - DNA, 25 bp, Homo sapien
gcaaagcagtcaaggagccaccacc

SEQ ID NO: 4747749 - DNA, 25 bp, Homo sapien
ctgacaccacgatggtgtaattcat

SEQ ID NO: 4747750 - DNA, 25 bp, Homo sapien
gctgacaccacgatggtgtaattca

SEQ ID NO: 4747751 - DNA, 25 bp, Homo sapien
agctgacaccacgatggtgtaattc

SEQ ID NO: 4747752 - DNA, 25 bp, Homo sapien
ggcatctgcatcgtaagtctcttca

SEQ ID NO: 4747753 - DNA, 25 bp, Homo sapien
gcatctgcatcgtaagtctcttcac

SEQ ID NO: 4747754 - DNA, 25 bp, Homo sapien
tcatcagatccatcattgaaacatt

SEQ ID NO: 4747755 - DNA, 25 bp, Homo sapien
tgaccaataacaacatagacacagt

SEQ ID NO: 4747756 - DNA, 25 bp, Homo sapien
cagtggatctcttttgaccaataac

SEQ ID NO: 4747757 - DNA, 25 bp, Homo sapien
aacaacatagacacagtacagcttc

SEQ ID NO: 4747758 - DNA, 25 bp, Homo sapien
ccagtctgtccattaccaataatca

SEQ ID NO: 4747759 - DNA, 25 bp, Homo sapien
ttacagccttaatgccagtctgcat

SEQ ID NO: 4747760 - DNA, 25 bp, Homo sapien
taatgccagtctgcattggttcctg

SEQ ID NO: 4747761 - DNA, 25 bp, Homo sapien
tggccaattggcaccaagctattta

SEQ ID NO: 4747762 - DNA, 25 bp, Homo sapien
ccaagctatttacagccttaatgcc

SEQ ID NO: 4747763 - DNA, 25 bp, Homo sapien
ctgaaatttgaggaatgattccagg

SEQ ID NO: 4747764 - DNA, 25 bp, Homo sapien
aggaatgattccaggggctttcaga

SEQ ID NO: 4747765 - DNA, 25 bp, Homo sapien
gaatgattccaggggctttcagacc

SEQ ID NO: 4747766 - DNA, 25 bp, Homo sapien
atgattccaggggctttcagaccaa

SEQ ID NO: 4747767 - DNA, 25 bp, Homo sapien
ctatggttcttggaaccaaatggac

SEQ ID NO: 4747768 - DNA, 25 bp, Homo sapien
cacctatggttcttggaaccaaatg

SEQ ID NO: 4747769 - DNA, 25 bp, Homo sapien
ctcacctatggttcttggaaccaaa

SEQ ID NO: 4747770 - DNA, 25 bp, Homo sapien
cctatggttcttggaaccaaatgga

SEQ ID NO: 4747771 - DNA, 25 bp, Homo sapien
tacgaagggcatcaaccacatgacc

SEQ ID NO: 4747772 - DNA, 25 bp, Homo sapien
gaagggcatcaaccacatgacccaa

SEQ ID NO: 4747773 - DNA, 25 bp, Homo sapien
ttccatcaatggcattacgaagggc

SEQ ID NO: 4747774 - DNA, 25 bp, Homo sapien
tggcattacgaagggcatcaaccac

SEQ ID NO: 4747775 - DNA, 25 bp, Homo sapien
caactggaatgtccacaatggctct

SEQ ID NO: 4747776 - DNA, 25 bp, Homo sapien
aatgtccacaatggctcttgtcctc

SEQ ID NO: 4747777 - DNA, 25 bp, Homo sapien
actggaatgtccacaatggctcttg

SEQ ID NO: 4747778 - DNA, 25 bp, Homo sapien
tggaatgtccacaatggctcttgtc

SEQ ID NO: 4747779 - DNA, 25 bp, Homo sapien
tgggtccacagattgcacaacgaag

SEQ ID NO: 4747780 - DNA, 25 bp, Homo sapien
tagccctgtcatgcaagtatcctgt

SEQ ID NO: 4747781 - DNA, 25 bp, Homo sapien
tggtggcagatgacaactgggtcca

SEQ ID NO: 4747782 - DNA, 25 bp, Homo sapien
tatatacctaggatcccagaggtcc

SEQ ID NO: 4747783 - DNA, 25 bp, Homo sapien
gtgtcccttagcagggcttgagcgc

SEQ ID NO: 4747784 - DNA, 25 bp, Homo sapien
tgtgtcccttagcagggcttgagcg

SEQ ID NO: 4747785 - DNA, 25 bp, Homo sapien
gacaaaactgtagaacatcagacct

SEQ ID NO: 4747786 - DNA, 25 bp, Homo sapien
acaaaactgtagaacatcagacctg

SEQ ID NO: 4747787 - DNA, 25 bp, Homo sapien
gaaacacgtgctttatggagcagct

SEQ ID NO: 4747788 - DNA, 25 bp, Homo sapien
ttgaaacacgtgctttatggagcag

SEQ ID NO: 4747789 - DNA, 25 bp, Homo sapien
gtttgaaacacgtgctttatggagc

SEQ ID NO: 4747790 - DNA, 25 bp, Homo sapien
tgtgtttgaaacacgtgctttatgg

SEQ ID NO: 4747791 - DNA, 25 bp, Homo sapien
gaaagggcctatctcattcttcttg

SEQ ID NO: 4747792 - DNA, 25 bp, Homo sapien
tatggcactatcttttaggtacagt

SEQ ID NO: 4747793 - DNA, 25 bp, Homo sapien
ttcttcttgcctggccacatggtct

SEQ ID NO: 4747794 - DNA, 25 bp, Homo sapien
tataaaagttccagagacaagccac

SEQ ID NO: 4747795 - DNA, 25 bp, Homo sapien
tttctccattcattgatgtgctgga

SEQ ID NO: 4747796 - DNA, 25 bp, Homo sapien
cagctgatgaggacctaatattgcc

SEQ ID NO: 4747797 - DNA, 25 bp, Homo sapien
tgttcaggcttccagcagaaaaggt

SEQ ID NO: 4747798 - DNA, 25 bp, Homo sapien
ttgccctcgtgagcacagaccttct

SEQ ID NO: 4747799 - DNA, 25 bp, Homo sapien
ttctgatgtgggaagttgcttattt

SEQ ID NO: 4747800 - DNA, 25 bp, Homo sapien
tgactcccgttctgccctcgctggc

SEQ ID NO: 4747801 - DNA, 25 bp, Homo sapien
ctgatgtgggaagttgcttatttcc

SEQ ID NO: 4747802 - DNA, 25 bp, Homo sapien
atgagcgcaatgctgactcccgttc

SEQ ID NO: 4747803 - DNA, 25 bp, Homo sapien
tggcatctaaatccagcaaacagag

SEQ ID NO: 4747804 - DNA, 25 bp, Homo sapien
gaatggaggcacaagtcagcttcat

SEQ ID NO: 4747805 - DNA, 25 bp, Homo sapien
catttccccgatggattcttccagg

SEQ ID NO: 4747806 - DNA, 25 bp, Homo sapien
tccccgatggattcttccagggaat

SEQ ID NO: 4747807 - DNA, 25 bp, Homo sapien
catctattgcggacatgatattcta

SEQ ID NO: 4747808 - DNA, 25 bp, Homo sapien
gaggtcaccgcattgtgcccatctt

SEQ ID NO: 4747809 - DNA, 25 bp, Homo sapien
tctgaagagactgtatgacatgagc

SEQ ID NO: 4747810 - DNA, 25 bp, Homo sapien
agactgtatgacatgagcctcttca

SEQ ID NO: 4747811 - DNA, 25 bp, Homo sapien
gcaatttcgaagaatccgaacaaaa

SEQ ID NO: 4747812 - DNA, 25 bp, Homo sapien
aacaaaagctaagcgaagttcagga

SEQ ID NO: 4747813 - DNA, 25 bp, Homo sapien
ggtacaactgccgagtttcgcatgc

SEQ ID NO: 4747814 - DNA, 25 bp, Homo sapien
catgcaaggccaatgtacaaccctg

SEQ ID NO: 4747815 - DNA, 25 bp, Homo sapien
ttaattcattagggggcacgtggct

SEQ ID NO: 4747816 - DNA, 25 bp, Homo sapien
gggcacgtggcttgaactggcttga

SEQ ID NO: 4747817 - DNA, 25 bp, Homo sapien
cacgtggcttgaactggcttgaagg

SEQ ID NO: 4747818 - DNA, 25 bp, Homo sapien
gtcgctgtttgtgtttaattcatta

SEQ ID NO: 4747819 - DNA, 25 bp, Homo sapien
atgattccatcatttcggaccaaag

SEQ ID NO: 4747820 - DNA, 25 bp, Homo sapien
gtctgggacaacacgagcatactct

SEQ ID NO: 4747821 - DNA, 25 bp, Homo sapien
agaaacgtctgggacaacacgagca

SEQ ID NO: 4747822 - DNA, 25 bp, Homo sapien
tcagaatgcagaaacgtctgggaca

SEQ ID NO: 4747823 - DNA, 25 bp, Homo sapien
tgggacaacacgagcatactctctc

SEQ ID NO: 4747824 - DNA, 25 bp, Homo sapien
gtacatagcttcagcttctacatcc

SEQ ID NO: 4747825 - DNA, 25 bp, Homo sapien
ctgtacatagcttcagcttctacat

SEQ ID NO: 4747826 - DNA, 25 bp, Homo sapien
acatagcttcagcttctacatcccc

SEQ ID NO: 4747827 - DNA, 25 bp, Homo sapien
atagcttcagcttctacatccccaa

SEQ ID NO: 4747828 - DNA, 25 bp, Homo sapien
ctacgacaggcggaggcatgaccag

SEQ ID NO: 4747829 - DNA, 25 bp, Homo sapien
cgccttatgtgtgctaatgattgcc

SEQ ID NO: 4747830 - DNA, 25 bp, Homo sapien
tcaacttaaggctctctacgacagg

SEQ ID NO: 4747831 - DNA, 25 bp, Homo sapien
gagaaaggcataagtactttctttc

SEQ ID NO: 4747832 - DNA, 25 bp, Homo sapien
gtttgtccataatgaatgtagccat

SEQ ID NO: 4747833 - DNA, 25 bp, Homo sapien
tgtttgtccataatgaatgtagcca

SEQ ID NO: 4747834 - DNA, 25 bp, Homo sapien
ctgtttgtccataatgaatgtagcc

SEQ ID NO: 4747835 - DNA, 25 bp, Homo sapien
ctttctacgtgcaagtatctggtac

SEQ ID NO: 4747836 - DNA, 25 bp, Homo sapien
tttctacgtgcaagtatctggtact

SEQ ID NO: 4747837 - DNA, 25 bp, Homo sapien
ctctttctacgtgcaagtatctggt

SEQ ID NO: 4747838 - DNA, 25 bp, Homo sapien
ctacgtgcaagtatctggtactaac

SEQ ID NO: 4747839 - DNA, 25 bp, Homo sapien
ttggaaggtttggacgacttgctga

SEQ ID NO: 4747840 - DNA, 25 bp, Homo sapien
gtttggacgacttgctgaggaacac

SEQ ID NO: 4747841 - DNA, 25 bp, Homo sapien
gtctaaatcagatatgtacaatgtt

SEQ ID NO: 4747842 - DNA, 25 bp, Homo sapien
gaagtgcttttgcttgtctaaatca

SEQ ID NO: 4747843 - DNA, 25 bp, Homo sapien
ttgttcagaacaaccatcgcatttc

SEQ ID NO: 4747844 - DNA, 25 bp, Homo sapien
tgcacttggttgagacccttgttca

SEQ ID NO: 4747845 - DNA, 25 bp, Homo sapien
acttggttgagacccttgttcagaa

SEQ ID NO: 4747846 - DNA, 25 bp, Homo sapien
aataaatgcacttggttgagaccct

SEQ ID NO: 4747847 - DNA, 25 bp, Homo sapien
tgggaagctgagatacaaatacaga

SEQ ID NO: 4747848 - DNA, 25 bp, Homo sapien
tctgggaagctgagatacaaataca

SEQ ID NO: 4747849 - DNA, 25 bp, Homo sapien
tctttatcatatcttgcatggtcct

SEQ ID NO: 4747850 - DNA, 25 bp, Homo sapien
cagaaacaaaattcagtgacataga

SEQ ID NO: 4747851 - DNA, 25 bp, Homo sapien
catgacgctattcttagtgtcctgg

SEQ ID NO: 4747852 - DNA, 25 bp, Homo sapien
atgacatgacgctattcttagtgtc

SEQ ID NO: 4747853 - DNA, 25 bp, Homo sapien
gacgctattcttagtgtcctggtat

SEQ ID NO: 4747854 - DNA, 25 bp, Homo sapien
cgctattcttagtgtcctggtatgt

SEQ ID NO: 4747855 - DNA, 25 bp, Homo sapien
gaggtaaggatctgttatcacgact

SEQ ID NO: 4747856 - DNA, 25 bp, Homo sapien
gaaattatctaatctgaacaataga

SEQ ID NO: 4747857 - DNA, 25 bp, Homo sapien
tatcacgactataaatcaacagaaa

SEQ ID NO: 4747858 - DNA, 25 bp, Homo sapien
tgaatatattaggaccaaaaaatcc

SEQ ID NO: 4747859 - DNA, 25 bp, Homo sapien
ttaagttgtggcgtacgtgtgtaga

SEQ ID NO: 4747860 - DNA, 25 bp, Homo sapien
acctttccacccgtcatctagattt

SEQ ID NO: 4747861 - DNA, 25 bp, Homo sapien
tgcacctttccacccgtcatctaga

SEQ ID NO: 4747862 - DNA, 25 bp, Homo sapien
cgtacgtgtgtagaaagtgcaggtt

SEQ ID NO: 4747863 - DNA, 25 bp, Homo sapien
cctttgccggtctccaagccctcct

SEQ ID NO: 4747864 - DNA, 25 bp, Homo sapien
acttgaaatggtccatcttttcctt

SEQ ID NO: 4747865 - DNA, 25 bp, Homo sapien
ttcctttgccggtctccaagccctc

SEQ ID NO: 4747866 - DNA, 25 bp, Homo sapien
atcttttcctttgccggtctccaag

SEQ ID NO: 4747867 - DNA, 25 bp, Homo sapien
aaaaacgtcttgcttcaggagcaca

SEQ ID NO: 4747868 - DNA, 25 bp, Homo sapien
tgaggtaggaaagcccacaatagct

SEQ ID NO: 4747869 - DNA, 25 bp, Homo sapien
tctgcctgctgacggtccaaaaacg

SEQ ID NO: 4747870 - DNA, 25 bp, Homo sapien
cccacagagctgattttagaaatac

SEQ ID NO: 4747871 - DNA, 25 bp, Homo sapien
gatacactaatgcactgggtggcct

SEQ ID NO: 4747872 - DNA, 25 bp, Homo sapien
tcttaaacctaggtagaggctccca

SEQ ID NO: 4747873 - DNA, 25 bp, Homo sapien
ttagccaatgctgcagctgaagtct

SEQ ID NO: 4747874 - DNA, 25 bp, Homo sapien
cgtcccatgctagtctgaaatccag

SEQ ID NO: 4747875 - DNA, 25 bp, Homo sapien
gaaatacaatgcattactttatacc

SEQ ID NO: 4747876 - DNA, 25 bp, Homo sapien
tgaggcagagaaatgttctatctat

SEQ ID NO: 4747877 - DNA, 25 bp, Homo sapien
ggcagagaaatgttctatctataga

SEQ ID NO: 4747878 - DNA, 25 bp, Homo sapien
aatgcattactttatacctcaaacc

SEQ ID NO: 4747879 - DNA, 25 bp, Homo sapien
tgaagaggagcaccaaaacaagtaa

SEQ ID NO: 4747880 - DNA, 25 bp, Homo sapien
caagagtcagttttccttggattcg

SEQ ID NO: 4747881 - DNA, 25 bp, Homo sapien
gcctgcaatgagatctagttagcca

SEQ ID NO: 4747882 - DNA, 25 bp, Homo sapien
actttcttcctcacgtaggtatgca

SEQ ID NO: 4747883 - DNA, 25 bp, Homo sapien
gctattttcccacttaggatcctag

SEQ ID NO: 4747884 - DNA, 25 bp, Homo sapien
gaaaggagtgagcttgacaaccacc

SEQ ID NO: 4747885 - DNA, 25 bp, Homo sapien
tacagatgcatcagcctgagtcaga

SEQ ID NO: 4747886 - DNA, 25 bp, Homo sapien
ttccctcagtgcatagaaaggagtg

SEQ ID NO: 4747887 - DNA, 25 bp, Homo sapien
ccatgtggctggtactactggtgca

SEQ ID NO: 4747888 - DNA, 25 bp, Homo sapien
tgaaaagtacagagcccaacgatgc

SEQ ID NO: 4747889 - DNA, 25 bp, Homo sapien
tccttcgctgcagacaacttgtact

SEQ ID NO: 4747890 - DNA, 25 bp, Homo sapien
gaaaggcagaggacttactatgctg

SEQ ID NO: 4747891 - DNA, 25 bp, Homo sapien
tctctcacatctccctcggaggtga

SEQ ID NO: 4747892 - DNA, 25 bp, Homo sapien
tctcacatctccctcggaggtgaca

SEQ ID NO: 4747893 - DNA, 25 bp, Homo sapien
tcacatctccctcggaggtgacaca

SEQ ID NO: 4747894 - DNA, 25 bp, Homo sapien
ttctctcacatctccctcggaggtg

SEQ ID NO: 4747895 - DNA, 25 bp, Homo sapien
ggatcgtcccttcaactgcagaaaa

SEQ ID NO: 4747896 - DNA, 25 bp, Homo sapien
tcagatccgggatcgtcccttcaac

SEQ ID NO: 4747897 - DNA, 25 bp, Homo sapien
tctttctttcagatccgggatcgtc

SEQ ID NO: 4747898 - DNA, 25 bp, Homo sapien
ggctctttctttcagatccgggatc

SEQ ID NO: 4747899 - DNA, 25 bp, Homo sapien
aaacagggagtacttagaacatatt

SEQ ID NO: 4747900 - DNA, 25 bp, Homo sapien
ctggtgcccacaaacagggagtact

SEQ ID NO: 4747901 - DNA, 25 bp, Homo sapien
gtgcctctgatgacaggcactgctt

SEQ ID NO: 4747902 - DNA, 25 bp, Homo sapien
ctggtgcctctgatgacaggcactg

SEQ ID NO: 4747903 - DNA, 25 bp, Homo sapien
gaagtctactctgtctgaaaactaa

SEQ ID NO: 4747904 - DNA, 25 bp, Homo sapien
caagcagtgcctatattcatccaga

SEQ ID NO: 4747905 - DNA, 25 bp, Homo sapien
ttttgcctcacgtattttaacactc

SEQ ID NO: 4747906 - DNA, 25 bp, Homo sapien
taattcacttttcgttatcaagcag

SEQ ID NO: 4747907 - DNA, 25 bp, Homo sapien
cacgggccagactgggagtcacgta

SEQ ID NO: 4747908 - DNA, 25 bp, Homo sapien
tcgcggttagcttttccacgggcca

SEQ ID NO: 4747909 - DNA, 25 bp, Homo sapien
tgagggcgcggtattttctaagtcc

SEQ ID NO: 4747910 - DNA, 25 bp, Homo sapien
cacgtagggagagtctgtattcttc

SEQ ID NO: 4747911 - DNA, 25 bp, Homo sapien
caggatgtccctagcgttagcagga

SEQ ID NO: 4747912 - DNA, 25 bp, Homo sapien
tgttcgtggaagcttggacctgcag

SEQ ID NO: 4747913 - DNA, 25 bp, Homo sapien
caccgggtcgagttccaggatgtcc

SEQ ID NO: 4747914 - DNA, 25 bp, Homo sapien
tgagaaatgcgatccgacatggact

SEQ ID NO: 4747915 - DNA, 25 bp, Homo sapien
gggtcgaccagcaacccccagtgcc

SEQ ID NO: 4747916 - DNA, 25 bp, Homo sapien
ggggcaacatgcgggtcgaccagca

SEQ ID NO: 4747917 - DNA, 25 bp, Homo sapien
ggtcgaccagcaacccccagtgcct

SEQ ID NO: 4747918 - DNA, 25 bp, Homo sapien
gcaacatgcgggtcgaccagcaacc

SEQ ID NO: 4747919 - DNA, 25 bp, Homo sapien
tccagtatagtcctttgctccagga

SEQ ID NO: 4747920 - DNA, 25 bp, Homo sapien
cagtatagtcctttgctccaggaca

SEQ ID NO: 4747921 - DNA, 25 bp, Homo sapien
attccagtatagtcctttgctccag

SEQ ID NO: 4747922 - DNA, 25 bp, Homo sapien
ctattccagtatagtcctttgctcc

SEQ ID NO: 4747923 - DNA, 25 bp, Homo sapien
tgccagatctgccggcactcagtca

SEQ ID NO: 4747924 - DNA, 25 bp, Homo sapien
gccagatctgccggcactcagtcat

SEQ ID NO: 4747925 - DNA, 25 bp, Homo sapien
ctgccagatctgccggcactcagtc

SEQ ID NO: 4747926 - DNA, 25 bp, Homo sapien
cctgacacctctggcagtaggcagg

SEQ ID NO: 4747927 - DNA, 25 bp, Homo sapien
cagtaggcaggtgtgtcctgtgctg

SEQ ID NO: 4747928 - DNA, 25 bp, Homo sapien
ccctgacacctctggcagtaggcag

SEQ ID NO: 4747929 - DNA, 25 bp, Homo sapien
gcccctgacacctctggcagtaggc

SEQ ID NO: 4747930 - DNA, 25 bp, Homo sapien
tcctgggcttgtagaattctgcctt

SEQ ID NO: 4747931 - DNA, 25 bp, Homo sapien
ttcatatggcatatcccctgtgtta

SEQ ID NO: 4747932 - DNA, 25 bp, Homo sapien
ctgagatcaagttcttggcagggct

SEQ ID NO: 4747933 - DNA, 25 bp, Homo sapien
tattgtcttcatctcctagggctgc

SEQ ID NO: 4747934 - DNA, 25 bp, Homo sapien
gtaaacagagcactccaccaggtat

SEQ ID NO: 4747935 - DNA, 25 bp, Homo sapien
ggttgactacaagatcaatgggaca

SEQ ID NO: 4747936 - DNA, 25 bp, Homo sapien
ccggctaatgtttgactgtagcaca

SEQ ID NO: 4747937 - DNA, 25 bp, Homo sapien
tacagaacagaccagggttgactac

SEQ ID NO: 4747938 - DNA, 25 bp, Homo sapien
tcctaatcctctattcttggagatc

SEQ ID NO: 4747939 - DNA, 25 bp, Homo sapien
ggagatctggatgcctgccattcgc

SEQ ID NO: 4747940 - DNA, 25 bp, Homo sapien
tactccttgacacacaaacaggaag

SEQ ID NO: 4747941 - DNA, 25 bp, Homo sapien
tgccattcgcgtatgggaagaacag

SEQ ID NO: 4747942 - DNA, 25 bp, Homo sapien
tctccaggtgctcgtatgcgactgc

SEQ ID NO: 4747943 - DNA, 25 bp, Homo sapien
gtctcagggcagtcttaagagctcc

SEQ ID NO: 4747944 - DNA, 25 bp, Homo sapien
tggcgatcagggcacatagaatctc

SEQ ID NO: 4747945 - DNA, 25 bp, Homo sapien
cctgatcccagaggcattgtctaaa

SEQ ID NO: 4747946 - DNA, 25 bp, Homo sapien
tcaggaaccgccctgtgatgtcaga

SEQ ID NO: 4747947 - DNA, 25 bp, Homo sapien
cggcgcccgccagtaacaaacatgg

SEQ ID NO: 4747948 - DNA, 25 bp, Homo sapien
gccagtaacaaacatggctccctga

SEQ ID NO: 4747949 - DNA, 25 bp, Homo sapien
gtccacttcaggaaccgccctgtga

SEQ ID NO: 4747950 - DNA, 25 bp, Homo sapien
ttaatcgctcctctccgggggcggc

SEQ ID NO: 4747951 - DNA, 25 bp, Homo sapien
gggcggccatactgaggaggcatct

SEQ ID NO: 4747952 - DNA, 25 bp, Homo sapien
gcaatgggtggattcgggtccagat

SEQ ID NO: 4747953 - DNA, 25 bp, Homo sapien
caatgggtggattcgggtccagatt

SEQ ID NO: 4747954 - DNA, 25 bp, Homo sapien
gcaggagggagtttgggatcgagat

SEQ ID NO: 4747955 - DNA, 25 bp, Homo sapien
ttgggacaagtacagtaaccctcgc

SEQ ID NO: 4747956 - DNA, 25 bp, Homo sapien
tggccaccgcgactggtgctgaagt

SEQ ID NO: 4747957 - DNA, 25 bp, Homo sapien
tcgcccgtcaagacgggccagggct

SEQ ID NO: 4747958 - DNA, 25 bp, Homo sapien
cacgccttagagcaggcacctatct

SEQ ID NO: 4747959 - DNA, 25 bp, Homo sapien
aaagagacggtcgttagatgcaagt

SEQ ID NO: 4747960 - DNA, 25 bp, Homo sapien
gaggcttcggtgtatctgtgtatca

SEQ ID NO: 4747961 - DNA, 25 bp, Homo sapien
catgcaagtgcacaggaaaattaac

SEQ ID NO: 4747962 - DNA, 25 bp, Homo sapien
ttgaatgtagggatgcgatgctgac

SEQ ID NO: 4747963 - DNA, 25 bp, Homo sapien
ctgtctcacgagttctgtgaaatgt

SEQ ID NO: 4747964 - DNA, 25 bp, Homo sapien
tctcacgagttctgtgaaatgtacc

SEQ ID NO: 4747965 - DNA, 25 bp, Homo sapien
cacgagttctgtgaaatgtaccaat

SEQ ID NO: 4747966 - DNA, 25 bp, Homo sapien
gagttctgtgaaatgtaccaatcag

SEQ ID NO: 4747967 - DNA, 25 bp, Homo sapien
acagcagtcctgagagctaattaat

SEQ ID NO: 4747968 - DNA, 25 bp, Homo sapien
attcttcaagtcagcaacaccacga

SEQ ID NO: 4747969 - DNA, 25 bp, Homo sapien
aaggaatcaactctggacacagcag

SEQ ID NO: 4747970 - DNA, 25 bp, Homo sapien
gacacagcagtcctgagagctaatt

SEQ ID NO: 4747971 - DNA, 25 bp, Homo sapien
catttacaagatactcatgccacac

SEQ ID NO: 4747972 - DNA, 25 bp, Homo sapien
cactctccgggattgggagccaaaa

SEQ ID NO: 4747973 - DNA, 25 bp, Homo sapien
tagtggagcaaaccacgattctgca

SEQ ID NO: 4747974 - DNA, 25 bp, Homo sapien
tgacttcagtatggccactctccgg

SEQ ID NO: 4747975 - DNA, 25 bp, Homo sapien
ctacagccgtttctcacatgttggg

SEQ ID NO: 4747976 - DNA, 25 bp, Homo sapien
catgcccagcatcgggcttcgttct

SEQ ID NO: 4747977 - DNA, 25 bp, Homo sapien
aaagcatgcccagcatcgggcttcg

SEQ ID NO: 4747978 - DNA, 25 bp, Homo sapien
gcaaagcatgcccagcatcgggctt

SEQ ID NO: 4747979 - DNA, 25 bp, Homo sapien
ctggcaaagcatgcccagcatcggg

SEQ ID NO: 4747980 - DNA, 25 bp, Homo sapien
ggaaatttccatccctttcgagcta

SEQ ID NO: 4747981 - DNA, 25 bp, Homo sapien
tccctgagagtgtatagctttggca

SEQ ID NO: 4747982 - DNA, 25 bp, Homo sapien
agctttggcatgatggttgctgtaa

SEQ ID NO: 4747983 - DNA, 25 bp, Homo sapien
aaaccaaacaaagcgtggcccagca

SEQ ID NO: 4747984 - DNA, 25 bp, Homo sapien
gactcaggacctggtaacaatcccc

SEQ ID NO: 4747985 - DNA, 25 bp, Homo sapien
tgattttgactgaacaccagagggc

SEQ ID NO: 4747986 - DNA, 25 bp, Homo sapien
tgcaggtggacaccaagagcattgc

SEQ ID NO: 4747987 - DNA, 25 bp, Homo sapien
tgtgtttccaacactcagactcagg

SEQ ID NO: 4747988 - DNA, 25 bp, Homo sapien
atatattgatatcccctgattttct

SEQ ID NO: 4747989 - DNA, 25 bp, Homo sapien
gttggtgaagtttccaggaacattc

SEQ ID NO: 4747990 - DNA, 25 bp, Homo sapien
ctgattttctgttggtgaagtttcc

SEQ ID NO: 4747991 - DNA, 25 bp, Homo sapien
ttctgttggtgaagtttccaggaac

SEQ ID NO: 4747992 - DNA, 25 bp, Homo sapien
ccttgactacagactcaattaactt

SEQ ID NO: 4747993 - DNA, 25 bp, Homo sapien
gcattgctgcccttgactacagact

SEQ ID NO: 4747994 - DNA, 25 bp, Homo sapien
gactacagactcaattaacttcctg

SEQ ID NO: 4747995 - DNA, 25 bp, Homo sapien
gctgcccttgactacagactcaatt

SEQ ID NO: 4747996 - DNA, 25 bp, Homo sapien
ccccttttcattctcataatctgtc

SEQ ID NO: 4747997 - DNA, 25 bp, Homo sapien
tttctgccttcatccccttttcatt

SEQ ID NO: 4747998 - DNA, 25 bp, Homo sapien
ccttttcattctcataatctgtcat

SEQ ID NO: 4747999 - DNA, 25 bp, Homo sapien
tcctgaactttctgccttcatcccc

SEQ ID NO: 4748000 - DNA, 25 bp, Homo sapien
tggattggtattgcaataaggtaaa

SEQ ID NO: 4748001 - DNA, 25 bp, Homo sapien
tattctcctctttttggattggtat

SEQ ID NO: 4748002 - DNA, 25 bp, Homo sapien
ggattggtattgcaataaggtaaaa

SEQ ID NO: 4748003 - DNA, 25 bp, Homo sapien
tcctctttttggattggtattgcaa

SEQ ID NO: 4748004 - DNA, 25 bp, Homo sapien
ccttctttcccaatcgtatgtggac

SEQ ID NO: 4748005 - DNA, 25 bp, Homo sapien
ttctttcccaatcgtatgtggacat

SEQ ID NO: 4748006 - DNA, 25 bp, Homo sapien
tgccttctttcccaatcgtatgtgg

SEQ ID NO: 4748007 - DNA, 25 bp, Homo sapien
gccttctttcccaatcgtatgtgga

SEQ ID NO: 4748008 - DNA, 25 bp, Homo sapien
tgtagacttttccaaactgtgttca

SEQ ID NO: 4748009 - DNA, 25 bp, Homo sapien
caactttcagccgtctgaaattgtg

SEQ ID NO: 4748010 - DNA, 25 bp, Homo sapien
cagccgtctgaaattgtgtagactt

SEQ ID NO: 4748011 - DNA, 25 bp, Homo sapien
tgtgtagacttttccaaactgtgtt

SEQ ID NO: 4748012 - DNA, 25 bp, Homo sapien
tgtgtgttggctactcggatattct

SEQ ID NO: 4748013 - DNA, 25 bp, Homo sapien
gagaaatgtcaatccaagtactgta

SEQ ID NO: 4748014 - DNA, 25 bp, Homo sapien
acaaccagtggggagtgatatctca

SEQ ID NO: 4748015 - DNA, 25 bp, Homo sapien
cacatctttgctaacacttgttacc

SEQ ID NO: 4748016 - DNA, 25 bp, Homo sapien
aacagggatgggagaatacctctgg

SEQ ID NO: 4748017 - DNA, 25 bp, Homo sapien
tactggattctcataactccctggg

SEQ ID NO: 4748018 - DNA, 25 bp, Homo sapien
caagtgaggctcatacacggtgtga

SEQ ID NO: 4748019 - DNA, 25 bp, Homo sapien
catagtgcttatcatataccaggta

SEQ ID NO: 4748020 - DNA, 25 bp, Homo sapien
tttagagacaatggcaaacatgctt

SEQ ID NO: 4748021 - DNA, 25 bp, Homo sapien
actggctgttccatgggagagtatt

SEQ ID NO: 4748022 - DNA, 25 bp, Homo sapien
ccatgggagagtattttagagacaa

SEQ ID NO: 4748023 - DNA, 25 bp, Homo sapien
acaatggcaaacatgctttgaccat

SEQ ID NO: 4748024 - DNA, 25 bp, Homo sapien
ttgtggtgtgtgtctaactgagttg

SEQ ID NO: 4748025 - DNA, 25 bp, Homo sapien
gctgttatccatgtgggtattaggg

SEQ ID NO: 4748026 - DNA, 25 bp, Homo sapien
caaagacagtatactcccatggcta

SEQ ID NO: 4748027 - DNA, 25 bp, Homo sapien
agctggcaccaagccctgttgggca

SEQ ID NO: 4748028 - DNA, 25 bp, Homo sapien
gcctcaggagtagggctggtgagag

SEQ ID NO: 4748029 - DNA, 25 bp, Homo sapien
gcagcctcaggagtagggctggtga

SEQ ID NO: 4748030 - DNA, 25 bp, Homo sapien
gcaggcagcctcaggagtagggctg

SEQ ID NO: 4748031 - DNA, 25 bp, Homo sapien
tcaggagtagggctggtgagaggcg

SEQ ID NO: 4748032 - DNA, 25 bp, Homo sapien
gtgttgctcttccactccgccttca

SEQ ID NO: 4748033 - DNA, 25 bp, Homo sapien
ggcatagaacttcttccgggcaagc

SEQ ID NO: 4748034 - DNA, 25 bp, Homo sapien
cttcttccgggcaagctgcctgtgg

SEQ ID NO: 4748035 - DNA, 25 bp, Homo sapien
ctgcctgtggatccgctgctgacac

SEQ ID NO: 4748036 - DNA, 25 bp, Homo sapien
tccagccaggacacaatcttcttac

SEQ ID NO: 4748037 - DNA, 25 bp, Homo sapien
cctgctctttcactacggtgttctg

SEQ ID NO: 4748038 - DNA, 25 bp, Homo sapien
atctcccaagattccttggcctttt

SEQ ID NO: 4748039 - DNA, 25 bp, Homo sapien
ccctgctctttcactacggtgttct

SEQ ID NO: 4748040 - DNA, 25 bp, Homo sapien
tgctctttcactacggtgttctgtt

SEQ ID NO: 4748041 - DNA, 25 bp, Homo sapien
cccctcactaacctcaaagcggagc

SEQ ID NO: 4748042 - DNA, 25 bp, Homo sapien
ccctcactaacctcaaagcggagcg

SEQ ID NO: 4748043 - DNA, 25 bp, Homo sapien
cctcactaacctcaaagcggagcgc

SEQ ID NO: 4748044 - DNA, 25 bp, Homo sapien
ctcactaacctcaaagcggagcgcc

SEQ ID NO: 4748045 - DNA, 25 bp, Homo sapien
gccctcatcgggcttgacatagcct

SEQ ID NO: 4748046 - DNA, 25 bp, Homo sapien
gagtccctattctgcggatgattcc

SEQ ID NO: 4748047 - DNA, 25 bp, Homo sapien
catagcgccctcatcgggcttgaca

SEQ ID NO: 4748048 - DNA, 25 bp, Homo sapien
atcgggcttgacatagccttcaccg

SEQ ID NO: 4748049 - DNA, 25 bp, Homo sapien
ctttcaaacacaagcgtggcgttat

SEQ ID NO: 4748050 - DNA, 25 bp, Homo sapien
tggggagatcgttggaggactgtct

SEQ ID NO: 4748051 - DNA, 25 bp, Homo sapien
cgttatggggagatcgttggaggac

SEQ ID NO: 4748052 - DNA, 25 bp, Homo sapien
tcaaacacaagcgtggcgttatggg

SEQ ID NO: 4748053 - DNA, 25 bp, Homo sapien
atattctggtttgcaggtgatgtgg

SEQ ID NO: 4748054 - DNA, 25 bp, Homo sapien
tctggtttgcaggtgatgtggccca

SEQ ID NO: 4748055 - DNA, 25 bp, Homo sapien
tctaggcatattctggtttgcaggt

SEQ ID NO: 4748056 - DNA, 25 bp, Homo sapien
ctctaggcatattctggtttgcagg

SEQ ID NO: 4748057 - DNA, 25 bp, Homo sapien
gtcttgatgactttcagcactcctt

SEQ ID NO: 4748058 - DNA, 25 bp, Homo sapien
ggctgcgccgcactctcggtcgcct

SEQ ID NO: 4748059 - DNA, 25 bp, Homo sapien
cggctgcgccgcactctcggtcgcc

SEQ ID NO: 4748060 - DNA, 25 bp, Homo sapien
gctgcgccgcactctcggtcgcctt

SEQ ID NO: 4748061 - DNA, 25 bp, Homo sapien
tctgcgtggcgcgaaatttttccgg

SEQ ID NO: 4748062 - DNA, 25 bp, Homo sapien
cgcgaaatttttccgggagatggcg

SEQ ID NO: 4748063 - DNA, 25 bp, Homo sapien
tggcgcgaaatttttccgggagatg

SEQ ID NO: 4748064 - DNA, 25 bp, Homo sapien
aatttttccgggagatggcgcaggc

SEQ ID NO: 4748065 - DNA, 25 bp, Homo sapien
tcatcccgatactcagtaacctcat

SEQ ID NO: 4748066 - DNA, 25 bp, Homo sapien
catcccgatactcagtaacctcatt

SEQ ID NO: 4748067 - DNA, 25 bp, Homo sapien
cttgctatcagtaattgtattcact

SEQ ID NO: 4748068 - DNA, 25 bp, Homo sapien
gaagtatgttggcactttgaccttg

SEQ ID NO: 4748069 - DNA, 25 bp, Homo sapien
tgtattcactgaagtattgaggaac

SEQ ID NO: 4748070 - DNA, 25 bp, Homo sapien
ggaacacattaacgttggtttcaga

SEQ ID NO: 4748071 - DNA, 25 bp, Homo sapien
cttctcccgaccgcttttgtgccgg

SEQ ID NO: 4748072 - DNA, 25 bp, Homo sapien
ctcttctcccgaccgcttttgtgcc

SEQ ID NO: 4748073 - DNA, 25 bp, Homo sapien
tcttctcccgaccgcttttgtgccg

SEQ ID NO: 4748074 - DNA, 25 bp, Homo sapien
cctcttctcccgaccgcttttgtgc

SEQ ID NO: 4748075 - DNA, 25 bp, Homo sapien
ggtgtcttttcgctccaagacgcaa

SEQ ID NO: 4748076 - DNA, 25 bp, Homo sapien
ttttcgctccaagacgcaatcgggc

SEQ ID NO: 4748077 - DNA, 25 bp, Homo sapien
agaaccgcctggaccctgtccgtgt

SEQ ID NO: 4748078 - DNA, 25 bp, Homo sapien
gtcttttcgctccaagacgcaatcg

SEQ ID NO: 4748079 - DNA, 25 bp, Homo sapien
gtgtgtgtcgggaatcctgcgtgtc

SEQ ID NO: 4748080 - DNA, 25 bp, Homo sapien
tgggctgggtcgtctctctcgggct

SEQ ID NO: 4748081 - DNA, 25 bp, Homo sapien
gctgcgtgtgttgcgctcccgtgtg

SEQ ID NO: 4748082 - DNA, 25 bp, Homo sapien
ctgggtcgtctctctcgggctgcgt

SEQ ID NO: 4748083 - DNA, 25 bp, Homo sapien
ccctggacgggttcgagttctcttg

SEQ ID NO: 4748084 - DNA, 25 bp, Homo sapien
tagctgtgtactgggcggggacccc

SEQ ID NO: 4748085 - DNA, 25 bp, Homo sapien
cctggacgggttcgagttctcttgg

SEQ ID NO: 4748086 - DNA, 25 bp, Homo sapien
gggccgtggggctagctgtgtactg

SEQ ID NO: 4748087 - DNA, 25 bp, Homo sapien
ttaagtggccgtcaggacaggcggg

SEQ ID NO: 4748088 - DNA, 25 bp, Homo sapien
agtggccgtcaggacaggcgggagg

SEQ ID NO: 4748089 - DNA, 25 bp, Homo sapien
taagtggccgtcaggacaggcggga

SEQ ID NO: 4748090 - DNA, 25 bp, Homo sapien
cttaagtggccgtcaggacaggcgg

SEQ ID NO: 4748091 - DNA, 25 bp, Homo sapien
tgaacaaggacattgcgtgttcttc

SEQ ID NO: 4748092 - DNA, 25 bp, Homo sapien
caaggacattgcgtgttcttctatt

SEQ ID NO: 4748093 - DNA, 25 bp, Homo sapien
cctgttgaacaaggacattgcgtgt

SEQ ID NO: 4748094 - DNA, 25 bp, Homo sapien
aattcctgttgaacaaggacattgc

SEQ ID NO: 4748095 - DNA, 25 bp, Homo sapien
gggacagtacgagatagttcattat

SEQ ID NO: 4748096 - DNA, 25 bp, Homo sapien
gcaaacaccacttgggccctatttc

SEQ ID NO: 4748097 - DNA, 25 bp, Homo sapien
gcacatcgaacttgtaatacagcat

SEQ ID NO: 4748098 - DNA, 25 bp, Homo sapien
ttataggagtctgccccagtactgc

SEQ ID NO: 4748099 - DNA, 25 bp, Homo sapien
cacattgcatctcgacaatgatgca

SEQ ID NO: 4748100 - DNA, 25 bp, Homo sapien
acattgcatctcgacaatgatgcac

SEQ ID NO: 4748101 - DNA, 25 bp, Homo sapien
gaagtctgtgcaatcactgtgaaac

SEQ ID NO: 4748102 - DNA, 25 bp, Homo sapien
tctgcaatagtaaggccaatcctgc

SEQ ID NO: 4748103 - DNA, 25 bp, Homo sapien
ttttctttctgcaatagtaaggcca

SEQ ID NO: 4748104 - DNA, 25 bp, Homo sapien
ctgcagggaccgaagtctgtgcaat

SEQ ID NO: 4748105 - DNA, 25 bp, Homo sapien
ggagtcctggggtaacctgagcaaa

SEQ ID NO: 4748106 - DNA, 25 bp, Homo sapien
aagaagcataaaacttctggagtcc

SEQ ID NO: 4748107 - DNA, 25 bp, Homo sapien
cataaaacttctggagtcctggggt

SEQ ID NO: 4748108 - DNA, 25 bp, Homo sapien
tcccactcctactcagaagacagac

SEQ ID NO: 4748109 - DNA, 25 bp, Homo sapien
gccttacaatcagagtttggagtgc

SEQ ID NO: 4748110 - DNA, 25 bp, Homo sapien
tttggagtgcctatagcatcagcag

SEQ ID NO: 4748111 - DNA, 25 bp, Homo sapien
tggcactcatcagcaaagggcgatg

SEQ ID NO: 4748112 - DNA, 25 bp, Homo sapien
gccagcaatcaggtaggccttacaa

SEQ ID NO: 4748113 - DNA, 25 bp, Homo sapien
tgaacatcacccataactacaatgg

SEQ ID NO: 4748114 - DNA, 25 bp, Homo sapien
gcaacatcattagtaaccacagctt

SEQ ID NO: 4748115 - DNA, 25 bp, Homo sapien
taactacaatggctccaggaacaat

SEQ ID NO: 4748116 - DNA, 25 bp, Homo sapien
gaccttactatcgatgccaattgaa

SEQ ID NO: 4748117 - DNA, 25 bp, Homo sapien
gccacaatgttcttagtaacagcac

SEQ ID NO: 4748118 - DNA, 25 bp, Homo sapien
ccatggccacaatgttcttagtaac

SEQ ID NO: 4748119 - DNA, 25 bp, Homo sapien
gcaacagtagcctctgcaatagtgg

SEQ ID NO: 4748120 - DNA, 25 bp, Homo sapien
gcctctgcaatagtggccatggcca

SEQ ID NO: 4748121 - DNA, 25 bp, Homo sapien
atttaagtttgggatcgttggtgct

SEQ ID NO: 4748122 - DNA, 25 bp, Homo sapien
gggatcgttggtgcttccatattta

SEQ ID NO: 4748123 - DNA, 25 bp, Homo sapien
ttccatatttaaccagcagcttaga

SEQ ID NO: 4748124 - DNA, 25 bp, Homo sapien
cttagaatatttaagtttgggatcg

SEQ ID NO: 4748125 - DNA, 25 bp, Homo sapien
caagaggaagtcgtgggcagaggca

SEQ ID NO: 4748126 - DNA, 25 bp, Homo sapien
tatgagctttaagagctgaactgtt

SEQ ID NO: 4748127 - DNA, 25 bp, Homo sapien
gagctttaagagctgaactgttggg

SEQ ID NO: 4748128 - DNA, 25 bp, Homo sapien
gtatatgagctttaagagctgaact

SEQ ID NO: 4748129 - DNA, 25 bp, Homo sapien
gcgtgtgtatgcaaagtgcacgtca

SEQ ID NO: 4748130 - DNA, 25 bp, Homo sapien
tatgcaacttggatgagcgtgtgta

SEQ ID NO: 4748131 - DNA, 25 bp, Homo sapien
gatgagcgtgtgtatgcaaagtgca

SEQ ID NO: 4748132 - DNA, 25 bp, Homo sapien
gtctgattgagtgcagtatgcaact

SEQ ID NO: 4748133 - DNA, 25 bp, Homo sapien
tctggacaaacttgagagacagtgc

SEQ ID NO: 4748134 - DNA, 25 bp, Homo sapien
taatcaccagtgcttaagatggccc

SEQ ID NO: 4748135 - DNA, 25 bp, Homo sapien
caaactacttggtcaatgagggccc

SEQ ID NO: 4748136 - DNA, 25 bp, Homo sapien
gatagacgcgaagctaggcctcttt

SEQ ID NO: 4748137 - DNA, 25 bp, Homo sapien
tgtcttctccgggacagtctctgag

SEQ ID NO: 4748138 - DNA, 25 bp, Homo sapien
gcttgactgtgatttaacacctgaa

SEQ ID NO: 4748139 - DNA, 25 bp, Homo sapien
cactaggtaaataggtgcttgactg

SEQ ID NO: 4748140 - DNA, 25 bp, Homo sapien
acagcctttgagctctctccatgtc

SEQ ID NO: 4748141 - DNA, 25 bp, Homo sapien
ctctgagctctctcttgtttgggac

SEQ ID NO: 4748142 - DNA, 25 bp, Homo sapien
ttctccgggacagcctctgaactgt

SEQ ID NO: 4748143 - DNA, 25 bp, Homo sapien
gctctccacgtcttctctgggacag

SEQ ID NO: 4748144 - DNA, 25 bp, Homo sapien
gaactgtctccacgtctcctccagg

SEQ ID NO: 4748145 - DNA, 25 bp, Homo sapien
gagctctttccacgtcttctccggg

SEQ ID NO: 4748146 - DNA, 25 bp, Homo sapien
tctgggtctcctgtggagtctgatc

SEQ ID NO: 4748147 - DNA, 25 bp, Homo sapien
tctctgggtctcctgtggagtctga

SEQ ID NO: 4748148 - DNA, 25 bp, Homo sapien
tgggtctcctgtggagtctgatcac

SEQ ID NO: 4748149 - DNA, 25 bp, Homo sapien
ttctctgggtctcctgtggagtctg

SEQ ID NO: 4748150 - DNA, 25 bp, Homo sapien
tcttaggaaagacgttagcatcctc

SEQ ID NO: 4748151 - DNA, 25 bp, Homo sapien
gtttcttaggaaagacgttagcatc

SEQ ID NO: 4748152 - DNA, 25 bp, Homo sapien
ggaaagacgttagcatcctctaaat

SEQ ID NO: 4748153 - DNA, 25 bp, Homo sapien
gacgttagcatcctctaaatcctca

SEQ ID NO: 4748154 - DNA, 25 bp, Homo sapien
ttctgggatttacagttggcatcat

SEQ ID NO: 4748155 - DNA, 25 bp, Homo sapien
tctgggatttacagttggcatcatt

SEQ ID NO: 4748156 - DNA, 25 bp, Homo sapien
gtgcctggcgcagcattattttgca

SEQ ID NO: 4748157 - DNA, 25 bp, Homo sapien
tgtgcctggcgcagcattattttgc

SEQ ID NO: 4748158 - DNA, 25 bp, Homo sapien
tgtccccacggaagtgggctcttct

SEQ ID NO: 4748159 - DNA, 25 bp, Homo sapien
tctgtccccacggaagtgggctctt

SEQ ID NO: 4748160 - DNA, 25 bp, Homo sapien
cacggaagtgggctcttctggttgc

SEQ ID NO: 4748161 - DNA, 25 bp, Homo sapien
aagtgggctcttctggttgcaacat

SEQ ID NO: 4748162 - DNA, 25 bp, Homo sapien
gtggctagaggcaccggatgtcttc

SEQ ID NO: 4748163 - DNA, 25 bp, Homo sapien
gaggcaccggatgtcttcggccagt

SEQ ID NO: 4748164 - DNA, 25 bp, Homo sapien
ggtgatggtggctagaggcaccgga

SEQ ID NO: 4748165 - DNA, 25 bp, Homo sapien
accggatgtcttcggccagtgctga

SEQ ID NO: 4748166 - DNA, 25 bp, Homo sapien
ggctttctaaggaacatgtccacct

SEQ ID NO: 4748167 - DNA, 25 bp, Homo sapien
gccatgaggtcatgtagctcctggg

SEQ ID NO: 4748168 - DNA, 25 bp, Homo sapien
tccaagatgggattcctcgcggtgc

SEQ ID NO: 4748169 - DNA, 25 bp, Homo sapien
gcatttgtccaactgccgtcatgag

SEQ ID NO: 4748170 - DNA, 25 bp, Homo sapien
tgccccagtgttggatgatccactt

SEQ ID NO: 4748171 - DNA, 25 bp, Homo sapien
tgattcgtcccgaagctgcatcaga

SEQ ID NO: 4748172 - DNA, 25 bp, Homo sapien
cttccgtgggaagcttttcatgtcc

SEQ ID NO: 4748173 - DNA, 25 bp, Homo sapien
catgggtgttggacacgggaagagc

SEQ ID NO: 4748174 - DNA, 25 bp, Homo sapien
gagttatcagtgtggagtcccgcag

SEQ ID NO: 4748175 - DNA, 25 bp, Homo sapien
taaaggcgcacgaggttctggcagt

SEQ ID NO: 4748176 - DNA, 25 bp, Homo sapien
tccgggcagctgtttcgagttctct

SEQ ID NO: 4748177 - DNA, 25 bp, Homo sapien
tgtcagttacccaggcgttagccac

SEQ ID NO: 4748178 - DNA, 25 bp, Homo sapien
ggtctggaccggagagctgaccaaa

SEQ ID NO: 4748179 - DNA, 25 bp, Homo sapien
aagtcacctttgtcaaggtgtggcc

SEQ ID NO: 4748180 - DNA, 25 bp, Homo sapien
cctttgtcaaggtgtggccccagga

SEQ ID NO: 4748181 - DNA, 25 bp, Homo sapien
tctggaccggagagctgaccaaagt

SEQ ID NO: 4748182 - DNA, 25 bp, Homo sapien
cagagtgggtgctcgggccacagcc

SEQ ID NO: 4748183 - DNA, 25 bp, Homo sapien
gggccggagggcagagtgggtgctc

SEQ ID NO: 4748184 - DNA, 25 bp, Homo sapien
agccaggagccggtggggccggagg

SEQ ID NO: 4748185 - DNA, 25 bp, Homo sapien
ggagacaggaggcacgagctgcagc

SEQ ID NO: 4748186 - DNA, 25 bp, Homo sapien
ctgattgcccaattctcctgctacc

SEQ ID NO: 4748187 - DNA, 25 bp, Homo sapien
ctcctgctacccctcgccccagggt

SEQ ID NO: 4748188 - DNA, 25 bp, Homo sapien
gattgcccaattctcctgctacccc

SEQ ID NO: 4748189 - DNA, 25 bp, Homo sapien
tgattgcccaattctcctgctaccc

SEQ ID NO: 4748190 - DNA, 25 bp, Homo sapien
ctgcagttgtgaaagaaggtccgaa

SEQ ID NO: 4748191 - DNA, 25 bp, Homo sapien
aagaaggtccgaagtctcctccagg

SEQ ID NO: 4748192 - DNA, 25 bp, Homo sapien
tgtgaaagaaggtccgaagtctcct

SEQ ID NO: 4748193 - DNA, 25 bp, Homo sapien
aggcctctcgggcactctctaccag

SEQ ID NO: 4748194 - DNA, 25 bp, Homo sapien
catagaaggctctccactggatttg

SEQ ID NO: 4748195 - DNA, 25 bp, Homo sapien
tgagacttcccatcatagaaggctc

SEQ ID NO: 4748196 - DNA, 25 bp, Homo sapien
agaaggctctccactggatttggaa

SEQ ID NO: 4748197 - DNA, 25 bp, Homo sapien
tcccatcatagaaggctctccactg

SEQ ID NO: 4748198 - DNA, 25 bp, Homo sapien
ggaagatatccaacacccatggtgt

SEQ ID NO: 4748199 - DNA, 25 bp, Homo sapien
gcaaacaccaaggtgaggaagatat

SEQ ID NO: 4748200 - DNA, 25 bp, Homo sapien
aagatatccaacacccatggtgtgg

SEQ ID NO: 4748201 - DNA, 25 bp, Homo sapien
gaggaagatatccaacacccatggt

SEQ ID NO: 4748202 - DNA, 25 bp, Homo sapien
ggagactagggactggggcccaggc

SEQ ID NO: 4748203 - DNA, 25 bp, Homo sapien
cgtggagactagggactggggccca

SEQ ID NO: 4748204 - DNA, 25 bp, Homo sapien
tggagactagggactggggcccagg

SEQ ID NO: 4748205 - DNA, 25 bp, Homo sapien
gtggagactagggactggggcccag

SEQ ID NO: 4748206 - DNA, 25 bp, Homo sapien
ggaggcttcggtgtatctgtgtatc

SEQ ID NO: 4748207 - DNA, 25 bp, Homo sapien
attccaacaattaatggaaaaacat

SEQ ID NO: 4748208 - DNA, 25 bp, Homo sapien
cttttgggaggcttcggtgtatctg

SEQ ID NO: 4748209 - DNA, 25 bp, Homo sapien
tcttggaaccaggattcttttggga

SEQ ID NO: 4748210 - DNA, 25 bp, Homo sapien
ccaactctggacacagtcctgcaaa

SEQ ID NO: 4748211 - DNA, 25 bp, Homo sapien
ggaaccaactctggacacagtcctg

SEQ ID NO: 4748212 - DNA, 25 bp, Homo sapien
caggaaggtccacagctgcattctt

SEQ ID NO: 4748213 - DNA, 25 bp, Homo sapien
aggaaggtccacagctgcattcttg

SEQ ID NO: 4748214 - DNA, 25 bp, Homo sapien
accgtggccgccacaacagcaggag

SEQ ID NO: 4748215 - DNA, 25 bp, Homo sapien
caccgtggccgccacaacagcagga

SEQ ID NO: 4748216 - DNA, 25 bp, Homo sapien
tcaccgtggccgccacaacagcagg

SEQ ID NO: 4748217 - DNA, 25 bp, Homo sapien
tctagctggtcaagagcagctccag

SEQ ID NO: 4748218 - DNA, 25 bp, Homo sapien
gccctcctaagacttcagccgcgct

SEQ ID NO: 4748219 - DNA, 25 bp, Homo sapien
agagatgcagtctccgtcgccacca

SEQ ID NO: 4748220 - DNA, 25 bp, Homo sapien
tcctactgctcagactaccctccta

SEQ ID NO: 4748221 - DNA, 25 bp, Homo sapien
tactgtacagaagtggaataaagag

SEQ ID NO: 4748222 - DNA, 25 bp, Homo sapien
gtggaataaagagtagctgacaaca

SEQ ID NO: 4748223 - DNA, 25 bp, Homo sapien
cacctttgttacagagcaatagata

SEQ ID NO: 4748224 - DNA, 25 bp, Homo sapien
acacctttgttacagagcaatagat

SEQ ID NO: 4748225 - DNA, 25 bp, Homo sapien
ctctcgtgtgtcattcacgctcaag

SEQ ID NO: 4748226 - DNA, 25 bp, Homo sapien
ttgatatatcagtgacgtattctga

SEQ ID NO: 4748227 - DNA, 25 bp, Homo sapien
caaagaatctctcgtgtgtcattca

SEQ ID NO: 4748228 - DNA, 25 bp, Homo sapien
atggaaggcaaagaatctctcgtgt

SEQ ID NO: 4748229 - DNA, 25 bp, Homo sapien
tgtacatctttatgttctttggcag

SEQ ID NO: 4748230 - DNA, 25 bp, Homo sapien
caatgcttttactacagctaggtcc

SEQ ID NO: 4748231 - DNA, 25 bp, Homo sapien
ttatagcaatgcttttactacagct

SEQ ID NO: 4748232 - DNA, 25 bp, Homo sapien
tactacagctaggtccccttgtaca

SEQ ID NO: 4748233 - DNA, 25 bp, Homo sapien
tcaaggccccttattcctaactgta

SEQ ID NO: 4748234 - DNA, 25 bp, Homo sapien
tgctcttgccatctaacaggaaaac

SEQ ID NO: 4748235 - DNA, 25 bp, Homo sapien
cctaactgtatcttctgttttgggc

SEQ ID NO: 4748236 - DNA, 25 bp, Homo sapien
gttttgggcattgtgctcttgccat

SEQ ID NO: 4748237 - DNA, 25 bp, Homo sapien
tgatacttttctacctatgcattca

SEQ ID NO: 4748238 - DNA, 25 bp, Homo sapien
tagacttagtctcggtcacagaggg

SEQ ID NO: 4748239 - DNA, 25 bp, Homo sapien
aaaatatgatacttttctacctatg

SEQ ID NO: 4748240 - DNA, 25 bp, Homo sapien
tgtgctagacttagtctcggtcaca

SEQ ID NO: 4748241 - DNA, 25 bp, Homo sapien
taggtataagcatgttctaatcctg

SEQ ID NO: 4748242 - DNA, 25 bp, Homo sapien
ctaacatcatgattgtacaaccagt

SEQ ID NO: 4748243 - DNA, 25 bp, Homo sapien
tagtgtggcttgattatctgacaaa

SEQ ID NO: 4748244 - DNA, 25 bp, Homo sapien
caaatctaacatactcttaagggta

SEQ ID NO: 4748245 - DNA, 25 bp, Homo sapien
tcctcttacaggaatccccttttga

SEQ ID NO: 4748246 - DNA, 25 bp, Homo sapien
cattgtgtgtccatttagctgctgc

SEQ ID NO: 4748247 - DNA, 25 bp, Homo sapien
taagttattgccataggaagaaagt

SEQ ID NO: 4748248 - DNA, 25 bp, Homo sapien
gctgctgcatatgtgttgtaatggt

SEQ ID NO: 4748249 - DNA, 25 bp, Homo sapien
ttgccacaatccgaactgccactgt

SEQ ID NO: 4748250 - DNA, 25 bp, Homo sapien
gagttttccttcctcgttcattgca

SEQ ID NO: 4748251 - DNA, 25 bp, Homo sapien
cctcgttcattgcaagatagaattc

SEQ ID NO: 4748252 - DNA, 25 bp, Homo sapien
cctttgattgccacaatccgaactg

SEQ ID NO: 4748253 - DNA, 25 bp, Homo sapien
agccaaaacggtgccactgccctct

SEQ ID NO: 4748254 - DNA, 25 bp, Homo sapien
caacatggcgaaaaatacaaaaaat

SEQ ID NO: 4748255 - DNA, 25 bp, Homo sapien
gtgagccaaaacggtgccactgccc

SEQ ID NO: 4748256 - DNA, 25 bp, Homo sapien
tatccgggtgtggtagcgggtgcct

SEQ ID NO: 4748257 - DNA, 25 bp, Homo sapien
tttatgacaggatagtagcatctgg

SEQ ID NO: 4748258 - DNA, 25 bp, Homo sapien
taatttatgacaggatagtagcatc

SEQ ID NO: 4748259 - DNA, 25 bp, Homo sapien
tatgacaggatagtagcatctggtg

SEQ ID NO: 4748260 - DNA, 25 bp, Homo sapien
ctaatttatgacaggatagtagcat

SEQ ID NO: 4748261 - DNA, 25 bp, Homo sapien
tcacgttgcccctaaaggcgtctct

SEQ ID NO: 4748262 - DNA, 25 bp, Homo sapien
gttgcccctaaaggcgtctctgtta

SEQ ID NO: 4748263 - DNA, 25 bp, Homo sapien
tcttgacctcacgttgcccctaaag

SEQ ID NO: 4748264 - DNA, 25 bp, Homo sapien
tctgttattatattcatgactttcc

SEQ ID NO: 4748265 - DNA, 25 bp, Homo sapien
tgagcatgaaagttcaagactgtag

SEQ ID NO: 4748266 - DNA, 25 bp, Homo sapien
ttgagcatgaaagttcaagactgta

SEQ ID NO: 4748267 - DNA, 25 bp, Homo sapien
gagcatgaaagttcaagactgtagt

SEQ ID NO: 4748268 - DNA, 25 bp, Homo sapien
gcatgaaagttcaagactgtagtga

SEQ ID NO: 4748269 - DNA, 25 bp, Homo sapien
tcccaggaatttgatgtcagatgca

SEQ ID NO: 4748270 - DNA, 25 bp, Homo sapien
ctgtacttcccaggaatttgatgtc

SEQ ID NO: 4748271 - DNA, 25 bp, Homo sapien
gtcagatgcattttctattatttcc

SEQ ID NO: 4748272 - DNA, 25 bp, Homo sapien
cagatgcattttctattatttccat

SEQ ID NO: 4748273 - DNA, 25 bp, Homo sapien
tatgcgggaaaactccagcctggtg

SEQ ID NO: 4748274 - DNA, 25 bp, Homo sapien
aagaagctgaccaccgagttacaga

SEQ ID NO: 4748275 - DNA, 25 bp, Homo sapien
caaggacagatgtgactaacttcag

SEQ ID NO: 4748276 - DNA, 25 bp, Homo sapien
cagattcatgggaaagacatcagga

SEQ ID NO: 4748277 - DNA, 25 bp, Homo sapien
tgtgctccgtgttctcccacaatag

SEQ ID NO: 4748278 - DNA, 25 bp, Homo sapien
cctgcctgatgtcagttatggacta

SEQ ID NO: 4748279 - DNA, 25 bp, Homo sapien
tgtagcttagctagagacccgctgc

SEQ ID NO: 4748280 - DNA, 25 bp, Homo sapien
gggtcccctgcctcttagagctgct

SEQ ID NO: 4748281 - DNA, 25 bp, Homo sapien
taaattaaagcaacacatgtgcatg

SEQ ID NO: 4748282 - DNA, 25 bp, Homo sapien
tcagttttaagtaatatcccttgac

SEQ ID NO: 4748283 - DNA, 25 bp, Homo sapien
catacaccattgactaaaggaaacc

SEQ ID NO: 4748284 - DNA, 25 bp, Homo sapien
tatgctattctcttgaactgtaaat

SEQ ID NO: 4748285 - DNA, 25 bp, Homo sapien
tgttacatcctgtcaaaatgatgag

SEQ ID NO: 4748286 - DNA, 25 bp, Homo sapien
gatgagaagacagatcatcctttag

SEQ ID NO: 4748287 - DNA, 25 bp, Homo sapien
agaagacagatcatcctttagggaa

SEQ ID NO: 4748288 - DNA, 25 bp, Homo sapien
tttgttttgttacatcctgtcaaaa

SEQ ID NO: 4748289 - DNA, 25 bp, Homo sapien
tgagcttaattgatacctatgtgta

SEQ ID NO: 4748290 - DNA, 25 bp, Homo sapien
tgttttggggcatcacaagccatgg

SEQ ID NO: 4748291 - DNA, 25 bp, Homo sapien
taattgatacctatgtgtattcgaa

SEQ ID NO: 4748292 - DNA, 25 bp, Homo sapien
tgatacctatgtgtattcgaatggt

SEQ ID NO: 4748293 - DNA, 25 bp, Homo sapien
agttccccgcaggaactgagtcaga

SEQ ID NO: 4748294 - DNA, 25 bp, Homo sapien
agccctggcccgtcttgacgggcga

SEQ ID NO: 4748295 - DNA, 25 bp, Homo sapien
gtcccaaccgtacagatgagaaagc

SEQ ID NO: 4748296 - DNA, 25 bp, Homo sapien
cttgacgggcgagggttactgtact

SEQ ID NO: 4748297 - DNA, 25 bp, Homo sapien
agtcgcggtggccaccactgtgcgc

SEQ ID NO: 4748298 - DNA, 25 bp, Homo sapien
gcgacgcgtgcgcaggtaaagtcca

SEQ ID NO: 4748299 - DNA, 25 bp, Homo sapien
cactgtgcgcggagatggctgcgac

SEQ ID NO: 4748300 - DNA, 25 bp, Homo sapien
ggtaaagtccatccgtgccttgcct

SEQ ID NO: 4748301 - DNA, 25 bp, Homo sapien
tccagatctcgatcccaaactccct

SEQ ID NO: 4748302 - DNA, 25 bp, Homo sapien
tcctcttccagtctagtgctttttt

SEQ ID NO: 4748303 - DNA, 25 bp, Homo sapien
tccagtctagtgcttttttccagat

SEQ ID NO: 4748304 - DNA, 25 bp, Homo sapien
agaatctggacccgaatccacccat

SEQ ID NO: 4748305 - DNA, 25 bp, Homo sapien
gacctccatgttgctcttgagcctg

SEQ ID NO: 4748306 - DNA, 25 bp, Homo sapien
gagaggagcgattaagtgcagacct

SEQ ID NO: 4748307 - DNA, 25 bp, Homo sapien
ggagcgattaagtgcagacctccat

SEQ ID NO: 4748308 - DNA, 25 bp, Homo sapien
cgcccccggagaggagcgattaagt

SEQ ID NO: 4748309 - DNA, 25 bp, Homo sapien
agactgccctgagaccgccctttga

SEQ ID NO: 4748310 - DNA, 25 bp, Homo sapien
ggatggggagctcttaagactgccc

SEQ ID NO: 4748311 - DNA, 25 bp, Homo sapien
tggagagtccttgccagttctttgg

SEQ ID NO: 4748312 - DNA, 25 bp, Homo sapien
agctcttaagactgccctgagaccg

SEQ ID NO: 4748313 - DNA, 25 bp, Homo sapien
tgttcttcccatacgcgaatggcag

SEQ ID NO: 4748314 - DNA, 25 bp, Homo sapien
ctctgttcttcccatacgcgaatgg

SEQ ID NO: 4748315 - DNA, 25 bp, Homo sapien
cttcccatacgcgaatggcaggcat

SEQ ID NO: 4748316 - DNA, 25 bp, Homo sapien
gttcttcccatacgcgaatggcagg

SEQ ID NO: 4748317 - DNA, 25 bp, Homo sapien
gagcttaagctgcaggtccaagctt

SEQ ID NO: 4748318 - DNA, 25 bp, Homo sapien
aggtaacatcgaccgccaggtggag

SEQ ID NO: 4748319 - DNA, 25 bp, Homo sapien
ggctaagagcctcctccgagcttaa

SEQ ID NO: 4748320 - DNA, 25 bp, Homo sapien
gcccgacaaccggagcaaagggctg

SEQ ID NO: 4748321 - DNA, 25 bp, Homo sapien
tccgcctgtcgtagagagccttaag

SEQ ID NO: 4748322 - DNA, 25 bp, Homo sapien
ttttacgagagagtgggccctgtcc

SEQ ID NO: 4748323 - DNA, 25 bp, Homo sapien
aatgtgcatttgaccttgaggatac

SEQ ID NO: 4748324 - DNA, 25 bp, Homo sapien
ggcaatcattagcacacataaggcg

SEQ ID NO: 4748325 - DNA, 25 bp, Homo sapien
tgagcttttgctttaaaatacattc

SEQ ID NO: 4748326 - DNA, 25 bp, Homo sapien
tttgagcttttgctttaaaatacat

SEQ ID NO: 4748327 - DNA, 25 bp, Homo sapien
agcttttgctttaaaatacattcag

SEQ ID NO: 4748328 - DNA, 25 bp, Homo sapien
ctttgagcttttgctttaaaataca

SEQ ID NO: 4748329 - DNA, 25 bp, Homo sapien
ctgttcatgcactgactcttctaac

SEQ ID NO: 4748330 - DNA, 25 bp, Homo sapien
gcccagaagactcttgcagtggtga

SEQ ID NO: 4748331 - DNA, 25 bp, Homo sapien
gcagtggtgagccagtctctttatc

SEQ ID NO: 4748332 - DNA, 25 bp, Homo sapien
ggagaggcccagtaccaagatgatc

SEQ ID NO: 4748333 - DNA, 25 bp, Homo sapien
atgatcatccacaataacctgcaca

SEQ ID NO: 4748334 - DNA, 25 bp, Homo sapien
agaagccgcatggagatctggcacg

SEQ ID NO: 4748335 - DNA, 25 bp, Homo sapien
agaacgggagtcagcattgcgctca

SEQ ID NO: 4748336 - DNA, 25 bp, Homo sapien
tcagaacgggcaatgggaacaacca

SEQ ID NO: 4748337 - DNA, 25 bp, Homo sapien
gtcagcattgcgctcatggctctcc

SEQ ID NO: 4748338 - DNA, 25 bp, Homo sapien
caataattcgctgcttcgggaaggg

SEQ ID NO: 4748339 - DNA, 25 bp, Homo sapien
tggagggaccatgccttaaaagagt

SEQ ID NO: 4748340 - DNA, 25 bp, Homo sapien
tccattggcccgtatatgaacaggc

SEQ ID NO: 4748341 - DNA, 25 bp, Homo sapien
taacctggctaagtgtctttgaaaa

SEQ ID NO: 4748342 - DNA, 25 bp, Homo sapien
agtagaagcgaacggagacagctat

SEQ ID NO: 4748343 - DNA, 25 bp, Homo sapien
taaagtagaagcgaacggagacagc

SEQ ID NO: 4748344 - DNA, 25 bp, Homo sapien
gaagcgaacggagacagctatgaag

SEQ ID NO: 4748345 - DNA, 25 bp, Homo sapien
aactgtaaagtagaagcgaacggag

SEQ ID NO: 4748346 - DNA, 25 bp, Homo sapien
gaagaaacctccaggaattagcagg

SEQ ID NO: 4748347 - DNA, 25 bp, Homo sapien
tttgggccctgatgaaaatgataaa

SEQ ID NO: 4748348 - DNA, 25 bp, Homo sapien
tagagatggcatatgtttgggccct

SEQ ID NO: 4748349 - DNA, 25 bp, Homo sapien
tgataaaattgtggcctggttgcag

SEQ ID NO: 4748350 - DNA, 25 bp, Homo sapien
catagtgcttatcatataccaggta

SEQ ID NO: 4748351 - DNA, 25 bp, Homo sapien
tactggattctcataactccctggg

SEQ ID NO: 4748352 - DNA, 25 bp, Homo sapien
caagtgaggctcatacacggtgtga

SEQ ID NO: 4748353 - DNA, 25 bp, Homo sapien
aacagggatgggagaatacctctgg

SEQ ID NO: 4748354 - DNA, 25 bp, Homo sapien
aggactggaccaggcgtggacctct

SEQ ID NO: 4748355 - DNA, 25 bp, Homo sapien
cccaggcagagaggactggaccagg

SEQ ID NO: 4748356 - DNA, 25 bp, Homo sapien
actggaccaggcgtggacctctgac

SEQ ID NO: 4748357 - DNA, 25 bp, Homo sapien
gagaggactggaccaggcgtggacc

SEQ ID NO: 4748358 - DNA, 25 bp, Homo sapien
cctccttcaattgtagatgctgcag

SEQ ID NO: 4748359 - DNA, 25 bp, Homo sapien
aaatgaccatgtatctcgagaagag

SEQ ID NO: 4748360 - DNA, 25 bp, Homo sapien
cagtctcaggattgtcagccatcca

SEQ ID NO: 4748361 - DNA, 25 bp, Homo sapien
aattcatggtgaaatgaccatgtat

SEQ ID NO: 4748362 - DNA, 25 bp, Homo sapien
gatcttgtcagtctcaggattgtca

SEQ ID NO: 4748363 - DNA, 25 bp, Homo sapien
aagttcccagcctatgtcacatgag

SEQ ID NO: 4748364 - DNA, 25 bp, Homo sapien
tgaaggctcctgatcatcctggatg

SEQ ID NO: 4748365 - DNA, 25 bp, Homo sapien
ggtcagccccacctgaataaacggc

SEQ ID NO: 4748366 - DNA, 25 bp, Homo sapien
caagtttgctgcagaaataacctcc

SEQ ID NO: 4748367 - DNA, 25 bp, Homo sapien
tcccacagccattgttatcacaagg

SEQ ID NO: 4748368 - DNA, 25 bp, Homo sapien
cactgaggtgtgtcttgtgagagaa

SEQ ID NO: 4748369 - DNA, 25 bp, Homo sapien
gaattgtaggtgaaagatctcccac

SEQ ID NO: 4748370 - DNA, 25 bp, Homo sapien
ccaggatgctgaataggatgtgaac

SEQ ID NO: 4748371 - DNA, 25 bp, Homo sapien
tgaggggtgacttcctactgaaatt

SEQ ID NO: 4748372 - DNA, 25 bp, Homo sapien
gagtgaggggtgacttcctactgaa

SEQ ID NO: 4748373 - DNA, 25 bp, Homo sapien
agtgaggggtgacttcctactgaaa

SEQ ID NO: 4748374 - DNA, 25 bp, Homo sapien
ctactgaaattaatccccctttcat

SEQ ID NO: 4748375 - DNA, 25 bp, Homo sapien
tattcaacagcggtggttttgtcac

SEQ ID NO: 4748376 - DNA, 25 bp, Homo sapien
tgtcagttctcatgtggttaaataa

SEQ ID NO: 4748377 - DNA, 25 bp, Homo sapien
cccatattcattaagatcagagcat

SEQ ID NO: 4748378 - DNA, 25 bp, Homo sapien
tttgtcacaggatgtcccatattca

SEQ ID NO: 4748379 - DNA, 25 bp, Homo sapien
acaaattgtcttatcatataaacct

SEQ ID NO: 4748380 - DNA, 25 bp, Homo sapien
tacaaattgtcttatcatataaacc

SEQ ID NO: 4748381 - DNA, 25 bp, Homo sapien
caaattgtcttatcatataaacctt

SEQ ID NO: 4748382 - DNA, 25 bp, Homo sapien
tctcatgcttaatatcaagctgcag

SEQ ID NO: 4748383 - DNA, 25 bp, Homo sapien
ggcaaattcattctgtgtgagtcac

SEQ ID NO: 4748384 - DNA, 25 bp, Homo sapien
ctctggagctatttccagattaaat

SEQ ID NO: 4748385 - DNA, 25 bp, Homo sapien
tataattaattgagaagcaactggc

SEQ ID NO: 4748386 - DNA, 25 bp, Homo sapien
agctccatgctacttagctacacag

SEQ ID NO: 4748387 - DNA, 25 bp, Homo sapien
agcctcaatatctggtagagcagca

SEQ ID NO: 4748388 - DNA, 25 bp, Homo sapien
aaatcctcctgtatcactcgttttt

SEQ ID NO: 4748389 - DNA, 25 bp, Homo sapien
tatagcgttacctctttacagatgt

SEQ ID NO: 4748390 - DNA, 25 bp, Homo sapien
ctatgttacttatttagggatatcc

SEQ ID NO: 4748391 - DNA, 25 bp, Homo sapien
gctatttgttggtatggcttcaaac

SEQ ID NO: 4748392 - DNA, 25 bp, Homo sapien
tagtgactcagcaacatacttgatc

SEQ ID NO: 4748393 - DNA, 25 bp, Homo sapien
cctttttagacaatcaatatgatcc

SEQ ID NO: 4748394 - DNA, 25 bp, Homo sapien
ttcatcttctaaagaccatggctct

SEQ ID NO: 4748395 - DNA, 25 bp, Homo sapien
catcttctaaagaccatggctcttc

SEQ ID NO: 4748396 - DNA, 25 bp, Homo sapien
gaattcatcttctaaagaccatggc

SEQ ID NO: 4748397 - DNA, 25 bp, Homo sapien
aggaattcatcttctaaagaccatg

SEQ ID NO: 4748398 - DNA, 25 bp, Homo sapien
ccactgagacgaggtggctgtagtt

SEQ ID NO: 4748399 - DNA, 25 bp, Homo sapien
gcatcacatctctgtacagcgtcct

SEQ ID NO: 4748400 - DNA, 25 bp, Homo sapien
ccagcatcacatctctgtacagcgt

SEQ ID NO: 4748401 - DNA, 25 bp, Homo sapien
cactgagacgaggtggctgtagttc

SEQ ID NO: 4748402 - DNA, 25 bp, Homo sapien
ctcccgggtgaattccacagtcacg

SEQ ID NO: 4748403 - DNA, 25 bp, Homo sapien
gtcacgtcctggaatgacactgatg

SEQ ID NO: 4748404 - DNA, 25 bp, Homo sapien
ccgggtgaattccacagtcacgtcc

SEQ ID NO: 4748405 - DNA, 25 bp, Homo sapien
agtcacgtcctggaatgacactgat

SEQ ID NO: 4748406 - DNA, 25 bp, Homo sapien
tatccggggtagtctctaggacatt

SEQ ID NO: 4748407 - DNA, 25 bp, Homo sapien
ccacatctccgcaaattatccgggg

SEQ ID NO: 4748408 - DNA, 25 bp, Homo sapien
tctccgcaaattatccggggtagtc

SEQ ID NO: 4748409 - DNA, 25 bp, Homo sapien
tagtctctaggacattcacaccctc

SEQ ID NO: 4748410 - DNA, 25 bp, Homo sapien
gaagagtgtagaggactgtggaggt

SEQ ID NO: 4748411 - DNA, 25 bp, Homo sapien
tggaagagtgtagaggactgtggag

SEQ ID NO: 4748412 - DNA, 25 bp, Homo sapien
agtgtagaggactgtggaggttcag

SEQ ID NO: 4748413 - DNA, 25 bp, Homo sapien
agagtgtagaggactgtggaggttc

SEQ ID NO: 4748414 - DNA, 25 bp, Homo sapien
ggtctgcctctcagttcttacagag

SEQ ID NO: 4748415 - DNA, 25 bp, Homo sapien
cctgacatgagatggttcgacttga

SEQ ID NO: 4748416 - DNA, 25 bp, Homo sapien
gggtcatgagagacctggtctgcct

SEQ ID NO: 4748417 - DNA, 25 bp, Homo sapien
taatggttttactgcgacataaccc

SEQ ID NO: 4748418 - DNA, 25 bp, Homo sapien
gaacacgagttgctagtaacctcct

SEQ ID NO: 4748419 - DNA, 25 bp, Homo sapien
taccacttggtgagattctgtccac

SEQ ID NO: 4748420 - DNA, 25 bp, Homo sapien
ttagaacgagcaggacagggagtcc

SEQ ID NO: 4748421 - DNA, 25 bp, Homo sapien
gccactctgcataagcgctctgaag

SEQ ID NO: 4748422 - DNA, 25 bp, Homo sapien
tgcggacaggactcggcctgggccc

SEQ ID NO: 4748423 - DNA, 25 bp, Homo sapien
gcggacaggactcggcctgggcccg

SEQ ID NO: 4748424 - DNA, 25 bp, Homo sapien
cggagccctgtcaccgacgctctca

SEQ ID NO: 4748425 - DNA, 25 bp, Homo sapien
tgctgtcctccgcacacaagcccgc

SEQ ID NO: 4748426 - DNA, 25 bp, Homo sapien
ggagccctgtcaccgacgctctcac

SEQ ID NO: 4748427 - DNA, 25 bp, Homo sapien
gtcctccgcacacaagcccgcccgt

SEQ ID NO: 4748428 - DNA, 25 bp, Homo sapien
tcccgcgcagacctaaagactcgga

SEQ ID NO: 4748429 - DNA, 25 bp, Homo sapien
gcagacctaaagactcggacaccgt

SEQ ID NO: 4748430 - DNA, 25 bp, Homo sapien
tgggctcccgcgcagacctaaagac

SEQ ID NO: 4748431 - DNA, 25 bp, Homo sapien
ctaaagactcggacaccgtgtccct

SEQ ID NO: 4748432 - DNA, 25 bp, Homo sapien
ctgttattatctttcttttttctca

SEQ ID NO: 4748433 - DNA, 25 bp, Homo sapien
tctgttattatctttcttttttctc

SEQ ID NO: 4748434 - DNA, 25 bp, Homo sapien
tcttttctaagatgttatcaagttg

SEQ ID NO: 4748435 - DNA, 25 bp, Homo sapien
taggcactccaaactctgattgtaa

SEQ ID NO: 4748436 - DNA, 25 bp, Homo sapien
tcccagaaacaagtacatcgccctt

SEQ ID NO: 4748437 - DNA, 25 bp, Homo sapien
tgtaaggcctacctgattgctggca

SEQ ID NO: 4748438 - DNA, 25 bp, Homo sapien
gaaacaagtacatcgccctttgctg

SEQ ID NO: 4748439 - DNA, 25 bp, Homo sapien
tggattggtattgcaataaggtaaa

SEQ ID NO: 4748440 - DNA, 25 bp, Homo sapien
tattctcctctttttggattggtat

SEQ ID NO: 4748441 - DNA, 25 bp, Homo sapien
ggattggtattgcaataaggtaaaa

SEQ ID NO: 4748442 - DNA, 25 bp, Homo sapien
tcctctttttggattggtattgcaa

SEQ ID NO: 4748443 - DNA, 25 bp, Homo sapien
ccttctttcccaatcgtatgtggac

SEQ ID NO: 4748444 - DNA, 25 bp, Homo sapien
ttctttcccaatcgtatgtggacat

SEQ ID NO: 4748445 - DNA, 25 bp, Homo sapien
tgccttctttcccaatcgtatgtgg

SEQ ID NO: 4748446 - DNA, 25 bp, Homo sapien
gccttctttcccaatcgtatgtgga

SEQ ID NO: 4748447 - DNA, 25 bp, Homo sapien
cacacgtacacacgggagcgcaaca

SEQ ID NO: 4748448 - DNA, 25 bp, Homo sapien
acaccgaggcgggcgggtgcaaagg

SEQ ID NO: 4748449 - DNA, 25 bp, Homo sapien
ccagagagacgacccagcccacggc

SEQ ID NO: 4748450 - DNA, 25 bp, Homo sapien
cccacacaggcacgacacgcaggat

SEQ ID NO: 4748451 - DNA, 25 bp, Homo sapien
gatattcaacatgacaatgcatgtg

SEQ ID NO: 4748452 - DNA, 25 bp, Homo sapien
atctttttcaggatgccactgatgt

SEQ ID NO: 4748453 - DNA, 25 bp, Homo sapien
tactgatattcaacatgacaatgca

SEQ ID NO: 4748454 - DNA, 25 bp, Homo sapien
aatactgatattcaacatgacaatg

SEQ ID NO: 4748455 - DNA, 25 bp, Homo sapien
tgtgtgttggctactcggatattct

SEQ ID NO: 4748456 - DNA, 25 bp, Homo sapien
gagaaatgtcaatccaagtactgta

SEQ ID NO: 4748457 - DNA, 25 bp, Homo sapien
cacatctttgctaacacttgttacc

SEQ ID NO: 4748458 - DNA, 25 bp, Homo sapien
acaaccagtggggagtgatatctca

SEQ ID NO: 4748459 - DNA, 25 bp, Homo sapien
aacattctatcactctcgcctgcaa

SEQ ID NO: 4748460 - DNA, 25 bp, Homo sapien
ggtaacattctatcactctcgcctg

SEQ ID NO: 4748461 - DNA, 25 bp, Homo sapien
tttttgcacttgtcataattgaaag

SEQ ID NO: 4748462 - DNA, 25 bp, Homo sapien
ttggtaacattctatcactctcgcc

SEQ ID NO: 4748463 - DNA, 25 bp, Homo sapien
attccatcctcatcgagctccttga

SEQ ID NO: 4748464 - DNA, 25 bp, Homo sapien
gattccatcctcatcgagctccttg

SEQ ID NO: 4748465 - DNA, 25 bp, Homo sapien
ttgggacaaaatgagggcatttctg

SEQ ID NO: 4748466 - DNA, 25 bp, Homo sapien
gacaaaatgagggcatttctgagga

SEQ ID NO: 4748467 - DNA, 25 bp, Homo sapien
aaaatgagggcatttctgaggaagc

SEQ ID NO: 4748468 - DNA, 25 bp, Homo sapien
cttgggacaaaatgagggcatttct

SEQ ID NO: 4748469 - DNA, 25 bp, Homo sapien
tctttttctgtagtgactttatatg

SEQ ID NO: 4748470 - DNA, 25 bp, Homo sapien
tttctgtagtgactttatatgagca

SEQ ID NO: 4748471 - DNA, 25 bp, Homo sapien
ttaattgctgcattccttctttttc

SEQ ID NO: 4748472 - DNA, 25 bp, Homo sapien
ttttctgtagtgactttatatgagc

SEQ ID NO: 4748473 - DNA, 25 bp, Homo sapien
actgcagcgcactgtgcaccgagtt

SEQ ID NO: 4748474 - DNA, 25 bp, Homo sapien
gcgcactgtgcaccgagttttgcat

SEQ ID NO: 4748475 - DNA, 25 bp, Homo sapien
ttgtgatgtttccatcagacagcag

SEQ ID NO: 4748476 - DNA, 25 bp, Homo sapien
aggcggcactgcagcgcactgtgca

SEQ ID NO: 4748477 - DNA, 25 bp, Homo sapien
gagagggtcaacaccgtgacagcat

SEQ ID NO: 4748478 - DNA, 25 bp, Homo sapien
agagggtcaacaccgtgacagcatc

SEQ ID NO: 4748479 - DNA, 25 bp, Homo sapien
ggagacactgccctgctgagctgtc

SEQ ID NO: 4748480 - DNA, 25 bp, Homo sapien
tgctgagctgtcatttaaacttatt

SEQ ID NO: 4748481 - DNA, 25 bp, Homo sapien
gccctgctgagctgtcatttaaact

SEQ ID NO: 4748482 - DNA, 25 bp, Homo sapien
gggagacactgccctgctgagctgt

SEQ ID NO: 4748483 - DNA, 25 bp, Homo sapien
tgcgagcctccatgcagcattcgct

SEQ ID NO: 4748484 - DNA, 25 bp, Homo sapien
gaggagtcagttatcagtgccgctg

SEQ ID NO: 4748485 - DNA, 25 bp, Homo sapien
gagcctccatgcagcattcgctgga

SEQ ID NO: 4748486 - DNA, 25 bp, Homo sapien
tatcagtgccgctggtggacgtgaa

SEQ ID NO: 4748487 - DNA, 25 bp, Homo sapien
ctgtgtggccaagggtgacatttcc

SEQ ID NO: 4748488 - DNA, 25 bp, Homo sapien
tggccaagggtgacatttcctccag

SEQ ID NO: 4748489 - DNA, 25 bp, Homo sapien
tgtggccaagggtgacatttcctcc

SEQ ID NO: 4748490 - DNA, 25 bp, Homo sapien
gccaagggtgacatttcctccaggc

SEQ ID NO: 4748491 - DNA, 25 bp, Homo sapien
gaatgaacagtcaagccatgcctcc

SEQ ID NO: 4748492 - DNA, 25 bp, Homo sapien
tgaatgaacagtcaagccatgcctc

SEQ ID NO: 4748493 - DNA, 25 bp, Homo sapien
ttgaatgaacagtcaagccatgcct

SEQ ID NO: 4748494 - DNA, 25 bp, Homo sapien
tttgaatgaacagtcaagccatgcc

SEQ ID NO: 4748495 - DNA, 25 bp, Homo sapien
tatctgagcggaagcggaaccgcat

SEQ ID NO: 4748496 - DNA, 25 bp, Homo sapien
attatctgagcggaagcggaaccgc

SEQ ID NO: 4748497 - DNA, 25 bp, Homo sapien
cgtcattatctgagcggaagcggaa

SEQ ID NO: 4748498 - DNA, 25 bp, Homo sapien
aactgtttttacgtcattatctgag

SEQ ID NO: 4748499 - DNA, 25 bp, Homo sapien
tggatgttcccatcaggagtgaact

SEQ ID NO: 4748500 - DNA, 25 bp, Homo sapien
taggccagccaccgaacatggcctt

SEQ ID NO: 4748501 - DNA, 25 bp, Homo sapien
ctaggccagccaccgaacatggcct

SEQ ID NO: 4748502 - DNA, 25 bp, Homo sapien
aggccagccaccgaacatggccttc

SEQ ID NO: 4748503 - DNA, 25 bp, Homo sapien
gccagagcatctgccgaagtttggg

SEQ ID NO: 4748504 - DNA, 25 bp, Homo sapien
cctcgggctgatgggctccaaagcc

SEQ ID NO: 4748505 - DNA, 25 bp, Homo sapien
tggtcctcgggctgatgggctccaa

SEQ ID NO: 4748506 - DNA, 25 bp, Homo sapien
agccagagcatctgccgaagtttgg

SEQ ID NO: 4748507 - DNA, 25 bp, Homo sapien
cctcttgacaaacgtttttgtgtct

SEQ ID NO: 4748508 - DNA, 25 bp, Homo sapien
ttgacaaacgtttttgtgtcttcca

SEQ ID NO: 4748509 - DNA, 25 bp, Homo sapien
ttccatgaggatgattactactagc

SEQ ID NO: 4748510 - DNA, 25 bp, Homo sapien
gattactactagcttgttgctgatg

SEQ ID NO: 4748511 - DNA, 25 bp, Homo sapien
ctgtcaaagtaatcagctgaaagca

SEQ ID NO: 4748512 - DNA, 25 bp, Homo sapien
gtcaaagtaatcagctgaaagcagt

SEQ ID NO: 4748513 - DNA, 25 bp, Homo sapien
aaagtaatcagctgaaagcagttgc

SEQ ID NO: 4748514 - DNA, 25 bp, Homo sapien
agtaatcagctgaaagcagttgcct

SEQ ID NO: 4748515 - DNA, 25 bp, Homo sapien
catcgcgctgcacggtcttcccttc

SEQ ID NO: 4748516 - DNA, 25 bp, Homo sapien
gcgctgcaaggacgccctgtccctg

SEQ ID NO: 4748517 - DNA, 25 bp, Homo sapien
cctgatccccatcgcgctgcacggt

SEQ ID NO: 4748518 - DNA, 25 bp, Homo sapien
tcttcccttccaacaccgagggcgc

SEQ ID NO: 4748519 - DNA, 25 bp, Homo sapien
caatctgacccatgcaagtggatct

SEQ ID NO: 4748520 - DNA, 25 bp, Homo sapien
tgacccatgcaagtggatctcctgc

SEQ ID NO: 4748521 - DNA, 25 bp, Homo sapien
ggtcatgtcattgaagccacatctg

SEQ ID NO: 4748522 - DNA, 25 bp, Homo sapien
acatctgcaatctgacccatgcaag

SEQ ID NO: 4748523 - DNA, 25 bp, Homo sapien
tttacatgaccttcagcctgagggc

SEQ ID NO: 4748524 - DNA, 25 bp, Homo sapien
tgttactgagcaaacaatgggcttg

SEQ ID NO: 4748525 - DNA, 25 bp, Homo sapien
tgatctgattcgatcccacaatggg

SEQ ID NO: 4748526 - DNA, 25 bp, Homo sapien
cctaatgtacatggaggccaagacc

SEQ ID NO: 4748527 - DNA, 25 bp, Homo sapien
aagactttctcatacgctgcagtag

SEQ ID NO: 4748528 - DNA, 25 bp, Homo sapien
tttctcatacgctgcagtagcccat

SEQ ID NO: 4748529 - DNA, 25 bp, Homo sapien
tcatacgctgcagtagcccatgcac

SEQ ID NO: 4748530 - DNA, 25 bp, Homo sapien
tgcagtagcccatgcaccacacttg

SEQ ID NO: 4748531 - DNA, 25 bp, Homo sapien
cttgggcaaggacaagcaccttgac

SEQ ID NO: 4748532 - DNA, 25 bp, Homo sapien
acagaggttgtagagctctttgcag

SEQ ID NO: 4748533 - DNA, 25 bp, Homo sapien
tcagcggggaataatctccaccaag

SEQ ID NO: 4748534 - DNA, 25 bp, Homo sapien
ctccaccaagaacagtaatagcttg

SEQ ID NO: 4748535 - DNA, 25 bp, Homo sapien
ctgtggtcgttaggaaacagaagaa

SEQ ID NO: 4748536 - DNA, 25 bp, Homo sapien
gaagaaagcagctagccacagcttc

SEQ ID NO: 4748537 - DNA, 25 bp, Homo sapien
agaagaaagcagctagccacagctt

SEQ ID NO: 4748538 - DNA, 25 bp, Homo sapien
aagaaagcagctagccacagcttca

SEQ ID NO: 4748539 - DNA, 25 bp, Homo sapien
tctttccaaaactggcgaactctgt

SEQ ID NO: 4748540 - DNA, 25 bp, Homo sapien
tgctgtccgttgtccagtcccagaa

SEQ ID NO: 4748541 - DNA, 25 bp, Homo sapien
cagagaacaactacttgcacgtata

SEQ ID NO: 4748542 - DNA, 25 bp, Homo sapien
agtcccagaagaggttcagccacgc

SEQ ID NO: 4748543 - DNA, 25 bp, Homo sapien
ttcttcttgcataaacctctgctgg

SEQ ID NO: 4748544 - DNA, 25 bp, Homo sapien
gctggtatctaacattctttattct

SEQ ID NO: 4748545 - DNA, 25 bp, Homo sapien
tatctaacattctttattctcaagg

SEQ ID NO: 4748546 - DNA, 25 bp, Homo sapien
aaacctctgctggtatctaacattc

SEQ ID NO: 4748547 - DNA, 25 bp, Homo sapien
ggtttgagcagggatacttatgtca

SEQ ID NO: 4748548 - DNA, 25 bp, Homo sapien
tccaccctgacataacataaaagac

SEQ ID NO: 4748549 - DNA, 25 bp, Homo sapien
tttccaccctgacataacataaaag

SEQ ID NO: 4748550 - DNA, 25 bp, Homo sapien
caccctgacataacataaaagacaa

SEQ ID NO: 4748551 - DNA, 25 bp, Homo sapien
tttatcaagatagcccctaataccc

SEQ ID NO: 4748552 - DNA, 25 bp, Homo sapien
ttggtgccagctgacatgagacaag

SEQ ID NO: 4748553 - DNA, 25 bp, Homo sapien
ggcttggtgccagctgacatgagac

SEQ ID NO: 4748554 - DNA, 25 bp, Homo sapien
cctaatacccacatggataacagcc

SEQ ID NO: 4748555 - DNA, 25 bp, Homo sapien
caactcagttagacacacaccacaa

SEQ ID NO: 4748556 - DNA, 25 bp, Homo sapien
agaactgaactgggcaaaagtggtg

SEQ ID NO: 4748557 - DNA, 25 bp, Homo sapien
gcaactcagttagacacacaccaca

SEQ ID NO: 4748558 - DNA, 25 bp, Homo sapien
ctgcttcatagccctggtttgggca

SEQ ID NO: 4748559 - DNA, 25 bp, Homo sapien
ttcatagccctggtttgggcagcag

SEQ ID NO: 4748560 - DNA, 25 bp, Homo sapien
gcttcatagccctggtttgggcagc

SEQ ID NO: 4748561 - DNA, 25 bp, Homo sapien
tcatagccctggtttgggcagcaga

SEQ ID NO: 4748562 - DNA, 25 bp, Homo sapien
acagacagaccgacattaatggcag

SEQ ID NO: 4748563 - DNA, 25 bp, Homo sapien
cagacagaccgacattaatggcagg

SEQ ID NO: 4748564 - DNA, 25 bp, Homo sapien
agacagaccgacattaatggcaggg

SEQ ID NO: 4748565 - DNA, 25 bp, Homo sapien
tcattggaatgtaagcagacacatc

SEQ ID NO: 4748566 - DNA, 25 bp, Homo sapien
gatagaaatgacattcattggaatg

SEQ ID NO: 4748567 - DNA, 25 bp, Homo sapien
cttagtgatagaaatgacattcatt

SEQ ID NO: 4748568 - DNA, 25 bp, Homo sapien
aagcagacacatcaccagtctgttt

SEQ ID NO: 4748569 - DNA, 25 bp, Homo sapien
tgtcatagatggtcaaaacatgttt

SEQ ID NO: 4748570 - DNA, 25 bp, Homo sapien
aggcctcacaaccagggggttggca

SEQ ID NO: 4748571 - DNA, 25 bp, Homo sapien
ctgacaccacgatggtgtaattcat

SEQ ID NO: 4748572 - DNA, 25 bp, Homo sapien
gctgacaccacgatggtgtaattca

SEQ ID NO: 4748573 - DNA, 25 bp, Homo sapien
agctgacaccacgatggtgtaattc

SEQ ID NO: 4748574 - DNA, 25 bp, Homo sapien
ggcatctgcatcgtaagtctcttca

SEQ ID NO: 4748575 - DNA, 25 bp, Homo sapien
gcatctgcatcgtaagtctcttcac

SEQ ID NO: 4748576 - DNA, 25 bp, Homo sapien
tcatcagatccatcattgaaacatt

SEQ ID NO: 4748577 - DNA, 25 bp, Homo sapien
tgaccaataacaacatagacacagt

SEQ ID NO: 4748578 - DNA, 25 bp, Homo sapien
cagtggatctcttttgaccaataac

SEQ ID NO: 4748579 - DNA, 25 bp, Homo sapien
aacaacatagacacagtacagcttc

SEQ ID NO: 4748580 - DNA, 25 bp, Homo sapien
ccagtctgtccattaccaataatca

SEQ ID NO: 4748581 - DNA, 25 bp, Homo sapien
ttacagccttaatgccagtctgcat

SEQ ID NO: 4748582 - DNA, 25 bp, Homo sapien
ccaagctatttacagccttaatgcc

SEQ ID NO: 4748583 - DNA, 25 bp, Homo sapien
tggccaattggcaccaagctattta

SEQ ID NO: 4748584 - DNA, 25 bp, Homo sapien
taatgccagtctgcattggttcctg

SEQ ID NO: 4748585 - DNA, 25 bp, Homo sapien
ctgaaatttgaggaatgattccagg

SEQ ID NO: 4748586 - DNA, 25 bp, Homo sapien
aggaatgattccaggggctttcaga

SEQ ID NO: 4748587 - DNA, 25 bp, Homo sapien
gaatgattccaggggctttcagact

SEQ ID NO: 4748588 - DNA, 25 bp, Homo sapien
atgattccaggggctttcagactaa

SEQ ID NO: 4748589 - DNA, 25 bp, Homo sapien
ctatggttcttggaaccaaatggac

SEQ ID NO: 4748590 - DNA, 25 bp, Homo sapien
tggaatgtccacaatggctcttgtc

SEQ ID NO: 4748591 - DNA, 25 bp, Homo sapien
caactggaatgtccacaatggctct

SEQ ID NO: 4748592 - DNA, 25 bp, Homo sapien
aagggcatcaaccacatgacccaac

SEQ ID NO: 4748593 - DNA, 25 bp, Homo sapien
caccaactggaatgtccacaatggc

SEQ ID NO: 4748594 - DNA, 25 bp, Homo sapien
ctctagttgcaaaggtacattgtta

SEQ ID NO: 4748595 - DNA, 25 bp, Homo sapien
gttcctctagttgcaaaggtacatt

SEQ ID NO: 4748596 - DNA, 25 bp, Homo sapien
tagttcctctagttgcaaaggtaca

SEQ ID NO: 4748597 - DNA, 25 bp, Homo sapien
tcctctagttgcaaaggtacattgt

SEQ ID NO: 4748598 - DNA, 25 bp, Homo sapien
tctgcatgaatgctgcaaagtttcc

SEQ ID NO: 4748599 - DNA, 25 bp, Homo sapien
acaatccaggaccttcaccacacag

SEQ ID NO: 4748600 - DNA, 25 bp, Homo sapien
tgaagcctcttctatccgagggagc

SEQ ID NO: 4748601 - DNA, 25 bp, Homo sapien
tttaattcgggctccattctgcatc

SEQ ID NO: 4748602 - DNA, 25 bp, Homo sapien
gcccttaatccacagacagtggttt

SEQ ID NO: 4748603 - DNA, 25 bp, Homo sapien
gggtgaccagcccttaatccacaga

SEQ ID NO: 4748604 - DNA, 25 bp, Homo sapien
cagcgagagaaagagtcctggttcc

SEQ ID NO: 4748605 - DNA, 25 bp, Homo sapien
tggtttcagacgaccacagcagcgc

SEQ ID NO: 4748606 - DNA, 25 bp, Homo sapien
cgcagccttgccaccttacaagtta

SEQ ID NO: 4748607 - DNA, 25 bp, Homo sapien
tcagagaatcctcgcagacgggggt

SEQ ID NO: 4748608 - DNA, 25 bp, Homo sapien
tgggtgcaaagcagccgacacctca

SEQ ID NO: 4748609 - DNA, 25 bp, Homo sapien
ttacaagttacccacacgcaggaga

SEQ ID NO: 4748610 - DNA, 25 bp, Homo sapien
gtgctgcaatgtcgtgtgactgtgc

SEQ ID NO: 4748611 - DNA, 25 bp, Homo sapien
gcagtgctgcaatgtcgtgtgactg

SEQ ID NO: 4748612 - DNA, 25 bp, Homo sapien
ggcagtgctgcaatgtcgtgtgact

SEQ ID NO: 4748613 - DNA, 25 bp, Homo sapien
cagtgctgcaatgtcgtgtgactgt

SEQ ID NO: 4748614 - DNA, 25 bp, Homo sapien
ccaaggttaccagtgccacagaaca

SEQ ID NO: 4748615 - DNA, 25 bp, Homo sapien
aaggttaccagtgccacagaacaaa

SEQ ID NO: 4748616 - DNA, 25 bp, Homo sapien
caaggttaccagtgccacagaacaa

SEQ ID NO: 4748617 - DNA, 25 bp, Homo sapien
tccctagggagtcttgggccctctc

SEQ ID NO: 4748618 - DNA, 25 bp, Homo sapien
tttttgctgatagacaacccaaggc

SEQ ID NO: 4748619 - DNA, 25 bp, Homo sapien
ttagaggaatggctcgctctccctc

SEQ ID NO: 4748620 - DNA, 25 bp, Homo sapien
ggagcagaggatctccacgaagacc

SEQ ID NO: 4748621 - DNA, 25 bp, Homo sapien
ggggcaattgaccctttccaaagca

SEQ ID NO: 4748622 - DNA, 25 bp, Homo sapien
tgcaatcacagcgaggacaaacact

SEQ ID NO: 4748623 - DNA, 25 bp, Homo sapien
acaaacactaatgcccctcctgaga

SEQ ID NO: 4748624 - DNA, 25 bp, Homo sapien
gctgatggtgtggaccttgactcca

SEQ ID NO: 4748625 - DNA, 25 bp, Homo sapien
gagtggctcgtcctggacagactca

SEQ ID NO: 4748626 - DNA, 25 bp, Homo sapien
gccaggagtccctgagcgaggtgat

SEQ ID NO: 4748627 - DNA, 25 bp, Homo sapien
ctgccaggagtccctgagcgaggtg

SEQ ID NO: 4748628 - DNA, 25 bp, Homo sapien
tgccaggagtccctgagcgaggtga

SEQ ID NO: 4748629 - DNA, 25 bp, Homo sapien
catgtggaaacggtcacactggaga

SEQ ID NO: 4748630 - DNA, 25 bp, Homo sapien
atgtggaaacggtcacactggagag

SEQ ID NO: 4748631 - DNA, 25 bp, Homo sapien
gctaatgttgtcagcatccccagaa

SEQ ID NO: 4748632 - DNA, 25 bp, Homo sapien
tgtctgtacaagaggagctagaccc

SEQ ID NO: 4748633 - DNA, 25 bp, Homo sapien
cacgataaacatgagccacgctaat

SEQ ID NO: 4748634 - DNA, 25 bp, Homo sapien
gagctagacccacgataaacatgag

SEQ ID NO: 4748635 - DNA, 25 bp, Homo sapien
tcattgtttgagaattttacatcac

SEQ ID NO: 4748636 - DNA, 25 bp, Homo sapien
tttggctgcgtactttttatctatc

SEQ ID NO: 4748637 - DNA, 25 bp, Homo sapien
aatccagaaaaccaacatcgtgttt

SEQ ID NO: 4748638 - DNA, 25 bp, Homo sapien
catcgtgtttttacgaagggcctgc

SEQ ID NO: 4748639 - DNA, 25 bp, Homo sapien
cttctgatgtcctgatgtagaagcg

SEQ ID NO: 4748640 - DNA, 25 bp, Homo sapien
atctctgcgacccatctctgtgacc

SEQ ID NO: 4748641 - DNA, 25 bp, Homo sapien
ggccatctctgcgacccatctctgt

SEQ ID NO: 4748642 - DNA, 25 bp, Homo sapien
cagcttctgatgtcctgatgtagaa

SEQ ID NO: 4748643 - DNA, 25 bp, Homo sapien
tatgatattgaagttctccttcagc

SEQ ID NO: 4748644 - DNA, 25 bp, Homo sapien
atgatattgaagttctccttcagcc

SEQ ID NO: 4748645 - DNA, 25 bp, Homo sapien
tgtagacccctcctagatgacgagg

SEQ ID NO: 4748646 - DNA, 25 bp, Homo sapien
gacccctcctagatgacgaggaatg

SEQ ID NO: 4748647 - DNA, 25 bp, Homo sapien
tagacccctcctagatgacgaggaa

SEQ ID NO: 4748648 - DNA, 25 bp, Homo sapien
ttatgtagacccctcctagatgacg

SEQ ID NO: 4748649 - DNA, 25 bp, Homo sapien
acaaccttataaatgggctgaggag

SEQ ID NO: 4748650 - DNA, 25 bp, Homo sapien
caatgaacctatggctttatggcaa

SEQ ID NO: 4748651 - DNA, 25 bp, Homo sapien
gggctcagaactacttaagaacaaa

SEQ ID NO: 4748652 - DNA, 25 bp, Homo sapien
ggctgtctggcctctaagaaatgac

SEQ ID NO: 4748653 - DNA, 25 bp, Homo sapien
ttcacgtccccgctatagccacaca

SEQ ID NO: 4748654 - DNA, 25 bp, Homo sapien
ctatagccacacactacggtggaaa

SEQ ID NO: 4748655 - DNA, 25 bp, Homo sapien
gtccccgctatagccacacactacg

SEQ ID NO: 4748656 - DNA, 25 bp, Homo sapien
cacacactacggtggaaaggctcca

SEQ ID NO: 4748657 - DNA, 25 bp, Homo sapien
tgccttcgtgggtggtgcccagatc

SEQ ID NO: 4748658 - DNA, 25 bp, Homo sapien
agggctccacgtccatcccacaggg

SEQ ID NO: 4748659 - DNA, 25 bp, Homo sapien
cacagggacccggactctcatcttc

SEQ ID NO: 4748660 - DNA, 25 bp, Homo sapien
gccttcgtgggtggtgcccagatct

SEQ ID NO: 4748661 - DNA, 25 bp, Homo sapien
tatattacctgatggcttcgtgttc

SEQ ID NO: 4748662 - DNA, 25 bp, Homo sapien
caacttgatatattacctgatggct

SEQ ID NO: 4748663 - DNA, 25 bp, Homo sapien
tgatatattacctgatggcttcgtg

SEQ ID NO: 4748664 - DNA, 25 bp, Homo sapien
tatcaacttgatatattacctgatg

SEQ ID NO: 4748665 - DNA, 25 bp, Homo sapien
ctctctttcctgacaggcgggccat

SEQ ID NO: 4748666 - DNA, 25 bp, Homo sapien
ttgccacatgctggtcctctctttc

SEQ ID NO: 4748667 - DNA, 25 bp, Homo sapien
atcccaggcatttgccacatgctgg

SEQ ID NO: 4748668 - DNA, 25 bp, Homo sapien
catctgctcctacatatcccaggca

SEQ ID NO: 4748669 - DNA, 25 bp, Homo sapien
tgtgaagtcctcgatcacgtgagga

SEQ ID NO: 4748670 - DNA, 25 bp, Homo sapien
cggtcccggagcaatcgaagtctca

SEQ ID NO: 4748671 - DNA, 25 bp, Homo sapien
agtcctcgatcacgtgaggagatgc

SEQ ID NO: 4748672 - DNA, 25 bp, Homo sapien
tttgggtttgtgaagtcctcgatca

SEQ ID NO: 4748673 - DNA, 25 bp, Homo sapien
cttcaagaagctcagcaggctacta

SEQ ID NO: 4748674 - DNA, 25 bp, Homo sapien
aagctcagcaggctactactcgtgt

SEQ ID NO: 4748675 - DNA, 25 bp, Homo sapien
aagaagctcagcaggctactactcg

SEQ ID NO: 4748676 - DNA, 25 bp, Homo sapien
tcagcaggctactactcgtgttcat

SEQ ID NO: 4748677 - DNA, 25 bp, Homo sapien
tcacctttaatgctttctggggctg

SEQ ID NO: 4748678 - DNA, 25 bp, Homo sapien
tggcgcgggctgcttcacctttaat

SEQ ID NO: 4748679 - DNA, 25 bp, Homo sapien
aatcacgtgtacaaaggcggctgcg

SEQ ID NO: 4748680 - DNA, 25 bp, Homo sapien
ccttcaacagcagcgaaagccatgt

SEQ ID NO: 4748681 - DNA, 25 bp, Homo sapien
tgcatacaaatgtgctctgcgctct

SEQ ID NO: 4748682 - DNA, 25 bp, Homo sapien
gatgcatacaaatgtgctctgcgct

SEQ ID NO: 4748683 - DNA, 25 bp, Homo sapien
catacaaatgtgctctgcgctctgt

SEQ ID NO: 4748684 - DNA, 25 bp, Homo sapien
acaaatgtgctctgcgctctgtaga

SEQ ID NO: 4748685 - DNA, 25 bp, Homo sapien
tgcgtgctggggtaggatgcctgcc

SEQ ID NO: 4748686 - DNA, 25 bp, Homo sapien
ttgcgtgctggggtaggatgcctgc

SEQ ID NO: 4748687 - DNA, 25 bp, Homo sapien
ggtaggatgcctgcctcttcggatt

SEQ ID NO: 4748688 - DNA, 25 bp, Homo sapien
gctggggtaggatgcctgcctcttc

SEQ ID NO: 4748689 - DNA, 25 bp, Homo sapien
tttaaaaaggtcacacattttctga

SEQ ID NO: 4748690 - DNA, 25 bp, Homo sapien
cattttctgatccagcaatgcccca

SEQ ID NO: 4748691 - DNA, 25 bp, Homo sapien
aaaggtcacacattttctgatccag

SEQ ID NO: 4748692 - DNA, 25 bp, Homo sapien
attttctgatccagcaatgccccaa

SEQ ID NO: 4748693 - DNA, 25 bp, Homo sapien
ggaatcccatttcctagtctgcagc

SEQ ID NO: 4748694 - DNA, 25 bp, Homo sapien
tgactaggtgactaggtgaaggact

SEQ ID NO: 4748695 - DNA, 25 bp, Homo sapien
atcccatttcctagtctgcagcctt

SEQ ID NO: 4748696 - DNA, 25 bp, Homo sapien
actaggtgactaggtgaaggactga

SEQ ID NO: 4748697 - DNA, 25 bp, Homo sapien
tgccctatgcgccacaaagctgctt

SEQ ID NO: 4748698 - DNA, 25 bp, Homo sapien
ctgcttctcacatggcggactgtct

SEQ ID NO: 4748699 - DNA, 25 bp, Homo sapien
tgcttctcacatggcggactgtctt

SEQ ID NO: 4748700 - DNA, 25 bp, Homo sapien
tgtgttccccttgtgcgtgtgtgtc

SEQ ID NO: 4748701 - DNA, 25 bp, Homo sapien
ggcttgtgcagggatgccagcattc

SEQ ID NO: 4748702 - DNA, 25 bp, Homo sapien
ggtggcttgtgcagggatgccagca

SEQ ID NO: 4748703 - DNA, 25 bp, Homo sapien
ttgtgcagggatgccagcattccag

SEQ ID NO: 4748704 - DNA, 25 bp, Homo sapien
tcattcccgggttcctcttgcagac

SEQ ID NO: 4748705 - DNA, 25 bp, Homo sapien
actcttgtcctcgtctgaagtgtgt

SEQ ID NO: 4748706 - DNA, 25 bp, Homo sapien
gactcttgtcctcgtctgaagtgtg

SEQ ID NO: 4748707 - DNA, 25 bp, Homo sapien
gtgggactcttgtcctcgtctgaag

SEQ ID NO: 4748708 - DNA, 25 bp, Homo sapien
gggactcttgtcctcgtctgaagtg

SEQ ID NO: 4748709 - DNA, 25 bp, Homo sapien
gaccgcggtttacaggacacctgta

SEQ ID NO: 4748710 - DNA, 25 bp, Homo sapien
tggccagccccgcttgtaaaagtcc

SEQ ID NO: 4748711 - DNA, 25 bp, Homo sapien
cggaccgcggtttacaggacacctg

SEQ ID NO: 4748712 - DNA, 25 bp, Homo sapien
ctgaggttccggaaagcggaccgcg

SEQ ID NO: 4748713 - DNA, 25 bp, Homo sapien
tctcattcccgggttcctcttgcag

SEQ ID NO: 4748714 - DNA, 25 bp, Homo sapien
ggggctcttgtcctcgtctgcattg

SEQ ID NO: 4748715 - DNA, 25 bp, Homo sapien
cgggttcctcttgcagactgtatcg

SEQ ID NO: 4748716 - DNA, 25 bp, Homo sapien
ggtggtttgtccagggaggccagtg

SEQ ID NO: 4748717 - DNA, 25 bp, Homo sapien
ctgctcggctgcaaaccgaattcga

SEQ ID NO: 4748718 - DNA, 25 bp, Homo sapien
tcaagcggcctgtggacaggactgc

SEQ ID NO: 4748719 - DNA, 25 bp, Homo sapien
aattggattcaagcggcctgtggac

SEQ ID NO: 4748720 - DNA, 25 bp, Homo sapien
cgaattcgaattggattcaagcggc

SEQ ID NO: 4748721 - DNA, 25 bp, Homo sapien
gactcaggaagcacggaaaaacaaa

SEQ ID NO: 4748722 - DNA, 25 bp, Homo sapien
ggactcaggaagcacggaaaaacaa

SEQ ID NO: 4748723 - DNA, 25 bp, Homo sapien
taaattcaagaagccctgcgactgg

SEQ ID NO: 4748724 - DNA, 25 bp, Homo sapien
ccctgggttggccacagaacaataa

SEQ ID NO: 4748725 - DNA, 25 bp, Homo sapien
ttttgaacctggcagttgtcagcca

SEQ ID NO: 4748726 - DNA, 25 bp, Homo sapien
gtagaaatgtggctttttggcaagg

SEQ ID NO: 4748727 - DNA, 25 bp, Homo sapien
ccaggttccccacggccacatgatg

SEQ ID NO: 4748728 - DNA, 25 bp, Homo sapien
cgcgctgtggctgttcccatttgca

SEQ ID NO: 4748729 - DNA, 25 bp, Homo sapien
cccgtgctccgactccctgagttct

SEQ ID NO: 4748730 - DNA, 25 bp, Homo sapien
acggccacatgatgccccgcgctgt

SEQ ID NO: 4748731 - DNA, 25 bp, Homo sapien
gaccatgcagctggacaccgcatga

SEQ ID NO: 4748732 - DNA, 25 bp, Homo sapien
aggttcagactctcacagccggagg

SEQ ID NO: 4748733 - DNA, 25 bp, Homo sapien
tcaaaagggtctccccgagcatttg

SEQ ID NO: 4748734 - DNA, 25 bp, Homo sapien
tgaggtgatccccagaagcaatttg

SEQ ID NO: 4748735 - DNA, 25 bp, Homo sapien
gaatactggttggtccgtttggaga

SEQ ID NO: 4748736 - DNA, 25 bp, Homo sapien
taaattgtgtttcagtgggaggccg

SEQ ID NO: 4748737 - DNA, 25 bp, Homo sapien
gctgggtactgctcaggcaaacctg

SEQ ID NO: 4748738 - DNA, 25 bp, Homo sapien
tcaaggtctcgaaagaatgcaacag

SEQ ID NO: 4748739 - DNA, 25 bp, Homo sapien
ggaaaatccatctcaggccccaaaa

SEQ ID NO: 4748740 - DNA, 25 bp, Homo sapien
ttacttctcggtgggctcaggactc

SEQ ID NO: 4748741 - DNA, 25 bp, Homo sapien
caggagaccccagtaactcttcaac

SEQ ID NO: 4748742 - DNA, 25 bp, Homo sapien
tatctgcaaagggtcctgttcgctg

SEQ ID NO: 4748743 - DNA, 25 bp, Homo sapien
ttacagcagacaccactatctgcaa

SEQ ID NO: 4748744 - DNA, 25 bp, Homo sapien
tggactctgcctataacttcacagg

SEQ ID NO: 4748745 - DNA, 25 bp, Homo sapien
tgcaacagcgtgctttgcactcagc

SEQ ID NO: 4748746 - DNA, 25 bp, Homo sapien
acagagtaaaatgccaccaccagag

SEQ ID NO: 4748747 - DNA, 25 bp, Homo sapien
accaagactgtctgcccatgggctc

SEQ ID NO: 4748748 - DNA, 25 bp, Homo sapien
ctcagccattgagacagcagatcct

SEQ ID NO: 4748749 - DNA, 25 bp, Homo sapien
gctcagccattgagacagcagatcc

SEQ ID NO: 4748750 - DNA, 25 bp, Homo sapien
gagatgttatctgcaccccagactg

SEQ ID NO: 4748751 - DNA, 25 bp, Homo sapien
taaatacagggacaaagatggagca

SEQ ID NO: 4748752 - DNA, 25 bp, Homo sapien
cagggatccacaggccatgcaagtg

SEQ ID NO: 4748753 - DNA, 25 bp, Homo sapien
tgtggaactatgagtgaacccagcg

SEQ ID NO: 4748754 - DNA, 25 bp, Homo sapien
gagtggctcgtcctggacagactca

SEQ ID NO: 4748755 - DNA, 25 bp, Homo sapien
gctgatggtgtggaccttgactcca

SEQ ID NO: 4748756 - DNA, 25 bp, Homo sapien
acaaacactaatgcccctcctgaga

SEQ ID NO: 4748757 - DNA, 25 bp, Homo sapien
tgcaatcacagcgaggacaaacact

SEQ ID NO: 4748758 - DNA, 25 bp, Homo sapien
gggggaactgccaggagtccctgag

SEQ ID NO: 4748759 - DNA, 25 bp, Homo sapien
ctatgacacagggggaactgccagg

SEQ ID NO: 4748760 - DNA, 25 bp, Homo sapien
tatgacacagggggaactgccagga

SEQ ID NO: 4748761 - DNA, 25 bp, Homo sapien
gccaggagtccctgagcgaggtgat

SEQ ID NO: 4748762 - DNA, 25 bp, Homo sapien
gatcatatatgacacctagcaaggt

SEQ ID NO: 4748763 - DNA, 25 bp, Homo sapien
aagcaggctgcttgtggttatccat

SEQ ID NO: 4748764 - DNA, 25 bp, Homo sapien
gagatgcaggttttcattccggcca

SEQ ID NO: 4748765 - DNA, 25 bp, Homo sapien
tctatcagctgatcgggactccaca

SEQ ID NO: 4748766 - DNA, 25 bp, Homo sapien
tctcagcattccctcttttacttta

SEQ ID NO: 4748767 - DNA, 25 bp, Homo sapien
acgcccagctctcagcattccctct

SEQ ID NO: 4748768 - DNA, 25 bp, Homo sapien
tcagcattccctcttttactttatt

SEQ ID NO: 4748769 - DNA, 25 bp, Homo sapien
agctctcagcattccctcttttact

SEQ ID NO: 4748770 - DNA, 25 bp, Homo sapien
tcccggctcactggtcgcagtcttc

SEQ ID NO: 4748771 - DNA, 25 bp, Homo sapien
gtagagggacccccacatgccaggg

SEQ ID NO: 4748772 - DNA, 25 bp, Homo sapien
gcagtgcacaggatgattcagagag

SEQ ID NO: 4748773 - DNA, 25 bp, Homo sapien
ccctctgtgaaggcggccacttgag

SEQ ID NO: 4748774 - DNA, 25 bp, Homo sapien
tcattgtttgagaattttacatcac

SEQ ID NO: 4748775 - DNA, 25 bp, Homo sapien
catcgtgtttttacgaagggcctgc

SEQ ID NO: 4748776 - DNA, 25 bp, Homo sapien
aatccagaaaaccaacatcgtgttt

SEQ ID NO: 4748777 - DNA, 25 bp, Homo sapien
tttggctgcgtactttttatctatc

SEQ ID NO: 4748778 - DNA, 25 bp, Homo sapien
taattagaacacatagaacagatga

SEQ ID NO: 4748779 - DNA, 25 bp, Homo sapien
tataattagaacacatagaacagat

SEQ ID NO: 4748780 - DNA, 25 bp, Homo sapien
aattagaacacatagaacagatgac

SEQ ID NO: 4748781 - DNA, 25 bp, Homo sapien
ttataattagaacacatagaacaga

SEQ ID NO: 4748782 - DNA, 25 bp, Homo sapien
tacccagtatggcaggaggtcataa

SEQ ID NO: 4748783 - DNA, 25 bp, Homo sapien
cacaaagacccttcttcgtagacct

SEQ ID NO: 4748784 - DNA, 25 bp, Homo sapien
cgtagaccttagcaggagagacaca

SEQ ID NO: 4748785 - DNA, 25 bp, Homo sapien
gagacacacagtaaagagtaaacac

SEQ ID NO: 4748786 - DNA, 25 bp, Homo sapien
aggcgcccttgcacaggtctcttgc

SEQ ID NO: 4748787 - DNA, 25 bp, Homo sapien
ggcgcccttgcacaggtctcttgca

SEQ ID NO: 4748788 - DNA, 25 bp, Homo sapien
caaggcgcccttgcacaggtctctt

SEQ ID NO: 4748789 - DNA, 25 bp, Homo sapien
aaggcgcccttgcacaggtctcttg

SEQ ID NO: 4748790 - DNA, 25 bp, Homo sapien
cccagccggatgtcccaccacactc

SEQ ID NO: 4748791 - DNA, 25 bp, Homo sapien
tgtcccaccacactcctgcctggga

SEQ ID NO: 4748792 - DNA, 25 bp, Homo sapien
atgtcccaccacactcctgcctggg

SEQ ID NO: 4748793 - DNA, 25 bp, Homo sapien
gccggatgtcccaccacactcctgc

SEQ ID NO: 4748794 - DNA, 25 bp, Homo sapien
ggaatggcctcagagcaaccctggg

SEQ ID NO: 4748795 - DNA, 25 bp, Homo sapien
actccagacgaaattgcacagccgc

SEQ ID NO: 4748796 - DNA, 25 bp, Homo sapien
gggactccagacgaaattgcacagc

SEQ ID NO: 4748797 - DNA, 25 bp, Homo sapien
ctggggactccagacgaaattgcac

SEQ ID NO: 4748798 - DNA, 25 bp, Homo sapien
ccccttcatgtccccgctatagcca

SEQ ID NO: 4748799 - DNA, 25 bp, Homo sapien
atagccacacaccacgggggaaagg

SEQ ID NO: 4748800 - DNA, 25 bp, Homo sapien
gtccccgctatagccacacaccacg

SEQ ID NO: 4748801 - DNA, 25 bp, Homo sapien
cacaccacgggggaaaggctccagg

SEQ ID NO: 4748802 - DNA, 25 bp, Homo sapien
agggctccacgtccatcccacaggg

SEQ ID NO: 4748803 - DNA, 25 bp, Homo sapien
cacagggacccggactctcatcttc

SEQ ID NO: 4748804 - DNA, 25 bp, Homo sapien
gccttcgtgggtggtgcccagatct

SEQ ID NO: 4748805 - DNA, 25 bp, Homo sapien
tgccttcgtgggtggtgcccagatc

SEQ ID NO: 4748806 - DNA, 25 bp, Homo sapien
gacagagaaaggaagcaagaaagca

SEQ ID NO: 4748807 - DNA, 25 bp, Homo sapien
agcaagcaagcaagcaagcaaccaa

SEQ ID NO: 4748808 - DNA, 25 bp, Homo sapien
cagagaaaggaagcaagaaagcaag

SEQ ID NO: 4748809 - DNA, 25 bp, Homo sapien
aaagcaagcaagcaagcaagcaacc

SEQ ID NO: 4748810 - DNA, 25 bp, Homo sapien
aatcctctagcggtgaaaatgtaag

SEQ ID NO: 4748811 - DNA, 25 bp, Homo sapien
taagaacaaatcctctagcggtgaa

SEQ ID NO: 4748812 - DNA, 25 bp, Homo sapien
tgtgctcaggttgctaggatcgatg

SEQ ID NO: 4748813 - DNA, 25 bp, Homo sapien
gatcgatggtaagaacaaatcctct

SEQ ID NO: 4748814 - DNA, 25 bp, Homo sapien
cttcaagggacatggtttctttctc

SEQ ID NO: 4748815 - DNA, 25 bp, Homo sapien
agttttttgacccatagcctcatgc

SEQ ID NO: 4748816 - DNA, 25 bp, Homo sapien
agtgagcaatgaagaaaggactccc

SEQ ID NO: 4748817 - DNA, 25 bp, Homo sapien
tgctgatgggcatcatatatgccac

SEQ ID NO: 4748818 - DNA, 25 bp, Homo sapien
ggtcctgggccaaactttcacttca

SEQ ID NO: 4748819 - DNA, 25 bp, Homo sapien
tctggttggtcccaagctaaggtcc

SEQ ID NO: 4748820 - DNA, 25 bp, Homo sapien
gtcccgggccaagcgaagttgtgct

SEQ ID NO: 4748821 - DNA, 25 bp, Homo sapien
ttcttgggccaaaatttcacttcag

SEQ ID NO: 4748822 - DNA, 25 bp, Homo sapien
cgcatgcctatagtcaaagctaata

SEQ ID NO: 4748823 - DNA, 25 bp, Homo sapien
tgagagtagcctgcccaaatggcaa

SEQ ID NO: 4748824 - DNA, 25 bp, Homo sapien
tgcccggccaatagaggttttcaaa

SEQ ID NO: 4748825 - DNA, 25 bp, Homo sapien
cagtcttcctttaagaaaagagaca

SEQ ID NO: 4748826 - DNA, 25 bp, Homo sapien
cagcgccgtaaaggtattggttggg

SEQ ID NO: 4748827 - DNA, 25 bp, Homo sapien
gcagcgccgtaaaggtattggttgg

SEQ ID NO: 4748828 - DNA, 25 bp, Homo sapien
tggagaaaagtcaagataccacccc

SEQ ID NO: 4748829 - DNA, 25 bp, Homo sapien
ggagaacagtgatgcgattttggct

SEQ ID NO: 4748830 - DNA, 25 bp, Homo sapien
ctaagacacatggagaaaagtcaag

SEQ ID NO: 4748831 - DNA, 25 bp, Homo sapien
acacatggagaaaagtcaagatacc

SEQ ID NO: 4748832 - DNA, 25 bp, Homo sapien
caaagaatgcaattgccagatcgta

SEQ ID NO: 4748833 - DNA, 25 bp, Homo sapien
aagacacagtatgagtggctgcacc

SEQ ID NO: 4748834 - DNA, 25 bp, Homo sapien
ctctattgcaggatatcttggttac

SEQ ID NO: 4748835 - DNA, 25 bp, Homo sapien
tacctagggagggtcatcattttct

SEQ ID NO: 4748836 - DNA, 25 bp, Homo sapien
cactttctgccctagggaatctcca

SEQ ID NO: 4748837 - DNA, 25 bp, Homo sapien
actttctgccctagggaatctccat

SEQ ID NO: 4748838 - DNA, 25 bp, Homo sapien
tgccctagggaatctccattattgt

SEQ ID NO: 4748839 - DNA, 25 bp, Homo sapien
tctacacttgaacagccaaggatgg

SEQ ID NO: 4748840 - DNA, 25 bp, Homo sapien
cacttgaacagccaaggatggactg

SEQ ID NO: 4748841 - DNA, 25 bp, Homo sapien
ctctacacttgaacagccaaggatg

SEQ ID NO: 4748842 - DNA, 25 bp, Homo sapien
tacacttgaacagccaaggatggac

SEQ ID NO: 4748843 - DNA, 25 bp, Homo sapien
tgtgaagtcctcgatcacgtgagga

SEQ ID NO: 4748844 - DNA, 25 bp, Homo sapien
cggtcccggagcaatcgaagtctca

SEQ ID NO: 4748845 - DNA, 25 bp, Homo sapien
agtcctcgatcacgtgaggagatgc

SEQ ID NO: 4748846 - DNA, 25 bp, Homo sapien
tttgggtttgtgaagtcctcgatca

SEQ ID NO: 4748847 - DNA, 25 bp, Homo sapien
aaagacagctgatcttgggataaat

SEQ ID NO: 4748848 - DNA, 25 bp, Homo sapien
caagaaagacagctgatcttgggat

SEQ ID NO: 4748849 - DNA, 25 bp, Homo sapien
tcccaagaaagacagctgatcttgg

SEQ ID NO: 4748850 - DNA, 25 bp, Homo sapien
agaaagacagctgatcttgggataa

SEQ ID NO: 4748851 - DNA, 25 bp, Homo sapien
cttcaagaagctcagcaggctacta

SEQ ID NO: 4748852 - DNA, 25 bp, Homo sapien
aagctcagcaggctactactcgtgt

SEQ ID NO: 4748853 - DNA, 25 bp, Homo sapien
aagaagctcagcaggctactactcg

SEQ ID NO: 4748854 - DNA, 25 bp, Homo sapien
tcagcaggctactactcgtgttcat

SEQ ID NO: 4748855 - DNA, 25 bp, Homo sapien
ccttgtttcgggacgcagttgtgct

SEQ ID NO: 4748856 - DNA, 25 bp, Homo sapien
cctgtggctccttgtttcgggacgc

SEQ ID NO: 4748857 - DNA, 25 bp, Homo sapien
ggctcctgttctgggacgtctgctt

SEQ ID NO: 4748858 - DNA, 25 bp, Homo sapien
tgaccccgcggctcctgttctggga

SEQ ID NO: 4748859 - DNA, 25 bp, Homo sapien
ctgaagcacccttctcccatacttg

SEQ ID NO: 4748860 - DNA, 25 bp, Homo sapien
gcaggaagaattcagggtagacagt

SEQ ID NO: 4748861 - DNA, 25 bp, Homo sapien
cctgaagcacccttctcccatactt

SEQ ID NO: 4748862 - DNA, 25 bp, Homo sapien
caggaagaattcagggtagacagtg

SEQ ID NO: 4748863 - DNA, 25 bp, Homo sapien
ccatcagagagtactacctggtgca

SEQ ID NO: 4748864 - DNA, 25 bp, Homo sapien
tataggccctaaggatccagagatg

SEQ ID NO: 4748865 - DNA, 25 bp, Homo sapien
cagtctagtgggaaatagagttcac

SEQ ID NO: 4748866 - DNA, 25 bp, Homo sapien
agttgaataaggcaggaacgacctc

SEQ ID NO: 4748867 - DNA, 25 bp, Homo sapien
cagactctacgccaaatgcttttat

SEQ ID NO: 4748868 - DNA, 25 bp, Homo sapien
tgtgccagactctacgccaaatgct

SEQ ID NO: 4748869 - DNA, 25 bp, Homo sapien
gagtggggattcaaacacctgtctg

SEQ ID NO: 4748870 - DNA, 25 bp, Homo sapien
tggcagagtggggattcaaacacct

SEQ ID NO: 4748871 - DNA, 25 bp, Homo sapien
ctgtggcacgaccattgtcaaaatg

SEQ ID NO: 4748872 - DNA, 25 bp, Homo sapien
tttgggagatctttgaccaccacct

SEQ ID NO: 4748873 - DNA, 25 bp, Homo sapien
ggtctttgggagatctttgaccacc

SEQ ID NO: 4748874 - DNA, 25 bp, Homo sapien
gagatctttgaccaccacctctgct

SEQ ID NO: 4748875 - DNA, 25 bp, Homo sapien
ttcaacagcagcgaaagccgtgtga

SEQ ID NO: 4748876 - DNA, 25 bp, Homo sapien
tcaacagcagcgaaagccgtgtgaa

SEQ ID NO: 4748877 - DNA, 25 bp, Homo sapien
cttcaacagcagcgaaagccgtgtg

SEQ ID NO: 4748878 - DNA, 25 bp, Homo sapien
caacagcagcgaaagccgtgtgaac

SEQ ID NO: 4748879 - DNA, 25 bp, Homo sapien
gcacctttaacgctttctggcgctg

SEQ ID NO: 4748880 - DNA, 25 bp, Homo sapien
gggctgctgcacctttaacgctttc

SEQ ID NO: 4748881 - DNA, 25 bp, Homo sapien
tgctgcacctttaacgctttctggc

SEQ ID NO: 4748882 - DNA, 25 bp, Homo sapien
gcgcgggctgctgcacctttaacgc

SEQ ID NO: 4748883 - DNA, 25 bp, Homo sapien
gcgcatacactctccttaatgggct

SEQ ID NO: 4748884 - DNA, 25 bp, Homo sapien
cgcatacactctccttaatgggctt

SEQ ID NO: 4748885 - DNA, 25 bp, Homo sapien
actctctgtttggaggcactggtgg

SEQ ID NO: 4748886 - DNA, 25 bp, Homo sapien
tatttacagatttacgtttgaggga

SEQ ID NO: 4748887 - DNA, 25 bp, Homo sapien
cagatttacgtttgagggaaatata

SEQ ID NO: 4748888 - DNA, 25 bp, Homo sapien
gaggcactggtggctctactgacag

SEQ ID NO: 4748889 - DNA, 25 bp, Homo sapien
cctctgtctagtgaggatcacggtc

SEQ ID NO: 4748890 - DNA, 25 bp, Homo sapien
tgtctagtgaggatcacggtctgca

SEQ ID NO: 4748891 - DNA, 25 bp, Homo sapien
tctgtctagtgaggatcacggtctg

SEQ ID NO: 4748892 - DNA, 25 bp, Homo sapien
ctgtctagtgaggatcacggtctgc

SEQ ID NO: 4748893 - DNA, 25 bp, Homo sapien
ccttaagcagttaccctctcagaca

SEQ ID NO: 4748894 - DNA, 25 bp, Homo sapien
tccttcctccgcatgaaaacccatg

SEQ ID NO: 4748895 - DNA, 25 bp, Homo sapien
taagcagttaccctctcagacaact

SEQ ID NO: 4748896 - DNA, 25 bp, Homo sapien
tccgcatgaaaacccatggcttaca

SEQ ID NO: 4748897 - DNA, 25 bp, Homo sapien
tctctcaccgaagggtcgttctcgt

SEQ ID NO: 4748898 - DNA, 25 bp, Homo sapien
aaggcagcatggaatccctccctca

SEQ ID NO: 4748899 - DNA, 25 bp, Homo sapien
gaaagtctccggatgccaagagtca

SEQ ID NO: 4748900 - DNA, 25 bp, Homo sapien
tggggtgctctctcaccgaagggtc

SEQ ID NO: 4748901 - DNA, 25 bp, Homo sapien
aacggtgatatatcccgcctggccg

SEQ ID NO: 4748902 - DNA, 25 bp, Homo sapien
cttgattgggcaggtcgcatgacct

SEQ ID NO: 4748903 - DNA, 25 bp, Homo sapien
catttcttcgagatccgtgtcgtga

SEQ ID NO: 4748904 - DNA, 25 bp, Homo sapien
tatgaccctggcagtggaacggtga

SEQ ID NO: 4748905 - DNA, 25 bp, Homo sapien
aatcctccaccgacctggtagccct

SEQ ID NO: 4748906 - DNA, 25 bp, Homo sapien
gtttctgcaaaattcgcaacacccc

SEQ ID NO: 4748907 - DNA, 25 bp, Homo sapien
gacctggtagccctgacgcaacttc

SEQ ID NO: 4748908 - DNA, 25 bp, Homo sapien
tgcctgacccaagccacgttttcaa

SEQ ID NO: 4748909 - DNA, 25 bp, Homo sapien
catgcgcattggctgagccgactcg

SEQ ID NO: 4748910 - DNA, 25 bp, Homo sapien
gacagataggctgcgtcccctttaa

SEQ ID NO: 4748911 - DNA, 25 bp, Homo sapien
tgcagcacacaatgatcccataggt

SEQ ID NO: 4748912 - DNA, 25 bp, Homo sapien
cataggtctcaaggcctagcgtcag

SEQ ID NO: 4748913 - DNA, 25 bp, Homo sapien
atcttttttgaaggcatttggccag

SEQ ID NO: 4748914 - DNA, 25 bp, Homo sapien
gagcgagaggcatccaggcccctga

SEQ ID NO: 4748915 - DNA, 25 bp, Homo sapien
tttggccagagcgagaggcatccag

SEQ ID NO: 4748916 - DNA, 25 bp, Homo sapien
accgtgccaccgccacagacataag

SEQ ID NO: 4748917 - DNA, 25 bp, Homo sapien
gctctcctgtgggacaaagagttcc

SEQ ID NO: 4748918 - DNA, 25 bp, Homo sapien
tcttgttctcggctgcagtgtactc

SEQ ID NO: 4748919 - DNA, 25 bp, Homo sapien
tgttctcggctgcagtgtactcatc

SEQ ID NO: 4748920 - DNA, 25 bp, Homo sapien
ttctcggctgcagtgtactcatctt

SEQ ID NO: 4748921 - DNA, 25 bp, Homo sapien
gacaaccatgggaaccactgtgacg

SEQ ID NO: 4748922 - DNA, 25 bp, Homo sapien
actgtgacgggagaaaccgctcccg

SEQ ID NO: 4748923 - DNA, 25 bp, Homo sapien
ccactgtgacgggagaaaccgctcc

SEQ ID NO: 4748924 - DNA, 25 bp, Homo sapien
tgtgacgggagaaaccgctcccgcc

SEQ ID NO: 4748925 - DNA, 25 bp, Homo sapien
ataggaacgaggcacacacagggct

SEQ ID NO: 4748926 - DNA, 25 bp, Homo sapien
tgatggctgactccctgttttcatg

SEQ ID NO: 4748927 - DNA, 25 bp, Homo sapien
gtgtgatggctgactccctgttttc

SEQ ID NO: 4748928 - DNA, 25 bp, Homo sapien
ctaggatgtccataggaacgaggca

SEQ ID NO: 4748929 - DNA, 25 bp, Homo sapien
gtcagagagaccgagcagaatgctt

SEQ ID NO: 4748930 - DNA, 25 bp, Homo sapien
aaggtcagagagaccgagcagaatg

SEQ ID NO: 4748931 - DNA, 25 bp, Homo sapien
cagagagaccgagcagaatgcttag

SEQ ID NO: 4748932 - DNA, 25 bp, Homo sapien
gagaccgagcagaatgcttagaaac

SEQ ID NO: 4748933 - DNA, 25 bp, Homo sapien
taactgtggcccaagaaaactcacc

SEQ ID NO: 4748934 - DNA, 25 bp, Homo sapien
cgttgtcagtccgacgaaactgctg

SEQ ID NO: 4748935 - DNA, 25 bp, Homo sapien
gtcagtccgacgaaactgctggaga

SEQ ID NO: 4748936 - DNA, 25 bp, Homo sapien
tggcccaagaaaactcaccaagatc

SEQ ID NO: 4748937 - DNA, 25 bp, Homo sapien
gtcgtgcccacttcaggcaggaaga

SEQ ID NO: 4748938 - DNA, 25 bp, Homo sapien
ggaagagatccatgttcgctcccca

SEQ ID NO: 4748939 - DNA, 25 bp, Homo sapien
tcctctgggttcaggagtcgctgaa

SEQ ID NO: 4748940 - DNA, 25 bp, Homo sapien
caaagggtcaatatcgtcgtgccca

SEQ ID NO: 4748941 - DNA, 25 bp, Homo sapien
cgctgctgccgatcactgctcacag

SEQ ID NO: 4748942 - DNA, 25 bp, Homo sapien
gctgctgccgatcactgctcacagc

SEQ ID NO: 4748943 - DNA, 25 bp, Homo sapien
ctgctgccgatcactgctcacagcc

SEQ ID NO: 4748944 - DNA, 25 bp, Homo sapien
ccgctgctgccgatcactgctcaca

SEQ ID NO: 4748945 - DNA, 25 bp, Homo sapien
ggaacacagacttgatgatgattcc

SEQ ID NO: 4748946 - DNA, 25 bp, Homo sapien
gaacacagacttgatgatgattcct

SEQ ID NO: 4748947 - DNA, 25 bp, Homo sapien
gggaacacagacttgatgatgattc

SEQ ID NO: 4748948 - DNA, 25 bp, Homo sapien
aacttcacagcaaacaacaatattt

SEQ ID NO: 4748949 - DNA, 25 bp, Homo sapien
ttttttgtaaacttcacagcaaaca

SEQ ID NO: 4748950 - DNA, 25 bp, Homo sapien
taaacttcacagcaaacaacaatat

SEQ ID NO: 4748951 - DNA, 25 bp, Homo sapien
ctctgttttggtacaattgtgtttt

SEQ ID NO: 4748952 - DNA, 25 bp, Homo sapien
tctgtcctccctgaaagctaactct

SEQ ID NO: 4748953 - DNA, 25 bp, Homo sapien
tcacattcccgaggggaggagaagt

SEQ ID NO: 4748954 - DNA, 25 bp, Homo sapien
tgatgtcacattcccgaggggagga

SEQ ID NO: 4748955 - DNA, 25 bp, Homo sapien
tgtcacattcccgaggggaggagaa

SEQ ID NO: 4748956 - DNA, 25 bp, Homo sapien
gctgtgatgtcacattcccgagggg

SEQ ID NO: 4748957 - DNA, 25 bp, Homo sapien
cctctgggtattgcctgtgtcgcct

SEQ ID NO: 4748958 - DNA, 25 bp, Homo sapien
gcctgtgtcgcctgtctccgcagtt

SEQ ID NO: 4748959 - DNA, 25 bp, Homo sapien
tccactgtgattccctgcaatattc

SEQ ID NO: 4748960 - DNA, 25 bp, Homo sapien
gcaaggtagctggagtccactgtga

SEQ ID NO: 4748961 - DNA, 25 bp, Homo sapien
cactagctgctctcttctaaggcta

SEQ ID NO: 4748962 - DNA, 25 bp, Homo sapien
tcttctaaggctacgtaagatgaag

SEQ ID NO: 4748963 - DNA, 25 bp, Homo sapien
ctatcacgtctacagttttatggca

SEQ ID NO: 4748964 - DNA, 25 bp, Homo sapien
agttttatggcatatcactagctgc

SEQ ID NO: 4748965 - DNA, 25 bp, Homo sapien
cattacatcaaatgattgaaccaag

SEQ ID NO: 4748966 - DNA, 25 bp, Homo sapien
gcttcttcatgaaagtgaccacatc

SEQ ID NO: 4748967 - DNA, 25 bp, Homo sapien
tgaaccaagaaaaagccttcctcag

SEQ ID NO: 4748968 - DNA, 25 bp, Homo sapien
tgctttcatctgaatcattacatca

SEQ ID NO: 4748969 - DNA, 25 bp, Homo sapien
gaccagtgtgatccaggagactggg

SEQ ID NO: 4748970 - DNA, 25 bp, Homo sapien
accagtgtgatccaggagactggga

SEQ ID NO: 4748971 - DNA, 25 bp, Homo sapien
tactggcaaagtgcaaccaccaggg

SEQ ID NO: 4748972 - DNA, 25 bp, Homo sapien
tgccataagctactggcaaagtgca

SEQ ID NO: 4748973 - DNA, 25 bp, Homo sapien
taagctactggcaaagtgcaaccac

SEQ ID NO: 4748974 - DNA, 25 bp, Homo sapien
gggttgccataagctactggcaaag

SEQ ID NO: 4748975 - DNA, 25 bp, Homo sapien
ggagctggaggtcaatagtcgtaac

SEQ ID NO: 4748976 - DNA, 25 bp, Homo sapien
tcaatagtcgtaacctggaagtgct

SEQ ID NO: 4748977 - DNA, 25 bp, Homo sapien
caggctcatataagggtggttggaa

SEQ ID NO: 4748978 - DNA, 25 bp, Homo sapien
tggagcaggctcatataagggtggt

SEQ ID NO: 4748979 - DNA, 25 bp, Homo sapien
tgggcataagagtcaagcaacattc

SEQ ID NO: 4748980 - DNA, 25 bp, Homo sapien
acagtctgccctgggcataagagtc

SEQ ID NO: 4748981 - DNA, 25 bp, Homo sapien
tctgccctgggcataagagtcaagc

SEQ ID NO: 4748982 - DNA, 25 bp, Homo sapien
gccctgggcataagagtcaagcaac

SEQ ID NO: 4748983 - DNA, 25 bp, Homo sapien
tctcatcaaaaagcctcaacacttc

SEQ ID NO: 4748984 - DNA, 25 bp, Homo sapien
tctctcatcaaaaagcctcaacact

SEQ ID NO: 4748985 - DNA, 25 bp, Homo sapien
ctctcatcaaaaagcctcaacactt

SEQ ID NO: 4748986 - DNA, 25 bp, Homo sapien
tcccatggagtatatgagtaagctc

SEQ ID NO: 4748987 - DNA, 25 bp, Homo sapien
cataaacttcccatggagtatatga

SEQ ID NO: 4748988 - DNA, 25 bp, Homo sapien
tatgagtaagctctgacagctccat

SEQ ID NO: 4748989 - DNA, 25 bp, Homo sapien
gcatttgcctcagacacataaactt

SEQ ID NO: 4748990 - DNA, 25 bp, Homo sapien
cagtctttcccggaacctgaaacat

SEQ ID NO: 4748991 - DNA, 25 bp, Homo sapien
ttgttggctgtgctataccacctaa

SEQ ID NO: 4748992 - DNA, 25 bp, Homo sapien
ttcccggaacctgaaacatgaatgg

SEQ ID NO: 4748993 - DNA, 25 bp, Homo sapien
tataccacctaagggccttggctga

SEQ ID NO: 4748994 - DNA, 25 bp, Homo sapien
tcaaacagtacataacatcagcatg

SEQ ID NO: 4748995 - DNA, 25 bp, Homo sapien
aacagtacataacatcagcatgctg

SEQ ID NO: 4748996 - DNA, 25 bp, Homo sapien
cagtacataacatcagcatgctgaa

SEQ ID NO: 4748997 - DNA, 25 bp, Homo sapien
caaacagtacataacatcagcatgc

SEQ ID NO: 4748998 - DNA, 25 bp, Homo sapien
gaatacctcatcattgagagtcctg

SEQ ID NO: 4748999 - DNA, 25 bp, Homo sapien
tgatcccatgccaaattccagagag

SEQ ID NO: 4749000 - DNA, 25 bp, Homo sapien
cagtgccaaaaaggtcaagaatccc

SEQ ID NO: 4749001 - DNA, 25 bp, Homo sapien
caagaatcccagaacagagtggaag

SEQ ID NO: 4749002 - DNA, 25 bp, Homo sapien
taagcacagtgatagttttagctaa

SEQ ID NO: 4749003 - DNA, 25 bp, Homo sapien
gccttacaggctataagcacagtga

SEQ ID NO: 4749004 - DNA, 25 bp, Homo sapien
tttagctaacgcagttgaaacaacc

SEQ ID NO: 4749005 - DNA, 25 bp, Homo sapien
gatgctgtagccttacaggctataa

SEQ ID NO: 4749006 - DNA, 25 bp, Homo sapien
agtcctctgattaatgtggtaggta

SEQ ID NO: 4749007 - DNA, 25 bp, Homo sapien
aatgtggtaggtattgtagacgtga

SEQ ID NO: 4749008 - DNA, 25 bp, Homo sapien
ccaaagtcctctgattaatgtggta

SEQ ID NO: 4749009 - DNA, 25 bp, Homo sapien
tgtggtaggtattgtagacgtgata

SEQ ID NO: 4749010 - DNA, 25 bp, Homo sapien
aattccaagtccgtattttccatgt

SEQ ID NO: 4749011 - DNA, 25 bp, Homo sapien
attccaagtccgtattttccatgtc

SEQ ID NO: 4749012 - DNA, 25 bp, Homo sapien
tcaaattccaagtccgtattttcca

SEQ ID NO: 4749013 - DNA, 25 bp, Homo sapien
caaattccaagtccgtattttccat

SEQ ID NO: 4749014 - DNA, 25 bp, Homo sapien
tgtgatctgctatcaaacaaggtag

SEQ ID NO: 4749015 - DNA, 25 bp, Homo sapien
tctggaaccagggtcttgtgatctg

SEQ ID NO: 4749016 - DNA, 25 bp, Homo sapien
cacacggaaaggcaaggaaggttag

SEQ ID NO: 4749017 - DNA, 25 bp, Homo sapien
tgtaaagcaggaccgctctggaacc

SEQ ID NO: 4749018 - DNA, 25 bp, Homo sapien
acttggtgggtgaattcttgtggca

SEQ ID NO: 4749019 - DNA, 25 bp, Homo sapien
tgaacacgatcagaaccaaagagaa

SEQ ID NO: 4749020 - DNA, 25 bp, Homo sapien
gcatgtggagagtgctgatgaacac

SEQ ID NO: 4749021 - DNA, 25 bp, Homo sapien
caggaacgggaaaagtcatggttgt

SEQ ID NO: 4749022 - DNA, 25 bp, Homo sapien
aacttgtcagcacaatttttaattg

SEQ ID NO: 4749023 - DNA, 25 bp, Homo sapien
actagtaaagcactgcgcagattca

SEQ ID NO: 4749024 - DNA, 25 bp, Homo sapien
agcactgcgcagattcacaactcat

SEQ ID NO: 4749025 - DNA, 25 bp, Homo sapien
cactagccctgacaactgttgtaaa

SEQ ID NO: 4749026 - DNA, 25 bp, Homo sapien
gagtaagttggtggccccagcatgt

SEQ ID NO: 4749027 - DNA, 25 bp, Homo sapien
agagaacaggcaaacgagtaagttg

SEQ ID NO: 4749028 - DNA, 25 bp, Homo sapien
ttggtggccccagcatgtcgggtaa

SEQ ID NO: 4749029 - DNA, 25 bp, Homo sapien
caggcaaacgagtaagttggtggcc

SEQ ID NO: 4749030 - DNA, 25 bp, Homo sapien
tagacttcacgtatgcttagggcag

SEQ ID NO: 4749031 - DNA, 25 bp, Homo sapien
tagacaggtctatccaacagtaaga

SEQ ID NO: 4749032 - DNA, 25 bp, Homo sapien
cttggagccacctgtattgagtgac

SEQ ID NO: 4749033 - DNA, 25 bp, Homo sapien
cttagggcagtaaccagaggaacgt

SEQ ID NO: 4749034 - DNA, 25 bp, Homo sapien
tctctccctaggtgtgatagcagtg

SEQ ID NO: 4749035 - DNA, 25 bp, Homo sapien
tgctaggacagctctaaacagtgag

SEQ ID NO: 4749036 - DNA, 25 bp, Homo sapien
cagtgagctcgatgtgcaaaacgca

SEQ ID NO: 4749037 - DNA, 25 bp, Homo sapien
gctgtggctgtctctatcatcgtga

SEQ ID NO: 4749038 - DNA, 25 bp, Homo sapien
cttaactgaagatcactaattcctt

SEQ ID NO: 4749039 - DNA, 25 bp, Homo sapien
cctaacttacttccccaagatattg

SEQ ID NO: 4749040 - DNA, 25 bp, Homo sapien
tacttccccaagatattgagaggtc

SEQ ID NO: 4749041 - DNA, 25 bp, Homo sapien
tccccaagatattgagaggtcatat

SEQ ID NO: 4749042 - DNA, 25 bp, Homo sapien
agcactggcctaaggctccaaactt

SEQ ID NO: 4749043 - DNA, 25 bp, Homo sapien
gtccagcactggcctaaggctccaa

SEQ ID NO: 4749044 - DNA, 25 bp, Homo sapien
cagcactggcctaaggctccaaact

SEQ ID NO: 4749045 - DNA, 25 bp, Homo sapien
tccagcactggcctaaggctccaaa

SEQ ID NO: 4749046 - DNA, 25 bp, Homo sapien
gtcaagctcattacacattccagaa

SEQ ID NO: 4749047 - DNA, 25 bp, Homo sapien
ccaaaaaattggtagctgcgttgtt

SEQ ID NO: 4749048 - DNA, 25 bp, Homo sapien
atcaatcaagtttcctgctagcatt

SEQ ID NO: 4749049 - DNA, 25 bp, Homo sapien
caagtttcctgctagcatttgaaga

SEQ ID NO: 4749050 - DNA, 25 bp, Homo sapien
agcactggtcataaattccgtggtc

SEQ ID NO: 4749051 - DNA, 25 bp, Homo sapien
tcagcactggtcataaattccgtgg

SEQ ID NO: 4749052 - DNA, 25 bp, Homo sapien
cagcactggtcataaattccgtggt

SEQ ID NO: 4749053 - DNA, 25 bp, Homo sapien
tgtacggaagggctaactgtctgaa

SEQ ID NO: 4749054 - DNA, 25 bp, Homo sapien
gaaaatgtgttctgggtgtacggaa

SEQ ID NO: 4749055 - DNA, 25 bp, Homo sapien
gaaaaagtgagagtcccatggaatg

SEQ ID NO: 4749056 - DNA, 25 bp, Homo sapien
gaagccaggcatctcactgttctgc

SEQ ID NO: 4749057 - DNA, 25 bp, Homo sapien
tgttgcaggcattgtagacgtgata

SEQ ID NO: 4749058 - DNA, 25 bp, Homo sapien
cctctgatcagtgttgcaggcattg

SEQ ID NO: 4749059 - DNA, 25 bp, Homo sapien
cagtgttgcaggcattgtagacgtg

SEQ ID NO: 4749060 - DNA, 25 bp, Homo sapien
gatcagtgttgcaggcattgtagac

SEQ ID NO: 4749061 - DNA, 25 bp, Homo sapien
gtttgtttacccgtggaatagatca

SEQ ID NO: 4749062 - DNA, 25 bp, Homo sapien
cgttatgacaggaaactatgcaggt

SEQ ID NO: 4749063 - DNA, 25 bp, Homo sapien
acaggccataggacatgacagacat

SEQ ID NO: 4749064 - DNA, 25 bp, Homo sapien
tgatagtggcaaatgttcacaggcc

SEQ ID NO: 4749065 - DNA, 25 bp, Homo sapien
aatcccaagtccgtattttccatgt

SEQ ID NO: 4749066 - DNA, 25 bp, Homo sapien
atgctcaaatcccaagtccgtattt

SEQ ID NO: 4749067 - DNA, 25 bp, Homo sapien
tgcatagaaaatgctcaaatcccaa

SEQ ID NO: 4749068 - DNA, 25 bp, Homo sapien
atagaaaatgctcaaatcccaagtc

SEQ ID NO: 4749069 - DNA, 25 bp, Homo sapien
gaagatgcatagactagacaggaga

SEQ ID NO: 4749070 - DNA, 25 bp, Homo sapien
cagcgaatgagcaagggattttgga

SEQ ID NO: 4749071 - DNA, 25 bp, Homo sapien
aggcgagtgaagatgcatagactag

SEQ ID NO: 4749072 - DNA, 25 bp, Homo sapien
gttaaaatctgggtaagcagcagga

SEQ ID NO: 4749073 - DNA, 25 bp, Homo sapien
ctctggatgccaaagcgtcatactt

SEQ ID NO: 4749074 - DNA, 25 bp, Homo sapien
caaagcgtcatactttggagtataa

SEQ ID NO: 4749075 - DNA, 25 bp, Homo sapien
cctttagttcaaagcactctggatg

SEQ ID NO: 4749076 - DNA, 25 bp, Homo sapien
tatgagccccagcaataacagtctt

SEQ ID NO: 4749077 - DNA, 25 bp, Homo sapien
gctattactgtcattaggtagtcct

SEQ ID NO: 4749078 - DNA, 25 bp, Homo sapien
tagtagaggtttgtatactacgcac

SEQ ID NO: 4749079 - DNA, 25 bp, Homo sapien
ttactgtcattaggtagtcctttcc

SEQ ID NO: 4749080 - DNA, 25 bp, Homo sapien
agaagttagtagaggtttgtatact

SEQ ID NO: 4749081 - DNA, 25 bp, Homo sapien
tcagctgtccattagcatctcttgt

SEQ ID NO: 4749082 - DNA, 25 bp, Homo sapien
ggcttgagaaaatctccagatttgc

SEQ ID NO: 4749083 - DNA, 25 bp, Homo sapien
tggataacgcattcaacctcctgaa

SEQ ID NO: 4749084 - DNA, 25 bp, Homo sapien
taattccaagtgtagaaagcatggt

SEQ ID NO: 4749085 - DNA, 25 bp, Homo sapien
tctgtcaggacatatgtgtgatctt

SEQ ID NO: 4749086 - DNA, 25 bp, Homo sapien
ttcttcattgaaccccaaatctgtc

SEQ ID NO: 4749087 - DNA, 25 bp, Homo sapien
ttccctctaaaggaagcttgtgcag

SEQ ID NO: 4749088 - DNA, 25 bp, Homo sapien
ctgccctaaaagttttcccctcatg

SEQ ID NO: 4749089 - DNA, 25 bp, Homo sapien
agactccaggatactcctctgtccc

SEQ ID NO: 4749090 - DNA, 25 bp, Homo sapien
gcaggaaacatcatgcatcgagcag

SEQ ID NO: 4749091 - DNA, 25 bp, Homo sapien
cttcccttaaccctgctcagctgga

SEQ ID NO: 4749092 - DNA, 25 bp, Homo sapien
ggacacacttcccttaaccctgctc

SEQ ID NO: 4749093 - DNA, 25 bp, Homo sapien
acacttcccttaaccctgctcagct

SEQ ID NO: 4749094 - DNA, 25 bp, Homo sapien
gtggacacacttcccttaaccctgc

SEQ ID NO: 4749095 - DNA, 25 bp, Homo sapien
aggcccttgaggagctccatcttcc

SEQ ID NO: 4749096 - DNA, 25 bp, Homo sapien
ccctggctgggactcagctccttgt

SEQ ID NO: 4749097 - DNA, 25 bp, Homo sapien
agcaggtaccgcatgatctttggga

SEQ ID NO: 4749098 - DNA, 25 bp, Homo sapien
aacccatggagaatcctcatcttgg

SEQ ID NO: 4749099 - DNA, 25 bp, Homo sapien
gtatttgggctgtagaaacctgaga

SEQ ID NO: 4749100 - DNA, 25 bp, Homo sapien
ggctgtagaaacctgagaagcccct

SEQ ID NO: 4749101 - DNA, 25 bp, Homo sapien
ctgtagaaacctgagaagcccctga

SEQ ID NO: 4749102 - DNA, 25 bp, Homo sapien
gaaacctgagaagcccctgacccat

SEQ ID NO: 4749103 - DNA, 25 bp, Homo sapien
aggaggatggcagttaggcagctca

SEQ ID NO: 4749104 - DNA, 25 bp, Homo sapien
ggaggatggcagttaggcagctcat

SEQ ID NO: 4749105 - DNA, 25 bp, Homo sapien
gaggaggatggcagttaggcagctc

SEQ ID NO: 4749106 - DNA, 25 bp, Homo sapien
tggagtgatctcagcggctctccct

SEQ ID NO: 4749107 - DNA, 25 bp, Homo sapien
aggtggtgggccactgatcaccaca

SEQ ID NO: 4749108 - DNA, 25 bp, Homo sapien
taggtccagaccacatgtgagcagc

SEQ ID NO: 4749109 - DNA, 25 bp, Homo sapien
gatcaccacacagtgggtcctctga

SEQ ID NO: 4749110 - DNA, 25 bp, Homo sapien
agctatgaataaatccttgggcagg

SEQ ID NO: 4749111 - DNA, 25 bp, Homo sapien
ctatgaataaatccttgggcaggtg

SEQ ID NO: 4749112 - DNA, 25 bp, Homo sapien
tatgaataaatccttgggcaggtgc

SEQ ID NO: 4749113 - DNA, 25 bp, Homo sapien
gctatgaataaatccttgggcaggt

SEQ ID NO: 4749114 - DNA, 25 bp, Homo sapien
gccggaggacctgctggaacccctg

SEQ ID NO: 4749115 - DNA, 25 bp, Homo sapien
gagccggaggacctgctggaacccc

SEQ ID NO: 4749116 - DNA, 25 bp, Homo sapien
ctgggagccggaggacctgctggaa

SEQ ID NO: 4749117 - DNA, 25 bp, Homo sapien
cggaggacctgctggaacccctgct

SEQ ID NO: 4749118 - DNA, 25 bp, Homo sapien
cctcctgcaggcaggcaaacacccc

SEQ ID NO: 4749119 - DNA, 25 bp, Homo sapien
cagcagtagcagcagggccttcagc

SEQ ID NO: 4749120 - DNA, 25 bp, Homo sapien
ttttcttgctctccagcacctcctg

SEQ ID NO: 4749121 - DNA, 25 bp, Homo sapien
gcagtagcagcagggccttcagcag

SEQ ID NO: 4749122 - DNA, 25 bp, Homo sapien
ctccatagcttccactgtgcccagg

SEQ ID NO: 4749123 - DNA, 25 bp, Homo sapien
ctgggagcagtgtgggagctgctgg

SEQ ID NO: 4749124 - DNA, 25 bp, Homo sapien
tgctggctggagctgtgctggtcac

SEQ ID NO: 4749125 - DNA, 25 bp, Homo sapien
ggagctgctggctggagctgtgctg

SEQ ID NO: 4749126 - DNA, 25 bp, Homo sapien
agctgctggctggagctgtgctggt

SEQ ID NO: 4749127 - DNA, 25 bp, Homo sapien
gctctacaggaggtgccatggagtc

SEQ ID NO: 4749128 - DNA, 25 bp, Homo sapien
cagctggcactggaaatagctgtgt

SEQ ID NO: 4749129 - DNA, 25 bp, Homo sapien
ctagctccagcgctgtccctggaag

SEQ ID NO: 4749130 - DNA, 25 bp, Homo sapien
cctgtgcagtcccagggcagcggca

SEQ ID NO: 4749131 - DNA, 25 bp, Homo sapien
gtgcctgtgtctcaatgagctccag

SEQ ID NO: 4749132 - DNA, 25 bp, Homo sapien
gatgtggccctggtgggatcactgg

SEQ ID NO: 4749133 - DNA, 25 bp, Homo sapien
catgtgcctgtgtctcaatgagctc

SEQ ID NO: 4749134 - DNA, 25 bp, Homo sapien
ccgaatgtccccctcagggtgaatt

SEQ ID NO: 4749135 - DNA, 25 bp, Homo sapien
gggccgaatgtccccctcagggtga

SEQ ID NO: 4749136 - DNA, 25 bp, Homo sapien
atgtccccctcagggtgaattccac

SEQ ID NO: 4749137 - DNA, 25 bp, Homo sapien
ctggggccgaatgtccccctcaggg

SEQ ID NO: 4749138 - DNA, 25 bp, Homo sapien
ctgggtgtccaccttgggtctgatg

SEQ ID NO: 4749139 - DNA, 25 bp, Homo sapien
tgtccaccttgggtctgatgactac

SEQ ID NO: 4749140 - DNA, 25 bp, Homo sapien
tgggtgtccaccttgggtctgatga

SEQ ID NO: 4749141 - DNA, 25 bp, Homo sapien
ggtgtccaccttgggtctgatgact

SEQ ID NO: 4749142 - DNA, 25 bp, Homo sapien
catctgggaccttggtgtctatctg

SEQ ID NO: 4749143 - DNA, 25 bp, Homo sapien
gctgtacatctgggaccttggtgtc

SEQ ID NO: 4749144 - DNA, 25 bp, Homo sapien
tacatctgggaccttggtgtctatc

SEQ ID NO: 4749145 - DNA, 25 bp, Homo sapien
tgtacatctgggaccttggtgtcta

SEQ ID NO: 4749146 - DNA, 25 bp, Homo sapien
gggttgaatgtccaactgtggccag

SEQ ID NO: 4749147 - DNA, 25 bp, Homo sapien
ccttcgtgttaacctgtggcctaat

SEQ ID NO: 4749148 - DNA, 25 bp, Homo sapien
cgtgttaacctgtggcctaatgtac

SEQ ID NO: 4749149 - DNA, 25 bp, Homo sapien
ctggggccttcgtgttaacctgtgg

SEQ ID NO: 4749150 - DNA, 25 bp, Homo sapien
aacctgtggcctaatgtactcctgg

SEQ ID NO: 4749151 - DNA, 25 bp, Homo sapien
ctaccaggatccaggtatccacctg

SEQ ID NO: 4749152 - DNA, 25 bp, Homo sapien
accaggatccaggtatccacctggg

SEQ ID NO: 4749153 - DNA, 25 bp, Homo sapien
taccaggatccaggtatccacctgg

SEQ ID NO: 4749154 - DNA, 25 bp, Homo sapien
gtatccaattgagtgctggtgtcca

SEQ ID NO: 4749155 - DNA, 25 bp, Homo sapien
caccttcagggtgtgtatccaattg

SEQ ID NO: 4749156 - DNA, 25 bp, Homo sapien
cacatggagcctgggtgtacacttg

SEQ ID NO: 4749157 - DNA, 25 bp, Homo sapien
acctgatgttcagataagggctggc

SEQ ID NO: 4749158 - DNA, 25 bp, Homo sapien
cccaggtgtctgcctagtcctcaag

SEQ ID NO: 4749159 - DNA, 25 bp, Homo sapien
aggtgtctgcctagtcctcaagtgg

SEQ ID NO: 4749160 - DNA, 25 bp, Homo sapien
caggtgtctgcctagtcctcaagtg

SEQ ID NO: 4749161 - DNA, 25 bp, Homo sapien
ccaggtgtctgcctagtcctcaagt

SEQ ID NO: 4749162 - DNA, 25 bp, Homo sapien
ctctaggtagatccttaaaccccag

SEQ ID NO: 4749163 - DNA, 25 bp, Homo sapien
ccttaaaccccagttggtcatcagg

SEQ ID NO: 4749164 - DNA, 25 bp, Homo sapien
tcaggcccaaggtgtacaccagacc

SEQ ID NO: 4749165 - DNA, 25 bp, Homo sapien
cccagttggtcatcaggcccaaggt

SEQ ID NO: 4749166 - DNA, 25 bp, Homo sapien
cataggcaccagctgaactctgggc

SEQ ID NO: 4749167 - DNA, 25 bp, Homo sapien
tggacatcagttgccaggaggacac

SEQ ID NO: 4749168 - DNA, 25 bp, Homo sapien
agcatgcagtcccaggtggacatca

SEQ ID NO: 4749169 - DNA, 25 bp, Homo sapien
tagtcctcttgtgtgcatcaggtgc

SEQ ID NO: 4749170 - DNA, 25 bp, Homo sapien
tagaatccaggtgtacataaagcca

SEQ ID NO: 4749171 - DNA, 25 bp, Homo sapien
tcaaggttgacattagtccccaggt

SEQ ID NO: 4749172 - DNA, 25 bp, Homo sapien
taacaaccatgcttcaggccatagg

SEQ ID NO: 4749173 - DNA, 25 bp, Homo sapien
taaagccactggttgacaccaagcc

SEQ ID NO: 4749174 - DNA, 25 bp, Homo sapien
gctctagttggacatgaggtctcca

SEQ ID NO: 4749175 - DNA, 25 bp, Homo sapien
cattaggacccagcttcataccagt

SEQ ID NO: 4749176 - DNA, 25 bp, Homo sapien
ggacgtctggccatggatgaacatc

SEQ ID NO: 4749177 - DNA, 25 bp, Homo sapien
cacccaggagtaaggtggacatcaa

SEQ ID NO: 4749178 - DNA, 25 bp, Homo sapien
gcaggtagacatcaggccccagttt

SEQ ID NO: 4749179 - DNA, 25 bp, Homo sapien
aacatcagcccctcgtggacaccca

SEQ ID NO: 4749180 - DNA, 25 bp, Homo sapien
catcagtttctggatggatccccaa

SEQ ID NO: 4749181 - DNA, 25 bp, Homo sapien
ctagtccgcaggtagacatcaggcc

SEQ ID NO: 4749182 - DNA, 25 bp, Homo sapien
tcaggccatgggtggataaacagtc

SEQ ID NO: 4749183 - DNA, 25 bp, Homo sapien
gattcccgatgaacattaggcccca

SEQ ID NO: 4749184 - DNA, 25 bp, Homo sapien
gatatacactcaggtccaaggcaga

SEQ ID NO: 4749185 - DNA, 25 bp, Homo sapien
taggttccaggtgcacaacaagtca

SEQ ID NO: 4749186 - DNA, 25 bp, Homo sapien
tataaagtaccagtggacatccatg

SEQ ID NO: 4749187 - DNA, 25 bp, Homo sapien
taggcccctggtggatataaagtac

SEQ ID NO: 4749188 - DNA, 25 bp, Homo sapien
accaggtcttaggtggacattaggc

SEQ ID NO: 4749189 - DNA, 25 bp, Homo sapien
catccggtcttcagctgaacatcag

SEQ ID NO: 4749190 - DNA, 25 bp, Homo sapien
caggtggacacccagggcccagatg

SEQ ID NO: 4749191 - DNA, 25 bp, Homo sapien
tggacacccagggcccagatgggca

SEQ ID NO: 4749192 - DNA, 25 bp, Homo sapien
ggacacccagggcccagatgggcat

SEQ ID NO: 4749193 - DNA, 25 bp, Homo sapien
ctgcaggtggacacccagggcccag

SEQ ID NO: 4749194 - DNA, 25 bp, Homo sapien
tccaacatagacatcaggccttagg

SEQ ID NO: 4749195 - DNA, 25 bp, Homo sapien
ggtgaaccctaggtccaacatagac

SEQ ID NO: 4749196 - DNA, 25 bp, Homo sapien
taggttgacactcaagcaccagatg

SEQ ID NO: 4749197 - DNA, 25 bp, Homo sapien
catcaggccttaggttgacactcaa

SEQ ID NO: 4749198 - DNA, 25 bp, Homo sapien
ggcaccaattctccgctgcgcgttt

SEQ ID NO: 4749199 - DNA, 25 bp, Homo sapien
gccaggttccatggggccaagcgca

SEQ ID NO: 4749200 - DNA, 25 bp, Homo sapien
gtttgagtcaaggtcgccagggtcc

SEQ ID NO: 4749201 - DNA, 25 bp, Homo sapien
gcccgaggcgcaccgtgggtttgag

SEQ ID NO: 4749202 - DNA, 25 bp, Homo sapien
caggtcccgcttctttgcggcgcgg

SEQ ID NO: 4749203 - DNA, 25 bp, Homo sapien
ttctgggtaaccctagcgggcgcga

SEQ ID NO: 4749204 - DNA, 25 bp, Homo sapien
cttcccctaatgagcattctgcccg

SEQ ID NO: 4749205 - DNA, 25 bp, Homo sapien
gcattctgcccgctttgggataccc

SEQ ID NO: 4749206 - DNA, 25 bp, Homo sapien
agccaggccccgcttataggcggcg

SEQ ID NO: 4749207 - DNA, 25 bp, Homo sapien
gagaacctcggtgggtaggattcag

SEQ ID NO: 4749208 - DNA, 25 bp, Homo sapien
tgtggatctcgcactgcggccgcct

SEQ ID NO: 4749209 - DNA, 25 bp, Homo sapien
gtgtggatctcgcactgcggccgcc

SEQ ID NO: 4749210 - DNA, 25 bp, Homo sapien
ttcactttctggtaaccgcaagcgg

SEQ ID NO: 4749211 - DNA, 25 bp, Homo sapien
tgtctgtgtgcccactaccgtctct

SEQ ID NO: 4749212 - DNA, 25 bp, Homo sapien
tgtctcaccggtggctcgtagtcgc

SEQ ID NO: 4749213 - DNA, 25 bp, Homo sapien
gccagggcagttaccaggacggtct

SEQ ID NO: 4749214 - DNA, 25 bp, Homo sapien
agtctccccaaaagtggcgcccttg

SEQ ID NO: 4749215 - DNA, 25 bp, Homo sapien
ctattgttgtggcataaattgacag

SEQ ID NO: 4749216 - DNA, 25 bp, Homo sapien
caaatgcatgtaatcagtagtcaga

SEQ ID NO: 4749217 - DNA, 25 bp, Homo sapien
gactttactggcaagttgtttcaaa

SEQ ID NO: 4749218 - DNA, 25 bp, Homo sapien
caatgaatgagcatgacagtgttcc

SEQ ID NO: 4749219 - DNA, 25 bp, Homo sapien
caaagatcgttcagagtgactccac

SEQ ID NO: 4749220 - DNA, 25 bp, Homo sapien
tacagtcactatgtatggatgccgc

SEQ ID NO: 4749221 - DNA, 25 bp, Homo sapien
gtctcagttgcttggttacaagtcc

SEQ ID NO: 4749222 - DNA, 25 bp, Homo sapien
cattcagcctaggattgactaaggg

SEQ ID NO: 4749223 - DNA, 25 bp, Homo sapien
tcatctggaaaatagtacctcgtaa

SEQ ID NO: 4749224 - DNA, 25 bp, Homo sapien
catctggaaaatagtacctcgtaag

SEQ ID NO: 4749225 - DNA, 25 bp, Homo sapien
atctggaaaatagtacctcgtaagt

SEQ ID NO: 4749226 - DNA, 25 bp, Homo sapien
ctcggctcttataccaagcagtact

SEQ ID NO: 4749227 - DNA, 25 bp, Homo sapien
cggctcttataccaagcagtactga

SEQ ID NO: 4749228 - DNA, 25 bp, Homo sapien
actcggctcttataccaagcagtac

SEQ ID NO: 4749229 - DNA, 25 bp, Homo sapien
tcggctcttataccaagcagtactg

SEQ ID NO: 4749230 - DNA, 25 bp, Homo sapien
gcacagaaatgcatgagaccaattg

SEQ ID NO: 4749231 - DNA, 25 bp, Homo sapien
gatgcacttccctaaactatccaaa

SEQ ID NO: 4749232 - DNA, 25 bp, Homo sapien
aaactagtgcctttctatttgcaag

SEQ ID NO: 4749233 - DNA, 25 bp, Homo sapien
cagggctatccactatataaagatc

SEQ ID NO: 4749234 - DNA, 25 bp, Homo sapien
cagtatctgctgtgatttgttactg

SEQ ID NO: 4749235 - DNA, 25 bp, Homo sapien
tgtgtcgatgctgccataggaacac

SEQ ID NO: 4749236 - DNA, 25 bp, Homo sapien
tgaagctgtgtcgatgctgccatag

SEQ ID NO: 4749237 - DNA, 25 bp, Homo sapien
aagctgtgtcgatgctgccatagga

SEQ ID NO: 4749238 - DNA, 25 bp, Homo sapien
gtcgatgctgccataggaacaccac

SEQ ID NO: 4749239 - DNA, 25 bp, Homo sapien
caatttcctaatgtgagtaactgta

SEQ ID NO: 4749240 - DNA, 25 bp, Homo sapien
aagctgggtgaagaatatataggaa

SEQ ID NO: 4749241 - DNA, 25 bp, Homo sapien
aaaacattagtggaaccatgaacaa

SEQ ID NO: 4749242 - DNA, 25 bp, Homo sapien
gatatggtgttagcagtcaagaagc

SEQ ID NO: 4749243 - DNA, 25 bp, Homo sapien
gaaggcaagcttgagacatctagga

SEQ ID NO: 4749244 - DNA, 25 bp, Homo sapien
gaagtggatgttgtacctcgttcaa

SEQ ID NO: 4749245 - DNA, 25 bp, Homo sapien
gcaacaggagagcattaggccaagt

SEQ ID NO: 4749246 - DNA, 25 bp, Homo sapien
tctacatgatttgcagggcccagcg

SEQ ID NO: 4749247 - DNA, 25 bp, Homo sapien
tagggtcacgcttccttgaaaagcc

SEQ ID NO: 4749248 - DNA, 25 bp, Homo sapien
aaatcttttcttgcccctgcctagg

SEQ ID NO: 4749249 - DNA, 25 bp, Homo sapien
gaggagttaaggaccatagtcaccc

SEQ ID NO: 4749250 - DNA, 25 bp, Homo sapien
gctagaatttaaggcacagcccaag

SEQ ID NO: 4749251 - DNA, 25 bp, Homo sapien
tccagaagggcagtcaaatctaaag

SEQ ID NO: 4749252 - DNA, 25 bp, Homo sapien
ccagaagggcagtcaaatctaaagc

SEQ ID NO: 4749253 - DNA, 25 bp, Homo sapien
cagaagggcagtcaaatctaaagct

SEQ ID NO: 4749254 - DNA, 25 bp, Homo sapien
ttttatatgaacaatgacatagttc

SEQ ID NO: 4749255 - DNA, 25 bp, Homo sapien
tgaacaatgacatagttcaaattta

SEQ ID NO: 4749256 - DNA, 25 bp, Homo sapien
cttttatatgaacaatgacatagtt

SEQ ID NO: 4749257 - DNA, 25 bp, Homo sapien
tgacatagttcaaatttatcttgaa

SEQ ID NO: 4749258 - DNA, 25 bp, Homo sapien
tgagagcattctctggtcctgataa

SEQ ID NO: 4749259 - DNA, 25 bp, Homo sapien
cattctctggtcctgataaggatga

SEQ ID NO: 4749260 - DNA, 25 bp, Homo sapien
gagcattctctggtcctgataagga

SEQ ID NO: 4749261 - DNA, 25 bp, Homo sapien
gagagcattctctggtcctgataag

SEQ ID NO: 4749262 - DNA, 25 bp, Homo sapien
gtttttattggtggttaatcacata

SEQ ID NO: 4749263 - DNA, 25 bp, Homo sapien
ggttaatcacataggcatgcaatgc

SEQ ID NO: 4749264 - DNA, 25 bp, Homo sapien
tattggtggttaatcacataggcat

SEQ ID NO: 4749265 - DNA, 25 bp, Homo sapien
taatcacataggcatgcaatgccca

SEQ ID NO: 4749266 - DNA, 25 bp, Homo sapien
caagttcactaaaacttcatcattt

SEQ ID NO: 4749267 - DNA, 25 bp, Homo sapien
cattttttccaggttgaatccccat

SEQ ID NO: 4749268 - DNA, 25 bp, Homo sapien
tcactaaaacttcatcattttttcc

SEQ ID NO: 4749269 - DNA, 25 bp, Homo sapien
actaaaacttcatcattttttccag

SEQ ID NO: 4749270 - DNA, 25 bp, Homo sapien
ttagactcatgaccaaattgaagtt

SEQ ID NO: 4749271 - DNA, 25 bp, Homo sapien
aatttgtttagctcctgcatatggg

SEQ ID NO: 4749272 - DNA, 25 bp, Homo sapien
ttccatgtgaccagctatagagcac

SEQ ID NO: 4749273 - DNA, 25 bp, Homo sapien
tgcatatgggtaaggacagacagta

SEQ ID NO: 4749274 - DNA, 25 bp, Homo sapien
caggtgtacaatgcgtaatgatcaa

SEQ ID NO: 4749275 - DNA, 25 bp, Homo sapien
taactccacttgatactaaaggaag

SEQ ID NO: 4749276 - DNA, 25 bp, Homo sapien
aagctgagcttccttgctttaatca

SEQ ID NO: 4749277 - DNA, 25 bp, Homo sapien
gaaatatgaatacatccaatagatg

SEQ ID NO: 4749278 - DNA, 25 bp, Homo sapien
tcctagtgagtattataaatcatag

SEQ ID NO: 4749279 - DNA, 25 bp, Homo sapien
gaaaaggtcaataagcccaggtgaa

SEQ ID NO: 4749280 - DNA, 25 bp, Homo sapien
caaaatcggatctgaacgggagtcc

SEQ ID NO: 4749281 - DNA, 25 bp, Homo sapien
taggccttgagacctacgggatcat

SEQ ID NO: 4749282 - DNA, 25 bp, Homo sapien
gaccatagatcccagcaattgcagt

SEQ ID NO: 4749283 - DNA, 25 bp, Homo sapien
cgtgtcctcgtctgcagtgtgttca

SEQ ID NO: 4749284 - DNA, 25 bp, Homo sapien
gacgtgggtccgctggtctcctgcg

SEQ ID NO: 4749285 - DNA, 25 bp, Homo sapien
cctgtggggctcgtgtcctcgtctg

SEQ ID NO: 4749286 - DNA, 25 bp, Homo sapien
gtccgctggtctcctgcgggacaaa

SEQ ID NO: 4749287 - DNA, 25 bp, Homo sapien
tccctcgggttgacaggcaattcca

SEQ ID NO: 4749288 - DNA, 25 bp, Homo sapien
agcccaagctgctgccagccgccat

SEQ ID NO: 4749289 - DNA, 25 bp, Homo sapien
caaagcccaagctgctgccagccgc

SEQ ID NO: 4749290 - DNA, 25 bp, Homo sapien
accggtccggtcaaagcccaagctg

SEQ ID NO: 4749291 - DNA, 25 bp, Homo sapien
caccggtccggtcaaagcccaagct

SEQ ID NO: 4749292 - DNA, 25 bp, Homo sapien
aatttgtttagctcctgcatatggg

SEQ ID NO: 4749293 - DNA, 25 bp, Homo sapien
ttccatgtgaccagctatagagcac

SEQ ID NO: 4749294 - DNA, 25 bp, Homo sapien
tgcatatgggtaaggacagacagta

SEQ ID NO: 4749295 - DNA, 25 bp, Homo sapien
caggtgtacaatgcgtaatgatcaa

SEQ ID NO: 4749296 - DNA, 25 bp, Homo sapien
taactccacttgatactaaaggaag

SEQ ID NO: 4749297 - DNA, 25 bp, Homo sapien
tcctagtgagtattataaatcatag

SEQ ID NO: 4749298 - DNA, 25 bp, Homo sapien
gaaatatgaatacatccaatagatg

SEQ ID NO: 4749299 - DNA, 25 bp, Homo sapien
aagctgagcttccttgctttaatca

SEQ ID NO: 4749300 - DNA, 25 bp, Homo sapien
gaaaaggtcaataagcccaggtgaa

SEQ ID NO: 4749301 - DNA, 25 bp, Homo sapien
taggccttgagacctacgggatcat

SEQ ID NO: 4749302 - DNA, 25 bp, Homo sapien
caaaatcggatctgaacgggagtcc

SEQ ID NO: 4749303 - DNA, 25 bp, Homo sapien
gaccatagatcccagcaattgcagt

SEQ ID NO: 4749304 - DNA, 25 bp, Homo sapien
cgtgtcctcgtctgcagtgtgttca

SEQ ID NO: 4749305 - DNA, 25 bp, Homo sapien
gacgtgggtccgctggtctcctgcg

SEQ ID NO: 4749306 - DNA, 25 bp, Homo sapien
cctgtggggctcgtgtcctcgtctg

SEQ ID NO: 4749307 - DNA, 25 bp, Homo sapien
gtccgctggtctcctgcgggacaaa

SEQ ID NO: 4749308 - DNA, 25 bp, Homo sapien
tccctcgggttgacaggcaattcca

SEQ ID NO: 4749309 - DNA, 25 bp, Homo sapien
caccggtccggtcaaagcccaagct

SEQ ID NO: 4749310 - DNA, 25 bp, Homo sapien
agcccaagctgctgccagccgccat

SEQ ID NO: 4749311 - DNA, 25 bp, Homo sapien
accggtccggtcaaagcccaagctg

SEQ ID NO: 4749312 - DNA, 25 bp, Homo sapien
caaagcccaagctgctgccagccgc

SEQ ID NO: 4749313 - DNA, 25 bp, Homo sapien
ccctctgtgaaggcggccacttgag

SEQ ID NO: 4749314 - DNA, 25 bp, Homo sapien
gtagagggacccccacatgccaggg

SEQ ID NO: 4749315 - DNA, 25 bp, Homo sapien
gcagtgcacaggatgattcagagag

SEQ ID NO: 4749316 - DNA, 25 bp, Homo sapien
tcccggctcactggtcgcagtcttc

SEQ ID NO: 4749317 - DNA, 25 bp, Homo sapien
acatcacctatgatagaaggaatag

SEQ ID NO: 4749318 - DNA, 25 bp, Homo sapien
aattagaacacatagaacagatgac

SEQ ID NO: 4749319 - DNA, 25 bp, Homo sapien
ttataattagaacacatagaacaga

SEQ ID NO: 4749320 - DNA, 25 bp, Homo sapien
cctatgatagaaggaatagaaacat

SEQ ID NO: 4749321 - DNA, 25 bp, Homo sapien
gcaccttcaggtcgtgatgccgaag

SEQ ID NO: 4749322 - DNA, 25 bp, Homo sapien
caccttcaggtcgtgatgccgaaga

SEQ ID NO: 4749323 - DNA, 25 bp, Homo sapien
aaggcgcccttgcacaggtctcttg

SEQ ID NO: 4749324 - DNA, 25 bp, Homo sapien
gacccttcttcgtagaccttagcag

SEQ ID NO: 4749325 - DNA, 25 bp, Homo sapien
cagcttctgatgtcctgatgtagaa

SEQ ID NO: 4749326 - DNA, 25 bp, Homo sapien
caaagtacccagtatggcaggaggt

SEQ ID NO: 4749327 - DNA, 25 bp, Homo sapien
tgctgatgggcatcatatatgccac

SEQ ID NO: 4749328 - DNA, 25 bp, Homo sapien
agttttttgacccatagcctcatgc

SEQ ID NO: 4749329 - DNA, 25 bp, Homo sapien
agtgagcaatgaagaaaggactccc

SEQ ID NO: 4749330 - DNA, 25 bp, Homo sapien
cttcaagggacatggtttctttctc

SEQ ID NO: 4749331 - DNA, 25 bp, Homo sapien
catatgaatcggaaaatgctgactt

SEQ ID NO: 4749332 - DNA, 25 bp, Homo sapien
gaaatcattgtaaaaccccatagtg

SEQ ID NO: 4749333 - DNA, 25 bp, Homo sapien
gctgaccataccagagtatctattc

SEQ ID NO: 4749334 - DNA, 25 bp, Homo sapien
ttctacatcctaaatctaaactaat

SEQ ID NO: 4749335 - DNA, 25 bp, Homo sapien
tgtgtcctggacgagccgcgttgtg

SEQ ID NO: 4749336 - DNA, 25 bp, Homo sapien
tgtggctgtgcaggtgcaacttgtg

SEQ ID NO: 4749337 - DNA, 25 bp, Homo sapien
tgggtgtgtgactttgcgtgtgtgt

SEQ ID NO: 4749338 - DNA, 25 bp, Homo sapien
tgtgcaggtgcaacttgtgtggccc

SEQ ID NO: 4749339 - DNA, 25 bp, Homo sapien
gtgtgagagaggagagtgtgattgg

SEQ ID NO: 4749340 - DNA, 25 bp, Homo sapien
ctgtgtgagagaggagagtgtgatt

SEQ ID NO: 4749341 - DNA, 25 bp, Homo sapien
tgtgtgagagaggagagtgtgattg

SEQ ID NO: 4749342 - DNA, 25 bp, Homo sapien
tgagagtagcctgcccaaatggcaa

SEQ ID NO: 4749343 - DNA, 25 bp, Homo sapien
cgcatgcctatagtcaaagctaata

SEQ ID NO: 4749344 - DNA, 25 bp, Homo sapien
tgcccggccaatagaggttttcaaa

SEQ ID NO: 4749345 - DNA, 25 bp, Homo sapien
cagtcttcctttaagaaaagagaca

SEQ ID NO: 4749346 - DNA, 25 bp, Homo sapien
cagcgccgtaaaggtattggttggg

SEQ ID NO: 4749347 - DNA, 25 bp, Homo sapien
gcagcgccgtaaaggtattggttgg

SEQ ID NO: 4749348 - DNA, 25 bp, Homo sapien
tcagataattgtttcggtaactggg

SEQ ID NO: 4749349 - DNA, 25 bp, Homo sapien
tgggacctccagacctagagattct

SEQ ID NO: 4749350 - DNA, 25 bp, Homo sapien
gatccaagggcgtttcgggtcagct

SEQ ID NO: 4749351 - DNA, 25 bp, Homo sapien
cgttgccatgggatccaagggcgtt

SEQ ID NO: 4749352 - DNA, 25 bp, Homo sapien
ggcatttgccacatgctggtcctct

SEQ ID NO: 4749353 - DNA, 25 bp, Homo sapien
catctgctcctacataccccaggca

SEQ ID NO: 4749354 - DNA, 25 bp, Homo sapien
ctctctttcctgacaggcgggccat

SEQ ID NO: 4749355 - DNA, 25 bp, Homo sapien
tgctcctacataccccaggcatttg

SEQ ID NO: 4749356 - DNA, 25 bp, Homo sapien
tagtaaagggagagccgatcatcag

SEQ ID NO: 4749357 - DNA, 25 bp, Homo sapien
gaagctttgcatacccttgtgtggg

SEQ ID NO: 4749358 - DNA, 25 bp, Homo sapien
gagcctctcggaaggtcctgcagaa

SEQ ID NO: 4749359 - DNA, 25 bp, Homo sapien
tgcttctagggatacaggcacacct

SEQ ID NO: 4749360 - DNA, 25 bp, Homo sapien
tgtgaagtcctcgatcacgtgagga

SEQ ID NO: 4749361 - DNA, 25 bp, Homo sapien
cggtcccggagcaatcgaagtctca

SEQ ID NO: 4749362 - DNA, 25 bp, Homo sapien
agtcctcgatcacgtgaggagatgc

SEQ ID NO: 4749363 - DNA, 25 bp, Homo sapien
tttgggtttgtgaagtcctcgatca

SEQ ID NO: 4749364 - DNA, 25 bp, Homo sapien
cctccaagacccatagactcgaagt

SEQ ID NO: 4749365 - DNA, 25 bp, Homo sapien
tgctctagctcttgggttggtggtc

SEQ ID NO: 4749366 - DNA, 25 bp, Homo sapien
ttggggagagatcctataaccctgg

SEQ ID NO: 4749367 - DNA, 25 bp, Homo sapien
gctcttgggttggtggtccctccaa

SEQ ID NO: 4749368 - DNA, 25 bp, Homo sapien
gtcctcctgttcccccgcatttgta

SEQ ID NO: 4749369 - DNA, 25 bp, Homo sapien
tcctcctgttcccccgcatttgtag

SEQ ID NO: 4749370 - DNA, 25 bp, Homo sapien
ctgggaacgaagggctagagcgtga

SEQ ID NO: 4749371 - DNA, 25 bp, Homo sapien
tgggaacgaagggctagagcgtgag

SEQ ID NO: 4749372 - DNA, 25 bp, Homo sapien
tgcaggctttgacttggggcagcca

SEQ ID NO: 4749373 - DNA, 25 bp, Homo sapien
cccctgagctttgtttctgatcaca

SEQ ID NO: 4749374 - DNA, 25 bp, Homo sapien
tttctgatcacagttttcctgcttc

SEQ ID NO: 4749375 - DNA, 25 bp, Homo sapien
gccagacagcccctgagctttgttt

SEQ ID NO: 4749376 - DNA, 25 bp, Homo sapien
ccctgaacgggcatgttggtcccag

SEQ ID NO: 4749377 - DNA, 25 bp, Homo sapien
gagcagcaaggacggagacacttag

SEQ ID NO: 4749378 - DNA, 25 bp, Homo sapien
ccagtgggatcagctttgatgggat

SEQ ID NO: 4749379 - DNA, 25 bp, Homo sapien
ttgatgggatgcacacagactgacc

SEQ ID NO: 4749380 - DNA, 25 bp, Homo sapien
ttggtgggcctagagcgctagggac

SEQ ID NO: 4749381 - DNA, 25 bp, Homo sapien
agcgctagggactggcacgcaccag

SEQ ID NO: 4749382 - DNA, 25 bp, Homo sapien
ggcgggccttggctgggcgtccgcg

SEQ ID NO: 4749383 - DNA, 25 bp, Homo sapien
gcagagccagccctttgagtgcagg

SEQ ID NO: 4749384 - DNA, 25 bp, Homo sapien
ccttgtttcgggacgcagttgtgct

SEQ ID NO: 4749385 - DNA, 25 bp, Homo sapien
cctgtggctccttgtttcgggacgc

SEQ ID NO: 4749386 - DNA, 25 bp, Homo sapien
ggctcctgttctgggacgtctgctt

SEQ ID NO: 4749387 - DNA, 25 bp, Homo sapien
tgaccccgcggctcctgttctggga

SEQ ID NO: 4749388 - DNA, 25 bp, Homo sapien
ctgaagcacccttctcccatacttg

SEQ ID NO: 4749389 - DNA, 25 bp, Homo sapien
cctgaagcacccttctcccatactt

SEQ ID NO: 4749390 - DNA, 25 bp, Homo sapien
gcaggaagaattcagggtagacagt

SEQ ID NO: 4749391 - DNA, 25 bp, Homo sapien
caggaagaattcagggtagacagtg

SEQ ID NO: 4749392 - DNA, 25 bp, Homo sapien
ccatcagagagtactacctggtgca

SEQ ID NO: 4749393 - DNA, 25 bp, Homo sapien
tataggccctaaggatccagagatg

SEQ ID NO: 4749394 - DNA, 25 bp, Homo sapien
cagtctagtgggaaatagagttcac

SEQ ID NO: 4749395 - DNA, 25 bp, Homo sapien
agttgaataaggcaggaacgacctc

SEQ ID NO: 4749396 - DNA, 25 bp, Homo sapien
aagatcatgctggttaccaagtgga

SEQ ID NO: 4749397 - DNA, 25 bp, Homo sapien
aggtcactggtgatcgccctgtgag

SEQ ID NO: 4749398 - DNA, 25 bp, Homo sapien
ggcaaagtgctgacaagggtaaaac

SEQ ID NO: 4749399 - DNA, 25 bp, Homo sapien
gctggttaccaagtggagtattcca

SEQ ID NO: 4749400 - DNA, 25 bp, Homo sapien
aatgtacgccaaaatagttctgctg

SEQ ID NO: 4749401 - DNA, 25 bp, Homo sapien
taatgtacgccaaaatagttctgct

SEQ ID NO: 4749402 - DNA, 25 bp, Homo sapien
ttaatgtacgccaaaatagttctgc

SEQ ID NO: 4749403 - DNA, 25 bp, Homo sapien
tgggtggggccaattcaagcccttc

SEQ ID NO: 4749404 - DNA, 25 bp, Homo sapien
tccatatcagatgacttcctcagct

SEQ ID NO: 4749405 - DNA, 25 bp, Homo sapien
ttcctcagctcaagtcctagctctg

SEQ ID NO: 4749406 - DNA, 25 bp, Homo sapien
ctgccactgtggtagggacataata

SEQ ID NO: 4749407 - DNA, 25 bp, Homo sapien
taagtgccctgtcacaccgagtgga

SEQ ID NO: 4749408 - DNA, 25 bp, Homo sapien
tgccctgtcacaccgagtggaagta

SEQ ID NO: 4749409 - DNA, 25 bp, Homo sapien
cctgtcacaccgagtggaagtagtt

SEQ ID NO: 4749410 - DNA, 25 bp, Homo sapien
agtgccctgtcacaccgagtggaag

SEQ ID NO: 4749411 - DNA, 25 bp, Homo sapien
ttctaagcacgcagaaatgtcctct

SEQ ID NO: 4749412 - DNA, 25 bp, Homo sapien
tctgagcttctaagcacgcagaaat

SEQ ID NO: 4749413 - DNA, 25 bp, Homo sapien
ctgcgaggcttctgagcttctaagc

SEQ ID NO: 4749414 - DNA, 25 bp, Homo sapien
ggcttctgagcttctaagcacgcag

SEQ ID NO: 4749415 - DNA, 25 bp, Homo sapien
gagtatttagtattccaaggcccca

SEQ ID NO: 4749416 - DNA, 25 bp, Homo sapien
gagagtatttagtattccaaggccc

SEQ ID NO: 4749417 - DNA, 25 bp, Homo sapien
tgagagtatttagtattccaaggcc

SEQ ID NO: 4749418 - DNA, 25 bp, Homo sapien
tatttagtattccaaggccccacca

SEQ ID NO: 4749419 - DNA, 25 bp, Homo sapien
tgagcagtgcccatcgtggactggg

SEQ ID NO: 4749420 - DNA, 25 bp, Homo sapien
gggtctttgtgagcgtgcagcagtg

SEQ ID NO: 4749421 - DNA, 25 bp, Homo sapien
cagcagtgaggaatgctccgccatg

SEQ ID NO: 4749422 - DNA, 25 bp, Homo sapien
agtggacaccggcagttggaacatc

SEQ ID NO: 4749423 - DNA, 25 bp, Homo sapien
cccctcgtggggcacaaaatgttga

SEQ ID NO: 4749424 - DNA, 25 bp, Homo sapien
agaccaaggaatgttggcgtggctt

SEQ ID NO: 4749425 - DNA, 25 bp, Homo sapien
actagagatccatgggtgttgggcc

SEQ ID NO: 4749426 - DNA, 25 bp, Homo sapien
aaatgttgatgtgctggcaagagcc

SEQ ID NO: 4749427 - DNA, 25 bp, Homo sapien
ttcaacagcagcgaaagccgtgtga

SEQ ID NO: 4749428 - DNA, 25 bp, Homo sapien
cttcaacagcagcgaaagccgtgtg

SEQ ID NO: 4749429 - DNA, 25 bp, Homo sapien
acagcagcgaaagccgtgtgaactc

SEQ ID NO: 4749430 - DNA, 25 bp, Homo sapien
caacagcagcgaaagccgtgtgaac

SEQ ID NO: 4749431 - DNA, 25 bp, Homo sapien
ctgctgcacctttaacgctttctgg

SEQ ID NO: 4749432 - DNA, 25 bp, Homo sapien
gctgctgcacctttaacgctttctg

SEQ ID NO: 4749433 - DNA, 25 bp, Homo sapien
gcccgttggctgttcccgcaaagag

SEQ ID NO: 4749434 - DNA, 25 bp, Homo sapien
gaggcccgttggctgttcccgcaaa

SEQ ID NO: 4749435 - DNA, 25 bp, Homo sapien
ccgttggctgttcccgcaaagagtg

SEQ ID NO: 4749436 - DNA, 25 bp, Homo sapien
aggcccgttggctgttcccgcaaag

SEQ ID NO: 4749437 - DNA, 25 bp, Homo sapien
tctcttcgctggcactggcctcctg

SEQ ID NO: 4749438 - DNA, 25 bp, Homo sapien
tgcacccgggtctgcagtccctccg

SEQ ID NO: 4749439 - DNA, 25 bp, Homo sapien
tcgctggcactggcctcctgcaccc

SEQ ID NO: 4749440 - DNA, 25 bp, Homo sapien
tggcactggcctcctgcacccgggt

SEQ ID NO: 4749441 - DNA, 25 bp, Homo sapien
tgcatacaaatgtgctctgcgctct

SEQ ID NO: 4749442 - DNA, 25 bp, Homo sapien
acaaatgtgctctgcgctctgtaga

SEQ ID NO: 4749443 - DNA, 25 bp, Homo sapien
gatgcatacaaatgtgctctgcgct

SEQ ID NO: 4749444 - DNA, 25 bp, Homo sapien
catacaaatgtgctctgcgctctgt

SEQ ID NO: 4749445 - DNA, 25 bp, Homo sapien
gagagaagggattctttatgtattt

SEQ ID NO: 4749446 - DNA, 25 bp, Homo sapien
tgttctgcctgaatgctggtgtgcg

SEQ ID NO: 4749447 - DNA, 25 bp, Homo sapien
tgctggtgtgcgtgggcagtgtgtt

SEQ ID NO: 4749448 - DNA, 25 bp, Homo sapien
gaatgctggtgtgcgtgggcagtgt

SEQ ID NO: 4749449 - DNA, 25 bp, Homo sapien
cctctgtctagtgaggatcacggtc

SEQ ID NO: 4749450 - DNA, 25 bp, Homo sapien
cagcaatgccccaatcagattgttt

SEQ ID NO: 4749451 - DNA, 25 bp, Homo sapien
gatccagcaatgccccaatcagatt

SEQ ID NO: 4749452 - DNA, 25 bp, Homo sapien
tagtgaggatcacggtctgcagaga

SEQ ID NO: 4749453 - DNA, 25 bp, Homo sapien
tcaatccttttcgccgacgcggttc

SEQ ID NO: 4749454 - DNA, 25 bp, Homo sapien
aatatcctccccatcctgaacagcc

SEQ ID NO: 4749455 - DNA, 25 bp, Homo sapien
cccacgtgaggagattcttcggtcc

SEQ ID NO: 4749456 - DNA, 25 bp, Homo sapien
ggtcccggagcaattgaaatatcct

SEQ ID NO: 4749457 - DNA, 25 bp, Homo sapien
aggagaccagcggacccacgtcaga

SEQ ID NO: 4749458 - DNA, 25 bp, Homo sapien
ggagctctttgtcccgcaggagacc

SEQ ID NO: 4749459 - DNA, 25 bp, Homo sapien
tgcagacgaggacacgagccccaca

SEQ ID NO: 4749460 - DNA, 25 bp, Homo sapien
ccagcggacccacgtcagagaagat

SEQ ID NO: 4749461 - DNA, 25 bp, Homo sapien
cctgtgggattctgcagtgtgttcg

SEQ ID NO: 4749462 - DNA, 25 bp, Homo sapien
agagctcctgtgggattctgcagtg

SEQ ID NO: 4749463 - DNA, 25 bp, Homo sapien
gctcctgtgggattctgcagtgtgt

SEQ ID NO: 4749464 - DNA, 25 bp, Homo sapien
gagctcctgtgggattctgcagtgt

SEQ ID NO: 4749465 - DNA, 25 bp, Homo sapien
ttaaccagaggcaaggcatgaagtc

SEQ ID NO: 4749466 - DNA, 25 bp, Homo sapien
taagacccctgggacttctcatgtg

SEQ ID NO: 4749467 - DNA, 25 bp, Homo sapien
tgaagctatggcaactagcactggg

SEQ ID NO: 4749468 - DNA, 25 bp, Homo sapien
catgtgcctgatctggagctctgcc

SEQ ID NO: 4749469 - DNA, 25 bp, Homo sapien
taacatactctagtcttgtcttgaa

SEQ ID NO: 4749470 - DNA, 25 bp, Homo sapien
cattatcagaatggtagtgatagcc

SEQ ID NO: 4749471 - DNA, 25 bp, Homo sapien
taggacagctaattccattatcaga

SEQ ID NO: 4749472 - DNA, 25 bp, Homo sapien
taggtcatcaggtatgtaggacagc

SEQ ID NO: 4749473 - DNA, 25 bp, Homo sapien
aatatctggcacttcactggtgcta

SEQ ID NO: 4749474 - DNA, 25 bp, Homo sapien
tagtcggagtcttgcctaggtttcc

SEQ ID NO: 4749475 - DNA, 25 bp, Homo sapien
caaggcctacatagtccaaagtgac

SEQ ID NO: 4749476 - DNA, 25 bp, Homo sapien
aagtgacatcactcaaatatctggc

SEQ ID NO: 4749477 - DNA, 25 bp, Homo sapien
gttccatatcgtatttgccatcctc

SEQ ID NO: 4749478 - DNA, 25 bp, Homo sapien
gtgttccttgtgttccatatcgtat

SEQ ID NO: 4749479 - DNA, 25 bp, Homo sapien
tgacagcagacagtagtgttccttg

SEQ ID NO: 4749480 - DNA, 25 bp, Homo sapien
tgtcttccaggtgagttttgcagtg

SEQ ID NO: 4749481 - DNA, 25 bp, Homo sapien
gtatgatgtgaagtagtgactgctt

SEQ ID NO: 4749482 - DNA, 25 bp, Homo sapien
tcctttgtagaaacctggctgctgg

SEQ ID NO: 4749483 - DNA, 25 bp, Homo sapien
actgcttgttggctgccacacatgc

SEQ ID NO: 4749484 - DNA, 25 bp, Homo sapien
catgcatgagaacgacaactctgtt

SEQ ID NO: 4749485 - DNA, 25 bp, Homo sapien
tccaacatttgtgtgaggatggctt

SEQ ID NO: 4749486 - DNA, 25 bp, Homo sapien
aaacagatgcctgttccaacatttg

SEQ ID NO: 4749487 - DNA, 25 bp, Homo sapien
gaaccagttgtctggcgaacaaaca

SEQ ID NO: 4749488 - DNA, 25 bp, Homo sapien
taaagttttcagaaccagttgtctg

SEQ ID NO: 4749489 - DNA, 25 bp, Homo sapien
gaaggatgccggtgactattgaagc

SEQ ID NO: 4749490 - DNA, 25 bp, Homo sapien
aaaggccaccagtgtccatgacagg

SEQ ID NO: 4749491 - DNA, 25 bp, Homo sapien
catggtggcatggttaggagataca

SEQ ID NO: 4749492 - DNA, 25 bp, Homo sapien
ggagatacatgagcctgttcccacc

SEQ ID NO: 4749493 - DNA, 25 bp, Homo sapien
gctggcaccccagcagttgtgggaa

SEQ ID NO: 4749494 - DNA, 25 bp, Homo sapien
gcctttttcggattttgattggtgc

SEQ ID NO: 4749495 - DNA, 25 bp, Homo sapien
ttgattaaccgagaaaaactgtgca

SEQ ID NO: 4749496 - DNA, 25 bp, Homo sapien
ggattttgattggtgccatcctggt

SEQ ID NO: 4749497 - DNA, 25 bp, Homo sapien
ggttcacccattccagataggctgc

SEQ ID NO: 4749498 - DNA, 25 bp, Homo sapien
gaaagccccagaaaagatctggttc

SEQ ID NO: 4749499 - DNA, 25 bp, Homo sapien
cagataggctgctggaaggtcgttt

SEQ ID NO: 4749500 - DNA, 25 bp, Homo sapien
gaatctcatttatggcactaacagc

SEQ ID NO: 4749501 - DNA, 25 bp, Homo sapien
caggacgctgccgtgcaactgcatg

SEQ ID NO: 4749502 - DNA, 25 bp, Homo sapien
gctgccgtgcaactgcatggcctga

SEQ ID NO: 4749503 - DNA, 25 bp, Homo sapien
cctgacagcgctcccatttagaaga

SEQ ID NO: 4749504 - DNA, 25 bp, Homo sapien
gacgctgccgtgcaactgcatggcc

SEQ ID NO: 4749505 - DNA, 25 bp, Homo sapien
caagggtttgggtcacatgggtctc

SEQ ID NO: 4749506 - DNA, 25 bp, Homo sapien
gggtctctgaagtactgtggccagt

SEQ ID NO: 4749507 - DNA, 25 bp, Homo sapien
tgggtctctgaagtactgtggccag

SEQ ID NO: 4749508 - DNA, 25 bp, Homo sapien
gcaagggtttgggtcacatgggtct

SEQ ID NO: 4749509 - DNA, 25 bp, Homo sapien
ccaccctggacggcctgtcccagat

SEQ ID NO: 4749510 - DNA, 25 bp, Homo sapien
tcccaccctggacggcctgtcccag

SEQ ID NO: 4749511 - DNA, 25 bp, Homo sapien
ttcccaccctggacggcctgtccca

SEQ ID NO: 4749512 - DNA, 25 bp, Homo sapien
accctggacggcctgtcccagatga

SEQ ID NO: 4749513 - DNA, 25 bp, Homo sapien
cacctgtctgttttctaccggccac

SEQ ID NO: 4749514 - DNA, 25 bp, Homo sapien
ttttctaccggccactccaggatag

SEQ ID NO: 4749515 - DNA, 25 bp, Homo sapien
gtctgttttctaccggccactccag

SEQ ID NO: 4749516 - DNA, 25 bp, Homo sapien
tttctaccggccactccaggatagc

SEQ ID NO: 4749517 - DNA, 25 bp, Homo sapien
ctggaaaagttagcgaaattcctgt

SEQ ID NO: 4749518 - DNA, 25 bp, Homo sapien
aagttagcgaaattcctgttcctct

SEQ ID NO: 4749519 - DNA, 25 bp, Homo sapien
cctggaaaagttagcgaaattcctg

SEQ ID NO: 4749520 - DNA, 25 bp, Homo sapien
tggactttacttgaagggtctctgg

SEQ ID NO: 4749521 - DNA, 25 bp, Homo sapien
gggtctctggttttaaagtcagagc

SEQ ID NO: 4749522 - DNA, 25 bp, Homo sapien
ctctggttttaaagtcagagcacat

SEQ ID NO: 4749523 - DNA, 25 bp, Homo sapien
cgtggactttacttgaagggtctct

SEQ ID NO: 4749524 - DNA, 25 bp, Homo sapien
attcttttatcgagtgtgtgtgcgc

SEQ ID NO: 4749525 - DNA, 25 bp, Homo sapien
tgttagacctattcttttatcgagt

SEQ ID NO: 4749526 - DNA, 25 bp, Homo sapien
cctattcttttatcgagtgtgtgtg

SEQ ID NO: 4749527 - DNA, 25 bp, Homo sapien
tagacctattcttttatcgagtgtg

SEQ ID NO: 4749528 - DNA, 25 bp, Homo sapien
ttggttagtgtttgaactttatggc

SEQ ID NO: 4749529 - DNA, 25 bp, Homo sapien
agtgtttgaactttatggcttttct

SEQ ID NO: 4749530 - DNA, 25 bp, Homo sapien
tagtgtttgaactttatggcttttc

SEQ ID NO: 4749531 - DNA, 25 bp, Homo sapien
tggttagtgtttgaactttatggct

SEQ ID NO: 4749532 - DNA, 25 bp, Homo sapien
cagcagaaattgaagtaccagcaga

SEQ ID NO: 4749533 - DNA, 25 bp, Homo sapien
tgaccaaacagtaccagcagaaatt

SEQ ID NO: 4749534 - DNA, 25 bp, Homo sapien
ttctttagagggcaatgaccaaaca

SEQ ID NO: 4749535 - DNA, 25 bp, Homo sapien
tttagagggcaatgaccaaacagta

SEQ ID NO: 4749536 - DNA, 25 bp, Homo sapien
agatgagtccgcagagaacaggatg

SEQ ID NO: 4749537 - DNA, 25 bp, Homo sapien
gttgaagatgagtccgcagagaaca

SEQ ID NO: 4749538 - DNA, 25 bp, Homo sapien
tgaagatgagtccgcagagaacagg

SEQ ID NO: 4749539 - DNA, 25 bp, Homo sapien
aagatgagtccgcagagaacaggat

SEQ ID NO: 4749540 - DNA, 25 bp, Homo sapien
tcagaccttctgttctcacattctg

SEQ ID NO: 4749541 - DNA, 25 bp, Homo sapien
cggtcagaccttctgttctcacatt

SEQ ID NO: 4749542 - DNA, 25 bp, Homo sapien
cacggtcagaccttctgttctcaca

SEQ ID NO: 4749543 - DNA, 25 bp, Homo sapien
ccacggtcagaccttctgttctcac

SEQ ID NO: 4749544 - DNA, 25 bp, Homo sapien
ttgtgatcgtgccatggtgccccag

SEQ ID NO: 4749545 - DNA, 25 bp, Homo sapien
ggttggcctcctaagtgaaaattga

SEQ ID NO: 4749546 - DNA, 25 bp, Homo sapien
gtcttagctactagaggcgctgagg

SEQ ID NO: 4749547 - DNA, 25 bp, Homo sapien
ggcaggacgatttcttgacctagga

SEQ ID NO: 4749548 - DNA, 25 bp, Homo sapien
gaatcaaaaccgtggaagcctctgt

SEQ ID NO: 4749549 - DNA, 25 bp, Homo sapien
gatagaagccttggaagctacccct

SEQ ID NO: 4749550 - DNA, 25 bp, Homo sapien
caaggaaccccagtaagattcagag

SEQ ID NO: 4749551 - DNA, 25 bp, Homo sapien
gcaaaggcctcaaacctgtggtata

SEQ ID NO: 4749552 - DNA, 25 bp, Homo sapien
cacttctacccaagtagtggcaacg

SEQ ID NO: 4749553 - DNA, 25 bp, Homo sapien
gaactcaaccactatggcccctgag

SEQ ID NO: 4749554 - DNA, 25 bp, Homo sapien
tgctggcttggcaaccggtgacgct

SEQ ID NO: 4749555 - DNA, 25 bp, Homo sapien
tggcaacgctagagacagatgcctg

SEQ ID NO: 4749556 - DNA, 25 bp, Homo sapien
ataaagggacatgttgctgttgctg

SEQ ID NO: 4749557 - DNA, 25 bp, Homo sapien
caataaagggacatgttgctgttgc

SEQ ID NO: 4749558 - DNA, 25 bp, Homo sapien
aaagcaacttacaataaagggacat

SEQ ID NO: 4749559 - DNA, 25 bp, Homo sapien
aataaagggacatgttgctgttgct

SEQ ID NO: 4749560 - DNA, 25 bp, Homo sapien
catgctctcaaaggaatgctttgta

SEQ ID NO: 4749561 - DNA, 25 bp, Homo sapien
ggtcccaggcatgctctcaaaggaa

SEQ ID NO: 4749562 - DNA, 25 bp, Homo sapien
tacctaccaatatgtataacgaatg

SEQ ID NO: 4749563 - DNA, 25 bp, Homo sapien
ctttgtaacaaagcatcagtcttat

SEQ ID NO: 4749564 - DNA, 25 bp, Homo sapien
ttgaatccagcaccacttggcagac

SEQ ID NO: 4749565 - DNA, 25 bp, Homo sapien
tgtgttgaatccagcaccacttggc

SEQ ID NO: 4749566 - DNA, 25 bp, Homo sapien
aatccagcaccacttggcagaccta

SEQ ID NO: 4749567 - DNA, 25 bp, Homo sapien
gatgtgttgaatccagcaccacttg

SEQ ID NO: 4749568 - DNA, 25 bp, Homo sapien
tgtgtgccacctagagggggtccca

SEQ ID NO: 4749569 - DNA, 25 bp, Homo sapien
gcacctgtagaagctctaatgctgg

SEQ ID NO: 4749570 - DNA, 25 bp, Homo sapien
tagaagctctaatgctggccatgag

SEQ ID NO: 4749571 - DNA, 25 bp, Homo sapien
agctctaatgctggccatgagccct

SEQ ID NO: 4749572 - DNA, 25 bp, Homo sapien
atcttttctgatcacccccgtgatt

SEQ ID NO: 4749573 - DNA, 25 bp, Homo sapien
ctgatcacccccgtgattacccagg

SEQ ID NO: 4749574 - DNA, 25 bp, Homo sapien
agtcatctcgttcatcctcgcagca

SEQ ID NO: 4749575 - DNA, 25 bp, Homo sapien
tttctgatcacccccgtgattaccc

SEQ ID NO: 4749576 - DNA, 25 bp, Homo sapien
acaaagacgcaggtccagagacaac

SEQ ID NO: 4749577 - DNA, 25 bp, Homo sapien
gctccatgataacaaagacgcaggt

SEQ ID NO: 4749578 - DNA, 25 bp, Homo sapien
gcccagtccagctccatgataacaa

SEQ ID NO: 4749579 - DNA, 25 bp, Homo sapien
caggtccagagacaactgccctgca

SEQ ID NO: 4749580 - DNA, 25 bp, Homo sapien
tgaaacacttcattgccgcttggcc

SEQ ID NO: 4749581 - DNA, 25 bp, Homo sapien
tgatgctgatctcctcatagtgagc

SEQ ID NO: 4749582 - DNA, 25 bp, Homo sapien
tgcataacaggatatggcacctctt

SEQ ID NO: 4749583 - DNA, 25 bp, Homo sapien
tgagctctcatgaggtcaagttgca

SEQ ID NO: 4749584 - DNA, 25 bp, Homo sapien
tagaagctctaatgctggccatgag

SEQ ID NO: 4749585 - DNA, 25 bp, Homo sapien
gcacctgtagaagctctaatgctgg

SEQ ID NO: 4749586 - DNA, 25 bp, Homo sapien
tgtgtgccacctagagggggtccca

SEQ ID NO: 4749587 - DNA, 25 bp, Homo sapien
agctctaatgctggccatgagccct

SEQ ID NO: 4749588 - DNA, 25 bp, Homo sapien
tttctgatcacccccgtgattaccc

SEQ ID NO: 4749589 - DNA, 25 bp, Homo sapien
atcttttctgatcacccccgtgatt

SEQ ID NO: 4749590 - DNA, 25 bp, Homo sapien
ctgatcacccccgtgattacccagg

SEQ ID NO: 4749591 - DNA, 25 bp, Homo sapien
agtcatctcgttcatcctcgcagca

SEQ ID NO: 4749592 - DNA, 25 bp, Homo sapien
gctccatgataacaaagacgcaggt

SEQ ID NO: 4749593 - DNA, 25 bp, Homo sapien
gcccagtccagctccatgataacaa

SEQ ID NO: 4749594 - DNA, 25 bp, Homo sapien
acaaagacgcaggtccagagacaac

SEQ ID NO: 4749595 - DNA, 25 bp, Homo sapien
caggtccagagacaactgccctgca

SEQ ID NO: 4749596 - DNA, 25 bp, Homo sapien
tcctgaggggagatgcttctgcagg

SEQ ID NO: 4749597 - DNA, 25 bp, Homo sapien
cctgaggggagatgcttctgcaggg

SEQ ID NO: 4749598 - DNA, 25 bp, Homo sapien
ctgaggggagatgcttctgcagggc

SEQ ID NO: 4749599 - DNA, 25 bp, Homo sapien
tcactattgtgaatcttaagatggc

SEQ ID NO: 4749600 - DNA, 25 bp, Homo sapien
tattgtgaatcttaagatggctttt

SEQ ID NO: 4749601 - DNA, 25 bp, Homo sapien
actattgtgaatcttaagatggctt

SEQ ID NO: 4749602 - DNA, 25 bp, Homo sapien
ctcactattgtgaatcttaagatgg

SEQ ID NO: 4749603 - DNA, 25 bp, Homo sapien
ggagcaggacagaggtttttccact

SEQ ID NO: 4749604 - DNA, 25 bp, Homo sapien
tgtggaccagaatttggagcaggac

SEQ ID NO: 4749605 - DNA, 25 bp, Homo sapien
aatgactgataacgtaaaggctttc

SEQ ID NO: 4749606 - DNA, 25 bp, Homo sapien
cagtagtactactcctgtgtggacc

SEQ ID NO: 4749607 - DNA, 25 bp, Homo sapien
gagttatgtgtgccctaaggcacat

SEQ ID NO: 4749608 - DNA, 25 bp, Homo sapien
tggactccactcatgaatgtttgtc

SEQ ID NO: 4749609 - DNA, 25 bp, Homo sapien
gactccactcatgaatgtttgtcct

SEQ ID NO: 4749610 - DNA, 25 bp, Homo sapien
tccactcatgaatgtttgtccttgt

SEQ ID NO: 4749611 - DNA, 25 bp, Homo sapien
ctccactcatgaatgtttgtccttg

SEQ ID NO: 4749612 - DNA, 25 bp, Homo sapien
gagtacttgtcacggatgtccaccc

SEQ ID NO: 4749613 - DNA, 25 bp, Homo sapien
ataggtccacgggatcatgccgtag

SEQ ID NO: 4749614 - DNA, 25 bp, Homo sapien
agttctcacacttgtcgattcccaa

SEQ ID NO: 4749615 - DNA, 25 bp, Homo sapien
gtgccagttctacacggaagccgtt

SEQ ID NO: 4749616 - DNA, 25 bp, Homo sapien
gaacacgagttgtagttccttggca

SEQ ID NO: 4749617 - DNA, 25 bp, Homo sapien
catatatgatcattgcctgcctgac

SEQ ID NO: 4749618 - DNA, 25 bp, Homo sapien
gagaacagattgctgagcttagccc

SEQ ID NO: 4749619 - DNA, 25 bp, Homo sapien
cattagaaattgataaccagcccag

SEQ ID NO: 4749620 - DNA, 25 bp, Homo sapien
cattctcactaagattatgatgtgc

SEQ ID NO: 4749621 - DNA, 25 bp, Homo sapien
tatgatgtgctttctcacgtgggaa

SEQ ID NO: 4749622 - DNA, 25 bp, Homo sapien
acataatattgcgtgtacacttggg

SEQ ID NO: 4749623 - DNA, 25 bp, Homo sapien
gcgtgtacacttgggaggatgtcct

SEQ ID NO: 4749624 - DNA, 25 bp, Homo sapien
gcgctcatcagagcggccaggcctt

SEQ ID NO: 4749625 - DNA, 25 bp, Homo sapien
acgcagggcgctcatcagagcggcc

SEQ ID NO: 4749626 - DNA, 25 bp, Homo sapien
gatacacgcagggcgctcatcagag

SEQ ID NO: 4749627 - DNA, 25 bp, Homo sapien
ggcgctcatcagagcggccaggcct

SEQ ID NO: 4749628 - DNA, 25 bp, Homo sapien
aaggtgcccgctggcacttccaggc

SEQ ID NO: 4749629 - DNA, 25 bp, Homo sapien
tgaaggtgcccgctggcacttccag

SEQ ID NO: 4749630 - DNA, 25 bp, Homo sapien
atgcgtgtagggtgaaggtgcccgc

SEQ ID NO: 4749631 - DNA, 25 bp, Homo sapien
tgtagggtgaaggtgcccgctggca

SEQ ID NO: 4749632 - DNA, 25 bp, Homo sapien
tgttggtctcttccccatgaggctg

SEQ ID NO: 4749633 - DNA, 25 bp, Homo sapien
tgaggctgtcttccctacatgtgtc

SEQ ID NO: 4749634 - DNA, 25 bp, Homo sapien
tggagaaccctgtaagaaggcagaa

SEQ ID NO: 4749635 - DNA, 25 bp, Homo sapien
tatcctcactgagcgccagttccag

SEQ ID NO: 4749636 - DNA, 25 bp, Homo sapien
tgtaagctctgctaggtgcagtggc

SEQ ID NO: 4749637 - DNA, 25 bp, Homo sapien
actgtaagctctgctaggtgcagtg

SEQ ID NO: 4749638 - DNA, 25 bp, Homo sapien
ctgtaagctctgctaggtgcagtgg

SEQ ID NO: 4749639 - DNA, 25 bp, Homo sapien
cattgagactaattttgtgacttgt

SEQ ID NO: 4749640 - DNA, 25 bp, Homo sapien
aagtttatcgagtttaatattatgc

SEQ ID NO: 4749641 - DNA, 25 bp, Homo sapien
gacttgtgaattatttaggaatatg

SEQ ID NO: 4749642 - DNA, 25 bp, Homo sapien
tatgaaaatttgtcacggcttgatc

SEQ ID NO: 4749643 - DNA, 25 bp, Homo sapien
tggatggcatgcaacatctccagta

SEQ ID NO: 4749644 - DNA, 25 bp, Homo sapien
aagactatgttctctcgtcacgcca

SEQ ID NO: 4749645 - DNA, 25 bp, Homo sapien
gatagtaaatcctgaagccacaata

SEQ ID NO: 4749646 - DNA, 25 bp, Homo sapien
gatttgaatgtccacttctgcatgg

SEQ ID NO: 4749647 - DNA, 25 bp, Homo sapien
tgctcctttttcgtccttctttgta

SEQ ID NO: 4749648 - DNA, 25 bp, Homo sapien
ttcgtccttctttgtaagcaccctc

SEQ ID NO: 4749649 - DNA, 25 bp, Homo sapien
ttctgctctttgctcctttttcgtc

SEQ ID NO: 4749650 - DNA, 25 bp, Homo sapien
cgtccttctttgtaagcaccctcat

SEQ ID NO: 4749651 - DNA, 25 bp, Homo sapien
tgtataacttaaaaccattaggcca

SEQ ID NO: 4749652 - DNA, 25 bp, Homo sapien
aagtttaacacatcatgatttataa

SEQ ID NO: 4749653 - DNA, 25 bp, Homo sapien
taaagtttaacacatcatgatttat

SEQ ID NO: 4749654 - DNA, 25 bp, Homo sapien
aattcaaattgtaagatcataataa

SEQ ID NO: 4749655 - DNA, 25 bp, Homo sapien
gaaataaacctcctgtgacaccaca

SEQ ID NO: 4749656 - DNA, 25 bp, Homo sapien
tcacccagacattgataggcggcag

SEQ ID NO: 4749657 - DNA, 25 bp, Homo sapien
cactatggcctacactgaagggaag

SEQ ID NO: 4749658 - DNA, 25 bp, Homo sapien
ggcacattgtaactacctggcagag

SEQ ID NO: 4749659 - DNA, 25 bp, Homo sapien
gcactaagttagatccaggtcccta

SEQ ID NO: 4749660 - DNA, 25 bp, Homo sapien
tgtgcacatgcgtttgacaaagaga

SEQ ID NO: 4749661 - DNA, 25 bp, Homo sapien
gactaagttggctcaattttcctga

SEQ ID NO: 4749662 - DNA, 25 bp, Homo sapien
caatccacaggcatacaaagtgtgt

SEQ ID NO: 4749663 - DNA, 25 bp, Homo sapien
tcaccagcaatatcaaggccatgtc

SEQ ID NO: 4749664 - DNA, 25 bp, Homo sapien
tgctcaggtcaaggaagattaaatc

SEQ ID NO: 4749665 - DNA, 25 bp, Homo sapien
gcattcttctgtgagtcggctcctt

SEQ ID NO: 4749666 - DNA, 25 bp, Homo sapien
taatcacaatgccattgggcaaaga

SEQ ID NO: 4749667 - DNA, 25 bp, Homo sapien
gattgtggcgggtgaggttctggag

SEQ ID NO: 4749668 - DNA, 25 bp, Homo sapien
tgagaagatcaacccaaaacacata

SEQ ID NO: 4749669 - DNA, 25 bp, Homo sapien
cttcagtaagatccatgagaagatc

SEQ ID NO: 4749670 - DNA, 25 bp, Homo sapien
taagagccacgtcacctagaaaagg

SEQ ID NO: 4749671 - DNA, 25 bp, Homo sapien
ggaaatcattcaggagaatttcccc

SEQ ID NO: 4749672 - DNA, 25 bp, Homo sapien
gatgattgtagaggagtttagagcc

SEQ ID NO: 4749673 - DNA, 25 bp, Homo sapien
gtatttttctcacaagggaggatga

SEQ ID NO: 4749674 - DNA, 25 bp, Homo sapien
gattgtagaggagtttagagcctgc

SEQ ID NO: 4749675 - DNA, 25 bp, Homo sapien
ttgtagaggagtttagagcctgcat

SEQ ID NO: 4749676 - DNA, 25 bp, Homo sapien
tccaagttagcatcaccgttcctgg

SEQ ID NO: 4749677 - DNA, 25 bp, Homo sapien
gaatatgtgtctttctcaactatca

SEQ ID NO: 4749678 - DNA, 25 bp, Homo sapien
tggttccaagttagcatcaccgttc

SEQ ID NO: 4749679 - DNA, 25 bp, Homo sapien
ttagcatcaccgttcctggtccttc

SEQ ID NO: 4749680 - DNA, 25 bp, Homo sapien
catatgcacgatggcagacacaagg

SEQ ID NO: 4749681 - DNA, 25 bp, Homo sapien
caggagctgagagcatatgcacgat

SEQ ID NO: 4749682 - DNA, 25 bp, Homo sapien
tgaactcatgctgctagcacaggta

SEQ ID NO: 4749683 - DNA, 25 bp, Homo sapien
gatctagaacaataatcaacttgaa

SEQ ID NO: 4749684 - DNA, 25 bp, Homo sapien
aataagtgataattgatattccaaa

SEQ ID NO: 4749685 - DNA, 25 bp, Homo sapien
tactttgctttgaattcaaattgtt

SEQ ID NO: 4749686 - DNA, 25 bp, Homo sapien
caataagtgataattgatattccaa

SEQ ID NO: 4749687 - DNA, 25 bp, Homo sapien
aagtgataattgatattccaaaaat

SEQ ID NO: 4749688 - DNA, 25 bp, Homo sapien
tgacccattgttaggtgcccggctg

SEQ ID NO: 4749689 - DNA, 25 bp, Homo sapien
catcctacacactgcggctcaggtg

SEQ ID NO: 4749690 - DNA, 25 bp, Homo sapien
ctcaggtgtgctttctaaacctcac

SEQ ID NO: 4749691 - DNA, 25 bp, Homo sapien
tcccataggcaactcagactcagca

SEQ ID NO: 4749692 - DNA, 25 bp, Homo sapien
ctggagcccttggagccctaagagg

SEQ ID NO: 4749693 - DNA, 25 bp, Homo sapien
ttcctgtgtcttcatgtgttcgaag

SEQ ID NO: 4749694 - DNA, 25 bp, Homo sapien
ggagccctaagaggcctcttcctgt

SEQ ID NO: 4749695 - DNA, 25 bp, Homo sapien
ttcatgtgttcgaaggatttccctc

SEQ ID NO: 4749696 - DNA, 25 bp, Homo sapien
catggattcatgtaagggtggggca

SEQ ID NO: 4749697 - DNA, 25 bp, Homo sapien
ggcagggtggactgaagatctgttg

SEQ ID NO: 4749698 - DNA, 25 bp, Homo sapien
actgaagatctgttggcagggctca

SEQ ID NO: 4749699 - DNA, 25 bp, Homo sapien
tggactgaagatctgttggcagggc

SEQ ID NO: 4749700 - DNA, 25 bp, Homo sapien
agatcccatcttgggcaatacggtt

SEQ ID NO: 4749701 - DNA, 25 bp, Homo sapien
catgagatcccatcttgggcaatac

SEQ ID NO: 4749702 - DNA, 25 bp, Homo sapien
tgagatcccatcttgggcaatacgg

SEQ ID NO: 4749703 - DNA, 25 bp, Homo sapien
gagatcccatcttgggcaatacggt

SEQ ID NO: 4749704 - DNA, 25 bp, Homo sapien
cagaagtggtgccaccactggcacc

SEQ ID NO: 4749705 - DNA, 25 bp, Homo sapien
ccaatgaagaccaggtagatgatgc

SEQ ID NO: 4749706 - DNA, 25 bp, Homo sapien
tagatgatgccacctagagaggcac

SEQ ID NO: 4749707 - DNA, 25 bp, Homo sapien
tgccacagagtcctccaatttcagg

SEQ ID NO: 4749708 - DNA, 25 bp, Homo sapien
ttcatgccatggtacaccctgatga

SEQ ID NO: 4749709 - DNA, 25 bp, Homo sapien
ctgtgttcatgccatggtacaccct

SEQ ID NO: 4749710 - DNA, 25 bp, Homo sapien
gatgcctatcaccagtgcgtgtgtt

SEQ ID NO: 4749711 - DNA, 25 bp, Homo sapien
cctatcaccagtgcgtgtgttcctg

SEQ ID NO: 4749712 - DNA, 25 bp, Homo sapien
tgggcccctccccaagccacaggac

SEQ ID NO: 4749713 - DNA, 25 bp, Homo sapien
ctgggcccctccccaagccacagga

SEQ ID NO: 4749714 - DNA, 25 bp, Homo sapien
agttcttgtcctgtctatccggagg

SEQ ID NO: 4749715 - DNA, 25 bp, Homo sapien
tgtctatccggagggactccctgct

SEQ ID NO: 4749716 - DNA, 25 bp, Homo sapien
tgtcctgtctatccggagggactcc

SEQ ID NO: 4749717 - DNA, 25 bp, Homo sapien
tcttgtcctgtctatccggagggac

SEQ ID NO: 4749718 - DNA, 25 bp, Homo sapien
aggaagccccgccacaatgtcatgt

SEQ ID NO: 4749719 - DNA, 25 bp, Homo sapien
tcaggaagccccgccacaatgtcat

SEQ ID NO: 4749720 - DNA, 25 bp, Homo sapien
aagccccgccacaatgtcatgtgat

SEQ ID NO: 4749721 - DNA, 25 bp, Homo sapien
gaagccccgccacaatgtcatgtga

SEQ ID NO: 4749722 - DNA, 25 bp, Homo sapien
cagaggcggacacccgggcaggacg

SEQ ID NO: 4749723 - DNA, 25 bp, Homo sapien
ccagaggcggacacccgggcaggac

SEQ ID NO: 4749724 - DNA, 25 bp, Homo sapien
acacggcccagtgcacagttagtga

SEQ ID NO: 4749725 - DNA, 25 bp, Homo sapien
caagttgacaccaaggtagctccca

SEQ ID NO: 4749726 - DNA, 25 bp, Homo sapien
agccaaaacccaagttgacaccaag

SEQ ID NO: 4749727 - DNA, 25 bp, Homo sapien
tgggccacggaaccaaggccgaata

SEQ ID NO: 4749728 - DNA, 25 bp, Homo sapien
actcccatggtgactccgaagccaa

SEQ ID NO: 4749729 - DNA, 25 bp, Homo sapien
cgttgcctcgaagaccctctgccat

SEQ ID NO: 4749730 - DNA, 25 bp, Homo sapien
cattaccctcagtctagagccactg

SEQ ID NO: 4749731 - DNA, 25 bp, Homo sapien
taccctcagtctagagccactgttc

SEQ ID NO: 4749732 - DNA, 25 bp, Homo sapien
tagagccactgttcccttcagccct

SEQ ID NO: 4749733 - DNA, 25 bp, Homo sapien
ttcaggcccattaccctcagtctag

SEQ ID NO: 4749734 - DNA, 25 bp, Homo sapien
catatgtgctcatgaactcggccag

SEQ ID NO: 4749735 - DNA, 25 bp, Homo sapien
tgacatatgtgctcatgaactcggc

SEQ ID NO: 4749736 - DNA, 25 bp, Homo sapien
catcatgacatatgtgctcatgaac

SEQ ID NO: 4749737 - DNA, 25 bp, Homo sapien
atcatgacatatgtgctcatgaact

SEQ ID NO: 4749738 - DNA, 25 bp, Homo sapien
gaccattttggagccacgggtggac

SEQ ID NO: 4749739 - DNA, 25 bp, Homo sapien
gatctttgctatcacggaccaggag

SEQ ID NO: 4749740 - DNA, 25 bp, Homo sapien
tatttcctggatctttgctatcacg

SEQ ID NO: 4749741 - DNA, 25 bp, Homo sapien
agaccattttggagccacgggtgga

SEQ ID NO: 4749742 - DNA, 25 bp, Homo sapien
ctctcagatggagggaatagtcacc

SEQ ID NO: 4749743 - DNA, 25 bp, Homo sapien
tagtcaccagaggactctcagcatg

SEQ ID NO: 4749744 - DNA, 25 bp, Homo sapien
taactgcagaaagcctctcagatgg

SEQ ID NO: 4749745 - DNA, 25 bp, Homo sapien
gagagtgggctgtatgttaactgca

SEQ ID NO: 4749746 - DNA, 25 bp, Homo sapien
cgcctgtgcccagatgcttgaacca

SEQ ID NO: 4749747 - DNA, 25 bp, Homo sapien
cagatgcttgaaccatgttttgtcc

SEQ ID NO: 4749748 - DNA, 25 bp, Homo sapien
gcccagatgcttgaaccatgttttg

SEQ ID NO: 4749749 - DNA, 25 bp, Homo sapien
gcttgaaccatgttttgtccttcag

SEQ ID NO: 4749750 - DNA, 25 bp, Homo sapien
gagccaaagagaggtcactagggct

SEQ ID NO: 4749751 - DNA, 25 bp, Homo sapien
agccaaagagaggtcactagggctg

SEQ ID NO: 4749752 - DNA, 25 bp, Homo sapien
ccaaagagaggtcactagggctgga

SEQ ID NO: 4749753 - DNA, 25 bp, Homo sapien
gccaaagagaggtcactagggctgg

SEQ ID NO: 4749754 - DNA, 25 bp, Homo sapien
gctggggctcagctatccctgtgtc

SEQ ID NO: 4749755 - DNA, 25 bp, Homo sapien
ctggggctcagctatccctgtgtcc

SEQ ID NO: 4749756 - DNA, 25 bp, Homo sapien
tggggctcagctatccctgtgtccc

SEQ ID NO: 4749757 - DNA, 25 bp, Homo sapien
agctggggctcagctatccctgtgt

SEQ ID NO: 4749758 - DNA, 25 bp, Homo sapien
tcctccctaagttgataagactcta

SEQ ID NO: 4749759 - DNA, 25 bp, Homo sapien
aattctggcaccattctgaaaggca

SEQ ID NO: 4749760 - DNA, 25 bp, Homo sapien
taaaagtcgtgtcaaccaggcacgg

SEQ ID NO: 4749761 - DNA, 25 bp, Homo sapien
gaaaggcagttgtgattctcactca

SEQ ID NO: 4749762 - DNA, 25 bp, Homo sapien
tgacccagagtgtaaaggtcttgag

SEQ ID NO: 4749763 - DNA, 25 bp, Homo sapien
tcagtattacctgaatacaagcctt

SEQ ID NO: 4749764 - DNA, 25 bp, Homo sapien
cagccatcttggaactgacccagag

SEQ ID NO: 4749765 - DNA, 25 bp, Homo sapien
aaggtcttgaggattctcttcatca

SEQ ID NO: 4749766 - DNA, 25 bp, Homo sapien
ctgataacggattctttcactgtta

SEQ ID NO: 4749767 - DNA, 25 bp, Homo sapien
cctatgttctgataacggattcttt

SEQ ID NO: 4749768 - DNA, 25 bp, Homo sapien
tcttctcttacaataagaagaccag

SEQ ID NO: 4749769 - DNA, 25 bp, Homo sapien
ggatattctgcctcactatcagttt

SEQ ID NO: 4749770 - DNA, 25 bp, Homo sapien
tgctgatcggtgaaatagccagtat

SEQ ID NO: 4749771 - DNA, 25 bp, Homo sapien
ccagataagatttgaatgggaacac

SEQ ID NO: 4749772 - DNA, 25 bp, Homo sapien
cagaaccaaattgactggctagagt

SEQ ID NO: 4749773 - DNA, 25 bp, Homo sapien
ggaacatcgaaacctaattcaagga

SEQ ID NO: 4749774 - DNA, 25 bp, Homo sapien
cataacaagtgtactgaacatggcc

SEQ ID NO: 4749775 - DNA, 25 bp, Homo sapien
gaaagaagtagtcaaggccaggtaa

SEQ ID NO: 4749776 - DNA, 25 bp, Homo sapien
taagagatccctgctgtacgatgcc

SEQ ID NO: 4749777 - DNA, 25 bp, Homo sapien
gaccaaggcacagtgtaaacagcga

SEQ ID NO: 4749778 - DNA, 25 bp, Homo sapien
caaacacccagaggggagatcatgt

SEQ ID NO: 4749779 - DNA, 25 bp, Homo sapien
acccaaacacccagaggggagatca

SEQ ID NO: 4749780 - DNA, 25 bp, Homo sapien
acacccagaggggagatcatgtgtg

SEQ ID NO: 4749781 - DNA, 25 bp, Homo sapien
ccaaacacccagaggggagatcatg

SEQ ID NO: 4749782 - DNA, 25 bp, Homo sapien
agggagcgccgtgggccactgggcc

SEQ ID NO: 4749783 - DNA, 25 bp, Homo sapien
gccggagcccgagggagcgccgtgg

SEQ ID NO: 4749784 - DNA, 25 bp, Homo sapien
gagcccgagggagcgccgtgggcca

SEQ ID NO: 4749785 - DNA, 25 bp, Homo sapien
taagggagatattcaggggccggag

SEQ ID NO: 4749786 - DNA, 25 bp, Homo sapien
gtaggcccatgccgaaggcctggcc

SEQ ID NO: 4749787 - DNA, 25 bp, Homo sapien
taggcccatgccgaaggcctggccg

SEQ ID NO: 4749788 - DNA, 25 bp, Homo sapien
cccaattgcccactatgttaccagg

SEQ ID NO: 4749789 - DNA, 25 bp, Homo sapien
gatagcaacgctacccacagtgcaa

SEQ ID NO: 4749790 - DNA, 25 bp, Homo sapien
tctcggcaaccaaaacaatcaatga

SEQ ID NO: 4749791 - DNA, 25 bp, Homo sapien
ggctcttggtaagtaatctggacat

SEQ ID NO: 4749792 - DNA, 25 bp, Homo sapien
gatgcaatccaaatagatggctttc

SEQ ID NO: 4749793 - DNA, 25 bp, Homo sapien
ggttagagtgatgcaatccaaatag

SEQ ID NO: 4749794 - DNA, 25 bp, Homo sapien
gagtgatgcaatccaaatagatggc

SEQ ID NO: 4749795 - DNA, 25 bp, Homo sapien
aatccaaatagatggctttcttctg

SEQ ID NO: 4749796 - DNA, 25 bp, Homo sapien
tacagacgactgagagagtgatcac

SEQ ID NO: 4749797 - DNA, 25 bp, Homo sapien
tagtagcagtaaagagaggtgaccc

SEQ ID NO: 4749798 - DNA, 25 bp, Homo sapien
tacagttcccacgtgagaaagcaca

SEQ ID NO: 4749799 - DNA, 25 bp, Homo sapien
tcatactcagggatgccaacgatgt

SEQ ID NO: 4749800 - DNA, 25 bp, Homo sapien
ctcttgttggtagtaaatggttgcc

SEQ ID NO: 4749801 - DNA, 25 bp, Homo sapien
aaattggccattgtgagacactctg

SEQ ID NO: 4749802 - DNA, 25 bp, Homo sapien
attggccattgtgagacactctgag

SEQ ID NO: 4749803 - DNA, 25 bp, Homo sapien
ttgttggtagtaaatggttgccagc

SEQ ID NO: 4749804 - DNA, 25 bp, Homo sapien
gtttagacaggctacaacgtcttgg

SEQ ID NO: 4749805 - DNA, 25 bp, Homo sapien
taacctcccaagtttagacaggcta

SEQ ID NO: 4749806 - DNA, 25 bp, Homo sapien
ccaagtttagacaggctacaacgtc

SEQ ID NO: 4749807 - DNA, 25 bp, Homo sapien
aacacctaataaagagagcatcatg

SEQ ID NO: 4749808 - DNA, 25 bp, Homo sapien
ctcacagggttgttctgaagattag

SEQ ID NO: 4749809 - DNA, 25 bp, Homo sapien
tcacagggttgttctgaagattaga

SEQ ID NO: 4749810 - DNA, 25 bp, Homo sapien
ataaatgcgcatcctgaagagagct

SEQ ID NO: 4749811 - DNA, 25 bp, Homo sapien
agggagaaataaatgcgcatcctga

SEQ ID NO: 4749812 - DNA, 25 bp, Homo sapien
agccagatgtgcctttcagtccttg

SEQ ID NO: 4749813 - DNA, 25 bp, Homo sapien
gactgaggcctcctccaaagggaga

SEQ ID NO: 4749814 - DNA, 25 bp, Homo sapien
gaatgcccagtaaggctgaaatttt

SEQ ID NO: 4749815 - DNA, 25 bp, Homo sapien
ttatcatcagcataacatattttgc

SEQ ID NO: 4749816 - DNA, 25 bp, Homo sapien
tccagaatgcccagtaaggctgaaa

SEQ ID NO: 4749817 - DNA, 25 bp, Homo sapien
ttgcttccagaatgcccagtaaggc

SEQ ID NO: 4749818 - DNA, 25 bp, Homo sapien
ttcctctttcttatacagctcaatt

SEQ ID NO: 4749819 - DNA, 25 bp, Homo sapien
cagaactgtttctactcctgtagac

SEQ ID NO: 4749820 - DNA, 25 bp, Homo sapien
aacagaactgtttctactcctgtag

SEQ ID NO: 4749821 - DNA, 25 bp, Homo sapien
gaaacagaactgtttctactcctgt

SEQ ID NO: 4749822 - DNA, 25 bp, Homo sapien
tccacgatatgtatgcactattttt

SEQ ID NO: 4749823 - DNA, 25 bp, Homo sapien
ttccacgatatgtatgcactatttt

SEQ ID NO: 4749824 - DNA, 25 bp, Homo sapien
ctctgttcccgtgaaaaataaagat

SEQ ID NO: 4749825 - DNA, 25 bp, Homo sapien
tagacagtgatctggacgacacttc

SEQ ID NO: 4749826 - DNA, 25 bp, Homo sapien
ccatatagacagtgatctggacgac

SEQ ID NO: 4749827 - DNA, 25 bp, Homo sapien
cagtgatctggacgacacttccatt

SEQ ID NO: 4749828 - DNA, 25 bp, Homo sapien
gatcgcccatgtaatgtttaacttg

SEQ ID NO: 4749829 - DNA, 25 bp, Homo sapien
tcttgatcgcccatgtaatgtttaa

SEQ ID NO: 4749830 - DNA, 25 bp, Homo sapien
cttgatcgcccatgtaatgtttaac

SEQ ID NO: 4749831 - DNA, 25 bp, Homo sapien
gcccatgtaatgtttaacttgtata

SEQ ID NO: 4749832 - DNA, 25 bp, Homo sapien
cagtctttcacctagatacattttc

SEQ ID NO: 4749833 - DNA, 25 bp, Homo sapien
agtctttcacctagatacattttct

SEQ ID NO: 4749834 - DNA, 25 bp, Homo sapien
ttccagtctttcacctagatacatt

SEQ ID NO: 4749835 - DNA, 25 bp, Homo sapien
tccagtctttcacctagatacattt

SEQ ID NO: 4749836 - DNA, 25 bp, Homo sapien
cgccaccacggcccgctccttcctc

SEQ ID NO: 4749837 - DNA, 25 bp, Homo sapien
ccgccaccacggcccgctccttcct

SEQ ID NO: 4749838 - DNA, 25 bp, Homo sapien
gacacagagccaccacgcgcggtag

SEQ ID NO: 4749839 - DNA, 25 bp, Homo sapien
tctgggtaagtctcttgctctcctt

SEQ ID NO: 4749840 - DNA, 25 bp, Homo sapien
ctcctaggacaagcctgtgggcacc

SEQ ID NO: 4749841 - DNA, 25 bp, Homo sapien
tcttttgtgcccaagaggacacaat

SEQ ID NO: 4749842 - DNA, 25 bp, Homo sapien
tgcagcacaggtgaacagttcttct

SEQ ID NO: 4749843 - DNA, 25 bp, Homo sapien
gtttctacagtcaggtgatcaggaa

SEQ ID NO: 4749844 - DNA, 25 bp, Homo sapien
aaagacattaccagccacttcgagg

SEQ ID NO: 4749845 - DNA, 25 bp, Homo sapien
cagtgccatgcctaacacaagatgg

SEQ ID NO: 4749846 - DNA, 25 bp, Homo sapien
actagctgaggtttctataggcaca

SEQ ID NO: 4749847 - DNA, 25 bp, Homo sapien
gtcccaactgttgcaatggagctgg

SEQ ID NO: 4749848 - DNA, 25 bp, Homo sapien
tgtacagtttcagtcacccagtaac

SEQ ID NO: 4749849 - DNA, 25 bp, Homo sapien
gccaggtacctctgagagacagcac

SEQ ID NO: 4749850 - DNA, 25 bp, Homo sapien
ccctgacagcgcttccagcaatggg

SEQ ID NO: 4749851 - DNA, 25 bp, Homo sapien
gggccagacatctcatgatcaaagt

SEQ ID NO: 4749852 - DNA, 25 bp, Homo sapien
gatagacgataaggtgggaatcaga

SEQ ID NO: 4749853 - DNA, 25 bp, Homo sapien
tgactccatgggatagacgataagg

SEQ ID NO: 4749854 - DNA, 25 bp, Homo sapien
taaggcgagtgaaagtcttaagaac

SEQ ID NO: 4749855 - DNA, 25 bp, Homo sapien
ggcgagtgaaagtcttaagaacaaa

SEQ ID NO: 4749856 - DNA, 25 bp, Homo sapien
gtcactaattctccaagcagcctcg

SEQ ID NO: 4749857 - DNA, 25 bp, Homo sapien
tttccttctaggctaaaacagcaga

SEQ ID NO: 4749858 - DNA, 25 bp, Homo sapien
agcagcctcgtggagtaaaagaaat

SEQ ID NO: 4749859 - DNA, 25 bp, Homo sapien
tctcgacaccaaatgcctgctgggt

SEQ ID NO: 4749860 - DNA, 25 bp, Homo sapien
cagcactcccagtgtctgggtgtct

SEQ ID NO: 4749861 - DNA, 25 bp, Homo sapien
gtcttcagaattgccgtccctcaga

SEQ ID NO: 4749862 - DNA, 25 bp, Homo sapien
aactcttgcaccacgaggtggcagc

SEQ ID NO: 4749863 - DNA, 25 bp, Homo sapien
cagaattgccgtccctcagaactct

SEQ ID NO: 4749864 - DNA, 25 bp, Homo sapien
tgaggggtaccaggatccagtagag

SEQ ID NO: 4749865 - DNA, 25 bp, Homo sapien
tggcagcaaggcaggcttgggtctc

SEQ ID NO: 4749866 - DNA, 25 bp, Homo sapien
ctaagtggcagcaaggcaggcttgg

SEQ ID NO: 4749867 - DNA, 25 bp, Homo sapien
gtggcagcaaggcaggcttgggtct

SEQ ID NO: 4749868 - DNA, 25 bp, Homo sapien
aagtggcagcaaggcaggcttgggt

SEQ ID NO: 4749869 - DNA, 25 bp, Homo sapien
cattgagtccctcaggagaatggga

SEQ ID NO: 4749870 - DNA, 25 bp, Homo sapien
tgcattgagtccctcaggagaatgg

SEQ ID NO: 4749871 - DNA, 25 bp, Homo sapien
gcccatgcattgagtccctcaggag

SEQ ID NO: 4749872 - DNA, 25 bp, Homo sapien
ccatgcattgagtccctcaggagaa

SEQ ID NO: 4749873 - DNA, 25 bp, Homo sapien
gaccacgattggcactcatgaagat

SEQ ID NO: 4749874 - DNA, 25 bp, Homo sapien
ccagcctccatgtatatgtccttgt

SEQ ID NO: 4749875 - DNA, 25 bp, Homo sapien
ccatgtatatgtccttgtctgacaa

SEQ ID NO: 4749876 - DNA, 25 bp, Homo sapien
gtctgacaactcctccttattttca

SEQ ID NO: 4749877 - DNA, 25 bp, Homo sapien
gaattaagatcccggagaagcccac

SEQ ID NO: 4749878 - DNA, 25 bp, Homo sapien
cctgaattaagatcccggagaagcc

SEQ ID NO: 4749879 - DNA, 25 bp, Homo sapien
ctgaattaagatcccggagaagccc

SEQ ID NO: 4749880 - DNA, 25 bp, Homo sapien
ctcctgaattaagatcccggagaag

SEQ ID NO: 4749881 - DNA, 25 bp, Homo sapien
cacaaacgcatcactgaagtcgaaa

SEQ ID NO: 4749882 - DNA, 25 bp, Homo sapien
gcacaaacgcatcactgaagtcgaa

SEQ ID NO: 4749883 - DNA, 25 bp, Homo sapien
agcacaaacgcatcactgaagtcga

SEQ ID NO: 4749884 - DNA, 25 bp, Homo sapien
caaacgcatcactgaagtcgaaaat

SEQ ID NO: 4749885 - DNA, 25 bp, Homo sapien
ctcaggagtgaggtagtacaggaag

SEQ ID NO: 4749886 - DNA, 25 bp, Homo sapien
tcaggagtgaggtagtacaggaagt

SEQ ID NO: 4749887 - DNA, 25 bp, Homo sapien
tctgctggtgctgttacactatgag

SEQ ID NO: 4749888 - DNA, 25 bp, Homo sapien
ctggtgctgttacactatgagggca

SEQ ID NO: 4749889 - DNA, 25 bp, Homo sapien
cagatctgctggtgctgttacacta

SEQ ID NO: 4749890 - DNA, 25 bp, Homo sapien
tgctgttacactatgagggcactga

SEQ ID NO: 4749891 - DNA, 25 bp, Homo sapien
agagaggaagcatctccataacaca

SEQ ID NO: 4749892 - DNA, 25 bp, Homo sapien
gcacggtgaggttggagagaggaag

SEQ ID NO: 4749893 - DNA, 25 bp, Homo sapien
ctgcacggtgaggttggagagagga

SEQ ID NO: 4749894 - DNA, 25 bp, Homo sapien
ggagagaggaagcatctccataaca

SEQ ID NO: 4749895 - DNA, 25 bp, Homo sapien
catggaagcccccacagctctggat

SEQ ID NO: 4749896 - DNA, 25 bp, Homo sapien
gggacctcccaattcccatggaagc

SEQ ID NO: 4749897 - DNA, 25 bp, Homo sapien
aattcccatggaagcccccacagct

SEQ ID NO: 4749898 - DNA, 25 bp, Homo sapien
tggaagcccccacagctctggattg

SEQ ID NO: 4749899 - DNA, 25 bp, Homo sapien
ctgccctgtgatcctccagccccat

SEQ ID NO: 4749900 - DNA, 25 bp, Homo sapien
tgtgatcctccagccccataggcct

SEQ ID NO: 4749901 - DNA, 25 bp, Homo sapien
gatcctccagccccataggccttac

SEQ ID NO: 4749902 - DNA, 25 bp, Homo sapien
gccctgtgatcctccagccccatag

SEQ ID NO: 4749903 - DNA, 25 bp, Homo sapien
ccagaacatgacacgtttctctgaa

SEQ ID NO: 4749904 - DNA, 25 bp, Homo sapien
ttagccctcccagaacatgacacgt

SEQ ID NO: 4749905 - DNA, 25 bp, Homo sapien
acctcttgctgttttcctttatggt

SEQ ID NO: 4749906 - DNA, 25 bp, Homo sapien
ctgaatgtggctgatgtccagggcc

SEQ ID NO: 4749907 - DNA, 25 bp, Homo sapien
ccagcctaatctcagaatggacaaa

SEQ ID NO: 4749908 - DNA, 25 bp, Homo sapien
aaaaggctcactgccctaacagcaa

SEQ ID NO: 4749909 - DNA, 25 bp, Homo sapien
tgccctaacagcaaccaccaaacag

SEQ ID NO: 4749910 - DNA, 25 bp, Homo sapien
atggacaaaaggctcactgccctaa

SEQ ID NO: 4749911 - DNA, 25 bp, Homo sapien
aaaagaggtttcattctgcagaaag

SEQ ID NO: 4749912 - DNA, 25 bp, Homo sapien
gtttggcttctttctgaagccagga

SEQ ID NO: 4749913 - DNA, 25 bp, Homo sapien
ctggatggaaaagaggtttcattct

SEQ ID NO: 4749914 - DNA, 25 bp, Homo sapien
tctgaagccaggaaggggtaccaaa

SEQ ID NO: 4749915 - DNA, 25 bp, Homo sapien
ggactcccttgtagagcacctgaga

SEQ ID NO: 4749916 - DNA, 25 bp, Homo sapien
tgcggtgcctacgttagcatctgtg

SEQ ID NO: 4749917 - DNA, 25 bp, Homo sapien
taggatgcatgatgggctcccactg

SEQ ID NO: 4749918 - DNA, 25 bp, Homo sapien
tgtgcctaggatgcatgatgggctc

SEQ ID NO: 4749919 - DNA, 25 bp, Homo sapien
cccaggtaaggacagtgtgctaccc

SEQ ID NO: 4749920 - DNA, 25 bp, Homo sapien
gtcccccaggtaaggacagtgtgct

SEQ ID NO: 4749921 - DNA, 25 bp, Homo sapien
tatgcatcacgaactctgatctgga

SEQ ID NO: 4749922 - DNA, 25 bp, Homo sapien
agtgggtgagtgctatgcatcacga

SEQ ID NO: 4749923 - DNA, 25 bp, Homo sapien
tgctactcccagatttcttctggtc

SEQ ID NO: 4749924 - DNA, 25 bp, Homo sapien
cttgctactcccagatttcttctgg

SEQ ID NO: 4749925 - DNA, 25 bp, Homo sapien
gctactcccagatttcttctggtca

SEQ ID NO: 4749926 - DNA, 25 bp, Homo sapien
tcttgctactcccagatttcttctg

SEQ ID NO: 4749927 - DNA, 25 bp, Homo sapien
aaaccacctcagggagaattctggg

SEQ ID NO: 4749928 - DNA, 25 bp, Homo sapien
gggctcaggccctatgacccaacgg

SEQ ID NO: 4749929 - DNA, 25 bp, Homo sapien
cccagtagtgccctggcactggtgg

SEQ ID NO: 4749930 - DNA, 25 bp, Homo sapien
ccaaaccacaatagcagttctgggt

SEQ ID NO: 4749931 - DNA, 25 bp, Homo sapien
cctggttggctgatgtggtcactcc

SEQ ID NO: 4749932 - DNA, 25 bp, Homo sapien
ccctggttggctgatgtggtcactc

SEQ ID NO: 4749933 - DNA, 25 bp, Homo sapien
accctggttggctgatgtggtcact

SEQ ID NO: 4749934 - DNA, 25 bp, Homo sapien
tcccatcccaagaccggattttctg

SEQ ID NO: 4749935 - DNA, 25 bp, Homo sapien
caccgtcccatcccaagaccggatt

SEQ ID NO: 4749936 - DNA, 25 bp, Homo sapien
atcccaagaccggattttctgagtc

SEQ ID NO: 4749937 - DNA, 25 bp, Homo sapien
cagcaccgtcccatcccaagaccgg

SEQ ID NO: 4749938 - DNA, 25 bp, Homo sapien
ctgcaggatctgagaaagtccagtc

SEQ ID NO: 4749939 - DNA, 25 bp, Homo sapien
cgcagggctggcagggatgctccag

SEQ ID NO: 4749940 - DNA, 25 bp, Homo sapien
tgggagtagagggagcgcagggctg

SEQ ID NO: 4749941 - DNA, 25 bp, Homo sapien
catggagagcttgggctgcaccaag

SEQ ID NO: 4749942 - DNA, 25 bp, Homo sapien
ccacttttgactgggccattggaca

SEQ ID NO: 4749943 - DNA, 25 bp, Homo sapien
ttttgactgggccattggacaccac

SEQ ID NO: 4749944 - DNA, 25 bp, Homo sapien
attggacaccactgggccatcccag

SEQ ID NO: 4749945 - DNA, 25 bp, Homo sapien
ttgttctttcagaatctctgagcaa

SEQ ID NO: 4749946 - DNA, 25 bp, Homo sapien
tcgctctcgttgtctacgtgaaaac

SEQ ID NO: 4749947 - DNA, 25 bp, Homo sapien
tgggacaaaggtactgatggacatc

SEQ ID NO: 4749948 - DNA, 25 bp, Homo sapien
cgagatgaacacaactgcgtgtgtg

SEQ ID NO: 4749949 - DNA, 25 bp, Homo sapien
cagagggatgagaaatagaaacgga

SEQ ID NO: 4749950 - DNA, 25 bp, Homo sapien
ggtgtgctccgaggcgtcagggccc

SEQ ID NO: 4749951 - DNA, 25 bp, Homo sapien
acggggtgtgctccgaggcgtcagg

SEQ ID NO: 4749952 - DNA, 25 bp, Homo sapien
ttaggacggggtgtgctccgaggcg

SEQ ID NO: 4749953 - DNA, 25 bp, Homo sapien
aatgctcacaccatcgtcgcttgtt

SEQ ID NO: 4749954 - DNA, 25 bp, Homo sapien
tagacagggcacctttcagcaggcc

SEQ ID NO: 4749955 - DNA, 25 bp, Homo sapien
gaagagagagcaccacagtagagcg

SEQ ID NO: 4749956 - DNA, 25 bp, Homo sapien
cttggacggttgcagtgacgctgaa

SEQ ID NO: 4749957 - DNA, 25 bp, Homo sapien
gacacacccacggatacacacgggt

SEQ ID NO: 4749958 - DNA, 25 bp, Homo sapien
ctacggtaccgctattaccaggcgg

SEQ ID NO: 4749959 - DNA, 25 bp, Homo sapien
gatcagaggcgagccgggcgcgttc

SEQ ID NO: 4749960 - DNA, 25 bp, Homo sapien
caacagatcagaggcgagccgggcg

SEQ ID NO: 4749961 - DNA, 25 bp, Homo sapien
agcctacggtaccgctattaccagg

SEQ ID NO: 4749962 - DNA, 25 bp, Homo sapien
tcaggaccaatgtggcaccgccctg

SEQ ID NO: 4749963 - DNA, 25 bp, Homo sapien
aagcccgcatgactccaggcgtcat

SEQ ID NO: 4749964 - DNA, 25 bp, Homo sapien
ccccagaggcgctcgcccgtgcccc

SEQ ID NO: 4749965 - DNA, 25 bp, Homo sapien
ggcctcccagagagtcccgccgtct

SEQ ID NO: 4749966 - DNA, 25 bp, Homo sapien
ttttcagctcagaatgtctgcttaa

SEQ ID NO: 4749967 - DNA, 25 bp, Homo sapien
caatctctttgttgagtttagctga

SEQ ID NO: 4749968 - DNA, 25 bp, Homo sapien
aagccatatctgctttatggagcac

SEQ ID NO: 4749969 - DNA, 25 bp, Homo sapien
tctgctattacatggctctaatgca

SEQ ID NO: 4749970 - DNA, 25 bp, Homo sapien
tgttgagacaatcacgtggttatta

SEQ ID NO: 4749971 - DNA, 25 bp, Homo sapien
ggaagaagcttatttcactatggtg

SEQ ID NO: 4749972 - DNA, 25 bp, Homo sapien
gcaaacagaggtagttggacttctc

SEQ ID NO: 4749973 - DNA, 25 bp, Homo sapien
gatggaccacccttctattccaggg

SEQ ID NO: 4749974 - DNA, 25 bp, Homo sapien
ccctgggatgctcccagcatgttcc

SEQ ID NO: 4749975 - DNA, 25 bp, Homo sapien
ggttttctccgcagactctgtgagg

SEQ ID NO: 4749976 - DNA, 25 bp, Homo sapien
tctgtgtgcgcttttggcaccctgg

SEQ ID NO: 4749977 - DNA, 25 bp, Homo sapien
aggcaggtgttccatctgtgtgcgc

SEQ ID NO: 4749978 - DNA, 25 bp, Homo sapien
ccagctgtgggaatagtatctgaaa

SEQ ID NO: 4749979 - DNA, 25 bp, Homo sapien
aaatctcttctgtcaggtctgaagg

SEQ ID NO: 4749980 - DNA, 25 bp, Homo sapien
tactgtgcccttttaggtcaggaaa

SEQ ID NO: 4749981 - DNA, 25 bp, Homo sapien
ggtacttacctgacattggccttta

SEQ ID NO: 4749982 - DNA, 25 bp, Homo sapien
ccacccctcaaccgtccctggtgtg

SEQ ID NO: 4749983 - DNA, 25 bp, Homo sapien
cctcaaccgtccctggtgtgtgatg

SEQ ID NO: 4749984 - DNA, 25 bp, Homo sapien
ggcagtatagagtttttattagttg

SEQ ID NO: 4749985 - DNA, 25 bp, Homo sapien
cccctcaaccgtccctggtgtgtga

SEQ ID NO: 4749986 - DNA, 25 bp, Homo sapien
gccatagaatactataaagctctgt

SEQ ID NO: 4749987 - DNA, 25 bp, Homo sapien
tatgaccactatgaaggagtttatg

SEQ ID NO: 4749988 - DNA, 25 bp, Homo sapien
tagagaaatatagcatcctgtatta

SEQ ID NO: 4749989 - DNA, 25 bp, Homo sapien
tatgaccgctaggtttgttcttcaa

SEQ ID NO: 4749990 - DNA, 25 bp, Homo sapien
cctcggaacattagaacaccaaatt

SEQ ID NO: 4749991 - DNA, 25 bp, Homo sapien
tttcctgttgactattgatgtaaaa

SEQ ID NO: 4749992 - DNA, 25 bp, Homo sapien
cccggatcacttcattaaatacata

SEQ ID NO: 4749993 - DNA, 25 bp, Homo sapien
tgagcccagcattaacacaacacca

SEQ ID NO: 4749994 - DNA, 25 bp, Homo sapien
tgctatctctcctctagccctccag

SEQ ID NO: 4749995 - DNA, 25 bp, Homo sapien
ctactgctatctctcctctagccct

SEQ ID NO: 4749996 - DNA, 25 bp, Homo sapien
ctcctactgctatctctcctctagc

SEQ ID NO: 4749997 - DNA, 25 bp, Homo sapien
actgctatctctcctctagccctcc

SEQ ID NO: 4749998 - DNA, 25 bp, Homo sapien
ccatgcctatgacctgaatgatgta

SEQ ID NO: 4749999 - DNA, 25 bp, Homo sapien
tatgacctgaatgatgtagcctagg

SEQ ID NO: 4750000 - DNA, 25 bp, Homo sapien
ctgaatgatgtagcctaggatttct

SEQ ID NO: 4750001 - DNA, 25 bp, Homo sapien
tgcctatgacctgaatgatgtagcc

SEQ ID NO: 4750002 - DNA, 25 bp, Homo sapien
gatacatttcatcaatatgtagttt

SEQ ID NO: 4750003 - DNA, 25 bp, Homo sapien
gcatattgatttcttatcctgagac

SEQ ID NO: 4750004 - DNA, 25 bp, Homo sapien
caaaggccttttctatatctatgga

SEQ ID NO: 4750005 - DNA, 25 bp, Homo sapien
ataatttgacttcctaattgaatac

SEQ ID NO: 4750006 - DNA, 25 bp, Homo sapien
tatttgcccagtagccattcagaag

SEQ ID NO: 4750007 - DNA, 25 bp, Homo sapien
ctgtcattgttatgttagctcactg

SEQ ID NO: 4750008 - DNA, 25 bp, Homo sapien
gccaggaggtctcaaaatctctcag

SEQ ID NO: 4750009 - DNA, 25 bp, Homo sapien
gctacattgggaaaattctcctgaa

SEQ ID NO: 4750010 - DNA, 25 bp, Homo sapien
ccattgtctgaccttttttcaaggt

SEQ ID NO: 4750011 - DNA, 25 bp, Homo sapien
tgttggcccgtactatgagatgtct

SEQ ID NO: 4750012 - DNA, 25 bp, Homo sapien
gaagagggtctcctacctgtatgag

SEQ ID NO: 4750013 - DNA, 25 bp, Homo sapien
cctggaagcttcgttgaagagggtc

SEQ ID NO: 4750014 - DNA, 25 bp, Homo sapien
tattgctgcttgatccttccctgga

SEQ ID NO: 4750015 - DNA, 25 bp, Homo sapien
tcagtgaaagtcctggcaaaacaac

SEQ ID NO: 4750016 - DNA, 25 bp, Homo sapien
tcttcattacatggtacaatccaag

SEQ ID NO: 4750017 - DNA, 25 bp, Homo sapien
tctgaagtgtggaaagtttatcctc

SEQ ID NO: 4750018 - DNA, 25 bp, Homo sapien
caagcaaagagatgtaagactagta

SEQ ID NO: 4750019 - DNA, 25 bp, Homo sapien
tatggaagttctctaggatgggcca

SEQ ID NO: 4750020 - DNA, 25 bp, Homo sapien
ggatgggccatatcttcgtccacaa

SEQ ID NO: 4750021 - DNA, 25 bp, Homo sapien
taatacgcatatacaggacagtcca

SEQ ID NO: 4750022 - DNA, 25 bp, Homo sapien
gaaagcagagccattactaccaact

SEQ ID NO: 4750023 - DNA, 25 bp, Homo sapien
tatccccaaaatgcaagggtggctc

SEQ ID NO: 4750024 - DNA, 25 bp, Homo sapien
cagtgtaatatactctaacagtaaa

SEQ ID NO: 4750025 - DNA, 25 bp, Homo sapien
tcaccctgtgagatttatccccaaa

SEQ ID NO: 4750026 - DNA, 25 bp, Homo sapien
tatttcaattgatgcagagaaaaca

SEQ ID NO: 4750027 - DNA, 25 bp, Homo sapien
tcaggcataaatctaaccatggtgg

SEQ ID NO: 4750028 - DNA, 25 bp, Homo sapien
catctagaacaagacaagcatggtg

SEQ ID NO: 4750029 - DNA, 25 bp, Homo sapien
gacattctgtgttcacgggttgtaa

SEQ ID NO: 4750030 - DNA, 25 bp, Homo sapien
taactaataaaagaggcaggatgca

SEQ ID NO: 4750031 - DNA, 25 bp, Homo sapien
aaacaagagctgctggcttccgggt

SEQ ID NO: 4750032 - DNA, 25 bp, Homo sapien
acggcgacatccaggcccgggtctg

SEQ ID NO: 4750033 - DNA, 25 bp, Homo sapien
tagttctgcgatgctgacagcgcga

SEQ ID NO: 4750034 - DNA, 25 bp, Homo sapien
ctgctggaatgcttgcgctcgaggc

SEQ ID NO: 4750035 - DNA, 25 bp, Homo sapien
gagttcctcccttgtcatgttagca

SEQ ID NO: 4750036 - DNA, 25 bp, Homo sapien
tcgggaataatactagggagctacc

SEQ ID NO: 4750037 - DNA, 25 bp, Homo sapien
taggtttcattgtcttaggccccac

SEQ ID NO: 4750038 - DNA, 25 bp, Homo sapien
ggccgttacacgtgacatgggatgt

SEQ ID NO: 4750039 - DNA, 25 bp, Homo sapien
ccccggcttcagcacccctgggcca

SEQ ID NO: 4750040 - DNA, 25 bp, Homo sapien
cagcacccccggcttcagcacccct

SEQ ID NO: 4750041 - DNA, 25 bp, Homo sapien
agcagcacccccggcttcagcaccc

SEQ ID NO: 4750042 - DNA, 25 bp, Homo sapien
gcacccccggcttcagcacccctgg

SEQ ID NO: 4750043 - DNA, 25 bp, Homo sapien
tacaggcacctacttaagtgatatg

SEQ ID NO: 4750044 - DNA, 25 bp, Homo sapien
taagtcagtcaaagtcagtcatata

SEQ ID NO: 4750045 - DNA, 25 bp, Homo sapien
tgtcctttaccatgacagttggtga

SEQ ID NO: 4750046 - DNA, 25 bp, Homo sapien
ccaagagaaatttagggcacataga

SEQ ID NO: 4750047 - DNA, 25 bp, Homo sapien
gatttacatgaagaagctgcccagg

SEQ ID NO: 4750048 - DNA, 25 bp, Homo sapien
ggtgacagacttgaagccccagatg

SEQ ID NO: 4750049 - DNA, 25 bp, Homo sapien
tccaggagcctaaaattcagcagtg

SEQ ID NO: 4750050 - DNA, 25 bp, Homo sapien
tctacatgtgcattcggctcgcgga

SEQ ID NO: 4750051 - DNA, 25 bp, Homo sapien
tatctggtgtgaagcccactggctc

SEQ ID NO: 4750052 - DNA, 25 bp, Homo sapien
gggataactcataccgcctggaagc

SEQ ID NO: 4750053 - DNA, 25 bp, Homo sapien
tcaccagagtggagtagttcagacc

SEQ ID NO: 4750054 - DNA, 25 bp, Homo sapien
gactcttaatgacctgctcctgcgg

SEQ ID NO: 4750055 - DNA, 25 bp, Homo sapien
ccagagtggcgtgaggaccccagtg

SEQ ID NO: 4750056 - DNA, 25 bp, Homo sapien
ccccagagtggcgtgaggaccccag

SEQ ID NO: 4750057 - DNA, 25 bp, Homo sapien
cccagagtggcgtgaggaccccagt

SEQ ID NO: 4750058 - DNA, 25 bp, Homo sapien
gctcccagcatgatgaccaagatgg

SEQ ID NO: 4750059 - DNA, 25 bp, Homo sapien
cccagcatgatgaccaagatggcag

SEQ ID NO: 4750060 - DNA, 25 bp, Homo sapien
gcatgatgaccaagatggcaggtag

SEQ ID NO: 4750061 - DNA, 25 bp, Homo sapien
ggtggctcccagcatgatgaccaag

SEQ ID NO: 4750062 - DNA, 25 bp, Homo sapien
agaaggcaatggctttctgagtgga

SEQ ID NO: 4750063 - DNA, 25 bp, Homo sapien
cgtagccaagacagaaggcaatggc

SEQ ID NO: 4750064 - DNA, 25 bp, Homo sapien
tagccaagacagaaggcaatggctt

SEQ ID NO: 4750065 - DNA, 25 bp, Homo sapien
acagaaggcaatggctttctgagtg

SEQ ID NO: 4750066 - DNA, 25 bp, Homo sapien
tgcagaatgaaaaccaggcgataga

SEQ ID NO: 4750067 - DNA, 25 bp, Homo sapien
tggaaaagcccaccccaacataaga

SEQ ID NO: 4750068 - DNA, 25 bp, Homo sapien
tggcagcgaccacaatgaaccaggt

SEQ ID NO: 4750069 - DNA, 25 bp, Homo sapien
gaaccaggtgttggcgaccagaagg

SEQ ID NO: 4750070 - DNA, 25 bp, Homo sapien
gatacaggtgacattgtccccatca

SEQ ID NO: 4750071 - DNA, 25 bp, Homo sapien
gtcacagatacaggtgacattgtcc

SEQ ID NO: 4750072 - DNA, 25 bp, Homo sapien
tacaggtgacattgtccccatcacc

SEQ ID NO: 4750073 - DNA, 25 bp, Homo sapien
acagatacaggtgacattgtcccca

SEQ ID NO: 4750074 - DNA, 25 bp, Homo sapien
ccccgtgttgttggaaagcctgaag

SEQ ID NO: 4750075 - DNA, 25 bp, Homo sapien
cccgtgttgttggaaagcctgaagt

SEQ ID NO: 4750076 - DNA, 25 bp, Homo sapien
ccgtgttgttggaaagcctgaagtt

SEQ ID NO: 4750077 - DNA, 25 bp, Homo sapien
gagggctatctcctaattgtagtgc

SEQ ID NO: 4750078 - DNA, 25 bp, Homo sapien
gacacatgttgtttcgccgcctgaa

SEQ ID NO: 4750079 - DNA, 25 bp, Homo sapien
gtgcttgggaaaaccttcccactga

SEQ ID NO: 4750080 - DNA, 25 bp, Homo sapien
ggtgacaataggtgaatctgatggc

SEQ ID NO: 4750081 - DNA, 25 bp, Homo sapien
ccttcttatggcagagtttagcaga

SEQ ID NO: 4750082 - DNA, 25 bp, Homo sapien
cttacaggtgtgcatatctcgtgac

SEQ ID NO: 4750083 - DNA, 25 bp, Homo sapien
cacatgtctggttatagctctggcc

SEQ ID NO: 4750084 - DNA, 25 bp, Homo sapien
tggccttccaagactatagctcctg

SEQ ID NO: 4750085 - DNA, 25 bp, Homo sapien
agcaatcaggtcttggtgccaacaa

SEQ ID NO: 4750086 - DNA, 25 bp, Homo sapien
cagggcagaagcttatgatattaaa

SEQ ID NO: 4750087 - DNA, 25 bp, Homo sapien
tcgagaatctcctccatacactttc

SEQ ID NO: 4750088 - DNA, 25 bp, Homo sapien
tattaaaactcatgtggttcctcga

SEQ ID NO: 4750089 - DNA, 25 bp, Homo sapien
tccccaggctaccaccatccaaaag

SEQ ID NO: 4750090 - DNA, 25 bp, Homo sapien
gttccccaggctaccaccatccaaa

SEQ ID NO: 4750091 - DNA, 25 bp, Homo sapien
caggctaccaccatccaaaagcaga

SEQ ID NO: 4750092 - DNA, 25 bp, Homo sapien
ggctaccaccatccaaaagcagaaa

SEQ ID NO: 4750093 - DNA, 25 bp, Homo sapien
gtcttgattgcccaagaaattgctt

SEQ ID NO: 4750094 - DNA, 25 bp, Homo sapien
gtataactccatactcaagccatac

SEQ ID NO: 4750095 - DNA, 25 bp, Homo sapien
accatcgtataactccatactcaag

SEQ ID NO: 4750096 - DNA, 25 bp, Homo sapien
ccaaaccatcgtataactccatact

SEQ ID NO: 4750097 - DNA, 25 bp, Homo sapien
gggttattgttgaggacaatgtccc

SEQ ID NO: 4750098 - DNA, 25 bp, Homo sapien
gacaacaaaacctctcacataaaat

SEQ ID NO: 4750099 - DNA, 25 bp, Homo sapien
taaaggccccaacaaacattgctct

SEQ ID NO: 4750100 - DNA, 25 bp, Homo sapien
tcccctttatcgcttggtgactcca

SEQ ID NO: 4750101 - DNA, 25 bp, Homo sapien
agctgagatacaaaaatggaaccaa

SEQ ID NO: 4750102 - DNA, 25 bp, Homo sapien
aagctgagatacaaaaatggaacca

SEQ ID NO: 4750103 - DNA, 25 bp, Homo sapien
gtacaatggctccaatcagccctac

SEQ ID NO: 4750104 - DNA, 25 bp, Homo sapien
ctgtacaatggctccaatcagccct

SEQ ID NO: 4750105 - DNA, 25 bp, Homo sapien
tacaatggctccaatcagccctact

SEQ ID NO: 4750106 - DNA, 25 bp, Homo sapien
tgtacaatggctccaatcagcccta

SEQ ID NO: 4750107 - DNA, 25 bp, Homo sapien
gatttcagctaacaactgggccttg

SEQ ID NO: 4750108 - DNA, 25 bp, Homo sapien
tacgcagtgtttgcatgagataaaa

SEQ ID NO: 4750109 - DNA, 25 bp, Homo sapien
aaaatctgctccgaaaagtgccttg

SEQ ID NO: 4750110 - DNA, 25 bp, Homo sapien
tgggccttggttctactatgacatt

SEQ ID NO: 4750111 - DNA, 25 bp, Homo sapien
cttagcgatgggcatttaaggtttt

SEQ ID NO: 4750112 - DNA, 25 bp, Homo sapien
acttagcgatgggcatttaaggttt

SEQ ID NO: 4750113 - DNA, 25 bp, Homo sapien
ttcacttagcgatgggcatttaagg

SEQ ID NO: 4750114 - DNA, 25 bp, Homo sapien
tcacttagcgatgggcatttaaggt

SEQ ID NO: 4750115 - DNA, 25 bp, Homo sapien
ggaggttacaaccatcagatgacca

SEQ ID NO: 4750116 - DNA, 25 bp, Homo sapien
ggaaagctggaggttacaaccatca

SEQ ID NO: 4750117 - DNA, 25 bp, Homo sapien
tacaaccatcagatgaccaatgccc

SEQ ID NO: 4750118 - DNA, 25 bp, Homo sapien
ctgggaaagctggaggttacaacca

SEQ ID NO: 4750119 - DNA, 25 bp, Homo sapien
ttctggtgtcagaaaccagggctgt

SEQ ID NO: 4750120 - DNA, 25 bp, Homo sapien
ggacgtgtctgctctttctattagg

SEQ ID NO: 4750121 - DNA, 25 bp, Homo sapien
gaaaagggcttctgtatgcaacata

SEQ ID NO: 4750122 - DNA, 25 bp, Homo sapien
tcaactggacgagctctgactagtg

SEQ ID NO: 4750123 - DNA, 25 bp, Homo sapien
aaggtatatcagacctacaggctgc

SEQ ID NO: 4750124 - DNA, 25 bp, Homo sapien
taaggcactgcattaaagagacatt

SEQ ID NO: 4750125 - DNA, 25 bp, Homo sapien
tttgtcagataatcaacccacacta

SEQ ID NO: 4750126 - DNA, 25 bp, Homo sapien
tattcctatctgcttataaaatggc

SEQ ID NO: 4750127 - DNA, 25 bp, Homo sapien
ttagatggcaagagcacaatgccca

SEQ ID NO: 4750128 - DNA, 25 bp, Homo sapien
gaagtcagcctacagataacaggat

SEQ ID NO: 4750129 - DNA, 25 bp, Homo sapien
ggaataacaaaactgtctggctcaa

SEQ ID NO: 4750130 - DNA, 25 bp, Homo sapien
tgactgacactaagctagcacacag

SEQ ID NO: 4750131 - DNA, 25 bp, Homo sapien
tactgaaatttctctaatagtagag

SEQ ID NO: 4750132 - DNA, 25 bp, Homo sapien
tagactgccaaagaacataaagatg

SEQ ID NO: 4750133 - DNA, 25 bp, Homo sapien
gacctagctgtagtaaaagcatacc

SEQ ID NO: 4750134 - DNA, 25 bp, Homo sapien
agggatgctggaggtaaataaattc

SEQ ID NO: 4750135 - DNA, 25 bp, Homo sapien
gggagtccactatcactagatctgc

SEQ ID NO: 4750136 - DNA, 25 bp, Homo sapien
tatttaacagtcagtatgggcgatc

SEQ ID NO: 4750137 - DNA, 25 bp, Homo sapien
atcaaaatggatgcaggccactgtg

SEQ ID NO: 4750138 - DNA, 25 bp, Homo sapien
ggctaggacttacagactttttcag

SEQ ID NO: 4750139 - DNA, 25 bp, Homo sapien
attgaccaacctctcactaggccaa

SEQ ID NO: 4750140 - DNA, 25 bp, Homo sapien
ttgaccaacctctcactaggccaag

SEQ ID NO: 4750141 - DNA, 25 bp, Homo sapien
gaaaaggacactacaaggatgacag

SEQ ID NO: 4750142 - DNA, 25 bp, Homo sapien
aatccaagaccagatagcttagtgg

SEQ ID NO: 4750143 - DNA, 25 bp, Homo sapien
tacaaaggataataatagtctactc

SEQ ID NO: 4750144 - DNA, 25 bp, Homo sapien
gaaacatacatccactagactgaaa

SEQ ID NO: 4750145 - DNA, 25 bp, Homo sapien
gtgaagttccccgcaggaactgagt

SEQ ID NO: 4750146 - DNA, 25 bp, Homo sapien
agttccccgcaggaactgagtcaga

SEQ ID NO: 4750147 - DNA, 25 bp, Homo sapien
gaagttccccgcaggaactgagtca

SEQ ID NO: 4750148 - DNA, 25 bp, Homo sapien
actggtgaagttccccgcaggaact

SEQ ID NO: 4750149 - DNA, 25 bp, Homo sapien
tacttgtcccaaccgtacagatgag

SEQ ID NO: 4750150 - DNA, 25 bp, Homo sapien
tcttgacgggcgagggttactgtac

SEQ ID NO: 4750151 - DNA, 25 bp, Homo sapien
acttcagcaccagtcgcggtggcca

SEQ ID NO: 4750152 - DNA, 25 bp, Homo sapien
cgacgcgtgcgcaggtaaagtccat

SEQ ID NO: 4750153 - DNA, 25 bp, Homo sapien
ttccagatctcgatcccaaactccc

SEQ ID NO: 4750154 - DNA, 25 bp, Homo sapien
tcctcttccagtctagtgctttttt

SEQ ID NO: 4750155 - DNA, 25 bp, Homo sapien
tccagtctagtgcttttttccagat

SEQ ID NO: 4750156 - DNA, 25 bp, Homo sapien
ccagatctcgatcccaaactccctc

SEQ ID NO: 4750157 - DNA, 25 bp, Homo sapien
gacctccatgttgctcttgagcctg

SEQ ID NO: 4750158 - DNA, 25 bp, Homo sapien
agaatctggacccgaatccacccat

SEQ ID NO: 4750159 - DNA, 25 bp, Homo sapien
ggagcgattaagtgcagacctccat

SEQ ID NO: 4750160 - DNA, 25 bp, Homo sapien
cgcccccggagaggagcgattaagt

SEQ ID NO: 4750161 - DNA, 25 bp, Homo sapien
gggagccatgtttgttactggcggg

SEQ ID NO: 4750162 - DNA, 25 bp, Homo sapien
agccatgtttgttactggcgggcgc

SEQ ID NO: 4750163 - DNA, 25 bp, Homo sapien
cagggagccatgtttgttactggcg

SEQ ID NO: 4750164 - DNA, 25 bp, Homo sapien
tcagggagccatgtttgttactggc

SEQ ID NO: 4750165 - DNA, 25 bp, Homo sapien
atccagccctgccaagaacttgatc

SEQ ID NO: 4750166 - DNA, 25 bp, Homo sapien
cactgtgggccataaatgtgttctt

SEQ ID NO: 4750167 - DNA, 25 bp, Homo sapien
taagtcagccatatggtttgtggca

SEQ ID NO: 4750168 - DNA, 25 bp, Homo sapien
gatgaagacaatatgcaacatggta

SEQ ID NO: 4750169 - DNA, 25 bp, Homo sapien
atcctggaactcgacgctggtgcac

SEQ ID NO: 4750170 - DNA, 25 bp, Homo sapien
acagcggccacttctctctctcgcg

SEQ ID NO: 4750171 - DNA, 25 bp, Homo sapien
ggctaagagcgcgacaagagcctcc

SEQ ID NO: 4750172 - DNA, 25 bp, Homo sapien
aaggtactggtatcgggacacacgc

SEQ ID NO: 4750173 - DNA, 25 bp, Homo sapien
gtagggctcagcaatacagctggaa

SEQ ID NO: 4750174 - DNA, 25 bp, Homo sapien
ccttcgtagggctcagcaatacagc

SEQ ID NO: 4750175 - DNA, 25 bp, Homo sapien
agcaccttcgtagggctcagcaata

SEQ ID NO: 4750176 - DNA, 25 bp, Homo sapien
caggacagcaccttcgtagggctca

SEQ ID NO: 4750177 - DNA, 25 bp, Homo sapien
ttgtgcctgcaatctcatgtgtcat

SEQ ID NO: 4750178 - DNA, 25 bp, Homo sapien
ttcacagactgcattgtgcctgcaa

SEQ ID NO: 4750179 - DNA, 25 bp, Homo sapien
ataatgttctcattcacagactgca

SEQ ID NO: 4750180 - DNA, 25 bp, Homo sapien
tgcattgtgcctgcaatctcatgtg

SEQ ID NO: 4750181 - DNA, 25 bp, Homo sapien
tttaagacctgcatttagtaaagtg

SEQ ID NO: 4750182 - DNA, 25 bp, Homo sapien
aagtgttatgtcaccaactttaatg

SEQ ID NO: 4750183 - DNA, 25 bp, Homo sapien
gatgtagataaaagatggtaacata

SEQ ID NO: 4750184 - DNA, 25 bp, Homo sapien
gataaaagatggtaacatagtagaa

SEQ ID NO: 4750185 - DNA, 25 bp, Homo sapien
gcatttgatcaaattggtcagcatg

SEQ ID NO: 4750186 - DNA, 25 bp, Homo sapien
tagggaaactaaactgacaaagcat

SEQ ID NO: 4750187 - DNA, 25 bp, Homo sapien
tagtaatccttacctgtctcactca

SEQ ID NO: 4750188 - DNA, 25 bp, Homo sapien
ctatgttttggtctgacagttgaac

SEQ ID NO: 4750189 - DNA, 25 bp, Homo sapien
tagttcatgcgatgtgattttcaaa

SEQ ID NO: 4750190 - DNA, 25 bp, Homo sapien
tttatggctgtattcatcattttca

SEQ ID NO: 4750191 - DNA, 25 bp, Homo sapien
tgtgcactatttgcatcatgcattt

SEQ ID NO: 4750192 - DNA, 25 bp, Homo sapien
ccctgacagcagattatattttact

SEQ ID NO: 4750193 - DNA, 25 bp, Homo sapien
aatgttctgctttagattttcccag

SEQ ID NO: 4750194 - DNA, 25 bp, Homo sapien
tcattcatagtacaaagcaacactt

SEQ ID NO: 4750195 - DNA, 25 bp, Homo sapien
taatgtggacatgtttcactcaaat

SEQ ID NO: 4750196 - DNA, 25 bp, Homo sapien
tgcctaaggcttaccagaagcttta

SEQ ID NO: 4750197 - DNA, 25 bp, Homo sapien
cccattccatataggagaattggac

SEQ ID NO: 4750198 - DNA, 25 bp, Homo sapien
gaagaagtagactctcatggtcttg

SEQ ID NO: 4750199 - DNA, 25 bp, Homo sapien
aagtagactctcatggtcttgggca

SEQ ID NO: 4750200 - DNA, 25 bp, Homo sapien
gtggaagaagtagactctcatggtc

SEQ ID NO: 4750201 - DNA, 25 bp, Homo sapien
gaatcctgatagaatacactctttt

SEQ ID NO: 4750202 - DNA, 25 bp, Homo sapien
actctagagcactctagtcagaatc

SEQ ID NO: 4750203 - DNA, 25 bp, Homo sapien
gagcactctagtcagaatcctgata

SEQ ID NO: 4750204 - DNA, 25 bp, Homo sapien
tagtcagaatcctgatagaatacac

SEQ ID NO: 4750205 - DNA, 25 bp, Homo sapien
tattctcccatattgatatctaaat

SEQ ID NO: 4750206 - DNA, 25 bp, Homo sapien
caggtgatggtgtaagtatgagttt

SEQ ID NO: 4750207 - DNA, 25 bp, Homo sapien
gtttcacccttgtcataaatcaggt

SEQ ID NO: 4750208 - DNA, 25 bp, Homo sapien
tcccatattgatatctaaattatct

SEQ ID NO: 4750209 - DNA, 25 bp, Homo sapien
gctgagtgcacacatcgcaaaaaat

SEQ ID NO: 4750210 - DNA, 25 bp, Homo sapien
gagctgagtgcacacatcgcaaaaa

SEQ ID NO: 4750211 - DNA, 25 bp, Homo sapien
tgagctgagtgcacacatcgcaaaa

SEQ ID NO: 4750212 - DNA, 25 bp, Homo sapien
ctgagtgcacacatcgcaaaaaatt

SEQ ID NO: 4750213 - DNA, 25 bp, Homo sapien
gaagccacgtcagcccacgggcact

SEQ ID NO: 4750214 - DNA, 25 bp, Homo sapien
ggaagccactgcagctccgggaagc

SEQ ID NO: 4750215 - DNA, 25 bp, Homo sapien
gggaagccacgtcagcccacgggca

SEQ ID NO: 4750216 - DNA, 25 bp, Homo sapien
gctccgggaagccactgcagctccg

SEQ ID NO: 4750217 - DNA, 25 bp, Homo sapien
gaccagctaaggtgcacatgctcgc

SEQ ID NO: 4750218 - DNA, 25 bp, Homo sapien
catgctcgctggtcctgaccattct

SEQ ID NO: 4750219 - DNA, 25 bp, Homo sapien
cgcctgcactgggtgccacgagaga

SEQ ID NO: 4750220 - DNA, 25 bp, Homo sapien
acctcgggcctgttgctcgggacca

SEQ ID NO: 4750221 - DNA, 25 bp, Homo sapien
gagtctctgcgaaggtccatggaca

SEQ ID NO: 4750222 - DNA, 25 bp, Homo sapien
tgctgagagtctctgcgaaggtcca

SEQ ID NO: 4750223 - DNA, 25 bp, Homo sapien
tctctgcgaaggtccatggacagac

SEQ ID NO: 4750224 - DNA, 25 bp, Homo sapien
atggacagactgcattgcttgttgt

SEQ ID NO: 4750225 - DNA, 25 bp, Homo sapien
ttcggaggcggcgatccccgaaggc

SEQ ID NO: 4750226 - DNA, 25 bp, Homo sapien
ggaggcggcgatccccgaaggcgag

SEQ ID NO: 4750227 - DNA, 25 bp, Homo sapien
gcgatccccgaaggcgagctgaaat

SEQ ID NO: 4750228 - DNA, 25 bp, Homo sapien
tccccgaaggcgagctgaaatatag

SEQ ID NO: 4750229 - DNA, 25 bp, Homo sapien
tcttggccgcagactgagcctgtac

SEQ ID NO: 4750230 - DNA, 25 bp, Homo sapien
catcttgcaggacggagtcttggcc

SEQ ID NO: 4750231 - DNA, 25 bp, Homo sapien
tcttgcaggacggagtcttggccgc

SEQ ID NO: 4750232 - DNA, 25 bp, Homo sapien
cttcatcttgcaggacggagtcttg

SEQ ID NO: 4750233 - DNA, 25 bp, Homo sapien
tcacccgtctcccaccgactcttgg

SEQ ID NO: 4750234 - DNA, 25 bp, Homo sapien
cccaccgactcttggtactggccat

SEQ ID NO: 4750235 - DNA, 25 bp, Homo sapien
gtctcccaccgactcttggtactgg

SEQ ID NO: 4750236 - DNA, 25 bp, Homo sapien
tcccaccgactcttggtactggcca

SEQ ID NO: 4750237 - DNA, 25 bp, Homo sapien
tgcttttgtctagtttttatgtgaa

SEQ ID NO: 4750238 - DNA, 25 bp, Homo sapien
ttctgagaatgcttttgtctagttt

SEQ ID NO: 4750239 - DNA, 25 bp, Homo sapien
tgagaatgcttttgtctagttttta

SEQ ID NO: 4750240 - DNA, 25 bp, Homo sapien
gaatgcttttgtctagtttttatgt

SEQ ID NO: 4750241 - DNA, 25 bp, Homo sapien
aaagcgctacaattgaccacttcca

SEQ ID NO: 4750242 - DNA, 25 bp, Homo sapien
tgtccacctgccgattctacaaaga

SEQ ID NO: 4750243 - DNA, 25 bp, Homo sapien
ccgattcgaacaaaggcctcaaagc

SEQ ID NO: 4750244 - DNA, 25 bp, Homo sapien
gaagatattcccgattcgaacaaag

SEQ ID NO: 4750245 - DNA, 25 bp, Homo sapien
tttccaacgaaggccacaaagcgct

SEQ ID NO: 4750246 - DNA, 25 bp, Homo sapien
acgaaggccacaaagcgctccaaat

SEQ ID NO: 4750247 - DNA, 25 bp, Homo sapien
ccaacgaaggccacaaagcgctcca

SEQ ID NO: 4750248 - DNA, 25 bp, Homo sapien
aacgaaggccacaaagcgctccaaa

SEQ ID NO: 4750249 - DNA, 25 bp, Homo sapien
gttgaatgtacacatcacagagaag

SEQ ID NO: 4750250 - DNA, 25 bp, Homo sapien
tctgctctatgaaaaagaattttca

SEQ ID NO: 4750251 - DNA, 25 bp, Homo sapien
agttgaatgtacacatcacagagaa

SEQ ID NO: 4750252 - DNA, 25 bp, Homo sapien
tcaaatctgctctatgaaaaagaat

SEQ ID NO: 4750253 - DNA, 25 bp, Homo sapien
tgaggctctcccagtaataaacaaa

SEQ ID NO: 4750254 - DNA, 25 bp, Homo sapien
tgagtcacccttacattatgaactg

SEQ ID NO: 4750255 - DNA, 25 bp, Homo sapien
tatgaactgactgttaattaacaca

SEQ ID NO: 4750256 - DNA, 25 bp, Homo sapien
tgtgggtggcacactatgtcttttg

SEQ ID NO: 4750257 - DNA, 25 bp, Homo sapien
ttttatacaacaatcccatagatgc

SEQ ID NO: 4750258 - DNA, 25 bp, Homo sapien
aaattagccgtctctggtggtggat

SEQ ID NO: 4750259 - DNA, 25 bp, Homo sapien
tcccatagatgcaaaactactacta

SEQ ID NO: 4750260 - DNA, 25 bp, Homo sapien
tacaacaatcccatagatgcaaaac

SEQ ID NO: 4750261 - DNA, 25 bp, Homo sapien
ccttctggtgtcatgacttggtggt

SEQ ID NO: 4750262 - DNA, 25 bp, Homo sapien
tatttccacctcatgatgaactact

SEQ ID NO: 4750263 - DNA, 25 bp, Homo sapien
tttcccttctggtgtcatgacttgg

SEQ ID NO: 4750264 - DNA, 25 bp, Homo sapien
ttccacctcatgatgaactacttct

SEQ ID NO: 4750265 - DNA, 25 bp, Homo sapien
ttggtgcctgccctcttctctgtgc

SEQ ID NO: 4750266 - DNA, 25 bp, Homo sapien
tgttggtgcctgccctcttctctgt

SEQ ID NO: 4750267 - DNA, 25 bp, Homo sapien
ttctctgtgctccagagcagatcat

SEQ ID NO: 4750268 - DNA, 25 bp, Homo sapien
tcttctctgtgctccagagcagatc

SEQ ID NO: 4750269 - DNA, 25 bp, Homo sapien
ttttcatttttcggagtgaacactg

SEQ ID NO: 4750270 - DNA, 25 bp, Homo sapien
ttcggagtgaacactgagccaccac

SEQ ID NO: 4750271 - DNA, 25 bp, Homo sapien
taaaagggttgtccttagatgtggc

SEQ ID NO: 4750272 - DNA, 25 bp, Homo sapien
gagcgaggaaggtccactatttttc

SEQ ID NO: 4750273 - DNA, 25 bp, Homo sapien
catcctctcatgttcttcatgagcg

SEQ ID NO: 4750274 - DNA, 25 bp, Homo sapien
tacatattcatttacacaccatggc

SEQ ID NO: 4750275 - DNA, 25 bp, Homo sapien
tgtagtatataaaattgaggatcag

SEQ ID NO: 4750276 - DNA, 25 bp, Homo sapien
caggtgtagtatataaaattgagga

SEQ ID NO: 4750277 - DNA, 25 bp, Homo sapien
ggtgtagtatataaaattgaggatc

SEQ ID NO: 4750278 - DNA, 25 bp, Homo sapien
tagtatataaaattgaggatcagag

SEQ ID NO: 4750279 - DNA, 25 bp, Homo sapien
tatgctcagtactttataggagaac

SEQ ID NO: 4750280 - DNA, 25 bp, Homo sapien
gaacattcaagtaagtgtcagagga

SEQ ID NO: 4750281 - DNA, 25 bp, Homo sapien
tatctcataaagacttgaccaatgt

SEQ ID NO: 4750282 - DNA, 25 bp, Homo sapien
cctagagatgcaactaaatggctgt

SEQ ID NO: 4750283 - DNA, 25 bp, Homo sapien
gatccacaaagctgcctcccgtggc

SEQ ID NO: 4750284 - DNA, 25 bp, Homo sapien
ggatctcaggaagatccacaaagct

SEQ ID NO: 4750285 - DNA, 25 bp, Homo sapien
gtgattcaccatggggatctcagga

SEQ ID NO: 4750286 - DNA, 25 bp, Homo sapien
gaagatccacaaagctgcctcccgt

SEQ ID NO: 4750287 - DNA, 25 bp, Homo sapien
agtgctgcaaggcataattgcatgt

SEQ ID NO: 4750288 - DNA, 25 bp, Homo sapien
cattacttctaaattgttctcaaga

SEQ ID NO: 4750289 - DNA, 25 bp, Homo sapien
aattgcatgtaaatccttttctacc

SEQ ID NO: 4750290 - DNA, 25 bp, Homo sapien
catttatagttcaacaaagagagtg

SEQ ID NO: 4750291 - DNA, 25 bp, Homo sapien
agaagtttctcagaaggcatttgtg

SEQ ID NO: 4750292 - DNA, 25 bp, Homo sapien
caaaactgttcgatcaaaagaaagg

SEQ ID NO: 4750293 - DNA, 25 bp, Homo sapien
aaatatccacatgcagatccttcaa

SEQ ID NO: 4750294 - DNA, 25 bp, Homo sapien
gatccttcaaaagaagtgtttcaaa

SEQ ID NO: 4750295 - DNA, 25 bp, Homo sapien
gcatatctttattggttatatcaca

SEQ ID NO: 4750296 - DNA, 25 bp, Homo sapien
tgactctattgcatatctttattgg

SEQ ID NO: 4750297 - DNA, 25 bp, Homo sapien
taaagtattcaagtcccatttgtaa

SEQ ID NO: 4750298 - DNA, 25 bp, Homo sapien
aatgaagtgtgtctttatgagtcac

SEQ ID NO: 4750299 - DNA, 25 bp, Homo sapien
tgttggtgcctgccctcttctctgt

SEQ ID NO: 4750300 - DNA, 25 bp, Homo sapien
ttggtgcctgccctcttctctgtgc

SEQ ID NO: 4750301 - DNA, 25 bp, Homo sapien
ttctctgtgctccagagcagatcat

SEQ ID NO: 4750302 - DNA, 25 bp, Homo sapien
tcttctctgtgctccagagcagatc

SEQ ID NO: 4750303 - DNA, 25 bp, Homo sapien
gggctcaaacagaccgcctgtctca

SEQ ID NO: 4750304 - DNA, 25 bp, Homo sapien
gactcaaagagatagtctcctgact

SEQ ID NO: 4750305 - DNA, 25 bp, Homo sapien
tcttcatagcgcttagtacatccat

SEQ ID NO: 4750306 - DNA, 25 bp, Homo sapien
tactacccagcataaaataggctgt

SEQ ID NO: 4750307 - DNA, 25 bp, Homo sapien
gaatagtttcaacccaagaggcgaa

SEQ ID NO: 4750308 - DNA, 25 bp, Homo sapien
gttccacgtcttattatattaggca

SEQ ID NO: 4750309 - DNA, 25 bp, Homo sapien
ggaatgtttctagcacataagtgtt

SEQ ID NO: 4750310 - DNA, 25 bp, Homo sapien
tattaggcaatatcctttcatgtaa

SEQ ID NO: 4750311 - DNA, 25 bp, Homo sapien
gttccacattgctgtgacaatgctg

SEQ ID NO: 4750312 - DNA, 25 bp, Homo sapien
tacaaccatcagatactcatgtaca

SEQ ID NO: 4750313 - DNA, 25 bp, Homo sapien
gagcctggcccaactttactcttta

SEQ ID NO: 4750314 - DNA, 25 bp, Homo sapien
tgaaggcaatgtttcatcttgtatt

SEQ ID NO: 4750315 - DNA, 25 bp, Homo sapien
atgtcaagtaaacttgagcaacaaa

SEQ ID NO: 4750316 - DNA, 25 bp, Homo sapien
gaactctcttatgtcaagtaaactt

SEQ ID NO: 4750317 - DNA, 25 bp, Homo sapien
actctcttatgtcaagtaaacttga

SEQ ID NO: 4750318 - DNA, 25 bp, Homo sapien
tcataagtttagtaaggctaaagga

SEQ ID NO: 4750319 - DNA, 25 bp, Homo sapien
tttaaagactctgacacattcttcg

SEQ ID NO: 4750320 - DNA, 25 bp, Homo sapien
tcttatgtatagtgaggcctgaaga

SEQ ID NO: 4750321 - DNA, 25 bp, Homo sapien
gaggaatagtaaaagcctttgccac

SEQ ID NO: 4750322 - DNA, 25 bp, Homo sapien
tgatgtatagtaagctcagaggacc

SEQ ID NO: 4750323 - DNA, 25 bp, Homo sapien
ataaggtttgaggaacagtaaaatg

SEQ ID NO: 4750324 - DNA, 25 bp, Homo sapien
ttatatatagtaagatttgaagacc

SEQ ID NO: 4750325 - DNA, 25 bp, Homo sapien
tttttcacaatggtatggtttctct

SEQ ID NO: 4750326 - DNA, 25 bp, Homo sapien
aggtttgaggaacagtaaaatgctt

SEQ ID NO: 4750327 - DNA, 25 bp, Homo sapien
tatgaactatcatgtttagtaaagc

SEQ ID NO: 4750328 - DNA, 25 bp, Homo sapien
taaaagctttgatgcattcttgaca

SEQ ID NO: 4750329 - DNA, 25 bp, Homo sapien
agctttgatgcattcttgacatttg

SEQ ID NO: 4750330 - DNA, 25 bp, Homo sapien
ccagtatgaactatcatgtttagta

SEQ ID NO: 4750331 - DNA, 25 bp, Homo sapien
caaagactgcttacaagctttgcca

SEQ ID NO: 4750332 - DNA, 25 bp, Homo sapien
tgtaggttgtatctccagtataaat

SEQ ID NO: 4750333 - DNA, 25 bp, Homo sapien
tttgtaggttgtatctccagtataa

SEQ ID NO: 4750334 - DNA, 25 bp, Homo sapien
gtaggttgtatctccagtataaatt

SEQ ID NO: 4750335 - DNA, 25 bp, Homo sapien
atttgtaggttgtatctccagtata

SEQ ID NO: 4750336 - DNA, 25 bp, Homo sapien
ttaaaggctttgtcacattcttcac

SEQ ID NO: 4750337 - DNA, 25 bp, Homo sapien
aaaggctttgtcacattcttcacac

SEQ ID NO: 4750338 - DNA, 25 bp, Homo sapien
cttgaagattgtttaaaggctttgt

SEQ ID NO: 4750339 - DNA, 25 bp, Homo sapien
gtttaaaggctttgtcacattcttc

SEQ ID NO: 4750340 - DNA, 25 bp, Homo sapien
ttctcccatgtatagtaagacctga

SEQ ID NO: 4750341 - DNA, 25 bp, Homo sapien
ccatgtatagtaagacctgaagact

SEQ ID NO: 4750342 - DNA, 25 bp, Homo sapien
ctcccatgtatagtaagacctgaag

SEQ ID NO: 4750343 - DNA, 25 bp, Homo sapien
aattctcccatgtatagtaagacct

SEQ ID NO: 4750344 - DNA, 25 bp, Homo sapien
tatctgatgttgtcttaggtgtgag

SEQ ID NO: 4750345 - DNA, 25 bp, Homo sapien
tctgatgttgtcttaggtgtgagaa

SEQ ID NO: 4750346 - DNA, 25 bp, Homo sapien
ctgatgttgtcttaggtgtgagaac

SEQ ID NO: 4750347 - DNA, 25 bp, Homo sapien
aattatctgatgttgtcttaggtgt

SEQ ID NO: 4750348 - DNA, 25 bp, Homo sapien
atgtcttctcctaagtctatttgaa

SEQ ID NO: 4750349 - DNA, 25 bp, Homo sapien
tcagcctttggatgtctcatctatg

SEQ ID NO: 4750350 - DNA, 25 bp, Homo sapien
ggtgcttcatactccatggcttttt

SEQ ID NO: 4750351 - DNA, 25 bp, Homo sapien
ctgggtgcttcatactccatggctt

SEQ ID NO: 4750352 - DNA, 25 bp, Homo sapien
tgggtgcttcatactccatggcttt

SEQ ID NO: 4750353 - DNA, 25 bp, Homo sapien
tgcttcatactccatggctttttcc

SEQ ID NO: 4750354 - DNA, 25 bp, Homo sapien
aacacatcctacaaaggaagaaaat

SEQ ID NO: 4750355 - DNA, 25 bp, Homo sapien
caaaacacatcctacaaaggaagaa

SEQ ID NO: 4750356 - DNA, 25 bp, Homo sapien
catcctacaaaggaagaaaatgaaa

SEQ ID NO: 4750357 - DNA, 25 bp, Homo sapien
cacatcctacaaaggaagaaaatga

SEQ ID NO: 4750358 - DNA, 25 bp, Homo sapien
tctgactgatgcgactgaaattgtc

SEQ ID NO: 4750359 - DNA, 25 bp, Homo sapien
aagagaactgattctgactgatgcg

SEQ ID NO: 4750360 - DNA, 25 bp, Homo sapien
aactgattctgactgatgcgactga

SEQ ID NO: 4750361 - DNA, 25 bp, Homo sapien
gattctgactgatgcgactgaaatt

SEQ ID NO: 4750362 - DNA, 25 bp, Homo sapien
cttccccagtaggaatcttgggtat

SEQ ID NO: 4750363 - DNA, 25 bp, Homo sapien
ggagcacttcgaggccttcggtgga

SEQ ID NO: 4750364 - DNA, 25 bp, Homo sapien
ttggagcacttcgaggccttcggtg

SEQ ID NO: 4750365 - DNA, 25 bp, Homo sapien
cacttcgaggccttcggtggaaaag

SEQ ID NO: 4750366 - DNA, 25 bp, Homo sapien
gagcacttcgaggccttcggtggaa

SEQ ID NO: 4750367 - DNA, 25 bp, Homo sapien
tttaaaatatgtgctgttgaaataa

SEQ ID NO: 4750368 - DNA, 25 bp, Homo sapien
aatttgtgtgccatccctaggcagt

SEQ ID NO: 4750369 - DNA, 25 bp, Homo sapien
ggcagtagccatgcttatctgctct

SEQ ID NO: 4750370 - DNA, 25 bp, Homo sapien
aaaatatgtgctgttgaaataagta

SEQ ID NO: 4750371 - DNA, 25 bp, Homo sapien
cttgagcgaagacatcaatattttg

SEQ ID NO: 4750372 - DNA, 25 bp, Homo sapien
cacacatgtcttgagcgaagacatc

SEQ ID NO: 4750373 - DNA, 25 bp, Homo sapien
caatacctggtgagtcatagtatac

SEQ ID NO: 4750374 - DNA, 25 bp, Homo sapien
cctggtgagtcatagtatacagcaa

SEQ ID NO: 4750375 - DNA, 25 bp, Homo sapien
catgtactagcttgggtctataagc

SEQ ID NO: 4750376 - DNA, 25 bp, Homo sapien
tttgcatgtactagcttgggtctat

SEQ ID NO: 4750377 - DNA, 25 bp, Homo sapien
tactagcttgggtctataagcatct

SEQ ID NO: 4750378 - DNA, 25 bp, Homo sapien
gcttgggtctataagcatctagggt

SEQ ID NO: 4750379 - DNA, 25 bp, Homo sapien
gtctcagcctatcaacggcatgtga

SEQ ID NO: 4750380 - DNA, 25 bp, Homo sapien
acggcatgtgaacttgctttccttt

SEQ ID NO: 4750381 - DNA, 25 bp, Homo sapien
tatcaacggcatgtgaacttgcttt

SEQ ID NO: 4750382 - DNA, 25 bp, Homo sapien
tcagcctatcaacggcatgtgaact

SEQ ID NO: 4750383 - DNA, 25 bp, Homo sapien
taggatacgcctgaagtccacattt

SEQ ID NO: 4750384 - DNA, 25 bp, Homo sapien
gcacagcagaccaaagaatgataga

SEQ ID NO: 4750385 - DNA, 25 bp, Homo sapien
tgtgtaccacattagaatatagccc

SEQ ID NO: 4750386 - DNA, 25 bp, Homo sapien
gttgattcaacttatagaggcaaac

SEQ ID NO: 4750387 - DNA, 25 bp, Homo sapien
tgagaatcagtgcagcagacaatca

SEQ ID NO: 4750388 - DNA, 25 bp, Homo sapien
gaaaagagtaagagatagtgtcatt

SEQ ID NO: 4750389 - DNA, 25 bp, Homo sapien
gagtaagagatagtgtcatttatta

SEQ ID NO: 4750390 - DNA, 25 bp, Homo sapien
ttatcagttggagatgtggccaaaa

SEQ ID NO: 4750391 - DNA, 25 bp, Homo sapien
ccacatggctaattcctttatcagt

SEQ ID NO: 4750392 - DNA, 25 bp, Homo sapien
tagaacagggacaagtaaactcaaa

SEQ ID NO: 4750393 - DNA, 25 bp, Homo sapien
tgcttcaatatgtgcaccatgggaa

SEQ ID NO: 4750394 - DNA, 25 bp, Homo sapien
aatatgtgcaccatgggaaagcagt

SEQ ID NO: 4750395 - DNA, 25 bp, Homo sapien
ttcaatatgtgcaccatgggaaagc

SEQ ID NO: 4750396 - DNA, 25 bp, Homo sapien
tgtccagtgcttcaatatgtgcacc

SEQ ID NO: 4750397 - DNA, 25 bp, Homo sapien
gtgaccacttgcacatggccactgg

SEQ ID NO: 4750398 - DNA, 25 bp, Homo sapien
tctttgtcacagacatcaatctggc

SEQ ID NO: 4750399 - DNA, 25 bp, Homo sapien
tcacagacatcaatctggcattttc

SEQ ID NO: 4750400 - DNA, 25 bp, Homo sapien
tgtatcaaaggcgttctgttttctt

SEQ ID NO: 4750401 - DNA, 25 bp, Homo sapien
tgagagtaagaggattttttaagaa

SEQ ID NO: 4750402 - DNA, 25 bp, Homo sapien
tatgagagtaagaggattttttaag

SEQ ID NO: 4750403 - DNA, 25 bp, Homo sapien
atgagagtaagaggattttttaaga

SEQ ID NO: 4750404 - DNA, 25 bp, Homo sapien
ctatgagagtaagaggattttttaa

SEQ ID NO: 4750405 - DNA, 25 bp, Homo sapien
ttataggatccattctatgggttct

SEQ ID NO: 4750406 - DNA, 25 bp, Homo sapien
cacaaatattgtggatagaaaactg

SEQ ID NO: 4750407 - DNA, 25 bp, Homo sapien
taaaacatcctcacaaatattgtgg

SEQ ID NO: 4750408 - DNA, 25 bp, Homo sapien
tttataggatccattctatgggttc

SEQ ID NO: 4750409 - DNA, 25 bp, Homo sapien
cgtgtagacgtggtctatggagccc

SEQ ID NO: 4750410 - DNA, 25 bp, Homo sapien
tgtagacgtggtctatggagccctg

SEQ ID NO: 4750411 - DNA, 25 bp, Homo sapien
tccgcggcgtcgcctttgacagctg

SEQ ID NO: 4750412 - DNA, 25 bp, Homo sapien
acgtggtctatggagccctgggccg

SEQ ID NO: 4750413 - DNA, 25 bp, Homo sapien
tgcggctcccgaagccgaataactt

SEQ ID NO: 4750414 - DNA, 25 bp, Homo sapien
ctgcggctcccgaagccgaataact

SEQ ID NO: 4750415 - DNA, 25 bp, Homo sapien
gcggctcccgaagccgaataacttc

SEQ ID NO: 4750416 - DNA, 25 bp, Homo sapien
ggctcccgaagccgaataacttcat

SEQ ID NO: 4750417 - DNA, 25 bp, Homo sapien
tcgccggttctcctgggatcgcccg

SEQ ID NO: 4750418 - DNA, 25 bp, Homo sapien
ggccacctgagtggcttcgcggatt

SEQ ID NO: 4750419 - DNA, 25 bp, Homo sapien
gcgtgcgccgatgggctcgccggtt

SEQ ID NO: 4750420 - DNA, 25 bp, Homo sapien
acggcagttgctgccgggctcccag

SEQ ID NO: 4750421 - DNA, 25 bp, Homo sapien
gccagtgccacacgcgcggtttgca

SEQ ID NO: 4750422 - DNA, 25 bp, Homo sapien
gagcttcctttggatggcctcaggg

SEQ ID NO: 4750423 - DNA, 25 bp, Homo sapien
cacacgcgcggtttgcagctgcaga

SEQ ID NO: 4750424 - DNA, 25 bp, Homo sapien
ctttggatggcctcagggccgcaga

SEQ ID NO: 4750425 - DNA, 25 bp, Homo sapien
tggacatctttctggatcctgggcc

SEQ ID NO: 4750426 - DNA, 25 bp, Homo sapien
atcctgggccctggcgctgggcact

SEQ ID NO: 4750427 - DNA, 25 bp, Homo sapien
tggcctcaaggtccgctcctcttgg

SEQ ID NO: 4750428 - DNA, 25 bp, Homo sapien
caaggtccgctcctcttggacatct

SEQ ID NO: 4750429 - DNA, 25 bp, Homo sapien
gtccacacggatgaaacagcggctg

SEQ ID NO: 4750430 - DNA, 25 bp, Homo sapien
cctgggggtctggcctcaggatcca

SEQ ID NO: 4750431 - DNA, 25 bp, Homo sapien
ccacacggatgaaacagcggctgct

SEQ ID NO: 4750432 - DNA, 25 bp, Homo sapien
tgcctgattttgccgcctgggggtc

SEQ ID NO: 4750433 - DNA, 25 bp, Homo sapien
gatggtaccgagcagcaggttttca

SEQ ID NO: 4750434 - DNA, 25 bp, Homo sapien
cgccgggactggctcttcgtggtaa

SEQ ID NO: 4750435 - DNA, 25 bp, Homo sapien
gtaaccgggatggtaccgagcagca

SEQ ID NO: 4750436 - DNA, 25 bp, Homo sapien
ctcccacttgagaggttgctctgac

SEQ ID NO: 4750437 - DNA, 25 bp, Homo sapien
tgtgcggactgcctgacttgggcac

SEQ ID NO: 4750438 - DNA, 25 bp, Homo sapien
gtgcggactgcctgacttgggcacc

SEQ ID NO: 4750439 - DNA, 25 bp, Homo sapien
gcggactgcctgacttgggcaccca

SEQ ID NO: 4750440 - DNA, 25 bp, Homo sapien
gactgcctgacttgggcacccaggc

SEQ ID NO: 4750441 - DNA, 25 bp, Homo sapien
gctcccctggatggcgtcaggtttg

SEQ ID NO: 4750442 - DNA, 25 bp, Homo sapien
aggcctgaaggtccgctcaggggcc

SEQ ID NO: 4750443 - DNA, 25 bp, Homo sapien
caggcctgaaggtccgctcaggggc

SEQ ID NO: 4750444 - DNA, 25 bp, Homo sapien
ggcctgaaggtccgctcaggggcca

SEQ ID NO: 4750445 - DNA, 25 bp, Homo sapien
gcctgaaggtccgctcaggggccat

SEQ ID NO: 4750446 - DNA, 25 bp, Homo sapien
cacctggccaactgccagacttaac

SEQ ID NO: 4750447 - DNA, 25 bp, Homo sapien
agacttaaccgctgccgcccaggaa

SEQ ID NO: 4750448 - DNA, 25 bp, Homo sapien
cagttcccgtcctttggccacctgg

SEQ ID NO: 4750449 - DNA, 25 bp, Homo sapien
agtggttgagttctctgtggaactg

SEQ ID NO: 4750450 - DNA, 25 bp, Homo sapien
aggccagcactgtctttgcaacata

SEQ ID NO: 4750451 - DNA, 25 bp, Homo sapien
gcagctcaggcgccagcatgggctg

SEQ ID NO: 4750452 - DNA, 25 bp, Homo sapien
tggacggccctcaggtcgctcacag

SEQ ID NO: 4750453 - DNA, 25 bp, Homo sapien
ggtcgctcacagcattgtcccagga

SEQ ID NO: 4750454 - DNA, 25 bp, Homo sapien
cctcagcgcctctagtagctaagac

SEQ ID NO: 4750455 - DNA, 25 bp, Homo sapien
ggcaccatggcacgatcacaacaca

SEQ ID NO: 4750456 - DNA, 25 bp, Homo sapien
gctggggcaccatggcacgatcaca

SEQ ID NO: 4750457 - DNA, 25 bp, Homo sapien
tcctaggtcaagaaatcgtcctgcc

SEQ ID NO: 4750458 - DNA, 25 bp, Homo sapien
cctcatcttcaacaaactcctcatc

SEQ ID NO: 4750459 - DNA, 25 bp, Homo sapien
tcaatgggcagggtggaaactgcaa

SEQ ID NO: 4750460 - DNA, 25 bp, Homo sapien
gactcgagagctgacattaggaatg

SEQ ID NO: 4750461 - DNA, 25 bp, Homo sapien
accatcctgctctccaaggactcct

SEQ ID NO: 4750462 - DNA, 25 bp, Homo sapien
ctgtgagagtttttcaccggctgga

SEQ ID NO: 4750463 - DNA, 25 bp, Homo sapien
agagctgtgagagtttttcaccggc

SEQ ID NO: 4750464 - DNA, 25 bp, Homo sapien
ccagagctgtgagagtttttcaccg

SEQ ID NO: 4750465 - DNA, 25 bp, Homo sapien
gagagtttttcaccggctggataat

SEQ ID NO: 4750466 - DNA, 25 bp, Homo sapien
tgcggactcatcttcaacggactcc

SEQ ID NO: 4750467 - DNA, 25 bp, Homo sapien
ctgttctctgcggactcatcttcaa

SEQ ID NO: 4750468 - DNA, 25 bp, Homo sapien
tctctgcggactcatcttcaacgga

SEQ ID NO: 4750469 - DNA, 25 bp, Homo sapien
catcctgttctctgcggactcatct

SEQ ID NO: 4750470 - DNA, 25 bp, Homo sapien
ctgtttggtcattgccctctaaaga

SEQ ID NO: 4750471 - DNA, 25 bp, Homo sapien
ttgccctctaaagaatgatggcttc

SEQ ID NO: 4750472 - DNA, 25 bp, Homo sapien
ggtactgtttggtcattgccctcta

SEQ ID NO: 4750473 - DNA, 25 bp, Homo sapien
tctgctggtactgtttggtcattgc

SEQ ID NO: 4750474 - DNA, 25 bp, Homo sapien
atgttgtactgtatttctacaaaga

SEQ ID NO: 4750475 - DNA, 25 bp, Homo sapien
tgttgtactgtatttctacaaagaa

SEQ ID NO: 4750476 - DNA, 25 bp, Homo sapien
acatgtcacttgacttgaactgttc

SEQ ID NO: 4750477 - DNA, 25 bp, Homo sapien
ctcacatgtcacttgacttgaactg

SEQ ID NO: 4750478 - DNA, 25 bp, Homo sapien
tcacatgtcacttgacttgaactgt

SEQ ID NO: 4750479 - DNA, 25 bp, Homo sapien
aacacaaaatgttcctcacatgtca

SEQ ID NO: 4750480 - DNA, 25 bp, Homo sapien
actgttccaaagaagcggaagagca

SEQ ID NO: 4750481 - DNA, 25 bp, Homo sapien
tgtgactgttccaaagaagcggaag

SEQ ID NO: 4750482 - DNA, 25 bp, Homo sapien
gaagcggaagagcattttaagtttc

SEQ ID NO: 4750483 - DNA, 25 bp, Homo sapien
tgactgttccaaagaagcggaagag

SEQ ID NO: 4750484 - DNA, 25 bp, Homo sapien
agcgaggcgagctgcgccgctgtgc

SEQ ID NO: 4750485 - DNA, 25 bp, Homo sapien
catagcgaggcgagctgcgccgctg

SEQ ID NO: 4750486 - DNA, 25 bp, Homo sapien
atagcgaggcgagctgcgccgctgt

SEQ ID NO: 4750487 - DNA, 25 bp, Homo sapien
cgaggcgagctgcgccgctgtgccg

SEQ ID NO: 4750488 - DNA, 25 bp, Homo sapien
ctctgccatttgttcaacaaggtca

SEQ ID NO: 4750489 - DNA, 25 bp, Homo sapien
tagggagctatgcaacacaccaagg

SEQ ID NO: 4750490 - DNA, 25 bp, Homo sapien
ggtcaagtgtcattaggagcacaga

SEQ ID NO: 4750491 - DNA, 25 bp, Homo sapien
gagctatgcaacacaccaagggcca

SEQ ID NO: 4750492 - DNA, 25 bp, Homo sapien
gcaacgaataagcactggatgagtt

SEQ ID NO: 4750493 - DNA, 25 bp, Homo sapien
ttagttgagcaacgaataagcactg

SEQ ID NO: 4750494 - DNA, 25 bp, Homo sapien
acgaataagcactggatgagttttc

SEQ ID NO: 4750495 - DNA, 25 bp, Homo sapien
gttgagcaacgaataagcactggat

SEQ ID NO: 4750496 - DNA, 25 bp, Homo sapien
tgttaaatctccttgatattggaga

SEQ ID NO: 4750497 - DNA, 25 bp, Homo sapien
ttaaatctccttgatattggagaac

SEQ ID NO: 4750498 - DNA, 25 bp, Homo sapien
aaatctccttgatattggagaactc

SEQ ID NO: 4750499 - DNA, 25 bp, Homo sapien
atctccttgatattggagaactcat

SEQ ID NO: 4750500 - DNA, 25 bp, Homo sapien
tctcgacaatgaaaacttattcagc

SEQ ID NO: 4750501 - DNA, 25 bp, Homo sapien
caatgaaaacttattcagcaaagct

SEQ ID NO: 4750502 - DNA, 25 bp, Homo sapien
gaccatctcgacaatgaaaacttat

SEQ ID NO: 4750503 - DNA, 25 bp, Homo sapien
gtgaagaccatctcgacaatgaaaa

SEQ ID NO: 4750504 - DNA, 25 bp, Homo sapien
cctagaggcatccaaagagtaaact

SEQ ID NO: 4750505 - DNA, 25 bp, Homo sapien
cttcagatcctagaggcatccaaag

SEQ ID NO: 4750506 - DNA, 25 bp, Homo sapien
ttcagatcctagaggcatccaaaga

SEQ ID NO: 4750507 - DNA, 25 bp, Homo sapien
gaggcatccaaagagtaaactgaat

SEQ ID NO: 4750508 - DNA, 25 bp, Homo sapien
tttgaagaaacctgatacacattgc

SEQ ID NO: 4750509 - DNA, 25 bp, Homo sapien
taaataagggtggattgcaatatgc

SEQ ID NO: 4750510 - DNA, 25 bp, Homo sapien
ttttttcatacagccttaagcagat

SEQ ID NO: 4750511 - DNA, 25 bp, Homo sapien
tgcttttagctcttacaatcgaggg

SEQ ID NO: 4750512 - DNA, 25 bp, Homo sapien
tcagctgtccattagcatctcttgt

SEQ ID NO: 4750513 - DNA, 25 bp, Homo sapien
ggcttgagaaaatctccagatttgc

SEQ ID NO: 4750514 - DNA, 25 bp, Homo sapien
cttcatgttgtttattagcagtcat

SEQ ID NO: 4750515 - DNA, 25 bp, Homo sapien
tcttcatgttgtttattagcagtca

SEQ ID NO: 4750516 - DNA, 25 bp, Homo sapien
ctgttgcaatcacttgccttttaca

SEQ ID NO: 4750517 - DNA, 25 bp, Homo sapien
ttcttcattgaaccccaaatctgtc

SEQ ID NO: 4750518 - DNA, 25 bp, Homo sapien
tggataacgcattcaacctcctgaa

SEQ ID NO: 4750519 - DNA, 25 bp, Homo sapien
taattccaagtgtagaaagcatggt

SEQ ID NO: 4750520 - DNA, 25 bp, Homo sapien
tctgtcaggacatatgtgtgatctt

SEQ ID NO: 4750521 - DNA, 25 bp, Homo sapien
gcaggaaacatcatgcatcgagcag

SEQ ID NO: 4750522 - DNA, 25 bp, Homo sapien
ttccctctaaaggaagcttgtgcag

SEQ ID NO: 4750523 - DNA, 25 bp, Homo sapien
agactccaggatactcctctgtccc

SEQ ID NO: 4750524 - DNA, 25 bp, Homo sapien
ctgccctaaaagttttcccctcatg

SEQ ID NO: 4750525 - DNA, 25 bp, Homo sapien
ggctgggactcagccccttgtcagg

SEQ ID NO: 4750526 - DNA, 25 bp, Homo sapien
ctcgaggagctccatcttcccttgt

SEQ ID NO: 4750527 - DNA, 25 bp, Homo sapien
aacccatggagaatcctcatcttgg

SEQ ID NO: 4750528 - DNA, 25 bp, Homo sapien
agcaggtaccgcatgatctttggga

SEQ ID NO: 4750529 - DNA, 25 bp, Homo sapien
ggaggatggcagttaggcagctcat

SEQ ID NO: 4750530 - DNA, 25 bp, Homo sapien
aggaggatggcagttaggcagctca

SEQ ID NO: 4750531 - DNA, 25 bp, Homo sapien
gaggaggatggcagttaggcagctc

SEQ ID NO: 4750532 - DNA, 25 bp, Homo sapien
tggagtgatctcagcggctctccct

SEQ ID NO: 4750533 - DNA, 25 bp, Homo sapien
gagggcggctgcgtccagaccacat

SEQ ID NO: 4750534 - DNA, 25 bp, Homo sapien
tgcgtccagaccacatgtgagcagc

SEQ ID NO: 4750535 - DNA, 25 bp, Homo sapien
gatcaccacacagtgggtcctctga

SEQ ID NO: 4750536 - DNA, 25 bp, Homo sapien
gacctcctccctgtctactgtgctc

SEQ ID NO: 4750537 - DNA, 25 bp, Homo sapien
caagcaggaacagccacctgggtga

SEQ ID NO: 4750538 - DNA, 25 bp, Homo sapien
tgggtgacctcctccctgtctactg

SEQ ID NO: 4750539 - DNA, 25 bp, Homo sapien
gaagtgggggccaagcaggaacagc

SEQ ID NO: 4750540 - DNA, 25 bp, Homo sapien
aatatgtaaagttgcccagcttcat

SEQ ID NO: 4750541 - DNA, 25 bp, Homo sapien
aaatatgtaaagttgcccagcttca

SEQ ID NO: 4750542 - DNA, 25 bp, Homo sapien
cttacaccaagtgatctccagctcg

SEQ ID NO: 4750543 - DNA, 25 bp, Homo sapien
caagtgatctccagctcgtggaaaa

SEQ ID NO: 4750544 - DNA, 25 bp, Homo sapien
agctatgaataaatccttgggcagg

SEQ ID NO: 4750545 - DNA, 25 bp, Homo sapien
gctatgaataaatccttgggcaggt

SEQ ID NO: 4750546 - DNA, 25 bp, Homo sapien
ctatgaataaatccttgggcaggtg

SEQ ID NO: 4750547 - DNA, 25 bp, Homo sapien
tatgaataaatccttgggcaggtgc

SEQ ID NO: 4750548 - DNA, 25 bp, Homo sapien
gccggaggacctgctggaacccctg

SEQ ID NO: 4750549 - DNA, 25 bp, Homo sapien
gagccggaggacctgctggaacccc

SEQ ID NO: 4750550 - DNA, 25 bp, Homo sapien
ctgggagccggaggacctgctggaa

SEQ ID NO: 4750551 - DNA, 25 bp, Homo sapien
cggaggacctgctggaacccctgct

SEQ ID NO: 4750552 - DNA, 25 bp, Homo sapien
cctcctgcaggcaggcaaacacccc

SEQ ID NO: 4750553 - DNA, 25 bp, Homo sapien
gcagtagcagcagggccttcagcag

SEQ ID NO: 4750554 - DNA, 25 bp, Homo sapien
cagcagtagcagcagggccttcagc

SEQ ID NO: 4750555 - DNA, 25 bp, Homo sapien
ttttcttgctctccagcacctcctg

SEQ ID NO: 4750556 - DNA, 25 bp, Homo sapien
ctccatagcttccactgtgcccagg

SEQ ID NO: 4750557 - DNA, 25 bp, Homo sapien
tgctggctggagctgtgctggtcac

SEQ ID NO: 4750558 - DNA, 25 bp, Homo sapien
agctgctggctggagctgtgctggt

SEQ ID NO: 4750559 - DNA, 25 bp, Homo sapien
ggagctgctggctggagctgtgctg

SEQ ID NO: 4750560 - DNA, 25 bp, Homo sapien
ctgggagcagtgtgggagctgctgg

SEQ ID NO: 4750561 - DNA, 25 bp, Homo sapien
gaaggctctggaggttcctctagct

SEQ ID NO: 4750562 - DNA, 25 bp, Homo sapien
ccggtggctctacaggaggtgccat

SEQ ID NO: 4750563 - DNA, 25 bp, Homo sapien
ctagctccagcgctgtccctggaag

SEQ ID NO: 4750564 - DNA, 25 bp, Homo sapien
gaggtgccatgaagtcaggcagctt

SEQ ID NO: 4750565 - DNA, 25 bp, Homo sapien
gtgcctgtgtctcaatgagctccag

SEQ ID NO: 4750566 - DNA, 25 bp, Homo sapien
gatgtggccctggtgggatcactgg

SEQ ID NO: 4750567 - DNA, 25 bp, Homo sapien
catgtgcctgtgtctcaatgagctc

SEQ ID NO: 4750568 - DNA, 25 bp, Homo sapien
gggccgaatgtccccctcagggtga

SEQ ID NO: 4750569 - DNA, 25 bp, Homo sapien
atgtccccctcagggtgaattccac

SEQ ID NO: 4750570 - DNA, 25 bp, Homo sapien
ccgaatgtccccctcagggtgaatt

SEQ ID NO: 4750571 - DNA, 25 bp, Homo sapien
ctggggccgaatgtccccctcaggg

SEQ ID NO: 4750572 - DNA, 25 bp, Homo sapien
tgtccaccttgggtctgatgactac

SEQ ID NO: 4750573 - DNA, 25 bp, Homo sapien
ggtgtccaccttgggtctgatgact

SEQ ID NO: 4750574 - DNA, 25 bp, Homo sapien
tgggtgtccaccttgggtctgatga

SEQ ID NO: 4750575 - DNA, 25 bp, Homo sapien
ctgggtgtccaccttgggtctgatg

SEQ ID NO: 4750576 - DNA, 25 bp, Homo sapien
catctgggaccttggtgtctatctg

SEQ ID NO: 4750577 - DNA, 25 bp, Homo sapien
tgtacatctgggaccttggtgtcta

SEQ ID NO: 4750578 - DNA, 25 bp, Homo sapien
tacatctgggaccttggtgtctatc

SEQ ID NO: 4750579 - DNA, 25 bp, Homo sapien
gctgtacatctgggaccttggtgtc

SEQ ID NO: 4750580 - DNA, 25 bp, Homo sapien
gggttgaatgtccaactgtggccag

SEQ ID NO: 4750581 - DNA, 25 bp, Homo sapien
cgtgttaacctgtggcctaatgtac

SEQ ID NO: 4750582 - DNA, 25 bp, Homo sapien
aacctgtggcctaatgtactcctgg

SEQ ID NO: 4750583 - DNA, 25 bp, Homo sapien
ctggggccttcgtgttaacctgtgg

SEQ ID NO: 4750584 - DNA, 25 bp, Homo sapien
ccttcgtgttaacctgtggcctaat

SEQ ID NO: 4750585 - DNA, 25 bp, Homo sapien
taccaggatccaggtatccacctgg

SEQ ID NO: 4750586 - DNA, 25 bp, Homo sapien
accaggatccaggtatccacctggg

SEQ ID NO: 4750587 - DNA, 25 bp, Homo sapien
ctaccaggatccaggtatccacctg

SEQ ID NO: 4750588 - DNA, 25 bp, Homo sapien
gataactggtgccatcggggtcctg

SEQ ID NO: 4750589 - DNA, 25 bp, Homo sapien
gcctgatgtccacttagggtataag

SEQ ID NO: 4750590 - DNA, 25 bp, Homo sapien
catcggggtcctgatgttcaccttg

SEQ ID NO: 4750591 - DNA, 25 bp, Homo sapien
cttagggtataagtgtttatctggg

SEQ ID NO: 4750592 - DNA, 25 bp, Homo sapien
ccacatagaccgtggtgtcaatctg

SEQ ID NO: 4750593 - DNA, 25 bp, Homo sapien
cacatagaccgtggtgtcaatctgg

SEQ ID NO: 4750594 - DNA, 25 bp, Homo sapien
tccacatagaccgtggtgtcaatct

SEQ ID NO: 4750595 - DNA, 25 bp, Homo sapien
gtatccaattgagtgctggtgtcca

SEQ ID NO: 4750596 - DNA, 25 bp, Homo sapien
acctgatgttcagataagggctggc

SEQ ID NO: 4750597 - DNA, 25 bp, Homo sapien
caccttcagggtgtgtatccaattg

SEQ ID NO: 4750598 - DNA, 25 bp, Homo sapien
cacatggagcctgggtgtacacttg

SEQ ID NO: 4750599 - DNA, 25 bp, Homo sapien
cccaggtgtctgcctagtcctcaag

SEQ ID NO: 4750600 - DNA, 25 bp, Homo sapien
aggtgtctgcctagtcctcaagtgg

SEQ ID NO: 4750601 - DNA, 25 bp, Homo sapien
caggtgtctgcctagtcctcaagtg

SEQ ID NO: 4750602 - DNA, 25 bp, Homo sapien
ccaggtgtctgcctagtcctcaagt

SEQ ID NO: 4750603 - DNA, 25 bp, Homo sapien
gattgacacacaggtaccaggtgga

SEQ ID NO: 4750604 - DNA, 25 bp, Homo sapien
ggttacttatagcataggtggccat

SEQ ID NO: 4750605 - DNA, 25 bp, Homo sapien
tggttgggttacttatagcataggt

SEQ ID NO: 4750606 - DNA, 25 bp, Homo sapien
caggtggttgggttacttatagcat

SEQ ID NO: 4750607 - DNA, 25 bp, Homo sapien
ccaagtggacatcaggttccaggtt

SEQ ID NO: 4750608 - DNA, 25 bp, Homo sapien
ctgggtggattcctcggctccaggt

SEQ ID NO: 4750609 - DNA, 25 bp, Homo sapien
gacataaagtatcagtggacatcca

SEQ ID NO: 4750610 - DNA, 25 bp, Homo sapien
tcagaccccaggtgaactccaggtt

SEQ ID NO: 4750611 - DNA, 25 bp, Homo sapien
catccggtcttcagctgaacatcag

SEQ ID NO: 4750612 - DNA, 25 bp, Homo sapien
tgcaggtggacacccagggcccaga

SEQ ID NO: 4750613 - DNA, 25 bp, Homo sapien
cagggcccagatgggcatcaggccc

SEQ ID NO: 4750614 - DNA, 25 bp, Homo sapien
ggcccagatgggcatcaggccccat

SEQ ID NO: 4750615 - DNA, 25 bp, Homo sapien
agatgggcatcaggccccatttgga

SEQ ID NO: 4750616 - DNA, 25 bp, Homo sapien
actgtgggctcgaaccagggaagcc

SEQ ID NO: 4750617 - DNA, 25 bp, Homo sapien
tcatgggccttctgcacactttggg

SEQ ID NO: 4750618 - DNA, 25 bp, Homo sapien
tctgtctgccttggggtacacctag

SEQ ID NO: 4750619 - DNA, 25 bp, Homo sapien
ctagcggcccgaggtgcactgtggg

SEQ ID NO: 4750620 - DNA, 25 bp, Homo sapien
agccgccgctttggtcacagtgacc

SEQ ID NO: 4750621 - DNA, 25 bp, Homo sapien
accttcgtccgtggaggagccaggc

SEQ ID NO: 4750622 - DNA, 25 bp, Homo sapien
ttaaaaggtccgcagcctgactctg

SEQ ID NO: 4750623 - DNA, 25 bp, Homo sapien
gagccctgtgtgatcgtgcgtcaga

SEQ ID NO: 4750624 - DNA, 25 bp, Homo sapien
tctgagtctacaattcccagctgac

SEQ ID NO: 4750625 - DNA, 25 bp, Homo sapien
caattcccagctgacaatgtttatc

SEQ ID NO: 4750626 - DNA, 25 bp, Homo sapien
aagatagtttctctgagtctacaat

SEQ ID NO: 4750627 - DNA, 25 bp, Homo sapien
agtttctctgagtctacaattccca

SEQ ID NO: 4750628 - DNA, 25 bp, Homo sapien
ttgcagttattcaagctagtttgaa

SEQ ID NO: 4750629 - DNA, 25 bp, Homo sapien
tttgcagttattcaagctagtttga

SEQ ID NO: 4750630 - DNA, 25 bp, Homo sapien
tctctggttactagaaataagcata

SEQ ID NO: 4750631 - DNA, 25 bp, Homo sapien
gttaatctagttacctgccaaatca

SEQ ID NO: 4750632 - DNA, 25 bp, Homo sapien
gggtatatctttacataactagatg

SEQ ID NO: 4750633 - DNA, 25 bp, Homo sapien
ggaatccaaagtttcataaccctgc

SEQ ID NO: 4750634 - DNA, 25 bp, Homo sapien
cataggccaattgatacaacaagat

SEQ ID NO: 4750635 - DNA, 25 bp, Homo sapien
tctggtcacaatattatcactgtac

SEQ ID NO: 4750636 - DNA, 25 bp, Homo sapien
tatcagtagattattggaaactgca

SEQ ID NO: 4750637 - DNA, 25 bp, Homo sapien
caagatataagttcctactgcatat

SEQ ID NO: 4750638 - DNA, 25 bp, Homo sapien
ggataacagttatcccacttgatgg

SEQ ID NO: 4750639 - DNA, 25 bp, Homo sapien
tctttatggataacagttatcccac

SEQ ID NO: 4750640 - DNA, 25 bp, Homo sapien
ttatggataacagttatcccacttg

SEQ ID NO: 4750641 - DNA, 25 bp, Homo sapien
tggataacagttatcccacttgatg

SEQ ID NO: 4750642 - DNA, 25 bp, Homo sapien
caacttccagtgtatcaatggccag

SEQ ID NO: 4750643 - DNA, 25 bp, Homo sapien
tgtttattatcttgccctttgcaga

SEQ ID NO: 4750644 - DNA, 25 bp, Homo sapien
aatttgatggttcatggttcaaggc

SEQ ID NO: 4750645 - DNA, 25 bp, Homo sapien
tattcaatcctccatggctttcagc

SEQ ID NO: 4750646 - DNA, 25 bp, Homo sapien
tcatctggaaaatagtacctcgtaa

SEQ ID NO: 4750647 - DNA, 25 bp, Homo sapien
catctggaaaatagtacctcgtaag

SEQ ID NO: 4750648 - DNA, 25 bp, Homo sapien
atctggaaaatagtacctcgtaagt

SEQ ID NO: 4750649 - DNA, 25 bp, Homo sapien
cagtatctgctgtgatttgttactg

SEQ ID NO: 4750650 - DNA, 25 bp, Homo sapien
tgaagctgtgtcgatgctgccatag

SEQ ID NO: 4750651 - DNA, 25 bp, Homo sapien
aagctgtgtcgatgctgccatagga

SEQ ID NO: 4750652 - DNA, 25 bp, Homo sapien
gtcgatgctgccataggaacaccac

SEQ ID NO: 4750653 - DNA, 25 bp, Homo sapien
tgtgtcgatgctgccataggaacac

SEQ ID NO: 4750654 - DNA, 25 bp, Homo sapien
cttggcaaataccacataattgttg

SEQ ID NO: 4750655 - DNA, 25 bp, Homo sapien
cagacaagtctgctaaaattagtgg

SEQ ID NO: 4750656 - DNA, 25 bp, Homo sapien
gtgatcagagttaacgtcaacaata

SEQ ID NO: 4750657 - DNA, 25 bp, Homo sapien
gacaaaggaaagcttttccatacag

SEQ ID NO: 4750658 - DNA, 25 bp, Homo sapien
caggcaataggacaggttcagtgta

SEQ ID NO: 4750659 - DNA, 25 bp, Homo sapien
cattcttagctgcaggttgtacaaa

SEQ ID NO: 4750660 - DNA, 25 bp, Homo sapien
gctgctaatagcaagagcaatgtcc

SEQ ID NO: 4750661 - DNA, 25 bp, Homo sapien
gctgaagtctgctaaaccctgtggt

SEQ ID NO: 4750662 - DNA, 25 bp, Homo sapien
taaaagtgggcatccgtgtcgtgtc

SEQ ID NO: 4750663 - DNA, 25 bp, Homo sapien
catatggccccagtgcatgatgtgc

SEQ ID NO: 4750664 - DNA, 25 bp, Homo sapien
tgacgatcagccatagagagccaag

SEQ ID NO: 4750665 - DNA, 25 bp, Homo sapien
tgcaagtgctttcgggaactcagtc

SEQ ID NO: 4750666 - DNA, 25 bp, Homo sapien
gagggtattcttcatgcttgtcaca

SEQ ID NO: 4750667 - DNA, 25 bp, Homo sapien
ggctaagaagtacacgatcagcata

SEQ ID NO: 4750668 - DNA, 25 bp, Homo sapien
gatcagcatacacatagtcagtttc

SEQ ID NO: 4750669 - DNA, 25 bp, Homo sapien
aaggaagtgtacaagaaagtgctct

SEQ ID NO: 4750670 - DNA, 25 bp, Homo sapien
tttccagagacatcttagctcttgc

SEQ ID NO: 4750671 - DNA, 25 bp, Homo sapien
ggatgtagggcaattcaaactttta

SEQ ID NO: 4750672 - DNA, 25 bp, Homo sapien
atcatgtgccaaccctgtgacccag

SEQ ID NO: 4750673 - DNA, 25 bp, Homo sapien
tctggtgacaagtacacaataagca

SEQ ID NO: 4750674 - DNA, 25 bp, Homo sapien
tattgttgtaacagttttgggctgc

SEQ ID NO: 4750675 - DNA, 25 bp, Homo sapien
tgtgatattctagacaacctcttgt

SEQ ID NO: 4750676 - DNA, 25 bp, Homo sapien
tgtagtctcccctggcgtgacatgc

SEQ ID NO: 4750677 - DNA, 25 bp, Homo sapien
tggcaattgtcttccgatctgtttg

SEQ ID NO: 4750678 - DNA, 25 bp, Homo sapien
caatagaagccactaatcttaccaa

SEQ ID NO: 4750679 - DNA, 25 bp, Homo sapien
catagttcaagctggagctattaag

SEQ ID NO: 4750680 - DNA, 25 bp, Homo sapien
acaatagtcatgaaaaccgttatac

SEQ ID NO: 4750681 - DNA, 25 bp, Homo sapien
tacgtacagaacatagtcatctacc

SEQ ID NO: 4750682 - DNA, 25 bp, Homo sapien
ctcccactacatacagaaattatgg

SEQ ID NO: 4750683 - DNA, 25 bp, Homo sapien
cactacatacagaaattatgggagc

SEQ ID NO: 4750684 - DNA, 25 bp, Homo sapien
ggtccctcccactacatacagaaat

SEQ ID NO: 4750685 - DNA, 25 bp, Homo sapien
aggtccctcccactacatacagaaa

SEQ ID NO: 4750686 - DNA, 25 bp, Homo sapien
catttggtggtcagggtcttcggaa

SEQ ID NO: 4750687 - DNA, 25 bp, Homo sapien
ttgcatttggtggtcagggtcttcg

SEQ ID NO: 4750688 - DNA, 25 bp, Homo sapien
gaatctgatatcaaatcccagttgt

SEQ ID NO: 4750689 - DNA, 25 bp, Homo sapien
atgaatctgatatcaaatcccagtt

SEQ ID NO: 4750690 - DNA, 25 bp, Homo sapien
tccagtatgacgtcatctcaagatc

SEQ ID NO: 4750691 - DNA, 25 bp, Homo sapien
gatttagggtgcactaggatcatcc

SEQ ID NO: 4750692 - DNA, 25 bp, Homo sapien
tgcactaggatcatccagtatgacg

SEQ ID NO: 4750693 - DNA, 25 bp, Homo sapien
aacacttattggatttagggtgcac

SEQ ID NO: 4750694 - DNA, 25 bp, Homo sapien
ttttatatgaacaatgacatagttc

SEQ ID NO: 4750695 - DNA, 25 bp, Homo sapien
tgacatagttcaaatttatcttgaa

SEQ ID NO: 4750696 - DNA, 25 bp, Homo sapien
tgaacaatgacatagttcaaattta

SEQ ID NO: 4750697 - DNA, 25 bp, Homo sapien
cttttatatgaacaatgacatagtt

SEQ ID NO: 4750698 - DNA, 25 bp, Homo sapien
tgagagcattctctggtcttgataa

SEQ ID NO: 4750699 - DNA, 25 bp, Homo sapien
gagcattctctggtcttgataagga

SEQ ID NO: 4750700 - DNA, 25 bp, Homo sapien
ctggtcttgataaggatgaggccat

SEQ ID NO: 4750701 - DNA, 25 bp, Homo sapien
tctctggtcttgataaggatgaggc

SEQ ID NO: 4750702 - DNA, 25 bp, Homo sapien
tgaatcattcctcggcacacctaag

SEQ ID NO: 4750703 - DNA, 25 bp, Homo sapien
tacaagatgtaaccaaagggcctag

SEQ ID NO: 4750704 - DNA, 25 bp, Homo sapien
tggtacacatcctagttactttggg

SEQ ID NO: 4750705 - DNA, 25 bp, Homo sapien
gagatttactgacatccctaatgaa

SEQ ID NO: 4750706 - DNA, 25 bp, Homo sapien
aagatgttttggtgggggtctccat

SEQ ID NO: 4750707 - DNA, 25 bp, Homo sapien
ttaaaaaactctcagaactcagaga

SEQ ID NO: 4750708 - DNA, 25 bp, Homo sapien
ggggtctccattgctcttcagcttt

SEQ ID NO: 4750709 - DNA, 25 bp, Homo sapien
tacaaaattgaaatgtgtaaagatg

SEQ ID NO: 4750710 - DNA, 25 bp, Homo sapien
gtttttattggtggttaatcacata

SEQ ID NO: 4750711 - DNA, 25 bp, Homo sapien
ggttaatcacataggcatgcaatgc

SEQ ID NO: 4750712 - DNA, 25 bp, Homo sapien
tattggtggttaatcacataggcat

SEQ ID NO: 4750713 - DNA, 25 bp, Homo sapien
taatcacataggcatgcaatgccca

SEQ ID NO: 4750714 - DNA, 25 bp, Homo sapien
aattactaatgcatcctacaagccc

SEQ ID NO: 4750715 - DNA, 25 bp, Homo sapien
aacaaaccttacctttgaatgtgca

SEQ ID NO: 4750716 - DNA, 25 bp, Homo sapien
tctgtgcagaactatttagcattga

SEQ ID NO: 4750717 - DNA, 25 bp, Homo sapien
cattttatggacacagtgtagggta

SEQ ID NO: 4750718 - DNA, 25 bp, Homo sapien
gttgagtctaccttaccaagttcac

SEQ ID NO: 4750719 - DNA, 25 bp, Homo sapien
taagtgttattactactcaccatga

SEQ ID NO: 4750720 - DNA, 25 bp, Homo sapien
tgttacagctactcaacataattgg

SEQ ID NO: 4750721 - DNA, 25 bp, Homo sapien
tgttgggtcctagcattatccatca

SEQ ID NO: 4750722 - DNA, 25 bp, Homo sapien
tatatttgctccctatggaacagaa

SEQ ID NO: 4750723 - DNA, 25 bp, Homo sapien
agagaaatcggtagaacagctgtat

SEQ ID NO: 4750724 - DNA, 25 bp, Homo sapien
catagttgcgatgtttcatgtggta

SEQ ID NO: 4750725 - DNA, 25 bp, Homo sapien
tatgtttcccatacagtctagttgg

SEQ ID NO: 4750726 - DNA, 25 bp, Homo sapien
gttatatcaacaactaaacataata

SEQ ID NO: 4750727 - DNA, 25 bp, Homo sapien
ttaaggtaggaaagcagctcagcaa

SEQ ID NO: 4750728 - DNA, 25 bp, Homo sapien
ccatgaggcaaatgtctaatgactg

SEQ ID NO: 4750729 - DNA, 25 bp, Homo sapien
gaagcaagtatttcaagtatttatt

SEQ ID NO: 4750730 - DNA, 25 bp, Homo sapien
aagcaaatgggtttcagaccgatta

SEQ ID NO: 4750731 - DNA, 25 bp, Homo sapien
tttataaaacatatgcacttctgag

SEQ ID NO: 4750732 - DNA, 25 bp, Homo sapien
acaactgctttaaacatgacacatt

SEQ ID NO: 4750733 - DNA, 25 bp, Homo sapien
tgattatatacctcttccccaagat

SEQ ID NO: 4750734 - DNA, 25 bp, Homo sapien
tatggccaagtataatcccattata

SEQ ID NO: 4750735 - DNA, 25 bp, Homo sapien
gtaaggtgaaacacagattaactca

SEQ ID NO: 4750736 - DNA, 25 bp, Homo sapien
gatttacaagtagacacaagtaagg

SEQ ID NO: 4750737 - DNA, 25 bp, Homo sapien
taccatcaaattcatatggccaagt

SEQ ID NO: 4750738 - DNA, 25 bp, Homo sapien
cataacaatctgtatgtacaagtct

SEQ ID NO: 4750739 - DNA, 25 bp, Homo sapien
gtatgtacaagtctaggttttccaa

SEQ ID NO: 4750740 - DNA, 25 bp, Homo sapien
tgtatgtacaagtctaggttttcca

SEQ ID NO: 4750741 - DNA, 25 bp, Homo sapien
aaacataacaatctgtatgtacaag

SEQ ID NO: 4750742 - DNA, 25 bp, Homo sapien
gggctgcatctactaccacaacatg

SEQ ID NO: 4750743 - DNA, 25 bp, Homo sapien
tggaaacaagaccactcaagccagc

SEQ ID NO: 4750744 - DNA, 25 bp, Homo sapien
cagctgagccgcatttccatgggag

SEQ ID NO: 4750745 - DNA, 25 bp, Homo sapien
caacatgcaatatgggtaacactgg

SEQ ID NO: 4750746 - DNA, 25 bp, Homo sapien
ggtcacacggctttcaagtgccaga

SEQ ID NO: 4750747 - DNA, 25 bp, Homo sapien
caagcccaactatacaggtcagatc

SEQ ID NO: 4750748 - DNA, 25 bp, Homo sapien
gctttactgggctaaaccttcacca

SEQ ID NO: 4750749 - DNA, 25 bp, Homo sapien
tgtgaatttctagacctccatagca

SEQ ID NO: 4750750 - DNA, 25 bp, Homo sapien
actctccaggtgctcgtatgcgact

SEQ ID NO: 4750751 - DNA, 25 bp, Homo sapien
tgagaggcgaataacattgctaaac

SEQ ID NO: 4750752 - DNA, 25 bp, Homo sapien
gtctcagggcagtcttaagagctcc

SEQ ID NO: 4750753 - DNA, 25 bp, Homo sapien
attttcatgacttctaagacactag

SEQ ID NO: 4750754 - DNA, 25 bp, Homo sapien
tcaggaaccgccctgtgatgtcaga

SEQ ID NO: 4750755 - DNA, 25 bp, Homo sapien
gccagtaacaaacatggctccctga

SEQ ID NO: 4750756 - DNA, 25 bp, Homo sapien
cctgatcccagaggcattgtctaaa

SEQ ID NO: 4750757 - DNA, 25 bp, Homo sapien
gctcttacaactacgtccacttcag

SEQ ID NO: 4750758 - DNA, 25 bp, Homo sapien
ttaatcgctcctctccgggggcggc

SEQ ID NO: 4750759 - DNA, 25 bp, Homo sapien
caatgggtggattcgggtccagatt

SEQ ID NO: 4750760 - DNA, 25 bp, Homo sapien
gcaatgggtggattcgggtccagat

SEQ ID NO: 4750761 - DNA, 25 bp, Homo sapien
gcaggagggagtttgggatcgagat

SEQ ID NO: 4750762 - DNA, 25 bp, Homo sapien
gaggcaaggcacggatggactttac

SEQ ID NO: 4750763 - DNA, 25 bp, Homo sapien
gcactagactggaagaggacgcgat

SEQ ID NO: 4750764 - DNA, 25 bp, Homo sapien
acgcgatggagtcggagccgctggc

SEQ ID NO: 4750765 - DNA, 25 bp, Homo sapien
agaggacgcgatggagtcggagccg

SEQ ID NO: 4750766 - DNA, 25 bp, Homo sapien
tggccaccgcgactggtgctgaagt

SEQ ID NO: 4750767 - DNA, 25 bp, Homo sapien
cacagtggtggccaccgcgactggt

SEQ ID NO: 4750768 - DNA, 25 bp, Homo sapien
atctccgcgcacagtggtggccacc

SEQ ID NO: 4750769 - DNA, 25 bp, Homo sapien
gtcgcagccatctccgcgcacagtg

SEQ ID NO: 4750770 - DNA, 25 bp, Homo sapien
ttgggacaagtacagtaaccctcgc

SEQ ID NO: 4750771 - DNA, 25 bp, Homo sapien
gactcagttcctgcggggaacttca

SEQ ID NO: 4750772 - DNA, 25 bp, Homo sapien
cacgccttagagcaggcacctatct

SEQ ID NO: 4750773 - DNA, 25 bp, Homo sapien
tcgcccgtcaagacgggccagggct

SEQ ID NO: 4750774 - DNA, 25 bp, Homo sapien
cactctccgggattgggagccaaaa

SEQ ID NO: 4750775 - DNA, 25 bp, Homo sapien
catttacaagatactcatgccacac

SEQ ID NO: 4750776 - DNA, 25 bp, Homo sapien
tgacttcagtatggccactctccgg

SEQ ID NO: 4750777 - DNA, 25 bp, Homo sapien
tagtggagcaaaccacgattctgca

SEQ ID NO: 4750778 - DNA, 25 bp, Homo sapien
ggaaatttccatccctttcgagcta

SEQ ID NO: 4750779 - DNA, 25 bp, Homo sapien
tccctgagagtgtatagctttggca

SEQ ID NO: 4750780 - DNA, 25 bp, Homo sapien
agctttggcatgatggttgctgtaa

SEQ ID NO: 4750781 - DNA, 25 bp, Homo sapien
aaaccaaacaaagcgtggcccagca

SEQ ID NO: 4750782 - DNA, 25 bp, Homo sapien
cctccaagacccatagactcgaagt

SEQ ID NO: 4750783 - DNA, 25 bp, Homo sapien
tgctctagctcttgggttggtggtc

SEQ ID NO: 4750784 - DNA, 25 bp, Homo sapien
ttggggagagatcctataaccctgg

SEQ ID NO: 4750785 - DNA, 25 bp, Homo sapien
gctcttgggttggtggtccctccaa

SEQ ID NO: 4750786 - DNA, 25 bp, Homo sapien
gcatactatgtactaggtacataca

SEQ ID NO: 4750787 - DNA, 25 bp, Homo sapien
aaagagttcattgaagttctgagag

SEQ ID NO: 4750788 - DNA, 25 bp, Homo sapien
tacacagtagtagctggatttcctg

SEQ ID NO: 4750789 - DNA, 25 bp, Homo sapien
tattgaaggcatactatgtactagg

SEQ ID NO: 4750790 - DNA, 25 bp, Homo sapien
gtcctcctgttcccccgcatttgta

SEQ ID NO: 4750791 - DNA, 25 bp, Homo sapien
tcctcctgttcccccgcatttgtag

SEQ ID NO: 4750792 - DNA, 25 bp, Homo sapien
ctgggaacgaagggctagagcgtga

SEQ ID NO: 4750793 - DNA, 25 bp, Homo sapien
tgggaacgaagggctagagcgtgag

SEQ ID NO: 4750794 - DNA, 25 bp, Homo sapien
aaagacagctgatcttgggataaat

SEQ ID NO: 4750795 - DNA, 25 bp, Homo sapien
caagaaagacagctgatcttgggat

SEQ ID NO: 4750796 - DNA, 25 bp, Homo sapien
tcccaagaaagacagctgatcttgg

SEQ ID NO: 4750797 - DNA, 25 bp, Homo sapien
agaaagacagctgatcttgggataa

SEQ ID NO: 4750798 - DNA, 25 bp, Homo sapien
tacctttcctagtctggaagtcagc

SEQ ID NO: 4750799 - DNA, 25 bp, Homo sapien
gctaccgctacctttcctagtctgg

SEQ ID NO: 4750800 - DNA, 25 bp, Homo sapien
tgtgaaaaatgtcgagttgtaaatc

SEQ ID NO: 4750801 - DNA, 25 bp, Homo sapien
taaatcactttctgctaccgctacc

SEQ ID NO: 4750802 - DNA, 25 bp, Homo sapien
ccatcctgaaaaagggtgaacagcc

SEQ ID NO: 4750803 - DNA, 25 bp, Homo sapien
agccacccaggagcccctgaacggg

SEQ ID NO: 4750804 - DNA, 25 bp, Homo sapien
cacccaggagcccctgaacgggcat

SEQ ID NO: 4750805 - DNA, 25 bp, Homo sapien
ctgccttctcctcaccatcctgaaa

SEQ ID NO: 4750806 - DNA, 25 bp, Homo sapien
tggctccttttggaactcgggtctc

SEQ ID NO: 4750807 - DNA, 25 bp, Homo sapien
acagcatgccctgtggctccttttg

SEQ ID NO: 4750808 - DNA, 25 bp, Homo sapien
cacacagcatgccctgtggctcctt

SEQ ID NO: 4750809 - DNA, 25 bp, Homo sapien
cacagcatgccctgtggctcctttt

SEQ ID NO: 4750810 - DNA, 25 bp, Homo sapien
ttggtgggcctagagcgctagggac

SEQ ID NO: 4750811 - DNA, 25 bp, Homo sapien
agcgctagggactggcacgcaccag

SEQ ID NO: 4750812 - DNA, 25 bp, Homo sapien
ggcgggccttggctgggcgtccgcg

SEQ ID NO: 4750813 - DNA, 25 bp, Homo sapien
cctagagcgctagggactggcacgc

SEQ ID NO: 4750814 - DNA, 25 bp, Homo sapien
ccttgtttcgggacgcagttgtgct

SEQ ID NO: 4750815 - DNA, 25 bp, Homo sapien
ggctcctgttctgggacgtctgctt

SEQ ID NO: 4750816 - DNA, 25 bp, Homo sapien
tgaccccgcggctcctgttctggga

SEQ ID NO: 4750817 - DNA, 25 bp, Homo sapien
cctgtggctccttgtttcgggacgc

SEQ ID NO: 4750818 - DNA, 25 bp, Homo sapien
gcagaggtgcttcaccatttgggaa

SEQ ID NO: 4750819 - DNA, 25 bp, Homo sapien
tcaggcctttgggaaggactaggaa

SEQ ID NO: 4750820 - DNA, 25 bp, Homo sapien
ggactaggaagtctgacaatgcctt

SEQ ID NO: 4750821 - DNA, 25 bp, Homo sapien
gttccccagtgtggtacgtccacag

SEQ ID NO: 4750822 - DNA, 25 bp, Homo sapien
cctggcttataagcatcataaactc

SEQ ID NO: 4750823 - DNA, 25 bp, Homo sapien
gcctggcttataagcatcataaact

SEQ ID NO: 4750824 - DNA, 25 bp, Homo sapien
caccgagtggaagtagttcttatag

SEQ ID NO: 4750825 - DNA, 25 bp, Homo sapien
taagtgccctgtcacaccgagtgga

SEQ ID NO: 4750826 - DNA, 25 bp, Homo sapien
ctgtcacaccgagtggaagtagttc

SEQ ID NO: 4750827 - DNA, 25 bp, Homo sapien
ggaagtagttcttatagagtgaaac

SEQ ID NO: 4750828 - DNA, 25 bp, Homo sapien
gctgaaagaacaggcatgtgtcttc

SEQ ID NO: 4750829 - DNA, 25 bp, Homo sapien
ctgaaagaacaggcatgtgtcttct

SEQ ID NO: 4750830 - DNA, 25 bp, Homo sapien
ttctaagcacgcagaaatgtcctct

SEQ ID NO: 4750831 - DNA, 25 bp, Homo sapien
tctgagcttctaagcacgcagaaat

SEQ ID NO: 4750832 - DNA, 25 bp, Homo sapien
ctgcgaggcttctgagcttctaagc

SEQ ID NO: 4750833 - DNA, 25 bp, Homo sapien
ggcttctgagcttctaagcacgcag

SEQ ID NO: 4750834 - DNA, 25 bp, Homo sapien
ttcaacagcagcgaaagccgtgtga

SEQ ID NO: 4750835 - DNA, 25 bp, Homo sapien
cttcaacagcagcgaaagccgtgtg

SEQ ID NO: 4750836 - DNA, 25 bp, Homo sapien
acagcagcgaaagccgtgtgaactc

SEQ ID NO: 4750837 - DNA, 25 bp, Homo sapien
caacagcagcgaaagccgtgtgaac

SEQ ID NO: 4750838 - DNA, 25 bp, Homo sapien
gctgctgcacctttaacgctttctg

SEQ ID NO: 4750839 - DNA, 25 bp, Homo sapien
ctgctgcacctttaacgctttctgg

SEQ ID NO: 4750840 - DNA, 25 bp, Homo sapien
taagaggcccggaattagcctcttc

SEQ ID NO: 4750841 - DNA, 25 bp, Homo sapien
ttataagaggcccggaattagcctc

SEQ ID NO: 4750842 - DNA, 25 bp, Homo sapien
cccggaattagcctcttcgactggg

SEQ ID NO: 4750843 - DNA, 25 bp, Homo sapien
gaggcccggaattagcctcttcgac

SEQ ID NO: 4750844 - DNA, 25 bp, Homo sapien
cccgggtctgcagtccctccgccat

SEQ ID NO: 4750845 - DNA, 25 bp, Homo sapien
cgcacccgggtctgcagtccctccg

SEQ ID NO: 4750846 - DNA, 25 bp, Homo sapien
gcctcccgcacccgggtctgcagtc

SEQ ID NO: 4750847 - DNA, 25 bp, Homo sapien
tctcttcgctggcactggcctcccg

SEQ ID NO: 4750848 - DNA, 25 bp, Homo sapien
tgcatacaaatgtgctctgcgctct

SEQ ID NO: 4750849 - DNA, 25 bp, Homo sapien
acaaatgtgctctgcgctctgtaga

SEQ ID NO: 4750850 - DNA, 25 bp, Homo sapien
gatgcatacaaatgtgctctgcgct

SEQ ID NO: 4750851 - DNA, 25 bp, Homo sapien
catacaaatgtgctctgcgctctgt

SEQ ID NO: 4750852 - DNA, 25 bp, Homo sapien
tgcgtgctggggtaggatgcctgcc

SEQ ID NO: 4750853 - DNA, 25 bp, Homo sapien
ttgcgtgctggggtaggatgcctgc

SEQ ID NO: 4750854 - DNA, 25 bp, Homo sapien
ggtaggatgcctgcctcttcggatt

SEQ ID NO: 4750855 - DNA, 25 bp, Homo sapien
gctggggtaggatgcctgcctcttc

SEQ ID NO: 4750856 - DNA, 25 bp, Homo sapien
tgaattttccttcgcgagtttggag

SEQ ID NO: 4750857 - DNA, 25 bp, Homo sapien
ggagaccagccgatttttcatgaag

SEQ ID NO: 4750858 - DNA, 25 bp, Homo sapien
atgaagcaagcaagggccgcggtcc

SEQ ID NO: 4750859 - DNA, 25 bp, Homo sapien
gcggtcccggatcctgcaacatata

SEQ ID NO: 4750860 - DNA, 25 bp, Homo sapien
ggctggcgactctgctcggcctccg

SEQ ID NO: 4750861 - DNA, 25 bp, Homo sapien
cggctggcgactctgctcggcctcc

SEQ ID NO: 4750862 - DNA, 25 bp, Homo sapien
agcctctgggcctcgtgggctctct

SEQ ID NO: 4750863 - DNA, 25 bp, Homo sapien
ctctccgctccgacgcctgttcggg

SEQ ID NO: 4750864 - DNA, 25 bp, Homo sapien
gaaggaggaggaacggcttggagtc

SEQ ID NO: 4750865 - DNA, 25 bp, Homo sapien
aagaaggaggaggaacggcttggag

SEQ ID NO: 4750866 - DNA, 25 bp, Homo sapien
gaagaaggaggaggaacggcttgga

SEQ ID NO: 4750867 - DNA, 25 bp, Homo sapien
aagaagaaggaggaggaacggcttg

SEQ ID NO: 4750868 - DNA, 25 bp, Homo sapien
actctctgtttggaggcactggtgg

SEQ ID NO: 4750869 - DNA, 25 bp, Homo sapien
tatttacagatttacgtttgaggga

SEQ ID NO: 4750870 - DNA, 25 bp, Homo sapien
cagatttacgtttgagggaaatata

SEQ ID NO: 4750871 - DNA, 25 bp, Homo sapien
gaggcactggtggctctactgacag

SEQ ID NO: 4750872 - DNA, 25 bp, Homo sapien
cattttctgatccagcaatgcccca

SEQ ID NO: 4750873 - DNA, 25 bp, Homo sapien
tttaaaaaggtcacacattttctga

SEQ ID NO: 4750874 - DNA, 25 bp, Homo sapien
aaaggtcacacattttctgatccag

SEQ ID NO: 4750875 - DNA, 25 bp, Homo sapien
attttctgatccagcaatgccccaa

SEQ ID NO: 4750876 - DNA, 25 bp, Homo sapien
atcaacactgtcccctttttggcac

SEQ ID NO: 4750877 - DNA, 25 bp, Homo sapien
cactgtcccctttttggcacctgta

SEQ ID NO: 4750878 - DNA, 25 bp, Homo sapien
aacactgtcccctttttggcacctg

SEQ ID NO: 4750879 - DNA, 25 bp, Homo sapien
ttattattatcaacactgtcccctt

SEQ ID NO: 4750880 - DNA, 25 bp, Homo sapien
cctctgtctagtgaggatcacggtc

SEQ ID NO: 4750881 - DNA, 25 bp, Homo sapien
tgtctagtgaggatcacggtctgca

SEQ ID NO: 4750882 - DNA, 25 bp, Homo sapien
tagtgaggatcacggtctgcagaga

SEQ ID NO: 4750883 - DNA, 25 bp, Homo sapien
tctagtgaggatcacggtctgcaga

SEQ ID NO: 4750884 - DNA, 25 bp, Homo sapien
ttctcgtcgaaagcagaaccccaca

SEQ ID NO: 4750885 - DNA, 25 bp, Homo sapien
tctctcaccgaagggtcgttctcgt

SEQ ID NO: 4750886 - DNA, 25 bp, Homo sapien
gaaagtctccggatgccaagagtca

SEQ ID NO: 4750887 - DNA, 25 bp, Homo sapien
acagggtgaggaaacccgacgcaga

SEQ ID NO: 4750888 - DNA, 25 bp, Homo sapien
aatatccccatcctgagcggtctct

SEQ ID NO: 4750889 - DNA, 25 bp, Homo sapien
tcaatccttttcgccgacgcggttc

SEQ ID NO: 4750890 - DNA, 25 bp, Homo sapien
ggtcccggagcaattgaaatatccc

SEQ ID NO: 4750891 - DNA, 25 bp, Homo sapien
cccacgtgaggagattcttcggtcc

SEQ ID NO: 4750892 - DNA, 25 bp, Homo sapien
ccacaatacggtctggaagaggaag

SEQ ID NO: 4750893 - DNA, 25 bp, Homo sapien
tctggacaagccacccttttggaac

SEQ ID NO: 4750894 - DNA, 25 bp, Homo sapien
cctgtcactggaatgctggcctctc

SEQ ID NO: 4750895 - DNA, 25 bp, Homo sapien
agtccctgtcactggaatgctggcc

SEQ ID NO: 4750896 - DNA, 25 bp, Homo sapien
ggaatgggagatggcaacagtccct

SEQ ID NO: 4750897 - DNA, 25 bp, Homo sapien
ttgtccagggaggccagcgttccag

SEQ ID NO: 4750898 - DNA, 25 bp, Homo sapien
tccaaaagggtggcttgtccaggga

SEQ ID NO: 4750899 - DNA, 25 bp, Homo sapien
gcttgtccagggaggccagcgttcc

SEQ ID NO: 4750900 - DNA, 25 bp, Homo sapien
caaaagggtggcttgtccagggagg

SEQ ID NO: 4750901 - DNA, 25 bp, Homo sapien
tcccggcttcctcttgctgactgta

SEQ ID NO: 4750902 - DNA, 25 bp, Homo sapien
tcctcttgctgactgtatcgtggtg

SEQ ID NO: 4750903 - DNA, 25 bp, Homo sapien
ggacagggattgttgccatctctca

SEQ ID NO: 4750904 - DNA, 25 bp, Homo sapien
ggcttcctcttgctgactgtatcgt

SEQ ID NO: 4750905 - DNA, 25 bp, Homo sapien
gggattcttctcctcgtctgcagtg

SEQ ID NO: 4750906 - DNA, 25 bp, Homo sapien
gatgagacttcaattgctccgagac

SEQ ID NO: 4750907 - DNA, 25 bp, Homo sapien
gacttcaattgctccgagaccgacg

SEQ ID NO: 4750908 - DNA, 25 bp, Homo sapien
ttcacagagccaaagcggatccaca

SEQ ID NO: 4750909 - DNA, 25 bp, Homo sapien
caggccttcacagagccaaagcgga

SEQ ID NO: 4750910 - DNA, 25 bp, Homo sapien
atcttttttgaaggcatttggccag

SEQ ID NO: 4750911 - DNA, 25 bp, Homo sapien
tgcccaattaagcagaaacacgttt

SEQ ID NO: 4750912 - DNA, 25 bp, Homo sapien
gaagtgtctccctgacggactggga

SEQ ID NO: 4750913 - DNA, 25 bp, Homo sapien
gatcatgacacggatctccaggaag

SEQ ID NO: 4750914 - DNA, 25 bp, Homo sapien
tgagaaacaggggaggcagagccag

SEQ ID NO: 4750915 - DNA, 25 bp, Homo sapien
cagagggaggagagagtagaggcca

SEQ ID NO: 4750916 - DNA, 25 bp, Homo sapien
gagccagagggaggagagagtagag

SEQ ID NO: 4750917 - DNA, 25 bp, Homo sapien
ctgagaaacaggggaggcagagcca

SEQ ID NO: 4750918 - DNA, 25 bp, Homo sapien
cgtgccaccgccacaggcataaggg

SEQ ID NO: 4750919 - DNA, 25 bp, Homo sapien
tcccggcttcctcttgctgactgta

SEQ ID NO: 4750920 - DNA, 25 bp, Homo sapien
tcctcttgctgactgtatcgtggtg

SEQ ID NO: 4750921 - DNA, 25 bp, Homo sapien
cacaggcataaggggtggggttcct

SEQ ID NO: 4750922 - DNA, 25 bp, Homo sapien
tcttgttctcggctgcagtgtactc

SEQ ID NO: 4750923 - DNA, 25 bp, Homo sapien
tgttctcggctgcagtgtactcatc

SEQ ID NO: 4750924 - DNA, 25 bp, Homo sapien
ttctcggctgcagtgtactcatctt

SEQ ID NO: 4750925 - DNA, 25 bp, Homo sapien
tctcctgtgggacaaagagttcctc

SEQ ID NO: 4750926 - DNA, 25 bp, Homo sapien
caggccgccatgcgacaaaccgctt

SEQ ID NO: 4750927 - DNA, 25 bp, Homo sapien
aggccgccatgcgacaaaccgcttt

SEQ ID NO: 4750928 - DNA, 25 bp, Homo sapien
ctgggatcccgtgctgcttcccccg

SEQ ID NO: 4750929 - DNA, 25 bp, Homo sapien
gtgctgcttcccccgtccccgcctg

SEQ ID NO: 4750930 - DNA, 25 bp, Homo sapien
gaggctgggatcccgtgctgcttcc

SEQ ID NO: 4750931 - DNA, 25 bp, Homo sapien
ggatcccgtgctgcttcccccgtcc

SEQ ID NO: 4750932 - DNA, 25 bp, Homo sapien
tgtgacgggagaaaccgctcccgcc

SEQ ID NO: 4750933 - DNA, 25 bp, Homo sapien
gacaaccatgggaaccactgtgacg

SEQ ID NO: 4750934 - DNA, 25 bp, Homo sapien
aggtgaggccggatcctcagagccc

SEQ ID NO: 4750935 - DNA, 25 bp, Homo sapien
ccatgggaaccactgtgacgggaga

SEQ ID NO: 4750936 - DNA, 25 bp, Homo sapien
gaattgtgggatctacaggatgaga

SEQ ID NO: 4750937 - DNA, 25 bp, Homo sapien
ggaaatacccatctccattattcag

SEQ ID NO: 4750938 - DNA, 25 bp, Homo sapien
taccactgtatgtaatggcagaggg

SEQ ID NO: 4750939 - DNA, 25 bp, Homo sapien
tattcagtcatttcccaccaggtac

SEQ ID NO: 4750940 - DNA, 25 bp, Homo sapien
ttaaccagaggcaaggcatgaagtc

SEQ ID NO: 4750941 - DNA, 25 bp, Homo sapien
tgaagctatggcaactagcactggg

SEQ ID NO: 4750942 - DNA, 25 bp, Homo sapien
taagacccctgggacttctcatgtg

SEQ ID NO: 4750943 - DNA, 25 bp, Homo sapien
catgtgcctgatctggagctctgcc

SEQ ID NO: 4750944 - DNA, 25 bp, Homo sapien
gttagttatattacaagattgcagc

SEQ ID NO: 4750945 - DNA, 25 bp, Homo sapien
tagaggcaatcctttcaagccctgc

SEQ ID NO: 4750946 - DNA, 25 bp, Homo sapien
tagggactattctaaatcctcattg

SEQ ID NO: 4750947 - DNA, 25 bp, Homo sapien
tctctgtagcataggatatcatttg

SEQ ID NO: 4750948 - DNA, 25 bp, Homo sapien
ttttgagttgaccactccttaggca

SEQ ID NO: 4750949 - DNA, 25 bp, Homo sapien
gctccctggaagctaacatattgat

SEQ ID NO: 4750950 - DNA, 25 bp, Homo sapien
tttttgagttgaccactccttaggc

SEQ ID NO: 4750951 - DNA, 25 bp, Homo sapien
tccctggaagctaacatattgatgc

SEQ ID NO: 4750952 - DNA, 25 bp, Homo sapien
ggatttaacctacatacctctgaac

SEQ ID NO: 4750953 - DNA, 25 bp, Homo sapien
tgatatttgattgccggatttaacc

SEQ ID NO: 4750954 - DNA, 25 bp, Homo sapien
gcaccattgcataacttacagtaag

SEQ ID NO: 4750955 - DNA, 25 bp, Homo sapien
taacactttgagacaaccaatacac

SEQ ID NO: 4750956 - DNA, 25 bp, Homo sapien
cttgtctaattactcttgataggac

SEQ ID NO: 4750957 - DNA, 25 bp, Homo sapien
tgcttaggcctggtgccatggcaca

SEQ ID NO: 4750958 - DNA, 25 bp, Homo sapien
gatgtcctcctttccgatttgaatg

SEQ ID NO: 4750959 - DNA, 25 bp, Homo sapien
tgcaaataggaacaatttgatgtcc

SEQ ID NO: 4750960 - DNA, 25 bp, Homo sapien
tctctgttgaaaaactttgaataaa

SEQ ID NO: 4750961 - DNA, 25 bp, Homo sapien
gcagtagcagcacagttttattaag

SEQ ID NO: 4750962 - DNA, 25 bp, Homo sapien
tacgacaaaacaatgtaacagggtg

SEQ ID NO: 4750963 - DNA, 25 bp, Homo sapien
gcaactgggataacaaggtattaac

SEQ ID NO: 4750964 - DNA, 25 bp, Homo sapien
catcatggacgttttgtgaggttaa

SEQ ID NO: 4750965 - DNA, 25 bp, Homo sapien
gagaacctgagtccgtcactgtcca

SEQ ID NO: 4750966 - DNA, 25 bp, Homo sapien
aacctgagtccgtcactgtccacgg

SEQ ID NO: 4750967 - DNA, 25 bp, Homo sapien
gaacctgagtccgtcactgtccacg

SEQ ID NO: 4750968 - DNA, 25 bp, Homo sapien
gtgagaacctgagtccgtcactgtc

SEQ ID NO: 4750969 - DNA, 25 bp, Homo sapien
gacggctcagatcttaaacgctctc

SEQ ID NO: 4750970 - DNA, 25 bp, Homo sapien
agtataagacttgaagacggctcag

SEQ ID NO: 4750971 - DNA, 25 bp, Homo sapien
gattaccggaaatgaactgaccata

SEQ ID NO: 4750972 - DNA, 25 bp, Homo sapien
caccctcatgccctggtaattaaag

SEQ ID NO: 4750973 - DNA, 25 bp, Homo sapien
aaagaatttggaaagtaggtgtgtg

SEQ ID NO: 4750974 - DNA, 25 bp, Homo sapien
ttttcatacaggaggaaagaatttg

SEQ ID NO: 4750975 - DNA, 25 bp, Homo sapien
cagccttaagtttttttcatacagg

SEQ ID NO: 4750976 - DNA, 25 bp, Homo sapien
caggaggaaagaatttggaaagtag

SEQ ID NO: 4750977 - DNA, 25 bp, Homo sapien
gtcacagcaggaagatttcaaccaa

SEQ ID NO: 4750978 - DNA, 25 bp, Homo sapien
gagcgaatcctactcaaaacctgat

SEQ ID NO: 4750979 - DNA, 25 bp, Homo sapien
gaagaatctagtgtccattgccaca

SEQ ID NO: 4750980 - DNA, 25 bp, Homo sapien
tcagaaaaatggacttagacttccc

SEQ ID NO: 4750981 - DNA, 25 bp, Homo sapien
tttttatcagcatcaacagggtagc

SEQ ID NO: 4750982 - DNA, 25 bp, Homo sapien
tcagaggactcttgacagggtagca

SEQ ID NO: 4750983 - DNA, 25 bp, Homo sapien
tcttttcagggtatcacagggcgtc

SEQ ID NO: 4750984 - DNA, 25 bp, Homo sapien
taattaagcaactactatgtctggg

SEQ ID NO: 4750985 - DNA, 25 bp, Homo sapien
aacaagcgggaggaaagtcgtatct

SEQ ID NO: 4750986 - DNA, 25 bp, Homo sapien
tgttagaagctgtgcatgaatgcca

SEQ ID NO: 4750987 - DNA, 25 bp, Homo sapien
ccttgcatctgtcttggaactcaca

SEQ ID NO: 4750988 - DNA, 25 bp, Homo sapien
tactcaaaaagactagcatacctga

SEQ ID NO: 4750989 - DNA, 25 bp, Homo sapien
ggaaaaagcatgttgtattagagca

SEQ ID NO: 4750990 - DNA, 25 bp, Homo sapien
ctaagagtgtttaaagtgcatattc

SEQ ID NO: 4750991 - DNA, 25 bp, Homo sapien
catgttgtattagagcatattcaac

SEQ ID NO: 4750992 - DNA, 25 bp, Homo sapien
taatgtctaccataaacaatgactc

SEQ ID NO: 4750993 - DNA, 25 bp, Homo sapien
ccaggacaattaggtgagagaaaga

SEQ ID NO: 4750994 - DNA, 25 bp, Homo sapien
gccaggacaattaggtgagagaaag

SEQ ID NO: 4750995 - DNA, 25 bp, Homo sapien
tttcagctcatttcatgtcacatct

SEQ ID NO: 4750996 - DNA, 25 bp, Homo sapien
catttcagctcatttcatgtcacat

SEQ ID NO: 4750997 - DNA, 25 bp, Homo sapien
cacatctcttcatcatttcaacatt

SEQ ID NO: 4750998 - DNA, 25 bp, Homo sapien
ctcatttcagctcatttcatgtcac

SEQ ID NO: 4750999 - DNA, 25 bp, Homo sapien
catcatttcatctcatttcttctca

SEQ ID NO: 4751000 - DNA, 25 bp, Homo sapien
tcatcatttcatctcatttcttctc

SEQ ID NO: 4751001 - DNA, 25 bp, Homo sapien
ttcatcatttcatctcatttcttct

SEQ ID NO: 4751002 - DNA, 25 bp, Homo sapien
tttcatcatttcatctcatttcttc

SEQ ID NO: 4751003 - DNA, 25 bp, Homo sapien
catttaatttcatcatctcatttaa

SEQ ID NO: 4751004 - DNA, 25 bp, Homo sapien
atctcatttccatttcattatttca

SEQ ID NO: 4751005 - DNA, 25 bp, Homo sapien
tttcatcatttaatttcatcatctc

SEQ ID NO: 4751006 - DNA, 25 bp, Homo sapien
catcatttaatttcatcatctcatt

SEQ ID NO: 4751007 - DNA, 25 bp, Homo sapien
tcatctcatctcattccatcattac

SEQ ID NO: 4751008 - DNA, 25 bp, Homo sapien
tctcatctcattccatcattacatc

SEQ ID NO: 4751009 - DNA, 25 bp, Homo sapien
atatcatcattttatctcatctatc

SEQ ID NO: 4751010 - DNA, 25 bp, Homo sapien
actcattgcatctcagctcatcatt

SEQ ID NO: 4751011 - DNA, 25 bp, Homo sapien
catctcatctcgtatcttatctcat

SEQ ID NO: 4751012 - DNA, 25 bp, Homo sapien
ttcatctcatctcgtatcttatctc

SEQ ID NO: 4751013 - DNA, 25 bp, Homo sapien
ctcatcatctcatcaactcttttca

SEQ ID NO: 4751014 - DNA, 25 bp, Homo sapien
caactcttttcatcttatctcatca

SEQ ID NO: 4751015 - DNA, 25 bp, Homo sapien
gtcatctcatctcatctcatcattt

SEQ ID NO: 4751016 - DNA, 25 bp, Homo sapien
tttcatctcatcatttcatctcatc

SEQ ID NO: 4751017 - DNA, 25 bp, Homo sapien
ctcatcatttcatctcatcatttca

SEQ ID NO: 4751018 - DNA, 25 bp, Homo sapien
catttcatctcatcatttcatctca

SEQ ID NO: 4751019 - DNA, 25 bp, Homo sapien
ttcatttcatctcatcatttcatct

SEQ ID NO: 4751020 - DNA, 25 bp, Homo sapien
tttcatttcatctcatcatttcatc

SEQ ID NO: 4751021 - DNA, 25 bp, Homo sapien
catttcaactcattgcatctcagct

SEQ ID NO: 4751022 - DNA, 25 bp, Homo sapien
caactcattgcatctcagctcatca

SEQ ID NO: 4751023 - DNA, 25 bp, Homo sapien
ttcaactcattgcatctcagctcat

SEQ ID NO: 4751024 - DNA, 25 bp, Homo sapien
ctcattgcatctcagctcatcattt

SEQ ID NO: 4751025 - DNA, 25 bp, Homo sapien
tcattatttcatgtcatctcatctc

SEQ ID NO: 4751026 - DNA, 25 bp, Homo sapien
atcattttatttcatcatctcatca

SEQ ID NO: 4751027 - DNA, 25 bp, Homo sapien
catttcatctcatttcgattttatt

SEQ ID NO: 4751028 - DNA, 25 bp, Homo sapien
catctcatttcgattttatttcaat

SEQ ID NO: 4751029 - DNA, 25 bp, Homo sapien
ttcatctcatcatttcatatcatca

SEQ ID NO: 4751030 - DNA, 25 bp, Homo sapien
cattcatctcatcatttcatatcat

SEQ ID NO: 4751031 - DNA, 25 bp, Homo sapien
tcatctcatcatttcatatcatcat

SEQ ID NO: 4751032 - DNA, 25 bp, Homo sapien
catctcatcatttcatatcatcatt

SEQ ID NO: 4751033 - DNA, 25 bp, Homo sapien
ttcatctcatttcaactcattgcat

SEQ ID NO: 4751034 - DNA, 25 bp, Homo sapien
catcatttcatctcatttcaactca

SEQ ID NO: 4751035 - DNA, 25 bp, Homo sapien
atttcatctcatttcaactcattgc

SEQ ID NO: 4751036 - DNA, 25 bp, Homo sapien
acatctcatctcatcatttcatcat

SEQ ID NO: 4751037 - DNA, 25 bp, Homo sapien
tcatcatttcattcattatgtcatt

SEQ ID NO: 4751038 - DNA, 25 bp, Homo sapien
tcatttcattcattatgtcatttca

SEQ ID NO: 4751039 - DNA, 25 bp, Homo sapien
tttcattcattatgtcatttcatct

SEQ ID NO: 4751040 - DNA, 25 bp, Homo sapien
ttcatcatttcattcattatgtcat

SEQ ID NO: 4751041 - DNA, 25 bp, Homo sapien
catctcatctcgtatcttatctcat

SEQ ID NO: 4751042 - DNA, 25 bp, Homo sapien
tcatcatctcaacccttttcatctt

SEQ ID NO: 4751043 - DNA, 25 bp, Homo sapien
atatcatcattttatctcatctatt

SEQ ID NO: 4751044 - DNA, 25 bp, Homo sapien
catctcatttcgattttatttcaat

SEQ ID NO: 4751045 - DNA, 25 bp, Homo sapien
atctcatctcatcatttcatctcat

SEQ ID NO: 4751046 - DNA, 25 bp, Homo sapien
atttcatcatttcatctcatttcaa

SEQ ID NO: 4751047 - DNA, 25 bp, Homo sapien
catttcatcatttcatctcatttca

SEQ ID NO: 4751048 - DNA, 25 bp, Homo sapien
ctcatcatttcatctcatttcatca

SEQ ID NO: 4751049 - DNA, 25 bp, Homo sapien
acatttcatctttcatctcataatt

SEQ ID NO: 4751050 - DNA, 25 bp, Homo sapien
tctcattacatttcatctttcatct

SEQ ID NO: 4751051 - DNA, 25 bp, Homo sapien
cattacatttcatctttcatctcat

SEQ ID NO: 4751052 - DNA, 25 bp, Homo sapien
ttcatctttcatctcataatttcat

SEQ ID NO: 4751053 - DNA, 25 bp, Homo sapien
gaaatgaaatggataggatgccctc

SEQ ID NO: 4751054 - DNA, 25 bp, Homo sapien
tgaaatgaaatggataggatgccct

SEQ ID NO: 4751055 - DNA, 25 bp, Homo sapien
aaatgaaatggataggatgccctca

SEQ ID NO: 4751056 - DNA, 25 bp, Homo sapien
catgaaatgaaatggataggatgcc

SEQ ID NO: 4751057 - DNA, 25 bp, Homo sapien
agttacgtgtacaaagccatgaccc

SEQ ID NO: 4751058 - DNA, 25 bp, Homo sapien
gcagcgaggtgagccgtggtgttgc

SEQ ID NO: 4751059 - DNA, 25 bp, Homo sapien
agccagtgggccgcaggctctagct

SEQ ID NO: 4751060 - DNA, 25 bp, Homo sapien
gccagtgggccgcaggctctagctc

SEQ ID NO: 4751061 - DNA, 25 bp, Homo sapien
cagtaactagtttgacaagagagac

SEQ ID NO: 4751062 - DNA, 25 bp, Homo sapien
agaactaggccaagagcagatagga

SEQ ID NO: 4751063 - DNA, 25 bp, Homo sapien
caagagagactagcacactgatccc

SEQ ID NO: 4751064 - DNA, 25 bp, Homo sapien
gatttgtggaaacttgaacctctta

SEQ ID NO: 4751065 - DNA, 25 bp, Homo sapien
cccattgtgggaaggccaagagaac

SEQ ID NO: 4751066 - DNA, 25 bp, Homo sapien
tactggtgagtttccaccggcagca

SEQ ID NO: 4751067 - DNA, 25 bp, Homo sapien
gagcctgggattctagtactggtga

SEQ ID NO: 4751068 - DNA, 25 bp, Homo sapien
gaagatttgctagccctctgcaggg

SEQ ID NO: 4751069 - DNA, 25 bp, Homo sapien
aataagtgtacatcccattaaggga

SEQ ID NO: 4751070 - DNA, 25 bp, Homo sapien
aaagatcttctacacaatggattgg

SEQ ID NO: 4751071 - DNA, 25 bp, Homo sapien
taacatgcagggattaatagcagtg

SEQ ID NO: 4751072 - DNA, 25 bp, Homo sapien
tagcagtgaattgcaaactcaactc

SEQ ID NO: 4751073 - DNA, 25 bp, Homo sapien
tctcatgagtcgcaaagctttcttc

SEQ ID NO: 4751074 - DNA, 25 bp, Homo sapien
aaacatcattctcatgagtcgcaaa

SEQ ID NO: 4751075 - DNA, 25 bp, Homo sapien
aaattgagaatgacgctggttactt

SEQ ID NO: 4751076 - DNA, 25 bp, Homo sapien
gaatgacgctggttactttccttcc

SEQ ID NO: 4751077 - DNA, 25 bp, Homo sapien
ctgaagagacagggatgactccttc

SEQ ID NO: 4751078 - DNA, 25 bp, Homo sapien
tgaagagacagggatgactccttcc

SEQ ID NO: 4751079 - DNA, 25 bp, Homo sapien
ctgggttgtggaggaaggcatggcc

SEQ ID NO: 4751080 - DNA, 25 bp, Homo sapien
acctcacgatgagaggaagcaatgg

SEQ ID NO: 4751081 - DNA, 25 bp, Homo sapien
caccattggcagtctgctgcaggga

SEQ ID NO: 4751082 - DNA, 25 bp, Homo sapien
cagggacctcacgatgagaggaagc

SEQ ID NO: 4751083 - DNA, 25 bp, Homo sapien
attctgatgtagagatagggaagaa

SEQ ID NO: 4751084 - DNA, 25 bp, Homo sapien
ctgggccagggaaatgcatatttgg

SEQ ID NO: 4751085 - DNA, 25 bp, Homo sapien
ccagggaaatgcatatttgggagaa

SEQ ID NO: 4751086 - DNA, 25 bp, Homo sapien
tctgatgtagagatagggaagaacc

SEQ ID NO: 4751087 - DNA, 25 bp, Homo sapien
gctcacggggagagcaagctcacag

SEQ ID NO: 4751088 - DNA, 25 bp, Homo sapien
aggaggaaaccaccaggatcccagg

SEQ ID NO: 4751089 - DNA, 25 bp, Homo sapien
agggcccaggagcatcggagagagg

SEQ ID NO: 4751090 - DNA, 25 bp, Homo sapien
gacacaaacaaagtgaggccagatg

SEQ ID NO: 4751091 - DNA, 25 bp, Homo sapien
tgaattctcctccatgcctaaccga

SEQ ID NO: 4751092 - DNA, 25 bp, Homo sapien
tccccactgagctcgcaaagaactt

SEQ ID NO: 4751093 - DNA, 25 bp, Homo sapien
gcctaaccgagtgaagcaagtatat

SEQ ID NO: 4751094 - DNA, 25 bp, Homo sapien
catgcatccctaagcagggccggta

SEQ ID NO: 4751095 - DNA, 25 bp, Homo sapien
tgacatcattgatgcccaaacatgc

SEQ ID NO: 4751096 - DNA, 25 bp, Homo sapien
tgatgcccaaacatgctccagcaat

SEQ ID NO: 4751097 - DNA, 25 bp, Homo sapien
tcattgatgcccaaacatgctccag

SEQ ID NO: 4751098 - DNA, 25 bp, Homo sapien
gacatcattgatgcccaaacatgct

SEQ ID NO: 4751099 - DNA, 25 bp, Homo sapien
aaaatctggcctacaagtgaacatg

SEQ ID NO: 4751100 - DNA, 25 bp, Homo sapien
aaaaatctggcctacaagtgaacat

SEQ ID NO: 4751101 - DNA, 25 bp, Homo sapien
tggagtctatcataaggcctgtgag

SEQ ID NO: 4751102 - DNA, 25 bp, Homo sapien
ggccctgcgtgctgtaggcatttaa

SEQ ID NO: 4751103 - DNA, 25 bp, Homo sapien
gggctgatggccctgcgtgctgtag

SEQ ID NO: 4751104 - DNA, 25 bp, Homo sapien
tttctcatagccgttgggctgatgg

SEQ ID NO: 4751105 - DNA, 25 bp, Homo sapien
tctgatttcccagaacggctttggt

SEQ ID NO: 4751106 - DNA, 25 bp, Homo sapien
ccatggcaacagattctgatttccc

SEQ ID NO: 4751107 - DNA, 25 bp, Homo sapien
caggagcggacagcctggtgtccag

SEQ ID NO: 4751108 - DNA, 25 bp, Homo sapien
gctttggtctttacctggtgttgga

SEQ ID NO: 4751109 - DNA, 25 bp, Homo sapien
cttctatctgcgtctaccagctgta

SEQ ID NO: 4751110 - DNA, 25 bp, Homo sapien
tctgcgtctaccagctgtaaactac

SEQ ID NO: 4751111 - DNA, 25 bp, Homo sapien
tatctgcgtctaccagctgtaaact

SEQ ID NO: 4751112 - DNA, 25 bp, Homo sapien
aattcacttctatctgcgtctacca

SEQ ID NO: 4751113 - DNA, 25 bp, Homo sapien
gtgaatgaatttgttgggtgaactg

SEQ ID NO: 4751114 - DNA, 25 bp, Homo sapien
ctgaagcagagaaagtttctttagg

SEQ ID NO: 4751115 - DNA, 25 bp, Homo sapien
cttatgcagcattggccgagtgaat

SEQ ID NO: 4751116 - DNA, 25 bp, Homo sapien
gggcttcctgtagccccgagctgag

SEQ ID NO: 4751117 - DNA, 25 bp, Homo sapien
actctaaggatcctgaacacatgat

SEQ ID NO: 4751118 - DNA, 25 bp, Homo sapien
tatgactctaaggatcctgaacaca

SEQ ID NO: 4751119 - DNA, 25 bp, Homo sapien
ttatgactctaaggatcctgaacac

SEQ ID NO: 4751120 - DNA, 25 bp, Homo sapien
tgactctaaggatcctgaacacatg

SEQ ID NO: 4751121 - DNA, 25 bp, Homo sapien
gaggcactgcgacaatgcagaatgg

SEQ ID NO: 4751122 - DNA, 25 bp, Homo sapien
cataacgatttgaggcactgcgaca

SEQ ID NO: 4751123 - DNA, 25 bp, Homo sapien
ggtggagcataacgatttgaggcac

SEQ ID NO: 4751124 - DNA, 25 bp, Homo sapien
ttaaagagcgggtggagcataacga

SEQ ID NO: 4751125 - DNA, 25 bp, Homo sapien
tcactgataggtaagatgaagtccc

SEQ ID NO: 4751126 - DNA, 25 bp, Homo sapien
ggtctttgccatgcagatgggcaaa

SEQ ID NO: 4751127 - DNA, 25 bp, Homo sapien
ccttggcacaccttttttgtcaggt

SEQ ID NO: 4751128 - DNA, 25 bp, Homo sapien
gcacaccttttttgtcaggttggtg

SEQ ID NO: 4751129 - DNA, 25 bp, Homo sapien
cagtatgctatatactgtcaccaga

SEQ ID NO: 4751130 - DNA, 25 bp, Homo sapien
tgagtgagaatcacaactgcctttc

SEQ ID NO: 4751131 - DNA, 25 bp, Homo sapien
gcctggttgacacgacttttaagga

SEQ ID NO: 4751132 - DNA, 25 bp, Homo sapien
tagagtcttatcaacttagggagga

SEQ ID NO: 4751133 - DNA, 25 bp, Homo sapien
aatggtccttatcttgtccacaatt

SEQ ID NO: 4751134 - DNA, 25 bp, Homo sapien
caatggtccttatcttgtccacaat

SEQ ID NO: 4751135 - DNA, 25 bp, Homo sapien
gcaatggtccttatcttgtccacaa

SEQ ID NO: 4751136 - DNA, 25 bp, Homo sapien
tgcctgccccattgtttgagaccca

SEQ ID NO: 4751137 - DNA, 25 bp, Homo sapien
gccccattgtttgagacccagtcag

SEQ ID NO: 4751138 - DNA, 25 bp, Homo sapien
aactgcctgccccattgtttgagac

SEQ ID NO: 4751139 - DNA, 25 bp, Homo sapien
cccattgtttgagacccagtcaggc

SEQ ID NO: 4751140 - DNA, 25 bp, Homo sapien
gagccccatgccccgatccagctgt

SEQ ID NO: 4751141 - DNA, 25 bp, Homo sapien
cgagccccatgccccgatccagctg

SEQ ID NO: 4751142 - DNA, 25 bp, Homo sapien
tctggacttggttcaagtggcacca

SEQ ID NO: 4751143 - DNA, 25 bp, Homo sapien
gggatgttattttgggcagtgcatc

SEQ ID NO: 4751144 - DNA, 25 bp, Homo sapien
tgcatctggacttggttcaagtggc

SEQ ID NO: 4751145 - DNA, 25 bp, Homo sapien
cttggttcaagtggcaccagccaaa

SEQ ID NO: 4751146 - DNA, 25 bp, Homo sapien
ggacacagggatagctgagccccag

SEQ ID NO: 4751147 - DNA, 25 bp, Homo sapien
gggacacagggatagctgagcccca

SEQ ID NO: 4751148 - DNA, 25 bp, Homo sapien
ctcaaggccgccttgggagggctga

SEQ ID NO: 4751149 - DNA, 25 bp, Homo sapien
gcaggagcagcgctcaaggccgcct

SEQ ID NO: 4751150 - DNA, 25 bp, Homo sapien
tgttgggaggaccagcggtagagca

SEQ ID NO: 4751151 - DNA, 25 bp, Homo sapien
gctggagtcattcctcccacgcagt

SEQ ID NO: 4751152 - DNA, 25 bp, Homo sapien
aggagagagctgaagaccaccggca

SEQ ID NO: 4751153 - DNA, 25 bp, Homo sapien
gctgccggcttgctggagtcattcc

SEQ ID NO: 4751154 - DNA, 25 bp, Homo sapien
gaaatgagttttcagggcctcatcc

SEQ ID NO: 4751155 - DNA, 25 bp, Homo sapien
ggttaaaggtatagcacgcaaatat

SEQ ID NO: 4751156 - DNA, 25 bp, Homo sapien
cacgcaaatatgaggctggagccac

SEQ ID NO: 4751157 - DNA, 25 bp, Homo sapien
cagcttaagttagcagcaagagaac

SEQ ID NO: 4751158 - DNA, 25 bp, Homo sapien
tgtggctcaggctgccaccacttct

SEQ ID NO: 4751159 - DNA, 25 bp, Homo sapien
agttcagactccctaatgtgggcca

SEQ ID NO: 4751160 - DNA, 25 bp, Homo sapien
cagcttgactgtgctcttgtggcca

SEQ ID NO: 4751161 - DNA, 25 bp, Homo sapien
tgctgaaaccctccacttggcccat

SEQ ID NO: 4751162 - DNA, 25 bp, Homo sapien
ctgcccatctcatgccacctccact

SEQ ID NO: 4751163 - DNA, 25 bp, Homo sapien
tgcccatctcatgccacctccactc

SEQ ID NO: 4751164 - DNA, 25 bp, Homo sapien
ctctgcccatctcatgccacctcca

SEQ ID NO: 4751165 - DNA, 25 bp, Homo sapien
tctgcccatctcatgccacctccac

SEQ ID NO: 4751166 - DNA, 25 bp, Homo sapien
acatgccccacagtgcccactcttt

SEQ ID NO: 4751167 - DNA, 25 bp, Homo sapien
cactctttcagctggggcaatgctc

SEQ ID NO: 4751168 - DNA, 25 bp, Homo sapien
tccagccttcttttcttgacctgaa

SEQ ID NO: 4751169 - DNA, 25 bp, Homo sapien
tcctctaggccattcacttcctcca

SEQ ID NO: 4751170 - DNA, 25 bp, Homo sapien
cacactgcatagtaattgctcaatt

SEQ ID NO: 4751171 - DNA, 25 bp, Homo sapien
taattgctcaattgattgcttttct

SEQ ID NO: 4751172 - DNA, 25 bp, Homo sapien
cactgcatagtaattgctcaattga

SEQ ID NO: 4751173 - DNA, 25 bp, Homo sapien
gcatagtaattgctcaattgattgc

SEQ ID NO: 4751174 - DNA, 25 bp, Homo sapien
tggtggttatctgttgcttactgtg

SEQ ID NO: 4751175 - DNA, 25 bp, Homo sapien
ctgcagtgactgaacattctaggca

SEQ ID NO: 4751176 - DNA, 25 bp, Homo sapien
cacagtagattcaagaaatcttgag

SEQ ID NO: 4751177 - DNA, 25 bp, Homo sapien
gaacattctaggcacagtagattca

SEQ ID NO: 4751178 - DNA, 25 bp, Homo sapien
cagctgtgagttgaagagccgatgg

SEQ ID NO: 4751179 - DNA, 25 bp, Homo sapien
tcagctgtgagttgaagagccgatg

SEQ ID NO: 4751180 - DNA, 25 bp, Homo sapien
ctgtgagttgaagagccgatgggca

SEQ ID NO: 4751181 - DNA, 25 bp, Homo sapien
aagagccgatgggcagcaggcagac

SEQ ID NO: 4751182 - DNA, 25 bp, Homo sapien
gagctcgggccactgtatcaggtcc

SEQ ID NO: 4751183 - DNA, 25 bp, Homo sapien
aagatccaggaaatatgatgcgagg

SEQ ID NO: 4751184 - DNA, 25 bp, Homo sapien
agctcgggccactgtatcaggtcca

SEQ ID NO: 4751185 - DNA, 25 bp, Homo sapien
aaatatgatgcgaggaagatgagag

SEQ ID NO: 4751186 - DNA, 25 bp, Homo sapien
gagaaacttgatgatcaggctctga

SEQ ID NO: 4751187 - DNA, 25 bp, Homo sapien
ctgataatgaatccagagggcaatg

SEQ ID NO: 4751188 - DNA, 25 bp, Homo sapien
gaaagcacatgtttgagagggctgt

SEQ ID NO: 4751189 - DNA, 25 bp, Homo sapien
caaagcgccgatgagctgttctgga

SEQ ID NO: 4751190 - DNA, 25 bp, Homo sapien
aggacagcagttggatcctgtccct

SEQ ID NO: 4751191 - DNA, 25 bp, Homo sapien
ggacagcagttggatcctgtccctc

SEQ ID NO: 4751192 - DNA, 25 bp, Homo sapien
caggagggtgcatcctctgagagct

SEQ ID NO: 4751193 - DNA, 25 bp, Homo sapien
acaagacattccagccccatgaggg

SEQ ID NO: 4751194 - DNA, 25 bp, Homo sapien
gctgttaacccttggagcctcggag

SEQ ID NO: 4751195 - DNA, 25 bp, Homo sapien
tgttagggaaataggcaccgcccac

SEQ ID NO: 4751196 - DNA, 25 bp, Homo sapien
gccagttggcaaccctgacacaagg

SEQ ID NO: 4751197 - DNA, 25 bp, Homo sapien
gaatgcaggccagtgttgcttgagc

SEQ ID NO: 4751198 - DNA, 25 bp, Homo sapien
tcaagagagacggaaacttctgttc

SEQ ID NO: 4751199 - DNA, 25 bp, Homo sapien
tctgtgcgctggatgaattaggtgc

SEQ ID NO: 4751200 - DNA, 25 bp, Homo sapien
tgtttccaagttcaacgtcctgcag

SEQ ID NO: 4751201 - DNA, 25 bp, Homo sapien
ctctacttctctggtcgctaagcaa

SEQ ID NO: 4751202 - DNA, 25 bp, Homo sapien
cttctctggtcgctaagcaactgac

SEQ ID NO: 4751203 - DNA, 25 bp, Homo sapien
ttccaagttcaacgtcctgcagcaa

SEQ ID NO: 4751204 - DNA, 25 bp, Homo sapien
tgaagaatacataatgatctgcata

SEQ ID NO: 4751205 - DNA, 25 bp, Homo sapien
aatacataatgatctgcatagacac

SEQ ID NO: 4751206 - DNA, 25 bp, Homo sapien
agaatacataatgatctgcatagac

SEQ ID NO: 4751207 - DNA, 25 bp, Homo sapien
ctgtggtgaagaatacataatgatc

SEQ ID NO: 4751208 - DNA, 25 bp, Homo sapien
cagcacaatatttacacagatcatt

SEQ ID NO: 4751209 - DNA, 25 bp, Homo sapien
tgcggtttgttagcagcaatgacct

SEQ ID NO: 4751210 - DNA, 25 bp, Homo sapien
tttgccagatcgctaatcagttttg

SEQ ID NO: 4751211 - DNA, 25 bp, Homo sapien
tctgtttgcattctgcggtttgtta

SEQ ID NO: 4751212 - DNA, 25 bp, Homo sapien
taagccatcggaaaaagctccaaaa

SEQ ID NO: 4751213 - DNA, 25 bp, Homo sapien
taaaataagccatcggaaaaagctc

SEQ ID NO: 4751214 - DNA, 25 bp, Homo sapien
atcggaaaaagctccaaaatgggca

SEQ ID NO: 4751215 - DNA, 25 bp, Homo sapien
gccatcggaaaaagctccaaaatgg

SEQ ID NO: 4751216 - DNA, 25 bp, Homo sapien
ggtgacacttctggcagctctaggc

SEQ ID NO: 4751217 - DNA, 25 bp, Homo sapien
aaatattactcacagaatcagtagc

SEQ ID NO: 4751218 - DNA, 25 bp, Homo sapien
tattactcacagaatcagtagcatt

SEQ ID NO: 4751219 - DNA, 25 bp, Homo sapien
aatattactcacagaatcagtagca

SEQ ID NO: 4751220 - DNA, 25 bp, Homo sapien
ttactcacagaatcagtagcattca

SEQ ID NO: 4751221 - DNA, 25 bp, Homo sapien
cagaaagattgtaagaggtcagcaa

SEQ ID NO: 4751222 - DNA, 25 bp, Homo sapien
acagaaagattgtaagaggtcagca

SEQ ID NO: 4751223 - DNA, 25 bp, Homo sapien
attccattaaaggtcgtcttcttgg

SEQ ID NO: 4751224 - DNA, 25 bp, Homo sapien
cagcgtccatcaaatattccattaa

SEQ ID NO: 4751225 - DNA, 25 bp, Homo sapien
aatattccattaaaggtcgtcttct

SEQ ID NO: 4751226 - DNA, 25 bp, Homo sapien
ttcagcgtccatcaaatattccatt

SEQ ID NO: 4751227 - DNA, 25 bp, Homo sapien
tgtataacttaaaaccattaggcca

SEQ ID NO: 4751228 - DNA, 25 bp, Homo sapien
aagtttaacacatcatgatttataa

SEQ ID NO: 4751229 - DNA, 25 bp, Homo sapien
taaagtttaacacatcatgatttat

SEQ ID NO: 4751230 - DNA, 25 bp, Homo sapien
aattcaaattgtaagatcataataa

SEQ ID NO: 4751231 - DNA, 25 bp, Homo sapien
gaaataaacctcctgtgacaccaca

SEQ ID NO: 4751232 - DNA, 25 bp, Homo sapien
tcacccagacattgataggcggcag

SEQ ID NO: 4751233 - DNA, 25 bp, Homo sapien
cactatggcctacactgaagggaag

SEQ ID NO: 4751234 - DNA, 25 bp, Homo sapien
ggcacattgtaactacctggcagag

SEQ ID NO: 4751235 - DNA, 25 bp, Homo sapien
gcactaagttagatccaggtcccta

SEQ ID NO: 4751236 - DNA, 25 bp, Homo sapien
tgtgcacatgcgtttgacaaagaga

SEQ ID NO: 4751237 - DNA, 25 bp, Homo sapien
gactaagttggctcaattttcctga

SEQ ID NO: 4751238 - DNA, 25 bp, Homo sapien
caatccacaggcatacaaagtgtgt

SEQ ID NO: 4751239 - DNA, 25 bp, Homo sapien
tgcttattacgattgaggtcagact

SEQ ID NO: 4751240 - DNA, 25 bp, Homo sapien
tctgggtggacaaaccttttgggca

SEQ ID NO: 4751241 - DNA, 25 bp, Homo sapien
tagaggatgagcacactttattacc

SEQ ID NO: 4751242 - DNA, 25 bp, Homo sapien
gaaaaaacccattccatgctgtcag

SEQ ID NO: 4751243 - DNA, 25 bp, Homo sapien
caggataggaaccatctaaattgaa

SEQ ID NO: 4751244 - DNA, 25 bp, Homo sapien
aatgccccttcgtatatttttatca

SEQ ID NO: 4751245 - DNA, 25 bp, Homo sapien
ctaaattgaaaatgccccttcgtat

SEQ ID NO: 4751246 - DNA, 25 bp, Homo sapien
tgctgtgttggaatttatcaggata

SEQ ID NO: 4751247 - DNA, 25 bp, Homo sapien
cttacttcagcataaacagtacata

SEQ ID NO: 4751248 - DNA, 25 bp, Homo sapien
tcttacttcagcataaacagtacat

SEQ ID NO: 4751249 - DNA, 25 bp, Homo sapien
attcttacttcagcataaacagtac

SEQ ID NO: 4751250 - DNA, 25 bp, Homo sapien
taacaagaactatgttatataaaat

SEQ ID NO: 4751251 - DNA, 25 bp, Homo sapien
tgtagctcagtttccataggcaact

SEQ ID NO: 4751252 - DNA, 25 bp, Homo sapien
caagctaatataaatgtgcacatgc

SEQ ID NO: 4751253 - DNA, 25 bp, Homo sapien
tgacagactctttctatagctatgt

SEQ ID NO: 4751254 - DNA, 25 bp, Homo sapien
ggaaaagagatttatgccttaaaga

SEQ ID NO: 4751255 - DNA, 25 bp, Homo sapien
tgctcaggtcaaggaagattaaatc

SEQ ID NO: 4751256 - DNA, 25 bp, Homo sapien
gcattcttctgtgagtcggctcctt

SEQ ID NO: 4751257 - DNA, 25 bp, Homo sapien
taatcacaatgccattgggcaaaga

SEQ ID NO: 4751258 - DNA, 25 bp, Homo sapien
gattgtggcgggtgaggttctggag

SEQ ID NO: 4751259 - DNA, 25 bp, Homo sapien
tatcagtatgcgtaacataaaggag

SEQ ID NO: 4751260 - DNA, 25 bp, Homo sapien
tcaacaattttatcagtatgcgtaa

SEQ ID NO: 4751261 - DNA, 25 bp, Homo sapien
caattttatcagtatgcgtaacata

SEQ ID NO: 4751262 - DNA, 25 bp, Homo sapien
cagtatgcgtaacataaaggagaaa

SEQ ID NO: 4751263 - DNA, 25 bp, Homo sapien
tgacccacagggagcaaggaaaagc

SEQ ID NO: 4751264 - DNA, 25 bp, Homo sapien
tgacaaggtgattggcctgacccac

SEQ ID NO: 4751265 - DNA, 25 bp, Homo sapien
taactgattgagaccaccaacaggg

SEQ ID NO: 4751266 - DNA, 25 bp, Homo sapien
gagtgctttgttaagtggtccccga

SEQ ID NO: 4751267 - DNA, 25 bp, Homo sapien
taagagataatactattcgttaaaa

SEQ ID NO: 4751268 - DNA, 25 bp, Homo sapien
tgtatataaccagagctataggcct

SEQ ID NO: 4751269 - DNA, 25 bp, Homo sapien
ttatcagaggtaaataataagagat

SEQ ID NO: 4751270 - DNA, 25 bp, Homo sapien
caaacatttggactttatcagaggt

SEQ ID NO: 4751271 - DNA, 25 bp, Homo sapien
tgtgttcaggtttctatttatttta

SEQ ID NO: 4751272 - DNA, 25 bp, Homo sapien
gatgattgtagaggagtttagagcc

SEQ ID NO: 4751273 - DNA, 25 bp, Homo sapien
gtatttttctcacaagggaggatga

SEQ ID NO: 4751274 - DNA, 25 bp, Homo sapien
gattgtagaggagtttagagcctgc

SEQ ID NO: 4751275 - DNA, 25 bp, Homo sapien
ttgtagaggagtttagagcctgcat

SEQ ID NO: 4751276 - DNA, 25 bp, Homo sapien
caccattcctggtccttccatcttt

SEQ ID NO: 4751277 - DNA, 25 bp, Homo sapien
gaatatgtgtctttctcaactatca

SEQ ID NO: 4751278 - DNA, 25 bp, Homo sapien
ggttccaagttagcatcaccattcc

SEQ ID NO: 4751279 - DNA, 25 bp, Homo sapien
tctgcttagtcatatttaacttgtg

SEQ ID NO: 4751280 - DNA, 25 bp, Homo sapien
catggaaatgtcaagctagggtcac

SEQ ID NO: 4751281 - DNA, 25 bp, Homo sapien
gaagccatgttgtatgaaagagcag

SEQ ID NO: 4751282 - DNA, 25 bp, Homo sapien
tgacgttggctacgaaaaccaatgg

SEQ ID NO: 4751283 - DNA, 25 bp, Homo sapien
gggcactagaggtacttggctttaa

SEQ ID NO: 4751284 - DNA, 25 bp, Homo sapien
ctctgcacatgcctaaagaagataa

SEQ ID NO: 4751285 - DNA, 25 bp, Homo sapien
aacacttgatttcttagtcctgatt

SEQ ID NO: 4751286 - DNA, 25 bp, Homo sapien
tttagaaactccttgtcagcaatca

SEQ ID NO: 4751287 - DNA, 25 bp, Homo sapien
tgttatcaagcacaatcatataata

SEQ ID NO: 4751288 - DNA, 25 bp, Homo sapien
taccttgttcctactgagggcgcag

SEQ ID NO: 4751289 - DNA, 25 bp, Homo sapien
taagacatagccctagagctcctgg

SEQ ID NO: 4751290 - DNA, 25 bp, Homo sapien
tctggaattatactagggaaggcac

SEQ ID NO: 4751291 - DNA, 25 bp, Homo sapien
taaactgcaaccctcaaaggcagag

SEQ ID NO: 4751292 - DNA, 25 bp, Homo sapien
catggattcatgtaagggtggggca

SEQ ID NO: 4751293 - DNA, 25 bp, Homo sapien
ggcagggtggactgaagatctgttg

SEQ ID NO: 4751294 - DNA, 25 bp, Homo sapien
actgaagatctgttggcagggctca

SEQ ID NO: 4751295 - DNA, 25 bp, Homo sapien
tggactgaagatctgttggcagggc

SEQ ID NO: 4751296 - DNA, 25 bp, Homo sapien
agatcccatcttgggcaatacggtt

SEQ ID NO: 4751297 - DNA, 25 bp, Homo sapien
tgagatcccatcttgggcaatacgg

SEQ ID NO: 4751298 - DNA, 25 bp, Homo sapien
catgagatcccatcttgggcaatac

SEQ ID NO: 4751299 - DNA, 25 bp, Homo sapien
gagatcccatcttgggcaatacggt

SEQ ID NO: 4751300 - DNA, 25 bp, Homo sapien
gctcccgtgggatggtggagccaat

SEQ ID NO: 4751301 - DNA, 25 bp, Homo sapien
cccgtgggatggtggagccaatgaa

SEQ ID NO: 4751302 - DNA, 25 bp, Homo sapien
ccaatgaagaccaggtagatgatgc

SEQ ID NO: 4751303 - DNA, 25 bp, Homo sapien
atggtggagccaatgaagaccaggt

SEQ ID NO: 4751304 - DNA, 25 bp, Homo sapien
agaagtggtgccaccactggcaccc

SEQ ID NO: 4751305 - DNA, 25 bp, Homo sapien
actggcacccaccacaagttctccc

SEQ ID NO: 4751306 - DNA, 25 bp, Homo sapien
tagagaggcacccagaagtggtgcc

SEQ ID NO: 4751307 - DNA, 25 bp, Homo sapien
gcacccagaagtggtgccaccactg

SEQ ID NO: 4751308 - DNA, 25 bp, Homo sapien
gggaaatgttgggactcactcctgc

SEQ ID NO: 4751309 - DNA, 25 bp, Homo sapien
aatgttgggactcactcctgctccc

SEQ ID NO: 4751310 - DNA, 25 bp, Homo sapien
gaaatgttgggactcactcctgctc

SEQ ID NO: 4751311 - DNA, 25 bp, Homo sapien
gcctggggaaatgttgggactcact

SEQ ID NO: 4751312 - DNA, 25 bp, Homo sapien
ctgtgttcatgccatggtacaccct

SEQ ID NO: 4751313 - DNA, 25 bp, Homo sapien
gatgcctatcaccagtgcgtgtgtt

SEQ ID NO: 4751314 - DNA, 25 bp, Homo sapien
cctatcaccagtgcgtgtgttcctg

SEQ ID NO: 4751315 - DNA, 25 bp, Homo sapien
ttcatgccatggtacaccctgatga

SEQ ID NO: 4751316 - DNA, 25 bp, Homo sapien
tgggcccctccccaagccacaggac

SEQ ID NO: 4751317 - DNA, 25 bp, Homo sapien
ctgggcccctccccaagccacagga

SEQ ID NO: 4751318 - DNA, 25 bp, Homo sapien
agttcttgtcctgtctatccggagg

SEQ ID NO: 4751319 - DNA, 25 bp, Homo sapien
tgtctatccggagggactccctgct

SEQ ID NO: 4751320 - DNA, 25 bp, Homo sapien
tcttgtcctgtctatccggagggac

SEQ ID NO: 4751321 - DNA, 25 bp, Homo sapien
tgtcctgtctatccggagggactcc

SEQ ID NO: 4751322 - DNA, 25 bp, Homo sapien
aggaagccccgccacaatgtcatgt

SEQ ID NO: 4751323 - DNA, 25 bp, Homo sapien
aagccccgccacaatgtcatgtgat

SEQ ID NO: 4751324 - DNA, 25 bp, Homo sapien
gaagccccgccacaatgtcatgtga

SEQ ID NO: 4751325 - DNA, 25 bp, Homo sapien
tcaggaagccccgccacaatgtcat

SEQ ID NO: 4751326 - DNA, 25 bp, Homo sapien
gacactgaggtccaatctgcccata

SEQ ID NO: 4751327 - DNA, 25 bp, Homo sapien
caatctgcccatatttcataggagg

SEQ ID NO: 4751328 - DNA, 25 bp, Homo sapien
tagagggtaggagatctccaaggct

SEQ ID NO: 4751329 - DNA, 25 bp, Homo sapien
gagacacagactatcacgcgaacct

SEQ ID NO: 4751330 - DNA, 25 bp, Homo sapien
acacggcccagtgcacagttagtga

SEQ ID NO: 4751331 - DNA, 25 bp, Homo sapien
caaacaacagtgacaaacagtatga

SEQ ID NO: 4751332 - DNA, 25 bp, Homo sapien
cagggagcgagagcagaacaaacaa

SEQ ID NO: 4751333 - DNA, 25 bp, Homo sapien
caacgatggctagcgtgtatgacag

SEQ ID NO: 4751334 - DNA, 25 bp, Homo sapien
tgacagcatgctccgtgacagagtt

SEQ ID NO: 4751335 - DNA, 25 bp, Homo sapien
tgcccggtccggcagggcctgggct

SEQ ID NO: 4751336 - DNA, 25 bp, Homo sapien
ttgcccggtccggcagggcctgggc

SEQ ID NO: 4751337 - DNA, 25 bp, Homo sapien
tccggcagggcctgggctcactcac

SEQ ID NO: 4751338 - DNA, 25 bp, Homo sapien
cggtccggcagggcctgggctcact

SEQ ID NO: 4751339 - DNA, 25 bp, Homo sapien
gcactcccatggtgactccgaagcc

SEQ ID NO: 4751340 - DNA, 25 bp, Homo sapien
agccaaaacccaagttgacaccaag

SEQ ID NO: 4751341 - DNA, 25 bp, Homo sapien
tcccatggtgactccgaagccaaaa

SEQ ID NO: 4751342 - DNA, 25 bp, Homo sapien
catggtgactccgaagccaaaaccc

SEQ ID NO: 4751343 - DNA, 25 bp, Homo sapien
tgggccacggaaccaaggccgaata

SEQ ID NO: 4751344 - DNA, 25 bp, Homo sapien
atgggccacggaaccaaggccgaat

SEQ ID NO: 4751345 - DNA, 25 bp, Homo sapien
caagggagggcctctaagggggctg

SEQ ID NO: 4751346 - DNA, 25 bp, Homo sapien
gaagccccaacctcagaggagggct

SEQ ID NO: 4751347 - DNA, 25 bp, Homo sapien
gggctgcctgcccagaagccccaac

SEQ ID NO: 4751348 - DNA, 25 bp, Homo sapien
agggctcagagctcagttctagctc

SEQ ID NO: 4751349 - DNA, 25 bp, Homo sapien
tcaggcggcattcccaagctgctgc

SEQ ID NO: 4751350 - DNA, 25 bp, Homo sapien
tgccaggaacccctccctacacaca

SEQ ID NO: 4751351 - DNA, 25 bp, Homo sapien
acagtggggccctaactgtcttgcc

SEQ ID NO: 4751352 - DNA, 25 bp, Homo sapien
tgcttcttgcccatccctcacggct

SEQ ID NO: 4751353 - DNA, 25 bp, Homo sapien
taccctcagtctagagccactgttc

SEQ ID NO: 4751354 - DNA, 25 bp, Homo sapien
tagagccactgttcccttcagccct

SEQ ID NO: 4751355 - DNA, 25 bp, Homo sapien
tgtgctatcctctccctctgcagag

SEQ ID NO: 4751356 - DNA, 25 bp, Homo sapien
cagtctagagccactgttcccttca

SEQ ID NO: 4751357 - DNA, 25 bp, Homo sapien
gctctgttgaaggttcgccatctca

SEQ ID NO: 4751358 - DNA, 25 bp, Homo sapien
cacacagcctgtacatggtgagcca

SEQ ID NO: 4751359 - DNA, 25 bp, Homo sapien
ggttttaccacgtagacagtctcag

SEQ ID NO: 4751360 - DNA, 25 bp, Homo sapien
gatggcctcaaaccaaacaactgcg

SEQ ID NO: 4751361 - DNA, 25 bp, Homo sapien
aaatactggatgagcataggccggg

SEQ ID NO: 4751362 - DNA, 25 bp, Homo sapien
ggataagatacagcaggagaggaca

SEQ ID NO: 4751363 - DNA, 25 bp, Homo sapien
gaaaatgtgaaatagcccagatatg

SEQ ID NO: 4751364 - DNA, 25 bp, Homo sapien
cagagctaggctggcttcagatcca

SEQ ID NO: 4751365 - DNA, 25 bp, Homo sapien
tgacatatgtgctcatgaactcggc

SEQ ID NO: 4751366 - DNA, 25 bp, Homo sapien
catcatgacatatgtgctcatgaac

SEQ ID NO: 4751367 - DNA, 25 bp, Homo sapien
catatgtgctcatgaactcggccag

SEQ ID NO: 4751368 - DNA, 25 bp, Homo sapien
atcatgacatatgtgctcatgaact

SEQ ID NO: 4751369 - DNA, 25 bp, Homo sapien
gaccattttggagccacgggtggac

SEQ ID NO: 4751370 - DNA, 25 bp, Homo sapien
tatttcctggatctttgctatcacg

SEQ ID NO: 4751371 - DNA, 25 bp, Homo sapien
gatctttgctatcacggaccaggag

SEQ ID NO: 4751372 - DNA, 25 bp, Homo sapien
agaccattttggagccacgggtgga

SEQ ID NO: 4751373 - DNA, 25 bp, Homo sapien
atacagtggcccgagcccatggaca

SEQ ID NO: 4751374 - DNA, 25 bp, Homo sapien
tgatacagtggcccgagcccatgga

SEQ ID NO: 4751375 - DNA, 25 bp, Homo sapien
ctgatacagtggcccgagcccatgg

SEQ ID NO: 4751376 - DNA, 25 bp, Homo sapien
tacagtggcccgagcccatggacag

SEQ ID NO: 4751377 - DNA, 25 bp, Homo sapien
tagaagagatgggtaatggcaacac

SEQ ID NO: 4751378 - DNA, 25 bp, Homo sapien
tacttatgagtcaagcaccagggat

SEQ ID NO: 4751379 - DNA, 25 bp, Homo sapien
aatagggcagtcagagtaatccttg

SEQ ID NO: 4751380 - DNA, 25 bp, Homo sapien
cttgggtcactctgtttaatagaag

SEQ ID NO: 4751381 - DNA, 25 bp, Homo sapien
cgcctgtgcccagatgcttgaacca

SEQ ID NO: 4751382 - DNA, 25 bp, Homo sapien
gcctgtgcccagatgcttgaaccat

SEQ ID NO: 4751383 - DNA, 25 bp, Homo sapien
gttttgtccttcagatttgtagatg

SEQ ID NO: 4751384 - DNA, 25 bp, Homo sapien
aaaataacatccctcgtctggccag

SEQ ID NO: 4751385 - DNA, 25 bp, Homo sapien
aataacatccctcgtctggccagca

SEQ ID NO: 4751386 - DNA, 25 bp, Homo sapien
ataacatccctcgtctggccagcag

SEQ ID NO: 4751387 - DNA, 25 bp, Homo sapien
aaataacatccctcgtctggccagc

SEQ ID NO: 4751388 - DNA, 25 bp, Homo sapien
ttgccagccagggtatttgttctcc

SEQ ID NO: 4751389 - DNA, 25 bp, Homo sapien
agcttcatgattggtagtgttgacc

SEQ ID NO: 4751390 - DNA, 25 bp, Homo sapien
gatgttcttggcttaccctttacaa

SEQ ID NO: 4751391 - DNA, 25 bp, Homo sapien
gctctgtgcctaggcattgtggtga

SEQ ID NO: 4751392 - DNA, 25 bp, Homo sapien
aattctggcaccattctgaaaggca

SEQ ID NO: 4751393 - DNA, 25 bp, Homo sapien
tcctccctaagttgataagactcta

SEQ ID NO: 4751394 - DNA, 25 bp, Homo sapien
taaaagtcgtgtcaaccaggcacgg

SEQ ID NO: 4751395 - DNA, 25 bp, Homo sapien
gaaaggcagttgtgattctcactca

SEQ ID NO: 4751396 - DNA, 25 bp, Homo sapien
cacagggatagctggaaatcagtga

SEQ ID NO: 4751397 - DNA, 25 bp, Homo sapien
tcaggtctacagttcagatcagcag

SEQ ID NO: 4751398 - DNA, 25 bp, Homo sapien
gaaacacccactttaatgcagccga

SEQ ID NO: 4751399 - DNA, 25 bp, Homo sapien
cagagaacgtccagaaaaatcccac

SEQ ID NO: 4751400 - DNA, 25 bp, Homo sapien
ccattgacttcacattgaggcagtg

SEQ ID NO: 4751401 - DNA, 25 bp, Homo sapien
aatttatggcaacactctgggctgg

SEQ ID NO: 4751402 - DNA, 25 bp, Homo sapien
ttttctcactggcaaacatgggaca

SEQ ID NO: 4751403 - DNA, 25 bp, Homo sapien
caaccaagttggaattcatagcaga

SEQ ID NO: 4751404 - DNA, 25 bp, Homo sapien
tacctcgtttggcttaaagtcactg

SEQ ID NO: 4751405 - DNA, 25 bp, Homo sapien
cactggtatgaaatcagggagcaag

SEQ ID NO: 4751406 - DNA, 25 bp, Homo sapien
tgtataactgcatgactaacccctg

SEQ ID NO: 4751407 - DNA, 25 bp, Homo sapien
tggttatcacactcttctctgggta

SEQ ID NO: 4751408 - DNA, 25 bp, Homo sapien
tggaggaacagtgcctttgtcacac

SEQ ID NO: 4751409 - DNA, 25 bp, Homo sapien
actgaagctcataattcatcatgag

SEQ ID NO: 4751410 - DNA, 25 bp, Homo sapien
tgtcacacctaccagaatatactca

SEQ ID NO: 4751411 - DNA, 25 bp, Homo sapien
tgaagctcataattcatcatgagat

SEQ ID NO: 4751412 - DNA, 25 bp, Homo sapien
ttagcagcaacacagaagagaaatg

SEQ ID NO: 4751413 - DNA, 25 bp, Homo sapien
catcattagctgagatgggcaatgc

SEQ ID NO: 4751414 - DNA, 25 bp, Homo sapien
ttccagcagtacaggcatgatgtga

SEQ ID NO: 4751415 - DNA, 25 bp, Homo sapien
tggcgactggcttgatattatcatc

SEQ ID NO: 4751416 - DNA, 25 bp, Homo sapien
aatagactttcagaaggaagggcct

SEQ ID NO: 4751417 - DNA, 25 bp, Homo sapien
aagggccttccataacaaggaatgc

SEQ ID NO: 4751418 - DNA, 25 bp, Homo sapien
tcaggaatccagtcataggcaaatc

SEQ ID NO: 4751419 - DNA, 25 bp, Homo sapien
gaccctttgacagcacagggaaaga

SEQ ID NO: 4751420 - DNA, 25 bp, Homo sapien
gcctgttcattaattggtcccttgg

SEQ ID NO: 4751421 - DNA, 25 bp, Homo sapien
gtggcatacatgcaatttccatgga

SEQ ID NO: 4751422 - DNA, 25 bp, Homo sapien
aaactgagaaggcaacgtggcatac

SEQ ID NO: 4751423 - DNA, 25 bp, Homo sapien
gagtaggatgctgaaaatgtgagta

SEQ ID NO: 4751424 - DNA, 25 bp, Homo sapien
ttctacagctacatagtgaagacac

SEQ ID NO: 4751425 - DNA, 25 bp, Homo sapien
cagctacatagtgaagacactgtgc

SEQ ID NO: 4751426 - DNA, 25 bp, Homo sapien
tacttctacagctacatagtgaaga

SEQ ID NO: 4751427 - DNA, 25 bp, Homo sapien
ttatacttctacagctacatagtga

SEQ ID NO: 4751428 - DNA, 25 bp, Homo sapien
ggaagtgcacatttggagcgcattc

SEQ ID NO: 4751429 - DNA, 25 bp, Homo sapien
tttggagcgcattcaggcctaaggt

SEQ ID NO: 4751430 - DNA, 25 bp, Homo sapien
tgaggatttcattggaaacaggaat

SEQ ID NO: 4751431 - DNA, 25 bp, Homo sapien
ggagcgcattcaggcctaaggtgaa

SEQ ID NO: 4751432 - DNA, 25 bp, Homo sapien
tctactatagcctgatcattgaatt

SEQ ID NO: 4751433 - DNA, 25 bp, Homo sapien
tactggggaccatctactatagcct

SEQ ID NO: 4751434 - DNA, 25 bp, Homo sapien
ccctaagtccaaggaagacaatcag

SEQ ID NO: 4751435 - DNA, 25 bp, Homo sapien
ttccctaagtccaaggaagacaatc

SEQ ID NO: 4751436 - DNA, 25 bp, Homo sapien
cctggtgtgctacagttcatctaga

SEQ ID NO: 4751437 - DNA, 25 bp, Homo sapien
gattcgggcactcttctgtatgtac

SEQ ID NO: 4751438 - DNA, 25 bp, Homo sapien
gaacaaatctacatcaggaactggg

SEQ ID NO: 4751439 - DNA, 25 bp, Homo sapien
tctagatgcacacttatgattcggg

SEQ ID NO: 4751440 - DNA, 25 bp, Homo sapien
ctgtagaaccctgcttccttggaac

SEQ ID NO: 4751441 - DNA, 25 bp, Homo sapien
tgaactggggtaccttgcccttcag

SEQ ID NO: 4751442 - DNA, 25 bp, Homo sapien
gacttggtgccctgctttccaggga

SEQ ID NO: 4751443 - DNA, 25 bp, Homo sapien
acctgccagggatgagccaacatgg

SEQ ID NO: 4751444 - DNA, 25 bp, Homo sapien
cagttaagctgcaaggtataaactc

SEQ ID NO: 4751445 - DNA, 25 bp, Homo sapien
tagagtacttgcaagagcaatcaga

SEQ ID NO: 4751446 - DNA, 25 bp, Homo sapien
gcagatgacaagatcctttacgtaa

SEQ ID NO: 4751447 - DNA, 25 bp, Homo sapien
ctgtgagaactactaaatcaattca

SEQ ID NO: 4751448 - DNA, 25 bp, Homo sapien
taattttttggatatcgcaccacaa

SEQ ID NO: 4751449 - DNA, 25 bp, Homo sapien
tgtaaacataaacaaggaggactgc

SEQ ID NO: 4751450 - DNA, 25 bp, Homo sapien
catagggggaaagcctcttgacatt

SEQ ID NO: 4751451 - DNA, 25 bp, Homo sapien
tgaaaggggaacctacagactggaa

SEQ ID NO: 4751452 - DNA, 25 bp, Homo sapien
aattatagaaaagtgtctgtgtgac

SEQ ID NO: 4751453 - DNA, 25 bp, Homo sapien
atagaaaagtgtctgtgtgactccc

SEQ ID NO: 4751454 - DNA, 25 bp, Homo sapien
agaaaagtgtctgtgtgactccctg

SEQ ID NO: 4751455 - DNA, 25 bp, Homo sapien
ttatagaaaagtgtctgtgtgactc

SEQ ID NO: 4751456 - DNA, 25 bp, Homo sapien
tacagagagtccttgtttgtcttta

SEQ ID NO: 4751457 - DNA, 25 bp, Homo sapien
gttggcccgtggtccacattcctga

SEQ ID NO: 4751458 - DNA, 25 bp, Homo sapien
acaccatgggcgagcctgagttggc

SEQ ID NO: 4751459 - DNA, 25 bp, Homo sapien
tttgtctttagtctgacaccatggg

SEQ ID NO: 4751460 - DNA, 25 bp, Homo sapien
taccaagttcgcatggagacaatat

SEQ ID NO: 4751461 - DNA, 25 bp, Homo sapien
gaaacaggataccaagttcgcatgg

SEQ ID NO: 4751462 - DNA, 25 bp, Homo sapien
ggataccaagttcgcatggagacaa

SEQ ID NO: 4751463 - DNA, 25 bp, Homo sapien
caggataccaagttcgcatggagac

SEQ ID NO: 4751464 - DNA, 25 bp, Homo sapien
gctcatccgcagcttatcctcaaag

SEQ ID NO: 4751465 - DNA, 25 bp, Homo sapien
caaagctatcctggaaagctccttc

SEQ ID NO: 4751466 - DNA, 25 bp, Homo sapien
agctcagagtgctctcttgatctgc

SEQ ID NO: 4751467 - DNA, 25 bp, Homo sapien
ctcagagtgctctcttgatctgccc

SEQ ID NO: 4751468 - DNA, 25 bp, Homo sapien
tgacagttcgaatcacagcatcttc

SEQ ID NO: 4751469 - DNA, 25 bp, Homo sapien
gcatcttcaaatttggccacttcca

SEQ ID NO: 4751470 - DNA, 25 bp, Homo sapien
acagttcgaatcacagcatcttcaa

SEQ ID NO: 4751471 - DNA, 25 bp, Homo sapien
cttccaaggcagaattaaacattcc

SEQ ID NO: 4751472 - DNA, 25 bp, Homo sapien
tgctttgtcgatttttctactgagt

SEQ ID NO: 4751473 - DNA, 25 bp, Homo sapien
tttctactgagttagacaaacttgt

SEQ ID NO: 4751474 - DNA, 25 bp, Homo sapien
tactgagttagacaaacttgtgatt

SEQ ID NO: 4751475 - DNA, 25 bp, Homo sapien
caaatgctttgtcgatttttctact

SEQ ID NO: 4751476 - DNA, 25 bp, Homo sapien
tatggatttatccagatcaaggaca

SEQ ID NO: 4751477 - DNA, 25 bp, Homo sapien
ttatggatttatccagatcaaggac

SEQ ID NO: 4751478 - DNA, 25 bp, Homo sapien
tttatggatttatccagatcaagga

SEQ ID NO: 4751479 - DNA, 25 bp, Homo sapien
ttttatggatttatccagatcaagg

SEQ ID NO: 4751480 - DNA, 25 bp, Homo sapien
tcctctaatcccacaccctactgaa

SEQ ID NO: 4751481 - DNA, 25 bp, Homo sapien
ggatgtacgaagattaaaagcaaag

SEQ ID NO: 4751482 - DNA, 25 bp, Homo sapien
cctactgaaaaggatgtacgaagat

SEQ ID NO: 4751483 - DNA, 25 bp, Homo sapien
tctaatcccacaccctactgaaaag

SEQ ID NO: 4751484 - DNA, 25 bp, Homo sapien
taataacccacattcaggatatatt

SEQ ID NO: 4751485 - DNA, 25 bp, Homo sapien
tcaacttaaagtctcatgtacataa

SEQ ID NO: 4751486 - DNA, 25 bp, Homo sapien
acattcaggatatatttctcaaacc

SEQ ID NO: 4751487 - DNA, 25 bp, Homo sapien
agtctcatgtacataataacccaca

SEQ ID NO: 4751488 - DNA, 25 bp, Homo sapien
ctgtaaaagaaatcgtccaagatag

SEQ ID NO: 4751489 - DNA, 25 bp, Homo sapien
taaaagaaatcgtccaagatagtta

SEQ ID NO: 4751490 - DNA, 25 bp, Homo sapien
tgtaaaagaaatcgtccaagatagt

SEQ ID NO: 4751491 - DNA, 25 bp, Homo sapien
actgtattgccaagaaaccagttcc

SEQ ID NO: 4751492 - DNA, 25 bp, Homo sapien
gccactgacagactgtattgccaag

SEQ ID NO: 4751493 - DNA, 25 bp, Homo sapien
gacagactgtattgccaagaaacca

SEQ ID NO: 4751494 - DNA, 25 bp, Homo sapien
ttatgccactgacagactgtattgc

SEQ ID NO: 4751495 - DNA, 25 bp, Homo sapien
ttagattctagtttaacatactgga

SEQ ID NO: 4751496 - DNA, 25 bp, Homo sapien
tttagattctagtttaacatactgg

SEQ ID NO: 4751497 - DNA, 25 bp, Homo sapien
tagattctagtttaacatactggat

SEQ ID NO: 4751498 - DNA, 25 bp, Homo sapien
acagcctgtaaagtttaatctcggc

SEQ ID NO: 4751499 - DNA, 25 bp, Homo sapien
aaagtttaatctcggcaataggcaa

SEQ ID NO: 4751500 - DNA, 25 bp, Homo sapien
ctcggcaataggcaagttattgtaa

SEQ ID NO: 4751501 - DNA, 25 bp, Homo sapien
tgtaaagtttaatctcggcaatagg

SEQ ID NO: 4751502 - DNA, 25 bp, Homo sapien
ctccaccctacagaaaatatgattg

SEQ ID NO: 4751503 - DNA, 25 bp, Homo sapien
gcaccaaatacgcagcaaagggacc

SEQ ID NO: 4751504 - DNA, 25 bp, Homo sapien
accaaatacgcagcaaagggaccca

SEQ ID NO: 4751505 - DNA, 25 bp, Homo sapien
ctcaggcaccaaatacgcagcaaag

SEQ ID NO: 4751506 - DNA, 25 bp, Homo sapien
caggcaccaaatacgcagcaaaggg

SEQ ID NO: 4751507 - DNA, 25 bp, Homo sapien
tcccaggtcgaaaaccctcatactg

SEQ ID NO: 4751508 - DNA, 25 bp, Homo sapien
gtcgaaaaccctcatactgaactct

SEQ ID NO: 4751509 - DNA, 25 bp, Homo sapien
aggtcgaaaaccctcatactgaact

SEQ ID NO: 4751510 - DNA, 25 bp, Homo sapien
ccaggtcgaaaaccctcatactgaa

SEQ ID NO: 4751511 - DNA, 25 bp, Homo sapien
ccaaaaactgcttcatttctctgct

SEQ ID NO: 4751512 - DNA, 25 bp, Homo sapien
tccacttcttccaccaaaaactgct

SEQ ID NO: 4751513 - DNA, 25 bp, Homo sapien
tcttccaccaaaaactgcttcattt

SEQ ID NO: 4751514 - DNA, 25 bp, Homo sapien
ctcaaaaccttttgattccacttct

SEQ ID NO: 4751515 - DNA, 25 bp, Homo sapien
ctgaccaggatgagttttcagagca

SEQ ID NO: 4751516 - DNA, 25 bp, Homo sapien
tctcaaaagtagagaccatgtctca

SEQ ID NO: 4751517 - DNA, 25 bp, Homo sapien
tcaaatcagggagcagcgatcggaa

SEQ ID NO: 4751518 - DNA, 25 bp, Homo sapien
tcggaataggcagcattggcttgca

SEQ ID NO: 4751519 - DNA, 25 bp, Homo sapien
cttcatcatattctgcatcaaacat

SEQ ID NO: 4751520 - DNA, 25 bp, Homo sapien
tcatcaaaatatgtgctttctcctt

SEQ ID NO: 4751521 - DNA, 25 bp, Homo sapien
ctccttcatcatattctgcatcaaa

SEQ ID NO: 4751522 - DNA, 25 bp, Homo sapien
tctttctgcatttctcctttaagat

SEQ ID NO: 4751523 - DNA, 25 bp, Homo sapien
tggcactttcttcttcgtcggggtc

SEQ ID NO: 4751524 - DNA, 25 bp, Homo sapien
cactttcttcttcgtcggggtcaat

SEQ ID NO: 4751525 - DNA, 25 bp, Homo sapien
ttttctcttcttatccaaatgcttt

SEQ ID NO: 4751526 - DNA, 25 bp, Homo sapien
tctcttcttatccaaatgctttttc

SEQ ID NO: 4751527 - DNA, 25 bp, Homo sapien
ccgattttcccttgtgcacgtcctg

SEQ ID NO: 4751528 - DNA, 25 bp, Homo sapien
ttgtgcacgtcctgtttccaagtct

SEQ ID NO: 4751529 - DNA, 25 bp, Homo sapien
tcccttgtgcacgtcctgtttccaa

SEQ ID NO: 4751530 - DNA, 25 bp, Homo sapien
gtcttcaaagtcaccgtagagctcc

SEQ ID NO: 4751531 - DNA, 25 bp, Homo sapien
cccacccacgacaggcccacagtgc

SEQ ID NO: 4751532 - DNA, 25 bp, Homo sapien
gctgctctgtgagccaggcatgcat

SEQ ID NO: 4751533 - DNA, 25 bp, Homo sapien
aggcatgcatgtgctgctggcccca

SEQ ID NO: 4751534 - DNA, 25 bp, Homo sapien
cacgacaggcccacagtgcgctccg

SEQ ID NO: 4751535 - DNA, 25 bp, Homo sapien
ggtctatctgtgtcccccaaatgaa

SEQ ID NO: 4751536 - DNA, 25 bp, Homo sapien
gacactttttatgaaaggcacagag

SEQ ID NO: 4751537 - DNA, 25 bp, Homo sapien
tatgaaaggcacagaggtctatctg

SEQ ID NO: 4751538 - DNA, 25 bp, Homo sapien
tgcaaccggccaatggacacttttt

SEQ ID NO: 4751539 - DNA, 25 bp, Homo sapien
cacagctggggagtggagcctgggc

SEQ ID NO: 4751540 - DNA, 25 bp, Homo sapien
ggggagtggagcctgggcctgcgcc

SEQ ID NO: 4751541 - DNA, 25 bp, Homo sapien
cctttcacagctggggagtggagcc

SEQ ID NO: 4751542 - DNA, 25 bp, Homo sapien
tggagcctgggcctgcgcctctccg

SEQ ID NO: 4751543 - DNA, 25 bp, Homo sapien
gcctgtgcactctgggtctgtgcct

SEQ ID NO: 4751544 - DNA, 25 bp, Homo sapien
tgggtctgtgcctcagaggctgcca

SEQ ID NO: 4751545 - DNA, 25 bp, Homo sapien
caccgtggttcctgggcctgtgcac

SEQ ID NO: 4751546 - DNA, 25 bp, Homo sapien
ccaccgtggttcctgggcctgtgca

SEQ ID NO: 4751547 - DNA, 25 bp, Homo sapien
aaatgatgagctgagatgcaatgag

SEQ ID NO: 4751548 - DNA, 25 bp, Homo sapien
aatgatgagctgagatgcaatgagt

SEQ ID NO: 4751549 - DNA, 25 bp, Homo sapien
gatgagctgagatgcaatgagttga

SEQ ID NO: 4751550 - DNA, 25 bp, Homo sapien
atgatgacatgaaatgatgacataa

SEQ ID NO: 4751551 - DNA, 25 bp, Homo sapien
aaatgatgacataaaatgagatgaa

SEQ ID NO: 4751552 - DNA, 25 bp, Homo sapien
gatgacatgaaatgatgacataaaa

SEQ ID NO: 4751553 - DNA, 25 bp, Homo sapien
gagatgtgatgaaatgatgacatga

SEQ ID NO: 4751554 - DNA, 25 bp, Homo sapien
aaataaaatcgaaatgagatgagat

SEQ ID NO: 4751555 - DNA, 25 bp, Homo sapien
aaatgatgagctgagatgcaatgag

SEQ ID NO: 4751556 - DNA, 25 bp, Homo sapien
aatgatgagctgagatgcaatgagt

SEQ ID NO: 4751557 - DNA, 25 bp, Homo sapien
gatgagctgagatgcaatgagttga

SEQ ID NO: 4751558 - DNA, 25 bp, Homo sapien
aggttacccggacatagtagttgct

SEQ ID NO: 4751559 - DNA, 25 bp, Homo sapien
gcaatgtagctaccctgttgatgct

SEQ ID NO: 4751560 - DNA, 25 bp, Homo sapien
gctgtaatgaaagtattggccgtat

SEQ ID NO: 4751561 - DNA, 25 bp, Homo sapien
cctataagactgaggattgggccta

SEQ ID NO: 4751562 - DNA, 25 bp, Homo sapien
aagagaaaagtctgccacccttcac

SEQ ID NO: 4751563 - DNA, 25 bp, Homo sapien
agagttccaataaggctagcagcat

SEQ ID NO: 4751564 - DNA, 25 bp, Homo sapien
tccaatcagattctatccaaacaag

SEQ ID NO: 4751565 - DNA, 25 bp, Homo sapien
tccaaacaagactataacaaaatgt

SEQ ID NO: 4751566 - DNA, 25 bp, Homo sapien
taaggaccaaatgtctccaatcaga

SEQ ID NO: 4751567 - DNA, 25 bp, Homo sapien
tgagagcattctctggtcttgataa

SEQ ID NO: 4751568 - DNA, 25 bp, Homo sapien
gagcattctctggtcttgataagga

SEQ ID NO: 4751569 - DNA, 25 bp, Homo sapien
ctggtcttgataaggatgaggccat

SEQ ID NO: 4751570 - DNA, 25 bp, Homo sapien
tctctggtcttgataaggatgaggc

SEQ ID NO: 4751571 - DNA, 25 bp, Homo sapien
tacaagatgtaaccaaagggcctag

SEQ ID NO: 4751572 - DNA, 25 bp, Homo sapien
gagatttactgacatccctaatgaa

SEQ ID NO: 4751573 - DNA, 25 bp, Homo sapien
tggtacacatcctagttactttggg

SEQ ID NO: 4751574 - DNA, 25 bp, Homo sapien
tgaatcattcctcggcacacctaag

SEQ ID NO: 4751575 - DNA, 25 bp, Homo sapien
gtttttattggtggttaatcacata

SEQ ID NO: 4751576 - DNA, 25 bp, Homo sapien
ggttaatcacataggcatgcaatgc

SEQ ID NO: 4751577 - DNA, 25 bp, Homo sapien
taatcacataggcatgcaatgccca

SEQ ID NO: 4751578 - DNA, 25 bp, Homo sapien
tattggtggttaatcacataggcat

SEQ ID NO: 4751579 - DNA, 25 bp, Homo sapien
tatataacttctctacataagatag

SEQ ID NO: 4751580 - DNA, 25 bp, Homo sapien
cttctctacataagatagttgaatc

SEQ ID NO: 4751581 - DNA, 25 bp, Homo sapien
gatagttgaatcttaccaacaatgc

SEQ ID NO: 4751582 - DNA, 25 bp, Homo sapien
catttgattatcaatataagcatta

SEQ ID NO: 4751583 - DNA, 25 bp, Homo sapien
gttgagtctaccttaccaagttcac

SEQ ID NO: 4751584 - DNA, 25 bp, Homo sapien
tgttacagctactcaacataattgg

SEQ ID NO: 4751585 - DNA, 25 bp, Homo sapien
taagtgttattactactcaccatga

SEQ ID NO: 4751586 - DNA, 25 bp, Homo sapien
tgttgggtcctagcattatccatca

SEQ ID NO: 4751587 - DNA, 25 bp, Homo sapien
ttagactcatgaccaaattgaagtt

SEQ ID NO: 4751588 - DNA, 25 bp, Homo sapien
cataacaatctgtatgtagaagtct

SEQ ID NO: 4751589 - DNA, 25 bp, Homo sapien
gtatgtagaagtctaggttttccaa

SEQ ID NO: 4751590 - DNA, 25 bp, Homo sapien
aacaatctgtatgtagaagtctagg

SEQ ID NO: 4751591 - DNA, 25 bp, Homo sapien
tgtatgtagaagtctaggttttcca

SEQ ID NO: 4751592 - DNA, 25 bp, Homo sapien
tgacatggagaataggacagggaca

SEQ ID NO: 4751593 - DNA, 25 bp, Homo sapien
gggcattattctgcttatcacagtt

SEQ ID NO: 4751594 - DNA, 25 bp, Homo sapien
tgaaaacatggaggaaatacgctta

SEQ ID NO: 4751595 - DNA, 25 bp, Homo sapien
gtaagcttaatgtcatgtgcaacct

SEQ ID NO: 4751596 - DNA, 25 bp, Homo sapien
aatttgtttagctcctgcatatggg

SEQ ID NO: 4751597 - DNA, 25 bp, Homo sapien
ttccatgtgaccagctatagagcac

SEQ ID NO: 4751598 - DNA, 25 bp, Homo sapien
tgcatatgggtaaggacagacagta

SEQ ID NO: 4751599 - DNA, 25 bp, Homo sapien
caggtgtacaatgcgtaatgatcaa

SEQ ID NO: 4751600 - DNA, 25 bp, Homo sapien
ttttgaacatcaagaaagaaggaag

SEQ ID NO: 4751601 - DNA, 25 bp, Homo sapien
gcaagcttaccattaaatgtttact

SEQ ID NO: 4751602 - DNA, 25 bp, Homo sapien
gatatattaatagaattagcagaaa

SEQ ID NO: 4751603 - DNA, 25 bp, Homo sapien
ggaattttgaacatcaagaaagaag

SEQ ID NO: 4751604 - DNA, 25 bp, Homo sapien
gcacctgcactacctttgtggtgta

SEQ ID NO: 4751605 - DNA, 25 bp, Homo sapien
gacagcacccatgggaatgcacctg

SEQ ID NO: 4751606 - DNA, 25 bp, Homo sapien
agggactgtcccaattatgtttcaa

SEQ ID NO: 4751607 - DNA, 25 bp, Homo sapien
catgaaagctcgagtagcacacagt

SEQ ID NO: 4751608 - DNA, 25 bp, Homo sapien
tgaggagactgcaacactaataata

SEQ ID NO: 4751609 - DNA, 25 bp, Homo sapien
ttggttgtgggacaagatcttggac

SEQ ID NO: 4751610 - DNA, 25 bp, Homo sapien
ccatttctggcaacccttgtttggg

SEQ ID NO: 4751611 - DNA, 25 bp, Homo sapien
tcttggacctcactaaattaaggag

SEQ ID NO: 4751612 - DNA, 25 bp, Homo sapien
aacacagttccaaatgatctatgga

SEQ ID NO: 4751613 - DNA, 25 bp, Homo sapien
caataacttacacttgtatctcaag

SEQ ID NO: 4751614 - DNA, 25 bp, Homo sapien
caaaatataggaaatacagctaagg

SEQ ID NO: 4751615 - DNA, 25 bp, Homo sapien
ggctgtggtgggaaagaaatttata

SEQ ID NO: 4751616 - DNA, 25 bp, Homo sapien
ccatagtgagatatttctacacacc

SEQ ID NO: 4751617 - DNA, 25 bp, Homo sapien
catcatggacatgtcaaataaaacc

SEQ ID NO: 4751618 - DNA, 25 bp, Homo sapien
gacatcaatggacgttttaacaaga

SEQ ID NO: 4751619 - DNA, 25 bp, Homo sapien
tgcaaatgatccaattaggtaatgg

SEQ ID NO: 4751620 - DNA, 25 bp, Homo sapien
ttaattgggcaggtatcatgagccg

SEQ ID NO: 4751621 - DNA, 25 bp, Homo sapien
gagtacactgcagccgagaacaaga

SEQ ID NO: 4751622 - DNA, 25 bp, Homo sapien
gatccgctttgggtgcctgaaagcc

SEQ ID NO: 4751623 - DNA, 25 bp, Homo sapien
tggccaaatgccttcaaaaaagatg

SEQ ID NO: 4751624 - DNA, 25 bp, Homo sapien
tgcgcgaggcgcgagcggtttctcc

SEQ ID NO: 4751625 - DNA, 25 bp, Homo sapien
cagcctatctgtcaggagcggagcg

SEQ ID NO: 4751626 - DNA, 25 bp, Homo sapien
atgatgaaaccccaggcagagacgg

SEQ ID NO: 4751627 - DNA, 25 bp, Homo sapien
tcgcaaagggccgaccatgatgatg

SEQ ID NO: 4751628 - DNA, 25 bp, Homo sapien
catgcgcgaggctctagtggcttct

SEQ ID NO: 4751629 - DNA, 25 bp, Homo sapien
cccttcacagtggttccttcggttg

SEQ ID NO: 4751630 - DNA, 25 bp, Homo sapien
gccgccatccgagatctcgaggaca

SEQ ID NO: 4751631 - DNA, 25 bp, Homo sapien
gacgtgaacgtctccggattccagg

SEQ ID NO: 4751632 - DNA, 25 bp, Homo sapien
tatatcaccgttccactgccagggt

SEQ ID NO: 4751633 - DNA, 25 bp, Homo sapien
tgttgaagacattgggcgtcagcga

SEQ ID NO: 4751634 - DNA, 25 bp, Homo sapien
cagcgagaggcattgaggcacttga

SEQ ID NO: 4751635 - DNA, 25 bp, Homo sapien
gcggccaggcgggatatatcaccgt

SEQ ID NO: 4751636 - DNA, 25 bp, Homo sapien
cggactctgcgtcgggtttcctcac

SEQ ID NO: 4751637 - DNA, 25 bp, Homo sapien
caccaacaccgtccagagaggcctg

SEQ ID NO: 4751638 - DNA, 25 bp, Homo sapien
tctccggactctgcgtcgggtttcc

SEQ ID NO: 4751639 - DNA, 25 bp, Homo sapien
cttctccggactctgcgtcgggttt

SEQ ID NO: 4751640 - DNA, 25 bp, Homo sapien
gctgcagactaggaaatgggattcc

SEQ ID NO: 4751641 - DNA, 25 bp, Homo sapien
cctagtcacagggtggattgcctct

SEQ ID NO: 4751642 - DNA, 25 bp, Homo sapien
gctttaagccttgataggagacggg

SEQ ID NO: 4751643 - DNA, 25 bp, Homo sapien
cactagacagaggagctccaaacct

SEQ ID NO: 4751644 - DNA, 25 bp, Homo sapien
gattccaggtgccttgctccagtcc

SEQ ID NO: 4751645 - DNA, 25 bp, Homo sapien
gccattccgtttacctcaagaagta

SEQ ID NO: 4751646 - DNA, 25 bp, Homo sapien
tactaaccactggtccggtcaaagc

SEQ ID NO: 4751647 - DNA, 25 bp, Homo sapien
catgttatctcctagcctggctagg

SEQ ID NO: 4751648 - DNA, 25 bp, Homo sapien
taaatacaaccacagcacatttagg

SEQ ID NO: 4751649 - DNA, 25 bp, Homo sapien
tagaactagatgtaaacatgactcc

SEQ ID NO: 4751650 - DNA, 25 bp, Homo sapien
aacagagagttatagagggagttat

SEQ ID NO: 4751651 - DNA, 25 bp, Homo sapien
tgtaagatattcctgaagcaagccc

SEQ ID NO: 4751652 - DNA, 25 bp, Homo sapien
taggatacaagtttccaggatcttt

SEQ ID NO: 4751653 - DNA, 25 bp, Homo sapien
gataaatcacccctaggaacagaat

SEQ ID NO: 4751654 - DNA, 25 bp, Homo sapien
attaggatacaagtttccaggatct

SEQ ID NO: 4751655 - DNA, 25 bp, Homo sapien
tggttgctacaataataggccaagc

SEQ ID NO: 4751656 - DNA, 25 bp, Homo sapien
cattctgcgattactgtcaggggac

SEQ ID NO: 4751657 - DNA, 25 bp, Homo sapien
gccctggacgctgggccagactgcc

SEQ ID NO: 4751658 - DNA, 25 bp, Homo sapien
cagatcgcattagcattagcgtggg

SEQ ID NO: 4751659 - DNA, 25 bp, Homo sapien
gaccgggtctctccagatcgcatta

SEQ ID NO: 4751660 - DNA, 25 bp, Homo sapien
ggacggggacatcgcggtggggcca

SEQ ID NO: 4751661 - DNA, 25 bp, Homo sapien
gccaacagcgtaggcctaaaagcaa

SEQ ID NO: 4751662 - DNA, 25 bp, Homo sapien
ggccaacttgttctatctcccacag

SEQ ID NO: 4751663 - DNA, 25 bp, Homo sapien
ggtactcgacagtttggccaacttg

SEQ ID NO: 4751664 - DNA, 25 bp, Homo sapien
cccaggtgtggagacaggtactcga

SEQ ID NO: 4751665 - DNA, 25 bp, Homo sapien
cagcctagtctctttgataactgaa

SEQ ID NO: 4751666 - DNA, 25 bp, Homo sapien
ttccagaggtaaatccagcctagtc

SEQ ID NO: 4751667 - DNA, 25 bp, Homo sapien
ttgtgcccaacactcggactctcag

SEQ ID NO: 4751668 - DNA, 25 bp, Homo sapien
tagcccgactcttgaacttgtgccc

SEQ ID NO: 4751669 - DNA, 25 bp, Homo sapien
aacttgggcagcgattatctggtgt

SEQ ID NO: 4751670 - DNA, 25 bp, Homo sapien
ggcagcgattatctggtgtcaaaaa

SEQ ID NO: 4751671 - DNA, 25 bp, Homo sapien
tgtgctgtgcgccatcaatctcaga

SEQ ID NO: 4751672 - DNA, 25 bp, Homo sapien
tgctgtgcgccatcaatctcagagc

SEQ ID NO: 4751673 - DNA, 25 bp, Homo sapien
gataaggcactaccttcggaacacc

SEQ ID NO: 4751674 - DNA, 25 bp, Homo sapien
ctcctcctctgccttggctaatggg

SEQ ID NO: 4751675 - DNA, 25 bp, Homo sapien
tcctcctcctctgccttggctaatg

SEQ ID NO: 4751676 - DNA, 25 bp, Homo sapien
ctcctcctcctctgccttggctaat

SEQ ID NO: 4751677 - DNA, 25 bp, Homo sapien
tcctcctcctcctctgccttggcta

SEQ ID NO: 4751678 - DNA, 25 bp, Homo sapien
ctggaatactccacttggtaaccag

SEQ ID NO: 4751679 - DNA, 25 bp, Homo sapien
tggaatactccacttggtaaccagc

SEQ ID NO: 4751680 - DNA, 25 bp, Homo sapien
ggaatactccacttggtaaccagca

SEQ ID NO: 4751681 - DNA, 25 bp, Homo sapien
gaatactccacttggtaaccagcat

SEQ ID NO: 4751682 - DNA, 25 bp, Homo sapien
ttaacaaaacctcaagtctggatag

SEQ ID NO: 4751683 - DNA, 25 bp, Homo sapien
cactgaagccttataatgttatcca

SEQ ID NO: 4751684 - DNA, 25 bp, Homo sapien
tatatgatggtggtgcttctgaaag

SEQ ID NO: 4751685 - DNA, 25 bp, Homo sapien
aattatatcataaccattggacctc

SEQ ID NO: 4751686 - DNA, 25 bp, Homo sapien
tggttgatgctgtgaggtcgttcct

SEQ ID NO: 4751687 - DNA, 25 bp, Homo sapien
tctgagtaagaggaagatattcttt

SEQ ID NO: 4751688 - DNA, 25 bp, Homo sapien
gaggtcgttcctgccttattcaact

SEQ ID NO: 4751689 - DNA, 25 bp, Homo sapien
taagaggaagatattctttgccctc

SEQ ID NO: 4751690 - DNA, 25 bp, Homo sapien
ctcagccttgcccatctccacgggc

SEQ ID NO: 4751691 - DNA, 25 bp, Homo sapien
cagccttgcccatctccacgggcat

SEQ ID NO: 4751692 - DNA, 25 bp, Homo sapien
ccctcagccttgcccatctccacgg

SEQ ID NO: 4751693 - DNA, 25 bp, Homo sapien
tcagccttgcccatctccacgggca

SEQ ID NO: 4751694 - DNA, 25 bp, Homo sapien
aagatgtatcccctggtactccaca

SEQ ID NO: 4751695 - DNA, 25 bp, Homo sapien
tgtcacagtgggataaagatgtatc

SEQ ID NO: 4751696 - DNA, 25 bp, Homo sapien
gagatgcacatcctcatatagccca

SEQ ID NO: 4751697 - DNA, 25 bp, Homo sapien
tggcagattctgtttgactcacagc

SEQ ID NO: 4751698 - DNA, 25 bp, Homo sapien
cctgcactgcctcttaattctgctt

SEQ ID NO: 4751699 - DNA, 25 bp, Homo sapien
ctgcactgcctcttaattctgcttt

SEQ ID NO: 4751700 - DNA, 25 bp, Homo sapien
cgtctgtggtattctcggctgtagc

SEQ ID NO: 4751701 - DNA, 25 bp, Homo sapien
atccatggcaaaccgtctgtggtat

SEQ ID NO: 4751702 - DNA, 25 bp, Homo sapien
gatccatggcaaaccgtctgtggta

SEQ ID NO: 4751703 - DNA, 25 bp, Homo sapien
gtctgtggtattctcggctgtagcc

SEQ ID NO: 4751704 - DNA, 25 bp, Homo sapien
ctgggaggaagttgttccagatagc

SEQ ID NO: 4751705 - DNA, 25 bp, Homo sapien
tgggaggaagttgttccagatagca

SEQ ID NO: 4751706 - DNA, 25 bp, Homo sapien
gctggctgaacggggggtaggagag

SEQ ID NO: 4751707 - DNA, 25 bp, Homo sapien
tcagtgctggctgaacggggggtag

SEQ ID NO: 4751708 - DNA, 25 bp, Homo sapien
taggagagcaccaggaacaacacac

SEQ ID NO: 4751709 - DNA, 25 bp, Homo sapien
gctgaacggggggtaggagagcacc

SEQ ID NO: 4751710 - DNA, 25 bp, Homo sapien
gcaaggaagacaccgatactcaaag

SEQ ID NO: 4751711 - DNA, 25 bp, Homo sapien
ttccatcgggctccaattctgcact

SEQ ID NO: 4751712 - DNA, 25 bp, Homo sapien
aacattgcaaggaagacaccgatac

SEQ ID NO: 4751713 - DNA, 25 bp, Homo sapien
aagacaccgatactcaaagtcacag

SEQ ID NO: 4751714 - DNA, 25 bp, Homo sapien
attaagccttcatagaggcgtgcgc

SEQ ID NO: 4751715 - DNA, 25 bp, Homo sapien
caaagaagactctgcgggagacaga

SEQ ID NO: 4751716 - DNA, 25 bp, Homo sapien
tgcgggagacagaacattaagcctt

SEQ ID NO: 4751717 - DNA, 25 bp, Homo sapien
ttcatagaggcgtgcgctggacagc

SEQ ID NO: 4751718 - DNA, 25 bp, Homo sapien
gaaacgcccttggatcccatggcaa

SEQ ID NO: 4751719 - DNA, 25 bp, Homo sapien
agaggtacctcccattggcgcctga

SEQ ID NO: 4751720 - DNA, 25 bp, Homo sapien
cttctgtacccagaatctctaggtc

SEQ ID NO: 4751721 - DNA, 25 bp, Homo sapien
ctaggtctggaggtcccaactccac

SEQ ID NO: 4751722 - DNA, 25 bp, Homo sapien
gggacctcacagattccccatccct

SEQ ID NO: 4751723 - DNA, 25 bp, Homo sapien
tgattccaggatctatagaacttca

SEQ ID NO: 4751724 - DNA, 25 bp, Homo sapien
ctcagggacctcacagattccccat

SEQ ID NO: 4751725 - DNA, 25 bp, Homo sapien
gattccaggatctatagaacttcat

SEQ ID NO: 4751726 - DNA, 25 bp, Homo sapien
acttttctccatgtgtcttaggcca

SEQ ID NO: 4751727 - DNA, 25 bp, Homo sapien
tgggttctaaacagcagtgccttcc

SEQ ID NO: 4751728 - DNA, 25 bp, Homo sapien
gaccttgcagaagagattccccaac

SEQ ID NO: 4751729 - DNA, 25 bp, Homo sapien
cacaactcttacatgggaccttgca

SEQ ID NO: 4751730 - DNA, 25 bp, Homo sapien
aaagaagtaaggtggccaggcaggc

SEQ ID NO: 4751731 - DNA, 25 bp, Homo sapien
gaaaagaagtaaggtggccaggcag

SEQ ID NO: 4751732 - DNA, 25 bp, Homo sapien
gggatagagagacctgtttataaga

SEQ ID NO: 4751733 - DNA, 25 bp, Homo sapien
aagaagtaaggtggccaggcaggca

SEQ ID NO: 4751734 - DNA, 25 bp, Homo sapien
tccgagcgcgcacagtcacaagcgc

SEQ ID NO: 4751735 - DNA, 25 bp, Homo sapien
acacacatccactccgagcgcgcac

SEQ ID NO: 4751736 - DNA, 25 bp, Homo sapien
catccgcacacacaacgcggctcgt

SEQ ID NO: 4751737 - DNA, 25 bp, Homo sapien
acacagtcaccggttgtccacatcc

SEQ ID NO: 4751738 - DNA, 25 bp, Homo sapien
gaccacctctcatataactttggga

SEQ ID NO: 4751739 - DNA, 25 bp, Homo sapien
caggtatagccatcaatttgccatc

SEQ ID NO: 4751740 - DNA, 25 bp, Homo sapien
cattcattccgatgtagtcaacact

SEQ ID NO: 4751741 - DNA, 25 bp, Homo sapien
tgggatagagcattcaatcaagaaa

SEQ ID NO: 4751742 - DNA, 25 bp, Homo sapien
gaatactatacacagtgctgagact

SEQ ID NO: 4751743 - DNA, 25 bp, Homo sapien
tgcaatggcataccaagttccaaat

SEQ ID NO: 4751744 - DNA, 25 bp, Homo sapien
tcatggattcattgaacaacccttt

SEQ ID NO: 4751745 - DNA, 25 bp, Homo sapien
ggaattggacaagttctgaacagaa

SEQ ID NO: 4751746 - DNA, 25 bp, Homo sapien
gaaaatattgtagtggcttccctcc

SEQ ID NO: 4751747 - DNA, 25 bp, Homo sapien
tgtagtcaactacacacaagctgag

SEQ ID NO: 4751748 - DNA, 25 bp, Homo sapien
taagcaggccaagagattttcacca

SEQ ID NO: 4751749 - DNA, 25 bp, Homo sapien
tatcaggctgtataactcatcatgc

SEQ ID NO: 4751750 - DNA, 25 bp, Homo sapien
aatttggtgaagagtgagctcagtc

SEQ ID NO: 4751751 - DNA, 25 bp, Homo sapien
tgtggaaacacaaagacgacaatgt

SEQ ID NO: 4751752 - DNA, 25 bp, Homo sapien
cacaagcaggtaatattctctccaa

SEQ ID NO: 4751753 - DNA, 25 bp, Homo sapien
gcttgagcaattccaaaggatccca

SEQ ID NO: 4751754 - DNA, 25 bp, Homo sapien
cttagtggggatgtctcctttgctt

SEQ ID NO: 4751755 - DNA, 25 bp, Homo sapien
tagtggggatgtctcctttgctttc

SEQ ID NO: 4751756 - DNA, 25 bp, Homo sapien
gtggggatgtctcctttgctttctt

SEQ ID NO: 4751757 - DNA, 25 bp, Homo sapien
ttaaaaggacaggtgatctcttagt

SEQ ID NO: 4751758 - DNA, 25 bp, Homo sapien
gccagcttaccccattgagcagctg

SEQ ID NO: 4751759 - DNA, 25 bp, Homo sapien
ttgccagccagcttaccccattgag

SEQ ID NO: 4751760 - DNA, 25 bp, Homo sapien
caaggccctggtgaactgattaatc

SEQ ID NO: 4751761 - DNA, 25 bp, Homo sapien
gccctggtgaactgattaatcacag

SEQ ID NO: 4751762 - DNA, 25 bp, Homo sapien
atagaggatggctctctgctgctgc

SEQ ID NO: 4751763 - DNA, 25 bp, Homo sapien
ctagctgcttatagaggatggctct

SEQ ID NO: 4751764 - DNA, 25 bp, Homo sapien
tagctgcttatagaggatggctctc

SEQ ID NO: 4751765 - DNA, 25 bp, Homo sapien
gaggatggctctctgctgctgcaac

SEQ ID NO: 4751766 - DNA, 25 bp, Homo sapien
atttgacaaagcaagtgaggtccct

SEQ ID NO: 4751767 - DNA, 25 bp, Homo sapien
catttgacaaagcaagtgaggtccc

SEQ ID NO: 4751768 - DNA, 25 bp, Homo sapien
atggggccatttgacaaagcaagtg

SEQ ID NO: 4751769 - DNA, 25 bp, Homo sapien
ctagtataatggggccatttgacaa

SEQ ID NO: 4751770 - DNA, 25 bp, Homo sapien
caaatttctcaaatggaagattcac

SEQ ID NO: 4751771 - DNA, 25 bp, Homo sapien
ccagtgccaaatttctcaaatggaa

SEQ ID NO: 4751772 - DNA, 25 bp, Homo sapien
gtgccaaatttctcaaatggaagat

SEQ ID NO: 4751773 - DNA, 25 bp, Homo sapien
ctgtccagtgccaaatttctcaaat

SEQ ID NO: 4751774 - DNA, 25 bp, Homo sapien
aagacagcaagggtgggcaccacct

SEQ ID NO: 4751775 - DNA, 25 bp, Homo sapien
tttcaagacagcaagggtgggcacc

SEQ ID NO: 4751776 - DNA, 25 bp, Homo sapien
tcaagacagcaagggtgggcaccac

SEQ ID NO: 4751777 - DNA, 25 bp, Homo sapien
tttttcaagacagcaagggtgggca

SEQ ID NO: 4751778 - DNA, 25 bp, Homo sapien
tcactcctaatgagacagggctctt

SEQ ID NO: 4751779 - DNA, 25 bp, Homo sapien
tgtaatgtaagcaagattctttccc

SEQ ID NO: 4751780 - DNA, 25 bp, Homo sapien
tcttggagaggtcttcgcatgactc

SEQ ID NO: 4751781 - DNA, 25 bp, Homo sapien
tcagggttttgcacaaggtaacatc

SEQ ID NO: 4751782 - DNA, 25 bp, Homo sapien
ggattccaattcaaaagctaaagac

SEQ ID NO: 4751783 - DNA, 25 bp, Homo sapien
tacaagtcagtaagaggtcttctcc

SEQ ID NO: 4751784 - DNA, 25 bp, Homo sapien
caaggaatttaatggctactgggct

SEQ ID NO: 4751785 - DNA, 25 bp, Homo sapien
tatcatttattctggttacgggtaa

SEQ ID NO: 4751786 - DNA, 25 bp, Homo sapien
tggcggtcgcctgcagttccaacta

SEQ ID NO: 4751787 - DNA, 25 bp, Homo sapien
ggtcgcctgcagttccaactactcg

SEQ ID NO: 4751788 - DNA, 25 bp, Homo sapien
gcggtcgcctgcagttccaactact

SEQ ID NO: 4751789 - DNA, 25 bp, Homo sapien
ggtggcggtcgcctgcagttccaac

SEQ ID NO: 4751790 - DNA, 25 bp, Homo sapien
ggaagttttgcagttatccatcaag

SEQ ID NO: 4751791 - DNA, 25 bp, Homo sapien
gataaatggtatacccaagagagct

SEQ ID NO: 4751792 - DNA, 25 bp, Homo sapien
tacatggagtattatcaagcaagaa

SEQ ID NO: 4751793 - DNA, 25 bp, Homo sapien
tattcacaacagcttaaattggaag

SEQ ID NO: 4751794 - DNA, 25 bp, Homo sapien
gggaacccctggcatattactgaac

SEQ ID NO: 4751795 - DNA, 25 bp, Homo sapien
taggtctgccaagagctactgaaaa

SEQ ID NO: 4751796 - DNA, 25 bp, Homo sapien
tggtatattccatggcaagcactat

SEQ ID NO: 4751797 - DNA, 25 bp, Homo sapien
tcattgtctgcccataaagagagat

SEQ ID NO: 4751798 - DNA, 25 bp, Homo sapien
gcttttgctggcaatgatttctcct

SEQ ID NO: 4751799 - DNA, 25 bp, Homo sapien
aaatgcttttgctggcaatgatttc

SEQ ID NO: 4751800 - DNA, 25 bp, Homo sapien
ggccattgttagagaaacaggtcca

SEQ ID NO: 4751801 - DNA, 25 bp, Homo sapien
acttgccgattagcaggcagtaggc

SEQ ID NO: 4751802 - DNA, 25 bp, Homo sapien
cattactttctctggcaatttgata

SEQ ID NO: 4751803 - DNA, 25 bp, Homo sapien
gaagatcattactttctctggcaat

SEQ ID NO: 4751804 - DNA, 25 bp, Homo sapien
ctgagttcagtaacagaagatcatt

SEQ ID NO: 4751805 - DNA, 25 bp, Homo sapien
gtaacagaagatcattactttctct

SEQ ID NO: 4751806 - DNA, 25 bp, Homo sapien
tggaaacgataatgtggagaaagag

SEQ ID NO: 4751807 - DNA, 25 bp, Homo sapien
gacaaaatataacaaatggaaacga

SEQ ID NO: 4751808 - DNA, 25 bp, Homo sapien
ccagggatattgaagcatcattcaa

SEQ ID NO: 4751809 - DNA, 25 bp, Homo sapien
gagaaagaggaatgttatacactgt

SEQ ID NO: 4751810 - DNA, 25 bp, Homo sapien
tccaataatctactgatattaaatg

SEQ ID NO: 4751811 - DNA, 25 bp, Homo sapien
tcttgttgtatcaattggcctatgg

SEQ ID NO: 4751812 - DNA, 25 bp, Homo sapien
tcattgttcaccattttgctgatag

SEQ ID NO: 4751813 - DNA, 25 bp, Homo sapien
tgcagtaggaacttatatcttgttg

SEQ ID NO: 4751814 - DNA, 25 bp, Homo sapien
gaaacaaagttcaatgaatccatac

SEQ ID NO: 4751815 - DNA, 25 bp, Homo sapien
ggctaagcgtgctggtatttacaca

SEQ ID NO: 4751816 - DNA, 25 bp, Homo sapien
agacctttgtcggatagttgacaag

SEQ ID NO: 4751817 - DNA, 25 bp, Homo sapien
gtatttacacacatattacttcttg

SEQ ID NO: 4751818 - DNA, 25 bp, Homo sapien
tctccttaggtttagcagtaaagac

SEQ ID NO: 4751819 - DNA, 25 bp, Homo sapien
tcatctccttaggtttagcagtaaa

SEQ ID NO: 4751820 - DNA, 25 bp, Homo sapien
catctccttaggtttagcagtaaag

SEQ ID NO: 4751821 - DNA, 25 bp, Homo sapien
ctcatctccttaggtttagcagtaa

SEQ ID NO: 4751822 - DNA, 25 bp, Homo sapien
gcttcatgggtggactgcctgttta

SEQ ID NO: 4751823 - DNA, 25 bp, Homo sapien
aaagcatgtccggttctggtggctc

SEQ ID NO: 4751824 - DNA, 25 bp, Homo sapien
tagttgtaacagagcctaatggcac

SEQ ID NO: 4751825 - DNA, 25 bp, Homo sapien
ggtcagcaagctatagcttcatggg

SEQ ID NO: 4751826 - DNA, 25 bp, Homo sapien
gcaactgccatttttagcagaaacc

SEQ ID NO: 4751827 - DNA, 25 bp, Homo sapien
ctgccatttttagcagaaaccaaaa

SEQ ID NO: 4751828 - DNA, 25 bp, Homo sapien
tcacacatactggtggcaactgcca

SEQ ID NO: 4751829 - DNA, 25 bp, Homo sapien
catttttagcagaaaccaaaactat

SEQ ID NO: 4751830 - DNA, 25 bp, Homo sapien
tgtggtctgcaatcttggaacaact

SEQ ID NO: 4751831 - DNA, 25 bp, Homo sapien
gtgtggtctgcaatcttggaacaac

SEQ ID NO: 4751832 - DNA, 25 bp, Homo sapien
cagagggcgagaggcgtgagaagca

SEQ ID NO: 4751833 - DNA, 25 bp, Homo sapien
ctagatttcgcgatgagggcagagg

SEQ ID NO: 4751834 - DNA, 25 bp, Homo sapien
ttctggaaggtctgccgacaccctc

SEQ ID NO: 4751835 - DNA, 25 bp, Homo sapien
cgagaggcgtgagaagcatcttctg

SEQ ID NO: 4751836 - DNA, 25 bp, Homo sapien
ggcctcgtgtccaccttgggacaga

SEQ ID NO: 4751837 - DNA, 25 bp, Homo sapien
tggcctcgtgtccaccttgggacag

SEQ ID NO: 4751838 - DNA, 25 bp, Homo sapien
gtggcctcgtgtccaccttgggaca

SEQ ID NO: 4751839 - DNA, 25 bp, Homo sapien
tattcagtaggggcctgagtgtcca

SEQ ID NO: 4751840 - DNA, 25 bp, Homo sapien
gacggatattcagtaggggcctgag

SEQ ID NO: 4751841 - DNA, 25 bp, Homo sapien
tcagtaggggcctgagtgtccacct

SEQ ID NO: 4751842 - DNA, 25 bp, Homo sapien
acggatattcagtaggggcctgagt

SEQ ID NO: 4751843 - DNA, 25 bp, Homo sapien
tgatatccacctggggcctggacat

SEQ ID NO: 4751844 - DNA, 25 bp, Homo sapien
atccacctggggcctggacatttgc

SEQ ID NO: 4751845 - DNA, 25 bp, Homo sapien
tatccacctggggcctggacatttg

SEQ ID NO: 4751846 - DNA, 25 bp, Homo sapien
ctgaggtgtgatatccacctggggc

SEQ ID NO: 4751847 - DNA, 25 bp, Homo sapien
cgaggaatccactcagggactggtg

SEQ ID NO: 4751848 - DNA, 25 bp, Homo sapien
cactcagggactggtgttgaactga

SEQ ID NO: 4751849 - DNA, 25 bp, Homo sapien
tggagccgaggaatccactcaggga

SEQ ID NO: 4751850 - DNA, 25 bp, Homo sapien
tggggtctgatgttcagctgaagac

SEQ ID NO: 4751851 - DNA, 25 bp, Homo sapien
tttgtccacattgggcctgatgtcc

SEQ ID NO: 4751852 - DNA, 25 bp, Homo sapien
caggcttgttgtccacctgtcacca

SEQ ID NO: 4751853 - DNA, 25 bp, Homo sapien
gcttgttgtccacctgtcaccagat

SEQ ID NO: 4751854 - DNA, 25 bp, Homo sapien
ccatcttgatcctgtttgtccacat

SEQ ID NO: 4751855 - DNA, 25 bp, Homo sapien
tgcagtaggtcatcaggccacagct

SEQ ID NO: 4751856 - DNA, 25 bp, Homo sapien
gccccaggttgatatccagttccca

SEQ ID NO: 4751857 - DNA, 25 bp, Homo sapien
ccgtaggtgagcaacaggatgcagt

SEQ ID NO: 4751858 - DNA, 25 bp, Homo sapien
taccagtccccggtgatcacaaggc

SEQ ID NO: 4751859 - DNA, 25 bp, Homo sapien
agtgacatgagtcctcccagatggc

SEQ ID NO: 4751860 - DNA, 25 bp, Homo sapien
ctaagggaggtctcccaggtgacct

SEQ ID NO: 4751861 - DNA, 25 bp, Homo sapien
tcaggtgacatgcttccatggtgac

SEQ ID NO: 4751862 - DNA, 25 bp, Homo sapien
gtgggctactacagggacatgagct

SEQ ID NO: 4751863 - DNA, 25 bp, Homo sapien
tcctcctcctgtatctgccagagga

SEQ ID NO: 4751864 - DNA, 25 bp, Homo sapien
ctcctcctgtatctgccagaggaag

SEQ ID NO: 4751865 - DNA, 25 bp, Homo sapien
cctcctcctgtatctgccagaggaa

SEQ ID NO: 4751866 - DNA, 25 bp, Homo sapien
gatgacaccctcaactctttcccag

SEQ ID NO: 4751867 - DNA, 25 bp, Homo sapien
aagcacaggaaagtttctgcgtggc

SEQ ID NO: 4751868 - DNA, 25 bp, Homo sapien
gaaagtttctgcgtggcacagaagc

SEQ ID NO: 4751869 - DNA, 25 bp, Homo sapien
caggaaagtttctgcgtggcacaga

SEQ ID NO: 4751870 - DNA, 25 bp, Homo sapien
atcacactgcaggggtcaggactca

SEQ ID NO: 4751871 - DNA, 25 bp, Homo sapien
ggaaagaaatttccgcatatcactc

SEQ ID NO: 4751872 - DNA, 25 bp, Homo sapien
aaagaaatttccgcatatcactcac

SEQ ID NO: 4751873 - DNA, 25 bp, Homo sapien
gaaagaaatttccgcatatcactca

SEQ ID NO: 4751874 - DNA, 25 bp, Homo sapien
tggaaagaaatttccgcatatcact

SEQ ID NO: 4751875 - DNA, 25 bp, Homo sapien
cactcttgccactagaaggacaatt

SEQ ID NO: 4751876 - DNA, 25 bp, Homo sapien
actcttgccactagaaggacaattt

SEQ ID NO: 4751877 - DNA, 25 bp, Homo sapien
tcactcttgccactagaaggacaat

SEQ ID NO: 4751878 - DNA, 25 bp, Homo sapien
gtcactcttgccactagaaggacaa

SEQ ID NO: 4751879 - DNA, 25 bp, Homo sapien
gatttaacagatccttgaatttact

SEQ ID NO: 4751880 - DNA, 25 bp, Homo sapien
ggcatctaatagcagttgctgaggg

SEQ ID NO: 4751881 - DNA, 25 bp, Homo sapien
gatctacttttaccagatttaacag

SEQ ID NO: 4751882 - DNA, 25 bp, Homo sapien
tgcttggcatctaatagcagttgct

SEQ ID NO: 4751883 - DNA, 25 bp, Homo sapien
ctgggccgcttggaccagaggtacc

SEQ ID NO: 4751884 - DNA, 25 bp, Homo sapien
tgggccgcttggaccagaggtacca

SEQ ID NO: 4751885 - DNA, 25 bp, Homo sapien
agctgggccgcttggaccagaggta

SEQ ID NO: 4751886 - DNA, 25 bp, Homo sapien
gctgggccgcttggaccagaggtac

SEQ ID NO: 4751887 - DNA, 25 bp, Homo sapien
gcaggagcaggtcattaagagtcac

SEQ ID NO: 4751888 - DNA, 25 bp, Homo sapien
tccgcaggagcaggtcattaagagt

SEQ ID NO: 4751889 - DNA, 25 bp, Homo sapien
gtccttccgcaggagcaggtcatta

SEQ ID NO: 4751890 - DNA, 25 bp, Homo sapien
cttccgcaggagcaggtcattaaga

SEQ ID NO: 4751891 - DNA, 25 bp, Homo sapien
aaggcattcatctggcagatgatag

SEQ ID NO: 4751892 - DNA, 25 bp, Homo sapien
ctgtatgaaaggcattcatctggca

SEQ ID NO: 4751893 - DNA, 25 bp, Homo sapien
tgaaaggcattcatctggcagatga

SEQ ID NO: 4751894 - DNA, 25 bp, Homo sapien
tatgaaaggcattcatctggcagat

SEQ ID NO: 4751895 - DNA, 25 bp, Homo sapien
ccatgctggaggagtgcttctggga

SEQ ID NO: 4751896 - DNA, 25 bp, Homo sapien
gccatgctggaggagtgcttctggg

SEQ ID NO: 4751897 - DNA, 25 bp, Homo sapien
tggcagaaactatcatcggctgtaa

SEQ ID NO: 4751898 - DNA, 25 bp, Homo sapien
cagatagatcctgaatgctctcatt

SEQ ID NO: 4751899 - DNA, 25 bp, Homo sapien
agatcctgaatgctctcattttcca

SEQ ID NO: 4751900 - DNA, 25 bp, Homo sapien
caacatggcagaaactatcatcggc

SEQ ID NO: 4751901 - DNA, 25 bp, Homo sapien
tctgaatggaaaggtcgctcagtac

SEQ ID NO: 4751902 - DNA, 25 bp, Homo sapien
tagatctgaatggaaaggtcgctca

SEQ ID NO: 4751903 - DNA, 25 bp, Homo sapien
ggtagatctgaatggaaaggtcgct

SEQ ID NO: 4751904 - DNA, 25 bp, Homo sapien
tggcaattttaaagagctgctggta

SEQ ID NO: 4751905 - DNA, 25 bp, Homo sapien
taaggcagtgttcgttgtgctttgc

SEQ ID NO: 4751906 - DNA, 25 bp, Homo sapien
tcaaagttcttaaggcagtgttcgt

SEQ ID NO: 4751907 - DNA, 25 bp, Homo sapien
catcgttggtttggtccgcgagccg

SEQ ID NO: 4751908 - DNA, 25 bp, Homo sapien
ccttgagatcatcgttggtttggtc

SEQ ID NO: 4751909 - DNA, 25 bp, Homo sapien
tgacctgcctgttgaactcatggcg

SEQ ID NO: 4751910 - DNA, 25 bp, Homo sapien
tccactgaactgtgacctgcctgtt

SEQ ID NO: 4751911 - DNA, 25 bp, Homo sapien
tgaactgtgacctgcctgttgaact

SEQ ID NO: 4751912 - DNA, 25 bp, Homo sapien
tgttgaactcatggcgcttcctccc

SEQ ID NO: 4751913 - DNA, 25 bp, Homo sapien
tgctaactcttgttgcgttggcggg

SEQ ID NO: 4751914 - DNA, 25 bp, Homo sapien
aacagcagttctgtgtaggtgctct

SEQ ID NO: 4751915 - DNA, 25 bp, Homo sapien
gccagcataggtgggccggatccct

SEQ ID NO: 4751916 - DNA, 25 bp, Homo sapien
cctgtgaccaacagcagttctgtgt

SEQ ID NO: 4751917 - DNA, 25 bp, Homo sapien
taggtgggccggatccctttgccca

SEQ ID NO: 4751918 - DNA, 25 bp, Homo sapien
tgcacacaaccgacggtaggcggtc

SEQ ID NO: 4751919 - DNA, 25 bp, Homo sapien
cacacaaccgacggtaggcggtcca

SEQ ID NO: 4751920 - DNA, 25 bp, Homo sapien
ctgcacacaaccgacggtaggcggt

SEQ ID NO: 4751921 - DNA, 25 bp, Homo sapien
gcacacaaccgacggtaggcggtcc

SEQ ID NO: 4751922 - DNA, 25 bp, Homo sapien
ctgcaaggggcagtggctcccggcc

SEQ ID NO: 4751923 - DNA, 25 bp, Homo sapien
ccgcccttcatgtacatggtgatgg

SEQ ID NO: 4751924 - DNA, 25 bp, Homo sapien
catgtacatggtgatggtcacctgg

SEQ ID NO: 4751925 - DNA, 25 bp, Homo sapien
ttcatgtacatggtgatggtcacct

SEQ ID NO: 4751926 - DNA, 25 bp, Homo sapien
ccttcatgtacatggtgatggtcac

SEQ ID NO: 4751927 - DNA, 25 bp, Homo sapien
tgaacaacaggtcggtggcaaccag

SEQ ID NO: 4751928 - DNA, 25 bp, Homo sapien
cggtggcaaccagccgcataactgt

SEQ ID NO: 4751929 - DNA, 25 bp, Homo sapien
cagcaaagtgaacaacaggtcggtg

SEQ ID NO: 4751930 - DNA, 25 bp, Homo sapien
tgttccttgcgcgacttgcacagca

SEQ ID NO: 4751931 - DNA, 25 bp, Homo sapien
cagcagattgggctccagaccaagg

SEQ ID NO: 4751932 - DNA, 25 bp, Homo sapien
ggctccagaccaaggacacattggc

SEQ ID NO: 4751933 - DNA, 25 bp, Homo sapien
gattgggctccagaccaaggacaca

SEQ ID NO: 4751934 - DNA, 25 bp, Homo sapien
tgtccagcagattgggctccagacc

SEQ ID NO: 4751935 - DNA, 25 bp, Homo sapien
ctggtggtacgcagccctggagtgc

SEQ ID NO: 4751936 - DNA, 25 bp, Homo sapien
gggttaacatgacagtggctggtgg

SEQ ID NO: 4751937 - DNA, 25 bp, Homo sapien
tgggaaggggttaacatgacagtgg

SEQ ID NO: 4751938 - DNA, 25 bp, Homo sapien
gttaacatgacagtggctggtggta

SEQ ID NO: 4751939 - DNA, 25 bp, Homo sapien
tggagatggcagaagagagacaaag

SEQ ID NO: 4751940 - DNA, 25 bp, Homo sapien
gatggcagaagagagacaaagccac

SEQ ID NO: 4751941 - DNA, 25 bp, Homo sapien
ggcagaagagagacaaagccaccat

SEQ ID NO: 4751942 - DNA, 25 bp, Homo sapien
ctggagatggcagaagagagacaaa

SEQ ID NO: 4751943 - DNA, 25 bp, Homo sapien
gtattattcccgacagattctgagt

SEQ ID NO: 4751944 - DNA, 25 bp, Homo sapien
agcctatctcactccactgacaaga

SEQ ID NO: 4751945 - DNA, 25 bp, Homo sapien
tctccagggaaaggtagctccctag

SEQ ID NO: 4751946 - DNA, 25 bp, Homo sapien
aatatttataaactgagcctcccat

SEQ ID NO: 4751947 - DNA, 25 bp, Homo sapien
catgtcaggcttgagcaggatagca

SEQ ID NO: 4751948 - DNA, 25 bp, Homo sapien
gctaattccttcttgtctgtaatga

SEQ ID NO: 4751949 - DNA, 25 bp, Homo sapien
taataatttagagagcaacagctct

SEQ ID NO: 4751950 - DNA, 25 bp, Homo sapien
aatgtgggtgggtcagcacttctgt

SEQ ID NO: 4751951 - DNA, 25 bp, Homo sapien
taattctcatgctcccaataaagac

SEQ ID NO: 4751952 - DNA, 25 bp, Homo sapien
gttaattctcatgctcccaataaag

SEQ ID NO: 4751953 - DNA, 25 bp, Homo sapien
ttaattctcatgctcccaataaaga

SEQ ID NO: 4751954 - DNA, 25 bp, Homo sapien
agtccaaaattcaatgggtcagtca

SEQ ID NO: 4751955 - DNA, 25 bp, Homo sapien
aagtccaaaattcaatgggtcagtc

SEQ ID NO: 4751956 - DNA, 25 bp, Homo sapien
caagtccaaaattcaatgggtcagt

SEQ ID NO: 4751957 - DNA, 25 bp, Homo sapien
gccatgattgggacacagggaacca

SEQ ID NO: 4751958 - DNA, 25 bp, Homo sapien
gcatcctctgaaatttaggcgtaga

SEQ ID NO: 4751959 - DNA, 25 bp, Homo sapien
cctgtgatggtttgagttgccttga

SEQ ID NO: 4751960 - DNA, 25 bp, Homo sapien
aggcccgacgcctcatgtaagctgc

SEQ ID NO: 4751961 - DNA, 25 bp, Homo sapien
gaaggagaagcgcaagcaaaggggg

SEQ ID NO: 4751962 - DNA, 25 bp, Homo sapien
gaaactttcaagcatggtagaatgt

SEQ ID NO: 4751963 - DNA, 25 bp, Homo sapien
gcaagtcaccttcttcacgaggtgg

SEQ ID NO: 4751964 - DNA, 25 bp, Homo sapien
ttcaagcatggtagaatgtgaaggg

SEQ ID NO: 4751965 - DNA, 25 bp, Homo sapien
catacctgagttttacgcttgcaaa

SEQ ID NO: 4751966 - DNA, 25 bp, Homo sapien
tattacatggtgacccatcccagct

SEQ ID NO: 4751967 - DNA, 25 bp, Homo sapien
gtgagactatcgttagcatacctga

SEQ ID NO: 4751968 - DNA, 25 bp, Homo sapien
cattaccattatacccgtgagacta

SEQ ID NO: 4751969 - DNA, 25 bp, Homo sapien
gtggcctaggaagggttctgttgtg

SEQ ID NO: 4751970 - DNA, 25 bp, Homo sapien
ctgtggcccaaacccgtgtggtcca

SEQ ID NO: 4751971 - DNA, 25 bp, Homo sapien
tatgacgttcaggattgtgtcttcc

SEQ ID NO: 4751972 - DNA, 25 bp, Homo sapien
caatgaaggcttaaatgggcgtcac

SEQ ID NO: 4751973 - DNA, 25 bp, Homo sapien
cgtcacgtatagattatatcccagg

SEQ ID NO: 4751974 - DNA, 25 bp, Homo sapien
ttaacaggaatagaagggaggtcat

SEQ ID NO: 4751975 - DNA, 25 bp, Homo sapien
ttcgaagagatgatggcgcgggacc

SEQ ID NO: 4751976 - DNA, 25 bp, Homo sapien
aggtcattcgaagagatgatggcgc

SEQ ID NO: 4751977 - DNA, 25 bp, Homo sapien
agctgatgctcctttattaacagga

SEQ ID NO: 4751978 - DNA, 25 bp, Homo sapien
agaaagagtgggaaatcatcaacta

SEQ ID NO: 4751979 - DNA, 25 bp, Homo sapien
gaaagagtgggaaatcatcaactac

SEQ ID NO: 4751980 - DNA, 25 bp, Homo sapien
ggtgtctggtgttcggaacccagag

SEQ ID NO: 4751981 - DNA, 25 bp, Homo sapien
tggtgtctggtgttcggaacccaga

SEQ ID NO: 4751982 - DNA, 25 bp, Homo sapien
gtctggtgttcggaacccagaggtc

SEQ ID NO: 4751983 - DNA, 25 bp, Homo sapien
tgtctggtgttcggaacccagaggt

SEQ ID NO: 4751984 - DNA, 25 bp, Homo sapien
catccgagcctcatgaaggtagtgg

SEQ ID NO: 4751985 - DNA, 25 bp, Homo sapien
tgagttcctgactagttggcacgat

SEQ ID NO: 4751986 - DNA, 25 bp, Homo sapien
gactagttggcacgattttagggac

SEQ ID NO: 4751987 - DNA, 25 bp, Homo sapien
cccacgcctgcttgtatcacaaata

SEQ ID NO: 4751988 - DNA, 25 bp, Homo sapien
tccgtgcctgtggacagctccgcag

SEQ ID NO: 4751989 - DNA, 25 bp, Homo sapien
tgcctataaacagcctcgcagcagg

SEQ ID NO: 4751990 - DNA, 25 bp, Homo sapien
ggtccgtgcctgtggacagctccgc

SEQ ID NO: 4751991 - DNA, 25 bp, Homo sapien
gcagggggatcatgcctataaacag

SEQ ID NO: 4751992 - DNA, 25 bp, Homo sapien
taaaacctattgaagagttctcctg

SEQ ID NO: 4751993 - DNA, 25 bp, Homo sapien
gattctaatgtgtaaccaggaaaga

SEQ ID NO: 4751994 - DNA, 25 bp, Homo sapien
gcctaaaactatgcagatttgacac

SEQ ID NO: 4751995 - DNA, 25 bp, Homo sapien
caacatacagagacactccctgaag

SEQ ID NO: 4751996 - DNA, 25 bp, Homo sapien
taatgtgattattgagcttcaacag

SEQ ID NO: 4751997 - DNA, 25 bp, Homo sapien
aggaaccacaaactaatccatccac

SEQ ID NO: 4751998 - DNA, 25 bp, Homo sapien
gaggtccgcagtaatgtgattattg

SEQ ID NO: 4751999 - DNA, 25 bp, Homo sapien
tgagcttcaacagaatacacagaag

SEQ ID NO: 4752000 - DNA, 25 bp, Homo sapien
gcaagtacgatgcatgcacactgct

SEQ ID NO: 4752001 - DNA, 25 bp, Homo sapien
ttccataatctttctgaaagtgaca

SEQ ID NO: 4752002 - DNA, 25 bp, Homo sapien
ataatctttctgaaagtgacacagc

SEQ ID NO: 4752003 - DNA, 25 bp, Homo sapien
acagcaagtacgatgcatgcacact

SEQ ID NO: 4752004 - DNA, 25 bp, Homo sapien
taatacagtactctttcaatccatg

SEQ ID NO: 4752005 - DNA, 25 bp, Homo sapien
tccctttcagacaattcattgttag

SEQ ID NO: 4752006 - DNA, 25 bp, Homo sapien
tcacttgtttggttagttagttcca

SEQ ID NO: 4752007 - DNA, 25 bp, Homo sapien
ttcaatccatgggttgtctttcaat

SEQ ID NO: 4752008 - DNA, 25 bp, Homo sapien
tcttagtgtagctaagggtctgtta

SEQ ID NO: 4752009 - DNA, 25 bp, Homo sapien
ttggcatataatcgcttaattgtcc

SEQ ID NO: 4752010 - DNA, 25 bp, Homo sapien
catttgtattcctgtacatttccta

SEQ ID NO: 4752011 - DNA, 25 bp, Homo sapien
taggttgttcgagttagatctttct

SEQ ID NO: 4752012 - DNA, 25 bp, Homo sapien
agacacaagtaaatagggctctagt

SEQ ID NO: 4752013 - DNA, 25 bp, Homo sapien
cacattctgtgtagctcctataagc

SEQ ID NO: 4752014 - DNA, 25 bp, Homo sapien
cctataagcttttaatggttgcaaa

SEQ ID NO: 4752015 - DNA, 25 bp, Homo sapien
tgttgataggtaaggagtaacttgc

SEQ ID NO: 4752016 - DNA, 25 bp, Homo sapien
tatccttcagttttggcgtggtggc

SEQ ID NO: 4752017 - DNA, 25 bp, Homo sapien
tacttgcaaaggcactgtgtggaca

SEQ ID NO: 4752018 - DNA, 25 bp, Homo sapien
cagggctgcatctaactggagaaag

SEQ ID NO: 4752019 - DNA, 25 bp, Homo sapien
tggaaaccctgtatgacctcgtgac

SEQ ID NO: 4752020 - DNA, 25 bp, Homo sapien
tgttgatcaacaaacttcctaaatg

SEQ ID NO: 4752021 - DNA, 25 bp, Homo sapien
taaacacggtatatgttgatcaaca

SEQ ID NO: 4752022 - DNA, 25 bp, Homo sapien
gccggattttcataaacacggtata

SEQ ID NO: 4752023 - DNA, 25 bp, Homo sapien
tgccatattatcttagccggatttt

SEQ ID NO: 4752024 - DNA, 25 bp, Homo sapien
gcagcagaagttagctttgtactcc

SEQ ID NO: 4752025 - DNA, 25 bp, Homo sapien
acaaaccctgctctgaagtactccg

SEQ ID NO: 4752026 - DNA, 25 bp, Homo sapien
aagtactccgcctagtggcccacag

SEQ ID NO: 4752027 - DNA, 25 bp, Homo sapien
caaggaagcttcagaagcatcaagc

SEQ ID NO: 4752028 - DNA, 25 bp, Homo sapien
ttaggagaaaattaactatcgatgc

SEQ ID NO: 4752029 - DNA, 25 bp, Homo sapien
tattttactttgatcacacaatgcc

SEQ ID NO: 4752030 - DNA, 25 bp, Homo sapien
tttcaaagctttagtaattccagaa

SEQ ID NO: 4752031 - DNA, 25 bp, Homo sapien
tttactttgatcacacaatgcctag

SEQ ID NO: 4752032 - DNA, 25 bp, Homo sapien
ggctctgctgaacctaggcccttgc

SEQ ID NO: 4752033 - DNA, 25 bp, Homo sapien
ctctgctgaacctaggcccttgctg

SEQ ID NO: 4752034 - DNA, 25 bp, Homo sapien
gctctgctgaacctaggcccttgct

SEQ ID NO: 4752035 - DNA, 25 bp, Homo sapien
gggctctgctgaacctaggcccttg

SEQ ID NO: 4752036 - DNA, 25 bp, Homo sapien
aactgaaggccggttgccgtgccaa

SEQ ID NO: 4752037 - DNA, 25 bp, Homo sapien
tgcctttgctggccgacgactcata

SEQ ID NO: 4752038 - DNA, 25 bp, Homo sapien
gtgcacatgcgacccgtcatcgtgg

SEQ ID NO: 4752039 - DNA, 25 bp, Homo sapien
tggtgcacatgcgacccgtcatcgt

SEQ ID NO: 4752040 - DNA, 25 bp, Homo sapien
tactatcacagttttattgcttttc

SEQ ID NO: 4752041 - DNA, 25 bp, Homo sapien
aatttctactatcacagttttattg

SEQ ID NO: 4752042 - DNA, 25 bp, Homo sapien
tttaatttctactatcacagtttta

SEQ ID NO: 4752043 - DNA, 25 bp, Homo sapien
actatcacagttttattgcttttca

SEQ ID NO: 4752044 - DNA, 25 bp, Homo sapien
gaaatgaccatactactcaaatcaa

SEQ ID NO: 4752045 - DNA, 25 bp, Homo sapien
gagcaatgctagaggtattacacta

SEQ ID NO: 4752046 - DNA, 25 bp, Homo sapien
aaaaagagcaatgctagaggtatta

SEQ ID NO: 4752047 - DNA, 25 bp, Homo sapien
aagagcaatgctagaggtattacac

SEQ ID NO: 4752048 - DNA, 25 bp, Homo sapien
gaggtcagttaaggcagcatccact

SEQ ID NO: 4752049 - DNA, 25 bp, Homo sapien
gacatcagtcaataagttgtacagg

SEQ ID NO: 4752050 - DNA, 25 bp, Homo sapien
tttgcaaaccatacggtctctatag

SEQ ID NO: 4752051 - DNA, 25 bp, Homo sapien
aatgtacaggcattaaaagtagctc

SEQ ID NO: 4752052 - DNA, 25 bp, Homo sapien
gccaccagggatcacgaatttaata

SEQ ID NO: 4752053 - DNA, 25 bp, Homo sapien
aatcctgactccatggtgccaccag

SEQ ID NO: 4752054 - DNA, 25 bp, Homo sapien
gatcttcgtggatgcttggaaccca

SEQ ID NO: 4752055 - DNA, 25 bp, Homo sapien
ggtttgagatgagccaatcctgact

SEQ ID NO: 4752056 - DNA, 25 bp, Homo sapien
tggatccctctcacctgtttactga

SEQ ID NO: 4752057 - DNA, 25 bp, Homo sapien
gactactgctcgtttcatcccatgc

SEQ ID NO: 4752058 - DNA, 25 bp, Homo sapien
tcatcccatgctcttgcgatggatc

SEQ ID NO: 4752059 - DNA, 25 bp, Homo sapien
cgctgcagaggaatcaccgtggact

SEQ ID NO: 4752060 - DNA, 25 bp, Homo sapien
agctctagcgggaggcagttccaca

SEQ ID NO: 4752061 - DNA, 25 bp, Homo sapien
cagcccgcagctctagcgggaggca

SEQ ID NO: 4752062 - DNA, 25 bp, Homo sapien
gagtggcctgcgctcccagacgcgc

SEQ ID NO: 4752063 - DNA, 25 bp, Homo sapien
ctagcgggaggcagttccacagcgt

SEQ ID NO: 4752064 - DNA, 25 bp, Homo sapien
ggaggcacgaatcctcaggggctcc

SEQ ID NO: 4752065 - DNA, 25 bp, Homo sapien
gggctcctcgagagggcgccaggga

SEQ ID NO: 4752066 - DNA, 25 bp, Homo sapien
aatcctcaggggctcctcgagaggg

SEQ ID NO: 4752067 - DNA, 25 bp, Homo sapien
ggctcctcgagagggcgccagggag

SEQ ID NO: 4752068 - DNA, 25 bp, Homo sapien
gcttcgctctgaccctgtctgggct

SEQ ID NO: 4752069 - DNA, 25 bp, Homo sapien
gtgctcaagggaaccgaggtgaaga

SEQ ID NO: 4752070 - DNA, 25 bp, Homo sapien
accgaggtgaagagctgggtcctgc

SEQ ID NO: 4752071 - DNA, 25 bp, Homo sapien
caggcttcgctctgaccctgtctgg

SEQ ID NO: 4752072 - DNA, 25 bp, Homo sapien
gaaacaggatagacgggcgggtgac

SEQ ID NO: 4752073 - DNA, 25 bp, Homo sapien
ctggaaacaggatagacgggcgggt

SEQ ID NO: 4752074 - DNA, 25 bp, Homo sapien
gatagacgggcgggtgacccgtgac

SEQ ID NO: 4752075 - DNA, 25 bp, Homo sapien
ggatagacgggcgggtgacccgtga

SEQ ID NO: 4752076 - DNA, 25 bp, Homo sapien
tctgatcttgtagttcattataata

SEQ ID NO: 4752077 - DNA, 25 bp, Homo sapien
agtctgatcttgtagttcattataa

SEQ ID NO: 4752078 - DNA, 25 bp, Homo sapien
gatcttgtagttcattataataact

SEQ ID NO: 4752079 - DNA, 25 bp, Homo sapien
tagtctgatcttgtagttcattata

SEQ ID NO: 4752080 - DNA, 25 bp, Homo sapien
gatctttgcttaccccaaagtcagg

SEQ ID NO: 4752081 - DNA, 25 bp, Homo sapien
gtcaggaagatattctacattgtct

SEQ ID NO: 4752082 - DNA, 25 bp, Homo sapien
tggcatggtgtgagtttggtttcaa

SEQ ID NO: 4752083 - DNA, 25 bp, Homo sapien
tcaaattaatttttggcatggtgtg

SEQ ID NO: 4752084 - DNA, 25 bp, Homo sapien
ctttacatgtttgataggatttacc

SEQ ID NO: 4752085 - DNA, 25 bp, Homo sapien
cagtgaagtcatctgaacctagagg

SEQ ID NO: 4752086 - DNA, 25 bp, Homo sapien
caaggtgatattgggtgtcataaaa

SEQ ID NO: 4752087 - DNA, 25 bp, Homo sapien
cataaaattagatgggaagtgctgt

SEQ ID NO: 4752088 - DNA, 25 bp, Homo sapien
cagccattggcaagtccctctttct

SEQ ID NO: 4752089 - DNA, 25 bp, Homo sapien
gaatggaaccattgcatttgactct

SEQ ID NO: 4752090 - DNA, 25 bp, Homo sapien
tattttttaggaatctggtgaacag

SEQ ID NO: 4752091 - DNA, 25 bp, Homo sapien
ttgtgtctggaacggaagatcctgc

SEQ ID NO: 4752092 - DNA, 25 bp, Homo sapien
taaaagtcaattctggcatccgagg

SEQ ID NO: 4752093 - DNA, 25 bp, Homo sapien
tattaccaaaactaacctgggtgca

SEQ ID NO: 4752094 - DNA, 25 bp, Homo sapien
aagcagtatcatttcgtcagcaagg

SEQ ID NO: 4752095 - DNA, 25 bp, Homo sapien
tctccaatagttgatgagggcccta

SEQ ID NO: 4752096 - DNA, 25 bp, Homo sapien
tactcttcatatgtatcttgtatag

SEQ ID NO: 4752097 - DNA, 25 bp, Homo sapien
tcatatgtatcttgtatagaattca

SEQ ID NO: 4752098 - DNA, 25 bp, Homo sapien
aattcatagcactgaagaccccagt

SEQ ID NO: 4752099 - DNA, 25 bp, Homo sapien
gaagaccccagtagaaaaattgtga

SEQ ID NO: 4752100 - DNA, 25 bp, Homo sapien
ggacaaggggcattaccagataatc

SEQ ID NO: 4752101 - DNA, 25 bp, Homo sapien
caaggggcattaccagataatctaa

SEQ ID NO: 4752102 - DNA, 25 bp, Homo sapien
atggacaaggggcattaccagataa

SEQ ID NO: 4752103 - DNA, 25 bp, Homo sapien
ggggcattaccagataatctaaaaa

SEQ ID NO: 4752104 - DNA, 25 bp, Homo sapien
gtaggcaactgaaacttaatcccgc

SEQ ID NO: 4752105 - DNA, 25 bp, Homo sapien
ttaatcccgcatgagcacgctaggg

SEQ ID NO: 4752106 - DNA, 25 bp, Homo sapien
gaggctttaaaatgtctcaacgcca

SEQ ID NO: 4752107 - DNA, 25 bp, Homo sapien
ttaataaagataggcttctcaagcc

SEQ ID NO: 4752108 - DNA, 25 bp, Homo sapien
tccccttgactgtagtcaggtgtcc

SEQ ID NO: 4752109 - DNA, 25 bp, Homo sapien
tgaatccccttgactgtagtcaggt

SEQ ID NO: 4752110 - DNA, 25 bp, Homo sapien
atttctgtgtccatgttccagggga

SEQ ID NO: 4752111 - DNA, 25 bp, Homo sapien
gtgtccatgttccaggggattcctc

SEQ ID NO: 4752112 - DNA, 25 bp, Homo sapien
aagaaatgaattccttttcttcata

SEQ ID NO: 4752113 - DNA, 25 bp, Homo sapien
ctgttatgcccctggaccttggact

SEQ ID NO: 4752114 - DNA, 25 bp, Homo sapien
tgttatgcccctggaccttggactt

SEQ ID NO: 4752115 - DNA, 25 bp, Homo sapien
tccataactgtaagaaatgaattcc

SEQ ID NO: 4752116 - DNA, 25 bp, Homo sapien
cccctttgccatcaattgggtccta

SEQ ID NO: 4752117 - DNA, 25 bp, Homo sapien
gccatcaattgggtcctaattactg

SEQ ID NO: 4752118 - DNA, 25 bp, Homo sapien
tgggtcctaattactgcagttactc

SEQ ID NO: 4752119 - DNA, 25 bp, Homo sapien
tagatcatacccctttgccatcaat

SEQ ID NO: 4752120 - DNA, 25 bp, Homo sapien
gcagacacttgctatctggaccaga

SEQ ID NO: 4752121 - DNA, 25 bp, Homo sapien
gggtctagaaatcctgcagacactt

SEQ ID NO: 4752122 - DNA, 25 bp, Homo sapien
ccaaccaaagtcaagacttgagttg

SEQ ID NO: 4752123 - DNA, 25 bp, Homo sapien
tagacaagctggtgtaagagcatgg

SEQ ID NO: 4752124 - DNA, 25 bp, Homo sapien
gtttattggtggtctagtaaataca

SEQ ID NO: 4752125 - DNA, 25 bp, Homo sapien
tacaaacctctatgctgggaactag

SEQ ID NO: 4752126 - DNA, 25 bp, Homo sapien
tgaacctaaccaatgtttattggtg

SEQ ID NO: 4752127 - DNA, 25 bp, Homo sapien
tcaaagagagcaatgattcttgccc

SEQ ID NO: 4752128 - DNA, 25 bp, Homo sapien
tgaagaccacaaatcaggcatagtt

SEQ ID NO: 4752129 - DNA, 25 bp, Homo sapien
aacagatagtatcaccagatgtctc

SEQ ID NO: 4752130 - DNA, 25 bp, Homo sapien
ttagtcgggtatatttttctttgca

SEQ ID NO: 4752131 - DNA, 25 bp, Homo sapien
aaaggagattgggtcattatgcacc

SEQ ID NO: 4752132 - DNA, 25 bp, Homo sapien
aatttctaagcaaggcctctggttt

SEQ ID NO: 4752133 - DNA, 25 bp, Homo sapien
aaatttctaagcaaggcctctggtt

SEQ ID NO: 4752134 - DNA, 25 bp, Homo sapien
gaaatttctaagcaaggcctctggt

SEQ ID NO: 4752135 - DNA, 25 bp, Homo sapien
taaacaccctacgtatcactcagga

SEQ ID NO: 4752136 - DNA, 25 bp, Homo sapien
gctttgttccctacaattctacgga

SEQ ID NO: 4752137 - DNA, 25 bp, Homo sapien
cagtagtaccctattatcagaagac

SEQ ID NO: 4752138 - DNA, 25 bp, Homo sapien
tctttaatatgaggagagtaatgcc

SEQ ID NO: 4752139 - DNA, 25 bp, Homo sapien
tgtcatctgaaactaagatcatact

SEQ ID NO: 4752140 - DNA, 25 bp, Homo sapien
cctaccttataccgtgctcaaaaat

SEQ ID NO: 4752141 - DNA, 25 bp, Homo sapien
ttatgtcatctgaaactaagatcat

SEQ ID NO: 4752142 - DNA, 25 bp, Homo sapien
ccttataccgtgctcaaaaattaat

SEQ ID NO: 4752143 - DNA, 25 bp, Homo sapien
ccataaagtttttcacggtgacatc

SEQ ID NO: 4752144 - DNA, 25 bp, Homo sapien
caaaggagacattgacgccaaaggt

SEQ ID NO: 4752145 - DNA, 25 bp, Homo sapien
gcaggggagaataagcgccagcaac

SEQ ID NO: 4752146 - DNA, 25 bp, Homo sapien
ttttcaacgcattcccaaatggagc

SEQ ID NO: 4752147 - DNA, 25 bp, Homo sapien
gccatgctggttggcatactcctcc

SEQ ID NO: 4752148 - DNA, 25 bp, Homo sapien
gctggttggcatactcctcccaaac

SEQ ID NO: 4752149 - DNA, 25 bp, Homo sapien
agggccatgctggttggcatactcc

SEQ ID NO: 4752150 - DNA, 25 bp, Homo sapien
catgctggttggcatactcctccca

SEQ ID NO: 4752151 - DNA, 25 bp, Homo sapien
ccagggagtcagaagggctcacaaa

SEQ ID NO: 4752152 - DNA, 25 bp, Homo sapien
caaagggtcagcagacagagagctt

SEQ ID NO: 4752153 - DNA, 25 bp, Homo sapien
gggtcagcagacagagagctttcct

SEQ ID NO: 4752154 - DNA, 25 bp, Homo sapien
aagggtcagcagacagagagctttc

SEQ ID NO: 4752155 - DNA, 25 bp, Homo sapien
tcaaagggtcagcagacagagagct

SEQ ID NO: 4752156 - DNA, 25 bp, Homo sapien
gggaacacagtttattgcagaattg

SEQ ID NO: 4752157 - DNA, 25 bp, Homo sapien
aacacagtttattgcagaattggct

SEQ ID NO: 4752158 - DNA, 25 bp, Homo sapien
ccaggggaacacagtttattgcaga

SEQ ID NO: 4752159 - DNA, 25 bp, Homo sapien
caggggaacacagtttattgcagaa

SEQ ID NO: 4752160 - DNA, 25 bp, Homo sapien
aagatagatatccactgggtccact

SEQ ID NO: 4752161 - DNA, 25 bp, Homo sapien
gaaggaggttaagatagatatccac

SEQ ID NO: 4752162 - DNA, 25 bp, Homo sapien
aaggaggttaagatagatatccact

SEQ ID NO: 4752163 - DNA, 25 bp, Homo sapien
tcttgtcttcctagtcgagataggt

SEQ ID NO: 4752164 - DNA, 25 bp, Homo sapien
gcatattcctcaatcgttttgctga

SEQ ID NO: 4752165 - DNA, 25 bp, Homo sapien
tcttcctagtcgagataggtcgatt

SEQ ID NO: 4752166 - DNA, 25 bp, Homo sapien
ggagatcaggacatatagcatattc

SEQ ID NO: 4752167 - DNA, 25 bp, Homo sapien
tattgttaggtatgttagcacggtc

SEQ ID NO: 4752168 - DNA, 25 bp, Homo sapien
tagcacggtcatgcagcaatgtgtc

SEQ ID NO: 4752169 - DNA, 25 bp, Homo sapien
tgtaaaacgtctacaaggagggata

SEQ ID NO: 4752170 - DNA, 25 bp, Homo sapien
ctgttgctggttaaaatttggctcc

SEQ ID NO: 4752171 - DNA, 25 bp, Homo sapien
tgccttgatcttcctgataatgcag

SEQ ID NO: 4752172 - DNA, 25 bp, Homo sapien
cctgataatgcaggagaccgcaggt

SEQ ID NO: 4752173 - DNA, 25 bp, Homo sapien
cattggcaacattaaacttcactcc

SEQ ID NO: 4752174 - DNA, 25 bp, Homo sapien
ttcactccaaactctccccctggtc

SEQ ID NO: 4752175 - DNA, 25 bp, Homo sapien
gctcactaagaagcgctgaagtcca

SEQ ID NO: 4752176 - DNA, 25 bp, Homo sapien
tatccctcttgtagatgtccttgag

SEQ ID NO: 4752177 - DNA, 25 bp, Homo sapien
cttgtagatgtccttgagatgctgc

SEQ ID NO: 4752178 - DNA, 25 bp, Homo sapien
ttaggtatccctcttgtagatgtcc

SEQ ID NO: 4752179 - DNA, 25 bp, Homo sapien
agatgtccttgagatgctgctggac

SEQ ID NO: 4752180 - DNA, 25 bp, Homo sapien
gatggccgtcctgctaaagtacctg

SEQ ID NO: 4752181 - DNA, 25 bp, Homo sapien
aggtcgatggacgacagcacgctct

SEQ ID NO: 4752182 - DNA, 25 bp, Homo sapien
ataaagttgggcaggtagttgcgct

SEQ ID NO: 4752183 - DNA, 25 bp, Homo sapien
cacgatctcgatggccgtcctgcta

SEQ ID NO: 4752184 - DNA, 25 bp, Homo sapien
tcccggagccggagggaatctgcag

SEQ ID NO: 4752185 - DNA, 25 bp, Homo sapien
cccggagccggagggaatctgcagc

SEQ ID NO: 4752186 - DNA, 25 bp, Homo sapien
agtttctccccaagttggactcact

SEQ ID NO: 4752187 - DNA, 25 bp, Homo sapien
attccagggcctgctagcccgaccc

SEQ ID NO: 4752188 - DNA, 25 bp, Homo sapien
gcctgctagcccgaccccggtgacg

SEQ ID NO: 4752189 - DNA, 25 bp, Homo sapien
tcagtttctccccaagttggactca

SEQ ID NO: 4752190 - DNA, 25 bp, Homo sapien
cacagtaagacaactgtgagtaata

SEQ ID NO: 4752191 - DNA, 25 bp, Homo sapien
tactgtcctgaaatatcctgctgct

SEQ ID NO: 4752192 - DNA, 25 bp, Homo sapien
gagtaataacacacattgtatactg

SEQ ID NO: 4752193 - DNA, 25 bp, Homo sapien
gcttataaagtgtttggtcacagta

SEQ ID NO: 4752194 - DNA, 25 bp, Homo sapien
aatcaggggagcgtgttcttctata

SEQ ID NO: 4752195 - DNA, 25 bp, Homo sapien
ttctgttggaatcaggggagcgtgt

SEQ ID NO: 4752196 - DNA, 25 bp, Homo sapien
tgttcttctataatcccctggctga

SEQ ID NO: 4752197 - DNA, 25 bp, Homo sapien
gtgttcttctataatcccctggctg

SEQ ID NO: 4752198 - DNA, 25 bp, Homo sapien
aggagggggccctacgggctgtgca

SEQ ID NO: 4752199 - DNA, 25 bp, Homo sapien
cattttctccccttcgtaaggcaag

SEQ ID NO: 4752200 - DNA, 25 bp, Homo sapien
tatgctaacattggaaaactcattt

SEQ ID NO: 4752201 - DNA, 25 bp, Homo sapien
tccccttcgtaaggcaaggtactga

SEQ ID NO: 4752202 - DNA, 25 bp, Homo sapien
ctttcccattgctcccatagggttt

SEQ ID NO: 4752203 - DNA, 25 bp, Homo sapien
gcaatttcaccattagcaaagcttt

SEQ ID NO: 4752204 - DNA, 25 bp, Homo sapien
gcctctaaataaactgttgaagtac

SEQ ID NO: 4752205 - DNA, 25 bp, Homo sapien
ctcccatagggtttcagttgtgcaa

SEQ ID NO: 4752206 - DNA, 25 bp, Homo sapien
cattgtataaagtcccctggagcca

SEQ ID NO: 4752207 - DNA, 25 bp, Homo sapien
attgtataaagtcccctggagccag

SEQ ID NO: 4752208 - DNA, 25 bp, Homo sapien
tctgcattcatgcaagcccgagcgg

SEQ ID NO: 4752209 - DNA, 25 bp, Homo sapien
catcgggtccttcctgattaaagtg

SEQ ID NO: 4752210 - DNA, 25 bp, Homo sapien
tgactcctagatgagacaagtgact

SEQ ID NO: 4752211 - DNA, 25 bp, Homo sapien
caaagacgctttctccttagggatc

SEQ ID NO: 4752212 - DNA, 25 bp, Homo sapien
ttcttcctctgctgccctcatacat

SEQ ID NO: 4752213 - DNA, 25 bp, Homo sapien
tgtttctgggctgctttgccaactc

SEQ ID NO: 4752214 - DNA, 25 bp, Homo sapien
tcactcctcctcttcatgtgtttct

SEQ ID NO: 4752215 - DNA, 25 bp, Homo sapien
ctgggctgctttgccaactcttctt

SEQ ID NO: 4752216 - DNA, 25 bp, Homo sapien
gaacacctccagcgtgcttggagct

SEQ ID NO: 4752217 - DNA, 25 bp, Homo sapien
ttcagctgctcgttctgccatctgc

SEQ ID NO: 4752218 - DNA, 25 bp, Homo sapien
gagctgcactgtcacgcttcgcccc

SEQ ID NO: 4752219 - DNA, 25 bp, Homo sapien
cacctccagcgtgcttggagctgca

SEQ ID NO: 4752220 - DNA, 25 bp, Homo sapien
aagaatagagggaacgcagaggcac

SEQ ID NO: 4752221 - DNA, 25 bp, Homo sapien
aacacctcgttttgaacttctagct

SEQ ID NO: 4752222 - DNA, 25 bp, Homo sapien
aggcatggagcagattcttcctagc

SEQ ID NO: 4752223 - DNA, 25 bp, Homo sapien
aaaggcatggagcagattcttccta

SEQ ID NO: 4752224 - DNA, 25 bp, Homo sapien
ttaacaagacacccagtttctggta

SEQ ID NO: 4752225 - DNA, 25 bp, Homo sapien
tctgttgttttaacaagacacccag

SEQ ID NO: 4752226 - DNA, 25 bp, Homo sapien
ttctgttgttttaacaagacaccca

SEQ ID NO: 4752227 - DNA, 25 bp, Homo sapien
taacaagacacccagtttctggtat

SEQ ID NO: 4752228 - DNA, 25 bp, Homo sapien
catttctgtacagcttcccatgtgc

SEQ ID NO: 4752229 - DNA, 25 bp, Homo sapien
ccccactcatttctgtacagcttcc

SEQ ID NO: 4752230 - DNA, 25 bp, Homo sapien
tcatttctgtacagcttcccatgtg

SEQ ID NO: 4752231 - DNA, 25 bp, Homo sapien
ccactcatttctgtacagcttccca

SEQ ID NO: 4752232 - DNA, 25 bp, Homo sapien
cacactgcattataaaggaccatct

SEQ ID NO: 4752233 - DNA, 25 bp, Homo sapien
tgcattataaaggaccatctcctgt

SEQ ID NO: 4752234 - DNA, 25 bp, Homo sapien
tctattgcagcacagatcacactgc

SEQ ID NO: 4752235 - DNA, 25 bp, Homo sapien
caggctcaataaaggctggtagaat

SEQ ID NO: 4752236 - DNA, 25 bp, Homo sapien
tccttgatagattaaaaactggatc

SEQ ID NO: 4752237 - DNA, 25 bp, Homo sapien
ctgttaaggcttttgataacttgtt

SEQ ID NO: 4752238 - DNA, 25 bp, Homo sapien
tgagatcctactaatctagtctttt

SEQ ID NO: 4752239 - DNA, 25 bp, Homo sapien
gggctatgaaacaaatgagatccta

SEQ ID NO: 4752240 - DNA, 25 bp, Homo sapien
catgtcaggcttgagcaggatagca

SEQ ID NO: 4752241 - DNA, 25 bp, Homo sapien
gctaattccttcttgtctgtaatga

SEQ ID NO: 4752242 - DNA, 25 bp, Homo sapien
aatgtgggtgggtcagcacttctgt

SEQ ID NO: 4752243 - DNA, 25 bp, Homo sapien
taataatttagagagcaacagctct

SEQ ID NO: 4752244 - DNA, 25 bp, Homo sapien
gttaattctcatgctcccaataaag

SEQ ID NO: 4752245 - DNA, 25 bp, Homo sapien
taattctcatgctcccaataaagac

SEQ ID NO: 4752246 - DNA, 25 bp, Homo sapien
ttaattctcatgctcccaataaaga

SEQ ID NO: 4752247 - DNA, 25 bp, Homo sapien
gcaaacaagaatcaaggcaccttct

SEQ ID NO: 4752248 - DNA, 25 bp, Homo sapien
caaacaagaatcaaggcaccttctt

SEQ ID NO: 4752249 - DNA, 25 bp, Homo sapien
gcatcctctgaaatttaggcgtaga

SEQ ID NO: 4752250 - DNA, 25 bp, Homo sapien
cctgtgatggtttgagttgccttga

SEQ ID NO: 4752251 - DNA, 25 bp, Homo sapien
aggcccgacgcctcatgtaagctgc

SEQ ID NO: 4752252 - DNA, 25 bp, Homo sapien
gccatgattgggacacagggaacca

SEQ ID NO: 4752253 - DNA, 25 bp, Homo sapien
gaaggagaagcgcaagcaaaggggg

SEQ ID NO: 4752254 - DNA, 25 bp, Homo sapien
gaaactttcaagcatggtagaatgt

SEQ ID NO: 4752255 - DNA, 25 bp, Homo sapien
gcaagtcaccttcttcacgaggtgg

SEQ ID NO: 4752256 - DNA, 25 bp, Homo sapien
ttcaagcatggtagaatgtgaaggg

SEQ ID NO: 4752257 - DNA, 25 bp, Homo sapien
tattacatggtgacccatcccagct

SEQ ID NO: 4752258 - DNA, 25 bp, Homo sapien
catacctgagttttacgcttgcaaa

SEQ ID NO: 4752259 - DNA, 25 bp, Homo sapien
gtgagactatcgttagcatacctga

SEQ ID NO: 4752260 - DNA, 25 bp, Homo sapien
cattaccattatacccgtgagacta

SEQ ID NO: 4752261 - DNA, 25 bp, Homo sapien
ctgtggcccaaacccgtgtggtcca

SEQ ID NO: 4752262 - DNA, 25 bp, Homo sapien
caatgaaggcttaaatgggcgtcac

SEQ ID NO: 4752263 - DNA, 25 bp, Homo sapien
cgtcacgtatagattatatcccagg

SEQ ID NO: 4752264 - DNA, 25 bp, Homo sapien
tatgacgttcaggattgtgtcttcc

SEQ ID NO: 4752265 - DNA, 25 bp, Homo sapien
aggtcattcgaagagatgatggcgc

SEQ ID NO: 4752266 - DNA, 25 bp, Homo sapien
ttaacaggaatagaagggaggtcat

SEQ ID NO: 4752267 - DNA, 25 bp, Homo sapien
ttcgaagagatgatggcgcgggacc

SEQ ID NO: 4752268 - DNA, 25 bp, Homo sapien
agctgatgctcctttattaacagga

SEQ ID NO: 4752269 - DNA, 25 bp, Homo sapien
gggaaatcatcaactaccctcctta

SEQ ID NO: 4752270 - DNA, 25 bp, Homo sapien
ggaaatcatcaactaccctccttac

SEQ ID NO: 4752271 - DNA, 25 bp, Homo sapien
agaaagagtgggaaatcatcaacta

SEQ ID NO: 4752272 - DNA, 25 bp, Homo sapien
aagagtgggaaatcatcaactaccc

SEQ ID NO: 4752273 - DNA, 25 bp, Homo sapien
gtctggtgttcggaacccagaggtc

SEQ ID NO: 4752274 - DNA, 25 bp, Homo sapien
ggtgtctggtgttcggaacccagag

SEQ ID NO: 4752275 - DNA, 25 bp, Homo sapien
tggtgtctggtgttcggaacccaga

SEQ ID NO: 4752276 - DNA, 25 bp, Homo sapien
tgtctggtgttcggaacccagaggt

SEQ ID NO: 4752277 - DNA, 25 bp, Homo sapien
catccgagcctcatgaaggtagtgg

SEQ ID NO: 4752278 - DNA, 25 bp, Homo sapien
tgagttcctgactagttggcacgat

SEQ ID NO: 4752279 - DNA, 25 bp, Homo sapien
gactagttggcacgattttagggac

SEQ ID NO: 4752280 - DNA, 25 bp, Homo sapien
cccacgcctgcttgtatcacaaata

SEQ ID NO: 4752281 - DNA, 25 bp, Homo sapien
tccgtgcctgtggacagctccgcag

SEQ ID NO: 4752282 - DNA, 25 bp, Homo sapien
tgcctataaacagcctcgcagcagg

SEQ ID NO: 4752283 - DNA, 25 bp, Homo sapien
ggtccgtgcctgtggacagctccgc

SEQ ID NO: 4752284 - DNA, 25 bp, Homo sapien
gcagggggatcatgcctataaacag

SEQ ID NO: 4752285 - DNA, 25 bp, Homo sapien
taaaacctattgaagagttctcctg

SEQ ID NO: 4752286 - DNA, 25 bp, Homo sapien
gcctaaaactatgcagatttgacac

SEQ ID NO: 4752287 - DNA, 25 bp, Homo sapien
gattctaatgtgtaaccaggaaaga

SEQ ID NO: 4752288 - DNA, 25 bp, Homo sapien
caacatacagagacactccctgaag

SEQ ID NO: 4752289 - DNA, 25 bp, Homo sapien
gctacaatgcatgccacaaccatgg

SEQ ID NO: 4752290 - DNA, 25 bp, Homo sapien
tatcggctgaatactcactgtgcag

SEQ ID NO: 4752291 - DNA, 25 bp, Homo sapien
ggtattctagttggacatgctacaa

SEQ ID NO: 4752292 - DNA, 25 bp, Homo sapien
tgtaaaattttggaggtccgcagta

SEQ ID NO: 4752293 - DNA, 25 bp, Homo sapien
tctcgtcagagctaatagaagcctt

SEQ ID NO: 4752294 - DNA, 25 bp, Homo sapien
tacagtgctataaagctgcttgcaa

SEQ ID NO: 4752295 - DNA, 25 bp, Homo sapien
taagaagagtaggagactagagccc

SEQ ID NO: 4752296 - DNA, 25 bp, Homo sapien
tgtgaacatacaacaagaacacctg

SEQ ID NO: 4752297 - DNA, 25 bp, Homo sapien
taatacagtactctttcaatccatg

SEQ ID NO: 4752298 - DNA, 25 bp, Homo sapien
tccctttcagacaattcattgttag

SEQ ID NO: 4752299 - DNA, 25 bp, Homo sapien
tcacttgtttggttagttagttcca

SEQ ID NO: 4752300 - DNA, 25 bp, Homo sapien
ttcaatccatgggttgtctttcaat

SEQ ID NO: 4752301 - DNA, 25 bp, Homo sapien
ttgcccatgaaagcatctgcacctg

SEQ ID NO: 4752302 - DNA, 25 bp, Homo sapien
taagtcatggtaacatcggcctcat

SEQ ID NO: 4752303 - DNA, 25 bp, Homo sapien
tcttcgtctagcttttaagtcatgg

SEQ ID NO: 4752304 - DNA, 25 bp, Homo sapien
gcatctatattcgttaaggatactg

SEQ ID NO: 4752305 - DNA, 25 bp, Homo sapien
tgttgatcaacaaacttcctaaatg

SEQ ID NO: 4752306 - DNA, 25 bp, Homo sapien
taaacacggtatatgttgatcaaca

SEQ ID NO: 4752307 - DNA, 25 bp, Homo sapien
gccggattttcataaacacggtata

SEQ ID NO: 4752308 - DNA, 25 bp, Homo sapien
tgccatattatcttagccggatttt

SEQ ID NO: 4752309 - DNA, 25 bp, Homo sapien
gcagcagaagttagctttgtactcc

SEQ ID NO: 4752310 - DNA, 25 bp, Homo sapien
acaaaccctgctctgaagtactccg

SEQ ID NO: 4752311 - DNA, 25 bp, Homo sapien
aagtactccgcctagtggcccacag

SEQ ID NO: 4752312 - DNA, 25 bp, Homo sapien
caaggaagcttcagaagcatcaagc

SEQ ID NO: 4752313 - DNA, 25 bp, Homo sapien
tttcaaagctttagtaattccagaa

SEQ ID NO: 4752314 - DNA, 25 bp, Homo sapien
ttaggagaaaattaactatcgatgc

SEQ ID NO: 4752315 - DNA, 25 bp, Homo sapien
tattttactttgatcacacaatgcc

SEQ ID NO: 4752316 - DNA, 25 bp, Homo sapien
tttactttgatcacacaatgcctag

SEQ ID NO: 4752317 - DNA, 25 bp, Homo sapien
ggctctgctgaacctaggcccttgc

SEQ ID NO: 4752318 - DNA, 25 bp, Homo sapien
ctctgctgaacctaggcccttgctg

SEQ ID NO: 4752319 - DNA, 25 bp, Homo sapien
gctctgctgaacctaggcccttgct

SEQ ID NO: 4752320 - DNA, 25 bp, Homo sapien
gggctctgctgaacctaggcccttg

SEQ ID NO: 4752321 - DNA, 25 bp, Homo sapien
tggtgcacatgcgacccgtcatcgt

SEQ ID NO: 4752322 - DNA, 25 bp, Homo sapien
gtgcacatgcgacccgtcatcgtgg

SEQ ID NO: 4752323 - DNA, 25 bp, Homo sapien
aactgaaggccggttgccgtgccaa

SEQ ID NO: 4752324 - DNA, 25 bp, Homo sapien
tgcctttgctggccgacgactcata

SEQ ID NO: 4752325 - DNA, 25 bp, Homo sapien
tactatcacagttttattgcttttc

SEQ ID NO: 4752326 - DNA, 25 bp, Homo sapien
aatttctactatcacagttttattg

SEQ ID NO: 4752327 - DNA, 25 bp, Homo sapien
tttaatttctactatcacagtttta

SEQ ID NO: 4752328 - DNA, 25 bp, Homo sapien
actatcacagttttattgcttttca

SEQ ID NO: 4752329 - DNA, 25 bp, Homo sapien
gaaggagtgatttaggctctcagtc

SEQ ID NO: 4752330 - DNA, 25 bp, Homo sapien
aatctcacagtttagtagcccaagg

SEQ ID NO: 4752331 - DNA, 25 bp, Homo sapien
gaagaaatacgtatgctctggacac

SEQ ID NO: 4752332 - DNA, 25 bp, Homo sapien
catgacttggtggtttttgctgaca

SEQ ID NO: 4752333 - DNA, 25 bp, Homo sapien
gagcaatgctagaggtattacacta

SEQ ID NO: 4752334 - DNA, 25 bp, Homo sapien
aaaaagagcaatgctagaggtatta

SEQ ID NO: 4752335 - DNA, 25 bp, Homo sapien
gaaatgaccatactactcaaatcaa

SEQ ID NO: 4752336 - DNA, 25 bp, Homo sapien
aagagcaatgctagaggtattacac

SEQ ID NO: 4752337 - DNA, 25 bp, Homo sapien
gaggtcagttaaggcagcatccact

SEQ ID NO: 4752338 - DNA, 25 bp, Homo sapien
gacatcagtcaataagttgtacagg

SEQ ID NO: 4752339 - DNA, 25 bp, Homo sapien
tttgcaaaccatacggtctctatag

SEQ ID NO: 4752340 - DNA, 25 bp, Homo sapien
aatgtacaggcattaaaagtagctc

SEQ ID NO: 4752341 - DNA, 25 bp, Homo sapien
ggaatcaccgtggactactgctcgt

SEQ ID NO: 4752342 - DNA, 25 bp, Homo sapien
ttaataatacccaccgctgcagagg

SEQ ID NO: 4752343 - DNA, 25 bp, Homo sapien
gatcttcgtggatgcttggaaccca

SEQ ID NO: 4752344 - DNA, 25 bp, Homo sapien
gccaccagggatcacgaatttaata

SEQ ID NO: 4752345 - DNA, 25 bp, Homo sapien
agctctagcgggaggcagttccaca

SEQ ID NO: 4752346 - DNA, 25 bp, Homo sapien
cagcccgcagctctagcgggaggca

SEQ ID NO: 4752347 - DNA, 25 bp, Homo sapien
gagtggcctgcgctcccagacgcgc

SEQ ID NO: 4752348 - DNA, 25 bp, Homo sapien
ctagcgggaggcagttccacagcgt

SEQ ID NO: 4752349 - DNA, 25 bp, Homo sapien
gcttcgctctgaccctgtctgggct

SEQ ID NO: 4752350 - DNA, 25 bp, Homo sapien
gtgctcaagggaaccgaggtgaaga

SEQ ID NO: 4752351 - DNA, 25 bp, Homo sapien
accgaggtgaagagctgggtcctgc

SEQ ID NO: 4752352 - DNA, 25 bp, Homo sapien
caggcttcgctctgaccctgtctgg

SEQ ID NO: 4752353 - DNA, 25 bp, Homo sapien
ctggaaacaggatagacgggcgggt

SEQ ID NO: 4752354 - DNA, 25 bp, Homo sapien
gatagacgggcgggtgacccgtgac

SEQ ID NO: 4752355 - DNA, 25 bp, Homo sapien
ggatagacgggcgggtgacccgtga

SEQ ID NO: 4752356 - DNA, 25 bp, Homo sapien
gaaacaggatagacgggcgggtgac

SEQ ID NO: 4752357 - DNA, 25 bp, Homo sapien
tctgatcttgtagttcattataata

SEQ ID NO: 4752358 - DNA, 25 bp, Homo sapien
tagtctgatcttgtagttcattata

SEQ ID NO: 4752359 - DNA, 25 bp, Homo sapien
agtctgatcttgtagttcattataa

SEQ ID NO: 4752360 - DNA, 25 bp, Homo sapien
gatcttgtagttcattataataact

SEQ ID NO: 4752361 - DNA, 25 bp, Homo sapien
gatctttgcttaccccaaagtcagg

SEQ ID NO: 4752362 - DNA, 25 bp, Homo sapien
gtcaggaagatattctacattgtct

SEQ ID NO: 4752363 - DNA, 25 bp, Homo sapien
tggcatggtgtgagtttggtttcaa

SEQ ID NO: 4752364 - DNA, 25 bp, Homo sapien
tcaaattaatttttggcatggtgtg

SEQ ID NO: 4752365 - DNA, 25 bp, Homo sapien
ccattaatccagtttcatatcttca

SEQ ID NO: 4752366 - DNA, 25 bp, Homo sapien
tgtgccagcaccactggtgtttcct

SEQ ID NO: 4752367 - DNA, 25 bp, Homo sapien
tgatagccatttgtgccagcaccac

SEQ ID NO: 4752368 - DNA, 25 bp, Homo sapien
tctggactctgttctatcgattgtc

SEQ ID NO: 4752369 - DNA, 25 bp, Homo sapien
gcaattatgtttcctgtgactatca

SEQ ID NO: 4752370 - DNA, 25 bp, Homo sapien
ggtttattatactgtccaggacttc

SEQ ID NO: 4752371 - DNA, 25 bp, Homo sapien
tcgaatcttaatgtcttgtcttgct

SEQ ID NO: 4752372 - DNA, 25 bp, Homo sapien
tcaatgtagcagtcttgcatgcctg

SEQ ID NO: 4752373 - DNA, 25 bp, Homo sapien
ctttacatgtttgataggatttacc

SEQ ID NO: 4752374 - DNA, 25 bp, Homo sapien
cagtgaagtcatctgaacctagagg

SEQ ID NO: 4752375 - DNA, 25 bp, Homo sapien
caaggtgatattgggtgtcataaaa

SEQ ID NO: 4752376 - DNA, 25 bp, Homo sapien
cataaaattagatgggaagtgctgt

SEQ ID NO: 4752377 - DNA, 25 bp, Homo sapien
tacctccaaaggttgaatgtaggcc

SEQ ID NO: 4752378 - DNA, 25 bp, Homo sapien
gacatagagacaggcaacttcagtg

SEQ ID NO: 4752379 - DNA, 25 bp, Homo sapien
tttcacagctaaaacccctgagtgg

SEQ ID NO: 4752380 - DNA, 25 bp, Homo sapien
aaattcagcttgtgcgtctgcagca

SEQ ID NO: 4752381 - DNA, 25 bp, Homo sapien
attagttattctaactgggaggcac

SEQ ID NO: 4752382 - DNA, 25 bp, Homo sapien
tattagttattctaactgggaggca

SEQ ID NO: 4752383 - DNA, 25 bp, Homo sapien
gaatggaaccattgcatttgactct

SEQ ID NO: 4752384 - DNA, 25 bp, Homo sapien
cagccattggcaagtccctctttct

SEQ ID NO: 4752385 - DNA, 25 bp, Homo sapien
tattttttaggaatctggtgaacag

SEQ ID NO: 4752386 - DNA, 25 bp, Homo sapien
ttgtgtctggaacggaagatcctgc

SEQ ID NO: 4752387 - DNA, 25 bp, Homo sapien
aattcatagcactgaagaccccagt

SEQ ID NO: 4752388 - DNA, 25 bp, Homo sapien
tcatatgtatcttgtatagaattca

SEQ ID NO: 4752389 - DNA, 25 bp, Homo sapien
ctgaagaccccagtagaaaaattgc

SEQ ID NO: 4752390 - DNA, 25 bp, Homo sapien
cccagtagaaaaattgcgaacaatc

SEQ ID NO: 4752391 - DNA, 25 bp, Homo sapien
ggacaaggggcattaccagataatc

SEQ ID NO: 4752392 - DNA, 25 bp, Homo sapien
caaggggcattaccagataatctaa

SEQ ID NO: 4752393 - DNA, 25 bp, Homo sapien
atggacaaggggcattaccagataa

SEQ ID NO: 4752394 - DNA, 25 bp, Homo sapien
ggggcattaccagataatctaaaaa

SEQ ID NO: 4752395 - DNA, 25 bp, Homo sapien
cttgggacctatgtgataaaactta

SEQ ID NO: 4752396 - DNA, 25 bp, Homo sapien
tgaagtaggtgctgacaagttgtca

SEQ ID NO: 4752397 - DNA, 25 bp, Homo sapien
aaaaagcctacctctgcacattgtt

SEQ ID NO: 4752398 - DNA, 25 bp, Homo sapien
tggtttctccagctcgaacattcta

SEQ ID NO: 4752399 - DNA, 25 bp, Homo sapien
tacatcagtgtccattctgtaagag

SEQ ID NO: 4752400 - DNA, 25 bp, Homo sapien
gttttgaacaaccaccaggcataga

SEQ ID NO: 4752401 - DNA, 25 bp, Homo sapien
caggcatagaatgtgcaaaaccaga

SEQ ID NO: 4752402 - DNA, 25 bp, Homo sapien
gagctttcttgttccttaccattcc

SEQ ID NO: 4752403 - DNA, 25 bp, Homo sapien
ttaatcccgcatgagcacgctaggg

SEQ ID NO: 4752404 - DNA, 25 bp, Homo sapien
gtaggcaactgaaacttaatcccgc

SEQ ID NO: 4752405 - DNA, 25 bp, Homo sapien
gaggctttaaaatgtctcaacgcca

SEQ ID NO: 4752406 - DNA, 25 bp, Homo sapien
ttaataaagataggcttctcaagcc

SEQ ID NO: 4752407 - DNA, 25 bp, Homo sapien
tgtgtccatgttccaggggattcct

SEQ ID NO: 4752408 - DNA, 25 bp, Homo sapien
tctgtgtccatgttccaggggattc

SEQ ID NO: 4752409 - DNA, 25 bp, Homo sapien
atttctgtgtccatgttccagggga

SEQ ID NO: 4752410 - DNA, 25 bp, Homo sapien
gtgtccatgttccaggggattcctc

SEQ ID NO: 4752411 - DNA, 25 bp, Homo sapien
gatcatgactgtcagtctcttcatg

SEQ ID NO: 4752412 - DNA, 25 bp, Homo sapien
tttctgtacactaggcaaattctga

SEQ ID NO: 4752413 - DNA, 25 bp, Homo sapien
tcttcatgtacctcaataacttgtg

SEQ ID NO: 4752414 - DNA, 25 bp, Homo sapien
gtgacccttcaactaatgcttcata

SEQ ID NO: 4752415 - DNA, 25 bp, Homo sapien
gatatggaggcagaatttagggtga

SEQ ID NO: 4752416 - DNA, 25 bp, Homo sapien
gaactgttacactcgtaattgaggc

SEQ ID NO: 4752417 - DNA, 25 bp, Homo sapien
aggcagaatttagggtgagaactgt

SEQ ID NO: 4752418 - DNA, 25 bp, Homo sapien
gtaattgaggccctgaatggaaatg

SEQ ID NO: 4752419 - DNA, 25 bp, Homo sapien
gacaactgttcgacggcgcttttcc

SEQ ID NO: 4752420 - DNA, 25 bp, Homo sapien
tgacaactgttcgacggcgcttttc

SEQ ID NO: 4752421 - DNA, 25 bp, Homo sapien
aatttgacaactgttcgacggcgct

SEQ ID NO: 4752422 - DNA, 25 bp, Homo sapien
tttgacaactgttcgacggcgcttt

SEQ ID NO: 4752423 - DNA, 25 bp, Homo sapien
aagaaatgaattccttttcttcata

SEQ ID NO: 4752424 - DNA, 25 bp, Homo sapien
ctgttatgcccctggaccttggact

SEQ ID NO: 4752425 - DNA, 25 bp, Homo sapien
tgttatgcccctggaccttggactt

SEQ ID NO: 4752426 - DNA, 25 bp, Homo sapien
tccataactgtaagaaatgaattcc

SEQ ID NO: 4752427 - DNA, 25 bp, Homo sapien
tgaagaccacaaatcaggcatagtt

SEQ ID NO: 4752428 - DNA, 25 bp, Homo sapien
ttagtcgggtatatttttctttgca

SEQ ID NO: 4752429 - DNA, 25 bp, Homo sapien
aaaggagattgggtcattatgcacc

SEQ ID NO: 4752430 - DNA, 25 bp, Homo sapien
aacagatagtatcaccagatgtctc

SEQ ID NO: 4752431 - DNA, 25 bp, Homo sapien
aatttctaagcaaggcctctggttt

SEQ ID NO: 4752432 - DNA, 25 bp, Homo sapien
aaatttctaagcaaggcctctggtt

SEQ ID NO: 4752433 - DNA, 25 bp, Homo sapien
gaaatttctaagcaaggcctctggt

SEQ ID NO: 4752434 - DNA, 25 bp, Homo sapien
aaaatcattctagacataaatgtaa

SEQ ID NO: 4752435 - DNA, 25 bp, Homo sapien
aagaagccattttggcctaggatca

SEQ ID NO: 4752436 - DNA, 25 bp, Homo sapien
tgctggttggcatactcctcccaaa

SEQ ID NO: 4752437 - DNA, 25 bp, Homo sapien
agggccatgctggttggcatactcc

SEQ ID NO: 4752438 - DNA, 25 bp, Homo sapien
ccagggagtcagaagggctcacaaa

SEQ ID NO: 4752439 - DNA, 25 bp, Homo sapien
gcagacagagagctttcctacttac

SEQ ID NO: 4752440 - DNA, 25 bp, Homo sapien
cagcagacagagagctttcctactt

SEQ ID NO: 4752441 - DNA, 25 bp, Homo sapien
tcaaagggtcagcagacagagagct

SEQ ID NO: 4752442 - DNA, 25 bp, Homo sapien
aaagggtcagcagacagagagcttt

SEQ ID NO: 4752443 - DNA, 25 bp, Homo sapien
ccaggggaacacagtttattgcaga

SEQ ID NO: 4752444 - DNA, 25 bp, Homo sapien
aacacagtttattgcagaattggct

SEQ ID NO: 4752445 - DNA, 25 bp, Homo sapien
gggaacacagtttattgcagaattg

SEQ ID NO: 4752446 - DNA, 25 bp, Homo sapien
caggggaacacagtttattgcagaa

SEQ ID NO: 4752447 - DNA, 25 bp, Homo sapien
aagatagatatccactgggtccact

SEQ ID NO: 4752448 - DNA, 25 bp, Homo sapien
gaaggaggttaagatagatatccac

SEQ ID NO: 4752449 - DNA, 25 bp, Homo sapien
aaggaggttaagatagatatccact

SEQ ID NO: 4752450 - DNA, 25 bp, Homo sapien
tcttgtcttcctagtcgagataggt

SEQ ID NO: 4752451 - DNA, 25 bp, Homo sapien
gcatattcctcaatcgttttgctga

SEQ ID NO: 4752452 - DNA, 25 bp, Homo sapien
tcttcctagtcgagataggtcgatt

SEQ ID NO: 4752453 - DNA, 25 bp, Homo sapien
ggagatcaggacatatagcatattc

SEQ ID NO: 4752454 - DNA, 25 bp, Homo sapien
ctccattggcaacattaaacttcac

SEQ ID NO: 4752455 - DNA, 25 bp, Homo sapien
cattggcaacattaaacttcactcc

SEQ ID NO: 4752456 - DNA, 25 bp, Homo sapien
acttcactccaaactctccccctgg

SEQ ID NO: 4752457 - DNA, 25 bp, Homo sapien
ttcactccaaactctccccctggtc

SEQ ID NO: 4752458 - DNA, 25 bp, Homo sapien
ctgataatgcaggagaccgcaggtg

SEQ ID NO: 4752459 - DNA, 25 bp, Homo sapien
gagaccgcaggtgttgacaagatgc

SEQ ID NO: 4752460 - DNA, 25 bp, Homo sapien
tgcaggagaccgcaggtgttgacaa

SEQ ID NO: 4752461 - DNA, 25 bp, Homo sapien
taatgcaggagaccgcaggtgttga

SEQ ID NO: 4752462 - DNA, 25 bp, Homo sapien
cacacccaagtggatgctactgcca

SEQ ID NO: 4752463 - DNA, 25 bp, Homo sapien
cccaagtggatgctactgccattaa

SEQ ID NO: 4752464 - DNA, 25 bp, Homo sapien
aagtggatgctactgccattaaggg

SEQ ID NO: 4752465 - DNA, 25 bp, Homo sapien
gcacacacccaagtggatgctactg

SEQ ID NO: 4752466 - DNA, 25 bp, Homo sapien
gcatcaaaccaccatggatttcata

SEQ ID NO: 4752467 - DNA, 25 bp, Homo sapien
gagagatagaggagagttcattagc

SEQ ID NO: 4752468 - DNA, 25 bp, Homo sapien
gatagaggagagttcattagcatca

SEQ ID NO: 4752469 - DNA, 25 bp, Homo sapien
gagagttcattagcatcaaaccacc

SEQ ID NO: 4752470 - DNA, 25 bp, Homo sapien
tatccctcttgtagatgtccttgag

SEQ ID NO: 4752471 - DNA, 25 bp, Homo sapien
cttgtagatgtccttgagatgctgc

SEQ ID NO: 4752472 - DNA, 25 bp, Homo sapien
ttaggtatccctcttgtagatgtcc

SEQ ID NO: 4752473 - DNA, 25 bp, Homo sapien
agatgtccttgagatgctgctggac

SEQ ID NO: 4752474 - DNA, 25 bp, Homo sapien
ataaagttgggcaggtagttgcgct

SEQ ID NO: 4752475 - DNA, 25 bp, Homo sapien
cacgatctcgatggccgtcctgcta

SEQ ID NO: 4752476 - DNA, 25 bp, Homo sapien
aggtcgatggacgacagcacgctct

SEQ ID NO: 4752477 - DNA, 25 bp, Homo sapien
gatggccgtcctgctaaagtacctg

SEQ ID NO: 4752478 - DNA, 25 bp, Homo sapien
tcccggagccggagggaatctgcag

SEQ ID NO: 4752479 - DNA, 25 bp, Homo sapien
cccggagccggagggaatctgcagc

SEQ ID NO: 4752480 - DNA, 25 bp, Homo sapien
accagcctggctgcgcgccgggact

SEQ ID NO: 4752481 - DNA, 25 bp, Homo sapien
attccagggcctgctagcccgaccc

SEQ ID NO: 4752482 - DNA, 25 bp, Homo sapien
agtttctccccaagttggactcact

SEQ ID NO: 4752483 - DNA, 25 bp, Homo sapien
gcctgctagcccgaccccggtgacg

SEQ ID NO: 4752484 - DNA, 25 bp, Homo sapien
tcagtttctccccaagttggactca

SEQ ID NO: 4752485 - DNA, 25 bp, Homo sapien
ttctgttggaatcaggggagcgtgt

SEQ ID NO: 4752486 - DNA, 25 bp, Homo sapien
aatcaggggagcgtgttcttctata

SEQ ID NO: 4752487 - DNA, 25 bp, Homo sapien
tgttcttctataatcccctggctga

SEQ ID NO: 4752488 - DNA, 25 bp, Homo sapien
gtgttcttctataatcccctggctg

SEQ ID NO: 4752489 - DNA, 25 bp, Homo sapien
gatttagagtaatctgctgttctcc

SEQ ID NO: 4752490 - DNA, 25 bp, Homo sapien
ttagagtaatctgctgttctcctag

SEQ ID NO: 4752491 - DNA, 25 bp, Homo sapien
gagtaatctgctgttctcctagagt

SEQ ID NO: 4752492 - DNA, 25 bp, Homo sapien
gggatttagagtaatctgctgttct

SEQ ID NO: 4752493 - DNA, 25 bp, Homo sapien
ttcttcctctgctgccctcatacat

SEQ ID NO: 4752494 - DNA, 25 bp, Homo sapien
ctgggctgctttgccaactcttctt

SEQ ID NO: 4752495 - DNA, 25 bp, Homo sapien
tgtttctgggctgctttgccaactc

SEQ ID NO: 4752496 - DNA, 25 bp, Homo sapien
tcactcctcctcttcatgtgtttct

SEQ ID NO: 4752497 - DNA, 25 bp, Homo sapien
aagaatagagggaacgcagaggcac

SEQ ID NO: 4752498 - DNA, 25 bp, Homo sapien
aacacctcgttttgaacttctagct

SEQ ID NO: 4752499 - DNA, 25 bp, Homo sapien
aggcatggagcagattcttcctagc

SEQ ID NO: 4752500 - DNA, 25 bp, Homo sapien
aaaggcatggagcagattcttccta

SEQ ID NO: 4752501 - DNA, 25 bp, Homo sapien
catttctgtacagcttcccatgtgc

SEQ ID NO: 4752502 - DNA, 25 bp, Homo sapien
tcatttctgtacagcttcccatgtg

SEQ ID NO: 4752503 - DNA, 25 bp, Homo sapien
ccactcatttctgtacagcttccca

SEQ ID NO: 4752504 - DNA, 25 bp, Homo sapien
ccccactcatttctgtacagcttcc

SEQ ID NO: 4752505 - DNA, 25 bp, Homo sapien
tggaatcaagcatcaaagggcagtg

SEQ ID NO: 4752506 - DNA, 25 bp, Homo sapien
aaaatcgcctgagaggctggacccg

SEQ ID NO: 4752507 - DNA, 25 bp, Homo sapien
taacagagtagtgaccagagtatgc

SEQ ID NO: 4752508 - DNA, 25 bp, Homo sapien
cgagatcgagcaaagcatgggcaac

SEQ ID NO: 4752509 - DNA, 25 bp, Homo sapien
cagcccctctaagccttctggctct

SEQ ID NO: 4752510 - DNA, 25 bp, Homo sapien
tccgtggactcacagcctctttacc

SEQ ID NO: 4752511 - DNA, 25 bp, Homo sapien
cctctcccacgctgcaattagaagg

SEQ ID NO: 4752512 - DNA, 25 bp, Homo sapien
ctgcaattagaaggaatatcagtgg

SEQ ID NO: 4752513 - DNA, 25 bp, Homo sapien
gcagggtatcgtccaagctttctcc

SEQ ID NO: 4752514 - DNA, 25 bp, Homo sapien
tgaaagcagggtatcgtccaagctt

SEQ ID NO: 4752515 - DNA, 25 bp, Homo sapien
ttgaaagcagggtatcgtccaagct

SEQ ID NO: 4752516 - DNA, 25 bp, Homo sapien
aaagcagggtatcgtccaagctttc

SEQ ID NO: 4752517 - DNA, 25 bp, Homo sapien
ccaggatcgtgggaacaatatccct

SEQ ID NO: 4752518 - DNA, 25 bp, Homo sapien
cgatattgggagtgacatcaacctc

SEQ ID NO: 4752519 - DNA, 25 bp, Homo sapien
gccatgtatgtagtcatatcacccc

SEQ ID NO: 4752520 - DNA, 25 bp, Homo sapien
ggtgtatacttcctccgatattggg

SEQ ID NO: 4752521 - DNA, 25 bp, Homo sapien
gaggggctacccgatctcacaaagc

SEQ ID NO: 4752522 - DNA, 25 bp, Homo sapien
acccccatcgcaagggtgcgaggca

SEQ ID NO: 4752523 - DNA, 25 bp, Homo sapien
gatagggattcgaaaggatggcccc

SEQ ID NO: 4752524 - DNA, 25 bp, Homo sapien
aattcccttgctagaaccagatgca

SEQ ID NO: 4752525 - DNA, 25 bp, Homo sapien
gctggcctgagggttcgcagagggc

SEQ ID NO: 4752526 - DNA, 25 bp, Homo sapien
actcctatagtcccgaacctgctgg

SEQ ID NO: 4752527 - DNA, 25 bp, Homo sapien
agagggccagtcgttgcgacagccc

SEQ ID NO: 4752528 - DNA, 25 bp, Homo sapien
tagtcccgaacctgctggcctgagg

SEQ ID NO: 4752529 - DNA, 25 bp, Homo sapien
gaaggcggctgggattagaaggtgg

SEQ ID NO: 4752530 - DNA, 25 bp, Homo sapien
ccggcacctacgtcgaggggtgcct

SEQ ID NO: 4752531 - DNA, 25 bp, Homo sapien
cggtaccgccggcacctacgtcgag

SEQ ID NO: 4752532 - DNA, 25 bp, Homo sapien
tgggattagaaggtggcttcgggcc

SEQ ID NO: 4752533 - DNA, 25 bp, Homo sapien
gggcggtgggacagaggccaggagg

SEQ ID NO: 4752534 - DNA, 25 bp, Homo sapien
gcgcctctgggtctcggggagagaa

SEQ ID NO: 4752535 - DNA, 25 bp, Homo sapien
cgcgcgagtctttcggcgcctctgg

SEQ ID NO: 4752536 - DNA, 25 bp, Homo sapien
agagaaaagcgcttcctggcaccgg

SEQ ID NO: 4752537 - DNA, 25 bp, Homo sapien
cctgaggggagatgcttctgcaggg

SEQ ID NO: 4752538 - DNA, 25 bp, Homo sapien
tcctgaggggagatgcttctgcagg

SEQ ID NO: 4752539 - DNA, 25 bp, Homo sapien
ctgaggggagatgcttctgcagggc

SEQ ID NO: 4752540 - DNA, 25 bp, Homo sapien
cagggatacacaacatgccattggg

SEQ ID NO: 4752541 - DNA, 25 bp, Homo sapien
tgtagggacaatctttccaatggtc

SEQ ID NO: 4752542 - DNA, 25 bp, Homo sapien
caagttgctaaacccaactcagggc

SEQ ID NO: 4752543 - DNA, 25 bp, Homo sapien
gtccagaaatagtccacggcagcca

SEQ ID NO: 4752544 - DNA, 25 bp, Homo sapien
gctttccatagactttaccttcaga

SEQ ID NO: 4752545 - DNA, 25 bp, Homo sapien
gaagatgaaaggctttccatagact

SEQ ID NO: 4752546 - DNA, 25 bp, Homo sapien
tttccatagactttaccttcagagg

SEQ ID NO: 4752547 - DNA, 25 bp, Homo sapien
tccatagactttaccttcagagggt

SEQ ID NO: 4752548 - DNA, 25 bp, Homo sapien
tattgtgaatcttaagatggctttt

SEQ ID NO: 4752549 - DNA, 25 bp, Homo sapien
actattgtgaatcttaagatggctt

SEQ ID NO: 4752550 - DNA, 25 bp, Homo sapien
tcactattgtgaatcttaagatggc

SEQ ID NO: 4752551 - DNA, 25 bp, Homo sapien
ctcactattgtgaatcttaagatgg

SEQ ID NO: 4752552 - DNA, 25 bp, Homo sapien
ttttgagccttgctgaaggctttcc

SEQ ID NO: 4752553 - DNA, 25 bp, Homo sapien
tatgtgcatgttttgagccttgctg

SEQ ID NO: 4752554 - DNA, 25 bp, Homo sapien
ttatatgtgcatgttttgagccttg

SEQ ID NO: 4752555 - DNA, 25 bp, Homo sapien
tgcatgttttgagccttgctgaagg

SEQ ID NO: 4752556 - DNA, 25 bp, Homo sapien
taaagcctttctcacttttgttaca

SEQ ID NO: 4752557 - DNA, 25 bp, Homo sapien
tgtttattaaggtgtagggaatatc

SEQ ID NO: 4752558 - DNA, 25 bp, Homo sapien
gtgtagggaatatctaaagcctttc

SEQ ID NO: 4752559 - DNA, 25 bp, Homo sapien
gggaatatctaaagcctttctcact

SEQ ID NO: 4752560 - DNA, 25 bp, Homo sapien
gtgccagttctacacggaagccgtt

SEQ ID NO: 4752561 - DNA, 25 bp, Homo sapien
gagtacttgtcacggatgtccaccc

SEQ ID NO: 4752562 - DNA, 25 bp, Homo sapien
agttctcacacttgtcgattcccaa

SEQ ID NO: 4752563 - DNA, 25 bp, Homo sapien
ataggtccacgggatcatgccgtag

SEQ ID NO: 4752564 - DNA, 25 bp, Homo sapien
gaattactttctatccagttccact

SEQ ID NO: 4752565 - DNA, 25 bp, Homo sapien
cgttacactaattcgctgataatga

SEQ ID NO: 4752566 - DNA, 25 bp, Homo sapien
tacaagtcgttgttcctattctaat

SEQ ID NO: 4752567 - DNA, 25 bp, Homo sapien
ttgaatgcaaccacagcctctaaca

SEQ ID NO: 4752568 - DNA, 25 bp, Homo sapien
taggatgctgtgtagaatggctccc

SEQ ID NO: 4752569 - DNA, 25 bp, Homo sapien
gaaagaacccctctaatcttcagaa

SEQ ID NO: 4752570 - DNA, 25 bp, Homo sapien
taaagaaactaagcacagcagatcc

SEQ ID NO: 4752571 - DNA, 25 bp, Homo sapien
tgtgaggtaggtgctactattactc

SEQ ID NO: 4752572 - DNA, 25 bp, Homo sapien
gggaatcgacaagtgtgacaactcc

SEQ ID NO: 4752573 - DNA, 25 bp, Homo sapien
caagctgggaatcgacaagtgtgac

SEQ ID NO: 4752574 - DNA, 25 bp, Homo sapien
tgacaccaagctgggaatcgacaag

SEQ ID NO: 4752575 - DNA, 25 bp, Homo sapien
ctatgacaccaagctgggaatcgac

SEQ ID NO: 4752576 - DNA, 25 bp, Homo sapien
aagatgggatacacacagggcgctc

SEQ ID NO: 4752577 - DNA, 25 bp, Homo sapien
gatgggatacacacagggcgctcat

SEQ ID NO: 4752578 - DNA, 25 bp, Homo sapien
ctgaagatgggatacacacagggcg

SEQ ID NO: 4752579 - DNA, 25 bp, Homo sapien
tgaagatgggatacacacagggcgc

SEQ ID NO: 4752580 - DNA, 25 bp, Homo sapien
aaggtgcccgctggcacttccaggc

SEQ ID NO: 4752581 - DNA, 25 bp, Homo sapien
tgaaggtgcccgctggcacttccag

SEQ ID NO: 4752582 - DNA, 25 bp, Homo sapien
tgtagggtgaaggtgcccgctggca

SEQ ID NO: 4752583 - DNA, 25 bp, Homo sapien
atgcgtgtagggtgaaggtgcccgc

SEQ ID NO: 4752584 - DNA, 25 bp, Homo sapien
actgtaagctctgctaggtgcagtg

SEQ ID NO: 4752585 - DNA, 25 bp, Homo sapien
ctgtaagctctgctaggtgcagtgg

SEQ ID NO: 4752586 - DNA, 25 bp, Homo sapien
tgtaagctctgctaggtgcagtggc

SEQ ID NO: 4752587 - DNA, 25 bp, Homo sapien
gacttgctatacagccagcatatgg

SEQ ID NO: 4752588 - DNA, 25 bp, Homo sapien
taaccgagaataaatagtcacctgc

SEQ ID NO: 4752589 - DNA, 25 bp, Homo sapien
gaatagttggctagctacacgtagg

SEQ ID NO: 4752590 - DNA, 25 bp, Homo sapien
taagcaaacaataacacaaagtggg

SEQ ID NO: 4752591 - DNA, 25 bp, Homo sapien
tatgaaaatttgtcacggcttgatc

SEQ ID NO: 4752592 - DNA, 25 bp, Homo sapien
gacttgtgaattatttaggaatatg

SEQ ID NO: 4752593 - DNA, 25 bp, Homo sapien
aagtttatcgagtttaatattatgc

SEQ ID NO: 4752594 - DNA, 25 bp, Homo sapien
cattgagactaattttgtgacttgt

SEQ ID NO: 4752595 - DNA, 25 bp, Homo sapien
gaaaatctttcatgggtcaagggat

SEQ ID NO: 4752596 - DNA, 25 bp, Homo sapien
tgagaccaaactgcaattattgtga

SEQ ID NO: 4752597 - DNA, 25 bp, Homo sapien
caatagccacatacgtgtgagaaaa

SEQ ID NO: 4752598 - DNA, 25 bp, Homo sapien
caagggatagtccatattgttctca

SEQ ID NO: 4752599 - DNA, 25 bp, Homo sapien
taggccatatcttcaaagcccagag

SEQ ID NO: 4752600 - DNA, 25 bp, Homo sapien
cccagagtgtgcatagcctgagtca

SEQ ID NO: 4752601 - DNA, 25 bp, Homo sapien
aagcccagagtgtgcatagcctgag

SEQ ID NO: 4752602 - DNA, 25 bp, Homo sapien
cagagtgtgcatagcctgagtcaag

SEQ ID NO: 4752603 - DNA, 25 bp, Homo sapien
tcctcttgcagggttccattattac

SEQ ID NO: 4752604 - DNA, 25 bp, Homo sapien
cttgcagggttccattattacacat

SEQ ID NO: 4752605 - DNA, 25 bp, Homo sapien
ccctcctcttgcagggttccattat

SEQ ID NO: 4752606 - DNA, 25 bp, Homo sapien
tgtaagcaccctcatgactccctcc

SEQ ID NO: 4752607 - DNA, 25 bp, Homo sapien
cagcatattcgcaattgctcattaa

SEQ ID NO: 4752608 - DNA, 25 bp, Homo sapien
ttcatttgttccagcatattcgcaa

SEQ ID NO: 4752609 - DNA, 25 bp, Homo sapien
ttaccctactgagccatcaagtatt

SEQ ID NO: 4752610 - DNA, 25 bp, Homo sapien
tccattaccctactgagccatcaag

SEQ ID NO: 4752611 - DNA, 25 bp, Homo sapien
tgtattgctggcaaggcttgctgca

SEQ ID NO: 4752612 - DNA, 25 bp, Homo sapien
taattgaaagtattctgtattgctg

SEQ ID NO: 4752613 - DNA, 25 bp, Homo sapien
gcaaggcttgctgcaggacgttgaa

SEQ ID NO: 4752614 - DNA, 25 bp, Homo sapien
aagtattctgtattgctggcaaggc

SEQ ID NO: 4752615 - DNA, 25 bp, Homo sapien
cttgtgcacctgatgtagtatagca

SEQ ID NO: 4752616 - DNA, 25 bp, Homo sapien
aacagaagtagggaaagtgctagct

SEQ ID NO: 4752617 - DNA, 25 bp, Homo sapien
gcacagtgcccagttggtttaatgt

SEQ ID NO: 4752618 - DNA, 25 bp, Homo sapien
atgtccaatgcttgactgtaaggga

SEQ ID NO: 4752619 - DNA, 25 bp, Homo sapien
tgtagctcagtttccataggcaact

SEQ ID NO: 4752620 - DNA, 25 bp, Homo sapien
tccacccaaacgcacatctgtatgg

SEQ ID NO: 4752621 - DNA, 25 bp, Homo sapien
caagctaatataaatgtgcacatgc

SEQ ID NO: 4752622 - DNA, 25 bp, Homo sapien
ttgacagactctttctatagctatg

SEQ ID NO: 4752623 - DNA, 25 bp, Homo sapien
taatcacaatgccattgggcaaaga

SEQ ID NO: 4752624 - DNA, 25 bp, Homo sapien
tatcagtatgcgtaacataaaggag

SEQ ID NO: 4752625 - DNA, 25 bp, Homo sapien
caattttatcagtatgcgtaacata

SEQ ID NO: 4752626 - DNA, 25 bp, Homo sapien
tcaacaattttatcagtatgcgtaa

SEQ ID NO: 4752627 - DNA, 25 bp, Homo sapien
cagtatgcgtaacataaaggagaaa

SEQ ID NO: 4752628 - DNA, 25 bp, Homo sapien
tgtgttcaggtttctatttatttta

SEQ ID NO: 4752629 - DNA, 25 bp, Homo sapien
gtatttttctcacaagggaggatga

SEQ ID NO: 4752630 - DNA, 25 bp, Homo sapien
ttgtagaggagattagagcctgcat

SEQ ID NO: 4752631 - DNA, 25 bp, Homo sapien
gattgtagaggagattagagcctgc

SEQ ID NO: 4752632 - DNA, 25 bp, Homo sapien
gatgattgtagaggagattagagcc

SEQ ID NO: 4752633 - DNA, 25 bp, Homo sapien
gaatatgtgtctttctcaactatca

SEQ ID NO: 4752634 - DNA, 25 bp, Homo sapien
tggttccaagttagcatcactgttc

SEQ ID NO: 4752635 - DNA, 25 bp, Homo sapien
cactgttcctggtccttccatcttt

SEQ ID NO: 4752636 - DNA, 25 bp, Homo sapien
tctgcttagtcatatttaacttgtg

SEQ ID NO: 4752637 - DNA, 25 bp, Homo sapien
caataagtgataattgatattccaa

SEQ ID NO: 4752638 - DNA, 25 bp, Homo sapien
aataagtgataattgatattccaaa

SEQ ID NO: 4752639 - DNA, 25 bp, Homo sapien
tactttgctttgaattcaaattgtt

SEQ ID NO: 4752640 - DNA, 25 bp, Homo sapien
aagtgataattgatattccaaaaat

SEQ ID NO: 4752641 - DNA, 25 bp, Homo sapien
tgtgggacaagcttctctttattgg

SEQ ID NO: 4752642 - DNA, 25 bp, Homo sapien
catggattcatgtaagggtggggca

SEQ ID NO: 4752643 - DNA, 25 bp, Homo sapien
ggcagggtggactgaagatctgttg

SEQ ID NO: 4752644 - DNA, 25 bp, Homo sapien
actgaagatctgttggcagggctca

SEQ ID NO: 4752645 - DNA, 25 bp, Homo sapien
tggactgaagatctgttggcagggc

SEQ ID NO: 4752646 - DNA, 25 bp, Homo sapien
agatcccatcttgggcaatacggtt

SEQ ID NO: 4752647 - DNA, 25 bp, Homo sapien
tgagatcccatcttgggcaatacgg

SEQ ID NO: 4752648 - DNA, 25 bp, Homo sapien
gagatcccatcttgggcaatacggt

SEQ ID NO: 4752649 - DNA, 25 bp, Homo sapien
catgagatcccatcttgggcaatac

SEQ ID NO: 4752650 - DNA, 25 bp, Homo sapien
tggtggagccaatgaagaccaggta

SEQ ID NO: 4752651 - DNA, 25 bp, Homo sapien
gctcccgtgggatggtggagccaat

SEQ ID NO: 4752652 - DNA, 25 bp, Homo sapien
ccaatgaagaccaggtagatgatgc

SEQ ID NO: 4752653 - DNA, 25 bp, Homo sapien
tgccacagagtcctccaatttcagg

SEQ ID NO: 4752654 - DNA, 25 bp, Homo sapien
actggcacccaccacaagttctccc

SEQ ID NO: 4752655 - DNA, 25 bp, Homo sapien
tagagaggcacccagaagtggtgcc

SEQ ID NO: 4752656 - DNA, 25 bp, Homo sapien
gcacccagaagtggtgccaccactg

SEQ ID NO: 4752657 - DNA, 25 bp, Homo sapien
agaagtggtgccaccactggcaccc

SEQ ID NO: 4752658 - DNA, 25 bp, Homo sapien
atgcccaggacagcaccctcatcca

SEQ ID NO: 4752659 - DNA, 25 bp, Homo sapien
gggctgatgcccaggacagcaccct

SEQ ID NO: 4752660 - DNA, 25 bp, Homo sapien
gaggccggctgagggggctgatgcc

SEQ ID NO: 4752661 - DNA, 25 bp, Homo sapien
ctgcaggcaagaggcagaggccggc

SEQ ID NO: 4752662 - DNA, 25 bp, Homo sapien
gggaaatgttgggactcactcctgc

SEQ ID NO: 4752663 - DNA, 25 bp, Homo sapien
gcctggggaaatgttgggactcact

SEQ ID NO: 4752664 - DNA, 25 bp, Homo sapien
gaaatgttgggactcactcctgctc

SEQ ID NO: 4752665 - DNA, 25 bp, Homo sapien
aatgttgggactcactcctgctccc

SEQ ID NO: 4752666 - DNA, 25 bp, Homo sapien
acaggggccccacagaaaatctcaa

SEQ ID NO: 4752667 - DNA, 25 bp, Homo sapien
agaaaatctcaaaggaatgggcctg

SEQ ID NO: 4752668 - DNA, 25 bp, Homo sapien
cccacacctcaacacacaggggccc

SEQ ID NO: 4752669 - DNA, 25 bp, Homo sapien
cacacctcaacacacaggggcccca

SEQ ID NO: 4752670 - DNA, 25 bp, Homo sapien
ttcatgccatggtacaccctgatga

SEQ ID NO: 4752671 - DNA, 25 bp, Homo sapien
gatgcctatcaccagtgcgtgtgtt

SEQ ID NO: 4752672 - DNA, 25 bp, Homo sapien
ctgtgttcatgccatggtacaccct

SEQ ID NO: 4752673 - DNA, 25 bp, Homo sapien
cctatcaccagtgcgtgtgttcctg

SEQ ID NO: 4752674 - DNA, 25 bp, Homo sapien
tgggcccctccccaagccacaggac

SEQ ID NO: 4752675 - DNA, 25 bp, Homo sapien
ctgggcccctccccaagccacagga

SEQ ID NO: 4752676 - DNA, 25 bp, Homo sapien
cagcagagacacatcttggtacagt

SEQ ID NO: 4752677 - DNA, 25 bp, Homo sapien
tggtacagtctccatccagagttct

SEQ ID NO: 4752678 - DNA, 25 bp, Homo sapien
cccaagcccaccagcagagacacat

SEQ ID NO: 4752679 - DNA, 25 bp, Homo sapien
gagacacatcttggtacagtctcca

SEQ ID NO: 4752680 - DNA, 25 bp, Homo sapien
tgtctatccggagggactccctgct

SEQ ID NO: 4752681 - DNA, 25 bp, Homo sapien
ctgtctatccggagggactccctgc

SEQ ID NO: 4752682 - DNA, 25 bp, Homo sapien
gaagccccgccacaatgtcatgtga

SEQ ID NO: 4752683 - DNA, 25 bp, Homo sapien
aggaagccccgccacaatgtcatgt

SEQ ID NO: 4752684 - DNA, 25 bp, Homo sapien
tcaggaagccccgccacaatgtcat

SEQ ID NO: 4752685 - DNA, 25 bp, Homo sapien
aagccccgccacaatgtcatgtgat

SEQ ID NO: 4752686 - DNA, 25 bp, Homo sapien
acacggcccagtgcacagttagtga

SEQ ID NO: 4752687 - DNA, 25 bp, Homo sapien
tgggccacggaaccaaggccgaata

SEQ ID NO: 4752688 - DNA, 25 bp, Homo sapien
caagttgacaccaaggtagctccca

SEQ ID NO: 4752689 - DNA, 25 bp, Homo sapien
agccaaaacccaagttgacaccaag

SEQ ID NO: 4752690 - DNA, 25 bp, Homo sapien
actcccatggtgactccgaagccaa

SEQ ID NO: 4752691 - DNA, 25 bp, Homo sapien
cgttgcctcgaagaccctctgccat

SEQ ID NO: 4752692 - DNA, 25 bp, Homo sapien
cagtctagagccactgttcccttca

SEQ ID NO: 4752693 - DNA, 25 bp, Homo sapien
taccctcagtctagagccactgttc

SEQ ID NO: 4752694 - DNA, 25 bp, Homo sapien
tagagccactgttcccttcagccct

SEQ ID NO: 4752695 - DNA, 25 bp, Homo sapien
tgtgctatcctctccctctgcagag

SEQ ID NO: 4752696 - DNA, 25 bp, Homo sapien
gtggttaatgggtctggtggtaaga

SEQ ID NO: 4752697 - DNA, 25 bp, Homo sapien
aagagggtgagctgaacataggaag

SEQ ID NO: 4752698 - DNA, 25 bp, Homo sapien
tgagctgaacataggaagtgttgat

SEQ ID NO: 4752699 - DNA, 25 bp, Homo sapien
gtctggtggtaagagggacaagagg

SEQ ID NO: 4752700 - DNA, 25 bp, Homo sapien
catatgtgctcatgaactcggccag

SEQ ID NO: 4752701 - DNA, 25 bp, Homo sapien
atcatgacatatgtgctcatgaact

SEQ ID NO: 4752702 - DNA, 25 bp, Homo sapien
catcatgacatatgtgctcatgaac

SEQ ID NO: 4752703 - DNA, 25 bp, Homo sapien
tgacatatgtgctcatgaactcggc

SEQ ID NO: 4752704 - DNA, 25 bp, Homo sapien
gaccattttggagccacgggtggac

SEQ ID NO: 4752705 - DNA, 25 bp, Homo sapien
tatttcctggatctttgctatcacg

SEQ ID NO: 4752706 - DNA, 25 bp, Homo sapien
gatctttgctatcacggaccaggag

SEQ ID NO: 4752707 - DNA, 25 bp, Homo sapien
agaccattttggagccacgggtgga

SEQ ID NO: 4752708 - DNA, 25 bp, Homo sapien
ttctctccgtccaagtgtacaacag

SEQ ID NO: 4752709 - DNA, 25 bp, Homo sapien
caaatatccctgcttgcgtggagct

SEQ ID NO: 4752710 - DNA, 25 bp, Homo sapien
gccctggaaagagacgtaggctaga

SEQ ID NO: 4752711 - DNA, 25 bp, Homo sapien
tgtataagcgaaggtaccagctcct

SEQ ID NO: 4752712 - DNA, 25 bp, Homo sapien
gcccagatgcttgaaccatgttttg

SEQ ID NO: 4752713 - DNA, 25 bp, Homo sapien
cgcctgtgcccagatgcttgaacca

SEQ ID NO: 4752714 - DNA, 25 bp, Homo sapien
cagatgcttgaaccatgttttgtcc

SEQ ID NO: 4752715 - DNA, 25 bp, Homo sapien
gcttgaaccatgttttgtccttcag

SEQ ID NO: 4752716 - DNA, 25 bp, Homo sapien
gagccaaagagaggtcactagggct

SEQ ID NO: 4752717 - DNA, 25 bp, Homo sapien
agccaaagagaggtcactagggctg

SEQ ID NO: 4752718 - DNA, 25 bp, Homo sapien
ccaaagagaggtcactagggctgga

SEQ ID NO: 4752719 - DNA, 25 bp, Homo sapien
gccaaagagaggtcactagggctgg

SEQ ID NO: 4752720 - DNA, 25 bp, Homo sapien
gctggggctcagctatccctgtgtc

SEQ ID NO: 4752721 - DNA, 25 bp, Homo sapien
ctggggctcagctatccctgtgtcc

SEQ ID NO: 4752722 - DNA, 25 bp, Homo sapien
tggggctcagctatccctgtgtccc

SEQ ID NO: 4752723 - DNA, 25 bp, Homo sapien
agctggggctcagctatccctgtgt

SEQ ID NO: 4752724 - DNA, 25 bp, Homo sapien
aattctggcaccattctgaaaggca

SEQ ID NO: 4752725 - DNA, 25 bp, Homo sapien
tcctccctaagttgataagactcta

SEQ ID NO: 4752726 - DNA, 25 bp, Homo sapien
taaaagtcgtgtcaaccaggcacgg

SEQ ID NO: 4752727 - DNA, 25 bp, Homo sapien
gaaaggcagttgtgattctcactca

SEQ ID NO: 4752728 - DNA, 25 bp, Homo sapien
tcaggtctacagttcagatcagcag

SEQ ID NO: 4752729 - DNA, 25 bp, Homo sapien
cacagggatagctggaaatcagtga

SEQ ID NO: 4752730 - DNA, 25 bp, Homo sapien
gaaacacccactttaatgcagccga

SEQ ID NO: 4752731 - DNA, 25 bp, Homo sapien
cagagaacgtccagaaaaatcccac

SEQ ID NO: 4752732 - DNA, 25 bp, Homo sapien
tacctcgtttggcttaaagtcactg

SEQ ID NO: 4752733 - DNA, 25 bp, Homo sapien
cactggtatgaaatcagggagcaag

SEQ ID NO: 4752734 - DNA, 25 bp, Homo sapien
tgtataactgcatgactaacccctg

SEQ ID NO: 4752735 - DNA, 25 bp, Homo sapien
tggttatcacactcttctctgggta

SEQ ID NO: 4752736 - DNA, 25 bp, Homo sapien
taaatgtggtagtggcctgccaacc

SEQ ID NO: 4752737 - DNA, 25 bp, Homo sapien
tgccaaccctgcagagggctagcaa

SEQ ID NO: 4752738 - DNA, 25 bp, Homo sapien
aatcttcagggagtctgctgccggt

SEQ ID NO: 4752739 - DNA, 25 bp, Homo sapien
ggtgtggaacataccctaggagcca

SEQ ID NO: 4752740 - DNA, 25 bp, Homo sapien
aatagactttcagaaggaagggcct

SEQ ID NO: 4752741 - DNA, 25 bp, Homo sapien
aagggccttccataacaaggaatgc

SEQ ID NO: 4752742 - DNA, 25 bp, Homo sapien
tcaggaatccagtcataggcaaatc

SEQ ID NO: 4752743 - DNA, 25 bp, Homo sapien
gaccctttgacagcacagggaaaga

SEQ ID NO: 4752744 - DNA, 25 bp, Homo sapien
gtggcatacatgcaatttccatgga

SEQ ID NO: 4752745 - DNA, 25 bp, Homo sapien
gcctgttcattaattggtcccttgg

SEQ ID NO: 4752746 - DNA, 25 bp, Homo sapien
aaactgagaaggcaacgtggcatac

SEQ ID NO: 4752747 - DNA, 25 bp, Homo sapien
gagtaggatgctgaaaatgtgagta

SEQ ID NO: 4752748 - DNA, 25 bp, Homo sapien
agcattatcagaaacgtctttgtga

SEQ ID NO: 4752749 - DNA, 25 bp, Homo sapien
gatagctttgaggttttcgttagaa

SEQ ID NO: 4752750 - DNA, 25 bp, Homo sapien
gcgcattgaggcctaaggtgaaaaa

SEQ ID NO: 4752751 - DNA, 25 bp, Homo sapien
tgatgtgtgtactgaactcacagag

SEQ ID NO: 4752752 - DNA, 25 bp, Homo sapien
ttttccactaagattgagtacaaga

SEQ ID NO: 4752753 - DNA, 25 bp, Homo sapien
ccactaagattgagtacaagatagg

SEQ ID NO: 4752754 - DNA, 25 bp, Homo sapien
aagcatttaacaaagtttagcaaca

SEQ ID NO: 4752755 - DNA, 25 bp, Homo sapien
gtctaatcatagttagtggggaaca

SEQ ID NO: 4752756 - DNA, 25 bp, Homo sapien
aattatagaaaagtgtctgtgtgac

SEQ ID NO: 4752757 - DNA, 25 bp, Homo sapien
atagaaaagtgtctgtgtgactccc

SEQ ID NO: 4752758 - DNA, 25 bp, Homo sapien
agaaaagtgtctgtgtgactccctg

SEQ ID NO: 4752759 - DNA, 25 bp, Homo sapien
ttatagaaaagtgtctgtgtgactc

SEQ ID NO: 4752760 - DNA, 25 bp, Homo sapien
gttggcccgtggtccacattcctga

SEQ ID NO: 4752761 - DNA, 25 bp, Homo sapien
acaccatgggcgagcctgagttggc

SEQ ID NO: 4752762 - DNA, 25 bp, Homo sapien
tttgtctttagtctgacaccatggg

SEQ ID NO: 4752763 - DNA, 25 bp, Homo sapien
tacagagagtccttgtttgtcttta

SEQ ID NO: 4752764 - DNA, 25 bp, Homo sapien
gctcatccgcagcttatcctcaaag

SEQ ID NO: 4752765 - DNA, 25 bp, Homo sapien
caaagctatcctggaaagctccttc

SEQ ID NO: 4752766 - DNA, 25 bp, Homo sapien
agctcagagtgctctcttgatctgc

SEQ ID NO: 4752767 - DNA, 25 bp, Homo sapien
ctcagagtgctctcttgatctgccc

SEQ ID NO: 4752768 - DNA, 25 bp, Homo sapien
acagttcgaatcacagcatcttcaa

SEQ ID NO: 4752769 - DNA, 25 bp, Homo sapien
tgacagttcgaatcacagcatcttc

SEQ ID NO: 4752770 - DNA, 25 bp, Homo sapien
gcatcttcaaatttggccacttcca

SEQ ID NO: 4752771 - DNA, 25 bp, Homo sapien
cttccaaggcagaattaaacattcc

SEQ ID NO: 4752772 - DNA, 25 bp, Homo sapien
tcatgtgagttcatgggcatgctca

SEQ ID NO: 4752773 - DNA, 25 bp, Homo sapien
atgtgagttcatgggcatgctcatc

SEQ ID NO: 4752774 - DNA, 25 bp, Homo sapien
gtgagttcatgggcatgctcatcac

SEQ ID NO: 4752775 - DNA, 25 bp, Homo sapien
tgagttcatgggcatgctcatcact

SEQ ID NO: 4752776 - DNA, 25 bp, Homo sapien
agaagatcgaagagggatttactgg

SEQ ID NO: 4752777 - DNA, 25 bp, Homo sapien
tcgaagagggatttactggactgaa

SEQ ID NO: 4752778 - DNA, 25 bp, Homo sapien
cccagatccttttactcagatgcat

SEQ ID NO: 4752779 - DNA, 25 bp, Homo sapien
gatcgaagagggatttactggactg

SEQ ID NO: 4752780 - DNA, 25 bp, Homo sapien
atatggacatttataaatatgagaa

SEQ ID NO: 4752781 - DNA, 25 bp, Homo sapien
tatgagaatatatagatatacagac

SEQ ID NO: 4752782 - DNA, 25 bp, Homo sapien
ttccttttctcaaacaatatggaca

SEQ ID NO: 4752783 - DNA, 25 bp, Homo sapien
gaggcccacattttagaggtatttc

SEQ ID NO: 4752784 - DNA, 25 bp, Homo sapien
ttttatggatttatccagatcaagg

SEQ ID NO: 4752785 - DNA, 25 bp, Homo sapien
ttatggatttatccagatcaaggac

SEQ ID NO: 4752786 - DNA, 25 bp, Homo sapien
tttatggatttatccagatcaagga

SEQ ID NO: 4752787 - DNA, 25 bp, Homo sapien
tatggatttatccagatcaaggaca

SEQ ID NO: 4752788 - DNA, 25 bp, Homo sapien
aataggaataatattagcaagagaa

SEQ ID NO: 4752789 - DNA, 25 bp, Homo sapien
gacacaataaattaccaaagtgaat

SEQ ID NO: 4752790 - DNA, 25 bp, Homo sapien
tggtaagccaaactaacaagggtga

SEQ ID NO: 4752791 - DNA, 25 bp, Homo sapien
ttcaattctatgtgacacaataaat

SEQ ID NO: 4752792 - DNA, 25 bp, Homo sapien
cctactgaaaaggatgtacgaagat

SEQ ID NO: 4752793 - DNA, 25 bp, Homo sapien
ggatgtacgaagattaaaagcaaag

SEQ ID NO: 4752794 - DNA, 25 bp, Homo sapien
tctaatcccacaccctactgaaaag

SEQ ID NO: 4752795 - DNA, 25 bp, Homo sapien
tcctctaatcccacaccctactgaa

SEQ ID NO: 4752796 - DNA, 25 bp, Homo sapien
acattcaggatatatttctcaaacc

SEQ ID NO: 4752797 - DNA, 25 bp, Homo sapien
taataacccacattcaggatatatt

SEQ ID NO: 4752798 - DNA, 25 bp, Homo sapien
tcaacttaaagtctcatgtacataa

SEQ ID NO: 4752799 - DNA, 25 bp, Homo sapien
agtctcatgtacataataacccaca

SEQ ID NO: 4752800 - DNA, 25 bp, Homo sapien
ctgtaaaagaaatcgtccaagatag

SEQ ID NO: 4752801 - DNA, 25 bp, Homo sapien
taaaagaaatcgtccaagatagtta

SEQ ID NO: 4752802 - DNA, 25 bp, Homo sapien
tgtaaaagaaatcgtccaagatagt

SEQ ID NO: 4752803 - DNA, 25 bp, Homo sapien
actgtattgccaagaaaccagttcc

SEQ ID NO: 4752804 - DNA, 25 bp, Homo sapien
gacagactgtattgccaagaaacca

SEQ ID NO: 4752805 - DNA, 25 bp, Homo sapien
gccactgacagactgtattgccaag

SEQ ID NO: 4752806 - DNA, 25 bp, Homo sapien
ttatgccactgacagactgtattgc

SEQ ID NO: 4752807 - DNA, 25 bp, Homo sapien
tagattctagtttaacatactggat

SEQ ID NO: 4752808 - DNA, 25 bp, Homo sapien
tttagattctagtttaacatactgg

SEQ ID NO: 4752809 - DNA, 25 bp, Homo sapien
ttagattctagtttaacatactgga

SEQ ID NO: 4752810 - DNA, 25 bp, Homo sapien
ctcggcaataggcaagttattgtaa

SEQ ID NO: 4752811 - DNA, 25 bp, Homo sapien
aaagtttaatctcggcaataggcaa

SEQ ID NO: 4752812 - DNA, 25 bp, Homo sapien
acagcctgtaaagtttaatctcggc

SEQ ID NO: 4752813 - DNA, 25 bp, Homo sapien
tgtaaagtttaatctcggcaatagg

SEQ ID NO: 4752814 - DNA, 25 bp, Homo sapien
ctccaccctacagaaaatatgattg

SEQ ID NO: 4752815 - DNA, 25 bp, Homo sapien
ccaggtcgaaaaccctcatactgaa

SEQ ID NO: 4752816 - DNA, 25 bp, Homo sapien
gtcgaaaaccctcatactgaactct

SEQ ID NO: 4752817 - DNA, 25 bp, Homo sapien
aggtcgaaaaccctcatactgaact

SEQ ID NO: 4752818 - DNA, 25 bp, Homo sapien
tcccaggtcgaaaaccctcatactg

SEQ ID NO: 4752819 - DNA, 25 bp, Homo sapien
ttcgcctccgtgtacaactggactc

SEQ ID NO: 4752820 - DNA, 25 bp, Homo sapien
tagttaacactgcagcgggatctga

SEQ ID NO: 4752821 - DNA, 25 bp, Homo sapien
tccgtgtacaactggactcctgcgt

SEQ ID NO: 4752822 - DNA, 25 bp, Homo sapien
gcttgccaagatcgctgaaggcctc

SEQ ID NO: 4752823 - DNA, 25 bp, Homo sapien
ccaaggactcccatttcagagtgaa

SEQ ID NO: 4752824 - DNA, 25 bp, Homo sapien
caatggcccacaaggctctaggtaa

SEQ ID NO: 4752825 - DNA, 25 bp, Homo sapien
gagttagcctagtcatgcctttcaa

SEQ ID NO: 4752826 - DNA, 25 bp, Homo sapien
tcaaaggtcaacacagactagcaac

SEQ ID NO: 4752827 - DNA, 25 bp, Homo sapien
cttatactccacatgtccttctgaa

SEQ ID NO: 4752828 - DNA, 25 bp, Homo sapien
ccttatactccacatgtccttctga

SEQ ID NO: 4752829 - DNA, 25 bp, Homo sapien
ttatactccacatgtccttctgaac

SEQ ID NO: 4752830 - DNA, 25 bp, Homo sapien
tatactccacatgtccttctgaact

SEQ ID NO: 4752831 - DNA, 25 bp, Homo sapien
tggttcctgagcctgtgcactctgg

SEQ ID NO: 4752832 - DNA, 25 bp, Homo sapien
cctgagcctgtgcactctgggtctg

SEQ ID NO: 4752833 - DNA, 25 bp, Homo sapien
cgtggttcctgagcctgtgcactct

SEQ ID NO: 4752834 - DNA, 25 bp, Homo sapien
gttcctgagcctgtgcactctgggt

SEQ ID NO: 4752835 - DNA, 25 bp, Homo sapien
gaattggcacctgggtgcggagggc

SEQ ID NO: 4752836 - DNA, 25 bp, Homo sapien
tgtgtgtggaggcatccggaacagg

SEQ ID NO: 4752837 - DNA, 25 bp, Homo sapien
tgtggaggcatccggaacaggaatt

SEQ ID NO: 4752838 - DNA, 25 bp, Homo sapien
ccctgtgtgtggaggcatccggaac

SEQ ID NO: 4752839 - DNA, 25 bp, Homo sapien
tgtcatggcactggccctgccagtg

SEQ ID NO: 4752840 - DNA, 25 bp, Homo sapien
ctgaccctggtcctgtcatggcact

SEQ ID NO: 4752841 - DNA, 25 bp, Homo sapien
tctgccccttgtcctgaccctggtc

SEQ ID NO: 4752842 - DNA, 25 bp, Homo sapien
ttgtcctgaccctggtcctgtcatg

SEQ ID NO: 4752843 - DNA, 25 bp, Homo sapien
tgatgagacgaaatgacaaaattga

SEQ ID NO: 4752844 - DNA, 25 bp, Homo sapien
tgaaatgatgagacgaaatgacaaa

SEQ ID NO: 4752845 - DNA, 25 bp, Homo sapien
aaatgatgagacgaaatgacaaaat

SEQ ID NO: 4752846 - DNA, 25 bp, Homo sapien
atgatgagacgaaatgacaaaattg

SEQ ID NO: 4752847 - DNA, 25 bp, Homo sapien
aatgagatgatggatgaaatgagat

SEQ ID NO: 4752848 - DNA, 25 bp, Homo sapien
atgaaatgagatgatggatgaaatg

SEQ ID NO: 4752849 - DNA, 25 bp, Homo sapien
gaaatgagatgatggatgaaatgag

SEQ ID NO: 4752850 - DNA, 25 bp, Homo sapien
gagatgaaatgagatgatggatgaa

SEQ ID NO: 4752851 - DNA, 25 bp, Homo sapien
tgaaatgaaatgacataatgaaatg

SEQ ID NO: 4752852 - DNA, 25 bp, Homo sapien
tgagatgaaatgaaatgacataatg

SEQ ID NO: 4752853 - DNA, 25 bp, Homo sapien
gatgaaatgaaatgacataatgaaa

SEQ ID NO: 4752854 - DNA, 25 bp, Homo sapien
aaatgaaatgacataatgaaatgaa

SEQ ID NO: 4752855 - DNA, 25 bp, Homo sapien
aatgagataagatacgagatgagat

SEQ ID NO: 4752856 - DNA, 25 bp, Homo sapien
gataagatacgagatgagatgaaat

SEQ ID NO: 4752857 - DNA, 25 bp, Homo sapien
gagataagatacgagatgagatgaa

SEQ ID NO: 4752858 - DNA, 25 bp, Homo sapien
atgagataagatacgagatgagatg

SEQ ID NO: 4752859 - DNA, 25 bp, Homo sapien
gagatgaaacgagatgaaatgatga

SEQ ID NO: 4752860 - DNA, 25 bp, Homo sapien
atgaaatgagatgaaacgagatgaa

SEQ ID NO: 4752861 - DNA, 25 bp, Homo sapien
aatgatgaaatgagatgagatgaga

SEQ ID NO: 4752862 - DNA, 25 bp, Homo sapien
gatgaaacgagatgaaatgatgaaa

SEQ ID NO: 4752863 - DNA, 25 bp, Homo sapien
atgatgagatgaaaaatgagatgaa

SEQ ID NO: 4752864 - DNA, 25 bp, Homo sapien
atgagatgaaaaatgatgagatgaa

SEQ ID NO: 4752865 - DNA, 25 bp, Homo sapien
aaaatgatgagatgaaaaatgagat

SEQ ID NO: 4752866 - DNA, 25 bp, Homo sapien
gatgaaaaatgatgagatgaaaaat

SEQ ID NO: 4752867 - DNA, 25 bp, Homo sapien
aagagaaaagtctgccacccttcac

SEQ ID NO: 4752868 - DNA, 25 bp, Homo sapien
gtgtggccctctgtattataaaatg

SEQ ID NO: 4752869 - DNA, 25 bp, Homo sapien
gtggccctctgtattataaaatgtt

SEQ ID NO: 4752870 - DNA, 25 bp, Homo sapien
ggtgtggccctctgtattataaaat

SEQ ID NO: 4752871 - DNA, 25 bp, Homo sapien
tgtggccctctgtattataaaatgt

SEQ ID NO: 4752872 - DNA, 25 bp, Homo sapien
ctagtgtggagacaagtcatatcat

SEQ ID NO: 4752873 - DNA, 25 bp, Homo sapien
agtgtggagacaagtcatatcatgg

SEQ ID NO: 4752874 - DNA, 25 bp, Homo sapien
tagtgtggagacaagtcatatcatg

SEQ ID NO: 4752875 - DNA, 25 bp, Homo sapien
gctagtgtggagacaagtcatatca

SEQ ID NO: 4752876 - DNA, 25 bp, Homo sapien
ccccttcagtgagccagtgtttctg

SEQ ID NO: 4752877 - DNA, 25 bp, Homo sapien
tgccctccagctttcaaagtgctct

SEQ ID NO: 4752878 - DNA, 25 bp, Homo sapien
tgttccttagctgccccttcagtga

SEQ ID NO: 4752879 - DNA, 25 bp, Homo sapien
gctctgagtcatcacttacacagtg

SEQ ID NO: 4752880 - DNA, 25 bp, Homo sapien
tgatggggtctatgaggtaattcag

SEQ ID NO: 4752881 - DNA, 25 bp, Homo sapien
aggcttgtgggaagtctaagtccat

SEQ ID NO: 4752882 - DNA, 25 bp, Homo sapien
aaggcttgtgggaagtctaagtcca

SEQ ID NO: 4752883 - DNA, 25 bp, Homo sapien
agaaactgtgcccgcagcctatagt

SEQ ID NO: 4752884 - DNA, 25 bp, Homo sapien
aaaccatacagggatagggtaggag

SEQ ID NO: 4752885 - DNA, 25 bp, Homo sapien
atagggtaggagatgccatttggat

SEQ ID NO: 4752886 - DNA, 25 bp, Homo sapien
cctaggttaaaccatacagggatag

SEQ ID NO: 4752887 - DNA, 25 bp, Homo sapien
tgactcctctgggaaagagtttccc

SEQ ID NO: 4752888 - DNA, 25 bp, Homo sapien
aacactgtccagaggctaggtgcgg

SEQ ID NO: 4752889 - DNA, 25 bp, Homo sapien
taatctgacctgtgaaaaacactgt

SEQ ID NO: 4752890 - DNA, 25 bp, Homo sapien
tcaggcgatctagaccacgatgaaa

SEQ ID NO: 4752891 - DNA, 25 bp, Homo sapien
tcatttccggtaatcttcagagggt

SEQ ID NO: 4752892 - DNA, 25 bp, Homo sapien
tgccaaccacctaaaacctctcatt

SEQ ID NO: 4752893 - DNA, 25 bp, Homo sapien
gtgccaaccacctaaaacctctcat

SEQ ID NO: 4752894 - DNA, 25 bp, Homo sapien
cagtgccaaccacctaaaacctctc

SEQ ID NO: 4752895 - DNA, 25 bp, Homo sapien
agtgccaaccacctaaaacctctca

SEQ ID NO: 4752896 - DNA, 25 bp, Homo sapien
cagtgacggactcaggttctcacca

SEQ ID NO: 4752897 - DNA, 25 bp, Homo sapien
tggggccagattctgagctctccat

SEQ ID NO: 4752898 - DNA, 25 bp, Homo sapien
cgagattctgaactgggtccccttt

SEQ ID NO: 4752899 - DNA, 25 bp, Homo sapien
cttctctggggccagattctgagct

SEQ ID NO: 4752900 - DNA, 25 bp, Homo sapien
tctctggggccagattctgagctct

SEQ ID NO: 4752901 - DNA, 25 bp, Homo sapien
cagcaaaagttgtacaggtgacttc

SEQ ID NO: 4752902 - DNA, 25 bp, Homo sapien
cagtggccatcgttagagtgttgaa

SEQ ID NO: 4752903 - DNA, 25 bp, Homo sapien
ggaaaacaaagtagtgcacacggta

SEQ ID NO: 4752904 - DNA, 25 bp, Homo sapien
ttaaaccaagactggagacacaggt

SEQ ID NO: 4752905 - DNA, 25 bp, Homo sapien
ccttcaagcaaaatgggtacacgca

SEQ ID NO: 4752906 - DNA, 25 bp, Homo sapien
aagcatacttgcacacaccttcaag

SEQ ID NO: 4752907 - DNA, 25 bp, Homo sapien
tggcccaataatttaacttcgtaca

SEQ ID NO: 4752908 - DNA, 25 bp, Homo sapien
tactatgcaggtgttaagaatgagg

SEQ ID NO: 4752909 - DNA, 25 bp, Homo sapien
gagcaatgcttacatccttcaatgt

SEQ ID NO: 4752910 - DNA, 25 bp, Homo sapien
tccccagactactgactcaaatatt

SEQ ID NO: 4752911 - DNA, 25 bp, Homo sapien
gcagctgattaaatggtgcccatag

SEQ ID NO: 4752912 - DNA, 25 bp, Homo sapien
cagtattaactatcacaggattaca

SEQ ID NO: 4752913 - DNA, 25 bp, Homo sapien
tgttatgacttgtaacactgtggga

SEQ ID NO: 4752914 - DNA, 25 bp, Homo sapien
tatgacttgtaacactgtgggaggg

SEQ ID NO: 4752915 - DNA, 25 bp, Homo sapien
tatgttatgacttgtaacactgtgg

SEQ ID NO: 4752916 - DNA, 25 bp, Homo sapien
gacttgtaacactgtgggagggtta

SEQ ID NO: 4752917 - DNA, 25 bp, Homo sapien
gaaccgagagggaatcccactttgc

SEQ ID NO: 4752918 - DNA, 25 bp, Homo sapien
tcactctgttgacagtaataagttg

SEQ ID NO: 4752919 - DNA, 25 bp, Homo sapien
tgtcactctgttgacagtaataagt

SEQ ID NO: 4752920 - DNA, 25 bp, Homo sapien
ccactgtcactgaaccgagagggaa

SEQ ID NO: 4752921 - DNA, 25 bp, Homo sapien
cggcaagtgatggtgactctgcctc

SEQ ID NO: 4752922 - DNA, 25 bp, Homo sapien
gcccggcaagtgatggtgactctgc

SEQ ID NO: 4752923 - DNA, 25 bp, Homo sapien
ccggcaagtgatggtgactctgcct

SEQ ID NO: 4752924 - DNA, 25 bp, Homo sapien
tcgcccggcaagtgatggtgactct

SEQ ID NO: 4752925 - DNA, 25 bp, Homo sapien
tgggtcatctggatgtcacatctgg

SEQ ID NO: 4752926 - DNA, 25 bp, Homo sapien
ggagactgggtcatctggatgtcac

SEQ ID NO: 4752927 - DNA, 25 bp, Homo sapien
gactgggtcatctggatgtcacatc

SEQ ID NO: 4752928 - DNA, 25 bp, Homo sapien
ggtcatctggatgtcacatctggca

SEQ ID NO: 4752929 - DNA, 25 bp, Homo sapien
ctggcagccagagccccaggagccc

SEQ ID NO: 4752930 - DNA, 25 bp, Homo sapien
caggagctgagtgggggccctcacg

SEQ ID NO: 4752931 - DNA, 25 bp, Homo sapien
ggagctgagtgggggccctcacgtc

SEQ ID NO: 4752932 - DNA, 25 bp, Homo sapien
cccaggagctgagtgggggccctca

SEQ ID NO: 4752933 - DNA, 25 bp, Homo sapien
aagtaggatgacaaaggccgcatcc

SEQ ID NO: 4752934 - DNA, 25 bp, Homo sapien
cgcatcccctgagtaatgctctgag

SEQ ID NO: 4752935 - DNA, 25 bp, Homo sapien
tcaaagtaggatgacaaaggccgca

SEQ ID NO: 4752936 - DNA, 25 bp, Homo sapien
gtaggatgacaaaggccgcatcccc

SEQ ID NO: 4752937 - DNA, 25 bp, Homo sapien
ctcaggagcatctgccctagagtct

SEQ ID NO: 4752938 - DNA, 25 bp, Homo sapien
ggagcatctgccctagagtctggct

SEQ ID NO: 4752939 - DNA, 25 bp, Homo sapien
agcatctgccctagagtctggcttt

SEQ ID NO: 4752940 - DNA, 25 bp, Homo sapien
tcaggagcatctgccctagagtctg

SEQ ID NO: 4752941 - DNA, 25 bp, Homo sapien
gatacatctctggattcaaatgcgc

SEQ ID NO: 4752942 - DNA, 25 bp, Homo sapien
ctgcttttccagagaactggatttc

SEQ ID NO: 4752943 - DNA, 25 bp, Homo sapien
gctgccaggatccatatatccagat

SEQ ID NO: 4752944 - DNA, 25 bp, Homo sapien
tctttgtgcataattttagcagtca

SEQ ID NO: 4752945 - DNA, 25 bp, Homo sapien
gtagcttcaaacaacaggaatggaa

SEQ ID NO: 4752946 - DNA, 25 bp, Homo sapien
taagcaaggagattgcaaaccaaca

SEQ ID NO: 4752947 - DNA, 25 bp, Homo sapien
ccatttgtgttagtgtcctcgggct

SEQ ID NO: 4752948 - DNA, 25 bp, Homo sapien
caacacaacacctttagtctggatt

SEQ ID NO: 4752949 - DNA, 25 bp, Homo sapien
tccgttccgatcatggactgtattg

SEQ ID NO: 4752950 - DNA, 25 bp, Homo sapien
gaagagggtaagttaaggcatgtcc

SEQ ID NO: 4752951 - DNA, 25 bp, Homo sapien
aggcatgtccaatcatccgttccga

SEQ ID NO: 4752952 - DNA, 25 bp, Homo sapien
ttcatattaaaagctggtcagttct

SEQ ID NO: 4752953 - DNA, 25 bp, Homo sapien
aatgcaaatgcaaatcttacacaca

SEQ ID NO: 4752954 - DNA, 25 bp, Homo sapien
gcttttaatactgcacttggatgtt

SEQ ID NO: 4752955 - DNA, 25 bp, Homo sapien
gaggatagcaaattgatgccaaaat

SEQ ID NO: 4752956 - DNA, 25 bp, Homo sapien
tggatgtttgaaatcacatacgtgg

SEQ ID NO: 4752957 - DNA, 25 bp, Homo sapien
aactgtgcgtctattaaaactctgt

SEQ ID NO: 4752958 - DNA, 25 bp, Homo sapien
tctgtcttctggaaattacacagtc

SEQ ID NO: 4752959 - DNA, 25 bp, Homo sapien
gaactgtgcgtctattaaaactctg

SEQ ID NO: 4752960 - DNA, 25 bp, Homo sapien
aattttttgcaccatcagacaaaag

SEQ ID NO: 4752961 - DNA, 25 bp, Homo sapien
acaaaagacaagggtagaagacatt

SEQ ID NO: 4752962 - DNA, 25 bp, Homo sapien
aaattttttgcaccatcagacaaaa

SEQ ID NO: 4752963 - DNA, 25 bp, Homo sapien
gaagacatttgtaaccctataaaca

SEQ ID NO: 4752964 - DNA, 25 bp, Homo sapien
tttatgttattaaagagctccctta

SEQ ID NO: 4752965 - DNA, 25 bp, Homo sapien
tatataattttaggtcgagcttgaa

SEQ ID NO: 4752966 - DNA, 25 bp, Homo sapien
tagttttaatactgatgtttagaca

SEQ ID NO: 4752967 - DNA, 25 bp, Homo sapien
acatgttaaatctatatctatccca

SEQ ID NO: 4752968 - DNA, 25 bp, Homo sapien
caattgtttctatggagcacagaca

SEQ ID NO: 4752969 - DNA, 25 bp, Homo sapien
ctaatgagaggatcagaggtctggc

SEQ ID NO: 4752970 - DNA, 25 bp, Homo sapien
gttatccgtctaacctctgtcagtg

SEQ ID NO: 4752971 - DNA, 25 bp, Homo sapien
gactcccagtgcagacaattgtttc

SEQ ID NO: 4752972 - DNA, 25 bp, Homo sapien
tggtttgaatgattgccccttccaa

SEQ ID NO: 4752973 - DNA, 25 bp, Homo sapien
ctatggtttgaatgattgccccttc

SEQ ID NO: 4752974 - DNA, 25 bp, Homo sapien
tatggtttgaatgattgccccttcc

SEQ ID NO: 4752975 - DNA, 25 bp, Homo sapien
gctatggtttgaatgattgcccctt

SEQ ID NO: 4752976 - DNA, 25 bp, Homo sapien
ggtacacccatcagatggagagttg

SEQ ID NO: 4752977 - DNA, 25 bp, Homo sapien
catcagatggagagttggtcttttc

SEQ ID NO: 4752978 - DNA, 25 bp, Homo sapien
cacccatcagatggagagttggtct

SEQ ID NO: 4752979 - DNA, 25 bp, Homo sapien
tcaggtacacccatcagatggagag

SEQ ID NO: 4752980 - DNA, 25 bp, Homo sapien
taatctgacatgcttattaattcat

SEQ ID NO: 4752981 - DNA, 25 bp, Homo sapien
attaatctgacatgcttattaattc

SEQ ID NO: 4752982 - DNA, 25 bp, Homo sapien
taattcatcccatagatataataat

SEQ ID NO: 4752983 - DNA, 25 bp, Homo sapien
ttaattcatcccatagatataataa

SEQ ID NO: 4752984 - DNA, 25 bp, Homo sapien
attaggaatgccactcttacagaac

SEQ ID NO: 4752985 - DNA, 25 bp, Homo sapien
cagatatagttctactatgtaaaca

SEQ ID NO: 4752986 - DNA, 25 bp, Homo sapien
gtgactacccaaaaatcatgaatca

SEQ ID NO: 4752987 - DNA, 25 bp, Homo sapien
aaggttgcctgatgtgttccagtgt

SEQ ID NO: 4752988 - DNA, 25 bp, Homo sapien
tcagtgaccatagtgtcttgagacc

SEQ ID NO: 4752989 - DNA, 25 bp, Homo sapien
gttttatcaggcctggagggacaca

SEQ ID NO: 4752990 - DNA, 25 bp, Homo sapien
catccaggacctaaatctacagtac

SEQ ID NO: 4752991 - DNA, 25 bp, Homo sapien
taagcctttctacaagtggttgaca

SEQ ID NO: 4752992 - DNA, 25 bp, Homo sapien
aaagaatctccttcgttggtacctg

SEQ ID NO: 4752993 - DNA, 25 bp, Homo sapien
tctggagacttggactgataaacaa

SEQ ID NO: 4752994 - DNA, 25 bp, Homo sapien
cagtttccttggcaaaaaattcagg

SEQ ID NO: 4752995 - DNA, 25 bp, Homo sapien
ttggtacctggacgagagtttctcc

SEQ ID NO: 4752996 - DNA, 25 bp, Homo sapien
agaacataaatgagtggacattttc

SEQ ID NO: 4752997 - DNA, 25 bp, Homo sapien
gatctttctacctgtgtttgtggtg

SEQ ID NO: 4752998 - DNA, 25 bp, Homo sapien
ttttctgcatgcctggatctttcta

SEQ ID NO: 4752999 - DNA, 25 bp, Homo sapien
ataaatgagtggacattttctgcat

SEQ ID NO: 4753000 - DNA, 25 bp, Homo sapien
tataactctccaagaatgtacagaa

SEQ ID NO: 4753001 - DNA, 25 bp, Homo sapien
tgcctattttgaactgggttactgt

SEQ ID NO: 4753002 - DNA, 25 bp, Homo sapien
atactactattgctagattgtgcag

SEQ ID NO: 4753003 - DNA, 25 bp, Homo sapien
agtactttatggcttatctcttggc

SEQ ID NO: 4753004 - DNA, 25 bp, Homo sapien
caaagcctattgtagtttcatgcaa

SEQ ID NO: 4753005 - DNA, 25 bp, Homo sapien
ttcaaagcctattgtagtttcatgc

SEQ ID NO: 4753006 - DNA, 25 bp, Homo sapien
cttttgcctggaggtatccagtttt

SEQ ID NO: 4753007 - DNA, 25 bp, Homo sapien
gaggtatccagttttttcagaacca

SEQ ID NO: 4753008 - DNA, 25 bp, Homo sapien
cagggtaatgggtccacagggtaat

SEQ ID NO: 4753009 - DNA, 25 bp, Homo sapien
agatctccttttgttgggtccccag

SEQ ID NO: 4753010 - DNA, 25 bp, Homo sapien
aatggaaccatgtagccttaccctg

SEQ ID NO: 4753011 - DNA, 25 bp, Homo sapien
aatgggatgccctatgagcttgtag

SEQ ID NO: 4753012 - DNA, 25 bp, Homo sapien
cattgtagtcgttaagagtatttac

SEQ ID NO: 4753013 - DNA, 25 bp, Homo sapien
tctctagaacttttacgtcttctaa

SEQ ID NO: 4753014 - DNA, 25 bp, Homo sapien
acattgttatgtaaagatctctaga

SEQ ID NO: 4753015 - DNA, 25 bp, Homo sapien
tatgatgactcatatcatggaatca

SEQ ID NO: 4753016 - DNA, 25 bp, Homo sapien
tttaataggaggactcttctcagca

SEQ ID NO: 4753017 - DNA, 25 bp, Homo sapien
gcttggcacctcaactatagcacac

SEQ ID NO: 4753018 - DNA, 25 bp, Homo sapien
cagcattttttgtatggcacatgta

SEQ ID NO: 4753019 - DNA, 25 bp, Homo sapien
tagaagctatttttcgcttggcacc

SEQ ID NO: 4753020 - DNA, 25 bp, Homo sapien
gaaaccatgtgctcataaatcttca

SEQ ID NO: 4753021 - DNA, 25 bp, Homo sapien
cagctcctgtagaatgcattttggg

SEQ ID NO: 4753022 - DNA, 25 bp, Homo sapien
tgtgataccatctcaccccagtcta

SEQ ID NO: 4753023 - DNA, 25 bp, Homo sapien
tacacaccatccaatgctatgcagc

SEQ ID NO: 4753024 - DNA, 25 bp, Homo sapien
gaagatggcatgactttcagatgaa

SEQ ID NO: 4753025 - DNA, 25 bp, Homo sapien
cagaaagtgaagcagagtcaaccag

SEQ ID NO: 4753026 - DNA, 25 bp, Homo sapien
ttccagaattccaagcatacagatc

SEQ ID NO: 4753027 - DNA, 25 bp, Homo sapien
tgtgagccacaattgccccatttgg

SEQ ID NO: 4753028 - DNA, 25 bp, Homo sapien
tttatggctgtattcatcattttca

SEQ ID NO: 4753029 - DNA, 25 bp, Homo sapien
tgtgcactatttgcatcatgcattt

SEQ ID NO: 4753030 - DNA, 25 bp, Homo sapien
ccctgacagcagattatattttact

SEQ ID NO: 4753031 - DNA, 25 bp, Homo sapien
tagttcatgcgatgtgattttcaaa

SEQ ID NO: 4753032 - DNA, 25 bp, Homo sapien
cactttattttcagtcttttcaaag

SEQ ID NO: 4753033 - DNA, 25 bp, Homo sapien
ttaatcagcagtcactttattttca

SEQ ID NO: 4753034 - DNA, 25 bp, Homo sapien
tattttcagtcttttcaaagccact

SEQ ID NO: 4753035 - DNA, 25 bp, Homo sapien
taatcagcagtcactttattttcag

SEQ ID NO: 4753036 - DNA, 25 bp, Homo sapien
aaatacaagatgaaacattgccttc

SEQ ID NO: 4753037 - DNA, 25 bp, Homo sapien
gcaaagagacaattcaatccaatgt

SEQ ID NO: 4753038 - DNA, 25 bp, Homo sapien
tctgtgtacatgagtatctgatggt

SEQ ID NO: 4753039 - DNA, 25 bp, Homo sapien
aatccaatgtgccaagctggtcccc

SEQ ID NO: 4753040 - DNA, 25 bp, Homo sapien
tcattcatagtacaaagcaacactt

SEQ ID NO: 4753041 - DNA, 25 bp, Homo sapien
aatgttctgctttagattttcccag

SEQ ID NO: 4753042 - DNA, 25 bp, Homo sapien
taatgtggacatgtttcactcaaat

SEQ ID NO: 4753043 - DNA, 25 bp, Homo sapien
tgcctaaggcttaccagaagcttta

SEQ ID NO: 4753044 - DNA, 25 bp, Homo sapien
aagtagactctcatggtcttgggca

SEQ ID NO: 4753045 - DNA, 25 bp, Homo sapien
cccattccatataggagaattggac

SEQ ID NO: 4753046 - DNA, 25 bp, Homo sapien
gaagaagtagactctcatggtcttg

SEQ ID NO: 4753047 - DNA, 25 bp, Homo sapien
gtggaagaagtagactctcatggtc

SEQ ID NO: 4753048 - DNA, 25 bp, Homo sapien
gtggcatacatgcaatttccatgga

SEQ ID NO: 4753049 - DNA, 25 bp, Homo sapien
gcctgttcattaattggtcccttgg

SEQ ID NO: 4753050 - DNA, 25 bp, Homo sapien
aaactgagaaggcaacgtggcatac

SEQ ID NO: 4753051 - DNA, 25 bp, Homo sapien
gagtaggatgctgaaaatgtgagta

SEQ ID NO: 4753052 - DNA, 25 bp, Homo sapien
acttctacagctacatagtgaagac

SEQ ID NO: 4753053 - DNA, 25 bp, Homo sapien
tatacttctacagctacatagtgaa

SEQ ID NO: 4753054 - DNA, 25 bp, Homo sapien
ttatacttctacagctacatagtga

SEQ ID NO: 4753055 - DNA, 25 bp, Homo sapien
ttctacagctacatagtgaagacac

SEQ ID NO: 4753056 - DNA, 25 bp, Homo sapien
cagttcaaaagagtatccagtgaaa

SEQ ID NO: 4753057 - DNA, 25 bp, Homo sapien
gagtgatgccagctaagggctgatc

SEQ ID NO: 4753058 - DNA, 25 bp, Homo sapien
aaatacatgtatatggtgggggaaa

SEQ ID NO: 4753059 - DNA, 25 bp, Homo sapien
gatgccagctaagggctgatcaata

SEQ ID NO: 4753060 - DNA, 25 bp, Homo sapien
acctgccagggatgagccaacatgg

SEQ ID NO: 4753061 - DNA, 25 bp, Homo sapien
ctgtagaaccctgcttccttggaac

SEQ ID NO: 4753062 - DNA, 25 bp, Homo sapien
tgaactggggtaccttgcccttcag

SEQ ID NO: 4753063 - DNA, 25 bp, Homo sapien
gacttggtgccctgctttccaggga

SEQ ID NO: 4753064 - DNA, 25 bp, Homo sapien
ttttccactaagattgagtacaaga

SEQ ID NO: 4753065 - DNA, 25 bp, Homo sapien
ccactaagattgagtacaagatagg

SEQ ID NO: 4753066 - DNA, 25 bp, Homo sapien
aagcatttaacaaagtttagcaaca

SEQ ID NO: 4753067 - DNA, 25 bp, Homo sapien
gtctaatcatagttagtggggaaca

SEQ ID NO: 4753068 - DNA, 25 bp, Homo sapien
aaacagatacaagaccaaagaccca

SEQ ID NO: 4753069 - DNA, 25 bp, Homo sapien
gggcaaacaagacaacacaatggta

SEQ ID NO: 4753070 - DNA, 25 bp, Homo sapien
tacaacttaagagcagaaaaacaac

SEQ ID NO: 4753071 - DNA, 25 bp, Homo sapien
cagagacctttgaaataaatccaaa

SEQ ID NO: 4753072 - DNA, 25 bp, Homo sapien
aattatagaaaagtgtctgtgtgac

SEQ ID NO: 4753073 - DNA, 25 bp, Homo sapien
atagaaaagtgtctgtgtgactccc

SEQ ID NO: 4753074 - DNA, 25 bp, Homo sapien
ttatagaaaagtgtctgtgtgactc

SEQ ID NO: 4753075 - DNA, 25 bp, Homo sapien
agaaaagtgtctgtgtgactccctg

SEQ ID NO: 4753076 - DNA, 25 bp, Homo sapien
gttggcccgtggtccacattcctga

SEQ ID NO: 4753077 - DNA, 25 bp, Homo sapien
acaccatgggcgagcctgagttggc

SEQ ID NO: 4753078 - DNA, 25 bp, Homo sapien
tacagagagtccttgtttgtcttta

SEQ ID NO: 4753079 - DNA, 25 bp, Homo sapien
tttgtctttagtctgacaccatggg

SEQ ID NO: 4753080 - DNA, 25 bp, Homo sapien
gctcatccgcagcttatcctcaaag

SEQ ID NO: 4753081 - DNA, 25 bp, Homo sapien
caaagctatcctggaaagctccttc

SEQ ID NO: 4753082 - DNA, 25 bp, Homo sapien
agctcagagtgctctcttgatctgc

SEQ ID NO: 4753083 - DNA, 25 bp, Homo sapien
ctcagagtgctctcttgatctgccc

SEQ ID NO: 4753084 - DNA, 25 bp, Homo sapien
gcatcttcaaatttggccacttcca

SEQ ID NO: 4753085 - DNA, 25 bp, Homo sapien
tgacagttcgaatcacagcatcttc

SEQ ID NO: 4753086 - DNA, 25 bp, Homo sapien
acagttcgaatcacagcatcttcaa

SEQ ID NO: 4753087 - DNA, 25 bp, Homo sapien
cttccaaggcagaattaaacattcc

SEQ ID NO: 4753088 - DNA, 25 bp, Homo sapien
caaaaacaactcactgaagggtgat

SEQ ID NO: 4753089 - DNA, 25 bp, Homo sapien
taatcaaaatgtatttgcccctgaa

SEQ ID NO: 4753090 - DNA, 25 bp, Homo sapien
aacaaaaacaactcactgaagggtg

SEQ ID NO: 4753091 - DNA, 25 bp, Homo sapien
cctgaaagtggaattactacctcaa

SEQ ID NO: 4753092 - DNA, 25 bp, Homo sapien
tgagttcatgggcatgctcatcact

SEQ ID NO: 4753093 - DNA, 25 bp, Homo sapien
atgtgagttcatgggcatgctcatc

SEQ ID NO: 4753094 - DNA, 25 bp, Homo sapien
gtgagttcatgggcatgctcatcac

SEQ ID NO: 4753095 - DNA, 25 bp, Homo sapien
tcatgtgagttcatgggcatgctca

SEQ ID NO: 4753096 - DNA, 25 bp, Homo sapien
agaagatcgaagagggatttactgg

SEQ ID NO: 4753097 - DNA, 25 bp, Homo sapien
tcgaagagggatttactggactgaa

SEQ ID NO: 4753098 - DNA, 25 bp, Homo sapien
cccagatccttttactcagatgcat

SEQ ID NO: 4753099 - DNA, 25 bp, Homo sapien
gatcgaagagggatttactggactg

SEQ ID NO: 4753100 - DNA, 25 bp, Homo sapien
gataaacgccagtggtattattacc

SEQ ID NO: 4753101 - DNA, 25 bp, Homo sapien
aaacagtaagataaacgccagtggt

SEQ ID NO: 4753102 - DNA, 25 bp, Homo sapien
taagataaacgccagtggtattatt

SEQ ID NO: 4753103 - DNA, 25 bp, Homo sapien
acagtaagataaacgccagtggtat

SEQ ID NO: 4753104 - DNA, 25 bp, Homo sapien
ttttatggatttatccagatcaagg

SEQ ID NO: 4753105 - DNA, 25 bp, Homo sapien
tatggatttatccagatcaaggaca

SEQ ID NO: 4753106 - DNA, 25 bp, Homo sapien
ttatggatttatccagatcaaggac

SEQ ID NO: 4753107 - DNA, 25 bp, Homo sapien
tttatggatttatccagatcaagga

SEQ ID NO: 4753108 - DNA, 25 bp, Homo sapien
acattcaggatatatttctcaaacc

SEQ ID NO: 4753109 - DNA, 25 bp, Homo sapien
tcaacttaaagtctcatgtacataa

SEQ ID NO: 4753110 - DNA, 25 bp, Homo sapien
agtctcatgtacataataacccaca

SEQ ID NO: 4753111 - DNA, 25 bp, Homo sapien
taataacccacattcaggatatatt

SEQ ID NO: 4753112 - DNA, 25 bp, Homo sapien
gccactgacagactgtattgccaag

SEQ ID NO: 4753113 - DNA, 25 bp, Homo sapien
gacagactgtattgccaagaaacca

SEQ ID NO: 4753114 - DNA, 25 bp, Homo sapien
ttatgccactgacagactgtattgc

SEQ ID NO: 4753115 - DNA, 25 bp, Homo sapien
actgtattgccaagaaaccagttcc

SEQ ID NO: 4753116 - DNA, 25 bp, Homo sapien
ctccaccctacagaaaatatgattg

SEQ ID NO: 4753117 - DNA, 25 bp, Homo sapien
gcaccaaatacgcagcaaagggacc

SEQ ID NO: 4753118 - DNA, 25 bp, Homo sapien
ctcaggcaccaaatacgcagcaaag

SEQ ID NO: 4753119 - DNA, 25 bp, Homo sapien
caggcaccaaatacgcagcaaaggg

SEQ ID NO: 4753120 - DNA, 25 bp, Homo sapien
accaaatacgcagcaaagggaccca

SEQ ID NO: 4753121 - DNA, 25 bp, Homo sapien
tcccaggtcgaaaaccctcatactg

SEQ ID NO: 4753122 - DNA, 25 bp, Homo sapien
ccaggtcgaaaaccctcatactgaa

SEQ ID NO: 4753123 - DNA, 25 bp, Homo sapien
gtcgaaaaccctcatactgaactct

SEQ ID NO: 4753124 - DNA, 25 bp, Homo sapien
aggtcgaaaaccctcatactgaact

SEQ ID NO: 4753125 - DNA, 25 bp, Homo sapien
ccaaggactcccatttcagagtgaa

SEQ ID NO: 4753126 - DNA, 25 bp, Homo sapien
gagttagcctagtcatgcctttcaa

SEQ ID NO: 4753127 - DNA, 25 bp, Homo sapien
caatggcccacaaggctctaggtaa

SEQ ID NO: 4753128 - DNA, 25 bp, Homo sapien
tcaaaggtcaacacagactagcaac

SEQ ID NO: 4753129 - DNA, 25 bp, Homo sapien
tctccgcatctgaccttatactcca

SEQ ID NO: 4753130 - DNA, 25 bp, Homo sapien
tatctccgcatctgaccttatactc

SEQ ID NO: 4753131 - DNA, 25 bp, Homo sapien
ttatctccgcatctgaccttatact

SEQ ID NO: 4753132 - DNA, 25 bp, Homo sapien
ccgcatctgaccttatactccacat

SEQ ID NO: 4753133 - DNA, 25 bp, Homo sapien
ctgggcctgtgcactctgggtctgt

SEQ ID NO: 4753134 - DNA, 25 bp, Homo sapien
gtgcactctgggtctgtgcctcaga

SEQ ID NO: 4753135 - DNA, 25 bp, Homo sapien
tgggtctgtgcctcagaggctgcca

SEQ ID NO: 4753136 - DNA, 25 bp, Homo sapien
cgtggttcctgggcctgtgcactct

SEQ ID NO: 4753137 - DNA, 25 bp, Homo sapien
atgagatgaaatgatgaaatgaaat

SEQ ID NO: 4753138 - DNA, 25 bp, Homo sapien
agatgaaatgatgaaatgaaatgag

SEQ ID NO: 4753139 - DNA, 25 bp, Homo sapien
aaatgatgaaatgaaatgagatgaa

SEQ ID NO: 4753140 - DNA, 25 bp, Homo sapien
tgaaatgatgaaatgaaatgagatg

SEQ ID NO: 4753141 - DNA, 25 bp, Homo sapien
aaggaaattatgaaatgtaatgatg

SEQ ID NO: 4753142 - DNA, 25 bp, Homo sapien
tgaaaggaaattatgaaatgtaatg

SEQ ID NO: 4753143 - DNA, 25 bp, Homo sapien
tgaaattgaaatgagatgagttgaa

SEQ ID NO: 4753144 - DNA, 25 bp, Homo sapien
ggaaattatgaaatgtaatgatgaa

SEQ ID NO: 4753145 - DNA, 25 bp, Homo sapien
aatgagatgaaatgatgagatgaga

SEQ ID NO: 4753146 - DNA, 25 bp, Homo sapien
aatgatgagatgagataaaatgaga

SEQ ID NO: 4753147 - DNA, 25 bp, Homo sapien
gagatgaaatgatgagatgagatga

SEQ ID NO: 4753148 - DNA, 25 bp, Homo sapien
gatgagatgagataaaatgagatga

SEQ ID NO: 4753149 - DNA, 25 bp, Homo sapien
aaatgagatgaaatgagatgtaatg

SEQ ID NO: 4753150 - DNA, 25 bp, Homo sapien
aatgagatgaaatgagatgtaatga

SEQ ID NO: 4753151 - DNA, 25 bp, Homo sapien
gaaatgaaatgacataatgaaatga

SEQ ID NO: 4753152 - DNA, 25 bp, Homo sapien
gaaataatgaaatgagatgaaataa

SEQ ID NO: 4753153 - DNA, 25 bp, Homo sapien
gaaatgacataatgaaatgaaataa

SEQ ID NO: 4753154 - DNA, 25 bp, Homo sapien
gatgaaatgaaatgacataatgaaa

SEQ ID NO: 4753155 - DNA, 25 bp, Homo sapien
gaaatgaaaatgaaatggaaatgat

SEQ ID NO: 4753156 - DNA, 25 bp, Homo sapien
aatgaaaatgaaatggaaatgatga

SEQ ID NO: 4753157 - DNA, 25 bp, Homo sapien
aatgaaatgatgaaataatgaaatg

SEQ ID NO: 4753158 - DNA, 25 bp, Homo sapien
aatgaaatgaaaatgaaatggaaat

SEQ ID NO: 4753159 - DNA, 25 bp, Homo sapien
agatgaaatgatgagatgagatgag

SEQ ID NO: 4753160 - DNA, 25 bp, Homo sapien
atgagatgaaatgatgagatgaaat

SEQ ID NO: 4753161 - DNA, 25 bp, Homo sapien
gaaatgatgagatgaaatgatgaga

SEQ ID NO: 4753162 - DNA, 25 bp, Homo sapien
gagatgaaatgatgagatgagatga

SEQ ID NO: 4753163 - DNA, 25 bp, Homo sapien
aagagaaaagtctgccacccttcac

SEQ ID NO: 4753164 - DNA, 25 bp, Homo sapien
gtgtggccctctgtattataaaatg

SEQ ID NO: 4753165 - DNA, 25 bp, Homo sapien
ggtgtggccctctgtattataaaat

SEQ ID NO: 4753166 - DNA, 25 bp, Homo sapien
gtggccctctgtattataaaatgtt

SEQ ID NO: 4753167 - DNA, 25 bp, Homo sapien
tgtggccctctgtattataaaatgt

SEQ ID NO: 4753168 - DNA, 25 bp, Homo sapien
ccccttcagtgagccagtgtttctg

SEQ ID NO: 4753169 - DNA, 25 bp, Homo sapien
tgccctccagctttcaaagtgctct

SEQ ID NO: 4753170 - DNA, 25 bp, Homo sapien
tgttccttagctgccccttcagtga

SEQ ID NO: 4753171 - DNA, 25 bp, Homo sapien
gctctgagtcatcacttacacagtg

SEQ ID NO: 4753172 - DNA, 25 bp, Homo sapien
aaaccatacagggatagggtaggag

SEQ ID NO: 4753173 - DNA, 25 bp, Homo sapien
atagggtaggagatgccatttggat

SEQ ID NO: 4753174 - DNA, 25 bp, Homo sapien
cctaggttaaaccatacagggatag

SEQ ID NO: 4753175 - DNA, 25 bp, Homo sapien
tgactcctctgggaaagagtttccc

SEQ ID NO: 4753176 - DNA, 25 bp, Homo sapien
gtgccaaccacctaaaacctctcat

SEQ ID NO: 4753177 - DNA, 25 bp, Homo sapien
tgccaaccacctaaaacctctcatt

SEQ ID NO: 4753178 - DNA, 25 bp, Homo sapien
cagtgccaaccacctaaaacctctc

SEQ ID NO: 4753179 - DNA, 25 bp, Homo sapien
agtgccaaccacctaaaacctctca

SEQ ID NO: 4753180 - DNA, 25 bp, Homo sapien
cagtgacggactcaggttctcacca

SEQ ID NO: 4753181 - DNA, 25 bp, Homo sapien
cgagattctgaactgggtccccttt

SEQ ID NO: 4753182 - DNA, 25 bp, Homo sapien
cttctctggggccagattctgagct

SEQ ID NO: 4753183 - DNA, 25 bp, Homo sapien
tggggccagattctgagctctccat

SEQ ID NO: 4753184 - DNA, 25 bp, Homo sapien
tctctggggccagattctgagctct

SEQ ID NO: 4753185 - DNA, 25 bp, Homo sapien
cagcaaaagttgtacaggtgacttc

SEQ ID NO: 4753186 - DNA, 25 bp, Homo sapien
cagtggccatcgttagagtgttgaa

SEQ ID NO: 4753187 - DNA, 25 bp, Homo sapien
ggaaaacaaagtagtgcacacggta

SEQ ID NO: 4753188 - DNA, 25 bp, Homo sapien
ttaaaccaagactggagacacaggt

SEQ ID NO: 4753189 - DNA, 25 bp, Homo sapien
ttctgctttcccaatttcttaaata

SEQ ID NO: 4753190 - DNA, 25 bp, Homo sapien
aatatggttcagtgaaacctccacc

SEQ ID NO: 4753191 - DNA, 25 bp, Homo sapien
aaatacaatgcaactttatgtttaa

SEQ ID NO: 4753192 - DNA, 25 bp, Homo sapien
tggtgtgaatatggttcagtgaaac

SEQ ID NO: 4753193 - DNA, 25 bp, Homo sapien
aagggcattcaaatcggaaaggagg

SEQ ID NO: 4753194 - DNA, 25 bp, Homo sapien
aagtcctatcaagagtaattagaca

SEQ ID NO: 4753195 - DNA, 25 bp, Homo sapien
ggacatcaaattgttcctatttgca

SEQ ID NO: 4753196 - DNA, 25 bp, Homo sapien
aactacaaaacaagtaggatcttct

SEQ ID NO: 4753197 - DNA, 25 bp, Homo sapien
tccccagactactgactcaaatatt

SEQ ID NO: 4753198 - DNA, 25 bp, Homo sapien
gagcaatgcttacatccttcaatgt

SEQ ID NO: 4753199 - DNA, 25 bp, Homo sapien
gcagctgattaaatggtgcccatag

SEQ ID NO: 4753200 - DNA, 25 bp, Homo sapien
cagtattaactatcacaggattaca

SEQ ID NO: 4753201 - DNA, 25 bp, Homo sapien
tcctcagctggacttatctctcttc

SEQ ID NO: 4753202 - DNA, 25 bp, Homo sapien
ccataacacagactcctcagctgga

SEQ ID NO: 4753203 - DNA, 25 bp, Homo sapien
caaattccgattatcccataacaca

SEQ ID NO: 4753204 - DNA, 25 bp, Homo sapien
cttttgctgtacaaattccgattat

SEQ ID NO: 4753205 - DNA, 25 bp, Homo sapien
tatgttatgacttgtaacactgtgg

SEQ ID NO: 4753206 - DNA, 25 bp, Homo sapien
tgttatgacttgtaacactgtggga

SEQ ID NO: 4753207 - DNA, 25 bp, Homo sapien
tatgacttgtaacactgtgggaggg

SEQ ID NO: 4753208 - DNA, 25 bp, Homo sapien
gacttgtaacactgtgggagggtta

SEQ ID NO: 4753209 - DNA, 25 bp, Homo sapien
gaaccgagagggaatcccactttgc

SEQ ID NO: 4753210 - DNA, 25 bp, Homo sapien
cactgtcactgaaccgagagggaat

SEQ ID NO: 4753211 - DNA, 25 bp, Homo sapien
cactctgttgacagtaataggttgc

SEQ ID NO: 4753212 - DNA, 25 bp, Homo sapien
tgtcactctgttgacagtaataggt

SEQ ID NO: 4753213 - DNA, 25 bp, Homo sapien
agttagaaacataaaaacagatatt

SEQ ID NO: 4753214 - DNA, 25 bp, Homo sapien
gaagttagaaacataaaaacagata

SEQ ID NO: 4753215 - DNA, 25 bp, Homo sapien
tgaagttagaaacataaaaacagat

SEQ ID NO: 4753216 - DNA, 25 bp, Homo sapien
ctgaagttagaaacataaaaacaga

SEQ ID NO: 4753217 - DNA, 25 bp, Homo sapien
gtaggatgacaaaggccacatcccc

SEQ ID NO: 4753218 - DNA, 25 bp, Homo sapien
tcaaagtaggatgacaaaggccaca

SEQ ID NO: 4753219 - DNA, 25 bp, Homo sapien
aagtaggatgacaaaggccacatcc

SEQ ID NO: 4753220 - DNA, 25 bp, Homo sapien
cacatcccctgagtaatgctctgag

SEQ ID NO: 4753221 - DNA, 25 bp, Homo sapien
gatacatctctggattcaaatgcgc

SEQ ID NO: 4753222 - DNA, 25 bp, Homo sapien
ctgcttttccagagaactggatttc

SEQ ID NO: 4753223 - DNA, 25 bp, Homo sapien
tctttgtgcataattttagcagtca

SEQ ID NO: 4753224 - DNA, 25 bp, Homo sapien
gctgccaggatccatatatccagat

SEQ ID NO: 4753225 - DNA, 25 bp, Homo sapien
taaccaggtctcagtgttagtcctg

SEQ ID NO: 4753226 - DNA, 25 bp, Homo sapien
tcttggagtcatcagttctggctcc

SEQ ID NO: 4753227 - DNA, 25 bp, Homo sapien
gctctagggagcagtctgatttagc

SEQ ID NO: 4753228 - DNA, 25 bp, Homo sapien
gagatacatgcatagtcttcttgga

SEQ ID NO: 4753229 - DNA, 25 bp, Homo sapien
tccgttccgatcatggactgtattg

SEQ ID NO: 4753230 - DNA, 25 bp, Homo sapien
aggcatgtccaatcatccgttccga

SEQ ID NO: 4753231 - DNA, 25 bp, Homo sapien
gaagagggtaagttaaggcatgtcc

SEQ ID NO: 4753232 - DNA, 25 bp, Homo sapien
ttcatattaaaagctggtcagttct

SEQ ID NO: 4753233 - DNA, 25 bp, Homo sapien
cgcggcaggcaaataaccgcggcac

SEQ ID NO: 4753234 - DNA, 25 bp, Homo sapien
gcggcaggcaaataaccgcggcacc

SEQ ID NO: 4753235 - DNA, 25 bp, Homo sapien
tgccttcctcccttttaccattctc

SEQ ID NO: 4753236 - DNA, 25 bp, Homo sapien
ttctttctctttactacaattcata

SEQ ID NO: 4753237 - DNA, 25 bp, Homo sapien
aataaagaacgctttaatctgcagg

SEQ ID NO: 4753238 - DNA, 25 bp, Homo sapien
ttctctttactacaattcatattat

SEQ ID NO: 4753239 - DNA, 25 bp, Homo sapien
aaataaagaacgctttaatctgcag

SEQ ID NO: 4753240 - DNA, 25 bp, Homo sapien
tgccacatagccctcagaaagactg

SEQ ID NO: 4753241 - DNA, 25 bp, Homo sapien
tcatgttccaaggaataaaggtggc

SEQ ID NO: 4753242 - DNA, 25 bp, Homo sapien
tgcccaaaacttgatgttagccctg

SEQ ID NO: 4753243 - DNA, 25 bp, Homo sapien
aaaggtggcctctggatgctgaaaa

SEQ ID NO: 4753244 - DNA, 25 bp, Homo sapien
agtcaggtaggttgtatccaacggt

SEQ ID NO: 4753245 - DNA, 25 bp, Homo sapien
ggtgagtcaggtaggttgtatccaa

SEQ ID NO: 4753246 - DNA, 25 bp, Homo sapien
tgactcccgctgcaaccgagcaggt

SEQ ID NO: 4753247 - DNA, 25 bp, Homo sapien
ttgactcccgctgcaaccgagcagg

SEQ ID NO: 4753248 - DNA, 25 bp, Homo sapien
aagatgacaatgtgcaaatcgggac

SEQ ID NO: 4753249 - DNA, 25 bp, Homo sapien
agatgacaatgtgcaaatcgggaca

SEQ ID NO: 4753250 - DNA, 25 bp, Homo sapien
tgcaacaggcttgatggtcgctgga

SEQ ID NO: 4753251 - DNA, 25 bp, Homo sapien
ggatgcaacaggcttgatggtcgct

SEQ ID NO: 4753252 - DNA, 25 bp, Homo sapien
gcggcggcggacacttgcagcaaag

SEQ ID NO: 4753253 - DNA, 25 bp, Homo sapien
ggcggcggacacttgcagcaaaggg

SEQ ID NO: 4753254 - DNA, 25 bp, Homo sapien
tgctttcttcggtgccccggcatag

SEQ ID NO: 4753255 - DNA, 25 bp, Homo sapien
aacgcttcctacgccggagaaagct

SEQ ID NO: 4753256 - DNA, 25 bp, Homo sapien
cagcagagcgtaagggcgtctcccg

SEQ ID NO: 4753257 - DNA, 25 bp, Homo sapien
gaggatgcgggtgcagcagagcgta

SEQ ID NO: 4753258 - DNA, 25 bp, Homo sapien
aatgaaggcgcagatgccgctgagc

SEQ ID NO: 4753259 - DNA, 25 bp, Homo sapien
ctaatgaaggcgcagatgccgctga

SEQ ID NO: 4753260 - DNA, 25 bp, Homo sapien
ggctttgccggctgccgggcatctt

SEQ ID NO: 4753261 - DNA, 25 bp, Homo sapien
cgggcatcttcagaggccgccgcag

SEQ ID NO: 4753262 - DNA, 25 bp, Homo sapien
tcctctcccaggacatcgattttac

SEQ ID NO: 4753263 - DNA, 25 bp, Homo sapien
gccccggctggagcgactgctctag

SEQ ID NO: 4753264 - DNA, 25 bp, Homo sapien
cccggctggagcgactgctctagga

SEQ ID NO: 4753265 - DNA, 25 bp, Homo sapien
cagccccggctggagcgactgctct

SEQ ID NO: 4753266 - DNA, 25 bp, Homo sapien
cgtcttccccatcggagtcccggag

SEQ ID NO: 4753267 - DNA, 25 bp, Homo sapien
aaacactgtccggagaaaagcccag

SEQ ID NO: 4753268 - DNA, 25 bp, Homo sapien
acactgtccggagaaaagcccaggc

SEQ ID NO: 4753269 - DNA, 25 bp, Homo sapien
tgggcaaacactgtccggagaaaag

SEQ ID NO: 4753270 - DNA, 25 bp, Homo sapien
ggcaaacactgtccggagaaaagcc

SEQ ID NO: 4753271 - DNA, 25 bp, Homo sapien
aagatgctctactcatccggtgcag

SEQ ID NO: 4753272 - DNA, 25 bp, Homo sapien
cagttggcaagcctttgcacgggtt

SEQ ID NO: 4753273 - DNA, 25 bp, Homo sapien
gccaccaaggaagatgctctactca

SEQ ID NO: 4753274 - DNA, 25 bp, Homo sapien
tccggtgcagccagacagttggcaa

SEQ ID NO: 4753275 - DNA, 25 bp, Homo sapien
tcagtatatgtaaactccaaagcca

SEQ ID NO: 4753276 - DNA, 25 bp, Homo sapien
taaaatggtgacacttacttgtgtt

SEQ ID NO: 4753277 - DNA, 25 bp, Homo sapien
taatcattatatctctgcaatcagc

SEQ ID NO: 4753278 - DNA, 25 bp, Homo sapien
tatattggaattcgtaactaaagta

SEQ ID NO: 4753279 - DNA, 25 bp, Homo sapien
cttttgataagaaatgccactagtg

SEQ ID NO: 4753280 - DNA, 25 bp, Homo sapien
tccttttgataagaaatgccactag

SEQ ID NO: 4753281 - DNA, 25 bp, Homo sapien
ccaatccttttgataagaaatgcca

SEQ ID NO: 4753282 - DNA, 25 bp, Homo sapien
caatccttttgataagaaatgccac

SEQ ID NO: 4753283 - DNA, 25 bp, Homo sapien
cacagtagctataaacagctgttta

SEQ ID NO: 4753284 - DNA, 25 bp, Homo sapien
ctgtttctgtcacagtagctataaa

SEQ ID NO: 4753285 - DNA, 25 bp, Homo sapien
tagctataaacagctgtttaaggat

SEQ ID NO: 4753286 - DNA, 25 bp, Homo sapien
ctgtcacagtagctataaacagctg

SEQ ID NO: 4753287 - DNA, 25 bp, Homo sapien
tccaggtcagtacatcaaagtcaca

SEQ ID NO: 4753288 - DNA, 25 bp, Homo sapien
tcacattggtccttggattaaccac

SEQ ID NO: 4753289 - DNA, 25 bp, Homo sapien
gatgaaacattgaccacaagcttat

SEQ ID NO: 4753290 - DNA, 25 bp, Homo sapien
gacacagttcacctatcaattccag

SEQ ID NO: 4753291 - DNA, 25 bp, Homo sapien
atagagctcatggacaccctggaca

SEQ ID NO: 4753292 - DNA, 25 bp, Homo sapien
cctccagatcatagagctcatggac

SEQ ID NO: 4753293 - DNA, 25 bp, Homo sapien
ctggacaatcacttgttgtgatttg

SEQ ID NO: 4753294 - DNA, 25 bp, Homo sapien
caatcgatttgttctctcagtgtca

SEQ ID NO: 4753295 - DNA, 25 bp, Homo sapien
cagagagcagaaggtaacatttcaa

SEQ ID NO: 4753296 - DNA, 25 bp, Homo sapien
cacaggtttgttctagctgcaaccc

SEQ ID NO: 4753297 - DNA, 25 bp, Homo sapien
gctgcaaccctaaagaaagttgtgc

SEQ ID NO: 4753298 - DNA, 25 bp, Homo sapien
tgcatcaggaagcataatgttcagc

SEQ ID NO: 4753299 - DNA, 25 bp, Homo sapien
ttcagccttatgacctccatgcagt

SEQ ID NO: 4753300 - DNA, 25 bp, Homo sapien
cagccttatgacctccatgcagtga

SEQ ID NO: 4753301 - DNA, 25 bp, Homo sapien
ccttatgacctccatgcagtgattg

SEQ ID NO: 4753302 - DNA, 25 bp, Homo sapien
ttatgacctccatgcagtgattgtc

SEQ ID NO: 4753303 - DNA, 25 bp, Homo sapien
cttcaaatgtgattgtaacaatact

SEQ ID NO: 4753304 - DNA, 25 bp, Homo sapien
ttgcatttcctggtacttcaaatgt

SEQ ID NO: 4753305 - DNA, 25 bp, Homo sapien
tattaagatgttcttcctttgcatt

SEQ ID NO: 4753306 - DNA, 25 bp, Homo sapien
gaataaacatattaagatgttcttc

SEQ ID NO: 4753307 - DNA, 25 bp, Homo sapien
actttcctcagcatatgtgctgttt

SEQ ID NO: 4753308 - DNA, 25 bp, Homo sapien
tggaattagcaactccatttcctac

SEQ ID NO: 4753309 - DNA, 25 bp, Homo sapien
tggatttagtatttacacaaactac

SEQ ID NO: 4753310 - DNA, 25 bp, Homo sapien
attctgcacaggtaccaatggattt

SEQ ID NO: 4753311 - DNA, 25 bp, Homo sapien
tgcatttgcttgaaatccttgccta

SEQ ID NO: 4753312 - DNA, 25 bp, Homo sapien
aagtaaggcggtatcgcactgtggt

SEQ ID NO: 4753313 - DNA, 25 bp, Homo sapien
tagaagtgttctgggttcaccacat

SEQ ID NO: 4753314 - DNA, 25 bp, Homo sapien
tctccttttaagaacggtctattca

SEQ ID NO: 4753315 - DNA, 25 bp, Homo sapien
tgtcttggtccatccctttacctta

SEQ ID NO: 4753316 - DNA, 25 bp, Homo sapien
tgagactcttgaaggcgacagatag

SEQ ID NO: 4753317 - DNA, 25 bp, Homo sapien
gtcagtggagtattaaaatccctca

SEQ ID NO: 4753318 - DNA, 25 bp, Homo sapien
tctatcttacagaaagttcatgtgc

SEQ ID NO: 4753319 - DNA, 25 bp, Homo sapien
tagagttccttttagcattcttgca

SEQ ID NO: 4753320 - DNA, 25 bp, Homo sapien
cattcttgcactggtggcttggtag

SEQ ID NO: 4753321 - DNA, 25 bp, Homo sapien
ggtagtggtgaattcgctgtttgtc

SEQ ID NO: 4753322 - DNA, 25 bp, Homo sapien
cctgacgacaatgtgcctagatgac

SEQ ID NO: 4753323 - DNA, 25 bp, Homo sapien
tgtccattatttcctaaagttttga

SEQ ID NO: 4753324 - DNA, 25 bp, Homo sapien
tctgatgccttagcttaataaccaa

SEQ ID NO: 4753325 - DNA, 25 bp, Homo sapien
cattgaatatttctccccttacttc

SEQ ID NO: 4753326 - DNA, 25 bp, Homo sapien
taatatccttacattgggcttcacc

SEQ ID NO: 4753327 - DNA, 25 bp, Homo sapien
tcagctccatcgtaatcttatgcag

SEQ ID NO: 4753328 - DNA, 25 bp, Homo sapien
taagctatgctgtatagcctgttgc

SEQ ID NO: 4753329 - DNA, 25 bp, Homo sapien
gactaaaacgctgttatgcagtgca

SEQ ID NO: 4753330 - DNA, 25 bp, Homo sapien
tacaaacatgatagtgcacttacac

SEQ ID NO: 4753331 - DNA, 25 bp, Homo sapien
gtttcaggcccttatcacacagtat

SEQ ID NO: 4753332 - DNA, 25 bp, Homo sapien
agtatcttcccgcatggtctcctga

SEQ ID NO: 4753333 - DNA, 25 bp, Homo sapien
gcaagtctactggtgaaacagctct

SEQ ID NO: 4753334 - DNA, 25 bp, Homo sapien
tatactataatatctggccaccagg

SEQ ID NO: 4753335 - DNA, 25 bp, Homo sapien
ctgaatcccatagccctttggctgt

SEQ ID NO: 4753336 - DNA, 25 bp, Homo sapien
cagatccactaaaccaaatgaaatt

SEQ ID NO: 4753337 - DNA, 25 bp, Homo sapien
tcagccatgaatctagtgataggcg

SEQ ID NO: 4753338 - DNA, 25 bp, Homo sapien
tctgttagagagacctcagccatga

SEQ ID NO: 4753339 - DNA, 25 bp, Homo sapien
tcaaggtgaggttgtgttcctggca

SEQ ID NO: 4753340 - DNA, 25 bp, Homo sapien
cctggcacatgctgaagttttttct

SEQ ID NO: 4753341 - DNA, 25 bp, Homo sapien
ctgatcaaggtgaggttgtgttcct

SEQ ID NO: 4753342 - DNA, 25 bp, Homo sapien
gtgttcctggcacatgctgaagttt

SEQ ID NO: 4753343 - DNA, 25 bp, Homo sapien
ctagtattgcttagagttccttaac

SEQ ID NO: 4753344 - DNA, 25 bp, Homo sapien
taccattccaacaggtttaatacaa

SEQ ID NO: 4753345 - DNA, 25 bp, Homo sapien
taatgctggcacctaaagaaagttg

SEQ ID NO: 4753346 - DNA, 25 bp, Homo sapien
tctcctgcttcctaatatgaaaata

SEQ ID NO: 4753347 - DNA, 25 bp, Homo sapien
agagtgaaacgttccagagatctgc

SEQ ID NO: 4753348 - DNA, 25 bp, Homo sapien
actgggaaatgggaaactgcgattc

SEQ ID NO: 4753349 - DNA, 25 bp, Homo sapien
ttataaagagtgaaacgttccagag

SEQ ID NO: 4753350 - DNA, 25 bp, Homo sapien
cgattcaaggggtataaagcttcag

SEQ ID NO: 4753351 - DNA, 25 bp, Homo sapien
gcgcaccaggagattgtgtcccaca

SEQ ID NO: 4753352 - DNA, 25 bp, Homo sapien
ttagactcccacacaataataatgg

SEQ ID NO: 4753353 - DNA, 25 bp, Homo sapien
aagtcctgagtgacctacaaagaga

SEQ ID NO: 4753354 - DNA, 25 bp, Homo sapien
gggatggaggaaaatctaccaagca

SEQ ID NO: 4753355 - DNA, 25 bp, Homo sapien
cataaagcaagtcctgagtgaccta

SEQ ID NO: 4753356 - DNA, 25 bp, Homo sapien
atctaatacattagagagatcaact

SEQ ID NO: 4753357 - DNA, 25 bp, Homo sapien
caaaggcatgaagatctaatacatt

SEQ ID NO: 4753358 - DNA, 25 bp, Homo sapien
cagagagactatcaaaggcatgaag

SEQ ID NO: 4753359 - DNA, 25 bp, Homo sapien
gatctaatacattagagagatcaac

SEQ ID NO: 4753360 - DNA, 25 bp, Homo sapien
tataaagactggtgattgagttata

SEQ ID NO: 4753361 - DNA, 25 bp, Homo sapien
tttaacataagcccagaaaaccaca

SEQ ID NO: 4753362 - DNA, 25 bp, Homo sapien
aaatttataaagactggtgattgag

SEQ ID NO: 4753363 - DNA, 25 bp, Homo sapien
aacataagcccagaaaaccacagag

SEQ ID NO: 4753364 - DNA, 25 bp, Homo sapien
aaaaacatcattggtcagattcaag

SEQ ID NO: 4753365 - DNA, 25 bp, Homo sapien
agattccagaagcttgccaaacatt

SEQ ID NO: 4753366 - DNA, 25 bp, Homo sapien
atcctggccatggacaacgtggtga

SEQ ID NO: 4753367 - DNA, 25 bp, Homo sapien
tctcataatcaaagctaaggtgaag

SEQ ID NO: 4753368 - DNA, 25 bp, Homo sapien
atcagtttacactaaaaggccaaag

SEQ ID NO: 4753369 - DNA, 25 bp, Homo sapien
aatatcagtttacactaaaaggcca

SEQ ID NO: 4753370 - DNA, 25 bp, Homo sapien
tatcagtttacactaaaaggccaaa

SEQ ID NO: 4753371 - DNA, 25 bp, Homo sapien
gaatatcagtttacactaaaaggcc

SEQ ID NO: 4753372 - DNA, 25 bp, Homo sapien
actcggagggtgaagcaggagaatc

SEQ ID NO: 4753373 - DNA, 25 bp, Homo sapien
ttctgtctcaaaccagagtgagatt

SEQ ID NO: 4753374 - DNA, 25 bp, Homo sapien
agattctgtctcaaaccagagtgag

SEQ ID NO: 4753375 - DNA, 25 bp, Homo sapien
accgcactccaacttgggggacaca

SEQ ID NO: 4753376 - DNA, 25 bp, Homo sapien
tagctcagtcttcaactctggaaat

SEQ ID NO: 4753377 - DNA, 25 bp, Homo sapien
cagtaaatagctgagcaaactgcaa

SEQ ID NO: 4753378 - DNA, 25 bp, Homo sapien
tacctcggagattagcctcacattg

SEQ ID NO: 4753379 - DNA, 25 bp, Homo sapien
tctgtgctacataataccaagtttt

SEQ ID NO: 4753380 - DNA, 25 bp, Homo sapien
tccagtttctaaactggtaagctca

SEQ ID NO: 4753381 - DNA, 25 bp, Homo sapien
agtttctaaactggtaagctcaagt

SEQ ID NO: 4753382 - DNA, 25 bp, Homo sapien
tctaaactggtaagctcaagttgct

SEQ ID NO: 4753383 - DNA, 25 bp, Homo sapien
cacccagcccaaatctccagtttct

SEQ ID NO: 4753384 - DNA, 25 bp, Homo sapien
gagagaatatttaatgtaagattca

SEQ ID NO: 4753385 - DNA, 25 bp, Homo sapien
gaatatttaatgtaagattcaggac

SEQ ID NO: 4753386 - DNA, 25 bp, Homo sapien
ctcaaggaatttgagagaatattta

SEQ ID NO: 4753387 - DNA, 25 bp, Homo sapien
gagaatatttaatgtaagattcagg

SEQ ID NO: 4753388 - DNA, 25 bp, Homo sapien
ggacatctgatcttcattgaaacgg

SEQ ID NO: 4753389 - DNA, 25 bp, Homo sapien
acggattctaatccaacttcagtcc

SEQ ID NO: 4753390 - DNA, 25 bp, Homo sapien
tcttcattgaaacggattctaatcc

SEQ ID NO: 4753391 - DNA, 25 bp, Homo sapien
ctcaggacatctgatcttcattgaa

SEQ ID NO: 4753392 - DNA, 25 bp, Homo sapien
aaaatcaatcactgcatgtttattg

SEQ ID NO: 4753393 - DNA, 25 bp, Homo sapien
cactcatccacttgaagtaagaaaa

SEQ ID NO: 4753394 - DNA, 25 bp, Homo sapien
acttgctcactcatccacttgaagt

SEQ ID NO: 4753395 - DNA, 25 bp, Homo sapien
tgctcactcatccacttgaagtaag

SEQ ID NO: 4753396 - DNA, 25 bp, Homo sapien
actaaagggcattcttcggctacct

SEQ ID NO: 4753397 - DNA, 25 bp, Homo sapien
aaagggcattcttcggctacctctg

SEQ ID NO: 4753398 - DNA, 25 bp, Homo sapien
ctaaagggcattcttcggctacctc

SEQ ID NO: 4753399 - DNA, 25 bp, Homo sapien
taaagggcattcttcggctacctct

SEQ ID NO: 4753400 - DNA, 25 bp, Homo sapien
aagaatttctcaagtagagactgag

SEQ ID NO: 4753401 - DNA, 25 bp, Homo sapien
ttgctgagtctatcagctgctgagc

SEQ ID NO: 4753402 - DNA, 25 bp, Homo sapien
gagtagaactagactgccagctgtg

SEQ ID NO: 4753403 - DNA, 25 bp, Homo sapien
gagactgagtagaactagactgcca

SEQ ID NO: 4753404 - DNA, 25 bp, Homo sapien
ctaacttattaagagcattccaaac

SEQ ID NO: 4753405 - DNA, 25 bp, Homo sapien
aactaacttattaagagcattccaa

SEQ ID NO: 4753406 - DNA, 25 bp, Homo sapien
caaatatgccaaactaacttattaa

SEQ ID NO: 4753407 - DNA, 25 bp, Homo sapien
actaacttattaagagcattccaaa

SEQ ID NO: 4753408 - DNA, 25 bp, Homo sapien
ttctaagatttgtcctagtccattt

SEQ ID NO: 4753409 - DNA, 25 bp, Homo sapien
tctaagatttgtcctagtccattta

SEQ ID NO: 4753410 - DNA, 25 bp, Homo sapien
ctaagatttgtcctagtccatttat

SEQ ID NO: 4753411 - DNA, 25 bp, Homo sapien
tgttaacaagctggctaatagtcaa

SEQ ID NO: 4753412 - DNA, 25 bp, Homo sapien
cagtgtcagagatttagcttaggtc

SEQ ID NO: 4753413 - DNA, 25 bp, Homo sapien
gatggctaattcctctcaaacatgt

SEQ ID NO: 4753414 - DNA, 25 bp, Homo sapien
tgatataaagggagggtaaaagcca

SEQ ID NO: 4753415 - DNA, 25 bp, Homo sapien
gaactatattctgcaagcactgagg

SEQ ID NO: 4753416 - DNA, 25 bp, Homo sapien
aaagaaagatggagtgcgaagaccc

SEQ ID NO: 4753417 - DNA, 25 bp, Homo sapien
ggcagagtgagaatacattatgagt

SEQ ID NO: 4753418 - DNA, 25 bp, Homo sapien
tgggtaaagttagggaagactgaca

SEQ ID NO: 4753419 - DNA, 25 bp, Homo sapien
aatgatatctgccaaagcaacttgc

SEQ ID NO: 4753420 - DNA, 25 bp, Homo sapien
tttattaatgagaatgatatctgcc

SEQ ID NO: 4753421 - DNA, 25 bp, Homo sapien
tctggaaccaagtctgttttattaa

SEQ ID NO: 4753422 - DNA, 25 bp, Homo sapien
tgtcgttcttaatttctttacatct

SEQ ID NO: 4753423 - DNA, 25 bp, Homo sapien
ctagtagcttcattgataaggccat

SEQ ID NO: 4753424 - DNA, 25 bp, Homo sapien
cattgataaggccatcaggtttctc

SEQ ID NO: 4753425 - DNA, 25 bp, Homo sapien
tagcttcattgataaggccatcagg

SEQ ID NO: 4753426 - DNA, 25 bp, Homo sapien
gcttcattgataaggccatcaggtt

SEQ ID NO: 4753427 - DNA, 25 bp, Homo sapien
cacgtgaactcagtactaggccttt

SEQ ID NO: 4753428 - DNA, 25 bp, Homo sapien
aatgtcaacacaaaggattttactt

SEQ ID NO: 4753429 - DNA, 25 bp, Homo sapien
gaagagggcttaggatttcatactc

SEQ ID NO: 4753430 - DNA, 25 bp, Homo sapien
ttaataaaaacttcaacatgttctg

SEQ ID NO: 4753431 - DNA, 25 bp, Homo sapien
cagaatagagagctgtcattttaag

SEQ ID NO: 4753432 - DNA, 25 bp, Homo sapien
ctattgcattaaatgctgtcacatt

SEQ ID NO: 4753433 - DNA, 25 bp, Homo sapien
ttaaatgctgtcacatttgtagaac

SEQ ID NO: 4753434 - DNA, 25 bp, Homo sapien
atagagagctgtcattttaagttgt

SEQ ID NO: 4753435 - DNA, 25 bp, Homo sapien
tatgctcagattgggaacgggtcag

SEQ ID NO: 4753436 - DNA, 25 bp, Homo sapien
tccatatgctcagattgggaacggg

SEQ ID NO: 4753437 - DNA, 25 bp, Homo sapien
gaacgggtcagtgggtgggatgatt

SEQ ID NO: 4753438 - DNA, 25 bp, Homo sapien
ctttgggccctatccatatgctcag

SEQ ID NO: 4753439 - DNA, 25 bp, Homo sapien
ccatattttgaatccacaatagtta

SEQ ID NO: 4753440 - DNA, 25 bp, Homo sapien
tttgaatccacaatagttatgatac

SEQ ID NO: 4753441 - DNA, 25 bp, Homo sapien
attttgaatccacaatagttatgat

SEQ ID NO: 4753442 - DNA, 25 bp, Homo sapien
taatccatattttgaatccacaata

SEQ ID NO: 4753443 - DNA, 25 bp, Homo sapien
gacatcgagttccaccactgtctgg

SEQ ID NO: 4753444 - DNA, 25 bp, Homo sapien
tacagaaaacctacaaagcattgtt

SEQ ID NO: 4753445 - DNA, 25 bp, Homo sapien
gagtgacatcgagttccaccactgt

SEQ ID NO: 4753446 - DNA, 25 bp, Homo sapien
ggaagttgagtgacatcgagttcca

SEQ ID NO: 4753447 - DNA, 25 bp, Homo sapien
taaatatcactccctaattcagcat

SEQ ID NO: 4753448 - DNA, 25 bp, Homo sapien
aatatcactccctaattcagcatca

SEQ ID NO: 4753449 - DNA, 25 bp, Homo sapien
tatcactccctaattcagcatcaac

SEQ ID NO: 4753450 - DNA, 25 bp, Homo sapien
aaatatcactccctaattcagcatc

SEQ ID NO: 4753451 - DNA, 25 bp, Homo sapien
cagctttcaaactagggctcaggag

SEQ ID NO: 4753452 - DNA, 25 bp, Homo sapien
atgatgtccccatacaaggcaaagg

SEQ ID NO: 4753453 - DNA, 25 bp, Homo sapien
ggtacttcaagagagcagagcctaa

SEQ ID NO: 4753454 - DNA, 25 bp, Homo sapien
tagagccgaggaatgaataagcaac

SEQ ID NO: 4753455 - DNA, 25 bp, Homo sapien
cactggcatagagagatccctggaa

SEQ ID NO: 4753456 - DNA, 25 bp, Homo sapien
ggctgtacagtataagaatcacctg

SEQ ID NO: 4753457 - DNA, 25 bp, Homo sapien
cagtagatctgggttggtcaagaat

SEQ ID NO: 4753458 - DNA, 25 bp, Homo sapien
tcagtttactgcagtgatatggaac

SEQ ID NO: 4753459 - DNA, 25 bp, Homo sapien
ctctgaaaagctgaatcgtgtttaa

SEQ ID NO: 4753460 - DNA, 25 bp, Homo sapien
gaaagttagaagcaagaaacattaa

SEQ ID NO: 4753461 - DNA, 25 bp, Homo sapien
acaatttgtataaaagctttctctg

SEQ ID NO: 4753462 - DNA, 25 bp, Homo sapien
gaatgttccatctttacccaaacaa

SEQ ID NO: 4753463 - DNA, 25 bp, Homo sapien
tagttttacaaatcgccccaatgcc

SEQ ID NO: 4753464 - DNA, 25 bp, Homo sapien
tgaaaacccatgcttactataagga

SEQ ID NO: 4753465 - DNA, 25 bp, Homo sapien
taatggtatgggtcagattcacaga

SEQ ID NO: 4753466 - DNA, 25 bp, Homo sapien
tagtccaagtcctatcatcagtcag

SEQ ID NO: 4753467 - DNA, 25 bp, Homo sapien
tttgcatcaaattctcaatagctct

SEQ ID NO: 4753468 - DNA, 25 bp, Homo sapien
ttttgcatcaaattctcaatagctc

SEQ ID NO: 4753469 - DNA, 25 bp, Homo sapien
ggaaactttatctgaccaagtatct

SEQ ID NO: 4753470 - DNA, 25 bp, Homo sapien
tatttgagtgctactatgtgttggg

SEQ ID NO: 4753471 - DNA, 25 bp, Homo sapien
tgggtaactcttctagggtctatgg

SEQ ID NO: 4753472 - DNA, 25 bp, Homo sapien
tctagggtctatggtagactagtga

SEQ ID NO: 4753473 - DNA, 25 bp, Homo sapien
aatgaagcaaactgtgtaaattcag

SEQ ID NO: 4753474 - DNA, 25 bp, Homo sapien
tgaagcaaactgtgtaaattcagtt

SEQ ID NO: 4753475 - DNA, 25 bp, Homo sapien
atgaagcaaactgtgtaaattcagt

SEQ ID NO: 4753476 - DNA, 25 bp, Homo sapien
caatgaagcaaactgtgtaaattca

SEQ ID NO: 4753477 - DNA, 25 bp, Homo sapien
accttggctgacagctaaggatttc

SEQ ID NO: 4753478 - DNA, 25 bp, Homo sapien
ccgtttctaagttccagccactctt

SEQ ID NO: 4753479 - DNA, 25 bp, Homo sapien
aacagcagaggcaaccgtttctaag

SEQ ID NO: 4753480 - DNA, 25 bp, Homo sapien
ttggctgacagctaaggatttctcc

SEQ ID NO: 4753481 - DNA, 25 bp, Homo sapien
ctagaataaataacaaacagcactc

SEQ ID NO: 4753482 - DNA, 25 bp, Homo sapien
acaaagttaactaataacagaagca

SEQ ID NO: 4753483 - DNA, 25 bp, Homo sapien
atatttgagttgagaagttaagcac

SEQ ID NO: 4753484 - DNA, 25 bp, Homo sapien
tttttcatgagttgcaatagagtcc

SEQ ID NO: 4753485 - DNA, 25 bp, Homo sapien
gataaaatacatgaggataaagacc

SEQ ID NO: 4753486 - DNA, 25 bp, Homo sapien
tatggaatatcaattcaccagagga

SEQ ID NO: 4753487 - DNA, 25 bp, Homo sapien
tatccacatcaatacaataccttgc

SEQ ID NO: 4753488 - DNA, 25 bp, Homo sapien
aatcttgcaacatgacatttattga

SEQ ID NO: 4753489 - DNA, 25 bp, Homo sapien
tctcaacccatataaatcttaacag

SEQ ID NO: 4753490 - DNA, 25 bp, Homo sapien
taaaatgaccgctactcttttacta

SEQ ID NO: 4753491 - DNA, 25 bp, Homo sapien
gaccgctactcttttactatgttgc

SEQ ID NO: 4753492 - DNA, 25 bp, Homo sapien
aaatgaccgctactcttttactatg

SEQ ID NO: 4753493 - DNA, 25 bp, Homo sapien
tgaccgctactcttttactatgttg

SEQ ID NO: 4753494 - DNA, 25 bp, Homo sapien
atatagttcagaagtgttgtcttcc

SEQ ID NO: 4753495 - DNA, 25 bp, Homo sapien
gggaattcagtgaataaggaggcaa

SEQ ID NO: 4753496 - DNA, 25 bp, Homo sapien
ctcagggtgacatattcaataggag

SEQ ID NO: 4753497 - DNA, 25 bp, Homo sapien
tcaaaggtttctaatacgttacaga

SEQ ID NO: 4753498 - DNA, 25 bp, Homo sapien
tacgttacagatttatgctgggcct

SEQ ID NO: 4753499 - DNA, 25 bp, Homo sapien
tgaattttaacccatagggacgcca

SEQ ID NO: 4753500 - DNA, 25 bp, Homo sapien
cactgaaaggtgtgacgcagtcgga

SEQ ID NO: 4753501 - DNA, 25 bp, Homo sapien
aagatccagatcctacaggtccttg

SEQ ID NO: 4753502 - DNA, 25 bp, Homo sapien
caagactccagattagtcaggaggc

SEQ ID NO: 4753503 - DNA, 25 bp, Homo sapien
tgaaatacattgttttggacaagaa

SEQ ID NO: 4753504 - DNA, 25 bp, Homo sapien
tcttggcgccgaggccagacttttc

SEQ ID NO: 4753505 - DNA, 25 bp, Homo sapien
aattcaggacaatcctcctccgcag

SEQ ID NO: 4753506 - DNA, 25 bp, Homo sapien
tgataattgtgactgggatcttggc

SEQ ID NO: 4753507 - DNA, 25 bp, Homo sapien
tcaggacaatcctcctccgcaggat

SEQ ID NO: 4753508 - DNA, 25 bp, Homo sapien
tgtcactggcgcctagagccttaat

SEQ ID NO: 4753509 - DNA, 25 bp, Homo sapien
tacctgggctctggacgagaactgc

SEQ ID NO: 4753510 - DNA, 25 bp, Homo sapien
tgttctgtgaacctgagcgacgctg

SEQ ID NO: 4753511 - DNA, 25 bp, Homo sapien
gaaatctggagtgggtaacctgacc

SEQ ID NO: 4753512 - DNA, 25 bp, Homo sapien
ggaaggagtaacattgcacccacag

SEQ ID NO: 4753513 - DNA, 25 bp, Homo sapien
cagtttcaagttctggccttaggca

SEQ ID NO: 4753514 - DNA, 25 bp, Homo sapien
aaatggagtcgctcatgctaagcac

SEQ ID NO: 4753515 - DNA, 25 bp, Homo sapien
tgggttcccaatatggcactggctg

SEQ ID NO: 4753516 - DNA, 25 bp, Homo sapien
tactgaagatgactagcaggtgaaa

SEQ ID NO: 4753517 - DNA, 25 bp, Homo sapien
catatagtcgtcttttaagatatac

SEQ ID NO: 4753518 - DNA, 25 bp, Homo sapien
gatatacaaccactgtaaggacagg

SEQ ID NO: 4753519 - DNA, 25 bp, Homo sapien
gactagcaggtgaaaaatgtacatt

SEQ ID NO: 4753520 - DNA, 25 bp, Homo sapien
gaagcatattccaaaatccataggc

SEQ ID NO: 4753521 - DNA, 25 bp, Homo sapien
gaaataccatgctactggcaaagcc

SEQ ID NO: 4753522 - DNA, 25 bp, Homo sapien
gtggtgcaccaatctctctaaaaga

SEQ ID NO: 4753523 - DNA, 25 bp, Homo sapien
tacacgtaagtaaaaggcatgaaac

SEQ ID NO: 4753524 - DNA, 25 bp, Homo sapien
tgccaggaagtttgtgtctagtgag

SEQ ID NO: 4753525 - DNA, 25 bp, Homo sapien
tgtgtcctcctgaggggatgaacac

SEQ ID NO: 4753526 - DNA, 25 bp, Homo sapien
aaaagctgtgtcctcctgaggggat

SEQ ID NO: 4753527 - DNA, 25 bp, Homo sapien
gcttccaagatggtacctcaaaagc

SEQ ID NO: 4753528 - DNA, 25 bp, Homo sapien
aataatataagtaggctgtgcacag

SEQ ID NO: 4753529 - DNA, 25 bp, Homo sapien
actaatcctaaccaacttatttgat

SEQ ID NO: 4753530 - DNA, 25 bp, Homo sapien
taagtttctgtttatgccactgaaa

SEQ ID NO: 4753531 - DNA, 25 bp, Homo sapien
gaaataagctttcacattgtttaag

SEQ ID NO: 4753532 - DNA, 25 bp, Homo sapien
taaataggaacatacataggctttg

SEQ ID NO: 4753533 - DNA, 25 bp, Homo sapien
ttccctcctgaaagaatattcctgt

SEQ ID NO: 4753534 - DNA, 25 bp, Homo sapien
ctttgcccctgccatgttaggtatt

SEQ ID NO: 4753535 - DNA, 25 bp, Homo sapien
tttctgtaggagaagcaagattccc

SEQ ID NO: 4753536 - DNA, 25 bp, Homo sapien
ggcagaaggtgaaaggcatgtctca

SEQ ID NO: 4753537 - DNA, 25 bp, Homo sapien
atggcagaaggtgaaaggcatgtct

SEQ ID NO: 4753538 - DNA, 25 bp, Homo sapien
tggcagaaggtgaaaggcatgtctc

SEQ ID NO: 4753539 - DNA, 25 bp, Homo sapien
gcagaaggtgaaaggcatgtctcac

SEQ ID NO: 4753540 - DNA, 25 bp, Homo sapien
attttaaaatgagtcatggcttctc

SEQ ID NO: 4753541 - DNA, 25 bp, Homo sapien
gcattaattcatttcagtgttaact

SEQ ID NO: 4753542 - DNA, 25 bp, Homo sapien
atggcttctcaaccgtctcccaaag

SEQ ID NO: 4753543 - DNA, 25 bp, Homo sapien
gagtcatggcttctcaaccgtctcc

SEQ ID NO: 4753544 - DNA, 25 bp, Homo sapien
agcaaacttctacatcttctgatat

SEQ ID NO: 4753545 - DNA, 25 bp, Homo sapien
aacagacagagctgtactttggctc

SEQ ID NO: 4753546 - DNA, 25 bp, Homo sapien
acagcaaacttctacatcttctgat

SEQ ID NO: 4753547 - DNA, 25 bp, Homo sapien
cagagctgtactttggctcctttca

SEQ ID NO: 4753548 - DNA, 25 bp, Homo sapien
aaaacatgcttgtatgtgcatgggc

SEQ ID NO: 4753549 - DNA, 25 bp, Homo sapien
cacacccttgcaataacatgaacta

SEQ ID NO: 4753550 - DNA, 25 bp, Homo sapien
cctattactggttacaagaggcata

SEQ ID NO: 4753551 - DNA, 25 bp, Homo sapien
agggagtactatagatgacagagac

SEQ ID NO: 4753552 - DNA, 25 bp, Homo sapien
ctgcaaagttaacagttgacttgcc

SEQ ID NO: 4753553 - DNA, 25 bp, Homo sapien
tcttcctcagtaaacattggagaga

SEQ ID NO: 4753554 - DNA, 25 bp, Homo sapien
caatataatataacagaaacagagc

SEQ ID NO: 4753555 - DNA, 25 bp, Homo sapien
tatggtcactacattctttaaagtt

SEQ ID NO: 4753556 - DNA, 25 bp, Homo sapien
tttgttcgttgtacttctgaggttg

SEQ ID NO: 4753557 - DNA, 25 bp, Homo sapien
tctgaggttgccagaatgtaaatgt

SEQ ID NO: 4753558 - DNA, 25 bp, Homo sapien
ctggctggtgtcctttgttcgttgt

SEQ ID NO: 4753559 - DNA, 25 bp, Homo sapien
gtcctttgttcgttgtacttctgag

SEQ ID NO: 4753560 - DNA, 25 bp, Homo sapien
agtgaagcttaatcaaaattttagg

SEQ ID NO: 4753561 - DNA, 25 bp, Homo sapien
gctcttggatcaagaagattctgtc

SEQ ID NO: 4753562 - DNA, 25 bp, Homo sapien
tgcatcaaataacatcgtgacctat

SEQ ID NO: 4753563 - DNA, 25 bp, Homo sapien
tctgtctttccaacgtttgcatcaa

SEQ ID NO: 4753564 - DNA, 25 bp, Homo sapien
tgcctaaggccagaacttgaaactg

SEQ ID NO: 4753565 - DNA, 25 bp, Homo sapien
gtttctctacaaatgcacacaggca

SEQ ID NO: 4753566 - DNA, 25 bp, Homo sapien
tgcccagctattttgggagaactga

SEQ ID NO: 4753567 - DNA, 25 bp, Homo sapien
cacaggcaccccattttgatgcaca

SEQ ID NO: 4753568 - DNA, 25 bp, Homo sapien
gaatttacacagtttgcttcattgt

SEQ ID NO: 4753569 - DNA, 25 bp, Homo sapien
tgaagagtggctggaacttagaaac

SEQ ID NO: 4753570 - DNA, 25 bp, Homo sapien
tatttccagctttaattttcttgag

SEQ ID NO: 4753571 - DNA, 25 bp, Homo sapien
ttagaaacggttgcctctgctgttc

SEQ ID NO: 4753572 - DNA, 25 bp, Homo sapien
ctgtgaagtgtatttctgtagatta

SEQ ID NO: 4753573 - DNA, 25 bp, Homo sapien
taccttgaagttcctgacaaattct

SEQ ID NO: 4753574 - DNA, 25 bp, Homo sapien
gccaaaaaatacatggagtctttac

SEQ ID NO: 4753575 - DNA, 25 bp, Homo sapien
ctgttcctaaaacatctgtgaagtg

SEQ ID NO: 4753576 - DNA, 25 bp, Homo sapien
cacagacaagtgcatgatacttaaa

SEQ ID NO: 4753577 - DNA, 25 bp, Homo sapien
gaacaataaacatgcagtgattgat

SEQ ID NO: 4753578 - DNA, 25 bp, Homo sapien
tgacagactgccataagtattaggc

SEQ ID NO: 4753579 - DNA, 25 bp, Homo sapien
gctttggttctgtcataatattcgt

SEQ ID NO: 4753580 - DNA, 25 bp, Homo sapien
tgttatacaggtctaatattgatcc

SEQ ID NO: 4753581 - DNA, 25 bp, Homo sapien
ttcttggcgattttaatgctttgga

SEQ ID NO: 4753582 - DNA, 25 bp, Homo sapien
ctagtcgtatgccttgaatgagtga

SEQ ID NO: 4753583 - DNA, 25 bp, Homo sapien
ctttttcatggtggtactaaatttg

SEQ ID NO: 4753584 - DNA, 25 bp, Homo sapien
taataagatgggaatttgtctctct

SEQ ID NO: 4753585 - DNA, 25 bp, Homo sapien
cacagtattgttgccacgagtacga

SEQ ID NO: 4753586 - DNA, 25 bp, Homo sapien
ccatgccccttgtttgtgacctgtc

SEQ ID NO: 4753587 - DNA, 25 bp, Homo sapien
caggcacagttggtcagtcctaaga

SEQ ID NO: 4753588 - DNA, 25 bp, Homo sapien
ggagcttagtttagtaggtcacaca

SEQ ID NO: 4753589 - DNA, 25 bp, Homo sapien
tctgttaggctcaaacctgtctgtt

SEQ ID NO: 4753590 - DNA, 25 bp, Homo sapien
tgaagctggctctaggaaaactaac

SEQ ID NO: 4753591 - DNA, 25 bp, Homo sapien
ccagattttatcctgaaggcactag

SEQ ID NO: 4753592 - DNA, 25 bp, Homo sapien
tctgcgccttcattagtggccgctt

SEQ ID NO: 4753593 - DNA, 25 bp, Homo sapien
taggaagcgtttcaagcgccaccaa

SEQ ID NO: 4753594 - DNA, 25 bp, Homo sapien
atggcagctttctccggcgtaggaa

SEQ ID NO: 4753595 - DNA, 25 bp, Homo sapien
gtctgcggcggcctctgaagatgcc

SEQ ID NO: 4753596 - DNA, 25 bp, Homo sapien
aatttcttggcacgccctacctgag

SEQ ID NO: 4753597 - DNA, 25 bp, Homo sapien
tctaattggccgatttttctccggc

SEQ ID NO: 4753598 - DNA, 25 bp, Homo sapien
cacatttttacaggagtctaattgg

SEQ ID NO: 4753599 - DNA, 25 bp, Homo sapien
cttctccatcccgtctcttggaatt

SEQ ID NO: 4753600 - DNA, 25 bp, Homo sapien
aaacaggagcttcgggtccacctgt

SEQ ID NO: 4753601 - DNA, 25 bp, Homo sapien
agcttggagaggtccggccttcggg

SEQ ID NO: 4753602 - DNA, 25 bp, Homo sapien
cacctgtttggaagcacccaggcag

SEQ ID NO: 4753603 - DNA, 25 bp, Homo sapien
cgttattctccgatcaaacaggagc

SEQ ID NO: 4753604 - DNA, 25 bp, Homo sapien
accaggcgtcgtggaggcgccccag

SEQ ID NO: 4753605 - DNA, 25 bp, Homo sapien
tgcgtagtgcttggcgcggtgacca

SEQ ID NO: 4753606 - DNA, 25 bp, Homo sapien
tgtcgcagctacgaacccaccaacg

SEQ ID NO: 4753607 - DNA, 25 bp, Homo sapien
aacgacaccaagcacttgccgggca

SEQ ID NO: 4753608 - DNA, 25 bp, Homo sapien
tggccgctaataacgctgataatag

SEQ ID NO: 4753609 - DNA, 25 bp, Homo sapien
taataacgctgataatagtaacagt

SEQ ID NO: 4753610 - DNA, 25 bp, Homo sapien
cacactgtcctggccgctaataacg

SEQ ID NO: 4753611 - DNA, 25 bp, Homo sapien
taatagtaacagtatcggccaactg

SEQ ID NO: 4753612 - DNA, 25 bp, Homo sapien
tcacgcctgactagagcactctgct

SEQ ID NO: 4753613 - DNA, 25 bp, Homo sapien
tgtgcgttttcttgcaagcctctgc

SEQ ID NO: 4753614 - DNA, 25 bp, Homo sapien
gatcctggtagcgtgaaacttgccc

SEQ ID NO: 4753615 - DNA, 25 bp, Homo sapien
ttgatacagctctccacttcgtcgc

SEQ ID NO: 4753616 - DNA, 25 bp, Homo sapien
gtaacaccggatttttgcaagactc

SEQ ID NO: 4753617 - DNA, 25 bp, Homo sapien
cgtggacttgcgaacaaatctgagc

SEQ ID NO: 4753618 - DNA, 25 bp, Homo sapien
tgcaagactccctgagtatttctcg

SEQ ID NO: 4753619 - DNA, 25 bp, Homo sapien
tctgagcaagaaaaccacgtaattt

SEQ ID NO: 4753620 - DNA, 25 bp, Homo sapien
gcctcgcgaggggtgcctcctcccc

SEQ ID NO: 4753621 - DNA, 25 bp, Homo sapien
ccgcttgcccgtgagcaacaggatt

SEQ ID NO: 4753622 - DNA, 25 bp, Homo sapien
atcccctgcaacctgggagccagtg

SEQ ID NO: 4753623 - DNA, 25 bp, Homo sapien
ggagccagtgcatgcaatgctccag

SEQ ID NO: 4753624 - DNA, 25 bp, Homo sapien
agccacatggcctccttcaatcgga

SEQ ID NO: 4753625 - DNA, 25 bp, Homo sapien
ggagctgctgacatcccctgcaacc

SEQ ID NO: 4753626 - DNA, 25 bp, Homo sapien
actcctcgagcggtttgggatggct

SEQ ID NO: 4753627 - DNA, 25 bp, Homo sapien
caaacttgctgtcctagtggtaaca

SEQ ID NO: 4753628 - DNA, 25 bp, Homo sapien
caggcaaacttgctgtcctagtggt

SEQ ID NO: 4753629 - DNA, 25 bp, Homo sapien
tcctcgagcggtttgggatggcttc

SEQ ID NO: 4753630 - DNA, 25 bp, Homo sapien
aaagttcttggaataagtttgagct

SEQ ID NO: 4753631 - DNA, 25 bp, Homo sapien
tgaaaagttcttggaataagtttga

SEQ ID NO: 4753632 - DNA, 25 bp, Homo sapien
cagggtctggtggaatgctgctccc

SEQ ID NO: 4753633 - DNA, 25 bp, Homo sapien
tatcttgctaaatcagggtctggtg

SEQ ID NO: 4753634 - DNA, 25 bp, Homo sapien
ttccagctggttgggggaatgatac

SEQ ID NO: 4753635 - DNA, 25 bp, Homo sapien
gggaatgatacggaaatatcttgct

SEQ ID NO: 4753636 - DNA, 25 bp, Homo sapien
cccactgctgccgtcatcaatatag

SEQ ID NO: 4753637 - DNA, 25 bp, Homo sapien
gtcatcaatatagcacaccacaatg

SEQ ID NO: 4753638 - DNA, 25 bp, Homo sapien
atatagcacaccacaatggctccca

SEQ ID NO: 4753639 - DNA, 25 bp, Homo sapien
tggctcccagcctctgtacgtctgg

SEQ ID NO: 4753640 - DNA, 25 bp, Homo sapien
ctctgtgttacgctcacgaatgatg

SEQ ID NO: 4753641 - DNA, 25 bp, Homo sapien
tgttgaaaggaacgcagatacacaa

SEQ ID NO: 4753642 - DNA, 25 bp, Homo sapien
cacacttgttgaaaggaacgcagat

SEQ ID NO: 4753643 - DNA, 25 bp, Homo sapien
gctgagctctgtgttacgctcacga

SEQ ID NO: 4753644 - DNA, 25 bp, Homo sapien
cagcaaacaactgtggggccctcta

SEQ ID NO: 4753645 - DNA, 25 bp, Homo sapien
agcaaacaactgtggggccctctaa

SEQ ID NO: 4753646 - DNA, 25 bp, Homo sapien
gcaaacaactgtggggccctctaag

SEQ ID NO: 4753647 - DNA, 25 bp, Homo sapien
gcaatacataattcggacaggctga

SEQ ID NO: 4753648 - DNA, 25 bp, Homo sapien
tggctaaaaagtcccagcaggtttc

SEQ ID NO: 4753649 - DNA, 25 bp, Homo sapien
catgctgtgctgtagatctcaacaa

SEQ ID NO: 4753650 - DNA, 25 bp, Homo sapien
caggctgaaagtaccattgtaacca

SEQ ID NO: 4753651 - DNA, 25 bp, Homo sapien
gaaagtgtgctgttttggaggaggc

SEQ ID NO: 4753652 - DNA, 25 bp, Homo sapien
ggaaagtgtgctgttttggaggagg

SEQ ID NO: 4753653 - DNA, 25 bp, Homo sapien
aaagtgtgctgttttggaggaggct

SEQ ID NO: 4753654 - DNA, 25 bp, Homo sapien
cggaaagtgtgctgttttggaggag

SEQ ID NO: 4753655 - DNA, 25 bp, Homo sapien
gcacatcccgcacctgctcattttt

SEQ ID NO: 4753656 - DNA, 25 bp, Homo sapien
gactcttctccgactctgcgcacat

SEQ ID NO: 4753657 - DNA, 25 bp, Homo sapien
gtttccgtcgttcctggagccactc

SEQ ID NO: 4753658 - DNA, 25 bp, Homo sapien
actccgggcgccctggactcttctc

SEQ ID NO: 4753659 - DNA, 25 bp, Homo sapien
aaacttctttcgcaggctcacaaca

SEQ ID NO: 4753660 - DNA, 25 bp, Homo sapien
cacacaaacttctttcgcaggctca

SEQ ID NO: 4753661 - DNA, 25 bp, Homo sapien
cacaaacttctttcgcaggctcaca

SEQ ID NO: 4753662 - DNA, 25 bp, Homo sapien
ttctttcgcaggctcacaacatagt

SEQ ID NO: 4753663 - DNA, 25 bp, Homo sapien
ccaggtggattctcatgatggacac

SEQ ID NO: 4753664 - DNA, 25 bp, Homo sapien
ggtgatttgttctgggtatttgatc

SEQ ID NO: 4753665 - DNA, 25 bp, Homo sapien
tcatgcttgctggttgggaatcaga

SEQ ID NO: 4753666 - DNA, 25 bp, Homo sapien
ggtatttgatctgttgtgtaggtcc

SEQ ID NO: 4753667 - DNA, 25 bp, Homo sapien
atttagcccagaataatacagtttc

SEQ ID NO: 4753668 - DNA, 25 bp, Homo sapien
gtctttaatttctactcttacagtg

SEQ ID NO: 4753669 - DNA, 25 bp, Homo sapien
tacagtgtcactaaaacaaggattc

SEQ ID NO: 4753670 - DNA, 25 bp, Homo sapien
cagaataatacagtttcagccttga

SEQ ID NO: 4753671 - DNA, 25 bp, Homo sapien
caggttgctgcctgacgattaaatt

SEQ ID NO: 4753672 - DNA, 25 bp, Homo sapien
tcaggttgctgcctgacgattaaat

SEQ ID NO: 4753673 - DNA, 25 bp, Homo sapien
ctagccacatcgtctaaggttcccc

SEQ ID NO: 4753674 - DNA, 25 bp, Homo sapien
gccttcccactactcgccaacactg

SEQ ID NO: 4753675 - DNA, 25 bp, Homo sapien
cagcccatctggagcccttgttctc

SEQ ID NO: 4753676 - DNA, 25 bp, Homo sapien
gccaacactgtccacttttctttgc

SEQ ID NO: 4753677 - DNA, 25 bp, Homo sapien
atgcttggaatacagcagacaccag

SEQ ID NO: 4753678 - DNA, 25 bp, Homo sapien
ctagatagtgtgaggatgcttggaa

SEQ ID NO: 4753679 - DNA, 25 bp, Homo sapien
gctccctagatagtgtgaggatgct

SEQ ID NO: 4753680 - DNA, 25 bp, Homo sapien
gaggatgcttggaatacagcagaca

SEQ ID NO: 4753681 - DNA, 25 bp, Homo sapien
caggacgttgcaatctgtgtgggga

SEQ ID NO: 4753682 - DNA, 25 bp, Homo sapien
aagagagctttggcactggtaggct

SEQ ID NO: 4753683 - DNA, 25 bp, Homo sapien
gctttgttgggttgatattactggg

SEQ ID NO: 4753684 - DNA, 25 bp, Homo sapien
ggaagagagctttggcactggtagg

SEQ ID NO: 4753685 - DNA, 25 bp, Homo sapien
aataatacgttgttattgcgaaaat

SEQ ID NO: 4753686 - DNA, 25 bp, Homo sapien
taatacgttgttattgcgaaaatat

SEQ ID NO: 4753687 - DNA, 25 bp, Homo sapien
tacgttgttattgcgaaaatattta

SEQ ID NO: 4753688 - DNA, 25 bp, Homo sapien
gaaataatacgttgttattgcgaaa

SEQ ID NO: 4753689 - DNA, 25 bp, Homo sapien
gaatcatataatacaaggtccttta

SEQ ID NO: 4753690 - DNA, 25 bp, Homo sapien
caagtaatattctatcacgtggatg

SEQ ID NO: 4753691 - DNA, 25 bp, Homo sapien
cagatggttctctcatttaaagggc

SEQ ID NO: 4753692 - DNA, 25 bp, Homo sapien
gaattgtgcagttatcaccacaacc

SEQ ID NO: 4753693 - DNA, 25 bp, Homo sapien
ggaaatctccagcatgaggcttctg

SEQ ID NO: 4753694 - DNA, 25 bp, Homo sapien
tctgaggttgaactccatagctttt

SEQ ID NO: 4753695 - DNA, 25 bp, Homo sapien
ttcttgtcagaagggttcttcattt

SEQ ID NO: 4753696 - DNA, 25 bp, Homo sapien
ttttgattgcaaccaaacatgaaag

SEQ ID NO: 4753697 - DNA, 25 bp, Homo sapien
gagagctctttgacttggccaatag

SEQ ID NO: 4753698 - DNA, 25 bp, Homo sapien
tacatcaagtatgttggtacatggg

SEQ ID NO: 4753699 - DNA, 25 bp, Homo sapien
gggcctatcttaatgcacttgtttg

SEQ ID NO: 4753700 - DNA, 25 bp, Homo sapien
ttatacaagttcctcttgagaaggc

SEQ ID NO: 4753701 - DNA, 25 bp, Homo sapien
tcctcacttgggaaaagggtactgc

SEQ ID NO: 4753702 - DNA, 25 bp, Homo sapien
ctttcagaaaacctgcaagggctgt

SEQ ID NO: 4753703 - DNA, 25 bp, Homo sapien
cttccttgggaacggcacagtcact

SEQ ID NO: 4753704 - DNA, 25 bp, Homo sapien
tagtcaaggttagtgcaagcaagga

SEQ ID NO: 4753705 - DNA, 25 bp, Homo sapien
tggtaaggcctactcaaactttctg

SEQ ID NO: 4753706 - DNA, 25 bp, Homo sapien
tatgagattacaatactggagggcc

SEQ ID NO: 4753707 - DNA, 25 bp, Homo sapien
tggagggccttcaaccctgagaact

SEQ ID NO: 4753708 - DNA, 25 bp, Homo sapien
tgctgtttccaatccttgaccgtaa

SEQ ID NO: 4753709 - DNA, 25 bp, Homo sapien
tttgacttatggtcttttattgatt

SEQ ID NO: 4753710 - DNA, 25 bp, Homo sapien
attgatttttttttctgatgcaaaa

SEQ ID NO: 4753711 - DNA, 25 bp, Homo sapien
ttttctgatgcaaaaaaaaaatggc

SEQ ID NO: 4753712 - DNA, 25 bp, Homo sapien
tgacttatggtcttttattgatttt

SEQ ID NO: 4753713 - DNA, 25 bp, Homo sapien
aactctgctatgaggcaagggacca

SEQ ID NO: 4753714 - DNA, 25 bp, Homo sapien
tattggacaaccatgagtgaccttc

SEQ ID NO: 4753715 - DNA, 25 bp, Homo sapien
caagggctatctccattgggaatca

SEQ ID NO: 4753716 - DNA, 25 bp, Homo sapien
ccaatgatggtccttgttcaagtca

SEQ ID NO: 4753717 - DNA, 25 bp, Homo sapien
gacagggctacctagctcaaaagtg

SEQ ID NO: 4753718 - DNA, 25 bp, Homo sapien
gagagaaatccaaactgtctcctag

SEQ ID NO: 4753719 - DNA, 25 bp, Homo sapien
tcaaaagtgtgaagtcagtcagtcc

SEQ ID NO: 4753720 - DNA, 25 bp, Homo sapien
ggctttaagatattgcagcaaccct

SEQ ID NO: 4753721 - DNA, 25 bp, Homo sapien
ccacagtggtggcatcatgagtgct

SEQ ID NO: 4753722 - DNA, 25 bp, Homo sapien
gagggcatatctcccaggatgtgaa

SEQ ID NO: 4753723 - DNA, 25 bp, Homo sapien
cactctggtagtatggtcagctgga

SEQ ID NO: 4753724 - DNA, 25 bp, Homo sapien
taacattcatgggttccgagggcat

SEQ ID NO: 4753725 - DNA, 25 bp, Homo sapien
cccgtctctgtatatagaggtggag

SEQ ID NO: 4753726 - DNA, 25 bp, Homo sapien
gcgtcctctgagattgctgtcacca

SEQ ID NO: 4753727 - DNA, 25 bp, Homo sapien
caggccggctatggactctctataa

SEQ ID NO: 4753728 - DNA, 25 bp, Homo sapien
gctctcttcataagctggagggtaa

SEQ ID NO: 4753729 - DNA, 25 bp, Homo sapien
gatgccaaaagtggatgctcatggg

SEQ ID NO: 4753730 - DNA, 25 bp, Homo sapien
agaatgatgcctagggtgttatccc

SEQ ID NO: 4753731 - DNA, 25 bp, Homo sapien
tgttatccctaaatggtcctgtggc

SEQ ID NO: 4753732 - DNA, 25 bp, Homo sapien
tgtggctagccaagaattaggaggt

SEQ ID NO: 4753733 - DNA, 25 bp, Homo sapien
gccctttgtaactgacttgtttcac

SEQ ID NO: 4753734 - DNA, 25 bp, Homo sapien
gttttcaacttcatccaagtggtgg

SEQ ID NO: 4753735 - DNA, 25 bp, Homo sapien
tattgctctacaaccatcaccttaa

SEQ ID NO: 4753736 - DNA, 25 bp, Homo sapien
aacttcatccaagtggtggcatgtg

SEQ ID NO: 4753737 - DNA, 25 bp, Homo sapien
tggtccctctgcctgtcagcacgta

SEQ ID NO: 4753738 - DNA, 25 bp, Homo sapien
ttggtccctctgcctgtcagcacgt

SEQ ID NO: 4753739 - DNA, 25 bp, Homo sapien
gcccttcttggtccctctgcctgtc

SEQ ID NO: 4753740 - DNA, 25 bp, Homo sapien
cttcttggtccctctgcctgtcagc

SEQ ID NO: 4753741 - DNA, 25 bp, Homo sapien
gacagtcgaatatggagccccagga

SEQ ID NO: 4753742 - DNA, 25 bp, Homo sapien
cagtcacctggcgatagttgctcca

SEQ ID NO: 4753743 - DNA, 25 bp, Homo sapien
cagggccccatgagcaaggtgttgt

SEQ ID NO: 4753744 - DNA, 25 bp, Homo sapien
cagaagcaaataggccgcaatcagg

SEQ ID NO: 4753745 - DNA, 25 bp, Homo sapien
cttgcaccttaggaacccagcaccc

SEQ ID NO: 4753746 - DNA, 25 bp, Homo sapien
ccttgcaccttaggaacccagcacc

SEQ ID NO: 4753747 - DNA, 25 bp, Homo sapien
aaaaggctgggaatatttgcagcat

SEQ ID NO: 4753748 - DNA, 25 bp, Homo sapien
catcaaggggaaaaggctgggaata

SEQ ID NO: 4753749 - DNA, 25 bp, Homo sapien
gggaaaaggctgggaatatttgcag

SEQ ID NO: 4753750 - DNA, 25 bp, Homo sapien
tttgggcatcaaggggaaaaggctg

SEQ ID NO: 4753751 - DNA, 25 bp, Homo sapien
gacatggagagaaagcgtcttgttc

SEQ ID NO: 4753752 - DNA, 25 bp, Homo sapien
gtaataacagaagagaaaatcaggc

SEQ ID NO: 4753753 - DNA, 25 bp, Homo sapien
tcttcagccatcttgaaggtgtaga

SEQ ID NO: 4753754 - DNA, 25 bp, Homo sapien
ggtgtagaagaaactcaagcagaag

SEQ ID NO: 4753755 - DNA, 25 bp, Homo sapien
tcagcactgattatgagagtaaggg

SEQ ID NO: 4753756 - DNA, 25 bp, Homo sapien
gccactactcagcactgattatgag

SEQ ID NO: 4753757 - DNA, 25 bp, Homo sapien
cactactcagcactgattatgagag

SEQ ID NO: 4753758 - DNA, 25 bp, Homo sapien
ccttgccactactcagcactgatta

SEQ ID NO: 4753759 - DNA, 25 bp, Homo sapien
ccttgcttttaaactagtctatttg

SEQ ID NO: 4753760 - DNA, 25 bp, Homo sapien
aaattcacccatcaggccgggtgcg

SEQ ID NO: 4753761 - DNA, 25 bp, Homo sapien
caccaaggaaatgataccttgcttt

SEQ ID NO: 4753762 - DNA, 25 bp, Homo sapien
tcaagagatccaccaaggaaatgat

SEQ ID NO: 4753763 - DNA, 25 bp, Homo sapien
gaagatcataacaggccaggcaatt

SEQ ID NO: 4753764 - DNA, 25 bp, Homo sapien
cagagtcagcccttctgataggaaa

SEQ ID NO: 4753765 - DNA, 25 bp, Homo sapien
ccaaaaatgcagcacgtgagagtga

SEQ ID NO: 4753766 - DNA, 25 bp, Homo sapien
tgataggaaactccccaggttcact

SEQ ID NO: 4753767 - DNA, 25 bp, Homo sapien
cctccctgcactgtacgagttaact

SEQ ID NO: 4753768 - DNA, 25 bp, Homo sapien
ataattactgacaaggcccctccct

SEQ ID NO: 4753769 - DNA, 25 bp, Homo sapien
gcctggcccataatgcaatctttta

SEQ ID NO: 4753770 - DNA, 25 bp, Homo sapien
actgtacgagttaactctgagcttg

SEQ ID NO: 4753771 - DNA, 25 bp, Homo sapien
tcacagagtccatcataggtcagct

SEQ ID NO: 4753772 - DNA, 25 bp, Homo sapien
tgtattccttgttctctcacagagt

SEQ ID NO: 4753773 - DNA, 25 bp, Homo sapien
tcaggatgggctaggatttgctttg

SEQ ID NO: 4753774 - DNA, 25 bp, Homo sapien
gcaaacaacctcatatctccatggt

SEQ ID NO: 4753775 - DNA, 25 bp, Homo sapien
gagtcattctatcatggtccatgac

SEQ ID NO: 4753776 - DNA, 25 bp, Homo sapien
tatcatggtccatgacacataacct

SEQ ID NO: 4753777 - DNA, 25 bp, Homo sapien
tccatgacacataacctggacaatt

SEQ ID NO: 4753778 - DNA, 25 bp, Homo sapien
aaagatgagtcattctatcatggtc

SEQ ID NO: 4753779 - DNA, 25 bp, Homo sapien
cttgacattggcctggttcttcaag

SEQ ID NO: 4753780 - DNA, 25 bp, Homo sapien
gatagagttccaagtaatgaacccg

SEQ ID NO: 4753781 - DNA, 25 bp, Homo sapien
cccgaaagagtttcattgctttata

SEQ ID NO: 4753782 - DNA, 25 bp, Homo sapien
tattccattacgaggagagtgtagg

SEQ ID NO: 4753783 - DNA, 25 bp, Homo sapien
tgtagggttgagtatgctgacctgc

SEQ ID NO: 4753784 - DNA, 25 bp, Homo sapien
aaggccacgaattgcttctaacgaa

SEQ ID NO: 4753785 - DNA, 25 bp, Homo sapien
gccacgaattgcttctaacgaagaa

SEQ ID NO: 4753786 - DNA, 25 bp, Homo sapien
tcaaaggccacgaattgcttctaac

SEQ ID NO: 4753787 - DNA, 25 bp, Homo sapien
ggccacgaattgcttctaacgaaga

SEQ ID NO: 4753788 - DNA, 25 bp, Homo sapien
aataaacttgttgcgttttgaggtg

SEQ ID NO: 4753789 - DNA, 25 bp, Homo sapien
tggacaattgtctctctgcgtagat

SEQ ID NO: 4753790 - DNA, 25 bp, Homo sapien
ctgctacatatttgcctgagtactt

SEQ ID NO: 4753791 - DNA, 25 bp, Homo sapien
gagtactttaaggttctatggacaa

SEQ ID NO: 4753792 - DNA, 25 bp, Homo sapien
gacatcacaacagaattcgtggctt

SEQ ID NO: 4753793 - DNA, 25 bp, Homo sapien
aagtcttcaggaactcacaagagag

SEQ ID NO: 4753794 - DNA, 25 bp, Homo sapien
cagaattcgtggcttcccagaggaa

SEQ ID NO: 4753795 - DNA, 25 bp, Homo sapien
cagcgtgtgtttaacagttcttccc

SEQ ID NO: 4753796 - DNA, 25 bp, Homo sapien
tggtgtcatcagtgtcacacatgct

SEQ ID NO: 4753797 - DNA, 25 bp, Homo sapien
aacaagtgtttgtggtgtcatcagt

SEQ ID NO: 4753798 - DNA, 25 bp, Homo sapien
tcaacaagtgtttgtggtgtcatca

SEQ ID NO: 4753799 - DNA, 25 bp, Homo sapien
gtgtcatcagtgtcacacatgctac

SEQ ID NO: 4753800 - DNA, 25 bp, Homo sapien
tctgcctcgtccactgtaagcaact

SEQ ID NO: 4753801 - DNA, 25 bp, Homo sapien
taggatctgcctcgtccactgtaag

SEQ ID NO: 4753802 - DNA, 25 bp, Homo sapien
ttccctccacacagggtaggatctg

SEQ ID NO: 4753803 - DNA, 25 bp, Homo sapien
cacacagggtaggatctgcctcgtc

SEQ ID NO: 4753804 - DNA, 25 bp, Homo sapien
attttccactctggatttcatagct

SEQ ID NO: 4753805 - DNA, 25 bp, Homo sapien
ttttccactctggatttcatagctg

SEQ ID NO: 4753806 - DNA, 25 bp, Homo sapien
tttccactctggatttcatagctga

SEQ ID NO: 4753807 - DNA, 25 bp, Homo sapien
atctctcagtaatggccagccacat

SEQ ID NO: 4753808 - DNA, 25 bp, Homo sapien
aatctctcagtaatggccagccaca

SEQ ID NO: 4753809 - DNA, 25 bp, Homo sapien
taaatctctcagtaatggccagcca

SEQ ID NO: 4753810 - DNA, 25 bp, Homo sapien
cttaaatctctcagtaatggccagc

SEQ ID NO: 4753811 - DNA, 25 bp, Homo sapien
ccagcccactaagcgctatcagtag

SEQ ID NO: 4753812 - DNA, 25 bp, Homo sapien
tcttcgcagctagactgacatcagg

SEQ ID NO: 4753813 - DNA, 25 bp, Homo sapien
tatcagtaggaattggccctcagcc

SEQ ID NO: 4753814 - DNA, 25 bp, Homo sapien
acatcaggtgacgttgcaagtgccc

SEQ ID NO: 4753815 - DNA, 25 bp, Homo sapien
cttagaatgggagcaaccaacgcct

SEQ ID NO: 4753816 - DNA, 25 bp, Homo sapien
ccttcctcgtgaagggggcgcctgc

SEQ ID NO: 4753817 - DNA, 25 bp, Homo sapien
gcaaccaacgccttggaatcctggc

SEQ ID NO: 4753818 - DNA, 25 bp, Homo sapien
tcaagtgccggcttcgccgcctcag

SEQ ID NO: 4753819 - DNA, 25 bp, Homo sapien
gcgggacaggcgcccggtccccaca

SEQ ID NO: 4753820 - DNA, 25 bp, Homo sapien
ggctgagacgcccagcccactgcgg

SEQ ID NO: 4753821 - DNA, 25 bp, Homo sapien
cggcaggtgctgcaaaccggtctgc

SEQ ID NO: 4753822 - DNA, 25 bp, Homo sapien
aaaccggtctgccttcgctgcaggg

SEQ ID NO: 4753823 - DNA, 25 bp, Homo sapien
tgaagctccggccgctgttgcggca

SEQ ID NO: 4753824 - DNA, 25 bp, Homo sapien
cagtggagccgctcggagctgctgg

SEQ ID NO: 4753825 - DNA, 25 bp, Homo sapien
ggcagtggagccgctcggagctgct

SEQ ID NO: 4753826 - DNA, 25 bp, Homo sapien
cggtccccgaacgcgccgcggcgag

SEQ ID NO: 4753827 - DNA, 25 bp, Homo sapien
cgcggcgaggctgcgcccggcagtg

SEQ ID NO: 4753828 - DNA, 25 bp, Homo sapien
ggcttgcgcttaggggctctgcatc

SEQ ID NO: 4753829 - DNA, 25 bp, Homo sapien
ctttgcctgtctgcgttgtgctggg

SEQ ID NO: 4753830 - DNA, 25 bp, Homo sapien
tctctgctgaaacccgtcggtctct

SEQ ID NO: 4753831 - DNA, 25 bp, Homo sapien
gagagggcgcccgtggccaccgaag

SEQ ID NO: 4753832 - DNA, 25 bp, Homo sapien
cagtgacactcggagatcactctgg

SEQ ID NO: 4753833 - DNA, 25 bp, Homo sapien
cactcggagatcactctgggttcac

SEQ ID NO: 4753834 - DNA, 25 bp, Homo sapien
cacttaaataggagtactctcccct

SEQ ID NO: 4753835 - DNA, 25 bp, Homo sapien
gatcactctgggttcacttaaatag

SEQ ID NO: 4753836 - DNA, 25 bp, Homo sapien
tgcctcctgaagctggcgggtacag

SEQ ID NO: 4753837 - DNA, 25 bp, Homo sapien
cctcctgaagctggcgggtacagag

SEQ ID NO: 4753838 - DNA, 25 bp, Homo sapien
tgtaaattcccaacacataagataa

SEQ ID NO: 4753839 - DNA, 25 bp, Homo sapien
atgtgcctcctgaagctggcgggta

SEQ ID NO: 4753840 - DNA, 25 bp, Homo sapien
tcctgctgagtatgggttgaggctc

SEQ ID NO: 4753841 - DNA, 25 bp, Homo sapien
ccgggaatcctgttagggtgacatc

SEQ ID NO: 4753842 - DNA, 25 bp, Homo sapien
gaggctctggccttctcaactgggt

SEQ ID NO: 4753843 - DNA, 25 bp, Homo sapien
tgccagatgaatgtaccgggaatcc

SEQ ID NO: 4753844 - DNA, 25 bp, Homo sapien
gaagtcccaaacaaggtcacagtgc

SEQ ID NO: 4753845 - DNA, 25 bp, Homo sapien
ttccacatcgtaagagcctcatgct

SEQ ID NO: 4753846 - DNA, 25 bp, Homo sapien
cctttgttcccaccaactgggagag

SEQ ID NO: 4753847 - DNA, 25 bp, Homo sapien
gtttcctttggcttgtccgtcagca

SEQ ID NO: 4753848 - DNA, 25 bp, Homo sapien
tagcggcttgtttgacacatcccat

SEQ ID NO: 4753849 - DNA, 25 bp, Homo sapien
ctggtatctcatccatcttagcggc

SEQ ID NO: 4753850 - DNA, 25 bp, Homo sapien
ccatcttagcggcttgtttgacaca

SEQ ID NO: 4753851 - DNA, 25 bp, Homo sapien
tcatccatcttagcggcttgtttga

SEQ ID NO: 4753852 - DNA, 25 bp, Homo sapien
tagacctttggttatactcctgctc

SEQ ID NO: 4753853 - DNA, 25 bp, Homo sapien
tatgactttctaagaatgctctgac

SEQ ID NO: 4753854 - DNA, 25 bp, Homo sapien
ctctgaaagagtcggtagtggagga

SEQ ID NO: 4753855 - DNA, 25 bp, Homo sapien
tagtggaggatgcttgttttagacc

SEQ ID NO: 4753856 - DNA, 25 bp, Homo sapien
tccgtgtcatcatttagcaaggctg

SEQ ID NO: 4753857 - DNA, 25 bp, Homo sapien
caacgaatgtcagctgcctttgaga

SEQ ID NO: 4753858 - DNA, 25 bp, Homo sapien
gaatgaggcaaagcgtttaaccttc

SEQ ID NO: 4753859 - DNA, 25 bp, Homo sapien
gcaaggctgattagaccccatgaat

SEQ ID NO: 4753860 - DNA, 25 bp, Homo sapien
atgagccaagaattgtggtttcatt

SEQ ID NO: 4753861 - DNA, 25 bp, Homo sapien
tatattaattacatgagccaagaat

SEQ ID NO: 4753862 - DNA, 25 bp, Homo sapien
atattaattacatgagccaagaatt

SEQ ID NO: 4753863 - DNA, 25 bp, Homo sapien
caatatgtattctccagactgcagg

SEQ ID NO: 4753864 - DNA, 25 bp, Homo sapien
cactgtcaccttagtgcaaatgacc

SEQ ID NO: 4753865 - DNA, 25 bp, Homo sapien
gaccagaatgtggtctggtccacca

SEQ ID NO: 4753866 - DNA, 25 bp, Homo sapien
tgctgttacacccatgcttgaaaac

SEQ ID NO: 4753867 - DNA, 25 bp, Homo sapien
tgacatgcgtcaacgcgagcttgcg

SEQ ID NO: 4753868 - DNA, 25 bp, Homo sapien
tattacgcattaagcaggcgccgcg

SEQ ID NO: 4753869 - DNA, 25 bp, Homo sapien
gaagccctccctgattaggccaagc

SEQ ID NO: 4753870 - DNA, 25 bp, Homo sapien
ggaatatacggactagcggcccgac

SEQ ID NO: 4753871 - DNA, 25 bp, Homo sapien
aatcctaggtccctgactgagcacc

SEQ ID NO: 4753872 - DNA, 25 bp, Homo sapien
ggccagcccgctgacagattctcgg

SEQ ID NO: 4753873 - DNA, 25 bp, Homo sapien
gggaatgggaatcctaggtccctga

SEQ ID NO: 4753874 - DNA, 25 bp, Homo sapien
ccgctgacagattctcggtggcggc

SEQ ID NO: 4753875 - DNA, 25 bp, Homo sapien
catggacttgatcaaccgagagacg

SEQ ID NO: 4753876 - DNA, 25 bp, Homo sapien
gcagcagtgccggatcttcttgtaa

SEQ ID NO: 4753877 - DNA, 25 bp, Homo sapien
tgacaacgacgtggagaaatccgcc

SEQ ID NO: 4753878 - DNA, 25 bp, Homo sapien
taactcaccagcgaaagtcagcact

SEQ ID NO: 4753879 - DNA, 25 bp, Homo sapien
taaaattgcggacctgatccttcca

SEQ ID NO: 4753880 - DNA, 25 bp, Homo sapien
aatgtattaattctgggctaggagg

SEQ ID NO: 4753881 - DNA, 25 bp, Homo sapien
gcttcctgttctcatgagtatgcca

SEQ ID NO: 4753882 - DNA, 25 bp, Homo sapien
ttttctgtgcttcgccctcactggc

SEQ ID NO: 4753883 - DNA, 25 bp, Homo sapien
agtaccacccccgcatggacaaatg

SEQ ID NO: 4753884 - DNA, 25 bp, Homo sapien
tgatggaagagtttccaaccggaag

SEQ ID NO: 4753885 - DNA, 25 bp, Homo sapien
ccattctcttaaggcgattgatgga

SEQ ID NO: 4753886 - DNA, 25 bp, Homo sapien
gcagatgtgagatcactcacagcca

SEQ ID NO: 4753887 - DNA, 25 bp, Homo sapien
ttcagcagcaattgtagaacctgat

SEQ ID NO: 4753888 - DNA, 25 bp, Homo sapien
agcatcaatcatcccctgggtttca

SEQ ID NO: 4753889 - DNA, 25 bp, Homo sapien
tcagcttgatacagcatcaatcatc

SEQ ID NO: 4753890 - DNA, 25 bp, Homo sapien
gcaattgtagaacctgatttatcaa

SEQ ID NO: 4753891 - DNA, 25 bp, Homo sapien
tcggtagccaacgagtcagcttgga

SEQ ID NO: 4753892 - DNA, 25 bp, Homo sapien
acaactgttcgaaggatagtgggag

SEQ ID NO: 4753893 - DNA, 25 bp, Homo sapien
gttgacaactgttcgaaggatagtg

SEQ ID NO: 4753894 - DNA, 25 bp, Homo sapien
tctttgaggatatttgactcggtag

SEQ ID NO: 4753895 - DNA, 25 bp, Homo sapien
acagaacagtgtaccacacttctcc

SEQ ID NO: 4753896 - DNA, 25 bp, Homo sapien
tcccagataggaaaagtgtcgatcc

SEQ ID NO: 4753897 - DNA, 25 bp, Homo sapien
gaggaacttgagctgtaagcactcc

SEQ ID NO: 4753898 - DNA, 25 bp, Homo sapien
tgtcgatccaagttgcaggcttcca

SEQ ID NO: 4753899 - DNA, 25 bp, Homo sapien
gaatactttgagcagttgtctccct

SEQ ID NO: 4753900 - DNA, 25 bp, Homo sapien
taggttgagttctgatggaatgaat

SEQ ID NO: 4753901 - DNA, 25 bp, Homo sapien
gggtttgccccagcatattagcagc

SEQ ID NO: 4753902 - DNA, 25 bp, Homo sapien
cagcatattagcagcgcatttcggc

SEQ ID NO: 4753903 - DNA, 25 bp, Homo sapien
gtggccaccacacggactctccttg

SEQ ID NO: 4753904 - DNA, 25 bp, Homo sapien
gtttttcatgtcagtttgatgcttg

SEQ ID NO: 4753905 - DNA, 25 bp, Homo sapien
ttgaacattccttgattatccagtg

SEQ ID NO: 4753906 - DNA, 25 bp, Homo sapien
agtttgatgcttgaacattccttga

SEQ ID NO: 4753907 - DNA, 25 bp, Homo sapien
tagtttttcatgtcagtttgatgct

SEQ ID NO: 4753908 - DNA, 25 bp, Homo sapien
gaggctagctcaagtagaacaaaca

SEQ ID NO: 4753909 - DNA, 25 bp, Homo sapien
aactggtccagaatgcaagtgcgtt

SEQ ID NO: 4753910 - DNA, 25 bp, Homo sapien
gcattcttcaaggaagtcctcaggg

SEQ ID NO: 4753911 - DNA, 25 bp, Homo sapien
gcatttgagattggcacagccctgg

SEQ ID NO: 4753912 - DNA, 25 bp, Homo sapien
gagccctctgacacttgagagggag

SEQ ID NO: 4753913 - DNA, 25 bp, Homo sapien
gggccctgtgtgtagaggctccttc

SEQ ID NO: 4753914 - DNA, 25 bp, Homo sapien
ctctgacacttgagagggagcatgt

SEQ ID NO: 4753915 - DNA, 25 bp, Homo sapien
ccctgtgtgtagaggctccttcacc

SEQ ID NO: 4753916 - DNA, 25 bp, Homo sapien
aaggcctcgaatacctggagtttct

SEQ ID NO: 4753917 - DNA, 25 bp, Homo sapien
cagagatgagggtgagcatcacact

SEQ ID NO: 4753918 - DNA, 25 bp, Homo sapien
actttgcaaggcctcgaatacctgg

SEQ ID NO: 4753919 - DNA, 25 bp, Homo sapien
gatgagggtgagcatcacactttgc

SEQ ID NO: 4753920 - DNA, 25 bp, Homo sapien
gcaatgagggtccactctgtcctgt

SEQ ID NO: 4753921 - DNA, 25 bp, Homo sapien
ctgtagccacgagaaggttgggagc

SEQ ID NO: 4753922 - DNA, 25 bp, Homo sapien
gggagcagggcaatgagggtccact

SEQ ID NO: 4753923 - DNA, 25 bp, Homo sapien
agccacgagaaggttgggagcaggg

SEQ ID NO: 4753924 - DNA, 25 bp, Homo sapien
ccttcccttctccacgcctgctcct

SEQ ID NO: 4753925 - DNA, 25 bp, Homo sapien
tcctgctctgacatctctcatccat

SEQ ID NO: 4753926 - DNA, 25 bp, Homo sapien
ggcccttcccttctccacgcctgct

SEQ ID NO: 4753927 - DNA, 25 bp, Homo sapien
ttcccttctccacgcctgctccttc

SEQ ID NO: 4753928 - DNA, 25 bp, Homo sapien
gctgttttcactggcgactttcttc

SEQ ID NO: 4753929 - DNA, 25 bp, Homo sapien
cagtagcagtgtttttcatgaaagg

SEQ ID NO: 4753930 - DNA, 25 bp, Homo sapien
tctgaaagcaacacatccgtcatgg

SEQ ID NO: 4753931 - DNA, 25 bp, Homo sapien
tctgtctaatgtttgcaatgaaggc

SEQ ID NO: 4753932 - DNA, 25 bp, Homo sapien
catctggtaactgatcgtattttcc

SEQ ID NO: 4753933 - DNA, 25 bp, Homo sapien
gcttttatcttttgcgcattgtgca

SEQ ID NO: 4753934 - DNA, 25 bp, Homo sapien
cataggagaaatttccactccagct

SEQ ID NO: 4753935 - DNA, 25 bp, Homo sapien
acctgtggttcatttgagcaactgc

SEQ ID NO: 4753936 - DNA, 25 bp, Homo sapien
gatgtggtgcagaagcatagcaagt

SEQ ID NO: 4753937 - DNA, 25 bp, Homo sapien
tctgtcttccttaggaacaacagca

SEQ ID NO: 4753938 - DNA, 25 bp, Homo sapien
tctcttgtagatgtcttctgctgct

SEQ ID NO: 4753939 - DNA, 25 bp, Homo sapien
cctttggttagcaatattattaata

SEQ ID NO: 4753940 - DNA, 25 bp, Homo sapien
gatcctttggttagcaatattatta

SEQ ID NO: 4753941 - DNA, 25 bp, Homo sapien
tcaggtggtattctcaatcagcatc

SEQ ID NO: 4753942 - DNA, 25 bp, Homo sapien
cacagagatgattacgttgctagcc

SEQ ID NO: 4753943 - DNA, 25 bp, Homo sapien
ttcttgaccaaattctgactcacag

SEQ ID NO: 4753944 - DNA, 25 bp, Homo sapien
ttcattcaagcatggaccaacacag

SEQ ID NO: 4753945 - DNA, 25 bp, Homo sapien
cacatgatgtcccatgttgtcattt

SEQ ID NO: 4753946 - DNA, 25 bp, Homo sapien
catttgtccgttggactgggtcagt

SEQ ID NO: 4753947 - DNA, 25 bp, Homo sapien
agatgattagaagctccagtcacat

SEQ ID NO: 4753948 - DNA, 25 bp, Homo sapien
tgttaggaagatgattagaagctcc

SEQ ID NO: 4753949 - DNA, 25 bp, Homo sapien
ctgaccgtgaccacattccaaggaa

SEQ ID NO: 4753950 - DNA, 25 bp, Homo sapien
caccatgagtaagataatagctcag

SEQ ID NO: 4753951 - DNA, 25 bp, Homo sapien
ttttcaccatgagtaagataatagc

SEQ ID NO: 4753952 - DNA, 25 bp, Homo sapien
gagtaagataatagctcagagacac

SEQ ID NO: 4753953 - DNA, 25 bp, Homo sapien
ttaatataagcaggtgttcactcgc

SEQ ID NO: 4753954 - DNA, 25 bp, Homo sapien
tgttctcagggcacaacgatgcttt

SEQ ID NO: 4753955 - DNA, 25 bp, Homo sapien
ggcctccatatgttaagttacccag

SEQ ID NO: 4753956 - DNA, 25 bp, Homo sapien
tgcacggcttccttcactggcaaaa

SEQ ID NO: 4753957 - DNA, 25 bp, Homo sapien
cagttctcccaaatggtacactgta

SEQ ID NO: 4753958 - DNA, 25 bp, Homo sapien
agagaaaggaatatgtggcagctca

SEQ ID NO: 4753959 - DNA, 25 bp, Homo sapien
aaaggaatatgtggcagctcagtcc

SEQ ID NO: 4753960 - DNA, 25 bp, Homo sapien
tctcccaaatggtacactgtatttt

SEQ ID NO: 4753961 - DNA, 25 bp, Homo sapien
gagggtcccacgcagcgtctggtac

SEQ ID NO: 4753962 - DNA, 25 bp, Homo sapien
gcaccctgcacttaaccctgttatg

SEQ ID NO: 4753963 - DNA, 25 bp, Homo sapien
tgccaactgcactgtgagtggctgg

SEQ ID NO: 4753964 - DNA, 25 bp, Homo sapien
tgttcttgagcctacagttctggag

SEQ ID NO: 4753965 - DNA, 25 bp, Homo sapien
gaagccaggtggccatgccgagcag

SEQ ID NO: 4753966 - DNA, 25 bp, Homo sapien
cagaagccaggtggccatgccgagc

SEQ ID NO: 4753967 - DNA, 25 bp, Homo sapien
ccaggtggccatgccgagcagatgc

SEQ ID NO: 4753968 - DNA, 25 bp, Homo sapien
agccaggtggccatgccgagcagat

SEQ ID NO: 4753969 - DNA, 25 bp, Homo sapien
attatgtctcactcacccgctcctt

SEQ ID NO: 4753970 - DNA, 25 bp, Homo sapien
gagtccctcttacattatgtctcac

SEQ ID NO: 4753971 - DNA, 25 bp, Homo sapien
gccgcttccttcacctttaaagcca

SEQ ID NO: 4753972 - DNA, 25 bp, Homo sapien
agccaacaatggcagattgagtccc

SEQ ID NO: 4753973 - DNA, 25 bp, Homo sapien
ccacctggacagtctaggacaatct

SEQ ID NO: 4753974 - DNA, 25 bp, Homo sapien
cacctggacagtctaggacaatctc

SEQ ID NO: 4753975 - DNA, 25 bp, Homo sapien
cctggacagtctaggacaatctccc

SEQ ID NO: 4753976 - DNA, 25 bp, Homo sapien
ctggacagtctaggacaatctccct

SEQ ID NO: 4753977 - DNA, 25 bp, Homo sapien
tgatgacaggattagacagaccttt

SEQ ID NO: 4753978 - DNA, 25 bp, Homo sapien
cttgaaagtaattgaatattctgtg

SEQ ID NO: 4753979 - DNA, 25 bp, Homo sapien
gacaggattagacagaccttttttc

SEQ ID NO: 4753980 - DNA, 25 bp, Homo sapien
ttcttgaaagtaattgaatattctg

SEQ ID NO: 4753981 - DNA, 25 bp, Homo sapien
tggcaaagaccgctatggcagcagt

SEQ ID NO: 4753982 - DNA, 25 bp, Homo sapien
agcatggacaagtcttggcaaagac

SEQ ID NO: 4753983 - DNA, 25 bp, Homo sapien
aaccctatgccaggggaggaattgg

SEQ ID NO: 4753984 - DNA, 25 bp, Homo sapien
cccagtcagggaaccctatgccagg

SEQ ID NO: 4753985 - DNA, 25 bp, Homo sapien
gccactctactcctgttgggaaaac

SEQ ID NO: 4753986 - DNA, 25 bp, Homo sapien
cacttaaattcggagagtgagccac

SEQ ID NO: 4753987 - DNA, 25 bp, Homo sapien
caggcagccccggttggtggtggta

SEQ ID NO: 4753988 - DNA, 25 bp, Homo sapien
tttccttacccaacgagactgtaga

SEQ ID NO: 4753989 - DNA, 25 bp, Homo sapien
taatcgtgcatttgggactgggcca

SEQ ID NO: 4753990 - DNA, 25 bp, Homo sapien
tgacagcccagaaagatgtccgagt

SEQ ID NO: 4753991 - DNA, 25 bp, Homo sapien
ttcttggaaacctgctgagaacagg

SEQ ID NO: 4753992 - DNA, 25 bp, Homo sapien
tatgcatcgggcacttccacttgtg

SEQ ID NO: 4753993 - DNA, 25 bp, Homo sapien
tcatttcttacttcagggaagccca

SEQ ID NO: 4753994 - DNA, 25 bp, Homo sapien
gatcatttcttacttcagggaagcc

SEQ ID NO: 4753995 - DNA, 25 bp, Homo sapien
ctgatcatttcttacttcagggaag

SEQ ID NO: 4753996 - DNA, 25 bp, Homo sapien
catttcttacttcagggaagcccat

SEQ ID NO: 4753997 - DNA, 25 bp, Homo sapien
taatcccagcaactcaggaggaggc

SEQ ID NO: 4753998 - DNA, 25 bp, Homo sapien
tgcagtgggctgaggtcctgccact

SEQ ID NO: 4753999 - DNA, 25 bp, Homo sapien
gaggcaggagaatctctggagcctg

SEQ ID NO: 4754000 - DNA, 25 bp, Homo sapien
ggaggcagaggttgcagtgggctga

SEQ ID NO: 4754001 - DNA, 25 bp, Homo sapien
gtcatccttgcacaggggccatgct

SEQ ID NO: 4754002 - DNA, 25 bp, Homo sapien
tagtatatgtgctgccaaagtgagc

SEQ ID NO: 4754003 - DNA, 25 bp, Homo sapien
aatcttctctgtatcgttccaattt

SEQ ID NO: 4754004 - DNA, 25 bp, Homo sapien
tatggaacgtttcacaaatttgcat

SEQ ID NO: 4754005 - DNA, 25 bp, Homo sapien
tctcttcgagacgtttccctttggc

SEQ ID NO: 4754006 - DNA, 25 bp, Homo sapien
tgtccacgtgacagttgcactcttg

SEQ ID NO: 4754007 - DNA, 25 bp, Homo sapien
aaatttcgtctcaccctagagagcc

SEQ ID NO: 4754008 - DNA, 25 bp, Homo sapien
gaagctggccttatgcaaatttcgt

SEQ ID NO: 4754009 - DNA, 25 bp, Homo sapien
aggccaggtattcgaaggccaggtc

SEQ ID NO: 4754010 - DNA, 25 bp, Homo sapien
gagagaggccaggtattcgaaggcc

SEQ ID NO: 4754011 - DNA, 25 bp, Homo sapien
ccaggtattcgaaggccaggtcaaa

SEQ ID NO: 4754012 - DNA, 25 bp, Homo sapien
agagaggccaggtattcgaaggcca

SEQ ID NO: 4754013 - DNA, 25 bp, Homo sapien
ttttgtaacaaaactctatgcccag

SEQ ID NO: 4754014 - DNA, 25 bp, Homo sapien
gaaaaagagcaagccgtagtccacc

SEQ ID NO: 4754015 - DNA, 25 bp, Homo sapien
cgtcttcatgtgcaatcaccttcaa

SEQ ID NO: 4754016 - DNA, 25 bp, Homo sapien
caaatagtcgtgtaacatgtgttaa

SEQ ID NO: 4754017 - DNA, 25 bp, Homo sapien
ggactgaactggttgccctctagga

SEQ ID NO: 4754018 - DNA, 25 bp, Homo sapien
gggattctagtaacctcttgtctgt

SEQ ID NO: 4754019 - DNA, 25 bp, Homo sapien
cctctaggacctgatgtacaaatgt

SEQ ID NO: 4754020 - DNA, 25 bp, Homo sapien
gaagtttccgccagacacttctgac

SEQ ID NO: 4754021 - DNA, 25 bp, Homo sapien
cccacatgagagaggactagcgaaa

SEQ ID NO: 4754022 - DNA, 25 bp, Homo sapien
gagctggtcagactccctataggag

SEQ ID NO: 4754023 - DNA, 25 bp, Homo sapien
tctacagattaagagaggcccagag

SEQ ID NO: 4754024 - DNA, 25 bp, Homo sapien
tgtccaagtagatctgtaagtcccc

SEQ ID NO: 4754025 - DNA, 25 bp, Homo sapien
aaagtccaggtatatgcagtctagg

SEQ ID NO: 4754026 - DNA, 25 bp, Homo sapien
cagtgacactcttatgtatccaggt

SEQ ID NO: 4754027 - DNA, 25 bp, Homo sapien
tgccatagcttcagacatcacgtcc

SEQ ID NO: 4754028 - DNA, 25 bp, Homo sapien
tctagggtgggtacagctgcacagt

SEQ ID NO: 4754029 - DNA, 25 bp, Homo sapien
attctttatgatacttgatcttgca

SEQ ID NO: 4754030 - DNA, 25 bp, Homo sapien
cagctgacttaattcctgttttcat

SEQ ID NO: 4754031 - DNA, 25 bp, Homo sapien
ctttatgatacttgatcttgcagct

SEQ ID NO: 4754032 - DNA, 25 bp, Homo sapien
gatcttgcagctgacttaattcctg

SEQ ID NO: 4754033 - DNA, 25 bp, Homo sapien
cccttccgggaattgctttatgatc

SEQ ID NO: 4754034 - DNA, 25 bp, Homo sapien
gagtctaggaccacccattttctta

SEQ ID NO: 4754035 - DNA, 25 bp, Homo sapien
tgatctaccggaaagagagccctgt

SEQ ID NO: 4754036 - DNA, 25 bp, Homo sapien
taggtcaacattgtgagatatcttc

SEQ ID NO: 4754037 - DNA, 25 bp, Homo sapien
aattctcctaatgatagagtgcccc

SEQ ID NO: 4754038 - DNA, 25 bp, Homo sapien
gtagaatcgtttataatccttatgg

SEQ ID NO: 4754039 - DNA, 25 bp, Homo sapien
ttaggtaattctcctaatgatagag

SEQ ID NO: 4754040 - DNA, 25 bp, Homo sapien
gaatcgtttataatccttatggtat

SEQ ID NO: 4754041 - DNA, 25 bp, Homo sapien
taatgggcgatcgaggcgggtggat

SEQ ID NO: 4754042 - DNA, 25 bp, Homo sapien
attgttaataatgggcgatcgaggc

SEQ ID NO: 4754043 - DNA, 25 bp, Homo sapien
gaagaacagccatttgattgttaat

SEQ ID NO: 4754044 - DNA, 25 bp, Homo sapien
ccatttgattgttaataatgggcga

SEQ ID NO: 4754045 - DNA, 25 bp, Homo sapien
cttctggtggtgtgctggccgtctt

SEQ ID NO: 4754046 - DNA, 25 bp, Homo sapien
gaggttgtgaagaagaatctgttcc

SEQ ID NO: 4754047 - DNA, 25 bp, Homo sapien
tggccgtctttgacattccttggct

SEQ ID NO: 4754048 - DNA, 25 bp, Homo sapien
tctgaggttgtgaagaagaatctgt

SEQ ID NO: 4754049 - DNA, 25 bp, Homo sapien
ttcattagaaacaggcagtctcctt

SEQ ID NO: 4754050 - DNA, 25 bp, Homo sapien
gagccatcggttgataccaggagag

SEQ ID NO: 4754051 - DNA, 25 bp, Homo sapien
tcggttgataccaggagagagcctg

SEQ ID NO: 4754052 - DNA, 25 bp, Homo sapien
tgccttcattagaaacaggcagtct

SEQ ID NO: 4754053 - DNA, 25 bp, Homo sapien
agaagtttatgacttgttcggagag

SEQ ID NO: 4754054 - DNA, 25 bp, Homo sapien
agcccgggaagagtactggcagttt

SEQ ID NO: 4754055 - DNA, 25 bp, Homo sapien
acagagcccgggaagagtactggca

SEQ ID NO: 4754056 - DNA, 25 bp, Homo sapien
gacttgttcggagagcagagcacag

SEQ ID NO: 4754057 - DNA, 25 bp, Homo sapien
ctgtgtttttacaagggaagaacat

SEQ ID NO: 4754058 - DNA, 25 bp, Homo sapien
tcctggtgtacaagtgcaacttcag

SEQ ID NO: 4754059 - DNA, 25 bp, Homo sapien
ctgagccaatactctgtgtcgctcc

SEQ ID NO: 4754060 - DNA, 25 bp, Homo sapien
caatactctgtgtcgctcctggtgt

SEQ ID NO: 4754061 - DNA, 25 bp, Homo sapien
caggaatcagcaccgagtgatgcat

SEQ ID NO: 4754062 - DNA, 25 bp, Homo sapien
gtgaacttggggtctgcgaggccct

SEQ ID NO: 4754063 - DNA, 25 bp, Homo sapien
aacagcctgtaatggtgtgaacttg

SEQ ID NO: 4754064 - DNA, 25 bp, Homo sapien
agaacagcctgtaatggtgtgaact

SEQ ID NO: 4754065 - DNA, 25 bp, Homo sapien
gtgtgaacttggggtctgcgaggcc

SEQ ID NO: 4754066 - DNA, 25 bp, Homo sapien
tgaaaggctcccttggcagattggg

SEQ ID NO: 4754067 - DNA, 25 bp, Homo sapien
aggtccaagtgtgcccccctcatcc

SEQ ID NO: 4754068 - DNA, 25 bp, Homo sapien
cagttctgcttgagcctttttgaaa

SEQ ID NO: 4754069 - DNA, 25 bp, Homo sapien
ccctcatccatcaaggccagttctg

SEQ ID NO: 4754070 - DNA, 25 bp, Homo sapien
tccacaggtcctcgcctacagccat

SEQ ID NO: 4754071 - DNA, 25 bp, Homo sapien
ttccacaggtcctcgcctacagcca

SEQ ID NO: 4754072 - DNA, 25 bp, Homo sapien
cttccacaggtcctcgcctacagcc

SEQ ID NO: 4754073 - DNA, 25 bp, Homo sapien
ccagatctggaacaaaatagctgtc

SEQ ID NO: 4754074 - DNA, 25 bp, Homo sapien
gaattcaaccaacagtctaccagat

SEQ ID NO: 4754075 - DNA, 25 bp, Homo sapien
ttcaaggatggcgaaagtcctgcct

SEQ ID NO: 4754076 - DNA, 25 bp, Homo sapien
ctgcctcaaggcttctcggttgaag

SEQ ID NO: 4754077 - DNA, 25 bp, Homo sapien
tgctcagggatcatggagacctcac

SEQ ID NO: 4754078 - DNA, 25 bp, Homo sapien
gttgactgctcagggatcatggaga

SEQ ID NO: 4754079 - DNA, 25 bp, Homo sapien
ggatcatggagacctcacaggactt

SEQ ID NO: 4754080 - DNA, 25 bp, Homo sapien
ccaagggttgactgctcagggatca

SEQ ID NO: 4754081 - DNA, 25 bp, Homo sapien
cacagttaggttggccaagatgaac

SEQ ID NO: 4754082 - DNA, 25 bp, Homo sapien
tctacacccattcggtcaggatggg

SEQ ID NO: 4754083 - DNA, 25 bp, Homo sapien
taatgccctgaagagtccatctgcg

SEQ ID NO: 4754084 - DNA, 25 bp, Homo sapien
gaggtctctgatccctgagcggtca

SEQ ID NO: 4754085 - DNA, 25 bp, Homo sapien
ggaataataaaatggtttctgcata

SEQ ID NO: 4754086 - DNA, 25 bp, Homo sapien
gaaggaataataaaatggtttctgc

SEQ ID NO: 4754087 - DNA, 25 bp, Homo sapien
cttttatgctaaggaaggaataata

SEQ ID NO: 4754088 - DNA, 25 bp, Homo sapien
gaataataaaatggtttctgcatac

SEQ ID NO: 4754089 - DNA, 25 bp, Homo sapien
gcaagaagacgctgtgctttcagat

SEQ ID NO: 4754090 - DNA, 25 bp, Homo sapien
gaagacgctgtgctttcagatccca

SEQ ID NO: 4754091 - DNA, 25 bp, Homo sapien
aagaagacgctgtgctttcagatcc

SEQ ID NO: 4754092 - DNA, 25 bp, Homo sapien
acaagcaagaagacgctgtgctttc

SEQ ID NO: 4754093 - DNA, 25 bp, Homo sapien
gacctggcctgaatagagctgagaa

SEQ ID NO: 4754094 - DNA, 25 bp, Homo sapien
ccaggcaggattacgccaaagggta

SEQ ID NO: 4754095 - DNA, 25 bp, Homo sapien
tttattctagcaaacagcccactga

SEQ ID NO: 4754096 - DNA, 25 bp, Homo sapien
ccttgatacaacagcaagacctggc

SEQ ID NO: 4754097 - DNA, 25 bp, Homo sapien
attgatggagatccggagctcttcc

SEQ ID NO: 4754098 - DNA, 25 bp, Homo sapien
tcattgatggagatccggagctctt

SEQ ID NO: 4754099 - DNA, 25 bp, Homo sapien
tctcattgatggagatccggagctc

SEQ ID NO: 4754100 - DNA, 25 bp, Homo sapien
gggcctgtgtacttcgggatgaagg

SEQ ID NO: 4754101 - DNA, 25 bp, Homo sapien
tggttcttgatgtcgccaaccccgt

SEQ ID NO: 4754102 - DNA, 25 bp, Homo sapien
ccgttcctgaggtttccgaagcgct

SEQ ID NO: 4754103 - DNA, 25 bp, Homo sapien
gctccgcagcagatgcttgaggtca

SEQ ID NO: 4754104 - DNA, 25 bp, Homo sapien
catagatggcgatccagctggttgt

SEQ ID NO: 4754105 - DNA, 25 bp, Homo sapien
atagatgagcacccctagggcccac

SEQ ID NO: 4754106 - DNA, 25 bp, Homo sapien
ctcatagatgagcacccctagggcc

SEQ ID NO: 4754107 - DNA, 25 bp, Homo sapien
agatgagcacccctagggcccacca

SEQ ID NO: 4754108 - DNA, 25 bp, Homo sapien
tcatagatgagcacccctagggccc

SEQ ID NO: 4754109 - DNA, 25 bp, Homo sapien
cggtggatgaggtcgagcgagtgta

SEQ ID NO: 4754110 - DNA, 25 bp, Homo sapien
ggatgaggtcgagcgagtgtaggta

SEQ ID NO: 4754111 - DNA, 25 bp, Homo sapien
ctgctggtcgatgaggagattctcg

SEQ ID NO: 4754112 - DNA, 25 bp, Homo sapien
tggatgaggtcgagcgagtgtaggt

SEQ ID NO: 4754113 - DNA, 25 bp, Homo sapien
cctgggcggcatagaaacaggcatg

SEQ ID NO: 4754114 - DNA, 25 bp, Homo sapien
gacctgggcggcatagaaacaggca

SEQ ID NO: 4754115 - DNA, 25 bp, Homo sapien
gacgacctgggcggcatagaaacag

SEQ ID NO: 4754116 - DNA, 25 bp, Homo sapien
catagaaacaggcatggggctcgct

SEQ ID NO: 4754117 - DNA, 25 bp, Homo sapien
ttcagtatgtgctcgacctgcttca

SEQ ID NO: 4754118 - DNA, 25 bp, Homo sapien
cgctgtaggcgggagaacatctccc

SEQ ID NO: 4754119 - DNA, 25 bp, Homo sapien
aaagtcgatcgcctgcaggatgcgc

SEQ ID NO: 4754120 - DNA, 25 bp, Homo sapien
tcttcatggcgtagtggccgccggt

SEQ ID NO: 4754121 - DNA, 25 bp, Homo sapien
gcgtcctgagccgttcgaactgatc

SEQ ID NO: 4754122 - DNA, 25 bp, Homo sapien
ggctttggctaggaactcgttcacg

SEQ ID NO: 4754123 - DNA, 25 bp, Homo sapien
ctgatccgagctggcggtgttttga

SEQ ID NO: 4754124 - DNA, 25 bp, Homo sapien
tccccatctgtagaggaaatctcct

SEQ ID NO: 4754125 - DNA, 25 bp, Homo sapien
ggacattttgtcctgcggtgcgact

SEQ ID NO: 4754126 - DNA, 25 bp, Homo sapien
tgtgcggctgtctccatgcttgtca

SEQ ID NO: 4754127 - DNA, 25 bp, Homo sapien
ggttctcccggttgcatttacactg

SEQ ID NO: 4754128 - DNA, 25 bp, Homo sapien
gcgcagtaagtatccgcgccgggaa

SEQ ID NO: 4754129 - DNA, 25 bp, Homo sapien
gaaaggacctcttgtcactaggcag

SEQ ID NO: 4754130 - DNA, 25 bp, Homo sapien
ggagtccgctctacttgacctagta

SEQ ID NO: 4754131 - DNA, 25 bp, Homo sapien
gtgtgtcgtctgatcaagtggtcca

SEQ ID NO: 4754132 - DNA, 25 bp, Homo sapien
ggagactgttagagtcaccccacta

SEQ ID NO: 4754133 - DNA, 25 bp, Homo sapien
tgctcactgttctatctccaaatga

SEQ ID NO: 4754134 - DNA, 25 bp, Homo sapien
aatgtcttatgcctatacctgaata

SEQ ID NO: 4754135 - DNA, 25 bp, Homo sapien
tggattgtcggatttcctccctcac

SEQ ID NO: 4754136 - DNA, 25 bp, Homo sapien
agtacatgaagagcagctggtcaac

SEQ ID NO: 4754137 - DNA, 25 bp, Homo sapien
tcggtgacatgatgtactcctttat

SEQ ID NO: 4754138 - DNA, 25 bp, Homo sapien
gaactcggtgacatgatgtactcct

SEQ ID NO: 4754139 - DNA, 25 bp, Homo sapien
cttagaactcggtgacatgatgtac

SEQ ID NO: 4754140 - DNA, 25 bp, Homo sapien
ttacttagaactcggtgacatgatg

SEQ ID NO: 4754141 - DNA, 25 bp, Homo sapien
cttgttggggatgtggaaggcaaga

SEQ ID NO: 4754142 - DNA, 25 bp, Homo sapien
tggaaggcaagactctcagactcca

SEQ ID NO: 4754143 - DNA, 25 bp, Homo sapien
tgtggaaggcaagactctcagactc

SEQ ID NO: 4754144 - DNA, 25 bp, Homo sapien
ggatgtggaaggcaagactctcaga

SEQ ID NO: 4754145 - DNA, 25 bp, Homo sapien
gtctctcaaattcctctacagtttc

SEQ ID NO: 4754146 - DNA, 25 bp, Homo sapien
cgctgctgctggatctagtgaagat

SEQ ID NO: 4754147 - DNA, 25 bp, Homo sapien
tgcgctgctgctggatctagtgaag

SEQ ID NO: 4754148 - DNA, 25 bp, Homo sapien
cctctacagtttctctaatggaaga

SEQ ID NO: 4754149 - DNA, 25 bp, Homo sapien
tgaatgtgctcttaatgtccatctt

SEQ ID NO: 4754150 - DNA, 25 bp, Homo sapien
aagatgaatgtgctcttaatgtcca

SEQ ID NO: 4754151 - DNA, 25 bp, Homo sapien
gatgaatgtgctcttaatgtccatc

SEQ ID NO: 4754152 - DNA, 25 bp, Homo sapien
gaagatgaatgtgctcttaatgtcc

SEQ ID NO: 4754153 - DNA, 25 bp, Homo sapien
tgaattcaatgccgtagacttggcc

SEQ ID NO: 4754154 - DNA, 25 bp, Homo sapien
gaattcaatgccgtagacttggcca

SEQ ID NO: 4754155 - DNA, 25 bp, Homo sapien
gttgaattcaatgccgtagacttgg

SEQ ID NO: 4754156 - DNA, 25 bp, Homo sapien
ttgaattcaatgccgtagacttggc

SEQ ID NO: 4754157 - DNA, 25 bp, Homo sapien
tagtggaaagactaataaatgccca

SEQ ID NO: 4754158 - DNA, 25 bp, Homo sapien
ccatatactttccactaggttgtta

SEQ ID NO: 4754159 - DNA, 25 bp, Homo sapien
ggttgttaccacattcattgactgc

SEQ ID NO: 4754160 - DNA, 25 bp, Homo sapien
gaaagactaataaatgcccatatac

SEQ ID NO: 4754161 - DNA, 25 bp, Homo sapien
gataccagcattcatgtgttgcatt

SEQ ID NO: 4754162 - DNA, 25 bp, Homo sapien
aaataattaattgcgtctgtgtgtg

SEQ ID NO: 4754163 - DNA, 25 bp, Homo sapien
agagcatgagccctttgtccagccc

SEQ ID NO: 4754164 - DNA, 25 bp, Homo sapien
tgttaagctaccaacttgataccag

SEQ ID NO: 4754165 - DNA, 25 bp, Homo sapien
ggtatttccggatgggggcctcaga

SEQ ID NO: 4754166 - DNA, 25 bp, Homo sapien
gggcctcagacccagtgatcccggc

SEQ ID NO: 4754167 - DNA, 25 bp, Homo sapien
ctcagacccagtgatcccggctaag

SEQ ID NO: 4754168 - DNA, 25 bp, Homo sapien
agacccagtgatcccggctaagggt

SEQ ID NO: 4754169 - DNA, 25 bp, Homo sapien
ttgaagggtagaggagctgacatcc

SEQ ID NO: 4754170 - DNA, 25 bp, Homo sapien
tgaagggtagaggagctgacatcct

SEQ ID NO: 4754171 - DNA, 25 bp, Homo sapien
ctgcagagtgcgctgtgtacttcat

SEQ ID NO: 4754172 - DNA, 25 bp, Homo sapien
tgtcccgactttggccagggaatga

SEQ ID NO: 4754173 - DNA, 25 bp, Homo sapien
cagcgcgagtaaacgggttgacatc

SEQ ID NO: 4754174 - DNA, 25 bp, Homo sapien
aatgatttggtgggcgcgaattcgc

SEQ ID NO: 4754175 - DNA, 25 bp, Homo sapien
tggcctggcaccctttcactcaagg

SEQ ID NO: 4754176 - DNA, 25 bp, Homo sapien
caacaggtgtgcctgaacacgcacc

SEQ ID NO: 4754177 - DNA, 25 bp, Homo sapien
gctgagcttctcttttacccgatta

SEQ ID NO: 4754178 - DNA, 25 bp, Homo sapien
cagcgcctcacagggtctctctggg

SEQ ID NO: 4754179 - DNA, 25 bp, Homo sapien
tagctggctcctgtcaatattcccc

SEQ ID NO: 4754180 - DNA, 25 bp, Homo sapien
cagggtaccaggaatctactttctg

SEQ ID NO: 4754181 - DNA, 25 bp, Homo sapien
gatgtttttaatgccccctcagaga

SEQ ID NO: 4754182 - DNA, 25 bp, Homo sapien
tctacccctgaccagggtaccagga

SEQ ID NO: 4754183 - DNA, 25 bp, Homo sapien
agacaagtgctgaggacgaattgag

SEQ ID NO: 4754184 - DNA, 25 bp, Homo sapien
tgctgaggacgaattgaggaatact

SEQ ID NO: 4754185 - DNA, 25 bp, Homo sapien
agcagggcgcatagacaagtgctga

SEQ ID NO: 4754186 - DNA, 25 bp, Homo sapien
agccaaagcagggcgcatagacaag

SEQ ID NO: 4754187 - DNA, 25 bp, Homo sapien
tctcttgggtttcggaaagaggcca

SEQ ID NO: 4754188 - DNA, 25 bp, Homo sapien
tcattttaaaggaatcctcattgcg

SEQ ID NO: 4754189 - DNA, 25 bp, Homo sapien
gtcacaaagtcgagagaaacatccc

SEQ ID NO: 4754190 - DNA, 25 bp, Homo sapien
tcattgcgtctgaggatgtaaaata

SEQ ID NO: 4754191 - DNA, 25 bp, Homo sapien
gcctgaagggctggtcctgtggggt

SEQ ID NO: 4754192 - DNA, 25 bp, Homo sapien
gggcaatgtggggctgttgtctgga

SEQ ID NO: 4754193 - DNA, 25 bp, Homo sapien
ctgaagggctggtcctgtggggtgc

SEQ ID NO: 4754194 - DNA, 25 bp, Homo sapien
cctgaagggctggtcctgtggggtg

SEQ ID NO: 4754195 - DNA, 25 bp, Homo sapien
ctgtgactgcccgagtgaagctgcc

SEQ ID NO: 4754196 - DNA, 25 bp, Homo sapien
tagagtgttttgcacagacgccaca

SEQ ID NO: 4754197 - DNA, 25 bp, Homo sapien
tggtattcgaaaggcacatgcaggc

SEQ ID NO: 4754198 - DNA, 25 bp, Homo sapien
aagagtatgtccagaagtggtgaga

SEQ ID NO: 4754199 - DNA, 25 bp, Homo sapien
ccaaagtttaggtggcaattcactt

SEQ ID NO: 4754200 - DNA, 25 bp, Homo sapien
tgaaaggcgaattcttataagatct

SEQ ID NO: 4754201 - DNA, 25 bp, Homo sapien
ctggtgataccaaagtttaggtggc

SEQ ID NO: 4754202 - DNA, 25 bp, Homo sapien
tgtttctcagagtgaccctcaggtg

SEQ ID NO: 4754203 - DNA, 25 bp, Homo sapien
ctgtcatctccctgtgagtgggatt

SEQ ID NO: 4754204 - DNA, 25 bp, Homo sapien
atctccctgtgagtgggattggcac

SEQ ID NO: 4754205 - DNA, 25 bp, Homo sapien
tgtcatctccctgtgagtgggattg

SEQ ID NO: 4754206 - DNA, 25 bp, Homo sapien
tcatctccctgtgagtgggattggc

SEQ ID NO: 4754207 - DNA, 25 bp, Homo sapien
ctgaattaatggactgaattgatag

SEQ ID NO: 4754208 - DNA, 25 bp, Homo sapien
acgtcccaaacatgagaagacagat

SEQ ID NO: 4754209 - DNA, 25 bp, Homo sapien
aacatgagaagacagatacctgctc

SEQ ID NO: 4754210 - DNA, 25 bp, Homo sapien
aagacagatacctgctcagactcca

SEQ ID NO: 4754211 - DNA, 25 bp, Homo sapien
aaacgtcccaaacatgagaagacag

SEQ ID NO: 4754212 - DNA, 25 bp, Homo sapien
tttagttgctgcgagagcaaaaatc

SEQ ID NO: 4754213 - DNA, 25 bp, Homo sapien
tcgtcttgcattctgttaaaagaag

SEQ ID NO: 4754214 - DNA, 25 bp, Homo sapien
gagcaaaaatcgtcttgcattctgt

SEQ ID NO: 4754215 - DNA, 25 bp, Homo sapien
agttgctgcgagagcaaaaatcgtc

SEQ ID NO: 4754216 - DNA, 25 bp, Homo sapien
tctatccccgaaaagagagtgtggc

SEQ ID NO: 4754217 - DNA, 25 bp, Homo sapien
tgaggacaaccatgggcaaactgct

SEQ ID NO: 4754218 - DNA, 25 bp, Homo sapien
tccaggagtggatcagggttacgct

SEQ ID NO: 4754219 - DNA, 25 bp, Homo sapien
tataagtcacctaggagtctgcatg

SEQ ID NO: 4754220 - DNA, 25 bp, Homo sapien
cctctgtgctggaagatagcttgaa

SEQ ID NO: 4754221 - DNA, 25 bp, Homo sapien
aacagtgtcgaagctatttaggatc

SEQ ID NO: 4754222 - DNA, 25 bp, Homo sapien
tactagaaacgtagatgccaacgtg

SEQ ID NO: 4754223 - DNA, 25 bp, Homo sapien
ggagcatctcaattcacaggtctat

SEQ ID NO: 4754224 - DNA, 25 bp, Homo sapien
ttagatgccgctctcctggaggtaa

SEQ ID NO: 4754225 - DNA, 25 bp, Homo sapien
gggtgattattgtgggaggaagcct

SEQ ID NO: 4754226 - DNA, 25 bp, Homo sapien
cctgcaggtgaaccgggtggttatt

SEQ ID NO: 4754227 - DNA, 25 bp, Homo sapien
cacaggggccattgagtggggtgat

SEQ ID NO: 4754228 - DNA, 25 bp, Homo sapien
tggagccaggagaggagatgaggct

SEQ ID NO: 4754229 - DNA, 25 bp, Homo sapien
ctgaggaagatgggtggagccagga

SEQ ID NO: 4754230 - DNA, 25 bp, Homo sapien
gaggaagatgggtggagccaggaga

SEQ ID NO: 4754231 - DNA, 25 bp, Homo sapien
gagccaggagaggagatgaggctac

SEQ ID NO: 4754232 - DNA, 25 bp, Homo sapien
ggcttaatctacatcacgtctctga

SEQ ID NO: 4754233 - DNA, 25 bp, Homo sapien
tggtctctgttctggcaactcaagt

SEQ ID NO: 4754234 - DNA, 25 bp, Homo sapien
gaatgtgggattgtcccctcccaag

SEQ ID NO: 4754235 - DNA, 25 bp, Homo sapien
cagagatgagtcctgtccttagtcc

SEQ ID NO: 4754236 - DNA, 25 bp, Homo sapien
tctggagaggcatctactggacttg

SEQ ID NO: 4754237 - DNA, 25 bp, Homo sapien
ggagtccagaagcataacacttctg

SEQ ID NO: 4754238 - DNA, 25 bp, Homo sapien
ccagaggcgtggacttagttactcc

SEQ ID NO: 4754239 - DNA, 25 bp, Homo sapien
tagttactccaaaggagtccagaag

SEQ ID NO: 4754240 - DNA, 25 bp, Homo sapien
ctctttattggagttgttggaaatg

SEQ ID NO: 4754241 - DNA, 25 bp, Homo sapien
tatttaatacgaacatcttataacc

SEQ ID NO: 4754242 - DNA, 25 bp, Homo sapien
ctcggaattcgggtaggcagttgtt

SEQ ID NO: 4754243 - DNA, 25 bp, Homo sapien
tattggagttgttggaaatgtgcca

SEQ ID NO: 4754244 - DNA, 25 bp, Homo sapien
agcgcccggagctcactccaggtct

SEQ ID NO: 4754245 - DNA, 25 bp, Homo sapien
gtgcacgccgcggagcgaaccatcg

SEQ ID NO: 4754246 - DNA, 25 bp, Homo sapien
ggaaacaccgcggacagtcgggcca

SEQ ID NO: 4754247 - DNA, 25 bp, Homo sapien
ggtctccaaacttgcagcacttccc

SEQ ID NO: 4754248 - DNA, 25 bp, Homo sapien
tggtgcccaggaggagtaggagcag

SEQ ID NO: 4754249 - DNA, 25 bp, Homo sapien
gggtccggagctgcgcgcctacgcg

SEQ ID NO: 4754250 - DNA, 25 bp, Homo sapien
tcagagcactgtccggtggtgccca

SEQ ID NO: 4754251 - DNA, 25 bp, Homo sapien
gcagaagcagaagcggggtccggag

SEQ ID NO: 4754252 - DNA, 25 bp, Homo sapien
gggctcctggaacctttactctgaa

SEQ ID NO: 4754253 - DNA, 25 bp, Homo sapien
gaggcatctcgtgtctgttgtgtcg

SEQ ID NO: 4754254 - DNA, 25 bp, Homo sapien
cactgtcttgaacccggtgtcctgg

SEQ ID NO: 4754255 - DNA, 25 bp, Homo sapien
cgtccgggctgatgactcgtggcct

SEQ ID NO: 4754256 - DNA, 25 bp, Homo sapien
aagttcccagcggagagtcatccca

SEQ ID NO: 4754257 - DNA, 25 bp, Homo sapien
ccatgatagaaactgccttgcgctt

SEQ ID NO: 4754258 - DNA, 25 bp, Homo sapien
agtgctcccgcgcttagtaatggaa

SEQ ID NO: 4754259 - DNA, 25 bp, Homo sapien
taatcagggatttctaccacagggt

SEQ ID NO: 4754260 - DNA, 25 bp, Homo sapien
tgctgacggtccttttgggaaaaca

SEQ ID NO: 4754261 - DNA, 25 bp, Homo sapien
ttgccagcgtaattcagaaagagat

SEQ ID NO: 4754262 - DNA, 25 bp, Homo sapien
ccagcgtaattcagaaagagatgta

SEQ ID NO: 4754263 - DNA, 25 bp, Homo sapien
tctgtgctgggtgtgctgacggtcc

SEQ ID NO: 4754264 - DNA, 25 bp, Homo sapien
tgctttactaaagcaccggtggctt

SEQ ID NO: 4754265 - DNA, 25 bp, Homo sapien
ggtactggagcttcctcattgtggg

SEQ ID NO: 4754266 - DNA, 25 bp, Homo sapien
gatcgcttgaagtgagaaattcgta

SEQ ID NO: 4754267 - DNA, 25 bp, Homo sapien
gaatccgatgagtgccatttagaaa

SEQ ID NO: 4754268 - DNA, 25 bp, Homo sapien
gagggaatgtatgatgccgatgcac

SEQ ID NO: 4754269 - DNA, 25 bp, Homo sapien
ggaatgtatgatgccgatgcacact

SEQ ID NO: 4754270 - DNA, 25 bp, Homo sapien
tctgtgtcgggattcctgagactga

SEQ ID NO: 4754271 - DNA, 25 bp, Homo sapien
gaaactgttagactttactctgcaa

SEQ ID NO: 4754272 - DNA, 25 bp, Homo sapien
catacattgtagtgtgagaggcaga

SEQ ID NO: 4754273 - DNA, 25 bp, Homo sapien
tccgagttggagagtgtctgcttcc

SEQ ID NO: 4754274 - DNA, 25 bp, Homo sapien
aatggctacccataacagtgacggc

SEQ ID NO: 4754275 - DNA, 25 bp, Homo sapien
tcttagaactgggtgactgacagct

SEQ ID NO: 4754276 - DNA, 25 bp, Homo sapien
gtcaaacacagaatggcccagaata

SEQ ID NO: 4754277 - DNA, 25 bp, Homo sapien
tatagagagcctggtataccttgac

SEQ ID NO: 4754278 - DNA, 25 bp, Homo sapien
ggactttctgtcttaagcgtgtgca

SEQ ID NO: 4754279 - DNA, 25 bp, Homo sapien
ggtataccttgaccacgccttcaag

SEQ ID NO: 4754280 - DNA, 25 bp, Homo sapien
ccactaaacgttggactgacttgat

SEQ ID NO: 4754281 - DNA, 25 bp, Homo sapien
tctgagtcatcttggtaaccccaga

SEQ ID NO: 4754282 - DNA, 25 bp, Homo sapien
acacatccactaaacgttggactga

SEQ ID NO: 4754283 - DNA, 25 bp, Homo sapien
ccctggtctgagtcatcttggtaac

SEQ ID NO: 4754284 - DNA, 25 bp, Homo sapien
atggagctggaaacatttgtgcgtt

SEQ ID NO: 4754285 - DNA, 25 bp, Homo sapien
aacatttgtgcgtttccttctggtg

SEQ ID NO: 4754286 - DNA, 25 bp, Homo sapien
gagctggaaacatttgtgcgtttcc

SEQ ID NO: 4754287 - DNA, 25 bp, Homo sapien
ggaaacatttgtgcgtttccttctg

SEQ ID NO: 4754288 - DNA, 25 bp, Homo sapien
tcggccagggctaacaatggatgtc

SEQ ID NO: 4754289 - DNA, 25 bp, Homo sapien
tctccagacttttagtcggccaggg

SEQ ID NO: 4754290 - DNA, 25 bp, Homo sapien
ggacccgtggtgttgcttcgtgtat

SEQ ID NO: 4754291 - DNA, 25 bp, Homo sapien
caaagggcttcactgtttggagact

SEQ ID NO: 4754292 - DNA, 25 bp, Homo sapien
tgtgagccccttgcaggtaacgacc

SEQ ID NO: 4754293 - DNA, 25 bp, Homo sapien
agcacccgtgtgagccccttgcagg

SEQ ID NO: 4754294 - DNA, 25 bp, Homo sapien
ccgtgtgagccccttgcaggtaacg

SEQ ID NO: 4754295 - DNA, 25 bp, Homo sapien
gagccccttgcaggtaacgacccat

SEQ ID NO: 4754296 - DNA, 25 bp, Homo sapien
ggtactaatgtgtccctcttttctg

SEQ ID NO: 4754297 - DNA, 25 bp, Homo sapien
ccaggctcattgctaggtggtacta

SEQ ID NO: 4754298 - DNA, 25 bp, Homo sapien
ttttctgtgggaaccatcatctgat

SEQ ID NO: 4754299 - DNA, 25 bp, Homo sapien
tgggaaccatcatctgatggtgccc

SEQ ID NO: 4754300 - DNA, 25 bp, Homo sapien
ctgagttgtcagagtgattgaatcc

SEQ ID NO: 4754301 - DNA, 25 bp, Homo sapien
agtggtgtggaaatagctatcatgc

SEQ ID NO: 4754302 - DNA, 25 bp, Homo sapien
tatcatgcttgtgaagatgttctga

SEQ ID NO: 4754303 - DNA, 25 bp, Homo sapien
gctgtgttgactggacccaggccag

SEQ ID NO: 4754304 - DNA, 25 bp, Homo sapien
cagaagtttccggagtggctacagc

SEQ ID NO: 4754305 - DNA, 25 bp, Homo sapien
tggatcaggatgaccgggcttttga

SEQ ID NO: 4754306 - DNA, 25 bp, Homo sapien
tccaggtggccgcacttcaggccag

SEQ ID NO: 4754307 - DNA, 25 bp, Homo sapien
ttttgaggtgatggacgagtttgat

SEQ ID NO: 4754308 - DNA, 25 bp, Homo sapien
ttggccccgttgcagtatttcagat

SEQ ID NO: 4754309 - DNA, 25 bp, Homo sapien
tagaagactatgtacctgcacgaac

SEQ ID NO: 4754310 - DNA, 25 bp, Homo sapien
cagtgaaattctagaccctccttgg

SEQ ID NO: 4754311 - DNA, 25 bp, Homo sapien
ccttggccctggtcaggatctagaa

SEQ ID NO: 4754312 - DNA, 25 bp, Homo sapien
ctactaaaaggcctagcatggtggt

SEQ ID NO: 4754313 - DNA, 25 bp, Homo sapien
ggctagtgattgagccaggccaaac

SEQ ID NO: 4754314 - DNA, 25 bp, Homo sapien
tcctgtgagactataaggctagtga

SEQ ID NO: 4754315 - DNA, 25 bp, Homo sapien
tgtccagcatggtggataacacttg

SEQ ID NO: 4754316 - DNA, 25 bp, Homo sapien
gcactgtgtcatcttttcaaggcat

SEQ ID NO: 4754317 - DNA, 25 bp, Homo sapien
gaagctttaggcagagccataatgg

SEQ ID NO: 4754318 - DNA, 25 bp, Homo sapien
taaacccaagtgctgcacaaaagca

SEQ ID NO: 4754319 - DNA, 25 bp, Homo sapien
tgctcaatagcttgaagcccaagaa

SEQ ID NO: 4754320 - DNA, 25 bp, Homo sapien
cgcaataagaagtggaatgtggttt

SEQ ID NO: 4754321 - DNA, 25 bp, Homo sapien
tggtttgattgcttctgcactgtcc

SEQ ID NO: 4754322 - DNA, 25 bp, Homo sapien
gagtccaggttgctctgtctttctg

SEQ ID NO: 4754323 - DNA, 25 bp, Homo sapien
tcggatgccgttccaccttcgagag

SEQ ID NO: 4754324 - DNA, 25 bp, Homo sapien
tctgaggttcaggggagagaggaat

SEQ ID NO: 4754325 - DNA, 25 bp, Homo sapien
gggagagaggaatggagagaacctg

SEQ ID NO: 4754326 - DNA, 25 bp, Homo sapien
agagaggaatggagagaacctggac

SEQ ID NO: 4754327 - DNA, 25 bp, Homo sapien
ctctgaggttcaggggagagaggaa

SEQ ID NO: 4754328 - DNA, 25 bp, Homo sapien
tcgagtcccatgcaacgtgcagcac

SEQ ID NO: 4754329 - DNA, 25 bp, Homo sapien
agcacccacacggccttaaggagag

SEQ ID NO: 4754330 - DNA, 25 bp, Homo sapien
tctttccccttcgagtcccatgcaa

SEQ ID NO: 4754331 - DNA, 25 bp, Homo sapien
cacacggccttaaggagagccagca

SEQ ID NO: 4754332 - DNA, 25 bp, Homo sapien
aactctgtagctccctgcgtgggtc

SEQ ID NO: 4754333 - DNA, 25 bp, Homo sapien
agctccctgcgtgggtctccggctt

SEQ ID NO: 4754334 - DNA, 25 bp, Homo sapien
tcctctggaagacgggctctgtcac

SEQ ID NO: 4754335 - DNA, 25 bp, Homo sapien
ggaactctgtagctccctgcgtggg

SEQ ID NO: 4754336 - DNA, 25 bp, Homo sapien
cacgtggcctctaccatccagagtt

SEQ ID NO: 4754337 - DNA, 25 bp, Homo sapien
ggtatagccacgtggcctctaccat

SEQ ID NO: 4754338 - DNA, 25 bp, Homo sapien
caatcaggtatagccacgtggcctc

SEQ ID NO: 4754339 - DNA, 25 bp, Homo sapien
ctttggcaatcaggtatagccacgt

SEQ ID NO: 4754340 - DNA, 25 bp, Homo sapien
ttatgattctgcaagtctctgtcca

SEQ ID NO: 4754341 - DNA, 25 bp, Homo sapien
ctgtggcagcagaagtatacccttg

SEQ ID NO: 4754342 - DNA, 25 bp, Homo sapien
tatccctgcattgctacagtgccac

SEQ ID NO: 4754343 - DNA, 25 bp, Homo sapien
tggttatccagacagtatccctgca

SEQ ID NO: 4754344 - DNA, 25 bp, Homo sapien
gacccttgagacttgtatgtgcctt

SEQ ID NO: 4754345 - DNA, 25 bp, Homo sapien
ccacaggcagcgcaaggattgcaaa

SEQ ID NO: 4754346 - DNA, 25 bp, Homo sapien
gagccctgtgaagaggacccttgag

SEQ ID NO: 4754347 - DNA, 25 bp, Homo sapien
tcaacatgttgacattccacaggca

SEQ ID NO: 4754348 - DNA, 25 bp, Homo sapien
tgccagggatgacttgcgtatatac

SEQ ID NO: 4754349 - DNA, 25 bp, Homo sapien
cagtaaatcaatgtggtgccaggga

SEQ ID NO: 4754350 - DNA, 25 bp, Homo sapien
ggtttgactctgaacttctcagcag

SEQ ID NO: 4754351 - DNA, 25 bp, Homo sapien
caacgtttgccatggagtcctgtgc

SEQ ID NO: 4754352 - DNA, 25 bp, Homo sapien
tttgaagggcctgatcctacatcgc

SEQ ID NO: 4754353 - DNA, 25 bp, Homo sapien
gtagatcagtagtcattaagaaaag

SEQ ID NO: 4754354 - DNA, 25 bp, Homo sapien
tctgccctgcacacttgctgttttg

SEQ ID NO: 4754355 - DNA, 25 bp, Homo sapien
taatcagcgttttgtagatcagtag

SEQ ID NO: 4754356 - DNA, 25 bp, Homo sapien
atcacgagacagattgtaagaatta

SEQ ID NO: 4754357 - DNA, 25 bp, Homo sapien
ttagcaaaatgtgacacgaagacac

SEQ ID NO: 4754358 - DNA, 25 bp, Homo sapien
ccccaaaaaatcacgagacagattg

SEQ ID NO: 4754359 - DNA, 25 bp, Homo sapien
cgaagacacaaagtgactacatgct

SEQ ID NO: 4754360 - DNA, 25 bp, Homo sapien
cagagcattttcttcattcacccct

SEQ ID NO: 4754361 - DNA, 25 bp, Homo sapien
ttcagagcattttcttcattcaccc

SEQ ID NO: 4754362 - DNA, 25 bp, Homo sapien
gagcattttcttcattcaccccttc

SEQ ID NO: 4754363 - DNA, 25 bp, Homo sapien
catttcagagcattttcttcattca

SEQ ID NO: 4754364 - DNA, 25 bp, Homo sapien
gctgattccaatagaggctcagaat

SEQ ID NO: 4754365 - DNA, 25 bp, Homo sapien
tgttgaaaccaagctgatatgtggt

SEQ ID NO: 4754366 - DNA, 25 bp, Homo sapien
tgtggttgctagctgattccaatag

SEQ ID NO: 4754367 - DNA, 25 bp, Homo sapien
ccaagctgatatgtggttgctagct

SEQ ID NO: 4754368 - DNA, 25 bp, Homo sapien
caacctctgaccaagagtttcaaca

SEQ ID NO: 4754369 - DNA, 25 bp, Homo sapien
gtcagctttcatccaacctctgacc

SEQ ID NO: 4754370 - DNA, 25 bp, Homo sapien
caggtttgctatagtcgccactcca

SEQ ID NO: 4754371 - DNA, 25 bp, Homo sapien
ttcaacatgatgtttctgggcaaga

SEQ ID NO: 4754372 - DNA, 25 bp, Homo sapien
tcaggggtctcttcagtattgtccc

SEQ ID NO: 4754373 - DNA, 25 bp, Homo sapien
tcccaatccagaccctacaagaagg

SEQ ID NO: 4754374 - DNA, 25 bp, Homo sapien
aatccagaccctacaagaaggttct

SEQ ID NO: 4754375 - DNA, 25 bp, Homo sapien
agtattgtcccttcatggtcaccag

SEQ ID NO: 4754376 - DNA, 25 bp, Homo sapien
attacagttgaatccataaagtgaa

SEQ ID NO: 4754377 - DNA, 25 bp, Homo sapien
agaattacagttgaatccataaagt

SEQ ID NO: 4754378 - DNA, 25 bp, Homo sapien
gaattacagttgaatccataaagtg

SEQ ID NO: 4754379 - DNA, 25 bp, Homo sapien
aattacagttgaatccataaagtga

SEQ ID NO: 4754380 - DNA, 25 bp, Homo sapien
ttttttctctttctctgagtcttac

SEQ ID NO: 4754381 - DNA, 25 bp, Homo sapien
cttctctctctcaatctttttttct

SEQ ID NO: 4754382 - DNA, 25 bp, Homo sapien
ctttttttctctttctctgagtctt

SEQ ID NO: 4754383 - DNA, 25 bp, Homo sapien
tctctctctcaatctttttttctct

SEQ ID NO: 4754384 - DNA, 25 bp, Homo sapien
aaggactctgattggccagctaggg

SEQ ID NO: 4754385 - DNA, 25 bp, Homo sapien
tgaagaattcgaagcaaggactctg

SEQ ID NO: 4754386 - DNA, 25 bp, Homo sapien
tctccatacagagtggattcctcca

SEQ ID NO: 4754387 - DNA, 25 bp, Homo sapien
gactgcaaggtctcactaccagaga

SEQ ID NO: 4754388 - DNA, 25 bp, Homo sapien
ctgctgcatggtggcgctcagcttc

SEQ ID NO: 4754389 - DNA, 25 bp, Homo sapien
ccggctcctcggtgagtaccgcgcg

SEQ ID NO: 4754390 - DNA, 25 bp, Homo sapien
agctccccgcaggtgaagaactcgt

SEQ ID NO: 4754391 - DNA, 25 bp, Homo sapien
aactcgtgcccgttctgggccggct

SEQ ID NO: 4754392 - DNA, 25 bp, Homo sapien
cctgaatggtaagaacggcttttgc

SEQ ID NO: 4754393 - DNA, 25 bp, Homo sapien
aatctgaaagtctagcaatgctgct

SEQ ID NO: 4754394 - DNA, 25 bp, Homo sapien
cagtatctatggacaccgggtggcc

SEQ ID NO: 4754395 - DNA, 25 bp, Homo sapien
aagagtgcccaacttcagagaaaag

SEQ ID NO: 4754396 - DNA, 25 bp, Homo sapien
tgactaagtccagccaaatggtggg

SEQ ID NO: 4754397 - DNA, 25 bp, Homo sapien
ggaattagacccgttatgccaccta

SEQ ID NO: 4754398 - DNA, 25 bp, Homo sapien
taggttccttgagactcgcctgaaa

SEQ ID NO: 4754399 - DNA, 25 bp, Homo sapien
gatttgtgcctcatgaaaaaacgcc

SEQ ID NO: 4754400 - DNA, 25 bp, Homo sapien
gctgaaatcagtttactattgtgaa

SEQ ID NO: 4754401 - DNA, 25 bp, Homo sapien
aatgcacttagatatcggtcaagcc

SEQ ID NO: 4754402 - DNA, 25 bp, Homo sapien
catagctagtttaggattcttaaaa

SEQ ID NO: 4754403 - DNA, 25 bp, Homo sapien
aatcataatctattgtcttctcaaa

SEQ ID NO: 4754404 - DNA, 25 bp, Homo sapien
cgtaaagagacagacattggtgaac

SEQ ID NO: 4754405 - DNA, 25 bp, Homo sapien
tctttggcaaggttctactttcacg

SEQ ID NO: 4754406 - DNA, 25 bp, Homo sapien
ttaagtcactgatctaaattcatga

SEQ ID NO: 4754407 - DNA, 25 bp, Homo sapien
gatcatcctttgagtccatgattct

SEQ ID NO: 4754408 - DNA, 25 bp, Homo sapien
tgtagctagagtatacataggagag

SEQ ID NO: 4754409 - DNA, 25 bp, Homo sapien
ggtgtagctagagtatacataggag

SEQ ID NO: 4754410 - DNA, 25 bp, Homo sapien
tcagggtgtagctagagtatacata

SEQ ID NO: 4754411 - DNA, 25 bp, Homo sapien
cagggtgtagctagagtatacatag

SEQ ID NO: 4754412 - DNA, 25 bp, Homo sapien
ttcatcttgcgctggatggaaagaa

SEQ ID NO: 4754413 - DNA, 25 bp, Homo sapien
caagtttcatcttgcgctggatgga

SEQ ID NO: 4754414 - DNA, 25 bp, Homo sapien
gttcattcagggcaagtttcatctt

SEQ ID NO: 4754415 - DNA, 25 bp, Homo sapien
ctgttcattcagggcaagtttcatc

SEQ ID NO: 4754416 - DNA, 25 bp, Homo sapien
tatcaaacccaactgtgttgtaggg

SEQ ID NO: 4754417 - DNA, 25 bp, Homo sapien
gggaaacagagcagattgaggccat

SEQ ID NO: 4754418 - DNA, 25 bp, Homo sapien
caggcttgctccctgcctagagtaa

SEQ ID NO: 4754419 - DNA, 25 bp, Homo sapien
agcagtagacccacacgaaaaaagg

SEQ ID NO: 4754420 - DNA, 25 bp, Homo sapien
ctcgtgatatgaggaacgccctgtg

SEQ ID NO: 4754421 - DNA, 25 bp, Homo sapien
agggaaggacttgctgttggccatc

SEQ ID NO: 4754422 - DNA, 25 bp, Homo sapien
gaggaacgccctgtgagtacagaca

SEQ ID NO: 4754423 - DNA, 25 bp, Homo sapien
acagggaaggacttgctgttggcca

SEQ ID NO: 4754424 - DNA, 25 bp, Homo sapien
caaggggcatagcagatctggttcc

SEQ ID NO: 4754425 - DNA, 25 bp, Homo sapien
tcccaaggggcatagcagatctggt

SEQ ID NO: 4754426 - DNA, 25 bp, Homo sapien
cttattcccaaggggcatagcagat

SEQ ID NO: 4754427 - DNA, 25 bp, Homo sapien
cagatctggttcctgaccagttcac

SEQ ID NO: 4754428 - DNA, 25 bp, Homo sapien
tcatgtgtcacatgatccactgact

SEQ ID NO: 4754429 - DNA, 25 bp, Homo sapien
cttattggaccaataaatctcatgt

SEQ ID NO: 4754430 - DNA, 25 bp, Homo sapien
tattggaccaataaatctcatgtgt

SEQ ID NO: 4754431 - DNA, 25 bp, Homo sapien
aaatctcatgtgtcacatgatccac

SEQ ID NO: 4754432 - DNA, 25 bp, Homo sapien
cagcagaagcaatggtggtagccat

SEQ ID NO: 4754433 - DNA, 25 bp, Homo sapien
ccagcagaagcaatggtggtagcca

SEQ ID NO: 4754434 - DNA, 25 bp, Homo sapien
agtcccaacacttgctgtcttcttt

SEQ ID NO: 4754435 - DNA, 25 bp, Homo sapien
ataatggaattgaagtcccaacact

SEQ ID NO: 4754436 - DNA, 25 bp, Homo sapien
tgtgccccaggcaggttaaaacttc

SEQ ID NO: 4754437 - DNA, 25 bp, Homo sapien
ggtgtcccttagctactccagatgt

SEQ ID NO: 4754438 - DNA, 25 bp, Homo sapien
aaagagtgatcagttgacggttccg

SEQ ID NO: 4754439 - DNA, 25 bp, Homo sapien
tacatgaaccacagaccctcttggg

SEQ ID NO: 4754440 - DNA, 25 bp, Homo sapien
tccctcttggaaggacagatctgcc

SEQ ID NO: 4754441 - DNA, 25 bp, Homo sapien
gagtaaatgcacaggtcggtccagg

SEQ ID NO: 4754442 - DNA, 25 bp, Homo sapien
tatgtgtccacaagcctcaagcctt

SEQ ID NO: 4754443 - DNA, 25 bp, Homo sapien
tggcaggaaataaggcgattaaccc

SEQ ID NO: 4754444 - DNA, 25 bp, Homo sapien
aggaatgagaaattgccagcgacaa

SEQ ID NO: 4754445 - DNA, 25 bp, Homo sapien
tgaggctacctgtgagcttaggccc

SEQ ID NO: 4754446 - DNA, 25 bp, Homo sapien
tgggttcccactctagacggcgtct

SEQ ID NO: 4754447 - DNA, 25 bp, Homo sapien
gacggcgtctcccagtttcatttgt

SEQ ID NO: 4754448 - DNA, 25 bp, Homo sapien
cacagcgagacccacggtgtgaaga

SEQ ID NO: 4754449 - DNA, 25 bp, Homo sapien
tttatttgatggctagacttctttc

SEQ ID NO: 4754450 - DNA, 25 bp, Homo sapien
ttttcggggacagcataatttagag

SEQ ID NO: 4754451 - DNA, 25 bp, Homo sapien
ggctagacttctttcaatagtaaac

SEQ ID NO: 4754452 - DNA, 25 bp, Homo sapien
taatttagagactagaaattgcggg

SEQ ID NO: 4754453 - DNA, 25 bp, Homo sapien
tatagatcagccgagagaacacggg

SEQ ID NO: 4754454 - DNA, 25 bp, Homo sapien
gggagggaatctagaccatgccagg

SEQ ID NO: 4754455 - DNA, 25 bp, Homo sapien
gaagcggtcgttttattccatgccc

SEQ ID NO: 4754456 - DNA, 25 bp, Homo sapien
tattgaaatcgttgctgtattcccc

SEQ ID NO: 4754457 - DNA, 25 bp, Homo sapien
ccgaggctcctagaatcatcgtggc

SEQ ID NO: 4754458 - DNA, 25 bp, Homo sapien
gctgtagcgggtcacacattgggct

SEQ ID NO: 4754459 - DNA, 25 bp, Homo sapien
cagggcgagtcccagtagcctatgg

SEQ ID NO: 4754460 - DNA, 25 bp, Homo sapien
tcatcgtggctaacagccatggaac

SEQ ID NO: 4754461 - DNA, 25 bp, Homo sapien
atccaccttccccaagctccctgca

SEQ ID NO: 4754462 - DNA, 25 bp, Homo sapien
tggctcccgcagctccatccacctt

SEQ ID NO: 4754463 - DNA, 25 bp, Homo sapien
accttccccaagctccctgcaggtt

SEQ ID NO: 4754464 - DNA, 25 bp, Homo sapien
ctcccgcagctccatccaccttccc

SEQ ID NO: 4754465 - DNA, 25 bp, Homo sapien
tccgcgttgttgtctgtcagcagct

SEQ ID NO: 4754466 - DNA, 25 bp, Homo sapien
gatgaggtccgcgttgttgtctgtc

SEQ ID NO: 4754467 - DNA, 25 bp, Homo sapien
gaagatgaggtccgcgttgttgtct

SEQ ID NO: 4754468 - DNA, 25 bp, Homo sapien
gaggtccgcgttgttgtctgtcagc

SEQ ID NO: 4754469 - DNA, 25 bp, Homo sapien
caagagcatcactgtgaaggctggg

SEQ ID NO: 4754470 - DNA, 25 bp, Homo sapien
aatattgacctcgtcaagggaggcg

SEQ ID NO: 4754471 - DNA, 25 bp, Homo sapien
ttatctacatgtggccgagggaccg

SEQ ID NO: 4754472 - DNA, 25 bp, Homo sapien
tctgggaggcaagggaatattgacc

SEQ ID NO: 4754473 - DNA, 25 bp, Homo sapien
tacattcagtgggtgtgcggtgtcc

SEQ ID NO: 4754474 - DNA, 25 bp, Homo sapien
gcagcaactcttatacagacattag

SEQ ID NO: 4754475 - DNA, 25 bp, Homo sapien
aactggatgactgtggccacgggac

SEQ ID NO: 4754476 - DNA, 25 bp, Homo sapien
cagtgaccagactgtcaaggaagta

SEQ ID NO: 4754477 - DNA, 25 bp, Homo sapien
tgtgctcaagtcaacctaggccagg

SEQ ID NO: 4754478 - DNA, 25 bp, Homo sapien
tcaagggagtgcatacgaaacttcc

SEQ ID NO: 4754479 - DNA, 25 bp, Homo sapien
tatgaggcacctgatgaaaacacgg

SEQ ID NO: 4754480 - DNA, 25 bp, Homo sapien
tggtaacggctacaccactgggtcg

SEQ ID NO: 4754481 - DNA, 25 bp, Homo sapien
cgtcagcagcctgtacatcgcggct

SEQ ID NO: 4754482 - DNA, 25 bp, Homo sapien
tgtacatcgcggctggcattgtctt

SEQ ID NO: 4754483 - DNA, 25 bp, Homo sapien
cagatgtaaacaggctgctcctggg

SEQ ID NO: 4754484 - DNA, 25 bp, Homo sapien
cctgggccgtcagcagcctgtacat

SEQ ID NO: 4754485 - DNA, 25 bp, Homo sapien
tattccccctcgcatgaggctgcag

SEQ ID NO: 4754486 - DNA, 25 bp, Homo sapien
agaatgtggacgatcttctcgtggg

SEQ ID NO: 4754487 - DNA, 25 bp, Homo sapien
gccacgacgctctgtccattgattt

SEQ ID NO: 4754488 - DNA, 25 bp, Homo sapien
tgatttcaatgatccggtgccccac

SEQ ID NO: 4754489 - DNA, 25 bp, Homo sapien
tccagagagggagctgagcctcctt

SEQ ID NO: 4754490 - DNA, 25 bp, Homo sapien
gggtgcatcccaaactctcaagctg

SEQ ID NO: 4754491 - DNA, 25 bp, Homo sapien
aaggcagtcctgcatgtcacagaaa

SEQ ID NO: 4754492 - DNA, 25 bp, Homo sapien
tcaaataccaaactgttcgagtccc

SEQ ID NO: 4754493 - DNA, 25 bp, Homo sapien
ttgtcaacattgtggaaaagggtgt

SEQ ID NO: 4754494 - DNA, 25 bp, Homo sapien
tttttatttgtcaacattgtggaaa

SEQ ID NO: 4754495 - DNA, 25 bp, Homo sapien
tttatttgtcaacattgtggaaaag

SEQ ID NO: 4754496 - DNA, 25 bp, Homo sapien
tatttgtcaacattgtggaaaaggg

SEQ ID NO: 4754497 - DNA, 25 bp, Homo sapien
cattctggacgctgaaaccgagctg

SEQ ID NO: 4754498 - DNA, 25 bp, Homo sapien
tggtcaccggaggacatctcacgat

SEQ ID NO: 4754499 - DNA, 25 bp, Homo sapien
agcgaaggtctggtcttctgattaa

SEQ ID NO: 4754500 - DNA, 25 bp, Homo sapien
ttctgattaacacggtggtcaccgg

SEQ ID NO: 4754501 - DNA, 25 bp, Homo sapien
cttaaacatgaataaagtacagtgg

SEQ ID NO: 4754502 - DNA, 25 bp, Homo sapien
taaacatgaataaagtacagtgggt

SEQ ID NO: 4754503 - DNA, 25 bp, Homo sapien
ataaagtacagtgggtatggtgacc

SEQ ID NO: 4754504 - DNA, 25 bp, Homo sapien
catgaataaagtacagtgggtatgg

SEQ ID NO: 4754505 - DNA, 25 bp, Homo sapien
tctttctgccagttagagattttat

SEQ ID NO: 4754506 - DNA, 25 bp, Homo sapien
tatagctgtcaacattcccacagca

SEQ ID NO: 4754507 - DNA, 25 bp, Homo sapien
acagcaaccagggactccaatcagt

SEQ ID NO: 4754508 - DNA, 25 bp, Homo sapien
gcaactggcctgattcatcatggct

SEQ ID NO: 4754509 - DNA, 25 bp, Homo sapien
gaggaagaaatacgacttgcagact

SEQ ID NO: 4754510 - DNA, 25 bp, Homo sapien
ggaagaaatacgacttgcagactgt

SEQ ID NO: 4754511 - DNA, 25 bp, Homo sapien
aagaggaagaaatacgacttgcaga

SEQ ID NO: 4754512 - DNA, 25 bp, Homo sapien
gaaatacgacttgcagactgttgtt

SEQ ID NO: 4754513 - DNA, 25 bp, Homo sapien
gactggaactatggatccctgctca

SEQ ID NO: 4754514 - DNA, 25 bp, Homo sapien
ggactggaactatggatccctgctc

SEQ ID NO: 4754515 - DNA, 25 bp, Homo sapien
tggaactcaatttccccgccgtcag

SEQ ID NO: 4754516 - DNA, 25 bp, Homo sapien
tcagcttgtggcctcgatgtaccat

SEQ ID NO: 4754517 - DNA, 25 bp, Homo sapien
tctagtttgtgctcctaatgtgtga

SEQ ID NO: 4754518 - DNA, 25 bp, Homo sapien
tgcaggacttgagcctccccatggc

SEQ ID NO: 4754519 - DNA, 25 bp, Homo sapien
tgcctttagagtctctgatggccca

SEQ ID NO: 4754520 - DNA, 25 bp, Homo sapien
tagcatctgctgtcccccttgtggg

SEQ ID NO: 4754521 - DNA, 25 bp, Homo sapien
tctgatggcccatctgtgcacctag

SEQ ID NO: 4754522 - DNA, 25 bp, Homo sapien
gcaagtctcctgtgcctttagagtc

SEQ ID NO: 4754523 - DNA, 25 bp, Homo sapien
tagctcttcttagctttataagcat

SEQ ID NO: 4754524 - DNA, 25 bp, Homo sapien
gctcttcttagctttataagcatca

SEQ ID NO: 4754525 - DNA, 25 bp, Homo sapien
tcttcttagctttataagcatcagt

SEQ ID NO: 4754526 - DNA, 25 bp, Homo sapien
ttaagtagctcttcttagctttata

SEQ ID NO: 4754527 - DNA, 25 bp, Homo sapien
actggaagagagtttcctcctcctt

SEQ ID NO: 4754528 - DNA, 25 bp, Homo sapien
cacatcaactgatttttcccatatt

SEQ ID NO: 4754529 - DNA, 25 bp, Homo sapien
caactgatttttcccatattcaggt

SEQ ID NO: 4754530 - DNA, 25 bp, Homo sapien
tcaactgatttttcccatattcagg

SEQ ID NO: 4754531 - DNA, 25 bp, Homo sapien
catcaactgatttttcccatattca

SEQ ID NO: 4754532 - DNA, 25 bp, Homo sapien
aatgctctggcaggtggacagaggc

SEQ ID NO: 4754533 - DNA, 25 bp, Homo sapien
cttaataatgctctggcaggtggac

SEQ ID NO: 4754534 - DNA, 25 bp, Homo sapien
ataatgctctggcaggtggacagag

SEQ ID NO: 4754535 - DNA, 25 bp, Homo sapien
taataatgctctggcaggtggacag

SEQ ID NO: 4754536 - DNA, 25 bp, Homo sapien
gggaggatggatccccagccagact

SEQ ID NO: 4754537 - DNA, 25 bp, Homo sapien
cagatttctccgcagggccaccatg

SEQ ID NO: 4754538 - DNA, 25 bp, Homo sapien
tctggtcaccgatattcagcttccc

SEQ ID NO: 4754539 - DNA, 25 bp, Homo sapien
tcatgttggcaatgatcacggtggg

SEQ ID NO: 4754540 - DNA, 25 bp, Homo sapien
cagaaggaagctcatgtccaaggga

SEQ ID NO: 4754541 - DNA, 25 bp, Homo sapien
ctctgtgacaagaatccctgcctca

SEQ ID NO: 4754542 - DNA, 25 bp, Homo sapien
gacagaccccagtggatcaaatgat

SEQ ID NO: 4754543 - DNA, 25 bp, Homo sapien
tacttggtgtcccaccaccaagctt

SEQ ID NO: 4754544 - DNA, 25 bp, Homo sapien
cccttcacttccgcggcagggtgcc

SEQ ID NO: 4754545 - DNA, 25 bp, Homo sapien
tcccttcacttccgcggcagggtgc

SEQ ID NO: 4754546 - DNA, 25 bp, Homo sapien
agaacagcttcaggtaagtacccac

SEQ ID NO: 4754547 - DNA, 25 bp, Homo sapien
gcggcagggtgccccactttccaag

SEQ ID NO: 4754548 - DNA, 25 bp, Homo sapien
gagcaggtcactatactccttctgg

SEQ ID NO: 4754549 - DNA, 25 bp, Homo sapien
cgctaaatgcctgtccgatggactg

SEQ ID NO: 4754550 - DNA, 25 bp, Homo sapien
gggttaatcccattggccctgagga

SEQ ID NO: 4754551 - DNA, 25 bp, Homo sapien
cgatggactgtgcaatcagctgagc

SEQ ID NO: 4754552 - DNA, 25 bp, Homo sapien
ggtgagcggcctggcgcacttccca

SEQ ID NO: 4754553 - DNA, 25 bp, Homo sapien
gcagtgcacctggtgagcggcctgg

SEQ ID NO: 4754554 - DNA, 25 bp, Homo sapien
tggtcagcagggcagtgcacctggt

SEQ ID NO: 4754555 - DNA, 25 bp, Homo sapien
ctggtgagcggcctggcgcacttcc

SEQ ID NO: 4754556 - DNA, 25 bp, Homo sapien
tattaacagcaaaatgggaactttc

SEQ ID NO: 4754557 - DNA, 25 bp, Homo sapien
ttcctaaaagcaccttattaacagc

SEQ ID NO: 4754558 - DNA, 25 bp, Homo sapien
cctaaaagcaccttattaacagcaa

SEQ ID NO: 4754559 - DNA, 25 bp, Homo sapien
aaatgggaactttccgtgtggctgg

SEQ ID NO: 4754560 - DNA, 25 bp, Homo sapien
gggcctacagggatcctcgatccct

SEQ ID NO: 4754561 - DNA, 25 bp, Homo sapien
tgatggatccaagggtaccccaagg

SEQ ID NO: 4754562 - DNA, 25 bp, Homo sapien
gagctccagccagatggaggtagca

SEQ ID NO: 4754563 - DNA, 25 bp, Homo sapien
gggatcctcgatccctgtaacttca

SEQ ID NO: 4754564 - DNA, 25 bp, Homo sapien
caacgatgttcccaatgtccgcaat

SEQ ID NO: 4754565 - DNA, 25 bp, Homo sapien
ggacgcttccacgttctcctgggag

SEQ ID NO: 4754566 - DNA, 25 bp, Homo sapien
tgtccgcaatgtaggaaatggtcct

SEQ ID NO: 4754567 - DNA, 25 bp, Homo sapien
tcctcagactcgaagacgtggcaga

SEQ ID NO: 4754568 - DNA, 25 bp, Homo sapien
agagggcgggtaagtccagctcagc

SEQ ID NO: 4754569 - DNA, 25 bp, Homo sapien
agggcgggtaagtccagctcagcat

SEQ ID NO: 4754570 - DNA, 25 bp, Homo sapien
aatgacctaagaaagcgcctgccac

SEQ ID NO: 4754571 - DNA, 25 bp, Homo sapien
gggcgggtaagtccagctcagcatc

SEQ ID NO: 4754572 - DNA, 25 bp, Homo sapien
cctgggaaaggtggaagccagctga

SEQ ID NO: 4754573 - DNA, 25 bp, Homo sapien
ctgggaaaggtggaagccagctgat

SEQ ID NO: 4754574 - DNA, 25 bp, Homo sapien
gggaaaggtggaagccagctgatac

SEQ ID NO: 4754575 - DNA, 25 bp, Homo sapien
tgggaaaggtggaagccagctgata

SEQ ID NO: 4754576 - DNA, 25 bp, Homo sapien
ctgtgtgtcggcgttcagcactttg

SEQ ID NO: 4754577 - DNA, 25 bp, Homo sapien
tgtgtgtcggcgttcagcactttga

SEQ ID NO: 4754578 - DNA, 25 bp, Homo sapien
gtgtgtcggcgttcagcactttgat

SEQ ID NO: 4754579 - DNA, 25 bp, Homo sapien
ctttgaacgatgatggcaagtggcc

SEQ ID NO: 4754580 - DNA, 25 bp, Homo sapien
tttgaacgatgatggcaagtggccc

SEQ ID NO: 4754581 - DNA, 25 bp, Homo sapien
gaacgatgatggcaagtggccctct

SEQ ID NO: 4754582 - DNA, 25 bp, Homo sapien
ttgaacgatgatggcaagtggccct

SEQ ID NO: 4754583 - DNA, 25 bp, Homo sapien
tgcttttggctaatttctgggccat

SEQ ID NO: 4754584 - DNA, 25 bp, Homo sapien
cttcttcctgcttttggctaatttc

SEQ ID NO: 4754585 - DNA, 25 bp, Homo sapien
tcctgcttttggctaatttctgggc

SEQ ID NO: 4754586 - DNA, 25 bp, Homo sapien
cttcctgcttttggctaatttctgg

SEQ ID NO: 4754587 - DNA, 25 bp, Homo sapien
ccagagtctggccagggatgttcgg

SEQ ID NO: 4754588 - DNA, 25 bp, Homo sapien
aggattcccgtgtggaaccccagag

SEQ ID NO: 4754589 - DNA, 25 bp, Homo sapien
cggactggcatcagttataatctgc

SEQ ID NO: 4754590 - DNA, 25 bp, Homo sapien
cagttataatctgcataactgacag

SEQ ID NO: 4754591 - DNA, 25 bp, Homo sapien
tcctttctacctctcaggcagaagg

SEQ ID NO: 4754592 - DNA, 25 bp, Homo sapien
tcccctgcactctggtggcactcgg

SEQ ID NO: 4754593 - DNA, 25 bp, Homo sapien
cctggcttgctttgtcattccctca

SEQ ID NO: 4754594 - DNA, 25 bp, Homo sapien
tggtcagaggtgttcgcatctgcag

SEQ ID NO: 4754595 - DNA, 25 bp, Homo sapien
cttgatcctgcttacggcttcctgg

SEQ ID NO: 4754596 - DNA, 25 bp, Homo sapien
tcatgcgcacgtttttggaaggagt

SEQ ID NO: 4754597 - DNA, 25 bp, Homo sapien
tgattccatcgatcaagtcttcggg

SEQ ID NO: 4754598 - DNA, 25 bp, Homo sapien
aattggcggcaaaaatgattccatc

SEQ ID NO: 4754599 - DNA, 25 bp, Homo sapien
cttcaacgtaggttgggaatgaagc

SEQ ID NO: 4754600 - DNA, 25 bp, Homo sapien
gttgggaatgaagccaagctttttc

SEQ ID NO: 4754601 - DNA, 25 bp, Homo sapien
tcaacgtaggttgggaatgaagcca

SEQ ID NO: 4754602 - DNA, 25 bp, Homo sapien
cgtaggttgggaatgaagccaagct

SEQ ID NO: 4754603 - DNA, 25 bp, Homo sapien
ctgatgttggctcattagcaggtgt

SEQ ID NO: 4754604 - DNA, 25 bp, Homo sapien
gcagttcactaggtgtaaaaggacc

SEQ ID NO: 4754605 - DNA, 25 bp, Homo sapien
tgggtggcagttcactaggtgtaaa

SEQ ID NO: 4754606 - DNA, 25 bp, Homo sapien
cattagcaggtgtgggtggcagttc

SEQ ID NO: 4754607 - DNA, 25 bp, Homo sapien
agacacctcaatgggagaaagcagc

SEQ ID NO: 4754608 - DNA, 25 bp, Homo sapien
tgcttgatgactctgcacccaaggg

SEQ ID NO: 4754609 - DNA, 25 bp, Homo sapien
agatgtgcttgatgactctgcaccc

SEQ ID NO: 4754610 - DNA, 25 bp, Homo sapien
tgtgcttgatgactctgcacccaag

SEQ ID NO: 4754611 - DNA, 25 bp, Homo sapien
gatgtgcttgatgactctgcaccca

SEQ ID NO: 4754612 - DNA, 25 bp, Homo sapien
tcctgagttgaaccaaaagatctaa

SEQ ID NO: 4754613 - DNA, 25 bp, Homo sapien
ctcattgaagaagcctaatactggc

SEQ ID NO: 4754614 - DNA, 25 bp, Homo sapien
ggataggatgataataagaatcccc

SEQ ID NO: 4754615 - DNA, 25 bp, Homo sapien
agttaccactctcgccccttggaga

SEQ ID NO: 4754616 - DNA, 25 bp, Homo sapien
cattagtgcctacctgaacagtcct

SEQ ID NO: 4754617 - DNA, 25 bp, Homo sapien
gtgtccaaataaacccagatccctg

SEQ ID NO: 4754618 - DNA, 25 bp, Homo sapien
cactgtctcagttgctgcaggaaaa

SEQ ID NO: 4754619 - DNA, 25 bp, Homo sapien
tgtcacagaaagtcacaaatgagct

SEQ ID NO: 4754620 - DNA, 25 bp, Homo sapien
tgaaggtacacatatgcagggattc

SEQ ID NO: 4754621 - DNA, 25 bp, Homo sapien
tccagtggccgaagtgtggcatgat

SEQ ID NO: 4754622 - DNA, 25 bp, Homo sapien
gaatggtggtcatcatttcaaatga

SEQ ID NO: 4754623 - DNA, 25 bp, Homo sapien
catactttgagaatggtggtcatca

SEQ ID NO: 4754624 - DNA, 25 bp, Homo sapien
tctccttcgtgacactcaaatcggt

SEQ ID NO: 4754625 - DNA, 25 bp, Homo sapien
ccttcgtgacactcaaatcggtaca

SEQ ID NO: 4754626 - DNA, 25 bp, Homo sapien
tgacactcaaatcggtacatccaga

SEQ ID NO: 4754627 - DNA, 25 bp, Homo sapien
tcaaatcggtacatccagaagttct

SEQ ID NO: 4754628 - DNA, 25 bp, Homo sapien
tttccgggtgctgtttgggcagctg

SEQ ID NO: 4754629 - DNA, 25 bp, Homo sapien
ctttccgggtgctgtttgggcagct

SEQ ID NO: 4754630 - DNA, 25 bp, Homo sapien
tgagagccgaggctaagtcctgacc

SEQ ID NO: 4754631 - DNA, 25 bp, Homo sapien
gatacccgagtcaatcatgcaactg

SEQ ID NO: 4754632 - DNA, 25 bp, Homo sapien
gtcctgacctcagtactcgtgtgag

SEQ ID NO: 4754633 - DNA, 25 bp, Homo sapien
tttccagtgttgttagatacccgag

SEQ ID NO: 4754634 - DNA, 25 bp, Homo sapien
tatagaacctgtgaaaaagcatcca

SEQ ID NO: 4754635 - DNA, 25 bp, Homo sapien
caaactctgctacgtttatagaacc

SEQ ID NO: 4754636 - DNA, 25 bp, Homo sapien
gaggctctctcaggacctgcatcag

SEQ ID NO: 4754637 - DNA, 25 bp, Homo sapien
tccagctcatgtggaaggaacgggt

SEQ ID NO: 4754638 - DNA, 25 bp, Homo sapien
gaaaggctgacggtataatgctgct

SEQ ID NO: 4754639 - DNA, 25 bp, Homo sapien
tataatgctgcttaaggtggaagct

SEQ ID NO: 4754640 - DNA, 25 bp, Homo sapien
tgagaactagggtcgcctgagtgcc

SEQ ID NO: 4754641 - DNA, 25 bp, Homo sapien
ttaatcagaccaaccctggaaggaa

SEQ ID NO: 4754642 - DNA, 25 bp, Homo sapien
aaaaccctccaacttacactgtgtg

SEQ ID NO: 4754643 - DNA, 25 bp, Homo sapien
gataaacgccatttcaagctgtaca

SEQ ID NO: 4754644 - DNA, 25 bp, Homo sapien
tactgtgactctgttctcgaatgat

SEQ ID NO: 4754645 - DNA, 25 bp, Homo sapien
ctaggatggagcagagataaacgcc

SEQ ID NO: 4754646 - DNA, 25 bp, Homo sapien
accataggctgtactgtgggctcac

SEQ ID NO: 4754647 - DNA, 25 bp, Homo sapien
taccataggctgtactgtgggctca

SEQ ID NO: 4754648 - DNA, 25 bp, Homo sapien
ctaccataggctgtactgtgggctc

SEQ ID NO: 4754649 - DNA, 25 bp, Homo sapien
taagcaggtcatttcaaggagctgg

SEQ ID NO: 4754650 - DNA, 25 bp, Homo sapien
agctggtgcactggagaaagctgaa

SEQ ID NO: 4754651 - DNA, 25 bp, Homo sapien
ccagcatctggaccaactgtgcctg

SEQ ID NO: 4754652 - DNA, 25 bp, Homo sapien
aaagctgaaggaagaggccagcatc

SEQ ID NO: 4754653 - DNA, 25 bp, Homo sapien
acacgtgagtgcacttatttttcac

SEQ ID NO: 4754654 - DNA, 25 bp, Homo sapien
ctacacgtgagtgcacttatttttc

SEQ ID NO: 4754655 - DNA, 25 bp, Homo sapien
acgtgagtgcacttatttttcacta

SEQ ID NO: 4754656 - DNA, 25 bp, Homo sapien
tgcacttatttttcactaaatcaga

SEQ ID NO: 4754657 - DNA, 25 bp, Homo sapien
gggctaatgtcctggcgcatgaccc

SEQ ID NO: 4754658 - DNA, 25 bp, Homo sapien
cctctggtcgtcacagtccctggtg

SEQ ID NO: 4754659 - DNA, 25 bp, Homo sapien
ccagatgggctctttgggctcgtcg

SEQ ID NO: 4754660 - DNA, 25 bp, Homo sapien
ggtcctggttttcacctcctcgatg

SEQ ID NO: 4754661 - DNA, 25 bp, Homo sapien
ggctctgcgagctcatgctctgctt

SEQ ID NO: 4754662 - DNA, 25 bp, Homo sapien
ggtagggggacgctccaggtcctgc

SEQ ID NO: 4754663 - DNA, 25 bp, Homo sapien
ctcggctgccttgtcgaggctctgc

SEQ ID NO: 4754664 - DNA, 25 bp, Homo sapien
tcggcctcaggcatgtcctcggctg

SEQ ID NO: 4754665 - DNA, 25 bp, Homo sapien
gtactgcacagcataggcgctctcg

SEQ ID NO: 4754666 - DNA, 25 bp, Homo sapien
tatctcctcgtacacgtgctcctgg

SEQ ID NO: 4754667 - DNA, 25 bp, Homo sapien
tgagtaggccgcattcatggcttcc

SEQ ID NO: 4754668 - DNA, 25 bp, Homo sapien
tcggagcgctcgtcgtaatggtgca

SEQ ID NO: 4754669 - DNA, 25 bp, Homo sapien
tcctcgagggctcgcccgcgctggt

SEQ ID NO: 4754670 - DNA, 25 bp, Homo sapien
ggcccacatagtgctgctgctgcgg

SEQ ID NO: 4754671 - DNA, 25 bp, Homo sapien
agctgggcgcggaggtcctcgaggg

SEQ ID NO: 4754672 - DNA, 25 bp, Homo sapien
tggtggcggcccacatagtgctgct

SEQ ID NO: 4754673 - DNA, 25 bp, Homo sapien
ccacctgccgcctcgtcggtcacct

SEQ ID NO: 4754674 - DNA, 25 bp, Homo sapien
gcctccaccgactcgttcacctccc

SEQ ID NO: 4754675 - DNA, 25 bp, Homo sapien
caccgactcgttcacctccccacct

SEQ ID NO: 4754676 - DNA, 25 bp, Homo sapien
ccgcagacccctccaagtggttcat

SEQ ID NO: 4754677 - DNA, 25 bp, Homo sapien
ggtgggagtcggaacggctaggaga

SEQ ID NO: 4754678 - DNA, 25 bp, Homo sapien
gagtcggaacggctaggagagaagc

SEQ ID NO: 4754679 - DNA, 25 bp, Homo sapien
tcggaacggctaggagagaagctgg

SEQ ID NO: 4754680 - DNA, 25 bp, Homo sapien
tgggagtcggaacggctaggagaga

SEQ ID NO: 4754681 - DNA, 25 bp, Homo sapien
gatcattttggagctaccaagtcca

SEQ ID NO: 4754682 - DNA, 25 bp, Homo sapien
cattctttgatggatccacccctga

SEQ ID NO: 4754683 - DNA, 25 bp, Homo sapien
tgatgaccatcccaataacaaagga

SEQ ID NO: 4754684 - DNA, 25 bp, Homo sapien
ccaagtccacattcaagcagaagta

SEQ ID NO: 4754685 - DNA, 25 bp, Homo sapien
gaggaagggctttgaggaagggctg

SEQ ID NO: 4754686 - DNA, 25 bp, Homo sapien
aggaagggctttgaggaagggctga

SEQ ID NO: 4754687 - DNA, 25 bp, Homo sapien
ggaagggctttgaggaagggctgat

SEQ ID NO: 4754688 - DNA, 25 bp, Homo sapien
tttctcaccacatttcaggtttctt

SEQ ID NO: 4754689 - DNA, 25 bp, Homo sapien
aaagaggacccagatggcactggcc

SEQ ID NO: 4754690 - DNA, 25 bp, Homo sapien
acccagatggcactggccaacagac

SEQ ID NO: 4754691 - DNA, 25 bp, Homo sapien
ggaaaaagaggacccagatggcact

SEQ ID NO: 4754692 - DNA, 25 bp, Homo sapien
ctggaaaaagaggacccagatggca

SEQ ID NO: 4754693 - DNA, 25 bp, Homo sapien
ctcaggaggtaagcaagaaaaagga

SEQ ID NO: 4754694 - DNA, 25 bp, Homo sapien
gtttctgacaaattaacggactgga

SEQ ID NO: 4754695 - DNA, 25 bp, Homo sapien
agggtaaaaggcaatagggtgctca

SEQ ID NO: 4754696 - DNA, 25 bp, Homo sapien
gacaaattaacggactggaggccat

SEQ ID NO: 4754697 - DNA, 25 bp, Homo sapien
gcatccgctagggtttccgtttgac

SEQ ID NO: 4754698 - DNA, 25 bp, Homo sapien
ctttttagaggtatacgtgagccag

SEQ ID NO: 4754699 - DNA, 25 bp, Homo sapien
taggtccccaaagtctggcagcaga

SEQ ID NO: 4754700 - DNA, 25 bp, Homo sapien
acttagctatggaacaggcatccgc

SEQ ID NO: 4754701 - DNA, 25 bp, Homo sapien
tgtcttcccctgcaaaacggtattc

SEQ ID NO: 4754702 - DNA, 25 bp, Homo sapien
ggtgatgcacacatattactcttgg

SEQ ID NO: 4754703 - DNA, 25 bp, Homo sapien
tcttgcgaagagcttcagcagtttc

SEQ ID NO: 4754704 - DNA, 25 bp, Homo sapien
gatgcacacatattactcttggagg

SEQ ID NO: 4754705 - DNA, 25 bp, Homo sapien
gaagccagccctttacactggagca

SEQ ID NO: 4754706 - DNA, 25 bp, Homo sapien
cacggatccaactgctaaagctgct

SEQ ID NO: 4754707 - DNA, 25 bp, Homo sapien
tacactggagcacggatccaactgc

SEQ ID NO: 4754708 - DNA, 25 bp, Homo sapien
aaagctgcttctatgtccccacaga

SEQ ID NO: 4754709 - DNA, 25 bp, Homo sapien
agggcatctagggtcaagatttcaa

SEQ ID NO: 4754710 - DNA, 25 bp, Homo sapien
catctagggtcaagatttcaatcat

SEQ ID NO: 4754711 - DNA, 25 bp, Homo sapien
ggcatctagggtcaagatttcaatc

SEQ ID NO: 4754712 - DNA, 25 bp, Homo sapien
gggcatctagggtcaagatttcaat

SEQ ID NO: 4754713 - DNA, 25 bp, Homo sapien
cttctactgcgggacgggtcgcttt

SEQ ID NO: 4754714 - DNA, 25 bp, Homo sapien
ctgcttctactgcgggacgggtcgc

SEQ ID NO: 4754715 - DNA, 25 bp, Homo sapien
tgcgggacgggtcgctttctccacc

SEQ ID NO: 4754716 - DNA, 25 bp, Homo sapien
tctactgcgggacgggtcgctttct

SEQ ID NO: 4754717 - DNA, 25 bp, Homo sapien
catggcaataagagggcaagaaagc

SEQ ID NO: 4754718 - DNA, 25 bp, Homo sapien
tctgtatactattctcaggccatgc

SEQ ID NO: 4754719 - DNA, 25 bp, Homo sapien
aagaaacccccataattctggccag

SEQ ID NO: 4754720 - DNA, 25 bp, Homo sapien
cctgcaggtaactggatacattaaa

SEQ ID NO: 4754721 - DNA, 25 bp, Homo sapien
gagggcaaagtgagggactctaatc

SEQ ID NO: 4754722 - DNA, 25 bp, Homo sapien
catacagccgtgcaaaacatgaagg

SEQ ID NO: 4754723 - DNA, 25 bp, Homo sapien
gcctacatagggttaaagctcccca

SEQ ID NO: 4754724 - DNA, 25 bp, Homo sapien
caacttgaaggatgagaggacttgc

SEQ ID NO: 4754725 - DNA, 25 bp, Homo sapien
tctagcagaaccagagttaaaagga

SEQ ID NO: 4754726 - DNA, 25 bp, Homo sapien
ccatgcccttgagaacaagttcaaa

SEQ ID NO: 4754727 - DNA, 25 bp, Homo sapien
tggtctagcagaaccagagttaaaa

SEQ ID NO: 4754728 - DNA, 25 bp, Homo sapien
ctgagatatttgctaccatgccctt

SEQ ID NO: 4754729 - DNA, 25 bp, Homo sapien
gataatactcaatgctccaaggctg

SEQ ID NO: 4754730 - DNA, 25 bp, Homo sapien
ggaattgcccattctggtcgttgca

SEQ ID NO: 4754731 - DNA, 25 bp, Homo sapien
tcccctggcaacgaccatgtggtgt

SEQ ID NO: 4754732 - DNA, 25 bp, Homo sapien
cttaattttagaaggtgacaccagc

SEQ ID NO: 4754733 - DNA, 25 bp, Homo sapien
gaagcagtttgaataacaagcacaa

SEQ ID NO: 4754734 - DNA, 25 bp, Homo sapien
tacttgtcttgtataacagtttctg

SEQ ID NO: 4754735 - DNA, 25 bp, Homo sapien
ggctgagaagcagtttgaataacaa

SEQ ID NO: 4754736 - DNA, 25 bp, Homo sapien
aacttctaatgcagagaagatgtac

SEQ ID NO: 4754737 - DNA, 25 bp, Homo sapien
ttttgtgcaagtgcctgtctcctgt

SEQ ID NO: 4754738 - DNA, 25 bp, Homo sapien
tgcgaacacatgtagaatgcacagc

SEQ ID NO: 4754739 - DNA, 25 bp, Homo sapien
tgagtaaggcccaactcggacagca

SEQ ID NO: 4754740 - DNA, 25 bp, Homo sapien
gacacacagttgatacagtgcgaac

SEQ ID NO: 4754741 - DNA, 25 bp, Homo sapien
ctgggaataaagctccgctccagcc

SEQ ID NO: 4754742 - DNA, 25 bp, Homo sapien
tagtgacagcgctggtgccaagcct

SEQ ID NO: 4754743 - DNA, 25 bp, Homo sapien
tgggaataaagctccgctccagccg

SEQ ID NO: 4754744 - DNA, 25 bp, Homo sapien
gagcaggcggcgctagtgacagcgc

SEQ ID NO: 4754745 - DNA, 25 bp, Homo sapien
cagcagttttgtggttttctttgta

SEQ ID NO: 4754746 - DNA, 25 bp, Homo sapien
ctttcagcagttttgtggttttctt

SEQ ID NO: 4754747 - DNA, 25 bp, Homo sapien
cagttttgtggttttctttgtatag

SEQ ID NO: 4754748 - DNA, 25 bp, Homo sapien
tggttttctttgtataggtccttca

SEQ ID NO: 4754749 - DNA, 25 bp, Homo sapien
gaagtcatgcatcaagaacctcgcc

SEQ ID NO: 4754750 - DNA, 25 bp, Homo sapien
tgttcatactagagccatagggacc

SEQ ID NO: 4754751 - DNA, 25 bp, Homo sapien
catacatgtgtgtgtggcccaacaa

SEQ ID NO: 4754752 - DNA, 25 bp, Homo sapien
cttggcaaattggaacaggctgatc

SEQ ID NO: 4754753 - DNA, 25 bp, Homo sapien
taagactcgctgttcagcaggaagg

SEQ ID NO: 4754754 - DNA, 25 bp, Homo sapien
caggctttccgtaacagtgagagag

SEQ ID NO: 4754755 - DNA, 25 bp, Homo sapien
gaatctggaaaacaccgtactgcca

SEQ ID NO: 4754756 - DNA, 25 bp, Homo sapien
taatccacagtaggatgacccactg

SEQ ID NO: 4754757 - DNA, 25 bp, Homo sapien
tacttgatcaatgaacctgtgctcc

SEQ ID NO: 4754758 - DNA, 25 bp, Homo sapien
tgtgctccatttctaggcctaggga

SEQ ID NO: 4754759 - DNA, 25 bp, Homo sapien
cctagggagtctggaactggcgtcc

SEQ ID NO: 4754760 - DNA, 25 bp, Homo sapien
ggcttgctccacgttccgacaggtg

SEQ ID NO: 4754761 - DNA, 25 bp, Homo sapien
tgtctgcaggtgacaactgggtcat

SEQ ID NO: 4754762 - DNA, 25 bp, Homo sapien
aaggtgcaagtcactcaaagtcccc

SEQ ID NO: 4754763 - DNA, 25 bp, Homo sapien
tcaaagtccccccagggctgtctgc

SEQ ID NO: 4754764 - DNA, 25 bp, Homo sapien
ctgggataaggtgcaagtcactcaa

SEQ ID NO: 4754765 - DNA, 25 bp, Homo sapien
aagtgatgctgaaggtagaaaatat

SEQ ID NO: 4754766 - DNA, 25 bp, Homo sapien
catttaagtgatgctgaaggtagaa

SEQ ID NO: 4754767 - DNA, 25 bp, Homo sapien
gtgatgctgaaggtagaaaatatgc

SEQ ID NO: 4754768 - DNA, 25 bp, Homo sapien
atgctgaaggtagaaaatatgccgc

SEQ ID NO: 4754769 - DNA, 25 bp, Homo sapien
aactgaagttgataggttgctaacc

SEQ ID NO: 4754770 - DNA, 25 bp, Homo sapien
tgaagttgataggttgctaaccctt

SEQ ID NO: 4754771 - DNA, 25 bp, Homo sapien
tttgctaccagactttcccctctct

SEQ ID NO: 4754772 - DNA, 25 bp, Homo sapien
gctaccagactttcccctctctcaa

SEQ ID NO: 4754773 - DNA, 25 bp, Homo sapien
caaaggattttgctccatcacagaa

SEQ ID NO: 4754774 - DNA, 25 bp, Homo sapien
aaaactggcggtagtgaaatccact

SEQ ID NO: 4754775 - DNA, 25 bp, Homo sapien
ggtctgaaacgtgcatagatgccca

SEQ ID NO: 4754776 - DNA, 25 bp, Homo sapien
ccaaagggtttcatgtcctgggtag

SEQ ID NO: 4754777 - DNA, 25 bp, Homo sapien
gaggctatagctggcaagtatctga

SEQ ID NO: 4754778 - DNA, 25 bp, Homo sapien
catggattgaaaagagtactccact

SEQ ID NO: 4754779 - DNA, 25 bp, Homo sapien
aaataaacctgtagaacattctggc

SEQ ID NO: 4754780 - DNA, 25 bp, Homo sapien
cttccagccaagatagtcaagttgt

SEQ ID NO: 4754781 - DNA, 25 bp, Homo sapien
caatatttatccttctgcgcttggc

SEQ ID NO: 4754782 - DNA, 25 bp, Homo sapien
tctccctcaggtctattgaagaagt

SEQ ID NO: 4754783 - DNA, 25 bp, Homo sapien
tcaacttgtttagagtccacctaca

SEQ ID NO: 4754784 - DNA, 25 bp, Homo sapien
gcatcacaaattgaacagggaatcc

SEQ ID NO: 4754785 - DNA, 25 bp, Homo sapien
gagatgggaattattgtcaccctcc

SEQ ID NO: 4754786 - DNA, 25 bp, Homo sapien
gcaacttcctcaaggctacacagca

SEQ ID NO: 4754787 - DNA, 25 bp, Homo sapien
tggtaaagccagaatgcaaagcagg

SEQ ID NO: 4754788 - DNA, 25 bp, Homo sapien
caggtctgcatgaccactgagtgaa

SEQ ID NO: 4754789 - DNA, 25 bp, Homo sapien
ggtagcagctgttgcgattctctca

SEQ ID NO: 4754790 - DNA, 25 bp, Homo sapien
tgaactactaccagaagattttaag

SEQ ID NO: 4754791 - DNA, 25 bp, Homo sapien
caagttgccagaccatcagtttctc

SEQ ID NO: 4754792 - DNA, 25 bp, Homo sapien
tcttctgagaatgaactactaccag

SEQ ID NO: 4754793 - DNA, 25 bp, Homo sapien
gatgcgatgggaccaagcattatag

SEQ ID NO: 4754794 - DNA, 25 bp, Homo sapien
tcttcttgtatgagtcgctgtgccc

SEQ ID NO: 4754795 - DNA, 25 bp, Homo sapien
tagttgcttgggtatctccctgctg

SEQ ID NO: 4754796 - DNA, 25 bp, Homo sapien
gcttggccaagtgctgtaaaaccca

SEQ ID NO: 4754797 - DNA, 25 bp, Homo sapien
cccagatgtaaatccttaattggat

SEQ ID NO: 4754798 - DNA, 25 bp, Homo sapien
gttaaggcgagttttcccagatgta

SEQ ID NO: 4754799 - DNA, 25 bp, Homo sapien
tggttaaggcgagttttcccagatg

SEQ ID NO: 4754800 - DNA, 25 bp, Homo sapien
tctggactctttggaaacttggtta

SEQ ID NO: 4754801 - DNA, 25 bp, Homo sapien
tacatgacccttgatatacgaggcc

SEQ ID NO: 4754802 - DNA, 25 bp, Homo sapien
atataagcagcagaagtaatagcaa

SEQ ID NO: 4754803 - DNA, 25 bp, Homo sapien
catttaggttgcgtcaaactttttg

SEQ ID NO: 4754804 - DNA, 25 bp, Homo sapien
tccaaaagagctattaacaaggtaa

SEQ ID NO: 4754805 - DNA, 25 bp, Homo sapien
atgtgcactgacacgcacggctaat

SEQ ID NO: 4754806 - DNA, 25 bp, Homo sapien
tgtgcactgacacgcacggctaatt

SEQ ID NO: 4754807 - DNA, 25 bp, Homo sapien
tcacaggtataaagaatagggagaa

SEQ ID NO: 4754808 - DNA, 25 bp, Homo sapien
caagaaagtttatgaagacaccaca

SEQ ID NO: 4754809 - DNA, 25 bp, Homo sapien
agtatactgtaactcaacatgacaa

SEQ ID NO: 4754810 - DNA, 25 bp, Homo sapien
aaagcatgtatcaaacagtatactg

SEQ ID NO: 4754811 - DNA, 25 bp, Homo sapien
tttatcatatcactaatgaaaatga

SEQ ID NO: 4754812 - DNA, 25 bp, Homo sapien
ttatcatatcactaatgaaaatgac

SEQ ID NO: 4754813 - DNA, 25 bp, Homo sapien
tgggtttagaagcagcagggtacat

SEQ ID NO: 4754814 - DNA, 25 bp, Homo sapien
tcacgttccatgcagtggtaaagtc

SEQ ID NO: 4754815 - DNA, 25 bp, Homo sapien
gtctgggtttagaagcagcagggta

SEQ ID NO: 4754816 - DNA, 25 bp, Homo sapien
ctcacgttccatgcagtggtaaagt

SEQ ID NO: 4754817 - DNA, 25 bp, Homo sapien
gaagcagaactactatgtcaaaaca

SEQ ID NO: 4754818 - DNA, 25 bp, Homo sapien
tatgactcctactaagcatttccag

SEQ ID NO: 4754819 - DNA, 25 bp, Homo sapien
gaacatgagtgtacttatgtcccta

SEQ ID NO: 4754820 - DNA, 25 bp, Homo sapien
cttgggctatatttcctgaagcaga

SEQ ID NO: 4754821 - DNA, 25 bp, Homo sapien
gctcactttgtagtacaagttggag

SEQ ID NO: 4754822 - DNA, 25 bp, Homo sapien
ggaggctcactttgtagtacaagtt

SEQ ID NO: 4754823 - DNA, 25 bp, Homo sapien
actttgtagtacaagttggagtgca

SEQ ID NO: 4754824 - DNA, 25 bp, Homo sapien
gaggctcactttgtagtacaagttg

SEQ ID NO: 4754825 - DNA, 25 bp, Homo sapien
tagtaacatatacaaccataggccc

SEQ ID NO: 4754826 - DNA, 25 bp, Homo sapien
gcaaaagatcctcctaagctggcta

SEQ ID NO: 4754827 - DNA, 25 bp, Homo sapien
aggactcaggctcagacaagacttc

SEQ ID NO: 4754828 - DNA, 25 bp, Homo sapien
gctgagcagagggatactttttgac

SEQ ID NO: 4754829 - DNA, 25 bp, Homo sapien
tcaggttaccacaagaagtgaagct

SEQ ID NO: 4754830 - DNA, 25 bp, Homo sapien
tatggtaaacaccagagaggccttg

SEQ ID NO: 4754831 - DNA, 25 bp, Homo sapien
tggcccaaggccagtagtcacctgg

SEQ ID NO: 4754832 - DNA, 25 bp, Homo sapien
gatactattatgcaagccatctgag

SEQ ID NO: 4754833 - DNA, 25 bp, Homo sapien
cagacatgcccagttacgaagagta

SEQ ID NO: 4754834 - DNA, 25 bp, Homo sapien
tcaagcgtgtctgaaatgactggct

SEQ ID NO: 4754835 - DNA, 25 bp, Homo sapien
tatgtcccagccaactattgccagg

SEQ ID NO: 4754836 - DNA, 25 bp, Homo sapien
tctgccgcagtgtctcaagagcttg

SEQ ID NO: 4754837 - DNA, 25 bp, Homo sapien
gcttttgtacacatgcacggttgca

SEQ ID NO: 4754838 - DNA, 25 bp, Homo sapien
tataacctgagtagtatgtgacacc

SEQ ID NO: 4754839 - DNA, 25 bp, Homo sapien
tattccgcaaggttccttatgagcc

SEQ ID NO: 4754840 - DNA, 25 bp, Homo sapien
cacggttgcagctgaattcaaagtt

SEQ ID NO: 4754841 - DNA, 25 bp, Homo sapien
caaccaggactatgggactccggtt

SEQ ID NO: 4754842 - DNA, 25 bp, Homo sapien
aaaggaacttgacacaccagctctc

SEQ ID NO: 4754843 - DNA, 25 bp, Homo sapien
caggactatgggactccggttatac

SEQ ID NO: 4754844 - DNA, 25 bp, Homo sapien
agcttgttgtggacatatggtaaaa

SEQ ID NO: 4754845 - DNA, 25 bp, Homo sapien
aggacatgggatcaggccaatttca

SEQ ID NO: 4754846 - DNA, 25 bp, Homo sapien
aaagatatgatggtttgggacagca

SEQ ID NO: 4754847 - DNA, 25 bp, Homo sapien
tgggacagcaatcaagttctaatgg

SEQ ID NO: 4754848 - DNA, 25 bp, Homo sapien
cctgcataactaagaagatcatagg

SEQ ID NO: 4754849 - DNA, 25 bp, Homo sapien
tacaaaatagtcttatgagaggaac

SEQ ID NO: 4754850 - DNA, 25 bp, Homo sapien
gaaggtacctattcacatcatacag

SEQ ID NO: 4754851 - DNA, 25 bp, Homo sapien
tctacattagcacagggtccataca

SEQ ID NO: 4754852 - DNA, 25 bp, Homo sapien
tggcaactaagtaccactgtgtgag

SEQ ID NO: 4754853 - DNA, 25 bp, Homo sapien
gactatccctaggtcaagttttcag

SEQ ID NO: 4754854 - DNA, 25 bp, Homo sapien
tagctgatgactagtcttaaacaat

SEQ ID NO: 4754855 - DNA, 25 bp, Homo sapien
tatgtattcaaatatagctgatgac

SEQ ID NO: 4754856 - DNA, 25 bp, Homo sapien
cttaaacaatgagttaagctattta

SEQ ID NO: 4754857 - DNA, 25 bp, Homo sapien
cattacattattccgaatatccaac

SEQ ID NO: 4754858 - DNA, 25 bp, Homo sapien
gcaaccactatggatactgccagga

SEQ ID NO: 4754859 - DNA, 25 bp, Homo sapien
taatgtggcacagttgcacgtctcc

SEQ ID NO: 4754860 - DNA, 25 bp, Homo sapien
tatacagcaaggcatcaaagcattc

SEQ ID NO: 4754861 - DNA, 25 bp, Homo sapien
gggagcaaaacatccaacggcttct

SEQ ID NO: 4754862 - DNA, 25 bp, Homo sapien
tgcgcccgagtaccttaaacacagg

SEQ ID NO: 4754863 - DNA, 25 bp, Homo sapien
caacgtccgggatgaatctcaagag

SEQ ID NO: 4754864 - DNA, 25 bp, Homo sapien
gtcacttctagggactcgaccgcga

SEQ ID NO: 4754865 - DNA, 25 bp, Homo sapien
gtttacaaggcatacacggacccac

SEQ ID NO: 4754866 - DNA, 25 bp, Homo sapien
aaggcgttagtgatgtccttcacaa

SEQ ID NO: 4754867 - DNA, 25 bp, Homo sapien
ggttcctcctgaaggcgttagtgat

SEQ ID NO: 4754868 - DNA, 25 bp, Homo sapien
gtgatgtccttcacaacccgctgca

SEQ ID NO: 4754869 - DNA, 25 bp, Homo sapien
cctcctgaaggcgttagtgatgtcc

SEQ ID NO: 4754870 - DNA, 25 bp, Homo sapien
tttttatggcacctactcaagtgtt

SEQ ID NO: 4754871 - DNA, 25 bp, Homo sapien
tttatggcacctactcaagtgtttc

SEQ ID NO: 4754872 - DNA, 25 bp, Homo sapien
tatggcacctactcaagtgtttctc

SEQ ID NO: 4754873 - DNA, 25 bp, Homo sapien
gcctttttatggcacctactcaagt

SEQ ID NO: 4754874 - DNA, 25 bp, Homo sapien
tgaggtactgttatattcactgtgc

SEQ ID NO: 4754875 - DNA, 25 bp, Homo sapien
ttatgaagtgtagttcttagctggc

SEQ ID NO: 4754876 - DNA, 25 bp, Homo sapien
gcctaaataccttgtttgtgtgtag

SEQ ID NO: 4754877 - DNA, 25 bp, Homo sapien
tggactatcttttatcaccccttta

SEQ ID NO: 4754878 - DNA, 25 bp, Homo sapien
gccaatttcccatccaatgcatagt

SEQ ID NO: 4754879 - DNA, 25 bp, Homo sapien
tgcatagttcaagaagaagccatga

SEQ ID NO: 4754880 - DNA, 25 bp, Homo sapien
tgacaggtaagtaggtgtatattct

SEQ ID NO: 4754881 - DNA, 25 bp, Homo sapien
tcattatagaaatcctgattgccaa

SEQ ID NO: 4754882 - DNA, 25 bp, Homo sapien
tcttcgactctcttctacttctcat

SEQ ID NO: 4754883 - DNA, 25 bp, Homo sapien
ctgactcttcgactctcttctactt

SEQ ID NO: 4754884 - DNA, 25 bp, Homo sapien
gactcttcgactctcttctacttct

SEQ ID NO: 4754885 - DNA, 25 bp, Homo sapien
ctcttcgactctcttctacttctca

SEQ ID NO: 4754886 - DNA, 25 bp, Homo sapien
gctgctaataaacaatgaaggttgg

SEQ ID NO: 4754887 - DNA, 25 bp, Homo sapien
gtcaaggtatttcacttattggctg

SEQ ID NO: 4754888 - DNA, 25 bp, Homo sapien
gactatgtcattactgatcttgggc

SEQ ID NO: 4754889 - DNA, 25 bp, Homo sapien
gccacctttatgctagactatgtca

SEQ ID NO: 4754890 - DNA, 25 bp, Homo sapien
tcttgcagcgtcatagccagaaggg

SEQ ID NO: 4754891 - DNA, 25 bp, Homo sapien
gaatgcccggagtcctaaactgtac

SEQ ID NO: 4754892 - DNA, 25 bp, Homo sapien
tcaggtactcgactaaggccaggga

SEQ ID NO: 4754893 - DNA, 25 bp, Homo sapien
tatgaaccacagaccacggaaaagc

SEQ ID NO: 4754894 - DNA, 25 bp, Homo sapien
actcttaggatttggcgggtggaca

SEQ ID NO: 4754895 - DNA, 25 bp, Homo sapien
caggatgcagttccccccttcatca

SEQ ID NO: 4754896 - DNA, 25 bp, Homo sapien
gggtggacaggcgaaactgcggatc

SEQ ID NO: 4754897 - DNA, 25 bp, Homo sapien
gtggacaggcgaaactgcggatccc

SEQ ID NO: 4754898 - DNA, 25 bp, Homo sapien
tcgctaccctcactgcattctggga

SEQ ID NO: 4754899 - DNA, 25 bp, Homo sapien
gtttcttatcagtaacgacaacgtc

SEQ ID NO: 4754900 - DNA, 25 bp, Homo sapien
ctgtgtagcccggtcgctaccctca

SEQ ID NO: 4754901 - DNA, 25 bp, Homo sapien
tttcttatcagtaacgacaacgtct

SEQ ID NO: 4754902 - DNA, 25 bp, Homo sapien
ctgatcctgttggtttgttgaggac

SEQ ID NO: 4754903 - DNA, 25 bp, Homo sapien
tgcctccagattcggtcccactcgg

SEQ ID NO: 4754904 - DNA, 25 bp, Homo sapien
gaatttgtggctgatcctgttggtt

SEQ ID NO: 4754905 - DNA, 25 bp, Homo sapien
tcatcctggtccaaccgctgtgcat

SEQ ID NO: 4754906 - DNA, 25 bp, Homo sapien
tttgacaatgacagtcccgtttttc

SEQ ID NO: 4754907 - DNA, 25 bp, Homo sapien
aatgacagtcccgtttttcaccact

SEQ ID NO: 4754908 - DNA, 25 bp, Homo sapien
gacaatgacagtcccgtttttcacc

SEQ ID NO: 4754909 - DNA, 25 bp, Homo sapien
ctggtttgacaatgacagtcccgtt

SEQ ID NO: 4754910 - DNA, 25 bp, Homo sapien
tttgtagatccctcaaacacggtga

SEQ ID NO: 4754911 - DNA, 25 bp, Homo sapien
tagtgatctcctgttctatcaatgt

SEQ ID NO: 4754912 - DNA, 25 bp, Homo sapien
tagtggttcattgtctataagtacc

SEQ ID NO: 4754913 - DNA, 25 bp, Homo sapien
tagtccccacgttgtgctattaaat

SEQ ID NO: 4754914 - DNA, 25 bp, Homo sapien
taggcatacagcactatagctcaga

SEQ ID NO: 4754915 - DNA, 25 bp, Homo sapien
cataggcatacagcactatagctca

SEQ ID NO: 4754916 - DNA, 25 bp, Homo sapien
ccataggcatacagcactatagctc

SEQ ID NO: 4754917 - DNA, 25 bp, Homo sapien
ataggcatacagcactatagctcag

SEQ ID NO: 4754918 - DNA, 25 bp, Homo sapien
gagttcttccataaaagtgtaaatc

SEQ ID NO: 4754919 - DNA, 25 bp, Homo sapien
tcttccataaaagtgtaaatctgaa

SEQ ID NO: 4754920 - DNA, 25 bp, Homo sapien
cttccataaaagtgtaaatctgaaa

SEQ ID NO: 4754921 - DNA, 25 bp, Homo sapien
gttcttccataaaagtgtaaatctg

SEQ ID NO: 4754922 - DNA, 25 bp, Homo sapien
gatgggctctctcagctccattaca

SEQ ID NO: 4754923 - DNA, 25 bp, Homo sapien
tcaggatctgttccagatactgcag

SEQ ID NO: 4754924 - DNA, 25 bp, Homo sapien
tccattacaatctcttgtaacatga

SEQ ID NO: 4754925 - DNA, 25 bp, Homo sapien
actgcagatgggctctctcagctcc

SEQ ID NO: 4754926 - DNA, 25 bp, Homo sapien
ttcacttaaacccaaccgagtcaca

SEQ ID NO: 4754927 - DNA, 25 bp, Homo sapien
gcagctctctatcacgtggaggcag

SEQ ID NO: 4754928 - DNA, 25 bp, Homo sapien
tcacaaacaatccaaacgccagacc

SEQ ID NO: 4754929 - DNA, 25 bp, Homo sapien
tctatcacgtggaggcagtgcgctg

SEQ ID NO: 4754930 - DNA, 25 bp, Homo sapien
atagaggcacaaacgcagtcagagg

SEQ ID NO: 4754931 - DNA, 25 bp, Homo sapien
gccccagtgcatagaggcacaaacg

SEQ ID NO: 4754932 - DNA, 25 bp, Homo sapien
tgcatagaggcacaaacgcagtcag

SEQ ID NO: 4754933 - DNA, 25 bp, Homo sapien
atttaaagccccagtgcatagaggc

SEQ ID NO: 4754934 - DNA, 25 bp, Homo sapien
tattaatgtagaggacattttggca

SEQ ID NO: 4754935 - DNA, 25 bp, Homo sapien
gtctcggagagcagatgtagaaaga

SEQ ID NO: 4754936 - DNA, 25 bp, Homo sapien
agaagatgcttctgaggtctcggag

SEQ ID NO: 4754937 - DNA, 25 bp, Homo sapien
taatgtagaggacattttggcagca

SEQ ID NO: 4754938 - DNA, 25 bp, Homo sapien
ctgtttttactcaggaatacctcct

SEQ ID NO: 4754939 - DNA, 25 bp, Homo sapien
tctgaatcccctgtttttactcagg

SEQ ID NO: 4754940 - DNA, 25 bp, Homo sapien
gttttcaattgttgaagaacctctc

SEQ ID NO: 4754941 - DNA, 25 bp, Homo sapien
aaagaattactctgaatcccctgtt

SEQ ID NO: 4754942 - DNA, 25 bp, Homo sapien
tttacctcatgggagtgttcatcag

SEQ ID NO: 4754943 - DNA, 25 bp, Homo sapien
tacctcatgggagtgttcatcaggg

SEQ ID NO: 4754944 - DNA, 25 bp, Homo sapien
atgtgggtgtttggagactttctca

SEQ ID NO: 4754945 - DNA, 25 bp, Homo sapien
ggtgtttggagactttctcacccca

SEQ ID NO: 4754946 - DNA, 25 bp, Homo sapien
ttgtgtttggactggcatctccttc

SEQ ID NO: 4754947 - DNA, 25 bp, Homo sapien
ctagacaaagactcactgtgctcat

SEQ ID NO: 4754948 - DNA, 25 bp, Homo sapien
ttgtctagacaaagactcactgtgc

SEQ ID NO: 4754949 - DNA, 25 bp, Homo sapien
caaattgtcttgaattttgtctaga

SEQ ID NO: 4754950 - DNA, 25 bp, Homo sapien
caaccccattgtttgtggaccataa

SEQ ID NO: 4754951 - DNA, 25 bp, Homo sapien
gaatgctgtgctcaaaatcggaagc

SEQ ID NO: 4754952 - DNA, 25 bp, Homo sapien
caaaccccaactgaaattaggccag

SEQ ID NO: 4754953 - DNA, 25 bp, Homo sapien
tcatatttctaaccccgaaggcctc

SEQ ID NO: 4754954 - DNA, 25 bp, Homo sapien
tctggcaaagctaattcatggtgct

SEQ ID NO: 4754955 - DNA, 25 bp, Homo sapien
cgctgaggtcccagtttgcttggca

SEQ ID NO: 4754956 - DNA, 25 bp, Homo sapien
tcacttgtaattatggaccctgctg

SEQ ID NO: 4754957 - DNA, 25 bp, Homo sapien
gcctgcctcttgcaaattggctggg

SEQ ID NO: 4754958 - DNA, 25 bp, Homo sapien
aattgctggttacggccctggtgta

SEQ ID NO: 4754959 - DNA, 25 bp, Homo sapien
gagtacaggaagactgattggagaa

SEQ ID NO: 4754960 - DNA, 25 bp, Homo sapien
agaaggtccatctccagaattgctg

SEQ ID NO: 4754961 - DNA, 25 bp, Homo sapien
cctggtgtaatttccatcaccagca

SEQ ID NO: 4754962 - DNA, 25 bp, Homo sapien
agggcaggattgaagccagcaaagg

SEQ ID NO: 4754963 - DNA, 25 bp, Homo sapien
tgagggcaggattgaagccagcaaa

SEQ ID NO: 4754964 - DNA, 25 bp, Homo sapien
cttgagggcaggattgaagccagca

SEQ ID NO: 4754965 - DNA, 25 bp, Homo sapien
ttgagggcaggattgaagccagcaa

SEQ ID NO: 4754966 - DNA, 25 bp, Homo sapien
ccagtggcacaacggcacccgtaga

SEQ ID NO: 4754967 - DNA, 25 bp, Homo sapien
aggccaattgtactggactccaggg

SEQ ID NO: 4754968 - DNA, 25 bp, Homo sapien
cccgtagatacaggttcccagaggc

SEQ ID NO: 4754969 - DNA, 25 bp, Homo sapien
gttcccagaggccaattgtactgga

SEQ ID NO: 4754970 - DNA, 25 bp, Homo sapien
ccaggctccgagttggtgaaacaca

SEQ ID NO: 4754971 - DNA, 25 bp, Homo sapien
cccaggctccgagttggtgaaacac

SEQ ID NO: 4754972 - DNA, 25 bp, Homo sapien
gtggggaaagggcattgtcttcaca

SEQ ID NO: 4754973 - DNA, 25 bp, Homo sapien
gggaaagggcattgtcttcacattc

SEQ ID NO: 4754974 - DNA, 25 bp, Homo sapien
ctctagagccttcgagtggggaaag

SEQ ID NO: 4754975 - DNA, 25 bp, Homo sapien
ctactctagagccttcgagtgggga

SEQ ID NO: 4754976 - DNA, 25 bp, Homo sapien
cagtttaagcctagctatttgtgga

SEQ ID NO: 4754977 - DNA, 25 bp, Homo sapien
ttgatgggtcatacttttaggtggg

SEQ ID NO: 4754978 - DNA, 25 bp, Homo sapien
gcctagctatttgtggatccacatg

SEQ ID NO: 4754979 - DNA, 25 bp, Homo sapien
gggcactagcaagcagtttaagcct

SEQ ID NO: 4754980 - DNA, 25 bp, Homo sapien
tccagaagtcagttgttgtctcttc

SEQ ID NO: 4754981 - DNA, 25 bp, Homo sapien
tcttaaaggttcatgcatttctaaa

SEQ ID NO: 4754982 - DNA, 25 bp, Homo sapien
tctcccatttcccatattcttaaag

SEQ ID NO: 4754983 - DNA, 25 bp, Homo sapien
ggatttgtggttcaatccaccatct

SEQ ID NO: 4754984 - DNA, 25 bp, Homo sapien
tgtgttcttaatcccagctcagtag

SEQ ID NO: 4754985 - DNA, 25 bp, Homo sapien
aaatcatgctcccattcctggtata

SEQ ID NO: 4754986 - DNA, 25 bp, Homo sapien
gatgaaaggattaaggcagtgtgtt

SEQ ID NO: 4754987 - DNA, 25 bp, Homo sapien
gagctacaagttgaacccaggtggt

SEQ ID NO: 4754988 - DNA, 25 bp, Homo sapien
ttaggtcattgaggcatcccgcaac

SEQ ID NO: 4754989 - DNA, 25 bp, Homo sapien
gaggcatcccgcaacgtctggtagt

SEQ ID NO: 4754990 - DNA, 25 bp, Homo sapien
aacgtctggtagtagagtttcttca

SEQ ID NO: 4754991 - DNA, 25 bp, Homo sapien
tcattatcaccaattgtttgggcct

SEQ ID NO: 4754992 - DNA, 25 bp, Homo sapien
gaaatgccaaagtcatggttgttgg

SEQ ID NO: 4754993 - DNA, 25 bp, Homo sapien
cgatgctgcccattctcactgcaat

SEQ ID NO: 4754994 - DNA, 25 bp, Homo sapien
acgatgctgcccattctcactgcaa

SEQ ID NO: 4754995 - DNA, 25 bp, Homo sapien
gccaaagtcatggttgttggtagca

SEQ ID NO: 4754996 - DNA, 25 bp, Homo sapien
tcagcaaattgaaggtcccatagtc

SEQ ID NO: 4754997 - DNA, 25 bp, Homo sapien
agtcatcatatgagctagccccagg

SEQ ID NO: 4754998 - DNA, 25 bp, Homo sapien
tgaggccattacttcctcctgggaa

SEQ ID NO: 4754999 - DNA, 25 bp, Homo sapien
tctcccaaagagtgtagaagcttgt

SEQ ID NO: 4755000 - DNA, 25 bp, Homo sapien
tggaagcatccaacattcttatagc

SEQ ID NO: 4755001 - DNA, 25 bp, Homo sapien
tatagctgatagttctcatggaaag

SEQ ID NO: 4755002 - DNA, 25 bp, Homo sapien
gatgatctgattggtcaagcctggg

SEQ ID NO: 4755003 - DNA, 25 bp, Homo sapien
ggaccaatcactgtggcaaagggtt

SEQ ID NO: 4755004 - DNA, 25 bp, Homo sapien
tgctagaagcatgggcatagaggtc

SEQ ID NO: 4755005 - DNA, 25 bp, Homo sapien
cctgtagtttcgtagaaggattcta

SEQ ID NO: 4755006 - DNA, 25 bp, Homo sapien
catagaggtccaggtacttttctcg

SEQ ID NO: 4755007 - DNA, 25 bp, Homo sapien
tattttaggaggctggctgctagaa

SEQ ID NO: 4755008 - DNA, 25 bp, Homo sapien
tctagtagatcccagagatgactgt

SEQ ID NO: 4755009 - DNA, 25 bp, Homo sapien
tacataattgaggatgcagttccac

SEQ ID NO: 4755010 - DNA, 25 bp, Homo sapien
tcttctctccacgatagaaatctgt

SEQ ID NO: 4755011 - DNA, 25 bp, Homo sapien
tccaggctgctttgattatctagta

SEQ ID NO: 4755012 - DNA, 25 bp, Homo sapien
gatgggcccagcactaaaagcacaa

SEQ ID NO: 4755013 - DNA, 25 bp, Homo sapien
cattgtttctaagtggcgtggccaa

SEQ ID NO: 4755014 - DNA, 25 bp, Homo sapien
tagcaactggtatcaaggaggtcca

SEQ ID NO: 4755015 - DNA, 25 bp, Homo sapien
tgagttcagggactagacttcagcc

SEQ ID NO: 4755016 - DNA, 25 bp, Homo sapien
tcacccacaccacttgcaagttagt

SEQ ID NO: 4755017 - DNA, 25 bp, Homo sapien
cagttgttacataagagtcaaatgt

SEQ ID NO: 4755018 - DNA, 25 bp, Homo sapien
tgtgttttaagctaacagttgttac

SEQ ID NO: 4755019 - DNA, 25 bp, Homo sapien
attttatacagtaccgtacagtgtg

SEQ ID NO: 4755020 - DNA, 25 bp, Homo sapien
tccaaggtctccacggagtgagaag

SEQ ID NO: 4755021 - DNA, 25 bp, Homo sapien
ctcgactccaaggtctccacggagt

SEQ ID NO: 4755022 - DNA, 25 bp, Homo sapien
ccaaggtctccccacagttgtaaga

SEQ ID NO: 4755023 - DNA, 25 bp, Homo sapien
tcatcctcgactccaaggtctccac

SEQ ID NO: 4755024 - DNA, 25 bp, Homo sapien
caacagttacattgagactttcaca

SEQ ID NO: 4755025 - DNA, 25 bp, Homo sapien
cattgagactttcacacattaagga

SEQ ID NO: 4755026 - DNA, 25 bp, Homo sapien
gatgaatcatgaaatggtcctctgg

SEQ ID NO: 4755027 - DNA, 25 bp, Homo sapien
gaaatagagagcaggtaatcaacag

SEQ ID NO: 4755028 - DNA, 25 bp, Homo sapien
gaacccttgtcttgtatagcaccta

SEQ ID NO: 4755029 - DNA, 25 bp, Homo sapien
ggatctctactccacacacatgaag

SEQ ID NO: 4755030 - DNA, 25 bp, Homo sapien
tacatattagatcctgcaacgcctt

SEQ ID NO: 4755031 - DNA, 25 bp, Homo sapien
tgtctcgtggagcacaaatgccttg

SEQ ID NO: 4755032 - DNA, 25 bp, Homo sapien
ttctggagaatacggctccatgttt

SEQ ID NO: 4755033 - DNA, 25 bp, Homo sapien
gcttctggagaatacggctccatgt

SEQ ID NO: 4755034 - DNA, 25 bp, Homo sapien
ctggagaatacggctccatgttttt

SEQ ID NO: 4755035 - DNA, 25 bp, Homo sapien
agcttctggagaatacggctccatg

SEQ ID NO: 4755036 - DNA, 25 bp, Homo sapien
tattcaaacgaggaatgccacataa

SEQ ID NO: 4755037 - DNA, 25 bp, Homo sapien
catgtttatctatacgatgctcaaa

SEQ ID NO: 4755038 - DNA, 25 bp, Homo sapien
aaattactatttgtggccctcccat

SEQ ID NO: 4755039 - DNA, 25 bp, Homo sapien
cacaaatcacttccctctggcatat

SEQ ID NO: 4755040 - DNA, 25 bp, Homo sapien
gtgggtagggcaaagtcagcattct

SEQ ID NO: 4755041 - DNA, 25 bp, Homo sapien
ggattgctaaaagtgcttgctgtct

SEQ ID NO: 4755042 - DNA, 25 bp, Homo sapien
tcatctagagcagagtgagcccttg

SEQ ID NO: 4755043 - DNA, 25 bp, Homo sapien
tgacgtttttgtaactccaagtgag

SEQ ID NO: 4755044 - DNA, 25 bp, Homo sapien
gccacgtggtgctgtttcctaagga

SEQ ID NO: 4755045 - DNA, 25 bp, Homo sapien
tgctgcagcaaggatctaacagggc

SEQ ID NO: 4755046 - DNA, 25 bp, Homo sapien
taatctaaattggagccagggccga

SEQ ID NO: 4755047 - DNA, 25 bp, Homo sapien
taacagggcttacaaagttctgcac

SEQ ID NO: 4755048 - DNA, 25 bp, Homo sapien
acagaatgagcagtccacgtgggtg

SEQ ID NO: 4755049 - DNA, 25 bp, Homo sapien
cacgtgggtgggctataagcaatga

SEQ ID NO: 4755050 - DNA, 25 bp, Homo sapien
ttcacagaatgagcagtccacgtgg

SEQ ID NO: 4755051 - DNA, 25 bp, Homo sapien
aatgatggggtgcattttctgtaga

SEQ ID NO: 4755052 - DNA, 25 bp, Homo sapien
tggctaaacatggtagaatgtaata

SEQ ID NO: 4755053 - DNA, 25 bp, Homo sapien
ttctatcattcttcaaacataaaga

SEQ ID NO: 4755054 - DNA, 25 bp, Homo sapien
ttaattggctaaacatggtagaatg

SEQ ID NO: 4755055 - DNA, 25 bp, Homo sapien
aaacctgtttaattggctaaacatg

SEQ ID NO: 4755056 - DNA, 25 bp, Homo sapien
tggcccaaaggcagaccagatgctc

SEQ ID NO: 4755057 - DNA, 25 bp, Homo sapien
gaagagatttagcattggcccaaag

SEQ ID NO: 4755058 - DNA, 25 bp, Homo sapien
gaacagttgtttccagccaccttgc

SEQ ID NO: 4755059 - DNA, 25 bp, Homo sapien
catttggcctcaatagtgatgcact

SEQ ID NO: 4755060 - DNA, 25 bp, Homo sapien
caagatcaagatgtcggtagggttg

SEQ ID NO: 4755061 - DNA, 25 bp, Homo sapien
ttctgaaatttctctccttggcttg

SEQ ID NO: 4755062 - DNA, 25 bp, Homo sapien
ggctgccttcttgcttcacatggcc

SEQ ID NO: 4755063 - DNA, 25 bp, Homo sapien
aggtctggcagcttaaagtccaaga

SEQ ID NO: 4755064 - DNA, 25 bp, Homo sapien
tattttgaggtatctcacatgaaca

SEQ ID NO: 4755065 - DNA, 25 bp, Homo sapien
ttttgaggtatctcacatgaacacc

SEQ ID NO: 4755066 - DNA, 25 bp, Homo sapien
ttattttgaggtatctcacatgaac

SEQ ID NO: 4755067 - DNA, 25 bp, Homo sapien
attttgaggtatctcacatgaacac

SEQ ID NO: 4755068 - DNA, 25 bp, Homo sapien
tgtggctgttacttgatgtagtttc

SEQ ID NO: 4755069 - DNA, 25 bp, Homo sapien
gttattgtggctgttacttgatgta

SEQ ID NO: 4755070 - DNA, 25 bp, Homo sapien
caatttggtacgtatttgcagtagc

SEQ ID NO: 4755071 - DNA, 25 bp, Homo sapien
tattgtggctgttacttgatgtagt

SEQ ID NO: 4755072 - DNA, 25 bp, Homo sapien
tattttcataactagcctagtattt

SEQ ID NO: 4755073 - DNA, 25 bp, Homo sapien
attttcataactagcctagtatttg

SEQ ID NO: 4755074 - DNA, 25 bp, Homo sapien
ttattttcataactagcctagtatt

SEQ ID NO: 4755075 - DNA, 25 bp, Homo sapien
gcccctgcctaactgtctctcctat

SEQ ID NO: 4755076 - DNA, 25 bp, Homo sapien
tatcttgtcaaatattgcccctgcc

SEQ ID NO: 4755077 - DNA, 25 bp, Homo sapien
tagttattctgcttgggtttcatta

SEQ ID NO: 4755078 - DNA, 25 bp, Homo sapien
tctttaatctttgagctgagatctt

SEQ ID NO: 4755079 - DNA, 25 bp, Homo sapien
catgaagctgtgtaatgcttatcac

SEQ ID NO: 4755080 - DNA, 25 bp, Homo sapien
tactcatgaagctgtgtaatgctta

SEQ ID NO: 4755081 - DNA, 25 bp, Homo sapien
tatactcatgaagctgtgtaatgct

SEQ ID NO: 4755082 - DNA, 25 bp, Homo sapien
ctcatgaagctgtgtaatgcttatc

SEQ ID NO: 4755083 - DNA, 25 bp, Homo sapien
ggtatatcattttccaatctttcag

SEQ ID NO: 4755084 - DNA, 25 bp, Homo sapien
gatattattgtagccactccagttc

SEQ ID NO: 4755085 - DNA, 25 bp, Homo sapien
ctaccatttgatcagagtgttaaca

SEQ ID NO: 4755086 - DNA, 25 bp, Homo sapien
caattcattctaccagtctctacca

SEQ ID NO: 4755087 - DNA, 25 bp, Homo sapien
tcttagccaaaacactgagaggtga

SEQ ID NO: 4755088 - DNA, 25 bp, Homo sapien
tactgcaatacctggagtggacaga

SEQ ID NO: 4755089 - DNA, 25 bp, Homo sapien
aacccatttaatatagtatcctcag

SEQ ID NO: 4755090 - DNA, 25 bp, Homo sapien
agtggacagagtaagctcctatccc

SEQ ID NO: 4755091 - DNA, 25 bp, Homo sapien
gttataagcccattgacacagtttt

SEQ ID NO: 4755092 - DNA, 25 bp, Homo sapien
tattctatcatgaatatggcacctt

SEQ ID NO: 4755093 - DNA, 25 bp, Homo sapien
aataacttgacttaagataatctag

SEQ ID NO: 4755094 - DNA, 25 bp, Homo sapien
gctttatgcagttggttgtctttta

SEQ ID NO: 4755095 - DNA, 25 bp, Homo sapien
tagggagctccaaatctgttctgta

SEQ ID NO: 4755096 - DNA, 25 bp, Homo sapien
caatcaggttaaataaaggcaagcc

SEQ ID NO: 4755097 - DNA, 25 bp, Homo sapien
tcatgaagagcctaaaggtcagcca

SEQ ID NO: 4755098 - DNA, 25 bp, Homo sapien
tgctctagcgggaagtttacaactt

SEQ ID NO: 4755099 - DNA, 25 bp, Homo sapien
tcatatgtagcaattccaagggagc

SEQ ID NO: 4755100 - DNA, 25 bp, Homo sapien
tgtgaagacatagcgttcctcccct

SEQ ID NO: 4755101 - DNA, 25 bp, Homo sapien
taaaagaggtttcacgcagcattcg

SEQ ID NO: 4755102 - DNA, 25 bp, Homo sapien
gaagatgcagcccttgttagacaag

SEQ ID NO: 4755103 - DNA, 25 bp, Homo sapien
acattacctaatcttaggtattttg

SEQ ID NO: 4755104 - DNA, 25 bp, Homo sapien
cacaagaatagtgagtacagtacag

SEQ ID NO: 4755105 - DNA, 25 bp, Homo sapien
tatccttagaaagtcaatagtagcc

SEQ ID NO: 4755106 - DNA, 25 bp, Homo sapien
gcctaacgctactttacaatgcctg

SEQ ID NO: 4755107 - DNA, 25 bp, Homo sapien
tcatccaggatcacccaaatcagat

SEQ ID NO: 4755108 - DNA, 25 bp, Homo sapien
tccaggttagtgagaaaatgtcttc

SEQ ID NO: 4755109 - DNA, 25 bp, Homo sapien
tcagacatgtaggaatgctatccag

SEQ ID NO: 4755110 - DNA, 25 bp, Homo sapien
tataagccaagagtaactatccagg

SEQ ID NO: 4755111 - DNA, 25 bp, Homo sapien
taactatctgaggaattagctccag

SEQ ID NO: 4755112 - DNA, 25 bp, Homo sapien
gggtctttcgtatctctatctcttt

SEQ ID NO: 4755113 - DNA, 25 bp, Homo sapien
agggtctttcgtatctctatctctt

SEQ ID NO: 4755114 - DNA, 25 bp, Homo sapien
gtctttcgtatctctatctctttca

SEQ ID NO: 4755115 - DNA, 25 bp, Homo sapien
aagggtctttcgtatctctatctct

SEQ ID NO: 4755116 - DNA, 25 bp, Homo sapien
tgttggtgtttgcttgggctgccat

SEQ ID NO: 4755117 - DNA, 25 bp, Homo sapien
ggcaaatgttggtgtttgcttgggc

SEQ ID NO: 4755118 - DNA, 25 bp, Homo sapien
aatttctgcatgaaataatgagaca

SEQ ID NO: 4755119 - DNA, 25 bp, Homo sapien
tttctgcatgaaataatgagacata

SEQ ID NO: 4755120 - DNA, 25 bp, Homo sapien
gtgcccacatggcctttcttggtgt

SEQ ID NO: 4755121 - DNA, 25 bp, Homo sapien
gcccacatggcctttcttggtgtgt

SEQ ID NO: 4755122 - DNA, 25 bp, Homo sapien
tgcccacatggcctttcttggtgtg

SEQ ID NO: 4755123 - DNA, 25 bp, Homo sapien
ccacatggcctttcttggtgtgtgc

SEQ ID NO: 4755124 - DNA, 25 bp, Homo sapien
agtcaaattccagagggccattact

SEQ ID NO: 4755125 - DNA, 25 bp, Homo sapien
gggccattactggtgcatctcttgc

SEQ ID NO: 4755126 - DNA, 25 bp, Homo sapien
tccagagggccattactggtgcatc

SEQ ID NO: 4755127 - DNA, 25 bp, Homo sapien
cattactggtgcatctcttgctgat

SEQ ID NO: 4755128 - DNA, 25 bp, Homo sapien
gtgtatggacaaaaagcacgcctct

SEQ ID NO: 4755129 - DNA, 25 bp, Homo sapien
tactacatgtacattgaggcctccc

SEQ ID NO: 4755130 - DNA, 25 bp, Homo sapien
ctttttctaccacatgtatggaggg

SEQ ID NO: 4755131 - DNA, 25 bp, Homo sapien
gcttttgcattcacctcaaggctac

SEQ ID NO: 4755132 - DNA, 25 bp, Homo sapien
gagagacttgatcctcagtcctggg

SEQ ID NO: 4755133 - DNA, 25 bp, Homo sapien
ctctatttaacagtgagcatggtcc

SEQ ID NO: 4755134 - DNA, 25 bp, Homo sapien
tattacctaattagttgcagctgca

SEQ ID NO: 4755135 - DNA, 25 bp, Homo sapien
gattaaatctaagcagtgacaggga

SEQ ID NO: 4755136 - DNA, 25 bp, Homo sapien
ctcacactctgagggctaagacctg

SEQ ID NO: 4755137 - DNA, 25 bp, Homo sapien
tctagggagagcagtggaaagcagc

SEQ ID NO: 4755138 - DNA, 25 bp, Homo sapien
gtccctgatgccttcatgtcttctc

SEQ ID NO: 4755139 - DNA, 25 bp, Homo sapien
acttcttggtctcatgccagggact

SEQ ID NO: 4755140 - DNA, 25 bp, Homo sapien
tgaaacgtaactgtaaaagtgtgta

SEQ ID NO: 4755141 - DNA, 25 bp, Homo sapien
cctctgccagagaggtaagcacgtt

SEQ ID NO: 4755142 - DNA, 25 bp, Homo sapien
tagaaactgtgtactactccccaat

SEQ ID NO: 4755143 - DNA, 25 bp, Homo sapien
catgtaacattgatacagcatgaga

SEQ ID NO: 4755144 - DNA, 25 bp, Homo sapien
attgcagctgtatgccatgggactc

SEQ ID NO: 4755145 - DNA, 25 bp, Homo sapien
atcgccacattcttcgcaaggctca

SEQ ID NO: 4755146 - DNA, 25 bp, Homo sapien
ggcagacattgcagctgtatgccat

SEQ ID NO: 4755147 - DNA, 25 bp, Homo sapien
tcgccacattcttcgcaaggctcag

SEQ ID NO: 4755148 - DNA, 25 bp, Homo sapien
gccacggctccagtttcttgtagat

SEQ ID NO: 4755149 - DNA, 25 bp, Homo sapien
ccagggatgcaaccttggcaggctc

SEQ ID NO: 4755150 - DNA, 25 bp, Homo sapien
aagaagttctagacaggcctcggtg

SEQ ID NO: 4755151 - DNA, 25 bp, Homo sapien
tcttaatgaaggcagcgcattccag

SEQ ID NO: 4755152 - DNA, 25 bp, Homo sapien
cacacatgactgaggctcgggaagc

SEQ ID NO: 4755153 - DNA, 25 bp, Homo sapien
cgagtttgagaacgcctagcacgat

SEQ ID NO: 4755154 - DNA, 25 bp, Homo sapien
cggagcgtcgggcacagagtcattt

SEQ ID NO: 4755155 - DNA, 25 bp, Homo sapien
tagcacgatgccttaacggagcgtc

SEQ ID NO: 4755156 - DNA, 25 bp, Homo sapien
tactgctaatagtttgatgaatctc

SEQ ID NO: 4755157 - DNA, 25 bp, Homo sapien
aaggacttggtacttctgtcaccat

SEQ ID NO: 4755158 - DNA, 25 bp, Homo sapien
gagcttggatattctcaattggcca

SEQ ID NO: 4755159 - DNA, 25 bp, Homo sapien
gatgaatctcatgtatgacaaggac

SEQ ID NO: 4755160 - DNA, 25 bp, Homo sapien
ggtgcgtgatacgttcctagaaaca

SEQ ID NO: 4755161 - DNA, 25 bp, Homo sapien
gaaacataaagttaatgtcattatt

SEQ ID NO: 4755162 - DNA, 25 bp, Homo sapien
aagaaatggaggtgcgtgatacgtt

SEQ ID NO: 4755163 - DNA, 25 bp, Homo sapien
tggaggtgcgtgatacgttcctaga

SEQ ID NO: 4755164 - DNA, 25 bp, Homo sapien
ttatcttctcgcttagtcgcccagg

SEQ ID NO: 4755165 - DNA, 25 bp, Homo sapien
aattactgacaaaggtgtattacac

SEQ ID NO: 4755166 - DNA, 25 bp, Homo sapien
gtattacactattcctctatgcaga

SEQ ID NO: 4755167 - DNA, 25 bp, Homo sapien
tgtcctgtcaattttcgccttatgt

SEQ ID NO: 4755168 - DNA, 25 bp, Homo sapien
tatacacccttttgaaggagggcaa

SEQ ID NO: 4755169 - DNA, 25 bp, Homo sapien
ttaggtacaagaggattcatagtgg

SEQ ID NO: 4755170 - DNA, 25 bp, Homo sapien
taggacttccaagatataaagagag

SEQ ID NO: 4755171 - DNA, 25 bp, Homo sapien
gactatggcttctaaccttcggtgg

SEQ ID NO: 4755172 - DNA, 25 bp, Homo sapien
cttctgattacccactaccatttga

SEQ ID NO: 4755173 - DNA, 25 bp, Homo sapien
ctatgttagtaacttctgattaccc

SEQ ID NO: 4755174 - DNA, 25 bp, Homo sapien
tgacactatgttagtaacttctgat

SEQ ID NO: 4755175 - DNA, 25 bp, Homo sapien
actttaatgacactatgttagtaac

SEQ ID NO: 4755176 - DNA, 25 bp, Homo sapien
ttggaaccatctgccagcaaaacta

SEQ ID NO: 4755177 - DNA, 25 bp, Homo sapien
taaatatcggaatgaactcacaatg

SEQ ID NO: 4755178 - DNA, 25 bp, Homo sapien
cactgtaatgattctaagggcaaaa

SEQ ID NO: 4755179 - DNA, 25 bp, Homo sapien
tagcaacatagcctaacagagaaaa

SEQ ID NO: 4755180 - DNA, 25 bp, Homo sapien
catatacaaatgagtcacagactta

SEQ ID NO: 4755181 - DNA, 25 bp, Homo sapien
caattgcatagtcatatgtaaaaaa

SEQ ID NO: 4755182 - DNA, 25 bp, Homo sapien
aaagagtaatctttgtaacaaacag

SEQ ID NO: 4755183 - DNA, 25 bp, Homo sapien
tacccttacctcgtatcatatacaa

SEQ ID NO: 4755184 - DNA, 25 bp, Homo sapien
cacttcaggagctaaatagatgtcc

SEQ ID NO: 4755185 - DNA, 25 bp, Homo sapien
tcgaagtagtactcaactgcatgaa

SEQ ID NO: 4755186 - DNA, 25 bp, Homo sapien
aagaagtgtttctaccatgttatac

SEQ ID NO: 4755187 - DNA, 25 bp, Homo sapien
tgatgaaatcaatcaggtatggtga

SEQ ID NO: 4755188 - DNA, 25 bp, Homo sapien
taaactaactccagtgcatgaagtg

SEQ ID NO: 4755189 - DNA, 25 bp, Homo sapien
ttgaacagtggattggatctgtgcc

SEQ ID NO: 4755190 - DNA, 25 bp, Homo sapien
ttaactaggtcaaaaaataatgagc

SEQ ID NO: 4755191 - DNA, 25 bp, Homo sapien
ggaaaatagacagtccaaagtcatg

SEQ ID NO: 4755192 - DNA, 25 bp, Homo sapien
tggtttgcctggaaagagtctctgt

SEQ ID NO: 4755193 - DNA, 25 bp, Homo sapien
tctttgaggtataaacctttagatg

SEQ ID NO: 4755194 - DNA, 25 bp, Homo sapien
gaggtataaacctttagatgtgaaa

SEQ ID NO: 4755195 - DNA, 25 bp, Homo sapien
ttggtttgcctggaaagagtctctg

SEQ ID NO: 4755196 - DNA, 25 bp, Homo sapien
gagctggcactgtagcttatgcctg

SEQ ID NO: 4755197 - DNA, 25 bp, Homo sapien
agctggcactgtagcttatgcctgt

SEQ ID NO: 4755198 - DNA, 25 bp, Homo sapien
atacacacgatgacagtcataaatc

SEQ ID NO: 4755199 - DNA, 25 bp, Homo sapien
tgcatggttgcatacacacgatgac

SEQ ID NO: 4755200 - DNA, 25 bp, Homo sapien
tacacacgatgacagtcataaatct

SEQ ID NO: 4755201 - DNA, 25 bp, Homo sapien
actgcatggttgcatacacacgatg

SEQ ID NO: 4755202 - DNA, 25 bp, Homo sapien
aaaggccgatgaacctgtcagaggg

SEQ ID NO: 4755203 - DNA, 25 bp, Homo sapien
cattaatctggaatcatggcgcacc

SEQ ID NO: 4755204 - DNA, 25 bp, Homo sapien
cgcggactttgctggttgactgttc

SEQ ID NO: 4755205 - DNA, 25 bp, Homo sapien
tcagtgagcacgacaaaaggccgat

SEQ ID NO: 4755206 - DNA, 25 bp, Homo sapien
tctgaatcagaaacgagtatgggtc

SEQ ID NO: 4755207 - DNA, 25 bp, Homo sapien
gacagcaagcataaagggcccagaa

SEQ ID NO: 4755208 - DNA, 25 bp, Homo sapien
tggagctaaaccttaaagccagggc

SEQ ID NO: 4755209 - DNA, 25 bp, Homo sapien
tcagagacgggttcagagagttgcc

SEQ ID NO: 4755210 - DNA, 25 bp, Homo sapien
aagcgttggccagcgcctttttcga

SEQ ID NO: 4755211 - DNA, 25 bp, Homo sapien
ccacgtgcagggaaagggccgttca

SEQ ID NO: 4755212 - DNA, 25 bp, Homo sapien
acacagcggacagcggaactgcttt

SEQ ID NO: 4755213 - DNA, 25 bp, Homo sapien
tcgtctgagcgggagaactttttaa

SEQ ID NO: 4755214 - DNA, 25 bp, Homo sapien
aaattccgaagggcggtcatggtca

SEQ ID NO: 4755215 - DNA, 25 bp, Homo sapien
ctggaacgagcatttctccctgagc

SEQ ID NO: 4755216 - DNA, 25 bp, Homo sapien
gctccccaccccacaagatgaaggc

SEQ ID NO: 4755217 - DNA, 25 bp, Homo sapien
cccaccccacaagatgaaggcaggg

SEQ ID NO: 4755218 - DNA, 25 bp, Homo sapien
accccacaagatgaaggcaggggag

SEQ ID NO: 4755219 - DNA, 25 bp, Homo sapien
tccccaccccacaagatgaaggcag

SEQ ID NO: 4755220 - DNA, 25 bp, Homo sapien
aagatgagaaccacacttgttccac

SEQ ID NO: 4755221 - DNA, 25 bp, Homo sapien
caggcagacaagcagacgagctgtt

SEQ ID NO: 4755222 - DNA, 25 bp, Homo sapien
gaaccacacttgttccacttataag

SEQ ID NO: 4755223 - DNA, 25 bp, Homo sapien
agcagacgagctgttgaagatgaga

SEQ ID NO: 4755224 - DNA, 25 bp, Homo sapien
gaggagtgaatattttctcactcct

SEQ ID NO: 4755225 - DNA, 25 bp, Homo sapien
tcctggtttccgcagaactctccag

SEQ ID NO: 4755226 - DNA, 25 bp, Homo sapien
gtttccgcagaactctccagacact

SEQ ID NO: 4755227 - DNA, 25 bp, Homo sapien
gacaatagctgctgcatagacagag

SEQ ID NO: 4755228 - DNA, 25 bp, Homo sapien
taaacccttatggagctctgagctg

SEQ ID NO: 4755229 - DNA, 25 bp, Homo sapien
cccaatgtgggtaaaacgaatctgt

SEQ ID NO: 4755230 - DNA, 25 bp, Homo sapien
tagcagttgattctctatgtgcaga

SEQ ID NO: 4755231 - DNA, 25 bp, Homo sapien
tgtgcagatctacgtataaaccctt

SEQ ID NO: 4755232 - DNA, 25 bp, Homo sapien
cccacccaagtccagggatgggtct

SEQ ID NO: 4755233 - DNA, 25 bp, Homo sapien
cctgccccacccaagtccagggatg

SEQ ID NO: 4755234 - DNA, 25 bp, Homo sapien
cacccaagtccagggatgggtctaa

SEQ ID NO: 4755235 - DNA, 25 bp, Homo sapien
tgccccacccaagtccagggatggg

SEQ ID NO: 4755236 - DNA, 25 bp, Homo sapien
aatatattcaatctcacaagtaatc

SEQ ID NO: 4755237 - DNA, 25 bp, Homo sapien
tatattcaatctcacaagtaatcaa

SEQ ID NO: 4755238 - DNA, 25 bp, Homo sapien
tactaatgaccaagaaataaatacg

SEQ ID NO: 4755239 - DNA, 25 bp, Homo sapien
atcaaaacatgccaattaagacacc

SEQ ID NO: 4755240 - DNA, 25 bp, Homo sapien
acacttgtaaacacctgtaatccag

SEQ ID NO: 4755241 - DNA, 25 bp, Homo sapien
ggctcacacttgtaaacacctgtaa

SEQ ID NO: 4755242 - DNA, 25 bp, Homo sapien
tcacacttgtaaacacctgtaatcc

SEQ ID NO: 4755243 - DNA, 25 bp, Homo sapien
gctcacacttgtaaacacctgtaat

SEQ ID NO: 4755244 - DNA, 25 bp, Homo sapien
aatttacgctcttcagtgggcgctg

SEQ ID NO: 4755245 - DNA, 25 bp, Homo sapien
cctttgtaccaattactaggcacta

SEQ ID NO: 4755246 - DNA, 25 bp, Homo sapien
tactaggcactaatttacgctcttc

SEQ ID NO: 4755247 - DNA, 25 bp, Homo sapien
gaaacagaaagtgcctttgtaccaa

SEQ ID NO: 4755248 - DNA, 25 bp, Homo sapien
gaagactgggaaatcatccgcccac

SEQ ID NO: 4755249 - DNA, 25 bp, Homo sapien
tagtccttgggataagcgtcaacaa

SEQ ID NO: 4755250 - DNA, 25 bp, Homo sapien
gtgtcaccatccaagtggcactgta

SEQ ID NO: 4755251 - DNA, 25 bp, Homo sapien
tagaaagcaggctccaactagagca

SEQ ID NO: 4755252 - DNA, 25 bp, Homo sapien
tcaagggaaacagtgtgcgtactct

SEQ ID NO: 4755253 - DNA, 25 bp, Homo sapien
gcgtactctgtaatttgactccact

SEQ ID NO: 4755254 - DNA, 25 bp, Homo sapien
tctatcgtgaaactgtaatcttgcc

SEQ ID NO: 4755255 - DNA, 25 bp, Homo sapien
agaagattctcagaggccccccgac

SEQ ID NO: 4755256 - DNA, 25 bp, Homo sapien
tgtacatctatgttggatgaagcaa

SEQ ID NO: 4755257 - DNA, 25 bp, Homo sapien
ggcctagttgtacatctatgttgga

SEQ ID NO: 4755258 - DNA, 25 bp, Homo sapien
atctatgttggatgaagcaagttgg

SEQ ID NO: 4755259 - DNA, 25 bp, Homo sapien
cccactcaggcctagttgtacatct

SEQ ID NO: 4755260 - DNA, 25 bp, Homo sapien
ccgatgacatcagactctccttgac

SEQ ID NO: 4755261 - DNA, 25 bp, Homo sapien
ctcccaggcaatgaagtgagttttt

SEQ ID NO: 4755262 - DNA, 25 bp, Homo sapien
caacatgtttgcaccctttcggccg

SEQ ID NO: 4755263 - DNA, 25 bp, Homo sapien
tcggccgagtgcagtgtcccgaacg

SEQ ID NO: 4755264 - DNA, 25 bp, Homo sapien
accctttcggccgagtgcagtgtcc

SEQ ID NO: 4755265 - DNA, 25 bp, Homo sapien
gttaaaccgcatcttatccaacatg

SEQ ID NO: 4755266 - DNA, 25 bp, Homo sapien
ccgcagcgcggttcgaaatggaaac

SEQ ID NO: 4755267 - DNA, 25 bp, Homo sapien
caacaagctcttggcgatggtgacc

SEQ ID NO: 4755268 - DNA, 25 bp, Homo sapien
gaccagtgtgcagtaatccttccag

SEQ ID NO: 4755269 - DNA, 25 bp, Homo sapien
ggaaggactcgacccagattcggtg

SEQ ID NO: 4755270 - DNA, 25 bp, Homo sapien
gtgcgggcgacggcagcccaggcgg

SEQ ID NO: 4755271 - DNA, 25 bp, Homo sapien
cggtggctgcggaggttcggctcgc

SEQ ID NO: 4755272 - DNA, 25 bp, Homo sapien
cggcgcggacaaacttggcggtggc

SEQ ID NO: 4755273 - DNA, 25 bp, Homo sapien
gcggaggttcggctcgccctgccct

SEQ ID NO: 4755274 - DNA, 25 bp, Homo sapien
cggcgcggcgcggcacggcgcggcg

SEQ ID NO: 4755275 - DNA, 25 bp, Homo sapien
ctcggacgacgagcgcggcgcggcg

SEQ ID NO: 4755276 - DNA, 25 bp, Homo sapien
cgcggcacggcgcggcggccaaggg

SEQ ID NO: 4755277 - DNA, 25 bp, Homo sapien
ggcgcggcacggcgcggcggccaag

SEQ ID NO: 4755278 - DNA, 25 bp, Homo sapien
gcccctcatctttacgtaaccggca

SEQ ID NO: 4755279 - DNA, 25 bp, Homo sapien
agcgcctccgcacgcagcatccacg

SEQ ID NO: 4755280 - DNA, 25 bp, Homo sapien
tcgcaggagcgccgaggcgacctca

SEQ ID NO: 4755281 - DNA, 25 bp, Homo sapien
atctttacgtaaccggcagcgcctc

SEQ ID NO: 4755282 - DNA, 25 bp, Homo sapien
ctctgagccggctcccttggaaaga

SEQ ID NO: 4755283 - DNA, 25 bp, Homo sapien
tgagccggctcccttggaaagatgc

SEQ ID NO: 4755284 - DNA, 25 bp, Homo sapien
agccggctcccttggaaagatgcca

SEQ ID NO: 4755285 - DNA, 25 bp, Homo sapien
ccgcgatcccccgacgggcgcgccg

SEQ ID NO: 4755286 - DNA, 25 bp, Homo sapien
gtctagaactgaggcgtgcggccaa

SEQ ID NO: 4755287 - DNA, 25 bp, Homo sapien
taagtgacttcctgcaaacgctaca

SEQ ID NO: 4755288 - DNA, 25 bp, Homo sapien
tcacaagggcgttccgaaagcaagc

SEQ ID NO: 4755289 - DNA, 25 bp, Homo sapien
gaaactgcaagagaggtgcacgccc

SEQ ID NO: 4755290 - DNA, 25 bp, Homo sapien
aacactgcagagtagggtgtcgaga

SEQ ID NO: 4755291 - DNA, 25 bp, Homo sapien
gaagaggaaaacctgccctgcggtc

SEQ ID NO: 4755292 - DNA, 25 bp, Homo sapien
aattgcgctcccagagtttgccggc

SEQ ID NO: 4755293 - DNA, 25 bp, Homo sapien
tttgccggcagatctctcccgcgat

SEQ ID NO: 4755294 - DNA, 25 bp, Homo sapien
ctcgcataacctcgcgcgggcaggc

SEQ ID NO: 4755295 - DNA, 25 bp, Homo sapien
gcataacctcgcgcgggcaggcacc

SEQ ID NO: 4755296 - DNA, 25 bp, Homo sapien
ataacctcgcgcgggcaggcaccgg

SEQ ID NO: 4755297 - DNA, 25 bp, Homo sapien
tcgcataacctcgcgcgggcaggca

SEQ ID NO: 4755298 - DNA, 25 bp, Homo sapien
tgcttctctggtattagcccttgag

SEQ ID NO: 4755299 - DNA, 25 bp, Homo sapien
tgtcccagtgctccattttttcaga

SEQ ID NO: 4755300 - DNA, 25 bp, Homo sapien
gagcttgttcaacttgtgtgtccac

SEQ ID NO: 4755301 - DNA, 25 bp, Homo sapien
tctgtggcttcccactgcatgtaag

SEQ ID NO: 4755302 - DNA, 25 bp, Homo sapien
tgtcaaggtttacaagggtcagtgt

SEQ ID NO: 4755303 - DNA, 25 bp, Homo sapien
ttggaatcccttgctaattgactca

SEQ ID NO: 4755304 - DNA, 25 bp, Homo sapien
attttcacaaattactctgtagttg

SEQ ID NO: 4755305 - DNA, 25 bp, Homo sapien
tattccaactgttgctccggggact

SEQ ID NO: 4755306 - DNA, 25 bp, Homo sapien
caattggttccaagcttgggtggaa

SEQ ID NO: 4755307 - DNA, 25 bp, Homo sapien
tctcaacagctgaagtctagtactt

SEQ ID NO: 4755308 - DNA, 25 bp, Homo sapien
tggctcagccgttacacagtttgca

SEQ ID NO: 4755309 - DNA, 25 bp, Homo sapien
ggactgccatgcactccctgacagt

SEQ ID NO: 4755310 - DNA, 25 bp, Homo sapien
gggaaggagacttcaggaacaaaga

SEQ ID NO: 4755311 - DNA, 25 bp, Homo sapien
tggggaaggagacttcaggaacaaa

SEQ ID NO: 4755312 - DNA, 25 bp, Homo sapien
agatggggaaggagacttcaggaac

SEQ ID NO: 4755313 - DNA, 25 bp, Homo sapien
ggaaggagacttcaggaacaaagag

SEQ ID NO: 4755314 - DNA, 25 bp, Homo sapien
gcttgaagctttaggttatgttcat

SEQ ID NO: 4755315 - DNA, 25 bp, Homo sapien
tttctccttcattatctggcatgct

SEQ ID NO: 4755316 - DNA, 25 bp, Homo sapien
tccttcattatctggcatgcttgaa

SEQ ID NO: 4755317 - DNA, 25 bp, Homo sapien
agctttaggttatgttcatcagatc

SEQ ID NO: 4755318 - DNA, 25 bp, Homo sapien
tggactcttggacctgtgaacttgt

SEQ ID NO: 4755319 - DNA, 25 bp, Homo sapien
gactcttggacctgtgaacttgtgt

SEQ ID NO: 4755320 - DNA, 25 bp, Homo sapien
ggtggaagtattgtccctgactaag

SEQ ID NO: 4755321 - DNA, 25 bp, Homo sapien
tcccatgtagctacagctgtggtgt

SEQ ID NO: 4755322 - DNA, 25 bp, Homo sapien
aggtgcttgtgtaacttgtttttca

SEQ ID NO: 4755323 - DNA, 25 bp, Homo sapien
ggtgcttgtgtaacttgtttttcaa

SEQ ID NO: 4755324 - DNA, 25 bp, Homo sapien
caaaggtgcttgtgtaacttgtttt

SEQ ID NO: 4755325 - DNA, 25 bp, Homo sapien
gaagaacagttctgagaagtgtctc

SEQ ID NO: 4755326 - DNA, 25 bp, Homo sapien
gaaagggtgtttacattctggaaga

SEQ ID NO: 4755327 - DNA, 25 bp, Homo sapien
acattctggaagaacagttctgaga

SEQ ID NO: 4755328 - DNA, 25 bp, Homo sapien
ttctggaagaacagttctgagaagt

SEQ ID NO: 4755329 - DNA, 25 bp, Homo sapien
cacaatcatagagatgatcttggac

SEQ ID NO: 4755330 - DNA, 25 bp, Homo sapien
tccttgttccccagtatctctggaa

SEQ ID NO: 4755331 - DNA, 25 bp, Homo sapien
gggctgtccctgaacaatccttgtt

SEQ ID NO: 4755332 - DNA, 25 bp, Homo sapien
gaagcttcttttcctatgggatggc

SEQ ID NO: 4755333 - DNA, 25 bp, Homo sapien
aacaagcttgaacatgacagaaggt

SEQ ID NO: 4755334 - DNA, 25 bp, Homo sapien
agtgaggaagcgctggtctgccacc

SEQ ID NO: 4755335 - DNA, 25 bp, Homo sapien
tagaggaaacaagcttgaacatgac

SEQ ID NO: 4755336 - DNA, 25 bp, Homo sapien
tgccacccagggtttgctgccctgt

SEQ ID NO: 4755337 - DNA, 25 bp, Homo sapien
ttgacagccctgcattcaaacgccg

SEQ ID NO: 4755338 - DNA, 25 bp, Homo sapien
gtgtactgtccagagatcgtctttg

SEQ ID NO: 4755339 - DNA, 25 bp, Homo sapien
tccagagatcgtctttgacagccct

SEQ ID NO: 4755340 - DNA, 25 bp, Homo sapien
ccctgcattcaaacgccgggctgtg

SEQ ID NO: 4755341 - DNA, 25 bp, Homo sapien
taggctactccattgggcatctggg

SEQ ID NO: 4755342 - DNA, 25 bp, Homo sapien
tgattagccatatcatggcactgag

SEQ ID NO: 4755343 - DNA, 25 bp, Homo sapien
catctgggcaaagcggcgttcctta

SEQ ID NO: 4755344 - DNA, 25 bp, Homo sapien
gtggcattgcctgtatctgcataag

SEQ ID NO: 4755345 - DNA, 25 bp, Homo sapien
ctgcataccgttccaaccacaagga

SEQ ID NO: 4755346 - DNA, 25 bp, Homo sapien
aagcagggaatggatttcctgcctc

SEQ ID NO: 4755347 - DNA, 25 bp, Homo sapien
agggaatggatttcctgcctctcct

SEQ ID NO: 4755348 - DNA, 25 bp, Homo sapien
ggaatggatttcctgcctctcctct

SEQ ID NO: 4755349 - DNA, 25 bp, Homo sapien
ctaagcagggaatggatttcctgcc

SEQ ID NO: 4755350 - DNA, 25 bp, Homo sapien
tcgatctccatgtgtgcgtctcctg

SEQ ID NO: 4755351 - DNA, 25 bp, Homo sapien
catgtgtgcgtctcctggagtcctt

SEQ ID NO: 4755352 - DNA, 25 bp, Homo sapien
gatctccatgtgtgcgtctcctgga

SEQ ID NO: 4755353 - DNA, 25 bp, Homo sapien
tccatgtgtgcgtctcctggagtcc

SEQ ID NO: 4755354 - DNA, 25 bp, Homo sapien
gaaaagccactatgttttcccaggc

SEQ ID NO: 4755355 - DNA, 25 bp, Homo sapien
aaaagccactatgttttcccaggct

SEQ ID NO: 4755356 - DNA, 25 bp, Homo sapien
gttccctttgggcatgcagccacct

SEQ ID NO: 4755357 - DNA, 25 bp, Homo sapien
tgtcagggtggcctagagtcacatt

SEQ ID NO: 4755358 - DNA, 25 bp, Homo sapien
gcctagagtcacattttgtagcaga

SEQ ID NO: 4755359 - DNA, 25 bp, Homo sapien
tttgtagcagaagttccctttgggc

SEQ ID NO: 4755360 - DNA, 25 bp, Homo sapien
aaatgagaattatgtaactgtgttg

SEQ ID NO: 4755361 - DNA, 25 bp, Homo sapien
aaaatgagaattatgtaactgtgtt

SEQ ID NO: 4755362 - DNA, 25 bp, Homo sapien
tctaaatttttcatcttgtctgaca

SEQ ID NO: 4755363 - DNA, 25 bp, Homo sapien
cggaattgctcagctctctcaactc

SEQ ID NO: 4755364 - DNA, 25 bp, Homo sapien
actctgattggtgttcttgggtcaa

SEQ ID NO: 4755365 - DNA, 25 bp, Homo sapien
ctccttctctaagggtgtagccaaa

SEQ ID NO: 4755366 - DNA, 25 bp, Homo sapien
tatggtttcaatacccggaattgct

SEQ ID NO: 4755367 - DNA, 25 bp, Homo sapien
tttcatcctcccagtacatgtaggg

SEQ ID NO: 4755368 - DNA, 25 bp, Homo sapien
gggccatccaggtaatgctctgagt

SEQ ID NO: 4755369 - DNA, 25 bp, Homo sapien
gactgagacagaccatatatgcttc

SEQ ID NO: 4755370 - DNA, 25 bp, Homo sapien
tctgagtaaagggaacttgagaatg

SEQ ID NO: 4755371 - DNA, 25 bp, Homo sapien
tcaggtcagacgcagtagtgacagg

SEQ ID NO: 4755372 - DNA, 25 bp, Homo sapien
tattgcctttgggactgaatgctgc

SEQ ID NO: 4755373 - DNA, 25 bp, Homo sapien
cgatagatatgcataccgtggtcca

SEQ ID NO: 4755374 - DNA, 25 bp, Homo sapien
cgtttacaaatgagagtctaggtcc

SEQ ID NO: 4755375 - DNA, 25 bp, Homo sapien
caagggtctgttggtctggtgaaaa

SEQ ID NO: 4755376 - DNA, 25 bp, Homo sapien
gggagaaagaaagccgcacatccag

SEQ ID NO: 4755377 - DNA, 25 bp, Homo sapien
catgggtcctgattggcactgacac

SEQ ID NO: 4755378 - DNA, 25 bp, Homo sapien
tgcgagggtcaacaaggtataaagg

SEQ ID NO: 4755379 - DNA, 25 bp, Homo sapien
tacaactacgctgggttaaacatgg

SEQ ID NO: 4755380 - DNA, 25 bp, Homo sapien
aaaatgcccggttcacaaagatgct

SEQ ID NO: 4755381 - DNA, 25 bp, Homo sapien
cacagctcgcaggactcattagagg

SEQ ID NO: 4755382 - DNA, 25 bp, Homo sapien
taactggcttaagcgtcacagcagg

SEQ ID NO: 4755383 - DNA, 25 bp, Homo sapien
cctagagttatcgtagagcctcgta

SEQ ID NO: 4755384 - DNA, 25 bp, Homo sapien
gaaccaggtagtatctcaggccagg

SEQ ID NO: 4755385 - DNA, 25 bp, Homo sapien
cagacccagtgcatgtttgctgaga

SEQ ID NO: 4755386 - DNA, 25 bp, Homo sapien
gcctcgtagggattcatgactcaag

SEQ ID NO: 4755387 - DNA, 25 bp, Homo sapien
catttggtctaatagtataatgaac

SEQ ID NO: 4755388 - DNA, 25 bp, Homo sapien
ttcaacatttggtctaatagtataa

SEQ ID NO: 4755389 - DNA, 25 bp, Homo sapien
ttcaatggaacttcttgtatattaa

SEQ ID NO: 4755390 - DNA, 25 bp, Homo sapien
aaatcttgattatacttcaaggtga

SEQ ID NO: 4755391 - DNA, 25 bp, Homo sapien
gggttgataccaaactcccagtcaa

SEQ ID NO: 4755392 - DNA, 25 bp, Homo sapien
gccatgcaaatgatgacggtcacac

SEQ ID NO: 4755393 - DNA, 25 bp, Homo sapien
gagcttgctcgactagacttgaacg

SEQ ID NO: 4755394 - DNA, 25 bp, Homo sapien
cacacgacatgaacggtgagaacag

SEQ ID NO: 4755395 - DNA, 25 bp, Homo sapien
cagtcaccagtgatggagccaatgt

SEQ ID NO: 4755396 - DNA, 25 bp, Homo sapien
gactgcggatacacattcatctcta

SEQ ID NO: 4755397 - DNA, 25 bp, Homo sapien
ggagcgtgctcgaagccccttgttt

SEQ ID NO: 4755398 - DNA, 25 bp, Homo sapien
tgcccagcaagtgtgaacatgcctt

SEQ ID NO: 4755399 - DNA, 25 bp, Homo sapien
cttctgtggcggatattaagaaggt

SEQ ID NO: 4755400 - DNA, 25 bp, Homo sapien
ccttctgtggcggatattaagaagg

SEQ ID NO: 4755401 - DNA, 25 bp, Homo sapien
tctggacagtctcctcatggacagg

SEQ ID NO: 4755402 - DNA, 25 bp, Homo sapien
tacagagtgggaactagtagcccgg

SEQ ID NO: 4755403 - DNA, 25 bp, Homo sapien
cagagggtctatatcacagtggagc

SEQ ID NO: 4755404 - DNA, 25 bp, Homo sapien
ttggcgcgctctatcttgggaacag

SEQ ID NO: 4755405 - DNA, 25 bp, Homo sapien
tccgtgcagtctgacgaggtcctcg

SEQ ID NO: 4755406 - DNA, 25 bp, Homo sapien
tccacggtctggagtgaagccttca

SEQ ID NO: 4755407 - DNA, 25 bp, Homo sapien
gaagctgctctgacggacaatgtag

SEQ ID NO: 4755408 - DNA, 25 bp, Homo sapien
tgcagggtctatactctcttggagc

SEQ ID NO: 4755409 - DNA, 25 bp, Homo sapien
gaggagacatggtttctacgaaaat

SEQ ID NO: 4755410 - DNA, 25 bp, Homo sapien
cctgaggtatataccaagagttttg

SEQ ID NO: 4755411 - DNA, 25 bp, Homo sapien
tgtcacagatataaacaggcctgag

SEQ ID NO: 4755412 - DNA, 25 bp, Homo sapien
aagagttttgagtcatgattgtagt

SEQ ID NO: 4755413 - DNA, 25 bp, Homo sapien
tttgaatatactagtaatagctatg

SEQ ID NO: 4755414 - DNA, 25 bp, Homo sapien
tcatggagaatgaggtaactatcct

SEQ ID NO: 4755415 - DNA, 25 bp, Homo sapien
gaggtaactatcctctcaatcattt

SEQ ID NO: 4755416 - DNA, 25 bp, Homo sapien
tgtcactttttggatctaggtaaaa

SEQ ID NO: 4755417 - DNA, 25 bp, Homo sapien
tgcacccggccttaatattcagaga

SEQ ID NO: 4755418 - DNA, 25 bp, Homo sapien
cctgtattcattcctaagactggta

SEQ ID NO: 4755419 - DNA, 25 bp, Homo sapien
taagactggtagcataggcagtttc

SEQ ID NO: 4755420 - DNA, 25 bp, Homo sapien
cacccggccttaatattcagagaga

SEQ ID NO: 4755421 - DNA, 25 bp, Homo sapien
ttctatgcattgctcttcaaagtca

SEQ ID NO: 4755422 - DNA, 25 bp, Homo sapien
tgagttgaaccgatcatccttttct

SEQ ID NO: 4755423 - DNA, 25 bp, Homo sapien
catcattagatgagttgaaccgatc

SEQ ID NO: 4755424 - DNA, 25 bp, Homo sapien
gtcacccgtatcctctcatcattag

SEQ ID NO: 4755425 - DNA, 25 bp, Homo sapien
tcaggccgtagtccctttcatccgg

SEQ ID NO: 4755426 - DNA, 25 bp, Homo sapien
catgatgagctgatacctctgaaac

SEQ ID NO: 4755427 - DNA, 25 bp, Homo sapien
cagacttggttggatatcgatttta

SEQ ID NO: 4755428 - DNA, 25 bp, Homo sapien
gctctcgtgtttcctccatcggcag

SEQ ID NO: 4755429 - DNA, 25 bp, Homo sapien
gatgtttgccactaagaggtagcag

SEQ ID NO: 4755430 - DNA, 25 bp, Homo sapien
atgatggccggcacgatccaagctc

SEQ ID NO: 4755431 - DNA, 25 bp, Homo sapien
tggattattttaccatcctctcggg

SEQ ID NO: 4755432 - DNA, 25 bp, Homo sapien
ccactaagaggtagcaggccatgat

SEQ ID NO: 4755433 - DNA, 25 bp, Homo sapien
tctccctctgagcacaaactggact

SEQ ID NO: 4755434 - DNA, 25 bp, Homo sapien
tgagcacaaactggactgagtttcc

SEQ ID NO: 4755435 - DNA, 25 bp, Homo sapien
tcctagaaatgccatgcgctctctt

SEQ ID NO: 4755436 - DNA, 25 bp, Homo sapien
tgcgctctcttacttcctgattttg

SEQ ID NO: 4755437 - DNA, 25 bp, Homo sapien
tactgtcaagtaatgtactgtcaag

SEQ ID NO: 4755438 - DNA, 25 bp, Homo sapien
gatctgactttagctttgtccataa

SEQ ID NO: 4755439 - DNA, 25 bp, Homo sapien
catgcaaagtatgtagttcagtatc

SEQ ID NO: 4755440 - DNA, 25 bp, Homo sapien
tgttcaaaccccgactctggctgag

SEQ ID NO: 4755441 - DNA, 25 bp, Homo sapien
cttaagattaagtcgtagggcctca

SEQ ID NO: 4755442 - DNA, 25 bp, Homo sapien
tagggcctcaaagtcacgtgcaggt

SEQ ID NO: 4755443 - DNA, 25 bp, Homo sapien
catggatgatagtaagaaagccctc

SEQ ID NO: 4755444 - DNA, 25 bp, Homo sapien
gaaggctacatctatgcagcagtgg

SEQ ID NO: 4755445 - DNA, 25 bp, Homo sapien
tggttacaaccatcctagagatgca

SEQ ID NO: 4755446 - DNA, 25 bp, Homo sapien
gacaaaatggcataaaccctacaga

SEQ ID NO: 4755447 - DNA, 25 bp, Homo sapien
caaattctatgccaagcgctttcat

SEQ ID NO: 4755448 - DNA, 25 bp, Homo sapien
aaatttcaagcccaagtacagcaag

SEQ ID NO: 4755449 - DNA, 25 bp, Homo sapien
tctgctggtgagcaatattcactat

SEQ ID NO: 4755450 - DNA, 25 bp, Homo sapien
aagccacggcgtccggccttagata

SEQ ID NO: 4755451 - DNA, 25 bp, Homo sapien
gtaaatctgctggtgagcaatattc

SEQ ID NO: 4755452 - DNA, 25 bp, Homo sapien
ctctatctgaaaggaccttggtgtg

SEQ ID NO: 4755453 - DNA, 25 bp, Homo sapien
gctggcagtggttcccggacgtctt

SEQ ID NO: 4755454 - DNA, 25 bp, Homo sapien
ggcatttgcatactcactaaggaca

SEQ ID NO: 4755455 - DNA, 25 bp, Homo sapien
tccatcttgactgttggcatttgca

SEQ ID NO: 4755456 - DNA, 25 bp, Homo sapien
taaggacacagtgctttacattagc

SEQ ID NO: 4755457 - DNA, 25 bp, Homo sapien
taagtgcccgatgtcctaacttggt

SEQ ID NO: 4755458 - DNA, 25 bp, Homo sapien
tactgctagatgttagtagcgcccc

SEQ ID NO: 4755459 - DNA, 25 bp, Homo sapien
cacgttgactgttcagacaccctaa

SEQ ID NO: 4755460 - DNA, 25 bp, Homo sapien
ggcatgggacaagatctactggtgt

SEQ ID NO: 4755461 - DNA, 25 bp, Homo sapien
tgatcgacacagcacactataaccc

SEQ ID NO: 4755462 - DNA, 25 bp, Homo sapien
gatgctaaacttattgtggatgcct

SEQ ID NO: 4755463 - DNA, 25 bp, Homo sapien
gtgatcccacgacccatcagcatgg

SEQ ID NO: 4755464 - DNA, 25 bp, Homo sapien
tattgtggatgcctgatcgacacag

SEQ ID NO: 4755465 - DNA, 25 bp, Homo sapien
taccttttcaagtagaagttgcaca

SEQ ID NO: 4755466 - DNA, 25 bp, Homo sapien
catatttttatgagtccacttcccc

SEQ ID NO: 4755467 - DNA, 25 bp, Homo sapien
caccttctcctgtcattattgtgaa

SEQ ID NO: 4755468 - DNA, 25 bp, Homo sapien
ggttccgaggcaatgtctgcatttt

SEQ ID NO: 4755469 - DNA, 25 bp, Homo sapien
tacttgtgcccgctggtaagctcac

SEQ ID NO: 4755470 - DNA, 25 bp, Homo sapien
aaataggtggcccagagcaatcctg

SEQ ID NO: 4755471 - DNA, 25 bp, Homo sapien
cctgaaggactaactgaatggacgt

SEQ ID NO: 4755472 - DNA, 25 bp, Homo sapien
tcatggcattaaccatcacggtggt

SEQ ID NO: 4755473 - DNA, 25 bp, Homo sapien
aaatgaaagtcgcattcattcaggg

SEQ ID NO: 4755474 - DNA, 25 bp, Homo sapien
agtaacccaggcattaagtagattg

SEQ ID NO: 4755475 - DNA, 25 bp, Homo sapien
gagaagcagaaaggaggactaaatt

SEQ ID NO: 4755476 - DNA, 25 bp, Homo sapien
gatggaaaagccctaggcagtaaga

SEQ ID NO: 4755477 - DNA, 25 bp, Homo sapien
atgtccacagtccagggctcagacg

SEQ ID NO: 4755478 - DNA, 25 bp, Homo sapien
ctaatccatgtccacagtccagggc

SEQ ID NO: 4755479 - DNA, 25 bp, Homo sapien
gtccacagtccagggctcagacggc

SEQ ID NO: 4755480 - DNA, 25 bp, Homo sapien
acagtccagggctcagacggctggc

SEQ ID NO: 4755481 - DNA, 25 bp, Homo sapien
gaaatattcaacacatggccctggg

SEQ ID NO: 4755482 - DNA, 25 bp, Homo sapien
ggaatcagtcctctatcttgagcca

SEQ ID NO: 4755483 - DNA, 25 bp, Homo sapien
tgtttcctccaagatagcaagctag

SEQ ID NO: 4755484 - DNA, 25 bp, Homo sapien
ttggtataccagatgtcgattcgtg

SEQ ID NO: 4755485 - DNA, 25 bp, Homo sapien
tggtgtatgagaatcataaacttgc

SEQ ID NO: 4755486 - DNA, 25 bp, Homo sapien
ctgactttggtgtatgagaatcata

SEQ ID NO: 4755487 - DNA, 25 bp, Homo sapien
gtgtatgagaatcataaacttgctt

SEQ ID NO: 4755488 - DNA, 25 bp, Homo sapien
gtatgagaatcataaacttgcttac

SEQ ID NO: 4755489 - DNA, 25 bp, Homo sapien
catgatggctcctcattgggaaaaa

SEQ ID NO: 4755490 - DNA, 25 bp, Homo sapien
aaaaggatggcttgcctggcgaccc

SEQ ID NO: 4755491 - DNA, 25 bp, Homo sapien
tggtccgcaaacacttccccataaa

SEQ ID NO: 4755492 - DNA, 25 bp, Homo sapien
gaaccaccagcataatgatgacaaa

SEQ ID NO: 4755493 - DNA, 25 bp, Homo sapien
tgttcacgccgaagatgtctaggag

SEQ ID NO: 4755494 - DNA, 25 bp, Homo sapien
aatcatcattacatacgggcccaaa

SEQ ID NO: 4755495 - DNA, 25 bp, Homo sapien
tgttcacgcagtagatgaccctccc

SEQ ID NO: 4755496 - DNA, 25 bp, Homo sapien
cgatgaggtccgtgacattccagta

SEQ ID NO: 4755497 - DNA, 25 bp, Homo sapien
accacacatgggtctatgaaatgca

SEQ ID NO: 4755498 - DNA, 25 bp, Homo sapien
gctggacagcagaagttgcacccat

SEQ ID NO: 4755499 - DNA, 25 bp, Homo sapien
acatgggtctatgaaatgcacagct

SEQ ID NO: 4755500 - DNA, 25 bp, Homo sapien
ttaaacttagaggggctaccacaca

SEQ ID NO: 4755501 - DNA, 25 bp, Homo sapien
cggggcttgctttggtgactccggg

SEQ ID NO: 4755502 - DNA, 25 bp, Homo sapien
tccttttgtgtatccctgggaaggc

SEQ ID NO: 4755503 - DNA, 25 bp, Homo sapien
gactccgggcagaagtatgtggggc

SEQ ID NO: 4755504 - DNA, 25 bp, Homo sapien
caggatcttgcgtctgagccctgga

SEQ ID NO: 4755505 - DNA, 25 bp, Homo sapien
tgagactagcagagccattcccaag

SEQ ID NO: 4755506 - DNA, 25 bp, Homo sapien
tatggtgcccagtatgttttcccac

SEQ ID NO: 4755507 - DNA, 25 bp, Homo sapien
tgcagtacagcaattagggttgttc

SEQ ID NO: 4755508 - DNA, 25 bp, Homo sapien
ccagtggacttgaacgggagcattt

SEQ ID NO: 4755509 - DNA, 25 bp, Homo sapien
ttcagttcaccttggtggtccctcc

SEQ ID NO: 4755510 - DNA, 25 bp, Homo sapien
ggtacgagcagaatgttaagaaata

SEQ ID NO: 4755511 - DNA, 25 bp, Homo sapien
cagcaggtacgagcagaatgttaag

SEQ ID NO: 4755512 - DNA, 25 bp, Homo sapien
gaaggatctgtgttcagttcacctt

SEQ ID NO: 4755513 - DNA, 25 bp, Homo sapien
catccacagatagaacttaaccact

SEQ ID NO: 4755514 - DNA, 25 bp, Homo sapien
ccatccacagatagaacttaaccac

SEQ ID NO: 4755515 - DNA, 25 bp, Homo sapien
ccacagatagaacttaaccactgtc

SEQ ID NO: 4755516 - DNA, 25 bp, Homo sapien
ctccatccacagatagaacttaacc

SEQ ID NO: 4755517 - DNA, 25 bp, Homo sapien
gaagagcatcaggtatccgatatac

SEQ ID NO: 4755518 - DNA, 25 bp, Homo sapien
tattcccagggtgaaaatataggag

SEQ ID NO: 4755519 - DNA, 25 bp, Homo sapien
ggccagcgttccatcttcactaaca

SEQ ID NO: 4755520 - DNA, 25 bp, Homo sapien
gagattacgatccattcctgggtgg

SEQ ID NO: 4755521 - DNA, 25 bp, Homo sapien
acagtgctctggctgttcaggccca

SEQ ID NO: 4755522 - DNA, 25 bp, Homo sapien
ctgtaaggagacacaatacagtgct

SEQ ID NO: 4755523 - DNA, 25 bp, Homo sapien
gagacacaatacagtgctctggctg

SEQ ID NO: 4755524 - DNA, 25 bp, Homo sapien
cacaatacagtgctctggctgttca

SEQ ID NO: 4755525 - DNA, 25 bp, Homo sapien
cgtttaaatctatgtgtcatgatgc

SEQ ID NO: 4755526 - DNA, 25 bp, Homo sapien
catcatttcgccttgcagttaccca

SEQ ID NO: 4755527 - DNA, 25 bp, Homo sapien
cttccttttgacctgtacatgtatc

SEQ ID NO: 4755528 - DNA, 25 bp, Homo sapien
tatgacaaaaggaacttgaaggtgc

SEQ ID NO: 4755529 - DNA, 25 bp, Homo sapien
taaccggtgcttgctctgaacttcc

SEQ ID NO: 4755530 - DNA, 25 bp, Homo sapien
aattcatagatttttctgccgaggg

SEQ ID NO: 4755531 - DNA, 25 bp, Homo sapien
gaaccagaacttcacgatgggtgca

SEQ ID NO: 4755532 - DNA, 25 bp, Homo sapien
cacgatgggtgcattgtagaattca

SEQ ID NO: 4755533 - DNA, 25 bp, Homo sapien
cagccctgagtttgccaggccacat

SEQ ID NO: 4755534 - DNA, 25 bp, Homo sapien
ccagccctgagtttgccaggccaca

SEQ ID NO: 4755535 - DNA, 25 bp, Homo sapien
agccctgagtttgccaggccacatg

SEQ ID NO: 4755536 - DNA, 25 bp, Homo sapien
ctttttcctttgtgggcttctctgg

SEQ ID NO: 4755537 - DNA, 25 bp, Homo sapien
ttcctgggcctgagacatatagggc

SEQ ID NO: 4755538 - DNA, 25 bp, Homo sapien
cctgggcctgagacatatagggcat

SEQ ID NO: 4755539 - DNA, 25 bp, Homo sapien
ccttctcttggaggtggatttcctg

SEQ ID NO: 4755540 - DNA, 25 bp, Homo sapien
gtcgtctttgttcttgaactccaag

SEQ ID NO: 4755541 - DNA, 25 bp, Homo sapien
tgaaggaggaagtagaattcccaga

SEQ ID NO: 4755542 - DNA, 25 bp, Homo sapien
ggaggaagtagaattcccagaatta

SEQ ID NO: 4755543 - DNA, 25 bp, Homo sapien
attgaaggaggaagtagaattccca

SEQ ID NO: 4755544 - DNA, 25 bp, Homo sapien
ctgagaattgaaggaggaagtagaa

SEQ ID NO: 4755545 - DNA, 25 bp, Homo sapien
aggcaggaacagtccttgcttgaat

SEQ ID NO: 4755546 - DNA, 25 bp, Homo sapien
gaacagtccttgcttgaatgcccac

SEQ ID NO: 4755547 - DNA, 25 bp, Homo sapien
ggaacagtccttgcttgaatgccca

SEQ ID NO: 4755548 - DNA, 25 bp, Homo sapien
caggaacagtccttgcttgaatgcc

SEQ ID NO: 4755549 - DNA, 25 bp, Homo sapien
ctggccggcctacgaaggctcaggt

SEQ ID NO: 4755550 - DNA, 25 bp, Homo sapien
ccagcagtgtggctatggagtgccc

SEQ ID NO: 4755551 - DNA, 25 bp, Homo sapien
gatgctgaattctgggtgcctggcc

SEQ ID NO: 4755552 - DNA, 25 bp, Homo sapien
tgacaccctgtcctcggagctgaga

SEQ ID NO: 4755553 - DNA, 25 bp, Homo sapien
caaaaaactccccatattctttcag

SEQ ID NO: 4755554 - DNA, 25 bp, Homo sapien
tcagtttcacattttccttgaaaaa

SEQ ID NO: 4755555 - DNA, 25 bp, Homo sapien
aactccccatattctttcagtcttc

SEQ ID NO: 4755556 - DNA, 25 bp, Homo sapien
ctttcagtcttccatctcccatttt

SEQ ID NO: 4755557 - DNA, 25 bp, Homo sapien
agccaggagggccttattgggcgcc

SEQ ID NO: 4755558 - DNA, 25 bp, Homo sapien
ccaggagggccttattgggcgccct

SEQ ID NO: 4755559 - DNA, 25 bp, Homo sapien
tagccaggagggccttattgggcgc

SEQ ID NO: 4755560 - DNA, 25 bp, Homo sapien
ggagggccttattgggcgccctgac

SEQ ID NO: 4755561 - DNA, 25 bp, Homo sapien
caggcacgtggcgttgctccagttc

SEQ ID NO: 4755562 - DNA, 25 bp, Homo sapien
tgtttggcagccacggcaagctgca

SEQ ID NO: 4755563 - DNA, 25 bp, Homo sapien
aggcctgagttcttgcgcatgcgga

SEQ ID NO: 4755564 - DNA, 25 bp, Homo sapien
atacgtcagcagtttcatggccagc

SEQ ID NO: 4755565 - DNA, 25 bp, Homo sapien
aaccatgtcgttctcagaggcctca

SEQ ID NO: 4755566 - DNA, 25 bp, Homo sapien
ggttgtctttcttcctcgcctcaag

SEQ ID NO: 4755567 - DNA, 25 bp, Homo sapien
ggatcatccaagtcaatgtccacct

SEQ ID NO: 4755568 - DNA, 25 bp, Homo sapien
tgggaaatgtcgtcaaccatgtcgt

SEQ ID NO: 4755569 - DNA, 25 bp, Homo sapien
tcagcacacaggaagcatcattggc

SEQ ID NO: 4755570 - DNA, 25 bp, Homo sapien
ggcaaaggtgcttaatagcatggaa

SEQ ID NO: 4755571 - DNA, 25 bp, Homo sapien
ctgctgcacatcagggcaagggcga

SEQ ID NO: 4755572 - DNA, 25 bp, Homo sapien
catgctgggaatgtgcaaaacaggc

SEQ ID NO: 4755573 - DNA, 25 bp, Homo sapien
cgtgtagttgcagcgataagccccg

SEQ ID NO: 4755574 - DNA, 25 bp, Homo sapien
tgtggtagagggtccggaagcgctt

SEQ ID NO: 4755575 - DNA, 25 bp, Homo sapien
tgtcaatcaggctgattctgtagtc

SEQ ID NO: 4755576 - DNA, 25 bp, Homo sapien
tcaggtactcgatcaccaggccgat

SEQ ID NO: 4755577 - DNA, 25 bp, Homo sapien
tagatccaaccgaaacctggatact

SEQ ID NO: 4755578 - DNA, 25 bp, Homo sapien
tccaaccgaaacctggatactctcg

SEQ ID NO: 4755579 - DNA, 25 bp, Homo sapien
gatccaaccgaaacctggatactct

SEQ ID NO: 4755580 - DNA, 25 bp, Homo sapien
aaatagatccaaccgaaacctggat

SEQ ID NO: 4755581 - DNA, 25 bp, Homo sapien
cctccatcagctgggattttaggac

SEQ ID NO: 4755582 - DNA, 25 bp, Homo sapien
tccatcagctgggattttaggactc

SEQ ID NO: 4755583 - DNA, 25 bp, Homo sapien
catcagctgggattttaggactcgg

SEQ ID NO: 4755584 - DNA, 25 bp, Homo sapien
tcagctgggattttaggactcgggt

SEQ ID NO: 4755585 - DNA, 25 bp, Homo sapien
tagtggaaccagaggcttgtagaca

SEQ ID NO: 4755586 - DNA, 25 bp, Homo sapien
tccagtgatcccctggagtttggtt

SEQ ID NO: 4755587 - DNA, 25 bp, Homo sapien
ggccaaagaccctgttcagagcttc

SEQ ID NO: 4755588 - DNA, 25 bp, Homo sapien
aaggttgatgtagcttccagtgatc

SEQ ID NO: 4755589 - DNA, 25 bp, Homo sapien
tggtacaatgtatttgagggcccat

SEQ ID NO: 4755590 - DNA, 25 bp, Homo sapien
gacatccctgaccaagtggtacaat

SEQ ID NO: 4755591 - DNA, 25 bp, Homo sapien
ttttgacatccctgaccaagtggta

SEQ ID NO: 4755592 - DNA, 25 bp, Homo sapien
tacaatgtatttgagggcccatgtc

SEQ ID NO: 4755593 - DNA, 25 bp, Homo sapien
aaatcttagcttgcagcccatacag

SEQ ID NO: 4755594 - DNA, 25 bp, Homo sapien
aaaaggacccattgaccgcactgga

SEQ ID NO: 4755595 - DNA, 25 bp, Homo sapien
tgttgacagctaggccaaaatatga

SEQ ID NO: 4755596 - DNA, 25 bp, Homo sapien
cagcaggctggatttcgatgacagt

SEQ ID NO: 4755597 - DNA, 25 bp, Homo sapien
tcagtatgctgaaccaagaaaagtc

SEQ ID NO: 4755598 - DNA, 25 bp, Homo sapien
cattcatgtggacgtgcccatcaga

SEQ ID NO: 4755599 - DNA, 25 bp, Homo sapien
tcaacaaagtattccgggaagccac

SEQ ID NO: 4755600 - DNA, 25 bp, Homo sapien
gacaggtctatgaaatgcggcaacg

SEQ ID NO: 4755601 - DNA, 25 bp, Homo sapien
aaacaagcggaatcttggtgacttg

SEQ ID NO: 4755602 - DNA, 25 bp, Homo sapien
gtgacttggtgtttgtcatctatgt

SEQ ID NO: 4755603 - DNA, 25 bp, Homo sapien
atgctgacaactgagcaattaaaac

SEQ ID NO: 4755604 - DNA, 25 bp, Homo sapien
caagcggaatcttggtgacttggtg

SEQ ID NO: 4755605 - DNA, 25 bp, Homo sapien
gtattgtacaattcctctagtctgg

SEQ ID NO: 4755606 - DNA, 25 bp, Homo sapien
atggtgagaaaacggtgcatgctta

SEQ ID NO: 4755607 - DNA, 25 bp, Homo sapien
tcctctagtctggagatggtgagaa

SEQ ID NO: 4755608 - DNA, 25 bp, Homo sapien
tgtacaattcctctagtctggagat

SEQ ID NO: 4755609 - DNA, 25 bp, Homo sapien
ccattctctatgagtaatttcacaa

SEQ ID NO: 4755610 - DNA, 25 bp, Homo sapien
ccagaactaaggcatccaacatggc

SEQ ID NO: 4755611 - DNA, 25 bp, Homo sapien
tctatgagtaatttcacaaaatcca

SEQ ID NO: 4755612 - DNA, 25 bp, Homo sapien
acatggcttgctccagagatcccac

SEQ ID NO: 4755613 - DNA, 25 bp, Homo sapien
taaagctaagctcagttggtctggg

SEQ ID NO: 4755614 - DNA, 25 bp, Homo sapien
cactgttgcccgtaaataaagatct

SEQ ID NO: 4755615 - DNA, 25 bp, Homo sapien
taaagatctggctgcgagcgatgtc

SEQ ID NO: 4755616 - DNA, 25 bp, Homo sapien
gagcgatgtcgactctgttccaggc

SEQ ID NO: 4755617 - DNA, 25 bp, Homo sapien
actttgcatcttggggtgtcactca

SEQ ID NO: 4755618 - DNA, 25 bp, Homo sapien
cagacaaaggagagaactttgcatc

SEQ ID NO: 4755619 - DNA, 25 bp, Homo sapien
ttccagacaaaggagagaactttgc

SEQ ID NO: 4755620 - DNA, 25 bp, Homo sapien
tttgcacatactgttccagacaaag

SEQ ID NO: 4755621 - DNA, 25 bp, Homo sapien
gaggactgccactgttaatttctat

SEQ ID NO: 4755622 - DNA, 25 bp, Homo sapien
tctgttggcgctttgtgaggactgc

SEQ ID NO: 4755623 - DNA, 25 bp, Homo sapien
gcttcacctaacatgcagtctgatt

SEQ ID NO: 4755624 - DNA, 25 bp, Homo sapien
tcctgcatagctcctgcatgtacaa

SEQ ID NO: 4755625 - DNA, 25 bp, Homo sapien
gatgagttaggtagtcatgtctacg

SEQ ID NO: 4755626 - DNA, 25 bp, Homo sapien
gataggaacgtgctcaataggaagg

SEQ ID NO: 4755627 - DNA, 25 bp, Homo sapien
catgtctacgttggaagtcctgaag

SEQ ID NO: 4755628 - DNA, 25 bp, Homo sapien
tcctgaaggcctactgttgctgagc

SEQ ID NO: 4755629 - DNA, 25 bp, Homo sapien
taagaggagaaaggttagatgctac

SEQ ID NO: 4755630 - DNA, 25 bp, Homo sapien
ttaagaggagaaaggttagatgcta

SEQ ID NO: 4755631 - DNA, 25 bp, Homo sapien
cttggtggagagtagccaaggactt

SEQ ID NO: 4755632 - DNA, 25 bp, Homo sapien
gacttgttaggtcgatgagggcctt

SEQ ID NO: 4755633 - DNA, 25 bp, Homo sapien
gatgagggccttgaatgtgcttaca

SEQ ID NO: 4755634 - DNA, 25 bp, Homo sapien
cttgaatgtgcttacagcagaaggg

SEQ ID NO: 4755635 - DNA, 25 bp, Homo sapien
tggtaactggcctaactggcctaac

SEQ ID NO: 4755636 - DNA, 25 bp, Homo sapien
tatttggtacactgtagaaggtctt

SEQ ID NO: 4755637 - DNA, 25 bp, Homo sapien
ttattaagtttagtttgcacaggaa

SEQ ID NO: 4755638 - DNA, 25 bp, Homo sapien
ggccacgaaatactaacaactcatt

SEQ ID NO: 4755639 - DNA, 25 bp, Homo sapien
ttttatgttgggacctcaagaggag

SEQ ID NO: 4755640 - DNA, 25 bp, Homo sapien
gcaatacaggtatttgaataagtct

SEQ ID NO: 4755641 - DNA, 25 bp, Homo sapien
gaactgaacttgacttatggagcca

SEQ ID NO: 4755642 - DNA, 25 bp, Homo sapien
tataaaactctaacaggtgcttctg

SEQ ID NO: 4755643 - DNA, 25 bp, Homo sapien
gaaactaaaggccacttctcttctg

SEQ ID NO: 4755644 - DNA, 25 bp, Homo sapien
taacaggacatcactctggattctc

SEQ ID NO: 4755645 - DNA, 25 bp, Homo sapien
cacaggctgctgatagaattgtagc

SEQ ID NO: 4755646 - DNA, 25 bp, Homo sapien
ggctgacagcgcctcagaaactaaa

SEQ ID NO: 4755647 - DNA, 25 bp, Homo sapien
agaagcgttgggatggcaattagct

SEQ ID NO: 4755648 - DNA, 25 bp, Homo sapien
gggatggcaattagcttactgtgca

SEQ ID NO: 4755649 - DNA, 25 bp, Homo sapien
gcttactgtgcagatcactaaacac

SEQ ID NO: 4755650 - DNA, 25 bp, Homo sapien
tagcttactgtgcagatcactaaac

SEQ ID NO: 4755651 - DNA, 25 bp, Homo sapien
cattccaggtgttctggcataatta

SEQ ID NO: 4755652 - DNA, 25 bp, Homo sapien
aattatctggtaaccattccgcagg

SEQ ID NO: 4755653 - DNA, 25 bp, Homo sapien
tgccagtttggaggtaaattatctg

SEQ ID NO: 4755654 - DNA, 25 bp, Homo sapien
ttcatgccgaagaaagtgccagttt

SEQ ID NO: 4755655 - DNA, 25 bp, Homo sapien
tgctgtgaatagatattttctgcgg

SEQ ID NO: 4755656 - DNA, 25 bp, Homo sapien
attttctgcggttttggagcctgga

SEQ ID NO: 4755657 - DNA, 25 bp, Homo sapien
gagcctggagcaagaggtttatgct

SEQ ID NO: 4755658 - DNA, 25 bp, Homo sapien
gtatgagggatgctgacaacatggg

SEQ ID NO: 4755659 - DNA, 25 bp, Homo sapien
taagtatgataagtccccacttggg

SEQ ID NO: 4755660 - DNA, 25 bp, Homo sapien
cattcttaaaagctactcgaggtca

SEQ ID NO: 4755661 - DNA, 25 bp, Homo sapien
tcagctgaagaaactgtgagcccct

SEQ ID NO: 4755662 - DNA, 25 bp, Homo sapien
ggcctgagaccaccgaccttgtgga

SEQ ID NO: 4755663 - DNA, 25 bp, Homo sapien
tggatctagggaccaatgggtcatt

SEQ ID NO: 4755664 - DNA, 25 bp, Homo sapien
gaaatttctcagattccgcagaata

SEQ ID NO: 4755665 - DNA, 25 bp, Homo sapien
tctggttctctcagaaatttctcag

SEQ ID NO: 4755666 - DNA, 25 bp, Homo sapien
tctagggaccaatgggtcatttcct

SEQ ID NO: 4755667 - DNA, 25 bp, Homo sapien
gcggttctcaagctggacacatgat

SEQ ID NO: 4755668 - DNA, 25 bp, Homo sapien
tgaccaaccatgactctacagcagg

SEQ ID NO: 4755669 - DNA, 25 bp, Homo sapien
taagtaggctcttggcctccgaaga

SEQ ID NO: 4755670 - DNA, 25 bp, Homo sapien
tggtcccgtgattcttctgcaaagc

SEQ ID NO: 4755671 - DNA, 25 bp, Homo sapien
taggagacataaggtcactgtatta

SEQ ID NO: 4755672 - DNA, 25 bp, Homo sapien
taaataacctcagataacactgcat

SEQ ID NO: 4755673 - DNA, 25 bp, Homo sapien
tagcagtaactgtcttacaggagag

SEQ ID NO: 4755674 - DNA, 25 bp, Homo sapien
ggagagacccctatgttatcaataa

SEQ ID NO: 4755675 - DNA, 25 bp, Homo sapien
caaatcaatgtcctggtgtccttct

SEQ ID NO: 4755676 - DNA, 25 bp, Homo sapien
caggatagccaaatcaatgtcctgg

SEQ ID NO: 4755677 - DNA, 25 bp, Homo sapien
tttgagtaaagctgtcaggatagcc

SEQ ID NO: 4755678 - DNA, 25 bp, Homo sapien
ctgatcccatccgaaataccgtaat

SEQ ID NO: 4755679 - DNA, 25 bp, Homo sapien
gtgctggtttcagaacccaaggacc

SEQ ID NO: 4755680 - DNA, 25 bp, Homo sapien
tgtgctggtttcagaacccaaggac

SEQ ID NO: 4755681 - DNA, 25 bp, Homo sapien
tgctggtttcagaacccaaggaccc

SEQ ID NO: 4755682 - DNA, 25 bp, Homo sapien
ctggcagagttagcaggatgtttat

SEQ ID NO: 4755683 - DNA, 25 bp, Homo sapien
cagagttagcaggatgtttatatgc

SEQ ID NO: 4755684 - DNA, 25 bp, Homo sapien
tatatgctgtttggtgccggaccat

SEQ ID NO: 4755685 - DNA, 25 bp, Homo sapien
gtttatatgctgtttggtgccggac

SEQ ID NO: 4755686 - DNA, 25 bp, Homo sapien
tctaaaacatattcgtattcgattt

SEQ ID NO: 4755687 - DNA, 25 bp, Homo sapien
cgtattcgattttcagtctttgaga

SEQ ID NO: 4755688 - DNA, 25 bp, Homo sapien
aaacatattcgtattcgattttcag

SEQ ID NO: 4755689 - DNA, 25 bp, Homo sapien
catattcgtattcgattttcagtct

SEQ ID NO: 4755690 - DNA, 25 bp, Homo sapien
aaaggttgagtataagcccagggca

SEQ ID NO: 4755691 - DNA, 25 bp, Homo sapien
tcctttttgactcaaaggttgagta

SEQ ID NO: 4755692 - DNA, 25 bp, Homo sapien
gatgaatcagacaaagttctactct

SEQ ID NO: 4755693 - DNA, 25 bp, Homo sapien
tgactcaaaggttgagtataagccc

SEQ ID NO: 4755694 - DNA, 25 bp, Homo sapien
taaatatgctaaacgttgtcccaga

SEQ ID NO: 4755695 - DNA, 25 bp, Homo sapien
ttaccacttcagtcagatgctggca

SEQ ID NO: 4755696 - DNA, 25 bp, Homo sapien
taaggaactatgtagacgtgcacac

SEQ ID NO: 4755697 - DNA, 25 bp, Homo sapien
catgactgggcaatgttaaacgtgc

SEQ ID NO: 4755698 - DNA, 25 bp, Homo sapien
tgaaaggctgcattcatcacagatg

SEQ ID NO: 4755699 - DNA, 25 bp, Homo sapien
gaaacaggagacttacgatgggact

SEQ ID NO: 4755700 - DNA, 25 bp, Homo sapien
aatactctgtacagtggcccaaggc

SEQ ID NO: 4755701 - DNA, 25 bp, Homo sapien
cagatgtcaagtacaggctgggtct

SEQ ID NO: 4755702 - DNA, 25 bp, Homo sapien
tgagtttcggttgcatatgccccgg

SEQ ID NO: 4755703 - DNA, 25 bp, Homo sapien
tgtcactagcagttcctgagtacat

SEQ ID NO: 4755704 - DNA, 25 bp, Homo sapien
tacatgtccatcttgaatttttcgc

SEQ ID NO: 4755705 - DNA, 25 bp, Homo sapien
tatgccccggtttatttgtgtatga

SEQ ID NO: 4755706 - DNA, 25 bp, Homo sapien
tggaagttgcaagttgacacttata

SEQ ID NO: 4755707 - DNA, 25 bp, Homo sapien
taatggaagttgcaagttgacactt

SEQ ID NO: 4755708 - DNA, 25 bp, Homo sapien
tccataatggaagttgcaagttgac

SEQ ID NO: 4755709 - DNA, 25 bp, Homo sapien
ttttgtccataatggaagttgcaag

SEQ ID NO: 4755710 - DNA, 25 bp, Homo sapien
cagggttgggtatgatgtgcctaca

SEQ ID NO: 4755711 - DNA, 25 bp, Homo sapien
tctctgatgatgcagggttgggtat

SEQ ID NO: 4755712 - DNA, 25 bp, Homo sapien
ccagtccagaggcatctctctgatg

SEQ ID NO: 4755713 - DNA, 25 bp, Homo sapien
gcatctctctgatgatgcagggttg

SEQ ID NO: 4755714 - DNA, 25 bp, Homo sapien
ctgccagaccctgctgacaaaattt

SEQ ID NO: 4755715 - DNA, 25 bp, Homo sapien
cagaccctgctgacaaaatttctgt

SEQ ID NO: 4755716 - DNA, 25 bp, Homo sapien
accctgctgacaaaatttctgtttc

SEQ ID NO: 4755717 - DNA, 25 bp, Homo sapien
gccagaccctgctgacaaaatttct

SEQ ID NO: 4755718 - DNA, 25 bp, Homo sapien
tgaaaggctgcattcatcacagatg

SEQ ID NO: 4755719 - DNA, 25 bp, Homo sapien
cagatgtcaagtacaggctgggtct

SEQ ID NO: 4755720 - DNA, 25 bp, Homo sapien
gaaacaggagacttacgatgggact

SEQ ID NO: 4755721 - DNA, 25 bp, Homo sapien
aatactctgtacagtggcccaaggc

SEQ ID NO: 4755722 - DNA, 25 bp, Homo sapien
tgagtttcggttgcatatgccccgg

SEQ ID NO: 4755723 - DNA, 25 bp, Homo sapien
tacatgtccatcttgaatttttcgc

SEQ ID NO: 4755724 - DNA, 25 bp, Homo sapien
tatgccccggtttatttgtgtatga

SEQ ID NO: 4755725 - DNA, 25 bp, Homo sapien
tgtcactagcagttcctgagtacat

SEQ ID NO: 4755726 - DNA, 25 bp, Homo sapien
tggaagttgcaagttgacacttata

SEQ ID NO: 4755727 - DNA, 25 bp, Homo sapien
taatggaagttgcaagttgacactt

SEQ ID NO: 4755728 - DNA, 25 bp, Homo sapien
tccataatggaagttgcaagttgac

SEQ ID NO: 4755729 - DNA, 25 bp, Homo sapien
ttttgtccataatggaagttgcaag

SEQ ID NO: 4755730 - DNA, 25 bp, Homo sapien
tctctgatgatgcagggttgggtat

SEQ ID NO: 4755731 - DNA, 25 bp, Homo sapien
cagggttgggtatgatgtgcctaca

SEQ ID NO: 4755732 - DNA, 25 bp, Homo sapien
ccagtccagaggcatctctctgatg

SEQ ID NO: 4755733 - DNA, 25 bp, Homo sapien
gcatctctctgatgatgcagggttg

SEQ ID NO: 4755734 - DNA, 25 bp, Homo sapien
ctgccagaccctgctgacaaaattt

SEQ ID NO: 4755735 - DNA, 25 bp, Homo sapien
accctgctgacaaaatttctgtttc

SEQ ID NO: 4755736 - DNA, 25 bp, Homo sapien
cagaccctgctgacaaaatttctgt

SEQ ID NO: 4755737 - DNA, 25 bp, Homo sapien
gccagaccctgctgacaaaatttct

SEQ ID NO: 4755738 - DNA, 25 bp, Homo sapien
ctgtatttccccttgactttgtcat

SEQ ID NO: 4755739 - DNA, 25 bp, Homo sapien
cctggatagaggaagtattcgagct

SEQ ID NO: 4755740 - DNA, 25 bp, Homo sapien
tgcaacaccatgagctaacgacatc

SEQ ID NO: 4755741 - DNA, 25 bp, Homo sapien
ctaacgacatccgagatgggaggat

SEQ ID NO: 4755742 - DNA, 25 bp, Homo sapien
tattcgagctgcaacaccatgagct

SEQ ID NO: 4755743 - DNA, 25 bp, Homo sapien
gatgctgagcttgggttcgagtgta

SEQ ID NO: 4755744 - DNA, 25 bp, Homo sapien
ccaacagctggtccctcaaagattc

SEQ ID NO: 4755745 - DNA, 25 bp, Homo sapien
gttcgagtgtatgtgaaagtcttct

SEQ ID NO: 4755746 - DNA, 25 bp, Homo sapien
tcttctgtatagtcaccaacagctg

SEQ ID NO: 4755747 - DNA, 25 bp, Homo sapien
gccttgccccatggtgttgctcttc

SEQ ID NO: 4755748 - DNA, 25 bp, Homo sapien
catggtgttgctcttcctgattata

SEQ ID NO: 4755749 - DNA, 25 bp, Homo sapien
tgtttgagttgagcctattgacttc

SEQ ID NO: 4755750 - DNA, 25 bp, Homo sapien
actgtttgagttgagcctattgact

SEQ ID NO: 4755751 - DNA, 25 bp, Homo sapien
acccagccatatcatcagagaattc

SEQ ID NO: 4755752 - DNA, 25 bp, Homo sapien
tagctgggacttggcctcctgagat

SEQ ID NO: 4755753 - DNA, 25 bp, Homo sapien
acacccagccatatcatcagagaat

SEQ ID NO: 4755754 - DNA, 25 bp, Homo sapien
gagaattctgttgggcagtgctgct

SEQ ID NO: 4755755 - DNA, 25 bp, Homo sapien
gagaatcatggtctaggcctcctat

SEQ ID NO: 4755756 - DNA, 25 bp, Homo sapien
cagagaagccttgtgacagcaggaa

SEQ ID NO: 4755757 - DNA, 25 bp, Homo sapien
tctggaccaaaagcatagcatcgcc

SEQ ID NO: 4755758 - DNA, 25 bp, Homo sapien
tttgacagagtaaacccgcaccttg

SEQ ID NO: 4755759 - DNA, 25 bp, Homo sapien
tcagagaagtgtggaccataggcca

SEQ ID NO: 4755760 - DNA, 25 bp, Homo sapien
tcatatacagtttcgtgggccccac

SEQ ID NO: 4755761 - DNA, 25 bp, Homo sapien
tccatgtagggcactgatgagccaa

SEQ ID NO: 4755762 - DNA, 25 bp, Homo sapien
aaatttggcagaaggtacagagggc

SEQ ID NO: 4755763 - DNA, 25 bp, Homo sapien
aagttcttgatagctagggccctgc

SEQ ID NO: 4755764 - DNA, 25 bp, Homo sapien
gcctttatcaaagcacacatgacct

SEQ ID NO: 4755765 - DNA, 25 bp, Homo sapien
tttatagataaaaccaccagcgttc

SEQ ID NO: 4755766 - DNA, 25 bp, Homo sapien
gattctcgtgaagaatgcgccacgc

SEQ ID NO: 4755767 - DNA, 25 bp, Homo sapien
catcctgaaaggtatggtatcccca

SEQ ID NO: 4755768 - DNA, 25 bp, Homo sapien
cacttcggttgagcattatcaggca

SEQ ID NO: 4755769 - DNA, 25 bp, Homo sapien
gaagtacttgctcactgattgacaa

SEQ ID NO: 4755770 - DNA, 25 bp, Homo sapien
taaaatttggatgaacgaggagcac

SEQ ID NO: 4755771 - DNA, 25 bp, Homo sapien
tctttgataatcagccattgttcac

SEQ ID NO: 4755772 - DNA, 25 bp, Homo sapien
gcactagttatgtgcataaactcat

SEQ ID NO: 4755773 - DNA, 25 bp, Homo sapien
cattgttcacagttggtgtagatcc

SEQ ID NO: 4755774 - DNA, 25 bp, Homo sapien
gatcccatatagattgtgcttttgc

SEQ ID NO: 4755775 - DNA, 25 bp, Homo sapien
ttgttgtataatggcctaggtagga

SEQ ID NO: 4755776 - DNA, 25 bp, Homo sapien
tgaggaacactacagcacataccat

SEQ ID NO: 4755777 - DNA, 25 bp, Homo sapien
aagggaaagaatccccatgacacgg

SEQ ID NO: 4755778 - DNA, 25 bp, Homo sapien
ggacagcatgagattccatttcata

SEQ ID NO: 4755779 - DNA, 25 bp, Homo sapien
cctaacagaccaaggaaagggcatg

SEQ ID NO: 4755780 - DNA, 25 bp, Homo sapien
gaagttaccaacctgaaccatctgg

SEQ ID NO: 4755781 - DNA, 25 bp, Homo sapien
tctaataatctgcaagagtgcctgg

SEQ ID NO: 4755782 - DNA, 25 bp, Homo sapien
gaagcctgatggcacgatctaccac

SEQ ID NO: 4755783 - DNA, 25 bp, Homo sapien
aaaactcaattcctgcttctcctta

SEQ ID NO: 4755784 - DNA, 25 bp, Homo sapien
tgttaaaactcaattcctgcttctc

SEQ ID NO: 4755785 - DNA, 25 bp, Homo sapien
tcatgtgttaaaactcaattcctgc

SEQ ID NO: 4755786 - DNA, 25 bp, Homo sapien
gttaaaactcaattcctgcttctcc

SEQ ID NO: 4755787 - DNA, 25 bp, Homo sapien
gagaaggagatacgaagagaagaaa

SEQ ID NO: 4755788 - DNA, 25 bp, Homo sapien
agaaggagatacgaagagaagaaaa

SEQ ID NO: 4755789 - DNA, 25 bp, Homo sapien
ggagaaggagatacgaagagaagaa

SEQ ID NO: 4755790 - DNA, 25 bp, Homo sapien
gaaggagatacgaagagaagaaaaa

SEQ ID NO: 4755791 - DNA, 25 bp, Homo sapien
cgtgtagctttcatagaatttccca

SEQ ID NO: 4755792 - DNA, 25 bp, Homo sapien
gatttgaggtcttggttgagctact

SEQ ID NO: 4755793 - DNA, 25 bp, Homo sapien
tgaaaacataatccactcataccct

SEQ ID NO: 4755794 - DNA, 25 bp, Homo sapien
tcataccctcgtttccaaacaggct

SEQ ID NO: 4755795 - DNA, 25 bp, Homo sapien
aaaacaatcgagatcacattgggtc

SEQ ID NO: 4755796 - DNA, 25 bp, Homo sapien
atcacagacaaccactggcacggga

SEQ ID NO: 4755797 - DNA, 25 bp, Homo sapien
tctgagtatttatgcccaaaggcca

SEQ ID NO: 4755798 - DNA, 25 bp, Homo sapien
gaggggtgtctcgaaggtactccaa

SEQ ID NO: 4755799 - DNA, 25 bp, Homo sapien
accacaggaacaccttgaccgattc

SEQ ID NO: 4755800 - DNA, 25 bp, Homo sapien
caccacaggaacaccttgaccgatt

SEQ ID NO: 4755801 - DNA, 25 bp, Homo sapien
agtgccaccacaggaacaccttgac

SEQ ID NO: 4755802 - DNA, 25 bp, Homo sapien
ctatgagtgccaccacaggaacacc

SEQ ID NO: 4755803 - DNA, 25 bp, Homo sapien
aagtgtgatccactcagtgttctcg

SEQ ID NO: 4755804 - DNA, 25 bp, Homo sapien
cactcagtgttctcgtggagggaga

SEQ ID NO: 4755805 - DNA, 25 bp, Homo sapien
agaccaagtgtgatccactcagtgt

SEQ ID NO: 4755806 - DNA, 25 bp, Homo sapien
gatccactcagtgttctcgtggagg

SEQ ID NO: 4755807 - DNA, 25 bp, Homo sapien
ctaccatgttccagtgatctggcat

SEQ ID NO: 4755808 - DNA, 25 bp, Homo sapien
tctaccatgttccagtgatctggca

SEQ ID NO: 4755809 - DNA, 25 bp, Homo sapien
ggaccttctaccatgttccagtgat

SEQ ID NO: 4755810 - DNA, 25 bp, Homo sapien
ccttctaccatgttccagtgatctg

SEQ ID NO: 4755811 - DNA, 25 bp, Homo sapien
gaaaatgacatcagataactagtaa

SEQ ID NO: 4755812 - DNA, 25 bp, Homo sapien
cacacataaacgtattgtctttatt

SEQ ID NO: 4755813 - DNA, 25 bp, Homo sapien
actagtaatgacctgaagtagtctg

SEQ ID NO: 4755814 - DNA, 25 bp, Homo sapien
ctgtagcctattcttagaatatgtt

SEQ ID NO: 4755815 - DNA, 25 bp, Homo sapien
tatccacatagtgaacacactcatg

SEQ ID NO: 4755816 - DNA, 25 bp, Homo sapien
cactcatgtaacctccacccatatc

SEQ ID NO: 4755817 - DNA, 25 bp, Homo sapien
ctccacccatatcaagaaatagaat

SEQ ID NO: 4755818 - DNA, 25 bp, Homo sapien
taacaacaatacatatccacatagt

SEQ ID NO: 4755819 - DNA, 25 bp, Homo sapien
ggactcctggttaggatatcacccc

SEQ ID NO: 4755820 - DNA, 25 bp, Homo sapien
tggaccggtaccagtctgtggacag

SEQ ID NO: 4755821 - DNA, 25 bp, Homo sapien
gctcctaataggacatggaccggta

SEQ ID NO: 4755822 - DNA, 25 bp, Homo sapien
caaatttgtgtctcgctcagctaaa

SEQ ID NO: 4755823 - DNA, 25 bp, Homo sapien
tttatgtcaaggtcacccacagatg

SEQ ID NO: 4755824 - DNA, 25 bp, Homo sapien
gatctaaagtgcgtatgggtctgaa

SEQ ID NO: 4755825 - DNA, 25 bp, Homo sapien
cattatgcatccatggagagcaggc

SEQ ID NO: 4755826 - DNA, 25 bp, Homo sapien
gactataggccacagatcatgatta

SEQ ID NO: 4755827 - DNA, 25 bp, Homo sapien
aagtttgcacactaccgcagctctt

SEQ ID NO: 4755828 - DNA, 25 bp, Homo sapien
accgcagctctttacaaatagtttc

SEQ ID NO: 4755829 - DNA, 25 bp, Homo sapien
atctttaactaatgcatctcttctg

SEQ ID NO: 4755830 - DNA, 25 bp, Homo sapien
aatagtttcagaattcgattcttga

SEQ ID NO: 4755831 - DNA, 25 bp, Homo sapien
tccagaccaaccatgtgaggaaggt

SEQ ID NO: 4755832 - DNA, 25 bp, Homo sapien
gaatgggaaatcctttaagctggcc

SEQ ID NO: 4755833 - DNA, 25 bp, Homo sapien
gaaaacaaaggagcagagggtacca

SEQ ID NO: 4755834 - DNA, 25 bp, Homo sapien
aagcctctgttagtggtggtcctcc

SEQ ID NO: 4755835 - DNA, 25 bp, Homo sapien
agagggcatctgtgaaagagaggaa

SEQ ID NO: 4755836 - DNA, 25 bp, Homo sapien
attgcaccaaagcctcagtgacaga

SEQ ID NO: 4755837 - DNA, 25 bp, Homo sapien
taaggcagtcttcacctgtctttta

SEQ ID NO: 4755838 - DNA, 25 bp, Homo sapien
tatcctgaaggtccacatgagctgt

SEQ ID NO: 4755839 - DNA, 25 bp, Homo sapien
tgagattatcatgatcaaacattcc

SEQ ID NO: 4755840 - DNA, 25 bp, Homo sapien
gctgccactctgcttgctctaaggc

SEQ ID NO: 4755841 - DNA, 25 bp, Homo sapien
tcaggtcaatgctgagtgcagtccc

SEQ ID NO: 4755842 - DNA, 25 bp, Homo sapien
ttcaggtcaatgctgagtgcagtcc

SEQ ID NO: 4755843 - DNA, 25 bp, Homo sapien
caggtcaatgctgagtgcagtccca

SEQ ID NO: 4755844 - DNA, 25 bp, Homo sapien
ggtcaatgctgagtgcagtcccaat

SEQ ID NO: 4755845 - DNA, 25 bp, Homo sapien
ttccagcataactcatgatcgtgtg

SEQ ID NO: 4755846 - DNA, 25 bp, Homo sapien
tactatatgggaagctactctccat

SEQ ID NO: 4755847 - DNA, 25 bp, Homo sapien
gactgtttactatatgggaagctac

SEQ ID NO: 4755848 - DNA, 25 bp, Homo sapien
gatcgtgtgggaagactgtttacta

SEQ ID NO: 4755849 - DNA, 25 bp, Homo sapien
ttccagtgaggcttggccttttgcc

SEQ ID NO: 4755850 - DNA, 25 bp, Homo sapien
aggtctaagacccagggcagagaga

SEQ ID NO: 4755851 - DNA, 25 bp, Homo sapien
acttgcttgattgcagtgggccttc

SEQ ID NO: 4755852 - DNA, 25 bp, Homo sapien
caacatggaccccaagacttgcttg

SEQ ID NO: 4755853 - DNA, 25 bp, Homo sapien
ttgatgttgtctctgcgaggaacat

SEQ ID NO: 4755854 - DNA, 25 bp, Homo sapien
tgtttttgatgttgtctctgcgagg

SEQ ID NO: 4755855 - DNA, 25 bp, Homo sapien
tttgatgttgtctctgcgaggaaca

SEQ ID NO: 4755856 - DNA, 25 bp, Homo sapien
tttttgatgttgtctctgcgaggaa

SEQ ID NO: 4755857 - DNA, 25 bp, Homo sapien
cattcttctgcctgcgatttaggac

SEQ ID NO: 4755858 - DNA, 25 bp, Homo sapien
ggctgcagcacgtgaaactcattac

SEQ ID NO: 4755859 - DNA, 25 bp, Homo sapien
aggaattgcccagtaccccatgtga

SEQ ID NO: 4755860 - DNA, 25 bp, Homo sapien
actcattacgcagctttgaaacctg

SEQ ID NO: 4755861 - DNA, 25 bp, Homo sapien
tgagctgggatcttaaggggttcaa

SEQ ID NO: 4755862 - DNA, 25 bp, Homo sapien
atgatcctgagctgggatcttaagg

SEQ ID NO: 4755863 - DNA, 25 bp, Homo sapien
tcctgagctgggatcttaaggggtt

SEQ ID NO: 4755864 - DNA, 25 bp, Homo sapien
tgatcctgagctgggatcttaaggg

SEQ ID NO: 4755865 - DNA, 25 bp, Homo sapien
gatccccagggaatgagacacctta

SEQ ID NO: 4755866 - DNA, 25 bp, Homo sapien
acaggctgtgctctataggatctca

SEQ ID NO: 4755867 - DNA, 25 bp, Homo sapien
aaatactgaggccacggtgcactgg

SEQ ID NO: 4755868 - DNA, 25 bp, Homo sapien
tcctgatctggactgaaaagcaacc

SEQ ID NO: 4755869 - DNA, 25 bp, Homo sapien
tctcttatgggacagttatgggccc

SEQ ID NO: 4755870 - DNA, 25 bp, Homo sapien
tatgggcccaatgatggaaaatttc

SEQ ID NO: 4755871 - DNA, 25 bp, Homo sapien
catggttatcccaatgcatttgatg

SEQ ID NO: 4755872 - DNA, 25 bp, Homo sapien
ttttcaagtcacatggtttggaccc

SEQ ID NO: 4755873 - DNA, 25 bp, Homo sapien
aaagggaagtccacgagtcacatga

SEQ ID NO: 4755874 - DNA, 25 bp, Homo sapien
gccagtgatgacaattgaacgtccc

SEQ ID NO: 4755875 - DNA, 25 bp, Homo sapien
tctcaggcataggatgacaaaggga

SEQ ID NO: 4755876 - DNA, 25 bp, Homo sapien
agtcacatgaagaaagactgtagcc

SEQ ID NO: 4755877 - DNA, 25 bp, Homo sapien
gagtctaactggcaactaccccaaa

SEQ ID NO: 4755878 - DNA, 25 bp, Homo sapien
taactggcaactaccccaaaatgaa

SEQ ID NO: 4755879 - DNA, 25 bp, Homo sapien
caactgagtctaactggcaactacc

SEQ ID NO: 4755880 - DNA, 25 bp, Homo sapien
ctgagtctaactggcaactacccca

SEQ ID NO: 4755881 - DNA, 25 bp, Homo sapien
gaaacctatgtagagcatcatccag

SEQ ID NO: 4755882 - DNA, 25 bp, Homo sapien
cctagatagcttctgtggtgtggaa

SEQ ID NO: 4755883 - DNA, 25 bp, Homo sapien
tatacgtgatggcaactcaagttgc

SEQ ID NO: 4755884 - DNA, 25 bp, Homo sapien
tggacaggtccttaaaaatcatagc

SEQ ID NO: 4755885 - DNA, 25 bp, Homo sapien
tcgagtactcaaaaatcctagtgcc

SEQ ID NO: 4755886 - DNA, 25 bp, Homo sapien
tactctaagacactgatacagcttg

SEQ ID NO: 4755887 - DNA, 25 bp, Homo sapien
tgaggcaggagggacaactacagtt

SEQ ID NO: 4755888 - DNA, 25 bp, Homo sapien
gttcctacacctccaacaagtcgag

SEQ ID NO: 4755889 - DNA, 25 bp, Homo sapien
tgcctattctaccactgtaactgaa

SEQ ID NO: 4755890 - DNA, 25 bp, Homo sapien
ttacacactcctagccaataagctc

SEQ ID NO: 4755891 - DNA, 25 bp, Homo sapien
taccaactgtgctgcatgagaattc

SEQ ID NO: 4755892 - DNA, 25 bp, Homo sapien
cactgatggtactttagggatacag

SEQ ID NO: 4755893 - DNA, 25 bp, Homo sapien
gacatgctttgcctctctggaccga

SEQ ID NO: 4755894 - DNA, 25 bp, Homo sapien
tagtatcgggtggtgactcctccag

SEQ ID NO: 4755895 - DNA, 25 bp, Homo sapien
tttgtactctagactcctgacgggc

SEQ ID NO: 4755896 - DNA, 25 bp, Homo sapien
cctacttcaaagagcctgggtcact

SEQ ID NO: 4755897 - DNA, 25 bp, Homo sapien
tagagattcctatgcgcttaagaga

SEQ ID NO: 4755898 - DNA, 25 bp, Homo sapien
tccttggagtaccatgcagatgatg

SEQ ID NO: 4755899 - DNA, 25 bp, Homo sapien
gctctggcccggtagaaataatggt

SEQ ID NO: 4755900 - DNA, 25 bp, Homo sapien
tctgaaaactcatctagccaaaggg

SEQ ID NO: 4755901 - DNA, 25 bp, Homo sapien
acatggtctggtatggccggacaac

SEQ ID NO: 4755902 - DNA, 25 bp, Homo sapien
cagtggtcccgttgtcagccagaat

SEQ ID NO: 4755903 - DNA, 25 bp, Homo sapien
tgctcatgggattggacatggtctg

SEQ ID NO: 4755904 - DNA, 25 bp, Homo sapien
gaagtgggaatgcatgctgttgaga

SEQ ID NO: 4755905 - DNA, 25 bp, Homo sapien
tgttgcagttcagataagaaacctg

SEQ ID NO: 4755906 - DNA, 25 bp, Homo sapien
tcccaagaacataggatgatccagg

SEQ ID NO: 4755907 - DNA, 25 bp, Homo sapien
tgagaaattaagtcctactgccccg

SEQ ID NO: 4755908 - DNA, 25 bp, Homo sapien
tttggagaatcgagaagacagtcac

SEQ ID NO: 4755909 - DNA, 25 bp, Homo sapien
tctcacccagaagtagtaaacagga

SEQ ID NO: 4755910 - DNA, 25 bp, Homo sapien
tcaagttaacgcagaatagtgacct

SEQ ID NO: 4755911 - DNA, 25 bp, Homo sapien
gctaatctaagaaaactgcttgagt

SEQ ID NO: 4755912 - DNA, 25 bp, Homo sapien
ctaaaattgagtctggacagcctgt

SEQ ID NO: 4755913 - DNA, 25 bp, Homo sapien
caaggattaacccattgacggcata

SEQ ID NO: 4755914 - DNA, 25 bp, Homo sapien
cagctggatatgaaagtccttctaa

SEQ ID NO: 4755915 - DNA, 25 bp, Homo sapien
catgtagattttaagagggaaggca

SEQ ID NO: 4755916 - DNA, 25 bp, Homo sapien
tgacggcatactttataggtgggaa

SEQ ID NO: 4755917 - DNA, 25 bp, Homo sapien
tttctgttccattggggtgactaac

SEQ ID NO: 4755918 - DNA, 25 bp, Homo sapien
tctcctcacacctttgacccgaata

SEQ ID NO: 4755919 - DNA, 25 bp, Homo sapien
gggtgactaacatcctccactcact

SEQ ID NO: 4755920 - DNA, 25 bp, Homo sapien
ctttgacccgaataccatcccttct

SEQ ID NO: 4755921 - DNA, 25 bp, Homo sapien
attcctcaccaaaatctgttgttcg

SEQ ID NO: 4755922 - DNA, 25 bp, Homo sapien
ttcctcaccaaaatctgttgttcga

SEQ ID NO: 4755923 - DNA, 25 bp, Homo sapien
ttattcctcaccaaaatctgttgtt

SEQ ID NO: 4755924 - DNA, 25 bp, Homo sapien
tcctcaccaaaatctgttgttcgat

SEQ ID NO: 4755925 - DNA, 25 bp, Homo sapien
tgttttaccgccacacccaacaggc

SEQ ID NO: 4755926 - DNA, 25 bp, Homo sapien
tgggtagatcacacatctttcaaaa

SEQ ID NO: 4755927 - DNA, 25 bp, Homo sapien
tgtccctcagatgggtagatcacac

SEQ ID NO: 4755928 - DNA, 25 bp, Homo sapien
atcccacactgttttaccgccacac

SEQ ID NO: 4755929 - DNA, 25 bp, Homo sapien
cttccaccttccaccttgagttgct

SEQ ID NO: 4755930 - DNA, 25 bp, Homo sapien
tccaccttccaccttgagttgctat

SEQ ID NO: 4755931 - DNA, 25 bp, Homo sapien
ttccaccttccaccttgagttgcta

SEQ ID NO: 4755932 - DNA, 25 bp, Homo sapien
tgtccccactgtagtcacaatcatg

SEQ ID NO: 4755933 - DNA, 25 bp, Homo sapien
ccagatgcttggttaaaaaatgtcc

SEQ ID NO: 4755934 - DNA, 25 bp, Homo sapien
aagaaaacagttttacagccagatg

SEQ ID NO: 4755935 - DNA, 25 bp, Homo sapien
cactgtagtcacaatcatgtgatgc

SEQ ID NO: 4755936 - DNA, 25 bp, Homo sapien
tacttttctgatatcccctctagga

SEQ ID NO: 4755937 - DNA, 25 bp, Homo sapien
acttttctgatatcccctctaggag

SEQ ID NO: 4755938 - DNA, 25 bp, Homo sapien
cttttctgatatcccctctaggaga

SEQ ID NO: 4755939 - DNA, 25 bp, Homo sapien
tttctgatatcccctctaggagaag

SEQ ID NO: 4755940 - DNA, 25 bp, Homo sapien
atggaaagcgacagcactcaggact

SEQ ID NO: 4755941 - DNA, 25 bp, Homo sapien
atctcttccaatgaggtcctcctgg

SEQ ID NO: 4755942 - DNA, 25 bp, Homo sapien
gagacttagaggcatgatccttcaa

SEQ ID NO: 4755943 - DNA, 25 bp, Homo sapien
ggcatcgccaacatgacgaataaca

SEQ ID NO: 4755944 - DNA, 25 bp, Homo sapien
gggcaatacctatggtgcatatctt

SEQ ID NO: 4755945 - DNA, 25 bp, Homo sapien
taggagccaatagcttgactgtgtc

SEQ ID NO: 4755946 - DNA, 25 bp, Homo sapien
ggagaaaacataaactcatggctgt

SEQ ID NO: 4755947 - DNA, 25 bp, Homo sapien
gctgtaatgccagatgcattggcca

SEQ ID NO: 4755948 - DNA, 25 bp, Homo sapien
aagcatccaatgtctataaaaagaa

SEQ ID NO: 4755949 - DNA, 25 bp, Homo sapien
gagaacctactcgtaaagacaatgt

SEQ ID NO: 4755950 - DNA, 25 bp, Homo sapien
gacactgtgcgctaaactaactaaa

SEQ ID NO: 4755951 - DNA, 25 bp, Homo sapien
tcagtttacaagatgttaggcggca

SEQ ID NO: 4755952 - DNA, 25 bp, Homo sapien
taaacacatgaaacacaccaggcaa

SEQ ID NO: 4755953 - DNA, 25 bp, Homo sapien
cattgaacatgagcagtctgcagac

SEQ ID NO: 4755954 - DNA, 25 bp, Homo sapien
gaattctcagtgtaggtcttactca

SEQ ID NO: 4755955 - DNA, 25 bp, Homo sapien
aatatctttacgtagctgtgtgcag

SEQ ID NO: 4755956 - DNA, 25 bp, Homo sapien
ccaaactacgaatgcaaaattaagc

SEQ ID NO: 4755957 - DNA, 25 bp, Homo sapien
taagaggagatcaggttttgtatca

SEQ ID NO: 4755958 - DNA, 25 bp, Homo sapien
cagtgaatatccacgctccagttgt

SEQ ID NO: 4755959 - DNA, 25 bp, Homo sapien
cttgagttttggctggagttcaaag

SEQ ID NO: 4755960 - DNA, 25 bp, Homo sapien
gccattccttggtcatcaggtgtaa

SEQ ID NO: 4755961 - DNA, 25 bp, Homo sapien
tacttgagtagtgtggtttagcgac

SEQ ID NO: 4755962 - DNA, 25 bp, Homo sapien
tgtgccacacaaggagcattcaggc

SEQ ID NO: 4755963 - DNA, 25 bp, Homo sapien
taagtttatggccttgattgtgctg

SEQ ID NO: 4755964 - DNA, 25 bp, Homo sapien
tcatgcagagggcaaaaactttcag

SEQ ID NO: 4755965 - DNA, 25 bp, Homo sapien
gtcagaatccttcagttctatcagc

SEQ ID NO: 4755966 - DNA, 25 bp, Homo sapien
ggtacttaacaggaagtcagaatcc

SEQ ID NO: 4755967 - DNA, 25 bp, Homo sapien
gatgtggcttggtacttaacaggaa

SEQ ID NO: 4755968 - DNA, 25 bp, Homo sapien
ggtaggatgtggcttggtacttaac

SEQ ID NO: 4755969 - DNA, 25 bp, Homo sapien
aataaaatcgtttggagtctcagtc

SEQ ID NO: 4755970 - DNA, 25 bp, Homo sapien
cacagacctctgtcagtgatgggct

SEQ ID NO: 4755971 - DNA, 25 bp, Homo sapien
tcttagggtctgtcaaatgcactac

SEQ ID NO: 4755972 - DNA, 25 bp, Homo sapien
tctaagtacgtgatgtggtgatcca

SEQ ID NO: 4755973 - DNA, 25 bp, Homo sapien
agcctggcacccctatggaaatatt

SEQ ID NO: 4755974 - DNA, 25 bp, Homo sapien
cactggaacagagttgattgtggac

SEQ ID NO: 4755975 - DNA, 25 bp, Homo sapien
tgattgtggacttatgcagcctggc

SEQ ID NO: 4755976 - DNA, 25 bp, Homo sapien
ggcacccctatggaaatattctaac

SEQ ID NO: 4755977 - DNA, 25 bp, Homo sapien
tcttgagcactagctgtataccagg

SEQ ID NO: 4755978 - DNA, 25 bp, Homo sapien
gtttcactactctgtctttgttact

SEQ ID NO: 4755979 - DNA, 25 bp, Homo sapien
ttgagcactagctgtataccaggta

SEQ ID NO: 4755980 - DNA, 25 bp, Homo sapien
gctgtttcactactctgtctttgtt

SEQ ID NO: 4755981 - DNA, 25 bp, Homo sapien
gaagcaagcttgttggacaatagca

SEQ ID NO: 4755982 - DNA, 25 bp, Homo sapien
taactaggaagtggcccatgatgaa

SEQ ID NO: 4755983 - DNA, 25 bp, Homo sapien
tccatgacacgcctaagaacagaca

SEQ ID NO: 4755984 - DNA, 25 bp, Homo sapien
tcccttgtggtctgtagtatgcttc

SEQ ID NO: 4755985 - DNA, 25 bp, Homo sapien
aacatgctggcctatcagacgccca

SEQ ID NO: 4755986 - DNA, 25 bp, Homo sapien
tgtcatttcgggagaggcgactttc

SEQ ID NO: 4755987 - DNA, 25 bp, Homo sapien
tgatggaccacttttcagactggat

SEQ ID NO: 4755988 - DNA, 25 bp, Homo sapien
ccaaaagcatccgtagggctgagtt

SEQ ID NO: 4755989 - DNA, 25 bp, Homo sapien
atgatgtggacacattctcttttat

SEQ ID NO: 4755990 - DNA, 25 bp, Homo sapien
tagattatttaacatcacaatattg

SEQ ID NO: 4755991 - DNA, 25 bp, Homo sapien
gctgattagattatttaacatcaca

SEQ ID NO: 4755992 - DNA, 25 bp, Homo sapien
aacatcacaatattgagaattaaag

SEQ ID NO: 4755993 - DNA, 25 bp, Homo sapien
ttatttaacatcacaatattgagaa

SEQ ID NO: 4755994 - DNA, 25 bp, Homo sapien
agcatttgcaatggcagcggagtct

SEQ ID NO: 4755995 - DNA, 25 bp, Homo sapien
gagctgctcagaggattccttctct

SEQ ID NO: 4755996 - DNA, 25 bp, Homo sapien
ctttaagatggaagttgctagagca

SEQ ID NO: 4755997 - DNA, 25 bp, Homo sapien
aagttgctagagcaacatttaatgt

SEQ ID NO: 4755998 - DNA, 25 bp, Homo sapien
gttgctagagcaacatttaatgtta

SEQ ID NO: 4755999 - DNA, 25 bp, Homo sapien
agttgctagagcaacatttaatgtt

SEQ ID NO: 4756000 - DNA, 25 bp, Homo sapien
gcaaagacaaatggatgagactttt

SEQ ID NO: 4756001 - DNA, 25 bp, Homo sapien
gatgagacttttcaaggacaccttc

SEQ ID NO: 4756002 - DNA, 25 bp, Homo sapien
caaggacaccttccttatttctctt

SEQ ID NO: 4756003 - DNA, 25 bp, Homo sapien
gatcccattgttaacctggaaagca

SEQ ID NO: 4756004 - DNA, 25 bp, Homo sapien
taggtccccagatccaatattgaga

SEQ ID NO: 4756005 - DNA, 25 bp, Homo sapien
caaaggtactaaattcataagttcg

SEQ ID NO: 4756006 - DNA, 25 bp, Homo sapien
tccaagcctccctcggtgttgatct

SEQ ID NO: 4756007 - DNA, 25 bp, Homo sapien
tgatctttggtcttcctctaggtcc

SEQ ID NO: 4756008 - DNA, 25 bp, Homo sapien
ggcaaaagcagtccccggagcagct

SEQ ID NO: 4756009 - DNA, 25 bp, Homo sapien
gtactggcaaaagcagtccccggag

SEQ ID NO: 4756010 - DNA, 25 bp, Homo sapien
aagcagtccccggagcagctcctgt

SEQ ID NO: 4756011 - DNA, 25 bp, Homo sapien
gcagtccccggagcagctcctgttg

SEQ ID NO: 4756012 - DNA, 25 bp, Homo sapien
gttaataatgctcttatgaccgccc

SEQ ID NO: 4756013 - DNA, 25 bp, Homo sapien
cgttaataatgctcttatgaccgcc

SEQ ID NO: 4756014 - DNA, 25 bp, Homo sapien
tccgttaataatgctcttatgaccg

SEQ ID NO: 4756015 - DNA, 25 bp, Homo sapien
ttaataatgctcttatgaccgccca

SEQ ID NO: 4756016 - DNA, 25 bp, Homo sapien
gcagaggaccatgacaaagccagct

SEQ ID NO: 4756017 - DNA, 25 bp, Homo sapien
gatcaataccagtcagtggctctcc

SEQ ID NO: 4756018 - DNA, 25 bp, Homo sapien
catccctagtatggtcagctcagca

SEQ ID NO: 4756019 - DNA, 25 bp, Homo sapien
tgagaaacacaggaccaagcgctct

SEQ ID NO: 4756020 - DNA, 25 bp, Homo sapien
catccttaagaatgccctggttgaa

SEQ ID NO: 4756021 - DNA, 25 bp, Homo sapien
tacttagtgcagagtacacaagaga

SEQ ID NO: 4756022 - DNA, 25 bp, Homo sapien
taactctgccatagagagaatttcc

SEQ ID NO: 4756023 - DNA, 25 bp, Homo sapien
cgtgtacaaggtatatatagggcct

SEQ ID NO: 4756024 - DNA, 25 bp, Homo sapien
ttgaggtagtgcaccttgaaagatt

SEQ ID NO: 4756025 - DNA, 25 bp, Homo sapien
gaggtagtgcaccttgaaagattta

SEQ ID NO: 4756026 - DNA, 25 bp, Homo sapien
ccttgaaagatttaaccaagtgact

SEQ ID NO: 4756027 - DNA, 25 bp, Homo sapien
taaccaagtgactgtgcaaggatgc

SEQ ID NO: 4756028 - DNA, 25 bp, Homo sapien
tcatacactatccataggagacaat

SEQ ID NO: 4756029 - DNA, 25 bp, Homo sapien
gccaaggccagtgcctgcataaagt

SEQ ID NO: 4756030 - DNA, 25 bp, Homo sapien
ccataggagacaatgagtgaaagga

SEQ ID NO: 4756031 - DNA, 25 bp, Homo sapien
ggccagtgcctgcataaagtgtttg

SEQ ID NO: 4756032 - DNA, 25 bp, Homo sapien
tcataaatagcagagcagatgtaac

SEQ ID NO: 4756033 - DNA, 25 bp, Homo sapien
gcagggcttgccacaagtacgtaag

SEQ ID NO: 4756034 - DNA, 25 bp, Homo sapien
gagcagatgtaaccctcggcctgcc

SEQ ID NO: 4756035 - DNA, 25 bp, Homo sapien
tccacaatacaaggcatcgtgtgtt

SEQ ID NO: 4756036 - DNA, 25 bp, Homo sapien
caattaggaagcgaaagtggtatat

SEQ ID NO: 4756037 - DNA, 25 bp, Homo sapien
gaagcgaaagtggtatattattaat

SEQ ID NO: 4756038 - DNA, 25 bp, Homo sapien
gtttcatgaaatattgctccagaat

SEQ ID NO: 4756039 - DNA, 25 bp, Homo sapien
atagtcaattaggaagcgaaagtgg

SEQ ID NO: 4756040 - DNA, 25 bp, Homo sapien
caagtccaagagtgaaaggccttca

SEQ ID NO: 4756041 - DNA, 25 bp, Homo sapien
tcccaagtccaagagtgaaaggcct

SEQ ID NO: 4756042 - DNA, 25 bp, Homo sapien
tccaagagtgaaaggccttcaacca

SEQ ID NO: 4756043 - DNA, 25 bp, Homo sapien
ctcccaagtccaagagtgaaaggcc

SEQ ID NO: 4756044 - DNA, 25 bp, Homo sapien
acctgctcagaaatgaactcggcca

SEQ ID NO: 4756045 - DNA, 25 bp, Homo sapien
ctccacctgctcagaaatgaactcg

SEQ ID NO: 4756046 - DNA, 25 bp, Homo sapien
ctgctcagaaatgaactcggccaga

SEQ ID NO: 4756047 - DNA, 25 bp, Homo sapien
caagagctcagtggggacaccacct

SEQ ID NO: 4756048 - DNA, 25 bp, Homo sapien
ctggagtggaacaaggccacccgca

SEQ ID NO: 4756049 - DNA, 25 bp, Homo sapien
gccacccgcactgtcactgccacca

SEQ ID NO: 4756050 - DNA, 25 bp, Homo sapien
ccagggccaagggagccaccacgat

SEQ ID NO: 4756051 - DNA, 25 bp, Homo sapien
agggccaagggagccaccacgataa

SEQ ID NO: 4756052 - DNA, 25 bp, Homo sapien
gaacattttcgactggattcaaaag

SEQ ID NO: 4756053 - DNA, 25 bp, Homo sapien
cattttcgactggattcaaaagaaa

SEQ ID NO: 4756054 - DNA, 25 bp, Homo sapien
ctgaacattttcgactggattcaaa

SEQ ID NO: 4756055 - DNA, 25 bp, Homo sapien
tttcgactggattcaaaagaaacat

SEQ ID NO: 4756056 - DNA, 25 bp, Homo sapien
ttccacctcatgaatgcccacgcac

SEQ ID NO: 4756057 - DNA, 25 bp, Homo sapien
tttccacctcatgaatgcccacgca

SEQ ID NO: 4756058 - DNA, 25 bp, Homo sapien
aaacagtcctttctgcgaggacttc

SEQ ID NO: 4756059 - DNA, 25 bp, Homo sapien
caatggtattcattcagccttattc

SEQ ID NO: 4756060 - DNA, 25 bp, Homo sapien
cctatgtcaatctgaacattgctga

SEQ ID NO: 4756061 - DNA, 25 bp, Homo sapien
ggaggtacattgtgagtcacctatg

SEQ ID NO: 4756062 - DNA, 25 bp, Homo sapien
cattgctgaaaacgaaatatacttt

SEQ ID NO: 4756063 - DNA, 25 bp, Homo sapien
cctacaggcatgttgatagagtcca

SEQ ID NO: 4756064 - DNA, 25 bp, Homo sapien
taacgggatgagcatcagatacaca

SEQ ID NO: 4756065 - DNA, 25 bp, Homo sapien
aacttggatgctaatttggcactgc

SEQ ID NO: 4756066 - DNA, 25 bp, Homo sapien
aatcataactcgtcatttgccaaag

SEQ ID NO: 4756067 - DNA, 25 bp, Homo sapien
gctctgaggcagacaataatgcaga

SEQ ID NO: 4756068 - DNA, 25 bp, Homo sapien
tgttgcttatataacccaggaggag

SEQ ID NO: 4756069 - DNA, 25 bp, Homo sapien
gagtcactgcatttaagctctctag

SEQ ID NO: 4756070 - DNA, 25 bp, Homo sapien
agctttgctctgaaactcaaggctg

SEQ ID NO: 4756071 - DNA, 25 bp, Homo sapien
ccaactttcgcaaatttcatctgtt

SEQ ID NO: 4756072 - DNA, 25 bp, Homo sapien
tttcctccaactttcgcaaatttca

SEQ ID NO: 4756073 - DNA, 25 bp, Homo sapien
tccaactttcgcaaatttcatctgt

SEQ ID NO: 4756074 - DNA, 25 bp, Homo sapien
cctccaactttcgcaaatttcatct

SEQ ID NO: 4756075 - DNA, 25 bp, Homo sapien
gtccagtgatggcttcaacactctc

SEQ ID NO: 4756076 - DNA, 25 bp, Homo sapien
gctgtgctcatgtctctccccagat

SEQ ID NO: 4756077 - DNA, 25 bp, Homo sapien
tgtgtaggatcaacttcaaagccca

SEQ ID NO: 4756078 - DNA, 25 bp, Homo sapien
caaatgtgccgtgtgtacactgtcc

SEQ ID NO: 4756079 - DNA, 25 bp, Homo sapien
tttaaaagtgagtatgggagctcct

SEQ ID NO: 4756080 - DNA, 25 bp, Homo sapien
accacttgtgctacaatgatgccca

SEQ ID NO: 4756081 - DNA, 25 bp, Homo sapien
cacattgtggtccttttgtgcatat

SEQ ID NO: 4756082 - DNA, 25 bp, Homo sapien
gtaccacttgtgctacaatgatgcc

SEQ ID NO: 4756083 - DNA, 25 bp, Homo sapien
ttgttgctcgcatcttgagaagtac

SEQ ID NO: 4756084 - DNA, 25 bp, Homo sapien
ggaatatggtttgttgctcgcatct

SEQ ID NO: 4756085 - DNA, 25 bp, Homo sapien
ctttgaccaacgtcagtatattctc

SEQ ID NO: 4756086 - DNA, 25 bp, Homo sapien
tatggtttgttgctcgcatcttgag

SEQ ID NO: 4756087 - DNA, 25 bp, Homo sapien
ccagttgcctttcatagaagagagc

SEQ ID NO: 4756088 - DNA, 25 bp, Homo sapien
gttccagttgcctttcatagaagag

SEQ ID NO: 4756089 - DNA, 25 bp, Homo sapien
gttgcctttcatagaagagagcaca

SEQ ID NO: 4756090 - DNA, 25 bp, Homo sapien
tcttcagttccagttgcctttcata

SEQ ID NO: 4756091 - DNA, 25 bp, Homo sapien
aataagcagaattggtggtatcacc

SEQ ID NO: 4756092 - DNA, 25 bp, Homo sapien
ccttggttggattcagaggaagaaa

SEQ ID NO: 4756093 - DNA, 25 bp, Homo sapien
gggcctgaacgtgatctgaaataat

SEQ ID NO: 4756094 - DNA, 25 bp, Homo sapien
ctgggcctgaacgtgatctgaaata

SEQ ID NO: 4756095 - DNA, 25 bp, Homo sapien
agggagcattcctacggctttcagg

SEQ ID NO: 4756096 - DNA, 25 bp, Homo sapien
tcaatgtcacgccagaaaaaggtgc

SEQ ID NO: 4756097 - DNA, 25 bp, Homo sapien
tatttctctgtaacgatgcttccgg

SEQ ID NO: 4756098 - DNA, 25 bp, Homo sapien
gcttccggagagcacttggctacca

SEQ ID NO: 4756099 - DNA, 25 bp, Homo sapien
tccggaataagaataccacactgaa

SEQ ID NO: 4756100 - DNA, 25 bp, Homo sapien
aaggtggaaccactgtgctttccca

SEQ ID NO: 4756101 - DNA, 25 bp, Homo sapien
tccacaaccttgctaataggatgtg

SEQ ID NO: 4756102 - DNA, 25 bp, Homo sapien
ctcaagggagaagtagagaacgccc

SEQ ID NO: 4756103 - DNA, 25 bp, Homo sapien
tccaagatagaataacatcactcac

SEQ ID NO: 4756104 - DNA, 25 bp, Homo sapien
cctccaagatagaataacatcactc

SEQ ID NO: 4756105 - DNA, 25 bp, Homo sapien
tcctccaagatagaataacatcact

SEQ ID NO: 4756106 - DNA, 25 bp, Homo sapien
cctcctccaagatagaataacatca

SEQ ID NO: 4756107 - DNA, 25 bp, Homo sapien
ggtcatgtcccacaagaaccactgg

SEQ ID NO: 4756108 - DNA, 25 bp, Homo sapien
tgaatttcccacaaagctcaggtgc

SEQ ID NO: 4756109 - DNA, 25 bp, Homo sapien
tcacatggataagactggccagagc

SEQ ID NO: 4756110 - DNA, 25 bp, Homo sapien
tgaaaggctcaaatccctggctgaa

SEQ ID NO: 4756111 - DNA, 25 bp, Homo sapien
acaagggcagcacaacaattcagtt

SEQ ID NO: 4756112 - DNA, 25 bp, Homo sapien
ggaggtctcctcctatatgcaggca

SEQ ID NO: 4756113 - DNA, 25 bp, Homo sapien
cgcagaatggcggttaagctccagt

SEQ ID NO: 4756114 - DNA, 25 bp, Homo sapien
gcaatccgggaagcaaccgcagaat

SEQ ID NO: 4756115 - DNA, 25 bp, Homo sapien
tgggccctgaattctatgctgacta

SEQ ID NO: 4756116 - DNA, 25 bp, Homo sapien
tcattgtgtatcgtggcctttagca

SEQ ID NO: 4756117 - DNA, 25 bp, Homo sapien
tgtgagagtggaaaatctcctgtca

SEQ ID NO: 4756118 - DNA, 25 bp, Homo sapien
tcaagatggcaattgctgattccct

SEQ ID NO: 4756119 - DNA, 25 bp, Homo sapien
tcctcagactaacatgagtcagatg

SEQ ID NO: 4756120 - DNA, 25 bp, Homo sapien
tcctgttgcatttggtacctgaacc

SEQ ID NO: 4756121 - DNA, 25 bp, Homo sapien
tacctgaaccatagatgggctactg

SEQ ID NO: 4756122 - DNA, 25 bp, Homo sapien
tttataatggccttatgcacctggc

SEQ ID NO: 4756123 - DNA, 25 bp, Homo sapien
aattgcatgcaaattggtccttcag

SEQ ID NO: 4756124 - DNA, 25 bp, Homo sapien
agttcggtcgctttgacaacttctc

SEQ ID NO: 4756125 - DNA, 25 bp, Homo sapien
gcaaattggtccttcagttgaatgc

SEQ ID NO: 4756126 - DNA, 25 bp, Homo sapien
agttgaatgctctcagttcggtcgc

SEQ ID NO: 4756127 - DNA, 25 bp, Homo sapien
tgtaggtaatgccaatgtggaggct

SEQ ID NO: 4756128 - DNA, 25 bp, Homo sapien
tctatcttcctattagttgtaggta

SEQ ID NO: 4756129 - DNA, 25 bp, Homo sapien
aaatgctaagcagtgaattataatt

SEQ ID NO: 4756130 - DNA, 25 bp, Homo sapien
cttggtagctactcaaaagagaatt

SEQ ID NO: 4756131 - DNA, 25 bp, Homo sapien
tgtactacagatctcattgaaatcc

SEQ ID NO: 4756132 - DNA, 25 bp, Homo sapien
aatttgatgattctcatataagtgg

SEQ ID NO: 4756133 - DNA, 25 bp, Homo sapien
tgtatccaacagtaagtcatcattc

SEQ ID NO: 4756134 - DNA, 25 bp, Homo sapien
tttcatctccctaagtaaaatcatg

SEQ ID NO: 4756135 - DNA, 25 bp, Homo sapien
tctcgaaactgatagaatacgcagg

SEQ ID NO: 4756136 - DNA, 25 bp, Homo sapien
caatattggcatgatggatggtaaa

SEQ ID NO: 4756137 - DNA, 25 bp, Homo sapien
tagtatggtggcctatttgaaccaa

SEQ ID NO: 4756138 - DNA, 25 bp, Homo sapien
caacaaaaggccaattcacataaga

SEQ ID NO: 4756139 - DNA, 25 bp, Homo sapien
ttacagattggagttttaaagtctc

SEQ ID NO: 4756140 - DNA, 25 bp, Homo sapien
taaccctcaattgattggaagagtc

SEQ ID NO: 4756141 - DNA, 25 bp, Homo sapien
gagatttctcctttgtcatgctaca

SEQ ID NO: 4756142 - DNA, 25 bp, Homo sapien
catgctacattttgacaagtatggg

SEQ ID NO: 4756143 - DNA, 25 bp, Homo sapien
actctggtagttagtgggtgattga

SEQ ID NO: 4756144 - DNA, 25 bp, Homo sapien
ttccagagagcttcaaaccttgcta

SEQ ID NO: 4756145 - DNA, 25 bp, Homo sapien
gttagtgggtgattgataaacagct

SEQ ID NO: 4756146 - DNA, 25 bp, Homo sapien
aaaccttgctatattccaactctgg

SEQ ID NO: 4756147 - DNA, 25 bp, Homo sapien
caggccctcttgatattaatatggg

SEQ ID NO: 4756148 - DNA, 25 bp, Homo sapien
tacagtgcttggtgaagtcagtctc

SEQ ID NO: 4756149 - DNA, 25 bp, Homo sapien
gtcagtctcttgacggagacagtgg

SEQ ID NO: 4756150 - DNA, 25 bp, Homo sapien
tatgggaattaggaagccaaaccag

SEQ ID NO: 4756151 - DNA, 25 bp, Homo sapien
tatgctagcagctctaggtggcagg

SEQ ID NO: 4756152 - DNA, 25 bp, Homo sapien
caaaggacctaacagtctccctggg

SEQ ID NO: 4756153 - DNA, 25 bp, Homo sapien
tcaggcctcctgctcgcaagagtag

SEQ ID NO: 4756154 - DNA, 25 bp, Homo sapien
tggaccccgatcagagcaaatgttt

SEQ ID NO: 4756155 - DNA, 25 bp, Homo sapien
gaaacctaataactggagcagccaa

SEQ ID NO: 4756156 - DNA, 25 bp, Homo sapien
tgtcaacctgccctacatattttgg

SEQ ID NO: 4756157 - DNA, 25 bp, Homo sapien
tttactctgaaggaaagaagtctgg

SEQ ID NO: 4756158 - DNA, 25 bp, Homo sapien
ggacttatccaatcaagtgaaggcc

SEQ ID NO: 4756159 - DNA, 25 bp, Homo sapien
tatccagctggacagtttcaagacc

SEQ ID NO: 4756160 - DNA, 25 bp, Homo sapien
ggaaagacagtgtagcctcaaagct

SEQ ID NO: 4756161 - DNA, 25 bp, Homo sapien
tatctgggatcaatgcaagcaagag

SEQ ID NO: 4756162 - DNA, 25 bp, Homo sapien
aaagggactccttgactgggtgaga

SEQ ID NO: 4756163 - DNA, 25 bp, Homo sapien
tagaagcactatgtttcaaacccag

SEQ ID NO: 4756164 - DNA, 25 bp, Homo sapien
ggtccctgcctagtcaagctactta

SEQ ID NO: 4756165 - DNA, 25 bp, Homo sapien
tcatctagggatatggctgcaaaca

SEQ ID NO: 4756166 - DNA, 25 bp, Homo sapien
gggcaagcccttatttgtcaaagca

SEQ ID NO: 4756167 - DNA, 25 bp, Homo sapien
cagaaatgtggattggaatggcccc

SEQ ID NO: 4756168 - DNA, 25 bp, Homo sapien
gaagaatgcatggtactcagccagg

SEQ ID NO: 4756169 - DNA, 25 bp, Homo sapien
tatttcttaacaagtgtcggccagg

SEQ ID NO: 4756170 - DNA, 25 bp, Homo sapien
tagaaatatcttccgtggtccacag

SEQ ID NO: 4756171 - DNA, 25 bp, Homo sapien
cactgacacctggaagccattctgg

SEQ ID NO: 4756172 - DNA, 25 bp, Homo sapien
tgatttcagggcttccactgacacc

SEQ ID NO: 4756173 - DNA, 25 bp, Homo sapien
tgttaggttaagaatctccaactta

SEQ ID NO: 4756174 - DNA, 25 bp, Homo sapien
tctggggtgttaggttaagaatctc

SEQ ID NO: 4756175 - DNA, 25 bp, Homo sapien
tagtttcatggaaatggccccattc

SEQ ID NO: 4756176 - DNA, 25 bp, Homo sapien
ggtgtttagtttcatggaaatggcc

SEQ ID NO: 4756177 - DNA, 25 bp, Homo sapien
cttctggctctgattgtctatggtg

SEQ ID NO: 4756178 - DNA, 25 bp, Homo sapien
ggctctgattgtctatggtgtttag

SEQ ID NO: 4756179 - DNA, 25 bp, Homo sapien
gcgtttgacaagattgtacctttcc

SEQ ID NO: 4756180 - DNA, 25 bp, Homo sapien
ctgctgttagcattcgccacttagc

SEQ ID NO: 4756181 - DNA, 25 bp, Homo sapien
cacttagcacgatgaacaacaccct

SEQ ID NO: 4756182 - DNA, 25 bp, Homo sapien
tctcaaaagcgtttgacaagattgt

SEQ ID NO: 4756183 - DNA, 25 bp, Homo sapien
cactagtggacggtagagaccgtga

SEQ ID NO: 4756184 - DNA, 25 bp, Homo sapien
gtttttacccacactctgcccgcac

SEQ ID NO: 4756185 - DNA, 25 bp, Homo sapien
tgtgctcctgtaacacccgttttta

SEQ ID NO: 4756186 - DNA, 25 bp, Homo sapien
cactctgcccgcactagtggacggt

SEQ ID NO: 4756187 - DNA, 25 bp, Homo sapien
taagagtctctctgctggcaaggcc

SEQ ID NO: 4756188 - DNA, 25 bp, Homo sapien
tatatgtgcgcttgtgggcaaaaac

SEQ ID NO: 4756189 - DNA, 25 bp, Homo sapien
tggtagccaaccacacaagcttctt

SEQ ID NO: 4756190 - DNA, 25 bp, Homo sapien
cctaggaagctagtgccagtggtca

SEQ ID NO: 4756191 - DNA, 25 bp, Homo sapien
tgaggctagctgttgcgttgaagat

SEQ ID NO: 4756192 - DNA, 25 bp, Homo sapien
ctgtgttgaggctagctgttgcgtt

SEQ ID NO: 4756193 - DNA, 25 bp, Homo sapien
gctagctgttgcgttgaagattgtt

SEQ ID NO: 4756194 - DNA, 25 bp, Homo sapien
agctgctgtgttgaggctagctgtt

SEQ ID NO: 4756195 - DNA, 25 bp, Homo sapien
gctggaacttgggtaaaccactaga

SEQ ID NO: 4756196 - DNA, 25 bp, Homo sapien
ggcttctgtcataaggaacttgtgc

SEQ ID NO: 4756197 - DNA, 25 bp, Homo sapien
cactagagtaatgcacaagatgaga

SEQ ID NO: 4756198 - DNA, 25 bp, Homo sapien
caaaagtgctctctatgggaacaaa

SEQ ID NO: 4756199 - DNA, 25 bp, Homo sapien
ctggcttgttggaggtaggactgtc

SEQ ID NO: 4756200 - DNA, 25 bp, Homo sapien
caaacatctgtcttacattctggct

SEQ ID NO: 4756201 - DNA, 25 bp, Homo sapien
gtcttgttttggcattaagcaattc

SEQ ID NO: 4756202 - DNA, 25 bp, Homo sapien
gcaattctaatgaaagtgtacaaac

SEQ ID NO: 4756203 - DNA, 25 bp, Homo sapien
cttgttttggcattaagcaattcta

SEQ ID NO: 4756204 - DNA, 25 bp, Homo sapien
caaaatctccttctcgagtgtggtt

SEQ ID NO: 4756205 - DNA, 25 bp, Homo sapien
gagcaccaggtagcccattctctga

SEQ ID NO: 4756206 - DNA, 25 bp, Homo sapien
tgtggttcgcaccagcctcttgtct

SEQ ID NO: 4756207 - DNA, 25 bp, Homo sapien
ggtagcccattctctgagaccaaaa

SEQ ID NO: 4756208 - DNA, 25 bp, Homo sapien
aagaaaggctgcgtggcacagcttc

SEQ ID NO: 4756209 - DNA, 25 bp, Homo sapien
tccagtttaggggtcgaggagcatc

SEQ ID NO: 4756210 - DNA, 25 bp, Homo sapien
gaaaggctgcgtggcacagcttccg

SEQ ID NO: 4756211 - DNA, 25 bp, Homo sapien
gggtcgaggagcatcagcctgattc

SEQ ID NO: 4756212 - DNA, 25 bp, Homo sapien
aaacaagaaactgaaaacctgagca

SEQ ID NO: 4756213 - DNA, 25 bp, Homo sapien
aagaaactgaaaacctgagcaatgc

SEQ ID NO: 4756214 - DNA, 25 bp, Homo sapien
attccaccaggaaaacaagaaactg

SEQ ID NO: 4756215 - DNA, 25 bp, Homo sapien
ttccaccaggaaaacaagaaactga

SEQ ID NO: 4756216 - DNA, 25 bp, Homo sapien
tggcatcccatggtcatctccacac

SEQ ID NO: 4756217 - DNA, 25 bp, Homo sapien
ccccacggctctggcatcccatggt

SEQ ID NO: 4756218 - DNA, 25 bp, Homo sapien
taaacggtcccccacggctctggca

SEQ ID NO: 4756219 - DNA, 25 bp, Homo sapien
acggctctggcatcccatggtcatc

SEQ ID NO: 4756220 - DNA, 25 bp, Homo sapien
tgcaaattccattagggcagaggct

SEQ ID NO: 4756221 - DNA, 25 bp, Homo sapien
caaattccattagggcagaggcttc

SEQ ID NO: 4756222 - DNA, 25 bp, Homo sapien
ctgcaaattccattagggcagaggc

SEQ ID NO: 4756223 - DNA, 25 bp, Homo sapien
gcaaattccattagggcagaggctt

SEQ ID NO: 4756224 - DNA, 25 bp, Homo sapien
gaagactagtcaagtagccttgcct

SEQ ID NO: 4756225 - DNA, 25 bp, Homo sapien
gcctgagcccctgaaccttcttaaa

SEQ ID NO: 4756226 - DNA, 25 bp, Homo sapien
tagtcaagtagccttgcctgagccc

SEQ ID NO: 4756227 - DNA, 25 bp, Homo sapien
ttgcctgagcccctgaaccttctta

SEQ ID NO: 4756228 - DNA, 25 bp, Homo sapien
tctctgcagccgtgctcatgcatac

SEQ ID NO: 4756229 - DNA, 25 bp, Homo sapien
ctctctctgcagccgtgctcatgca

SEQ ID NO: 4756230 - DNA, 25 bp, Homo sapien
tctctctgcagccgtgctcatgcat

SEQ ID NO: 4756231 - DNA, 25 bp, Homo sapien
ctctctgcagccgtgctcatgcata

SEQ ID NO: 4756232 - DNA, 25 bp, Homo sapien
aatgaagccagaacgggaaacttgc

SEQ ID NO: 4756233 - DNA, 25 bp, Homo sapien
ccaggaggatcgcaaaagggaacaa

SEQ ID NO: 4756234 - DNA, 25 bp, Homo sapien
tcctcccagtaaacgcaggtcaggc

SEQ ID NO: 4756235 - DNA, 25 bp, Homo sapien
acagcctgtggtcggagtcaaagca

SEQ ID NO: 4756236 - DNA, 25 bp, Homo sapien
cataaagtgccacatgggatgctgt

SEQ ID NO: 4756237 - DNA, 25 bp, Homo sapien
tgcaacacaagtttaacccataaag

SEQ ID NO: 4756238 - DNA, 25 bp, Homo sapien
tcctggaaagccacttgataccgct

SEQ ID NO: 4756239 - DNA, 25 bp, Homo sapien
gaaagccacttgataccgcttctct

SEQ ID NO: 4756240 - DNA, 25 bp, Homo sapien
tcttttgaagaccacgttccttctc

SEQ ID NO: 4756241 - DNA, 25 bp, Homo sapien
tatagtattgtaccactttgcaccc

SEQ ID NO: 4756242 - DNA, 25 bp, Homo sapien
cttcaaaagtcatagcaccctcaat

SEQ ID NO: 4756243 - DNA, 25 bp, Homo sapien
cactttgcaccctgtcttctttata

SEQ ID NO: 4756244 - DNA, 25 bp, Homo sapien
agcaccttctgactcacaccaatga

SEQ ID NO: 4756245 - DNA, 25 bp, Homo sapien
aagcaccttctgactcacaccaatg

SEQ ID NO: 4756246 - DNA, 25 bp, Homo sapien
gggttggaccataaggtccgctcac

SEQ ID NO: 4756247 - DNA, 25 bp, Homo sapien
tgggttggaccataaggtccgctca

SEQ ID NO: 4756248 - DNA, 25 bp, Homo sapien
ctgggaaacagagacatactgtgat

SEQ ID NO: 4756249 - DNA, 25 bp, Homo sapien
atattcttataagtgttctatggtt

SEQ ID NO: 4756250 - DNA, 25 bp, Homo sapien
ttcttataagtgttctatggttagt

SEQ ID NO: 4756251 - DNA, 25 bp, Homo sapien
tattcttataagtgttctatggtta

SEQ ID NO: 4756252 - DNA, 25 bp, Homo sapien
attcttataagtgttctatggttag

SEQ ID NO: 4756253 - DNA, 25 bp, Homo sapien
ttgtctgtagattttatgaccttca

SEQ ID NO: 4756254 - DNA, 25 bp, Homo sapien
tgtctgtagattttatgaccttcat

SEQ ID NO: 4756255 - DNA, 25 bp, Homo sapien
cgaaggatatgctctcttcgtctct

SEQ ID NO: 4756256 - DNA, 25 bp, Homo sapien
tagcgaaggatatgctctcttcgtc

SEQ ID NO: 4756257 - DNA, 25 bp, Homo sapien
gagaatagcgaaggatatgctctct

SEQ ID NO: 4756258 - DNA, 25 bp, Homo sapien
gatgagagaatagcgaaggatatgc

SEQ ID NO: 4756259 - DNA, 25 bp, Homo sapien
gaaaaactgggataggacaattggc

SEQ ID NO: 4756260 - DNA, 25 bp, Homo sapien
tgggataggacaattggcattaaca

SEQ ID NO: 4756261 - DNA, 25 bp, Homo sapien
cactgactccatcaagaattctggg

SEQ ID NO: 4756262 - DNA, 25 bp, Homo sapien
ggcagataccctttttcccactgac

SEQ ID NO: 4756263 - DNA, 25 bp, Homo sapien
ctgttcttcttctctcccctctcct

SEQ ID NO: 4756264 - DNA, 25 bp, Homo sapien
tgttcttcttctctcccctctcctc

SEQ ID NO: 4756265 - DNA, 25 bp, Homo sapien
tcttcttctctcccctctcctccat

SEQ ID NO: 4756266 - DNA, 25 bp, Homo sapien
gttcttcttctctcccctctcctcc

SEQ ID NO: 4756267 - DNA, 25 bp, Homo sapien
tagatcttcaactgtaatggattcc

SEQ ID NO: 4756268 - DNA, 25 bp, Homo sapien
tttgtaaatcatagatcttcaactg

SEQ ID NO: 4756269 - DNA, 25 bp, Homo sapien
tcttcaactgtaatggattccacca

SEQ ID NO: 4756270 - DNA, 25 bp, Homo sapien
ctgtaatggattccaccaggcccca

SEQ ID NO: 4756271 - DNA, 25 bp, Homo sapien
gacagggaggtggagctcatcctct

SEQ ID NO: 4756272 - DNA, 25 bp, Homo sapien
gaaacatatcaaccggtggtttcat

SEQ ID NO: 4756273 - DNA, 25 bp, Homo sapien
taaccaagtctaaaggaatgagaaa

SEQ ID NO: 4756274 - DNA, 25 bp, Homo sapien
tgagaaacatatcaaccggtggttt

SEQ ID NO: 4756275 - DNA, 25 bp, Homo sapien
tgctaatttaaccaagtctaaagga

SEQ ID NO: 4756276 - DNA, 25 bp, Homo sapien
cactaactgcgcagatgtggtttct

SEQ ID NO: 4756277 - DNA, 25 bp, Homo sapien
ttaggtcactaactgcgcagatgtg

SEQ ID NO: 4756278 - DNA, 25 bp, Homo sapien
aggtcactaactgcgcagatgtggt

SEQ ID NO: 4756279 - DNA, 25 bp, Homo sapien
gtcactaactgcgcagatgtggttt

SEQ ID NO: 4756280 - DNA, 25 bp, Homo sapien
tgagatgtaacctttatgagagcag

SEQ ID NO: 4756281 - DNA, 25 bp, Homo sapien
gcaagaccttatattcactgatcac

SEQ ID NO: 4756282 - DNA, 25 bp, Homo sapien
gggctagggaagatgcacacatctt

SEQ ID NO: 4756283 - DNA, 25 bp, Homo sapien
gcctaattaacctacactgtcaatg

SEQ ID NO: 4756284 - DNA, 25 bp, Homo sapien
catctagcttccacaaatgttgaag

SEQ ID NO: 4756285 - DNA, 25 bp, Homo sapien
aaaagaatgctttaattccacttgg

SEQ ID NO: 4756286 - DNA, 25 bp, Homo sapien
gaagtctcctgtactaagaaacaaa

SEQ ID NO: 4756287 - DNA, 25 bp, Homo sapien
tgtccaaactctctaaaccatctag

SEQ ID NO: 4756288 - DNA, 25 bp, Homo sapien
acaccaactgcctcgccataatcag

SEQ ID NO: 4756289 - DNA, 25 bp, Homo sapien
aactgcctcgccataatcagttcct

SEQ ID NO: 4756290 - DNA, 25 bp, Homo sapien
agttccttcattaatcctgtccaca

SEQ ID NO: 4756291 - DNA, 25 bp, Homo sapien
atataatacccattggctggccagg

SEQ ID NO: 4756292 - DNA, 25 bp, Homo sapien
tgctatatacaaatgtaaggtaaaa

SEQ ID NO: 4756293 - DNA, 25 bp, Homo sapien
gcctgatgatgttgaagtctattct

SEQ ID NO: 4756294 - DNA, 25 bp, Homo sapien
cataaaacatcacttagtataaaag

SEQ ID NO: 4756295 - DNA, 25 bp, Homo sapien
gagacaaaaccttgataaaatatta

SEQ ID NO: 4756296 - DNA, 25 bp, Homo sapien
tatgcctgacatgggacctagatac

SEQ ID NO: 4756297 - DNA, 25 bp, Homo sapien
catgagagccatgaccgtatgcctg

SEQ ID NO: 4756298 - DNA, 25 bp, Homo sapien
gaggacttcaagtagacaagctaag

SEQ ID NO: 4756299 - DNA, 25 bp, Homo sapien
cctagatacagtttgatgggaccaa

SEQ ID NO: 4756300 - DNA, 25 bp, Homo sapien
tacaagatgtccatgaatatgtaca

SEQ ID NO: 4756301 - DNA, 25 bp, Homo sapien
cacagcaagtccaggtacaagatgt

SEQ ID NO: 4756302 - DNA, 25 bp, Homo sapien
gaagtaaagctgtgtgttgattctg

SEQ ID NO: 4756303 - DNA, 25 bp, Homo sapien
aatatgtacaagggccttggaatca

SEQ ID NO: 4756304 - DNA, 25 bp, Homo sapien
atgaaaaggacaagtaacacacaca

SEQ ID NO: 4756305 - DNA, 25 bp, Homo sapien
gaaaaggacaagtaacacacacacc

SEQ ID NO: 4756306 - DNA, 25 bp, Homo sapien
ctggacacaaagttccaagcacatg

SEQ ID NO: 4756307 - DNA, 25 bp, Homo sapien
caggaggtgacactatcatcctcag

SEQ ID NO: 4756308 - DNA, 25 bp, Homo sapien
ttccaagcacatggagctgagccat

SEQ ID NO: 4756309 - DNA, 25 bp, Homo sapien
caacaggaggtgacactatcatcct

SEQ ID NO: 4756310 - DNA, 25 bp, Homo sapien
tctaacaaccatttggcatgaccag

SEQ ID NO: 4756311 - DNA, 25 bp, Homo sapien
tatgagcccagcctattaaagcatt

SEQ ID NO: 4756312 - DNA, 25 bp, Homo sapien
cactggcatgccaagttgaaattca

SEQ ID NO: 4756313 - DNA, 25 bp, Homo sapien
tggcataagaccatagagacagcac

SEQ ID NO: 4756314 - DNA, 25 bp, Homo sapien
tacgtggcaaaaaatcccttcgtca

SEQ ID NO: 4756315 - DNA, 25 bp, Homo sapien
gaacaactgactacatacgtggcaa

SEQ ID NO: 4756316 - DNA, 25 bp, Homo sapien
tctatcctcaaaagccatcagggag

SEQ ID NO: 4756317 - DNA, 25 bp, Homo sapien
tcgtcaaccgtacacacaaatcaat

SEQ ID NO: 4756318 - DNA, 25 bp, Homo sapien
gaaaaccccatgtgtgcctcataag

SEQ ID NO: 4756319 - DNA, 25 bp, Homo sapien
gagcaaagagggtgttcatccatta

SEQ ID NO: 4756320 - DNA, 25 bp, Homo sapien
taagtagattacaatgtgttgaccc

SEQ ID NO: 4756321 - DNA, 25 bp, Homo sapien
taggaaagttgaacatgtactggcc

SEQ ID NO: 4756322 - DNA, 25 bp, Homo sapien
tttgttctagtggtcctgttatttc

SEQ ID NO: 4756323 - DNA, 25 bp, Homo sapien
gacagcaatgcaaaacgcagcacat

SEQ ID NO: 4756324 - DNA, 25 bp, Homo sapien
cacattttgttctagtggtcctgtt

SEQ ID NO: 4756325 - DNA, 25 bp, Homo sapien
ggacagcaatgcaaaacgcagcaca

SEQ ID NO: 4756326 - DNA, 25 bp, Homo sapien
tgtaccccaaactgctaaccattca

SEQ ID NO: 4756327 - DNA, 25 bp, Homo sapien
gtaattcctaagtgactatttctag

SEQ ID NO: 4756328 - DNA, 25 bp, Homo sapien
tactttgaacttacctatattactg

SEQ ID NO: 4756329 - DNA, 25 bp, Homo sapien
ctttttcccactagaagtatgtcta

SEQ ID NO: 4756330 - DNA, 25 bp, Homo sapien
acactcctcccttaatgtcactctc

SEQ ID NO: 4756331 - DNA, 25 bp, Homo sapien
tctggtcaatatttagaggtgctgc

SEQ ID NO: 4756332 - DNA, 25 bp, Homo sapien
ttttccattgggtagaatcctgccc

SEQ ID NO: 4756333 - DNA, 25 bp, Homo sapien
tgttctaaagcatcgcaggagtggc

SEQ ID NO: 4756334 - DNA, 25 bp, Homo sapien
gaggtgctgctacatatgctgctac

SEQ ID NO: 4756335 - DNA, 25 bp, Homo sapien
ttttatttcctcattggtcacttga

SEQ ID NO: 4756336 - DNA, 25 bp, Homo sapien
cctcattggtcacttgaaaatactg

SEQ ID NO: 4756337 - DNA, 25 bp, Homo sapien
tctttttcatcatggaaccttatca

SEQ ID NO: 4756338 - DNA, 25 bp, Homo sapien
ctttttcatcatggaaccttatcat

SEQ ID NO: 4756339 - DNA, 25 bp, Homo sapien
cataggagccagctagaatttccct

SEQ ID NO: 4756340 - DNA, 25 bp, Homo sapien
tcagagaagataaacaggagacata

SEQ ID NO: 4756341 - DNA, 25 bp, Homo sapien
agggatacccttttgtgtcagagaa

SEQ ID NO: 4756342 - DNA, 25 bp, Homo sapien
cttgcaaagaagctcagggataccc

SEQ ID NO: 4756343 - DNA, 25 bp, Homo sapien
gataatgaaccttctcacaatctcc

SEQ ID NO: 4756344 - DNA, 25 bp, Homo sapien
ataatgaaccttctcacaatctcct

SEQ ID NO: 4756345 - DNA, 25 bp, Homo sapien
aagcagggctagtgtctctggtgca

SEQ ID NO: 4756346 - DNA, 25 bp, Homo sapien
gggctagtgtctctggtgcagttcc

SEQ ID NO: 4756347 - DNA, 25 bp, Homo sapien
cagggctagtgtctctggtgcagtt

SEQ ID NO: 4756348 - DNA, 25 bp, Homo sapien
gcagggctagtgtctctggtgcagt

SEQ ID NO: 4756349 - DNA, 25 bp, Homo sapien
gtttccgtaactggacacagatcca

SEQ ID NO: 4756350 - DNA, 25 bp, Homo sapien
aatcctcctcagtttccgtaactgg

SEQ ID NO: 4756351 - DNA, 25 bp, Homo sapien
taggatctgctgtttggagttaggc

SEQ ID NO: 4756352 - DNA, 25 bp, Homo sapien
acagatccagattagttggtaggat

SEQ ID NO: 4756353 - DNA, 25 bp, Homo sapien
cttccttggaccacggcatctgcct

SEQ ID NO: 4756354 - DNA, 25 bp, Homo sapien
gggagatacgatcctttttggcatc

SEQ ID NO: 4756355 - DNA, 25 bp, Homo sapien
caagtggggagatacgatccttttt

SEQ ID NO: 4756356 - DNA, 25 bp, Homo sapien
tttacaagtggggagatacgatcct

SEQ ID NO: 4756357 - DNA, 25 bp, Homo sapien
cttttacaagtggggagatacgatc

SEQ ID NO: 4756358 - DNA, 25 bp, Homo sapien
aaggcttggtaaaaacttcagccat

SEQ ID NO: 4756359 - DNA, 25 bp, Homo sapien
tgctcactaagtcaaaaggcttggt

SEQ ID NO: 4756360 - DNA, 25 bp, Homo sapien
cacaaactttggcagcgctgctcac

SEQ ID NO: 4756361 - DNA, 25 bp, Homo sapien
ggcagcgctgctcactaagtcaaaa

SEQ ID NO: 4756362 - DNA, 25 bp, Homo sapien
ctaagaagacttcagcataacgttc

SEQ ID NO: 4756363 - DNA, 25 bp, Homo sapien
tcagcataacgttcagtaaatcgtt

SEQ ID NO: 4756364 - DNA, 25 bp, Homo sapien
ccagcaaagagaaattccactaaga

SEQ ID NO: 4756365 - DNA, 25 bp, Homo sapien
gagaaattccactaagaagacttca

SEQ ID NO: 4756366 - DNA, 25 bp, Homo sapien
caaatttagcgattgttgcaatgtt

SEQ ID NO: 4756367 - DNA, 25 bp, Homo sapien
taggtacacagcgttaaggctgtaa

SEQ ID NO: 4756368 - DNA, 25 bp, Homo sapien
gccttattacacacttctttctgaa

SEQ ID NO: 4756369 - DNA, 25 bp, Homo sapien
tggattcacgtgaacaaatttagcg

SEQ ID NO: 4756370 - DNA, 25 bp, Homo sapien
gttgaaaaatagtcaaagatgctca

SEQ ID NO: 4756371 - DNA, 25 bp, Homo sapien
ctcagaaacagcagggttgaaaaat

SEQ ID NO: 4756372 - DNA, 25 bp, Homo sapien
gaaacagcagggttgaaaaatagtc

SEQ ID NO: 4756373 - DNA, 25 bp, Homo sapien
ggttgaaaaatagtcaaagatgctc

SEQ ID NO: 4756374 - DNA, 25 bp, Homo sapien
ctttcagaatagcaagaagggtgtt

SEQ ID NO: 4756375 - DNA, 25 bp, Homo sapien
tcagaatagcaagaagggtgttggt

SEQ ID NO: 4756376 - DNA, 25 bp, Homo sapien
tagcaagaagggtgttggtgctgga

SEQ ID NO: 4756377 - DNA, 25 bp, Homo sapien
atagcaagaagggtgttggtgctgg

SEQ ID NO: 4756378 - DNA, 25 bp, Homo sapien
gtacacaaggaaataagctaactga

SEQ ID NO: 4756379 - DNA, 25 bp, Homo sapien
aggtacacaaggaaataagctaact

SEQ ID NO: 4756380 - DNA, 25 bp, Homo sapien
ggtacacaaggaaataagctaactg

SEQ ID NO: 4756381 - DNA, 25 bp, Homo sapien
tacacaaggaaataagctaactgac

SEQ ID NO: 4756382 - DNA, 25 bp, Homo sapien
ttagtgcaatgtagacagacaaagc

SEQ ID NO: 4756383 - DNA, 25 bp, Homo sapien
tcttttagtgcaatgtagacagaca

SEQ ID NO: 4756384 - DNA, 25 bp, Homo sapien
tctcttttagtgcaatgtagacaga

SEQ ID NO: 4756385 - DNA, 25 bp, Homo sapien
cttttagtgcaatgtagacagacaa

SEQ ID NO: 4756386 - DNA, 25 bp, Homo sapien
tctccaataactccttaattgctat

SEQ ID NO: 4756387 - DNA, 25 bp, Homo sapien
tactcaatcatatattgtgcatata

SEQ ID NO: 4756388 - DNA, 25 bp, Homo sapien
tggttctaagaagatgaagggttct

SEQ ID NO: 4756389 - DNA, 25 bp, Homo sapien
gttagtcagggatttctgtgccact

SEQ ID NO: 4756390 - DNA, 25 bp, Homo sapien
caaagcctatttctccccatgtgtt

SEQ ID NO: 4756391 - DNA, 25 bp, Homo sapien
taaataaatccacaaggctctttcc

SEQ ID NO: 4756392 - DNA, 25 bp, Homo sapien
gtgttcatgggctttaatatcaccc

SEQ ID NO: 4756393 - DNA, 25 bp, Homo sapien
gaactcaccaatttgttgccaccat

SEQ ID NO: 4756394 - DNA, 25 bp, Homo sapien
gacacacattaacgttgcttacact

SEQ ID NO: 4756395 - DNA, 25 bp, Homo sapien
aaacagcctggtattaataaatgcc

SEQ ID NO: 4756396 - DNA, 25 bp, Homo sapien
caggcctgcagacaatatagtttca

SEQ ID NO: 4756397 - DNA, 25 bp, Homo sapien
tgaaacaccaaagtctacaggattt

SEQ ID NO: 4756398 - DNA, 25 bp, Homo sapien
tctttgtcacaaaatggctgtcgat

SEQ ID NO: 4756399 - DNA, 25 bp, Homo sapien
actctgggcaatgtgttggtgacag

SEQ ID NO: 4756400 - DNA, 25 bp, Homo sapien
gacagcaaatgtcaggtccaattat

SEQ ID NO: 4756401 - DNA, 25 bp, Homo sapien
tctgaaactggtacccactctgggc

SEQ ID NO: 4756402 - DNA, 25 bp, Homo sapien
agccacctaggaagcaggccttcac

SEQ ID NO: 4756403 - DNA, 25 bp, Homo sapien
taaataaagtcatcctgttgtgtgc

SEQ ID NO: 4756404 - DNA, 25 bp, Homo sapien
ctcaccaatcatcaaatctgccaga

SEQ ID NO: 4756405 - DNA, 25 bp, Homo sapien
tttgcagccttcaatatgataagaa

SEQ ID NO: 4756406 - DNA, 25 bp, Homo sapien
tgacattgcagtagcatattagaca

SEQ ID NO: 4756407 - DNA, 25 bp, Homo sapien
caaactactaaaggtttaatgacat

SEQ ID NO: 4756408 - DNA, 25 bp, Homo sapien
tactaaaggtttaatgacattgcag

SEQ ID NO: 4756409 - DNA, 25 bp, Homo sapien
ggtttaatgacattgcagtagcata

SEQ ID NO: 4756410 - DNA, 25 bp, Homo sapien
cttatagaatggagacaaagaagtc

SEQ ID NO: 4756411 - DNA, 25 bp, Homo sapien
gacatttgtaatgcgagacagcact

SEQ ID NO: 4756412 - DNA, 25 bp, Homo sapien
tattgaccaattcaacacagacagt

SEQ ID NO: 4756413 - DNA, 25 bp, Homo sapien
caaaacaaatagcaggaataacaag

SEQ ID NO: 4756414 - DNA, 25 bp, Homo sapien
cattgtaaaccatgaagccttaaaa

SEQ ID NO: 4756415 - DNA, 25 bp, Homo sapien
aaccatgaagccttaaaatatggga

SEQ ID NO: 4756416 - DNA, 25 bp, Homo sapien
cttccattgtaaaccatgaagcctt

SEQ ID NO: 4756417 - DNA, 25 bp, Homo sapien
aaaccatgaagccttaaaatatggg

SEQ ID NO: 4756418 - DNA, 25 bp, Homo sapien
gattacaagcacctgggatattctt

SEQ ID NO: 4756419 - DNA, 25 bp, Homo sapien
gaacgctgtatatgttaagcagtag

SEQ ID NO: 4756420 - DNA, 25 bp, Homo sapien
gagctgacacatgggaaaacttgtc

SEQ ID NO: 4756421 - DNA, 25 bp, Homo sapien
tgggaaaacttgtctgaacgctgta

SEQ ID NO: 4756422 - DNA, 25 bp, Homo sapien
tcccgagcgtttggtggacccctgc

SEQ ID NO: 4756423 - DNA, 25 bp, Homo sapien
tctccgcgttgtcctcgcggtcgga

SEQ ID NO: 4756424 - DNA, 25 bp, Homo sapien
cgtctgctgcgacgggagtcccgag

SEQ ID NO: 4756425 - DNA, 25 bp, Homo sapien
ttttccacgactcggcaaacctgcc

SEQ ID NO: 4756426 - DNA, 25 bp, Homo sapien
cccagcgccgagcgctctcgctggc

SEQ ID NO: 4756427 - DNA, 25 bp, Homo sapien
ccagcgccgagcgctctcgctggct

SEQ ID NO: 4756428 - DNA, 25 bp, Homo sapien
tcgcctccctcggccgggaaacagc

SEQ ID NO: 4756429 - DNA, 25 bp, Homo sapien
gactcatcatagaggcctacactgt

SEQ ID NO: 4756430 - DNA, 25 bp, Homo sapien
ttatacccagttggctgtatggaat

SEQ ID NO: 4756431 - DNA, 25 bp, Homo sapien
attcagccagtgtgccagtattaaa

SEQ ID NO: 4756432 - DNA, 25 bp, Homo sapien
ccagtgtgccagtattaaaagactc

SEQ ID NO: 4756433 - DNA, 25 bp, Homo sapien
tggcttgatggtcacaaaattgctt

SEQ ID NO: 4756434 - DNA, 25 bp, Homo sapien
atggcttgatggtcacaaaattgct

SEQ ID NO: 4756435 - DNA, 25 bp, Homo sapien
aatggcttgatggtcacaaaattgc

SEQ ID NO: 4756436 - DNA, 25 bp, Homo sapien
caatggcttgatggtcacaaaattg

SEQ ID NO: 4756437 - DNA, 25 bp, Homo sapien
acagcttaatgttcaggtccccact

SEQ ID NO: 4756438 - DNA, 25 bp, Homo sapien
agcttaatgttcaggtccccactgt

SEQ ID NO: 4756439 - DNA, 25 bp, Homo sapien
tgccacagcttaatgttcaggtccc

SEQ ID NO: 4756440 - DNA, 25 bp, Homo sapien
gctctgccacagcttaatgttcagg

SEQ ID NO: 4756441 - DNA, 25 bp, Homo sapien
gacagtgcagaagggtgtttatttt

SEQ ID NO: 4756442 - DNA, 25 bp, Homo sapien
gaactcggtttgcagcttatgctta

SEQ ID NO: 4756443 - DNA, 25 bp, Homo sapien
tgtcttacatctctgtgagaactcg

SEQ ID NO: 4756444 - DNA, 25 bp, Homo sapien
agcagacatgtgtcctacaggctga

SEQ ID NO: 4756445 - DNA, 25 bp, Homo sapien
ttcacaaggcaagacgacggagtga

SEQ ID NO: 4756446 - DNA, 25 bp, Homo sapien
cacaaggcaagacgacggagtgagt

SEQ ID NO: 4756447 - DNA, 25 bp, Homo sapien
tcttcacaaggcaagacgacggagt

SEQ ID NO: 4756448 - DNA, 25 bp, Homo sapien
gcaagacgacggagtgagtgcaagc

SEQ ID NO: 4756449 - DNA, 25 bp, Homo sapien
gacagccggcacaggcagacgcagc

SEQ ID NO: 4756450 - DNA, 25 bp, Homo sapien
gttgagggcagggagcgcggtcttt

SEQ ID NO: 4756451 - DNA, 25 bp, Homo sapien
gccgagcccgcacactgctcccagg

SEQ ID NO: 4756452 - DNA, 25 bp, Homo sapien
gagcgcggtctttgccgagcccgca

SEQ ID NO: 4756453 - DNA, 25 bp, Homo sapien
ctagcaactgtgcagtgctttcaga

SEQ ID NO: 4756454 - DNA, 25 bp, Homo sapien
aggaagatcggccagcgactccctc

SEQ ID NO: 4756455 - DNA, 25 bp, Homo sapien
cacagtgcctagcaactgtgcagtg

SEQ ID NO: 4756456 - DNA, 25 bp, Homo sapien
ttcagaaggaagatcggccagcgac

SEQ ID NO: 4756457 - DNA, 25 bp, Homo sapien
tccaggccactgtcaacaaattgtt

SEQ ID NO: 4756458 - DNA, 25 bp, Homo sapien
ccactgtcaacaaattgttctccca

SEQ ID NO: 4756459 - DNA, 25 bp, Homo sapien
aggccactgtcaacaaattgttctc

SEQ ID NO: 4756460 - DNA, 25 bp, Homo sapien
ccaggccactgtcaacaaattgttc

SEQ ID NO: 4756461 - DNA, 25 bp, Homo sapien
gccaagagtttgctcgtttccctcc

SEQ ID NO: 4756462 - DNA, 25 bp, Homo sapien
cttgggagtgtgctcagttctctcc

SEQ ID NO: 4756463 - DNA, 25 bp, Homo sapien
tgtaatgctccagaaataggggaag

SEQ ID NO: 4756464 - DNA, 25 bp, Homo sapien
cccatctaactcgtctttcacattt

SEQ ID NO: 4756465 - DNA, 25 bp, Homo sapien
gtatcactgcattaacctcaaaaaa

SEQ ID NO: 4756466 - DNA, 25 bp, Homo sapien
tgcccggctgtatccaactgatatt

SEQ ID NO: 4756467 - DNA, 25 bp, Homo sapien
atggaaaatctcctgtggcatctct

SEQ ID NO: 4756468 - DNA, 25 bp, Homo sapien
ccaactgatattaagtatcactgca

SEQ ID NO: 4756469 - DNA, 25 bp, Homo sapien
gggacccctcgctgcagatcttatg

SEQ ID NO: 4756470 - DNA, 25 bp, Homo sapien
taggagggctgactcttacaggctc

SEQ ID NO: 4756471 - DNA, 25 bp, Homo sapien
gactgtctactttggcgtagggcaa

SEQ ID NO: 4756472 - DNA, 25 bp, Homo sapien
catattaatatacaccagtcctggg

SEQ ID NO: 4756473 - DNA, 25 bp, Homo sapien
ggagtcagcctcgaagacggcctct

SEQ ID NO: 4756474 - DNA, 25 bp, Homo sapien
gtgcatagttctaaattgtgtcccc

SEQ ID NO: 4756475 - DNA, 25 bp, Homo sapien
tgtcttccagactaatggtgtatgg

SEQ ID NO: 4756476 - DNA, 25 bp, Homo sapien
gactaatggtgtatgggagtcagcc

SEQ ID NO: 4756477 - DNA, 25 bp, Homo sapien
tgggattcaaaatcaccctccacac

SEQ ID NO: 4756478 - DNA, 25 bp, Homo sapien
aaatcaccctccacactctggaaag

SEQ ID NO: 4756479 - DNA, 25 bp, Homo sapien
tctggtgctatttgtgttcctttgg

SEQ ID NO: 4756480 - DNA, 25 bp, Homo sapien
ggcttctggtgctatttgtgttcct

SEQ ID NO: 4756481 - DNA, 25 bp, Homo sapien
caatccatggatgatttgcctaggc

SEQ ID NO: 4756482 - DNA, 25 bp, Homo sapien
taggctcagcagcacttgccaatgg

SEQ ID NO: 4756483 - DNA, 25 bp, Homo sapien
tggtcctgctttccgtccactcatg

SEQ ID NO: 4756484 - DNA, 25 bp, Homo sapien
tggacaagctgtgtaaatgaccggt

SEQ ID NO: 4756485 - DNA, 25 bp, Homo sapien
tattactgtttacccaggagttaca

SEQ ID NO: 4756486 - DNA, 25 bp, Homo sapien
agatgacggctaaagcagacacaac

SEQ ID NO: 4756487 - DNA, 25 bp, Homo sapien
aaatctgactgcgaggaacctggac

SEQ ID NO: 4756488 - DNA, 25 bp, Homo sapien
cgaacacccgcgaaggacagggatt

SEQ ID NO: 4756489 - DNA, 25 bp, Homo sapien
tttttgccggctataagcaggatct

SEQ ID NO: 4756490 - DNA, 25 bp, Homo sapien
caatgccatttttgccggctataag

SEQ ID NO: 4756491 - DNA, 25 bp, Homo sapien
gtggcctggttcgtgccaaattccg

SEQ ID NO: 4756492 - DNA, 25 bp, Homo sapien
tcgtgccaaattccgaagtaatctt

SEQ ID NO: 4756493 - DNA, 25 bp, Homo sapien
aagagatccacttgtctctgcctcc

SEQ ID NO: 4756494 - DNA, 25 bp, Homo sapien
cctggcctgtctgagaccctttaac

SEQ ID NO: 4756495 - DNA, 25 bp, Homo sapien
catacctggcctgtctgagaccctt

SEQ ID NO: 4756496 - DNA, 25 bp, Homo sapien
cacccagctacttttcatatttctt

SEQ ID NO: 4756497 - DNA, 25 bp, Homo sapien
ttgagctccttccatcgcctctggt

SEQ ID NO: 4756498 - DNA, 25 bp, Homo sapien
cattgcctggaaagtcgagctctat

SEQ ID NO: 4756499 - DNA, 25 bp, Homo sapien
gcctctggtccactattatacatga

SEQ ID NO: 4756500 - DNA, 25 bp, Homo sapien
gatcttgccaactgttccttgactg

SEQ ID NO: 4756501 - DNA, 25 bp, Homo sapien
tcaggatttctttcactgagttgct

SEQ ID NO: 4756502 - DNA, 25 bp, Homo sapien
tttcactgagttgctattttttaac

SEQ ID NO: 4756503 - DNA, 25 bp, Homo sapien
tctttcactgagttgctatttttta

SEQ ID NO: 4756504 - DNA, 25 bp, Homo sapien
tttaacttatccaaaagctctttca

SEQ ID NO: 4756505 - DNA, 25 bp, Homo sapien
gaagttgcaccagcgtagcctttca

SEQ ID NO: 4756506 - DNA, 25 bp, Homo sapien
ttaagtcgactgctggatcaccggg

SEQ ID NO: 4756507 - DNA, 25 bp, Homo sapien
gatcaccgggtaaagagaatgtgca

SEQ ID NO: 4756508 - DNA, 25 bp, Homo sapien
tctgctgggtataaatccgtgcctt

SEQ ID NO: 4756509 - DNA, 25 bp, Homo sapien
tggcttcttgggcatttcacacgtc

SEQ ID NO: 4756510 - DNA, 25 bp, Homo sapien
ttcctcttcccacagcactggcttc

SEQ ID NO: 4756511 - DNA, 25 bp, Homo sapien
tcccacagcactggcttcttgggca

SEQ ID NO: 4756512 - DNA, 25 bp, Homo sapien
tcttcccacagcactggcttcttgg

SEQ ID NO: 4756513 - DNA, 25 bp, Homo sapien
taaagtatacactcctcagcatggc

SEQ ID NO: 4756514 - DNA, 25 bp, Homo sapien
tgtgaagaactagcaatattcagtg

SEQ ID NO: 4756515 - DNA, 25 bp, Homo sapien
gccttgcttgcagattaaagtatac

SEQ ID NO: 4756516 - DNA, 25 bp, Homo sapien
tccaggctttatatagagatcccaa

SEQ ID NO: 4756517 - DNA, 25 bp, Homo sapien
cttaggccctgattattagtatata

SEQ ID NO: 4756518 - DNA, 25 bp, Homo sapien
aacacacgtaaagatatttaagtca

SEQ ID NO: 4756519 - DNA, 25 bp, Homo sapien
caagctctaaaaaacacacgtaaag

SEQ ID NO: 4756520 - DNA, 25 bp, Homo sapien
tttacatatcttctccaaatcttta

SEQ ID NO: 4756521 - DNA, 25 bp, Homo sapien
gccatcagcctttgcccctagaaga

SEQ ID NO: 4756522 - DNA, 25 bp, Homo sapien
taactttgattaagacatgtgccct

SEQ ID NO: 4756523 - DNA, 25 bp, Homo sapien
gtgaaattatctgtactcattgcca

SEQ ID NO: 4756524 - DNA, 25 bp, Homo sapien
gtttatcggtagcactttgaggtag

SEQ ID NO: 4756525 - DNA, 25 bp, Homo sapien
cctcctctacactttatgcgtcggg

SEQ ID NO: 4756526 - DNA, 25 bp, Homo sapien
ggccatccctcctctacactttatg

SEQ ID NO: 4756527 - DNA, 25 bp, Homo sapien
catccctcctctacactttatgcgt

SEQ ID NO: 4756528 - DNA, 25 bp, Homo sapien
ccttggccatccctcctctacactt

SEQ ID NO: 4756529 - DNA, 25 bp, Homo sapien
ctttcctcttggtacggcagcatcc

SEQ ID NO: 4756530 - DNA, 25 bp, Homo sapien
ctcttggtacggcagcatcccaggc

SEQ ID NO: 4756531 - DNA, 25 bp, Homo sapien
gtggagccagttgcctcttgccgca

SEQ ID NO: 4756532 - DNA, 25 bp, Homo sapien
ggagccagttgcctcttgccgcatg

SEQ ID NO: 4756533 - DNA, 25 bp, Homo sapien
ttaaagctgcaaaaatggtcccaac

SEQ ID NO: 4756534 - DNA, 25 bp, Homo sapien
caactagaaggtgcatgaagctggt

SEQ ID NO: 4756535 - DNA, 25 bp, Homo sapien
tagcacatgtccaggcaaaaaaggg

SEQ ID NO: 4756536 - DNA, 25 bp, Homo sapien
gctcatggtcattacaaaatacggg

SEQ ID NO: 4756537 - DNA, 25 bp, Homo sapien
ggtggctctgggacaaccatattcg

SEQ ID NO: 4756538 - DNA, 25 bp, Homo sapien
tctcttctgcggacagtggtggctc

SEQ ID NO: 4756539 - DNA, 25 bp, Homo sapien
ccagctgcaaaggtatgaattgttc

SEQ ID NO: 4756540 - DNA, 25 bp, Homo sapien
tgaattgttcaagcaccccaaggcc

SEQ ID NO: 4756541 - DNA, 25 bp, Homo sapien
gagctggtttggctaatcccagagg

SEQ ID NO: 4756542 - DNA, 25 bp, Homo sapien
ccagaggtactagtaagtgtgaaat

SEQ ID NO: 4756543 - DNA, 25 bp, Homo sapien
atcccagaggtactagtaagtgtga

SEQ ID NO: 4756544 - DNA, 25 bp, Homo sapien
gctggtttggctaatcccagaggta

SEQ ID NO: 4756545 - DNA, 25 bp, Homo sapien
tacgtacgttcacctagtgcagggc

SEQ ID NO: 4756546 - DNA, 25 bp, Homo sapien
caaaactatgctggcctatggcttc

SEQ ID NO: 4756547 - DNA, 25 bp, Homo sapien
caccatgggcttcacacgttgctct

SEQ ID NO: 4756548 - DNA, 25 bp, Homo sapien
tccattgtctatcagggagtaagtc

SEQ ID NO: 4756549 - DNA, 25 bp, Homo sapien
cgaaacctatctgcataaccagagg

SEQ ID NO: 4756550 - DNA, 25 bp, Homo sapien
gcaaacgaaacctatctgcataacc

SEQ ID NO: 4756551 - DNA, 25 bp, Homo sapien
aatttttgcaaacgaaacctatctg

SEQ ID NO: 4756552 - DNA, 25 bp, Homo sapien
aaacctatctgcataaccagaggca

SEQ ID NO: 4756553 - DNA, 25 bp, Homo sapien
tcctaaatacttgtggtgagattta

SEQ ID NO: 4756554 - DNA, 25 bp, Homo sapien
acttgtggtgagatttatgtcctgg

SEQ ID NO: 4756555 - DNA, 25 bp, Homo sapien
tcttaaatctatggggtaccttgca

SEQ ID NO: 4756556 - DNA, 25 bp, Homo sapien
tgcaggactaccatgttgtcctaaa

SEQ ID NO: 4756557 - DNA, 25 bp, Homo sapien
gctgtacaagtgtcttaagccagaa

SEQ ID NO: 4756558 - DNA, 25 bp, Homo sapien
tattggcatccggttctataaagca

SEQ ID NO: 4756559 - DNA, 25 bp, Homo sapien
taaatcaacatctgcggcaaaggca

SEQ ID NO: 4756560 - DNA, 25 bp, Homo sapien
tgttacatccaaataatccagtgac

SEQ ID NO: 4756561 - DNA, 25 bp, Homo sapien
aaatgttgcaacatccaagttctgc

SEQ ID NO: 4756562 - DNA, 25 bp, Homo sapien
caggtaagcaatggcttgtcaatga

SEQ ID NO: 4756563 - DNA, 25 bp, Homo sapien
ataagcagcttagacgacatgggcg

SEQ ID NO: 4756564 - DNA, 25 bp, Homo sapien
caatggcttgtcaatgataagcagc

SEQ ID NO: 4756565 - DNA, 25 bp, Homo sapien
cttcggaaggtaaagtcagtgccat

SEQ ID NO: 4756566 - DNA, 25 bp, Homo sapien
gctgcacggatccacaacaaggagg

SEQ ID NO: 4756567 - DNA, 25 bp, Homo sapien
aatgcgactgacatcagcaagagga

SEQ ID NO: 4756568 - DNA, 25 bp, Homo sapien
tccgtcaagcggaatggaacgctgc

SEQ ID NO: 4756569 - DNA, 25 bp, Homo sapien
tgcctatagattctgccttgactga

SEQ ID NO: 4756570 - DNA, 25 bp, Homo sapien
tgtgttcctaggcactgcctataga

SEQ ID NO: 4756571 - DNA, 25 bp, Homo sapien
ctgccttgactgatgtttgctgact

SEQ ID NO: 4756572 - DNA, 25 bp, Homo sapien
tgcgtctgtgttcctaggcactgcc

SEQ ID NO: 4756573 - DNA, 25 bp, Homo sapien
aaaggctggatacctgtcacccaaa

SEQ ID NO: 4756574 - DNA, 25 bp, Homo sapien
tttggacaggccacatgctgagacc

SEQ ID NO: 4756575 - DNA, 25 bp, Homo sapien
tatgcgcaaatgctagtgttgacac

SEQ ID NO: 4756576 - DNA, 25 bp, Homo sapien
tatggtggcacctaggtcaacctga

SEQ ID NO: 4756577 - DNA, 25 bp, Homo sapien
aataacagacgggtctccacgctgg

SEQ ID NO: 4756578 - DNA, 25 bp, Homo sapien
tatgaggatcactagtaaacaccac

SEQ ID NO: 4756579 - DNA, 25 bp, Homo sapien
gggaggtaacttttatgaggatcac

SEQ ID NO: 4756580 - DNA, 25 bp, Homo sapien
agaaataacagacgggtctccacgc

SEQ ID NO: 4756581 - DNA, 25 bp, Homo sapien
ctttggaactccttctgtatgccca

SEQ ID NO: 4756582 - DNA, 25 bp, Homo sapien
cctggtcttactgccatgaatggat

SEQ ID NO: 4756583 - DNA, 25 bp, Homo sapien
gccccacagttgctgactcagtagg

SEQ ID NO: 4756584 - DNA, 25 bp, Homo sapien
ttaaaatagattgccaggccgcagc

SEQ ID NO: 4756585 - DNA, 25 bp, Homo sapien
acatagcaacctctaattttaaact

SEQ ID NO: 4756586 - DNA, 25 bp, Homo sapien
aaatgaggaccaacatagcaacctc

SEQ ID NO: 4756587 - DNA, 25 bp, Homo sapien
ttgttcaaggtaaactgacgtatca

SEQ ID NO: 4756588 - DNA, 25 bp, Homo sapien
gttgttcaaggtaaactgacgtatc

SEQ ID NO: 4756589 - DNA, 25 bp, Homo sapien
gcgcttcacattttagcatgggcca

SEQ ID NO: 4756590 - DNA, 25 bp, Homo sapien
tagtttgcttcttacgcgcttcaca

SEQ ID NO: 4756591 - DNA, 25 bp, Homo sapien
gctcctattgcaaagaaaccctctg

SEQ ID NO: 4756592 - DNA, 25 bp, Homo sapien
gccatgcaatgtccataaatgggca

SEQ ID NO: 4756593 - DNA, 25 bp, Homo sapien
ccgagtgccacagccttgacagagt

SEQ ID NO: 4756594 - DNA, 25 bp, Homo sapien
ggcatccgcttgaccactgacggct

SEQ ID NO: 4756595 - DNA, 25 bp, Homo sapien
ttgacagagtccagtgagcatggcc

SEQ ID NO: 4756596 - DNA, 25 bp, Homo sapien
tatgctttggccatgcagttactga

SEQ ID NO: 4756597 - DNA, 25 bp, Homo sapien
tgcacaaaacagaaaccaatccatg

SEQ ID NO: 4756598 - DNA, 25 bp, Homo sapien
ctgcacaaaacagaaaccaatccat

SEQ ID NO: 4756599 - DNA, 25 bp, Homo sapien
gcacaaaacagaaaccaatccatgt

SEQ ID NO: 4756600 - DNA, 25 bp, Homo sapien
tagtgtaccacaactatgcctgtga

SEQ ID NO: 4756601 - DNA, 25 bp, Homo sapien
gttccttcggtctatattagggcca

SEQ ID NO: 4756602 - DNA, 25 bp, Homo sapien
ggcaaaacccgcaattcgcaattac

SEQ ID NO: 4756603 - DNA, 25 bp, Homo sapien
cacactgagtatctctaggactgag

SEQ ID NO: 4756604 - DNA, 25 bp, Homo sapien
taagatagcctaagtcaggaagaga

SEQ ID NO: 4756605 - DNA, 25 bp, Homo sapien
ctcaaggtcaacttgtaagatagcc

SEQ ID NO: 4756606 - DNA, 25 bp, Homo sapien
gtatacagcaaacatcttcactcga

SEQ ID NO: 4756607 - DNA, 25 bp, Homo sapien
gggcctactgattcttcatcgacaa

SEQ ID NO: 4756608 - DNA, 25 bp, Homo sapien
gattttggataatgagccattctgc

SEQ ID NO: 4756609 - DNA, 25 bp, Homo sapien
tagaatttcctctcggattgctttc

SEQ ID NO: 4756610 - DNA, 25 bp, Homo sapien
gaaaacttgtgtttgatggatagca

SEQ ID NO: 4756611 - DNA, 25 bp, Homo sapien
ctgcaaatagccaaaggtaacttga

SEQ ID NO: 4756612 - DNA, 25 bp, Homo sapien
taaaattcttcacatagccaggcgg

SEQ ID NO: 4756613 - DNA, 25 bp, Homo sapien
ttaaataatatgtaacaaggcctta

SEQ ID NO: 4756614 - DNA, 25 bp, Homo sapien
caatgttgttcaatcatcatcacta

SEQ ID NO: 4756615 - DNA, 25 bp, Homo sapien
ccatatggttcagtggcaataagta

SEQ ID NO: 4756616 - DNA, 25 bp, Homo sapien
gacaaaatctatgacttccctataa

SEQ ID NO: 4756617 - DNA, 25 bp, Homo sapien
tacaatgcctcgctttggttaggag

SEQ ID NO: 4756618 - DNA, 25 bp, Homo sapien
tatggcacatccatagacacaaagc

SEQ ID NO: 4756619 - DNA, 25 bp, Homo sapien
gacacaaagcaacttgaggttagaa

SEQ ID NO: 4756620 - DNA, 25 bp, Homo sapien
tccccacaagagaagcaaagtatgt

SEQ ID NO: 4756621 - DNA, 25 bp, Homo sapien
tctctttaattccatcaacacaaaa

SEQ ID NO: 4756622 - DNA, 25 bp, Homo sapien
tgcttgctgcaaaggagacataagt

SEQ ID NO: 4756623 - DNA, 25 bp, Homo sapien
aattactacttgctcaactatttga

SEQ ID NO: 4756624 - DNA, 25 bp, Homo sapien
ggcagccttctgattaatacctcgg

SEQ ID NO: 4756625 - DNA, 25 bp, Homo sapien
ctggtactgtggaaaggcagccttc

SEQ ID NO: 4756626 - DNA, 25 bp, Homo sapien
tagggttggacggatactcatctcg

SEQ ID NO: 4756627 - DNA, 25 bp, Homo sapien
tacctcggagcaccatagggttgga

SEQ ID NO: 4756628 - DNA, 25 bp, Homo sapien
ttcagcacaaagtcaagtgtctcaa

SEQ ID NO: 4756629 - DNA, 25 bp, Homo sapien
cagcacaaagtcaagtgtctcaact

SEQ ID NO: 4756630 - DNA, 25 bp, Homo sapien
tcagcacaaagtcaagtgtctcaac

SEQ ID NO: 4756631 - DNA, 25 bp, Homo sapien
ttcaattttccatgacctacgtcag

SEQ ID NO: 4756632 - DNA, 25 bp, Homo sapien
tgtgctctgctagccaagatcttca

SEQ ID NO: 4756633 - DNA, 25 bp, Homo sapien
tacaggccagcttattcatcagaat

SEQ ID NO: 4756634 - DNA, 25 bp, Homo sapien
gaaatctctcagtctaaagaacaca

SEQ ID NO: 4756635 - DNA, 25 bp, Homo sapien
tatttaatactctactgacaccgct

SEQ ID NO: 4756636 - DNA, 25 bp, Homo sapien
acatacactgcatatctgtcccctg

SEQ ID NO: 4756637 - DNA, 25 bp, Homo sapien
tatatatataggaggctgtacatac

SEQ ID NO: 4756638 - DNA, 25 bp, Homo sapien
aatcttatccatattgactcctcaa

SEQ ID NO: 4756639 - DNA, 25 bp, Homo sapien
ggaaatagcacagcacggatcctcc

SEQ ID NO: 4756640 - DNA, 25 bp, Homo sapien
ctcagagaagtgacaagcgggagcc

SEQ ID NO: 4756641 - DNA, 25 bp, Homo sapien
gaaagctcaggtggtggaaacaaca

SEQ ID NO: 4756642 - DNA, 25 bp, Homo sapien
ggaagagcccatgctacgaaaagaa

SEQ ID NO: 4756643 - DNA, 25 bp, Homo sapien
tatccccattgtgtaccgacataga

SEQ ID NO: 4756644 - DNA, 25 bp, Homo sapien
cctgggcagctggtacctccattct

SEQ ID NO: 4756645 - DNA, 25 bp, Homo sapien
taaataatactaagagcagcgggca

SEQ ID NO: 4756646 - DNA, 25 bp, Homo sapien
tgtgccaggccatatgctaaatgct

SEQ ID NO: 4756647 - DNA, 25 bp, Homo sapien
taagcatccttgtatcctgtcacag

SEQ ID NO: 4756648 - DNA, 25 bp, Homo sapien
tacacagcttggatggcggatcagg

SEQ ID NO: 4756649 - DNA, 25 bp, Homo sapien
gcataggtcccactgcagatcactg

SEQ ID NO: 4756650 - DNA, 25 bp, Homo sapien
ggtagttgtccattcttcccacata

SEQ ID NO: 4756651 - DNA, 25 bp, Homo sapien
taaactgtacatgtaagatctgtgc

SEQ ID NO: 4756652 - DNA, 25 bp, Homo sapien
tatctcgctcctcaatacagaccaa

SEQ ID NO: 4756653 - DNA, 25 bp, Homo sapien
tctactcaattaatgacatgctggg

SEQ ID NO: 4756654 - DNA, 25 bp, Homo sapien
tattgataaactcactagaatctgc

SEQ ID NO: 4756655 - DNA, 25 bp, Homo sapien
tgtggaccaaacttcacgagggaga

SEQ ID NO: 4756656 - DNA, 25 bp, Homo sapien
cttcatgaggaagccaattgcactg

SEQ ID NO: 4756657 - DNA, 25 bp, Homo sapien
tctgaaagcctctaattgggaacgt

SEQ ID NO: 4756658 - DNA, 25 bp, Homo sapien
aattgcactgctgtacctatctgga

SEQ ID NO: 4756659 - DNA, 25 bp, Homo sapien
tgtttaatgcatatgggctgtcccc

SEQ ID NO: 4756660 - DNA, 25 bp, Homo sapien
agtaggagccaaaacaagatacctg

SEQ ID NO: 4756661 - DNA, 25 bp, Homo sapien
caaaagacaagtctgcgcttaggca

SEQ ID NO: 4756662 - DNA, 25 bp, Homo sapien
tgaagacagctaaatatccggtatg

SEQ ID NO: 4756663 - DNA, 25 bp, Homo sapien
ataaaactggaggtcaatataaaat

SEQ ID NO: 4756664 - DNA, 25 bp, Homo sapien
tgtaaagatatgatcatattaaagc

SEQ ID NO: 4756665 - DNA, 25 bp, Homo sapien
gaccatcacattgcagcccatatga

SEQ ID NO: 4756666 - DNA, 25 bp, Homo sapien
agtgaaattgatttggcgaccatca

SEQ ID NO: 4756667 - DNA, 25 bp, Homo sapien
gagattcagatacctcttggctgga

SEQ ID NO: 4756668 - DNA, 25 bp, Homo sapien
gaggcttctggtctattcctccagt

SEQ ID NO: 4756669 - DNA, 25 bp, Homo sapien
ctacatacttgttctgaccaccctg

SEQ ID NO: 4756670 - DNA, 25 bp, Homo sapien
tcctgggtaatgttcgaggcttctg

SEQ ID NO: 4756671 - DNA, 25 bp, Homo sapien
ctgtcacccaatgctcgagtacaat

SEQ ID NO: 4756672 - DNA, 25 bp, Homo sapien
aatgctcgagtacaatggcaagaac

SEQ ID NO: 4756673 - DNA, 25 bp, Homo sapien
ctcgagtacaatggcaagaacatgg

SEQ ID NO: 4756674 - DNA, 25 bp, Homo sapien
gtcacccaatgctcgagtacaatgg

SEQ ID NO: 4756675 - DNA, 25 bp, Homo sapien
gagccggtatgtccagccctcatat

SEQ ID NO: 4756676 - DNA, 25 bp, Homo sapien
gagaatgaggagaacaaacttgtcc

SEQ ID NO: 4756677 - DNA, 25 bp, Homo sapien
gctctagtctcaagcaataacactg

SEQ ID NO: 4756678 - DNA, 25 bp, Homo sapien
tttttggccctctagtggcatcagg

SEQ ID NO: 4756679 - DNA, 25 bp, Homo sapien
aaggtcagtcctattccattatctg

SEQ ID NO: 4756680 - DNA, 25 bp, Homo sapien
cagtcctattccattatctgcaaat

SEQ ID NO: 4756681 - DNA, 25 bp, Homo sapien
ctggcaaaggtcagtcctattccat

SEQ ID NO: 4756682 - DNA, 25 bp, Homo sapien
ggcaaaggtcagtcctattccatta

SEQ ID NO: 4756683 - DNA, 25 bp, Homo sapien
atgtaaaaagaggtaattctctcaa

SEQ ID NO: 4756684 - DNA, 25 bp, Homo sapien
tatgtaaaaagaggtaattctctca

SEQ ID NO: 4756685 - DNA, 25 bp, Homo sapien
tgtaaaaagaggtaattctctcaat

SEQ ID NO: 4756686 - DNA, 25 bp, Homo sapien
tttaaaagcaatgagcctgtcaatt

SEQ ID NO: 4756687 - DNA, 25 bp, Homo sapien
tgtcaattagagcagcaacacgtgg

SEQ ID NO: 4756688 - DNA, 25 bp, Homo sapien
gaacgataatatctcctcctctgac

SEQ ID NO: 4756689 - DNA, 25 bp, Homo sapien
tctgacccaagctccattatcatta

SEQ ID NO: 4756690 - DNA, 25 bp, Homo sapien
gagcctggctatgatgtaaatctga

SEQ ID NO: 4756691 - DNA, 25 bp, Homo sapien
aaagaaagtaacctagagcctggct

SEQ ID NO: 4756692 - DNA, 25 bp, Homo sapien
taagagaactctgctgaaatgctga

SEQ ID NO: 4756693 - DNA, 25 bp, Homo sapien
gattctttgaagaacaatcaggcct

SEQ ID NO: 4756694 - DNA, 25 bp, Homo sapien
aggtattcccttgggtcagcagcac

SEQ ID NO: 4756695 - DNA, 25 bp, Homo sapien
cactagagttggttgttttgacacc

SEQ ID NO: 4756696 - DNA, 25 bp, Homo sapien
tgcactattgtccaaacagaggtat

SEQ ID NO: 4756697 - DNA, 25 bp, Homo sapien
ctattgtccaaacagaggtattccc

SEQ ID NO: 4756698 - DNA, 25 bp, Homo sapien
tgaatcccaacttacaacaacatat

SEQ ID NO: 4756699 - DNA, 25 bp, Homo sapien
aatatgaatcccaacttacaacaac

SEQ ID NO: 4756700 - DNA, 25 bp, Homo sapien
tatgaatcccaacttacaacaacat

SEQ ID NO: 4756701 - DNA, 25 bp, Homo sapien
tgaatatgaatcccaacttacaaca

SEQ ID NO: 4756702 - DNA, 25 bp, Homo sapien
agttcatcctttacactgtctagca

SEQ ID NO: 4756703 - DNA, 25 bp, Homo sapien
accaaatgctgtccccttgatcttg

SEQ ID NO: 4756704 - DNA, 25 bp, Homo sapien
ccttgcccttctaccgtggatgaca

SEQ ID NO: 4756705 - DNA, 25 bp, Homo sapien
gctgctcattataagttaactagtc

SEQ ID NO: 4756706 - DNA, 25 bp, Homo sapien
tatacccaatggagtgagttctggt

SEQ ID NO: 4756707 - DNA, 25 bp, Homo sapien
gccaagagctgcaatccactggatt

SEQ ID NO: 4756708 - DNA, 25 bp, Homo sapien
aatttgaatggaccctgttgttata

SEQ ID NO: 4756709 - DNA, 25 bp, Homo sapien
gattccccagttggttccttgtgga

SEQ ID NO: 4756710 - DNA, 25 bp, Homo sapien
taaaagcctaatttatacagatatc

SEQ ID NO: 4756711 - DNA, 25 bp, Homo sapien
tatctatgaaacactctcataaact

SEQ ID NO: 4756712 - DNA, 25 bp, Homo sapien
taatttatacagatatctatgaaac

SEQ ID NO: 4756713 - DNA, 25 bp, Homo sapien
taaactaacttcttcatcagcaagt

SEQ ID NO: 4756714 - DNA, 25 bp, Homo sapien
aacagacaagttgacgggataagac

SEQ ID NO: 4756715 - DNA, 25 bp, Homo sapien
cgggataagacctggagggtcagaa

SEQ ID NO: 4756716 - DNA, 25 bp, Homo sapien
cagacaagttgacgggataagacct

SEQ ID NO: 4756717 - DNA, 25 bp, Homo sapien
caagttgacgggataagacctggag

SEQ ID NO: 4756718 - DNA, 25 bp, Homo sapien
cataacccataagctgagggcagag

SEQ ID NO: 4756719 - DNA, 25 bp, Homo sapien
ccatcctaggatgcaatggagatgg

SEQ ID NO: 4756720 - DNA, 25 bp, Homo sapien
ggcagagtggaccatcctaggatgc

SEQ ID NO: 4756721 - DNA, 25 bp, Homo sapien
ctgagggcagagtggaccatcctag

SEQ ID NO: 4756722 - DNA, 25 bp, Homo sapien
gattattgttgggatgagcaatcca

SEQ ID NO: 4756723 - DNA, 25 bp, Homo sapien
ctgcagctgcattattaatcagatt

SEQ ID NO: 4756724 - DNA, 25 bp, Homo sapien
cctgcagctgcattattaatcagat

SEQ ID NO: 4756725 - DNA, 25 bp, Homo sapien
agattattgttgggatgagcaatcc

SEQ ID NO: 4756726 - DNA, 25 bp, Homo sapien
cctatcggtgggcaggagagtaccc

SEQ ID NO: 4756727 - DNA, 25 bp, Homo sapien
cactttatctcgcatggtggtacac

SEQ ID NO: 4756728 - DNA, 25 bp, Homo sapien
cctagtgtgtcaaacccaatggtgt

SEQ ID NO: 4756729 - DNA, 25 bp, Homo sapien
gtacccggcttggtgaggagtccca

SEQ ID NO: 4756730 - DNA, 25 bp, Homo sapien
gtgaaaatgaacagggtatcgcccc

SEQ ID NO: 4756731 - DNA, 25 bp, Homo sapien
cagtgatgcaccttgagaagctgtg

SEQ ID NO: 4756732 - DNA, 25 bp, Homo sapien
tataatccacgtcaccacacaggtg

SEQ ID NO: 4756733 - DNA, 25 bp, Homo sapien
tttgtcccatgcacagtgatgcacc

SEQ ID NO: 4756734 - DNA, 25 bp, Homo sapien
tccgggtaagaattccaacctcagc

SEQ ID NO: 4756735 - DNA, 25 bp, Homo sapien
ccttggatcacaatattccgggtaa

SEQ ID NO: 4756736 - DNA, 25 bp, Homo sapien
gattttctgcgtagcatgagtcctc

SEQ ID NO: 4756737 - DNA, 25 bp, Homo sapien
gctctcatgtctacaccgtctatga

SEQ ID NO: 4756738 - DNA, 25 bp, Homo sapien
tcatctagcaaatttagcttcactc

SEQ ID NO: 4756739 - DNA, 25 bp, Homo sapien
tgaactcctctgcttggtacatgga

SEQ ID NO: 4756740 - DNA, 25 bp, Homo sapien
tgtgcttgcgaccacaatctggtct

SEQ ID NO: 4756741 - DNA, 25 bp, Homo sapien
ggctgcattcagaacagggaagaag

SEQ ID NO: 4756742 - DNA, 25 bp, Homo sapien
cttcccgccactgctatgattttca

SEQ ID NO: 4756743 - DNA, 25 bp, Homo sapien
taagctgtcacagagaacttctggc

SEQ ID NO: 4756744 - DNA, 25 bp, Homo sapien
tgacaccaactaaagcccaagcttg

SEQ ID NO: 4756745 - DNA, 25 bp, Homo sapien
catagtttctcacggattcattgca

SEQ ID NO: 4756746 - DNA, 25 bp, Homo sapien
ttcagggtccttgccaacaacgtcc

SEQ ID NO: 4756747 - DNA, 25 bp, Homo sapien
agctatggcaacaatccgacctgga

SEQ ID NO: 4756748 - DNA, 25 bp, Homo sapien
tccgtgccccatgtaactccagtgt

SEQ ID NO: 4756749 - DNA, 25 bp, Homo sapien
gacttttagcggctgaatccccgac

SEQ ID NO: 4756750 - DNA, 25 bp, Homo sapien
ccatggttagagtgacaccacaaac

SEQ ID NO: 4756751 - DNA, 25 bp, Homo sapien
aaccttgcagttcccataggcagga

SEQ ID NO: 4756752 - DNA, 25 bp, Homo sapien
cccacattaaagagcaaccttgcag

SEQ ID NO: 4756753 - DNA, 25 bp, Homo sapien
tatactctcaatgcccatgactgtg

SEQ ID NO: 4756754 - DNA, 25 bp, Homo sapien
ctgagacgaggattttgatctgggc

SEQ ID NO: 4756755 - DNA, 25 bp, Homo sapien
gactatagaatgcacggtggcgtct

SEQ ID NO: 4756756 - DNA, 25 bp, Homo sapien
tctgaggtcagacggagcatatctc

SEQ ID NO: 4756757 - DNA, 25 bp, Homo sapien
cctggatcccaattcctgagacgag

SEQ ID NO: 4756758 - DNA, 25 bp, Homo sapien
cttgagagctggacaccaaaggatg

SEQ ID NO: 4756759 - DNA, 25 bp, Homo sapien
caatatggtagtcagtcgaggttca

SEQ ID NO: 4756760 - DNA, 25 bp, Homo sapien
taaataagaggatcatgagaacact

SEQ ID NO: 4756761 - DNA, 25 bp, Homo sapien
caacctatggccaagtatttgtgga

SEQ ID NO: 4756762 - DNA, 25 bp, Homo sapien
ttagcctcaccagttatatccttgg

SEQ ID NO: 4756763 - DNA, 25 bp, Homo sapien
tagagaggtagggtgctacacaaac

SEQ ID NO: 4756764 - DNA, 25 bp, Homo sapien
tctcacaatgccctaggtttatgct

SEQ ID NO: 4756765 - DNA, 25 bp, Homo sapien
gaaattcctttcattaaggtggcag

SEQ ID NO: 4756766 - DNA, 25 bp, Homo sapien
cagtcttttgagatctggagcctac

SEQ ID NO: 4756767 - DNA, 25 bp, Homo sapien
cagcaatgccctgttttagatggaa

SEQ ID NO: 4756768 - DNA, 25 bp, Homo sapien
gagttgggaagtatgaatcagcaca

SEQ ID NO: 4756769 - DNA, 25 bp, Homo sapien
gatgatctgcactttacactgccaa

SEQ ID NO: 4756770 - DNA, 25 bp, Homo sapien
tcaggtgagaatgcgaaggttgccc

SEQ ID NO: 4756771 - DNA, 25 bp, Homo sapien
ggttgcccggtcttctcgtctgatg

SEQ ID NO: 4756772 - DNA, 25 bp, Homo sapien
gccagatgggtgacgactatttcca

SEQ ID NO: 4756773 - DNA, 25 bp, Homo sapien
ggctgaagcttgactctttggagga

SEQ ID NO: 4756774 - DNA, 25 bp, Homo sapien
agtgtcccctggaatcagtggcata

SEQ ID NO: 4756775 - DNA, 25 bp, Homo sapien
gggagtgtcccctggaatcagtggc

SEQ ID NO: 4756776 - DNA, 25 bp, Homo sapien
caggggagtgtcccctggaatcagt

SEQ ID NO: 4756777 - DNA, 25 bp, Homo sapien
gtcccctggaatcagtggcatacat

SEQ ID NO: 4756778 - DNA, 25 bp, Homo sapien
caggtacatcccacgatgattggct

SEQ ID NO: 4756779 - DNA, 25 bp, Homo sapien
ccagctggaatgtatgaatcataaa

SEQ ID NO: 4756780 - DNA, 25 bp, Homo sapien
catagatcactacagtctcgcactc

SEQ ID NO: 4756781 - DNA, 25 bp, Homo sapien
cccagtatccagctggaatgtatga

SEQ ID NO: 4756782 - DNA, 25 bp, Homo sapien
caaacaatcgagaggcaaagaatga

SEQ ID NO: 4756783 - DNA, 25 bp, Homo sapien
ggcttttaacttacaccactgtgtc

SEQ ID NO: 4756784 - DNA, 25 bp, Homo sapien
cacagttaatatagaggagaaccag

SEQ ID NO: 4756785 - DNA, 25 bp, Homo sapien
caacaaatctataaggtagatgcca

SEQ ID NO: 4756786 - DNA, 25 bp, Homo sapien
gggggtcaatatgggaggattgctt

SEQ ID NO: 4756787 - DNA, 25 bp, Homo sapien
aataaataaaggagaggcatgattt

SEQ ID NO: 4756788 - DNA, 25 bp, Homo sapien
gctttcaaacaccacactatctcat

SEQ ID NO: 4756789 - DNA, 25 bp, Homo sapien
tgggaacctagtgagacaccctgtc

SEQ ID NO: 4756790 - DNA, 25 bp, Homo sapien
tactttttgccttatgtttcagtta

SEQ ID NO: 4756791 - DNA, 25 bp, Homo sapien
ttacaggatcatcttactttttgcc

SEQ ID NO: 4756792 - DNA, 25 bp, Homo sapien
tttcagttaatttatgtacttgtcc

SEQ ID NO: 4756793 - DNA, 25 bp, Homo sapien
atttatgtacttgtccatctgcagc

SEQ ID NO: 4756794 - DNA, 25 bp, Homo sapien
aacctgctggcagtgacggatggca

SEQ ID NO: 4756795 - DNA, 25 bp, Homo sapien
ggttatagcaaagggcagaactgcc

SEQ ID NO: 4756796 - DNA, 25 bp, Homo sapien
gaaccaaagtcgaagtctgtcctga

SEQ ID NO: 4756797 - DNA, 25 bp, Homo sapien
cacacaatggcaagtgcaggcgcgt

SEQ ID NO: 4756798 - DNA, 25 bp, Homo sapien
ccatcatgtgtaagtagtaggcaat

SEQ ID NO: 4756799 - DNA, 25 bp, Homo sapien
tacacttagttccttatttcccaga

SEQ ID NO: 4756800 - DNA, 25 bp, Homo sapien
gtaacatcaccccaccatcatgtgt

SEQ ID NO: 4756801 - DNA, 25 bp, Homo sapien
taatgctatttttacacttagttcc

SEQ ID NO: 4756802 - DNA, 25 bp, Homo sapien
caagagagcaataccatatgacagt

SEQ ID NO: 4756803 - DNA, 25 bp, Homo sapien
gaaagtaccttttgataccagacag

SEQ ID NO: 4756804 - DNA, 25 bp, Homo sapien
taaagacttgctctcaagatgggat

SEQ ID NO: 4756805 - DNA, 25 bp, Homo sapien
tggatgttaccgtacaaaaccagac

SEQ ID NO: 4756806 - DNA, 25 bp, Homo sapien
tctctctagttgcaagtgacacagg

SEQ ID NO: 4756807 - DNA, 25 bp, Homo sapien
tgtgcgtaattctcccagacatgca

SEQ ID NO: 4756808 - DNA, 25 bp, Homo sapien
gcttcttagagcgttctgtgcgtaa

SEQ ID NO: 4756809 - DNA, 25 bp, Homo sapien
gagggtctggaccacaataggtgat

SEQ ID NO: 4756810 - DNA, 25 bp, Homo sapien
tcccatcacctaggttggagtgtag

SEQ ID NO: 4756811 - DNA, 25 bp, Homo sapien
gttcccatcacctaggttggagtgt

SEQ ID NO: 4756812 - DNA, 25 bp, Homo sapien
tcgttcccatcacctaggttggagt

SEQ ID NO: 4756813 - DNA, 25 bp, Homo sapien
cccatcacctaggttggagtgtagt

SEQ ID NO: 4756814 - DNA, 25 bp, Homo sapien
gctgttcgcaccgactttgaaaggt

SEQ ID NO: 4756815 - DNA, 25 bp, Homo sapien
tgttcgcaccgactttgaaaggtcc

SEQ ID NO: 4756816 - DNA, 25 bp, Homo sapien
ttcgcaccgactttgaaaggtccat

SEQ ID NO: 4756817 - DNA, 25 bp, Homo sapien
aaggctgttcgcaccgactttgaaa

SEQ ID NO: 4756818 - DNA, 25 bp, Homo sapien
cgcttagcgtccgttaactcaggtg

SEQ ID NO: 4756819 - DNA, 25 bp, Homo sapien
ccaggaagccactcgattgccggcg

SEQ ID NO: 4756820 - DNA, 25 bp, Homo sapien
acggagaggagtccctggcgtcctc

SEQ ID NO: 4756821 - DNA, 25 bp, Homo sapien
tggcgtcctcgggtccagatctcct

SEQ ID NO: 4756822 - DNA, 25 bp, Homo sapien
gagatgctcaggctgggaaaagcac

SEQ ID NO: 4756823 - DNA, 25 bp, Homo sapien
agccagccagacatgtttcctacag

SEQ ID NO: 4756824 - DNA, 25 bp, Homo sapien
aaaagcactggcgtgaggaggcggg

SEQ ID NO: 4756825 - DNA, 25 bp, Homo sapien
gccagacatgtttcctacagctagg

SEQ ID NO: 4756826 - DNA, 25 bp, Homo sapien
agagagagccaaaggcttattatta

SEQ ID NO: 4756827 - DNA, 25 bp, Homo sapien
gatttcgctgaatgcccaaagccat

SEQ ID NO: 4756828 - DNA, 25 bp, Homo sapien
caccatgtgcatacagggcagagag

SEQ ID NO: 4756829 - DNA, 25 bp, Homo sapien
tattattaagtaggacagcctctgg

SEQ ID NO: 4756830 - DNA, 25 bp, Homo sapien
gatgtagatgctggcctgctcccag

SEQ ID NO: 4756831 - DNA, 25 bp, Homo sapien
tttagaacagatgtagatgctggcc

SEQ ID NO: 4756832 - DNA, 25 bp, Homo sapien
ctgctcccagaatcttgctgcaaaa

SEQ ID NO: 4756833 - DNA, 25 bp, Homo sapien
gcaaaatcataacttcaccattccc

SEQ ID NO: 4756834 - DNA, 25 bp, Homo sapien
tgtttatcccttaactcgctgacag

SEQ ID NO: 4756835 - DNA, 25 bp, Homo sapien
gaatctaatgtctcctggccctaaa

SEQ ID NO: 4756836 - DNA, 25 bp, Homo sapien
ggaacaatgctgtttaatccaatct

SEQ ID NO: 4756837 - DNA, 25 bp, Homo sapien
ggtcacagagaatgtaaatgtcaaa

SEQ ID NO: 4756838 - DNA, 25 bp, Homo sapien
tatttcctataggatgagccacttg

SEQ ID NO: 4756839 - DNA, 25 bp, Homo sapien
tgaggagggcacaggcaaaattgtc

SEQ ID NO: 4756840 - DNA, 25 bp, Homo sapien
cacagagaaataagccggagaaagt

SEQ ID NO: 4756841 - DNA, 25 bp, Homo sapien
ccacttgaacaagctgagtttcttc

SEQ ID NO: 4756842 - DNA, 25 bp, Homo sapien
gtacatctgaaattgaagcttccca

SEQ ID NO: 4756843 - DNA, 25 bp, Homo sapien
ccgtaggcaaggattcgttaactag

SEQ ID NO: 4756844 - DNA, 25 bp, Homo sapien
cacctttctgtctacccgtaggcaa

SEQ ID NO: 4756845 - DNA, 25 bp, Homo sapien
aactgatactggaggagtgctgagc

SEQ ID NO: 4756846 - DNA, 25 bp, Homo sapien
aaggcccgagcaaggtgctgagcca

SEQ ID NO: 4756847 - DNA, 25 bp, Homo sapien
ggctaaggcccgagcaaggtgctga

SEQ ID NO: 4756848 - DNA, 25 bp, Homo sapien
aaagatgggctaaggcccgagcaag

SEQ ID NO: 4756849 - DNA, 25 bp, Homo sapien
ctaaggcccgagcaaggtgctgagc

SEQ ID NO: 4756850 - DNA, 25 bp, Homo sapien
gactggcagtttacggaggcaaggg

SEQ ID NO: 4756851 - DNA, 25 bp, Homo sapien
tgctcccacttggtattctcaactt

SEQ ID NO: 4756852 - DNA, 25 bp, Homo sapien
tgcccatctccatgctaggaccgaa

SEQ ID NO: 4756853 - DNA, 25 bp, Homo sapien
tcttttgctcccacttggtattctc

SEQ ID NO: 4756854 - DNA, 25 bp, Homo sapien
ttgatggttttatccctgaggacga

SEQ ID NO: 4756855 - DNA, 25 bp, Homo sapien
tcccagaaggataaccaagtctttg

SEQ ID NO: 4756856 - DNA, 25 bp, Homo sapien
gaggacgatgtagatctttattttc

SEQ ID NO: 4756857 - DNA, 25 bp, Homo sapien
catcactcttgtcccagaaggataa

SEQ ID NO: 4756858 - DNA, 25 bp, Homo sapien
ggctgtactggacaggacaaaaggt

SEQ ID NO: 4756859 - DNA, 25 bp, Homo sapien
gaggctgtactggacaggacaaaag

SEQ ID NO: 4756860 - DNA, 25 bp, Homo sapien
ctggacaggacaaaaggtgcacttg

SEQ ID NO: 4756861 - DNA, 25 bp, Homo sapien
tgtactggacaggacaaaaggtgca

SEQ ID NO: 4756862 - DNA, 25 bp, Homo sapien
tggcctctgactttaccaaagttat

SEQ ID NO: 4756863 - DNA, 25 bp, Homo sapien
tatattcgtaaacctacctgctacc

SEQ ID NO: 4756864 - DNA, 25 bp, Homo sapien
ttgacagcaccagatatatttaggg

SEQ ID NO: 4756865 - DNA, 25 bp, Homo sapien
tggagcccagacttctagacttaaa

SEQ ID NO: 4756866 - DNA, 25 bp, Homo sapien
tgacatttgttaagacctttgtact

SEQ ID NO: 4756867 - DNA, 25 bp, Homo sapien
tattcatgtgtctgtggctaccatc

SEQ ID NO: 4756868 - DNA, 25 bp, Homo sapien
tgacaaggaggaacctacccattaa

SEQ ID NO: 4756869 - DNA, 25 bp, Homo sapien
caactattcagtcagaggcataatc

SEQ ID NO: 4756870 - DNA, 25 bp, Homo sapien
cattgaaaactgtagaccttgagaa

SEQ ID NO: 4756871 - DNA, 25 bp, Homo sapien
cacttcccttctttatgtttctgca

SEQ ID NO: 4756872 - DNA, 25 bp, Homo sapien
acttcccttctttatgtttctgcac

SEQ ID NO: 4756873 - DNA, 25 bp, Homo sapien
tcacttcccttctttatgtttctgc

SEQ ID NO: 4756874 - DNA, 25 bp, Homo sapien
ccctgggttgtatgctgtacaaaga

SEQ ID NO: 4756875 - DNA, 25 bp, Homo sapien
aaacatttagctaagccctgggttg

SEQ ID NO: 4756876 - DNA, 25 bp, Homo sapien
gaacgaacactgaatgaataggatc

SEQ ID NO: 4756877 - DNA, 25 bp, Homo sapien
ttaaacataaccacggaacgagcag

SEQ ID NO: 4756878 - DNA, 25 bp, Homo sapien
taagatcaactcatggactttcggg

SEQ ID NO: 4756879 - DNA, 25 bp, Homo sapien
tacacagcctgactgcacggtactg

SEQ ID NO: 4756880 - DNA, 25 bp, Homo sapien
taaaaatagctaaagtgggccaggc

SEQ ID NO: 4756881 - DNA, 25 bp, Homo sapien
tatttaccaaagagtgcagttcagc

SEQ ID NO: 4756882 - DNA, 25 bp, Homo sapien
taatactggagaggttatcttagag

SEQ ID NO: 4756883 - DNA, 25 bp, Homo sapien
tctttggcaacgttcaaacaatgcg

SEQ ID NO: 4756884 - DNA, 25 bp, Homo sapien
tcctgtgacacaaactgtttcaacc

SEQ ID NO: 4756885 - DNA, 25 bp, Homo sapien
caaacaatgcgaggccatgtgaaaa

SEQ ID NO: 4756886 - DNA, 25 bp, Homo sapien
tggtatcaggaaaggcaactcgcat

SEQ ID NO: 4756887 - DNA, 25 bp, Homo sapien
tatcgagcagcaagatccacagacg

SEQ ID NO: 4756888 - DNA, 25 bp, Homo sapien
gggaatgcatcaaaacagtaggtct

SEQ ID NO: 4756889 - DNA, 25 bp, Homo sapien
tcgcattcccgaagtcagaggagaa

SEQ ID NO: 4756890 - DNA, 25 bp, Homo sapien
tcttttggaagaataattgctgagg

SEQ ID NO: 4756891 - DNA, 25 bp, Homo sapien
taacattacaataaagtctgtatca

SEQ ID NO: 4756892 - DNA, 25 bp, Homo sapien
gatcttagaataagacaatgtcaac

SEQ ID NO: 4756893 - DNA, 25 bp, Homo sapien
aagttggagtgatatgaaatgttcc

SEQ ID NO: 4756894 - DNA, 25 bp, Homo sapien
gatgtaaagtccaacggcttccgct

SEQ ID NO: 4756895 - DNA, 25 bp, Homo sapien
tggatcaggtggcaaaaacgctaat

SEQ ID NO: 4756896 - DNA, 25 bp, Homo sapien
gaatactgccagtctgctcgttcag

SEQ ID NO: 4756897 - DNA, 25 bp, Homo sapien
tcgcattgggtgaacaacgtacaaa

SEQ ID NO: 4756898 - DNA, 25 bp, Homo sapien
caacatagctcactaaatgaaagat

SEQ ID NO: 4756899 - DNA, 25 bp, Homo sapien
aacatagctcactaaatgaaagatt

SEQ ID NO: 4756900 - DNA, 25 bp, Homo sapien
acatagctcactaaatgaaagatta

SEQ ID NO: 4756901 - DNA, 25 bp, Homo sapien
gcaacatagctcactaaatgaaaga

SEQ ID NO: 4756902 - DNA, 25 bp, Homo sapien
tactatagaagttccaggagaaaat

SEQ ID NO: 4756903 - DNA, 25 bp, Homo sapien
taacctagaattgtacatagaacaa

SEQ ID NO: 4756904 - DNA, 25 bp, Homo sapien
gaaatatcactatccatactataga

SEQ ID NO: 4756905 - DNA, 25 bp, Homo sapien
gattgaaacacctcaaagtgtacca

SEQ ID NO: 4756906 - DNA, 25 bp, Homo sapien
gatgctactgatactgataagctta

SEQ ID NO: 4756907 - DNA, 25 bp, Homo sapien
actgatactgataagcttaagacat

SEQ ID NO: 4756908 - DNA, 25 bp, Homo sapien
tactgataagcttaagacatagaag

SEQ ID NO: 4756909 - DNA, 25 bp, Homo sapien
gaggatgctactgatactgataagc

SEQ ID NO: 4756910 - DNA, 25 bp, Homo sapien
gttgctgagcgtaagctagacatga

SEQ ID NO: 4756911 - DNA, 25 bp, Homo sapien
ctgttgctgagcgtaagctagacat

SEQ ID NO: 4756912 - DNA, 25 bp, Homo sapien
gctgagcgtaagctagacatgaaca

SEQ ID NO: 4756913 - DNA, 25 bp, Homo sapien
tgctgagcgtaagctagacatgaac

SEQ ID NO: 4756914 - DNA, 25 bp, Homo sapien
tcattcactgcccatccaaggggca

SEQ ID NO: 4756915 - DNA, 25 bp, Homo sapien
gtctgtagcaggttgttatcaatta

SEQ ID NO: 4756916 - DNA, 25 bp, Homo sapien
atttttaatgcctaccaagtattat

SEQ ID NO: 4756917 - DNA, 25 bp, Homo sapien
taccatttcatactcctcagaatgg

SEQ ID NO: 4756918 - DNA, 25 bp, Homo sapien
accatttcatactcctcagaatggc

SEQ ID NO: 4756919 - DNA, 25 bp, Homo sapien
gtaccatttcatactcctcagaatg

SEQ ID NO: 4756920 - DNA, 25 bp, Homo sapien
cactactaaatagaggccaggaatg

SEQ ID NO: 4756921 - DNA, 25 bp, Homo sapien
tgtgatctagcaacctactaccaga

SEQ ID NO: 4756922 - DNA, 25 bp, Homo sapien
taaaccagggcaatctttctcaatg

SEQ ID NO: 4756923 - DNA, 25 bp, Homo sapien
taaagttgaagacattcatacgctg

SEQ ID NO: 4756924 - DNA, 25 bp, Homo sapien
gaaggatgcatgtcaactttgggtc

SEQ ID NO: 4756925 - DNA, 25 bp, Homo sapien
caacacgtggatataggaaggatgc

SEQ ID NO: 4756926 - DNA, 25 bp, Homo sapien
gatgtaggtagggtcaagaaccact

SEQ ID NO: 4756927 - DNA, 25 bp, Homo sapien
tttgggtcactggttagatatcggg

SEQ ID NO: 4756928 - DNA, 25 bp, Homo sapien
atcctgtccttgccaattaacctta

SEQ ID NO: 4756929 - DNA, 25 bp, Homo sapien
ctaatcctgtccttgccaattaacc

SEQ ID NO: 4756930 - DNA, 25 bp, Homo sapien
taatcctgtccttgccaattaacct

SEQ ID NO: 4756931 - DNA, 25 bp, Homo sapien
aatcctgtccttgccaattaacctt

SEQ ID NO: 4756932 - DNA, 25 bp, Homo sapien
tggaacccttctcttcaccgaggag

SEQ ID NO: 4756933 - DNA, 25 bp, Homo sapien
gaatctctcagtgcgccagtgaggg

SEQ ID NO: 4756934 - DNA, 25 bp, Homo sapien
gagaaagcttttaggcacccgcgaa

SEQ ID NO: 4756935 - DNA, 25 bp, Homo sapien
ccttcttagagtgtcggtcggtcct

SEQ ID NO: 4756936 - DNA, 25 bp, Homo sapien
gactccggccgctccacggaccgca

SEQ ID NO: 4756937 - DNA, 25 bp, Homo sapien
tccccttcacgcaaccatcagagaa

SEQ ID NO: 4756938 - DNA, 25 bp, Homo sapien
gggactgtcctaccgctccccttca

SEQ ID NO: 4756939 - DNA, 25 bp, Homo sapien
catcagagaatcctctcaaaaacac

SEQ ID NO: 4756940 - DNA, 25 bp, Homo sapien
tgaggagtggcttccccgcctttcc

SEQ ID NO: 4756941 - DNA, 25 bp, Homo sapien
gatgaggagtggcttccccgccttt

SEQ ID NO: 4756942 - DNA, 25 bp, Homo sapien
cgatgaggagtggcttccccgcctt

SEQ ID NO: 4756943 - DNA, 25 bp, Homo sapien
atgaggagtggcttccccgcctttc

SEQ ID NO: 4756944 - DNA, 25 bp, Homo sapien
gcagaaggggtcgagagagaaccgc

SEQ ID NO: 4756945 - DNA, 25 bp, Homo sapien
cgggccgaagcgccgggcagaaggg

SEQ ID NO: 4756946 - DNA, 25 bp, Homo sapien
gcccgggccgaagcgccgggcagaa

SEQ ID NO: 4756947 - DNA, 25 bp, Homo sapien
agaaggggtcgagagagaaccgcag

SEQ ID NO: 4756948 - DNA, 25 bp, Homo sapien
ctccacaaggcgagatccgcgctcc

SEQ ID NO: 4756949 - DNA, 25 bp, Homo sapien
cacaaggcgagatccgcgctccggg

SEQ ID NO: 4756950 - DNA, 25 bp, Homo sapien
ctgtcctccacaaggcgagatccgc

SEQ ID NO: 4756951 - DNA, 25 bp, Homo sapien
tgtcctccacaaggcgagatccgcg

SEQ ID NO: 4756952 - DNA, 25 bp, Homo sapien
gttctgctgactaacggccccggtg

SEQ ID NO: 4756953 - DNA, 25 bp, Homo sapien
gccgctgcccgtcggttgctctcgg

SEQ ID NO: 4756954 - DNA, 25 bp, Homo sapien
gtcggttgctctcgggcctcacgtc

SEQ ID NO: 4756955 - DNA, 25 bp, Homo sapien
ctccacaagagctcgcgttctgctg

SEQ ID NO: 4756956 - DNA, 25 bp, Homo sapien
ttccggtagcgggaggaagactgga

SEQ ID NO: 4756957 - DNA, 25 bp, Homo sapien
gggacgagcacaatccccactgagc

SEQ ID NO: 4756958 - DNA, 25 bp, Homo sapien
caagcgcgaggctcgttccggtagc

SEQ ID NO: 4756959 - DNA, 25 bp, Homo sapien
gaggaaggtgccaaagctgaccccg

SEQ ID NO: 4756960 - DNA, 25 bp, Homo sapien
taaaagtgtgcagaccaaggtagga

SEQ ID NO: 4756961 - DNA, 25 bp, Homo sapien
tgatttcggcgatgagctcccagaa

SEQ ID NO: 4756962 - DNA, 25 bp, Homo sapien
tgcaccgtctttgactccaggaagg

SEQ ID NO: 4756963 - DNA, 25 bp, Homo sapien
tcccagaaaggcaacgtggctcgtt

SEQ ID NO: 4756964 - DNA, 25 bp, Homo sapien
ccgcagcccagagttagtcttggct

SEQ ID NO: 4756965 - DNA, 25 bp, Homo sapien
gggcgagtgtggaccgcagcccaga

SEQ ID NO: 4756966 - DNA, 25 bp, Homo sapien
gagtgtggaccgcagcccagagtta

SEQ ID NO: 4756967 - DNA, 25 bp, Homo sapien
tggaccgcagcccagagttagtctt

SEQ ID NO: 4756968 - DNA, 25 bp, Homo sapien
cataataatttatgtggccctgcag

SEQ ID NO: 4756969 - DNA, 25 bp, Homo sapien
tagtcctgttcagatatagtcactg

SEQ ID NO: 4756970 - DNA, 25 bp, Homo sapien
ttgcccttctcattcagtaaagtgg

SEQ ID NO: 4756971 - DNA, 25 bp, Homo sapien
tggcgtgatatggatcaccacaacc

SEQ ID NO: 4756972 - DNA, 25 bp, Homo sapien
aaacaaaaaaattgtgtcaccacat

SEQ ID NO: 4756973 - DNA, 25 bp, Homo sapien
aacaaaaaaattgtgtcaccacatt

SEQ ID NO: 4756974 - DNA, 25 bp, Homo sapien
acaaaaaaattgtgtcaccacattc

SEQ ID NO: 4756975 - DNA, 25 bp, Homo sapien
gcaacaaagtaagactccgcctcaa

SEQ ID NO: 4756976 - DNA, 25 bp, Homo sapien
tcagaattgtttgagtgattgtttc

SEQ ID NO: 4756977 - DNA, 25 bp, Homo sapien
tgtggtatatgtatggtcagaattg

SEQ ID NO: 4756978 - DNA, 25 bp, Homo sapien
ttttatttgaccatagtttccacta

SEQ ID NO: 4756979 - DNA, 25 bp, Homo sapien
taaaatgattagttgtggtatatgt

SEQ ID NO: 4756980 - DNA, 25 bp, Homo sapien
catatatgtacgtgggtctgtttct

SEQ ID NO: 4756981 - DNA, 25 bp, Homo sapien
ttctggagagggcccatttaacaaa

SEQ ID NO: 4756982 - DNA, 25 bp, Homo sapien
gatgtctttgcctagctgagggttc

SEQ ID NO: 4756983 - DNA, 25 bp, Homo sapien
tctttctagatcatggttttgttgt

SEQ ID NO: 4756984 - DNA, 25 bp, Homo sapien
tgccattgcactgcctaggacctcc

SEQ ID NO: 4756985 - DNA, 25 bp, Homo sapien
caagcgtgtgtgcaagatgtttata

SEQ ID NO: 4756986 - DNA, 25 bp, Homo sapien
cagggaaggtattcagtctttcatc

SEQ ID NO: 4756987 - DNA, 25 bp, Homo sapien
tattcccaggataaatccattgctg

SEQ ID NO: 4756988 - DNA, 25 bp, Homo sapien
aatgagcatgcgagagagtgagcaa

SEQ ID NO: 4756989 - DNA, 25 bp, Homo sapien
cacaagcaggtacaactgaaatggg

SEQ ID NO: 4756990 - DNA, 25 bp, Homo sapien
caagcaggtacaactgaaatgggcc

SEQ ID NO: 4756991 - DNA, 25 bp, Homo sapien
ttacacaagcaggtacaactgaaat

SEQ ID NO: 4756992 - DNA, 25 bp, Homo sapien
tacacaagcaggtacaactgaaatg

SEQ ID NO: 4756993 - DNA, 25 bp, Homo sapien
acagctgttgcgctacagactcagg

SEQ ID NO: 4756994 - DNA, 25 bp, Homo sapien
ttgcgctacagactcaggcacaggg

SEQ ID NO: 4756995 - DNA, 25 bp, Homo sapien
caactgttggagacaagccagccat

SEQ ID NO: 4756996 - DNA, 25 bp, Homo sapien
cagatgtgggccacaactgttggag

SEQ ID NO: 4756997 - DNA, 25 bp, Homo sapien
taagtagctcttagccttggctgca

SEQ ID NO: 4756998 - DNA, 25 bp, Homo sapien
tatgcggttatagccgacgcctagg

SEQ ID NO: 4756999 - DNA, 25 bp, Homo sapien
tactgaaacatactctgtgggcggg

SEQ ID NO: 4757000 - DNA, 25 bp, Homo sapien
aaattgcttcaactgtctggcctgc

SEQ ID NO: 4757001 - DNA, 25 bp, Homo sapien
ttgccagtggtaaatgcgacacaga

SEQ ID NO: 4757002 - DNA, 25 bp, Homo sapien
agtggtaaatgcgacacagataacc

SEQ ID NO: 4757003 - DNA, 25 bp, Homo sapien
tggtaaatgcgacacagataacccc

SEQ ID NO: 4757004 - DNA, 25 bp, Homo sapien
ccagtggtaaatgcgacacagataa

SEQ ID NO: 4757005 - DNA, 25 bp, Homo sapien
gtgggcatccgggctaaggctttac

SEQ ID NO: 4757006 - DNA, 25 bp, Homo sapien
gataaacgtatcaaaagaacacaca

SEQ ID NO: 4757007 - DNA, 25 bp, Homo sapien
aaacagaagataaacgtatcaaaag

SEQ ID NO: 4757008 - DNA, 25 bp, Homo sapien
ggtggttgcttcgaactttatttga

SEQ ID NO: 4757009 - DNA, 25 bp, Homo sapien
cccgcgactcgaaggtgactgggat

SEQ ID NO: 4757010 - DNA, 25 bp, Homo sapien
gcgactcgaaggtgactgggatggt

SEQ ID NO: 4757011 - DNA, 25 bp, Homo sapien
gactcgaaggtgactgggatggtga

SEQ ID NO: 4757012 - DNA, 25 bp, Homo sapien
ctcgaaggtgactgggatggtgatc

SEQ ID NO: 4757013 - DNA, 25 bp, Homo sapien
gaggagacctgagtggggtccacac

SEQ ID NO: 4757014 - DNA, 25 bp, Homo sapien
ccacaccggtggggcagcgtgtatt

SEQ ID NO: 4757015 - DNA, 25 bp, Homo sapien
cagcgtgtatttccgcgtgaagcac

SEQ ID NO: 4757016 - DNA, 25 bp, Homo sapien
gggtccacaccggtggggcagcgtg

SEQ ID NO: 4757017 - DNA, 25 bp, Homo sapien
gatgtagccatgctcgtcctgctgc

SEQ ID NO: 4757018 - DNA, 25 bp, Homo sapien
gagatgtagccatgctcgtcctgct

SEQ ID NO: 4757019 - DNA, 25 bp, Homo sapien
catgctcgtcctgctgctcctcgta

SEQ ID NO: 4757020 - DNA, 25 bp, Homo sapien
gggagatgtagccatgctcgtcctg

SEQ ID NO: 4757021 - DNA, 25 bp, Homo sapien
tcagaagacgtaactgagtgctcgc

SEQ ID NO: 4757022 - DNA, 25 bp, Homo sapien
agtgctcgcaggcaaatgttacatc

SEQ ID NO: 4757023 - DNA, 25 bp, Homo sapien
gacgtaactgagtgctcgcaggcaa

SEQ ID NO: 4757024 - DNA, 25 bp, Homo sapien
tctcctttgctaatagaatcatttc

SEQ ID NO: 4757025 - DNA, 25 bp, Homo sapien
tcaccccaaaggagcaaggcagttt

SEQ ID NO: 4757026 - DNA, 25 bp, Homo sapien
gttcatacttttcccgcaggcctgg

SEQ ID NO: 4757027 - DNA, 25 bp, Homo sapien
tcattttgtgatagccaggtcaggc

SEQ ID NO: 4757028 - DNA, 25 bp, Homo sapien
tcgagactgattgatctgccaagca

SEQ ID NO: 4757029 - DNA, 25 bp, Homo sapien
tgacgagagtactcttgaagcactc

SEQ ID NO: 4757030 - DNA, 25 bp, Homo sapien
aagttcatgcagttgcagaattctc

SEQ ID NO: 4757031 - DNA, 25 bp, Homo sapien
ttgactgaataccattgaatgccac

SEQ ID NO: 4757032 - DNA, 25 bp, Homo sapien
gcagcagtgagtagttacaagttca

SEQ ID NO: 4757033 - DNA, 25 bp, Homo sapien
tttacagtactgaccaggttctgcc

SEQ ID NO: 4757034 - DNA, 25 bp, Homo sapien
tacagtactgaccaggttctgcctg

SEQ ID NO: 4757035 - DNA, 25 bp, Homo sapien
tgaatgtggacctcttctttacagt

SEQ ID NO: 4757036 - DNA, 25 bp, Homo sapien
ctttacagtactgaccaggttctgc

SEQ ID NO: 4757037 - DNA, 25 bp, Homo sapien
taaaagacatccatggaagggcagt

SEQ ID NO: 4757038 - DNA, 25 bp, Homo sapien
acatccatggaagggcagtgaaaga

SEQ ID NO: 4757039 - DNA, 25 bp, Homo sapien
tgaaagattgcatgctctgcaaatc

SEQ ID NO: 4757040 - DNA, 25 bp, Homo sapien
cagtgaaagattgcatgctctgcaa

SEQ ID NO: 4757041 - DNA, 25 bp, Homo sapien
tccagtactgaccaggttttgtctg

SEQ ID NO: 4757042 - DNA, 25 bp, Homo sapien
ttccagtactgaccaggttttgtct

SEQ ID NO: 4757043 - DNA, 25 bp, Homo sapien
ccagtactgaccaggttttgtctgg

SEQ ID NO: 4757044 - DNA, 25 bp, Homo sapien
tttccagtactgaccaggttttgtc

SEQ ID NO: 4757045 - DNA, 25 bp, Homo sapien
taagaggcggaataagataacacca

SEQ ID NO: 4757046 - DNA, 25 bp, Homo sapien
cggaataagataacaccagcaaaaa

SEQ ID NO: 4757047 - DNA, 25 bp, Homo sapien
gaggcggaataagataacaccagca

SEQ ID NO: 4757048 - DNA, 25 bp, Homo sapien
ggcggaataagataacaccagcaaa

SEQ ID NO: 4757049 - DNA, 25 bp, Homo sapien
aaggaaagacacgtcccactgattt

SEQ ID NO: 4757050 - DNA, 25 bp, Homo sapien
gaaaggaaagacacgtcccactgat

SEQ ID NO: 4757051 - DNA, 25 bp, Homo sapien
tgaaaggaaagacacgtcccactga

SEQ ID NO: 4757052 - DNA, 25 bp, Homo sapien
aaaggaaagacacgtcccactgatt

SEQ ID NO: 4757053 - DNA, 25 bp, Homo sapien
gatgtgatgaagtccgttacaactg

SEQ ID NO: 4757054 - DNA, 25 bp, Homo sapien
ggatgagaacgagtacaatttgtga

SEQ ID NO: 4757055 - DNA, 25 bp, Homo sapien
gatgaagtccgttacaactgaaagc

SEQ ID NO: 4757056 - DNA, 25 bp, Homo sapien
atttgtgatgtgatgaagtccgtta

SEQ ID NO: 4757057 - DNA, 25 bp, Homo sapien
ccaggcttcttcggtttaattagct

SEQ ID NO: 4757058 - DNA, 25 bp, Homo sapien
tcaaagaggcttgggcttaaagata

SEQ ID NO: 4757059 - DNA, 25 bp, Homo sapien
agagctgcagtgtcaaagaggcttg

SEQ ID NO: 4757060 - DNA, 25 bp, Homo sapien
gtgtcaaagaggcttgggcttaaag

SEQ ID NO: 4757061 - DNA, 25 bp, Homo sapien
gtctccttaaactagacggactgtc

SEQ ID NO: 4757062 - DNA, 25 bp, Homo sapien
ttaaactagacggactgtctgcacc

SEQ ID NO: 4757063 - DNA, 25 bp, Homo sapien
taaactagacggactgtctgcacca

SEQ ID NO: 4757064 - DNA, 25 bp, Homo sapien
tccttaaactagacggactgtctgc

SEQ ID NO: 4757065 - DNA, 25 bp, Homo sapien
cccagcatggcctgtaatggtgaag

SEQ ID NO: 4757066 - DNA, 25 bp, Homo sapien
gcatggcctgtaatggtgaagtgtt

SEQ ID NO: 4757067 - DNA, 25 bp, Homo sapien
cagctgctttgtcccagcatggcct

SEQ ID NO: 4757068 - DNA, 25 bp, Homo sapien
cagcatggcctgtaatggtgaagtg

SEQ ID NO: 4757069 - DNA, 25 bp, Homo sapien
gatgcctgaaccttagggtggttaa

SEQ ID NO: 4757070 - DNA, 25 bp, Homo sapien
ccagagatgcctgaaccttagggtg

SEQ ID NO: 4757071 - DNA, 25 bp, Homo sapien
cagagatgcctgaaccttagggtgg

SEQ ID NO: 4757072 - DNA, 25 bp, Homo sapien
gagatgcctgaaccttagggtggtt

SEQ ID NO: 4757073 - DNA, 25 bp, Homo sapien
caccaatgcgcattcgtgcctgcag

SEQ ID NO: 4757074 - DNA, 25 bp, Homo sapien
cttgtccgagcagataaggggtcgc

SEQ ID NO: 4757075 - DNA, 25 bp, Homo sapien
ctgaagtttttgaacatctgctgtg

SEQ ID NO: 4757076 - DNA, 25 bp, Homo sapien
atgcgcattcgtgcctgcagtttgg

SEQ ID NO: 4757077 - DNA, 25 bp, Homo sapien
gttcttcaatatagccactgtggcc

SEQ ID NO: 4757078 - DNA, 25 bp, Homo sapien
tgctgtgcagattgaggacatgctc

SEQ ID NO: 4757079 - DNA, 25 bp, Homo sapien
ctaggaaccattgtattgtggttct

SEQ ID NO: 4757080 - DNA, 25 bp, Homo sapien
tctccagtgggaatgctacttcctg

SEQ ID NO: 4757081 - DNA, 25 bp, Homo sapien
gacccgtggacatcctccaactgtt

SEQ ID NO: 4757082 - DNA, 25 bp, Homo sapien
tcaacagaatagaccagcagcctct

SEQ ID NO: 4757083 - DNA, 25 bp, Homo sapien
ggccatggcatcctgagtttgctcg

SEQ ID NO: 4757084 - DNA, 25 bp, Homo sapien
agcctctctccatgagtaaaccaga

SEQ ID NO: 4757085 - DNA, 25 bp, Homo sapien
tttaaatcatgtcatcactctgaag

SEQ ID NO: 4757086 - DNA, 25 bp, Homo sapien
ttaaatcatgtcatcactctgaaga

SEQ ID NO: 4757087 - DNA, 25 bp, Homo sapien
cagactattgaggttttactggacc

SEQ ID NO: 4757088 - DNA, 25 bp, Homo sapien
gaaacactgagagactcccagacta

SEQ ID NO: 4757089 - DNA, 25 bp, Homo sapien
aaagcactgctatggttgtccagaa

SEQ ID NO: 4757090 - DNA, 25 bp, Homo sapien
tagttatagtttctggagttccctc

SEQ ID NO: 4757091 - DNA, 25 bp, Homo sapien
aaactagttcaaccattgtggaagt

SEQ ID NO: 4757092 - DNA, 25 bp, Homo sapien
cagtgtggcgattcctcagggatct

SEQ ID NO: 4757093 - DNA, 25 bp, Homo sapien
tagcttgatggggagaaataggaat

SEQ ID NO: 4757094 - DNA, 25 bp, Homo sapien
acttttacactgttggtgggactgt

SEQ ID NO: 4757095 - DNA, 25 bp, Homo sapien
caaatgaagaatgtatagcacttac

SEQ ID NO: 4757096 - DNA, 25 bp, Homo sapien
aatgaagaatgtatagcacttacta

SEQ ID NO: 4757097 - DNA, 25 bp, Homo sapien
aaagtgctgataccctgtcttcaaa

SEQ ID NO: 4757098 - DNA, 25 bp, Homo sapien
ccaaagtgctgataccctgtcttca

SEQ ID NO: 4757099 - DNA, 25 bp, Homo sapien
tgtccactctaatttctttgcaggt

SEQ ID NO: 4757100 - DNA, 25 bp, Homo sapien
actgtggactaaatatcctggtgcg

SEQ ID NO: 4757101 - DNA, 25 bp, Homo sapien
ggctactctgaatgcatgctttctc

SEQ ID NO: 4757102 - DNA, 25 bp, Homo sapien
ggcagaaacaaactggaccaacatt

SEQ ID NO: 4757103 - DNA, 25 bp, Homo sapien
ctaggggttgacatctttaactcct

SEQ ID NO: 4757104 - DNA, 25 bp, Homo sapien
cctggtgtactagcaagttgtgtgg

SEQ ID NO: 4757105 - DNA, 25 bp, Homo sapien
ctgctcctctctacactggttgatg

SEQ ID NO: 4757106 - DNA, 25 bp, Homo sapien
ttcctccagacctggtgtactagca

SEQ ID NO: 4757107 - DNA, 25 bp, Homo sapien
gctcctctctacactggttgatgcc

SEQ ID NO: 4757108 - DNA, 25 bp, Homo sapien
ttatctctccattggaacccacagg

SEQ ID NO: 4757109 - DNA, 25 bp, Homo sapien
aagtaccaagtcctaccaaccactg

SEQ ID NO: 4757110 - DNA, 25 bp, Homo sapien
ttctttgaaatcttcgctgatcaca

SEQ ID NO: 4757111 - DNA, 25 bp, Homo sapien
taccaaccactgtccaagttctgcc

SEQ ID NO: 4757112 - DNA, 25 bp, Homo sapien
gatgtgttaactagccacgtagcct

SEQ ID NO: 4757113 - DNA, 25 bp, Homo sapien
cgattccagaatcaggcagctctca

SEQ ID NO: 4757114 - DNA, 25 bp, Homo sapien
ggatgagctcagtgggaataaacag

SEQ ID NO: 4757115 - DNA, 25 bp, Homo sapien
cacgtagcctactcagtgggatgag

SEQ ID NO: 4757116 - DNA, 25 bp, Homo sapien
cacctgagattaaccttggcccaag

SEQ ID NO: 4757117 - DNA, 25 bp, Homo sapien
ttagagccgatatattgggaagcac

SEQ ID NO: 4757118 - DNA, 25 bp, Homo sapien
tacaggctcagcagtggatttctaa

SEQ ID NO: 4757119 - DNA, 25 bp, Homo sapien
catgaagtcaagatagggctgggta

SEQ ID NO: 4757120 - DNA, 25 bp, Homo sapien
taacactcattcctagagcttaggg

SEQ ID NO: 4757121 - DNA, 25 bp, Homo sapien
caggagccgccaatactaacaggac

SEQ ID NO: 4757122 - DNA, 25 bp, Homo sapien
gagccacgtcaaagatgccttgcca

SEQ ID NO: 4757123 - DNA, 25 bp, Homo sapien
taacaggacaggttccattgccatg

SEQ ID NO: 4757124 - DNA, 25 bp, Homo sapien
accaaatgagcaggcttaggaattt

SEQ ID NO: 4757125 - DNA, 25 bp, Homo sapien
caagctggaaggcacattgtatcaa

SEQ ID NO: 4757126 - DNA, 25 bp, Homo sapien
cttgtgctatacgtaggagagatcc

SEQ ID NO: 4757127 - DNA, 25 bp, Homo sapien
aaaatttggatgcttctggagactc

SEQ ID NO: 4757128 - DNA, 25 bp, Homo sapien
tcagaactagacatatggagagctt

SEQ ID NO: 4757129 - DNA, 25 bp, Homo sapien
gaaaatcctaacattggtctccgtg

SEQ ID NO: 4757130 - DNA, 25 bp, Homo sapien
taaattccaagagggctttcacagt

SEQ ID NO: 4757131 - DNA, 25 bp, Homo sapien
tggaagtcaaccagaccaatgatgg

SEQ ID NO: 4757132 - DNA, 25 bp, Homo sapien
tccacagggttcaaatgacttgggt

SEQ ID NO: 4757133 - DNA, 25 bp, Homo sapien
tgatccgagctagaccagtgcaatt

SEQ ID NO: 4757134 - DNA, 25 bp, Homo sapien
tcatgctcatactggaaaacggcag

SEQ ID NO: 4757135 - DNA, 25 bp, Homo sapien
cccttacaagggtgatagccatttc

SEQ ID NO: 4757136 - DNA, 25 bp, Homo sapien
catgacctaaattgccagtcggcag

SEQ ID NO: 4757137 - DNA, 25 bp, Homo sapien
gagaggtcatgatgtaatcaggact

SEQ ID NO: 4757138 - DNA, 25 bp, Homo sapien
tccacttccagaggacgtgccagta

SEQ ID NO: 4757139 - DNA, 25 bp, Homo sapien
gtttgatgcaagtaacagcaactga

SEQ ID NO: 4757140 - DNA, 25 bp, Homo sapien
tgaccagggctatccaaaatcagct

SEQ ID NO: 4757141 - DNA, 25 bp, Homo sapien
ctccatgaagccacacggtgtgcgg

SEQ ID NO: 4757142 - DNA, 25 bp, Homo sapien
ccatgaagccacacggtgtgcggtg

SEQ ID NO: 4757143 - DNA, 25 bp, Homo sapien
tctccatgaagccacacggtgtgcg

SEQ ID NO: 4757144 - DNA, 25 bp, Homo sapien
atgaagccacacggtgtgcggtggg

SEQ ID NO: 4757145 - DNA, 25 bp, Homo sapien
tgaggcactttgagctgaagggatt

SEQ ID NO: 4757146 - DNA, 25 bp, Homo sapien
tcatgaggcactttgagctgaaggg

SEQ ID NO: 4757147 - DNA, 25 bp, Homo sapien
aggcactttgagctgaagggattcc

SEQ ID NO: 4757148 - DNA, 25 bp, Homo sapien
catgaggcactttgagctgaaggga

SEQ ID NO: 4757149 - DNA, 25 bp, Homo sapien
ccctgacctgaaagactgtccattc

SEQ ID NO: 4757150 - DNA, 25 bp, Homo sapien
ctctaccctgacctgaaagactgtc

SEQ ID NO: 4757151 - DNA, 25 bp, Homo sapien
gacctgaaagactgtccattcctcc

SEQ ID NO: 4757152 - DNA, 25 bp, Homo sapien
cctgacctgaaagactgtccattcc

SEQ ID NO: 4757153 - DNA, 25 bp, Homo sapien
ccaggcaccagtggcggggacttct

SEQ ID NO: 4757154 - DNA, 25 bp, Homo sapien
ttgggagaccaatccaacggattct

SEQ ID NO: 4757155 - DNA, 25 bp, Homo sapien
ccagtggcggggacttctgcattca

SEQ ID NO: 4757156 - DNA, 25 bp, Homo sapien
tgagtgtagtggagacaggccgagt

SEQ ID NO: 4757157 - DNA, 25 bp, Homo sapien
ggaaaccaagacagttgatggcact

SEQ ID NO: 4757158 - DNA, 25 bp, Homo sapien
tatttccaaggtcagagtctgtggg

SEQ ID NO: 4757159 - DNA, 25 bp, Homo sapien
cagagtctgtgggtgggaaaaactt

SEQ ID NO: 4757160 - DNA, 25 bp, Homo sapien
gatggcactacatatttccaaggtc

SEQ ID NO: 4757161 - DNA, 25 bp, Homo sapien
tgtgcttatgactgggcctatgaac

SEQ ID NO: 4757162 - DNA, 25 bp, Homo sapien
ttatgactgggcctatgaacaagag

SEQ ID NO: 4757163 - DNA, 25 bp, Homo sapien
tatgactgggcctatgaacaagagg

SEQ ID NO: 4757164 - DNA, 25 bp, Homo sapien
gcttatgactgggcctatgaacaag

SEQ ID NO: 4757165 - DNA, 25 bp, Homo sapien
tccatcagggggcaaactttttaca

SEQ ID NO: 4757166 - DNA, 25 bp, Homo sapien
tcatgtcaccactattccatcaggg

SEQ ID NO: 4757167 - DNA, 25 bp, Homo sapien
tttttacatgaagttccttcataaa

SEQ ID NO: 4757168 - DNA, 25 bp, Homo sapien
ttacatgaagttccttcataaataa

SEQ ID NO: 4757169 - DNA, 25 bp, Homo sapien
atgctgagagataaggggaaggaac

SEQ ID NO: 4757170 - DNA, 25 bp, Homo sapien
ctagtccttgatgctgagagataag

SEQ ID NO: 4757171 - DNA, 25 bp, Homo sapien
catttggttctacactgtccatacc

SEQ ID NO: 4757172 - DNA, 25 bp, Homo sapien
ggaaggaacagagcatgtcatttgg

SEQ ID NO: 4757173 - DNA, 25 bp, Homo sapien
ctaagcaggcccgaccttacttagc

SEQ ID NO: 4757174 - DNA, 25 bp, Homo sapien
gcgtgttcagggtgatatgtccgga

SEQ ID NO: 4757175 - DNA, 25 bp, Homo sapien
ggcgtgttcagggtgatatgtccgg

SEQ ID NO: 4757176 - DNA, 25 bp, Homo sapien
gcccgaccttacttagcttctggga

SEQ ID NO: 4757177 - DNA, 25 bp, Homo sapien
gcagcaaaagcgcatgtgatgtcga

SEQ ID NO: 4757178 - DNA, 25 bp, Homo sapien
gcaagattagcagcaaaagcgcatg

SEQ ID NO: 4757179 - DNA, 25 bp, Homo sapien
gtaatttcctgcaagattagcagca

SEQ ID NO: 4757180 - DNA, 25 bp, Homo sapien
tgtcgagtgcaacactcaagcccat

SEQ ID NO: 4757181 - DNA, 25 bp, Homo sapien
gctgtgtgggctattaaaattcccc

SEQ ID NO: 4757182 - DNA, 25 bp, Homo sapien
caagtttcattcagcgtggccggtg

SEQ ID NO: 4757183 - DNA, 25 bp, Homo sapien
gggaagagtacagcctcctattagt

SEQ ID NO: 4757184 - DNA, 25 bp, Homo sapien
ccggtggtcactgaggagcgaccat

SEQ ID NO: 4757185 - DNA, 25 bp, Homo sapien
tcacacatgtattatgttgggctta

SEQ ID NO: 4757186 - DNA, 25 bp, Homo sapien
tgaaaatttcatcacacatgtatta

SEQ ID NO: 4757187 - DNA, 25 bp, Homo sapien
catgtattatgttgggcttactttt

SEQ ID NO: 4757188 - DNA, 25 bp, Homo sapien
cacatgtattatgttgggcttactt

SEQ ID NO: 4757189 - DNA, 25 bp, Homo sapien
tcaaaagtgtcctggcgtgtccatc

SEQ ID NO: 4757190 - DNA, 25 bp, Homo sapien
gtgtcctggcgtgtccatctctcct

SEQ ID NO: 4757191 - DNA, 25 bp, Homo sapien
taaatcacgttattctcatctccat

SEQ ID NO: 4757192 - DNA, 25 bp, Homo sapien
ccaataaatcacgttattctcatct

SEQ ID NO: 4757193 - DNA, 25 bp, Homo sapien
gcatgatccgtagcctgcattaggg

SEQ ID NO: 4757194 - DNA, 25 bp, Homo sapien
taaacttgcatgatccgtagcctgc

SEQ ID NO: 4757195 - DNA, 25 bp, Homo sapien
ctgtaaacttgcatgatccgtagcc

SEQ ID NO: 4757196 - DNA, 25 bp, Homo sapien
cttgcatgatccgtagcctgcatta

SEQ ID NO: 4757197 - DNA, 25 bp, Homo sapien
gtagtaatgcagtggaacctcatcc

SEQ ID NO: 4757198 - DNA, 25 bp, Homo sapien
agtaatgcagtggaacctcatccat

SEQ ID NO: 4757199 - DNA, 25 bp, Homo sapien
agtagtaatgcagtggaacctcatc

SEQ ID NO: 4757200 - DNA, 25 bp, Homo sapien
gaagtagtaatgcagtggaacctca

SEQ ID NO: 4757201 - DNA, 25 bp, Homo sapien
ccatgggtcccaacttatcaagtaa

SEQ ID NO: 4757202 - DNA, 25 bp, Homo sapien
tcactcgaatgctaaaggaccatgc

SEQ ID NO: 4757203 - DNA, 25 bp, Homo sapien
tataagtgggatgcttgctgttacc

SEQ ID NO: 4757204 - DNA, 25 bp, Homo sapien
tttgatggctatagattgcacccac

SEQ ID NO: 4757205 - DNA, 25 bp, Homo sapien
ggaaacatgaccctactaaggaaga

SEQ ID NO: 4757206 - DNA, 25 bp, Homo sapien
ctaaaggctaatggctcggatggca

SEQ ID NO: 4757207 - DNA, 25 bp, Homo sapien
cctactatgggataaatctagggta

SEQ ID NO: 4757208 - DNA, 25 bp, Homo sapien
tctcattagggtggacatgaaacca

SEQ ID NO: 4757209 - DNA, 25 bp, Homo sapien
ttcaaacagacaagagtcggccagg

SEQ ID NO: 4757210 - DNA, 25 bp, Homo sapien
caaaatcacgggctggttccagggt

SEQ ID NO: 4757211 - DNA, 25 bp, Homo sapien
gatatgggacagcttgagaggcttt

SEQ ID NO: 4757212 - DNA, 25 bp, Homo sapien
gacaatagcaaatacaatgtgccag

SEQ ID NO: 4757213 - DNA, 25 bp, Homo sapien
ggcataaacgctacagagaccaagt

SEQ ID NO: 4757214 - DNA, 25 bp, Homo sapien
ggtcacagcctaacaaaacttcagg

SEQ ID NO: 4757215 - DNA, 25 bp, Homo sapien
aaaggactcacccatttatactgcg

SEQ ID NO: 4757216 - DNA, 25 bp, Homo sapien
tactgcgaattcatgtggtcacagc

SEQ ID NO: 4757217 - DNA, 25 bp, Homo sapien
tgaacaagttcagcgatggcaaagg

SEQ ID NO: 4757218 - DNA, 25 bp, Homo sapien
cccaaaggtgcctattgaattcttc

SEQ ID NO: 4757219 - DNA, 25 bp, Homo sapien
cctttaggactccaactatggctta

SEQ ID NO: 4757220 - DNA, 25 bp, Homo sapien
tcaaaaataaactgcctatcaggta

SEQ ID NO: 4757221 - DNA, 25 bp, Homo sapien
ggtgctggataccactaagaagtct

SEQ ID NO: 4757222 - DNA, 25 bp, Homo sapien
gctgctgtatgtgaaaaccaaacgt

SEQ ID NO: 4757223 - DNA, 25 bp, Homo sapien
gcagacatcttctggtgcaggccag

SEQ ID NO: 4757224 - DNA, 25 bp, Homo sapien
taaccaggcttatatatggcgccaa

SEQ ID NO: 4757225 - DNA, 25 bp, Homo sapien
caattctgcctgtaacaaacaccca

SEQ ID NO: 4757226 - DNA, 25 bp, Homo sapien
tagggctgtatctatccaattctgc

SEQ ID NO: 4757227 - DNA, 25 bp, Homo sapien
tgtaaaactctggagaacatcaaag

SEQ ID NO: 4757228 - DNA, 25 bp, Homo sapien
tttggcacatgggaactacattttg

SEQ ID NO: 4757229 - DNA, 25 bp, Homo sapien
tttcagtctcttcacaagaagtaat

SEQ ID NO: 4757230 - DNA, 25 bp, Homo sapien
taatcatacggacagttgtgcttgt

SEQ ID NO: 4757231 - DNA, 25 bp, Homo sapien
ttttcagccacaacaactggattct

SEQ ID NO: 4757232 - DNA, 25 bp, Homo sapien
tctgctttgtaatcatacggacagt

SEQ ID NO: 4757233 - DNA, 25 bp, Homo sapien
caaaacaaatttccacatcggcagt

SEQ ID NO: 4757234 - DNA, 25 bp, Homo sapien
tatcgactcctgtagatgcaacgca

SEQ ID NO: 4757235 - DNA, 25 bp, Homo sapien
tgcatagctcaaagtaggtggcgct

SEQ ID NO: 4757236 - DNA, 25 bp, Homo sapien
caactagtctcttagggagtgacca

SEQ ID NO: 4757237 - DNA, 25 bp, Homo sapien
gataaaatttacacaggctctggag

SEQ ID NO: 4757238 - DNA, 25 bp, Homo sapien
ctgtaagaccaactttctttctgca

SEQ ID NO: 4757239 - DNA, 25 bp, Homo sapien
tgtaagaccaactttctttctgcac

SEQ ID NO: 4757240 - DNA, 25 bp, Homo sapien
gtaagaccaactttctttctgcaca

SEQ ID NO: 4757241 - DNA, 25 bp, Homo sapien
aaaaacacaaatttgtcaagcattc

SEQ ID NO: 4757242 - DNA, 25 bp, Homo sapien
acacaaatttgtcaagcattcactg

SEQ ID NO: 4757243 - DNA, 25 bp, Homo sapien
cacaaatttgtcaagcattcactgg

SEQ ID NO: 4757244 - DNA, 25 bp, Homo sapien
aaacacaaatttgtcaagcattcac

SEQ ID NO: 4757245 - DNA, 25 bp, Homo sapien
catcacgggcaaactaatgtggtca

SEQ ID NO: 4757246 - DNA, 25 bp, Homo sapien
aatgggcatccactatcgacagaga

SEQ ID NO: 4757247 - DNA, 25 bp, Homo sapien
tagcatctacaaacagtcccaccgt

SEQ ID NO: 4757248 - DNA, 25 bp, Homo sapien
tgaaaaatgaactacggctcctgag

SEQ ID NO: 4757249 - DNA, 25 bp, Homo sapien
tggctctgacacctctgttttcggg

SEQ ID NO: 4757250 - DNA, 25 bp, Homo sapien
ctgagttacaggcaaggcagccaca

SEQ ID NO: 4757251 - DNA, 25 bp, Homo sapien
ttctgtcatttgctgagttacaggc

SEQ ID NO: 4757252 - DNA, 25 bp, Homo sapien
ttgtcctctcttgaaatgctcattt

SEQ ID NO: 4757253 - DNA, 25 bp, Homo sapien
tgtttaagggcaaaagggcagctct

SEQ ID NO: 4757254 - DNA, 25 bp, Homo sapien
tattggaccagtacagacatcttga

SEQ ID NO: 4757255 - DNA, 25 bp, Homo sapien
gaaatcctcgattgcaaagccaagg

SEQ ID NO: 4757256 - DNA, 25 bp, Homo sapien
ggatgcccagcacaaatggttgaga

SEQ ID NO: 4757257 - DNA, 25 bp, Homo sapien
acagttgtttaagctagtgtctgct

SEQ ID NO: 4757258 - DNA, 25 bp, Homo sapien
cagttgtttaagctagtgtctgctc

SEQ ID NO: 4757259 - DNA, 25 bp, Homo sapien
agttgtttaagctagtgtctgctct

SEQ ID NO: 4757260 - DNA, 25 bp, Homo sapien
caaaaactcacttagtatcaagacg

SEQ ID NO: 4757261 - DNA, 25 bp, Homo sapien
cacttgggctgttgcttgaatttca

SEQ ID NO: 4757262 - DNA, 25 bp, Homo sapien
tgatcagtcatgtcaagcacttggg

SEQ ID NO: 4757263 - DNA, 25 bp, Homo sapien
aaagtcaatccaatgaacacaagtg

SEQ ID NO: 4757264 - DNA, 25 bp, Homo sapien
caaactgaacacattccatttgtcc

SEQ ID NO: 4757265 - DNA, 25 bp, Homo sapien
cccggggtctggttagtctcctgag

SEQ ID NO: 4757266 - DNA, 25 bp, Homo sapien
gtagcaaactgaacacattccattt

SEQ ID NO: 4757267 - DNA, 25 bp, Homo sapien
gctacacagcatgggccccggggtc

SEQ ID NO: 4757268 - DNA, 25 bp, Homo sapien
ggtataccgttgtaattgctacgca

SEQ ID NO: 4757269 - DNA, 25 bp, Homo sapien
tctgctgaggcagagcatctgtact

SEQ ID NO: 4757270 - DNA, 25 bp, Homo sapien
tgaaaagagaactggtagcccttcc

SEQ ID NO: 4757271 - DNA, 25 bp, Homo sapien
tagggtcagctggtttacgaaactc

SEQ ID NO: 4757272 - DNA, 25 bp, Homo sapien
cattttggagcagggtagtgtaaac

SEQ ID NO: 4757273 - DNA, 25 bp, Homo sapien
gtttaaggccaagcgatcaacctac

SEQ ID NO: 4757274 - DNA, 25 bp, Homo sapien
tacattttctacactgaggcccagt

SEQ ID NO: 4757275 - DNA, 25 bp, Homo sapien
catgaaagttgggtcactccttaaa

SEQ ID NO: 4757276 - DNA, 25 bp, Homo sapien
taggtattgcattccccttgtattt

SEQ ID NO: 4757277 - DNA, 25 bp, Homo sapien
ccattaggtattgcattccccttgt

SEQ ID NO: 4757278 - DNA, 25 bp, Homo sapien
ccattactatttattgcctttaaag

SEQ ID NO: 4757279 - DNA, 25 bp, Homo sapien
gggatgtgtgttcccattaggtatt

SEQ ID NO: 4757280 - DNA, 25 bp, Homo sapien
aacacccgagtgtaactgaacaatt

SEQ ID NO: 4757281 - DNA, 25 bp, Homo sapien
caattccaattctgaacaaagagct

SEQ ID NO: 4757282 - DNA, 25 bp, Homo sapien
gagcttttacacctatggaatacag

SEQ ID NO: 4757283 - DNA, 25 bp, Homo sapien
aagagcttttacacctatggaatac

SEQ ID NO: 4757284 - DNA, 25 bp, Homo sapien
gtctctagtctgccactaagtcagt

SEQ ID NO: 4757285 - DNA, 25 bp, Homo sapien
ctctttgccaaatggagtagaattg

SEQ ID NO: 4757286 - DNA, 25 bp, Homo sapien
tttccagatttcagttccctctttg

SEQ ID NO: 4757287 - DNA, 25 bp, Homo sapien
cctgagttcaagtctctagtctgcc

SEQ ID NO: 4757288 - DNA, 25 bp, Homo sapien
taagcaaaggcctcactcaataaag

SEQ ID NO: 4757289 - DNA, 25 bp, Homo sapien
caccaactgagttctgaaagcctac

SEQ ID NO: 4757290 - DNA, 25 bp, Homo sapien
tctcaggataaaaacgcagcgacgt

SEQ ID NO: 4757291 - DNA, 25 bp, Homo sapien
ggcacgccgtgcattgtttcccgac

SEQ ID NO: 4757292 - DNA, 25 bp, Homo sapien
caggtctcgggccacgacgacagga

SEQ ID NO: 4757293 - DNA, 25 bp, Homo sapien
tgacgcctccgtctttgtgcttcct

SEQ ID NO: 4757294 - DNA, 25 bp, Homo sapien
gggccacgacgacaggatgacgcct

SEQ ID NO: 4757295 - DNA, 25 bp, Homo sapien
gacgacaggatgacgcctccgtctt

SEQ ID NO: 4757296 - DNA, 25 bp, Homo sapien
cggcaacaaggagcccggctcccac

SEQ ID NO: 4757297 - DNA, 25 bp, Homo sapien
cgccatccgcggcctgctccggctt

SEQ ID NO: 4757298 - DNA, 25 bp, Homo sapien
cggcccggcaacaaggagcccggct

SEQ ID NO: 4757299 - DNA, 25 bp, Homo sapien
ggcttcgccattggcccgcggcgcc

SEQ ID NO: 4757300 - DNA, 25 bp, Homo sapien
gccgagacgggttgctgtgccttct

SEQ ID NO: 4757301 - DNA, 25 bp, Homo sapien
gtaagggcccgctgatggcgctctt

SEQ ID NO: 4757302 - DNA, 25 bp, Homo sapien
gagcccgcgtaggagatgcacacag

SEQ ID NO: 4757303 - DNA, 25 bp, Homo sapien
tgcagggtcccaaatgcgaaagccg

SEQ ID NO: 4757304 - DNA, 25 bp, Homo sapien
tgttctactcaaaagccgcgaaggg

SEQ ID NO: 4757305 - DNA, 25 bp, Homo sapien
gaacactgggaaccttttcagagca

SEQ ID NO: 4757306 - DNA, 25 bp, Homo sapien
caaagcgtcgtgaactgggaaagca

SEQ ID NO: 4757307 - DNA, 25 bp, Homo sapien
ggacaaaacaagctagacccgaggc

SEQ ID NO: 4757308 - DNA, 25 bp, Homo sapien
aggtctgagttccaaccatccccat

SEQ ID NO: 4757309 - DNA, 25 bp, Homo sapien
caggtctgagttccaaccatcccca

SEQ ID NO: 4757310 - DNA, 25 bp, Homo sapien
ccaggtctgagttccaaccatcccc

SEQ ID NO: 4757311 - DNA, 25 bp, Homo sapien
tgcagtgggtctgatagaaggaggc

SEQ ID NO: 4757312 - DNA, 25 bp, Homo sapien
tcccaaagatcagagaagcagagaa

SEQ ID NO: 4757313 - DNA, 25 bp, Homo sapien
cccaaagatcagagaagcagagaag

SEQ ID NO: 4757314 - DNA, 25 bp, Homo sapien
gtgcagtgggtctgatagaaggagg

SEQ ID NO: 4757315 - DNA, 25 bp, Homo sapien
ccccagaatcctgagataagattta

SEQ ID NO: 4757316 - DNA, 25 bp, Homo sapien
gctcacaaggcaatctattccaact

SEQ ID NO: 4757317 - DNA, 25 bp, Homo sapien
gattctgtgctggtaccgctaatac

SEQ ID NO: 4757318 - DNA, 25 bp, Homo sapien
tgtgaaaggatttgctcacaaggca

SEQ ID NO: 4757319 - DNA, 25 bp, Homo sapien
gatgtagtcacaactattatcacca

SEQ ID NO: 4757320 - DNA, 25 bp, Homo sapien
gataggtaacatttgctaagcactg

SEQ ID NO: 4757321 - DNA, 25 bp, Homo sapien
tttgctaagcactgattatatgaca

SEQ ID NO: 4757322 - DNA, 25 bp, Homo sapien
cataagataattaggatgtagtcac

SEQ ID NO: 4757323 - DNA, 25 bp, Homo sapien
ttaatctcacaaattttctgatggc

SEQ ID NO: 4757324 - DNA, 25 bp, Homo sapien
ctttttcggcttttaatgtcaggca

SEQ ID NO: 4757325 - DNA, 25 bp, Homo sapien
tttttcggcttttaatgtcaggcaa

SEQ ID NO: 4757326 - DNA, 25 bp, Homo sapien
tactgcattattgatgtggcacaga

SEQ ID NO: 4757327 - DNA, 25 bp, Homo sapien
gctggtcaataatccgggctactgc

SEQ ID NO: 4757328 - DNA, 25 bp, Homo sapien
acagatctaaagtagtatgtgcctg

SEQ ID NO: 4757329 - DNA, 25 bp, Homo sapien
gactttccttgtttcagctggtcaa

SEQ ID NO: 4757330 - DNA, 25 bp, Homo sapien
aattgcaaacggatcagaaaaccag

SEQ ID NO: 4757331 - DNA, 25 bp, Homo sapien
tttcttagcagatggtgggtgccac

SEQ ID NO: 4757332 - DNA, 25 bp, Homo sapien
catatttagagttgcgaataggaca

SEQ ID NO: 4757333 - DNA, 25 bp, Homo sapien
aatcagtcatgtttcttagcagatg

SEQ ID NO: 4757334 - DNA, 25 bp, Homo sapien
gacattcagctttctctaatataga

SEQ ID NO: 4757335 - DNA, 25 bp, Homo sapien
agacattcagctttctctaatatag

SEQ ID NO: 4757336 - DNA, 25 bp, Homo sapien
acagacattcagctttctctaatat

SEQ ID NO: 4757337 - DNA, 25 bp, Homo sapien
cattcagctttctctaatatagaac

SEQ ID NO: 4757338 - DNA, 25 bp, Homo sapien
gttgaagtgaacagctgtgagctct

SEQ ID NO: 4757339 - DNA, 25 bp, Homo sapien
ttcacatggcctacatgtccttggg

SEQ ID NO: 4757340 - DNA, 25 bp, Homo sapien
ccttgggggaatcctacagttgtca

SEQ ID NO: 4757341 - DNA, 25 bp, Homo sapien
gagctctgtgctcacagttttcaca

SEQ ID NO: 4757342 - DNA, 25 bp, Homo sapien
ttgaacagttgtggtgaggatcatg

SEQ ID NO: 4757343 - DNA, 25 bp, Homo sapien
caagtttccaagccatttgaacagt

SEQ ID NO: 4757344 - DNA, 25 bp, Homo sapien
tgcactggtccaacccgtaattgtc

SEQ ID NO: 4757345 - DNA, 25 bp, Homo sapien
ggtccaacccgtaattgtcattgta

SEQ ID NO: 4757346 - DNA, 25 bp, Homo sapien
ttgcatatgcttctgagaggttttg

SEQ ID NO: 4757347 - DNA, 25 bp, Homo sapien
ctttatcctctgtccaattgcatat

SEQ ID NO: 4757348 - DNA, 25 bp, Homo sapien
tgcatatgcttctgagaggttttgt

SEQ ID NO: 4757349 - DNA, 25 bp, Homo sapien
tatcctctgtccaattgcatatgct

SEQ ID NO: 4757350 - DNA, 25 bp, Homo sapien
ttctctttctagctttaattataag

SEQ ID NO: 4757351 - DNA, 25 bp, Homo sapien
tctttctagctttaattataagcat

SEQ ID NO: 4757352 - DNA, 25 bp, Homo sapien
gctttagaaaacttctctttctagc

SEQ ID NO: 4757353 - DNA, 25 bp, Homo sapien
cgctttagaaaacttctctttctag

SEQ ID NO: 4757354 - DNA, 25 bp, Homo sapien
ttggcattgatcatgcagccctgca

SEQ ID NO: 4757355 - DNA, 25 bp, Homo sapien
gcgtccggccttaaatccccatgat

SEQ ID NO: 4757356 - DNA, 25 bp, Homo sapien
taagggatttgctcatggtcactca

SEQ ID NO: 4757357 - DNA, 25 bp, Homo sapien
tgttgcacacttagtctctgccagg

SEQ ID NO: 4757358 - DNA, 25 bp, Homo sapien
gcaacaaagctggaccagaagtcca

SEQ ID NO: 4757359 - DNA, 25 bp, Homo sapien
tattggaactgggtttcgggaagca

SEQ ID NO: 4757360 - DNA, 25 bp, Homo sapien
ttgaagaggtcagacccttctgaga

SEQ ID NO: 4757361 - DNA, 25 bp, Homo sapien
gaacaaggtgccttgtttagctctg

SEQ ID NO: 4757362 - DNA, 25 bp, Homo sapien
cactgggagggactggtgcaatttt

SEQ ID NO: 4757363 - DNA, 25 bp, Homo sapien
tctgctggcatatgaactgaagcct

SEQ ID NO: 4757364 - DNA, 25 bp, Homo sapien
catctgaatgtgaggcttaagcgac

SEQ ID NO: 4757365 - DNA, 25 bp, Homo sapien
caggacagaggacattgggagttct

SEQ ID NO: 4757366 - DNA, 25 bp, Homo sapien
cgttgtgttgaaagggaattgactc

SEQ ID NO: 4757367 - DNA, 25 bp, Homo sapien
cctctcagttgagtctctgtttaaa

SEQ ID NO: 4757368 - DNA, 25 bp, Homo sapien
gaattgactcagtgacacgaataga

SEQ ID NO: 4757369 - DNA, 25 bp, Homo sapien
actttctagacttatgccgttgtgt

SEQ ID NO: 4757370 - DNA, 25 bp, Homo sapien
tgattcttctgtttcgctcaagaga

SEQ ID NO: 4757371 - DNA, 25 bp, Homo sapien
tctgtttcgctcaagagacccatca

SEQ ID NO: 4757372 - DNA, 25 bp, Homo sapien
gagacccatcactgtggatctggct

SEQ ID NO: 4757373 - DNA, 25 bp, Homo sapien
gctcaagagacccatcactgtggat

SEQ ID NO: 4757374 - DNA, 25 bp, Homo sapien
gaattccactcagtacaggtggtag

SEQ ID NO: 4757375 - DNA, 25 bp, Homo sapien
gtgaaaccatgggtgtgggcctcca

SEQ ID NO: 4757376 - DNA, 25 bp, Homo sapien
gccaaagccttaaggaattcactta

SEQ ID NO: 4757377 - DNA, 25 bp, Homo sapien
cagtgtatttaaggctcagttgagg

SEQ ID NO: 4757378 - DNA, 25 bp, Homo sapien
ctgggtgccttagtggaaatgtcat

SEQ ID NO: 4757379 - DNA, 25 bp, Homo sapien
gtaatccaccgccatagctgtggat

SEQ ID NO: 4757380 - DNA, 25 bp, Homo sapien
ctgtaatccaccgccatagctgtgg

SEQ ID NO: 4757381 - DNA, 25 bp, Homo sapien
ccgccatagctgtggattgctggag

SEQ ID NO: 4757382 - DNA, 25 bp, Homo sapien
tccaccgccatagctgtggattgct

SEQ ID NO: 4757383 - DNA, 25 bp, Homo sapien
tgcgtttgtaagacatgggcccaca

SEQ ID NO: 4757384 - DNA, 25 bp, Homo sapien
ggcagaacatttggagacctggaaa

SEQ ID NO: 4757385 - DNA, 25 bp, Homo sapien
tttaaaggaaacctaggcagagctc

SEQ ID NO: 4757386 - DNA, 25 bp, Homo sapien
ccatccctgcatgagtttgggttta

SEQ ID NO: 4757387 - DNA, 25 bp, Homo sapien
gcttcaagattccaagaaattctga

SEQ ID NO: 4757388 - DNA, 25 bp, Homo sapien
ctacttggtactaggtgagaaggta

SEQ ID NO: 4757389 - DNA, 25 bp, Homo sapien
gtactaggtgagaaggtacacattt

SEQ ID NO: 4757390 - DNA, 25 bp, Homo sapien
agcttcaagattccaagaaattctg

SEQ ID NO: 4757391 - DNA, 25 bp, Homo sapien
aattgatgcatttctcaagtgtgag

SEQ ID NO: 4757392 - DNA, 25 bp, Homo sapien
tgcacacagaagtatttgagaaatt

SEQ ID NO: 4757393 - DNA, 25 bp, Homo sapien
aaaatgcccagttacacatgatctg

SEQ ID NO: 4757394 - DNA, 25 bp, Homo sapien
tcagctgggatctgatgtcccgagg

SEQ ID NO: 4757395 - DNA, 25 bp, Homo sapien
acctttgcaaaccctctctggacat

SEQ ID NO: 4757396 - DNA, 25 bp, Homo sapien
cacctttgcaaaccctctctggaca

SEQ ID NO: 4757397 - DNA, 25 bp, Homo sapien
tataagggcaaataagaactgggct

SEQ ID NO: 4757398 - DNA, 25 bp, Homo sapien
tattgacgctgaagcactagtacca

SEQ ID NO: 4757399 - DNA, 25 bp, Homo sapien
gcaaacctatttggccgagaactgt

SEQ ID NO: 4757400 - DNA, 25 bp, Homo sapien
tcagggtcctgtcgagatccatagt

SEQ ID NO: 4757401 - DNA, 25 bp, Homo sapien
aattcaccacgaggacaatgtgctg

SEQ ID NO: 4757402 - DNA, 25 bp, Homo sapien
caatgtgctgctggacaagtcagac

SEQ ID NO: 4757403 - DNA, 25 bp, Homo sapien
gactccagtacaggccaaaggacag

SEQ ID NO: 4757404 - DNA, 25 bp, Homo sapien
gtcagactccagtacaggccaaagg

SEQ ID NO: 4757405 - DNA, 25 bp, Homo sapien
gcagcaccaaaggacttgttggaaa

SEQ ID NO: 4757406 - DNA, 25 bp, Homo sapien
tgataatcctgatgcagcggttctc

SEQ ID NO: 4757407 - DNA, 25 bp, Homo sapien
aagggtgtgcatttcttcggccagg

SEQ ID NO: 4757408 - DNA, 25 bp, Homo sapien
ctgggtacaataaagtgggtctgac

SEQ ID NO: 4757409 - DNA, 25 bp, Homo sapien
gaaagaaatcttcatatgagtggac

SEQ ID NO: 4757410 - DNA, 25 bp, Homo sapien
aaatcttcatatgagtggacccatg

SEQ ID NO: 4757411 - DNA, 25 bp, Homo sapien
gtagctttcgttgaaagaaatcttc

SEQ ID NO: 4757412 - DNA, 25 bp, Homo sapien
ggcacactcggggtagctttcgttg

SEQ ID NO: 4757413 - DNA, 25 bp, Homo sapien
cacatagccatttagtgcagagcca

SEQ ID NO: 4757414 - DNA, 25 bp, Homo sapien
gatatactaattagcgtcgttaccg

SEQ ID NO: 4757415 - DNA, 25 bp, Homo sapien
gaatcctatgtggtggtggacacga

SEQ ID NO: 4757416 - DNA, 25 bp, Homo sapien
gaaaattccacatatctctaaggag

SEQ ID NO: 4757417 - DNA, 25 bp, Homo sapien
tagaaagatacggtccagaaggccg

SEQ ID NO: 4757418 - DNA, 25 bp, Homo sapien
cttgtagagtttgtctttgatagaa

SEQ ID NO: 4757419 - DNA, 25 bp, Homo sapien
ttgatagaaagatacggtccagaag

SEQ ID NO: 4757420 - DNA, 25 bp, Homo sapien
cacagcccaagcctggattgtggag

SEQ ID NO: 4757421 - DNA, 25 bp, Homo sapien
tcactgtgtaggacaatggagaaca

SEQ ID NO: 4757422 - DNA, 25 bp, Homo sapien
caaatgagcatgaagggcaaggaag

SEQ ID NO: 4757423 - DNA, 25 bp, Homo sapien
ccttaacatacgtgagctgggaaca

SEQ ID NO: 4757424 - DNA, 25 bp, Homo sapien
tgctcctgttcttgcagagggtcag

SEQ ID NO: 4757425 - DNA, 25 bp, Homo sapien
tgcacgccaacacagattctgtttc

SEQ ID NO: 4757426 - DNA, 25 bp, Homo sapien
tgctgttgtttgttccgtccctggt

SEQ ID NO: 4757427 - DNA, 25 bp, Homo sapien
gctactttgcagacgctgcctgctc

SEQ ID NO: 4757428 - DNA, 25 bp, Homo sapien
tggcctctctgttgtggttgccagc

SEQ ID NO: 4757429 - DNA, 25 bp, Homo sapien
gtcagtcttggccatagtttcagca

SEQ ID NO: 4757430 - DNA, 25 bp, Homo sapien
agtcagtcttggccatagtttcagc

SEQ ID NO: 4757431 - DNA, 25 bp, Homo sapien
acagtcagtcttggccatagtttca

SEQ ID NO: 4757432 - DNA, 25 bp, Homo sapien
ctagtgactgatggaccatctataa

SEQ ID NO: 4757433 - DNA, 25 bp, Homo sapien
cactagtgactgatggaccatctat

SEQ ID NO: 4757434 - DNA, 25 bp, Homo sapien
ttttcactagtgactgatggaccat

SEQ ID NO: 4757435 - DNA, 25 bp, Homo sapien
ttcactagtgactgatggaccatct

SEQ ID NO: 4757436 - DNA, 25 bp, Homo sapien
tgtattcttcacttctcaaatatgt

SEQ ID NO: 4757437 - DNA, 25 bp, Homo sapien
cttctttgttcatcactgtaactcc

SEQ ID NO: 4757438 - DNA, 25 bp, Homo sapien
ctttccccagaatgttctcagatat

SEQ ID NO: 4757439 - DNA, 25 bp, Homo sapien
tctcagatatttacacccatcttcc

SEQ ID NO: 4757440 - DNA, 25 bp, Homo sapien
caatgtcaattagctcagtggaatc

SEQ ID NO: 4757441 - DNA, 25 bp, Homo sapien
tgtatttactcattgtgcccctcca

SEQ ID NO: 4757442 - DNA, 25 bp, Homo sapien
gttcggctagccttctgatccaaga

SEQ ID NO: 4757443 - DNA, 25 bp, Homo sapien
cagtggaatccaagatgttcggcta

SEQ ID NO: 4757444 - DNA, 25 bp, Homo sapien
tcggagcttcccagaaggtaacaac

SEQ ID NO: 4757445 - DNA, 25 bp, Homo sapien
tctcgaataggaaaatcaggaacaa

SEQ ID NO: 4757446 - DNA, 25 bp, Homo sapien
catgtcgttaaatttgcaaatctct

SEQ ID NO: 4757447 - DNA, 25 bp, Homo sapien
aacaatgacaacattcggagcttcc

SEQ ID NO: 4757448 - DNA, 25 bp, Homo sapien
caatgtttttgatggtaatgtctgc

SEQ ID NO: 4757449 - DNA, 25 bp, Homo sapien
aatgacaatgtttttgatggtaatg

SEQ ID NO: 4757450 - DNA, 25 bp, Homo sapien
ttttgatggtaatgtctgcagaagt

SEQ ID NO: 4757451 - DNA, 25 bp, Homo sapien
ggtaatgtctgcagaagtaaggcag

SEQ ID NO: 4757452 - DNA, 25 bp, Homo sapien
tccgctgattactcctccaaaattc

SEQ ID NO: 4757453 - DNA, 25 bp, Homo sapien
cactctgcgagttgttaggaaaagc

SEQ ID NO: 4757454 - DNA, 25 bp, Homo sapien
tggagctaccattgttcctcctctt

SEQ ID NO: 4757455 - DNA, 25 bp, Homo sapien
ctcttgggctgctcataacctaggg

SEQ ID NO: 4757456 - DNA, 25 bp, Homo sapien
aacacactgtagtggtgcctgaggg

SEQ ID NO: 4757457 - DNA, 25 bp, Homo sapien
ctgagaaacacactgtagtggtgcc

SEQ ID NO: 4757458 - DNA, 25 bp, Homo sapien
gaaacacactgtagtggtgcctgag

SEQ ID NO: 4757459 - DNA, 25 bp, Homo sapien
caatttctggcattctgagaaacac

SEQ ID NO: 4757460 - DNA, 25 bp, Homo sapien
tttctcctaactctgttactgctca

SEQ ID NO: 4757461 - DNA, 25 bp, Homo sapien
ttctcctaactctgttactgctcat

SEQ ID NO: 4757462 - DNA, 25 bp, Homo sapien
catctcatcggcctgagttcactca

SEQ ID NO: 4757463 - DNA, 25 bp, Homo sapien
tccaggatatgaaacggctgcttgg

SEQ ID NO: 4757464 - DNA, 25 bp, Homo sapien
tccaggcacactgataacgctgata

SEQ ID NO: 4757465 - DNA, 25 bp, Homo sapien
cttcttgcatctcatcggcctgagt

SEQ ID NO: 4757466 - DNA, 25 bp, Homo sapien
cccagagccacttgctagtttgatt

SEQ ID NO: 4757467 - DNA, 25 bp, Homo sapien
ttaaaaattctcagtgttaactaga

SEQ ID NO: 4757468 - DNA, 25 bp, Homo sapien
aattctcagtgttaactagatttct

SEQ ID NO: 4757469 - DNA, 25 bp, Homo sapien
cttccccagagccacttgctagttt

SEQ ID NO: 4757470 - DNA, 25 bp, Homo sapien
tgctatagggaccacatgctttgtg

SEQ ID NO: 4757471 - DNA, 25 bp, Homo sapien
gcttctgctatagggaccacatgct

SEQ ID NO: 4757472 - DNA, 25 bp, Homo sapien
aattggatgatagcaggctcctgac

SEQ ID NO: 4757473 - DNA, 25 bp, Homo sapien
attggatgatagcaggctcctgacc

SEQ ID NO: 4757474 - DNA, 25 bp, Homo sapien
ccacaggtctccagtgtgctttgga

SEQ ID NO: 4757475 - DNA, 25 bp, Homo sapien
ctactctatacgttcttcaccgtga

SEQ ID NO: 4757476 - DNA, 25 bp, Homo sapien
tcaccgtgataatccaagaagtctg

SEQ ID NO: 4757477 - DNA, 25 bp, Homo sapien
cctgtttccatccccagtcggtggg

SEQ ID NO: 4757478 - DNA, 25 bp, Homo sapien
tgttgatgccaatgctacactgtcc

SEQ ID NO: 4757479 - DNA, 25 bp, Homo sapien
tacactgtcctgataactgtagtta

SEQ ID NO: 4757480 - DNA, 25 bp, Homo sapien
tctgcctaacccatagccttatgtg

SEQ ID NO: 4757481 - DNA, 25 bp, Homo sapien
ggaaaactgattgttccagcactat

SEQ ID NO: 4757482 - DNA, 25 bp, Homo sapien
ctttgaaacctcttttaatgaatag

SEQ ID NO: 4757483 - DNA, 25 bp, Homo sapien
aagaaaatgctctgtcagtggcaaa

SEQ ID NO: 4757484 - DNA, 25 bp, Homo sapien
tgaaacctcttttaatgaatagaaa

SEQ ID NO: 4757485 - DNA, 25 bp, Homo sapien
atgctctgtcagtggcaaatatctc

SEQ ID NO: 4757486 - DNA, 25 bp, Homo sapien
ttatacgtctacaatggtgacttcc

SEQ ID NO: 4757487 - DNA, 25 bp, Homo sapien
tatacgtctacaatggtgacttcca

SEQ ID NO: 4757488 - DNA, 25 bp, Homo sapien
cttagtaggcatttgaactggtctt

SEQ ID NO: 4757489 - DNA, 25 bp, Homo sapien
tcaccacatggagttttttcttgta

SEQ ID NO: 4757490 - DNA, 25 bp, Homo sapien
tcttagtaggcatttgaactggtct

SEQ ID NO: 4757491 - DNA, 25 bp, Homo sapien
agtaggcatttgaactggtcttttc

SEQ ID NO: 4757492 - DNA, 25 bp, Homo sapien
cggtgaattgccatcttcggctccg

SEQ ID NO: 4757493 - DNA, 25 bp, Homo sapien
gaattgccatcttcggctccgtggg

SEQ ID NO: 4757494 - DNA, 25 bp, Homo sapien
tgccatcttcggctccgtgggtgtt

SEQ ID NO: 4757495 - DNA, 25 bp, Homo sapien
ccatcttcggctccgtgggtgtttt

SEQ ID NO: 4757496 - DNA, 25 bp, Homo sapien
aaccaataactcaaccaaagcacag

SEQ ID NO: 4757497 - DNA, 25 bp, Homo sapien
tcaaccaaagcacaggccttcagtt

SEQ ID NO: 4757498 - DNA, 25 bp, Homo sapien
tgtactttacaggtatcttgagtat

SEQ ID NO: 4757499 - DNA, 25 bp, Homo sapien
ctttacaggtatcttgagtatagca

SEQ ID NO: 4757500 - DNA, 25 bp, Homo sapien
taatctgaagggcattcttgatgaa

SEQ ID NO: 4757501 - DNA, 25 bp, Homo sapien
gaatgttgtacccagacaaagcaca

SEQ ID NO: 4757502 - DNA, 25 bp, Homo sapien
ttgctgatcagtagaaattcctgtc

SEQ ID NO: 4757503 - DNA, 25 bp, Homo sapien
tttcttgccaacaaagatcagtctt

SEQ ID NO: 4757504 - DNA, 25 bp, Homo sapien
tgttgctggtggaacactctgttgg

SEQ ID NO: 4757505 - DNA, 25 bp, Homo sapien
tttcaaagttgctcgaagatgccat

SEQ ID NO: 4757506 - DNA, 25 bp, Homo sapien
tccctctggcatggacctttggctg

SEQ ID NO: 4757507 - DNA, 25 bp, Homo sapien
gagatattctctgcctttcgaaagg

SEQ ID NO: 4757508 - DNA, 25 bp, Homo sapien
tagcacattgcctggtttccactgt

SEQ ID NO: 4757509 - DNA, 25 bp, Homo sapien
ttccttctatggtcatcctcaggtc

SEQ ID NO: 4757510 - DNA, 25 bp, Homo sapien
agtttgctgtcatgcatctggcaag

SEQ ID NO: 4757511 - DNA, 25 bp, Homo sapien
ctttgagtcaaactggtctcagtca

SEQ ID NO: 4757512 - DNA, 25 bp, Homo sapien
gctatgaggtattcagctggcttgg

SEQ ID NO: 4757513 - DNA, 25 bp, Homo sapien
cagttaggtaatgctcttcggtgaa

SEQ ID NO: 4757514 - DNA, 25 bp, Homo sapien
cattgaaagtgcctcctcggactgg

SEQ ID NO: 4757515 - DNA, 25 bp, Homo sapien
cagtgaggtaatggctacagataca

SEQ ID NO: 4757516 - DNA, 25 bp, Homo sapien
gctcataggcttaggcaggctacct

SEQ ID NO: 4757517 - DNA, 25 bp, Homo sapien
caggctacctgtggtagaatggagt

SEQ ID NO: 4757518 - DNA, 25 bp, Homo sapien
tttacaccgtaatgcttgactctag

SEQ ID NO: 4757519 - DNA, 25 bp, Homo sapien
caaatgaactgggatacagaattag

SEQ ID NO: 4757520 - DNA, 25 bp, Homo sapien
catctggggaccatgtgtcttggaa

SEQ ID NO: 4757521 - DNA, 25 bp, Homo sapien
caggttaagatgagtcgatacagta

SEQ ID NO: 4757522 - DNA, 25 bp, Homo sapien
cgatacagtagaaatcgtttttgag

SEQ ID NO: 4757523 - DNA, 25 bp, Homo sapien
gaatcacgacatccgattcatctgg

SEQ ID NO: 4757524 - DNA, 25 bp, Homo sapien
cacttctttatactgcgaggctttc

SEQ ID NO: 4757525 - DNA, 25 bp, Homo sapien
tatactgcgaggctttctgtgaggg

SEQ ID NO: 4757526 - DNA, 25 bp, Homo sapien
cagtgctcacttctttatactgcga

SEQ ID NO: 4757527 - DNA, 25 bp, Homo sapien
cacagtaaatccagtgctcacttct

SEQ ID NO: 4757528 - DNA, 25 bp, Homo sapien
ctgcatttcttctttgtttgtttgt

SEQ ID NO: 4757529 - DNA, 25 bp, Homo sapien
gcatttcttctttgtttgtttgttc

SEQ ID NO: 4757530 - DNA, 25 bp, Homo sapien
tctgtgaatctctgaagctaaactc

SEQ ID NO: 4757531 - DNA, 25 bp, Homo sapien
ctctctgtgaatctctgaagctaaa

SEQ ID NO: 4757532 - DNA, 25 bp, Homo sapien
ctctgtgaatctctgaagctaaact

SEQ ID NO: 4757533 - DNA, 25 bp, Homo sapien
tctctgtgaatctctgaagctaaac

SEQ ID NO: 4757534 - DNA, 25 bp, Homo sapien
ctttatggcagcaggaatggatgca

SEQ ID NO: 4757535 - DNA, 25 bp, Homo sapien
tatggcagcaggaatggatgcagca

SEQ ID NO: 4757536 - DNA, 25 bp, Homo sapien
tggatgcagcaacttccaatgccat

SEQ ID NO: 4757537 - DNA, 25 bp, Homo sapien
gcaggaatggatgcagcaacttcca

SEQ ID NO: 4757538 - DNA, 25 bp, Homo sapien
tggagtacatgtagcgcacttttgg

SEQ ID NO: 4757539 - DNA, 25 bp, Homo sapien
ggttctcgggaaataaagccctgca

SEQ ID NO: 4757540 - DNA, 25 bp, Homo sapien
aatccagtggagctgttcatggagt

SEQ ID NO: 4757541 - DNA, 25 bp, Homo sapien
tacagtggggacagatagagactgc

SEQ ID NO: 4757542 - DNA, 25 bp, Homo sapien
aaaccgatgatttgtccctatgggc

SEQ ID NO: 4757543 - DNA, 25 bp, Homo sapien
ttaccatgacatatgctgaaggcag

SEQ ID NO: 4757544 - DNA, 25 bp, Homo sapien
catgccctgttctgagatgtggctt

SEQ ID NO: 4757545 - DNA, 25 bp, Homo sapien
tgttggctgcatccagactattgga

SEQ ID NO: 4757546 - DNA, 25 bp, Homo sapien
aggttgcagtgatccttgttcgctc

SEQ ID NO: 4757547 - DNA, 25 bp, Homo sapien
agtgatccttgttcgctccattgca

SEQ ID NO: 4757548 - DNA, 25 bp, Homo sapien
caggagttacgtggtatctcatcgt

SEQ ID NO: 4757549 - DNA, 25 bp, Homo sapien
gacagcgcaaactccctttccaaaa

SEQ ID NO: 4757550 - DNA, 25 bp, Homo sapien
ggcattaggatacatgtagcttcat

SEQ ID NO: 4757551 - DNA, 25 bp, Homo sapien
aagcactagccatcttatccaacag

SEQ ID NO: 4757552 - DNA, 25 bp, Homo sapien
aactatattcaagccaggcattagg

SEQ ID NO: 4757553 - DNA, 25 bp, Homo sapien
cagtctcgatctttgttttgtgaca

SEQ ID NO: 4757554 - DNA, 25 bp, Homo sapien
gttagtagtgtctcttgatgcacag

SEQ ID NO: 4757555 - DNA, 25 bp, Homo sapien
cattattaatcatatgcttttcaga

SEQ ID NO: 4757556 - DNA, 25 bp, Homo sapien
gctttgactattaatcaggttgttc

SEQ ID NO: 4757557 - DNA, 25 bp, Homo sapien
tactaatgggtgagaagtggtttct

SEQ ID NO: 4757558 - DNA, 25 bp, Homo sapien
catacaagatcaagtagtctgaaca

SEQ ID NO: 4757559 - DNA, 25 bp, Homo sapien
tacatacaagatcaagtagtctgaa

SEQ ID NO: 4757560 - DNA, 25 bp, Homo sapien
tcctttgatataagttggctctgtg

SEQ ID NO: 4757561 - DNA, 25 bp, Homo sapien
tacaagatcaagtagtctgaacaga

SEQ ID NO: 4757562 - DNA, 25 bp, Homo sapien
aaattgctataactggccaggcgca

SEQ ID NO: 4757563 - DNA, 25 bp, Homo sapien
aaatgagctgaatgtgaaggtgcat

SEQ ID NO: 4757564 - DNA, 25 bp, Homo sapien
atgtccatatgtacttactgtttag

SEQ ID NO: 4757565 - DNA, 25 bp, Homo sapien
tgtttactcttcccacctctatgtc

SEQ ID NO: 4757566 - DNA, 25 bp, Homo sapien
cacttctgttgcaaggaatggagac

SEQ ID NO: 4757567 - DNA, 25 bp, Homo sapien
cagatgttcttgctggaatggtacc

SEQ ID NO: 4757568 - DNA, 25 bp, Homo sapien
tccgctttatgttttgtcaatgtgc

SEQ ID NO: 4757569 - DNA, 25 bp, Homo sapien
tctggctataacttaggacacttct

SEQ ID NO: 4757570 - DNA, 25 bp, Homo sapien
taagtatacatactgagtctctact

SEQ ID NO: 4757571 - DNA, 25 bp, Homo sapien
tccttcattaagtatacatactgag

SEQ ID NO: 4757572 - DNA, 25 bp, Homo sapien
tttgcttctcttaaggaacatatgg

SEQ ID NO: 4757573 - DNA, 25 bp, Homo sapien
ttctcttaaggaacatatggtcact

SEQ ID NO: 4757574 - DNA, 25 bp, Homo sapien
gttgctggtagcttttttctctccc

SEQ ID NO: 4757575 - DNA, 25 bp, Homo sapien
tatgaattagtattttggcctctct

SEQ ID NO: 4757576 - DNA, 25 bp, Homo sapien
ctgtcagaggtcagacatacagtcc

SEQ ID NO: 4757577 - DNA, 25 bp, Homo sapien
gatccttcatatgtaccaggctaat

SEQ ID NO: 4757578 - DNA, 25 bp, Homo sapien
ccacaggctgtacaggaggcatggc

SEQ ID NO: 4757579 - DNA, 25 bp, Homo sapien
ctgtacaggaggcatggctggggaa

SEQ ID NO: 4757580 - DNA, 25 bp, Homo sapien
agttccacaggctgtacaggaggca

SEQ ID NO: 4757581 - DNA, 25 bp, Homo sapien
tgtacaggaggcatggctggggaag

SEQ ID NO: 4757582 - DNA, 25 bp, Homo sapien
tgcagctaggcatccactaaactct

SEQ ID NO: 4757583 - DNA, 25 bp, Homo sapien
tctcggtgcactgactaagatggca

SEQ ID NO: 4757584 - DNA, 25 bp, Homo sapien
tatcggtcactactgtgcagctagg

SEQ ID NO: 4757585 - DNA, 25 bp, Homo sapien
tgaaaatgaaagagcctagcacact

SEQ ID NO: 4757586 - DNA, 25 bp, Homo sapien
caagcagccaagcataagcactgag

SEQ ID NO: 4757587 - DNA, 25 bp, Homo sapien
tgagcagttgtgtgggcaaaagccc

SEQ ID NO: 4757588 - DNA, 25 bp, Homo sapien
tcagttcaggccagaagtagtcaac

SEQ ID NO: 4757589 - DNA, 25 bp, Homo sapien
cctaaattaagcagggtgttggctg

SEQ ID NO: 4757590 - DNA, 25 bp, Homo sapien
tcttcattccggtatcagtaagcgc

SEQ ID NO: 4757591 - DNA, 25 bp, Homo sapien
tactcagtcttcattccggtatcag

SEQ ID NO: 4757592 - DNA, 25 bp, Homo sapien
tcagtaagcgcagtattccttatct

SEQ ID NO: 4757593 - DNA, 25 bp, Homo sapien
tccggtatcagtaagcgcagtattc

SEQ ID NO: 4757594 - DNA, 25 bp, Homo sapien
ccatgacctttcattcagcaggaag

SEQ ID NO: 4757595 - DNA, 25 bp, Homo sapien
gctggggtagtcttagcccaagtca

SEQ ID NO: 4757596 - DNA, 25 bp, Homo sapien
tgttccatgacctttcattcagcag

SEQ ID NO: 4757597 - DNA, 25 bp, Homo sapien
gtaagggatgcagctcttctggatt

SEQ ID NO: 4757598 - DNA, 25 bp, Homo sapien
atttctttacgtgataaacttgact

SEQ ID NO: 4757599 - DNA, 25 bp, Homo sapien
gaaagaagctaaatgcaactgttcc

SEQ ID NO: 4757600 - DNA, 25 bp, Homo sapien
tcaagagtcactaagggaaagaagc

SEQ ID NO: 4757601 - DNA, 25 bp, Homo sapien
tttactctgcagttaacgtgtatgt

SEQ ID NO: 4757602 - DNA, 25 bp, Homo sapien
cttttgacaagcagacatgacatcc

SEQ ID NO: 4757603 - DNA, 25 bp, Homo sapien
taatactaatatgatttagcttatg

SEQ ID NO: 4757604 - DNA, 25 bp, Homo sapien
agatgcttagctattgaagagcttc

SEQ ID NO: 4757605 - DNA, 25 bp, Homo sapien
tactaatatgatttagcttatgttt

SEQ ID NO: 4757606 - DNA, 25 bp, Homo sapien
cttagctattgaagagcttctctcc

SEQ ID NO: 4757607 - DNA, 25 bp, Homo sapien
tatattcatggaaaccgtactctcc

SEQ ID NO: 4757608 - DNA, 25 bp, Homo sapien
atattcatggaaaccgtactctccc

SEQ ID NO: 4757609 - DNA, 25 bp, Homo sapien
gtatattcatggaaaccgtactctc

SEQ ID NO: 4757610 - DNA, 25 bp, Homo sapien
tcaaaagacaattcgacccaacaag

SEQ ID NO: 4757611 - DNA, 25 bp, Homo sapien
taaaaactcgaactgcagatgcaac

SEQ ID NO: 4757612 - DNA, 25 bp, Homo sapien
ggtgccctaagatggcttgaaacaa

SEQ ID NO: 4757613 - DNA, 25 bp, Homo sapien
tacaaggtctactctagttctacag

SEQ ID NO: 4757614 - DNA, 25 bp, Homo sapien
ttaagttcaacccaaatgatcagga

SEQ ID NO: 4757615 - DNA, 25 bp, Homo sapien
tcagtcaatcagtttggattttggg

SEQ ID NO: 4757616 - DNA, 25 bp, Homo sapien
tgatcaggaattaactcagtcaatc

SEQ ID NO: 4757617 - DNA, 25 bp, Homo sapien
atggagacctcccaccagttttaga

SEQ ID NO: 4757618 - DNA, 25 bp, Homo sapien
tcaacccatgactttcgccaatagg

SEQ ID NO: 4757619 - DNA, 25 bp, Homo sapien
aagggcttagcctcagttgtctgaa

SEQ ID NO: 4757620 - DNA, 25 bp, Homo sapien
catataggcacttgaagctctcagg

SEQ ID NO: 4757621 - DNA, 25 bp, Homo sapien
gacatcattttctgctgggtaacct

SEQ ID NO: 4757622 - DNA, 25 bp, Homo sapien
tccagacatcttgaatccaccaaag

SEQ ID NO: 4757623 - DNA, 25 bp, Homo sapien
tccatttccagacatcttgaatcca

SEQ ID NO: 4757624 - DNA, 25 bp, Homo sapien
tttccagacatcttgaatccaccaa

SEQ ID NO: 4757625 - DNA, 25 bp, Homo sapien
cagacatcttgaatccaccaaaggg

SEQ ID NO: 4757626 - DNA, 25 bp, Homo sapien
cagagcagaggagattgttatggct

SEQ ID NO: 4757627 - DNA, 25 bp, Homo sapien
tgctcttttgatcacgtcatctaaa

SEQ ID NO: 4757628 - DNA, 25 bp, Homo sapien
tgctgataagccatagaaagtattg

SEQ ID NO: 4757629 - DNA, 25 bp, Homo sapien
agatttaaacttcatgatttgctgc

SEQ ID NO: 4757630 - DNA, 25 bp, Homo sapien
cactgtgggctggacaaagtagcct

SEQ ID NO: 4757631 - DNA, 25 bp, Homo sapien
caagtattttatcatattgttcctt

SEQ ID NO: 4757632 - DNA, 25 bp, Homo sapien
ctcctctttggcaatgcgcatctca

SEQ ID NO: 4757633 - DNA, 25 bp, Homo sapien
tgggctggacaaagtagcctttatt

SEQ ID NO: 4757634 - DNA, 25 bp, Homo sapien
catggccggtaaactgtttctagac

SEQ ID NO: 4757635 - DNA, 25 bp, Homo sapien
taaacaccaaactggcacagcattg

SEQ ID NO: 4757636 - DNA, 25 bp, Homo sapien
tctagacatgaaaactgggcaacac

SEQ ID NO: 4757637 - DNA, 25 bp, Homo sapien
gcattgtcacctaggaaggtgtgca

SEQ ID NO: 4757638 - DNA, 25 bp, Homo sapien
tggccctggtggtagaataccccat

SEQ ID NO: 4757639 - DNA, 25 bp, Homo sapien
cacaaaaatcctggatgcggctata

SEQ ID NO: 4757640 - DNA, 25 bp, Homo sapien
tgcggctatacaacactggccctgg

SEQ ID NO: 4757641 - DNA, 25 bp, Homo sapien
aaggatatacttcttagcccgctca

SEQ ID NO: 4757642 - DNA, 25 bp, Homo sapien
gacaccaaaaacgatgaaggacgaa

SEQ ID NO: 4757643 - DNA, 25 bp, Homo sapien
ttggcattatcagacaccaaaaacg

SEQ ID NO: 4757644 - DNA, 25 bp, Homo sapien
agacaccaaaaacgatgaaggacga

SEQ ID NO: 4757645 - DNA, 25 bp, Homo sapien
gcattatcagacaccaaaaacgatg

SEQ ID NO: 4757646 - DNA, 25 bp, Homo sapien
gcttttcccggcagcttctttgatc

SEQ ID NO: 4757647 - DNA, 25 bp, Homo sapien
caatgcaagggctctttcctccaag

SEQ ID NO: 4757648 - DNA, 25 bp, Homo sapien
taacacaatgcaagggctctttcct

SEQ ID NO: 4757649 - DNA, 25 bp, Homo sapien
gcagcttctttgatcaacttgccaa

SEQ ID NO: 4757650 - DNA, 25 bp, Homo sapien
tgaaagggagcattacaaaggagga

SEQ ID NO: 4757651 - DNA, 25 bp, Homo sapien
ctgaaagggagcattacaaaggagg

SEQ ID NO: 4757652 - DNA, 25 bp, Homo sapien
gcattctaaatttatgtgatgtttg

SEQ ID NO: 4757653 - DNA, 25 bp, Homo sapien
taccctgctctcatgaacacaggtt

SEQ ID NO: 4757654 - DNA, 25 bp, Homo sapien
gctacaaacgtcaaaagaactagga

SEQ ID NO: 4757655 - DNA, 25 bp, Homo sapien
taatgggatattgcggtggctcacg

SEQ ID NO: 4757656 - DNA, 25 bp, Homo sapien
cagtgtattccatgatactgtggca

SEQ ID NO: 4757657 - DNA, 25 bp, Homo sapien
tcccaaaagtctagctaaagtcaaa

SEQ ID NO: 4757658 - DNA, 25 bp, Homo sapien
cattcttaacttttgccctgagtaa

SEQ ID NO: 4757659 - DNA, 25 bp, Homo sapien
aattgttggctcaaaaatagttaca

SEQ ID NO: 4757660 - DNA, 25 bp, Homo sapien
gctaaaataagtaacaaatcattaa

SEQ ID NO: 4757661 - DNA, 25 bp, Homo sapien
ataaaacatacttcatagctggcaa

SEQ ID NO: 4757662 - DNA, 25 bp, Homo sapien
gaacaatattcactactccaggagg

SEQ ID NO: 4757663 - DNA, 25 bp, Homo sapien
gctgtaggcccataaccaggaacaa

SEQ ID NO: 4757664 - DNA, 25 bp, Homo sapien
gctgcccctgctgtaggcccataac

SEQ ID NO: 4757665 - DNA, 25 bp, Homo sapien
ttgtctatatccatgtgagaagaaa

SEQ ID NO: 4757666 - DNA, 25 bp, Homo sapien
tcttttattaaagatgccacgtgga

SEQ ID NO: 4757667 - DNA, 25 bp, Homo sapien
ggccctatcttccaaatgagcataa

SEQ ID NO: 4757668 - DNA, 25 bp, Homo sapien
tgagcataaccaacgggaaattcca

SEQ ID NO: 4757669 - DNA, 25 bp, Homo sapien
tttattaaagatgccacgtggagag

SEQ ID NO: 4757670 - DNA, 25 bp, Homo sapien
ttgagaattatataggagaaaagct

SEQ ID NO: 4757671 - DNA, 25 bp, Homo sapien
tgagaattatataggagaaaagctt

SEQ ID NO: 4757672 - DNA, 25 bp, Homo sapien
gagaaagcttcatcattagatagaa

SEQ ID NO: 4757673 - DNA, 25 bp, Homo sapien
cattagatagaataagaactcttct

SEQ ID NO: 4757674 - DNA, 25 bp, Homo sapien
taggttcatgtcttgtatatgtaaa

SEQ ID NO: 4757675 - DNA, 25 bp, Homo sapien
gaatgatttggccacatacaccaat

SEQ ID NO: 4757676 - DNA, 25 bp, Homo sapien
tgatttggccacatacaccaatagg

SEQ ID NO: 4757677 - DNA, 25 bp, Homo sapien
ggccacatacaccaataggttcatg

SEQ ID NO: 4757678 - DNA, 25 bp, Homo sapien
caattggtattgtacggccctggat

SEQ ID NO: 4757679 - DNA, 25 bp, Homo sapien
cagtagcgcaatgttttgatgcagc

SEQ ID NO: 4757680 - DNA, 25 bp, Homo sapien
tgatgcagcctgctaaatcattcag

SEQ ID NO: 4757681 - DNA, 25 bp, Homo sapien
tagagttttccaccattcattgact

SEQ ID NO: 4757682 - DNA, 25 bp, Homo sapien
tcagccaacttgtataatagtcgcc

SEQ ID NO: 4757683 - DNA, 25 bp, Homo sapien
tacgccacggggatccaatctgaaa

SEQ ID NO: 4757684 - DNA, 25 bp, Homo sapien
cggaagcatccatagtacgccacgg

SEQ ID NO: 4757685 - DNA, 25 bp, Homo sapien
gccagcagcagacgatctctttcga

SEQ ID NO: 4757686 - DNA, 25 bp, Homo sapien
ggagcttgcaatggggttcaggagc

SEQ ID NO: 4757687 - DNA, 25 bp, Homo sapien
gacaattttcctaagctgccccaga

SEQ ID NO: 4757688 - DNA, 25 bp, Homo sapien
ccagaaaccatattttcatggcatg

SEQ ID NO: 4757689 - DNA, 25 bp, Homo sapien
tgccccagaaaccatattttcatgg

SEQ ID NO: 4757690 - DNA, 25 bp, Homo sapien
ctcctcagttgcaggattaaagaca

SEQ ID NO: 4757691 - DNA, 25 bp, Homo sapien
cttgccactcactgaatcatgccat

SEQ ID NO: 4757692 - DNA, 25 bp, Homo sapien
agctcctcctcagttgcaggattaa

SEQ ID NO: 4757693 - DNA, 25 bp, Homo sapien
tcttgccactcactgaatcatgcca

SEQ ID NO: 4757694 - DNA, 25 bp, Homo sapien
acttaaactaaagcatttcaccatg

SEQ ID NO: 4757695 - DNA, 25 bp, Homo sapien
catacaaggcgcttaaatatgcaga

SEQ ID NO: 4757696 - DNA, 25 bp, Homo sapien
gcctaaatgatgcacatctcttcac

SEQ ID NO: 4757697 - DNA, 25 bp, Homo sapien
gaaaatacatacaaggcgcttaaat

SEQ ID NO: 4757698 - DNA, 25 bp, Homo sapien
tattctctaagagtgtttccctcat

SEQ ID NO: 4757699 - DNA, 25 bp, Homo sapien
tgggttggtcttcaaatgagttatt

SEQ ID NO: 4757700 - DNA, 25 bp, Homo sapien
ttactttgggttggtcttcaaatga

SEQ ID NO: 4757701 - DNA, 25 bp, Homo sapien
atattctctaagagtgtttccctca

SEQ ID NO: 4757702 - DNA, 25 bp, Homo sapien
taagtctggcgtgcctgaggatgac

SEQ ID NO: 4757703 - DNA, 25 bp, Homo sapien
caaatcggtgagtaggacaggtaag

SEQ ID NO: 4757704 - DNA, 25 bp, Homo sapien
tatattgaatcttcaaatcggtgag

SEQ ID NO: 4757705 - DNA, 25 bp, Homo sapien
gacaggtaagtctggcgtgcctgag

SEQ ID NO: 4757706 - DNA, 25 bp, Homo sapien
aggtgactggctcagcaatttggtt

SEQ ID NO: 4757707 - DNA, 25 bp, Homo sapien
caaagcctccctctaaaccattggg

SEQ ID NO: 4757708 - DNA, 25 bp, Homo sapien
tatctgcaggcactccgaactatat

SEQ ID NO: 4757709 - DNA, 25 bp, Homo sapien
ttctaagaagcacccaactaatgcc

SEQ ID NO: 4757710 - DNA, 25 bp, Homo sapien
tttccctcaggcgatagtatcatga

SEQ ID NO: 4757711 - DNA, 25 bp, Homo sapien
caggggaattgaaattgacattatg

SEQ ID NO: 4757712 - DNA, 25 bp, Homo sapien
tcaggggaattgaaattgacattat

SEQ ID NO: 4757713 - DNA, 25 bp, Homo sapien
aggggaattgaaattgacattatgt

SEQ ID NO: 4757714 - DNA, 25 bp, Homo sapien
taactccatactaagtcctgtggca

SEQ ID NO: 4757715 - DNA, 25 bp, Homo sapien
gcctggcatcctacactccagtgtt

SEQ ID NO: 4757716 - DNA, 25 bp, Homo sapien
ggcattctggattcataccaatgaa

SEQ ID NO: 4757717 - DNA, 25 bp, Homo sapien
ccagtgttttcaattgttggaatcc

SEQ ID NO: 4757718 - DNA, 25 bp, Homo sapien
ccacatttggaagcatattctttac

SEQ ID NO: 4757719 - DNA, 25 bp, Homo sapien
cttctgctaggtagacaattgttac

SEQ ID NO: 4757720 - DNA, 25 bp, Homo sapien
catctccgtttagtgtggattgggc

SEQ ID NO: 4757721 - DNA, 25 bp, Homo sapien
tattctgccaactttgttctcatgg

SEQ ID NO: 4757722 - DNA, 25 bp, Homo sapien
tatggacaatatgtttccaggaaaa

SEQ ID NO: 4757723 - DNA, 25 bp, Homo sapien
ttaaagataagataggtacctcaat

SEQ ID NO: 4757724 - DNA, 25 bp, Homo sapien
tagattgataacactgcaaggtata

SEQ ID NO: 4757725 - DNA, 25 bp, Homo sapien
taaaagacctcattacattccaaag

SEQ ID NO: 4757726 - DNA, 25 bp, Homo sapien
tttcctaaaatgagtgagtccttct

SEQ ID NO: 4757727 - DNA, 25 bp, Homo sapien
gagtccttcttagaacagacgaatt

SEQ ID NO: 4757728 - DNA, 25 bp, Homo sapien
tccagacttattagtgtagtaacag

SEQ ID NO: 4757729 - DNA, 25 bp, Homo sapien
taagcactcctcaggtcaagtattc

SEQ ID NO: 4757730 - DNA, 25 bp, Homo sapien
aagatcaatttccatcctactccct

SEQ ID NO: 4757731 - DNA, 25 bp, Homo sapien
ttcaaagatcaatttccatcctact

SEQ ID NO: 4757732 - DNA, 25 bp, Homo sapien
caaatgccttccctctgactccact

SEQ ID NO: 4757733 - DNA, 25 bp, Homo sapien
actcacagtgaaatctccgagcttc

SEQ ID NO: 4757734 - DNA, 25 bp, Homo sapien
ccagtgactggcagagactgcattc

SEQ ID NO: 4757735 - DNA, 25 bp, Homo sapien
tcttcacccaagatctcatctgact

SEQ ID NO: 4757736 - DNA, 25 bp, Homo sapien
ggaaaccatgtgcttcctgtagtgg

SEQ ID NO: 4757737 - DNA, 25 bp, Homo sapien
cagcagacagtaaatatgttataca

SEQ ID NO: 4757738 - DNA, 25 bp, Homo sapien
agtgtcatcggctccaccagaaaca

SEQ ID NO: 4757739 - DNA, 25 bp, Homo sapien
ccatttttcaagactgtaactgaga

SEQ ID NO: 4757740 - DNA, 25 bp, Homo sapien
tgccaacacaaatgcatgggtagct

SEQ ID NO: 4757741 - DNA, 25 bp, Homo sapien
taagcatgtgtattgggatttaccc

SEQ ID NO: 4757742 - DNA, 25 bp, Homo sapien
ctgtgattttgaagaaaatttactt

SEQ ID NO: 4757743 - DNA, 25 bp, Homo sapien
gtgattttgaagaaaatttacttga

SEQ ID NO: 4757744 - DNA, 25 bp, Homo sapien
tgattttgaagaaaatttacttgaa

SEQ ID NO: 4757745 - DNA, 25 bp, Homo sapien
tgtgattttgaagaaaatttacttg

SEQ ID NO: 4757746 - DNA, 25 bp, Homo sapien
ctctttgcacagaaggtcacttttc

SEQ ID NO: 4757747 - DNA, 25 bp, Homo sapien
gaaggtcacttttctagagtcttca

SEQ ID NO: 4757748 - DNA, 25 bp, Homo sapien
agagtcttcattccttgactcctcc

SEQ ID NO: 4757749 - DNA, 25 bp, Homo sapien
ctagagtcttcattccttgactcct

SEQ ID NO: 4757750 - DNA, 25 bp, Homo sapien
tagcattgctaaaggcttttgccat

SEQ ID NO: 4757751 - DNA, 25 bp, Homo sapien
gcctcagtgtgcctcttactgttct

SEQ ID NO: 4757752 - DNA, 25 bp, Homo sapien
tcttactgttctgcccagcattttg

SEQ ID NO: 4757753 - DNA, 25 bp, Homo sapien
tttgactttcatctatatgtttagc

SEQ ID NO: 4757754 - DNA, 25 bp, Homo sapien
aaagctgtaggttccctgggagtct

SEQ ID NO: 4757755 - DNA, 25 bp, Homo sapien
cctgcaatgctgtgaaggagaaagc

SEQ ID NO: 4757756 - DNA, 25 bp, Homo sapien
gagtctgcagatctctcttcccatc

SEQ ID NO: 4757757 - DNA, 25 bp, Homo sapien
ctgggagtctgcagatctctcttcc

SEQ ID NO: 4757758 - DNA, 25 bp, Homo sapien
gttacacaagtgtatacacctatca

SEQ ID NO: 4757759 - DNA, 25 bp, Homo sapien
gagcttctgaaatgcgaaactatgg

SEQ ID NO: 4757760 - DNA, 25 bp, Homo sapien
tcaatgattgcttggagcagagggt

SEQ ID NO: 4757761 - DNA, 25 bp, Homo sapien
acttcataggatgggagtactcagc

SEQ ID NO: 4757762 - DNA, 25 bp, Homo sapien
aatgctgcatgggaaaaagtgcctg

SEQ ID NO: 4757763 - DNA, 25 bp, Homo sapien
tatctcacctatcttcgacagtggg

SEQ ID NO: 4757764 - DNA, 25 bp, Homo sapien
gatcctctggcacatccttaaagaa

SEQ ID NO: 4757765 - DNA, 25 bp, Homo sapien
caggtgacggattcttcgctgtgca

SEQ ID NO: 4757766 - DNA, 25 bp, Homo sapien
ctggggatactgttgcatttggatg

SEQ ID NO: 4757767 - DNA, 25 bp, Homo sapien
tccctggggatactgttgcatttgg

SEQ ID NO: 4757768 - DNA, 25 bp, Homo sapien
ttacttgaaggtaaccagattaatg

SEQ ID NO: 4757769 - DNA, 25 bp, Homo sapien
acttgaaggtaaccagattaatgtt

SEQ ID NO: 4757770 - DNA, 25 bp, Homo sapien
cagctcgctggcctctggtcatctt

SEQ ID NO: 4757771 - DNA, 25 bp, Homo sapien
aaacactttcagctcgctggcctct

SEQ ID NO: 4757772 - DNA, 25 bp, Homo sapien
cttggtgatgtaagttgtagctaaa

SEQ ID NO: 4757773 - DNA, 25 bp, Homo sapien
gctaaagtatatggatcagagggct

SEQ ID NO: 4757774 - DNA, 25 bp, Homo sapien
cgttccctagtccagagtatccata

SEQ ID NO: 4757775 - DNA, 25 bp, Homo sapien
cattagttcttgacttaaggaaagg

SEQ ID NO: 4757776 - DNA, 25 bp, Homo sapien
tgaaatcttgagctgtcctgcaccc

SEQ ID NO: 4757777 - DNA, 25 bp, Homo sapien
gcaggcacgcccagccattagttct

SEQ ID NO: 4757778 - DNA, 25 bp, Homo sapien
tgaagcacaatggtacaatcgcagc

SEQ ID NO: 4757779 - DNA, 25 bp, Homo sapien
aatccaccatggcttgcctgaaaca

SEQ ID NO: 4757780 - DNA, 25 bp, Homo sapien
caagtataatccaccatggcttgcc

SEQ ID NO: 4757781 - DNA, 25 bp, Homo sapien
gtagctgggacaatggcgagccacc

SEQ ID NO: 4757782 - DNA, 25 bp, Homo sapien
gattaggagtaagatcaagtctgtt

SEQ ID NO: 4757783 - DNA, 25 bp, Homo sapien
aaatggtcactcaggtctattagga

SEQ ID NO: 4757784 - DNA, 25 bp, Homo sapien
gaaaacacctattgaccatggggta

SEQ ID NO: 4757785 - DNA, 25 bp, Homo sapien
cagcagggtttttgtagattctaaa

SEQ ID NO: 4757786 - DNA, 25 bp, Homo sapien
tgcagtgatcaccatggcaagggaa

SEQ ID NO: 4757787 - DNA, 25 bp, Homo sapien
tcagggtagtcttgttgtcccaaaa

SEQ ID NO: 4757788 - DNA, 25 bp, Homo sapien
gagaaataactcacaccgcctctta

SEQ ID NO: 4757789 - DNA, 25 bp, Homo sapien
caacactcagggcttattgcataca

SEQ ID NO: 4757790 - DNA, 25 bp, Homo sapien
agcaccaggggaagtgactacttgt

SEQ ID NO: 4757791 - DNA, 25 bp, Homo sapien
ttcagagagtcatagaatttcttgg

SEQ ID NO: 4757792 - DNA, 25 bp, Homo sapien
gactacttgtgtcatgcctctgatg

SEQ ID NO: 4757793 - DNA, 25 bp, Homo sapien
tagaatttcttggagatacaaagtt

SEQ ID NO: 4757794 - DNA, 25 bp, Homo sapien
attagaacaacaccaagatgacagt

SEQ ID NO: 4757795 - DNA, 25 bp, Homo sapien
ttatttctatagcaaccagccgagg

SEQ ID NO: 4757796 - DNA, 25 bp, Homo sapien
cattttcgaatcctaaggctattag

SEQ ID NO: 4757797 - DNA, 25 bp, Homo sapien
gctgtaacttccgtctgcttctgct

SEQ ID NO: 4757798 - DNA, 25 bp, Homo sapien
catagggccgctggtcttttcagag

SEQ ID NO: 4757799 - DNA, 25 bp, Homo sapien
gatagtcatagggccgctggtcttt

SEQ ID NO: 4757800 - DNA, 25 bp, Homo sapien
gtcatagggccgctggtcttttcag

SEQ ID NO: 4757801 - DNA, 25 bp, Homo sapien
agggccgctggtcttttcagagaag

SEQ ID NO: 4757802 - DNA, 25 bp, Homo sapien
tgtttagatactaagacacgtgaag

SEQ ID NO: 4757803 - DNA, 25 bp, Homo sapien
gatactaagacacgtgaagaaactt

SEQ ID NO: 4757804 - DNA, 25 bp, Homo sapien
gtttagatactaagacacgtgaaga

SEQ ID NO: 4757805 - DNA, 25 bp, Homo sapien
tagatactaagacacgtgaagaaac

SEQ ID NO: 4757806 - DNA, 25 bp, Homo sapien
gcatatagaagatctttctgcttga

SEQ ID NO: 4757807 - DNA, 25 bp, Homo sapien
tgtttatgttagatccatgtgtcag

SEQ ID NO: 4757808 - DNA, 25 bp, Homo sapien
cttgattctcataccaagcatggag

SEQ ID NO: 4757809 - DNA, 25 bp, Homo sapien
aacactgaaaagagggtaattgcaa

SEQ ID NO: 4757810 - DNA, 25 bp, Homo sapien
tattcgtaaaaccagagagaactga

SEQ ID NO: 4757811 - DNA, 25 bp, Homo sapien
tgatttgtcattcccaagaattgtt

SEQ ID NO: 4757812 - DNA, 25 bp, Homo sapien
aaactctgacctttcgttgtactag

SEQ ID NO: 4757813 - DNA, 25 bp, Homo sapien
tggaaagagtaagcatatttaacgt

SEQ ID NO: 4757814 - DNA, 25 bp, Homo sapien
caggattacagtgtagctacctaca

SEQ ID NO: 4757815 - DNA, 25 bp, Homo sapien
tctttgtggaggaaactaaacattc

SEQ ID NO: 4757816 - DNA, 25 bp, Homo sapien
tacctacatgctgaaaaatatagcc

SEQ ID NO: 4757817 - DNA, 25 bp, Homo sapien
gatggtctcaagctatgatcagaag

SEQ ID NO: 4757818 - DNA, 25 bp, Homo sapien
tcttttcatcatcttagcaggttct

SEQ ID NO: 4757819 - DNA, 25 bp, Homo sapien
gatattagtcgttcatcagatatgt

SEQ ID NO: 4757820 - DNA, 25 bp, Homo sapien
cttttgatgtcatgtctacaagctc

SEQ ID NO: 4757821 - DNA, 25 bp, Homo sapien
ttttgtggtagtctatagcttgtct

SEQ ID NO: 4757822 - DNA, 25 bp, Homo sapien
gaagataagcccaaaacgatgagaa

SEQ ID NO: 4757823 - DNA, 25 bp, Homo sapien
tttggctgacaccacctatgggagt

SEQ ID NO: 4757824 - DNA, 25 bp, Homo sapien
taaagcacacagtccaggagttagg

SEQ ID NO: 4757825 - DNA, 25 bp, Homo sapien
catccccagtgcagtagattcctga

SEQ ID NO: 4757826 - DNA, 25 bp, Homo sapien
gaagctggcactaaaggcatttaag

SEQ ID NO: 4757827 - DNA, 25 bp, Homo sapien
ttccagccatttcacacagttgatt

SEQ ID NO: 4757828 - DNA, 25 bp, Homo sapien
tgttgattgtaatgatttttgagcc

SEQ ID NO: 4757829 - DNA, 25 bp, Homo sapien
ttaatcagcagctagagatggtctg

SEQ ID NO: 4757830 - DNA, 25 bp, Homo sapien
actggcaaacatacatcccactggg

SEQ ID NO: 4757831 - DNA, 25 bp, Homo sapien
catcccactggggataagtgtgatt

SEQ ID NO: 4757832 - DNA, 25 bp, Homo sapien
cttgtggatcttgttgagctattga

SEQ ID NO: 4757833 - DNA, 25 bp, Homo sapien
tcttgttgagctattgattactggc

SEQ ID NO: 4757834 - DNA, 25 bp, Homo sapien
taagatggcttgctattattagctt

SEQ ID NO: 4757835 - DNA, 25 bp, Homo sapien
cacatctccggatgataaaatcagc

SEQ ID NO: 4757836 - DNA, 25 bp, Homo sapien
accagagtgctataagatggcttgc

SEQ ID NO: 4757837 - DNA, 25 bp, Homo sapien
cacggaaaggtgttattaccagagt

SEQ ID NO: 4757838 - DNA, 25 bp, Homo sapien
tgccttttgccactcccctgagtct

SEQ ID NO: 4757839 - DNA, 25 bp, Homo sapien
ccttttgccactcccctgagtctct

SEQ ID NO: 4757840 - DNA, 25 bp, Homo sapien
gccttttgccactcccctgagtctc

SEQ ID NO: 4757841 - DNA, 25 bp, Homo sapien
tgagctacagcttcacactgtaggg

SEQ ID NO: 4757842 - DNA, 25 bp, Homo sapien
cactggtgatgcgaacctacgagcg

SEQ ID NO: 4757843 - DNA, 25 bp, Homo sapien
aagcaagccttctgttcactggtga

SEQ ID NO: 4757844 - DNA, 25 bp, Homo sapien
ttactgtaggtaatgtctgggaaca

SEQ ID NO: 4757845 - DNA, 25 bp, Homo sapien
tacgagcgcgaactgcattgccaga

SEQ ID NO: 4757846 - DNA, 25 bp, Homo sapien
tattctttctccacagtctttctat

SEQ ID NO: 4757847 - DNA, 25 bp, Homo sapien
ttctccacagtctttctatagttaa

SEQ ID NO: 4757848 - DNA, 25 bp, Homo sapien
ttctttctccacagtctttctatag

SEQ ID NO: 4757849 - DNA, 25 bp, Homo sapien
tctttctccacagtctttctatagt

SEQ ID NO: 4757850 - DNA, 25 bp, Homo sapien
tgcccctggtcttactgtgacaagc

SEQ ID NO: 4757851 - DNA, 25 bp, Homo sapien
cctggtcttactgtgacaagctcac

SEQ ID NO: 4757852 - DNA, 25 bp, Homo sapien
actgcccctggtcttactgtgacaa

SEQ ID NO: 4757853 - DNA, 25 bp, Homo sapien
cttactgtgacaagctcactttgct

SEQ ID NO: 4757854 - DNA, 25 bp, Homo sapien
tcagcttccaatcccacacttcctt

SEQ ID NO: 4757855 - DNA, 25 bp, Homo sapien
taaccttccatatagtcatttgggt

SEQ ID NO: 4757856 - DNA, 25 bp, Homo sapien
ttttttcagcttccaatcccacact

SEQ ID NO: 4757857 - DNA, 25 bp, Homo sapien
tcaataaccttccatatagtcattt

SEQ ID NO: 4757858 - DNA, 25 bp, Homo sapien
gccaggtaataaactccccaggata

SEQ ID NO: 4757859 - DNA, 25 bp, Homo sapien
aaccatatccattcagctcactttg

SEQ ID NO: 4757860 - DNA, 25 bp, Homo sapien
gaacctgttgagatccaaatttgtg

SEQ ID NO: 4757861 - DNA, 25 bp, Homo sapien
cagctcactttggaccacctgtgga

SEQ ID NO: 4757862 - DNA, 25 bp, Homo sapien
ataccctccagatttcctggtttgt

SEQ ID NO: 4757863 - DNA, 25 bp, Homo sapien
ccctccagatttcctggtttgtgca

SEQ ID NO: 4757864 - DNA, 25 bp, Homo sapien
aaaattatggatcaaatttcattgc

SEQ ID NO: 4757865 - DNA, 25 bp, Homo sapien
atcagaaatttatccataccctcca

SEQ ID NO: 4757866 - DNA, 25 bp, Homo sapien
gaaggtcacgtcactcaaagccaac

SEQ ID NO: 4757867 - DNA, 25 bp, Homo sapien
catgtttaaggaagcgttgaaggtc

SEQ ID NO: 4757868 - DNA, 25 bp, Homo sapien
gctggaagctgatccttttcatgtc

SEQ ID NO: 4757869 - DNA, 25 bp, Homo sapien
tcagcaggcatcctaccaagataat

SEQ ID NO: 4757870 - DNA, 25 bp, Homo sapien
cttcaaacaccgacaacatgacgca

SEQ ID NO: 4757871 - DNA, 25 bp, Homo sapien
caacatgacgcagcttctttccttt

SEQ ID NO: 4757872 - DNA, 25 bp, Homo sapien
caaacaccgacaacatgacgcagct

SEQ ID NO: 4757873 - DNA, 25 bp, Homo sapien
caccgacaacatgacgcagcttctt

SEQ ID NO: 4757874 - DNA, 25 bp, Homo sapien
tttctttcacataagcatgctgggc

SEQ ID NO: 4757875 - DNA, 25 bp, Homo sapien
ctttctttcacataagcatgctggg

SEQ ID NO: 4757876 - DNA, 25 bp, Homo sapien
ttctttcacataagcatgctgggcc

SEQ ID NO: 4757877 - DNA, 25 bp, Homo sapien
tctttcacataagcatgctgggcca

SEQ ID NO: 4757878 - DNA, 25 bp, Homo sapien
caaaagggatgtttcaggcacgttg

SEQ ID NO: 4757879 - DNA, 25 bp, Homo sapien
agggatgtttcaggcacgttgactt

SEQ ID NO: 4757880 - DNA, 25 bp, Homo sapien
aaagggatgtttcaggcacgttgac

SEQ ID NO: 4757881 - DNA, 25 bp, Homo sapien
gcaaaagggatgtttcaggcacgtt

SEQ ID NO: 4757882 - DNA, 25 bp, Homo sapien
tctcacatatctttactcattcatg

SEQ ID NO: 4757883 - DNA, 25 bp, Homo sapien
ctcacatatctttactcattcatgt

SEQ ID NO: 4757884 - DNA, 25 bp, Homo sapien
tattgtctaagacctttattgtgta

SEQ ID NO: 4757885 - DNA, 25 bp, Homo sapien
taccaaggtttctgtatctctgaag

SEQ ID NO: 4757886 - DNA, 25 bp, Homo sapien
ttattgtgtatgttaccaaggtttc

SEQ ID NO: 4757887 - DNA, 25 bp, Homo sapien
tgacttgttcctattgtctaagacc

SEQ ID NO: 4757888 - DNA, 25 bp, Homo sapien
gtacgttttcaagggatcgatctga

SEQ ID NO: 4757889 - DNA, 25 bp, Homo sapien
ggtgaatgtacgttttcaagggatc

SEQ ID NO: 4757890 - DNA, 25 bp, Homo sapien
ctacttattttagttaggacctctg

SEQ ID NO: 4757891 - DNA, 25 bp, Homo sapien
tagttaggacctctggtgaatgtac

SEQ ID NO: 4757892 - DNA, 25 bp, Homo sapien
aagcacttggcacgctggaaggtgc

SEQ ID NO: 4757893 - DNA, 25 bp, Homo sapien
gacgggatggtgagcacggtcttgc

SEQ ID NO: 4757894 - DNA, 25 bp, Homo sapien
tagctgtcacatgtcatctacagga

SEQ ID NO: 4757895 - DNA, 25 bp, Homo sapien
ggatctagaccgtgatttctcagaa

SEQ ID NO: 4757896 - DNA, 25 bp, Homo sapien
tcagaattgggcatcggctgttgcc

SEQ ID NO: 4757897 - DNA, 25 bp, Homo sapien
taggatgtcctccaactcgagtcca

SEQ ID NO: 4757898 - DNA, 25 bp, Homo sapien
gcgcatcagcgactgctgcatacct

SEQ ID NO: 4757899 - DNA, 25 bp, Homo sapien
ctcagggggcgcatcagcgactgct

SEQ ID NO: 4757900 - DNA, 25 bp, Homo sapien
cgctctagggcagggttgcccacag

SEQ ID NO: 4757901 - DNA, 25 bp, Homo sapien
tcgtacagggtccaccctccggcca

SEQ ID NO: 4757902 - DNA, 25 bp, Homo sapien
agcgctctagggcagggttgcccac

SEQ ID NO: 4757903 - DNA, 25 bp, Homo sapien
tgtggaccagcacctccgcaggaag

SEQ ID NO: 4757904 - DNA, 25 bp, Homo sapien
gctgcggtcgagacggacctgggct

SEQ ID NO: 4757905 - DNA, 25 bp, Homo sapien
cagcctctggtaagactctcaggat

SEQ ID NO: 4757906 - DNA, 25 bp, Homo sapien
gggcccgtatatgggcctgctgcca

SEQ ID NO: 4757907 - DNA, 25 bp, Homo sapien
tctcaggatcacaatccgggcccgt

SEQ ID NO: 4757908 - DNA, 25 bp, Homo sapien
tcttcgtagctggagacaatggtgc

SEQ ID NO: 4757909 - DNA, 25 bp, Homo sapien
agacagaggtagaggcccacgctct

SEQ ID NO: 4757910 - DNA, 25 bp, Homo sapien
caggtcttcatgctccgataccagc

SEQ ID NO: 4757911 - DNA, 25 bp, Homo sapien
ccggcactcttcgtagctggagaca

SEQ ID NO: 4757912 - DNA, 25 bp, Homo sapien
cctttttcatcctgctcgatgagct

SEQ ID NO: 4757913 - DNA, 25 bp, Homo sapien
tcctgctcgatgagcttgccgctgc

SEQ ID NO: 4757914 - DNA, 25 bp, Homo sapien
tcatcctgctcgatgagcttgccgc

SEQ ID NO: 4757915 - DNA, 25 bp, Homo sapien
tttcatcctgctcgatgagcttgcc

SEQ ID NO: 4757916 - DNA, 25 bp, Homo sapien
agcccagcagttcgtgcaggcccac

SEQ ID NO: 4757917 - DNA, 25 bp, Homo sapien
agccttccgtctgcttcaggtcatt

SEQ ID NO: 4757918 - DNA, 25 bp, Homo sapien
ttcaggtcattgtagttggagatgt

SEQ ID NO: 4757919 - DNA, 25 bp, Homo sapien
ccttcacatactcctcgggaaccaa

SEQ ID NO: 4757920 - DNA, 25 bp, Homo sapien
ccacggctacgaagccttcacatac

SEQ ID NO: 4757921 - DNA, 25 bp, Homo sapien
gatgaactcgatgtaactctccacg

SEQ ID NO: 4757922 - DNA, 25 bp, Homo sapien
ctggatgaactcgatgtaactctcc

SEQ ID NO: 4757923 - DNA, 25 bp, Homo sapien
actcgatgtaactctccacgatggg

SEQ ID NO: 4757924 - DNA, 25 bp, Homo sapien
gaactcgatgtaactctccacgatg

SEQ ID NO: 4757925 - DNA, 25 bp, Homo sapien
gtactgggccagcatttgctcctgg

SEQ ID NO: 4757926 - DNA, 25 bp, Homo sapien
ggtgaagctctctatgtactgggcc

SEQ ID NO: 4757927 - DNA, 25 bp, Homo sapien
agccctgggtgaagctctctatgta

SEQ ID NO: 4757928 - DNA, 25 bp, Homo sapien
tatgtactgggccagcatttgctcc

SEQ ID NO: 4757929 - DNA, 25 bp, Homo sapien
ctgcatacgtcttggctttctccag

SEQ ID NO: 4757930 - DNA, 25 bp, Homo sapien
ttggctttctccagctgctccacca

SEQ ID NO: 4757931 - DNA, 25 bp, Homo sapien
ctttctccagctgctccaccacctt

SEQ ID NO: 4757932 - DNA, 25 bp, Homo sapien
ggctttctccagctgctccaccacc

SEQ ID NO: 4757933 - DNA, 25 bp, Homo sapien
tgttgtacacgcactgaggttctgt

SEQ ID NO: 4757934 - DNA, 25 bp, Homo sapien
gagccaggtgttgtacacgcactga

SEQ ID NO: 4757935 - DNA, 25 bp, Homo sapien
gccaggtgttgtacacgcactgagg

SEQ ID NO: 4757936 - DNA, 25 bp, Homo sapien
caggtgttgtacacgcactgaggtt

SEQ ID NO: 4757937 - DNA, 25 bp, Homo sapien
cttccatggtacaattaccaaagaa

SEQ ID NO: 4757938 - DNA, 25 bp, Homo sapien
taccaaagaaataggtggtgattca

SEQ ID NO: 4757939 - DNA, 25 bp, Homo sapien
ttaccaaagaaataggtggtgattc

SEQ ID NO: 4757940 - DNA, 25 bp, Homo sapien
caattaccaaagaaataggtggtga

SEQ ID NO: 4757941 - DNA, 25 bp, Homo sapien
gactctgcatccatggaaagtttag

SEQ ID NO: 4757942 - DNA, 25 bp, Homo sapien
gattcactcgaagttaaatccgact

SEQ ID NO: 4757943 - DNA, 25 bp, Homo sapien
gaaagtttagtggtgacaatagaca

SEQ ID NO: 4757944 - DNA, 25 bp, Homo sapien
acaaataatggtcttcggttgaagc

SEQ ID NO: 4757945 - DNA, 25 bp, Homo sapien
catagattgaaaagtagctagccta

SEQ ID NO: 4757946 - DNA, 25 bp, Homo sapien
ttaagagggcacatcaaaagctgac

SEQ ID NO: 4757947 - DNA, 25 bp, Homo sapien
gctagcctagttgtgaatgcaaaaa

SEQ ID NO: 4757948 - DNA, 25 bp, Homo sapien
gagcggttgtggcaattgtgcatca

SEQ ID NO: 4757949 - DNA, 25 bp, Homo sapien
tccaattgtctaatttcatgtgtag

SEQ ID NO: 4757950 - DNA, 25 bp, Homo sapien
tcttccaattgtctaatttcatgtg

SEQ ID NO: 4757951 - DNA, 25 bp, Homo sapien
tttcttccaattgtctaatttcatg

SEQ ID NO: 4757952 - DNA, 25 bp, Homo sapien
caattgtctaatttcatgtgtagta

SEQ ID NO: 4757953 - DNA, 25 bp, Homo sapien
tacagagtgacggatgttcatcttg

SEQ ID NO: 4757954 - DNA, 25 bp, Homo sapien
gcatcttgatcattaattcctccag

SEQ ID NO: 4757955 - DNA, 25 bp, Homo sapien
tccagtttgtccacatgtcttataa

SEQ ID NO: 4757956 - DNA, 25 bp, Homo sapien
taagaatgtcagcaggaactttact

SEQ ID NO: 4757957 - DNA, 25 bp, Homo sapien
taaagatagtataaactggaagctc

SEQ ID NO: 4757958 - DNA, 25 bp, Homo sapien
acaggcttcaaccagctaaagatag

SEQ ID NO: 4757959 - DNA, 25 bp, Homo sapien
ttcctatccagagctgctacaataa

SEQ ID NO: 4757960 - DNA, 25 bp, Homo sapien
gctgctacaataactacaggcttca

SEQ ID NO: 4757961 - DNA, 25 bp, Homo sapien
tgttaccgttactttcaaggaagca

SEQ ID NO: 4757962 - DNA, 25 bp, Homo sapien
cacttgtaaaacctgtgctctccat

SEQ ID NO: 4757963 - DNA, 25 bp, Homo sapien
aagcacttgtaaaacctgtgctctc

SEQ ID NO: 4757964 - DNA, 25 bp, Homo sapien
ttcaaggaagcacttgtaaaacctg

SEQ ID NO: 4757965 - DNA, 25 bp, Homo sapien
taatccctgcaatcggacccattaa

SEQ ID NO: 4757966 - DNA, 25 bp, Homo sapien
tgatcttggtaaaccggttgcctgt

SEQ ID NO: 4757967 - DNA, 25 bp, Homo sapien
cccacttgctgtttctttaggctaa

SEQ ID NO: 4757968 - DNA, 25 bp, Homo sapien
cattaaccaccacaaatattgtctt

SEQ ID NO: 4757969 - DNA, 25 bp, Homo sapien
tgtttacccgatgaatgtttaaggc

SEQ ID NO: 4757970 - DNA, 25 bp, Homo sapien
gtttaaggcaatttgtatcatccga

SEQ ID NO: 4757971 - DNA, 25 bp, Homo sapien
tactttgtctaatctcaacatagcc

SEQ ID NO: 4757972 - DNA, 25 bp, Homo sapien
tatcatccgatttacatttgccacc

SEQ ID NO: 4757973 - DNA, 25 bp, Homo sapien
tctgtgtagaaggtcgattgctgac

SEQ ID NO: 4757974 - DNA, 25 bp, Homo sapien
gttgcatttccccagtaggacaaca

SEQ ID NO: 4757975 - DNA, 25 bp, Homo sapien
acaaaaatcagcgtcagcacatcca

SEQ ID NO: 4757976 - DNA, 25 bp, Homo sapien
gaaactacgtctatttaactcagca

SEQ ID NO: 4757977 - DNA, 25 bp, Homo sapien
aaagcccactgtcctttcacgtgca

SEQ ID NO: 4757978 - DNA, 25 bp, Homo sapien
cactgtcctttcacgtgcatgcaac

SEQ ID NO: 4757979 - DNA, 25 bp, Homo sapien
cctttcacgtgcatgcaacagtcaa

SEQ ID NO: 4757980 - DNA, 25 bp, Homo sapien
cacgtgcatgcaacagtcaaaaggg

SEQ ID NO: 4757981 - DNA, 25 bp, Homo sapien
tgaattgcaaactgtaagtgacttc

SEQ ID NO: 4757982 - DNA, 25 bp, Homo sapien
gctgaattgcaaactgtaagtgact

SEQ ID NO: 4757983 - DNA, 25 bp, Homo sapien
agctgaattgcaaactgtaagtgac

SEQ ID NO: 4757984 - DNA, 25 bp, Homo sapien
aattgcaaactgtaagtgacttcat

SEQ ID NO: 4757985 - DNA, 25 bp, Homo sapien
tcatcaaaggtaatgtgagtgcaaa

SEQ ID NO: 4757986 - DNA, 25 bp, Homo sapien
tcaaaggtaatgtgagtgcaaatta

SEQ ID NO: 4757987 - DNA, 25 bp, Homo sapien
catcaaaggtaatgtgagtgcaaat

SEQ ID NO: 4757988 - DNA, 25 bp, Homo sapien
atcaaaggtaatgtgagtgcaaatt

SEQ ID NO: 4757989 - DNA, 25 bp, Homo sapien
aaaaaccaaaagaactgagctggcg

SEQ ID NO: 4757990 - DNA, 25 bp, Homo sapien
caaccagtaagtgattgcagtgtcc

SEQ ID NO: 4757991 - DNA, 25 bp, Homo sapien
tcgaagcatgaaacaatgtgtgtca

SEQ ID NO: 4757992 - DNA, 25 bp, Homo sapien
tatgcagtagaagggagattcctcg

SEQ ID NO: 4757993 - DNA, 25 bp, Homo sapien
tgctgttgcagaacttatgctgtct

SEQ ID NO: 4757994 - DNA, 25 bp, Homo sapien
gaaaataactctaaggcctaaatgc

SEQ ID NO: 4757995 - DNA, 25 bp, Homo sapien
taaatatggcttatcttcatgactg

SEQ ID NO: 4757996 - DNA, 25 bp, Homo sapien
taaataaagagttcatgcttgccat

SEQ ID NO: 4757997 - DNA, 25 bp, Homo sapien
aacctggtttcctatcatgatgcat

SEQ ID NO: 4757998 - DNA, 25 bp, Homo sapien
ttaagcagtgctttgtaacagagct

SEQ ID NO: 4757999 - DNA, 25 bp, Homo sapien
tatactgtcttgatattggagccat

SEQ ID NO: 4758000 - DNA, 25 bp, Homo sapien
ggttcaaggtatagatagaggttca

SEQ ID NO: 4758001 - DNA, 25 bp, Homo sapien
cctctgataggatccaaattccttg

SEQ ID NO: 4758002 - DNA, 25 bp, Homo sapien
tgtctcctctgataggatccaaatt

SEQ ID NO: 4758003 - DNA, 25 bp, Homo sapien
aggatccaaattccttgaagtgaag

SEQ ID NO: 4758004 - DNA, 25 bp, Homo sapien
tactgagtttaaagggtgtattcac

SEQ ID NO: 4758005 - DNA, 25 bp, Homo sapien
tgctgcttgtctttcggaaggtcta

SEQ ID NO: 4758006 - DNA, 25 bp, Homo sapien
tttcggaaggtctactctttggaca

SEQ ID NO: 4758007 - DNA, 25 bp, Homo sapien
gcttgtctttcggaaggtctactct

SEQ ID NO: 4758008 - DNA, 25 bp, Homo sapien
aaggtctactctttggacattgtgg

SEQ ID NO: 4758009 - DNA, 25 bp, Homo sapien
agaagttgtggaacatgcatggaca

SEQ ID NO: 4758010 - DNA, 25 bp, Homo sapien
caggagcctgacctactaatgggca

SEQ ID NO: 4758011 - DNA, 25 bp, Homo sapien
cagactggaagcctacatttgggtc

SEQ ID NO: 4758012 - DNA, 25 bp, Homo sapien
gtttcatgaggaaattgcagacgct

SEQ ID NO: 4758013 - DNA, 25 bp, Homo sapien
tcttatgatgaccaggcatgaccgg

SEQ ID NO: 4758014 - DNA, 25 bp, Homo sapien
gcaggtcctatggaaacagcacaag

SEQ ID NO: 4758015 - DNA, 25 bp, Homo sapien
ttaggcagccacatccaaggtactc

SEQ ID NO: 4758016 - DNA, 25 bp, Homo sapien
tcttttccagttcaaagggcaggtc

SEQ ID NO: 4758017 - DNA, 25 bp, Homo sapien
tttactgcaggattaagaacaaaac

SEQ ID NO: 4758018 - DNA, 25 bp, Homo sapien
ttttgaggccaaagtttcaccacta

SEQ ID NO: 4758019 - DNA, 25 bp, Homo sapien
ttactgcaggattaagaacaaaaca

SEQ ID NO: 4758020 - DNA, 25 bp, Homo sapien
ttcaccactaaatttactgcaggat

SEQ ID NO: 4758021 - DNA, 25 bp, Homo sapien
caggataaagacctacctcatctat

SEQ ID NO: 4758022 - DNA, 25 bp, Homo sapien
taaagacctacctcatctatgacca

SEQ ID NO: 4758023 - DNA, 25 bp, Homo sapien
ggataaagacctacctcatctatga

SEQ ID NO: 4758024 - DNA, 25 bp, Homo sapien
ttcaggataaagacctacctcatct

SEQ ID NO: 4758025 - DNA, 25 bp, Homo sapien
acttaacttcggagatcagaggaaa

SEQ ID NO: 4758026 - DNA, 25 bp, Homo sapien
tacttaacttcggagatcagaggaa

SEQ ID NO: 4758027 - DNA, 25 bp, Homo sapien
ggttcaaaatgctcccagtcgtgtc

SEQ ID NO: 4758028 - DNA, 25 bp, Homo sapien
ctggttcaaaatgctcccagtcgtg

SEQ ID NO: 4758029 - DNA, 25 bp, Homo sapien
gttcaaaatgctcccagtcgtgtcc

SEQ ID NO: 4758030 - DNA, 25 bp, Homo sapien
tcaaaatgctcccagtcgtgtccca

SEQ ID NO: 4758031 - DNA, 25 bp, Homo sapien
tggtttctgatggagatcttcactg

SEQ ID NO: 4758032 - DNA, 25 bp, Homo sapien
gatggagatcttcactgtcagtatc

SEQ ID NO: 4758033 - DNA, 25 bp, Homo sapien
gctatccacgacaggatcagggccc

SEQ ID NO: 4758034 - DNA, 25 bp, Homo sapien
tctgaatatctccagctatccacga

SEQ ID NO: 4758035 - DNA, 25 bp, Homo sapien
tcaattcacgatgcctagaaccacg

SEQ ID NO: 4758036 - DNA, 25 bp, Homo sapien
gggtaatatacagaggatggcacta

SEQ ID NO: 4758037 - DNA, 25 bp, Homo sapien
tacctaccctgttctagtgatgcgg

SEQ ID NO: 4758038 - DNA, 25 bp, Homo sapien
aactaggacactctatcaacaggtg

SEQ ID NO: 4758039 - DNA, 25 bp, Homo sapien
aggaggattggaccagtgttgcaca

SEQ ID NO: 4758040 - DNA, 25 bp, Homo sapien
cacgtccatagcagcttgaggagga

SEQ ID NO: 4758041 - DNA, 25 bp, Homo sapien
tggaccagtgttgcacagattcctg

SEQ ID NO: 4758042 - DNA, 25 bp, Homo sapien
tcaggcttcacgtccatagcagctt

SEQ ID NO: 4758043 - DNA, 25 bp, Homo sapien
tgacttagcatccatccggtcagat

SEQ ID NO: 4758044 - DNA, 25 bp, Homo sapien
catccatccggtcagatgactttag

SEQ ID NO: 4758045 - DNA, 25 bp, Homo sapien
ggtcaaattgaagcgtcaattcaca

SEQ ID NO: 4758046 - DNA, 25 bp, Homo sapien
gaccaatttaaggtcaaattgaagc

SEQ ID NO: 4758047 - DNA, 25 bp, Homo sapien
tatccaggacgaatgctgatgggag

SEQ ID NO: 4758048 - DNA, 25 bp, Homo sapien
gcatgagcagccaggtatccaggac

SEQ ID NO: 4758049 - DNA, 25 bp, Homo sapien
gagggaaaccatgtgccttggagtc

SEQ ID NO: 4758050 - DNA, 25 bp, Homo sapien
ttcagtgccaaatgagggatgtgca

SEQ ID NO: 4758051 - DNA, 25 bp, Homo sapien
aattcagccatgaggatgccagata

SEQ ID NO: 4758052 - DNA, 25 bp, Homo sapien
gtaaattcagccatgaggatgccag

SEQ ID NO: 4758053 - DNA, 25 bp, Homo sapien
gaggatgccagataggcagattctg

SEQ ID NO: 4758054 - DNA, 25 bp, Homo sapien
cctgtaaattcagccatgaggatgc

SEQ ID NO: 4758055 - DNA, 25 bp, Homo sapien
catgatgctctgttatctgctgaca

SEQ ID NO: 4758056 - DNA, 25 bp, Homo sapien
aaggccaagttctgatctgtttgct

SEQ ID NO: 4758057 - DNA, 25 bp, Homo sapien
tgttgacctggttaggccatgatgc

SEQ ID NO: 4758058 - DNA, 25 bp, Homo sapien
caatcattccctccaacgtaaaaag

SEQ ID NO: 4758059 - DNA, 25 bp, Homo sapien
acatacatgctttccctgctgatcg

SEQ ID NO: 4758060 - DNA, 25 bp, Homo sapien
catacatgctttccctgctgatcgt

SEQ ID NO: 4758061 - DNA, 25 bp, Homo sapien
tacatgctttccctgctgatcgtgt

SEQ ID NO: 4758062 - DNA, 25 bp, Homo sapien
atacatgctttccctgctgatcgtg

SEQ ID NO: 4758063 - DNA, 25 bp, Homo sapien
gctgcaagcttggttggcctgctgc

SEQ ID NO: 4758064 - DNA, 25 bp, Homo sapien
gctgtttcgtagcatcatatagcca

SEQ ID NO: 4758065 - DNA, 25 bp, Homo sapien
atttctcttagtctgcaagtcatct

SEQ ID NO: 4758066 - DNA, 25 bp, Homo sapien
tactgcgtgtcacatgacaaggtca

SEQ ID NO: 4758067 - DNA, 25 bp, Homo sapien
agtgttgctatcctgctcatcagca

SEQ ID NO: 4758068 - DNA, 25 bp, Homo sapien
gtgttgctatcctgctcatcagcac

SEQ ID NO: 4758069 - DNA, 25 bp, Homo sapien
tgttgctatcctgctcatcagcact

SEQ ID NO: 4758070 - DNA, 25 bp, Homo sapien
tgtcactcagaaaagctggttcctt

SEQ ID NO: 4758071 - DNA, 25 bp, Homo sapien
tgcagttgaagaatgagagttgctt

SEQ ID NO: 4758072 - DNA, 25 bp, Homo sapien
gaagaatgagagttgcttattacag

SEQ ID NO: 4758073 - DNA, 25 bp, Homo sapien
taggatccgatttaccacgggctgt

SEQ ID NO: 4758074 - DNA, 25 bp, Homo sapien
gttgcttattacagttaggatccga

SEQ ID NO: 4758075 - DNA, 25 bp, Homo sapien
ctagtcccactagcattgaattctt

SEQ ID NO: 4758076 - DNA, 25 bp, Homo sapien
gcctcctgagatctataagaatgat

SEQ ID NO: 4758077 - DNA, 25 bp, Homo sapien
tactggaaaccttccaacatgtatt

SEQ ID NO: 4758078 - DNA, 25 bp, Homo sapien
taccagtgactatttcagtaaagca

SEQ ID NO: 4758079 - DNA, 25 bp, Homo sapien
tgctgctttatctgatgttttatct

SEQ ID NO: 4758080 - DNA, 25 bp, Homo sapien
cacattgagttaatatgcattgaaa

SEQ ID NO: 4758081 - DNA, 25 bp, Homo sapien
gagttaatatgcattgaaatgctgc

SEQ ID NO: 4758082 - DNA, 25 bp, Homo sapien
gaaatgctgctttatctgatgtttt

SEQ ID NO: 4758083 - DNA, 25 bp, Homo sapien
tcctagatgacctgcctcttctgag

SEQ ID NO: 4758084 - DNA, 25 bp, Homo sapien
ctcctagatgacctgcctcttctga

SEQ ID NO: 4758085 - DNA, 25 bp, Homo sapien
ttctgagaaacccatgtatacaaga

SEQ ID NO: 4758086 - DNA, 25 bp, Homo sapien
cctcttctgagaaacccatgtatac

SEQ ID NO: 4758087 - DNA, 25 bp, Homo sapien
tccaaaagtcagtaggttcagagtt

SEQ ID NO: 4758088 - DNA, 25 bp, Homo sapien
gttgtgattcccatagcaaccataa

SEQ ID NO: 4758089 - DNA, 25 bp, Homo sapien
tgtttgtctctaatcccgtgcatgt

SEQ ID NO: 4758090 - DNA, 25 bp, Homo sapien
cgtgcatgttcctctacctatgtaa

SEQ ID NO: 4758091 - DNA, 25 bp, Homo sapien
ccttctgccctatcacattccaagt

SEQ ID NO: 4758092 - DNA, 25 bp, Homo sapien
ccaagtcagtcagatggtcatagcc

SEQ ID NO: 4758093 - DNA, 25 bp, Homo sapien
agccatctctgccagaatgcgccat

SEQ ID NO: 4758094 - DNA, 25 bp, Homo sapien
tcatagagtaaaaaattggagccct

SEQ ID NO: 4758095 - DNA, 25 bp, Homo sapien
atgtcattggcgctctgtgcagaaa

SEQ ID NO: 4758096 - DNA, 25 bp, Homo sapien
ctacctgtatgtcattggcgctctg

SEQ ID NO: 4758097 - DNA, 25 bp, Homo sapien
gtgctttctacctgtatgtcattgg

SEQ ID NO: 4758098 - DNA, 25 bp, Homo sapien
ttggcgctctgtgcagaaatagagg

SEQ ID NO: 4758099 - DNA, 25 bp, Homo sapien
tgtaactcgtagcattgcctcccag

SEQ ID NO: 4758100 - DNA, 25 bp, Homo sapien
taaaaagtatatgcaccatgcggaa

SEQ ID NO: 4758101 - DNA, 25 bp, Homo sapien
tcagatacgtaatcaggagacagct

SEQ ID NO: 4758102 - DNA, 25 bp, Homo sapien
gagacagctatctggccacacttga

SEQ ID NO: 4758103 - DNA, 25 bp, Homo sapien
attgtccttccttttctacatacac

SEQ ID NO: 4758104 - DNA, 25 bp, Homo sapien
ttcctgagatattgtccttcctttt

SEQ ID NO: 4758105 - DNA, 25 bp, Homo sapien
gatattgtccttccttttctacata

SEQ ID NO: 4758106 - DNA, 25 bp, Homo sapien
cttcctgagatattgtccttccttt

SEQ ID NO: 4758107 - DNA, 25 bp, Homo sapien
tgcctgcataccaaagagatgctta

SEQ ID NO: 4758108 - DNA, 25 bp, Homo sapien
gggcaccaaccatcttcaagagctt

SEQ ID NO: 4758109 - DNA, 25 bp, Homo sapien
gagatgcttacacaagagccttggc

SEQ ID NO: 4758110 - DNA, 25 bp, Homo sapien
tggcaatgagtcctgaagtgcttcg

SEQ ID NO: 4758111 - DNA, 25 bp, Homo sapien
gcaaatacaacttgaccggagaaag

SEQ ID NO: 4758112 - DNA, 25 bp, Homo sapien
caagaagatgaagactcctgtggct

SEQ ID NO: 4758113 - DNA, 25 bp, Homo sapien
taaaatgcagatactccagtcatag

SEQ ID NO: 4758114 - DNA, 25 bp, Homo sapien
gaacacagtaatttcccaataggga

SEQ ID NO: 4758115 - DNA, 25 bp, Homo sapien
tgtgcttctggctgaacacgagtgt

SEQ ID NO: 4758116 - DNA, 25 bp, Homo sapien
tctggctgaacacgagtgtcacact

SEQ ID NO: 4758117 - DNA, 25 bp, Homo sapien
caggactcccagataagaacagagc

SEQ ID NO: 4758118 - DNA, 25 bp, Homo sapien
ctcaggactcccagataagaacaga

SEQ ID NO: 4758119 - DNA, 25 bp, Homo sapien
ctcagtttgaaccgcctgcctcaga

SEQ ID NO: 4758120 - DNA, 25 bp, Homo sapien
tcagtttgaaccgcctgcctcagac

SEQ ID NO: 4758121 - DNA, 25 bp, Homo sapien
taattgtgatgagtttcaatcaaca

SEQ ID NO: 4758122 - DNA, 25 bp, Homo sapien
taggggacacaccataagtgagaag

SEQ ID NO: 4758123 - DNA, 25 bp, Homo sapien
tcgaatttcccgaagctcaaagccc

SEQ ID NO: 4758124 - DNA, 25 bp, Homo sapien
taaaaagtaagactgctggcactgc

SEQ ID NO: 4758125 - DNA, 25 bp, Homo sapien
gaaaattgcttatcttgatgccggg

SEQ ID NO: 4758126 - DNA, 25 bp, Homo sapien
tgttggcgttatctgggtagactgt

SEQ ID NO: 4758127 - DNA, 25 bp, Homo sapien
gggtagactgttcactgtctgcaaa

SEQ ID NO: 4758128 - DNA, 25 bp, Homo sapien
cagcagatgttgttggcgttatctg

SEQ ID NO: 4758129 - DNA, 25 bp, Homo sapien
cgttatctgggtagactgttcactg

SEQ ID NO: 4758130 - DNA, 25 bp, Homo sapien
ttcatccactctcacagggaattgc

SEQ ID NO: 4758131 - DNA, 25 bp, Homo sapien
cagttcatccactctcacagggaat

SEQ ID NO: 4758132 - DNA, 25 bp, Homo sapien
gttcatccactctcacagggaattg

SEQ ID NO: 4758133 - DNA, 25 bp, Homo sapien
agttcatccactctcacagggaatt

SEQ ID NO: 4758134 - DNA, 25 bp, Homo sapien
aggatgtgctttacacagagtaatg

SEQ ID NO: 4758135 - DNA, 25 bp, Homo sapien
gagtaatgtgttcaaaaagtgctga

SEQ ID NO: 4758136 - DNA, 25 bp, Homo sapien
acctgagctgttccccctttgtttg

SEQ ID NO: 4758137 - DNA, 25 bp, Homo sapien
gctttacacagagtaatgtgttcaa

SEQ ID NO: 4758138 - DNA, 25 bp, Homo sapien
tgtgagtaaccccacaatcctggct

SEQ ID NO: 4758139 - DNA, 25 bp, Homo sapien
tagttgcattactatgcgtcccctg

SEQ ID NO: 4758140 - DNA, 25 bp, Homo sapien
cacagatgccgccatttggtgggtt

SEQ ID NO: 4758141 - DNA, 25 bp, Homo sapien
gattccaaatatcgaggaccaggga

SEQ ID NO: 4758142 - DNA, 25 bp, Homo sapien
tgattttctcatcaaaactatccat

SEQ ID NO: 4758143 - DNA, 25 bp, Homo sapien
ctgattttctcatcaaaactatcca

SEQ ID NO: 4758144 - DNA, 25 bp, Homo sapien
aagttggtaataacagtgcctgctt

SEQ ID NO: 4758145 - DNA, 25 bp, Homo sapien
ctcctcagtgttgggagtaagcccc

SEQ ID NO: 4758146 - DNA, 25 bp, Homo sapien
gaagaagaacaataatcttaactcc

SEQ ID NO: 4758147 - DNA, 25 bp, Homo sapien
taacgcccaagctggaagcactggg

SEQ ID NO: 4758148 - DNA, 25 bp, Homo sapien
tacaaggtctaccacgacctggtct

SEQ ID NO: 4758149 - DNA, 25 bp, Homo sapien
gcttcctaaaacaggctacaaggtc

SEQ ID NO: 4758150 - DNA, 25 bp, Homo sapien
ggtctaccacgacctggtcttggtc

SEQ ID NO: 4758151 - DNA, 25 bp, Homo sapien
aaacaggctacaaggtctaccacga

SEQ ID NO: 4758152 - DNA, 25 bp, Homo sapien
tgtttgctctactaacaggcatttc

SEQ ID NO: 4758153 - DNA, 25 bp, Homo sapien
tcagcaagggaatttaacagttcaa

SEQ ID NO: 4758154 - DNA, 25 bp, Homo sapien
tggttcagcaagggaatttaacagt

SEQ ID NO: 4758155 - DNA, 25 bp, Homo sapien
ttgaaatgtttgctctactaacagg

SEQ ID NO: 4758156 - DNA, 25 bp, Homo sapien
gagaattgtctgtgttcaactcccc

SEQ ID NO: 4758157 - DNA, 25 bp, Homo sapien
ccagctatatctctacggaaggcaa

SEQ ID NO: 4758158 - DNA, 25 bp, Homo sapien
caatattctgcttagccacagagag

SEQ ID NO: 4758159 - DNA, 25 bp, Homo sapien
cagagaggaggaagttaatctgctg

SEQ ID NO: 4758160 - DNA, 25 bp, Homo sapien
cctacccgcctacctggacatacag

SEQ ID NO: 4758161 - DNA, 25 bp, Homo sapien
tacccgcctacctggacatacagca

SEQ ID NO: 4758162 - DNA, 25 bp, Homo sapien
atacagcatataatgcagccagcat

SEQ ID NO: 4758163 - DNA, 25 bp, Homo sapien
catacagcatataatgcagccagca

SEQ ID NO: 4758164 - DNA, 25 bp, Homo sapien
gatttacgcagtaccaagacactgg

SEQ ID NO: 4758165 - DNA, 25 bp, Homo sapien
gataagtcacactgtggagcacaaa

SEQ ID NO: 4758166 - DNA, 25 bp, Homo sapien
tgctggctgatgcttgaaaatgtct

SEQ ID NO: 4758167 - DNA, 25 bp, Homo sapien
tctttctgcaaggatgtgatgtccc

SEQ ID NO: 4758168 - DNA, 25 bp, Homo sapien
tttgctgtggtatgaattggtgctg

SEQ ID NO: 4758169 - DNA, 25 bp, Homo sapien
ttttgctgtggtatgaattggtgct

SEQ ID NO: 4758170 - DNA, 25 bp, Homo sapien
ttgctgtggtatgaattggtgctgg

SEQ ID NO: 4758171 - DNA, 25 bp, Homo sapien
tgagagtactggtatgttcagctgc

SEQ ID NO: 4758172 - DNA, 25 bp, Homo sapien
ctctgggaagagatgtaagacgtac

SEQ ID NO: 4758173 - DNA, 25 bp, Homo sapien
agagatgtaagacgtacttcatata

SEQ ID NO: 4758174 - DNA, 25 bp, Homo sapien
tcctctacatctgagagtactggta

SEQ ID NO: 4758175 - DNA, 25 bp, Homo sapien
cttctgggcagctgtcatatcttct

SEQ ID NO: 4758176 - DNA, 25 bp, Homo sapien
agctgtcatatcttctggtgatgag

SEQ ID NO: 4758177 - DNA, 25 bp, Homo sapien
gcagctgtcatatcttctggtgatg

SEQ ID NO: 4758178 - DNA, 25 bp, Homo sapien
ttctgggcagctgtcatatcttctg

SEQ ID NO: 4758179 - DNA, 25 bp, Homo sapien
tagaaagtaacacgtacaatgatgc

SEQ ID NO: 4758180 - DNA, 25 bp, Homo sapien
ttagaaagtaacacgtacaatgatg

SEQ ID NO: 4758181 - DNA, 25 bp, Homo sapien
tccagaggactcaactctattccca

SEQ ID NO: 4758182 - DNA, 25 bp, Homo sapien
caggatccagaggactcaactctat

SEQ ID NO: 4758183 - DNA, 25 bp, Homo sapien
gatccagaggactcaactctattcc

SEQ ID NO: 4758184 - DNA, 25 bp, Homo sapien
ggatccagaggactcaactctattc

SEQ ID NO: 4758185 - DNA, 25 bp, Homo sapien
catccattgatgaaacgtaaagtaa

SEQ ID NO: 4758186 - DNA, 25 bp, Homo sapien
tgaatgagtcatggaagccaatggg

SEQ ID NO: 4758187 - DNA, 25 bp, Homo sapien
tgccagagatggtaggacggtatca

SEQ ID NO: 4758188 - DNA, 25 bp, Homo sapien
gacggtatcattcgaagaggacttg

SEQ ID NO: 4758189 - DNA, 25 bp, Homo sapien
catgagcactgactatggggaagtt

SEQ ID NO: 4758190 - DNA, 25 bp, Homo sapien
tggtatcaagaaggagcaaaggaca

SEQ ID NO: 4758191 - DNA, 25 bp, Homo sapien
tgaggttctgctgagttattaatgg

SEQ ID NO: 4758192 - DNA, 25 bp, Homo sapien
gaagttctgagtgaggttctgctga

SEQ ID NO: 4758193 - DNA, 25 bp, Homo sapien
tttgtcactttttgtgacacacttg

SEQ ID NO: 4758194 - DNA, 25 bp, Homo sapien
caaccaagtccctcacagtgatttt

SEQ ID NO: 4758195 - DNA, 25 bp, Homo sapien
gacacacttgggctctcttgttctt

SEQ ID NO: 4758196 - DNA, 25 bp, Homo sapien
ctcccaaccaagtccctcacagtga

SEQ ID NO: 4758197 - DNA, 25 bp, Homo sapien
caatttgggctaggtttagctggaa

SEQ ID NO: 4758198 - DNA, 25 bp, Homo sapien
tctgtactcaagtgggcctgtacag

SEQ ID NO: 4758199 - DNA, 25 bp, Homo sapien
taggcttagctgaaatggctcatct

SEQ ID NO: 4758200 - DNA, 25 bp, Homo sapien
gctggaagtgtcttgtaggcttagc

SEQ ID NO: 4758201 - DNA, 25 bp, Homo sapien
tccaaaatcaaggggtgcatatctg

SEQ ID NO: 4758202 - DNA, 25 bp, Homo sapien
aaaatcaaggggtgcatatctggtg

SEQ ID NO: 4758203 - DNA, 25 bp, Homo sapien
caaaatcaaggggtgcatatctggt

SEQ ID NO: 4758204 - DNA, 25 bp, Homo sapien
agtccaaaatcaaggggtgcatatc

SEQ ID NO: 4758205 - DNA, 25 bp, Homo sapien
tatgagcattgatcacaccatcgca

SEQ ID NO: 4758206 - DNA, 25 bp, Homo sapien
catcgcactgcaacctggagggcag

SEQ ID NO: 4758207 - DNA, 25 bp, Homo sapien
aagctactatgagcattgatcacac

SEQ ID NO: 4758208 - DNA, 25 bp, Homo sapien
ctcaggaggtttatttaggaggatc

SEQ ID NO: 4758209 - DNA, 25 bp, Homo sapien
agtccaggatgcttgcacagacatc

SEQ ID NO: 4758210 - DNA, 25 bp, Homo sapien
cacagacatcgagttggtccccact

SEQ ID NO: 4758211 - DNA, 25 bp, Homo sapien
cactcatcacagtccacagggatca

SEQ ID NO: 4758212 - DNA, 25 bp, Homo sapien
tccacagggatcaaaacctgtttcc

SEQ ID NO: 4758213 - DNA, 25 bp, Homo sapien
cactttgattacataaccatttggg

SEQ ID NO: 4758214 - DNA, 25 bp, Homo sapien
tgttaagcgtgacatgacatgacca

SEQ ID NO: 4758215 - DNA, 25 bp, Homo sapien
ttgggactcatagcccataaaaatt

SEQ ID NO: 4758216 - DNA, 25 bp, Homo sapien
ctgcacatgtgttaagcgtgacatg

SEQ ID NO: 4758217 - DNA, 25 bp, Homo sapien
taaatgatgatgaggcctgctgtgc

SEQ ID NO: 4758218 - DNA, 25 bp, Homo sapien
tagcagggctacgtcaatttaatac

SEQ ID NO: 4758219 - DNA, 25 bp, Homo sapien
gaagtttacccaaatagcgctcggc

SEQ ID NO: 4758220 - DNA, 25 bp, Homo sapien
gaattagtaaggtggctacaccgcc

SEQ ID NO: 4758221 - DNA, 25 bp, Homo sapien
tcagtccaagtgatcacaaaagaaa

SEQ ID NO: 4758222 - DNA, 25 bp, Homo sapien
cacagatgtcatgtgaaaacgcaca

SEQ ID NO: 4758223 - DNA, 25 bp, Homo sapien
tcacattgtggatccgctaacaggc

SEQ ID NO: 4758224 - DNA, 25 bp, Homo sapien
aagaaatcttctgagccggaggcgg

SEQ ID NO: 4758225 - DNA, 25 bp, Homo sapien
agcttcatgactacgcggagcggga

SEQ ID NO: 4758226 - DNA, 25 bp, Homo sapien
catcaaaactgttaacatagcggcg

SEQ ID NO: 4758227 - DNA, 25 bp, Homo sapien
aagggatggttttctcggcagagca

SEQ ID NO: 4758228 - DNA, 25 bp, Homo sapien
caccatgcgaggtaagcgagtctgc

SEQ ID NO: 4758229 - DNA, 25 bp, Homo sapien
aaggtgttgatgtctttcgggagtt

SEQ ID NO: 4758230 - DNA, 25 bp, Homo sapien
ccaggcgcagttccccgaattcgct

SEQ ID NO: 4758231 - DNA, 25 bp, Homo sapien
aaagttgcgggaaggtgttgatgtc

SEQ ID NO: 4758232 - DNA, 25 bp, Homo sapien
atggcctgggcgtagaaagttgcgg

SEQ ID NO: 4758233 - DNA, 25 bp, Homo sapien
ggagaaagccgaaagagggatgcct

SEQ ID NO: 4758234 - DNA, 25 bp, Homo sapien
tcgggtgcggaagcggacgcgggat

SEQ ID NO: 4758235 - DNA, 25 bp, Homo sapien
tttgcttgtcgctctcgggtgcgga

SEQ ID NO: 4758236 - DNA, 25 bp, Homo sapien
cagtccttgagttgcactgaatctt

SEQ ID NO: 4758237 - DNA, 25 bp, Homo sapien
gcaggcatgtcccttcgctggagta

SEQ ID NO: 4758238 - DNA, 25 bp, Homo sapien
actcgccaggttacgaggcccacta

SEQ ID NO: 4758239 - DNA, 25 bp, Homo sapien
aggagcagtttggaagcgcccggcg

SEQ ID NO: 4758240 - DNA, 25 bp, Homo sapien
gaggcccactaagcgtcctggccag

SEQ ID NO: 4758241 - DNA, 25 bp, Homo sapien
cctgggtcttgacaacagaaagtta

SEQ ID NO: 4758242 - DNA, 25 bp, Homo sapien
ttagtaacggccagctccagacctt

SEQ ID NO: 4758243 - DNA, 25 bp, Homo sapien
tgacaacagaaagttagtaacggcc

SEQ ID NO: 4758244 - DNA, 25 bp, Homo sapien
gctccagaccttcttgcatcccaga

SEQ ID NO: 4758245 - DNA, 25 bp, Homo sapien
ttcgccacggcggtcgctttgagga

SEQ ID NO: 4758246 - DNA, 25 bp, Homo sapien
agcttgatctagcatctcctgaagg

SEQ ID NO: 4758247 - DNA, 25 bp, Homo sapien
gcggtcgctttgaggactccagaag

SEQ ID NO: 4758248 - DNA, 25 bp, Homo sapien
agatgactgtcctggttcgccacgg

SEQ ID NO: 4758249 - DNA, 25 bp, Homo sapien
ggattgaaagccaggcgctggtcct

SEQ ID NO: 4758250 - DNA, 25 bp, Homo sapien
gattgaaagccaggcgctggtcctc

SEQ ID NO: 4758251 - DNA, 25 bp, Homo sapien
aaggattgaaagccaggcgctggtc

SEQ ID NO: 4758252 - DNA, 25 bp, Homo sapien
ggaaggattgaaagccaggcgctgg

SEQ ID NO: 4758253 - DNA, 25 bp, Homo sapien
cagtttaagcccacagacctatcaa

SEQ ID NO: 4758254 - DNA, 25 bp, Homo sapien
aggcagctctcaggcggccttaggg

SEQ ID NO: 4758255 - DNA, 25 bp, Homo sapien
acctatcaaagagggcgccagcctc

SEQ ID NO: 4758256 - DNA, 25 bp, Homo sapien
tgagaaaaccagtttaagcccacag

SEQ ID NO: 4758257 - DNA, 25 bp, Homo sapien
cataaccctctgcattagcatgaat

SEQ ID NO: 4758258 - DNA, 25 bp, Homo sapien
actcttggccataaccctctgcatt

SEQ ID NO: 4758259 - DNA, 25 bp, Homo sapien
caggaccacagagtcatacctttta

SEQ ID NO: 4758260 - DNA, 25 bp, Homo sapien
ggccataaccctctgcattagcatg

SEQ ID NO: 4758261 - DNA, 25 bp, Homo sapien
tcttcatattcactaatcctgtcag

SEQ ID NO: 4758262 - DNA, 25 bp, Homo sapien
catattcactaatcctgtcagtctg

SEQ ID NO: 4758263 - DNA, 25 bp, Homo sapien
tattcactaatcctgtcagtctgtt

SEQ ID NO: 4758264 - DNA, 25 bp, Homo sapien
ttagatatagtggtatgtttcttca

SEQ ID NO: 4758265 - DNA, 25 bp, Homo sapien
tatagggtagcaggttgacttcatg

SEQ ID NO: 4758266 - DNA, 25 bp, Homo sapien
caggttgacttcatgcacttgaaga

SEQ ID NO: 4758267 - DNA, 25 bp, Homo sapien
cgtgtttatagggtagcaggttgac

SEQ ID NO: 4758268 - DNA, 25 bp, Homo sapien
cagcagcgtgtttatagggtagcag

SEQ ID NO: 4758269 - DNA, 25 bp, Homo sapien
gtccgtctggcggtgggaaaagcag

SEQ ID NO: 4758270 - DNA, 25 bp, Homo sapien
tgtctcctaatctctcctcgcacag

SEQ ID NO: 4758271 - DNA, 25 bp, Homo sapien
tgccaggccaaagtcttgttaccct

SEQ ID NO: 4758272 - DNA, 25 bp, Homo sapien
gaatccaggatttagtgtgccaggc

SEQ ID NO: 4758273 - DNA, 25 bp, Homo sapien
gttggtgtaccctgaatttgaagcc

SEQ ID NO: 4758274 - DNA, 25 bp, Homo sapien
taggtttagcaaagtcaaatctatc

SEQ ID NO: 4758275 - DNA, 25 bp, Homo sapien
ttttggtcgttgactgaaaattctc

SEQ ID NO: 4758276 - DNA, 25 bp, Homo sapien
gaagccaaatacatccccaagatta

SEQ ID NO: 4758277 - DNA, 25 bp, Homo sapien
cactggtcatgttatggatgctgct

SEQ ID NO: 4758278 - DNA, 25 bp, Homo sapien
ggtcatgttatggatgctgctgtga

SEQ ID NO: 4758279 - DNA, 25 bp, Homo sapien
taaaggtgacactggtcatgttatg

SEQ ID NO: 4758280 - DNA, 25 bp, Homo sapien
gtgacactggtcatgttatggatgc

SEQ ID NO: 4758281 - DNA, 25 bp, Homo sapien
ctcccattctgggaatatgatgaga

SEQ ID NO: 4758282 - DNA, 25 bp, Homo sapien
cattctgggaatatgatgagatcta

SEQ ID NO: 4758283 - DNA, 25 bp, Homo sapien
attctgggaatatgatgagatctac

SEQ ID NO: 4758284 - DNA, 25 bp, Homo sapien
cccattctgggaatatgatgagatc

SEQ ID NO: 4758285 - DNA, 25 bp, Homo sapien
gtggcagtgacagcaacatccccaa

SEQ ID NO: 4758286 - DNA, 25 bp, Homo sapien
ggcagtgacagcaacatccccaacc

SEQ ID NO: 4758287 - DNA, 25 bp, Homo sapien
gcagtgacagcaacatccccaacct

SEQ ID NO: 4758288 - DNA, 25 bp, Homo sapien
tggcagtgacagcaacatccccaac

SEQ ID NO: 4758289 - DNA, 25 bp, Homo sapien
cgttgtctttagcatcattaatgag

SEQ ID NO: 4758290 - DNA, 25 bp, Homo sapien
taatgagtgcgttgtctttagcatc

SEQ ID NO: 4758291 - DNA, 25 bp, Homo sapien
caatctaatgagtgcgttgtcttta

SEQ ID NO: 4758292 - DNA, 25 bp, Homo sapien
cctccaatctaatgagtgcgttgtc

SEQ ID NO: 4758293 - DNA, 25 bp, Homo sapien
gcgcatcacaagactggcaatttgg

SEQ ID NO: 4758294 - DNA, 25 bp, Homo sapien
tgtaaccagtcagtcacgcataagt

SEQ ID NO: 4758295 - DNA, 25 bp, Homo sapien
tctccatatagatcagcgggctctg

SEQ ID NO: 4758296 - DNA, 25 bp, Homo sapien
cacgcataagttgtgacagcgcatc

SEQ ID NO: 4758297 - DNA, 25 bp, Homo sapien
tgagactttgttcccactcgtaagg

SEQ ID NO: 4758298 - DNA, 25 bp, Homo sapien
tccagaggaagcatcaagaactgcc

SEQ ID NO: 4758299 - DNA, 25 bp, Homo sapien
tggaagtgccatgaaagaaaacaca

SEQ ID NO: 4758300 - DNA, 25 bp, Homo sapien
tctctgagcgagtggttcctttcat

SEQ ID NO: 4758301 - DNA, 25 bp, Homo sapien
ctggtttctgcataacatcatattg

SEQ ID NO: 4758302 - DNA, 25 bp, Homo sapien
gtttctgcataacatcatattgcat

SEQ ID NO: 4758303 - DNA, 25 bp, Homo sapien
ggtttctgcataacatcatattgca

SEQ ID NO: 4758304 - DNA, 25 bp, Homo sapien
tggtttctgcataacatcatattgc

SEQ ID NO: 4758305 - DNA, 25 bp, Homo sapien
gaacagaggcgccattatgatgcct

SEQ ID NO: 4758306 - DNA, 25 bp, Homo sapien
cacagcttttattgacggcctcctc

SEQ ID NO: 4758307 - DNA, 25 bp, Homo sapien
tgtctggcagtctcattatcatacc

SEQ ID NO: 4758308 - DNA, 25 bp, Homo sapien
gatgtccgttctagatttccacagc

SEQ ID NO: 4758309 - DNA, 25 bp, Homo sapien
caggaacagctttgactcacacata

SEQ ID NO: 4758310 - DNA, 25 bp, Homo sapien
gaacagctttgactcacacatacaa

SEQ ID NO: 4758311 - DNA, 25 bp, Homo sapien
gcaggaacagctttgactcacacat

SEQ ID NO: 4758312 - DNA, 25 bp, Homo sapien
ggagcaggaacagctttgactcaca

SEQ ID NO: 4758313 - DNA, 25 bp, Homo sapien
gcaccttctccgaacacccaaacat

SEQ ID NO: 4758314 - DNA, 25 bp, Homo sapien
caggcagacaattcccaaagctgca

SEQ ID NO: 4758315 - DNA, 25 bp, Homo sapien
caatggatccattttctgtagacag

SEQ ID NO: 4758316 - DNA, 25 bp, Homo sapien
cagacaattcccaaagctgcacatg

SEQ ID NO: 4758317 - DNA, 25 bp, Homo sapien
aactactctccctagcataatctca

SEQ ID NO: 4758318 - DNA, 25 bp, Homo sapien
actactctccctagcataatctcaa

SEQ ID NO: 4758319 - DNA, 25 bp, Homo sapien
ctactctccctagcataatctcaaa

SEQ ID NO: 4758320 - DNA, 25 bp, Homo sapien
gaaactgaccatagccatccatact

SEQ ID NO: 4758321 - DNA, 25 bp, Homo sapien
ttcagaaactgaccatagccatcca

SEQ ID NO: 4758322 - DNA, 25 bp, Homo sapien
aaataggaagtagatgactgtttac

SEQ ID NO: 4758323 - DNA, 25 bp, Homo sapien
tttacaatggcccaaattttgatag

SEQ ID NO: 4758324 - DNA, 25 bp, Homo sapien
tggatctccttggaaccctcaatcc

SEQ ID NO: 4758325 - DNA, 25 bp, Homo sapien
ttggatctccttggaaccctcaatc

SEQ ID NO: 4758326 - DNA, 25 bp, Homo sapien
gatctccttggaaccctcaatcccc

SEQ ID NO: 4758327 - DNA, 25 bp, Homo sapien
ctccttggaaccctcaatcccctgc

SEQ ID NO: 4758328 - DNA, 25 bp, Homo sapien
gaccaccaagtactttggaatatcg

SEQ ID NO: 4758329 - DNA, 25 bp, Homo sapien
accaagtactttggaatatcgccat

SEQ ID NO: 4758330 - DNA, 25 bp, Homo sapien
ccaccaagtactttggaatatcgcc

SEQ ID NO: 4758331 - DNA, 25 bp, Homo sapien
atggttgaccaccaagtactttgga

SEQ ID NO: 4758332 - DNA, 25 bp, Homo sapien
tgaagagccagacccaaatggctag

SEQ ID NO: 4758333 - DNA, 25 bp, Homo sapien
caaatggctagtaatggtcagcaac

SEQ ID NO: 4758334 - DNA, 25 bp, Homo sapien
atctgaagagccagacccaaatggc

SEQ ID NO: 4758335 - DNA, 25 bp, Homo sapien
ccagacccaaatggctagtaatggt

SEQ ID NO: 4758336 - DNA, 25 bp, Homo sapien
ccccagatgctgatagacgtgagag

SEQ ID NO: 4758337 - DNA, 25 bp, Homo sapien
cagagtattacagagaagaccccag

SEQ ID NO: 4758338 - DNA, 25 bp, Homo sapien
tctagcatggtatagcggccgaagt

SEQ ID NO: 4758339 - DNA, 25 bp, Homo sapien
tacaacttgggctactgagaccatc

SEQ ID NO: 4758340 - DNA, 25 bp, Homo sapien
tgtcaaatcagaaccgtgcactagc

SEQ ID NO: 4758341 - DNA, 25 bp, Homo sapien
tatagccacgtcacacagataagag

SEQ ID NO: 4758342 - DNA, 25 bp, Homo sapien
ttcactaagtgaaatgacccagcca

SEQ ID NO: 4758343 - DNA, 25 bp, Homo sapien
gggacttggaagcaactaagcaatt

SEQ ID NO: 4758344 - DNA, 25 bp, Homo sapien
ttctgtaactctgcaaggcttctcc

SEQ ID NO: 4758345 - DNA, 25 bp, Homo sapien
tcccccatgcgtcacaacaaagaaa

SEQ ID NO: 4758346 - DNA, 25 bp, Homo sapien
catgcgtcacaacaaagaaaattct

SEQ ID NO: 4758347 - DNA, 25 bp, Homo sapien
aggcttctcccccatgcgtcacaac

SEQ ID NO: 4758348 - DNA, 25 bp, Homo sapien
ccgtgcaatccgtgtctgagacatt

SEQ ID NO: 4758349 - DNA, 25 bp, Homo sapien
gggcctccggtgctcttggtaataa

SEQ ID NO: 4758350 - DNA, 25 bp, Homo sapien
cccaggatgtggcattctaatgaaa

SEQ ID NO: 4758351 - DNA, 25 bp, Homo sapien
tagcctttggagagcgccatttgct

SEQ ID NO: 4758352 - DNA, 25 bp, Homo sapien
tcttcgacatgtaccatctgcagcc

SEQ ID NO: 4758353 - DNA, 25 bp, Homo sapien
actgacttcttcttcgacatgtacc

SEQ ID NO: 4758354 - DNA, 25 bp, Homo sapien
gacttcttcttcgacatgtaccatc

SEQ ID NO: 4758355 - DNA, 25 bp, Homo sapien
cttcttcgacatgtaccatctgcag

SEQ ID NO: 4758356 - DNA, 25 bp, Homo sapien
tctgctggtcccatgtattctcctt

SEQ ID NO: 4758357 - DNA, 25 bp, Homo sapien
tgtctcggtgccacatctgctggtc

SEQ ID NO: 4758358 - DNA, 25 bp, Homo sapien
tattttgtctcggtgccacatctgc

SEQ ID NO: 4758359 - DNA, 25 bp, Homo sapien
cggtgccacatctgctggtcccatg

SEQ ID NO: 4758360 - DNA, 25 bp, Homo sapien
ctttgtataaagaattaattcccag

SEQ ID NO: 4758361 - DNA, 25 bp, Homo sapien
ctaatggaaagattactctactgat

SEQ ID NO: 4758362 - DNA, 25 bp, Homo sapien
gtaaatgtcactcctgctagctctt

SEQ ID NO: 4758363 - DNA, 25 bp, Homo sapien
ccagagtcatatttccttctaatgg

SEQ ID NO: 4758364 - DNA, 25 bp, Homo sapien
gacggtgagtacactgatttttcta

SEQ ID NO: 4758365 - DNA, 25 bp, Homo sapien
tgctgtaaataactggagacggtga

SEQ ID NO: 4758366 - DNA, 25 bp, Homo sapien
tatatgcttgtggaaggtctaatac

SEQ ID NO: 4758367 - DNA, 25 bp, Homo sapien
taagcatcttgacgggtcattggtg

SEQ ID NO: 4758368 - DNA, 25 bp, Homo sapien
gagcaagttgttgaaactgatgctt

SEQ ID NO: 4758369 - DNA, 25 bp, Homo sapien
ggcaggagcaagttgttgaaactga

SEQ ID NO: 4758370 - DNA, 25 bp, Homo sapien
gaaaatccaaggtgtcatgagctat

SEQ ID NO: 4758371 - DNA, 25 bp, Homo sapien
caaggtgtcatgagctatagcaaca

SEQ ID NO: 4758372 - DNA, 25 bp, Homo sapien
tccaatcctgtcaatcaacaagtgg

SEQ ID NO: 4758373 - DNA, 25 bp, Homo sapien
gctccaatcctgtcaatcaacaagt

SEQ ID NO: 4758374 - DNA, 25 bp, Homo sapien
tgcaaaaatacggaaccagctccaa

SEQ ID NO: 4758375 - DNA, 25 bp, Homo sapien
aatacggaaccagctccaatcctgt

SEQ ID NO: 4758376 - DNA, 25 bp, Homo sapien
caaagctggaagctacctgacttca

SEQ ID NO: 4758377 - DNA, 25 bp, Homo sapien
caaaagacctaggatagccaaaaca

SEQ ID NO: 4758378 - DNA, 25 bp, Homo sapien
gggtggcaagtgataaaagactaca

SEQ ID NO: 4758379 - DNA, 25 bp, Homo sapien
tgcaatccctatcaatgacatgctt

SEQ ID NO: 4758380 - DNA, 25 bp, Homo sapien
cttcagctcgaaatgtgcttttcct

SEQ ID NO: 4758381 - DNA, 25 bp, Homo sapien
cagaggtcagtgtctaggagaaccc

SEQ ID NO: 4758382 - DNA, 25 bp, Homo sapien
cttgttcgaggtagggcaaccaggc

SEQ ID NO: 4758383 - DNA, 25 bp, Homo sapien
taatagtacccctgagctttaagga

SEQ ID NO: 4758384 - DNA, 25 bp, Homo sapien
tgaggatggagctgcaaagtgccct

SEQ ID NO: 4758385 - DNA, 25 bp, Homo sapien
gaatttctacccgtctcccttgctg

SEQ ID NO: 4758386 - DNA, 25 bp, Homo sapien
tcctttcaggggaatagtcatttct

SEQ ID NO: 4758387 - DNA, 25 bp, Homo sapien
atttctacccgtctcccttgctgga

SEQ ID NO: 4758388 - DNA, 25 bp, Homo sapien
ttctacccgtctcccttgctggagg

SEQ ID NO: 4758389 - DNA, 25 bp, Homo sapien
cggtccaaacaccattcctcttgat

SEQ ID NO: 4758390 - DNA, 25 bp, Homo sapien
taattgcatcttcccccaaattggc

SEQ ID NO: 4758391 - DNA, 25 bp, Homo sapien
ccaaattggccggtccaaacaccat

SEQ ID NO: 4758392 - DNA, 25 bp, Homo sapien
gcagcaggagttacaatgatgtttt

SEQ ID NO: 4758393 - DNA, 25 bp, Homo sapien
tttataacagatggatctgtcaaat

SEQ ID NO: 4758394 - DNA, 25 bp, Homo sapien
agatggatctgtcaaattttctcca

SEQ ID NO: 4758395 - DNA, 25 bp, Homo sapien
gatggatctgtcaaattttctccaa

SEQ ID NO: 4758396 - DNA, 25 bp, Homo sapien
ggatctgtcaaattttctccaacac

SEQ ID NO: 4758397 - DNA, 25 bp, Homo sapien
tattggcactcccttggaagaaagc

SEQ ID NO: 4758398 - DNA, 25 bp, Homo sapien
tctttctctcaaagcggtagggaac

SEQ ID NO: 4758399 - DNA, 25 bp, Homo sapien
gtagggaaccacagcacactgagca

SEQ ID NO: 4758400 - DNA, 25 bp, Homo sapien
gaataaactgctcgagtatttcaca

SEQ ID NO: 4758401 - DNA, 25 bp, Homo sapien
attgctcatgatgccccaggactgt

SEQ ID NO: 4758402 - DNA, 25 bp, Homo sapien
ttgctcatgatgccccaggactgtc

SEQ ID NO: 4758403 - DNA, 25 bp, Homo sapien
tggctttcagcatagaatcccagaa

SEQ ID NO: 4758404 - DNA, 25 bp, Homo sapien
ggctttcagcatagaatcccagaac

SEQ ID NO: 4758405 - DNA, 25 bp, Homo sapien
gctttcagcatagaatcccagaacc

SEQ ID NO: 4758406 - DNA, 25 bp, Homo sapien
tttcagcatagaatcccagaaccag

SEQ ID NO: 4758407 - DNA, 25 bp, Homo sapien
accactggttggctgaatggcagta

SEQ ID NO: 4758408 - DNA, 25 bp, Homo sapien
taggtccagtgagagaaagccaaca

SEQ ID NO: 4758409 - DNA, 25 bp, Homo sapien
tccccgagtgtactcataggtccag

SEQ ID NO: 4758410 - DNA, 25 bp, Homo sapien
gcagtagattaagaaaacttccagg

SEQ ID NO: 4758411 - DNA, 25 bp, Homo sapien
gagtaccagacccaactcttcttgc

SEQ ID NO: 4758412 - DNA, 25 bp, Homo sapien
ttttatgagtaccagacccaactct

SEQ ID NO: 4758413 - DNA, 25 bp, Homo sapien
tgctgtgctctataaagttccttgt

SEQ ID NO: 4758414 - DNA, 25 bp, Homo sapien
gctgtgctctataaagttccttgta

SEQ ID NO: 4758415 - DNA, 25 bp, Homo sapien
tgtagggtatggtttgtggtttcac

SEQ ID NO: 4758416 - DNA, 25 bp, Homo sapien
cttggtgtgtagggtatggtttgtg

SEQ ID NO: 4758417 - DNA, 25 bp, Homo sapien
tgtgtagggtatggtttgtggtttc

SEQ ID NO: 4758418 - DNA, 25 bp, Homo sapien
tggtgtgtagggtatggtttgtggt

SEQ ID NO: 4758419 - DNA, 25 bp, Homo sapien
tgtccgcacaacctcaggaagaaag

SEQ ID NO: 4758420 - DNA, 25 bp, Homo sapien
caatgaaaacttgtcccggcttgag

SEQ ID NO: 4758421 - DNA, 25 bp, Homo sapien
gaccaagtgctgacgactctcatag

SEQ ID NO: 4758422 - DNA, 25 bp, Homo sapien
tctcctctcgggacaatacctggat

SEQ ID NO: 4758423 - DNA, 25 bp, Homo sapien
cctccaacctgtagacagttatttc

SEQ ID NO: 4758424 - DNA, 25 bp, Homo sapien
ccaacctgtagacagttatttcttc

SEQ ID NO: 4758425 - DNA, 25 bp, Homo sapien
ctctcctccaacctgtagacagtta

SEQ ID NO: 4758426 - DNA, 25 bp, Homo sapien
ctgtagacagttatttcttctcctg

SEQ ID NO: 4758427 - DNA, 25 bp, Homo sapien
caaacagttggactggtgtaaatgg

SEQ ID NO: 4758428 - DNA, 25 bp, Homo sapien
aaacagttggactggtgtaaatggt

SEQ ID NO: 4758429 - DNA, 25 bp, Homo sapien
gaagaccgattttaattagaagcga

SEQ ID NO: 4758430 - DNA, 25 bp, Homo sapien
gagccgaagaccgattttaattaga

SEQ ID NO: 4758431 - DNA, 25 bp, Homo sapien
taattagaagcgagtgatctgcatt

SEQ ID NO: 4758432 - DNA, 25 bp, Homo sapien
tttccagagagagccgaagaccgat

SEQ ID NO: 4758433 - DNA, 25 bp, Homo sapien
ttttcaagtcgcgagccatgtcagt

SEQ ID NO: 4758434 - DNA, 25 bp, Homo sapien
gccatgtcagtaacacagaatttgt

SEQ ID NO: 4758435 - DNA, 25 bp, Homo sapien
cagacatttagctcagctgacatgt

SEQ ID NO: 4758436 - DNA, 25 bp, Homo sapien
tcagctgacatgtctatgtgcatat

SEQ ID NO: 4758437 - DNA, 25 bp, Homo sapien
atggtgaggctcttgagggcttttt

SEQ ID NO: 4758438 - DNA, 25 bp, Homo sapien
tgatggtgaggctcttgagggcttt

SEQ ID NO: 4758439 - DNA, 25 bp, Homo sapien
tggtgaggctcttgagggcttttta

SEQ ID NO: 4758440 - DNA, 25 bp, Homo sapien
aatgatggtgaggctcttgagggct

SEQ ID NO: 4758441 - DNA, 25 bp, Homo sapien
aaattagagaggagattggcatttt

SEQ ID NO: 4758442 - DNA, 25 bp, Homo sapien
gtcaactccaattgaacttttcagc

SEQ ID NO: 4758443 - DNA, 25 bp, Homo sapien
tgtcaactccaattgaacttttcag

SEQ ID NO: 4758444 - DNA, 25 bp, Homo sapien
tgctcaaatgcacaagtggccacag

SEQ ID NO: 4758445 - DNA, 25 bp, Homo sapien
tgccctgctcaaatgcacaagtggc

SEQ ID NO: 4758446 - DNA, 25 bp, Homo sapien
ttgccctgctcaaatgcacaagtgg

SEQ ID NO: 4758447 - DNA, 25 bp, Homo sapien
cctgctcaaatgcacaagtggccac

SEQ ID NO: 4758448 - DNA, 25 bp, Homo sapien
ggagttcctattgaggttggtgctc

SEQ ID NO: 4758449 - DNA, 25 bp, Homo sapien
ttggtgctcctggaattccacaaag

SEQ ID NO: 4758450 - DNA, 25 bp, Homo sapien
gagttcctattgaggttggtgctcc

SEQ ID NO: 4758451 - DNA, 25 bp, Homo sapien
gctcctggaattccacaaagagttt

SEQ ID NO: 4758452 - DNA, 25 bp, Homo sapien
cttgactgatcgcactagtgaggga

SEQ ID NO: 4758453 - DNA, 25 bp, Homo sapien
ctattcacacttcccacgtggcgga

SEQ ID NO: 4758454 - DNA, 25 bp, Homo sapien
gggtctttaccctgcaaggcttgaa

SEQ ID NO: 4758455 - DNA, 25 bp, Homo sapien
cagcattgaagaaacactaagggtc

SEQ ID NO: 4758456 - DNA, 25 bp, Homo sapien
ttgtatagcacattgtccaatttct

SEQ ID NO: 4758457 - DNA, 25 bp, Homo sapien
ttaggtaatcactgatttgtatagc

SEQ ID NO: 4758458 - DNA, 25 bp, Homo sapien
cttgagactgctttaggtaatcact

SEQ ID NO: 4758459 - DNA, 25 bp, Homo sapien
ttctgatgtatgtaaggttctacac

SEQ ID NO: 4758460 - DNA, 25 bp, Homo sapien
gattcaactggtcactctgagagca

SEQ ID NO: 4758461 - DNA, 25 bp, Homo sapien
caactggtcactctgagagcaggca

SEQ ID NO: 4758462 - DNA, 25 bp, Homo sapien
tcctggctctggattcaactggtca

SEQ ID NO: 4758463 - DNA, 25 bp, Homo sapien
gctctggattcaactggtcactctg

SEQ ID NO: 4758464 - DNA, 25 bp, Homo sapien
ctcctgtctttggttagcattttcg

SEQ ID NO: 4758465 - DNA, 25 bp, Homo sapien
gcacctggagtccttgagtattctt

SEQ ID NO: 4758466 - DNA, 25 bp, Homo sapien
ctttttctttgacagtctcctgtct

SEQ ID NO: 4758467 - DNA, 25 bp, Homo sapien
tggcacctggagtccttgagtattc

SEQ ID NO: 4758468 - DNA, 25 bp, Homo sapien
catgctccctgccctatttctgaag

SEQ ID NO: 4758469 - DNA, 25 bp, Homo sapien
tccctgccctatttctgaagagcct

SEQ ID NO: 4758470 - DNA, 25 bp, Homo sapien
tgctccctgccctatttctgaagag

SEQ ID NO: 4758471 - DNA, 25 bp, Homo sapien
ccctgccctatttctgaagagcctg

SEQ ID NO: 4758472 - DNA, 25 bp, Homo sapien
atgactcctagcgaagggcctgtat

SEQ ID NO: 4758473 - DNA, 25 bp, Homo sapien
taaaactatgactcctagcgaaggg

SEQ ID NO: 4758474 - DNA, 25 bp, Homo sapien
ttatggaatctaaaactatgactcc

SEQ ID NO: 4758475 - DNA, 25 bp, Homo sapien
ttctcctccttatggaatctaaaac

SEQ ID NO: 4758476 - DNA, 25 bp, Homo sapien
ggtgctgttcactccgagaggaatc

SEQ ID NO: 4758477 - DNA, 25 bp, Homo sapien
tgagcattcactactctgggccgat

SEQ ID NO: 4758478 - DNA, 25 bp, Homo sapien
gagttatcagatagggagctgtcct

SEQ ID NO: 4758479 - DNA, 25 bp, Homo sapien
tcactgtcacaagtggagggcaagc

SEQ ID NO: 4758480 - DNA, 25 bp, Homo sapien
tgcccagtcagatgaacaagaacct

SEQ ID NO: 4758481 - DNA, 25 bp, Homo sapien
tccatccagtaagtgagcaataggc

SEQ ID NO: 4758482 - DNA, 25 bp, Homo sapien
tcaggtgtgcaactcaaagtgggta

SEQ ID NO: 4758483 - DNA, 25 bp, Homo sapien
tgcttgcctgttaggagacacccca

SEQ ID NO: 4758484 - DNA, 25 bp, Homo sapien
gaagagggcatgctataatactggt

SEQ ID NO: 4758485 - DNA, 25 bp, Homo sapien
gaatgctttctcttggccaggagag

SEQ ID NO: 4758486 - DNA, 25 bp, Homo sapien
tctttcagctggaagtacatctctg

SEQ ID NO: 4758487 - DNA, 25 bp, Homo sapien
tgtttgtaatctcaagaagtgcccc

SEQ ID NO: 4758488 - DNA, 25 bp, Homo sapien
gaagtatttttccacgcactgctcc

SEQ ID NO: 4758489 - DNA, 25 bp, Homo sapien
cagatcctccttactgaggtagagt

SEQ ID NO: 4758490 - DNA, 25 bp, Homo sapien
gatgtcactcggattcgttcctcac

SEQ ID NO: 4758491 - DNA, 25 bp, Homo sapien
cgttcctcacaactacaattcacat

SEQ ID NO: 4758492 - DNA, 25 bp, Homo sapien
taatccaacgtcaccctcttcttgg

SEQ ID NO: 4758493 - DNA, 25 bp, Homo sapien
gcgatagcggttgtatttccacagg

SEQ ID NO: 4758494 - DNA, 25 bp, Homo sapien
tcgtgaggagctcgatgacagcaca

SEQ ID NO: 4758495 - DNA, 25 bp, Homo sapien
cagggcttctcgtggtaggtcatga

SEQ ID NO: 4758496 - DNA, 25 bp, Homo sapien
tacaaatactatccacgtgtttaca

SEQ ID NO: 4758497 - DNA, 25 bp, Homo sapien
gatgaagtaagagagggacaatgtt

SEQ ID NO: 4758498 - DNA, 25 bp, Homo sapien
tggctcacctgacattaccggcagt

SEQ ID NO: 4758499 - DNA, 25 bp, Homo sapien
taccggcagttacccaatacaaata

SEQ ID NO: 4758500 - DNA, 25 bp, Homo sapien
gctgcatttggcttcaagatcgaga

SEQ ID NO: 4758501 - DNA, 25 bp, Homo sapien
gaagccgagtgtcggtgctgcattt

SEQ ID NO: 4758502 - DNA, 25 bp, Homo sapien
tggcttcaagatcgagaatcagagc

SEQ ID NO: 4758503 - DNA, 25 bp, Homo sapien
tggggctagaaaggagacctccagc

SEQ ID NO: 4758504 - DNA, 25 bp, Homo sapien
ccccaccaggggcttttcagagcta

SEQ ID NO: 4758505 - DNA, 25 bp, Homo sapien
gggcttttcagagctaaggctccag

SEQ ID NO: 4758506 - DNA, 25 bp, Homo sapien
gcttttcagagctaaggctccagaa

SEQ ID NO: 4758507 - DNA, 25 bp, Homo sapien
ttttcagagctaaggctccagaagg

SEQ ID NO: 4758508 - DNA, 25 bp, Homo sapien
gagatgtgactgtcaccaacagagt

SEQ ID NO: 4758509 - DNA, 25 bp, Homo sapien
tatactcaggtatatggctttgctg

SEQ ID NO: 4758510 - DNA, 25 bp, Homo sapien
gactgtcaccaacagagttctgtcc

SEQ ID NO: 4758511 - DNA, 25 bp, Homo sapien
tgtgctgcctccataataggcagga

SEQ ID NO: 4758512 - DNA, 25 bp, Homo sapien
cttcctggggctaagatgcggggtg

SEQ ID NO: 4758513 - DNA, 25 bp, Homo sapien
tcctggggctaagatgcggggtgtg

SEQ ID NO: 4758514 - DNA, 25 bp, Homo sapien
ttcctggggctaagatgcggggtgt

SEQ ID NO: 4758515 - DNA, 25 bp, Homo sapien
gatatattgcacgaagaggtagaca

SEQ ID NO: 4758516 - DNA, 25 bp, Homo sapien
gaggtagacagcttgcaagaatgga

SEQ ID NO: 4758517 - DNA, 25 bp, Homo sapien
aagcaatcaacaggttcaccatgat

SEQ ID NO: 4758518 - DNA, 25 bp, Homo sapien
gacagcttgcaagaatggagtaaga

SEQ ID NO: 4758519 - DNA, 25 bp, Homo sapien
caatttctgcatgacggtaaaatcc

SEQ ID NO: 4758520 - DNA, 25 bp, Homo sapien
taactgcacagaataccataaattc

SEQ ID NO: 4758521 - DNA, 25 bp, Homo sapien
tactcttgttaactatgaaggcaca

SEQ ID NO: 4758522 - DNA, 25 bp, Homo sapien
tgccactctagacacacatttagca

SEQ ID NO: 4758523 - DNA, 25 bp, Homo sapien
tcttttggcgaaaggatggccttgc

SEQ ID NO: 4758524 - DNA, 25 bp, Homo sapien
tcgagctagactccaagatggtggc

SEQ ID NO: 4758525 - DNA, 25 bp, Homo sapien
aaagctcagcaggactatggccatg

SEQ ID NO: 4758526 - DNA, 25 bp, Homo sapien
tatggctcaaatacaatatctcgag

SEQ ID NO: 4758527 - DNA, 25 bp, Homo sapien
ccaggagccgtgagaaccagaatat

SEQ ID NO: 4758528 - DNA, 25 bp, Homo sapien
ggacgaagccagctgaaaacaggcc

SEQ ID NO: 4758529 - DNA, 25 bp, Homo sapien
catatggacctgcatgttgattcac

SEQ ID NO: 4758530 - DNA, 25 bp, Homo sapien
cagtcttcccgctgtgtgaaaagga

SEQ ID NO: 4758531 - DNA, 25 bp, Homo sapien
gatatccacttcaaagataactgct

SEQ ID NO: 4758532 - DNA, 25 bp, Homo sapien
cttccaaagtgcaccaaccagcaga

SEQ ID NO: 4758533 - DNA, 25 bp, Homo sapien
caaagataactgcttccaaagtgca

SEQ ID NO: 4758534 - DNA, 25 bp, Homo sapien
aagtgcaccaaccagcagaaagcag

SEQ ID NO: 4758535 - DNA, 25 bp, Homo sapien
gctgcatctccaccaacacggtgta

SEQ ID NO: 4758536 - DNA, 25 bp, Homo sapien
tgtaaatgctaacaagccactcctg

SEQ ID NO: 4758537 - DNA, 25 bp, Homo sapien
cagcatgaggaatgccaaatacgcc

SEQ ID NO: 4758538 - DNA, 25 bp, Homo sapien
tccctgaccacctcaatagcattgg

SEQ ID NO: 4758539 - DNA, 25 bp, Homo sapien
gagacgcagatggagcagaaaccca

SEQ ID NO: 4758540 - DNA, 25 bp, Homo sapien
gaaacccaggcatgaacttcaacat

SEQ ID NO: 4758541 - DNA, 25 bp, Homo sapien
gagagcaagcatggagcatgccaag

SEQ ID NO: 4758542 - DNA, 25 bp, Homo sapien
attccccagatgtgagtgagagcaa

SEQ ID NO: 4758543 - DNA, 25 bp, Homo sapien
agctatcaatcatcattaatccgac

SEQ ID NO: 4758544 - DNA, 25 bp, Homo sapien
taatccgacatatattgttgcaatg

SEQ ID NO: 4758545 - DNA, 25 bp, Homo sapien
atcattaatccgacatatattgttg

SEQ ID NO: 4758546 - DNA, 25 bp, Homo sapien
tagctatcaatcatcattaatccga

SEQ ID NO: 4758547 - DNA, 25 bp, Homo sapien
catagactttcctggtccacggaag

SEQ ID NO: 4758548 - DNA, 25 bp, Homo sapien
ctttcctggtccacggaaggtgttg

SEQ ID NO: 4758549 - DNA, 25 bp, Homo sapien
gcactgtagaactcatagactttcc

SEQ ID NO: 4758550 - DNA, 25 bp, Homo sapien
aaacttgacaattggagcactgtag

SEQ ID NO: 4758551 - DNA, 25 bp, Homo sapien
tttctttggaactgctggcgttctg

SEQ ID NO: 4758552 - DNA, 25 bp, Homo sapien
tgctggcgttctggtcactgtaata

SEQ ID NO: 4758553 - DNA, 25 bp, Homo sapien
ggaactgctggcgttctggtcactg

SEQ ID NO: 4758554 - DNA, 25 bp, Homo sapien
ctttggaactgctggcgttctggtc

SEQ ID NO: 4758555 - DNA, 25 bp, Homo sapien
ccacataaattggaagtcctgggac

SEQ ID NO: 4758556 - DNA, 25 bp, Homo sapien
cataaattggaagtcctgggactgg

SEQ ID NO: 4758557 - DNA, 25 bp, Homo sapien
cacataaattggaagtcctgggact

SEQ ID NO: 4758558 - DNA, 25 bp, Homo sapien
ataaattggaagtcctgggactggg

SEQ ID NO: 4758559 - DNA, 25 bp, Homo sapien
taaactccataagacaagtaaagta

SEQ ID NO: 4758560 - DNA, 25 bp, Homo sapien
taatcctcccgacacggccagttta

SEQ ID NO: 4758561 - DNA, 25 bp, Homo sapien
tagcatctgggtacaagtatgtgaa

SEQ ID NO: 4758562 - DNA, 25 bp, Homo sapien
aggcaggtcgaattgctccagttcc

SEQ ID NO: 4758563 - DNA, 25 bp, Homo sapien
agttcctgagttcatacgtcaacag

SEQ ID NO: 4758564 - DNA, 25 bp, Homo sapien
tccataaaatgcatggcggtaagtc

SEQ ID NO: 4758565 - DNA, 25 bp, Homo sapien
atgcatggcggtaagtccatttgtc

SEQ ID NO: 4758566 - DNA, 25 bp, Homo sapien
gacccttttaacaggagagtccata

SEQ ID NO: 4758567 - DNA, 25 bp, Homo sapien
caggagagtccataaaatgcatggc

SEQ ID NO: 4758568 - DNA, 25 bp, Homo sapien
gaggatacacgcaatcacggcttta

SEQ ID NO: 4758569 - DNA, 25 bp, Homo sapien
tcaactcttctgaggcatcatccac

SEQ ID NO: 4758570 - DNA, 25 bp, Homo sapien
caatcacggctttaaccgtggcctc

SEQ ID NO: 4758571 - DNA, 25 bp, Homo sapien
gcttcatgggccattgcccggtaga

SEQ ID NO: 4758572 - DNA, 25 bp, Homo sapien
cagcccaaaccagcaggtcattgta

SEQ ID NO: 4758573 - DNA, 25 bp, Homo sapien
agaaagccagtagactcagggtcat

SEQ ID NO: 4758574 - DNA, 25 bp, Homo sapien
caaaccagcaggtcattgtaagggt

SEQ ID NO: 4758575 - DNA, 25 bp, Homo sapien
caggtcattgtaagggtaaagaaag

SEQ ID NO: 4758576 - DNA, 25 bp, Homo sapien
atttatgaaggactatagacttttc

SEQ ID NO: 4758577 - DNA, 25 bp, Homo sapien
tgatttatgaaggactatagacttt

SEQ ID NO: 4758578 - DNA, 25 bp, Homo sapien
ccttgatttatgaaggactatagac

SEQ ID NO: 4758579 - DNA, 25 bp, Homo sapien
tcttccttgatttatgaaggactat

SEQ ID NO: 4758580 - DNA, 25 bp, Homo sapien
cctgaactgatatatcttaaggtca

SEQ ID NO: 4758581 - DNA, 25 bp, Homo sapien
gccagcaagcaaaatttagaccata

SEQ ID NO: 4758582 - DNA, 25 bp, Homo sapien
aataagattttacaagccagcaagc

SEQ ID NO: 4758583 - DNA, 25 bp, Homo sapien
tcttgttgcatttaacagatccaga

SEQ ID NO: 4758584 - DNA, 25 bp, Homo sapien
ataatcctgtatcatcactttgtgt

SEQ ID NO: 4758585 - DNA, 25 bp, Homo sapien
gctgtgcagttctaatgaactggga

SEQ ID NO: 4758586 - DNA, 25 bp, Homo sapien
cttgaatttgtatggctgtgcagtt

SEQ ID NO: 4758587 - DNA, 25 bp, Homo sapien
gcagttctaatgaactgggagtgca

SEQ ID NO: 4758588 - DNA, 25 bp, Homo sapien
ttgtatggctgtgcagttctaatga

SEQ ID NO: 4758589 - DNA, 25 bp, Homo sapien
gactcatttctatttcctgaggagt

SEQ ID NO: 4758590 - DNA, 25 bp, Homo sapien
tttctgcagactcatttctatttcc

SEQ ID NO: 4758591 - DNA, 25 bp, Homo sapien
catttctatttcctgaggagtgtct

SEQ ID NO: 4758592 - DNA, 25 bp, Homo sapien
tcatttctatttcctgaggagtgtc

SEQ ID NO: 4758593 - DNA, 25 bp, Homo sapien
tatctgcataccttcactacgtgga

SEQ ID NO: 4758594 - DNA, 25 bp, Homo sapien
gtcactctctggcacgttattattt

SEQ ID NO: 4758595 - DNA, 25 bp, Homo sapien
tgattagcacccaacaagagcctct

SEQ ID NO: 4758596 - DNA, 25 bp, Homo sapien
gtcctaccaaatatccatgcctctg

SEQ ID NO: 4758597 - DNA, 25 bp, Homo sapien
gaggtattctactactaatccaatg

SEQ ID NO: 4758598 - DNA, 25 bp, Homo sapien
caaggttattcggtagcctgaaaga

SEQ ID NO: 4758599 - DNA, 25 bp, Homo sapien
aatgttttctagtgtagttgctgcg

SEQ ID NO: 4758600 - DNA, 25 bp, Homo sapien
tgcgatatgctctaccaatgaggta

SEQ ID NO: 4758601 - DNA, 25 bp, Homo sapien
ctgtttcacatcttggacgagatga

SEQ ID NO: 4758602 - DNA, 25 bp, Homo sapien
agagtgtattagtaggtccttgttt

SEQ ID NO: 4758603 - DNA, 25 bp, Homo sapien
cacatcttggacgagatgatgcaag

SEQ ID NO: 4758604 - DNA, 25 bp, Homo sapien
gacgagatgatgcaagagtgtatta

SEQ ID NO: 4758605 - DNA, 25 bp, Homo sapien
tagagctcttccagtcgagggatgg

SEQ ID NO: 4758606 - DNA, 25 bp, Homo sapien
taagaaagcgatggaggttcactcc

SEQ ID NO: 4758607 - DNA, 25 bp, Homo sapien
aaatccacccgatccatcactaaag

SEQ ID NO: 4758608 - DNA, 25 bp, Homo sapien
acattgcttgttccagggcatcagg

SEQ ID NO: 4758609 - DNA, 25 bp, Homo sapien
attgccagatttaattgctctgacg

SEQ ID NO: 4758610 - DNA, 25 bp, Homo sapien
attgctctgacgctgataaatttgt

SEQ ID NO: 4758611 - DNA, 25 bp, Homo sapien
tgctctgacgctgataaatttgtgc

SEQ ID NO: 4758612 - DNA, 25 bp, Homo sapien
gatttaattgctctgacgctgataa

SEQ ID NO: 4758613 - DNA, 25 bp, Homo sapien
tgttaggattgctaagtccaggtct

SEQ ID NO: 4758614 - DNA, 25 bp, Homo sapien
ggattgctaagtccaggtcttgctg

SEQ ID NO: 4758615 - DNA, 25 bp, Homo sapien
taggattgctaagtccaggtcttgc

SEQ ID NO: 4758616 - DNA, 25 bp, Homo sapien
gattgctaagtccaggtcttgctgc

SEQ ID NO: 4758617 - DNA, 25 bp, Homo sapien
tataaattagcagttcttaagtcag

SEQ ID NO: 4758618 - DNA, 25 bp, Homo sapien
taaattagcagttcttaagtcagtt

SEQ ID NO: 4758619 - DNA, 25 bp, Homo sapien
aaattagcagttcttaagtcagttg

SEQ ID NO: 4758620 - DNA, 25 bp, Homo sapien
aattagcagttcttaagtcagttga

SEQ ID NO: 4758621 - DNA, 25 bp, Homo sapien
gaaaaggtgcttggactgtttaaga

SEQ ID NO: 4758622 - DNA, 25 bp, Homo sapien
tgaatcatgcagatgatctcctctt

SEQ ID NO: 4758623 - DNA, 25 bp, Homo sapien
ctctttcacctgaggtcgcagcatc

SEQ ID NO: 4758624 - DNA, 25 bp, Homo sapien
cactccattagaatttggaaaaggt

SEQ ID NO: 4758625 - DNA, 25 bp, Homo sapien
cacgaccggcacgccttgtcttgag

SEQ ID NO: 4758626 - DNA, 25 bp, Homo sapien
ccttcatctgccaggtgtttgtgtg

SEQ ID NO: 4758627 - DNA, 25 bp, Homo sapien
acaggatgacgttgggaccgccttc

SEQ ID NO: 4758628 - DNA, 25 bp, Homo sapien
ttgacagtctcccacactgacagga

SEQ ID NO: 4758629 - DNA, 25 bp, Homo sapien
agatgggaccacaggtatgtaccac

SEQ ID NO: 4758630 - DNA, 25 bp, Homo sapien
cctatgttgctcaggttgatctcaa

SEQ ID NO: 4758631 - DNA, 25 bp, Homo sapien
tttttttcagttatttgtagagatg

SEQ ID NO: 4758632 - DNA, 25 bp, Homo sapien
gagtagatgggaccacaggtatgta

SEQ ID NO: 4758633 - DNA, 25 bp, Homo sapien
tcacactaagagttaagtgaacgac

SEQ ID NO: 4758634 - DNA, 25 bp, Homo sapien
ctaccccacaaccatgagatgatca

SEQ ID NO: 4758635 - DNA, 25 bp, Homo sapien
cagaatccttattcacactaagagt

SEQ ID NO: 4758636 - DNA, 25 bp, Homo sapien
gttaagtgaacgaccacaattccca

SEQ ID NO: 4758637 - DNA, 25 bp, Homo sapien
ctgtctggtcttaaccccttccctg

SEQ ID NO: 4758638 - DNA, 25 bp, Homo sapien
accccaccaacacatgaaatgtcat

SEQ ID NO: 4758639 - DNA, 25 bp, Homo sapien
cacacccctagtcccctcaagctag

SEQ ID NO: 4758640 - DNA, 25 bp, Homo sapien
tcttccctgaccatcaaagctcaca

SEQ ID NO: 4758641 - DNA, 25 bp, Homo sapien
acctcagcaggcctgcaaccagact

SEQ ID NO: 4758642 - DNA, 25 bp, Homo sapien
agcaggcctgcaaccagactgggtg

SEQ ID NO: 4758643 - DNA, 25 bp, Homo sapien
aggcctgcaaccagactgggtgact

SEQ ID NO: 4758644 - DNA, 25 bp, Homo sapien
ctcagcaggcctgcaaccagactgg

SEQ ID NO: 4758645 - DNA, 25 bp, Homo sapien
ttcatttccatacttgcccacggtc

SEQ ID NO: 4758646 - DNA, 25 bp, Homo sapien
acaggatgaagtgcgagtgcatgct

SEQ ID NO: 4758647 - DNA, 25 bp, Homo sapien
ccacggtcccatcatcagacaggat

SEQ ID NO: 4758648 - DNA, 25 bp, Homo sapien
ttatccagagtctggtacaggcaca

SEQ ID NO: 4758649 - DNA, 25 bp, Homo sapien
caatgacaccccaaggagggattcc

SEQ ID NO: 4758650 - DNA, 25 bp, Homo sapien
ggaatgggatttcaaggcatcccca

SEQ ID NO: 4758651 - DNA, 25 bp, Homo sapien
tgacaccccaaggagggattccaac

SEQ ID NO: 4758652 - DNA, 25 bp, Homo sapien
aatgggatttcaaggcatccccaac

SEQ ID NO: 4758653 - DNA, 25 bp, Homo sapien
gagatcacaagcttgggcagttcca

SEQ ID NO: 4758654 - DNA, 25 bp, Homo sapien
tgatgccttcagttattatccacgc

SEQ ID NO: 4758655 - DNA, 25 bp, Homo sapien
taaccaaaccttggctgaaaatctc

SEQ ID NO: 4758656 - DNA, 25 bp, Homo sapien
tttagagggcatagtaaagttctgg

SEQ ID NO: 4758657 - DNA, 25 bp, Homo sapien
tttgtatcataagaagttctaatat

SEQ ID NO: 4758658 - DNA, 25 bp, Homo sapien
caacattaaatgtaacagatgatcc

SEQ ID NO: 4758659 - DNA, 25 bp, Homo sapien
agatgatccagttttgtatcataag

SEQ ID NO: 4758660 - DNA, 25 bp, Homo sapien
tgtaacagatgatccagttttgtat

SEQ ID NO: 4758661 - DNA, 25 bp, Homo sapien
ggaataatctatcccagcatggtct

SEQ ID NO: 4758662 - DNA, 25 bp, Homo sapien
ggtctccaatcagtcggccacagta

SEQ ID NO: 4758663 - DNA, 25 bp, Homo sapien
ctttctttacccttggcagctgaga

SEQ ID NO: 4758664 - DNA, 25 bp, Homo sapien
aattaatcgtgccaaaagtatctgt

SEQ ID NO: 4758665 - DNA, 25 bp, Homo sapien
gcagacttggcatactggagtacat

SEQ ID NO: 4758666 - DNA, 25 bp, Homo sapien
ggcagacttggcatactggagtaca

SEQ ID NO: 4758667 - DNA, 25 bp, Homo sapien
tggcagacttggcatactggagtac

SEQ ID NO: 4758668 - DNA, 25 bp, Homo sapien
ggattttttgagctgggtatgattg

SEQ ID NO: 4758669 - DNA, 25 bp, Homo sapien
tttttgagctgggtatgattgtgct

SEQ ID NO: 4758670 - DNA, 25 bp, Homo sapien
ggtatgattgtgctacattctctct

SEQ ID NO: 4758671 - DNA, 25 bp, Homo sapien
tgagctgggtatgattgtgctacat

SEQ ID NO: 4758672 - DNA, 25 bp, Homo sapien
tcctttgcaatatactctccagcac

SEQ ID NO: 4758673 - DNA, 25 bp, Homo sapien
aatatactctccagcacacttccga

SEQ ID NO: 4758674 - DNA, 25 bp, Homo sapien
cctgccaacctcgtaatagttcctt

SEQ ID NO: 4758675 - DNA, 25 bp, Homo sapien
caacctcgtaatagttcctttgcaa

SEQ ID NO: 4758676 - DNA, 25 bp, Homo sapien
tccactttcaagtgtcagctcaggg

SEQ ID NO: 4758677 - DNA, 25 bp, Homo sapien
atccactttcaagtgtcagctcagg

SEQ ID NO: 4758678 - DNA, 25 bp, Homo sapien
aggggcagtctcagaaaaacagcat

SEQ ID NO: 4758679 - DNA, 25 bp, Homo sapien
gacacttgatccgagaggggcagtc

SEQ ID NO: 4758680 - DNA, 25 bp, Homo sapien
cagcatccaggctaaaaatatctaa

SEQ ID NO: 4758681 - DNA, 25 bp, Homo sapien
tgttccaccaacactaccagaaagt

SEQ ID NO: 4758682 - DNA, 25 bp, Homo sapien
tgttgcgccatatgccagcggtgga

SEQ ID NO: 4758683 - DNA, 25 bp, Homo sapien
actcctgaggttgcaagtccgggcg

SEQ ID NO: 4758684 - DNA, 25 bp, Homo sapien
ggatctccactactctcccaagcgt

SEQ ID NO: 4758685 - DNA, 25 bp, Homo sapien
cccagaacttcctgttgcgccatat

SEQ ID NO: 4758686 - DNA, 25 bp, Homo sapien
ctccgggactcctgcacggggaaca

SEQ ID NO: 4758687 - DNA, 25 bp, Homo sapien
gctccgggactcctgcacggggaac

SEQ ID NO: 4758688 - DNA, 25 bp, Homo sapien
cgctccgggactcctgcacggggaa

SEQ ID NO: 4758689 - DNA, 25 bp, Homo sapien
cggccgtctgggcacttctccagcc

SEQ ID NO: 4758690 - DNA, 25 bp, Homo sapien
aggggcgcggagggacggccgtctg

SEQ ID NO: 4758691 - DNA, 25 bp, Homo sapien
gccgtctgggcacttctccagccgc

SEQ ID NO: 4758692 - DNA, 25 bp, Homo sapien
gacggccgtctgggcacttctccag

SEQ ID NO: 4758693 - DNA, 25 bp, Homo sapien
tctgacaccacctccgctatggccg

SEQ ID NO: 4758694 - DNA, 25 bp, Homo sapien
gccgcatcccagctcttgaaacggg

SEQ ID NO: 4758695 - DNA, 25 bp, Homo sapien
gacctgccctgtagtagcgtacact

SEQ ID NO: 4758696 - DNA, 25 bp, Homo sapien
taggtttccgctctgacaccacctc

SEQ ID NO: 4758697 - DNA, 25 bp, Homo sapien
gaaagccggtatttcataaatccta

SEQ ID NO: 4758698 - DNA, 25 bp, Homo sapien
gaacttgaaagccggtatttcataa

SEQ ID NO: 4758699 - DNA, 25 bp, Homo sapien
tcataaatcctagctattctagatc

SEQ ID NO: 4758700 - DNA, 25 bp, Homo sapien
gccggtatttcataaatcctagcta

SEQ ID NO: 4758701 - DNA, 25 bp, Homo sapien
gctccaagacaggttgttctttcat

SEQ ID NO: 4758702 - DNA, 25 bp, Homo sapien
aagcgctccaagacaggttgttctt

SEQ ID NO: 4758703 - DNA, 25 bp, Homo sapien
ctgcaagcgctccaagacaggttgt

SEQ ID NO: 4758704 - DNA, 25 bp, Homo sapien
tgcaagcgctccaagacaggttgtt

SEQ ID NO: 4758705 - DNA, 25 bp, Homo sapien
ccctgtctgagcttttaactgtgga

SEQ ID NO: 4758706 - DNA, 25 bp, Homo sapien
ggatctgtcacaatacctttcggct

SEQ ID NO: 4758707 - DNA, 25 bp, Homo sapien
taacgaggatcaaatgggatggcca

SEQ ID NO: 4758708 - DNA, 25 bp, Homo sapien
gcctagaaaagaaggtgactctcag

SEQ ID NO: 4758709 - DNA, 25 bp, Homo sapien
ggcagggatactcaccaccatacta

SEQ ID NO: 4758710 - DNA, 25 bp, Homo sapien
tgacaggcagggatactcaccacca

SEQ ID NO: 4758711 - DNA, 25 bp, Homo sapien
ccgcgtgacaggcagggatactcac

SEQ ID NO: 4758712 - DNA, 25 bp, Homo sapien
agggatactcaccaccatactaacg

SEQ ID NO: 4758713 - DNA, 25 bp, Homo sapien
tctcctgccaaaagctacataagtg

SEQ ID NO: 4758714 - DNA, 25 bp, Homo sapien
tattcacagttatagagttccctcc

SEQ ID NO: 4758715 - DNA, 25 bp, Homo sapien
tatagcagaaatgatggcgtgtcac

SEQ ID NO: 4758716 - DNA, 25 bp, Homo sapien
tacaagcattggtctgtataaccag

SEQ ID NO: 4758717 - DNA, 25 bp, Homo sapien
cagtgacaaagagggctgccccagg

SEQ ID NO: 4758718 - DNA, 25 bp, Homo sapien
agtgacaaagagggctgccccagga

SEQ ID NO: 4758719 - DNA, 25 bp, Homo sapien
ccagtgacaaagagggctgccccag

SEQ ID NO: 4758720 - DNA, 25 bp, Homo sapien
gccagtgacaaagagggctgcccca

SEQ ID NO: 4758721 - DNA, 25 bp, Homo sapien
tagctgcaggtaaccctaatgccaa

SEQ ID NO: 4758722 - DNA, 25 bp, Homo sapien
taatgccaacagtcctacctaagat

SEQ ID NO: 4758723 - DNA, 25 bp, Homo sapien
atttttgtaatagctgcaggtcccc

SEQ ID NO: 4758724 - DNA, 25 bp, Homo sapien
cacatgaacagatgatcgtggtgca

SEQ ID NO: 4758725 - DNA, 25 bp, Homo sapien
ttcctgatcacctatctctatgaac

SEQ ID NO: 4758726 - DNA, 25 bp, Homo sapien
tcctgatcacctatctctatgaacc

SEQ ID NO: 4758727 - DNA, 25 bp, Homo sapien
tcttgtgcttagtgatcattgccca

SEQ ID NO: 4758728 - DNA, 25 bp, Homo sapien
cacgctaaaccagtgtgcgtttgca

SEQ ID NO: 4758729 - DNA, 25 bp, Homo sapien
gatcattgcccacgctaaaccagtg

SEQ ID NO: 4758730 - DNA, 25 bp, Homo sapien
aaaccagtgtgcgtttgcaccccag

SEQ ID NO: 4758731 - DNA, 25 bp, Homo sapien
ttttcatacggccaccatagtgctg

SEQ ID NO: 4758732 - DNA, 25 bp, Homo sapien
gactaggtaatatgtccccaggacc

SEQ ID NO: 4758733 - DNA, 25 bp, Homo sapien
tgactgagacaaggaaaagactctg

SEQ ID NO: 4758734 - DNA, 25 bp, Homo sapien
tttcatagagaaagcagtcttggca

SEQ ID NO: 4758735 - DNA, 25 bp, Homo sapien
tgtctgaccacaatgcaatacagtt

SEQ ID NO: 4758736 - DNA, 25 bp, Homo sapien
gatacataggtaggaagtggcagta

SEQ ID NO: 4758737 - DNA, 25 bp, Homo sapien
ggcagtacaagactttgaaccatgt

SEQ ID NO: 4758738 - DNA, 25 bp, Homo sapien
aaatgcaagcaagaaccagttactc

SEQ ID NO: 4758739 - DNA, 25 bp, Homo sapien
gggaagcaggcaccgattcagtttt

SEQ ID NO: 4758740 - DNA, 25 bp, Homo sapien
tcccgcccatcttaagtttgcatag

SEQ ID NO: 4758741 - DNA, 25 bp, Homo sapien
cagttgcccatagtagagcttaacc

SEQ ID NO: 4758742 - DNA, 25 bp, Homo sapien
aatattggaagctttgcaaacacgc

SEQ ID NO: 4758743 - DNA, 25 bp, Homo sapien
tcccttaagaatacgagaattcact

SEQ ID NO: 4758744 - DNA, 25 bp, Homo sapien
taaactttttggtgcagataggagg

SEQ ID NO: 4758745 - DNA, 25 bp, Homo sapien
tagagacatctcctcaaatcagcca

SEQ ID NO: 4758746 - DNA, 25 bp, Homo sapien
tacaactgtactctatccttgacaa

SEQ ID NO: 4758747 - DNA, 25 bp, Homo sapien
aatcttcaatgtctgccagatcaat

SEQ ID NO: 4758748 - DNA, 25 bp, Homo sapien
ccagtactggaaggtattatactgc

SEQ ID NO: 4758749 - DNA, 25 bp, Homo sapien
tcaataggaggcaaaggattcctcc

SEQ ID NO: 4758750 - DNA, 25 bp, Homo sapien
ctgtcagggtgtcttcacttaaatc

SEQ ID NO: 4758751 - DNA, 25 bp, Homo sapien
ttagagaaaaaagagagatcaaaga

SEQ ID NO: 4758752 - DNA, 25 bp, Homo sapien
agaaaaaagagagatcaaagagcat

SEQ ID NO: 4758753 - DNA, 25 bp, Homo sapien
agagaaaaaagagagatcaaagagc

SEQ ID NO: 4758754 - DNA, 25 bp, Homo sapien
gagaaaaaagagagatcaaagagca

SEQ ID NO: 4758755 - DNA, 25 bp, Homo sapien
tgggtttgcaagataactccaccgc

SEQ ID NO: 4758756 - DNA, 25 bp, Homo sapien
aactttgccaccagacagacctggg

SEQ ID NO: 4758757 - DNA, 25 bp, Homo sapien
taaaacatagtgactaagggcacac

SEQ ID NO: 4758758 - DNA, 25 bp, Homo sapien
ttcaggcttggcatagtaattgctc

SEQ ID NO: 4758759 - DNA, 25 bp, Homo sapien
cagtctccccgcgggggtcctgcgc

SEQ ID NO: 4758760 - DNA, 25 bp, Homo sapien
ggagccgggcgcccgggagctcctc

SEQ ID NO: 4758761 - DNA, 25 bp, Homo sapien
tgcgcgccccgccccgtcgtcgcca

SEQ ID NO: 4758762 - DNA, 25 bp, Homo sapien
ccagtctccccgcgggggtcctgcg

SEQ ID NO: 4758763 - DNA, 25 bp, Homo sapien
gcggcagcggcggatcgcctgtctc

SEQ ID NO: 4758764 - DNA, 25 bp, Homo sapien
gcagcggcggatcgcctgtctccag

SEQ ID NO: 4758765 - DNA, 25 bp, Homo sapien
ggcggatcgcctgtctccagaccgt

SEQ ID NO: 4758766 - DNA, 25 bp, Homo sapien
cggcggatcgcctgtctccagaccg

SEQ ID NO: 4758767 - DNA, 25 bp, Homo sapien
tcagcgaagtcgcaaagcaggagcc

SEQ ID NO: 4758768 - DNA, 25 bp, Homo sapien
catggtccctgcgtcgattttgcgc

SEQ ID NO: 4758769 - DNA, 25 bp, Homo sapien
ggagccgcttccaaggcacgtggaa

SEQ ID NO: 4758770 - DNA, 25 bp, Homo sapien
gattttgcgctttcggtgctgctct

SEQ ID NO: 4758771 - DNA, 25 bp, Homo sapien
ggctcggccgcacgccgcttggcca

SEQ ID NO: 4758772 - DNA, 25 bp, Homo sapien
cggctcggccgcacgccgcttggcc

SEQ ID NO: 4758773 - DNA, 25 bp, Homo sapien
gctcggccgcacgccgcttggccat

SEQ ID NO: 4758774 - DNA, 25 bp, Homo sapien
aggcgcgggagaccgagtgccgata

SEQ ID NO: 4758775 - DNA, 25 bp, Homo sapien
ggctcgggcggagcccgccaggcgc

SEQ ID NO: 4758776 - DNA, 25 bp, Homo sapien
cccgccaggcgcgggagaccgagtg

SEQ ID NO: 4758777 - DNA, 25 bp, Homo sapien
gccaggcgcgggagaccgagtgccg

SEQ ID NO: 4758778 - DNA, 25 bp, Homo sapien
cgcgaagcggcggagattcgaacct

SEQ ID NO: 4758779 - DNA, 25 bp, Homo sapien
atgcggcccggacgttgagaagcaa

SEQ ID NO: 4758780 - DNA, 25 bp, Homo sapien
gggacaggccgaagtcgggcgagga

SEQ ID NO: 4758781 - DNA, 25 bp, Homo sapien
gactgagcgcgtgagagagggacag

SEQ ID NO: 4758782 - DNA, 25 bp, Homo sapien
tctctgacaagacttttgggccaag

SEQ ID NO: 4758783 - DNA, 25 bp, Homo sapien
gggtcgtgttatccagcatacctgg

SEQ ID NO: 4758784 - DNA, 25 bp, Homo sapien
ccaggcactgggttacaacagtaaa

SEQ ID NO: 4758785 - DNA, 25 bp, Homo sapien
tttaagcatctgctacagaccaggc

SEQ ID NO: 4758786 - DNA, 25 bp, Homo sapien
aagatttgtcaagtgggacctgagc

SEQ ID NO: 4758787 - DNA, 25 bp, Homo sapien
ccagtgttctatgtgcagctaccaa

SEQ ID NO: 4758788 - DNA, 25 bp, Homo sapien
tctgggtgtgagaacaaacactctg

SEQ ID NO: 4758789 - DNA, 25 bp, Homo sapien
ccttttaagagagcaatctgggcag

SEQ ID NO: 4758790 - DNA, 25 bp, Homo sapien
ccaacctggcttataatgaggacag

SEQ ID NO: 4758791 - DNA, 25 bp, Homo sapien
tcaacagtccaacctggcttataat

SEQ ID NO: 4758792 - DNA, 25 bp, Homo sapien
acagtccaacctggcttataatgag

SEQ ID NO: 4758793 - DNA, 25 bp, Homo sapien
tggcttataatgaggacagggctct

SEQ ID NO: 4758794 - DNA, 25 bp, Homo sapien
caccattgctcctactgtcattgta

SEQ ID NO: 4758795 - DNA, 25 bp, Homo sapien
gatcttttggaatctgtgctgtagc

SEQ ID NO: 4758796 - DNA, 25 bp, Homo sapien
ttgtagactagcttcctctgccacc

SEQ ID NO: 4758797 - DNA, 25 bp, Homo sapien
gcacctgatgcacatgttaaacttc

SEQ ID NO: 4758798 - DNA, 25 bp, Homo sapien
tatatatgctcaactcattaaaatc

SEQ ID NO: 4758799 - DNA, 25 bp, Homo sapien
ttataaggcgaagtattcatgttac

SEQ ID NO: 4758800 - DNA, 25 bp, Homo sapien
ctaatccaagagttcaaaagtatat

SEQ ID NO: 4758801 - DNA, 25 bp, Homo sapien
gaaaatagttagtataaggcctggc

SEQ ID NO: 4758802 - DNA, 25 bp, Homo sapien
gaatatattttaccggcctgtgatg

SEQ ID NO: 4758803 - DNA, 25 bp, Homo sapien
catctgctaagtattgagggacaca

SEQ ID NO: 4758804 - DNA, 25 bp, Homo sapien
gaagacacagaccacgggcagtaat

SEQ ID NO: 4758805 - DNA, 25 bp, Homo sapien
catcactgtacacggaaaaggtccc

SEQ ID NO: 4758806 - DNA, 25 bp, Homo sapien
tacaaatctgcatggcatagtatat

SEQ ID NO: 4758807 - DNA, 25 bp, Homo sapien
agtacaaatctgcatggcatagtat

SEQ ID NO: 4758808 - DNA, 25 bp, Homo sapien
acttgtgtagtacaaatctgcatgg

SEQ ID NO: 4758809 - DNA, 25 bp, Homo sapien
ttttacttgtgtagtacaaatctgc

SEQ ID NO: 4758810 - DNA, 25 bp, Homo sapien
ctgatagttgattttgagtcgttga

SEQ ID NO: 4758811 - DNA, 25 bp, Homo sapien
tttccaggtggtatcacttgagacc

SEQ ID NO: 4758812 - DNA, 25 bp, Homo sapien
gaataagaaggcaccactgatttga

SEQ ID NO: 4758813 - DNA, 25 bp, Homo sapien
gagtcgttgatttcagcatttgttc

SEQ ID NO: 4758814 - DNA, 25 bp, Homo sapien
tatatgttgacaatacagattcttt

SEQ ID NO: 4758815 - DNA, 25 bp, Homo sapien
gatcattcacagtatatgttgacaa

SEQ ID NO: 4758816 - DNA, 25 bp, Homo sapien
caagacacattcatagtagtatttc

SEQ ID NO: 4758817 - DNA, 25 bp, Homo sapien
gagagatcattcacagtatatgttg

SEQ ID NO: 4758818 - DNA, 25 bp, Homo sapien
tatatcctcatagctcaattctatg

SEQ ID NO: 4758819 - DNA, 25 bp, Homo sapien
cagaacaacgttttttatatcctca

SEQ ID NO: 4758820 - DNA, 25 bp, Homo sapien
tagctcaattctatggaaagttcat

SEQ ID NO: 4758821 - DNA, 25 bp, Homo sapien
cttgaatccatactgcagaacaacg

SEQ ID NO: 4758822 - DNA, 25 bp, Homo sapien
tttagtggccataacagaaggagca

SEQ ID NO: 4758823 - DNA, 25 bp, Homo sapien
tacccaagctggattagaattcctg

SEQ ID NO: 4758824 - DNA, 25 bp, Homo sapien
taacagagacacattcctcaaaggg

SEQ ID NO: 4758825 - DNA, 25 bp, Homo sapien
cacctagctaatgtctggcactgga

SEQ ID NO: 4758826 - DNA, 25 bp, Homo sapien
atggcataggcatagttcactgcag

SEQ ID NO: 4758827 - DNA, 25 bp, Homo sapien
caggttgaagtacaatggcataggc

SEQ ID NO: 4758828 - DNA, 25 bp, Homo sapien
gatctgcctggcttgacctcaggag

SEQ ID NO: 4758829 - DNA, 25 bp, Homo sapien
cctcaggagttgtcaggattacagg

SEQ ID NO: 4758830 - DNA, 25 bp, Homo sapien
aagggaattcacaggcattcttttg

SEQ ID NO: 4758831 - DNA, 25 bp, Homo sapien
tacccaaaggacatatgcataatag

SEQ ID NO: 4758832 - DNA, 25 bp, Homo sapien
gccaaaatcatagccttacccaaag

SEQ ID NO: 4758833 - DNA, 25 bp, Homo sapien
tgcataatagttcccttaaaaggct

SEQ ID NO: 4758834 - DNA, 25 bp, Homo sapien
ttttccatattgtatcaatataatc

SEQ ID NO: 4758835 - DNA, 25 bp, Homo sapien
aattccacctggcttgagtattttc

SEQ ID NO: 4758836 - DNA, 25 bp, Homo sapien
ttccatattgtatcaatataatcaa

SEQ ID NO: 4758837 - DNA, 25 bp, Homo sapien
ccaaattccacctggcttgagtatt

SEQ ID NO: 4758838 - DNA, 25 bp, Homo sapien
caggtagcaatacagtcccaggtat

SEQ ID NO: 4758839 - DNA, 25 bp, Homo sapien
tatcactgccttgtacacgaccttg

SEQ ID NO: 4758840 - DNA, 25 bp, Homo sapien
tatctcttagtattaatgggcccaa

SEQ ID NO: 4758841 - DNA, 25 bp, Homo sapien
tgaatgatctaaaccttggcttagg

SEQ ID NO: 4758842 - DNA, 25 bp, Homo sapien
tctaaattgacactgacatatgcct

SEQ ID NO: 4758843 - DNA, 25 bp, Homo sapien
aaatctcctgctgtcatagaaaagt

SEQ ID NO: 4758844 - DNA, 25 bp, Homo sapien
agctgatctccggttattgctaaac

SEQ ID NO: 4758845 - DNA, 25 bp, Homo sapien
ctgatggatccaaggataaagttta

SEQ ID NO: 4758846 - DNA, 25 bp, Homo sapien
tgggtcgaatctgatcagctgatct

SEQ ID NO: 4758847 - DNA, 25 bp, Homo sapien
ctagtccagcaccaggtaccagaat

SEQ ID NO: 4758848 - DNA, 25 bp, Homo sapien
tatttcccaggccagtcttcctagt

SEQ ID NO: 4758849 - DNA, 25 bp, Homo sapien
gcataacctagcatagctatttccc

SEQ ID NO: 4758850 - DNA, 25 bp, Homo sapien
tccttgacaagcataacctagcata

SEQ ID NO: 4758851 - DNA, 25 bp, Homo sapien
caggctctagggtttaatttattct

SEQ ID NO: 4758852 - DNA, 25 bp, Homo sapien
tattctgacaaagctacgattttaa

SEQ ID NO: 4758853 - DNA, 25 bp, Homo sapien
taatattgatgcagcctttactgtg

SEQ ID NO: 4758854 - DNA, 25 bp, Homo sapien
gatagctcaccttatctactataag

SEQ ID NO: 4758855 - DNA, 25 bp, Homo sapien
ttaactttagaggtaagtctttgca

SEQ ID NO: 4758856 - DNA, 25 bp, Homo sapien
agcacacagcacactacacccctga

SEQ ID NO: 4758857 - DNA, 25 bp, Homo sapien
agttggattattaccttacccacat

SEQ ID NO: 4758858 - DNA, 25 bp, Homo sapien
ggctattactagaggtgcaatcaca

SEQ ID NO: 4758859 - DNA, 25 bp, Homo sapien
gatattcctactactctgatgcagg

SEQ ID NO: 4758860 - DNA, 25 bp, Homo sapien
tatttctagatgcaaggcttatgga

SEQ ID NO: 4758861 - DNA, 25 bp, Homo sapien
cactagtggcctaataagactaagg

SEQ ID NO: 4758862 - DNA, 25 bp, Homo sapien
tcaagaaaacagtcgcacaaacaga

SEQ ID NO: 4758863 - DNA, 25 bp, Homo sapien
gtacagacagagtatatgtgtaggg

SEQ ID NO: 4758864 - DNA, 25 bp, Homo sapien
tgcaaaaggtagatcatgtatacaa

SEQ ID NO: 4758865 - DNA, 25 bp, Homo sapien
aagtacgttaaagcacgtagtgcaa

SEQ ID NO: 4758866 - DNA, 25 bp, Homo sapien
aaagagatagggaatttgggtacag

SEQ ID NO: 4758867 - DNA, 25 bp, Homo sapien
cctaagagacgacatgaaatggttt

SEQ ID NO: 4758868 - DNA, 25 bp, Homo sapien
gagctatcaccccaggccaagaact

SEQ ID NO: 4758869 - DNA, 25 bp, Homo sapien
tcaaaggacttatcagcagattagc

SEQ ID NO: 4758870 - DNA, 25 bp, Homo sapien
gagtgggtagagtcatgtgaaacct

SEQ ID NO: 4758871 - DNA, 25 bp, Homo sapien
aaagcagaccatgggcttcagactg

SEQ ID NO: 4758872 - DNA, 25 bp, Homo sapien
gtttacaactatgtcataatgaggg

SEQ ID NO: 4758873 - DNA, 25 bp, Homo sapien
tcagaggtacagatccctcacttgt

SEQ ID NO: 4758874 - DNA, 25 bp, Homo sapien
tctgcttgctcagaggtacagatcc

SEQ ID NO: 4758875 - DNA, 25 bp, Homo sapien
tggctggtaacaggcatccctttct

SEQ ID NO: 4758876 - DNA, 25 bp, Homo sapien
catgtcaaatgtagatgctggcata

SEQ ID NO: 4758877 - DNA, 25 bp, Homo sapien
tcacaaactgtttcagcgtggattt

SEQ ID NO: 4758878 - DNA, 25 bp, Homo sapien
cgtggattttaacttatccatgtca

SEQ ID NO: 4758879 - DNA, 25 bp, Homo sapien
ctggagtggcccaactgtatccatc

SEQ ID NO: 4758880 - DNA, 25 bp, Homo sapien
ggctcacactggagtggcccaactg

SEQ ID NO: 4758881 - DNA, 25 bp, Homo sapien
acactggagtggcccaactgtatcc

SEQ ID NO: 4758882 - DNA, 25 bp, Homo sapien
tcacactggagtggcccaactgtat

SEQ ID NO: 4758883 - DNA, 25 bp, Homo sapien
ggaaaacaagtgaacagatccagtc

SEQ ID NO: 4758884 - DNA, 25 bp, Homo sapien
taagcctaatcaaatgactgaacat

SEQ ID NO: 4758885 - DNA, 25 bp, Homo sapien
gatccagtctctggctattaagcct

SEQ ID NO: 4758886 - DNA, 25 bp, Homo sapien
gcaaatagcctgtgccagattataa

SEQ ID NO: 4758887 - DNA, 25 bp, Homo sapien
gctggaagtgatcgaaactgtcttt

SEQ ID NO: 4758888 - DNA, 25 bp, Homo sapien
tgcaatcattcacaatggtcagtag

SEQ ID NO: 4758889 - DNA, 25 bp, Homo sapien
actgtctttctgttcggttcacccg

SEQ ID NO: 4758890 - DNA, 25 bp, Homo sapien
ctgaggaagtagtttctgttggtta

SEQ ID NO: 4758891 - DNA, 25 bp, Homo sapien
gtgagcccacaccaggtctgatcta

SEQ ID NO: 4758892 - DNA, 25 bp, Homo sapien
ctgtcatcagggtgagcccacacca

SEQ ID NO: 4758893 - DNA, 25 bp, Homo sapien
cacaccaggtctgatctaaaggcca

SEQ ID NO: 4758894 - DNA, 25 bp, Homo sapien
gcccacaccaggtctgatctaaagg

SEQ ID NO: 4758895 - DNA, 25 bp, Homo sapien
tctgtctgattccaactgcagcctc

SEQ ID NO: 4758896 - DNA, 25 bp, Homo sapien
catgtctgtctgattccaactgcag

SEQ ID NO: 4758897 - DNA, 25 bp, Homo sapien
tgcagcctcagaacatagtcaccgg

SEQ ID NO: 4758898 - DNA, 25 bp, Homo sapien
catagtcaccggtggactcatatct

SEQ ID NO: 4758899 - DNA, 25 bp, Homo sapien
taatcacccaccagttaaagacact

SEQ ID NO: 4758900 - DNA, 25 bp, Homo sapien
caaattttagaatatccggaccact

SEQ ID NO: 4758901 - DNA, 25 bp, Homo sapien
gcagctcttattgtgacttctctca

SEQ ID NO: 4758902 - DNA, 25 bp, Homo sapien
tcattcaatcgctcacacaaaagtg

SEQ ID NO: 4758903 - DNA, 25 bp, Homo sapien
agcccagcagtggacgattgtacca

SEQ ID NO: 4758904 - DNA, 25 bp, Homo sapien
tgggaaaatacgtcctacagcatcc

SEQ ID NO: 4758905 - DNA, 25 bp, Homo sapien
cacgcgtaggtgaacttgggctctc

SEQ ID NO: 4758906 - DNA, 25 bp, Homo sapien
tcagtttggaggacatcgaccacac

SEQ ID NO: 4758907 - DNA, 25 bp, Homo sapien
cagtgggcgccccgacggtctgggc

SEQ ID NO: 4758908 - DNA, 25 bp, Homo sapien
ggtccgccgccaccagtgggcgccc

SEQ ID NO: 4758909 - DNA, 25 bp, Homo sapien
gccgccaccagtgggcgccccgacg

SEQ ID NO: 4758910 - DNA, 25 bp, Homo sapien
tccggcgggtccgccgccaccagtg

SEQ ID NO: 4758911 - DNA, 25 bp, Homo sapien
ccgtagtagcggaaggcattaatga

SEQ ID NO: 4758912 - DNA, 25 bp, Homo sapien
cgtagtagcggaaggcattaatgat

SEQ ID NO: 4758913 - DNA, 25 bp, Homo sapien
gtgctcacgctcaagcctctcctcc

SEQ ID NO: 4758914 - DNA, 25 bp, Homo sapien
ttccagaagtgctcacgctcaagcc

SEQ ID NO: 4758915 - DNA, 25 bp, Homo sapien
aagtgctcacgctcaagcctctcct

SEQ ID NO: 4758916 - DNA, 25 bp, Homo sapien
cagaagtgctcacgctcaagcctct

SEQ ID NO: 4758917 - DNA, 25 bp, Homo sapien
ccaacgcccggcggaaaactgcact

SEQ ID NO: 4758918 - DNA, 25 bp, Homo sapien
caacgcccggcggaaaactgcactt

SEQ ID NO: 4758919 - DNA, 25 bp, Homo sapien
gggcggcggagggcgacgccgtcgc

SEQ ID NO: 4758920 - DNA, 25 bp, Homo sapien
gcggcggagggcgacgccgtcgctg

SEQ ID NO: 4758921 - DNA, 25 bp, Homo sapien
gcagccctcgggcagccgggaggtg

SEQ ID NO: 4758922 - DNA, 25 bp, Homo sapien
agccctcgggcagccgggaggtggg

SEQ ID NO: 4758923 - DNA, 25 bp, Homo sapien
ctcggcctggctcgcttgcgtctct

SEQ ID NO: 4758924 - DNA, 25 bp, Homo sapien
tctccgcgaccgacagcgtggtggc

SEQ ID NO: 4758925 - DNA, 25 bp, Homo sapien
ttggccttcctctagacggcgcccg

SEQ ID NO: 4758926 - DNA, 25 bp, Homo sapien
tggctcgcttgcgtctctccgcgac

SEQ ID NO: 4758927 - DNA, 25 bp, Homo sapien
gtcacaaccacgcttccaagggcgg

SEQ ID NO: 4758928 - DNA, 25 bp, Homo sapien
tgcggtctgcgctcatttgctgccg

SEQ ID NO: 4758929 - DNA, 25 bp, Homo sapien
gctcccagaaccaatgcgcatgcgt

SEQ ID NO: 4758930 - DNA, 25 bp, Homo sapien
tttgctgccgggcttcggagacagc

SEQ ID NO: 4758931 - DNA, 25 bp, Homo sapien
gcgcggccgcgtgggtgggacttaa

SEQ ID NO: 4758932 - DNA, 25 bp, Homo sapien
cggcgagtgccggattgttgagctg

SEQ ID NO: 4758933 - DNA, 25 bp, Homo sapien
gtgcgcggccgcgtgggtgggactt

SEQ ID NO: 4758934 - DNA, 25 bp, Homo sapien
tgggacttaaaagccggcgagtgcc

SEQ ID NO: 4758935 - DNA, 25 bp, Homo sapien
caacccacacgcaaatgaataccac

SEQ ID NO: 4758936 - DNA, 25 bp, Homo sapien
acccacacgcaaatgaataccactc

SEQ ID NO: 4758937 - DNA, 25 bp, Homo sapien
aacccacacgcaaatgaataccact

SEQ ID NO: 4758938 - DNA, 25 bp, Homo sapien
cccacacgcaaatgaataccactca

SEQ ID NO: 4758939 - DNA, 25 bp, Homo sapien
cacataacatacaatgtccttccca

SEQ ID NO: 4758940 - DNA, 25 bp, Homo sapien
tacaatgtccttcccatgtgggcca

SEQ ID NO: 4758941 - DNA, 25 bp, Homo sapien
taacatacaatgtccttcccatgtg

SEQ ID NO: 4758942 - DNA, 25 bp, Homo sapien
tgtccttcccatgtgggccacgggc

SEQ ID NO: 4758943 - DNA, 25 bp, Homo sapien
ccccgaaagagtcactccttcctca

SEQ ID NO: 4758944 - DNA, 25 bp, Homo sapien
gtgaactcatttaaggcataggttg

SEQ ID NO: 4758945 - DNA, 25 bp, Homo sapien
cccagtagaatgtgaactcatttaa

SEQ ID NO: 4758946 - DNA, 25 bp, Homo sapien
aaatatctggtttcccagtagaatg

SEQ ID NO: 4758947 - DNA, 25 bp, Homo sapien
cgtcctaaatccagtattatcaggg

SEQ ID NO: 4758948 - DNA, 25 bp, Homo sapien
cataggcgagaacaagggaccttct

SEQ ID NO: 4758949 - DNA, 25 bp, Homo sapien
tttctagcagctgtagaccagctga

SEQ ID NO: 4758950 - DNA, 25 bp, Homo sapien
gaccagctgaacaacacgtcctaaa

SEQ ID NO: 4758951 - DNA, 25 bp, Homo sapien
gcctttccaggctccttgatttgct

SEQ ID NO: 4758952 - DNA, 25 bp, Homo sapien
ggataacctgatgaaatggcttgca

SEQ ID NO: 4758953 - DNA, 25 bp, Homo sapien
ctttccaggctccttgatttgctcc

SEQ ID NO: 4758954 - DNA, 25 bp, Homo sapien
tgcctttccaggctccttgatttgc

SEQ ID NO: 4758955 - DNA, 25 bp, Homo sapien
gaaagcagcctcaagagatcacaca

SEQ ID NO: 4758956 - DNA, 25 bp, Homo sapien
caatggtattagatacacgccaaca

SEQ ID NO: 4758957 - DNA, 25 bp, Homo sapien
ttaaagacggaaaaacatcacagtg

SEQ ID NO: 4758958 - DNA, 25 bp, Homo sapien
tgctttccaaagataggtcccctgg

SEQ ID NO: 4758959 - DNA, 25 bp, Homo sapien
tgacaatcattgttatagagctatg

SEQ ID NO: 4758960 - DNA, 25 bp, Homo sapien
gctatgttcagaaagtggagacttt

SEQ ID NO: 4758961 - DNA, 25 bp, Homo sapien
cattgttatagagctatgttcagaa

SEQ ID NO: 4758962 - DNA, 25 bp, Homo sapien
ttatagagctatgttcagaaagtgg

SEQ ID NO: 4758963 - DNA, 25 bp, Homo sapien
agctctgctgtatctatgcgctccc

SEQ ID NO: 4758964 - DNA, 25 bp, Homo sapien
atatttattgttccacatgttggga

SEQ ID NO: 4758965 - DNA, 25 bp, Homo sapien
aacttgctaaggtacagtcctgtcc

SEQ ID NO: 4758966 - DNA, 25 bp, Homo sapien
tatctatgcgctccctggagaggga

SEQ ID NO: 4758967 - DNA, 25 bp, Homo sapien
cagtatacattgtatcttggtgaag

SEQ ID NO: 4758968 - DNA, 25 bp, Homo sapien
tcacttcaggaaggatttgttgtgt

SEQ ID NO: 4758969 - DNA, 25 bp, Homo sapien
cattgtatcttggtgaaggttctta

SEQ ID NO: 4758970 - DNA, 25 bp, Homo sapien
tactccttggagtttcctaattcac

SEQ ID NO: 4758971 - DNA, 25 bp, Homo sapien
gatactgtggatggaagaaatagga

SEQ ID NO: 4758972 - DNA, 25 bp, Homo sapien
agctttgccaggatactgtggatgg

SEQ ID NO: 4758973 - DNA, 25 bp, Homo sapien
tactgtggatggaagaaataggaaa

SEQ ID NO: 4758974 - DNA, 25 bp, Homo sapien
atactgtggatggaagaaataggaa

SEQ ID NO: 4758975 - DNA, 25 bp, Homo sapien
tgcctgcctctaggatgtagggaag

SEQ ID NO: 4758976 - DNA, 25 bp, Homo sapien
cctcaaatggcatagctaaatactt

SEQ ID NO: 4758977 - DNA, 25 bp, Homo sapien
caacacagggaaatgcactttcttg

SEQ ID NO: 4758978 - DNA, 25 bp, Homo sapien
tctagaagcctcaaatggcatagct

SEQ ID NO: 4758979 - DNA, 25 bp, Homo sapien
tcaaaacatgtcagctgttcttggg

SEQ ID NO: 4758980 - DNA, 25 bp, Homo sapien
cttgggctttggaacagatggtgaa

SEQ ID NO: 4758981 - DNA, 25 bp, Homo sapien
aaacatgtcagctgttcttgggctt

SEQ ID NO: 4758982 - DNA, 25 bp, Homo sapien
ctgtcaaaacatgtcagctgttctt

SEQ ID NO: 4758983 - DNA, 25 bp, Homo sapien
caaagagctataggtgtccaacagc

SEQ ID NO: 4758984 - DNA, 25 bp, Homo sapien
tagtcataaaggaaagctggaccca

SEQ ID NO: 4758985 - DNA, 25 bp, Homo sapien
tatcatttatgaaggctgagcccct

SEQ ID NO: 4758986 - DNA, 25 bp, Homo sapien
gatcataaggccaaactccagtgta

SEQ ID NO: 4758987 - DNA, 25 bp, Homo sapien
tgctagttcttgtattagatcttca

SEQ ID NO: 4758988 - DNA, 25 bp, Homo sapien
gttcttgtattagatcttcatatac

SEQ ID NO: 4758989 - DNA, 25 bp, Homo sapien
tttgctagttcttgtattagatctt

SEQ ID NO: 4758990 - DNA, 25 bp, Homo sapien
ctagttcttgtattagatcttcata

SEQ ID NO: 4758991 - DNA, 25 bp, Homo sapien
taggtgcactgaaggtgttcaccca

SEQ ID NO: 4758992 - DNA, 25 bp, Homo sapien
gatgctagccagctataataggtca

SEQ ID NO: 4758993 - DNA, 25 bp, Homo sapien
tactttgacacccaacatctcttgt

SEQ ID NO: 4758994 - DNA, 25 bp, Homo sapien
tgtgcatacggcactttaggtgcac

SEQ ID NO: 4758995 - DNA, 25 bp, Homo sapien
gagacatgcattcctcccttacagg

SEQ ID NO: 4758996 - DNA, 25 bp, Homo sapien
gatgttcttgcaaccaatggtccaa

SEQ ID NO: 4758997 - DNA, 25 bp, Homo sapien
tccaagttggacgtggtgcagccag

SEQ ID NO: 4758998 - DNA, 25 bp, Homo sapien
gcattgagtgccctattccagtgat

SEQ ID NO: 4758999 - DNA, 25 bp, Homo sapien
caacttcccatgtgatgtcctgcat

SEQ ID NO: 4759000 - DNA, 25 bp, Homo sapien
ggccatcaaagtatcccggagagtc

SEQ ID NO: 4759001 - DNA, 25 bp, Homo sapien
gtactttagatacatgggccacaca

SEQ ID NO: 4759002 - DNA, 25 bp, Homo sapien
aaagtatcccggagagtctggaggc

SEQ ID NO: 4759003 - DNA, 25 bp, Homo sapien
gtctggaggctgatagacccttgta

SEQ ID NO: 4759004 - DNA, 25 bp, Homo sapien
taaaatcctaatcaccatgggcttg

SEQ ID NO: 4759005 - DNA, 25 bp, Homo sapien
tactccatgcggatgaccatttatg

SEQ ID NO: 4759006 - DNA, 25 bp, Homo sapien
ggcagaacaggctcacttacattaa

SEQ ID NO: 4759007 - DNA, 25 bp, Homo sapien
caatggcagttagaacgacagtaac

SEQ ID NO: 4759008 - DNA, 25 bp, Homo sapien
agcttctattccatatagtgtcaag

SEQ ID NO: 4759009 - DNA, 25 bp, Homo sapien
cattcttcatatggaatagtcagga

SEQ ID NO: 4759010 - DNA, 25 bp, Homo sapien
tagtcaggaaatagcttctattcca

SEQ ID NO: 4759011 - DNA, 25 bp, Homo sapien
tatggaatagtcaggaaatagcttc

SEQ ID NO: 4759012 - DNA, 25 bp, Homo sapien
acagcatacttagttcacaagggtt

SEQ ID NO: 4759013 - DNA, 25 bp, Homo sapien
aacagcatacttagttcacaagggt

SEQ ID NO: 4759014 - DNA, 25 bp, Homo sapien
ttgataccacagagtgtcttgcgct

SEQ ID NO: 4759015 - DNA, 25 bp, Homo sapien
gtctgttgataccacagagtgtctt

SEQ ID NO: 4759016 - DNA, 25 bp, Homo sapien
taccacagagtgtcttgcgctttcc

SEQ ID NO: 4759017 - DNA, 25 bp, Homo sapien
agaaaaccttcgatgattaaaatgg

SEQ ID NO: 4759018 - DNA, 25 bp, Homo sapien
tatctgtctctatctcagactctgg

SEQ ID NO: 4759019 - DNA, 25 bp, Homo sapien
aatccatttttatctgtctctatct

SEQ ID NO: 4759020 - DNA, 25 bp, Homo sapien
tccatttttatctgtctctatctca

SEQ ID NO: 4759021 - DNA, 25 bp, Homo sapien
ttttatctgtctctatctcagactc

SEQ ID NO: 4759022 - DNA, 25 bp, Homo sapien
tgaagaaatcatcctgagatatgac

SEQ ID NO: 4759023 - DNA, 25 bp, Homo sapien
cctgagatatgacactgcaatttgg

SEQ ID NO: 4759024 - DNA, 25 bp, Homo sapien
gaaatcatcctgagatatgacactg

SEQ ID NO: 4759025 - DNA, 25 bp, Homo sapien
tcttagccagtgttgttttgccact

SEQ ID NO: 4759026 - DNA, 25 bp, Homo sapien
tgtagcttatcacaacaggccagtt

SEQ ID NO: 4759027 - DNA, 25 bp, Homo sapien
agggaggcacttctcgattcagtca

SEQ ID NO: 4759028 - DNA, 25 bp, Homo sapien
gaaatcacatttcctctgcgatgcc

SEQ ID NO: 4759029 - DNA, 25 bp, Homo sapien
tttgcagcatcgaggagatcacacg

SEQ ID NO: 4759030 - DNA, 25 bp, Homo sapien
tgaacataagtcagggcatctgtga

SEQ ID NO: 4759031 - DNA, 25 bp, Homo sapien
gaacataagtcagggcatctgtgaa

SEQ ID NO: 4759032 - DNA, 25 bp, Homo sapien
gtgaacataagtcagggcatctgtg

SEQ ID NO: 4759033 - DNA, 25 bp, Homo sapien
gggtggatatcttgaagtatcatcg

SEQ ID NO: 4759034 - DNA, 25 bp, Homo sapien
cagatgttttcatattatgttgcag

SEQ ID NO: 4759035 - DNA, 25 bp, Homo sapien
gatttatggcattgtttagacccac

SEQ ID NO: 4759036 - DNA, 25 bp, Homo sapien
ataagtacctctgacattcaccaag

SEQ ID NO: 4759037 - DNA, 25 bp, Homo sapien
ccttcttccgccatgtgacatgctg

SEQ ID NO: 4759038 - DNA, 25 bp, Homo sapien
tccttcttccgccatgtgacatgct

SEQ ID NO: 4759039 - DNA, 25 bp, Homo sapien
gctccttcttccgccatgtgacatg

SEQ ID NO: 4759040 - DNA, 25 bp, Homo sapien
ctccttcttccgccatgtgacatgc

SEQ ID NO: 4759041 - DNA, 25 bp, Homo sapien
gaaagcagtgcccaatcagaccttg

SEQ ID NO: 4759042 - DNA, 25 bp, Homo sapien
taaatcatcctgaatgaaagcagtg

SEQ ID NO: 4759043 - DNA, 25 bp, Homo sapien
tatggcaccacaggtaggatgacca

SEQ ID NO: 4759044 - DNA, 25 bp, Homo sapien
gacataaggccacccaaaacatggg

SEQ ID NO: 4759045 - DNA, 25 bp, Homo sapien
cactgattccaatgataaatgtttt

SEQ ID NO: 4759046 - DNA, 25 bp, Homo sapien
actgattccaatgataaatgttttc

SEQ ID NO: 4759047 - DNA, 25 bp, Homo sapien
ccactgattccaatgataaatgttt

SEQ ID NO: 4759048 - DNA, 25 bp, Homo sapien
tgattccaatgataaatgttttcat

SEQ ID NO: 4759049 - DNA, 25 bp, Homo sapien
tgaaaatcacagcttcctaatattt

SEQ ID NO: 4759050 - DNA, 25 bp, Homo sapien
ttgaaaatcacagcttcctaatatt

SEQ ID NO: 4759051 - DNA, 25 bp, Homo sapien
gaaaatcacagcttcctaatatttc

SEQ ID NO: 4759052 - DNA, 25 bp, Homo sapien
tcagcccagccccgcattatccaca

SEQ ID NO: 4759053 - DNA, 25 bp, Homo sapien
cagcccagccccgcattatccacat

SEQ ID NO: 4759054 - DNA, 25 bp, Homo sapien
ttcagcccagccccgcattatccac

SEQ ID NO: 4759055 - DNA, 25 bp, Homo sapien
ctgctgggtaatgcgaaagcggcca

SEQ ID NO: 4759056 - DNA, 25 bp, Homo sapien
caaatgagcgtgaccgtgttccagt

SEQ ID NO: 4759057 - DNA, 25 bp, Homo sapien
taacgcagctctctaacgcaaatga

SEQ ID NO: 4759058 - DNA, 25 bp, Homo sapien
gattgtacgaactctctaacgcagc

SEQ ID NO: 4759059 - DNA, 25 bp, Homo sapien
tctttttatttcttttcagtcatta

SEQ ID NO: 4759060 - DNA, 25 bp, Homo sapien
tcgatccgcgaggatcaagtcctga

SEQ ID NO: 4759061 - DNA, 25 bp, Homo sapien
ccaacgctagaggaatgagaccata

SEQ ID NO: 4759062 - DNA, 25 bp, Homo sapien
gtctcttggaggcagcgttcccatt

SEQ ID NO: 4759063 - DNA, 25 bp, Homo sapien
tgtccctggcgacttctccaggctg

SEQ ID NO: 4759064 - DNA, 25 bp, Homo sapien
ggcgcggcaggggcgagcaggtacg

SEQ ID NO: 4759065 - DNA, 25 bp, Homo sapien
aggctttcagggcgcaaccaagtcc

SEQ ID NO: 4759066 - DNA, 25 bp, Homo sapien
ctttcagggcgcaaccaagtcccgg

SEQ ID NO: 4759067 - DNA, 25 bp, Homo sapien
caaggctttcagggcgcaaccaagt

SEQ ID NO: 4759068 - DNA, 25 bp, Homo sapien
aaacacagcggcagaggcgacagcc

SEQ ID NO: 4759069 - DNA, 25 bp, Homo sapien
tggcgccagttcgagtcctcccaaa

SEQ ID NO: 4759070 - DNA, 25 bp, Homo sapien
ccacgctcctcctgggttagaggga

SEQ ID NO: 4759071 - DNA, 25 bp, Homo sapien
cttttctctactctcggcgccgggt

SEQ ID NO: 4759072 - DNA, 25 bp, Homo sapien
cgggcaagcggtgggcttttcggcg

SEQ ID NO: 4759073 - DNA, 25 bp, Homo sapien
ggtgcccggagtgccaggtggcggg

SEQ ID NO: 4759074 - DNA, 25 bp, Homo sapien
ccaggaagcgagatgtcgaagccgc

SEQ ID NO: 4759075 - DNA, 25 bp, Homo sapien
ggtctttaggatttgcagctccagg

SEQ ID NO: 4759076 - DNA, 25 bp, Homo sapien
tactaattgtggatacattcccagg

SEQ ID NO: 4759077 - DNA, 25 bp, Homo sapien
ggaccttaagtatctaacagtgcag

SEQ ID NO: 4759078 - DNA, 25 bp, Homo sapien
catgacaggtgtttagagggaactt

SEQ ID NO: 4759079 - DNA, 25 bp, Homo sapien
cctgctgccagttgaaatacgttaa

SEQ ID NO: 4759080 - DNA, 25 bp, Homo sapien
cctgtatacgtttgaacccagaact

SEQ ID NO: 4759081 - DNA, 25 bp, Homo sapien
gagccctgtatacgtttgaacccag

SEQ ID NO: 4759082 - DNA, 25 bp, Homo sapien
ttcagagccctgtatacgtttgaac

SEQ ID NO: 4759083 - DNA, 25 bp, Homo sapien
cagagccctgtatacgtttgaaccc

SEQ ID NO: 4759084 - DNA, 25 bp, Homo sapien
gaggaaggtgatattatctacatta

SEQ ID NO: 4759085 - DNA, 25 bp, Homo sapien
ctttgaggaaggtgatattatctac

SEQ ID NO: 4759086 - DNA, 25 bp, Homo sapien
ggtgatattatctacattactgaca

SEQ ID NO: 4759087 - DNA, 25 bp, Homo sapien
gaaggtgatattatctacattactg

SEQ ID NO: 4759088 - DNA, 25 bp, Homo sapien
taccaattggtggaaaggcacctcc

SEQ ID NO: 4759089 - DNA, 25 bp, Homo sapien
agcgataccaattggtggaaaggca

SEQ ID NO: 4759090 - DNA, 25 bp, Homo sapien
aggcaggactggactaattccaagc

SEQ ID NO: 4759091 - DNA, 25 bp, Homo sapien
actggactaattccaagcaactatg

SEQ ID NO: 4759092 - DNA, 25 bp, Homo sapien
tgacaatccattgcatgaagcagca

SEQ ID NO: 4759093 - DNA, 25 bp, Homo sapien
cattgacaatccattgcatgaagca

SEQ ID NO: 4759094 - DNA, 25 bp, Homo sapien
caggcagaatccattgacaatccat

SEQ ID NO: 4759095 - DNA, 25 bp, Homo sapien
gaatccattgacaatccattgcatg

SEQ ID NO: 4759096 - DNA, 25 bp, Homo sapien
gggtgttaatggcttagacaaagct

SEQ ID NO: 4759097 - DNA, 25 bp, Homo sapien
ttgagagagtgtttggacaacagag

SEQ ID NO: 4759098 - DNA, 25 bp, Homo sapien
agtgggtgttaatggcttagacaaa

SEQ ID NO: 4759099 - DNA, 25 bp, Homo sapien
agctggttgagagagtgtttggaca

SEQ ID NO: 4759100 - DNA, 25 bp, Homo sapien
tttactcaaccaaatattgaactga

SEQ ID NO: 4759101 - DNA, 25 bp, Homo sapien
atatagtggaaatgctatttactca

SEQ ID NO: 4759102 - DNA, 25 bp, Homo sapien
gctatttactcaaccaaatattgaa

SEQ ID NO: 4759103 - DNA, 25 bp, Homo sapien
aaccaaatattgaactgaaccagca

SEQ ID NO: 4759104 - DNA, 25 bp, Homo sapien
aacaagttgggagatacagctttgc

SEQ ID NO: 4759105 - DNA, 25 bp, Homo sapien
cttcgacatggctaccaatgctgcc

SEQ ID NO: 4759106 - DNA, 25 bp, Homo sapien
tcgacatggctaccaatgctgcctg

SEQ ID NO: 4759107 - DNA, 25 bp, Homo sapien
cgacatggctaccaatgctgcctgt

SEQ ID NO: 4759108 - DNA, 25 bp, Homo sapien
ttcgacatggctaccaatgctgcct

SEQ ID NO: 4759109 - DNA, 25 bp, Homo sapien
tagcctgtcctgaccgaagagtaag

SEQ ID NO: 4759110 - DNA, 25 bp, Homo sapien
ggtgctccccagctacattatgatt

SEQ ID NO: 4759111 - DNA, 25 bp, Homo sapien
tctgcagccttcgtagaacagggct

SEQ ID NO: 4759112 - DNA, 25 bp, Homo sapien
caggtaatgagcctttctgcagcct

SEQ ID NO: 4759113 - DNA, 25 bp, Homo sapien
tggcctcccaaggtagttgttgtct

SEQ ID NO: 4759114 - DNA, 25 bp, Homo sapien
gttactatggaagataactaggata

SEQ ID NO: 4759115 - DNA, 25 bp, Homo sapien
tatactcgagttgagccctttaaca

SEQ ID NO: 4759116 - DNA, 25 bp, Homo sapien
tatggaagataactaggatataggg

SEQ ID NO: 4759117 - DNA, 25 bp, Homo sapien
gaaaattatatatgaacacggcagt

SEQ ID NO: 4759118 - DNA, 25 bp, Homo sapien
gcaatgccgaggactatctcgatga

SEQ ID NO: 4759119 - DNA, 25 bp, Homo sapien
cagttcgaacattaagcaatgccga

SEQ ID NO: 4759120 - DNA, 25 bp, Homo sapien
gaacgtgtaaatgaattgttcccac

SEQ ID NO: 4759121 - DNA, 25 bp, Homo sapien
tccatatggagtagtcaggaaccat

SEQ ID NO: 4759122 - DNA, 25 bp, Homo sapien
gctttgatcaaagtcaggacaataa

SEQ ID NO: 4759123 - DNA, 25 bp, Homo sapien
tgtggtatcactcattgtcgttaag

SEQ ID NO: 4759124 - DNA, 25 bp, Homo sapien
tacagtttcgctaagatttgaaagg

SEQ ID NO: 4759125 - DNA, 25 bp, Homo sapien
tctttccaacggaagcccttgatat

SEQ ID NO: 4759126 - DNA, 25 bp, Homo sapien
taggcatctaacaaattcagcatat

SEQ ID NO: 4759127 - DNA, 25 bp, Homo sapien
gatataggcatctaacaaattcagc

SEQ ID NO: 4759128 - DNA, 25 bp, Homo sapien
cggaagcccttgatataggcatcta

SEQ ID NO: 4759129 - DNA, 25 bp, Homo sapien
tgagtctgggagctcgatgtgtaca

SEQ ID NO: 4759130 - DNA, 25 bp, Homo sapien
gcagtgctgctgtgtctgtcgccag

SEQ ID NO: 4759131 - DNA, 25 bp, Homo sapien
agtggccagcggcttgggtttccca

SEQ ID NO: 4759132 - DNA, 25 bp, Homo sapien
aagtaacttcacaattcccaggcag

SEQ ID NO: 4759133 - DNA, 25 bp, Homo sapien
cccttaatgatattaccatcttgca

SEQ ID NO: 4759134 - DNA, 25 bp, Homo sapien
gctgcccttaatgatattaccatct

SEQ ID NO: 4759135 - DNA, 25 bp, Homo sapien
tatagagctgcccttaatgatatta

SEQ ID NO: 4759136 - DNA, 25 bp, Homo sapien
tagagctgcccttaatgatattacc

SEQ ID NO: 4759137 - DNA, 25 bp, Homo sapien
agctgtaaacaccagtgcactcagg

SEQ ID NO: 4759138 - DNA, 25 bp, Homo sapien
attagctgtaaacaccagtgcactc

SEQ ID NO: 4759139 - DNA, 25 bp, Homo sapien
tcaattagctgtaaacaccagtgca

SEQ ID NO: 4759140 - DNA, 25 bp, Homo sapien
caaataaatttataactggttgtga

SEQ ID NO: 4759141 - DNA, 25 bp, Homo sapien
tttggtctggtgatgccagtttccc

SEQ ID NO: 4759142 - DNA, 25 bp, Homo sapien
ttttggtctggtgatgccagtttcc

SEQ ID NO: 4759143 - DNA, 25 bp, Homo sapien
ttggtctggtgatgccagtttccca

SEQ ID NO: 4759144 - DNA, 25 bp, Homo sapien
cagttaatcaggcaataaacccgtt

SEQ ID NO: 4759145 - DNA, 25 bp, Homo sapien
taggccagttaatcaggcaataaac

SEQ ID NO: 4759146 - DNA, 25 bp, Homo sapien
cgtttaggccagttaatcaggcaat

SEQ ID NO: 4759147 - DNA, 25 bp, Homo sapien
taatcaggcaataaacccgttctat

SEQ ID NO: 4759148 - DNA, 25 bp, Homo sapien
tttgctgccaggccgtcatgacagc

SEQ ID NO: 4759149 - DNA, 25 bp, Homo sapien
ctcatttgctgccaggccgtcatga

SEQ ID NO: 4759150 - DNA, 25 bp, Homo sapien
tgctgccaggccgtcatgacagctt

SEQ ID NO: 4759151 - DNA, 25 bp, Homo sapien
catttgctgccaggccgtcatgaca

SEQ ID NO: 4759152 - DNA, 25 bp, Homo sapien
cctccacagcgggacttggagagcc

SEQ ID NO: 4759153 - DNA, 25 bp, Homo sapien
tggagagcctgtgtcccagcctcac

SEQ ID NO: 4759154 - DNA, 25 bp, Homo sapien
ccacagcgggacttggagagcctgt

SEQ ID NO: 4759155 - DNA, 25 bp, Homo sapien
ctcctccacagcgggacttggagag

SEQ ID NO: 4759156 - DNA, 25 bp, Homo sapien
tgctaagttgctgcccaccatttac

SEQ ID NO: 4759157 - DNA, 25 bp, Homo sapien
cagacccacgtagcgcagtggggcc

SEQ ID NO: 4759158 - DNA, 25 bp, Homo sapien
gccagtgctaagttgctgcccacca

SEQ ID NO: 4759159 - DNA, 25 bp, Homo sapien
ttactctgttattccaacccagacc

SEQ ID NO: 4759160 - DNA, 25 bp, Homo sapien
ttgttaatcctcgaggcaggcgacc

SEQ ID NO: 4759161 - DNA, 25 bp, Homo sapien
ttgggatgcccttatatccttctgc

SEQ ID NO: 4759162 - DNA, 25 bp, Homo sapien
ggcgaccacctcttttcaacagcag

SEQ ID NO: 4759163 - DNA, 25 bp, Homo sapien
tattctacacaggaccatggttgca

SEQ ID NO: 4759164 - DNA, 25 bp, Homo sapien
tgtttgggaacctgaccatcatcct

SEQ ID NO: 4759165 - DNA, 25 bp, Homo sapien
ctaggtcttggtcttcactgtttgg

SEQ ID NO: 4759166 - DNA, 25 bp, Homo sapien
ttcacagccggccttctcaaaatgg

SEQ ID NO: 4759167 - DNA, 25 bp, Homo sapien
aaggatcttgggagataggaagctc

SEQ ID NO: 4759168 - DNA, 25 bp, Homo sapien
tctgtacagtttgtaaactgttgcc

SEQ ID NO: 4759169 - DNA, 25 bp, Homo sapien
tgtacagtttgtaaactgttgcccc

SEQ ID NO: 4759170 - DNA, 25 bp, Homo sapien
tgagctctgtacagtttgtaaactg

SEQ ID NO: 4759171 - DNA, 25 bp, Homo sapien
tacagtttgtaaactgttgccccat

SEQ ID NO: 4759172 - DNA, 25 bp, Homo sapien
ttgtctcatcttcactaggttccat

SEQ ID NO: 4759173 - DNA, 25 bp, Homo sapien
caggcatgctgtcacgtctgggtca

SEQ ID NO: 4759174 - DNA, 25 bp, Homo sapien
gacttgacgtcaaacagcagccaag

SEQ ID NO: 4759175 - DNA, 25 bp, Homo sapien
ctgagaatccgcctggcctgggtgt

SEQ ID NO: 4759176 - DNA, 25 bp, Homo sapien
tcatctgctgtcagcggacggttcc

SEQ ID NO: 4759177 - DNA, 25 bp, Homo sapien
tcagagcgtgactaggtttccatgg

SEQ ID NO: 4759178 - DNA, 25 bp, Homo sapien
ttaatcagatccttttgcagcacgc

SEQ ID NO: 4759179 - DNA, 25 bp, Homo sapien
ccttttgcagcacgccgcgagtgtt

SEQ ID NO: 4759180 - DNA, 25 bp, Homo sapien
gagcgtgactaggtttccatggaaa

SEQ ID NO: 4759181 - DNA, 25 bp, Homo sapien
gattgacgaaacaagtgtctgccga

SEQ ID NO: 4759182 - DNA, 25 bp, Homo sapien
tagaaaagaaggattgacgaaacaa

SEQ ID NO: 4759183 - DNA, 25 bp, Homo sapien
agtgtctgccgattgtcactggact

SEQ ID NO: 4759184 - DNA, 25 bp, Homo sapien
cgattgtcactggactttctatccc

SEQ ID NO: 4759185 - DNA, 25 bp, Homo sapien
ccctctaatggctgatgggataatg

SEQ ID NO: 4759186 - DNA, 25 bp, Homo sapien
taaatctttaccctctaatggctga

SEQ ID NO: 4759187 - DNA, 25 bp, Homo sapien
ggctaaatctttaccctctaatggc

SEQ ID NO: 4759188 - DNA, 25 bp, Homo sapien
tctttaccctctaatggctgatggg

SEQ ID NO: 4759189 - DNA, 25 bp, Homo sapien
tggctattagcatgatcactggtac

SEQ ID NO: 4759190 - DNA, 25 bp, Homo sapien
gatgactgtgggctgttacaccaac

SEQ ID NO: 4759191 - DNA, 25 bp, Homo sapien
tgttaacgtgatcacctgcactagg

SEQ ID NO: 4759192 - DNA, 25 bp, Homo sapien
ttagcatgatcaccggcactaggag

SEQ ID NO: 4759193 - DNA, 25 bp, Homo sapien
tgggccctcttaatgtccctgcagc

SEQ ID NO: 4759194 - DNA, 25 bp, Homo sapien
ttcagaataattgggcttattaatt

SEQ ID NO: 4759195 - DNA, 25 bp, Homo sapien
aggacaactcccacgtcctcatggg

SEQ ID NO: 4759196 - DNA, 25 bp, Homo sapien
ccggcacaggggcacataaggacaa

SEQ ID NO: 4759197 - DNA, 25 bp, Homo sapien
tcttctatcctggtaggaataggaa

SEQ ID NO: 4759198 - DNA, 25 bp, Homo sapien
aaatcttcttcttctatcctggtag

SEQ ID NO: 4759199 - DNA, 25 bp, Homo sapien
cttcttctatcctggtaggaatagg

SEQ ID NO: 4759200 - DNA, 25 bp, Homo sapien
tcttcttcttctatcctggtaggaa

SEQ ID NO: 4759201 - DNA, 25 bp, Homo sapien
ctctgcatccacatgagcaagctcc

SEQ ID NO: 4759202 - DNA, 25 bp, Homo sapien
catccacatgagcaagctccatctc

SEQ ID NO: 4759203 - DNA, 25 bp, Homo sapien
tctgcatccacatgagcaagctcca

SEQ ID NO: 4759204 - DNA, 25 bp, Homo sapien
tgcatccacatgagcaagctccatc

SEQ ID NO: 4759205 - DNA, 25 bp, Homo sapien
taatcaggtttgatactgtccatcc

SEQ ID NO: 4759206 - DNA, 25 bp, Homo sapien
ggtttctatcacctctacaatcggg

SEQ ID NO: 4759207 - DNA, 25 bp, Homo sapien
gctgttctaattcttggttgagtgc

SEQ ID NO: 4759208 - DNA, 25 bp, Homo sapien
tgtccatcctactttccatttcggt

SEQ ID NO: 4759209 - DNA, 25 bp, Homo sapien
ttggtcagcatgctttcacactcag

SEQ ID NO: 4759210 - DNA, 25 bp, Homo sapien
ggcttcttggtcagcatgctttcac

SEQ ID NO: 4759211 - DNA, 25 bp, Homo sapien
tcttggtcagcatgctttcacactc

SEQ ID NO: 4759212 - DNA, 25 bp, Homo sapien
ggtttccttaatggcttcttggtca

SEQ ID NO: 4759213 - DNA, 25 bp, Homo sapien
tatattctacatcaaaccccttttc

SEQ ID NO: 4759214 - DNA, 25 bp, Homo sapien
tcagacatgacactgcttctccact

SEQ ID NO: 4759215 - DNA, 25 bp, Homo sapien
tcaaaccccttttcctcagacatga

SEQ ID NO: 4759216 - DNA, 25 bp, Homo sapien
tgtacatatattctacatcaaaccc

SEQ ID NO: 4759217 - DNA, 25 bp, Homo sapien
tatccaactgcttaactctagtgac

SEQ ID NO: 4759218 - DNA, 25 bp, Homo sapien
gatgcccaggtccaaatagttgacc

SEQ ID NO: 4759219 - DNA, 25 bp, Homo sapien
gaatgaactacttgaaccatggata

SEQ ID NO: 4759220 - DNA, 25 bp, Homo sapien
tagcatactccattgtagacagtcc

SEQ ID NO: 4759221 - DNA, 25 bp, Homo sapien
taacatgaaatacactgatccacag

SEQ ID NO: 4759222 - DNA, 25 bp, Homo sapien
tcatagtacatctgctggaaagaag

SEQ ID NO: 4759223 - DNA, 25 bp, Homo sapien
tcctggttctgggtatgaagcttgc

SEQ ID NO: 4759224 - DNA, 25 bp, Homo sapien
gctggaaagaagagcctttttggac

SEQ ID NO: 4759225 - DNA, 25 bp, Homo sapien
cagagtccagcagggaaatcggatg

SEQ ID NO: 4759226 - DNA, 25 bp, Homo sapien
ccagagtccagcagggaaatcggat

SEQ ID NO: 4759227 - DNA, 25 bp, Homo sapien
ggcagtcagcgtcgttttgcctttc

SEQ ID NO: 4759228 - DNA, 25 bp, Homo sapien
tcagcgtcgttttgcctttctctgg

SEQ ID NO: 4759229 - DNA, 25 bp, Homo sapien
ctgcgtctgaggaggcttttctgta

SEQ ID NO: 4759230 - DNA, 25 bp, Homo sapien
aaagcaccttgaaagtcactccata

SEQ ID NO: 4759231 - DNA, 25 bp, Homo sapien
aagcaccttgaaagtcactccatat

SEQ ID NO: 4759232 - DNA, 25 bp, Homo sapien
aatgtgggtagcctgcgtctgagga

SEQ ID NO: 4759233 - DNA, 25 bp, Homo sapien
tcaggtttaaggacgcccctgtgtc

SEQ ID NO: 4759234 - DNA, 25 bp, Homo sapien
ttaaggacgcccctgtgtcacacaa

SEQ ID NO: 4759235 - DNA, 25 bp, Homo sapien
tgtgtcacacaaactacagaagcag

SEQ ID NO: 4759236 - DNA, 25 bp, Homo sapien
gcccctgtgtcacacaaactacaga

SEQ ID NO: 4759237 - DNA, 25 bp, Homo sapien
ggccataacctatatcccatctgtg

SEQ ID NO: 4759238 - DNA, 25 bp, Homo sapien
tgacacctcatgatgttcctcagag

SEQ ID NO: 4759239 - DNA, 25 bp, Homo sapien
aactctgtaggacgttgtaagctaa

SEQ ID NO: 4759240 - DNA, 25 bp, Homo sapien
ggtggccccatctcgagctcatttg

SEQ ID NO: 4759241 - DNA, 25 bp, Homo sapien
ctaatccatttagccacagtctctt

SEQ ID NO: 4759242 - DNA, 25 bp, Homo sapien
ctctaatccatttagccacagtctc

SEQ ID NO: 4759243 - DNA, 25 bp, Homo sapien
aggttctctaatccatttagccaca

SEQ ID NO: 4759244 - DNA, 25 bp, Homo sapien
ggaaggttctctaatccatttagcc

SEQ ID NO: 4759245 - DNA, 25 bp, Homo sapien
cttctgaaagtagagaattttggca

SEQ ID NO: 4759246 - DNA, 25 bp, Homo sapien
tgaaagtagagaattttggcagttt

SEQ ID NO: 4759247 - DNA, 25 bp, Homo sapien
tctgaaagtagagaattttggcagt

SEQ ID NO: 4759248 - DNA, 25 bp, Homo sapien
ttctgaaagtagagaattttggcag

SEQ ID NO: 4759249 - DNA, 25 bp, Homo sapien
ggctcagtgttatgaaatctcactt

SEQ ID NO: 4759250 - DNA, 25 bp, Homo sapien
ctcactttcatcatacactggattt

SEQ ID NO: 4759251 - DNA, 25 bp, Homo sapien
taaaaaggctcagtgttatgaaatc

SEQ ID NO: 4759252 - DNA, 25 bp, Homo sapien
attggtctggttatctctctgtgta

SEQ ID NO: 4759253 - DNA, 25 bp, Homo sapien
cggacattggaaggacacacagact

SEQ ID NO: 4759254 - DNA, 25 bp, Homo sapien
tccacgctgacatgggaaggacaca

SEQ ID NO: 4759255 - DNA, 25 bp, Homo sapien
gactccacgctgacatgggaaggac

SEQ ID NO: 4759256 - DNA, 25 bp, Homo sapien
ggacattggaaggacacacagactc

SEQ ID NO: 4759257 - DNA, 25 bp, Homo sapien
tttggaatttccagataactcggat

SEQ ID NO: 4759258 - DNA, 25 bp, Homo sapien
cacaaggctccattctagacagttt

SEQ ID NO: 4759259 - DNA, 25 bp, Homo sapien
tcaattacatcaagagtcacaaggc

SEQ ID NO: 4759260 - DNA, 25 bp, Homo sapien
taactcggattccatggatgagaaa

SEQ ID NO: 4759261 - DNA, 25 bp, Homo sapien
agtttgcctctagctgtttctcctg

SEQ ID NO: 4759262 - DNA, 25 bp, Homo sapien
gacttttgacaaggtgcagtttgcc

SEQ ID NO: 4759263 - DNA, 25 bp, Homo sapien
tgctctgcaaaagcccacgtaggtt

SEQ ID NO: 4759264 - DNA, 25 bp, Homo sapien
ggtagccccttgagtgatccgagag

SEQ ID NO: 4759265 - DNA, 25 bp, Homo sapien
cacatcaagataagaattaggtcaa

SEQ ID NO: 4759266 - DNA, 25 bp, Homo sapien
taaacaaggattgtaagaacaacaa

SEQ ID NO: 4759267 - DNA, 25 bp, Homo sapien
tatatcaaatgataacatattcaca

SEQ ID NO: 4759268 - DNA, 25 bp, Homo sapien
ggcatgagatattctttgagactga

SEQ ID NO: 4759269 - DNA, 25 bp, Homo sapien
gcatcacaagcttagtccctgtttt

SEQ ID NO: 4759270 - DNA, 25 bp, Homo sapien
tcccatccagtgactgggagttttc

SEQ ID NO: 4759271 - DNA, 25 bp, Homo sapien
tggcatcacaagcttagtccctgtt

SEQ ID NO: 4759272 - DNA, 25 bp, Homo sapien
catccagtgactgggagttttctct

SEQ ID NO: 4759273 - DNA, 25 bp, Homo sapien
ggatcaggatcaggaaaaaatgaac

SEQ ID NO: 4759274 - DNA, 25 bp, Homo sapien
ttttcaatacctcttcaccttgttc

SEQ ID NO: 4759275 - DNA, 25 bp, Homo sapien
ttctggcctctggaggatcaggatc

SEQ ID NO: 4759276 - DNA, 25 bp, Homo sapien
ctccccttaccctcttgttgcttct

SEQ ID NO: 4759277 - DNA, 25 bp, Homo sapien
gggatatcagttcatcacacacatt

SEQ ID NO: 4759278 - DNA, 25 bp, Homo sapien
gttatgggatatcagttcatcacac

SEQ ID NO: 4759279 - DNA, 25 bp, Homo sapien
tatgggatatcagttcatcacacac

SEQ ID NO: 4759280 - DNA, 25 bp, Homo sapien
ctctttgctgtatgtctgattcctt

SEQ ID NO: 4759281 - DNA, 25 bp, Homo sapien
aaatgccagctgttgactataaggg

SEQ ID NO: 4759282 - DNA, 25 bp, Homo sapien
gaaattccacgtaggactgcacact

SEQ ID NO: 4759283 - DNA, 25 bp, Homo sapien
tcttctttgtaaccgagagggctga

SEQ ID NO: 4759284 - DNA, 25 bp, Homo sapien
tgattgcattaattccacggacagc

SEQ ID NO: 4759285 - DNA, 25 bp, Homo sapien
tctggatcacaggtccctttgggaa

SEQ ID NO: 4759286 - DNA, 25 bp, Homo sapien
gagccagcatggtgagtgttttccc

SEQ ID NO: 4759287 - DNA, 25 bp, Homo sapien
tgcagttggaaacgggttgtgtctt

SEQ ID NO: 4759288 - DNA, 25 bp, Homo sapien
tgcctatccccatgctttgcagttg

SEQ ID NO: 4759289 - DNA, 25 bp, Homo sapien
caatcgatcctgtagtctgatctaa

SEQ ID NO: 4759290 - DNA, 25 bp, Homo sapien
agagaactgggtgtgttgctttccc

SEQ ID NO: 4759291 - DNA, 25 bp, Homo sapien
ccaggatactgctgtactgagtcca

SEQ ID NO: 4759292 - DNA, 25 bp, Homo sapien
tctgatctaacttctcccagagaga

SEQ ID NO: 4759293 - DNA, 25 bp, Homo sapien
agtactgcttccctctctttcggag

SEQ ID NO: 4759294 - DNA, 25 bp, Homo sapien
gatatcatttatcccctgccagtac

SEQ ID NO: 4759295 - DNA, 25 bp, Homo sapien
ggacccttcactgtcatatgcatca

SEQ ID NO: 4759296 - DNA, 25 bp, Homo sapien
tatgcatcatccgtgtaacatgggc

SEQ ID NO: 4759297 - DNA, 25 bp, Homo sapien
tagccacccagcagcattgtctttg

SEQ ID NO: 4759298 - DNA, 25 bp, Homo sapien
gaaatcccgtcaacaactgcaaggg

SEQ ID NO: 4759299 - DNA, 25 bp, Homo sapien
tggcagacacgctgttatggctagc

SEQ ID NO: 4759300 - DNA, 25 bp, Homo sapien
gaagagtcacaccttagtcgtaggg

SEQ ID NO: 4759301 - DNA, 25 bp, Homo sapien
taactggcctcgacgtaaattttca

SEQ ID NO: 4759302 - DNA, 25 bp, Homo sapien
tcagcattgttgtctctgaccccat

SEQ ID NO: 4759303 - DNA, 25 bp, Homo sapien
catcaggctgacaaatggcttttgt

SEQ ID NO: 4759304 - DNA, 25 bp, Homo sapien
tgtttaggtctcatgcatccctgct

SEQ ID NO: 4759305 - DNA, 25 bp, Homo sapien
ttctgtcttttcatcgctctgccat

SEQ ID NO: 4759306 - DNA, 25 bp, Homo sapien
tttgttctggaaagatatgcagtca

SEQ ID NO: 4759307 - DNA, 25 bp, Homo sapien
gtcttttcatcgctctgccattaag

SEQ ID NO: 4759308 - DNA, 25 bp, Homo sapien
agatatgcagtcatatcagcatcct

SEQ ID NO: 4759309 - DNA, 25 bp, Homo sapien
taccttccagatggaatgtactgcc

SEQ ID NO: 4759310 - DNA, 25 bp, Homo sapien
gcctccttggctgagtatccttttg

SEQ ID NO: 4759311 - DNA, 25 bp, Homo sapien
aaagatggatctttgctgctgcctc

SEQ ID NO: 4759312 - DNA, 25 bp, Homo sapien
tcctggtctgcatgctaagtattgc

SEQ ID NO: 4759313 - DNA, 25 bp, Homo sapien
gacttgggcaagttgagtttcagca

SEQ ID NO: 4759314 - DNA, 25 bp, Homo sapien
gctgagtactgggtcttagcaaaca

SEQ ID NO: 4759315 - DNA, 25 bp, Homo sapien
tgtgttgtttccaggaggatagccg

SEQ ID NO: 4759316 - DNA, 25 bp, Homo sapien
cacatgtcgttgctcccaggtgaat

SEQ ID NO: 4759317 - DNA, 25 bp, Homo sapien
aatgtgcccgttagaactggttctc

SEQ ID NO: 4759318 - DNA, 25 bp, Homo sapien
gatgccttcaccaagctgtgcctgt

SEQ ID NO: 4759319 - DNA, 25 bp, Homo sapien
tgctgtagcactattgcgatgcctt

SEQ ID NO: 4759320 - DNA, 25 bp, Homo sapien
tgcctgttgcatcccaatgtgcccg

SEQ ID NO: 4759321 - DNA, 25 bp, Homo sapien
tgcatccccacatcggagagcagtt

SEQ ID NO: 4759322 - DNA, 25 bp, Homo sapien
cttggtgggctttctcaacgagata

SEQ ID NO: 4759323 - DNA, 25 bp, Homo sapien
tcctctgaacagagccggtggagag

SEQ ID NO: 4759324 - DNA, 25 bp, Homo sapien
gagaggccattctctgtccaggcaa

SEQ ID NO: 4759325 - DNA, 25 bp, Homo sapien
gacgccgccacatatctcatctgaa

SEQ ID NO: 4759326 - DNA, 25 bp, Homo sapien
cagtcacagtgcatgatagagtaat

SEQ ID NO: 4759327 - DNA, 25 bp, Homo sapien
tagagtaatgaaggtgacgccgcca

SEQ ID NO: 4759328 - DNA, 25 bp, Homo sapien
ctttcactgttacaggactgtgctt

SEQ ID NO: 4759329 - DNA, 25 bp, Homo sapien
gctgcctgctccccgtgtgtcggac

SEQ ID NO: 4759330 - DNA, 25 bp, Homo sapien
tgctccccgtgtgtcggacgcgcgt

SEQ ID NO: 4759331 - DNA, 25 bp, Homo sapien
gcctgctccccgtgtgtcggacgcg

SEQ ID NO: 4759332 - DNA, 25 bp, Homo sapien
tgcctgctccccgtgtgtcggacgc

SEQ ID NO: 4759333 - DNA, 25 bp, Homo sapien
aaaagactcctgatcgttgactggg

SEQ ID NO: 4759334 - DNA, 25 bp, Homo sapien
aaaaatgattgtgggcctgtccagc

SEQ ID NO: 4759335 - DNA, 25 bp, Homo sapien
ggtcacatgtcctccctcaaaggga

SEQ ID NO: 4759336 - DNA, 25 bp, Homo sapien
tccaccagttgggtagggacagttc

SEQ ID NO: 4759337 - DNA, 25 bp, Homo sapien
cgagtggcgagtcagaggaattccg

SEQ ID NO: 4759338 - DNA, 25 bp, Homo sapien
aaggaagggcgagtggcgagtcaga

SEQ ID NO: 4759339 - DNA, 25 bp, Homo sapien
ggaagggcgagtggcgagtcagagg

SEQ ID NO: 4759340 - DNA, 25 bp, Homo sapien
agggcgagtggcgagtcagaggaat

SEQ ID NO: 4759341 - DNA, 25 bp, Homo sapien
taactatggggcgtctttcaatttg

SEQ ID NO: 4759342 - DNA, 25 bp, Homo sapien
cattctttgactcatcacgggatga

SEQ ID NO: 4759343 - DNA, 25 bp, Homo sapien
tctttgactcatcacgggatgatgt

SEQ ID NO: 4759344 - DNA, 25 bp, Homo sapien
tgctgcattctttgactcatcacgg

SEQ ID NO: 4759345 - DNA, 25 bp, Homo sapien
tgcattctttgactcatcacgggat

SEQ ID NO: 4759346 - DNA, 25 bp, Homo sapien
tgagggacaccgtgaagaaagtgaa

SEQ ID NO: 4759347 - DNA, 25 bp, Homo sapien
ttgagtcacccttctagatccagcc

SEQ ID NO: 4759348 - DNA, 25 bp, Homo sapien
tgggcacaaaatatctgagtagaca

SEQ ID NO: 4759349 - DNA, 25 bp, Homo sapien
tcatatctgaggaagacttgtaccc

SEQ ID NO: 4759350 - DNA, 25 bp, Homo sapien
aacatgcagtgatttggtttgccga

SEQ ID NO: 4759351 - DNA, 25 bp, Homo sapien
tggcaagacagaattgaagcaacat

SEQ ID NO: 4759352 - DNA, 25 bp, Homo sapien
gacagaattgaagcaacatgcagtg

SEQ ID NO: 4759353 - DNA, 25 bp, Homo sapien
gccgatttgcgatctgttaaaaatc

SEQ ID NO: 4759354 - DNA, 25 bp, Homo sapien
tgttcaacctaattctgaaaaggca

SEQ ID NO: 4759355 - DNA, 25 bp, Homo sapien
tcacctgtggaagtcatggctggca

SEQ ID NO: 4759356 - DNA, 25 bp, Homo sapien
tttacagtgcccacactatgctgag

SEQ ID NO: 4759357 - DNA, 25 bp, Homo sapien
caaaggttatagtgaacccagcaag

SEQ ID NO: 4759358 - DNA, 25 bp, Homo sapien
tgtgatgaggagtaagttgctgcat

SEQ ID NO: 4759359 - DNA, 25 bp, Homo sapien
cctgactgtattatatggtttgtgc

SEQ ID NO: 4759360 - DNA, 25 bp, Homo sapien
tatggtttgtgcaattgtgtgatga

SEQ ID NO: 4759361 - DNA, 25 bp, Homo sapien
gatgaggagtaagttgctgcatcca

SEQ ID NO: 4759362 - DNA, 25 bp, Homo sapien
gaacatggagctatttcgatccttc

SEQ ID NO: 4759363 - DNA, 25 bp, Homo sapien
tcagtgcatcacatggcttatgcgt

SEQ ID NO: 4759364 - DNA, 25 bp, Homo sapien
taggacacatagtacctggaatgca

SEQ ID NO: 4759365 - DNA, 25 bp, Homo sapien
tatgcgtgatccgacagagaccttg

SEQ ID NO: 4759366 - DNA, 25 bp, Homo sapien
gagcccacagttagtcgaccagatg

SEQ ID NO: 4759367 - DNA, 25 bp, Homo sapien
tattccaggtaatcaggagcccaca

SEQ ID NO: 4759368 - DNA, 25 bp, Homo sapien
aagggtactacctccagatctgggc

SEQ ID NO: 4759369 - DNA, 25 bp, Homo sapien
ggattatcgcgtccaccctgggaca

SEQ ID NO: 4759370 - DNA, 25 bp, Homo sapien
ggacagaacgagtcaggactttcag

SEQ ID NO: 4759371 - DNA, 25 bp, Homo sapien
cttagaatctccatgattgaatcag

SEQ ID NO: 4759372 - DNA, 25 bp, Homo sapien
gattgaatcagtcaaactctcctca

SEQ ID NO: 4759373 - DNA, 25 bp, Homo sapien
cagaacgagtcaggactttcagatc

SEQ ID NO: 4759374 - DNA, 25 bp, Homo sapien
tagctcttatgtatgagtggtatct

SEQ ID NO: 4759375 - DNA, 25 bp, Homo sapien
aacataaaagtgtctagctcttatg

SEQ ID NO: 4759376 - DNA, 25 bp, Homo sapien
taaaagtgtctagctcttatgtatg

SEQ ID NO: 4759377 - DNA, 25 bp, Homo sapien
gtgtctagctcttatgtatgagtgg

SEQ ID NO: 4759378 - DNA, 25 bp, Homo sapien
ggatatctgataggaaaggtcgtga

SEQ ID NO: 4759379 - DNA, 25 bp, Homo sapien
tggaaactcagtgtaatagaattgg

SEQ ID NO: 4759380 - DNA, 25 bp, Homo sapien
aaggtcgtgaggatttggccacgtc

SEQ ID NO: 4759381 - DNA, 25 bp, Homo sapien
gatacagtggcccgttttttcacga

SEQ ID NO: 4759382 - DNA, 25 bp, Homo sapien
taattcatatgactggtactcttga

SEQ ID NO: 4759383 - DNA, 25 bp, Homo sapien
catatgactggtactcttgactcat

SEQ ID NO: 4759384 - DNA, 25 bp, Homo sapien
tcagactctagtaattcatatgact

SEQ ID NO: 4759385 - DNA, 25 bp, Homo sapien
ctctcagactctagtaattcatatg

SEQ ID NO: 4759386 - DNA, 25 bp, Homo sapien
gtcacgggatgcatgtgcgctgcac

SEQ ID NO: 4759387 - DNA, 25 bp, Homo sapien
tctgtaggttcctttattgagtggc

SEQ ID NO: 4759388 - DNA, 25 bp, Homo sapien
ctgtaggttcctttattgagtggcc

SEQ ID NO: 4759389 - DNA, 25 bp, Homo sapien
tcctttattgagtggccaatcaaat

SEQ ID NO: 4759390 - DNA, 25 bp, Homo sapien
ttattgagtggccaatcaaatgcat

SEQ ID NO: 4759391 - DNA, 25 bp, Homo sapien
gtccatcacttgaatgtgcacagct

SEQ ID NO: 4759392 - DNA, 25 bp, Homo sapien
gaagcggcttttactgttcagaagt

SEQ ID NO: 4759393 - DNA, 25 bp, Homo sapien
catcttatctatgggagtttcaggg

SEQ ID NO: 4759394 - DNA, 25 bp, Homo sapien
ttgacttaaggaagctgaagcggct

SEQ ID NO: 4759395 - DNA, 25 bp, Homo sapien
tctctatttggggatatggattctt

SEQ ID NO: 4759396 - DNA, 25 bp, Homo sapien
acatttctctatttggggatatgga

SEQ ID NO: 4759397 - DNA, 25 bp, Homo sapien
tatttggggatatggattctttgag

SEQ ID NO: 4759398 - DNA, 25 bp, Homo sapien
tcacatttctctatttggggatatg

SEQ ID NO: 4759399 - DNA, 25 bp, Homo sapien
taagcgacaacctttgtgagtccct

SEQ ID NO: 4759400 - DNA, 25 bp, Homo sapien
ctttgtgagtccctctggaaatgtg

SEQ ID NO: 4759401 - DNA, 25 bp, Homo sapien
ttaagcgacaacctttgtgagtccc

SEQ ID NO: 4759402 - DNA, 25 bp, Homo sapien
gaagagcctgtgaaaatcagaaacc

SEQ ID NO: 4759403 - DNA, 25 bp, Homo sapien
aaaagactgagccaaagaagagcct

SEQ ID NO: 4759404 - DNA, 25 bp, Homo sapien
agccaaagaagagcctgtgaaaatc

SEQ ID NO: 4759405 - DNA, 25 bp, Homo sapien
gagcctgtgaaaatcagaaacctcc

SEQ ID NO: 4759406 - DNA, 25 bp, Homo sapien
tggagaatccccgccaattctcctg

SEQ ID NO: 4759407 - DNA, 25 bp, Homo sapien
aatccccgccaattctcctgcatcc

SEQ ID NO: 4759408 - DNA, 25 bp, Homo sapien
ctggagaatccccgccaattctcct

SEQ ID NO: 4759409 - DNA, 25 bp, Homo sapien
gagaatccccgccaattctcctgca

SEQ ID NO: 4759410 - DNA, 25 bp, Homo sapien
gatagtctcccaatgtgagtggaaa

SEQ ID NO: 4759411 - DNA, 25 bp, Homo sapien
aattatacgttttgaagggaagcat

SEQ ID NO: 4759412 - DNA, 25 bp, Homo sapien
tatacgttttgaagggaagcattct

SEQ ID NO: 4759413 - DNA, 25 bp, Homo sapien
ccataatgttgatagtctcccaatg

SEQ ID NO: 4759414 - DNA, 25 bp, Homo sapien
accaatggtgaaagtagacagaatc

SEQ ID NO: 4759415 - DNA, 25 bp, Homo sapien
tgaacacctgaagatgtttgttcca

SEQ ID NO: 4759416 - DNA, 25 bp, Homo sapien
tcagaagggaataccaatggtgaaa

SEQ ID NO: 4759417 - DNA, 25 bp, Homo sapien
gacagaatccgtgaacacctgaaga

SEQ ID NO: 4759418 - DNA, 25 bp, Homo sapien
ccacttgccattgcttgataaccta

SEQ ID NO: 4759419 - DNA, 25 bp, Homo sapien
attgtgactgtcaagcaatgcaatg

SEQ ID NO: 4759420 - DNA, 25 bp, Homo sapien
gccattgcttgataacctatatgta

SEQ ID NO: 4759421 - DNA, 25 bp, Homo sapien
taacctatatgtataattgtgactg

SEQ ID NO: 4759422 - DNA, 25 bp, Homo sapien
tcacatcttgtcttccgatctggga

SEQ ID NO: 4759423 - DNA, 25 bp, Homo sapien
ctgggatgaaacctcaaataagtta

SEQ ID NO: 4759424 - DNA, 25 bp, Homo sapien
gtttccatccacattaacagatacg

SEQ ID NO: 4759425 - DNA, 25 bp, Homo sapien
tccacattaacagatacggaagaaa

SEQ ID NO: 4759426 - DNA, 25 bp, Homo sapien
gaattttattcatgggcacactgtc

SEQ ID NO: 4759427 - DNA, 25 bp, Homo sapien
tcctaaactgagactgtgctatacc

SEQ ID NO: 4759428 - DNA, 25 bp, Homo sapien
gtaaatatgtggtctcaccctattg

SEQ ID NO: 4759429 - DNA, 25 bp, Homo sapien
tgaagcagtcgtagcgcgctgcagc

SEQ ID NO: 4759430 - DNA, 25 bp, Homo sapien
tggcacaatttcttagggattcagc

SEQ ID NO: 4759431 - DNA, 25 bp, Homo sapien
gattcagctgcagctattcccagaa

SEQ ID NO: 4759432 - DNA, 25 bp, Homo sapien
gacatcatcttatagtcacttcact

SEQ ID NO: 4759433 - DNA, 25 bp, Homo sapien
ccttgattattgaggactttaagaa

SEQ ID NO: 4759434 - DNA, 25 bp, Homo sapien
ttccacgacaatagcacagtcacag

SEQ ID NO: 4759435 - DNA, 25 bp, Homo sapien
cagctccgattccacgacaatagca

SEQ ID NO: 4759436 - DNA, 25 bp, Homo sapien
gaagcatgactaggcagctccgatt

SEQ ID NO: 4759437 - DNA, 25 bp, Homo sapien
ttctctgaagcatgactaggcagct

SEQ ID NO: 4759438 - DNA, 25 bp, Homo sapien
tccatagcagatgtattcaattcta

SEQ ID NO: 4759439 - DNA, 25 bp, Homo sapien
tttccatagcagatgtattcaattc

SEQ ID NO: 4759440 - DNA, 25 bp, Homo sapien
cattgtgctaaaattctcaagcatt

SEQ ID NO: 4759441 - DNA, 25 bp, Homo sapien
ttcattgtgctaaaattctcaagca

SEQ ID NO: 4759442 - DNA, 25 bp, Homo sapien
caccatgaatctgttcccgtaactg

SEQ ID NO: 4759443 - DNA, 25 bp, Homo sapien
cattggtacagtgacattaattttc

SEQ ID NO: 4759444 - DNA, 25 bp, Homo sapien
ccgtaactgccgatttcttttagca

SEQ ID NO: 4759445 - DNA, 25 bp, Homo sapien
agctcaccatgaatctgttcccgta

SEQ ID NO: 4759446 - DNA, 25 bp, Homo sapien
gccactggagtgtgggtccaagata

SEQ ID NO: 4759447 - DNA, 25 bp, Homo sapien
aggccactggagtgtgggtccaaga

SEQ ID NO: 4759448 - DNA, 25 bp, Homo sapien
agaggccactggagtgtgggtccaa

SEQ ID NO: 4759449 - DNA, 25 bp, Homo sapien
cagaggccactggagtgtgggtcca

SEQ ID NO: 4759450 - DNA, 25 bp, Homo sapien
gtcttcacgtctgcatcatccctgt

SEQ ID NO: 4759451 - DNA, 25 bp, Homo sapien
tgagatctctcatagtttgacttag

SEQ ID NO: 4759452 - DNA, 25 bp, Homo sapien
tcatccctgtgagtataaatacaaa

SEQ ID NO: 4759453 - DNA, 25 bp, Homo sapien
aagatgtgaatcagacgtatccata

SEQ ID NO: 4759454 - DNA, 25 bp, Homo sapien
aatattgttgctgaagtgaaggtag

SEQ ID NO: 4759455 - DNA, 25 bp, Homo sapien
cctggagagacgtacagcatgttat

SEQ ID NO: 4759456 - DNA, 25 bp, Homo sapien
gacatttgaacgctaatgactggaa

SEQ ID NO: 4759457 - DNA, 25 bp, Homo sapien
ttgtcaggacttcccgtgcgggaca

SEQ ID NO: 4759458 - DNA, 25 bp, Homo sapien
ccgtttctgacctggagagacgtac

SEQ ID NO: 4759459 - DNA, 25 bp, Homo sapien
cccgttggcattgcattctctgaag

SEQ ID NO: 4759460 - DNA, 25 bp, Homo sapien
tctctgaagcccaaatcaggagatt

SEQ ID NO: 4759461 - DNA, 25 bp, Homo sapien
tctagagttgtaaatacccgttggc

SEQ ID NO: 4759462 - DNA, 25 bp, Homo sapien
catgctcccaactcgtacaatataa

SEQ ID NO: 4759463 - DNA, 25 bp, Homo sapien
tgacttcatccactaccgatctaga

SEQ ID NO: 4759464 - DNA, 25 bp, Homo sapien
gatcatgtcttcaccaaagattttc

SEQ ID NO: 4759465 - DNA, 25 bp, Homo sapien
gattttcaattctacgtcttcaaca

SEQ ID NO: 4759466 - DNA, 25 bp, Homo sapien
tcttttcagttacaaggatcatgtc

SEQ ID NO: 4759467 - DNA, 25 bp, Homo sapien
gaatccaaatcttactgaaggattt

SEQ ID NO: 4759468 - DNA, 25 bp, Homo sapien
aatccaaatcttactgaaggattta

SEQ ID NO: 4759469 - DNA, 25 bp, Homo sapien
aagtgctgaacacaagagtgctgcg

SEQ ID NO: 4759470 - DNA, 25 bp, Homo sapien
caagtgtggctctcgtttatcctcc

SEQ ID NO: 4759471 - DNA, 25 bp, Homo sapien
gaaacaggcatttccgacgtgcggt

SEQ ID NO: 4759472 - DNA, 25 bp, Homo sapien
caggctcgcatgcattcttcaacag

SEQ ID NO: 4759473 - DNA, 25 bp, Homo sapien
cttggccccatttcaaagcacattc

SEQ ID NO: 4759474 - DNA, 25 bp, Homo sapien
tcaaagcacattcccagaatggaga

SEQ ID NO: 4759475 - DNA, 25 bp, Homo sapien
ttggccccatttcaaagcacattcc

SEQ ID NO: 4759476 - DNA, 25 bp, Homo sapien
atttcaaagcacattcccagaatgg

SEQ ID NO: 4759477 - DNA, 25 bp, Homo sapien
tctgtgtgggccgtctggagcccct

SEQ ID NO: 4759478 - DNA, 25 bp, Homo sapien
tgagaagtgctgaacacgttgatgt

SEQ ID NO: 4759479 - DNA, 25 bp, Homo sapien
tggctgacgggcacttgcctgaact

SEQ ID NO: 4759480 - DNA, 25 bp, Homo sapien
ttctgagaagtgctgaacacgttga

SEQ ID NO: 4759481 - DNA, 25 bp, Homo sapien
cattgacccatgagtgattaaaagt

SEQ ID NO: 4759482 - DNA, 25 bp, Homo sapien
tgctaatccagcagtcaaatcattg

SEQ ID NO: 4759483 - DNA, 25 bp, Homo sapien
ggaagaaacgtagggtctgctaatc

SEQ ID NO: 4759484 - DNA, 25 bp, Homo sapien
ttttgtgcccgatgtgatttgaaag

SEQ ID NO: 4759485 - DNA, 25 bp, Homo sapien
attggactgcaatgtctctcctctc

SEQ ID NO: 4759486 - DNA, 25 bp, Homo sapien
aacaatgcggttgactgaaatcact

SEQ ID NO: 4759487 - DNA, 25 bp, Homo sapien
caattacatttaccattggactgca

SEQ ID NO: 4759488 - DNA, 25 bp, Homo sapien
cctgttgactactcctgaatgatct

SEQ ID NO: 4759489 - DNA, 25 bp, Homo sapien
tctcgtcttcaactccccttctctc

SEQ ID NO: 4759490 - DNA, 25 bp, Homo sapien
gagcagccatcttagatttctttgt

SEQ ID NO: 4759491 - DNA, 25 bp, Homo sapien
aaaagaacaatctgtgccaacggaa

SEQ ID NO: 4759492 - DNA, 25 bp, Homo sapien
ggaggcttctgtatgcttgtgaaaa

SEQ ID NO: 4759493 - DNA, 25 bp, Homo sapien
tcttcaacaactttgctgcaaaaca

SEQ ID NO: 4759494 - DNA, 25 bp, Homo sapien
ccactggtttcatcagatagacttg

SEQ ID NO: 4759495 - DNA, 25 bp, Homo sapien
ttgataagtctgctccactggtttc

SEQ ID NO: 4759496 - DNA, 25 bp, Homo sapien
gataagtctgctccactggtttcat

SEQ ID NO: 4759497 - DNA, 25 bp, Homo sapien
cagatagacttgctgctactggctt

SEQ ID NO: 4759498 - DNA, 25 bp, Homo sapien
gtccccatccaaacagcaagctagg

SEQ ID NO: 4759499 - DNA, 25 bp, Homo sapien
gaagtagatgctgaggtccccatcc

SEQ ID NO: 4759500 - DNA, 25 bp, Homo sapien
taactagggaaccaactgattttgc

SEQ ID NO: 4759501 - DNA, 25 bp, Homo sapien
tactatcaacatggactatcctggg

SEQ ID NO: 4759502 - DNA, 25 bp, Homo sapien
taactactagtgtgttactgcctca

SEQ ID NO: 4759503 - DNA, 25 bp, Homo sapien
tgcaggtgcacgtcgcggaaatact

SEQ ID NO: 4759504 - DNA, 25 bp, Homo sapien
agaacggttgtaactgatactggcc

SEQ ID NO: 4759505 - DNA, 25 bp, Homo sapien
atttcccactgaccatgcaggtgca

SEQ ID NO: 4759506 - DNA, 25 bp, Homo sapien
aacaatttggcaaggcctgtttgca

SEQ ID NO: 4759507 - DNA, 25 bp, Homo sapien
cataagcctgctcagtaccatcttt

SEQ ID NO: 4759508 - DNA, 25 bp, Homo sapien
agagaagatcccctagccctctaaa

SEQ ID NO: 4759509 - DNA, 25 bp, Homo sapien
tttctcctaagagaagatcccctag

SEQ ID NO: 4759510 - DNA, 25 bp, Homo sapien
cacacagaacacagcgtgaggaggt

SEQ ID NO: 4759511 - DNA, 25 bp, Homo sapien
acattcgcagaccatagagggccct

SEQ ID NO: 4759512 - DNA, 25 bp, Homo sapien
taggtgtaaaacacgatgatccaga

SEQ ID NO: 4759513 - DNA, 25 bp, Homo sapien
agctggagaatgaagacccgcctat

SEQ ID NO: 4759514 - DNA, 25 bp, Homo sapien
atacccacccttccggatggcaagt

SEQ ID NO: 4759515 - DNA, 25 bp, Homo sapien
tctaccaagaggacatacaccatac

SEQ ID NO: 4759516 - DNA, 25 bp, Homo sapien
taagcaataacccagagtagcaagc

SEQ ID NO: 4759517 - DNA, 25 bp, Homo sapien
cactttctactactggtgctaagca

SEQ ID NO: 4759518 - DNA, 25 bp, Homo sapien
ggaatgtgtaggtgatgacatttct

SEQ ID NO: 4759519 - DNA, 25 bp, Homo sapien
tacggatgtgcaactcttccgccag

SEQ ID NO: 4759520 - DNA, 25 bp, Homo sapien
tctcttcgtgtgagttttatgccaa

SEQ ID NO: 4759521 - DNA, 25 bp, Homo sapien
ccagacagttctgctggccaaggac

SEQ ID NO: 4759522 - DNA, 25 bp, Homo sapien
ttctcagtaagcgtctcccaagggt

SEQ ID NO: 4759523 - DNA, 25 bp, Homo sapien
tgcatcaggttgtcggcgctgcttt

SEQ ID NO: 4759524 - DNA, 25 bp, Homo sapien
ggcagtgtcgtgctcactcatggga

SEQ ID NO: 4759525 - DNA, 25 bp, Homo sapien
gctgcgggcttgcatctcatgtgga

SEQ ID NO: 4759526 - DNA, 25 bp, Homo sapien
tagctgtaccagtccagtaaagcga

SEQ ID NO: 4759527 - DNA, 25 bp, Homo sapien
ggaaagagggatgaatttccctcat

SEQ ID NO: 4759528 - DNA, 25 bp, Homo sapien
atgctagctgtaccagtccagtaaa

SEQ ID NO: 4759529 - DNA, 25 bp, Homo sapien
tgtaccagtccagtaaagcgatggg

SEQ ID NO: 4759530 - DNA, 25 bp, Homo sapien
catcttagcagcacctcatgggcct

SEQ ID NO: 4759531 - DNA, 25 bp, Homo sapien
cagcacctcatgggcctgcagtgaa

SEQ ID NO: 4759532 - DNA, 25 bp, Homo sapien
gaccgtctgccagtctcgaaagcaa

SEQ ID NO: 4759533 - DNA, 25 bp, Homo sapien
gtctgccagtctcgaaagcaatgtg

SEQ ID NO: 4759534 - DNA, 25 bp, Homo sapien
ctgccagtctcgaaagcaatgtggg

SEQ ID NO: 4759535 - DNA, 25 bp, Homo sapien
tcagaagaccgtctgccagtctcga

SEQ ID NO: 4759536 - DNA, 25 bp, Homo sapien
caactctccatctccctatgccaca

SEQ ID NO: 4759537 - DNA, 25 bp, Homo sapien
cctatgccacaaccaaactgctatt

SEQ ID NO: 4759538 - DNA, 25 bp, Homo sapien
aaccaaactgctatttcatagatgg

SEQ ID NO: 4759539 - DNA, 25 bp, Homo sapien
gccacaaccaaactgctatttcata

SEQ ID NO: 4759540 - DNA, 25 bp, Homo sapien
tagagcctgaaattcctgctttcca

SEQ ID NO: 4759541 - DNA, 25 bp, Homo sapien
caggagggtaatttggtaggcatcc

SEQ ID NO: 4759542 - DNA, 25 bp, Homo sapien
tcaacaggagggtaatttggtaggc

SEQ ID NO: 4759543 - DNA, 25 bp, Homo sapien
ggtaggcatccagactcatcctttc

SEQ ID NO: 4759544 - DNA, 25 bp, Homo sapien
gccggggccgtcagaagcagaacgg

SEQ ID NO: 4759545 - DNA, 25 bp, Homo sapien
cagaacggggactaaacgctgcggc

SEQ ID NO: 4759546 - DNA, 25 bp, Homo sapien
aacggggactaaacgctgcggcaag

SEQ ID NO: 4759547 - DNA, 25 bp, Homo sapien
tcagaagcagaacggggactaaacg

SEQ ID NO: 4759548 - DNA, 25 bp, Homo sapien
tccctatttagccaggacagctttg

SEQ ID NO: 4759549 - DNA, 25 bp, Homo sapien
ttctccctatttagccaggacagct

SEQ ID NO: 4759550 - DNA, 25 bp, Homo sapien
cacttctccctatttagccaggaca

SEQ ID NO: 4759551 - DNA, 25 bp, Homo sapien
ccctatttagccaggacagctttgc

SEQ ID NO: 4759552 - DNA, 25 bp, Homo sapien
cttgttaggtgtatttgatttttca

SEQ ID NO: 4759553 - DNA, 25 bp, Homo sapien
ttaggtgtatttgatttttcataag

SEQ ID NO: 4759554 - DNA, 25 bp, Homo sapien
tgttaggtgtatttgatttttcata

SEQ ID NO: 4759555 - DNA, 25 bp, Homo sapien
taggtgtatttgatttttcataagt

SEQ ID NO: 4759556 - DNA, 25 bp, Homo sapien
ctattgagtggaacatgtgtgtctc

SEQ ID NO: 4759557 - DNA, 25 bp, Homo sapien
gttgaagtcattggcagatgcatct

SEQ ID NO: 4759558 - DNA, 25 bp, Homo sapien
cacagctgtaggagcacttggaggt

SEQ ID NO: 4759559 - DNA, 25 bp, Homo sapien
aagagctcccggcagtactggaatc

SEQ ID NO: 4759560 - DNA, 25 bp, Homo sapien
cagccattggtgattaacttattaa

SEQ ID NO: 4759561 - DNA, 25 bp, Homo sapien
agccattggtgattaacttattaaa

SEQ ID NO: 4759562 - DNA, 25 bp, Homo sapien
cattggtgattaacttattaaagga

SEQ ID NO: 4759563 - DNA, 25 bp, Homo sapien
gccattggtgattaacttattaaag

SEQ ID NO: 4759564 - DNA, 25 bp, Homo sapien
gtctctgcacaacagggattgtcca

SEQ ID NO: 4759565 - DNA, 25 bp, Homo sapien
ctctgcacaacagggattgtccaga

SEQ ID NO: 4759566 - DNA, 25 bp, Homo sapien
tgcacaacagggattgtccagatct

SEQ ID NO: 4759567 - DNA, 25 bp, Homo sapien
ctgcacaacagggattgtccagatc

SEQ ID NO: 4759568 - DNA, 25 bp, Homo sapien
tctttaggtaatagggtatggtcca

SEQ ID NO: 4759569 - DNA, 25 bp, Homo sapien
ggccaactggctgtcttccattcga

SEQ ID NO: 4759570 - DNA, 25 bp, Homo sapien
cacattctgcgtgtagtactcttct

SEQ ID NO: 4759571 - DNA, 25 bp, Homo sapien
tccaggccagtttgtctagcatgtc

SEQ ID NO: 4759572 - DNA, 25 bp, Homo sapien
aggtctgacagacatacttcaggct

SEQ ID NO: 4759573 - DNA, 25 bp, Homo sapien
cccagggcaccagcaaaacattgtg

SEQ ID NO: 4759574 - DNA, 25 bp, Homo sapien
gcttctgcaggttcgacatacttta

SEQ ID NO: 4759575 - DNA, 25 bp, Homo sapien
aggtgggcaggccatgctccaggtc

SEQ ID NO: 4759576 - DNA, 25 bp, Homo sapien
ttgtcttcatgaaatgccagcttgc

SEQ ID NO: 4759577 - DNA, 25 bp, Homo sapien
ccagcttgctgacttgtgccgacat

SEQ ID NO: 4759578 - DNA, 25 bp, Homo sapien
cctgtaattgtgacattttgtcttc

SEQ ID NO: 4759579 - DNA, 25 bp, Homo sapien
aatgccagcttgctgacttgtgccg

SEQ ID NO: 4759580 - DNA, 25 bp, Homo sapien
gaacgctgtagctctccttgcagaa

SEQ ID NO: 4759581 - DNA, 25 bp, Homo sapien
gaagacggcatatgtgaacgctgta

SEQ ID NO: 4759582 - DNA, 25 bp, Homo sapien
ccaactgccattcttgtgaaggagg

SEQ ID NO: 4759583 - DNA, 25 bp, Homo sapien
aacatgtgaaggaaacgccaccaac

SEQ ID NO: 4759584 - DNA, 25 bp, Homo sapien
gtgtgccaggaaaactgccccgaga

SEQ ID NO: 4759585 - DNA, 25 bp, Homo sapien
tgcaccacggagtgtgccaggaaaa

SEQ ID NO: 4759586 - DNA, 25 bp, Homo sapien
gtgccaggaaaactgccccgagagg

SEQ ID NO: 4759587 - DNA, 25 bp, Homo sapien
ctgcaccacggagtgtgccaggaaa

SEQ ID NO: 4759588 - DNA, 25 bp, Homo sapien
ctgagccaccagttgggggccgatt

SEQ ID NO: 4759589 - DNA, 25 bp, Homo sapien
tctgctgagccaccagttgggggcc

SEQ ID NO: 4759590 - DNA, 25 bp, Homo sapien
gctctgctgagccaccagttggggg

SEQ ID NO: 4759591 - DNA, 25 bp, Homo sapien
gagccaccagttgggggccgattat

SEQ ID NO: 4759592 - DNA, 25 bp, Homo sapien
tctatgcagactcgcgccactgtgt

SEQ ID NO: 4759593 - DNA, 25 bp, Homo sapien
gacgactgcgagctctgtcttgaga

SEQ ID NO: 4759594 - DNA, 25 bp, Homo sapien
tgtgtcccctgccataaagactgtc

SEQ ID NO: 4759595 - DNA, 25 bp, Homo sapien
agagtgcacgcctgagttcttcctg

SEQ ID NO: 4759596 - DNA, 25 bp, Homo sapien
cctgctccaaggtccccatttccac

SEQ ID NO: 4759597 - DNA, 25 bp, Homo sapien
tcctgctccaaggtccccatttcca

SEQ ID NO: 4759598 - DNA, 25 bp, Homo sapien
gctcatcatcgccttgtctcttaga

SEQ ID NO: 4759599 - DNA, 25 bp, Homo sapien
gacacatagtagtcattgttcttca

SEQ ID NO: 4759600 - DNA, 25 bp, Homo sapien
gccttgtctcttagatacctcagtc

SEQ ID NO: 4759601 - DNA, 25 bp, Homo sapien
aaccattcagctcatcatcgccttg

SEQ ID NO: 4759602 - DNA, 25 bp, Homo sapien
tccctccttatgaagacaagatgag

SEQ ID NO: 4759603 - DNA, 25 bp, Homo sapien
ggagtgctgtgactgccaggacacc

SEQ ID NO: 4759604 - DNA, 25 bp, Homo sapien
ctcttgattgctcttaacagggaga

SEQ ID NO: 4759605 - DNA, 25 bp, Homo sapien
gaactccagtgccttgttaatccct

SEQ ID NO: 4759606 - DNA, 25 bp, Homo sapien
aacatggcctcatggcctgatagtt

SEQ ID NO: 4759607 - DNA, 25 bp, Homo sapien
ggcctgatagttttttctctggttc

SEQ ID NO: 4759608 - DNA, 25 bp, Homo sapien
catggcctcatggcctgatagtttt

SEQ ID NO: 4759609 - DNA, 25 bp, Homo sapien
caacatggcctcatggcctgatagt

SEQ ID NO: 4759610 - DNA, 25 bp, Homo sapien
tcttccccgcaggtttatgataaac

SEQ ID NO: 4759611 - DNA, 25 bp, Homo sapien
cccacatattagttagtaggaggaa

SEQ ID NO: 4759612 - DNA, 25 bp, Homo sapien
cagaggactcagaattgaagcagct

SEQ ID NO: 4759613 - DNA, 25 bp, Homo sapien
gaaagatatagacacaattaacccc

SEQ ID NO: 4759614 - DNA, 25 bp, Homo sapien
tagtcgtttcttagcttcttcaata

SEQ ID NO: 4759615 - DNA, 25 bp, Homo sapien
ttcttagcttcttcaatatcacctt

SEQ ID NO: 4759616 - DNA, 25 bp, Homo sapien
tgttctggtaactctagtcgtttct

SEQ ID NO: 4759617 - DNA, 25 bp, Homo sapien
taactctagtcgtttcttagcttct

SEQ ID NO: 4759618 - DNA, 25 bp, Homo sapien
acttcataccgctggagagaagcag

SEQ ID NO: 4759619 - DNA, 25 bp, Homo sapien
attaacttcataccgctggagagaa

SEQ ID NO: 4759620 - DNA, 25 bp, Homo sapien
tcattaacttcataccgctggagag

SEQ ID NO: 4759621 - DNA, 25 bp, Homo sapien
taacttcataccgctggagagaagc

SEQ ID NO: 4759622 - DNA, 25 bp, Homo sapien
acaatggccacattgaggatttccc

SEQ ID NO: 4759623 - DNA, 25 bp, Homo sapien
ctttgaaggtatgcatgatatgtgt

SEQ ID NO: 4759624 - DNA, 25 bp, Homo sapien
tggtctcaggtagccaacaatggcc

SEQ ID NO: 4759625 - DNA, 25 bp, Homo sapien
aggatttccccatagaagtcctctt

SEQ ID NO: 4759626 - DNA, 25 bp, Homo sapien
gccaaatctaacagataaaacactg

SEQ ID NO: 4759627 - DNA, 25 bp, Homo sapien
cttctattaactccacacagaacaa

SEQ ID NO: 4759628 - DNA, 25 bp, Homo sapien
ttaactccacacagaacaaaattta

SEQ ID NO: 4759629 - DNA, 25 bp, Homo sapien
aaaagattcagccaaatctaacaga

SEQ ID NO: 4759630 - DNA, 25 bp, Homo sapien
ctggcccaaccatagtaaataccag

SEQ ID NO: 4759631 - DNA, 25 bp, Homo sapien
agtaaataccagtggatatatcagc

SEQ ID NO: 4759632 - DNA, 25 bp, Homo sapien
ccccgcggagctcggagccagaagc

SEQ ID NO: 4759633 - DNA, 25 bp, Homo sapien
ggaatcctgcgattcatctcgggct

SEQ ID NO: 4759634 - DNA, 25 bp, Homo sapien
cgcggagctcggagccagaagcagg

SEQ ID NO: 4759635 - DNA, 25 bp, Homo sapien
gccaaggaggcgtgaacggggaatc

SEQ ID NO: 4759636 - DNA, 25 bp, Homo sapien
cgaagccccgcaccacttgaccccg

SEQ ID NO: 4759637 - DNA, 25 bp, Homo sapien
gccccgcaccacttgaccccggcag

SEQ ID NO: 4759638 - DNA, 25 bp, Homo sapien
ccccgcaccacttgaccccggcaga

SEQ ID NO: 4759639 - DNA, 25 bp, Homo sapien
agccccgcaccacttgaccccggca

SEQ ID NO: 4759640 - DNA, 25 bp, Homo sapien
gccgccgtcgacgcggcgcccagac

SEQ ID NO: 4759641 - DNA, 25 bp, Homo sapien
gccgggggacaggagcgtgagctct

SEQ ID NO: 4759642 - DNA, 25 bp, Homo sapien
tgcggagccgccgtcgacgcggcgc

SEQ ID NO: 4759643 - DNA, 25 bp, Homo sapien
ccggtctgcgcgtcctgcggagccg

SEQ ID NO: 4759644 - DNA, 25 bp, Homo sapien
gggcgcctgaggagctgcgtctccg

SEQ ID NO: 4759645 - DNA, 25 bp, Homo sapien
aggccactgcgaatccctgacgccg

SEQ ID NO: 4759646 - DNA, 25 bp, Homo sapien
ctgacgccgccgacccaacaaatac

SEQ ID NO: 4759647 - DNA, 25 bp, Homo sapien
agtggccggacgacgccgaccacag

SEQ ID NO: 4759648 - DNA, 25 bp, Homo sapien
gccgaagtaagtgccgggtgtgagc

SEQ ID NO: 4759649 - DNA, 25 bp, Homo sapien
gagacagccgaagtaagtgccgggt

SEQ ID NO: 4759650 - DNA, 25 bp, Homo sapien
cagcggagacagccgaagtaagtgc

SEQ ID NO: 4759651 - DNA, 25 bp, Homo sapien
gccggcgtgcgctcccttcctcagc

SEQ ID NO: 4759652 - DNA, 25 bp, Homo sapien
aaactttcacaatgtccggagccct

SEQ ID NO: 4759653 - DNA, 25 bp, Homo sapien
tcacaatgtccggagcccttgatgt

SEQ ID NO: 4759654 - DNA, 25 bp, Homo sapien
agaggggcccatacggcgttgttct

SEQ ID NO: 4759655 - DNA, 25 bp, Homo sapien
ggcccatacggcgttgttctggatt

SEQ ID NO: 4759656 - DNA, 25 bp, Homo sapien
gaatagaaaatgaaatccctgctgc

SEQ ID NO: 4759657 - DNA, 25 bp, Homo sapien
gaagagaacatggaacgtgaacgca

SEQ ID NO: 4759658 - DNA, 25 bp, Homo sapien
tgcaatgttacgtaccagaagagaa

SEQ ID NO: 4759659 - DNA, 25 bp, Homo sapien
aatagttttgggtgtgtgcttctca

SEQ ID NO: 4759660 - DNA, 25 bp, Homo sapien
agacagagtgatgtgggattcagtg

SEQ ID NO: 4759661 - DNA, 25 bp, Homo sapien
tagcttcacggagacagagtgatgt

SEQ ID NO: 4759662 - DNA, 25 bp, Homo sapien
agcacccacatggatagcttcacgg

SEQ ID NO: 4759663 - DNA, 25 bp, Homo sapien
atggatagcttcacggagacagagt

SEQ ID NO: 4759664 - DNA, 25 bp, Homo sapien
catctagtcacgtcgtagtaagaca

SEQ ID NO: 4759665 - DNA, 25 bp, Homo sapien
ggtgcatctagtcacgtcgtagtaa

SEQ ID NO: 4759666 - DNA, 25 bp, Homo sapien
tcacgtcgtagtaagacagctgcat

SEQ ID NO: 4759667 - DNA, 25 bp, Homo sapien
tagtcacgtcgtagtaagacagctg

SEQ ID NO: 4759668 - DNA, 25 bp, Homo sapien
gtaggtgtcagttcttcccccaggc

SEQ ID NO: 4759669 - DNA, 25 bp, Homo sapien
caataggcagaaagggtaggtgtca

SEQ ID NO: 4759670 - DNA, 25 bp, Homo sapien
ggctgtcagctggtgtgtccctggt

SEQ ID NO: 4759671 - DNA, 25 bp, Homo sapien
ccccaggctgtcagctggtgtgtcc

SEQ ID NO: 4759672 - DNA, 25 bp, Homo sapien
ggtcacagtcctccgagatactggc

SEQ ID NO: 4759673 - DNA, 25 bp, Homo sapien
tcacttgggtcacagtcctccgaga

SEQ ID NO: 4759674 - DNA, 25 bp, Homo sapien
cttgggtcacagtcctccgagatac

SEQ ID NO: 4759675 - DNA, 25 bp, Homo sapien
tgggtcacagtcctccgagatactg

SEQ ID NO: 4759676 - DNA, 25 bp, Homo sapien
cagttcgttttctctgtagggtcga

SEQ ID NO: 4759677 - DNA, 25 bp, Homo sapien
gaagaggccatgtttcagttcgttt

SEQ ID NO: 4759678 - DNA, 25 bp, Homo sapien
caacttatgatgtgggtaggtccca

SEQ ID NO: 4759679 - DNA, 25 bp, Homo sapien
tcatattaaatacagacgctcctca

SEQ ID NO: 4759680 - DNA, 25 bp, Homo sapien
agtagtagccccgaaatagatgtga

SEQ ID NO: 4759681 - DNA, 25 bp, Homo sapien
ttagaccaaggcagtagtagccccg

SEQ ID NO: 4759682 - DNA, 25 bp, Homo sapien
gccccgaaatagatgtgagtataaa

SEQ ID NO: 4759683 - DNA, 25 bp, Homo sapien
caaggcagtagtagccccgaaatag

SEQ ID NO: 4759684 - DNA, 25 bp, Homo sapien
ccgtcttgtcatcaagccctgttca

SEQ ID NO: 4759685 - DNA, 25 bp, Homo sapien
cacatgctcccgtcttgtcatcaag

SEQ ID NO: 4759686 - DNA, 25 bp, Homo sapien
agtgactccgttcacatgctcccgt

SEQ ID NO: 4759687 - DNA, 25 bp, Homo sapien
tcacagtgactccgttcacatgctc

SEQ ID NO: 4759688 - DNA, 25 bp, Homo sapien
catagagtgacttgctgccagtgcc

SEQ ID NO: 4759689 - DNA, 25 bp, Homo sapien
aaaactgagagctatttgtgttgag

SEQ ID NO: 4759690 - DNA, 25 bp, Homo sapien
tttctccccatagagtgacttgctg

SEQ ID NO: 4759691 - DNA, 25 bp, Homo sapien
tccatgatactcatgccttctttca

SEQ ID NO: 4759692 - DNA, 25 bp, Homo sapien
ctagtgctctgagcatgaaagtttc

SEQ ID NO: 4759693 - DNA, 25 bp, Homo sapien
tgctctgagcatgaaagtttctgct

SEQ ID NO: 4759694 - DNA, 25 bp, Homo sapien
agtgctctgagcatgaaagtttctg

SEQ ID NO: 4759695 - DNA, 25 bp, Homo sapien
ctgctgtctttggaactttgcaaac

SEQ ID NO: 4759696 - DNA, 25 bp, Homo sapien
tgatggggttgactatggctggtgg

SEQ ID NO: 4759697 - DNA, 25 bp, Homo sapien
taaaagctcgctgatgatggcgatg

SEQ ID NO: 4759698 - DNA, 25 bp, Homo sapien
ctgcttaaaagctcgctgatgatgg

SEQ ID NO: 4759699 - DNA, 25 bp, Homo sapien
agctcgctgatgatggcgatgttga

SEQ ID NO: 4759700 - DNA, 25 bp, Homo sapien
tccaggtgtttcttcagatcttgaa

SEQ ID NO: 4759701 - DNA, 25 bp, Homo sapien
ttgattttgtttagggtatcttcca

SEQ ID NO: 4759702 - DNA, 25 bp, Homo sapien
tatcttccaggtgtttcttcagatc

SEQ ID NO: 4759703 - DNA, 25 bp, Homo sapien
tgattttgtttagggtatcttccag

SEQ ID NO: 4759704 - DNA, 25 bp, Homo sapien
taggttcaataatccacaagtctgc

SEQ ID NO: 4759705 - DNA, 25 bp, Homo sapien
aagcagcccttgctgtaatcatcgt

SEQ ID NO: 4759706 - DNA, 25 bp, Homo sapien
aaagagctcattgagagctgacagt

SEQ ID NO: 4759707 - DNA, 25 bp, Homo sapien
taatcatcgttcataaaaactctgg

SEQ ID NO: 4759708 - DNA, 25 bp, Homo sapien
tatcttcagtcagaatctctccatc

SEQ ID NO: 4759709 - DNA, 25 bp, Homo sapien
catccagtacctgatagagtccagt

SEQ ID NO: 4759710 - DNA, 25 bp, Homo sapien
tgtccaacccatgggaccctataag

SEQ ID NO: 4759711 - DNA, 25 bp, Homo sapien
atgggaccctataagccgccagggc

SEQ ID NO: 4759712 - DNA, 25 bp, Homo sapien
tcttgcacagtggtaccaacagttg

SEQ ID NO: 4759713 - DNA, 25 bp, Homo sapien
cctgctttgactcggtccatgacat

SEQ ID NO: 4759714 - DNA, 25 bp, Homo sapien
tttgactcggtccatgacatgctgc

SEQ ID NO: 4759715 - DNA, 25 bp, Homo sapien
ctttgactcggtccatgacatgctg

SEQ ID NO: 4759716 - DNA, 25 bp, Homo sapien
tgctttgactcggtccatgacatgc

SEQ ID NO: 4759717 - DNA, 25 bp, Homo sapien
ctggttccctacccaagggctatgt

SEQ ID NO: 4759718 - DNA, 25 bp, Homo sapien
tctggttccctacccaagggctatg

SEQ ID NO: 4759719 - DNA, 25 bp, Homo sapien
ccaggtccccataccagtttgcggg

SEQ ID NO: 4759720 - DNA, 25 bp, Homo sapien
tctacacctatgctaggctgtctct

SEQ ID NO: 4759721 - DNA, 25 bp, Homo sapien
cagtttgcgggcatcttccttggac

SEQ ID NO: 4759722 - DNA, 25 bp, Homo sapien
tccttggactctacacctatgctag

SEQ ID NO: 4759723 - DNA, 25 bp, Homo sapien
agccttctgcccgtgtccctcttag

SEQ ID NO: 4759724 - DNA, 25 bp, Homo sapien
ccacttctgcacctaaagatggttt

SEQ ID NO: 4759725 - DNA, 25 bp, Homo sapien
gtgtccctcttagcatccacttctg

SEQ ID NO: 4759726 - DNA, 25 bp, Homo sapien
tcttcaggtgaacgcttctctcaac

SEQ ID NO: 4759727 - DNA, 25 bp, Homo sapien
agtctgcacagcaggaagggagccc

SEQ ID NO: 4759728 - DNA, 25 bp, Homo sapien
tgtgcagtgggatagagtctgcaca

SEQ ID NO: 4759729 - DNA, 25 bp, Homo sapien
agggagcccagagtgaccttgaaac

SEQ ID NO: 4759730 - DNA, 25 bp, Homo sapien
cccagagtgaccttgaaacaagcag

SEQ ID NO: 4759731 - DNA, 25 bp, Homo sapien
gttcctgggggattcctgccccaga

SEQ ID NO: 4759732 - DNA, 25 bp, Homo sapien
tcctcttctcctaaagaagcccaag

SEQ ID NO: 4759733 - DNA, 25 bp, Homo sapien
gagcctttctctaacattgccatac

SEQ ID NO: 4759734 - DNA, 25 bp, Homo sapien
tataaaaccaggtcctcctcttctc

SEQ ID NO: 4759735 - DNA, 25 bp, Homo sapien
gaacgagggctacatctctccccta

SEQ ID NO: 4759736 - DNA, 25 bp, Homo sapien
tctctcccctactgttggtcgttta

SEQ ID NO: 4759737 - DNA, 25 bp, Homo sapien
tcttcccgtctgcagatctgaggtg

SEQ ID NO: 4759738 - DNA, 25 bp, Homo sapien
tctgaggtgaacgagggctacatct

SEQ ID NO: 4759739 - DNA, 25 bp, Homo sapien
ccaaggggcagtttaaggacttgtg

SEQ ID NO: 4759740 - DNA, 25 bp, Homo sapien
gtttaaggacttgtggcagctgcat

SEQ ID NO: 4759741 - DNA, 25 bp, Homo sapien
ttaaggacttgtggcagctgcatcc

SEQ ID NO: 4759742 - DNA, 25 bp, Homo sapien
gggcagtttaaggacttgtggcagc

SEQ ID NO: 4759743 - DNA, 25 bp, Homo sapien
tgagcactgggctctgctcctttat

SEQ ID NO: 4759744 - DNA, 25 bp, Homo sapien
gagcactgggctctgctcctttatt

SEQ ID NO: 4759745 - DNA, 25 bp, Homo sapien
cctctgagcactgggctctgctcct

SEQ ID NO: 4759746 - DNA, 25 bp, Homo sapien
tctgagcactgggctctgctccttt

SEQ ID NO: 4759747 - DNA, 25 bp, Homo sapien
accatgagactagggtggaaccgct

SEQ ID NO: 4759748 - DNA, 25 bp, Homo sapien
ttctaagggaacaaactactgaggc

SEQ ID NO: 4759749 - DNA, 25 bp, Homo sapien
tatcagagtggttatgcagcctaca

SEQ ID NO: 4759750 - DNA, 25 bp, Homo sapien
tatgaacagctctatgccctcaggt

SEQ ID NO: 4759751 - DNA, 25 bp, Homo sapien
tcagctctgcggctgtagtgtgaaa

SEQ ID NO: 4759752 - DNA, 25 bp, Homo sapien
cagtacaaaaacaagtttgtgtggc

SEQ ID NO: 4759753 - DNA, 25 bp, Homo sapien
gtagctgtagacagtacaaaaacaa

SEQ ID NO: 4759754 - DNA, 25 bp, Homo sapien
agctgtagacagtacaaaaacaagt

SEQ ID NO: 4759755 - DNA, 25 bp, Homo sapien
gacagtacaaaaacaagtttgtgtg

SEQ ID NO: 4759756 - DNA, 25 bp, Homo sapien
gagagctaccaaacatgcaacacgg

SEQ ID NO: 4759757 - DNA, 25 bp, Homo sapien
caaaacgggcacttagctgatgatg

SEQ ID NO: 4759758 - DNA, 25 bp, Homo sapien
gttgacgtggattagaaagcccggc

SEQ ID NO: 4759759 - DNA, 25 bp, Homo sapien
taagggacaaagtatcactacaccg

SEQ ID NO: 4759760 - DNA, 25 bp, Homo sapien
ctaaggcttttctttcagcttcaag

SEQ ID NO: 4759761 - DNA, 25 bp, Homo sapien
agacatttagtaatgatttgggtag

SEQ ID NO: 4759762 - DNA, 25 bp, Homo sapien
tagtaatgatttgggtagcactgtg

SEQ ID NO: 4759763 - DNA, 25 bp, Homo sapien
catttagtaatgatttgggtagcac

SEQ ID NO: 4759764 - DNA, 25 bp, Homo sapien
tttagtaatgatttgggtagcactg

SEQ ID NO: 4759765 - DNA, 25 bp, Homo sapien
tctgaggagtaagcctaaaactcac

SEQ ID NO: 4759766 - DNA, 25 bp, Homo sapien
taaaactcactcgaatcacgtctct

SEQ ID NO: 4759767 - DNA, 25 bp, Homo sapien
ggtcaaatgggttcccaagtatctg

SEQ ID NO: 4759768 - DNA, 25 bp, Homo sapien
gaaaagcttgtttttcagaaggtca

SEQ ID NO: 4759769 - DNA, 25 bp, Homo sapien
gctcttcgctttattaccctacttg

SEQ ID NO: 4759770 - DNA, 25 bp, Homo sapien
ttttttgaaatgagcaaatagctct

SEQ ID NO: 4759771 - DNA, 25 bp, Homo sapien
cctttggaaagccaaaatcatcatg

SEQ ID NO: 4759772 - DNA, 25 bp, Homo sapien
tactgcaaccgccgtctcctagatt

SEQ ID NO: 4759773 - DNA, 25 bp, Homo sapien
aaaggcatgttgcaagttttggaac

SEQ ID NO: 4759774 - DNA, 25 bp, Homo sapien
cagcaacgttgtggagttaacaaag

SEQ ID NO: 4759775 - DNA, 25 bp, Homo sapien
tagagccactcttgatcactgtact

SEQ ID NO: 4759776 - DNA, 25 bp, Homo sapien
tattcttaatcctcgggcaaatggg

SEQ ID NO: 4759777 - DNA, 25 bp, Homo sapien
tcctgattgctaggaacaagggcaa

SEQ ID NO: 4759778 - DNA, 25 bp, Homo sapien
cttttggacctcaacgcaaaggagg

SEQ ID NO: 4759779 - DNA, 25 bp, Homo sapien
tcataggcatgcatccagaattggc

SEQ ID NO: 4759780 - DNA, 25 bp, Homo sapien
tggaagctccttgtcggatgaccaa

SEQ ID NO: 4759781 - DNA, 25 bp, Homo sapien
tagaatgccatgtccacaggttgtc

SEQ ID NO: 4759782 - DNA, 25 bp, Homo sapien
agagcccagccatacaacactacaa

SEQ ID NO: 4759783 - DNA, 25 bp, Homo sapien
agcacaggaaagctgaacatctaaa

SEQ ID NO: 4759784 - DNA, 25 bp, Homo sapien
cactacaagtaaccacatagctgtt

SEQ ID NO: 4759785 - DNA, 25 bp, Homo sapien
tccttctccatagaagacatttctg

SEQ ID NO: 4759786 - DNA, 25 bp, Homo sapien
ccttctccatagaagacatttctgg

SEQ ID NO: 4759787 - DNA, 25 bp, Homo sapien
acatttctggatcattgtaaaggca

SEQ ID NO: 4759788 - DNA, 25 bp, Homo sapien
tggatcattgtaaaggcagctagtt

SEQ ID NO: 4759789 - DNA, 25 bp, Homo sapien
tgtgcccggcctcccataaatattt

SEQ ID NO: 4759790 - DNA, 25 bp, Homo sapien
caagctaatttatctgtttgcacat

SEQ ID NO: 4759791 - DNA, 25 bp, Homo sapien
taagtgcagttgtcctcttagtaat

SEQ ID NO: 4759792 - DNA, 25 bp, Homo sapien
gcacataagaggatccatgatgaag

SEQ ID NO: 4759793 - DNA, 25 bp, Homo sapien
caagtaagtgttgacagcgtgctaa

SEQ ID NO: 4759794 - DNA, 25 bp, Homo sapien
ccaaaggcaacacacggatgcttcc

SEQ ID NO: 4759795 - DNA, 25 bp, Homo sapien
tccagtgagcaaggacagtcaagta

SEQ ID NO: 4759796 - DNA, 25 bp, Homo sapien
tctccccaggtgagatagcaacctt

SEQ ID NO: 4759797 - DNA, 25 bp, Homo sapien
catttagacacattgggagagggta

SEQ ID NO: 4759798 - DNA, 25 bp, Homo sapien
gatttcgtgttttaccatgtgctcc

SEQ ID NO: 4759799 - DNA, 25 bp, Homo sapien
tatgtaccaggcacgagcatagtgc

SEQ ID NO: 4759800 - DNA, 25 bp, Homo sapien
taggctccactctagagctgctgaa

SEQ ID NO: 4759801 - DNA, 25 bp, Homo sapien
tattacagtttattgccctgttgtt

SEQ ID NO: 4759802 - DNA, 25 bp, Homo sapien
gtctgactttctattggttgggcta

SEQ ID NO: 4759803 - DNA, 25 bp, Homo sapien
gaggttaacttgtagtttctgtcca

SEQ ID NO: 4759804 - DNA, 25 bp, Homo sapien
ggttgggctattttacagctcaata

SEQ ID NO: 4759805 - DNA, 25 bp, Homo sapien
catagaaggccgtgaaattgattct

SEQ ID NO: 4759806 - DNA, 25 bp, Homo sapien
ctttaacaccttagtggttcctgca

SEQ ID NO: 4759807 - DNA, 25 bp, Homo sapien
gctcaaaggctgttagttaagcaat

SEQ ID NO: 4759808 - DNA, 25 bp, Homo sapien
tactttagcaatagtgggcaatgac

SEQ ID NO: 4759809 - DNA, 25 bp, Homo sapien
cagccgctaaacgaaaaccaagtct

SEQ ID NO: 4759810 - DNA, 25 bp, Homo sapien
tcatgccagccgctaaacgaaaacc

SEQ ID NO: 4759811 - DNA, 25 bp, Homo sapien
ctgaaatgcaagccaacatcatgcc

SEQ ID NO: 4759812 - DNA, 25 bp, Homo sapien
caacatcatgccagccgctaaacga

SEQ ID NO: 4759813 - DNA, 25 bp, Homo sapien
ttagctgcctctgatgcttccctca

SEQ ID NO: 4759814 - DNA, 25 bp, Homo sapien
tgcctctgatgcttccctcagttct

SEQ ID NO: 4759815 - DNA, 25 bp, Homo sapien
gctgcctctgatgcttccctcagtt

SEQ ID NO: 4759816 - DNA, 25 bp, Homo sapien
cctctgatgcttccctcagttcttc

SEQ ID NO: 4759817 - DNA, 25 bp, Homo sapien
gttcaagttagcttgcagcctgggc

SEQ ID NO: 4759818 - DNA, 25 bp, Homo sapien
gcaagcacagcatgagacagtcact

SEQ ID NO: 4759819 - DNA, 25 bp, Homo sapien
tgaaaacatccacgtcagtctggtg

SEQ ID NO: 4759820 - DNA, 25 bp, Homo sapien
cctgggccaagtcagggatgtatct

SEQ ID NO: 4759821 - DNA, 25 bp, Homo sapien
ttgttgaggtcacccacaagtaaaa

SEQ ID NO: 4759822 - DNA, 25 bp, Homo sapien
cagcatgaataggagatcaggagat

SEQ ID NO: 4759823 - DNA, 25 bp, Homo sapien
caagtaaaacactggtgtacacaca

SEQ ID NO: 4759824 - DNA, 25 bp, Homo sapien
tggcatacaaaagactgatacagtg

SEQ ID NO: 4759825 - DNA, 25 bp, Homo sapien
cacttctcttataagatctctcttc

SEQ ID NO: 4759826 - DNA, 25 bp, Homo sapien
ctcacacttctcttataagatctct

SEQ ID NO: 4759827 - DNA, 25 bp, Homo sapien
cacacttctcttataagatctctct

SEQ ID NO: 4759828 - DNA, 25 bp, Homo sapien
acttctcttataagatctctcttca

SEQ ID NO: 4759829 - DNA, 25 bp, Homo sapien
aacgagtgccataaggaaaatgagc

SEQ ID NO: 4759830 - DNA, 25 bp, Homo sapien
ggtcacttgtggacatgtgcagagt

SEQ ID NO: 4759831 - DNA, 25 bp, Homo sapien
gagcaacaggttatagcagatagcc

SEQ ID NO: 4759832 - DNA, 25 bp, Homo sapien
taccatggtgttatagctgcctgca

SEQ ID NO: 4759833 - DNA, 25 bp, Homo sapien
gcaatccattgggatcagcccactg

SEQ ID NO: 4759834 - DNA, 25 bp, Homo sapien
aatgtggatgcaatccattgggatc

SEQ ID NO: 4759835 - DNA, 25 bp, Homo sapien
tgagttctgataagctattgacata

SEQ ID NO: 4759836 - DNA, 25 bp, Homo sapien
ggatcagcccactgagttctgataa

SEQ ID NO: 4759837 - DNA, 25 bp, Homo sapien
gatgaaccaagatggatgaacaatg

SEQ ID NO: 4759838 - DNA, 25 bp, Homo sapien
cgtgtcacagcaaggattgttctga

SEQ ID NO: 4759839 - DNA, 25 bp, Homo sapien
cttataaaaggtcgtgtcacagcaa

SEQ ID NO: 4759840 - DNA, 25 bp, Homo sapien
caaggattgttctgatgaaccaaga

SEQ ID NO: 4759841 - DNA, 25 bp, Homo sapien
gcctagccctggcatcctccttctt

SEQ ID NO: 4759842 - DNA, 25 bp, Homo sapien
catatagtcttcagctaccatcaac

SEQ ID NO: 4759843 - DNA, 25 bp, Homo sapien
gggttgcaccattcaagtacacaat

SEQ ID NO: 4759844 - DNA, 25 bp, Homo sapien
gcatttcttcatccagcctagccct

SEQ ID NO: 4759845 - DNA, 25 bp, Homo sapien
tcacaggaaggaagaggaatgtttt

SEQ ID NO: 4759846 - DNA, 25 bp, Homo sapien
ctgatcacaggaaggaagaggaatg

SEQ ID NO: 4759847 - DNA, 25 bp, Homo sapien
aggaaggaagaggaatgttttcagt

SEQ ID NO: 4759848 - DNA, 25 bp, Homo sapien
gatcacaggaaggaagaggaatgtt

SEQ ID NO: 4759849 - DNA, 25 bp, Homo sapien
tgacatagtggtaatccgcccgact

SEQ ID NO: 4759850 - DNA, 25 bp, Homo sapien
ggcatttagaccgtccccatagtat

SEQ ID NO: 4759851 - DNA, 25 bp, Homo sapien
cacaatgatggcatttagaccgtcc

SEQ ID NO: 4759852 - DNA, 25 bp, Homo sapien
acatagtggtaatccgcccgactgc

SEQ ID NO: 4759853 - DNA, 25 bp, Homo sapien
gaagtaacatctgaagtatctttac

SEQ ID NO: 4759854 - DNA, 25 bp, Homo sapien
tggtaagtaaggagatttttcatca

SEQ ID NO: 4759855 - DNA, 25 bp, Homo sapien
tcattatggtctaagagagtgctgt

SEQ ID NO: 4759856 - DNA, 25 bp, Homo sapien
tcagtaggttggtaagtaaggagat

SEQ ID NO: 4759857 - DNA, 25 bp, Homo sapien
taaagttccggatgggtgcagccag

SEQ ID NO: 4759858 - DNA, 25 bp, Homo sapien
ggtggcatctctctaaagttccgga

SEQ ID NO: 4759859 - DNA, 25 bp, Homo sapien
tctctctaaagttccggatgggtgc

SEQ ID NO: 4759860 - DNA, 25 bp, Homo sapien
aaaggtggcatctctctaaagttcc

SEQ ID NO: 4759861 - DNA, 25 bp, Homo sapien
catgttccggagaagtctagactca

SEQ ID NO: 4759862 - DNA, 25 bp, Homo sapien
gggtctttgagatgtcatgttccgg

SEQ ID NO: 4759863 - DNA, 25 bp, Homo sapien
tagttccctgaatattggctctaga

SEQ ID NO: 4759864 - DNA, 25 bp, Homo sapien
aataaaatggctgccccttccccat

SEQ ID NO: 4759865 - DNA, 25 bp, Homo sapien
tcttcggccgtatattctggaatag

SEQ ID NO: 4759866 - DNA, 25 bp, Homo sapien
gctcttgttctccaatgaccactgt

SEQ ID NO: 4759867 - DNA, 25 bp, Homo sapien
gaaatgactctcctgtagggctcga

SEQ ID NO: 4759868 - DNA, 25 bp, Homo sapien
tagggctcgatgaccttcatgtcaa

SEQ ID NO: 4759869 - DNA, 25 bp, Homo sapien
cattgttagcatattcactgggaag

SEQ ID NO: 4759870 - DNA, 25 bp, Homo sapien
attcctggttcaaaatggtcgcgtg

SEQ ID NO: 4759871 - DNA, 25 bp, Homo sapien
ggaactaagggcaacaatgagctgt

SEQ ID NO: 4759872 - DNA, 25 bp, Homo sapien
tggtcgcgtgagaaacctaagaaac

SEQ ID NO: 4759873 - DNA, 25 bp, Homo sapien
aatggttatgtatggcctctgtgac

SEQ ID NO: 4759874 - DNA, 25 bp, Homo sapien
tggcacaaaaatgagaggtctgtta

SEQ ID NO: 4759875 - DNA, 25 bp, Homo sapien
tcttgtaacacagcatgtaacagtc

SEQ ID NO: 4759876 - DNA, 25 bp, Homo sapien
tcaggctccaaactgtcaatcatgg

SEQ ID NO: 4759877 - DNA, 25 bp, Homo sapien
ttggccttgccaacttagtgactta

SEQ ID NO: 4759878 - DNA, 25 bp, Homo sapien
tggccttgccaacttagtgacttac

SEQ ID NO: 4759879 - DNA, 25 bp, Homo sapien
tttggccttgccaacttagtgactt

SEQ ID NO: 4759880 - DNA, 25 bp, Homo sapien
gcttgattctccgaggatgagtgtc

SEQ ID NO: 4759881 - DNA, 25 bp, Homo sapien
tatcatcagagagaatagatccttc

SEQ ID NO: 4759882 - DNA, 25 bp, Homo sapien
catggccagtgtactcaaaagaatc

SEQ ID NO: 4759883 - DNA, 25 bp, Homo sapien
gatgagtgtcattaagatccagaga

SEQ ID NO: 4759884 - DNA, 25 bp, Homo sapien
cgccctcttcaaaggggatgtccat

SEQ ID NO: 4759885 - DNA, 25 bp, Homo sapien
acgccctcttcaaaggggatgtcca

SEQ ID NO: 4759886 - DNA, 25 bp, Homo sapien
tgggactcagcacgccctcttcaaa

SEQ ID NO: 4759887 - DNA, 25 bp, Homo sapien
taagaagctgaccactgttcacgat

SEQ ID NO: 4759888 - DNA, 25 bp, Homo sapien
tggacctttgttcagtaagacccca

SEQ ID NO: 4759889 - DNA, 25 bp, Homo sapien
tgctgagcccacaaccatctgtatt

SEQ ID NO: 4759890 - DNA, 25 bp, Homo sapien
tcttgtttctaatcagtgctgagcc

SEQ ID NO: 4759891 - DNA, 25 bp, Homo sapien
cacttaaaacatagtacaggagcag

SEQ ID NO: 4759892 - DNA, 25 bp, Homo sapien
acttaaaacatagtacaggagcagt

SEQ ID NO: 4759893 - DNA, 25 bp, Homo sapien
ttggagactaaaaaacacacgtgta

SEQ ID NO: 4759894 - DNA, 25 bp, Homo sapien
tgatcctgaataccaccaaatggag

SEQ ID NO: 4759895 - DNA, 25 bp, Homo sapien
aatgaagcccacgtatattcgtaga

SEQ ID NO: 4759896 - DNA, 25 bp, Homo sapien
tcaacgtatctgaatctggagggat

SEQ ID NO: 4759897 - DNA, 25 bp, Homo sapien
tgatggatgcatggagaattctacc

SEQ ID NO: 4759898 - DNA, 25 bp, Homo sapien
gtttacagttcacaaccaggatggc

SEQ ID NO: 4759899 - DNA, 25 bp, Homo sapien
catgaaaatttgaggaacgctgagc

SEQ ID NO: 4759900 - DNA, 25 bp, Homo sapien
gaattctacctcttgcctgcaggct

SEQ ID NO: 4759901 - DNA, 25 bp, Homo sapien
tgaaagaatgaggttcttccgaagg

SEQ ID NO: 4759902 - DNA, 25 bp, Homo sapien
ctgggagtgaatttgaaagaatgag

SEQ ID NO: 4759903 - DNA, 25 bp, Homo sapien
cactctctggtgtggcacatattgt

SEQ ID NO: 4759904 - DNA, 25 bp, Homo sapien
taatattaggagcaactgggagtga

SEQ ID NO: 4759905 - DNA, 25 bp, Homo sapien
ctgcaggacgcccaagtgagcagca

SEQ ID NO: 4759906 - DNA, 25 bp, Homo sapien
ctgggccaaccaaagctgtgcttca

SEQ ID NO: 4759907 - DNA, 25 bp, Homo sapien
ttaccccaggattctgatctgtgaa

SEQ ID NO: 4759908 - DNA, 25 bp, Homo sapien
gataggaagggttctcccattcctc

SEQ ID NO: 4759909 - DNA, 25 bp, Homo sapien
ccaaccaaagctgtgcttcagggaa

SEQ ID NO: 4759910 - DNA, 25 bp, Homo sapien
tatcttttcattcccacacagtcgc

SEQ ID NO: 4759911 - DNA, 25 bp, Homo sapien
tttcctctagcattaaattccttta

SEQ ID NO: 4759912 - DNA, 25 bp, Homo sapien
tgcctgtggttgaaaattgagtcac

SEQ ID NO: 4759913 - DNA, 25 bp, Homo sapien
cacacagtcgctgcctgtggttgaa

SEQ ID NO: 4759914 - DNA, 25 bp, Homo sapien
ctggaatccattccccgaggtcagc

SEQ ID NO: 4759915 - DNA, 25 bp, Homo sapien
gcaagatccgggcaaattcctggaa

SEQ ID NO: 4759916 - DNA, 25 bp, Homo sapien
ttgcactcgagtgttccaaaccatc

SEQ ID NO: 4759917 - DNA, 25 bp, Homo sapien
acaccccacgaggatttgcactcga

SEQ ID NO: 4759918 - DNA, 25 bp, Homo sapien
tcatatctttatgccagcgtttgcc

SEQ ID NO: 4759919 - DNA, 25 bp, Homo sapien
tattctctggggattggccgggctt

SEQ ID NO: 4759920 - DNA, 25 bp, Homo sapien
gccaaaaggctctatgccaattaag

SEQ ID NO: 4759921 - DNA, 25 bp, Homo sapien
agcatcatatattatattctctggg

SEQ ID NO: 4759922 - DNA, 25 bp, Homo sapien
gatatgtgggcctctacggacagct

SEQ ID NO: 4759923 - DNA, 25 bp, Homo sapien
ggatagggaacactgccttgccaat

SEQ ID NO: 4759924 - DNA, 25 bp, Homo sapien
tgcacttgaatcttggctctgacct

SEQ ID NO: 4759925 - DNA, 25 bp, Homo sapien
gaagcacaggtctgagacataaccc

SEQ ID NO: 4759926 - DNA, 25 bp, Homo sapien
aacaaacatttgagtcctagagcca

SEQ ID NO: 4759927 - DNA, 25 bp, Homo sapien
cattccggtaggagttcaacaaaca

SEQ ID NO: 4759928 - DNA, 25 bp, Homo sapien
ccattcattccggtaggagttcaac

SEQ ID NO: 4759929 - DNA, 25 bp, Homo sapien
ccatatggaaagtgttagcctcggg

SEQ ID NO: 4759930 - DNA, 25 bp, Homo sapien
cacgaatttcagagatagcagcagt

SEQ ID NO: 4759931 - DNA, 25 bp, Homo sapien
tagagtagagcaatctagaagcctc

SEQ ID NO: 4759932 - DNA, 25 bp, Homo sapien
gacatgagagtcctacacgaatttc

SEQ ID NO: 4759933 - DNA, 25 bp, Homo sapien
gcctgaccagaggaaaacgtcacca

SEQ ID NO: 4759934 - DNA, 25 bp, Homo sapien
cagagccccaccgttgtgtaatctc

SEQ ID NO: 4759935 - DNA, 25 bp, Homo sapien
caccgttgtgtaatctcttatggaa

SEQ ID NO: 4759936 - DNA, 25 bp, Homo sapien
gccccaccgttgtgtaatctcttat

SEQ ID NO: 4759937 - DNA, 25 bp, Homo sapien
acccagagccccaccgttgtgtaat

SEQ ID NO: 4759938 - DNA, 25 bp, Homo sapien
caagcttttctaggatgagtggata

SEQ ID NO: 4759939 - DNA, 25 bp, Homo sapien
gacagcataacgaccacaagctttt

SEQ ID NO: 4759940 - DNA, 25 bp, Homo sapien
gggacagcataacgaccacaagctt

SEQ ID NO: 4759941 - DNA, 25 bp, Homo sapien
gtggatacggaataaaatgcagctg

SEQ ID NO: 4759942 - DNA, 25 bp, Homo sapien
tgagaaggatgcacgactacagctc

SEQ ID NO: 4759943 - DNA, 25 bp, Homo sapien
ctctcttctgagcagttaactggaa

SEQ ID NO: 4759944 - DNA, 25 bp, Homo sapien
taactggaaatacagattcgcctcc

SEQ ID NO: 4759945 - DNA, 25 bp, Homo sapien
ctttctaacggagggtgagaaggat

SEQ ID NO: 4759946 - DNA, 25 bp, Homo sapien
ttgcttcgtcagctctactctccta

SEQ ID NO: 4759947 - DNA, 25 bp, Homo sapien
ccctcaccctccgacttccactagg

SEQ ID NO: 4759948 - DNA, 25 bp, Homo sapien
ctccctcaccctccgacttccacta

SEQ ID NO: 4759949 - DNA, 25 bp, Homo sapien
ctcaccctccgacttccactaggtt

SEQ ID NO: 4759950 - DNA, 25 bp, Homo sapien
gaaaatattctcatgggctccttaa

SEQ ID NO: 4759951 - DNA, 25 bp, Homo sapien
cataagccccttctgtcattaaaac

SEQ ID NO: 4759952 - DNA, 25 bp, Homo sapien
tgactttcataagccccttgaggag

SEQ ID NO: 4759953 - DNA, 25 bp, Homo sapien
cagttcactcagctagcttcttacc

SEQ ID NO: 4759954 - DNA, 25 bp, Homo sapien
tgatggatcaccaacctcactatgg

SEQ ID NO: 4759955 - DNA, 25 bp, Homo sapien
cacccaagccgagttcagagaacgg

SEQ ID NO: 4759956 - DNA, 25 bp, Homo sapien
gaagcttgctaactgagttccctgc

SEQ ID NO: 4759957 - DNA, 25 bp, Homo sapien
tgcaacgtaactgcatccgggccag

SEQ ID NO: 4759958 - DNA, 25 bp, Homo sapien
ccacctgctggtaaatcagaattat

SEQ ID NO: 4759959 - DNA, 25 bp, Homo sapien
catttggtggtcctatgtctccacc

SEQ ID NO: 4759960 - DNA, 25 bp, Homo sapien
ctacttcccagtcaacgtttgatgg

SEQ ID NO: 4759961 - DNA, 25 bp, Homo sapien
gacaaaatgttggagcctgctccta

SEQ ID NO: 4759962 - DNA, 25 bp, Homo sapien
ggagggtcaccaccatacaggaagt

SEQ ID NO: 4759963 - DNA, 25 bp, Homo sapien
tattcaaaatcaccccacgaggctt

SEQ ID NO: 4759964 - DNA, 25 bp, Homo sapien
cagggtcttcacgaatatgcagcac

SEQ ID NO: 4759965 - DNA, 25 bp, Homo sapien
atcaactggcgtttccggatggcct

SEQ ID NO: 4759966 - DNA, 25 bp, Homo sapien
gacaagtgtctgaggctagcaaagc

SEQ ID NO: 4759967 - DNA, 25 bp, Homo sapien
gaaactgtggtcaaaggcagcttcg

SEQ ID NO: 4759968 - DNA, 25 bp, Homo sapien
gacctgaggcatcgctgaaactgtg

SEQ ID NO: 4759969 - DNA, 25 bp, Homo sapien
ggcagcttcgcttatatccagacaa

SEQ ID NO: 4759970 - DNA, 25 bp, Homo sapien
tctgcattggatgggacaaactccc

SEQ ID NO: 4759971 - DNA, 25 bp, Homo sapien
gatagccaattggaggcagcacagt

SEQ ID NO: 4759972 - DNA, 25 bp, Homo sapien
tgaacctttatgagaggcgggctga

SEQ ID NO: 4759973 - DNA, 25 bp, Homo sapien
gcacagttgcgttttcagaatcgag

SEQ ID NO: 4759974 - DNA, 25 bp, Homo sapien
tggattccacttcaggtcccatgca

SEQ ID NO: 4759975 - DNA, 25 bp, Homo sapien
gaattgctgtcatgttcgcagtgcg

SEQ ID NO: 4759976 - DNA, 25 bp, Homo sapien
tcgcagtgcgtcaggatatcaggat

SEQ ID NO: 4759977 - DNA, 25 bp, Homo sapien
gctgtcggaagcctgagaattgctg

SEQ ID NO: 4759978 - DNA, 25 bp, Homo sapien
ctatccacaagtcaggcgcggcaga

SEQ ID NO: 4759979 - DNA, 25 bp, Homo sapien
ccacaagtcaggcgcggcagaggcc

SEQ ID NO: 4759980 - DNA, 25 bp, Homo sapien
atccacaagtcaggcgcggcagagg

SEQ ID NO: 4759981 - DNA, 25 bp, Homo sapien
cccaccctcttgaaagttgccatgt

SEQ ID NO: 4759982 - DNA, 25 bp, Homo sapien
ctggcacaaaggtacctcgggagtc

SEQ ID NO: 4759983 - DNA, 25 bp, Homo sapien
gtagagccatcccattcagagcctg

SEQ ID NO: 4759984 - DNA, 25 bp, Homo sapien
gagcctggcttcattatcagttggg

SEQ ID NO: 4759985 - DNA, 25 bp, Homo sapien
gcttcattatcagttgggtgggaga

SEQ ID NO: 4759986 - DNA, 25 bp, Homo sapien
tggcaatgcttgaatttgtcatctc

SEQ ID NO: 4759987 - DNA, 25 bp, Homo sapien
tgtggcaatgcttgaatttgtcatc

SEQ ID NO: 4759988 - DNA, 25 bp, Homo sapien
gcaatgcttgaatttgtcatctcac

SEQ ID NO: 4759989 - DNA, 25 bp, Homo sapien
ctgtggcaatgcttgaatttgtcat

SEQ ID NO: 4759990 - DNA, 25 bp, Homo sapien
cctgtttgcacatcacgggagtcta

SEQ ID NO: 4759991 - DNA, 25 bp, Homo sapien
gattcatcctcagcaacgtggcagt

SEQ ID NO: 4759992 - DNA, 25 bp, Homo sapien
gattctcaagcctagtcgccaagga

SEQ ID NO: 4759993 - DNA, 25 bp, Homo sapien
tcaaaatttccagacgaaccggctc

SEQ ID NO: 4759994 - DNA, 25 bp, Homo sapien
tgttccacaagtcgagactgtcagg

SEQ ID NO: 4759995 - DNA, 25 bp, Homo sapien
catatctgagatcgttgcagtggac

SEQ ID NO: 4759996 - DNA, 25 bp, Homo sapien
cattgtacagttgcatcatgctggg

SEQ ID NO: 4759997 - DNA, 25 bp, Homo sapien
gggagctcccaatctacctgatttg

SEQ ID NO: 4759998 - DNA, 25 bp, Homo sapien
gttatctgtatgaggtgaagcccac

SEQ ID NO: 4759999 - DNA, 25 bp, Homo sapien
ccaggttgtgagtggtatttatttc

SEQ ID NO: 4760000 - DNA, 25 bp, Homo sapien
catccaggttgtgagtggtatttat

SEQ ID NO: 4760001 - DNA, 25 bp, Homo sapien
gaactgttatctgtatgaggtgaag

SEQ ID NO: 4760002 - DNA, 25 bp, Homo sapien
tccttgacaacgagaaccacctgat

SEQ ID NO: 4760003 - DNA, 25 bp, Homo sapien
cattcgggtccctaacagaaggtgt

SEQ ID NO: 4760004 - DNA, 25 bp, Homo sapien
gctcctaatggtagccagtccgctg

SEQ ID NO: 4760005 - DNA, 25 bp, Homo sapien
gctgtctgggctaacaaggtctaca

SEQ ID NO: 4760006 - DNA, 25 bp, Homo sapien
tctgacagatagctggagaacagga

SEQ ID NO: 4760007 - DNA, 25 bp, Homo sapien
tttctgagtacacagcaatctgtcg

SEQ ID NO: 4760008 - DNA, 25 bp, Homo sapien
agcaatctgtcgtctcggctgctgc

SEQ ID NO: 4760009 - DNA, 25 bp, Homo sapien
gagaacaggatgaggacatcaaaac

SEQ ID NO: 4760010 - DNA, 25 bp, Homo sapien
cttcaaaaagccatcatacccgtac

SEQ ID NO: 4760011 - DNA, 25 bp, Homo sapien
atacccgtactctgtaattctgctg

SEQ ID NO: 4760012 - DNA, 25 bp, Homo sapien
taattctgctgagttgaatctcaag

SEQ ID NO: 4760013 - DNA, 25 bp, Homo sapien
gttgaatctcaaggtctgtgaggct

SEQ ID NO: 4760014 - DNA, 25 bp, Homo sapien
tagtaaagacctacgagtcagccaa

SEQ ID NO: 4760015 - DNA, 25 bp, Homo sapien
gaggttaaccctcgctgtgacactc

SEQ ID NO: 4760016 - DNA, 25 bp, Homo sapien
gagctcatgccaaggtagtaaagac

SEQ ID NO: 4760017 - DNA, 25 bp, Homo sapien
tagctgggtgactcaaatcagttac

SEQ ID NO: 4760018 - DNA, 25 bp, Homo sapien
cagctcacagctcgtatgtgggaca

SEQ ID NO: 4760019 - DNA, 25 bp, Homo sapien
cgaacattaccatgctttgtgagca

SEQ ID NO: 4760020 - DNA, 25 bp, Homo sapien
gttaagtaactgatgccacccagct

SEQ ID NO: 4760021 - DNA, 25 bp, Homo sapien
taaactttaagatgcccctgtgaga

SEQ ID NO: 4760022 - DNA, 25 bp, Homo sapien
ttgcatggggagcacaatatggctc

SEQ ID NO: 4760023 - DNA, 25 bp, Homo sapien
tttggctcaatgaaagtgtcagtac

SEQ ID NO: 4760024 - DNA, 25 bp, Homo sapien
ggctcttgtcagaggtgcttcatca

SEQ ID NO: 4760025 - DNA, 25 bp, Homo sapien
tcagtacagtttgggattcgttctt

SEQ ID NO: 4760026 - DNA, 25 bp, Homo sapien
aaaaaggccttgagctttgtctgca

SEQ ID NO: 4760027 - DNA, 25 bp, Homo sapien
taagggaccctgatacgtgcattta

SEQ ID NO: 4760028 - DNA, 25 bp, Homo sapien
tgcttatagtaaaggagtcaaacct

SEQ ID NO: 4760029 - DNA, 25 bp, Homo sapien
cctttacagtgtgaacaaactcatg

SEQ ID NO: 4760030 - DNA, 25 bp, Homo sapien
tcaaacaaaggttgatattatcata

SEQ ID NO: 4760031 - DNA, 25 bp, Homo sapien
caaacaaaggttgatattatcatat

SEQ ID NO: 4760032 - DNA, 25 bp, Homo sapien
tgatattatcatatgcaaagaatca

SEQ ID NO: 4760033 - DNA, 25 bp, Homo sapien
catcaaacaaaggttgatattatca

SEQ ID NO: 4760034 - DNA, 25 bp, Homo sapien
cttcaatctttgtccctgggaggca

SEQ ID NO: 4760035 - DNA, 25 bp, Homo sapien
gatttgtgggaacaagctcgtcttc

SEQ ID NO: 4760036 - DNA, 25 bp, Homo sapien
cacatggcaggatagaaagctcaac

SEQ ID NO: 4760037 - DNA, 25 bp, Homo sapien
ttagcagggcaccatacaaggctcc

SEQ ID NO: 4760038 - DNA, 25 bp, Homo sapien
tcagtgtatgctcagagacatcatg

SEQ ID NO: 4760039 - DNA, 25 bp, Homo sapien
tctgagtaaccaactctaggtaacc

SEQ ID NO: 4760040 - DNA, 25 bp, Homo sapien
tcttcttctgagtaaccaactctag

SEQ ID NO: 4760041 - DNA, 25 bp, Homo sapien
tatgctcagagacatcatggctttc

SEQ ID NO: 4760042 - DNA, 25 bp, Homo sapien
ctcgtatattccactattcttatcc

SEQ ID NO: 4760043 - DNA, 25 bp, Homo sapien
cgtatattccactattcttatccca

SEQ ID NO: 4760044 - DNA, 25 bp, Homo sapien
tcgtatattccactattcttatccc

SEQ ID NO: 4760045 - DNA, 25 bp, Homo sapien
aatctcatggacaaatatatagtag

SEQ ID NO: 4760046 - DNA, 25 bp, Homo sapien
tctcatggacaaatatatagtagat

SEQ ID NO: 4760047 - DNA, 25 bp, Homo sapien
catggacaaatatatagtagatgta

SEQ ID NO: 4760048 - DNA, 25 bp, Homo sapien
ctcatggacaaatatatagtagatg

SEQ ID NO: 4760049 - DNA, 25 bp, Homo sapien
tgaaaagtgacagcctcaagctctc

SEQ ID NO: 4760050 - DNA, 25 bp, Homo sapien
ctctgtcattaagtagtgatgtggc

SEQ ID NO: 4760051 - DNA, 25 bp, Homo sapien
gatgtggctcgatgtgaaaagtgac

SEQ ID NO: 4760052 - DNA, 25 bp, Homo sapien
gcctcaagctctcggtttagagcca

SEQ ID NO: 4760053 - DNA, 25 bp, Homo sapien
ggaaaattatctgcagtacttatga

SEQ ID NO: 4760054 - DNA, 25 bp, Homo sapien
agatgttgagaagggaggattacct

SEQ ID NO: 4760055 - DNA, 25 bp, Homo sapien
tgttaacatatcataaagccaaaag

SEQ ID NO: 4760056 - DNA, 25 bp, Homo sapien
cttatgataaacaaatattaatcct

SEQ ID NO: 4760057 - DNA, 25 bp, Homo sapien
tatggaggcggaggtccctacatac

SEQ ID NO: 4760058 - DNA, 25 bp, Homo sapien
gaccacatgagattgagctccagag

SEQ ID NO: 4760059 - DNA, 25 bp, Homo sapien
cagtcctagctcttgtatggaggcg

SEQ ID NO: 4760060 - DNA, 25 bp, Homo sapien
aactctccacgtttctttttacatg

SEQ ID NO: 4760061 - DNA, 25 bp, Homo sapien
tggtgtacttgcccagttctaccaa

SEQ ID NO: 4760062 - DNA, 25 bp, Homo sapien
ggtgtacttgcccagttctaccaat

SEQ ID NO: 4760063 - DNA, 25 bp, Homo sapien
tcgtaataccacttcaaacacaagc

SEQ ID NO: 4760064 - DNA, 25 bp, Homo sapien
taataccacttcaaacacaagctgg

SEQ ID NO: 4760065 - DNA, 25 bp, Homo sapien
cagaagttgggaagcccaaccaagt

SEQ ID NO: 4760066 - DNA, 25 bp, Homo sapien
agttgggaagcccaaccaagtcact

SEQ ID NO: 4760067 - DNA, 25 bp, Homo sapien
gaagttgggaagcccaaccaagtca

SEQ ID NO: 4760068 - DNA, 25 bp, Homo sapien
taacagaagttgggaagcccaacca

SEQ ID NO: 4760069 - DNA, 25 bp, Homo sapien
tgtaatgggaacactaatatctact

SEQ ID NO: 4760070 - DNA, 25 bp, Homo sapien
cctttgagtagtgaaaagattgtag

SEQ ID NO: 4760071 - DNA, 25 bp, Homo sapien
tctactacacagatgagttatgaga

SEQ ID NO: 4760072 - DNA, 25 bp, Homo sapien
gggagctttagcacctttgagtagt

SEQ ID NO: 4760073 - DNA, 25 bp, Homo sapien
catcagggtagcttcctcttgggcc

SEQ ID NO: 4760074 - DNA, 25 bp, Homo sapien
gattctcggcactcctaaactgttc

SEQ ID NO: 4760075 - DNA, 25 bp, Homo sapien
tcctcttgggttgggttcccacatc

SEQ ID NO: 4760076 - DNA, 25 bp, Homo sapien
ctttcttccactcagcggagattct

SEQ ID NO: 4760077 - DNA, 25 bp, Homo sapien
caaagtccctgaggcaaaagcatgc

SEQ ID NO: 4760078 - DNA, 25 bp, Homo sapien
gaaaatcgaagtaagcaggagcact

SEQ ID NO: 4760079 - DNA, 25 bp, Homo sapien
tgtaaaatgctatcccaggcacaga

SEQ ID NO: 4760080 - DNA, 25 bp, Homo sapien
taactatgcaggtatctagggaaac

SEQ ID NO: 4760081 - DNA, 25 bp, Homo sapien
ggacaaagatctgtaaatttacagt

SEQ ID NO: 4760082 - DNA, 25 bp, Homo sapien
taatccaacctgtgagattaaggct

SEQ ID NO: 4760083 - DNA, 25 bp, Homo sapien
actgaaaaatagcagtgagttccac

SEQ ID NO: 4760084 - DNA, 25 bp, Homo sapien
agtgagttccacataatccaacctg

SEQ ID NO: 4760085 - DNA, 25 bp, Homo sapien
gttgagagaccatttagtctggcca

SEQ ID NO: 4760086 - DNA, 25 bp, Homo sapien
tagtctggccacctgtatccaagat

SEQ ID NO: 4760087 - DNA, 25 bp, Homo sapien
gaccatttagtctggccacctgtat

SEQ ID NO: 4760088 - DNA, 25 bp, Homo sapien
cactcccccaacaattgagaattga

SEQ ID NO: 4760089 - DNA, 25 bp, Homo sapien
ccatcgtatcgggagatgcccaggt

SEQ ID NO: 4760090 - DNA, 25 bp, Homo sapien
tgagaaccaatgaggagccagctcc

SEQ ID NO: 4760091 - DNA, 25 bp, Homo sapien
catggtctatgaaggcagccgctaa

SEQ ID NO: 4760092 - DNA, 25 bp, Homo sapien
caggctacgctgcaacctagggtgt

SEQ ID NO: 4760093 - DNA, 25 bp, Homo sapien
cctgggagaaatgcccggccgccat

SEQ ID NO: 4760094 - DNA, 25 bp, Homo sapien
tccgtccctccatatttgtcctcca

SEQ ID NO: 4760095 - DNA, 25 bp, Homo sapien
cctccatatttgtcctccactttca

SEQ ID NO: 4760096 - DNA, 25 bp, Homo sapien
ccactttcacagatccctgggagaa

SEQ ID NO: 4760097 - DNA, 25 bp, Homo sapien
gtctccatagccaaagacactgctt

SEQ ID NO: 4760098 - DNA, 25 bp, Homo sapien
aaattgcacacatcgcacatgctca

SEQ ID NO: 4760099 - DNA, 25 bp, Homo sapien
catgctcatccctttgtctccatag

SEQ ID NO: 4760100 - DNA, 25 bp, Homo sapien
agacactgctttgctccagtcctgc

SEQ ID NO: 4760101 - DNA, 25 bp, Homo sapien
ggcctccacgatgctttcatggtca

SEQ ID NO: 4760102 - DNA, 25 bp, Homo sapien
tgttaatagcaatggcctccacgat

SEQ ID NO: 4760103 - DNA, 25 bp, Homo sapien
ggtcactagacagtcctctccaatc

SEQ ID NO: 4760104 - DNA, 25 bp, Homo sapien
cacgatgctttcatggtcactagac

SEQ ID NO: 4760105 - DNA, 25 bp, Homo sapien
gacgatgggcttcatatccactgac

SEQ ID NO: 4760106 - DNA, 25 bp, Homo sapien
ctgtgacgatgggcttcatatccac

SEQ ID NO: 4760107 - DNA, 25 bp, Homo sapien
tgacgatgggcttcatatccactga

SEQ ID NO: 4760108 - DNA, 25 bp, Homo sapien
tgtgacgatgggcttcatatccact

SEQ ID NO: 4760109 - DNA, 25 bp, Homo sapien
gccttatggtttcttgtacacgagc

SEQ ID NO: 4760110 - DNA, 25 bp, Homo sapien
tcgacacactttgttgtcaagtgat

SEQ ID NO: 4760111 - DNA, 25 bp, Homo sapien
tcatgctgacatcgacacactttgt

SEQ ID NO: 4760112 - DNA, 25 bp, Homo sapien
ttggttcacacaaccaaaatgtttc

SEQ ID NO: 4760113 - DNA, 25 bp, Homo sapien
acacactttgttgtcaagtgatttt

SEQ ID NO: 4760114 - DNA, 25 bp, Homo sapien
cctgtttccaccactaggcgacacc

SEQ ID NO: 4760115 - DNA, 25 bp, Homo sapien
accactaggcgacaccactgacctg

SEQ ID NO: 4760116 - DNA, 25 bp, Homo sapien
aataatccactcttctccaacaggc

SEQ ID NO: 4760117 - DNA, 25 bp, Homo sapien
ataatccactcttctccaacaggct

SEQ ID NO: 4760118 - DNA, 25 bp, Homo sapien
tcaggtccccaaatcagcaaaataa

SEQ ID NO: 4760119 - DNA, 25 bp, Homo sapien
aggtccccaaatcagcaaaataact

SEQ ID NO: 4760120 - DNA, 25 bp, Homo sapien
caggtccccaaatcagcaaaataac

SEQ ID NO: 4760121 - DNA, 25 bp, Homo sapien
taagagttatcatgatgcaccttgg

SEQ ID NO: 4760122 - DNA, 25 bp, Homo sapien
gaccatgctttggaggatgagcaag

SEQ ID NO: 4760123 - DNA, 25 bp, Homo sapien
ccttggttgaccatgctttggagga

SEQ ID NO: 4760124 - DNA, 25 bp, Homo sapien
caagattcggaaagtcataggaact

SEQ ID NO: 4760125 - DNA, 25 bp, Homo sapien
ttaggaaggaattccaaacaaggca

SEQ ID NO: 4760126 - DNA, 25 bp, Homo sapien
gaaggaattccaaacaaggcattta

SEQ ID NO: 4760127 - DNA, 25 bp, Homo sapien
aggaaggaattccaaacaaggcatt

SEQ ID NO: 4760128 - DNA, 25 bp, Homo sapien
taggaaggaattccaaacaaggcat

SEQ ID NO: 4760129 - DNA, 25 bp, Homo sapien
caaaagtagcattcgctctgagcca

SEQ ID NO: 4760130 - DNA, 25 bp, Homo sapien
tctatgaacaatacagggtggtaca

SEQ ID NO: 4760131 - DNA, 25 bp, Homo sapien
taagagctaagtgcccaaccaaatg

SEQ ID NO: 4760132 - DNA, 25 bp, Homo sapien
gctcagactgcaattgtgggaaatc

SEQ ID NO: 4760133 - DNA, 25 bp, Homo sapien
tcacagtactaatggccacttttat

SEQ ID NO: 4760134 - DNA, 25 bp, Homo sapien
ctcaaggttcatgctcacagtacta

SEQ ID NO: 4760135 - DNA, 25 bp, Homo sapien
ggttcatgctcacagtactaatggc

SEQ ID NO: 4760136 - DNA, 25 bp, Homo sapien
gatctttcaacattgtctgttcaat

SEQ ID NO: 4760137 - DNA, 25 bp, Homo sapien
tgaactgggtctcctgtaggacgtt

SEQ ID NO: 4760138 - DNA, 25 bp, Homo sapien
ctcttggaggcaagttaggaaattt

SEQ ID NO: 4760139 - DNA, 25 bp, Homo sapien
ggtctcctgtaggacgttgatgatg

SEQ ID NO: 4760140 - DNA, 25 bp, Homo sapien
ctctcttggaggcaagttaggaaat

SEQ ID NO: 4760141 - DNA, 25 bp, Homo sapien
ggtcatccacttgaaaagaatgcta

SEQ ID NO: 4760142 - DNA, 25 bp, Homo sapien
gtcatccacttgaaaagaatgctac

SEQ ID NO: 4760143 - DNA, 25 bp, Homo sapien
ccaaaatctagggttcagaggagtc

SEQ ID NO: 4760144 - DNA, 25 bp, Homo sapien
tagatagcgggaccatgaagggcct

SEQ ID NO: 4760145 - DNA, 25 bp, Homo sapien
taactagggacttaaggcaaagaca

SEQ ID NO: 4760146 - DNA, 25 bp, Homo sapien
gacaagagggaggtcatgatccaga

SEQ ID NO: 4760147 - DNA, 25 bp, Homo sapien
tctgatgaagcttcccgtggtcttt

SEQ ID NO: 4760148 - DNA, 25 bp, Homo sapien
cttcccgtggtctttaaagagattg

SEQ ID NO: 4760149 - DNA, 25 bp, Homo sapien
atgaagcttcccgtggtctttaaag

SEQ ID NO: 4760150 - DNA, 25 bp, Homo sapien
gttaacccaagaatggatcgcattc

SEQ ID NO: 4760151 - DNA, 25 bp, Homo sapien
ccggattaatgactttgacaactgc

SEQ ID NO: 4760152 - DNA, 25 bp, Homo sapien
gcatcgctctgctcaaccggattaa

SEQ ID NO: 4760153 - DNA, 25 bp, Homo sapien
gccagttgctcggtgatgagctcag

SEQ ID NO: 4760154 - DNA, 25 bp, Homo sapien
gactctcggaactcaacgttggcat

SEQ ID NO: 4760155 - DNA, 25 bp, Homo sapien
tcggtgaagtagttgaattcagttc

SEQ ID NO: 4760156 - DNA, 25 bp, Homo sapien
tgccaacaagtgttatcgataactt

SEQ ID NO: 4760157 - DNA, 25 bp, Homo sapien
tagctcttctaaaataaacctcgtc

SEQ ID NO: 4760158 - DNA, 25 bp, Homo sapien
tcatcatttagctgatgcaggttaa

SEQ ID NO: 4760159 - DNA, 25 bp, Homo sapien
gatttaggcccaataaccacatgga

SEQ ID NO: 4760160 - DNA, 25 bp, Homo sapien
gagaatccaagtcacacgatttagg

SEQ ID NO: 4760161 - DNA, 25 bp, Homo sapien
tctagaaagtaagcatatgtgaagg

SEQ ID NO: 4760162 - DNA, 25 bp, Homo sapien
gaccttctccaagcgtttgcttcga

SEQ ID NO: 4760163 - DNA, 25 bp, Homo sapien
gaactgtatctctgagtcgtaattt

SEQ ID NO: 4760164 - DNA, 25 bp, Homo sapien
ttcatatgaactgtatctctgagtc

SEQ ID NO: 4760165 - DNA, 25 bp, Homo sapien
tatgaactgtatctctgagtcgtaa

SEQ ID NO: 4760166 - DNA, 25 bp, Homo sapien
catatgaactgtatctctgagtcgt

SEQ ID NO: 4760167 - DNA, 25 bp, Homo sapien
tcccaaatcttataaggcagacagt

SEQ ID NO: 4760168 - DNA, 25 bp, Homo sapien
ggttctagtctaggtccagttctca

SEQ ID NO: 4760169 - DNA, 25 bp, Homo sapien
aatgtcagactgcttcccctgtgca

SEQ ID NO: 4760170 - DNA, 25 bp, Homo sapien
tagcagcactttttataggtcagag

SEQ ID NO: 4760171 - DNA, 25 bp, Homo sapien
gaatcccacagcacagtgcagtgag

SEQ ID NO: 4760172 - DNA, 25 bp, Homo sapien
cagggtggttcccagaatcccacag

SEQ ID NO: 4760173 - DNA, 25 bp, Homo sapien
agggtggttcccagaatcccacagc

SEQ ID NO: 4760174 - DNA, 25 bp, Homo sapien
ccagaatcccacagcacagtgcagt

SEQ ID NO: 4760175 - DNA, 25 bp, Homo sapien
taatgacttctcaacactatgagga

SEQ ID NO: 4760176 - DNA, 25 bp, Homo sapien
tctgccctgtattaatgccataatg

SEQ ID NO: 4760177 - DNA, 25 bp, Homo sapien
taggcttgatcattccctgacatag

SEQ ID NO: 4760178 - DNA, 25 bp, Homo sapien
gaggatctcagcgtccacacaagtg

SEQ ID NO: 4760179 - DNA, 25 bp, Homo sapien
gatttgtgtgccgattcattaccaa

SEQ ID NO: 4760180 - DNA, 25 bp, Homo sapien
catggggagtgtagcaagatttgtg

SEQ ID NO: 4760181 - DNA, 25 bp, Homo sapien
gcaagatttgtgtgccgattcatta

SEQ ID NO: 4760182 - DNA, 25 bp, Homo sapien
ttgtgtgccgattcattaccaagcc

SEQ ID NO: 4760183 - DNA, 25 bp, Homo sapien
tctcacaactcaggaaccctgtaag

SEQ ID NO: 4760184 - DNA, 25 bp, Homo sapien
gaaaaggtgctaaatgaagactgca

SEQ ID NO: 4760185 - DNA, 25 bp, Homo sapien
ctttccttgctgacatatctctttc

SEQ ID NO: 4760186 - DNA, 25 bp, Homo sapien
aaagcatgctacacgaactctcaca

SEQ ID NO: 4760187 - DNA, 25 bp, Homo sapien
tgtacaggtacactattgaactcta

SEQ ID NO: 4760188 - DNA, 25 bp, Homo sapien
cattatgacatgtgcattatgccca

SEQ ID NO: 4760189 - DNA, 25 bp, Homo sapien
gctattagtacatgcacatccagca

SEQ ID NO: 4760190 - DNA, 25 bp, Homo sapien
cttgacttctgagttgctaccacat

SEQ ID NO: 4760191 - DNA, 25 bp, Homo sapien
cgcgtcgccccttctgtagcctgct

SEQ ID NO: 4760192 - DNA, 25 bp, Homo sapien
gtcgccccttctgtagcctgctgct

SEQ ID NO: 4760193 - DNA, 25 bp, Homo sapien
gcgtcgccccttctgtagcctgctg

SEQ ID NO: 4760194 - DNA, 25 bp, Homo sapien
ctgctgctgtgcggcacagcttgcc

SEQ ID NO: 4760195 - DNA, 25 bp, Homo sapien
gagctaattagtcaggtcttctccc

SEQ ID NO: 4760196 - DNA, 25 bp, Homo sapien
gatctattgctttaatactcacgag

SEQ ID NO: 4760197 - DNA, 25 bp, Homo sapien
cagtcagctttttgttgtcataagg

SEQ ID NO: 4760198 - DNA, 25 bp, Homo sapien
tatgaacaagccaagacgcgctcga

SEQ ID NO: 4760199 - DNA, 25 bp, Homo sapien
aaagaagccttgtatatagtctcag

SEQ ID NO: 4760200 - DNA, 25 bp, Homo sapien
tctgccactgtacttcccgaggaaa

SEQ ID NO: 4760201 - DNA, 25 bp, Homo sapien
gctggtcccctcttcaatctttgtg

SEQ ID NO: 4760202 - DNA, 25 bp, Homo sapien
ttaataattcagctacactctgcca

SEQ ID NO: 4760203 - DNA, 25 bp, Homo sapien
gccagagagctctattgtgtgcctc

SEQ ID NO: 4760204 - DNA, 25 bp, Homo sapien
ccttttcaagggatcgctggtaaat

SEQ ID NO: 4760205 - DNA, 25 bp, Homo sapien
aacagcgcgtcttcctctcaagcat

SEQ ID NO: 4760206 - DNA, 25 bp, Homo sapien
gtaaatctcccaaacgaggcgccag

SEQ ID NO: 4760207 - DNA, 25 bp, Homo sapien
agagagaacatccttgcagcacaaa

SEQ ID NO: 4760208 - DNA, 25 bp, Homo sapien
cttgcagcacaaacccatgatgaaa

SEQ ID NO: 4760209 - DNA, 25 bp, Homo sapien
catgatgaaagcttttgtgaatttg

SEQ ID NO: 4760210 - DNA, 25 bp, Homo sapien
ctgcatatgaggcgaggagagagag

SEQ ID NO: 4760211 - DNA, 25 bp, Homo sapien
aatgttattctgcagggaaccaatt

SEQ ID NO: 4760212 - DNA, 25 bp, Homo sapien
taaatgttattctgcagggaaccaa

SEQ ID NO: 4760213 - DNA, 25 bp, Homo sapien
tgttattctgcagggaaccaattaa

SEQ ID NO: 4760214 - DNA, 25 bp, Homo sapien
ataaatgttattctgcagggaacca

SEQ ID NO: 4760215 - DNA, 25 bp, Homo sapien
aagcgattgccctcttggcttcatt

SEQ ID NO: 4760216 - DNA, 25 bp, Homo sapien
tctcatctagagtcaggtcgcttct

SEQ ID NO: 4760217 - DNA, 25 bp, Homo sapien
tatgaagaagcgattgccctcttgg

SEQ ID NO: 4760218 - DNA, 25 bp, Homo sapien
tcatttttctcatctagagtcaggt

SEQ ID NO: 4760219 - DNA, 25 bp, Homo sapien
agacgaggtttcactacatcggcca

SEQ ID NO: 4760220 - DNA, 25 bp, Homo sapien
gacgaggtttcactacatcggccag

SEQ ID NO: 4760221 - DNA, 25 bp, Homo sapien
tatagttcctaaggaagtggtgatt

SEQ ID NO: 4760222 - DNA, 25 bp, Homo sapien
tgcacaaagcacacttgggttatag

SEQ ID NO: 4760223 - DNA, 25 bp, Homo sapien
tggttgggcccagatgtaaccagtt

SEQ ID NO: 4760224 - DNA, 25 bp, Homo sapien
tggtgattaactgttccatccctgg

SEQ ID NO: 4760225 - DNA, 25 bp, Homo sapien
tggctttagcaatcatgttgccttt

SEQ ID NO: 4760226 - DNA, 25 bp, Homo sapien
tattggctttagcaatcatgttgcc

SEQ ID NO: 4760227 - DNA, 25 bp, Homo sapien
tcatctttgcgcatattggctttag

SEQ ID NO: 4760228 - DNA, 25 bp, Homo sapien
gcgcatattggctttagcaatcatg

SEQ ID NO: 4760229 - DNA, 25 bp, Homo sapien
tctgtttcaatgctaaaaatctgtg

SEQ ID NO: 4760230 - DNA, 25 bp, Homo sapien
ctgtttcaatgctaaaaatctgtga

SEQ ID NO: 4760231 - DNA, 25 bp, Homo sapien
catctgtttcaatgctaaaaatctg

SEQ ID NO: 4760232 - DNA, 25 bp, Homo sapien
aacatgacaaaagttcgagacgagc

SEQ ID NO: 4760233 - DNA, 25 bp, Homo sapien
tcacagggccacgaaaattgctttg

SEQ ID NO: 4760234 - DNA, 25 bp, Homo sapien
tcagccaagtggcaagcacatgatc

SEQ ID NO: 4760235 - DNA, 25 bp, Homo sapien
gactggagccaagagtaatgacact

SEQ ID NO: 4760236 - DNA, 25 bp, Homo sapien
taatgacacttcaggccacggtcca

SEQ ID NO: 4760237 - DNA, 25 bp, Homo sapien
ttagggaccgaagctggactgaagc

SEQ ID NO: 4760238 - DNA, 25 bp, Homo sapien
ggaccgaagctggactgaagcgacc

SEQ ID NO: 4760239 - DNA, 25 bp, Homo sapien
gctgatttagggaccgaagctggac

SEQ ID NO: 4760240 - DNA, 25 bp, Homo sapien
tggactgaagcgacccaacttcagc

SEQ ID NO: 4760241 - DNA, 25 bp, Homo sapien
cgtggcaaagttgtttcttcctcct

SEQ ID NO: 4760242 - DNA, 25 bp, Homo sapien
cagagttcctgagatttcttccagg

SEQ ID NO: 4760243 - DNA, 25 bp, Homo sapien
ggagacaacccgcacaccctgataa

SEQ ID NO: 4760244 - DNA, 25 bp, Homo sapien
gagacagattgccagctttaagagc
